United States Patent Application Publication US 2005/0244851 A1 - sequence listing, part 80

SEQ ID NO: 3114215 - DNA, 25 bp, Homo sapien
tgatcctgtgccctcggtgtgcacc

SEQ ID NO: 3114216 - DNA, 25 bp, Homo sapien
ggtgtgcaccgtctcgtggctctcg

SEQ ID NO: 3114217 - DNA, 25 bp, Homo sapien
tcttcagcgtgtgaagggcggtcag

SEQ ID NO: 3114218 - DNA, 25 bp, Homo sapien
tgggaggtgcccgatgacaggtctt

SEQ ID NO: 3114219 - DNA, 25 bp, Homo sapien
tgcacgctgaagacgcagaagagag

SEQ ID NO: 3114220 - DNA, 25 bp, Homo sapien
gggcggtcagggttaagcatcccca

SEQ ID NO: 3114221 - DNA, 25 bp, Homo sapien
tgcgctgagcagactacttcatttg

SEQ ID NO: 3114222 - DNA, 25 bp, Homo sapien
ctgggctggagtgaggcctgtgtct

SEQ ID NO: 3114223 - DNA, 25 bp, Homo sapien
tgcaggaccgggtgcgtcttgaaca

SEQ ID NO: 3114224 - DNA, 25 bp, Homo sapien
tgttgcgagcagtggtcagctctgc

SEQ ID NO: 3114225 - DNA, 25 bp, Homo sapien
ccctgtgaggccctgaggcctcttc

SEQ ID NO: 3114226 - DNA, 25 bp, Homo sapien
tgaggccctgaggcctcttcagcac

SEQ ID NO: 3114227 - DNA, 25 bp, Homo sapien
tgtgaggccctgaggcctcttcagc

SEQ ID NO: 3114228 - DNA, 25 bp, Homo sapien
cctgtgaggccctgaggcctcttca

SEQ ID NO: 3114229 - DNA, 25 bp, Homo sapien
tcccagcaacgctgtgaggaaggtg

SEQ ID NO: 3114230 - DNA, 25 bp, Homo sapien
ctgaactctagacgccctgcattgc

SEQ ID NO: 3114231 - DNA, 25 bp, Homo sapien
gcagcaaaaggcgttgaagtcctgt

SEQ ID NO: 3114232 - DNA, 25 bp, Homo sapien
ggtgctcccatgtcaagactggccg

SEQ ID NO: 3114233 - DNA, 25 bp, Homo sapien
tgagggcggcatcacggggacctgc

SEQ ID NO: 3114234 - DNA, 25 bp, Homo sapien
cggcatcacggggacctgcagtcat

SEQ ID NO: 3114235 - DNA, 25 bp, Homo sapien
tccaatcctgagggcggcatcacgg

SEQ ID NO: 3114236 - DNA, 25 bp, Homo sapien
ccaatcctgagggcggcatcacggg

SEQ ID NO: 3114237 - DNA, 25 bp, Homo sapien
aggtgtgctcgtggcgtgcagggcg

SEQ ID NO: 3114238 - DNA, 25 bp, Homo sapien
gcaggtaagtctgaaggcctttgca

SEQ ID NO: 3114239 - DNA, 25 bp, Homo sapien
ctttgccgcagccatcgttgaggga

SEQ ID NO: 3114240 - DNA, 25 bp, Homo sapien
ggacagctcatgagacaagcaggta

SEQ ID NO: 3114241 - DNA, 25 bp, Homo sapien
acgacacgggtcgtgccctggagat

SEQ ID NO: 3114242 - DNA, 25 bp, Homo sapien
tccctttggccaacgacggagttga

SEQ ID NO: 3114243 - DNA, 25 bp, Homo sapien
gttgaaggcgttccgagtccctgta

SEQ ID NO: 3114244 - DNA, 25 bp, Homo sapien
gttggaggcagtcctacgaccttca

SEQ ID NO: 3114245 - DNA, 25 bp, Homo sapien
agcctccgtgtggttgtcgtgggca

SEQ ID NO: 3114246 - DNA, 25 bp, Homo sapien
gggcagaattgtcacgagctcagga

SEQ ID NO: 3114247 - DNA, 25 bp, Homo sapien
ggcagctttccacgcgacgtgccct

SEQ ID NO: 3114248 - DNA, 25 bp, Homo sapien
aaccatggaaaaaccgcaggtcctg

SEQ ID NO: 3114249 - DNA, 25 bp, Homo sapien
ccatccgggttctcggtgctctgct

SEQ ID NO: 3114250 - DNA, 25 bp, Homo sapien
ggcgtcttcacgccatccgggttct

SEQ ID NO: 3114251 - DNA, 25 bp, Homo sapien
gcggtttcggtgtttggcgtcttca

SEQ ID NO: 3114252 - DNA, 25 bp, Homo sapien
tcttcacgccatccgggttctcggt

SEQ ID NO: 3114253 - DNA, 25 bp, Homo sapien
ctgaaggatggtggagggctgtggt

SEQ ID NO: 3114254 - DNA, 25 bp, Homo sapien
cgctgagtgcaaacgcggcactcct

SEQ ID NO: 3114255 - DNA, 25 bp, Homo sapien
gctgagtgcaaacgcggcactcctg

SEQ ID NO: 3114256 - DNA, 25 bp, Homo sapien
gtgcaaacgcggcactcctgcacat

SEQ ID NO: 3114257 - DNA, 25 bp, Homo sapien
aaacgcggcactcctgcacatgtcg

SEQ ID NO: 3114258 - DNA, 25 bp, Homo sapien
actccccagccgtgacctcagctcc

SEQ ID NO: 3114259 - DNA, 25 bp, Homo sapien
gccgtgacctcagctcccggcgccg

SEQ ID NO: 3114260 - DNA, 25 bp, Homo sapien
cccggcgccggccctccttgtgcag

SEQ ID NO: 3114261 - DNA, 25 bp, Homo sapien
ctgcactccccagccgtgacctcag

SEQ ID NO: 3114262 - DNA, 25 bp, Homo sapien
caggtctaggagcagaagccgctat

SEQ ID NO: 3114263 - DNA, 25 bp, Homo sapien
tcaggcctccttgttcacggtgaca

SEQ ID NO: 3114264 - DNA, 25 bp, Homo sapien
tgacctgtggtctggagcattgcag

SEQ ID NO: 3114265 - DNA, 25 bp, Homo sapien
tccgcatctgtagcacggtcaggcc

SEQ ID NO: 3114266 - DNA, 25 bp, Homo sapien
tctgctcgcacacattgacctggtc

SEQ ID NO: 3114267 - DNA, 25 bp, Homo sapien
tacaggtggactttggactcacaga

SEQ ID NO: 3114268 - DNA, 25 bp, Homo sapien
acctggtcatgttgtgtgggtgcca

SEQ ID NO: 3114269 - DNA, 25 bp, Homo sapien
catagataagaaaccatgggcccgg

SEQ ID NO: 3114270 - DNA, 25 bp, Homo sapien
gaaacgtgagcgaaacccaaggtga

SEQ ID NO: 3114271 - DNA, 25 bp, Homo sapien
tctcccgcatgtcctaagtgagggc

SEQ ID NO: 3114272 - DNA, 25 bp, Homo sapien
tgacctgctttatgtggcaaccctg

SEQ ID NO: 3114273 - DNA, 25 bp, Homo sapien
catcaggttctagatcggcctccgc

SEQ ID NO: 3114274 - DNA, 25 bp, Homo sapien
catgcgctgtagtctaatgtacggc

SEQ ID NO: 3114275 - DNA, 25 bp, Homo sapien
tagtctaatgtacggctaatgtttg

SEQ ID NO: 3114276 - DNA, 25 bp, Homo sapien
tacaggcatgcgctgtagtctaatg

SEQ ID NO: 3114277 - DNA, 25 bp, Homo sapien
cgctgtagtctaatgtacggctaat

SEQ ID NO: 3114278 - DNA, 25 bp, Homo sapien
tcacctacagtgacgtcgtgggcgc

SEQ ID NO: 3114279 - DNA, 25 bp, Homo sapien
cgtgggcgcggatgtgctggacgag

SEQ ID NO: 3114280 - DNA, 25 bp, Homo sapien
tgtgctggacgaggtggtgactgtg

SEQ ID NO: 3114281 - DNA, 25 bp, Homo sapien
gccaggtgtacgagacattgctcac

SEQ ID NO: 3114282 - DNA, 25 bp, Homo sapien
tgtgtgaccttctgggcgtacccag

SEQ ID NO: 3114283 - DNA, 25 bp, Homo sapien
aaccgtctgtgtgaccttctgggcg

SEQ ID NO: 3114284 - DNA, 25 bp, Homo sapien
gagagagcagcgcaaccgtctgtgt

SEQ ID NO: 3114285 - DNA, 25 bp, Homo sapien
gcgcaaccgtctgtgtgaccttctg

SEQ ID NO: 3114286 - DNA, 25 bp, Homo sapien
tgtggaaagcctcgcacagtggtgc

SEQ ID NO: 3114287 - DNA, 25 bp, Homo sapien
taagagcagtgcagtgaacctccct

SEQ ID NO: 3114288 - DNA, 25 bp, Homo sapien
gaggacacgttagtcatgagcacct

SEQ ID NO: 3114289 - DNA, 25 bp, Homo sapien
gaggctggcactagctgacagcttt

SEQ ID NO: 3114290 - DNA, 25 bp, Homo sapien
ctataaaatcatgtaccaagaagtt

SEQ ID NO: 3114291 - DNA, 25 bp, Homo sapien
taaaatcatgtaccaagaagttcct

SEQ ID NO: 3114292 - DNA, 25 bp, Homo sapien
ctgagcctgatgtgtgtaggggtga

SEQ ID NO: 3114293 - DNA, 25 bp, Homo sapien
aaatcatgtaccaagaagttcctgc

SEQ ID NO: 3114294 - DNA, 25 bp, Homo sapien
ggatgtgtgtgacgacctggccaca

SEQ ID NO: 3114295 - DNA, 25 bp, Homo sapien
caggaacatgggcaggccgagaact

SEQ ID NO: 3114296 - DNA, 25 bp, Homo sapien
tagcagacagctcttcacgggatgt

SEQ ID NO: 3114297 - DNA, 25 bp, Homo sapien
catctgtgaggcttgtgaggtcacc

SEQ ID NO: 3114298 - DNA, 25 bp, Homo sapien
tacgagatttaaatattttattcca

SEQ ID NO: 3114299 - DNA, 25 bp, Homo sapien
atcgccatgcctgcagctcacaaag

SEQ ID NO: 3114300 - DNA, 25 bp, Homo sapien
tgtggtcggcacacacgagactctg

SEQ ID NO: 3114301 - DNA, 25 bp, Homo sapien
ctgggtgtggaacaggcgcaccatc

SEQ ID NO: 3114302 - DNA, 25 bp, Homo sapien
tccttgaactgtcccgattggctgg

SEQ ID NO: 3114303 - DNA, 25 bp, Homo sapien
caaacccagatggttcttcggtgaa

SEQ ID NO: 3114304 - DNA, 25 bp, Homo sapien
cctaaagtggtgcttaagcgattct

SEQ ID NO: 3114305 - DNA, 25 bp, Homo sapien
ggacagttacagaacccaagtgtgt

SEQ ID NO: 3114306 - DNA, 25 bp, Homo sapien
gagaaaaacttgacccaatggacag

SEQ ID NO: 3114307 - DNA, 25 bp, Homo sapien
tcagctgaagtgaaggaagtcctgg

SEQ ID NO: 3114308 - DNA, 25 bp, Homo sapien
gaagtgaaggaagtcctggccctcc

SEQ ID NO: 3114309 - DNA, 25 bp, Homo sapien
tgcaagtgcagtgacctcaggttgt

SEQ ID NO: 3114310 - DNA, 25 bp, Homo sapien
ctggccctcctgcaagtgcagtgac

SEQ ID NO: 3114311 - DNA, 25 bp, Homo sapien
cagattcagctcagtccggtctcct

SEQ ID NO: 3114312 - DNA, 25 bp, Homo sapien
gagcagcagattcagctcagtccgg

SEQ ID NO: 3114313 - DNA, 25 bp, Homo sapien
aggagcagcagattcagctcagtcc

SEQ ID NO: 3114314 - DNA, 25 bp, Homo sapien
cagcagattcagctcagtccggtct

SEQ ID NO: 3114315 - DNA, 25 bp, Homo sapien
gcagccggcactgcttgtaccacag

SEQ ID NO: 3114316 - DNA, 25 bp, Homo sapien
cagccggcactgcttgtaccacagg

SEQ ID NO: 3114317 - DNA, 25 bp, Homo sapien
agcagccggcactgcttgtaccaca

SEQ ID NO: 3114318 - DNA, 25 bp, Homo sapien
agccggcactgcttgtaccacaggc

SEQ ID NO: 3114319 - DNA, 25 bp, Homo sapien
cataaggtggctgactctccctggg

SEQ ID NO: 3114320 - DNA, 25 bp, Homo sapien
aaccaacaaagtcgagcagccagag

SEQ ID NO: 3114321 - DNA, 25 bp, Homo sapien
cccggcagagtggtggacacaagtc

SEQ ID NO: 3114322 - DNA, 25 bp, Homo sapien
gaatgagactaacaggcaatgcctc

SEQ ID NO: 3114323 - DNA, 25 bp, Homo sapien
tcccaggattagacccgaggcaggg

SEQ ID NO: 3114324 - DNA, 25 bp, Homo sapien
cccaaacacgtggagtgaaaaccag

SEQ ID NO: 3114325 - DNA, 25 bp, Homo sapien
tgcacacgggacgtggagaaagtcc

SEQ ID NO: 3114326 - DNA, 25 bp, Homo sapien
tgttcacgcacacgccatgagggtt

SEQ ID NO: 3114327 - DNA, 25 bp, Homo sapien
cagctaacggtggaggaaggcacaa

SEQ ID NO: 3114328 - DNA, 25 bp, Homo sapien
gaaaggtcatgtcgtaaaggtcaca

SEQ ID NO: 3114329 - DNA, 25 bp, Homo sapien
tccctttaagggcacgaggcaggtg

SEQ ID NO: 3114330 - DNA, 25 bp, Homo sapien
aactaagaaaagagcgtcggcgtca

SEQ ID NO: 3114331 - DNA, 25 bp, Homo sapien
gaccgtagcatgatcttctggagag

SEQ ID NO: 3114332 - DNA, 25 bp, Homo sapien
caaggttgcttcctctacactgaag

SEQ ID NO: 3114333 - DNA, 25 bp, Homo sapien
tcacactcatattacggagacggct

SEQ ID NO: 3114334 - DNA, 25 bp, Homo sapien
catagatgggttttaaagtcacggc

SEQ ID NO: 3114335 - DNA, 25 bp, Homo sapien
ggctggggtctcatcccaggccaca

SEQ ID NO: 3114336 - DNA, 25 bp, Homo sapien
cttccacggccaagggccccacact

SEQ ID NO: 3114337 - DNA, 25 bp, Homo sapien
aggtggcagagcccgggatccccaa

SEQ ID NO: 3114338 - DNA, 25 bp, Homo sapien
acagcagggcgggttgtccaggtgg

SEQ ID NO: 3114339 - DNA, 25 bp, Homo sapien
cttcacgcagatgacgaagggtggc

SEQ ID NO: 3114340 - DNA, 25 bp, Homo sapien
cagcttcacgcagatgacgaagggt

SEQ ID NO: 3114341 - DNA, 25 bp, Homo sapien
gggcggctcggaagtgcaggatggg

SEQ ID NO: 3114342 - DNA, 25 bp, Homo sapien
ttcacgcagatgacgaagggtggcc

SEQ ID NO: 3114343 - DNA, 25 bp, Homo sapien
tcgtccacgtcacagaatgccacca

SEQ ID NO: 3114344 - DNA, 25 bp, Homo sapien
ctcgtggcaatagaagcctttcctg

SEQ ID NO: 3114345 - DNA, 25 bp, Homo sapien
tcctgatcttgttctcgtccacgtc

SEQ ID NO: 3114346 - DNA, 25 bp, Homo sapien
ctgagagtcctcgtggcaatagaag

SEQ ID NO: 3114347 - DNA, 25 bp, Homo sapien
gacgcggtgggtccagatggtcgtc

SEQ ID NO: 3114348 - DNA, 25 bp, Homo sapien
ctgcttgccagcgttccagatggtg

SEQ ID NO: 3114349 - DNA, 25 bp, Homo sapien
ctcttccaggaagcggacgcggtgg

SEQ ID NO: 3114350 - DNA, 25 bp, Homo sapien
gctgccggcagtcaagctgcggtac

SEQ ID NO: 3114351 - DNA, 25 bp, Homo sapien
gcaggtggccgagacctctgtgtcc

SEQ ID NO: 3114352 - DNA, 25 bp, Homo sapien
tgtgtcctcacagttctaaggaggg

SEQ ID NO: 3114353 - DNA, 25 bp, Homo sapien
taaggagggaactgtctgcccggat

SEQ ID NO: 3114354 - DNA, 25 bp, Homo sapien
gctttccaacttaacgctgcggcac

SEQ ID NO: 3114355 - DNA, 25 bp, Homo sapien
gggtggtggcgatacagcaggagac

SEQ ID NO: 3114356 - DNA, 25 bp, Homo sapien
cctgaggtgctcgtagaagaacagc

SEQ ID NO: 3114357 - DNA, 25 bp, Homo sapien
ggccgcctgtgggtggtggcgatac

SEQ ID NO: 3114358 - DNA, 25 bp, Homo sapien
gcaggagactctggtccacgcggat

SEQ ID NO: 3114359 - DNA, 25 bp, Homo sapien
tcagccggccaaccaggaaccggtg

SEQ ID NO: 3114360 - DNA, 25 bp, Homo sapien
tgcacactacacctgcgctcagccg

SEQ ID NO: 3114361 - DNA, 25 bp, Homo sapien
gaaacgcgtgcctgccccggatgca

SEQ ID NO: 3114362 - DNA, 25 bp, Homo sapien
tggggccccagaaacgcgtgcctgc

SEQ ID NO: 3114363 - DNA, 25 bp, Homo sapien
aagctcaagggactcaaagtgccga

SEQ ID NO: 3114364 - DNA, 25 bp, Homo sapien
ccagaagctcaagggactcaaagtg

SEQ ID NO: 3114365 - DNA, 25 bp, Homo sapien
ctggatggctggtccggcctccgtc

SEQ ID NO: 3114366 - DNA, 25 bp, Homo sapien
cctggatggctggtccggcctccgt

SEQ ID NO: 3114367 - DNA, 25 bp, Homo sapien
ctgtgggcagaggacagtggtgctg

SEQ ID NO: 3114368 - DNA, 25 bp, Homo sapien
gacagtggtgctgggtgggcgtgtg

SEQ ID NO: 3114369 - DNA, 25 bp, Homo sapien
gaggacagtggtgctgggtgggcgt

SEQ ID NO: 3114370 - DNA, 25 bp, Homo sapien
gcagaggacagtggtgctgggtggg

SEQ ID NO: 3114371 - DNA, 25 bp, Homo sapien
tcagcccacggggcttatccccgaa

SEQ ID NO: 3114372 - DNA, 25 bp, Homo sapien
agctcagaaacttgaacctcagccc

SEQ ID NO: 3114373 - DNA, 25 bp, Homo sapien
gcttatccccgaacactccctccat

SEQ ID NO: 3114374 - DNA, 25 bp, Homo sapien
gctcagaaacttgaacctcagccca

SEQ ID NO: 3114375 - DNA, 25 bp, Homo sapien
tttctgtcctgtgagaacctgggcc

SEQ ID NO: 3114376 - DNA, 25 bp, Homo sapien
tctgtcctgtgagaacctgggccct

SEQ ID NO: 3114377 - DNA, 25 bp, Homo sapien
tgtcctgtgagaacctgggccctgc

SEQ ID NO: 3114378 - DNA, 25 bp, Homo sapien
ctgggccctgctttccccggcccat

SEQ ID NO: 3114379 - DNA, 25 bp, Homo sapien
tcagccgcccggagacacctttgct

SEQ ID NO: 3114380 - DNA, 25 bp, Homo sapien
cggagacacctttgctccaggaaag

SEQ ID NO: 3114381 - DNA, 25 bp, Homo sapien
gcccggagacacctttgctccagga

SEQ ID NO: 3114382 - DNA, 25 bp, Homo sapien
tgggtcagccgcccggagacacctt

SEQ ID NO: 3114383 - DNA, 25 bp, Homo sapien
cagcgattggagtccgcggaacgca

SEQ ID NO: 3114384 - DNA, 25 bp, Homo sapien
cagcagtcaccacgcggggacagaa

SEQ ID NO: 3114385 - DNA, 25 bp, Homo sapien
gaagcagcagtcaccacgcggggac

SEQ ID NO: 3114386 - DNA, 25 bp, Homo sapien
agagctcgagccagggcccagcgat

SEQ ID NO: 3114387 - DNA, 25 bp, Homo sapien
gaaccaggtgggcatgatcaccgtg

SEQ ID NO: 3114388 - DNA, 25 bp, Homo sapien
cacgctcgcgagcagaaccaggtgg

SEQ ID NO: 3114389 - DNA, 25 bp, Homo sapien
acgtgggagaaccacgctcgcgagc

SEQ ID NO: 3114390 - DNA, 25 bp, Homo sapien
gggagaaccacgctcgcgagcagaa

SEQ ID NO: 3114391 - DNA, 25 bp, Homo sapien
agatggcgctggaaccactggtgtc

SEQ ID NO: 3114392 - DNA, 25 bp, Homo sapien
ggcagacagacaaacggaacagaac

SEQ ID NO: 3114393 - DNA, 25 bp, Homo sapien
gattggtatcagcttatgggcagac

SEQ ID NO: 3114394 - DNA, 25 bp, Homo sapien
caaaagaggcaacgagctcatccag

SEQ ID NO: 3114395 - DNA, 25 bp, Homo sapien
ctttggtgcttctgcgtcgtgacag

SEQ ID NO: 3114396 - DNA, 25 bp, Homo sapien
gtttcgcacatcaaagctttggtgc

SEQ ID NO: 3114397 - DNA, 25 bp, Homo sapien
ttctgcgtcgtgacaggtgggtgcc

SEQ ID NO: 3114398 - DNA, 25 bp, Homo sapien
ggtgccccctgggacatcaggaaga

SEQ ID NO: 3114399 - DNA, 25 bp, Homo sapien
ggccagaaggacccggtactgacca

SEQ ID NO: 3114400 - DNA, 25 bp, Homo sapien
cagaaggacccggtactgaccacac

SEQ ID NO: 3114401 - DNA, 25 bp, Homo sapien
cacaccacaggggatagaaggacct

SEQ ID NO: 3114402 - DNA, 25 bp, Homo sapien
cacaccacaccacaggggctagaag

SEQ ID NO: 3114403 - DNA, 25 bp, Homo sapien
ctgcgtgtagttgtaagcgtcaaac

SEQ ID NO: 3114404 - DNA, 25 bp, Homo sapien
gcagccagcacccttgaatcttacg

SEQ ID NO: 3114405 - DNA, 25 bp, Homo sapien
agcgtcaaacgagcgggcacagagc

SEQ ID NO: 3114406 - DNA, 25 bp, Homo sapien
cccttgaatcttacgaacagtcgga

SEQ ID NO: 3114407 - DNA, 25 bp, Homo sapien
tgaaggtggccagaccagtgaagca

SEQ ID NO: 3114408 - DNA, 25 bp, Homo sapien
tgctgagaaaaacccaagtgtacgt

SEQ ID NO: 3114409 - DNA, 25 bp, Homo sapien
aacacactgttcgagggtcaccact

SEQ ID NO: 3114410 - DNA, 25 bp, Homo sapien
catgactgcatttacctgagcctcc

SEQ ID NO: 3114411 - DNA, 25 bp, Homo sapien
ccgctagctcgtacagggaagggct

SEQ ID NO: 3114412 - DNA, 25 bp, Homo sapien
gttcagaaccagcttggcaacgccg

SEQ ID NO: 3114413 - DNA, 25 bp, Homo sapien
gagacgctgaaacactagctgtggg

SEQ ID NO: 3114414 - DNA, 25 bp, Homo sapien
cgcattccggtttgcacgaggtgca

SEQ ID NO: 3114415 - DNA, 25 bp, Homo sapien
agctgctccggcgtcagctggttga

SEQ ID NO: 3114416 - DNA, 25 bp, Homo sapien
gctggttgatccaacgtgtgtatcg

SEQ ID NO: 3114417 - DNA, 25 bp, Homo sapien
caacgtgtgtatcgttcggtggagt

SEQ ID NO: 3114418 - DNA, 25 bp, Homo sapien
tccggcgtcagctggttgatccaac

SEQ ID NO: 3114419 - DNA, 25 bp, Homo sapien
aaagtggatgtgaggaaaccgctgc

SEQ ID NO: 3114420 - DNA, 25 bp, Homo sapien
caggccgcccgtctgaacctgctcc

SEQ ID NO: 3114421 - DNA, 25 bp, Homo sapien
gaggaaaccgctgcctgtccgcagg

SEQ ID NO: 3114422 - DNA, 25 bp, Homo sapien
acatgcaaagtggatgtgaggaaac

SEQ ID NO: 3114423 - DNA, 25 bp, Homo sapien
tgaagtcacaccgaggcatctgagg

SEQ ID NO: 3114424 - DNA, 25 bp, Homo sapien
gaacagcgtcttcaatccactggga

SEQ ID NO: 3114425 - DNA, 25 bp, Homo sapien
gagtccagatccagatgtcccaggg

SEQ ID NO: 3114426 - DNA, 25 bp, Homo sapien
gagtagacgttctcacagcacaggc

SEQ ID NO: 3114427 - DNA, 25 bp, Homo sapien
tcagactccccgtggattcgccaca

SEQ ID NO: 3114428 - DNA, 25 bp, Homo sapien
cagctcagactccccgtggattcgc

SEQ ID NO: 3114429 - DNA, 25 bp, Homo sapien
ccgtggattcgccacagaggccgag

SEQ ID NO: 3114430 - DNA, 25 bp, Homo sapien
actccccgtggattcgccacagagg

SEQ ID NO: 3114431 - DNA, 25 bp, Homo sapien
tcaagaagtcagcttctgaattaca

SEQ ID NO: 3114432 - DNA, 25 bp, Homo sapien
aaccagttgcatttttgacactaac

SEQ ID NO: 3114433 - DNA, 25 bp, Homo sapien
aaaccagttgcatttttgacactaa

SEQ ID NO: 3114434 - DNA, 25 bp, Homo sapien
accagttgcatttttgacactaaca

SEQ ID NO: 3114435 - DNA, 25 bp, Homo sapien
gaaaccagttgcatttttgacacta

SEQ ID NO: 3114436 - DNA, 25 bp, Homo sapien
ccttggagtgaacgacttgccgtcc

SEQ ID NO: 3114437 - DNA, 25 bp, Homo sapien
actgccttggagtgaacgacttgcc

SEQ ID NO: 3114438 - DNA, 25 bp, Homo sapien
ggagtgaacgacttgccgtccactg

SEQ ID NO: 3114439 - DNA, 25 bp, Homo sapien
gccactgccttggagtgaacgactt

SEQ ID NO: 3114440 - DNA, 25 bp, Homo sapien
gtgcctggggagctcgttcaaccac

SEQ ID NO: 3114441 - DNA, 25 bp, Homo sapien
ggtgcctggggagctcgttcaacca

SEQ ID NO: 3114442 - DNA, 25 bp, Homo sapien
gagccacgccccagggtccagagtc

SEQ ID NO: 3114443 - DNA, 25 bp, Homo sapien
ctgagccacgccccagggtccagag

SEQ ID NO: 3114444 - DNA, 25 bp, Homo sapien
tgagccacgccccagggtccagagt

SEQ ID NO: 3114445 - DNA, 25 bp, Homo sapien
agcccgaactacagcccagcagagc

SEQ ID NO: 3114446 - DNA, 25 bp, Homo sapien
agcaccgggggcttcggccgccact

SEQ ID NO: 3114447 - DNA, 25 bp, Homo sapien
ggcttcggccgccactcctgagcag

SEQ ID NO: 3114448 - DNA, 25 bp, Homo sapien
gaggcagccgtccagtgtgaccctg

SEQ ID NO: 3114449 - DNA, 25 bp, Homo sapien
ggatgattatggcttggcacaggca

SEQ ID NO: 3114450 - DNA, 25 bp, Homo sapien
cctgtttatttaagttaacacgcag

SEQ ID NO: 3114451 - DNA, 25 bp, Homo sapien
tttatttaagttaacacgcagcttc

SEQ ID NO: 3114452 - DNA, 25 bp, Homo sapien
gctgccgtgccgtctggatgattat

SEQ ID NO: 3114453 - DNA, 25 bp, Homo sapien
actggtcttgaacgttgggaacaga

SEQ ID NO: 3114454 - DNA, 25 bp, Homo sapien
gctgtaccccgaggactggtcttga

SEQ ID NO: 3114455 - DNA, 25 bp, Homo sapien
gccagggcagccttcgtgtttggtc

SEQ ID NO: 3114456 - DNA, 25 bp, Homo sapien
cagggcagccttcgtgtttggtctg

SEQ ID NO: 3114457 - DNA, 25 bp, Homo sapien
tgcaggctttcctctccgatgtctc

SEQ ID NO: 3114458 - DNA, 25 bp, Homo sapien
ctagaggtgaccaagaatgcaggct

SEQ ID NO: 3114459 - DNA, 25 bp, Homo sapien
ggtgaccaagaatgcaggctttcct

SEQ ID NO: 3114460 - DNA, 25 bp, Homo sapien
aagaatgcaggctttcctctccgat

SEQ ID NO: 3114461 - DNA, 25 bp, Homo sapien
gacaaactacacaatgtaattcacg

SEQ ID NO: 3114462 - DNA, 25 bp, Homo sapien
taattcacgtaaccacgaaccagca

SEQ ID NO: 3114463 - DNA, 25 bp, Homo sapien
ggacaaactacacaatgtaattcac

SEQ ID NO: 3114464 - DNA, 25 bp, Homo sapien
atgtaattcacgtaaccacgaacca

SEQ ID NO: 3114465 - DNA, 25 bp, Homo sapien
aagcttgtcttattacaattaagac

SEQ ID NO: 3114466 - DNA, 25 bp, Homo sapien
tcttattacaattaagacaaactga

SEQ ID NO: 3114467 - DNA, 25 bp, Homo sapien
ttaagcttgtcttattacaattaag

SEQ ID NO: 3114468 - DNA, 25 bp, Homo sapien
tgtcttattacaattaagacaaact

SEQ ID NO: 3114469 - DNA, 25 bp, Homo sapien
ccagctcgtttgaacacatgccacg

SEQ ID NO: 3114470 - DNA, 25 bp, Homo sapien
cagctcgtttgaacacatgccacga

SEQ ID NO: 3114471 - DNA, 25 bp, Homo sapien
ctcgtttgaacacatgccacgaaga

SEQ ID NO: 3114472 - DNA, 25 bp, Homo sapien
tcgtttgaacacatgccacgaagaa

SEQ ID NO: 3114473 - DNA, 25 bp, Homo sapien
accttccagtccacaggaccacaca

SEQ ID NO: 3114474 - DNA, 25 bp, Homo sapien
cggcacagggtctgctccaccttcc

SEQ ID NO: 3114475 - DNA, 25 bp, Homo sapien
gccggcacagggtctgctccacctt

SEQ ID NO: 3114476 - DNA, 25 bp, Homo sapien
gggccggcacagggtctgctccacc

SEQ ID NO: 3114477 - DNA, 25 bp, Homo sapien
ctcgacgggtgctgaacggcagcct

SEQ ID NO: 3114478 - DNA, 25 bp, Homo sapien
tgctgaacggcagcctcgtgttgca

SEQ ID NO: 3114479 - DNA, 25 bp, Homo sapien
gaacggcagcctcgtgttgcagcct

SEQ ID NO: 3114480 - DNA, 25 bp, Homo sapien
tcgacgggtgctgaacggcagcctc

SEQ ID NO: 3114481 - DNA, 25 bp, Homo sapien
acggccgcatggcactcctgccact

SEQ ID NO: 3114482 - DNA, 25 bp, Homo sapien
gttactgattctgagcgcagttggg

SEQ ID NO: 3114483 - DNA, 25 bp, Homo sapien
aagagttactgattctgagcgcagt

SEQ ID NO: 3114484 - DNA, 25 bp, Homo sapien
gagaggccacggccgcatggcactc

SEQ ID NO: 3114485 - DNA, 25 bp, Homo sapien
gaggagtgaccagaacgctgtggcc

SEQ ID NO: 3114486 - DNA, 25 bp, Homo sapien
tctgcagccggacaggcagacgctg

SEQ ID NO: 3114487 - DNA, 25 bp, Homo sapien
tgctcaggggtgcaaagcgctccaa

SEQ ID NO: 3114488 - DNA, 25 bp, Homo sapien
acgctgtgatgctgaggagtgacca

SEQ ID NO: 3114489 - DNA, 25 bp, Homo sapien
acccaccctcgacagacacacagag

SEQ ID NO: 3114490 - DNA, 25 bp, Homo sapien
caaacccaccctcgacagacacaca

SEQ ID NO: 3114491 - DNA, 25 bp, Homo sapien
gacaaacccaccctcgacagacaca

SEQ ID NO: 3114492 - DNA, 25 bp, Homo sapien
gcagacaaacccaccctcgacagac

SEQ ID NO: 3114493 - DNA, 25 bp, Homo sapien
cacaggcgtgtgagctgtcaaaaca

SEQ ID NO: 3114494 - DNA, 25 bp, Homo sapien
caagctgtaacgcatgaccatccgg

SEQ ID NO: 3114495 - DNA, 25 bp, Homo sapien
gaaacaatctcggtgcagtcacaga

SEQ ID NO: 3114496 - DNA, 25 bp, Homo sapien
cacggcgtgcggtttcacgtacgca

SEQ ID NO: 3114497 - DNA, 25 bp, Homo sapien
gcaggtccatgggtgtttgtcacac

SEQ ID NO: 3114498 - DNA, 25 bp, Homo sapien
gataagcatcgtggtcacctgtgag

SEQ ID NO: 3114499 - DNA, 25 bp, Homo sapien
ggacacagcgcgtctgcacgaataa

SEQ ID NO: 3114500 - DNA, 25 bp, Homo sapien
cctgtgagacgtgagaagaccgagc

SEQ ID NO: 3114501 - DNA, 25 bp, Homo sapien
aacgggccacgcgtgaacaaatgag

SEQ ID NO: 3114502 - DNA, 25 bp, Homo sapien
gaatgtgtcctgaaccaagggtcgt

SEQ ID NO: 3114503 - DNA, 25 bp, Homo sapien
gattaatttgattctgggctcctga

SEQ ID NO: 3114504 - DNA, 25 bp, Homo sapien
cacagagacaagtaaaacgggccac

SEQ ID NO: 3114505 - DNA, 25 bp, Homo sapien
acagccccggcgatgactcgacaat

SEQ ID NO: 3114506 - DNA, 25 bp, Homo sapien
cctcggttcaaggatcggcagtgag

SEQ ID NO: 3114507 - DNA, 25 bp, Homo sapien
atccctgtcccctcggttcaaggat

SEQ ID NO: 3114508 - DNA, 25 bp, Homo sapien
gaacggccaggcttgtctgtaaccc

SEQ ID NO: 3114509 - DNA, 25 bp, Homo sapien
ggcggttccgggaaggccatgtggc

SEQ ID NO: 3114510 - DNA, 25 bp, Homo sapien
atgcggccggttccccagtgaagac

SEQ ID NO: 3114511 - DNA, 25 bp, Homo sapien
cagtgaagacgggagtcgggggaca

SEQ ID NO: 3114512 - DNA, 25 bp, Homo sapien
cacgtggacagccatgcggccggtt

SEQ ID NO: 3114513 - DNA, 25 bp, Homo sapien
gaagggtgtaaactcagcgacggct

SEQ ID NO: 3114514 - DNA, 25 bp, Homo sapien
gggtgtaaactcagcgacggccgcc

SEQ ID NO: 3114515 - DNA, 25 bp, Homo sapien
gaagggtgtaaactcagcgacggcc

SEQ ID NO: 3114516 - DNA, 25 bp, Homo sapien
gggtgtaaactcagcgacggctgcc

SEQ ID NO: 3114517 - DNA, 25 bp, Homo sapien
cccaaacttccacatgtaccaggag

SEQ ID NO: 3114518 - DNA, 25 bp, Homo sapien
ttccacatgtaccaggagcatgtgc

SEQ ID NO: 3114519 - DNA, 25 bp, Homo sapien
acacgggcacgcctctcccaaactt

SEQ ID NO: 3114520 - DNA, 25 bp, Homo sapien
aacttccacatgtaccaggagcatg

SEQ ID NO: 3114521 - DNA, 25 bp, Homo sapien
tcccgcgtaaatccccgcgtaggca

SEQ ID NO: 3114522 - DNA, 25 bp, Homo sapien
aaatccccgcgtaggcaggagctct

SEQ ID NO: 3114523 - DNA, 25 bp, Homo sapien
ctggagacgctgagcggcaccccag

SEQ ID NO: 3114524 - DNA, 25 bp, Homo sapien
cgcgtaaatccccgcgtaggcagga

SEQ ID NO: 3114525 - DNA, 25 bp, Homo sapien
aaagcaaaggtaagaccctgagctc

SEQ ID NO: 3114526 - DNA, 25 bp, Homo sapien
aactgcttgatttttagcgtatccg

SEQ ID NO: 3114527 - DNA, 25 bp, Homo sapien
gcaaaggtaagaccctgagctctgg

SEQ ID NO: 3114528 - DNA, 25 bp, Homo sapien
actgcttgatttttagcgtatccga

SEQ ID NO: 3114529 - DNA, 25 bp, Homo sapien
gctcctcacgagaaacacaggcgga

SEQ ID NO: 3114530 - DNA, 25 bp, Homo sapien
aagctcctcacgagaaacacaggcg

SEQ ID NO: 3114531 - DNA, 25 bp, Homo sapien
ctgaagctcctcacgagaaacacag

SEQ ID NO: 3114532 - DNA, 25 bp, Homo sapien
ctcacgagaaacacaggcggaggca

SEQ ID NO: 3114533 - DNA, 25 bp, Homo sapien
cttgaagaaagtcaaatgtttgcgt

SEQ ID NO: 3114534 - DNA, 25 bp, Homo sapien
tcctgcttggggaggccagtccctt

SEQ ID NO: 3114535 - DNA, 25 bp, Homo sapien
aggaaaaactcacacggcggcgaga

SEQ ID NO: 3114536 - DNA, 25 bp, Homo sapien
cacggcggcgagatattaacattcc

SEQ ID NO: 3114537 - DNA, 25 bp, Homo sapien
tcgtgccccccaatgatcacgtgga

SEQ ID NO: 3114538 - DNA, 25 bp, Homo sapien
ctctaggagagggagaatcgtgccc

SEQ ID NO: 3114539 - DNA, 25 bp, Homo sapien
tctaggagagggagaatcgtgcccc

SEQ ID NO: 3114540 - DNA, 25 bp, Homo sapien
tgatcacgtggacaccagaatcttc

SEQ ID NO: 3114541 - DNA, 25 bp, Homo sapien
tcattgaaaacagacagctccatgg

SEQ ID NO: 3114542 - DNA, 25 bp, Homo sapien
cattgaaaacagacagctccatggt

SEQ ID NO: 3114543 - DNA, 25 bp, Homo sapien
atcattgaaaacagacagctccatg

SEQ ID NO: 3114544 - DNA, 25 bp, Homo sapien
ttgaaaacagacagctccatggtac

SEQ ID NO: 3114545 - DNA, 25 bp, Homo sapien
ttcaaagtcctgttgcaaaacagac

SEQ ID NO: 3114546 - DNA, 25 bp, Homo sapien
cttcaaagtcctgttgcaaaacaga

SEQ ID NO: 3114547 - DNA, 25 bp, Homo sapien
aacattcgtccagccacggttcagc

SEQ ID NO: 3114548 - DNA, 25 bp, Homo sapien
ctcaaacattcgtccagccacggtt

SEQ ID NO: 3114549 - DNA, 25 bp, Homo sapien
ttcgtccagccacggttcagcgttg

SEQ ID NO: 3114550 - DNA, 25 bp, Homo sapien
tccagccacggttcagcgttgtgga

SEQ ID NO: 3114551 - DNA, 25 bp, Homo sapien
acccgcacatatgccgtgacaaaca

SEQ ID NO: 3114552 - DNA, 25 bp, Homo sapien
tgacaaacaaaaggtgtccactcct

SEQ ID NO: 3114553 - DNA, 25 bp, Homo sapien
tctccaggctcttaacatgcttgta

SEQ ID NO: 3114554 - DNA, 25 bp, Homo sapien
ttacgtcttagctttccctgaactg

SEQ ID NO: 3114555 - DNA, 25 bp, Homo sapien
gctccgagcccggaagcttcaaaat

SEQ ID NO: 3114556 - DNA, 25 bp, Homo sapien
ccacgaccaggtgagggcgaacggg

SEQ ID NO: 3114557 - DNA, 25 bp, Homo sapien
gaacggggaactgcctgagctccga

SEQ ID NO: 3114558 - DNA, 25 bp, Homo sapien
tcaaaatcagaacgaggaaggtcgg

SEQ ID NO: 3114559 - DNA, 25 bp, Homo sapien
accccgtaggtgagcccgagaggcg

SEQ ID NO: 3114560 - DNA, 25 bp, Homo sapien
gcggagaccccgtaggtgagcccga

SEQ ID NO: 3114561 - DNA, 25 bp, Homo sapien
tgctcagggcggagaccccgtaggt

SEQ ID NO: 3114562 - DNA, 25 bp, Homo sapien
tcagggcggagaccccgtaggtgag

SEQ ID NO: 3114563 - DNA, 25 bp, Homo sapien
ccacgccggctccgctcatcccgcc

SEQ ID NO: 3114564 - DNA, 25 bp, Homo sapien
gcccacgccggctccgctcatcccg

SEQ ID NO: 3114565 - DNA, 25 bp, Homo sapien
gccctcgcagtaggaagatcctcgg

SEQ ID NO: 3114566 - DNA, 25 bp, Homo sapien
gtcagcagagggcccggacagaagg

SEQ ID NO: 3114567 - DNA, 25 bp, Homo sapien
ccctcgcagtaggaagatcctcggg

SEQ ID NO: 3114568 - DNA, 25 bp, Homo sapien
ggtcagcagagggcccggacagaag

SEQ ID NO: 3114569 - DNA, 25 bp, Homo sapien
cccacagacagtgttagactcagtg

SEQ ID NO: 3114570 - DNA, 25 bp, Homo sapien
gagacagaggttccctgcaggtccg

SEQ ID NO: 3114571 - DNA, 25 bp, Homo sapien
tgcaggtccccacagacagtgttag

SEQ ID NO: 3114572 - DNA, 25 bp, Homo sapien
gagacagaggttccctgcaggtccc

SEQ ID NO: 3114573 - DNA, 25 bp, Homo sapien
caggtccgcacggacggtgttagac

SEQ ID NO: 3114574 - DNA, 25 bp, Homo sapien
ccctgcaggtccgcacggacggtgt

SEQ ID NO: 3114575 - DNA, 25 bp, Homo sapien
cctgcaggtccgcacggacggtgtt

SEQ ID NO: 3114576 - DNA, 25 bp, Homo sapien
ctgcaggtccgcacggacggtgtta

SEQ ID NO: 3114577 - DNA, 25 bp, Homo sapien
gcaggtccgcacggacggtgttaga

SEQ ID NO: 3114578 - DNA, 25 bp, Homo sapien
ctgcaggtccgcacggacggtgtta

SEQ ID NO: 3114579 - DNA, 25 bp, Homo sapien
tgcaggtccgcacggacggtgttag

SEQ ID NO: 3114580 - DNA, 25 bp, Homo sapien
caggtccgcacggacggtgttagac

SEQ ID NO: 3114581 - DNA, 25 bp, Homo sapien
tccccacagacagtgttagactcgg

SEQ ID NO: 3114582 - DNA, 25 bp, Homo sapien
cccacagacagtgttagactcggtg

SEQ ID NO: 3114583 - DNA, 25 bp, Homo sapien
tgcaggtccccacagacagtgttag

SEQ ID NO: 3114584 - DNA, 25 bp, Homo sapien
aggtccccacagacagtgttagact

SEQ ID NO: 3114585 - DNA, 25 bp, Homo sapien
gtggggaggttccctgcaggtccgc

SEQ ID NO: 3114586 - DNA, 25 bp, Homo sapien
tgggtggggaggttccctgcaggtc

SEQ ID NO: 3114587 - DNA, 25 bp, Homo sapien
ggggaggttccctgcaggtccgcac

SEQ ID NO: 3114588 - DNA, 25 bp, Homo sapien
ctgggtggggaggttccctgcaggt

SEQ ID NO: 3114589 - DNA, 25 bp, Homo sapien
caggtccgcacggacggtgttagac

SEQ ID NO: 3114590 - DNA, 25 bp, Homo sapien
ctgcaggtccgcacggacggtgtta

SEQ ID NO: 3114591 - DNA, 25 bp, Homo sapien
ccctgcaggtccgcacggacggtgt

SEQ ID NO: 3114592 - DNA, 25 bp, Homo sapien
cctgcaggtccgcacggacggtgtt

SEQ ID NO: 3114593 - DNA, 25 bp, Homo sapien
gcaggtccgcacggacggtgttaga

SEQ ID NO: 3114594 - DNA, 25 bp, Homo sapien
ctgcaggtccgcacggacggtgtta

SEQ ID NO: 3114595 - DNA, 25 bp, Homo sapien
tgcaggtccgcacggacggtgttag

SEQ ID NO: 3114596 - DNA, 25 bp, Homo sapien
caggtccgcacggacggtgttagac

SEQ ID NO: 3114597 - DNA, 25 bp, Homo sapien
cctggctgttcggcgatgtgtgcac

SEQ ID NO: 3114598 - DNA, 25 bp, Homo sapien
catagcacccccataataaagcagc

SEQ ID NO: 3114599 - DNA, 25 bp, Homo sapien
tcggcgatgtgtgcactgaggtcat

SEQ ID NO: 3114600 - DNA, 25 bp, Homo sapien
cataataaagcagcccgtgagggca

SEQ ID NO: 3114601 - DNA, 25 bp, Homo sapien
gtggtcagtgcggccgtgcagctgc

SEQ ID NO: 3114602 - DNA, 25 bp, Homo sapien
tgcaccccggcctggtcacctgtgc

SEQ ID NO: 3114603 - DNA, 25 bp, Homo sapien
gtcagtgcggccgtgcagctgcacc

SEQ ID NO: 3114604 - DNA, 25 bp, Homo sapien
tcagtggtcagtgcggccgtgcagc

SEQ ID NO: 3114605 - DNA, 25 bp, Homo sapien
caaaccagccaatatccacagggcc

SEQ ID NO: 3114606 - DNA, 25 bp, Homo sapien
ccagccaatatccacagggcctgaa

SEQ ID NO: 3114607 - DNA, 25 bp, Homo sapien
aaccagccaatatccacagggcctg

SEQ ID NO: 3114608 - DNA, 25 bp, Homo sapien
agccaatatccacagggcctgaaac

SEQ ID NO: 3114609 - DNA, 25 bp, Homo sapien
tctctcttccattggtggaaatcag

SEQ ID NO: 3114610 - DNA, 25 bp, Homo sapien
ctctcttccattggtggaaatcagc

SEQ ID NO: 3114611 - DNA, 25 bp, Homo sapien
ccgtgtctccactgacaagtgtcct

SEQ ID NO: 3114612 - DNA, 25 bp, Homo sapien
aatcagccgtgtctccactgacaag

SEQ ID NO: 3114613 - DNA, 25 bp, Homo sapien
ccgtcacctttctggtgtgcaggga

SEQ ID NO: 3114614 - DNA, 25 bp, Homo sapien
ctgtgtgtggccgtcacctttctgg

SEQ ID NO: 3114615 - DNA, 25 bp, Homo sapien
tgtgcagggaactgtctcacagctc

SEQ ID NO: 3114616 - DNA, 25 bp, Homo sapien
cacagctccattaaagatgaggaag

SEQ ID NO: 3114617 - DNA, 25 bp, Homo sapien
cccccactgaaaggatgcccagaaa

SEQ ID NO: 3114618 - DNA, 25 bp, Homo sapien
cactgaaaggatgcccagaaacctc

SEQ ID NO: 3114619 - DNA, 25 bp, Homo sapien
cctggccccccactgaaaggatgcc

SEQ ID NO: 3114620 - DNA, 25 bp, Homo sapien
cccactgaaaggatgcccagaaacc

SEQ ID NO: 3114621 - DNA, 25 bp, Homo sapien
tgaagactcagcacagacgctcaca

SEQ ID NO: 3114622 - DNA, 25 bp, Homo sapien
ttcctgatgaagactcagcacagac

SEQ ID NO: 3114623 - DNA, 25 bp, Homo sapien
tcagcacagacgctcacagcatcat

SEQ ID NO: 3114624 - DNA, 25 bp, Homo sapien
agcacagacgctcacagcatcattg

SEQ ID NO: 3114625 - DNA, 25 bp, Homo sapien
ctggtggcagaaggcccggagggtg

SEQ ID NO: 3114626 - DNA, 25 bp, Homo sapien
gcagaaggcccggagggtgcacggc

SEQ ID NO: 3114627 - DNA, 25 bp, Homo sapien
gtggcagaaggcccggagggtgcac

SEQ ID NO: 3114628 - DNA, 25 bp, Homo sapien
cagaaggcccggagggtgcacggcc

SEQ ID NO: 3114629 - DNA, 25 bp, Homo sapien
cctggcccctaaagtcctgctgttt

SEQ ID NO: 3114630 - DNA, 25 bp, Homo sapien
caggaactgctgacggaccgaagga

SEQ ID NO: 3114631 - DNA, 25 bp, Homo sapien
catggctgcgtagctttgctgtgca

SEQ ID NO: 3114632 - DNA, 25 bp, Homo sapien
agcgccatggctgcgtagctttgct

SEQ ID NO: 3114633 - DNA, 25 bp, Homo sapien
agtgccagcgaataggcccctgcag

SEQ ID NO: 3114634 - DNA, 25 bp, Homo sapien
ctgagacagtgccagcgaataggcc

SEQ ID NO: 3114635 - DNA, 25 bp, Homo sapien
tgccagcgaataggcccctgcagca

SEQ ID NO: 3114636 - DNA, 25 bp, Homo sapien
gacagtgccagcgaataggcccctg

SEQ ID NO: 3114637 - DNA, 25 bp, Homo sapien
ctgtggagggaggtgctccccacca

SEQ ID NO: 3114638 - DNA, 25 bp, Homo sapien
tggagggaggtgctccccaccacag

SEQ ID NO: 3114639 - DNA, 25 bp, Homo sapien
agcccctgcaccatctgtccccagg

SEQ ID NO: 3114640 - DNA, 25 bp, Homo sapien
tgcagcccctgcaccatctgtcccc

SEQ ID NO: 3114641 - DNA, 25 bp, Homo sapien
tgatgccagcaggacgacaccaggt

SEQ ID NO: 3114642 - DNA, 25 bp, Homo sapien
cagcaggacgacaccaggtacaggg

SEQ ID NO: 3114643 - DNA, 25 bp, Homo sapien
gtgctggaccccccaggtggcaaat

SEQ ID NO: 3114644 - DNA, 25 bp, Homo sapien
caggtgggtgctggaccccccaggt

SEQ ID NO: 3114645 - DNA, 25 bp, Homo sapien
gtttcaggatactcttacgtcgttc

SEQ ID NO: 3114646 - DNA, 25 bp, Homo sapien
tcttacgtcgttctctgtgttcatc

SEQ ID NO: 3114647 - DNA, 25 bp, Homo sapien
aggtttcaggatactcttacgtcgt

SEQ ID NO: 3114648 - DNA, 25 bp, Homo sapien
cgttctctgtgttcatccgcatttt

SEQ ID NO: 3114649 - DNA, 25 bp, Homo sapien
gtcctggagggacagtgcgtgttct

SEQ ID NO: 3114650 - DNA, 25 bp, Homo sapien
tcctggagggacagtgcgtgttctc

SEQ ID NO: 3114651 - DNA, 25 bp, Homo sapien
ctggagggacagtgcgtgttctcac

SEQ ID NO: 3114652 - DNA, 25 bp, Homo sapien
cctggagggacagtgcgtgttctca

SEQ ID NO: 3114653 - DNA, 25 bp, Homo sapien
cacggctgcccgccctctgcaccct

SEQ ID NO: 3114654 - DNA, 25 bp, Homo sapien
acggcttcaccctgggcacggctgc

SEQ ID NO: 3114655 - DNA, 25 bp, Homo sapien
cggggccacggcttcaccctgggca

SEQ ID NO: 3114656 - DNA, 25 bp, Homo sapien
tgggcacggctgcccgccccctgca

SEQ ID NO: 3114657 - DNA, 25 bp, Homo sapien
ctgggcacggctgcccgccccctgc

SEQ ID NO: 3114658 - DNA, 25 bp, Homo sapien
ctggagggacagtgcgtgttctcac

SEQ ID NO: 3114659 - DNA, 25 bp, Homo sapien
cacggctgcccgccctctgcaccct

SEQ ID NO: 3114660 - DNA, 25 bp, Homo sapien
ctggagggacagtgcgtgttctcac

SEQ ID NO: 3114661 - DNA, 25 bp, Homo sapien
ctggagggacggtgcatgttcttac

SEQ ID NO: 3114662 - DNA, 25 bp, Homo sapien
gggccacggcttcaccctgggcacg

SEQ ID NO: 3114663 - DNA, 25 bp, Homo sapien
tcaccctgagtcctggagggacggt

SEQ ID NO: 3114664 - DNA, 25 bp, Homo sapien
ctgggcacggctgcccgccctctgc

SEQ ID NO: 3114665 - DNA, 25 bp, Homo sapien
ccatggtgtggacacggacccattg

SEQ ID NO: 3114666 - DNA, 25 bp, Homo sapien
tttcctttgcgggattccacgctgg

SEQ ID NO: 3114667 - DNA, 25 bp, Homo sapien
ggacacggacccattgtctgtttcc

SEQ ID NO: 3114668 - DNA, 25 bp, Homo sapien
ctttgcgggattccacgctgggctc

SEQ ID NO: 3114669 - DNA, 25 bp, Homo sapien
gccagcgctgaacatggggtcccac

SEQ ID NO: 3114670 - DNA, 25 bp, Homo sapien
cccgaaggtggccagcgctgaacat

SEQ ID NO: 3114671 - DNA, 25 bp, Homo sapien
caccccatgctgtcggagcagcccg

SEQ ID NO: 3114672 - DNA, 25 bp, Homo sapien
accccatgctgtcggagcagcccga

SEQ ID NO: 3114673 - DNA, 25 bp, Homo sapien
gctgtgctgatgactcctcattcgc

SEQ ID NO: 3114674 - DNA, 25 bp, Homo sapien
ctccactttgagcggcggcttggcc

SEQ ID NO: 3114675 - DNA, 25 bp, Homo sapien
tgctgatgactcctcattcgcaggg

SEQ ID NO: 3114676 - DNA, 25 bp, Homo sapien
tgagcggcggcttggcctctggcct

SEQ ID NO: 3114677 - DNA, 25 bp, Homo sapien
cctgcctgccagtgtgcctgcccac

SEQ ID NO: 3114678 - DNA, 25 bp, Homo sapien
ggaccgtctgtccaaatggctgtca

SEQ ID NO: 3114679 - DNA, 25 bp, Homo sapien
ggacagccgggctaattacctgcat

SEQ ID NO: 3114680 - DNA, 25 bp, Homo sapien
ctatctcagcgtgggcagaaaggga

SEQ ID NO: 3114681 - DNA, 25 bp, Homo sapien
cagaaagggacggacatgtgagaca

SEQ ID NO: 3114682 - DNA, 25 bp, Homo sapien
tggtgagggtgtctaccgccacccc

SEQ ID NO: 3114683 - DNA, 25 bp, Homo sapien
tcatccaggcgcagcgtcgatgtgg

SEQ ID NO: 3114684 - DNA, 25 bp, Homo sapien
ggctgagtcatccaggcgcagcgtc

SEQ ID NO: 3114685 - DNA, 25 bp, Homo sapien
ctcctggtgagggtgtctaccgcca

SEQ ID NO: 3114686 - DNA, 25 bp, Homo sapien
tgtgtacaaatccaccgtgtactgt

SEQ ID NO: 3114687 - DNA, 25 bp, Homo sapien
tccaccgtgtactgtagatggcccc

SEQ ID NO: 3114688 - DNA, 25 bp, Homo sapien
acgcagacgtccacctctgtgtaca

SEQ ID NO: 3114689 - DNA, 25 bp, Homo sapien
gcagacgtccacctctgtgtacaaa

SEQ ID NO: 3114690 - DNA, 25 bp, Homo sapien
gggtgagatgctgccatgaacagct

SEQ ID NO: 3114691 - DNA, 25 bp, Homo sapien
acagaactgtctctcactgccgagc

SEQ ID NO: 3114692 - DNA, 25 bp, Homo sapien
catggtcggttcatggccgggcgga

SEQ ID NO: 3114693 - DNA, 25 bp, Homo sapien
caaacaactgctaggacggtgtggg

SEQ ID NO: 3114694 - DNA, 25 bp, Homo sapien
agaccctgagcaggtcacggcaggt

SEQ ID NO: 3114695 - DNA, 25 bp, Homo sapien
tgggtcccatactcaccatcgtacg

SEQ ID NO: 3114696 - DNA, 25 bp, Homo sapien
gagttccccatgtccgcatctataa

SEQ ID NO: 3114697 - DNA, 25 bp, Homo sapien
tacgatcccagtcttaggacagccc

SEQ ID NO: 3114698 - DNA, 25 bp, Homo sapien
gaaagcagttgctgcgcacaggtgt

SEQ ID NO: 3114699 - DNA, 25 bp, Homo sapien
ggtgtgaagccgcaggtccctttcc

SEQ ID NO: 3114700 - DNA, 25 bp, Homo sapien
gtgtgaagccgcaggtccctttcca

SEQ ID NO: 3114701 - DNA, 25 bp, Homo sapien
tgatgggggtggggggaggtgcact

SEQ ID NO: 3114702 - DNA, 25 bp, Homo sapien
gatgggggtggggggaggtgcactc

SEQ ID NO: 3114703 - DNA, 25 bp, Homo sapien
gatgtcacttgatgtgctgggcaag

SEQ ID NO: 3114704 - DNA, 25 bp, Homo sapien
cagaccttgagcctcagggtgatgt

SEQ ID NO: 3114705 - DNA, 25 bp, Homo sapien
ggtgggtgctctgaacagatcctta

SEQ ID NO: 3114706 - DNA, 25 bp, Homo sapien
tccaggctttcgatggggtgggtgc

SEQ ID NO: 3114707 - DNA, 25 bp, Homo sapien
tattcagacttgtacaggtcgttcg

SEQ ID NO: 3114708 - DNA, 25 bp, Homo sapien
tgtcatcgccttccagttcttcaga

SEQ ID NO: 3114709 - DNA, 25 bp, Homo sapien
tttgccggtgacttccgtccctgca

SEQ ID NO: 3114710 - DNA, 25 bp, Homo sapien
tggtagtcacaacccagttattcag

SEQ ID NO: 3114711 - DNA, 25 bp, Homo sapien
gggccactgacccgcagcacacaga

SEQ ID NO: 3114712 - DNA, 25 bp, Homo sapien
ctcggctctggaactgacaccaggc

SEQ ID NO: 3114713 - DNA, 25 bp, Homo sapien
gcgctcggctctggaactgacacca

SEQ ID NO: 3114714 - DNA, 25 bp, Homo sapien
ctgcgctcggctctggaactgacac

SEQ ID NO: 3114715 - DNA, 25 bp, Homo sapien
tctgctccgggggtcgcggacgcgg

SEQ ID NO: 3114716 - DNA, 25 bp, Homo sapien
gagccggcgccagagcatgcggggc

SEQ ID NO: 3114717 - DNA, 25 bp, Homo sapien
cggctcgccggctccggggtctgct

SEQ ID NO: 3114718 - DNA, 25 bp, Homo sapien
ggcggagccggcgccagagcatgcg

SEQ ID NO: 3114719 - DNA, 25 bp, Homo sapien
ctccgaggccgacggctcttctggg

SEQ ID NO: 3114720 - DNA, 25 bp, Homo sapien
cggagtgattcagccccggctcgct

SEQ ID NO: 3114721 - DNA, 25 bp, Homo sapien
tcacgcggtgatgtcgagcgaagct

SEQ ID NO: 3114722 - DNA, 25 bp, Homo sapien
ggccgcgggcggatggaggtctggg

SEQ ID NO: 3114723 - DNA, 25 bp, Homo sapien
caggtgacagcagcgggacaggagt

SEQ ID NO: 3114724 - DNA, 25 bp, Homo sapien
gggcgttccgctccagcagaccgaa

SEQ ID NO: 3114725 - DNA, 25 bp, Homo sapien
cgggtcggtgcatccccgaaccgag

SEQ ID NO: 3114726 - DNA, 25 bp, Homo sapien
acccaggccgagtgtgtcgagaagg

SEQ ID NO: 3114727 - DNA, 25 bp, Homo sapien
ggaggccctcttcgccatcgttgcc

SEQ ID NO: 3114728 - DNA, 25 bp, Homo sapien
ctggaggccctcttcgccatcgttg

SEQ ID NO: 3114729 - DNA, 25 bp, Homo sapien
aggccctcttcgccatcgttgccag

SEQ ID NO: 3114730 - DNA, 25 bp, Homo sapien
tggaggccctcttcgccatcgttgc

SEQ ID NO: 3114731 - DNA, 25 bp, Homo sapien
gatccacacacgtcacgaatcagtg

SEQ ID NO: 3114732 - DNA, 25 bp, Homo sapien
ccggagtgcgctggcctgcctgcta

SEQ ID NO: 3114733 - DNA, 25 bp, Homo sapien
tgcctgctaccctccggtgtttgtg

SEQ ID NO: 3114734 - DNA, 25 bp, Homo sapien
tgactttttaccagctgtcctgacg

SEQ ID NO: 3114735 - DNA, 25 bp, Homo sapien
gggtggagccaggcgtgcccaccag

SEQ ID NO: 3114736 - DNA, 25 bp, Homo sapien
ccaggcgtgcccaccagatgcgggt

SEQ ID NO: 3114737 - DNA, 25 bp, Homo sapien
ggagccaggcgtgcccaccagatgc

SEQ ID NO: 3114738 - DNA, 25 bp, Homo sapien
caggcgtgcccaccagatgcgggta

SEQ ID NO: 3114739 - DNA, 25 bp, Homo sapien
tcaggacggtgtatgtggagagagg

SEQ ID NO: 3114740 - DNA, 25 bp, Homo sapien
cggtgcctgagcacgggcaggagga

SEQ ID NO: 3114741 - DNA, 25 bp, Homo sapien
tggagagagggtcgaggctcggtgc

SEQ ID NO: 3114742 - DNA, 25 bp, Homo sapien
cgggagggagagacgtgacgatgag

SEQ ID NO: 3114743 - DNA, 25 bp, Homo sapien
gagtccagtttccacacagcacgat

SEQ ID NO: 3114744 - DNA, 25 bp, Homo sapien
cgagtccagtttccacacagcacga

SEQ ID NO: 3114745 - DNA, 25 bp, Homo sapien
tccagtttccacacagcacgatcat

SEQ ID NO: 3114746 - DNA, 25 bp, Homo sapien
gtccagtttccacacagcacgatca

SEQ ID NO: 3114747 - DNA, 25 bp, Homo sapien
tgtgggccgtgtgacctccatggtc

SEQ ID NO: 3114748 - DNA, 25 bp, Homo sapien
tcggactcgggtgtacagacttcta

SEQ ID NO: 3114749 - DNA, 25 bp, Homo sapien
cagggctggacgctgatgtaaactc

SEQ ID NO: 3114750 - DNA, 25 bp, Homo sapien
ttctgtgggtagacaccaggaggca

SEQ ID NO: 3114751 - DNA, 25 bp, Homo sapien
cctgccgtcagccgggtgagccagg

SEQ ID NO: 3114752 - DNA, 25 bp, Homo sapien
ctgccgtcagccgggtgagccaggg

SEQ ID NO: 3114753 - DNA, 25 bp, Homo sapien
tgccgtcagccgggtgagccagggc

SEQ ID NO: 3114754 - DNA, 25 bp, Homo sapien
ccgtgtcttaaaacgccttggtgtg

SEQ ID NO: 3114755 - DNA, 25 bp, Homo sapien
taaaacgccttggtgtgccgtctga

SEQ ID NO: 3114756 - DNA, 25 bp, Homo sapien
tactgttctctaaagacgttaggag

SEQ ID NO: 3114757 - DNA, 25 bp, Homo sapien
tggtgtgccgtctgatactgttctc

SEQ ID NO: 3114758 - DNA, 25 bp, Homo sapien
tcatgacggaagttttggagccaaa

SEQ ID NO: 3114759 - DNA, 25 bp, Homo sapien
gaataaagacgaggatccgaccagc

SEQ ID NO: 3114760 - DNA, 25 bp, Homo sapien
cagagttgttattctcatgacggaa

SEQ ID NO: 3114761 - DNA, 25 bp, Homo sapien
gagtctgtctttcgccaggtccggt

SEQ ID NO: 3114762 - DNA, 25 bp, Homo sapien
actggctcaggtgtgtaccgtgcac

SEQ ID NO: 3114763 - DNA, 25 bp, Homo sapien
gtgtgcaccggctcagatgttcacc

SEQ ID NO: 3114764 - DNA, 25 bp, Homo sapien
ggcactctgggtaagcactgtgtac

SEQ ID NO: 3114765 - DNA, 25 bp, Homo sapien
ttcaccggctcaggtgttcactggc

SEQ ID NO: 3114766 - DNA, 25 bp, Homo sapien
gggcggcagggaatctgctcctgga

SEQ ID NO: 3114767 - DNA, 25 bp, Homo sapien
ggtgtgcaccagctcagatctgagc

SEQ ID NO: 3114768 - DNA, 25 bp, Homo sapien
gtggtcagcacacctttgccagcag

SEQ ID NO: 3114769 - DNA, 25 bp, Homo sapien
cggcagggaatctgctcctggaacc

SEQ ID NO: 3114770 - DNA, 25 bp, Homo sapien
gggcagatccacatgtcccccgagg

SEQ ID NO: 3114771 - DNA, 25 bp, Homo sapien
gcagatccacatgtcccccgaggaa

SEQ ID NO: 3114772 - DNA, 25 bp, Homo sapien
gagcccacggccgtgaacatgcaca

SEQ ID NO: 3114773 - DNA, 25 bp, Homo sapien
aggagcccacggccgtgaacatgca

SEQ ID NO: 3114774 - DNA, 25 bp, Homo sapien
tagggggtgcagaactcacttctaa

SEQ ID NO: 3114775 - DNA, 25 bp, Homo sapien
ctagggggtgcagaactcacttcta

SEQ ID NO: 3114776 - DNA, 25 bp, Homo sapien
gtcggattgcaacgcagcctgcatt

SEQ ID NO: 3114777 - DNA, 25 bp, Homo sapien
attgtcctcgctgaacgcctggtcc

SEQ ID NO: 3114778 - DNA, 25 bp, Homo sapien
ggtgtaactcatccccggagagcaa

SEQ ID NO: 3114779 - DNA, 25 bp, Homo sapien
gagcaaccagaaaggccgtcggatt

SEQ ID NO: 3114780 - DNA, 25 bp, Homo sapien
cagggcggcccccatcgtcccccag

SEQ ID NO: 3114781 - DNA, 25 bp, Homo sapien
gctgatggccatgagagagaagctg

SEQ ID NO: 3114782 - DNA, 25 bp, Homo sapien
ggctgatggccatgagagagaagct

SEQ ID NO: 3114783 - DNA, 25 bp, Homo sapien
gaagctgagagcaaccagagcccac

SEQ ID NO: 3114784 - DNA, 25 bp, Homo sapien
agagagaagctgagagcaaccagag

SEQ ID NO: 3114785 - DNA, 25 bp, Homo sapien
gactcggtttccagctcgtcacagg

SEQ ID NO: 3114786 - DNA, 25 bp, Homo sapien
tggtccgtgttcacatgtgtctctg

SEQ ID NO: 3114787 - DNA, 25 bp, Homo sapien
gcactggacaccgtgtggctgagcc

SEQ ID NO: 3114788 - DNA, 25 bp, Homo sapien
tatcctgtgagttgagcttcctctg

SEQ ID NO: 3114789 - DNA, 25 bp, Homo sapien
tctagccatcagtttgatcagaggc

SEQ ID NO: 3114790 - DNA, 25 bp, Homo sapien
aagccacatacttttctagccatca

SEQ ID NO: 3114791 - DNA, 25 bp, Homo sapien
acttttctagccatcagtttgatca

SEQ ID NO: 3114792 - DNA, 25 bp, Homo sapien
ccatcagtttgatcagaggcaagat

SEQ ID NO: 3114793 - DNA, 25 bp, Homo sapien
tcttgatggtagataactggtctct

SEQ ID NO: 3114794 - DNA, 25 bp, Homo sapien
acattcttgatggtagataactggt

SEQ ID NO: 3114795 - DNA, 25 bp, Homo sapien
tgatggtagataactggtctctggc

SEQ ID NO: 3114796 - DNA, 25 bp, Homo sapien
gatggtagataactggtctctggcc

SEQ ID NO: 3114797 - DNA, 25 bp, Homo sapien
agtgtcgctccggatgtggatagaa

SEQ ID NO: 3114798 - DNA, 25 bp, Homo sapien
ccggatgtggatagaaggagacact

SEQ ID NO: 3114799 - DNA, 25 bp, Homo sapien
acagaccaggtgcttccttcgtcct

SEQ ID NO: 3114800 - DNA, 25 bp, Homo sapien
aggtgcttccttcgtcctgaccaca

SEQ ID NO: 3114801 - DNA, 25 bp, Homo sapien
tcgaccaggacacttgactttcctg

SEQ ID NO: 3114802 - DNA, 25 bp, Homo sapien
tgttgctggcacctgccgtgccttg

SEQ ID NO: 3114803 - DNA, 25 bp, Homo sapien
ggctactcttgagtggtccccaggc

SEQ ID NO: 3114804 - DNA, 25 bp, Homo sapien
ccccagagggtcttgtctggacctc

SEQ ID NO: 3114805 - DNA, 25 bp, Homo sapien
agggcgtgctccttgccacggaaca

SEQ ID NO: 3114806 - DNA, 25 bp, Homo sapien
tccgtgtggctttcccggtggagca

SEQ ID NO: 3114807 - DNA, 25 bp, Homo sapien
cagagaatgggcaacttccagggag

SEQ ID NO: 3114808 - DNA, 25 bp, Homo sapien
tcatggctgctgcacgtgggttgct

SEQ ID NO: 3114809 - DNA, 25 bp, Homo sapien
gagcttcagggcagtaggaaggggg

SEQ ID NO: 3114810 - DNA, 25 bp, Homo sapien
gcttcagggcagtaggaagggggag

SEQ ID NO: 3114811 - DNA, 25 bp, Homo sapien
agcttcagggcagtaggaaggggga

SEQ ID NO: 3114812 - DNA, 25 bp, Homo sapien
cacgggaagtctgggctaagagaca

SEQ ID NO: 3114813 - DNA, 25 bp, Homo sapien
acaggggccagaagatgaacaatgg

SEQ ID NO: 3114814 - DNA, 25 bp, Homo sapien
attaagttacatgcagacaacaggg

SEQ ID NO: 3114815 - DNA, 25 bp, Homo sapien
tgcctggttgtggtattaagttaca

SEQ ID NO: 3114816 - DNA, 25 bp, Homo sapien
tccaagtcggccgtcgtcttctgca

SEQ ID NO: 3114817 - DNA, 25 bp, Homo sapien
aagtcggccgtcgtcttctgcagct

SEQ ID NO: 3114818 - DNA, 25 bp, Homo sapien
tcggccgtcgtcttctgcagctctg

SEQ ID NO: 3114819 - DNA, 25 bp, Homo sapien
tgtgatccaagtcggccgtcgtctt

SEQ ID NO: 3114820 - DNA, 25 bp, Homo sapien
taaggctttgagttacagctgcctc

SEQ ID NO: 3114821 - DNA, 25 bp, Homo sapien
cagaggctaaggctttgagttacag

SEQ ID NO: 3114822 - DNA, 25 bp, Homo sapien
gctaaggctttgagttacagctgcc

SEQ ID NO: 3114823 - DNA, 25 bp, Homo sapien
gctttgagttacagctgcctcccca

SEQ ID NO: 3114824 - DNA, 25 bp, Homo sapien
aaaggcaggagtgaacttccacaca

SEQ ID NO: 3114825 - DNA, 25 bp, Homo sapien
aggcccatgacaaacaccgtctcca

SEQ ID NO: 3114826 - DNA, 25 bp, Homo sapien
acagcagcaatggcagaaccaaagg

SEQ ID NO: 3114827 - DNA, 25 bp, Homo sapien
caaacaccgtctccagcgggcagag

SEQ ID NO: 3114828 - DNA, 25 bp, Homo sapien
agatctcacggatggccaggaccca

SEQ ID NO: 3114829 - DNA, 25 bp, Homo sapien
gccctgggaagatctcacggatggc

SEQ ID NO: 3114830 - DNA, 25 bp, Homo sapien
agtccagggcagctaactttagtta

SEQ ID NO: 3114831 - DNA, 25 bp, Homo sapien
ttattatagaaagggcagtagcaga

SEQ ID NO: 3114832 - DNA, 25 bp, Homo sapien
aaacgtctcggggtcagtgactgcc

SEQ ID NO: 3114833 - DNA, 25 bp, Homo sapien
ctctaaaaatagtcatgctgagagc

SEQ ID NO: 3114834 - DNA, 25 bp, Homo sapien
tgcaggatgcaaacgtctcggggtc

SEQ ID NO: 3114835 - DNA, 25 bp, Homo sapien
gggtctctaaaaatagtcatgctga

SEQ ID NO: 3114836 - DNA, 25 bp, Homo sapien
tggcctcggccccaagtggtgtccc

SEQ ID NO: 3114837 - DNA, 25 bp, Homo sapien
cggtctctcccatgcgggtcctggg

SEQ ID NO: 3114838 - DNA, 25 bp, Homo sapien
aggtgtctcgaagccgcggtctctc

SEQ ID NO: 3114839 - DNA, 25 bp, Homo sapien
caagtggtgtcccggagatgcagca

SEQ ID NO: 3114840 - DNA, 25 bp, Homo sapien
atccgtaacctgcatcttggcctgc

SEQ ID NO: 3114841 - DNA, 25 bp, Homo sapien
tccgtaacctgcatcttggcctgca

SEQ ID NO: 3114842 - DNA, 25 bp, Homo sapien
gagatgtcctcatcgcggacgtggc

SEQ ID NO: 3114843 - DNA, 25 bp, Homo sapien
gactgttgttgacgaggtcacttcc

SEQ ID NO: 3114844 - DNA, 25 bp, Homo sapien
tgtcctcaggtgtctcgaagccatg

SEQ ID NO: 3114845 - DNA, 25 bp, Homo sapien
tccactgcgttaacaaaagagcctt

SEQ ID NO: 3114846 - DNA, 25 bp, Homo sapien
tccccagagacaaggtggtcgctgc

SEQ ID NO: 3114847 - DNA, 25 bp, Homo sapien
tggtcgctgctacggctgctgcact

SEQ ID NO: 3114848 - DNA, 25 bp, Homo sapien
tagccagcccgtgtgcttccaggct

SEQ ID NO: 3114849 - DNA, 25 bp, Homo sapien
ccagtggagcgagtgtagccagccc

SEQ ID NO: 3114850 - DNA, 25 bp, Homo sapien
ccgacagttgcatcatcactttcca

SEQ ID NO: 3114851 - DNA, 25 bp, Homo sapien
tcgtgctgccgcccgaggcagtgct

SEQ ID NO: 3114852 - DNA, 25 bp, Homo sapien
cttgcgaggcagtgagtgcaccgtc

SEQ ID NO: 3114853 - DNA, 25 bp, Homo sapien
agtgctcctgccgtccgacagttgc

SEQ ID NO: 3114854 - DNA, 25 bp, Homo sapien
ttctcaggatcgattgccactggtc

SEQ ID NO: 3114855 - DNA, 25 bp, Homo sapien
ccaggtgaccttggagggccatgcc

SEQ ID NO: 3114856 - DNA, 25 bp, Homo sapien
cccgggctcctcttcaccaggtgac

SEQ ID NO: 3114857 - DNA, 25 bp, Homo sapien
tcgattgccactggtctgccccaga

SEQ ID NO: 3114858 - DNA, 25 bp, Homo sapien
gttgtggccggtggtgccagactgc

SEQ ID NO: 3114859 - DNA, 25 bp, Homo sapien
atgttgtggccggtggtgccagact

SEQ ID NO: 3114860 - DNA, 25 bp, Homo sapien
tgtttcatgttgtggccggtggtgc

SEQ ID NO: 3114861 - DNA, 25 bp, Homo sapien
tttcatgttgtggccggtggtgcca

SEQ ID NO: 3114862 - DNA, 25 bp, Homo sapien
gatggcccagctgccctagtgtgtg

SEQ ID NO: 3114863 - DNA, 25 bp, Homo sapien
tagtgtgtgcttgccttgtccctcg

SEQ ID NO: 3114864 - DNA, 25 bp, Homo sapien
tgagccgatgaccaccttctacaag

SEQ ID NO: 3114865 - DNA, 25 bp, Homo sapien
aatatggcctatctgccaggcaggg

SEQ ID NO: 3114866 - DNA, 25 bp, Homo sapien
ccaatgacaagtgcgagacagcctg

SEQ ID NO: 3114867 - DNA, 25 bp, Homo sapien
tgccaggaccaatgtgagctcgagg

SEQ ID NO: 3114868 - DNA, 25 bp, Homo sapien
tcacgcagacgaaaagccggagttc

SEQ ID NO: 3114869 - DNA, 25 bp, Homo sapien
cgtgctgtgcgcagaaaccttcggc

SEQ ID NO: 3114870 - DNA, 25 bp, Homo sapien
ccagggccgcccctctcagccgggc

SEQ ID NO: 3114871 - DNA, 25 bp, Homo sapien
ctccagggccgcccctctcagccgg

SEQ ID NO: 3114872 - DNA, 25 bp, Homo sapien
ggctctgcccgcactgccagcccgc

SEQ ID NO: 3114873 - DNA, 25 bp, Homo sapien
gctctgcccgcactgccagcccgca

SEQ ID NO: 3114874 - DNA, 25 bp, Homo sapien
catcttcctcttgcgcctcgggccc

SEQ ID NO: 3114875 - DNA, 25 bp, Homo sapien
ctcatcttcctcttgcgcctcgggc

SEQ ID NO: 3114876 - DNA, 25 bp, Homo sapien
cttcctcttgcgcctcgggcccacc

SEQ ID NO: 3114877 - DNA, 25 bp, Homo sapien
tcctcttgcgcctcgggcccacccg

SEQ ID NO: 3114878 - DNA, 25 bp, Homo sapien
tcggcagatcgcagagcagcgggtc

SEQ ID NO: 3114879 - DNA, 25 bp, Homo sapien
gtcctgcaccaccatagccagaccc

SEQ ID NO: 3114880 - DNA, 25 bp, Homo sapien
ctggatcggcagatcgcagagcagc

SEQ ID NO: 3114881 - DNA, 25 bp, Homo sapien
ctgcaccaccatagccagaccctcc

SEQ ID NO: 3114882 - DNA, 25 bp, Homo sapien
caacaaagaacaagccgatagtggc

SEQ ID NO: 3114883 - DNA, 25 bp, Homo sapien
ccaggcttcgggactgagtaaggca

SEQ ID NO: 3114884 - DNA, 25 bp, Homo sapien
gatagtggccaaaaagtggtgctcc

SEQ ID NO: 3114885 - DNA, 25 bp, Homo sapien
ggtttcccaattcatcagagcccca

SEQ ID NO: 3114886 - DNA, 25 bp, Homo sapien
ctagggctatttgggagttgacttc

SEQ ID NO: 3114887 - DNA, 25 bp, Homo sapien
gaccgtcattgcctggccgtattct

SEQ ID NO: 3114888 - DNA, 25 bp, Homo sapien
catcttgcacactcggaccgtcatt

SEQ ID NO: 3114889 - DNA, 25 bp, Homo sapien
ggccgtattctagggctatttggga

SEQ ID NO: 3114890 - DNA, 25 bp, Homo sapien
ctgaagggaggagggtagcacttac

SEQ ID NO: 3114891 - DNA, 25 bp, Homo sapien
aggtcttcctgctgtgaaagcctgg

SEQ ID NO: 3114892 - DNA, 25 bp, Homo sapien
ggtcttcctgctgtgaaagcctgga

SEQ ID NO: 3114893 - DNA, 25 bp, Homo sapien
tcttcctgctgtgaaagcctggacc

SEQ ID NO: 3114894 - DNA, 25 bp, Homo sapien
ttcctgctgtgaaagcctggaccac

SEQ ID NO: 3114895 - DNA, 25 bp, Homo sapien
aagatccatggtgagaacccaaagc

SEQ ID NO: 3114896 - DNA, 25 bp, Homo sapien
aggaaaggaaccaacacctctgtgc

SEQ ID NO: 3114897 - DNA, 25 bp, Homo sapien
agatccatggtgagaacccaaagcc

SEQ ID NO: 3114898 - DNA, 25 bp, Homo sapien
ctccgatggcaggaaaggaaccaac

SEQ ID NO: 3114899 - DNA, 25 bp, Homo sapien
tcctgcttgagctgcacgtatctct

SEQ ID NO: 3114900 - DNA, 25 bp, Homo sapien
ttgagctgcacgtatctctggatgg

SEQ ID NO: 3114901 - DNA, 25 bp, Homo sapien
ccccttcacgctcctgcttgagctg

SEQ ID NO: 3114902 - DNA, 25 bp, Homo sapien
gatgtgctgaatgcccccttcacgc

SEQ ID NO: 3114903 - DNA, 25 bp, Homo sapien
tttgacatattttctttgcccactt

SEQ ID NO: 3114904 - DNA, 25 bp, Homo sapien
gagactgagttgttagcaggtgtgc

SEQ ID NO: 3114905 - DNA, 25 bp, Homo sapien
aagtcatggacttttctgggaaatg

SEQ ID NO: 3114906 - DNA, 25 bp, Homo sapien
agcaccatcgtcactattaagcaga

SEQ ID NO: 3114907 - DNA, 25 bp, Homo sapien
gcaggtgtgcttagctcttgatagt

SEQ ID NO: 3114908 - DNA, 25 bp, Homo sapien
gcacccagccttttaccatgtgggt

SEQ ID NO: 3114909 - DNA, 25 bp, Homo sapien
acgtgtaccttgggaactggctcac

SEQ ID NO: 3114910 - DNA, 25 bp, Homo sapien
gcagacatttcagttggtagaatcc

SEQ ID NO: 3114911 - DNA, 25 bp, Homo sapien
acctgctaatagcaccatcgtcact

SEQ ID NO: 3114912 - DNA, 25 bp, Homo sapien
gctcttgatagtgaacgtgtacctt

SEQ ID NO: 3114913 - DNA, 25 bp, Homo sapien
taaaagcgtccataagccaccattc

SEQ ID NO: 3114914 - DNA, 25 bp, Homo sapien
acccacatggtaaaaggctgggtgc

SEQ ID NO: 3114915 - DNA, 25 bp, Homo sapien
aagtgggcaaagaaaatatgtcaaa

SEQ ID NO: 3114916 - DNA, 25 bp, Homo sapien
gtgagccagttcccaaggtacacgt

SEQ ID NO: 3114917 - DNA, 25 bp, Homo sapien
gaatggtggcttatggacgctttta

SEQ ID NO: 3114918 - DNA, 25 bp, Homo sapien
ggattctaccaactgaaatgtctgc

SEQ ID NO: 3114919 - DNA, 25 bp, Homo sapien
agtgacgatggtgctattagcaggt

SEQ ID NO: 3114920 - DNA, 25 bp, Homo sapien
catttcccagaaaagtccatgactt

SEQ ID NO: 3114921 - DNA, 25 bp, Homo sapien
actatcaagagctaagcacacctgc

SEQ ID NO: 3114922 - DNA, 25 bp, Homo sapien
gcacacctgctaacaactcagtctc

SEQ ID NO: 3114923 - DNA, 25 bp, Homo sapien
aaggtacacgttcactatcaagagc

SEQ ID NO: 3114924 - DNA, 25 bp, Homo sapien
tctgcttaatagtgacgatggtgct

SEQ ID NO: 3114925 - DNA, 25 bp, Homo sapien
gacagtgtccccaagtgaagatacc

SEQ ID NO: 3114926 - DNA, 25 bp, Homo sapien
tacaggtgtaccatccaaaactagg

SEQ ID NO: 3114927 - DNA, 25 bp, Homo sapien
tgaagatacccagcagctcggatgg

SEQ ID NO: 3114928 - DNA, 25 bp, Homo sapien
gaacgacccgcactgtctgtgacag

SEQ ID NO: 3114929 - DNA, 25 bp, Homo sapien
ggcagctacaaggaggctctgttct

SEQ ID NO: 3114930 - DNA, 25 bp, Homo sapien
ctgggctgttctgtacaatgtgcag

SEQ ID NO: 3114931 - DNA, 25 bp, Homo sapien
gtctgaggcagctacaaggaggctc

SEQ ID NO: 3114932 - DNA, 25 bp, Homo sapien
tgttctgtacaatgtgcagattggg

SEQ ID NO: 3114933 - DNA, 25 bp, Homo sapien
tctgcatgacgtgggcttgaggcat

SEQ ID NO: 3114934 - DNA, 25 bp, Homo sapien
gggaatgcaggtaaaccacgtgccc

SEQ ID NO: 3114935 - DNA, 25 bp, Homo sapien
ggtaaaccacgtgccctgagcaggg

SEQ ID NO: 3114936 - DNA, 25 bp, Homo sapien
ggcatgcagtcctatgggacctggg

SEQ ID NO: 3114937 - DNA, 25 bp, Homo sapien
gatggtacgtcctccacacgtagga

SEQ ID NO: 3114938 - DNA, 25 bp, Homo sapien
tcctgcagaggtcagatggtacgtc

SEQ ID NO: 3114939 - DNA, 25 bp, Homo sapien
cagaggtcagatggtacgtcctcca

SEQ ID NO: 3114940 - DNA, 25 bp, Homo sapien
ggtcagatggtacgtcctccacacg

SEQ ID NO: 3114941 - DNA, 25 bp, Homo sapien
ggaaacctcgtctcgattccggatg

SEQ ID NO: 3114942 - DNA, 25 bp, Homo sapien
gatgaaggaaacctcgtctcgattc

SEQ ID NO: 3114943 - DNA, 25 bp, Homo sapien
ctcgtctcgattccggatgccgtag

SEQ ID NO: 3114944 - DNA, 25 bp, Homo sapien
tgaaggaaacctcgtctcgattccg

SEQ ID NO: 3114945 - DNA, 25 bp, Homo sapien
tgaggccaccacaacgtcctttctg

SEQ ID NO: 3114946 - DNA, 25 bp, Homo sapien
ggcacgatgattcgaggacccattc

SEQ ID NO: 3114947 - DNA, 25 bp, Homo sapien
tacatgaaaggagggagcactggct

SEQ ID NO: 3114948 - DNA, 25 bp, Homo sapien
gaggtcagtctcaggccaagtacat

SEQ ID NO: 3114949 - DNA, 25 bp, Homo sapien
gtggcgccatcttggactataggac

SEQ ID NO: 3114950 - DNA, 25 bp, Homo sapien
ctcagtctttgctacccaggttact

SEQ ID NO: 3114951 - DNA, 25 bp, Homo sapien
taggactcgcctgtaccaattctct

SEQ ID NO: 3114952 - DNA, 25 bp, Homo sapien
tggagatcatggtaacacagttgtg

SEQ ID NO: 3114953 - DNA, 25 bp, Homo sapien
actcgctcgtcaccatcctagccgt

SEQ ID NO: 3114954 - DNA, 25 bp, Homo sapien
cgctcgtcaccatcctagccgtgtg

SEQ ID NO: 3114955 - DNA, 25 bp, Homo sapien
gtgcactcgctcgtcaccatcctag

SEQ ID NO: 3114956 - DNA, 25 bp, Homo sapien
ttcgtgcactcgctcgtcaccatcc

SEQ ID NO: 3114957 - DNA, 25 bp, Homo sapien
ctgtgcacgcggccagcttgatggg

SEQ ID NO: 3114958 - DNA, 25 bp, Homo sapien
tgtgcacgcggccagcttgatgggt

SEQ ID NO: 3114959 - DNA, 25 bp, Homo sapien
tgcacgcggccagcttgatgggtgc

SEQ ID NO: 3114960 - DNA, 25 bp, Homo sapien
cacgcggccagcttgatgggtgccc

SEQ ID NO: 3114961 - DNA, 25 bp, Homo sapien
ccaggcttgatggttctggccccgg

SEQ ID NO: 3114962 - DNA, 25 bp, Homo sapien
agcccaggcttgatggttctggccc

SEQ ID NO: 3114963 - DNA, 25 bp, Homo sapien
tggcagtcaactccgccgccagttg

SEQ ID NO: 3114964 - DNA, 25 bp, Homo sapien
ccggggttggcagtcaactccgccg

SEQ ID NO: 3114965 - DNA, 25 bp, Homo sapien
cctcagggattcctgtgtctacagg

SEQ ID NO: 3114966 - DNA, 25 bp, Homo sapien
ctcagggattcctgtgtctacaggc

SEQ ID NO: 3114967 - DNA, 25 bp, Homo sapien
tagcagggaacctcttgttctgtct

SEQ ID NO: 3114968 - DNA, 25 bp, Homo sapien
cggagccgcccagcgctgacactgc

SEQ ID NO: 3114969 - DNA, 25 bp, Homo sapien
tgacactgcggtccgctcccaccag

SEQ ID NO: 3114970 - DNA, 25 bp, Homo sapien
cccagcgctgacactgcggtccgct

SEQ ID NO: 3114971 - DNA, 25 bp, Homo sapien
actgcggtccgctcccaccaggtcc

SEQ ID NO: 3114972 - DNA, 25 bp, Homo sapien
tcagggaagggagatggggtgggac

SEQ ID NO: 3114973 - DNA, 25 bp, Homo sapien
tgattcttcacttgcttcatctgga

SEQ ID NO: 3114974 - DNA, 25 bp, Homo sapien
gtccgaagaaaagagagtcagggaa

SEQ ID NO: 3114975 - DNA, 25 bp, Homo sapien
ttatagggtttgggcgggcagtgga

SEQ ID NO: 3114976 - DNA, 25 bp, Homo sapien
tgggcaggacagacgcacaggccat

SEQ ID NO: 3114977 - DNA, 25 bp, Homo sapien
gtcaggtgggagacgctgggcagga

SEQ ID NO: 3114978 - DNA, 25 bp, Homo sapien
gcacctggccgcgtcaggtgggaga

SEQ ID NO: 3114979 - DNA, 25 bp, Homo sapien
gacagacgcacaggccatgtgtctg

SEQ ID NO: 3114980 - DNA, 25 bp, Homo sapien
ttcctgagctttgacttctgtgacc

SEQ ID NO: 3114981 - DNA, 25 bp, Homo sapien
cctgagctttgacttctgtgaccct

SEQ ID NO: 3114982 - DNA, 25 bp, Homo sapien
tgagctttgacttctgtgaccctgg

SEQ ID NO: 3114983 - DNA, 25 bp, Homo sapien
gagctttgacttctgtgaccctggt

SEQ ID NO: 3114984 - DNA, 25 bp, Homo sapien
ttcccagcgcccaccgccaggtccg

SEQ ID NO: 3114985 - DNA, 25 bp, Homo sapien
cgcccaccgccaggtccggaccgat

SEQ ID NO: 3114986 - DNA, 25 bp, Homo sapien
accgattcccgggcccgatgcggtg

SEQ ID NO: 3114987 - DNA, 25 bp, Homo sapien
tggaggtggatcctcttcccagcgc

SEQ ID NO: 3114988 - DNA, 25 bp, Homo sapien
gcagtgagcgccgggaactggctgc

SEQ ID NO: 3114989 - DNA, 25 bp, Homo sapien
ctgcgcagaaggggacggaagccgg

SEQ ID NO: 3114990 - DNA, 25 bp, Homo sapien
gcagccgccgaccacggaagcaccc

SEQ ID NO: 3114991 - DNA, 25 bp, Homo sapien
tgggactcggaccccggcgcggagc

SEQ ID NO: 3114992 - DNA, 25 bp, Homo sapien
agcagccgccgaccacggaagcacc

SEQ ID NO: 3114993 - DNA, 25 bp, Homo sapien
cagcagccgccgaccacggaagcac

SEQ ID NO: 3114994 - DNA, 25 bp, Homo sapien
tggctctgccccgaaccctcggggc

SEQ ID NO: 3114995 - DNA, 25 bp, Homo sapien
ctggctctgccccgaaccctcgggg

SEQ ID NO: 3114996 - DNA, 25 bp, Homo sapien
ctcggggcggtgggcgctacgcccg

SEQ ID NO: 3114997 - DNA, 25 bp, Homo sapien
gcctgggggtgggcgcgtctgttcc

SEQ ID NO: 3114998 - DNA, 25 bp, Homo sapien
tggaacggacgctgacgtgaccgtc

SEQ ID NO: 3114999 - DNA, 25 bp, Homo sapien
tgccagtcggcctggaacggacgct

SEQ ID NO: 3115000 - DNA, 25 bp, Homo sapien
gttaatgtagaacggagactgccag

SEQ ID NO: 3115001 - DNA, 25 bp, Homo sapien
gacgctgacgtgaccgtctccgcag

SEQ ID NO: 3115002 - DNA, 25 bp, Homo sapien
gctgctctgccccacatatgtgcga

SEQ ID NO: 3115003 - DNA, 25 bp, Homo sapien
cacgtctgacgatggacggctgctg

SEQ ID NO: 3115004 - DNA, 25 bp, Homo sapien
cctgtgggttgttatgaggcacaaa

SEQ ID NO: 3115005 - DNA, 25 bp, Homo sapien
tgacacactcgaggcctcaggaaat

SEQ ID NO: 3115006 - DNA, 25 bp, Homo sapien
cttcatctgcaaagcgggggtgacc

SEQ ID NO: 3115007 - DNA, 25 bp, Homo sapien
ttcatctgcaaagcgggggtgacca

SEQ ID NO: 3115008 - DNA, 25 bp, Homo sapien
tcatctgcaaagcgggggtgaccat

SEQ ID NO: 3115009 - DNA, 25 bp, Homo sapien
gctgccctgctctagctggtcgctg

SEQ ID NO: 3115010 - DNA, 25 bp, Homo sapien
ctgccggctggtcgaagaactccaa

SEQ ID NO: 3115011 - DNA, 25 bp, Homo sapien
gaaatagatgctgcggtatgggccc

SEQ ID NO: 3115012 - DNA, 25 bp, Homo sapien
tcttttgccccatccgtcggcaaaa

SEQ ID NO: 3115013 - DNA, 25 bp, Homo sapien
aactgcagtgacaggcacttcagga

SEQ ID NO: 3115014 - DNA, 25 bp, Homo sapien
ttcaggagggccctcgctgctatgt

SEQ ID NO: 3115015 - DNA, 25 bp, Homo sapien
gtgacaggcacttcaggagggccct

SEQ ID NO: 3115016 - DNA, 25 bp, Homo sapien
ggccctcgctgctatgttcacatta

SEQ ID NO: 3115017 - DNA, 25 bp, Homo sapien
aggccttcccggagatagggtggtg

SEQ ID NO: 3115018 - DNA, 25 bp, Homo sapien
cagcgtggggagcattcaggagggc

SEQ ID NO: 3115019 - DNA, 25 bp, Homo sapien
aggaggccttcccggagatagggtg

SEQ ID NO: 3115020 - DNA, 25 bp, Homo sapien
gcttcccggagatagggtggtggga

SEQ ID NO: 3115021 - DNA, 25 bp, Homo sapien
tcccagagcccgtgaagtcccctaa

SEQ ID NO: 3115022 - DNA, 25 bp, Homo sapien
cgtgaagtcccctaaacctgggctg

SEQ ID NO: 3115023 - DNA, 25 bp, Homo sapien
tgaagtcccctaaacctgggctgct

SEQ ID NO: 3115024 - DNA, 25 bp, Homo sapien
gaagtcccctaaacctgggctgctg

SEQ ID NO: 3115025 - DNA, 25 bp, Homo sapien
tctgtgccattaggaagtcgccgga

SEQ ID NO: 3115026 - DNA, 25 bp, Homo sapien
gatgcggcctcggagttctgtgcca

SEQ ID NO: 3115027 - DNA, 25 bp, Homo sapien
gatgttcatgcagaagtacatgccg

SEQ ID NO: 3115028 - DNA, 25 bp, Homo sapien
tgatgtacacgtacagggtccccgg

SEQ ID NO: 3115029 - DNA, 25 bp, Homo sapien
gagccgcctgcaaatgagtcaaagc

SEQ ID NO: 3115030 - DNA, 25 bp, Homo sapien
tgctgcctccgtcaagggcaggcga

SEQ ID NO: 3115031 - DNA, 25 bp, Homo sapien
agcctttaagttcccgtccattctg

SEQ ID NO: 3115032 - DNA, 25 bp, Homo sapien
ggcgacactgtgtcctcggccttct

SEQ ID NO: 3115033 - DNA, 25 bp, Homo sapien
ctcgggtgcgatcattcagccagga

SEQ ID NO: 3115034 - DNA, 25 bp, Homo sapien
tgcaccggatgttgggagagcccat

SEQ ID NO: 3115035 - DNA, 25 bp, Homo sapien
gacagtttggaagtggagcctccct

SEQ ID NO: 3115036 - DNA, 25 bp, Homo sapien
tctgccctgcaggtttggaaaggcc

SEQ ID NO: 3115037 - DNA, 25 bp, Homo sapien
gggctccagtgctcgcagcaagacg

SEQ ID NO: 3115038 - DNA, 25 bp, Homo sapien
acacggctggcggtgcctttccgga

SEQ ID NO: 3115039 - DNA, 25 bp, Homo sapien
cgaagctgacgcatggtctccagac

SEQ ID NO: 3115040 - DNA, 25 bp, Homo sapien
tccttgaggacacggctggcggtgc

SEQ ID NO: 3115041 - DNA, 25 bp, Homo sapien
caggtccctctggtcaaagctcttg

SEQ ID NO: 3115042 - DNA, 25 bp, Homo sapien
cacgctccagccatacagcttcatc

SEQ ID NO: 3115043 - DNA, 25 bp, Homo sapien
gggaccacgctccagccatacagct

SEQ ID NO: 3115044 - DNA, 25 bp, Homo sapien
cctctggtcaaagctcttgttgatg

SEQ ID NO: 3115045 - DNA, 25 bp, Homo sapien
ccgggcccactcccctgcatggccg

SEQ ID NO: 3115046 - DNA, 25 bp, Homo sapien
actcccctgcatggccgacgcccac

SEQ ID NO: 3115047 - DNA, 25 bp, Homo sapien
ctgcatggccgacgcccacccgggc

SEQ ID NO: 3115048 - DNA, 25 bp, Homo sapien
atggccgacgcccacccgggctgct

SEQ ID NO: 3115049 - DNA, 25 bp, Homo sapien
caggcctgtgtgtcctgctcagcca

SEQ ID NO: 3115050 - DNA, 25 bp, Homo sapien
tcaggcctgtgtgtcctgctcagcc

SEQ ID NO: 3115051 - DNA, 25 bp, Homo sapien
aggcctgtgtgtcctgctcagccac

SEQ ID NO: 3115052 - DNA, 25 bp, Homo sapien
aaaaaatcttgtctgggcaggccct

SEQ ID NO: 3115053 - DNA, 25 bp, Homo sapien
taaaaaatcttgtctgggcaggccc

SEQ ID NO: 3115054 - DNA, 25 bp, Homo sapien
aaaatcttgtctgggcaggcccttt

SEQ ID NO: 3115055 - DNA, 25 bp, Homo sapien
aatcttgtctgggcaggccctttgc

SEQ ID NO: 3115056 - DNA, 25 bp, Homo sapien
gaagagctagctccagacatgggtt

SEQ ID NO: 3115057 - DNA, 25 bp, Homo sapien
catgggttgatcacctagaggagct

SEQ ID NO: 3115058 - DNA, 25 bp, Homo sapien
gggctttcggctcccacactgatga

SEQ ID NO: 3115059 - DNA, 25 bp, Homo sapien
gcaaacaggctcatagccaagctgt

SEQ ID NO: 3115060 - DNA, 25 bp, Homo sapien
ttatgtacaacgagaacacgcggcg

SEQ ID NO: 3115061 - DNA, 25 bp, Homo sapien
tctgtggccaccctgaagaatgtgc

SEQ ID NO: 3115062 - DNA, 25 bp, Homo sapien
tgctcatgctgtttgacaagttccg

SEQ ID NO: 3115063 - DNA, 25 bp, Homo sapien
tccgcagcgtgctggtggtgaccac

SEQ ID NO: 3115064 - DNA, 25 bp, Homo sapien
gggactcgccactgaaccagaggat

SEQ ID NO: 3115065 - DNA, 25 bp, Homo sapien
agagctacttcccagcggggactcg

SEQ ID NO: 3115066 - DNA, 25 bp, Homo sapien
cagcatggacaactccagcgcagag

SEQ ID NO: 3115067 - DNA, 25 bp, Homo sapien
tggacaactccagcgcagagctact

SEQ ID NO: 3115068 - DNA, 25 bp, Homo sapien
tagacagatgtgtatctgaggacac

SEQ ID NO: 3115069 - DNA, 25 bp, Homo sapien
tcttacttgcctgggatatatcccc

SEQ ID NO: 3115070 - DNA, 25 bp, Homo sapien
ccttgttgaccctcccagagatgag

SEQ ID NO: 3115071 - DNA, 25 bp, Homo sapien
catgtgaagtctggatatcttgcag

SEQ ID NO: 3115072 - DNA, 25 bp, Homo sapien
tagaggaaccaacatggcgtgtctc

SEQ ID NO: 3115073 - DNA, 25 bp, Homo sapien
tacaaaccagaccacatgactgcgg

SEQ ID NO: 3115074 - DNA, 25 bp, Homo sapien
gcagcacttgtcaccgctctaggga

SEQ ID NO: 3115075 - DNA, 25 bp, Homo sapien
tccaaggacagctgacacggtgagg

SEQ ID NO: 3115076 - DNA, 25 bp, Homo sapien
tgaagggtcgaacacagtaacgtag

SEQ ID NO: 3115077 - DNA, 25 bp, Homo sapien
cccctggtggcagaacttgtagttg

SEQ ID NO: 3115078 - DNA, 25 bp, Homo sapien
tatacagatccagcaattctgggag

SEQ ID NO: 3115079 - DNA, 25 bp, Homo sapien
ttattcgtgaacctccatggaagga

SEQ ID NO: 3115080 - DNA, 25 bp, Homo sapien
cctggcctctagcagggaaagagcc

SEQ ID NO: 3115081 - DNA, 25 bp, Homo sapien
tttataaacgcgaactgggctacca

SEQ ID NO: 3115082 - DNA, 25 bp, Homo sapien
agttggccgtctctgcagaccctgg

SEQ ID NO: 3115083 - DNA, 25 bp, Homo sapien
tcagctcacagatttccagttggcc

SEQ ID NO: 3115084 - DNA, 25 bp, Homo sapien
caattgttttgtcatggggccgggc

SEQ ID NO: 3115085 - DNA, 25 bp, Homo sapien
ctcaattgttttgtcatggggccgg

SEQ ID NO: 3115086 - DNA, 25 bp, Homo sapien
agccgctcaattgttttgtcatggg

SEQ ID NO: 3115087 - DNA, 25 bp, Homo sapien
aaagccgctcaattgttttgtcatg

SEQ ID NO: 3115088 - DNA, 25 bp, Homo sapien
agtagcacaatcctcatcctcctga

SEQ ID NO: 3115089 - DNA, 25 bp, Homo sapien
tgcagtagcacaatcctcatcctcc

SEQ ID NO: 3115090 - DNA, 25 bp, Homo sapien
gtgtctcccaggctggagtacagtg

SEQ ID NO: 3115091 - DNA, 25 bp, Homo sapien
agacggagtcttgccgtgtctccca

SEQ ID NO: 3115092 - DNA, 25 bp, Homo sapien
gccctcagtttccatcataggggta

SEQ ID NO: 3115093 - DNA, 25 bp, Homo sapien
caaaggagtttagattatgaaaaga

SEQ ID NO: 3115094 - DNA, 25 bp, Homo sapien
ttaaacttgttgatatggcagaaag

SEQ ID NO: 3115095 - DNA, 25 bp, Homo sapien
atcataggggtaactactgttccca

SEQ ID NO: 3115096 - DNA, 25 bp, Homo sapien
ggtccccttatatacagggagctgg

SEQ ID NO: 3115097 - DNA, 25 bp, Homo sapien
cccttatatacagggagctgggccc

SEQ ID NO: 3115098 - DNA, 25 bp, Homo sapien
ccagggtccccttatatacagggag

SEQ ID NO: 3115099 - DNA, 25 bp, Homo sapien
tccccttatatacagggagctgggc

SEQ ID NO: 3115100 - DNA, 25 bp, Homo sapien
gacacaatgatggtcctctcagtct

SEQ ID NO: 3115101 - DNA, 25 bp, Homo sapien
ggacacaatgatggtcctctcagtc

SEQ ID NO: 3115102 - DNA, 25 bp, Homo sapien
tccacgcgcaggatgtaggcgtgca

SEQ ID NO: 3115103 - DNA, 25 bp, Homo sapien
ccttggagccgtgcgcgcgcaactg

SEQ ID NO: 3115104 - DNA, 25 bp, Homo sapien
ccgggtgcaggtcgaagtgcgggaa

SEQ ID NO: 3115105 - DNA, 25 bp, Homo sapien
gtcgtcgatgctcttcaccgcgtcg

SEQ ID NO: 3115106 - DNA, 25 bp, Homo sapien
tacgaccgataggaacttgtcccag

SEQ ID NO: 3115107 - DNA, 25 bp, Homo sapien
cgaccgataggaacttgtcccaggc

SEQ ID NO: 3115108 - DNA, 25 bp, Homo sapien
gatacgaccgataggaacttgtccc

SEQ ID NO: 3115109 - DNA, 25 bp, Homo sapien
gaggatacgaccgataggaacttgt

SEQ ID NO: 3115110 - DNA, 25 bp, Homo sapien
tattggcgcattacgcggtaagtgg

SEQ ID NO: 3115111 - DNA, 25 bp, Homo sapien
cattggtttattggcgcattacgcg

SEQ ID NO: 3115112 - DNA, 25 bp, Homo sapien
ttattggcgcattacgcggtaagtg

SEQ ID NO: 3115113 - DNA, 25 bp, Homo sapien
ggtttattggcgcattacgcggtaa

SEQ ID NO: 3115114 - DNA, 25 bp, Homo sapien
ctctccagagtctcggtgccgatgg

SEQ ID NO: 3115115 - DNA, 25 bp, Homo sapien
tccagagtctcggtgccgatggtgt

SEQ ID NO: 3115116 - DNA, 25 bp, Homo sapien
ccagagtctcggtgccgatggtgtc

SEQ ID NO: 3115117 - DNA, 25 bp, Homo sapien
tctccagagtctcggtgccgatggt

SEQ ID NO: 3115118 - DNA, 25 bp, Homo sapien
tccacgcgcaggatgtaggcgtgca

SEQ ID NO: 3115119 - DNA, 25 bp, Homo sapien
ccttggagccgtgcgcgcgcaactg

SEQ ID NO: 3115120 - DNA, 25 bp, Homo sapien
gtcgtcgatgctcttcaccgcgtcg

SEQ ID NO: 3115121 - DNA, 25 bp, Homo sapien
ccgggtgcaggtcgaagtgcgggaa

SEQ ID NO: 3115122 - DNA, 25 bp, Homo sapien
gatacgaccgataggaacttggccc

SEQ ID NO: 3115123 - DNA, 25 bp, Homo sapien
gaggatacgaccgataggaacttgg

SEQ ID NO: 3115124 - DNA, 25 bp, Homo sapien
tacgaccgataggaacttggcccag

SEQ ID NO: 3115125 - DNA, 25 bp, Homo sapien
ggatacgaccgataggaacttggcc

SEQ ID NO: 3115126 - DNA, 25 bp, Homo sapien
caggaactgtgggagggtgaagggc

SEQ ID NO: 3115127 - DNA, 25 bp, Homo sapien
cagggcaggaactgtgggagggtga

SEQ ID NO: 3115128 - DNA, 25 bp, Homo sapien
gggccgcagcctgtcctgggggtcc

SEQ ID NO: 3115129 - DNA, 25 bp, Homo sapien
catccatttattggagtcagggcag

SEQ ID NO: 3115130 - DNA, 25 bp, Homo sapien
cctgcgcgatttgggcgcgctcctg

SEQ ID NO: 3115131 - DNA, 25 bp, Homo sapien
tcgtggcccgcaatcaggtcccaga

SEQ ID NO: 3115132 - DNA, 25 bp, Homo sapien
agctccgccccgaattgcgcctcgt

SEQ ID NO: 3115133 - DNA, 25 bp, Homo sapien
aggtcccagacctgcgcgatttggg

SEQ ID NO: 3115134 - DNA, 25 bp, Homo sapien
cgaaggaccttggatggcgttggcg

SEQ ID NO: 3115135 - DNA, 25 bp, Homo sapien
gcgttggcggcccacgcgcccaaaa

SEQ ID NO: 3115136 - DNA, 25 bp, Homo sapien
ggatccgcacccgaaggaccttgga

SEQ ID NO: 3115137 - DNA, 25 bp, Homo sapien
ctgcgtggggcttcactagcgccca

SEQ ID NO: 3115138 - DNA, 25 bp, Homo sapien
tgcgctgcccgtggctcagcagctg

SEQ ID NO: 3115139 - DNA, 25 bp, Homo sapien
cgcaggttgtccacgtgctgcaccg

SEQ ID NO: 3115140 - DNA, 25 bp, Homo sapien
aaagttggctgggtccacgcgcagc

SEQ ID NO: 3115141 - DNA, 25 bp, Homo sapien
agcacgagcgcgtgcaggtccgcca

SEQ ID NO: 3115142 - DNA, 25 bp, Homo sapien
gctgcgcgctgcaccattgccccgg

SEQ ID NO: 3115143 - DNA, 25 bp, Homo sapien
cccggctgcgcgctgcaccattgcc

SEQ ID NO: 3115144 - DNA, 25 bp, Homo sapien
gcgctgcaccattgccccggccgga

SEQ ID NO: 3115145 - DNA, 25 bp, Homo sapien
tgcaccattgccccggccggaaagg

SEQ ID NO: 3115146 - DNA, 25 bp, Homo sapien
cacgacgtggaaacactggattagc

SEQ ID NO: 3115147 - DNA, 25 bp, Homo sapien
cacggtgaactcgtcctgcaggtgg

SEQ ID NO: 3115148 - DNA, 25 bp, Homo sapien
tgtttattgacaggcacagaccaag

SEQ ID NO: 3115149 - DNA, 25 bp, Homo sapien
gtatttttcggtcagcaccacggcc

SEQ ID NO: 3115150 - DNA, 25 bp, Homo sapien
tccagggcctccgtggcatagccag

SEQ ID NO: 3115151 - DNA, 25 bp, Homo sapien
catagccagcagtgtggttgccaac

SEQ ID NO: 3115152 - DNA, 25 bp, Homo sapien
ggagacagcaccacggcagcttatt

SEQ ID NO: 3115153 - DNA, 25 bp, Homo sapien
gccttggtgttagccttgtcctcag

SEQ ID NO: 3115154 - DNA, 25 bp, Homo sapien
catgtcatctaagtggaccacggca

SEQ ID NO: 3115155 - DNA, 25 bp, Homo sapien
tctgggctgagccataactcagggc

SEQ ID NO: 3115156 - DNA, 25 bp, Homo sapien
cagacacatcattgggcatgtcatc

SEQ ID NO: 3115157 - DNA, 25 bp, Homo sapien
cgtgtcggccacctacttgcattgt

SEQ ID NO: 3115158 - DNA, 25 bp, Homo sapien
tgaccaccaatgctctagcttaatg

SEQ ID NO: 3115159 - DNA, 25 bp, Homo sapien
taggtcaccagcaggcatttaccca

SEQ ID NO: 3115160 - DNA, 25 bp, Homo sapien
gaagggtgtggcaggcctaggtcac

SEQ ID NO: 3115161 - DNA, 25 bp, Homo sapien
gggcatgaccaccaatgctctagct

SEQ ID NO: 3115162 - DNA, 25 bp, Homo sapien
tgggttctctctgagtctgtgggga

SEQ ID NO: 3115163 - DNA, 25 bp, Homo sapien
gggttctctctgagtctgtggggac

SEQ ID NO: 3115164 - DNA, 25 bp, Homo sapien
ggtgggttctctctgagtctgtggg

SEQ ID NO: 3115165 - DNA, 25 bp, Homo sapien
gtgggttctctctgagtctgtgggg

SEQ ID NO: 3115166 - DNA, 25 bp, Homo sapien
ggtcttgtcggcaggagacagcacc

SEQ ID NO: 3115167 - DNA, 25 bp, Homo sapien
acgttggtcttgtcggcaggagaca

SEQ ID NO: 3115168 - DNA, 25 bp, Homo sapien
ttgacgttggtcttgtcggcaggag

SEQ ID NO: 3115169 - DNA, 25 bp, Homo sapien
tggtcttgtcggcaggagacagcac

SEQ ID NO: 3115170 - DNA, 25 bp, Homo sapien
cagggcctccgcaccatactcgcca

SEQ ID NO: 3115171 - DNA, 25 bp, Homo sapien
caccatactcgccagcgtgcgcgcc

SEQ ID NO: 3115172 - DNA, 25 bp, Homo sapien
ctctccagggcctccgcaccatact

SEQ ID NO: 3115173 - DNA, 25 bp, Homo sapien
actcgccagcgtgcgcgccgacctt

SEQ ID NO: 3115174 - DNA, 25 bp, Homo sapien
caggacggttgagggtggcctgtgg

SEQ ID NO: 3115175 - DNA, 25 bp, Homo sapien
ccaggacggttgagggtggcctgtg

SEQ ID NO: 3115176 - DNA, 25 bp, Homo sapien
ggcccttaacctgggcagagccgtg

SEQ ID NO: 3115177 - DNA, 25 bp, Homo sapien
cagcgcgttgggcatgtcgtccacg

SEQ ID NO: 3115178 - DNA, 25 bp, Homo sapien
gtccacccgaagcttgtgcgcgtgc

SEQ ID NO: 3115179 - DNA, 25 bp, Homo sapien
ttggtcagcgcgtcggccaccttct

SEQ ID NO: 3115180 - DNA, 25 bp, Homo sapien
cccgcaacccgcgtgatcctctgcc

SEQ ID NO: 3115181 - DNA, 25 bp, Homo sapien
ccgcctgcgctacacctcccgcaac

SEQ ID NO: 3115182 - DNA, 25 bp, Homo sapien
cgcctgcgctacacctcccgcaacc

SEQ ID NO: 3115183 - DNA, 25 bp, Homo sapien
cagggtcaccagcaggcagtggctt

SEQ ID NO: 3115184 - DNA, 25 bp, Homo sapien
gcggccagggtcaccagcaggcagt

SEQ ID NO: 3115185 - DNA, 25 bp, Homo sapien
gggaggtgggcggccagggtcacca

SEQ ID NO: 3115186 - DNA, 25 bp, Homo sapien
gtcaccagcaggcagtggcttagga

SEQ ID NO: 3115187 - DNA, 25 bp, Homo sapien
cttgtccagggaggcgtgcaccgca

SEQ ID NO: 3115188 - DNA, 25 bp, Homo sapien
acttgtccagggaggcgtgcaccgc

SEQ ID NO: 3115189 - DNA, 25 bp, Homo sapien
aacttgtccagggaggcgtgcaccg

SEQ ID NO: 3115190 - DNA, 25 bp, Homo sapien
ggaacttgtccagggaggcgtgcac

SEQ ID NO: 3115191 - DNA, 25 bp, Homo sapien
gtatttggaggtcagcacggtgctc

SEQ ID NO: 3115192 - DNA, 25 bp, Homo sapien
ggtatttggaggtcagcacggtgct

SEQ ID NO: 3115193 - DNA, 25 bp, Homo sapien
atttggaggtcagcacggtgctcac

SEQ ID NO: 3115194 - DNA, 25 bp, Homo sapien
tatttggaggtcagcacggtgctca

SEQ ID NO: 3115195 - DNA, 25 bp, Homo sapien
tgtggacgaggcattcaaggtgacc

SEQ ID NO: 3115196 - DNA, 25 bp, Homo sapien
tgaccagggttagtctgagggcttc

SEQ ID NO: 3115197 - DNA, 25 bp, Homo sapien
gaggaagtctggaggtgtggacgag

SEQ ID NO: 3115198 - DNA, 25 bp, Homo sapien
gtgaccagggttagtctgagggctt

SEQ ID NO: 3115199 - DNA, 25 bp, Homo sapien
ggtcttgtcggcaggagacagcacc

SEQ ID NO: 3115200 - DNA, 25 bp, Homo sapien
acgttggtcttgtcggcaggagaca

SEQ ID NO: 3115201 - DNA, 25 bp, Homo sapien
ttgacgttggtcttgtcggcaggag

SEQ ID NO: 3115202 - DNA, 25 bp, Homo sapien
tggtcttgtcggcaggagacagcac

SEQ ID NO: 3115203 - DNA, 25 bp, Homo sapien
cagggcctccgcaccatactcgcca

SEQ ID NO: 3115204 - DNA, 25 bp, Homo sapien
ctctccagggcctccgcaccatact

SEQ ID NO: 3115205 - DNA, 25 bp, Homo sapien
actcgccagcgtgcgcgccgacctt

SEQ ID NO: 3115206 - DNA, 25 bp, Homo sapien
caccatactcgccagcgtgcgcgcc

SEQ ID NO: 3115207 - DNA, 25 bp, Homo sapien
ccaggacggttgagggtggcctgtg

SEQ ID NO: 3115208 - DNA, 25 bp, Homo sapien
caggacggttgagggtggcctgtgg

SEQ ID NO: 3115209 - DNA, 25 bp, Homo sapien
ggtggtggggaaggacaggaacatc

SEQ ID NO: 3115210 - DNA, 25 bp, Homo sapien
ttggtggtggggaaggacaggaaca

SEQ ID NO: 3115211 - DNA, 25 bp, Homo sapien
tggtggtggggaaggacaggaacat

SEQ ID NO: 3115212 - DNA, 25 bp, Homo sapien
ggcccttaacctgggcagagccgtg

SEQ ID NO: 3115213 - DNA, 25 bp, Homo sapien
cagcgcgttgggcatgtcgtccacg

SEQ ID NO: 3115214 - DNA, 25 bp, Homo sapien
gtccacccgaagcttgtgcgcgtgc

SEQ ID NO: 3115215 - DNA, 25 bp, Homo sapien
ttggtcagcgcgtcggccaccttct

SEQ ID NO: 3115216 - DNA, 25 bp, Homo sapien
gcaacccgcgtgatcctctgccctg

SEQ ID NO: 3115217 - DNA, 25 bp, Homo sapien
atctcgcccctcgacccagatcgct

SEQ ID NO: 3115218 - DNA, 25 bp, Homo sapien
ccgcaacccgcgtgatcctctgccc

SEQ ID NO: 3115219 - DNA, 25 bp, Homo sapien
cctgcgaggaaggcgccatctcgcc

SEQ ID NO: 3115220 - DNA, 25 bp, Homo sapien
cagggtcaccagcaggcagtggctt

SEQ ID NO: 3115221 - DNA, 25 bp, Homo sapien
gcggccagggtcaccagcaggcagt

SEQ ID NO: 3115222 - DNA, 25 bp, Homo sapien
gggaggtgggcggccagggtcacca

SEQ ID NO: 3115223 - DNA, 25 bp, Homo sapien
gtcaccagcaggcagtggcttagga

SEQ ID NO: 3115224 - DNA, 25 bp, Homo sapien
acttgtccagggaggcgtgcaccgc

SEQ ID NO: 3115225 - DNA, 25 bp, Homo sapien
aacttgtccagggaggcgtgcaccg

SEQ ID NO: 3115226 - DNA, 25 bp, Homo sapien
cttgtccagggaggcgtgcaccgca

SEQ ID NO: 3115227 - DNA, 25 bp, Homo sapien
ggaacttgtccagggaggcgtgcac

SEQ ID NO: 3115228 - DNA, 25 bp, Homo sapien
gtatttggaggtcagcacggtgctc

SEQ ID NO: 3115229 - DNA, 25 bp, Homo sapien
atttggaggtcagcacggtgctcac

SEQ ID NO: 3115230 - DNA, 25 bp, Homo sapien
ggtatttggaggtcagcacggtgct

SEQ ID NO: 3115231 - DNA, 25 bp, Homo sapien
tatttggaggtcagcacggtgctca

SEQ ID NO: 3115232 - DNA, 25 bp, Homo sapien
gcttagtcaactgaagcagcaggag

SEQ ID NO: 3115233 - DNA, 25 bp, Homo sapien
tttataactggttctgatcaattaa

SEQ ID NO: 3115234 - DNA, 25 bp, Homo sapien
tgtaaaaagcgctgcactccaacca

SEQ ID NO: 3115235 - DNA, 25 bp, Homo sapien
caattaattgtaaaaagcgctgcac

SEQ ID NO: 3115236 - DNA, 25 bp, Homo sapien
ctcgtcggagatcccgggaccgcgc

SEQ ID NO: 3115237 - DNA, 25 bp, Homo sapien
gccgcgccctgcgaccccgctgcgc

SEQ ID NO: 3115238 - DNA, 25 bp, Homo sapien
gtccagggcctcgtcggagatcccg

SEQ ID NO: 3115239 - DNA, 25 bp, Homo sapien
gcgcctgcgcggaccggccaggggt

SEQ ID NO: 3115240 - DNA, 25 bp, Homo sapien
tgtagacgccgacgttgctgcccag

SEQ ID NO: 3115241 - DNA, 25 bp, Homo sapien
tctgtcgtgtagacgccgacgttgc

SEQ ID NO: 3115242 - DNA, 25 bp, Homo sapien
agggcctctgtcgtgtagacgccga

SEQ ID NO: 3115243 - DNA, 25 bp, Homo sapien
agcgcccggtcctccgcggacagcg

SEQ ID NO: 3115244 - DNA, 25 bp, Homo sapien
tggccgtgggctctgacttgtgagg

SEQ ID NO: 3115245 - DNA, 25 bp, Homo sapien
tgggctctgacttgtgaggagccgg

SEQ ID NO: 3115246 - DNA, 25 bp, Homo sapien
ccgtgggctctgacttgtgaggagc

SEQ ID NO: 3115247 - DNA, 25 bp, Homo sapien
gagaagtaggtcttcgtggcgggga

SEQ ID NO: 3115248 - DNA, 25 bp, Homo sapien
actcgcagctggcacgcgtgcaggt

SEQ ID NO: 3115249 - DNA, 25 bp, Homo sapien
tggctcagcgcggacagcgcgtggg

SEQ ID NO: 3115250 - DNA, 25 bp, Homo sapien
gtaggtcgtccaggcgctccacggc

SEQ ID NO: 3115251 - DNA, 25 bp, Homo sapien
tccacggcgaggctcagcgcgtccg

SEQ ID NO: 3115252 - DNA, 25 bp, Homo sapien
gggcgagggttaccagcaggcagtg

SEQ ID NO: 3115253 - DNA, 25 bp, Homo sapien
tgcagcgcggggctgaagtctccgg

SEQ ID NO: 3115254 - DNA, 25 bp, Homo sapien
gtagtgccgggcgagggttaccagc

SEQ ID NO: 3115255 - DNA, 25 bp, Homo sapien
caggaacttgtccagcgacgcctgc

SEQ ID NO: 3115256 - DNA, 25 bp, Homo sapien
cctgggagaggctttactcaaacac

SEQ ID NO: 3115257 - DNA, 25 bp, Homo sapien
tcctgggagaggctttactcaaaca

SEQ ID NO: 3115258 - DNA, 25 bp, Homo sapien
gctcctgggagaggctttactcaaa

SEQ ID NO: 3115259 - DNA, 25 bp, Homo sapien
tgggagaggctttactcaaacacgg

SEQ ID NO: 3115260 - DNA, 25 bp, Homo sapien
tggttcaagtgattctcctgtctca

SEQ ID NO: 3115261 - DNA, 25 bp, Homo sapien
tcgcaaagctggagtgcagtggtgc

SEQ ID NO: 3115262 - DNA, 25 bp, Homo sapien
tcactccaacctccgactctggttc

SEQ ID NO: 3115263 - DNA, 25 bp, Homo sapien
ttttgtttgagacagtctcgctctg

SEQ ID NO: 3115264 - DNA, 25 bp, Homo sapien
gagcgcatgggccttgaccgaagcc

SEQ ID NO: 3115265 - DNA, 25 bp, Homo sapien
gcatgggccttgaccgaagccctga

SEQ ID NO: 3115266 - DNA, 25 bp, Homo sapien
tgaccgaagccctgagtgggttaag

SEQ ID NO: 3115267 - DNA, 25 bp, Homo sapien
gccttgaccgaagccctgagtgggt

SEQ ID NO: 3115268 - DNA, 25 bp, Homo sapien
tgtccgtattcctcccgtgtccgta

SEQ ID NO: 3115269 - DNA, 25 bp, Homo sapien
tgttgctgttcctcccgtgttggta

SEQ ID NO: 3115270 - DNA, 25 bp, Homo sapien
ggactcagggtacttgttcagcaca

SEQ ID NO: 3115271 - DNA, 25 bp, Homo sapien
catgtcgatattccctgcgtgttgc

SEQ ID NO: 3115272 - DNA, 25 bp, Homo sapien
tgtgttcccgggtcatgttgagtag

SEQ ID NO: 3115273 - DNA, 25 bp, Homo sapien
gctgtaaatagtctgataaacgttc

SEQ ID NO: 3115274 - DNA, 25 bp, Homo sapien
tggagctagctgtgagtttctagaa

SEQ ID NO: 3115275 - DNA, 25 bp, Homo sapien
tacagagttgctcctgtgttcccgg

SEQ ID NO: 3115276 - DNA, 25 bp, Homo sapien
agctcagatgttgcctctacactcc

SEQ ID NO: 3115277 - DNA, 25 bp, Homo sapien
agtgagctcagatgttgcctctaca

SEQ ID NO: 3115278 - DNA, 25 bp, Homo sapien
cagtgagctcagatgttgcctctac

SEQ ID NO: 3115279 - DNA, 25 bp, Homo sapien
tgagctcagatgttgcctctacact

SEQ ID NO: 3115280 - DNA, 25 bp, Homo sapien
catggacctctgattagcttgggtt

SEQ ID NO: 3115281 - DNA, 25 bp, Homo sapien
cagctgtttacgtctgactccttga

SEQ ID NO: 3115282 - DNA, 25 bp, Homo sapien
cttctttggtacagtgatggagtca

SEQ ID NO: 3115283 - DNA, 25 bp, Homo sapien
taccagctctataagtcacccttgg

SEQ ID NO: 3115284 - DNA, 25 bp, Homo sapien
gaaaaggctgcgtctccgatctgca

SEQ ID NO: 3115285 - DNA, 25 bp, Homo sapien
aatgaaaaggctgcgtctccgatct

SEQ ID NO: 3115286 - DNA, 25 bp, Homo sapien
tgaaaaggctgcgtctccgatctgc

SEQ ID NO: 3115287 - DNA, 25 bp, Homo sapien
taatgaaaaggctgcgtctccgatc

SEQ ID NO: 3115288 - DNA, 25 bp, Homo sapien
ttagtcatcaggtttcaaagaatca

SEQ ID NO: 3115289 - DNA, 25 bp, Homo sapien
tagtcatcaggtttcaaagaatcat

SEQ ID NO: 3115290 - DNA, 25 bp, Homo sapien
atcatagccttctttccataggtcc

SEQ ID NO: 3115291 - DNA, 25 bp, Homo sapien
atagccttctttccataggtcccgc

SEQ ID NO: 3115292 - DNA, 25 bp, Homo sapien
cgggcgggggcggaaatgcgcaggc

SEQ ID NO: 3115293 - DNA, 25 bp, Homo sapien
ccctggcgtcacttccgaccagccg

SEQ ID NO: 3115294 - DNA, 25 bp, Homo sapien
ggcggaaatgcgcaggctccgaccc

SEQ ID NO: 3115295 - DNA, 25 bp, Homo sapien
gcgtcacttccgaccagccgggcgg

SEQ ID NO: 3115296 - DNA, 25 bp, Homo sapien
tcgctatgtctccagagcgtagtgg

SEQ ID NO: 3115297 - DNA, 25 bp, Homo sapien
gctatgtctccagagcgtagtggtg

SEQ ID NO: 3115298 - DNA, 25 bp, Homo sapien
cgctatgtctccagagcgtagtggt

SEQ ID NO: 3115299 - DNA, 25 bp, Homo sapien
tctcgctatgtctccagagcgtagt

SEQ ID NO: 3115300 - DNA, 25 bp, Homo sapien
aacaaaggagggttgcttgggcaca

SEQ ID NO: 3115301 - DNA, 25 bp, Homo sapien
ccaacaaaggagggttgcttgggca

SEQ ID NO: 3115302 - DNA, 25 bp, Homo sapien
caaaggagggttgcttgggcacagg

SEQ ID NO: 3115303 - DNA, 25 bp, Homo sapien
aaaggagggttgcttgggcacagga

SEQ ID NO: 3115304 - DNA, 25 bp, Homo sapien
tgttgttacaagcagcagacaacca

SEQ ID NO: 3115305 - DNA, 25 bp, Homo sapien
caagcagcagacaaccattagaagt

SEQ ID NO: 3115306 - DNA, 25 bp, Homo sapien
agcagacaaccattagaagtcagca

SEQ ID NO: 3115307 - DNA, 25 bp, Homo sapien
gcagcagacaaccattagaagtcag

SEQ ID NO: 3115308 - DNA, 25 bp, Homo sapien
agatctgaattttccgacagacttc

SEQ ID NO: 3115309 - DNA, 25 bp, Homo sapien
tcactaaccaatcttgtagcgagtg

SEQ ID NO: 3115310 - DNA, 25 bp, Homo sapien
tgaattttccgacagacttcatcat

SEQ ID NO: 3115311 - DNA, 25 bp, Homo sapien
tccataatcactaaccaatcttgta

SEQ ID NO: 3115312 - DNA, 25 bp, Homo sapien
tgagagggttcccagacagtcaggc

SEQ ID NO: 3115313 - DNA, 25 bp, Homo sapien
agggttcccagacagtcaggccccg

SEQ ID NO: 3115314 - DNA, 25 bp, Homo sapien
agagggttcccagacagtcaggccc

SEQ ID NO: 3115315 - DNA, 25 bp, Homo sapien
tcccagacagtcaggccccgcagtg

SEQ ID NO: 3115316 - DNA, 25 bp, Homo sapien
gcctggccgaaaggacaaacatttc

SEQ ID NO: 3115317 - DNA, 25 bp, Homo sapien
cctgccttttgaattggagagcctg

SEQ ID NO: 3115318 - DNA, 25 bp, Homo sapien
gatttgtcatgttaaatcagaccaa

SEQ ID NO: 3115319 - DNA, 25 bp, Homo sapien
tatctctacagcatgatttgtcatg

SEQ ID NO: 3115320 - DNA, 25 bp, Homo sapien
tgcatctggtcgtgagctgtggacg

SEQ ID NO: 3115321 - DNA, 25 bp, Homo sapien
agtgcccggaggacgtcctcgatgt

SEQ ID NO: 3115322 - DNA, 25 bp, Homo sapien
gacgtcctcgatgtggactcctgct

SEQ ID NO: 3115323 - DNA, 25 bp, Homo sapien
tctgtgccttcgcaagcccaggtgg

SEQ ID NO: 3115324 - DNA, 25 bp, Homo sapien
ataaagcaagaggtcggcgaggcca

SEQ ID NO: 3115325 - DNA, 25 bp, Homo sapien
ctgtgtcgataaagcaagaggtcgg

SEQ ID NO: 3115326 - DNA, 25 bp, Homo sapien
tgtcgataaagcaagaggtcggcga

SEQ ID NO: 3115327 - DNA, 25 bp, Homo sapien
cgataaagcaagaggtcggcgaggc

SEQ ID NO: 3115328 - DNA, 25 bp, Homo sapien
cacgggcacatcccaaagtttaact

SEQ ID NO: 3115329 - DNA, 25 bp, Homo sapien
ccggtctggacacgggatgacgaat

SEQ ID NO: 3115330 - DNA, 25 bp, Homo sapien
gatgacgaatgagacgacgaacacc

SEQ ID NO: 3115331 - DNA, 25 bp, Homo sapien
atgaaagaaaaaacgccgccgctcg

SEQ ID NO: 3115332 - DNA, 25 bp, Homo sapien
tggaggcgcgcttttcacgttatcc

SEQ ID NO: 3115333 - DNA, 25 bp, Homo sapien
acatcttggatcctgtccccgttta

SEQ ID NO: 3115334 - DNA, 25 bp, Homo sapien
ccgtttatatcatccacagccagaa

SEQ ID NO: 3115335 - DNA, 25 bp, Homo sapien
cttcgtccacacaggatcggctgaa

SEQ ID NO: 3115336 - DNA, 25 bp, Homo sapien
cacaggatcggctgaaattgttgct

SEQ ID NO: 3115337 - DNA, 25 bp, Homo sapien
ctgcaaaggtgcagggagaggaaaa

SEQ ID NO: 3115338 - DNA, 25 bp, Homo sapien
gcaaaggtgcagggagaggaaaagc

SEQ ID NO: 3115339 - DNA, 25 bp, Homo sapien
tgcaaaggtgcagggagaggaaaag

SEQ ID NO: 3115340 - DNA, 25 bp, Homo sapien
agggccacgtcttgggccacaggtc

SEQ ID NO: 3115341 - DNA, 25 bp, Homo sapien
gcaggcagaaggtgcctcactgcct

SEQ ID NO: 3115342 - DNA, 25 bp, Homo sapien
tccacgagggccacgtcttgggcca

SEQ ID NO: 3115343 - DNA, 25 bp, Homo sapien
ggtctctcccagagcgtgctgccgt

SEQ ID NO: 3115344 - DNA, 25 bp, Homo sapien
cagaaatcttccagaccgcgatgag

SEQ ID NO: 3115345 - DNA, 25 bp, Homo sapien
gaacattcaccaaatctaggcacag

SEQ ID NO: 3115346 - DNA, 25 bp, Homo sapien
taccccatggcaggtgacatcggac

SEQ ID NO: 3115347 - DNA, 25 bp, Homo sapien
acgggccgagtgctggttcatgttc

SEQ ID NO: 3115348 - DNA, 25 bp, Homo sapien
tgagtccccttcaacagcagcccgg

SEQ ID NO: 3115349 - DNA, 25 bp, Homo sapien
ggtcacggaacgtggccctgagtcc

SEQ ID NO: 3115350 - DNA, 25 bp, Homo sapien
tgttgaggcatcaccctcgtgagcc

SEQ ID NO: 3115351 - DNA, 25 bp, Homo sapien
ctagaatcaagcacacggtcacgga

SEQ ID NO: 3115352 - DNA, 25 bp, Homo sapien
gccccatcgccgtccacatcaggca

SEQ ID NO: 3115353 - DNA, 25 bp, Homo sapien
gatggacgcattcccgctgaagctg

SEQ ID NO: 3115354 - DNA, 25 bp, Homo sapien
cccgctcctgggtgagaaccagcag

SEQ ID NO: 3115355 - DNA, 25 bp, Homo sapien
agggctcaggatggacgcattcccg

SEQ ID NO: 3115356 - DNA, 25 bp, Homo sapien
gcacctgtcctggtgacgtgaagga

SEQ ID NO: 3115357 - DNA, 25 bp, Homo sapien
tcctggtgacgtgaaggaggaagcc

SEQ ID NO: 3115358 - DNA, 25 bp, Homo sapien
tgccggagtagaggtggccactaac

SEQ ID NO: 3115359 - DNA, 25 bp, Homo sapien
ccggtgctgccggagtagaggtggc

SEQ ID NO: 3115360 - DNA, 25 bp, Homo sapien
cggtcaccttctcgtagagaccctt

SEQ ID NO: 3115361 - DNA, 25 bp, Homo sapien
ttgagcatgctctcccagtgcgggt

SEQ ID NO: 3115362 - DNA, 25 bp, Homo sapien
agtgcgggtcactcttgaacgggcc

SEQ ID NO: 3115363 - DNA, 25 bp, Homo sapien
tcctgcgggtggtggcattgagcat

SEQ ID NO: 3115364 - DNA, 25 bp, Homo sapien
cagcgaggcgtcagctcctgcccgt

SEQ ID NO: 3115365 - DNA, 25 bp, Homo sapien
tcctgcccgtccagcagcacgaagg

SEQ ID NO: 3115366 - DNA, 25 bp, Homo sapien
gaaggcctctgagcccacaagaagc

SEQ ID NO: 3115367 - DNA, 25 bp, Homo sapien
aagaagcacatctgcaccggcgttc

SEQ ID NO: 3115368 - DNA, 25 bp, Homo sapien
ctcaggacatgggctgccttgggtg

SEQ ID NO: 3115369 - DNA, 25 bp, Homo sapien
tcaggacatgggctgccttgggtgt

SEQ ID NO: 3115370 - DNA, 25 bp, Homo sapien
ccaggaacacgtccgcccctcagtc

SEQ ID NO: 3115371 - DNA, 25 bp, Homo sapien
ccagccaacgggatgtgcccgggat

SEQ ID NO: 3115372 - DNA, 25 bp, Homo sapien
tcacgaggggtctcagtgaggagac

SEQ ID NO: 3115373 - DNA, 25 bp, Homo sapien
ctggaacaatatggaggaagcgctc

SEQ ID NO: 3115374 - DNA, 25 bp, Homo sapien
aaggtgtctggtttgtagcggccga

SEQ ID NO: 3115375 - DNA, 25 bp, Homo sapien
tgtctggtttgtagcggccgaagat

SEQ ID NO: 3115376 - DNA, 25 bp, Homo sapien
ctgtctgtcggtgccagttccgttt

SEQ ID NO: 3115377 - DNA, 25 bp, Homo sapien
cgttttcaacggctacagccaaggt

SEQ ID NO: 3115378 - DNA, 25 bp, Homo sapien
agtctatcctcagctaagaacaaag

SEQ ID NO: 3115379 - DNA, 25 bp, Homo sapien
gccacctccgaaggaagaacaacga

SEQ ID NO: 3115380 - DNA, 25 bp, Homo sapien
taccgggaaaagctcgaggcttgca

SEQ ID NO: 3115381 - DNA, 25 bp, Homo sapien
tcagctaagaacaaaggtgccacct

SEQ ID NO: 3115382 - DNA, 25 bp, Homo sapien
tctgcggtcggcaggctggcggaca

SEQ ID NO: 3115383 - DNA, 25 bp, Homo sapien
aaggctgagcggtggtctgcggtcg

SEQ ID NO: 3115384 - DNA, 25 bp, Homo sapien
gggaggctcgggagggctaggctac

SEQ ID NO: 3115385 - DNA, 25 bp, Homo sapien
tccccagctcgtggaggccccagaa

SEQ ID NO: 3115386 - DNA, 25 bp, Homo sapien
aaaggcgacaatgtgggtagagaca

SEQ ID NO: 3115387 - DNA, 25 bp, Homo sapien
cgtcaaaggcgacaatgtgggtaga

SEQ ID NO: 3115388 - DNA, 25 bp, Homo sapien
tcaaaggcgacaatgtgggtagaga

SEQ ID NO: 3115389 - DNA, 25 bp, Homo sapien
aggcgacaatgtgggtagagacatt

SEQ ID NO: 3115390 - DNA, 25 bp, Homo sapien
gtcagaaggatgtaggcggcgtggc

SEQ ID NO: 3115391 - DNA, 25 bp, Homo sapien
gcggcgtggcggcttggctcaaaca

SEQ ID NO: 3115392 - DNA, 25 bp, Homo sapien
cctgtcagaaggatgtaggcggcgt

SEQ ID NO: 3115393 - DNA, 25 bp, Homo sapien
gtgcctctgagtctgccgggcctgt

SEQ ID NO: 3115394 - DNA, 25 bp, Homo sapien
acccaggcggaccaccctgctgctt

SEQ ID NO: 3115395 - DNA, 25 bp, Homo sapien
tgctgcttgggacaaggtcccgcac

SEQ ID NO: 3115396 - DNA, 25 bp, Homo sapien
tctggtaccgcagccgggagaaccg

SEQ ID NO: 3115397 - DNA, 25 bp, Homo sapien
ggtccctgatggcttggtcactgtc

SEQ ID NO: 3115398 - DNA, 25 bp, Homo sapien
ggacaccctggttctttctacgcga

SEQ ID NO: 3115399 - DNA, 25 bp, Homo sapien
agtggcgaccatcaccagggtcagg

SEQ ID NO: 3115400 - DNA, 25 bp, Homo sapien
ttcccaggacgtttagtgtcagcag

SEQ ID NO: 3115401 - DNA, 25 bp, Homo sapien
tgtcagcaggcggagtctctccaca

SEQ ID NO: 3115402 - DNA, 25 bp, Homo sapien
ctactgagagggcacagactgaccc

SEQ ID NO: 3115403 - DNA, 25 bp, Homo sapien
tgcaacaccactaaggacacctgtg

SEQ ID NO: 3115404 - DNA, 25 bp, Homo sapien
ctttggctacgaagctcaggctctg

SEQ ID NO: 3115405 - DNA, 25 bp, Homo sapien
cgttgaggcccagtaccctgagttc

SEQ ID NO: 3115406 - DNA, 25 bp, Homo sapien
caagtcttccttcgtgagctggcct

SEQ ID NO: 3115407 - DNA, 25 bp, Homo sapien
catagggctggctcacatccagtca

SEQ ID NO: 3115408 - DNA, 25 bp, Homo sapien
cttcaactctctcggcggtagggcg

SEQ ID NO: 3115409 - DNA, 25 bp, Homo sapien
agggtggatccttgccaggcgtccc

SEQ ID NO: 3115410 - DNA, 25 bp, Homo sapien
gaatacccggaagcaagatgcacag

SEQ ID NO: 3115411 - DNA, 25 bp, Homo sapien
acacccgtcacaagacgcggacatg

SEQ ID NO: 3115412 - DNA, 25 bp, Homo sapien
cagtaaatcagccagcgaatacccg

SEQ ID NO: 3115413 - DNA, 25 bp, Homo sapien
acatgcaggtctcggcgcgagctct

SEQ ID NO: 3115414 - DNA, 25 bp, Homo sapien
ttttatttgactccacaaccctgcc

SEQ ID NO: 3115415 - DNA, 25 bp, Homo sapien
tcccgctaatggctgaggaggtgcc

SEQ ID NO: 3115416 - DNA, 25 bp, Homo sapien
ttattcctctacacgtggccaccag

SEQ ID NO: 3115417 - DNA, 25 bp, Homo sapien
ggagccattcctggttcccgctaat

SEQ ID NO: 3115418 - DNA, 25 bp, Homo sapien
aaaatgtgacatattaggccgggcg

SEQ ID NO: 3115419 - DNA, 25 bp, Homo sapien
tctccaacagtgtcagggtgccctg

SEQ ID NO: 3115420 - DNA, 25 bp, Homo sapien
ggcagggtttctgctcattccccag

SEQ ID NO: 3115421 - DNA, 25 bp, Homo sapien
ggcatccggcccatgtagaaagctg

SEQ ID NO: 3115422 - DNA, 25 bp, Homo sapien
gcaatgtatgcagtcttggccacaa

SEQ ID NO: 3115423 - DNA, 25 bp, Homo sapien
atagtgagacctcgacttagttttt

SEQ ID NO: 3115424 - DNA, 25 bp, Homo sapien
tagtgagacctcgacttagttttta

SEQ ID NO: 3115425 - DNA, 25 bp, Homo sapien
catagtgagacctcgacttagtttt

SEQ ID NO: 3115426 - DNA, 25 bp, Homo sapien
cagccccgcagagacgcgcgtgtcg

SEQ ID NO: 3115427 - DNA, 25 bp, Homo sapien
cccggcgcgactgcggtgagctcat

SEQ ID NO: 3115428 - DNA, 25 bp, Homo sapien
agagacgcgcgtgtcgcccgcacgg

SEQ ID NO: 3115429 - DNA, 25 bp, Homo sapien
actgcggtgagctcatcccggccgg

SEQ ID NO: 3115430 - DNA, 25 bp, Homo sapien
cagctcgcacgcgtccaggcccagc

SEQ ID NO: 3115431 - DNA, 25 bp, Homo sapien
gcgcccccagctcgcacgcgtccag

SEQ ID NO: 3115432 - DNA, 25 bp, Homo sapien
tgcgcccccagctcgcacgcgtcca

SEQ ID NO: 3115433 - DNA, 25 bp, Homo sapien
ccccagctcgcacgcgtccaggccc

SEQ ID NO: 3115434 - DNA, 25 bp, Homo sapien
ctggagcctggatgaagtcccccac

SEQ ID NO: 3115435 - DNA, 25 bp, Homo sapien
gctggagcctggatgaagtccccca

SEQ ID NO: 3115436 - DNA, 25 bp, Homo sapien
gctacctgctagagagcagcggccc

SEQ ID NO: 3115437 - DNA, 25 bp, Homo sapien
tccctgactcggagaccaaagggcg

SEQ ID NO: 3115438 - DNA, 25 bp, Homo sapien
cctggcattcgagcaccaggctgga

SEQ ID NO: 3115439 - DNA, 25 bp, Homo sapien
tccaaagggactcaagggaagcctc

SEQ ID NO: 3115440 - DNA, 25 bp, Homo sapien
ctgccggatctccaagaggctcttc

SEQ ID NO: 3115441 - DNA, 25 bp, Homo sapien
tgtcgtccgggtccagctgccggat

SEQ ID NO: 3115442 - DNA, 25 bp, Homo sapien
ggcgcccggtactcgggcacagcct

SEQ ID NO: 3115443 - DNA, 25 bp, Homo sapien
aggctcctgtcgtccgggtccagct

SEQ ID NO: 3115444 - DNA, 25 bp, Homo sapien
cctgttccgacaggagtgtcagcct

SEQ ID NO: 3115445 - DNA, 25 bp, Homo sapien
agatccatgacgacgggccccggag

SEQ ID NO: 3115446 - DNA, 25 bp, Homo sapien
ctgtgagatccatgacgacgggccc

SEQ ID NO: 3115447 - DNA, 25 bp, Homo sapien
agcctgttccgacaggagtgtcagc

SEQ ID NO: 3115448 - DNA, 25 bp, Homo sapien
ttcactctgtaatcaacaccttcct

SEQ ID NO: 3115449 - DNA, 25 bp, Homo sapien
tctgtaatcaacaccttccttcagg

SEQ ID NO: 3115450 - DNA, 25 bp, Homo sapien
tcaacaccttccttcaggacaaaca

SEQ ID NO: 3115451 - DNA, 25 bp, Homo sapien
taatcaacaccttccttcaggacaa

SEQ ID NO: 3115452 - DNA, 25 bp, Homo sapien
gcagacacttgaggccgctgacaat

SEQ ID NO: 3115453 - DNA, 25 bp, Homo sapien
tgtggtgcagacacttgaggccgct

SEQ ID NO: 3115454 - DNA, 25 bp, Homo sapien
ggccgctgacaatctccctgtggac

SEQ ID NO: 3115455 - DNA, 25 bp, Homo sapien
aggccccggcggtaggtgtggtgca

SEQ ID NO: 3115456 - DNA, 25 bp, Homo sapien
tcgtcggtgaagagggacaccacca

SEQ ID NO: 3115457 - DNA, 25 bp, Homo sapien
tggtgcgtcctgtcatcgtcggtga

SEQ ID NO: 3115458 - DNA, 25 bp, Homo sapien
catagctgcccaccatgtagacggt

SEQ ID NO: 3115459 - DNA, 25 bp, Homo sapien
tccaccggagtcacaaactcatact

SEQ ID NO: 3115460 - DNA, 25 bp, Homo sapien
ccttccagtcctggcagatgcagag

SEQ ID NO: 3115461 - DNA, 25 bp, Homo sapien
agtccttccagtcctggcagatgca

SEQ ID NO: 3115462 - DNA, 25 bp, Homo sapien
cagtcctggcagatgcagagacccc

SEQ ID NO: 3115463 - DNA, 25 bp, Homo sapien
tcagtccttccagtcctggcagatg

SEQ ID NO: 3115464 - DNA, 25 bp, Homo sapien
cctgtgcaacaactgagggaggtag

SEQ ID NO: 3115465 - DNA, 25 bp, Homo sapien
gccatgtttaatgggacagctcagg

SEQ ID NO: 3115466 - DNA, 25 bp, Homo sapien
gagacagggccatgtttaatgggac

SEQ ID NO: 3115467 - DNA, 25 bp, Homo sapien
ccctgtgcaacaactgagggaggta

SEQ ID NO: 3115468 - DNA, 25 bp, Homo sapien
gcagaagctggcggctcatggtgct

SEQ ID NO: 3115469 - DNA, 25 bp, Homo sapien
agagacgacacccagggcaccgaga

SEQ ID NO: 3115470 - DNA, 25 bp, Homo sapien
cccagcaaagacaaggcccatgcgg

SEQ ID NO: 3115471 - DNA, 25 bp, Homo sapien
ggcagaaagagacgacacccagggc

SEQ ID NO: 3115472 - DNA, 25 bp, Homo sapien
gggctcctcgctccctgttcctgac

SEQ ID NO: 3115473 - DNA, 25 bp, Homo sapien
cctgttcctgaccccatgggcacga

SEQ ID NO: 3115474 - DNA, 25 bp, Homo sapien
gttcctgaccccatgggcacgaagc

SEQ ID NO: 3115475 - DNA, 25 bp, Homo sapien
gctcctcgctccctgttcctgaccc

SEQ ID NO: 3115476 - DNA, 25 bp, Homo sapien
tgtggcggctcagcaccaagatccc

SEQ ID NO: 3115477 - DNA, 25 bp, Homo sapien
tggcggctcagcaccaagatcccat

SEQ ID NO: 3115478 - DNA, 25 bp, Homo sapien
gcggctcagcaccaagatcccatcc

SEQ ID NO: 3115479 - DNA, 25 bp, Homo sapien
ggtgtggcggctcagcaccaagatc

SEQ ID NO: 3115480 - DNA, 25 bp, Homo sapien
catgccctgcatttgccggcaaagg

SEQ ID NO: 3115481 - DNA, 25 bp, Homo sapien
agtctgtgggatgcccctggcagct

SEQ ID NO: 3115482 - DNA, 25 bp, Homo sapien
caggtgttctcaagtcctgtgggta

SEQ ID NO: 3115483 - DNA, 25 bp, Homo sapien
aggcccctcctagagagctcctggg

SEQ ID NO: 3115484 - DNA, 25 bp, Homo sapien
ccgggattggttgcgtatgcctata

SEQ ID NO: 3115485 - DNA, 25 bp, Homo sapien
cagcacagggaccagtaaggcttgg

SEQ ID NO: 3115486 - DNA, 25 bp, Homo sapien
acctgacaacccagcagggaacaag

SEQ ID NO: 3115487 - DNA, 25 bp, Homo sapien
gacaagccgagcaccagtgcctctt

SEQ ID NO: 3115488 - DNA, 25 bp, Homo sapien
tgaccaccattgactcggccgcgag

SEQ ID NO: 3115489 - DNA, 25 bp, Homo sapien
ttgactcggccgcgagcacggcagc

SEQ ID NO: 3115490 - DNA, 25 bp, Homo sapien
cggcagctgccttgctgtactcggg

SEQ ID NO: 3115491 - DNA, 25 bp, Homo sapien
accattgactcggccgcgagcacgg

SEQ ID NO: 3115492 - DNA, 25 bp, Homo sapien
gctgcgcgggcccatccaccttggc

SEQ ID NO: 3115493 - DNA, 25 bp, Homo sapien
cgcgctgcgcgggcccatccacctt

SEQ ID NO: 3115494 - DNA, 25 bp, Homo sapien
ctcgcgctgcgcgggcccatccacc

SEQ ID NO: 3115495 - DNA, 25 bp, Homo sapien
cgctgcgcgggcccatccaccttgg

SEQ ID NO: 3115496 - DNA, 25 bp, Homo sapien
aacttgagcgtagggtactccgtca

SEQ ID NO: 3115497 - DNA, 25 bp, Homo sapien
tcccattgcggaagaacttgagcgt

SEQ ID NO: 3115498 - DNA, 25 bp, Homo sapien
tagggtactccgtcacaccaaactc

SEQ ID NO: 3115499 - DNA, 25 bp, Homo sapien
tcctccgggtgcgtgcggttcccat

SEQ ID NO: 3115500 - DNA, 25 bp, Homo sapien
caccgcccccccaatgaccggcctg

SEQ ID NO: 3115501 - DNA, 25 bp, Homo sapien
gccgtcgcagccactcggcaatgcc

SEQ ID NO: 3115502 - DNA, 25 bp, Homo sapien
ggcaatgccctcagcgtcccgtggt

SEQ ID NO: 3115503 - DNA, 25 bp, Homo sapien
ctaggtcccggccaccgatcagcgc

SEQ ID NO: 3115504 - DNA, 25 bp, Homo sapien
gtcctccagccgcatggcactgggc

SEQ ID NO: 3115505 - DNA, 25 bp, Homo sapien
tgaaagagccgcggccggtctgtga

SEQ ID NO: 3115506 - DNA, 25 bp, Homo sapien
tgctgaaagagccgcggccggtctg

SEQ ID NO: 3115507 - DNA, 25 bp, Homo sapien
cttcttgaagagaaccacagtgtcc

SEQ ID NO: 3115508 - DNA, 25 bp, Homo sapien
caaaggtcatgtccagggcgtcctg

SEQ ID NO: 3115509 - DNA, 25 bp, Homo sapien
caacccacacctgggcctgacctac

SEQ ID NO: 3115510 - DNA, 25 bp, Homo sapien
ctgcagccggaccccaacccacacc

SEQ ID NO: 3115511 - DNA, 25 bp, Homo sapien
cagccggaccccaacccacacctgg

SEQ ID NO: 3115512 - DNA, 25 bp, Homo sapien
ccaacccacacctgggcctgaccta

SEQ ID NO: 3115513 - DNA, 25 bp, Homo sapien
acagcagcaggtgggttagcgggcg

SEQ ID NO: 3115514 - DNA, 25 bp, Homo sapien
gacagcagcaggtgggttagcgggc

SEQ ID NO: 3115515 - DNA, 25 bp, Homo sapien
ctggacagcagcaggtgggttagcg

SEQ ID NO: 3115516 - DNA, 25 bp, Homo sapien
tggacagcagcaggtgggttagcgg

SEQ ID NO: 3115517 - DNA, 25 bp, Homo sapien
tgaactccgtgaccaggcgcatgct

SEQ ID NO: 3115518 - DNA, 25 bp, Homo sapien
aggtccaggccaagctcctcgtcca

SEQ ID NO: 3115519 - DNA, 25 bp, Homo sapien
gtgtgaccaggaagcgcgacagatc

SEQ ID NO: 3115520 - DNA, 25 bp, Homo sapien
accaggcgcatgctgtgtgtgacca

SEQ ID NO: 3115521 - DNA, 25 bp, Homo sapien
gagggtgctcatgactccacaggac

SEQ ID NO: 3115522 - DNA, 25 bp, Homo sapien
ctacagtagggagggtgctcatgac

SEQ ID NO: 3115523 - DNA, 25 bp, Homo sapien
catccctggacgactctaccctggg

SEQ ID NO: 3115524 - DNA, 25 bp, Homo sapien
tagggagggtgctcatgactccaca

SEQ ID NO: 3115525 - DNA, 25 bp, Homo sapien
tcccggtgcgcagccagcgtctggt

SEQ ID NO: 3115526 - DNA, 25 bp, Homo sapien
tggccgcgaagatcttggcagacgt

SEQ ID NO: 3115527 - DNA, 25 bp, Homo sapien
gttgaggatcctggccgcgaagatc

SEQ ID NO: 3115528 - DNA, 25 bp, Homo sapien
cagccagcgtctggttgacaaacag

SEQ ID NO: 3115529 - DNA, 25 bp, Homo sapien
gggagtccatgctggcaccggccac

SEQ ID NO: 3115530 - DNA, 25 bp, Homo sapien
tggcagggagtccatgctggcaccg

SEQ ID NO: 3115531 - DNA, 25 bp, Homo sapien
ctgtggcagggagtccatgctggca

SEQ ID NO: 3115532 - DNA, 25 bp, Homo sapien
ggagtccatgctggcaccggccact

SEQ ID NO: 3115533 - DNA, 25 bp, Homo sapien
cacaggcgcatacttcttagtggtt

SEQ ID NO: 3115534 - DNA, 25 bp, Homo sapien
cttgacttggccgttgaggactgca

SEQ ID NO: 3115535 - DNA, 25 bp, Homo sapien
tgcagcacgtgctcattgtcggccg

SEQ ID NO: 3115536 - DNA, 25 bp, Homo sapien
tcaaggttgaccaagcgcagagtgg

SEQ ID NO: 3115537 - DNA, 25 bp, Homo sapien
ttggtttcgtcaaaagccacctgct

SEQ ID NO: 3115538 - DNA, 25 bp, Homo sapien
ggtttcgtcaaaagccacctgctca

SEQ ID NO: 3115539 - DNA, 25 bp, Homo sapien
gagggtcttaactggccgctgatcc

SEQ ID NO: 3115540 - DNA, 25 bp, Homo sapien
tcaaaattcttgcccacgagggtct

SEQ ID NO: 3115541 - DNA, 25 bp, Homo sapien
cgaaggcatccagctcgttggccgt

SEQ ID NO: 3115542 - DNA, 25 bp, Homo sapien
gcaatgatgatgtcctcgtggtctt

SEQ ID NO: 3115543 - DNA, 25 bp, Homo sapien
tacttgagagtagggaagccgtgca

SEQ ID NO: 3115544 - DNA, 25 bp, Homo sapien
catctccttgcagtgggtgcaccac

SEQ ID NO: 3115545 - DNA, 25 bp, Homo sapien
tcctccgtgggcagcacgcccccgt

SEQ ID NO: 3115546 - DNA, 25 bp, Homo sapien
gaacttggagaaagtctccaggtcc

SEQ ID NO: 3115547 - DNA, 25 bp, Homo sapien
cagcacgcccccgttgtccaggaac

SEQ ID NO: 3115548 - DNA, 25 bp, Homo sapien
ccgttgtccaggaacttggagaaag

SEQ ID NO: 3115549 - DNA, 25 bp, Homo sapien
ttggaccccatagtggagttggccg

SEQ ID NO: 3115550 - DNA, 25 bp, Homo sapien
ccatagtggagttggccggtggctc

SEQ ID NO: 3115551 - DNA, 25 bp, Homo sapien
ccttggaccccatagtggagttggc

SEQ ID NO: 3115552 - DNA, 25 bp, Homo sapien
ctccttggaccccatagtggagttg

SEQ ID NO: 3115553 - DNA, 25 bp, Homo sapien
tattcacaatgcacagctccctctg

SEQ ID NO: 3115554 - DNA, 25 bp, Homo sapien
tctttattcacaatgcacagctccc

SEQ ID NO: 3115555 - DNA, 25 bp, Homo sapien
tccagcagtgatggcgggggtgaca

SEQ ID NO: 3115556 - DNA, 25 bp, Homo sapien
ttcacaatgcacagctccctctggt

SEQ ID NO: 3115557 - DNA, 25 bp, Homo sapien
catccctgtggtctacccgtgtcta

SEQ ID NO: 3115558 - DNA, 25 bp, Homo sapien
ggtctacccgtgtctagaggcaggt

SEQ ID NO: 3115559 - DNA, 25 bp, Homo sapien
aacagtgttgggtgtaccacccatc

SEQ ID NO: 3115560 - DNA, 25 bp, Homo sapien
ttgggtgtaccacccatccctgtgg

SEQ ID NO: 3115561 - DNA, 25 bp, Homo sapien
ctcctggtcacttttggttccttga

SEQ ID NO: 3115562 - DNA, 25 bp, Homo sapien
gactgcagcgggtgatctcaacttc

SEQ ID NO: 3115563 - DNA, 25 bp, Homo sapien
tcttcaccccgtgtggctggcaagt

SEQ ID NO: 3115564 - DNA, 25 bp, Homo sapien
ggaagggctagtggcgtgcagtcgg

SEQ ID NO: 3115565 - DNA, 25 bp, Homo sapien
gcctcttgatctggtagtcgggaga

SEQ ID NO: 3115566 - DNA, 25 bp, Homo sapien
tcgggagacgctggaaagaagcagc

SEQ ID NO: 3115567 - DNA, 25 bp, Homo sapien
cttgatctggtagtcgggagacgct

SEQ ID NO: 3115568 - DNA, 25 bp, Homo sapien
tcttgatctggtagtcgggagacgc

SEQ ID NO: 3115569 - DNA, 25 bp, Homo sapien
tttttatggagctcgcgtggcggca

SEQ ID NO: 3115570 - DNA, 25 bp, Homo sapien
ggcatgagtgctcctgttggcccct

SEQ ID NO: 3115571 - DNA, 25 bp, Homo sapien
ttctcagaaccgtggtgacgcagcc

SEQ ID NO: 3115572 - DNA, 25 bp, Homo sapien
caaggccacctggagtctttttatg

SEQ ID NO: 3115573 - DNA, 25 bp, Homo sapien
aattagataggcgagttggcgcatg

SEQ ID NO: 3115574 - DNA, 25 bp, Homo sapien
tagataggcgagttggcgcatgcct

SEQ ID NO: 3115575 - DNA, 25 bp, Homo sapien
ttagataggcgagttggcgcatgcc

SEQ ID NO: 3115576 - DNA, 25 bp, Homo sapien
aaaaattagataggcgagttggcgc

SEQ ID NO: 3115577 - DNA, 25 bp, Homo sapien
tgtgacttgttcagcactctaggct

SEQ ID NO: 3115578 - DNA, 25 bp, Homo sapien
caggaaggaccatagaccatggcag

SEQ ID NO: 3115579 - DNA, 25 bp, Homo sapien
cgggttgacaggcatagccagagct

SEQ ID NO: 3115580 - DNA, 25 bp, Homo sapien
cagtcacctgcatggccgggttgac

SEQ ID NO: 3115581 - DNA, 25 bp, Homo sapien
ccgcacttccggacgccgccggcgg

SEQ ID NO: 3115582 - DNA, 25 bp, Homo sapien
ctctggctcgggaggcgatcgtggc

SEQ ID NO: 3115583 - DNA, 25 bp, Homo sapien
gggcttcggcgctctggctcgggct

SEQ ID NO: 3115584 - DNA, 25 bp, Homo sapien
gcgtccacgcggagcgggcgggtgg

SEQ ID NO: 3115585 - DNA, 25 bp, Homo sapien
caggccgtggcggtccccacgaggg

SEQ ID NO: 3115586 - DNA, 25 bp, Homo sapien
ctgcttccctcacggcggcgggcag

SEQ ID NO: 3115587 - DNA, 25 bp, Homo sapien
tgactgccctccgatgtactggcgg

SEQ ID NO: 3115588 - DNA, 25 bp, Homo sapien
ggcagaaaagggctgcgccccacgt

SEQ ID NO: 3115589 - DNA, 25 bp, Homo sapien
ttggttctgacagggttgggctggc

SEQ ID NO: 3115590 - DNA, 25 bp, Homo sapien
agagcagagggttggttctgacagg

SEQ ID NO: 3115591 - DNA, 25 bp, Homo sapien
ggcctgatggttggctgaggcctgg

SEQ ID NO: 3115592 - DNA, 25 bp, Homo sapien
ggtggagagcagagggttggttctg

SEQ ID NO: 3115593 - DNA, 25 bp, Homo sapien
gccgtcaggtcatccatggccatgg

SEQ ID NO: 3115594 - DNA, 25 bp, Homo sapien
cgggggcagaggccgtcaggtcatc

SEQ ID NO: 3115595 - DNA, 25 bp, Homo sapien
actggggtgtgcaggtatcggggcc

SEQ ID NO: 3115596 - DNA, 25 bp, Homo sapien
ctcgagggggaaccgctgggcactg

SEQ ID NO: 3115597 - DNA, 25 bp, Homo sapien
atgtccccttgccagctcgaggggg

SEQ ID NO: 3115598 - DNA, 25 bp, Homo sapien
ggcactggggtgtgcaggtatcggg

SEQ ID NO: 3115599 - DNA, 25 bp, Homo sapien
acagcacagaggtcgtgcaccgcag

SEQ ID NO: 3115600 - DNA, 25 bp, Homo sapien
gtacgtgcaggagcggacactgtgg

SEQ ID NO: 3115601 - DNA, 25 bp, Homo sapien
ggtgacagcacagaggtcgtgcacc

SEQ ID NO: 3115602 - DNA, 25 bp, Homo sapien
tgtgcgcgtgcacgcgtgtacgtgc

SEQ ID NO: 3115603 - DNA, 25 bp, Homo sapien
tgacggttgagaagcctcgtctcca

SEQ ID NO: 3115604 - DNA, 25 bp, Homo sapien
gtctccagacatacgggaaagcttt

SEQ ID NO: 3115605 - DNA, 25 bp, Homo sapien
gcgcgtggacaagccaacactgttt

SEQ ID NO: 3115606 - DNA, 25 bp, Homo sapien
ccaggatgtccacgggtgacggttg

SEQ ID NO: 3115607 - DNA, 25 bp, Homo sapien
tccaagtttgggatggacctgaagc

SEQ ID NO: 3115608 - DNA, 25 bp, Homo sapien
tgctccaagtttgggatggacctga

SEQ ID NO: 3115609 - DNA, 25 bp, Homo sapien
atgctgctgcggcttgcccggcagg

SEQ ID NO: 3115610 - DNA, 25 bp, Homo sapien
caagtttgggatggacctgaagcga

SEQ ID NO: 3115611 - DNA, 25 bp, Homo sapien
gggagggcatctgttcccgcctgcc

SEQ ID NO: 3115612 - DNA, 25 bp, Homo sapien
tcccgtgcactataggcctcatggg

SEQ ID NO: 3115613 - DNA, 25 bp, Homo sapien
acgcccactcccgtgcactataggc

SEQ ID NO: 3115614 - DNA, 25 bp, Homo sapien
ccggccactacctgcgctccctgga

SEQ ID NO: 3115615 - DNA, 25 bp, Homo sapien
ggcagggcgcgggttcctctcggtc

SEQ ID NO: 3115616 - DNA, 25 bp, Homo sapien
tgccacggaggtcccggccgagcgg

SEQ ID NO: 3115617 - DNA, 25 bp, Homo sapien
ctctgcggcgtgaaggccggcccgg

SEQ ID NO: 3115618 - DNA, 25 bp, Homo sapien
tgctgaggcgcctgactcaggccca

SEQ ID NO: 3115619 - DNA, 25 bp, Homo sapien
aattcccgagggaaggtcattgctg

SEQ ID NO: 3115620 - DNA, 25 bp, Homo sapien
aaaacgcagaggtggaattcccgag

SEQ ID NO: 3115621 - DNA, 25 bp, Homo sapien
ctgttacttcagtggacaagtcggg

SEQ ID NO: 3115622 - DNA, 25 bp, Homo sapien
ctgcaagcagtgtctgtgggccaca

SEQ ID NO: 3115623 - DNA, 25 bp, Homo sapien
tcctgtttgtttggaaatacgatgc

SEQ ID NO: 3115624 - DNA, 25 bp, Homo sapien
tacgatgcgtccctgttatccagca

SEQ ID NO: 3115625 - DNA, 25 bp, Homo sapien
gagcacaccgactgtggaaagctgc

SEQ ID NO: 3115626 - DNA, 25 bp, Homo sapien
tccaagacaactataataatgctta

SEQ ID NO: 3115627 - DNA, 25 bp, Homo sapien
gatattcaggccgcctccggcgtcg

SEQ ID NO: 3115628 - DNA, 25 bp, Homo sapien
caaggatattcaggccgcctccggc

SEQ ID NO: 3115629 - DNA, 25 bp, Homo sapien
tccaaggatattcaggccgcctccg

SEQ ID NO: 3115630 - DNA, 25 bp, Homo sapien
tcttccaaggatattcaggccgcct

SEQ ID NO: 3115631 - DNA, 25 bp, Homo sapien
tgagcgctgtgcggtcactgcccat

SEQ ID NO: 3115632 - DNA, 25 bp, Homo sapien
ggctgagcgctgtgcggtcactgcc

SEQ ID NO: 3115633 - DNA, 25 bp, Homo sapien
gctgagcgctgtgcggtcactgccc

SEQ ID NO: 3115634 - DNA, 25 bp, Homo sapien
agcgctgtgcggtcactgcccatgc

SEQ ID NO: 3115635 - DNA, 25 bp, Homo sapien
tctggtcaccaaagactgcagctgc

SEQ ID NO: 3115636 - DNA, 25 bp, Homo sapien
cacggccgtggatttctggaacatt

SEQ ID NO: 3115637 - DNA, 25 bp, Homo sapien
ttagcctggtgggatgtgacacgcc

SEQ ID NO: 3115638 - DNA, 25 bp, Homo sapien
ctaatacaaacagcagccagggagg

SEQ ID NO: 3115639 - DNA, 25 bp, Homo sapien
gcgcccggccactatatcgtacatt

SEQ ID NO: 3115640 - DNA, 25 bp, Homo sapien
ggccactatatcgtacattttttaa

SEQ ID NO: 3115641 - DNA, 25 bp, Homo sapien
cccggccactatatcgtacattttt

SEQ ID NO: 3115642 - DNA, 25 bp, Homo sapien
gcccggccactatatcgtacatttt

SEQ ID NO: 3115643 - DNA, 25 bp, Homo sapien
gggaaatgttcaacgccaatttctg

SEQ ID NO: 3115644 - DNA, 25 bp, Homo sapien
caaaaggaggtctagaagccctggt

SEQ ID NO: 3115645 - DNA, 25 bp, Homo sapien
tacaccgacgcaaccgttaactatc

SEQ ID NO: 3115646 - DNA, 25 bp, Homo sapien
gaattgcattcgtctttacaccgac

SEQ ID NO: 3115647 - DNA, 25 bp, Homo sapien
gcccgcgggccgctgtgagcgcgag

SEQ ID NO: 3115648 - DNA, 25 bp, Homo sapien
gggccgctgtgagcgcgaggagcgg

SEQ ID NO: 3115649 - DNA, 25 bp, Homo sapien
cgctgtgagcgcgaggagcgggcgc

SEQ ID NO: 3115650 - DNA, 25 bp, Homo sapien
cgcgggccgctgtgagcgcgaggag

SEQ ID NO: 3115651 - DNA, 25 bp, Homo sapien
ggcgcactagcaggctcgggcccgg

SEQ ID NO: 3115652 - DNA, 25 bp, Homo sapien
cgcagcgcggagcgccagaagaggc

SEQ ID NO: 3115653 - DNA, 25 bp, Homo sapien
ccgtggcgcactagcaggctcgggc

SEQ ID NO: 3115654 - DNA, 25 bp, Homo sapien
cgagccgtggcgcactagcaggctc

SEQ ID NO: 3115655 - DNA, 25 bp, Homo sapien
ggcctgacgtcccagtcagattctg

SEQ ID NO: 3115656 - DNA, 25 bp, Homo sapien
ttctggcctaacttggccttcagcg

SEQ ID NO: 3115657 - DNA, 25 bp, Homo sapien
cctgggacatggatcgtcctgtgag

SEQ ID NO: 3115658 - DNA, 25 bp, Homo sapien
agccctgggacatggatcgtcctgt

SEQ ID NO: 3115659 - DNA, 25 bp, Homo sapien
tccggcatcgggtccctggtttcca

SEQ ID NO: 3115660 - DNA, 25 bp, Homo sapien
tcgggtccctggtttccagaggagc

SEQ ID NO: 3115661 - DNA, 25 bp, Homo sapien
aaaacccagtttgcagggcgccttg

SEQ ID NO: 3115662 - DNA, 25 bp, Homo sapien
agagccaagctaccctccggcatcg

SEQ ID NO: 3115663 - DNA, 25 bp, Homo sapien
ccagggaaacagaagacgtcctcac

SEQ ID NO: 3115664 - DNA, 25 bp, Homo sapien
gccagggaaacagaagacgtcctca

SEQ ID NO: 3115665 - DNA, 25 bp, Homo sapien
tgccagggaaacagaagacgtcctc

SEQ ID NO: 3115666 - DNA, 25 bp, Homo sapien
tgctgtggagtttcaaggcctgtcg

SEQ ID NO: 3115667 - DNA, 25 bp, Homo sapien
aaggcctgtcgcttccagacccagg

SEQ ID NO: 3115668 - DNA, 25 bp, Homo sapien
ggttctgtccgagccaggagacggg

SEQ ID NO: 3115669 - DNA, 25 bp, Homo sapien
agacccagggtcagcgctgagctcc

SEQ ID NO: 3115670 - DNA, 25 bp, Homo sapien
gtcagggacacccaaggcaatgtgt

SEQ ID NO: 3115671 - DNA, 25 bp, Homo sapien
gaagccccgactttccacatgagga

SEQ ID NO: 3115672 - DNA, 25 bp, Homo sapien
acctcaaggtccagggagggacagc

SEQ ID NO: 3115673 - DNA, 25 bp, Homo sapien
ggaagtctggagatcctgcaaaact

SEQ ID NO: 3115674 - DNA, 25 bp, Homo sapien
tctgcctctatgcagggcactctgg

SEQ ID NO: 3115675 - DNA, 25 bp, Homo sapien
gcttcagggtgtctgcctctatgca

SEQ ID NO: 3115676 - DNA, 25 bp, Homo sapien
ctctatgcagggcactctggaaggg

SEQ ID NO: 3115677 - DNA, 25 bp, Homo sapien
ctatgcagggcactctggaagggac

SEQ ID NO: 3115678 - DNA, 25 bp, Homo sapien
aaggcaagaggtcagaggcactgcc

SEQ ID NO: 3115679 - DNA, 25 bp, Homo sapien
aggcaagaggtcagaggcactgcca

SEQ ID NO: 3115680 - DNA, 25 bp, Homo sapien
tcacgtccccaacgagccgccgttg

SEQ ID NO: 3115681 - DNA, 25 bp, Homo sapien
gttgcacgccatcgggcttcaccgc

SEQ ID NO: 3115682 - DNA, 25 bp, Homo sapien
gatcacgtccccaacgagccgccgt

SEQ ID NO: 3115683 - DNA, 25 bp, Homo sapien
aacgagccgccgttgcacgccatcg

SEQ ID NO: 3115684 - DNA, 25 bp, Homo sapien
agcagctgtgatgccctgacctcag

SEQ ID NO: 3115685 - DNA, 25 bp, Homo sapien
atgtgaaaggccgagaaggatcccc

SEQ ID NO: 3115686 - DNA, 25 bp, Homo sapien
gcagacagtaaacgtgggcactagc

SEQ ID NO: 3115687 - DNA, 25 bp, Homo sapien
caggcaccttgcagataacaccagc

SEQ ID NO: 3115688 - DNA, 25 bp, Homo sapien
ctccgcaggtcctggtagtgctcgg

SEQ ID NO: 3115689 - DNA, 25 bp, Homo sapien
ggcccagagctcatgtagcggatga

SEQ ID NO: 3115690 - DNA, 25 bp, Homo sapien
tgtagcggatgagggcagggtagaa

SEQ ID NO: 3115691 - DNA, 25 bp, Homo sapien
gctcggcaaggacgctctctggtgc

SEQ ID NO: 3115692 - DNA, 25 bp, Homo sapien
cgagagataatggttggggagaagt

SEQ ID NO: 3115693 - DNA, 25 bp, Homo sapien
cacacgccctttacccacaggccct

SEQ ID NO: 3115694 - DNA, 25 bp, Homo sapien
cacccacacgccctttacccacagg

SEQ ID NO: 3115695 - DNA, 25 bp, Homo sapien
ctgcagcgagagataatggttgggg

SEQ ID NO: 3115696 - DNA, 25 bp, Homo sapien
tgaagtcaccccttatggttcctgg

SEQ ID NO: 3115697 - DNA, 25 bp, Homo sapien
gcagcctcagccgagtcggtgtgtc

SEQ ID NO: 3115698 - DNA, 25 bp, Homo sapien
gtgtccaatcatggccctcgaggcg

SEQ ID NO: 3115699 - DNA, 25 bp, Homo sapien
gaggcgcggacgacattgtaccctt

SEQ ID NO: 3115700 - DNA, 25 bp, Homo sapien
ttcatgtgcaccctgaggaatccca

SEQ ID NO: 3115701 - DNA, 25 bp, Homo sapien
aggcttcatgtgcaccctgaggaat

SEQ ID NO: 3115702 - DNA, 25 bp, Homo sapien
tgctgctcccgttgccctctgtcta

SEQ ID NO: 3115703 - DNA, 25 bp, Homo sapien
tgctcccgttgccctctgtctaggg

SEQ ID NO: 3115704 - DNA, 25 bp, Homo sapien
ggagtcgctggcgtggatgacattc

SEQ ID NO: 3115705 - DNA, 25 bp, Homo sapien
gctctggaaccacagctggatctcc

SEQ ID NO: 3115706 - DNA, 25 bp, Homo sapien
ggaaccacagctggatctcccgctg

SEQ ID NO: 3115707 - DNA, 25 bp, Homo sapien
ccccctccacggagtcgctggcgtg

SEQ ID NO: 3115708 - DNA, 25 bp, Homo sapien
tgtgctggcccccgtctgcccagct

SEQ ID NO: 3115709 - DNA, 25 bp, Homo sapien
ctgctgtgctggcccccgtctgccc

SEQ ID NO: 3115710 - DNA, 25 bp, Homo sapien
tcaggctgggtggatgctgctgtgc

SEQ ID NO: 3115711 - DNA, 25 bp, Homo sapien
caggctgggtggatgctgctgtgct

SEQ ID NO: 3115712 - DNA, 25 bp, Homo sapien
atggggtggtaagggcagcttgagc

SEQ ID NO: 3115713 - DNA, 25 bp, Homo sapien
gatggggtggtaagggcagcttgag

SEQ ID NO: 3115714 - DNA, 25 bp, Homo sapien
caccacaaaggttgtccggcacttt

SEQ ID NO: 3115715 - DNA, 25 bp, Homo sapien
gttggtggctcaaactcctctgggc

SEQ ID NO: 3115716 - DNA, 25 bp, Homo sapien
tgcctcccctttagaggagaggtta

SEQ ID NO: 3115717 - DNA, 25 bp, Homo sapien
ttcttgctgacggaggtagttggtc

SEQ ID NO: 3115718 - DNA, 25 bp, Homo sapien
gggaagtcataattagtgtaccacc

SEQ ID NO: 3115719 - DNA, 25 bp, Homo sapien
taaaggcgtcatttctacctcagag

SEQ ID NO: 3115720 - DNA, 25 bp, Homo sapien
gaagtcataattagtgtaccaccca

SEQ ID NO: 3115721 - DNA, 25 bp, Homo sapien
tactgttcaactccttacaacttgc

SEQ ID NO: 3115722 - DNA, 25 bp, Homo sapien
cagctgcgaactcgcctggaaccgg

SEQ ID NO: 3115723 - DNA, 25 bp, Homo sapien
ctgcgaactcgcctggaaccgggag

SEQ ID NO: 3115724 - DNA, 25 bp, Homo sapien
ccggcgcgcagctgcgaactcgcct

SEQ ID NO: 3115725 - DNA, 25 bp, Homo sapien
gcgcagctgcgaactcgcctggaac

SEQ ID NO: 3115726 - DNA, 25 bp, Homo sapien
gcggtacgcggggagacagtcgtcc

SEQ ID NO: 3115727 - DNA, 25 bp, Homo sapien
gtggcggtacgcggggagacagtcg

SEQ ID NO: 3115728 - DNA, 25 bp, Homo sapien
ggcagaagaggtggcggtacgcggg

SEQ ID NO: 3115729 - DNA, 25 bp, Homo sapien
gcggggagacagtcgtccccctcca

SEQ ID NO: 3115730 - DNA, 25 bp, Homo sapien
cctcctgtgatgaaggccactttgt

SEQ ID NO: 3115731 - DNA, 25 bp, Homo sapien
gcctcctgtgatgaaggccactttg

SEQ ID NO: 3115732 - DNA, 25 bp, Homo sapien
tcctgtgatgaaggccactttgtcc

SEQ ID NO: 3115733 - DNA, 25 bp, Homo sapien
cgcctcctgtgatgaaggccacttt

SEQ ID NO: 3115734 - DNA, 25 bp, Homo sapien
tcagcaatccggaacccaatcccag

SEQ ID NO: 3115735 - DNA, 25 bp, Homo sapien
agcaatccggaacccaatcccagag

SEQ ID NO: 3115736 - DNA, 25 bp, Homo sapien
aatctcagcaatccggaacccaatc

SEQ ID NO: 3115737 - DNA, 25 bp, Homo sapien
gaaaatctcagcaatccggaaccca

SEQ ID NO: 3115738 - DNA, 25 bp, Homo sapien
acagacaaacgggatctgtctgcct

SEQ ID NO: 3115739 - DNA, 25 bp, Homo sapien
gtcccactggagctgcaatgtccca

SEQ ID NO: 3115740 - DNA, 25 bp, Homo sapien
taaaggtagctacccctgctaggca

SEQ ID NO: 3115741 - DNA, 25 bp, Homo sapien
tgcttgcccacaataaccataaagg

SEQ ID NO: 3115742 - DNA, 25 bp, Homo sapien
tcgcggcaggctcctactggcaatc

SEQ ID NO: 3115743 - DNA, 25 bp, Homo sapien
ggctcctactggcaatcaccgtatg

SEQ ID NO: 3115744 - DNA, 25 bp, Homo sapien
tactggcaatcaccgtatggcagcc

SEQ ID NO: 3115745 - DNA, 25 bp, Homo sapien
ggcaatcaccgtatggcagccgtgc

SEQ ID NO: 3115746 - DNA, 25 bp, Homo sapien
ttttggtgccaacatccccatagcc

SEQ ID NO: 3115747 - DNA, 25 bp, Homo sapien
agccacccgaacaggggaccatggg

SEQ ID NO: 3115748 - DNA, 25 bp, Homo sapien
tttggtgccaacatccccatagcct

SEQ ID NO: 3115749 - DNA, 25 bp, Homo sapien
ccacagccacccgaacaggggacca

SEQ ID NO: 3115750 - DNA, 25 bp, Homo sapien
gcctggtcaacgtggtgaaaaccca

SEQ ID NO: 3115751 - DNA, 25 bp, Homo sapien
cagcctggtcaacgtggtgaaaacc

SEQ ID NO: 3115752 - DNA, 25 bp, Homo sapien
agaccagcctggtcaacgtggtgaa

SEQ ID NO: 3115753 - DNA, 25 bp, Homo sapien
accagcctggtcaacgtggtgaaaa

SEQ ID NO: 3115754 - DNA, 25 bp, Homo sapien
ggaggctgaggtgccggccgggcac

SEQ ID NO: 3115755 - DNA, 25 bp, Homo sapien
gctccatatttaggataggtgcaag

SEQ ID NO: 3115756 - DNA, 25 bp, Homo sapien
caagttttggtgccggctgggcaca

SEQ ID NO: 3115757 - DNA, 25 bp, Homo sapien
ataggtgcaagttttggtgccggct

SEQ ID NO: 3115758 - DNA, 25 bp, Homo sapien
tatttaggataggtgcaagttttgg

SEQ ID NO: 3115759 - DNA, 25 bp, Homo sapien
aaagatgtctctgggaggccactta

SEQ ID NO: 3115760 - DNA, 25 bp, Homo sapien
cctaaataacccaggtgagcccaga

SEQ ID NO: 3115761 - DNA, 25 bp, Homo sapien
ggtggcacaggtgagactctcctcc

SEQ ID NO: 3115762 - DNA, 25 bp, Homo sapien
tgggacgcacggaccacctaaataa

SEQ ID NO: 3115763 - DNA, 25 bp, Homo sapien
ctgcaagtgcccacgaccccagtgg

SEQ ID NO: 3115764 - DNA, 25 bp, Homo sapien
agtggatgtttgtgggaacctgcca

SEQ ID NO: 3115765 - DNA, 25 bp, Homo sapien
tttggaatctgcagaggacgatgct

SEQ ID NO: 3115766 - DNA, 25 bp, Homo sapien
cagaggacgatgcttccgggttcct

SEQ ID NO: 3115767 - DNA, 25 bp, Homo sapien
aggacgatgcttccgggttcctcgg

SEQ ID NO: 3115768 - DNA, 25 bp, Homo sapien
aggcctttggaatctgcagaggacg

SEQ ID NO: 3115769 - DNA, 25 bp, Homo sapien
gtccacggcggccatgacagctggg

SEQ ID NO: 3115770 - DNA, 25 bp, Homo sapien
gggcgctcggacgtccatagagaga

SEQ ID NO: 3115771 - DNA, 25 bp, Homo sapien
tgtcgattctgccaaactccttcag

SEQ ID NO: 3115772 - DNA, 25 bp, Homo sapien
agttaatgagaatgtcgattctgcc

SEQ ID NO: 3115773 - DNA, 25 bp, Homo sapien
gtgagaagccaccaacctcactcag

SEQ ID NO: 3115774 - DNA, 25 bp, Homo sapien
ctgtgagaagccaccaacctcactc

SEQ ID NO: 3115775 - DNA, 25 bp, Homo sapien
aagccaccaacctcactcagcaccg

SEQ ID NO: 3115776 - DNA, 25 bp, Homo sapien
gagaagccaccaacctcactcagca

SEQ ID NO: 3115777 - DNA, 25 bp, Homo sapien
cactgaagtcacaacgaattagggt

SEQ ID NO: 3115778 - DNA, 25 bp, Homo sapien
atgaccagagcaagacgggcgtcct

SEQ ID NO: 3115779 - DNA, 25 bp, Homo sapien
tcgtagtactctgttagcccaggaa

SEQ ID NO: 3115780 - DNA, 25 bp, Homo sapien
tccgtacctgcgactgtggccttgt

SEQ ID NO: 3115781 - DNA, 25 bp, Homo sapien
tgcagaatgggagaccgcaggagct

SEQ ID NO: 3115782 - DNA, 25 bp, Homo sapien
ctgcagaatgggagaccgcaggagc

SEQ ID NO: 3115783 - DNA, 25 bp, Homo sapien
acttctcatagagcacacgagacac

SEQ ID NO: 3115784 - DNA, 25 bp, Homo sapien
aaggtgccgctggtatcgatgtcca

SEQ ID NO: 3115785 - DNA, 25 bp, Homo sapien
tcttgaaggcgttgaaggacaaggc

SEQ ID NO: 3115786 - DNA, 25 bp, Homo sapien
cgatgtccatcacggtcttgaaggc

SEQ ID NO: 3115787 - DNA, 25 bp, Homo sapien
gatgttcacgatcacccctccgtgg

SEQ ID NO: 3115788 - DNA, 25 bp, Homo sapien
cacagcggccttggcggagcctgca

SEQ ID NO: 3115789 - DNA, 25 bp, Homo sapien
tgcatgcacctggagcgcctgcccc

SEQ ID NO: 3115790 - DNA, 25 bp, Homo sapien
ggtggcagtgatgttcacgatcacc

SEQ ID NO: 3115791 - DNA, 25 bp, Homo sapien
cagacggcccattggggacccacgt

SEQ ID NO: 3115792 - DNA, 25 bp, Homo sapien
aagcagacggcccattggggaccca

SEQ ID NO: 3115793 - DNA, 25 bp, Homo sapien
tgccctctgcgagggcgcagggcca

SEQ ID NO: 3115794 - DNA, 25 bp, Homo sapien
ttggatatgaaagggccgctctgcc

SEQ ID NO: 3115795 - DNA, 25 bp, Homo sapien
ccaggggcgaggctgttgacgcgga

SEQ ID NO: 3115796 - DNA, 25 bp, Homo sapien
tgttgacgcggatgttttggggacc

SEQ ID NO: 3115797 - DNA, 25 bp, Homo sapien
gggcgaggctgttgacgcggatgtt

SEQ ID NO: 3115798 - DNA, 25 bp, Homo sapien
cgaggctgttgacgcggatgttttg

SEQ ID NO: 3115799 - DNA, 25 bp, Homo sapien
cattccctgagaggcatctgggaac

SEQ ID NO: 3115800 - DNA, 25 bp, Homo sapien
acagggcttttcaacatacaccctg

SEQ ID NO: 3115801 - DNA, 25 bp, Homo sapien
aggcacagaacatagttgccaccat

SEQ ID NO: 3115802 - DNA, 25 bp, Homo sapien
agcacagggcttttcaacatacacc

SEQ ID NO: 3115803 - DNA, 25 bp, Homo sapien
gttccccagcctctgcagcgggctg

SEQ ID NO: 3115804 - DNA, 25 bp, Homo sapien
ctggcagtgaccttggtgctcaggc

SEQ ID NO: 3115805 - DNA, 25 bp, Homo sapien
ctctgcagcgggctggcagtgacct

SEQ ID NO: 3115806 - DNA, 25 bp, Homo sapien
gctggcagtgaccttggtgctcagg

SEQ ID NO: 3115807 - DNA, 25 bp, Homo sapien
ccgtcacgtaggaagccagagggct

SEQ ID NO: 3115808 - DNA, 25 bp, Homo sapien
gagggctggccaggtagagcacgct

SEQ ID NO: 3115809 - DNA, 25 bp, Homo sapien
tagagcacgctgtgggcgatctcgg

SEQ ID NO: 3115810 - DNA, 25 bp, Homo sapien
agcacggcccccgtcacgtaggaag

SEQ ID NO: 3115811 - DNA, 25 bp, Homo sapien
agcagagaaggatgcgaaatccggc

SEQ ID NO: 3115812 - DNA, 25 bp, Homo sapien
gcagccctttgacaccgtttgggaa

SEQ ID NO: 3115813 - DNA, 25 bp, Homo sapien
aggatgcgaaatccggcagcccttt

SEQ ID NO: 3115814 - DNA, 25 bp, Homo sapien
tttgggaacgtcaaccatgccccgc

SEQ ID NO: 3115815 - DNA, 25 bp, Homo sapien
ggagggaaagcgcagtaatagctga

SEQ ID NO: 3115816 - DNA, 25 bp, Homo sapien
gcaggcattgctggttcagattggt

SEQ ID NO: 3115817 - DNA, 25 bp, Homo sapien
agggaaagcgcagtaatagctgagt

SEQ ID NO: 3115818 - DNA, 25 bp, Homo sapien
cattgctggttcagattggtgctct

SEQ ID NO: 3115819 - DNA, 25 bp, Homo sapien
aggcacctgcgtggcagctccacgg

SEQ ID NO: 3115820 - DNA, 25 bp, Homo sapien
ggcccactgtccagttgctcctgcc

SEQ ID NO: 3115821 - DNA, 25 bp, Homo sapien
gcacctgcgtggcagctccacgggc

SEQ ID NO: 3115822 - DNA, 25 bp, Homo sapien
tgcgtggcagctccacgggccaggc

SEQ ID NO: 3115823 - DNA, 25 bp, Homo sapien
ctggtcctcagacacctgcgtggca

SEQ ID NO: 3115824 - DNA, 25 bp, Homo sapien
tggtcctcagacacctgcgtggcac

SEQ ID NO: 3115825 - DNA, 25 bp, Homo sapien
gacatcccagcatcttgtctgtacc

SEQ ID NO: 3115826 - DNA, 25 bp, Homo sapien
gggacatcccagcatcttgtctgta

SEQ ID NO: 3115827 - DNA, 25 bp, Homo sapien
atcttgtctgtacccccaccacctg

SEQ ID NO: 3115828 - DNA, 25 bp, Homo sapien
ggacacccttgaccatggggcaggg

SEQ ID NO: 3115829 - DNA, 25 bp, Homo sapien
ctagcaagattgtagcaaagtgtgt

SEQ ID NO: 3115830 - DNA, 25 bp, Homo sapien
tctaaaagcttttgcaaagtccaat

SEQ ID NO: 3115831 - DNA, 25 bp, Homo sapien
tcttttaagaaaacgcactagcaag

SEQ ID NO: 3115832 - DNA, 25 bp, Homo sapien
gagcacctcagtgttttcagccaag

SEQ ID NO: 3115833 - DNA, 25 bp, Homo sapien
catgtcttagagtaaaaatggaaca

SEQ ID NO: 3115834 - DNA, 25 bp, Homo sapien
tttggtaaagtacatgtcttagagt

SEQ ID NO: 3115835 - DNA, 25 bp, Homo sapien
taaagtacatgtcttagagtaaaaa

SEQ ID NO: 3115836 - DNA, 25 bp, Homo sapien
agtacatgtcttagagtaaaaatgg

SEQ ID NO: 3115837 - DNA, 25 bp, Homo sapien
tccttcggggatttgtacttctctg

SEQ ID NO: 3115838 - DNA, 25 bp, Homo sapien
gcacatgtccgcagggagatggaaa

SEQ ID NO: 3115839 - DNA, 25 bp, Homo sapien
tctggaagaagagccgaacggcttc

SEQ ID NO: 3115840 - DNA, 25 bp, Homo sapien
ctgccggagaaactgcacatgtccg

SEQ ID NO: 3115841 - DNA, 25 bp, Homo sapien
cgcggagcctgtgaagcaggatgag

SEQ ID NO: 3115842 - DNA, 25 bp, Homo sapien
gcggcgaggatccgggcggcggatg

SEQ ID NO: 3115843 - DNA, 25 bp, Homo sapien
ggcgaggatccgggcggcggatggc

SEQ ID NO: 3115844 - DNA, 25 bp, Homo sapien
ttcgcaccgcgcctcagctgccctc

SEQ ID NO: 3115845 - DNA, 25 bp, Homo sapien
cgggcgcgggcatcccctcggcggc

SEQ ID NO: 3115846 - DNA, 25 bp, Homo sapien
ggcgggcgcgggcatcccctcggcg

SEQ ID NO: 3115847 - DNA, 25 bp, Homo sapien
agtggtgcggaagggcgcgggcggc

SEQ ID NO: 3115848 - DNA, 25 bp, Homo sapien
agaggctagtggtgcggaagggcgc

SEQ ID NO: 3115849 - DNA, 25 bp, Homo sapien
gaggctagtggtgcggaagggcgcg

SEQ ID NO: 3115850 - DNA, 25 bp, Homo sapien
gctagtggtgcggaagggcgcgggc

SEQ ID NO: 3115851 - DNA, 25 bp, Homo sapien
gggcgtcggggctcgcaagctgccc

SEQ ID NO: 3115852 - DNA, 25 bp, Homo sapien
gctccgaggcgtagctccgcagggc

SEQ ID NO: 3115853 - DNA, 25 bp, Homo sapien
gcagggcccggagccagttgtgccg

SEQ ID NO: 3115854 - DNA, 25 bp, Homo sapien
tggaagcggcgcttcggagcgcggc

SEQ ID NO: 3115855 - DNA, 25 bp, Homo sapien
tcctcagtccaggagaacaacgggt

SEQ ID NO: 3115856 - DNA, 25 bp, Homo sapien
agtccaggagaacaacgggtcgagt

SEQ ID NO: 3115857 - DNA, 25 bp, Homo sapien
ctcagtccaggagaacaacgggtcg

SEQ ID NO: 3115858 - DNA, 25 bp, Homo sapien
ctgcaagcggaaaggcgcgctctcc

SEQ ID NO: 3115859 - DNA, 25 bp, Homo sapien
aagggagagaagacgtcgacctcgc

SEQ ID NO: 3115860 - DNA, 25 bp, Homo sapien
gagagaagacgtcgacctcgccccg

SEQ ID NO: 3115861 - DNA, 25 bp, Homo sapien
gggagagaagacgtcgacctcgccc

SEQ ID NO: 3115862 - DNA, 25 bp, Homo sapien
ggaagggagagaagacgtcgacctc

SEQ ID NO: 3115863 - DNA, 25 bp, Homo sapien
ggacccgggaccttgctccagcgcc

SEQ ID NO: 3115864 - DNA, 25 bp, Homo sapien
gggacccgggaccttgctccagcgc

SEQ ID NO: 3115865 - DNA, 25 bp, Homo sapien
gacccgggaccttgctccagcgcca

SEQ ID NO: 3115866 - DNA, 25 bp, Homo sapien
acccgggaccttgctccagcgccag

SEQ ID NO: 3115867 - DNA, 25 bp, Homo sapien
tgctctgccccgtagaccgtagcaa

SEQ ID NO: 3115868 - DNA, 25 bp, Homo sapien
cccgtagaccgtagcaaactggatg

SEQ ID NO: 3115869 - DNA, 25 bp, Homo sapien
tcgatgcggacgaaaccgtccccat

SEQ ID NO: 3115870 - DNA, 25 bp, Homo sapien
ggatgaagtcctcgatgcggacgaa

SEQ ID NO: 3115871 - DNA, 25 bp, Homo sapien
gaagagaagcaatccataagcctgg

SEQ ID NO: 3115872 - DNA, 25 bp, Homo sapien
aagcctggtgcccttaacaaccttg

SEQ ID NO: 3115873 - DNA, 25 bp, Homo sapien
ggatgcctaatccttttgtctgata

SEQ ID NO: 3115874 - DNA, 25 bp, Homo sapien
tacataatagacttaagtggatgcc

SEQ ID NO: 3115875 - DNA, 25 bp, Homo sapien
aacatctttgtgaggaagatgcatc

SEQ ID NO: 3115876 - DNA, 25 bp, Homo sapien
cttcccataagggataaaagcatct

SEQ ID NO: 3115877 - DNA, 25 bp, Homo sapien
taaaagcatctgtgtattttgaaca

SEQ ID NO: 3115878 - DNA, 25 bp, Homo sapien
attttgaacatctttgtgaggaaga

SEQ ID NO: 3115879 - DNA, 25 bp, Homo sapien
tcttcaaagctgatcacgccgagcc

SEQ ID NO: 3115880 - DNA, 25 bp, Homo sapien
gatcccttggtagaagtcttcaaag

SEQ ID NO: 3115881 - DNA, 25 bp, Homo sapien
tgggatccaagtacttagttaagtc

SEQ ID NO: 3115882 - DNA, 25 bp, Homo sapien
gatggctgtgatcccttggtagaag

SEQ ID NO: 3115883 - DNA, 25 bp, Homo sapien
gaagcctgcatccagtaattcttga

SEQ ID NO: 3115884 - DNA, 25 bp, Homo sapien
tagaagcctgcatccagtaattctt

SEQ ID NO: 3115885 - DNA, 25 bp, Homo sapien
acctagaagcctgcatccagtaatt

SEQ ID NO: 3115886 - DNA, 25 bp, Homo sapien
cctagaagcctgcatccagtaattc

SEQ ID NO: 3115887 - DNA, 25 bp, Homo sapien
tattcttccaaagcgtgagggtgtg

SEQ ID NO: 3115888 - DNA, 25 bp, Homo sapien
cattttggacacagcgcatgacagc

SEQ ID NO: 3115889 - DNA, 25 bp, Homo sapien
tgtgtgagacacagcaatggcctat

SEQ ID NO: 3115890 - DNA, 25 bp, Homo sapien
caaacaatctgagggtcttgcccca

SEQ ID NO: 3115891 - DNA, 25 bp, Homo sapien
ctcataggtgacgaagtcatcgaac

SEQ ID NO: 3115892 - DNA, 25 bp, Homo sapien
cgaagtcatcgaactcgtccgggca

SEQ ID NO: 3115893 - DNA, 25 bp, Homo sapien
ccaccgtagcactggccatcaggat

SEQ ID NO: 3115894 - DNA, 25 bp, Homo sapien
tcttgggcagaagcgacaccaccgt

SEQ ID NO: 3115895 - DNA, 25 bp, Homo sapien
aggaggcacgagctgtagggcataa

SEQ ID NO: 3115896 - DNA, 25 bp, Homo sapien
gcacgagctgtagggcataaaggaa

SEQ ID NO: 3115897 - DNA, 25 bp, Homo sapien
gcttctacggaagacagcccggagg

SEQ ID NO: 3115898 - DNA, 25 bp, Homo sapien
ttccttcacgccagcttctacggaa

SEQ ID NO: 3115899 - DNA, 25 bp, Homo sapien
tggttacgctctgtcgaccacggct

SEQ ID NO: 3115900 - DNA, 25 bp, Homo sapien
tggaatctaaccctccagaccggcg

SEQ ID NO: 3115901 - DNA, 25 bp, Homo sapien
tgtcgaccacggctgtgctcgaaga

SEQ ID NO: 3115902 - DNA, 25 bp, Homo sapien
gttcaacttcatgcattttctgctg

SEQ ID NO: 3115903 - DNA, 25 bp, Homo sapien
tgcctcacgtgcagaaagagcacac

SEQ ID NO: 3115904 - DNA, 25 bp, Homo sapien
agttaagctgcccacccaagggtga

SEQ ID NO: 3115905 - DNA, 25 bp, Homo sapien
gcttctcggaacagggaactgagta

SEQ ID NO: 3115906 - DNA, 25 bp, Homo sapien
ctgataactgggacaccgccgtaag

SEQ ID NO: 3115907 - DNA, 25 bp, Homo sapien
gggttaccctgcagagccttgggca

SEQ ID NO: 3115908 - DNA, 25 bp, Homo sapien
agttccccggacgttgcagaccaag

SEQ ID NO: 3115909 - DNA, 25 bp, Homo sapien
aggagccaccgtctgtagtcctggg

SEQ ID NO: 3115910 - DNA, 25 bp, Homo sapien
tcctcgtgaagaagccgggtccttc

SEQ ID NO: 3115911 - DNA, 25 bp, Homo sapien
atgccagatggttctagctccgtgg

SEQ ID NO: 3115912 - DNA, 25 bp, Homo sapien
gaggtaactgcgtattcactaaggg

SEQ ID NO: 3115913 - DNA, 25 bp, Homo sapien
cagtatcgaactccactttgtggaa

SEQ ID NO: 3115914 - DNA, 25 bp, Homo sapien
tcactaagggaaagaggcgcatctg

SEQ ID NO: 3115915 - DNA, 25 bp, Homo sapien
caactttcccgttataagctgcctg

SEQ ID NO: 3115916 - DNA, 25 bp, Homo sapien
aactttcccgttataagctgcctgc

SEQ ID NO: 3115917 - DNA, 25 bp, Homo sapien
tcaaacaacaatgtcaccttcctac

SEQ ID NO: 3115918 - DNA, 25 bp, Homo sapien
caaccgggtcactggcttttctcaa

SEQ ID NO: 3115919 - DNA, 25 bp, Homo sapien
ccttcctacttgcttgtcatgctgg

SEQ ID NO: 3115920 - DNA, 25 bp, Homo sapien
gttggagaccggctccccatcgtgt

SEQ ID NO: 3115921 - DNA, 25 bp, Homo sapien
tgctctggggttgtggacgtccact

SEQ ID NO: 3115922 - DNA, 25 bp, Homo sapien
tgccatcgccatcgatactcagagc

SEQ ID NO: 3115923 - DNA, 25 bp, Homo sapien
gttgtggacgtccacttccatgcca

SEQ ID NO: 3115924 - DNA, 25 bp, Homo sapien
tcagagcccctggccggctggatgc

SEQ ID NO: 3115925 - DNA, 25 bp, Homo sapien
cagagcatctgtcctacgaagggag

SEQ ID NO: 3115926 - DNA, 25 bp, Homo sapien
gaaagaattctccacggacacagga

SEQ ID NO: 3115927 - DNA, 25 bp, Homo sapien
taaagtaagcctgagggccagacgc

SEQ ID NO: 3115928 - DNA, 25 bp, Homo sapien
tcagactccctgtaagctggatgcc

SEQ ID NO: 3115929 - DNA, 25 bp, Homo sapien
ctgcgggacgccaggcaggaaaagg

SEQ ID NO: 3115930 - DNA, 25 bp, Homo sapien
gggcccagggcccactcaggacagg

SEQ ID NO: 3115931 - DNA, 25 bp, Homo sapien
ccactcaggacagggctggcctgtg

SEQ ID NO: 3115932 - DNA, 25 bp, Homo sapien
ctcccactcctgcaggacggcaggg

SEQ ID NO: 3115933 - DNA, 25 bp, Homo sapien
tcccactcctgcaggacggcagggc

SEQ ID NO: 3115934 - DNA, 25 bp, Homo sapien
tggtcatccactccgcacctcaagt

SEQ ID NO: 3115935 - DNA, 25 bp, Homo sapien
agacaggatctagctgtagctggga

SEQ ID NO: 3115936 - DNA, 25 bp, Homo sapien
tgtgagccatcgcaaccaattgttt

SEQ ID NO: 3115937 - DNA, 25 bp, Homo sapien
ccatcgcaaccaattgtttttactg

SEQ ID NO: 3115938 - DNA, 25 bp, Homo sapien
tgctggtgtcctcgtccgtgaaggt

SEQ ID NO: 3115939 - DNA, 25 bp, Homo sapien
gtgaaggtctcacactcactgtagg

SEQ ID NO: 3115940 - DNA, 25 bp, Homo sapien
ctctcggagcccatgtacgcgctgt

SEQ ID NO: 3115941 - DNA, 25 bp, Homo sapien
tgtctgcgtccccttcaggttgcag

SEQ ID NO: 3115942 - DNA, 25 bp, Homo sapien
ccccgatcaccgtgatgacagactg

SEQ ID NO: 3115943 - DNA, 25 bp, Homo sapien
tcctcgcccccgatcaccgtgatga

SEQ ID NO: 3115944 - DNA, 25 bp, Homo sapien
tcaaagtgctcctcgcccccgatca

SEQ ID NO: 3115945 - DNA, 25 bp, Homo sapien
gatcaccgtgatgacagactggcca

SEQ ID NO: 3115946 - DNA, 25 bp, Homo sapien
tctggggacagctccgcctcactgc

SEQ ID NO: 3115947 - DNA, 25 bp, Homo sapien
ctgggcgtgaggaaagcggggtcac

SEQ ID NO: 3115948 - DNA, 25 bp, Homo sapien
tgaggaaagcggggtcactgcagcc

SEQ ID NO: 3115949 - DNA, 25 bp, Homo sapien
gctgcccgttgcatagggtctctgg

SEQ ID NO: 3115950 - DNA, 25 bp, Homo sapien
gattgaagtaacaaccccatcggcc

SEQ ID NO: 3115951 - DNA, 25 bp, Homo sapien
gatggacgacaacctagtagcaaag

SEQ ID NO: 3115952 - DNA, 25 bp, Homo sapien
cacacaggatatccgtgcagggtcc

SEQ ID NO: 3115953 - DNA, 25 bp, Homo sapien
tagagggactgactcccacgtggga

SEQ ID NO: 3115954 - DNA, 25 bp, Homo sapien
tgggaaaccatttggaagctcaagt

SEQ ID NO: 3115955 - DNA, 25 bp, Homo sapien
aaaggcagcctcatcgcgggcgctg

SEQ ID NO: 3115956 - DNA, 25 bp, Homo sapien
tgctgtgggaaaccatttggaagct

SEQ ID NO: 3115957 - DNA, 25 bp, Homo sapien
accatttggaagctcaagtaaagaa

SEQ ID NO: 3115958 - DNA, 25 bp, Homo sapien
tgtgacttcacctccaagggcttct

SEQ ID NO: 3115959 - DNA, 25 bp, Homo sapien
ctgtgacttcacctccaagggcttc

SEQ ID NO: 3115960 - DNA, 25 bp, Homo sapien
cgacctgtcgaaactcagtgttaga

SEQ ID NO: 3115961 - DNA, 25 bp, Homo sapien
aaaagaccgacctgtcgaaactcag

SEQ ID NO: 3115962 - DNA, 25 bp, Homo sapien
gaccgacctgtcgaaactcagtgtt

SEQ ID NO: 3115963 - DNA, 25 bp, Homo sapien
cctgtcgaaactcagtgttagattt

SEQ ID NO: 3115964 - DNA, 25 bp, Homo sapien
gcctcatcagtgaggatgctgtgca

SEQ ID NO: 3115965 - DNA, 25 bp, Homo sapien
cagtaaaactcaaacgcctcatcag

SEQ ID NO: 3115966 - DNA, 25 bp, Homo sapien
tcatttcaagatcactcaggcgggc

SEQ ID NO: 3115967 - DNA, 25 bp, Homo sapien
tcaggcgggcagaaagatcctcaag

SEQ ID NO: 3115968 - DNA, 25 bp, Homo sapien
gcctggcccgcttcatagagtctta

SEQ ID NO: 3115969 - DNA, 25 bp, Homo sapien
caagattctggacggcctcgggtct

SEQ ID NO: 3115970 - DNA, 25 bp, Homo sapien
tagcagaacctggacgtgaggctcc

SEQ ID NO: 3115971 - DNA, 25 bp, Homo sapien
tcttcagaaaatgagagacgagacc

SEQ ID NO: 3115972 - DNA, 25 bp, Homo sapien
cagctattggcctgttctgaggcga

SEQ ID NO: 3115973 - DNA, 25 bp, Homo sapien
cagaggtggtctggactaagtcacc

SEQ ID NO: 3115974 - DNA, 25 bp, Homo sapien
tggacatcgtatctgacatcaaagc

SEQ ID NO: 3115975 - DNA, 25 bp, Homo sapien
taagcttactttcaggcaagtccat

SEQ ID NO: 3115976 - DNA, 25 bp, Homo sapien
tgcctcattactcccatagcctgtg

SEQ ID NO: 3115977 - DNA, 25 bp, Homo sapien
caagccctgacagcacggtggtgtc

SEQ ID NO: 3115978 - DNA, 25 bp, Homo sapien
cacgccgtttgcagctggtgcagac

SEQ ID NO: 3115979 - DNA, 25 bp, Homo sapien
gaagaggtttgcctcctggttctga

SEQ ID NO: 3115980 - DNA, 25 bp, Homo sapien
ggtgaggccgcatacgtctcgttac

SEQ ID NO: 3115981 - DNA, 25 bp, Homo sapien
caggcaagtccatgcacaaatgctc

SEQ ID NO: 3115982 - DNA, 25 bp, Homo sapien
ggtgggcggcctttcagcaatgctc

SEQ ID NO: 3115983 - DNA, 25 bp, Homo sapien
ggaaactcaggctgtggagatacga

SEQ ID NO: 3115984 - DNA, 25 bp, Homo sapien
caccttcttgctggagagccgcttt

SEQ ID NO: 3115985 - DNA, 25 bp, Homo sapien
ttgccaccttcttgctggagagccg

SEQ ID NO: 3115986 - DNA, 25 bp, Homo sapien
gccaccttcttgctggagagccgct

SEQ ID NO: 3115987 - DNA, 25 bp, Homo sapien
ccttcttgctggagagccgctttgt

SEQ ID NO: 3115988 - DNA, 25 bp, Homo sapien
cactgggtctcgctacctcagagct

SEQ ID NO: 3115989 - DNA, 25 bp, Homo sapien
gattaattatccacttcagaacgtt

SEQ ID NO: 3115990 - DNA, 25 bp, Homo sapien
taggaattggagtcagacccatccc

SEQ ID NO: 3115991 - DNA, 25 bp, Homo sapien
gcggccccttccagaccttagtgaa

SEQ ID NO: 3115992 - DNA, 25 bp, Homo sapien
gaagctacaggaagatacgctggac

SEQ ID NO: 3115993 - DNA, 25 bp, Homo sapien
tgggaagggccttaaccctgcatgt

SEQ ID NO: 3115994 - DNA, 25 bp, Homo sapien
aaaggcagactctgacggcagcaga

SEQ ID NO: 3115995 - DNA, 25 bp, Homo sapien
gcaggaagccaacagatctatacga

SEQ ID NO: 3115996 - DNA, 25 bp, Homo sapien
gatgcatgatgacgttcacctctgc

SEQ ID NO: 3115997 - DNA, 25 bp, Homo sapien
gatgatgtcacttcacagagcaaga

SEQ ID NO: 3115998 - DNA, 25 bp, Homo sapien
ggcattggcaatgcgcacctgtagt

SEQ ID NO: 3115999 - DNA, 25 bp, Homo sapien
aaacaagtgggacgcggtggctcct

SEQ ID NO: 3116000 - DNA, 25 bp, Homo sapien
tgcacgtcacgttcctaagagctca

SEQ ID NO: 3116001 - DNA, 25 bp, Homo sapien
aacagaagtgtagctggggatgcac

SEQ ID NO: 3116002 - DNA, 25 bp, Homo sapien
tgcagcctgtctggagtaaaagact

SEQ ID NO: 3116003 - DNA, 25 bp, Homo sapien
tggagtaaaagacttgatgaagcgg

SEQ ID NO: 3116004 - DNA, 25 bp, Homo sapien
taagcgcgtgcttgtggtcaccacg

SEQ ID NO: 3116005 - DNA, 25 bp, Homo sapien
tgagtagacgcaaaggcccataggc

SEQ ID NO: 3116006 - DNA, 25 bp, Homo sapien
ggtcccaggaaaggtgtggatccca

SEQ ID NO: 3116007 - DNA, 25 bp, Homo sapien
gacacactgggaaactggtccgacc

SEQ ID NO: 3116008 - DNA, 25 bp, Homo sapien
ctctgggccctccatgagctcgggg

SEQ ID NO: 3116009 - DNA, 25 bp, Homo sapien
cagggcccctgactggtgcaggtac

SEQ ID NO: 3116010 - DNA, 25 bp, Homo sapien
cttgtcagcaatgtcctcctctggg

SEQ ID NO: 3116011 - DNA, 25 bp, Homo sapien
agggcctccatggtcagggcccctg

SEQ ID NO: 3116012 - DNA, 25 bp, Homo sapien
cttcagggtcaggcagccagaagca

SEQ ID NO: 3116013 - DNA, 25 bp, Homo sapien
ggtcaggcagccagaagcagaaggg

SEQ ID NO: 3116014 - DNA, 25 bp, Homo sapien
ttcagggtcaggcagccagaagcag

SEQ ID NO: 3116015 - DNA, 25 bp, Homo sapien
cagggtcaggcagccagaagcagaa

SEQ ID NO: 3116016 - DNA, 25 bp, Homo sapien
gcggctgtgttgctcaccggtggct

SEQ ID NO: 3116017 - DNA, 25 bp, Homo sapien
tcaccggtggctgccgtgtcctttt

SEQ ID NO: 3116018 - DNA, 25 bp, Homo sapien
gctcaccggtggctgccgtgtcctt

SEQ ID NO: 3116019 - DNA, 25 bp, Homo sapien
ccggtggctgccgtgtccttttcca

SEQ ID NO: 3116020 - DNA, 25 bp, Homo sapien
gccaggtccacatgggagccaggac

SEQ ID NO: 3116021 - DNA, 25 bp, Homo sapien
ccacatgggagccaggacgagtctg

SEQ ID NO: 3116022 - DNA, 25 bp, Homo sapien
tgagatgccaggtccacatgggagc

SEQ ID NO: 3116023 - DNA, 25 bp, Homo sapien
gtccacatgggagccaggacgagtc

SEQ ID NO: 3116024 - DNA, 25 bp, Homo sapien
agctgagctgtctccaggcagggtg

SEQ ID NO: 3116025 - DNA, 25 bp, Homo sapien
ggttctcgatctcaatgctcttctc

SEQ ID NO: 3116026 - DNA, 25 bp, Homo sapien
ctgcaggttctcgatctcaatgctc

SEQ ID NO: 3116027 - DNA, 25 bp, Homo sapien
acaggagctccttctgacgccgggt

SEQ ID NO: 3116028 - DNA, 25 bp, Homo sapien
agctccttctgacgccgggtctctt

SEQ ID NO: 3116029 - DNA, 25 bp, Homo sapien
tggcgggctgtcgggaacctcgcct

SEQ ID NO: 3116030 - DNA, 25 bp, Homo sapien
gcgggctgtcgggaacctcgcctac

SEQ ID NO: 3116031 - DNA, 25 bp, Homo sapien
ggcgggctgtcgggaacctcgccta

SEQ ID NO: 3116032 - DNA, 25 bp, Homo sapien
gcgggctgtcgggaacctctcctac

SEQ ID NO: 3116033 - DNA, 25 bp, Homo sapien
ggcgggctgtcgggaacctctccta

SEQ ID NO: 3116034 - DNA, 25 bp, Homo sapien
tgggctgaccgcaggttgctgacct

SEQ ID NO: 3116035 - DNA, 25 bp, Homo sapien
aaccacaaggttcctggtggccact

SEQ ID NO: 3116036 - DNA, 25 bp, Homo sapien
caagatgccagaggcctcgtgctgg

SEQ ID NO: 3116037 - DNA, 25 bp, Homo sapien
aaggttcctggtggccactccagga

SEQ ID NO: 3116038 - DNA, 25 bp, Homo sapien
aaccccaacacgtgtcggccgtgtg

SEQ ID NO: 3116039 - DNA, 25 bp, Homo sapien
gaaccccggtccgtgtcagccatgt

SEQ ID NO: 3116040 - DNA, 25 bp, Homo sapien
catgtaccaagatgcaaaccccggt

SEQ ID NO: 3116041 - DNA, 25 bp, Homo sapien
tggctgttccgagatgcaaacccca

SEQ ID NO: 3116042 - DNA, 25 bp, Homo sapien
gccttcagacagggcgtgcaggacc

SEQ ID NO: 3116043 - DNA, 25 bp, Homo sapien
tgttctcctcgtccagttgctgtag

SEQ ID NO: 3116044 - DNA, 25 bp, Homo sapien
tcctccagacgctcaatgttggcct

SEQ ID NO: 3116045 - DNA, 25 bp, Homo sapien
cgtgcaggaccggagttcactgttc

SEQ ID NO: 3116046 - DNA, 25 bp, Homo sapien
tcactgagccgcagcgtcagcgact

SEQ ID NO: 3116047 - DNA, 25 bp, Homo sapien
gcgtcagcgactctatctcatccaa

SEQ ID NO: 3116048 - DNA, 25 bp, Homo sapien
tctggaactggtgcctctcgtgact

SEQ ID NO: 3116049 - DNA, 25 bp, Homo sapien
gcgactctatctcatccaacagctt

SEQ ID NO: 3116050 - DNA, 25 bp, Homo sapien
ctgcttcagcctgcggacctcctgc

SEQ ID NO: 3116051 - DNA, 25 bp, Homo sapien
agctgctttcggaggtcctcgatca

SEQ ID NO: 3116052 - DNA, 25 bp, Homo sapien
gcttcagcctgcggacctcctgctc

SEQ ID NO: 3116053 - DNA, 25 bp, Homo sapien
ccagctgctttcggaggtcctcgat

SEQ ID NO: 3116054 - DNA, 25 bp, Homo sapien
aagaggctcttggcgccctggatgc

SEQ ID NO: 3116055 - DNA, 25 bp, Homo sapien
tcatctcgggagacggagctgatct

SEQ ID NO: 3116056 - DNA, 25 bp, Homo sapien
tgatctgcccgttcagctcctcgtt

SEQ ID NO: 3116057 - DNA, 25 bp, Homo sapien
gatgctgagggtaatgatctgcccg

SEQ ID NO: 3116058 - DNA, 25 bp, Homo sapien
gcagactgtggaccccaggccacac

SEQ ID NO: 3116059 - DNA, 25 bp, Homo sapien
cacagcgcacagacagtgcagactg

SEQ ID NO: 3116060 - DNA, 25 bp, Homo sapien
aggccacagcgcataaaccacagcg

SEQ ID NO: 3116061 - DNA, 25 bp, Homo sapien
ggtcagagctgaggcgcatgggcca

SEQ ID NO: 3116062 - DNA, 25 bp, Homo sapien
gatggccacgatgatcctgtcgatg

SEQ ID NO: 3116063 - DNA, 25 bp, Homo sapien
tgtcgatgtagtcctgcaggcggaa

SEQ ID NO: 3116064 - DNA, 25 bp, Homo sapien
cctgcttctgaatcgcctccatgag

SEQ ID NO: 3116065 - DNA, 25 bp, Homo sapien
acctccaggatggacgggttggtct

SEQ ID NO: 3116066 - DNA, 25 bp, Homo sapien
tggtctgacggaaccactccagggt

SEQ ID NO: 3116067 - DNA, 25 bp, Homo sapien
ttacatcctagcgtggaaggcggcg

SEQ ID NO: 3116068 - DNA, 25 bp, Homo sapien
gaagtgtacgcgttcatggccagct

SEQ ID NO: 3116069 - DNA, 25 bp, Homo sapien
caggagcggctcaacatgggtgaca

SEQ ID NO: 3116070 - DNA, 25 bp, Homo sapien
ttttgacggctctcccgacatggga

SEQ ID NO: 3116071 - DNA, 25 bp, Homo sapien
gtctcagcagctcgtcaggatccag

SEQ ID NO: 3116072 - DNA, 25 bp, Homo sapien
tctgagctcagacaactgatggcct

SEQ ID NO: 3116073 - DNA, 25 bp, Homo sapien
gaggtgcaatcctacggccttggaa

SEQ ID NO: 3116074 - DNA, 25 bp, Homo sapien
ctgcatctgagagtgacaggcaggc

SEQ ID NO: 3116075 - DNA, 25 bp, Homo sapien
atctgcatctgagagtgacaggcag

SEQ ID NO: 3116076 - DNA, 25 bp, Homo sapien
atctgagagtgacaggcaggcgggc

SEQ ID NO: 3116077 - DNA, 25 bp, Homo sapien
tgcatctgagagtgacaggcaggcg

SEQ ID NO: 3116078 - DNA, 25 bp, Homo sapien
ctctcgggagaatgccttggcgtca

SEQ ID NO: 3116079 - DNA, 25 bp, Homo sapien
acgctgcgtgctgtgcttggtcctg

SEQ ID NO: 3116080 - DNA, 25 bp, Homo sapien
gcggagggacgccattaaacggcca

SEQ ID NO: 3116081 - DNA, 25 bp, Homo sapien
ggcgtcaagcttatcaggctgcagg

SEQ ID NO: 3116082 - DNA, 25 bp, Homo sapien
gctgccttcgtagcgtagcgcccgg

SEQ ID NO: 3116083 - DNA, 25 bp, Homo sapien
gccggccgatccacaacttctgcct

SEQ ID NO: 3116084 - DNA, 25 bp, Homo sapien
gccttacgctgccttcgtagcgtag

SEQ ID NO: 3116085 - DNA, 25 bp, Homo sapien
gcgctgcccggacggcctcccgctc

SEQ ID NO: 3116086 - DNA, 25 bp, Homo sapien
aggcgtgagccacagcggctggctt

SEQ ID NO: 3116087 - DNA, 25 bp, Homo sapien
ggcgtgagccacagcggctggcttt

SEQ ID NO: 3116088 - DNA, 25 bp, Homo sapien
gcgtgagccacagcggctggctttt

SEQ ID NO: 3116089 - DNA, 25 bp, Homo sapien
ctctgtgccgcgtctgggctgctgc

SEQ ID NO: 3116090 - DNA, 25 bp, Homo sapien
ctctctgtgccgcgtctgggctgct

SEQ ID NO: 3116091 - DNA, 25 bp, Homo sapien
ggccctctctgtgccgcgtctgggc

SEQ ID NO: 3116092 - DNA, 25 bp, Homo sapien
ccctctctgtgccgcgtctgggctg

SEQ ID NO: 3116093 - DNA, 25 bp, Homo sapien
agggcctgggcacacgtgaatcacc

SEQ ID NO: 3116094 - DNA, 25 bp, Homo sapien
cacacgtgaatcacccagtgcagtg

SEQ ID NO: 3116095 - DNA, 25 bp, Homo sapien
ccgaggacgcaggtcaggtcagtcc

SEQ ID NO: 3116096 - DNA, 25 bp, Homo sapien
aggtcagtccgtggttcccatcctg

SEQ ID NO: 3116097 - DNA, 25 bp, Homo sapien
agaaaacctttcttgagctggagcc

SEQ ID NO: 3116098 - DNA, 25 bp, Homo sapien
gatccgaggtatctgagacatcgct

SEQ ID NO: 3116099 - DNA, 25 bp, Homo sapien
gagaacgttaatcctgagacgggag

SEQ ID NO: 3116100 - DNA, 25 bp, Homo sapien
gctcaaacatgcaggacgcaggcga

SEQ ID NO: 3116101 - DNA, 25 bp, Homo sapien
gtgctgccggctgaccagggcacct

SEQ ID NO: 3116102 - DNA, 25 bp, Homo sapien
cgctcctacaccagccagccgctgc

SEQ ID NO: 3116103 - DNA, 25 bp, Homo sapien
gtccgactcggtctctgcggccagg

SEQ ID NO: 3116104 - DNA, 25 bp, Homo sapien
aagctgtggtccgactcggtctctg

SEQ ID NO: 3116105 - DNA, 25 bp, Homo sapien
agtgaatgaaactgcctcgggctgc

SEQ ID NO: 3116106 - DNA, 25 bp, Homo sapien
tgcgggatgctgtaacactggactg

SEQ ID NO: 3116107 - DNA, 25 bp, Homo sapien
caaagctgttgtcggcacacgtgga

SEQ ID NO: 3116108 - DNA, 25 bp, Homo sapien
tctgcacaaggcaaaccaagacagg

SEQ ID NO: 3116109 - DNA, 25 bp, Homo sapien
ccggtgggaactaggtaatgcagcc

SEQ ID NO: 3116110 - DNA, 25 bp, Homo sapien
tgcggaagatggcttggcagttcct

SEQ ID NO: 3116111 - DNA, 25 bp, Homo sapien
gataaatgaaaacaggtccacgcaa

SEQ ID NO: 3116112 - DNA, 25 bp, Homo sapien
cctgggacggccagaatcacaagga

SEQ ID NO: 3116113 - DNA, 25 bp, Homo sapien
cccagggatgccgacccaggggagg

SEQ ID NO: 3116114 - DNA, 25 bp, Homo sapien
caacacgggtgttctgtggagccga

SEQ ID NO: 3116115 - DNA, 25 bp, Homo sapien
cgggaatctgctctaacagcgggct

SEQ ID NO: 3116116 - DNA, 25 bp, Homo sapien
gagccgagcgaactccgtgatgctg

SEQ ID NO: 3116117 - DNA, 25 bp, Homo sapien
agcagagagacccaaggccgggaat

SEQ ID NO: 3116118 - DNA, 25 bp, Homo sapien
aaactcaggaccaggtcgtcctggg

SEQ ID NO: 3116119 - DNA, 25 bp, Homo sapien
ccaggcctgtggacggcagatagca

SEQ ID NO: 3116120 - DNA, 25 bp, Homo sapien
gaagaacaggtgctcagacctacgg

SEQ ID NO: 3116121 - DNA, 25 bp, Homo sapien
tcagacctacggaagggcaggtgca

SEQ ID NO: 3116122 - DNA, 25 bp, Homo sapien
aagttgcggaaggtgcagcgggcgc

SEQ ID NO: 3116123 - DNA, 25 bp, Homo sapien
tggccggccgggttcaggaaggtgc

SEQ ID NO: 3116124 - DNA, 25 bp, Homo sapien
aggaccccgttgaggactggcagga

SEQ ID NO: 3116125 - DNA, 25 bp, Homo sapien
cgctgagccgcaggatgtggttgag

SEQ ID NO: 3116126 - DNA, 25 bp, Homo sapien
gccccctggcgggctccgtggccac

SEQ ID NO: 3116127 - DNA, 25 bp, Homo sapien
tgccccctggcgggctccgtggcca

SEQ ID NO: 3116128 - DNA, 25 bp, Homo sapien
cttctcctcctcgtccttgtcctcg

SEQ ID NO: 3116129 - DNA, 25 bp, Homo sapien
ctcctcctcgtccttgtcctcgcac

SEQ ID NO: 3116130 - DNA, 25 bp, Homo sapien
ttctcctcctcgtccttgtcctcgc

SEQ ID NO: 3116131 - DNA, 25 bp, Homo sapien
ctccttctcctcctcgtccttgtcc

SEQ ID NO: 3116132 - DNA, 25 bp, Homo sapien
gtgcagcgtgcaacgcggacacgcc

SEQ ID NO: 3116133 - DNA, 25 bp, Homo sapien
tgttgtgcagcgtgcaacgcggaca

SEQ ID NO: 3116134 - DNA, 25 bp, Homo sapien
ggcgtgttgtgcagcgtgcaacgcg

SEQ ID NO: 3116135 - DNA, 25 bp, Homo sapien
ttgtgcagcgtgcaacgcggacacg

SEQ ID NO: 3116136 - DNA, 25 bp, Homo sapien
ctgcgtgggcccccgcagacggagc

SEQ ID NO: 3116137 - DNA, 25 bp, Homo sapien
tgggcccccgcagacggagcaggag

SEQ ID NO: 3116138 - DNA, 25 bp, Homo sapien
cgtgggcccccgcagacggagcagg

SEQ ID NO: 3116139 - DNA, 25 bp, Homo sapien
tgcgtgggcccccgcagacggagca

SEQ ID NO: 3116140 - DNA, 25 bp, Homo sapien
acttccgggaccaccagggcctcag

SEQ ID NO: 3116141 - DNA, 25 bp, Homo sapien
ctgggcggctctggttcggcagctg

SEQ ID NO: 3116142 - DNA, 25 bp, Homo sapien
gcggcaggcacgacgtggaagccgg

SEQ ID NO: 3116143 - DNA, 25 bp, Homo sapien
agggcctcaggagggatccgtggca

SEQ ID NO: 3116144 - DNA, 25 bp, Homo sapien
ggggaacctcgcgtcggctgcgcgg

SEQ ID NO: 3116145 - DNA, 25 bp, Homo sapien
ctgggggggaacctcgcgtcggctg

SEQ ID NO: 3116146 - DNA, 25 bp, Homo sapien
ggaacctcgcgtcggctgcgcggca

SEQ ID NO: 3116147 - DNA, 25 bp, Homo sapien
gtcggctgcgcggcacggggttgtt

SEQ ID NO: 3116148 - DNA, 25 bp, Homo sapien
cagcaactctgctaggcgggaggcc

SEQ ID NO: 3116149 - DNA, 25 bp, Homo sapien
acagcaactctgctaggcgggaggc

SEQ ID NO: 3116150 - DNA, 25 bp, Homo sapien
gccggcagagggtgacggctgggca

SEQ ID NO: 3116151 - DNA, 25 bp, Homo sapien
cacttggcacatgaccaggtggtga

SEQ ID NO: 3116152 - DNA, 25 bp, Homo sapien
tgtctccggccaggtcaatgatgtc

SEQ ID NO: 3116153 - DNA, 25 bp, Homo sapien
gaaggccacgatgttctcccagagt

SEQ ID NO: 3116154 - DNA, 25 bp, Homo sapien
cctggaagccgtgcagtttggagca

SEQ ID NO: 3116155 - DNA, 25 bp, Homo sapien
tgatgccatcctggactctagaggg

SEQ ID NO: 3116156 - DNA, 25 bp, Homo sapien
gcggagcacgggtacatcccgacct

SEQ ID NO: 3116157 - DNA, 25 bp, Homo sapien
cagttgacccgtgggtgatgccatc

SEQ ID NO: 3116158 - DNA, 25 bp, Homo sapien
ggccctgtgtcgaggaagccctcag

SEQ ID NO: 3116159 - DNA, 25 bp, Homo sapien
tgcagagaccacggccatgtgctca

SEQ ID NO: 3116160 - DNA, 25 bp, Homo sapien
cagagaccacggccatgtgctcagg

SEQ ID NO: 3116161 - DNA, 25 bp, Homo sapien
ctgcagagaccacggccatgtgctc

SEQ ID NO: 3116162 - DNA, 25 bp, Homo sapien
gcagagaccacggccatgtgctcag

SEQ ID NO: 3116163 - DNA, 25 bp, Homo sapien
gagggccgcagtgtgtggaacacag

SEQ ID NO: 3116164 - DNA, 25 bp, Homo sapien
tgtggtccctgaagacggagcagtt

SEQ ID NO: 3116165 - DNA, 25 bp, Homo sapien
tgtcatccacgaagctcacattgtt

SEQ ID NO: 3116166 - DNA, 25 bp, Homo sapien
gatctcctggggtcgcagccactgc

SEQ ID NO: 3116167 - DNA, 25 bp, Homo sapien
cagggcagcatgtcgtccaccagca

SEQ ID NO: 3116168 - DNA, 25 bp, Homo sapien
tggtccacgtgccgtccttgcacag

SEQ ID NO: 3116169 - DNA, 25 bp, Homo sapien
ctgcacacaggctgcgcgtgaccat

SEQ ID NO: 3116170 - DNA, 25 bp, Homo sapien
ctcatcacagggcagcatgtcgtcc

SEQ ID NO: 3116171 - DNA, 25 bp, Homo sapien
gcagccggccttgttttcggggctg

SEQ ID NO: 3116172 - DNA, 25 bp, Homo sapien
cagccggccttgttttcggggctgg

SEQ ID NO: 3116173 - DNA, 25 bp, Homo sapien
ttggccagcgccttctcgatgaggg

SEQ ID NO: 3116174 - DNA, 25 bp, Homo sapien
gaactcagcattttggcccagatga

SEQ ID NO: 3116175 - DNA, 25 bp, Homo sapien
ccgcctggagcgcaaagtaggagcc

SEQ ID NO: 3116176 - DNA, 25 bp, Homo sapien
cagatgaggtcagtgtcaacgggct

SEQ ID NO: 3116177 - DNA, 25 bp, Homo sapien
gggtcgaggcacagacccgctgacc

SEQ ID NO: 3116178 - DNA, 25 bp, Homo sapien
gcacagacccgctgaccagagtgtg

SEQ ID NO: 3116179 - DNA, 25 bp, Homo sapien
tgaccagagtgtggccaaactcgac

SEQ ID NO: 3116180 - DNA, 25 bp, Homo sapien
gtgtggccaaactcgacacgccgct

SEQ ID NO: 3116181 - DNA, 25 bp, Homo sapien
cgaccttgccaccaagacaggcagg

SEQ ID NO: 3116182 - DNA, 25 bp, Homo sapien
ggccgcgaccttgccaccaagacag

SEQ ID NO: 3116183 - DNA, 25 bp, Homo sapien
gctggccgcgaccttgccaccaaga

SEQ ID NO: 3116184 - DNA, 25 bp, Homo sapien
cgcgaccttgccaccaagacaggca

SEQ ID NO: 3116185 - DNA, 25 bp, Homo sapien
taggccgaatcgtccaccttcatgt

SEQ ID NO: 3116186 - DNA, 25 bp, Homo sapien
tggtgccctggacatctcggacatc

SEQ ID NO: 3116187 - DNA, 25 bp, Homo sapien
gcaggcccaggctctcgtaggccga

SEQ ID NO: 3116188 - DNA, 25 bp, Homo sapien
gacatctcggacatccaggatggag

SEQ ID NO: 3116189 - DNA, 25 bp, Homo sapien
agtgtggccactcgtcggaccagct

SEQ ID NO: 3116190 - DNA, 25 bp, Homo sapien
tcactgctgccgtgcggcatgagct

SEQ ID NO: 3116191 - DNA, 25 bp, Homo sapien
aaagtcgccgtactccatccagaag

SEQ ID NO: 3116192 - DNA, 25 bp, Homo sapien
accagctgccgttccaggagaaacg

SEQ ID NO: 3116193 - DNA, 25 bp, Homo sapien
cagctgctccgtcaccgtcctcttg

SEQ ID NO: 3116194 - DNA, 25 bp, Homo sapien
caggtgccagctgctccgtcaccgt

SEQ ID NO: 3116195 - DNA, 25 bp, Homo sapien
tgctccgtcaccgtcctcttgcagc

SEQ ID NO: 3116196 - DNA, 25 bp, Homo sapien
ccgtcaccgtcctcttgcagcccgg

SEQ ID NO: 3116197 - DNA, 25 bp, Homo sapien
gaagagcgcgaactccagcgaggcc

SEQ ID NO: 3116198 - DNA, 25 bp, Homo sapien
ctgccagtccgagtgcaccttacag

SEQ ID NO: 3116199 - DNA, 25 bp, Homo sapien
ggaaagcagccctgcacccgcgcct

SEQ ID NO: 3116200 - DNA, 25 bp, Homo sapien
tccagcaccgtgagcgctgttaccc

SEQ ID NO: 3116201 - DNA, 25 bp, Homo sapien
ccccagtggttgaaggcgcagcaca

SEQ ID NO: 3116202 - DNA, 25 bp, Homo sapien
tgccgaacgtggcccggaacaccag

SEQ ID NO: 3116203 - DNA, 25 bp, Homo sapien
acgaacttcttgaccgcgcgcttac

SEQ ID NO: 3116204 - DNA, 25 bp, Homo sapien
gcatgacgtcgcagctgacgaactt

SEQ ID NO: 3116205 - DNA, 25 bp, Homo sapien
ctacaaggacgggcgtgtgaaccgc

SEQ ID NO: 3116206 - DNA, 25 bp, Homo sapien
aggacgggcgtgtgaaccgcagccc

SEQ ID NO: 3116207 - DNA, 25 bp, Homo sapien
tacaaggacgggcgtgtgaaccgca

SEQ ID NO: 3116208 - DNA, 25 bp, Homo sapien
caaggacgggcgtgtgaaccgcagc

SEQ ID NO: 3116209 - DNA, 25 bp, Homo sapien
tctccgcggctctcggtgagcagga

SEQ ID NO: 3116210 - DNA, 25 bp, Homo sapien
aggctctcgggacccctgccgaggg

SEQ ID NO: 3116211 - DNA, 25 bp, Homo sapien
cagcgtggtcggctgggcttccacg

SEQ ID NO: 3116212 - DNA, 25 bp, Homo sapien
tgaccagcctcgagctgtacacagc

SEQ ID NO: 3116213 - DNA, 25 bp, Homo sapien
aggtgctggggcatactccccctgc

SEQ ID NO: 3116214 - DNA, 25 bp, Homo sapien
gaggtgctggggcatactccccctg

SEQ ID NO: 3116215 - DNA, 25 bp, Homo sapien
ggaggtgctggggcatactccccct

SEQ ID NO: 3116216 - DNA, 25 bp, Homo sapien
ggtgctggggcatactccccctgcc

SEQ ID NO: 3116217 - DNA, 25 bp, Homo sapien
cactgcacgtgcaggtaggccttgg

SEQ ID NO: 3116218 - DNA, 25 bp, Homo sapien
cccaaccgtgtgtcaggtagtagca

SEQ ID NO: 3116219 - DNA, 25 bp, Homo sapien
tgaagctgtcggtgcagtcacactg

SEQ ID NO: 3116220 - DNA, 25 bp, Homo sapien
gtggcacgctatcctgggtacgcag

SEQ ID NO: 3116221 - DNA, 25 bp, Homo sapien
cctgggctgccttgcgatgtgccag

SEQ ID NO: 3116222 - DNA, 25 bp, Homo sapien
gggtgatagagaagccggcgttgcc

SEQ ID NO: 3116223 - DNA, 25 bp, Homo sapien
ctgtgggtccccttggaggctgtcc

SEQ ID NO: 3116224 - DNA, 25 bp, Homo sapien
tgcgatgtgccaggcggtgggtgat

SEQ ID NO: 3116225 - DNA, 25 bp, Homo sapien
tcacagcggtcggggcccatgcaga

SEQ ID NO: 3116226 - DNA, 25 bp, Homo sapien
ttcgaggtattctgcgtggcggcca

SEQ ID NO: 3116227 - DNA, 25 bp, Homo sapien
gggtctccctcataaagtgcgtgtg

SEQ ID NO: 3116228 - DNA, 25 bp, Homo sapien
ctatggtaaaggaacgggactgaca

SEQ ID NO: 3116229 - DNA, 25 bp, Homo sapien
agtcatggcttcgatcctggcgggc

SEQ ID NO: 3116230 - DNA, 25 bp, Homo sapien
caccgaggtgagatgtgttctggca

SEQ ID NO: 3116231 - DNA, 25 bp, Homo sapien
cccggagcgaacactgctggtggct

SEQ ID NO: 3116232 - DNA, 25 bp, Homo sapien
ttaattgctttcacattcgatacgc

SEQ ID NO: 3116233 - DNA, 25 bp, Homo sapien
acattcgatacgctgcccgtgacag

SEQ ID NO: 3116234 - DNA, 25 bp, Homo sapien
cacacgaagagcctgcggagctctg

SEQ ID NO: 3116235 - DNA, 25 bp, Homo sapien
gctggccttgatgggcgggtacaca

SEQ ID NO: 3116236 - DNA, 25 bp, Homo sapien
ggtcatggatacacgtgagggccct

SEQ ID NO: 3116237 - DNA, 25 bp, Homo sapien
cgcccaggacaacggcccaagggtg

SEQ ID NO: 3116238 - DNA, 25 bp, Homo sapien
tgtccccagctcaggtcggggtcag

SEQ ID NO: 3116239 - DNA, 25 bp, Homo sapien
cacggggcttctgggtgtcacccct

SEQ ID NO: 3116240 - DNA, 25 bp, Homo sapien
cacccctcgaatggggcagagaaga

SEQ ID NO: 3116241 - DNA, 25 bp, Homo sapien
ttctgggtgtcacccctcgaatggg

SEQ ID NO: 3116242 - DNA, 25 bp, Homo sapien
tcctctaaaccggaggctgcccgga

SEQ ID NO: 3116243 - DNA, 25 bp, Homo sapien
ggtgccgcggactgagccagcggag

SEQ ID NO: 3116244 - DNA, 25 bp, Homo sapien
ggccgtcagcgcttatccatcaggg

SEQ ID NO: 3116245 - DNA, 25 bp, Homo sapien
tgggaggtgcctcagcgctgcccca

SEQ ID NO: 3116246 - DNA, 25 bp, Homo sapien
cctcgtgcgccgggaccggctcagc

SEQ ID NO: 3116247 - DNA, 25 bp, Homo sapien
cggcgcaggtgtgcggccgagtcag

SEQ ID NO: 3116248 - DNA, 25 bp, Homo sapien
aggcagcggacggagagcggactgc

SEQ ID NO: 3116249 - DNA, 25 bp, Homo sapien
ggaccggctcagctctcggggcgcg

SEQ ID NO: 3116250 - DNA, 25 bp, Homo sapien
gcgtgtagggcgcaaacttcccgcc

SEQ ID NO: 3116251 - DNA, 25 bp, Homo sapien
tctgggggtgggatgcggctcccgt

SEQ ID NO: 3116252 - DNA, 25 bp, Homo sapien
gagcggagccgccaagtctgcgagg

SEQ ID NO: 3116253 - DNA, 25 bp, Homo sapien
tccgcggtccctcgagcggcagcga

SEQ ID NO: 3116254 - DNA, 25 bp, Homo sapien
aagtccactcgtccaaaggcttggg

SEQ ID NO: 3116255 - DNA, 25 bp, Homo sapien
tcatgcatggccagtgggttgagca

SEQ ID NO: 3116256 - DNA, 25 bp, Homo sapien
ggagaagtccactcgtccaaaggct

SEQ ID NO: 3116257 - DNA, 25 bp, Homo sapien
ggtcgcacccgtggtcatgcatggc

SEQ ID NO: 3116258 - DNA, 25 bp, Homo sapien
ctgctatgaggcagggccgggcacc

SEQ ID NO: 3116259 - DNA, 25 bp, Homo sapien
atgaggcagggccgggcaccatggc

SEQ ID NO: 3116260 - DNA, 25 bp, Homo sapien
aggcagggccgggcaccatggccac

SEQ ID NO: 3116261 - DNA, 25 bp, Homo sapien
tgctatgaggcagggccgggcacca

SEQ ID NO: 3116262 - DNA, 25 bp, Homo sapien
cacgcggcatgagcccgcctcccgc

SEQ ID NO: 3116263 - DNA, 25 bp, Homo sapien
ccacgcggcatgagcccgcctcccg

SEQ ID NO: 3116264 - DNA, 25 bp, Homo sapien
ctgtgcccacgcggcatgagcccgc

SEQ ID NO: 3116265 - DNA, 25 bp, Homo sapien
tgcccacgcggcatgagcccgcctc

SEQ ID NO: 3116266 - DNA, 25 bp, Homo sapien
aggtgtgacttctccaggcaggtga

SEQ ID NO: 3116267 - DNA, 25 bp, Homo sapien
tgcagaggctgtacttcatgtggtt

SEQ ID NO: 3116268 - DNA, 25 bp, Homo sapien
ccgcgggatgtagtgtggcttcttg

SEQ ID NO: 3116269 - DNA, 25 bp, Homo sapien
gcatttgtagttgtagggtttgccc

SEQ ID NO: 3116270 - DNA, 25 bp, Homo sapien
tggggcctaggcgtggtggagccac

SEQ ID NO: 3116271 - DNA, 25 bp, Homo sapien
tgtgggccgtgctccctggggttgc

SEQ ID NO: 3116272 - DNA, 25 bp, Homo sapien
tcccatccccggcttccacgactca

SEQ ID NO: 3116273 - DNA, 25 bp, Homo sapien
tggacttggggcctccgccacagtg

SEQ ID NO: 3116274 - DNA, 25 bp, Homo sapien
gaagcagcgggtagtacaggcgggg

SEQ ID NO: 3116275 - DNA, 25 bp, Homo sapien
gccaggaagggcacatgggctgcag

SEQ ID NO: 3116276 - DNA, 25 bp, Homo sapien
gggctgagcgggtagttgacgccca

SEQ ID NO: 3116277 - DNA, 25 bp, Homo sapien
gggtagttgacgcccagcagagaca

SEQ ID NO: 3116278 - DNA, 25 bp, Homo sapien
tgccttcggaagctccagcctgctt

SEQ ID NO: 3116279 - DNA, 25 bp, Homo sapien
ctgctccgggaacagaaccttgtca

SEQ ID NO: 3116280 - DNA, 25 bp, Homo sapien
ctgggggatgccttcggaagctcca

SEQ ID NO: 3116281 - DNA, 25 bp, Homo sapien
gctccgggaacagaaccttgtcagg

SEQ ID NO: 3116282 - DNA, 25 bp, Homo sapien
gcctggatccccgtcctcaggccac

SEQ ID NO: 3116283 - DNA, 25 bp, Homo sapien
tcagggccgcctggatccccgtcct

SEQ ID NO: 3116284 - DNA, 25 bp, Homo sapien
ctggatccccgtcctcaggccacag

SEQ ID NO: 3116285 - DNA, 25 bp, Homo sapien
cgggggtctcagggccgcctggatc

SEQ ID NO: 3116286 - DNA, 25 bp, Homo sapien
tcaccgagggctcgggtcaggtcct

SEQ ID NO: 3116287 - DNA, 25 bp, Homo sapien
ccaactgtcccaggcgctgctccac

SEQ ID NO: 3116288 - DNA, 25 bp, Homo sapien
cagctccaggcggatcttgcccagc

SEQ ID NO: 3116289 - DNA, 25 bp, Homo sapien
tccaccctggcgtagtcaccgaggg

SEQ ID NO: 3116290 - DNA, 25 bp, Homo sapien
ctggggccccttggcgggcgcacgt

SEQ ID NO: 3116291 - DNA, 25 bp, Homo sapien
tcgaggggtgcgtctggcggcctca

SEQ ID NO: 3116292 - DNA, 25 bp, Homo sapien
cttggcgggcgcacgtttcacagag

SEQ ID NO: 3116293 - DNA, 25 bp, Homo sapien
tttcacagagaggtcgaggggtgcg

SEQ ID NO: 3116294 - DNA, 25 bp, Homo sapien
tgggacgctggagtcggcctcacac

SEQ ID NO: 3116295 - DNA, 25 bp, Homo sapien
cagccactgccaggaatgacagggt

SEQ ID NO: 3116296 - DNA, 25 bp, Homo sapien
ccctgggggtgggacgctggagtcg

SEQ ID NO: 3116297 - DNA, 25 bp, Homo sapien
gacagggtcatctggggctgcgagg

SEQ ID NO: 3116298 - DNA, 25 bp, Homo sapien
tgggaactcctcgtcgcaacacagg

SEQ ID NO: 3116299 - DNA, 25 bp, Homo sapien
gggaactcctcgtcgcaacacaggt

SEQ ID NO: 3116300 - DNA, 25 bp, Homo sapien
ggaactcctcgtcgcaacacaggtg

SEQ ID NO: 3116301 - DNA, 25 bp, Homo sapien
aactcctcgtcgcaacacaggtgcc

SEQ ID NO: 3116302 - DNA, 25 bp, Homo sapien
gcaggcagagacagtcagacctcag

SEQ ID NO: 3116303 - DNA, 25 bp, Homo sapien
taatgtccacaattgtgatcaataa

SEQ ID NO: 3116304 - DNA, 25 bp, Homo sapien
gccacggcccgtgggggtctatcca

SEQ ID NO: 3116305 - DNA, 25 bp, Homo sapien
ctgtgtggccccagggacaagcgtt

SEQ ID NO: 3116306 - DNA, 25 bp, Homo sapien
ggccctgtctcgctgggccctgctt

SEQ ID NO: 3116307 - DNA, 25 bp, Homo sapien
ccctgtctcgctgggccctgcttcg

SEQ ID NO: 3116308 - DNA, 25 bp, Homo sapien
tgggccctgtctcgctgggccctgc

SEQ ID NO: 3116309 - DNA, 25 bp, Homo sapien
gccctgtctcgctgggccctgcttc

SEQ ID NO: 3116310 - DNA, 25 bp, Homo sapien
agtccagtcagtccgaatcaccgtc

SEQ ID NO: 3116311 - DNA, 25 bp, Homo sapien
ccagtcagtccgaatcaccgtctca

SEQ ID NO: 3116312 - DNA, 25 bp, Homo sapien
tcagtccgaatcaccgtctcagctt

SEQ ID NO: 3116313 - DNA, 25 bp, Homo sapien
agtcagtccgaatcaccgtctcagc

SEQ ID NO: 3116314 - DNA, 25 bp, Homo sapien
gccgggagcccgtggagtctccagg

SEQ ID NO: 3116315 - DNA, 25 bp, Homo sapien
tgggtccagtgtgaggtgcagacac

SEQ ID NO: 3116316 - DNA, 25 bp, Homo sapien
cccgtggagtctccaggtgggtcca

SEQ ID NO: 3116317 - DNA, 25 bp, Homo sapien
gagcccgtggagtctccaggtgggt

SEQ ID NO: 3116318 - DNA, 25 bp, Homo sapien
caggcaagtagtccgtcaccaggag

SEQ ID NO: 3116319 - DNA, 25 bp, Homo sapien
tgggcagccgaaagtgtgccccgtc

SEQ ID NO: 3116320 - DNA, 25 bp, Homo sapien
gcaggacccaacgagaagctgtgca

SEQ ID NO: 3116321 - DNA, 25 bp, Homo sapien
cagatctagcacgtggacacagggt

SEQ ID NO: 3116322 - DNA, 25 bp, Homo sapien
tcaccagcaggagaactcgagccaa

SEQ ID NO: 3116323 - DNA, 25 bp, Homo sapien
gttcctcccgcggtgatccaagggc

SEQ ID NO: 3116324 - DNA, 25 bp, Homo sapien
tcaggactctaggtccctctgaggt

SEQ ID NO: 3116325 - DNA, 25 bp, Homo sapien
gagtctgcctagctgtgtgccggca

SEQ ID NO: 3116326 - DNA, 25 bp, Homo sapien
tctgcagaatgaaggcccagacagc

SEQ ID NO: 3116327 - DNA, 25 bp, Homo sapien
gcggcaactccgtttattgagcacc

SEQ ID NO: 3116328 - DNA, 25 bp, Homo sapien
tgagcacctaactacattgcgcagt

SEQ ID NO: 3116329 - DNA, 25 bp, Homo sapien
aaaaggcatccagggttcagccagc

SEQ ID NO: 3116330 - DNA, 25 bp, Homo sapien
cttccggggccgcgcgctcgggcgg

SEQ ID NO: 3116331 - DNA, 25 bp, Homo sapien
gggcagacgacggcgctcgctgcct

SEQ ID NO: 3116332 - DNA, 25 bp, Homo sapien
gggcccgggcagacgacggcgctcg

SEQ ID NO: 3116333 - DNA, 25 bp, Homo sapien
tgggcgggcccgggcagacgacggc

SEQ ID NO: 3116334 - DNA, 25 bp, Homo sapien
ggtggacgccgtagggctccttggc

SEQ ID NO: 3116335 - DNA, 25 bp, Homo sapien
ctgcgggatgttgcacagacggcct

SEQ ID NO: 3116336 - DNA, 25 bp, Homo sapien
ctcagcttcaagttcggtggtggac

SEQ ID NO: 3116337 - DNA, 25 bp, Homo sapien
atgttgcacagacggcctgacaggt

SEQ ID NO: 3116338 - DNA, 25 bp, Homo sapien
gaagatgagcatgacctggtcctca

SEQ ID NO: 3116339 - DNA, 25 bp, Homo sapien
cactgcgtgctaccgtgtcgaagac

SEQ ID NO: 3116340 - DNA, 25 bp, Homo sapien
cacctggcgctggtcatagaagatg

SEQ ID NO: 3116341 - DNA, 25 bp, Homo sapien
tcaaagcggtcactgcggaagagca

SEQ ID NO: 3116342 - DNA, 25 bp, Homo sapien
agaagcagggcctgtagaccactcc

SEQ ID NO: 3116343 - DNA, 25 bp, Homo sapien
gggccagcaagtggatgacaccccc

SEQ ID NO: 3116344 - DNA, 25 bp, Homo sapien
gcacctgtgattgtggagagaagca

SEQ ID NO: 3116345 - DNA, 25 bp, Homo sapien
cacacggggccagcaagtggatgac

SEQ ID NO: 3116346 - DNA, 25 bp, Homo sapien
tgggcagggttctccgccttccgtg

SEQ ID NO: 3116347 - DNA, 25 bp, Homo sapien
agctgttcgcacgtggagagtttgc

SEQ ID NO: 3116348 - DNA, 25 bp, Homo sapien
agtttgctcccgaggaaggacaggg

SEQ ID NO: 3116349 - DNA, 25 bp, Homo sapien
tactgaagattagcgtgaggtgctc

SEQ ID NO: 3116350 - DNA, 25 bp, Homo sapien
gcccggccggcatgagggtggccag

SEQ ID NO: 3116351 - DNA, 25 bp, Homo sapien
ccggccggcatgagggtggccagca

SEQ ID NO: 3116352 - DNA, 25 bp, Homo sapien
cggcccggccggcatgagggtggcc

SEQ ID NO: 3116353 - DNA, 25 bp, Homo sapien
cggccggcatgagggtggccagcac

SEQ ID NO: 3116354 - DNA, 25 bp, Homo sapien
aggaacgagggcgtcggccagatgc

SEQ ID NO: 3116355 - DNA, 25 bp, Homo sapien
gatgcggcttctcccgtggagccag

SEQ ID NO: 3116356 - DNA, 25 bp, Homo sapien
ggccagatgcccgatgcggcttctc

SEQ ID NO: 3116357 - DNA, 25 bp, Homo sapien
tcagccacaggaacgagggcgtcgg

SEQ ID NO: 3116358 - DNA, 25 bp, Homo sapien
tctaggacaaagtaggccggtggca

SEQ ID NO: 3116359 - DNA, 25 bp, Homo sapien
cagcacaggagttacagaatcagca

SEQ ID NO: 3116360 - DNA, 25 bp, Homo sapien
tgggccaaagagtcaggtaccaccc

SEQ ID NO: 3116361 - DNA, 25 bp, Homo sapien
tcagggaccacaagggagataccag

SEQ ID NO: 3116362 - DNA, 25 bp, Homo sapien
cacccccggctgagaaaagaacatt

SEQ ID NO: 3116363 - DNA, 25 bp, Homo sapien
cccccggctgagaaaagaacattct

SEQ ID NO: 3116364 - DNA, 25 bp, Homo sapien
tccacaggtggatgtggtagaggaa

SEQ ID NO: 3116365 - DNA, 25 bp, Homo sapien
tgagcccggcgggagcacccatcag

SEQ ID NO: 3116366 - DNA, 25 bp, Homo sapien
ccagcacctggtccagtgcacggtt

SEQ ID NO: 3116367 - DNA, 25 bp, Homo sapien
cagtgcacggttcatcttgagcccg

SEQ ID NO: 3116368 - DNA, 25 bp, Homo sapien
gccgagaggcccacgtgccaaagga

SEQ ID NO: 3116369 - DNA, 25 bp, Homo sapien
tgaggagggcgataatgtccgagag

SEQ ID NO: 3116370 - DNA, 25 bp, Homo sapien
gccaaaggatgtgctccacgaaggg

SEQ ID NO: 3116371 - DNA, 25 bp, Homo sapien
ctggctccatagacgtaaaagcagt

SEQ ID NO: 3116372 - DNA, 25 bp, Homo sapien
caggccatggatcttcaggcagtac

SEQ ID NO: 3116373 - DNA, 25 bp, Homo sapien
aggccatggatcttcaggcagtaca

SEQ ID NO: 3116374 - DNA, 25 bp, Homo sapien
gctggcgcagaacgttccacttctt

SEQ ID NO: 3116375 - DNA, 25 bp, Homo sapien
gagtccacgcgctggcgcagaacgt

SEQ ID NO: 3116376 - DNA, 25 bp, Homo sapien
gcccggggcacctctagggcctgtg

SEQ ID NO: 3116377 - DNA, 25 bp, Homo sapien
ggcctgtgcctgcaccaccttcggg

SEQ ID NO: 3116378 - DNA, 25 bp, Homo sapien
cggggcacctctagggcctgtgcct

SEQ ID NO: 3116379 - DNA, 25 bp, Homo sapien
gggcctgtgcctgcaccaccttcgg

SEQ ID NO: 3116380 - DNA, 25 bp, Homo sapien
agggtgaacaccaggtagtacaggg

SEQ ID NO: 3116381 - DNA, 25 bp, Homo sapien
cagggtgaacaccaggtagtacagg

SEQ ID NO: 3116382 - DNA, 25 bp, Homo sapien
ggcccagcctgtgggtgctcagctc

SEQ ID NO: 3116383 - DNA, 25 bp, Homo sapien
agaagccacacagagcactgcagcc

SEQ ID NO: 3116384 - DNA, 25 bp, Homo sapien
ggcagaagccacacagagcactgca

SEQ ID NO: 3116385 - DNA, 25 bp, Homo sapien
caggcccagcctgtgggtgctcagc

SEQ ID NO: 3116386 - DNA, 25 bp, Homo sapien
cacccacgtggcctgcagcaggaga

SEQ ID NO: 3116387 - DNA, 25 bp, Homo sapien
ccagagggtcctgaaaggccaccca

SEQ ID NO: 3116388 - DNA, 25 bp, Homo sapien
cagcaggagacagcccgccccacag

SEQ ID NO: 3116389 - DNA, 25 bp, Homo sapien
agggtcctgaaaggccacccacgtg

SEQ ID NO: 3116390 - DNA, 25 bp, Homo sapien
gagggtgtcttactggccaggatag

SEQ ID NO: 3116391 - DNA, 25 bp, Homo sapien
ctgagcagggcacggagtctgccat

SEQ ID NO: 3116392 - DNA, 25 bp, Homo sapien
ggccctctcaccaggtcagaggtgc

SEQ ID NO: 3116393 - DNA, 25 bp, Homo sapien
ggtggttctgctcacctcccactgt

SEQ ID NO: 3116394 - DNA, 25 bp, Homo sapien
gggcagagcagtccgaccccatcct

SEQ ID NO: 3116395 - DNA, 25 bp, Homo sapien
gtggcagaggagcatttaggaccgg

SEQ ID NO: 3116396 - DNA, 25 bp, Homo sapien
agagcagtccgaccccatcctgggc

SEQ ID NO: 3116397 - DNA, 25 bp, Homo sapien
gagcatttaggaccggcccggccag

SEQ ID NO: 3116398 - DNA, 25 bp, Homo sapien
aagacccagtgagtacagcggcagg

SEQ ID NO: 3116399 - DNA, 25 bp, Homo sapien
gccggcagagccgaagacccagtga

SEQ ID NO: 3116400 - DNA, 25 bp, Homo sapien
agttgatgaggtccacgagcagatg

SEQ ID NO: 3116401 - DNA, 25 bp, Homo sapien
tggatcaggccctgcacggcgacca

SEQ ID NO: 3116402 - DNA, 25 bp, Homo sapien
gacctctgggactaggaggccctgt

SEQ ID NO: 3116403 - DNA, 25 bp, Homo sapien
gtgcctctgactttgccgcgcttgg

SEQ ID NO: 3116404 - DNA, 25 bp, Homo sapien
gcttgcgcatgcataccacggcttc

SEQ ID NO: 3116405 - DNA, 25 bp, Homo sapien
ggcacttactggatggtggccgccc

SEQ ID NO: 3116406 - DNA, 25 bp, Homo sapien
tgcaaggatagcaagcggctgacga

SEQ ID NO: 3116407 - DNA, 25 bp, Homo sapien
gccgtggccacccacgaagctctcc

SEQ ID NO: 3116408 - DNA, 25 bp, Homo sapien
agcggctgacgaggggacgcgtggg

SEQ ID NO: 3116409 - DNA, 25 bp, Homo sapien
cgtcgcccaactcctggagctggct

SEQ ID NO: 3116410 - DNA, 25 bp, Homo sapien
gtgccggaggacacggaacttcacg

SEQ ID NO: 3116411 - DNA, 25 bp, Homo sapien
cctgccggcctcgtgccggaggaca

SEQ ID NO: 3116412 - DNA, 25 bp, Homo sapien
gcctcgtgccggaggacacggaact

SEQ ID NO: 3116413 - DNA, 25 bp, Homo sapien
cggaggacacggaacttcacgccag

SEQ ID NO: 3116414 - DNA, 25 bp, Homo sapien
ttccacccagaacttgagccctgtg

SEQ ID NO: 3116415 - DNA, 25 bp, Homo sapien
gcgcctccgacacagggcagaatgg

SEQ ID NO: 3116416 - DNA, 25 bp, Homo sapien
aagggcgcctccgacacagggcaga

SEQ ID NO: 3116417 - DNA, 25 bp, Homo sapien
tctgttccacccagaacttgagccc

SEQ ID NO: 3116418 - DNA, 25 bp, Homo sapien
gaaggacaagggcagcggtcagtgg

SEQ ID NO: 3116419 - DNA, 25 bp, Homo sapien
gcggtcagtggggtggtctgagctc

SEQ ID NO: 3116420 - DNA, 25 bp, Homo sapien
tccaaccccgtctgcagagagaggg

SEQ ID NO: 3116421 - DNA, 25 bp, Homo sapien
gctgtctcagacattcccttgcctg

SEQ ID NO: 3116422 - DNA, 25 bp, Homo sapien
tgcaccacgcggctgtagggcagtg

SEQ ID NO: 3116423 - DNA, 25 bp, Homo sapien
cccaaggaacagcttgcggcacagg

SEQ ID NO: 3116424 - DNA, 25 bp, Homo sapien
gggaggcggtaggtgtgcaccacgc

SEQ ID NO: 3116425 - DNA, 25 bp, Homo sapien
caaggaacagcttgcggcacagggc

SEQ ID NO: 3116426 - DNA, 25 bp, Homo sapien
acaaagcacaggacatgcgccagct

SEQ ID NO: 3116427 - DNA, 25 bp, Homo sapien
catccgcaaataaaccccgtgtggt

SEQ ID NO: 3116428 - DNA, 25 bp, Homo sapien
cccaaggtgtgatagcagggcctgc

SEQ ID NO: 3116429 - DNA, 25 bp, Homo sapien
acaaagcgacctctccagggaacat

SEQ ID NO: 3116430 - DNA, 25 bp, Homo sapien
tgccgtctggcaggcactttcggcc

SEQ ID NO: 3116431 - DNA, 25 bp, Homo sapien
gcaccgtggacgaataggtacggct

SEQ ID NO: 3116432 - DNA, 25 bp, Homo sapien
ggagacagatttggccgcaggacct

SEQ ID NO: 3116433 - DNA, 25 bp, Homo sapien
agcggactcgggctcacagggaaca

SEQ ID NO: 3116434 - DNA, 25 bp, Homo sapien
tgcttccgcagaaccctcggaggga

SEQ ID NO: 3116435 - DNA, 25 bp, Homo sapien
aaacgaaagcccctcgcaggctgtg

SEQ ID NO: 3116436 - DNA, 25 bp, Homo sapien
cacgttgtttgtatccgccccttca

SEQ ID NO: 3116437 - DNA, 25 bp, Homo sapien
atgcggctgagtccgggaaacgaaa

SEQ ID NO: 3116438 - DNA, 25 bp, Homo sapien
ctgctttcccggaaccattggttcg

SEQ ID NO: 3116439 - DNA, 25 bp, Homo sapien
cgattataagttcaccaagatcatt

SEQ ID NO: 3116440 - DNA, 25 bp, Homo sapien
accattggttcgattataagttcac

SEQ ID NO: 3116441 - DNA, 25 bp, Homo sapien
ccggaaccattggttcgattataag

SEQ ID NO: 3116442 - DNA, 25 bp, Homo sapien
ggtgaggccgcggcgtgagagagcc

SEQ ID NO: 3116443 - DNA, 25 bp, Homo sapien
cggcggccgagtgggcgcgcccgaa

SEQ ID NO: 3116444 - DNA, 25 bp, Homo sapien
ctgccgaagcaccgccgggtgaggc

SEQ ID NO: 3116445 - DNA, 25 bp, Homo sapien
tgcgcccgttgcgtccgccccacgg

SEQ ID NO: 3116446 - DNA, 25 bp, Homo sapien
gcgccgcctgcgccccgcgccggcc

SEQ ID NO: 3116447 - DNA, 25 bp, Homo sapien
cgcgccgcctgcgccccgcgccggc

SEQ ID NO: 3116448 - DNA, 25 bp, Homo sapien
gccgcgccgcctgcgccccgcgccg

SEQ ID NO: 3116449 - DNA, 25 bp, Homo sapien
gccgcctgcgccccgcgccggccgc

SEQ ID NO: 3116450 - DNA, 25 bp, Homo sapien
ttactgtaggcgtacggggactctg

SEQ ID NO: 3116451 - DNA, 25 bp, Homo sapien
agtcgtagctcttcaccggactgcc

SEQ ID NO: 3116452 - DNA, 25 bp, Homo sapien
ggtagtcgtagctcttcaccggact

SEQ ID NO: 3116453 - DNA, 25 bp, Homo sapien
tactgtaggcgtacggggactctgc

SEQ ID NO: 3116454 - DNA, 25 bp, Homo sapien
gccaccgagctaccgagtctggaag

SEQ ID NO: 3116455 - DNA, 25 bp, Homo sapien
tgggctccagatcccggacccatga

SEQ ID NO: 3116456 - DNA, 25 bp, Homo sapien
gacaccttctctaggacccatgaca

SEQ ID NO: 3116457 - DNA, 25 bp, Homo sapien
caggcaaaggcgttcctgggaacgt

SEQ ID NO: 3116458 - DNA, 25 bp, Homo sapien
tccaggcaggtaagcgatccggtgt

SEQ ID NO: 3116459 - DNA, 25 bp, Homo sapien
aagacttccaggcaggtaagcgatc

SEQ ID NO: 3116460 - DNA, 25 bp, Homo sapien
tgtgggccatgctgaagcagtaagc

SEQ ID NO: 3116461 - DNA, 25 bp, Homo sapien
aagcagtaagccttgcacagaaggg

SEQ ID NO: 3116462 - DNA, 25 bp, Homo sapien
cagacctagagatccagaaacccag

SEQ ID NO: 3116463 - DNA, 25 bp, Homo sapien
cacattaggagacacggaagagctc

SEQ ID NO: 3116464 - DNA, 25 bp, Homo sapien
tccctaagatcactgctgggtgtca

SEQ ID NO: 3116465 - DNA, 25 bp, Homo sapien
tgggcgtgtggtcacacgccactgc

SEQ ID NO: 3116466 - DNA, 25 bp, Homo sapien
cggtgccgagggtggaactgcctta

SEQ ID NO: 3116467 - DNA, 25 bp, Homo sapien
ggtgtgcaccctgtgcgggtggttc

SEQ ID NO: 3116468 - DNA, 25 bp, Homo sapien
gccttaatccaggaccttcgatgcc

SEQ ID NO: 3116469 - DNA, 25 bp, Homo sapien
ggaagggtgtgcaccctgtgcgggt

SEQ ID NO: 3116470 - DNA, 25 bp, Homo sapien
catttgccctgttgcctgtgagcgc

SEQ ID NO: 3116471 - DNA, 25 bp, Homo sapien
gaaaatttaagtaaggccatgccag

SEQ ID NO: 3116472 - DNA, 25 bp, Homo sapien
tcgtgcaggccacaacacgtgtgct

SEQ ID NO: 3116473 - DNA, 25 bp, Homo sapien
aaaagtacctgcgaggacccagatc

SEQ ID NO: 3116474 - DNA, 25 bp, Homo sapien
ctccagaccagggtaggcggcagct

SEQ ID NO: 3116475 - DNA, 25 bp, Homo sapien
tgctctacgccagctcgcaggggct

SEQ ID NO: 3116476 - DNA, 25 bp, Homo sapien
agcttcgcgccttctcagctgcaat

SEQ ID NO: 3116477 - DNA, 25 bp, Homo sapien
gtaggcggcagcttttcagggacca

SEQ ID NO: 3116478 - DNA, 25 bp, Homo sapien
tcactgtaaagacggcgaaggctgc

SEQ ID NO: 3116479 - DNA, 25 bp, Homo sapien
tctcacagtggttcggcagcgttct

SEQ ID NO: 3116480 - DNA, 25 bp, Homo sapien
tagtgccatcgaactacaccctggg

SEQ ID NO: 3116481 - DNA, 25 bp, Homo sapien
taccttaggctcaaagtgcgagtcc

SEQ ID NO: 3116482 - DNA, 25 bp, Homo sapien
tgcagcagtgactttctggaccgaa

SEQ ID NO: 3116483 - DNA, 25 bp, Homo sapien
gcacctcggcaaccctgatcagtgt

SEQ ID NO: 3116484 - DNA, 25 bp, Homo sapien
tgatgtcatctaccctattaccgcc

SEQ ID NO: 3116485 - DNA, 25 bp, Homo sapien
cagagaagggtctcctgtcagtggc

SEQ ID NO: 3116486 - DNA, 25 bp, Homo sapien
cacgctgattaatgccacgaggtaa

SEQ ID NO: 3116487 - DNA, 25 bp, Homo sapien
ccacgggtgtgcattttcacgtaca

SEQ ID NO: 3116488 - DNA, 25 bp, Homo sapien
aacaggaaaggagtatgatgccaca

SEQ ID NO: 3116489 - DNA, 25 bp, Homo sapien
cctctcaggcaggaatcaggtgggc

SEQ ID NO: 3116490 - DNA, 25 bp, Homo sapien
tcaagggggccatgggagtcccaaa

SEQ ID NO: 3116491 - DNA, 25 bp, Homo sapien
catggccctagtgaactgactgaga

SEQ ID NO: 3116492 - DNA, 25 bp, Homo sapien
cagatactcggtgatacagccttga

SEQ ID NO: 3116493 - DNA, 25 bp, Homo sapien
gatcacattgctctgctgacgcggc

SEQ ID NO: 3116494 - DNA, 25 bp, Homo sapien
tctggaaactgacgtgtggacactg

SEQ ID NO: 3116495 - DNA, 25 bp, Homo sapien
tagatctacctaagggaacagaaac

SEQ ID NO: 3116496 - DNA, 25 bp, Homo sapien
tgcaaaggaataccacttgggaaca

SEQ ID NO: 3116497 - DNA, 25 bp, Homo sapien
aaaagaactagctctgagccgggtg

SEQ ID NO: 3116498 - DNA, 25 bp, Homo sapien
gaagaactcgttcacatcagcatta

SEQ ID NO: 3116499 - DNA, 25 bp, Homo sapien
tatctctgatgacgccaatggtaag

SEQ ID NO: 3116500 - DNA, 25 bp, Homo sapien
caatggtaagatgtccttccctgag

SEQ ID NO: 3116501 - DNA, 25 bp, Homo sapien
cagcgtctggctcttcattcgtgga

SEQ ID NO: 3116502 - DNA, 25 bp, Homo sapien
aaggacagaccctagccaggaagct

SEQ ID NO: 3116503 - DNA, 25 bp, Homo sapien
gagaggccaaagttggacaccacga

SEQ ID NO: 3116504 - DNA, 25 bp, Homo sapien
gttggacaccacgattgccacaaag

SEQ ID NO: 3116505 - DNA, 25 bp, Homo sapien
gacaccacgattgccacaaaggcca

SEQ ID NO: 3116506 - DNA, 25 bp, Homo sapien
ctgagaggccaaagttggacaccac

SEQ ID NO: 3116507 - DNA, 25 bp, Homo sapien
ccggtggttctgtcaagcagggaca

SEQ ID NO: 3116508 - DNA, 25 bp, Homo sapien
ctccggtggttctgtcaagcaggga

SEQ ID NO: 3116509 - DNA, 25 bp, Homo sapien
cctcctccggtggttctgtcaagca

SEQ ID NO: 3116510 - DNA, 25 bp, Homo sapien
tcctccggtggttctgtcaagcagg

SEQ ID NO: 3116511 - DNA, 25 bp, Homo sapien
gaagcttctacctttagggctcagc

SEQ ID NO: 3116512 - DNA, 25 bp, Homo sapien
actgaaaggagcagacagttctgga

SEQ ID NO: 3116513 - DNA, 25 bp, Homo sapien
cgcaggcacgacatcttaaacaggc

SEQ ID NO: 3116514 - DNA, 25 bp, Homo sapien
cagttctggacacttaacgcaggca

SEQ ID NO: 3116515 - DNA, 25 bp, Homo sapien
agcctgctgagtagctgaactacag

SEQ ID NO: 3116516 - DNA, 25 bp, Homo sapien
tcagcctgctgagtagctgaactac

SEQ ID NO: 3116517 - DNA, 25 bp, Homo sapien
tatctagcctcagcctgctgagtag

SEQ ID NO: 3116518 - DNA, 25 bp, Homo sapien
cctcagcctgctgagtagctgaact

SEQ ID NO: 3116519 - DNA, 25 bp, Homo sapien
agctccagcttcacgcgccggccgt

SEQ ID NO: 3116520 - DNA, 25 bp, Homo sapien
gctccagcttcacgcgccggccgtc

SEQ ID NO: 3116521 - DNA, 25 bp, Homo sapien
cagagctccagcttcacgcgccggc

SEQ ID NO: 3116522 - DNA, 25 bp, Homo sapien
atggtggtggtcttgtagtcgatcc

SEQ ID NO: 3116523 - DNA, 25 bp, Homo sapien
aagatggtgcagaaccggccctggc

SEQ ID NO: 3116524 - DNA, 25 bp, Homo sapien
agcgcccctggagtaggacctgaag

SEQ ID NO: 3116525 - DNA, 25 bp, Homo sapien
ctgagcgcccctggagtaggacctg

SEQ ID NO: 3116526 - DNA, 25 bp, Homo sapien
cccctggagtaggacctgaagatgg

SEQ ID NO: 3116527 - DNA, 25 bp, Homo sapien
attcgccagcagatccagtcagcac

SEQ ID NO: 3116528 - DNA, 25 bp, Homo sapien
cagtcagcacaaaagcgtgcttggg

SEQ ID NO: 3116529 - DNA, 25 bp, Homo sapien
tgtttacatgggcttcacgtccttg

SEQ ID NO: 3116530 - DNA, 25 bp, Homo sapien
aaatgagcttgccatgggacgaagc

SEQ ID NO: 3116531 - DNA, 25 bp, Homo sapien
cagagtgacaaatcccggctgggac

SEQ ID NO: 3116532 - DNA, 25 bp, Homo sapien
tccactctctaacggagggaggcag

SEQ ID NO: 3116533 - DNA, 25 bp, Homo sapien
caacatgtgcacctgggtctgtaac

SEQ ID NO: 3116534 - DNA, 25 bp, Homo sapien
taacctgctcctcgcatgtggaaaa

SEQ ID NO: 3116535 - DNA, 25 bp, Homo sapien
cactcatcccaccagcgggttgtgg

SEQ ID NO: 3116536 - DNA, 25 bp, Homo sapien
atgaagtctagggagcccggccttc

SEQ ID NO: 3116537 - DNA, 25 bp, Homo sapien
cagcaacagaatatgcaaacacgac

SEQ ID NO: 3116538 - DNA, 25 bp, Homo sapien
ccttcggcggcacgtgaagggcctc

SEQ ID NO: 3116539 - DNA, 25 bp, Homo sapien
tgtggctgaagctcccaaggtacag

SEQ ID NO: 3116540 - DNA, 25 bp, Homo sapien
cacactgcagttacaaggagcctac

SEQ ID NO: 3116541 - DNA, 25 bp, Homo sapien
aaaaactagcgacttcggccaggcg

SEQ ID NO: 3116542 - DNA, 25 bp, Homo sapien
tctcagctaaacaggatggcacatc

SEQ ID NO: 3116543 - DNA, 25 bp, Homo sapien
gtcccagcactgcggatggcatttt

SEQ ID NO: 3116544 - DNA, 25 bp, Homo sapien
cagcactgcggatggcattttcttt

SEQ ID NO: 3116545 - DNA, 25 bp, Homo sapien
cccagcactgcggatggcattttct

SEQ ID NO: 3116546 - DNA, 25 bp, Homo sapien
ccagcactgcggatggcattttctt

SEQ ID NO: 3116547 - DNA, 25 bp, Homo sapien
tctcggccagtccatcagtgaatcc

SEQ ID NO: 3116548 - DNA, 25 bp, Homo sapien
tccatggtgtcagaaatgccgcttc

SEQ ID NO: 3116549 - DNA, 25 bp, Homo sapien
gtcctctcggccagtccatcagtga

SEQ ID NO: 3116550 - DNA, 25 bp, Homo sapien
gtgggcgccttccatggtgtcagaa

SEQ ID NO: 3116551 - DNA, 25 bp, Homo sapien
tcatcgatctccttgatccagcggt

SEQ ID NO: 3116552 - DNA, 25 bp, Homo sapien
gatccagcggtcgatgccgtcaaag

SEQ ID NO: 3116553 - DNA, 25 bp, Homo sapien
tgccgtcaaaggaccagcggttggt

SEQ ID NO: 3116554 - DNA, 25 bp, Homo sapien
aggaccagcggttggtgatgtcata

SEQ ID NO: 3116555 - DNA, 25 bp, Homo sapien
tacagtgcagcccttccgggtggcc

SEQ ID NO: 3116556 - DNA, 25 bp, Homo sapien
cagcagacgcacaaacgcagggtgc

SEQ ID NO: 3116557 - DNA, 25 bp, Homo sapien
cacgcccgactgtcgtgtgcacagt

SEQ ID NO: 3116558 - DNA, 25 bp, Homo sapien
cgccctcattgtctggactatgatg

SEQ ID NO: 3116559 - DNA, 25 bp, Homo sapien
caggtgcagccggtttccaaccaag

SEQ ID NO: 3116560 - DNA, 25 bp, Homo sapien
aggtgcagccggtttccaaccaaga

SEQ ID NO: 3116561 - DNA, 25 bp, Homo sapien
ccaggtgcagccggtttccaaccaa

SEQ ID NO: 3116562 - DNA, 25 bp, Homo sapien
tagctccgtgaaggactcgatgacg

SEQ ID NO: 3116563 - DNA, 25 bp, Homo sapien
tcgatgacgttgaagttgcacaggg

SEQ ID NO: 3116564 - DNA, 25 bp, Homo sapien
ttctccatgccgtgccgcatgagca

SEQ ID NO: 3116565 - DNA, 25 bp, Homo sapien
catgagcacgatgcgggatagctcc

SEQ ID NO: 3116566 - DNA, 25 bp, Homo sapien
gaggctgttgcccttgctgccgccg

SEQ ID NO: 3116567 - DNA, 25 bp, Homo sapien
ggatggacttggacctcttgaggct

SEQ ID NO: 3116568 - DNA, 25 bp, Homo sapien
taggaacggccgtgcatcatgaccg

SEQ ID NO: 3116569 - DNA, 25 bp, Homo sapien
tgaccgcgttcatgccgttggccat

SEQ ID NO: 3116570 - DNA, 25 bp, Homo sapien
cagaagctgccgagaacaggaggct

SEQ ID NO: 3116571 - DNA, 25 bp, Homo sapien
gagtggtcaatgtccccgaaggtgt

SEQ ID NO: 3116572 - DNA, 25 bp, Homo sapien
tcacatcacagcaggaaggttctca

SEQ ID NO: 3116573 - DNA, 25 bp, Homo sapien
cactcgcagcgcatgaattcacagg

SEQ ID NO: 3116574 - DNA, 25 bp, Homo sapien
catgtcgtgccgcacggcctgagga

SEQ ID NO: 3116575 - DNA, 25 bp, Homo sapien
tcatctcccaggaacgggccatggg

SEQ ID NO: 3116576 - DNA, 25 bp, Homo sapien
cttctgcgtgctggccatgtcgtgc

SEQ ID NO: 3116577 - DNA, 25 bp, Homo sapien
cgtgggaccaccttgggaagcatgt

SEQ ID NO: 3116578 - DNA, 25 bp, Homo sapien
tgggattccatccaccgggaagagg

SEQ ID NO: 3116579 - DNA, 25 bp, Homo sapien
tcttgagaccggatgggagtgtccc

SEQ ID NO: 3116580 - DNA, 25 bp, Homo sapien
tgtctaacagcagcgcgggtagtgt

SEQ ID NO: 3116581 - DNA, 25 bp, Homo sapien
gggtctccaagttctcagaggccgt

SEQ ID NO: 3116582 - DNA, 25 bp, Homo sapien
ggagcggcaggagtggacgtagggc

SEQ ID NO: 3116583 - DNA, 25 bp, Homo sapien
gcaggagtggacgtagggcgggcat

SEQ ID NO: 3116584 - DNA, 25 bp, Homo sapien
cggcaggagtggacgtagggcgggc

SEQ ID NO: 3116585 - DNA, 25 bp, Homo sapien
caggagcggcaggagtggacgtagg

SEQ ID NO: 3116586 - DNA, 25 bp, Homo sapien
agctggttggggcacacgcccgggt

SEQ ID NO: 3116587 - DNA, 25 bp, Homo sapien
gctacactcgcgctcacaggtgctc

SEQ ID NO: 3116588 - DNA, 25 bp, Homo sapien
gcgtccacccacaggttggggctga

SEQ ID NO: 3116589 - DNA, 25 bp, Homo sapien
cacaggtgctctgggcgtccaccca

SEQ ID NO: 3116590 - DNA, 25 bp, Homo sapien
cccaaggagggcgtacagtgctcag

SEQ ID NO: 3116591 - DNA, 25 bp, Homo sapien
aggacaaaggctggacatcggctgc

SEQ ID NO: 3116592 - DNA, 25 bp, Homo sapien
tattctttacgttgtacagacgagg

SEQ ID NO: 3116593 - DNA, 25 bp, Homo sapien
cttaagacaaatgagggcaacgatg

SEQ ID NO: 3116594 - DNA, 25 bp, Homo sapien
tcagggcgcatgatcaggttctctc

SEQ ID NO: 3116595 - DNA, 25 bp, Homo sapien
tcggcgtccatatagcagcggttgt

SEQ ID NO: 3116596 - DNA, 25 bp, Homo sapien
gcatgcctcgtaggtctcaaagccg

SEQ ID NO: 3116597 - DNA, 25 bp, Homo sapien
cacgttgccatacatctgatcaggg

SEQ ID NO: 3116598 - DNA, 25 bp, Homo sapien
gtggaagttgttgccgttgccctcg

SEQ ID NO: 3116599 - DNA, 25 bp, Homo sapien
ttgtcatccttgagcacgtcctcga

SEQ ID NO: 3116600 - DNA, 25 bp, Homo sapien
ccacgatggcgaagtcgctgcggca

SEQ ID NO: 3116601 - DNA, 25 bp, Homo sapien
tcagcgccagcttgctccggaggcg

SEQ ID NO: 3116602 - DNA, 25 bp, Homo sapien
gcacctcacccatgatgaccagcgg

SEQ ID NO: 3116603 - DNA, 25 bp, Homo sapien
ctggcggcgcggacgtagctgccgg

SEQ ID NO: 3116604 - DNA, 25 bp, Homo sapien
ttcttgacgcgcttctcgctggcgg

SEQ ID NO: 3116605 - DNA, 25 bp, Homo sapien
aggcccagtccatgccactcagcgt

SEQ ID NO: 3116606 - DNA, 25 bp, Homo sapien
ggttgagcagctcgcaggcctgctt

SEQ ID NO: 3116607 - DNA, 25 bp, Homo sapien
ctagtcctggaagcggttgagcagc

SEQ ID NO: 3116608 - DNA, 25 bp, Homo sapien
gcggttgagcagctcgcaggcctgc

SEQ ID NO: 3116609 - DNA, 25 bp, Homo sapien
gaagcggttgagcagctcgcaggcc

SEQ ID NO: 3116610 - DNA, 25 bp, Homo sapien
gggagtgcgtttattcaccaggacg

SEQ ID NO: 3116611 - DNA, 25 bp, Homo sapien
gagtgcgtttattcaccaggacggg

SEQ ID NO: 3116612 - DNA, 25 bp, Homo sapien
cagggagtgcgtttattcaccagga

SEQ ID NO: 3116613 - DNA, 25 bp, Homo sapien
cacagggagtgcgtttattcaccag

SEQ ID NO: 3116614 - DNA, 25 bp, Homo sapien
tctgtgctctcagccgctggccgaa

SEQ ID NO: 3116615 - DNA, 25 bp, Homo sapien
gaggcacgaaccctgcctccctagg

SEQ ID NO: 3116616 - DNA, 25 bp, Homo sapien
aggccggaccttgtggacgacagcc

SEQ ID NO: 3116617 - DNA, 25 bp, Homo sapien
tgcatccctgccggaggctctgtga

SEQ ID NO: 3116618 - DNA, 25 bp, Homo sapien
cgtgctgcggcagtacctggatccg

SEQ ID NO: 3116619 - DNA, 25 bp, Homo sapien
cacttctatcggtgcggcggtccgg

SEQ ID NO: 3116620 - DNA, 25 bp, Homo sapien
cgtcggacgtggaccagcgctgcct

SEQ ID NO: 3116621 - DNA, 25 bp, Homo sapien
ggatcccatcttgcacgtgctgcgg

SEQ ID NO: 3116622 - DNA, 25 bp, Homo sapien
tatgctcctgtggaagacctggcag

SEQ ID NO: 3116623 - DNA, 25 bp, Homo sapien
gcagagctagcgtttgcttcagcca

SEQ ID NO: 3116624 - DNA, 25 bp, Homo sapien
taaacctgccatgcgctgggcactg

SEQ ID NO: 3116625 - DNA, 25 bp, Homo sapien
ctgggcactgtaggcagctcctgaa

SEQ ID NO: 3116626 - DNA, 25 bp, Homo sapien
tcaggccttaattatagattaaaag

SEQ ID NO: 3116627 - DNA, 25 bp, Homo sapien
taaaaatagtgagcccaagatcgtg

SEQ ID NO: 3116628 - DNA, 25 bp, Homo sapien
actcaggccttaattatagattaaa

SEQ ID NO: 3116629 - DNA, 25 bp, Homo sapien
tactaaaaatagtgagcccaagatc

SEQ ID NO: 3116630 - DNA, 25 bp, Homo sapien
cgggctgaccccggacacgcggcgg

SEQ ID NO: 3116631 - DNA, 25 bp, Homo sapien
ggctgaccccggacacgcggcggag

SEQ ID NO: 3116632 - DNA, 25 bp, Homo sapien
gggctgaccccggacacgcggcgga

SEQ ID NO: 3116633 - DNA, 25 bp, Homo sapien
tgcgccggggctcgcacttaacgga

SEQ ID NO: 3116634 - DNA, 25 bp, Homo sapien
cgcacttaacggactgcgggcgccg

SEQ ID NO: 3116635 - DNA, 25 bp, Homo sapien
ggctcgcacttaacggactgcgggc

SEQ ID NO: 3116636 - DNA, 25 bp, Homo sapien
ccggggctcgcacttaacggactgc

SEQ ID NO: 3116637 - DNA, 25 bp, Homo sapien
ctgggccccttggtgatggtgtaca

SEQ ID NO: 3116638 - DNA, 25 bp, Homo sapien
ggcgctgcgcgaccagcttgctggg

SEQ ID NO: 3116639 - DNA, 25 bp, Homo sapien
ctgtgcggcgctgcgcgaccagctt

SEQ ID NO: 3116640 - DNA, 25 bp, Homo sapien
gcttgctgggccccttggtgatggt

SEQ ID NO: 3116641 - DNA, 25 bp, Homo sapien
ctgcgggcaccggggggcggtcagc

SEQ ID NO: 3116642 - DNA, 25 bp, Homo sapien
tgcgggcaccggggggcggtcagcc

SEQ ID NO: 3116643 - DNA, 25 bp, Homo sapien
ccggcatttcaggagctcgccgagc

SEQ ID NO: 3116644 - DNA, 25 bp, Homo sapien
ggcatttcaggagctcgccgagccg

SEQ ID NO: 3116645 - DNA, 25 bp, Homo sapien
tgccggcatttcaggagctcgccga

SEQ ID NO: 3116646 - DNA, 25 bp, Homo sapien
gccggcatttcaggagctcgccgag

SEQ ID NO: 3116647 - DNA, 25 bp, Homo sapien
gaactgagccaaagtcaaacgtcca

SEQ ID NO: 3116648 - DNA, 25 bp, Homo sapien
ccaacctctgggtcatggtcacggg

SEQ ID NO: 3116649 - DNA, 25 bp, Homo sapien
aactgggttaggaaaagcagaagca

SEQ ID NO: 3116650 - DNA, 25 bp, Homo sapien
tgtggtctcggagtttcctaactgg

SEQ ID NO: 3116651 - DNA, 25 bp, Homo sapien
ccttcgggccggcttggggccacag

SEQ ID NO: 3116652 - DNA, 25 bp, Homo sapien
gccttcgggccggcttggggccaca

SEQ ID NO: 3116653 - DNA, 25 bp, Homo sapien
cacctccaggagccttcgggccggc

SEQ ID NO: 3116654 - DNA, 25 bp, Homo sapien
ctccaggagccttcgggccggcttg

SEQ ID NO: 3116655 - DNA, 25 bp, Homo sapien
cgccccgctggaacctccacacctt

SEQ ID NO: 3116656 - DNA, 25 bp, Homo sapien
gaacctccacacctttctgagaggt

SEQ ID NO: 3116657 - DNA, 25 bp, Homo sapien
ccagcaccgcctcaggccatgaccc

SEQ ID NO: 3116658 - DNA, 25 bp, Homo sapien
agcaccgcctcaggccatgacccta

SEQ ID NO: 3116659 - DNA, 25 bp, Homo sapien
ccagaaggcgcctctggtagagggc

SEQ ID NO: 3116660 - DNA, 25 bp, Homo sapien
ggcgcctctggtagagggcacttac

SEQ ID NO: 3116661 - DNA, 25 bp, Homo sapien
aaggcgcctctggtagagggcactt

SEQ ID NO: 3116662 - DNA, 25 bp, Homo sapien
cagaaggcgcctctggtagagggca

SEQ ID NO: 3116663 - DNA, 25 bp, Homo sapien
gaattgaatactaccctgggccaca

SEQ ID NO: 3116664 - DNA, 25 bp, Homo sapien
gagatgtgcagggaccccgacaccc

SEQ ID NO: 3116665 - DNA, 25 bp, Homo sapien
ggagtagcaaaaagcaccaaggaga

SEQ ID NO: 3116666 - DNA, 25 bp, Homo sapien
tacatcatgggtgacaagccttgac

SEQ ID NO: 3116667 - DNA, 25 bp, Homo sapien
tccaacaacagagtccatggccctg

SEQ ID NO: 3116668 - DNA, 25 bp, Homo sapien
gaacttgtcaaaggtgtatctgggc

SEQ ID NO: 3116669 - DNA, 25 bp, Homo sapien
aagatcagcctagcatacgtggtga

SEQ ID NO: 3116670 - DNA, 25 bp, Homo sapien
tctggttacgtaaggctgctgctct

SEQ ID NO: 3116671 - DNA, 25 bp, Homo sapien
ctaaaataaagaggagtgtcttgag

SEQ ID NO: 3116672 - DNA, 25 bp, Homo sapien
gaggggcgcagggtcctgccggccc

SEQ ID NO: 3116673 - DNA, 25 bp, Homo sapien
aaaataaagaggagtgtcttgaggg

SEQ ID NO: 3116674 - DNA, 25 bp, Homo sapien
aaagaggagtgtcttgaggggcgca

SEQ ID NO: 3116675 - DNA, 25 bp, Homo sapien
tccgccaggcactcgcggtcccggc

SEQ ID NO: 3116676 - DNA, 25 bp, Homo sapien
ctgctccgccaggcactcgcggtcc

SEQ ID NO: 3116677 - DNA, 25 bp, Homo sapien
gctccgccaggcactcgcggtcccg

SEQ ID NO: 3116678 - DNA, 25 bp, Homo sapien
cagcgccgctctcggttcctcctca

SEQ ID NO: 3116679 - DNA, 25 bp, Homo sapien
cgcagtgccgcacgcaacgtctggt

SEQ ID NO: 3116680 - DNA, 25 bp, Homo sapien
gacaaggggcgatgccaaaggagat

SEQ ID NO: 3116681 - DNA, 25 bp, Homo sapien
tgccgcacgcaacgtctggtgggcc

SEQ ID NO: 3116682 - DNA, 25 bp, Homo sapien
cacgcaacgtctggtgggcccctgg

SEQ ID NO: 3116683 - DNA, 25 bp, Homo sapien
ccatggacggatggacctggacggg

SEQ ID NO: 3116684 - DNA, 25 bp, Homo sapien
ctaggcacttcctgaaccagagaga

SEQ ID NO: 3116685 - DNA, 25 bp, Homo sapien
ggagagtgactataaccctcgccca

SEQ ID NO: 3116686 - DNA, 25 bp, Homo sapien
ggcctcagtcttagagtgtcccaaa

SEQ ID NO: 3116687 - DNA, 25 bp, Homo sapien
ggagacggacatggttggtgcccat

SEQ ID NO: 3116688 - DNA, 25 bp, Homo sapien
gaggagacggacatggttggtgccc

SEQ ID NO: 3116689 - DNA, 25 bp, Homo sapien
agggaggagacggacatggttggtg

SEQ ID NO: 3116690 - DNA, 25 bp, Homo sapien
ggaggagacggacatggttggtgcc

SEQ ID NO: 3116691 - DNA, 25 bp, Homo sapien
cacgattgaacacaagccttggccc

SEQ ID NO: 3116692 - DNA, 25 bp, Homo sapien
acacgattgaacacaagccttggcc

SEQ ID NO: 3116693 - DNA, 25 bp, Homo sapien
attcacacgattgaacacaagcctt

SEQ ID NO: 3116694 - DNA, 25 bp, Homo sapien
tcacacgattgaacacaagccttgg

SEQ ID NO: 3116695 - DNA, 25 bp, Homo sapien
cttcggacacaaagcggacattctc

SEQ ID NO: 3116696 - DNA, 25 bp, Homo sapien
ttcggacacaaagcggacattctcc

SEQ ID NO: 3116697 - DNA, 25 bp, Homo sapien
tcagcttgaagtggggccatcccgg

SEQ ID NO: 3116698 - DNA, 25 bp, Homo sapien
ccgggtccatggttttgcgacccag

SEQ ID NO: 3116699 - DNA, 25 bp, Homo sapien
gttttgcgacccagcagcctatgcc

SEQ ID NO: 3116700 - DNA, 25 bp, Homo sapien
gccatgcagcggctgtgggtcagct

SEQ ID NO: 3116701 - DNA, 25 bp, Homo sapien
aggagggcagtcgggctgagccagg

SEQ ID NO: 3116702 - DNA, 25 bp, Homo sapien
ggagggcagtcgggctgagccaggt

SEQ ID NO: 3116703 - DNA, 25 bp, Homo sapien
cggctgggccaccatccagctgctg

SEQ ID NO: 3116704 - DNA, 25 bp, Homo sapien
gctgggccaccatccagctgctgtt

SEQ ID NO: 3116705 - DNA, 25 bp, Homo sapien
cagctgctgttgcacctgctgccag

SEQ ID NO: 3116706 - DNA, 25 bp, Homo sapien
tgggccaccatccagctgctgttgc

SEQ ID NO: 3116707 - DNA, 25 bp, Homo sapien
tctgcagccggggattgggggtcct

SEQ ID NO: 3116708 - DNA, 25 bp, Homo sapien
gcagccggggattgggggtcctctc

SEQ ID NO: 3116709 - DNA, 25 bp, Homo sapien
ctgcagccggggattgggggtcctc

SEQ ID NO: 3116710 - DNA, 25 bp, Homo sapien
tgcagccggggattgggggtcctct

SEQ ID NO: 3116711 - DNA, 25 bp, Homo sapien
tccgagtgcggcaggcgctgggaag

SEQ ID NO: 3116712 - DNA, 25 bp, Homo sapien
gggtttctgcacaagagtcccctcc

SEQ ID NO: 3116713 - DNA, 25 bp, Homo sapien
ctggagctaaccacaagccgctcac

SEQ ID NO: 3116714 - DNA, 25 bp, Homo sapien
gccgctcacccggactccgagtgcg

SEQ ID NO: 3116715 - DNA, 25 bp, Homo sapien
ggtgattctcgccaggaactgctgc

SEQ ID NO: 3116716 - DNA, 25 bp, Homo sapien
gcccaccactcgtctaggtcaatgg

SEQ ID NO: 3116717 - DNA, 25 bp, Homo sapien
ctaggaacagctggtgattctcgcc

SEQ ID NO: 3116718 - DNA, 25 bp, Homo sapien
tcgtctaggtcaatgggcacaaagt

SEQ ID NO: 3116719 - DNA, 25 bp, Homo sapien
ccatggcagcttggttgggacagcc

SEQ ID NO: 3116720 - DNA, 25 bp, Homo sapien
gcttctctcctggcgacaggtcggc

SEQ ID NO: 3116721 - DNA, 25 bp, Homo sapien
tctcctggcgacaggtcggccgtgt

SEQ ID NO: 3116722 - DNA, 25 bp, Homo sapien
cagacgggttcggcccttggccatg

SEQ ID NO: 3116723 - DNA, 25 bp, Homo sapien
tgggctgggtcatccccgtccatca

SEQ ID NO: 3116724 - DNA, 25 bp, Homo sapien
tggttcccacgttcgtcctatcagg

SEQ ID NO: 3116725 - DNA, 25 bp, Homo sapien
tgggtaccctgggtcctgactcagg

SEQ ID NO: 3116726 - DNA, 25 bp, Homo sapien
ccatcagggaaggtagtgcgggcgc

SEQ ID NO: 3116727 - DNA, 25 bp, Homo sapien
ccgccgctcgagcttcccgcctagg

SEQ ID NO: 3116728 - DNA, 25 bp, Homo sapien
gcgcgcccagcgcagagtacgcccc

SEQ ID NO: 3116729 - DNA, 25 bp, Homo sapien
agtacgccccgcgacgccaggcaac

SEQ ID NO: 3116730 - DNA, 25 bp, Homo sapien
gccaggcaacggctgcctggcaacg

SEQ ID NO: 3116731 - DNA, 25 bp, Homo sapien
gcgcccgagggaagccaagctccgg

SEQ ID NO: 3116732 - DNA, 25 bp, Homo sapien
ggagcccgagggtgggcgcccggca

SEQ ID NO: 3116733 - DNA, 25 bp, Homo sapien
gcgcccggcagacgggaccctgcct

SEQ ID NO: 3116734 - DNA, 25 bp, Homo sapien
tgcctgagcggggactctggcctca

SEQ ID NO: 3116735 - DNA, 25 bp, Homo sapien
actcggccacgcgagccggggccac

SEQ ID NO: 3116736 - DNA, 25 bp, Homo sapien
gcgtcaggggactcggccacgcgag

SEQ ID NO: 3116737 - DNA, 25 bp, Homo sapien
cgggcgccgggcgtcaggggactcg

SEQ ID NO: 3116738 - DNA, 25 bp, Homo sapien
gccttccccggcgacgccaacgcca

SEQ ID NO: 3116739 - DNA, 25 bp, Homo sapien
ttggcggagcgcttccactcgtcca

SEQ ID NO: 3116740 - DNA, 25 bp, Homo sapien
ctcgtccacccggaagtgtctgaag

SEQ ID NO: 3116741 - DNA, 25 bp, Homo sapien
ctgcttggcggagcgcttccactcg

SEQ ID NO: 3116742 - DNA, 25 bp, Homo sapien
cccggaagtgtctgaagacgttgag

SEQ ID NO: 3116743 - DNA, 25 bp, Homo sapien
gcgggagcccgcatcaccgacagca

SEQ ID NO: 3116744 - DNA, 25 bp, Homo sapien
tggagaagcgggagcccgcatcacc

SEQ ID NO: 3116745 - DNA, 25 bp, Homo sapien
atcaccgacagcacccagaagaagt

SEQ ID NO: 3116746 - DNA, 25 bp, Homo sapien
cagcacccagaagaagtgcagcggg

SEQ ID NO: 3116747 - DNA, 25 bp, Homo sapien
gggccgaaagagcacatacaggtat

SEQ ID NO: 3116748 - DNA, 25 bp, Homo sapien
catcgaggtggatgacgaagtgctt

SEQ ID NO: 3116749 - DNA, 25 bp, Homo sapien
tgtagttggcggcagagactgagcc

SEQ ID NO: 3116750 - DNA, 25 bp, Homo sapien
agactgagccccgaatgcgatacac

SEQ ID NO: 3116751 - DNA, 25 bp, Homo sapien
ggttggagaaagacacacggatgac

SEQ ID NO: 3116752 - DNA, 25 bp, Homo sapien
agaggttggagaaagacacacggat

SEQ ID NO: 3116753 - DNA, 25 bp, Homo sapien
gccgtagacttaaactccttgaaga

SEQ ID NO: 3116754 - DNA, 25 bp, Homo sapien
cacgtggccgtagacttaaactcct

SEQ ID NO: 3116755 - DNA, 25 bp, Homo sapien
ctctctgaggtgtcctggcctccag

SEQ ID NO: 3116756 - DNA, 25 bp, Homo sapien
aggtgtcctggcctccaggaccaag

SEQ ID NO: 3116757 - DNA, 25 bp, Homo sapien
tctgaggtgtcctggcctccaggac

SEQ ID NO: 3116758 - DNA, 25 bp, Homo sapien
gcctccaggaccaagggaaactgga

SEQ ID NO: 3116759 - DNA, 25 bp, Homo sapien
cctggatcatccacaccccatcttg

SEQ ID NO: 3116760 - DNA, 25 bp, Homo sapien
tgggcctgcaccaactccctccagc

SEQ ID NO: 3116761 - DNA, 25 bp, Homo sapien
tggatcatccacaccccatcttggt

SEQ ID NO: 3116762 - DNA, 25 bp, Homo sapien
tccagccacctgtcctggatcatcc

SEQ ID NO: 3116763 - DNA, 25 bp, Homo sapien
ctgcaggcaggtccagcgggctccg

SEQ ID NO: 3116764 - DNA, 25 bp, Homo sapien
gtccagcgggctccggagggggcca

SEQ ID NO: 3116765 - DNA, 25 bp, Homo sapien
tccagcgggctccggagggggccaa

SEQ ID NO: 3116766 - DNA, 25 bp, Homo sapien
ggcaggtccagcgggctccggaggg

SEQ ID NO: 3116767 - DNA, 25 bp, Homo sapien
caggctggcgcacagcctgatgctc

SEQ ID NO: 3116768 - DNA, 25 bp, Homo sapien
agatggccgtagcaccggttcaggt

SEQ ID NO: 3116769 - DNA, 25 bp, Homo sapien
acaggtcactggtgtacaggttcct

SEQ ID NO: 3116770 - DNA, 25 bp, Homo sapien
ggttcaggtagaccaggagaacgtc

SEQ ID NO: 3116771 - DNA, 25 bp, Homo sapien
tcccgaggcataggagtcacgggca

SEQ ID NO: 3116772 - DNA, 25 bp, Homo sapien
gatgtagcggtcatgccagctctct

SEQ ID NO: 3116773 - DNA, 25 bp, Homo sapien
gtggatgtagcggtcatgccagctc

SEQ ID NO: 3116774 - DNA, 25 bp, Homo sapien
ggcacagggaatgccatttcccgag

SEQ ID NO: 3116775 - DNA, 25 bp, Homo sapien
ggcactttcaagctctcacttggaa

SEQ ID NO: 3116776 - DNA, 25 bp, Homo sapien
tctcaatcggcttggaaggcacttt

SEQ ID NO: 3116777 - DNA, 25 bp, Homo sapien
gaaggcactttcaagctctcacttg

SEQ ID NO: 3116778 - DNA, 25 bp, Homo sapien
cttctcaatcggcttggaaggcact

SEQ ID NO: 3116779 - DNA, 25 bp, Homo sapien
actgaaccgcacaggtttgctggag

SEQ ID NO: 3116780 - DNA, 25 bp, Homo sapien
ctggaggccaccgggcaagggagag

SEQ ID NO: 3116781 - DNA, 25 bp, Homo sapien
ggctgggcgtctggaccactggaga

SEQ ID NO: 3116782 - DNA, 25 bp, Homo sapien
gagacacactgaaccgcacaggttt

SEQ ID NO: 3116783 - DNA, 25 bp, Homo sapien
ctgggtgccaaggcggcccggccgg

SEQ ID NO: 3116784 - DNA, 25 bp, Homo sapien
tgggtgccaaggcggcccggccgga

SEQ ID NO: 3116785 - DNA, 25 bp, Homo sapien
tcaacacgtgggtgccggcagcagc

SEQ ID NO: 3116786 - DNA, 25 bp, Homo sapien
gcagcagccgtgtggatgtcagagg

SEQ ID NO: 3116787 - DNA, 25 bp, Homo sapien
ccatccgcgttggaggcgtctgagc

SEQ ID NO: 3116788 - DNA, 25 bp, Homo sapien
tcagccgactcgtgagtcaacacgt

SEQ ID NO: 3116789 - DNA, 25 bp, Homo sapien
tgtctggtgccgtggcccccaaagc

SEQ ID NO: 3116790 - DNA, 25 bp, Homo sapien
ccccaaagccgatgacgcccttgag

SEQ ID NO: 3116791 - DNA, 25 bp, Homo sapien
ccgatgacgcccttgagcctcagga

SEQ ID NO: 3116792 - DNA, 25 bp, Homo sapien
ctgtctggtgccgtggcccccaaag

SEQ ID NO: 3116793 - DNA, 25 bp, Homo sapien
caggacgacgatgaccgcatggcag

SEQ ID NO: 3116794 - DNA, 25 bp, Homo sapien
tcccccgtgtccacgagcaggacga

SEQ ID NO: 3116795 - DNA, 25 bp, Homo sapien
gtctgtgtggccaaggaagaagcgc

SEQ ID NO: 3116796 - DNA, 25 bp, Homo sapien
atggcaggggtacacgacagccgcc

SEQ ID NO: 3116797 - DNA, 25 bp, Homo sapien
gccgaggccaatagtgagctgctgc

SEQ ID NO: 3116798 - DNA, 25 bp, Homo sapien
ttgggctccggaacaggcacaagca

SEQ ID NO: 3116799 - DNA, 25 bp, Homo sapien
gtcccagagccgcatcacactaggg

SEQ ID NO: 3116800 - DNA, 25 bp, Homo sapien
agcagacaacgtgcattgggctccg

SEQ ID NO: 3116801 - DNA, 25 bp, Homo sapien
gtcctcccgtggtggtccttgccaa

SEQ ID NO: 3116802 - DNA, 25 bp, Homo sapien
ccgcagagaagggccccgctgtcag

SEQ ID NO: 3116803 - DNA, 25 bp, Homo sapien
tggtccttgccaaccccgcagagaa

SEQ ID NO: 3116804 - DNA, 25 bp, Homo sapien
agagaagggccccgctgtcagagaa

SEQ ID NO: 3116805 - DNA, 25 bp, Homo sapien
ccaacccgcagccagggccctgtta

SEQ ID NO: 3116806 - DNA, 25 bp, Homo sapien
cccaacccgcagccagggccctgtt

SEQ ID NO: 3116807 - DNA, 25 bp, Homo sapien
caacccgcagccagggccctgttac

SEQ ID NO: 3116808 - DNA, 25 bp, Homo sapien
ttacaaccgcatcaccagcagagag

SEQ ID NO: 3116809 - DNA, 25 bp, Homo sapien
tccgatggccgaaaagccgagacgt

SEQ ID NO: 3116810 - DNA, 25 bp, Homo sapien
gggctctgccacgtgaaaatcttac

SEQ ID NO: 3116811 - DNA, 25 bp, Homo sapien
gaggtgccattgatgcccaagcgtg

SEQ ID NO: 3116812 - DNA, 25 bp, Homo sapien
gaaggtggataaaaagcagctcgtg

SEQ ID NO: 3116813 - DNA, 25 bp, Homo sapien
tacagagacccgcaatgctgagcac

SEQ ID NO: 3116814 - DNA, 25 bp, Homo sapien
ccattcgcagagaagtacaaacccc

SEQ ID NO: 3116815 - DNA, 25 bp, Homo sapien
aagctttgggacttctacagagacc

SEQ ID NO: 3116816 - DNA, 25 bp, Homo sapien
cctggacgtcaaagtcagtgtgcgc

SEQ ID NO: 3116817 - DNA, 25 bp, Homo sapien
tcaaagtcagtgtgcgcctttgcca

SEQ ID NO: 3116818 - DNA, 25 bp, Homo sapien
gtgtgcgcctttgccagaacgacca

SEQ ID NO: 3116819 - DNA, 25 bp, Homo sapien
ccggaaggcctggacgtcaaagtca

SEQ ID NO: 3116820 - DNA, 25 bp, Homo sapien
ctgacccaccgggagacgcagagac

SEQ ID NO: 3116821 - DNA, 25 bp, Homo sapien
tcccaacatcgtggatgggcggctg

SEQ ID NO: 3116822 - DNA, 25 bp, Homo sapien
cctctcccaacatcgtggatgggcg

SEQ ID NO: 3116823 - DNA, 25 bp, Homo sapien
atgaggactgagcactgccgcagct

SEQ ID NO: 3116824 - DNA, 25 bp, Homo sapien
tgcagcgcgtggtgctcccctaagt

SEQ ID NO: 3116825 - DNA, 25 bp, Homo sapien
aggaacgcagcaccccgccacgcag

SEQ ID NO: 3116826 - DNA, 25 bp, Homo sapien
cggtgaactgcagcgcgtggtgctc

SEQ ID NO: 3116827 - DNA, 25 bp, Homo sapien
agagccgcacactgccctgcccgca

SEQ ID NO: 3116828 - DNA, 25 bp, Homo sapien
caatctccaagatgtggccactgcg

SEQ ID NO: 3116829 - DNA, 25 bp, Homo sapien
gggcatgccgcacgaccatgcgctg

SEQ ID NO: 3116830 - DNA, 25 bp, Homo sapien
catgcgctgacagtcaatctccaag

SEQ ID NO: 3116831 - DNA, 25 bp, Homo sapien
tctccaagatgtggccactgcggct

SEQ ID NO: 3116832 - DNA, 25 bp, Homo sapien
gggccagagccgcaagaagccgtcc

SEQ ID NO: 3116833 - DNA, 25 bp, Homo sapien
cacagcacacatggccggggagacg

SEQ ID NO: 3116834 - DNA, 25 bp, Homo sapien
cagagccgcaagaagccgtcctcag

SEQ ID NO: 3116835 - DNA, 25 bp, Homo sapien
ccacagcacacatggccggggagac

SEQ ID NO: 3116836 - DNA, 25 bp, Homo sapien
aggccaccactcttaggctaggcgg

SEQ ID NO: 3116837 - DNA, 25 bp, Homo sapien
ttgggagagcgtgcccacagcatca

SEQ ID NO: 3116838 - DNA, 25 bp, Homo sapien
gctgcaagatgcagctccctcgagg

SEQ ID NO: 3116839 - DNA, 25 bp, Homo sapien
tgagccgcatgctcaggcttcgggt

SEQ ID NO: 3116840 - DNA, 25 bp, Homo sapien
gtacggtcctgggacacggtggcca

SEQ ID NO: 3116841 - DNA, 25 bp, Homo sapien
gcctctgctccatggcgagggccaa

SEQ ID NO: 3116842 - DNA, 25 bp, Homo sapien
acagactgagctgacggggccctcg

SEQ ID NO: 3116843 - DNA, 25 bp, Homo sapien
ggagcgagccagcatgtggtacacc

SEQ ID NO: 3116844 - DNA, 25 bp, Homo sapien
cgcacggggcgtcctctgatgatgt

SEQ ID NO: 3116845 - DNA, 25 bp, Homo sapien
cctctgatgatgtgaagtcgtatag

SEQ ID NO: 3116846 - DNA, 25 bp, Homo sapien
ggggtggaaggtgacagcgcacggg

SEQ ID NO: 3116847 - DNA, 25 bp, Homo sapien
ggagcgcacggccccactgctaaag

SEQ ID NO: 3116848 - DNA, 25 bp, Homo sapien
gccactgggggtccgcacagctgta

SEQ ID NO: 3116849 - DNA, 25 bp, Homo sapien
tcaggggtggcggtcaggccggtga

SEQ ID NO: 3116850 - DNA, 25 bp, Homo sapien
aggacatgccactgggggtccgcac

SEQ ID NO: 3116851 - DNA, 25 bp, Homo sapien
gcggtcaggccggtgacagctcctc

SEQ ID NO: 3116852 - DNA, 25 bp, Homo sapien
ggggcatccgggcataccatgtccg

SEQ ID NO: 3116853 - DNA, 25 bp, Homo sapien
ctgtcactgtgcacctggagggtcc

SEQ ID NO: 3116854 - DNA, 25 bp, Homo sapien
aggccgagcccatgactgtcactgt

SEQ ID NO: 3116855 - DNA, 25 bp, Homo sapien
tcaagggaggccgagcccatgactg

SEQ ID NO: 3116856 - DNA, 25 bp, Homo sapien
cacgactctgttggacgaggtggac

SEQ ID NO: 3116857 - DNA, 25 bp, Homo sapien
gagtgccgatgtcaactcgcagcag

SEQ ID NO: 3116858 - DNA, 25 bp, Homo sapien
tcccggatgatgcggcccgacacag

SEQ ID NO: 3116859 - DNA, 25 bp, Homo sapien
gccaggtccagagtgccgatgtcaa

SEQ ID NO: 3116860 - DNA, 25 bp, Homo sapien
ctgagcgtcaaggaggggcagggct

SEQ ID NO: 3116861 - DNA, 25 bp, Homo sapien
agggctcagggtggacaccgggcag

SEQ ID NO: 3116862 - DNA, 25 bp, Homo sapien
ggcagggctcagggtggacaccggg

SEQ ID NO: 3116863 - DNA, 25 bp, Homo sapien
tgagcgtcaaggaggggcagggctc

SEQ ID NO: 3116864 - DNA, 25 bp, Homo sapien
ttgatggtccggccggcggcaatca

SEQ ID NO: 3116865 - DNA, 25 bp, Homo sapien
atggtccggccggcggcaatcagca

SEQ ID NO: 3116866 - DNA, 25 bp, Homo sapien
cttgatggtccggccggcggcaatc

SEQ ID NO: 3116867 - DNA, 25 bp, Homo sapien
tccggccggcggcaatcagcaggaa

SEQ ID NO: 3116868 - DNA, 25 bp, Homo sapien
tggcctgtgtggcgtagtcccacac

SEQ ID NO: 3116869 - DNA, 25 bp, Homo sapien
ctggcctgtgtggcgtagtcccaca

SEQ ID NO: 3116870 - DNA, 25 bp, Homo sapien
agacggcgtcccctgcgctgaggac

SEQ ID NO: 3116871 - DNA, 25 bp, Homo sapien
cgggttccgagtggccgatgtacac

SEQ ID NO: 3116872 - DNA, 25 bp, Homo sapien
cagcctgcacgggttccgagtggcc

SEQ ID NO: 3116873 - DNA, 25 bp, Homo sapien
aggaagacggcgtcccctgcgctga

SEQ ID NO: 3116874 - DNA, 25 bp, Homo sapien
aggagagagggtttcaggagggcct

SEQ ID NO: 3116875 - DNA, 25 bp, Homo sapien
ggcctggggggcctaggcagacaca

SEQ ID NO: 3116876 - DNA, 25 bp, Homo sapien
gggcctaggcagacacagctgagag

SEQ ID NO: 3116877 - DNA, 25 bp, Homo sapien
ggcagacacagctgagagtaggcac

SEQ ID NO: 3116878 - DNA, 25 bp, Homo sapien
ctgtcttgcaggctgggggggcccc

SEQ ID NO: 3116879 - DNA, 25 bp, Homo sapien
tgtcttgcaggctgggggggccccg

SEQ ID NO: 3116880 - DNA, 25 bp, Homo sapien
tggacgctgcgtcctccagcggtcc

SEQ ID NO: 3116881 - DNA, 25 bp, Homo sapien
gctgcgtcctccagcggtcctgcgc

SEQ ID NO: 3116882 - DNA, 25 bp, Homo sapien
gacgctgcgtcctccagcggtcctg

SEQ ID NO: 3116883 - DNA, 25 bp, Homo sapien
gtcctccagcggtcctgcgcccggg

SEQ ID NO: 3116884 - DNA, 25 bp, Homo sapien
agccgtggtggagatgcctgacatg

SEQ ID NO: 3116885 - DNA, 25 bp, Homo sapien
gtggagatgcctgacatggcttggg

SEQ ID NO: 3116886 - DNA, 25 bp, Homo sapien
ggcacagacgcccagccgtggtgga

SEQ ID NO: 3116887 - DNA, 25 bp, Homo sapien
gcacagacgcccagccgtggtggag

SEQ ID NO: 3116888 - DNA, 25 bp, Homo sapien
ttcctcatctgacggggacaaggtg

SEQ ID NO: 3116889 - DNA, 25 bp, Homo sapien
agggtccttcctcatctgacgggga

SEQ ID NO: 3116890 - DNA, 25 bp, Homo sapien
ggtccttcctcatctgacggggaca

SEQ ID NO: 3116891 - DNA, 25 bp, Homo sapien
tccttcctcatctgacggggacaag

SEQ ID NO: 3116892 - DNA, 25 bp, Homo sapien
acggggaggcagggcaagcccccag

SEQ ID NO: 3116893 - DNA, 25 bp, Homo sapien
ctcctccgtgagcacaggtgggcct

SEQ ID NO: 3116894 - DNA, 25 bp, Homo sapien
aagcccctcggggtcacagctctcc

SEQ ID NO: 3116895 - DNA, 25 bp, Homo sapien
cctccgtgagcacaggtgggcctga

SEQ ID NO: 3116896 - DNA, 25 bp, Homo sapien
aagccaggtaggtggtgcgtggggc

SEQ ID NO: 3116897 - DNA, 25 bp, Homo sapien
ggaagccaggtaggtggtgcgtggg

SEQ ID NO: 3116898 - DNA, 25 bp, Homo sapien
cagctgaccctggcaggcgtgaagg

SEQ ID NO: 3116899 - DNA, 25 bp, Homo sapien
gccaggtaggtggtgcgtggggccc

SEQ ID NO: 3116900 - DNA, 25 bp, Homo sapien
cccaaagcctgcacatgggaggctg

SEQ ID NO: 3116901 - DNA, 25 bp, Homo sapien
cccgtggggctctcatcaagggcag

SEQ ID NO: 3116902 - DNA, 25 bp, Homo sapien
ggctctcatcaagggcagctgctgg

SEQ ID NO: 3116903 - DNA, 25 bp, Homo sapien
aggaaggagacccggatgctgctgg

SEQ ID NO: 3116904 - DNA, 25 bp, Homo sapien
tcagacgcagccacccaccgctggc

SEQ ID NO: 3116905 - DNA, 25 bp, Homo sapien
cgcagccacccaccgctggcgggag

SEQ ID NO: 3116906 - DNA, 25 bp, Homo sapien
gacgcagccacccaccgctggcggg

SEQ ID NO: 3116907 - DNA, 25 bp, Homo sapien
cttcagacgcagccacccaccgctg

SEQ ID NO: 3116908 - DNA, 25 bp, Homo sapien
gttggcccgcccattcccgctgtaa

SEQ ID NO: 3116909 - DNA, 25 bp, Homo sapien
cagaccatgttggcccgcccattcc

SEQ ID NO: 3116910 - DNA, 25 bp, Homo sapien
cgcccattcccgctgtaaccgacga

SEQ ID NO: 3116911 - DNA, 25 bp, Homo sapien
cattcccgctgtaaccgacgacagc

SEQ ID NO: 3116912 - DNA, 25 bp, Homo sapien
accaggcggccgcacgtgtaggcaa

SEQ ID NO: 3116913 - DNA, 25 bp, Homo sapien
cggccgcacgtgtaggcaaagaagc

SEQ ID NO: 3116914 - DNA, 25 bp, Homo sapien
tctccgcagagtggccggaccagtg

SEQ ID NO: 3116915 - DNA, 25 bp, Homo sapien
ccagcgtggagatctccgcagagtg

SEQ ID NO: 3116916 - DNA, 25 bp, Homo sapien
ggaggagggcgatgcaggcgggcac

SEQ ID NO: 3116917 - DNA, 25 bp, Homo sapien
cggtccgggagctgggttctgccgg

SEQ ID NO: 3116918 - DNA, 25 bp, Homo sapien
ggagctgggttctgccgggcacggt

SEQ ID NO: 3116919 - DNA, 25 bp, Homo sapien
gagaggaggagggcgatgcaggcgg

SEQ ID NO: 3116920 - DNA, 25 bp, Homo sapien
cgtctttggtggtgagaacccgcac

SEQ ID NO: 3116921 - DNA, 25 bp, Homo sapien
gccgtctgctccgtctttggtggtg

SEQ ID NO: 3116922 - DNA, 25 bp, Homo sapien
ggtggccgtctgctccgtctttggt

SEQ ID NO: 3116923 - DNA, 25 bp, Homo sapien
gaggccgtggctggctggagtggag

SEQ ID NO: 3116924 - DNA, 25 bp, Homo sapien
agaggccgccagacacgtcccagac

SEQ ID NO: 3116925 - DNA, 25 bp, Homo sapien
tgacaatgggcggtcgtgctgcttc

SEQ ID NO: 3116926 - DNA, 25 bp, Homo sapien
tcgtgctgcttcggcccgaggcaga

SEQ ID NO: 3116927 - DNA, 25 bp, Homo sapien
cagacgcggatctgacaatgggcgg

SEQ ID NO: 3116928 - DNA, 25 bp, Homo sapien
ggcgggtggaggacacgaggtcata

SEQ ID NO: 3116929 - DNA, 25 bp, Homo sapien
ggcgagggtgcggccatcgtggtcc

SEQ ID NO: 3116930 - DNA, 25 bp, Homo sapien
gcccacacaggtgagctcgccggcg

SEQ ID NO: 3116931 - DNA, 25 bp, Homo sapien
gctcgccggcgtcccaggggttgaa

SEQ ID NO: 3116932 - DNA, 25 bp, Homo sapien
ccagagctggtgccacaatagagca

SEQ ID NO: 3116933 - DNA, 25 bp, Homo sapien
acgcgtgtcccagacacagacctgg

SEQ ID NO: 3116934 - DNA, 25 bp, Homo sapien
gtcatccgcctcccaggacaagaag

SEQ ID NO: 3116935 - DNA, 25 bp, Homo sapien
gccccgtagcagagcgaggtcagct

SEQ ID NO: 3116936 - DNA, 25 bp, Homo sapien
gcgcctgagcccttgcacctcagct

SEQ ID NO: 3116937 - DNA, 25 bp, Homo sapien
ttgcacctcagctccgacacagccc

SEQ ID NO: 3116938 - DNA, 25 bp, Homo sapien
atcgagaacccgagaacagcaacag

SEQ ID NO: 3116939 - DNA, 25 bp, Homo sapien
tgctgccgctgaccaatcgagaacc

SEQ ID NO: 3116940 - DNA, 25 bp, Homo sapien
gcattgcatctcaggacctggctgt

SEQ ID NO: 3116941 - DNA, 25 bp, Homo sapien
tctcaaggccgatgacaagagccag

SEQ ID NO: 3116942 - DNA, 25 bp, Homo sapien
ccacgtgcagccaaaacacgtaggg

SEQ ID NO: 3116943 - DNA, 25 bp, Homo sapien
ggcactggctgcaagccccagtcag

SEQ ID NO: 3116944 - DNA, 25 bp, Homo sapien
acgacgcccatgtccacgctgtcat

SEQ ID NO: 3116945 - DNA, 25 bp, Homo sapien
agcaccagctcgtgttccatgaaca

SEQ ID NO: 3116946 - DNA, 25 bp, Homo sapien
acgctgtcatcgaagctggcactca

SEQ ID NO: 3116947 - DNA, 25 bp, Homo sapien
actgatgagacgtgtgctggtgccc

SEQ ID NO: 3116948 - DNA, 25 bp, Homo sapien
gcaggacttggaatcatctgggctg

SEQ ID NO: 3116949 - DNA, 25 bp, Homo sapien
accacgcccggactgatgtgatttc

SEQ ID NO: 3116950 - DNA, 25 bp, Homo sapien
gtgcagacacaaccgggacggcttt

SEQ ID NO: 3116951 - DNA, 25 bp, Homo sapien
agcaatagcagggaaaggacagttt

SEQ ID NO: 3116952 - DNA, 25 bp, Homo sapien
cttccagaccaggaggtcccagaga

SEQ ID NO: 3116953 - DNA, 25 bp, Homo sapien
caactttctttgctggctatcgtca

SEQ ID NO: 3116954 - DNA, 25 bp, Homo sapien
cagagctgggccttacaggactaga

SEQ ID NO: 3116955 - DNA, 25 bp, Homo sapien
tgacccagagagagcagaacttgac

SEQ ID NO: 3116956 - DNA, 25 bp, Homo sapien
tgagaagaagcaatacagcctggca

SEQ ID NO: 3116957 - DNA, 25 bp, Homo sapien
tctgggtgagtccaaaccaaagcaa

SEQ ID NO: 3116958 - DNA, 25 bp, Homo sapien
cagacgtgtcattatgcaggtgcca

SEQ ID NO: 3116959 - DNA, 25 bp, Homo sapien
tgtgtgtccctgcactagatctggg

SEQ ID NO: 3116960 - DNA, 25 bp, Homo sapien
ggccgggctgtccaaaccagagcat

SEQ ID NO: 3116961 - DNA, 25 bp, Homo sapien
cagggtaaagggacgcaggcatttc

SEQ ID NO: 3116962 - DNA, 25 bp, Homo sapien
agggccgggctgtccaaaccagagc

SEQ ID NO: 3116963 - DNA, 25 bp, Homo sapien
taaagggacgcaggcatttcctatt

SEQ ID NO: 3116964 - DNA, 25 bp, Homo sapien
gatcacaagctccatgctggccaag

SEQ ID NO: 3116965 - DNA, 25 bp, Homo sapien
ctcactgcatgtggcgcagtgggac

SEQ ID NO: 3116966 - DNA, 25 bp, Homo sapien
tgcatgtggcgcagtgggactcccc

SEQ ID NO: 3116967 - DNA, 25 bp, Homo sapien
cggggctgaagaccacctcgttcac

SEQ ID NO: 3116968 - DNA, 25 bp, Homo sapien
aaacttcagcactcacaggggccct

SEQ ID NO: 3116969 - DNA, 25 bp, Homo sapien
gggaaacttcagcactcacaggggc

SEQ ID NO: 3116970 - DNA, 25 bp, Homo sapien
gacccacagtggggaaacttcagca

SEQ ID NO: 3116971 - DNA, 25 bp, Homo sapien
cttcagcactcacaggggccctgag

SEQ ID NO: 3116972 - DNA, 25 bp, Homo sapien
gtagccagccgctagccgctgctgc

SEQ ID NO: 3116973 - DNA, 25 bp, Homo sapien
gagaaggcaacagtggtcagcgcca

SEQ ID NO: 3116974 - DNA, 25 bp, Homo sapien
agctccatggccgtgcgggagacgc

SEQ ID NO: 3116975 - DNA, 25 bp, Homo sapien
ctgaagatgcgcagggagccgtcac

SEQ ID NO: 3116976 - DNA, 25 bp, Homo sapien
acgagcccatccttgtctccagaga

SEQ ID NO: 3116977 - DNA, 25 bp, Homo sapien
tcagcacacggaaggttgtccctgt

SEQ ID NO: 3116978 - DNA, 25 bp, Homo sapien
gggcgccctggtggtcactcagcac

SEQ ID NO: 3116979 - DNA, 25 bp, Homo sapien
gagcccatccttgtctccagagagg

SEQ ID NO: 3116980 - DNA, 25 bp, Homo sapien
agtccacaagctcacagtggttccg

SEQ ID NO: 3116981 - DNA, 25 bp, Homo sapien
aggcattgggaaactcaaccagtcc

SEQ ID NO: 3116982 - DNA, 25 bp, Homo sapien
gttccgcagccagtcggaggcccag

SEQ ID NO: 3116983 - DNA, 25 bp, Homo sapien
agccagccataggtctgtgccctcc

SEQ ID NO: 3116984 - DNA, 25 bp, Homo sapien
tggatgggtaccggccccacccaca

SEQ ID NO: 3116985 - DNA, 25 bp, Homo sapien
cgcagcatgctgcggtggggtggat

SEQ ID NO: 3116986 - DNA, 25 bp, Homo sapien
gcaaaggcgcagcatgctgcggtgg

SEQ ID NO: 3116987 - DNA, 25 bp, Homo sapien
cagcatgctgcggtggggtggatgg

SEQ ID NO: 3116988 - DNA, 25 bp, Homo sapien
tgatcacctccttgtaaacaccggg

SEQ ID NO: 3116989 - DNA, 25 bp, Homo sapien
tgtagatgatcacctccttgtaaac

SEQ ID NO: 3116990 - DNA, 25 bp, Homo sapien
aacaccggggcccacgtacatcagg

SEQ ID NO: 3116991 - DNA, 25 bp, Homo sapien
cgtacatcaggagcgccccatccca

SEQ ID NO: 3116992 - DNA, 25 bp, Homo sapien
caggctcagggacatggcaaaaaag

SEQ ID NO: 3116993 - DNA, 25 bp, Homo sapien
acaggctcagggacatggcaaaaaa

SEQ ID NO: 3116994 - DNA, 25 bp, Homo sapien
aggctcagggacatggcaaaaaagg

SEQ ID NO: 3116995 - DNA, 25 bp, Homo sapien
tgcacaggtgcactgcgttgtcgtg

SEQ ID NO: 3116996 - DNA, 25 bp, Homo sapien
actgcgttgtcgtggccggcaaagt

SEQ ID NO: 3116997 - DNA, 25 bp, Homo sapien
ctgcacaggtgcactgcgttgtcgt

SEQ ID NO: 3116998 - DNA, 25 bp, Homo sapien
acacaaggatctcgttgcgggcggc

SEQ ID NO: 3116999 - DNA, 25 bp, Homo sapien
ctcccacacaaggatctcgttgcgg

SEQ ID NO: 3117000 - DNA, 25 bp, Homo sapien
gagcagcctggcggacggtgtaaac

SEQ ID NO: 3117001 - DNA, 25 bp, Homo sapien
ccacacaaggatctcgttgcgggcg

SEQ ID NO: 3117002 - DNA, 25 bp, Homo sapien
aacagcttgctccaggcgatttacg

SEQ ID NO: 3117003 - DNA, 25 bp, Homo sapien
gcgatttacgtgaatcctggcctgt

SEQ ID NO: 3117004 - DNA, 25 bp, Homo sapien
tcacagggcgccaaatttacaacag

SEQ ID NO: 3117005 - DNA, 25 bp, Homo sapien
cagcatgaggccattgacaacctgg

SEQ ID NO: 3117006 - DNA, 25 bp, Homo sapien
tgagctcaggccaggagtgaccaga

SEQ ID NO: 3117007 - DNA, 25 bp, Homo sapien
gacagccagtgcaacaatgcagcaa

SEQ ID NO: 3117008 - DNA, 25 bp, Homo sapien
agagacagccagtgcaacaatgcag

SEQ ID NO: 3117009 - DNA, 25 bp, Homo sapien
ggccaggagtgaccagagacagcca

SEQ ID NO: 3117010 - DNA, 25 bp, Homo sapien
cctggcaggccgagcggccattgct

SEQ ID NO: 3117011 - DNA, 25 bp, Homo sapien
gacctggtcctcaagcctttcgctc

SEQ ID NO: 3117012 - DNA, 25 bp, Homo sapien
gccagagcggacaggctgtgcggcg

SEQ ID NO: 3117013 - DNA, 25 bp, Homo sapien
gcggacagcgcagggtcctggcgcc

SEQ ID NO: 3117014 - DNA, 25 bp, Homo sapien
cagtaacaggatgcgcacgtcccgc

SEQ ID NO: 3117015 - DNA, 25 bp, Homo sapien
gcccagtaacaggatgcgcacgtcc

SEQ ID NO: 3117016 - DNA, 25 bp, Homo sapien
tcgcccagtaacaggatgcgcacgt

SEQ ID NO: 3117017 - DNA, 25 bp, Homo sapien
ctcgcccagtaacaggatgcgcacg

SEQ ID NO: 3117018 - DNA, 25 bp, Homo sapien
agggacaggatcagcgacgtcttcc

SEQ ID NO: 3117019 - DNA, 25 bp, Homo sapien
gggacaggatcagcgacgtcttccc

SEQ ID NO: 3117020 - DNA, 25 bp, Homo sapien
aagggacccgcgcgctcaccaggga

SEQ ID NO: 3117021 - DNA, 25 bp, Homo sapien
caagggacccgcgcgctcaccaggg

SEQ ID NO: 3117022 - DNA, 25 bp, Homo sapien
ggacccgcgcgctcaccagggaccc

SEQ ID NO: 3117023 - DNA, 25 bp, Homo sapien
ctgcaagggacccgcgcgctcacca

SEQ ID NO: 3117024 - DNA, 25 bp, Homo sapien
gcaccttctccggggtgacgtccgc

SEQ ID NO: 3117025 - DNA, 25 bp, Homo sapien
tgacgtccgcggggatggtgatctc

SEQ ID NO: 3117026 - DNA, 25 bp, Homo sapien
acgtccgcggggatggtgatctcct

SEQ ID NO: 3117027 - DNA, 25 bp, Homo sapien
ctccggggtgacgtccgcggggatg

SEQ ID NO: 3117028 - DNA, 25 bp, Homo sapien
agagactccactgcggacccagcag

SEQ ID NO: 3117029 - DNA, 25 bp, Homo sapien
aaagagactccactgcggacccagc

SEQ ID NO: 3117030 - DNA, 25 bp, Homo sapien
acaaagagactccactgcggaccca

SEQ ID NO: 3117031 - DNA, 25 bp, Homo sapien
gacaaagagactccactgcggaccc

SEQ ID NO: 3117032 - DNA, 25 bp, Homo sapien
ctcccgcagctcctcgtccgtctgc

SEQ ID NO: 3117033 - DNA, 25 bp, Homo sapien
cgcagctcctcgtccgtctgctcgg

SEQ ID NO: 3117034 - DNA, 25 bp, Homo sapien
ccgcagctcctcgtccgtctgctcg

SEQ ID NO: 3117035 - DNA, 25 bp, Homo sapien
cttgtggatctcctcccgcagctcc

SEQ ID NO: 3117036 - DNA, 25 bp, Homo sapien
gctcacaggtagcatgggtgcagct

SEQ ID NO: 3117037 - DNA, 25 bp, Homo sapien
caagacccttggagcagagggctca

SEQ ID NO: 3117038 - DNA, 25 bp, Homo sapien
aattatcagggccaaggacacccgg

SEQ ID NO: 3117039 - DNA, 25 bp, Homo sapien
tgttatccctggagcaccactggac

SEQ ID NO: 3117040 - DNA, 25 bp, Homo sapien
tcagagacgtcatacaccacacaca

SEQ ID NO: 3117041 - DNA, 25 bp, Homo sapien
cctcagagacgtcatacaccacaca

SEQ ID NO: 3117042 - DNA, 25 bp, Homo sapien
ctcagagacgtcatacaccacacac

SEQ ID NO: 3117043 - DNA, 25 bp, Homo sapien
ctcaatggctcagactgcgggacgc

SEQ ID NO: 3117044 - DNA, 25 bp, Homo sapien
agtcccggccacaggaacaaagctg

SEQ ID NO: 3117045 - DNA, 25 bp, Homo sapien
aatgctgtgagcgatggcactggcc

SEQ ID NO: 3117046 - DNA, 25 bp, Homo sapien
gggtgactccacgtcaggcaactcc

SEQ ID NO: 3117047 - DNA, 25 bp, Homo sapien
catggctcccagctggagcatgagc

SEQ ID NO: 3117048 - DNA, 25 bp, Homo sapien
gctgtgaagtgaggctgcccgcggg

SEQ ID NO: 3117049 - DNA, 25 bp, Homo sapien
ctgaaaagcaaagcctggctgtgaa

SEQ ID NO: 3117050 - DNA, 25 bp, Homo sapien
tgcccgcgggcacatggctcccagc

SEQ ID NO: 3117051 - DNA, 25 bp, Homo sapien
ctgggcccctgcgtggtccccccat

SEQ ID NO: 3117052 - DNA, 25 bp, Homo sapien
ggcccctgcgtggtccccccattca

SEQ ID NO: 3117053 - DNA, 25 bp, Homo sapien
attcaccagtgggatccacttagtt

SEQ ID NO: 3117054 - DNA, 25 bp, Homo sapien
ccagtgggatccacttagttcgaat

SEQ ID NO: 3117055 - DNA, 25 bp, Homo sapien
ctccacgcaggtctcaatctcggga

SEQ ID NO: 3117056 - DNA, 25 bp, Homo sapien
ccgaccgcaggtctgacttgttgcc

SEQ ID NO: 3117057 - DNA, 25 bp, Homo sapien
tcaatctcgggaaactggctcatga

SEQ ID NO: 3117058 - DNA, 25 bp, Homo sapien
atggagctccccgaccgcaggtctg

SEQ ID NO: 3117059 - DNA, 25 bp, Homo sapien
gagatgttcctcaggttcttggccg

SEQ ID NO: 3117060 - DNA, 25 bp, Homo sapien
gatgttcctcaggttcttggccgaa

SEQ ID NO: 3117061 - DNA, 25 bp, Homo sapien
tagtagaacagctctgagatgttcc

SEQ ID NO: 3117062 - DNA, 25 bp, Homo sapien
gtgggatgcaggacggccttctggg

SEQ ID NO: 3117063 - DNA, 25 bp, Homo sapien
ctgtggggatgttggctcagcaccc

SEQ ID NO: 3117064 - DNA, 25 bp, Homo sapien
gggaaccagcgtgcggggccccagc

SEQ ID NO: 3117065 - DNA, 25 bp, Homo sapien
gtgacccacgccgacctgccacacc

SEQ ID NO: 3117066 - DNA, 25 bp, Homo sapien
agcaccctcaggtgacccacgccga

SEQ ID NO: 3117067 - DNA, 25 bp, Homo sapien
agagcctgaagatgcgcgtcagcgc

SEQ ID NO: 3117068 - DNA, 25 bp, Homo sapien
gctcttcgtcactgagcgcctggtc

SEQ ID NO: 3117069 - DNA, 25 bp, Homo sapien
ttgagctcttcgtcactgagcgcct

SEQ ID NO: 3117070 - DNA, 25 bp, Homo sapien
cttcgtcactgagcgcctggtccag

SEQ ID NO: 3117071 - DNA, 25 bp, Homo sapien
ggagacgacccgttccagtcactaa

SEQ ID NO: 3117072 - DNA, 25 bp, Homo sapien
cttccgagagaacgttgttgggagt

SEQ ID NO: 3117073 - DNA, 25 bp, Homo sapien
agtcactaacggcagcggaggttca

SEQ ID NO: 3117074 - DNA, 25 bp, Homo sapien
aacgttgttgggagtcagccagcca

SEQ ID NO: 3117075 - DNA, 25 bp, Homo sapien
ctgcggggccagggggtgcccaaag

SEQ ID NO: 3117076 - DNA, 25 bp, Homo sapien
ccagggggtgcccaaagcaggattt

SEQ ID NO: 3117077 - DNA, 25 bp, Homo sapien
cggggccagggggtgcccaaagcag

SEQ ID NO: 3117078 - DNA, 25 bp, Homo sapien
ggccagggggtgcccaaagcaggat

SEQ ID NO: 3117079 - DNA, 25 bp, Homo sapien
ctgcacaccaccgtcttcacgtcct

SEQ ID NO: 3117080 - DNA, 25 bp, Homo sapien
acgccgcccgccacgttcctgcaca

SEQ ID NO: 3117081 - DNA, 25 bp, Homo sapien
agggtcagccggtcctcccgcacgc

SEQ ID NO: 3117082 - DNA, 25 bp, Homo sapien
gccacgttcctgcacaccaccgtct

SEQ ID NO: 3117083 - DNA, 25 bp, Homo sapien
ctgcaccgagacaaagcagggggag

SEQ ID NO: 3117084 - DNA, 25 bp, Homo sapien
tgcaccgagacaaagcagggggagc

SEQ ID NO: 3117085 - DNA, 25 bp, Homo sapien
ggcacaggcgggcacccggcctcac

SEQ ID NO: 3117086 - DNA, 25 bp, Homo sapien
atggtccaggtggtctcgtgccggc

SEQ ID NO: 3117087 - DNA, 25 bp, Homo sapien
ccgcgctggatgaagagcgtgttca

SEQ ID NO: 3117088 - DNA, 25 bp, Homo sapien
agggcatcgctgtagccgaagcgcc

SEQ ID NO: 3117089 - DNA, 25 bp, Homo sapien
gagatagtccgcagtcagctccagg

SEQ ID NO: 3117090 - DNA, 25 bp, Homo sapien
accccagatggcctgctgagcgaga

SEQ ID NO: 3117091 - DNA, 25 bp, Homo sapien
tgagcgagaccttcactgaccctca

SEQ ID NO: 3117092 - DNA, 25 bp, Homo sapien
aaaccccagcgtcactcatggaggg

SEQ ID NO: 3117093 - DNA, 25 bp, Homo sapien
ggcacagccaggcaagggcacgacc

SEQ ID NO: 3117094 - DNA, 25 bp, Homo sapien
gccaaggtggttgagctccgtgctg

SEQ ID NO: 3117095 - DNA, 25 bp, Homo sapien
ccaaggtggttgagctccgtgctgc

SEQ ID NO: 3117096 - DNA, 25 bp, Homo sapien
agccaaggtggttgagctccgtgct

SEQ ID NO: 3117097 - DNA, 25 bp, Homo sapien
ctggtcgtgcttctcaaacactctc

SEQ ID NO: 3117098 - DNA, 25 bp, Homo sapien
gggcaggggactcgccatgctctca

SEQ ID NO: 3117099 - DNA, 25 bp, Homo sapien
ggggcaggggactcgccatgctctc

SEQ ID NO: 3117100 - DNA, 25 bp, Homo sapien
caggggcaggggactcgccatgctc

SEQ ID NO: 3117101 - DNA, 25 bp, Homo sapien
ggcaggggactcgccatgctctcac

SEQ ID NO: 3117102 - DNA, 25 bp, Homo sapien
ccacgggcgagagggcgccgtcgcg

SEQ ID NO: 3117103 - DNA, 25 bp, Homo sapien
tctgtgcggactgtgcgtgggagct

SEQ ID NO: 3117104 - DNA, 25 bp, Homo sapien
aaggctttgcagctccacgggcgag

SEQ ID NO: 3117105 - DNA, 25 bp, Homo sapien
ccactggcagaggtatccgtgcagg

SEQ ID NO: 3117106 - DNA, 25 bp, Homo sapien
aggcacagtgttatggtggggaggg

SEQ ID NO: 3117107 - DNA, 25 bp, Homo sapien
gtccaaggcagctccggacgtccag

SEQ ID NO: 3117108 - DNA, 25 bp, Homo sapien
tagcccaggtagcctaggtgtccaa

SEQ ID NO: 3117109 - DNA, 25 bp, Homo sapien
ctccgctgcgtctgtcccttctcct

SEQ ID NO: 3117110 - DNA, 25 bp, Homo sapien
ggacgctccgctgcgtctgtccctt

SEQ ID NO: 3117111 - DNA, 25 bp, Homo sapien
gacttgcccactccacgggccccta

SEQ ID NO: 3117112 - DNA, 25 bp, Homo sapien
tgcaggaaggcagacttgcccactc

SEQ ID NO: 3117113 - DNA, 25 bp, Homo sapien
agtgccccccagattgccctgccct

SEQ ID NO: 3117114 - DNA, 25 bp, Homo sapien
tgtcgatggcgtagccgggaggctg

SEQ ID NO: 3117115 - DNA, 25 bp, Homo sapien
cattgacctgcaccgtgtcgatggc

SEQ ID NO: 3117116 - DNA, 25 bp, Homo sapien
ctgtccattgacctgcaccgtgtcg

SEQ ID NO: 3117117 - DNA, 25 bp, Homo sapien
acctgcaccgtgtcgatggcgtagc

SEQ ID NO: 3117118 - DNA, 25 bp, Homo sapien
gcaggcctgggtgtccccgggtcca

SEQ ID NO: 3117119 - DNA, 25 bp, Homo sapien
tcggtccccctagggccatgctggg

SEQ ID NO: 3117120 - DNA, 25 bp, Homo sapien
ctgggacagacagcggccttaggaa

SEQ ID NO: 3117121 - DNA, 25 bp, Homo sapien
ctgggccagatctgccaggcaggcc

SEQ ID NO: 3117122 - DNA, 25 bp, Homo sapien
atcaaacatcaagcaggcaacgtca

SEQ ID NO: 3117123 - DNA, 25 bp, Homo sapien
cgatgtggccagcagaccatctgtg

SEQ ID NO: 3117124 - DNA, 25 bp, Homo sapien
gcgtccagcgatgtggccagcagac

SEQ ID NO: 3117125 - DNA, 25 bp, Homo sapien
aggcaacgtcacaggtggcgtccag

SEQ ID NO: 3117126 - DNA, 25 bp, Homo sapien
gagtggtatgaggtacagtcctggg

SEQ ID NO: 3117127 - DNA, 25 bp, Homo sapien
gtggtatgaggtacagtcctggggt

SEQ ID NO: 3117128 - DNA, 25 bp, Homo sapien
agagtggtatgaggtacagtcctgg

SEQ ID NO: 3117129 - DNA, 25 bp, Homo sapien
gagagtggtatgaggtacagtcctg

SEQ ID NO: 3117130 - DNA, 25 bp, Homo sapien
aactcggccggtgatgggccagaca

SEQ ID NO: 3117131 - DNA, 25 bp, Homo sapien
ggtagccggtgcttgcggcaaaact

SEQ ID NO: 3117132 - DNA, 25 bp, Homo sapien
accgcgacaccttcgggcaggtcgg

SEQ ID NO: 3117133 - DNA, 25 bp, Homo sapien
agaacggcacgggagcgggtagccg

SEQ ID NO: 3117134 - DNA, 25 bp, Homo sapien
agtccccagggctgcgctactgggt

SEQ ID NO: 3117135 - DNA, 25 bp, Homo sapien
agacactgctagtccccagttccag

SEQ ID NO: 3117136 - DNA, 25 bp, Homo sapien
acaaagctccaccccgccactctgg

SEQ ID NO: 3117137 - DNA, 25 bp, Homo sapien
atgacagacactgctagtccccagg

SEQ ID NO: 3117138 - DNA, 25 bp, Homo sapien
ccagaccagaggcacagccggtgga

SEQ ID NO: 3117139 - DNA, 25 bp, Homo sapien
gagggacatgcctgggcactgcctc

SEQ ID NO: 3117140 - DNA, 25 bp, Homo sapien
tgggcaccctcccatgtcctggact

SEQ ID NO: 3117141 - DNA, 25 bp, Homo sapien
ctgcagatacctcaggcacatgccc

SEQ ID NO: 3117142 - DNA, 25 bp, Homo sapien
tcaccaggaccctgtagagtgagaa

SEQ ID NO: 3117143 - DNA, 25 bp, Homo sapien
ggcggccccgacaacccccagcagc

SEQ ID NO: 3117144 - DNA, 25 bp, Homo sapien
cggcggccccgacaacccccagcag

SEQ ID NO: 3117145 - DNA, 25 bp, Homo sapien
ccaggaccctgtagagtgagaagct

SEQ ID NO: 3117146 - DNA, 25 bp, Homo sapien
ggcagcataaggccccgctgcagat

SEQ ID NO: 3117147 - DNA, 25 bp, Homo sapien
gcgcaaaggcgttcccggagtggca

SEQ ID NO: 3117148 - DNA, 25 bp, Homo sapien
agcggtggccggcacttgggagctc

SEQ ID NO: 3117149 - DNA, 25 bp, Homo sapien
gctgcagatcgactgccttcagaaa

SEQ ID NO: 3117150 - DNA, 25 bp, Homo sapien
cttccagccctcctcatacccactg

SEQ ID NO: 3117151 - DNA, 25 bp, Homo sapien
cagccctcctcatacccactggcca

SEQ ID NO: 3117152 - DNA, 25 bp, Homo sapien
agccctcctcatacccactggccac

SEQ ID NO: 3117153 - DNA, 25 bp, Homo sapien
tccagccctcctcatacccactggc

SEQ ID NO: 3117154 - DNA, 25 bp, Homo sapien
gctacaaccacggaaacggctccaa

SEQ ID NO: 3117155 - DNA, 25 bp, Homo sapien
ctgctacaaccacggaaacggctcc

SEQ ID NO: 3117156 - DNA, 25 bp, Homo sapien
cacggaaacggctccaaacttgagg

SEQ ID NO: 3117157 - DNA, 25 bp, Homo sapien
ccacggaaacggctccaaacttgag

SEQ ID NO: 3117158 - DNA, 25 bp, Homo sapien
aaaacacacagtgaagtttaatcag

SEQ ID NO: 3117159 - DNA, 25 bp, Homo sapien
cagtgaagtttaatcaggaacccaa

SEQ ID NO: 3117160 - DNA, 25 bp, Homo sapien
acacagtgaagtttaatcaggaacc

SEQ ID NO: 3117161 - DNA, 25 bp, Homo sapien
aaacacacagtgaagtttaatcagg

SEQ ID NO: 3117162 - DNA, 25 bp, Homo sapien
caagttgtcttcagagactgggatc

SEQ ID NO: 3117163 - DNA, 25 bp, Homo sapien
tgtcttcagagactgggatccgaga

SEQ ID NO: 3117164 - DNA, 25 bp, Homo sapien
agttgtcttcagagactgggatccg

SEQ ID NO: 3117165 - DNA, 25 bp, Homo sapien
aagcaagttgtcttcagagactggg

SEQ ID NO: 3117166 - DNA, 25 bp, Homo sapien
ggggctgctctgcggacgactccgc

SEQ ID NO: 3117167 - DNA, 25 bp, Homo sapien
ggctgctctgcggacgactccgctc

SEQ ID NO: 3117168 - DNA, 25 bp, Homo sapien
tgctctgcggacgactccgctccgc

SEQ ID NO: 3117169 - DNA, 25 bp, Homo sapien
ctgctctgcggacgactccgctccg

SEQ ID NO: 3117170 - DNA, 25 bp, Homo sapien
tcctggatgagctgcagcagcgagc

SEQ ID NO: 3117171 - DNA, 25 bp, Homo sapien
tgctcctggatgagctgcagcagcg

SEQ ID NO: 3117172 - DNA, 25 bp, Homo sapien
gctcctggatgagctgcagcagcga

SEQ ID NO: 3117173 - DNA, 25 bp, Homo sapien
ctggatgagctgcagcagcgagctc

SEQ ID NO: 3117174 - DNA, 25 bp, Homo sapien
ctggaaagcgagggccaaggtccaa

SEQ ID NO: 3117175 - DNA, 25 bp, Homo sapien
tggaaagcgagggccaaggtccaag

SEQ ID NO: 3117176 - DNA, 25 bp, Homo sapien
cccgtgcctgtctgttccctgggac

SEQ ID NO: 3117177 - DNA, 25 bp, Homo sapien
tgttccctgggaccctgcttgatcc

SEQ ID NO: 3117178 - DNA, 25 bp, Homo sapien
gggccccgtgcctgtctgttccctg

SEQ ID NO: 3117179 - DNA, 25 bp, Homo sapien
agctcctcagttgttcccccgtctt

SEQ ID NO: 3117180 - DNA, 25 bp, Homo sapien
agccaaggcctgagtgcgggcccga

SEQ ID NO: 3117181 - DNA, 25 bp, Homo sapien
caaggcctgagtgcgggcccgaccc

SEQ ID NO: 3117182 - DNA, 25 bp, Homo sapien
gccgccagccaaggcctgagtgcgg

SEQ ID NO: 3117183 - DNA, 25 bp, Homo sapien
ctgcagtgaggagccgccagccaag

SEQ ID NO: 3117184 - DNA, 25 bp, Homo sapien
gctcctggtagcagacctggccctg

SEQ ID NO: 3117185 - DNA, 25 bp, Homo sapien
accaggccagtgaaggtgtccgcac

SEQ ID NO: 3117186 - DNA, 25 bp, Homo sapien
caccagctcctggtagcagacctgg

SEQ ID NO: 3117187 - DNA, 25 bp, Homo sapien
tccgcaccgatgaagcctgtgttct

SEQ ID NO: 3117188 - DNA, 25 bp, Homo sapien
cagctgcggtgacggtagaagtacc

SEQ ID NO: 3117189 - DNA, 25 bp, Homo sapien
tgtccgttagcaatggcccgcttga

SEQ ID NO: 3117190 - DNA, 25 bp, Homo sapien
aaccgcttgtagacacctaggcctg

SEQ ID NO: 3117191 - DNA, 25 bp, Homo sapien
caaggcaggatctcgtaggccacgt

SEQ ID NO: 3117192 - DNA, 25 bp, Homo sapien
gggtggtaggtctgcagcacccact

SEQ ID NO: 3117193 - DNA, 25 bp, Homo sapien
caagggggctcttcatgtactcggg

SEQ ID NO: 3117194 - DNA, 25 bp, Homo sapien
ttgaggcgggccccgtaacacagga

SEQ ID NO: 3117195 - DNA, 25 bp, Homo sapien
ccaacgtgcatgaacatgtaggtga

SEQ ID NO: 3117196 - DNA, 25 bp, Homo sapien
agcaggccgtgcaccatctccaggg

SEQ ID NO: 3117197 - DNA, 25 bp, Homo sapien
cagcacgcctgccaggtagagcagg

SEQ ID NO: 3117198 - DNA, 25 bp, Homo sapien
tcatcagctgcaggagggcgttgaa

SEQ ID NO: 3117199 - DNA, 25 bp, Homo sapien
caggctgatgcggagcaggccgtgc

SEQ ID NO: 3117200 - DNA, 25 bp, Homo sapien
agcacagggcgtagaccccgccgga

SEQ ID NO: 3117201 - DNA, 25 bp, Homo sapien
caccggggcccgcatgtcggtgatg

SEQ ID NO: 3117202 - DNA, 25 bp, Homo sapien
ttggccaggtgtgccgagcacaggg

SEQ ID NO: 3117203 - DNA, 25 bp, Homo sapien
catgtcggtgatggagacggttagg

SEQ ID NO: 3117204 - DNA, 25 bp, Homo sapien
tgtgcagacgagaagtggtgaggct

SEQ ID NO: 3117205 - DNA, 25 bp, Homo sapien
gtgtgtgcagacgagaagtggtgag

SEQ ID NO: 3117206 - DNA, 25 bp, Homo sapien
cagacgagaagtggtgaggctcacc

SEQ ID NO: 3117207 - DNA, 25 bp, Homo sapien
tgcagacgagaagtggtgaggctca

SEQ ID NO: 3117208 - DNA, 25 bp, Homo sapien
cttgtagggacatctcatcccagcc

SEQ ID NO: 3117209 - DNA, 25 bp, Homo sapien
agcaccatcctcagcaacttgtagg

SEQ ID NO: 3117210 - DNA, 25 bp, Homo sapien
ccatcctcagcaacttgtagggaca

SEQ ID NO: 3117211 - DNA, 25 bp, Homo sapien
tcagcaacttgtagggacatctcat

SEQ ID NO: 3117212 - DNA, 25 bp, Homo sapien
gggaggtgccctggctgcaggctga

SEQ ID NO: 3117213 - DNA, 25 bp, Homo sapien
agagggacgcggcaggtgggaggtg

SEQ ID NO: 3117214 - DNA, 25 bp, Homo sapien
ctgcagagggacgcggcaggtggga

SEQ ID NO: 3117215 - DNA, 25 bp, Homo sapien
gccctggctgcaggctgagaggccc

SEQ ID NO: 3117216 - DNA, 25 bp, Homo sapien
gaaggtgccgtaggccagcagcacc

SEQ ID NO: 3117217 - DNA, 25 bp, Homo sapien
gcgaagacgttccagaagacggcga

SEQ ID NO: 3117218 - DNA, 25 bp, Homo sapien
tcgtagctccgcaggatggtcaggc

SEQ ID NO: 3117219 - DNA, 25 bp, Homo sapien
caggtgcgccatgaagctgggctgt

SEQ ID NO: 3117220 - DNA, 25 bp, Homo sapien
tgagacgtccgttcacaaagggcag

SEQ ID NO: 3117221 - DNA, 25 bp, Homo sapien
ggcagacgtgaaggcccctggtggg

SEQ ID NO: 3117222 - DNA, 25 bp, Homo sapien
gctcagaccgcaagtcctgggagtg

SEQ ID NO: 3117223 - DNA, 25 bp, Homo sapien
tatccaaaaaggctcagaccgcaag

SEQ ID NO: 3117224 - DNA, 25 bp, Homo sapien
tcaggtatcgggaagagttgccagc

SEQ ID NO: 3117225 - DNA, 25 bp, Homo sapien
agggcctccgtagcgcgggtcttca

SEQ ID NO: 3117226 - DNA, 25 bp, Homo sapien
cagagaagcatgtgacagggagctg

SEQ ID NO: 3117227 - DNA, 25 bp, Homo sapien
cgcccttcctcaggtatcgggaaga

SEQ ID NO: 3117228 - DNA, 25 bp, Homo sapien
ctggaagccccggactgttggtaga

SEQ ID NO: 3117229 - DNA, 25 bp, Homo sapien
tgaacgtagcggcttcccacgcgct

SEQ ID NO: 3117230 - DNA, 25 bp, Homo sapien
ggcgagcgtcctccgtggccagtcc

SEQ ID NO: 3117231 - DNA, 25 bp, Homo sapien
ttctggagcgccacgagaggtgcta

SEQ ID NO: 3117232 - DNA, 25 bp, Homo sapien
ccgcccccagcacccggccccatca

SEQ ID NO: 3117233 - DNA, 25 bp, Homo sapien
ccccagcacccggccccatcagcag

SEQ ID NO: 3117234 - DNA, 25 bp, Homo sapien
gcccccagcacccggccccatcagc

SEQ ID NO: 3117235 - DNA, 25 bp, Homo sapien
cccagcacccggccccatcagcaga

SEQ ID NO: 3117236 - DNA, 25 bp, Homo sapien
agccgcccaatccagaggccccgcc

SEQ ID NO: 3117237 - DNA, 25 bp, Homo sapien
gcagccggccccatccgcagaggcc

SEQ ID NO: 3117238 - DNA, 25 bp, Homo sapien
agcagccggccccatccgcagaggc

SEQ ID NO: 3117239 - DNA, 25 bp, Homo sapien
gcccccagcagccgcccaatccaga

SEQ ID NO: 3117240 - DNA, 25 bp, Homo sapien
tgggaggaacgctccagttccctgt

SEQ ID NO: 3117241 - DNA, 25 bp, Homo sapien
tgctgaggtctcttcggaacccgcc

SEQ ID NO: 3117242 - DNA, 25 bp, Homo sapien
tcgactttcccagtgagatgcctca

SEQ ID NO: 3117243 - DNA, 25 bp, Homo sapien
cctgtccccgcgctcttaagggtgg

SEQ ID NO: 3117244 - DNA, 25 bp, Homo sapien
gggaccagcggggacgcacgcgtgg

SEQ ID NO: 3117245 - DNA, 25 bp, Homo sapien
cgctcccaagctccgcgcctcgcgg

SEQ ID NO: 3117246 - DNA, 25 bp, Homo sapien
ctccgctcccaagctccgcgcctcg

SEQ ID NO: 3117247 - DNA, 25 bp, Homo sapien
ggacgcacgcgtgggggcgagtggg

SEQ ID NO: 3117248 - DNA, 25 bp, Homo sapien
ctttcggcccacgaacagacgattg

SEQ ID NO: 3117249 - DNA, 25 bp, Homo sapien
gtactttcggcccacgaacagacga

SEQ ID NO: 3117250 - DNA, 25 bp, Homo sapien
acgaacagacgattgccctgctcct

SEQ ID NO: 3117251 - DNA, 25 bp, Homo sapien
ggcccacgaacagacgattgccctg

SEQ ID NO: 3117252 - DNA, 25 bp, Homo sapien
caaggatctgtgcacagtggagtac

SEQ ID NO: 3117253 - DNA, 25 bp, Homo sapien
ggctgagcctatccgcttgattcca

SEQ ID NO: 3117254 - DNA, 25 bp, Homo sapien
aaatctttggagagtccgggcttag

SEQ ID NO: 3117255 - DNA, 25 bp, Homo sapien
gtcctcaagggtcgagggcccctgc

SEQ ID NO: 3117256 - DNA, 25 bp, Homo sapien
agggcgtaggctcagcgtgcccact

SEQ ID NO: 3117257 - DNA, 25 bp, Homo sapien
agccgcatgagggcgtaggctcagc

SEQ ID NO: 3117258 - DNA, 25 bp, Homo sapien
gcccgtcccagcttctgcgctctgg

SEQ ID NO: 3117259 - DNA, 25 bp, Homo sapien
catgagggcgtaggctcagcgtgcc

SEQ ID NO: 3117260 - DNA, 25 bp, Homo sapien
ggtgtaatacacggccaccagcggg

SEQ ID NO: 3117261 - DNA, 25 bp, Homo sapien
gtagcacaaggcccggttggtgtaa

SEQ ID NO: 3117262 - DNA, 25 bp, Homo sapien
caaggcccggttggtgtaatacacg

SEQ ID NO: 3117263 - DNA, 25 bp, Homo sapien
gcacaaggcccggttggtgtaatac

SEQ ID NO: 3117264 - DNA, 25 bp, Homo sapien
tggcgatggcctcatcatagctctc

SEQ ID NO: 3117265 - DNA, 25 bp, Homo sapien
ctcgctgcagattggcgatggcctc

SEQ ID NO: 3117266 - DNA, 25 bp, Homo sapien
caggaagaagtgcgccttcacagac

SEQ ID NO: 3117267 - DNA, 25 bp, Homo sapien
ccttcacagactgcccgtccagctc

SEQ ID NO: 3117268 - DNA, 25 bp, Homo sapien
atgtcgtccccgaagttcagccgct

SEQ ID NO: 3117269 - DNA, 25 bp, Homo sapien
gaggtaggagtgcagctcgctctcc

SEQ ID NO: 3117270 - DNA, 25 bp, Homo sapien
tcctcaatgctgttccagcgcttct

SEQ ID NO: 3117271 - DNA, 25 bp, Homo sapien
cagcgcttcttcttcgcgattcgaa

SEQ ID NO: 3117272 - DNA, 25 bp, Homo sapien
aattatcccaagacagggcggcctg

SEQ ID NO: 3117273 - DNA, 25 bp, Homo sapien
gtaaagccttcgataaacgcttgtg

SEQ ID NO: 3117274 - DNA, 25 bp, Homo sapien
tgtcgggagtcggtgattcagaatt

SEQ ID NO: 3117275 - DNA, 25 bp, Homo sapien
cgataaacgcttgtgtcgggagtcg

SEQ ID NO: 3117276 - DNA, 25 bp, Homo sapien
accaggagccggtcagagatggacc

SEQ ID NO: 3117277 - DNA, 25 bp, Homo sapien
caatctcagagctaacatccacact

SEQ ID NO: 3117278 - DNA, 25 bp, Homo sapien
ccggtcagagatggacctggccaga

SEQ ID NO: 3117279 - DNA, 25 bp, Homo sapien
tggccagatgtctgaccacacccca

SEQ ID NO: 3117280 - DNA, 25 bp, Homo sapien
gtcgtcctcatcaccctcgtggttt

SEQ ID NO: 3117281 - DNA, 25 bp, Homo sapien
gctgtcgtcctcatcaccctcgtgg

SEQ ID NO: 3117282 - DNA, 25 bp, Homo sapien
cctcatcaccctcgtggtttcgctg

SEQ ID NO: 3117283 - DNA, 25 bp, Homo sapien
cgtggctgtcgtcctcatcaccctc

SEQ ID NO: 3117284 - DNA, 25 bp, Homo sapien
ctgtgaagagttgagtgctgtgctt

SEQ ID NO: 3117285 - DNA, 25 bp, Homo sapien
acagacccaacacaaggcggggatg

SEQ ID NO: 3117286 - DNA, 25 bp, Homo sapien
atgctcccacgccacgtgcacacac

SEQ ID NO: 3117287 - DNA, 25 bp, Homo sapien
acacaaggcggggatgctcccacgc

SEQ ID NO: 3117288 - DNA, 25 bp, Homo sapien
aaaaagctcgtccatgtccgccatg

SEQ ID NO: 3117289 - DNA, 25 bp, Homo sapien
aaaaaagctcgtccatgtccgccat

SEQ ID NO: 3117290 - DNA, 25 bp, Homo sapien
agaaaaaagctcgtccatgtccgcc

SEQ ID NO: 3117291 - DNA, 25 bp, Homo sapien
ctgagaaaaaagctcgtccatgtcc

SEQ ID NO: 3117292 - DNA, 25 bp, Homo sapien
tgaaaaggggcactgcacgagcacc

SEQ ID NO: 3117293 - DNA, 25 bp, Homo sapien
aaggggcactgcacgagcacctgcc

SEQ ID NO: 3117294 - DNA, 25 bp, Homo sapien
tgcacgagcacctgccagccatcgg

SEQ ID NO: 3117295 - DNA, 25 bp, Homo sapien
gagcacctgccagccatcggcagca

SEQ ID NO: 3117296 - DNA, 25 bp, Homo sapien
cttgcggtcgtaggtgatgccactg

SEQ ID NO: 3117297 - DNA, 25 bp, Homo sapien
tccttgcggtcgtaggtgatgccac

SEQ ID NO: 3117298 - DNA, 25 bp, Homo sapien
cactgggcgtgatgcacggctcccg

SEQ ID NO: 3117299 - DNA, 25 bp, Homo sapien
atgccactgggcgtgatgcacggct

SEQ ID NO: 3117300 - DNA, 25 bp, Homo sapien
caggaccatgccactggccctgctc

SEQ ID NO: 3117301 - DNA, 25 bp, Homo sapien
ccaggaccatgccactggccctgct

SEQ ID NO: 3117302 - DNA, 25 bp, Homo sapien
ggtcacggggtcaaaatgacccaca

SEQ ID NO: 3117303 - DNA, 25 bp, Homo sapien
gtcacggggtcaaaatgacccacac

SEQ ID NO: 3117304 - DNA, 25 bp, Homo sapien
tcacggggtcaaaatgacccacacg

SEQ ID NO: 3117305 - DNA, 25 bp, Homo sapien
gatgaatgcgtcaataacctccttc

SEQ ID NO: 3117306 - DNA, 25 bp, Homo sapien
tctcagagatgaatgcgtcaataac

SEQ ID NO: 3117307 - DNA, 25 bp, Homo sapien
ccaagttggggatgagctgttcctg

SEQ ID NO: 3117308 - DNA, 25 bp, Homo sapien
taacctccttcatagccaagttggg

SEQ ID NO: 3117309 - DNA, 25 bp, Homo sapien
ggaaacagtccagagtccaacagca

SEQ ID NO: 3117310 - DNA, 25 bp, Homo sapien
cccctggaccaggacgccaggtagg

SEQ ID NO: 3117311 - DNA, 25 bp, Homo sapien
cccagcaaaagcgatgctgagaggg

SEQ ID NO: 3117312 - DNA, 25 bp, Homo sapien
gggtggccaggaacataaactatgt

SEQ ID NO: 3117313 - DNA, 25 bp, Homo sapien
tacacagatagtggcggcaatggcc

SEQ ID NO: 3117314 - DNA, 25 bp, Homo sapien
agatagtggcggcaatggcctcagc

SEQ ID NO: 3117315 - DNA, 25 bp, Homo sapien
tttattacacagatagtggcggcaa

SEQ ID NO: 3117316 - DNA, 25 bp, Homo sapien
tattacacagatagtggcggcaatg

SEQ ID NO: 3117317 - DNA, 25 bp, Homo sapien
ctcggctagccaaaacagctggcag

SEQ ID NO: 3117318 - DNA, 25 bp, Homo sapien
cttcctcggctagccaaaacagctg

SEQ ID NO: 3117319 - DNA, 25 bp, Homo sapien
gtacttccccgaccgctggtggcat

SEQ ID NO: 3117320 - DNA, 25 bp, Homo sapien
tggcatgctacgctcaaccttgaca

SEQ ID NO: 3117321 - DNA, 25 bp, Homo sapien
tccatgcaggcggaaaagggctccg

SEQ ID NO: 3117322 - DNA, 25 bp, Homo sapien
tcgtggcaggccgtagcatcttcaa

SEQ ID NO: 3117323 - DNA, 25 bp, Homo sapien
ccaatgccatcagtgtgtgccgcga

SEQ ID NO: 3117324 - DNA, 25 bp, Homo sapien
tcgtggaaaagctgaacctgcgtgt

SEQ ID NO: 3117325 - DNA, 25 bp, Homo sapien
gacagagaggtcgaaaaaggcaact

SEQ ID NO: 3117326 - DNA, 25 bp, Homo sapien
tcccctgctgggattgactgaccga

SEQ ID NO: 3117327 - DNA, 25 bp, Homo sapien
tacacagtaacaggcaaggacaagg

SEQ ID NO: 3117328 - DNA, 25 bp, Homo sapien
gaatgtccagctagagtcttccgtg

SEQ ID NO: 3117329 - DNA, 25 bp, Homo sapien
gatcaacagcccaaagattttcctg

SEQ ID NO: 3117330 - DNA, 25 bp, Homo sapien
ctggatgccgacatggtagaatgga

SEQ ID NO: 3117331 - DNA, 25 bp, Homo sapien
tgatatttccaacgactgtaggagg

SEQ ID NO: 3117332 - DNA, 25 bp, Homo sapien
ggcagctgtccatttgcccaaagta

SEQ ID NO: 3117333 - DNA, 25 bp, Homo sapien
tcgctgagcgtgagtgactgcatca

SEQ ID NO: 3117334 - DNA, 25 bp, Homo sapien
gagctgtcgggctgcaacgacttca

SEQ ID NO: 3117335 - DNA, 25 bp, Homo sapien
cgtggtcaacgtggtgcacagcctg

SEQ ID NO: 3117336 - DNA, 25 bp, Homo sapien
ggagatcaccaaccacggcgtggtc

SEQ ID NO: 3117337 - DNA, 25 bp, Homo sapien
tgcatgccaaggagctctacaacgt

SEQ ID NO: 3117338 - DNA, 25 bp, Homo sapien
gcgtctccgacctggacatctgtga

SEQ ID NO: 3117339 - DNA, 25 bp, Homo sapien
tctacaacgtgctgcctggtggcga

SEQ ID NO: 3117340 - DNA, 25 bp, Homo sapien
tatgcgctctccaagaagggtgtca

SEQ ID NO: 3117341 - DNA, 25 bp, Homo sapien
ctgtaaaatggccatcatggtacct

SEQ ID NO: 3117342 - DNA, 25 bp, Homo sapien
ctaagtgctaaaaagtgtcggcgtt

SEQ ID NO: 3117343 - DNA, 25 bp, Homo sapien
tggtgggtacctacagtggacggca

SEQ ID NO: 3117344 - DNA, 25 bp, Homo sapien
cagcagagaggtcaagagagcagtc

SEQ ID NO: 3117345 - DNA, 25 bp, Homo sapien
aaacgttgtgatgtcggcctccgga

SEQ ID NO: 3117346 - DNA, 25 bp, Homo sapien
gccgcgccttctgatcatgggcaca

SEQ ID NO: 3117347 - DNA, 25 bp, Homo sapien
ggcaaattcgctcctcagagcctcg

SEQ ID NO: 3117348 - DNA, 25 bp, Homo sapien
gccgtgaggtcgaatcatgtgccga

SEQ ID NO: 3117349 - DNA, 25 bp, Homo sapien
agctcctttccgtgcgctgccgagg

SEQ ID NO: 3117350 - DNA, 25 bp, Homo sapien
cggccaggacgggacgcggggcgca

SEQ ID NO: 3117351 - DNA, 25 bp, Homo sapien
gccaggacgggacgcggggcgcagg

SEQ ID NO: 3117352 - DNA, 25 bp, Homo sapien
gggccctgccggccagtccagcacc

SEQ ID NO: 3117353 - DNA, 25 bp, Homo sapien
aggtatagagcgaggctgtgggcca

SEQ ID NO: 3117354 - DNA, 25 bp, Homo sapien
gaacaggaccatgtctgcacggcaa

SEQ ID NO: 3117355 - DNA, 25 bp, Homo sapien
accatgtctgcacggcaaaatggcc

SEQ ID NO: 3117356 - DNA, 25 bp, Homo sapien
ggaagaacaggaccatgtctgcacg

SEQ ID NO: 3117357 - DNA, 25 bp, Homo sapien
tgagaaaagaaggtccttggtgctg

SEQ ID NO: 3117358 - DNA, 25 bp, Homo sapien
ggaagaagaccgcaccctggccctc

SEQ ID NO: 3117359 - DNA, 25 bp, Homo sapien
ctcagcaggcacagtcagccaatag

SEQ ID NO: 3117360 - DNA, 25 bp, Homo sapien
gggaggtgaggacacgggtctgtgg

SEQ ID NO: 3117361 - DNA, 25 bp, Homo sapien
ggatgctccaactgagggtgcttca

SEQ ID NO: 3117362 - DNA, 25 bp, Homo sapien
tatcagtctccaggaccaatggagg

SEQ ID NO: 3117363 - DNA, 25 bp, Homo sapien
gagatcgaagtctgctgagcagccc

SEQ ID NO: 3117364 - DNA, 25 bp, Homo sapien
gtgcgggcctgagcggtatccacat

SEQ ID NO: 3117365 - DNA, 25 bp, Homo sapien
cccggtgaagtatgctcctggtagg

SEQ ID NO: 3117366 - DNA, 25 bp, Homo sapien
cctcagtgctgaggcatcaaggcaa

SEQ ID NO: 3117367 - DNA, 25 bp, Homo sapien
aggtgctccagatgagggttttcca

SEQ ID NO: 3117368 - DNA, 25 bp, Homo sapien
ggtcccggtgaagtatgctcctggt

SEQ ID NO: 3117369 - DNA, 25 bp, Homo sapien
tctcagggcaagatgtaccagcagc

SEQ ID NO: 3117370 - DNA, 25 bp, Homo sapien
gctctccagtgtggggatatcacca

SEQ ID NO: 3117371 - DNA, 25 bp, Homo sapien
gctgaagtgaatgtgggtccccttg

SEQ ID NO: 3117372 - DNA, 25 bp, Homo sapien
caagatgtaccagcagcctctggtc

SEQ ID NO: 3117373 - DNA, 25 bp, Homo sapien
gccgaaaatgcagctgccgactgat

SEQ ID NO: 3117374 - DNA, 25 bp, Homo sapien
gctaaaaataactgccgggctccag

SEQ ID NO: 3117375 - DNA, 25 bp, Homo sapien
tcagggcacccctaatggctgtgag

SEQ ID NO: 3117376 - DNA, 25 bp, Homo sapien
cattgctaggagacaaccgttgccg

SEQ ID NO: 3117377 - DNA, 25 bp, Homo sapien
atagcagctgtcacggccagggcag

SEQ ID NO: 3117378 - DNA, 25 bp, Homo sapien
gcagagtctgggacaatcatctctc

SEQ ID NO: 3117379 - DNA, 25 bp, Homo sapien
gaggacaccagtgctgcatttgcca

SEQ ID NO: 3117380 - DNA, 25 bp, Homo sapien
agtgccgggcacagaatagcagctg

SEQ ID NO: 3117381 - DNA, 25 bp, Homo sapien
gagccgaggttttgatgtccactgg

SEQ ID NO: 3117382 - DNA, 25 bp, Homo sapien
actttccgccaatagcaggcgcggg

SEQ ID NO: 3117383 - DNA, 25 bp, Homo sapien
ggaggactatcccacggtccaagcg

SEQ ID NO: 3117384 - DNA, 25 bp, Homo sapien
cgctgtcccgatcggagtcctggag

SEQ ID NO: 3117385 - DNA, 25 bp, Homo sapien
gggagtcggggctctcaccaccgct

SEQ ID NO: 3117386 - DNA, 25 bp, Homo sapien
ggggagtcggggctctcaccaccgc

SEQ ID NO: 3117387 - DNA, 25 bp, Homo sapien
cggggagtcggggctctcaccaccg

SEQ ID NO: 3117388 - DNA, 25 bp, Homo sapien
gctcctcggagtagccggcgcgggc

SEQ ID NO: 3117389 - DNA, 25 bp, Homo sapien
cctcggagtagccggcgcgggcagc

SEQ ID NO: 3117390 - DNA, 25 bp, Homo sapien
tgcagcgctcctcggagtagccggc

SEQ ID NO: 3117391 - DNA, 25 bp, Homo sapien
ctcctcggagtagccggcgcgggca

SEQ ID NO: 3117392 - DNA, 25 bp, Homo sapien
cgtcctcgcgcagctcaaagcggaa

SEQ ID NO: 3117393 - DNA, 25 bp, Homo sapien
gtctacgccgagaccgtgggcctgc

SEQ ID NO: 3117394 - DNA, 25 bp, Homo sapien
tgccgggccgcgctctgggatcggg

SEQ ID NO: 3117395 - DNA, 25 bp, Homo sapien
gcggctgatgtcctggtgcggcgtg

SEQ ID NO: 3117396 - DNA, 25 bp, Homo sapien
actggacttttgttggttgggctgg

SEQ ID NO: 3117397 - DNA, 25 bp, Homo sapien
ctttccagagatgaatcgggaaggg

SEQ ID NO: 3117398 - DNA, 25 bp, Homo sapien
tttggccggaggcttcgattctgtc

SEQ ID NO: 3117399 - DNA, 25 bp, Homo sapien
atggtgaccgggctgcacactggac

SEQ ID NO: 3117400 - DNA, 25 bp, Homo sapien
catctgggacccctctagtttcccg

SEQ ID NO: 3117401 - DNA, 25 bp, Homo sapien
cacttgcaggcgcgtacctccaagg

SEQ ID NO: 3117402 - DNA, 25 bp, Homo sapien
gcaggcgcgtacctccaaggcagga

SEQ ID NO: 3117403 - DNA, 25 bp, Homo sapien
ttgcaggcgcgtacctccaaggcag

SEQ ID NO: 3117404 - DNA, 25 bp, Homo sapien
cttgcaggcgcgtacctccaaggca

SEQ ID NO: 3117405 - DNA, 25 bp, Homo sapien
gtcccttgtccgcacaagcggcagg

SEQ ID NO: 3117406 - DNA, 25 bp, Homo sapien
atgagcagagcccacgctcagggcc

SEQ ID NO: 3117407 - DNA, 25 bp, Homo sapien
ttgtccgcacaagcggcaggaggca

SEQ ID NO: 3117408 - DNA, 25 bp, Homo sapien
aggcaaatgagcagagcccacgctc

SEQ ID NO: 3117409 - DNA, 25 bp, Homo sapien
ccaggagcagctcagcgtcgctgca

SEQ ID NO: 3117410 - DNA, 25 bp, Homo sapien
caggagcagctcagcgtcgctgcag

SEQ ID NO: 3117411 - DNA, 25 bp, Homo sapien
gctcagcgtcgctgcagggcctgca

SEQ ID NO: 3117412 - DNA, 25 bp, Homo sapien
aggagcagctcagcgtcgctgcagg

SEQ ID NO: 3117413 - DNA, 25 bp, Homo sapien
atgtggctgcggtaggcattcaggg

SEQ ID NO: 3117414 - DNA, 25 bp, Homo sapien
caggctccccccatggcggggacac

SEQ ID NO: 3117415 - DNA, 25 bp, Homo sapien
tggctgcggtaggcattcaggggaa

SEQ ID NO: 3117416 - DNA, 25 bp, Homo sapien
ctgcggtaggcattcaggggaaggc

SEQ ID NO: 3117417 - DNA, 25 bp, Homo sapien
gcctcgtaggcacggcggaactcct

SEQ ID NO: 3117418 - DNA, 25 bp, Homo sapien
gggtacgaatggaggtcagcccctg

SEQ ID NO: 3117419 - DNA, 25 bp, Homo sapien
gtgaccccatggatgatcccgtgaa

SEQ ID NO: 3117420 - DNA, 25 bp, Homo sapien
gcggctccagcccatgaagaggaag

SEQ ID NO: 3117421 - DNA, 25 bp, Homo sapien
ccaagggttattggaggctgcccca

SEQ ID NO: 3117422 - DNA, 25 bp, Homo sapien
aaggaccgtgtttgtgggccctgca

SEQ ID NO: 3117423 - DNA, 25 bp, Homo sapien
cagatggatgtaaggctatgggccc

SEQ ID NO: 3117424 - DNA, 25 bp, Homo sapien
aaagggtaagtctcttgcacgtgca

SEQ ID NO: 3117425 - DNA, 25 bp, Homo sapien
agctgggattacagatgcatgccac

SEQ ID NO: 3117426 - DNA, 25 bp, Homo sapien
ctgggattacagatgcatgccacca

SEQ ID NO: 3117427 - DNA, 25 bp, Homo sapien
gggattacagatgcatgccaccatg

SEQ ID NO: 3117428 - DNA, 25 bp, Homo sapien
tgattcctctgcctcagccttttga

SEQ ID NO: 3117429 - DNA, 25 bp, Homo sapien
gctcccaagtgcagagtctcacagg

SEQ ID NO: 3117430 - DNA, 25 bp, Homo sapien
tagggctgaacacccgtgaatgtcg

SEQ ID NO: 3117431 - DNA, 25 bp, Homo sapien
ttccagacatgggtatgccgcagac

SEQ ID NO: 3117432 - DNA, 25 bp, Homo sapien
gttgtctatgcgtgccctggcctag

SEQ ID NO: 3117433 - DNA, 25 bp, Homo sapien
gcccgggaggacatccttccatttc

SEQ ID NO: 3117434 - DNA, 25 bp, Homo sapien
gctgcgcgtctttgtcgtggaatga

SEQ ID NO: 3117435 - DNA, 25 bp, Homo sapien
gtcggctccgttggtccgctctgcg

SEQ ID NO: 3117436 - DNA, 25 bp, Homo sapien
acacccggcgatctcacgggctaga

SEQ ID NO: 3117437 - DNA, 25 bp, Homo sapien
gcgtaggctgccaagcccgagccgg

SEQ ID NO: 3117438 - DNA, 25 bp, Homo sapien
gcagctccgtcagcgcctcgaccgg

SEQ ID NO: 3117439 - DNA, 25 bp, Homo sapien
cacgcgccggaagccgggctggagc

SEQ ID NO: 3117440 - DNA, 25 bp, Homo sapien
agcagcgcccacaccgcgtaggctg

SEQ ID NO: 3117441 - DNA, 25 bp, Homo sapien
ctggaccgggtggcggcgagagtcc

SEQ ID NO: 3117442 - DNA, 25 bp, Homo sapien
cagcccggcccgaactaccacacgg

SEQ ID NO: 3117443 - DNA, 25 bp, Homo sapien
tgagcggcagccgagctcccctgcc

SEQ ID NO: 3117444 - DNA, 25 bp, Homo sapien
cagaccttgagaccctgagcggcag

SEQ ID NO: 3117445 - DNA, 25 bp, Homo sapien
agagcccagatccaccgtttttccg

SEQ ID NO: 3117446 - DNA, 25 bp, Homo sapien
tttttccggggcgtcctcgcagcag

SEQ ID NO: 3117447 - DNA, 25 bp, Homo sapien
gacaacacgtgctccacctgccgcg

SEQ ID NO: 3117448 - DNA, 25 bp, Homo sapien
tcctgccgtcgccagagcccagatc

SEQ ID NO: 3117449 - DNA, 25 bp, Homo sapien
ccgagagtgtgggaaccaggatgtg

SEQ ID NO: 3117450 - DNA, 25 bp, Homo sapien
cgaagacccagacgcaggcacttac

SEQ ID NO: 3117451 - DNA, 25 bp, Homo sapien
gcggcgaagacccagacgcaggcac

SEQ ID NO: 3117452 - DNA, 25 bp, Homo sapien
gtgggcaccgagagtgtgggaacca

SEQ ID NO: 3117453 - DNA, 25 bp, Homo sapien
gatccttgcggcgatagcagacgct

SEQ ID NO: 3117454 - DNA, 25 bp, Homo sapien
cttccagagatccttgcggcgatag

SEQ ID NO: 3117455 - DNA, 25 bp, Homo sapien
gttcagctcgtagcccacggccggg

SEQ ID NO: 3117456 - DNA, 25 bp, Homo sapien
cgatagcagacgctgccggcacagc

SEQ ID NO: 3117457 - DNA, 25 bp, Homo sapien
tcgcaggtgtcagccgcaccttggg

SEQ ID NO: 3117458 - DNA, 25 bp, Homo sapien
gtgggcaccgggtcatcgcagcttc

SEQ ID NO: 3117459 - DNA, 25 bp, Homo sapien
accttgggctgtcagcgggtggcca

SEQ ID NO: 3117460 - DNA, 25 bp, Homo sapien
tgccggaagagaagtcgccccggcc

SEQ ID NO: 3117461 - DNA, 25 bp, Homo sapien
ggaacacagacacgttgcggcagtc

SEQ ID NO: 3117462 - DNA, 25 bp, Homo sapien
gaacacagacacgttgcggcagtcc

SEQ ID NO: 3117463 - DNA, 25 bp, Homo sapien
aacacagacacgttgcggcagtccc

SEQ ID NO: 3117464 - DNA, 25 bp, Homo sapien
acacagacacgttgcggcagtccct

SEQ ID NO: 3117465 - DNA, 25 bp, Homo sapien
gggccggtagaaaacagccgcgctc

SEQ ID NO: 3117466 - DNA, 25 bp, Homo sapien
gcgctcacccccctagccccaagcc

SEQ ID NO: 3117467 - DNA, 25 bp, Homo sapien
ctcacccccctagccccaagcctag

SEQ ID NO: 3117468 - DNA, 25 bp, Homo sapien
gccggtagaaaacagccgcgctcac

SEQ ID NO: 3117469 - DNA, 25 bp, Homo sapien
tgggaagcgcccagacaccacgcgg

SEQ ID NO: 3117470 - DNA, 25 bp, Homo sapien
aggccctcgccaaccgcggtcacag

SEQ ID NO: 3117471 - DNA, 25 bp, Homo sapien
catactcggtccaggccctcgccaa

SEQ ID NO: 3117472 - DNA, 25 bp, Homo sapien
ggagtgggaagcgcccagacaccac

SEQ ID NO: 3117473 - DNA, 25 bp, Homo sapien
cgggatgggggcagaactaggtccg

SEQ ID NO: 3117474 - DNA, 25 bp, Homo sapien
ggcagaactaggtccgggggcagcc

SEQ ID NO: 3117475 - DNA, 25 bp, Homo sapien
tgggtatccgcgaggaggcggcctc

SEQ ID NO: 3117476 - DNA, 25 bp, Homo sapien
cagcctggatgggtatccgcgagga

SEQ ID NO: 3117477 - DNA, 25 bp, Homo sapien
gaacccacagagtctttatcgtgtc

SEQ ID NO: 3117478 - DNA, 25 bp, Homo sapien
agaacccacagagtctttatcgtgt

SEQ ID NO: 3117479 - DNA, 25 bp, Homo sapien
cccacagagtctttatcgtgtctaa

SEQ ID NO: 3117480 - DNA, 25 bp, Homo sapien
acagagtctttatcgtgtctaatac

SEQ ID NO: 3117481 - DNA, 25 bp, Homo sapien
ctgtgctgaggacccgaaggacaga

SEQ ID NO: 3117482 - DNA, 25 bp, Homo sapien
gatcctgcgcgcgatgagaccacaa

SEQ ID NO: 3117483 - DNA, 25 bp, Homo sapien
acccgaaggacagactgacggaggc

SEQ ID NO: 3117484 - DNA, 25 bp, Homo sapien
tgcgcgcgatgagaccacaaggccc

SEQ ID NO: 3117485 - DNA, 25 bp, Homo sapien
tgcgaagcgggctcggtcaacacgc

SEQ ID NO: 3117486 - DNA, 25 bp, Homo sapien
ggaactccccggcactcgcgtggaa

SEQ ID NO: 3117487 - DNA, 25 bp, Homo sapien
cggtcaacacgctgggggccaaaag

SEQ ID NO: 3117488 - DNA, 25 bp, Homo sapien
gaattccacgcaccgggctccagca

SEQ ID NO: 3117489 - DNA, 25 bp, Homo sapien
tgccccttcagggcggggcccgctc

SEQ ID NO: 3117490 - DNA, 25 bp, Homo sapien
cggggcccgctctccacaccctagg

SEQ ID NO: 3117491 - DNA, 25 bp, Homo sapien
ccagcccacggtgccccttcagggc

SEQ ID NO: 3117492 - DNA, 25 bp, Homo sapien
gcggggcccgctctccacaccctag

SEQ ID NO: 3117493 - DNA, 25 bp, Homo sapien
ggtcacggagctcggccaccggtgc

SEQ ID NO: 3117494 - DNA, 25 bp, Homo sapien
tcacggagctcggccaccggtgcct

SEQ ID NO: 3117495 - DNA, 25 bp, Homo sapien
gtcacggagctcggccaccggtgcc

SEQ ID NO: 3117496 - DNA, 25 bp, Homo sapien
gcctcgcgcgtgagctcctcgatga

SEQ ID NO: 3117497 - DNA, 25 bp, Homo sapien
tagttgtcctcgagcacggggatga

SEQ ID NO: 3117498 - DNA, 25 bp, Homo sapien
gttgtcctcgagcacggggatgacc

SEQ ID NO: 3117499 - DNA, 25 bp, Homo sapien
accgcctcgcgcgtgagctcctcga

SEQ ID NO: 3117500 - DNA, 25 bp, Homo sapien
gccagaggtgccgtaacttcaggga

SEQ ID NO: 3117501 - DNA, 25 bp, Homo sapien
gataaacaaggaaccccagccgcca

SEQ ID NO: 3117502 - DNA, 25 bp, Homo sapien
ccagccgccaatgacttccggagag

SEQ ID NO: 3117503 - DNA, 25 bp, Homo sapien
gagtgacggtaacacagacggtccc

SEQ ID NO: 3117504 - DNA, 25 bp, Homo sapien
cccctcccggcccacgatctccagc

SEQ ID NO: 3117505 - DNA, 25 bp, Homo sapien
cagcggtcagagacaccccctcccg

SEQ ID NO: 3117506 - DNA, 25 bp, Homo sapien
gggtggtcagcacagcggtcagaga

SEQ ID NO: 3117507 - DNA, 25 bp, Homo sapien
gcggtcagagacaccccctcccggc

SEQ ID NO: 3117508 - DNA, 25 bp, Homo sapien
cgcgtcagcgagaagatgcgctcgt

SEQ ID NO: 3117509 - DNA, 25 bp, Homo sapien
acgaagccgcgccagctccgggttt

SEQ ID NO: 3117510 - DNA, 25 bp, Homo sapien
ctgcgcgtcagcgagaagatgcgct

SEQ ID NO: 3117511 - DNA, 25 bp, Homo sapien
agcccgggacgaagccgcgccagct

SEQ ID NO: 3117512 - DNA, 25 bp, Homo sapien
ccgcagctcctcgccgtgcgccagc

SEQ ID NO: 3117513 - DNA, 25 bp, Homo sapien
caggcggacctgtgagggcgggtgg

SEQ ID NO: 3117514 - DNA, 25 bp, Homo sapien
aggcggacctgtgagggcgggtgga

SEQ ID NO: 3117515 - DNA, 25 bp, Homo sapien
acaggaagtagctcatgtggccggc

SEQ ID NO: 3117516 - DNA, 25 bp, Homo sapien
ccacaggaagtagctcatgtggccg

SEQ ID NO: 3117517 - DNA, 25 bp, Homo sapien
ggcaacgcacgtggatggccccgaa

SEQ ID NO: 3117518 - DNA, 25 bp, Homo sapien
cgggcgtcaggaggcaacgcacgtg

SEQ ID NO: 3117519 - DNA, 25 bp, Homo sapien
cagggcgggtgggtccgggcaatcg

SEQ ID NO: 3117520 - DNA, 25 bp, Homo sapien
ggaggcggggtgggcgcgctccgcg

SEQ ID NO: 3117521 - DNA, 25 bp, Homo sapien
gggaggcggggtgggcgcgctccgc

SEQ ID NO: 3117522 - DNA, 25 bp, Homo sapien
aggcggggtgggcgcgctccgcgct

SEQ ID NO: 3117523 - DNA, 25 bp, Homo sapien
tctcggggggcagggtacccagctc

SEQ ID NO: 3117524 - DNA, 25 bp, Homo sapien
tctggtacatctgctgggcgctgcc

SEQ ID NO: 3117525 - DNA, 25 bp, Homo sapien
cagccggccaccgacagcgcgtcgc

SEQ ID NO: 3117526 - DNA, 25 bp, Homo sapien
gggcagggtacccagctcggccagg

SEQ ID NO: 3117527 - DNA, 25 bp, Homo sapien
gggctgtgcccacgggagaagaggg

SEQ ID NO: 3117528 - DNA, 25 bp, Homo sapien
gcacagtgagggtgcggagcgtggg

SEQ ID NO: 3117529 - DNA, 25 bp, Homo sapien
gggggctgtgcccacgggagaagag

SEQ ID NO: 3117530 - DNA, 25 bp, Homo sapien
ctagcacagtgagggtgcggagcgt

SEQ ID NO: 3117531 - DNA, 25 bp, Homo sapien
ggaggaagagcgctcggtgagcgcg

SEQ ID NO: 3117532 - DNA, 25 bp, Homo sapien
agagcgctcggtgagcgcgcacgcg

SEQ ID NO: 3117533 - DNA, 25 bp, Homo sapien
gaagcggggaaagtgcttgcgccgg

SEQ ID NO: 3117534 - DNA, 25 bp, Homo sapien
ggtgagcgcgcacgcggccaggaag

SEQ ID NO: 3117535 - DNA, 25 bp, Homo sapien
ctaagcgtgtgctcgtggccgcaga

SEQ ID NO: 3117536 - DNA, 25 bp, Homo sapien
gtggtcgttgcagggctccactttc

SEQ ID NO: 3117537 - DNA, 25 bp, Homo sapien
tgccgcggcgggaaaggggccgtgc

SEQ ID NO: 3117538 - DNA, 25 bp, Homo sapien
cccggtcaccattaggccttgtctg

SEQ ID NO: 3117539 - DNA, 25 bp, Homo sapien
aggccccggtcaccattaggccttg

SEQ ID NO: 3117540 - DNA, 25 bp, Homo sapien
tcaccattaggccttgtctgagagc

SEQ ID NO: 3117541 - DNA, 25 bp, Homo sapien
ccattaggccttgtctgagagcccc

SEQ ID NO: 3117542 - DNA, 25 bp, Homo sapien
ctcgcccagagtcgacggcacagtg

SEQ ID NO: 3117543 - DNA, 25 bp, Homo sapien
ggcacagtgggcacgtcatcctcat

SEQ ID NO: 3117544 - DNA, 25 bp, Homo sapien
agtcgacggcacagtgggcacgtca

SEQ ID NO: 3117545 - DNA, 25 bp, Homo sapien
aaggggttgtagaggcgctcctcgc

SEQ ID NO: 3117546 - DNA, 25 bp, Homo sapien
gcagtccccagatgccttcctaagg

SEQ ID NO: 3117547 - DNA, 25 bp, Homo sapien
gtggaggccccgggacaacagccat

SEQ ID NO: 3117548 - DNA, 25 bp, Homo sapien
ccagatgccttcctaagggtccacg

SEQ ID NO: 3117549 - DNA, 25 bp, Homo sapien
gatgccttcctaagggtccacgtaa

SEQ ID NO: 3117550 - DNA, 25 bp, Homo sapien
ccacgcgggagcatggcgccgaggg

SEQ ID NO: 3117551 - DNA, 25 bp, Homo sapien
gcaggcacttaatgagcagcctccc

SEQ ID NO: 3117552 - DNA, 25 bp, Homo sapien
cgggcaggcaggcacttaatgagca

SEQ ID NO: 3117553 - DNA, 25 bp, Homo sapien
ggcaggcaggcacttaatgagcagc

SEQ ID NO: 3117554 - DNA, 25 bp, Homo sapien
ggctcgcccgcctgttcgaagcgcg

SEQ ID NO: 3117555 - DNA, 25 bp, Homo sapien
cttgcatagcgcctccaggacgtcg

SEQ ID NO: 3117556 - DNA, 25 bp, Homo sapien
actgcagcgcaaggagggcccgcgc

SEQ ID NO: 3117557 - DNA, 25 bp, Homo sapien
ttgcccgtgaacttgcgcaccggct

SEQ ID NO: 3117558 - DNA, 25 bp, Homo sapien
cgtgtggggctgcactcaggagccc

SEQ ID NO: 3117559 - DNA, 25 bp, Homo sapien
tcagtcgtgtggggctgcactcagg

SEQ ID NO: 3117560 - DNA, 25 bp, Homo sapien
tcgtgtggggctgcactcaggagcc

SEQ ID NO: 3117561 - DNA, 25 bp, Homo sapien
agtcgtgtggggctgcactcaggag

SEQ ID NO: 3117562 - DNA, 25 bp, Homo sapien
ttattcatagttcggaggccccgtg

SEQ ID NO: 3117563 - DNA, 25 bp, Homo sapien
tggccgaggtcacgaggagggacgc

SEQ ID NO: 3117564 - DNA, 25 bp, Homo sapien
tcctgtgtgtccacccgggaagcac

SEQ ID NO: 3117565 - DNA, 25 bp, Homo sapien
gaaggttccagaggtggccctcatg

SEQ ID NO: 3117566 - DNA, 25 bp, Homo sapien
tcctggcacatctgccaacactgac

SEQ ID NO: 3117567 - DNA, 25 bp, Homo sapien
tggcacatctgccaacactgacaac

SEQ ID NO: 3117568 - DNA, 25 bp, Homo sapien
cctctcctggcacatctgccaacac

SEQ ID NO: 3117569 - DNA, 25 bp, Homo sapien
tctcctggcacatctgccaacactg

SEQ ID NO: 3117570 - DNA, 25 bp, Homo sapien
tccagcacgtggagagactgtacgg

SEQ ID NO: 3117571 - DNA, 25 bp, Homo sapien
ttcaggagctgtacacacactggct

SEQ ID NO: 3117572 - DNA, 25 bp, Homo sapien
cctgaggcagagcaagacgggttct

SEQ ID NO: 3117573 - DNA, 25 bp, Homo sapien
gggcaagccaagtacgaagcagcag

SEQ ID NO: 3117574 - DNA, 25 bp, Homo sapien
agccaggtggcgctcagtaatacct

SEQ ID NO: 3117575 - DNA, 25 bp, Homo sapien
cagccaggtggcgctcagtaatacc

SEQ ID NO: 3117576 - DNA, 25 bp, Homo sapien
gccaggtggcgctcagtaatacctc

SEQ ID NO: 3117577 - DNA, 25 bp, Homo sapien
ccaggtggcgctcagtaatacctcc

SEQ ID NO: 3117578 - DNA, 25 bp, Homo sapien
tgactgcacgcggattttcacccgg

SEQ ID NO: 3117579 - DNA, 25 bp, Homo sapien
tctgctatgccgagaagactcacgg

SEQ ID NO: 3117580 - DNA, 25 bp, Homo sapien
ttacgcgagggaggaatgacaagtc

SEQ ID NO: 3117581 - DNA, 25 bp, Homo sapien
catgatctcctgtatgagcgggccc

SEQ ID NO: 3117582 - DNA, 25 bp, Homo sapien
gaggcgtgggtcacacaggcctcct

SEQ ID NO: 3117583 - DNA, 25 bp, Homo sapien
acctgttgacaagacgtggctgccc

SEQ ID NO: 3117584 - DNA, 25 bp, Homo sapien
taattgcagcatgtcacggcctcca

SEQ ID NO: 3117585 - DNA, 25 bp, Homo sapien
gttgattatgctgctaacgacccca

SEQ ID NO: 3117586 - DNA, 25 bp, Homo sapien
ggttccggaagctgagattccaatt

SEQ ID NO: 3117587 - DNA, 25 bp, Homo sapien
caggcactatggagtggtcccggct

SEQ ID NO: 3117588 - DNA, 25 bp, Homo sapien
tgatggtggagtgggcggttccgga

SEQ ID NO: 3117589 - DNA, 25 bp, Homo sapien
gggaaccaggtcttcaacacaggag

SEQ ID NO: 3117590 - DNA, 25 bp, Homo sapien
acccccgtgtgctgccggtgagcag

SEQ ID NO: 3117591 - DNA, 25 bp, Homo sapien
cttggtggttctgcgggacaggaac

SEQ ID NO: 3117592 - DNA, 25 bp, Homo sapien
tgtgctgccggtgagcacgttagag

SEQ ID NO: 3117593 - DNA, 25 bp, Homo sapien
tgtgctgccggtgagcaggttagag

SEQ ID NO: 3117594 - DNA, 25 bp, Homo sapien
ctcggtttcctcaattgggaagtgg

SEQ ID NO: 3117595 - DNA, 25 bp, Homo sapien
ccagggtaactctgatgtgcagggt

SEQ ID NO: 3117596 - DNA, 25 bp, Homo sapien
ctggcagcgcccatgaggaacagga

SEQ ID NO: 3117597 - DNA, 25 bp, Homo sapien
tctgaggccttctgcgcagttgggt

SEQ ID NO: 3117598 - DNA, 25 bp, Homo sapien
cacacgtgggcctctaaagggcgat

SEQ ID NO: 3117599 - DNA, 25 bp, Homo sapien
ctgtccgcgcgtcacagcagacggg

SEQ ID NO: 3117600 - DNA, 25 bp, Homo sapien
cgcgtcacagcagacgggagtggcc

SEQ ID NO: 3117601 - DNA, 25 bp, Homo sapien
cgtcacagcagacgggagtggccgg

SEQ ID NO: 3117602 - DNA, 25 bp, Homo sapien
tccgcgcgtcacagcagacgggagt

SEQ ID NO: 3117603 - DNA, 25 bp, Homo sapien
gcaccgtgggtccaccggtagctct

SEQ ID NO: 3117604 - DNA, 25 bp, Homo sapien
ctgtggagggcagtgactcaggatg

SEQ ID NO: 3117605 - DNA, 25 bp, Homo sapien
cccaccccacgcctctgtcctgggc

SEQ ID NO: 3117606 - DNA, 25 bp, Homo sapien
ggcagtgactcaggatgggaccccc

SEQ ID NO: 3117607 - DNA, 25 bp, Homo sapien
gagggcagtgactcaggatgggacc

SEQ ID NO: 3117608 - DNA, 25 bp, Homo sapien
cccaacaggggtcgagccgttggca

SEQ ID NO: 3117609 - DNA, 25 bp, Homo sapien
gtctctccagccagggtcctcgagg

SEQ ID NO: 3117610 - DNA, 25 bp, Homo sapien
tgccctgtctctccagccagggtcc

SEQ ID NO: 3117611 - DNA, 25 bp, Homo sapien
ctgccctgtctctccagccagggtc

SEQ ID NO: 3117612 - DNA, 25 bp, Homo sapien
cctgtctctccagccagggtcctcg

SEQ ID NO: 3117613 - DNA, 25 bp, Homo sapien
gccaggactccgtccaggggcgcag

SEQ ID NO: 3117614 - DNA, 25 bp, Homo sapien
ccaggactccgtccaggggcgcagc

SEQ ID NO: 3117615 - DNA, 25 bp, Homo sapien
taggtgggttggccaggactccgtc

SEQ ID NO: 3117616 - DNA, 25 bp, Homo sapien
aatgttaggtgggttggccaggact

SEQ ID NO: 3117617 - DNA, 25 bp, Homo sapien
aagccaaggagttggcgaggggaga

SEQ ID NO: 3117618 - DNA, 25 bp, Homo sapien
ggaagccaaggagttggcgagggga

SEQ ID NO: 3117619 - DNA, 25 bp, Homo sapien
gccaaggagttggcgaggggagagg

SEQ ID NO: 3117620 - DNA, 25 bp, Homo sapien
ctccgcacacgggaagccaaggagt

SEQ ID NO: 3117621 - DNA, 25 bp, Homo sapien
ggacacgctccgtgctcaggccgga

SEQ ID NO: 3117622 - DNA, 25 bp, Homo sapien
tgctctgttgagagcttgacattct

SEQ ID NO: 3117623 - DNA, 25 bp, Homo sapien
gccagctcccggacacgctccgtgc

SEQ ID NO: 3117624 - DNA, 25 bp, Homo sapien
ctgttgagagcttgacattcttctg

SEQ ID NO: 3117625 - DNA, 25 bp, Homo sapien
ggtccaatgggagggcgtccaggtc

SEQ ID NO: 3117626 - DNA, 25 bp, Homo sapien
tcagagagccggtgagccagacagc

SEQ ID NO: 3117627 - DNA, 25 bp, Homo sapien
aggaatagcagcaggtccaatggga

SEQ ID NO: 3117628 - DNA, 25 bp, Homo sapien
gctcagagagccggtgagccagaca

SEQ ID NO: 3117629 - DNA, 25 bp, Homo sapien
ctggggccccgagaacgcatctggg

SEQ ID NO: 3117630 - DNA, 25 bp, Homo sapien
gcaggtccacattggccttcgtgat

SEQ ID NO: 3117631 - DNA, 25 bp, Homo sapien
gtccacattggccttcgtgatgcgg

SEQ ID NO: 3117632 - DNA, 25 bp, Homo sapien
cattggccttcgtgatgcgggagaa

SEQ ID NO: 3117633 - DNA, 25 bp, Homo sapien
ggagcaggtccacattggccttcgt

SEQ ID NO: 3117634 - DNA, 25 bp, Homo sapien
ctcagcgcttttggaactgccgagc

SEQ ID NO: 3117635 - DNA, 25 bp, Homo sapien
gcctcagcgcttttggaactgccga

SEQ ID NO: 3117636 - DNA, 25 bp, Homo sapien
ggctggcctcagcgcttttggaact

SEQ ID NO: 3117637 - DNA, 25 bp, Homo sapien
ctggcctcagcgcttttggaactgc

SEQ ID NO: 3117638 - DNA, 25 bp, Homo sapien
gggtagcagcacttcggccgactcg

SEQ ID NO: 3117639 - DNA, 25 bp, Homo sapien
gcgcccaggcaggtcgcaagccagg

SEQ ID NO: 3117640 - DNA, 25 bp, Homo sapien
gccgactcggccacaaagcgcccag

SEQ ID NO: 3117641 - DNA, 25 bp, Homo sapien
cgcacatcagcctcgctcagcagag

SEQ ID NO: 3117642 - DNA, 25 bp, Homo sapien
ctcctgctggtcctggtccaggggt

SEQ ID NO: 3117643 - DNA, 25 bp, Homo sapien
ggggtcccccgccctgcagagccgc

SEQ ID NO: 3117644 - DNA, 25 bp, Homo sapien
cccgccctgcagagccgccctggct

SEQ ID NO: 3117645 - DNA, 25 bp, Homo sapien
cctgctggtcctggtccaggggtcc

SEQ ID NO: 3117646 - DNA, 25 bp, Homo sapien
agaggccaggccgtaccccctggct

SEQ ID NO: 3117647 - DNA, 25 bp, Homo sapien
caggccgtaccccctggctgtggag

SEQ ID NO: 3117648 - DNA, 25 bp, Homo sapien
ccaggccgtaccccctggctgtgga

SEQ ID NO: 3117649 - DNA, 25 bp, Homo sapien
gaggccaggccgtaccccctggctg

SEQ ID NO: 3117650 - DNA, 25 bp, Homo sapien
tcgtggagacagaccatgtcgacgg

SEQ ID NO: 3117651 - DNA, 25 bp, Homo sapien
cgcagagcgtccatcgtggagacag

SEQ ID NO: 3117652 - DNA, 25 bp, Homo sapien
catcgtggagacagaccatgtcgac

SEQ ID NO: 3117653 - DNA, 25 bp, Homo sapien
aggccccgcagagcgtccatcgtgg

SEQ ID NO: 3117654 - DNA, 25 bp, Homo sapien
cgagaggagcgttgccgccacgcgg

SEQ ID NO: 3117655 - DNA, 25 bp, Homo sapien
ccgcggccggaggatggtccgttca

SEQ ID NO: 3117656 - DNA, 25 bp, Homo sapien
aggatggtccgttcaggctgccgcc

SEQ ID NO: 3117657 - DNA, 25 bp, Homo sapien
tcaggctgccgccaggatgggtccc

SEQ ID NO: 3117658 - DNA, 25 bp, Homo sapien
tggcgttcacgcggtccatctgggt

SEQ ID NO: 3117659 - DNA, 25 bp, Homo sapien
ccagtttatgctttaggacgtccag

SEQ ID NO: 3117660 - DNA, 25 bp, Homo sapien
tgaggctctcgtctatctcgcgggc

SEQ ID NO: 3117661 - DNA, 25 bp, Homo sapien
tcccacttcttgtagaagatgaggc

SEQ ID NO: 3117662 - DNA, 25 bp, Homo sapien
cagggctcatcttgaggaagaggta

SEQ ID NO: 3117663 - DNA, 25 bp, Homo sapien
gggtctccagggacgtcacattcca

SEQ ID NO: 3117664 - DNA, 25 bp, Homo sapien
attccacttgcgaatgtcctcaggg

SEQ ID NO: 3117665 - DNA, 25 bp, Homo sapien
ggtgctggatcacagactcggggta

SEQ ID NO: 3117666 - DNA, 25 bp, Homo sapien
gactcatttcgtgccctttgttgac

SEQ ID NO: 3117667 - DNA, 25 bp, Homo sapien
ggactcatttcgtgccctttgttga

SEQ ID NO: 3117668 - DNA, 25 bp, Homo sapien
gaggactcatttcgtgccctttgtt

SEQ ID NO: 3117669 - DNA, 25 bp, Homo sapien
ctgaggactcatttcgtgccctttg

SEQ ID NO: 3117670 - DNA, 25 bp, Homo sapien
cacaggtacccagggtagaaggcgg

SEQ ID NO: 3117671 - DNA, 25 bp, Homo sapien
cacaaagcggtcgatcagggtggcc

SEQ ID NO: 3117672 - DNA, 25 bp, Homo sapien
tcagggtgtctagggtgtctttgtc

SEQ ID NO: 3117673 - DNA, 25 bp, Homo sapien
cttcccttcacaaagcggtcgatca

SEQ ID NO: 3117674 - DNA, 25 bp, Homo sapien
ctgccttgggtcacacgtgtccagg

SEQ ID NO: 3117675 - DNA, 25 bp, Homo sapien
gccttgggatagaggacgtccagct

SEQ ID NO: 3117676 - DNA, 25 bp, Homo sapien
atagaggacgtccagctgccttggg

SEQ ID NO: 3117677 - DNA, 25 bp, Homo sapien
caaggcgggccttgggatagaggac

SEQ ID NO: 3117678 - DNA, 25 bp, Homo sapien
gactggatcttcacgaagtattcgg

SEQ ID NO: 3117679 - DNA, 25 bp, Homo sapien
cgaagtattcggacccgttcatgtt

SEQ ID NO: 3117680 - DNA, 25 bp, Homo sapien
caggaaggactggatcttcacgaag

SEQ ID NO: 3117681 - DNA, 25 bp, Homo sapien
gatcttcacgaagtattcggacccg

SEQ ID NO: 3117682 - DNA, 25 bp, Homo sapien
atgctcacattctgctgactgagcg

SEQ ID NO: 3117683 - DNA, 25 bp, Homo sapien
tccgtccgcagcttcatgaacgtgg

SEQ ID NO: 3117684 - DNA, 25 bp, Homo sapien
tgagcgccttcaaatcctccgtggg

SEQ ID NO: 3117685 - DNA, 25 bp, Homo sapien
gcatccgtccgcagcttcatgaacg

SEQ ID NO: 3117686 - DNA, 25 bp, Homo sapien
tagccgttggggatgccgccctgta

SEQ ID NO: 3117687 - DNA, 25 bp, Homo sapien
gcatgctgaggtctaggaccaggta

SEQ ID NO: 3117688 - DNA, 25 bp, Homo sapien
gtaggatccagtcccgcaccgggcg

SEQ ID NO: 3117689 - DNA, 25 bp, Homo sapien
gtcgtcctgccgctgccgtaggatc

SEQ ID NO: 3117690 - DNA, 25 bp, Homo sapien
gggtgactcagagcgcccacctcca

SEQ ID NO: 3117691 - DNA, 25 bp, Homo sapien
agaggggtgactcagagcgcccacc

SEQ ID NO: 3117692 - DNA, 25 bp, Homo sapien
gagagaggggtgactcagagcgccc

SEQ ID NO: 3117693 - DNA, 25 bp, Homo sapien
aggggtgactcagagcgcccacctc

SEQ ID NO: 3117694 - DNA, 25 bp, Homo sapien
aggcagggcgtccccgagagggcct

SEQ ID NO: 3117695 - DNA, 25 bp, Homo sapien
aggagcagtgccaggacggtgagaa

SEQ ID NO: 3117696 - DNA, 25 bp, Homo sapien
agtgccaggacggtgagaacaggtc

SEQ ID NO: 3117697 - DNA, 25 bp, Homo sapien
gagcagtgccaggacggtgagaaca

SEQ ID NO: 3117698 - DNA, 25 bp, Homo sapien
tgccaggacggtgagaacaggtcca

SEQ ID NO: 3117699 - DNA, 25 bp, Homo sapien
ctgcagggggcatgttcccgtttac

SEQ ID NO: 3117700 - DNA, 25 bp, Homo sapien
tcccgtttactgagcgcgagttctc

SEQ ID NO: 3117701 - DNA, 25 bp, Homo sapien
gggcatgttcccgtttactgagcgc

SEQ ID NO: 3117702 - DNA, 25 bp, Homo sapien
tttactgagcgcgagttctcttggg

SEQ ID NO: 3117703 - DNA, 25 bp, Homo sapien
taaagtccacggtcgtggtcctgcc

SEQ ID NO: 3117704 - DNA, 25 bp, Homo sapien
tggacatgaataaagtccacggtcg

SEQ ID NO: 3117705 - DNA, 25 bp, Homo sapien
tcactgctggacatgaataaagtcc

SEQ ID NO: 3117706 - DNA, 25 bp, Homo sapien
catgaataaagtccacggtcgtggt

SEQ ID NO: 3117707 - DNA, 25 bp, Homo sapien
atgacaggtgagagcaccgcaccca

SEQ ID NO: 3117708 - DNA, 25 bp, Homo sapien
ctgggatgacaggtgagagcaccgc

SEQ ID NO: 3117709 - DNA, 25 bp, Homo sapien
acctctctcttgtctcctggattca

SEQ ID NO: 3117710 - DNA, 25 bp, Homo sapien
tgcaacctctctcttgtctcctgga

SEQ ID NO: 3117711 - DNA, 25 bp, Homo sapien
gctgcagtctcttgggcccctgctg

SEQ ID NO: 3117712 - DNA, 25 bp, Homo sapien
tctgccacgtcaccgcctgcctggc

SEQ ID NO: 3117713 - DNA, 25 bp, Homo sapien
acagccatgcattgtcactctgcct

SEQ ID NO: 3117714 - DNA, 25 bp, Homo sapien
catgcattgtcactctgcctccggg

SEQ ID NO: 3117715 - DNA, 25 bp, Homo sapien
gtcgggcagaggcattcacgtgcat

SEQ ID NO: 3117716 - DNA, 25 bp, Homo sapien
caccgtcgggcagaggcattcacgt

SEQ ID NO: 3117717 - DNA, 25 bp, Homo sapien
ccgtcgggcagaggcattcacgtgc

SEQ ID NO: 3117718 - DNA, 25 bp, Homo sapien
cccaccgtcgggcagaggcattcac

SEQ ID NO: 3117719 - DNA, 25 bp, Homo sapien
caggttggtcttggcgtgggcgtgg

SEQ ID NO: 3117720 - DNA, 25 bp, Homo sapien
tgcacggcccggcagcaggttggtc

SEQ ID NO: 3117721 - DNA, 25 bp, Homo sapien
cgcagcggtgcagggcggaagcgct

SEQ ID NO: 3117722 - DNA, 25 bp, Homo sapien
tccagggtctctgggtcgccagcgc

SEQ ID NO: 3117723 - DNA, 25 bp, Homo sapien
tccagctcggccgcgaactggttgt

SEQ ID NO: 3117724 - DNA, 25 bp, Homo sapien
cgcgaactggttgtggaaatcatcc

SEQ ID NO: 3117725 - DNA, 25 bp, Homo sapien
ctcggccgcgaactggttgtggaaa

SEQ ID NO: 3117726 - DNA, 25 bp, Homo sapien
tgtggaaatcatcctcgacgccgca

SEQ ID NO: 3117727 - DNA, 25 bp, Homo sapien
cgggactggaggccgcgtcccctct

SEQ ID NO: 3117728 - DNA, 25 bp, Homo sapien
ggcaagggcctcctcgaacgtccgc

SEQ ID NO: 3117729 - DNA, 25 bp, Homo sapien
gctgcccacagatgcggctggggcg

SEQ ID NO: 3117730 - DNA, 25 bp, Homo sapien
tggaggccgcgtcccctctggcaag

SEQ ID NO: 3117731 - DNA, 25 bp, Homo sapien
acccggccggctgcaggtcggcgtc

SEQ ID NO: 3117732 - DNA, 25 bp, Homo sapien
cgtggggcagggacccggccggctg

SEQ ID NO: 3117733 - DNA, 25 bp, Homo sapien
cggccggctgcaggtcggcgtccac

SEQ ID NO: 3117734 - DNA, 25 bp, Homo sapien
gacccggccggctgcaggtcggcgt

SEQ ID NO: 3117735 - DNA, 25 bp, Homo sapien
gcctcgcgcccactccggaggccct

SEQ ID NO: 3117736 - DNA, 25 bp, Homo sapien
cagcctcgcgcccactccggaggcc

SEQ ID NO: 3117737 - DNA, 25 bp, Homo sapien
ctcgcgcccactccggaggccctgg

SEQ ID NO: 3117738 - DNA, 25 bp, Homo sapien
ctcagcctcgcgcccactccggagg

SEQ ID NO: 3117739 - DNA, 25 bp, Homo sapien
catctcctccgatctgaagttcagc

SEQ ID NO: 3117740 - DNA, 25 bp, Homo sapien
caaagctctgcgaggtcctcagggc

SEQ ID NO: 3117741 - DNA, 25 bp, Homo sapien
ggtgatgtccgtcggcgaggagtcg

SEQ ID NO: 3117742 - DNA, 25 bp, Homo sapien
gcagcctaggccgtttgatcctggg

SEQ ID NO: 3117743 - DNA, 25 bp, Homo sapien
atatgggtgtccgagactgctctca

SEQ ID NO: 3117744 - DNA, 25 bp, Homo sapien
tcagtggcagaaactcaagcgtggg

SEQ ID NO: 3117745 - DNA, 25 bp, Homo sapien
gggtcacccttggatatgggtgtcc

SEQ ID NO: 3117746 - DNA, 25 bp, Homo sapien
ggctcagtggcagaaactcaagcgt

SEQ ID NO: 3117747 - DNA, 25 bp, Homo sapien
ctcaggacgggattgcgggcagctg

SEQ ID NO: 3117748 - DNA, 25 bp, Homo sapien
ccgtgtgagacccacgtcggcagca

SEQ ID NO: 3117749 - DNA, 25 bp, Homo sapien
aggcccgtgtgagacccacgtcggc

SEQ ID NO: 3117750 - DNA, 25 bp, Homo sapien
gtgagacccacgtcggcagcagctt

SEQ ID NO: 3117751 - DNA, 25 bp, Homo sapien
tcacgtggacgtagtcctccaagat

SEQ ID NO: 3117752 - DNA, 25 bp, Homo sapien
gggtcagcacgcagcaccagataag

SEQ ID NO: 3117753 - DNA, 25 bp, Homo sapien
agataagcccggacgccctccgtgg

SEQ ID NO: 3117754 - DNA, 25 bp, Homo sapien
gacgccctccgtggatgtcacgtgg

SEQ ID NO: 3117755 - DNA, 25 bp, Homo sapien
taggtcacaggattcacgtcagccc

SEQ ID NO: 3117756 - DNA, 25 bp, Homo sapien
ccatcagtgctcagggacccgggtg

SEQ ID NO: 3117757 - DNA, 25 bp, Homo sapien
cgggtgggacaaccccagtaagctg

SEQ ID NO: 3117758 - DNA, 25 bp, Homo sapien
gggaggacaattgcctctgggcccc

SEQ ID NO: 3117759 - DNA, 25 bp, Homo sapien
tggccaccgcctcgccatgggacgt

SEQ ID NO: 3117760 - DNA, 25 bp, Homo sapien
gaggctaaggacacacccagcaggt

SEQ ID NO: 3117761 - DNA, 25 bp, Homo sapien
ccaccgcctcgccatgggacgtgga

SEQ ID NO: 3117762 - DNA, 25 bp, Homo sapien
ggctaaggacacacccagcaggtcc

SEQ ID NO: 3117763 - DNA, 25 bp, Homo sapien
tgtgcagggtgtctgaaagcttctg

SEQ ID NO: 3117764 - DNA, 25 bp, Homo sapien
gtgcagggtgtctgaaagcttctgg

SEQ ID NO: 3117765 - DNA, 25 bp, Homo sapien
cactgagcagctccgtgtagtggcg

SEQ ID NO: 3117766 - DNA, 25 bp, Homo sapien
gtgactggaggcgtcttgaccgtca

SEQ ID NO: 3117767 - DNA, 25 bp, Homo sapien
gcgtcttgaccgtcagtcggctcct

SEQ ID NO: 3117768 - DNA, 25 bp, Homo sapien
catcactgagcagctccgtgtagtg

SEQ ID NO: 3117769 - DNA, 25 bp, Homo sapien
acagagacttggatcaggtgacacc

SEQ ID NO: 3117770 - DNA, 25 bp, Homo sapien
gcccagtggattggctgtgcaaaaa

SEQ ID NO: 3117771 - DNA, 25 bp, Homo sapien
tacaactcaaaagggcaaaccagag

SEQ ID NO: 3117772 - DNA, 25 bp, Homo sapien
tgtgcaaaaatcactgggcccaggt

SEQ ID NO: 3117773 - DNA, 25 bp, Homo sapien
tgacccgggccggctcaacactggg

SEQ ID NO: 3117774 - DNA, 25 bp, Homo sapien
tcagccacttgagcaggcagcggtt

SEQ ID NO: 3117775 - DNA, 25 bp, Homo sapien
tgcttcggtcgctggctcgggtcca

SEQ ID NO: 3117776 - DNA, 25 bp, Homo sapien
agcacctgttcgtggctcttccact

SEQ ID NO: 3117777 - DNA, 25 bp, Homo sapien
tacacaaagcaaagttcgtgcagac

SEQ ID NO: 3117778 - DNA, 25 bp, Homo sapien
cagttctaactcacgctaatggcgc

SEQ ID NO: 3117779 - DNA, 25 bp, Homo sapien
aagtcaacaggctgcaagggtgccg

SEQ ID NO: 3117780 - DNA, 25 bp, Homo sapien
gagttgttactgcaacgctccagtt

SEQ ID NO: 3117781 - DNA, 25 bp, Homo sapien
agagtaccccgcgtgacgcgcaatc

SEQ ID NO: 3117782 - DNA, 25 bp, Homo sapien
tctccaccacagagtaccccgcgtg

SEQ ID NO: 3117783 - DNA, 25 bp, Homo sapien
gcgtgacgcgcaatcacgtgtgcca

SEQ ID NO: 3117784 - DNA, 25 bp, Homo sapien
atcacgtgtgccagggtggtcttcc

SEQ ID NO: 3117785 - DNA, 25 bp, Homo sapien
gaccgtcacatgacgcggctgctgc

SEQ ID NO: 3117786 - DNA, 25 bp, Homo sapien
ccgcatttgcgtggagaccgtcaca

SEQ ID NO: 3117787 - DNA, 25 bp, Homo sapien
aacacgtcaggacagaaggcgagcc

SEQ ID NO: 3117788 - DNA, 25 bp, Homo sapien
cgggaacatccacacccggtttcag

SEQ ID NO: 3117789 - DNA, 25 bp, Homo sapien
tgcggaagacctccgggctacggtc

SEQ ID NO: 3117790 - DNA, 25 bp, Homo sapien
acgggggccccgtcgatctcatcga

SEQ ID NO: 3117791 - DNA, 25 bp, Homo sapien
ggcagttgggcttcccgccagcacc

SEQ ID NO: 3117792 - DNA, 25 bp, Homo sapien
actccatctgggtggccgcctcgat

SEQ ID NO: 3117793 - DNA, 25 bp, Homo sapien
ggatgctcaggaggacgttgatggc

SEQ ID NO: 3117794 - DNA, 25 bp, Homo sapien
gccccttgcggttcaggatgctcag

SEQ ID NO: 3117795 - DNA, 25 bp, Homo sapien
tgctcaggaggacgttgatggcggc

SEQ ID NO: 3117796 - DNA, 25 bp, Homo sapien
cctgtggccccttgcggttcaggat

SEQ ID NO: 3117797 - DNA, 25 bp, Homo sapien
aatgcagataatgggcctcatgagg

SEQ ID NO: 3117798 - DNA, 25 bp, Homo sapien
caaatgcagataatgggcctcatga

SEQ ID NO: 3117799 - DNA, 25 bp, Homo sapien
aaatgcagataatgggcctcatgag

SEQ ID NO: 3117800 - DNA, 25 bp, Homo sapien
caccagcctcgagggcagagtcggc

SEQ ID NO: 3117801 - DNA, 25 bp, Homo sapien
gcaccagcctcgagggcagagtcgg

SEQ ID NO: 3117802 - DNA, 25 bp, Homo sapien
gaaacaggggccagaacgaggccac

SEQ ID NO: 3117803 - DNA, 25 bp, Homo sapien
cccgccatcagccacacggctcctg

SEQ ID NO: 3117804 - DNA, 25 bp, Homo sapien
gatggtatgccccatcctttcaggg

SEQ ID NO: 3117805 - DNA, 25 bp, Homo sapien
ctggagggcccgatggtatgcccca

SEQ ID NO: 3117806 - DNA, 25 bp, Homo sapien
ggtgttgatgcaggcccggatgtca

SEQ ID NO: 3117807 - DNA, 25 bp, Homo sapien
ggcccggatgtcattgtcagttttc

SEQ ID NO: 3117808 - DNA, 25 bp, Homo sapien
tgcagggtgttgatgcaggcccgga

SEQ ID NO: 3117809 - DNA, 25 bp, Homo sapien
agcacccctgggtcggccctcatgc

SEQ ID NO: 3117810 - DNA, 25 bp, Homo sapien
tcagctcccgctggccccggctgta

SEQ ID NO: 3117811 - DNA, 25 bp, Homo sapien
tctgcgctggtccttgaggcccacg

SEQ ID NO: 3117812 - DNA, 25 bp, Homo sapien
tgaggcccacgcgtgtggcctgcac

SEQ ID NO: 3117813 - DNA, 25 bp, Homo sapien
agacctcctgccacaccgagaagag

SEQ ID NO: 3117814 - DNA, 25 bp, Homo sapien
ggtcccatggcacgtcaggacagag

SEQ ID NO: 3117815 - DNA, 25 bp, Homo sapien
atatcctgcagcacgaccaggccag

SEQ ID NO: 3117816 - DNA, 25 bp, Homo sapien
ccagcgtctcccatatcctgcagca

SEQ ID NO: 3117817 - DNA, 25 bp, Homo sapien
gggtcccatggcacgtcaggacaga

SEQ ID NO: 3117818 - DNA, 25 bp, Homo sapien
aggcagggcggggtcctggcccaca

SEQ ID NO: 3117819 - DNA, 25 bp, Homo sapien
acccagcaggagtgtgtcagcaggc

SEQ ID NO: 3117820 - DNA, 25 bp, Homo sapien
gtccccgtcacccagcaggagtgtg

SEQ ID NO: 3117821 - DNA, 25 bp, Homo sapien
gcggaggtgagggagcccgcgtccc

SEQ ID NO: 3117822 - DNA, 25 bp, Homo sapien
ttctcgtgctcgcccgcagaggcag

SEQ ID NO: 3117823 - DNA, 25 bp, Homo sapien
gaggcagcggcatgcaggacacggt

SEQ ID NO: 3117824 - DNA, 25 bp, Homo sapien
cggcatgcaggacacggtagaatcg

SEQ ID NO: 3117825 - DNA, 25 bp, Homo sapien
ggaccaccttctcgtgctcgcccgc

SEQ ID NO: 3117826 - DNA, 25 bp, Homo sapien
aggaaccaaagggatccagcctcac

SEQ ID NO: 3117827 - DNA, 25 bp, Homo sapien
ggaagttccgcccaccagagtccag

SEQ ID NO: 3117828 - DNA, 25 bp, Homo sapien
tgcctgaggaagttccgcccaccag

SEQ ID NO: 3117829 - DNA, 25 bp, Homo sapien
tcagcccctccttagactgcctgag

SEQ ID NO: 3117830 - DNA, 25 bp, Homo sapien
gcaggcggccggcaacccctgagct

SEQ ID NO: 3117831 - DNA, 25 bp, Homo sapien
ctgcaggcggccggcaacccctgag

SEQ ID NO: 3117832 - DNA, 25 bp, Homo sapien
tgcaggcggccggcaacccctgagc

SEQ ID NO: 3117833 - DNA, 25 bp, Homo sapien
caggcggccggcaacccctgagctc

SEQ ID NO: 3117834 - DNA, 25 bp, Homo sapien
aggccagccagtcgagggccacaca

SEQ ID NO: 3117835 - DNA, 25 bp, Homo sapien
caggctggagtctcgcagccgcaga

SEQ ID NO: 3117836 - DNA, 25 bp, Homo sapien
cgccagcaggtcatcgaaggccagc

SEQ ID NO: 3117837 - DNA, 25 bp, Homo sapien
gccgcagacgcaggaagttgtcaaa

SEQ ID NO: 3117838 - DNA, 25 bp, Homo sapien
tcatctggctcatccggttctgggc

SEQ ID NO: 3117839 - DNA, 25 bp, Homo sapien
accagcgtctggatcaggttcctca

SEQ ID NO: 3117840 - DNA, 25 bp, Homo sapien
ggcgcgatgccggacaccagcgtct

SEQ ID NO: 3117841 - DNA, 25 bp, Homo sapien
ttgggtgcaagaatgtccaggagca

SEQ ID NO: 3117842 - DNA, 25 bp, Homo sapien
agcgagcatcgtgcccaccaggctg

SEQ ID NO: 3117843 - DNA, 25 bp, Homo sapien
taggtcaggctgtaagcgagcatcg

SEQ ID NO: 3117844 - DNA, 25 bp, Homo sapien
ggcgtgcgctcctggcggtaggtca

SEQ ID NO: 3117845 - DNA, 25 bp, Homo sapien
cttttcacgggtgctgtacagctgt

SEQ ID NO: 3117846 - DNA, 25 bp, Homo sapien
aggctcagggccagagagccgccgg

SEQ ID NO: 3117847 - DNA, 25 bp, Homo sapien
gggacaccagggcaggtcagcgggg

SEQ ID NO: 3117848 - DNA, 25 bp, Homo sapien
ctgctcagcacagggggacaccagg

SEQ ID NO: 3117849 - DNA, 25 bp, Homo sapien
agagccgccgggcactccaaccgca

SEQ ID NO: 3117850 - DNA, 25 bp, Homo sapien
tgttctctacccgggcagaagcctc

SEQ ID NO: 3117851 - DNA, 25 bp, Homo sapien
gaagcggcagagttcctccacgttc

SEQ ID NO: 3117852 - DNA, 25 bp, Homo sapien
tccacctcgatctcgcgggcgatga

SEQ ID NO: 3117853 - DNA, 25 bp, Homo sapien
tacccgggcagaagcctccgcccgc

SEQ ID NO: 3117854 - DNA, 25 bp, Homo sapien
gggccgctcgcctcatgatgtgctc

SEQ ID NO: 3117855 - DNA, 25 bp, Homo sapien
tcccgggccgctcgcctcatgatgt

SEQ ID NO: 3117856 - DNA, 25 bp, Homo sapien
cctcccgggccgctcgcctcatgat

SEQ ID NO: 3117857 - DNA, 25 bp, Homo sapien
tttctccccaatgccccccagcaga

SEQ ID NO: 3117858 - DNA, 25 bp, Homo sapien
cgggactgctgtgctcctgacgacc

SEQ ID NO: 3117859 - DNA, 25 bp, Homo sapien
actgctgtgctcctgacgaccacac

SEQ ID NO: 3117860 - DNA, 25 bp, Homo sapien
gggactgctgtgctcctgacgacca

SEQ ID NO: 3117861 - DNA, 25 bp, Homo sapien
ctgcactcgggactgctgtgctcct

SEQ ID NO: 3117862 - DNA, 25 bp, Homo sapien
acggcgttggagacaccctcgttga

SEQ ID NO: 3117863 - DNA, 25 bp, Homo sapien
tcgttgaagcggaaccagacctcgc

SEQ ID NO: 3117864 - DNA, 25 bp, Homo sapien
tgatgtacaggctgcgccgcacggc

SEQ ID NO: 3117865 - DNA, 25 bp, Homo sapien
tagagcaagtccctgatgtacaggc

SEQ ID NO: 3117866 - DNA, 25 bp, Homo sapien
aatgcgagggcatgtccgcggctca

SEQ ID NO: 3117867 - DNA, 25 bp, Homo sapien
cactcgcacgtgattacagtctgta

SEQ ID NO: 3117868 - DNA, 25 bp, Homo sapien
ggtgtgactttataaagacatctcc

SEQ ID NO: 3117869 - DNA, 25 bp, Homo sapien
tgcactctgcgggaagcaatgcgag

SEQ ID NO: 3117870 - DNA, 25 bp, Homo sapien
gtggatcgaggacgggatccccaag

SEQ ID NO: 3117871 - DNA, 25 bp, Homo sapien
cctgaaccccgacctgatgaagaac

SEQ ID NO: 3117872 - DNA, 25 bp, Homo sapien
gaaccccgacctgatgaagaacaac

SEQ ID NO: 3117873 - DNA, 25 bp, Homo sapien
gatcgaggacgggatccccaaggac

SEQ ID NO: 3117874 - DNA, 25 bp, Homo sapien
tcgcggtcgcctggccgttgtcatt

SEQ ID NO: 3117875 - DNA, 25 bp, Homo sapien
actcgcggtcgcctggccgttgtca

SEQ ID NO: 3117876 - DNA, 25 bp, Homo sapien
ctcgcggtcgcctggccgttgtcat

SEQ ID NO: 3117877 - DNA, 25 bp, Homo sapien
gctcagaaatgcaggcgggtgtctt

SEQ ID NO: 3117878 - DNA, 25 bp, Homo sapien
tctggtctccacgtagcaggatgca

SEQ ID NO: 3117879 - DNA, 25 bp, Homo sapien
cacactgcatttgcgagcggctgcg

SEQ ID NO: 3117880 - DNA, 25 bp, Homo sapien
cccaggcttatttcccgagacggag

SEQ ID NO: 3117881 - DNA, 25 bp, Homo sapien
aagacggccgctggcgggacggcca

SEQ ID NO: 3117882 - DNA, 25 bp, Homo sapien
tgtttggccatatcgggaggcggca

SEQ ID NO: 3117883 - DNA, 25 bp, Homo sapien
ctgtaagagggatccgctggcgggt

SEQ ID NO: 3117884 - DNA, 25 bp, Homo sapien
ctaaatgcagggacagaagacggcc

SEQ ID NO: 3117885 - DNA, 25 bp, Homo sapien
caatatattggtcggcctctggaga

SEQ ID NO: 3117886 - DNA, 25 bp, Homo sapien
tggagaatgcctactgatgcgacac

SEQ ID NO: 3117887 - DNA, 25 bp, Homo sapien
tgagtcacacctttagctcccctgg

SEQ ID NO: 3117888 - DNA, 25 bp, Homo sapien
cgtttcctgacttggaccgagccag

SEQ ID NO: 3117889 - DNA, 25 bp, Homo sapien
ggagcccacgaggatctttaaacta

SEQ ID NO: 3117890 - DNA, 25 bp, Homo sapien
gcagcttcgaagtgagcgatccgtg

SEQ ID NO: 3117891 - DNA, 25 bp, Homo sapien
gaatctagcatcacgaatggagccc

SEQ ID NO: 3117892 - DNA, 25 bp, Homo sapien
aaagagggcaaatcagacactgtcc

SEQ ID NO: 3117893 - DNA, 25 bp, Homo sapien
gggttcaggcctgggcgctccctgg

SEQ ID NO: 3117894 - DNA, 25 bp, Homo sapien
ggggttcaggcctgggcgctccctg

SEQ ID NO: 3117895 - DNA, 25 bp, Homo sapien
ctgcagggtcagcggcgcaggaggg

SEQ ID NO: 3117896 - DNA, 25 bp, Homo sapien
ggtcagcggcgcaggaggggttcag

SEQ ID NO: 3117897 - DNA, 25 bp, Homo sapien
gacctgtggctccacccggtggtga

SEQ ID NO: 3117898 - DNA, 25 bp, Homo sapien
ggcgtcagcacggagcaaaacattc

SEQ ID NO: 3117899 - DNA, 25 bp, Homo sapien
caaaacattcgcacatgatggccga

SEQ ID NO: 3117900 - DNA, 25 bp, Homo sapien
agatcacagacgtctccagatgccg

SEQ ID NO: 3117901 - DNA, 25 bp, Homo sapien
gcccctcggtgaaggccgaggactc

SEQ ID NO: 3117902 - DNA, 25 bp, Homo sapien
cgatcctggttcacgccagtgtggg

SEQ ID NO: 3117903 - DNA, 25 bp, Homo sapien
aggccgaggactccggtaaactgcg

SEQ ID NO: 3117904 - DNA, 25 bp, Homo sapien
gcagccagacgggaactgtcccagg

SEQ ID NO: 3117905 - DNA, 25 bp, Homo sapien
ccctctgctggcttgaatatgcaca

SEQ ID NO: 3117906 - DNA, 25 bp, Homo sapien
gttttaggttccaccctctgctggc

SEQ ID NO: 3117907 - DNA, 25 bp, Homo sapien
tagttttaggttccaccctctgctg

SEQ ID NO: 3117908 - DNA, 25 bp, Homo sapien
cttgaatatgcacagatgtggatgc

SEQ ID NO: 3117909 - DNA, 25 bp, Homo sapien
cgcagtctgtgatggggcccgttct

SEQ ID NO: 3117910 - DNA, 25 bp, Homo sapien
agttccttctaagcgcagtctgtga

SEQ ID NO: 3117911 - DNA, 25 bp, Homo sapien
actgagttccttctaagcgcagtct

SEQ ID NO: 3117912 - DNA, 25 bp, Homo sapien
ccttctaagcgcagtctgtgatggg

SEQ ID NO: 3117913 - DNA, 25 bp, Homo sapien
gcaggttcctgtaattgcagacgac

SEQ ID NO: 3117914 - DNA, 25 bp, Homo sapien
tgcgtgcttgcgtctgttcattgtt

SEQ ID NO: 3117915 - DNA, 25 bp, Homo sapien
accgtcagggcgtgcggctctgcgt

SEQ ID NO: 3117916 - DNA, 25 bp, Homo sapien
attgcagacgaccaggccaccttgg

SEQ ID NO: 3117917 - DNA, 25 bp, Homo sapien
acctagagacggatggtcgcacgca

SEQ ID NO: 3117918 - DNA, 25 bp, Homo sapien
tgattgtcggcatctcacaggtgtg

SEQ ID NO: 3117919 - DNA, 25 bp, Homo sapien
tcagccttcccagtatgcacggagg

SEQ ID NO: 3117920 - DNA, 25 bp, Homo sapien
catagagaaggttcacggtgctcac

SEQ ID NO: 3117921 - DNA, 25 bp, Homo sapien
gaccccacaccgtgctgggtgccag

SEQ ID NO: 3117922 - DNA, 25 bp, Homo sapien
ttccctgaccccacaccgtgctggg

SEQ ID NO: 3117923 - DNA, 25 bp, Homo sapien
tgttcccctaatgcccagcgggcag

SEQ ID NO: 3117924 - DNA, 25 bp, Homo sapien
agtaggtgtatcttggaatatgttt

SEQ ID NO: 3117925 - DNA, 25 bp, Homo sapien
actgccgaactggtatgtgtggtcc

SEQ ID NO: 3117926 - DNA, 25 bp, Homo sapien
tggcagcagtcatgtcttcagtgaa

SEQ ID NO: 3117927 - DNA, 25 bp, Homo sapien
gcgacagatgtttgcaaagacacct

SEQ ID NO: 3117928 - DNA, 25 bp, Homo sapien
caccccgttccgtgattgagtggga

SEQ ID NO: 3117929 - DNA, 25 bp, Homo sapien
acacggttgcggttctgagactgcg

SEQ ID NO: 3117930 - DNA, 25 bp, Homo sapien
gaacggcactatcggccactttgac

SEQ ID NO: 3117931 - DNA, 25 bp, Homo sapien
gatcagctgcagtaggtttaacacg

SEQ ID NO: 3117932 - DNA, 25 bp, Homo sapien
gctgtttcctgtggtcgtcgtccca

SEQ ID NO: 3117933 - DNA, 25 bp, Homo sapien
aggtgtgaggttccgccgcctctgg

SEQ ID NO: 3117934 - DNA, 25 bp, Homo sapien
agctgtctctgctgacggtggcctg

SEQ ID NO: 3117935 - DNA, 25 bp, Homo sapien
atgctcttggtgaggacgtcgctct

SEQ ID NO: 3117936 - DNA, 25 bp, Homo sapien
cgcacatcacgttcacatgagctgt

SEQ ID NO: 3117937 - DNA, 25 bp, Homo sapien
gacttgctggctcttctcggactgg

SEQ ID NO: 3117938 - DNA, 25 bp, Homo sapien
tgggcatctcgtctttcgtactgat

SEQ ID NO: 3117939 - DNA, 25 bp, Homo sapien
acatgtccctggttaatgtgggcca

SEQ ID NO: 3117940 - DNA, 25 bp, Homo sapien
gggctgcgccaacatgcttctcatg

SEQ ID NO: 3117941 - DNA, 25 bp, Homo sapien
tgtggatgtgagagagccgtcgtgg

SEQ ID NO: 3117942 - DNA, 25 bp, Homo sapien
gccgtcgtggggtgggcgccgtgag

SEQ ID NO: 3117943 - DNA, 25 bp, Homo sapien
ccgtcgtggggtgggcgccgtgaga

SEQ ID NO: 3117944 - DNA, 25 bp, Homo sapien
ctgtggatgtgagagagccgtcgtg

SEQ ID NO: 3117945 - DNA, 25 bp, Homo sapien
tactgacgtccagaggatgtgagag

SEQ ID NO: 3117946 - DNA, 25 bp, Homo sapien
tgtcagcatctctgggtaagcattc

SEQ ID NO: 3117947 - DNA, 25 bp, Homo sapien
gagctgttgtgggtgggcgccgtgg

SEQ ID NO: 3117948 - DNA, 25 bp, Homo sapien
taagcattcagtgttctacaaatac

SEQ ID NO: 3117949 - DNA, 25 bp, Homo sapien
accgcttggctgtgatcccgagtga

SEQ ID NO: 3117950 - DNA, 25 bp, Homo sapien
tagcttcgtagcgtgggctgaaacc

SEQ ID NO: 3117951 - DNA, 25 bp, Homo sapien
tacttgttctctccgtggctgccga

SEQ ID NO: 3117952 - DNA, 25 bp, Homo sapien
tatgttgaaaatccgacctctaggg

SEQ ID NO: 3117953 - DNA, 25 bp, Homo sapien
caggcagccacggagtatatatatc

SEQ ID NO: 3117954 - DNA, 25 bp, Homo sapien
tatatctgaacgtcggaaaggacct

SEQ ID NO: 3117955 - DNA, 25 bp, Homo sapien
tgtgcgcaataaggaaaccgaaccc

SEQ ID NO: 3117956 - DNA, 25 bp, Homo sapien
tccctgcggaagattgaggccctca

SEQ ID NO: 3117957 - DNA, 25 bp, Homo sapien
atctggacgagtaaaagcttatgtg

SEQ ID NO: 3117958 - DNA, 25 bp, Homo sapien
agcttatgtgacaggagtttccggc

SEQ ID NO: 3117959 - DNA, 25 bp, Homo sapien
gacctgggtgccatgttcttggtgt

SEQ ID NO: 3117960 - DNA, 25 bp, Homo sapien
tgacaggagtttccggcctaagcag

SEQ ID NO: 3117961 - DNA, 25 bp, Homo sapien
gacattgaactgagggaggcttacc

SEQ ID NO: 3117962 - DNA, 25 bp, Homo sapien
tctggattttactgggactgtgcgc

SEQ ID NO: 3117963 - DNA, 25 bp, Homo sapien
ttcctgacgtgtggactcgggtccc

SEQ ID NO: 3117964 - DNA, 25 bp, Homo sapien
tgtgcagcgattgtccgtaggccct

SEQ ID NO: 3117965 - DNA, 25 bp, Homo sapien
caggtaattaaacaagcaataaaga

SEQ ID NO: 3117966 - DNA, 25 bp, Homo sapien
taaacaggtaattaaacaagcaata

SEQ ID NO: 3117967 - DNA, 25 bp, Homo sapien
acaggtaattaaacaagcaataaag

SEQ ID NO: 3117968 - DNA, 25 bp, Homo sapien
tccacggaggacgagcatttccagc

SEQ ID NO: 3117969 - DNA, 25 bp, Homo sapien
gaggacgagcatttccagcccagcc

SEQ ID NO: 3117970 - DNA, 25 bp, Homo sapien
ccgacctccacggaggacgagcatt

SEQ ID NO: 3117971 - DNA, 25 bp, Homo sapien
acggaggacgagcatttccagccca

SEQ ID NO: 3117972 - DNA, 25 bp, Homo sapien
aagtccagatgcaaagtcgggggtc

SEQ ID NO: 3117973 - DNA, 25 bp, Homo sapien
agccactgagccacgcggtctcccc

SEQ ID NO: 3117974 - DNA, 25 bp, Homo sapien
cggcccggtcggcagaaggagctgg

SEQ ID NO: 3117975 - DNA, 25 bp, Homo sapien
gagctggtccgttactagaaaagtc

SEQ ID NO: 3117976 - DNA, 25 bp, Homo sapien
cgggacccgaggtcgccgcgcggtg

SEQ ID NO: 3117977 - DNA, 25 bp, Homo sapien
gggcgcgcacaggagacgcgcaccg

SEQ ID NO: 3117978 - DNA, 25 bp, Homo sapien
ctgccctgcggtcgctccgggaccc

SEQ ID NO: 3117979 - DNA, 25 bp, Homo sapien
gcgcgcacaggagacgcgcaccggg

SEQ ID NO: 3117980 - DNA, 25 bp, Homo sapien
ctgggagcgggcctcgctcatgtcc

SEQ ID NO: 3117981 - DNA, 25 bp, Homo sapien
ggagctggcggtgccggacgggctg

SEQ ID NO: 3117982 - DNA, 25 bp, Homo sapien
agggcggctgggagcgggcctcgct

SEQ ID NO: 3117983 - DNA, 25 bp, Homo sapien
agcgggcctcgctcatgtccagcat

SEQ ID NO: 3117984 - DNA, 25 bp, Homo sapien
ctcggagccggcgggagacggcggc

SEQ ID NO: 3117985 - DNA, 25 bp, Homo sapien
agtcgtagcccttgagcacctgcga

SEQ ID NO: 3117986 - DNA, 25 bp, Homo sapien
acggcgtcgcggatgcaggccggga

SEQ ID NO: 3117987 - DNA, 25 bp, Homo sapien
ttgagcacctgcgacacggcgtcgc

SEQ ID NO: 3117988 - DNA, 25 bp, Homo sapien
accagactccagtcgtagcccttga

SEQ ID NO: 3117989 - DNA, 25 bp, Homo sapien
ggccgcttcacatgcggcttggctt

SEQ ID NO: 3117990 - DNA, 25 bp, Homo sapien
atgggccgcttcacatgcggcttgg

SEQ ID NO: 3117991 - DNA, 25 bp, Homo sapien
cttcacatgcggcttggctttgagc

SEQ ID NO: 3117992 - DNA, 25 bp, Homo sapien
catgcggcttggctttgagcgcgcc

SEQ ID NO: 3117993 - DNA, 25 bp, Homo sapien
tggtcggccagcttgcggcgcgccg

SEQ ID NO: 3117994 - DNA, 25 bp, Homo sapien
tgcaggtgcgggtactggtcggcca

SEQ ID NO: 3117995 - DNA, 25 bp, Homo sapien
cgtcttgctgagctcggcgttgtgc

SEQ ID NO: 3117996 - DNA, 25 bp, Homo sapien
gtactggtcggccagcttgcggcgc

SEQ ID NO: 3117997 - DNA, 25 bp, Homo sapien
tgttccccgccaggagaactggctc

SEQ ID NO: 3117998 - DNA, 25 bp, Homo sapien
ctggccagaggatgtttttccactg

SEQ ID NO: 3117999 - DNA, 25 bp, Homo sapien
tgagccctttctaaggagggagcac

SEQ ID NO: 3118000 - DNA, 25 bp, Homo sapien
catgcaacttgctgtcgtgccgggc

SEQ ID NO: 3118001 - DNA, 25 bp, Homo sapien
gagaaccatttgaaacccaaccaga

SEQ ID NO: 3118002 - DNA, 25 bp, Homo sapien
ggtgcaaatacgcaagctccaagct

SEQ ID NO: 3118003 - DNA, 25 bp, Homo sapien
gaaggttggtatgcttacgacagcc

SEQ ID NO: 3118004 - DNA, 25 bp, Homo sapien
gctgcgccctagatccagacagaag

SEQ ID NO: 3118005 - DNA, 25 bp, Homo sapien
cgctgtggccggctttggcgctctt

SEQ ID NO: 3118006 - DNA, 25 bp, Homo sapien
tgcttcagccttgtacacggcaccg

SEQ ID NO: 3118007 - DNA, 25 bp, Homo sapien
tcttcctgcgccgtggctggtactt

SEQ ID NO: 3118008 - DNA, 25 bp, Homo sapien
ttgtgctgcacgcgaaggcgctctg

SEQ ID NO: 3118009 - DNA, 25 bp, Homo sapien
atacagggaccctcagatatgcggg

SEQ ID NO: 3118010 - DNA, 25 bp, Homo sapien
tccaccatcatgcacccttctcagc

SEQ ID NO: 3118011 - DNA, 25 bp, Homo sapien
agctgcctcccatacagggaccctc

SEQ ID NO: 3118012 - DNA, 25 bp, Homo sapien
gaaggcccggttctctcgagggcgc

SEQ ID NO: 3118013 - DNA, 25 bp, Homo sapien
gtcgaaggcgtccatggtgcccatg

SEQ ID NO: 3118014 - DNA, 25 bp, Homo sapien
ttgctgaagtcgatgttctggcgcc

SEQ ID NO: 3118015 - DNA, 25 bp, Homo sapien
tcgctgctgagctccgagatgtcca

SEQ ID NO: 3118016 - DNA, 25 bp, Homo sapien
tactggtcgaactcgtggacgtcga

SEQ ID NO: 3118017 - DNA, 25 bp, Homo sapien
acccgtctcggtgggcgacgcggag

SEQ ID NO: 3118018 - DNA, 25 bp, Homo sapien
acggggcactcttgtgggcccacac

SEQ ID NO: 3118019 - DNA, 25 bp, Homo sapien
caggaaccgtagtcgggcgagcctc

SEQ ID NO: 3118020 - DNA, 25 bp, Homo sapien
ctcggggctggtcgccgtagtggcc

SEQ ID NO: 3118021 - DNA, 25 bp, Homo sapien
ctggtcagggtggtgtacaccggct

SEQ ID NO: 3118022 - DNA, 25 bp, Homo sapien
acaccggctggtcccagtgactggt

SEQ ID NO: 3118023 - DNA, 25 bp, Homo sapien
cagggtaggcaccatagtagctgga

SEQ ID NO: 3118024 - DNA, 25 bp, Homo sapien
gaggcctgcaggtcgccatagtcgc

SEQ ID NO: 3118025 - DNA, 25 bp, Homo sapien
cacaagtttccgtgaagtaggcgct

SEQ ID NO: 3118026 - DNA, 25 bp, Homo sapien
tatgctctatgctcagcacacaggg

SEQ ID NO: 3118027 - DNA, 25 bp, Homo sapien
tgccaagggagacgctgcatgaaac

SEQ ID NO: 3118028 - DNA, 25 bp, Homo sapien
tgcatgaaacgggtctgcgacggct

SEQ ID NO: 3118029 - DNA, 25 bp, Homo sapien
agctcggttcccagaggccgcgacg

SEQ ID NO: 3118030 - DNA, 25 bp, Homo sapien
gacgggattcgcgaagggcatggct

SEQ ID NO: 3118031 - DNA, 25 bp, Homo sapien
gactgaagcctgctgacgcctggtg

SEQ ID NO: 3118032 - DNA, 25 bp, Homo sapien
gcatggctgtttccattctgactga

SEQ ID NO: 3118033 - DNA, 25 bp, Homo sapien
gcggctgtctttcgaatttgggttc

SEQ ID NO: 3118034 - DNA, 25 bp, Homo sapien
gttaaaattgtagatgcggctgtct

SEQ ID NO: 3118035 - DNA, 25 bp, Homo sapien
ccaggccaccgtgttaaaattgtag

SEQ ID NO: 3118036 - DNA, 25 bp, Homo sapien
tgtagatgcggctgtctttcgaatt

SEQ ID NO: 3118037 - DNA, 25 bp, Homo sapien
cacaccgataacctgctcctaaggc

SEQ ID NO: 3118038 - DNA, 25 bp, Homo sapien
cgataacctgctcctaaggccgctt

SEQ ID NO: 3118039 - DNA, 25 bp, Homo sapien
aacctgctcctaaggccgcttctgt

SEQ ID NO: 3118040 - DNA, 25 bp, Homo sapien
attctgttcggctgagatcagaggc

SEQ ID NO: 3118041 - DNA, 25 bp, Homo sapien
cattgccccggagggattcaaacca

SEQ ID NO: 3118042 - DNA, 25 bp, Homo sapien
gttatggtgtcactgcccggaagca

SEQ ID NO: 3118043 - DNA, 25 bp, Homo sapien
gatggtgtcaagaaaggtcctccgt

SEQ ID NO: 3118044 - DNA, 25 bp, Homo sapien
gctgtgaacccgctggaatgtgccc

SEQ ID NO: 3118045 - DNA, 25 bp, Homo sapien
agagaagcagatgtcgtcactggca

SEQ ID NO: 3118046 - DNA, 25 bp, Homo sapien
ccttgtttgcagtggcctcaggact

SEQ ID NO: 3118047 - DNA, 25 bp, Homo sapien
gcagccgagggccagtgagtaatca

SEQ ID NO: 3118048 - DNA, 25 bp, Homo sapien
cagtgggcgatctgagcctctggct

SEQ ID NO: 3118049 - DNA, 25 bp, Homo sapien
gacgttagatgatgcctcggaatgg

SEQ ID NO: 3118050 - DNA, 25 bp, Homo sapien
gcacaacagtacgtcaggcacctgg

SEQ ID NO: 3118051 - DNA, 25 bp, Homo sapien
tcgcatggcccgaggtggtaataat

SEQ ID NO: 3118052 - DNA, 25 bp, Homo sapien
taagcaaaagggtcatcgcatggcc

SEQ ID NO: 3118053 - DNA, 25 bp, Homo sapien
tgtccatggcagacctcagtgggcc

SEQ ID NO: 3118054 - DNA, 25 bp, Homo sapien
cattaaaatgcagcgccttcgcccg

SEQ ID NO: 3118055 - DNA, 25 bp, Homo sapien
ggcctcgccggcaataacgattcat

SEQ ID NO: 3118056 - DNA, 25 bp, Homo sapien
caagaggtgcgctcactgggtctga

SEQ ID NO: 3118057 - DNA, 25 bp, Homo sapien
tgttgtcaggaaattgagctcccgg

SEQ ID NO: 3118058 - DNA, 25 bp, Homo sapien
aaacactcatcaatggttctgaggg

SEQ ID NO: 3118059 - DNA, 25 bp, Homo sapien
ggcgctcacgttcaccttgggaaaa

SEQ ID NO: 3118060 - DNA, 25 bp, Homo sapien
cattccagaaggctgctccgtcagt

SEQ ID NO: 3118061 - DNA, 25 bp, Homo sapien
cacggtgaggggctttgtaacacgc

SEQ ID NO: 3118062 - DNA, 25 bp, Homo sapien
cacgcctgccccgacacggtgaggg

SEQ ID NO: 3118063 - DNA, 25 bp, Homo sapien
gcccagctctgtcgctccagaccct

SEQ ID NO: 3118064 - DNA, 25 bp, Homo sapien
cctcgctagccttgcgggggttgct

SEQ ID NO: 3118065 - DNA, 25 bp, Homo sapien
tgggtgacggtttccgtggacagga

SEQ ID NO: 3118066 - DNA, 25 bp, Homo sapien
agcctgggagcgttggatcccccac

SEQ ID NO: 3118067 - DNA, 25 bp, Homo sapien
tgggagcgttggatcccccactcag

SEQ ID NO: 3118068 - DNA, 25 bp, Homo sapien
agtagcctgggagcgttggatcccc

SEQ ID NO: 3118069 - DNA, 25 bp, Homo sapien
cagtagcctgggagcgttggatccc

SEQ ID NO: 3118070 - DNA, 25 bp, Homo sapien
ctgccccgcctgccacacgtctctc

SEQ ID NO: 3118071 - DNA, 25 bp, Homo sapien
tgccccgcctgccacacgtctctca

SEQ ID NO: 3118072 - DNA, 25 bp, Homo sapien
gccccgcctgccacacgtctctcag

SEQ ID NO: 3118073 - DNA, 25 bp, Homo sapien
cagcacatggaacagcaacacaggc

SEQ ID NO: 3118074 - DNA, 25 bp, Homo sapien
aggggccacttaggcgggcagaacg

SEQ ID NO: 3118075 - DNA, 25 bp, Homo sapien
ccacttaggcgggcagaacgcaggg

SEQ ID NO: 3118076 - DNA, 25 bp, Homo sapien
ggccaaggagcaccacaggaagatc

SEQ ID NO: 3118077 - DNA, 25 bp, Homo sapien
gaacgcaggggccaaggagcaccac

SEQ ID NO: 3118078 - DNA, 25 bp, Homo sapien
acctggccgtccttcgctgcaacct

SEQ ID NO: 3118079 - DNA, 25 bp, Homo sapien
cttcgctgcaacctcggagaagcca

SEQ ID NO: 3118080 - DNA, 25 bp, Homo sapien
cgtccttcgctgcaacctcggagaa

SEQ ID NO: 3118081 - DNA, 25 bp, Homo sapien
gctgcaacctcggagaagccactct

SEQ ID NO: 3118082 - DNA, 25 bp, Homo sapien
tgccatttcctagcacgtggacggg

SEQ ID NO: 3118083 - DNA, 25 bp, Homo sapien
gatagaaagtcacggctgccagaca

SEQ ID NO: 3118084 - DNA, 25 bp, Homo sapien
cacttcgaaagagaaagtcaacggg

SEQ ID NO: 3118085 - DNA, 25 bp, Homo sapien
caggcatatttaggagccgcaaagc

SEQ ID NO: 3118086 - DNA, 25 bp, Homo sapien
gccaacaggcgaacccacagggctg

SEQ ID NO: 3118087 - DNA, 25 bp, Homo sapien
cagtggtcctcacatatctggccaa

SEQ ID NO: 3118088 - DNA, 25 bp, Homo sapien
ctctgctacctgagggcccgacggg

SEQ ID NO: 3118089 - DNA, 25 bp, Homo sapien
gagttctcgaccgtgtcccggccaa

SEQ ID NO: 3118090 - DNA, 25 bp, Homo sapien
cgagggcacagccagaacgggtcct

SEQ ID NO: 3118091 - DNA, 25 bp, Homo sapien
aggaccgcacagagctgccagggag

SEQ ID NO: 3118092 - DNA, 25 bp, Homo sapien
agatgcccccagagaatcgtccttg

SEQ ID NO: 3118093 - DNA, 25 bp, Homo sapien
cttgtgcccggtagcacccaaaggg

SEQ ID NO: 3118094 - DNA, 25 bp, Homo sapien
ggccttgggaacagacgccttggaa

SEQ ID NO: 3118095 - DNA, 25 bp, Homo sapien
tggaagcaaattccgggaactccca

SEQ ID NO: 3118096 - DNA, 25 bp, Homo sapien
ggctgcaggcctttgctcccgagtt

SEQ ID NO: 3118097 - DNA, 25 bp, Homo sapien
tctcgacagcatagcccgggttttc

SEQ ID NO: 3118098 - DNA, 25 bp, Homo sapien
tctggaggggccgtaactccaacca

SEQ ID NO: 3118099 - DNA, 25 bp, Homo sapien
taactccaaccagcaaaggcctttc

SEQ ID NO: 3118100 - DNA, 25 bp, Homo sapien
cttactggaagctgcggcgtcttgc

SEQ ID NO: 3118101 - DNA, 25 bp, Homo sapien
caggagccccaaccccgacttctct

SEQ ID NO: 3118102 - DNA, 25 bp, Homo sapien
gggacaatgtcacctatcgggtggt

SEQ ID NO: 3118103 - DNA, 25 bp, Homo sapien
ctgtgacgggacaatgtcacctatc

SEQ ID NO: 3118104 - DNA, 25 bp, Homo sapien
tgacgggacaatgtcacctatcggg

SEQ ID NO: 3118105 - DNA, 25 bp, Homo sapien
acaatgtcacctatcgggtggtgcc

SEQ ID NO: 3118106 - DNA, 25 bp, Homo sapien
ggacctcagcaccctccaagccggg

SEQ ID NO: 3118107 - DNA, 25 bp, Homo sapien
gacctcagcaccctccaagccgggg

SEQ ID NO: 3118108 - DNA, 25 bp, Homo sapien
tcagcaccctccaagccggggacct

SEQ ID NO: 3118109 - DNA, 25 bp, Homo sapien
acctcagcaccctccaagccgggga

SEQ ID NO: 3118110 - DNA, 25 bp, Homo sapien
ttaatagccaataggacgccagccg

SEQ ID NO: 3118111 - DNA, 25 bp, Homo sapien
actacggtgatgtggtcagcagcgc

SEQ ID NO: 3118112 - DNA, 25 bp, Homo sapien
gccagccgccgtgagaaagaagtca

SEQ ID NO: 3118113 - DNA, 25 bp, Homo sapien
gaggcaggcgttgatctcagaaata

SEQ ID NO: 3118114 - DNA, 25 bp, Homo sapien
ccaggcgcaagcagcatcgggcagt

SEQ ID NO: 3118115 - DNA, 25 bp, Homo sapien
aacacacgccgggcagcagagccag

SEQ ID NO: 3118116 - DNA, 25 bp, Homo sapien
agacaggtccacaacacacgccggg

SEQ ID NO: 3118117 - DNA, 25 bp, Homo sapien
gccttgtgatgcgccaggccctcgg

SEQ ID NO: 3118118 - DNA, 25 bp, Homo sapien
tcctggggagtcccactgtgttccc

SEQ ID NO: 3118119 - DNA, 25 bp, Homo sapien
ctggggagtcccactgtgttccccg

SEQ ID NO: 3118120 - DNA, 25 bp, Homo sapien
cctggtgcaggggcagtgaccgagg

SEQ ID NO: 3118121 - DNA, 25 bp, Homo sapien
agtgaccgaggccccagtcgcagga

SEQ ID NO: 3118122 - DNA, 25 bp, Homo sapien
agtaaatgaaagaacgctggtgcgt

SEQ ID NO: 3118123 - DNA, 25 bp, Homo sapien
gggcagctattgagggaactgccct

SEQ ID NO: 3118124 - DNA, 25 bp, Homo sapien
acatcgtcacgcagggacaatgcca

SEQ ID NO: 3118125 - DNA, 25 bp, Homo sapien
aacgctggtgcgtgtgatgggctac

SEQ ID NO: 3118126 - DNA, 25 bp, Homo sapien
ccttaacttcgtgtagcctggcggt

SEQ ID NO: 3118127 - DNA, 25 bp, Homo sapien
cagggcaggggtccttaacttcgtg

SEQ ID NO: 3118128 - DNA, 25 bp, Homo sapien
ggtccttaacttcgtgtagcctggc

SEQ ID NO: 3118129 - DNA, 25 bp, Homo sapien
taacttcgtgtagcctggcggtgac

SEQ ID NO: 3118130 - DNA, 25 bp, Homo sapien
acagtgtctcccagcggcccctggg

SEQ ID NO: 3118131 - DNA, 25 bp, Homo sapien
cagtgtctcccagcggcccctgggg

SEQ ID NO: 3118132 - DNA, 25 bp, Homo sapien
atctggggacaagtgcccgagcccc

SEQ ID NO: 3118133 - DNA, 25 bp, Homo sapien
tctggggacaagtgcccgagccccc

SEQ ID NO: 3118134 - DNA, 25 bp, Homo sapien
ctgtgtcacagtgtccccagcgtgg

SEQ ID NO: 3118135 - DNA, 25 bp, Homo sapien
gtgtcacagtgtccccagcgtggca

SEQ ID NO: 3118136 - DNA, 25 bp, Homo sapien
ctgagagcctgtgtcacagtgtccc

SEQ ID NO: 3118137 - DNA, 25 bp, Homo sapien
gcctgtgtcacagtgtccccagcgt

SEQ ID NO: 3118138 - DNA, 25 bp, Homo sapien
gcggtgtcgggaccgccggcttctg

SEQ ID NO: 3118139 - DNA, 25 bp, Homo sapien
ccctgcgtttgaaccgcggtgtcgg

SEQ ID NO: 3118140 - DNA, 25 bp, Homo sapien
ggccctgcgtgaggtcgggcttggt

SEQ ID NO: 3118141 - DNA, 25 bp, Homo sapien
cggtccctgcgtttgaaccgcggtg

SEQ ID NO: 3118142 - DNA, 25 bp, Homo sapien
ggctcttcgaggtctgtcctgttca

SEQ ID NO: 3118143 - DNA, 25 bp, Homo sapien
ccagataaatgcagtaatggcagca

SEQ ID NO: 3118144 - DNA, 25 bp, Homo sapien
tcttctaggtctcgggttgtggtgc

SEQ ID NO: 3118145 - DNA, 25 bp, Homo sapien
tggcagcaaggagaaccggcatttc

SEQ ID NO: 3118146 - DNA, 25 bp, Homo sapien
cacggcagcgttggggggtccgagg

SEQ ID NO: 3118147 - DNA, 25 bp, Homo sapien
cacggacacggcagcgttggggggt

SEQ ID NO: 3118148 - DNA, 25 bp, Homo sapien
agcagcgttgggggatctgaggccc

SEQ ID NO: 3118149 - DNA, 25 bp, Homo sapien
ccacggacacgacagcattgggaga

SEQ ID NO: 3118150 - DNA, 25 bp, Homo sapien
gacagtgaggctgaaatgtttgcac

SEQ ID NO: 3118151 - DNA, 25 bp, Homo sapien
tggctaatccggacaggcttgctgg

SEQ ID NO: 3118152 - DNA, 25 bp, Homo sapien
gctgtgtcctcggtgggcactgaca

SEQ ID NO: 3118153 - DNA, 25 bp, Homo sapien
tgttgttgactcattcaaagctctt

SEQ ID NO: 3118154 - DNA, 25 bp, Homo sapien
cccacacttgttccgtcgaccgctg

SEQ ID NO: 3118155 - DNA, 25 bp, Homo sapien
ccccgggtctgatcacagcaggatt

SEQ ID NO: 3118156 - DNA, 25 bp, Homo sapien
ctcaagcaacgcttcctccgggaag

SEQ ID NO: 3118157 - DNA, 25 bp, Homo sapien
ctgcagatgttcacaggaggccacg

SEQ ID NO: 3118158 - DNA, 25 bp, Homo sapien
gcggcgccctctgaacgggggagcc

SEQ ID NO: 3118159 - DNA, 25 bp, Homo sapien
tctgaacgggggagccccgatgtcc

SEQ ID NO: 3118160 - DNA, 25 bp, Homo sapien
tgggcggcggcgccctctgaacggg

SEQ ID NO: 3118161 - DNA, 25 bp, Homo sapien
ggggacaggggcgggcggcactcac

SEQ ID NO: 3118162 - DNA, 25 bp, Homo sapien
cactccgctctcttgcccttgaggg

SEQ ID NO: 3118163 - DNA, 25 bp, Homo sapien
tccccaacttctgtcaccatgcact

SEQ ID NO: 3118164 - DNA, 25 bp, Homo sapien
tgtcaccatgcactccgctctcttg

SEQ ID NO: 3118165 - DNA, 25 bp, Homo sapien
ggaaccatccccaacttctgtcacc

SEQ ID NO: 3118166 - DNA, 25 bp, Homo sapien
cagaggcggggcctcagcaccaagt

SEQ ID NO: 3118167 - DNA, 25 bp, Homo sapien
aggcggggcctcagcaccaagtcct

SEQ ID NO: 3118168 - DNA, 25 bp, Homo sapien
ctgggaccagaggcggggcctcagc

SEQ ID NO: 3118169 - DNA, 25 bp, Homo sapien
cggggcctcagcaccaagtcctcca

SEQ ID NO: 3118170 - DNA, 25 bp, Homo sapien
gctcaacgattgctcccacaagctg

SEQ ID NO: 3118171 - DNA, 25 bp, Homo sapien
cacaagctgccctaagcagcccagc

SEQ ID NO: 3118172 - DNA, 25 bp, Homo sapien
tacactgggcgctcaacgattgctc

SEQ ID NO: 3118173 - DNA, 25 bp, Homo sapien
gctggcatacactgggcgctcaacg

SEQ ID NO: 3118174 - DNA, 25 bp, Homo sapien
gaaatctggtagacaaggaaaggag

SEQ ID NO: 3118175 - DNA, 25 bp, Homo sapien
cactgaaatctggtagacaaggaaa

SEQ ID NO: 3118176 - DNA, 25 bp, Homo sapien
agagcacaggacgaccccagcagct

SEQ ID NO: 3118177 - DNA, 25 bp, Homo sapien
ctggaggcacctcagagcacaggac

SEQ ID NO: 3118178 - DNA, 25 bp, Homo sapien
gttggccccgaacctctctccaggc

SEQ ID NO: 3118179 - DNA, 25 bp, Homo sapien
ctggacgtggtgtcgccaccgcagc

SEQ ID NO: 3118180 - DNA, 25 bp, Homo sapien
tggctaggacgacctgagaagtggc

SEQ ID NO: 3118181 - DNA, 25 bp, Homo sapien
cagcctcgagggactttcaccgggg

SEQ ID NO: 3118182 - DNA, 25 bp, Homo sapien
cggcagccctggggtgcgtcaggct

SEQ ID NO: 3118183 - DNA, 25 bp, Homo sapien
ttcatcttggcgaagcgcagcacca

SEQ ID NO: 3118184 - DNA, 25 bp, Homo sapien
agcatgtacaggacgtcggccactg

SEQ ID NO: 3118185 - DNA, 25 bp, Homo sapien
ccaggttgacgatgttgacggtgaa

SEQ ID NO: 3118186 - DNA, 25 bp, Homo sapien
tgctggtctgcataagcccgttggc

SEQ ID NO: 3118187 - DNA, 25 bp, Homo sapien
accgccggggagcatcctgactggc

SEQ ID NO: 3118188 - DNA, 25 bp, Homo sapien
gggggtcaccgcagtgcaacctccg

SEQ ID NO: 3118189 - DNA, 25 bp, Homo sapien
tgggtgggggtcaccgcagtgcaac

SEQ ID NO: 3118190 - DNA, 25 bp, Homo sapien
accaccgccggggagcatcctgact

SEQ ID NO: 3118191 - DNA, 25 bp, Homo sapien
ccccgctgtgtggcagacggttaga

SEQ ID NO: 3118192 - DNA, 25 bp, Homo sapien
aggcggccctgagcacttgcacggc

SEQ ID NO: 3118193 - DNA, 25 bp, Homo sapien
ctgagcacttgcacggcatggcgga

SEQ ID NO: 3118194 - DNA, 25 bp, Homo sapien
gggaacctactgccctgtgtctacc

SEQ ID NO: 3118195 - DNA, 25 bp, Homo sapien
tggctcggagctgacatgcagctgg

SEQ ID NO: 3118196 - DNA, 25 bp, Homo sapien
ccggtggctcggagctgacatgcag

SEQ ID NO: 3118197 - DNA, 25 bp, Homo sapien
cctggccggccttctggaaaagtcg

SEQ ID NO: 3118198 - DNA, 25 bp, Homo sapien
ttctggaaaagtcgctccccagagg

SEQ ID NO: 3118199 - DNA, 25 bp, Homo sapien
ggacaggcgtgaccctggctgacca

SEQ ID NO: 3118200 - DNA, 25 bp, Homo sapien
ggacctgagtcaagcgctttcgggt

SEQ ID NO: 3118201 - DNA, 25 bp, Homo sapien
aaagcagaagagacggccgcaggtt

SEQ ID NO: 3118202 - DNA, 25 bp, Homo sapien
tcgggtgtctttaacttagcagagc

SEQ ID NO: 3118203 - DNA, 25 bp, Homo sapien
agctccccgctgcgcctggatgacc

SEQ ID NO: 3118204 - DNA, 25 bp, Homo sapien
tccccgctgcgcctggatgaccgtc

SEQ ID NO: 3118205 - DNA, 25 bp, Homo sapien
gctgcgcctggatgaccgtcctctg

SEQ ID NO: 3118206 - DNA, 25 bp, Homo sapien
tgcgcctggatgaccgtcctctgct

SEQ ID NO: 3118207 - DNA, 25 bp, Homo sapien
aagggcgtcttcacccgagagtgag

SEQ ID NO: 3118208 - DNA, 25 bp, Homo sapien
agtgagggcactggcgcctctgtct

SEQ ID NO: 3118209 - DNA, 25 bp, Homo sapien
cccgaggcttgtggccgggtcgaat

SEQ ID NO: 3118210 - DNA, 25 bp, Homo sapien
gggacgaggctatgaccaaaggcac

SEQ ID NO: 3118211 - DNA, 25 bp, Homo sapien
gcaaaggcctctgtcggggacccca

SEQ ID NO: 3118212 - DNA, 25 bp, Homo sapien
aggaggagcctgttggggtcaagtg

SEQ ID NO: 3118213 - DNA, 25 bp, Homo sapien
cacagagcccgtgtccctgccagct

SEQ ID NO: 3118214 - DNA, 25 bp, Homo sapien
cagggggtgcgcaaaggcctctgtc

SEQ ID NO: 3118215 - DNA, 25 bp, Homo sapien
gaagtgtggtgacaaccaaggacag

SEQ ID NO: 3118216 - DNA, 25 bp, Homo sapien
tgtctgtgggggggcggtagcaggg

SEQ ID NO: 3118217 - DNA, 25 bp, Homo sapien
agtgtggtgacaaccaaggacagga

SEQ ID NO: 3118218 - DNA, 25 bp, Homo sapien
tgggggggcggtagcagggcttctg

SEQ ID NO: 3118219 - DNA, 25 bp, Homo sapien
cctgccccaggagggtctgtgagag

SEQ ID NO: 3118220 - DNA, 25 bp, Homo sapien
gggtctgtgagaggacagcccccaa

SEQ ID NO: 3118221 - DNA, 25 bp, Homo sapien
ggacagcccccaacatcagggtgca

SEQ ID NO: 3118222 - DNA, 25 bp, Homo sapien
gcctgccccaggagggtctgtgaga

SEQ ID NO: 3118223 - DNA, 25 bp, Homo sapien
ttctgcttataaaagctgtgccagg

SEQ ID NO: 3118224 - DNA, 25 bp, Homo sapien
gctgaggagacattcattcgacatt

SEQ ID NO: 3118225 - DNA, 25 bp, Homo sapien
gggccattctgcttataaaagctgt

SEQ ID NO: 3118226 - DNA, 25 bp, Homo sapien
attcattcgacattgcgtatttgcc

SEQ ID NO: 3118227 - DNA, 25 bp, Homo sapien
tgcagggattgattgagcgccgact

SEQ ID NO: 3118228 - DNA, 25 bp, Homo sapien
tgctgtgattggttgagcgccgact

SEQ ID NO: 3118229 - DNA, 25 bp, Homo sapien
cagggattgattgagcgccgactgt

SEQ ID NO: 3118230 - DNA, 25 bp, Homo sapien
tgtgcagtgatttgttgagcgccga

SEQ ID NO: 3118231 - DNA, 25 bp, Homo sapien
tgctccgccagatgacaaatctctg

SEQ ID NO: 3118232 - DNA, 25 bp, Homo sapien
cggcctggagagcatctgccactat

SEQ ID NO: 3118233 - DNA, 25 bp, Homo sapien
tggacacttcaagtcgggcaggccg

SEQ ID NO: 3118234 - DNA, 25 bp, Homo sapien
gccactatggctgggacatatggtc

SEQ ID NO: 3118235 - DNA, 25 bp, Homo sapien
ttgcccagccatatgccttgttata

SEQ ID NO: 3118236 - DNA, 25 bp, Homo sapien
tagctgggaccctgggcgtgcacca

SEQ ID NO: 3118237 - DNA, 25 bp, Homo sapien
ctcttgcccagccatatgccttgtt

SEQ ID NO: 3118238 - DNA, 25 bp, Homo sapien
gcccagccatatgccttgttatagc

SEQ ID NO: 3118239 - DNA, 25 bp, Homo sapien
gggctgctcggtgcacaagatggag

SEQ ID NO: 3118240 - DNA, 25 bp, Homo sapien
gggactctggccgtgatcaagacgt

SEQ ID NO: 3118241 - DNA, 25 bp, Homo sapien
tgagtggtggcacttctgggactct

SEQ ID NO: 3118242 - DNA, 25 bp, Homo sapien
tcaggagcgagctcagctgtgcctt

SEQ ID NO: 3118243 - DNA, 25 bp, Homo sapien
agcgcaggcagtcgggggaggctcc

SEQ ID NO: 3118244 - DNA, 25 bp, Homo sapien
ggggcagcgcaggcagtcgggggag

SEQ ID NO: 3118245 - DNA, 25 bp, Homo sapien
gggcagcgcaggcagtcgggggagg

SEQ ID NO: 3118246 - DNA, 25 bp, Homo sapien
tgctccgacagtccggggtgaccac

SEQ ID NO: 3118247 - DNA, 25 bp, Homo sapien
gggtggcctggcggtgctccgacag

SEQ ID NO: 3118248 - DNA, 25 bp, Homo sapien
tggcctggcggtgctccgacagtcc

SEQ ID NO: 3118249 - DNA, 25 bp, Homo sapien
gtgctccgacagtccggggtgacca

SEQ ID NO: 3118250 - DNA, 25 bp, Homo sapien
cccaaaagtgttcctgagcggactc

SEQ ID NO: 3118251 - DNA, 25 bp, Homo sapien
tccccaaaagtgttcctgagcggac

SEQ ID NO: 3118252 - DNA, 25 bp, Homo sapien
ttccccaaaagtgttcctgagcgga

SEQ ID NO: 3118253 - DNA, 25 bp, Homo sapien
ccccaaaagtgttcctgagcggact

SEQ ID NO: 3118254 - DNA, 25 bp, Homo sapien
tcttgggcaggcatactgggtgaca

SEQ ID NO: 3118255 - DNA, 25 bp, Homo sapien
caacagcggcacctcttgttcttgg

SEQ ID NO: 3118256 - DNA, 25 bp, Homo sapien
gctgcattgtaaagaggactctgga

SEQ ID NO: 3118257 - DNA, 25 bp, Homo sapien
gaatggcttgcagatcaacagcggc

SEQ ID NO: 3118258 - DNA, 25 bp, Homo sapien
gacggtgctgtgtgcggaaacatcc

SEQ ID NO: 3118259 - DNA, 25 bp, Homo sapien
taaacggtgatagcctgtgacggtg

SEQ ID NO: 3118260 - DNA, 25 bp, Homo sapien
tgtgagctcaggacggtttagacgc

SEQ ID NO: 3118261 - DNA, 25 bp, Homo sapien
catccgattttattgccgctgggtg

SEQ ID NO: 3118262 - DNA, 25 bp, Homo sapien
tgccatggagtcagagacacgagac

SEQ ID NO: 3118263 - DNA, 25 bp, Homo sapien
ctttgtcctgccatggagtcagaga

SEQ ID NO: 3118264 - DNA, 25 bp, Homo sapien
tcctgccatggagtcagagacacga

SEQ ID NO: 3118265 - DNA, 25 bp, Homo sapien
tgtcctgccatggagtcagagacac

SEQ ID NO: 3118266 - DNA, 25 bp, Homo sapien
caggtgcccgcacgcctggaacatg

SEQ ID NO: 3118267 - DNA, 25 bp, Homo sapien
acgtccggcgggacaggtgcccgca

SEQ ID NO: 3118268 - DNA, 25 bp, Homo sapien
cgcacgcctggaacatggatgctcc

SEQ ID NO: 3118269 - DNA, 25 bp, Homo sapien
tgacttgcacgctccacgtccggcg

SEQ ID NO: 3118270 - DNA, 25 bp, Homo sapien
tcccggccgcggctcgactccggct

SEQ ID NO: 3118271 - DNA, 25 bp, Homo sapien
cgtggaggccgctgagcggacgggt

SEQ ID NO: 3118272 - DNA, 25 bp, Homo sapien
aggcagcgagcgagcctcgagcccg

SEQ ID NO: 3118273 - DNA, 25 bp, Homo sapien
ggtcaccgcggaccccgctcggcgc

SEQ ID NO: 3118274 - DNA, 25 bp, Homo sapien
caggggcacccggacctcgtcggcg

SEQ ID NO: 3118275 - DNA, 25 bp, Homo sapien
tcggcggcccgtgcgccctcggtca

SEQ ID NO: 3118276 - DNA, 25 bp, Homo sapien
ctcgtcggcggcccgtgcgccctcg

SEQ ID NO: 3118277 - DNA, 25 bp, Homo sapien
gacctcgtcggcggcccgtgcgccc

SEQ ID NO: 3118278 - DNA, 25 bp, Homo sapien
ctcggagggtgacacgccgagctcg

SEQ ID NO: 3118279 - DNA, 25 bp, Homo sapien
cggagggtgacacgccgagctcgga

SEQ ID NO: 3118280 - DNA, 25 bp, Homo sapien
gagggtgacacgccgagctcggacc

SEQ ID NO: 3118281 - DNA, 25 bp, Homo sapien
gggtgacacgccgagctcggacccc

SEQ ID NO: 3118282 - DNA, 25 bp, Homo sapien
ggtacgggacgcgctgctcctcgtc

SEQ ID NO: 3118283 - DNA, 25 bp, Homo sapien
ctcctcgtcggcacccagctccgcg

SEQ ID NO: 3118284 - DNA, 25 bp, Homo sapien
gaagaagaccgtggccgccaaggcc

SEQ ID NO: 3118285 - DNA, 25 bp, Homo sapien
ccaaggccgggtacgggacgcgctg

SEQ ID NO: 3118286 - DNA, 25 bp, Homo sapien
ccagctgcgcggccgcgtggtctga

SEQ ID NO: 3118287 - DNA, 25 bp, Homo sapien
cagctgcgcggccgcgtggtctgac

SEQ ID NO: 3118288 - DNA, 25 bp, Homo sapien
tcagaaattagagcgcggtcctcca

SEQ ID NO: 3118289 - DNA, 25 bp, Homo sapien
gggcgcatgccgagggagtcccgcg

SEQ ID NO: 3118290 - DNA, 25 bp, Homo sapien
cactctcagaaattagagcgcggtc

SEQ ID NO: 3118291 - DNA, 25 bp, Homo sapien
cccacgccaggtcccaccaacaggg

SEQ ID NO: 3118292 - DNA, 25 bp, Homo sapien
cgagttcagccagaaaaagcgagtt

SEQ ID NO: 3118293 - DNA, 25 bp, Homo sapien
caaggtagggaagtgtacacaggcc

SEQ ID NO: 3118294 - DNA, 25 bp, Homo sapien
tctgtgccgctctggccgagagtag

SEQ ID NO: 3118295 - DNA, 25 bp, Homo sapien
accaggcgccggctgaaaactttgc

SEQ ID NO: 3118296 - DNA, 25 bp, Homo sapien
tcaccctcttcaggagggatgcggg

SEQ ID NO: 3118297 - DNA, 25 bp, Homo sapien
tcagagttcaccctcttcaggaggg

SEQ ID NO: 3118298 - DNA, 25 bp, Homo sapien
gttcaccctcttcaggagggatgcg

SEQ ID NO: 3118299 - DNA, 25 bp, Homo sapien
ccctcttcaggagggatgcggggcc

SEQ ID NO: 3118300 - DNA, 25 bp, Homo sapien
ctgggccgaggccacccccactgcc

SEQ ID NO: 3118301 - DNA, 25 bp, Homo sapien
ggccctgctgggccgaggccacccc

SEQ ID NO: 3118302 - DNA, 25 bp, Homo sapien
ctgctgggccgaggccacccccact

SEQ ID NO: 3118303 - DNA, 25 bp, Homo sapien
ccctgctgggccgaggccaccccca

SEQ ID NO: 3118304 - DNA, 25 bp, Homo sapien
aggtggccagcacaactcaggagag

SEQ ID NO: 3118305 - DNA, 25 bp, Homo sapien
cacaattaaaagatgcacgggccgg

SEQ ID NO: 3118306 - DNA, 25 bp, Homo sapien
agaaatctcggcgtcagctctcaga

SEQ ID NO: 3118307 - DNA, 25 bp, Homo sapien
cctctgagtctgagtgagaaaacac

SEQ ID NO: 3118308 - DNA, 25 bp, Homo sapien
cgctggtcgtcacataaacaagtaa

SEQ ID NO: 3118309 - DNA, 25 bp, Homo sapien
gatggttcaacaacacgaaggtcgc

SEQ ID NO: 3118310 - DNA, 25 bp, Homo sapien
gaaggtcgctaacccgtgcgcttta

SEQ ID NO: 3118311 - DNA, 25 bp, Homo sapien
acatgtcacacggaaagtcccgcac

SEQ ID NO: 3118312 - DNA, 25 bp, Homo sapien
tgccgcaaatagcacctttctgcgg

SEQ ID NO: 3118313 - DNA, 25 bp, Homo sapien
cctaactgccgcaaatagcaccttt

SEQ ID NO: 3118314 - DNA, 25 bp, Homo sapien
gctggggactgtctttgtgcatctc

SEQ ID NO: 3118315 - DNA, 25 bp, Homo sapien
ctttgtcccctaactgccgcaaata

SEQ ID NO: 3118316 - DNA, 25 bp, Homo sapien
gcttgggacccggatgatggtggca

SEQ ID NO: 3118317 - DNA, 25 bp, Homo sapien
ggtcagggtctgagtgtctcaaact

SEQ ID NO: 3118318 - DNA, 25 bp, Homo sapien
cactacagcggaggtcctgggtgct

SEQ ID NO: 3118319 - DNA, 25 bp, Homo sapien
ctcaaactctcagggatcacaggaa

SEQ ID NO: 3118320 - DNA, 25 bp, Homo sapien
ggcacaactcggggcagactttcca

SEQ ID NO: 3118321 - DNA, 25 bp, Homo sapien
acggtggcacaactcggggcagact

SEQ ID NO: 3118322 - DNA, 25 bp, Homo sapien
ggtggcacaactcggggcagacttt

SEQ ID NO: 3118323 - DNA, 25 bp, Homo sapien
cacaactcggggcagactttccagg

SEQ ID NO: 3118324 - DNA, 25 bp, Homo sapien
gtgtcgccgcgggttaaggagcaca

SEQ ID NO: 3118325 - DNA, 25 bp, Homo sapien
aaggagcacaccggcgcggcccggg

SEQ ID NO: 3118326 - DNA, 25 bp, Homo sapien
ttaaggagcacaccggcgcggcccg

SEQ ID NO: 3118327 - DNA, 25 bp, Homo sapien
ggttaaggagcacaccggcgcggcc

SEQ ID NO: 3118328 - DNA, 25 bp, Homo sapien
ctcacagggccggaacatgcccagg

SEQ ID NO: 3118329 - DNA, 25 bp, Homo sapien
cccagggtcacgcagttgagcatga

SEQ ID NO: 3118330 - DNA, 25 bp, Homo sapien
gggtcacgcagttgagcatgattac

SEQ ID NO: 3118331 - DNA, 25 bp, Homo sapien
cacagggccggaacatgcccagggt

SEQ ID NO: 3118332 - DNA, 25 bp, Homo sapien
ccaggatgttgcagcgctcggagcc

SEQ ID NO: 3118333 - DNA, 25 bp, Homo sapien
tccaggatgttgcagcgctcggagc

SEQ ID NO: 3118334 - DNA, 25 bp, Homo sapien
cacgtgtcacccaggtaacacttct

SEQ ID NO: 3118335 - DNA, 25 bp, Homo sapien
tccaccgcaaaaaaggcgaaaatga

SEQ ID NO: 3118336 - DNA, 25 bp, Homo sapien
caaggccaccatcttgatgaccatc

SEQ ID NO: 3118337 - DNA, 25 bp, Homo sapien
caggtaacacttctgcccgaacagc

SEQ ID NO: 3118338 - DNA, 25 bp, Homo sapien
tgtccgtccaacgagtactccatca

SEQ ID NO: 3118339 - DNA, 25 bp, Homo sapien
acccgcacggtcctgatagccgaga

SEQ ID NO: 3118340 - DNA, 25 bp, Homo sapien
agaggctcacgttgtgtccgtccaa

SEQ ID NO: 3118341 - DNA, 25 bp, Homo sapien
tcctgatagccgagaggctcacgtt

SEQ ID NO: 3118342 - DNA, 25 bp, Homo sapien
gggcgccaggtctccacctccaacc

SEQ ID NO: 3118343 - DNA, 25 bp, Homo sapien
gcagcagagtgaccaggatccgcat

SEQ ID NO: 3118344 - DNA, 25 bp, Homo sapien
agcagagtgaccaggatccgcatgc

SEQ ID NO: 3118345 - DNA, 25 bp, Homo sapien
agcagaaggacgttcccgagcatgg

SEQ ID NO: 3118346 - DNA, 25 bp, Homo sapien
agaaggacgttcccgagcatgggca

SEQ ID NO: 3118347 - DNA, 25 bp, Homo sapien
gggcgggtgactgcacggtgggcag

SEQ ID NO: 3118348 - DNA, 25 bp, Homo sapien
acatggtgcgttatctgcatggtgg

SEQ ID NO: 3118349 - DNA, 25 bp, Homo sapien
cggtggagccacatggtgcgttatc

SEQ ID NO: 3118350 - DNA, 25 bp, Homo sapien
tggagccacatggtgcgttatctgc

SEQ ID NO: 3118351 - DNA, 25 bp, Homo sapien
tgtcttgggggctgagaggtggcag

SEQ ID NO: 3118352 - DNA, 25 bp, Homo sapien
tcttgggggctgagaggtggcagca

SEQ ID NO: 3118353 - DNA, 25 bp, Homo sapien
ctgtcttgggggctgagaggtggca

SEQ ID NO: 3118354 - DNA, 25 bp, Homo sapien
gtcttgggggctgagaggtggcagc

SEQ ID NO: 3118355 - DNA, 25 bp, Homo sapien
tctgcatgccgttgtctcggcgtga

SEQ ID NO: 3118356 - DNA, 25 bp, Homo sapien
tgaggagcagatgaacgggttctcc

SEQ ID NO: 3118357 - DNA, 25 bp, Homo sapien
cccgagcggcacacgttgtagtact

SEQ ID NO: 3118358 - DNA, 25 bp, Homo sapien
gatggcaatccaggcgtagccgatg

SEQ ID NO: 3118359 - DNA, 25 bp, Homo sapien
gcagtggcttgacttgggcccgcac

SEQ ID NO: 3118360 - DNA, 25 bp, Homo sapien
gggcgagtcctgcacccgctcccct

SEQ ID NO: 3118361 - DNA, 25 bp, Homo sapien
gggcagtggcttgacttgggcccgc

SEQ ID NO: 3118362 - DNA, 25 bp, Homo sapien
gtggcttgacttgggcccgcacgac

SEQ ID NO: 3118363 - DNA, 25 bp, Homo sapien
gtccatgacgtagtacatgatgtcc

SEQ ID NO: 3118364 - DNA, 25 bp, Homo sapien
agttgtagaatgagtgggcgtccat

SEQ ID NO: 3118365 - DNA, 25 bp, Homo sapien
tgggcgtccatgacgtagtacatga

SEQ ID NO: 3118366 - DNA, 25 bp, Homo sapien
aatgagtgggcgtccatgacgtagt

SEQ ID NO: 3118367 - DNA, 25 bp, Homo sapien
ctggccagcgtgctgtcgttggaca

SEQ ID NO: 3118368 - DNA, 25 bp, Homo sapien
gctgtcgttggacaggtggcgtgcc

SEQ ID NO: 3118369 - DNA, 25 bp, Homo sapien
tctcccgctgcttcgtctccgagaa

SEQ ID NO: 3118370 - DNA, 25 bp, Homo sapien
ctcttcgtagcagctgccaggctcg

SEQ ID NO: 3118371 - DNA, 25 bp, Homo sapien
ggggtccaccttcttgcgccagcgg

SEQ ID NO: 3118372 - DNA, 25 bp, Homo sapien
cctggccttgcacagcactggggtc

SEQ ID NO: 3118373 - DNA, 25 bp, Homo sapien
cagcgggcgtagaggcgcaagctgc

SEQ ID NO: 3118374 - DNA, 25 bp, Homo sapien
caagctgcgccgcttgaccttgcgg

SEQ ID NO: 3118375 - DNA, 25 bp, Homo sapien
tagaccaggtggtgcaccgaggctg

SEQ ID NO: 3118376 - DNA, 25 bp, Homo sapien
gcaccgaggctgtgtgcctgcctgc

SEQ ID NO: 3118377 - DNA, 25 bp, Homo sapien
gtagaccaggtggtgcaccgaggct

SEQ ID NO: 3118378 - DNA, 25 bp, Homo sapien
ggtggtgcaccgaggctgtgtgcct

SEQ ID NO: 3118379 - DNA, 25 bp, Homo sapien
ctcggaccagcctggtgtcgcaggc

SEQ ID NO: 3118380 - DNA, 25 bp, Homo sapien
accagcctggtgtcgcaggcgcctg

SEQ ID NO: 3118381 - DNA, 25 bp, Homo sapien
aggggggcgcgccagctcggaccag

SEQ ID NO: 3118382 - DNA, 25 bp, Homo sapien
gcgccagctcggaccagcctggtgt

SEQ ID NO: 3118383 - DNA, 25 bp, Homo sapien
ggctgttcaagctcaacgggccgtg

SEQ ID NO: 3118384 - DNA, 25 bp, Homo sapien
gaccacatgcgggatcttctcgtag

SEQ ID NO: 3118385 - DNA, 25 bp, Homo sapien
tcttctcgtagggatcagggctgtt

SEQ ID NO: 3118386 - DNA, 25 bp, Homo sapien
ggcccctctatgtggcagtcggcat

SEQ ID NO: 3118387 - DNA, 25 bp, Homo sapien
gctcagcgtgttgacaaggatggcc

SEQ ID NO: 3118388 - DNA, 25 bp, Homo sapien
agcttgccgctgaaggtaacccaga

SEQ ID NO: 3118389 - DNA, 25 bp, Homo sapien
gtgaattcatagacgccacggccat

SEQ ID NO: 3118390 - DNA, 25 bp, Homo sapien
agtctccactttccgagccgctgag

SEQ ID NO: 3118391 - DNA, 25 bp, Homo sapien
tacgggttccggatgtagcccagag

SEQ ID NO: 3118392 - DNA, 25 bp, Homo sapien
ggtgaacacgatgttgctgatctcc

SEQ ID NO: 3118393 - DNA, 25 bp, Homo sapien
gatgaccacgatgatgccgtcgaag

SEQ ID NO: 3118394 - DNA, 25 bp, Homo sapien
tgatctccagagcattagtcagctc

SEQ ID NO: 3118395 - DNA, 25 bp, Homo sapien
gtgcgcagcacagacaagccaccgt

SEQ ID NO: 3118396 - DNA, 25 bp, Homo sapien
cgcagggctggcagaaagcgcacca

SEQ ID NO: 3118397 - DNA, 25 bp, Homo sapien
cagggctggcagaaagcgcaccagc

SEQ ID NO: 3118398 - DNA, 25 bp, Homo sapien
cacagacaagccaccgtccgcctgc

SEQ ID NO: 3118399 - DNA, 25 bp, Homo sapien
gaacttgcagccgaaaaggtgcatg

SEQ ID NO: 3118400 - DNA, 25 bp, Homo sapien
cggtgtctgtcttcaggctgaactt

SEQ ID NO: 3118401 - DNA, 25 bp, Homo sapien
gctgaacttgcagccgaaaaggtgc

SEQ ID NO: 3118402 - DNA, 25 bp, Homo sapien
cttcctgtcaggcacggtgtctccg

SEQ ID NO: 3118403 - DNA, 25 bp, Homo sapien
actcagcacccaacactgctgcggg

SEQ ID NO: 3118404 - DNA, 25 bp, Homo sapien
aatgccggcaagtccttggggcaga

SEQ ID NO: 3118405 - DNA, 25 bp, Homo sapien
accccagccccgaaatgccggcaag

SEQ ID NO: 3118406 - DNA, 25 bp, Homo sapien
cagaggcagctatggatgcgcagga

SEQ ID NO: 3118407 - DNA, 25 bp, Homo sapien
ggaggccatgccgttgtacaggacc

SEQ ID NO: 3118408 - DNA, 25 bp, Homo sapien
tgccgttgtacaggaccacgttcca

SEQ ID NO: 3118409 - DNA, 25 bp, Homo sapien
tcatgagggccacgaagtagagggc

SEQ ID NO: 3118410 - DNA, 25 bp, Homo sapien
ccacgaagtagagggcggcccagga

SEQ ID NO: 3118411 - DNA, 25 bp, Homo sapien
tgtcctcgtccgtgtcggatctgtt

SEQ ID NO: 3118412 - DNA, 25 bp, Homo sapien
cctcctcgaagtggaccgacgtctt

SEQ ID NO: 3118413 - DNA, 25 bp, Homo sapien
agtggaccgacgtcttgtcctcgtc

SEQ ID NO: 3118414 - DNA, 25 bp, Homo sapien
aagtcctcctcgaagtggaccgacg

SEQ ID NO: 3118415 - DNA, 25 bp, Homo sapien
gtcacggccagggaacacatcttca

SEQ ID NO: 3118416 - DNA, 25 bp, Homo sapien
ctggtctcccagtggcgggtccccg

SEQ ID NO: 3118417 - DNA, 25 bp, Homo sapien
tgcatccaggaatggtgagctcttg

SEQ ID NO: 3118418 - DNA, 25 bp, Homo sapien
ctgctgctgccacgccgagagtctg

SEQ ID NO: 3118419 - DNA, 25 bp, Homo sapien
gctgcatcctcacggtggctgtcga

SEQ ID NO: 3118420 - DNA, 25 bp, Homo sapien
gagtcgtcgtcaagctcggctgcat

SEQ ID NO: 3118421 - DNA, 25 bp, Homo sapien
gccgtcctcagcttcgtcgtcggtg

SEQ ID NO: 3118422 - DNA, 25 bp, Homo sapien
agacagcagggactcacgttcccca

SEQ ID NO: 3118423 - DNA, 25 bp, Homo sapien
ggctccagcactttatgcaggcgga

SEQ ID NO: 3118424 - DNA, 25 bp, Homo sapien
gctccggcaccactggggcttgtag

SEQ ID NO: 3118425 - DNA, 25 bp, Homo sapien
tcgcggctccggcaccactggggct

SEQ ID NO: 3118426 - DNA, 25 bp, Homo sapien
agggctccagcactttatgcaggcg

SEQ ID NO: 3118427 - DNA, 25 bp, Homo sapien
gatcaaacatcttgtgtgtgatgac

SEQ ID NO: 3118428 - DNA, 25 bp, Homo sapien
tgaccttctggcaggagacgcggaa

SEQ ID NO: 3118429 - DNA, 25 bp, Homo sapien
ccgggatcaatgtcaggcctctcca

SEQ ID NO: 3118430 - DNA, 25 bp, Homo sapien
tgaagacgaggaccacgtgatcaaa

SEQ ID NO: 3118431 - DNA, 25 bp, Homo sapien
catcatctccgccacgaagatggcc

SEQ ID NO: 3118432 - DNA, 25 bp, Homo sapien
ttcaccatcatctccgccacgaaga

SEQ ID NO: 3118433 - DNA, 25 bp, Homo sapien
accatcatctccgccacgaagatgg

SEQ ID NO: 3118434 - DNA, 25 bp, Homo sapien
atcatctccgccacgaagatggccg

SEQ ID NO: 3118435 - DNA, 25 bp, Homo sapien
ctgcaggtaggcgtgctcgccggac

SEQ ID NO: 3118436 - DNA, 25 bp, Homo sapien
tggccacgacaatgtccaccaggga

SEQ ID NO: 3118437 - DNA, 25 bp, Homo sapien
agaacacccaggatcttggcgccac

SEQ ID NO: 3118438 - DNA, 25 bp, Homo sapien
gcagcagacgcagcacgcgcagaac

SEQ ID NO: 3118439 - DNA, 25 bp, Homo sapien
cccaatgggcctgagtgatgatatc

SEQ ID NO: 3118440 - DNA, 25 bp, Homo sapien
gcgcagcagatgaggacgatgttcc

SEQ ID NO: 3118441 - DNA, 25 bp, Homo sapien
gagtgatgatatcagcgtctccacc

SEQ ID NO: 3118442 - DNA, 25 bp, Homo sapien
tgaggacgatgttcccaatgggcct

SEQ ID NO: 3118443 - DNA, 25 bp, Homo sapien
gacggggtgcgacggtcaccgcgga

SEQ ID NO: 3118444 - DNA, 25 bp, Homo sapien
gtgcgacggtcaccgcggagggcct

SEQ ID NO: 3118445 - DNA, 25 bp, Homo sapien
gggtgcgacggtcaccgcggagggc

SEQ ID NO: 3118446 - DNA, 25 bp, Homo sapien
ctgacggggtgcgacggtcaccgcg

SEQ ID NO: 3118447 - DNA, 25 bp, Homo sapien
gttgtcgaagttgtacttgcgtcgc

SEQ ID NO: 3118448 - DNA, 25 bp, Homo sapien
acttgcgtcgcacccagcggtagtg

SEQ ID NO: 3118449 - DNA, 25 bp, Homo sapien
tgtcggggccctcgcagtagtagaa

SEQ ID NO: 3118450 - DNA, 25 bp, Homo sapien
ctcgcagtagtagaacttccctttg

SEQ ID NO: 3118451 - DNA, 25 bp, Homo sapien
ggcatccagcccgtcgtacatgatg

SEQ ID NO: 3118452 - DNA, 25 bp, Homo sapien
ttcacccatccatccttggatgaca

SEQ ID NO: 3118453 - DNA, 25 bp, Homo sapien
tgctggtcgacacccacggcatcca

SEQ ID NO: 3118454 - DNA, 25 bp, Homo sapien
acagcacgaacagcgacatcagggc

SEQ ID NO: 3118455 - DNA, 25 bp, Homo sapien
gcatccaggggttgtggttctgcac

SEQ ID NO: 3118456 - DNA, 25 bp, Homo sapien
agcagcatccaggggttgtggttct

SEQ ID NO: 3118457 - DNA, 25 bp, Homo sapien
tgaagtacagcagcatccaggggtt

SEQ ID NO: 3118458 - DNA, 25 bp, Homo sapien
tacagcagcatccaggggttgtggt

SEQ ID NO: 3118459 - DNA, 25 bp, Homo sapien
cgaacatgttgagcacgaagaagct

SEQ ID NO: 3118460 - DNA, 25 bp, Homo sapien
gcgcctcctctctaggcgccgcagc

SEQ ID NO: 3118461 - DNA, 25 bp, Homo sapien
tgtggaagttctcgaccacgacgcc

SEQ ID NO: 3118462 - DNA, 25 bp, Homo sapien
gaccacgacgcccacgaacatgttg

SEQ ID NO: 3118463 - DNA, 25 bp, Homo sapien
ccgccaccgccaccgggagcgcctt

SEQ ID NO: 3118464 - DNA, 25 bp, Homo sapien
cgccaccgccaccgggagcgcctta

SEQ ID NO: 3118465 - DNA, 25 bp, Homo sapien
accgccaccgccaccgggagcgcct

SEQ ID NO: 3118466 - DNA, 25 bp, Homo sapien
gccaccgccaccgggagcgccttac

SEQ ID NO: 3118467 - DNA, 25 bp, Homo sapien
catggacatggtgatgacgttgaca

SEQ ID NO: 3118468 - DNA, 25 bp, Homo sapien
tgggttggttatagtgctccatgga

SEQ ID NO: 3118469 - DNA, 25 bp, Homo sapien
ctggtgcacagcgagtgaatggagc

SEQ ID NO: 3118470 - DNA, 25 bp, Homo sapien
tagtcggcatagtagggccggcgct

SEQ ID NO: 3118471 - DNA, 25 bp, Homo sapien
gcagcctcgaagacaaacacgatgg

SEQ ID NO: 3118472 - DNA, 25 bp, Homo sapien
aacacgatggtgaagacgtagttgc

SEQ ID NO: 3118473 - DNA, 25 bp, Homo sapien
gcagtacttgagggcctcgtccagc

SEQ ID NO: 3118474 - DNA, 25 bp, Homo sapien
tgaagaaccgacggaacccaaatgc

SEQ ID NO: 3118475 - DNA, 25 bp, Homo sapien
gaagcacgcgcatgatgcggatgat

SEQ ID NO: 3118476 - DNA, 25 bp, Homo sapien
cacgggcaatgcgaagcacgcgcat

SEQ ID NO: 3118477 - DNA, 25 bp, Homo sapien
caatgcgaagcacgcgcatgatgcg

SEQ ID NO: 3118478 - DNA, 25 bp, Homo sapien
ggcagcgcggcgctcatctctatct

SEQ ID NO: 3118479 - DNA, 25 bp, Homo sapien
ctgggggagagcttgcaccacagtg

SEQ ID NO: 3118480 - DNA, 25 bp, Homo sapien
gggagagcttgcaccacagtgtcca

SEQ ID NO: 3118481 - DNA, 25 bp, Homo sapien
gcagggcgcgcatgcccgtagccat

SEQ ID NO: 3118482 - DNA, 25 bp, Homo sapien
cagcagggcgcgcatgcccgtagcc

SEQ ID NO: 3118483 - DNA, 25 bp, Homo sapien
atgagtcttgcccagaggattgagg

SEQ ID NO: 3118484 - DNA, 25 bp, Homo sapien
tatgagtcttgcccagaggattgag

SEQ ID NO: 3118485 - DNA, 25 bp, Homo sapien
ggcagcggctggatccacctctgcc

SEQ ID NO: 3118486 - DNA, 25 bp, Homo sapien
gcatgaaaagaaggcccaggttccc

SEQ ID NO: 3118487 - DNA, 25 bp, Homo sapien
aaacaggagcatgaaaagaaggccc

SEQ ID NO: 3118488 - DNA, 25 bp, Homo sapien
ccactcccagcgcagcatagataaa

SEQ ID NO: 3118489 - DNA, 25 bp, Homo sapien
tcccagcgcagcatagataaaaaac

SEQ ID NO: 3118490 - DNA, 25 bp, Homo sapien
ttgctgaaggtggcgtgcctgctca

SEQ ID NO: 3118491 - DNA, 25 bp, Homo sapien
ggccatgccgaagttgctgaaggtg

SEQ ID NO: 3118492 - DNA, 25 bp, Homo sapien
tcgcaggggttgtcttcactgcact

SEQ ID NO: 3118493 - DNA, 25 bp, Homo sapien
acacgcggaacagcgtgaggaaggc

SEQ ID NO: 3118494 - DNA, 25 bp, Homo sapien
ttgtcctcacgggagcactcgcgca

SEQ ID NO: 3118495 - DNA, 25 bp, Homo sapien
aaggtcacgaagtagacgggcgaca

SEQ ID NO: 3118496 - DNA, 25 bp, Homo sapien
tcaggcagtgcttgtcctcacggga

SEQ ID NO: 3118497 - DNA, 25 bp, Homo sapien
acagggccggcaggtagctcaggca

SEQ ID NO: 3118498 - DNA, 25 bp, Homo sapien
ggcaagggaggcctgtccgcgtcca

SEQ ID NO: 3118499 - DNA, 25 bp, Homo sapien
gtccagctccgcatcctcccgtgcc

SEQ ID NO: 3118500 - DNA, 25 bp, Homo sapien
ggcgtccagctccgcatcctcccgt

SEQ ID NO: 3118501 - DNA, 25 bp, Homo sapien
ccggcgtgcactcccggggccctgc

SEQ ID NO: 3118502 - DNA, 25 bp, Homo sapien
tgtcgttgggcagcgagagcatcct

SEQ ID NO: 3118503 - DNA, 25 bp, Homo sapien
agagcatcctggacacggacacctt

SEQ ID NO: 3118504 - DNA, 25 bp, Homo sapien
gggtgccggccccataggtctccat

SEQ ID NO: 3118505 - DNA, 25 bp, Homo sapien
gcaccacgggcctgaacatgtagct

SEQ ID NO: 3118506 - DNA, 25 bp, Homo sapien
ctgcgggcggagagtgcacagaggc

SEQ ID NO: 3118507 - DNA, 25 bp, Homo sapien
ggagagtgcacagaggcaacggagc

SEQ ID NO: 3118508 - DNA, 25 bp, Homo sapien
gcggagagtgcacagaggcaacgga

SEQ ID NO: 3118509 - DNA, 25 bp, Homo sapien
gggcggagagtgcacagaggcaacg

SEQ ID NO: 3118510 - DNA, 25 bp, Homo sapien
ctggggacgacacagccaatgggat

SEQ ID NO: 3118511 - DNA, 25 bp, Homo sapien
cacagccaatgggatctggagggag

SEQ ID NO: 3118512 - DNA, 25 bp, Homo sapien
acgacacagccaatgggatctggag

SEQ ID NO: 3118513 - DNA, 25 bp, Homo sapien
gccaatgggatctggagggaggcac

SEQ ID NO: 3118514 - DNA, 25 bp, Homo sapien
acagggcgtggaggggctcgccgct

SEQ ID NO: 3118515 - DNA, 25 bp, Homo sapien
gcgtggaggggctcgccgctcctgg

SEQ ID NO: 3118516 - DNA, 25 bp, Homo sapien
ggacagggcgtggaggggctcgccg

SEQ ID NO: 3118517 - DNA, 25 bp, Homo sapien
cagagcagccggctgagactggggg

SEQ ID NO: 3118518 - DNA, 25 bp, Homo sapien
ctgcaggatccagggtgtccctagg

SEQ ID NO: 3118519 - DNA, 25 bp, Homo sapien
gcaggatccagggtgtccctagggc

SEQ ID NO: 3118520 - DNA, 25 bp, Homo sapien
tgtccctagggctgtcaatcttccc

SEQ ID NO: 3118521 - DNA, 25 bp, Homo sapien
ccgtggggagcgtggtggggactgc

SEQ ID NO: 3118522 - DNA, 25 bp, Homo sapien
cgaaggtatgcttacgagtgcggac

SEQ ID NO: 3118523 - DNA, 25 bp, Homo sapien
ggtccagcggctcaaaggcaaagct

SEQ ID NO: 3118524 - DNA, 25 bp, Homo sapien
tcctgcgcctcagtgtggtgctgcc

SEQ ID NO: 3118525 - DNA, 25 bp, Homo sapien
atccacgctgtagagcctgcgcagg

SEQ ID NO: 3118526 - DNA, 25 bp, Homo sapien
gggactgtgaggtacagcccccgcc

SEQ ID NO: 3118527 - DNA, 25 bp, Homo sapien
ggactgtgaggtacagcccccgcct

SEQ ID NO: 3118528 - DNA, 25 bp, Homo sapien
gggtcaccgacgggcatgggaggct

SEQ ID NO: 3118529 - DNA, 25 bp, Homo sapien
cgcctcttctctggggggtcaccga

SEQ ID NO: 3118530 - DNA, 25 bp, Homo sapien
cgtgacaggcggacaagaactcaga

SEQ ID NO: 3118531 - DNA, 25 bp, Homo sapien
cagcgagtgtcctgtaacaacgcgg

SEQ ID NO: 3118532 - DNA, 25 bp, Homo sapien
gtcaatgggaatctcgcggccaacg

SEQ ID NO: 3118533 - DNA, 25 bp, Homo sapien
gggcctgaaaggacgcaacctggta

SEQ ID NO: 3118534 - DNA, 25 bp, Homo sapien
tgctgcacccatctgcggatggtac

SEQ ID NO: 3118535 - DNA, 25 bp, Homo sapien
tcttccttctgctagtctcctgtgt

SEQ ID NO: 3118536 - DNA, 25 bp, Homo sapien
cacatcacagcatcagggggctcag

SEQ ID NO: 3118537 - DNA, 25 bp, Homo sapien
acgtgaactggatccgccgccacat

SEQ ID NO: 3118538 - DNA, 25 bp, Homo sapien
cacttggtcttgactcactccgagg

SEQ ID NO: 3118539 - DNA, 25 bp, Homo sapien
ctacttccttccaatggaaagggag

SEQ ID NO: 3118540 - DNA, 25 bp, Homo sapien
aaagggaggagctggttgcccacct

SEQ ID NO: 3118541 - DNA, 25 bp, Homo sapien
caggtttcggatgcaggcggccgga

SEQ ID NO: 3118542 - DNA, 25 bp, Homo sapien
ctccgggagccctggttagtttgtg

SEQ ID NO: 3118543 - DNA, 25 bp, Homo sapien
gcatggtgcttagaaaggacgacct

SEQ ID NO: 3118544 - DNA, 25 bp, Homo sapien
ttatcaagcgtccaattcagaggcc

SEQ ID NO: 3118545 - DNA, 25 bp, Homo sapien
agacgtcatttctgctgcacccacg

SEQ ID NO: 3118546 - DNA, 25 bp, Homo sapien
tcctgaaggtcccatcttgtgggcc

SEQ ID NO: 3118547 - DNA, 25 bp, Homo sapien
ctgaaggtcccatcttgtgggcctc

SEQ ID NO: 3118548 - DNA, 25 bp, Homo sapien
tgaaggtcccatcttgtgggcctca

SEQ ID NO: 3118549 - DNA, 25 bp, Homo sapien
cctgaaggtcccatcttgtgggcct

SEQ ID NO: 3118550 - DNA, 25 bp, Homo sapien
ttccttctacccagtgggctctccc

SEQ ID NO: 3118551 - DNA, 25 bp, Homo sapien
ggccgctccctgttccttctaccca

SEQ ID NO: 3118552 - DNA, 25 bp, Homo sapien
ctccctgttccttctacccagtggg

SEQ ID NO: 3118553 - DNA, 25 bp, Homo sapien
cgctccctgttccttctacccagtg

SEQ ID NO: 3118554 - DNA, 25 bp, Homo sapien
aggtgacgctgatgtcagggtctct

SEQ ID NO: 3118555 - DNA, 25 bp, Homo sapien
gtgacgctgatgtcagggtctctga

SEQ ID NO: 3118556 - DNA, 25 bp, Homo sapien
acgctgatgtcagggtctctgagag

SEQ ID NO: 3118557 - DNA, 25 bp, Homo sapien
gacgctgatgtcagggtctctgaga

SEQ ID NO: 3118558 - DNA, 25 bp, Homo sapien
caggggccgcgtaggcgcggctcgc

SEQ ID NO: 3118559 - DNA, 25 bp, Homo sapien
gggccgcgtaggcgcggctcgccag

SEQ ID NO: 3118560 - DNA, 25 bp, Homo sapien
aggggccgcgtaggcgcggctcgcc

SEQ ID NO: 3118561 - DNA, 25 bp, Homo sapien
gaatgtggtgaggggcagggtggac

SEQ ID NO: 3118562 - DNA, 25 bp, Homo sapien
cagggtggaccccggctgggactca

SEQ ID NO: 3118563 - DNA, 25 bp, Homo sapien
tgtggaatgtggtgaggggcagggt

SEQ ID NO: 3118564 - DNA, 25 bp, Homo sapien
tgaggggcagggtggaccccggctg

SEQ ID NO: 3118565 - DNA, 25 bp, Homo sapien
gtcccacgcagtgcgctgcggtcag

SEQ ID NO: 3118566 - DNA, 25 bp, Homo sapien
ggtcccacgcagtgcgctgcggtca

SEQ ID NO: 3118567 - DNA, 25 bp, Homo sapien
gagggcggccagatccttgacgtcc

SEQ ID NO: 3118568 - DNA, 25 bp, Homo sapien
ctgagggcggccagatccttgacgt

SEQ ID NO: 3118569 - DNA, 25 bp, Homo sapien
tgagggcggccagatccttgacgtc

SEQ ID NO: 3118570 - DNA, 25 bp, Homo sapien
tcctggtagtagaggtgctgctccc

SEQ ID NO: 3118571 - DNA, 25 bp, Homo sapien
tagaactgtgggtgcacgatgatcc

SEQ ID NO: 3118572 - DNA, 25 bp, Homo sapien
cagctggtcctggtagtagaggtgc

SEQ ID NO: 3118573 - DNA, 25 bp, Homo sapien
tgcacgatgatcctgctgaccggca

SEQ ID NO: 3118574 - DNA, 25 bp, Homo sapien
tgtggctaagaccctggccccacct

SEQ ID NO: 3118575 - DNA, 25 bp, Homo sapien
tgggctgtggctaagaccctggccc

SEQ ID NO: 3118576 - DNA, 25 bp, Homo sapien
tggcatgagtccctccgggtgttcc

SEQ ID NO: 3118577 - DNA, 25 bp, Homo sapien
ccaaggtggtattttgcgtcacaaa

SEQ ID NO: 3118578 - DNA, 25 bp, Homo sapien
ggcacacagcatgtcgtcacggacg

SEQ ID NO: 3118579 - DNA, 25 bp, Homo sapien
tgcggacgtcgtctcccgtgtaggc

SEQ ID NO: 3118580 - DNA, 25 bp, Homo sapien
gtgtagatgccaggccggttgggct

SEQ ID NO: 3118581 - DNA, 25 bp, Homo sapien
cagcactcaggaggattagcgccca

SEQ ID NO: 3118582 - DNA, 25 bp, Homo sapien
ttccatgcactttaatgaggtccag

SEQ ID NO: 3118583 - DNA, 25 bp, Homo sapien
ttaatgaggtccagcactcaggagg

SEQ ID NO: 3118584 - DNA, 25 bp, Homo sapien
actcaggaggattagcgcccaccac

SEQ ID NO: 3118585 - DNA, 25 bp, Homo sapien
cctcccgggcacagacgtggctgtc

SEQ ID NO: 3118586 - DNA, 25 bp, Homo sapien
tcccgggcacagacgtggctgtctg

SEQ ID NO: 3118587 - DNA, 25 bp, Homo sapien
ccgggcacagacgtggctgtctgca

SEQ ID NO: 3118588 - DNA, 25 bp, Homo sapien
cgggcacagacgtggctgtctgcac

SEQ ID NO: 3118589 - DNA, 25 bp, Homo sapien
tcctggttccatgaatgaggcccac

SEQ ID NO: 3118590 - DNA, 25 bp, Homo sapien
tggcccagaccgctcctgctcatga

SEQ ID NO: 3118591 - DNA, 25 bp, Homo sapien
ctgccccgtcctggttccatgaatg

SEQ ID NO: 3118592 - DNA, 25 bp, Homo sapien
cccgtcctggttccatgaatgaggc

SEQ ID NO: 3118593 - DNA, 25 bp, Homo sapien
tctctgagagtagggacttaccctg

SEQ ID NO: 3118594 - DNA, 25 bp, Homo sapien
gctgatgtcagggtctctgagagta

SEQ ID NO: 3118595 - DNA, 25 bp, Homo sapien
gagtagggacttaccctggccactc

SEQ ID NO: 3118596 - DNA, 25 bp, Homo sapien
ctgagagtagggacttaccctggcc

SEQ ID NO: 3118597 - DNA, 25 bp, Homo sapien
cacgtaggccgggctcgccaggacg

SEQ ID NO: 3118598 - DNA, 25 bp, Homo sapien
gccacgtaggccgggctcgccagga

SEQ ID NO: 3118599 - DNA, 25 bp, Homo sapien
acgtaggccgggctcgccaggacgg

SEQ ID NO: 3118600 - DNA, 25 bp, Homo sapien
gggccacgtaggccgggctcgccag

SEQ ID NO: 3118601 - DNA, 25 bp, Homo sapien
gttccacgcagtgcgccgcggttag

SEQ ID NO: 3118602 - DNA, 25 bp, Homo sapien
ccaacaatgcccgtttgctgcaggg

SEQ ID NO: 3118603 - DNA, 25 bp, Homo sapien
cagaagtgcatccagtatgggccgc

SEQ ID NO: 3118604 - DNA, 25 bp, Homo sapien
gtgcatccagtatgggccgcggact

SEQ ID NO: 3118605 - DNA, 25 bp, Homo sapien
gagggcggccagatccttgatgtcc

SEQ ID NO: 3118606 - DNA, 25 bp, Homo sapien
ctgagggcggccagatccttgatgt

SEQ ID NO: 3118607 - DNA, 25 bp, Homo sapien
tgagggcggccagatccttgatgtc

SEQ ID NO: 3118608 - DNA, 25 bp, Homo sapien
tccgccccggtctggatgatgtaga

SEQ ID NO: 3118609 - DNA, 25 bp, Homo sapien
ccgccccggtctggatgatgtagaa

SEQ ID NO: 3118610 - DNA, 25 bp, Homo sapien
atgtccgccccggtctggatgatgt

SEQ ID NO: 3118611 - DNA, 25 bp, Homo sapien
gcgatgtccgccccggtctggatga

SEQ ID NO: 3118612 - DNA, 25 bp, Homo sapien
ctggcccggcctcccgctgtcccca

SEQ ID NO: 3118613 - DNA, 25 bp, Homo sapien
ggcctcccgctgtccccaacaccca

SEQ ID NO: 3118614 - DNA, 25 bp, Homo sapien
gcccggcctcccgctgtccccaaca

SEQ ID NO: 3118615 - DNA, 25 bp, Homo sapien
gcctcccgctgtccccaacacccac

SEQ ID NO: 3118616 - DNA, 25 bp, Homo sapien
cacagcatgtcatcgcggacgattt

SEQ ID NO: 3118617 - DNA, 25 bp, Homo sapien
tatggaggccggtgtgatattccgc

SEQ ID NO: 3118618 - DNA, 25 bp, Homo sapien
tttgaaagctgtggcccgtatggag

SEQ ID NO: 3118619 - DNA, 25 bp, Homo sapien
ccacctccttcagcgggtatggcgg

SEQ ID NO: 3118620 - DNA, 25 bp, Homo sapien
cttgcagaccaggggccctccagag

SEQ ID NO: 3118621 - DNA, 25 bp, Homo sapien
ttgcagaccaggggccctccagagt

SEQ ID NO: 3118622 - DNA, 25 bp, Homo sapien
agaccaggggccctccagagtcacc

SEQ ID NO: 3118623 - DNA, 25 bp, Homo sapien
gcagaccaggggccctccagagtca

SEQ ID NO: 3118624 - DNA, 25 bp, Homo sapien
gtgtagatgccaggccggttgggct

SEQ ID NO: 3118625 - DNA, 25 bp, Homo sapien
gaaggtgtggggggcagtcaccacc

SEQ ID NO: 3118626 - DNA, 25 bp, Homo sapien
gggactcaggatgggggaaggtgtg

SEQ ID NO: 3118627 - DNA, 25 bp, Homo sapien
agtggtggtttggacaggaggggct

SEQ ID NO: 3118628 - DNA, 25 bp, Homo sapien
cagtcaccacctgggtaggaagcag

SEQ ID NO: 3118629 - DNA, 25 bp, Homo sapien
cgctccttgcatcctgggcttgtgt

SEQ ID NO: 3118630 - DNA, 25 bp, Homo sapien
tggtgacttgcactctcctggagct

SEQ ID NO: 3118631 - DNA, 25 bp, Homo sapien
tccaggcaccgagaagtgaaccctt

SEQ ID NO: 3118632 - DNA, 25 bp, Homo sapien
aaagaggagaacaggctccaggcac

SEQ ID NO: 3118633 - DNA, 25 bp, Homo sapien
taatgcctgcggctaccgctgtctc

SEQ ID NO: 3118634 - DNA, 25 bp, Homo sapien
tcggctgtgatgcaacgtgggcagg

SEQ ID NO: 3118635 - DNA, 25 bp, Homo sapien
gctgggggttgcattgggtaatgcc

SEQ ID NO: 3118636 - DNA, 25 bp, Homo sapien
tcctcgggtcggctgtgatgcaacg

SEQ ID NO: 3118637 - DNA, 25 bp, Homo sapien
cagacagcccactcacgggaggaat

SEQ ID NO: 3118638 - DNA, 25 bp, Homo sapien
ggatgcgaggccctggaagcatgcc

SEQ ID NO: 3118639 - DNA, 25 bp, Homo sapien
cctcccgagcgccagcaggccatgg

SEQ ID NO: 3118640 - DNA, 25 bp, Homo sapien
acgcagacagcccactcacgggagg

SEQ ID NO: 3118641 - DNA, 25 bp, Homo sapien
tcaggcggttgttaactgcctgtgt

SEQ ID NO: 3118642 - DNA, 25 bp, Homo sapien
gcctgtgtaacataatacttgttgc

SEQ ID NO: 3118643 - DNA, 25 bp, Homo sapien
cgggagcatcagtcgtccttcgggc

SEQ ID NO: 3118644 - DNA, 25 bp, Homo sapien
tcagtcgtccttcgggcgatggtca

SEQ ID NO: 3118645 - DNA, 25 bp, Homo sapien
attgctgggcccatgacagcagcag

SEQ ID NO: 3118646 - DNA, 25 bp, Homo sapien
gattgctgggcccatgacagcagca

SEQ ID NO: 3118647 - DNA, 25 bp, Homo sapien
gaccgctgtggcattctgagtcaca

SEQ ID NO: 3118648 - DNA, 25 bp, Homo sapien
aggttgcagcaaaggagccgtccaa

SEQ ID NO: 3118649 - DNA, 25 bp, Homo sapien
agaccgctgtggcattctgagtcac

SEQ ID NO: 3118650 - DNA, 25 bp, Homo sapien
agcaaaggagccgtccaaatcccac

SEQ ID NO: 3118651 - DNA, 25 bp, Homo sapien
gattggacggaacctctcggattcc

SEQ ID NO: 3118652 - DNA, 25 bp, Homo sapien
tttcccagggtttgctctaggtctg

SEQ ID NO: 3118653 - DNA, 25 bp, Homo sapien
tccctggcagaactcgaatgcagcg

SEQ ID NO: 3118654 - DNA, 25 bp, Homo sapien
tgcagcgtgagctgggcacttttcc

SEQ ID NO: 3118655 - DNA, 25 bp, Homo sapien
agacagaaggaccatcgaaggagaa

SEQ ID NO: 3118656 - DNA, 25 bp, Homo sapien
tggccgctggccgtccagtagtcct

SEQ ID NO: 3118657 - DNA, 25 bp, Homo sapien
ggtgacccggtgaagagggcaggga

SEQ ID NO: 3118658 - DNA, 25 bp, Homo sapien
acatgcgtaggtttggccgctggcc

SEQ ID NO: 3118659 - DNA, 25 bp, Homo sapien
tggtgaaatacgctgtaggtcacat

SEQ ID NO: 3118660 - DNA, 25 bp, Homo sapien
ccgcggttctcaggtttcacctgac

SEQ ID NO: 3118661 - DNA, 25 bp, Homo sapien
tgcccccgcggttctcaggtttcac

SEQ ID NO: 3118662 - DNA, 25 bp, Homo sapien
ccccgcggttctcaggtttcacctg

SEQ ID NO: 3118663 - DNA, 25 bp, Homo sapien
ttgcccccgcggttctcaggtttca

SEQ ID NO: 3118664 - DNA, 25 bp, Homo sapien
cagggctacagaaatcgctcacgtt

SEQ ID NO: 3118665 - DNA, 25 bp, Homo sapien
gtcgtgccctcttgcggatccagga

SEQ ID NO: 3118666 - DNA, 25 bp, Homo sapien
aatgaatgaacgaaccagccggaac

SEQ ID NO: 3118667 - DNA, 25 bp, Homo sapien
gagcgggtgtacacaggcatgttca

SEQ ID NO: 3118668 - DNA, 25 bp, Homo sapien
ggcaggtgcgtgaagccccatgagg

SEQ ID NO: 3118669 - DNA, 25 bp, Homo sapien
tgccgggacccaagcgacggcagca

SEQ ID NO: 3118670 - DNA, 25 bp, Homo sapien
tgccgggtccgcaggtctgggtggc

SEQ ID NO: 3118671 - DNA, 25 bp, Homo sapien
ggcaagagggctgtgccgggaccca

SEQ ID NO: 3118672 - DNA, 25 bp, Homo sapien
aatgaccgtcgtgagcactgcagag

SEQ ID NO: 3118673 - DNA, 25 bp, Homo sapien
cactgcagagaataaagagagcgcc

SEQ ID NO: 3118674 - DNA, 25 bp, Homo sapien
gggtctccagtcctggtcgtggcca

SEQ ID NO: 3118675 - DNA, 25 bp, Homo sapien
tggccagcacagttggaatgaccgt

SEQ ID NO: 3118676 - DNA, 25 bp, Homo sapien
gaccactgaggcctaaggatcctct

SEQ ID NO: 3118677 - DNA, 25 bp, Homo sapien
actgaggcctaaggatcctctgaag

SEQ ID NO: 3118678 - DNA, 25 bp, Homo sapien
aagaccactgaggcctaaggatcct

SEQ ID NO: 3118679 - DNA, 25 bp, Homo sapien
gccgggggtcaaagaccactgaggc

SEQ ID NO: 3118680 - DNA, 25 bp, Homo sapien
cagccacaggtcccggaggtttcct

SEQ ID NO: 3118681 - DNA, 25 bp, Homo sapien
tccagccacaggtcccggaggtttc

SEQ ID NO: 3118682 - DNA, 25 bp, Homo sapien
cgtctgtaaactccccttcgggctg

SEQ ID NO: 3118683 - DNA, 25 bp, Homo sapien
gaagccgagatctccaaaggctccc

SEQ ID NO: 3118684 - DNA, 25 bp, Homo sapien
tccccgatgtgagggagcgtctgta

SEQ ID NO: 3118685 - DNA, 25 bp, Homo sapien
gggaaaaaggaagccgagatctcca

SEQ ID NO: 3118686 - DNA, 25 bp, Homo sapien
gcggacaggtggaggaccgagcggg

SEQ ID NO: 3118687 - DNA, 25 bp, Homo sapien
cggcgagcgtagcggacaggtggag

SEQ ID NO: 3118688 - DNA, 25 bp, Homo sapien
gcctgcctcgcgcgccgctcctgcc

SEQ ID NO: 3118689 - DNA, 25 bp, Homo sapien
tgccctctgcacgcctgcctcgcgc

SEQ ID NO: 3118690 - DNA, 25 bp, Homo sapien
gcggcccatcctatccgtccgcggg

SEQ ID NO: 3118691 - DNA, 25 bp, Homo sapien
ccgggcccaacaggagtagaggcct

SEQ ID NO: 3118692 - DNA, 25 bp, Homo sapien
gatgttgcaatccaagactctcccc

SEQ ID NO: 3118693 - DNA, 25 bp, Homo sapien
ggcaccgaaaacaagcccgctcgcc

SEQ ID NO: 3118694 - DNA, 25 bp, Homo sapien
cgtcttccgttgcataggttctcta

SEQ ID NO: 3118695 - DNA, 25 bp, Homo sapien
caatcagggcaaactgaggatccgt

SEQ ID NO: 3118696 - DNA, 25 bp, Homo sapien
tctacccaaaggcaacgtttcttga

SEQ ID NO: 3118697 - DNA, 25 bp, Homo sapien
tgcgattcaagcgtgactacaggcc

SEQ ID NO: 3118698 - DNA, 25 bp, Homo sapien
tctgaagcaagatcccaaaccctga

SEQ ID NO: 3118699 - DNA, 25 bp, Homo sapien
cccaggccccgagaatgtttctgaa

SEQ ID NO: 3118700 - DNA, 25 bp, Homo sapien
cagcaatcacccagtggcctaggga

SEQ ID NO: 3118701 - DNA, 25 bp, Homo sapien
agatcccaaaccctgagacaccata

SEQ ID NO: 3118702 - DNA, 25 bp, Homo sapien
tgacagcaccgacttcagagcaact

SEQ ID NO: 3118703 - DNA, 25 bp, Homo sapien
ggagcggcccgaaagtctgccttct

SEQ ID NO: 3118704 - DNA, 25 bp, Homo sapien
gggaggtattcccttctgcaagacc

SEQ ID NO: 3118705 - DNA, 25 bp, Homo sapien
ctgcagtcgggagacgcttacctgg

SEQ ID NO: 3118706 - DNA, 25 bp, Homo sapien
ccagctgcgacttgaggactcacag

SEQ ID NO: 3118707 - DNA, 25 bp, Homo sapien
tatggtcaggcagggttcgagccca

SEQ ID NO: 3118708 - DNA, 25 bp, Homo sapien
ggtccacgactaagtccaagacagg

SEQ ID NO: 3118709 - DNA, 25 bp, Homo sapien
aagcaggcgaaggaacctgggtcct

SEQ ID NO: 3118710 - DNA, 25 bp, Homo sapien
ctgcaggtgaatttggctccttttc

SEQ ID NO: 3118711 - DNA, 25 bp, Homo sapien
tcaccaaacacagatcctcagggca

SEQ ID NO: 3118712 - DNA, 25 bp, Homo sapien
tgaatttggctccttttcaccaaac

SEQ ID NO: 3118713 - DNA, 25 bp, Homo sapien
accaaacacagatcctcagggcagc

SEQ ID NO: 3118714 - DNA, 25 bp, Homo sapien
ttctgaagctgctagagccgcctgc

SEQ ID NO: 3118715 - DNA, 25 bp, Homo sapien
gcactcgttagggagacaaggccca

SEQ ID NO: 3118716 - DNA, 25 bp, Homo sapien
tctgggtggcacgatgacttcccca

SEQ ID NO: 3118717 - DNA, 25 bp, Homo sapien
cagacccacggacgaaggagctctg

SEQ ID NO: 3118718 - DNA, 25 bp, Homo sapien
agctccacctgcgtcggagccgccg

SEQ ID NO: 3118719 - DNA, 25 bp, Homo sapien
ctccacctgcgtcggagccgccgca

SEQ ID NO: 3118720 - DNA, 25 bp, Homo sapien
gcagctccacctgcgtcggagccgc

SEQ ID NO: 3118721 - DNA, 25 bp, Homo sapien
ctcgcagccgcagaaaggggccagg

SEQ ID NO: 3118722 - DNA, 25 bp, Homo sapien
tgtcctagaatagccacaagggccc

SEQ ID NO: 3118723 - DNA, 25 bp, Homo sapien
tccatgggaacactgaagctactac

SEQ ID NO: 3118724 - DNA, 25 bp, Homo sapien
caagaattcaaacctaagtgtgtgc

SEQ ID NO: 3118725 - DNA, 25 bp, Homo sapien
gatatctcaacaccaaacaagagcc

SEQ ID NO: 3118726 - DNA, 25 bp, Homo sapien
ccagcagcctcaatgccaccctcaa

SEQ ID NO: 3118727 - DNA, 25 bp, Homo sapien
gcctcaatgccaccctcaactgtca

SEQ ID NO: 3118728 - DNA, 25 bp, Homo sapien
cagcctcaatgccaccctcaactgt

SEQ ID NO: 3118729 - DNA, 25 bp, Homo sapien
gggccagcagcctcaatgccaccct

SEQ ID NO: 3118730 - DNA, 25 bp, Homo sapien
gggcttggcaccttcgcctttgcgt

SEQ ID NO: 3118731 - DNA, 25 bp, Homo sapien
ggcaccttcgcctttgcgttctcgg

SEQ ID NO: 3118732 - DNA, 25 bp, Homo sapien
tttgcgttctcggcgggagcctgtc

SEQ ID NO: 3118733 - DNA, 25 bp, Homo sapien
gggagcctgtcggccagcactgtca

SEQ ID NO: 3118734 - DNA, 25 bp, Homo sapien
agagcagaacaagtaccacagggca

SEQ ID NO: 3118735 - DNA, 25 bp, Homo sapien
gaccaggtccctgatcagaggcagc

SEQ ID NO: 3118736 - DNA, 25 bp, Homo sapien
cctgatcagaggcagcggcacacac

SEQ ID NO: 3118737 - DNA, 25 bp, Homo sapien
gacagacgggtcctgcagggcaggg

SEQ ID NO: 3118738 - DNA, 25 bp, Homo sapien
tctcttcttgcaagccgtcgtccga

SEQ ID NO: 3118739 - DNA, 25 bp, Homo sapien
gccctggtctgcgacacatgctgcg

SEQ ID NO: 3118740 - DNA, 25 bp, Homo sapien
gggtcctcaccataccatcaggtgg

SEQ ID NO: 3118741 - DNA, 25 bp, Homo sapien
cccagcagggactctcttcttgcaa

SEQ ID NO: 3118742 - DNA, 25 bp, Homo sapien
tggcccgcagcaggcaggcttgctc

SEQ ID NO: 3118743 - DNA, 25 bp, Homo sapien
ccgcagcaggcaggcttgctcctaa

SEQ ID NO: 3118744 - DNA, 25 bp, Homo sapien
gcaggcaggcttgctcctaacatac

SEQ ID NO: 3118745 - DNA, 25 bp, Homo sapien
cacgtggcccgcagcaggcaggctt

SEQ ID NO: 3118746 - DNA, 25 bp, Homo sapien
atgctttcctctcctgggcgagtct

SEQ ID NO: 3118747 - DNA, 25 bp, Homo sapien
cgagtctgctgagggcgatccccga

SEQ ID NO: 3118748 - DNA, 25 bp, Homo sapien
ctttcctctcctgggcgagtctgct

SEQ ID NO: 3118749 - DNA, 25 bp, Homo sapien
cctctcctgggcgagtctgctgagg

SEQ ID NO: 3118750 - DNA, 25 bp, Homo sapien
ttctttcctggaatggcgcactccc

SEQ ID NO: 3118751 - DNA, 25 bp, Homo sapien
catgaggttcatcgtgccatcggga

SEQ ID NO: 3118752 - DNA, 25 bp, Homo sapien
tcgtgccatcgggattttttgttgg

SEQ ID NO: 3118753 - DNA, 25 bp, Homo sapien
ctcccagttcatgaggttcatcgtg

SEQ ID NO: 3118754 - DNA, 25 bp, Homo sapien
ctgctgagccccgacaggcaggagg

SEQ ID NO: 3118755 - DNA, 25 bp, Homo sapien
catctgctgagccccgacaggcagg

SEQ ID NO: 3118756 - DNA, 25 bp, Homo sapien
gctgagccccgacaggcaggaggcc

SEQ ID NO: 3118757 - DNA, 25 bp, Homo sapien
tgccgcacgcatctgctgagccccg

SEQ ID NO: 3118758 - DNA, 25 bp, Homo sapien
gggatctgagcggagtatccccatg

SEQ ID NO: 3118759 - DNA, 25 bp, Homo sapien
tctgagctcaagtcctcacggggcg

SEQ ID NO: 3118760 - DNA, 25 bp, Homo sapien
tgtgacaagggtggccgtcacggac

SEQ ID NO: 3118761 - DNA, 25 bp, Homo sapien
ggatctgagctgttgaccgcggcct

SEQ ID NO: 3118762 - DNA, 25 bp, Homo sapien
tttcagagcgaaacccagaggctgg

SEQ ID NO: 3118763 - DNA, 25 bp, Homo sapien
cccagagagtgagtcggaaaggccc

SEQ ID NO: 3118764 - DNA, 25 bp, Homo sapien
tcaaccagaaatgccctcggtaggg

SEQ ID NO: 3118765 - DNA, 25 bp, Homo sapien
tgaaccttatgtgcaagccggcctg

SEQ ID NO: 3118766 - DNA, 25 bp, Homo sapien
tgaaaagcatccgtagtttaaacaa

SEQ ID NO: 3118767 - DNA, 25 bp, Homo sapien
atctttgaaaagcatccgtagttta

SEQ ID NO: 3118768 - DNA, 25 bp, Homo sapien
tctttgaaaagcatccgtagtttaa

SEQ ID NO: 3118769 - DNA, 25 bp, Homo sapien
ttgaaaagcatccgtagtttaaaca

SEQ ID NO: 3118770 - DNA, 25 bp, Homo sapien
gactaagtctattacgtgcaccgcc

SEQ ID NO: 3118771 - DNA, 25 bp, Homo sapien
tcatcgccaacaatcactgagggtc

SEQ ID NO: 3118772 - DNA, 25 bp, Homo sapien
actcggagtggtggcgcttctgcac

SEQ ID NO: 3118773 - DNA, 25 bp, Homo sapien
tccaggacactgaacagggagctac

SEQ ID NO: 3118774 - DNA, 25 bp, Homo sapien
tgtaggctcaaagtcgaacctggcc

SEQ ID NO: 3118775 - DNA, 25 bp, Homo sapien
tgaagcaagtctcgaccagctggtg

SEQ ID NO: 3118776 - DNA, 25 bp, Homo sapien
acgtgttaatgcgtggaactcacca

SEQ ID NO: 3118777 - DNA, 25 bp, Homo sapien
cgatttccagctatgggacggcagg

SEQ ID NO: 3118778 - DNA, 25 bp, Homo sapien
gtacaatgtcgtgtgttcccctcca

SEQ ID NO: 3118779 - DNA, 25 bp, Homo sapien
ccttgctcgctgaaatgatataaaa

SEQ ID NO: 3118780 - DNA, 25 bp, Homo sapien
ggtacagaggtcctgaaccaatctt

SEQ ID NO: 3118781 - DNA, 25 bp, Homo sapien
tattctacagttttcggtacagagg

SEQ ID NO: 3118782 - DNA, 25 bp, Homo sapien
tcctgagtgcgaacacgcgtgagcg

SEQ ID NO: 3118783 - DNA, 25 bp, Homo sapien
cctttcctgtgagggacacgctgga

SEQ ID NO: 3118784 - DNA, 25 bp, Homo sapien
tcaatgctacggaaggacacacagt

SEQ ID NO: 3118785 - DNA, 25 bp, Homo sapien
tagtgcagccggaggaattaccaga

SEQ ID NO: 3118786 - DNA, 25 bp, Homo sapien
atatacgggcttttaggaccctgtg

SEQ ID NO: 3118787 - DNA, 25 bp, Homo sapien
ctgcttccaggatatacgggctttt

SEQ ID NO: 3118788 - DNA, 25 bp, Homo sapien
gagacgtccagggacatagccaacg

SEQ ID NO: 3118789 - DNA, 25 bp, Homo sapien
ccagagtcggctgttccgacgcaga

SEQ ID NO: 3118790 - DNA, 25 bp, Homo sapien
tatccacctttgcacacagggaaca

SEQ ID NO: 3118791 - DNA, 25 bp, Homo sapien
ggcactgtcccagagtcacgtcctt

SEQ ID NO: 3118792 - DNA, 25 bp, Homo sapien
ccgcagccgagacgaagctgtgtct

SEQ ID NO: 3118793 - DNA, 25 bp, Homo sapien
gccaggcagtctgggaacacaggcc

SEQ ID NO: 3118794 - DNA, 25 bp, Homo sapien
tgaaataatggtggttcgaatttac

SEQ ID NO: 3118795 - DNA, 25 bp, Homo sapien
cgaagggtacacattcgggtgaaat

SEQ ID NO: 3118796 - DNA, 25 bp, Homo sapien
gtacacattcgggtgaaataatggt

SEQ ID NO: 3118797 - DNA, 25 bp, Homo sapien
actgtccccgaagggtacacattcg

SEQ ID NO: 3118798 - DNA, 25 bp, Homo sapien
gagcagtttgaaagggagacaccgt

SEQ ID NO: 3118799 - DNA, 25 bp, Homo sapien
agagaatgaccacagacccacgtgt

SEQ ID NO: 3118800 - DNA, 25 bp, Homo sapien
gagacaccgtgagactcggcctcag

SEQ ID NO: 3118801 - DNA, 25 bp, Homo sapien
aacacaagacgggtgtgagcagttt

SEQ ID NO: 3118802 - DNA, 25 bp, Homo sapien
gtaaatcgtgtaggcctctgcttga

SEQ ID NO: 3118803 - DNA, 25 bp, Homo sapien
tcgtgtaggcctctgcttgagctgg

SEQ ID NO: 3118804 - DNA, 25 bp, Homo sapien
cagtaaatcgtgtaggcctctgctt

SEQ ID NO: 3118805 - DNA, 25 bp, Homo sapien
aatcgtgtaggcctctgcttgagct

SEQ ID NO: 3118806 - DNA, 25 bp, Homo sapien
ctccactcccgtcctgccaggcggc

SEQ ID NO: 3118807 - DNA, 25 bp, Homo sapien
atgccccccgaccttccccacagag

SEQ ID NO: 3118808 - DNA, 25 bp, Homo sapien
cactcccgtcctgccaggcggcctt

SEQ ID NO: 3118809 - DNA, 25 bp, Homo sapien
accctggctgtccgtagggtgagcc

SEQ ID NO: 3118810 - DNA, 25 bp, Homo sapien
tgggtttctcaacgctgcaggcgga

SEQ ID NO: 3118811 - DNA, 25 bp, Homo sapien
gaaaccaggtgcttttcctcacgac

SEQ ID NO: 3118812 - DNA, 25 bp, Homo sapien
cactgtttggctgtcgtctgcatcc

SEQ ID NO: 3118813 - DNA, 25 bp, Homo sapien
cagggtccgtgtgacagcatcacgt

SEQ ID NO: 3118814 - DNA, 25 bp, Homo sapien
agggagggcaccttgcagacacctg

SEQ ID NO: 3118815 - DNA, 25 bp, Homo sapien
tctgtgccaccctcggccaccaggg

SEQ ID NO: 3118816 - DNA, 25 bp, Homo sapien
ctgtgccaccctcggccaccaggga

SEQ ID NO: 3118817 - DNA, 25 bp, Homo sapien
ctgggctcaggtaacgtcccacagt

SEQ ID NO: 3118818 - DNA, 25 bp, Homo sapien
cacacttggcctagaaatcattttc

SEQ ID NO: 3118819 - DNA, 25 bp, Homo sapien
tggcctagaaatcattttccaggca

SEQ ID NO: 3118820 - DNA, 25 bp, Homo sapien
aacgtcccacagtggccttgcaaag

SEQ ID NO: 3118821 - DNA, 25 bp, Homo sapien
agggcaggaacacggtccaaggcct

SEQ ID NO: 3118822 - DNA, 25 bp, Homo sapien
cacaaagggtgcttttcaagcggat

SEQ ID NO: 3118823 - DNA, 25 bp, Homo sapien
ggaaaaacgatctgaaacccgcaca

SEQ ID NO: 3118824 - DNA, 25 bp, Homo sapien
aagaacgtttgtttacgtgcacgca

SEQ ID NO: 3118825 - DNA, 25 bp, Homo sapien
cgtcatagtaacagaagcagaagcc

SEQ ID NO: 3118826 - DNA, 25 bp, Homo sapien
cacgctgggtgaacgtggtgttcaa

SEQ ID NO: 3118827 - DNA, 25 bp, Homo sapien
cagggcctgcaacatcgttgccgat

SEQ ID NO: 3118828 - DNA, 25 bp, Homo sapien
catgctggctctgacgtggctgaga

SEQ ID NO: 3118829 - DNA, 25 bp, Homo sapien
caaacttcttggcttgtgctcggac

SEQ ID NO: 3118830 - DNA, 25 bp, Homo sapien
ttatgagggcgcaaacttcttggct

SEQ ID NO: 3118831 - DNA, 25 bp, Homo sapien
tgtgctcggacccttttctcgtact

SEQ ID NO: 3118832 - DNA, 25 bp, Homo sapien
tttctcgtactccactctgttttgg

SEQ ID NO: 3118833 - DNA, 25 bp, Homo sapien
tataaacacaaaggaagtggcgcag

SEQ ID NO: 3118834 - DNA, 25 bp, Homo sapien
gcaattcagcgaatcgagaccgcac

SEQ ID NO: 3118835 - DNA, 25 bp, Homo sapien
tggcgcagaaccgagatgctgacct

SEQ ID NO: 3118836 - DNA, 25 bp, Homo sapien
ttttgacgatgccacaaggtcgctg

SEQ ID NO: 3118837 - DNA, 25 bp, Homo sapien
aaaggtgaccgcgtttcagagctct

SEQ ID NO: 3118838 - DNA, 25 bp, Homo sapien
cgattggcgagaaacatccgttact

SEQ ID NO: 3118839 - DNA, 25 bp, Homo sapien
cttgaaacgaaactgaggagggcca

SEQ ID NO: 3118840 - DNA, 25 bp, Homo sapien
tcagacgtcagaccgagagctcagt

SEQ ID NO: 3118841 - DNA, 25 bp, Homo sapien
ctggcaacttgtcgtcatggtaatc

SEQ ID NO: 3118842 - DNA, 25 bp, Homo sapien
tcagcggatcccagtgagtgatggc

SEQ ID NO: 3118843 - DNA, 25 bp, Homo sapien
tcgtcatggtaatcatgaggaaggc

SEQ ID NO: 3118844 - DNA, 25 bp, Homo sapien
aggcttcccatcagcggatcccagt

SEQ ID NO: 3118845 - DNA, 25 bp, Homo sapien
caagtcaatgagttgcttatggatg

SEQ ID NO: 3118846 - DNA, 25 bp, Homo sapien
agtcaatgagttgcttatggatgct

SEQ ID NO: 3118847 - DNA, 25 bp, Homo sapien
actgtgcaagtcaatgagttgctta

SEQ ID NO: 3118848 - DNA, 25 bp, Homo sapien
tgtgcaagtcaatgagttgcttatg

SEQ ID NO: 3118849 - DNA, 25 bp, Homo sapien
taatcaatttattaaaatagttgac

SEQ ID NO: 3118850 - DNA, 25 bp, Homo sapien
tttcaactggtaatcaatttattaa

SEQ ID NO: 3118851 - DNA, 25 bp, Homo sapien
ctggtaatcaatttattaaaatagt

SEQ ID NO: 3118852 - DNA, 25 bp, Homo sapien
ttttcaactggtaatcaatttatta

SEQ ID NO: 3118853 - DNA, 25 bp, Homo sapien
tgcccttggtcgaatacagctggac

SEQ ID NO: 3118854 - DNA, 25 bp, Homo sapien
ccttggtcgaatacagctggacact

SEQ ID NO: 3118855 - DNA, 25 bp, Homo sapien
ctgcccttggtcgaatacagctgga

SEQ ID NO: 3118856 - DNA, 25 bp, Homo sapien
tggtcgaatacagctggacactcgc

SEQ ID NO: 3118857 - DNA, 25 bp, Homo sapien
gcgcgcgccgacgactgagcaactg

SEQ ID NO: 3118858 - DNA, 25 bp, Homo sapien
gcgccgacgactgagcaactgctgg

SEQ ID NO: 3118859 - DNA, 25 bp, Homo sapien
gacgccgaggcacagctaccgctcc

SEQ ID NO: 3118860 - DNA, 25 bp, Homo sapien
actgagcaactgctgggcggacgcc

SEQ ID NO: 3118861 - DNA, 25 bp, Homo sapien
ccctttgccgagtggggctgaagga

SEQ ID NO: 3118862 - DNA, 25 bp, Homo sapien
gctttgcactcgcagggatttcggg

SEQ ID NO: 3118863 - DNA, 25 bp, Homo sapien
gggccgctttgcactcgcagggatt

SEQ ID NO: 3118864 - DNA, 25 bp, Homo sapien
ccgctttgcactcgcagggatttcg

SEQ ID NO: 3118865 - DNA, 25 bp, Homo sapien
tccagtcgaaccccgggaatctgca

SEQ ID NO: 3118866 - DNA, 25 bp, Homo sapien
tgcattctaacaagcgctgccggtg

SEQ ID NO: 3118867 - DNA, 25 bp, Homo sapien
attctaacaagcgctgccggtggcc

SEQ ID NO: 3118868 - DNA, 25 bp, Homo sapien
ccagtcgaaccccgggaatctgcat

SEQ ID NO: 3118869 - DNA, 25 bp, Homo sapien
gcgggcccgctgcaaacgctgctcc

SEQ ID NO: 3118870 - DNA, 25 bp, Homo sapien
ccgctgcaaacgctgctccccgggg

SEQ ID NO: 3118871 - DNA, 25 bp, Homo sapien
gcccgctgcaaacgctgctccccgg

SEQ ID NO: 3118872 - DNA, 25 bp, Homo sapien
ctggcgggcccgctgcaaacgctgc

SEQ ID NO: 3118873 - DNA, 25 bp, Homo sapien
cagatggcccctgcgaagccgatgg

SEQ ID NO: 3118874 - DNA, 25 bp, Homo sapien
tcctccagatggcccctgcgaagcc

SEQ ID NO: 3118875 - DNA, 25 bp, Homo sapien
cctgcgaagccgatggcggtgccca

SEQ ID NO: 3118876 - DNA, 25 bp, Homo sapien
ccctgcgaagccgatggcggtgccc

SEQ ID NO: 3118877 - DNA, 25 bp, Homo sapien
ggaaggacgggcacacctgcacctg

SEQ ID NO: 3118878 - DNA, 25 bp, Homo sapien
ggtcggcgctggcactccctgggtc

SEQ ID NO: 3118879 - DNA, 25 bp, Homo sapien
tgctcttaatgtccagcaaggtcga

SEQ ID NO: 3118880 - DNA, 25 bp, Homo sapien
tcctgctcagtcctgcggcggaagg

SEQ ID NO: 3118881 - DNA, 25 bp, Homo sapien
tgaggcgcatgtgggcaaagaactc

SEQ ID NO: 3118882 - DNA, 25 bp, Homo sapien
ctcgaggcacggcaagccctgtctg

SEQ ID NO: 3118883 - DNA, 25 bp, Homo sapien
gaggcacggcaagccctgtctgcct

SEQ ID NO: 3118884 - DNA, 25 bp, Homo sapien
ccccttcttcagcatgaggcgcatg

SEQ ID NO: 3118885 - DNA, 25 bp, Homo sapien
gggcccagggtgagggctctgacgg

SEQ ID NO: 3118886 - DNA, 25 bp, Homo sapien
ggtgagggctctgacggcagggaga

SEQ ID NO: 3118887 - DNA, 25 bp, Homo sapien
ggcccagggtgagggctctgacggc

SEQ ID NO: 3118888 - DNA, 25 bp, Homo sapien
cagggtgagggctctgacggcaggg

SEQ ID NO: 3118889 - DNA, 25 bp, Homo sapien
caggctccgggggtgctggcgagcc

SEQ ID NO: 3118890 - DNA, 25 bp, Homo sapien
gggatccacaggctccgggggtgct

SEQ ID NO: 3118891 - DNA, 25 bp, Homo sapien
gggtgctggcgagccactgcgcagg

SEQ ID NO: 3118892 - DNA, 25 bp, Homo sapien
tccgggggtgctggcgagccactgc

SEQ ID NO: 3118893 - DNA, 25 bp, Homo sapien
tacccgcgcggtaaagcaccgtgta

SEQ ID NO: 3118894 - DNA, 25 bp, Homo sapien
tcagggcccatggtacccgcgcggt

SEQ ID NO: 3118895 - DNA, 25 bp, Homo sapien
agggcctcctcgtagagcatctcca

SEQ ID NO: 3118896 - DNA, 25 bp, Homo sapien
gtaaagcaccgtgtacagggcctcc

SEQ ID NO: 3118897 - DNA, 25 bp, Homo sapien
ttggccttcctcactcgctcgatgg

SEQ ID NO: 3118898 - DNA, 25 bp, Homo sapien
tggcctcagtgtgctcctcaaggct

SEQ ID NO: 3118899 - DNA, 25 bp, Homo sapien
tcactcgctcgatggcctcagtgtg

SEQ ID NO: 3118900 - DNA, 25 bp, Homo sapien
gctcctcaaggctggtgccaaacac

SEQ ID NO: 3118901 - DNA, 25 bp, Homo sapien
gttcttggcacgcatgacagagact

SEQ ID NO: 3118902 - DNA, 25 bp, Homo sapien
cttggcacgcatgacagagactttc

SEQ ID NO: 3118903 - DNA, 25 bp, Homo sapien
cagaaggttcttggcacgcatgaca

SEQ ID NO: 3118904 - DNA, 25 bp, Homo sapien
acgcatgacagagactttcagggca

SEQ ID NO: 3118905 - DNA, 25 bp, Homo sapien
tgcggaagccgaagcgctgctcctt

SEQ ID NO: 3118906 - DNA, 25 bp, Homo sapien
accgcgcttgctgcccttgcggaag

SEQ ID NO: 3118907 - DNA, 25 bp, Homo sapien
ctcggtgacctggatgcacttggca

SEQ ID NO: 3118908 - DNA, 25 bp, Homo sapien
agcatgcagtatgggtcgctgaagc

SEQ ID NO: 3118909 - DNA, 25 bp, Homo sapien
tgcagctggtccgtgctcacatcct

SEQ ID NO: 3118910 - DNA, 25 bp, Homo sapien
agctggtccgtgctcacatcctcaa

SEQ ID NO: 3118911 - DNA, 25 bp, Homo sapien
tggtccgtgctcacatcctcaatct

SEQ ID NO: 3118912 - DNA, 25 bp, Homo sapien
caggtgcagctggtccgtgctcaca

SEQ ID NO: 3118913 - DNA, 25 bp, Homo sapien
ccagggatacatcgtcgtcatgatc

SEQ ID NO: 3118914 - DNA, 25 bp, Homo sapien
gcttcctgcacgcttctaccaggga

SEQ ID NO: 3118915 - DNA, 25 bp, Homo sapien
gcccttcaggccgatgacttcattc

SEQ ID NO: 3118916 - DNA, 25 bp, Homo sapien
tcaggccgatgacttcattcagctt

SEQ ID NO: 3118917 - DNA, 25 bp, Homo sapien
ccccaggaagtcatcggtgtggtcc

SEQ ID NO: 3118918 - DNA, 25 bp, Homo sapien
cggacaggtatgttgaggcacccca

SEQ ID NO: 3118919 - DNA, 25 bp, Homo sapien
tcggtgggtcctgctgtcccgtttg

SEQ ID NO: 3118920 - DNA, 25 bp, Homo sapien
cgggctgacttgacgatctgtttga

SEQ ID NO: 3118921 - DNA, 25 bp, Homo sapien
ggcagtgtccctgcacacgcgaggc

SEQ ID NO: 3118922 - DNA, 25 bp, Homo sapien
gtgtccctgcacacgcgaggcactg

SEQ ID NO: 3118923 - DNA, 25 bp, Homo sapien
cagcttgaaccagcggtcgacgcca

SEQ ID NO: 3118924 - DNA, 25 bp, Homo sapien
gcactggagcgtggctccagcttga

SEQ ID NO: 3118925 - DNA, 25 bp, Homo sapien
caggtgggacaggaagccggatcgc

SEQ ID NO: 3118926 - DNA, 25 bp, Homo sapien
gaagccggatcgcccgcgctggctc

SEQ ID NO: 3118927 - DNA, 25 bp, Homo sapien
ggtgggacaggaagccggatcgccc

SEQ ID NO: 3118928 - DNA, 25 bp, Homo sapien
aggtgggacaggaagccggatcgcc

SEQ ID NO: 3118929 - DNA, 25 bp, Homo sapien
cagaggatggtggcggctggtgtgc

SEQ ID NO: 3118930 - DNA, 25 bp, Homo sapien
gcagaggatggtggcggctggtgtg

SEQ ID NO: 3118931 - DNA, 25 bp, Homo sapien
tggtggcggctggtgtgctgagctc

SEQ ID NO: 3118932 - DNA, 25 bp, Homo sapien
gcaggtttgatggtggcggctgctg

SEQ ID NO: 3118933 - DNA, 25 bp, Homo sapien
tagtccagcgtgcaggtttgatggt

SEQ ID NO: 3118934 - DNA, 25 bp, Homo sapien
ggtggcggctgctgacctgccagtg

SEQ ID NO: 3118935 - DNA, 25 bp, Homo sapien
gtggcggctgctgacctgccagtgc

SEQ ID NO: 3118936 - DNA, 25 bp, Homo sapien
ccaggcggtggacagcggtgctgtt

SEQ ID NO: 3118937 - DNA, 25 bp, Homo sapien
cagctgcagcccgaactcagagaag

SEQ ID NO: 3118938 - DNA, 25 bp, Homo sapien
cagggaagtagtctcggagctggcg

SEQ ID NO: 3118939 - DNA, 25 bp, Homo sapien
gcggaaaggctatcagccaggctct

SEQ ID NO: 3118940 - DNA, 25 bp, Homo sapien
gtgggggcagcacgctgacgtgggg

SEQ ID NO: 3118941 - DNA, 25 bp, Homo sapien
ggtgggggcagcacgctgacgtggg

SEQ ID NO: 3118942 - DNA, 25 bp, Homo sapien
gtccatgttcagctccgactcgaag

SEQ ID NO: 3118943 - DNA, 25 bp, Homo sapien
cgactcgaaggggcagatctcaaag

SEQ ID NO: 3118944 - DNA, 25 bp, Homo sapien
ccatgttcagctccgactcgaaggg

SEQ ID NO: 3118945 - DNA, 25 bp, Homo sapien
actcgaaggggcagatctcaaagga

SEQ ID NO: 3118946 - DNA, 25 bp, Homo sapien
gctctcggggactcttgtcattcag

SEQ ID NO: 3118947 - DNA, 25 bp, Homo sapien
tgtcgtaccactcacggttgcctct

SEQ ID NO: 3118948 - DNA, 25 bp, Homo sapien
gggactcttgtcattcaggatcctg

SEQ ID NO: 3118949 - DNA, 25 bp, Homo sapien
tcaggatcctgtcgtaccactcacg

SEQ ID NO: 3118950 - DNA, 25 bp, Homo sapien
ctgcccgtacccctcatggccaggg

SEQ ID NO: 3118951 - DNA, 25 bp, Homo sapien
ctcggctgcccgtacccctcatggc

SEQ ID NO: 3118952 - DNA, 25 bp, Homo sapien
ctctcggctgcccgtacccctcatg

SEQ ID NO: 3118953 - DNA, 25 bp, Homo sapien
gcccgtacccctcatggccagggtc

SEQ ID NO: 3118954 - DNA, 25 bp, Homo sapien
tcatagacggcgtcagccagcacaa

SEQ ID NO: 3118955 - DNA, 25 bp, Homo sapien
tgtagcagaactgaaggtcatcata

SEQ ID NO: 3118956 - DNA, 25 bp, Homo sapien
gaagaggctggcgtacacactgtag

SEQ ID NO: 3118957 - DNA, 25 bp, Homo sapien
cacaaccagcccaggcaggcgctgt

SEQ ID NO: 3118958 - DNA, 25 bp, Homo sapien
gacgctccagctgccggaaggtcag

SEQ ID NO: 3118959 - DNA, 25 bp, Homo sapien
gaaggtcagggtgaagacgtccaca

SEQ ID NO: 3118960 - DNA, 25 bp, Homo sapien
ggtgaagacgtccacattgaggatg

SEQ ID NO: 3118961 - DNA, 25 bp, Homo sapien
cagacgctccagctgccggaaggtc

SEQ ID NO: 3118962 - DNA, 25 bp, Homo sapien
gggtcaggtagagctcaaagagccc

SEQ ID NO: 3118963 - DNA, 25 bp, Homo sapien
ggtcaggtagagctcaaagagcccc

SEQ ID NO: 3118964 - DNA, 25 bp, Homo sapien
agggtcaggtagagctcaaagagcc

SEQ ID NO: 3118965 - DNA, 25 bp, Homo sapien
ctggtccctcagcacttggaaccag

SEQ ID NO: 3118966 - DNA, 25 bp, Homo sapien
gtgtccatgtccacggctccctgaa

SEQ ID NO: 3118967 - DNA, 25 bp, Homo sapien
aggaagggggcgtggatgccagcca

SEQ ID NO: 3118968 - DNA, 25 bp, Homo sapien
cctcagcacttggaaccagagcttc

SEQ ID NO: 3118969 - DNA, 25 bp, Homo sapien
ggaggctggggttgctgaggaggct

SEQ ID NO: 3118970 - DNA, 25 bp, Homo sapien
gaggctggggttgcggaggaggccg

SEQ ID NO: 3118971 - DNA, 25 bp, Homo sapien
gggaggctggggttgcggaggaggc

SEQ ID NO: 3118972 - DNA, 25 bp, Homo sapien
ggctgggtttgctggggaggcaggg

SEQ ID NO: 3118973 - DNA, 25 bp, Homo sapien
acgccaggcgcacccacaactcctg

SEQ ID NO: 3118974 - DNA, 25 bp, Homo sapien
cctgggcagggtcaggccacgccag

SEQ ID NO: 3118975 - DNA, 25 bp, Homo sapien
tggaggaggcgtccacgggctccag

SEQ ID NO: 3118976 - DNA, 25 bp, Homo sapien
tgggcagggtcaggccacgccaggc

SEQ ID NO: 3118977 - DNA, 25 bp, Homo sapien
cagctccgtatagaagagggtggcc

SEQ ID NO: 3118978 - DNA, 25 bp, Homo sapien
ccgcccctggctgagtgtccacctt

SEQ ID NO: 3118979 - DNA, 25 bp, Homo sapien
tatagaagagggtggcctcacacac

SEQ ID NO: 3118980 - DNA, 25 bp, Homo sapien
tcttccgaagcagctccgtatagaa

SEQ ID NO: 3118981 - DNA, 25 bp, Homo sapien
agccttgcgcacgagctccacattg

SEQ ID NO: 3118982 - DNA, 25 bp, Homo sapien
gagctccacattgttgaggaccacg

SEQ ID NO: 3118983 - DNA, 25 bp, Homo sapien
ccacattgttgaggaccacgcagag

SEQ ID NO: 3118984 - DNA, 25 bp, Homo sapien
cgcacgagctccacattgttgagga

SEQ ID NO: 3118985 - DNA, 25 bp, Homo sapien
tcccgttgcagatcatcgtccaggg

SEQ ID NO: 3118986 - DNA, 25 bp, Homo sapien
tgggcctcccgttgcagatcatcgt

SEQ ID NO: 3118987 - DNA, 25 bp, Homo sapien
cttagaggtcaggtgcgctgtcacc

SEQ ID NO: 3118988 - DNA, 25 bp, Homo sapien
gctgtcaccgtgtgggcctcccgtt

SEQ ID NO: 3118989 - DNA, 25 bp, Homo sapien
ggagtcaggcgagagactgatgtgc

SEQ ID NO: 3118990 - DNA, 25 bp, Homo sapien
ctcatcgttctggatggagtcaggc

SEQ ID NO: 3118991 - DNA, 25 bp, Homo sapien
tgtgctgtacatacttgcggatgtc

SEQ ID NO: 3118992 - DNA, 25 bp, Homo sapien
catacttgcggatgtcgcccaccat

SEQ ID NO: 3118993 - DNA, 25 bp, Homo sapien
accagcgaggcgttcagcagggcca

SEQ ID NO: 3118994 - DNA, 25 bp, Homo sapien
ttctcatccaggtacttcatgagcg

SEQ ID NO: 3118995 - DNA, 25 bp, Homo sapien
ctcatccaggtacttcatgagcggg

SEQ ID NO: 3118996 - DNA, 25 bp, Homo sapien
tccccttcaccagcgaggcgttcag

SEQ ID NO: 3118997 - DNA, 25 bp, Homo sapien
cctcagtgaccacgggccagcccag

SEQ ID NO: 3118998 - DNA, 25 bp, Homo sapien
ctcagtgaccacgggccagcccagc

SEQ ID NO: 3118999 - DNA, 25 bp, Homo sapien
gcctggaggagtagctcccacaggg

SEQ ID NO: 3119000 - DNA, 25 bp, Homo sapien
catcagtgaccacgggccagcccca

SEQ ID NO: 3119001 - DNA, 25 bp, Homo sapien
agggcagcatcagtgaccacgggcc

SEQ ID NO: 3119002 - DNA, 25 bp, Homo sapien
gcagcatcagtgaccacgggccagc

SEQ ID NO: 3119003 - DNA, 25 bp, Homo sapien
ctgcagggcagcatcagtgaccacg

SEQ ID NO: 3119004 - DNA, 25 bp, Homo sapien
gcctggaggagtagctcccacaggg

SEQ ID NO: 3119005 - DNA, 25 bp, Homo sapien
ccagcgtgaaatggaagcggctgta

SEQ ID NO: 3119006 - DNA, 25 bp, Homo sapien
ctccagcgtgaaatggaagcggctg

SEQ ID NO: 3119007 - DNA, 25 bp, Homo sapien
tcagcagagacgtcacggtttgcac

SEQ ID NO: 3119008 - DNA, 25 bp, Homo sapien
aatcagcagagacgtcacggtttgc

SEQ ID NO: 3119009 - DNA, 25 bp, Homo sapien
cctgaccctctgcgtggaaaaaact

SEQ ID NO: 3119010 - DNA, 25 bp, Homo sapien
tgaccctctgcgtggaaaaaactga

SEQ ID NO: 3119011 - DNA, 25 bp, Homo sapien
ctgaccctctgcgtggaaaaaactg

SEQ ID NO: 3119012 - DNA, 25 bp, Homo sapien
gaccctctgcgtggaaaaaactgac

SEQ ID NO: 3119013 - DNA, 25 bp, Homo sapien
tgcactcgcgggtggaacatttgtg

SEQ ID NO: 3119014 - DNA, 25 bp, Homo sapien
ctgtttgagcttgtccaggtagaac

SEQ ID NO: 3119015 - DNA, 25 bp, Homo sapien
ggtagaactgctcgatgcactcgcg

SEQ ID NO: 3119016 - DNA, 25 bp, Homo sapien
cgggtggaacatttgtgcagccgca

SEQ ID NO: 3119017 - DNA, 25 bp, Homo sapien
taatggcaacggacgctcaggcgtc

SEQ ID NO: 3119018 - DNA, 25 bp, Homo sapien
tcagccgcctcgtaatggcaacgga

SEQ ID NO: 3119019 - DNA, 25 bp, Homo sapien
ctgctcagccgcctcgtaatggcaa

SEQ ID NO: 3119020 - DNA, 25 bp, Homo sapien
tcaggcgtccaaaccggttctgctc

SEQ ID NO: 3119021 - DNA, 25 bp, Homo sapien
ccagtggaaagagatgcggtgggcc

SEQ ID NO: 3119022 - DNA, 25 bp, Homo sapien
ggtcctctggctgcggaccagtgga

SEQ ID NO: 3119023 - DNA, 25 bp, Homo sapien
tatacagggtgcagcgtccgggtct

SEQ ID NO: 3119024 - DNA, 25 bp, Homo sapien
tagaagagttcgtcgtatacagggt

SEQ ID NO: 3119025 - DNA, 25 bp, Homo sapien
cagcgaagtcgttggtggacagcca

SEQ ID NO: 3119026 - DNA, 25 bp, Homo sapien
agtgacgccacctaggccgagggcc

SEQ ID NO: 3119027 - DNA, 25 bp, Homo sapien
gtgaacaacacacaggccgcgcggc

SEQ ID NO: 3119028 - DNA, 25 bp, Homo sapien
acagccagtcgtggtccatgacggt

SEQ ID NO: 3119029 - DNA, 25 bp, Homo sapien
gagtttcttcacgaactcctgcgcc

SEQ ID NO: 3119030 - DNA, 25 bp, Homo sapien
cagctccttgagtttcttcacgaac

SEQ ID NO: 3119031 - DNA, 25 bp, Homo sapien
ctccagctccttgagtttcttcacg

SEQ ID NO: 3119032 - DNA, 25 bp, Homo sapien
aggggtccgcctccatgcacttctc

SEQ ID NO: 3119033 - DNA, 25 bp, Homo sapien
tgcctcggcgctctcgcaaatgaag

SEQ ID NO: 3119034 - DNA, 25 bp, Homo sapien
gctgtgattaccaaaaatgcgtctg

SEQ ID NO: 3119035 - DNA, 25 bp, Homo sapien
tctcaggtggccacggatatgtgcg

SEQ ID NO: 3119036 - DNA, 25 bp, Homo sapien
tatgtgcgtgaaggacagctgacca

SEQ ID NO: 3119037 - DNA, 25 bp, Homo sapien
ttgaggctgggtgacgagaaaatct

SEQ ID NO: 3119038 - DNA, 25 bp, Homo sapien
cagagagactgagggttgcagacac

SEQ ID NO: 3119039 - DNA, 25 bp, Homo sapien
cgagaaaatctagagacatgaggga

SEQ ID NO: 3119040 - DNA, 25 bp, Homo sapien
gacagtgatgcgtctgaggacccag

SEQ ID NO: 3119041 - DNA, 25 bp, Homo sapien
caagggcttcttggacctgaaccgc

SEQ ID NO: 3119042 - DNA, 25 bp, Homo sapien
gcagcacgggttctcaggactgtga

SEQ ID NO: 3119043 - DNA, 25 bp, Homo sapien
tgactagaaaacctgcagtgcatgt

SEQ ID NO: 3119044 - DNA, 25 bp, Homo sapien
tgcatgtcccactggagaggtttgg

SEQ ID NO: 3119045 - DNA, 25 bp, Homo sapien
tctggggtcgccgtcatcgactgct

SEQ ID NO: 3119046 - DNA, 25 bp, Homo sapien
cttgcgcctgttgccctacctggtg

SEQ ID NO: 3119047 - DNA, 25 bp, Homo sapien
cgagacaccgtttgggaagatgcga

SEQ ID NO: 3119048 - DNA, 25 bp, Homo sapien
aagatgcgagggagccacttgcgcc

SEQ ID NO: 3119049 - DNA, 25 bp, Homo sapien
cccttcagggatggtttagtggcac

SEQ ID NO: 3119050 - DNA, 25 bp, Homo sapien
tgcccgaggtcgtcttcatttccag

SEQ ID NO: 3119051 - DNA, 25 bp, Homo sapien
catttccagcgcgtggttcccttca

SEQ ID NO: 3119052 - DNA, 25 bp, Homo sapien
tagtggcacttgtatgtcgcaccca

SEQ ID NO: 3119053 - DNA, 25 bp, Homo sapien
cgcctgggccacagattcggcggtc

SEQ ID NO: 3119054 - DNA, 25 bp, Homo sapien
agccccgtgggcaagcagtacgcgt

SEQ ID NO: 3119055 - DNA, 25 bp, Homo sapien
gattcggcggtctggtgctgagccc

SEQ ID NO: 3119056 - DNA, 25 bp, Homo sapien
tgagccccgtgggcaagcagtacgc

SEQ ID NO: 3119057 - DNA, 25 bp, Homo sapien
cgtgatggggagagcgggtcagggt

SEQ ID NO: 3119058 - DNA, 25 bp, Homo sapien
tctctctctcgtgcagcttccgtgg

SEQ ID NO: 3119059 - DNA, 25 bp, Homo sapien
cctggaggccttcgccgaggaggtc

SEQ ID NO: 3119060 - DNA, 25 bp, Homo sapien
cttctctctctcgtgcagcttccgt

SEQ ID NO: 3119061 - DNA, 25 bp, Homo sapien
cggccgccgcgcggtcacgtgaagt

SEQ ID NO: 3119062 - DNA, 25 bp, Homo sapien
ccggccgagagcccgaggagcaaca

SEQ ID NO: 3119063 - DNA, 25 bp, Homo sapien
gcaacaggagccgcgccagccccgc

SEQ ID NO: 3119064 - DNA, 25 bp, Homo sapien
cgccggccgagagcccgaggagcaa

SEQ ID NO: 3119065 - DNA, 25 bp, Homo sapien
gccggccgagagcccgaggagcaac

SEQ ID NO: 3119066 - DNA, 25 bp, Homo sapien
caaacgcgttgggctcctccaccac

SEQ ID NO: 3119067 - DNA, 25 bp, Homo sapien
acgcgttgggctcctccaccacctt

SEQ ID NO: 3119068 - DNA, 25 bp, Homo sapien
cgttgggctcctccaccaccttcat

SEQ ID NO: 3119069 - DNA, 25 bp, Homo sapien
ccaaacgcgttgggctcctccacca

SEQ ID NO: 3119070 - DNA, 25 bp, Homo sapien
ctacgggaagcggcaaggtcagcgg

SEQ ID NO: 3119071 - DNA, 25 bp, Homo sapien
gaggcgactggcctgaggcaagaac

SEQ ID NO: 3119072 - DNA, 25 bp, Homo sapien
cagacacgggtgaaggatccctctt

SEQ ID NO: 3119073 - DNA, 25 bp, Homo sapien
cgggtgaaggatccctcttggcctg

SEQ ID NO: 3119074 - DNA, 25 bp, Homo sapien
ctgaggcaagaacgggttgttcacc

SEQ ID NO: 3119075 - DNA, 25 bp, Homo sapien
tatctctgatctgtggctaccccag

SEQ ID NO: 3119076 - DNA, 25 bp, Homo sapien
ttctgagccgcagggaagtgagcct

SEQ ID NO: 3119077 - DNA, 25 bp, Homo sapien
gagtcaaagtccaccaaacctacca

SEQ ID NO: 3119078 - DNA, 25 bp, Homo sapien
atttaaagcaatccccaccaagaca

SEQ ID NO: 3119079 - DNA, 25 bp, Homo sapien
cgtattaataataaagtcgaggcca

SEQ ID NO: 3119080 - DNA, 25 bp, Homo sapien
ttaataataaagtcgaggccaggcg

SEQ ID NO: 3119081 - DNA, 25 bp, Homo sapien
tattaataataaagtcgaggccagg

SEQ ID NO: 3119082 - DNA, 25 bp, Homo sapien
cggtggctcatgactgtcatcccag

SEQ ID NO: 3119083 - DNA, 25 bp, Homo sapien
tccatggacagatgacgggtaaaca

SEQ ID NO: 3119084 - DNA, 25 bp, Homo sapien
cgtgtacacatcaaggccagtggca

SEQ ID NO: 3119085 - DNA, 25 bp, Homo sapien
aaaggtcgcacacagttatgagtca

SEQ ID NO: 3119086 - DNA, 25 bp, Homo sapien
gaggacgccccagactgatgtttca

SEQ ID NO: 3119087 - DNA, 25 bp, Homo sapien
gtctgcaactgtggacctgaagtga

SEQ ID NO: 3119088 - DNA, 25 bp, Homo sapien
ctatgcccggcctgaaagactaact

SEQ ID NO: 3119089 - DNA, 25 bp, Homo sapien
taaaagggtcaatgtgccaagacac

SEQ ID NO: 3119090 - DNA, 25 bp, Homo sapien
aagatgacaataccacccagagtga

SEQ ID NO: 3119091 - DNA, 25 bp, Homo sapien
cattcccagataaaagcttcaggag

SEQ ID NO: 3119092 - DNA, 25 bp, Homo sapien
taaggcttgctatcgtggctcatgc

SEQ ID NO: 3119093 - DNA, 25 bp, Homo sapien
ttcaggagttggttacatgcaggcc

SEQ ID NO: 3119094 - DNA, 25 bp, Homo sapien
tcctcgtgcagggtgaattaatacc

SEQ ID NO: 3119095 - DNA, 25 bp, Homo sapien
gaagagacctcacactgatccccag

SEQ ID NO: 3119096 - DNA, 25 bp, Homo sapien
atccccagggtccaagcacagaacc

SEQ ID NO: 3119097 - DNA, 25 bp, Homo sapien
cccagggtccaagcacagaacctgt

SEQ ID NO: 3119098 - DNA, 25 bp, Homo sapien
agagacctcacactgatccccaggg

SEQ ID NO: 3119099 - DNA, 25 bp, Homo sapien
cacttgcccgagagtcggaagagat

SEQ ID NO: 3119100 - DNA, 25 bp, Homo sapien
ttgcccgagagtcggaagagatgca

SEQ ID NO: 3119101 - DNA, 25 bp, Homo sapien
gctgaagcacttgcccgagagtcgg

SEQ ID NO: 3119102 - DNA, 25 bp, Homo sapien
aagcacttgcccgagagtcggaaga

SEQ ID NO: 3119103 - DNA, 25 bp, Homo sapien
cagatggcatgaggggggtccgcag

SEQ ID NO: 3119104 - DNA, 25 bp, Homo sapien
acacagatggcatgaggggggtccg

SEQ ID NO: 3119105 - DNA, 25 bp, Homo sapien
ggacacagatggcatgaggggggtc

SEQ ID NO: 3119106 - DNA, 25 bp, Homo sapien
cacagatggcatgaggggggtccgc

SEQ ID NO: 3119107 - DNA, 25 bp, Homo sapien
tcacgttgtggaacgggcagaactc

SEQ ID NO: 3119108 - DNA, 25 bp, Homo sapien
ccgaggatcccactgtaggcgttcc

SEQ ID NO: 3119109 - DNA, 25 bp, Homo sapien
cactgtaggcgttccagcggaaggt

SEQ ID NO: 3119110 - DNA, 25 bp, Homo sapien
gaacgggcagaactcatacttgtac

SEQ ID NO: 3119111 - DNA, 25 bp, Homo sapien
ggcacggcacgtgaggccgggtggg

SEQ ID NO: 3119112 - DNA, 25 bp, Homo sapien
gctgctttgggatccctgccccggc

SEQ ID NO: 3119113 - DNA, 25 bp, Homo sapien
gagacacgggcacggcacgtgaggc

SEQ ID NO: 3119114 - DNA, 25 bp, Homo sapien
gggagacacgggcacggcacgtgag

SEQ ID NO: 3119115 - DNA, 25 bp, Homo sapien
ctccgggaacggcaggcgtcaccgt

SEQ ID NO: 3119116 - DNA, 25 bp, Homo sapien
cccgtgaaggtgttgttggcgatct

SEQ ID NO: 3119117 - DNA, 25 bp, Homo sapien
tccacatgcccgtgaaggtgttgtt

SEQ ID NO: 3119118 - DNA, 25 bp, Homo sapien
tggcgatctcccactcgtgccagat

SEQ ID NO: 3119119 - DNA, 25 bp, Homo sapien
tcccgggctcccgtctgaggcccca

SEQ ID NO: 3119120 - DNA, 25 bp, Homo sapien
ccctcttcccgggctcccgtctgag

SEQ ID NO: 3119121 - DNA, 25 bp, Homo sapien
tcttcccgggctcccgtctgaggcc

SEQ ID NO: 3119122 - DNA, 25 bp, Homo sapien
ctcttcccgggctcccgtctgaggc

SEQ ID NO: 3119123 - DNA, 25 bp, Homo sapien
tagacgcaggtgctcggctcggaca

SEQ ID NO: 3119124 - DNA, 25 bp, Homo sapien
gacacatgggccagccggttgcttt

SEQ ID NO: 3119125 - DNA, 25 bp, Homo sapien
tgggccagccggttgctttttccac

SEQ ID NO: 3119126 - DNA, 25 bp, Homo sapien
tctcgaacgtcagcgcgtagacgca

SEQ ID NO: 3119127 - DNA, 25 bp, Homo sapien
ctgcgtgcgcggctgaccccactgg

SEQ ID NO: 3119128 - DNA, 25 bp, Homo sapien
ggctcaactgcgtcccgcaccccta

SEQ ID NO: 3119129 - DNA, 25 bp, Homo sapien
agcagggctgcgtgcgcggctgacc

SEQ ID NO: 3119130 - DNA, 25 bp, Homo sapien
accccactgggctcaactgcgtccc

SEQ ID NO: 3119131 - DNA, 25 bp, Homo sapien
ctggggggtgatcagctcatcggcc

SEQ ID NO: 3119132 - DNA, 25 bp, Homo sapien
tgatcagctcatcggccaggtcctg

SEQ ID NO: 3119133 - DNA, 25 bp, Homo sapien
gggtgatcagctcatcggccaggtc

SEQ ID NO: 3119134 - DNA, 25 bp, Homo sapien
ggggggtgatcagctcatcggccag

SEQ ID NO: 3119135 - DNA, 25 bp, Homo sapien
ggggccaccccgagcgcacgcttac

SEQ ID NO: 3119136 - DNA, 25 bp, Homo sapien
ccaggggccaccccgagcgcacgct

SEQ ID NO: 3119137 - DNA, 25 bp, Homo sapien
ccaccaggggccaccccgagcgcac

SEQ ID NO: 3119138 - DNA, 25 bp, Homo sapien
aggggccaccccgagcgcacgctta

SEQ ID NO: 3119139 - DNA, 25 bp, Homo sapien
caaaccccaagctgtcaggacctcc

SEQ ID NO: 3119140 - DNA, 25 bp, Homo sapien
tctttaagtagccagcatcctcaaa

SEQ ID NO: 3119141 - DNA, 25 bp, Homo sapien
ggggtctttaagtagccagcatcct

SEQ ID NO: 3119142 - DNA, 25 bp, Homo sapien
tctggggtctttaagtagccagcat

SEQ ID NO: 3119143 - DNA, 25 bp, Homo sapien
ggtgctggagggctactgcgtgcca

SEQ ID NO: 3119144 - DNA, 25 bp, Homo sapien
aggtgctggagggctactgcgtgcc

SEQ ID NO: 3119145 - DNA, 25 bp, Homo sapien
ctgtgggcctcgtgtaggggatgcc

SEQ ID NO: 3119146 - DNA, 25 bp, Homo sapien
cagccttttgatctcctttgagagt

SEQ ID NO: 3119147 - DNA, 25 bp, Homo sapien
ggtgagcaaacctttcagccttttg

SEQ ID NO: 3119148 - DNA, 25 bp, Homo sapien
atgccgtgctgggtgagcaaacctt

SEQ ID NO: 3119149 - DNA, 25 bp, Homo sapien
ggtggcgagtgtgatggtgagcctg

SEQ ID NO: 3119150 - DNA, 25 bp, Homo sapien
cccacaggtggcgagtgtgatggtg

SEQ ID NO: 3119151 - DNA, 25 bp, Homo sapien
ccacaggtggcgagtgtgatggtga

SEQ ID NO: 3119152 - DNA, 25 bp, Homo sapien
caggtggcgagtgtgatggtgagcc

SEQ ID NO: 3119153 - DNA, 25 bp, Homo sapien
aaaacaccaggtggccagtcctcac

SEQ ID NO: 3119154 - DNA, 25 bp, Homo sapien
ctgccaaaacaccaggtggccagtc

SEQ ID NO: 3119155 - DNA, 25 bp, Homo sapien
gccaaaacaccaggtggccagtcct

SEQ ID NO: 3119156 - DNA, 25 bp, Homo sapien
caaaacaccaggtggccagtcctca

SEQ ID NO: 3119157 - DNA, 25 bp, Homo sapien
gctctgggcgtctcgtggcccaagt

SEQ ID NO: 3119158 - DNA, 25 bp, Homo sapien
tgggcgtctcgtggcccaagtgctc

SEQ ID NO: 3119159 - DNA, 25 bp, Homo sapien
gtctcgtggcccaagtgctccaagt

SEQ ID NO: 3119160 - DNA, 25 bp, Homo sapien
cgtctcgtggcccaagtgctccaag

SEQ ID NO: 3119161 - DNA, 25 bp, Homo sapien
ttttacactatagcatttatgcaat

SEQ ID NO: 3119162 - DNA, 25 bp, Homo sapien
gcatttatgcaatggtttacagaat

SEQ ID NO: 3119163 - DNA, 25 bp, Homo sapien
ctctgtagggctctcggccgcgtcc

SEQ ID NO: 3119164 - DNA, 25 bp, Homo sapien
agctggtccctgcgggtcctaccag

SEQ ID NO: 3119165 - DNA, 25 bp, Homo sapien
tgggtccgtgacattctgcagctag

SEQ ID NO: 3119166 - DNA, 25 bp, Homo sapien
cgcgtggacgcctcaagtggattaa

SEQ ID NO: 3119167 - DNA, 25 bp, Homo sapien
taactctagtgttcgacattcgccg

SEQ ID NO: 3119168 - DNA, 25 bp, Homo sapien
catctcccggttgtcagtggtcagg

SEQ ID NO: 3119169 - DNA, 25 bp, Homo sapien
tgaggtctctgtgcggtgtaggccg

SEQ ID NO: 3119170 - DNA, 25 bp, Homo sapien
catcagtgagggtccaagaacttgc

SEQ ID NO: 3119171 - DNA, 25 bp, Homo sapien
agggcgcctgcgcaacagtccctgt

SEQ ID NO: 3119172 - DNA, 25 bp, Homo sapien
cgcctgcgcaacagtccctgtgtgg

SEQ ID NO: 3119173 - DNA, 25 bp, Homo sapien
catggtccccgtggcgctgactggt

SEQ ID NO: 3119174 - DNA, 25 bp, Homo sapien
gggccaccaccgcggcacgaggata

SEQ ID NO: 3119175 - DNA, 25 bp, Homo sapien
gcacgaggatactccggctgccctg

SEQ ID NO: 3119176 - DNA, 25 bp, Homo sapien
gtccccgtggcgctgactggtgcca

SEQ ID NO: 3119177 - DNA, 25 bp, Homo sapien
catgcgccgtgtgccgtcccggacg

SEQ ID NO: 3119178 - DNA, 25 bp, Homo sapien
ccctaaaagcttcattggaacggtg

SEQ ID NO: 3119179 - DNA, 25 bp, Homo sapien
aggccactcccgcatgcgccgtgtg

SEQ ID NO: 3119180 - DNA, 25 bp, Homo sapien
gtctccgtgggagtggaggccactc

SEQ ID NO: 3119181 - DNA, 25 bp, Homo sapien
tgttactctagtttctggataagac

SEQ ID NO: 3119182 - DNA, 25 bp, Homo sapien
ctgttactctagtttctggataaga

SEQ ID NO: 3119183 - DNA, 25 bp, Homo sapien
acagcaggttaggagcccggcaaag

SEQ ID NO: 3119184 - DNA, 25 bp, Homo sapien
cctttcttgcaggtcaggattcagg

SEQ ID NO: 3119185 - DNA, 25 bp, Homo sapien
ccggcacgcgcaagggcacaagctt

SEQ ID NO: 3119186 - DNA, 25 bp, Homo sapien
caaaggacccattgggaagcggtga

SEQ ID NO: 3119187 - DNA, 25 bp, Homo sapien
gaccctctccggtgctctctttgga

SEQ ID NO: 3119188 - DNA, 25 bp, Homo sapien
ccctctgagttgagtgcgagccgta

SEQ ID NO: 3119189 - DNA, 25 bp, Homo sapien
gaagcttctgccgacttagcacgga

SEQ ID NO: 3119190 - DNA, 25 bp, Homo sapien
ttcccgggcttcagcacaggtgact

SEQ ID NO: 3119191 - DNA, 25 bp, Homo sapien
tgtactcgcttaggtgaccagcctc

SEQ ID NO: 3119192 - DNA, 25 bp, Homo sapien
gaccgcggcgccttgaatgtgctgt

SEQ ID NO: 3119193 - DNA, 25 bp, Homo sapien
tcctgagttccgagcagtctgtagc

SEQ ID NO: 3119194 - DNA, 25 bp, Homo sapien
aatgtgctgtgtcacggcagagccg

SEQ ID NO: 3119195 - DNA, 25 bp, Homo sapien
attaagagagacctgcgagctccgt

SEQ ID NO: 3119196 - DNA, 25 bp, Homo sapien
cagacccatctgataggttccattt

SEQ ID NO: 3119197 - DNA, 25 bp, Homo sapien
tcatcttacacttcataggaacagg

SEQ ID NO: 3119198 - DNA, 25 bp, Homo sapien
gaatagaagaaatgagcggattctg

SEQ ID NO: 3119199 - DNA, 25 bp, Homo sapien
gttacatccctgcactagccacagg

SEQ ID NO: 3119200 - DNA, 25 bp, Homo sapien
caggatcgacactgccttagttaga

SEQ ID NO: 3119201 - DNA, 25 bp, Homo sapien
tgcggctgaaattgtgagctttgcc

SEQ ID NO: 3119202 - DNA, 25 bp, Homo sapien
tctgagacatcgctgtaaagttaca

SEQ ID NO: 3119203 - DNA, 25 bp, Homo sapien
tacacatgaatgtgtatcagagagc

SEQ ID NO: 3119204 - DNA, 25 bp, Homo sapien
tattttacacatgaatgtgtatcag

SEQ ID NO: 3119205 - DNA, 25 bp, Homo sapien
ttacacatgaatgtgtatcagagag

SEQ ID NO: 3119206 - DNA, 25 bp, Homo sapien
ttttacacatgaatgtgtatcagag

SEQ ID NO: 3119207 - DNA, 25 bp, Homo sapien
cagcagttgcggtcttgaagtcttc

SEQ ID NO: 3119208 - DNA, 25 bp, Homo sapien
tcatcccctgatcttttggaaggag

SEQ ID NO: 3119209 - DNA, 25 bp, Homo sapien
gattatatattcacagactggcggg

SEQ ID NO: 3119210 - DNA, 25 bp, Homo sapien
gaaggctgctttcagcacggagatc

SEQ ID NO: 3119211 - DNA, 25 bp, Homo sapien
agctccctcggccatcgggacctcc

SEQ ID NO: 3119212 - DNA, 25 bp, Homo sapien
tgcccagctccctcggccatcggga

SEQ ID NO: 3119213 - DNA, 25 bp, Homo sapien
ctcggccatcgggacctcccggaca

SEQ ID NO: 3119214 - DNA, 25 bp, Homo sapien
gccatcgggacctcccggacagcca

SEQ ID NO: 3119215 - DNA, 25 bp, Homo sapien
ggctggcaaatatttggcgacagca

SEQ ID NO: 3119216 - DNA, 25 bp, Homo sapien
aggcagaccttcacccggacacaag

SEQ ID NO: 3119217 - DNA, 25 bp, Homo sapien
caagcatttatagccgcgctctgca

SEQ ID NO: 3119218 - DNA, 25 bp, Homo sapien
tggcaaatatttggcgacagcattg

SEQ ID NO: 3119219 - DNA, 25 bp, Homo sapien
actcaagtgaggtatctgggtcagg

SEQ ID NO: 3119220 - DNA, 25 bp, Homo sapien
ggcctggcaggagggtatctggatg

SEQ ID NO: 3119221 - DNA, 25 bp, Homo sapien
tgcccctggggtcaggtagcctgaa

SEQ ID NO: 3119222 - DNA, 25 bp, Homo sapien
tagcctgaacccatcttgtccggag

SEQ ID NO: 3119223 - DNA, 25 bp, Homo sapien
ggcaggttccctgtcaggcctggcc

SEQ ID NO: 3119224 - DNA, 25 bp, Homo sapien
ggggcaggttccctgtcaggcctgg

SEQ ID NO: 3119225 - DNA, 25 bp, Homo sapien
agacagaggggcaggttccctgtca

SEQ ID NO: 3119226 - DNA, 25 bp, Homo sapien
caggttccctgtcaggcctggccat

SEQ ID NO: 3119227 - DNA, 25 bp, Homo sapien
gcgcgtcccacgcttctggggcctc

SEQ ID NO: 3119228 - DNA, 25 bp, Homo sapien
ccgcgcgtcccacgcttctggggcc

SEQ ID NO: 3119229 - DNA, 25 bp, Homo sapien
ctccgcgcgtcccacgcttctgggg

SEQ ID NO: 3119230 - DNA, 25 bp, Homo sapien
gcgtcccacgcttctggggcctccg

SEQ ID NO: 3119231 - DNA, 25 bp, Homo sapien
gcagctggaagtcgcacaggggccg

SEQ ID NO: 3119232 - DNA, 25 bp, Homo sapien
agcaggggcagctggaagtcgcaca

SEQ ID NO: 3119233 - DNA, 25 bp, Homo sapien
ctggaagtcgcacaggggccggatc

SEQ ID NO: 3119234 - DNA, 25 bp, Homo sapien
aggggcagctggaagtcgcacaggg

SEQ ID NO: 3119235 - DNA, 25 bp, Homo sapien
ctgaaaagcgtagcagctgcagcgg

SEQ ID NO: 3119236 - DNA, 25 bp, Homo sapien
tgcagcggggtctcggggctgccgg

SEQ ID NO: 3119237 - DNA, 25 bp, Homo sapien
gggggctgcttcctccgtggcctct

SEQ ID NO: 3119238 - DNA, 25 bp, Homo sapien
ctgccgggaccctcgggggctgctt

SEQ ID NO: 3119239 - DNA, 25 bp, Homo sapien
caggtccgcatagtagagctcccgg

SEQ ID NO: 3119240 - DNA, 25 bp, Homo sapien
cgtagacgtcgcaggcatctgggtc

SEQ ID NO: 3119241 - DNA, 25 bp, Homo sapien
cgccggatgtcgtcgctgatgagct

SEQ ID NO: 3119242 - DNA, 25 bp, Homo sapien
atccttgcggccaaagtaccgccgg

SEQ ID NO: 3119243 - DNA, 25 bp, Homo sapien
tccagggacccgccacgggccaggc

SEQ ID NO: 3119244 - DNA, 25 bp, Homo sapien
agggacccgccacgggccaggcgca

SEQ ID NO: 3119245 - DNA, 25 bp, Homo sapien
gggacccgccacgggccaggcgcac

SEQ ID NO: 3119246 - DNA, 25 bp, Homo sapien
cagggacccgccacgggccaggcgc

SEQ ID NO: 3119247 - DNA, 25 bp, Homo sapien
taggggtcggctccttccagaagga

SEQ ID NO: 3119248 - DNA, 25 bp, Homo sapien
gacaggcctcggttgaccagctggc

SEQ ID NO: 3119249 - DNA, 25 bp, Homo sapien
gtgatgtggccgtacttccgctcca

SEQ ID NO: 3119250 - DNA, 25 bp, Homo sapien
tgctgcagcccgtagtcgaagagct

SEQ ID NO: 3119251 - DNA, 25 bp, Homo sapien
cttggctagggcctgcgcagaagca

SEQ ID NO: 3119252 - DNA, 25 bp, Homo sapien
agcccggcttcaggctgttgctttc

SEQ ID NO: 3119253 - DNA, 25 bp, Homo sapien
ttccatggcactttagcagcctctc

SEQ ID NO: 3119254 - DNA, 25 bp, Homo sapien
tgtttgctctctcggtcgggcagtg

SEQ ID NO: 3119255 - DNA, 25 bp, Homo sapien
tctgctgaccgttactgggctgggc

SEQ ID NO: 3119256 - DNA, 25 bp, Homo sapien
gacaagtgcctgcttcataagagcg

SEQ ID NO: 3119257 - DNA, 25 bp, Homo sapien
cataagagcgactcagacctcagga

SEQ ID NO: 3119258 - DNA, 25 bp, Homo sapien
gacctcaggatttccgccgaaggca

SEQ ID NO: 3119259 - DNA, 25 bp, Homo sapien
gcaggcctgtgcacaaatgtctcag

SEQ ID NO: 3119260 - DNA, 25 bp, Homo sapien
caaacgtgggcgacaccctgcgttt

SEQ ID NO: 3119261 - DNA, 25 bp, Homo sapien
ctcgggcacctgtgtggtcggaaca

SEQ ID NO: 3119262 - DNA, 25 bp, Homo sapien
gtaacgtgcattgcgtaggcgccgc

SEQ ID NO: 3119263 - DNA, 25 bp, Homo sapien
tcctcggggcctcgtgcgcagagct

SEQ ID NO: 3119264 - DNA, 25 bp, Homo sapien
cgggcatcccgtttcccgctcctcg

SEQ ID NO: 3119265 - DNA, 25 bp, Homo sapien
cacgggcatcccgtttcccgctcct

SEQ ID NO: 3119266 - DNA, 25 bp, Homo sapien
tcggggcctcgtgcgcagagcttca

SEQ ID NO: 3119267 - DNA, 25 bp, Homo sapien
ggttcacccgtgaacgtgcacagtt

SEQ ID NO: 3119268 - DNA, 25 bp, Homo sapien
aggaaacagagccacgcacggtgcg

SEQ ID NO: 3119269 - DNA, 25 bp, Homo sapien
cagctctgttgagatggattcactc

SEQ ID NO: 3119270 - DNA, 25 bp, Homo sapien
tcgtgctcttgttcactgtgtaaca

SEQ ID NO: 3119271 - DNA, 25 bp, Homo sapien
aaggagctgagtggccatctcccgg

SEQ ID NO: 3119272 - DNA, 25 bp, Homo sapien
tccactgagggtgtctatgtgtccc

SEQ ID NO: 3119273 - DNA, 25 bp, Homo sapien
gaacccgtgttggtggcactgtgac

SEQ ID NO: 3119274 - DNA, 25 bp, Homo sapien
tggccgcctatgtgcaggagaacct

SEQ ID NO: 3119275 - DNA, 25 bp, Homo sapien
agaaccaggcgtcgctgaaccgtgt

SEQ ID NO: 3119276 - DNA, 25 bp, Homo sapien
aaccgtgtcctactggccgaggaga

SEQ ID NO: 3119277 - DNA, 25 bp, Homo sapien
tggcccagctgaccaagtttgtgca

SEQ ID NO: 3119278 - DNA, 25 bp, Homo sapien
cccagctgaccaagtttgtgcagca

SEQ ID NO: 3119279 - DNA, 25 bp, Homo sapien
ccaagctcggcgaagaggtgagcct

SEQ ID NO: 3119280 - DNA, 25 bp, Homo sapien
atgcctggttggtcgtctgggtaca

SEQ ID NO: 3119281 - DNA, 25 bp, Homo sapien
cagaggctgcacacgggacaatgtg

SEQ ID NO: 3119282 - DNA, 25 bp, Homo sapien
tgagcctgcgcttcctgaagaggga

SEQ ID NO: 3119283 - DNA, 25 bp, Homo sapien
taccctttgcgtgtatgagatgcag

SEQ ID NO: 3119284 - DNA, 25 bp, Homo sapien
gccatgctgagagggttacaacaga

SEQ ID NO: 3119285 - DNA, 25 bp, Homo sapien
tatctactctaaggtgacctcctgg

SEQ ID NO: 3119286 - DNA, 25 bp, Homo sapien
ctgttggtgtggagacaaggcccca

SEQ ID NO: 3119287 - DNA, 25 bp, Homo sapien
gaggcaacttcagtgtccctgttag

SEQ ID NO: 3119288 - DNA, 25 bp, Homo sapien
ccgtgtatttcctccccagggagtg

SEQ ID NO: 3119289 - DNA, 25 bp, Homo sapien
cacaggcagctagaagggccggtgg

SEQ ID NO: 3119290 - DNA, 25 bp, Homo sapien
ggccccaaggtgtccgagtgtgttg

SEQ ID NO: 3119291 - DNA, 25 bp, Homo sapien
gcacggactcgtagcaccagggttt

SEQ ID NO: 3119292 - DNA, 25 bp, Homo sapien
gagtcactggtttctcggcccaaac

SEQ ID NO: 3119293 - DNA, 25 bp, Homo sapien
gcctcagagcgtggaattgctgccc

SEQ ID NO: 3119294 - DNA, 25 bp, Homo sapien
tgcatccggcttgggtacacaggcc

SEQ ID NO: 3119295 - DNA, 25 bp, Homo sapien
tgatgagccccagatatcgacaagt

SEQ ID NO: 3119296 - DNA, 25 bp, Homo sapien
ctgagcccagcgtgttccagtgcag

SEQ ID NO: 3119297 - DNA, 25 bp, Homo sapien
catggttgggccgtgagacgtctct

SEQ ID NO: 3119298 - DNA, 25 bp, Homo sapien
gttcacagagaagggcggactgtcc

SEQ ID NO: 3119299 - DNA, 25 bp, Homo sapien
cttttctggatttgacgggcctgcc

SEQ ID NO: 3119300 - DNA, 25 bp, Homo sapien
cctggagaggatacctggatagact

SEQ ID NO: 3119301 - DNA, 25 bp, Homo sapien
cccagtgctgtctagcatcaattca

SEQ ID NO: 3119302 - DNA, 25 bp, Homo sapien
ttcccaatctgcttgctgcactgtt

SEQ ID NO: 3119303 - DNA, 25 bp, Homo sapien
ggttggccccgagcacgagttcctg

SEQ ID NO: 3119304 - DNA, 25 bp, Homo sapien
tctcagcgcgaatctgcggaggacg

SEQ ID NO: 3119305 - DNA, 25 bp, Homo sapien
cggacgaaacgcgatcgcggcccag

SEQ ID NO: 3119306 - DNA, 25 bp, Homo sapien
ccgcgggttttcttgagcctctggg

SEQ ID NO: 3119307 - DNA, 25 bp, Homo sapien
gacagatctgggcgtcacgggaaga

SEQ ID NO: 3119308 - DNA, 25 bp, Homo sapien
caggacagatctgggcgtcacggga

SEQ ID NO: 3119309 - DNA, 25 bp, Homo sapien
ctgcaggacagatctgggcgtcacg

SEQ ID NO: 3119310 - DNA, 25 bp, Homo sapien
acagatctgggcgtcacgggaagac

SEQ ID NO: 3119311 - DNA, 25 bp, Homo sapien
cagcctgctggcaagacatctgagg

SEQ ID NO: 3119312 - DNA, 25 bp, Homo sapien
agaagtgggccgaggcaaactcctc

SEQ ID NO: 3119313 - DNA, 25 bp, Homo sapien
gacgagagggcatgaatggcttccc

SEQ ID NO: 3119314 - DNA, 25 bp, Homo sapien
gagataccgcttcagggactccagg

SEQ ID NO: 3119315 - DNA, 25 bp, Homo sapien
tggagagagtccacaaccgcctgca

SEQ ID NO: 3119316 - DNA, 25 bp, Homo sapien
ccatcttcatcagccggaagctggg

SEQ ID NO: 3119317 - DNA, 25 bp, Homo sapien
cgggctgcgtctgctgccgacactg

SEQ ID NO: 3119318 - DNA, 25 bp, Homo sapien
tcctcgccgagcaggcggaagtagt

SEQ ID NO: 3119319 - DNA, 25 bp, Homo sapien
ccccgaacacgtgaaaaagccgcat

SEQ ID NO: 3119320 - DNA, 25 bp, Homo sapien
cattccacatgtgtccgagatgttc

SEQ ID NO: 3119321 - DNA, 25 bp, Homo sapien
tgtgtccgagatgttcccaaagcct

SEQ ID NO: 3119322 - DNA, 25 bp, Homo sapien
gcctccttaatacatgggcccatgc

SEQ ID NO: 3119323 - DNA, 25 bp, Homo sapien
tgagacacgaaggacacggaggaat

SEQ ID NO: 3119324 - DNA, 25 bp, Homo sapien
tcccaaggacctgagacacgaagga

SEQ ID NO: 3119325 - DNA, 25 bp, Homo sapien
gacacgaaggacacggaggaatcca

SEQ ID NO: 3119326 - DNA, 25 bp, Homo sapien
gacctgagacacgaaggacacggag

SEQ ID NO: 3119327 - DNA, 25 bp, Homo sapien
ccagcagacgcgctggtgcaggtag

SEQ ID NO: 3119328 - DNA, 25 bp, Homo sapien
cggggtaccagcacgcccaggatct

SEQ ID NO: 3119329 - DNA, 25 bp, Homo sapien
ctccatggcccggtccggcacttgc

SEQ ID NO: 3119330 - DNA, 25 bp, Homo sapien
accaggcgccagcagacgcgctggt

SEQ ID NO: 3119331 - DNA, 25 bp, Homo sapien
gagccgggactgtaagaacagaagc

SEQ ID NO: 3119332 - DNA, 25 bp, Homo sapien
cagcagtctcgaaaggacctcaggc

SEQ ID NO: 3119333 - DNA, 25 bp, Homo sapien
cccagcagtctcgaaaggacctcag

SEQ ID NO: 3119334 - DNA, 25 bp, Homo sapien
cgtgagccgggactgtaagaacaga

SEQ ID NO: 3119335 - DNA, 25 bp, Homo sapien
gaagattgacacatgagaagccctc

SEQ ID NO: 3119336 - DNA, 25 bp, Homo sapien
ggcttctcgggagtctagaagattg

SEQ ID NO: 3119337 - DNA, 25 bp, Homo sapien
agggcctgtcatcagggcagggagg

SEQ ID NO: 3119338 - DNA, 25 bp, Homo sapien
atgagaagccctcactcagagccgt

SEQ ID NO: 3119339 - DNA, 25 bp, Homo sapien
gagcgggcgccgctggctgtccatg

SEQ ID NO: 3119340 - DNA, 25 bp, Homo sapien
agcgggcgccgctggctgtccatgg

SEQ ID NO: 3119341 - DNA, 25 bp, Homo sapien
gcgggcgccgctggctgtccatggc

SEQ ID NO: 3119342 - DNA, 25 bp, Homo sapien
ggagtgtggcggatggcactgctgc

SEQ ID NO: 3119343 - DNA, 25 bp, Homo sapien
tgccccacgtctccaacagctcctt

SEQ ID NO: 3119344 - DNA, 25 bp, Homo sapien
cgagttgcgccaggcagatgaggac

SEQ ID NO: 3119345 - DNA, 25 bp, Homo sapien
gacagccttgctgacgtggcgctgc

SEQ ID NO: 3119346 - DNA, 25 bp, Homo sapien
ggcggcacttcacgcccgccatcat

SEQ ID NO: 3119347 - DNA, 25 bp, Homo sapien
aggctactgtccaggcggcacttca

SEQ ID NO: 3119348 - DNA, 25 bp, Homo sapien
acgatcatgcccaggcgtcgcacgg

SEQ ID NO: 3119349 - DNA, 25 bp, Homo sapien
gggcactaacgacctctgccacgat

SEQ ID NO: 3119350 - DNA, 25 bp, Homo sapien
cagctcgaggctcagttcatcctct

SEQ ID NO: 3119351 - DNA, 25 bp, Homo sapien
agctcgaggctcagttcatcctctt

SEQ ID NO: 3119352 - DNA, 25 bp, Homo sapien
tgtccaggtccgagtcagagcccgc

SEQ ID NO: 3119353 - DNA, 25 bp, Homo sapien
catccacgatctctgcgggggtctc

SEQ ID NO: 3119354 - DNA, 25 bp, Homo sapien
ctgtgcttgggggacgccgccatcc

SEQ ID NO: 3119355 - DNA, 25 bp, Homo sapien
gtccgagtcagagcccgccagctgt

SEQ ID NO: 3119356 - DNA, 25 bp, Homo sapien
cttccacgcagtcccggacgtaggc

SEQ ID NO: 3119357 - DNA, 25 bp, Homo sapien
agtcccggacgtaggcaggagcctt

SEQ ID NO: 3119358 - DNA, 25 bp, Homo sapien
gtcgtaggggacaaactcatcatcg

SEQ ID NO: 3119359 - DNA, 25 bp, Homo sapien
cccgacatgtcgtaggggacaaact

SEQ ID NO: 3119360 - DNA, 25 bp, Homo sapien
cagaaccaggctgtgagcgggaccc

SEQ ID NO: 3119361 - DNA, 25 bp, Homo sapien
gaaccaggctgtgagcgggacccat

SEQ ID NO: 3119362 - DNA, 25 bp, Homo sapien
accaggctgtgagcgggacccatgc

SEQ ID NO: 3119363 - DNA, 25 bp, Homo sapien
gtgagcgggacccatgcccagccca

SEQ ID NO: 3119364 - DNA, 25 bp, Homo sapien
cctgaccctgaacccatgagagcca

SEQ ID NO: 3119365 - DNA, 25 bp, Homo sapien
accctgaacccatgagagccagcag

SEQ ID NO: 3119366 - DNA, 25 bp, Homo sapien
agccctgaccctgaacccatgagag

SEQ ID NO: 3119367 - DNA, 25 bp, Homo sapien
tgaccctgaacccatgagagccagc

SEQ ID NO: 3119368 - DNA, 25 bp, Homo sapien
ctctatgtcctcagacgtggtcagg

SEQ ID NO: 3119369 - DNA, 25 bp, Homo sapien
ccagcgctctatgtcctcagacgtg

SEQ ID NO: 3119370 - DNA, 25 bp, Homo sapien
tcctgtagaccaggccctcaagggc

SEQ ID NO: 3119371 - DNA, 25 bp, Homo sapien
gggctcctgtagaccaggccctcaa

SEQ ID NO: 3119372 - DNA, 25 bp, Homo sapien
ccgggtctgtgaccgtgacggccac

SEQ ID NO: 3119373 - DNA, 25 bp, Homo sapien
cggggccgggtctgtgaccgtgacg

SEQ ID NO: 3119374 - DNA, 25 bp, Homo sapien
gggccgggtctgtgaccgtgacggc

SEQ ID NO: 3119375 - DNA, 25 bp, Homo sapien
ggtctgtgaccgtgacggccaccag

SEQ ID NO: 3119376 - DNA, 25 bp, Homo sapien
actgtgaggtcagatagtcggccac

SEQ ID NO: 3119377 - DNA, 25 bp, Homo sapien
ccaggatgtccatgcgctgccggag

SEQ ID NO: 3119378 - DNA, 25 bp, Homo sapien
aggctgtagttgagggcatagaact

SEQ ID NO: 3119379 - DNA, 25 bp, Homo sapien
atgtccatgcgctgccggaggctgt

SEQ ID NO: 3119380 - DNA, 25 bp, Homo sapien
gcccagcaacaaggagacccaggtt

SEQ ID NO: 3119381 - DNA, 25 bp, Homo sapien
tggacaggcctgcacgagcccttgg

SEQ ID NO: 3119382 - DNA, 25 bp, Homo sapien
gggtcacacactcacgaaggcagtg

SEQ ID NO: 3119383 - DNA, 25 bp, Homo sapien
caggttttggcagccccaccttagg

SEQ ID NO: 3119384 - DNA, 25 bp, Homo sapien
cccgaggcacccaggcctagacagc

SEQ ID NO: 3119385 - DNA, 25 bp, Homo sapien
acccaggcctagacagctcctgggc

SEQ ID NO: 3119386 - DNA, 25 bp, Homo sapien
cagtcagacgccacggcactgccag

SEQ ID NO: 3119387 - DNA, 25 bp, Homo sapien
cttctgatccgctcctccaccacca

SEQ ID NO: 3119388 - DNA, 25 bp, Homo sapien
ccgccagtcagacgccacggcactg

SEQ ID NO: 3119389 - DNA, 25 bp, Homo sapien
cttggagagccgctgggtcttgctt

SEQ ID NO: 3119390 - DNA, 25 bp, Homo sapien
ctgccgggccctgcctcgggccacc

SEQ ID NO: 3119391 - DNA, 25 bp, Homo sapien
ggaagaagaagtggccggccacgga

SEQ ID NO: 3119392 - DNA, 25 bp, Homo sapien
aagtggccggccacggagttgaatc

SEQ ID NO: 3119393 - DNA, 25 bp, Homo sapien
tggccggccacggagttgaatctgc

SEQ ID NO: 3119394 - DNA, 25 bp, Homo sapien
gccggccacggagttgaatctgctg

SEQ ID NO: 3119395 - DNA, 25 bp, Homo sapien
cagtggtacgtccagggtccctgtc

SEQ ID NO: 3119396 - DNA, 25 bp, Homo sapien
cacaggcccacggaaaacccactca

SEQ ID NO: 3119397 - DNA, 25 bp, Homo sapien
tggccacagtggtacgtccagggtc

SEQ ID NO: 3119398 - DNA, 25 bp, Homo sapien
agatcccagcccgaacttcttggcc

SEQ ID NO: 3119399 - DNA, 25 bp, Homo sapien
acagcaaagcacgaccctgttcaca

SEQ ID NO: 3119400 - DNA, 25 bp, Homo sapien
agccacagcaaagcacgaccctgtt

SEQ ID NO: 3119401 - DNA, 25 bp, Homo sapien
tttaacacaggcttacaaaaagcca

SEQ ID NO: 3119402 - DNA, 25 bp, Homo sapien
ttaacacaggcttacaaaaagccac

SEQ ID NO: 3119403 - DNA, 25 bp, Homo sapien
cacagaggaatcttgcgggacgctc

SEQ ID NO: 3119404 - DNA, 25 bp, Homo sapien
catcggagcagatgcctggtgcctc

SEQ ID NO: 3119405 - DNA, 25 bp, Homo sapien
ccagcaggtgatggcgtcgggcacg

SEQ ID NO: 3119406 - DNA, 25 bp, Homo sapien
cgtcgggcacgtgcgggcggcactg

SEQ ID NO: 3119407 - DNA, 25 bp, Homo sapien
ggagcagacatttccgggtgcctac

SEQ ID NO: 3119408 - DNA, 25 bp, Homo sapien
gatcgtaggagcagacatttccggg

SEQ ID NO: 3119409 - DNA, 25 bp, Homo sapien
ctgcaccgagatcgtaggagcagac

SEQ ID NO: 3119410 - DNA, 25 bp, Homo sapien
ccacacttctctgccatctcgagag

SEQ ID NO: 3119411 - DNA, 25 bp, Homo sapien
cctgggccaccgtgggagaccgagg

SEQ ID NO: 3119412 - DNA, 25 bp, Homo sapien
tgggccaccgtgggagaccgaggga

SEQ ID NO: 3119413 - DNA, 25 bp, Homo sapien
ctgggccaccgtgggagaccgaggg

SEQ ID NO: 3119414 - DNA, 25 bp, Homo sapien
cttctcccaagaggtcgaaggtcac

SEQ ID NO: 3119415 - DNA, 25 bp, Homo sapien
ccagctggtcttctcccaagaggtc

SEQ ID NO: 3119416 - DNA, 25 bp, Homo sapien
tgtgcgccagccttccgagaaccag

SEQ ID NO: 3119417 - DNA, 25 bp, Homo sapien
acatcagggcccctaaggtgtgcgc

SEQ ID NO: 3119418 - DNA, 25 bp, Homo sapien
acagtcagtggggtcccgacgccgt

SEQ ID NO: 3119419 - DNA, 25 bp, Homo sapien
gggacagtcagtggggtcccgacgc

SEQ ID NO: 3119420 - DNA, 25 bp, Homo sapien
cagtcagtggggtcccgacgccgtc

SEQ ID NO: 3119421 - DNA, 25 bp, Homo sapien
ggacagtcagtggggtcccgacgcc

SEQ ID NO: 3119422 - DNA, 25 bp, Homo sapien
aagcgaagggcccacacgaattcca

SEQ ID NO: 3119423 - DNA, 25 bp, Homo sapien
tgtggaagcgaagggcccacacgaa

SEQ ID NO: 3119424 - DNA, 25 bp, Homo sapien
gaagggcccacacgaattccagcag

SEQ ID NO: 3119425 - DNA, 25 bp, Homo sapien
agggcccacacgaattccagcaggg

SEQ ID NO: 3119426 - DNA, 25 bp, Homo sapien
ctgagcaggacggaggagacggccg

SEQ ID NO: 3119427 - DNA, 25 bp, Homo sapien
cgacaacagcccctggcgcacgtag

SEQ ID NO: 3119428 - DNA, 25 bp, Homo sapien
aggagacggccgacaacagcccctg

SEQ ID NO: 3119429 - DNA, 25 bp, Homo sapien
cgccagccaggaccgggcttccagc

SEQ ID NO: 3119430 - DNA, 25 bp, Homo sapien
ggctagaatcgcagggtgaggaggc

SEQ ID NO: 3119431 - DNA, 25 bp, Homo sapien
cagctcctccccagattgggctaga

SEQ ID NO: 3119432 - DNA, 25 bp, Homo sapien
ccagattgggctagaatcgcagggt

SEQ ID NO: 3119433 - DNA, 25 bp, Homo sapien
tcctccccagattgggctagaatcg

SEQ ID NO: 3119434 - DNA, 25 bp, Homo sapien
cctcttgggtgtctgggaccgcaca

SEQ ID NO: 3119435 - DNA, 25 bp, Homo sapien
caagggctgtggtcggaggtggaag

SEQ ID NO: 3119436 - DNA, 25 bp, Homo sapien
ttgctggacggcagacaagggctgt

SEQ ID NO: 3119437 - DNA, 25 bp, Homo sapien
cagcactgtacatggagggctgccc

SEQ ID NO: 3119438 - DNA, 25 bp, Homo sapien
cagtcctcgtccgggtctttctcag

SEQ ID NO: 3119439 - DNA, 25 bp, Homo sapien
ctcgtccgggtctttctcagccacg

SEQ ID NO: 3119440 - DNA, 25 bp, Homo sapien
tcgtccgggtctttctcagccacgt

SEQ ID NO: 3119441 - DNA, 25 bp, Homo sapien
gcatctgcactctccgtaccggatg

SEQ ID NO: 3119442 - DNA, 25 bp, Homo sapien
tatttttagcggactggctgcacta

SEQ ID NO: 3119443 - DNA, 25 bp, Homo sapien
gcactataaatagcggcaggccggg

SEQ ID NO: 3119444 - DNA, 25 bp, Homo sapien
tgtgagcactattctcctggtgaca

SEQ ID NO: 3119445 - DNA, 25 bp, Homo sapien
gtgacccgtctgcaccttgctctgt

SEQ ID NO: 3119446 - DNA, 25 bp, Homo sapien
tgtgttggaatacgcgacagagctg

SEQ ID NO: 3119447 - DNA, 25 bp, Homo sapien
acagagctgggcgagaacgcagcgg

SEQ ID NO: 3119448 - DNA, 25 bp, Homo sapien
gcccggcagctccactagatttttg

SEQ ID NO: 3119449 - DNA, 25 bp, Homo sapien
taaactgagaatgcccaggcacacg

SEQ ID NO: 3119450 - DNA, 25 bp, Homo sapien
aaggtcagctccgtgagacacagac

SEQ ID NO: 3119451 - DNA, 25 bp, Homo sapien
gaagcctgtggaatttagtaactcg

SEQ ID NO: 3119452 - DNA, 25 bp, Homo sapien
actgggaagcgcagctaaactgaga

SEQ ID NO: 3119453 - DNA, 25 bp, Homo sapien
tagttcccgggactcacaaactgag

SEQ ID NO: 3119454 - DNA, 25 bp, Homo sapien
gtcagaccctgcagctatgccgatg

SEQ ID NO: 3119455 - DNA, 25 bp, Homo sapien
aacatagagaattgcacgcgcctgc

SEQ ID NO: 3119456 - DNA, 25 bp, Homo sapien
gcttgggaaacatgctggcgaccgt

SEQ ID NO: 3119457 - DNA, 25 bp, Homo sapien
agaaagttgtgagaagcagccgggt

SEQ ID NO: 3119458 - DNA, 25 bp, Homo sapien
ctggccctgacttgggcctaccctg

SEQ ID NO: 3119459 - DNA, 25 bp, Homo sapien
tgggcctaccctgaggcagaaagtt

SEQ ID NO: 3119460 - DNA, 25 bp, Homo sapien
agttgtgagaagcagccgggtgcag

SEQ ID NO: 3119461 - DNA, 25 bp, Homo sapien
gagcaactagtgacgagggcagcat

SEQ ID NO: 3119462 - DNA, 25 bp, Homo sapien
gcagcatatgctcaggatttgggat

SEQ ID NO: 3119463 - DNA, 25 bp, Homo sapien
gcctcatgtgtagtgtgggagcaac

SEQ ID NO: 3119464 - DNA, 25 bp, Homo sapien
tcccctgtggtggatagcagctgaa

SEQ ID NO: 3119465 - DNA, 25 bp, Homo sapien
ctgtgggcggctggtccctccagtc

SEQ ID NO: 3119466 - DNA, 25 bp, Homo sapien
ctctgtgggcggctggtccctccag

SEQ ID NO: 3119467 - DNA, 25 bp, Homo sapien
tctgtgggcggctggtccctccagt

SEQ ID NO: 3119468 - DNA, 25 bp, Homo sapien
aggcgtagccaaccgcaacaaatag

SEQ ID NO: 3119469 - DNA, 25 bp, Homo sapien
aaaacagagtcactcgggaggccgg

SEQ ID NO: 3119470 - DNA, 25 bp, Homo sapien
tgtggagcgggttcacagctcctct

SEQ ID NO: 3119471 - DNA, 25 bp, Homo sapien
gtgtgcgcagagctcgccttccctg

SEQ ID NO: 3119472 - DNA, 25 bp, Homo sapien
ggtgccgccgcttatccggagaaag

SEQ ID NO: 3119473 - DNA, 25 bp, Homo sapien
gggtggctagaggacatcaccactc

SEQ ID NO: 3119474 - DNA, 25 bp, Homo sapien
agggccaggagtgcgccgtcttccc

SEQ ID NO: 3119475 - DNA, 25 bp, Homo sapien
ccagggagagccgacgctgctaggg

SEQ ID NO: 3119476 - DNA, 25 bp, Homo sapien
cggccacgagtctctgcacggtcat

SEQ ID NO: 3119477 - DNA, 25 bp, Homo sapien
ctcacagtcatgtgcgtccacctgg

SEQ ID NO: 3119478 - DNA, 25 bp, Homo sapien
tgaaggccgccacgttgttgaggat

SEQ ID NO: 3119479 - DNA, 25 bp, Homo sapien
cagcgtctggcacacccagttggag

SEQ ID NO: 3119480 - DNA, 25 bp, Homo sapien
atgtgccctcgagcctcggccacgc

SEQ ID NO: 3119481 - DNA, 25 bp, Homo sapien
tccgcgcctaacatctcccatgtgc

SEQ ID NO: 3119482 - DNA, 25 bp, Homo sapien
caggtccgcgcctaacatctcccat

SEQ ID NO: 3119483 - DNA, 25 bp, Homo sapien
gccctcgagcctcggccacgctgaa

SEQ ID NO: 3119484 - DNA, 25 bp, Homo sapien
gagatgaattcctgtgtaaaagagc

SEQ ID NO: 3119485 - DNA, 25 bp, Homo sapien
ccttgatttgattaatgtacccatc

SEQ ID NO: 3119486 - DNA, 25 bp, Homo sapien
aactatgtgtaacggcagagaggcc

SEQ ID NO: 3119487 - DNA, 25 bp, Homo sapien
tatgtaggctaggttcgtcttgaac

SEQ ID NO: 3119488 - DNA, 25 bp, Homo sapien
agccacctgcagatgccatacaagt

SEQ ID NO: 3119489 - DNA, 25 bp, Homo sapien
tgctcaggttcactgagggtcagcc

SEQ ID NO: 3119490 - DNA, 25 bp, Homo sapien
taaatattgtccaaggggctgacca

SEQ ID NO: 3119491 - DNA, 25 bp, Homo sapien
gatgccatacaagttgcaggaggat

SEQ ID NO: 3119492 - DNA, 25 bp, Homo sapien
atgaagtcgagaccgggctcctctg

SEQ ID NO: 3119493 - DNA, 25 bp, Homo sapien
gatgattttgactccatgtgcccca

SEQ ID NO: 3119494 - DNA, 25 bp, Homo sapien
agggcctgaacctggatgaagtcga

SEQ ID NO: 3119495 - DNA, 25 bp, Homo sapien
tcctggtgatgtttgcgagtgacga

SEQ ID NO: 3119496 - DNA, 25 bp, Homo sapien
gccagccccaagcagtgaccacgta

SEQ ID NO: 3119497 - DNA, 25 bp, Homo sapien
agccccaagcagtgaccacgtacag

SEQ ID NO: 3119498 - DNA, 25 bp, Homo sapien
tcctgactgctccaacggactccac

SEQ ID NO: 3119499 - DNA, 25 bp, Homo sapien
tgctccaacggactccacagccagc

SEQ ID NO: 3119500 - DNA, 25 bp, Homo sapien
tgtcccaagagccctgaaggtgctg

SEQ ID NO: 3119501 - DNA, 25 bp, Homo sapien
ggtgctggcctctagggtgactgct

SEQ ID NO: 3119502 - DNA, 25 bp, Homo sapien
tccccgcgcccgcatccatcacaga

SEQ ID NO: 3119503 - DNA, 25 bp, Homo sapien
aaggtgctggcctctagggtgactg

SEQ ID NO: 3119504 - DNA, 25 bp, Homo sapien
tcgccagttggaatgcagcggccat

SEQ ID NO: 3119505 - DNA, 25 bp, Homo sapien
caggcgcgcatcatgtcgaactgca

SEQ ID NO: 3119506 - DNA, 25 bp, Homo sapien
ccagttggaatgcagcggccatggc

SEQ ID NO: 3119507 - DNA, 25 bp, Homo sapien
caccaggttgcaggcgcgcatcatg

SEQ ID NO: 3119508 - DNA, 25 bp, Homo sapien
tgggccgacatgctcgctttctctg

SEQ ID NO: 3119509 - DNA, 25 bp, Homo sapien
agccatgggccgacatgctcgcttt

SEQ ID NO: 3119510 - DNA, 25 bp, Homo sapien
ccatgggccgacatgctcgctttct

SEQ ID NO: 3119511 - DNA, 25 bp, Homo sapien
catgggccgacatgctcgctttctc

SEQ ID NO: 3119512 - DNA, 25 bp, Homo sapien
tgcgagcattgctgacgagggcaca

SEQ ID NO: 3119513 - DNA, 25 bp, Homo sapien
cacatctgtgcgctggagtggtcac

SEQ ID NO: 3119514 - DNA, 25 bp, Homo sapien
gcatgcatgttacccagcagggctt

SEQ ID NO: 3119515 - DNA, 25 bp, Homo sapien
cgatccagctgggaaacacctgagg

SEQ ID NO: 3119516 - DNA, 25 bp, Homo sapien
taatccagaccaagcaaagaaccgg

SEQ ID NO: 3119517 - DNA, 25 bp, Homo sapien
cagcagactttctcaccagcgagca

SEQ ID NO: 3119518 - DNA, 25 bp, Homo sapien
tatttccacgagacgattcccaagt

SEQ ID NO: 3119519 - DNA, 25 bp, Homo sapien
tggtgccccgatgtcatgtccaggg

SEQ ID NO: 3119520 - DNA, 25 bp, Homo sapien
tgagtcagctgcatgatcgcactgc

SEQ ID NO: 3119521 - DNA, 25 bp, Homo sapien
cgcgcgtaagaaggtgactgagtca

SEQ ID NO: 3119522 - DNA, 25 bp, Homo sapien
ttggcctccagacgcgcgtaagaag

SEQ ID NO: 3119523 - DNA, 25 bp, Homo sapien
gatgccgttctgaagccttttactt

SEQ ID NO: 3119524 - DNA, 25 bp, Homo sapien
gatccttcgggcctcggcttagagt

SEQ ID NO: 3119525 - DNA, 25 bp, Homo sapien
gagccctttggccagatcacgtaga

SEQ ID NO: 3119526 - DNA, 25 bp, Homo sapien
actgggtccacctactctgggcttc

SEQ ID NO: 3119527 - DNA, 25 bp, Homo sapien
gaggagaccaaagtagacgtgaaac

SEQ ID NO: 3119528 - DNA, 25 bp, Homo sapien
atggagccgggcgtcctaatccagc

SEQ ID NO: 3119529 - DNA, 25 bp, Homo sapien
taatccagctggaaacataggctct

SEQ ID NO: 3119530 - DNA, 25 bp, Homo sapien
gaaacataggctctaggatggagga

SEQ ID NO: 3119531 - DNA, 25 bp, Homo sapien
actgtggccgcagcgatggagccgg

SEQ ID NO: 3119532 - DNA, 25 bp, Homo sapien
tcagcatggtgactccacgtagtca

SEQ ID NO: 3119533 - DNA, 25 bp, Homo sapien
tcaggtagcaggaccaggacaggtt

SEQ ID NO: 3119534 - DNA, 25 bp, Homo sapien
cagggagcggctgatgacaatcacc

SEQ ID NO: 3119535 - DNA, 25 bp, Homo sapien
tctgtagaaagtcacgagcccgatg

SEQ ID NO: 3119536 - DNA, 25 bp, Homo sapien
gcgttgcgctaaccaggaaagctgg

SEQ ID NO: 3119537 - DNA, 25 bp, Homo sapien
taacagtaaacgcacacgtgtctcg

SEQ ID NO: 3119538 - DNA, 25 bp, Homo sapien
ttaatcccaaagcaaagcggagcgc

SEQ ID NO: 3119539 - DNA, 25 bp, Homo sapien
gacacgtacagacatatgaccgaca

SEQ ID NO: 3119540 - DNA, 25 bp, Homo sapien
cacgaacacgattctgtctgaaacc

SEQ ID NO: 3119541 - DNA, 25 bp, Homo sapien
taaccggctatagattctgactcac

SEQ ID NO: 3119542 - DNA, 25 bp, Homo sapien
aaaccatcactaaccggctatagat

SEQ ID NO: 3119543 - DNA, 25 bp, Homo sapien
aggaaaagaatcgagcaaaacagac

SEQ ID NO: 3119544 - DNA, 25 bp, Homo sapien
gcattcacacaaacgcgaacctggg

SEQ ID NO: 3119545 - DNA, 25 bp, Homo sapien
aacttgtgacaatgacgtgaccagg

SEQ ID NO: 3119546 - DNA, 25 bp, Homo sapien
taggacctggcataaaggacacggt

SEQ ID NO: 3119547 - DNA, 25 bp, Homo sapien
gaccccagagggacattccgagaag

SEQ ID NO: 3119548 - DNA, 25 bp, Homo sapien
ttacaggaagcatgactgcggaggc

SEQ ID NO: 3119549 - DNA, 25 bp, Homo sapien
attactgcaggctttacaggaagca

SEQ ID NO: 3119550 - DNA, 25 bp, Homo sapien
gctttacaggaagcatgactgcgga

SEQ ID NO: 3119551 - DNA, 25 bp, Homo sapien
ggctttacaggaagcatgactgcgg

SEQ ID NO: 3119552 - DNA, 25 bp, Homo sapien
ccttgcacagccttcctcggccttc

SEQ ID NO: 3119553 - DNA, 25 bp, Homo sapien
tgctgacacagccttgcacagcctt

SEQ ID NO: 3119554 - DNA, 25 bp, Homo sapien
ttcctcggccttccagccctgcaca

SEQ ID NO: 3119555 - DNA, 25 bp, Homo sapien
ttccttgatgctgacacagccttgc

SEQ ID NO: 3119556 - DNA, 25 bp, Homo sapien
ggtaaagccatcaagccctgagaga

SEQ ID NO: 3119557 - DNA, 25 bp, Homo sapien
tatggaactcattcaggcaggcctg

SEQ ID NO: 3119558 - DNA, 25 bp, Homo sapien
tgctaagtttcatccgcgcagggcc

SEQ ID NO: 3119559 - DNA, 25 bp, Homo sapien
ggcaagaagcacacgacaaaggtaa

SEQ ID NO: 3119560 - DNA, 25 bp, Homo sapien
ccctgagggtcgtgttgcatcaaac

SEQ ID NO: 3119561 - DNA, 25 bp, Homo sapien
tggcttctcagtaccgtccgctgga

SEQ ID NO: 3119562 - DNA, 25 bp, Homo sapien
gaccccgtgccgcttagctgaatgg

SEQ ID NO: 3119563 - DNA, 25 bp, Homo sapien
tgtttggtcactcgctgggtcggcc

SEQ ID NO: 3119564 - DNA, 25 bp, Homo sapien
tgcggacgcagatactgccgccact

SEQ ID NO: 3119565 - DNA, 25 bp, Homo sapien
cacctttttcatcaacgccgggcgg

SEQ ID NO: 3119566 - DNA, 25 bp, Homo sapien
ctggtcgtccgcctcggaagcgact

SEQ ID NO: 3119567 - DNA, 25 bp, Homo sapien
tccgcctcggaagcgactggtcgag

SEQ ID NO: 3119568 - DNA, 25 bp, Homo sapien
ctgtaccgggcgctgtggaagcgac

SEQ ID NO: 3119569 - DNA, 25 bp, Homo sapien
ccctgaggccagttgtggctgtacc

SEQ ID NO: 3119570 - DNA, 25 bp, Homo sapien
taccgggcgctgtggaagcgacgcc

SEQ ID NO: 3119571 - DNA, 25 bp, Homo sapien
agttgtggctgtaccgggcgctgtg

SEQ ID NO: 3119572 - DNA, 25 bp, Homo sapien
cccacgcgccggcccccagagctgg

SEQ ID NO: 3119573 - DNA, 25 bp, Homo sapien
ccgggacgggagaagcgcgggctcg

SEQ ID NO: 3119574 - DNA, 25 bp, Homo sapien
cgcctgcccgcacggggaactccat

SEQ ID NO: 3119575 - DNA, 25 bp, Homo sapien
gggacgggagaagcgcgggctcgcc

SEQ ID NO: 3119576 - DNA, 25 bp, Homo sapien
gccgtcgcccaacttcactgtcatc

SEQ ID NO: 3119577 - DNA, 25 bp, Homo sapien
ttcttgagcccgtcctccccgctgc

SEQ ID NO: 3119578 - DNA, 25 bp, Homo sapien
cccagcttcttgagcccgtcctccc

SEQ ID NO: 3119579 - DNA, 25 bp, Homo sapien
cgccgtcgcccaacttcactgtcat

SEQ ID NO: 3119580 - DNA, 25 bp, Homo sapien
gtccctctttgtgccgctgctctcc

SEQ ID NO: 3119581 - DNA, 25 bp, Homo sapien
gggtcttctcgtccctctttgtgcc

SEQ ID NO: 3119582 - DNA, 25 bp, Homo sapien
ttctcgtccctctttgtgccgctgc

SEQ ID NO: 3119583 - DNA, 25 bp, Homo sapien
ggggtcttctcgtccctctttgtgc

SEQ ID NO: 3119584 - DNA, 25 bp, Homo sapien
cacagcgctcggaggatccttcctg

SEQ ID NO: 3119585 - DNA, 25 bp, Homo sapien
tgggcctcttgctctgcggccgcac

SEQ ID NO: 3119586 - DNA, 25 bp, Homo sapien
ggccccgagccaccggcgttgccgc

SEQ ID NO: 3119587 - DNA, 25 bp, Homo sapien
cacgctggaccggaggaagtggtgc

SEQ ID NO: 3119588 - DNA, 25 bp, Homo sapien
agtttcaaaagcctgctcccttggt

SEQ ID NO: 3119589 - DNA, 25 bp, Homo sapien
ttggtgcatttccaccgcctgatgt

SEQ ID NO: 3119590 - DNA, 25 bp, Homo sapien
ccccaatgagtttcaaaagcctgct

SEQ ID NO: 3119591 - DNA, 25 bp, Homo sapien
catcttccccccaatgagtttcaaa

SEQ ID NO: 3119592 - DNA, 25 bp, Homo sapien
cacgcggctaatagacagccagagc

SEQ ID NO: 3119593 - DNA, 25 bp, Homo sapien
cgaaaggcacgcggctaatagacag

SEQ ID NO: 3119594 - DNA, 25 bp, Homo sapien
ggcacgcggctaatagacagccaga

SEQ ID NO: 3119595 - DNA, 25 bp, Homo sapien
cggctaatagacagccagagctggg

SEQ ID NO: 3119596 - DNA, 25 bp, Homo sapien
ccaggccgctttccggctgctccat

SEQ ID NO: 3119597 - DNA, 25 bp, Homo sapien
ttggagagaaagcaccgtacagtga

SEQ ID NO: 3119598 - DNA, 25 bp, Homo sapien
cagtgatctgttccagaaagctggc

SEQ ID NO: 3119599 - DNA, 25 bp, Homo sapien
gaaagcaccgtacagtgatctgttc

SEQ ID NO: 3119600 - DNA, 25 bp, Homo sapien
gtgatctgttccagaaagctggcgg

SEQ ID NO: 3119601 - DNA, 25 bp, Homo sapien
atttccagacgatgatccaccacct

SEQ ID NO: 3119602 - DNA, 25 bp, Homo sapien
cacatttccagacgatgatccacca

SEQ ID NO: 3119603 - DNA, 25 bp, Homo sapien
cagacacatttccagacgatgatcc

SEQ ID NO: 3119604 - DNA, 25 bp, Homo sapien
ccccagacacatttccagacgatga

SEQ ID NO: 3119605 - DNA, 25 bp, Homo sapien
tctcgccaccagaagaccctaagtt

SEQ ID NO: 3119606 - DNA, 25 bp, Homo sapien
tacagcccctcgaagaaggtgttct

SEQ ID NO: 3119607 - DNA, 25 bp, Homo sapien
cactgccgccggacctttttgcctt

SEQ ID NO: 3119608 - DNA, 25 bp, Homo sapien
gtcctctgtgctccacgactcccac

SEQ ID NO: 3119609 - DNA, 25 bp, Homo sapien
catgatcaaagtcgatgtacttggt

SEQ ID NO: 3119610 - DNA, 25 bp, Homo sapien
tagaagtggcggacctgctccttgt

SEQ ID NO: 3119611 - DNA, 25 bp, Homo sapien
tttcttcttgtacttcagcgcaatg

SEQ ID NO: 3119612 - DNA, 25 bp, Homo sapien
tcttgtgccaggtgcggtagtagaa

SEQ ID NO: 3119613 - DNA, 25 bp, Homo sapien
cacaccaggctcacgtggtttcttg

SEQ ID NO: 3119614 - DNA, 25 bp, Homo sapien
cctggcttgggtgtgagagccacac

SEQ ID NO: 3119615 - DNA, 25 bp, Homo sapien
tggatctcctccctgtacctttgtc

SEQ ID NO: 3119616 - DNA, 25 bp, Homo sapien
aacagaagagaaggcggctttagag

SEQ ID NO: 3119617 - DNA, 25 bp, Homo sapien
gccatagcagatcaggccatacagt

SEQ ID NO: 3119618 - DNA, 25 bp, Homo sapien
aatcttcttgcgcagctcgccatag

SEQ ID NO: 3119619 - DNA, 25 bp, Homo sapien
gccatacagttcctgggatgacttc

SEQ ID NO: 3119620 - DNA, 25 bp, Homo sapien
gacttcttcaggcctcgagagaaca

SEQ ID NO: 3119621 - DNA, 25 bp, Homo sapien
tccacagtcacatgcagggcaacgg

SEQ ID NO: 3119622 - DNA, 25 bp, Homo sapien
tattctgggctgtggcgtgacatct

SEQ ID NO: 3119623 - DNA, 25 bp, Homo sapien
catctaagctaaagagcacggccgc

SEQ ID NO: 3119624 - DNA, 25 bp, Homo sapien
tgctaaaagtctaggtgcgaccatg

SEQ ID NO: 3119625 - DNA, 25 bp, Homo sapien
ccaacctgaatgagttcattcagct

SEQ ID NO: 3119626 - DNA, 25 bp, Homo sapien
tttgttgcattcttgtcatccatac

SEQ ID NO: 3119627 - DNA, 25 bp, Homo sapien
ggactgaacacgtaactgagaggtt

SEQ ID NO: 3119628 - DNA, 25 bp, Homo sapien
ttttaactcggaaggtcctcactga

SEQ ID NO: 3119629 - DNA, 25 bp, Homo sapien
caggacacgacaaaaatgcaatgga

SEQ ID NO: 3119630 - DNA, 25 bp, Homo sapien
tgagtgctgcgtcgagaccacaacg

SEQ ID NO: 3119631 - DNA, 25 bp, Homo sapien
gcaaaaggaacgctcatcggacagg

SEQ ID NO: 3119632 - DNA, 25 bp, Homo sapien
ggtgaagtaagatttgccccaagta

SEQ ID NO: 3119633 - DNA, 25 bp, Homo sapien
ttctcccgcggatggcgctgcaggt

SEQ ID NO: 3119634 - DNA, 25 bp, Homo sapien
tgtgcaccgtcctcaagcatacagc

SEQ ID NO: 3119635 - DNA, 25 bp, Homo sapien
agcacagtggagggatcttggttca

SEQ ID NO: 3119636 - DNA, 25 bp, Homo sapien
ccagtcttttccagacaagctggta

SEQ ID NO: 3119637 - DNA, 25 bp, Homo sapien
tccagacaagctggtagccaggtga

SEQ ID NO: 3119638 - DNA, 25 bp, Homo sapien
tagccaggtgagctacctcaacact

SEQ ID NO: 3119639 - DNA, 25 bp, Homo sapien
ggtgagctacctcaacactagcttc

SEQ ID NO: 3119640 - DNA, 25 bp, Homo sapien
tctttccttgctggtaccatgctgt

SEQ ID NO: 3119641 - DNA, 25 bp, Homo sapien
cagcagccgttctgcctcagatctc

SEQ ID NO: 3119642 - DNA, 25 bp, Homo sapien
catttccagaaccaatgaacacact

SEQ ID NO: 3119643 - DNA, 25 bp, Homo sapien
caaaccttttctccgtgtctcacac

SEQ ID NO: 3119644 - DNA, 25 bp, Homo sapien
agttctgcgaccgacttgaggctgc

SEQ ID NO: 3119645 - DNA, 25 bp, Homo sapien
ttgaggctgcgacactgaacacgat

SEQ ID NO: 3119646 - DNA, 25 bp, Homo sapien
ttaggcctggtcacagttccgggac

SEQ ID NO: 3119647 - DNA, 25 bp, Homo sapien
ttcaagtgcgaaagccagggtgacg

SEQ ID NO: 3119648 - DNA, 25 bp, Homo sapien
aaaagagttttgaaggaacgctgag

SEQ ID NO: 3119649 - DNA, 25 bp, Homo sapien
aaagagttttgaaggaacgctgagg

SEQ ID NO: 3119650 - DNA, 25 bp, Homo sapien
gaaaagagttttgaaggaacgctga

SEQ ID NO: 3119651 - DNA, 25 bp, Homo sapien
aagagttttgaaggaacgctgaggc

SEQ ID NO: 3119652 - DNA, 25 bp, Homo sapien
catctggatcgcacagcttcttcag

SEQ ID NO: 3119653 - DNA, 25 bp, Homo sapien
catgggcgctttgatccgcaggttc

SEQ ID NO: 3119654 - DNA, 25 bp, Homo sapien
gccctttgtaacgtacagtggtggc

SEQ ID NO: 3119655 - DNA, 25 bp, Homo sapien
ttcagggcccggcacatgggcgctt

SEQ ID NO: 3119656 - DNA, 25 bp, Homo sapien
gttgttccgcggctgtagctctata

SEQ ID NO: 3119657 - DNA, 25 bp, Homo sapien
tatagggactttcagaggcaggcgc

SEQ ID NO: 3119658 - DNA, 25 bp, Homo sapien
ctggcttctggtcctcttcatcact

SEQ ID NO: 3119659 - DNA, 25 bp, Homo sapien
ccgcggctgtagctctatagggact

SEQ ID NO: 3119660 - DNA, 25 bp, Homo sapien
ctccacggcctgaacacaggttggg

SEQ ID NO: 3119661 - DNA, 25 bp, Homo sapien
acaggttgggcgatccctgcccaga

SEQ ID NO: 3119662 - DNA, 25 bp, Homo sapien
cactgctgcgtcctcgtgtgatgac

SEQ ID NO: 3119663 - DNA, 25 bp, Homo sapien
tgcccagatacaggactgcagccca

SEQ ID NO: 3119664 - DNA, 25 bp, Homo sapien
agccacgagtctccaagaagcgggt

SEQ ID NO: 3119665 - DNA, 25 bp, Homo sapien
acgatggcgccttgtgcatatgcga

SEQ ID NO: 3119666 - DNA, 25 bp, Homo sapien
gccttgtgcatatgcgagccacgag

SEQ ID NO: 3119667 - DNA, 25 bp, Homo sapien
gaggaactgtatgggccttagtggg

SEQ ID NO: 3119668 - DNA, 25 bp, Homo sapien
ctgcttcaagaattcgatgaggctg

SEQ ID NO: 3119669 - DNA, 25 bp, Homo sapien
tgaggctggagacctttcgatgtag

SEQ ID NO: 3119670 - DNA, 25 bp, Homo sapien
tcaagaattcgatgaggctggagac

SEQ ID NO: 3119671 - DNA, 25 bp, Homo sapien
ctttcgatgtagctccacgatcatc

SEQ ID NO: 3119672 - DNA, 25 bp, Homo sapien
tcaaggaaggcccacactggctagc

SEQ ID NO: 3119673 - DNA, 25 bp, Homo sapien
ctgagtgcccgtcaaggaaggccca

SEQ ID NO: 3119674 - DNA, 25 bp, Homo sapien
cactggctagcactgaggtcgggat

SEQ ID NO: 3119675 - DNA, 25 bp, Homo sapien
ccacactggctagcactgaggtcgg

SEQ ID NO: 3119676 - DNA, 25 bp, Homo sapien
gcagctgccgctcctcgagtgtctt

SEQ ID NO: 3119677 - DNA, 25 bp, Homo sapien
cagctgccgctcctcgagtgtcttc

SEQ ID NO: 3119678 - DNA, 25 bp, Homo sapien
gctgccgctcctcgagtgtcttccg

SEQ ID NO: 3119679 - DNA, 25 bp, Homo sapien
agctgccgctcctcgagtgtcttcc

SEQ ID NO: 3119680 - DNA, 25 bp, Homo sapien
cttctcctgcatcggtgcggagcat

SEQ ID NO: 3119681 - DNA, 25 bp, Homo sapien
tcagtgtacagttctcgcctgggaa

SEQ ID NO: 3119682 - DNA, 25 bp, Homo sapien
aaggccttggagtgcaccacgcgag

SEQ ID NO: 3119683 - DNA, 25 bp, Homo sapien
agccacgcccggcagcggtgtcagt

SEQ ID NO: 3119684 - DNA, 25 bp, Homo sapien
agcacgtgggcgtccttggcactct

SEQ ID NO: 3119685 - DNA, 25 bp, Homo sapien
aggaggcctgtcaggagcgtccggg

SEQ ID NO: 3119686 - DNA, 25 bp, Homo sapien
tccgggctgctcaagcttagggcag

SEQ ID NO: 3119687 - DNA, 25 bp, Homo sapien
ccgggtgggactgtccctgccttct

SEQ ID NO: 3119688 - DNA, 25 bp, Homo sapien
tctccggagctctgcaaggcgtcag

SEQ ID NO: 3119689 - DNA, 25 bp, Homo sapien
aagcgagagctcgtcctccaggtct

SEQ ID NO: 3119690 - DNA, 25 bp, Homo sapien
gggtctagaagcgagagctcgtcct

SEQ ID NO: 3119691 - DNA, 25 bp, Homo sapien
cactgctcggggacaatgaggtcct

SEQ ID NO: 3119692 - DNA, 25 bp, Homo sapien
gacaggactttaggtagcggggcaa

SEQ ID NO: 3119693 - DNA, 25 bp, Homo sapien
gctgctcgctcccaggccgtgtgtc

SEQ ID NO: 3119694 - DNA, 25 bp, Homo sapien
ggtcagcagcctccttgctgacagg

SEQ ID NO: 3119695 - DNA, 25 bp, Homo sapien
ggatgggccagtgggagcaaggtca

SEQ ID NO: 3119696 - DNA, 25 bp, Homo sapien
tttagtgcaaacatccagcaggagc

SEQ ID NO: 3119697 - DNA, 25 bp, Homo sapien
tcctccgcaggtgcatctgccaagt

SEQ ID NO: 3119698 - DNA, 25 bp, Homo sapien
gagctcctccgcaggtgcatctgcc

SEQ ID NO: 3119699 - DNA, 25 bp, Homo sapien
ctcctccgcaggtgcatctgccaag

SEQ ID NO: 3119700 - DNA, 25 bp, Homo sapien
ctggagctcctccgcaggtgcatct

SEQ ID NO: 3119701 - DNA, 25 bp, Homo sapien
tgggcttgcccatcatgaggtagac

SEQ ID NO: 3119702 - DNA, 25 bp, Homo sapien
ggctttcggaggtctgcaggttcca

SEQ ID NO: 3119703 - DNA, 25 bp, Homo sapien
aggctgtccctgagacggcggaggc

SEQ ID NO: 3119704 - DNA, 25 bp, Homo sapien
gtagacttcggccagcgtgaggctt

SEQ ID NO: 3119705 - DNA, 25 bp, Homo sapien
ttgtggagggcggtgggtagggagc

SEQ ID NO: 3119706 - DNA, 25 bp, Homo sapien
cttgtggagggcggtgggtagggag

SEQ ID NO: 3119707 - DNA, 25 bp, Homo sapien
cagcttggggttgacctcggtggaa

SEQ ID NO: 3119708 - DNA, 25 bp, Homo sapien
tgacctcggtggaaatgagcttcag

SEQ ID NO: 3119709 - DNA, 25 bp, Homo sapien
gttgacctcggtggaaatgagcttc

SEQ ID NO: 3119710 - DNA, 25 bp, Homo sapien
gggttgacctcggtggaaatgagct

SEQ ID NO: 3119711 - DNA, 25 bp, Homo sapien
actctccggggcaagccctgcaccg

SEQ ID NO: 3119712 - DNA, 25 bp, Homo sapien
ccacctgctgatggaccaactctcc

SEQ ID NO: 3119713 - DNA, 25 bp, Homo sapien
cctgctgatggaccaactctccggg

SEQ ID NO: 3119714 - DNA, 25 bp, Homo sapien
cctggtgtccctgctatgcgacccc

SEQ ID NO: 3119715 - DNA, 25 bp, Homo sapien
gggctgcgagagctgacggtcacca

SEQ ID NO: 3119716 - DNA, 25 bp, Homo sapien
ctcctgggcgggccttactgaggct

SEQ ID NO: 3119717 - DNA, 25 bp, Homo sapien
ccttactgaggctgtagagatggtg

SEQ ID NO: 3119718 - DNA, 25 bp, Homo sapien
ccttccctgggggcgtcatcgactg

SEQ ID NO: 3119719 - DNA, 25 bp, Homo sapien
caaggttgtcgggacagcaaaaagg

SEQ ID NO: 3119720 - DNA, 25 bp, Homo sapien
ggagagaagagcttcccgtgtcggc

SEQ ID NO: 3119721 - DNA, 25 bp, Homo sapien
agttcagatgctggcggaaagtcag

SEQ ID NO: 3119722 - DNA, 25 bp, Homo sapien
ctgtgctggagggaccaggcaccaa

SEQ ID NO: 3119723 - DNA, 25 bp, Homo sapien
cacggggacgctcgcacgcgggcgg

SEQ ID NO: 3119724 - DNA, 25 bp, Homo sapien
gtgcactctccagaccacggggacg

SEQ ID NO: 3119725 - DNA, 25 bp, Homo sapien
gcgtccggcacctgaaggtgcactc

SEQ ID NO: 3119726 - DNA, 25 bp, Homo sapien
aaggtgcactctccagaccacgggg

SEQ ID NO: 3119727 - DNA, 25 bp, Homo sapien
gcaggtgccggttccgcagcttccg

SEQ ID NO: 3119728 - DNA, 25 bp, Homo sapien
aggtgccggttccgcagcttccggg

SEQ ID NO: 3119729 - DNA, 25 bp, Homo sapien
caggtgccggttccgcagcttccgg

SEQ ID NO: 3119730 - DNA, 25 bp, Homo sapien
ccgcaggtgccggttccgcagcttc

SEQ ID NO: 3119731 - DNA, 25 bp, Homo sapien
tgatggtcgtcgtacaccttgtgac

SEQ ID NO: 3119732 - DNA, 25 bp, Homo sapien
ttttatgcgtcagaatgccaagctc

SEQ ID NO: 3119733 - DNA, 25 bp, Homo sapien
cgaggccacacgttcagacttgaga

SEQ ID NO: 3119734 - DNA, 25 bp, Homo sapien
cgtgagttcataggagcagggtttc

SEQ ID NO: 3119735 - DNA, 25 bp, Homo sapien
ttataggcactcgccatcacgccca

SEQ ID NO: 3119736 - DNA, 25 bp, Homo sapien
tacaggtgcgagccaccgtgcctgg

SEQ ID NO: 3119737 - DNA, 25 bp, Homo sapien
gattataggcactcgccatcacgcc

SEQ ID NO: 3119738 - DNA, 25 bp, Homo sapien
caggtgcgagccaccgtgcctggcc

SEQ ID NO: 3119739 - DNA, 25 bp, Homo sapien
ttacggaagagttagacaggatgga

SEQ ID NO: 3119740 - DNA, 25 bp, Homo sapien
tgtgggactggttttccgatggtct

SEQ ID NO: 3119741 - DNA, 25 bp, Homo sapien
tccgatggtctagggagcagtgttc

SEQ ID NO: 3119742 - DNA, 25 bp, Homo sapien
cagttacggaagagttagacaggat

SEQ ID NO: 3119743 - DNA, 25 bp, Homo sapien
gataggccatggaaataagcaccca

SEQ ID NO: 3119744 - DNA, 25 bp, Homo sapien
gaagggcaccctttggactagctgc

SEQ ID NO: 3119745 - DNA, 25 bp, Homo sapien
tgtgtaatatctaccgcaaggagcc

SEQ ID NO: 3119746 - DNA, 25 bp, Homo sapien
cagagagagcagacaagagacacaa

SEQ ID NO: 3119747 - DNA, 25 bp, Homo sapien
gcaaaagcagacatgtcgagcccgc

SEQ ID NO: 3119748 - DNA, 25 bp, Homo sapien
tcatcctgcggaaatggctcttgaa

SEQ ID NO: 3119749 - DNA, 25 bp, Homo sapien
tcctttacagccactgttgggagtg

SEQ ID NO: 3119750 - DNA, 25 bp, Homo sapien
tccaaatgctaacatgaggagtcag

SEQ ID NO: 3119751 - DNA, 25 bp, Homo sapien
aaggaccttgggcacgatcggccga

SEQ ID NO: 3119752 - DNA, 25 bp, Homo sapien
cacgatcggccgagacagagctgct

SEQ ID NO: 3119753 - DNA, 25 bp, Homo sapien
ggccgagacagagctgctttggtca

SEQ ID NO: 3119754 - DNA, 25 bp, Homo sapien
ctggatgggccggaacgaacctctc

SEQ ID NO: 3119755 - DNA, 25 bp, Homo sapien
ttcccggaaaggatgccggcacttg

SEQ ID NO: 3119756 - DNA, 25 bp, Homo sapien
tggtgagttccagtagagtcctgcc

SEQ ID NO: 3119757 - DNA, 25 bp, Homo sapien
gtggagagatgccagacaagccctc

SEQ ID NO: 3119758 - DNA, 25 bp, Homo sapien
cacttgtagctgctaagtcgatagc

SEQ ID NO: 3119759 - DNA, 25 bp, Homo sapien
cagggtgcaccagatgccacccata

SEQ ID NO: 3119760 - DNA, 25 bp, Homo sapien
aggaagagcacgcccatgagcagcc

SEQ ID NO: 3119761 - DNA, 25 bp, Homo sapien
cacccgcgacagagttccagaaaaa

SEQ ID NO: 3119762 - DNA, 25 bp, Homo sapien
tccagaaaaagaggcgttccatccc

SEQ ID NO: 3119763 - DNA, 25 bp, Homo sapien
tgctcaggcctcgaagggatgctga

SEQ ID NO: 3119764 - DNA, 25 bp, Homo sapien
cctgctcaggcctcgaagggatgct

SEQ ID NO: 3119765 - DNA, 25 bp, Homo sapien
ctcaggcctcgaagggatgctgaca

SEQ ID NO: 3119766 - DNA, 25 bp, Homo sapien
tcaggcctcgaagggatgctgacaa

SEQ ID NO: 3119767 - DNA, 25 bp, Homo sapien
ctcagataaggagagaacagatgag

SEQ ID NO: 3119768 - DNA, 25 bp, Homo sapien
tcagataaggagagaacagatgagc

SEQ ID NO: 3119769 - DNA, 25 bp, Homo sapien
cagataaggagagaacagatgagcc

SEQ ID NO: 3119770 - DNA, 25 bp, Homo sapien
gtgctggagctctctgacgaggaca

SEQ ID NO: 3119771 - DNA, 25 bp, Homo sapien
gcaggctcgccctgtgacagcgcat

SEQ ID NO: 3119772 - DNA, 25 bp, Homo sapien
tgatggcgatctcaatgatggagtc

SEQ ID NO: 3119773 - DNA, 25 bp, Homo sapien
acagcggtatggagaggccattctg

SEQ ID NO: 3119774 - DNA, 25 bp, Homo sapien
ctcggcaggtaaggagcgcagcacc

SEQ ID NO: 3119775 - DNA, 25 bp, Homo sapien
gctgaaccagatggatggcatggct

SEQ ID NO: 3119776 - DNA, 25 bp, Homo sapien
cagggctctaccctgctgaaccaga

SEQ ID NO: 3119777 - DNA, 25 bp, Homo sapien
ttctccagcccaccacggagaaggc

SEQ ID NO: 3119778 - DNA, 25 bp, Homo sapien
tgagcgaggagtcggtggagtcact

SEQ ID NO: 3119779 - DNA, 25 bp, Homo sapien
gaaggctcttggaactgtcactgcc

SEQ ID NO: 3119780 - DNA, 25 bp, Homo sapien
tgggtgggagaggcgatccagtgtg

SEQ ID NO: 3119781 - DNA, 25 bp, Homo sapien
gggagggaaggctcttggaactgtc

SEQ ID NO: 3119782 - DNA, 25 bp, Homo sapien
gcaaggaagtgccactgttggtccc

SEQ ID NO: 3119783 - DNA, 25 bp, Homo sapien
tgggagtcggcaacatcttccggct

SEQ ID NO: 3119784 - DNA, 25 bp, Homo sapien
gagtcccgcgagtttccatccaaca

SEQ ID NO: 3119785 - DNA, 25 bp, Homo sapien
ggacctggacacaaatgagtcccgc

SEQ ID NO: 3119786 - DNA, 25 bp, Homo sapien
tcaagagtcacgattcacattcgga

SEQ ID NO: 3119787 - DNA, 25 bp, Homo sapien
aagagtcacgattcacattcggata

SEQ ID NO: 3119788 - DNA, 25 bp, Homo sapien
caagagtcacgattcacattcggat

SEQ ID NO: 3119789 - DNA, 25 bp, Homo sapien
gagcaaagagtaattctccttcccc

SEQ ID NO: 3119790 - DNA, 25 bp, Homo sapien
gattatgggaaatgtcagacaaatt

SEQ ID NO: 3119791 - DNA, 25 bp, Homo sapien
gagctatggcgtaaatgaaatttta

SEQ ID NO: 3119792 - DNA, 25 bp, Homo sapien
gaaattttatgctttgattatggga

SEQ ID NO: 3119793 - DNA, 25 bp, Homo sapien
catcaaacagagcttctcggcggcc

SEQ ID NO: 3119794 - DNA, 25 bp, Homo sapien
ttcgttcatcatgcacaccagctgg

SEQ ID NO: 3119795 - DNA, 25 bp, Homo sapien
tcactgggacaggtcactgacagcg

SEQ ID NO: 3119796 - DNA, 25 bp, Homo sapien
ccaggctcagcgatggacagctctt

SEQ ID NO: 3119797 - DNA, 25 bp, Homo sapien
tgacaccttagatcgcctggaagct

SEQ ID NO: 3119798 - DNA, 25 bp, Homo sapien
tatgcagaccctaacatgggcccag

SEQ ID NO: 3119799 - DNA, 25 bp, Homo sapien
gaatgtccaacacaacaatcgaggc

SEQ ID NO: 3119800 - DNA, 25 bp, Homo sapien
gaagaacggctctagtaccacagtg

SEQ ID NO: 3119801 - DNA, 25 bp, Homo sapien
caacagaattgaggccagaggacta

SEQ ID NO: 3119802 - DNA, 25 bp, Homo sapien
tcatatctgaaacgagcggaggcct

SEQ ID NO: 3119803 - DNA, 25 bp, Homo sapien
gatcaccgcttctgttggaaaggca

SEQ ID NO: 3119804 - DNA, 25 bp, Homo sapien
caatgtctgaaggagggaagccagc

SEQ ID NO: 3119805 - DNA, 25 bp, Homo sapien
taaacagaagtttaacagctcttat

SEQ ID NO: 3119806 - DNA, 25 bp, Homo sapien
catttacaagttgaactggaaattt

SEQ ID NO: 3119807 - DNA, 25 bp, Homo sapien
aaacagaagtttaacagctcttatt

SEQ ID NO: 3119808 - DNA, 25 bp, Homo sapien
cattgggcgccaagacgccaatcat

SEQ ID NO: 3119809 - DNA, 25 bp, Homo sapien
gtcgaccgccgccaccctcagctcg

SEQ ID NO: 3119810 - DNA, 25 bp, Homo sapien
cgccagcgcccattgggcgccaaga

SEQ ID NO: 3119811 - DNA, 25 bp, Homo sapien
agcgcaggtactcaaggccgcccgc

SEQ ID NO: 3119812 - DNA, 25 bp, Homo sapien
cggccgccctcgctatccgggacct

SEQ ID NO: 3119813 - DNA, 25 bp, Homo sapien
gccgccctcgctatccgggacctgg

SEQ ID NO: 3119814 - DNA, 25 bp, Homo sapien
cgcggccgccctcgctatccgggac

SEQ ID NO: 3119815 - DNA, 25 bp, Homo sapien
cgccctcgctatccgggacctggaa

SEQ ID NO: 3119816 - DNA, 25 bp, Homo sapien
gaggtggatgccaaacttcctgtca

SEQ ID NO: 3119817 - DNA, 25 bp, Homo sapien
gggaggtggatgccaaacttcctgt

SEQ ID NO: 3119818 - DNA, 25 bp, Homo sapien
ggggaggtggatgccaaacttcctg

SEQ ID NO: 3119819 - DNA, 25 bp, Homo sapien
ggaggtggatgccaaacttcctgtc

SEQ ID NO: 3119820 - DNA, 25 bp, Homo sapien
gccatcctattaggcctgctggaag

SEQ ID NO: 3119821 - DNA, 25 bp, Homo sapien
tccaaaaagattgctcgattctcct

SEQ ID NO: 3119822 - DNA, 25 bp, Homo sapien
aatattagatgccatcctattaggc

SEQ ID NO: 3119823 - DNA, 25 bp, Homo sapien
caaaaagattgctcgattctcctcc

SEQ ID NO: 3119824 - DNA, 25 bp, Homo sapien
accagacaatatgggaaaggatcag

SEQ ID NO: 3119825 - DNA, 25 bp, Homo sapien
aacaagtgattacctgaaccagaca

SEQ ID NO: 3119826 - DNA, 25 bp, Homo sapien
tatgggaaaggatcagtataaagaa

SEQ ID NO: 3119827 - DNA, 25 bp, Homo sapien
agaactctgataacaagtgattacc

SEQ ID NO: 3119828 - DNA, 25 bp, Homo sapien
tccgtggaacaattgggagcagctc

SEQ ID NO: 3119829 - DNA, 25 bp, Homo sapien
gagtccctcctactgtaaccactag

SEQ ID NO: 3119830 - DNA, 25 bp, Homo sapien
gagtttcaatcccactgacgatctg

SEQ ID NO: 3119831 - DNA, 25 bp, Homo sapien
cactaggaggttgggtaaatactga

SEQ ID NO: 3119832 - DNA, 25 bp, Homo sapien
cacgtatacgtgcaataggtactaa

SEQ ID NO: 3119833 - DNA, 25 bp, Homo sapien
agtgcccgttcccagaaactcctgt

SEQ ID NO: 3119834 - DNA, 25 bp, Homo sapien
taactaggtagtcataccacatatg

SEQ ID NO: 3119835 - DNA, 25 bp, Homo sapien
ctgccaaagtcatcgagaacagtgc

SEQ ID NO: 3119836 - DNA, 25 bp, Homo sapien
aaagcagggtggctttctgggacac

SEQ ID NO: 3119837 - DNA, 25 bp, Homo sapien
taatgcttgagtatagcccacctgg

SEQ ID NO: 3119838 - DNA, 25 bp, Homo sapien
cacaaggttagtgtacagttacagc

SEQ ID NO: 3119839 - DNA, 25 bp, Homo sapien
gatgaagagcccacgtgtgcttgcg

SEQ ID NO: 3119840 - DNA, 25 bp, Homo sapien
tgccaagcgtgaagtggcagtgacc

SEQ ID NO: 3119841 - DNA, 25 bp, Homo sapien
aaaaatgtcgctggtcttccctcca

SEQ ID NO: 3119842 - DNA, 25 bp, Homo sapien
ttcaggtgctgtcgagtctgcacgg

SEQ ID NO: 3119843 - DNA, 25 bp, Homo sapien
gcagtgaccggagacccaaaaatgt

SEQ ID NO: 3119844 - DNA, 25 bp, Homo sapien
gggaacttccaaactcgatgactaa

SEQ ID NO: 3119845 - DNA, 25 bp, Homo sapien
gataatctacggcacccaccatgat

SEQ ID NO: 3119846 - DNA, 25 bp, Homo sapien
aaaacatgtcgcatctgccttggag

SEQ ID NO: 3119847 - DNA, 25 bp, Homo sapien
gcttcagtcagcacaaggctggact

SEQ ID NO: 3119848 - DNA, 25 bp, Homo sapien
gtctgcggcacgttccgctccccac

SEQ ID NO: 3119849 - DNA, 25 bp, Homo sapien
aaacaggaagagtggaagacggaca

SEQ ID NO: 3119850 - DNA, 25 bp, Homo sapien
gaagacggacaagggcccagctcgt

SEQ ID NO: 3119851 - DNA, 25 bp, Homo sapien
ggcccagctcgtctgcggcacgttc

SEQ ID NO: 3119852 - DNA, 25 bp, Homo sapien
acaggtaaccagccgaggaccttga

SEQ ID NO: 3119853 - DNA, 25 bp, Homo sapien
agagatgtagggcaatccaaaccag

SEQ ID NO: 3119854 - DNA, 25 bp, Homo sapien
tcagcagagtctaacaggtcctata

SEQ ID NO: 3119855 - DNA, 25 bp, Homo sapien
gagatgccagcacaagagagatgta

SEQ ID NO: 3119856 - DNA, 25 bp, Homo sapien
tctatacactggaaagagatgtcgc

SEQ ID NO: 3119857 - DNA, 25 bp, Homo sapien
cggctcactgcgccctttgccttct

SEQ ID NO: 3119858 - DNA, 25 bp, Homo sapien
tcactgcgccctttgccttctgggt

SEQ ID NO: 3119859 - DNA, 25 bp, Homo sapien
ctgcgccctttgccttctgggttca

SEQ ID NO: 3119860 - DNA, 25 bp, Homo sapien
ggagtacaggcgcccagctactttt

SEQ ID NO: 3119861 - DNA, 25 bp, Homo sapien
cccgcccttgggctactgtgaataa

SEQ ID NO: 3119862 - DNA, 25 bp, Homo sapien
gatggacaaatgagtcattcccgcc

SEQ ID NO: 3119863 - DNA, 25 bp, Homo sapien
cctggtgcaaggatctagtgtttga

SEQ ID NO: 3119864 - DNA, 25 bp, Homo sapien
catgctgtagcgtgtgtcaatgctc

SEQ ID NO: 3119865 - DNA, 25 bp, Homo sapien
ttaagatccgattttggttcttctc

SEQ ID NO: 3119866 - DNA, 25 bp, Homo sapien
ttctccttcacataagaaaacatga

SEQ ID NO: 3119867 - DNA, 25 bp, Homo sapien
ttcttctccttcacataagaaaaca

SEQ ID NO: 3119868 - DNA, 25 bp, Homo sapien
ctccttcacataagaaaacatgatc

SEQ ID NO: 3119869 - DNA, 25 bp, Homo sapien
ctctgctccagccgggatgctcctt

SEQ ID NO: 3119870 - DNA, 25 bp, Homo sapien
ctggctctgctccagccgggatgct

SEQ ID NO: 3119871 - DNA, 25 bp, Homo sapien
gctccagccgggatgctccttgcag

SEQ ID NO: 3119872 - DNA, 25 bp, Homo sapien
tggctctgctccagccgggatgctc

SEQ ID NO: 3119873 - DNA, 25 bp, Homo sapien
ctcatggctgtcgactgtgggcatg

SEQ ID NO: 3119874 - DNA, 25 bp, Homo sapien
gggctcatggctgtcgactgtgggc

SEQ ID NO: 3119875 - DNA, 25 bp, Homo sapien
ccttggcggggcctgcttttctggc

SEQ ID NO: 3119876 - DNA, 25 bp, Homo sapien
gggcctgcttttctggcgctgcctt

SEQ ID NO: 3119877 - DNA, 25 bp, Homo sapien
agaaggagatgctggatttgcctcc

SEQ ID NO: 3119878 - DNA, 25 bp, Homo sapien
gaaggagatgctggatttgcctccc

SEQ ID NO: 3119879 - DNA, 25 bp, Homo sapien
gatttttaaagtcccgcagaggtca

SEQ ID NO: 3119880 - DNA, 25 bp, Homo sapien
ttagcagccgtgatctccagaatgg

SEQ ID NO: 3119881 - DNA, 25 bp, Homo sapien
gagatcagatcaggccgaggtttca

SEQ ID NO: 3119882 - DNA, 25 bp, Homo sapien
tgttgatccaaggaccatgccctgc

SEQ ID NO: 3119883 - DNA, 25 bp, Homo sapien
caccttaaggacatgttaggacaag

SEQ ID NO: 3119884 - DNA, 25 bp, Homo sapien
ccaggtcagaggcaggttaaacacc

SEQ ID NO: 3119885 - DNA, 25 bp, Homo sapien
ggaagggactataagggacacacac

SEQ ID NO: 3119886 - DNA, 25 bp, Homo sapien
taggacaagtggcatacaagggaaa

SEQ ID NO: 3119887 - DNA, 25 bp, Homo sapien
tagcgtgtcatttcctagcctggtt

SEQ ID NO: 3119888 - DNA, 25 bp, Homo sapien
ggcacccgcgtccttctagacttgg

SEQ ID NO: 3119889 - DNA, 25 bp, Homo sapien
cacagggtgtgacctaccaggtaca

SEQ ID NO: 3119890 - DNA, 25 bp, Homo sapien
caaaagagcctgtgtattcctggac

SEQ ID NO: 3119891 - DNA, 25 bp, Homo sapien
tcagctcactgttacttccgccccc

SEQ ID NO: 3119892 - DNA, 25 bp, Homo sapien
ctcactgttacttccgccccccgtg

SEQ ID NO: 3119893 - DNA, 25 bp, Homo sapien
caccatactggtcaggccggtctca

SEQ ID NO: 3119894 - DNA, 25 bp, Homo sapien
cttccgccccccgtgttcaagccat

SEQ ID NO: 3119895 - DNA, 25 bp, Homo sapien
ctcgctatccggccggcgcgcccgg

SEQ ID NO: 3119896 - DNA, 25 bp, Homo sapien
tcgctatccggccggcgcgcccggc

SEQ ID NO: 3119897 - DNA, 25 bp, Homo sapien
cgctatccggccggcgcgcccggcc

SEQ ID NO: 3119898 - DNA, 25 bp, Homo sapien
cctcaggttccgcaggccgcagccc

SEQ ID NO: 3119899 - DNA, 25 bp, Homo sapien
cgcggccaccgccgccgccagcgcg

SEQ ID NO: 3119900 - DNA, 25 bp, Homo sapien
gcggccaccgccgccgccagcgcgg

SEQ ID NO: 3119901 - DNA, 25 bp, Homo sapien
cctcgtccatctggatctccatcat

SEQ ID NO: 3119902 - DNA, 25 bp, Homo sapien
cgccgccctcgtccatctggatctc

SEQ ID NO: 3119903 - DNA, 25 bp, Homo sapien
ggtacaccaccacgccgccgccctc

SEQ ID NO: 3119904 - DNA, 25 bp, Homo sapien
cgccctcgtccatctggatctccat

SEQ ID NO: 3119905 - DNA, 25 bp, Homo sapien
tcgctgagcaccgagtctaggttct

SEQ ID NO: 3119906 - DNA, 25 bp, Homo sapien
gcagctgctcgttgtcctcgcgcag

SEQ ID NO: 3119907 - DNA, 25 bp, Homo sapien
tcaccgagccggagcagtagtcgtc

SEQ ID NO: 3119908 - DNA, 25 bp, Homo sapien
tagcagtggatgaggcgctcgaact

SEQ ID NO: 3119909 - DNA, 25 bp, Homo sapien
ctctagggaggtgtctcacggcggg

SEQ ID NO: 3119910 - DNA, 25 bp, Homo sapien
caggcgggggagtgctctagggagg

SEQ ID NO: 3119911 - DNA, 25 bp, Homo sapien
gggaggtgtctcacggcgggcagag

SEQ ID NO: 3119912 - DNA, 25 bp, Homo sapien
ctagggaggtgtctcacggcgggca

SEQ ID NO: 3119913 - DNA, 25 bp, Homo sapien
caggcaggccgagctcagtatctga

SEQ ID NO: 3119914 - DNA, 25 bp, Homo sapien
tatctgacggtgaatgaatgaagct

SEQ ID NO: 3119915 - DNA, 25 bp, Homo sapien
tgatggaaaatcgaaccccaggcag

SEQ ID NO: 3119916 - DNA, 25 bp, Homo sapien
gggcttggagatcgcctagtgcaat

SEQ ID NO: 3119917 - DNA, 25 bp, Homo sapien
gcagcggagcggcagaggggcaggc

SEQ ID NO: 3119918 - DNA, 25 bp, Homo sapien
actgctgccagcgtggcccgggggc

SEQ ID NO: 3119919 - DNA, 25 bp, Homo sapien
tctcagctctcggccctgtctgact

SEQ ID NO: 3119920 - DNA, 25 bp, Homo sapien
tcccgcagcggagcggcagaggggc

SEQ ID NO: 3119921 - DNA, 25 bp, Homo sapien
cccactgggactgtgcgtatatctg

SEQ ID NO: 3119922 - DNA, 25 bp, Homo sapien
ctgggactgtgcgtatatctgggaa

SEQ ID NO: 3119923 - DNA, 25 bp, Homo sapien
ctgtgcgtatatctgggaattcatt

SEQ ID NO: 3119924 - DNA, 25 bp, Homo sapien
gactgtgcgtatatctgggaattca

SEQ ID NO: 3119925 - DNA, 25 bp, Homo sapien
aacccgaggcagggacatagagaca

SEQ ID NO: 3119926 - DNA, 25 bp, Homo sapien
taacccgaggcagggacatagagac

SEQ ID NO: 3119927 - DNA, 25 bp, Homo sapien
ctaacccgaggcagggacatagaga

SEQ ID NO: 3119928 - DNA, 25 bp, Homo sapien
tttccatttcccacaattgcctggc

SEQ ID NO: 3119929 - DNA, 25 bp, Homo sapien
cccacaattgcctggccacctaggt

SEQ ID NO: 3119930 - DNA, 25 bp, Homo sapien
tctttccatttcccacaattgcctg

SEQ ID NO: 3119931 - DNA, 25 bp, Homo sapien
tttcccacaattgcctggccaccta

SEQ ID NO: 3119932 - DNA, 25 bp, Homo sapien
tttggttatgcatttcacctgtctg

SEQ ID NO: 3119933 - DNA, 25 bp, Homo sapien
gagaatcattttgaatcaccgacat

SEQ ID NO: 3119934 - DNA, 25 bp, Homo sapien
aactggtgttgtggtgttatggtac

SEQ ID NO: 3119935 - DNA, 25 bp, Homo sapien
tgtttctgagccagcaccacaggtt

SEQ ID NO: 3119936 - DNA, 25 bp, Homo sapien
ccggatactaggctcctcgacgctt

SEQ ID NO: 3119937 - DNA, 25 bp, Homo sapien
ccaagaggtgactcattctgtgcag

SEQ ID NO: 3119938 - DNA, 25 bp, Homo sapien
ttgtgttgaaaccactggggctctg

SEQ ID NO: 3119939 - DNA, 25 bp, Homo sapien
tcctcgacgcttcttcctatagcag

SEQ ID NO: 3119940 - DNA, 25 bp, Homo sapien
aagagcagtcatcaggagtgagtgt

SEQ ID NO: 3119941 - DNA, 25 bp, Homo sapien
aagggccgcaggctttgagggccca

SEQ ID NO: 3119942 - DNA, 25 bp, Homo sapien
cctttcacttgaagggccgcaggct

SEQ ID NO: 3119943 - DNA, 25 bp, Homo sapien
gggaaagagcagtcatcaggagtga

SEQ ID NO: 3119944 - DNA, 25 bp, Homo sapien
tcagctccagctggcgcgtctggaa

SEQ ID NO: 3119945 - DNA, 25 bp, Homo sapien
cacctggatttgcagctctttcttc

SEQ ID NO: 3119946 - DNA, 25 bp, Homo sapien
gtctggaactcgtagtgctccacct

SEQ ID NO: 3119947 - DNA, 25 bp, Homo sapien
cagctggcgcgtctggaactcgtag

SEQ ID NO: 3119948 - DNA, 25 bp, Homo sapien
cgctggtgcagggcattgtactcct

SEQ ID NO: 3119949 - DNA, 25 bp, Homo sapien
gccgctggtgcagggcattgtactc

SEQ ID NO: 3119950 - DNA, 25 bp, Homo sapien
ccgctggtgcagggcattgtactcc

SEQ ID NO: 3119951 - DNA, 25 bp, Homo sapien
tctaacctgtgaggcttttccggct

SEQ ID NO: 3119952 - DNA, 25 bp, Homo sapien
ctgcgaggagggaaacgcctgcatt

SEQ ID NO: 3119953 - DNA, 25 bp, Homo sapien
tggggggctgtctccgtcccctcta

SEQ ID NO: 3119954 - DNA, 25 bp, Homo sapien
gaaacgcctgcattagcgctgccgt

SEQ ID NO: 3119955 - DNA, 25 bp, Homo sapien
ctcaatgtgctccacgtaggtctgt

SEQ ID NO: 3119956 - DNA, 25 bp, Homo sapien
aatgtgctccacgtaggtctgtatc

SEQ ID NO: 3119957 - DNA, 25 bp, Homo sapien
caatgtgctccacgtaggtctgtat

SEQ ID NO: 3119958 - DNA, 25 bp, Homo sapien
tgtgctccacgtaggtctgtatcat

SEQ ID NO: 3119959 - DNA, 25 bp, Homo sapien
ggctgctctcggtctggctgtttcc

SEQ ID NO: 3119960 - DNA, 25 bp, Homo sapien
ccccggcaggctgctctcggtctgg

SEQ ID NO: 3119961 - DNA, 25 bp, Homo sapien
gctgctctcggtctggctgtttcct

SEQ ID NO: 3119962 - DNA, 25 bp, Homo sapien
ccggcaggctgctctcggtctggct

SEQ ID NO: 3119963 - DNA, 25 bp, Homo sapien
ggccataacaagcactacgaccctg

SEQ ID NO: 3119964 - DNA, 25 bp, Homo sapien
ccagagtgttccctgtcgtcctgag

SEQ ID NO: 3119965 - DNA, 25 bp, Homo sapien
tagaagtgccacctcatgcttagct

SEQ ID NO: 3119966 - DNA, 25 bp, Homo sapien
gttaaatatgcgcaagctgcccggg

SEQ ID NO: 3119967 - DNA, 25 bp, Homo sapien
gaaatatagggtgactagccacccc

SEQ ID NO: 3119968 - DNA, 25 bp, Homo sapien
tggctggccaccctactaacaggaa

SEQ ID NO: 3119969 - DNA, 25 bp, Homo sapien
aactggcctcatgcgtgacacgtga

SEQ ID NO: 3119970 - DNA, 25 bp, Homo sapien
gactcccgtttctccctaatgtgtg

SEQ ID NO: 3119971 - DNA, 25 bp, Homo sapien
tgagggaggcttttgccatcgcagc

SEQ ID NO: 3119972 - DNA, 25 bp, Homo sapien
gagctggacgttctgacccttctcg

SEQ ID NO: 3119973 - DNA, 25 bp, Homo sapien
tgtatcatccagaacgtgacccatg

SEQ ID NO: 3119974 - DNA, 25 bp, Homo sapien
ggcaggcacgatgcagctttcgcag

SEQ ID NO: 3119975 - DNA, 25 bp, Homo sapien
catgcaggacgaagtactccttgcc

SEQ ID NO: 3119976 - DNA, 25 bp, Homo sapien
catgacgacggcagcatcaggcggc

SEQ ID NO: 3119977 - DNA, 25 bp, Homo sapien
gctctcaggacctctcgggtgttgt

SEQ ID NO: 3119978 - DNA, 25 bp, Homo sapien
ttctgccccacaccatgagagaaac

SEQ ID NO: 3119979 - DNA, 25 bp, Homo sapien
cacggccggtgccaaaggtcctgtg

SEQ ID NO: 3119980 - DNA, 25 bp, Homo sapien
gcagcgctgacaagagagcacccca

SEQ ID NO: 3119981 - DNA, 25 bp, Homo sapien
ggcttcttccagagggcaccgtctg

SEQ ID NO: 3119982 - DNA, 25 bp, Homo sapien
ggatccagtcatggcaaccaaggct

SEQ ID NO: 3119983 - DNA, 25 bp, Homo sapien
ggccagagtaatgtagctgcgcaga

SEQ ID NO: 3119984 - DNA, 25 bp, Homo sapien
agagtaatgtagctgcgcagacccc

SEQ ID NO: 3119985 - DNA, 25 bp, Homo sapien
agtaatgtagctgcgcagaccccac

SEQ ID NO: 3119986 - DNA, 25 bp, Homo sapien
ccagagtaatgtagctgcgcagacc

SEQ ID NO: 3119987 - DNA, 25 bp, Homo sapien
gaagctcacacggacggtcactcac

SEQ ID NO: 3119988 - DNA, 25 bp, Homo sapien
atggacggtcacacacggacggtca

SEQ ID NO: 3119989 - DNA, 25 bp, Homo sapien
cacatggacggtgacacgctcacat

SEQ ID NO: 3119990 - DNA, 25 bp, Homo sapien
cactcacacgaacggtcacacagat

SEQ ID NO: 3119991 - DNA, 25 bp, Homo sapien
gccaccttctcagtgtcagtctcgt

SEQ ID NO: 3119992 - DNA, 25 bp, Homo sapien
gccgtgccttcgtctgtgaccaagg

SEQ ID NO: 3119993 - DNA, 25 bp, Homo sapien
atgtggccagatggcccttccgacc

SEQ ID NO: 3119994 - DNA, 25 bp, Homo sapien
cctccttagcaggagtcggcgccgt

SEQ ID NO: 3119995 - DNA, 25 bp, Homo sapien
tgaggcccagttctgacgccatcag

SEQ ID NO: 3119996 - DNA, 25 bp, Homo sapien
gacacgtctcagtccctagaccgaa

SEQ ID NO: 3119997 - DNA, 25 bp, Homo sapien
ttccactgcgctcccaacgctggtg

SEQ ID NO: 3119998 - DNA, 25 bp, Homo sapien
aagccgatgcggtcctggctgtcac

SEQ ID NO: 3119999 - DNA, 25 bp, Homo sapien
ccgatctgtgcacgtaccgtgccgt

SEQ ID NO: 3120000 - DNA, 25 bp, Homo sapien
gctggccgaggtcactcaggtgcca

SEQ ID NO: 3120001 - DNA, 25 bp, Homo sapien
aggcacgagcttgcccccgatctgt

SEQ ID NO: 3120002 - DNA, 25 bp, Homo sapien
tgcacgtaccgtgccgtcagccagg

SEQ ID NO: 3120003 - DNA, 25 bp, Homo sapien
cacaggcacgatggacacttagagg

SEQ ID NO: 3120004 - DNA, 25 bp, Homo sapien
ctacagagcggtctatccaagggca

SEQ ID NO: 3120005 - DNA, 25 bp, Homo sapien
gacagtcggcaaagcatgcagcagg

SEQ ID NO: 3120006 - DNA, 25 bp, Homo sapien
tagacactgacgttcctccgagagt

SEQ ID NO: 3120007 - DNA, 25 bp, Homo sapien
aagggacgccaccaagacattctgg

SEQ ID NO: 3120008 - DNA, 25 bp, Homo sapien
tggcctttaagtgaccagggcagac

SEQ ID NO: 3120009 - DNA, 25 bp, Homo sapien
taatgctaaggatctcacccaggga

SEQ ID NO: 3120010 - DNA, 25 bp, Homo sapien
tgatcacccgctatggcagagcttg

SEQ ID NO: 3120011 - DNA, 25 bp, Homo sapien
gacctgtacttccatgttgcggctg

SEQ ID NO: 3120012 - DNA, 25 bp, Homo sapien
tcccgggcacgcttgctgttcttgg

SEQ ID NO: 3120013 - DNA, 25 bp, Homo sapien
ggcctgactcggacatttcatcctg

SEQ ID NO: 3120014 - DNA, 25 bp, Homo sapien
tgttgcggctgtcgcgcttctcccg

SEQ ID NO: 3120015 - DNA, 25 bp, Homo sapien
ctctggcgtggagtcaataatgtct

SEQ ID NO: 3120016 - DNA, 25 bp, Homo sapien
cttgaacatcagaccactcgtcact

SEQ ID NO: 3120017 - DNA, 25 bp, Homo sapien
tgtcttgaacatcagaccactcgtc

SEQ ID NO: 3120018 - DNA, 25 bp, Homo sapien
catgtccagctctggcgtggagtca

SEQ ID NO: 3120019 - DNA, 25 bp, Homo sapien
cttcgtccacatccccgatgacctc

SEQ ID NO: 3120020 - DNA, 25 bp, Homo sapien
gatgacctcagaccctgccgtcgac

SEQ ID NO: 3120021 - DNA, 25 bp, Homo sapien
catggtacagggagtcggtgttgat

SEQ ID NO: 3120022 - DNA, 25 bp, Homo sapien
ggtgttgatgccgaaagctttgttc

SEQ ID NO: 3120023 - DNA, 25 bp, Homo sapien
ccagcattgtgcaggcacagcggtg

SEQ ID NO: 3120024 - DNA, 25 bp, Homo sapien
agcagaaagccccagcattgtgcag

SEQ ID NO: 3120025 - DNA, 25 bp, Homo sapien
ggcacagcggtgcgggggaaggctt

SEQ ID NO: 3120026 - DNA, 25 bp, Homo sapien
ggtgcgggggaaggcttgcgcttac

SEQ ID NO: 3120027 - DNA, 25 bp, Homo sapien
tccggtgtagacctgtggcgctgag

SEQ ID NO: 3120028 - DNA, 25 bp, Homo sapien
acaggagactccacgtgctgacagg

SEQ ID NO: 3120029 - DNA, 25 bp, Homo sapien
agccgccacagacctaggcacaggg

SEQ ID NO: 3120030 - DNA, 25 bp, Homo sapien
ggtcctgatgtttgcagccgccaca

SEQ ID NO: 3120031 - DNA, 25 bp, Homo sapien
aaatatacattatcggccgggcatg

SEQ ID NO: 3120032 - DNA, 25 bp, Homo sapien
cttggcagccacacaagggcgtact

SEQ ID NO: 3120033 - DNA, 25 bp, Homo sapien
ggcgcaggtcccagctcatttgtcc

SEQ ID NO: 3120034 - DNA, 25 bp, Homo sapien
caagggcgtactccttttcctgctg

SEQ ID NO: 3120035 - DNA, 25 bp, Homo sapien
cgcaggtcccagctcatttgtccat

SEQ ID NO: 3120036 - DNA, 25 bp, Homo sapien
cggccggtcctagtataccaattct

SEQ ID NO: 3120037 - DNA, 25 bp, Homo sapien
tgtgcccggccggtcctagtatacc

SEQ ID NO: 3120038 - DNA, 25 bp, Homo sapien
cttaaacaatcactgtcacattata

SEQ ID NO: 3120039 - DNA, 25 bp, Homo sapien
ataccaattctaagacgtacatttt

SEQ ID NO: 3120040 - DNA, 25 bp, Homo sapien
ataagttccttagtgaatatttgct

SEQ ID NO: 3120041 - DNA, 25 bp, Homo sapien
cagaaaaataagttccttagtgaat

SEQ ID NO: 3120042 - DNA, 25 bp, Homo sapien
gttccttagtgaatatttgctgtga

SEQ ID NO: 3120043 - DNA, 25 bp, Homo sapien
agtattagtcatttgtgaaacagaa

SEQ ID NO: 3120044 - DNA, 25 bp, Homo sapien
agcacacccggctgcattctgttgt

SEQ ID NO: 3120045 - DNA, 25 bp, Homo sapien
taatccacctggaaatcactgctgt

SEQ ID NO: 3120046 - DNA, 25 bp, Homo sapien
ttctgttgtcctcgtaattgtgtac

SEQ ID NO: 3120047 - DNA, 25 bp, Homo sapien
tcaggcttagacttcattttacacc

SEQ ID NO: 3120048 - DNA, 25 bp, Homo sapien
cacacagccacggtgacgggatagc

SEQ ID NO: 3120049 - DNA, 25 bp, Homo sapien
acagccacggtgacgggatagctcg

SEQ ID NO: 3120050 - DNA, 25 bp, Homo sapien
gaacaagcttccgagcggcggtggc

SEQ ID NO: 3120051 - DNA, 25 bp, Homo sapien
cggtggctgcgagcagaagcagagg

SEQ ID NO: 3120052 - DNA, 25 bp, Homo sapien
gaaacagaaggtgcggaggtttcac

SEQ ID NO: 3120053 - DNA, 25 bp, Homo sapien
tgaaacagaaggtgcggaggtttca

SEQ ID NO: 3120054 - DNA, 25 bp, Homo sapien
ctgaaacagaaggtgcggaggtttc

SEQ ID NO: 3120055 - DNA, 25 bp, Homo sapien
gcagattccccacttctttgcccat

SEQ ID NO: 3120056 - DNA, 25 bp, Homo sapien
gctgtgagttttccagtagcagatt

SEQ ID NO: 3120057 - DNA, 25 bp, Homo sapien
agtagcagattccccacttctttgc

SEQ ID NO: 3120058 - DNA, 25 bp, Homo sapien
tttccagtagcagattccccacttc

SEQ ID NO: 3120059 - DNA, 25 bp, Homo sapien
cttgccaggggcgcctgcacttccg

SEQ ID NO: 3120060 - DNA, 25 bp, Homo sapien
ccttgccaggggcgcctgcacttcc

SEQ ID NO: 3120061 - DNA, 25 bp, Homo sapien
tgccaggggcgcctgcacttccgcc

SEQ ID NO: 3120062 - DNA, 25 bp, Homo sapien
ttgccaggggcgcctgcacttccgc

SEQ ID NO: 3120063 - DNA, 25 bp, Homo sapien
cttgactttggcctgcttagcagcc

SEQ ID NO: 3120064 - DNA, 25 bp, Homo sapien
tccccggacagctggtcgaccttgg

SEQ ID NO: 3120065 - DNA, 25 bp, Homo sapien
ggcaatcaggtcattcttcaccaca

SEQ ID NO: 3120066 - DNA, 25 bp, Homo sapien
agctccttgatacggttttccagct

SEQ ID NO: 3120067 - DNA, 25 bp, Homo sapien
ctcttctttgggttcacggcgggcg

SEQ ID NO: 3120068 - DNA, 25 bp, Homo sapien
cgggcgatgatggcctcggacttca

SEQ ID NO: 3120069 - DNA, 25 bp, Homo sapien
ggcgatgatggcctcggacttcact

SEQ ID NO: 3120070 - DNA, 25 bp, Homo sapien
cttctttgggttcacggcgggcgat

SEQ ID NO: 3120071 - DNA, 25 bp, Homo sapien
gattctgtacagagatagctgctta

SEQ ID NO: 3120072 - DNA, 25 bp, Homo sapien
cgattctgtacagagatagctgctt

SEQ ID NO: 3120073 - DNA, 25 bp, Homo sapien
attctgtacagagatagctgcttac

SEQ ID NO: 3120074 - DNA, 25 bp, Homo sapien
ggctgccccacgtgtgaatgcgtat

SEQ ID NO: 3120075 - DNA, 25 bp, Homo sapien
tgggaatgatggctgccccacgtgt

SEQ ID NO: 3120076 - DNA, 25 bp, Homo sapien
gaatgcgtatgaacagtggtcaccc

SEQ ID NO: 3120077 - DNA, 25 bp, Homo sapien
tccccatgccccgagtgtgaatagt

SEQ ID NO: 3120078 - DNA, 25 bp, Homo sapien
tccatcagccgctccttgtactggt

SEQ ID NO: 3120079 - DNA, 25 bp, Homo sapien
acgggccatctccacccgcgtgaag

SEQ ID NO: 3120080 - DNA, 25 bp, Homo sapien
ctgatcatctcagtccaccgcacag

SEQ ID NO: 3120081 - DNA, 25 bp, Homo sapien
ccgctccatgagcacacgggccatc

SEQ ID NO: 3120082 - DNA, 25 bp, Homo sapien
gacggatgggtgctctcgggacgct

SEQ ID NO: 3120083 - DNA, 25 bp, Homo sapien
ctggacggatgggtgctctcgggac

SEQ ID NO: 3120084 - DNA, 25 bp, Homo sapien
ttcttctcctggacggatgggtgct

SEQ ID NO: 3120085 - DNA, 25 bp, Homo sapien
cttcttctcctggacggatgggtgc

SEQ ID NO: 3120086 - DNA, 25 bp, Homo sapien
ccgagatcgggcacatggcatggtt

SEQ ID NO: 3120087 - DNA, 25 bp, Homo sapien
tgacttgtagtggatgttcaccgag

SEQ ID NO: 3120088 - DNA, 25 bp, Homo sapien
tgaagccggcagtggtgggtgactt

SEQ ID NO: 3120089 - DNA, 25 bp, Homo sapien
cggcgctggctgaagccggcagtgg

SEQ ID NO: 3120090 - DNA, 25 bp, Homo sapien
tgaaacggctccttgctgcagaggc

SEQ ID NO: 3120091 - DNA, 25 bp, Homo sapien
gcatgaccagcgactccctgctgga

SEQ ID NO: 3120092 - DNA, 25 bp, Homo sapien
ccaaataccgtggagccaaagcagc

SEQ ID NO: 3120093 - DNA, 25 bp, Homo sapien
agcctctgccaagggacatcctgaa

SEQ ID NO: 3120094 - DNA, 25 bp, Homo sapien
gaatgatgggtgatgtctctgtcca

SEQ ID NO: 3120095 - DNA, 25 bp, Homo sapien
aatgatgggtgatgtctctgtccag

SEQ ID NO: 3120096 - DNA, 25 bp, Homo sapien
aagaatgatgggtgatgtctctgtc

SEQ ID NO: 3120097 - DNA, 25 bp, Homo sapien
ggaagaatgatgggtgatgtctctg

SEQ ID NO: 3120098 - DNA, 25 bp, Homo sapien
cgcgcttctgctctcgacgggcgga

SEQ ID NO: 3120099 - DNA, 25 bp, Homo sapien
gctcgcgcttctgctctcgacgggc

SEQ ID NO: 3120100 - DNA, 25 bp, Homo sapien
gcttctgctctcgacgggcggagga

SEQ ID NO: 3120101 - DNA, 25 bp, Homo sapien
cttctgctctcgacgggcggaggac

SEQ ID NO: 3120102 - DNA, 25 bp, Homo sapien
gccgtcgtcgttacgcacgtgctca

SEQ ID NO: 3120103 - DNA, 25 bp, Homo sapien
ctgcagacggccgtcgtcgttacgc

SEQ ID NO: 3120104 - DNA, 25 bp, Homo sapien
tcgtcgttacgcacgtgctcacgca

SEQ ID NO: 3120105 - DNA, 25 bp, Homo sapien
agacggccgtcgtcgttacgcacgt

SEQ ID NO: 3120106 - DNA, 25 bp, Homo sapien
ctgcttgtacttggcgggcaggctc

SEQ ID NO: 3120107 - DNA, 25 bp, Homo sapien
cgtgggcacgaaccctggctcctac

SEQ ID NO: 3120108 - DNA, 25 bp, Homo sapien
cacagccacttcaagactggaggca

SEQ ID NO: 3120109 - DNA, 25 bp, Homo sapien
aaatctgagacaggtagggctgcca

SEQ ID NO: 3120110 - DNA, 25 bp, Homo sapien
cttctccgaccctccagacccctgc

SEQ ID NO: 3120111 - DNA, 25 bp, Homo sapien
ggcacgttcttcatccgcgtgtcct

SEQ ID NO: 3120112 - DNA, 25 bp, Homo sapien
gttcttcatccgcgtgtcctcctgg

SEQ ID NO: 3120113 - DNA, 25 bp, Homo sapien
gggcggcagtacaccggcaccggca

SEQ ID NO: 3120114 - DNA, 25 bp, Homo sapien
accggcaccggcacgttcttcatcc

SEQ ID NO: 3120115 - DNA, 25 bp, Homo sapien
tcccagcgtcgtcctcattgggcct

SEQ ID NO: 3120116 - DNA, 25 bp, Homo sapien
cacccgctcaggttgacgcccgcgg

SEQ ID NO: 3120117 - DNA, 25 bp, Homo sapien
tctccttcgcggtcgcaggtcaggg

SEQ ID NO: 3120118 - DNA, 25 bp, Homo sapien
ttcttctcgggagacgtgtgggcgc

SEQ ID NO: 3120119 - DNA, 25 bp, Homo sapien
ctggtcaggatccacacccggctgg

SEQ ID NO: 3120120 - DNA, 25 bp, Homo sapien
ccgtgcccggctggttggcgtcgat

SEQ ID NO: 3120121 - DNA, 25 bp, Homo sapien
gagatgcacagcacgtgcgcgttgc

SEQ ID NO: 3120122 - DNA, 25 bp, Homo sapien
tgcagacggtgaactggtccaccac

SEQ ID NO: 3120123 - DNA, 25 bp, Homo sapien
aggagcagttgctccgcggcacgtt

SEQ ID NO: 3120124 - DNA, 25 bp, Homo sapien
gtgataccggccagcacgccatctg

SEQ ID NO: 3120125 - DNA, 25 bp, Homo sapien
tcctctgggttcacgtcgctgtcca

SEQ ID NO: 3120126 - DNA, 25 bp, Homo sapien
atctccccgggagggtagtcgctgt

SEQ ID NO: 3120127 - DNA, 25 bp, Homo sapien
cccgggccgcaatgtggctgtctct

SEQ ID NO: 3120128 - DNA, 25 bp, Homo sapien
tctgtggactgggacgggttgacct

SEQ ID NO: 3120129 - DNA, 25 bp, Homo sapien
gaccttcccgttggcgatggtggcc

SEQ ID NO: 3120130 - DNA, 25 bp, Homo sapien
tgaagacgtgctctgtgagaggccc

SEQ ID NO: 3120131 - DNA, 25 bp, Homo sapien
acatggtgggtgcagcactgctgcc

SEQ ID NO: 3120132 - DNA, 25 bp, Homo sapien
gctctggctctggccgtgtgctgct

SEQ ID NO: 3120133 - DNA, 25 bp, Homo sapien
ctgctgcctgctcccgtggggtccc

SEQ ID NO: 3120134 - DNA, 25 bp, Homo sapien
gctgctgtcaggctctggcccgttc

SEQ ID NO: 3120135 - DNA, 25 bp, Homo sapien
gagtgcaggcacttcttccagttgg

SEQ ID NO: 3120136 - DNA, 25 bp, Homo sapien
ggagtgcaggcacttcttccagttg

SEQ ID NO: 3120137 - DNA, 25 bp, Homo sapien
ttcagcttgatggagtgcaggcact

SEQ ID NO: 3120138 - DNA, 25 bp, Homo sapien
aacaggaatgcggtgagcctggttt

SEQ ID NO: 3120139 - DNA, 25 bp, Homo sapien
ggaatgcggtgagcctggtttgggc

SEQ ID NO: 3120140 - DNA, 25 bp, Homo sapien
ctgaaacaggaatgcggtgagcctg

SEQ ID NO: 3120141 - DNA, 25 bp, Homo sapien
tgcggtgagcctggtttgggccagg

SEQ ID NO: 3120142 - DNA, 25 bp, Homo sapien
cttcaccacggtggaagatggccag

SEQ ID NO: 3120143 - DNA, 25 bp, Homo sapien
gtggaagatggccagggtcccgtcc

SEQ ID NO: 3120144 - DNA, 25 bp, Homo sapien
aagatggccagggtcccgtccgcca

SEQ ID NO: 3120145 - DNA, 25 bp, Homo sapien
cacggtggaagatggccagggtccc

SEQ ID NO: 3120146 - DNA, 25 bp, Homo sapien
caacagccatgcagcggatggagtg

SEQ ID NO: 3120147 - DNA, 25 bp, Homo sapien
cccaggtccattaggtgatagttgc

SEQ ID NO: 3120148 - DNA, 25 bp, Homo sapien
gatagttgctcagatcccactggcc

SEQ ID NO: 3120149 - DNA, 25 bp, Homo sapien
ggctggatgacgtgcaccttgttct

SEQ ID NO: 3120150 - DNA, 25 bp, Homo sapien
acttccgtatggaagatgcgggaga

SEQ ID NO: 3120151 - DNA, 25 bp, Homo sapien
gtagggcctcgtggacttccgtatg

SEQ ID NO: 3120152 - DNA, 25 bp, Homo sapien
gggcctcgtggacttccgtatggaa

SEQ ID NO: 3120153 - DNA, 25 bp, Homo sapien
tcgtggacttccgtatggaagatgc

SEQ ID NO: 3120154 - DNA, 25 bp, Homo sapien
tttgcgcctgttcgagcctgagtca

SEQ ID NO: 3120155 - DNA, 25 bp, Homo sapien
cctgctttgcgcctgttcgagcctg

SEQ ID NO: 3120156 - DNA, 25 bp, Homo sapien
agccagcgcctgctttgcgcctgtt

SEQ ID NO: 3120157 - DNA, 25 bp, Homo sapien
cctgttcgagcctgagtcataggtg

SEQ ID NO: 3120158 - DNA, 25 bp, Homo sapien
gagaggagaggaagtggggagcccc

SEQ ID NO: 3120159 - DNA, 25 bp, Homo sapien
gggagaggagaggaagtggggagcc

SEQ ID NO: 3120160 - DNA, 25 bp, Homo sapien
ctgcccatcaacagggctggggaga

SEQ ID NO: 3120161 - DNA, 25 bp, Homo sapien
gaggagaggaagtggggagccccaa

SEQ ID NO: 3120162 - DNA, 25 bp, Homo sapien
gctgacgtagggctcaatgtccacg

SEQ ID NO: 3120163 - DNA, 25 bp, Homo sapien
ggatggacacccatacgccatcgcc

SEQ ID NO: 3120164 - DNA, 25 bp, Homo sapien
aatgtccacgtcctgtagatgctgg

SEQ ID NO: 3120165 - DNA, 25 bp, Homo sapien
tgtgtgcatggtagagcctcagggt

SEQ ID NO: 3120166 - DNA, 25 bp, Homo sapien
aaggagaaacccagcttgccagtgc

SEQ ID NO: 3120167 - DNA, 25 bp, Homo sapien
tgatgcgtacgaaggagaaacccag

SEQ ID NO: 3120168 - DNA, 25 bp, Homo sapien
gagatgaccactccgttgccggtgc

SEQ ID NO: 3120169 - DNA, 25 bp, Homo sapien
tgcccgcgacaagcagggccgtgat

SEQ ID NO: 3120170 - DNA, 25 bp, Homo sapien
cagagccaccccgtgaacccacgta

SEQ ID NO: 3120171 - DNA, 25 bp, Homo sapien
ggcagcaaggcaccctccaaggtgg

SEQ ID NO: 3120172 - DNA, 25 bp, Homo sapien
aacccacgtacacctctggcagcac

SEQ ID NO: 3120173 - DNA, 25 bp, Homo sapien
gagaagaggagagcggtcagcgtag

SEQ ID NO: 3120174 - DNA, 25 bp, Homo sapien
ccaggagctggcctcggtgcaggac

SEQ ID NO: 3120175 - DNA, 25 bp, Homo sapien
aggagctggcctcggtgcaggacca

SEQ ID NO: 3120176 - DNA, 25 bp, Homo sapien
gagctggcctcggtgcaggaccaca

SEQ ID NO: 3120177 - DNA, 25 bp, Homo sapien
agctggcctcggtgcaggaccacag

SEQ ID NO: 3120178 - DNA, 25 bp, Homo sapien
ctgagcccgcatacaggtggagagt

SEQ ID NO: 3120179 - DNA, 25 bp, Homo sapien
agagaacccagaggcgctgagcccg

SEQ ID NO: 3120180 - DNA, 25 bp, Homo sapien
gggagagaacccagaggcgctgagc

SEQ ID NO: 3120181 - DNA, 25 bp, Homo sapien
ggggacacgaggtggctgggcttac

SEQ ID NO: 3120182 - DNA, 25 bp, Homo sapien
cactgctgtcatcgccatacacgtg

SEQ ID NO: 3120183 - DNA, 25 bp, Homo sapien
gacaaagaacttcacggcatcgcgg

SEQ ID NO: 3120184 - DNA, 25 bp, Homo sapien
catcgccatacacgtggatgatgcc

SEQ ID NO: 3120185 - DNA, 25 bp, Homo sapien
tgcccatggaagcatagctgggcct

SEQ ID NO: 3120186 - DNA, 25 bp, Homo sapien
tcagcaccagcacgttccgcagctt

SEQ ID NO: 3120187 - DNA, 25 bp, Homo sapien
agcttctggccctcgacctccgagg

SEQ ID NO: 3120188 - DNA, 25 bp, Homo sapien
ggctgtccagcacactcccattcag

SEQ ID NO: 3120189 - DNA, 25 bp, Homo sapien
ctcagcaccagcacgttccgcagct

SEQ ID NO: 3120190 - DNA, 25 bp, Homo sapien
tgccacacgatgatgtgactgcgct

SEQ ID NO: 3120191 - DNA, 25 bp, Homo sapien
taggacacctgccacacgatgatgt

SEQ ID NO: 3120192 - DNA, 25 bp, Homo sapien
tgtgactgcgctctgccttggacag

SEQ ID NO: 3120193 - DNA, 25 bp, Homo sapien
gggtgtaggacacctgccacacgat

SEQ ID NO: 3120194 - DNA, 25 bp, Homo sapien
aaggtgagtcttctgcccaggcaga

SEQ ID NO: 3120195 - DNA, 25 bp, Homo sapien
tcataagggcctcccagacaggagt

SEQ ID NO: 3120196 - DNA, 25 bp, Homo sapien
gcgggcaaccctaggcacttagtag

SEQ ID NO: 3120197 - DNA, 25 bp, Homo sapien
tgtgtcctaggactgatcccggaga

SEQ ID NO: 3120198 - DNA, 25 bp, Homo sapien
gcctgaggagaatcgtcacccctcc

SEQ ID NO: 3120199 - DNA, 25 bp, Homo sapien
attacatacagagcagatatgtggg

SEQ ID NO: 3120200 - DNA, 25 bp, Homo sapien
catacagagcagatatgtgggtttg

SEQ ID NO: 3120201 - DNA, 25 bp, Homo sapien
gagcagatatgtgggtttgcttgca

SEQ ID NO: 3120202 - DNA, 25 bp, Homo sapien
tggaaccctgggattaccctgcaaa

SEQ ID NO: 3120203 - DNA, 25 bp, Homo sapien
tctttgcgttacacccgagtctgcc

SEQ ID NO: 3120204 - DNA, 25 bp, Homo sapien
tccgggccatgattatcgcagaacg

SEQ ID NO: 3120205 - DNA, 25 bp, Homo sapien
tgtgcagaggatacgcatggaaccc

SEQ ID NO: 3120206 - DNA, 25 bp, Homo sapien
acgcacaccgcgaggcgcttcagga

SEQ ID NO: 3120207 - DNA, 25 bp, Homo sapien
gagtcctcagcgtcggagtctgaga

SEQ ID NO: 3120208 - DNA, 25 bp, Homo sapien
tcccaggttggaggtcgccgctgac

SEQ ID NO: 3120209 - DNA, 25 bp, Homo sapien
gcgaggcgcttcaggacctgctccg

SEQ ID NO: 3120210 - DNA, 25 bp, Homo sapien
ggctcgatgcggcactcgcagccca

SEQ ID NO: 3120211 - DNA, 25 bp, Homo sapien
tccatcaggacgtcggcaccggcgt

SEQ ID NO: 3120212 - DNA, 25 bp, Homo sapien
ggcgctggggctcgatgcggcactc

SEQ ID NO: 3120213 - DNA, 25 bp, Homo sapien
tcgggactcgctcgggtccaccgca

SEQ ID NO: 3120214 - DNA, 25 bp, Homo sapien
ggctctataccagcagaacggcttg

SEQ ID NO: 3120215 - DNA, 25 bp, Homo sapien
ttgctttacccatccgcgagacgcg

SEQ ID NO: 3120216 - DNA, 25 bp, Homo sapien
agccagctcggctctataccagcag

SEQ ID NO: 3120217 - DNA, 25 bp, Homo sapien
tataccagcagaacggcttgggcac

SEQ ID NO: 3120218 - DNA, 25 bp, Homo sapien
ttcacctgcagcccacacttcagga

SEQ ID NO: 3120219 - DNA, 25 bp, Homo sapien
ctgcagcccacacttcaggaggcag

SEQ ID NO: 3120220 - DNA, 25 bp, Homo sapien
ctgttcacctgcagcccacacttca

SEQ ID NO: 3120221 - DNA, 25 bp, Homo sapien
acctgcagcccacacttcaggaggc

SEQ ID NO: 3120222 - DNA, 25 bp, Homo sapien
ctgggtcagtgtggcgacgccctgc

SEQ ID NO: 3120223 - DNA, 25 bp, Homo sapien
ggtcagtgtggcgacgccctgcaga

SEQ ID NO: 3120224 - DNA, 25 bp, Homo sapien
agtgtggcgacgccctgcagaaact

SEQ ID NO: 3120225 - DNA, 25 bp, Homo sapien
gtggcgacgccctgcagaaactcct

SEQ ID NO: 3120226 - DNA, 25 bp, Homo sapien
ctcgggggagatccagggcacccag

SEQ ID NO: 3120227 - DNA, 25 bp, Homo sapien
gtggtctcgggggagatccagggca

SEQ ID NO: 3120228 - DNA, 25 bp, Homo sapien
tcgggggagatccagggcacccagt

SEQ ID NO: 3120229 - DNA, 25 bp, Homo sapien
ggtctcgggggagatccagggcacc

SEQ ID NO: 3120230 - DNA, 25 bp, Homo sapien
ctgaacccccgtcccagccagccct

SEQ ID NO: 3120231 - DNA, 25 bp, Homo sapien
ctgctgtgggcatgagagtgagcgg

SEQ ID NO: 3120232 - DNA, 25 bp, Homo sapien
gccctgctgtgggcatgagagtgag

SEQ ID NO: 3120233 - DNA, 25 bp, Homo sapien
ctgtgggcatgagagtgagcggtac

SEQ ID NO: 3120234 - DNA, 25 bp, Homo sapien
ggagaagtgggatcagctgtgccac

SEQ ID NO: 3120235 - DNA, 25 bp, Homo sapien
ctggagaagtgggatcagctgtgcc

SEQ ID NO: 3120236 - DNA, 25 bp, Homo sapien
tggagaagtgggatcagctgtgcca

SEQ ID NO: 3120237 - DNA, 25 bp, Homo sapien
gccctgcccgagcttggcctctgcc

SEQ ID NO: 3120238 - DNA, 25 bp, Homo sapien
gagcagaggtgaccattcctccccg

SEQ ID NO: 3120239 - DNA, 25 bp, Homo sapien
ctgcccgagcttggcctctgccaga

SEQ ID NO: 3120240 - DNA, 25 bp, Homo sapien
ctgagcagaggtgaccattcctccc

SEQ ID NO: 3120241 - DNA, 25 bp, Homo sapien
tccggccagctgacggccacctcgg

SEQ ID NO: 3120242 - DNA, 25 bp, Homo sapien
agctgacggccacctcggcaccggc

SEQ ID NO: 3120243 - DNA, 25 bp, Homo sapien
tgtgtcccccgggaaacgtgctggc

SEQ ID NO: 3120244 - DNA, 25 bp, Homo sapien
caccggccaccttcgggctctctgg

SEQ ID NO: 3120245 - DNA, 25 bp, Homo sapien
gatactgggcgagagccttggtaac

SEQ ID NO: 3120246 - DNA, 25 bp, Homo sapien
ttggtaacggcgcacacgtgccgac

SEQ ID NO: 3120247 - DNA, 25 bp, Homo sapien
aagaggccaccagtagcacgtccag

SEQ ID NO: 3120248 - DNA, 25 bp, Homo sapien
ccagtagcacgtccaggtttgccca

SEQ ID NO: 3120249 - DNA, 25 bp, Homo sapien
ccccttcagccttggcatcacgcac

SEQ ID NO: 3120250 - DNA, 25 bp, Homo sapien
ccccccttcagccttggcatcacgc

SEQ ID NO: 3120251 - DNA, 25 bp, Homo sapien
cccccttcagccttggcatcacgca

SEQ ID NO: 3120252 - DNA, 25 bp, Homo sapien
atcagccacggctgggctgacccga

SEQ ID NO: 3120253 - DNA, 25 bp, Homo sapien
gggaaggctgtgacaactgcatcag

SEQ ID NO: 3120254 - DNA, 25 bp, Homo sapien
tgacccgactgaactgcctgatctg

SEQ ID NO: 3120255 - DNA, 25 bp, Homo sapien
tgcgccgtctcttgccactggctcg

SEQ ID NO: 3120256 - DNA, 25 bp, Homo sapien
gcggcacaggaaggtcggccaggag

SEQ ID NO: 3120257 - DNA, 25 bp, Homo sapien
caccctgcggggacgcccgccttca

SEQ ID NO: 3120258 - DNA, 25 bp, Homo sapien
gggcggcacaggaaggtcggccagg

SEQ ID NO: 3120259 - DNA, 25 bp, Homo sapien
gggacgcccgccttcactgggcggc

SEQ ID NO: 3120260 - DNA, 25 bp, Homo sapien
ccaccgcccagggtgtctggtctgt

SEQ ID NO: 3120261 - DNA, 25 bp, Homo sapien
ccccaaggctgcatgctgtcctggt

SEQ ID NO: 3120262 - DNA, 25 bp, Homo sapien
tgctgtcctggtggtcccacgtgtg

SEQ ID NO: 3120263 - DNA, 25 bp, Homo sapien
gggtgtctggtctgtccccaaggct

SEQ ID NO: 3120264 - DNA, 25 bp, Homo sapien
catggcgtgagctgaaacgtatccg

SEQ ID NO: 3120265 - DNA, 25 bp, Homo sapien
acgtatccgtgcagaggccgggctt

SEQ ID NO: 3120266 - DNA, 25 bp, Homo sapien
gagttgatgtctaacacccacatgg

SEQ ID NO: 3120267 - DNA, 25 bp, Homo sapien
gcctacgtgttcaggactcagcaca

SEQ ID NO: 3120268 - DNA, 25 bp, Homo sapien
caggtgctacacaacaagctgggct

SEQ ID NO: 3120269 - DNA, 25 bp, Homo sapien
tcccgaggctgggacagtcctttct

SEQ ID NO: 3120270 - DNA, 25 bp, Homo sapien
ggtcctgagcatgagttgcagccgc

SEQ ID NO: 3120271 - DNA, 25 bp, Homo sapien
tgccccgccgtcatagacttaaagg

SEQ ID NO: 3120272 - DNA, 25 bp, Homo sapien
ccatcattggcgtgcacctggacac

SEQ ID NO: 3120273 - DNA, 25 bp, Homo sapien
gacatggtaagttgcttcggcccag

SEQ ID NO: 3120274 - DNA, 25 bp, Homo sapien
tgctgagctgtgacaaccgtaaggt

SEQ ID NO: 3120275 - DNA, 25 bp, Homo sapien
ttccacatggagtacagctgcggca

SEQ ID NO: 3120276 - DNA, 25 bp, Homo sapien
gagcgaggcctccttctgtagcagc

SEQ ID NO: 3120277 - DNA, 25 bp, Homo sapien
tatccaccgtctagaaaccacttgg

SEQ ID NO: 3120278 - DNA, 25 bp, Homo sapien
gatgcaccgcattcagtaagactct

SEQ ID NO: 3120279 - DNA, 25 bp, Homo sapien
gaagctggctttcgataggtccacg

SEQ ID NO: 3120280 - DNA, 25 bp, Homo sapien
ggctgcagtccgcttacgcccgcgg

SEQ ID NO: 3120281 - DNA, 25 bp, Homo sapien
gcagtccgcttacgcccgcgggccg

SEQ ID NO: 3120282 - DNA, 25 bp, Homo sapien
ctgcagtccgcttacgcccgcgggc

SEQ ID NO: 3120283 - DNA, 25 bp, Homo sapien
ttacgcccgcgggccgtcagcctcc

SEQ ID NO: 3120284 - DNA, 25 bp, Homo sapien
tcttactttcatgactgcgcgcgtg

SEQ ID NO: 3120285 - DNA, 25 bp, Homo sapien
gagatcacggagcttccacatcgaa

SEQ ID NO: 3120286 - DNA, 25 bp, Homo sapien
tttctgaacactgagagcgccactt

SEQ ID NO: 3120287 - DNA, 25 bp, Homo sapien
aaagcatgtgagattctggcgtccg

SEQ ID NO: 3120288 - DNA, 25 bp, Homo sapien
tagtaaatccgtcctgataataagg

SEQ ID NO: 3120289 - DNA, 25 bp, Homo sapien
aaatccgtcctgataataaggacag

SEQ ID NO: 3120290 - DNA, 25 bp, Homo sapien
tttgtagtaaatccgtcctgataat

SEQ ID NO: 3120291 - DNA, 25 bp, Homo sapien
gtaaatccgtcctgataataaggac

SEQ ID NO: 3120292 - DNA, 25 bp, Homo sapien
gaaggatcatttcggtccaggagga

SEQ ID NO: 3120293 - DNA, 25 bp, Homo sapien
gcaccactctcaataacgtattcag

SEQ ID NO: 3120294 - DNA, 25 bp, Homo sapien
taacgtattcagaccccatgtctac

SEQ ID NO: 3120295 - DNA, 25 bp, Homo sapien
ggaggagttccgcaccactctcaat

SEQ ID NO: 3120296 - DNA, 25 bp, Homo sapien
aacacatgatgcgtaaaacctgccc

SEQ ID NO: 3120297 - DNA, 25 bp, Homo sapien
tcaagggcacgttcaaaggctccca

SEQ ID NO: 3120298 - DNA, 25 bp, Homo sapien
catccccgacaggtccttggagggt

SEQ ID NO: 3120299 - DNA, 25 bp, Homo sapien
agtccaaagcctcccggagaacctg

SEQ ID NO: 3120300 - DNA, 25 bp, Homo sapien
ctgacgccggccaggtttccaggct

SEQ ID NO: 3120301 - DNA, 25 bp, Homo sapien
aggatgatgtgcctgacgccggcca

SEQ ID NO: 3120302 - DNA, 25 bp, Homo sapien
tcttgcctgcatggcgcagtgccag

SEQ ID NO: 3120303 - DNA, 25 bp, Homo sapien
tggagatggtgcttttcccaacgcc

SEQ ID NO: 3120304 - DNA, 25 bp, Homo sapien
cggggctccgcccagtgaggggtag

SEQ ID NO: 3120305 - DNA, 25 bp, Homo sapien
tccgcccagtgaggggtagggcgct

SEQ ID NO: 3120306 - DNA, 25 bp, Homo sapien
ccgccaggcctccaccgggatgcgg

SEQ ID NO: 3120307 - DNA, 25 bp, Homo sapien
gcccagtgaggggtagggcgctcac

SEQ ID NO: 3120308 - DNA, 25 bp, Homo sapien
agccgcggtcgcactggtgcacagc

SEQ ID NO: 3120309 - DNA, 25 bp, Homo sapien
acaccacggcctcgtccggcttctc

SEQ ID NO: 3120310 - DNA, 25 bp, Homo sapien
cagacatgagcgagatgctctgctc

SEQ ID NO: 3120311 - DNA, 25 bp, Homo sapien
aggaagacgggtgcccagccgcggt

SEQ ID NO: 3120312 - DNA, 25 bp, Homo sapien
gccactaagaaccagccaggtcagg

SEQ ID NO: 3120313 - DNA, 25 bp, Homo sapien
tgtgtggcagcacggacccaactgg

SEQ ID NO: 3120314 - DNA, 25 bp, Homo sapien
tgggagcacccacattctccgtggt

SEQ ID NO: 3120315 - DNA, 25 bp, Homo sapien
ccctgtgcctggtcgtgggtgtcat

SEQ ID NO: 3120316 - DNA, 25 bp, Homo sapien
aggccacgtcggacacaaactgctt

SEQ ID NO: 3120317 - DNA, 25 bp, Homo sapien
caggccacgtcggacacaaactgct

SEQ ID NO: 3120318 - DNA, 25 bp, Homo sapien
gggcttctatggtggccatgtgctc

SEQ ID NO: 3120319 - DNA, 25 bp, Homo sapien
gacgcagggcttctatggtggccat

SEQ ID NO: 3120320 - DNA, 25 bp, Homo sapien
ttcctacagaaggtcagctcgcgcc

SEQ ID NO: 3120321 - DNA, 25 bp, Homo sapien
tacagaaggtcagctcgcgcctcac

SEQ ID NO: 3120322 - DNA, 25 bp, Homo sapien
tcctacagaaggtcagctcgcgcct

SEQ ID NO: 3120323 - DNA, 25 bp, Homo sapien
agaaggtcagctcgcgcctcacgtc

SEQ ID NO: 3120324 - DNA, 25 bp, Homo sapien
gtgaagccgctcatattctccacga

SEQ ID NO: 3120325 - DNA, 25 bp, Homo sapien
gaagccgctcatattctccacgatt

SEQ ID NO: 3120326 - DNA, 25 bp, Homo sapien
aggtgaagccgctcatattctccac

SEQ ID NO: 3120327 - DNA, 25 bp, Homo sapien
atattctccacgattcccatcaccc

SEQ ID NO: 3120328 - DNA, 25 bp, Homo sapien
ggcgagctgggccagctcctctccg

SEQ ID NO: 3120329 - DNA, 25 bp, Homo sapien
ctaagaagggcaccccggcgagctg

SEQ ID NO: 3120330 - DNA, 25 bp, Homo sapien
ctgggccagctcctctccgccgccc

SEQ ID NO: 3120331 - DNA, 25 bp, Homo sapien
agctgggccagctcctctccgccgc

SEQ ID NO: 3120332 - DNA, 25 bp, Homo sapien
agggtcctcatgagcgcagggtcca

SEQ ID NO: 3120333 - DNA, 25 bp, Homo sapien
gggctatggaggtgagtgcagcgaa

SEQ ID NO: 3120334 - DNA, 25 bp, Homo sapien
ctatggaggtgagtgcagcgaaggc

SEQ ID NO: 3120335 - DNA, 25 bp, Homo sapien
aactcctggatgaagtcgtggccct

SEQ ID NO: 3120336 - DNA, 25 bp, Homo sapien
ctaactgtgtggacacgcggctgcc

SEQ ID NO: 3120337 - DNA, 25 bp, Homo sapien
tccccgagctaaacacagatgacag

SEQ ID NO: 3120338 - DNA, 25 bp, Homo sapien
acagcagcggacacgtttaatggca

SEQ ID NO: 3120339 - DNA, 25 bp, Homo sapien
ggcaggcgcctctacagttacaaaa

SEQ ID NO: 3120340 - DNA, 25 bp, Homo sapien
ttgacaacggaacgaacgaacctgc

SEQ ID NO: 3120341 - DNA, 25 bp, Homo sapien
gacagaagactctagaaacatcaga

SEQ ID NO: 3120342 - DNA, 25 bp, Homo sapien
gaacgaacgaacctgccggcctggc

SEQ ID NO: 3120343 - DNA, 25 bp, Homo sapien
aggacagaagactctagaaacatca

SEQ ID NO: 3120344 - DNA, 25 bp, Homo sapien
tagacaggtatgcacccacaggatg

SEQ ID NO: 3120345 - DNA, 25 bp, Homo sapien
aagatgctcggtctcccaggtgatg

SEQ ID NO: 3120346 - DNA, 25 bp, Homo sapien
taactagaaaatcggcaagagaccg

SEQ ID NO: 3120347 - DNA, 25 bp, Homo sapien
tccaggacgtgacctagacatggcc

SEQ ID NO: 3120348 - DNA, 25 bp, Homo sapien
tcactggtctgttcgcatactcgca

SEQ ID NO: 3120349 - DNA, 25 bp, Homo sapien
gccctgggacctaggagcaagcctg

SEQ ID NO: 3120350 - DNA, 25 bp, Homo sapien
gggatgccacggaagccaggcgtgt

SEQ ID NO: 3120351 - DNA, 25 bp, Homo sapien
tagacagactcttctgagtggaggg

SEQ ID NO: 3120352 - DNA, 25 bp, Homo sapien
ctaaggctaatctgaaatttagggc

SEQ ID NO: 3120353 - DNA, 25 bp, Homo sapien
agtgctctcggcctgtgaccccggg

SEQ ID NO: 3120354 - DNA, 25 bp, Homo sapien
gtaggtggccacatgtcctgccccg

SEQ ID NO: 3120355 - DNA, 25 bp, Homo sapien
ggtggcagagggtctatgagggaag

SEQ ID NO: 3120356 - DNA, 25 bp, Homo sapien
tacagcccttggcttgtgttatcgg

SEQ ID NO: 3120357 - DNA, 25 bp, Homo sapien
cttaattttacagcccttggcttgt

SEQ ID NO: 3120358 - DNA, 25 bp, Homo sapien
tggcttgtgttatcggacattctaa

SEQ ID NO: 3120359 - DNA, 25 bp, Homo sapien
tgtgttatcggacattctaatgcat

SEQ ID NO: 3120360 - DNA, 25 bp, Homo sapien
cgcagggagaaggaccagttcaaga

SEQ ID NO: 3120361 - DNA, 25 bp, Homo sapien
agacggacccggtgaccaccatgcg

SEQ ID NO: 3120362 - DNA, 25 bp, Homo sapien
cagcagcacgcaggtgagacggacc

SEQ ID NO: 3120363 - DNA, 25 bp, Homo sapien
ccagttcaagatgccccgggactga

SEQ ID NO: 3120364 - DNA, 25 bp, Homo sapien
agtttacctacaaccccttcatgag

SEQ ID NO: 3120365 - DNA, 25 bp, Homo sapien
ttacctacaaccccttcatgagagt

SEQ ID NO: 3120366 - DNA, 25 bp, Homo sapien
gagtttacctacaaccccttcatga

SEQ ID NO: 3120367 - DNA, 25 bp, Homo sapien
gtttacctacaaccccttcatgaga

SEQ ID NO: 3120368 - DNA, 25 bp, Homo sapien
gaatgaaaaggaagctccgtccctg

SEQ ID NO: 3120369 - DNA, 25 bp, Homo sapien
tcagccttgtcagtcgggcagtgtc

SEQ ID NO: 3120370 - DNA, 25 bp, Homo sapien
cagtgtcctaaggttaccaggaggt

SEQ ID NO: 3120371 - DNA, 25 bp, Homo sapien
gagacgtgatgtcgctgtcacccag

SEQ ID NO: 3120372 - DNA, 25 bp, Homo sapien
tgccaaaaaagaggcggaggctcgc

SEQ ID NO: 3120373 - DNA, 25 bp, Homo sapien
aggaccaactgcctcggaacgctgt

SEQ ID NO: 3120374 - DNA, 25 bp, Homo sapien
agggatccactgtgcggtgccaaaa

SEQ ID NO: 3120375 - DNA, 25 bp, Homo sapien
gatgcctacggcatcccggagagga

SEQ ID NO: 3120376 - DNA, 25 bp, Homo sapien
aggacgccgtgaagctcttcgccag

SEQ ID NO: 3120377 - DNA, 25 bp, Homo sapien
ccgtggacggcttcaggaacagcac

SEQ ID NO: 3120378 - DNA, 25 bp, Homo sapien
tggcgtcccagtcaagataatatct

SEQ ID NO: 3120379 - DNA, 25 bp, Homo sapien
tcccagaagcgggacaatggcctgg

SEQ ID NO: 3120380 - DNA, 25 bp, Homo sapien
ttctggcttttccactttaaatgtc

SEQ ID NO: 3120381 - DNA, 25 bp, Homo sapien
caatattctggcttttccactttaa

SEQ ID NO: 3120382 - DNA, 25 bp, Homo sapien
ggcttttccactttaaatgtcatac

SEQ ID NO: 3120383 - DNA, 25 bp, Homo sapien
tctggcttttccactttaaatgtca

SEQ ID NO: 3120384 - DNA, 25 bp, Homo sapien
taagtgctgaactactgatcatcct

SEQ ID NO: 3120385 - DNA, 25 bp, Homo sapien
taatagccgttgcttgctcttgtct

SEQ ID NO: 3120386 - DNA, 25 bp, Homo sapien
tgatcatcctagagataacccactg

SEQ ID NO: 3120387 - DNA, 25 bp, Homo sapien
gagttgaggcatagcaatctaatca

SEQ ID NO: 3120388 - DNA, 25 bp, Homo sapien
cctgatgatgaccaaatctaagaaa

SEQ ID NO: 3120389 - DNA, 25 bp, Homo sapien
aacaacggaaagttatctggaacat

SEQ ID NO: 3120390 - DNA, 25 bp, Homo sapien
ctgatgatgaccaaatctaagaaaa

SEQ ID NO: 3120391 - DNA, 25 bp, Homo sapien
tcctgatgatgaccaaatctaagaa

SEQ ID NO: 3120392 - DNA, 25 bp, Homo sapien
tcactggagattaatcctatcaaat

SEQ ID NO: 3120393 - DNA, 25 bp, Homo sapien
aaattgattcagcaagtccgagatg

SEQ ID NO: 3120394 - DNA, 25 bp, Homo sapien
attgattcagcaagtccgagatggg

SEQ ID NO: 3120395 - DNA, 25 bp, Homo sapien
gattcagcaagtccgagatgggcca

SEQ ID NO: 3120396 - DNA, 25 bp, Homo sapien
ttcaaaatcatctcccgaactcaga

SEQ ID NO: 3120397 - DNA, 25 bp, Homo sapien
gtagataccctaagtaaacaggtga

SEQ ID NO: 3120398 - DNA, 25 bp, Homo sapien
gaatcgatgggtctgggtagatacc

SEQ ID NO: 3120399 - DNA, 25 bp, Homo sapien
taaattaaccgattatgtacaggag

SEQ ID NO: 3120400 - DNA, 25 bp, Homo sapien
tctgagagctgggtggtgactcgtc

SEQ ID NO: 3120401 - DNA, 25 bp, Homo sapien
tctaaagactactttctgagagctg

SEQ ID NO: 3120402 - DNA, 25 bp, Homo sapien
ggtgactcgtcatctgacagatctg

SEQ ID NO: 3120403 - DNA, 25 bp, Homo sapien
catctgacagatctgacaggatgag

SEQ ID NO: 3120404 - DNA, 25 bp, Homo sapien
gctgatgggtgcaatagtacacacc

SEQ ID NO: 3120405 - DNA, 25 bp, Homo sapien
tcccagatgtgcataaggattcagc

SEQ ID NO: 3120406 - DNA, 25 bp, Homo sapien
tataaaggagttaccaaagacatca

SEQ ID NO: 3120407 - DNA, 25 bp, Homo sapien
taaggattcagctatcctaaaagca

SEQ ID NO: 3120408 - DNA, 25 bp, Homo sapien
tgtaacctcagaaacgggaagctga

SEQ ID NO: 3120409 - DNA, 25 bp, Homo sapien
gtaacctcagaaacgggaagctgag

SEQ ID NO: 3120410 - DNA, 25 bp, Homo sapien
cacaggaagtgttgctgaggagact

SEQ ID NO: 3120411 - DNA, 25 bp, Homo sapien
tgtagtctcacaggaagtgttgctg

SEQ ID NO: 3120412 - DNA, 25 bp, Homo sapien
tctcacaggaagtgttgctgaggag

SEQ ID NO: 3120413 - DNA, 25 bp, Homo sapien
tcctgtagtctcacaggaagtgttg

SEQ ID NO: 3120414 - DNA, 25 bp, Homo sapien
gactcctgagaatggctgcgtagaa

SEQ ID NO: 3120415 - DNA, 25 bp, Homo sapien
gggccccagcaaggaaatgagactg

SEQ ID NO: 3120416 - DNA, 25 bp, Homo sapien
tcttgtagaccgcatagcactgaac

SEQ ID NO: 3120417 - DNA, 25 bp, Homo sapien
tgtatttgtagagaaggccccgtgc

SEQ ID NO: 3120418 - DNA, 25 bp, Homo sapien
aatccactggtcgtattcagattcc

SEQ ID NO: 3120419 - DNA, 25 bp, Homo sapien
tttgctagaccaagtgatctgtggc

SEQ ID NO: 3120420 - DNA, 25 bp, Homo sapien
tattgatatctgaggaaaagcatct

SEQ ID NO: 3120421 - DNA, 25 bp, Homo sapien
gatctgtggctagataagaaaccac

SEQ ID NO: 3120422 - DNA, 25 bp, Homo sapien
ccaatgaagtgctgaaggaaccgga

SEQ ID NO: 3120423 - DNA, 25 bp, Homo sapien
tgttgcttcacatcctcactaatgt

SEQ ID NO: 3120424 - DNA, 25 bp, Homo sapien
caggctgggatgcaaagccgcgatc

SEQ ID NO: 3120425 - DNA, 25 bp, Homo sapien
caagtaatattagttcctggaagat

SEQ ID NO: 3120426 - DNA, 25 bp, Homo sapien
gctctcaccatggtagccctgtgga

SEQ ID NO: 3120427 - DNA, 25 bp, Homo sapien
tgccctcgaggagtccacgtagatg

SEQ ID NO: 3120428 - DNA, 25 bp, Homo sapien
tgtatctcgcatgtggctctcacca

SEQ ID NO: 3120429 - DNA, 25 bp, Homo sapien
actaagaagacggaggtgctgagcc

SEQ ID NO: 3120430 - DNA, 25 bp, Homo sapien
tgtgttatatgcaccaaagttgttc

SEQ ID NO: 3120431 - DNA, 25 bp, Homo sapien
ttggatcttacttgccctgggttgg

SEQ ID NO: 3120432 - DNA, 25 bp, Homo sapien
taagtccaatccttagcacatctaa

SEQ ID NO: 3120433 - DNA, 25 bp, Homo sapien
aacttaaataatgctacatgtggac

SEQ ID NO: 3120434 - DNA, 25 bp, Homo sapien
cgggaactcgttcacaatgaagcca

SEQ ID NO: 3120435 - DNA, 25 bp, Homo sapien
tgactttgacacaataaacgggaac

SEQ ID NO: 3120436 - DNA, 25 bp, Homo sapien
gaagccatctcacgccaaatctatg

SEQ ID NO: 3120437 - DNA, 25 bp, Homo sapien
gttggcccatccgtacctggctgct

SEQ ID NO: 3120438 - DNA, 25 bp, Homo sapien
cccctgatagggaggaacaagatcc

SEQ ID NO: 3120439 - DNA, 25 bp, Homo sapien
cacagagggagcatcgaagctgcaa

SEQ ID NO: 3120440 - DNA, 25 bp, Homo sapien
gatgggcaatctgcaggtaccttcc

SEQ ID NO: 3120441 - DNA, 25 bp, Homo sapien
taaaagcgtccgcatcaagatgatg

SEQ ID NO: 3120442 - DNA, 25 bp, Homo sapien
gcatgatccgctctggtcaaaccct

SEQ ID NO: 3120443 - DNA, 25 bp, Homo sapien
tctgtgcggaagtagcttgcctcac

SEQ ID NO: 3120444 - DNA, 25 bp, Homo sapien
tactgtacatgctcggaggcctggc

SEQ ID NO: 3120445 - DNA, 25 bp, Homo sapien
ggaaagcggctgttgctccataact

SEQ ID NO: 3120446 - DNA, 25 bp, Homo sapien
gcaaaggcggtttcacctgggcgcg

SEQ ID NO: 3120447 - DNA, 25 bp, Homo sapien
tgggcgcggaaaggctgcatgacct

SEQ ID NO: 3120448 - DNA, 25 bp, Homo sapien
atgacctccggcagctccgggctta

SEQ ID NO: 3120449 - DNA, 25 bp, Homo sapien
gatagagtcggctgagttagatctc

SEQ ID NO: 3120450 - DNA, 25 bp, Homo sapien
ccaggagagccgattggtcagggag

SEQ ID NO: 3120451 - DNA, 25 bp, Homo sapien
ggagagccgattggtcagggaggaa

SEQ ID NO: 3120452 - DNA, 25 bp, Homo sapien
caggagagccgattggtcagggagg

SEQ ID NO: 3120453 - DNA, 25 bp, Homo sapien
aggagagccgattggtcagggagga

SEQ ID NO: 3120454 - DNA, 25 bp, Homo sapien
ctaggtcgcccgctacagaggacgc

SEQ ID NO: 3120455 - DNA, 25 bp, Homo sapien
tcgcccgctacagaggacgccgagg

SEQ ID NO: 3120456 - DNA, 25 bp, Homo sapien
gtcccgcggcctaggtcgcccgcta

SEQ ID NO: 3120457 - DNA, 25 bp, Homo sapien
ggcctaggtcgcccgctacagagga

SEQ ID NO: 3120458 - DNA, 25 bp, Homo sapien
tcacgggtcggtccacgatgaggtc

SEQ ID NO: 3120459 - DNA, 25 bp, Homo sapien
gctttcatcatgtagacgatgggat

SEQ ID NO: 3120460 - DNA, 25 bp, Homo sapien
atgggattgggctgcaccggcgtgc

SEQ ID NO: 3120461 - DNA, 25 bp, Homo sapien
tccacgatgaggtcgaacgctttca

SEQ ID NO: 3120462 - DNA, 25 bp, Homo sapien
catcccggggtgcaggggagagtaa

SEQ ID NO: 3120463 - DNA, 25 bp, Homo sapien
gaggcgacggagctcggaggtctcc

SEQ ID NO: 3120464 - DNA, 25 bp, Homo sapien
gcggtgcagtggaggggtgcccggg

SEQ ID NO: 3120465 - DNA, 25 bp, Homo sapien
aggcagacgggaccccggaggcatt

SEQ ID NO: 3120466 - DNA, 25 bp, Homo sapien
tcacagatggcaaggactgggacgc

SEQ ID NO: 3120467 - DNA, 25 bp, Homo sapien
gagctcgaacatccagacacatagg

SEQ ID NO: 3120468 - DNA, 25 bp, Homo sapien
tcgtctctctaagggatgtggccag

SEQ ID NO: 3120469 - DNA, 25 bp, Homo sapien
tcctcactgggaaatgaacgagcta

SEQ ID NO: 3120470 - DNA, 25 bp, Homo sapien
gatgtctggcacgcggcggtactgc

SEQ ID NO: 3120471 - DNA, 25 bp, Homo sapien
ttgcactcagtgatgtctggcacgc

SEQ ID NO: 3120472 - DNA, 25 bp, Homo sapien
tctggcacgcggcggtactgccggt

SEQ ID NO: 3120473 - DNA, 25 bp, Homo sapien
ccttgcactcagtgatgtctggcac

SEQ ID NO: 3120474 - DNA, 25 bp, Homo sapien
tcttccactgcatttcggcttcata

SEQ ID NO: 3120475 - DNA, 25 bp, Homo sapien
cttccactgcatttcggcttcatac

SEQ ID NO: 3120476 - DNA, 25 bp, Homo sapien
cagcagcacacggtgcagatctcca

SEQ ID NO: 3120477 - DNA, 25 bp, Homo sapien
cagggactagtgtcccagcagcaca

SEQ ID NO: 3120478 - DNA, 25 bp, Homo sapien
tcacaaggaatccttttcctgtacc

SEQ ID NO: 3120479 - DNA, 25 bp, Homo sapien
caagagaggctaatcacaaggaatc

SEQ ID NO: 3120480 - DNA, 25 bp, Homo sapien
cacttccttgatacagttctgctgg

SEQ ID NO: 3120481 - DNA, 25 bp, Homo sapien
cctctgctgacaggctttgagccga

SEQ ID NO: 3120482 - DNA, 25 bp, Homo sapien
gttgataatttcttggtcgactttg

SEQ ID NO: 3120483 - DNA, 25 bp, Homo sapien
gagccgatcctgcataatgttgata

SEQ ID NO: 3120484 - DNA, 25 bp, Homo sapien
gaagatttgcaatggttctggcccc

SEQ ID NO: 3120485 - DNA, 25 bp, Homo sapien
atttgcaatggttctggcccccagg

SEQ ID NO: 3120486 - DNA, 25 bp, Homo sapien
agatttgcaatggttctggccccca

SEQ ID NO: 3120487 - DNA, 25 bp, Homo sapien
gggaagatttgcaatggttctggcc

SEQ ID NO: 3120488 - DNA, 25 bp, Homo sapien
cgaggcctctgctacatgcaaaggg

SEQ ID NO: 3120489 - DNA, 25 bp, Homo sapien
gggaaccgaggcctctgctacatgc

SEQ ID NO: 3120490 - DNA, 25 bp, Homo sapien
gctgggaaccgaggcctctgctaca

SEQ ID NO: 3120491 - DNA, 25 bp, Homo sapien
aacaagctgggaaccgaggcctctg

SEQ ID NO: 3120492 - DNA, 25 bp, Homo sapien
tctgcctctgtttggccaggcactt

SEQ ID NO: 3120493 - DNA, 25 bp, Homo sapien
ctctgcctctgtttggccaggcact

SEQ ID NO: 3120494 - DNA, 25 bp, Homo sapien
ttatatttcagcaacagtcatacag

SEQ ID NO: 3120495 - DNA, 25 bp, Homo sapien
tatatttcagcaacagtcatacaga

SEQ ID NO: 3120496 - DNA, 25 bp, Homo sapien
atatttcagcaacagtcatacagag

SEQ ID NO: 3120497 - DNA, 25 bp, Homo sapien
tatttcagcaacagtcatacagagc

SEQ ID NO: 3120498 - DNA, 25 bp, Homo sapien
caaggccacctttgatgccatttct

SEQ ID NO: 3120499 - DNA, 25 bp, Homo sapien
catttctaagacctacagctacctg

SEQ ID NO: 3120500 - DNA, 25 bp, Homo sapien
agtctccgtgcagcggactcaggct

SEQ ID NO: 3120501 - DNA, 25 bp, Homo sapien
agagtctccgtgcagcggactcagg

SEQ ID NO: 3120502 - DNA, 25 bp, Homo sapien
gctcatgatggctggtatcgatgac

SEQ ID NO: 3120503 - DNA, 25 bp, Homo sapien
agctgctcatgatggctggtatcga

SEQ ID NO: 3120504 - DNA, 25 bp, Homo sapien
ggctggtatcgatgactgctacacc

SEQ ID NO: 3120505 - DNA, 25 bp, Homo sapien
catgatggctggtatcgatgactgc

SEQ ID NO: 3120506 - DNA, 25 bp, Homo sapien
ggcaagccccacactgtcccttgca

SEQ ID NO: 3120507 - DNA, 25 bp, Homo sapien
gcaagccccacactgtcccttgcaa

SEQ ID NO: 3120508 - DNA, 25 bp, Homo sapien
caagatcggcaagccccacactgtc

SEQ ID NO: 3120509 - DNA, 25 bp, Homo sapien
atcggcaagccccacactgtccctt

SEQ ID NO: 3120510 - DNA, 25 bp, Homo sapien
tggaggcgcggacgtttatagccac

SEQ ID NO: 3120511 - DNA, 25 bp, Homo sapien
tcgcttttcgggtgacgtagattcc

SEQ ID NO: 3120512 - DNA, 25 bp, Homo sapien
gaggcgccggcgtttatagtcgctt

SEQ ID NO: 3120513 - DNA, 25 bp, Homo sapien
tatagccactcttcgggtggattcc

SEQ ID NO: 3120514 - DNA, 25 bp, Homo sapien
cctgggtttcaccgccgcacatggg

SEQ ID NO: 3120515 - DNA, 25 bp, Homo sapien
ccggtctcgaagaccaccagcgaga

SEQ ID NO: 3120516 - DNA, 25 bp, Homo sapien
gattttcaaccaacgccggtctcga

SEQ ID NO: 3120517 - DNA, 25 bp, Homo sapien
gccagtggtcaacgcggcaggacct

SEQ ID NO: 3120518 - DNA, 25 bp, Homo sapien
gacgtcggtgtcaggcgtgggagga

SEQ ID NO: 3120519 - DNA, 25 bp, Homo sapien
cgcggtcctggcgacgtcggtgtca

SEQ ID NO: 3120520 - DNA, 25 bp, Homo sapien
ctggcgacgtcggtgtcaggcgtgg

SEQ ID NO: 3120521 - DNA, 25 bp, Homo sapien
caaccccgcggtcctggcgacgtcg

SEQ ID NO: 3120522 - DNA, 25 bp, Homo sapien
gccagtgtagttcacttgagatgcg

SEQ ID NO: 3120523 - DNA, 25 bp, Homo sapien
agtgtagttcacttgagatgcgcat

SEQ ID NO: 3120524 - DNA, 25 bp, Homo sapien
cagtgtagttcacttgagatgcgca

SEQ ID NO: 3120525 - DNA, 25 bp, Homo sapien
ctgccagtgtagttcacttgagatg

SEQ ID NO: 3120526 - DNA, 25 bp, Homo sapien
tgctggcctcttgagaaccccatgg

SEQ ID NO: 3120527 - DNA, 25 bp, Homo sapien
gaagaggttgagatcatacccgcca

SEQ ID NO: 3120528 - DNA, 25 bp, Homo sapien
cagaagatgtggctgcatggcaacc

SEQ ID NO: 3120529 - DNA, 25 bp, Homo sapien
catggcagacggagcacacgaagtt

SEQ ID NO: 3120530 - DNA, 25 bp, Homo sapien
ttcacctctttcctacagcacggac

SEQ ID NO: 3120531 - DNA, 25 bp, Homo sapien
acctctttcctacagcacggacagg

SEQ ID NO: 3120532 - DNA, 25 bp, Homo sapien
tctttcctacagcacggacaggtct

SEQ ID NO: 3120533 - DNA, 25 bp, Homo sapien
cctacagcacggacaggtcttttgt

SEQ ID NO: 3120534 - DNA, 25 bp, Homo sapien
caatggttttccggagtttattcat

SEQ ID NO: 3120535 - DNA, 25 bp, Homo sapien
tccaggcggccaatggttttccgga

SEQ ID NO: 3120536 - DNA, 25 bp, Homo sapien
caggcggccaatggttttccggagt

SEQ ID NO: 3120537 - DNA, 25 bp, Homo sapien
gacttccaggcggccaatggttttc

SEQ ID NO: 3120538 - DNA, 25 bp, Homo sapien
cctggtgccccttgcgatgggccag

SEQ ID NO: 3120539 - DNA, 25 bp, Homo sapien
gcgctgctgggacccttgctggcaa

SEQ ID NO: 3120540 - DNA, 25 bp, Homo sapien
atgtcactatgcagccagcgtcggc

SEQ ID NO: 3120541 - DNA, 25 bp, Homo sapien
tcccggtagcagttgtggcgagcac

SEQ ID NO: 3120542 - DNA, 25 bp, Homo sapien
tctctacgaacgacactggtggctt

SEQ ID NO: 3120543 - DNA, 25 bp, Homo sapien
tccagcagagcggtgtcttcctcca

SEQ ID NO: 3120544 - DNA, 25 bp, Homo sapien
gaacgacactggtggcttggtccag

SEQ ID NO: 3120545 - DNA, 25 bp, Homo sapien
gccagctctctacgaacgacactgg

SEQ ID NO: 3120546 - DNA, 25 bp, Homo sapien
acaaggtatgttggccctgggctcc

SEQ ID NO: 3120547 - DNA, 25 bp, Homo sapien
tttacaaggtatgttggccctgggc

SEQ ID NO: 3120548 - DNA, 25 bp, Homo sapien
ctatttacaaggtatgttggccctg

SEQ ID NO: 3120549 - DNA, 25 bp, Homo sapien
ctcagccccaacgttgccttctggg

SEQ ID NO: 3120550 - DNA, 25 bp, Homo sapien
ccatctttgcttcgggcagtggcgg

SEQ ID NO: 3120551 - DNA, 25 bp, Homo sapien
ggttagcaccgaactcttcacagaa

SEQ ID NO: 3120552 - DNA, 25 bp, Homo sapien
tccagctgaaacctgctagggtccc

SEQ ID NO: 3120553 - DNA, 25 bp, Homo sapien
catttgtagccagcgtttactcctg

SEQ ID NO: 3120554 - DNA, 25 bp, Homo sapien
ttggtcttgaagcggcccactccgg

SEQ ID NO: 3120555 - DNA, 25 bp, Homo sapien
tggtcttgaagcggcccactccggc

SEQ ID NO: 3120556 - DNA, 25 bp, Homo sapien
gtcttgaagcggcccactccggccg

SEQ ID NO: 3120557 - DNA, 25 bp, Homo sapien
cttgaagcggcccactccggccgcg

SEQ ID NO: 3120558 - DNA, 25 bp, Homo sapien
tccgcccttgtagaaaggctcaatt

SEQ ID NO: 3120559 - DNA, 25 bp, Homo sapien
cccttgtagaaaggctcaattttgc

SEQ ID NO: 3120560 - DNA, 25 bp, Homo sapien
tgcttttccgcccttgtagaaaggc

SEQ ID NO: 3120561 - DNA, 25 bp, Homo sapien
ttttccgcccttgtagaaaggctca

SEQ ID NO: 3120562 - DNA, 25 bp, Homo sapien
gccaggcaacattcagcaccccccg

SEQ ID NO: 3120563 - DNA, 25 bp, Homo sapien
agccaggcaacattcagcacccccc

SEQ ID NO: 3120564 - DNA, 25 bp, Homo sapien
tcagccaggcaacattcagcacccc

SEQ ID NO: 3120565 - DNA, 25 bp, Homo sapien
cagccaggcaacattcagcaccccc

SEQ ID NO: 3120566 - DNA, 25 bp, Homo sapien
ctctggtgccacagacgcagaagag

SEQ ID NO: 3120567 - DNA, 25 bp, Homo sapien
ctgctccagactccgcagcacggcc

SEQ ID NO: 3120568 - DNA, 25 bp, Homo sapien
cgaggccacttccagaatgttgact

SEQ ID NO: 3120569 - DNA, 25 bp, Homo sapien
cagaatgttgactctggtgccacag

SEQ ID NO: 3120570 - DNA, 25 bp, Homo sapien
aggtcaaaggcagtgatgtcctcct

SEQ ID NO: 3120571 - DNA, 25 bp, Homo sapien
ggctgaggtcaaaggcagtgatgtc

SEQ ID NO: 3120572 - DNA, 25 bp, Homo sapien
tgaggtcaaaggcagtgatgtcctc

SEQ ID NO: 3120573 - DNA, 25 bp, Homo sapien
cagggctgaggtcaaaggcagtgat

SEQ ID NO: 3120574 - DNA, 25 bp, Homo sapien
gggccgtgtgtatcgccttccacag

SEQ ID NO: 3120575 - DNA, 25 bp, Homo sapien
gcgggtaacgctgccctcttgccag

SEQ ID NO: 3120576 - DNA, 25 bp, Homo sapien
gcagcaatgcccgactggctgtcac

SEQ ID NO: 3120577 - DNA, 25 bp, Homo sapien
tatcgccttccacaggcgggtaacg

SEQ ID NO: 3120578 - DNA, 25 bp, Homo sapien
agcagagtggaggtggggtcgaagg

SEQ ID NO: 3120579 - DNA, 25 bp, Homo sapien
ctgtggctagcagagtggaggtggg

SEQ ID NO: 3120580 - DNA, 25 bp, Homo sapien
cagagtggaggtggggtcgaaggcc

SEQ ID NO: 3120581 - DNA, 25 bp, Homo sapien
gagtggaggtggggtcgaaggccat

SEQ ID NO: 3120582 - DNA, 25 bp, Homo sapien
agcctcggaagtggtgtgtcccgta

SEQ ID NO: 3120583 - DNA, 25 bp, Homo sapien
tgcacgacaccgggcgagcctcgga

SEQ ID NO: 3120584 - DNA, 25 bp, Homo sapien
tggtgtgtcccgtagtgccgcacga

SEQ ID NO: 3120585 - DNA, 25 bp, Homo sapien
agtgccgcacgatgtcccagacgcg

SEQ ID NO: 3120586 - DNA, 25 bp, Homo sapien
ggcggacgggacaggatgggtgagc

SEQ ID NO: 3120587 - DNA, 25 bp, Homo sapien
gacgggacaggatgggtgagctgtg

SEQ ID NO: 3120588 - DNA, 25 bp, Homo sapien
gtgggcggacgggacaggatgggtg

SEQ ID NO: 3120589 - DNA, 25 bp, Homo sapien
gcggacgggacaggatgggtgagct

SEQ ID NO: 3120590 - DNA, 25 bp, Homo sapien
ccacacgcggatggcggcatccgtg

SEQ ID NO: 3120591 - DNA, 25 bp, Homo sapien
tccgtggccgaggagaagagcagca

SEQ ID NO: 3120592 - DNA, 25 bp, Homo sapien
catgaccggtcctgcagtgaccaca

SEQ ID NO: 3120593 - DNA, 25 bp, Homo sapien
gcatgaccggtcctgcagtgaccac

SEQ ID NO: 3120594 - DNA, 25 bp, Homo sapien
ggcgctgaaggccagtgaggtgacg

SEQ ID NO: 3120595 - DNA, 25 bp, Homo sapien
gcgctgaaggccagtgaggtgacgg

SEQ ID NO: 3120596 - DNA, 25 bp, Homo sapien
cgctgaaggccagtgaggtgacggc

SEQ ID NO: 3120597 - DNA, 25 bp, Homo sapien
gctgaaggccagtgaggtgacggcg

SEQ ID NO: 3120598 - DNA, 25 bp, Homo sapien
tgaaggtcccagatgatacatatct

SEQ ID NO: 3120599 - DNA, 25 bp, Homo sapien
gcacggtcctcgtggcctggcagct

SEQ ID NO: 3120600 - DNA, 25 bp, Homo sapien
caaacacaggcacggtcctcgtggc

SEQ ID NO: 3120601 - DNA, 25 bp, Homo sapien
caggcacggtcctcgtggcctggca

SEQ ID NO: 3120602 - DNA, 25 bp, Homo sapien
tggagacgaattgggtcacaggctg

SEQ ID NO: 3120603 - DNA, 25 bp, Homo sapien
ctggagacgaattgggtcacaggct

SEQ ID NO: 3120604 - DNA, 25 bp, Homo sapien
tgggtcacaggctgctatcatgccc

SEQ ID NO: 3120605 - DNA, 25 bp, Homo sapien
tggtcgccagctgtcagaaagtaca

SEQ ID NO: 3120606 - DNA, 25 bp, Homo sapien
ggtcgccagctgtcagaaagtacag

SEQ ID NO: 3120607 - DNA, 25 bp, Homo sapien
cttggtcgccagctgtcagaaagta

SEQ ID NO: 3120608 - DNA, 25 bp, Homo sapien
cgccagctgtcagaaagtacagccc

SEQ ID NO: 3120609 - DNA, 25 bp, Homo sapien
gagcgagcctcgtagagcaacaggt

SEQ ID NO: 3120610 - DNA, 25 bp, Homo sapien
ccggcggtgtgtgccagggtgcagt

SEQ ID NO: 3120611 - DNA, 25 bp, Homo sapien
agctgcctcccacacgcgcagagtg

SEQ ID NO: 3120612 - DNA, 25 bp, Homo sapien
tcggcggtggcggtgaggaccacgc

SEQ ID NO: 3120613 - DNA, 25 bp, Homo sapien
ggtggcagggagcaggagatgtgag

SEQ ID NO: 3120614 - DNA, 25 bp, Homo sapien
tgcggggtggcagggagcaggagat

SEQ ID NO: 3120615 - DNA, 25 bp, Homo sapien
gcagggagcaggagatgtgagccag

SEQ ID NO: 3120616 - DNA, 25 bp, Homo sapien
cggggtggcagggagcaggagatgt

SEQ ID NO: 3120617 - DNA, 25 bp, Homo sapien
tcgggcccaagaaaccggacatcca

SEQ ID NO: 3120618 - DNA, 25 bp, Homo sapien
gctattggaggccacgacaacgtgg

SEQ ID NO: 3120619 - DNA, 25 bp, Homo sapien
caacgtgggagtcctcgggcccaag

SEQ ID NO: 3120620 - DNA, 25 bp, Homo sapien
gcagctcaaacacttttaggcaggg

SEQ ID NO: 3120621 - DNA, 25 bp, Homo sapien
tggggaggtataggtcacacagcaa

SEQ ID NO: 3120622 - DNA, 25 bp, Homo sapien
gtcacacagcaagacgggggaaggg

SEQ ID NO: 3120623 - DNA, 25 bp, Homo sapien
cacacagcaagacgggggaagggaa

SEQ ID NO: 3120624 - DNA, 25 bp, Homo sapien
gatgttgtggggaggtataggtcac

SEQ ID NO: 3120625 - DNA, 25 bp, Homo sapien
caccccttccggaacacatccaggg

SEQ ID NO: 3120626 - DNA, 25 bp, Homo sapien
gagccaccccttccggaacacatcc

SEQ ID NO: 3120627 - DNA, 25 bp, Homo sapien
gcaaagagccaccccttccggaaca

SEQ ID NO: 3120628 - DNA, 25 bp, Homo sapien
aagagccaccccttccggaacacat

SEQ ID NO: 3120629 - DNA, 25 bp, Homo sapien
agaggctggtccatgggcctactgc

SEQ ID NO: 3120630 - DNA, 25 bp, Homo sapien
agagaggctggtccatgggcctact

SEQ ID NO: 3120631 - DNA, 25 bp, Homo sapien
aggctggtccatgggcctactgcgt

SEQ ID NO: 3120632 - DNA, 25 bp, Homo sapien
tggtccatgggcctactgcgtggcc

SEQ ID NO: 3120633 - DNA, 25 bp, Homo sapien
gccttgttcattctccagatacgga

SEQ ID NO: 3120634 - DNA, 25 bp, Homo sapien
cattctccagatacggacgctctga

SEQ ID NO: 3120635 - DNA, 25 bp, Homo sapien
tggccagccttgttcattctccaga

SEQ ID NO: 3120636 - DNA, 25 bp, Homo sapien
tgttcattctccagatacggacgct

SEQ ID NO: 3120637 - DNA, 25 bp, Homo sapien
tgtgtgtgaccggaaccctgagcca

SEQ ID NO: 3120638 - DNA, 25 bp, Homo sapien
gagcagcagacggtgcccacactgt

SEQ ID NO: 3120639 - DNA, 25 bp, Homo sapien
tgtgtgaccggaaccctgagccacg

SEQ ID NO: 3120640 - DNA, 25 bp, Homo sapien
cagacggtgcccacactgtgtgtgt

SEQ ID NO: 3120641 - DNA, 25 bp, Homo sapien
gcacctgtaggatcaagccctgtct

SEQ ID NO: 3120642 - DNA, 25 bp, Homo sapien
tgaccccgaggcacctagggactct

SEQ ID NO: 3120643 - DNA, 25 bp, Homo sapien
cctcgtgcagggtcattctctctgc

SEQ ID NO: 3120644 - DNA, 25 bp, Homo sapien
ccagggctacttctgaggactgacc

SEQ ID NO: 3120645 - DNA, 25 bp, Homo sapien
ctgtcaccaggaaggactccttcag

SEQ ID NO: 3120646 - DNA, 25 bp, Homo sapien
tgtcaccaggaaggactccttcagc

SEQ ID NO: 3120647 - DNA, 25 bp, Homo sapien
tctggggctgtgttcttggacagca

SEQ ID NO: 3120648 - DNA, 25 bp, Homo sapien
cttatcatggcagcgctgagtggtc

SEQ ID NO: 3120649 - DNA, 25 bp, Homo sapien
cctgcaggaggatagggccgttgtc

SEQ ID NO: 3120650 - DNA, 25 bp, Homo sapien
tggcagcgctgagtggtctgggcct

SEQ ID NO: 3120651 - DNA, 25 bp, Homo sapien
gagagaactggacgcaccagaggcc

SEQ ID NO: 3120652 - DNA, 25 bp, Homo sapien
cttggccgtgcggtcctgtgagcct

SEQ ID NO: 3120653 - DNA, 25 bp, Homo sapien
acagctgaagtcctggagtgcccag

SEQ ID NO: 3120654 - DNA, 25 bp, Homo sapien
cacgccggtggcctgagaagacacc

SEQ ID NO: 3120655 - DNA, 25 bp, Homo sapien
gggggtagggcatgagatgtcacca

SEQ ID NO: 3120656 - DNA, 25 bp, Homo sapien
ggtagggcatgagatgtcaccaggg

SEQ ID NO: 3120657 - DNA, 25 bp, Homo sapien
gggtagggcatgagatgtcaccagg

SEQ ID NO: 3120658 - DNA, 25 bp, Homo sapien
tggggggtagggcatgagatgtcac

SEQ ID NO: 3120659 - DNA, 25 bp, Homo sapien
tgcgtgccacggctcacaaaggcca

SEQ ID NO: 3120660 - DNA, 25 bp, Homo sapien
cagaagcatcgtgcccctcaaatgt

SEQ ID NO: 3120661 - DNA, 25 bp, Homo sapien
cagctgcgtgccacggctcacaaag

SEQ ID NO: 3120662 - DNA, 25 bp, Homo sapien
acagaagcatcgtgcccctcaaatg

SEQ ID NO: 3120663 - DNA, 25 bp, Homo sapien
gcgtcaggcaggtccccccgccacc

SEQ ID NO: 3120664 - DNA, 25 bp, Homo sapien
cagcgtcaggcaggtccccccgcca

SEQ ID NO: 3120665 - DNA, 25 bp, Homo sapien
gagaggctcagcgtcaggcaggtcc

SEQ ID NO: 3120666 - DNA, 25 bp, Homo sapien
ctcagcgtcaggcaggtccccccgc

SEQ ID NO: 3120667 - DNA, 25 bp, Homo sapien
agcgtccgcacacactcgttgttct

SEQ ID NO: 3120668 - DNA, 25 bp, Homo sapien
actcgggagtcactggccccagtga

SEQ ID NO: 3120669 - DNA, 25 bp, Homo sapien
agtgagggcgtggtcgtccagccgg

SEQ ID NO: 3120670 - DNA, 25 bp, Homo sapien
cacactcgttgttcttgatggtcca

SEQ ID NO: 3120671 - DNA, 25 bp, Homo sapien
cacctgctcctcttgcctggcctgc

SEQ ID NO: 3120672 - DNA, 25 bp, Homo sapien
cctgctcctcttgcctggcctgctc

SEQ ID NO: 3120673 - DNA, 25 bp, Homo sapien
gaccacctgctcctcttgcctggcc

SEQ ID NO: 3120674 - DNA, 25 bp, Homo sapien
tgctcctcttgcctggcctgctcct

SEQ ID NO: 3120675 - DNA, 25 bp, Homo sapien
caggtaccgcttctcatgcagcagg

SEQ ID NO: 3120676 - DNA, 25 bp, Homo sapien
ccgcttctcatgcagcaggttgtcc

SEQ ID NO: 3120677 - DNA, 25 bp, Homo sapien
cgcaggtaccgcttctcatgcagca

SEQ ID NO: 3120678 - DNA, 25 bp, Homo sapien
agcgcccgcaggtaccgcttctcat

SEQ ID NO: 3120679 - DNA, 25 bp, Homo sapien
cgccgcagtcggagcatggtggctt

SEQ ID NO: 3120680 - DNA, 25 bp, Homo sapien
ccgcagtcggagcatggtggcttcc

SEQ ID NO: 3120681 - DNA, 25 bp, Homo sapien
gtcgcgccgcagtcggagcatggtg

SEQ ID NO: 3120682 - DNA, 25 bp, Homo sapien
ctggtcgcgccgcagtcggagcatg

SEQ ID NO: 3120683 - DNA, 25 bp, Homo sapien
aacaggaccctcatcgtcttgccca

SEQ ID NO: 3120684 - DNA, 25 bp, Homo sapien
tgcccagccaatctgccatgactgg

SEQ ID NO: 3120685 - DNA, 25 bp, Homo sapien
tggcccttgcccaccgggccaccca

SEQ ID NO: 3120686 - DNA, 25 bp, Homo sapien
gtcttgcccagccaatctgccatga

SEQ ID NO: 3120687 - DNA, 25 bp, Homo sapien
tcgggggcctctcgcctcaagagca

SEQ ID NO: 3120688 - DNA, 25 bp, Homo sapien
ttccacgtgacgcagaagcgcagca

SEQ ID NO: 3120689 - DNA, 25 bp, Homo sapien
gcagtgccgcgagttggtgttccac

SEQ ID NO: 3120690 - DNA, 25 bp, Homo sapien
tgggcctcgtggcagtgccgcgagt

SEQ ID NO: 3120691 - DNA, 25 bp, Homo sapien
gaagtccaagaaagcggcggcctgg

SEQ ID NO: 3120692 - DNA, 25 bp, Homo sapien
agtccaagaaagcggcggcctggag

SEQ ID NO: 3120693 - DNA, 25 bp, Homo sapien
aagtccaagaaagcggcggcctgga

SEQ ID NO: 3120694 - DNA, 25 bp, Homo sapien
aaagcggcggcctggagggtcctgc

SEQ ID NO: 3120695 - DNA, 25 bp, Homo sapien
agggcagtgcgcctttatgggtttc

SEQ ID NO: 3120696 - DNA, 25 bp, Homo sapien
ctagggcagtgcgcctttatgggtt

SEQ ID NO: 3120697 - DNA, 25 bp, Homo sapien
cagtgcgcctttatgggtttcccag

SEQ ID NO: 3120698 - DNA, 25 bp, Homo sapien
ggcagtgcgcctttatgggtttccc

SEQ ID NO: 3120699 - DNA, 25 bp, Homo sapien
tccagagagacagagccggccagga

SEQ ID NO: 3120700 - DNA, 25 bp, Homo sapien
caccgtctaagcgtgcggagccgcg

SEQ ID NO: 3120701 - DNA, 25 bp, Homo sapien
gagagcggcctttatgggttttcca

SEQ ID NO: 3120702 - DNA, 25 bp, Homo sapien
ccttctggctggctaggtagggtgt

SEQ ID NO: 3120703 - DNA, 25 bp, Homo sapien
gcttggtctccgcacctagaggaag

SEQ ID NO: 3120704 - DNA, 25 bp, Homo sapien
tagggagcagcggtatgcgcctaac

SEQ ID NO: 3120705 - DNA, 25 bp, Homo sapien
gccgtcagcagactcaagcaaggag

SEQ ID NO: 3120706 - DNA, 25 bp, Homo sapien
cactgcggcttgaccgtgtggcaag

SEQ ID NO: 3120707 - DNA, 25 bp, Homo sapien
caagaggctccaagtaagacctggc

SEQ ID NO: 3120708 - DNA, 25 bp, Homo sapien
agttgggacgaattcaggcagctca

SEQ ID NO: 3120709 - DNA, 25 bp, Homo sapien
tctctgtgcgctggtcagacggcag

SEQ ID NO: 3120710 - DNA, 25 bp, Homo sapien
gaaacctattctcggaggctgctgg

SEQ ID NO: 3120711 - DNA, 25 bp, Homo sapien
taggtgcatcccaacacagaactgg

SEQ ID NO: 3120712 - DNA, 25 bp, Homo sapien
cactgagtccttggttctgcacaga

SEQ ID NO: 3120713 - DNA, 25 bp, Homo sapien
caaaggccctttgttgcagccaggg

SEQ ID NO: 3120714 - DNA, 25 bp, Homo sapien
aaaagtggaaaccatgcagggctga

SEQ ID NO: 3120715 - DNA, 25 bp, Homo sapien
tatttgcgcagtgaccgctctgttc

SEQ ID NO: 3120716 - DNA, 25 bp, Homo sapien
tgttccaagcgctgttccaagtgct

SEQ ID NO: 3120717 - DNA, 25 bp, Homo sapien
gattcctgtgcctccttgcgttcat

SEQ ID NO: 3120718 - DNA, 25 bp, Homo sapien
tcataatccagtggtcaagacagga

SEQ ID NO: 3120719 - DNA, 25 bp, Homo sapien
cgggtcagctcggcctccagatgag

SEQ ID NO: 3120720 - DNA, 25 bp, Homo sapien
gtcagctcggcctccagatgagcct

SEQ ID NO: 3120721 - DNA, 25 bp, Homo sapien
gctcggcctccagatgagcctccag

SEQ ID NO: 3120722 - DNA, 25 bp, Homo sapien
ggtcagctcggcctccagatgagcc

SEQ ID NO: 3120723 - DNA, 25 bp, Homo sapien
agaatcggaggtcggcgcctgggct

SEQ ID NO: 3120724 - DNA, 25 bp, Homo sapien
aggtcgtccatcatctcggagcgcg

SEQ ID NO: 3120725 - DNA, 25 bp, Homo sapien
cgtcctcggcgacaggagaatcgga

SEQ ID NO: 3120726 - DNA, 25 bp, Homo sapien
cacgtcttgaagtcgacgcaggccc

SEQ ID NO: 3120727 - DNA, 25 bp, Homo sapien
ggccgaccgagagtgagttcattct

SEQ ID NO: 3120728 - DNA, 25 bp, Homo sapien
agcaggccgaccgagagtgagttca

SEQ ID NO: 3120729 - DNA, 25 bp, Homo sapien
cggaagcaggccgaccgagagtgag

SEQ ID NO: 3120730 - DNA, 25 bp, Homo sapien
caggccgaccgagagtgagttcatt

SEQ ID NO: 3120731 - DNA, 25 bp, Homo sapien
ataaatgtatgaactgggccatgtc

SEQ ID NO: 3120732 - DNA, 25 bp, Homo sapien
gttcctcgcgatccggcgggcagtc

SEQ ID NO: 3120733 - DNA, 25 bp, Homo sapien
acagcccagctgtggcggcccagtt

SEQ ID NO: 3120734 - DNA, 25 bp, Homo sapien
cactcctcacaggggtaaaacttag

SEQ ID NO: 3120735 - DNA, 25 bp, Homo sapien
gacagcttggcaaactccaacgagg

SEQ ID NO: 3120736 - DNA, 25 bp, Homo sapien
cactgctgtgaactacacctgggag

SEQ ID NO: 3120737 - DNA, 25 bp, Homo sapien
tatgctccaaggtacaggcactccc

SEQ ID NO: 3120738 - DNA, 25 bp, Homo sapien
tgtctgctgtcaaggaaggagagct

SEQ ID NO: 3120739 - DNA, 25 bp, Homo sapien
cacttttgagcagtcgaagtcaggc

SEQ ID NO: 3120740 - DNA, 25 bp, Homo sapien
gcgccagcgctcatccacttttgag

SEQ ID NO: 3120741 - DNA, 25 bp, Homo sapien
ccagcttgcggttcacttcattgtg

SEQ ID NO: 3120742 - DNA, 25 bp, Homo sapien
ctgtgtgaagcatgcccgggtgcgg

SEQ ID NO: 3120743 - DNA, 25 bp, Homo sapien
catgcctggctagctgtcccatgag

SEQ ID NO: 3120744 - DNA, 25 bp, Homo sapien
ggctagctgtcccatgagctctggc

SEQ ID NO: 3120745 - DNA, 25 bp, Homo sapien
tgcctggctagctgtcccatgagct

SEQ ID NO: 3120746 - DNA, 25 bp, Homo sapien
cctggctagctgtcccatgagctct

SEQ ID NO: 3120747 - DNA, 25 bp, Homo sapien
ggctgtgatgcactttaatgagtgc

SEQ ID NO: 3120748 - DNA, 25 bp, Homo sapien
gctgtgatgcactttaatgagtgcc

SEQ ID NO: 3120749 - DNA, 25 bp, Homo sapien
ctgtgatgcactttaatgagtgccc

SEQ ID NO: 3120750 - DNA, 25 bp, Homo sapien
tggacaggcatgacacaacgctggc

SEQ ID NO: 3120751 - DNA, 25 bp, Homo sapien
cgacctgagctttccctgtagggac

SEQ ID NO: 3120752 - DNA, 25 bp, Homo sapien
caaactctgatgaagtgagccccac

SEQ ID NO: 3120753 - DNA, 25 bp, Homo sapien
tgagcagagtggagaattgagcccc

SEQ ID NO: 3120754 - DNA, 25 bp, Homo sapien
ttggagacctcgtgccgtctggcct

SEQ ID NO: 3120755 - DNA, 25 bp, Homo sapien
tcttggtggtcactcggtgactgcc

SEQ ID NO: 3120756 - DNA, 25 bp, Homo sapien
ccaatcaacgtccttgctgttcctg

SEQ ID NO: 3120757 - DNA, 25 bp, Homo sapien
aacccgccaagaacttcctgtcagg

SEQ ID NO: 3120758 - DNA, 25 bp, Homo sapien
gatacaggcggtatgttcctaagct

SEQ ID NO: 3120759 - DNA, 25 bp, Homo sapien
catgagttctctggctctcccttta

SEQ ID NO: 3120760 - DNA, 25 bp, Homo sapien
gaaaggctgagactcctggaggata

SEQ ID NO: 3120761 - DNA, 25 bp, Homo sapien
ggagttttatgaccacaggacacac

SEQ ID NO: 3120762 - DNA, 25 bp, Homo sapien
tgatgctaccaacgctgcagccgct

SEQ ID NO: 3120763 - DNA, 25 bp, Homo sapien
ttctgtccgcctgtccgtccggccg

SEQ ID NO: 3120764 - DNA, 25 bp, Homo sapien
gacgcgcgcccctggcgccttctgt

SEQ ID NO: 3120765 - DNA, 25 bp, Homo sapien
atgctgatgctaccaacgctgcagc

SEQ ID NO: 3120766 - DNA, 25 bp, Homo sapien
gcccgcgccgaaggaggcgccctcc

SEQ ID NO: 3120767 - DNA, 25 bp, Homo sapien
gccgcgcaaagctcacggggtccag

SEQ ID NO: 3120768 - DNA, 25 bp, Homo sapien
gacgcgacccggagcagggtctggg

SEQ ID NO: 3120769 - DNA, 25 bp, Homo sapien
gggccgccgcgcaaagctcacgggg

SEQ ID NO: 3120770 - DNA, 25 bp, Homo sapien
tcctgcccctcggagaattccgtcc

SEQ ID NO: 3120771 - DNA, 25 bp, Homo sapien
ctccctgccaaggagacccgagggt

SEQ ID NO: 3120772 - DNA, 25 bp, Homo sapien
ggaggcgcttctcggttcccgtagc

SEQ ID NO: 3120773 - DNA, 25 bp, Homo sapien
tcacgagaacaggaaaaacggagta

SEQ ID NO: 3120774 - DNA, 25 bp, Homo sapien
gcgttcccgttgaacacgcagcgca

SEQ ID NO: 3120775 - DNA, 25 bp, Homo sapien
ctcgttgacgatgggcccgaagacg

SEQ ID NO: 3120776 - DNA, 25 bp, Homo sapien
tcggtgttcacgtagccctcgttga

SEQ ID NO: 3120777 - DNA, 25 bp, Homo sapien
ttgctggaagcgcacatcgagcagc

SEQ ID NO: 3120778 - DNA, 25 bp, Homo sapien
gccggcggtcgcggacgctgctgat

SEQ ID NO: 3120779 - DNA, 25 bp, Homo sapien
agcaacaccgcgcgccggcggtcgc

SEQ ID NO: 3120780 - DNA, 25 bp, Homo sapien
cgcgcgccggcggtcgcggacgctg

SEQ ID NO: 3120781 - DNA, 25 bp, Homo sapien
ccaggtccagcaacaccgcgcgccg

SEQ ID NO: 3120782 - DNA, 25 bp, Homo sapien
agtgcggcgcgtcagggcgacgctc

SEQ ID NO: 3120783 - DNA, 25 bp, Homo sapien
ggctcgccgcgtggcgcgaggtccc

SEQ ID NO: 3120784 - DNA, 25 bp, Homo sapien
ggcgacgctccacgcggtggcccac

SEQ ID NO: 3120785 - DNA, 25 bp, Homo sapien
ctgcgaacagtgcggcgcgtcaggg

SEQ ID NO: 3120786 - DNA, 25 bp, Homo sapien
cccgcctgcgtcgtggccggccctg

SEQ ID NO: 3120787 - DNA, 25 bp, Homo sapien
aagcagaagcccacgaaccacagga

SEQ ID NO: 3120788 - DNA, 25 bp, Homo sapien
ccctggcgccgtgcgctgccactga

SEQ ID NO: 3120789 - DNA, 25 bp, Homo sapien
tggcgccgtgcgctgccactgattg

SEQ ID NO: 3120790 - DNA, 25 bp, Homo sapien
tcgccccggtgctcagctgttcggt

SEQ ID NO: 3120791 - DNA, 25 bp, Homo sapien
ggctctggtaggtctcggtgccctc

SEQ ID NO: 3120792 - DNA, 25 bp, Homo sapien
aagagtgacatgtcggtgcccaggc

SEQ ID NO: 3120793 - DNA, 25 bp, Homo sapien
ctagtaggcgggcacctggtaccct

SEQ ID NO: 3120794 - DNA, 25 bp, Homo sapien
cagtccattccaggctagggacaca

SEQ ID NO: 3120795 - DNA, 25 bp, Homo sapien
cctgatcgtagagggcagctggacc

SEQ ID NO: 3120796 - DNA, 25 bp, Homo sapien
gggcagtgctatccccttctcagga

SEQ ID NO: 3120797 - DNA, 25 bp, Homo sapien
tcttggccccggatggcgcaaagcg

SEQ ID NO: 3120798 - DNA, 25 bp, Homo sapien
ctagcagcctgtgagagaaagtgga

SEQ ID NO: 3120799 - DNA, 25 bp, Homo sapien
agtggctccggacgggacgcaccac

SEQ ID NO: 3120800 - DNA, 25 bp, Homo sapien
gagacagtcactacccacagggaca

SEQ ID NO: 3120801 - DNA, 25 bp, Homo sapien
acagaaacgagacagtcactaccca

SEQ ID NO: 3120802 - DNA, 25 bp, Homo sapien
tgaaacccgaagactggaccatgat

SEQ ID NO: 3120803 - DNA, 25 bp, Homo sapien
tcctggcaaggtcttactgaagggc

SEQ ID NO: 3120804 - DNA, 25 bp, Homo sapien
taaagaaggtgcagtcggaacatgg

SEQ ID NO: 3120805 - DNA, 25 bp, Homo sapien
tcagctatgcagagggactccaacc

SEQ ID NO: 3120806 - DNA, 25 bp, Homo sapien
tgttggcacactcaagcgggagtcc

SEQ ID NO: 3120807 - DNA, 25 bp, Homo sapien
acacggacttctgcaaccgcgagaa

SEQ ID NO: 3120808 - DNA, 25 bp, Homo sapien
agccatcgccaggatcatcacgtag

SEQ ID NO: 3120809 - DNA, 25 bp, Homo sapien
tgagcaccaagtccaagaagaacaa

SEQ ID NO: 3120810 - DNA, 25 bp, Homo sapien
cccggtttgttcatagaaggcttcg

SEQ ID NO: 3120811 - DNA, 25 bp, Homo sapien
taagtagacgtttacatcaaaggag

SEQ ID NO: 3120812 - DNA, 25 bp, Homo sapien
gagcccgttggtttgctgagcttag

SEQ ID NO: 3120813 - DNA, 25 bp, Homo sapien
aaggcttcggctggtgacatctgcc

SEQ ID NO: 3120814 - DNA, 25 bp, Homo sapien
agcccggcgagtgttgacgtgacac

SEQ ID NO: 3120815 - DNA, 25 bp, Homo sapien
tgagatgcaaaccagttgtgccgtg

SEQ ID NO: 3120816 - DNA, 25 bp, Homo sapien
aagacatgaccccttgttcatctga

SEQ ID NO: 3120817 - DNA, 25 bp, Homo sapien
gtttcatctgacaacgccagttcgt

SEQ ID NO: 3120818 - DNA, 25 bp, Homo sapien
tgcgagatggacgtcaccacgtgct

SEQ ID NO: 3120819 - DNA, 25 bp, Homo sapien
agcatccatccaaacacgtcctgtg

SEQ ID NO: 3120820 - DNA, 25 bp, Homo sapien
gtttagatctggacctgccttctgg

SEQ ID NO: 3120821 - DNA, 25 bp, Homo sapien
caggttccgttcgtgccttccagag

SEQ ID NO: 3120822 - DNA, 25 bp, Homo sapien
gacacagcccactatatcctcagaa

SEQ ID NO: 3120823 - DNA, 25 bp, Homo sapien
cacctgactgacacagcccactata

SEQ ID NO: 3120824 - DNA, 25 bp, Homo sapien
actgacacagcccactatatcctca

SEQ ID NO: 3120825 - DNA, 25 bp, Homo sapien
cagacacctgactgacacagcccac

SEQ ID NO: 3120826 - DNA, 25 bp, Homo sapien
cccgcagaagccttagaagcctcat

SEQ ID NO: 3120827 - DNA, 25 bp, Homo sapien
ttttgcctaaaccaacagcctgtgg

SEQ ID NO: 3120828 - DNA, 25 bp, Homo sapien
ttggcaacaccaagccatccgtggg

SEQ ID NO: 3120829 - DNA, 25 bp, Homo sapien
cagcgcctcctctctggtgatggtc

SEQ ID NO: 3120830 - DNA, 25 bp, Homo sapien
cagtggagttgggacgcccaggtac

SEQ ID NO: 3120831 - DNA, 25 bp, Homo sapien
ccacgaaccggctcggctgggtttg

SEQ ID NO: 3120832 - DNA, 25 bp, Homo sapien
aggcccagctataaccgctcggtgg

SEQ ID NO: 3120833 - DNA, 25 bp, Homo sapien
gggacgtgggtacttgagcacctca

SEQ ID NO: 3120834 - DNA, 25 bp, Homo sapien
ctgaacccacgagggcagcaggaga

SEQ ID NO: 3120835 - DNA, 25 bp, Homo sapien
gggactcgccacgtgcttgtaccac

SEQ ID NO: 3120836 - DNA, 25 bp, Homo sapien
ccacagatagggtgagcgacgcagc

SEQ ID NO: 3120837 - DNA, 25 bp, Homo sapien
caggagaggagcctcgcgggctgcg

SEQ ID NO: 3120838 - DNA, 25 bp, Homo sapien
ctggccagctccgctgaagtccagg

SEQ ID NO: 3120839 - DNA, 25 bp, Homo sapien
actccggttccagcgcaggctctgg

SEQ ID NO: 3120840 - DNA, 25 bp, Homo sapien
cgctgaagtccagggactccggttc

SEQ ID NO: 3120841 - DNA, 25 bp, Homo sapien
aagtccagggactccggttccagcg

SEQ ID NO: 3120842 - DNA, 25 bp, Homo sapien
ggcgggagacgtctctccgaagtct

SEQ ID NO: 3120843 - DNA, 25 bp, Homo sapien
tctatgagcggctcctggaagcgcg

SEQ ID NO: 3120844 - DNA, 25 bp, Homo sapien
attttattgaccggacggcaggcgg

SEQ ID NO: 3120845 - DNA, 25 bp, Homo sapien
cctcctgggtcaggcgcggaggcgc

SEQ ID NO: 3120846 - DNA, 25 bp, Homo sapien
aactggtggcattgcatcgtgcgag

SEQ ID NO: 3120847 - DNA, 25 bp, Homo sapien
taccgcccggaacagtagccgcgca

SEQ ID NO: 3120848 - DNA, 25 bp, Homo sapien
tggcttccttccactcgatccagtc

SEQ ID NO: 3120849 - DNA, 25 bp, Homo sapien
acctggccggaactggtggcattgc

SEQ ID NO: 3120850 - DNA, 25 bp, Homo sapien
caaagtgcttggtgtctcgaagaaa

SEQ ID NO: 3120851 - DNA, 25 bp, Homo sapien
ggccgcaaagtgcttggtgtctcga

SEQ ID NO: 3120852 - DNA, 25 bp, Homo sapien
cgcaaagtgcttggtgtctcgaaga

SEQ ID NO: 3120853 - DNA, 25 bp, Homo sapien
aagtgcttggtgtctcgaagaaagg

SEQ ID NO: 3120854 - DNA, 25 bp, Homo sapien
cctggccacactagagtcgagggag

SEQ ID NO: 3120855 - DNA, 25 bp, Homo sapien
cacctgtttgggcttagggggtcat

SEQ ID NO: 3120856 - DNA, 25 bp, Homo sapien
ctggtgctgccacccttggagtctg

SEQ ID NO: 3120857 - DNA, 25 bp, Homo sapien
caggtccacccaaaacctggcaggc

SEQ ID NO: 3120858 - DNA, 25 bp, Homo sapien
ctcgcctctgggcagcctcctgggc

SEQ ID NO: 3120859 - DNA, 25 bp, Homo sapien
ccaagcacagggctcgcctctgggc

SEQ ID NO: 3120860 - DNA, 25 bp, Homo sapien
caagcacagggctcgcctctgggca

SEQ ID NO: 3120861 - DNA, 25 bp, Homo sapien
gcctctgggcagcctcctgggccat

SEQ ID NO: 3120862 - DNA, 25 bp, Homo sapien
agaagcaggcttggcgcagtcctcc

SEQ ID NO: 3120863 - DNA, 25 bp, Homo sapien
ccctctcgtctctccggggccctgg

SEQ ID NO: 3120864 - DNA, 25 bp, Homo sapien
tgagccgtagaagcaggcttggcgc

SEQ ID NO: 3120865 - DNA, 25 bp, Homo sapien
cctctccctctcgtctctccggggc

SEQ ID NO: 3120866 - DNA, 25 bp, Homo sapien
acagccagcccaggcaattccccat

SEQ ID NO: 3120867 - DNA, 25 bp, Homo sapien
ctggttcccaggggtcaggcacagc

SEQ ID NO: 3120868 - DNA, 25 bp, Homo sapien
gcacagccagcccaggcaattcccc

SEQ ID NO: 3120869 - DNA, 25 bp, Homo sapien
ggttcccaggggtcaggcacagcca

SEQ ID NO: 3120870 - DNA, 25 bp, Homo sapien
ccctaggggaccggccacttcacag

SEQ ID NO: 3120871 - DNA, 25 bp, Homo sapien
cctaggggaccggccacttcacaga

SEQ ID NO: 3120872 - DNA, 25 bp, Homo sapien
gcacccggcggtggcttcagcggcg

SEQ ID NO: 3120873 - DNA, 25 bp, Homo sapien
gggcacccggcggtggcttcagcgg

SEQ ID NO: 3120874 - DNA, 25 bp, Homo sapien
ggcggctcctgttcggctcccgtcg

SEQ ID NO: 3120875 - DNA, 25 bp, Homo sapien
gtcgcctcgggatccggctcgggct

SEQ ID NO: 3120876 - DNA, 25 bp, Homo sapien
caccaagcggcacaggcgcggccgc

SEQ ID NO: 3120877 - DNA, 25 bp, Homo sapien
gcgcaccaagcggcacaggcgcggc

SEQ ID NO: 3120878 - DNA, 25 bp, Homo sapien
gccgcagcggctccggcgcggccat

SEQ ID NO: 3120879 - DNA, 25 bp, Homo sapien
accaagcggcacaggcgcggccgca

SEQ ID NO: 3120880 - DNA, 25 bp, Homo sapien
ggatgaactgcccgcggcggccctt

SEQ ID NO: 3120881 - DNA, 25 bp, Homo sapien
ggtggtgcgtctcgccctccacgtt

SEQ ID NO: 3120882 - DNA, 25 bp, Homo sapien
gaaccgggttccacgcgccggatga

SEQ ID NO: 3120883 - DNA, 25 bp, Homo sapien
acgttgacgccgttgacctcgacca

SEQ ID NO: 3120884 - DNA, 25 bp, Homo sapien
ggctccaggcggcccaacaccctcc

SEQ ID NO: 3120885 - DNA, 25 bp, Homo sapien
gcccaacaccctccttcacggcaca

SEQ ID NO: 3120886 - DNA, 25 bp, Homo sapien
tccaggcggcccaacaccctccttc

SEQ ID NO: 3120887 - DNA, 25 bp, Homo sapien
aggcggcccaacaccctccttcacg

SEQ ID NO: 3120888 - DNA, 25 bp, Homo sapien
gtccagctgaaccaacctgctaatc

SEQ ID NO: 3120889 - DNA, 25 bp, Homo sapien
tagacaggttatggattcatcggtg

SEQ ID NO: 3120890 - DNA, 25 bp, Homo sapien
gctaatctctaggttccaggaccag

SEQ ID NO: 3120891 - DNA, 25 bp, Homo sapien
gacaaggcaccaggtaaacaggaga

SEQ ID NO: 3120892 - DNA, 25 bp, Homo sapien
cgcacacccgcggagagaaagcagt

SEQ ID NO: 3120893 - DNA, 25 bp, Homo sapien
ggccagcgcacacccgcggagagaa

SEQ ID NO: 3120894 - DNA, 25 bp, Homo sapien
cacccgcggagagaaagcagtgccc

SEQ ID NO: 3120895 - DNA, 25 bp, Homo sapien
gcacacccgcggagagaaagcagtg

SEQ ID NO: 3120896 - DNA, 25 bp, Homo sapien
ggagaggcaggtgcacctgtggaca

SEQ ID NO: 3120897 - DNA, 25 bp, Homo sapien
tgtgcgtgcaggtgcctgtgaagtg

SEQ ID NO: 3120898 - DNA, 25 bp, Homo sapien
gctgtggcttggtggccgtcggtgt

SEQ ID NO: 3120899 - DNA, 25 bp, Homo sapien
gtggccgtcggtgtgtgcgtgcagg

SEQ ID NO: 3120900 - DNA, 25 bp, Homo sapien
gggcgaatgggcgataggagcgggt

SEQ ID NO: 3120901 - DNA, 25 bp, Homo sapien
cgggcagcacatgggcagtggcacc

SEQ ID NO: 3120902 - DNA, 25 bp, Homo sapien
ataggagcgggtcagtggcccacat

SEQ ID NO: 3120903 - DNA, 25 bp, Homo sapien
tgggcgataggagcgggtcagtggc

SEQ ID NO: 3120904 - DNA, 25 bp, Homo sapien
gtggctgccggtgtgtgcccagtct

SEQ ID NO: 3120905 - DNA, 25 bp, Homo sapien
cccagtctggcttcggctcccaggg

SEQ ID NO: 3120906 - DNA, 25 bp, Homo sapien
ctcctcggtacaggtcagctgccgc

SEQ ID NO: 3120907 - DNA, 25 bp, Homo sapien
accagcagccgagtctgcccctcca

SEQ ID NO: 3120908 - DNA, 25 bp, Homo sapien
aggggcagccagcttcagcagtgac

SEQ ID NO: 3120909 - DNA, 25 bp, Homo sapien
gggcagccagcttcagcagtgacgt

SEQ ID NO: 3120910 - DNA, 25 bp, Homo sapien
agctcctaggggcagccagcttcag

SEQ ID NO: 3120911 - DNA, 25 bp, Homo sapien
tcagctcctaggggcagccagcttc

SEQ ID NO: 3120912 - DNA, 25 bp, Homo sapien
gcagagggctcagggtctgccacca

SEQ ID NO: 3120913 - DNA, 25 bp, Homo sapien
cagagggctcagggtctgccaccac

SEQ ID NO: 3120914 - DNA, 25 bp, Homo sapien
agagggctcagggtctgccaccacc

SEQ ID NO: 3120915 - DNA, 25 bp, Homo sapien
gctaggcttccgtcccaagaaagga

SEQ ID NO: 3120916 - DNA, 25 bp, Homo sapien
acccagctaggcttccgtcccaaga

SEQ ID NO: 3120917 - DNA, 25 bp, Homo sapien
ctgcgaaggctccagcccggcgccc

SEQ ID NO: 3120918 - DNA, 25 bp, Homo sapien
gacgtgggggctgagtcactctggg

SEQ ID NO: 3120919 - DNA, 25 bp, Homo sapien
gacagcggcacagtgacagcaagtg

SEQ ID NO: 3120920 - DNA, 25 bp, Homo sapien
cagcggcacagtgacagcaagtggc

SEQ ID NO: 3120921 - DNA, 25 bp, Homo sapien
ggtggcctgaactctctggccgacc

SEQ ID NO: 3120922 - DNA, 25 bp, Homo sapien
caggcgtccggccggggtggcctga

SEQ ID NO: 3120923 - DNA, 25 bp, Homo sapien
aggtggcgtggcactcccggagcgt

SEQ ID NO: 3120924 - DNA, 25 bp, Homo sapien
gtggcgtggcactcccggagcgtgc

SEQ ID NO: 3120925 - DNA, 25 bp, Homo sapien
gcgtggcactcccggagcgtgccat

SEQ ID NO: 3120926 - DNA, 25 bp, Homo sapien
caggtggcgtggcactcccggagcg

SEQ ID NO: 3120927 - DNA, 25 bp, Homo sapien
agcccacacatgcggccagccccac

SEQ ID NO: 3120928 - DNA, 25 bp, Homo sapien
ctcagggatgcagtcacagcacggc

SEQ ID NO: 3120929 - DNA, 25 bp, Homo sapien
aaagtgcccctcagggatgcagtca

SEQ ID NO: 3120930 - DNA, 25 bp, Homo sapien
gtcacagcacggcccccaggctggc

SEQ ID NO: 3120931 - DNA, 25 bp, Homo sapien
gcccctcagggatgcagtcacagca

SEQ ID NO: 3120932 - DNA, 25 bp, Homo sapien
cagggggtgggccagggtgcggcgg

SEQ ID NO: 3120933 - DNA, 25 bp, Homo sapien
ttaaacatggcggtggccggagcag

SEQ ID NO: 3120934 - DNA, 25 bp, Homo sapien
cgccaagcttgagggcgtgcgcagg

SEQ ID NO: 3120935 - DNA, 25 bp, Homo sapien
cggcggtggccagcggctgcccgtg

SEQ ID NO: 3120936 - DNA, 25 bp, Homo sapien
caggcgctcctaggccagcagtttt

SEQ ID NO: 3120937 - DNA, 25 bp, Homo sapien
ggcccaacggacagggtcagtctct

SEQ ID NO: 3120938 - DNA, 25 bp, Homo sapien
ccaggctgcctgtgacagagcttta

SEQ ID NO: 3120939 - DNA, 25 bp, Homo sapien
tgggatgaactgtcgccgttggcct

SEQ ID NO: 3120940 - DNA, 25 bp, Homo sapien
ggtccctttcgcaggtggcagagcc

SEQ ID NO: 3120941 - DNA, 25 bp, Homo sapien
cccgggtccacagagcggatgtact

SEQ ID NO: 3120942 - DNA, 25 bp, Homo sapien
gccgggccgggacttgtcactatgc

SEQ ID NO: 3120943 - DNA, 25 bp, Homo sapien
gcaggttgaacccatagccctgagg

SEQ ID NO: 3120944 - DNA, 25 bp, Homo sapien
tcagcatggcgcagtccctccacat

SEQ ID NO: 3120945 - DNA, 25 bp, Homo sapien
acgtgctcctcggtgggtgtgaccc

SEQ ID NO: 3120946 - DNA, 25 bp, Homo sapien
aagtgttcatctgtctcggggtcca

SEQ ID NO: 3120947 - DNA, 25 bp, Homo sapien
tcgtcctcccgtgccttgatgctgg

SEQ ID NO: 3120948 - DNA, 25 bp, Homo sapien
agggctggttccattggtgacgggt

SEQ ID NO: 3120949 - DNA, 25 bp, Homo sapien
tggttccattggtgacgggtgacgg

SEQ ID NO: 3120950 - DNA, 25 bp, Homo sapien
ggctggttccattggtgacgggtga

SEQ ID NO: 3120951 - DNA, 25 bp, Homo sapien
gctggttccattggtgacgggtgac

SEQ ID NO: 3120952 - DNA, 25 bp, Homo sapien
gcagagactggagggcaactcctta

SEQ ID NO: 3120953 - DNA, 25 bp, Homo sapien
tcatggtgcagagggggttcaggtg

SEQ ID NO: 3120954 - DNA, 25 bp, Homo sapien
tcaggtgcaggaatggccggcgtga

SEQ ID NO: 3120955 - DNA, 25 bp, Homo sapien
tctggtggactccagatgcggcggg

SEQ ID NO: 3120956 - DNA, 25 bp, Homo sapien
gtgtccttgtcggaaccaggcaggt

SEQ ID NO: 3120957 - DNA, 25 bp, Homo sapien
tgtccttgtcggaaccaggcaggtc

SEQ ID NO: 3120958 - DNA, 25 bp, Homo sapien
ccaggcaggtcacttcgggacgagc

SEQ ID NO: 3120959 - DNA, 25 bp, Homo sapien
acttcgggacgagcacgcagagcca

SEQ ID NO: 3120960 - DNA, 25 bp, Homo sapien
aggcctctagcaaccccacgtgtga

SEQ ID NO: 3120961 - DNA, 25 bp, Homo sapien
caaggcctctagcaaccccacgtgt

SEQ ID NO: 3120962 - DNA, 25 bp, Homo sapien
aaggcctctagcaaccccacgtgtg

SEQ ID NO: 3120963 - DNA, 25 bp, Homo sapien
gaggacttcctgaacagagacccca

SEQ ID NO: 3120964 - DNA, 25 bp, Homo sapien
agagaccccactgcccgggctgaca

SEQ ID NO: 3120965 - DNA, 25 bp, Homo sapien
ggctgacatctccacagacgcctac

SEQ ID NO: 3120966 - DNA, 25 bp, Homo sapien
ctgcccgggctgacatctccacaga

SEQ ID NO: 3120967 - DNA, 25 bp, Homo sapien
ctggagtgagccctagtcccacacc

SEQ ID NO: 3120968 - DNA, 25 bp, Homo sapien
tgtctggagtgagccctagtcccac

SEQ ID NO: 3120969 - DNA, 25 bp, Homo sapien
tctggagtgagccctagtcccacac

SEQ ID NO: 3120970 - DNA, 25 bp, Homo sapien
gtctggagtgagccctagtcccaca

SEQ ID NO: 3120971 - DNA, 25 bp, Homo sapien
ggatcttgcttccaggcactgccat

SEQ ID NO: 3120972 - DNA, 25 bp, Homo sapien
gatcttgcttccaggcactgccatc

SEQ ID NO: 3120973 - DNA, 25 bp, Homo sapien
gaagggatcttgcttccaggcactg

SEQ ID NO: 3120974 - DNA, 25 bp, Homo sapien
ctggaagggatcttgcttccaggca

SEQ ID NO: 3120975 - DNA, 25 bp, Homo sapien
tgactcgcatggctcgagccttctc

SEQ ID NO: 3120976 - DNA, 25 bp, Homo sapien
tgtggcgcgcgcttgttgactcgca

SEQ ID NO: 3120977 - DNA, 25 bp, Homo sapien
tgctgaagatttcacgcttcctgtt

SEQ ID NO: 3120978 - DNA, 25 bp, Homo sapien
tccagtccatctgtggcgcgcgctt

SEQ ID NO: 3120979 - DNA, 25 bp, Homo sapien
caattatttagagcgcgtcccaagg

SEQ ID NO: 3120980 - DNA, 25 bp, Homo sapien
aacacaaattcctttcagtcagcag

SEQ ID NO: 3120981 - DNA, 25 bp, Homo sapien
gggtctctggtattaagtggaaaca

SEQ ID NO: 3120982 - DNA, 25 bp, Homo sapien
tcccagggtcccgagacaggcagga

SEQ ID NO: 3120983 - DNA, 25 bp, Homo sapien
ggcgccccaacttggccactgggaa

SEQ ID NO: 3120984 - DNA, 25 bp, Homo sapien
gtttatcctgagagcgcgcatgcgc

SEQ ID NO: 3120985 - DNA, 25 bp, Homo sapien
tgcaaagtcaacagggtgtccacgg

SEQ ID NO: 3120986 - DNA, 25 bp, Homo sapien
catgcgctatggcttacgaggcaac

SEQ ID NO: 3120987 - DNA, 25 bp, Homo sapien
actctgtccgggactctccactcca

SEQ ID NO: 3120988 - DNA, 25 bp, Homo sapien
cactctgtccgggactctccactcc

SEQ ID NO: 3120989 - DNA, 25 bp, Homo sapien
agccgcgaacggttcccacgtgcgg

SEQ ID NO: 3120990 - DNA, 25 bp, Homo sapien
cgccttgagcgcgaggatgctgacc

SEQ ID NO: 3120991 - DNA, 25 bp, Homo sapien
agcccgggcctctccggagaagaga

SEQ ID NO: 3120992 - DNA, 25 bp, Homo sapien
tttcccaaagattgcggtccgcagg

SEQ ID NO: 3120993 - DNA, 25 bp, Homo sapien
ccctctggcggaaaggccggcgatc

SEQ ID NO: 3120994 - DNA, 25 bp, Homo sapien
ccgccgggatgtgtagtccgcagga

SEQ ID NO: 3120995 - DNA, 25 bp, Homo sapien
ttgtagttctgtgccgccctctggc

SEQ ID NO: 3120996 - DNA, 25 bp, Homo sapien
ggcgatccttgcatcacgtgacggg

SEQ ID NO: 3120997 - DNA, 25 bp, Homo sapien
gacgccgccggaagcgcgacccgca

SEQ ID NO: 3120998 - DNA, 25 bp, Homo sapien
acgccgccggaagcgcgacccgcac

SEQ ID NO: 3120999 - DNA, 25 bp, Homo sapien
ggacgccgccggaagcgcgacccgc

SEQ ID NO: 3121000 - DNA, 25 bp, Homo sapien
ccgccccgacgcggagaaaggcgca

SEQ ID NO: 3121001 - DNA, 25 bp, Homo sapien
cgccccgacgcggagaaaggcgcac

SEQ ID NO: 3121002 - DNA, 25 bp, Homo sapien
gccgccccgacgcggagaaaggcgc

SEQ ID NO: 3121003 - DNA, 25 bp, Homo sapien
gtggaccaggacgcaccagaaaacc

SEQ ID NO: 3121004 - DNA, 25 bp, Homo sapien
ggtggaccaggacgcaccagaaaac

SEQ ID NO: 3121005 - DNA, 25 bp, Homo sapien
tggaccaggacgcaccagaaaaccc

SEQ ID NO: 3121006 - DNA, 25 bp, Homo sapien
taaactccgtctgtttaccctctgc

SEQ ID NO: 3121007 - DNA, 25 bp, Homo sapien
tgatgataaactccgtctgtttacc

SEQ ID NO: 3121008 - DNA, 25 bp, Homo sapien
ctgggatttggcctcggtgttccca

SEQ ID NO: 3121009 - DNA, 25 bp, Homo sapien
ggtgttcccagtcccaacagaatct

SEQ ID NO: 3121010 - DNA, 25 bp, Homo sapien
atttcttggtttttgcgacttcaca

SEQ ID NO: 3121011 - DNA, 25 bp, Homo sapien
gtttttgcgacttcacaaatctgcc

SEQ ID NO: 3121012 - DNA, 25 bp, Homo sapien
tctgccctatcatccggatgcgatt

SEQ ID NO: 3121013 - DNA, 25 bp, Homo sapien
tgcgattgttgaggccacattccat

SEQ ID NO: 3121014 - DNA, 25 bp, Homo sapien
tccggctgcaacagatccgcgaccg

SEQ ID NO: 3121015 - DNA, 25 bp, Homo sapien
agcaccgcgtgccgggcctccagcg

SEQ ID NO: 3121016 - DNA, 25 bp, Homo sapien
agatccgcgaccgccttccagagtg

SEQ ID NO: 3121017 - DNA, 25 bp, Homo sapien
tgcccctgcacgatggccttcagca

SEQ ID NO: 3121018 - DNA, 25 bp, Homo sapien
ccatcccagcgtcgccctgggcctt

SEQ ID NO: 3121019 - DNA, 25 bp, Homo sapien
aggagtccaaacacggcccagcagg

SEQ ID NO: 3121020 - DNA, 25 bp, Homo sapien
agtgggcagcctgacgtcacccatc

SEQ ID NO: 3121021 - DNA, 25 bp, Homo sapien
gtcacccatcccagcgtcgccctgg

SEQ ID NO: 3121022 - DNA, 25 bp, Homo sapien
gccaagaagtccctgaagtgcaggg

SEQ ID NO: 3121023 - DNA, 25 bp, Homo sapien
agcagagcctgccagcgtcgcccac

SEQ ID NO: 3121024 - DNA, 25 bp, Homo sapien
aagtgcaggggcacccggactccag

SEQ ID NO: 3121025 - DNA, 25 bp, Homo sapien
gcctgccagcgtcgcccacacggct

SEQ ID NO: 3121026 - DNA, 25 bp, Homo sapien
tgaaaacctccagcctttcgtgaag

SEQ ID NO: 3121027 - DNA, 25 bp, Homo sapien
tccagcctttcgtgaaggtcttcgt

SEQ ID NO: 3121028 - DNA, 25 bp, Homo sapien
ctttcgtgaaggtcttcgttggaag

SEQ ID NO: 3121029 - DNA, 25 bp, Homo sapien
tcttcctccaagtaggtgatgtgtc

SEQ ID NO: 3121030 - DNA, 25 bp, Homo sapien
tacgctccggttgagaccaagtcag

SEQ ID NO: 3121031 - DNA, 25 bp, Homo sapien
catgaagcagggtgggcatacccgc

SEQ ID NO: 3121032 - DNA, 25 bp, Homo sapien
gaacagcaaagccagagtcagaccg

SEQ ID NO: 3121033 - DNA, 25 bp, Homo sapien
tacacttgatcgtcaaggccagaga

SEQ ID NO: 3121034 - DNA, 25 bp, Homo sapien
tgaaccatccttgcgatgtactcgt

SEQ ID NO: 3121035 - DNA, 25 bp, Homo sapien
caccagaaggaattccgaggacaag

SEQ ID NO: 3121036 - DNA, 25 bp, Homo sapien
gaggacaagccaacatccatccact

SEQ ID NO: 3121037 - DNA, 25 bp, Homo sapien
tactcgtcgaggtaacagctattga

SEQ ID NO: 3121038 - DNA, 25 bp, Homo sapien
acttaggaccattatcagaacagga

SEQ ID NO: 3121039 - DNA, 25 bp, Homo sapien
cactgcggagctgaacttaggacca

SEQ ID NO: 3121040 - DNA, 25 bp, Homo sapien
cagaacaggatctcaattcttttct

SEQ ID NO: 3121041 - DNA, 25 bp, Homo sapien
ggtttcaactttattcactgcggag

SEQ ID NO: 3121042 - DNA, 25 bp, Homo sapien
tctatgtccacagaggacgcggtcc

SEQ ID NO: 3121043 - DNA, 25 bp, Homo sapien
ctctatgtccacagaggacgcggtc

SEQ ID NO: 3121044 - DNA, 25 bp, Homo sapien
gacgcggtccggacgcacagcagac

SEQ ID NO: 3121045 - DNA, 25 bp, Homo sapien
tccggacgcacagcagacagatcat

SEQ ID NO: 3121046 - DNA, 25 bp, Homo sapien
ggcagttgtagcagaccacggcgtc

SEQ ID NO: 3121047 - DNA, 25 bp, Homo sapien
cgacagagggtaacgatgaacagcg

SEQ ID NO: 3121048 - DNA, 25 bp, Homo sapien
ttgtagcagaccacggcgtccagca

SEQ ID NO: 3121049 - DNA, 25 bp, Homo sapien
agctccttgacgttgatggtgcgac

SEQ ID NO: 3121050 - DNA, 25 bp, Homo sapien
gggtgccaaggaggttccgcatcag

SEQ ID NO: 3121051 - DNA, 25 bp, Homo sapien
gtgggtgccaaggaggttccgcatc

SEQ ID NO: 3121052 - DNA, 25 bp, Homo sapien
tgggtgccaaggaggttccgcatca

SEQ ID NO: 3121053 - DNA, 25 bp, Homo sapien
cagcaggggcgcgtcctccatgtag

SEQ ID NO: 3121054 - DNA, 25 bp, Homo sapien
agagccatgcccacaaaaaacacgg

SEQ ID NO: 3121055 - DNA, 25 bp, Homo sapien
acggctcctctcagcaggggcgcgt

SEQ ID NO: 3121056 - DNA, 25 bp, Homo sapien
agaatagagccggtgggctccccag

SEQ ID NO: 3121057 - DNA, 25 bp, Homo sapien
atggcaacacagatgtcggcgagtt

SEQ ID NO: 3121058 - DNA, 25 bp, Homo sapien
gatggcaacacagatgtcggcgagt

SEQ ID NO: 3121059 - DNA, 25 bp, Homo sapien
tggcaacacagatgtcggcgagttc

SEQ ID NO: 3121060 - DNA, 25 bp, Homo sapien
ccctgagttcggctgcaagctgtgc

SEQ ID NO: 3121061 - DNA, 25 bp, Homo sapien
ttcggctgcaagctgtgcacaaaga

SEQ ID NO: 3121062 - DNA, 25 bp, Homo sapien
agctgtgcacaaagacaacatcccc

SEQ ID NO: 3121063 - DNA, 25 bp, Homo sapien
tgcaagctgtgcacaaagacaacat

SEQ ID NO: 3121064 - DNA, 25 bp, Homo sapien
agccgttcgatgatgttcagcagaa

SEQ ID NO: 3121065 - DNA, 25 bp, Homo sapien
ttcgatgatgttcagcagaatgtcc

SEQ ID NO: 3121066 - DNA, 25 bp, Homo sapien
taggacaccacctcgttcggacatg

SEQ ID NO: 3121067 - DNA, 25 bp, Homo sapien
tctcataggacaccacctcgttcgg

SEQ ID NO: 3121068 - DNA, 25 bp, Homo sapien
tgcagtaccaggcacgatgacacag

SEQ ID NO: 3121069 - DNA, 25 bp, Homo sapien
gctacacacccaccgcatggagacg

SEQ ID NO: 3121070 - DNA, 25 bp, Homo sapien
tctcaggccgctctgggccgcatgg

SEQ ID NO: 3121071 - DNA, 25 bp, Homo sapien
atggagacgccctcagccctctcag

SEQ ID NO: 3121072 - DNA, 25 bp, Homo sapien
aaagtatctctcctgagacccgtgg

SEQ ID NO: 3121073 - DNA, 25 bp, Homo sapien
tctctccaccagttcaaagtatctc

SEQ ID NO: 3121074 - DNA, 25 bp, Homo sapien
gtggaactcgttctggtcacacagc

SEQ ID NO: 3121075 - DNA, 25 bp, Homo sapien
tcaacaggtcatggacgatggtcct

SEQ ID NO: 3121076 - DNA, 25 bp, Homo sapien
aaagcaggcgcccacctggcccttg

SEQ ID NO: 3121077 - DNA, 25 bp, Homo sapien
ttaccaaacacgtgctgtgcctgcc

SEQ ID NO: 3121078 - DNA, 25 bp, Homo sapien
ggatggaagcttgctccacacaggt

SEQ ID NO: 3121079 - DNA, 25 bp, Homo sapien
aaactgatgggtgggctagccccga

SEQ ID NO: 3121080 - DNA, 25 bp, Homo sapien
ccagccgtccttggccgggtggatg

SEQ ID NO: 3121081 - DNA, 25 bp, Homo sapien
tgaagaatctctccatcagcgcctg

SEQ ID NO: 3121082 - DNA, 25 bp, Homo sapien
ccgggtggatggactgcgctctata

SEQ ID NO: 3121083 - DNA, 25 bp, Homo sapien
tctataggagatcaggttcaggagg

SEQ ID NO: 3121084 - DNA, 25 bp, Homo sapien
gaaagcaagctagcacctgctcacc

SEQ ID NO: 3121085 - DNA, 25 bp, Homo sapien
agcccagtggcgtcatgagaggacc

SEQ ID NO: 3121086 - DNA, 25 bp, Homo sapien
tggcgtcatgagaggacctgtcctg

SEQ ID NO: 3121087 - DNA, 25 bp, Homo sapien
gctcatcgggcatcctgagacccag

SEQ ID NO: 3121088 - DNA, 25 bp, Homo sapien
cagcacaaaggacagcacgtccagc

SEQ ID NO: 3121089 - DNA, 25 bp, Homo sapien
gttgatgagcagcacaaaggacagc

SEQ ID NO: 3121090 - DNA, 25 bp, Homo sapien
tgcctgttgatgagcagcacaaagg

SEQ ID NO: 3121091 - DNA, 25 bp, Homo sapien
cagcaccttgatgcgcacggcgcct

SEQ ID NO: 3121092 - DNA, 25 bp, Homo sapien
cagcaaagggcaattcaaggacagt

SEQ ID NO: 3121093 - DNA, 25 bp, Homo sapien
aggacaagaccagccctgatgggag

SEQ ID NO: 3121094 - DNA, 25 bp, Homo sapien
cacagggtgaacgtcaggactgaaa

SEQ ID NO: 3121095 - DNA, 25 bp, Homo sapien
caagactggctgaaacgaactcaca

SEQ ID NO: 3121096 - DNA, 25 bp, Homo sapien
tgtggcagccctctgccaggtccac

SEQ ID NO: 3121097 - DNA, 25 bp, Homo sapien
ggtccaccagcaactgggtggccag

SEQ ID NO: 3121098 - DNA, 25 bp, Homo sapien
cagctttcggacctggtggtcttta

SEQ ID NO: 3121099 - DNA, 25 bp, Homo sapien
gagagctgcgagatgaccactgagt

SEQ ID NO: 3121100 - DNA, 25 bp, Homo sapien
cccgagtgactgtgcagaaaccaaa

SEQ ID NO: 3121101 - DNA, 25 bp, Homo sapien
agcaaagatgccctttatacccgag

SEQ ID NO: 3121102 - DNA, 25 bp, Homo sapien
ccagctgtcccagagtgtgacagga

SEQ ID NO: 3121103 - DNA, 25 bp, Homo sapien
gacaggacacccatgtccaggactt

SEQ ID NO: 3121104 - DNA, 25 bp, Homo sapien
tccaaggaggccgagtatgcggcca

SEQ ID NO: 3121105 - DNA, 25 bp, Homo sapien
caaggaggccgagtatgcggccaca

SEQ ID NO: 3121106 - DNA, 25 bp, Homo sapien
gaggccgagtatgcggccacatccc

SEQ ID NO: 3121107 - DNA, 25 bp, Homo sapien
aggaggccgagtatgcggccacatc

SEQ ID NO: 3121108 - DNA, 25 bp, Homo sapien
tgcaaggcggacacaggccaaatgt

SEQ ID NO: 3121109 - DNA, 25 bp, Homo sapien
gacacatggcgctgggtggaacaat

SEQ ID NO: 3121110 - DNA, 25 bp, Homo sapien
gctgggtggaacaatccagtcagca

SEQ ID NO: 3121111 - DNA, 25 bp, Homo sapien
tccaccaatggaggaacggacagac

SEQ ID NO: 3121112 - DNA, 25 bp, Homo sapien
catgcctagcatcttaacagcattt

SEQ ID NO: 3121113 - DNA, 25 bp, Homo sapien
caccatgcctagcatcttaacagca

SEQ ID NO: 3121114 - DNA, 25 bp, Homo sapien
gtcaccatgcctagcatcttaacag

SEQ ID NO: 3121115 - DNA, 25 bp, Homo sapien
gcctagcatcttaacagcatttgct

SEQ ID NO: 3121116 - DNA, 25 bp, Homo sapien
tcccaggttcaagtgattctcctac

SEQ ID NO: 3121117 - DNA, 25 bp, Homo sapien
caacctccacctcccaggttcaagt

SEQ ID NO: 3121118 - DNA, 25 bp, Homo sapien
acctcccaggttcaagtgattctcc

SEQ ID NO: 3121119 - DNA, 25 bp, Homo sapien
gccatggcacgatctcaggtcactg

SEQ ID NO: 3121120 - DNA, 25 bp, Homo sapien
ggcgtggcttgcaggcagggtgtac

SEQ ID NO: 3121121 - DNA, 25 bp, Homo sapien
agccggatgctgctcgcgattggca

SEQ ID NO: 3121122 - DNA, 25 bp, Homo sapien
cagcatctcatacacacgcgtggcg

SEQ ID NO: 3121123 - DNA, 25 bp, Homo sapien
cttgtagtggagctgaatgtggctg

SEQ ID NO: 3121124 - DNA, 25 bp, Homo sapien
gggcccccaggaactggctgcgcaa

SEQ ID NO: 3121125 - DNA, 25 bp, Homo sapien
cccaggaactggctgcgcaacccca

SEQ ID NO: 3121126 - DNA, 25 bp, Homo sapien
caggaactggctgcgcaaccccagc

SEQ ID NO: 3121127 - DNA, 25 bp, Homo sapien
cccccaggaactggctgcgcaaccc

SEQ ID NO: 3121128 - DNA, 25 bp, Homo sapien
gcttagagcgacaagccacagatgt

SEQ ID NO: 3121129 - DNA, 25 bp, Homo sapien
cggaagtcgccgtgcgtccttttct

SEQ ID NO: 3121130 - DNA, 25 bp, Homo sapien
caacccatgtcaccgtgcggcttag

SEQ ID NO: 3121131 - DNA, 25 bp, Homo sapien
agggccatgcactgccccggaagtc

SEQ ID NO: 3121132 - DNA, 25 bp, Homo sapien
ggtgcagtgagtcggcccgcagcag

SEQ ID NO: 3121133 - DNA, 25 bp, Homo sapien
accgcacgactccatccttgttggg

SEQ ID NO: 3121134 - DNA, 25 bp, Homo sapien
tgtagtcgcagacgcagtaggggct

SEQ ID NO: 3121135 - DNA, 25 bp, Homo sapien
gtaggggctgaaccgcacgactcca

SEQ ID NO: 3121136 - DNA, 25 bp, Homo sapien
acgccctgagcctcatgggccgtgg

SEQ ID NO: 3121137 - DNA, 25 bp, Homo sapien
tgggccgtgggcgaggtcccgcgta

SEQ ID NO: 3121138 - DNA, 25 bp, Homo sapien
tctgacgccctgagcctcatgggcc

SEQ ID NO: 3121139 - DNA, 25 bp, Homo sapien
gcctcatgggccgtgggcgaggtcc

SEQ ID NO: 3121140 - DNA, 25 bp, Homo sapien
gggccgctggtcttcttctcagagc

SEQ ID NO: 3121141 - DNA, 25 bp, Homo sapien
aggacgcggaagagcagggagtagg

SEQ ID NO: 3121142 - DNA, 25 bp, Homo sapien
gcttcaagcactgcagcaggacgcg

SEQ ID NO: 3121143 - DNA, 25 bp, Homo sapien
gagtagggcacggaccccagccgca

SEQ ID NO: 3121144 - DNA, 25 bp, Homo sapien
gatgagcactttatagcgcagggac

SEQ ID NO: 3121145 - DNA, 25 bp, Homo sapien
cactttatagcgcagggactcaggc

SEQ ID NO: 3121146 - DNA, 25 bp, Homo sapien
tgagcactttatagcgcagggactc

SEQ ID NO: 3121147 - DNA, 25 bp, Homo sapien
gagcactttatagcgcagggactca

SEQ ID NO: 3121148 - DNA, 25 bp, Homo sapien
aggtgaacggcacgggagccccact

SEQ ID NO: 3121149 - DNA, 25 bp, Homo sapien
gaatgtgaggtgaacggcacgggag

SEQ ID NO: 3121150 - DNA, 25 bp, Homo sapien
ccctttcggagtggtgggagtgcct

SEQ ID NO: 3121151 - DNA, 25 bp, Homo sapien
cctccctttcggagtggtgggagtg

SEQ ID NO: 3121152 - DNA, 25 bp, Homo sapien
aggcatgaaacctctccccagcggc

SEQ ID NO: 3121153 - DNA, 25 bp, Homo sapien
cagcggccaggtcacggggtagcca

SEQ ID NO: 3121154 - DNA, 25 bp, Homo sapien
ctgatgaccaaatccaggcatgaaa

SEQ ID NO: 3121155 - DNA, 25 bp, Homo sapien
accaaatccaggcatgaaacctctc

SEQ ID NO: 3121156 - DNA, 25 bp, Homo sapien
ggtaagagattaatgctgtcagcac

SEQ ID NO: 3121157 - DNA, 25 bp, Homo sapien
cctcggagccgctccagtgtctttg

SEQ ID NO: 3121158 - DNA, 25 bp, Homo sapien
ttgtccaggtagttatggtaagaga

SEQ ID NO: 3121159 - DNA, 25 bp, Homo sapien
ccacggccaggtgcaagtcagttct

SEQ ID NO: 3121160 - DNA, 25 bp, Homo sapien
gcaacgctctacagagagcagagat

SEQ ID NO: 3121161 - DNA, 25 bp, Homo sapien
cagatcgcaggtgaagggacagttt

SEQ ID NO: 3121162 - DNA, 25 bp, Homo sapien
caggaacaagccaggcaacgctcta

SEQ ID NO: 3121163 - DNA, 25 bp, Homo sapien
gaagggacagtttccggcacctgat

SEQ ID NO: 3121164 - DNA, 25 bp, Homo sapien
agggccatgtcaaagagaggtgtgg

SEQ ID NO: 3121165 - DNA, 25 bp, Homo sapien
tcccggagggccatgtcaaagagag

SEQ ID NO: 3121166 - DNA, 25 bp, Homo sapien
tcgtcccggagggccatgtcaaaga

SEQ ID NO: 3121167 - DNA, 25 bp, Homo sapien
gagggccatgtcaaagagaggtgtg

SEQ ID NO: 3121168 - DNA, 25 bp, Homo sapien
tttgaggcaagacccatgaggaccc

SEQ ID NO: 3121169 - DNA, 25 bp, Homo sapien
gccagtaaggcctcagaacctgcag

SEQ ID NO: 3121170 - DNA, 25 bp, Homo sapien
cctgagggatgggaacccaacaaca

SEQ ID NO: 3121171 - DNA, 25 bp, Homo sapien
tctcctggcgggcatggccctgagc

SEQ ID NO: 3121172 - DNA, 25 bp, Homo sapien
cagtgctgcctgaagtggccaagcc

SEQ ID NO: 3121173 - DNA, 25 bp, Homo sapien
gacagcagaagatgagcggagctca

SEQ ID NO: 3121174 - DNA, 25 bp, Homo sapien
gactgctccggtcagttgcattccg

SEQ ID NO: 3121175 - DNA, 25 bp, Homo sapien
aggccaacagaacccagacatgctg

SEQ ID NO: 3121176 - DNA, 25 bp, Homo sapien
accgggagaacagccgaggcttagc

SEQ ID NO: 3121177 - DNA, 25 bp, Homo sapien
aggccccacccgcttgcagcagagg

SEQ ID NO: 3121178 - DNA, 25 bp, Homo sapien
aacctcgagtgctccaccgggagaa

SEQ ID NO: 3121179 - DNA, 25 bp, Homo sapien
tagcaagtccctgaatgcctgtggg

SEQ ID NO: 3121180 - DNA, 25 bp, Homo sapien
gatgtgcgtgagcttcaccaccaga

SEQ ID NO: 3121181 - DNA, 25 bp, Homo sapien
gaactccagcagtgggacggccatg

SEQ ID NO: 3121182 - DNA, 25 bp, Homo sapien
gatggacaaggccacgacgcactgg

SEQ ID NO: 3121183 - DNA, 25 bp, Homo sapien
accaccagaacaggcagcgccttga

SEQ ID NO: 3121184 - DNA, 25 bp, Homo sapien
gtgcatgcgcaggcagggcggggac

SEQ ID NO: 3121185 - DNA, 25 bp, Homo sapien
ctctcgggtgcatgcgcaggcaggg

SEQ ID NO: 3121186 - DNA, 25 bp, Homo sapien
atgcgcaggcagggcggggactcac

SEQ ID NO: 3121187 - DNA, 25 bp, Homo sapien
gcatgcgcaggcagggcggggactc

SEQ ID NO: 3121188 - DNA, 25 bp, Homo sapien
tggccaggcttctacacttctaaag

SEQ ID NO: 3121189 - DNA, 25 bp, Homo sapien
tcttcaaggaggagcgttcacatgg

SEQ ID NO: 3121190 - DNA, 25 bp, Homo sapien
tcaacaaaacagaaagaccgacagg

SEQ ID NO: 3121191 - DNA, 25 bp, Homo sapien
caggttccccaaggagtcctgagag

SEQ ID NO: 3121192 - DNA, 25 bp, Homo sapien
agcgcctctgaaggccaacacggct

SEQ ID NO: 3121193 - DNA, 25 bp, Homo sapien
gcgcctctgaaggccaacacggctg

SEQ ID NO: 3121194 - DNA, 25 bp, Homo sapien
gcctctgaaggccaacacggctgct

SEQ ID NO: 3121195 - DNA, 25 bp, Homo sapien
agccggggtcccgtgcagcgcctct

SEQ ID NO: 3121196 - DNA, 25 bp, Homo sapien
ctggcatactgctccgcggcaaagt

SEQ ID NO: 3121197 - DNA, 25 bp, Homo sapien
gttggtgtacggcagggagatggcg

SEQ ID NO: 3121198 - DNA, 25 bp, Homo sapien
tccgcggcaaagttcctgtagaggt

SEQ ID NO: 3121199 - DNA, 25 bp, Homo sapien
aagttcctgtagaggtgcggcagcc

SEQ ID NO: 3121200 - DNA, 25 bp, Homo sapien
gatgagaagggggctggcactccat

SEQ ID NO: 3121201 - DNA, 25 bp, Homo sapien
ctgagatgagaagggggctggcact

SEQ ID NO: 3121202 - DNA, 25 bp, Homo sapien
gagatgagaagggggctggcactcc

SEQ ID NO: 3121203 - DNA, 25 bp, Homo sapien
atgagaagggggctggcactccatc

SEQ ID NO: 3121204 - DNA, 25 bp, Homo sapien
tggctatgacgtgatgggccagaca

SEQ ID NO: 3121205 - DNA, 25 bp, Homo sapien
tgaaccacatggctatgacgtgatg

SEQ ID NO: 3121206 - DNA, 25 bp, Homo sapien
cacatggctatgacgtgatgggcca

SEQ ID NO: 3121207 - DNA, 25 bp, Homo sapien
accacatggctatgacgtgatgggc

SEQ ID NO: 3121208 - DNA, 25 bp, Homo sapien
tgtcatcaaaagacaagaggacatt

SEQ ID NO: 3121209 - DNA, 25 bp, Homo sapien
acaagaggacattggaccgcaggcc

SEQ ID NO: 3121210 - DNA, 25 bp, Homo sapien
ttgagactagtactccgggccctga

SEQ ID NO: 3121211 - DNA, 25 bp, Homo sapien
ctcttgggtctctcgttgagactag

SEQ ID NO: 3121212 - DNA, 25 bp, Homo sapien
ccaccccacaccgactccaggcaca

SEQ ID NO: 3121213 - DNA, 25 bp, Homo sapien
gccacagccccatgtccttccccac

SEQ ID NO: 3121214 - DNA, 25 bp, Homo sapien
caggccacagccccatgtccttccc

SEQ ID NO: 3121215 - DNA, 25 bp, Homo sapien
ccccaccccacaccgactccaggca

SEQ ID NO: 3121216 - DNA, 25 bp, Homo sapien
ggctggagacaacagcttccgagtt

SEQ ID NO: 3121217 - DNA, 25 bp, Homo sapien
tgaggtcacgctggaaaatgccgta

SEQ ID NO: 3121218 - DNA, 25 bp, Homo sapien
gaaagtagtctctggccgtaatggc

SEQ ID NO: 3121219 - DNA, 25 bp, Homo sapien
gccaggccctgaaggtcactaggaa

SEQ ID NO: 3121220 - DNA, 25 bp, Homo sapien
gcaaattaaacgtgtgtgggtcacc

SEQ ID NO: 3121221 - DNA, 25 bp, Homo sapien
caagtaaggcttcacgcatgacacc

SEQ ID NO: 3121222 - DNA, 25 bp, Homo sapien
gagccatgccaaagggcagttagcg

SEQ ID NO: 3121223 - DNA, 25 bp, Homo sapien
tgagatgagcaaaaagagccatgcc

SEQ ID NO: 3121224 - DNA, 25 bp, Homo sapien
gaggaaggagccccaacgccccaga

SEQ ID NO: 3121225 - DNA, 25 bp, Homo sapien
ctatcgggtgaggaaggagccccaa

SEQ ID NO: 3121226 - DNA, 25 bp, Homo sapien
gaaggagccccaacgccccagagag

SEQ ID NO: 3121227 - DNA, 25 bp, Homo sapien
tatcgggtgaggaaggagccccaac

SEQ ID NO: 3121228 - DNA, 25 bp, Homo sapien
tgcggaccacatgttcagacacact

SEQ ID NO: 3121229 - DNA, 25 bp, Homo sapien
gcagagctctccttgaattctttca

SEQ ID NO: 3121230 - DNA, 25 bp, Homo sapien
tcacgggtggagagttattcaagcc

SEQ ID NO: 3121231 - DNA, 25 bp, Homo sapien
cacactgatgctgcggcaccggaag

SEQ ID NO: 3121232 - DNA, 25 bp, Homo sapien
ccacgggagcactaggttacggcct

SEQ ID NO: 3121233 - DNA, 25 bp, Homo sapien
gatacaaatttcatagcccctaggc

SEQ ID NO: 3121234 - DNA, 25 bp, Homo sapien
gactcaggaggctagagaccgacat

SEQ ID NO: 3121235 - DNA, 25 bp, Homo sapien
gcctcctggcgaaacggtgtagtca

SEQ ID NO: 3121236 - DNA, 25 bp, Homo sapien
ggaggtttttcaggctatcgtcagc

SEQ ID NO: 3121237 - DNA, 25 bp, Homo sapien
caggtttccgtgagctccaggtgga

SEQ ID NO: 3121238 - DNA, 25 bp, Homo sapien
gggccacggagttctcatctgcaga

SEQ ID NO: 3121239 - DNA, 25 bp, Homo sapien
gagaagacgtatcgagccatcatgt

SEQ ID NO: 3121240 - DNA, 25 bp, Homo sapien
ggttcccacgcttgtcgtcacagtg

SEQ ID NO: 3121241 - DNA, 25 bp, Homo sapien
cagtgacaagcttgttcccaaccag

SEQ ID NO: 3121242 - DNA, 25 bp, Homo sapien
ccgagtccaggcctagtaacgaccg

SEQ ID NO: 3121243 - DNA, 25 bp, Homo sapien
ttggtcctgccacccgctaggagga

SEQ ID NO: 3121244 - DNA, 25 bp, Homo sapien
gcgcctccttggtctgtctcacatg

SEQ ID NO: 3121245 - DNA, 25 bp, Homo sapien
cgacatggaacggacccgatcccgg

SEQ ID NO: 3121246 - DNA, 25 bp, Homo sapien
tgggactccagcttggccggcgcct

SEQ ID NO: 3121247 - DNA, 25 bp, Homo sapien
cgggccccacgggacacctgctgcc

SEQ ID NO: 3121248 - DNA, 25 bp, Homo sapien
acataggccgccaggttcgtcttct

SEQ ID NO: 3121249 - DNA, 25 bp, Homo sapien
agggcgccaactcgaagaccatggc

SEQ ID NO: 3121250 - DNA, 25 bp, Homo sapien
ttctcctgcacaggaacccgggtgc

SEQ ID NO: 3121251 - DNA, 25 bp, Homo sapien
cttctcaggtttcgcggctggtgca

SEQ ID NO: 3121252 - DNA, 25 bp, Homo sapien
tcagccgccatgagggcgttagaca

SEQ ID NO: 3121253 - DNA, 25 bp, Homo sapien
agggctgtgtcccggtgctccttga

SEQ ID NO: 3121254 - DNA, 25 bp, Homo sapien
tccaggctcatcagccagctggtgt

SEQ ID NO: 3121255 - DNA, 25 bp, Homo sapien
tgccggcaccgacagtgacttgtac

SEQ ID NO: 3121256 - DNA, 25 bp, Homo sapien
ctgtgcagctgtccttggcagctgg

SEQ ID NO: 3121257 - DNA, 25 bp, Homo sapien
ctgcccaggaaacgctcctgtgcag

SEQ ID NO: 3121258 - DNA, 25 bp, Homo sapien
gcccaggaaacgctcctgtgcagct

SEQ ID NO: 3121259 - DNA, 25 bp, Homo sapien
gctggactggtacagggaggagaaa

SEQ ID NO: 3121260 - DNA, 25 bp, Homo sapien
tcgtctgcacgtggagacctggcag

SEQ ID NO: 3121261 - DNA, 25 bp, Homo sapien
tttcctgtgccagcgtcaggacagg

SEQ ID NO: 3121262 - DNA, 25 bp, Homo sapien
ggagcaccatgcaggtcacagcact

SEQ ID NO: 3121263 - DNA, 25 bp, Homo sapien
ctcagctgatgtcaccatggagact

SEQ ID NO: 3121264 - DNA, 25 bp, Homo sapien
ctaaaagagcgggagcctgaaacca

SEQ ID NO: 3121265 - DNA, 25 bp, Homo sapien
cctcgtaaccgaggagagctgcgga

SEQ ID NO: 3121266 - DNA, 25 bp, Homo sapien
gggctctgcttactgctgccatcca

SEQ ID NO: 3121267 - DNA, 25 bp, Homo sapien
tggccctgacgtggcctccgagaac

SEQ ID NO: 3121268 - DNA, 25 bp, Homo sapien
gtgcgcctgtccatgcctagcgctg

SEQ ID NO: 3121269 - DNA, 25 bp, Homo sapien
agcacaggaacctcgcccggacttc

SEQ ID NO: 3121270 - DNA, 25 bp, Homo sapien
cctgctgtaggcatccgtgcgcctg

SEQ ID NO: 3121271 - DNA, 25 bp, Homo sapien
atgcctagcgctgcctcaacgtcct

SEQ ID NO: 3121272 - DNA, 25 bp, Homo sapien
gaccagcccgagcaccaggctacgg

SEQ ID NO: 3121273 - DNA, 25 bp, Homo sapien
cgcccgttgacgcagcagcactgcc

SEQ ID NO: 3121274 - DNA, 25 bp, Homo sapien
acagaccagcccgagcaccaggcta

SEQ ID NO: 3121275 - DNA, 25 bp, Homo sapien
ggtggtgaggccctatctgtcctcc

SEQ ID NO: 3121276 - DNA, 25 bp, Homo sapien
cagggtccccgaggatgtcctgcag

SEQ ID NO: 3121277 - DNA, 25 bp, Homo sapien
tccgaggagacgactcgctcgatgg

SEQ ID NO: 3121278 - DNA, 25 bp, Homo sapien
gccgagtcggagatggtgtaacctc

SEQ ID NO: 3121279 - DNA, 25 bp, Homo sapien
tccctgactgtgaccgggccttaac

SEQ ID NO: 3121280 - DNA, 25 bp, Homo sapien
tgtttgactcgtcgccaaagaaggg

SEQ ID NO: 3121281 - DNA, 25 bp, Homo sapien
gattggcttgtttgactcgtcgcca

SEQ ID NO: 3121282 - DNA, 25 bp, Homo sapien
cagcaggattggcttgtttgactcg

SEQ ID NO: 3121283 - DNA, 25 bp, Homo sapien
ggcttgtttgactcgtcgccaaaga

SEQ ID NO: 3121284 - DNA, 25 bp, Homo sapien
agccacacagctccagcggatgcag

SEQ ID NO: 3121285 - DNA, 25 bp, Homo sapien
ggagctgcaccgaccgctcaaagga

SEQ ID NO: 3121286 - DNA, 25 bp, Homo sapien
tctccaacatacaggacggcgatct

SEQ ID NO: 3121287 - DNA, 25 bp, Homo sapien
cttgtgggtgtcgtatgatgggatc

SEQ ID NO: 3121288 - DNA, 25 bp, Homo sapien
tatgatgggatctggtcgaggagct

SEQ ID NO: 3121289 - DNA, 25 bp, Homo sapien
aggctctgccgggagccccactctg

SEQ ID NO: 3121290 - DNA, 25 bp, Homo sapien
ggagaggcagggtggcatcactccc

SEQ ID NO: 3121291 - DNA, 25 bp, Homo sapien
gccacccaggccagacatcgggtgt

SEQ ID NO: 3121292 - DNA, 25 bp, Homo sapien
cctgaggcagacaagaccatccatt

SEQ ID NO: 3121293 - DNA, 25 bp, Homo sapien
gcagtaggtgaactggccgtcctca

SEQ ID NO: 3121294 - DNA, 25 bp, Homo sapien
catgatgtcatcgtgccagcagtag

SEQ ID NO: 3121295 - DNA, 25 bp, Homo sapien
cattggacaggatggcgagctcgct

SEQ ID NO: 3121296 - DNA, 25 bp, Homo sapien
aggtacaccttgtccggctggcagt

SEQ ID NO: 3121297 - DNA, 25 bp, Homo sapien
gtgggcatcagggtggcgatgtgga

SEQ ID NO: 3121298 - DNA, 25 bp, Homo sapien
tggtgggcatcagggtggcgatgtg

SEQ ID NO: 3121299 - DNA, 25 bp, Homo sapien
cttggtgggcatcagggtggcgatg

SEQ ID NO: 3121300 - DNA, 25 bp, Homo sapien
gggcatcagggtggcgatgtggaag

SEQ ID NO: 3121301 - DNA, 25 bp, Homo sapien
caatggacacaaagtcgttgcccag

SEQ ID NO: 3121302 - DNA, 25 bp, Homo sapien
cttcttgtcgcagcggtgcttgtcc

SEQ ID NO: 3121303 - DNA, 25 bp, Homo sapien
cattgtagacaatggacacaaagtc

SEQ ID NO: 3121304 - DNA, 25 bp, Homo sapien
gcccaggtggcgcttcttgtcgcag

SEQ ID NO: 3121305 - DNA, 25 bp, Homo sapien
gatggtgccaagcttgaagtcctca

SEQ ID NO: 3121306 - DNA, 25 bp, Homo sapien
ccgtgctgtgacactggccgaccca

SEQ ID NO: 3121307 - DNA, 25 bp, Homo sapien
gtgctgtgacactggccgacccagc

SEQ ID NO: 3121308 - DNA, 25 bp, Homo sapien
accgtgctgtgacactggccgaccc

SEQ ID NO: 3121309 - DNA, 25 bp, Homo sapien
cgtgctgtgacactggccgacccag

SEQ ID NO: 3121310 - DNA, 25 bp, Homo sapien
gtgtctgcagccacacgtccgaatc

SEQ ID NO: 3121311 - DNA, 25 bp, Homo sapien
agggtgtctgcagccacacgtccga

SEQ ID NO: 3121312 - DNA, 25 bp, Homo sapien
ccagggtgtctgcagccacacgtcc

SEQ ID NO: 3121313 - DNA, 25 bp, Homo sapien
ggtgtctgcagccacacgtccgaat

SEQ ID NO: 3121314 - DNA, 25 bp, Homo sapien
caggttgcactcgtagtccagcggg

SEQ ID NO: 3121315 - DNA, 25 bp, Homo sapien
gacaccaggttgcactcgtagtcca

SEQ ID NO: 3121316 - DNA, 25 bp, Homo sapien
gggtgacgatcacgtggacaaagtt

SEQ ID NO: 3121317 - DNA, 25 bp, Homo sapien
atcacgtggacaaagttgaactggc

SEQ ID NO: 3121318 - DNA, 25 bp, Homo sapien
gggagacttggtggtcacgccaggc

SEQ ID NO: 3121319 - DNA, 25 bp, Homo sapien
gacttggtggtcacgccaggcccag

SEQ ID NO: 3121320 - DNA, 25 bp, Homo sapien
ggagacttggtggtcacgccaggcc

SEQ ID NO: 3121321 - DNA, 25 bp, Homo sapien
tggggagacttggtggtcacgccag

SEQ ID NO: 3121322 - DNA, 25 bp, Homo sapien
ggcaggttgcggtcagacacgatct

SEQ ID NO: 3121323 - DNA, 25 bp, Homo sapien
ggccacgaagggcaggttgcggtca

SEQ ID NO: 3121324 - DNA, 25 bp, Homo sapien
ggttgcggtcagacacgatcttggc

SEQ ID NO: 3121325 - DNA, 25 bp, Homo sapien
agggccatctggcgggccacgaagg

SEQ ID NO: 3121326 - DNA, 25 bp, Homo sapien
taggcagggggtgagctcactatca

SEQ ID NO: 3121327 - DNA, 25 bp, Homo sapien
agctcactatcaggtggcacctggg

SEQ ID NO: 3121328 - DNA, 25 bp, Homo sapien
ggcacctgggcctgtcccaccagct

SEQ ID NO: 3121329 - DNA, 25 bp, Homo sapien
gggtgagctcactatcaggtggcac

SEQ ID NO: 3121330 - DNA, 25 bp, Homo sapien
aatccacttggaggggtagatatcg

SEQ ID NO: 3121331 - DNA, 25 bp, Homo sapien
tgtggcggagccgggcaatccactt

SEQ ID NO: 3121332 - DNA, 25 bp, Homo sapien
ctggcggagccgcttgatgtggcgg

SEQ ID NO: 3121333 - DNA, 25 bp, Homo sapien
gagccgcttgatgtggcggagccgg

SEQ ID NO: 3121334 - DNA, 25 bp, Homo sapien
acaccccgctgagggagccccatat

SEQ ID NO: 3121335 - DNA, 25 bp, Homo sapien
agcacaccccgctgagggagcccca

SEQ ID NO: 3121336 - DNA, 25 bp, Homo sapien
gctgagggagccccatattccctac

SEQ ID NO: 3121337 - DNA, 25 bp, Homo sapien
cccgctgagggagccccatattccc

SEQ ID NO: 3121338 - DNA, 25 bp, Homo sapien
ggcccacctcatagccaggtgtggg

SEQ ID NO: 3121339 - DNA, 25 bp, Homo sapien
tggagtaggcggcttcctcgcagat

SEQ ID NO: 3121340 - DNA, 25 bp, Homo sapien
gctttgctatgggacggagggtgca

SEQ ID NO: 3121341 - DNA, 25 bp, Homo sapien
tgaagtcctccaccgaggagatgag

SEQ ID NO: 3121342 - DNA, 25 bp, Homo sapien
caggcaataccgtccaaggccagtg

SEQ ID NO: 3121343 - DNA, 25 bp, Homo sapien
acaggcaataccgtccaaggccagt

SEQ ID NO: 3121344 - DNA, 25 bp, Homo sapien
ggcaataccgtccaaggccagtgca

SEQ ID NO: 3121345 - DNA, 25 bp, Homo sapien
aataccgtccaaggccagtgcagga

SEQ ID NO: 3121346 - DNA, 25 bp, Homo sapien
gaaggacacagcagtattggacggt

SEQ ID NO: 3121347 - DNA, 25 bp, Homo sapien
acgcgcgagtgtgctgtatggccca

SEQ ID NO: 3121348 - DNA, 25 bp, Homo sapien
agaatggctgcacgtaggttcccca

SEQ ID NO: 3121349 - DNA, 25 bp, Homo sapien
ggactaggcatgtcagaggacccca

SEQ ID NO: 3121350 - DNA, 25 bp, Homo sapien
ctgttcgccgtgcacttcgccgtgg

SEQ ID NO: 3121351 - DNA, 25 bp, Homo sapien
tgaccgccagtggacccgtttcgtg

SEQ ID NO: 3121352 - DNA, 25 bp, Homo sapien
agggaagggcgctggcgcgtgctgc

SEQ ID NO: 3121353 - DNA, 25 bp, Homo sapien
cgaggcccgtacttggcacagggaa

SEQ ID NO: 3121354 - DNA, 25 bp, Homo sapien
cagcgtccgcccctttgcgctgcgc

SEQ ID NO: 3121355 - DNA, 25 bp, Homo sapien
tcacgcgctacagcccggccgtggg

SEQ ID NO: 3121356 - DNA, 25 bp, Homo sapien
tgcgcctcgagttcccggcggccgg

SEQ ID NO: 3121357 - DNA, 25 bp, Homo sapien
cctcagcgcgggcctctcgctgcct

SEQ ID NO: 3121358 - DNA, 25 bp, Homo sapien
aggagctgcacagccgggccttcct

SEQ ID NO: 3121359 - DNA, 25 bp, Homo sapien
aaagcgccatcaagcaggagctgca

SEQ ID NO: 3121360 - DNA, 25 bp, Homo sapien
ttcctggccatcacgcggtacgggc

SEQ ID NO: 3121361 - DNA, 25 bp, Homo sapien
catccggtgcactggtctgtcttct

SEQ ID NO: 3121362 - DNA, 25 bp, Homo sapien
cgttctttcggtgatgggctgacga

SEQ ID NO: 3121363 - DNA, 25 bp, Homo sapien
tcaacgtgtcttcgctgcctctgta

SEQ ID NO: 3121364 - DNA, 25 bp, Homo sapien
tctgggaccgggcatatcagcatgg

SEQ ID NO: 3121365 - DNA, 25 bp, Homo sapien
tcggcgtctcgcagttggtctcgtc

SEQ ID NO: 3121366 - DNA, 25 bp, Homo sapien
gtcttttatcctccgagagacagca

SEQ ID NO: 3121367 - DNA, 25 bp, Homo sapien
ttatcctccgagagacagcaaaaca

SEQ ID NO: 3121368 - DNA, 25 bp, Homo sapien
cttttatcctccgagagacagcaaa

SEQ ID NO: 3121369 - DNA, 25 bp, Homo sapien
tttatcctccgagagacagcaaaac

SEQ ID NO: 3121370 - DNA, 25 bp, Homo sapien
accacgcctgaccaagttgaggcta

SEQ ID NO: 3121371 - DNA, 25 bp, Homo sapien
caagttgaggctaggtcatttttta

SEQ ID NO: 3121372 - DNA, 25 bp, Homo sapien
cctgaccaagttgaggctaggtcat

SEQ ID NO: 3121373 - DNA, 25 bp, Homo sapien
cacgcctgaccaagttgaggctagg

SEQ ID NO: 3121374 - DNA, 25 bp, Homo sapien
caccccttaggaatgcacacgtggg

SEQ ID NO: 3121375 - DNA, 25 bp, Homo sapien
gaaggcgcataagccgcgaccagga

SEQ ID NO: 3121376 - DNA, 25 bp, Homo sapien
cattcatacggaaacgggaggccgc

SEQ ID NO: 3121377 - DNA, 25 bp, Homo sapien
gaggttacatgcaaactaaccccag

SEQ ID NO: 3121378 - DNA, 25 bp, Homo sapien
caggctcagagccttcacgatagaa

SEQ ID NO: 3121379 - DNA, 25 bp, Homo sapien
aggctcagagccttcacgatagaat

SEQ ID NO: 3121380 - DNA, 25 bp, Homo sapien
ggctcagagccttcacgatagaatt

SEQ ID NO: 3121381 - DNA, 25 bp, Homo sapien
tggagcacaatgtcatgcacaccta

SEQ ID NO: 3121382 - DNA, 25 bp, Homo sapien
tccagcctccgtacaacgagtcctt

SEQ ID NO: 3121383 - DNA, 25 bp, Homo sapien
cccaggtgctggtggagcacaatgt

SEQ ID NO: 3121384 - DNA, 25 bp, Homo sapien
caccgccccggcaggtggacctttg

SEQ ID NO: 3121385 - DNA, 25 bp, Homo sapien
ggtcttcaagctctcagtaggtggg

SEQ ID NO: 3121386 - DNA, 25 bp, Homo sapien
cttcaagctctcagtaggtgggcgg

SEQ ID NO: 3121387 - DNA, 25 bp, Homo sapien
gcggtcttcaagctctcagtaggtg

SEQ ID NO: 3121388 - DNA, 25 bp, Homo sapien
tcttcaagctctcagtaggtgggcg

SEQ ID NO: 3121389 - DNA, 25 bp, Homo sapien
gctctgaaaagagagacatgctgcc

SEQ ID NO: 3121390 - DNA, 25 bp, Homo sapien
acctggtttgtaactcgggcagctc

SEQ ID NO: 3121391 - DNA, 25 bp, Homo sapien
aaagagagacatgctgccgccctgt

SEQ ID NO: 3121392 - DNA, 25 bp, Homo sapien
tgtaactcgggcagctctgaaaaga

SEQ ID NO: 3121393 - DNA, 25 bp, Homo sapien
ctgtgcccacagccgagtgggtgat

SEQ ID NO: 3121394 - DNA, 25 bp, Homo sapien
acagccgggcgcagatggccagttt

SEQ ID NO: 3121395 - DNA, 25 bp, Homo sapien
ctgccccgctggatctgtgctgctg

SEQ ID NO: 3121396 - DNA, 25 bp, Homo sapien
tgggtgatgggattccggctgcccc

SEQ ID NO: 3121397 - DNA, 25 bp, Homo sapien
cccagggaacgtcacagctgtggga

SEQ ID NO: 3121398 - DNA, 25 bp, Homo sapien
tagcagcgccatgatctgaagacag

SEQ ID NO: 3121399 - DNA, 25 bp, Homo sapien
tccgggttctgagcccgtccactgt

SEQ ID NO: 3121400 - DNA, 25 bp, Homo sapien
cgtccactgtgcatcgtggccctgg

SEQ ID NO: 3121401 - DNA, 25 bp, Homo sapien
gctcttcatggcttggcagctgtcc

SEQ ID NO: 3121402 - DNA, 25 bp, Homo sapien
cagaacacctcgctcttcatggctt

SEQ ID NO: 3121403 - DNA, 25 bp, Homo sapien
cacctcgctcttcatggcttggcag

SEQ ID NO: 3121404 - DNA, 25 bp, Homo sapien
ctcgctcttcatggcttggcagctg

SEQ ID NO: 3121405 - DNA, 25 bp, Homo sapien
cctgatgtgcggaccccgctgcatt

SEQ ID NO: 3121406 - DNA, 25 bp, Homo sapien
tggcgagtggcactgcctgagttcc

SEQ ID NO: 3121407 - DNA, 25 bp, Homo sapien
gaccccgctgcattcttgctgttag

SEQ ID NO: 3121408 - DNA, 25 bp, Homo sapien
tttgttcttttgacgtaagctggcg

SEQ ID NO: 3121409 - DNA, 25 bp, Homo sapien
gtggagacagagagcacctgcaggt

SEQ ID NO: 3121410 - DNA, 25 bp, Homo sapien
cagagagcacctgcaggtcatccat

SEQ ID NO: 3121411 - DNA, 25 bp, Homo sapien
gagacagagagcacctgcaggtcat

SEQ ID NO: 3121412 - DNA, 25 bp, Homo sapien
gacagagagcacctgcaggtcatcc

SEQ ID NO: 3121413 - DNA, 25 bp, Homo sapien
ctgtacgcgattgccggcaggggtg

SEQ ID NO: 3121414 - DNA, 25 bp, Homo sapien
cctgtacgcgattgccggcaggggt

SEQ ID NO: 3121415 - DNA, 25 bp, Homo sapien
tcctgtacgcgattgccggcagggg

SEQ ID NO: 3121416 - DNA, 25 bp, Homo sapien
cccgcactcgggcgttcagaacgtg

SEQ ID NO: 3121417 - DNA, 25 bp, Homo sapien
tcccgcactcgggcgttcagaacgt

SEQ ID NO: 3121418 - DNA, 25 bp, Homo sapien
ccgcactcgggcgttcagaacgtgc

SEQ ID NO: 3121419 - DNA, 25 bp, Homo sapien
ctcccgcactcgggcgttcagaacg

SEQ ID NO: 3121420 - DNA, 25 bp, Homo sapien
tccaggactgggcacatcgagggac

SEQ ID NO: 3121421 - DNA, 25 bp, Homo sapien
gctgtctcgcaaatgctggggtcca

SEQ ID NO: 3121422 - DNA, 25 bp, Homo sapien
cacatcgagggacttggtaggtgct

SEQ ID NO: 3121423 - DNA, 25 bp, Homo sapien
gcttggttcactgatgtaaaatata

SEQ ID NO: 3121424 - DNA, 25 bp, Homo sapien
aatgaagaattctacctggctgtga

SEQ ID NO: 3121425 - DNA, 25 bp, Homo sapien
gaacaccactgtgcttggaccagct

SEQ ID NO: 3121426 - DNA, 25 bp, Homo sapien
agcaaagcagtaggactggagaaag

SEQ ID NO: 3121427 - DNA, 25 bp, Homo sapien
aaggctggtcaagcaaagcagtagg

SEQ ID NO: 3121428 - DNA, 25 bp, Homo sapien
ctgcaaaacgtgctgctctgcgtgg

SEQ ID NO: 3121429 - DNA, 25 bp, Homo sapien
gcctgccttgggttaatgatgctgc

SEQ ID NO: 3121430 - DNA, 25 bp, Homo sapien
tttggaaaagatggcgtactgcaaa

SEQ ID NO: 3121431 - DNA, 25 bp, Homo sapien
ccttgggttaatgatgctgccgaga

SEQ ID NO: 3121432 - DNA, 25 bp, Homo sapien
gtccatgagagcagcccctcaggag

SEQ ID NO: 3121433 - DNA, 25 bp, Homo sapien
tcactggggactctgtccagggcct

SEQ ID NO: 3121434 - DNA, 25 bp, Homo sapien
ccagcacctgatggtgtccatgaga

SEQ ID NO: 3121435 - DNA, 25 bp, Homo sapien
agggcctggtggttcctgcttccca

SEQ ID NO: 3121436 - DNA, 25 bp, Homo sapien
ttacaccgtgccctctaactcctgc

SEQ ID NO: 3121437 - DNA, 25 bp, Homo sapien
cctctaactcctgccagttccttct

SEQ ID NO: 3121438 - DNA, 25 bp, Homo sapien
cagccaaaacgacccctgggagcca

SEQ ID NO: 3121439 - DNA, 25 bp, Homo sapien
agccaaaacgacccctgggagccat

SEQ ID NO: 3121440 - DNA, 25 bp, Homo sapien
cttctgacggcccggccccctggca

SEQ ID NO: 3121441 - DNA, 25 bp, Homo sapien
ttctgacggcccggccccctggcat

SEQ ID NO: 3121442 - DNA, 25 bp, Homo sapien
tcctgggcagtggactcccagtcca

SEQ ID NO: 3121443 - DNA, 25 bp, Homo sapien
aggagttgggtgcaagtagggcatc

SEQ ID NO: 3121444 - DNA, 25 bp, Homo sapien
tcccagtccagtggaccccgtcctg

SEQ ID NO: 3121445 - DNA, 25 bp, Homo sapien
ccagtggaccccgtcctgccagctg

SEQ ID NO: 3121446 - DNA, 25 bp, Homo sapien
gcgggcgggcgctcagtgtgctccc

SEQ ID NO: 3121447 - DNA, 25 bp, Homo sapien
ccgctgcagccgccgtgccctgggc

SEQ ID NO: 3121448 - DNA, 25 bp, Homo sapien
ggcgggcgctcagtgtgctcccgct

SEQ ID NO: 3121449 - DNA, 25 bp, Homo sapien
agccgccgtgccctgggccgtcccg

SEQ ID NO: 3121450 - DNA, 25 bp, Homo sapien
ctgcaagggcccgttgggcggcgcg

SEQ ID NO: 3121451 - DNA, 25 bp, Homo sapien
gcgtcggggccggaaagcgcagtcc

SEQ ID NO: 3121452 - DNA, 25 bp, Homo sapien
caagggcccgttgggcggcgcgtcg

SEQ ID NO: 3121453 - DNA, 25 bp, Homo sapien
ggaaagcgcagtcccggagcgcgcc

SEQ ID NO: 3121454 - DNA, 25 bp, Homo sapien
cttgaaggcgacgtcgtagaagtcg

SEQ ID NO: 3121455 - DNA, 25 bp, Homo sapien
gacgtcgtagaagtcgacaccgccg

SEQ ID NO: 3121456 - DNA, 25 bp, Homo sapien
tagaagtcgacaccgccgccaagcg

SEQ ID NO: 3121457 - DNA, 25 bp, Homo sapien
gaaggcgacgtcgtagaagtcgaca

SEQ ID NO: 3121458 - DNA, 25 bp, Homo sapien
gcctggggggcgggtgcctggctca

SEQ ID NO: 3121459 - DNA, 25 bp, Homo sapien
cctggggggcgggtgcctggctcac

SEQ ID NO: 3121460 - DNA, 25 bp, Homo sapien
ctgctgcgctggcctggggggcggg

SEQ ID NO: 3121461 - DNA, 25 bp, Homo sapien
ctggcctggggggcgggtgcctggc

SEQ ID NO: 3121462 - DNA, 25 bp, Homo sapien
gaagtcaatgcctacggtggagatg

SEQ ID NO: 3121463 - DNA, 25 bp, Homo sapien
ccggaagtcaatgcctacggtggag

SEQ ID NO: 3121464 - DNA, 25 bp, Homo sapien
aaggtccccgccaggaaagcaccat

SEQ ID NO: 3121465 - DNA, 25 bp, Homo sapien
gaaggtccccgccaggaaagcacca

SEQ ID NO: 3121466 - DNA, 25 bp, Homo sapien
agcttcaccttcacaccatccacgt

SEQ ID NO: 3121467 - DNA, 25 bp, Homo sapien
cttcaccttcacaccatccacgtcc

SEQ ID NO: 3121468 - DNA, 25 bp, Homo sapien
gcttcaccttcacaccatccacgtc

SEQ ID NO: 3121469 - DNA, 25 bp, Homo sapien
cggtagtaggcatgggtaacactgc

SEQ ID NO: 3121470 - DNA, 25 bp, Homo sapien
atgggtaacactgcggaaccgctcc

SEQ ID NO: 3121471 - DNA, 25 bp, Homo sapien
atgagcatcccggtagtaggcatgg

SEQ ID NO: 3121472 - DNA, 25 bp, Homo sapien
taggcatgggtaacactgcggaacc

SEQ ID NO: 3121473 - DNA, 25 bp, Homo sapien
gccttgttggtgacatcgtagagca

SEQ ID NO: 3121474 - DNA, 25 bp, Homo sapien
aggccttgttggtgacatcgtagag

SEQ ID NO: 3121475 - DNA, 25 bp, Homo sapien
ccttgttggtgacatcgtagagcag

SEQ ID NO: 3121476 - DNA, 25 bp, Homo sapien
ttgttggtgacatcgtagagcagca

SEQ ID NO: 3121477 - DNA, 25 bp, Homo sapien
ctttcaccccaccaggaaagccact

SEQ ID NO: 3121478 - DNA, 25 bp, Homo sapien
atcagggccctttcaccccaccagg

SEQ ID NO: 3121479 - DNA, 25 bp, Homo sapien
gtcaggccctatcagggccctttca

SEQ ID NO: 3121480 - DNA, 25 bp, Homo sapien
ttcaccccaccaggaaagccactga

SEQ ID NO: 3121481 - DNA, 25 bp, Homo sapien
gggtcctttggaaccctgatgccat

SEQ ID NO: 3121482 - DNA, 25 bp, Homo sapien
gaatggcactcaggtccacttgggc

SEQ ID NO: 3121483 - DNA, 25 bp, Homo sapien
ttacaggtcccttacacaaagcctc

SEQ ID NO: 3121484 - DNA, 25 bp, Homo sapien
tctctcagcggggtcctttggaacc

SEQ ID NO: 3121485 - DNA, 25 bp, Homo sapien
ggctggggctccctgcatggcttgc

SEQ ID NO: 3121486 - DNA, 25 bp, Homo sapien
tggggctccctgcatggcttgcccc

SEQ ID NO: 3121487 - DNA, 25 bp, Homo sapien
ctgtgggaggcagcagaccaggctg

SEQ ID NO: 3121488 - DNA, 25 bp, Homo sapien
tgtgggaggcagcagaccaggctgg

SEQ ID NO: 3121489 - DNA, 25 bp, Homo sapien
gctgggcgtactcgtggatctcggt

SEQ ID NO: 3121490 - DNA, 25 bp, Homo sapien
gtcgtgctgggcgtactcgtggatc

SEQ ID NO: 3121491 - DNA, 25 bp, Homo sapien
cgtgctgggcgtactcgtggatctc

SEQ ID NO: 3121492 - DNA, 25 bp, Homo sapien
tgctgggcgtactcgtggatctcgg

SEQ ID NO: 3121493 - DNA, 25 bp, Homo sapien
cttgttccccagcagcatgagcgcc

SEQ ID NO: 3121494 - DNA, 25 bp, Homo sapien
tgttccccagcagcatgagcgccac

SEQ ID NO: 3121495 - DNA, 25 bp, Homo sapien
ttgttccccagcagcatgagcgcca

SEQ ID NO: 3121496 - DNA, 25 bp, Homo sapien
tgaaagctggcccatggttggcccc

SEQ ID NO: 3121497 - DNA, 25 bp, Homo sapien
gtgaaagctggcccatggttggccc

SEQ ID NO: 3121498 - DNA, 25 bp, Homo sapien
ggtgaaagctggcccatggttggcc

SEQ ID NO: 3121499 - DNA, 25 bp, Homo sapien
tcttcaccacacgctcatgggcaga

SEQ ID NO: 3121500 - DNA, 25 bp, Homo sapien
cctcttcaccacacgctcatgggca

SEQ ID NO: 3121501 - DNA, 25 bp, Homo sapien
accacacgctcatgggcagagtcca

SEQ ID NO: 3121502 - DNA, 25 bp, Homo sapien
ttcaccacacgctcatgggcagagt

SEQ ID NO: 3121503 - DNA, 25 bp, Homo sapien
ggggacagcctaggctcgcagcctc

SEQ ID NO: 3121504 - DNA, 25 bp, Homo sapien
ctggcggggacagcctaggctcgca

SEQ ID NO: 3121505 - DNA, 25 bp, Homo sapien
gacagcctaggctcgcagcctccag

SEQ ID NO: 3121506 - DNA, 25 bp, Homo sapien
ggcggggacagcctaggctcgcagc

SEQ ID NO: 3121507 - DNA, 25 bp, Homo sapien
acgttgaggcccgtcttggcgctgg

SEQ ID NO: 3121508 - DNA, 25 bp, Homo sapien
gttgaggcccgtcttggcgctggtc

SEQ ID NO: 3121509 - DNA, 25 bp, Homo sapien
ccacgttgaggcccgtcttggcgct

SEQ ID NO: 3121510 - DNA, 25 bp, Homo sapien
agtccacgttgaggcccgtcttggc

SEQ ID NO: 3121511 - DNA, 25 bp, Homo sapien
ggacacgatggcctggactctaatg

SEQ ID NO: 3121512 - DNA, 25 bp, Homo sapien
atggcctggactctaatgaggattc

SEQ ID NO: 3121513 - DNA, 25 bp, Homo sapien
gggtgacaaggggacacgatggcct

SEQ ID NO: 3121514 - DNA, 25 bp, Homo sapien
cacgatggcctggactctaatgagg

SEQ ID NO: 3121515 - DNA, 25 bp, Homo sapien
cctccctcttaacgtaatcatgcag

SEQ ID NO: 3121516 - DNA, 25 bp, Homo sapien
aagcgcggctcgctgggagccttca

SEQ ID NO: 3121517 - DNA, 25 bp, Homo sapien
cttcatggagcgctgcttcaactcc

SEQ ID NO: 3121518 - DNA, 25 bp, Homo sapien
atcatgcagccggaagcgcggctcg

SEQ ID NO: 3121519 - DNA, 25 bp, Homo sapien
gggcggcagcaggaggcccctcgac

SEQ ID NO: 3121520 - DNA, 25 bp, Homo sapien
tcaagggcggcagcaggaggcccct

SEQ ID NO: 3121521 - DNA, 25 bp, Homo sapien
aagggcggcagcaggaggcccctcg

SEQ ID NO: 3121522 - DNA, 25 bp, Homo sapien
agggcggcagcaggaggcccctcga

SEQ ID NO: 3121523 - DNA, 25 bp, Homo sapien
aaggcttgacctggggctcctgaaa

SEQ ID NO: 3121524 - DNA, 25 bp, Homo sapien
gcgttggccactgggcaacaaagtc

SEQ ID NO: 3121525 - DNA, 25 bp, Homo sapien
cttctagggactggacggcttcctc

SEQ ID NO: 3121526 - DNA, 25 bp, Homo sapien
tgaaaacagacactcgggcgttggc

SEQ ID NO: 3121527 - DNA, 25 bp, Homo sapien
ggcaaagtctgtccacttgccgctc

SEQ ID NO: 3121528 - DNA, 25 bp, Homo sapien
gactgcttttccgtggcggccagtg

SEQ ID NO: 3121529 - DNA, 25 bp, Homo sapien
agcagagcaccgtggcaaagtctgt

SEQ ID NO: 3121530 - DNA, 25 bp, Homo sapien
cccgtcccgtgcagaagactgcttt

SEQ ID NO: 3121531 - DNA, 25 bp, Homo sapien
cagatgcacgatgtgattagcagtg

SEQ ID NO: 3121532 - DNA, 25 bp, Homo sapien
gcgtgggcaggcgtcctcccttagc

SEQ ID NO: 3121533 - DNA, 25 bp, Homo sapien
tttctagggttaggcactgtgcgtg

SEQ ID NO: 3121534 - DNA, 25 bp, Homo sapien
catgtgcggctgaagacatggcttt

SEQ ID NO: 3121535 - DNA, 25 bp, Homo sapien
ccctattgctgtttgagccagagcc

SEQ ID NO: 3121536 - DNA, 25 bp, Homo sapien
tcccacattttatcacaaggccaca

SEQ ID NO: 3121537 - DNA, 25 bp, Homo sapien
gccgggctggcagttgttgtttctg

SEQ ID NO: 3121538 - DNA, 25 bp, Homo sapien
acaggcatcctccaaggtcagtgag

SEQ ID NO: 3121539 - DNA, 25 bp, Homo sapien
aacaaaggcttgtgcaatcaaaagg

SEQ ID NO: 3121540 - DNA, 25 bp, Homo sapien
caaggtggagcgtgctcggaaatca

SEQ ID NO: 3121541 - DNA, 25 bp, Homo sapien
cacaactttattcactaggactgaa

SEQ ID NO: 3121542 - DNA, 25 bp, Homo sapien
tcaaaaggccaagttgagtgcaagg

SEQ ID NO: 3121543 - DNA, 25 bp, Homo sapien
ggccttgctgagtctctcaaactcc

SEQ ID NO: 3121544 - DNA, 25 bp, Homo sapien
cgttaggcttcacggactctgcata

SEQ ID NO: 3121545 - DNA, 25 bp, Homo sapien
gactctgcataagggaggagcttcg

SEQ ID NO: 3121546 - DNA, 25 bp, Homo sapien
aaaagaaatgccacggtacgattgg

SEQ ID NO: 3121547 - DNA, 25 bp, Homo sapien
ctgggtctgagagaccgtctccaaa

SEQ ID NO: 3121548 - DNA, 25 bp, Homo sapien
cgcacttccgaaactacgacttccg

SEQ ID NO: 3121549 - DNA, 25 bp, Homo sapien
actagacgcgcgagccggaagcgcc

SEQ ID NO: 3121550 - DNA, 25 bp, Homo sapien
gccgccagcccgcttcatgatgccc

SEQ ID NO: 3121551 - DNA, 25 bp, Homo sapien
tgcgcccgccgggacgtgtagttcc

SEQ ID NO: 3121552 - DNA, 25 bp, Homo sapien
aaagaactgcgcgagaacaggacgg

SEQ ID NO: 3121553 - DNA, 25 bp, Homo sapien
agaactgggaccgtgttctccgcgg

SEQ ID NO: 3121554 - DNA, 25 bp, Homo sapien
tactggtatctagcggccaggagcc

SEQ ID NO: 3121555 - DNA, 25 bp, Homo sapien
agttgttccgcaggaggcatttgcc

SEQ ID NO: 3121556 - DNA, 25 bp, Homo sapien
ctggctgcaccctcctcctccaggg

SEQ ID NO: 3121557 - DNA, 25 bp, Homo sapien
gctgcaccctcctcctccagggagc

SEQ ID NO: 3121558 - DNA, 25 bp, Homo sapien
caccctcctcctccagggagcaagg

SEQ ID NO: 3121559 - DNA, 25 bp, Homo sapien
tgcaccctcctcctccagggagcaa

SEQ ID NO: 3121560 - DNA, 25 bp, Homo sapien
gcactgtccacctcgaggcccatgc

SEQ ID NO: 3121561 - DNA, 25 bp, Homo sapien
tgtccacctcgaggcccatgcgcag

SEQ ID NO: 3121562 - DNA, 25 bp, Homo sapien
agcaccccatgaggacacaccatgg

SEQ ID NO: 3121563 - DNA, 25 bp, Homo sapien
aggcccatgcgcagcaccccatgag

SEQ ID NO: 3121564 - DNA, 25 bp, Homo sapien
ctgcagggtgagtcaccggagccca

SEQ ID NO: 3121565 - DNA, 25 bp, Homo sapien
tgcagcggggagacaccagccacac

SEQ ID NO: 3121566 - DNA, 25 bp, Homo sapien
cagggtgagtcaccggagcccaact

SEQ ID NO: 3121567 - DNA, 25 bp, Homo sapien
gctgcagcggggagacaccagccac

SEQ ID NO: 3121568 - DNA, 25 bp, Homo sapien
gcatctacggtccttgggaagcacc

SEQ ID NO: 3121569 - DNA, 25 bp, Homo sapien
agagaggcatctacggtccttggga

SEQ ID NO: 3121570 - DNA, 25 bp, Homo sapien
gaggcatctacggtccttgggaagc

SEQ ID NO: 3121571 - DNA, 25 bp, Homo sapien
ctagagaggcatctacggtccttgg

SEQ ID NO: 3121572 - DNA, 25 bp, Homo sapien
agattgctgggccccccggagaagc

SEQ ID NO: 3121573 - DNA, 25 bp, Homo sapien
cccggagaagcggttgtagcgggca

SEQ ID NO: 3121574 - DNA, 25 bp, Homo sapien
cctgtggtgacgtctggggtgggaa

SEQ ID NO: 3121575 - DNA, 25 bp, Homo sapien
ttgtagcgggcactcttgcctgagc

SEQ ID NO: 3121576 - DNA, 25 bp, Homo sapien
tggtggtgacggctgaaaaggcggg

SEQ ID NO: 3121577 - DNA, 25 bp, Homo sapien
gatggtggtgacggctgaaaaggcg

SEQ ID NO: 3121578 - DNA, 25 bp, Homo sapien
atggtggtgacggctgaaaaggcgg

SEQ ID NO: 3121579 - DNA, 25 bp, Homo sapien
gcagtgctgcttgtaggtgctggtc

SEQ ID NO: 3121580 - DNA, 25 bp, Homo sapien
ctgcagtgctgcttgtaggtgctgg

SEQ ID NO: 3121581 - DNA, 25 bp, Homo sapien
gtgctgcttgtaggtgctggtcccg

SEQ ID NO: 3121582 - DNA, 25 bp, Homo sapien
agtgctgcttgtaggtgctggtccc

SEQ ID NO: 3121583 - DNA, 25 bp, Homo sapien
ccgcggggagtaggcaagggtgctg

SEQ ID NO: 3121584 - DNA, 25 bp, Homo sapien
ctcctcgtcccgcggggagtaggca

SEQ ID NO: 3121585 - DNA, 25 bp, Homo sapien
gggagtaggcaagggtgctggagga

SEQ ID NO: 3121586 - DNA, 25 bp, Homo sapien
tcccgcggggagtaggcaagggtgc

SEQ ID NO: 3121587 - DNA, 25 bp, Homo sapien
ctcctgtgcctcaccagctcactgt

SEQ ID NO: 3121588 - DNA, 25 bp, Homo sapien
gccgaggcctcagggtatccacagg

SEQ ID NO: 3121589 - DNA, 25 bp, Homo sapien
agggtatccacaggtgctcttcttc

SEQ ID NO: 3121590 - DNA, 25 bp, Homo sapien
atgtctgccgaggcctcagggtatc

SEQ ID NO: 3121591 - DNA, 25 bp, Homo sapien
ccttaagatggagccaaatatgcct

SEQ ID NO: 3121592 - DNA, 25 bp, Homo sapien
tgtggtttccacctcccttaagatg

SEQ ID NO: 3121593 - DNA, 25 bp, Homo sapien
aaatatgcctcatcctggcctgcag

SEQ ID NO: 3121594 - DNA, 25 bp, Homo sapien
tgtattttattgtgctatcctcctg

SEQ ID NO: 3121595 - DNA, 25 bp, Homo sapien
cttgggcgtaggggctgacagcagg

SEQ ID NO: 3121596 - DNA, 25 bp, Homo sapien
atgtgggccgtgagggggcacctcc

SEQ ID NO: 3121597 - DNA, 25 bp, Homo sapien
aggaatgctggcagggagcgacggc

SEQ ID NO: 3121598 - DNA, 25 bp, Homo sapien
ccgcaggatggaagggccaggaatg

SEQ ID NO: 3121599 - DNA, 25 bp, Homo sapien
acagccgaggccgtgaccgcaggat

SEQ ID NO: 3121600 - DNA, 25 bp, Homo sapien
tggactctgagtgcagggagcggac

SEQ ID NO: 3121601 - DNA, 25 bp, Homo sapien
aatgtggagcgcagagacatgctgg

SEQ ID NO: 3121602 - DNA, 25 bp, Homo sapien
ctcgggcagtgagaatgtggagcgc

SEQ ID NO: 3121603 - DNA, 25 bp, Homo sapien
acagagatggcggagtcggagcggc

SEQ ID NO: 3121604 - DNA, 25 bp, Homo sapien
tttgaagacgctgcagcagagctga

SEQ ID NO: 3121605 - DNA, 25 bp, Homo sapien
gatcacggggtctttgaagacgctg

SEQ ID NO: 3121606 - DNA, 25 bp, Homo sapien
tctttgaagacgctgcagcagagct

SEQ ID NO: 3121607 - DNA, 25 bp, Homo sapien
gggtctttgaagacgctgcagcaga

SEQ ID NO: 3121608 - DNA, 25 bp, Homo sapien
ctgacttcaaggcgcatctcctaca

SEQ ID NO: 3121609 - DNA, 25 bp, Homo sapien
tgacttcaaggcgcatctcctacag

SEQ ID NO: 3121610 - DNA, 25 bp, Homo sapien
tcaaggcgcatctcctacagaacgt

SEQ ID NO: 3121611 - DNA, 25 bp, Homo sapien
aggcgcatctcctacagaacgtgtg

SEQ ID NO: 3121612 - DNA, 25 bp, Homo sapien
ttgacgttgtccacgggacacttct

SEQ ID NO: 3121613 - DNA, 25 bp, Homo sapien
tcggccaccgcgatgttgttcacca

SEQ ID NO: 3121614 - DNA, 25 bp, Homo sapien
caccacggtcagtttgacgttgtcc

SEQ ID NO: 3121615 - DNA, 25 bp, Homo sapien
tgccggcagtggatgaagagctccc

SEQ ID NO: 3121616 - DNA, 25 bp, Homo sapien
gggcatttgatgtgctcgcactcct

SEQ ID NO: 3121617 - DNA, 25 bp, Homo sapien
catttgatgtgctcgcactccttga

SEQ ID NO: 3121618 - DNA, 25 bp, Homo sapien
ccgtacttggagtgggggcatttga

SEQ ID NO: 3121619 - DNA, 25 bp, Homo sapien
gatgtgctcgcactccttgaggtgg

SEQ ID NO: 3121620 - DNA, 25 bp, Homo sapien
gagagctttcccagcatggagcgca

SEQ ID NO: 3121621 - DNA, 25 bp, Homo sapien
ttcaggccctcgaagcggcaagtct

SEQ ID NO: 3121622 - DNA, 25 bp, Homo sapien
cgtaagtgtcctggttcccgatgaa

SEQ ID NO: 3121623 - DNA, 25 bp, Homo sapien
cacgtgcatctcgtggaagcggtca

SEQ ID NO: 3121624 - DNA, 25 bp, Homo sapien
gtgtcactggtgcccggagcagtgg

SEQ ID NO: 3121625 - DNA, 25 bp, Homo sapien
cactggtgcccggagcagtggccag

SEQ ID NO: 3121626 - DNA, 25 bp, Homo sapien
tgtcactggtgcccggagcagtggc

SEQ ID NO: 3121627 - DNA, 25 bp, Homo sapien
atttaacatggatgcgtcccgccgg

SEQ ID NO: 3121628 - DNA, 25 bp, Homo sapien
tgagcttgctctggttttcgtccag

SEQ ID NO: 3121629 - DNA, 25 bp, Homo sapien
ttgctctggttttcgtccaggacgt

SEQ ID NO: 3121630 - DNA, 25 bp, Homo sapien
tgcgtcccgccggaactccatgagg

SEQ ID NO: 3121631 - DNA, 25 bp, Homo sapien
catgttcagccgcgcgttgatgtgg

SEQ ID NO: 3121632 - DNA, 25 bp, Homo sapien
ttcagccgcgcgttgatgtgggaca

SEQ ID NO: 3121633 - DNA, 25 bp, Homo sapien
tgcccatgttcagccgcgcgttgat

SEQ ID NO: 3121634 - DNA, 25 bp, Homo sapien
gttcagccgcgcgttgatgtgggac

SEQ ID NO: 3121635 - DNA, 25 bp, Homo sapien
ggagccacggcgggtccatactcac

SEQ ID NO: 3121636 - DNA, 25 bp, Homo sapien
gggagccacggcgggtccatactca

SEQ ID NO: 3121637 - DNA, 25 bp, Homo sapien
cgggagccacggcgggtccatactc

SEQ ID NO: 3121638 - DNA, 25 bp, Homo sapien
gcgggagccacggcgggtccatact

SEQ ID NO: 3121639 - DNA, 25 bp, Homo sapien
tggtggcccacaaaggtccctttgc

SEQ ID NO: 3121640 - DNA, 25 bp, Homo sapien
ccatggagtagacgcagagacacca

SEQ ID NO: 3121641 - DNA, 25 bp, Homo sapien
aaaggtccctttgcacttgaagatc

SEQ ID NO: 3121642 - DNA, 25 bp, Homo sapien
aggtcacccatggagtagacgcaga

SEQ ID NO: 3121643 - DNA, 25 bp, Homo sapien
cagcatgacaggaatgagtgaggga

SEQ ID NO: 3121644 - DNA, 25 bp, Homo sapien
agccaggctgcagagactgaggtag

SEQ ID NO: 3121645 - DNA, 25 bp, Homo sapien
agcccagtgtcaaggggcagcatga

SEQ ID NO: 3121646 - DNA, 25 bp, Homo sapien
gccaggctgcagagactgaggtagg

SEQ ID NO: 3121647 - DNA, 25 bp, Homo sapien
cgatgccatcatggccctccagtgt

SEQ ID NO: 3121648 - DNA, 25 bp, Homo sapien
agagccagcacgatgccatcatggc

SEQ ID NO: 3121649 - DNA, 25 bp, Homo sapien
ctgacacttgtaggtggtacatgtg

SEQ ID NO: 3121650 - DNA, 25 bp, Homo sapien
ttgtaggtggtacatgtgtcccaca

SEQ ID NO: 3121651 - DNA, 25 bp, Homo sapien
tcactgatcacacatgtgcctggac

SEQ ID NO: 3121652 - DNA, 25 bp, Homo sapien
tgatcacacatgtgcctggactcac

SEQ ID NO: 3121653 - DNA, 25 bp, Homo sapien
actgatcacacatgtgcctggactc

SEQ ID NO: 3121654 - DNA, 25 bp, Homo sapien
cactgatcacacatgtgcctggact

SEQ ID NO: 3121655 - DNA, 25 bp, Homo sapien
gatggtgtaggccacacaagggccc

SEQ ID NO: 3121656 - DNA, 25 bp, Homo sapien
gagctcatggctcacggcccacggg

SEQ ID NO: 3121657 - DNA, 25 bp, Homo sapien
cacatagctacacaggctcgagctc

SEQ ID NO: 3121658 - DNA, 25 bp, Homo sapien
gggcacacacatagctacacaggct

SEQ ID NO: 3121659 - DNA, 25 bp, Homo sapien
gaaagtggccaaggtagttgctccg

SEQ ID NO: 3121660 - DNA, 25 bp, Homo sapien
cagcgagctgggaggtaattaccca

SEQ ID NO: 3121661 - DNA, 25 bp, Homo sapien
caaagcctcacgataggagacagga

SEQ ID NO: 3121662 - DNA, 25 bp, Homo sapien
tatcttctggttgcgcaaggtgcac

SEQ ID NO: 3121663 - DNA, 25 bp, Homo sapien
tcaaggtgggagaagctgtgtccat

SEQ ID NO: 3121664 - DNA, 25 bp, Homo sapien
gcagagacaatgtgtcaaggtggga

SEQ ID NO: 3121665 - DNA, 25 bp, Homo sapien
gaagctgtgtccatgctgacaccgc

SEQ ID NO: 3121666 - DNA, 25 bp, Homo sapien
acaccgccctggcagggcccgaggt

SEQ ID NO: 3121667 - DNA, 25 bp, Homo sapien
gtctgcagagccgctgtagagtttg

SEQ ID NO: 3121668 - DNA, 25 bp, Homo sapien
tgcagagccgctgtagagtttgcac

SEQ ID NO: 3121669 - DNA, 25 bp, Homo sapien
ctgcagagccgctgtagagtttgca

SEQ ID NO: 3121670 - DNA, 25 bp, Homo sapien
tctgcagagccgctgtagagtttgc

SEQ ID NO: 3121671 - DNA, 25 bp, Homo sapien
gcgggcctgggccgcctcctgccca

SEQ ID NO: 3121672 - DNA, 25 bp, Homo sapien
cgggcctgggccgcctcctgcccac

SEQ ID NO: 3121673 - DNA, 25 bp, Homo sapien
agtctggagcccagacggggagaaa

SEQ ID NO: 3121674 - DNA, 25 bp, Homo sapien
gagtctggagcccagacggggagaa

SEQ ID NO: 3121675 - DNA, 25 bp, Homo sapien
tgtgaggagaccagcgtgcacaccg

SEQ ID NO: 3121676 - DNA, 25 bp, Homo sapien
tgtcatgggcccggatggtgttcac

SEQ ID NO: 3121677 - DNA, 25 bp, Homo sapien
aagagcacgttgtgtgaggagacca

SEQ ID NO: 3121678 - DNA, 25 bp, Homo sapien
tgcacaccgggttgtcatgggcccg

SEQ ID NO: 3121679 - DNA, 25 bp, Homo sapien
gggctgggcgggcaagggacgcctc

SEQ ID NO: 3121680 - DNA, 25 bp, Homo sapien
gtgacacacacgtaggcacagcctc

SEQ ID NO: 3121681 - DNA, 25 bp, Homo sapien
ggcaagggacgcctcagtgacacac

SEQ ID NO: 3121682 - DNA, 25 bp, Homo sapien
ctcagtgacacacacgtaggcacag

SEQ ID NO: 3121683 - DNA, 25 bp, Homo sapien
ttgtctggtaggagccgctgtacag

SEQ ID NO: 3121684 - DNA, 25 bp, Homo sapien
agctcagtgcccacgatgtcccaga

SEQ ID NO: 3121685 - DNA, 25 bp, Homo sapien
taggagccgctgtacaggtagctct

SEQ ID NO: 3121686 - DNA, 25 bp, Homo sapien
cttgattgtctggtaggagccgctg

SEQ ID NO: 3121687 - DNA, 25 bp, Homo sapien
gatgtgcgaaggtaggaacagggca

SEQ ID NO: 3121688 - DNA, 25 bp, Homo sapien
cccagccaggggatgtgcgaaggta

SEQ ID NO: 3121689 - DNA, 25 bp, Homo sapien
agtgctggtaggaggcaaggccctg

SEQ ID NO: 3121690 - DNA, 25 bp, Homo sapien
aggaggcaaggccctgtggccacca

SEQ ID NO: 3121691 - DNA, 25 bp, Homo sapien
gatgaggttctcgtaggtgccacag

SEQ ID NO: 3121692 - DNA, 25 bp, Homo sapien
cagtcaagggttcggatgtcccaga

SEQ ID NO: 3121693 - DNA, 25 bp, Homo sapien
tctgcaggacgtggatgcagtcaag

SEQ ID NO: 3121694 - DNA, 25 bp, Homo sapien
agcaatggagtagacgctgccacca

SEQ ID NO: 3121695 - DNA, 25 bp, Homo sapien
gtgggcacaggcaggtcaaagacac

SEQ ID NO: 3121696 - DNA, 25 bp, Homo sapien
gacactgagcaaggcgggggagacg

SEQ ID NO: 3121697 - DNA, 25 bp, Homo sapien
gcacaggcaggtcaaagacactgag

SEQ ID NO: 3121698 - DNA, 25 bp, Homo sapien
aggtcaaagacactgagcaaggcgg

SEQ ID NO: 3121699 - DNA, 25 bp, Homo sapien
tctggtctggcgtcgagatgaccgc

SEQ ID NO: 3121700 - DNA, 25 bp, Homo sapien
agatgaccgccagggcatacacggt

SEQ ID NO: 3121701 - DNA, 25 bp, Homo sapien
gaccggtcgtaggatgcactgaaga

SEQ ID NO: 3121702 - DNA, 25 bp, Homo sapien
acacggtgcccacgtggcccgtgag

SEQ ID NO: 3121703 - DNA, 25 bp, Homo sapien
acatgggacgtgagggcccgccgga

SEQ ID NO: 3121704 - DNA, 25 bp, Homo sapien
gggcacatgggacgtgagggcccgc

SEQ ID NO: 3121705 - DNA, 25 bp, Homo sapien
ctgggggcacatgggacgtgagggc

SEQ ID NO: 3121706 - DNA, 25 bp, Homo sapien
gcacatgggacgtgagggcccgccg

SEQ ID NO: 3121707 - DNA, 25 bp, Homo sapien
gggtctgcgtgcagatcatgttgtc

SEQ ID NO: 3121708 - DNA, 25 bp, Homo sapien
acagcccctgagaagagtcggcccc

SEQ ID NO: 3121709 - DNA, 25 bp, Homo sapien
cctgagaagagtcggccccgggaca

SEQ ID NO: 3121710 - DNA, 25 bp, Homo sapien
agcagggtctgcgtgcagatcatgt

SEQ ID NO: 3121711 - DNA, 25 bp, Homo sapien
agcccctttgaatggcctgagccac

SEQ ID NO: 3121712 - DNA, 25 bp, Homo sapien
tgtgcagcccctttgaatggcctga

SEQ ID NO: 3121713 - DNA, 25 bp, Homo sapien
cctccaccactttgtgctggggctg

SEQ ID NO: 3121714 - DNA, 25 bp, Homo sapien
cctttgaatggcctgagccacgggc

SEQ ID NO: 3121715 - DNA, 25 bp, Homo sapien
ggtgagtaaaaaggccctcgctcca

SEQ ID NO: 3121716 - DNA, 25 bp, Homo sapien
cagcaaggacagtgccgagtagagg

SEQ ID NO: 3121717 - DNA, 25 bp, Homo sapien
gggcaggcagaaaccccgagaccac

SEQ ID NO: 3121718 - DNA, 25 bp, Homo sapien
gggcaagcgtcgtacctggcaccca

SEQ ID NO: 3121719 - DNA, 25 bp, Homo sapien
ttcaaccaggaggtaaccaaatcta

SEQ ID NO: 3121720 - DNA, 25 bp, Homo sapien
ggaaacagaggtgcctggctcactt

SEQ ID NO: 3121721 - DNA, 25 bp, Homo sapien
aaatgccgaaaaccagcgattgtgg

SEQ ID NO: 3121722 - DNA, 25 bp, Homo sapien
cagcttgggtgtgacgagttgcctc

SEQ ID NO: 3121723 - DNA, 25 bp, Homo sapien
gcttctgctcatggtccaaggctgt

SEQ ID NO: 3121724 - DNA, 25 bp, Homo sapien
cggccgtgtcctcctcctggcgtgg

SEQ ID NO: 3121725 - DNA, 25 bp, Homo sapien
tgtgccttgctctcggcggccgtgt

SEQ ID NO: 3121726 - DNA, 25 bp, Homo sapien
caagaactcgaggttgtgccttgct

SEQ ID NO: 3121727 - DNA, 25 bp, Homo sapien
aggttgtgccttgctctcggcggcc

SEQ ID NO: 3121728 - DNA, 25 bp, Homo sapien
cccaggctgctagcacaggtggaag

SEQ ID NO: 3121729 - DNA, 25 bp, Homo sapien
tccttcctccggccagagtggaggc

SEQ ID NO: 3121730 - DNA, 25 bp, Homo sapien
cacgaagtctagctccggacaaaag

SEQ ID NO: 3121731 - DNA, 25 bp, Homo sapien
caaaagctgttagaggcccaggctg

SEQ ID NO: 3121732 - DNA, 25 bp, Homo sapien
tgattctatagaaaaccatttacca

SEQ ID NO: 3121733 - DNA, 25 bp, Homo sapien
gagctgaggcggatttccccagaga

SEQ ID NO: 3121734 - DNA, 25 bp, Homo sapien
tattgggaatgagctgaggcggatt

SEQ ID NO: 3121735 - DNA, 25 bp, Homo sapien
ggaatgagctgaggcggatttcccc

SEQ ID NO: 3121736 - DNA, 25 bp, Homo sapien
atttattgggaatgagctgaggcgg

SEQ ID NO: 3121737 - DNA, 25 bp, Homo sapien
tataaaaaaagcagctgagtgcggt

SEQ ID NO: 3121738 - DNA, 25 bp, Homo sapien
gagtgcggtggttcaaaatgctgca

SEQ ID NO: 3121739 - DNA, 25 bp, Homo sapien
aaatcggctggttgtggtgatgcac

SEQ ID NO: 3121740 - DNA, 25 bp, Homo sapien
aggctgacgcaggagcccaggaatt

SEQ ID NO: 3121741 - DNA, 25 bp, Homo sapien
gggctgcgggctggccggcacacac

SEQ ID NO: 3121742 - DNA, 25 bp, Homo sapien
gggctggccggcacacaccgtacat

SEQ ID NO: 3121743 - DNA, 25 bp, Homo sapien
agacacacagccagtgggcagagga

SEQ ID NO: 3121744 - DNA, 25 bp, Homo sapien
gggagcccctgagcagacacacagc

SEQ ID NO: 3121745 - DNA, 25 bp, Homo sapien
gggggtgcatcttgtcccttgacca

SEQ ID NO: 3121746 - DNA, 25 bp, Homo sapien
cagagggggtgcatcttgtcccttg

SEQ ID NO: 3121747 - DNA, 25 bp, Homo sapien
gcatcttgtcccttgaccaggccat

SEQ ID NO: 3121748 - DNA, 25 bp, Homo sapien
ggtgcatcttgtcccttgaccaggc

SEQ ID NO: 3121749 - DNA, 25 bp, Homo sapien
gcccggcgcgaggtggaaggaagct

SEQ ID NO: 3121750 - DNA, 25 bp, Homo sapien
tgtcgggtcgcgctgttccggtgcc

SEQ ID NO: 3121751 - DNA, 25 bp, Homo sapien
tgcccttctgacacggctgtccgtt

SEQ ID NO: 3121752 - DNA, 25 bp, Homo sapien
tgggtgggacgagaccaaagttctg

SEQ ID NO: 3121753 - DNA, 25 bp, Homo sapien
actccgccgtgtccaggacggcgag

SEQ ID NO: 3121754 - DNA, 25 bp, Homo sapien
cgagcgtagagttatcgatggctcc

SEQ ID NO: 3121755 - DNA, 25 bp, Homo sapien
tcgatcgaggccgagcgtagagtta

SEQ ID NO: 3121756 - DNA, 25 bp, Homo sapien
ggagccggagcgagtcgatcgaggc

SEQ ID NO: 3121757 - DNA, 25 bp, Homo sapien
ccggtgaccgcccttgctccgtcct

SEQ ID NO: 3121758 - DNA, 25 bp, Homo sapien
cggcccctggctcgcggcctccgta

SEQ ID NO: 3121759 - DNA, 25 bp, Homo sapien
aaagggcgcagtctggctggacccc

SEQ ID NO: 3121760 - DNA, 25 bp, Homo sapien
ggccggcttcccctggccgtgctct

SEQ ID NO: 3121761 - DNA, 25 bp, Homo sapien
tgcgcgtgcgcaaggcggcggatgg

SEQ ID NO: 3121762 - DNA, 25 bp, Homo sapien
gcatgcgtagcaggccagcggcagg

SEQ ID NO: 3121763 - DNA, 25 bp, Homo sapien
gggagtcacgcgcgggcgccactct

SEQ ID NO: 3121764 - DNA, 25 bp, Homo sapien
cgagcgctgcggctgcgcatgcgta

SEQ ID NO: 3121765 - DNA, 25 bp, Homo sapien
tccagggcgcgtgctccatccccgc

SEQ ID NO: 3121766 - DNA, 25 bp, Homo sapien
gggctccagggcgcgtgctccatcc

SEQ ID NO: 3121767 - DNA, 25 bp, Homo sapien
agggcgcgtgctccatccccgcccc

SEQ ID NO: 3121768 - DNA, 25 bp, Homo sapien
gctccagggcgcgtgctccatcccc

SEQ ID NO: 3121769 - DNA, 25 bp, Homo sapien
gtagattatagacccacaaggcgct

SEQ ID NO: 3121770 - DNA, 25 bp, Homo sapien
tttagagttgggacaagaagcgcag

SEQ ID NO: 3121771 - DNA, 25 bp, Homo sapien
caaggcgctgccgaatggcgcttat

SEQ ID NO: 3121772 - DNA, 25 bp, Homo sapien
caggtaggttcagggacacgcgtca

SEQ ID NO: 3121773 - DNA, 25 bp, Homo sapien
ctgaacggcaggggtcaaaggtcag

SEQ ID NO: 3121774 - DNA, 25 bp, Homo sapien
cggcaggggtcaaaggtcagagcat

SEQ ID NO: 3121775 - DNA, 25 bp, Homo sapien
gaacggcaggggtcaaaggtcagag

SEQ ID NO: 3121776 - DNA, 25 bp, Homo sapien
acggcaggggtcaaaggtcagagca

SEQ ID NO: 3121777 - DNA, 25 bp, Homo sapien
gcgcacggtgtggtcgtagcctgca

SEQ ID NO: 3121778 - DNA, 25 bp, Homo sapien
gaccgggtcactgcccaccgtgcct

SEQ ID NO: 3121779 - DNA, 25 bp, Homo sapien
tccgggtgcagatgccgctgtgggc

SEQ ID NO: 3121780 - DNA, 25 bp, Homo sapien
cgtccgggtgcagatgccgctgtgg

SEQ ID NO: 3121781 - DNA, 25 bp, Homo sapien
cccagcgccgccctgcccgccccgg

SEQ ID NO: 3121782 - DNA, 25 bp, Homo sapien
tccccccagcgccgccctgcccgcc

SEQ ID NO: 3121783 - DNA, 25 bp, Homo sapien
agcgccgccctgcccgccccgggtg

SEQ ID NO: 3121784 - DNA, 25 bp, Homo sapien
cagcgccgccctgcccgccccgggt

SEQ ID NO: 3121785 - DNA, 25 bp, Homo sapien
atcatgctgcggtccggtgtgacct

SEQ ID NO: 3121786 - DNA, 25 bp, Homo sapien
gcagcaatcatgctgcggtccggtg

SEQ ID NO: 3121787 - DNA, 25 bp, Homo sapien
agcaatcatgctgcggtccggtgtg

SEQ ID NO: 3121788 - DNA, 25 bp, Homo sapien
caatcatgctgcggtccggtgtgac

SEQ ID NO: 3121789 - DNA, 25 bp, Homo sapien
gtgctgaggtcgacccaccagagct

SEQ ID NO: 3121790 - DNA, 25 bp, Homo sapien
ctgaggtcgacccaccagagctcag

SEQ ID NO: 3121791 - DNA, 25 bp, Homo sapien
gaggtcgacccaccagagctcagga

SEQ ID NO: 3121792 - DNA, 25 bp, Homo sapien
gctgtgctgaggtcgacccaccaga

SEQ ID NO: 3121793 - DNA, 25 bp, Homo sapien
agggttattggagttgagatcatac

SEQ ID NO: 3121794 - DNA, 25 bp, Homo sapien
gggttattggagttgagatcataca

SEQ ID NO: 3121795 - DNA, 25 bp, Homo sapien
ggttattggagttgagatcatacat

SEQ ID NO: 3121796 - DNA, 25 bp, Homo sapien
gaagcccacagacgcgatgttcttg

SEQ ID NO: 3121797 - DNA, 25 bp, Homo sapien
cgtgtacatccagcggccgtcttcg

SEQ ID NO: 3121798 - DNA, 25 bp, Homo sapien
ggccgtcttcgtggaagcccacaga

SEQ ID NO: 3121799 - DNA, 25 bp, Homo sapien
gatgttcttgttgacgccgtcgtag

SEQ ID NO: 3121800 - DNA, 25 bp, Homo sapien
ttctctcagtaagtcgcccacagga

SEQ ID NO: 3121801 - DNA, 25 bp, Homo sapien
aggactcgcgctctgatgcaattca

SEQ ID NO: 3121802 - DNA, 25 bp, Homo sapien
aaatacttgggacgcagggccctct

SEQ ID NO: 3121803 - DNA, 25 bp, Homo sapien
ctggctccgggctcaaggcaggact

SEQ ID NO: 3121804 - DNA, 25 bp, Homo sapien
tgttggtgccctacccagatggcct

SEQ ID NO: 3121805 - DNA, 25 bp, Homo sapien
ctgggcttgttggtgccctacccag

SEQ ID NO: 3121806 - DNA, 25 bp, Homo sapien
cttgttggtgccctacccagatggc

SEQ ID NO: 3121807 - DNA, 25 bp, Homo sapien
tggtgccctacccagatggcctcgg

SEQ ID NO: 3121808 - DNA, 25 bp, Homo sapien
tgcaggcacacgcagttaatgggtg

SEQ ID NO: 3121809 - DNA, 25 bp, Homo sapien
tcacctggaagatccgctggcactg

SEQ ID NO: 3121810 - DNA, 25 bp, Homo sapien
cacgcagttaatgggtgcgttcacc

SEQ ID NO: 3121811 - DNA, 25 bp, Homo sapien
taatgggtgcgttcacctggaagat

SEQ ID NO: 3121812 - DNA, 25 bp, Homo sapien
tctgttttcaagtcccagatgtgga

SEQ ID NO: 3121813 - DNA, 25 bp, Homo sapien
cagatgtggatagccccgctctggt

SEQ ID NO: 3121814 - DNA, 25 bp, Homo sapien
ggtgctattgacagctgccatgtag

SEQ ID NO: 3121815 - DNA, 25 bp, Homo sapien
agacctcgggctcagggatcagctg

SEQ ID NO: 3121816 - DNA, 25 bp, Homo sapien
aagcctcagagagtgtgtcagccgt

SEQ ID NO: 3121817 - DNA, 25 bp, Homo sapien
gcatccaagagagaacgtgtcaggg

SEQ ID NO: 3121818 - DNA, 25 bp, Homo sapien
ctagaagcatccaagagagaacgtg

SEQ ID NO: 3121819 - DNA, 25 bp, Homo sapien
cagaaacaagggtgactgggaccag

SEQ ID NO: 3121820 - DNA, 25 bp, Homo sapien
caaaggccagcagaagggaaatccg

SEQ ID NO: 3121821 - DNA, 25 bp, Homo sapien
caagtgatgcactgggattaaatga

SEQ ID NO: 3121822 - DNA, 25 bp, Homo sapien
ccgggtctcctcaggggaatgacgc

SEQ ID NO: 3121823 - DNA, 25 bp, Homo sapien
acgccacagcagcctacgggcgagg

SEQ ID NO: 3121824 - DNA, 25 bp, Homo sapien
tggccaacggaagtagacaggagaa

SEQ ID NO: 3121825 - DNA, 25 bp, Homo sapien
aagaacaggaggccacgcctggcca

SEQ ID NO: 3121826 - DNA, 25 bp, Homo sapien
gatgccgatggccaacggaagtaga

SEQ ID NO: 3121827 - DNA, 25 bp, Homo sapien
ctggaggatgccgatggccaacgga

SEQ ID NO: 3121828 - DNA, 25 bp, Homo sapien
gcctggccccaagcaagggccacac

SEQ ID NO: 3121829 - DNA, 25 bp, Homo sapien
tgggggccaactgtgcatggggacc

SEQ ID NO: 3121830 - DNA, 25 bp, Homo sapien
cctcaggtctgagacacagggaagg

SEQ ID NO: 3121831 - DNA, 25 bp, Homo sapien
cgtcacggagggcccaaggcctcag

SEQ ID NO: 3121832 - DNA, 25 bp, Homo sapien
ctgaagcgacactgcagggcgtagc

SEQ ID NO: 3121833 - DNA, 25 bp, Homo sapien
cgtgtgggcagggatcttagtcttg

SEQ ID NO: 3121834 - DNA, 25 bp, Homo sapien
ccccgtcagattccagacatagcag

SEQ ID NO: 3121835 - DNA, 25 bp, Homo sapien
gctgggtcacctcgtcaccaatgcc

SEQ ID NO: 3121836 - DNA, 25 bp, Homo sapien
gggtgggcatggggcgtgtccagca

SEQ ID NO: 3121837 - DNA, 25 bp, Homo sapien
tgggcatggggcgtgtccagcagca

SEQ ID NO: 3121838 - DNA, 25 bp, Homo sapien
ccaggcaggtcccctcccgggccag

SEQ ID NO: 3121839 - DNA, 25 bp, Homo sapien
cagcagcagccactccatccagcag

SEQ ID NO: 3121840 - DNA, 25 bp, Homo sapien
cacgtctgatcagccgagcaggtgg

SEQ ID NO: 3121841 - DNA, 25 bp, Homo sapien
tcagggagaagttggacgtcctcca

SEQ ID NO: 3121842 - DNA, 25 bp, Homo sapien
ccggggttgccgctcttgatgctca

SEQ ID NO: 3121843 - DNA, 25 bp, Homo sapien
cagtgacgatgtactgggagtcccc

SEQ ID NO: 3121844 - DNA, 25 bp, Homo sapien
ctaagagcgcaggtgcaggccaagc

SEQ ID NO: 3121845 - DNA, 25 bp, Homo sapien
ggctctggaggccagcgccgggggc

SEQ ID NO: 3121846 - DNA, 25 bp, Homo sapien
tgcaggccaagcaggcggccccagc

SEQ ID NO: 3121847 - DNA, 25 bp, Homo sapien
agcagaggggaagctgcagccgagg

SEQ ID NO: 3121848 - DNA, 25 bp, Homo sapien
gcccagcacactgtcattgaaggcc

SEQ ID NO: 3121849 - DNA, 25 bp, Homo sapien
gagccgggccaggttgtccgaggaa

SEQ ID NO: 3121850 - DNA, 25 bp, Homo sapien
acacaccagagccgggccaggttgt

SEQ ID NO: 3121851 - DNA, 25 bp, Homo sapien
ggtggccgccatactctctcttgat

SEQ ID NO: 3121852 - DNA, 25 bp, Homo sapien
ttgggtcgagctctgtcacatctgg

SEQ ID NO: 3121853 - DNA, 25 bp, Homo sapien
tgacctgggtgctgcatgggtccct

SEQ ID NO: 3121854 - DNA, 25 bp, Homo sapien
tgctggcagggactaataaaccctt

SEQ ID NO: 3121855 - DNA, 25 bp, Homo sapien
tgttctctatggaccgaggccctga

SEQ ID NO: 3121856 - DNA, 25 bp, Homo sapien
cttctcaacaggtccaagaggcttg

SEQ ID NO: 3121857 - DNA, 25 bp, Homo sapien
caaaccatcctggtggacgtggccc

SEQ ID NO: 3121858 - DNA, 25 bp, Homo sapien
aggtctgcttcctccgcctgatgga

SEQ ID NO: 3121859 - DNA, 25 bp, Homo sapien
cggagcccttggagattcacggcac

SEQ ID NO: 3121860 - DNA, 25 bp, Homo sapien
atgacccttctgaccctgatgcacg

SEQ ID NO: 3121861 - DNA, 25 bp, Homo sapien
ctgatgcacgcccaggtgaagacca

SEQ ID NO: 3121862 - DNA, 25 bp, Homo sapien
gcccaactctgggagtcaaggataa

SEQ ID NO: 3121863 - DNA, 25 bp, Homo sapien
tctgagtttcccctggccaaggctg

SEQ ID NO: 3121864 - DNA, 25 bp, Homo sapien
gcgcatttccgcagcgagcgcttca

SEQ ID NO: 3121865 - DNA, 25 bp, Homo sapien
taggctgaccactcgcttccaatgg

SEQ ID NO: 3121866 - DNA, 25 bp, Homo sapien
tcccaaggccggtagccaatgatcg

SEQ ID NO: 3121867 - DNA, 25 bp, Homo sapien
gagcgcttcactccgaatgccggtt

SEQ ID NO: 3121868 - DNA, 25 bp, Homo sapien
tcgcaacgcgccgcaggaagatggc

SEQ ID NO: 3121869 - DNA, 25 bp, Homo sapien
tacgaccatgtcgtcataacaacgg

SEQ ID NO: 3121870 - DNA, 25 bp, Homo sapien
ggaagatggcggatttacgaccatg

SEQ ID NO: 3121871 - DNA, 25 bp, Homo sapien
atgtcgtcataacaacgggccgcgc

SEQ ID NO: 3121872 - DNA, 25 bp, Homo sapien
ttctgccgtatgagcggccgtcacc

SEQ ID NO: 3121873 - DNA, 25 bp, Homo sapien
ggcttctgccgtatgagcggccgtc

SEQ ID NO: 3121874 - DNA, 25 bp, Homo sapien
gcctgggcttctgccgtatgagcgg

SEQ ID NO: 3121875 - DNA, 25 bp, Homo sapien
gccaccgccgcaactgcaccctcgc

SEQ ID NO: 3121876 - DNA, 25 bp, Homo sapien
gctgtgagggtcccgcgagatccgc

SEQ ID NO: 3121877 - DNA, 25 bp, Homo sapien
gtcccgcgagatccgcgaggtgtct

SEQ ID NO: 3121878 - DNA, 25 bp, Homo sapien
gcagctcgggccatccgggcctctg

SEQ ID NO: 3121879 - DNA, 25 bp, Homo sapien
gtctgggagggtcggtcgagcccgc

SEQ ID NO: 3121880 - DNA, 25 bp, Homo sapien
ccgcaggagaggcccgtgagggtcg

SEQ ID NO: 3121881 - DNA, 25 bp, Homo sapien
caggagaggcccgtgagggtcgcag

SEQ ID NO: 3121882 - DNA, 25 bp, Homo sapien
agaggcccgtgagggtcgcagcaaa

SEQ ID NO: 3121883 - DNA, 25 bp, Homo sapien
gagaggcccgtgagggtcgcagcaa

SEQ ID NO: 3121884 - DNA, 25 bp, Homo sapien
gttcccaaggttgagcccgtcacca

SEQ ID NO: 3121885 - DNA, 25 bp, Homo sapien
ttcccaaggttgagcccgtcaccat

SEQ ID NO: 3121886 - DNA, 25 bp, Homo sapien
tggttcccaaggttgagcccgtcac

SEQ ID NO: 3121887 - DNA, 25 bp, Homo sapien
ctggttcccaaggttgagcccgtca

SEQ ID NO: 3121888 - DNA, 25 bp, Homo sapien
ggtacagcccctatcctctgcaggt

SEQ ID NO: 3121889 - DNA, 25 bp, Homo sapien
acactcgggcccaaaacaaggtcat

SEQ ID NO: 3121890 - DNA, 25 bp, Homo sapien
tgacagcacgcttaggctgcaggga

SEQ ID NO: 3121891 - DNA, 25 bp, Homo sapien
acaaggtcatcccaaggtacagccc

SEQ ID NO: 3121892 - DNA, 25 bp, Homo sapien
tgcaacgagcctgctgtcagcaggg

SEQ ID NO: 3121893 - DNA, 25 bp, Homo sapien
gcaacgagcctgctgtcagcagggc

SEQ ID NO: 3121894 - DNA, 25 bp, Homo sapien
ctgcaacgagcctgctgtcagcagg

SEQ ID NO: 3121895 - DNA, 25 bp, Homo sapien
ggcagcggccgcatctgtgcacatc

SEQ ID NO: 3121896 - DNA, 25 bp, Homo sapien
cctccaaggcggtgaactctgcctg

SEQ ID NO: 3121897 - DNA, 25 bp, Homo sapien
agcggccgcatctgtgcacatcgtc

SEQ ID NO: 3121898 - DNA, 25 bp, Homo sapien
aaaatcctccaaggcggtgaactct

SEQ ID NO: 3121899 - DNA, 25 bp, Homo sapien
tccaccacgatgtgggccacagtga

SEQ ID NO: 3121900 - DNA, 25 bp, Homo sapien
cctccaccacgatgtgggccacagt

SEQ ID NO: 3121901 - DNA, 25 bp, Homo sapien
ccaccacgatgtgggccacagtgat

SEQ ID NO: 3121902 - DNA, 25 bp, Homo sapien
gaaggtctatcaggccagcgattca

SEQ ID NO: 3121903 - DNA, 25 bp, Homo sapien
aaagctgacgggagagagcacagcc

SEQ ID NO: 3121904 - DNA, 25 bp, Homo sapien
tctcgggagagacgagcatacaggc

SEQ ID NO: 3121905 - DNA, 25 bp, Homo sapien
cagcgattcatggaagtcggcttac

SEQ ID NO: 3121906 - DNA, 25 bp, Homo sapien
tgggcgagtgggccattctggtggg

SEQ ID NO: 3121907 - DNA, 25 bp, Homo sapien
ctgggcgagtgggccattctggtgg

SEQ ID NO: 3121908 - DNA, 25 bp, Homo sapien
gcgggagagtcccgtccaccctgta

SEQ ID NO: 3121909 - DNA, 25 bp, Homo sapien
aggcgggagagtcccgtccaccctg

SEQ ID NO: 3121910 - DNA, 25 bp, Homo sapien
ggcattgcacgctcataaaagcccc

SEQ ID NO: 3121911 - DNA, 25 bp, Homo sapien
agtcctggcattgcacgctcataaa

SEQ ID NO: 3121912 - DNA, 25 bp, Homo sapien
agtagccatcaaagagtcctggcat

SEQ ID NO: 3121913 - DNA, 25 bp, Homo sapien
ggaccagtgtagcaatcaccactcc

SEQ ID NO: 3121914 - DNA, 25 bp, Homo sapien
ttgaaggtcttgtggcacagcgcac

SEQ ID NO: 3121915 - DNA, 25 bp, Homo sapien
gatgacctctttgatgtgcccacca

SEQ ID NO: 3121916 - DNA, 25 bp, Homo sapien
tcagcagccacgatgacctctttga

SEQ ID NO: 3121917 - DNA, 25 bp, Homo sapien
catagcggccatccttgttcaccag

SEQ ID NO: 3121918 - DNA, 25 bp, Homo sapien
cgtgtgccgccggtggtgccggatg

SEQ ID NO: 3121919 - DNA, 25 bp, Homo sapien
cggtggtgccggatgagtgagccct

SEQ ID NO: 3121920 - DNA, 25 bp, Homo sapien
gcttgcactcgtggtccttgcggct

SEQ ID NO: 3121921 - DNA, 25 bp, Homo sapien
acagagcttgcactcgtggtccttg

SEQ ID NO: 3121922 - DNA, 25 bp, Homo sapien
accatcggggtgctaccgggctcca

SEQ ID NO: 3121923 - DNA, 25 bp, Homo sapien
cccagggccaaccatcggggtgcta

SEQ ID NO: 3121924 - DNA, 25 bp, Homo sapien
ccaaccatcggggtgctaccgggct

SEQ ID NO: 3121925 - DNA, 25 bp, Homo sapien
cagggccaaccatcggggtgctacc

SEQ ID NO: 3121926 - DNA, 25 bp, Homo sapien
cagagagaacctagtcagccccggg

SEQ ID NO: 3121927 - DNA, 25 bp, Homo sapien
gcagagagaacctagtcagccccgg

SEQ ID NO: 3121928 - DNA, 25 bp, Homo sapien
agtgcacccgactcccggaagctct

SEQ ID NO: 3121929 - DNA, 25 bp, Homo sapien
cactgaagcggattttctctgtgca

SEQ ID NO: 3121930 - DNA, 25 bp, Homo sapien
gagagacttgaggtgccgggtcagt

SEQ ID NO: 3121931 - DNA, 25 bp, Homo sapien
ccttgctcacactgaagcggatttt

SEQ ID NO: 3121932 - DNA, 25 bp, Homo sapien
cccagtggcggctgcgtccacagcc

SEQ ID NO: 3121933 - DNA, 25 bp, Homo sapien
ggaccaggcagctgcccgcaccatg

SEQ ID NO: 3121934 - DNA, 25 bp, Homo sapien
agtggcggctgcgtccacagccagc

SEQ ID NO: 3121935 - DNA, 25 bp, Homo sapien
aggcagctgcccgcaccatgctgac

SEQ ID NO: 3121936 - DNA, 25 bp, Homo sapien
atgatgtggctgtccccaagccggc

SEQ ID NO: 3121937 - DNA, 25 bp, Homo sapien
tgtggctgtccccaagccggcagct

SEQ ID NO: 3121938 - DNA, 25 bp, Homo sapien
tcaccgatgatgtggctgtccccaa

SEQ ID NO: 3121939 - DNA, 25 bp, Homo sapien
ctgtcaccgatgatgtggctgtccc

SEQ ID NO: 3121940 - DNA, 25 bp, Homo sapien
caccaggtgaatcacgggtgaagtc

SEQ ID NO: 3121941 - DNA, 25 bp, Homo sapien
ggccagggctttcatgcccagggac

SEQ ID NO: 3121942 - DNA, 25 bp, Homo sapien
tgcatctggacgtggacttcgtgga

SEQ ID NO: 3121943 - DNA, 25 bp, Homo sapien
gacttcgtggatgacggtgcccttg

SEQ ID NO: 3121944 - DNA, 25 bp, Homo sapien
aggagccttgtgcaaaccctcagac

SEQ ID NO: 3121945 - DNA, 25 bp, Homo sapien
ctccctgtgggaagcccagccctcg

SEQ ID NO: 3121946 - DNA, 25 bp, Homo sapien
agacgcacgccaggagccttgtgca

SEQ ID NO: 3121947 - DNA, 25 bp, Homo sapien
aacaaagactggcaccgagcaggca

SEQ ID NO: 3121948 - DNA, 25 bp, Homo sapien
ggttctcacggctgccctcgctgga

SEQ ID NO: 3121949 - DNA, 25 bp, Homo sapien
atgccggagttctgcatggcctggt

SEQ ID NO: 3121950 - DNA, 25 bp, Homo sapien
cccagcagcgcgctcaaggacgatg

SEQ ID NO: 3121951 - DNA, 25 bp, Homo sapien
tgcacttccagtaccggcagctgcg

SEQ ID NO: 3121952 - DNA, 25 bp, Homo sapien
aacagatcaatggacaaagtcactg

SEQ ID NO: 3121953 - DNA, 25 bp, Homo sapien
ctggcagtaccaagaacacaaccat

SEQ ID NO: 3121954 - DNA, 25 bp, Homo sapien
tgtgccctggcagtaccaagaacac

SEQ ID NO: 3121955 - DNA, 25 bp, Homo sapien
gccctggcagtaccaagaacacaac

SEQ ID NO: 3121956 - DNA, 25 bp, Homo sapien
ctgtgccctggcagtaccaagaaca

SEQ ID NO: 3121957 - DNA, 25 bp, Homo sapien
tgggcaccgctgaggcctcgctggc

SEQ ID NO: 3121958 - DNA, 25 bp, Homo sapien
catgggtgggtcctgggcaccgctg

SEQ ID NO: 3121959 - DNA, 25 bp, Homo sapien
ggcaccgctgaggcctcgctggcca

SEQ ID NO: 3121960 - DNA, 25 bp, Homo sapien
tgggtgggtcctgggcaccgctgag

SEQ ID NO: 3121961 - DNA, 25 bp, Homo sapien
ccagggtggctgctgtcgggaaggt

SEQ ID NO: 3121962 - DNA, 25 bp, Homo sapien
ctgctgtcgggaaggtctcactgca

SEQ ID NO: 3121963 - DNA, 25 bp, Homo sapien
cggtgtggcccctcttgtgggcctc

SEQ ID NO: 3121964 - DNA, 25 bp, Homo sapien
cctcttgtgggcctccagggtggct

SEQ ID NO: 3121965 - DNA, 25 bp, Homo sapien
ggaagcggcgctcacgcacgtgcac

SEQ ID NO: 3121966 - DNA, 25 bp, Homo sapien
ggccacgcacatgggcaatggtctt

SEQ ID NO: 3121967 - DNA, 25 bp, Homo sapien
tggtgcttcttgagcaggtaggcct

SEQ ID NO: 3121968 - DNA, 25 bp, Homo sapien
caatggtcttgtagagcttcccgca

SEQ ID NO: 3121969 - DNA, 25 bp, Homo sapien
gaactggcacacgtgcggcttctcc

SEQ ID NO: 3121970 - DNA, 25 bp, Homo sapien
cttctctcggaagccacggctgcag

SEQ ID NO: 3121971 - DNA, 25 bp, Homo sapien
tctcgcctgtgtggtgtcgcacgtg

SEQ ID NO: 3121972 - DNA, 25 bp, Homo sapien
cacggccgcacttgtagcacttgaa

SEQ ID NO: 3121973 - DNA, 25 bp, Homo sapien
agacaccagcaactcctccacctcc

SEQ ID NO: 3121974 - DNA, 25 bp, Homo sapien
cctcagacaccagcaactcctccac

SEQ ID NO: 3121975 - DNA, 25 bp, Homo sapien
acaccagcaactcctccacctccag

SEQ ID NO: 3121976 - DNA, 25 bp, Homo sapien
tcagacaccagcaactcctccacct

SEQ ID NO: 3121977 - DNA, 25 bp, Homo sapien
cgggtcttccgtgaggacggtggtg

SEQ ID NO: 3121978 - DNA, 25 bp, Homo sapien
tgtgtgcgggtcttccgtgaggacg

SEQ ID NO: 3121979 - DNA, 25 bp, Homo sapien
actgtgtgcgggtcttccgtgagga

SEQ ID NO: 3121980 - DNA, 25 bp, Homo sapien
tgtgcgggtcttccgtgaggacggt

SEQ ID NO: 3121981 - DNA, 25 bp, Homo sapien
tgtcagctaccacggacgagaactc

SEQ ID NO: 3121982 - DNA, 25 bp, Homo sapien
tgggtgtcagctaccacggacgaga

SEQ ID NO: 3121983 - DNA, 25 bp, Homo sapien
tgatatactcctgggtgtcagctac

SEQ ID NO: 3121984 - DNA, 25 bp, Homo sapien
ctcgatgatatactcctgggtgtca

SEQ ID NO: 3121985 - DNA, 25 bp, Homo sapien
agatgggcagaaggacagaggtcag

SEQ ID NO: 3121986 - DNA, 25 bp, Homo sapien
gatgggcagaaggacagaggtcagc

SEQ ID NO: 3121987 - DNA, 25 bp, Homo sapien
atgggcagaaggacagaggtcagcc

SEQ ID NO: 3121988 - DNA, 25 bp, Homo sapien
tgggtgccctcgatgatctccgtgg

SEQ ID NO: 3121989 - DNA, 25 bp, Homo sapien
tcgatgatctccgtggcctcactgg

SEQ ID NO: 3121990 - DNA, 25 bp, Homo sapien
gcctcactggtctccgcatcgtccg

SEQ ID NO: 3121991 - DNA, 25 bp, Homo sapien
gatgatctccgtggcctcactggtc

SEQ ID NO: 3121992 - DNA, 25 bp, Homo sapien
cagcaagagcggctgtgccagggag

SEQ ID NO: 3121993 - DNA, 25 bp, Homo sapien
tcagcaagagcggctgtgccaggga

SEQ ID NO: 3121994 - DNA, 25 bp, Homo sapien
gctcagcaagagcggctgtgccagg

SEQ ID NO: 3121995 - DNA, 25 bp, Homo sapien
ctcagcaagagcggctgtgccaggg

SEQ ID NO: 3121996 - DNA, 25 bp, Homo sapien
ctagcctggtgcacgatctgctgca

SEQ ID NO: 3121997 - DNA, 25 bp, Homo sapien
tctgcacgatgatctggtggccggc

SEQ ID NO: 3121998 - DNA, 25 bp, Homo sapien
tcctcgtccatggtgacgttctgca

SEQ ID NO: 3121999 - DNA, 25 bp, Homo sapien
tgatgacaccatggtcacagtggcc

SEQ ID NO: 3122000 - DNA, 25 bp, Homo sapien
gaaactcttatgtacactgtccgtc

SEQ ID NO: 3122001 - DNA, 25 bp, Homo sapien
gcaacaagaaactcttatgtacact

SEQ ID NO: 3122002 - DNA, 25 bp, Homo sapien
tcttatgtacactgtccgtcttggg

SEQ ID NO: 3122003 - DNA, 25 bp, Homo sapien
actgtccgtcttggggcgcctccat

SEQ ID NO: 3122004 - DNA, 25 bp, Homo sapien
ccctcgactcagctgggtgcctgat

SEQ ID NO: 3122005 - DNA, 25 bp, Homo sapien
gggaggtagacggtcagccacatcc

SEQ ID NO: 3122006 - DNA, 25 bp, Homo sapien
tgcctgagccggttctggtgcccca

SEQ ID NO: 3122007 - DNA, 25 bp, Homo sapien
tgttcttgtcctcgcccctagaaat

SEQ ID NO: 3122008 - DNA, 25 bp, Homo sapien
tccaggctgcgggcgtgtccgacac

SEQ ID NO: 3122009 - DNA, 25 bp, Homo sapien
ctctggcaccaaggcaggggccggt

SEQ ID NO: 3122010 - DNA, 25 bp, Homo sapien
ctgcgggcgtgtccgacacaggact

SEQ ID NO: 3122011 - DNA, 25 bp, Homo sapien
ctctggcagtagctctggcaccaag

SEQ ID NO: 3122012 - DNA, 25 bp, Homo sapien
gggctctcagggaccgctgccttct

SEQ ID NO: 3122013 - DNA, 25 bp, Homo sapien
tgccttctcactgcgcgggaagctg

SEQ ID NO: 3122014 - DNA, 25 bp, Homo sapien
ttgacggccagtgcgacgcggaatc

SEQ ID NO: 3122015 - DNA, 25 bp, Homo sapien
ggaatccgcccctgcgttctgcagg

SEQ ID NO: 3122016 - DNA, 25 bp, Homo sapien
cactttgctgtcaccgaagctctga

SEQ ID NO: 3122017 - DNA, 25 bp, Homo sapien
ttcgcgatgatgctgccgcaagcgg

SEQ ID NO: 3122018 - DNA, 25 bp, Homo sapien
caagcggggtccgacactttgctgt

SEQ ID NO: 3122019 - DNA, 25 bp, Homo sapien
aatgttgaaggctccgatgcgaagc

SEQ ID NO: 3122020 - DNA, 25 bp, Homo sapien
acacggcgctgaggtctgggtctcg

SEQ ID NO: 3122021 - DNA, 25 bp, Homo sapien
gatctgctccatgagcgcggacacg

SEQ ID NO: 3122022 - DNA, 25 bp, Homo sapien
cagcgcgaggtcatagccagccagg

SEQ ID NO: 3122023 - DNA, 25 bp, Homo sapien
gtctgggtctcgcacctcctgcacc

SEQ ID NO: 3122024 - DNA, 25 bp, Homo sapien
aaagctgtactcgtgctcggacacg

SEQ ID NO: 3122025 - DNA, 25 bp, Homo sapien
tacatctccttgtactggtcccggc

SEQ ID NO: 3122026 - DNA, 25 bp, Homo sapien
gtacacgaacaggtacatctccttg

SEQ ID NO: 3122027 - DNA, 25 bp, Homo sapien
ctcacaaagctgtactcgtgctcgg

SEQ ID NO: 3122028 - DNA, 25 bp, Homo sapien
taggtgtccacgaccgacaccgcgt

SEQ ID NO: 3122029 - DNA, 25 bp, Homo sapien
ggccgagaacttgaccacgaagggc

SEQ ID NO: 3122030 - DNA, 25 bp, Homo sapien
ccacgaagggctcgcggctgaagac

SEQ ID NO: 3122031 - DNA, 25 bp, Homo sapien
tctgggtacaggtaggtgtccacga

SEQ ID NO: 3122032 - DNA, 25 bp, Homo sapien
ggcgtcagagctcggcgggagggga

SEQ ID NO: 3122033 - DNA, 25 bp, Homo sapien
ggggcgtcagagctcggcgggaggg

SEQ ID NO: 3122034 - DNA, 25 bp, Homo sapien
gtgggggcgtcagagctcggcggga

SEQ ID NO: 3122035 - DNA, 25 bp, Homo sapien
aggggtgggggcgtcagagctcggc

SEQ ID NO: 3122036 - DNA, 25 bp, Homo sapien
tacacgtcgtagagcgcgtcgatct

SEQ ID NO: 3122037 - DNA, 25 bp, Homo sapien
tcgatctccgccacggcttgatgcg

SEQ ID NO: 3122038 - DNA, 25 bp, Homo sapien
cacttgtcgatcacgtccaggtaca

SEQ ID NO: 3122039 - DNA, 25 bp, Homo sapien
cgtgcagcgggatcagcaccaggtt

SEQ ID NO: 3122040 - DNA, 25 bp, Homo sapien
catagctgcagtcggcgttgaagtc

SEQ ID NO: 3122041 - DNA, 25 bp, Homo sapien
cacatagctgcagtcggcgttgaag

SEQ ID NO: 3122042 - DNA, 25 bp, Homo sapien
gctgcagtcggcgttgaagtcgccc

SEQ ID NO: 3122043 - DNA, 25 bp, Homo sapien
tgcagtcggcgttgaagtcgcccag

SEQ ID NO: 3122044 - DNA, 25 bp, Homo sapien
tgtcggcgctgtcagggatgagcca

SEQ ID NO: 3122045 - DNA, 25 bp, Homo sapien
gagccacttgaagacctcactgctc

SEQ ID NO: 3122046 - DNA, 25 bp, Homo sapien
tcctcagacggatggcggcccagtc

SEQ ID NO: 3122047 - DNA, 25 bp, Homo sapien
actgctcctcagacggatggcggcc

SEQ ID NO: 3122048 - DNA, 25 bp, Homo sapien
cgccacaggccacaatgcggtcgta

SEQ ID NO: 3122049 - DNA, 25 bp, Homo sapien
ctggaagtcgtgcacggtggccgac

SEQ ID NO: 3122050 - DNA, 25 bp, Homo sapien
tcgtaggcgcagtctgagttgccca

SEQ ID NO: 3122051 - DNA, 25 bp, Homo sapien
caggccgaattcctcctggaagtcg

SEQ ID NO: 3122052 - DNA, 25 bp, Homo sapien
gggcggtggggacccaagaccagca

SEQ ID NO: 3122053 - DNA, 25 bp, Homo sapien
ctgcctgcgtgcgcccgggcggtgg

SEQ ID NO: 3122054 - DNA, 25 bp, Homo sapien
ctccctgctgcctgcgtgcgcccgg

SEQ ID NO: 3122055 - DNA, 25 bp, Homo sapien
ggcggtggggacccaagaccagcac

SEQ ID NO: 3122056 - DNA, 25 bp, Homo sapien
cagggtccttggaaacgagccctgg

SEQ ID NO: 3122057 - DNA, 25 bp, Homo sapien
ggtccttggaaacgagccctggtgc

SEQ ID NO: 3122058 - DNA, 25 bp, Homo sapien
cttggaaacgagccctggtgcaggg

SEQ ID NO: 3122059 - DNA, 25 bp, Homo sapien
gtccttggaaacgagccctggtgca

SEQ ID NO: 3122060 - DNA, 25 bp, Homo sapien
gaaagtggtcgctgatggcaagagc

SEQ ID NO: 3122061 - DNA, 25 bp, Homo sapien
actggaaagtggtcgctgatggcaa

SEQ ID NO: 3122062 - DNA, 25 bp, Homo sapien
ccactggaaagtggtcgctgatggc

SEQ ID NO: 3122063 - DNA, 25 bp, Homo sapien
ctccactggaaagtggtcgctgatg

SEQ ID NO: 3122064 - DNA, 25 bp, Homo sapien
tgcaggtggcatgccccagccaggc

SEQ ID NO: 3122065 - DNA, 25 bp, Homo sapien
ggccactgttgggccattcctcaga

SEQ ID NO: 3122066 - DNA, 25 bp, Homo sapien
tggctgccaccctgaaggggccact

SEQ ID NO: 3122067 - DNA, 25 bp, Homo sapien
actgttgggccattcctcagagcca

SEQ ID NO: 3122068 - DNA, 25 bp, Homo sapien
ggcccgaccgggagcagctcattta

SEQ ID NO: 3122069 - DNA, 25 bp, Homo sapien
catgaggtcgctggatgcagcccgt

SEQ ID NO: 3122070 - DNA, 25 bp, Homo sapien
gagcagcacatcacgtgtccatggc

SEQ ID NO: 3122071 - DNA, 25 bp, Homo sapien
agctcatttattgagcagacatctg

SEQ ID NO: 3122072 - DNA, 25 bp, Homo sapien
taaggaaggacagaggcctgggagc

SEQ ID NO: 3122073 - DNA, 25 bp, Homo sapien
ctaaggaaggacagaggcctgggag

SEQ ID NO: 3122074 - DNA, 25 bp, Homo sapien
aaggacagaggcctgggagccaagc

SEQ ID NO: 3122075 - DNA, 25 bp, Homo sapien
aggaaggacagaggcctgggagcca

SEQ ID NO: 3122076 - DNA, 25 bp, Homo sapien
gaggatgagcaaggagcatccctga

SEQ ID NO: 3122077 - DNA, 25 bp, Homo sapien
gggcagccacgtcccaccaggacat

SEQ ID NO: 3122078 - DNA, 25 bp, Homo sapien
tgtttgtagtttccacagaggatga

SEQ ID NO: 3122079 - DNA, 25 bp, Homo sapien
ccacagaggatgagcaaggagcatc

SEQ ID NO: 3122080 - DNA, 25 bp, Homo sapien
cagaagctcatctcacggtgctgga

SEQ ID NO: 3122081 - DNA, 25 bp, Homo sapien
ctgtaacaacgcagcacagaccggg

SEQ ID NO: 3122082 - DNA, 25 bp, Homo sapien
cgctgtcagcgatagcccagtggat

SEQ ID NO: 3122083 - DNA, 25 bp, Homo sapien
tgtggacatcgtgacttcgggagac

SEQ ID NO: 3122084 - DNA, 25 bp, Homo sapien
tgtacatgttgccaagataacctga

SEQ ID NO: 3122085 - DNA, 25 bp, Homo sapien
caatgtacatgttgccaagataacc

SEQ ID NO: 3122086 - DNA, 25 bp, Homo sapien
tgttgccaagataacctgaaagacc

SEQ ID NO: 3122087 - DNA, 25 bp, Homo sapien
tgccaagataacctgaaagaccacc

SEQ ID NO: 3122088 - DNA, 25 bp, Homo sapien
tacatgttgccaagataacctgaaa

SEQ ID NO: 3122089 - DNA, 25 bp, Homo sapien
taaaagcaatgtacatgttgccaag

SEQ ID NO: 3122090 - DNA, 25 bp, Homo sapien
ctctacacaacaaagtacaaacaca

SEQ ID NO: 3122091 - DNA, 25 bp, Homo sapien
caattcttccactctacacaacaaa

SEQ ID NO: 3122092 - DNA, 25 bp, Homo sapien
aacacaatgtcatctaaaatgctac

SEQ ID NO: 3122093 - DNA, 25 bp, Homo sapien
caaacacaatgtcatctaaaatgct

SEQ ID NO: 3122094 - DNA, 25 bp, Homo sapien
aaacacaatgtcatctaaaatgcta

SEQ ID NO: 3122095 - DNA, 25 bp, Homo sapien
acacaatgtcatctaaaatgctaca

SEQ ID NO: 3122096 - DNA, 25 bp, Homo sapien
tagcattttagatgacattgtgttt

SEQ ID NO: 3122097 - DNA, 25 bp, Homo sapien
agcattttagatgacattgtgtttg

SEQ ID NO: 3122098 - DNA, 25 bp, Homo sapien
gtagcattttagatgacattgtgtt

SEQ ID NO: 3122099 - DNA, 25 bp, Homo sapien
tgtagcattttagatgacattgtgt

SEQ ID NO: 3122100 - DNA, 25 bp, Homo sapien
tgtgtttgtactttgttgtgtagag

SEQ ID NO: 3122101 - DNA, 25 bp, Homo sapien
tttgttgtgtagagtggaagaattg

SEQ ID NO: 3122102 - DNA, 25 bp, Homo sapien
ggtggtctttcaggttatcttggca

SEQ ID NO: 3122103 - DNA, 25 bp, Homo sapien
tttcaggttatcttggcaacatgta

SEQ ID NO: 3122104 - DNA, 25 bp, Homo sapien
tcaggttatcttggcaacatgtaca

SEQ ID NO: 3122105 - DNA, 25 bp, Homo sapien
tcttggcaacatgtacattgctttt

SEQ ID NO: 3122106 - DNA, 25 bp, Homo sapien
ggttatcttggcaacatgtacattg

SEQ ID NO: 3122107 - DNA, 25 bp, Homo sapien
ggtctttcaggttatcttggcaaca

SEQ ID NO: 3122108 - DNA, 25 bp, Homo sapien
atgaacggcaggcacaaccatggct

SEQ ID NO: 3122109 - DNA, 25 bp, Homo sapien
tgtgcatcggtgcacggacagacag

SEQ ID NO: 3122110 - DNA, 25 bp, Homo sapien
caggcacaaccatggctgcgtgatg

SEQ ID NO: 3122111 - DNA, 25 bp, Homo sapien
tgatgactccgcagagctggctctc

SEQ ID NO: 3122112 - DNA, 25 bp, Homo sapien
tcgccaatttcagagtacagtggtg

SEQ ID NO: 3122113 - DNA, 25 bp, Homo sapien
gaaccacgagcagcaactaccatgg

SEQ ID NO: 3122114 - DNA, 25 bp, Homo sapien
ctgtctgtccgtgcaccgatgcaca

SEQ ID NO: 3122115 - DNA, 25 bp, Homo sapien
cagccatggttgtgcctgccgttca

SEQ ID NO: 3122116 - DNA, 25 bp, Homo sapien
tcatcacgcagccatggttgtgcct

SEQ ID NO: 3122117 - DNA, 25 bp, Homo sapien
gagagccagctctgcggagtcatca

SEQ ID NO: 3122118 - DNA, 25 bp, Homo sapien
accactgtactctgaaattggcgag

SEQ ID NO: 3122119 - DNA, 25 bp, Homo sapien
catggtagttgctgctcgtggttct

SEQ ID NO: 3122120 - DNA, 25 bp, Homo sapien
tgccagagtcaagggtttgctttcc

SEQ ID NO: 3122121 - DNA, 25 bp, Homo sapien
tctagccagaaaaccggagggaatc

SEQ ID NO: 3122122 - DNA, 25 bp, Homo sapien
agcatccaaaccaacagcacttctg

SEQ ID NO: 3122123 - DNA, 25 bp, Homo sapien
cactgaactgactcttagaaaccgg

SEQ ID NO: 3122124 - DNA, 25 bp, Homo sapien
gagggaatcttgacaggcacacagc

SEQ ID NO: 3122125 - DNA, 25 bp, Homo sapien
tcttagaaaccggaaacggatgagc

SEQ ID NO: 3122126 - DNA, 25 bp, Homo sapien
tccggtttctaagagtcagttcagt

SEQ ID NO: 3122127 - DNA, 25 bp, Homo sapien
ccccgatgacctgggatggtggcca

SEQ ID NO: 3122128 - DNA, 25 bp, Homo sapien
gattccctccggttttctggctaga

SEQ ID NO: 3122129 - DNA, 25 bp, Homo sapien
ggaaagcaaacccttgactctggca

SEQ ID NO: 3122130 - DNA, 25 bp, Homo sapien
gctgtgtgcctgtcaagattccctc

SEQ ID NO: 3122131 - DNA, 25 bp, Homo sapien
ccaaaggaagaccagtaggaaagca

SEQ ID NO: 3122132 - DNA, 25 bp, Homo sapien
cctgtttatcgggaggagttggagc

SEQ ID NO: 3122133 - DNA, 25 bp, Homo sapien
cttcagtggcctgtttatcgggagg

SEQ ID NO: 3122134 - DNA, 25 bp, Homo sapien
ttcagtggcctgtttatcgggagga

SEQ ID NO: 3122135 - DNA, 25 bp, Homo sapien
gcttcagtggcctgtttatcgggag

SEQ ID NO: 3122136 - DNA, 25 bp, Homo sapien
gggaccgtgatctccggcgcacggg

SEQ ID NO: 3122137 - DNA, 25 bp, Homo sapien
gggacctgcgcctcggggagcggga

SEQ ID NO: 3122138 - DNA, 25 bp, Homo sapien
gtcccgctccccgaggcgcaggtcc

SEQ ID NO: 3122139 - DNA, 25 bp, Homo sapien
ccccgtgcgccggagatcacggtcc

SEQ ID NO: 3122140 - DNA, 25 bp, Homo sapien
ctcccgataaacaggccactgaagc

SEQ ID NO: 3122141 - DNA, 25 bp, Homo sapien
tgcgccggagatcacggtccccggg

SEQ ID NO: 3122142 - DNA, 25 bp, Homo sapien
gctccaactcctcccgataaacagg

SEQ ID NO: 3122143 - DNA, 25 bp, Homo sapien
tcctcccgataaacaggccactgaa

SEQ ID NO: 3122144 - DNA, 25 bp, Homo sapien
aaaccacatcagagtagctcaggct

SEQ ID NO: 3122145 - DNA, 25 bp, Homo sapien
gaaaccacatcagagtagctcaggc

SEQ ID NO: 3122146 - DNA, 25 bp, Homo sapien
gcctgagctactctgatgtggtttc

SEQ ID NO: 3122147 - DNA, 25 bp, Homo sapien
agcctgagctactctgatgtggttt

SEQ ID NO: 3122148 - DNA, 25 bp, Homo sapien
gggctcacaggtctagtggtctcct

SEQ ID NO: 3122149 - DNA, 25 bp, Homo sapien
cctgggctcacaggtctagtggtct

SEQ ID NO: 3122150 - DNA, 25 bp, Homo sapien
tgcacctgggctcacaggtctagtg

SEQ ID NO: 3122151 - DNA, 25 bp, Homo sapien
tgggctcacaggtctagtggtctcc

SEQ ID NO: 3122152 - DNA, 25 bp, Homo sapien
cacctgggctcacaggtctagtggt

SEQ ID NO: 3122153 - DNA, 25 bp, Homo sapien
cctgcacctgggctcacaggtctag

SEQ ID NO: 3122154 - DNA, 25 bp, Homo sapien
ctagacctgtgagcccaggtgcagg

SEQ ID NO: 3122155 - DNA, 25 bp, Homo sapien
cactagacctgtgagcccaggtgca

SEQ ID NO: 3122156 - DNA, 25 bp, Homo sapien
aggagaccactagacctgtgagccc

SEQ ID NO: 3122157 - DNA, 25 bp, Homo sapien
gagaccactagacctgtgagcccag

SEQ ID NO: 3122158 - DNA, 25 bp, Homo sapien
ggagaccactagacctgtgagccca

SEQ ID NO: 3122159 - DNA, 25 bp, Homo sapien
gaccactagacctgtgagcccaggt

SEQ ID NO: 3122160 - DNA, 25 bp, Homo sapien
tacaaattgtttaccttctcctcat

SEQ ID NO: 3122161 - DNA, 25 bp, Homo sapien
agacctgcgccacataggcggtggt

SEQ ID NO: 3122162 - DNA, 25 bp, Homo sapien
tctcctcatccgtgggggagacctg

SEQ ID NO: 3122163 - DNA, 25 bp, Homo sapien
cagcacggcggtggcagtgatctcc

SEQ ID NO: 3122164 - DNA, 25 bp, Homo sapien
ccacataggcggtggtggcaacatt

SEQ ID NO: 3122165 - DNA, 25 bp, Homo sapien
tccactgaaactacaaattgtttac

SEQ ID NO: 3122166 - DNA, 25 bp, Homo sapien
accaccgcctatgtggcgcaggtct

SEQ ID NO: 3122167 - DNA, 25 bp, Homo sapien
tgaggagaaggtaaacaatttgtag

SEQ ID NO: 3122168 - DNA, 25 bp, Homo sapien
aatgttgccaccaccgcctatgtgg

SEQ ID NO: 3122169 - DNA, 25 bp, Homo sapien
ggagatcactgccaccgccgtgctg

SEQ ID NO: 3122170 - DNA, 25 bp, Homo sapien
gtaaacaatttgtagtttcagtgga

SEQ ID NO: 3122171 - DNA, 25 bp, Homo sapien
caggtctcccccacggatgaggaga

SEQ ID NO: 3122172 - DNA, 25 bp, Homo sapien
catctaccctagacaatgcatgcca

SEQ ID NO: 3122173 - DNA, 25 bp, Homo sapien
caatgacaatgtaagataatcacag

SEQ ID NO: 3122174 - DNA, 25 bp, Homo sapien
taccctagacaatgcatgccacagt

SEQ ID NO: 3122175 - DNA, 25 bp, Homo sapien
gggacaatgacaatgtaagataatc

SEQ ID NO: 3122176 - DNA, 25 bp, Homo sapien
gcatgccacagtgaaagacaggcct

SEQ ID NO: 3122177 - DNA, 25 bp, Homo sapien
atctaacaagcatctaccctagaca

SEQ ID NO: 3122178 - DNA, 25 bp, Homo sapien
tgtctagggtagatgcttgttagat

SEQ ID NO: 3122179 - DNA, 25 bp, Homo sapien
ggcctgtctttcactgtggcatgca

SEQ ID NO: 3122180 - DNA, 25 bp, Homo sapien
catgcattgtctagggtagatgctt

SEQ ID NO: 3122181 - DNA, 25 bp, Homo sapien
ctgtgattatcttacattgtcattg

SEQ ID NO: 3122182 - DNA, 25 bp, Homo sapien
gattatcttacattgtcattgtccc

SEQ ID NO: 3122183 - DNA, 25 bp, Homo sapien
actgtggcatgcattgtctagggta

SEQ ID NO: 3122184 - DNA, 25 bp, Homo sapien
cagcactgactctataataatgaag

SEQ ID NO: 3122185 - DNA, 25 bp, Homo sapien
ctcaactacctttaaggcacatggg

SEQ ID NO: 3122186 - DNA, 25 bp, Homo sapien
ggagacagcatggactcactccatt

SEQ ID NO: 3122187 - DNA, 25 bp, Homo sapien
gactaactccggcatgtggctatgt

SEQ ID NO: 3122188 - DNA, 25 bp, Homo sapien
tagcccaaattagggatttcacagc

SEQ ID NO: 3122189 - DNA, 25 bp, Homo sapien
tgtagctgccagtaaaggccaaccc

SEQ ID NO: 3122190 - DNA, 25 bp, Homo sapien
gctgtgaaatccctaatttgggcta

SEQ ID NO: 3122191 - DNA, 25 bp, Homo sapien
gggttggcctttactggcagctaca

SEQ ID NO: 3122192 - DNA, 25 bp, Homo sapien
tgaatacatagccacatgccggagt

SEQ ID NO: 3122193 - DNA, 25 bp, Homo sapien
cattattatagagtcagtgctgtga

SEQ ID NO: 3122194 - DNA, 25 bp, Homo sapien
tagtccccatgtgccttaaaggtag

SEQ ID NO: 3122195 - DNA, 25 bp, Homo sapien
aatggagtgagtccatgctgtctcc

SEQ ID NO: 3122196 - DNA, 25 bp, Homo sapien
taacgaagaatacgtcaggacccat

SEQ ID NO: 3122197 - DNA, 25 bp, Homo sapien
gctgggatataagaaaagcccacca

SEQ ID NO: 3122198 - DNA, 25 bp, Homo sapien
tgtttggtgccccatgacgacaacc

SEQ ID NO: 3122199 - DNA, 25 bp, Homo sapien
gcagcaacctacttctatgtgtggc

SEQ ID NO: 3122200 - DNA, 25 bp, Homo sapien
cctcaagccctgtaaactgaagact

SEQ ID NO: 3122201 - DNA, 25 bp, Homo sapien
tgtggctgttgcatcctattacgtt

SEQ ID NO: 3122202 - DNA, 25 bp, Homo sapien
caagatgcacattaactgagtaggt

SEQ ID NO: 3122203 - DNA, 25 bp, Homo sapien
cacacatagaagtaggttgctgctg

SEQ ID NO: 3122204 - DNA, 25 bp, Homo sapien
tactcagacagtactaaaacacttg

SEQ ID NO: 3122205 - DNA, 25 bp, Homo sapien
taaatgggtcctgacgtattcttcg

SEQ ID NO: 3122206 - DNA, 25 bp, Homo sapien
gaaacgtaataggatgcaacagcca

SEQ ID NO: 3122207 - DNA, 25 bp, Homo sapien
tcttcagtttacagggcttgaggaa

SEQ ID NO: 3122208 - DNA, 25 bp, Homo sapien
catccatgtgcttcagcgccttctc

SEQ ID NO: 3122209 - DNA, 25 bp, Homo sapien
gagaaggcgctgaagcacatggatg

SEQ ID NO: 3122210 - DNA, 25 bp, Homo sapien
ttctcggcttcatctggattctcaa

SEQ ID NO: 3122211 - DNA, 25 bp, Homo sapien
tcagcgccttctcggcttcatctgg

SEQ ID NO: 3122212 - DNA, 25 bp, Homo sapien
attctcaaactctacgtacgcatag

SEQ ID NO: 3122213 - DNA, 25 bp, Homo sapien
tccatgtgcttcagcgccttctcgg

SEQ ID NO: 3122214 - DNA, 25 bp, Homo sapien
gtgcttcagcgccttctcggcttca

SEQ ID NO: 3122215 - DNA, 25 bp, Homo sapien
ggattctcaaactctacgtacgcat

SEQ ID NO: 3122216 - DNA, 25 bp, Homo sapien
gagaatccagatgaagccgagaagg

SEQ ID NO: 3122217 - DNA, 25 bp, Homo sapien
ctatgcgtacgtagagtttgagaat

SEQ ID NO: 3122218 - DNA, 25 bp, Homo sapien
cgtacgtagagtttgagaatccaga

SEQ ID NO: 3122219 - DNA, 25 bp, Homo sapien
tgaagccgagaaggcgctgaagcac

SEQ ID NO: 3122220 - DNA, 25 bp, Homo sapien
cagatgaagccgagaaggcgctgaa

SEQ ID NO: 3122221 - DNA, 25 bp, Homo sapien
cgagaaggcgctgaagcacatggat

SEQ ID NO: 3122222 - DNA, 25 bp, Homo sapien
cctgttgtcgtgtctgcgccgagaa

SEQ ID NO: 3122223 - DNA, 25 bp, Homo sapien
gccactgcttgagccagtgctggtg

SEQ ID NO: 3122224 - DNA, 25 bp, Homo sapien
aagtcgagctggaccgagacctgag

SEQ ID NO: 3122225 - DNA, 25 bp, Homo sapien
cgtgtctgcgccgagaaggacttgg

SEQ ID NO: 3122226 - DNA, 25 bp, Homo sapien
gggagcgcctcctgttgtcgtgtct

SEQ ID NO: 3122227 - DNA, 25 bp, Homo sapien
ctggaagtcgagctggaccgagacc

SEQ ID NO: 3122228 - DNA, 25 bp, Homo sapien
caagtccttctcggcgcagacacga

SEQ ID NO: 3122229 - DNA, 25 bp, Homo sapien
ggtctcggtccagctcgacttccag

SEQ ID NO: 3122230 - DNA, 25 bp, Homo sapien
caccagcactggctcaagcagtggc

SEQ ID NO: 3122231 - DNA, 25 bp, Homo sapien
ctcaggtctcggtccagctcgactt

SEQ ID NO: 3122232 - DNA, 25 bp, Homo sapien
ttctcggcgcagacacgacaacagg

SEQ ID NO: 3122233 - DNA, 25 bp, Homo sapien
cgcagacacgacaacaggaggcgct

SEQ ID NO: 3122234 - DNA, 25 bp, Homo sapien
tgcaatttacgccaaagagcagcct

SEQ ID NO: 3122235 - DNA, 25 bp, Homo sapien
cagaaggattacctagtgctggact

SEQ ID NO: 3122236 - DNA, 25 bp, Homo sapien
cccttctgaggtgttcaaagcagca

SEQ ID NO: 3122237 - DNA, 25 bp, Homo sapien
taaagagtgaacgaattggcaaggc

SEQ ID NO: 3122238 - DNA, 25 bp, Homo sapien
gcaatggcggcctcacttatctgaa

SEQ ID NO: 3122239 - DNA, 25 bp, Homo sapien
gattctgagaaacgatccctaatcg

SEQ ID NO: 3122240 - DNA, 25 bp, Homo sapien
aggctgctctttggcgtaaattgca

SEQ ID NO: 3122241 - DNA, 25 bp, Homo sapien
cgtaaattgcaatcgattagggatc

SEQ ID NO: 3122242 - DNA, 25 bp, Homo sapien
tgctgctttgaacacctcagaaggg

SEQ ID NO: 3122243 - DNA, 25 bp, Homo sapien
tagggatcgtttctcagaatcaagt

SEQ ID NO: 3122244 - DNA, 25 bp, Homo sapien
gagttcagataagtgaggccgccat

SEQ ID NO: 3122245 - DNA, 25 bp, Homo sapien
tactgctagggacccgcagaaaggg

SEQ ID NO: 3122246 - DNA, 25 bp, Homo sapien
gaaattgcgtgagagactgcctgcc

SEQ ID NO: 3122247 - DNA, 25 bp, Homo sapien
attactaattagttatgggccctat

SEQ ID NO: 3122248 - DNA, 25 bp, Homo sapien
actgcctgccatgtaagagtttagc

SEQ ID NO: 3122249 - DNA, 25 bp, Homo sapien
aactgtataactcgaccttcctgtg

SEQ ID NO: 3122250 - DNA, 25 bp, Homo sapien
cagaatgtgctcaaataacggtaac

SEQ ID NO: 3122251 - DNA, 25 bp, Homo sapien
tatttctagtaaggctctgcacaag

SEQ ID NO: 3122252 - DNA, 25 bp, Homo sapien
tggcaggcagtctctcacgcaattt

SEQ ID NO: 3122253 - DNA, 25 bp, Homo sapien
tgtgcagagccttactagaaatact

SEQ ID NO: 3122254 - DNA, 25 bp, Homo sapien
cacaggaaggtcgagttatacagtt

SEQ ID NO: 3122255 - DNA, 25 bp, Homo sapien
ttaccgttatttgagcacattctgc

SEQ ID NO: 3122256 - DNA, 25 bp, Homo sapien
gctaaactcttacatggcaggcagt

SEQ ID NO: 3122257 - DNA, 25 bp, Homo sapien
atagggcccataactaattagtaat

SEQ ID NO: 3122258 - DNA, 25 bp, Homo sapien
gccttgactctttaacgcttcctcg

SEQ ID NO: 3122259 - DNA, 25 bp, Homo sapien
cgcttcctcgctggcgcccattggg

SEQ ID NO: 3122260 - DNA, 25 bp, Homo sapien
gcgactcccacaaactgccttgact

SEQ ID NO: 3122261 - DNA, 25 bp, Homo sapien
gtccccagcgcgactcccacaaact

SEQ ID NO: 3122262 - DNA, 25 bp, Homo sapien
cgggcgcgcccttccattcgggtct

SEQ ID NO: 3122263 - DNA, 25 bp, Homo sapien
agaggcccgccgttgcaccccatct

SEQ ID NO: 3122264 - DNA, 25 bp, Homo sapien
tctcaagctcgtcgctcttcctgcc

SEQ ID NO: 3122265 - DNA, 25 bp, Homo sapien
gggtctcagcggcagtgtcacctcc

SEQ ID NO: 3122266 - DNA, 25 bp, Homo sapien
tgttggatgcttcggcttgaaggag

SEQ ID NO: 3122267 - DNA, 25 bp, Homo sapien
cacacctcacagacactggtgttgg

SEQ ID NO: 3122268 - DNA, 25 bp, Homo sapien
ctcgaggccaggctgtaggcaggca

SEQ ID NO: 3122269 - DNA, 25 bp, Homo sapien
gctccaaatggactagccgcagctg

SEQ ID NO: 3122270 - DNA, 25 bp, Homo sapien
catgaagtcgaaaaatcaagaccat

SEQ ID NO: 3122271 - DNA, 25 bp, Homo sapien
cacctctgtgttcaaggaagtgctt

SEQ ID NO: 3122272 - DNA, 25 bp, Homo sapien
tggttcacgcctccctcctcatggt

SEQ ID NO: 3122273 - DNA, 25 bp, Homo sapien
gaggaggcagtccagcactcggtca

SEQ ID NO: 3122274 - DNA, 25 bp, Homo sapien
tgaatacgttgtgaccatccagaaa

SEQ ID NO: 3122275 - DNA, 25 bp, Homo sapien
tggccaggctcgaagcagtctctgt

SEQ ID NO: 3122276 - DNA, 25 bp, Homo sapien
ccttagggcatggtagtcaccgcga

SEQ ID NO: 3122277 - DNA, 25 bp, Homo sapien
ccaggttgaactgtagcgaggcccc

SEQ ID NO: 3122278 - DNA, 25 bp, Homo sapien
tttccgcacatgaaggacgctgagc

SEQ ID NO: 3122279 - DNA, 25 bp, Homo sapien
gacgctgagcgggaaggactcctct

SEQ ID NO: 3122280 - DNA, 25 bp, Homo sapien
tcaaggaggcttttccgcacatgaa

SEQ ID NO: 3122281 - DNA, 25 bp, Homo sapien
gcctgcagttgtagcgagtggacca

SEQ ID NO: 3122282 - DNA, 25 bp, Homo sapien
tcccgggactagtgaagagagcctc

SEQ ID NO: 3122283 - DNA, 25 bp, Homo sapien
gctggagtcctgagtgtttaactta

SEQ ID NO: 3122284 - DNA, 25 bp, Homo sapien
cagaggcggcagctttaggagtggc

SEQ ID NO: 3122285 - DNA, 25 bp, Homo sapien
tccctttcctgactgtgtcccggga

SEQ ID NO: 3122286 - DNA, 25 bp, Homo sapien
gagggtagcacgagttgtttctaaa

SEQ ID NO: 3122287 - DNA, 25 bp, Homo sapien
ctcaactgggaaggcccaggtaaga

SEQ ID NO: 3122288 - DNA, 25 bp, Homo sapien
atgggagcccattttgacgtagtct

SEQ ID NO: 3122289 - DNA, 25 bp, Homo sapien
caggtaagatccctagtttgccatt

SEQ ID NO: 3122290 - DNA, 25 bp, Homo sapien
aagccggctccacgcttcagaaggg

SEQ ID NO: 3122291 - DNA, 25 bp, Homo sapien
tattcagatagtctgggcgctgcct

SEQ ID NO: 3122292 - DNA, 25 bp, Homo sapien
gaaatgcccgctgagtgagtagccg

SEQ ID NO: 3122293 - DNA, 25 bp, Homo sapien
gaaggcgcttggtgtctgtcgcaca

SEQ ID NO: 3122294 - DNA, 25 bp, Homo sapien
agccttgggcgtgtcccgcactgcg

SEQ ID NO: 3122295 - DNA, 25 bp, Homo sapien
gcggccacgcagctgtcagtgccgc

SEQ ID NO: 3122296 - DNA, 25 bp, Homo sapien
gtgccgctccctcagcgtcggctcc

SEQ ID NO: 3122297 - DNA, 25 bp, Homo sapien
gcagctgtcagtgccgccgccactg

SEQ ID NO: 3122298 - DNA, 25 bp, Homo sapien
ctccttaagtgagggcgactccgct

SEQ ID NO: 3122299 - DNA, 25 bp, Homo sapien
caaagtcgagtttccgggtgtgaag

SEQ ID NO: 3122300 - DNA, 25 bp, Homo sapien
cccaaggaaagacagtgcgtgagga

SEQ ID NO: 3122301 - DNA, 25 bp, Homo sapien
agagtcattcctgtcagaggccacc

SEQ ID NO: 3122302 - DNA, 25 bp, Homo sapien
gcccgcggcaactgtcggccccgcg

SEQ ID NO: 3122303 - DNA, 25 bp, Homo sapien
catcaggactcttgggggtgggcga

SEQ ID NO: 3122304 - DNA, 25 bp, Homo sapien
gtcgggtcgtggtgccggcggctgg

SEQ ID NO: 3122305 - DNA, 25 bp, Homo sapien
gaccacggacgcacctcactgtggt

SEQ ID NO: 3122306 - DNA, 25 bp, Homo sapien
ctgtaaggtcatccttcttccaaaa

SEQ ID NO: 3122307 - DNA, 25 bp, Homo sapien
ttgtctgtcttgatctgtaaggtca

SEQ ID NO: 3122308 - DNA, 25 bp, Homo sapien
taccctatcttccatctaaggtaaa

SEQ ID NO: 3122309 - DNA, 25 bp, Homo sapien
aaattcctaccctatcttccatcta

SEQ ID NO: 3122310 - DNA, 25 bp, Homo sapien
tagaccccgctttccaccattgtat

SEQ ID NO: 3122311 - DNA, 25 bp, Homo sapien
ttgtatcacattgatggagagtttt

SEQ ID NO: 3122312 - DNA, 25 bp, Homo sapien
tttccaaacacaggagagaggttca

SEQ ID NO: 3122313 - DNA, 25 bp, Homo sapien
gttccattgagcctagaccccgctt

SEQ ID NO: 3122314 - DNA, 25 bp, Homo sapien
gcttgggcaacagagcgagactcca

SEQ ID NO: 3122315 - DNA, 25 bp, Homo sapien
tcgctggaatccaggaggcaaaggt

SEQ ID NO: 3122316 - DNA, 25 bp, Homo sapien
cttgggcaacagagcgagactccat

SEQ ID NO: 3122317 - DNA, 25 bp, Homo sapien
ggcacaagaatcgctggaatccagg

SEQ ID NO: 3122318 - DNA, 25 bp, Homo sapien
gacagtgtttccttctcctgaatat

SEQ ID NO: 3122319 - DNA, 25 bp, Homo sapien
taatgctacttccttaaatacagag

SEQ ID NO: 3122320 - DNA, 25 bp, Homo sapien
tacctcggatagcagaaagttcctt

SEQ ID NO: 3122321 - DNA, 25 bp, Homo sapien
ttctcaggtgaaagcatctctaact

SEQ ID NO: 3122322 - DNA, 25 bp, Homo sapien
taactttctgaacaccgtcattttc

SEQ ID NO: 3122323 - DNA, 25 bp, Homo sapien
agaacacatgtggtgaatgctcttc

SEQ ID NO: 3122324 - DNA, 25 bp, Homo sapien
aagctaaatgtcaacccaaaacaga

SEQ ID NO: 3122325 - DNA, 25 bp, Homo sapien
gaacacatgtggtgaatgctcttcc

SEQ ID NO: 3122326 - DNA, 25 bp, Homo sapien
aaagctaaatgtcaacccaaaacag

SEQ ID NO: 3122327 - DNA, 25 bp, Homo sapien
ggactgctaccagagtcttccgttt

SEQ ID NO: 3122328 - DNA, 25 bp, Homo sapien
caggtctttttattggagcactact

SEQ ID NO: 3122329 - DNA, 25 bp, Homo sapien
tggagcactactaaaacgaagatac

SEQ ID NO: 3122330 - DNA, 25 bp, Homo sapien
tagcaatggcatcaagatttcaagg

SEQ ID NO: 3122331 - DNA, 25 bp, Homo sapien
ttttcaggaaaattgtagaagtctg

SEQ ID NO: 3122332 - DNA, 25 bp, Homo sapien
ggcaacaaactgatatcaattgcat

SEQ ID NO: 3122333 - DNA, 25 bp, Homo sapien
aattgtagaagtctggcaacaaact

SEQ ID NO: 3122334 - DNA, 25 bp, Homo sapien
caggaaaattgtagaagtctggcaa

SEQ ID NO: 3122335 - DNA, 25 bp, Homo sapien
tcaacatcaaagatctgttccacca

SEQ ID NO: 3122336 - DNA, 25 bp, Homo sapien
agccttcaatgtttcacttatagaa

SEQ ID NO: 3122337 - DNA, 25 bp, Homo sapien
tagaagggatataaactagttgaaa

SEQ ID NO: 3122338 - DNA, 25 bp, Homo sapien
caccatttcggtgacagccttcaat

SEQ ID NO: 3122339 - DNA, 25 bp, Homo sapien
ccaacatgaccagtgtgtgggagca

SEQ ID NO: 3122340 - DNA, 25 bp, Homo sapien
cacggagactggattagaatgggac

SEQ ID NO: 3122341 - DNA, 25 bp, Homo sapien
tgcaaaggccctattgggagaaaac

SEQ ID NO: 3122342 - DNA, 25 bp, Homo sapien
aatcactactgtaagaactctcggg

SEQ ID NO: 3122343 - DNA, 25 bp, Homo sapien
tgggatcatcaattatataacgttc

SEQ ID NO: 3122344 - DNA, 25 bp, Homo sapien
gctgtggtcaaaaacaattcctgcc

SEQ ID NO: 3122345 - DNA, 25 bp, Homo sapien
tataacgttcaaacaaagacactga

SEQ ID NO: 3122346 - DNA, 25 bp, Homo sapien
aagtggcaaagatccattgctgtca

SEQ ID NO: 3122347 - DNA, 25 bp, Homo sapien
aactgaagcgcaattgatacttaac

SEQ ID NO: 3122348 - DNA, 25 bp, Homo sapien
gtgcaccagccttctatgtcatctt

SEQ ID NO: 3122349 - DNA, 25 bp, Homo sapien
gaaagtaactgaagcgcaattgata

SEQ ID NO: 3122350 - DNA, 25 bp, Homo sapien
ctgaaagtaactgaagcgcaattga

SEQ ID NO: 3122351 - DNA, 25 bp, Homo sapien
gaagaacctgtcctcgatatagggt

SEQ ID NO: 3122352 - DNA, 25 bp, Homo sapien
cagcatactgtatggccaggaagcc

SEQ ID NO: 3122353 - DNA, 25 bp, Homo sapien
cattctgaaggactaggaagaacct

SEQ ID NO: 3122354 - DNA, 25 bp, Homo sapien
tgtgagcatggtaccacatgatggc

SEQ ID NO: 3122355 - DNA, 25 bp, Homo sapien
cttggaagttgcttggacacctaag

SEQ ID NO: 3122356 - DNA, 25 bp, Homo sapien
tgcttggacacctaagcaacctcct

SEQ ID NO: 3122357 - DNA, 25 bp, Homo sapien
gaggcatacacttgaagtatctggg

SEQ ID NO: 3122358 - DNA, 25 bp, Homo sapien
gtcccaggagaggcatacacttgaa

SEQ ID NO: 3122359 - DNA, 25 bp, Homo sapien
gtttgggttgggtcttagggcatca

SEQ ID NO: 3122360 - DNA, 25 bp, Homo sapien
tttgggttgggtcttagggcatcac

SEQ ID NO: 3122361 - DNA, 25 bp, Homo sapien
ctggaatatttcccatagtaatgac

SEQ ID NO: 3122362 - DNA, 25 bp, Homo sapien
atatttcccatagtaatgactcctc

SEQ ID NO: 3122363 - DNA, 25 bp, Homo sapien
gaatatttcccatagtaatgactcc

SEQ ID NO: 3122364 - DNA, 25 bp, Homo sapien
aatacaacttgcctactcctgggtc

SEQ ID NO: 3122365 - DNA, 25 bp, Homo sapien
gatgaaccaagcaacccagtgtaac

SEQ ID NO: 3122366 - DNA, 25 bp, Homo sapien
agagaatggtcatgaaagaaacagc

SEQ ID NO: 3122367 - DNA, 25 bp, Homo sapien
cagtgtaaccagctttccagtccca

SEQ ID NO: 3122368 - DNA, 25 bp, Homo sapien
cagaaatgaagaacgtgatgaacca

SEQ ID NO: 3122369 - DNA, 25 bp, Homo sapien
caaatatcagactagggtcactgtt

SEQ ID NO: 3122370 - DNA, 25 bp, Homo sapien
gaaaaacaaatatcagactagggtc

SEQ ID NO: 3122371 - DNA, 25 bp, Homo sapien
gactagggtcactgttcttaagcag

SEQ ID NO: 3122372 - DNA, 25 bp, Homo sapien
ttcttaagcagtgccacatttttca

SEQ ID NO: 3122373 - DNA, 25 bp, Homo sapien
cacgtatgaggagcatcagggctat

SEQ ID NO: 3122374 - DNA, 25 bp, Homo sapien
gcttcactattttgctgctcctcaa

SEQ ID NO: 3122375 - DNA, 25 bp, Homo sapien
tcagggctatggaggcagatgtggg

SEQ ID NO: 3122376 - DNA, 25 bp, Homo sapien
cagtggaaagagcatcagccacgta

SEQ ID NO: 3122377 - DNA, 25 bp, Homo sapien
cagtccagactaatggatgcttacg

SEQ ID NO: 3122378 - DNA, 25 bp, Homo sapien
ggtcaaagatgggacaagacttgaa

SEQ ID NO: 3122379 - DNA, 25 bp, Homo sapien
caaatcaccctctggttgttagatc

SEQ ID NO: 3122380 - DNA, 25 bp, Homo sapien
tgactgcttcccaattatttcctta

SEQ ID NO: 3122381 - DNA, 25 bp, Homo sapien
ttcagggcacttctgacgtgacagg

SEQ ID NO: 3122382 - DNA, 25 bp, Homo sapien
agcctgcgatgagggcgatgccgat

SEQ ID NO: 3122383 - DNA, 25 bp, Homo sapien
gaagcggctccgtgagttccacttg

SEQ ID NO: 3122384 - DNA, 25 bp, Homo sapien
gggcgatgccgatggagagcttgcg

SEQ ID NO: 3122385 - DNA, 25 bp, Homo sapien
acagaggccccaaagctggagatgc

SEQ ID NO: 3122386 - DNA, 25 bp, Homo sapien
agctctacctgcctcagttccaagt

SEQ ID NO: 3122387 - DNA, 25 bp, Homo sapien
gaggccccaaagctggagatgccca

SEQ ID NO: 3122388 - DNA, 25 bp, Homo sapien
tgcctcagttccaagtcagtaaata

SEQ ID NO: 3122389 - DNA, 25 bp, Homo sapien
tttgggacagctgtactggcatctg

SEQ ID NO: 3122390 - DNA, 25 bp, Homo sapien
gacagctgtactggcatctgccaac

SEQ ID NO: 3122391 - DNA, 25 bp, Homo sapien
tgtttgatgtttgggacagctgtac

SEQ ID NO: 3122392 - DNA, 25 bp, Homo sapien
atggatagagggatgtttgatgttt

SEQ ID NO: 3122393 - DNA, 25 bp, Homo sapien
gaaggtcctcgaatgaagatgttta

SEQ ID NO: 3122394 - DNA, 25 bp, Homo sapien
gatgtttaattctgtcaacaggaat

SEQ ID NO: 3122395 - DNA, 25 bp, Homo sapien
cccagtccgtattgagaaggtcctc

SEQ ID NO: 3122396 - DNA, 25 bp, Homo sapien
gtgtttggtttgattggcagcccag

SEQ ID NO: 3122397 - DNA, 25 bp, Homo sapien
tgatgatcaccagagggaccaggat

SEQ ID NO: 3122398 - DNA, 25 bp, Homo sapien
cttaacatgatgatcaccagaggga

SEQ ID NO: 3122399 - DNA, 25 bp, Homo sapien
taacatgatgatcaccagagggacc

SEQ ID NO: 3122400 - DNA, 25 bp, Homo sapien
catgatgatcaccagagggaccagg

SEQ ID NO: 3122401 - DNA, 25 bp, Homo sapien
aaagaaaggaacaatggtctgacca

SEQ ID NO: 3122402 - DNA, 25 bp, Homo sapien
aaggaacaatggtctgaccatatgt

SEQ ID NO: 3122403 - DNA, 25 bp, Homo sapien
gaaaggaacaatggtctgaccatat

SEQ ID NO: 3122404 - DNA, 25 bp, Homo sapien
ggaacaatggtctgaccatatgttt

SEQ ID NO: 3122405 - DNA, 25 bp, Homo sapien
acctccagaggaatctgtccctcaa

SEQ ID NO: 3122406 - DNA, 25 bp, Homo sapien
gaaagttgaggatccagcctggaat

SEQ ID NO: 3122407 - DNA, 25 bp, Homo sapien
aaacatatttgcaaagcgttctgaa

SEQ ID NO: 3122408 - DNA, 25 bp, Homo sapien
taggacctccagaggaatctgtccc

SEQ ID NO: 3122409 - DNA, 25 bp, Homo sapien
taacttcagagagcaccacgtggcc

SEQ ID NO: 3122410 - DNA, 25 bp, Homo sapien
acttcagagagcaccacgtggccca

SEQ ID NO: 3122411 - DNA, 25 bp, Homo sapien
ttctaacttcagagagcaccacgtg

SEQ ID NO: 3122412 - DNA, 25 bp, Homo sapien
tctaacttcagagagcaccacgtgg

SEQ ID NO: 3122413 - DNA, 25 bp, Homo sapien
gctgcggtaatggaagccctggcac

SEQ ID NO: 3122414 - DNA, 25 bp, Homo sapien
gttgaacagcgctgtcactatggtg

SEQ ID NO: 3122415 - DNA, 25 bp, Homo sapien
aaaggaagctgccactaagtagagc

SEQ ID NO: 3122416 - DNA, 25 bp, Homo sapien
caagagaaaattgtccaatagcgcc

SEQ ID NO: 3122417 - DNA, 25 bp, Homo sapien
atgaggtcccatagcagagtggaga

SEQ ID NO: 3122418 - DNA, 25 bp, Homo sapien
ccattgataaactggacaagcttgg

SEQ ID NO: 3122419 - DNA, 25 bp, Homo sapien
aagcttggccttaacgcgcctctct

SEQ ID NO: 3122420 - DNA, 25 bp, Homo sapien
gctagacaggaaagctaatccaaaa

SEQ ID NO: 3122421 - DNA, 25 bp, Homo sapien
ggagcacagccgcagcatgggctgc

SEQ ID NO: 3122422 - DNA, 25 bp, Homo sapien
caggagcacagccgcagcatgggct

SEQ ID NO: 3122423 - DNA, 25 bp, Homo sapien
tcaggagcacagccgcagcatgggc

SEQ ID NO: 3122424 - DNA, 25 bp, Homo sapien
agcacagccgcagcatgggctgcat

SEQ ID NO: 3122425 - DNA, 25 bp, Homo sapien
gattttgagattgttgcatagccta

SEQ ID NO: 3122426 - DNA, 25 bp, Homo sapien
caggcagtgccctggaagtattagg

SEQ ID NO: 3122427 - DNA, 25 bp, Homo sapien
aaggattttgagattgttgcatagc

SEQ ID NO: 3122428 - DNA, 25 bp, Homo sapien
tattaggaatgtataatccaaggat

SEQ ID NO: 3122429 - DNA, 25 bp, Homo sapien
acctctgtagttcagagttgtaata

SEQ ID NO: 3122430 - DNA, 25 bp, Homo sapien
tgtaatataagttggtgaaagccat

SEQ ID NO: 3122431 - DNA, 25 bp, Homo sapien
tcttgacactgcaaaacctctgtag

SEQ ID NO: 3122432 - DNA, 25 bp, Homo sapien
tcaggttcttgacactgcaaaacct

SEQ ID NO: 3122433 - DNA, 25 bp, Homo sapien
caagcctccaatgaggcaagggcct

SEQ ID NO: 3122434 - DNA, 25 bp, Homo sapien
aagcctccaatgaggcaagggcctg

SEQ ID NO: 3122435 - DNA, 25 bp, Homo sapien
gacagtaaccaatccaccgccatac

SEQ ID NO: 3122436 - DNA, 25 bp, Homo sapien
aggacagtaaccaatccaccgccat

SEQ ID NO: 3122437 - DNA, 25 bp, Homo sapien
tgaggacagtaaccaatccaccgcc

SEQ ID NO: 3122438 - DNA, 25 bp, Homo sapien
ggacagtaaccaatccaccgccata

SEQ ID NO: 3122439 - DNA, 25 bp, Homo sapien
ccgatctgggcatacatgaccagca

SEQ ID NO: 3122440 - DNA, 25 bp, Homo sapien
tctggtccacacaagcactgatggg

SEQ ID NO: 3122441 - DNA, 25 bp, Homo sapien
gaccagcttgttggcgtacatgtac

SEQ ID NO: 3122442 - DNA, 25 bp, Homo sapien
gactaaatcctcaagaatctggtcc

SEQ ID NO: 3122443 - DNA, 25 bp, Homo sapien
ccccaaccacctgcgcagtgacctc

SEQ ID NO: 3122444 - DNA, 25 bp, Homo sapien
aaccacctgcgcagtgacctcatgc

SEQ ID NO: 3122445 - DNA, 25 bp, Homo sapien
tgcgcagtgacctcatgcccagagc

SEQ ID NO: 3122446 - DNA, 25 bp, Homo sapien
acctgcgcagtgacctcatgcccag

SEQ ID NO: 3122447 - DNA, 25 bp, Homo sapien
cagggtgagcacacggccgacgagt

SEQ ID NO: 3122448 - DNA, 25 bp, Homo sapien
gagcacacggccgacgagtcttctt

SEQ ID NO: 3122449 - DNA, 25 bp, Homo sapien
ccgacgagtcttctttgagggtttg

SEQ ID NO: 3122450 - DNA, 25 bp, Homo sapien
tttgagggtttgaagtgttgagggc

SEQ ID NO: 3122451 - DNA, 25 bp, Homo sapien
ggctatccactcaggaaataacttg

SEQ ID NO: 3122452 - DNA, 25 bp, Homo sapien
gtccaccactttcacccagagctga

SEQ ID NO: 3122453 - DNA, 25 bp, Homo sapien
agagctgaattgtggcttgggctat

SEQ ID NO: 3122454 - DNA, 25 bp, Homo sapien
gggctttcagcaatgcagtccacca

SEQ ID NO: 3122455 - DNA, 25 bp, Homo sapien
ccttgccagactcgtgggcgtgtgc

SEQ ID NO: 3122456 - DNA, 25 bp, Homo sapien
gcattccagaacaggcgccgggcca

SEQ ID NO: 3122457 - DNA, 25 bp, Homo sapien
tgccagactcgtgggcgtgtgccac

SEQ ID NO: 3122458 - DNA, 25 bp, Homo sapien
ggccttgccagactcgtgggcgtgt

SEQ ID NO: 3122459 - DNA, 25 bp, Homo sapien
ttcactctgcaccttggcccgcagg

SEQ ID NO: 3122460 - DNA, 25 bp, Homo sapien
gtcaggtccacgaaggccttgaact

SEQ ID NO: 3122461 - DNA, 25 bp, Homo sapien
caggtccacgaaggccttgaactcc

SEQ ID NO: 3122462 - DNA, 25 bp, Homo sapien
tcaggtccacgaaggccttgaactc

SEQ ID NO: 3122463 - DNA, 25 bp, Homo sapien
agtgggggctgccggggccggcaca

SEQ ID NO: 3122464 - DNA, 25 bp, Homo sapien
gggggctgccggggccggcacacac

SEQ ID NO: 3122465 - DNA, 25 bp, Homo sapien
tgggggctgccggggccggcacaca

SEQ ID NO: 3122466 - DNA, 25 bp, Homo sapien
ccagtgggggctgccggggccggca

SEQ ID NO: 3122467 - DNA, 25 bp, Homo sapien
caaaaatgtgcgctcaacttcgccc

SEQ ID NO: 3122468 - DNA, 25 bp, Homo sapien
gtgcgctcaacttcgcccagctgag

SEQ ID NO: 3122469 - DNA, 25 bp, Homo sapien
gcggcccagcagatggtaatggacc

SEQ ID NO: 3122470 - DNA, 25 bp, Homo sapien
aggtcgcggcccagcagatggtaat

SEQ ID NO: 3122471 - DNA, 25 bp, Homo sapien
gaagctcaggaagacgtcctccatg

SEQ ID NO: 3122472 - DNA, 25 bp, Homo sapien
gacctgactgctgagtagttgtcca

SEQ ID NO: 3122473 - DNA, 25 bp, Homo sapien
tagttgtccagcatgtacttcttgg

SEQ ID NO: 3122474 - DNA, 25 bp, Homo sapien
tctgcttgctctcgttggtcttcgc

SEQ ID NO: 3122475 - DNA, 25 bp, Homo sapien
ttctagagaaggaagagcgcaagct

SEQ ID NO: 3122476 - DNA, 25 bp, Homo sapien
ttgcatgtgaccatgggagccagcc

SEQ ID NO: 3122477 - DNA, 25 bp, Homo sapien
tcctgctttccaagggatctgcaca

SEQ ID NO: 3122478 - DNA, 25 bp, Homo sapien
ggagtgcactggatggacaaaccat

SEQ ID NO: 3122479 - DNA, 25 bp, Homo sapien
cggcgaccggcatctgcggtgccag

SEQ ID NO: 3122480 - DNA, 25 bp, Homo sapien
cgggcttcgccgctgaccccggcga

SEQ ID NO: 3122481 - DNA, 25 bp, Homo sapien
cgaccggcatctgcggtgccagatg

SEQ ID NO: 3122482 - DNA, 25 bp, Homo sapien
gctgaccccggcgaccggcatctgc

SEQ ID NO: 3122483 - DNA, 25 bp, Homo sapien
gccgcgccaggacgcgaattcgaac

SEQ ID NO: 3122484 - DNA, 25 bp, Homo sapien
aattcgaacattggccgctgattgg

SEQ ID NO: 3122485 - DNA, 25 bp, Homo sapien
tgattggtggaacccgcgtggccgc

SEQ ID NO: 3122486 - DNA, 25 bp, Homo sapien
caggacgcgaattcgaacattggcc

SEQ ID NO: 3122487 - DNA, 25 bp, Homo sapien
gcgctcgcgtcgctgccgccggagc

SEQ ID NO: 3122488 - DNA, 25 bp, Homo sapien
tcgcgtcgctgccgccggagcccgc

SEQ ID NO: 3122489 - DNA, 25 bp, Homo sapien
cgccgcgctcgcgtcgctgccgccg

SEQ ID NO: 3122490 - DNA, 25 bp, Homo sapien
ccgcgctcgcgtcgctgccgccgga

SEQ ID NO: 3122491 - DNA, 25 bp, Homo sapien
accagcggacatcgccccgcactca

SEQ ID NO: 3122492 - DNA, 25 bp, Homo sapien
tgtggggcagaaaccagcggacatc

SEQ ID NO: 3122493 - DNA, 25 bp, Homo sapien
cagaaaccagcggacatcgccccgc

SEQ ID NO: 3122494 - DNA, 25 bp, Homo sapien
ggtgtggggcagaaaccagcggaca

SEQ ID NO: 3122495 - DNA, 25 bp, Homo sapien
tgcgcgggacgcgacatccgccccg

SEQ ID NO: 3122496 - DNA, 25 bp, Homo sapien
catccgccccgggttaaagagctcg

SEQ ID NO: 3122497 - DNA, 25 bp, Homo sapien
agagctcgagccagccctcttcagg

SEQ ID NO: 3122498 - DNA, 25 bp, Homo sapien
gttaaagagctcgagccagccctct

SEQ ID NO: 3122499 - DNA, 25 bp, Homo sapien
gctttccacagagctaggtccacgg

SEQ ID NO: 3122500 - DNA, 25 bp, Homo sapien
gcgctggtgtttggctccccgagac

SEQ ID NO: 3122501 - DNA, 25 bp, Homo sapien
ccggctccaggacagatactatgat

SEQ ID NO: 3122502 - DNA, 25 bp, Homo sapien
gataatagctgaaaccacagttcgt

SEQ ID NO: 3122503 - DNA, 25 bp, Homo sapien
cttattcttcgctttgtaggataac

SEQ ID NO: 3122504 - DNA, 25 bp, Homo sapien
aagagcacatcttcggggagactca

SEQ ID NO: 3122505 - DNA, 25 bp, Homo sapien
ccaggatgtcctctacagaaagcca

SEQ ID NO: 3122506 - DNA, 25 bp, Homo sapien
gagactcaagatggtcaggtttcgg

SEQ ID NO: 3122507 - DNA, 25 bp, Homo sapien
tccctcgccatcccaagtagttgag

SEQ ID NO: 3122508 - DNA, 25 bp, Homo sapien
ctcttgaggacgagaggcagatgta

SEQ ID NO: 3122509 - DNA, 25 bp, Homo sapien
ctttgagcagataaaagagcccaga

SEQ ID NO: 3122510 - DNA, 25 bp, Homo sapien
agcccagaaacgagtttctctgagg

SEQ ID NO: 3122511 - DNA, 25 bp, Homo sapien
ttcaggttccctggagacggccaca

SEQ ID NO: 3122512 - DNA, 25 bp, Homo sapien
cactggcgtggttgtccaccaggtc

SEQ ID NO: 3122513 - DNA, 25 bp, Homo sapien
aaagagcttcaggttccctggagac

SEQ ID NO: 3122514 - DNA, 25 bp, Homo sapien
cacacactggcgtggttgtccacca

SEQ ID NO: 3122515 - DNA, 25 bp, Homo sapien
gaggtaggctatgcccagcttcaca

SEQ ID NO: 3122516 - DNA, 25 bp, Homo sapien
ggccttcattgtagaggtaggctat

SEQ ID NO: 3122517 - DNA, 25 bp, Homo sapien
agcttcacagcagcttcgaaattcc

SEQ ID NO: 3122518 - DNA, 25 bp, Homo sapien
agcagcttcgaaattccccttttca

SEQ ID NO: 3122519 - DNA, 25 bp, Homo sapien
gtcagagtatcattagcaggtccct

SEQ ID NO: 3122520 - DNA, 25 bp, Homo sapien
caaagtcagagtatcattagcaggt

SEQ ID NO: 3122521 - DNA, 25 bp, Homo sapien
ctgcaaagtcagagtatcattagca

SEQ ID NO: 3122522 - DNA, 25 bp, Homo sapien
agtatcattagcaggtccctcagca

SEQ ID NO: 3122523 - DNA, 25 bp, Homo sapien
tctccccctacttcattaatgtcta

SEQ ID NO: 3122524 - DNA, 25 bp, Homo sapien
caggtgggtcattgtgatcaatgcc

SEQ ID NO: 3122525 - DNA, 25 bp, Homo sapien
tgatcaatgcccctgctgtggtcct

SEQ ID NO: 3122526 - DNA, 25 bp, Homo sapien
ttaatgtctagaacaggtgggtcat

SEQ ID NO: 3122527 - DNA, 25 bp, Homo sapien
gctcagcgagactgaagaagcgaga

SEQ ID NO: 3122528 - DNA, 25 bp, Homo sapien
tctcgtgaaccacggccttgcagca

SEQ ID NO: 3122529 - DNA, 25 bp, Homo sapien
cactctgccctgaggctctcgtgaa

SEQ ID NO: 3122530 - DNA, 25 bp, Homo sapien
tgaaaggtgcggcacccacattcag

SEQ ID NO: 3122531 - DNA, 25 bp, Homo sapien
cagctgtcagcacgtgtacccagaa

SEQ ID NO: 3122532 - DNA, 25 bp, Homo sapien
ccagctaatttccagatgcgttccc

SEQ ID NO: 3122533 - DNA, 25 bp, Homo sapien
ccttaggctactgactttccagggt

SEQ ID NO: 3122534 - DNA, 25 bp, Homo sapien
gatttgtgtcttgagctcccactgc

SEQ ID NO: 3122535 - DNA, 25 bp, Homo sapien
cccaagcagtgcaatatggatgctt

SEQ ID NO: 3122536 - DNA, 25 bp, Homo sapien
cagtgcaatatggatgctttgtgag

SEQ ID NO: 3122537 - DNA, 25 bp, Homo sapien
tcgaacagactcagcactctgccca

SEQ ID NO: 3122538 - DNA, 25 bp, Homo sapien
ctgcccaagcagtgcaatatggatg

SEQ ID NO: 3122539 - DNA, 25 bp, Homo sapien
cagcctcctcaaacaggtcatgggc

SEQ ID NO: 3122540 - DNA, 25 bp, Homo sapien
taggagctggtcagacatccctgat

SEQ ID NO: 3122541 - DNA, 25 bp, Homo sapien
tcctgtcgctttcccagaggaggta

SEQ ID NO: 3122542 - DNA, 25 bp, Homo sapien
agctggtcagacatccctgatgagc

SEQ ID NO: 3122543 - DNA, 25 bp, Homo sapien
gccacctcccttttgtggacagaac

SEQ ID NO: 3122544 - DNA, 25 bp, Homo sapien
cagcatcaactacgcctttgtccag

SEQ ID NO: 3122545 - DNA, 25 bp, Homo sapien
tggacagaaccgcatccaaggacca

SEQ ID NO: 3122546 - DNA, 25 bp, Homo sapien
ctgagagaccgggagcagcaagagc

SEQ ID NO: 3122547 - DNA, 25 bp, Homo sapien
gggggtaccaagaatagccgactga

SEQ ID NO: 3122548 - DNA, 25 bp, Homo sapien
tgggggtaccaagaatagccgactg

SEQ ID NO: 3122549 - DNA, 25 bp, Homo sapien
ggggtaccaagaatagccgactgac

SEQ ID NO: 3122550 - DNA, 25 bp, Homo sapien
cagcgtagtccctgagttttcggaa

SEQ ID NO: 3122551 - DNA, 25 bp, Homo sapien
agttttcggaagctgtggaggcatc

SEQ ID NO: 3122552 - DNA, 25 bp, Homo sapien
ccagcagcctttggcagcgtagtcc

SEQ ID NO: 3122553 - DNA, 25 bp, Homo sapien
ggaggcatcgcccaggatctgacac

SEQ ID NO: 3122554 - DNA, 25 bp, Homo sapien
tagctggcagacgatctcactggaa

SEQ ID NO: 3122555 - DNA, 25 bp, Homo sapien
agcctgggaagcctgaaatagctgg

SEQ ID NO: 3122556 - DNA, 25 bp, Homo sapien
gtccaagctggtttgcatttgcaca

SEQ ID NO: 3122557 - DNA, 25 bp, Homo sapien
tctgcacggagaagacttgttgttt

SEQ ID NO: 3122558 - DNA, 25 bp, Homo sapien
agcctcctccgcaggtaccggtcca

SEQ ID NO: 3122559 - DNA, 25 bp, Homo sapien
aagtccttcatggtggcaacttcca

SEQ ID NO: 3122560 - DNA, 25 bp, Homo sapien
tccaccagccagtcgatcagaatgt

SEQ ID NO: 3122561 - DNA, 25 bp, Homo sapien
gctggagcctgtaccgcggcaccag

SEQ ID NO: 3122562 - DNA, 25 bp, Homo sapien
caccaggctctacagaggagtcggt

SEQ ID NO: 3122563 - DNA, 25 bp, Homo sapien
taggaaatgcaaatcgtattgtgag

SEQ ID NO: 3122564 - DNA, 25 bp, Homo sapien
cctcgggaaatgtagaccatgctgg

SEQ ID NO: 3122565 - DNA, 25 bp, Homo sapien
aggagtcggtctggaaagcacttcc

SEQ ID NO: 3122566 - DNA, 25 bp, Homo sapien
caagactaagctcagtgcaaaggtg

SEQ ID NO: 3122567 - DNA, 25 bp, Homo sapien
aacatgccaatgacctgagcctgga

SEQ ID NO: 3122568 - DNA, 25 bp, Homo sapien
cggaagacctgggacgctggattca

SEQ ID NO: 3122569 - DNA, 25 bp, Homo sapien
aatgacactgcatcgagctggcaca

SEQ ID NO: 3122570 - DNA, 25 bp, Homo sapien
cggagacgatctcgcccatcattct

SEQ ID NO: 3122571 - DNA, 25 bp, Homo sapien
agccatacggcctcccggatggtca

SEQ ID NO: 3122572 - DNA, 25 bp, Homo sapien
taagtgttgtccgtgagccatacgg

SEQ ID NO: 3122573 - DNA, 25 bp, Homo sapien
ccaggtcctcgtacttgtaagtgtt

SEQ ID NO: 3122574 - DNA, 25 bp, Homo sapien
cctccttgtaatccaccacagtggg

SEQ ID NO: 3122575 - DNA, 25 bp, Homo sapien
ggactagcgtcagcaggacctcctt

SEQ ID NO: 3122576 - DNA, 25 bp, Homo sapien
gggcgtaggcggacaggctggtgtg

SEQ ID NO: 3122577 - DNA, 25 bp, Homo sapien
ctcagctccacagggactagcgtca

SEQ ID NO: 3122578 - DNA, 25 bp, Homo sapien
cttccccgacacaggcatccctggg

SEQ ID NO: 3122579 - DNA, 25 bp, Homo sapien
catccctgggaagggccactcctta

SEQ ID NO: 3122580 - DNA, 25 bp, Homo sapien
acacaggcatccctgggaagggcca

SEQ ID NO: 3122581 - DNA, 25 bp, Homo sapien
ccgacacaggcatccctgggaaggg

SEQ ID NO: 3122582 - DNA, 25 bp, Homo sapien
tcaagacgcagggaatgaggtcttc

SEQ ID NO: 3122583 - DNA, 25 bp, Homo sapien
gagaatccggtgaggtcccacagct

SEQ ID NO: 3122584 - DNA, 25 bp, Homo sapien
tgaggtcttcataggagaatccggt

SEQ ID NO: 3122585 - DNA, 25 bp, Homo sapien
cacttcttatggaggctcaagacgc

SEQ ID NO: 3122586 - DNA, 25 bp, Homo sapien
gcagccgccacggatagctccagtc

SEQ ID NO: 3122587 - DNA, 25 bp, Homo sapien
gccacggatagctccagtccccaag

SEQ ID NO: 3122588 - DNA, 25 bp, Homo sapien
ggacatgtgcggggcggctgccaca

SEQ ID NO: 3122589 - DNA, 25 bp, Homo sapien
acgggacatgtgcggggcggctgcc

SEQ ID NO: 3122590 - DNA, 25 bp, Homo sapien
ctggaaacagagtcacgtggagtgg

SEQ ID NO: 3122591 - DNA, 25 bp, Homo sapien
aaacagagtcacgtggagtggacat

SEQ ID NO: 3122592 - DNA, 25 bp, Homo sapien
ggaaacagagtcacgtggagtggac

SEQ ID NO: 3122593 - DNA, 25 bp, Homo sapien
gaaacagagtcacgtggagtggaca

SEQ ID NO: 3122594 - DNA, 25 bp, Homo sapien
tcaaaccgctgcttcacggcggtca

SEQ ID NO: 3122595 - DNA, 25 bp, Homo sapien
gcttcacggcggtcagagagacttg

SEQ ID NO: 3122596 - DNA, 25 bp, Homo sapien
tgatttctccatagcgcttgtcctc

SEQ ID NO: 3122597 - DNA, 25 bp, Homo sapien
tagcgcttgtcctcaaaccgctgct

SEQ ID NO: 3122598 - DNA, 25 bp, Homo sapien
gctgaggaaggcgtggatctcccct

SEQ ID NO: 3122599 - DNA, 25 bp, Homo sapien
aaggcgtggatctcccctgtgctga

SEQ ID NO: 3122600 - DNA, 25 bp, Homo sapien
ctcctaatgcagcacacaactggct

SEQ ID NO: 3122601 - DNA, 25 bp, Homo sapien
ctgtcttgtgtcactcctaatgcag

SEQ ID NO: 3122602 - DNA, 25 bp, Homo sapien
tgctcccaaaggttctgctacgaag

SEQ ID NO: 3122603 - DNA, 25 bp, Homo sapien
tcccaaaggttctgctacgaagaag

SEQ ID NO: 3122604 - DNA, 25 bp, Homo sapien
aggttctgctacgaagaagatgccg

SEQ ID NO: 3122605 - DNA, 25 bp, Homo sapien
ccacgtgctcccaaaggttctgcta

SEQ ID NO: 3122606 - DNA, 25 bp, Homo sapien
gagagagcccaggagacccagtcat

SEQ ID NO: 3122607 - DNA, 25 bp, Homo sapien
gtggagagagcccaggagacccagt

SEQ ID NO: 3122608 - DNA, 25 bp, Homo sapien
caaggtggagagagcccaggagacc

SEQ ID NO: 3122609 - DNA, 25 bp, Homo sapien
gcaaggtggagagagcccaggagac

SEQ ID NO: 3122610 - DNA, 25 bp, Homo sapien
gggtggtaacgaagctgcctctgtc

SEQ ID NO: 3122611 - DNA, 25 bp, Homo sapien
ggtggtaacgaagctgcctctgtct

SEQ ID NO: 3122612 - DNA, 25 bp, Homo sapien
tcactctcctggtcgccttcatagc

SEQ ID NO: 3122613 - DNA, 25 bp, Homo sapien
tggtcgccttcatagccagagcagc

SEQ ID NO: 3122614 - DNA, 25 bp, Homo sapien
gggttcaggtagaccacggtgacat

SEQ ID NO: 3122615 - DNA, 25 bp, Homo sapien
cacggtgacatcgaggatgccgctg

SEQ ID NO: 3122616 - DNA, 25 bp, Homo sapien
ggattcctggcagcaatgctgttct

SEQ ID NO: 3122617 - DNA, 25 bp, Homo sapien
tagaccacggtgacatcgaggatgc

SEQ ID NO: 3122618 - DNA, 25 bp, Homo sapien
ttccctggctcccggctggtgcgga

SEQ ID NO: 3122619 - DNA, 25 bp, Homo sapien
tcctctggacaagcctcctcatcac

SEQ ID NO: 3122620 - DNA, 25 bp, Homo sapien
agggatctgggtgtccagcgccagt

SEQ ID NO: 3122621 - DNA, 25 bp, Homo sapien
tctgggtgtccagcgccagtgcctg

SEQ ID NO: 3122622 - DNA, 25 bp, Homo sapien
gctgtgtgtgcgagtcactgtccag

SEQ ID NO: 3122623 - DNA, 25 bp, Homo sapien
tttatccgcttcacctgttgctggg

SEQ ID NO: 3122624 - DNA, 25 bp, Homo sapien
caccgtccacggagcttgtgggact

SEQ ID NO: 3122625 - DNA, 25 bp, Homo sapien
taaacatgacttcctggcctgatgg

SEQ ID NO: 3122626 - DNA, 25 bp, Homo sapien
agcctcacaaggcccaggttcatgt

SEQ ID NO: 3122627 - DNA, 25 bp, Homo sapien
cctcacaaggcccaggttcatgtcc

SEQ ID NO: 3122628 - DNA, 25 bp, Homo sapien
acaaggcccaggttcatgtcctcct

SEQ ID NO: 3122629 - DNA, 25 bp, Homo sapien
tcacaaggcccaggttcatgtcctc

SEQ ID NO: 3122630 - DNA, 25 bp, Homo sapien
gactcccgcggagacagaaacttgg

SEQ ID NO: 3122631 - DNA, 25 bp, Homo sapien
cattctgatggcttgcacgggactc

SEQ ID NO: 3122632 - DNA, 25 bp, Homo sapien
aaaggcctccatggtctatgcagcg

SEQ ID NO: 3122633 - DNA, 25 bp, Homo sapien
gggtcacatacgaacgcctctggga

SEQ ID NO: 3122634 - DNA, 25 bp, Homo sapien
ctggctagcctatctgggaaaattc

SEQ ID NO: 3122635 - DNA, 25 bp, Homo sapien
ctgccgcggacatgaacacacatag

SEQ ID NO: 3122636 - DNA, 25 bp, Homo sapien
cctgggtttccggttcaagagcatt

SEQ ID NO: 3122637 - DNA, 25 bp, Homo sapien
gacgggtctacagttccaacgcttg

SEQ ID NO: 3122638 - DNA, 25 bp, Homo sapien
agcagcccgccggcagcatgaaggc

SEQ ID NO: 3122639 - DNA, 25 bp, Homo sapien
ggcgtctccttgcaatttgccgcct

SEQ ID NO: 3122640 - DNA, 25 bp, Homo sapien
ggcggcgtctccttgcaatttgccg

SEQ ID NO: 3122641 - DNA, 25 bp, Homo sapien
cagcccgccggcagcatgaaggcgg

SEQ ID NO: 3122642 - DNA, 25 bp, Homo sapien
ggggacgcaccggcggctcagcacc

SEQ ID NO: 3122643 - DNA, 25 bp, Homo sapien
cgcctggctaccggcccgcccgcat

SEQ ID NO: 3122644 - DNA, 25 bp, Homo sapien
ccgcgcctggctaccggcccgcccg

SEQ ID NO: 3122645 - DNA, 25 bp, Homo sapien
cgcgcctggctaccggcccgcccgc

SEQ ID NO: 3122646 - DNA, 25 bp, Homo sapien
agccgacggcaaacgcgcaggctct

SEQ ID NO: 3122647 - DNA, 25 bp, Homo sapien
catgcagcagccgacggcaaacgcg

SEQ ID NO: 3122648 - DNA, 25 bp, Homo sapien
aattgtcgctgtgcgcaggcgtcca

SEQ ID NO: 3122649 - DNA, 25 bp, Homo sapien
tctgctccaattgcaattgtcgctg

SEQ ID NO: 3122650 - DNA, 25 bp, Homo sapien
gctccgaagtgggcggctgcgcccg

SEQ ID NO: 3122651 - DNA, 25 bp, Homo sapien
aagtgggcggctgcgcccggtctcc

SEQ ID NO: 3122652 - DNA, 25 bp, Homo sapien
aagacacgggcagccatcgcacggc

SEQ ID NO: 3122653 - DNA, 25 bp, Homo sapien
acgggcagccatcgcacggccagga

SEQ ID NO: 3122654 - DNA, 25 bp, Homo sapien
agggcccagcccaaacagacccgag

SEQ ID NO: 3122655 - DNA, 25 bp, Homo sapien
ctgcaaagacacgggcagccatcgc

SEQ ID NO: 3122656 - DNA, 25 bp, Homo sapien
gggtcctctccattagtttctggcc

SEQ ID NO: 3122657 - DNA, 25 bp, Homo sapien
ctggaagggggtcctctccattagt

SEQ ID NO: 3122658 - DNA, 25 bp, Homo sapien
tggaggtggcttcaaagcccgggtc

SEQ ID NO: 3122659 - DNA, 25 bp, Homo sapien
tctccattagtttctggccctggag

SEQ ID NO: 3122660 - DNA, 25 bp, Homo sapien
tgggtcagaaactccaactctttga

SEQ ID NO: 3122661 - DNA, 25 bp, Homo sapien
ggtcagaaactccaactctttgagg

SEQ ID NO: 3122662 - DNA, 25 bp, Homo sapien
gggtcagaaactccaactctttgag

SEQ ID NO: 3122663 - DNA, 25 bp, Homo sapien
caatggacctagatttcaggctggg

SEQ ID NO: 3122664 - DNA, 25 bp, Homo sapien
tctctctccggccttagtgatgcct

SEQ ID NO: 3122665 - DNA, 25 bp, Homo sapien
ctgtcgtgccagaagaggtgacaat

SEQ ID NO: 3122666 - DNA, 25 bp, Homo sapien
tgatgcctcttcgaactcgtacagc

SEQ ID NO: 3122667 - DNA, 25 bp, Homo sapien
agggtggcccttggcaggcaccgtg

SEQ ID NO: 3122668 - DNA, 25 bp, Homo sapien
cccactgacagcagccggcgctcag

SEQ ID NO: 3122669 - DNA, 25 bp, Homo sapien
agccggcgctcagggtggcccttgg

SEQ ID NO: 3122670 - DNA, 25 bp, Homo sapien
acgggtcccatcccccactgacagc

SEQ ID NO: 3122671 - DNA, 25 bp, Homo sapien
cagcggatggggccatttgctggtc

SEQ ID NO: 3122672 - DNA, 25 bp, Homo sapien
agcagcggatggggccatttgctgg

SEQ ID NO: 3122673 - DNA, 25 bp, Homo sapien
cggatggggccatttgctggtccct

SEQ ID NO: 3122674 - DNA, 25 bp, Homo sapien
gcggatggggccatttgctggtccc

SEQ ID NO: 3122675 - DNA, 25 bp, Homo sapien
caatcagggatgaggcttcttgccc

SEQ ID NO: 3122676 - DNA, 25 bp, Homo sapien
aagcccgtgttcagaggagcatcgc

SEQ ID NO: 3122677 - DNA, 25 bp, Homo sapien
cagtgctgccccattagagagaaga

SEQ ID NO: 3122678 - DNA, 25 bp, Homo sapien
cagagacagaagtccctccagtgag

SEQ ID NO: 3122679 - DNA, 25 bp, Homo sapien
gctttcctgaatgccgcaggcagcc

SEQ ID NO: 3122680 - DNA, 25 bp, Homo sapien
ttcctgaatgccgcaggcagccgca

SEQ ID NO: 3122681 - DNA, 25 bp, Homo sapien
tttcctgaatgccgcaggcagccgc

SEQ ID NO: 3122682 - DNA, 25 bp, Homo sapien
ctttcctgaatgccgcaggcagccg

SEQ ID NO: 3122683 - DNA, 25 bp, Homo sapien
cacagagggacacggttattccagc

SEQ ID NO: 3122684 - DNA, 25 bp, Homo sapien
caagaggacactgactaggacaagg

SEQ ID NO: 3122685 - DNA, 25 bp, Homo sapien
gacccactggaaagtatctcgaacc

SEQ ID NO: 3122686 - DNA, 25 bp, Homo sapien
ggacaaagctgaccggctggcagat

SEQ ID NO: 3122687 - DNA, 25 bp, Homo sapien
actgggttttggcagcggcggcatc

SEQ ID NO: 3122688 - DNA, 25 bp, Homo sapien
gcagcggcggcatccgtggaatcac

SEQ ID NO: 3122689 - DNA, 25 bp, Homo sapien
cagcggcggcatccgtggaatcact

SEQ ID NO: 3122690 - DNA, 25 bp, Homo sapien
tctggaggaactgggttttggcagc

SEQ ID NO: 3122691 - DNA, 25 bp, Homo sapien
aggttcagagctagaggcccccagg

SEQ ID NO: 3122692 - DNA, 25 bp, Homo sapien
ccaggttcagagctagaggccccca

SEQ ID NO: 3122693 - DNA, 25 bp, Homo sapien
ctgccaggttcagagctagaggccc

SEQ ID NO: 3122694 - DNA, 25 bp, Homo sapien
gttcagagctagaggcccccagggc

SEQ ID NO: 3122695 - DNA, 25 bp, Homo sapien
gagcaggccttccgcaggcgccccg

SEQ ID NO: 3122696 - DNA, 25 bp, Homo sapien
ctgccgagagctcctccctcatgcg

SEQ ID NO: 3122697 - DNA, 25 bp, Homo sapien
cctcatgcgcagtctcagcagcgag

SEQ ID NO: 3122698 - DNA, 25 bp, Homo sapien
gcagtctcagcagcgagcaggcctt

SEQ ID NO: 3122699 - DNA, 25 bp, Homo sapien
ggcccgtggcagtctggaaaccctc

SEQ ID NO: 3122700 - DNA, 25 bp, Homo sapien
agtctggaaaccctccctgcactgg

SEQ ID NO: 3122701 - DNA, 25 bp, Homo sapien
acactcctcctgatacagacccagg

SEQ ID NO: 3122702 - DNA, 25 bp, Homo sapien
tcctcctgatacagacccaggaccc

SEQ ID NO: 3122703 - DNA, 25 bp, Homo sapien
ctgtgcagacactggcccaccatgg

SEQ ID NO: 3122704 - DNA, 25 bp, Homo sapien
tgtgcagacactggcccaccatggc

SEQ ID NO: 3122705 - DNA, 25 bp, Homo sapien
gcaggcagcggtactcctgcatcca

SEQ ID NO: 3122706 - DNA, 25 bp, Homo sapien
ctccagcgtgagcaggcagcggtac

SEQ ID NO: 3122707 - DNA, 25 bp, Homo sapien
ctgggtgaataagcaactgctcaga

SEQ ID NO: 3122708 - DNA, 25 bp, Homo sapien
agaatgtggcctttggggtagcagc

SEQ ID NO: 3122709 - DNA, 25 bp, Homo sapien
gggccccgcttttcctgtgtgcctg

SEQ ID NO: 3122710 - DNA, 25 bp, Homo sapien
agcagccgaacccagggccccgctt

SEQ ID NO: 3122711 - DNA, 25 bp, Homo sapien
gtgtgcacaggagaatgtggccttt

SEQ ID NO: 3122712 - DNA, 25 bp, Homo sapien
cacaggacatggtcttggtggctgt

SEQ ID NO: 3122713 - DNA, 25 bp, Homo sapien
gcctccccacaggacatggtcttgg

SEQ ID NO: 3122714 - DNA, 25 bp, Homo sapien
cacaggacggcgaggctccgggggg

SEQ ID NO: 3122715 - DNA, 25 bp, Homo sapien
ggtcttggtggctgttccgccaccg

SEQ ID NO: 3122716 - DNA, 25 bp, Homo sapien
acagccactcgcagcttgagggccg

SEQ ID NO: 3122717 - DNA, 25 bp, Homo sapien
cagcacagccactcgcagcttgagg

SEQ ID NO: 3122718 - DNA, 25 bp, Homo sapien
gcacagccactcgcagcttgagggc

SEQ ID NO: 3122719 - DNA, 25 bp, Homo sapien
cagccactcgcagcttgagggccgc

SEQ ID NO: 3122720 - DNA, 25 bp, Homo sapien
ctgcggacctctgttgcacccccac

SEQ ID NO: 3122721 - DNA, 25 bp, Homo sapien
aaggctgcggacctctgttgcaccc

SEQ ID NO: 3122722 - DNA, 25 bp, Homo sapien
tcaaggctgcggacctctgttgcac

SEQ ID NO: 3122723 - DNA, 25 bp, Homo sapien
ggctgcggacctctgttgcaccccc

SEQ ID NO: 3122724 - DNA, 25 bp, Homo sapien
ctcctgccgtcccagccccgtctga

SEQ ID NO: 3122725 - DNA, 25 bp, Homo sapien
agggccaaggtctcaggggcaccta

SEQ ID NO: 3122726 - DNA, 25 bp, Homo sapien
tgacccatgcacttcccaacccaca

SEQ ID NO: 3122727 - DNA, 25 bp, Homo sapien
ctgggacaggcttcgaggcccccat

SEQ ID NO: 3122728 - DNA, 25 bp, Homo sapien
agggggaggagttcagccatcagga

SEQ ID NO: 3122729 - DNA, 25 bp, Homo sapien
gggggaggagttcagccatcaggac

SEQ ID NO: 3122730 - DNA, 25 bp, Homo sapien
cagggggaggagttcagccatcagg

SEQ ID NO: 3122731 - DNA, 25 bp, Homo sapien
gttcatcccgcaggatggtaaggac

SEQ ID NO: 3122732 - DNA, 25 bp, Homo sapien
aggttcatcccgcaggatggtaagg

SEQ ID NO: 3122733 - DNA, 25 bp, Homo sapien
ggcccctgcggctgtgcagcgctta

SEQ ID NO: 3122734 - DNA, 25 bp, Homo sapien
gcggcccctgcggctgtgcagcgct

SEQ ID NO: 3122735 - DNA, 25 bp, Homo sapien
tgaccagcaggcttagttgtcctga

SEQ ID NO: 3122736 - DNA, 25 bp, Homo sapien
ccctgaccagcaggcttagttgtcc

SEQ ID NO: 3122737 - DNA, 25 bp, Homo sapien
tctggagtccaggagccttaggaag

SEQ ID NO: 3122738 - DNA, 25 bp, Homo sapien
gcctctggagtccaggagccttagg

SEQ ID NO: 3122739 - DNA, 25 bp, Homo sapien
tttaatatcacacaagcggctcttt

SEQ ID NO: 3122740 - DNA, 25 bp, Homo sapien
ggctttaatatcacacaagcggctc

SEQ ID NO: 3122741 - DNA, 25 bp, Homo sapien
gctttctaaagtggctttaatatca

SEQ ID NO: 3122742 - DNA, 25 bp, Homo sapien
taatatcacacaagcggctctttgg

SEQ ID NO: 3122743 - DNA, 25 bp, Homo sapien
tcctaccttggcatgatttaaatac

SEQ ID NO: 3122744 - DNA, 25 bp, Homo sapien
agaatgcagcgaggccacgagcccc

SEQ ID NO: 3122745 - DNA, 25 bp, Homo sapien
tccccgcagcgagaaggtgatggcc

SEQ ID NO: 3122746 - DNA, 25 bp, Homo sapien
ggtccccgcagcgagaaggtgatgg

SEQ ID NO: 3122747 - DNA, 25 bp, Homo sapien
acggccacggcaccgaacggcagaa

SEQ ID NO: 3122748 - DNA, 25 bp, Homo sapien
aggaaggcggcggtcagaagcccca

SEQ ID NO: 3122749 - DNA, 25 bp, Homo sapien
ccagcacaggaaggcggcggtcaga

SEQ ID NO: 3122750 - DNA, 25 bp, Homo sapien
gccgagcgcgccagcacaggaaggc

SEQ ID NO: 3122751 - DNA, 25 bp, Homo sapien
cgcctccgccgagcgcgccagcaca

SEQ ID NO: 3122752 - DNA, 25 bp, Homo sapien
gcttggttagctgttgaggacccct

SEQ ID NO: 3122753 - DNA, 25 bp, Homo sapien
ggggcctcatcgcagagctggaatc

SEQ ID NO: 3122754 - DNA, 25 bp, Homo sapien
ggagggggcctcatcgcagagctgg

SEQ ID NO: 3122755 - DNA, 25 bp, Homo sapien
agggggcctcatcgcagagctggaa

SEQ ID NO: 3122756 - DNA, 25 bp, Homo sapien
gggcctcatcgcagagctggaatca

SEQ ID NO: 3122757 - DNA, 25 bp, Homo sapien
cgagggcggacgagctgtgccagga

SEQ ID NO: 3122758 - DNA, 25 bp, Homo sapien
gcggggcctgcggtgcacgggccgc

SEQ ID NO: 3122759 - DNA, 25 bp, Homo sapien
agggccgggcggagcaggtctcccg

SEQ ID NO: 3122760 - DNA, 25 bp, Homo sapien
gcctgcggtgcacgggccgccgcct

SEQ ID NO: 3122761 - DNA, 25 bp, Homo sapien
gcctagagcgatgacaggcgtcgcc

SEQ ID NO: 3122762 - DNA, 25 bp, Homo sapien
gcccgcaatgccgaggaacagggcc

SEQ ID NO: 3122763 - DNA, 25 bp, Homo sapien
gtggccgggccccaagacgctgccc

SEQ ID NO: 3122764 - DNA, 25 bp, Homo sapien
ctcccgctgggcctagagcgatgac

SEQ ID NO: 3122765 - DNA, 25 bp, Homo sapien
ttgtgagcactacacggacgtcggt

SEQ ID NO: 3122766 - DNA, 25 bp, Homo sapien
ggcaccgtgaggcatgtccattgca

SEQ ID NO: 3122767 - DNA, 25 bp, Homo sapien
tgccatggcctgtcgcagtagaagg

SEQ ID NO: 3122768 - DNA, 25 bp, Homo sapien
aggcagacggccatagtccaggtca

SEQ ID NO: 3122769 - DNA, 25 bp, Homo sapien
aggggcaggctggttgtgtccaagg

SEQ ID NO: 3122770 - DNA, 25 bp, Homo sapien
ggctggttgtgtccaaggtccccag

SEQ ID NO: 3122771 - DNA, 25 bp, Homo sapien
caggctggttgtgtccaaggtcccc

SEQ ID NO: 3122772 - DNA, 25 bp, Homo sapien
ggagggatgggtcaggggcaggctg

SEQ ID NO: 3122773 - DNA, 25 bp, Homo sapien
ttgtgccggcagttgagacagacac

SEQ ID NO: 3122774 - DNA, 25 bp, Homo sapien
cacggccagggtctcgatagaagcc

SEQ ID NO: 3122775 - DNA, 25 bp, Homo sapien
ctgcaagcccgacggtcactcaggg

SEQ ID NO: 3122776 - DNA, 25 bp, Homo sapien
gacagtcggtacagctccatgttga

SEQ ID NO: 3122777 - DNA, 25 bp, Homo sapien
aggtgaggccagtgacgccatcctt

SEQ ID NO: 3122778 - DNA, 25 bp, Homo sapien
gcaccaaccgggtgacagtcgcagg

SEQ ID NO: 3122779 - DNA, 25 bp, Homo sapien
cagtgacgccatccttgcagggaca

SEQ ID NO: 3122780 - DNA, 25 bp, Homo sapien
ttgccagcagcaccaaccgggtgac

SEQ ID NO: 3122781 - DNA, 25 bp, Homo sapien
ctgctgtcctcagtgggtccaggga

SEQ ID NO: 3122782 - DNA, 25 bp, Homo sapien
gctgtcctcagtgggtccagggata

SEQ ID NO: 3122783 - DNA, 25 bp, Homo sapien
ggctgctgtcctcagtgggtccagg

SEQ ID NO: 3122784 - DNA, 25 bp, Homo sapien
cctggggctgcacagggctgctgtc

SEQ ID NO: 3122785 - DNA, 25 bp, Homo sapien
ctttaggctgatgcggtagctgcca

SEQ ID NO: 3122786 - DNA, 25 bp, Homo sapien
tagctgccacgggcaggtttgcagt

SEQ ID NO: 3122787 - DNA, 25 bp, Homo sapien
tgcggtagctgccacgggcaggttt

SEQ ID NO: 3122788 - DNA, 25 bp, Homo sapien
ttctttaggctgatgcggtagctgc

SEQ ID NO: 3122789 - DNA, 25 bp, Homo sapien
gccgcgcgcacccaccgccacctgc

SEQ ID NO: 3122790 - DNA, 25 bp, Homo sapien
ctcgccgcgcgcacccaccgccacc

SEQ ID NO: 3122791 - DNA, 25 bp, Homo sapien
cgcgcgcacccaccgccacctgcac

SEQ ID NO: 3122792 - DNA, 25 bp, Homo sapien
tcgccgcgcgcacccaccgccacct

SEQ ID NO: 3122793 - DNA, 25 bp, Homo sapien
ccaccgggaagcgtgtccacgcgcc

SEQ ID NO: 3122794 - DNA, 25 bp, Homo sapien
tccgctccggaacacggcgagcacc

SEQ ID NO: 3122795 - DNA, 25 bp, Homo sapien
acacggcgagcaccgccaccgggaa

SEQ ID NO: 3122796 - DNA, 25 bp, Homo sapien
gggaagcgtgtccacgcgccgcgcg

SEQ ID NO: 3122797 - DNA, 25 bp, Homo sapien
tccagggtagcacgaggcttccgcg

SEQ ID NO: 3122798 - DNA, 25 bp, Homo sapien
tccctccagggtagcacgaggcttc

SEQ ID NO: 3122799 - DNA, 25 bp, Homo sapien
cgtccctccagggtagcacgaggct

SEQ ID NO: 3122800 - DNA, 25 bp, Homo sapien
acgcgtccctccagggtagcacgag

SEQ ID NO: 3122801 - DNA, 25 bp, Homo sapien
gactccttggcaggcgaaggcacag

SEQ ID NO: 3122802 - DNA, 25 bp, Homo sapien
cgacacgcgcgacgcgagcaaggac

SEQ ID NO: 3122803 - DNA, 25 bp, Homo sapien
aaggcacagggtgaacgtgcgccta

SEQ ID NO: 3122804 - DNA, 25 bp, Homo sapien
acagggtgaacgtgcgcctagatgt

SEQ ID NO: 3122805 - DNA, 25 bp, Homo sapien
agggcccggcatcacgaaggattca

SEQ ID NO: 3122806 - DNA, 25 bp, Homo sapien
ggtcctccgggtgtgccatatcatc

SEQ ID NO: 3122807 - DNA, 25 bp, Homo sapien
attcacagccttccgggtatcccag

SEQ ID NO: 3122808 - DNA, 25 bp, Homo sapien
cgggctgtcgctgcgccggtcacat

SEQ ID NO: 3122809 - DNA, 25 bp, Homo sapien
cagagagagggacggccggacggag

SEQ ID NO: 3122810 - DNA, 25 bp, Homo sapien
gtccaaggcgcctgcggtggccaca

SEQ ID NO: 3122811 - DNA, 25 bp, Homo sapien
agacggggacacaggcggccaagaa

SEQ ID NO: 3122812 - DNA, 25 bp, Homo sapien
ggtcagtgcgctccctggcgggtcg

SEQ ID NO: 3122813 - DNA, 25 bp, Homo sapien
acagccgcctgtcggagtcgcggtc

SEQ ID NO: 3122814 - DNA, 25 bp, Homo sapien
gagaggaggcaacggcagtgcggtc

SEQ ID NO: 3122815 - DNA, 25 bp, Homo sapien
ggctctgggcatgcgcgctgacggt

SEQ ID NO: 3122816 - DNA, 25 bp, Homo sapien
gtcacgcgtggatccggaaccgcgt

SEQ ID NO: 3122817 - DNA, 25 bp, Homo sapien
cctgccgcgccggcctttctgcgca

SEQ ID NO: 3122818 - DNA, 25 bp, Homo sapien
ccgccgagctgtcgccctgtgccca

SEQ ID NO: 3122819 - DNA, 25 bp, Homo sapien
ggcctttctgcgcacgcgcgtgctc

SEQ ID NO: 3122820 - DNA, 25 bp, Homo sapien
ccccgccgagctgtcgccctgtgcc

SEQ ID NO: 3122821 - DNA, 25 bp, Homo sapien
agcacgcgccgaccgcggtgacagc

SEQ ID NO: 3122822 - DNA, 25 bp, Homo sapien
gacacagtcactcttccagacgaca

SEQ ID NO: 3122823 - DNA, 25 bp, Homo sapien
cggaaagcgccccaaggaaacagtg

SEQ ID NO: 3122824 - DNA, 25 bp, Homo sapien
agacgacaccatgccctgggccggg

SEQ ID NO: 3122825 - DNA, 25 bp, Homo sapien
gtcggtgggggcgtgtgtcatccct

SEQ ID NO: 3122826 - DNA, 25 bp, Homo sapien
agggcagggcgtatcagaatctgtt

SEQ ID NO: 3122827 - DNA, 25 bp, Homo sapien
acagggcagggcgtatcagaatctg

SEQ ID NO: 3122828 - DNA, 25 bp, Homo sapien
ccacagggcagggcgtatcagaatc

SEQ ID NO: 3122829 - DNA, 25 bp, Homo sapien
ggggcgggaacaggtgcagcccagc

SEQ ID NO: 3122830 - DNA, 25 bp, Homo sapien
ccatcaaagaaggcctgtggccagg

SEQ ID NO: 3122831 - DNA, 25 bp, Homo sapien
tagacaacctttgacctttaatatc

SEQ ID NO: 3122832 - DNA, 25 bp, Homo sapien
cgcaagcagtaacccgggggccaca

SEQ ID NO: 3122833 - DNA, 25 bp, Homo sapien
tgacctttaatatcacccccgcaag

SEQ ID NO: 3122834 - DNA, 25 bp, Homo sapien
ccaggtggcttttagacaacctttg

SEQ ID NO: 3122835 - DNA, 25 bp, Homo sapien
taatgggacggttccttctgcacac

SEQ ID NO: 3122836 - DNA, 25 bp, Homo sapien
gcacactgcctggaagtcacctggt

SEQ ID NO: 3122837 - DNA, 25 bp, Homo sapien
gactgcttgtcttcgccgcaactga

SEQ ID NO: 3122838 - DNA, 25 bp, Homo sapien
gaggaaacgccacgtgtgccatcta

SEQ ID NO: 3122839 - DNA, 25 bp, Homo sapien
ggaagcaaagatgaacagcgtggct

SEQ ID NO: 3122840 - DNA, 25 bp, Homo sapien
aagacaggcttctaagtagagcaag

SEQ ID NO: 3122841 - DNA, 25 bp, Homo sapien
agatgaacagcgtggctcccgccct

SEQ ID NO: 3122842 - DNA, 25 bp, Homo sapien
gacaggcttctaagtagagcaagca

SEQ ID NO: 3122843 - DNA, 25 bp, Homo sapien
cactgcaatagttgacatctatcac

SEQ ID NO: 3122844 - DNA, 25 bp, Homo sapien
ccacttcaaccatcatgtagagaaa

SEQ ID NO: 3122845 - DNA, 25 bp, Homo sapien
caaaaggaccttgatccacttcaac

SEQ ID NO: 3122846 - DNA, 25 bp, Homo sapien
accatcatgtagagaaaacctctgg

SEQ ID NO: 3122847 - DNA, 25 bp, Homo sapien
tagattacttctgcatctcggaagg

SEQ ID NO: 3122848 - DNA, 25 bp, Homo sapien
gagcaacactgcatgcccaaggtca

SEQ ID NO: 3122849 - DNA, 25 bp, Homo sapien
ggctaccctacaggtgacttcacag

SEQ ID NO: 3122850 - DNA, 25 bp, Homo sapien
tcagcgagagctagtaaggctaccc

SEQ ID NO: 3122851 - DNA, 25 bp, Homo sapien
cgcacctcgcttaacaaacacatgt

SEQ ID NO: 3122852 - DNA, 25 bp, Homo sapien
caagttggtcctcagtaaaaagcct

SEQ ID NO: 3122853 - DNA, 25 bp, Homo sapien
cataacagaaaaggtatgctcagac

SEQ ID NO: 3122854 - DNA, 25 bp, Homo sapien
ttgaaaggcaatgtttgaaacagcc

SEQ ID NO: 3122855 - DNA, 25 bp, Homo sapien
cactgcccgctgctcaatactggaa

SEQ ID NO: 3122856 - DNA, 25 bp, Homo sapien
tcccaggtggaactcaaggcttttc

SEQ ID NO: 3122857 - DNA, 25 bp, Homo sapien
tcagaggcttcatgccactcagggt

SEQ ID NO: 3122858 - DNA, 25 bp, Homo sapien
tctgggtgtgccatgacagtccctc

SEQ ID NO: 3122859 - DNA, 25 bp, Homo sapien
cccagtctcgcagtaacctcatcgc

SEQ ID NO: 3122860 - DNA, 25 bp, Homo sapien
tgcccagtctcgcagtaacctcatc

SEQ ID NO: 3122861 - DNA, 25 bp, Homo sapien
cagtctcgcagtaacctcatcgcca

SEQ ID NO: 3122862 - DNA, 25 bp, Homo sapien
agtctcgcagtaacctcatcgccat

SEQ ID NO: 3122863 - DNA, 25 bp, Homo sapien
attctcctgggaagacccaacccag

SEQ ID NO: 3122864 - DNA, 25 bp, Homo sapien
tctcgtctagtacactctccttggc

SEQ ID NO: 3122865 - DNA, 25 bp, Homo sapien
gcaacgggttactgactggccttct

SEQ ID NO: 3122866 - DNA, 25 bp, Homo sapien
ccacagggttcaggattccgtctcg

SEQ ID NO: 3122867 - DNA, 25 bp, Homo sapien
gacgagcaaccctcagactgcaggt

SEQ ID NO: 3122868 - DNA, 25 bp, Homo sapien
gaacgtctgagacgagcaaccctca

SEQ ID NO: 3122869 - DNA, 25 bp, Homo sapien
ctgtgggaacgtctgagacgagcaa

SEQ ID NO: 3122870 - DNA, 25 bp, Homo sapien
agacgagcaaccctcagactgcagg

SEQ ID NO: 3122871 - DNA, 25 bp, Homo sapien
agccttgggtctctcggtctgagaa

SEQ ID NO: 3122872 - DNA, 25 bp, Homo sapien
tgggtctctcggtctgagaaggctt

SEQ ID NO: 3122873 - DNA, 25 bp, Homo sapien
tggaaggagagtgaggtgcccctga

SEQ ID NO: 3122874 - DNA, 25 bp, Homo sapien
ccttgggtctctcggtctgagaagg

SEQ ID NO: 3122875 - DNA, 25 bp, Homo sapien
gcatcacacacgtggcctctgttct

SEQ ID NO: 3122876 - DNA, 25 bp, Homo sapien
ctttttccaaagttgtacctgctgc

SEQ ID NO: 3122877 - DNA, 25 bp, Homo sapien
tgctgccaatgctgatggaccacac

SEQ ID NO: 3122878 - DNA, 25 bp, Homo sapien
gggacgcatcacacacgtggcctct

SEQ ID NO: 3122879 - DNA, 25 bp, Homo sapien
atcaggaaggtgtggtggcaagaac

SEQ ID NO: 3122880 - DNA, 25 bp, Homo sapien
aggaaggtgtggtggcaagaacctg

SEQ ID NO: 3122881 - DNA, 25 bp, Homo sapien
aaatcaggaaggtgtggtggcaaga

SEQ ID NO: 3122882 - DNA, 25 bp, Homo sapien
tcaggaaggtgtggtggcaagaacc

SEQ ID NO: 3122883 - DNA, 25 bp, Homo sapien
gatcctaaggccacaggtttaccaa

SEQ ID NO: 3122884 - DNA, 25 bp, Homo sapien
taaacaacctctctcggtgtgtggc

SEQ ID NO: 3122885 - DNA, 25 bp, Homo sapien
taatgtccacacctcgatcctaagg

SEQ ID NO: 3122886 - DNA, 25 bp, Homo sapien
tggaaaccgaatggcccaccagtaa

SEQ ID NO: 3122887 - DNA, 25 bp, Homo sapien
gaaggccaggcacacatcaggttct

SEQ ID NO: 3122888 - DNA, 25 bp, Homo sapien
tcaagacatgcttcccgaatgccag

SEQ ID NO: 3122889 - DNA, 25 bp, Homo sapien
tattaatggtgaccgacatgccaca

SEQ ID NO: 3122890 - DNA, 25 bp, Homo sapien
tagacctaaggagagatccagctcg

SEQ ID NO: 3122891 - DNA, 25 bp, Homo sapien
tggcaagagcagatgacacccagct

SEQ ID NO: 3122892 - DNA, 25 bp, Homo sapien
taaactgcacgaggaagtgagcccg

SEQ ID NO: 3122893 - DNA, 25 bp, Homo sapien
caagttcaccgtcctggctggaaag

SEQ ID NO: 3122894 - DNA, 25 bp, Homo sapien
ggaaagctccgtggcctctagaact

SEQ ID NO: 3122895 - DNA, 25 bp, Homo sapien
gagaatgctcctctggcgatcccat

SEQ ID NO: 3122896 - DNA, 25 bp, Homo sapien
acagtgtcactaaccacggtgagca

SEQ ID NO: 3122897 - DNA, 25 bp, Homo sapien
ctgctgcatgtagggtggccacccc

SEQ ID NO: 3122898 - DNA, 25 bp, Homo sapien
tgagaccctcagctataggaccatg

SEQ ID NO: 3122899 - DNA, 25 bp, Homo sapien
cactccatcccgatagtgacagggc

SEQ ID NO: 3122900 - DNA, 25 bp, Homo sapien
gaaagagcaccacggagattctgag

SEQ ID NO: 3122901 - DNA, 25 bp, Homo sapien
tacaagacttgctctaagcagtggg

SEQ ID NO: 3122902 - DNA, 25 bp, Homo sapien
ttctagaaggcggttacagcgtgct

SEQ ID NO: 3122903 - DNA, 25 bp, Homo sapien
ggcataactgattaccccactggca

SEQ ID NO: 3122904 - DNA, 25 bp, Homo sapien
cggggcggaacacaaccccacagct

SEQ ID NO: 3122905 - DNA, 25 bp, Homo sapien
ggggcggaacacaaccccacagctg

SEQ ID NO: 3122906 - DNA, 25 bp, Homo sapien
ggcggaacacaaccccacagctgct

SEQ ID NO: 3122907 - DNA, 25 bp, Homo sapien
ctcggggcggaacacaaccccacag

SEQ ID NO: 3122908 - DNA, 25 bp, Homo sapien
tgtttgggtgaaagaactggctcct

SEQ ID NO: 3122909 - DNA, 25 bp, Homo sapien
cactagcctctggaggaactccagg

SEQ ID NO: 3122910 - DNA, 25 bp, Homo sapien
ctggctccttcttaaggcaataaac

SEQ ID NO: 3122911 - DNA, 25 bp, Homo sapien
cttccctgctatgggcccactagcc

SEQ ID NO: 3122912 - DNA, 25 bp, Homo sapien
tccacctgggatggtagaagttccc

SEQ ID NO: 3122913 - DNA, 25 bp, Homo sapien
ttggttgagtgaccagaccactccg

SEQ ID NO: 3122914 - DNA, 25 bp, Homo sapien
gaccagaccactccggtttctcttg

SEQ ID NO: 3122915 - DNA, 25 bp, Homo sapien
cctgggatggtagaagttcccagtg

SEQ ID NO: 3122916 - DNA, 25 bp, Homo sapien
gggaggacagagtggctaaatcctc

SEQ ID NO: 3122917 - DNA, 25 bp, Homo sapien
ggacagagtggctaaatcctccagc

SEQ ID NO: 3122918 - DNA, 25 bp, Homo sapien
aggacagagtggctaaatcctccag

SEQ ID NO: 3122919 - DNA, 25 bp, Homo sapien
acagagtggctaaatcctccagccc

SEQ ID NO: 3122920 - DNA, 25 bp, Homo sapien
agcgccgctgtgctcgggaggaggc

SEQ ID NO: 3122921 - DNA, 25 bp, Homo sapien
gcgccgctgtgctcgggaggaggcc

SEQ ID NO: 3122922 - DNA, 25 bp, Homo sapien
gccgctgtgctcgggaggaggccct

SEQ ID NO: 3122923 - DNA, 25 bp, Homo sapien
cgctgtgctcgggaggaggccctgg

SEQ ID NO: 3122924 - DNA, 25 bp, Homo sapien
aatgtcccggatcaggcgctggtac

SEQ ID NO: 3122925 - DNA, 25 bp, Homo sapien
gatgtcgctgtacacgctggcgtca

SEQ ID NO: 3122926 - DNA, 25 bp, Homo sapien
tctgacgaacgtgcggatgtcctgc

SEQ ID NO: 3122927 - DNA, 25 bp, Homo sapien
gatggcgaacgctttctccagcagc

SEQ ID NO: 3122928 - DNA, 25 bp, Homo sapien
aagttctctgcatggacggccaagt

SEQ ID NO: 3122929 - DNA, 25 bp, Homo sapien
atggacggccaagtgtacaaactgc

SEQ ID NO: 3122930 - DNA, 25 bp, Homo sapien
tcacgctgacgatctccgagcggaa

SEQ ID NO: 3122931 - DNA, 25 bp, Homo sapien
tggccaggctgtacccgtgctgcag

SEQ ID NO: 3122932 - DNA, 25 bp, Homo sapien
gcatggtcttgatgagcaagagggt

SEQ ID NO: 3122933 - DNA, 25 bp, Homo sapien
tgagcaagagggtaggctcatgtcc

SEQ ID NO: 3122934 - DNA, 25 bp, Homo sapien
tcttgatgagcaagagggtaggctc

SEQ ID NO: 3122935 - DNA, 25 bp, Homo sapien
cttgatgagcaagagggtaggctca

SEQ ID NO: 3122936 - DNA, 25 bp, Homo sapien
attctccggtcccaaagaagcccag

SEQ ID NO: 3122937 - DNA, 25 bp, Homo sapien
aaagcattctccggtcccaaagaag

SEQ ID NO: 3122938 - DNA, 25 bp, Homo sapien
acacaaagcattctccggtcccaaa

SEQ ID NO: 3122939 - DNA, 25 bp, Homo sapien
gtcccaaagaagcccagtttgcctc

SEQ ID NO: 3122940 - DNA, 25 bp, Homo sapien
gccccagagccacaacccgtttcat

SEQ ID NO: 3122941 - DNA, 25 bp, Homo sapien
agtgtgaggagctggcgcgggcgtt

SEQ ID NO: 3122942 - DNA, 25 bp, Homo sapien
ctggtggctcgagcagatgaagccc

SEQ ID NO: 3122943 - DNA, 25 bp, Homo sapien
cgtgaatctgcacccagagcccaag

SEQ ID NO: 3122944 - DNA, 25 bp, Homo sapien
cccgccatgaacatggactcggtct

SEQ ID NO: 3122945 - DNA, 25 bp, Homo sapien
tcttggagggcaggttgaagtggcg

SEQ ID NO: 3122946 - DNA, 25 bp, Homo sapien
tcagctcggggtgcttgatcaccac

SEQ ID NO: 3122947 - DNA, 25 bp, Homo sapien
gtgcttgatcaccacccactcgtag

SEQ ID NO: 3122948 - DNA, 25 bp, Homo sapien
tcccagagccccgtctgctggcgct

SEQ ID NO: 3122949 - DNA, 25 bp, Homo sapien
tcatcccagagccccgtctgctggc

SEQ ID NO: 3122950 - DNA, 25 bp, Homo sapien
cagagccccgtctgctggcgctcac

SEQ ID NO: 3122951 - DNA, 25 bp, Homo sapien
cctcatcccagagccccgtctgctg

SEQ ID NO: 3122952 - DNA, 25 bp, Homo sapien
caatgaggaagttctcggagcagag

SEQ ID NO: 3122953 - DNA, 25 bp, Homo sapien
cccggttcaggtccccatcgatgta

SEQ ID NO: 3122954 - DNA, 25 bp, Homo sapien
gatgtagagcgcctggccgcctcct

SEQ ID NO: 3122955 - DNA, 25 bp, Homo sapien
tgtcgcagtggcttgtgcggccccg

SEQ ID NO: 3122956 - DNA, 25 bp, Homo sapien
actgggtgtcagggtcctggaagcc

SEQ ID NO: 3122957 - DNA, 25 bp, Homo sapien
cactgggtgtcagggtcctggaagc

SEQ ID NO: 3122958 - DNA, 25 bp, Homo sapien
tcactgggtgtcagggtcctggaag

SEQ ID NO: 3122959 - DNA, 25 bp, Homo sapien
tgggcagacccctggaaatggagct

SEQ ID NO: 3122960 - DNA, 25 bp, Homo sapien
taatgaacaccaaagctggcggtac

SEQ ID NO: 3122961 - DNA, 25 bp, Homo sapien
tctgttctcgggatctacgctggga

SEQ ID NO: 3122962 - DNA, 25 bp, Homo sapien
caaaggctgtaaggtgagaggctca

SEQ ID NO: 3122963 - DNA, 25 bp, Homo sapien
tgtctacaggacacggtatccactg

SEQ ID NO: 3122964 - DNA, 25 bp, Homo sapien
caaagaacttcgctcatgatgtgga

SEQ ID NO: 3122965 - DNA, 25 bp, Homo sapien
tgaacccaaatttgaggcaggtgct

SEQ ID NO: 3122966 - DNA, 25 bp, Homo sapien
tactcaaggagactgcaaaggcttt

SEQ ID NO: 3122967 - DNA, 25 bp, Homo sapien
cagataaacgctcagccctaggcag

SEQ ID NO: 3122968 - DNA, 25 bp, Homo sapien
tgcaccacgaccaggtttttcagaa

SEQ ID NO: 3122969 - DNA, 25 bp, Homo sapien
tcagaacgggtgtcagataaacgct

SEQ ID NO: 3122970 - DNA, 25 bp, Homo sapien
caggtttttcagaacgggtgtcaga

SEQ ID NO: 3122971 - DNA, 25 bp, Homo sapien
ctaggcagcagtgttcggcgtttct

SEQ ID NO: 3122972 - DNA, 25 bp, Homo sapien
taggcagcagtgttcggcgtttctt

SEQ ID NO: 3122973 - DNA, 25 bp, Homo sapien
ctgagtgggccctcctctttgagga

SEQ ID NO: 3122974 - DNA, 25 bp, Homo sapien
gcctgagtgggccctcctctttgag

SEQ ID NO: 3122975 - DNA, 25 bp, Homo sapien
tcagggttgatggaaaagggcctga

SEQ ID NO: 3122976 - DNA, 25 bp, Homo sapien
gttgatggaaaagggcctgagtggg

SEQ ID NO: 3122977 - DNA, 25 bp, Homo sapien
cttgcccttgccaaggtcactggtg

SEQ ID NO: 3122978 - DNA, 25 bp, Homo sapien
ttgccaaggtcactggtgaccgcca

SEQ ID NO: 3122979 - DNA, 25 bp, Homo sapien
cccttgccaaggtcactggtgaccg

SEQ ID NO: 3122980 - DNA, 25 bp, Homo sapien
tgcccttgccaaggtcactggtgac

SEQ ID NO: 3122981 - DNA, 25 bp, Homo sapien
agccacccactcacgcaaagcctgc

SEQ ID NO: 3122982 - DNA, 25 bp, Homo sapien
gcagccacccactcacgcaaagcct

SEQ ID NO: 3122983 - DNA, 25 bp, Homo sapien
cttgcagccacccactcacgcaaag

SEQ ID NO: 3122984 - DNA, 25 bp, Homo sapien
cacccactcacgcaaagcctgcacc

SEQ ID NO: 3122985 - DNA, 25 bp, Homo sapien
gcggccgcgtcacatgacctgggcc

SEQ ID NO: 3122986 - DNA, 25 bp, Homo sapien
ggcgaaggcgatccggcccgtcagc

SEQ ID NO: 3122987 - DNA, 25 bp, Homo sapien
tcagccgctgcgctctaaataccag

SEQ ID NO: 3122988 - DNA, 25 bp, Homo sapien
taaataccagcaccgcagaacaaaa

SEQ ID NO: 3122989 - DNA, 25 bp, Homo sapien
tcggggccgctcttggactcggaca

SEQ ID NO: 3122990 - DNA, 25 bp, Homo sapien
cggggccgctcttggactcggacat

SEQ ID NO: 3122991 - DNA, 25 bp, Homo sapien
ccatgacggcgaaaaacgaagcata

SEQ ID NO: 3122992 - DNA, 25 bp, Homo sapien
catgacggcgaaaaacgaagcatac

SEQ ID NO: 3122993 - DNA, 25 bp, Homo sapien
cggaccccggcgagctgcgggcatg

SEQ ID NO: 3122994 - DNA, 25 bp, Homo sapien
ccccggcgagctgcgggcatgagca

SEQ ID NO: 3122995 - DNA, 25 bp, Homo sapien
tgcgggcatgagcaacgcgcgcgcc

SEQ ID NO: 3122996 - DNA, 25 bp, Homo sapien
cgagctgcgggcatgagcaacgcgc

SEQ ID NO: 3122997 - DNA, 25 bp, Homo sapien
ccggccaggcccgcacgccctgcgc

SEQ ID NO: 3122998 - DNA, 25 bp, Homo sapien
tccagcgaccggctgggcgttcctg

SEQ ID NO: 3122999 - DNA, 25 bp, Homo sapien
ccggccgccataagggcgagggctg

SEQ ID NO: 3123000 - DNA, 25 bp, Homo sapien
ggctccccaccagccggaaagctcc

SEQ ID NO: 3123001 - DNA, 25 bp, Homo sapien
tggggccttcgaggtgtgatgtcac

SEQ ID NO: 3123002 - DNA, 25 bp, Homo sapien
cgacacgggtattgggcaactgtaa

SEQ ID NO: 3123003 - DNA, 25 bp, Homo sapien
aactgtaaccagctccaaccggaag

SEQ ID NO: 3123004 - DNA, 25 bp, Homo sapien
aaccagctccaaccggaagtacctg

SEQ ID NO: 3123005 - DNA, 25 bp, Homo sapien
aaacagcccacacagcgacacgggt

SEQ ID NO: 3123006 - DNA, 25 bp, Homo sapien
acacaggcgcggtgacctccaggca

SEQ ID NO: 3123007 - DNA, 25 bp, Homo sapien
ggtgaggacacaggcgcggtgacct

SEQ ID NO: 3123008 - DNA, 25 bp, Homo sapien
aggacacaggcgcggtgacctccag

SEQ ID NO: 3123009 - DNA, 25 bp, Homo sapien
tgaggacacaggcgcggtgacctcc

SEQ ID NO: 3123010 - DNA, 25 bp, Homo sapien
gcctgaacccttgacagattggaga

SEQ ID NO: 3123011 - DNA, 25 bp, Homo sapien
gatcatcaacagtccaactacgagg

SEQ ID NO: 3123012 - DNA, 25 bp, Homo sapien
gggagcagatcaataaccagcctga

SEQ ID NO: 3123013 - DNA, 25 bp, Homo sapien
cctgggccctattctcaaagtggag

SEQ ID NO: 3123014 - DNA, 25 bp, Homo sapien
accccagggagcctcagtgcagcct

SEQ ID NO: 3123015 - DNA, 25 bp, Homo sapien
ctgtcaccccagggagcctcagtgc

SEQ ID NO: 3123016 - DNA, 25 bp, Homo sapien
cccagggagcctcagtgcagcctca

SEQ ID NO: 3123017 - DNA, 25 bp, Homo sapien
tcaccccagggagcctcagtgcagc

SEQ ID NO: 3123018 - DNA, 25 bp, Homo sapien
ggccaccccaagttatcacatgcag

SEQ ID NO: 3123019 - DNA, 25 bp, Homo sapien
tacgcaggccagttgagactaggac

SEQ ID NO: 3123020 - DNA, 25 bp, Homo sapien
gaccccgaggtgtagctttggcaca

SEQ ID NO: 3123021 - DNA, 25 bp, Homo sapien
gtgagcccacagcagtacgcaggcc

SEQ ID NO: 3123022 - DNA, 25 bp, Homo sapien
gccggtaccgctcttggctgtgcca

SEQ ID NO: 3123023 - DNA, 25 bp, Homo sapien
gccgcaatgccggtaccgctcttgg

SEQ ID NO: 3123024 - DNA, 25 bp, Homo sapien
gcaatgccggtaccgctcttggctg

SEQ ID NO: 3123025 - DNA, 25 bp, Homo sapien
atgccggtaccgctcttggctgtgc

SEQ ID NO: 3123026 - DNA, 25 bp, Homo sapien
cagggagttggcgatgaggactgcc

SEQ ID NO: 3123027 - DNA, 25 bp, Homo sapien
tgatggacttcatgatctgctccgg

SEQ ID NO: 3123028 - DNA, 25 bp, Homo sapien
tagaggctgatgtcgtcattcaggg

SEQ ID NO: 3123029 - DNA, 25 bp, Homo sapien
accaccaggccgtagatggcgatga

SEQ ID NO: 3123030 - DNA, 25 bp, Homo sapien
gcgacgatgagaccgtagaggccga

SEQ ID NO: 3123031 - DNA, 25 bp, Homo sapien
agggcgacgatgagaccgtagaggc

SEQ ID NO: 3123032 - DNA, 25 bp, Homo sapien
ggcggtgccccgcacgccagcgtcc

SEQ ID NO: 3123033 - DNA, 25 bp, Homo sapien
gatgagggcgacgatgagaccgtag

SEQ ID NO: 3123034 - DNA, 25 bp, Homo sapien
ccccgtgcgtatgtgtcaggctgtt

SEQ ID NO: 3123035 - DNA, 25 bp, Homo sapien
aattctaaatcatccgcatacacag

SEQ ID NO: 3123036 - DNA, 25 bp, Homo sapien
ggcggcggccccgtgcgtatgtgtc

SEQ ID NO: 3123037 - DNA, 25 bp, Homo sapien
atagctgggagacaagggccgctcc

SEQ ID NO: 3123038 - DNA, 25 bp, Homo sapien
gcggcggccaaatcccgcgcccagt

SEQ ID NO: 3123039 - DNA, 25 bp, Homo sapien
agtgacgaaccccagccgagagctg

SEQ ID NO: 3123040 - DNA, 25 bp, Homo sapien
tgagaccgcgcccacgtgaccttca

SEQ ID NO: 3123041 - DNA, 25 bp, Homo sapien
cgtgagccgtgtcgggagcgagcgg

SEQ ID NO: 3123042 - DNA, 25 bp, Homo sapien
cggcagttagtgaactggagcacgc

SEQ ID NO: 3123043 - DNA, 25 bp, Homo sapien
gagcagtttccctccgcgcaggatc

SEQ ID NO: 3123044 - DNA, 25 bp, Homo sapien
caggatccggcagttagtgaactgg

SEQ ID NO: 3123045 - DNA, 25 bp, Homo sapien
ttagtgaactggagcacgcgggccc

SEQ ID NO: 3123046 - DNA, 25 bp, Homo sapien
ttctctgggtccaagatgcggcctc

SEQ ID NO: 3123047 - DNA, 25 bp, Homo sapien
cgcgccgctcctcaaagaacagctt

SEQ ID NO: 3123048 - DNA, 25 bp, Homo sapien
atgaatccgggagccaagatgcggc

SEQ ID NO: 3123049 - DNA, 25 bp, Homo sapien
cgttgatctgcacgtcgatgaatcc

SEQ ID NO: 3123050 - DNA, 25 bp, Homo sapien
agaaaaggaagtgtcgcatggagct

SEQ ID NO: 3123051 - DNA, 25 bp, Homo sapien
gaagtgtcgcatggagctcagagct

SEQ ID NO: 3123052 - DNA, 25 bp, Homo sapien
aagtgtcgcatggagctcagagctc

SEQ ID NO: 3123053 - DNA, 25 bp, Homo sapien
aaggaagtgtcgcatggagctcaga

SEQ ID NO: 3123054 - DNA, 25 bp, Homo sapien
cgacaggatcctccgggccacgagg

SEQ ID NO: 3123055 - DNA, 25 bp, Homo sapien
gggcagaaggaggtgacgccgtgcg

SEQ ID NO: 3123056 - DNA, 25 bp, Homo sapien
gtcctccgtggcttgagagaagtca

SEQ ID NO: 3123057 - DNA, 25 bp, Homo sapien
tgagagaagtcaacaccaaatccac

SEQ ID NO: 3123058 - DNA, 25 bp, Homo sapien
tgtgccaatcacagaatcccctgcg

SEQ ID NO: 3123059 - DNA, 25 bp, Homo sapien
ggactatcgctgtgccaatcacaga

SEQ ID NO: 3123060 - DNA, 25 bp, Homo sapien
cagggactatcgctgtgccaatcac

SEQ ID NO: 3123061 - DNA, 25 bp, Homo sapien
acagaatcccctgcggccttggtta

SEQ ID NO: 3123062 - DNA, 25 bp, Homo sapien
gagaaggtggtcttaatggaccaga

SEQ ID NO: 3123063 - DNA, 25 bp, Homo sapien
agcttctggcaaagtggccatccaa

SEQ ID NO: 3123064 - DNA, 25 bp, Homo sapien
tccaagtaccgtagcaaaggacagg

SEQ ID NO: 3123065 - DNA, 25 bp, Homo sapien
gtcttaatggaccagaacaggacaa

SEQ ID NO: 3123066 - DNA, 25 bp, Homo sapien
cacaggtattctcatcacaattatg

SEQ ID NO: 3123067 - DNA, 25 bp, Homo sapien
caggtattctcatcacaattatggg

SEQ ID NO: 3123068 - DNA, 25 bp, Homo sapien
ctacacaggtattctcatcacaatt

SEQ ID NO: 3123069 - DNA, 25 bp, Homo sapien
tacacaggtattctcatcacaatta

SEQ ID NO: 3123070 - DNA, 25 bp, Homo sapien
tcacaccacacatctcagaggctaa

SEQ ID NO: 3123071 - DNA, 25 bp, Homo sapien
ggacacgggctcacaccacacatct

SEQ ID NO: 3123072 - DNA, 25 bp, Homo sapien
gggctcacaccacacatctcagagg

SEQ ID NO: 3123073 - DNA, 25 bp, Homo sapien
acaccacacatctcagaggctaaca

SEQ ID NO: 3123074 - DNA, 25 bp, Homo sapien
cagggaaagcacagccggcagaatt

SEQ ID NO: 3123075 - DNA, 25 bp, Homo sapien
tgtgtgggatgccagcggtccctgg

SEQ ID NO: 3123076 - DNA, 25 bp, Homo sapien
atgataggtgtgtgggatgccagcg

SEQ ID NO: 3123077 - DNA, 25 bp, Homo sapien
cggcagaattgaaggacccatggca

SEQ ID NO: 3123078 - DNA, 25 bp, Homo sapien
ccccacagcccattcccagaggcca

SEQ ID NO: 3123079 - DNA, 25 bp, Homo sapien
ccacagcccattcccagaggccaca

SEQ ID NO: 3123080 - DNA, 25 bp, Homo sapien
ctgtcccccacagcccattcccaga

SEQ ID NO: 3123081 - DNA, 25 bp, Homo sapien
acagcccattcccagaggccacagc

SEQ ID NO: 3123082 - DNA, 25 bp, Homo sapien
catggggaccaccactcttcacagg

SEQ ID NO: 3123083 - DNA, 25 bp, Homo sapien
ctgccccatggggaccaccactctt

SEQ ID NO: 3123084 - DNA, 25 bp, Homo sapien
tggggaccaccactcttcacaggga

SEQ ID NO: 3123085 - DNA, 25 bp, Homo sapien
gacccctgccccatggggaccacca

SEQ ID NO: 3123086 - DNA, 25 bp, Homo sapien
tcccggctgatgaaggggccctcca

SEQ ID NO: 3123087 - DNA, 25 bp, Homo sapien
cctggaaggcatcggcctcgaagga

SEQ ID NO: 3123088 - DNA, 25 bp, Homo sapien
tcggcctcgaaggagcggaggtggg

SEQ ID NO: 3123089 - DNA, 25 bp, Homo sapien
ggcccgtaggtggccagcaagtcct

SEQ ID NO: 3123090 - DNA, 25 bp, Homo sapien
acgcagatgccacgggccgtcagcg

SEQ ID NO: 3123091 - DNA, 25 bp, Homo sapien
gtcagcgcccggatcacttcgtggc

SEQ ID NO: 3123092 - DNA, 25 bp, Homo sapien
ctagggacacgcagatgccacgggc

SEQ ID NO: 3123093 - DNA, 25 bp, Homo sapien
acttcgtggctacggcccaactctg

SEQ ID NO: 3123094 - DNA, 25 bp, Homo sapien
caagcaggcccaccccgagccggcc

SEQ ID NO: 3123095 - DNA, 25 bp, Homo sapien
tcccccaagcaggcccaccccgagc

SEQ ID NO: 3123096 - DNA, 25 bp, Homo sapien
ggcccaggtcccccaagcaggccca

SEQ ID NO: 3123097 - DNA, 25 bp, Homo sapien
cccaagcaggcccaccccgagccgg

SEQ ID NO: 3123098 - DNA, 25 bp, Homo sapien
aggcagcatggcgttgaagaggtgg

SEQ ID NO: 3123099 - DNA, 25 bp, Homo sapien
gcagcatggcgttgaagaggtgggt

SEQ ID NO: 3123100 - DNA, 25 bp, Homo sapien
ggcagcatggcgttgaagaggtggg

SEQ ID NO: 3123101 - DNA, 25 bp, Homo sapien
aagggatggctgagcgacagcaggg

SEQ ID NO: 3123102 - DNA, 25 bp, Homo sapien
caggggcgagggaagggatggctga

SEQ ID NO: 3123103 - DNA, 25 bp, Homo sapien
ggcgagggaagggatggctgagcga

SEQ ID NO: 3123104 - DNA, 25 bp, Homo sapien
gggaagggatggctgagcgacagca

SEQ ID NO: 3123105 - DNA, 25 bp, Homo sapien
cccacgatgcctgggtcgcggtggt

SEQ ID NO: 3123106 - DNA, 25 bp, Homo sapien
agccggtcgctggtcaggagcccca

SEQ ID NO: 3123107 - DNA, 25 bp, Homo sapien
ggatgggcacggtgggcgatccgca

SEQ ID NO: 3123108 - DNA, 25 bp, Homo sapien
ggtgtgcgtgccatctgcaatcatc

SEQ ID NO: 3123109 - DNA, 25 bp, Homo sapien
tgtcctggccacctgccgcagctta

SEQ ID NO: 3123110 - DNA, 25 bp, Homo sapien
gtcctggccacctgccgcagcttac

SEQ ID NO: 3123111 - DNA, 25 bp, Homo sapien
ctgtcctggccacctgccgcagctt

SEQ ID NO: 3123112 - DNA, 25 bp, Homo sapien
gaacctgctagcccagtcatcctac

SEQ ID NO: 3123113 - DNA, 25 bp, Homo sapien
gagaagaggctcagaacctgctagc

SEQ ID NO: 3123114 - DNA, 25 bp, Homo sapien
agaagaggctcagaacctgctagcc

SEQ ID NO: 3123115 - DNA, 25 bp, Homo sapien
agaacctgctagcccagtcatccta

SEQ ID NO: 3123116 - DNA, 25 bp, Homo sapien
ggatggcatcggtgaccagcaccag

SEQ ID NO: 3123117 - DNA, 25 bp, Homo sapien
cagggatggcatcggtgaccagcac

SEQ ID NO: 3123118 - DNA, 25 bp, Homo sapien
acgtaggccgtcagaccgtccactt

SEQ ID NO: 3123119 - DNA, 25 bp, Homo sapien
tgctgtcccagcgtgtgccggccgt

SEQ ID NO: 3123120 - DNA, 25 bp, Homo sapien
tgggacctgggacccagtgggtcag

SEQ ID NO: 3123121 - DNA, 25 bp, Homo sapien
cgtgggccacctggcatgcgggctg

SEQ ID NO: 3123122 - DNA, 25 bp, Homo sapien
gggtcgtgggccacctggcatgcgg

SEQ ID NO: 3123123 - DNA, 25 bp, Homo sapien
ggacccagtgggtcagggcgctcac

SEQ ID NO: 3123124 - DNA, 25 bp, Homo sapien
caggaagtgccggacacagacgtcc

SEQ ID NO: 3123125 - DNA, 25 bp, Homo sapien
tatgctgccactcagcgtcttggtg

SEQ ID NO: 3123126 - DNA, 25 bp, Homo sapien
gggctatgctgccactcagcgtctt

SEQ ID NO: 3123127 - DNA, 25 bp, Homo sapien
gtgccggacacagacgtccattggg

SEQ ID NO: 3123128 - DNA, 25 bp, Homo sapien
cagagcttgggctacagtccgggca

SEQ ID NO: 3123129 - DNA, 25 bp, Homo sapien
aacccgcacccgtgctgctcactga

SEQ ID NO: 3123130 - DNA, 25 bp, Homo sapien
cagaccacctaaacccgcacccgtg

SEQ ID NO: 3123131 - DNA, 25 bp, Homo sapien
acacagctaggtgacagtccccaag

SEQ ID NO: 3123132 - DNA, 25 bp, Homo sapien
tccagccccagcaactgggcggggt

SEQ ID NO: 3123133 - DNA, 25 bp, Homo sapien
ctgcgtcagcaccaaagtccagggt

SEQ ID NO: 3123134 - DNA, 25 bp, Homo sapien
cagggtccccttactcttctccagc

SEQ ID NO: 3123135 - DNA, 25 bp, Homo sapien
gcgtcagcaccaaagtccagggtcc

SEQ ID NO: 3123136 - DNA, 25 bp, Homo sapien
cagggacacgactagtgcaagacac

SEQ ID NO: 3123137 - DNA, 25 bp, Homo sapien
aagcccggcctgatggcaacacggg

SEQ ID NO: 3123138 - DNA, 25 bp, Homo sapien
ccatcacagatggacagaggtactg

SEQ ID NO: 3123139 - DNA, 25 bp, Homo sapien
ttgtctgcaacaccagaaagcccgg

SEQ ID NO: 3123140 - DNA, 25 bp, Homo sapien
acgtgaagggagtcgtcgagcacca

SEQ ID NO: 3123141 - DNA, 25 bp, Homo sapien
tggcctggacgtgaagggagtcgtc

SEQ ID NO: 3123142 - DNA, 25 bp, Homo sapien
ccgagatgtaggtggcctggacgtg

SEQ ID NO: 3123143 - DNA, 25 bp, Homo sapien
agggagtcgtcgagcaccacgaagt

SEQ ID NO: 3123144 - DNA, 25 bp, Homo sapien
gcctagctgcgtccgcctgccacac

SEQ ID NO: 3123145 - DNA, 25 bp, Homo sapien
ggccctgatggcatcccgctgcggc

SEQ ID NO: 3123146 - DNA, 25 bp, Homo sapien
tggcatcccgctgcggccaggtgtc

SEQ ID NO: 3123147 - DNA, 25 bp, Homo sapien
acccggccctgatggcatcccgctg

SEQ ID NO: 3123148 - DNA, 25 bp, Homo sapien
ctgatggcatcccgctgcggccagg

SEQ ID NO: 3123149 - DNA, 25 bp, Homo sapien
aacagaacgctggtcatccgtggca

SEQ ID NO: 3123150 - DNA, 25 bp, Homo sapien
gagcagaaagcaaacccctgactgt

SEQ ID NO: 3123151 - DNA, 25 bp, Homo sapien
gatggtgccacatgtgagcacaagc

SEQ ID NO: 3123152 - DNA, 25 bp, Homo sapien
tcctgctgggtgcacgtttatccca

SEQ ID NO: 3123153 - DNA, 25 bp, Homo sapien
tgtttgccacatgggtgtgtgccag

SEQ ID NO: 3123154 - DNA, 25 bp, Homo sapien
tcgaagctgttcagggagcctcacg

SEQ ID NO: 3123155 - DNA, 25 bp, Homo sapien
gggctgcaccaatccctgacgtctg

SEQ ID NO: 3123156 - DNA, 25 bp, Homo sapien
gtcaagacaatcacccctgacgtgg

SEQ ID NO: 3123157 - DNA, 25 bp, Homo sapien
ggacctggagacatttccttaactg

SEQ ID NO: 3123158 - DNA, 25 bp, Homo sapien
agaggtgggtatccctgcacctcac

SEQ ID NO: 3123159 - DNA, 25 bp, Homo sapien
gggcccagaccatcctatctctttg

SEQ ID NO: 3123160 - DNA, 25 bp, Homo sapien
ggaggtcaggatccacatccgtcgc

SEQ ID NO: 3123161 - DNA, 25 bp, Homo sapien
tgctcaacctctaacacatcggctg

SEQ ID NO: 3123162 - DNA, 25 bp, Homo sapien
cagcaagctgggcacaggcgatgct

SEQ ID NO: 3123163 - DNA, 25 bp, Homo sapien
gcacaggcgatgctcaacctctaac

SEQ ID NO: 3123164 - DNA, 25 bp, Homo sapien
ctaacacatcggctgagaacctcac

SEQ ID NO: 3123165 - DNA, 25 bp, Homo sapien
tctggactgggcgtcccgtctgagg

SEQ ID NO: 3123166 - DNA, 25 bp, Homo sapien
agctctggactgggcgtcccgtctg

SEQ ID NO: 3123167 - DNA, 25 bp, Homo sapien
tggactgggcgtcccgtctgaggtg

SEQ ID NO: 3123168 - DNA, 25 bp, Homo sapien
gctctggactgggcgtcccgtctga

SEQ ID NO: 3123169 - DNA, 25 bp, Homo sapien
tagccctgtggaccaaccatctctg

SEQ ID NO: 3123170 - DNA, 25 bp, Homo sapien
cgctggccggtgaatggggcaggcc

SEQ ID NO: 3123171 - DNA, 25 bp, Homo sapien
agggctagccctgtggaccaaccat

SEQ ID NO: 3123172 - DNA, 25 bp, Homo sapien
ggctagccctgtggaccaaccatct

SEQ ID NO: 3123173 - DNA, 25 bp, Homo sapien
cccgcagtcagggcgccctgcatcc

SEQ ID NO: 3123174 - DNA, 25 bp, Homo sapien
cgcagtcagggcgccctgcatcctt

SEQ ID NO: 3123175 - DNA, 25 bp, Homo sapien
tcagggcgccctgcatccttctttg

SEQ ID NO: 3123176 - DNA, 25 bp, Homo sapien
gcgccctgcatccttctttgtaaaa

SEQ ID NO: 3123177 - DNA, 25 bp, Homo sapien
agcgaatgcccacaccgcgggcagg

SEQ ID NO: 3123178 - DNA, 25 bp, Homo sapien
tgcccacaccgcgggcaggcctgcc

SEQ ID NO: 3123179 - DNA, 25 bp, Homo sapien
aatgcccacaccgcgggcaggcctg

SEQ ID NO: 3123180 - DNA, 25 bp, Homo sapien
tcagcgaatgcccacaccgcgggca

SEQ ID NO: 3123181 - DNA, 25 bp, Homo sapien
ttcaagctagttgaggacagagcca

SEQ ID NO: 3123182 - DNA, 25 bp, Homo sapien
cacaaccctggtagaaagtgaacgg

SEQ ID NO: 3123183 - DNA, 25 bp, Homo sapien
gaaggccctgagttacaaagccagg

SEQ ID NO: 3123184 - DNA, 25 bp, Homo sapien
gcaggtgtgcacaccagaaggccct

SEQ ID NO: 3123185 - DNA, 25 bp, Homo sapien
agcacggttctcccgacccgggctg

SEQ ID NO: 3123186 - DNA, 25 bp, Homo sapien
cagcacggttctcccgacccgggct

SEQ ID NO: 3123187 - DNA, 25 bp, Homo sapien
tcctcctccccgaagcggagcccca

SEQ ID NO: 3123188 - DNA, 25 bp, Homo sapien
cccagcaatggccgccctcatcctg

SEQ ID NO: 3123189 - DNA, 25 bp, Homo sapien
ccccgaagcggagccccagcaatgg

SEQ ID NO: 3123190 - DNA, 25 bp, Homo sapien
agcgtcctcctccccgaagcggagc

SEQ ID NO: 3123191 - DNA, 25 bp, Homo sapien
cgcgtccagtccgccgccgcgcgct

SEQ ID NO: 3123192 - DNA, 25 bp, Homo sapien
tgcaggtaaggaggcacccggccct

SEQ ID NO: 3123193 - DNA, 25 bp, Homo sapien
tcaggtgctttcagcaagaacttgc

SEQ ID NO: 3123194 - DNA, 25 bp, Homo sapien
gggcccaggagcatcaggtgctttc

SEQ ID NO: 3123195 - DNA, 25 bp, Homo sapien
tttcagcaagaacttgcaccttctg

SEQ ID NO: 3123196 - DNA, 25 bp, Homo sapien
tctcgcaggcggaggcgccaaggac

SEQ ID NO: 3123197 - DNA, 25 bp, Homo sapien
ccacgggcagcaaaagcacccaaat

SEQ ID NO: 3123198 - DNA, 25 bp, Homo sapien
caaatgccccttggccgggccgtga

SEQ ID NO: 3123199 - DNA, 25 bp, Homo sapien
tcggtgatcctgcacattcggcctc

SEQ ID NO: 3123200 - DNA, 25 bp, Homo sapien
cttggccgggccgtgaaaggcgagt

SEQ ID NO: 3123201 - DNA, 25 bp, Homo sapien
tccttaacacgcatctctacaaagt

SEQ ID NO: 3123202 - DNA, 25 bp, Homo sapien
cgggccactctggtgtacagccaca

SEQ ID NO: 3123203 - DNA, 25 bp, Homo sapien
ttcttccttaacacgcatctctaca

SEQ ID NO: 3123204 - DNA, 25 bp, Homo sapien
acacgcatctctacaaagtccacga

SEQ ID NO: 3123205 - DNA, 25 bp, Homo sapien
gaagcagaatccaactacaaggccc

SEQ ID NO: 3123206 - DNA, 25 bp, Homo sapien
gaggtcacacgcaattctgaagcag

SEQ ID NO: 3123207 - DNA, 25 bp, Homo sapien
gaagttactcctaggccagttgcgg

SEQ ID NO: 3123208 - DNA, 25 bp, Homo sapien
tacatggcatctaggcgacacagtc

SEQ ID NO: 3123209 - DNA, 25 bp, Homo sapien
tacaagatttctctgcaaggaggct

SEQ ID NO: 3123210 - DNA, 25 bp, Homo sapien
ttctatttctccacgaagggaggga

SEQ ID NO: 3123211 - DNA, 25 bp, Homo sapien
aaactacaatctggagggccactcg

SEQ ID NO: 3123212 - DNA, 25 bp, Homo sapien
gatgccagttacctctgaacgggag

SEQ ID NO: 3123213 - DNA, 25 bp, Homo sapien
tggtggtttccgatacaactcccca

SEQ ID NO: 3123214 - DNA, 25 bp, Homo sapien
tctctcagtagggtcctgaagtcca

SEQ ID NO: 3123215 - DNA, 25 bp, Homo sapien
cactacagaagaacaatgcgaggcg

SEQ ID NO: 3123216 - DNA, 25 bp, Homo sapien
gaaccccggagagctcttgattcca

SEQ ID NO: 3123217 - DNA, 25 bp, Homo sapien
tcaatgcacggactaaggtttaagg

SEQ ID NO: 3123218 - DNA, 25 bp, Homo sapien
agctgccttgctctcaatgcacgga

SEQ ID NO: 3123219 - DNA, 25 bp, Homo sapien
gacctcatttcaacgctcaaaaaca

SEQ ID NO: 3123220 - DNA, 25 bp, Homo sapien
aggacctcatttcaacgctcaaaaa

SEQ ID NO: 3123221 - DNA, 25 bp, Homo sapien
tcccaaacttgaagtcctcaggccg

SEQ ID NO: 3123222 - DNA, 25 bp, Homo sapien
ggatgggcaggaacataacaccacg

SEQ ID NO: 3123223 - DNA, 25 bp, Homo sapien
gaggctcggctgcagtgccgtccat

SEQ ID NO: 3123224 - DNA, 25 bp, Homo sapien
taacaccacgctggactggatgggc

SEQ ID NO: 3123225 - DNA, 25 bp, Homo sapien
catgtcagctgctttcgaccttcat

SEQ ID NO: 3123226 - DNA, 25 bp, Homo sapien
gtcccacgtcagcaaaacgtcccat

SEQ ID NO: 3123227 - DNA, 25 bp, Homo sapien
tcagcaaaacgtcccatgtcagctg

SEQ ID NO: 3123228 - DNA, 25 bp, Homo sapien
gtcagctgctttcgaccttcatttc

SEQ ID NO: 3123229 - DNA, 25 bp, Homo sapien
ctgggtggttgtaagcagccatgca

SEQ ID NO: 3123230 - DNA, 25 bp, Homo sapien
tgcagaatgcccaaggttttccaaa

SEQ ID NO: 3123231 - DNA, 25 bp, Homo sapien
catttttcatgagggcataatcctt

SEQ ID NO: 3123232 - DNA, 25 bp, Homo sapien
aaaaatctaaagtgtaagggcagca

SEQ ID NO: 3123233 - DNA, 25 bp, Homo sapien
gaggaatacgccacgcatggatggc

SEQ ID NO: 3123234 - DNA, 25 bp, Homo sapien
tcctggaaagcaccatgtgagacgc

SEQ ID NO: 3123235 - DNA, 25 bp, Homo sapien
gcaggactcctgatgggacacgtca

SEQ ID NO: 3123236 - DNA, 25 bp, Homo sapien
gaaagaattgtgaacgagcaccgat

SEQ ID NO: 3123237 - DNA, 25 bp, Homo sapien
gaggttgccagttctcgagccagga

SEQ ID NO: 3123238 - DNA, 25 bp, Homo sapien
tggaggttgccagttctcgagccag

SEQ ID NO: 3123239 - DNA, 25 bp, Homo sapien
tctctggaggttgccagttctcgag

SEQ ID NO: 3123240 - DNA, 25 bp, Homo sapien
tctggaggttgccagttctcgagcc

SEQ ID NO: 3123241 - DNA, 25 bp, Homo sapien
tatgatatgtcgcttctccagaatt

SEQ ID NO: 3123242 - DNA, 25 bp, Homo sapien
tgatccaggcgcgacatgacatccc

SEQ ID NO: 3123243 - DNA, 25 bp, Homo sapien
gcttctcgtcgtcctgaaatgtgaa

SEQ ID NO: 3123244 - DNA, 25 bp, Homo sapien
catcccgctctctggttacataggg

SEQ ID NO: 3123245 - DNA, 25 bp, Homo sapien
gcaggccagaacgaagctctaacac

SEQ ID NO: 3123246 - DNA, 25 bp, Homo sapien
tgggagcaggccagaacgaagctct

SEQ ID NO: 3123247 - DNA, 25 bp, Homo sapien
cagaacgaagctctaacacagaaga

SEQ ID NO: 3123248 - DNA, 25 bp, Homo sapien
cgccggcagccgaaggagctgcagg

SEQ ID NO: 3123249 - DNA, 25 bp, Homo sapien
gaagcttctcgtgggcagagacgcc

SEQ ID NO: 3123250 - DNA, 25 bp, Homo sapien
tccaccaaaatcgaagcttctcgtg

SEQ ID NO: 3123251 - DNA, 25 bp, Homo sapien
gggaagcctctgacacggatcgtca

SEQ ID NO: 3123252 - DNA, 25 bp, Homo sapien
gatcgtcagtgcacgtccagctcct

SEQ ID NO: 3123253 - DNA, 25 bp, Homo sapien
cactttgtaagacaaaagccatctc

SEQ ID NO: 3123254 - DNA, 25 bp, Homo sapien
cctggccgagtgacacactttgtaa

SEQ ID NO: 3123255 - DNA, 25 bp, Homo sapien
tgaacttctacacccatgaagtgtg

SEQ ID NO: 3123256 - DNA, 25 bp, Homo sapien
gcaccactgccctacgatggctcca

SEQ ID NO: 3123257 - DNA, 25 bp, Homo sapien
gagggctttctcattaagaacgcca

SEQ ID NO: 3123258 - DNA, 25 bp, Homo sapien
caagacgaggcaccagcatgatgag

SEQ ID NO: 3123259 - DNA, 25 bp, Homo sapien
atgagggctttctcattaagaacgc

SEQ ID NO: 3123260 - DNA, 25 bp, Homo sapien
aggccccagctccaagacgaggcac

SEQ ID NO: 3123261 - DNA, 25 bp, Homo sapien
ctgataagaatttttaattcagtgc

SEQ ID NO: 3123262 - DNA, 25 bp, Homo sapien
aatttttaattcagtgcaaactgaa

SEQ ID NO: 3123263 - DNA, 25 bp, Homo sapien
taagaatttttaattcagtgcaaac

SEQ ID NO: 3123264 - DNA, 25 bp, Homo sapien
ttaattcagtgcaaactgaaagtac

SEQ ID NO: 3123265 - DNA, 25 bp, Homo sapien
tgtaaaatcgggtacaggtctcatc

SEQ ID NO: 3123266 - DNA, 25 bp, Homo sapien
cgaatgaaccgattttgcgaatata

SEQ ID NO: 3123267 - DNA, 25 bp, Homo sapien
agtactctaaagcagacacaatctc

SEQ ID NO: 3123268 - DNA, 25 bp, Homo sapien
gtgaatgatgcccttgccgtgcaag

SEQ ID NO: 3123269 - DNA, 25 bp, Homo sapien
gctggacacagtagggattcaccac

SEQ ID NO: 3123270 - DNA, 25 bp, Homo sapien
taaagctcacaagcaacaagtgttg

SEQ ID NO: 3123271 - DNA, 25 bp, Homo sapien
gacaaccagggctacaggcctaaag

SEQ ID NO: 3123272 - DNA, 25 bp, Homo sapien
ccaggaaagacacgcaaccattgca

SEQ ID NO: 3123273 - DNA, 25 bp, Homo sapien
ggatgtgcatatcttcatttaacaa

SEQ ID NO: 3123274 - DNA, 25 bp, Homo sapien
ctggatgtgcatatcttcatttaac

SEQ ID NO: 3123275 - DNA, 25 bp, Homo sapien
gatctggatgtgcatatcttcattt

SEQ ID NO: 3123276 - DNA, 25 bp, Homo sapien
gatgtgcatatcttcatttaacaaa

SEQ ID NO: 3123277 - DNA, 25 bp, Homo sapien
tgacacaatgcaaacactcctcaga

SEQ ID NO: 3123278 - DNA, 25 bp, Homo sapien
atgacacaatgcaaacactcctcag

SEQ ID NO: 3123279 - DNA, 25 bp, Homo sapien
cacgcgggtggctgggtacgaatgt

SEQ ID NO: 3123280 - DNA, 25 bp, Homo sapien
ctgcacgcgggtggctgggtacgaa

SEQ ID NO: 3123281 - DNA, 25 bp, Homo sapien
ggctgggtacgaatgtggcccccca

SEQ ID NO: 3123282 - DNA, 25 bp, Homo sapien
cgggtggctgggtacgaatgtggcc

SEQ ID NO: 3123283 - DNA, 25 bp, Homo sapien
aggtacagggatgtgcgcgcccgga

SEQ ID NO: 3123284 - DNA, 25 bp, Homo sapien
gtacagggatgtgcgcgcccggata

SEQ ID NO: 3123285 - DNA, 25 bp, Homo sapien
acagggatgtgcgcgcccggatact

SEQ ID NO: 3123286 - DNA, 25 bp, Homo sapien
agggatgtgcgcgcccggatactac

SEQ ID NO: 3123287 - DNA, 25 bp, Homo sapien
tcccagcacacagaatacagggcca

SEQ ID NO: 3123288 - DNA, 25 bp, Homo sapien
ctcccagcacacagaatacagggcc

SEQ ID NO: 3123289 - DNA, 25 bp, Homo sapien
agcacacagaatacagggccaattc

SEQ ID NO: 3123290 - DNA, 25 bp, Homo sapien
ccagcacacagaatacagggccaat

SEQ ID NO: 3123291 - DNA, 25 bp, Homo sapien
gaggccccacaggcaccagctgggt

SEQ ID NO: 3123292 - DNA, 25 bp, Homo sapien
ggccccacaggcaccagctgggtac

SEQ ID NO: 3123293 - DNA, 25 bp, Homo sapien
aaggtgccaagagaggccccacagg

SEQ ID NO: 3123294 - DNA, 25 bp, Homo sapien
tcaaggtgccaagagaggccccaca

SEQ ID NO: 3123295 - DNA, 25 bp, Homo sapien
tgggcgggaggtgcgcactctggca

SEQ ID NO: 3123296 - DNA, 25 bp, Homo sapien
tctgaaacgccaggaagaccgccct

SEQ ID NO: 3123297 - DNA, 25 bp, Homo sapien
gaagaccgccctggctctgtgcagc

SEQ ID NO: 3123298 - DNA, 25 bp, Homo sapien
tttgggcgggaggtgcgcactctgg

SEQ ID NO: 3123299 - DNA, 25 bp, Homo sapien
tgtgtacacagaaacaggattacca

SEQ ID NO: 3123300 - DNA, 25 bp, Homo sapien
gtgtacacagaaacaggattaccag

SEQ ID NO: 3123301 - DNA, 25 bp, Homo sapien
ttcaactttgtcacagacaacactg

SEQ ID NO: 3123302 - DNA, 25 bp, Homo sapien
gacactgacagatcctaagaaagct

SEQ ID NO: 3123303 - DNA, 25 bp, Homo sapien
gctcctgaccccacggaatgttgtg

SEQ ID NO: 3123304 - DNA, 25 bp, Homo sapien
tttcatcagcgcacttaaatgcccg

SEQ ID NO: 3123305 - DNA, 25 bp, Homo sapien
tccacacgaagggaaaaatgcccag

SEQ ID NO: 3123306 - DNA, 25 bp, Homo sapien
tccacacctggctgcatgccagaaa

SEQ ID NO: 3123307 - DNA, 25 bp, Homo sapien
tcctgtttggtgagtgctgcctcca

SEQ ID NO: 3123308 - DNA, 25 bp, Homo sapien
ctgaagcccacagcgtccaccctgt

SEQ ID NO: 3123309 - DNA, 25 bp, Homo sapien
tgcccacacctgtggccttcctctc

SEQ ID NO: 3123310 - DNA, 25 bp, Homo sapien
gccactgtagtgactgaagcccacg

SEQ ID NO: 3123311 - DNA, 25 bp, Homo sapien
cagaggagccactgtagtgactgaa

SEQ ID NO: 3123312 - DNA, 25 bp, Homo sapien
ctggacgatggccatgcacagatga

SEQ ID NO: 3123313 - DNA, 25 bp, Homo sapien
tggacgatggccatgcacagatgag

SEQ ID NO: 3123314 - DNA, 25 bp, Homo sapien
ggtgggtgatccagcctaagctaga

SEQ ID NO: 3123315 - DNA, 25 bp, Homo sapien
gccctcaggagagcgtctggagtcc

SEQ ID NO: 3123316 - DNA, 25 bp, Homo sapien
ggaaaatccgtcttgaaggcagctc

SEQ ID NO: 3123317 - DNA, 25 bp, Homo sapien
ctagaatggcggcaagctcaaggca

SEQ ID NO: 3123318 - DNA, 25 bp, Homo sapien
ctcatgaatgtatcaggctgtgacc

SEQ ID NO: 3123319 - DNA, 25 bp, Homo sapien
gagaggaccatgttcaacaacgcca

SEQ ID NO: 3123320 - DNA, 25 bp, Homo sapien
gagatgccggataaagaacacccac

SEQ ID NO: 3123321 - DNA, 25 bp, Homo sapien
caactctgaatgtgatgtagtggcc

SEQ ID NO: 3123322 - DNA, 25 bp, Homo sapien
ttaatcatcattggaagagaatgga

SEQ ID NO: 3123323 - DNA, 25 bp, Homo sapien
gaaagaagcatttatcctacttttc

SEQ ID NO: 3123324 - DNA, 25 bp, Homo sapien
tgataccacgagtcaacccaaaagt

SEQ ID NO: 3123325 - DNA, 25 bp, Homo sapien
ggagaaccaatgtgtggttttcaaa

SEQ ID NO: 3123326 - DNA, 25 bp, Homo sapien
acctagctaaaaacacacctgtatt

SEQ ID NO: 3123327 - DNA, 25 bp, Homo sapien
cacctagctaaaaacacacctgtat

SEQ ID NO: 3123328 - DNA, 25 bp, Homo sapien
aaaaacacacctgtattttcagtag

SEQ ID NO: 3123329 - DNA, 25 bp, Homo sapien
ccacacctagctaaaaacacacctg

SEQ ID NO: 3123330 - DNA, 25 bp, Homo sapien
attacaggagtcacctggctaagtt

SEQ ID NO: 3123331 - DNA, 25 bp, Homo sapien
gattacaggagtcacctggctaagt

SEQ ID NO: 3123332 - DNA, 25 bp, Homo sapien
ttacaggagtcacctggctaagttt

SEQ ID NO: 3123333 - DNA, 25 bp, Homo sapien
tctcttcaaagccaagggtgccggc

SEQ ID NO: 3123334 - DNA, 25 bp, Homo sapien
cttcaaagccaagggtgccggctgc

SEQ ID NO: 3123335 - DNA, 25 bp, Homo sapien
acactctcttcaaagccaagggtgc

SEQ ID NO: 3123336 - DNA, 25 bp, Homo sapien
gagacacccacactctcttcaaagc

SEQ ID NO: 3123337 - DNA, 25 bp, Homo sapien
tggctgctgatgcccccgcatgcca

SEQ ID NO: 3123338 - DNA, 25 bp, Homo sapien
ctggctgctgatgcccccgcatgcc

SEQ ID NO: 3123339 - DNA, 25 bp, Homo sapien
cccgcatgccacgggactaccgacg

SEQ ID NO: 3123340 - DNA, 25 bp, Homo sapien
ctgctgatgcccccgcatgccacgg

SEQ ID NO: 3123341 - DNA, 25 bp, Homo sapien
caccctatctctcggatgagcgcta

SEQ ID NO: 3123342 - DNA, 25 bp, Homo sapien
tagtgacctgccgtgctgtcgggac

SEQ ID NO: 3123343 - DNA, 25 bp, Homo sapien
agcaagtccgtgaggccaacaccca

SEQ ID NO: 3123344 - DNA, 25 bp, Homo sapien
tttaaacagccacagcgtgcacgga

SEQ ID NO: 3123345 - DNA, 25 bp, Homo sapien
tattcggcgtttctgttctttacta

SEQ ID NO: 3123346 - DNA, 25 bp, Homo sapien
tgttctttactatcatcgagtgttg

SEQ ID NO: 3123347 - DNA, 25 bp, Homo sapien
atcatcgagtgttgcttttgtgact

SEQ ID NO: 3123348 - DNA, 25 bp, Homo sapien
cgagtgttgcttttgtgacttgtac

SEQ ID NO: 3123349 - DNA, 25 bp, Homo sapien
aggcggacttctccgtgagcagctc

SEQ ID NO: 3123350 - DNA, 25 bp, Homo sapien
tgttcccacgaatgagttggccctg

SEQ ID NO: 3123351 - DNA, 25 bp, Homo sapien
ggacttctccgtgagcagctctgga

SEQ ID NO: 3123352 - DNA, 25 bp, Homo sapien
cagctctggagaaacgtactgcgct

SEQ ID NO: 3123353 - DNA, 25 bp, Homo sapien
tgtgtggccgagcaacccgaaggcc

SEQ ID NO: 3123354 - DNA, 25 bp, Homo sapien
ctctcaaagaccctcatgcctgctg

SEQ ID NO: 3123355 - DNA, 25 bp, Homo sapien
tgcgctctgcgggacgctgtcccac

SEQ ID NO: 3123356 - DNA, 25 bp, Homo sapien
gccacgctttcctcactcaatagtt

SEQ ID NO: 3123357 - DNA, 25 bp, Homo sapien
ttccttgacccgcaccggccctgca

SEQ ID NO: 3123358 - DNA, 25 bp, Homo sapien
ttgccgtcagctccctggacatcct

SEQ ID NO: 3123359 - DNA, 25 bp, Homo sapien
agcccctgtaccatctgcacttttt

SEQ ID NO: 3123360 - DNA, 25 bp, Homo sapien
acaccgccggtggtcccctggctgg

SEQ ID NO: 3123361 - DNA, 25 bp, Homo sapien
tggggcaggaggaaccccagcccca

SEQ ID NO: 3123362 - DNA, 25 bp, Homo sapien
gagagcaccagcagccgaagctgac

SEQ ID NO: 3123363 - DNA, 25 bp, Homo sapien
cagccctcagcagcacttgactggc

SEQ ID NO: 3123364 - DNA, 25 bp, Homo sapien
cagcagccgaagctgaccccagccc

SEQ ID NO: 3123365 - DNA, 25 bp, Homo sapien
ccagccctcagcagcacttgactgg

SEQ ID NO: 3123366 - DNA, 25 bp, Homo sapien
ggccccttgtaacctggcggagcag

SEQ ID NO: 3123367 - DNA, 25 bp, Homo sapien
caggaaggtggccccttgtaacctg

SEQ ID NO: 3123368 - DNA, 25 bp, Homo sapien
gtggccccttgtaacctggcggagc

SEQ ID NO: 3123369 - DNA, 25 bp, Homo sapien
cccttgtaacctggcggagcaggag

SEQ ID NO: 3123370 - DNA, 25 bp, Homo sapien
aaaacgtgaatacacattcctcctt

SEQ ID NO: 3123371 - DNA, 25 bp, Homo sapien
ctcctttttcgaagagggcaggatc

SEQ ID NO: 3123372 - DNA, 25 bp, Homo sapien
gaagagggcaggatcctatgcgtat

SEQ ID NO: 3123373 - DNA, 25 bp, Homo sapien
ctgaaacgcgcaaacgagaaaacgt

SEQ ID NO: 3123374 - DNA, 25 bp, Homo sapien
tagacaactaccatcatccgttcag

SEQ ID NO: 3123375 - DNA, 25 bp, Homo sapien
atccgttcagtgtctatccctccag

SEQ ID NO: 3123376 - DNA, 25 bp, Homo sapien
gacaactaccatcatccgttcagtg

SEQ ID NO: 3123377 - DNA, 25 bp, Homo sapien
ccatagacaactaccatcatccgtt

SEQ ID NO: 3123378 - DNA, 25 bp, Homo sapien
aattcaaaagcataaaaagagatgc

SEQ ID NO: 3123379 - DNA, 25 bp, Homo sapien
gttcttaactatgtttaatatcaca

SEQ ID NO: 3123380 - DNA, 25 bp, Homo sapien
gaaatgccttcctcataaacctgtt

SEQ ID NO: 3123381 - DNA, 25 bp, Homo sapien
gcccggcctctttcaattctttata

SEQ ID NO: 3123382 - DNA, 25 bp, Homo sapien
gtatattatgcatccaagagcccaa

SEQ ID NO: 3123383 - DNA, 25 bp, Homo sapien
ctccacgaggtctcttgccttaggg

SEQ ID NO: 3123384 - DNA, 25 bp, Homo sapien
tccacgaggtctcttgccttaggga

SEQ ID NO: 3123385 - DNA, 25 bp, Homo sapien
aagtttctccacgaggtctcttgcc

SEQ ID NO: 3123386 - DNA, 25 bp, Homo sapien
caaaagtttctccacgaggtctctt

SEQ ID NO: 3123387 - DNA, 25 bp, Homo sapien
ctgtgcgaggaaaggggccgagcct

SEQ ID NO: 3123388 - DNA, 25 bp, Homo sapien
gggcctgcctccccgtccagttgct

SEQ ID NO: 3123389 - DNA, 25 bp, Homo sapien
gggccgagccttgaggggcagcaca

SEQ ID NO: 3123390 - DNA, 25 bp, Homo sapien
gccttgaggggcagcacaggatccc

SEQ ID NO: 3123391 - DNA, 25 bp, Homo sapien
tcgtcttccgacatagccggcaggt

SEQ ID NO: 3123392 - DNA, 25 bp, Homo sapien
gctttaagaggtccgtatccttcca

SEQ ID NO: 3123393 - DNA, 25 bp, Homo sapien
tgcaggttctcccacgtgacggact

SEQ ID NO: 3123394 - DNA, 25 bp, Homo sapien
acggactcgaagaacgggtgtgctt

SEQ ID NO: 3123395 - DNA, 25 bp, Homo sapien
aagactacaaccaccagcaggcctg

SEQ ID NO: 3123396 - DNA, 25 bp, Homo sapien
aggcctgccgcagtggcacagacac

SEQ ID NO: 3123397 - DNA, 25 bp, Homo sapien
tccacggccacggaaatgaggagaa

SEQ ID NO: 3123398 - DNA, 25 bp, Homo sapien
tgcctcacggcagcaaagactacaa

SEQ ID NO: 3123399 - DNA, 25 bp, Homo sapien
tctggagcatcttggccgcacagtt

SEQ ID NO: 3123400 - DNA, 25 bp, Homo sapien
caagccaagcgcagatgcgacaggc

SEQ ID NO: 3123401 - DNA, 25 bp, Homo sapien
gctcggcgtccggttctagcggcac

SEQ ID NO: 3123402 - DNA, 25 bp, Homo sapien
gccgcacagttgtacaagcaccaag

SEQ ID NO: 3123403 - DNA, 25 bp, Homo sapien
caagggcctcgaggctcccaggcct

SEQ ID NO: 3123404 - DNA, 25 bp, Homo sapien
ggcaagggcctcgaggctcccaggc

SEQ ID NO: 3123405 - DNA, 25 bp, Homo sapien
gtgggggcaagggcctcgaggctcc

SEQ ID NO: 3123406 - DNA, 25 bp, Homo sapien
tgggggcaagggcctcgaggctccc

SEQ ID NO: 3123407 - DNA, 25 bp, Homo sapien
tggcacctgccagccgtaaccaaac

SEQ ID NO: 3123408 - DNA, 25 bp, Homo sapien
ggagagcactgcagccccgtggcac

SEQ ID NO: 3123409 - DNA, 25 bp, Homo sapien
ccagtcgcgagcaaaacctctgcag

SEQ ID NO: 3123410 - DNA, 25 bp, Homo sapien
gagcccacgggagaacggccaccag

SEQ ID NO: 3123411 - DNA, 25 bp, Homo sapien
ctgggaagagaaggggcccaaggag

SEQ ID NO: 3123412 - DNA, 25 bp, Homo sapien
cgtgaatgccagtgctgccccccgg

SEQ ID NO: 3123413 - DNA, 25 bp, Homo sapien
cccgtgaatgccagtgctgcccccc

SEQ ID NO: 3123414 - DNA, 25 bp, Homo sapien
tgaatgccagtgctgccccccggag

SEQ ID NO: 3123415 - DNA, 25 bp, Homo sapien
aatgccagtgctgccccccggaggt

SEQ ID NO: 3123416 - DNA, 25 bp, Homo sapien
tcatcttcggaaaactgtaagtcca

SEQ ID NO: 3123417 - DNA, 25 bp, Homo sapien
gaggaggacgaagacacctgcatgc

SEQ ID NO: 3123418 - DNA, 25 bp, Homo sapien
tactgctctatgttgctgcctgacc

SEQ ID NO: 3123419 - DNA, 25 bp, Homo sapien
gagtccagatcgtgaatgtactgct

SEQ ID NO: 3123420 - DNA, 25 bp, Homo sapien
tgtgctccttggccaagcgtccaag

SEQ ID NO: 3123421 - DNA, 25 bp, Homo sapien
gtgctccttggccaagcgtccaagg

SEQ ID NO: 3123422 - DNA, 25 bp, Homo sapien
gatgtgctccttggccaagcgtcca

SEQ ID NO: 3123423 - DNA, 25 bp, Homo sapien
atgtgctccttggccaagcgtccaa

SEQ ID NO: 3123424 - DNA, 25 bp, Homo sapien
acctcataaactcccaagtggccag

SEQ ID NO: 3123425 - DNA, 25 bp, Homo sapien
gctatgtggaaaagaggggctacaa

SEQ ID NO: 3123426 - DNA, 25 bp, Homo sapien
tagaagacataaatggacaagtggg

SEQ ID NO: 3123427 - DNA, 25 bp, Homo sapien
gggctacaacagcaaacctcataaa

SEQ ID NO: 3123428 - DNA, 25 bp, Homo sapien
tgcaagatctcaggagtcatcagct

SEQ ID NO: 3123429 - DNA, 25 bp, Homo sapien
cagatcctgcaagatctcaggagtc

SEQ ID NO: 3123430 - DNA, 25 bp, Homo sapien
tcctgcaagatctcaggagtcatca

SEQ ID NO: 3123431 - DNA, 25 bp, Homo sapien
agacagatcctgcaagatctcagga

SEQ ID NO: 3123432 - DNA, 25 bp, Homo sapien
ttcaacttccaaggctcaggtaatc

SEQ ID NO: 3123433 - DNA, 25 bp, Homo sapien
gcagcttcaacttccaaggctcagg

SEQ ID NO: 3123434 - DNA, 25 bp, Homo sapien
ctggggggcagtggcaagctctctg

SEQ ID NO: 3123435 - DNA, 25 bp, Homo sapien
gcttcaacttccaaggctcaggtaa

SEQ ID NO: 3123436 - DNA, 25 bp, Homo sapien
ggaaatagtactgagaagtagcctc

SEQ ID NO: 3123437 - DNA, 25 bp, Homo sapien
tgaggaagcgattcggaaatagtac

SEQ ID NO: 3123438 - DNA, 25 bp, Homo sapien
gagaagtagcctcgcttccagaaat

SEQ ID NO: 3123439 - DNA, 25 bp, Homo sapien
ggaagcgattcggaaatagtactga

SEQ ID NO: 3123440 - DNA, 25 bp, Homo sapien
gcacagaaagcatagagcacagaaa

SEQ ID NO: 3123441 - DNA, 25 bp, Homo sapien
agcatagagcacagaaatgcctgga

SEQ ID NO: 3123442 - DNA, 25 bp, Homo sapien
gcacagaaatgcctggagggaccac

SEQ ID NO: 3123443 - DNA, 25 bp, Homo sapien
agcacagaaagcatagagcacagaa

SEQ ID NO: 3123444 - DNA, 25 bp, Homo sapien
tttgggatgagcagagaacgttcgc

SEQ ID NO: 3123445 - DNA, 25 bp, Homo sapien
ttgcaacggagcctgcagataccag

SEQ ID NO: 3123446 - DNA, 25 bp, Homo sapien
gccacgcagagagccttaatccgta

SEQ ID NO: 3123447 - DNA, 25 bp, Homo sapien
gagaacgttcgccacatgtaaccca

SEQ ID NO: 3123448 - DNA, 25 bp, Homo sapien
cactgggcccatctttagtattaaa

SEQ ID NO: 3123449 - DNA, 25 bp, Homo sapien
tgggcccatctttagtattaaatta

SEQ ID NO: 3123450 - DNA, 25 bp, Homo sapien
cttccgcttatccactgggcccatc

SEQ ID NO: 3123451 - DNA, 25 bp, Homo sapien
ttccgcttatccactgggcccatct

SEQ ID NO: 3123452 - DNA, 25 bp, Homo sapien
gctgtcgtcgtcttgcaaataaacc

SEQ ID NO: 3123453 - DNA, 25 bp, Homo sapien
aatgtggtccttctgtgagcaacag

SEQ ID NO: 3123454 - DNA, 25 bp, Homo sapien
gaactttgttgacaggatccacata

SEQ ID NO: 3123455 - DNA, 25 bp, Homo sapien
tcttggcctctggtcgaagttcttg

SEQ ID NO: 3123456 - DNA, 25 bp, Homo sapien
tgcaccacttgtgtgcgttcccgct

SEQ ID NO: 3123457 - DNA, 25 bp, Homo sapien
tccgggtggctctggtatcgctgcc

SEQ ID NO: 3123458 - DNA, 25 bp, Homo sapien
tgcgttcccgctggggtccatcaga

SEQ ID NO: 3123459 - DNA, 25 bp, Homo sapien
ctctggtatcgctgcctccaaacct

SEQ ID NO: 3123460 - DNA, 25 bp, Homo sapien
gcaagcaaagcgaccctgaattcct

SEQ ID NO: 3123461 - DNA, 25 bp, Homo sapien
tctgtccactagtctgggcgggact

SEQ ID NO: 3123462 - DNA, 25 bp, Homo sapien
taaaaatgctgcaaggtttccgcct

SEQ ID NO: 3123463 - DNA, 25 bp, Homo sapien
gatgctaggaaaaactggtgacacc

SEQ ID NO: 3123464 - DNA, 25 bp, Homo sapien
aggaccagcacacagttggggcagg

SEQ ID NO: 3123465 - DNA, 25 bp, Homo sapien
agcacacagttggggcagggcgggc

SEQ ID NO: 3123466 - DNA, 25 bp, Homo sapien
agcaggaccagcacacagttggggc

SEQ ID NO: 3123467 - DNA, 25 bp, Homo sapien
gcaggaccagcacacagttggggca

SEQ ID NO: 3123468 - DNA, 25 bp, Homo sapien
caggactctctcgtgcagtgagcca

SEQ ID NO: 3123469 - DNA, 25 bp, Homo sapien
caaagcatcaaagggaaatggcccc

SEQ ID NO: 3123470 - DNA, 25 bp, Homo sapien
ctcagtttggatctggcctggcaca

SEQ ID NO: 3123471 - DNA, 25 bp, Homo sapien
tgtactcgcctagctaaaaagagcc

SEQ ID NO: 3123472 - DNA, 25 bp, Homo sapien
aaggcccaggcaggaaccacaggca

SEQ ID NO: 3123473 - DNA, 25 bp, Homo sapien
agctctcacacagcagcagccaagg

SEQ ID NO: 3123474 - DNA, 25 bp, Homo sapien
atgcagctctcacacagcagcagcc

SEQ ID NO: 3123475 - DNA, 25 bp, Homo sapien
aggcaggaaccacaggcagggcctg

SEQ ID NO: 3123476 - DNA, 25 bp, Homo sapien
gaaagggctaagagagactccccaa

SEQ ID NO: 3123477 - DNA, 25 bp, Homo sapien
gagagagccactctcctacatggag

SEQ ID NO: 3123478 - DNA, 25 bp, Homo sapien
gccgagtgctccaattaaagccacg

SEQ ID NO: 3123479 - DNA, 25 bp, Homo sapien
tgtttccctataaccagacgccctg

SEQ ID NO: 3123480 - DNA, 25 bp, Homo sapien
aggcaatggcatcattttggctggc

SEQ ID NO: 3123481 - DNA, 25 bp, Homo sapien
cttcctcatcttggataaacccaca

SEQ ID NO: 3123482 - DNA, 25 bp, Homo sapien
gtgtggtcccgacattccacctgtc

SEQ ID NO: 3123483 - DNA, 25 bp, Homo sapien
ccgctttgtgccgagaagccgcaca

SEQ ID NO: 3123484 - DNA, 25 bp, Homo sapien
ggcacatggccccaagtctattaaa

SEQ ID NO: 3123485 - DNA, 25 bp, Homo sapien
aaggttccacatggtagccgtggta

SEQ ID NO: 3123486 - DNA, 25 bp, Homo sapien
catggtagccgtggtacagaggcat

SEQ ID NO: 3123487 - DNA, 25 bp, Homo sapien
ttccacatggtagccgtggtacaga

SEQ ID NO: 3123488 - DNA, 25 bp, Homo sapien
tagccgtggtacagaggcatttctc

SEQ ID NO: 3123489 - DNA, 25 bp, Homo sapien
ttgtaaaacccaatcagctacgtgg

SEQ ID NO: 3123490 - DNA, 25 bp, Homo sapien
aaattcaggtacacacgtaggctcg

SEQ ID NO: 3123491 - DNA, 25 bp, Homo sapien
cacgtgtgctgcgtaagaagggacc

SEQ ID NO: 3123492 - DNA, 25 bp, Homo sapien
ggaacacatggcttatcagaaaccg

SEQ ID NO: 3123493 - DNA, 25 bp, Homo sapien
cacaatgacccctattcgtagtcat

SEQ ID NO: 3123494 - DNA, 25 bp, Homo sapien
gcacaatgacccctattcgtagtca

SEQ ID NO: 3123495 - DNA, 25 bp, Homo sapien
cagtcgtaatagaggcttttaccag

SEQ ID NO: 3123496 - DNA, 25 bp, Homo sapien
ttacagtcgtaatagaggcttttac

SEQ ID NO: 3123497 - DNA, 25 bp, Homo sapien
cagaccaggtagagaatattacgca

SEQ ID NO: 3123498 - DNA, 25 bp, Homo sapien
tcacagttacagctacagaccaggt

SEQ ID NO: 3123499 - DNA, 25 bp, Homo sapien
gaaggaacagctacagcagctctaa

SEQ ID NO: 3123500 - DNA, 25 bp, Homo sapien
gccacccacctgaaagacgtactag

SEQ ID NO: 3123501 - DNA, 25 bp, Homo sapien
tctggtaactacacctaaagcacaa

SEQ ID NO: 3123502 - DNA, 25 bp, Homo sapien
tacaagactactgaccatacgagga

SEQ ID NO: 3123503 - DNA, 25 bp, Homo sapien
tgaactagaggccaacaatagccag

SEQ ID NO: 3123504 - DNA, 25 bp, Homo sapien
aatacatacaacaacgtggccccga

SEQ ID NO: 3123505 - DNA, 25 bp, Homo sapien
tggtcagcccttgtagaacacccgc

SEQ ID NO: 3123506 - DNA, 25 bp, Homo sapien
cggtcacatggcaggcggaagttcc

SEQ ID NO: 3123507 - DNA, 25 bp, Homo sapien
cttccggagggagtgaaaccgagct

SEQ ID NO: 3123508 - DNA, 25 bp, Homo sapien
ttccatccgggaaaagcagccggct

SEQ ID NO: 3123509 - DNA, 25 bp, Homo sapien
agcggcaggagctcgcagtgattcc

SEQ ID NO: 3123510 - DNA, 25 bp, Homo sapien
ggagctcgcagtgattccccgccat

SEQ ID NO: 3123511 - DNA, 25 bp, Homo sapien
caggagctcgcagtgattccccgcc

SEQ ID NO: 3123512 - DNA, 25 bp, Homo sapien
aggagctcgcagtgattccccgcca

SEQ ID NO: 3123513 - DNA, 25 bp, Homo sapien
ctttaagggaggcacaagaagccac

SEQ ID NO: 3123514 - DNA, 25 bp, Homo sapien
cacagcggcgtctgcccagtggtga

SEQ ID NO: 3123515 - DNA, 25 bp, Homo sapien
gggtcggcctggctcaagaggtaca

SEQ ID NO: 3123516 - DNA, 25 bp, Homo sapien
gaaggatttcgggtcctgacacagc

SEQ ID NO: 3123517 - DNA, 25 bp, Homo sapien
gaggaagtaggtgccgccgctgtag

SEQ ID NO: 3123518 - DNA, 25 bp, Homo sapien
tgtgaaacgccaagggttctgtctc

SEQ ID NO: 3123519 - DNA, 25 bp, Homo sapien
tccagagccagcaagtaccctggga

SEQ ID NO: 3123520 - DNA, 25 bp, Homo sapien
agaagagaaggcgttcacacaccct

SEQ ID NO: 3123521 - DNA, 25 bp, Homo sapien
tcaaacgtccagaatgtgaaacgcc

SEQ ID NO: 3123522 - DNA, 25 bp, Homo sapien
caggtttcttgcaagaaaactcggg

SEQ ID NO: 3123523 - DNA, 25 bp, Homo sapien
agccgaggtcgctgcagagagtcct

SEQ ID NO: 3123524 - DNA, 25 bp, Homo sapien
ctgctagggtcagccagagctctgg

SEQ ID NO: 3123525 - DNA, 25 bp, Homo sapien
ggcagggcgagccactcctggccat

SEQ ID NO: 3123526 - DNA, 25 bp, Homo sapien
tctgacctacttggggccgggccca

SEQ ID NO: 3123527 - DNA, 25 bp, Homo sapien
ttgctgaaccggcatctgacctact

SEQ ID NO: 3123528 - DNA, 25 bp, Homo sapien
ccaggcaggccggtttccaaaccat

SEQ ID NO: 3123529 - DNA, 25 bp, Homo sapien
gcaggctgggttgacccacccatct

SEQ ID NO: 3123530 - DNA, 25 bp, Homo sapien
gtgagccaagattgtgccattgtac

SEQ ID NO: 3123531 - DNA, 25 bp, Homo sapien
ttgaacccaggtggcagaggttgtg

SEQ ID NO: 3123532 - DNA, 25 bp, Homo sapien
tccagcttgggcaacaagaacaaaa

SEQ ID NO: 3123533 - DNA, 25 bp, Homo sapien
caggagactgaaggaggagactcgc

SEQ ID NO: 3123534 - DNA, 25 bp, Homo sapien
aaccagcacaggctgcgctcgattc

SEQ ID NO: 3123535 - DNA, 25 bp, Homo sapien
tgtgtcccacggcttacacaaccag

SEQ ID NO: 3123536 - DNA, 25 bp, Homo sapien
cgattctcgcaaaggttcgtggtgg

SEQ ID NO: 3123537 - DNA, 25 bp, Homo sapien
taagacagccctaattggctgggtg

SEQ ID NO: 3123538 - DNA, 25 bp, Homo sapien
aaggagggaaagatgccccagcccg

SEQ ID NO: 3123539 - DNA, 25 bp, Homo sapien
ggtaaggcccctgtgctgcccacaa

SEQ ID NO: 3123540 - DNA, 25 bp, Homo sapien
tgtgctgcccacaaggccatcagcg

SEQ ID NO: 3123541 - DNA, 25 bp, Homo sapien
tgctgcccacaaggccatcagcggt

SEQ ID NO: 3123542 - DNA, 25 bp, Homo sapien
ccaggtaaggcccctgtgctgccca

SEQ ID NO: 3123543 - DNA, 25 bp, Homo sapien
gggccctgggccgatgcaagaggag

SEQ ID NO: 3123544 - DNA, 25 bp, Homo sapien
ggagaagaaactgtactgggtgccc

SEQ ID NO: 3123545 - DNA, 25 bp, Homo sapien
aggagaagaaactgtactgggtgcc

SEQ ID NO: 3123546 - DNA, 25 bp, Homo sapien
ggccgatgcaagaggagaagaaact

SEQ ID NO: 3123547 - DNA, 25 bp, Homo sapien
gcccctgctgctaccacggccactt

SEQ ID NO: 3123548 - DNA, 25 bp, Homo sapien
taccacggccacttcaatgtgggca

SEQ ID NO: 3123549 - DNA, 25 bp, Homo sapien
cacggccacttcaatgtgggcagat

SEQ ID NO: 3123550 - DNA, 25 bp, Homo sapien
cactgcccctgctgctaccacggcc

SEQ ID NO: 3123551 - DNA, 25 bp, Homo sapien
ctcacggaggccgagatgtttacaa

SEQ ID NO: 3123552 - DNA, 25 bp, Homo sapien
cggaggccgagatgtttacaaaaca

SEQ ID NO: 3123553 - DNA, 25 bp, Homo sapien
tcacagagccctcgccccggctcag

SEQ ID NO: 3123554 - DNA, 25 bp, Homo sapien
ccggctcagcgctcacggaggccga

SEQ ID NO: 3123555 - DNA, 25 bp, Homo sapien
gtgtctcaggtagttcagcacaggc

SEQ ID NO: 3123556 - DNA, 25 bp, Homo sapien
gggtctctgtcgattaaataggcgc

SEQ ID NO: 3123557 - DNA, 25 bp, Homo sapien
gcttgccgtgtctcaggtagttcag

SEQ ID NO: 3123558 - DNA, 25 bp, Homo sapien
gtcgattaaataggcgcctgtttca

SEQ ID NO: 3123559 - DNA, 25 bp, Homo sapien
cttgtgtcgccagccggagcctgga

SEQ ID NO: 3123560 - DNA, 25 bp, Homo sapien
tcggccccagcttcagagtacaggg

SEQ ID NO: 3123561 - DNA, 25 bp, Homo sapien
taaggcacctgtgcccaaaactcgg

SEQ ID NO: 3123562 - DNA, 25 bp, Homo sapien
tgtcttaagtggagcccttggcacc

SEQ ID NO: 3123563 - DNA, 25 bp, Homo sapien
cagaggcccagaacagaaacggagt

SEQ ID NO: 3123564 - DNA, 25 bp, Homo sapien
tgtgaaagacattccctgccaaaga

SEQ ID NO: 3123565 - DNA, 25 bp, Homo sapien
taaaacgaagcctcaactcgagtgg

SEQ ID NO: 3123566 - DNA, 25 bp, Homo sapien
tctccagcaccgaggacgtgagtgg

SEQ ID NO: 3123567 - DNA, 25 bp, Homo sapien
gacccacgtgtgatttgtagccgaa

SEQ ID NO: 3123568 - DNA, 25 bp, Homo sapien
ttaagagcagattccacaggtcctg

SEQ ID NO: 3123569 - DNA, 25 bp, Homo sapien
catatgggacatggcagctcaggac

SEQ ID NO: 3123570 - DNA, 25 bp, Homo sapien
gaagacgacgaggactgctatggca

SEQ ID NO: 3123571 - DNA, 25 bp, Homo sapien
gccaaaagcacaggaaggtcaggag

SEQ ID NO: 3123572 - DNA, 25 bp, Homo sapien
aaagggagcgaatcatcactgggac

SEQ ID NO: 3123573 - DNA, 25 bp, Homo sapien
cagtggctgtggagcctagcgatcc

SEQ ID NO: 3123574 - DNA, 25 bp, Homo sapien
cactgagtaattaacaaagggagcg

SEQ ID NO: 3123575 - DNA, 25 bp, Homo sapien
caggcgtctttgagccggtgagcca

SEQ ID NO: 3123576 - DNA, 25 bp, Homo sapien
gtccaggcgcgtgtcgggtgggagc

SEQ ID NO: 3123577 - DNA, 25 bp, Homo sapien
gccccggacaagtctggctcctggg

SEQ ID NO: 3123578 - DNA, 25 bp, Homo sapien
gcgccagggtgcagggcgccggtgt

SEQ ID NO: 3123579 - DNA, 25 bp, Homo sapien
cagaggaatcgagggtgagggtggg

SEQ ID NO: 3123580 - DNA, 25 bp, Homo sapien
ttgatgagggtggagacaacaaccc

SEQ ID NO: 3123581 - DNA, 25 bp, Homo sapien
tgggtgtctcgtgagctcaggatca

SEQ ID NO: 3123582 - DNA, 25 bp, Homo sapien
gcccctccaagtatgactggcagat

SEQ ID NO: 3123583 - DNA, 25 bp, Homo sapien
gtctctttccccagcgtcggtagtc

SEQ ID NO: 3123584 - DNA, 25 bp, Homo sapien
gggactggaacccacgtatgctgtg

SEQ ID NO: 3123585 - DNA, 25 bp, Homo sapien
gaatgcccgtagcatcatgcacagt

SEQ ID NO: 3123586 - DNA, 25 bp, Homo sapien
gaaacgacgcacgtgtcatcgaatg

SEQ ID NO: 3123587 - DNA, 25 bp, Homo sapien
caaaaacaggtgctagaatgcccgt

SEQ ID NO: 3123588 - DNA, 25 bp, Homo sapien
ccacacattggttctccattctctt

SEQ ID NO: 3123589 - DNA, 25 bp, Homo sapien
agtaggataaatgcttctttcccct

SEQ ID NO: 3123590 - DNA, 25 bp, Homo sapien
aaagaaaagtaggataaatgcttct

SEQ ID NO: 3123591 - DNA, 25 bp, Homo sapien
tttcatgccatttttgaaaaccaca

SEQ ID NO: 3123592 - DNA, 25 bp, Homo sapien
tacatcattgtaaaccagggccagt

SEQ ID NO: 3123593 - DNA, 25 bp, Homo sapien
tgtatcttggtgagggcagctgact

SEQ ID NO: 3123594 - DNA, 25 bp, Homo sapien
tgtgccctctatgcaagaaccttgg

SEQ ID NO: 3123595 - DNA, 25 bp, Homo sapien
ggcatagcgaggttccttacccgcg

SEQ ID NO: 3123596 - DNA, 25 bp, Homo sapien
ttgtgacgtgggtagagtttctttg

SEQ ID NO: 3123597 - DNA, 25 bp, Homo sapien
aaaaaacgggcatttaagtgcgctg

SEQ ID NO: 3123598 - DNA, 25 bp, Homo sapien
gatagtcttgttgccctgtagccac

SEQ ID NO: 3123599 - DNA, 25 bp, Homo sapien
ccgaggcaggtcgatcatttgcgcc

SEQ ID NO: 3123600 - DNA, 25 bp, Homo sapien
aaagtgtgtcactcggccaggtgcg

SEQ ID NO: 3123601 - DNA, 25 bp, Homo sapien
ggttgtcctggctcgagaactggca

SEQ ID NO: 3123602 - DNA, 25 bp, Homo sapien
tggatgcgtagcacataaagccggg

SEQ ID NO: 3123603 - DNA, 25 bp, Homo sapien
tacttcacatttcaggacgacgaga

SEQ ID NO: 3123604 - DNA, 25 bp, Homo sapien
catacatggcccttaacatttatct

SEQ ID NO: 3123605 - DNA, 25 bp, Homo sapien
accatacatggcccttaacatttat

SEQ ID NO: 3123606 - DNA, 25 bp, Homo sapien
gtgccaccatacatggcccttaaca

SEQ ID NO: 3123607 - DNA, 25 bp, Homo sapien
gccaccatacatggcccttaacatt

SEQ ID NO: 3123608 - DNA, 25 bp, Homo sapien
gattatgccctcatgaaaaatgcct

SEQ ID NO: 3123609 - DNA, 25 bp, Homo sapien
tcaaccatgagactagtccccaaag

SEQ ID NO: 3123610 - DNA, 25 bp, Homo sapien
ttggaaaaccttgggcattctgcat

SEQ ID NO: 3123611 - DNA, 25 bp, Homo sapien
ggctgcttacaaccacccagtgaaa

SEQ ID NO: 3123612 - DNA, 25 bp, Homo sapien
gaaggctctttttccacggtgagta

SEQ ID NO: 3123613 - DNA, 25 bp, Homo sapien
cagcgtggtgttatgttcctgccca

SEQ ID NO: 3123614 - DNA, 25 bp, Homo sapien
tccgtgcattgagagcaaggcagct

SEQ ID NO: 3123615 - DNA, 25 bp, Homo sapien
tttgtcgcctagtatgacgccgtgc

SEQ ID NO: 3123616 - DNA, 25 bp, Homo sapien
gagcttctaaacatcgtcctgccag

SEQ ID NO: 3123617 - DNA, 25 bp, Homo sapien
cgaaggcagaagactaccagtaggc

SEQ ID NO: 3123618 - DNA, 25 bp, Homo sapien
tggccgtgctgaaccgctatgagtc

SEQ ID NO: 3123619 - DNA, 25 bp, Homo sapien
gaggcctttctacacttcagttgga

SEQ ID NO: 3123620 - DNA, 25 bp, Homo sapien
ttcctccagatcgtggcaggcggtc

SEQ ID NO: 3123621 - DNA, 25 bp, Homo sapien
tggcaggaccctaccctgcacgtgg

SEQ ID NO: 3123622 - DNA, 25 bp, Homo sapien
gcggtctcgggatgctgttaatgca

SEQ ID NO: 3123623 - DNA, 25 bp, Homo sapien
tgggccctggccgtgcgtttcctcc

SEQ ID NO: 3123624 - DNA, 25 bp, Homo sapien
catttcattagggaggacaaggata

SEQ ID NO: 3123625 - DNA, 25 bp, Homo sapien
gacaggtgcacctagggtcttatta

SEQ ID NO: 3123626 - DNA, 25 bp, Homo sapien
tcagaagctgttgagtaactggaag

SEQ ID NO: 3123627 - DNA, 25 bp, Homo sapien
gaagtgttgacttactacaatttgg

SEQ ID NO: 3123628 - DNA, 25 bp, Homo sapien
ctgggcaggccttggtcatgaggaa

SEQ ID NO: 3123629 - DNA, 25 bp, Homo sapien
aggcaggccacagctccccgccttc

SEQ ID NO: 3123630 - DNA, 25 bp, Homo sapien
cagggagccagcgtgcgaggctgct

SEQ ID NO: 3123631 - DNA, 25 bp, Homo sapien
tgctggcgaggcaggccacagctcc

SEQ ID NO: 3123632 - DNA, 25 bp, Homo sapien
tggggagattgattgattgccagga

SEQ ID NO: 3123633 - DNA, 25 bp, Homo sapien
tgagtggggagattgattgattgcc

SEQ ID NO: 3123634 - DNA, 25 bp, Homo sapien
ctgagtggggagattgattgattgc

SEQ ID NO: 3123635 - DNA, 25 bp, Homo sapien
agtggggagattgattgattgccag

SEQ ID NO: 3123636 - DNA, 25 bp, Homo sapien
tgttctcagtagacctgtgccgtgg

SEQ ID NO: 3123637 - DNA, 25 bp, Homo sapien
gatggtgcttattctcccagccaca

SEQ ID NO: 3123638 - DNA, 25 bp, Homo sapien
tctgttgagaacattggcctttccc

SEQ ID NO: 3123639 - DNA, 25 bp, Homo sapien
tgaagtcacagaagcttgtctcgac

SEQ ID NO: 3123640 - DNA, 25 bp, Homo sapien
gcacctggtagctttaaggacctaa

SEQ ID NO: 3123641 - DNA, 25 bp, Homo sapien
ataagtagggggcagtgactcgtca

SEQ ID NO: 3123642 - DNA, 25 bp, Homo sapien
cagtgactcgtcattgagtggcgcg

SEQ ID NO: 3123643 - DNA, 25 bp, Homo sapien
ggatggcacctggtagctttaagga

SEQ ID NO: 3123644 - DNA, 25 bp, Homo sapien
tggaaagtagcaacaggaccagcac

SEQ ID NO: 3123645 - DNA, 25 bp, Homo sapien
caggaccagcacctggtggtcccat

SEQ ID NO: 3123646 - DNA, 25 bp, Homo sapien
gctgtggaaagtagcaacaggacca

SEQ ID NO: 3123647 - DNA, 25 bp, Homo sapien
aacaggaccagcacctggtggtccc

SEQ ID NO: 3123648 - DNA, 25 bp, Homo sapien
ccctgcctggtttctacttctaaga

SEQ ID NO: 3123649 - DNA, 25 bp, Homo sapien
tacccatgggctacatttttacaag

SEQ ID NO: 3123650 - DNA, 25 bp, Homo sapien
tcatacccagacaagttaaagaaat

SEQ ID NO: 3123651 - DNA, 25 bp, Homo sapien
gatggagactgctgaacttcatacc

SEQ ID NO: 3123652 - DNA, 25 bp, Homo sapien
attggttttgctagtccaccacagt

SEQ ID NO: 3123653 - DNA, 25 bp, Homo sapien
ccacaggtaagctgtaaatctggaa

SEQ ID NO: 3123654 - DNA, 25 bp, Homo sapien
tagtccaccacagttgtccttggtg

SEQ ID NO: 3123655 - DNA, 25 bp, Homo sapien
ggtaagctgtaaatctggaactcaa

SEQ ID NO: 3123656 - DNA, 25 bp, Homo sapien
ggtacgagcacaccgagaatcccct

SEQ ID NO: 3123657 - DNA, 25 bp, Homo sapien
aatcccctccgccatagggcctgcc

SEQ ID NO: 3123658 - DNA, 25 bp, Homo sapien
accgagaatcccctccgccataggg

SEQ ID NO: 3123659 - DNA, 25 bp, Homo sapien
ctggtacgagcacaccgagaatccc

SEQ ID NO: 3123660 - DNA, 25 bp, Homo sapien
ttttgctgagttgcaccgtgggaga

SEQ ID NO: 3123661 - DNA, 25 bp, Homo sapien
gagcgttggtgaccacttgcctgct

SEQ ID NO: 3123662 - DNA, 25 bp, Homo sapien
caccgtgggagagcgttggtgacca

SEQ ID NO: 3123663 - DNA, 25 bp, Homo sapien
gctgcgttttgctgagttgcaccgt

SEQ ID NO: 3123664 - DNA, 25 bp, Homo sapien
tccctcccttcgtggagaaatagaa

SEQ ID NO: 3123665 - DNA, 25 bp, Homo sapien
gaggacagattgagtagctgtcctt

SEQ ID NO: 3123666 - DNA, 25 bp, Homo sapien
cctgaggaccagacttgaggcagtt

SEQ ID NO: 3123667 - DNA, 25 bp, Homo sapien
gcagttggcagtccgcgcctcgttg

SEQ ID NO: 3123668 - DNA, 25 bp, Homo sapien
tctctcccagttgggcctgactctg

SEQ ID NO: 3123669 - DNA, 25 bp, Homo sapien
gaaggctgacggctgctcatttccc

SEQ ID NO: 3123670 - DNA, 25 bp, Homo sapien
gctaggttcgtctgcgtttctctct

SEQ ID NO: 3123671 - DNA, 25 bp, Homo sapien
cttcctgagggcgagcgctaggttc

SEQ ID NO: 3123672 - DNA, 25 bp, Homo sapien
ctaattgaccttcagacccaccgtg

SEQ ID NO: 3123673 - DNA, 25 bp, Homo sapien
accttcagacccaccgtgtgccagt

SEQ ID NO: 3123674 - DNA, 25 bp, Homo sapien
ccttcagacccaccgtgtgccagtg

SEQ ID NO: 3123675 - DNA, 25 bp, Homo sapien
attgaccttcagacccaccgtgtgc

SEQ ID NO: 3123676 - DNA, 25 bp, Homo sapien
tccgcaggatggttgtgtgactgat

SEQ ID NO: 3123677 - DNA, 25 bp, Homo sapien
gcttctaaggtgtcctgtggcggca

SEQ ID NO: 3123678 - DNA, 25 bp, Homo sapien
tgggtgcagccacctgtagagctgc

SEQ ID NO: 3123679 - DNA, 25 bp, Homo sapien
ccttgactttgctgtagcttctaag

SEQ ID NO: 3123680 - DNA, 25 bp, Homo sapien
gcaggctgggttgacccacccatct

SEQ ID NO: 3123681 - DNA, 25 bp, Homo sapien
tctgacctacttggggccgggccca

SEQ ID NO: 3123682 - DNA, 25 bp, Homo sapien
ttgctgaaccggcatctgacctact

SEQ ID NO: 3123683 - DNA, 25 bp, Homo sapien
ccaggcaggccggtttccaaaccat

SEQ ID NO: 3123684 - DNA, 25 bp, Homo sapien
cccggcgtgagggtgctcttcttcc

SEQ ID NO: 3123685 - DNA, 25 bp, Homo sapien
aaggagggaaagatgccccagcccg

SEQ ID NO: 3123686 - DNA, 25 bp, Homo sapien
gctttcccgtgtgtcccacggctta

SEQ ID NO: 3123687 - DNA, 25 bp, Homo sapien
cagcccggccatgcctctaagatgg

SEQ ID NO: 3123688 - DNA, 25 bp, Homo sapien
ggccgatgcaagaggagaagaaact

SEQ ID NO: 3123689 - DNA, 25 bp, Homo sapien
gggccctgggccgatgcaagaggag

SEQ ID NO: 3123690 - DNA, 25 bp, Homo sapien
ggagaagaaactgtactgggtgccc

SEQ ID NO: 3123691 - DNA, 25 bp, Homo sapien
aggagaagaaactgtactgggtgcc

SEQ ID NO: 3123692 - DNA, 25 bp, Homo sapien
gtgtctcaggtagttcagcacaggc

SEQ ID NO: 3123693 - DNA, 25 bp, Homo sapien
gggtctctgtcgattaaataggcgc

SEQ ID NO: 3123694 - DNA, 25 bp, Homo sapien
gcttgccgtgtctcaggtagttcag

SEQ ID NO: 3123695 - DNA, 25 bp, Homo sapien
gtcgattaaataggcgcctgtttca

SEQ ID NO: 3123696 - DNA, 25 bp, Homo sapien
acagagacattcaccacccttgggc

SEQ ID NO: 3123697 - DNA, 25 bp, Homo sapien
cagagacattcaccacccttgggct

SEQ ID NO: 3123698 - DNA, 25 bp, Homo sapien
agagacattcaccacccttgggctg

SEQ ID NO: 3123699 - DNA, 25 bp, Homo sapien
gagacattcaccacccttgggctgt

SEQ ID NO: 3123700 - DNA, 25 bp, Homo sapien
gatacggacctcttaaagcacaccc

SEQ ID NO: 3123701 - DNA, 25 bp, Homo sapien
gtcacgtgggagaacctgcaccagc

SEQ ID NO: 3123702 - DNA, 25 bp, Homo sapien
cgttcttcgagtccgtcacgtggga

SEQ ID NO: 3123703 - DNA, 25 bp, Homo sapien
aggaaatggaaggatacggacctct

SEQ ID NO: 3123704 - DNA, 25 bp, Homo sapien
gccaaaagcacaggaaggtcaggag

SEQ ID NO: 3123705 - DNA, 25 bp, Homo sapien
aaagggagcgaatcatcactgggac

SEQ ID NO: 3123706 - DNA, 25 bp, Homo sapien
cagtggctgtggagcctagcgatcc

SEQ ID NO: 3123707 - DNA, 25 bp, Homo sapien
cactgagtaattaacaaagggagcg

SEQ ID NO: 3123708 - DNA, 25 bp, Homo sapien
aacagcgcagtacgtttctccagag

SEQ ID NO: 3123709 - DNA, 25 bp, Homo sapien
cagtcatgaagtccgcagaaaagtc

SEQ ID NO: 3123710 - DNA, 25 bp, Homo sapien
gaagtccgcctgtaagaggtaacca

SEQ ID NO: 3123711 - DNA, 25 bp, Homo sapien
caactcattcgtgggaacagcgcag

SEQ ID NO: 3123712 - DNA, 25 bp, Homo sapien
gggactggaacccacgtatgctgtg

SEQ ID NO: 3123713 - DNA, 25 bp, Homo sapien
gaatgcccgtagcatcatgcacagt

SEQ ID NO: 3123714 - DNA, 25 bp, Homo sapien
gaaacgacgcacgtgtcatcgaatg

SEQ ID NO: 3123715 - DNA, 25 bp, Homo sapien
caaaaacaggtgctagaatgcccgt

SEQ ID NO: 3123716 - DNA, 25 bp, Homo sapien
ctttggaaggccgaggcaggcggat

SEQ ID NO: 3123717 - DNA, 25 bp, Homo sapien
gtggctcacgcctgtaatcccagca

SEQ ID NO: 3123718 - DNA, 25 bp, Homo sapien
aatacaaaatttatggctgggcgtg

SEQ ID NO: 3123719 - DNA, 25 bp, Homo sapien
cacctgagatcaggagttcgagacc

SEQ ID NO: 3123720 - DNA, 25 bp, Homo sapien
ccacacattggttctccattctctt

SEQ ID NO: 3123721 - DNA, 25 bp, Homo sapien
agtaggataaatgcttctttcccct

SEQ ID NO: 3123722 - DNA, 25 bp, Homo sapien
tttcatgccatttttgaaaaccaca

SEQ ID NO: 3123723 - DNA, 25 bp, Homo sapien
aaagaaaagtaggataaatgcttct

SEQ ID NO: 3123724 - DNA, 25 bp, Homo sapien
ggtgctagtgacctgatgcccagca

SEQ ID NO: 3123725 - DNA, 25 bp, Homo sapien
tcatctgtgcatggccatcgtccag

SEQ ID NO: 3123726 - DNA, 25 bp, Homo sapien
tgttgaacatggtcctctctcctgg

SEQ ID NO: 3123727 - DNA, 25 bp, Homo sapien
tctagcttaggctggatcacccacc

SEQ ID NO: 3123728 - DNA, 25 bp, Homo sapien
ttgtgacgtgggtagagtttctttg

SEQ ID NO: 3123729 - DNA, 25 bp, Homo sapien
aaaaaacgggcatttaagtgcgctg

SEQ ID NO: 3123730 - DNA, 25 bp, Homo sapien
gatagtcttgttgccctgtagccac

SEQ ID NO: 3123731 - DNA, 25 bp, Homo sapien
ccgaggcaggtcgatcatttgcgcc

SEQ ID NO: 3123732 - DNA, 25 bp, Homo sapien
aaagtgtgtcactcggccaggtgcg

SEQ ID NO: 3123733 - DNA, 25 bp, Homo sapien
tcaagcctagtgcacagcggtgtct

SEQ ID NO: 3123734 - DNA, 25 bp, Homo sapien
tggatgcgtagcacataaagccggg

SEQ ID NO: 3123735 - DNA, 25 bp, Homo sapien
tacttcacatttcaggacgacgaga

SEQ ID NO: 3123736 - DNA, 25 bp, Homo sapien
gcgtctcacatggtgctttccagga

SEQ ID NO: 3123737 - DNA, 25 bp, Homo sapien
caaaaacgaaacttcagggcagcct

SEQ ID NO: 3123738 - DNA, 25 bp, Homo sapien
gctagtccgagtggagggtctctcc

SEQ ID NO: 3123739 - DNA, 25 bp, Homo sapien
gctcttgtggagaaacgtgacctca

SEQ ID NO: 3123740 - DNA, 25 bp, Homo sapien
cctttgtgaagaaaccgtaggtgag

SEQ ID NO: 3123741 - DNA, 25 bp, Homo sapien
gctgacatgggacgttttgctgacg

SEQ ID NO: 3123742 - DNA, 25 bp, Homo sapien
ggctgtggtccgtgtctttctgaac

SEQ ID NO: 3123743 - DNA, 25 bp, Homo sapien
cgccgtgtgcgtgctagggccattc

SEQ ID NO: 3123744 - DNA, 25 bp, Homo sapien
ttatggctgtgggtgcaccttgcac

SEQ ID NO: 3123745 - DNA, 25 bp, Homo sapien
aaaccttagtccgtgcattgagagc

SEQ ID NO: 3123746 - DNA, 25 bp, Homo sapien
tactgagagatggaatcaagagctc

SEQ ID NO: 3123747 - DNA, 25 bp, Homo sapien
caatcccggtttttggtgccagccg

SEQ ID NO: 3123748 - DNA, 25 bp, Homo sapien
tgcgccaacaagcccggctagtttt

SEQ ID NO: 3123749 - DNA, 25 bp, Homo sapien
catgcgccaacaagcccggctagtt

SEQ ID NO: 3123750 - DNA, 25 bp, Homo sapien
ggcatgcgccaacaagcccggctag

SEQ ID NO: 3123751 - DNA, 25 bp, Homo sapien
aacctctgccttgcaggttgaagcg

SEQ ID NO: 3123752 - DNA, 25 bp, Homo sapien
caattaactgcgacgacaggcacat

SEQ ID NO: 3123753 - DNA, 25 bp, Homo sapien
gagactttgataagcaaaatagtga

SEQ ID NO: 3123754 - DNA, 25 bp, Homo sapien
cctcctttaagagactttgataagc

SEQ ID NO: 3123755 - DNA, 25 bp, Homo sapien
gtccatagcgtaggtaagtcacctc

SEQ ID NO: 3123756 - DNA, 25 bp, Homo sapien
ttctctgaggtgctgcggtccctac

SEQ ID NO: 3123757 - DNA, 25 bp, Homo sapien
gatcggctggctttgagaggttcct

SEQ ID NO: 3123758 - DNA, 25 bp, Homo sapien
tggccgtgctgaaccgctatgagtc

SEQ ID NO: 3123759 - DNA, 25 bp, Homo sapien
gaggcctttctacacttcagttgga

SEQ ID NO: 3123760 - DNA, 25 bp, Homo sapien
gagcttctaaacatcgtcctgccag

SEQ ID NO: 3123761 - DNA, 25 bp, Homo sapien
tcatcacacccgtgagagtggcagt

SEQ ID NO: 3123762 - DNA, 25 bp, Homo sapien
gaagactaccagtaggcaggtccca

SEQ ID NO: 3123763 - DNA, 25 bp, Homo sapien
aagttgcagaattccacgaaggcag

SEQ ID NO: 3123764 - DNA, 25 bp, Homo sapien
cctttacaacaatagtagtacaaat

SEQ ID NO: 3123765 - DNA, 25 bp, Homo sapien
ttaatgcagttgaatcaccacctca

SEQ ID NO: 3123766 - DNA, 25 bp, Homo sapien
cgtttagacacttcacgctcaaaga

SEQ ID NO: 3123767 - DNA, 25 bp, Homo sapien
caaataaacgtttagacacttcacg

SEQ ID NO: 3123768 - DNA, 25 bp, Homo sapien
gactgagtgctgggacggggcgttt

SEQ ID NO: 3123769 - DNA, 25 bp, Homo sapien
tgagtgctgggacggggcgttttgg

SEQ ID NO: 3123770 - DNA, 25 bp, Homo sapien
actgagtgctgggacggggcgtttt

SEQ ID NO: 3123771 - DNA, 25 bp, Homo sapien
ctgagtgctgggacggggcgttttg

SEQ ID NO: 3123772 - DNA, 25 bp, Homo sapien
catttcattagggaggacaaggata

SEQ ID NO: 3123773 - DNA, 25 bp, Homo sapien
cttattactgtaaattgttccagag

SEQ ID NO: 3123774 - DNA, 25 bp, Homo sapien
gacaggtgcacctagggtcttatta

SEQ ID NO: 3123775 - DNA, 25 bp, Homo sapien
tcagaagctgttgagtaactggaag

SEQ ID NO: 3123776 - DNA, 25 bp, Homo sapien
ttgttttcctatcagaggtgtggtt

SEQ ID NO: 3123777 - DNA, 25 bp, Homo sapien
ttttcctatcagaggtgtggttggg

SEQ ID NO: 3123778 - DNA, 25 bp, Homo sapien
gctgtggaaagtagcaacaggacca

SEQ ID NO: 3123779 - DNA, 25 bp, Homo sapien
caggaccagcacctggtggtcccat

SEQ ID NO: 3123780 - DNA, 25 bp, Homo sapien
ccctgcctggtttctacttctaaga

SEQ ID NO: 3123781 - DNA, 25 bp, Homo sapien
catacccagacaagttaaagaaatt

SEQ ID NO: 3123782 - DNA, 25 bp, Homo sapien
gatggagactgctgaacttcatacc

SEQ ID NO: 3123783 - DNA, 25 bp, Homo sapien
tacttctaagagatggagactgctg

SEQ ID NO: 3123784 - DNA, 25 bp, Homo sapien
ctgtgcccggcaaagagagtttcta

SEQ ID NO: 3123785 - DNA, 25 bp, Homo sapien
ctgggattatggcgctgctacaccc

SEQ ID NO: 3123786 - DNA, 25 bp, Homo sapien
tgcccggcaaagagagtttctactc

SEQ ID NO: 3123787 - DNA, 25 bp, Homo sapien
gggattatggcgctgctacacccag

SEQ ID NO: 3123788 - DNA, 25 bp, Homo sapien
ttacaagtggccaccacgacaccca

SEQ ID NO: 3123789 - DNA, 25 bp, Homo sapien
ctcccaccttgtcttgctaaagtgc

SEQ ID NO: 3123790 - DNA, 25 bp, Homo sapien
gtgttagccattgtgccctgcctga

SEQ ID NO: 3123791 - DNA, 25 bp, Homo sapien
agccattgtgccctgcctgatttct

SEQ ID NO: 3123792 - DNA, 25 bp, Homo sapien
tggttttctgtgctgggcctagctt

SEQ ID NO: 3123793 - DNA, 25 bp, Homo sapien
gctggtacgagcacaccgagaatcc

SEQ ID NO: 3123794 - DNA, 25 bp, Homo sapien
gagcgttggtgaccacttgcctgct

SEQ ID NO: 3123795 - DNA, 25 bp, Homo sapien
gcacgggttgctggtacgagcacac

SEQ ID NO: 3123796 - DNA, 25 bp, Homo sapien
ttttgctgagttgcaccgtgggaga

SEQ ID NO: 3123797 - DNA, 25 bp, Homo sapien
caggattttaccagaaggctcgagt

SEQ ID NO: 3123798 - DNA, 25 bp, Homo sapien
gaaattgagacctggcgcttcctga

SEQ ID NO: 3123799 - DNA, 25 bp, Homo sapien
gaacaaagcctccttgcagagaaat

SEQ ID NO: 3123800 - DNA, 25 bp, Homo sapien
cccgttcagaggtaactggcatcct

SEQ ID NO: 3123801 - DNA, 25 bp, Homo sapien
gtgtgccagtgctggctggcacaca

SEQ ID NO: 3123802 - DNA, 25 bp, Homo sapien
tggcacacagcactgcttggacttc

SEQ ID NO: 3123803 - DNA, 25 bp, Homo sapien
agtgctggctggcacacagcactgc

SEQ ID NO: 3123804 - DNA, 25 bp, Homo sapien
ggcacacagcactgcttggacttcc

SEQ ID NO: 3123805 - DNA, 25 bp, Homo sapien
actctggccattgccgctgtccttc

SEQ ID NO: 3123806 - DNA, 25 bp, Homo sapien
ccatggagctgcaggacgctgcatt

SEQ ID NO: 3123807 - DNA, 25 bp, Homo sapien
tgcttccccttttctggtgagggag

SEQ ID NO: 3123808 - DNA, 25 bp, Homo sapien
cttgctggctggtccccagatgcca

SEQ ID NO: 3123809 - DNA, 25 bp, Homo sapien
tgtgttcttatgagaaggatccagc

SEQ ID NO: 3123810 - DNA, 25 bp, Homo sapien
aagcgtggccagtcccttctgagag

SEQ ID NO: 3123811 - DNA, 25 bp, Homo sapien
tttttcaatctatgcgctcatcccc

SEQ ID NO: 3123812 - DNA, 25 bp, Homo sapien
ctacaagagggaagtggtttgttct

SEQ ID NO: 3123813 - DNA, 25 bp, Homo sapien
cgttacccggcggatcgtggcccag

SEQ ID NO: 3123814 - DNA, 25 bp, Homo sapien
ggatcgtggcccagtggtagcaaaa

SEQ ID NO: 3123815 - DNA, 25 bp, Homo sapien
ccggcggatcgtggcccagtggtag

SEQ ID NO: 3123816 - DNA, 25 bp, Homo sapien
ttacccggcggatcgtggcccagtg

SEQ ID NO: 3123817 - DNA, 25 bp, Homo sapien
cagtaacgctgttccaatgcaaggt

SEQ ID NO: 3123818 - DNA, 25 bp, Homo sapien
gaaccttctgcagctcactcgtgga

SEQ ID NO: 3123819 - DNA, 25 bp, Homo sapien
tgtgaggttaactcgcacccagtaa

SEQ ID NO: 3123820 - DNA, 25 bp, Homo sapien
tgtgtggctgtaccccagagtgccc

SEQ ID NO: 3123821 - DNA, 25 bp, Homo sapien
ccaaggggcatttgggtgcttttgc

SEQ ID NO: 3123822 - DNA, 25 bp, Homo sapien
gatgacattggtcgggaaaactcgc

SEQ ID NO: 3123823 - DNA, 25 bp, Homo sapien
actcgcctttcacggcccggccaag

SEQ ID NO: 3123824 - DNA, 25 bp, Homo sapien
ccagattcttgatgacattggtcgg

SEQ ID NO: 3123825 - DNA, 25 bp, Homo sapien
ccgccctgggcttccacctggaacg

SEQ ID NO: 3123826 - DNA, 25 bp, Homo sapien
ctgtagaggaaccgccctgggcttc

SEQ ID NO: 3123827 - DNA, 25 bp, Homo sapien
cgccctgggcttccacctggaacgg

SEQ ID NO: 3123828 - DNA, 25 bp, Homo sapien
tgtctgtagaggaaccgccctgggc

SEQ ID NO: 3123829 - DNA, 25 bp, Homo sapien
aaggcccaggcaggaaccacaggca

SEQ ID NO: 3123830 - DNA, 25 bp, Homo sapien
agctctcacacagcagcagccaagg

SEQ ID NO: 3123831 - DNA, 25 bp, Homo sapien
atgcagctctcacacagcagcagcc

SEQ ID NO: 3123832 - DNA, 25 bp, Homo sapien
aggcaggaaccacaggcagggcctg

SEQ ID NO: 3123833 - DNA, 25 bp, Homo sapien
aggcaatggcatcatttcggctggc

SEQ ID NO: 3123834 - DNA, 25 bp, Homo sapien
gaagggccacaaatcccacagtgtg

SEQ ID NO: 3123835 - DNA, 25 bp, Homo sapien
aatggcagggcaggatatacggcaa

SEQ ID NO: 3123836 - DNA, 25 bp, Homo sapien
ggtttgttccatgggacagtctcca

SEQ ID NO: 3123837 - DNA, 25 bp, Homo sapien
tagccgtggtacagaggcatttctc

SEQ ID NO: 3123838 - DNA, 25 bp, Homo sapien
ggcctgaaatctacaccagctggga

SEQ ID NO: 3123839 - DNA, 25 bp, Homo sapien
cggcctgaaatctacaccagctggg

SEQ ID NO: 3123840 - DNA, 25 bp, Homo sapien
gcggcctgaaatctacaccagctgg

SEQ ID NO: 3123841 - DNA, 25 bp, Homo sapien
ggcggcctgaaatctacaccagctg

SEQ ID NO: 3123842 - DNA, 25 bp, Homo sapien
agctcccttccaccggaagcgtccg

SEQ ID NO: 3123843 - DNA, 25 bp, Homo sapien
agcaagccccgcaacagctcccttc

SEQ ID NO: 3123844 - DNA, 25 bp, Homo sapien
aacagctcccttccaccggaagcgt

SEQ ID NO: 3123845 - DNA, 25 bp, Homo sapien
ccagcaagccccgcaacagctccct

SEQ ID NO: 3123846 - DNA, 25 bp, Homo sapien
cccgggccggcgacaggagctcgca

SEQ ID NO: 3123847 - DNA, 25 bp, Homo sapien
ccccgggccggcgacaggagctcgc

SEQ ID NO: 3123848 - DNA, 25 bp, Homo sapien
ggagctcgcagtgattctccgccat

SEQ ID NO: 3123849 - DNA, 25 bp, Homo sapien
ggcgacaggagctcgcagtgattct

SEQ ID NO: 3123850 - DNA, 25 bp, Homo sapien
tctgagtccaggtcgggatcggcct

SEQ ID NO: 3123851 - DNA, 25 bp, Homo sapien
gatcggcctggcataagcggtacag

SEQ ID NO: 3123852 - DNA, 25 bp, Homo sapien
acgttgagtcggacccacttggaca

SEQ ID NO: 3123853 - DNA, 25 bp, Homo sapien
acttggacacgctgccagggcgctg

SEQ ID NO: 3123854 - DNA, 25 bp, Homo sapien
gatgctttagcagggtgctctccca

SEQ ID NO: 3123855 - DNA, 25 bp, Homo sapien
taacaacccgtctgtcaagagctcc

SEQ ID NO: 3123856 - DNA, 25 bp, Homo sapien
gatccatgcttaagtccaactcgag

SEQ ID NO: 3123857 - DNA, 25 bp, Homo sapien
cacaagtctaataatccaggcaggg

SEQ ID NO: 3123858 - DNA, 25 bp, Homo sapien
tcccaggaggaagtgagaattcaca

SEQ ID NO: 3123859 - DNA, 25 bp, Homo sapien
gtcccaggaggaagtgagaattcac

SEQ ID NO: 3123860 - DNA, 25 bp, Homo sapien
gcctgccctcgaagacaccaaggaa

SEQ ID NO: 3123861 - DNA, 25 bp, Homo sapien
tggcctgccctcgaagacaccaagg

SEQ ID NO: 3123862 - DNA, 25 bp, Homo sapien
ctggcctgccctcgaagacaccaag

SEQ ID NO: 3123863 - DNA, 25 bp, Homo sapien
ctgccctcgaagacaccaaggaaga

SEQ ID NO: 3123864 - DNA, 25 bp, Homo sapien
tggagaggggccccgatgcagagct

SEQ ID NO: 3123865 - DNA, 25 bp, Homo sapien
ccactgccctcagcatggcaggaga

SEQ ID NO: 3123866 - DNA, 25 bp, Homo sapien
agagctggggctgtgcttcgggggc

SEQ ID NO: 3123867 - DNA, 25 bp, Homo sapien
aggagagcagcatggttgggtggag

SEQ ID NO: 3123868 - DNA, 25 bp, Homo sapien
gctggcccagtgcggtgatgccagc

SEQ ID NO: 3123869 - DNA, 25 bp, Homo sapien
ctgctgccatcacgtgatacctgcc

SEQ ID NO: 3123870 - DNA, 25 bp, Homo sapien
gctgctgccatcacgtgatacctgc

SEQ ID NO: 3123871 - DNA, 25 bp, Homo sapien
tgctgccatcacgtgatacctgccg

SEQ ID NO: 3123872 - DNA, 25 bp, Homo sapien
gtgtctcaggtagttcagcacaggc

SEQ ID NO: 3123873 - DNA, 25 bp, Homo sapien
gcttgccgtgtctcaggtagttcag

SEQ ID NO: 3123874 - DNA, 25 bp, Homo sapien
gtcgattaaataggcgcctgtttca

SEQ ID NO: 3123875 - DNA, 25 bp, Homo sapien
gggtctctgtcgattaaataggcgc

SEQ ID NO: 3123876 - DNA, 25 bp, Homo sapien
ctttacaagttttattaatgaggtg

SEQ ID NO: 3123877 - DNA, 25 bp, Homo sapien
tcgttctctaattttgtcctttaca

SEQ ID NO: 3123878 - DNA, 25 bp, Homo sapien
cgatgttttgctgtctcgttctcta

SEQ ID NO: 3123879 - DNA, 25 bp, Homo sapien
gaggtgatattgtaaaattctgctt

SEQ ID NO: 3123880 - DNA, 25 bp, Homo sapien
cctggacagtcactacggaggactc

SEQ ID NO: 3123881 - DNA, 25 bp, Homo sapien
cagtcactacggaggactcaggctg

SEQ ID NO: 3123882 - DNA, 25 bp, Homo sapien
cacatcctggacagtcactacggag

SEQ ID NO: 3123883 - DNA, 25 bp, Homo sapien
tggtcctgggagtgatggtgagcca

SEQ ID NO: 3123884 - DNA, 25 bp, Homo sapien
agctgtgcatctctcgggagttgat

SEQ ID NO: 3123885 - DNA, 25 bp, Homo sapien
tgcatctctcgggagttgatgctca

SEQ ID NO: 3123886 - DNA, 25 bp, Homo sapien
tctcgggagttgatgctcaggacca

SEQ ID NO: 3123887 - DNA, 25 bp, Homo sapien
atctctcgggagttgatgctcagga

SEQ ID NO: 3123888 - DNA, 25 bp, Homo sapien
gccctccgtgggtgaaaagacagat

SEQ ID NO: 3123889 - DNA, 25 bp, Homo sapien
ggctaccgccggctataaagacaga

SEQ ID NO: 3123890 - DNA, 25 bp, Homo sapien
agctgcagtttccagccggagggca

SEQ ID NO: 3123891 - DNA, 25 bp, Homo sapien
tcccgagtacggaactctgacagag

SEQ ID NO: 3123892 - DNA, 25 bp, Homo sapien
gaagcctgcgggatggtgctgcttg

SEQ ID NO: 3123893 - DNA, 25 bp, Homo sapien
ccagagcccagacccggtgggagaa

SEQ ID NO: 3123894 - DNA, 25 bp, Homo sapien
gggagaagcctgcgggatggtgctg

SEQ ID NO: 3123895 - DNA, 25 bp, Homo sapien
agaacagccatcaggtgggagaagc

SEQ ID NO: 3123896 - DNA, 25 bp, Homo sapien
gaaaactggtacatctggtgccgtc

SEQ ID NO: 3123897 - DNA, 25 bp, Homo sapien
gctgtgaccgtgctgtgaccttcag

SEQ ID NO: 3123898 - DNA, 25 bp, Homo sapien
aaaatgagggtcacgctgatggccc

SEQ ID NO: 3123899 - DNA, 25 bp, Homo sapien
accgtaagggtgtggagaccgcaca

SEQ ID NO: 3123900 - DNA, 25 bp, Homo sapien
gctctggcgttctccccctctgaga

SEQ ID NO: 3123901 - DNA, 25 bp, Homo sapien
gggaggccacggtcatctgagatcc

SEQ ID NO: 3123902 - DNA, 25 bp, Homo sapien
gagagggaggccacggtcatctgag

SEQ ID NO: 3123903 - DNA, 25 bp, Homo sapien
gcgttctccccctctgagagggagg

SEQ ID NO: 3123904 - DNA, 25 bp, Homo sapien
gggctttcccctctaatggaccatg

SEQ ID NO: 3123905 - DNA, 25 bp, Homo sapien
gatgaccttgaggacaacttgtagg

SEQ ID NO: 3123906 - DNA, 25 bp, Homo sapien
tggcaaggtcccagagagtcatggc

SEQ ID NO: 3123907 - DNA, 25 bp, Homo sapien
ttactcaacaaggagcgggtgcctc

SEQ ID NO: 3123908 - DNA, 25 bp, Homo sapien
ggcctgcactgtgctcgccatgtct

SEQ ID NO: 3123909 - DNA, 25 bp, Homo sapien
gtccctgtgtgcctgacgcttgcag

SEQ ID NO: 3123910 - DNA, 25 bp, Homo sapien
tccatgttgcccgtgggccccgggc

SEQ ID NO: 3123911 - DNA, 25 bp, Homo sapien
caggacaagaatccctgcaaaggtg

SEQ ID NO: 3123912 - DNA, 25 bp, Homo sapien
gcagaccctcgaatttacaaccagg

SEQ ID NO: 3123913 - DNA, 25 bp, Homo sapien
tctccatgggtgcacagacgggaac

SEQ ID NO: 3123914 - DNA, 25 bp, Homo sapien
gacgggaacgtatcaggctgtctca

SEQ ID NO: 3123915 - DNA, 25 bp, Homo sapien
tcaaggaaggccaacgacctagagt

SEQ ID NO: 3123916 - DNA, 25 bp, Homo sapien
cattccagcaaaaggttccagatga

SEQ ID NO: 3123917 - DNA, 25 bp, Homo sapien
gttgtctagacatggcctcctgctg

SEQ ID NO: 3123918 - DNA, 25 bp, Homo sapien
tgggccttcccgttgtctagacatg

SEQ ID NO: 3123919 - DNA, 25 bp, Homo sapien
ttcccgttgtctagacatggcctcc

SEQ ID NO: 3123920 - DNA, 25 bp, Homo sapien
gtgggccttcccgttgtctagacat

SEQ ID NO: 3123921 - DNA, 25 bp, Homo sapien
acaggtgatgcctccattagctcca

SEQ ID NO: 3123922 - DNA, 25 bp, Homo sapien
cacgtgaagcctccgttagctccat

SEQ ID NO: 3123923 - DNA, 25 bp, Homo sapien
gtcatccgaacaggtaactcctcca

SEQ ID NO: 3123924 - DNA, 25 bp, Homo sapien
attagctccatcatctgaacacgtg

SEQ ID NO: 3123925 - DNA, 25 bp, Homo sapien
caaacgcagagccaatgggcatgct

SEQ ID NO: 3123926 - DNA, 25 bp, Homo sapien
ttacaaacgcagagccaatgggcat

SEQ ID NO: 3123927 - DNA, 25 bp, Homo sapien
tacaaacgcagagccaatgggcatg

SEQ ID NO: 3123928 - DNA, 25 bp, Homo sapien
aaacgcagagccaatgggcatgctt

SEQ ID NO: 3123929 - DNA, 25 bp, Homo sapien
ggtctccttatctgtgatctggctg

SEQ ID NO: 3123930 - DNA, 25 bp, Homo sapien
gccgcctgggatgtcttggtctcct

SEQ ID NO: 3123931 - DNA, 25 bp, Homo sapien
tgccctgtctacatgaagctcaggt

SEQ ID NO: 3123932 - DNA, 25 bp, Homo sapien
tgtctacatgaagctcaggttggag

SEQ ID NO: 3123933 - DNA, 25 bp, Homo sapien
tctgggggcatatccctgcatgctg

SEQ ID NO: 3123934 - DNA, 25 bp, Homo sapien
ggcatatccctgcatgctggggctg

SEQ ID NO: 3123935 - DNA, 25 bp, Homo sapien
gccttctgggggcatatccctgcat

SEQ ID NO: 3123936 - DNA, 25 bp, Homo sapien
cagtgccttctgggggcatatccct

SEQ ID NO: 3123937 - DNA, 25 bp, Homo sapien
cacccgagacctccgggattgagaa

SEQ ID NO: 3123938 - DNA, 25 bp, Homo sapien
ccgagacctccgggattgagaaggg

SEQ ID NO: 3123939 - DNA, 25 bp, Homo sapien
gccacccgagacctccgggattgag

SEQ ID NO: 3123940 - DNA, 25 bp, Homo sapien
cccgagacctccgggattgagaagg

SEQ ID NO: 3123941 - DNA, 25 bp, Homo sapien
tccccgatcccaccgtctgatttta

SEQ ID NO: 3123942 - DNA, 25 bp, Homo sapien
gtcgtccccgatcccaccgtctgat

SEQ ID NO: 3123943 - DNA, 25 bp, Homo sapien
cgtccccgatcccaccgtctgattt

SEQ ID NO: 3123944 - DNA, 25 bp, Homo sapien
ggtcgtccccgatcccaccgtctga

SEQ ID NO: 3123945 - DNA, 25 bp, Homo sapien
ttgagttacttatccccgaatgagg

SEQ ID NO: 3123946 - DNA, 25 bp, Homo sapien
gttttccagttcatgagctgtgtcc

SEQ ID NO: 3123947 - DNA, 25 bp, Homo sapien
tagagctgatcaagcccttctttcc

SEQ ID NO: 3123948 - DNA, 25 bp, Homo sapien
ggctcccttcagaccaggtgttttc

SEQ ID NO: 3123949 - DNA, 25 bp, Homo sapien
ttctctccggctgcctttaataaac

SEQ ID NO: 3123950 - DNA, 25 bp, Homo sapien
gcgcccttggcgtgcccctttgtgt

SEQ ID NO: 3123951 - DNA, 25 bp, Homo sapien
ttcactgcccttggtgtgtgctgca

SEQ ID NO: 3123952 - DNA, 25 bp, Homo sapien
gggtctctcgctgacatttggccac

SEQ ID NO: 3123953 - DNA, 25 bp, Homo sapien
ttgtgtatgaataaacttctctccc

SEQ ID NO: 3123954 - DNA, 25 bp, Homo sapien
ccgtaaatacgtggcacagcactgc

SEQ ID NO: 3123955 - DNA, 25 bp, Homo sapien
aatagttccggctttggtcttccag

SEQ ID NO: 3123956 - DNA, 25 bp, Homo sapien
tctattcgtgagtccccaagccata

SEQ ID NO: 3123957 - DNA, 25 bp, Homo sapien
gaagggaaactgcacccaggaagtg

SEQ ID NO: 3123958 - DNA, 25 bp, Homo sapien
tggaaacattgctggtaaccccgag

SEQ ID NO: 3123959 - DNA, 25 bp, Homo sapien
tgtgtggtcaaacatgcggcgtgca

SEQ ID NO: 3123960 - DNA, 25 bp, Homo sapien
gcctcgggcgcaaataagatgactg

SEQ ID NO: 3123961 - DNA, 25 bp, Homo sapien
gcatcagacactttcatcggccggg

SEQ ID NO: 3123962 - DNA, 25 bp, Homo sapien
tgccccaaggaagcgtatacatccc

SEQ ID NO: 3123963 - DNA, 25 bp, Homo sapien
tgaacgaggcttgaaatcgctccgc

SEQ ID NO: 3123964 - DNA, 25 bp, Homo sapien
ttggagccagttgggccaaatcctc

SEQ ID NO: 3123965 - DNA, 25 bp, Homo sapien
tgttgaccagataggttggagccag

SEQ ID NO: 3123966 - DNA, 25 bp, Homo sapien
gacacgtgccgacattcatttgccc

SEQ ID NO: 3123967 - DNA, 25 bp, Homo sapien
acaccagctgtcgaagagcgaggct

SEQ ID NO: 3123968 - DNA, 25 bp, Homo sapien
tgaggccagctagccccaggtggta

SEQ ID NO: 3123969 - DNA, 25 bp, Homo sapien
ccacttttggagttggagcatccac

SEQ ID NO: 3123970 - DNA, 25 bp, Homo sapien
catccagccggaaatagattgggca

SEQ ID NO: 3123971 - DNA, 25 bp, Homo sapien
tgagcagtcagccaaagaaagcgga

SEQ ID NO: 3123972 - DNA, 25 bp, Homo sapien
cctgtagtagatccagctagggcga

SEQ ID NO: 3123973 - DNA, 25 bp, Homo sapien
cagaactggtttgccacctgtggga

SEQ ID NO: 3123974 - DNA, 25 bp, Homo sapien
tctgcagtgttccagcggaacacat

SEQ ID NO: 3123975 - DNA, 25 bp, Homo sapien
gctgcctgcgccagcttggttagca

SEQ ID NO: 3123976 - DNA, 25 bp, Homo sapien
catttgtggtctgccagtagaaagg

SEQ ID NO: 3123977 - DNA, 25 bp, Homo sapien
ggaacacatcctacagagcctctgc

SEQ ID NO: 3123978 - DNA, 25 bp, Homo sapien
gctgggactactattggctggaaaa

SEQ ID NO: 3123979 - DNA, 25 bp, Homo sapien
tgaacttgagttaggaatctggtac

SEQ ID NO: 3123980 - DNA, 25 bp, Homo sapien
tgtggttggaaggtacagccaccct

SEQ ID NO: 3123981 - DNA, 25 bp, Homo sapien
gccaccctggtatctattttttcat

SEQ ID NO: 3123982 - DNA, 25 bp, Homo sapien
atgaggttgtctgccatttccttcg

SEQ ID NO: 3123983 - DNA, 25 bp, Homo sapien
agatgaggttgtctgccatttcctt

SEQ ID NO: 3123984 - DNA, 25 bp, Homo sapien
aggttgtctgccatttccttcgtgg

SEQ ID NO: 3123985 - DNA, 25 bp, Homo sapien
gaggttgtctgccatttccttcgtg

SEQ ID NO: 3123986 - DNA, 25 bp, Homo sapien
tatggcgtgcactgtcttgaaggga

SEQ ID NO: 3123987 - DNA, 25 bp, Homo sapien
aacagatctcacgtcccagcggtgt

SEQ ID NO: 3123988 - DNA, 25 bp, Homo sapien
ggctcatgccacaaggataatacag

SEQ ID NO: 3123989 - DNA, 25 bp, Homo sapien
tcatactgacttctggtggacacaa

SEQ ID NO: 3123990 - DNA, 25 bp, Homo sapien
ctgaaataaagctaggatgatgtcc

SEQ ID NO: 3123991 - DNA, 25 bp, Homo sapien
tcctccaggccgctatgagaatcat

SEQ ID NO: 3123992 - DNA, 25 bp, Homo sapien
tacgttggatcgtagcacagcacgc

SEQ ID NO: 3123993 - DNA, 25 bp, Homo sapien
cagaacccctcagtttacgttggat

SEQ ID NO: 3123994 - DNA, 25 bp, Homo sapien
gagaacaggacattctttaaggccc

SEQ ID NO: 3123995 - DNA, 25 bp, Homo sapien
taggtgccagctgatatcccaggga

SEQ ID NO: 3123996 - DNA, 25 bp, Homo sapien
catgatggaagtggaccagtgataa

SEQ ID NO: 3123997 - DNA, 25 bp, Homo sapien
ccagtgataacaacctgccattagg

SEQ ID NO: 3123998 - DNA, 25 bp, Homo sapien
gacatctgcagagccttagatgttc

SEQ ID NO: 3123999 - DNA, 25 bp, Homo sapien
gttctgatggggcagttggcagctg

SEQ ID NO: 3124000 - DNA, 25 bp, Homo sapien
ttctgatggggcagttggcagctgg

SEQ ID NO: 3124001 - DNA, 25 bp, Homo sapien
catatcctttgtcttcaggttttcc

SEQ ID NO: 3124002 - DNA, 25 bp, Homo sapien
cagaattcacgctcctctgtgctaa

SEQ ID NO: 3124003 - DNA, 25 bp, Homo sapien
tgcttcttctgtgttagcgtcatat

SEQ ID NO: 3124004 - DNA, 25 bp, Homo sapien
aattcacgctcctctgtgctaaatg

SEQ ID NO: 3124005 - DNA, 25 bp, Homo sapien
gaactgaccgacaagcctctgatga

SEQ ID NO: 3124006 - DNA, 25 bp, Homo sapien
tggagacttcttacgagctaaggac

SEQ ID NO: 3124007 - DNA, 25 bp, Homo sapien
gcacagcactgtactcaaggccatg

SEQ ID NO: 3124008 - DNA, 25 bp, Homo sapien
cgctgtgtccagatcgttctatcat

SEQ ID NO: 3124009 - DNA, 25 bp, Homo sapien
ctgaatttactctgatgtcctgttt

SEQ ID NO: 3124010 - DNA, 25 bp, Homo sapien
catttgttcgtaaacagcaggtcct

SEQ ID NO: 3124011 - DNA, 25 bp, Homo sapien
ggtcctcagtttgcataactgaatt

SEQ ID NO: 3124012 - DNA, 25 bp, Homo sapien
cagcaggtcctcagtttgcataact

SEQ ID NO: 3124013 - DNA, 25 bp, Homo sapien
agccaccttcataattaacagggtt

SEQ ID NO: 3124014 - DNA, 25 bp, Homo sapien
gctgggagccaccttcataattaac

SEQ ID NO: 3124015 - DNA, 25 bp, Homo sapien
tcagagctgggagccaccttcataa

SEQ ID NO: 3124016 - DNA, 25 bp, Homo sapien
tgggagccaccttcataattaacag

SEQ ID NO: 3124017 - DNA, 25 bp, Homo sapien
gggacaatgacagctgcctgcttca

SEQ ID NO: 3124018 - DNA, 25 bp, Homo sapien
ttggagtcgctggcgtgggcctggg

SEQ ID NO: 3124019 - DNA, 25 bp, Homo sapien
agtcgctggcgtgggcctgggggac

SEQ ID NO: 3124020 - DNA, 25 bp, Homo sapien
ctgggggacaatgacagctgcctgc

SEQ ID NO: 3124021 - DNA, 25 bp, Homo sapien
cggtggaaagtatggaaaagtatgt

SEQ ID NO: 3124022 - DNA, 25 bp, Homo sapien
tggaaagtatggaaaagtatgtgat

SEQ ID NO: 3124023 - DNA, 25 bp, Homo sapien
gaaagtatggaaaagtatgtgatac

SEQ ID NO: 3124024 - DNA, 25 bp, Homo sapien
tcggtggaaagtatggaaaagtatg

SEQ ID NO: 3124025 - DNA, 25 bp, Homo sapien
agaccggtcttgcttgccgctgcag

SEQ ID NO: 3124026 - DNA, 25 bp, Homo sapien
tgagagccaacatgctggtgatgga

SEQ ID NO: 3124027 - DNA, 25 bp, Homo sapien
gatcatttagcaccggaagtatgta

SEQ ID NO: 3124028 - DNA, 25 bp, Homo sapien
tatgtaattccgcagagtgagagcc

SEQ ID NO: 3124029 - DNA, 25 bp, Homo sapien
gatggtctcccaaaagattacctgc

SEQ ID NO: 3124030 - DNA, 25 bp, Homo sapien
gattacctgctaggaaccaaacacg

SEQ ID NO: 3124031 - DNA, 25 bp, Homo sapien
gacctttctcccaaatggaatagat

SEQ ID NO: 3124032 - DNA, 25 bp, Homo sapien
tcctttttgagaagtataacactaa

SEQ ID NO: 3124033 - DNA, 25 bp, Homo sapien
tgccggttattcactctattccgat

SEQ ID NO: 3124034 - DNA, 25 bp, Homo sapien
tattcactctattccgatctctacc

SEQ ID NO: 3124035 - DNA, 25 bp, Homo sapien
gtatatttgccggttattcactcta

SEQ ID NO: 3124036 - DNA, 25 bp, Homo sapien
ctgccgtgaagtatatttgccggtt

SEQ ID NO: 3124037 - DNA, 25 bp, Homo sapien
cactgggcgcctgtgttgtacatgc

SEQ ID NO: 3124038 - DNA, 25 bp, Homo sapien
tcactgggcgcctgtgttgtacatg

SEQ ID NO: 3124039 - DNA, 25 bp, Homo sapien
gtcctgctttctcagcgttctgagt

SEQ ID NO: 3124040 - DNA, 25 bp, Homo sapien
cgaacagacgtttcttgaaagaaga

SEQ ID NO: 3124041 - DNA, 25 bp, Homo sapien
gggcttacaggttggagtcaccaca

SEQ ID NO: 3124042 - DNA, 25 bp, Homo sapien
cctgggctggtctaggctcaagcag

SEQ ID NO: 3124043 - DNA, 25 bp, Homo sapien
tctggaaggccagtgctatgcccac

SEQ ID NO: 3124044 - DNA, 25 bp, Homo sapien
ggccagtgctatgcccacccttccc

SEQ ID NO: 3124045 - DNA, 25 bp, Homo sapien
gaaggccagtgctatgcccaccctt

SEQ ID NO: 3124046 - DNA, 25 bp, Homo sapien
tggaaggccagtgctatgcccaccc

SEQ ID NO: 3124047 - DNA, 25 bp, Homo sapien
tttctgctgagtctggtccgaggtc

SEQ ID NO: 3124048 - DNA, 25 bp, Homo sapien
tgctgagtctggtccgaggtctggt

SEQ ID NO: 3124049 - DNA, 25 bp, Homo sapien
ctggttcttgacatgtacacttttc

SEQ ID NO: 3124050 - DNA, 25 bp, Homo sapien
ctggtccgaggtctggttcttgaca

SEQ ID NO: 3124051 - DNA, 25 bp, Homo sapien
tacattcagtgtctggtacagtccg

SEQ ID NO: 3124052 - DNA, 25 bp, Homo sapien
acattcagtgtctggtacagtccgg

SEQ ID NO: 3124053 - DNA, 25 bp, Homo sapien
cattcagtgtctggtacagtccggg

SEQ ID NO: 3124054 - DNA, 25 bp, Homo sapien
atacattcagtgtctggtacagtcc

SEQ ID NO: 3124055 - DNA, 25 bp, Homo sapien
ccgagtggctccatgagaagttgca

SEQ ID NO: 3124056 - DNA, 25 bp, Homo sapien
tggctccatgagaagttgcacccat

SEQ ID NO: 3124057 - DNA, 25 bp, Homo sapien
tgatctgggccgagtggctccatga

SEQ ID NO: 3124058 - DNA, 25 bp, Homo sapien
ggctgagtgtctcatccacagccct

SEQ ID NO: 3124059 - DNA, 25 bp, Homo sapien
caagttgaccgttgtggcctgaagc

SEQ ID NO: 3124060 - DNA, 25 bp, Homo sapien
gcctgaagctattataacggtcctg

SEQ ID NO: 3124061 - DNA, 25 bp, Homo sapien
tgctgtgagttgcaggccactccct

SEQ ID NO: 3124062 - DNA, 25 bp, Homo sapien
agagccggcacctccggattggcag

SEQ ID NO: 3124063 - DNA, 25 bp, Homo sapien
gacggcttcctgagtgttttgtcac

SEQ ID NO: 3124064 - DNA, 25 bp, Homo sapien
tcgtctgggtcgaccccgcctggga

SEQ ID NO: 3124065 - DNA, 25 bp, Homo sapien
ccgccccgtggctcgtctgggtcga

SEQ ID NO: 3124066 - DNA, 25 bp, Homo sapien
taggttgttgcgtggacccacgcgc

SEQ ID NO: 3124067 - DNA, 25 bp, Homo sapien
cgaggggactgcgcggaccctcgga

SEQ ID NO: 3124068 - DNA, 25 bp, Homo sapien
ggactgcgcggaccctcggacgagg

SEQ ID NO: 3124069 - DNA, 25 bp, Homo sapien
tcggacgagggggtccgtgactctg

SEQ ID NO: 3124070 - DNA, 25 bp, Homo sapien
gagggggtccgtgactctggatggg

SEQ ID NO: 3124071 - DNA, 25 bp, Homo sapien
cgtagcgagactgcttcgtccgact

SEQ ID NO: 3124072 - DNA, 25 bp, Homo sapien
cggctgcggctctgtcggctgttca

SEQ ID NO: 3124073 - DNA, 25 bp, Homo sapien
gctccattgttaaggcggctgcggc

SEQ ID NO: 3124074 - DNA, 25 bp, Homo sapien
ggctgttcagctgcgctccagtcgg

SEQ ID NO: 3124075 - DNA, 25 bp, Homo sapien
ctgggtattctaggaggcgatgatc

SEQ ID NO: 3124076 - DNA, 25 bp, Homo sapien
gattacgtttcttcgagcggcaggc

SEQ ID NO: 3124077 - DNA, 25 bp, Homo sapien
tctgggtttgagatgagcgcgtcct

SEQ ID NO: 3124078 - DNA, 25 bp, Homo sapien
gagccgactccaggtagacgttgag

SEQ ID NO: 3124079 - DNA, 25 bp, Homo sapien
ccagcagcatccctgagtgagtgcc

SEQ ID NO: 3124080 - DNA, 25 bp, Homo sapien
cccagcagcatccctgagtgagtgc

SEQ ID NO: 3124081 - DNA, 25 bp, Homo sapien
agtgagtgccttcagggcgcaggtc

SEQ ID NO: 3124082 - DNA, 25 bp, Homo sapien
tgtgcatccacccatcccagcagca

SEQ ID NO: 3124083 - DNA, 25 bp, Homo sapien
gtatcagcaactaccattaattcag

SEQ ID NO: 3124084 - DNA, 25 bp, Homo sapien
gatgaggcatctaaaagctaagtaa

SEQ ID NO: 3124085 - DNA, 25 bp, Homo sapien
gaagtggaaatgttgccttaaggaa

SEQ ID NO: 3124086 - DNA, 25 bp, Homo sapien
caatcaaggcctacccatatttcat

SEQ ID NO: 3124087 - DNA, 25 bp, Homo sapien
ggcggtgtctcagcctgaaacataa

SEQ ID NO: 3124088 - DNA, 25 bp, Homo sapien
ttttctcgtcacacaggtaacctta

SEQ ID NO: 3124089 - DNA, 25 bp, Homo sapien
cctgaaacagacaaccacacgctgt

SEQ ID NO: 3124090 - DNA, 25 bp, Homo sapien
tagctcttgatgcaccgtccttgtg

SEQ ID NO: 3124091 - DNA, 25 bp, Homo sapien
tctgcaatgtgaagggcaagccagc

SEQ ID NO: 3124092 - DNA, 25 bp, Homo sapien
gactgtcagtgtgagccgcatctgc

SEQ ID NO: 3124093 - DNA, 25 bp, Homo sapien
cctgcattattgagggcgatctcct

SEQ ID NO: 3124094 - DNA, 25 bp, Homo sapien
tcagccatctcagaacgcaaggtgg

SEQ ID NO: 3124095 - DNA, 25 bp, Homo sapien
tggtgccctgcgagttttggaagcc

SEQ ID NO: 3124096 - DNA, 25 bp, Homo sapien
ccgttatgcagagcgatgggcacta

SEQ ID NO: 3124097 - DNA, 25 bp, Homo sapien
gagagtgagtttccaaccgtccaag

SEQ ID NO: 3124098 - DNA, 25 bp, Homo sapien
ccgtccaaggtgaaggtggtgccct

SEQ ID NO: 3124099 - DNA, 25 bp, Homo sapien
ccctctgtggcttcctcctcggtca

SEQ ID NO: 3124100 - DNA, 25 bp, Homo sapien
tgtggcttcctcctcggtcagcgcc

SEQ ID NO: 3124101 - DNA, 25 bp, Homo sapien
tctgtggcttcctcctcggtcagcg

SEQ ID NO: 3124102 - DNA, 25 bp, Homo sapien
ctctgtggcttcctcctcggtcagc

SEQ ID NO: 3124103 - DNA, 25 bp, Homo sapien
cagggcccagtactggggtgacacc

SEQ ID NO: 3124104 - DNA, 25 bp, Homo sapien
caccagggcccagtactggggtgac

SEQ ID NO: 3124105 - DNA, 25 bp, Homo sapien
accagggcccagtactggggtgaca

SEQ ID NO: 3124106 - DNA, 25 bp, Homo sapien
ccagggcccagtactggggtgacac

SEQ ID NO: 3124107 - DNA, 25 bp, Homo sapien
ctttgctgataaggagctcccgctg

SEQ ID NO: 3124108 - DNA, 25 bp, Homo sapien
agacccggatgctgtgtgagccaca

SEQ ID NO: 3124109 - DNA, 25 bp, Homo sapien
aatgtccagcggtgactttgacctc

SEQ ID NO: 3124110 - DNA, 25 bp, Homo sapien
gccttgaatgtccagcggtgacttt

SEQ ID NO: 3124111 - DNA, 25 bp, Homo sapien
ccacaaagcagacccggatgctgtg

SEQ ID NO: 3124112 - DNA, 25 bp, Homo sapien
cgtgcttgtgattggccgcatcttc

SEQ ID NO: 3124113 - DNA, 25 bp, Homo sapien
aggcagcagcctcgccatccgtgct

SEQ ID NO: 3124114 - DNA, 25 bp, Homo sapien
gagcagcgtaagagtctggtgcctc

SEQ ID NO: 3124115 - DNA, 25 bp, Homo sapien
cctgggagcagcgtaagagtctggt

SEQ ID NO: 3124116 - DNA, 25 bp, Homo sapien
tacacttgaatagggccggtatatg

SEQ ID NO: 3124117 - DNA, 25 bp, Homo sapien
ggtgtacacttgaatagggccggta

SEQ ID NO: 3124118 - DNA, 25 bp, Homo sapien
tatatgggggagagcattccgcatc

SEQ ID NO: 3124119 - DNA, 25 bp, Homo sapien
gcattccgcatcacccagggcggag

SEQ ID NO: 3124120 - DNA, 25 bp, Homo sapien
tcatgcctgcaaactgtaaaccgtc

SEQ ID NO: 3124121 - DNA, 25 bp, Homo sapien
tatgtgtgtggcattcggccggcca

SEQ ID NO: 3124122 - DNA, 25 bp, Homo sapien
tgcagtgaggcagtcccaagttcaa

SEQ ID NO: 3124123 - DNA, 25 bp, Homo sapien
cactgacccgtcgtgtgatgggcgc

SEQ ID NO: 3124124 - DNA, 25 bp, Homo sapien
tgcacagctattcgaagtcccagga

SEQ ID NO: 3124125 - DNA, 25 bp, Homo sapien
tgttgatgccgccaaagagggagct

SEQ ID NO: 3124126 - DNA, 25 bp, Homo sapien
tatgtgctaggcttgtcccagtgct

SEQ ID NO: 3124127 - DNA, 25 bp, Homo sapien
gagattctagcggatttgcccacgg

SEQ ID NO: 3124128 - DNA, 25 bp, Homo sapien
caaatgtcagggttcaccccaagac

SEQ ID NO: 3124129 - DNA, 25 bp, Homo sapien
taagtgggtaaacaagcgccagagt

SEQ ID NO: 3124130 - DNA, 25 bp, Homo sapien
ggctggaggctaacagaccctgaag

SEQ ID NO: 3124131 - DNA, 25 bp, Homo sapien
caaatggctggctcgggattggatc

SEQ ID NO: 3124132 - DNA, 25 bp, Homo sapien
ccagggctagaaaagggagctccgc

SEQ ID NO: 3124133 - DNA, 25 bp, Homo sapien
gggtcacttaaccaccggatgctgc

SEQ ID NO: 3124134 - DNA, 25 bp, Homo sapien
ctgtggagcggccatgagacctgca

SEQ ID NO: 3124135 - DNA, 25 bp, Homo sapien
tggctggcgacagctcccgggttct

SEQ ID NO: 3124136 - DNA, 25 bp, Homo sapien
tcattctacaagctaccctgaggct

SEQ ID NO: 3124137 - DNA, 25 bp, Homo sapien
tgtgaattttgttgtcctctcaaat

SEQ ID NO: 3124138 - DNA, 25 bp, Homo sapien
gctgcgctgggtctcagggatgagc

SEQ ID NO: 3124139 - DNA, 25 bp, Homo sapien
attttgttgtcctctcaaatagctg

SEQ ID NO: 3124140 - DNA, 25 bp, Homo sapien
gaaatcccgctgtgagcttggccag

SEQ ID NO: 3124141 - DNA, 25 bp, Homo sapien
tggccaggatcgcagcagctagctg

SEQ ID NO: 3124142 - DNA, 25 bp, Homo sapien
tggcagaagagtcacgcgatgaaat

SEQ ID NO: 3124143 - DNA, 25 bp, Homo sapien
tgatgctctcctagcagctctgctt

SEQ ID NO: 3124144 - DNA, 25 bp, Homo sapien
tcgaatgtggggtatcccgtagacc

SEQ ID NO: 3124145 - DNA, 25 bp, Homo sapien
tagcggcaagtctgggctcttgttt

SEQ ID NO: 3124146 - DNA, 25 bp, Homo sapien
gtgactctgatgtcctgtagcggca

SEQ ID NO: 3124147 - DNA, 25 bp, Homo sapien
gggtatcccgtagacctcatccatt

SEQ ID NO: 3124148 - DNA, 25 bp, Homo sapien
gattctacaggctcattgtccagtc

SEQ ID NO: 3124149 - DNA, 25 bp, Homo sapien
agattctacaggctcattgtccagt

SEQ ID NO: 3124150 - DNA, 25 bp, Homo sapien
cagattctacaggctcattgtccag

SEQ ID NO: 3124151 - DNA, 25 bp, Homo sapien
ttctacaggctcattgtccagtccc

SEQ ID NO: 3124152 - DNA, 25 bp, Homo sapien
catctttgtacagttaagaggacac

SEQ ID NO: 3124153 - DNA, 25 bp, Homo sapien
tttgtacagttaagaggacactgac

SEQ ID NO: 3124154 - DNA, 25 bp, Homo sapien
tctttgtacagttaagaggacactg

SEQ ID NO: 3124155 - DNA, 25 bp, Homo sapien
caccatctttgtacagttaagagga

SEQ ID NO: 3124156 - DNA, 25 bp, Homo sapien
tccatctggcatccggcgtgtcgac

SEQ ID NO: 3124157 - DNA, 25 bp, Homo sapien
ggttcctccatctggcatccggcgt

SEQ ID NO: 3124158 - DNA, 25 bp, Homo sapien
tggcatccggcgtgtcgacaagcag

SEQ ID NO: 3124159 - DNA, 25 bp, Homo sapien
ccggcgtgtcgacaagcagccagaa

SEQ ID NO: 3124160 - DNA, 25 bp, Homo sapien
gccccaggaggagcaagtgccccag

SEQ ID NO: 3124161 - DNA, 25 bp, Homo sapien
ccaggaggagcaagtgccccagatc

SEQ ID NO: 3124162 - DNA, 25 bp, Homo sapien
acagggagcggcaggtcaggctgag

SEQ ID NO: 3124163 - DNA, 25 bp, Homo sapien
tcaggctgaggttcagggaggcccc

SEQ ID NO: 3124164 - DNA, 25 bp, Homo sapien
cctccagggatgtcggggctccatg

SEQ ID NO: 3124165 - DNA, 25 bp, Homo sapien
ccacggtctcctgggcgatgaggca

SEQ ID NO: 3124166 - DNA, 25 bp, Homo sapien
tgtcggggctccatgcagatgttat

SEQ ID NO: 3124167 - DNA, 25 bp, Homo sapien
ttcctgccgcggactttcccataaa

SEQ ID NO: 3124168 - DNA, 25 bp, Homo sapien
ctttgggaccgtcccagcagtgcca

SEQ ID NO: 3124169 - DNA, 25 bp, Homo sapien
agacaggacagcctcgtccccggtg

SEQ ID NO: 3124170 - DNA, 25 bp, Homo sapien
cgagagcccgtcaaagggtcctttg

SEQ ID NO: 3124171 - DNA, 25 bp, Homo sapien
ccccggtgtcgcctgttccttgagt

SEQ ID NO: 3124172 - DNA, 25 bp, Homo sapien
gctgaataatactccctggcataga

SEQ ID NO: 3124173 - DNA, 25 bp, Homo sapien
tgttgtagcaggatcagtgctttca

SEQ ID NO: 3124174 - DNA, 25 bp, Homo sapien
tgcctgctccggattttccatagtg

SEQ ID NO: 3124175 - DNA, 25 bp, Homo sapien
tagtgaaggaatcctctaccccgtg

SEQ ID NO: 3124176 - DNA, 25 bp, Homo sapien
tcatactttatgagtggcccgaact

SEQ ID NO: 3124177 - DNA, 25 bp, Homo sapien
tggctttggccacgagcctgggaca

SEQ ID NO: 3124178 - DNA, 25 bp, Homo sapien
tgtgccatcactggaaagggtgcag

SEQ ID NO: 3124179 - DNA, 25 bp, Homo sapien
cagttaattccgtgctctgaggccc

SEQ ID NO: 3124180 - DNA, 25 bp, Homo sapien
ctcgtggctgcgagcacacatcaag

SEQ ID NO: 3124181 - DNA, 25 bp, Homo sapien
catgcaccattcagcagctgacccc

SEQ ID NO: 3124182 - DNA, 25 bp, Homo sapien
gtggctgcgagcacacatcaaggat

SEQ ID NO: 3124183 - DNA, 25 bp, Homo sapien
atgcaccattcagcagctgacccca

SEQ ID NO: 3124184 - DNA, 25 bp, Homo sapien
cattgagggctcgttgaccagaaag

SEQ ID NO: 3124185 - DNA, 25 bp, Homo sapien
agacctgaggttcctcaagggccgg

SEQ ID NO: 3124186 - DNA, 25 bp, Homo sapien
tgttctcattgagggctcgttgacc

SEQ ID NO: 3124187 - DNA, 25 bp, Homo sapien
ccccagacctgaggttcctcaaggg

SEQ ID NO: 3124188 - DNA, 25 bp, Homo sapien
tttcacaagccttctcgcagctcag

SEQ ID NO: 3124189 - DNA, 25 bp, Homo sapien
tcagcgcgggagtcattttatgtgc

SEQ ID NO: 3124190 - DNA, 25 bp, Homo sapien
agcttcctgcgaggctttcacaagc

SEQ ID NO: 3124191 - DNA, 25 bp, Homo sapien
gctgtctgcgtatttgtgattctcc

SEQ ID NO: 3124192 - DNA, 25 bp, Homo sapien
gctttggattctgggacgctcactg

SEQ ID NO: 3124193 - DNA, 25 bp, Homo sapien
caaacaggtctgctgcggataacga

SEQ ID NO: 3124194 - DNA, 25 bp, Homo sapien
gcttccaggcctacaacaaacaggt

SEQ ID NO: 3124195 - DNA, 25 bp, Homo sapien
cagtacttgggcctcacgctgaggg

SEQ ID NO: 3124196 - DNA, 25 bp, Homo sapien
ctgggccagatgctcgtataggttt

SEQ ID NO: 3124197 - DNA, 25 bp, Homo sapien
tcggagcggccggtggcatctctac

SEQ ID NO: 3124198 - DNA, 25 bp, Homo sapien
gatgctcgtataggtttcctcccgg

SEQ ID NO: 3124199 - DNA, 25 bp, Homo sapien
cagatgctcgtataggtttcctccc

SEQ ID NO: 3124200 - DNA, 25 bp, Homo sapien
gccagagcgattgtttatatagcac

SEQ ID NO: 3124201 - DNA, 25 bp, Homo sapien
gtggaaggagatggcatcccatacc

SEQ ID NO: 3124202 - DNA, 25 bp, Homo sapien
ggatccgaatccaatgtcctagctg

SEQ ID NO: 3124203 - DNA, 25 bp, Homo sapien
cagtttccccagtagtatggccggc

SEQ ID NO: 3124204 - DNA, 25 bp, Homo sapien
cccagccgatgatgcgcacagcagg

SEQ ID NO: 3124205 - DNA, 25 bp, Homo sapien
tccccagccgatgatgcgcacagca

SEQ ID NO: 3124206 - DNA, 25 bp, Homo sapien
gccctgtccccagccgatgatgcgc

SEQ ID NO: 3124207 - DNA, 25 bp, Homo sapien
ctgtccccagccgatgatgcgcaca

SEQ ID NO: 3124208 - DNA, 25 bp, Homo sapien
tgtggtcccccctgtcatcagggag

SEQ ID NO: 3124209 - DNA, 25 bp, Homo sapien
ctgtggtcccccctgtcatcaggga

SEQ ID NO: 3124210 - DNA, 25 bp, Homo sapien
gtcatcagggagagcctcagaagca

SEQ ID NO: 3124211 - DNA, 25 bp, Homo sapien
tcagggagagcctcagaagcagtgc

SEQ ID NO: 3124212 - DNA, 25 bp, Homo sapien
cggtcagggtccgcgcgggggcctg

SEQ ID NO: 3124213 - DNA, 25 bp, Homo sapien
agaaagcggtcagggtccgcgcggg

SEQ ID NO: 3124214 - DNA, 25 bp, Homo sapien
ctgcagaaagcggtcagggtccgcg

SEQ ID NO: 3124215 - DNA, 25 bp, Homo sapien
gcagaaagcggtcagggtccgcgcg

SEQ ID NO: 3124216 - DNA, 25 bp, Homo sapien
agcgcgtagctcagtggcgcgggcc

SEQ ID NO: 3124217 - DNA, 25 bp, Homo sapien
ggatgtctggaaggcgccccttctt

SEQ ID NO: 3124218 - DNA, 25 bp, Homo sapien
gggatcctttcccagcgcgccggcc

SEQ ID NO: 3124219 - DNA, 25 bp, Homo sapien
agcggctccacccaacttttgctcc

SEQ ID NO: 3124220 - DNA, 25 bp, Homo sapien
ctgcgggcccgagggtctggctgtc

SEQ ID NO: 3124221 - DNA, 25 bp, Homo sapien
tcgcggcgccgcaagggctgggtgg

SEQ ID NO: 3124222 - DNA, 25 bp, Homo sapien
gactccgagcggctgctgagatgag

SEQ ID NO: 3124223 - DNA, 25 bp, Homo sapien
gctgggtggcattcggaggctgcac

SEQ ID NO: 3124224 - DNA, 25 bp, Homo sapien
gccgcgaagcgtgctgggacttgta

SEQ ID NO: 3124225 - DNA, 25 bp, Homo sapien
tgggacttgtagtccgatcgccccg

SEQ ID NO: 3124226 - DNA, 25 bp, Homo sapien
tggccgcgaagcgtgctgggacttg

SEQ ID NO: 3124227 - DNA, 25 bp, Homo sapien
gacttgtagtccgatcgccccgcag

SEQ ID NO: 3124228 - DNA, 25 bp, Homo sapien
cgggcagaatcacctagctgggcct

SEQ ID NO: 3124229 - DNA, 25 bp, Homo sapien
ttcaggcgccttgtagctcgactac

SEQ ID NO: 3124230 - DNA, 25 bp, Homo sapien
cctgatgtcacagggtagccggtca

SEQ ID NO: 3124231 - DNA, 25 bp, Homo sapien
taaagaagagttggcccagaaggtc

SEQ ID NO: 3124232 - DNA, 25 bp, Homo sapien
tcctgacggtcctcgtctgtttctg

SEQ ID NO: 3124233 - DNA, 25 bp, Homo sapien
ttcccaggtgttcctgacggtcctc

SEQ ID NO: 3124234 - DNA, 25 bp, Homo sapien
aatgaagtttaatgggaggaagtgc

SEQ ID NO: 3124235 - DNA, 25 bp, Homo sapien
cggtcctcgtctgtttctgctgaac

SEQ ID NO: 3124236 - DNA, 25 bp, Homo sapien
gacaagagctgctctcactgtcagg

SEQ ID NO: 3124237 - DNA, 25 bp, Homo sapien
gcctggtgacaaagttgctaagaag

SEQ ID NO: 3124238 - DNA, 25 bp, Homo sapien
caagcttgagcttgccggtgaggcc

SEQ ID NO: 3124239 - DNA, 25 bp, Homo sapien
aagggacacgatgtcttgcttgatc

SEQ ID NO: 3124240 - DNA, 25 bp, Homo sapien
gattaagcttcttcgaaaccttatc

SEQ ID NO: 3124241 - DNA, 25 bp, Homo sapien
tgattaagcttcttcgaaaccttat

SEQ ID NO: 3124242 - DNA, 25 bp, Homo sapien
ctgcatgggtaggtgttgtggctcc

SEQ ID NO: 3124243 - DNA, 25 bp, Homo sapien
ggtaggtgttgtggctcctgcacaa

SEQ ID NO: 3124244 - DNA, 25 bp, Homo sapien
tccatggactgcatgggtaggtgtt

SEQ ID NO: 3124245 - DNA, 25 bp, Homo sapien
tgagaagtccatggactgcatgggt

SEQ ID NO: 3124246 - DNA, 25 bp, Homo sapien
tgccagcctgcattgtgtgaggaat

SEQ ID NO: 3124247 - DNA, 25 bp, Homo sapien
gccagcctgcattgtgtgaggaatg

SEQ ID NO: 3124248 - DNA, 25 bp, Homo sapien
gcctgcattgtgtgaggaatggggg

SEQ ID NO: 3124249 - DNA, 25 bp, Homo sapien
cagcctgcattgtgtgaggaatggg

SEQ ID NO: 3124250 - DNA, 25 bp, Homo sapien
ctccaggagggttagccagacaagt

SEQ ID NO: 3124251 - DNA, 25 bp, Homo sapien
actcctccaggagggttagccagac

SEQ ID NO: 3124252 - DNA, 25 bp, Homo sapien
tcccggccccgtggctgcgggtgat

SEQ ID NO: 3124253 - DNA, 25 bp, Homo sapien
atcccggggctatggtggacgccac

SEQ ID NO: 3124254 - DNA, 25 bp, Homo sapien
ccacacacgtaactgtaggaacgac

SEQ ID NO: 3124255 - DNA, 25 bp, Homo sapien
cgtaactgtaggaacgacagtcacc

SEQ ID NO: 3124256 - DNA, 25 bp, Homo sapien
cacacgtaactgtaggaacgacagt

SEQ ID NO: 3124257 - DNA, 25 bp, Homo sapien
cacgtaactgtaggaacgacagtca

SEQ ID NO: 3124258 - DNA, 25 bp, Homo sapien
acaaataactctgttaacgttgtga

SEQ ID NO: 3124259 - DNA, 25 bp, Homo sapien
tggtgggccaaatatacaaataact

SEQ ID NO: 3124260 - DNA, 25 bp, Homo sapien
tatacaaataactctgttaacgttg

SEQ ID NO: 3124261 - DNA, 25 bp, Homo sapien
taactctgttaacgttgtgacacat

SEQ ID NO: 3124262 - DNA, 25 bp, Homo sapien
caagaaagtgggagtaacatctgta

SEQ ID NO: 3124263 - DNA, 25 bp, Homo sapien
tgtcaagaaagtgggagtaacatct

SEQ ID NO: 3124264 - DNA, 25 bp, Homo sapien
tgttgtcaagaaagtgggagtaaca

SEQ ID NO: 3124265 - DNA, 25 bp, Homo sapien
gggagtaacatctgtaggaggttct

SEQ ID NO: 3124266 - DNA, 25 bp, Homo sapien
gcttggcgtaaagtactgagcaccc

SEQ ID NO: 3124267 - DNA, 25 bp, Homo sapien
tggtgtcaaaatcaccggcatctgg

SEQ ID NO: 3124268 - DNA, 25 bp, Homo sapien
cattgccaggtgttgcaggtatacc

SEQ ID NO: 3124269 - DNA, 25 bp, Homo sapien
ggttcgaataaccacagatctctgg

SEQ ID NO: 3124270 - DNA, 25 bp, Homo sapien
tgggggctttgatgttaagtcatac

SEQ ID NO: 3124271 - DNA, 25 bp, Homo sapien
cctgggggctttgatgttaagtcat

SEQ ID NO: 3124272 - DNA, 25 bp, Homo sapien
ttcctgggggctttgatgttaagtc

SEQ ID NO: 3124273 - DNA, 25 bp, Homo sapien
ttactcccactcagtagttcctggg

SEQ ID NO: 3124274 - DNA, 25 bp, Homo sapien
cagctgttgctatcacagttcctca

SEQ ID NO: 3124275 - DNA, 25 bp, Homo sapien
cacagctgttgctatcacagttcct

SEQ ID NO: 3124276 - DNA, 25 bp, Homo sapien
ctgttgctatcacagttcctcagga

SEQ ID NO: 3124277 - DNA, 25 bp, Homo sapien
ggccacagctgttgctatcacagtt

SEQ ID NO: 3124278 - DNA, 25 bp, Homo sapien
ctgtctcgacaggtgacactgagca

SEQ ID NO: 3124279 - DNA, 25 bp, Homo sapien
cagggagggctttccaagcgcagac

SEQ ID NO: 3124280 - DNA, 25 bp, Homo sapien
gtctcgacaggtgacactgagcatg

SEQ ID NO: 3124281 - DNA, 25 bp, Homo sapien
cgcagacccagcaaaatgctctgga

SEQ ID NO: 3124282 - DNA, 25 bp, Homo sapien
caagggtagcgtagcggtccaggta

SEQ ID NO: 3124283 - DNA, 25 bp, Homo sapien
gggtagcgtagcggtccaggtacca

SEQ ID NO: 3124284 - DNA, 25 bp, Homo sapien
ggtagcgtagcggtccaggtaccac

SEQ ID NO: 3124285 - DNA, 25 bp, Homo sapien
tgatcctgaccttggcttacacagt

SEQ ID NO: 3124286 - DNA, 25 bp, Homo sapien
tccgccgaaggagtgaagtcctccc

SEQ ID NO: 3124287 - DNA, 25 bp, Homo sapien
gcagcgagcgataaccacactactg

SEQ ID NO: 3124288 - DNA, 25 bp, Homo sapien
gatcccagcttacagatgagtcccc

SEQ ID NO: 3124289 - DNA, 25 bp, Homo sapien
tgcagctcccgccagtcctcagcat

SEQ ID NO: 3124290 - DNA, 25 bp, Homo sapien
tgcctacataggagcccccacagca

SEQ ID NO: 3124291 - DNA, 25 bp, Homo sapien
ctgcagctcccgccagtcctcagca

SEQ ID NO: 3124292 - DNA, 25 bp, Homo sapien
agctcccgccagtcctcagcatctc

SEQ ID NO: 3124293 - DNA, 25 bp, Homo sapien
ggtggtgagggaagcgagctgtttc

SEQ ID NO: 3124294 - DNA, 25 bp, Homo sapien
agggaagcgagctgtttccccagag

SEQ ID NO: 3124295 - DNA, 25 bp, Homo sapien
gggaagcgagctgtttccccagagg

SEQ ID NO: 3124296 - DNA, 25 bp, Homo sapien
gagcccagggaatcgctgactctgc

SEQ ID NO: 3124297 - DNA, 25 bp, Homo sapien
gaactgctctttgcaaaacgaggac

SEQ ID NO: 3124298 - DNA, 25 bp, Homo sapien
aagagcagagctctaggccccatga

SEQ ID NO: 3124299 - DNA, 25 bp, Homo sapien
ggctttccagatgactgatggccac

SEQ ID NO: 3124300 - DNA, 25 bp, Homo sapien
catgataagccgctagcctggagcc

SEQ ID NO: 3124301 - DNA, 25 bp, Homo sapien
gacatgaacctaaactcggagcaga

SEQ ID NO: 3124302 - DNA, 25 bp, Homo sapien
gaaacatggtacatcacgtcaggcc

SEQ ID NO: 3124303 - DNA, 25 bp, Homo sapien
taggacggtgccctattcagcagcg

SEQ ID NO: 3124304 - DNA, 25 bp, Homo sapien
ttttggtgtcagctcggtacataag

SEQ ID NO: 3124305 - DNA, 25 bp, Homo sapien
cttttggtgtcagctcggtacataa

SEQ ID NO: 3124306 - DNA, 25 bp, Homo sapien
cagggccgtagcacgcaggaaccag

SEQ ID NO: 3124307 - DNA, 25 bp, Homo sapien
caggaaccaggtggccgctcctggc

SEQ ID NO: 3124308 - DNA, 25 bp, Homo sapien
aggcccacagggccgtagcacgcag

SEQ ID NO: 3124309 - DNA, 25 bp, Homo sapien
ccacagggccgtagcacgcaggaac

SEQ ID NO: 3124310 - DNA, 25 bp, Homo sapien
aactgtaatctgattgatcagtttg

SEQ ID NO: 3124311 - DNA, 25 bp, Homo sapien
atctgattgatcagtttgtggccaa

SEQ ID NO: 3124312 - DNA, 25 bp, Homo sapien
cctgctccaactgtaatctgattga

SEQ ID NO: 3124313 - DNA, 25 bp, Homo sapien
ctccaactgtaatctgattgatcag

SEQ ID NO: 3124314 - DNA, 25 bp, Homo sapien
tggtgagaagattttccctgctgct

SEQ ID NO: 3124315 - DNA, 25 bp, Homo sapien
gtctaatacaggctctgctgcccct

SEQ ID NO: 3124316 - DNA, 25 bp, Homo sapien
aagtccagagcctcggggagcaatg

SEQ ID NO: 3124317 - DNA, 25 bp, Homo sapien
gggttccatccgtgcctgatgtgtg

SEQ ID NO: 3124318 - DNA, 25 bp, Homo sapien
ccaccctgcccctccagaacaccat

SEQ ID NO: 3124319 - DNA, 25 bp, Homo sapien
gaaaggtccaccctgcccctccaga

SEQ ID NO: 3124320 - DNA, 25 bp, Homo sapien
ggtccaccctgcccctccagaacac

SEQ ID NO: 3124321 - DNA, 25 bp, Homo sapien
tgttcactgattgtgggtggggaaa

SEQ ID NO: 3124322 - DNA, 25 bp, Homo sapien
atagtcagaaccctgctgtccccaa

SEQ ID NO: 3124323 - DNA, 25 bp, Homo sapien
aagcacatagtcagaaccctgctgt

SEQ ID NO: 3124324 - DNA, 25 bp, Homo sapien
ggagggcttggtcatggggggcctc

SEQ ID NO: 3124325 - DNA, 25 bp, Homo sapien
agggcttggtcatggggggcctcac

SEQ ID NO: 3124326 - DNA, 25 bp, Homo sapien
cacagaaggacacattcgagtcccc

SEQ ID NO: 3124327 - DNA, 25 bp, Homo sapien
cttccagcgtcacaaataggcacag

SEQ ID NO: 3124328 - DNA, 25 bp, Homo sapien
cggaacagtgctccgtcgcctgtca

SEQ ID NO: 3124329 - DNA, 25 bp, Homo sapien
acagtgctccgtcgcctgtcagaag

SEQ ID NO: 3124330 - DNA, 25 bp, Homo sapien
ccctatctcgggtttgctgtgctcc

SEQ ID NO: 3124331 - DNA, 25 bp, Homo sapien
ggcagaacccctgggtgccttgtgc

SEQ ID NO: 3124332 - DNA, 25 bp, Homo sapien
tggagtccccttccctgtcgaggca

SEQ ID NO: 3124333 - DNA, 25 bp, Homo sapien
tcgggtttgctgtgctcccttcctc

SEQ ID NO: 3124334 - DNA, 25 bp, Homo sapien
acccgcagagacctcacatgcctgg

SEQ ID NO: 3124335 - DNA, 25 bp, Homo sapien
gacccgcagagacctcacatgcctg

SEQ ID NO: 3124336 - DNA, 25 bp, Homo sapien
tctcactggcgccttggcctcctcg

SEQ ID NO: 3124337 - DNA, 25 bp, Homo sapien
tccccatgggggtcggctcctcagt

SEQ ID NO: 3124338 - DNA, 25 bp, Homo sapien
gctcacagagggcctcatgaccaca

SEQ ID NO: 3124339 - DNA, 25 bp, Homo sapien
catgaccacagtccggacctggtcc

SEQ ID NO: 3124340 - DNA, 25 bp, Homo sapien
caaggccaaacccatcggactgttt

SEQ ID NO: 3124341 - DNA, 25 bp, Homo sapien
tcaaaggcccctgcctcgttctttg

SEQ ID NO: 3124342 - DNA, 25 bp, Homo sapien
agttttgttatcactgacgcgtccc

SEQ ID NO: 3124343 - DNA, 25 bp, Homo sapien
ggactgtttctggaacggtctctga

SEQ ID NO: 3124344 - DNA, 25 bp, Homo sapien
gagatcacctaggtcactcttcagg

SEQ ID NO: 3124345 - DNA, 25 bp, Homo sapien
actcttcaggtctcccgggaattca

SEQ ID NO: 3124346 - DNA, 25 bp, Homo sapien
ccaagacagggacataggcagctaa

SEQ ID NO: 3124347 - DNA, 25 bp, Homo sapien
tcaatcccttgaacagtgacgaagc

SEQ ID NO: 3124348 - DNA, 25 bp, Homo sapien
cttggccaagcagggaaagtttcct

SEQ ID NO: 3124349 - DNA, 25 bp, Homo sapien
gcaatttactcccaaaaggatcaga

SEQ ID NO: 3124350 - DNA, 25 bp, Homo sapien
gaacctgggtatgggcaaatggaat

SEQ ID NO: 3124351 - DNA, 25 bp, Homo sapien
aaatgcgaacattcagggaacctgg

SEQ ID NO: 3124352 - DNA, 25 bp, Homo sapien
acagcctcctagacgtctcactcag

SEQ ID NO: 3124353 - DNA, 25 bp, Homo sapien
tcacagcctcctagacgtctcactc

SEQ ID NO: 3124354 - DNA, 25 bp, Homo sapien
gaacttctgtgtggccggtcttcac

SEQ ID NO: 3124355 - DNA, 25 bp, Homo sapien
tctgtgtggccggtcttcacagcct

SEQ ID NO: 3124356 - DNA, 25 bp, Homo sapien
ctgtcctgcgcagtttctctatcca

SEQ ID NO: 3124357 - DNA, 25 bp, Homo sapien
cattggtcctgcagagtttgcatct

SEQ ID NO: 3124358 - DNA, 25 bp, Homo sapien
tgggggtcacccctctggccattgg

SEQ ID NO: 3124359 - DNA, 25 bp, Homo sapien
ctctgtcctgcgcagtttctctatc

SEQ ID NO: 3124360 - DNA, 25 bp, Homo sapien
tggagcatccgggatcatctctcca

SEQ ID NO: 3124361 - DNA, 25 bp, Homo sapien
tccatctcgagatccttgcctttga

SEQ ID NO: 3124362 - DNA, 25 bp, Homo sapien
gacatgggcatctttggaggacttt

SEQ ID NO: 3124363 - DNA, 25 bp, Homo sapien
caggtaggagccaggacatagaccc

SEQ ID NO: 3124364 - DNA, 25 bp, Homo sapien
tggctcctctgaaggcgccaaacgc

SEQ ID NO: 3124365 - DNA, 25 bp, Homo sapien
gctcctctgaaggcgccaaacgctc

SEQ ID NO: 3124366 - DNA, 25 bp, Homo sapien
ggctcctctgaaggcgccaaacgct

SEQ ID NO: 3124367 - DNA, 25 bp, Homo sapien
ctgtgggataaacccccatctggca

SEQ ID NO: 3124368 - DNA, 25 bp, Homo sapien
tgtgggataaacccccatctggcag

SEQ ID NO: 3124369 - DNA, 25 bp, Homo sapien
atgcgtcctggtcatcccgagtggc

SEQ ID NO: 3124370 - DNA, 25 bp, Homo sapien
taaataacggtcctattgcctaatg

SEQ ID NO: 3124371 - DNA, 25 bp, Homo sapien
tgcctaatgcgtcctggtcatcccg

SEQ ID NO: 3124372 - DNA, 25 bp, Homo sapien
cctattgcctaatgcgtcctggtca

SEQ ID NO: 3124373 - DNA, 25 bp, Homo sapien
acaccacatcagccaccagcaaccc

SEQ ID NO: 3124374 - DNA, 25 bp, Homo sapien
caccacatcagccaccagcaacccc

SEQ ID NO: 3124375 - DNA, 25 bp, Homo sapien
atcagccaccagcaaccccatgggc

SEQ ID NO: 3124376 - DNA, 25 bp, Homo sapien
agccaccagcaaccccatgggctcc

SEQ ID NO: 3124377 - DNA, 25 bp, Homo sapien
agccgcacttagcaagctcctcctc

SEQ ID NO: 3124378 - DNA, 25 bp, Homo sapien
acagccgcacttagcaagctcctcc

SEQ ID NO: 3124379 - DNA, 25 bp, Homo sapien
ggacagccgcacttagcaagctcct

SEQ ID NO: 3124380 - DNA, 25 bp, Homo sapien
ctggacagccgcacttagcaagctc

SEQ ID NO: 3124381 - DNA, 25 bp, Homo sapien
gagggtctgctgtaggccggggtcc

SEQ ID NO: 3124382 - DNA, 25 bp, Homo sapien
ctcccggctatcattctccagcagg

SEQ ID NO: 3124383 - DNA, 25 bp, Homo sapien
gggtcccgcagtctgctcttcctcc

SEQ ID NO: 3124384 - DNA, 25 bp, Homo sapien
aagcacgcgggccatctcccggcta

SEQ ID NO: 3124385 - DNA, 25 bp, Homo sapien
gatccggtcctggtcactgtggatg

SEQ ID NO: 3124386 - DNA, 25 bp, Homo sapien
agagcatggtaggtggaaaacttcc

SEQ ID NO: 3124387 - DNA, 25 bp, Homo sapien
cgagagcatggtaggtggaaaactt

SEQ ID NO: 3124388 - DNA, 25 bp, Homo sapien
tcaaaagtcttaaacgtcaccacga

SEQ ID NO: 3124389 - DNA, 25 bp, Homo sapien
tcaagggtggtgtcgcaagatcccc

SEQ ID NO: 3124390 - DNA, 25 bp, Homo sapien
cagcaaggtgggtctgaaatgccca

SEQ ID NO: 3124391 - DNA, 25 bp, Homo sapien
cgtccacagtgggatgagcctcagc

SEQ ID NO: 3124392 - DNA, 25 bp, Homo sapien
tgagccttcgttcaccgcagctgaa

SEQ ID NO: 3124393 - DNA, 25 bp, Homo sapien
ggaggctctcgtgggtcagccttaa

SEQ ID NO: 3124394 - DNA, 25 bp, Homo sapien
cagccttaaggcgttctcatccaca

SEQ ID NO: 3124395 - DNA, 25 bp, Homo sapien
atgagcaggtttgccaggcagtgat

SEQ ID NO: 3124396 - DNA, 25 bp, Homo sapien
catggacttggatggccgtctcctc

SEQ ID NO: 3124397 - DNA, 25 bp, Homo sapien
gggacccgtcatcactctcacatgg

SEQ ID NO: 3124398 - DNA, 25 bp, Homo sapien
tgatgaaatggaatcaaaggctccg

SEQ ID NO: 3124399 - DNA, 25 bp, Homo sapien
tctcacatggtggtcaggacacagg

SEQ ID NO: 3124400 - DNA, 25 bp, Homo sapien
tgaagagtctgtttccggggccgcc

SEQ ID NO: 3124401 - DNA, 25 bp, Homo sapien
ctggagccggaagagggaggtcttt

SEQ ID NO: 3124402 - DNA, 25 bp, Homo sapien
tggagccggaagagggaggtctttg

SEQ ID NO: 3124403 - DNA, 25 bp, Homo sapien
catcagcgggttgccgggcatcaca

SEQ ID NO: 3124404 - DNA, 25 bp, Homo sapien
ggccacccatggcatcgtcgatggg

SEQ ID NO: 3124405 - DNA, 25 bp, Homo sapien
ccatcagcgggttgccgggcatcac

SEQ ID NO: 3124406 - DNA, 25 bp, Homo sapien
atcacagggccacccatggcatcgt

SEQ ID NO: 3124407 - DNA, 25 bp, Homo sapien
gctggacccggcatccaaggagaag

SEQ ID NO: 3124408 - DNA, 25 bp, Homo sapien
tcataaagaggacgcggtcacggtc

SEQ ID NO: 3124409 - DNA, 25 bp, Homo sapien
tctgacaggtgcacaggccatccag

SEQ ID NO: 3124410 - DNA, 25 bp, Homo sapien
cttgccacagagcacaaagcgctgg

SEQ ID NO: 3124411 - DNA, 25 bp, Homo sapien
tgaggtcgccacctcggaaggtcat

SEQ ID NO: 3124412 - DNA, 25 bp, Homo sapien
tgcgccccaaggatctcgatgaggt

SEQ ID NO: 3124413 - DNA, 25 bp, Homo sapien
tggaagtctgccaatgccgaggcca

SEQ ID NO: 3124414 - DNA, 25 bp, Homo sapien
ctcggaaggtcatctcttcgggccc

SEQ ID NO: 3124415 - DNA, 25 bp, Homo sapien
gctgatgaggctgctccgcacaaac

SEQ ID NO: 3124416 - DNA, 25 bp, Homo sapien
atgctgatgaggctgctccgcacaa

SEQ ID NO: 3124417 - DNA, 25 bp, Homo sapien
ctgatgaggctgctccgcacaaacc

SEQ ID NO: 3124418 - DNA, 25 bp, Homo sapien
tgctgatgaggctgctccgcacaaa

SEQ ID NO: 3124419 - DNA, 25 bp, Homo sapien
gcagccctcgctgaagaatgacttt

SEQ ID NO: 3124420 - DNA, 25 bp, Homo sapien
aggctgtacacgctgcagacatcgg

SEQ ID NO: 3124421 - DNA, 25 bp, Homo sapien
tgcagacatcggtgcccgacatccg

SEQ ID NO: 3124422 - DNA, 25 bp, Homo sapien
gccctcgctgaagaatgacttttct

SEQ ID NO: 3124423 - DNA, 25 bp, Homo sapien
ctttcagcatccaggggctggcact

SEQ ID NO: 3124424 - DNA, 25 bp, Homo sapien
tttcagcatccaggggctggcacta

SEQ ID NO: 3124425 - DNA, 25 bp, Homo sapien
ttcagcatccaggggctggcactat

SEQ ID NO: 3124426 - DNA, 25 bp, Homo sapien
caggttgagctagtgtcgatgttgc

SEQ ID NO: 3124427 - DNA, 25 bp, Homo sapien
tgagagcattgctgggtgcaggtat

SEQ ID NO: 3124428 - DNA, 25 bp, Homo sapien
gcagggtcaggtgcaaccagcatag

SEQ ID NO: 3124429 - DNA, 25 bp, Homo sapien
tgcaggtattgagggctgagatgtt

SEQ ID NO: 3124430 - DNA, 25 bp, Homo sapien
tttcctgcggctgctcggtctcagc

SEQ ID NO: 3124431 - DNA, 25 bp, Homo sapien
tttttcctgcggctgctcggtctca

SEQ ID NO: 3124432 - DNA, 25 bp, Homo sapien
tgcggctgctcggtctcagcttcct

SEQ ID NO: 3124433 - DNA, 25 bp, Homo sapien
tcctgcggctgctcggtctcagctt

SEQ ID NO: 3124434 - DNA, 25 bp, Homo sapien
cctggagcacataggaactccggca

SEQ ID NO: 3124435 - DNA, 25 bp, Homo sapien
cttgagaattatgtgcaatgcaaac

SEQ ID NO: 3124436 - DNA, 25 bp, Homo sapien
ccttgagaattatgtgcaatgcaaa

SEQ ID NO: 3124437 - DNA, 25 bp, Homo sapien
agggcctggagcacataggaactcc

SEQ ID NO: 3124438 - DNA, 25 bp, Homo sapien
ccacatcgtacaggccacggaagct

SEQ ID NO: 3124439 - DNA, 25 bp, Homo sapien
cctcgtcgctgaagctgcggaacac

SEQ ID NO: 3124440 - DNA, 25 bp, Homo sapien
tcctgcaagctcacgtcgctggatg

SEQ ID NO: 3124441 - DNA, 25 bp, Homo sapien
caggtcttgcattgttccagaacat

SEQ ID NO: 3124442 - DNA, 25 bp, Homo sapien
tccactgcctgcgtcatgaaggtga

SEQ ID NO: 3124443 - DNA, 25 bp, Homo sapien
ggactccggcaatagcactggcttc

SEQ ID NO: 3124444 - DNA, 25 bp, Homo sapien
tgcttccggtaaatgctggccaggt

SEQ ID NO: 3124445 - DNA, 25 bp, Homo sapien
gtacacagccaccactaggaacagg

SEQ ID NO: 3124446 - DNA, 25 bp, Homo sapien
ctgaagctcactttcccatgctcag

SEQ ID NO: 3124447 - DNA, 25 bp, Homo sapien
aggaccccacaagccccatttgtgg

SEQ ID NO: 3124448 - DNA, 25 bp, Homo sapien
ccaaggaccccacaagccccatttg

SEQ ID NO: 3124449 - DNA, 25 bp, Homo sapien
ccccatttgtgggtgggacgtggca

SEQ ID NO: 3124450 - DNA, 25 bp, Homo sapien
tctccttgcagtcagagaatggccc

SEQ ID NO: 3124451 - DNA, 25 bp, Homo sapien
ctggagggtctccttgcagtcagag

SEQ ID NO: 3124452 - DNA, 25 bp, Homo sapien
ccttgggcagatggctccccagtgc

SEQ ID NO: 3124453 - DNA, 25 bp, Homo sapien
cgggtttctggagggtctccttgca

SEQ ID NO: 3124454 - DNA, 25 bp, Homo sapien
gcaacattccggagatgaacaccag

SEQ ID NO: 3124455 - DNA, 25 bp, Homo sapien
tactggcgtgaaactggacatcaac

SEQ ID NO: 3124456 - DNA, 25 bp, Homo sapien
caggtacgccgagtggacatctatc

SEQ ID NO: 3124457 - DNA, 25 bp, Homo sapien
caagtagcccctgtcgcagatggaa

SEQ ID NO: 3124458 - DNA, 25 bp, Homo sapien
cgctgtagaagtggcacagccgctg

SEQ ID NO: 3124459 - DNA, 25 bp, Homo sapien
cctcgctgggcatgacggcgctgta

SEQ ID NO: 3124460 - DNA, 25 bp, Homo sapien
gcccctccagcaccttgtcggccac

SEQ ID NO: 3124461 - DNA, 25 bp, Homo sapien
cagggacaggtagagctggctgatg

SEQ ID NO: 3124462 - DNA, 25 bp, Homo sapien
cagcccagaatgcatgtaactgctt

SEQ ID NO: 3124463 - DNA, 25 bp, Homo sapien
atgacaaaagccaccaggtaggaag

SEQ ID NO: 3124464 - DNA, 25 bp, Homo sapien
gatgtgagaccttgaaaccctgccc

SEQ ID NO: 3124465 - DNA, 25 bp, Homo sapien
tggttaccccaccaggtcaggatgc

SEQ ID NO: 3124466 - DNA, 25 bp, Homo sapien
cgggtccctgtggaatccggctcct

SEQ ID NO: 3124467 - DNA, 25 bp, Homo sapien
tctcaaggtgcgcaggcatcacagt

SEQ ID NO: 3124468 - DNA, 25 bp, Homo sapien
tgagaacatggctctaacacactgg

SEQ ID NO: 3124469 - DNA, 25 bp, Homo sapien
cagtgttcagatgctatccaggccg

SEQ ID NO: 3124470 - DNA, 25 bp, Homo sapien
tcccgtgggtctggtgacagatgaa

SEQ ID NO: 3124471 - DNA, 25 bp, Homo sapien
gaaggacatccttctgagggaactg

SEQ ID NO: 3124472 - DNA, 25 bp, Homo sapien
aatgggactgggaacggccctcttg

SEQ ID NO: 3124473 - DNA, 25 bp, Homo sapien
gggttgaacacacacggcaaggaaa

SEQ ID NO: 3124474 - DNA, 25 bp, Homo sapien
ctggatgtagaggtccaccagctcg

SEQ ID NO: 3124475 - DNA, 25 bp, Homo sapien
ggtcaatgaaaatccccagacttcg

SEQ ID NO: 3124476 - DNA, 25 bp, Homo sapien
cgctctgccgcaagatgtaatagat

SEQ ID NO: 3124477 - DNA, 25 bp, Homo sapien
ccagacttcgtttggtgtagtccag

SEQ ID NO: 3124478 - DNA, 25 bp, Homo sapien
ccaggccccgtcgaagaagatgtct

SEQ ID NO: 3124479 - DNA, 25 bp, Homo sapien
tgtgtacagggccacgttctgtgcc

SEQ ID NO: 3124480 - DNA, 25 bp, Homo sapien
cccaggttggggtcgcctgtgtaca

SEQ ID NO: 3124481 - DNA, 25 bp, Homo sapien
tagaaggacacagctttctcccgct

SEQ ID NO: 3124482 - DNA, 25 bp, Homo sapien
cacgacatttatctgtgcccagggc

SEQ ID NO: 3124483 - DNA, 25 bp, Homo sapien
gataaagggcggttcagacacccaa

SEQ ID NO: 3124484 - DNA, 25 bp, Homo sapien
caagggtaaggccattgctgtgtcc

SEQ ID NO: 3124485 - DNA, 25 bp, Homo sapien
tatcattcccggtgaaaccactagg

SEQ ID NO: 3124486 - DNA, 25 bp, Homo sapien
agtgctagggccatgtgggcaaact

SEQ ID NO: 3124487 - DNA, 25 bp, Homo sapien
atgtgggcaaactccaagccctcct

SEQ ID NO: 3124488 - DNA, 25 bp, Homo sapien
tccgccttgcggttgcccgtagtca

SEQ ID NO: 3124489 - DNA, 25 bp, Homo sapien
cggttgcccgtagtcactgccaggg

SEQ ID NO: 3124490 - DNA, 25 bp, Homo sapien
caaagtcggacttggatggcccagc

SEQ ID NO: 3124491 - DNA, 25 bp, Homo sapien
tctctctagaggacagacgaccctg

SEQ ID NO: 3124492 - DNA, 25 bp, Homo sapien
catctaccgtgaggctttggcaaag

SEQ ID NO: 3124493 - DNA, 25 bp, Homo sapien
tgagctctggcaaagtgtgggtcct

SEQ ID NO: 3124494 - DNA, 25 bp, Homo sapien
caggtacaccttcacgtagtagagg

SEQ ID NO: 3124495 - DNA, 25 bp, Homo sapien
tcctcgtcaaactccagcggcgagt

SEQ ID NO: 3124496 - DNA, 25 bp, Homo sapien
ggccttgaggtagaagtgctctgcc

SEQ ID NO: 3124497 - DNA, 25 bp, Homo sapien
gatgatgtcaccgagcaccaggtac

SEQ ID NO: 3124498 - DNA, 25 bp, Homo sapien
tggccagccgcgtgtagatcttcag

SEQ ID NO: 3124499 - DNA, 25 bp, Homo sapien
aagagcgacttctcacggtccagga

SEQ ID NO: 3124500 - DNA, 25 bp, Homo sapien
gctctgtggcgaaggtcctggcctt

SEQ ID NO: 3124501 - DNA, 25 bp, Homo sapien
ggtagtacccggctgcatcaaacgg

SEQ ID NO: 3124502 - DNA, 25 bp, Homo sapien
cgcagagtggcagaggaggcaggtt

SEQ ID NO: 3124503 - DNA, 25 bp, Homo sapien
agagtggcagaggaggcaggttgac

SEQ ID NO: 3124504 - DNA, 25 bp, Homo sapien
cagagtggcagaggaggcaggttga

SEQ ID NO: 3124505 - DNA, 25 bp, Homo sapien
ccgcagagtggcagaggaggcaggt

SEQ ID NO: 3124506 - DNA, 25 bp, Homo sapien
cgagggtggctgggggccaaccagg

SEQ ID NO: 3124507 - DNA, 25 bp, Homo sapien
tcagcgagggtggctgggggccaac

SEQ ID NO: 3124508 - DNA, 25 bp, Homo sapien
gcgagggtggctgggggccaaccag

SEQ ID NO: 3124509 - DNA, 25 bp, Homo sapien
agcgagggtggctgggggccaacca

SEQ ID NO: 3124510 - DNA, 25 bp, Homo sapien
tattgctatttggcccctgcgttcg

SEQ ID NO: 3124511 - DNA, 25 bp, Homo sapien
gccagaaaatgagccaccggcgaca

SEQ ID NO: 3124512 - DNA, 25 bp, Homo sapien
tgagccaccggcgacaccaggagag

SEQ ID NO: 3124513 - DNA, 25 bp, Homo sapien
tgcgttcgtgcctccatttgccaga

SEQ ID NO: 3124514 - DNA, 25 bp, Homo sapien
tattatcagagctccgctcactggc

SEQ ID NO: 3124515 - DNA, 25 bp, Homo sapien
tcaacatgaggtttgtcagcagctc

SEQ ID NO: 3124516 - DNA, 25 bp, Homo sapien
gaatgccttttgaaactagacggtg

SEQ ID NO: 3124517 - DNA, 25 bp, Homo sapien
gaaacaggcctctattggccctggg

SEQ ID NO: 3124518 - DNA, 25 bp, Homo sapien
cagcggacgaacagggtccaggaca

SEQ ID NO: 3124519 - DNA, 25 bp, Homo sapien
acgccagggctcaggacgtgtgccc

SEQ ID NO: 3124520 - DNA, 25 bp, Homo sapien
ctggcctggtgagcacggcagcgga

SEQ ID NO: 3124521 - DNA, 25 bp, Homo sapien
cctgtgtttggctctggcgggttac

SEQ ID NO: 3124522 - DNA, 25 bp, Homo sapien
gaggtggggatgcacacaggggctc

SEQ ID NO: 3124523 - DNA, 25 bp, Homo sapien
ctgcataggaggtggggatgcacac

SEQ ID NO: 3124524 - DNA, 25 bp, Homo sapien
aggaggtggggatgcacacaggggc

SEQ ID NO: 3124525 - DNA, 25 bp, Homo sapien
ggtggggatgcacacaggggctccc

SEQ ID NO: 3124526 - DNA, 25 bp, Homo sapien
ctggcctggagatagccagtctgct

SEQ ID NO: 3124527 - DNA, 25 bp, Homo sapien
gcccagctttgcactctgccctgga

SEQ ID NO: 3124528 - DNA, 25 bp, Homo sapien
cctgtcgggaacgggtgtgttcaca

SEQ ID NO: 3124529 - DNA, 25 bp, Homo sapien
gcccggcagtgtgagccgtgaccac

SEQ ID NO: 3124530 - DNA, 25 bp, Homo sapien
atgtatctttgacgtcattgaacac

SEQ ID NO: 3124531 - DNA, 25 bp, Homo sapien
taatgtatctttgacgtcattgaac

SEQ ID NO: 3124532 - DNA, 25 bp, Homo sapien
tcttaatgtatctttgacgtcattg

SEQ ID NO: 3124533 - DNA, 25 bp, Homo sapien
tatctttgacgtcattgaacactat

SEQ ID NO: 3124534 - DNA, 25 bp, Homo sapien
gcggcctggactaaagctggtgaca

SEQ ID NO: 3124535 - DNA, 25 bp, Homo sapien
gactaaagctggtgacattgtcagt

SEQ ID NO: 3124536 - DNA, 25 bp, Homo sapien
gctggtgacattgtcagtgaaggct

SEQ ID NO: 3124537 - DNA, 25 bp, Homo sapien
ggtgacattgtcagtgaaggctaaa

SEQ ID NO: 3124538 - DNA, 25 bp, Homo sapien
aatatccaggttaggcgtcgctgcc

SEQ ID NO: 3124539 - DNA, 25 bp, Homo sapien
gaggccctggttctggacgaacact

SEQ ID NO: 3124540 - DNA, 25 bp, Homo sapien
cacttccgtggattcttcctcctgt

SEQ ID NO: 3124541 - DNA, 25 bp, Homo sapien
gcagtgccctttccacttccgtgga

SEQ ID NO: 3124542 - DNA, 25 bp, Homo sapien
ctggctagcgatgctgcaatccagg

SEQ ID NO: 3124543 - DNA, 25 bp, Homo sapien
actgagatgccctggctagcgatgc

SEQ ID NO: 3124544 - DNA, 25 bp, Homo sapien
gccctggctagcgatgctgcaatcc

SEQ ID NO: 3124545 - DNA, 25 bp, Homo sapien
gatgccctggctagcgatgctgcaa

SEQ ID NO: 3124546 - DNA, 25 bp, Homo sapien
tgaactgctcagcgccctcctgagc

SEQ ID NO: 3124547 - DNA, 25 bp, Homo sapien
tgtctcccacgtgcgcacacacttt

SEQ ID NO: 3124548 - DNA, 25 bp, Homo sapien
cggtgccctccagccgtgaactgct

SEQ ID NO: 3124549 - DNA, 25 bp, Homo sapien
ggtgcagtgcagacaccggtgccct

SEQ ID NO: 3124550 - DNA, 25 bp, Homo sapien
ctgctggggcgaaccctcctccttc

SEQ ID NO: 3124551 - DNA, 25 bp, Homo sapien
ctcctccttcccgaggagaaagcgg

SEQ ID NO: 3124552 - DNA, 25 bp, Homo sapien
cctccttcccgaggagaaagcggct

SEQ ID NO: 3124553 - DNA, 25 bp, Homo sapien
tccttcccgaggagaaagcggctgg

SEQ ID NO: 3124554 - DNA, 25 bp, Homo sapien
gccacgtgggcctccattctgctga

SEQ ID NO: 3124555 - DNA, 25 bp, Homo sapien
ctggccacgtgggcctccattctgc

SEQ ID NO: 3124556 - DNA, 25 bp, Homo sapien
tctgctgagcaaatgggcaacaggg

SEQ ID NO: 3124557 - DNA, 25 bp, Homo sapien
ctccattctgctgagcaaatgggca

SEQ ID NO: 3124558 - DNA, 25 bp, Homo sapien
tgaggtaatggcctaaattgtggtt

SEQ ID NO: 3124559 - DNA, 25 bp, Homo sapien
tggcctaaattgtggttctggccac

SEQ ID NO: 3124560 - DNA, 25 bp, Homo sapien
aatggcctaaattgtggttctggcc

SEQ ID NO: 3124561 - DNA, 25 bp, Homo sapien
ctggggtgaggtaatggcctaaatt

SEQ ID NO: 3124562 - DNA, 25 bp, Homo sapien
actggccaggggtcgtctgaggcct

SEQ ID NO: 3124563 - DNA, 25 bp, Homo sapien
gccaggggtcgtctgaggcctccat

SEQ ID NO: 3124564 - DNA, 25 bp, Homo sapien
cactggccaggggtcgtctgaggcc

SEQ ID NO: 3124565 - DNA, 25 bp, Homo sapien
gctgaatgtgaacaccctggaccac

SEQ ID NO: 3124566 - DNA, 25 bp, Homo sapien
tctttttcacatggcgctcctcctt

SEQ ID NO: 3124567 - DNA, 25 bp, Homo sapien
tgaaatgaaacgatgaatcagggtc

SEQ ID NO: 3124568 - DNA, 25 bp, Homo sapien
aacgatgaatcagggtcacgcagct

SEQ ID NO: 3124569 - DNA, 25 bp, Homo sapien
catcagctgtgataagacgcggtgg

SEQ ID NO: 3124570 - DNA, 25 bp, Homo sapien
tgaaggctgcggagttgtgagagaa

SEQ ID NO: 3124571 - DNA, 25 bp, Homo sapien
gaatctggtgacagtgcgtcagctg

SEQ ID NO: 3124572 - DNA, 25 bp, Homo sapien
gcagaaccccccttggaggtgaatg

SEQ ID NO: 3124573 - DNA, 25 bp, Homo sapien
ccatcacgagagtcagaatctggtg

SEQ ID NO: 3124574 - DNA, 25 bp, Homo sapien
gtggctcaggctggcgggcgtcagg

SEQ ID NO: 3124575 - DNA, 25 bp, Homo sapien
cgcggtcacatgcgccggtggctca

SEQ ID NO: 3124576 - DNA, 25 bp, Homo sapien
gccgggcgcctacggatgggactgg

SEQ ID NO: 3124577 - DNA, 25 bp, Homo sapien
agggcgcagggagcgcagggaccag

SEQ ID NO: 3124578 - DNA, 25 bp, Homo sapien
cgacacgtcgcagcgcgcgggacac

SEQ ID NO: 3124579 - DNA, 25 bp, Homo sapien
acgtcgcagcgcgcgggacacggcg

SEQ ID NO: 3124580 - DNA, 25 bp, Homo sapien
tgggacaccgcgacacgtcgcagcg

SEQ ID NO: 3124581 - DNA, 25 bp, Homo sapien
ctgggacaccgcgacacgtcgcagc

SEQ ID NO: 3124582 - DNA, 25 bp, Homo sapien
tgcagcgcgcacacgttggcatagg

SEQ ID NO: 3124583 - DNA, 25 bp, Homo sapien
ggctctcgccgcaaggcgagtccag

SEQ ID NO: 3124584 - DNA, 25 bp, Homo sapien
ataggtgtgcccgtcggtgccacac

SEQ ID NO: 3124585 - DNA, 25 bp, Homo sapien
agttgcagaggtcgggcacgtagcc

SEQ ID NO: 3124586 - DNA, 25 bp, Homo sapien
acattctgagcgcatggcaggctcc

SEQ ID NO: 3124587 - DNA, 25 bp, Homo sapien
ttctgagcgcatggcaggctccaag

SEQ ID NO: 3124588 - DNA, 25 bp, Homo sapien
cttgtaaactgctctggggctctac

SEQ ID NO: 3124589 - DNA, 25 bp, Homo sapien
gctctacattctgagcgcatggcag

SEQ ID NO: 3124590 - DNA, 25 bp, Homo sapien
gcacaataaaagccggtgattaaat

SEQ ID NO: 3124591 - DNA, 25 bp, Homo sapien
cttggcgaaagctcttggccaagca

SEQ ID NO: 3124592 - DNA, 25 bp, Homo sapien
tcagctccagtccggctggactcct

SEQ ID NO: 3124593 - DNA, 25 bp, Homo sapien
aagtcctccagtgccgccagatgct

SEQ ID NO: 3124594 - DNA, 25 bp, Homo sapien
agctctgccggcagttccaagtcct

SEQ ID NO: 3124595 - DNA, 25 bp, Homo sapien
ggcacagcacatggaaagccacagg

SEQ ID NO: 3124596 - DNA, 25 bp, Homo sapien
ggaaagccacaggctgagcccgcat

SEQ ID NO: 3124597 - DNA, 25 bp, Homo sapien
gcaggggcacagcacatggaaagcc

SEQ ID NO: 3124598 - DNA, 25 bp, Homo sapien
ccaggcctggaagagcccacgggca

SEQ ID NO: 3124599 - DNA, 25 bp, Homo sapien
gtgagatcacgatgctgccagctcc

SEQ ID NO: 3124600 - DNA, 25 bp, Homo sapien
catcagtgagatcacgatgctgcca

SEQ ID NO: 3124601 - DNA, 25 bp, Homo sapien
tcagtgagatcacgatgctgccagc

SEQ ID NO: 3124602 - DNA, 25 bp, Homo sapien
ggtgcatcagtgagatcacgatgct

SEQ ID NO: 3124603 - DNA, 25 bp, Homo sapien
ggaagagctctatgtggaccacggc

SEQ ID NO: 3124604 - DNA, 25 bp, Homo sapien
tctccaccacgtcagcaatgaagtt

SEQ ID NO: 3124605 - DNA, 25 bp, Homo sapien
aagttgaacttgtagcgcgggctgc

SEQ ID NO: 3124606 - DNA, 25 bp, Homo sapien
ggaccacggctggtgcgatcttctc

SEQ ID NO: 3124607 - DNA, 25 bp, Homo sapien
ggaaaactgagtcccgagacgctga

SEQ ID NO: 3124608 - DNA, 25 bp, Homo sapien
caaggactgcggaaaacactagagc

SEQ ID NO: 3124609 - DNA, 25 bp, Homo sapien
taagggagggaagtccagtctcaca

SEQ ID NO: 3124610 - DNA, 25 bp, Homo sapien
gagacgctgaactacttgcctaggt

SEQ ID NO: 3124611 - DNA, 25 bp, Homo sapien
gagacacaggcgggcatttagggtg

SEQ ID NO: 3124612 - DNA, 25 bp, Homo sapien
agacacaggcgggcatttagggtgg

SEQ ID NO: 3124613 - DNA, 25 bp, Homo sapien
ggagacacaggcgggcatttagggt

SEQ ID NO: 3124614 - DNA, 25 bp, Homo sapien
acacaggcgggcatttagggtgggg

SEQ ID NO: 3124615 - DNA, 25 bp, Homo sapien
cacgttgcggccaaacagcgggtgt

SEQ ID NO: 3124616 - DNA, 25 bp, Homo sapien
ttggtgatgatcaggccggcctctg

SEQ ID NO: 3124617 - DNA, 25 bp, Homo sapien
gatgaagccagaaccgctggacagg

SEQ ID NO: 3124618 - DNA, 25 bp, Homo sapien
cataggagtccccattctgtagctg

SEQ ID NO: 3124619 - DNA, 25 bp, Homo sapien
cagggcttgcaaagataaaatattt

SEQ ID NO: 3124620 - DNA, 25 bp, Homo sapien
tgtgcagcctaaggctgcatttttg

SEQ ID NO: 3124621 - DNA, 25 bp, Homo sapien
cctgtgcagcctaaggctgcatttt

SEQ ID NO: 3124622 - DNA, 25 bp, Homo sapien
ccacctgtgcagcctaaggctgcat

SEQ ID NO: 3124623 - DNA, 25 bp, Homo sapien
aagggactgccgatggccaccacaa

SEQ ID NO: 3124624 - DNA, 25 bp, Homo sapien
gatgtagtccatgtcggagtcccgg

SEQ ID NO: 3124625 - DNA, 25 bp, Homo sapien
gcagtgctgacgatgcccgttgtca

SEQ ID NO: 3124626 - DNA, 25 bp, Homo sapien
cgagtgacccagcaacaacacaggg

SEQ ID NO: 3124627 - DNA, 25 bp, Homo sapien
caggttcaccagtggtcccccggag

SEQ ID NO: 3124628 - DNA, 25 bp, Homo sapien
gctgcactcccgactgttggtgtaa

SEQ ID NO: 3124629 - DNA, 25 bp, Homo sapien
cactagcatccccgaggcgcttggg

SEQ ID NO: 3124630 - DNA, 25 bp, Homo sapien
cactcccgactgttggtgtaaatgt

SEQ ID NO: 3124631 - DNA, 25 bp, Homo sapien
ccagctgcactcccgactgttggtg

SEQ ID NO: 3124632 - DNA, 25 bp, Homo sapien
gtgttgatgccaatgacctcgccat

SEQ ID NO: 3124633 - DNA, 25 bp, Homo sapien
actctgtgaggaaccgtgtgatgcg

SEQ ID NO: 3124634 - DNA, 25 bp, Homo sapien
ggaactctgtgaggaaccgtgtgat

SEQ ID NO: 3124635 - DNA, 25 bp, Homo sapien
atgccagccgtgaccttgagcgtgt

SEQ ID NO: 3124636 - DNA, 25 bp, Homo sapien
cacagaagaacaatggcggcatcct

SEQ ID NO: 3124637 - DNA, 25 bp, Homo sapien
tgggtgcacccctgaatctagctct

SEQ ID NO: 3124638 - DNA, 25 bp, Homo sapien
catgctaggacaggtctgggtgcac

SEQ ID NO: 3124639 - DNA, 25 bp, Homo sapien
gatggtccccactgttcaagagaag

SEQ ID NO: 3124640 - DNA, 25 bp, Homo sapien
atttcaaagaactttagattaactg

SEQ ID NO: 3124641 - DNA, 25 bp, Homo sapien
ttgatttaataaaaagatggttcat

SEQ ID NO: 3124642 - DNA, 25 bp, Homo sapien
aataaaaagatggttcatttcaaag

SEQ ID NO: 3124643 - DNA, 25 bp, Homo sapien
catttcaaagaactttagattaact

SEQ ID NO: 3124644 - DNA, 25 bp, Homo sapien
tttgatctgtggcatctgggggcgt

SEQ ID NO: 3124645 - DNA, 25 bp, Homo sapien
ctgtggcatctgggggcgtttttgt

SEQ ID NO: 3124646 - DNA, 25 bp, Homo sapien
gcatctgggggcgtttttgtggccc

SEQ ID NO: 3124647 - DNA, 25 bp, Homo sapien
catctgggggcgtttttgtggcccg

SEQ ID NO: 3124648 - DNA, 25 bp, Homo sapien
gatcgtccgcatccgtatgccgatg

SEQ ID NO: 3124649 - DNA, 25 bp, Homo sapien
tccgcatccgtatgccgatgaagcg

SEQ ID NO: 3124650 - DNA, 25 bp, Homo sapien
tccgtatgccgatgaagcgcttctt

SEQ ID NO: 3124651 - DNA, 25 bp, Homo sapien
ttggtgtgatcgtccgcatccgtat

SEQ ID NO: 3124652 - DNA, 25 bp, Homo sapien
caaggagccgaacacagccagccag

SEQ ID NO: 3124653 - DNA, 25 bp, Homo sapien
gcaaggagccgaacacagccagcca

SEQ ID NO: 3124654 - DNA, 25 bp, Homo sapien
ctgcaaggagccgaacacagccagc

SEQ ID NO: 3124655 - DNA, 25 bp, Homo sapien
tgcaaggagccgaacacagccagcc

SEQ ID NO: 3124656 - DNA, 25 bp, Homo sapien
tgagaaggtgaattcggcgcaacct

SEQ ID NO: 3124657 - DNA, 25 bp, Homo sapien
gcaacctcttgcacataaattccac

SEQ ID NO: 3124658 - DNA, 25 bp, Homo sapien
tgcacataaattccactgctgacct

SEQ ID NO: 3124659 - DNA, 25 bp, Homo sapien
tctgggaagtccgggttgctggcct

SEQ ID NO: 3124660 - DNA, 25 bp, Homo sapien
tgatgtcaccatcttggatgccgcc

SEQ ID NO: 3124661 - DNA, 25 bp, Homo sapien
gctgaagaggaggtcgtcgttcccc

SEQ ID NO: 3124662 - DNA, 25 bp, Homo sapien
gacgcccgttgaccttgacgatgat

SEQ ID NO: 3124663 - DNA, 25 bp, Homo sapien
tcgagtccactagaggacgcccgtt

SEQ ID NO: 3124664 - DNA, 25 bp, Homo sapien
gcaccgggatgtggatccaacactc

SEQ ID NO: 3124665 - DNA, 25 bp, Homo sapien
cttggaagtgactttcaggatcatc

SEQ ID NO: 3124666 - DNA, 25 bp, Homo sapien
ggtggtccttcgtcctgatctcggg

SEQ ID NO: 3124667 - DNA, 25 bp, Homo sapien
tgaatatccggagaacttggaagtg

SEQ ID NO: 3124668 - DNA, 25 bp, Homo sapien
cagccctggccctacagcttggtaa

SEQ ID NO: 3124669 - DNA, 25 bp, Homo sapien
ccctggccctacagcttggtaagtc

SEQ ID NO: 3124670 - DNA, 25 bp, Homo sapien
gccctggccctacagcttggtaagt

SEQ ID NO: 3124671 - DNA, 25 bp, Homo sapien
agcagccctggccctacagcttggt

SEQ ID NO: 3124672 - DNA, 25 bp, Homo sapien
gcaccccaaagggatcagatgtgac

SEQ ID NO: 3124673 - DNA, 25 bp, Homo sapien
gaggaaaacctcatggcagggcggg

SEQ ID NO: 3124674 - DNA, 25 bp, Homo sapien
ggcagcagccaactttccacgtgct

SEQ ID NO: 3124675 - DNA, 25 bp, Homo sapien
gccagggggcattcactcagtgcct

SEQ ID NO: 3124676 - DNA, 25 bp, Homo sapien
agctccacgtccactgtcctctgca

SEQ ID NO: 3124677 - DNA, 25 bp, Homo sapien
gcagctccacgtccactgtcctctg

SEQ ID NO: 3124678 - DNA, 25 bp, Homo sapien
cgcagctccacgtccactgtcctct

SEQ ID NO: 3124679 - DNA, 25 bp, Homo sapien
gctccacgtccactgtcctctgcag

SEQ ID NO: 3124680 - DNA, 25 bp, Homo sapien
aaggggaagccggctcagtcctcac

SEQ ID NO: 3124681 - DNA, 25 bp, Homo sapien
gaaggggaagccggctcagtcctca

SEQ ID NO: 3124682 - DNA, 25 bp, Homo sapien
gcggcacttccatgcgagcggctgc

SEQ ID NO: 3124683 - DNA, 25 bp, Homo sapien
cagcagcctgcatgcctctgggcgg

SEQ ID NO: 3124684 - DNA, 25 bp, Homo sapien
gcctctgggcggcacttccatgcga

SEQ ID NO: 3124685 - DNA, 25 bp, Homo sapien
acttccatgcgagcggctgctgcat

SEQ ID NO: 3124686 - DNA, 25 bp, Homo sapien
ttccatacagtagagaaacatacag

SEQ ID NO: 3124687 - DNA, 25 bp, Homo sapien
tttccatacagtagagaaacataca

SEQ ID NO: 3124688 - DNA, 25 bp, Homo sapien
ttgccaggcgctggcacagagccag

SEQ ID NO: 3124689 - DNA, 25 bp, Homo sapien
attgccaggcgctggcacagagcca

SEQ ID NO: 3124690 - DNA, 25 bp, Homo sapien
cgtagtcgcaggagttctggtcaca

SEQ ID NO: 3124691 - DNA, 25 bp, Homo sapien
gggcgtagtcgcaggagttctggtc

SEQ ID NO: 3124692 - DNA, 25 bp, Homo sapien
agcagggcgtagtcgcaggagttct

SEQ ID NO: 3124693 - DNA, 25 bp, Homo sapien
tagtcgcaggagttctggtcacagg

SEQ ID NO: 3124694 - DNA, 25 bp, Homo sapien
ggagggggccgtcacaggtgtcctg

SEQ ID NO: 3124695 - DNA, 25 bp, Homo sapien
agcagggatcggggggtgtcacagg

SEQ ID NO: 3124696 - DNA, 25 bp, Homo sapien
cctggttgcagggcggggcattgca

SEQ ID NO: 3124697 - DNA, 25 bp, Homo sapien
cccaggcgggcctggttgcagggcg

SEQ ID NO: 3124698 - DNA, 25 bp, Homo sapien
tcacctctcccagacctatttttag

SEQ ID NO: 3124699 - DNA, 25 bp, Homo sapien
caaacacattgtcaagatagtggcc

SEQ ID NO: 3124700 - DNA, 25 bp, Homo sapien
ggatggccgcctcggcagtcacctc

SEQ ID NO: 3124701 - DNA, 25 bp, Homo sapien
caacttggatcccttccatgaacag

SEQ ID NO: 3124702 - DNA, 25 bp, Homo sapien
cacattcagatagtgggcccatgga

SEQ ID NO: 3124703 - DNA, 25 bp, Homo sapien
ttgatggagacaggcacgtaaaccg

SEQ ID NO: 3124704 - DNA, 25 bp, Homo sapien
ccaggcaggttcgagctttcactaa

SEQ ID NO: 3124705 - DNA, 25 bp, Homo sapien
acaaggaggcataccctgtggacgg

SEQ ID NO: 3124706 - DNA, 25 bp, Homo sapien
gtcagaagatgccttcatggccaga

SEQ ID NO: 3124707 - DNA, 25 bp, Homo sapien
cagagtgtctgctgagcccggtgcc

SEQ ID NO: 3124708 - DNA, 25 bp, Homo sapien
tgcttgagtcagaagatgccttcat

SEQ ID NO: 3124709 - DNA, 25 bp, Homo sapien
tctgctgagcccggtgccactcggg

SEQ ID NO: 3124710 - DNA, 25 bp, Homo sapien
ggtgcatctgaacaagactgggcag

SEQ ID NO: 3124711 - DNA, 25 bp, Homo sapien
ttgggaggctgctacaggcttagta

SEQ ID NO: 3124712 - DNA, 25 bp, Homo sapien
tggcactgttctactcctcagggtg

SEQ ID NO: 3124713 - DNA, 25 bp, Homo sapien
ctcagaaagtcagagcccatatccc

SEQ ID NO: 3124714 - DNA, 25 bp, Homo sapien
ccttgcctttattggagtctagggc

SEQ ID NO: 3124715 - DNA, 25 bp, Homo sapien
agggtacacggcatgcccagaggcc

SEQ ID NO: 3124716 - DNA, 25 bp, Homo sapien
ttctctatacagatttcctgcagga

SEQ ID NO: 3124717 - DNA, 25 bp, Homo sapien
tcctgcaggaagttttaatcggtgg

SEQ ID NO: 3124718 - DNA, 25 bp, Homo sapien
gggggccctcctgagcccaccaggc

SEQ ID NO: 3124719 - DNA, 25 bp, Homo sapien
ctcctccagggggccctcctgagcc

SEQ ID NO: 3124720 - DNA, 25 bp, Homo sapien
tgagcccaccaggccagccgctcct

SEQ ID NO: 3124721 - DNA, 25 bp, Homo sapien
cctgagcccaccaggccagccgctc

SEQ ID NO: 3124722 - DNA, 25 bp, Homo sapien
gaaatgggtcatactctgtggacat

SEQ ID NO: 3124723 - DNA, 25 bp, Homo sapien
gccaggaacaggttagtgttcccca

SEQ ID NO: 3124724 - DNA, 25 bp, Homo sapien
acctgccgggatcatgttagcgtac

SEQ ID NO: 3124725 - DNA, 25 bp, Homo sapien
tgcatacttgcttcccctcacctgc

SEQ ID NO: 3124726 - DNA, 25 bp, Homo sapien
caggatcatgtaagcgtgcaccgtt

SEQ ID NO: 3124727 - DNA, 25 bp, Homo sapien
taagcgtgcaccgttctccacactt

SEQ ID NO: 3124728 - DNA, 25 bp, Homo sapien
cacctgccaggatcatgtaagcgtg

SEQ ID NO: 3124729 - DNA, 25 bp, Homo sapien
ggcttcatgttagcatgcaccgttc

SEQ ID NO: 3124730 - DNA, 25 bp, Homo sapien
ttgggccgtgtccaggccacgcact

SEQ ID NO: 3124731 - DNA, 25 bp, Homo sapien
cggcggagggcttgggccgtgtcca

SEQ ID NO: 3124732 - DNA, 25 bp, Homo sapien
caatgtgaaagtgttgtctgtgggc

SEQ ID NO: 3124733 - DNA, 25 bp, Homo sapien
acacggtccctgctcctaaagctgt

SEQ ID NO: 3124734 - DNA, 25 bp, Homo sapien
cccagagctatagcgcatgtgagat

SEQ ID NO: 3124735 - DNA, 25 bp, Homo sapien
accaaggcccagagctatagcgcat

SEQ ID NO: 3124736 - DNA, 25 bp, Homo sapien
gctatagcgcatgtgagatcagaag

SEQ ID NO: 3124737 - DNA, 25 bp, Homo sapien
caaggcccagagctatagcgcatgt

SEQ ID NO: 3124738 - DNA, 25 bp, Homo sapien
gtgactgctggccttacgtggacct

SEQ ID NO: 3124739 - DNA, 25 bp, Homo sapien
ccccggtgactgctggccttacgtg

SEQ ID NO: 3124740 - DNA, 25 bp, Homo sapien
actgctggccttacgtggacctttc

SEQ ID NO: 3124741 - DNA, 25 bp, Homo sapien
ccggtgactgctggccttacgtgga

SEQ ID NO: 3124742 - DNA, 25 bp, Homo sapien
agcttttccttcgagaacttggtag

SEQ ID NO: 3124743 - DNA, 25 bp, Homo sapien
gagaacttggtagcagaatttcacg

SEQ ID NO: 3124744 - DNA, 25 bp, Homo sapien
tccttcgagaacttggtagcagaat

SEQ ID NO: 3124745 - DNA, 25 bp, Homo sapien
ctgtagcttttccttcgagaacttg

SEQ ID NO: 3124746 - DNA, 25 bp, Homo sapien
ctggtccatacggagtactgtggga

SEQ ID NO: 3124747 - DNA, 25 bp, Homo sapien
gggtctcaggaccatgcctggtcca

SEQ ID NO: 3124748 - DNA, 25 bp, Homo sapien
ggtagtagcagtacagcctggtggg

SEQ ID NO: 3124749 - DNA, 25 bp, Homo sapien
tcagtggggtagtagcagtacagcc

SEQ ID NO: 3124750 - DNA, 25 bp, Homo sapien
catggggtcaaggacagagccccag

SEQ ID NO: 3124751 - DNA, 25 bp, Homo sapien
tccctcacgccgcagggaagcttgt

SEQ ID NO: 3124752 - DNA, 25 bp, Homo sapien
caagggcatttggtcacagatccca

SEQ ID NO: 3124753 - DNA, 25 bp, Homo sapien
tatgggagagagaccgccattatcc

SEQ ID NO: 3124754 - DNA, 25 bp, Homo sapien
aagggtggaggatttgccaagccaa

SEQ ID NO: 3124755 - DNA, 25 bp, Homo sapien
gtcactttctaagcttcccaaatgt

SEQ ID NO: 3124756 - DNA, 25 bp, Homo sapien
gcccggccgcaagtcactttctaag

SEQ ID NO: 3124757 - DNA, 25 bp, Homo sapien
cttcccctgagactgaaagcaaaag

SEQ ID NO: 3124758 - DNA, 25 bp, Homo sapien
ctaatcattgtggtaacttcaaccc

SEQ ID NO: 3124759 - DNA, 25 bp, Homo sapien
aggctcattcagggtagtttggcca

SEQ ID NO: 3124760 - DNA, 25 bp, Homo sapien
gctcattcagggtagtttggccatg

SEQ ID NO: 3124761 - DNA, 25 bp, Homo sapien
attcagggtagtttggccatggaca

SEQ ID NO: 3124762 - DNA, 25 bp, Homo sapien
ctgtgctgggatgcaggcggggtag

SEQ ID NO: 3124763 - DNA, 25 bp, Homo sapien
tctttgagggattggattttggagc

SEQ ID NO: 3124764 - DNA, 25 bp, Homo sapien
cattagcagcatgacttttggaatg

SEQ ID NO: 3124765 - DNA, 25 bp, Homo sapien
aggccaggccgcaagggccttgagg

SEQ ID NO: 3124766 - DNA, 25 bp, Homo sapien
cagactgtgtcccatgaagcctgtg

SEQ ID NO: 3124767 - DNA, 25 bp, Homo sapien
tcaactatataagggcacatggaga

SEQ ID NO: 3124768 - DNA, 25 bp, Homo sapien
ccttggagaagtatcgcgagctgaa

SEQ ID NO: 3124769 - DNA, 25 bp, Homo sapien
tgaacttccttcgatgcaagcggat

SEQ ID NO: 3124770 - DNA, 25 bp, Homo sapien
tattctgttgtcgtagacacagttc

SEQ ID NO: 3124771 - DNA, 25 bp, Homo sapien
cgctttcttcctgatctattctgtt

SEQ ID NO: 3124772 - DNA, 25 bp, Homo sapien
tgatctattctgttgtcgtagacac

SEQ ID NO: 3124773 - DNA, 25 bp, Homo sapien
tctgttgtcgtagacacagttccag

SEQ ID NO: 3124774 - DNA, 25 bp, Homo sapien
ccgaaatgatctttcagtcccttcc

SEQ ID NO: 3124775 - DNA, 25 bp, Homo sapien
tgcaatcggacgctcccactgatac

SEQ ID NO: 3124776 - DNA, 25 bp, Homo sapien
ttctgcttttgcaatcggacgctcc

SEQ ID NO: 3124777 - DNA, 25 bp, Homo sapien
ggcccgaaatgatctttcagtccct

SEQ ID NO: 3124778 - DNA, 25 bp, Homo sapien
tgtgctgatcagaatgatggctcca

SEQ ID NO: 3124779 - DNA, 25 bp, Homo sapien
gaagctgggtggaactcgagaagca

SEQ ID NO: 3124780 - DNA, 25 bp, Homo sapien
gctctgagcgccctgagtggcagcc

SEQ ID NO: 3124781 - DNA, 25 bp, Homo sapien
tggaactcgagaagcagcagtggag

SEQ ID NO: 3124782 - DNA, 25 bp, Homo sapien
aaagcaatgagctcagcttaacgac

SEQ ID NO: 3124783 - DNA, 25 bp, Homo sapien
cctctacacagttaatgctcgacag

SEQ ID NO: 3124784 - DNA, 25 bp, Homo sapien
agctcagcttaacgacagtgtccag

SEQ ID NO: 3124785 - DNA, 25 bp, Homo sapien
atgagctcagcttaacgacagtgtc

SEQ ID NO: 3124786 - DNA, 25 bp, Homo sapien
cgtagactattcagctgccagtgcg

SEQ ID NO: 3124787 - DNA, 25 bp, Homo sapien
agcaacagcttggtctcgtctccga

SEQ ID NO: 3124788 - DNA, 25 bp, Homo sapien
tcgtctccgaatcagccgggtagga

SEQ ID NO: 3124789 - DNA, 25 bp, Homo sapien
ccagtgcgtgactagagccgggctt

SEQ ID NO: 3124790 - DNA, 25 bp, Homo sapien
caatggggacaccttatataggtgt

SEQ ID NO: 3124791 - DNA, 25 bp, Homo sapien
caggaaaactattagtcttaagatt

SEQ ID NO: 3124792 - DNA, 25 bp, Homo sapien
acaggaaaactattagtcttaagat

SEQ ID NO: 3124793 - DNA, 25 bp, Homo sapien
tacaggaaaactattagtcttaaga

SEQ ID NO: 3124794 - DNA, 25 bp, Homo sapien
agaagcgcgcctgggtagctgatcc

SEQ ID NO: 3124795 - DNA, 25 bp, Homo sapien
ccctgtgggagaagcgcgcctgggt

SEQ ID NO: 3124796 - DNA, 25 bp, Homo sapien
acacttcgaccgcagcccagaagcc

SEQ ID NO: 3124797 - DNA, 25 bp, Homo sapien
tgggtagctgatcccggtacggccc

SEQ ID NO: 3124798 - DNA, 25 bp, Homo sapien
cgggcgccgcaaagccgtttgtttg

SEQ ID NO: 3124799 - DNA, 25 bp, Homo sapien
gtcctgatagcgacctgggacccgg

SEQ ID NO: 3124800 - DNA, 25 bp, Homo sapien
tcaagttcgcaacatgccgtgccct

SEQ ID NO: 3124801 - DNA, 25 bp, Homo sapien
aaagcgaatccagatctgcggcggg

SEQ ID NO: 3124802 - DNA, 25 bp, Homo sapien
caatgtgggctagttttcgggatga

SEQ ID NO: 3124803 - DNA, 25 bp, Homo sapien
tgcgatcccgccccggagctggtga

SEQ ID NO: 3124804 - DNA, 25 bp, Homo sapien
ttcgggatgacggttctgagaacca

SEQ ID NO: 3124805 - DNA, 25 bp, Homo sapien
tgagaaccacgtcgagctcacgctg

SEQ ID NO: 3124806 - DNA, 25 bp, Homo sapien
tgctcatcttaacctttaggttccc

SEQ ID NO: 3124807 - DNA, 25 bp, Homo sapien
ctttgctatgactgagctgaatttg

SEQ ID NO: 3124808 - DNA, 25 bp, Homo sapien
tctttgctatgactgagctgaattt

SEQ ID NO: 3124809 - DNA, 25 bp, Homo sapien
caaatgttgccgaaaatgaatccag

SEQ ID NO: 3124810 - DNA, 25 bp, Homo sapien
caacaaatgttgccgaaaatgaatc

SEQ ID NO: 3124811 - DNA, 25 bp, Homo sapien
aacaaatgttgccgaaaatgaatcc

SEQ ID NO: 3124812 - DNA, 25 bp, Homo sapien
acaaatgttgccgaaaatgaatcca

SEQ ID NO: 3124813 - DNA, 25 bp, Homo sapien
cactctgccgtttctattgagggga

SEQ ID NO: 3124814 - DNA, 25 bp, Homo sapien
gccacactctgccgtttctattgag

SEQ ID NO: 3124815 - DNA, 25 bp, Homo sapien
cggccacactctgccgtttctattg

SEQ ID NO: 3124816 - DNA, 25 bp, Homo sapien
cacactctgccgtttctattgaggg

SEQ ID NO: 3124817 - DNA, 25 bp, Homo sapien
aagtgtgctgagggcgcggcagcag

SEQ ID NO: 3124818 - DNA, 25 bp, Homo sapien
agtgtgctgagggcgcggcagcagc

SEQ ID NO: 3124819 - DNA, 25 bp, Homo sapien
acagaaaattaaaacagatatgaac

SEQ ID NO: 3124820 - DNA, 25 bp, Homo sapien
tggacagaaaattaaaacagatatg

SEQ ID NO: 3124821 - DNA, 25 bp, Homo sapien
ggacagaaaattaaaacagatatga

SEQ ID NO: 3124822 - DNA, 25 bp, Homo sapien
ctggacagaaaattaaaacagatat

SEQ ID NO: 3124823 - DNA, 25 bp, Homo sapien
ctggtaagccttgctatacttcata

SEQ ID NO: 3124824 - DNA, 25 bp, Homo sapien
tacacgattccatctgaatgccatc

SEQ ID NO: 3124825 - DNA, 25 bp, Homo sapien
gggtttgggatacacgattccatct

SEQ ID NO: 3124826 - DNA, 25 bp, Homo sapien
gctatacttcataatggagatgagg

SEQ ID NO: 3124827 - DNA, 25 bp, Homo sapien
cacgaacttctcaggatcagtgact

SEQ ID NO: 3124828 - DNA, 25 bp, Homo sapien
ggtatgctgcgatagccacatcttc

SEQ ID NO: 3124829 - DNA, 25 bp, Homo sapien
cagcaggtatgctgcgatagccaca

SEQ ID NO: 3124830 - DNA, 25 bp, Homo sapien
gccacatcttcatacacgaacttct

SEQ ID NO: 3124831 - DNA, 25 bp, Homo sapien
aggactgcctggcagttagtctcct

SEQ ID NO: 3124832 - DNA, 25 bp, Homo sapien
ggactgcctggcagttagtctcctc

SEQ ID NO: 3124833 - DNA, 25 bp, Homo sapien
aaggactgcctggcagttagtctcc

SEQ ID NO: 3124834 - DNA, 25 bp, Homo sapien
tactgtacagtacagcatagcagga

SEQ ID NO: 3124835 - DNA, 25 bp, Homo sapien
tgcgcagcctatcagtacagtactg

SEQ ID NO: 3124836 - DNA, 25 bp, Homo sapien
gaaccatcaatattgggctgcaggt

SEQ ID NO: 3124837 - DNA, 25 bp, Homo sapien
gaagataatcagtttggaaccatca

SEQ ID NO: 3124838 - DNA, 25 bp, Homo sapien
tcattggctctcatagggcaaactt

SEQ ID NO: 3124839 - DNA, 25 bp, Homo sapien
agtactgtactgatggcctgcacat

SEQ ID NO: 3124840 - DNA, 25 bp, Homo sapien
tagccacttcctgctagcagcaaca

SEQ ID NO: 3124841 - DNA, 25 bp, Homo sapien
catatttgcctacgcctctaagagc

SEQ ID NO: 3124842 - DNA, 25 bp, Homo sapien
gcagcaacagctggaacctgcagcc

SEQ ID NO: 3124843 - DNA, 25 bp, Homo sapien
tcttcttcggacatcaatccctctg

SEQ ID NO: 3124844 - DNA, 25 bp, Homo sapien
ttcggacatcaatccctctgcctgg

SEQ ID NO: 3124845 - DNA, 25 bp, Homo sapien
ttttcttcttcggacatcaatccct

SEQ ID NO: 3124846 - DNA, 25 bp, Homo sapien
agatttttcttcttcggacatcaat

SEQ ID NO: 3124847 - DNA, 25 bp, Homo sapien
ctctaactgagtttgtggtccatac

SEQ ID NO: 3124848 - DNA, 25 bp, Homo sapien
tctaactgagtttgtggtccataca

SEQ ID NO: 3124849 - DNA, 25 bp, Homo sapien
ctaactgagtttgtggtccatacat

SEQ ID NO: 3124850 - DNA, 25 bp, Homo sapien
ccacagaggtgatcggtgtcacaca

SEQ ID NO: 3124851 - DNA, 25 bp, Homo sapien
aattgggcacttgaaacacttgggc

SEQ ID NO: 3124852 - DNA, 25 bp, Homo sapien
gagatcacgtttcactaggctatgc

SEQ ID NO: 3124853 - DNA, 25 bp, Homo sapien
tatgggtcctgcagtgctactcgag

SEQ ID NO: 3124854 - DNA, 25 bp, Homo sapien
gctggaaggaaatcattcactagaa

SEQ ID NO: 3124855 - DNA, 25 bp, Homo sapien
atgtgcacgtcaacggaaccaccct

SEQ ID NO: 3124856 - DNA, 25 bp, Homo sapien
gtcaacggaaccaccctcattctgg

SEQ ID NO: 3124857 - DNA, 25 bp, Homo sapien
tccacaaacaccatgtgcacgtcaa

SEQ ID NO: 3124858 - DNA, 25 bp, Homo sapien
actgaaaatagtattgttcaagggt

SEQ ID NO: 3124859 - DNA, 25 bp, Homo sapien
gaaaatagtattgttcaagggtata

SEQ ID NO: 3124860 - DNA, 25 bp, Homo sapien
aatagtattgttcaagggtatacgt

SEQ ID NO: 3124861 - DNA, 25 bp, Homo sapien
tattgttcaagggtatacgtatgat

SEQ ID NO: 3124862 - DNA, 25 bp, Homo sapien
tatcattgggtgtgattgcatcttc

SEQ ID NO: 3124863 - DNA, 25 bp, Homo sapien
caacatcagggaaaagggtcttatc

SEQ ID NO: 3124864 - DNA, 25 bp, Homo sapien
tcatcagaatggttaccgattaacc

SEQ ID NO: 3124865 - DNA, 25 bp, Homo sapien
ggtcttatcattgggtgtgattgca

SEQ ID NO: 3124866 - DNA, 25 bp, Homo sapien
ttccaatgaagtcaaagaagcagca

SEQ ID NO: 3124867 - DNA, 25 bp, Homo sapien
aaagaagcggcaattgtaggaagac

SEQ ID NO: 3124868 - DNA, 25 bp, Homo sapien
gcctccgggagtatcttccaatgaa

SEQ ID NO: 3124869 - DNA, 25 bp, Homo sapien
tgaagtcaaggtattcccggtactg

SEQ ID NO: 3124870 - DNA, 25 bp, Homo sapien
gaggcagtcttcgtccacgtgaaac

SEQ ID NO: 3124871 - DNA, 25 bp, Homo sapien
gcagtcttcgtccacgtgaaaccca

SEQ ID NO: 3124872 - DNA, 25 bp, Homo sapien
aatcctgaggcagtcttcgtccacg

SEQ ID NO: 3124873 - DNA, 25 bp, Homo sapien
ctgaggcagtcttcgtccacgtgaa

SEQ ID NO: 3124874 - DNA, 25 bp, Homo sapien
agacagtcccctccggacaaccagg

SEQ ID NO: 3124875 - DNA, 25 bp, Homo sapien
cagacagtcccctccggacaaccag

SEQ ID NO: 3124876 - DNA, 25 bp, Homo sapien
tccctttgccgcacaccccgatgga

SEQ ID NO: 3124877 - DNA, 25 bp, Homo sapien
ttgcctccctttgccgcacaccccg

SEQ ID NO: 3124878 - DNA, 25 bp, Homo sapien
cagagccagcgagtgcatacggggg

SEQ ID NO: 3124879 - DNA, 25 bp, Homo sapien
cttgccagagccagcgagtgcatac

SEQ ID NO: 3124880 - DNA, 25 bp, Homo sapien
ttgccagagccagcgagtgcatacg

SEQ ID NO: 3124881 - DNA, 25 bp, Homo sapien
agccagcgagtgcatacgggggctg

SEQ ID NO: 3124882 - DNA, 25 bp, Homo sapien
gccccgcctgctcttaatgtactga

SEQ ID NO: 3124883 - DNA, 25 bp, Homo sapien
caggtgggcttacagggcagccccg

SEQ ID NO: 3124884 - DNA, 25 bp, Homo sapien
ttttcatccacggaagcttctctgg

SEQ ID NO: 3124885 - DNA, 25 bp, Homo sapien
cagagcttgctgaccgtcacagtga

SEQ ID NO: 3124886 - DNA, 25 bp, Homo sapien
gaaatccaggtagccagggtccttc

SEQ ID NO: 3124887 - DNA, 25 bp, Homo sapien
gatgaaatccaggtagccagggtcc

SEQ ID NO: 3124888 - DNA, 25 bp, Homo sapien
atccaggtagccagggtccttcagc

SEQ ID NO: 3124889 - DNA, 25 bp, Homo sapien
ggatgaaatccaggtagccagggtc

SEQ ID NO: 3124890 - DNA, 25 bp, Homo sapien
actcccatttcgagaacttcttgtg

SEQ ID NO: 3124891 - DNA, 25 bp, Homo sapien
cagtaaattcgctacttgcaaaacc

SEQ ID NO: 3124892 - DNA, 25 bp, Homo sapien
gtcaataaaatctcgtggcagggcg

SEQ ID NO: 3124893 - DNA, 25 bp, Homo sapien
tgtgtttaattgctttccacctaac

SEQ ID NO: 3124894 - DNA, 25 bp, Homo sapien
ctccctaagatggtggacagcttac

SEQ ID NO: 3124895 - DNA, 25 bp, Homo sapien
ctagcccctccctaagatggtggac

SEQ ID NO: 3124896 - DNA, 25 bp, Homo sapien
gcccctccctaagatggtggacagc

SEQ ID NO: 3124897 - DNA, 25 bp, Homo sapien
ccctccctaagatggtggacagctt

SEQ ID NO: 3124898 - DNA, 25 bp, Homo sapien
tgcttgaagagagcctatgcaccca

SEQ ID NO: 3124899 - DNA, 25 bp, Homo sapien
tcaaagtgtgtagtcacagggccac

SEQ ID NO: 3124900 - DNA, 25 bp, Homo sapien
ggttctgaagacgtgaattcctgcc

SEQ ID NO: 3124901 - DNA, 25 bp, Homo sapien
acagggccacaccatttcatgtcgg

SEQ ID NO: 3124902 - DNA, 25 bp, Homo sapien
accgaaagccgtccatcccaggcac

SEQ ID NO: 3124903 - DNA, 25 bp, Homo sapien
gcacagctgacatctgtgtgcccgt

SEQ ID NO: 3124904 - DNA, 25 bp, Homo sapien
gctgacatctgtgtgcccgtcatct

SEQ ID NO: 3124905 - DNA, 25 bp, Homo sapien
ccaggcacagctgacatctgtgtgc

SEQ ID NO: 3124906 - DNA, 25 bp, Homo sapien
ccatccccgctctccatctccaggt

SEQ ID NO: 3124907 - DNA, 25 bp, Homo sapien
catctccaggtctgttcctccttcc

SEQ ID NO: 3124908 - DNA, 25 bp, Homo sapien
tccaggtctgttcctccttcctcct

SEQ ID NO: 3124909 - DNA, 25 bp, Homo sapien
ctccatctccaggtctgttcctcct

SEQ ID NO: 3124910 - DNA, 25 bp, Homo sapien
gaaacgcagaggtgcctgcctgagg

SEQ ID NO: 3124911 - DNA, 25 bp, Homo sapien
aaacgcagaggtgcctgcctgagga

SEQ ID NO: 3124912 - DNA, 25 bp, Homo sapien
aacgcagaggtgcctgcctgaggac

SEQ ID NO: 3124913 - DNA, 25 bp, Homo sapien
agaaacgcagaggtgcctgcctgag

SEQ ID NO: 3124914 - DNA, 25 bp, Homo sapien
aaacatcaaattggatatgaatgaa

SEQ ID NO: 3124915 - DNA, 25 bp, Homo sapien
tgtcagacccctacggatcaggaca

SEQ ID NO: 3124916 - DNA, 25 bp, Homo sapien
agacggcgcctgtctgtatgcagct

SEQ ID NO: 3124917 - DNA, 25 bp, Homo sapien
cagctgctgcgagaatcctgcccac

SEQ ID NO: 3124918 - DNA, 25 bp, Homo sapien
tccagcacgaaggacgattccatct

SEQ ID NO: 3124919 - DNA, 25 bp, Homo sapien
catacactcacacgcgttatgcact

SEQ ID NO: 3124920 - DNA, 25 bp, Homo sapien
tccatttcagttccatacactcaca

SEQ ID NO: 3124921 - DNA, 25 bp, Homo sapien
tattacgaacctgtcacacaggcag

SEQ ID NO: 3124922 - DNA, 25 bp, Homo sapien
gtctccgtgtccagctcgttggcta

SEQ ID NO: 3124923 - DNA, 25 bp, Homo sapien
cttggaacacctggtggctgttccg

SEQ ID NO: 3124924 - DNA, 25 bp, Homo sapien
tgttccggagcagcgtctgcaggcc

SEQ ID NO: 3124925 - DNA, 25 bp, Homo sapien
cagctcgttggctacttctgccaga

SEQ ID NO: 3124926 - DNA, 25 bp, Homo sapien
gaacgggttgaggattacagtcctc

SEQ ID NO: 3124927 - DNA, 25 bp, Homo sapien
cggcgcactgacctctctgagactt

SEQ ID NO: 3124928 - DNA, 25 bp, Homo sapien
gacttgtctacatgttcaaggagga

SEQ ID NO: 3124929 - DNA, 25 bp, Homo sapien
tacagtcctcggatgatgccatagg

SEQ ID NO: 3124930 - DNA, 25 bp, Homo sapien
gaacacagcctagagttcctgctgg

SEQ ID NO: 3124931 - DNA, 25 bp, Homo sapien
cagggtcagggatacaaccggaaca

SEQ ID NO: 3124932 - DNA, 25 bp, Homo sapien
tggtcacagtgagtctgcctccagt

SEQ ID NO: 3124933 - DNA, 25 bp, Homo sapien
accaggactggccacattcgaggga

SEQ ID NO: 3124934 - DNA, 25 bp, Homo sapien
agggtgatgcatgaagaaccagcag

SEQ ID NO: 3124935 - DNA, 25 bp, Homo sapien
gcccatgggcaaacgggcagcagtc

SEQ ID NO: 3124936 - DNA, 25 bp, Homo sapien
agagcagtctctgtttcgcttccgg

SEQ ID NO: 3124937 - DNA, 25 bp, Homo sapien
cagtcgcggatgtgaactctcccat

SEQ ID NO: 3124938 - DNA, 25 bp, Homo sapien
tatgatatgaagatgctgcgcacgt

SEQ ID NO: 3124939 - DNA, 25 bp, Homo sapien
tgtggtgagaaacgctggcagatac

SEQ ID NO: 3124940 - DNA, 25 bp, Homo sapien
tacggtcttacttctcgaggagccc

SEQ ID NO: 3124941 - DNA, 25 bp, Homo sapien
gaaatacggttcatcactgtgagga

SEQ ID NO: 3124942 - DNA, 25 bp, Homo sapien
gcttagctcaggaggtgtgcccctt

SEQ ID NO: 3124943 - DNA, 25 bp, Homo sapien
gatatacccaatggagaggcaccag

SEQ ID NO: 3124944 - DNA, 25 bp, Homo sapien
gaaagtcaacggcagaacagtgtgg

SEQ ID NO: 3124945 - DNA, 25 bp, Homo sapien
tgtgctgagcaacaaaacctgaaag

SEQ ID NO: 3124946 - DNA, 25 bp, Homo sapien
tggaaactgccgtaacaagtgttgg

SEQ ID NO: 3124947 - DNA, 25 bp, Homo sapien
agcaccaagcgcagaaccaggctct

SEQ ID NO: 3124948 - DNA, 25 bp, Homo sapien
gagactgtgtccttgcggcttgtga

SEQ ID NO: 3124949 - DNA, 25 bp, Homo sapien
tggtgggccccacttagcatagctc

SEQ ID NO: 3124950 - DNA, 25 bp, Homo sapien
tagtccttgaggtgatggtcccaca

SEQ ID NO: 3124951 - DNA, 25 bp, Homo sapien
tcaggtgatgtagtccccaagggct

SEQ ID NO: 3124952 - DNA, 25 bp, Homo sapien
cctgcgtggcactagtctgaaaagc

SEQ ID NO: 3124953 - DNA, 25 bp, Homo sapien
caggcgccagggagaggcaatttcc

SEQ ID NO: 3124954 - DNA, 25 bp, Homo sapien
tttgcagaggcggtttcagcaccac

SEQ ID NO: 3124955 - DNA, 25 bp, Homo sapien
ggaaacctcgctattctggaaacag

SEQ ID NO: 3124956 - DNA, 25 bp, Homo sapien
gagtttaacagacacaagggtggcc

SEQ ID NO: 3124957 - DNA, 25 bp, Homo sapien
caaagtaggttgagcctacgcccgg

SEQ ID NO: 3124958 - DNA, 25 bp, Homo sapien
caatttaaggaggttcagaatcccg

SEQ ID NO: 3124959 - DNA, 25 bp, Homo sapien
tgtaaaagatgttaagcactcatct

SEQ ID NO: 3124960 - DNA, 25 bp, Homo sapien
taatctcatggcaaatttgttagtc

SEQ ID NO: 3124961 - DNA, 25 bp, Homo sapien
taggttatcacaggagcaatttaag

SEQ ID NO: 3124962 - DNA, 25 bp, Homo sapien
taacttggtgagtagagggccagta

SEQ ID NO: 3124963 - DNA, 25 bp, Homo sapien
cttgagctgagtccattcctgggtg

SEQ ID NO: 3124964 - DNA, 25 bp, Homo sapien
ctgattggtcgggtccaagataaaa

SEQ ID NO: 3124965 - DNA, 25 bp, Homo sapien
caagataaaatcttagggagctgaa

SEQ ID NO: 3124966 - DNA, 25 bp, Homo sapien
attgcttcactctatgcaaatgaca

SEQ ID NO: 3124967 - DNA, 25 bp, Homo sapien
cactctatgcaaatgaaggtttctc

SEQ ID NO: 3124968 - DNA, 25 bp, Homo sapien
gacagcttcccattggttcactcta

SEQ ID NO: 3124969 - DNA, 25 bp, Homo sapien
tatgcaaatgaaggtttcccactgc

SEQ ID NO: 3124970 - DNA, 25 bp, Homo sapien
catcacaaaggcctcttatgggctc

SEQ ID NO: 3124971 - DNA, 25 bp, Homo sapien
catctgcaggatagattaatacgcg

SEQ ID NO: 3124972 - DNA, 25 bp, Homo sapien
ccctagaggcgaaaatttactggct

SEQ ID NO: 3124973 - DNA, 25 bp, Homo sapien
cacagtgaccgcctgcatctgcagg

SEQ ID NO: 3124974 - DNA, 25 bp, Homo sapien
acaccagctcagtggactcacatct

SEQ ID NO: 3124975 - DNA, 25 bp, Homo sapien
caggcgcctgccaccacacccagct

SEQ ID NO: 3124976 - DNA, 25 bp, Homo sapien
ctacaggcgcctgccaccacaccca

SEQ ID NO: 3124977 - DNA, 25 bp, Homo sapien
caaagacagagcagggtttttttgt

SEQ ID NO: 3124978 - DNA, 25 bp, Homo sapien
taattcactgccaggcgattctggg

SEQ ID NO: 3124979 - DNA, 25 bp, Homo sapien
gattctgggcttctaaactatcagc

SEQ ID NO: 3124980 - DNA, 25 bp, Homo sapien
aggcaaggatgcacgctgagctccg

SEQ ID NO: 3124981 - DNA, 25 bp, Homo sapien
tgggtacagtgttactcagcagaat

SEQ ID NO: 3124982 - DNA, 25 bp, Homo sapien
ggaagcacctccaatcgcatgaaca

SEQ ID NO: 3124983 - DNA, 25 bp, Homo sapien
gaagagacatttgctcggacagcga

SEQ ID NO: 3124984 - DNA, 25 bp, Homo sapien
gaggctcagagggatcagtgccact

SEQ ID NO: 3124985 - DNA, 25 bp, Homo sapien
tcttacacatgaggccggagaggct

SEQ ID NO: 3124986 - DNA, 25 bp, Homo sapien
agctcaccggctgaccttggaggga

SEQ ID NO: 3124987 - DNA, 25 bp, Homo sapien
tgactatgttaggttgcgtggccaa

SEQ ID NO: 3124988 - DNA, 25 bp, Homo sapien
aagggtcagagacaccatgcaggca

SEQ ID NO: 3124989 - DNA, 25 bp, Homo sapien
gatatcccagtgcaaatctccagga

SEQ ID NO: 3124990 - DNA, 25 bp, Homo sapien
gagcaattgcacgagatggtccaga

SEQ ID NO: 3124991 - DNA, 25 bp, Homo sapien
taaattcaggcgtacaaaaaggaca

SEQ ID NO: 3124992 - DNA, 25 bp, Homo sapien
gctgcccaaagaaacaagacctcga

SEQ ID NO: 3124993 - DNA, 25 bp, Homo sapien
ttttgcaagcatagacactcggtga

SEQ ID NO: 3124994 - DNA, 25 bp, Homo sapien
ggcatgggacaagtatcaacctata

SEQ ID NO: 3124995 - DNA, 25 bp, Homo sapien
atggatgcttacagggtgaggacag

SEQ ID NO: 3124996 - DNA, 25 bp, Homo sapien
gaccctgctgtgcaattcaacatgc

SEQ ID NO: 3124997 - DNA, 25 bp, Homo sapien
gatgcagacaggaactcaggaccct

SEQ ID NO: 3124998 - DNA, 25 bp, Homo sapien
aggtgtgcagcgtgctcccgacttg

SEQ ID NO: 3124999 - DNA, 25 bp, Homo sapien
caaacgtatgccaagatgccaaaga

SEQ ID NO: 3125000 - DNA, 25 bp, Homo sapien
tcggcacagcccgactctggaacaa

SEQ ID NO: 3125001 - DNA, 25 bp, Homo sapien
catgaggtgtgcagcgtgctcccga

SEQ ID NO: 3125002 - DNA, 25 bp, Homo sapien
gctctctgccggtcaatgaggggca

SEQ ID NO: 3125003 - DNA, 25 bp, Homo sapien
tcacggagagcttcaaggcctgatc

SEQ ID NO: 3125004 - DNA, 25 bp, Homo sapien
tccaggatctcgtccctgaggcctg

SEQ ID NO: 3125005 - DNA, 25 bp, Homo sapien
caatgaggggcacaatgtacacctt

SEQ ID NO: 3125006 - DNA, 25 bp, Homo sapien
gtgatcctgtggtcggtcggcaccc

SEQ ID NO: 3125007 - DNA, 25 bp, Homo sapien
gagatctccctaaactacatcagtt

SEQ ID NO: 3125008 - DNA, 25 bp, Homo sapien
cctgctgcgggaagctacagcctgg

SEQ ID NO: 3125009 - DNA, 25 bp, Homo sapien
ggagagacagattgcgggtctctaa

SEQ ID NO: 3125010 - DNA, 25 bp, Homo sapien
tgatgccacaaagccaaacccaggc

SEQ ID NO: 3125011 - DNA, 25 bp, Homo sapien
ccagatccgtttccagagttaaggc

SEQ ID NO: 3125012 - DNA, 25 bp, Homo sapien
ccagagttaaggctttgccgttgat

SEQ ID NO: 3125013 - DNA, 25 bp, Homo sapien
aggctttgccgttgattgtcctcca

SEQ ID NO: 3125014 - DNA, 25 bp, Homo sapien
gggttcagacgcttccagcaaacag

SEQ ID NO: 3125015 - DNA, 25 bp, Homo sapien
ggctgtgtgaaacgccaagcccaga

SEQ ID NO: 3125016 - DNA, 25 bp, Homo sapien
gctgttgcaagaacgcctgagatta

SEQ ID NO: 3125017 - DNA, 25 bp, Homo sapien
tgtttacctccacgggctgttgcaa

SEQ ID NO: 3125018 - DNA, 25 bp, Homo sapien
cctagccacgagagacatcagacaa

SEQ ID NO: 3125019 - DNA, 25 bp, Homo sapien
tttttggagaatggcacagaccacc

SEQ ID NO: 3125020 - DNA, 25 bp, Homo sapien
gaacattagtctgaaagccccactg

SEQ ID NO: 3125021 - DNA, 25 bp, Homo sapien
aaagcggtgcctttaagccctgtga

SEQ ID NO: 3125022 - DNA, 25 bp, Homo sapien
cttttggaaaggtctaatcttagat

SEQ ID NO: 3125023 - DNA, 25 bp, Homo sapien
tattagattgtagccttgtccagga

SEQ ID NO: 3125024 - DNA, 25 bp, Homo sapien
cctatacggcagataattcttgctg

SEQ ID NO: 3125025 - DNA, 25 bp, Homo sapien
cacaaataaatccttggctgggctc

SEQ ID NO: 3125026 - DNA, 25 bp, Homo sapien
tagttatttacataggttcaaccag

SEQ ID NO: 3125027 - DNA, 25 bp, Homo sapien
tatcttatagcaggacacaattgga

SEQ ID NO: 3125028 - DNA, 25 bp, Homo sapien
aaatttgaaaactatctgtcggtat

SEQ ID NO: 3125029 - DNA, 25 bp, Homo sapien
tgtcggtattcttaatctatggcaa

SEQ ID NO: 3125030 - DNA, 25 bp, Homo sapien
cccagcaacgcggtgaggtgtggat

SEQ ID NO: 3125031 - DNA, 25 bp, Homo sapien
aacgcggtgaggtgtggattccacc

SEQ ID NO: 3125032 - DNA, 25 bp, Homo sapien
gcaacgcggtgaggtgtggattcca

SEQ ID NO: 3125033 - DNA, 25 bp, Homo sapien
cttcccagcaacgcggtgaggtgtg

SEQ ID NO: 3125034 - DNA, 25 bp, Homo sapien
gtcttcccatgcgtcacctcctcca

SEQ ID NO: 3125035 - DNA, 25 bp, Homo sapien
aggtcttcccatgcgtcacctcctc

SEQ ID NO: 3125036 - DNA, 25 bp, Homo sapien
gaggtcttcccatgcgtcacctcct

SEQ ID NO: 3125037 - DNA, 25 bp, Homo sapien
tcttcccatgcgtcacctcctccat

SEQ ID NO: 3125038 - DNA, 25 bp, Homo sapien
tgcccctcttatgcgccagggctga

SEQ ID NO: 3125039 - DNA, 25 bp, Homo sapien
ccacttattccacaagcgcttgccc

SEQ ID NO: 3125040 - DNA, 25 bp, Homo sapien
gagacccatgggcatcctttcaccc

SEQ ID NO: 3125041 - DNA, 25 bp, Homo sapien
tccacaagcgcttgcccctcttatg

SEQ ID NO: 3125042 - DNA, 25 bp, Homo sapien
ggaatgccgagattcatacctcagt

SEQ ID NO: 3125043 - DNA, 25 bp, Homo sapien
caaggcttctgagcgaccatgtgca

SEQ ID NO: 3125044 - DNA, 25 bp, Homo sapien
tcacagggagactttggtctagcca

SEQ ID NO: 3125045 - DNA, 25 bp, Homo sapien
tagagcagccacgtcaaagttttcc

SEQ ID NO: 3125046 - DNA, 25 bp, Homo sapien
tcttctctcctcgtggcgtggcagg

SEQ ID NO: 3125047 - DNA, 25 bp, Homo sapien
ggactctgcgcgcttctgttccggg

SEQ ID NO: 3125048 - DNA, 25 bp, Homo sapien
gagggaggtctctttcctaacactg

SEQ ID NO: 3125049 - DNA, 25 bp, Homo sapien
gttctcatggctctgcttcgggcgc

SEQ ID NO: 3125050 - DNA, 25 bp, Homo sapien
agcgccttcatggtgacggtgtcca

SEQ ID NO: 3125051 - DNA, 25 bp, Homo sapien
ctgtaggcgcaacaaagcagcacca

SEQ ID NO: 3125052 - DNA, 25 bp, Homo sapien
caccagtgcgttggatagcagcgcc

SEQ ID NO: 3125053 - DNA, 25 bp, Homo sapien
caccgagcagcgtgaagggcatgtc

SEQ ID NO: 3125054 - DNA, 25 bp, Homo sapien
agcagatgaggaaggtcgcaatagc

SEQ ID NO: 3125055 - DNA, 25 bp, Homo sapien
tggcggcgccgcttctgctggatga

SEQ ID NO: 3125056 - DNA, 25 bp, Homo sapien
gaaggtcgcaatagcaatgccaatc

SEQ ID NO: 3125057 - DNA, 25 bp, Homo sapien
tggtcatgacatacggggcaaagca

SEQ ID NO: 3125058 - DNA, 25 bp, Homo sapien
ttcacggtgacgaagggcacgagct

SEQ ID NO: 3125059 - DNA, 25 bp, Homo sapien
atgccggccacatccagagagctgt

SEQ ID NO: 3125060 - DNA, 25 bp, Homo sapien
tcggccaccgccttgctgtaggtca

SEQ ID NO: 3125061 - DNA, 25 bp, Homo sapien
gaggatgccccactgggcgttcacg

SEQ ID NO: 3125062 - DNA, 25 bp, Homo sapien
tggcaccccgtgattactaaactgg

SEQ ID NO: 3125063 - DNA, 25 bp, Homo sapien
gaccgtctcatgtctaagatccaga

SEQ ID NO: 3125064 - DNA, 25 bp, Homo sapien
caatgacattgatggtgggtgctcc

SEQ ID NO: 3125065 - DNA, 25 bp, Homo sapien
gggacccctaggcttccagagatgg

SEQ ID NO: 3125066 - DNA, 25 bp, Homo sapien
tgtaaggtgtcatgatacaggctcc

SEQ ID NO: 3125067 - DNA, 25 bp, Homo sapien
tgcaagagcccacggttgaagccca

SEQ ID NO: 3125068 - DNA, 25 bp, Homo sapien
tccaccgttaatgccaagagcaagt

SEQ ID NO: 3125069 - DNA, 25 bp, Homo sapien
gacgaccgcgtgtgtctttgaagaa

SEQ ID NO: 3125070 - DNA, 25 bp, Homo sapien
gcttcctgaccacatacctatagtt

SEQ ID NO: 3125071 - DNA, 25 bp, Homo sapien
tggtgagtcagcaaataacacctgg

SEQ ID NO: 3125072 - DNA, 25 bp, Homo sapien
tacacttcgtgagttatacacacct

SEQ ID NO: 3125073 - DNA, 25 bp, Homo sapien
cccctgggttggattgaactggcca

SEQ ID NO: 3125074 - DNA, 25 bp, Homo sapien
tagtgaccaaggcttttagcctggc

SEQ ID NO: 3125075 - DNA, 25 bp, Homo sapien
tggggaacaacctgcttctgctgtg

SEQ ID NO: 3125076 - DNA, 25 bp, Homo sapien
ggcttttagcctggcggagatgcaa

SEQ ID NO: 3125077 - DNA, 25 bp, Homo sapien
gatgcaataacacagagtgtaggcc

SEQ ID NO: 3125078 - DNA, 25 bp, Homo sapien
gtgtgcctccctctaaccatggtgc

SEQ ID NO: 3125079 - DNA, 25 bp, Homo sapien
cagtgtgcctccctctaaccatggt

SEQ ID NO: 3125080 - DNA, 25 bp, Homo sapien
cagggcagggtgcacgcgtttcctt

SEQ ID NO: 3125081 - DNA, 25 bp, Homo sapien
ggtgcacgcgtttccttgagtggct

SEQ ID NO: 3125082 - DNA, 25 bp, Homo sapien
gctgccgaggaaggcgaaacatgac

SEQ ID NO: 3125083 - DNA, 25 bp, Homo sapien
gattcacagcattcttgagacccag

SEQ ID NO: 3125084 - DNA, 25 bp, Homo sapien
cctaaggcaagggatagcccagtgt

SEQ ID NO: 3125085 - DNA, 25 bp, Homo sapien
caacacgtttaagtgcacatgaaaa

SEQ ID NO: 3125086 - DNA, 25 bp, Homo sapien
tgatgtggcactcgggccgcgcggg

SEQ ID NO: 3125087 - DNA, 25 bp, Homo sapien
agtcgggttacagtgggcagcgcca

SEQ ID NO: 3125088 - DNA, 25 bp, Homo sapien
gggagggcgccccaaacgcaaatgc

SEQ ID NO: 3125089 - DNA, 25 bp, Homo sapien
cggccagcgcagtgatgtggcactc

SEQ ID NO: 3125090 - DNA, 25 bp, Homo sapien
ctcaaactcgcaccccggccgggca

SEQ ID NO: 3125091 - DNA, 25 bp, Homo sapien
ggcggggttccgctcaaactcgcac

SEQ ID NO: 3125092 - DNA, 25 bp, Homo sapien
ccgggcagcggcgacgaccaggact

SEQ ID NO: 3125093 - DNA, 25 bp, Homo sapien
cagcggcgacgaccaggactgtaag

SEQ ID NO: 3125094 - DNA, 25 bp, Homo sapien
gggagaggtcacactaccagtccca

SEQ ID NO: 3125095 - DNA, 25 bp, Homo sapien
ggcctggatgccgtagagagcctcc

SEQ ID NO: 3125096 - DNA, 25 bp, Homo sapien
ttggagacgttctcgccaggaccat

SEQ ID NO: 3125097 - DNA, 25 bp, Homo sapien
cacatgctgcccactttggagacgt

SEQ ID NO: 3125098 - DNA, 25 bp, Homo sapien
ctgctgctgtgtccgacaggaaaaa

SEQ ID NO: 3125099 - DNA, 25 bp, Homo sapien
tgctgtgtccgacaggaaaaagatc

SEQ ID NO: 3125100 - DNA, 25 bp, Homo sapien
ccctgctgctgtgtccgacaggaaa

SEQ ID NO: 3125101 - DNA, 25 bp, Homo sapien
gctgctgtgtccgacaggaaaaaga

SEQ ID NO: 3125102 - DNA, 25 bp, Homo sapien
tcctgagcacggttggctagatgca

SEQ ID NO: 3125103 - DNA, 25 bp, Homo sapien
atgagagtcctgagcacggttggct

SEQ ID NO: 3125104 - DNA, 25 bp, Homo sapien
gagcacggttggctagatgcacccc

SEQ ID NO: 3125105 - DNA, 25 bp, Homo sapien
gagtcctgagcacggttggctagat

SEQ ID NO: 3125106 - DNA, 25 bp, Homo sapien
gaaacacttgccgatgccacggctg

SEQ ID NO: 3125107 - DNA, 25 bp, Homo sapien
gggctggaaacgtccttgacttcca

SEQ ID NO: 3125108 - DNA, 25 bp, Homo sapien
acttccacactcgtccataagaggg

SEQ ID NO: 3125109 - DNA, 25 bp, Homo sapien
caagacccagatggcgagacaggga

SEQ ID NO: 3125110 - DNA, 25 bp, Homo sapien
tgtcagtgtggctaaagacaactgg

SEQ ID NO: 3125111 - DNA, 25 bp, Homo sapien
gagcaccggtgtgcaaagctggcca

SEQ ID NO: 3125112 - DNA, 25 bp, Homo sapien
tcagctgactcgtggtctcatcctg

SEQ ID NO: 3125113 - DNA, 25 bp, Homo sapien
gcagcagggtttgcactcagctgac

SEQ ID NO: 3125114 - DNA, 25 bp, Homo sapien
tgtgggcgtgagactgtccagacac

SEQ ID NO: 3125115 - DNA, 25 bp, Homo sapien
tgggcgtgagactgtccagacaccc

SEQ ID NO: 3125116 - DNA, 25 bp, Homo sapien
gtgggcgtgagactgtccagacacc

SEQ ID NO: 3125117 - DNA, 25 bp, Homo sapien
ctgtgggcgtgagactgtccagaca

SEQ ID NO: 3125118 - DNA, 25 bp, Homo sapien
aggagcttgagtccccctggatgac

SEQ ID NO: 3125119 - DNA, 25 bp, Homo sapien
gcttgagtccccctggatgactgtc

SEQ ID NO: 3125120 - DNA, 25 bp, Homo sapien
agtccccctggatgactgtcacggg

SEQ ID NO: 3125121 - DNA, 25 bp, Homo sapien
ttgagtccccctggatgactgtcac

SEQ ID NO: 3125122 - DNA, 25 bp, Homo sapien
cgtccatgcccgcggacgcccacaa

SEQ ID NO: 3125123 - DNA, 25 bp, Homo sapien
catgcccgcggacgcccacaacgcg

SEQ ID NO: 3125124 - DNA, 25 bp, Homo sapien
tgcccgcggacgcccacaacgcgcg

SEQ ID NO: 3125125 - DNA, 25 bp, Homo sapien
tccatgcccgcggacgcccacaacg

SEQ ID NO: 3125126 - DNA, 25 bp, Homo sapien
gtctgcagctggtggcctgtggcat

SEQ ID NO: 3125127 - DNA, 25 bp, Homo sapien
cgctgtctgcagctggtggcctgtg

SEQ ID NO: 3125128 - DNA, 25 bp, Homo sapien
tctgcagctggtggcctgtggcatt

SEQ ID NO: 3125129 - DNA, 25 bp, Homo sapien
gcagctggtggcctgtggcattcac

SEQ ID NO: 3125130 - DNA, 25 bp, Homo sapien
agctgcctaaagtgctctgacagtg

SEQ ID NO: 3125131 - DNA, 25 bp, Homo sapien
aaatcacggattcagctgcctaaag

SEQ ID NO: 3125132 - DNA, 25 bp, Homo sapien
gctgcctaaagtgctctgacagtgt

SEQ ID NO: 3125133 - DNA, 25 bp, Homo sapien
tctgaaatcacggattcagctgcct

SEQ ID NO: 3125134 - DNA, 25 bp, Homo sapien
acaagggcccgtgaaggcagccagc

SEQ ID NO: 3125135 - DNA, 25 bp, Homo sapien
tgtgccacacaagggcccgtgaagg

SEQ ID NO: 3125136 - DNA, 25 bp, Homo sapien
gctgtgccacacaagggcccgtgaa

SEQ ID NO: 3125137 - DNA, 25 bp, Homo sapien
acacaagggcccgtgaaggcagcca

SEQ ID NO: 3125138 - DNA, 25 bp, Homo sapien
tcacgcatcagacatttacgtaggg

SEQ ID NO: 3125139 - DNA, 25 bp, Homo sapien
cagggtcggcaggtcagtccctcct

SEQ ID NO: 3125140 - DNA, 25 bp, Homo sapien
acagctactgtgcaggaatcagagc

SEQ ID NO: 3125141 - DNA, 25 bp, Homo sapien
tgaccgtcacgcatcagacatttac

SEQ ID NO: 3125142 - DNA, 25 bp, Homo sapien
tcctctctcgtgaagtagcggtggc

SEQ ID NO: 3125143 - DNA, 25 bp, Homo sapien
tcccatgaccggtgctgaagcaggt

SEQ ID NO: 3125144 - DNA, 25 bp, Homo sapien
ttctccagcgggtcatagcagccct

SEQ ID NO: 3125145 - DNA, 25 bp, Homo sapien
tcagcaggatgtactcggagctggc

SEQ ID NO: 3125146 - DNA, 25 bp, Homo sapien
tatctaagccaaacggcacctgagg

SEQ ID NO: 3125147 - DNA, 25 bp, Homo sapien
tcatgcagggtctctggtggacacc

SEQ ID NO: 3125148 - DNA, 25 bp, Homo sapien
taatggtggaaacaggaaggctcct

SEQ ID NO: 3125149 - DNA, 25 bp, Homo sapien
tccactagaacagaggtgccctgag

SEQ ID NO: 3125150 - DNA, 25 bp, Homo sapien
tcagcacacgcaccatctgggcgta

SEQ ID NO: 3125151 - DNA, 25 bp, Homo sapien
tgccgtcgaagctgcgcccgatgct

SEQ ID NO: 3125152 - DNA, 25 bp, Homo sapien
ctgaagcggatgaaggtgggcggca

SEQ ID NO: 3125153 - DNA, 25 bp, Homo sapien
ctggagaactcgatgaccagcagct

SEQ ID NO: 3125154 - DNA, 25 bp, Homo sapien
tactgggctaggtagatgagcatct

SEQ ID NO: 3125155 - DNA, 25 bp, Homo sapien
gaatgttgccgatgagcttcacctc

SEQ ID NO: 3125156 - DNA, 25 bp, Homo sapien
ccgccacctcgttgccatgaatgtt

SEQ ID NO: 3125157 - DNA, 25 bp, Homo sapien
taggtagatgagcatctcccggccc

SEQ ID NO: 3125158 - DNA, 25 bp, Homo sapien
ctgaaaacatggccaacccccgact

SEQ ID NO: 3125159 - DNA, 25 bp, Homo sapien
cgggtctccgccagccggtagtact

SEQ ID NO: 3125160 - DNA, 25 bp, Homo sapien
ggatgtggtcgctgcgtgcgccgcg

SEQ ID NO: 3125161 - DNA, 25 bp, Homo sapien
tagtactcggacgtcaggtccggga

SEQ ID NO: 3125162 - DNA, 25 bp, Homo sapien
gatccaggttctgcgcgttctgcct

SEQ ID NO: 3125163 - DNA, 25 bp, Homo sapien
catccacttcatgattgcctttgtc

SEQ ID NO: 3125164 - DNA, 25 bp, Homo sapien
gcatccacttcatgattgcctttgt

SEQ ID NO: 3125165 - DNA, 25 bp, Homo sapien
tgcatccacttcatgattgcctttg

SEQ ID NO: 3125166 - DNA, 25 bp, Homo sapien
agcacaaagggtatggtctgcatcc

SEQ ID NO: 3125167 - DNA, 25 bp, Homo sapien
ctcgtcgggcgtgggagaaaacatc

SEQ ID NO: 3125168 - DNA, 25 bp, Homo sapien
cctgggggtgcttggagaagtcgaa

SEQ ID NO: 3125169 - DNA, 25 bp, Homo sapien
gtcgggcgtgggagaaaacatcttc

SEQ ID NO: 3125170 - DNA, 25 bp, Homo sapien
ttctcgtcgggcgtgggagaaaaca

SEQ ID NO: 3125171 - DNA, 25 bp, Homo sapien
acagcatgagcaggattcgggcaaa

SEQ ID NO: 3125172 - DNA, 25 bp, Homo sapien
ctctcgtccgtagggcaccatggaa

SEQ ID NO: 3125173 - DNA, 25 bp, Homo sapien
cattcccacagcaagcgttggcaaa

SEQ ID NO: 3125174 - DNA, 25 bp, Homo sapien
gaaactggctatgctcattcccaca

SEQ ID NO: 3125175 - DNA, 25 bp, Homo sapien
caccctgcatgagctcatcagggcc

SEQ ID NO: 3125176 - DNA, 25 bp, Homo sapien
gcaggcgaagggctcaccctgcatg

SEQ ID NO: 3125177 - DNA, 25 bp, Homo sapien
cccaccaagcaggacaggtctgtgc

SEQ ID NO: 3125178 - DNA, 25 bp, Homo sapien
tcaccctgcatgagctcatcagggc

SEQ ID NO: 3125179 - DNA, 25 bp, Homo sapien
ggaaattgcctccacacctattctc

SEQ ID NO: 3125180 - DNA, 25 bp, Homo sapien
gtgaagctgtaccagtccgccccgt

SEQ ID NO: 3125181 - DNA, 25 bp, Homo sapien
tggacgtcagcgtaggctctggaca

SEQ ID NO: 3125182 - DNA, 25 bp, Homo sapien
ctattctccgacctgtccatcatca

SEQ ID NO: 3125183 - DNA, 25 bp, Homo sapien
gctgaacaactgcaaggtggaccat

SEQ ID NO: 3125184 - DNA, 25 bp, Homo sapien
catgaggcatttaagggtcccgcaa

SEQ ID NO: 3125185 - DNA, 25 bp, Homo sapien
cactttgcagatccgcagatggcgg

SEQ ID NO: 3125186 - DNA, 25 bp, Homo sapien
tttacccagacgctgtcctgaccag

SEQ ID NO: 3125187 - DNA, 25 bp, Homo sapien
agcccagctctaccgtgatctcaaa

SEQ ID NO: 3125188 - DNA, 25 bp, Homo sapien
tcgggggggaacttcacacagccca

SEQ ID NO: 3125189 - DNA, 25 bp, Homo sapien
tccacgaaattcaggagtgactcct

SEQ ID NO: 3125190 - DNA, 25 bp, Homo sapien
tgtgcaggtagttgaaatcggacat

SEQ ID NO: 3125191 - DNA, 25 bp, Homo sapien
ggcaattgacccgagcacgttctgg

SEQ ID NO: 3125192 - DNA, 25 bp, Homo sapien
cgctctgccatctttaacgagtcag

SEQ ID NO: 3125193 - DNA, 25 bp, Homo sapien
tgactccatctctatgggcattgag

SEQ ID NO: 3125194 - DNA, 25 bp, Homo sapien
tgggcttttgaatgaccctgcatct

SEQ ID NO: 3125195 - DNA, 25 bp, Homo sapien
cagctcgttccccacatgctcctca

SEQ ID NO: 3125196 - DNA, 25 bp, Homo sapien
agcgtggaggccgtcagctcgttcc

SEQ ID NO: 3125197 - DNA, 25 bp, Homo sapien
agggagatggcgtgagctctcctgc

SEQ ID NO: 3125198 - DNA, 25 bp, Homo sapien
agctctcctgctgagcgtggaggcc

SEQ ID NO: 3125199 - DNA, 25 bp, Homo sapien
tgagatccgggcgtttttgactggc

SEQ ID NO: 3125200 - DNA, 25 bp, Homo sapien
tatctgtcaccacacctttgatgcc

SEQ ID NO: 3125201 - DNA, 25 bp, Homo sapien
ggcttgccgaatttatctgtcacca

SEQ ID NO: 3125202 - DNA, 25 bp, Homo sapien
tgatgtcgtggcgaatgcctttgac

SEQ ID NO: 3125203 - DNA, 25 bp, Homo sapien
gacaccccagctatcaacagggtat

SEQ ID NO: 3125204 - DNA, 25 bp, Homo sapien
accccagctatcaacagggtatgaa

SEQ ID NO: 3125205 - DNA, 25 bp, Homo sapien
tggacaccccagctatcaacagggt

SEQ ID NO: 3125206 - DNA, 25 bp, Homo sapien
ctggacaccccagctatcaacaggg

SEQ ID NO: 3125207 - DNA, 25 bp, Homo sapien
gtcatttttcattggctgtgaaatt

SEQ ID NO: 3125208 - DNA, 25 bp, Homo sapien
cgtcatttttcattggctgtgaaat

SEQ ID NO: 3125209 - DNA, 25 bp, Homo sapien
tcatttttcattggctgtgaaattc

SEQ ID NO: 3125210 - DNA, 25 bp, Homo sapien
cttgggcaatgacaatgtggatacc

SEQ ID NO: 3125211 - DNA, 25 bp, Homo sapien
ggcagcagtctccagtagtcaccat

SEQ ID NO: 3125212 - DNA, 25 bp, Homo sapien
ggccagccctcttcatccgggcggg

SEQ ID NO: 3125213 - DNA, 25 bp, Homo sapien
catccgggcggggatgatgactttc

SEQ ID NO: 3125214 - DNA, 25 bp, Homo sapien
ggtcgtggggcccagtcctccgcag

SEQ ID NO: 3125215 - DNA, 25 bp, Homo sapien
cgcccggagcgggtcgggctccgtg

SEQ ID NO: 3125216 - DNA, 25 bp, Homo sapien
gagctggcacctcccagcgggtcgt

SEQ ID NO: 3125217 - DNA, 25 bp, Homo sapien
cctccgcagcccatgaataaagttc

SEQ ID NO: 3125218 - DNA, 25 bp, Homo sapien
gcgatgtgaagtaggaccaccacca

SEQ ID NO: 3125219 - DNA, 25 bp, Homo sapien
cagcgatgtgaagtaggaccaccac

SEQ ID NO: 3125220 - DNA, 25 bp, Homo sapien
gatgtgaagtaggaccaccaccagg

SEQ ID NO: 3125221 - DNA, 25 bp, Homo sapien
tcagcgatgtgaagtaggaccacca

SEQ ID NO: 3125222 - DNA, 25 bp, Homo sapien
atgcggagatgggcctcggtctcca

SEQ ID NO: 3125223 - DNA, 25 bp, Homo sapien
ggatgcggagatgggcctcggtctc

SEQ ID NO: 3125224 - DNA, 25 bp, Homo sapien
gcagcggctttgtgggatgtctgtg

SEQ ID NO: 3125225 - DNA, 25 bp, Homo sapien
aaatggcagcggctttgtgggatgt

SEQ ID NO: 3125226 - DNA, 25 bp, Homo sapien
tgccaacctggacatgtctttcttt

SEQ ID NO: 3125227 - DNA, 25 bp, Homo sapien
tccggaggttatcttcccttcatcc

SEQ ID NO: 3125228 - DNA, 25 bp, Homo sapien
tccttgccaacctggacatgtcttt

SEQ ID NO: 3125229 - DNA, 25 bp, Homo sapien
cgtctgctcagaggagggtccggag

SEQ ID NO: 3125230 - DNA, 25 bp, Homo sapien
tcctgccggctctgtgctaagtcca

SEQ ID NO: 3125231 - DNA, 25 bp, Homo sapien
ctcctgccggctctgtgctaagtcc

SEQ ID NO: 3125232 - DNA, 25 bp, Homo sapien
tggctctcacgtcgccttgaatgtc

SEQ ID NO: 3125233 - DNA, 25 bp, Homo sapien
tttccggtggctctcacgtcgcctt

SEQ ID NO: 3125234 - DNA, 25 bp, Homo sapien
tctcacgtcgccttgaatgtctcac

SEQ ID NO: 3125235 - DNA, 25 bp, Homo sapien
ccggtggctctcacgtcgccttgaa

SEQ ID NO: 3125236 - DNA, 25 bp, Homo sapien
gcatcctcaacatcagattcccagt

SEQ ID NO: 3125237 - DNA, 25 bp, Homo sapien
cgagggctcgctcctgctcagggtc

SEQ ID NO: 3125238 - DNA, 25 bp, Homo sapien
gcgtggtcccggtgttccgatgcca

SEQ ID NO: 3125239 - DNA, 25 bp, Homo sapien
accaggcggcgctgttcccttgcat

SEQ ID NO: 3125240 - DNA, 25 bp, Homo sapien
tcctgccggctctgtgctaagtcca

SEQ ID NO: 3125241 - DNA, 25 bp, Homo sapien
ctcctgccggctctgtgctaagtcc

SEQ ID NO: 3125242 - DNA, 25 bp, Homo sapien
tggctctcacgtggcctcgaatgtc

SEQ ID NO: 3125243 - DNA, 25 bp, Homo sapien
tttccggtggctctcacgtggcctc

SEQ ID NO: 3125244 - DNA, 25 bp, Homo sapien
ccggtggctctcacgtggcctcgaa

SEQ ID NO: 3125245 - DNA, 25 bp, Homo sapien
tctcacgtggcctcgaatgtctcac

SEQ ID NO: 3125246 - DNA, 25 bp, Homo sapien
gcgtggtcccggtgttccgatgcca

SEQ ID NO: 3125247 - DNA, 25 bp, Homo sapien
cgagggctcgctcctgctcagggtc

SEQ ID NO: 3125248 - DNA, 25 bp, Homo sapien
gcatcctcaacatcagattcccagt

SEQ ID NO: 3125249 - DNA, 25 bp, Homo sapien
accaggcggcgctgttcccttgcat

SEQ ID NO: 3125250 - DNA, 25 bp, Homo sapien
ctcctgccggctctgtgctaagtcc

SEQ ID NO: 3125251 - DNA, 25 bp, Homo sapien
tcctgccggctctgtgctaagtcca

SEQ ID NO: 3125252 - DNA, 25 bp, Homo sapien
tttccggtggctctcacgtcgcctt

SEQ ID NO: 3125253 - DNA, 25 bp, Homo sapien
tctcacgtcgccttgaatgtctcac

SEQ ID NO: 3125254 - DNA, 25 bp, Homo sapien
tggctctcacgtcgccttgaatgtc

SEQ ID NO: 3125255 - DNA, 25 bp, Homo sapien
ccggtggctctcacgtcgccttgaa

SEQ ID NO: 3125256 - DNA, 25 bp, Homo sapien
gcgtggtcccggtgttccgatgcca

SEQ ID NO: 3125257 - DNA, 25 bp, Homo sapien
accaggcggcgctgttcccttgcat

SEQ ID NO: 3125258 - DNA, 25 bp, Homo sapien
gcatcctcaacatcagattcccagt

SEQ ID NO: 3125259 - DNA, 25 bp, Homo sapien
cgagggctcgctcctgctcagggtc

SEQ ID NO: 3125260 - DNA, 25 bp, Homo sapien
agcctgaggccctgaggaacgaggg

SEQ ID NO: 3125261 - DNA, 25 bp, Homo sapien
aactccacgattctgacagtgccag

SEQ ID NO: 3125262 - DNA, 25 bp, Homo sapien
ggaatccgatgcaggcctgaggctt

SEQ ID NO: 3125263 - DNA, 25 bp, Homo sapien
tttgcaagtcactaagtctccgttt

SEQ ID NO: 3125264 - DNA, 25 bp, Homo sapien
gagcggcacagggaacatggatccc

SEQ ID NO: 3125265 - DNA, 25 bp, Homo sapien
actggcgatgcctgccacgtgggct

SEQ ID NO: 3125266 - DNA, 25 bp, Homo sapien
ggtgagcggcacagggaacatggat

SEQ ID NO: 3125267 - DNA, 25 bp, Homo sapien
cagtaaggtgacactggcgatgcct

SEQ ID NO: 3125268 - DNA, 25 bp, Homo sapien
gcaggatcagagaatccgatcggat

SEQ ID NO: 3125269 - DNA, 25 bp, Homo sapien
ggatcagagaatccgatcggatttc

SEQ ID NO: 3125270 - DNA, 25 bp, Homo sapien
gggcaggatcagagaatccgatcgg

SEQ ID NO: 3125271 - DNA, 25 bp, Homo sapien
cagagaatccgatcggatttcttac

SEQ ID NO: 3125272 - DNA, 25 bp, Homo sapien
agggtgaggcgccgtggactgagtc

SEQ ID NO: 3125273 - DNA, 25 bp, Homo sapien
gggtgaggcgccgtggactgagtcc

SEQ ID NO: 3125274 - DNA, 25 bp, Homo sapien
ccccagccctcggcgatcagccctc

SEQ ID NO: 3125275 - DNA, 25 bp, Homo sapien
cctcggcgatcagccctcccctccc

SEQ ID NO: 3125276 - DNA, 25 bp, Homo sapien
tgtcaccgatggtcagattctccca

SEQ ID NO: 3125277 - DNA, 25 bp, Homo sapien
gcctgatgaaagttggtaaaacctc

SEQ ID NO: 3125278 - DNA, 25 bp, Homo sapien
ctcagcattgtcaccgatggtcaga

SEQ ID NO: 3125279 - DNA, 25 bp, Homo sapien
gggaagcagtgagctcctcgtcctg

SEQ ID NO: 3125280 - DNA, 25 bp, Homo sapien
gcatctcaaaggtctgctcctccat

SEQ ID NO: 3125281 - DNA, 25 bp, Homo sapien
ggccctctttgttctgtggggcatc

SEQ ID NO: 3125282 - DNA, 25 bp, Homo sapien
ccaaggggccctctttgttctgtgg

SEQ ID NO: 3125283 - DNA, 25 bp, Homo sapien
ctgtggggcatctcaaaggtctgct

SEQ ID NO: 3125284 - DNA, 25 bp, Homo sapien
gaatcgctggatctagggatgcaga

SEQ ID NO: 3125285 - DNA, 25 bp, Homo sapien
ctttctcggaggacggcccacttgg

SEQ ID NO: 3125286 - DNA, 25 bp, Homo sapien
gcttcctattttggccgcaccagag

SEQ ID NO: 3125287 - DNA, 25 bp, Homo sapien
cttgggtttgaatcgctggatctag

SEQ ID NO: 3125288 - DNA, 25 bp, Homo sapien
tgtccttcccgctgggcgaatcagg

SEQ ID NO: 3125289 - DNA, 25 bp, Homo sapien
ttctagccctcaagcccctgggaag

SEQ ID NO: 3125290 - DNA, 25 bp, Homo sapien
aggtgctcagtcaaccctgcctggg

SEQ ID NO: 3125291 - DNA, 25 bp, Homo sapien
ttcgcgacgaggacaccaaggctgg

SEQ ID NO: 3125292 - DNA, 25 bp, Homo sapien
tgcatctgctgagatcttgctctgc

SEQ ID NO: 3125293 - DNA, 25 bp, Homo sapien
cgcatggtgcatcctgcagcgagcc

SEQ ID NO: 3125294 - DNA, 25 bp, Homo sapien
tgacgggagctcttcgtgcatctgc

SEQ ID NO: 3125295 - DNA, 25 bp, Homo sapien
ctgagacttccgcatggtgcatcct

SEQ ID NO: 3125296 - DNA, 25 bp, Homo sapien
gacacatctggttctgcgaggaggc

SEQ ID NO: 3125297 - DNA, 25 bp, Homo sapien
cacatctggttctgcgaggaggcca

SEQ ID NO: 3125298 - DNA, 25 bp, Homo sapien
acatctggttctgcgaggaggccag

SEQ ID NO: 3125299 - DNA, 25 bp, Homo sapien
tctggttctgcgaggaggccaggaa

SEQ ID NO: 3125300 - DNA, 25 bp, Homo sapien
tttggagcctgaacagggcccagca

SEQ ID NO: 3125301 - DNA, 25 bp, Homo sapien
cgaaaagcctcgagccccgagattc

SEQ ID NO: 3125302 - DNA, 25 bp, Homo sapien
tccatgaggaactcacaggcttccc

SEQ ID NO: 3125303 - DNA, 25 bp, Homo sapien
agcagggaagactccccgctccatg

SEQ ID NO: 3125304 - DNA, 25 bp, Homo sapien
gtgcctgaacagcaggttaggcttt

SEQ ID NO: 3125305 - DNA, 25 bp, Homo sapien
agtcagtgagtagggagcagcctca

SEQ ID NO: 3125306 - DNA, 25 bp, Homo sapien
gcaggctgaagtcagtgagtaggga

SEQ ID NO: 3125307 - DNA, 25 bp, Homo sapien
cagcagtgcctgaacagcaggttag

SEQ ID NO: 3125308 - DNA, 25 bp, Homo sapien
ctgcactgtctccactgactgaggc

SEQ ID NO: 3125309 - DNA, 25 bp, Homo sapien
agaggaggcgcactggggcgaggag

SEQ ID NO: 3125310 - DNA, 25 bp, Homo sapien
tcagaggaggcgcactggggcgagg

SEQ ID NO: 3125311 - DNA, 25 bp, Homo sapien
cagaggaggcgcactggggcgagga

SEQ ID NO: 3125312 - DNA, 25 bp, Homo sapien
tatgccctcaagctggcctcctcca

SEQ ID NO: 3125313 - DNA, 25 bp, Homo sapien
ttatgccctcaagctggcctcctcc

SEQ ID NO: 3125314 - DNA, 25 bp, Homo sapien
caagctggcctcctccagcctcaac

SEQ ID NO: 3125315 - DNA, 25 bp, Homo sapien
cctcaagctggcctcctccagcctc

SEQ ID NO: 3125316 - DNA, 25 bp, Homo sapien
acctgctgtgagcccgactcagcca

SEQ ID NO: 3125317 - DNA, 25 bp, Homo sapien
gctgtgagcccgactcagccaggtg

SEQ ID NO: 3125318 - DNA, 25 bp, Homo sapien
tgagcccgactcagccaggtggtct

SEQ ID NO: 3125319 - DNA, 25 bp, Homo sapien
tgtgagcccgactcagccaggtggt

SEQ ID NO: 3125320 - DNA, 25 bp, Homo sapien
caaatcggaatcaaatgtggtgccc

SEQ ID NO: 3125321 - DNA, 25 bp, Homo sapien
aatcaaatgtggtgcccgagacggc

SEQ ID NO: 3125322 - DNA, 25 bp, Homo sapien
ccgagacggcgaaaatgctccattt

SEQ ID NO: 3125323 - DNA, 25 bp, Homo sapien
cactccaggtgcaaatcggaatcaa

SEQ ID NO: 3125324 - DNA, 25 bp, Homo sapien
gcatccataggagctgttggcaagt

SEQ ID NO: 3125325 - DNA, 25 bp, Homo sapien
ccaggtctgctctcttgtttacggg

SEQ ID NO: 3125326 - DNA, 25 bp, Homo sapien
tgatgttgccggctatgctcgggtc

SEQ ID NO: 3125327 - DNA, 25 bp, Homo sapien
ccttgtccgggtagccttggctcag

SEQ ID NO: 3125328 - DNA, 25 bp, Homo sapien
tgctccccaggcactagtctgagga

SEQ ID NO: 3125329 - DNA, 25 bp, Homo sapien
aagggtccctgcaggcttgtttctg

SEQ ID NO: 3125330 - DNA, 25 bp, Homo sapien
gaccagcaagtatggaatatccagg

SEQ ID NO: 3125331 - DNA, 25 bp, Homo sapien
agaagaggcgtctgagatgctcccc

SEQ ID NO: 3125332 - DNA, 25 bp, Homo sapien
ggatcacgtctagaccacttggctt

SEQ ID NO: 3125333 - DNA, 25 bp, Homo sapien
tgagtctcaacttggggatcacgtc

SEQ ID NO: 3125334 - DNA, 25 bp, Homo sapien
tgttgagttaagtccagctgcctgc

SEQ ID NO: 3125335 - DNA, 25 bp, Homo sapien
cttccggcgggagatgcctgcctgt

SEQ ID NO: 3125336 - DNA, 25 bp, Homo sapien
gcagccaggacctggcccggtgccc

SEQ ID NO: 3125337 - DNA, 25 bp, Homo sapien
aggccaccctgatcagcagccagga

SEQ ID NO: 3125338 - DNA, 25 bp, Homo sapien
aggtgcactgggcaggccaccctga

SEQ ID NO: 3125339 - DNA, 25 bp, Homo sapien
actgggcaggccaccctgatcagca

SEQ ID NO: 3125340 - DNA, 25 bp, Homo sapien
gcgcagcactagcagcccccctccc

SEQ ID NO: 3125341 - DNA, 25 bp, Homo sapien
agcgcagcactagcagcccccctcc

SEQ ID NO: 3125342 - DNA, 25 bp, Homo sapien
gccgtatgctgcctgttctgaaaca

SEQ ID NO: 3125343 - DNA, 25 bp, Homo sapien
acagtgaatattcggcgcagctcca

SEQ ID NO: 3125344 - DNA, 25 bp, Homo sapien
caaatgagtggttgattttatggac

SEQ ID NO: 3125345 - DNA, 25 bp, Homo sapien
tctttggtgaaggttctctttggaa

SEQ ID NO: 3125346 - DNA, 25 bp, Homo sapien
ctgccatccccggccctcccgcccg

SEQ ID NO: 3125347 - DNA, 25 bp, Homo sapien
tgcccctgccatccccggccctccc

SEQ ID NO: 3125348 - DNA, 25 bp, Homo sapien
ctgcccctgccatccccggccctcc

SEQ ID NO: 3125349 - DNA, 25 bp, Homo sapien
tgccatccccggccctcccgcccgc

SEQ ID NO: 3125350 - DNA, 25 bp, Homo sapien
aaacccggcattggtggaagctgaa

SEQ ID NO: 3125351 - DNA, 25 bp, Homo sapien
aggcaccagcgagtggactccgcag

SEQ ID NO: 3125352 - DNA, 25 bp, Homo sapien
ctgcagcaacccaagggcccggtat

SEQ ID NO: 3125353 - DNA, 25 bp, Homo sapien
gcaaagagattgatcctgcagcaac

SEQ ID NO: 3125354 - DNA, 25 bp, Homo sapien
gagtccatgggtccagggtcatccg

SEQ ID NO: 3125355 - DNA, 25 bp, Homo sapien
catgggtccagggtcatccgtgaga

SEQ ID NO: 3125356 - DNA, 25 bp, Homo sapien
gtccatgggtccagggtcatccgtg

SEQ ID NO: 3125357 - DNA, 25 bp, Homo sapien
cctggagtccatgggtccagggtca

SEQ ID NO: 3125358 - DNA, 25 bp, Homo sapien
agctctgctccgtgggcttcatctg

SEQ ID NO: 3125359 - DNA, 25 bp, Homo sapien
ttaaccctctcaattctccttccca

SEQ ID NO: 3125360 - DNA, 25 bp, Homo sapien
ctgctccgtgggcttcatctgcatt

SEQ ID NO: 3125361 - DNA, 25 bp, Homo sapien
gcttcatctgcattaaccctctcaa

SEQ ID NO: 3125362 - DNA, 25 bp, Homo sapien
tctgtggttctacggagccctgagt

SEQ ID NO: 3125363 - DNA, 25 bp, Homo sapien
gttcgtatgcacatttgggtgcttg

SEQ ID NO: 3125364 - DNA, 25 bp, Homo sapien
tgcttgagcagggttgcgcccaaga

SEQ ID NO: 3125365 - DNA, 25 bp, Homo sapien
agccctgagttgtgccctgggcagc

SEQ ID NO: 3125366 - DNA, 25 bp, Homo sapien
gggagcccaatcgataagctgtctg

SEQ ID NO: 3125367 - DNA, 25 bp, Homo sapien
ctgggcatcggtgtgcttgaatgct

SEQ ID NO: 3125368 - DNA, 25 bp, Homo sapien
gaatgctcataaccgattttgaggg

SEQ ID NO: 3125369 - DNA, 25 bp, Homo sapien
agctgtctgccagtcatgctcatca

SEQ ID NO: 3125370 - DNA, 25 bp, Homo sapien
aaggcttcctgtgccggatgtaaag

SEQ ID NO: 3125371 - DNA, 25 bp, Homo sapien
gaaggcttcctgtgccggatgtaaa

SEQ ID NO: 3125372 - DNA, 25 bp, Homo sapien
tcagaaggcttcctgtgccggatgt

SEQ ID NO: 3125373 - DNA, 25 bp, Homo sapien
cttcctgtgccggatgtaaagtgtc

SEQ ID NO: 3125374 - DNA, 25 bp, Homo sapien
caaaataagccgtgcatatcctgga

SEQ ID NO: 3125375 - DNA, 25 bp, Homo sapien
gtgaaacagaggatagcgtgccatt

SEQ ID NO: 3125376 - DNA, 25 bp, Homo sapien
ggattctcgcatcgatcgttcagga

SEQ ID NO: 3125377 - DNA, 25 bp, Homo sapien
catcggagacgtttaaaagcaggga

SEQ ID NO: 3125378 - DNA, 25 bp, Homo sapien
attataccgtagaaaagcccggctg

SEQ ID NO: 3125379 - DNA, 25 bp, Homo sapien
catacgtatgtgataatggatcaac

SEQ ID NO: 3125380 - DNA, 25 bp, Homo sapien
gcatgtgtgataatatttccatacg

SEQ ID NO: 3125381 - DNA, 25 bp, Homo sapien
ggatcaacgtttcctagagatgaaa

SEQ ID NO: 3125382 - DNA, 25 bp, Homo sapien
gactggaacgaggatcacaaggttt

SEQ ID NO: 3125383 - DNA, 25 bp, Homo sapien
gaacgaggatcacaaggtttgtctg

SEQ ID NO: 3125384 - DNA, 25 bp, Homo sapien
gtcgactggaacgaggatcacaagg

SEQ ID NO: 3125385 - DNA, 25 bp, Homo sapien
tggaacgaggatcacaaggtttgtc

SEQ ID NO: 3125386 - DNA, 25 bp, Homo sapien
gaaaagtggttgaactgccactcac

SEQ ID NO: 3125387 - DNA, 25 bp, Homo sapien
aaatcatcacagaggtcgacacggg

SEQ ID NO: 3125388 - DNA, 25 bp, Homo sapien
caggtctcctgctactcagaggaag

SEQ ID NO: 3125389 - DNA, 25 bp, Homo sapien
ctcagggagagaagtccgctggatt

SEQ ID NO: 3125390 - DNA, 25 bp, Homo sapien
tttgagagtgctcccgggacagcat

SEQ ID NO: 3125391 - DNA, 25 bp, Homo sapien
gtttgagagtgctcccgggacagca

SEQ ID NO: 3125392 - DNA, 25 bp, Homo sapien
ccctccctcgcagggaagcgagtgt

SEQ ID NO: 3125393 - DNA, 25 bp, Homo sapien
ctcctgatgtgtcggggtcgacgaa

SEQ ID NO: 3125394 - DNA, 25 bp, Homo sapien
cgcctgtcggtgtcttctgcgccaa

SEQ ID NO: 3125395 - DNA, 25 bp, Homo sapien
tcgcctgtcggtgtcttctgcgcca

SEQ ID NO: 3125396 - DNA, 25 bp, Homo sapien
gtagttttcacacacgtcacacgga

SEQ ID NO: 3125397 - DNA, 25 bp, Homo sapien
gggagcccaatcgataagctgtctg

SEQ ID NO: 3125398 - DNA, 25 bp, Homo sapien
acggagaccctgttcgtatgcacat

SEQ ID NO: 3125399 - DNA, 25 bp, Homo sapien
catcggtgtgcttgaatgctcataa

SEQ ID NO: 3125400 - DNA, 25 bp, Homo sapien
aaggcttcctgtgccggatgtaaag

SEQ ID NO: 3125401 - DNA, 25 bp, Homo sapien
tcagaaggcttcctgtgccggatgt

SEQ ID NO: 3125402 - DNA, 25 bp, Homo sapien
gaaggcttcctgtgccggatgtaaa

SEQ ID NO: 3125403 - DNA, 25 bp, Homo sapien
cttcctgtgccggatgtaaagtgtc

SEQ ID NO: 3125404 - DNA, 25 bp, Homo sapien
ggattctcgcatcgatcgttcagga

SEQ ID NO: 3125405 - DNA, 25 bp, Homo sapien
catcggagacgtttaaaagcaggga

SEQ ID NO: 3125406 - DNA, 25 bp, Homo sapien
caaaataagccgtgcatatcctgga

SEQ ID NO: 3125407 - DNA, 25 bp, Homo sapien
tataccgtagaaaagcccggctgac

SEQ ID NO: 3125408 - DNA, 25 bp, Homo sapien
gtttgtgctgggatgaacctccaag

SEQ ID NO: 3125409 - DNA, 25 bp, Homo sapien
gaaagtgcgctttctgacctgagaa

SEQ ID NO: 3125410 - DNA, 25 bp, Homo sapien
cagcgtattttcttccctagtgaga

SEQ ID NO: 3125411 - DNA, 25 bp, Homo sapien
gctcttgtggaagctagattgccaa

SEQ ID NO: 3125412 - DNA, 25 bp, Homo sapien
tggaacgaggatcacaaggtttgtc

SEQ ID NO: 3125413 - DNA, 25 bp, Homo sapien
gaacgaggatcacaaggtttgtctg

SEQ ID NO: 3125414 - DNA, 25 bp, Homo sapien
gtcgactggaacgaggatcacaagg

SEQ ID NO: 3125415 - DNA, 25 bp, Homo sapien
gactggaacgaggatcacaaggttt

SEQ ID NO: 3125416 - DNA, 25 bp, Homo sapien
ctcagggagagaagtccgctggatt

SEQ ID NO: 3125417 - DNA, 25 bp, Homo sapien
caggtctcctgctactcagaggaag

SEQ ID NO: 3125418 - DNA, 25 bp, Homo sapien
gaaaagtggttgaactgccactcac

SEQ ID NO: 3125419 - DNA, 25 bp, Homo sapien
aaatcatcacagaggtcgacacggg

SEQ ID NO: 3125420 - DNA, 25 bp, Homo sapien
tttgagagtgctcccgggacagcat

SEQ ID NO: 3125421 - DNA, 25 bp, Homo sapien
gtttgagagtgctcccgggacagca

SEQ ID NO: 3125422 - DNA, 25 bp, Homo sapien
cgcctgtcggtgtcttctgcgccaa

SEQ ID NO: 3125423 - DNA, 25 bp, Homo sapien
tcgcctgtcggtgtcttctgcgcca

SEQ ID NO: 3125424 - DNA, 25 bp, Homo sapien
ctcctgatgtgtcggggtcgacgaa

SEQ ID NO: 3125425 - DNA, 25 bp, Homo sapien
tggactcctgatgtgtcggggtcga

SEQ ID NO: 3125426 - DNA, 25 bp, Homo sapien
ccctccctcgcagggaagcgagtgt

SEQ ID NO: 3125427 - DNA, 25 bp, Homo sapien
tgtgtcggggtcgacgaagagaggt

SEQ ID NO: 3125428 - DNA, 25 bp, Homo sapien
acggagaccctgttcgtatgcacat

SEQ ID NO: 3125429 - DNA, 25 bp, Homo sapien
catcggtgtgcttgaatgctcataa

SEQ ID NO: 3125430 - DNA, 25 bp, Homo sapien
gggagcccaatcgataagctgtctg

SEQ ID NO: 3125431 - DNA, 25 bp, Homo sapien
gtagttttcacacacgtcacacgga

SEQ ID NO: 3125432 - DNA, 25 bp, Homo sapien
aaggcttcctgtgccggatgtaaag

SEQ ID NO: 3125433 - DNA, 25 bp, Homo sapien
tcagaaggcttcctgtgccggatgt

SEQ ID NO: 3125434 - DNA, 25 bp, Homo sapien
cttcctgtgccggatgtaaagtgtc

SEQ ID NO: 3125435 - DNA, 25 bp, Homo sapien
gaaggcttcctgtgccggatgtaaa

SEQ ID NO: 3125436 - DNA, 25 bp, Homo sapien
caaaataagccgtgcatatcctgga

SEQ ID NO: 3125437 - DNA, 25 bp, Homo sapien
ggattctcgcatcgatcgttcagga

SEQ ID NO: 3125438 - DNA, 25 bp, Homo sapien
catcggagacgtttaaaagcaggga

SEQ ID NO: 3125439 - DNA, 25 bp, Homo sapien
tataccgtagaaaagcccggctgac

SEQ ID NO: 3125440 - DNA, 25 bp, Homo sapien
gtttgtgctgggatgaacctccaag

SEQ ID NO: 3125441 - DNA, 25 bp, Homo sapien
gctcttgtggaagctagattgccaa

SEQ ID NO: 3125442 - DNA, 25 bp, Homo sapien
gaaagtgcgctttctgacctgagaa

SEQ ID NO: 3125443 - DNA, 25 bp, Homo sapien
cagcgtattttcttccctagtgaga

SEQ ID NO: 3125444 - DNA, 25 bp, Homo sapien
gaacgaggatcacaaggtttgtctg

SEQ ID NO: 3125445 - DNA, 25 bp, Homo sapien
gtcgactggaacgaggatcacaagg

SEQ ID NO: 3125446 - DNA, 25 bp, Homo sapien
gactggaacgaggatcacaaggttt

SEQ ID NO: 3125447 - DNA, 25 bp, Homo sapien
tggaacgaggatcacaaggtttgtc

SEQ ID NO: 3125448 - DNA, 25 bp, Homo sapien
gaaaagtggttgaactgccactcac

SEQ ID NO: 3125449 - DNA, 25 bp, Homo sapien
caggtctcctgctactcagaggaag

SEQ ID NO: 3125450 - DNA, 25 bp, Homo sapien
aaatcatcacagaggtcgacacggg

SEQ ID NO: 3125451 - DNA, 25 bp, Homo sapien
ctcagggagagaagtccgctggatt

SEQ ID NO: 3125452 - DNA, 25 bp, Homo sapien
gtttgagagtgctcccgggacagca

SEQ ID NO: 3125453 - DNA, 25 bp, Homo sapien
tttgagagtgctcccgggacagcat

SEQ ID NO: 3125454 - DNA, 25 bp, Homo sapien
tcgcctgtcggtgtcttctgcgcca

SEQ ID NO: 3125455 - DNA, 25 bp, Homo sapien
cgcctgtcggtgtcttctgcgccaa

SEQ ID NO: 3125456 - DNA, 25 bp, Homo sapien
tgtgtcggggtcgacgaagagaggt

SEQ ID NO: 3125457 - DNA, 25 bp, Homo sapien
tggactcctgatgtgtcggggtcga

SEQ ID NO: 3125458 - DNA, 25 bp, Homo sapien
ctcctgatgtgtcggggtcgacgaa

SEQ ID NO: 3125459 - DNA, 25 bp, Homo sapien
ccctccctcgcagggaagcgagtgt

SEQ ID NO: 3125460 - DNA, 25 bp, Homo sapien
gggagcccaatcgataagctgtctg

SEQ ID NO: 3125461 - DNA, 25 bp, Homo sapien
acggagaccctgttcgtatgcacat

SEQ ID NO: 3125462 - DNA, 25 bp, Homo sapien
catcggtgtgcttgaatgctcataa

SEQ ID NO: 3125463 - DNA, 25 bp, Homo sapien
gtagttttcacacacgtcacacgga

SEQ ID NO: 3125464 - DNA, 25 bp, Homo sapien
tcagaaggcttcctgtgccggatgt

SEQ ID NO: 3125465 - DNA, 25 bp, Homo sapien
aaggcttcctgtgccggatgtaaag

SEQ ID NO: 3125466 - DNA, 25 bp, Homo sapien
cttcctgtgccggatgtaaagtgtc

SEQ ID NO: 3125467 - DNA, 25 bp, Homo sapien
gaaggcttcctgtgccggatgtaaa

SEQ ID NO: 3125468 - DNA, 25 bp, Homo sapien
tataccgtagaaaagcccggctgac

SEQ ID NO: 3125469 - DNA, 25 bp, Homo sapien
catcggagacgtttaaaagcaggga

SEQ ID NO: 3125470 - DNA, 25 bp, Homo sapien
ggattctcgcatcgatcgttcagga

SEQ ID NO: 3125471 - DNA, 25 bp, Homo sapien
caaaataagccgtgcatatcctgga

SEQ ID NO: 3125472 - DNA, 25 bp, Homo sapien
gctcttgtggaagctagattgccaa

SEQ ID NO: 3125473 - DNA, 25 bp, Homo sapien
gtttgtgctgggatgaacctccaag

SEQ ID NO: 3125474 - DNA, 25 bp, Homo sapien
gaaagtgcgctttctgacctgagaa

SEQ ID NO: 3125475 - DNA, 25 bp, Homo sapien
cagcgtattttcttccctagtgaga

SEQ ID NO: 3125476 - DNA, 25 bp, Homo sapien
ctggaacgaggatcacaaggtttgt

SEQ ID NO: 3125477 - DNA, 25 bp, Homo sapien
ggaacgaggatcacaaggtttgtct

SEQ ID NO: 3125478 - DNA, 25 bp, Homo sapien
gaacgaggatcacaaggtttgtctg

SEQ ID NO: 3125479 - DNA, 25 bp, Homo sapien
tggaacgaggatcacaaggtttgtc

SEQ ID NO: 3125480 - DNA, 25 bp, Homo sapien
caggtctcctgctactcagaggaag

SEQ ID NO: 3125481 - DNA, 25 bp, Homo sapien
gaaaagtggttgaactgccactcac

SEQ ID NO: 3125482 - DNA, 25 bp, Homo sapien
ctcagggagagaagtccgctggatt

SEQ ID NO: 3125483 - DNA, 25 bp, Homo sapien
aaatcatcacagaggtcgacacggg

SEQ ID NO: 3125484 - DNA, 25 bp, Homo sapien
tttgagagtgctcccgggacagcat

SEQ ID NO: 3125485 - DNA, 25 bp, Homo sapien
gtttgagagtgctcccgggacagca

SEQ ID NO: 3125486 - DNA, 25 bp, Homo sapien
cgcctgtcggtgtcttctgcgccaa

SEQ ID NO: 3125487 - DNA, 25 bp, Homo sapien
tcgcctgtcggtgtcttctgcgcca

SEQ ID NO: 3125488 - DNA, 25 bp, Homo sapien
ccctccctcgcagggaagcgagtgt

SEQ ID NO: 3125489 - DNA, 25 bp, Homo sapien
ctcctgatgtgtcggggtcgacgaa

SEQ ID NO: 3125490 - DNA, 25 bp, Homo sapien
tgtgtcggggtcgacgaagagaggt

SEQ ID NO: 3125491 - DNA, 25 bp, Homo sapien
tggactcctgatgtgtcggggtcga

SEQ ID NO: 3125492 - DNA, 25 bp, Homo sapien
gggagcccaatcgataagctgtctg

SEQ ID NO: 3125493 - DNA, 25 bp, Homo sapien
acggagaccctgttcgtatgcacat

SEQ ID NO: 3125494 - DNA, 25 bp, Homo sapien
gtagttttcacacacgtcacacgga

SEQ ID NO: 3125495 - DNA, 25 bp, Homo sapien
catcggtgtgcttgaatgctcataa

SEQ ID NO: 3125496 - DNA, 25 bp, Homo sapien
gaaggcttcctgtgccggatgtaaa

SEQ ID NO: 3125497 - DNA, 25 bp, Homo sapien
aaggcttcctgtgccggatgtaaag

SEQ ID NO: 3125498 - DNA, 25 bp, Homo sapien
tcagaaggcttcctgtgccggatgt

SEQ ID NO: 3125499 - DNA, 25 bp, Homo sapien
cttcctgtgccggatgtaaagtgtc

SEQ ID NO: 3125500 - DNA, 25 bp, Homo sapien
catcggagacgtttaaaagcaggga

SEQ ID NO: 3125501 - DNA, 25 bp, Homo sapien
tataccgtagaaaagcccggctgac

SEQ ID NO: 3125502 - DNA, 25 bp, Homo sapien
ggattctcgcatcgatcgttcagga

SEQ ID NO: 3125503 - DNA, 25 bp, Homo sapien
caaaataagccgtgcatatcctgga

SEQ ID NO: 3125504 - DNA, 25 bp, Homo sapien
gctcttgtggaagctagattgccaa

SEQ ID NO: 3125505 - DNA, 25 bp, Homo sapien
gtttgtgctgggatgaacctccaag

SEQ ID NO: 3125506 - DNA, 25 bp, Homo sapien
gaaagtgcgctttctgacctgagaa

SEQ ID NO: 3125507 - DNA, 25 bp, Homo sapien
cagcgtattttcttccctagtgaga

SEQ ID NO: 3125508 - DNA, 25 bp, Homo sapien
ctggaacgaggatcacaaggtttgt

SEQ ID NO: 3125509 - DNA, 25 bp, Homo sapien
ggaacgaggatcacaaggtttgtct

SEQ ID NO: 3125510 - DNA, 25 bp, Homo sapien
gaacgaggatcacaaggtttgtctg

SEQ ID NO: 3125511 - DNA, 25 bp, Homo sapien
tggaacgaggatcacaaggtttgtc

SEQ ID NO: 3125512 - DNA, 25 bp, Homo sapien
caggtctcctgctactcagaggaag

SEQ ID NO: 3125513 - DNA, 25 bp, Homo sapien
gaaaagtggttgaactgccactcac

SEQ ID NO: 3125514 - DNA, 25 bp, Homo sapien
ctcagggagagaagtccgctggatt

SEQ ID NO: 3125515 - DNA, 25 bp, Homo sapien
aaatcatcacagaggtcgacacggg

SEQ ID NO: 3125516 - DNA, 25 bp, Homo sapien
gtttgagagtgctcccgggacagca

SEQ ID NO: 3125517 - DNA, 25 bp, Homo sapien
tttgagagtgctcccgggacagcat

SEQ ID NO: 3125518 - DNA, 25 bp, Homo sapien
cgcctgtcggtgtcttctgcgccaa

SEQ ID NO: 3125519 - DNA, 25 bp, Homo sapien
tcgcctgtcggtgtcttctgcgcca

SEQ ID NO: 3125520 - DNA, 25 bp, Homo sapien
ctcctgatgtgtcggggtcgacgaa

SEQ ID NO: 3125521 - DNA, 25 bp, Homo sapien
tggactcctgatgtgtcggggtcga

SEQ ID NO: 3125522 - DNA, 25 bp, Homo sapien
ccctccctcgcagggaagcgagtgt

SEQ ID NO: 3125523 - DNA, 25 bp, Homo sapien
tgtgtcggggtcgacgaagagaggt

SEQ ID NO: 3125524 - DNA, 25 bp, Homo sapien
acggagaccctgttcgtatgcacat

SEQ ID NO: 3125525 - DNA, 25 bp, Homo sapien
gggagcccaatcgataagctgtctg

SEQ ID NO: 3125526 - DNA, 25 bp, Homo sapien
gtagttttcacacacgtcacacgga

SEQ ID NO: 3125527 - DNA, 25 bp, Homo sapien
catcggtgtgcttgaatgctcataa

SEQ ID NO: 3125528 - DNA, 25 bp, Homo sapien
tataccgtagaaaagcccggctgac

SEQ ID NO: 3125529 - DNA, 25 bp, Homo sapien
caaaataagccgtgcatatcctgga

SEQ ID NO: 3125530 - DNA, 25 bp, Homo sapien
ggattctcgcatcgatcgttcagga

SEQ ID NO: 3125531 - DNA, 25 bp, Homo sapien
catcggagacgtttaaaagcaggga

SEQ ID NO: 3125532 - DNA, 25 bp, Homo sapien
gtttgtgctgggatgaacctccaag

SEQ ID NO: 3125533 - DNA, 25 bp, Homo sapien
gctcttgtggaagctagattgccaa

SEQ ID NO: 3125534 - DNA, 25 bp, Homo sapien
gaaagtgcgctttctgacctgagaa

SEQ ID NO: 3125535 - DNA, 25 bp, Homo sapien
cagcgtattttcttccctagtgaga

SEQ ID NO: 3125536 - DNA, 25 bp, Homo sapien
gaaaagtggttgaactgccactcac

SEQ ID NO: 3125537 - DNA, 25 bp, Homo sapien
caggtctcctgctactcagaggaag

SEQ ID NO: 3125538 - DNA, 25 bp, Homo sapien
aaatcatcacagaggtcgacacggg

SEQ ID NO: 3125539 - DNA, 25 bp, Homo sapien
ctcagggagagaagtccgctggatt

SEQ ID NO: 3125540 - DNA, 25 bp, Homo sapien
tttgagagtgctcccgggacagcat

SEQ ID NO: 3125541 - DNA, 25 bp, Homo sapien
gtttgagagtgctcccgggacagca

SEQ ID NO: 3125542 - DNA, 25 bp, Homo sapien
cgcctgtcggtgtcttctgcgccaa

SEQ ID NO: 3125543 - DNA, 25 bp, Homo sapien
tcgcctgtcggtgtcttctgcgcca

SEQ ID NO: 3125544 - DNA, 25 bp, Homo sapien
tgtgtcggggtcgacgaagagaggt

SEQ ID NO: 3125545 - DNA, 25 bp, Homo sapien
ctcctgatgtgtcggggtcgacgaa

SEQ ID NO: 3125546 - DNA, 25 bp, Homo sapien
tggactcctgatgtgtcggggtcga

SEQ ID NO: 3125547 - DNA, 25 bp, Homo sapien
ccctccctcgcagggaagcgagtgt

SEQ ID NO: 3125548 - DNA, 25 bp, Homo sapien
acggagaccctgttcgtatgcacat

SEQ ID NO: 3125549 - DNA, 25 bp, Homo sapien
gggagcccaatcgataagctgtctg

SEQ ID NO: 3125550 - DNA, 25 bp, Homo sapien
gtagttttcacacacgtcacacgga

SEQ ID NO: 3125551 - DNA, 25 bp, Homo sapien
catcggtgtgcttgaatgctcataa

SEQ ID NO: 3125552 - DNA, 25 bp, Homo sapien
gaaggcttcctgtgccggatgtaaa

SEQ ID NO: 3125553 - DNA, 25 bp, Homo sapien
cttcctgtgccggatgtaaagtgtc

SEQ ID NO: 3125554 - DNA, 25 bp, Homo sapien
aaggcttcctgtgccggatgtaaag

SEQ ID NO: 3125555 - DNA, 25 bp, Homo sapien
tcagaaggcttcctgtgccggatgt

SEQ ID NO: 3125556 - DNA, 25 bp, Homo sapien
catcggagacgtttaaaagcaggga

SEQ ID NO: 3125557 - DNA, 25 bp, Homo sapien
caaaataagccgtgcatatcctgga

SEQ ID NO: 3125558 - DNA, 25 bp, Homo sapien
tataccgtagaaaagcccggctgac

SEQ ID NO: 3125559 - DNA, 25 bp, Homo sapien
ggattctcgcatcgatcgttcagga

SEQ ID NO: 3125560 - DNA, 25 bp, Homo sapien
gctcttgtggaagctagattgccaa

SEQ ID NO: 3125561 - DNA, 25 bp, Homo sapien
gaaagtgcgctttctgacctgagaa

SEQ ID NO: 3125562 - DNA, 25 bp, Homo sapien
cagcgtattttcttccctagtgaga

SEQ ID NO: 3125563 - DNA, 25 bp, Homo sapien
gtttgtgctgggatgaacctccaag

SEQ ID NO: 3125564 - DNA, 25 bp, Homo sapien
gtcgactggaacgaggatcacaagg

SEQ ID NO: 3125565 - DNA, 25 bp, Homo sapien
gaacgaggatcacaaggtttgtctg

SEQ ID NO: 3125566 - DNA, 25 bp, Homo sapien
gactggaacgaggatcacaaggttt

SEQ ID NO: 3125567 - DNA, 25 bp, Homo sapien
tggaacgaggatcacaaggtttgtc

SEQ ID NO: 3125568 - DNA, 25 bp, Homo sapien
aaatcatcacagaggtcgacacggg

SEQ ID NO: 3125569 - DNA, 25 bp, Homo sapien
gaaaagtggttgaactgccactcac

SEQ ID NO: 3125570 - DNA, 25 bp, Homo sapien
caggtctcctgctactcagaggaag

SEQ ID NO: 3125571 - DNA, 25 bp, Homo sapien
ctcagggagagaagtccgctggatt

SEQ ID NO: 3125572 - DNA, 25 bp, Homo sapien
tttgagagtgctcccgggacagcat

SEQ ID NO: 3125573 - DNA, 25 bp, Homo sapien
gtttgagagtgctcccgggacagca

SEQ ID NO: 3125574 - DNA, 25 bp, Homo sapien
cgcctgtcggtgtcttctgcgccaa

SEQ ID NO: 3125575 - DNA, 25 bp, Homo sapien
tcgcctgtcggtgtcttctgcgcca

SEQ ID NO: 3125576 - DNA, 25 bp, Homo sapien
ccctccctcgcagggaagcgagtgt

SEQ ID NO: 3125577 - DNA, 25 bp, Homo sapien
tgtgtcggggtcgacgaagagaggt

SEQ ID NO: 3125578 - DNA, 25 bp, Homo sapien
ctcctgatgtgtcggggtcgacgaa

SEQ ID NO: 3125579 - DNA, 25 bp, Homo sapien
tggactcctgatgtgtcggggtcga

SEQ ID NO: 3125580 - DNA, 25 bp, Homo sapien
catcggtgtgcttgaatgctcataa

SEQ ID NO: 3125581 - DNA, 25 bp, Homo sapien
gggagcccaatcgataagctgtctg

SEQ ID NO: 3125582 - DNA, 25 bp, Homo sapien
acggagaccctgttcgtatgcacat

SEQ ID NO: 3125583 - DNA, 25 bp, Homo sapien
gtagttttcacacacgtcacacgga

SEQ ID NO: 3125584 - DNA, 25 bp, Homo sapien
caaaataagccgtgcatatcctgga

SEQ ID NO: 3125585 - DNA, 25 bp, Homo sapien
catttccagttacgcattgtatggt

SEQ ID NO: 3125586 - DNA, 25 bp, Homo sapien
ggattctcgcatcgatcgttcagga

SEQ ID NO: 3125587 - DNA, 25 bp, Homo sapien
cgttcaggatcggagatgttgcctc

SEQ ID NO: 3125588 - DNA, 25 bp, Homo sapien
gtgaaacagaggatagcgtgccatt

SEQ ID NO: 3125589 - DNA, 25 bp, Homo sapien
tataccgtagaaaagcccggctgac

SEQ ID NO: 3125590 - DNA, 25 bp, Homo sapien
catcggagacgtttaaaagcaggga

SEQ ID NO: 3125591 - DNA, 25 bp, Homo sapien
ggatcaacgtttcctagagatgaaa

SEQ ID NO: 3125592 - DNA, 25 bp, Homo sapien
caaatggtagaaacatgcactgaag

SEQ ID NO: 3125593 - DNA, 25 bp, Homo sapien
caagacaagtctttgcatgaaatgc

SEQ ID NO: 3125594 - DNA, 25 bp, Homo sapien
gctcttgtggaagctagattgccaa

SEQ ID NO: 3125595 - DNA, 25 bp, Homo sapien
aaagtagactgtgaaagcctttggg

SEQ ID NO: 3125596 - DNA, 25 bp, Homo sapien
ttccagcgataacctttccacgttg

SEQ ID NO: 3125597 - DNA, 25 bp, Homo sapien
tgagcctattgattctctgtccgag

SEQ ID NO: 3125598 - DNA, 25 bp, Homo sapien
ttgattctctgtccgagtgaaatta

SEQ ID NO: 3125599 - DNA, 25 bp, Homo sapien
cctttccacgttgagcctattgatt

SEQ ID NO: 3125600 - DNA, 25 bp, Homo sapien
gaaagtgcgctttctgacctgagaa

SEQ ID NO: 3125601 - DNA, 25 bp, Homo sapien
gtttgtgctgggatgaacctccaag

SEQ ID NO: 3125602 - DNA, 25 bp, Homo sapien
gagagatccgtggaatcaaacagac

SEQ ID NO: 3125603 - DNA, 25 bp, Homo sapien
cagcgtattttcttccctagtgaga

SEQ ID NO: 3125604 - DNA, 25 bp, Homo sapien
gaacgaggatcacaaggtttgtctg

SEQ ID NO: 3125605 - DNA, 25 bp, Homo sapien
ggaacgaggatcacaaggtttgtct

SEQ ID NO: 3125606 - DNA, 25 bp, Homo sapien
ctggaacgaggatcacaaggtttgt

SEQ ID NO: 3125607 - DNA, 25 bp, Homo sapien
tggaacgaggatcacaaggtttgtc

SEQ ID NO: 3125608 - DNA, 25 bp, Homo sapien
aaatcatcacagaggtcgacacggg

SEQ ID NO: 3125609 - DNA, 25 bp, Homo sapien
caggtctcctgctactcagaggaag

SEQ ID NO: 3125610 - DNA, 25 bp, Homo sapien
gaaaagtggttgaactgccactcac

SEQ ID NO: 3125611 - DNA, 25 bp, Homo sapien
ctcagggagagaagtccgctggatt

SEQ ID NO: 3125612 - DNA, 25 bp, Homo sapien
tttgagagtgctcccgggacagcat

SEQ ID NO: 3125613 - DNA, 25 bp, Homo sapien
gtttgagagtgctcccgggacagca

SEQ ID NO: 3125614 - DNA, 25 bp, Homo sapien
tgatgtgagcttgcatagtacagag

SEQ ID NO: 3125615 - DNA, 25 bp, Homo sapien
ggcgatgtccaggtaagggtcaaaa

SEQ ID NO: 3125616 - DNA, 25 bp, Homo sapien
ttcgggcttcaccaactgttccaaa

SEQ ID NO: 3125617 - DNA, 25 bp, Homo sapien
tgcttgcctctatggaagccagcag

SEQ ID NO: 3125618 - DNA, 25 bp, Homo sapien
tcaggatattgcacattcttggcaa

SEQ ID NO: 3125619 - DNA, 25 bp, Homo sapien
tgttgcctgtgacatcggagaatct

SEQ ID NO: 3125620 - DNA, 25 bp, Homo sapien
catgtcaaggcactcaggatattgc

SEQ ID NO: 3125621 - DNA, 25 bp, Homo sapien
gctgagacatgtatggctgcatgtc

SEQ ID NO: 3125622 - DNA, 25 bp, Homo sapien
tgtgtcggggtcgacgaagagaggt

SEQ ID NO: 3125623 - DNA, 25 bp, Homo sapien
ccctccctcgcagggaagcgagtgt

SEQ ID NO: 3125624 - DNA, 25 bp, Homo sapien
ctcctgatgtgtcggggtcgacgaa

SEQ ID NO: 3125625 - DNA, 25 bp, Homo sapien
tggactcctgatgtgtcggggtcga

SEQ ID NO: 3125626 - DNA, 25 bp, Homo sapien
acggagaccctgttcgtatgcacat

SEQ ID NO: 3125627 - DNA, 25 bp, Homo sapien
catcggtgtgcttgaatgctcataa

SEQ ID NO: 3125628 - DNA, 25 bp, Homo sapien
gggagcccaatcgataagctgtctg

SEQ ID NO: 3125629 - DNA, 25 bp, Homo sapien
gtagttttcacacacgtcacacgga

SEQ ID NO: 3125630 - DNA, 25 bp, Homo sapien
catcggagacgtttaaaagcaggga

SEQ ID NO: 3125631 - DNA, 25 bp, Homo sapien
tataccgtagaaaagcccggctgac

SEQ ID NO: 3125632 - DNA, 25 bp, Homo sapien
caaaataagccgtgcatatcctgga

SEQ ID NO: 3125633 - DNA, 25 bp, Homo sapien
ggattctcgcatcgatcgttcagga

SEQ ID NO: 3125634 - DNA, 25 bp, Homo sapien
gctcttgtggaagctagattgccaa

SEQ ID NO: 3125635 - DNA, 25 bp, Homo sapien
gtttgtgctgggatgaacctccaag

SEQ ID NO: 3125636 - DNA, 25 bp, Homo sapien
gaaagtgcgctttctgacctgagaa

SEQ ID NO: 3125637 - DNA, 25 bp, Homo sapien
cagcgtattttcttccctagtgaga

SEQ ID NO: 3125638 - DNA, 25 bp, Homo sapien
caggtctcctgctactcagaggaag

SEQ ID NO: 3125639 - DNA, 25 bp, Homo sapien
aaatcatcacagaggtcgacacggg

SEQ ID NO: 3125640 - DNA, 25 bp, Homo sapien
ctcagggagagaagtccgctggatt

SEQ ID NO: 3125641 - DNA, 25 bp, Homo sapien
gaaaagtggttgaactgccactcac

SEQ ID NO: 3125642 - DNA, 25 bp, Homo sapien
tttgagagtgctcccgggacagcat

SEQ ID NO: 3125643 - DNA, 25 bp, Homo sapien
gtttgagagtgctcccgggacagca

SEQ ID NO: 3125644 - DNA, 25 bp, Homo sapien
ctcctgatgtgtcggggtcgacgaa

SEQ ID NO: 3125645 - DNA, 25 bp, Homo sapien
ccctccctcgcagggaagcgagtgt

SEQ ID NO: 3125646 - DNA, 25 bp, Homo sapien
cgcctgtcggtgtcttctgcgccaa

SEQ ID NO: 3125647 - DNA, 25 bp, Homo sapien
tcgcctgtcggtgtcttctgcgcca

SEQ ID NO: 3125648 - DNA, 25 bp, Homo sapien
gggagcccaatcgataagctgtctg

SEQ ID NO: 3125649 - DNA, 25 bp, Homo sapien
gtagttttcacacacgtcacacgga

SEQ ID NO: 3125650 - DNA, 25 bp, Homo sapien
acggagaccctgttcgtatgcacat

SEQ ID NO: 3125651 - DNA, 25 bp, Homo sapien
catcggtgtgcttgaatgctcataa

SEQ ID NO: 3125652 - DNA, 25 bp, Homo sapien
aaggcttcctgtgccggatgtaaag

SEQ ID NO: 3125653 - DNA, 25 bp, Homo sapien
cttcctgtgccggatgtaaagtgtc

SEQ ID NO: 3125654 - DNA, 25 bp, Homo sapien
tcagaaggcttcctgtgccggatgt

SEQ ID NO: 3125655 - DNA, 25 bp, Homo sapien
gaaggcttcctgtgccggatgtaaa

SEQ ID NO: 3125656 - DNA, 25 bp, Homo sapien
tataccgtagaaaagcccggctgac

SEQ ID NO: 3125657 - DNA, 25 bp, Homo sapien
catcggagacgtttaaaagcaggga

SEQ ID NO: 3125658 - DNA, 25 bp, Homo sapien
ggattctcgcatcgatcgttcagga

SEQ ID NO: 3125659 - DNA, 25 bp, Homo sapien
caaaataagccgtgcatatcctgga

SEQ ID NO: 3125660 - DNA, 25 bp, Homo sapien
gtttgtgctgggatgaacctccaag

SEQ ID NO: 3125661 - DNA, 25 bp, Homo sapien
gaaagtgcgctttctgacctgagaa

SEQ ID NO: 3125662 - DNA, 25 bp, Homo sapien
gctcttgtggaagctagattgccaa

SEQ ID NO: 3125663 - DNA, 25 bp, Homo sapien
cagcgtattttcttccctagtgaga

SEQ ID NO: 3125664 - DNA, 25 bp, Homo sapien
tggaacgaggatcacaaggtttgtc

SEQ ID NO: 3125665 - DNA, 25 bp, Homo sapien
gtcgactggaacgaggatcacaagg

SEQ ID NO: 3125666 - DNA, 25 bp, Homo sapien
gactggaacgaggatcacaaggttt

SEQ ID NO: 3125667 - DNA, 25 bp, Homo sapien
gaacgaggatcacaaggtttgtctg

SEQ ID NO: 3125668 - DNA, 25 bp, Homo sapien
ctcagggagagaagtccgctggatt

SEQ ID NO: 3125669 - DNA, 25 bp, Homo sapien
aaatcatcacagaggtcgacacggg

SEQ ID NO: 3125670 - DNA, 25 bp, Homo sapien
gaaaagtggttgaactgccactcac

SEQ ID NO: 3125671 - DNA, 25 bp, Homo sapien
caggtctcctgctactcagaggaag

SEQ ID NO: 3125672 - DNA, 25 bp, Homo sapien
tttgagagtgctcccgggacagcat

SEQ ID NO: 3125673 - DNA, 25 bp, Homo sapien
gtttgagagtgctcccgggacagca

SEQ ID NO: 3125674 - DNA, 25 bp, Homo sapien
catgtcaaggcactcaggatattgc

SEQ ID NO: 3125675 - DNA, 25 bp, Homo sapien
cattgagttcttcgggcttcaccaa

SEQ ID NO: 3125676 - DNA, 25 bp, Homo sapien
tgcttgcctctatggaagccagcag

SEQ ID NO: 3125677 - DNA, 25 bp, Homo sapien
ggcgatgtccaggtaagggtcaaaa

SEQ ID NO: 3125678 - DNA, 25 bp, Homo sapien
cagtagataagacagctggctgatg

SEQ ID NO: 3125679 - DNA, 25 bp, Homo sapien
cagctttcagtagataagacagctg

SEQ ID NO: 3125680 - DNA, 25 bp, Homo sapien
atccagagaaggcatgggtccacac

SEQ ID NO: 3125681 - DNA, 25 bp, Homo sapien
ggctgatggggtagggatccagaga

SEQ ID NO: 3125682 - DNA, 25 bp, Homo sapien
ccataagtgaataacaggcataaat

SEQ ID NO: 3125683 - DNA, 25 bp, Homo sapien
tggacttgggacatataagttttcc

SEQ ID NO: 3125684 - DNA, 25 bp, Homo sapien
gctgtgtagggttatttcaagtccc

SEQ ID NO: 3125685 - DNA, 25 bp, Homo sapien
cttgggacatataagttttccataa

SEQ ID NO: 3125686 - DNA, 25 bp, Homo sapien
ggtggcacgggttggagggcctggc

SEQ ID NO: 3125687 - DNA, 25 bp, Homo sapien
gaggctgaggtggcacgggttggag

SEQ ID NO: 3125688 - DNA, 25 bp, Homo sapien
tgaggtggcacgggttggagggcct

SEQ ID NO: 3125689 - DNA, 25 bp, Homo sapien
ggctgaggtggcacgggttggaggg

SEQ ID NO: 3125690 - DNA, 25 bp, Homo sapien
tcagtatccgcctcaggccagataa

SEQ ID NO: 3125691 - DNA, 25 bp, Homo sapien
ccgagacggcgggacctgcacaagc

SEQ ID NO: 3125692 - DNA, 25 bp, Homo sapien
tcaggccagataacccctctgggcc

SEQ ID NO: 3125693 - DNA, 25 bp, Homo sapien
gggacctgcacaagccgccctattc

SEQ ID NO: 3125694 - DNA, 25 bp, Homo sapien
gtccctggagcctctctaactggaa

SEQ ID NO: 3125695 - DNA, 25 bp, Homo sapien
agctcacctccctttacttcaacgt

SEQ ID NO: 3125696 - DNA, 25 bp, Homo sapien
tcattgcatagatttagcagggaaa

SEQ ID NO: 3125697 - DNA, 25 bp, Homo sapien
tctcttctatccctcagaaggctct

SEQ ID NO: 3125698 - DNA, 25 bp, Homo sapien
taaagaagaaaatggcgaagaggag

SEQ ID NO: 3125699 - DNA, 25 bp, Homo sapien
atggcgaagaggaggacagcaatcc

SEQ ID NO: 3125700 - DNA, 25 bp, Homo sapien
aatggcgaagaggaggacagcaatc

SEQ ID NO: 3125701 - DNA, 25 bp, Homo sapien
gaaaatggcgaagaggaggacagca

SEQ ID NO: 3125702 - DNA, 25 bp, Homo sapien
taatgttcgcatgctgaatgcagta

SEQ ID NO: 3125703 - DNA, 25 bp, Homo sapien
tgcagtaggctatgctctggtgtgg

SEQ ID NO: 3125704 - DNA, 25 bp, Homo sapien
ctgtgattaatgttcgcatgctgaa

SEQ ID NO: 3125705 - DNA, 25 bp, Homo sapien
gtgattaatgttcgcatgctgaatg

SEQ ID NO: 3125706 - DNA, 25 bp, Homo sapien
tcgaatctactttgggtgtctggta

SEQ ID NO: 3125707 - DNA, 25 bp, Homo sapien
gggttattgtaaccattcattggtc

SEQ ID NO: 3125708 - DNA, 25 bp, Homo sapien
tgcagaagagggttattgtaaccat

SEQ ID NO: 3125709 - DNA, 25 bp, Homo sapien
gagggttattgtaaccattcattgg

SEQ ID NO: 3125710 - DNA, 25 bp, Homo sapien
gaagagggttattgtaaccattcat

SEQ ID NO: 3125711 - DNA, 25 bp, Homo sapien
tcagtcctttttgggtgtagtgctc

SEQ ID NO: 3125712 - DNA, 25 bp, Homo sapien
caattcttggttgatgccccagagg

SEQ ID NO: 3125713 - DNA, 25 bp, Homo sapien
tgggtgtagtgctctcaattcttgg

SEQ ID NO: 3125714 - DNA, 25 bp, Homo sapien
tgctctcaattcttggttgatgccc

SEQ ID NO: 3125715 - DNA, 25 bp, Homo sapien
caatagactcaacatcacttccatc

SEQ ID NO: 3125716 - DNA, 25 bp, Homo sapien
taccgagttcgaaccaagaactatc

SEQ ID NO: 3125717 - DNA, 25 bp, Homo sapien
catccactaccgagttcgaaccaag

SEQ ID NO: 3125718 - DNA, 25 bp, Homo sapien
acttccatccactaccgagttcgaa

SEQ ID NO: 3125719 - DNA, 25 bp, Homo sapien
caggatctggatgaaacaccctgaa

SEQ ID NO: 3125720 - DNA, 25 bp, Homo sapien
tctggatgaaacaccctgaagatgt

SEQ ID NO: 3125721 - DNA, 25 bp, Homo sapien
tcatatcttatcaggatctggatga

SEQ ID NO: 3125722 - DNA, 25 bp, Homo sapien
ttatcaggatctggatgaaacaccc

SEQ ID NO: 3125723 - DNA, 25 bp, Homo sapien
ccttcattacatataccaatggtat

SEQ ID NO: 3125724 - DNA, 25 bp, Homo sapien
tcatctagtgtgctgcatagtttgt

SEQ ID NO: 3125725 - DNA, 25 bp, Homo sapien
agcaatacactgtttttgtcctgga

SEQ ID NO: 3125726 - DNA, 25 bp, Homo sapien
aatggtatcatctagtgtgctgcat

SEQ ID NO: 3125727 - DNA, 25 bp, Homo sapien
ctggaggaactgtgaacatcaagga

SEQ ID NO: 3125728 - DNA, 25 bp, Homo sapien
tcaaggaaaggactccaaagacaaa

SEQ ID NO: 3125729 - DNA, 25 bp, Homo sapien
aggaactgtgaacatcaaggaaagg

SEQ ID NO: 3125730 - DNA, 25 bp, Homo sapien
tggaggaactgtgaacatcaaggaa

SEQ ID NO: 3125731 - DNA, 25 bp, Homo sapien
ttcagtctgcaatgataatattctg

SEQ ID NO: 3125732 - DNA, 25 bp, Homo sapien
tattctgaaggacattcatcattag

SEQ ID NO: 3125733 - DNA, 25 bp, Homo sapien
ttctgaaggacattcatcattagaa

SEQ ID NO: 3125734 - DNA, 25 bp, Homo sapien
catgttcatcagcattgcacttcag

SEQ ID NO: 3125735 - DNA, 25 bp, Homo sapien
tctctcaactgtcttcagctcttag

SEQ ID NO: 3125736 - DNA, 25 bp, Homo sapien
tcccaagtaacgtacttgctgtcag

SEQ ID NO: 3125737 - DNA, 25 bp, Homo sapien
tggtgaccgcatacaaagtcttggc

SEQ ID NO: 3125738 - DNA, 25 bp, Homo sapien
ttaggatctgctagatggcaaatga

SEQ ID NO: 3125739 - DNA, 25 bp, Homo sapien
ctgtatcaggcagaccgcatgagag

SEQ ID NO: 3125740 - DNA, 25 bp, Homo sapien
gactaataaagacatctgtatcagg

SEQ ID NO: 3125741 - DNA, 25 bp, Homo sapien
aaaggactaataaagacatctgtat

SEQ ID NO: 3125742 - DNA, 25 bp, Homo sapien
ggactaataaagacatctgtatcag

SEQ ID NO: 3125743 - DNA, 25 bp, Homo sapien
cagcaaacaactgctaggtgagagg

SEQ ID NO: 3125744 - DNA, 25 bp, Homo sapien
gcaaacaactgctaggtgagaggca

SEQ ID NO: 3125745 - DNA, 25 bp, Homo sapien
aacaactgctaggtgagaggcacag

SEQ ID NO: 3125746 - DNA, 25 bp, Homo sapien
caaacaactgctaggtgagaggcac

SEQ ID NO: 3125747 - DNA, 25 bp, Homo sapien
ctgctgcgtagcctccgcagggcac

SEQ ID NO: 3125748 - DNA, 25 bp, Homo sapien
cgactgttctgctgcgtagcctccg

SEQ ID NO: 3125749 - DNA, 25 bp, Homo sapien
tgttctgctgcgtagcctccgcagg

SEQ ID NO: 3125750 - DNA, 25 bp, Homo sapien
cgtagcctccgcagggcactttgta

SEQ ID NO: 3125751 - DNA, 25 bp, Homo sapien
caggtccactgtcttccctgtgtgg

SEQ ID NO: 3125752 - DNA, 25 bp, Homo sapien
ctgtcttccctgtgtggtgcaccat

SEQ ID NO: 3125753 - DNA, 25 bp, Homo sapien
aacaggtccactgtcttccctgtgt

SEQ ID NO: 3125754 - DNA, 25 bp, Homo sapien
ccactgtcttccctgtgtggtgcac

SEQ ID NO: 3125755 - DNA, 25 bp, Homo sapien
tggaagccaaactccgaattgatga

SEQ ID NO: 3125756 - DNA, 25 bp, Homo sapien
aatggaagccaaactccgaattgat

SEQ ID NO: 3125757 - DNA, 25 bp, Homo sapien
aataggaatggaagccaaactccga

SEQ ID NO: 3125758 - DNA, 25 bp, Homo sapien
ggaatggaagccaaactccgaattg

SEQ ID NO: 3125759 - DNA, 25 bp, Homo sapien
aaccaatacccagcattgtgtctgc

SEQ ID NO: 3125760 - DNA, 25 bp, Homo sapien
taaaccaatacccagcattgtgtct

SEQ ID NO: 3125761 - DNA, 25 bp, Homo sapien
acaagtaaaccaatacccagcattg

SEQ ID NO: 3125762 - DNA, 25 bp, Homo sapien
aagtaaaccaatacccagcattgtg

SEQ ID NO: 3125763 - DNA, 25 bp, Homo sapien
tcgtttggatacaaccttcttttgc

SEQ ID NO: 3125764 - DNA, 25 bp, Homo sapien
tgtatcgtttggatacaaccttctt

SEQ ID NO: 3125765 - DNA, 25 bp, Homo sapien
tgtgggtctgtatcgtttggataca

SEQ ID NO: 3125766 - DNA, 25 bp, Homo sapien
ggtctgtatcgtttggatacaacct

SEQ ID NO: 3125767 - DNA, 25 bp, Homo sapien
caggaacagcccagcgatgaccggc

SEQ ID NO: 3125768 - DNA, 25 bp, Homo sapien
agggctgactgccatgatgatgagc

SEQ ID NO: 3125769 - DNA, 25 bp, Homo sapien
aacagcccagcgatgaccggctgca

SEQ ID NO: 3125770 - DNA, 25 bp, Homo sapien
tcagggctgactgccatgatgatga

SEQ ID NO: 3125771 - DNA, 25 bp, Homo sapien
ggacaggttggagaggaagaagtac

SEQ ID NO: 3125772 - DNA, 25 bp, Homo sapien
cgatgtcaggcaaggacaggttgga

SEQ ID NO: 3125773 - DNA, 25 bp, Homo sapien
aaggacaggttggagaggaagaagt

SEQ ID NO: 3125774 - DNA, 25 bp, Homo sapien
gcaaggacaggttggagaggaagaa

SEQ ID NO: 3125775 - DNA, 25 bp, Homo sapien
acaatcatcttggggaccgtgtgga

SEQ ID NO: 3125776 - DNA, 25 bp, Homo sapien
cgctcaggagcatgtgtctcttcca

SEQ ID NO: 3125777 - DNA, 25 bp, Homo sapien
tggtcgtaggccatcacgctcagga

SEQ ID NO: 3125778 - DNA, 25 bp, Homo sapien
atcttggggaccgtgtggaggtgaa

SEQ ID NO: 3125779 - DNA, 25 bp, Homo sapien
ggaaatacaggttgatgttcctggt

SEQ ID NO: 3125780 - DNA, 25 bp, Homo sapien
cagggaaatacaggttgatgttcct

SEQ ID NO: 3125781 - DNA, 25 bp, Homo sapien
ggagttgagaaggttcccagaagac

SEQ ID NO: 3125782 - DNA, 25 bp, Homo sapien
ccagaagacattagaaatttccaca

SEQ ID NO: 3125783 - DNA, 25 bp, Homo sapien
ttagaccgtgctgctgtgcggccgc

SEQ ID NO: 3125784 - DNA, 25 bp, Homo sapien
actgcactctttctcggggaagatg

SEQ ID NO: 3125785 - DNA, 25 bp, Homo sapien
ctgaggccactgcactctttctcgg

SEQ ID NO: 3125786 - DNA, 25 bp, Homo sapien
gaccaccgtatacatcactgaggcc

SEQ ID NO: 3125787 - DNA, 25 bp, Homo sapien
aagcgaggaccgactgcagctctgg

SEQ ID NO: 3125788 - DNA, 25 bp, Homo sapien
actgcagctctggatcctctgaaag

SEQ ID NO: 3125789 - DNA, 25 bp, Homo sapien
cagcaaagcgaggaccgactgcagc

SEQ ID NO: 3125790 - DNA, 25 bp, Homo sapien
cgactgcagctctggatcctctgaa

SEQ ID NO: 3125791 - DNA, 25 bp, Homo sapien
acatctgtgtgaggcagccctcatg

SEQ ID NO: 3125792 - DNA, 25 bp, Homo sapien
atctgtgtgaggcagccctcatgag

SEQ ID NO: 3125793 - DNA, 25 bp, Homo sapien
ctgtgtgaggcagccctcatgagag

SEQ ID NO: 3125794 - DNA, 25 bp, Homo sapien
atgagagatgactctactatacgac

SEQ ID NO: 3125795 - DNA, 25 bp, Homo sapien
gaatgaaggtgacgattttaaagta

SEQ ID NO: 3125796 - DNA, 25 bp, Homo sapien
gagaatgaaggtgacgattttaaag

SEQ ID NO: 3125797 - DNA, 25 bp, Homo sapien
agaatgaaggtgacgattttaaagt

SEQ ID NO: 3125798 - DNA, 25 bp, Homo sapien
aacaggtccactgtcttccctgtgt

SEQ ID NO: 3125799 - DNA, 25 bp, Homo sapien
caggtccactgtcttccctgtgtgg

SEQ ID NO: 3125800 - DNA, 25 bp, Homo sapien
ctgtcttccctgtgtggtgcaccat

SEQ ID NO: 3125801 - DNA, 25 bp, Homo sapien
ccactgtcttccctgtgtggtgcac

SEQ ID NO: 3125802 - DNA, 25 bp, Homo sapien
tgctgagaggatagtttgcacattg

SEQ ID NO: 3125803 - DNA, 25 bp, Homo sapien
actgctgagaggatagtttgcacat

SEQ ID NO: 3125804 - DNA, 25 bp, Homo sapien
ctgagaggatagtttgcacattggt

SEQ ID NO: 3125805 - DNA, 25 bp, Homo sapien
acactgctgagaggatagtttgcac

SEQ ID NO: 3125806 - DNA, 25 bp, Homo sapien
ccacgagggaaaccgggcgtggcag

SEQ ID NO: 3125807 - DNA, 25 bp, Homo sapien
ctccagccacgagggaaaccgggcg

SEQ ID NO: 3125808 - DNA, 25 bp, Homo sapien
gccacgagggaaaccgggcgtggca

SEQ ID NO: 3125809 - DNA, 25 bp, Homo sapien
ctgctccagccacgagggaaaccgg

SEQ ID NO: 3125810 - DNA, 25 bp, Homo sapien
ccacagcctgccaccagtggtagat

SEQ ID NO: 3125811 - DNA, 25 bp, Homo sapien
catccagcactgtcccttacagtcg

SEQ ID NO: 3125812 - DNA, 25 bp, Homo sapien
ctcctgcaggcgaggctcacatcca

SEQ ID NO: 3125813 - DNA, 25 bp, Homo sapien
ccagcactgtcccttacagtcgcca

SEQ ID NO: 3125814 - DNA, 25 bp, Homo sapien
cgcctcctgcaggcgaggctcacat

SEQ ID NO: 3125815 - DNA, 25 bp, Homo sapien
atgcccctcgctgagataggccctt

SEQ ID NO: 3125816 - DNA, 25 bp, Homo sapien
cctcgctgagataggcccttccctc

SEQ ID NO: 3125817 - DNA, 25 bp, Homo sapien
ctatgcccctcgctgagataggccc

SEQ ID NO: 3125818 - DNA, 25 bp, Homo sapien
cccctcgctgagataggcccttccc

SEQ ID NO: 3125819 - DNA, 25 bp, Homo sapien
ccctccgcgtcgctctcgtccgagt

SEQ ID NO: 3125820 - DNA, 25 bp, Homo sapien
gcgtcgctctcgtccgagttgtcct

SEQ ID NO: 3125821 - DNA, 25 bp, Homo sapien
tccgcgtcgctctcgtccgagttgt

SEQ ID NO: 3125822 - DNA, 25 bp, Homo sapien
tcgccctccgcgtcgctctcgtccg

SEQ ID NO: 3125823 - DNA, 25 bp, Homo sapien
tcagctgtattttcgaaccactgtg

SEQ ID NO: 3125824 - DNA, 25 bp, Homo sapien
cctttgaagacagcacgggactcgg

SEQ ID NO: 3125825 - DNA, 25 bp, Homo sapien
ctaagggcccgcagggtttcagctg

SEQ ID NO: 3125826 - DNA, 25 bp, Homo sapien
caaggctccactccgccttagaggg

SEQ ID NO: 3125827 - DNA, 25 bp, Homo sapien
gccgctccgccactcccttctcctg

SEQ ID NO: 3125828 - DNA, 25 bp, Homo sapien
gccagcaacgccgtcacaccctcct

SEQ ID NO: 3125829 - DNA, 25 bp, Homo sapien
ctgccagccgctccgccactccctt

SEQ ID NO: 3125830 - DNA, 25 bp, Homo sapien
ggggggccagcaacgccgtcacacc

SEQ ID NO: 3125831 - DNA, 25 bp, Homo sapien
ggcacgtggagggtgtgcctccaga

SEQ ID NO: 3125832 - DNA, 25 bp, Homo sapien
acaggcacgtggagggtgtgcctcc

SEQ ID NO: 3125833 - DNA, 25 bp, Homo sapien
tccagagtctgtctcgccctctgga

SEQ ID NO: 3125834 - DNA, 25 bp, Homo sapien
cgtggagggtgtgcctccagagtct

SEQ ID NO: 3125835 - DNA, 25 bp, Homo sapien
gacgtgggggtggtcgctggagggc

SEQ ID NO: 3125836 - DNA, 25 bp, Homo sapien
cctgtccgacgtgggggtggtcgct

SEQ ID NO: 3125837 - DNA, 25 bp, Homo sapien
gtggtcgctggagggccgaggatgc

SEQ ID NO: 3125838 - DNA, 25 bp, Homo sapien
gcttggaagtggaccctgtccgacg

SEQ ID NO: 3125839 - DNA, 25 bp, Homo sapien
cctactgggcacagggtgaccccac

SEQ ID NO: 3125840 - DNA, 25 bp, Homo sapien
ccaccacttccaaggcccctactgg

SEQ ID NO: 3125841 - DNA, 25 bp, Homo sapien
ggcccctactgggcacagggtgacc

SEQ ID NO: 3125842 - DNA, 25 bp, Homo sapien
gcctccaaccaccacttccaaggcc

SEQ ID NO: 3125843 - DNA, 25 bp, Homo sapien
gtgtgtttcctgttgcacggcctgt

SEQ ID NO: 3125844 - DNA, 25 bp, Homo sapien
aaagaccaagaaatacatctgcgtc

SEQ ID NO: 3125845 - DNA, 25 bp, Homo sapien
gggagagacagagctgacagtcagg

SEQ ID NO: 3125846 - DNA, 25 bp, Homo sapien
agagacagagctgacagtcaggatg

SEQ ID NO: 3125847 - DNA, 25 bp, Homo sapien
agaccaagaaatacatctgcgtcag

SEQ ID NO: 3125848 - DNA, 25 bp, Homo sapien
ccgcagggcactttgtatgttcctg

SEQ ID NO: 3125849 - DNA, 25 bp, Homo sapien
tgtatgttcctgtttctcaggctat

SEQ ID NO: 3125850 - DNA, 25 bp, Homo sapien
gcctccgcagggcactttgtatgtt

SEQ ID NO: 3125851 - DNA, 25 bp, Homo sapien
ctccgcagggcactttgtatgttcc

SEQ ID NO: 3125852 - DNA, 25 bp, Homo sapien
ggaagccaaattccgaattgatgac

SEQ ID NO: 3125853 - DNA, 25 bp, Homo sapien
ggaatggaagccaaattccgaattg

SEQ ID NO: 3125854 - DNA, 25 bp, Homo sapien
aatggaagccaaattccgaattgat

SEQ ID NO: 3125855 - DNA, 25 bp, Homo sapien
aagccaaattccgaattgatgactc

SEQ ID NO: 3125856 - DNA, 25 bp, Homo sapien
acacgccgggctaggcgcactgaca

SEQ ID NO: 3125857 - DNA, 25 bp, Homo sapien
ccgggctaggcgcactgacagctac

SEQ ID NO: 3125858 - DNA, 25 bp, Homo sapien
ggctaggcgcactgacagctactgc

SEQ ID NO: 3125859 - DNA, 25 bp, Homo sapien
taggcgcactgacagctactgccgc

SEQ ID NO: 3125860 - DNA, 25 bp, Homo sapien
ctgggatgaacttatcgtagttctc

SEQ ID NO: 3125861 - DNA, 25 bp, Homo sapien
ggctgggatgaacttatcgtagttc

SEQ ID NO: 3125862 - DNA, 25 bp, Homo sapien
tgaacttatcgtagttctcatatac

SEQ ID NO: 3125863 - DNA, 25 bp, Homo sapien
gatgaacttatcgtagttctcatat

SEQ ID NO: 3125864 - DNA, 25 bp, Homo sapien
gaacccaccaattccagacacactt

SEQ ID NO: 3125865 - DNA, 25 bp, Homo sapien
aacccaccaattccagacacactta

SEQ ID NO: 3125866 - DNA, 25 bp, Homo sapien
cattccaacccggcgacagaacaaa

SEQ ID NO: 3125867 - DNA, 25 bp, Homo sapien
ttccaacccggcgacagaacaaaga

SEQ ID NO: 3125868 - DNA, 25 bp, Homo sapien
ccaacccggcgacagaacaaagact

SEQ ID NO: 3125869 - DNA, 25 bp, Homo sapien
caacccggcgacagaacaaagactc

SEQ ID NO: 3125870 - DNA, 25 bp, Homo sapien
tgggaaaaccgaggctgctcaaaac

SEQ ID NO: 3125871 - DNA, 25 bp, Homo sapien
cttgcatgatttggaggtggtggga

SEQ ID NO: 3125872 - DNA, 25 bp, Homo sapien
cctgtgtcttgcatgatttggaggt

SEQ ID NO: 3125873 - DNA, 25 bp, Homo sapien
tgctcaaaactcttggagaattccg

SEQ ID NO: 3125874 - DNA, 25 bp, Homo sapien
agggacgccccgagagggtggacat

SEQ ID NO: 3125875 - DNA, 25 bp, Homo sapien
agagaagggacgccccgagagggtg

SEQ ID NO: 3125876 - DNA, 25 bp, Homo sapien
ggagagaagagaagggacgccccga

SEQ ID NO: 3125877 - DNA, 25 bp, Homo sapien
agaagagaagggacgccccgagagg

SEQ ID NO: 3125878 - DNA, 25 bp, Homo sapien
ctgccccggcccaggtggtcgctgt

SEQ ID NO: 3125879 - DNA, 25 bp, Homo sapien
tgccccggcccaggtggtcgctgtc

SEQ ID NO: 3125880 - DNA, 25 bp, Homo sapien
agccagtttgcaccccgaaggtctc

SEQ ID NO: 3125881 - DNA, 25 bp, Homo sapien
cgccccagccagtttgcaccccgaa

SEQ ID NO: 3125882 - DNA, 25 bp, Homo sapien
cgcggagctgggcaacggggtcggc

SEQ ID NO: 3125883 - DNA, 25 bp, Homo sapien
cgggccggggcctgttccgcgctca

SEQ ID NO: 3125884 - DNA, 25 bp, Homo sapien
ctgcacttgggttagaggaaggacc

SEQ ID NO: 3125885 - DNA, 25 bp, Homo sapien
ctgggcaacggggtcggcgcgggct

SEQ ID NO: 3125886 - DNA, 25 bp, Homo sapien
gtgcgcttcccccttccagccccag

SEQ ID NO: 3125887 - DNA, 25 bp, Homo sapien
tcttctcctcgggaggtacgtcgtc

SEQ ID NO: 3125888 - DNA, 25 bp, Homo sapien
agcctcggggcttgcctgtggcttt

SEQ ID NO: 3125889 - DNA, 25 bp, Homo sapien
tctcctcgggaggtacgtcgtcctc

SEQ ID NO: 3125890 - DNA, 25 bp, Homo sapien
atgcagtaaagtgtatggggagatg

SEQ ID NO: 3125891 - DNA, 25 bp, Homo sapien
gaatgcagtaaagtgtatggggaga

SEQ ID NO: 3125892 - DNA, 25 bp, Homo sapien
ctgaatgcagtaaagtgtatgggga

SEQ ID NO: 3125893 - DNA, 25 bp, Homo sapien
cagtaaagtgtatggggagatgagg

SEQ ID NO: 3125894 - DNA, 25 bp, Homo sapien
gtgatcggccgtggaaaaccttcca

SEQ ID NO: 3125895 - DNA, 25 bp, Homo sapien
gatcggccgtggaaaaccttccaga

SEQ ID NO: 3125896 - DNA, 25 bp, Homo sapien
caccctttccgtgatcggccgtgga

SEQ ID NO: 3125897 - DNA, 25 bp, Homo sapien
tttctcaccctttccgtgatcggcc

SEQ ID NO: 3125898 - DNA, 25 bp, Homo sapien
ttctggtatcctggtctttggcaga

SEQ ID NO: 3125899 - DNA, 25 bp, Homo sapien
gcattctggtatcctggtctttggc

SEQ ID NO: 3125900 - DNA, 25 bp, Homo sapien
aaccaggatgcaaaccccagccgcc

SEQ ID NO: 3125901 - DNA, 25 bp, Homo sapien
ggatgcaaaccccagccgcctggct

SEQ ID NO: 3125902 - DNA, 25 bp, Homo sapien
tcaggtcatgcgattcccatttccc

SEQ ID NO: 3125903 - DNA, 25 bp, Homo sapien
caggtcatgcgattcccatttccct

SEQ ID NO: 3125904 - DNA, 25 bp, Homo sapien
ccttcaggtcatgcgattcccattt

SEQ ID NO: 3125905 - DNA, 25 bp, Homo sapien
atccttcaggtcatgcgattcccat

SEQ ID NO: 3125906 - DNA, 25 bp, Homo sapien
ctgctcaaacaaatcgctgctgatc

SEQ ID NO: 3125907 - DNA, 25 bp, Homo sapien
caaacaaatcgctgctgatcctcaa

SEQ ID NO: 3125908 - DNA, 25 bp, Homo sapien
gctcaaacaaatcgctgctgatcct

SEQ ID NO: 3125909 - DNA, 25 bp, Homo sapien
caaatcgctgctgatcctcaaacca

SEQ ID NO: 3125910 - DNA, 25 bp, Homo sapien
agcttcgaggtccagtatgagttca

SEQ ID NO: 3125911 - DNA, 25 bp, Homo sapien
tatttttgttaatagacagcttcga

SEQ ID NO: 3125912 - DNA, 25 bp, Homo sapien
accctgaacagccactttgctattt

SEQ ID NO: 3125913 - DNA, 25 bp, Homo sapien
tgaacagccactttgctatttttgt

SEQ ID NO: 3125914 - DNA, 25 bp, Homo sapien
aagttcatgaccaatggaccactcc

SEQ ID NO: 3125915 - DNA, 25 bp, Homo sapien
gaccaatggaccactccagaggaaa

SEQ ID NO: 3125916 - DNA, 25 bp, Homo sapien
catgaccaatggaccactccagagg

SEQ ID NO: 3125917 - DNA, 25 bp, Homo sapien
caatggaccactccagaggaaacaa

SEQ ID NO: 3125918 - DNA, 25 bp, Homo sapien
gacttcacttctcttcagcaatatt

SEQ ID NO: 3125919 - DNA, 25 bp, Homo sapien
acttcacttctcttcagcaatattt

SEQ ID NO: 3125920 - DNA, 25 bp, Homo sapien
caccataaaagcacagtcccccaaa

SEQ ID NO: 3125921 - DNA, 25 bp, Homo sapien
taagctgttgccaagcccgctctga

SEQ ID NO: 3125922 - DNA, 25 bp, Homo sapien
tgataagctgttgccaagcccgctc

SEQ ID NO: 3125923 - DNA, 25 bp, Homo sapien
tctgataagctgttgccaagcccgc

SEQ ID NO: 3125924 - DNA, 25 bp, Homo sapien
ttcttagagaatggaccaacgaatt

SEQ ID NO: 3125925 - DNA, 25 bp, Homo sapien
cttagagaatggaccaacgaatttc

SEQ ID NO: 3125926 - DNA, 25 bp, Homo sapien
gaatggaccaacgaatttcttctta

SEQ ID NO: 3125927 - DNA, 25 bp, Homo sapien
agagaatggaccaacgaatttcttc

SEQ ID NO: 3125928 - DNA, 25 bp, Homo sapien
ggtcctggtgaccaagtgtttccaa

SEQ ID NO: 3125929 - DNA, 25 bp, Homo sapien
cttgggtcctggtgaccaagtgttt

SEQ ID NO: 3125930 - DNA, 25 bp, Homo sapien
cctggtgaccaagtgtttccaatat

SEQ ID NO: 3125931 - DNA, 25 bp, Homo sapien
tgggtcctggtgaccaagtgtttcc

SEQ ID NO: 3125932 - DNA, 25 bp, Homo sapien
tcaaatgcaagacccttgagaccat

SEQ ID NO: 3125933 - DNA, 25 bp, Homo sapien
agaccatcagatgcaatttgggttc

SEQ ID NO: 3125934 - DNA, 25 bp, Homo sapien
ttgagaccatcagatgcaatttggg

SEQ ID NO: 3125935 - DNA, 25 bp, Homo sapien
ttcaaatgcaagacccttgagacca

SEQ ID NO: 3125936 - DNA, 25 bp, Homo sapien
gagcttcagtcattgttgaacattt

SEQ ID NO: 3125937 - DNA, 25 bp, Homo sapien
gtcattgttgaacatttttcaacca

SEQ ID NO: 3125938 - DNA, 25 bp, Homo sapien
atgagcttcagtcattgttgaacat

SEQ ID NO: 3125939 - DNA, 25 bp, Homo sapien
cagtcattgttgaacatttttcaac

SEQ ID NO: 3125940 - DNA, 25 bp, Homo sapien
ctgagcataagaggtcttcagtatc

SEQ ID NO: 3125941 - DNA, 25 bp, Homo sapien
agaggtcttcagtatctgattgttg

SEQ ID NO: 3125942 - DNA, 25 bp, Homo sapien
ggtcttcagtatctgattgttgtgt

SEQ ID NO: 3125943 - DNA, 25 bp, Homo sapien
tgagcataagaggtcttcagtatct

SEQ ID NO: 3125944 - DNA, 25 bp, Homo sapien
catttgccgcacctctcaggtcatg

SEQ ID NO: 3125945 - DNA, 25 bp, Homo sapien
tccatgcctttcaaacccagggttc

SEQ ID NO: 3125946 - DNA, 25 bp, Homo sapien
tttagcatgtatctcgtccctaggg

SEQ ID NO: 3125947 - DNA, 25 bp, Homo sapien
gaactactaccgtcaccacgaagct

SEQ ID NO: 3125948 - DNA, 25 bp, Homo sapien
ccagtaacaaactagctaaaataga

SEQ ID NO: 3125949 - DNA, 25 bp, Homo sapien
tggaaaggcatctcatgctcgtggc

SEQ ID NO: 3125950 - DNA, 25 bp, Homo sapien
gaaggacgtgaacaaatggaaaggc

SEQ ID NO: 3125951 - DNA, 25 bp, Homo sapien
catgctacccgaagcaatctagaga

SEQ ID NO: 3125952 - DNA, 25 bp, Homo sapien
cagcaatgaagctcccagccacatt

SEQ ID NO: 3125953 - DNA, 25 bp, Homo sapien
cagactggagatgtggatgaataac

SEQ ID NO: 3125954 - DNA, 25 bp, Homo sapien
ggaaaataaggttgtgtcactcaaa

SEQ ID NO: 3125955 - DNA, 25 bp, Homo sapien
aacatggctgagtgttggtacaggc

SEQ ID NO: 3125956 - DNA, 25 bp, Homo sapien
aatatttgatgcacagagatcactg

SEQ ID NO: 3125957 - DNA, 25 bp, Homo sapien
taatatttgatgcacagagatcact

SEQ ID NO: 3125958 - DNA, 25 bp, Homo sapien
acttccacctcggatcgagctgtgc

SEQ ID NO: 3125959 - DNA, 25 bp, Homo sapien
cctcggatcgagctgtgcctgatgc

SEQ ID NO: 3125960 - DNA, 25 bp, Homo sapien
cggtataaacttccacctcggatcg

SEQ ID NO: 3125961 - DNA, 25 bp, Homo sapien
tataaacttccacctcggatcgagc

SEQ ID NO: 3125962 - DNA, 25 bp, Homo sapien
ggtctagaggctttaagactcttac

SEQ ID NO: 3125963 - DNA, 25 bp, Homo sapien
tttagccggcgcctaagaaatggct

SEQ ID NO: 3125964 - DNA, 25 bp, Homo sapien
taaacagttctaggtctagaggctt

SEQ ID NO: 3125965 - DNA, 25 bp, Homo sapien
tgtattgttacagtaaagtaaacag

SEQ ID NO: 3125966 - DNA, 25 bp, Homo sapien
gaactcatccacatgccgtttaagg

SEQ ID NO: 3125967 - DNA, 25 bp, Homo sapien
gatatttacggcaacatcatcttca

SEQ ID NO: 3125968 - DNA, 25 bp, Homo sapien
tcaacaaagtatttagctcaacatg

SEQ ID NO: 3125969 - DNA, 25 bp, Homo sapien
ttagctcaacatgtatgcctctggg

SEQ ID NO: 3125970 - DNA, 25 bp, Homo sapien
tgaacaacgtatgctcctctgagaa

SEQ ID NO: 3125971 - DNA, 25 bp, Homo sapien
cttggatacccttggtggcaatgaa

SEQ ID NO: 3125972 - DNA, 25 bp, Homo sapien
gagaagaaagcactattatcttcag

SEQ ID NO: 3125973 - DNA, 25 bp, Homo sapien
gataaattggacttggctctccttc

SEQ ID NO: 3125974 - DNA, 25 bp, Homo sapien
ctgggccttgacaccctccctggcc

SEQ ID NO: 3125975 - DNA, 25 bp, Homo sapien
gtactgggccttgacaccctccctg

SEQ ID NO: 3125976 - DNA, 25 bp, Homo sapien
cgggatggcggtgaagtgggacggg

SEQ ID NO: 3125977 - DNA, 25 bp, Homo sapien
ccgggatggcggtgaagtgggacgg

SEQ ID NO: 3125978 - DNA, 25 bp, Homo sapien
attccgggaatgacgggcactgggg

SEQ ID NO: 3125979 - DNA, 25 bp, Homo sapien
gggaatgacgggcactggggctttg

SEQ ID NO: 3125980 - DNA, 25 bp, Homo sapien
ccgggaatgacgggcactggggctt

SEQ ID NO: 3125981 - DNA, 25 bp, Homo sapien
tggggctttgatgggtattgggtga

SEQ ID NO: 3125982 - DNA, 25 bp, Homo sapien
agttcactcacgatttcactctctg

SEQ ID NO: 3125983 - DNA, 25 bp, Homo sapien
gttcactcacgatttcactctctgt

SEQ ID NO: 3125984 - DNA, 25 bp, Homo sapien
tctttttttgtatgagtaccatgct

SEQ ID NO: 3125985 - DNA, 25 bp, Homo sapien
cactcacgatttcactctctgtttg

SEQ ID NO: 3125986 - DNA, 25 bp, Homo sapien
caaggttccagaagatttcctgggc

SEQ ID NO: 3125987 - DNA, 25 bp, Homo sapien
tgccatcaggcactctgtcttgcct

SEQ ID NO: 3125988 - DNA, 25 bp, Homo sapien
ggataggagtgaggctcatgccatc

SEQ ID NO: 3125989 - DNA, 25 bp, Homo sapien
gaagaagcggctgtctggataggag

SEQ ID NO: 3125990 - DNA, 25 bp, Homo sapien
ggactaaagatgttcaccactatgc

SEQ ID NO: 3125991 - DNA, 25 bp, Homo sapien
gctgggactaaagatgttcaccact

SEQ ID NO: 3125992 - DNA, 25 bp, Homo sapien
gggactaaagatgttcaccactatg

SEQ ID NO: 3125993 - DNA, 25 bp, Homo sapien
actaaagatgttcaccactatgcct

SEQ ID NO: 3125994 - DNA, 25 bp, Homo sapien
atgatgaagcaggatatttggagtc

SEQ ID NO: 3125995 - DNA, 25 bp, Homo sapien
gaagcaggatatttggagtcaatag

SEQ ID NO: 3125996 - DNA, 25 bp, Homo sapien
gatatttggagtcaatagccaatgt

SEQ ID NO: 3125997 - DNA, 25 bp, Homo sapien
ttggagtcaatagccaatgttttta

SEQ ID NO: 3125998 - DNA, 25 bp, Homo sapien
tcaatatgcagactttcacagccct

SEQ ID NO: 3125999 - DNA, 25 bp, Homo sapien
gagggagaagcttgatcaatatgca

SEQ ID NO: 3126000 - DNA, 25 bp, Homo sapien
tcacagcccttcagtcctggggtta

SEQ ID NO: 3126001 - DNA, 25 bp, Homo sapien
gggttattggaggagagacaggtct

SEQ ID NO: 3126002 - DNA, 25 bp, Homo sapien
ccatgtgcgccgaaagctcctgctg

SEQ ID NO: 3126003 - DNA, 25 bp, Homo sapien
cagggctcagagactggaccatcat

SEQ ID NO: 3126004 - DNA, 25 bp, Homo sapien
cagttcccatgtgcgccgaaagctc

SEQ ID NO: 3126005 - DNA, 25 bp, Homo sapien
gggaagccagttcccatgtgcgccg

SEQ ID NO: 3126006 - DNA, 25 bp, Homo sapien
gcttttattcttggtgagaactgag

SEQ ID NO: 3126007 - DNA, 25 bp, Homo sapien
caaatccagtgagggggtccatgta

SEQ ID NO: 3126008 - DNA, 25 bp, Homo sapien
aatttcgacagggttcagtgggact

SEQ ID NO: 3126009 - DNA, 25 bp, Homo sapien
ggctgtttgcacgtgtggtcagcaa

SEQ ID NO: 3126010 - DNA, 25 bp, Homo sapien
tgcaataaaaactgagcttgtgaaa

SEQ ID NO: 3126011 - DNA, 25 bp, Homo sapien
aatgttcattgtcattaccagtgat

SEQ ID NO: 3126012 - DNA, 25 bp, Homo sapien
tcactttgcaataaaaactgagctt

SEQ ID NO: 3126013 - DNA, 25 bp, Homo sapien
gcttgtgaaaatgttcattgtcatt

SEQ ID NO: 3126014 - DNA, 25 bp, Homo sapien
catttgacggatgtaaaatggccaa

SEQ ID NO: 3126015 - DNA, 25 bp, Homo sapien
gccatgtccatttgacggatgtaaa

SEQ ID NO: 3126016 - DNA, 25 bp, Homo sapien
aattataacatcatggctttcactt

SEQ ID NO: 3126017 - DNA, 25 bp, Homo sapien
ctgggccatgtccatttgacggatg

SEQ ID NO: 3126018 - DNA, 25 bp, Homo sapien
ggcaggatgggagctgacggcttct

SEQ ID NO: 3126019 - DNA, 25 bp, Homo sapien
ggagctgacggcttctcagcatctt

SEQ ID NO: 3126020 - DNA, 25 bp, Homo sapien
ctgtagggcaggatgggagctgacg

SEQ ID NO: 3126021 - DNA, 25 bp, Homo sapien
aggatgggagctgacggcttctcag

SEQ ID NO: 3126022 - DNA, 25 bp, Homo sapien
acctgtgtttggcactttgttgatc

SEQ ID NO: 3126023 - DNA, 25 bp, Homo sapien
ctcagtgcacctgtgtttggcactt

SEQ ID NO: 3126024 - DNA, 25 bp, Homo sapien
ttgctcagtgcacctgtgtttggca

SEQ ID NO: 3126025 - DNA, 25 bp, Homo sapien
gtgcacctgtgtttggcactttgtt

SEQ ID NO: 3126026 - DNA, 25 bp, Homo sapien
ctcctcattgctcacccactgaacc

SEQ ID NO: 3126027 - DNA, 25 bp, Homo sapien
gttctcctcattgctcacccactga

SEQ ID NO: 3126028 - DNA, 25 bp, Homo sapien
tcctcattgctcacccactgaaccc

SEQ ID NO: 3126029 - DNA, 25 bp, Homo sapien
agttctcctcattgctcacccactg

SEQ ID NO: 3126030 - DNA, 25 bp, Homo sapien
gctgggattgtgggtacacaccatc

SEQ ID NO: 3126031 - DNA, 25 bp, Homo sapien
gggattgtgggtacacaccatcaag

SEQ ID NO: 3126032 - DNA, 25 bp, Homo sapien
tgggattgtgggtacacaccatcaa

SEQ ID NO: 3126033 - DNA, 25 bp, Homo sapien
ctgggattgtgggtacacaccatca

SEQ ID NO: 3126034 - DNA, 25 bp, Homo sapien
tatgatagttttactcctgggaaac

SEQ ID NO: 3126035 - DNA, 25 bp, Homo sapien
acgtatgcccggacaccactctaaa

SEQ ID NO: 3126036 - DNA, 25 bp, Homo sapien
taagaagtgttgctatgccttttga

SEQ ID NO: 3126037 - DNA, 25 bp, Homo sapien
tgagggacgtcggtaaacatttcaa

SEQ ID NO: 3126038 - DNA, 25 bp, Homo sapien
aacttttcgggcgttattatctgca

SEQ ID NO: 3126039 - DNA, 25 bp, Homo sapien
tctcatataaggagagttaggtcca

SEQ ID NO: 3126040 - DNA, 25 bp, Homo sapien
tatataagcaacaggattagtagcc

SEQ ID NO: 3126041 - DNA, 25 bp, Homo sapien
gcaaccttgccacaaagtctggata

SEQ ID NO: 3126042 - DNA, 25 bp, Homo sapien
cctgaaatggtggtatttactgtgg

SEQ ID NO: 3126043 - DNA, 25 bp, Homo sapien
aatcgggaatgccccactttgttgc

SEQ ID NO: 3126044 - DNA, 25 bp, Homo sapien
tagaaagacattccttagcccaata

SEQ ID NO: 3126045 - DNA, 25 bp, Homo sapien
ccatttcccgacaatggctgtccaa

SEQ ID NO: 3126046 - DNA, 25 bp, Homo sapien
caatgatgttcgattgcgggttctc

SEQ ID NO: 3126047 - DNA, 25 bp, Homo sapien
tgtctctgcggaggtgccttccctt

SEQ ID NO: 3126048 - DNA, 25 bp, Homo sapien
cagaccctttaaggtatcgggctgg

SEQ ID NO: 3126049 - DNA, 25 bp, Homo sapien
tagttaagtcaccatcgtaggccag

SEQ ID NO: 3126050 - DNA, 25 bp, Homo sapien
agctgggtgtcgtcagtcacctggc

SEQ ID NO: 3126051 - DNA, 25 bp, Homo sapien
tgggtgtcgtcagtcacctggctct

SEQ ID NO: 3126052 - DNA, 25 bp, Homo sapien
gggtgtcgtcagtcacctggctctg

SEQ ID NO: 3126053 - DNA, 25 bp, Homo sapien
gctgggtgtcgtcagtcacctggct

SEQ ID NO: 3126054 - DNA, 25 bp, Homo sapien
atttcagtggtttcccaccagctcc

SEQ ID NO: 3126055 - DNA, 25 bp, Homo sapien
ctctgatttcagtggtttcccacca

SEQ ID NO: 3126056 - DNA, 25 bp, Homo sapien
tgatttcagtggtttcccaccagct

SEQ ID NO: 3126057 - DNA, 25 bp, Homo sapien
tcgctctgatttcagtggtttccca

SEQ ID NO: 3126058 - DNA, 25 bp, Homo sapien
ttctggcagcattactgtcattgaa

SEQ ID NO: 3126059 - DNA, 25 bp, Homo sapien
tggcagcattactgtcattgaagga

SEQ ID NO: 3126060 - DNA, 25 bp, Homo sapien
tctggcagcattactgtcattgaag

SEQ ID NO: 3126061 - DNA, 25 bp, Homo sapien
gcagcattactgtcattgaaggaaa

SEQ ID NO: 3126062 - DNA, 25 bp, Homo sapien
atacctttctcacaatcagcaaagc

SEQ ID NO: 3126063 - DNA, 25 bp, Homo sapien
ctggaataatggaatgatgccgctt

SEQ ID NO: 3126064 - DNA, 25 bp, Homo sapien
cccctggaataatggaatgatgccg

SEQ ID NO: 3126065 - DNA, 25 bp, Homo sapien
taatggaatgatgccgctttgttcc

SEQ ID NO: 3126066 - DNA, 25 bp, Homo sapien
gaataatggaatgatgccgctttgt

SEQ ID NO: 3126067 - DNA, 25 bp, Homo sapien
agcaagatggaaatgctctggaaac

SEQ ID NO: 3126068 - DNA, 25 bp, Homo sapien
tttagcaagatggaaatgctctgga

SEQ ID NO: 3126069 - DNA, 25 bp, Homo sapien
tcatgtttagcaagatggaaatgct

SEQ ID NO: 3126070 - DNA, 25 bp, Homo sapien
tgtttagcaagatggaaatgctctg

SEQ ID NO: 3126071 - DNA, 25 bp, Homo sapien
aaagctctgaatatggtctcatatc

SEQ ID NO: 3126072 - DNA, 25 bp, Homo sapien
ctggctgctggacataggagttcac

SEQ ID NO: 3126073 - DNA, 25 bp, Homo sapien
gctggacataggagttcacgagcat

SEQ ID NO: 3126074 - DNA, 25 bp, Homo sapien
ctgctggacataggagttcacgagc

SEQ ID NO: 3126075 - DNA, 25 bp, Homo sapien
ggctgctggacataggagttcacga

SEQ ID NO: 3126076 - DNA, 25 bp, Homo sapien
ctttctgtgctattgaaggagggct

SEQ ID NO: 3126077 - DNA, 25 bp, Homo sapien
tttttcagcatcgagggaacagcag

SEQ ID NO: 3126078 - DNA, 25 bp, Homo sapien
tcttcctttgtatcacccagattga

SEQ ID NO: 3126079 - DNA, 25 bp, Homo sapien
tcagcatcgagggaacagcagggtt

SEQ ID NO: 3126080 - DNA, 25 bp, Homo sapien
gaacccgatcactgcaccttgcaga

SEQ ID NO: 3126081 - DNA, 25 bp, Homo sapien
tcagtcctttttccgatgaatggct

SEQ ID NO: 3126082 - DNA, 25 bp, Homo sapien
agcagatgccatctgtacctccgct

SEQ ID NO: 3126083 - DNA, 25 bp, Homo sapien
gacaatgctgaacccgatcactgca

SEQ ID NO: 3126084 - DNA, 25 bp, Homo sapien
tcaggcctgcgagacaatacatttc

SEQ ID NO: 3126085 - DNA, 25 bp, Homo sapien
agcgaagcccggctgacaccctgat

SEQ ID NO: 3126086 - DNA, 25 bp, Homo sapien
tgttttcagccacatgcggggccct

SEQ ID NO: 3126087 - DNA, 25 bp, Homo sapien
gtttcagaggaagcgaagcccggct

SEQ ID NO: 3126088 - DNA, 25 bp, Homo sapien
cagcaagtcctaaccagggatgggt

SEQ ID NO: 3126089 - DNA, 25 bp, Homo sapien
acagcaagtcctaaccagggatggg

SEQ ID NO: 3126090 - DNA, 25 bp, Homo sapien
cacagcaagtcctaaccagggatgg

SEQ ID NO: 3126091 - DNA, 25 bp, Homo sapien
ctgcggagggtttgaggcaggccca

SEQ ID NO: 3126092 - DNA, 25 bp, Homo sapien
gaggcaggcccaggagcaaggccat

SEQ ID NO: 3126093 - DNA, 25 bp, Homo sapien
tgcggagggtttgaggcaggcccag

SEQ ID NO: 3126094 - DNA, 25 bp, Homo sapien
tttgaggcaggcccaggagcaaggc

SEQ ID NO: 3126095 - DNA, 25 bp, Homo sapien
cagaagctcagaatctgatgagtct

SEQ ID NO: 3126096 - DNA, 25 bp, Homo sapien
gagtctcttaactttgcttctaagc

SEQ ID NO: 3126097 - DNA, 25 bp, Homo sapien
gaagctcagaatctgatgagtctct

SEQ ID NO: 3126098 - DNA, 25 bp, Homo sapien
tctgcaaaatatcccacagaagctc

SEQ ID NO: 3126099 - DNA, 25 bp, Homo sapien
ttttaaagggtacaagcacatctgt

SEQ ID NO: 3126100 - DNA, 25 bp, Homo sapien
tttttaaagggtacaagcacatctg

SEQ ID NO: 3126101 - DNA, 25 bp, Homo sapien
tttaaagggtacaagcacatctgtg

SEQ ID NO: 3126102 - DNA, 25 bp, Homo sapien
cttgagtgcaaaccccaccctgggc

SEQ ID NO: 3126103 - DNA, 25 bp, Homo sapien
agtgcaaaccccaccctgggcaaag

SEQ ID NO: 3126104 - DNA, 25 bp, Homo sapien
cttcatgcagatgcacttgagtgca

SEQ ID NO: 3126105 - DNA, 25 bp, Homo sapien
tgggcaaagcaagggcccatttagg

SEQ ID NO: 3126106 - DNA, 25 bp, Homo sapien
tttgcagtaaggacagtcgccaact

SEQ ID NO: 3126107 - DNA, 25 bp, Homo sapien
gccagtgtgaaccagggtttgcagt

SEQ ID NO: 3126108 - DNA, 25 bp, Homo sapien
actgtctggctctatggaagaggca

SEQ ID NO: 3126109 - DNA, 25 bp, Homo sapien
ggcaactgctctcttggagcatgtg

SEQ ID NO: 3126110 - DNA, 25 bp, Homo sapien
aaagcaccaggcatacttgactgac

SEQ ID NO: 3126111 - DNA, 25 bp, Homo sapien
accaggcatacttgactgacggcgg

SEQ ID NO: 3126112 - DNA, 25 bp, Homo sapien
caccaggcatacttgactgacggcg

SEQ ID NO: 3126113 - DNA, 25 bp, Homo sapien
agcaccaggcatacttgactgacgg

SEQ ID NO: 3126114 - DNA, 25 bp, Homo sapien
gaccccttggccatcagggtctctg

SEQ ID NO: 3126115 - DNA, 25 bp, Homo sapien
ctgccagcaccttgtacagctcgtc

SEQ ID NO: 3126116 - DNA, 25 bp, Homo sapien
agggtctctgccagcaccttgtaca

SEQ ID NO: 3126117 - DNA, 25 bp, Homo sapien
ggtctctgccagcaccttgtacagc

SEQ ID NO: 3126118 - DNA, 25 bp, Homo sapien
tactctcggagagtgtgacggagcc

SEQ ID NO: 3126119 - DNA, 25 bp, Homo sapien
ggctgctgggttctcggcccattct

SEQ ID NO: 3126120 - DNA, 25 bp, Homo sapien
tgatggccgtactctcggagagtgt

SEQ ID NO: 3126121 - DNA, 25 bp, Homo sapien
agatgatggccgtactctcggagag

SEQ ID NO: 3126122 - DNA, 25 bp, Homo sapien
accaaggtaagcctgccctgcaccc

SEQ ID NO: 3126123 - DNA, 25 bp, Homo sapien
tgactgcaccaaggtaagcctgccc

SEQ ID NO: 3126124 - DNA, 25 bp, Homo sapien
tctgtgactgcaccaaggtaagcct

SEQ ID NO: 3126125 - DNA, 25 bp, Homo sapien
gggaccgtgtctgtgactgcaccaa

SEQ ID NO: 3126126 - DNA, 25 bp, Homo sapien
attgaggacattccctcggagctgc

SEQ ID NO: 3126127 - DNA, 25 bp, Homo sapien
tgagaggccattgaggacattccct

SEQ ID NO: 3126128 - DNA, 25 bp, Homo sapien
gagagctgatggaccgtcgcgacgt

SEQ ID NO: 3126129 - DNA, 25 bp, Homo sapien
gctgtctaagttggaagtgatgtct

SEQ ID NO: 3126130 - DNA, 25 bp, Homo sapien
ctctctggtctctagggtgaccaga

SEQ ID NO: 3126131 - DNA, 25 bp, Homo sapien
ccctctctggtctctagggtgacca

SEQ ID NO: 3126132 - DNA, 25 bp, Homo sapien
tctctggtctctagggtgaccagag

SEQ ID NO: 3126133 - DNA, 25 bp, Homo sapien
cctctctggtctctagggtgaccag

SEQ ID NO: 3126134 - DNA, 25 bp, Homo sapien
caggcatctgccgattggtctgctg

SEQ ID NO: 3126135 - DNA, 25 bp, Homo sapien
gtttcaggcatctgccgattggtct

SEQ ID NO: 3126136 - DNA, 25 bp, Homo sapien
ggcatctgccgattggtctgctggc

SEQ ID NO: 3126137 - DNA, 25 bp, Homo sapien
cgtgtttcaggcatctgccgattgg

SEQ ID NO: 3126138 - DNA, 25 bp, Homo sapien
tctagagggcttcgaatgacacaaa

SEQ ID NO: 3126139 - DNA, 25 bp, Homo sapien
agaaaaacagctctggttctcggcc

SEQ ID NO: 3126140 - DNA, 25 bp, Homo sapien
tggtgttccttagaaaaacagctct

SEQ ID NO: 3126141 - DNA, 25 bp, Homo sapien
ggcttcgaatgacacaaagcctgac

SEQ ID NO: 3126142 - DNA, 25 bp, Homo sapien
caggaccctgaccagcgacacaatg

SEQ ID NO: 3126143 - DNA, 25 bp, Homo sapien
tccacaggaccctgaccagcgacac

SEQ ID NO: 3126144 - DNA, 25 bp, Homo sapien
accctgaccagcgacacaatggctt

SEQ ID NO: 3126145 - DNA, 25 bp, Homo sapien
cacaggaccctgaccagcgacacaa

SEQ ID NO: 3126146 - DNA, 25 bp, Homo sapien
acagtgaaggccacatagacctcag

SEQ ID NO: 3126147 - DNA, 25 bp, Homo sapien
ctgggttgcggacagtgaaggccac

SEQ ID NO: 3126148 - DNA, 25 bp, Homo sapien
cagtgaaggccacatagacctcagg

SEQ ID NO: 3126149 - DNA, 25 bp, Homo sapien
cacgtctctgggttgcggacagtga

SEQ ID NO: 3126150 - DNA, 25 bp, Homo sapien
catgcaggcgcaggtggacatggag

SEQ ID NO: 3126151 - DNA, 25 bp, Homo sapien
ggggaccatgcaggcgcaggtggac

SEQ ID NO: 3126152 - DNA, 25 bp, Homo sapien
ggaccatgcaggcgcaggtggacat

SEQ ID NO: 3126153 - DNA, 25 bp, Homo sapien
accatgcaggcgcaggtggacatgg

SEQ ID NO: 3126154 - DNA, 25 bp, Homo sapien
tgtccagccctgaacccgactgcct

SEQ ID NO: 3126155 - DNA, 25 bp, Homo sapien
ctgtgtccagccctgaacccgactg

SEQ ID NO: 3126156 - DNA, 25 bp, Homo sapien
tgtgtccagccctgaacccgactgc

SEQ ID NO: 3126157 - DNA, 25 bp, Homo sapien
tccagccctgaacccgactgcctct

SEQ ID NO: 3126158 - DNA, 25 bp, Homo sapien
ggtgtagtgtggaggcatgagagcc

SEQ ID NO: 3126159 - DNA, 25 bp, Homo sapien
tgtggaggcatgagagccaggtggc

SEQ ID NO: 3126160 - DNA, 25 bp, Homo sapien
ctggagcagaggctgatggcattgg

SEQ ID NO: 3126161 - DNA, 25 bp, Homo sapien
atgagagccaggtggccgggctgca

SEQ ID NO: 3126162 - DNA, 25 bp, Homo sapien
gcttccgcttcccatgtgatcctgg

SEQ ID NO: 3126163 - DNA, 25 bp, Homo sapien
tccgcttcccatgtgatcctggccc

SEQ ID NO: 3126164 - DNA, 25 bp, Homo sapien
tcatgatgagcttccgcttcccatg

SEQ ID NO: 3126165 - DNA, 25 bp, Homo sapien
gcttcccatgtgatcctggcccggc

SEQ ID NO: 3126166 - DNA, 25 bp, Homo sapien
gttcagcattgccatctccaagtgc

SEQ ID NO: 3126167 - DNA, 25 bp, Homo sapien
tacagtgtgaggttcagcattgcca

SEQ ID NO: 3126168 - DNA, 25 bp, Homo sapien
ctacagtgtgaggttcagcattgcc

SEQ ID NO: 3126169 - DNA, 25 bp, Homo sapien
agcattgccatctccaagtgctctc

SEQ ID NO: 3126170 - DNA, 25 bp, Homo sapien
gacttgattctcacgatcctgttgg

SEQ ID NO: 3126171 - DNA, 25 bp, Homo sapien
tctcacgatcctgttggagtcgtgt

SEQ ID NO: 3126172 - DNA, 25 bp, Homo sapien
cacgatcctgttggagtcgtgtgtg

SEQ ID NO: 3126173 - DNA, 25 bp, Homo sapien
ttctcacgatcctgttggagtcgtg

SEQ ID NO: 3126174 - DNA, 25 bp, Homo sapien
gactcctggttcatgcttcagctcc

SEQ ID NO: 3126175 - DNA, 25 bp, Homo sapien
agactcctggttcatgcttcagctc

SEQ ID NO: 3126176 - DNA, 25 bp, Homo sapien
aagactcctggttcatgcttcagct

SEQ ID NO: 3126177 - DNA, 25 bp, Homo sapien
ggacggttcagttgaaaatctgacc

SEQ ID NO: 3126178 - DNA, 25 bp, Homo sapien
tggccatctcctggacggttcagtt

SEQ ID NO: 3126179 - DNA, 25 bp, Homo sapien
ttcttcaccactctccaggaatctt

SEQ ID NO: 3126180 - DNA, 25 bp, Homo sapien
tctctgagcctctaagacttctatt

SEQ ID NO: 3126181 - DNA, 25 bp, Homo sapien
gaagtaacctgttgacaagcgcaaa

SEQ ID NO: 3126182 - DNA, 25 bp, Homo sapien
gttgacaagcgcaaagaccctggga

SEQ ID NO: 3126183 - DNA, 25 bp, Homo sapien
gtgggaagtaacctgttgacaagcg

SEQ ID NO: 3126184 - DNA, 25 bp, Homo sapien
taacctgttgacaagcgcaaagacc

SEQ ID NO: 3126185 - DNA, 25 bp, Homo sapien
cctgagaagggggcagcggggatgg

SEQ ID NO: 3126186 - DNA, 25 bp, Homo sapien
gaagggggcagcggggatggccctg

SEQ ID NO: 3126187 - DNA, 25 bp, Homo sapien
ctgagaagggggcagcggggatggc

SEQ ID NO: 3126188 - DNA, 25 bp, Homo sapien
gagaagggggcagcggggatggccc

SEQ ID NO: 3126189 - DNA, 25 bp, Homo sapien
accagaaggaattgatgggctctct

SEQ ID NO: 3126190 - DNA, 25 bp, Homo sapien
caagtcccactgctcatttccccgg

SEQ ID NO: 3126191 - DNA, 25 bp, Homo sapien
cagaaggaattgatgggctctctcc

SEQ ID NO: 3126192 - DNA, 25 bp, Homo sapien
cactgctcatttccccggggctgca

SEQ ID NO: 3126193 - DNA, 25 bp, Homo sapien
gaagcagaaacaaaaattgaaggca

SEQ ID NO: 3126194 - DNA, 25 bp, Homo sapien
aagcagaaacaaaaattgaaggcac

SEQ ID NO: 3126195 - DNA, 25 bp, Homo sapien
ctgaagcagaaacaaaaattgaagg

SEQ ID NO: 3126196 - DNA, 25 bp, Homo sapien
tgaagcagaaacaaaaattgaaggc

SEQ ID NO: 3126197 - DNA, 25 bp, Homo sapien
gttgaggaacttggattcatggcag

SEQ ID NO: 3126198 - DNA, 25 bp, Homo sapien
gatgttgaggaacttggattcatgg

SEQ ID NO: 3126199 - DNA, 25 bp, Homo sapien
tgttgaggaacttggattcatggca

SEQ ID NO: 3126200 - DNA, 25 bp, Homo sapien
gtagatgttgaggaacttggattca

SEQ ID NO: 3126201 - DNA, 25 bp, Homo sapien
ggcttattctcaaactgtggcttca

SEQ ID NO: 3126202 - DNA, 25 bp, Homo sapien
tcctgggaccatggcagctttggag

SEQ ID NO: 3126203 - DNA, 25 bp, Homo sapien
tgagcggagctgttgcaaaatgctt

SEQ ID NO: 3126204 - DNA, 25 bp, Homo sapien
gctttggagagctgagcggagctgt

SEQ ID NO: 3126205 - DNA, 25 bp, Homo sapien
gattagcaatggctggatcaatcac

SEQ ID NO: 3126206 - DNA, 25 bp, Homo sapien
ttcaaagaaggttttagattagcaa

SEQ ID NO: 3126207 - DNA, 25 bp, Homo sapien
aagaaggttttagattagcaatggc

SEQ ID NO: 3126208 - DNA, 25 bp, Homo sapien
tggctggatcaatcactgtgagtat

SEQ ID NO: 3126209 - DNA, 25 bp, Homo sapien
gaaacttgcagatgacattccaaaa

SEQ ID NO: 3126210 - DNA, 25 bp, Homo sapien
taatactgttatgtgctacattaac

SEQ ID NO: 3126211 - DNA, 25 bp, Homo sapien
ggcaggcattgctgaaacttgcaga

SEQ ID NO: 3126212 - DNA, 25 bp, Homo sapien
ttgcaggccttgaatagtaatactg

SEQ ID NO: 3126213 - DNA, 25 bp, Homo sapien
caagggggcaggggtagcgatggaa

SEQ ID NO: 3126214 - DNA, 25 bp, Homo sapien
caggggtagcgatggaaatattagg

SEQ ID NO: 3126215 - DNA, 25 bp, Homo sapien
ggggcaggggtagcgatggaaatat

SEQ ID NO: 3126216 - DNA, 25 bp, Homo sapien
gggtagcgatggaaatattaggcca

SEQ ID NO: 3126217 - DNA, 25 bp, Homo sapien
cagcacttaggggtgtgacaaaacc

SEQ ID NO: 3126218 - DNA, 25 bp, Homo sapien
ctgaatccacatcaccgtgacaagg

SEQ ID NO: 3126219 - DNA, 25 bp, Homo sapien
tctgaatccacatcaccgtgacaag

SEQ ID NO: 3126220 - DNA, 25 bp, Homo sapien
acatctgaatccacatcaccgtgac

SEQ ID NO: 3126221 - DNA, 25 bp, Homo sapien
cattaagatgtctttcgacctcatg

SEQ ID NO: 3126222 - DNA, 25 bp, Homo sapien
tcactttcattaagatgtctttcga

SEQ ID NO: 3126223 - DNA, 25 bp, Homo sapien
cactttcattaagatgtctttcgac

SEQ ID NO: 3126224 - DNA, 25 bp, Homo sapien
tttcattaagatgtctttcgacctc

SEQ ID NO: 3126225 - DNA, 25 bp, Homo sapien
tctgctgggccatgaccacggagaa

SEQ ID NO: 3126226 - DNA, 25 bp, Homo sapien
ctctgctgggccatgaccacggaga

SEQ ID NO: 3126227 - DNA, 25 bp, Homo sapien
tgctgggccatgaccacggagaaca

SEQ ID NO: 3126228 - DNA, 25 bp, Homo sapien
tgggccatgaccacggagaacaggt

SEQ ID NO: 3126229 - DNA, 25 bp, Homo sapien
ctagaaaagagggttgagaaatcgg

SEQ ID NO: 3126230 - DNA, 25 bp, Homo sapien
aaacaggtaaaccaacacccagcat

SEQ ID NO: 3126231 - DNA, 25 bp, Homo sapien
agagggttgagaaatcggaaacagg

SEQ ID NO: 3126232 - DNA, 25 bp, Homo sapien
tgagaaatcggaaacaggtaaacca

SEQ ID NO: 3126233 - DNA, 25 bp, Homo sapien
gtctgtagagattggacaccttttg

SEQ ID NO: 3126234 - DNA, 25 bp, Homo sapien
ctgtgggtctgtagagattggacac

SEQ ID NO: 3126235 - DNA, 25 bp, Homo sapien
tatagagacatccattagattctgt

SEQ ID NO: 3126236 - DNA, 25 bp, Homo sapien
gaatatagagacatccattagattc

SEQ ID NO: 3126237 - DNA, 25 bp, Homo sapien
gcccagtgaggaccggctgccgttc

SEQ ID NO: 3126238 - DNA, 25 bp, Homo sapien
cagcccagtgaggaccggctgccgt

SEQ ID NO: 3126239 - DNA, 25 bp, Homo sapien
aacagcccagtgaggaccggctgcc

SEQ ID NO: 3126240 - DNA, 25 bp, Homo sapien
ggctgccgttctggatcctctgtgg

SEQ ID NO: 3126241 - DNA, 25 bp, Homo sapien
ggctgaaggccaacatgatgagcag

SEQ ID NO: 3126242 - DNA, 25 bp, Homo sapien
gggctgaaggccaacatgatgagca

SEQ ID NO: 3126243 - DNA, 25 bp, Homo sapien
ggacaggttggagaggaagaagtac

SEQ ID NO: 3126244 - DNA, 25 bp, Homo sapien
caaggacaggttggagaggaagaag

SEQ ID NO: 3126245 - DNA, 25 bp, Homo sapien
tgatgtcaggcaaggacaggttgga

SEQ ID NO: 3126246 - DNA, 25 bp, Homo sapien
ctgatgtcaggcaaggacaggttgg

SEQ ID NO: 3126247 - DNA, 25 bp, Homo sapien
cacaatcatcttggggacaatggtg

SEQ ID NO: 3126248 - DNA, 25 bp, Homo sapien
aggcggcctgcataggagatcactc

SEQ ID NO: 3126249 - DNA, 25 bp, Homo sapien
ggcctgcataggagatcactctgct

SEQ ID NO: 3126250 - DNA, 25 bp, Homo sapien
agtcaggcggcctgcataggagatc

SEQ ID NO: 3126251 - DNA, 25 bp, Homo sapien
tcaggagcatttctgtcttccatgc

SEQ ID NO: 3126252 - DNA, 25 bp, Homo sapien
agcatttctgtcttccatgcctcca

SEQ ID NO: 3126253 - DNA, 25 bp, Homo sapien
ggagcatttctgtcttccatgcctc

SEQ ID NO: 3126254 - DNA, 25 bp, Homo sapien
gcctccaaaaatggcaaagagagac

SEQ ID NO: 3126255 - DNA, 25 bp, Homo sapien
gtaggaagccacagaaacatggatt

SEQ ID NO: 3126256 - DNA, 25 bp, Homo sapien
gaagccacagaaacatggattcatg

SEQ ID NO: 3126257 - DNA, 25 bp, Homo sapien
taggaagccacagaaacatggattc

SEQ ID NO: 3126258 - DNA, 25 bp, Homo sapien
aagtaggaagccacagaaacatgga

SEQ ID NO: 3126259 - DNA, 25 bp, Homo sapien
ttgtaaagcaatcaagttgtgcagc

SEQ ID NO: 3126260 - DNA, 25 bp, Homo sapien
caagttgtgcagctgggtgtctaaa

SEQ ID NO: 3126261 - DNA, 25 bp, Homo sapien
aagcaatcaagttgtgcagctgggt

SEQ ID NO: 3126262 - DNA, 25 bp, Homo sapien
aatcaagttgtgcagctgggtgtct

SEQ ID NO: 3126263 - DNA, 25 bp, Homo sapien
gcctttctcagggaagatgacacat

SEQ ID NO: 3126264 - DNA, 25 bp, Homo sapien
cactgcagcctttctcagggaagat

SEQ ID NO: 3126265 - DNA, 25 bp, Homo sapien
gaggccactgcagcctttctcaggg

SEQ ID NO: 3126266 - DNA, 25 bp, Homo sapien
tgcagcctttctcagggaagatgac

SEQ ID NO: 3126267 - DNA, 25 bp, Homo sapien
gctggtacccaaaaacgcctctcca

SEQ ID NO: 3126268 - DNA, 25 bp, Homo sapien
tatagggcggtgtattgtttttgca

SEQ ID NO: 3126269 - DNA, 25 bp, Homo sapien
ggactctccgcctttctttgctgtt

SEQ ID NO: 3126270 - DNA, 25 bp, Homo sapien
ttttgcagttgagaaggttgacgga

SEQ ID NO: 3126271 - DNA, 25 bp, Homo sapien
gacacagccctcacgtatttctgca

SEQ ID NO: 3126272 - DNA, 25 bp, Homo sapien
tgtgcttgttcagggaagggcacac

SEQ ID NO: 3126273 - DNA, 25 bp, Homo sapien
catagcacttgtaaattgttggagg

SEQ ID NO: 3126274 - DNA, 25 bp, Homo sapien
gaatgagcatcgtgtcatcatagca

SEQ ID NO: 3126275 - DNA, 25 bp, Homo sapien
ttcccaataaagagcagagaagtgg

SEQ ID NO: 3126276 - DNA, 25 bp, Homo sapien
aaagaggtgagggaactacgatctg

SEQ ID NO: 3126277 - DNA, 25 bp, Homo sapien
tattagacctgaaaagccggaggag

SEQ ID NO: 3126278 - DNA, 25 bp, Homo sapien
aaagaaactgtgatgagaccaaaac

SEQ ID NO: 3126279 - DNA, 25 bp, Homo sapien
agaaagggatgtgacagcagccagc

SEQ ID NO: 3126280 - DNA, 25 bp, Homo sapien
ctccggctgcgacctgctggcccag

SEQ ID NO: 3126281 - DNA, 25 bp, Homo sapien
agctccggctgcgacctgctggccc

SEQ ID NO: 3126282 - DNA, 25 bp, Homo sapien
gctccggctgcgacctgctggccca

SEQ ID NO: 3126283 - DNA, 25 bp, Homo sapien
gttctcgggagtctgtagcgcgccg

SEQ ID NO: 3126284 - DNA, 25 bp, Homo sapien
tctcgggagtctgtagcgcgccgga

SEQ ID NO: 3126285 - DNA, 25 bp, Homo sapien
tgtagcgcgccggacggcagcggca

SEQ ID NO: 3126286 - DNA, 25 bp, Homo sapien
cgggagtctgtagcgcgccggacgg

SEQ ID NO: 3126287 - DNA, 25 bp, Homo sapien
cttcagccctgcgacccccaggcag

SEQ ID NO: 3126288 - DNA, 25 bp, Homo sapien
cagccccatcgggcaccccgaggat

SEQ ID NO: 3126289 - DNA, 25 bp, Homo sapien
caagggaccctcgagccccagaggg

SEQ ID NO: 3126290 - DNA, 25 bp, Homo sapien
ctgtgcgcggtcccaacttcagccc

SEQ ID NO: 3126291 - DNA, 25 bp, Homo sapien
ttagcccagccgaaccagacgaaga

SEQ ID NO: 3126292 - DNA, 25 bp, Homo sapien
tccttcttgatggaagcgcgcaggc

SEQ ID NO: 3126293 - DNA, 25 bp, Homo sapien
cacgaaaaggtctgacacggccaga

SEQ ID NO: 3126294 - DNA, 25 bp, Homo sapien
aaggtccatgccaggccgaccatga

SEQ ID NO: 3126295 - DNA, 25 bp, Homo sapien
tgttattttgtctaaagaaatctcc

SEQ ID NO: 3126296 - DNA, 25 bp, Homo sapien
tctaaagaaatctccccctcgcagt

SEQ ID NO: 3126297 - DNA, 25 bp, Homo sapien
gtgttattttgtctaaagaaatctc

SEQ ID NO: 3126298 - DNA, 25 bp, Homo sapien
gtctaaagaaatctccccctcgcag

SEQ ID NO: 3126299 - DNA, 25 bp, Homo sapien
cagggatacttcttaagctatggta

SEQ ID NO: 3126300 - DNA, 25 bp, Homo sapien
tgacataagcacaaagccacgggaa

SEQ ID NO: 3126301 - DNA, 25 bp, Homo sapien
taggatcgttggtccatctctggta

SEQ ID NO: 3126302 - DNA, 25 bp, Homo sapien
cactggaaaggcatgtatttgcgtg

SEQ ID NO: 3126303 - DNA, 25 bp, Homo sapien
caaaatgattggagtcagccgggct

SEQ ID NO: 3126304 - DNA, 25 bp, Homo sapien
gattaagcatgtacttccagaccca

SEQ ID NO: 3126305 - DNA, 25 bp, Homo sapien
taatgccatgccattgaagccaggt

SEQ ID NO: 3126306 - DNA, 25 bp, Homo sapien
gccctggtgtatctttaaggccaaa

SEQ ID NO: 3126307 - DNA, 25 bp, Homo sapien
caagatatggctgcacagaagactg

SEQ ID NO: 3126308 - DNA, 25 bp, Homo sapien
ggcttcaaagcagggacttgcaaga

SEQ ID NO: 3126309 - DNA, 25 bp, Homo sapien
aattgattgaactgtccttgataaa

SEQ ID NO: 3126310 - DNA, 25 bp, Homo sapien
catttgcttccattaatagtgctca

SEQ ID NO: 3126311 - DNA, 25 bp, Homo sapien
gaatgcggcacaattgccctgccaa

SEQ ID NO: 3126312 - DNA, 25 bp, Homo sapien
tggtcaatccaagaatgcggcacaa

SEQ ID NO: 3126313 - DNA, 25 bp, Homo sapien
gattggtcgagcttggcctctggca

SEQ ID NO: 3126314 - DNA, 25 bp, Homo sapien
ggagggacagacaaagccagtgatt

SEQ ID NO: 3126315 - DNA, 25 bp, Homo sapien
ccccatacagcgtgtcagatggaga

SEQ ID NO: 3126316 - DNA, 25 bp, Homo sapien
gaaagtcttgcaaaggacacccgct

SEQ ID NO: 3126317 - DNA, 25 bp, Homo sapien
gaggacataatggttggccccatac

SEQ ID NO: 3126318 - DNA, 25 bp, Homo sapien
tcagcatggctagggtcatccacga

SEQ ID NO: 3126319 - DNA, 25 bp, Homo sapien
tcctcctctctgttacctaagttga

SEQ ID NO: 3126320 - DNA, 25 bp, Homo sapien
tactttctaatattcacactttaac

SEQ ID NO: 3126321 - DNA, 25 bp, Homo sapien
tacaaatgagtagaatggaatagct

SEQ ID NO: 3126322 - DNA, 25 bp, Homo sapien
acacacttgtaccacaaatctaggg

SEQ ID NO: 3126323 - DNA, 25 bp, Homo sapien
catccagttggaatcacagaataca

SEQ ID NO: 3126324 - DNA, 25 bp, Homo sapien
cagctctgtacatttcttgcttatt

SEQ ID NO: 3126325 - DNA, 25 bp, Homo sapien
gcttattattcatccagttggaatc

SEQ ID NO: 3126326 - DNA, 25 bp, Homo sapien
taatttttagacagctctgtacatt

SEQ ID NO: 3126327 - DNA, 25 bp, Homo sapien
tgaggcggctaagtttgttcactgg

SEQ ID NO: 3126328 - DNA, 25 bp, Homo sapien
tcatgacccaactaccttttaaaga

SEQ ID NO: 3126329 - DNA, 25 bp, Homo sapien
gggctctcatgacccaactaccttt

SEQ ID NO: 3126330 - DNA, 25 bp, Homo sapien
gaatcacatggtgaggcggctaagt

SEQ ID NO: 3126331 - DNA, 25 bp, Homo sapien
gggctcaaaacttcagggctgacgc

SEQ ID NO: 3126332 - DNA, 25 bp, Homo sapien
gaccttgtggatctcaggctttgga

SEQ ID NO: 3126333 - DNA, 25 bp, Homo sapien
taactttctcataactgcagcaggg

SEQ ID NO: 3126334 - DNA, 25 bp, Homo sapien
cagcagggactgaaaattgacctcc

SEQ ID NO: 3126335 - DNA, 25 bp, Homo sapien
tggtcagcatcagtgttgcttgggc

SEQ ID NO: 3126336 - DNA, 25 bp, Homo sapien
gctgtggtcagcatcagtgttgctt

SEQ ID NO: 3126337 - DNA, 25 bp, Homo sapien
tcagcatcagtgttgcttgggccat

SEQ ID NO: 3126338 - DNA, 25 bp, Homo sapien
tgtggtcagcatcagtgttgcttgg

SEQ ID NO: 3126339 - DNA, 25 bp, Homo sapien
catcttgactggtgagttcttccag

SEQ ID NO: 3126340 - DNA, 25 bp, Homo sapien
tcattgcaggcaccgtcaactggct

SEQ ID NO: 3126341 - DNA, 25 bp, Homo sapien
ggtggcatcccgttcatcttgactg

SEQ ID NO: 3126342 - DNA, 25 bp, Homo sapien
tgacaaggagtcttttgcccatggg

SEQ ID NO: 3126343 - DNA, 25 bp, Homo sapien
tcagaagtactgagttatccacagg

SEQ ID NO: 3126344 - DNA, 25 bp, Homo sapien
tatccacaggtgcttccaaaaacac

SEQ ID NO: 3126345 - DNA, 25 bp, Homo sapien
actgcattgtacattgatgtaccgc

SEQ ID NO: 3126346 - DNA, 25 bp, Homo sapien
gatgtaccgcattccattgtaccag

SEQ ID NO: 3126347 - DNA, 25 bp, Homo sapien
tgcaggctcctcatggttgcttagg

SEQ ID NO: 3126348 - DNA, 25 bp, Homo sapien
ggttgcttagggcttggtctgaagg

SEQ ID NO: 3126349 - DNA, 25 bp, Homo sapien
gttgcttagggcttggtctgaaggc

SEQ ID NO: 3126350 - DNA, 25 bp, Homo sapien
caagacagcttggttgttagaccag

SEQ ID NO: 3126351 - DNA, 25 bp, Homo sapien
gcgctgtcgccacaagacagcttgg

SEQ ID NO: 3126352 - DNA, 25 bp, Homo sapien
tggttgttagaccagctgagctgta

SEQ ID NO: 3126353 - DNA, 25 bp, Homo sapien
acaccagggcgctgtcgccacaaga

SEQ ID NO: 3126354 - DNA, 25 bp, Homo sapien
tcagcagcctcccctgcctccctac

SEQ ID NO: 3126355 - DNA, 25 bp, Homo sapien
ccctagttgctcagcagcctcccct

SEQ ID NO: 3126356 - DNA, 25 bp, Homo sapien
ctcagcagcctcccctgcctcccta

SEQ ID NO: 3126357 - DNA, 25 bp, Homo sapien
tagttgctcagcagcctcccctgcc

SEQ ID NO: 3126358 - DNA, 25 bp, Homo sapien
tcagggtgagtcaaggctctgcaag

SEQ ID NO: 3126359 - DNA, 25 bp, Homo sapien
caggaagcatctgctatacctcctc

SEQ ID NO: 3126360 - DNA, 25 bp, Homo sapien
ctgagagtcagggtgagtcaaggct

SEQ ID NO: 3126361 - DNA, 25 bp, Homo sapien
ggaagcatctgctatacctcctcat

SEQ ID NO: 3126362 - DNA, 25 bp, Homo sapien
tgagggaagatggagtaaagaacca

SEQ ID NO: 3126363 - DNA, 25 bp, Homo sapien
gatggagtaaagaaccagtcatcca

SEQ ID NO: 3126364 - DNA, 25 bp, Homo sapien
gagtaaagaaccagtcatccacatc

SEQ ID NO: 3126365 - DNA, 25 bp, Homo sapien
gagatggtgagggaagatggagtaa

SEQ ID NO: 3126366 - DNA, 25 bp, Homo sapien
gatatcagcattaatatatgtgaca

SEQ ID NO: 3126367 - DNA, 25 bp, Homo sapien
ccggttctgcaaagagagcaggcgc

SEQ ID NO: 3126368 - DNA, 25 bp, Homo sapien
tgacagcaataggagctgcaggctg

SEQ ID NO: 3126369 - DNA, 25 bp, Homo sapien
aggcgctccctgacttccagcaggg

SEQ ID NO: 3126370 - DNA, 25 bp, Homo sapien
caggtctgtcgcttcaccactcatg

SEQ ID NO: 3126371 - DNA, 25 bp, Homo sapien
agtagtgtccttctgtgtgcaggag

SEQ ID NO: 3126372 - DNA, 25 bp, Homo sapien
caccactcatgaatccataaggatg

SEQ ID NO: 3126373 - DNA, 25 bp, Homo sapien
gaatccataaggatgacaagtagtg

SEQ ID NO: 3126374 - DNA, 25 bp, Homo sapien
caaaaaggaatgagttgcccatcaa

SEQ ID NO: 3126375 - DNA, 25 bp, Homo sapien
gaatgagttgcccatcaattgaggt

SEQ ID NO: 3126376 - DNA, 25 bp, Homo sapien
tgcccatcaattgaggtgcacaagg

SEQ ID NO: 3126377 - DNA, 25 bp, Homo sapien
tcaattgaggtgcacaagggagcca

SEQ ID NO: 3126378 - DNA, 25 bp, Homo sapien
agctccgaagatgcatgcaccagcc

SEQ ID NO: 3126379 - DNA, 25 bp, Homo sapien
cttcccggggttgtgatatctgatc

SEQ ID NO: 3126380 - DNA, 25 bp, Homo sapien
cctgggagacaatcgatactcatat

SEQ ID NO: 3126381 - DNA, 25 bp, Homo sapien
atactcatatttgggctccatcaga

SEQ ID NO: 3126382 - DNA, 25 bp, Homo sapien
gggcacttgcaggaggtcacttctg

SEQ ID NO: 3126383 - DNA, 25 bp, Homo sapien
cctgatggaatcgcccttggagagc

SEQ ID NO: 3126384 - DNA, 25 bp, Homo sapien
ttgcaggaggtcacttctgctgtca

SEQ ID NO: 3126385 - DNA, 25 bp, Homo sapien
ggcacttgcaggaggtcacttctgc

SEQ ID NO: 3126386 - DNA, 25 bp, Homo sapien
gggctgtctcatcaatccaattgtg

SEQ ID NO: 3126387 - DNA, 25 bp, Homo sapien
ctgtatcacatccttgcgtctggga

SEQ ID NO: 3126388 - DNA, 25 bp, Homo sapien
aaaatggcaaatcatgggccccggg

SEQ ID NO: 3126389 - DNA, 25 bp, Homo sapien
aattgtggcaaatcttcaaagaccg

SEQ ID NO: 3126390 - DNA, 25 bp, Homo sapien
tatagacattctataggaggaaggg

SEQ ID NO: 3126391 - DNA, 25 bp, Homo sapien
gctcttaggattgcacacagcaggt

SEQ ID NO: 3126392 - DNA, 25 bp, Homo sapien
gaggaggaaaccctcctgcaaacag

SEQ ID NO: 3126393 - DNA, 25 bp, Homo sapien
tgccccaacaggagcctggtgagat

SEQ ID NO: 3126394 - DNA, 25 bp, Homo sapien
gcattctggccatcatcgcctcttt

SEQ ID NO: 3126395 - DNA, 25 bp, Homo sapien
ggacggagacccctcctcattggtg

SEQ ID NO: 3126396 - DNA, 25 bp, Homo sapien
ggctttgggctcatgggcctcttct

SEQ ID NO: 3126397 - DNA, 25 bp, Homo sapien
actagggtttggtcattgagcacct

SEQ ID NO: 3126398 - DNA, 25 bp, Homo sapien
ttgggaccctcaccatcacgctgac

SEQ ID NO: 3126399 - DNA, 25 bp, Homo sapien
gagactccagagggatcatccactt

SEQ ID NO: 3126400 - DNA, 25 bp, Homo sapien
tccacttccttgacattcccaactt

SEQ ID NO: 3126401 - DNA, 25 bp, Homo sapien
actccagagggatcatccacttcct

SEQ ID NO: 3126402 - DNA, 25 bp, Homo sapien
tgcatctctcggcttgtggcccctt

SEQ ID NO: 3126403 - DNA, 25 bp, Homo sapien
tccacttgccctgctccataggact

SEQ ID NO: 3126404 - DNA, 25 bp, Homo sapien
cacttgccctgctccataggactta

SEQ ID NO: 3126405 - DNA, 25 bp, Homo sapien
tgccctgctccataggacttagcac

SEQ ID NO: 3126406 - DNA, 25 bp, Homo sapien
cttgccctgctccataggacttagc

SEQ ID NO: 3126407 - DNA, 25 bp, Homo sapien
cacttggtgggatacccatgcatta

SEQ ID NO: 3126408 - DNA, 25 bp, Homo sapien
ccatgcattacagggttcctggtgt

SEQ ID NO: 3126409 - DNA, 25 bp, Homo sapien
tgttcctctaaccacttagttggga

SEQ ID NO: 3126410 - DNA, 25 bp, Homo sapien
tagttgggaaatcgttgtgtactcc

SEQ ID NO: 3126411 - DNA, 25 bp, Homo sapien
gctgcatcttatcaaccctgtgcct

SEQ ID NO: 3126412 - DNA, 25 bp, Homo sapien
ttcagtgtgagtgtcagtctgttgc

SEQ ID NO: 3126413 - DNA, 25 bp, Homo sapien
agagcagcccatgccacatggtggg

SEQ ID NO: 3126414 - DNA, 25 bp, Homo sapien
agctattagtgggtctccatcctgg

SEQ ID NO: 3126415 - DNA, 25 bp, Homo sapien
accactacaccccagcctgggacac

SEQ ID NO: 3126416 - DNA, 25 bp, Homo sapien
caccactacaccccagcctgggaca

SEQ ID NO: 3126417 - DNA, 25 bp, Homo sapien
gggacacagagcaagactccatcac

SEQ ID NO: 3126418 - DNA, 25 bp, Homo sapien
cctgggacacagagcaagactccat

SEQ ID NO: 3126419 - DNA, 25 bp, Homo sapien
cacagatggctcagtatatttatgc

SEQ ID NO: 3126420 - DNA, 25 bp, Homo sapien
aaacatcccatgggagcaaaattgc

SEQ ID NO: 3126421 - DNA, 25 bp, Homo sapien
ggctgagaacctctgtatcaagcaa

SEQ ID NO: 3126422 - DNA, 25 bp, Homo sapien
tctgtatcaagcaaacatcacagat

SEQ ID NO: 3126423 - DNA, 25 bp, Homo sapien
gagctggaaaattcattgtcatggg

SEQ ID NO: 3126424 - DNA, 25 bp, Homo sapien
gctgtgtgcctaggctattcagcag

SEQ ID NO: 3126425 - DNA, 25 bp, Homo sapien
gacagcccacccagacactttgtac

SEQ ID NO: 3126426 - DNA, 25 bp, Homo sapien
atttctcagcctcatatctgtgtac

SEQ ID NO: 3126427 - DNA, 25 bp, Homo sapien
gaggaatagtaaaaggatttgagcc

SEQ ID NO: 3126428 - DNA, 25 bp, Homo sapien
gatttgagccctagctatctggccc

SEQ ID NO: 3126429 - DNA, 25 bp, Homo sapien
gggacaagtcttcttccgtgttaca

SEQ ID NO: 3126430 - DNA, 25 bp, Homo sapien
gacccatgctgtttagtggcaaatg

SEQ ID NO: 3126431 - DNA, 25 bp, Homo sapien
tagaaggctggtgcgcttgggccag

SEQ ID NO: 3126432 - DNA, 25 bp, Homo sapien
ggcaggtaactccttggtgcaggtt

SEQ ID NO: 3126433 - DNA, 25 bp, Homo sapien
aggcgccggcaggtaactccttggt

SEQ ID NO: 3126434 - DNA, 25 bp, Homo sapien
cgccggcaggtaactccttggtgca

SEQ ID NO: 3126435 - DNA, 25 bp, Homo sapien
tcatctccgtgcaaacactcaaggc

SEQ ID NO: 3126436 - DNA, 25 bp, Homo sapien
tcctggaggtgtctgagataaggct

SEQ ID NO: 3126437 - DNA, 25 bp, Homo sapien
taaggctgaaagaacgaggcaagta

SEQ ID NO: 3126438 - DNA, 25 bp, Homo sapien
tttttaatcaccatatgcccagctc

SEQ ID NO: 3126439 - DNA, 25 bp, Homo sapien
gaaaaggatgtcctaggcaggcaac

SEQ ID NO: 3126440 - DNA, 25 bp, Homo sapien
tctggacacaaggaacagcacgagc

SEQ ID NO: 3126441 - DNA, 25 bp, Homo sapien
tgtgaccacaggcatccagtttagg

SEQ ID NO: 3126442 - DNA, 25 bp, Homo sapien
tcagacaaatcagacacggaaggca

SEQ ID NO: 3126443 - DNA, 25 bp, Homo sapien
ctattatctaaaagtgttgggccag

SEQ ID NO: 3126444 - DNA, 25 bp, Homo sapien
tgattatccctaggtgaggcagctg

SEQ ID NO: 3126445 - DNA, 25 bp, Homo sapien
ggctacatctacctaaaatcaagtg

SEQ ID NO: 3126446 - DNA, 25 bp, Homo sapien
gtctcacgttgttggttggtcctac

SEQ ID NO: 3126447 - DNA, 25 bp, Homo sapien
gggagttgacccttcgaacatataa

SEQ ID NO: 3126448 - DNA, 25 bp, Homo sapien
gaacatataactaattgatctctga

SEQ ID NO: 3126449 - DNA, 25 bp, Homo sapien
cctttcctagtggaggcaactgaga

SEQ ID NO: 3126450 - DNA, 25 bp, Homo sapien
gcattccaagatggaccttttacaa

SEQ ID NO: 3126451 - DNA, 25 bp, Homo sapien
tagtgatcttgttcaagtattagcc

SEQ ID NO: 3126452 - DNA, 25 bp, Homo sapien
caagatgtagtgatcttgttcaagt

SEQ ID NO: 3126453 - DNA, 25 bp, Homo sapien
tgttcaagtattagccggtgtcatt

SEQ ID NO: 3126454 - DNA, 25 bp, Homo sapien
ccaggagcaacagagaagacaagat

SEQ ID NO: 3126455 - DNA, 25 bp, Homo sapien
tcttacacatatcattggatctggt

SEQ ID NO: 3126456 - DNA, 25 bp, Homo sapien
tacacatatcattggatctggttct

SEQ ID NO: 3126457 - DNA, 25 bp, Homo sapien
gacagagtcaattgtgcatctgttc

SEQ ID NO: 3126458 - DNA, 25 bp, Homo sapien
tccatcacttgacagagtcaattgt

SEQ ID NO: 3126459 - DNA, 25 bp, Homo sapien
tcacgtagggaggaacagataaagg

SEQ ID NO: 3126460 - DNA, 25 bp, Homo sapien
tgatgggtcccattccacactggtt

SEQ ID NO: 3126461 - DNA, 25 bp, Homo sapien
gacttcgtggtttttggctgagcaa

SEQ ID NO: 3126462 - DNA, 25 bp, Homo sapien
ggtggtcccattcactcacgtaggg

SEQ ID NO: 3126463 - DNA, 25 bp, Homo sapien
tcaatgtcaggtaaatgtccagcca

SEQ ID NO: 3126464 - DNA, 25 bp, Homo sapien
cattctgaaggctgctggtagcacc

SEQ ID NO: 3126465 - DNA, 25 bp, Homo sapien
tggtagcaccctgatgaaggctcag

SEQ ID NO: 3126466 - DNA, 25 bp, Homo sapien
caaagtaccacggactgagtgactg

SEQ ID NO: 3126467 - DNA, 25 bp, Homo sapien
tattagcctgactccttgcaagaca

SEQ ID NO: 3126468 - DNA, 25 bp, Homo sapien
tagggagcaagttcacgtgcaagag

SEQ ID NO: 3126469 - DNA, 25 bp, Homo sapien
tccaggaagccagtcattactgagg

SEQ ID NO: 3126470 - DNA, 25 bp, Homo sapien
tactataagagtgccatagggagca

SEQ ID NO: 3126471 - DNA, 25 bp, Homo sapien
ggagccaggcgacattaggtagcac

SEQ ID NO: 3126472 - DNA, 25 bp, Homo sapien
aagagaagtctcaggcgtgctgtga

SEQ ID NO: 3126473 - DNA, 25 bp, Homo sapien
ttctacacaggaggccttacctcgg

SEQ ID NO: 3126474 - DNA, 25 bp, Homo sapien
tggggccctaacttcagagggcctg

SEQ ID NO: 3126475 - DNA, 25 bp, Homo sapien
taagttgactcaatgcatttcccag

SEQ ID NO: 3126476 - DNA, 25 bp, Homo sapien
gaaataatactgaatggcttggctt

SEQ ID NO: 3126477 - DNA, 25 bp, Homo sapien
cagactcttgtccttcatggtgtta

SEQ ID NO: 3126478 - DNA, 25 bp, Homo sapien
ccagggtttctgtagagcaattaag

SEQ ID NO: 3126479 - DNA, 25 bp, Homo sapien
gcctttaccgttcttaagatgagtg

SEQ ID NO: 3126480 - DNA, 25 bp, Homo sapien
aaaaagccctcatgaggtgccggcc

SEQ ID NO: 3126481 - DNA, 25 bp, Homo sapien
tatggcagcatcagtaagagcacag

SEQ ID NO: 3126482 - DNA, 25 bp, Homo sapien
gatgagtgacacatattatggcagc

SEQ ID NO: 3126483 - DNA, 25 bp, Homo sapien
ctacttgcaggtccccaacttgcgt

SEQ ID NO: 3126484 - DNA, 25 bp, Homo sapien
ctgaaaggatcgtgtggagctgccc

SEQ ID NO: 3126485 - DNA, 25 bp, Homo sapien
acctggactggaaccctacttgcag

SEQ ID NO: 3126486 - DNA, 25 bp, Homo sapien
aaactgcgtttcaggaatcctcacg

SEQ ID NO: 3126487 - DNA, 25 bp, Homo sapien
agggtgtgagagctgcacgggctgg

SEQ ID NO: 3126488 - DNA, 25 bp, Homo sapien
tctcctgttgaccatggccagggac

SEQ ID NO: 3126489 - DNA, 25 bp, Homo sapien
taatgacagtagctacacaggtctc

SEQ ID NO: 3126490 - DNA, 25 bp, Homo sapien
cagtagctacacaggtctcctgttg

SEQ ID NO: 3126491 - DNA, 25 bp, Homo sapien
cctggagagttttgaaagaggataa

SEQ ID NO: 3126492 - DNA, 25 bp, Homo sapien
gatacttcctggagagttttgaaag

SEQ ID NO: 3126493 - DNA, 25 bp, Homo sapien
acttcctggagagttttgaaagagg

SEQ ID NO: 3126494 - DNA, 25 bp, Homo sapien
aagatacttcctggagagttttgaa

SEQ ID NO: 3126495 - DNA, 25 bp, Homo sapien
gtggccctcgccctggatttcggac

SEQ ID NO: 3126496 - DNA, 25 bp, Homo sapien
taagcaggcgagtgcagagagcttg

SEQ ID NO: 3126497 - DNA, 25 bp, Homo sapien
tggatttcggacaccaccaccggga

SEQ ID NO: 3126498 - DNA, 25 bp, Homo sapien
tgacaacccacgagcacagcgacac

SEQ ID NO: 3126499 - DNA, 25 bp, Homo sapien
ccagctgccctcgtatgaagacaag

SEQ ID NO: 3126500 - DNA, 25 bp, Homo sapien
cagctgccctcgtatgaagacaaga

SEQ ID NO: 3126501 - DNA, 25 bp, Homo sapien
agctgccctcgtatgaagacaagag

SEQ ID NO: 3126502 - DNA, 25 bp, Homo sapien
tccagctgccctcgtatgaagacaa

SEQ ID NO: 3126503 - DNA, 25 bp, Homo sapien
tgaaggaaaggtcaattcctgtgtt

SEQ ID NO: 3126504 - DNA, 25 bp, Homo sapien
cctgtgtttggaacgatcggtctgg

SEQ ID NO: 3126505 - DNA, 25 bp, Homo sapien
gagaagacccagcaggtgtttcacc

SEQ ID NO: 3126506 - DNA, 25 bp, Homo sapien
ttgccttggcataggaaagccaacc

SEQ ID NO: 3126507 - DNA, 25 bp, Homo sapien
ggtgaaaaggacttcttacatggca

SEQ ID NO: 3126508 - DNA, 25 bp, Homo sapien
tcatggcgggaggtgaaaaggactt

SEQ ID NO: 3126509 - DNA, 25 bp, Homo sapien
atggcgggaggtgaaaaggacttct

SEQ ID NO: 3126510 - DNA, 25 bp, Homo sapien
aatcatggcgggaggtgaaaaggac

SEQ ID NO: 3126511 - DNA, 25 bp, Homo sapien
gctccctgcagggataacccaggtc

SEQ ID NO: 3126512 - DNA, 25 bp, Homo sapien
tctttgttaagaggatgggctggca

SEQ ID NO: 3126513 - DNA, 25 bp, Homo sapien
ggcagggaaccgctttgcaattatc

SEQ ID NO: 3126514 - DNA, 25 bp, Homo sapien
tgagcagaggagatagttgctccct

SEQ ID NO: 3126515 - DNA, 25 bp, Homo sapien
tgtctgaggtccctggttgcagtgc

SEQ ID NO: 3126516 - DNA, 25 bp, Homo sapien
tccatgaggtcctgatgtacagagc

SEQ ID NO: 3126517 - DNA, 25 bp, Homo sapien
cctgatgtacagagcatagcatact

SEQ ID NO: 3126518 - DNA, 25 bp, Homo sapien
tgatttagaagtccttctcctgctt

SEQ ID NO: 3126519 - DNA, 25 bp, Homo sapien
acaggccctggtgggatgtcagcat

SEQ ID NO: 3126520 - DNA, 25 bp, Homo sapien
caacaaaatcggttgtccccacagg

SEQ ID NO: 3126521 - DNA, 25 bp, Homo sapien
gctgcaagacaagaagcccggttca

SEQ ID NO: 3126522 - DNA, 25 bp, Homo sapien
tactgcagtaggacaaagtagactc

SEQ ID NO: 3126523 - DNA, 25 bp, Homo sapien
aagttttgggtcatccaattgtcat

SEQ ID NO: 3126524 - DNA, 25 bp, Homo sapien
tccaattgtcatcctactctttacc

SEQ ID NO: 3126525 - DNA, 25 bp, Homo sapien
gggtcatccaattgtcatcctactc

SEQ ID NO: 3126526 - DNA, 25 bp, Homo sapien
ctactctttaccttgtcaccacaaa

SEQ ID NO: 3126527 - DNA, 25 bp, Homo sapien
cagctcgccctccaggatagcatct

SEQ ID NO: 3126528 - DNA, 25 bp, Homo sapien
cgccctccaggatagcatctgcatt

SEQ ID NO: 3126529 - DNA, 25 bp, Homo sapien
ctcgccctccaggatagcatctgca

SEQ ID NO: 3126530 - DNA, 25 bp, Homo sapien
agctcgccctccaggatagcatctg

SEQ ID NO: 3126531 - DNA, 25 bp, Homo sapien
gaccctttggagaggcgcaggtagg

SEQ ID NO: 3126532 - DNA, 25 bp, Homo sapien
ccttaggtgcacagcaagactgaat

SEQ ID NO: 3126533 - DNA, 25 bp, Homo sapien
cataggaggccctggttcacagagc

SEQ ID NO: 3126534 - DNA, 25 bp, Homo sapien
caccgcttggcaactgcccttaggt

SEQ ID NO: 3126535 - DNA, 25 bp, Homo sapien
caaggttgagcaccaaatcggagtc

SEQ ID NO: 3126536 - DNA, 25 bp, Homo sapien
gcagaccagctttggctacctggaa

SEQ ID NO: 3126537 - DNA, 25 bp, Homo sapien
gcatgacccagacggagctgatcct

SEQ ID NO: 3126538 - DNA, 25 bp, Homo sapien
gatcctcacacctccgttgaaggca

SEQ ID NO: 3126539 - DNA, 25 bp, Homo sapien
tttacaaactagtgcgttgacggca

SEQ ID NO: 3126540 - DNA, 25 bp, Homo sapien
ccgcggctctcactatctgtcaggg

SEQ ID NO: 3126541 - DNA, 25 bp, Homo sapien
tgcattgcagttcagcaaagccgga

SEQ ID NO: 3126542 - DNA, 25 bp, Homo sapien
cagatgtctgtctccctagtgtgtg

SEQ ID NO: 3126543 - DNA, 25 bp, Homo sapien
cagtcatgaccctcgtctctgcagg

SEQ ID NO: 3126544 - DNA, 25 bp, Homo sapien
gaccgaatcagggactagagtttaa

SEQ ID NO: 3126545 - DNA, 25 bp, Homo sapien
tctgtacacgttcttctgaaagctt

SEQ ID NO: 3126546 - DNA, 25 bp, Homo sapien
tagagtttaactgcagcggaacatg

SEQ ID NO: 3126547 - DNA, 25 bp, Homo sapien
ctgtggtggcaactcgggcctgtct

SEQ ID NO: 3126548 - DNA, 25 bp, Homo sapien
aaatccacatagcagtggtcttttt

SEQ ID NO: 3126549 - DNA, 25 bp, Homo sapien
tgcagcacatgacggctgagtctgg

SEQ ID NO: 3126550 - DNA, 25 bp, Homo sapien
gagggaattaagttccacttgctgt

SEQ ID NO: 3126551 - DNA, 25 bp, Homo sapien
tttggccttacgtaggcccagggca

SEQ ID NO: 3126552 - DNA, 25 bp, Homo sapien
cctgagcatagcagaccacgtggtc

SEQ ID NO: 3126553 - DNA, 25 bp, Homo sapien
ttcatgatactgttctgtctgcctt

SEQ ID NO: 3126554 - DNA, 25 bp, Homo sapien
gcctctttcagggtgggacgccctc

SEQ ID NO: 3126555 - DNA, 25 bp, Homo sapien
gcggctgggtgagctggctgactgc

SEQ ID NO: 3126556 - DNA, 25 bp, Homo sapien
gggctctgttctgatcgagccaggc

SEQ ID NO: 3126557 - DNA, 25 bp, Homo sapien
ctgttctgatcgagccaggcggctg

SEQ ID NO: 3126558 - DNA, 25 bp, Homo sapien
gctctgttctgatcgagccaggcgg

SEQ ID NO: 3126559 - DNA, 25 bp, Homo sapien
catggcatggtatgttggagccctt

SEQ ID NO: 3126560 - DNA, 25 bp, Homo sapien
tagttccagcttggaggtcagcaga

SEQ ID NO: 3126561 - DNA, 25 bp, Homo sapien
gaccttttgcgggaagccatggcat

SEQ ID NO: 3126562 - DNA, 25 bp, Homo sapien
tggtgtaagctaccaaaatgcccct

SEQ ID NO: 3126563 - DNA, 25 bp, Homo sapien
gacaaggaatgtgtaagccagcctt

SEQ ID NO: 3126564 - DNA, 25 bp, Homo sapien
tgacaaggaatgtgtaagccagcct

SEQ ID NO: 3126565 - DNA, 25 bp, Homo sapien
ggcccagggcgaagctgggcttctg

SEQ ID NO: 3126566 - DNA, 25 bp, Homo sapien
ctcagggcccagggcgaagctgggc

SEQ ID NO: 3126567 - DNA, 25 bp, Homo sapien
gcctgggtggcgctcagggcccagg

SEQ ID NO: 3126568 - DNA, 25 bp, Homo sapien
cctgggtggcgctcagggcccaggg

SEQ ID NO: 3126569 - DNA, 25 bp, Homo sapien
gcagggtagcgacgagtgggctgaa

SEQ ID NO: 3126570 - DNA, 25 bp, Homo sapien
ccatgggttggggtagtcagcccaa

SEQ ID NO: 3126571 - DNA, 25 bp, Homo sapien
gttctatcctcaagggttggggtga

SEQ ID NO: 3126572 - DNA, 25 bp, Homo sapien
caaggagtggctggcaacgtcaggg

SEQ ID NO: 3126573 - DNA, 25 bp, Homo sapien
gagttacggaaatgtcgcttctgtg

SEQ ID NO: 3126574 - DNA, 25 bp, Homo sapien
tattatagcgagtctcaaaggcggc

SEQ ID NO: 3126575 - DNA, 25 bp, Homo sapien
ctgcctggggcataacagagttacg

SEQ ID NO: 3126576 - DNA, 25 bp, Homo sapien
caaaggcggcacagacattgtacag

SEQ ID NO: 3126577 - DNA, 25 bp, Homo sapien
cagttggcagctaaaggagggcaca

SEQ ID NO: 3126578 - DNA, 25 bp, Homo sapien
catggaggacgcctgagactttctc

SEQ ID NO: 3126579 - DNA, 25 bp, Homo sapien
caaccttctagcatgttccatcagg

SEQ ID NO: 3126580 - DNA, 25 bp, Homo sapien
ccttcatcagtgttgtgtcgtcatc

SEQ ID NO: 3126581 - DNA, 25 bp, Homo sapien
ccgctcacacgtagtccaatgaggg

SEQ ID NO: 3126582 - DNA, 25 bp, Homo sapien
aggtggtggtgtcccgctcacacgt

SEQ ID NO: 3126583 - DNA, 25 bp, Homo sapien
ctcatcagttaaggccctggtgggc

SEQ ID NO: 3126584 - DNA, 25 bp, Homo sapien
ctttgcaactcatcagttaaggccc

SEQ ID NO: 3126585 - DNA, 25 bp, Homo sapien
agtgtattttgtgctggtctgtggc

SEQ ID NO: 3126586 - DNA, 25 bp, Homo sapien
gccccactgtccaatccagtgtata

SEQ ID NO: 3126587 - DNA, 25 bp, Homo sapien
tgtatacccctgagcacctctctgt

SEQ ID NO: 3126588 - DNA, 25 bp, Homo sapien
tgagtgtattttgtgctggtctgtg

SEQ ID NO: 3126589 - DNA, 25 bp, Homo sapien
ctcaggagaatctgagtggctgcag

SEQ ID NO: 3126590 - DNA, 25 bp, Homo sapien
tgcaaacgagctggcagcagcgcct

SEQ ID NO: 3126591 - DNA, 25 bp, Homo sapien
aacctctaggccttcagtctgacca

SEQ ID NO: 3126592 - DNA, 25 bp, Homo sapien
ctgcaggtgccagtcaggacgctgg

SEQ ID NO: 3126593 - DNA, 25 bp, Homo sapien
aacacgtcctcggatacagagcagt

SEQ ID NO: 3126594 - DNA, 25 bp, Homo sapien
ctgtgatagcttcttaaactgtagc

SEQ ID NO: 3126595 - DNA, 25 bp, Homo sapien
cataaagtacctgctgtgcatctgg

SEQ ID NO: 3126596 - DNA, 25 bp, Homo sapien
ttgcagtccacattgacttccaggg

SEQ ID NO: 3126597 - DNA, 25 bp, Homo sapien
gaggcatcagtgaagacccagagac

SEQ ID NO: 3126598 - DNA, 25 bp, Homo sapien
gcaaaccagtgtgcaacaaaatggg

SEQ ID NO: 3126599 - DNA, 25 bp, Homo sapien
agacaggtgccagaacagaatgacc

SEQ ID NO: 3126600 - DNA, 25 bp, Homo sapien
acttgctccttgagccaggcagagc

SEQ ID NO: 3126601 - DNA, 25 bp, Homo sapien
gtgctcgagcaacaaggtccctgct

SEQ ID NO: 3126602 - DNA, 25 bp, Homo sapien
gggtgggcccctgcaacaagtgctc

SEQ ID NO: 3126603 - DNA, 25 bp, Homo sapien
agagtcgagacgctgatgaacccca

SEQ ID NO: 3126604 - DNA, 25 bp, Homo sapien
tccctgctctcaatccctaaaaagg

SEQ ID NO: 3126605 - DNA, 25 bp, Homo sapien
aacagccaaacacgttagctctgac

SEQ ID NO: 3126606 - DNA, 25 bp, Homo sapien
aaacaagccagacaccggtgctcaa

SEQ ID NO: 3126607 - DNA, 25 bp, Homo sapien
gacaccggtgctcaacagccaaaca

SEQ ID NO: 3126608 - DNA, 25 bp, Homo sapien
aaacacgttagctctgaccacacaa

SEQ ID NO: 3126609 - DNA, 25 bp, Homo sapien
ggagactcgctgcagcgaacagcct

SEQ ID NO: 3126610 - DNA, 25 bp, Homo sapien
tgtacaaggagactcgctgcagcga

SEQ ID NO: 3126611 - DNA, 25 bp, Homo sapien
tcgctgcagcgaacagcctcatgac

SEQ ID NO: 3126612 - DNA, 25 bp, Homo sapien
caaggagactcgctgcagcgaacag

SEQ ID NO: 3126613 - DNA, 25 bp, Homo sapien
ggacccaagccctcaggccaatggg

SEQ ID NO: 3126614 - DNA, 25 bp, Homo sapien
ggagcagaggaaggacccaagccct

SEQ ID NO: 3126615 - DNA, 25 bp, Homo sapien
aggccaatgggcaagaaggccacac

SEQ ID NO: 3126616 - DNA, 25 bp, Homo sapien
aagccctcaggccaatgggcaagaa

SEQ ID NO: 3126617 - DNA, 25 bp, Homo sapien
gggcaatgtctacccagaaacacca

SEQ ID NO: 3126618 - DNA, 25 bp, Homo sapien
ccacccacttggagggagcagatca

SEQ ID NO: 3126619 - DNA, 25 bp, Homo sapien
agatccccactgctgggatgggcaa

SEQ ID NO: 3126620 - DNA, 25 bp, Homo sapien
aaacaccacccacttggagggagca

SEQ ID NO: 3126621 - DNA, 25 bp, Homo sapien
cccaataggacataactaccaattt

SEQ ID NO: 3126622 - DNA, 25 bp, Homo sapien
ccaataggacataactaccaattta

SEQ ID NO: 3126623 - DNA, 25 bp, Homo sapien
agcagggccaagtctctcagggtcc

SEQ ID NO: 3126624 - DNA, 25 bp, Homo sapien
tgccgacactatactgcctcggtca

SEQ ID NO: 3126625 - DNA, 25 bp, Homo sapien
tgtcccacgtgtgtagaagcctcca

SEQ ID NO: 3126626 - DNA, 25 bp, Homo sapien
cctcggtcatctttaatctgcagca

SEQ ID NO: 3126627 - DNA, 25 bp, Homo sapien
gacttcaagcagcagttgattatca

SEQ ID NO: 3126628 - DNA, 25 bp, Homo sapien
tatcaagagtcgctaccctcaagtg

SEQ ID NO: 3126629 - DNA, 25 bp, Homo sapien
tcgctaccctcaagtgttctatttg

SEQ ID NO: 3126630 - DNA, 25 bp, Homo sapien
tcaaagactgcgtgcataagtgact

SEQ ID NO: 3126631 - DNA, 25 bp, Homo sapien
cagtgagggacagaacaatccgaca

SEQ ID NO: 3126632 - DNA, 25 bp, Homo sapien
agtgagggacagaacaatccgacat

SEQ ID NO: 3126633 - DNA, 25 bp, Homo sapien
ccagtgagggacagaacaatccgac

SEQ ID NO: 3126634 - DNA, 25 bp, Homo sapien
tctgcagcatgaagactgtcagccc

SEQ ID NO: 3126635 - DNA, 25 bp, Homo sapien
ccagaagtgatgtccccagaagtga

SEQ ID NO: 3126636 - DNA, 25 bp, Homo sapien
tccaggaagtacgtgcccagaagtg

SEQ ID NO: 3126637 - DNA, 25 bp, Homo sapien
ttgagggatcattctacaggagcag

SEQ ID NO: 3126638 - DNA, 25 bp, Homo sapien
ctggtctcccccctgcatcgacttt

SEQ ID NO: 3126639 - DNA, 25 bp, Homo sapien
atcgactttcatccaatgcacctgc

SEQ ID NO: 3126640 - DNA, 25 bp, Homo sapien
ctgaaagctgaacccccctcttcct

SEQ ID NO: 3126641 - DNA, 25 bp, Homo sapien
cctgcatcgactttcatccaatgca

SEQ ID NO: 3126642 - DNA, 25 bp, Homo sapien
tcctccggctgcattccaaggtaaa

SEQ ID NO: 3126643 - DNA, 25 bp, Homo sapien
caaagtacactgaaggattcccggg

SEQ ID NO: 3126644 - DNA, 25 bp, Homo sapien
aggtaaagtattcccatcagatccc

SEQ ID NO: 3126645 - DNA, 25 bp, Homo sapien
tcagatccctttatccctagagtcc

SEQ ID NO: 3126646 - DNA, 25 bp, Homo sapien
ggcagactcacttcaccgttagaga

SEQ ID NO: 3126647 - DNA, 25 bp, Homo sapien
gatatatcacccatgctcaaagaaa

SEQ ID NO: 3126648 - DNA, 25 bp, Homo sapien
gaattacctgctttgaggcaacgct

SEQ ID NO: 3126649 - DNA, 25 bp, Homo sapien
ggctctaggttcacagtacacagaa

SEQ ID NO: 3126650 - DNA, 25 bp, Homo sapien
acttcagttccagcatcatggccag

SEQ ID NO: 3126651 - DNA, 25 bp, Homo sapien
cccctgggcaagatatgcagcagca

SEQ ID NO: 3126652 - DNA, 25 bp, Homo sapien
gctctcaactgtggcatataccttt

SEQ ID NO: 3126653 - DNA, 25 bp, Homo sapien
cccaagtaatggagagttcttatgc

SEQ ID NO: 3126654 - DNA, 25 bp, Homo sapien
ggtgagcaggaactgctgctacact

SEQ ID NO: 3126655 - DNA, 25 bp, Homo sapien
tccttttgccggaaggtgagcagga

SEQ ID NO: 3126656 - DNA, 25 bp, Homo sapien
caggagtagctaggccattacagca

SEQ ID NO: 3126657 - DNA, 25 bp, Homo sapien
actgccaggtcatgtttggctcctt

SEQ ID NO: 3126658 - DNA, 25 bp, Homo sapien
caatggcaggtttctctagacagga

SEQ ID NO: 3126659 - DNA, 25 bp, Homo sapien
gtctgtgacactgcgaaatacacta

SEQ ID NO: 3126660 - DNA, 25 bp, Homo sapien
cccaatggcaggtttctctagacag

SEQ ID NO: 3126661 - DNA, 25 bp, Homo sapien
actgcgaaatacactaacccagacc

SEQ ID NO: 3126662 - DNA, 25 bp, Homo sapien
ccccaagcataatccagtcttcctc

SEQ ID NO: 3126663 - DNA, 25 bp, Homo sapien
tgtgaacttgatcttcgttctatct

SEQ ID NO: 3126664 - DNA, 25 bp, Homo sapien
ctccccaagcataatccagtcttcc

SEQ ID NO: 3126665 - DNA, 25 bp, Homo sapien
tccccaagcataatccagtcttcct

SEQ ID NO: 3126666 - DNA, 25 bp, Homo sapien
caactgtcaggtccgtgtgagcaca

SEQ ID NO: 3126667 - DNA, 25 bp, Homo sapien
tgcaagtgtgactgtccaaatgacc

SEQ ID NO: 3126668 - DNA, 25 bp, Homo sapien
agatgaaaggtcaactgtcaggtcc

SEQ ID NO: 3126669 - DNA, 25 bp, Homo sapien
cacagtcatggcaataagtacccag

SEQ ID NO: 3126670 - DNA, 25 bp, Homo sapien
gactaagaactgtcccacgtgatga

SEQ ID NO: 3126671 - DNA, 25 bp, Homo sapien
gaacatcagtgaaggggactaagaa

SEQ ID NO: 3126672 - DNA, 25 bp, Homo sapien
catcagtgaaggggactaagaactg

SEQ ID NO: 3126673 - DNA, 25 bp, Homo sapien
tcagtgaaggggactaagaactgtc

SEQ ID NO: 3126674 - DNA, 25 bp, Homo sapien
tcacttaagtcagacctgggcaaca

SEQ ID NO: 3126675 - DNA, 25 bp, Homo sapien
tgggcaacaggaaagtaggaagtac

SEQ ID NO: 3126676 - DNA, 25 bp, Homo sapien
tatcacttaagtcagacctgggcaa

SEQ ID NO: 3126677 - DNA, 25 bp, Homo sapien
caggaaagtaggaagtaccctggag

SEQ ID NO: 3126678 - DNA, 25 bp, Homo sapien
aaaggctgggctgtacgtcgagttc

SEQ ID NO: 3126679 - DNA, 25 bp, Homo sapien
cagctcaaggacttttgttgtggcc

SEQ ID NO: 3126680 - DNA, 25 bp, Homo sapien
tgagcagaggaagatgccaagcaca

SEQ ID NO: 3126681 - DNA, 25 bp, Homo sapien
tccaagtgcactcttatcaaatgac

SEQ ID NO: 3126682 - DNA, 25 bp, Homo sapien
gaaacggagtcatcaagaggcctca

SEQ ID NO: 3126683 - DNA, 25 bp, Homo sapien
tgccaggaaacggagtcatcaagag

SEQ ID NO: 3126684 - DNA, 25 bp, Homo sapien
caggaaacggagtcatcaagaggcc

SEQ ID NO: 3126685 - DNA, 25 bp, Homo sapien
aacaggagacattgccaggaaacgg

SEQ ID NO: 3126686 - DNA, 25 bp, Homo sapien
ggagagctggcacacccaaaggttt

SEQ ID NO: 3126687 - DNA, 25 bp, Homo sapien
aaggtggagcgttcaaggtcattgt

SEQ ID NO: 3126688 - DNA, 25 bp, Homo sapien
gctggcacacccaaaggtttcaaaa

SEQ ID NO: 3126689 - DNA, 25 bp, Homo sapien
taaaaaggtggagcgttcaaggtca

SEQ ID NO: 3126690 - DNA, 25 bp, Homo sapien
ctacccagggttatgcctgccatca

SEQ ID NO: 3126691 - DNA, 25 bp, Homo sapien
acccagggttatgcctgccatcatc

SEQ ID NO: 3126692 - DNA, 25 bp, Homo sapien
tgccatcatccccctgaaacttcat

SEQ ID NO: 3126693 - DNA, 25 bp, Homo sapien
tacccagggttatgcctgccatcat

SEQ ID NO: 3126694 - DNA, 25 bp, Homo sapien
aactcattcccgtgcatcccgtgga

SEQ ID NO: 3126695 - DNA, 25 bp, Homo sapien
tcccgtggacgcatggaaatgaagt

SEQ ID NO: 3126696 - DNA, 25 bp, Homo sapien
cacaagtcgctgcatgagggctctc

SEQ ID NO: 3126697 - DNA, 25 bp, Homo sapien
tagactccactacaagcaccaagag

SEQ ID NO: 3126698 - DNA, 25 bp, Homo sapien
tcaacactatgatcttgcatctcac

SEQ ID NO: 3126699 - DNA, 25 bp, Homo sapien
gagaaaggtcaacactatgatcttg

SEQ ID NO: 3126700 - DNA, 25 bp, Homo sapien
gtaggagaaaggtcaacactatgat

SEQ ID NO: 3126701 - DNA, 25 bp, Homo sapien
gaaaggtcaacactatgatcttgca

SEQ ID NO: 3126702 - DNA, 25 bp, Homo sapien
ctcacacacgcattgctggttaaga

SEQ ID NO: 3126703 - DNA, 25 bp, Homo sapien
tctgcaaagtatccccaaacaactt

SEQ ID NO: 3126704 - DNA, 25 bp, Homo sapien
taagaatatattcgtacacagtgaa

SEQ ID NO: 3126705 - DNA, 25 bp, Homo sapien
cctccgggggcatagttttaatgat

SEQ ID NO: 3126706 - DNA, 25 bp, Homo sapien
acactgatttgcccattttagaggt

SEQ ID NO: 3126707 - DNA, 25 bp, Homo sapien
taggggatgggtggcaaaactcatt

SEQ ID NO: 3126708 - DNA, 25 bp, Homo sapien
ctgatttgcccattttagaggtagg

SEQ ID NO: 3126709 - DNA, 25 bp, Homo sapien
gtaggggatgggtggcaaaactcat

SEQ ID NO: 3126710 - DNA, 25 bp, Homo sapien
tcattaagctggttaaataactcga

SEQ ID NO: 3126711 - DNA, 25 bp, Homo sapien
gctggttaaataactcgatataagc

SEQ ID NO: 3126712 - DNA, 25 bp, Homo sapien
aaccaggacccaagccttaaggcag

SEQ ID NO: 3126713 - DNA, 25 bp, Homo sapien
taactcgatataagcccaaaccagg

SEQ ID NO: 3126714 - DNA, 25 bp, Homo sapien
gggatcaggagctctaacttcacaa

SEQ ID NO: 3126715 - DNA, 25 bp, Homo sapien
ctctaacttcacaaagcccaaaagg

SEQ ID NO: 3126716 - DNA, 25 bp, Homo sapien
gaataccgagttctttgtgtccagg

SEQ ID NO: 3126717 - DNA, 25 bp, Homo sapien
gggagtacttgtgtcagggaatacc

SEQ ID NO: 3126718 - DNA, 25 bp, Homo sapien
cacagaacctcgtggtgaagaggag

SEQ ID NO: 3126719 - DNA, 25 bp, Homo sapien
tgaagaggagcaagtaggcccttta

SEQ ID NO: 3126720 - DNA, 25 bp, Homo sapien
agcaagtaggccctttaaaagccat

SEQ ID NO: 3126721 - DNA, 25 bp, Homo sapien
tgctcacagaacctcgtggtgaaga

SEQ ID NO: 3126722 - DNA, 25 bp, Homo sapien
cgctgcctccttatgactgggagga

SEQ ID NO: 3126723 - DNA, 25 bp, Homo sapien
actgggaggatcaaacgagaaggca

SEQ ID NO: 3126724 - DNA, 25 bp, Homo sapien
ccttatgactgggaggatcaaacga

SEQ ID NO: 3126725 - DNA, 25 bp, Homo sapien
caaacgagaaggcagcgtttccagg

SEQ ID NO: 3126726 - DNA, 25 bp, Homo sapien
taggctgtcactatcaagggcaggc

SEQ ID NO: 3126727 - DNA, 25 bp, Homo sapien
aagggcaggcaagatgaggatcaca

SEQ ID NO: 3126728 - DNA, 25 bp, Homo sapien
caagatagccttggatacccttcac

SEQ ID NO: 3126729 - DNA, 25 bp, Homo sapien
ggtccactgtgcactaagggctcat

SEQ ID NO: 3126730 - DNA, 25 bp, Homo sapien
ccttccaaggtgagtagcagttcaa

SEQ ID NO: 3126731 - DNA, 25 bp, Homo sapien
ctgctccttccaaggtgagtagcag

SEQ ID NO: 3126732 - DNA, 25 bp, Homo sapien
ccaaggtgagtagcagttcaataga

SEQ ID NO: 3126733 - DNA, 25 bp, Homo sapien
tagcagttcaatagaatttgttctg

SEQ ID NO: 3126734 - DNA, 25 bp, Homo sapien
tgatgatgctgcattgacctgagga

SEQ ID NO: 3126735 - DNA, 25 bp, Homo sapien
gctgatgatgctgcattgacctgag

SEQ ID NO: 3126736 - DNA, 25 bp, Homo sapien
gagctgatgatgctgcattgacctg

SEQ ID NO: 3126737 - DNA, 25 bp, Homo sapien
gatgatgctgcattgacctgaggat

SEQ ID NO: 3126738 - DNA, 25 bp, Homo sapien
tcaccttggaacaactcatgacacg

SEQ ID NO: 3126739 - DNA, 25 bp, Homo sapien
gaagatttggcagataagataggtc

SEQ ID NO: 3126740 - DNA, 25 bp, Homo sapien
tcatgacacgtaaggaagatttggc

SEQ ID NO: 3126741 - DNA, 25 bp, Homo sapien
gataggtctcattttagatccttgg

SEQ ID NO: 3126742 - DNA, 25 bp, Homo sapien
tgcacatccgaagcaatgcaaaggg

SEQ ID NO: 3126743 - DNA, 25 bp, Homo sapien
gcctatgacaggcaatgggatcatc

SEQ ID NO: 3126744 - DNA, 25 bp, Homo sapien
gagggccagagacaacttacaggtt

SEQ ID NO: 3126745 - DNA, 25 bp, Homo sapien
ggctgtagctcctgccaatgcaata

SEQ ID NO: 3126746 - DNA, 25 bp, Homo sapien
gagttctcatgggtcactataatcc

SEQ ID NO: 3126747 - DNA, 25 bp, Homo sapien
aaacaccatctatggtcctttcaaa

SEQ ID NO: 3126748 - DNA, 25 bp, Homo sapien
caaaattgtacaagctgtcagtatc

SEQ ID NO: 3126749 - DNA, 25 bp, Homo sapien
attcaggcctcggaagaccccaagg

SEQ ID NO: 3126750 - DNA, 25 bp, Homo sapien
cactgtatcagtttgccatgcttcc

SEQ ID NO: 3126751 - DNA, 25 bp, Homo sapien
gtggtcaacacctgactcaagaatt

SEQ ID NO: 3126752 - DNA, 25 bp, Homo sapien
ctgagatttaaagtggtcaacacct

SEQ ID NO: 3126753 - DNA, 25 bp, Homo sapien
gcttcccgacgacaacttcgtaaca

SEQ ID NO: 3126754 - DNA, 25 bp, Homo sapien
ctctgatgcttgcaaagaaaggctg

SEQ ID NO: 3126755 - DNA, 25 bp, Homo sapien
ccaccaagacagttagagatgtgtg

SEQ ID NO: 3126756 - DNA, 25 bp, Homo sapien
gaatgcctagatcagccaccaagac

SEQ ID NO: 3126757 - DNA, 25 bp, Homo sapien
cacaagtgtgtgaaatataggcata

SEQ ID NO: 3126758 - DNA, 25 bp, Homo sapien
aagtatccagatgatctttgtagcc

SEQ ID NO: 3126759 - DNA, 25 bp, Homo sapien
ttgcagtgtttcgaagtatccagat

SEQ ID NO: 3126760 - DNA, 25 bp, Homo sapien
tccatttgcagtgtttcgaagtatc

SEQ ID NO: 3126761 - DNA, 25 bp, Homo sapien
cgaagtatccagatgatctttgtag

SEQ ID NO: 3126762 - DNA, 25 bp, Homo sapien
tcagcagagatgttaggcagtgccc

SEQ ID NO: 3126763 - DNA, 25 bp, Homo sapien
taatgcagtggtcttccctgtaggt

SEQ ID NO: 3126764 - DNA, 25 bp, Homo sapien
ggcagtgcccagtaacaccgggtaa

SEQ ID NO: 3126765 - DNA, 25 bp, Homo sapien
ccgggtaaccataagcagagagcta

SEQ ID NO: 3126766 - DNA, 25 bp, Homo sapien
tgatctgacagacttttgggctgga

SEQ ID NO: 3126767 - DNA, 25 bp, Homo sapien
ggtatccgaatctgggctgctgaga

SEQ ID NO: 3126768 - DNA, 25 bp, Homo sapien
ccttgcaccagttgtggaattaacc

SEQ ID NO: 3126769 - DNA, 25 bp, Homo sapien
gcagcctgaaccaagttctccctgg

SEQ ID NO: 3126770 - DNA, 25 bp, Homo sapien
tcacaatctgagacctccattgacc

SEQ ID NO: 3126771 - DNA, 25 bp, Homo sapien
acaatctgagacctccattgaccca

SEQ ID NO: 3126772 - DNA, 25 bp, Homo sapien
ttcacaatctgagacctccattgac

SEQ ID NO: 3126773 - DNA, 25 bp, Homo sapien
ttttcacaatctgagacctccattg

SEQ ID NO: 3126774 - DNA, 25 bp, Homo sapien
tcctccacagcctgatagtctccca

SEQ ID NO: 3126775 - DNA, 25 bp, Homo sapien
cagcctgatagtctcccatccttcc

SEQ ID NO: 3126776 - DNA, 25 bp, Homo sapien
gcttccccgagtggtgccacgcagg

SEQ ID NO: 3126777 - DNA, 25 bp, Homo sapien
tggtgccacgcaggcacgctcaggc

SEQ ID NO: 3126778 - DNA, 25 bp, Homo sapien
ctgtgttgataagcattaccaccaa

SEQ ID NO: 3126779 - DNA, 25 bp, Homo sapien
tatgatccagctccgttcttttgaa

SEQ ID NO: 3126780 - DNA, 25 bp, Homo sapien
ggcgccgacaatgcagtacatggtc

SEQ ID NO: 3126781 - DNA, 25 bp, Homo sapien
agacagtccgaaggcgccgacaatg

SEQ ID NO: 3126782 - DNA, 25 bp, Homo sapien
ccatgtatgatccagctccgttctt

SEQ ID NO: 3126783 - DNA, 25 bp, Homo sapien
aagcagaaaggttataggatggact

SEQ ID NO: 3126784 - DNA, 25 bp, Homo sapien
ttcagtgcagttcacatcacagtgc

SEQ ID NO: 3126785 - DNA, 25 bp, Homo sapien
gacttcagtgcagttcacatcacag

SEQ ID NO: 3126786 - DNA, 25 bp, Homo sapien
ctgacttcagtgcagttcacatcac

SEQ ID NO: 3126787 - DNA, 25 bp, Homo sapien
tcccagaggcagtacttgcatgtca

SEQ ID NO: 3126788 - DNA, 25 bp, Homo sapien
cctagattggcagacaagatcccat

SEQ ID NO: 3126789 - DNA, 25 bp, Homo sapien
ggcagacagtcaggcaccaatagaa

SEQ ID NO: 3126790 - DNA, 25 bp, Homo sapien
tccaaaccagattctcaagcgagca

SEQ ID NO: 3126791 - DNA, 25 bp, Homo sapien
gtatccccagtcgagaacatcttgt

SEQ ID NO: 3126792 - DNA, 25 bp, Homo sapien
taagccttcattaagggccacctgc

SEQ ID NO: 3126793 - DNA, 25 bp, Homo sapien
gaagatgtgatgttgctcggccttt

SEQ ID NO: 3126794 - DNA, 25 bp, Homo sapien
gaagatagcttaacctgtaggtaca

SEQ ID NO: 3126795 - DNA, 25 bp, Homo sapien
taagggtctaatctcacttttggaa

SEQ ID NO: 3126796 - DNA, 25 bp, Homo sapien
tattttataatgatacatgggctgg

SEQ ID NO: 3126797 - DNA, 25 bp, Homo sapien
aaattgcagtagctaattttctgat

SEQ ID NO: 3126798 - DNA, 25 bp, Homo sapien
tccagtagatggaattgcaatcctt

SEQ ID NO: 3126799 - DNA, 25 bp, Homo sapien
gccagcatacccatgcacagctttg

SEQ ID NO: 3126800 - DNA, 25 bp, Homo sapien
ctccggtgtctttttgtactccttg

SEQ ID NO: 3126801 - DNA, 25 bp, Homo sapien
gagtaccctttcagtgccagcatac

SEQ ID NO: 3126802 - DNA, 25 bp, Homo sapien
tgagagtttgcacggtaggcaaaca

SEQ ID NO: 3126803 - DNA, 25 bp, Homo sapien
ttactgggaaagctagacaagcctt

SEQ ID NO: 3126804 - DNA, 25 bp, Homo sapien
cagagttggaactgtaaaccctgcc

SEQ ID NO: 3126805 - DNA, 25 bp, Homo sapien
gacaagcctttgctatggtgaaaga

SEQ ID NO: 3126806 - DNA, 25 bp, Homo sapien
gcatctcctgatcgccctttaagtt

SEQ ID NO: 3126807 - DNA, 25 bp, Homo sapien
agcagtgtcaagtcaatctccaaaa

SEQ ID NO: 3126808 - DNA, 25 bp, Homo sapien
ttcctgccgactaatgaactcatgt

SEQ ID NO: 3126809 - DNA, 25 bp, Homo sapien
tagactcagttgatgtgcacagcag

SEQ ID NO: 3126810 - DNA, 25 bp, Homo sapien
gaactcatgttgatacagacctttg

SEQ ID NO: 3126811 - DNA, 25 bp, Homo sapien
ttagcaccttcagagacccggagtc

SEQ ID NO: 3126812 - DNA, 25 bp, Homo sapien
tatgccgtgtgatactaccttattt

SEQ ID NO: 3126813 - DNA, 25 bp, Homo sapien
aattttgtaatatgccgtgtgatac

SEQ ID NO: 3126814 - DNA, 25 bp, Homo sapien
agacccggagtcatttgatgtgctt

SEQ ID NO: 3126815 - DNA, 25 bp, Homo sapien
tatggcttcatttcacagcttcaca

SEQ ID NO: 3126816 - DNA, 25 bp, Homo sapien
ggcttcatttcacagcttcacacag

SEQ ID NO: 3126817 - DNA, 25 bp, Homo sapien
cttcatttcacagcttcacacagca

SEQ ID NO: 3126818 - DNA, 25 bp, Homo sapien
tggcttcatttcacagcttcacaca

SEQ ID NO: 3126819 - DNA, 25 bp, Homo sapien
gatgtagaagcctacaccagggcct

SEQ ID NO: 3126820 - DNA, 25 bp, Homo sapien
tgacgcccagggttctgatgtagaa

SEQ ID NO: 3126821 - DNA, 25 bp, Homo sapien
tcatccttggagtgaaagcagctac

SEQ ID NO: 3126822 - DNA, 25 bp, Homo sapien
tgtgaaactcatggcagtccacgcc

SEQ ID NO: 3126823 - DNA, 25 bp, Homo sapien
tatctagagggcagttggctcgccc

SEQ ID NO: 3126824 - DNA, 25 bp, Homo sapien
ggctaaatgtggacctcgctcgcta

SEQ ID NO: 3126825 - DNA, 25 bp, Homo sapien
gaacgtgttgggtcaagctctaagc

SEQ ID NO: 3126826 - DNA, 25 bp, Homo sapien
caaaatagcaccgaagtccaggagg

SEQ ID NO: 3126827 - DNA, 25 bp, Homo sapien
tatatgattccgcttttacttgaat

SEQ ID NO: 3126828 - DNA, 25 bp, Homo sapien
gaaatacttagttctcatgtcaaat

SEQ ID NO: 3126829 - DNA, 25 bp, Homo sapien
caaactaatttaacgatatgaaata

SEQ ID NO: 3126830 - DNA, 25 bp, Homo sapien
taggaaacagatactcattacatag

SEQ ID NO: 3126831 - DNA, 25 bp, Homo sapien
aagtttgttgtttcaaactattcag

SEQ ID NO: 3126832 - DNA, 25 bp, Homo sapien
ctggaaatcccgaagtctaggtgtc

SEQ ID NO: 3126833 - DNA, 25 bp, Homo sapien
ggtggcaaacttggccagagtcctc

SEQ ID NO: 3126834 - DNA, 25 bp, Homo sapien
acccagcaggagatagggccagtcc

SEQ ID NO: 3126835 - DNA, 25 bp, Homo sapien
ttttgtactcacaaagccctaagag

SEQ ID NO: 3126836 - DNA, 25 bp, Homo sapien
taatccataagacaatcgtgccaag

SEQ ID NO: 3126837 - DNA, 25 bp, Homo sapien
agtaggccctccaatcacaaacagg

SEQ ID NO: 3126838 - DNA, 25 bp, Homo sapien
taagctaggcctgggtatctcgagt

SEQ ID NO: 3126839 - DNA, 25 bp, Homo sapien
tagttgggtgctgctcacgatgacg

SEQ ID NO: 3126840 - DNA, 25 bp, Homo sapien
tctcacattaacactcatgagcact

SEQ ID NO: 3126841 - DNA, 25 bp, Homo sapien
tttttatttctagcaattctcacat

SEQ ID NO: 3126842 - DNA, 25 bp, Homo sapien
ttatttctagcaattctcacattaa

SEQ ID NO: 3126843 - DNA, 25 bp, Homo sapien
cattaacactcatgagcactcttgt

SEQ ID NO: 3126844 - DNA, 25 bp, Homo sapien
cttcaatacagatagcttcaaaaca

SEQ ID NO: 3126845 - DNA, 25 bp, Homo sapien
tcaatacagatagcttcaaaacaaa

SEQ ID NO: 3126846 - DNA, 25 bp, Homo sapien
taacttcaatacagatagcttcaaa

SEQ ID NO: 3126847 - DNA, 25 bp, Homo sapien
ataaataacttcaatacagatagct

SEQ ID NO: 3126848 - DNA, 25 bp, Homo sapien
ggtctctgcccagctatcaaggcaa

SEQ ID NO: 3126849 - DNA, 25 bp, Homo sapien
agccaagcaccacagggaaaggaga

SEQ ID NO: 3126850 - DNA, 25 bp, Homo sapien
gagagatatgtacgccagccaagca

SEQ ID NO: 3126851 - DNA, 25 bp, Homo sapien
gcatagaaggtcaagtagggcaacc

SEQ ID NO: 3126852 - DNA, 25 bp, Homo sapien
tttcctttgaatgtgaatatcccat

SEQ ID NO: 3126853 - DNA, 25 bp, Homo sapien
gtactggccttaatcttacagcctg

SEQ ID NO: 3126854 - DNA, 25 bp, Homo sapien
tctgctcctgaaagtcctcagagac

SEQ ID NO: 3126855 - DNA, 25 bp, Homo sapien
tgcgtaacaacttcagggagtatcc

SEQ ID NO: 3126856 - DNA, 25 bp, Homo sapien
tgaaatcgtgatgtctgtactccag

SEQ ID NO: 3126857 - DNA, 25 bp, Homo sapien
aactacctgtatcctcttcctccca

SEQ ID NO: 3126858 - DNA, 25 bp, Homo sapien
tgggcactccgtttccttgacagca

SEQ ID NO: 3126859 - DNA, 25 bp, Homo sapien
tggtgaccggtgaatcataaagcac

SEQ ID NO: 3126860 - DNA, 25 bp, Homo sapien
cataaagcacacaggtaaaatacag

SEQ ID NO: 3126861 - DNA, 25 bp, Homo sapien
atttactgctaatttctgcagaacc

SEQ ID NO: 3126862 - DNA, 25 bp, Homo sapien
tctgcagaacctccggcagcttgaa

SEQ ID NO: 3126863 - DNA, 25 bp, Homo sapien
tgctaatttctgcagaacctccggc

SEQ ID NO: 3126864 - DNA, 25 bp, Homo sapien
taatttctgcagaacctccggcagc

SEQ ID NO: 3126865 - DNA, 25 bp, Homo sapien
cacagctccatggtgcaaacgctcc

SEQ ID NO: 3126866 - DNA, 25 bp, Homo sapien
ccacagctccatggtgcaaacgctc

SEQ ID NO: 3126867 - DNA, 25 bp, Homo sapien
cagctccatggtgcaaacgctccac

SEQ ID NO: 3126868 - DNA, 25 bp, Homo sapien
acagctccatggtgcaaacgctcca

SEQ ID NO: 3126869 - DNA, 25 bp, Homo sapien
tgcaaacctccacacgacctctagg

SEQ ID NO: 3126870 - DNA, 25 bp, Homo sapien
cagattccctactgtctgagcacac

SEQ ID NO: 3126871 - DNA, 25 bp, Homo sapien
ctccagattccctactgtctgagca

SEQ ID NO: 3126872 - DNA, 25 bp, Homo sapien
tctaagcatcctttactcttgcaaa

SEQ ID NO: 3126873 - DNA, 25 bp, Homo sapien
gtgtcaccacactatccacattcag

SEQ ID NO: 3126874 - DNA, 25 bp, Homo sapien
cccattcgtcacctcattggctatg

SEQ ID NO: 3126875 - DNA, 25 bp, Homo sapien
ttccatcctttactcttgacagcga

SEQ ID NO: 3126876 - DNA, 25 bp, Homo sapien
cagcgatgctaggaacagtgtcacc

SEQ ID NO: 3126877 - DNA, 25 bp, Homo sapien
tctctgtactgagcagtggcaccaa

SEQ ID NO: 3126878 - DNA, 25 bp, Homo sapien
ggcaccaagattctaatccacatct

SEQ ID NO: 3126879 - DNA, 25 bp, Homo sapien
gctgaagggcttgccaagtcctctc

SEQ ID NO: 3126880 - DNA, 25 bp, Homo sapien
ccagggagctgaagggcttgccaag

SEQ ID NO: 3126881 - DNA, 25 bp, Homo sapien
cataacagatcataagcctgtgtca

SEQ ID NO: 3126882 - DNA, 25 bp, Homo sapien
tgaacgagacatagtcctggatacc

SEQ ID NO: 3126883 - DNA, 25 bp, Homo sapien
gtgggtgtggaactgcaaagtatat

SEQ ID NO: 3126884 - DNA, 25 bp, Homo sapien
atgcaccatggcagacacagacgca

SEQ ID NO: 3126885 - DNA, 25 bp, Homo sapien
ccttctcgctggtgtgtcccttagt

SEQ ID NO: 3126886 - DNA, 25 bp, Homo sapien
tccttctcgctggtgtgtcccttag

SEQ ID NO: 3126887 - DNA, 25 bp, Homo sapien
tctcgctggtgtgtcccttagttgc

SEQ ID NO: 3126888 - DNA, 25 bp, Homo sapien
tcgctggtgtgtcccttagttgctt

SEQ ID NO: 3126889 - DNA, 25 bp, Homo sapien
gcacagaaactctatggatgcacct

SEQ ID NO: 3126890 - DNA, 25 bp, Homo sapien
tgttcttcttaccagaaaccagctc

SEQ ID NO: 3126891 - DNA, 25 bp, Homo sapien
gctcgactcttgtgagctccatcag

SEQ ID NO: 3126892 - DNA, 25 bp, Homo sapien
caaagccttgctcgactcttgtgag

SEQ ID NO: 3126893 - DNA, 25 bp, Homo sapien
aatttagcgtgaaaaggctccagcg

SEQ ID NO: 3126894 - DNA, 25 bp, Homo sapien
gcggccagagtcctcacgaatgagt

SEQ ID NO: 3126895 - DNA, 25 bp, Homo sapien
tcaggtccagttgtaatgcccagtg

SEQ ID NO: 3126896 - DNA, 25 bp, Homo sapien
ggtgttcgcctacctgcaagtatag

SEQ ID NO: 3126897 - DNA, 25 bp, Homo sapien
cacaggacaataggctgcagctgga

SEQ ID NO: 3126898 - DNA, 25 bp, Homo sapien
aagtgaattgtcctgcattttgcag

SEQ ID NO: 3126899 - DNA, 25 bp, Homo sapien
ggagccccagagtctaatcacagga

SEQ ID NO: 3126900 - DNA, 25 bp, Homo sapien
cattttgcagcacacgcatcatcct

SEQ ID NO: 3126901 - DNA, 25 bp, Homo sapien
ctataagacggctgcttctctgatt

SEQ ID NO: 3126902 - DNA, 25 bp, Homo sapien
agagaatggtctgtcaaccctctcc

SEQ ID NO: 3126903 - DNA, 25 bp, Homo sapien
tcttggagagaatggtctgtcaacc

SEQ ID NO: 3126904 - DNA, 25 bp, Homo sapien
tttacatactctgaatcttggagag

SEQ ID NO: 3126905 - DNA, 25 bp, Homo sapien
acctaaaacactcgggctatttgct

SEQ ID NO: 3126906 - DNA, 25 bp, Homo sapien
tagattgtgtaaacctaaaacactc

SEQ ID NO: 3126907 - DNA, 25 bp, Homo sapien
cacatgctctggattgtttagattg

SEQ ID NO: 3126908 - DNA, 25 bp, Homo sapien
aacactcgggctatttgcttttcca

SEQ ID NO: 3126909 - DNA, 25 bp, Homo sapien
cagatccttcctcacctctaatgac

SEQ ID NO: 3126910 - DNA, 25 bp, Homo sapien
caactaaggagccatgcaaggggga

SEQ ID NO: 3126911 - DNA, 25 bp, Homo sapien
tccagcaatgatattctcagatcct

SEQ ID NO: 3126912 - DNA, 25 bp, Homo sapien
cagtcccagtccaactgctcatttt

SEQ ID NO: 3126913 - DNA, 25 bp, Homo sapien
caatgagtcatagcgaacttttcct

SEQ ID NO: 3126914 - DNA, 25 bp, Homo sapien
tggataaacaatttacccggctcta

SEQ ID NO: 3126915 - DNA, 25 bp, Homo sapien
tatatattaaaaatgctatcggccg

SEQ ID NO: 3126916 - DNA, 25 bp, Homo sapien
taacatgagatcatagcttcctacg

SEQ ID NO: 3126917 - DNA, 25 bp, Homo sapien
tgccttgaagaataactcttcttct

SEQ ID NO: 3126918 - DNA, 25 bp, Homo sapien
accctcaggccagtcaatccgtatg

SEQ ID NO: 3126919 - DNA, 25 bp, Homo sapien
gcatccttttcctcccctagtccca

SEQ ID NO: 3126920 - DNA, 25 bp, Homo sapien
ccagtcaatccgtatgggattgctg

SEQ ID NO: 3126921 - DNA, 25 bp, Homo sapien
ccttagatttgaagctggcaatgcg

SEQ ID NO: 3126922 - DNA, 25 bp, Homo sapien
ttgtgatttcagctttacagtcacc

SEQ ID NO: 3126923 - DNA, 25 bp, Homo sapien
ctggcaatgcgtaggccagaggaca

SEQ ID NO: 3126924 - DNA, 25 bp, Homo sapien
gctttacagtcaccttagatttgaa

SEQ ID NO: 3126925 - DNA, 25 bp, Homo sapien
tggatatgcaagaagttccttaacc

SEQ ID NO: 3126926 - DNA, 25 bp, Homo sapien
cctctggatatgcaagaagttcctt

SEQ ID NO: 3126927 - DNA, 25 bp, Homo sapien
ctctggatatgcaagaagttcctta

SEQ ID NO: 3126928 - DNA, 25 bp, Homo sapien
tctggatatgcaagaagttccttaa

SEQ ID NO: 3126929 - DNA, 25 bp, Homo sapien
agcctacaagtcctgcctccccttc

SEQ ID NO: 3126930 - DNA, 25 bp, Homo sapien
ggctgacgctccacagcctacaagt

SEQ ID NO: 3126931 - DNA, 25 bp, Homo sapien
cctgcaaggctgacgctccacagcc

SEQ ID NO: 3126932 - DNA, 25 bp, Homo sapien
aaggctgacgctccacagcctacaa

SEQ ID NO: 3126933 - DNA, 25 bp, Homo sapien
gcttctcaaggtctccgaatcaagg

SEQ ID NO: 3126934 - DNA, 25 bp, Homo sapien
caaggcaagaagatgttgcatactc

SEQ ID NO: 3126935 - DNA, 25 bp, Homo sapien
caagaagatgttgcatactctttga

SEQ ID NO: 3126936 - DNA, 25 bp, Homo sapien
caaggtctccgaatcaaggcaagaa

SEQ ID NO: 3126937 - DNA, 25 bp, Homo sapien
cgggttccacaagcaaaactgacag

SEQ ID NO: 3126938 - DNA, 25 bp, Homo sapien
ccacagcagagtcgactctggacct

SEQ ID NO: 3126939 - DNA, 25 bp, Homo sapien
ctgtgactccgggttccacaagcaa

SEQ ID NO: 3126940 - DNA, 25 bp, Homo sapien
tcgactctggacctattaatatcac

SEQ ID NO: 3126941 - DNA, 25 bp, Homo sapien
tccctgaaagtagggtgtggtctcc

SEQ ID NO: 3126942 - DNA, 25 bp, Homo sapien
gacagtgagtccctgaaagtagggt

SEQ ID NO: 3126943 - DNA, 25 bp, Homo sapien
gtagggtgtggtctcctcttgatac

SEQ ID NO: 3126944 - DNA, 25 bp, Homo sapien
cctgacagtgagtccctgaaagtag

SEQ ID NO: 3126945 - DNA, 25 bp, Homo sapien
ccttgtggactcctggaggaccctg

SEQ ID NO: 3126946 - DNA, 25 bp, Homo sapien
ctccttgtggactcctggaggaccc

SEQ ID NO: 3126947 - DNA, 25 bp, Homo sapien
ggcagcctctccttgtggactcctg

SEQ ID NO: 3126948 - DNA, 25 bp, Homo sapien
tggaggaccctgggctcctttgtac

SEQ ID NO: 3126949 - DNA, 25 bp, Homo sapien
gagaccatccgccccaaagctgtgg

SEQ ID NO: 3126950 - DNA, 25 bp, Homo sapien
tgtgcacctctctttgacatggtcc

SEQ ID NO: 3126951 - DNA, 25 bp, Homo sapien
ttgtttggtccaaatagatggttga

SEQ ID NO: 3126952 - DNA, 25 bp, Homo sapien
tggtccaaatagatggttgaggcag

SEQ ID NO: 3126953 - DNA, 25 bp, Homo sapien
gtctcccatcttgctagataagtga

SEQ ID NO: 3126954 - DNA, 25 bp, Homo sapien
tctcccatcttgctagataagtgat

SEQ ID NO: 3126955 - DNA, 25 bp, Homo sapien
ctcccatcttgctagataagtgatc

SEQ ID NO: 3126956 - DNA, 25 bp, Homo sapien
tgtctcccatcttgctagataagtg

SEQ ID NO: 3126957 - DNA, 25 bp, Homo sapien
tgttgcccagcagttccttttattg

SEQ ID NO: 3126958 - DNA, 25 bp, Homo sapien
gtgttgcccagcagttccttttatt

SEQ ID NO: 3126959 - DNA, 25 bp, Homo sapien
aaccaaacaccgaatagtgtcaggg

SEQ ID NO: 3126960 - DNA, 25 bp, Homo sapien
tgaaaccaaacaccgaatagtgtca

SEQ ID NO: 3126961 - DNA, 25 bp, Homo sapien
caccgaatagtgtcagggtgtttac

SEQ ID NO: 3126962 - DNA, 25 bp, Homo sapien
caaacaccgaatagtgtcagggtgt

SEQ ID NO: 3126963 - DNA, 25 bp, Homo sapien
gcctgaacttggcagtcacgaccag

SEQ ID NO: 3126964 - DNA, 25 bp, Homo sapien
gccttgataccacctgagaccagct

SEQ ID NO: 3126965 - DNA, 25 bp, Homo sapien
gtttgtgtaagttgcaaggtgctac

SEQ ID NO: 3126966 - DNA, 25 bp, Homo sapien
aaggtgctactccaggccttgatac

SEQ ID NO: 3126967 - DNA, 25 bp, Homo sapien
gatggtttagtcagggtggttgggc

SEQ ID NO: 3126968 - DNA, 25 bp, Homo sapien
ctgtgggatggtttagtcagggtgg

SEQ ID NO: 3126969 - DNA, 25 bp, Homo sapien
gagccctggatttacccatgttggg

SEQ ID NO: 3126970 - DNA, 25 bp, Homo sapien
gccggatgagctcttatactgagcc

SEQ ID NO: 3126971 - DNA, 25 bp, Homo sapien
ttatactgagccctggatttaccca

SEQ ID NO: 3126972 - DNA, 25 bp, Homo sapien
gagctcttatactgagccctggatt

SEQ ID NO: 3126973 - DNA, 25 bp, Homo sapien
aaagagagggaagtgattctggttc

SEQ ID NO: 3126974 - DNA, 25 bp, Homo sapien
caggctcaaggtgtctaaaggtgtg

SEQ ID NO: 3126975 - DNA, 25 bp, Homo sapien
caaggtgtctaaaggtgtgaatact

SEQ ID NO: 3126976 - DNA, 25 bp, Homo sapien
gtgtctaaaggtgtgaatactaagc

SEQ ID NO: 3126977 - DNA, 25 bp, Homo sapien
ctaaaggtgtgaatactaagctgaa

SEQ ID NO: 3126978 - DNA, 25 bp, Homo sapien
gaagcttaaggcgtagacatcaggc

SEQ ID NO: 3126979 - DNA, 25 bp, Homo sapien
ttaaggcgtagacatcaggctgggt

SEQ ID NO: 3126980 - DNA, 25 bp, Homo sapien
caggaagcttaaggcgtagacatca

SEQ ID NO: 3126981 - DNA, 25 bp, Homo sapien
gcttaaggcgtagacatcaggctgg

SEQ ID NO: 3126982 - DNA, 25 bp, Homo sapien
gcccaaggagtgttccatttcactt

SEQ ID NO: 3126983 - DNA, 25 bp, Homo sapien
tctcctacagcccttacagcccact

SEQ ID NO: 3126984 - DNA, 25 bp, Homo sapien
ggtgctcttctcctacagcccttac

SEQ ID NO: 3126985 - DNA, 25 bp, Homo sapien
cccaaggagtgttccatttcacttt

SEQ ID NO: 3126986 - DNA, 25 bp, Homo sapien
atcatgagtgtctggaaccattcac

SEQ ID NO: 3126987 - DNA, 25 bp, Homo sapien
caatcatgagtgtctggaaccattc

SEQ ID NO: 3126988 - DNA, 25 bp, Homo sapien
tgcaatcatgagtgtctggaaccat

SEQ ID NO: 3126989 - DNA, 25 bp, Homo sapien
tttgcaatcatgagtgtctggaacc

SEQ ID NO: 3126990 - DNA, 25 bp, Homo sapien
tcctcattaaggcagtcatgcgggc

SEQ ID NO: 3126991 - DNA, 25 bp, Homo sapien
ttctacttgcaaggaccaccagtgg

SEQ ID NO: 3126992 - DNA, 25 bp, Homo sapien
gaaggcacggatccagtgtcagtga

SEQ ID NO: 3126993 - DNA, 25 bp, Homo sapien
gccccggcctgctcaagtattcatg

SEQ ID NO: 3126994 - DNA, 25 bp, Homo sapien
gatgccgcacttcctttgaaacgcg

SEQ ID NO: 3126995 - DNA, 25 bp, Homo sapien
gaactttctgcatgtgatctagcag

SEQ ID NO: 3126996 - DNA, 25 bp, Homo sapien
gcgatatccattgtctcccggtgcc

SEQ ID NO: 3126997 - DNA, 25 bp, Homo sapien
ttgaaacgcgatatccattgtctcc

SEQ ID NO: 3126998 - DNA, 25 bp, Homo sapien
atcttcccctgcaccttcctctatc

SEQ ID NO: 3126999 - DNA, 25 bp, Homo sapien
ccacctccttttggctgaggttgtt

SEQ ID NO: 3127000 - DNA, 25 bp, Homo sapien
tggctgaggttgttcccccttcctc

SEQ ID NO: 3127001 - DNA, 25 bp, Homo sapien
cctccacctccttttggctgaggtt

SEQ ID NO: 3127002 - DNA, 25 bp, Homo sapien
aagattcttgtttggccgataatgt

SEQ ID NO: 3127003 - DNA, 25 bp, Homo sapien
ctgcccagatttggcagcttcaaaa

SEQ ID NO: 3127004 - DNA, 25 bp, Homo sapien
tttggcagcttcaaaaggcccatga

SEQ ID NO: 3127005 - DNA, 25 bp, Homo sapien
gataatgtttcgagctgctgcccag

SEQ ID NO: 3127006 - DNA, 25 bp, Homo sapien
aagccaagagattttgcttcaggca

SEQ ID NO: 3127007 - DNA, 25 bp, Homo sapien
agccaagagattttgcttcaggcat

SEQ ID NO: 3127008 - DNA, 25 bp, Homo sapien
atcagtgaccactgaggtgatggca

SEQ ID NO: 3127009 - DNA, 25 bp, Homo sapien
agtgaccactgaggtgatggcaaac

SEQ ID NO: 3127010 - DNA, 25 bp, Homo sapien
cagtgaccactgaggtgatggcaaa

SEQ ID NO: 3127011 - DNA, 25 bp, Homo sapien
agatcagtgaccactgaggtgatgg

SEQ ID NO: 3127012 - DNA, 25 bp, Homo sapien
tgagttgtaaaccagaggtgaccac

SEQ ID NO: 3127013 - DNA, 25 bp, Homo sapien
tgaagtaagaatagacccatatgaa

SEQ ID NO: 3127014 - DNA, 25 bp, Homo sapien
catgaggcatgtacgattttgatcg

SEQ ID NO: 3127015 - DNA, 25 bp, Homo sapien
aacatgtatttcagcggtggttcta

SEQ ID NO: 3127016 - DNA, 25 bp, Homo sapien
ctgaggagacaggaagctgtggcta

SEQ ID NO: 3127017 - DNA, 25 bp, Homo sapien
aggagacaggaagctgtggctatca

SEQ ID NO: 3127018 - DNA, 25 bp, Homo sapien
gaggagacaggaagctgtggctatc

SEQ ID NO: 3127019 - DNA, 25 bp, Homo sapien
ggagacaggaagctgtggctatcac

SEQ ID NO: 3127020 - DNA, 25 bp, Homo sapien
tggcagaggcacccccaagacaggc

SEQ ID NO: 3127021 - DNA, 25 bp, Homo sapien
ctggcagaggcacccccaagacagg

SEQ ID NO: 3127022 - DNA, 25 bp, Homo sapien
gtgacttgaagagtttggtgactaa

SEQ ID NO: 3127023 - DNA, 25 bp, Homo sapien
tgtggcacagggtttatgggcagac

SEQ ID NO: 3127024 - DNA, 25 bp, Homo sapien
tgactaagaggtggattgtggcaca

SEQ ID NO: 3127025 - DNA, 25 bp, Homo sapien
aggtgggctgttgtcatgaatgtcc

SEQ ID NO: 3127026 - DNA, 25 bp, Homo sapien
tgttatgcttccctcaatcacgaaa

SEQ ID NO: 3127027 - DNA, 25 bp, Homo sapien
caatcacgaaaaggacaaacttctc

SEQ ID NO: 3127028 - DNA, 25 bp, Homo sapien
tcctgagtaaaagtgacctgaattc

SEQ ID NO: 3127029 - DNA, 25 bp, Homo sapien
tcaacagactggtcctgagtaaaag

SEQ ID NO: 3127030 - DNA, 25 bp, Homo sapien
ggaattttgacatcgaagaagattt

SEQ ID NO: 3127031 - DNA, 25 bp, Homo sapien
aggaattttgacatcgaagaagatt

SEQ ID NO: 3127032 - DNA, 25 bp, Homo sapien
agggggccagaaagggatgagcttt

SEQ ID NO: 3127033 - DNA, 25 bp, Homo sapien
aagggggccagaaagggatgagctt

SEQ ID NO: 3127034 - DNA, 25 bp, Homo sapien
tgttaacaacttcatgtccccgtgg

SEQ ID NO: 3127035 - DNA, 25 bp, Homo sapien
tcatcaaatagaccaagatccccag

SEQ ID NO: 3127036 - DNA, 25 bp, Homo sapien
gatctggctctccttgaccactgta

SEQ ID NO: 3127037 - DNA, 25 bp, Homo sapien
ctttgtcctagagccagcagagtcc

SEQ ID NO: 3127038 - DNA, 25 bp, Homo sapien
ggaagtagataggaacacaaaggaa

SEQ ID NO: 3127039 - DNA, 25 bp, Homo sapien
ttcgttcaggcttcttttcggaggc

SEQ ID NO: 3127040 - DNA, 25 bp, Homo sapien
taacttagcctttggcagtcttgcc

SEQ ID NO: 3127041 - DNA, 25 bp, Homo sapien
aaaatagcttgtgaaggaagtagat

SEQ ID NO: 3127042 - DNA, 25 bp, Homo sapien
aaaccagtgaattaggcatttccag

SEQ ID NO: 3127043 - DNA, 25 bp, Homo sapien
gccaggatctgtagagtcacgtaaa

SEQ ID NO: 3127044 - DNA, 25 bp, Homo sapien
cgtaaatcattgcagtcactttgga

SEQ ID NO: 3127045 - DNA, 25 bp, Homo sapien
ggccctgaggtagagcattcttact

SEQ ID NO: 3127046 - DNA, 25 bp, Homo sapien
gaacaacactagagagcttggtggg

SEQ ID NO: 3127047 - DNA, 25 bp, Homo sapien
gggacagatgatcactatagaccag

SEQ ID NO: 3127048 - DNA, 25 bp, Homo sapien
tcctccagaaatgtagggggacaga

SEQ ID NO: 3127049 - DNA, 25 bp, Homo sapien
aacacagtaacaaggaactctagac

SEQ ID NO: 3127050 - DNA, 25 bp, Homo sapien
cctccagaacacctctcagaaagtt

SEQ ID NO: 3127051 - DNA, 25 bp, Homo sapien
tgattacacccctatgtggccccaa

SEQ ID NO: 3127052 - DNA, 25 bp, Homo sapien
aagccagtgtgaagtgccgcctagc

SEQ ID NO: 3127053 - DNA, 25 bp, Homo sapien
tatttacggcagtgaggtcttggag

SEQ ID NO: 3127054 - DNA, 25 bp, Homo sapien
gagaaagggctccatacattgggca

SEQ ID NO: 3127055 - DNA, 25 bp, Homo sapien
acacacagagtttggctctccatac

SEQ ID NO: 3127056 - DNA, 25 bp, Homo sapien
agctcaccagtctcccttcggtttc

SEQ ID NO: 3127057 - DNA, 25 bp, Homo sapien
gagtttggctctccatacatgggtt

SEQ ID NO: 3127058 - DNA, 25 bp, Homo sapien
tggctctccatacatgggtttgaat

SEQ ID NO: 3127059 - DNA, 25 bp, Homo sapien
tggtttctgattgtccgggaccaac

SEQ ID NO: 3127060 - DNA, 25 bp, Homo sapien
tcctctgtgctaggagttttcctac

SEQ ID NO: 3127061 - DNA, 25 bp, Homo sapien
gacctttaatgaggagcagaaccct

SEQ ID NO: 3127062 - DNA, 25 bp, Homo sapien
tcttctccgaaggaaccaaaagtga

SEQ ID NO: 3127063 - DNA, 25 bp, Homo sapien
atttttacaagaactggaagctgag

SEQ ID NO: 3127064 - DNA, 25 bp, Homo sapien
ggcaagtccacagaacactcactgg

SEQ ID NO: 3127065 - DNA, 25 bp, Homo sapien
tctgtgtgacacatcatagcatcca

SEQ ID NO: 3127066 - DNA, 25 bp, Homo sapien
tagcatccaccacacaatacttagg

SEQ ID NO: 3127067 - DNA, 25 bp, Homo sapien
gagttgtgacaaccaccaaggatgt

SEQ ID NO: 3127068 - DNA, 25 bp, Homo sapien
tagcatctgtaatcagggccactcc

SEQ ID NO: 3127069 - DNA, 25 bp, Homo sapien
tactcctttggccaagggacatccg

SEQ ID NO: 3127070 - DNA, 25 bp, Homo sapien
tagtaacatcccacacacggtctag

SEQ ID NO: 3127071 - DNA, 25 bp, Homo sapien
gcttggtgtaggtggacaacagcat

SEQ ID NO: 3127072 - DNA, 25 bp, Homo sapien
tgcttggtgtaggtggacaacagca

SEQ ID NO: 3127073 - DNA, 25 bp, Homo sapien
ctgcttggtgtaggtggacaacagc

SEQ ID NO: 3127074 - DNA, 25 bp, Homo sapien
ggatcttttgctctatccacaaaga

SEQ ID NO: 3127075 - DNA, 25 bp, Homo sapien
gctctatccacaaagaaatgtcacc

SEQ ID NO: 3127076 - DNA, 25 bp, Homo sapien
cctcttggaccccttttctggatct

SEQ ID NO: 3127077 - DNA, 25 bp, Homo sapien
ctcccttctagtcttcctcttggac

SEQ ID NO: 3127078 - DNA, 25 bp, Homo sapien
aatgcagcagcccttctcgagtggt

SEQ ID NO: 3127079 - DNA, 25 bp, Homo sapien
taagggctctaaacacagactcaca

SEQ ID NO: 3127080 - DNA, 25 bp, Homo sapien
tctaaacaaggctctctggaatgca

SEQ ID NO: 3127081 - DNA, 25 bp, Homo sapien
tctcgagtggtgtaagttactcctt

SEQ ID NO: 3127082 - DNA, 25 bp, Homo sapien
gataagctccgagtgagggaccaga

SEQ ID NO: 3127083 - DNA, 25 bp, Homo sapien
gagccggcctgagcattcgctattg

SEQ ID NO: 3127084 - DNA, 25 bp, Homo sapien
gaaacagcacagattgcccagggag

SEQ ID NO: 3127085 - DNA, 25 bp, Homo sapien
caatggatgcccttggtgagaaaca

SEQ ID NO: 3127086 - DNA, 25 bp, Homo sapien
ttttctgcatattcccaattctctg

SEQ ID NO: 3127087 - DNA, 25 bp, Homo sapien
tttctgcatattcccaattctctgt

SEQ ID NO: 3127088 - DNA, 25 bp, Homo sapien
cagactagggtggtcaaaaaaagat

SEQ ID NO: 3127089 - DNA, 25 bp, Homo sapien
gctgagagcagcacccagactaggg

SEQ ID NO: 3127090 - DNA, 25 bp, Homo sapien
aaaaagatctattttcaagaggcct

SEQ ID NO: 3127091 - DNA, 25 bp, Homo sapien
gtgtgcctcagggtgctgagagcag

SEQ ID NO: 3127092 - DNA, 25 bp, Homo sapien
tgatgctgactattagctaagacct

SEQ ID NO: 3127093 - DNA, 25 bp, Homo sapien
ccttgttcacttgccagcagttgat

SEQ ID NO: 3127094 - DNA, 25 bp, Homo sapien
ctcctcatgtgctctgggattcctt

SEQ ID NO: 3127095 - DNA, 25 bp, Homo sapien
ccttagctaaggctgtcagctggaa

SEQ ID NO: 3127096 - DNA, 25 bp, Homo sapien
taggcatggacacgtcatctcccca

SEQ ID NO: 3127097 - DNA, 25 bp, Homo sapien
tagttgtatcaagaaagcataagat

SEQ ID NO: 3127098 - DNA, 25 bp, Homo sapien
cctgatgcccagtttaggcatggac

SEQ ID NO: 3127099 - DNA, 25 bp, Homo sapien
taaagcatacccccctttcctgatg

SEQ ID NO: 3127100 - DNA, 25 bp, Homo sapien
agtgggtgggcgcactgtgcgtgag

SEQ ID NO: 3127101 - DNA, 25 bp, Homo sapien
tgggcgcactgtgcgtgagccgaag

SEQ ID NO: 3127102 - DNA, 25 bp, Homo sapien
gggtgggcgcactgtgcgtgagccg

SEQ ID NO: 3127103 - DNA, 25 bp, Homo sapien
tgagtcaaagaaaagggtgacagat

SEQ ID NO: 3127104 - DNA, 25 bp, Homo sapien
taattagatgttgggtcaacaaatg

SEQ ID NO: 3127105 - DNA, 25 bp, Homo sapien
ttgttttccctaatcgagcagatgc

SEQ ID NO: 3127106 - DNA, 25 bp, Homo sapien
cctaatcgagcagatgccttggtgc

SEQ ID NO: 3127107 - DNA, 25 bp, Homo sapien
tttccctaatcgagcagatgccttg

SEQ ID NO: 3127108 - DNA, 25 bp, Homo sapien
ctctgagtgtgaagcagttctttct

SEQ ID NO: 3127109 - DNA, 25 bp, Homo sapien
tgcacagatacacccagtgacccag

SEQ ID NO: 3127110 - DNA, 25 bp, Homo sapien
tctctaaatccctttgcacagatac

SEQ ID NO: 3127111 - DNA, 25 bp, Homo sapien
cccagctggattattgtagagtcca

SEQ ID NO: 3127112 - DNA, 25 bp, Homo sapien
tgatgaagtccctgtttggtctgtt

SEQ ID NO: 3127113 - DNA, 25 bp, Homo sapien
aaatccaaaagcaaatctatggggg

SEQ ID NO: 3127114 - DNA, 25 bp, Homo sapien
caaaagcaaatctatgggggatggg

SEQ ID NO: 3127115 - DNA, 25 bp, Homo sapien
agtccctgtttggtctgttatcagc

SEQ ID NO: 3127116 - DNA, 25 bp, Homo sapien
ttgctctatttgttggagatacagc

SEQ ID NO: 3127117 - DNA, 25 bp, Homo sapien
ccattgctctatttgttggagatac

SEQ ID NO: 3127118 - DNA, 25 bp, Homo sapien
ctctatttgttggagatacagcagg

SEQ ID NO: 3127119 - DNA, 25 bp, Homo sapien
ttaaccattgctctatttgttggag

SEQ ID NO: 3127120 - DNA, 25 bp, Homo sapien
tagactttcgaggagttgctgaaga

SEQ ID NO: 3127121 - DNA, 25 bp, Homo sapien
atatgtcacatcaggtaggttaaaa

SEQ ID NO: 3127122 - DNA, 25 bp, Homo sapien
ccactgacaacatgtctgtgcctct

SEQ ID NO: 3127123 - DNA, 25 bp, Homo sapien
ggctattttgctctctaaccactga

SEQ ID NO: 3127124 - DNA, 25 bp, Homo sapien
aagttgcagttggaaactgcttggt

SEQ ID NO: 3127125 - DNA, 25 bp, Homo sapien
caaatgttcttggagggaagttgca

SEQ ID NO: 3127126 - DNA, 25 bp, Homo sapien
tctgcccatgttccataatattcct

SEQ ID NO: 3127127 - DNA, 25 bp, Homo sapien
gaagtgtggcaaatgttcttggagg

SEQ ID NO: 3127128 - DNA, 25 bp, Homo sapien
tccagcatcacggtcatcttgcttc

SEQ ID NO: 3127129 - DNA, 25 bp, Homo sapien
cagcatcacggtcatcttgcttcag

SEQ ID NO: 3127130 - DNA, 25 bp, Homo sapien
ttctccagcatcacggtcatcttgc

SEQ ID NO: 3127131 - DNA, 25 bp, Homo sapien
tcatcttgcttcagtgaagctccct

SEQ ID NO: 3127132 - DNA, 25 bp, Homo sapien
tgtagacagatacaaaacgggactt

SEQ ID NO: 3127133 - DNA, 25 bp, Homo sapien
aacgggacttagaccattttgctgc

SEQ ID NO: 3127134 - DNA, 25 bp, Homo sapien
taggtgccacagacagttcattact

SEQ ID NO: 3127135 - DNA, 25 bp, Homo sapien
taaatggatgagagtggagcagaaa

SEQ ID NO: 3127136 - DNA, 25 bp, Homo sapien
taacatatacatacaagactagaaa

SEQ ID NO: 3127137 - DNA, 25 bp, Homo sapien
aatctacttctaaccacagtgtagc

SEQ ID NO: 3127138 - DNA, 25 bp, Homo sapien
aaacatacctattgccatgtatttt

SEQ ID NO: 3127139 - DNA, 25 bp, Homo sapien
acagtgtagccccatcccatgagac

SEQ ID NO: 3127140 - DNA, 25 bp, Homo sapien
ggagtcagagaagtgaaccatcatc

SEQ ID NO: 3127141 - DNA, 25 bp, Homo sapien
gagaagtgaaccatcatcccatcag

SEQ ID NO: 3127142 - DNA, 25 bp, Homo sapien
gtgaaccatcatcccatcagttaag

SEQ ID NO: 3127143 - DNA, 25 bp, Homo sapien
tcagagaagtgaaccatcatcccat

SEQ ID NO: 3127144 - DNA, 25 bp, Homo sapien
tgtgccttagtcctactgttgctgt

SEQ ID NO: 3127145 - DNA, 25 bp, Homo sapien
tcctccccatctggtatgagacctt

SEQ ID NO: 3127146 - DNA, 25 bp, Homo sapien
tcagtttgaaatggctcctggtgct

SEQ ID NO: 3127147 - DNA, 25 bp, Homo sapien
ccccatctggtatgagaccttctca

SEQ ID NO: 3127148 - DNA, 25 bp, Homo sapien
cattgaggtagtagatttttgtcca

SEQ ID NO: 3127149 - DNA, 25 bp, Homo sapien
tatctttgtagcctaacatctgcct

SEQ ID NO: 3127150 - DNA, 25 bp, Homo sapien
ccaaagttaacctgctacattgagg

SEQ ID NO: 3127151 - DNA, 25 bp, Homo sapien
tgcctgagtcatgcatgagcctctt

SEQ ID NO: 3127152 - DNA, 25 bp, Homo sapien
gggtaatacaactgtctcctatact

SEQ ID NO: 3127153 - DNA, 25 bp, Homo sapien
aaactagtaagctggcctcttgggt

SEQ ID NO: 3127154 - DNA, 25 bp, Homo sapien
cacgccctctgctcttaaactagta

SEQ ID NO: 3127155 - DNA, 25 bp, Homo sapien
tagtgtttgacttggtcagtctgca

SEQ ID NO: 3127156 - DNA, 25 bp, Homo sapien
gcagcacccccccattctacggatg

SEQ ID NO: 3127157 - DNA, 25 bp, Homo sapien
acccccccattctacggatgctcgc

SEQ ID NO: 3127158 - DNA, 25 bp, Homo sapien
ccccattctacggatgctcgccttg

SEQ ID NO: 3127159 - DNA, 25 bp, Homo sapien
agcacccccccattctacggatgct

SEQ ID NO: 3127160 - DNA, 25 bp, Homo sapien
ttacttggacttggctccattgcat

SEQ ID NO: 3127161 - DNA, 25 bp, Homo sapien
tccattgcattgtgtttgaaactct

SEQ ID NO: 3127162 - DNA, 25 bp, Homo sapien
tacttggacttggctccattgcatt

SEQ ID NO: 3127163 - DNA, 25 bp, Homo sapien
tctccctggacaggtcttcagcaga

SEQ ID NO: 3127164 - DNA, 25 bp, Homo sapien
tgagccacttcaccaattgggcctt

SEQ ID NO: 3127165 - DNA, 25 bp, Homo sapien
gacaggtcttcagcagaatctgcat

SEQ ID NO: 3127166 - DNA, 25 bp, Homo sapien
aataacatccagtccagtgcgggca

SEQ ID NO: 3127167 - DNA, 25 bp, Homo sapien
ttgcctgtatttaagggctgcagaa

SEQ ID NO: 3127168 - DNA, 25 bp, Homo sapien
acacatttgcctgtatttaagggct

SEQ ID NO: 3127169 - DNA, 25 bp, Homo sapien
gggctgcagaaaacttggcttcaag

SEQ ID NO: 3127170 - DNA, 25 bp, Homo sapien
aacttggcttcaagctggctgtgac

SEQ ID NO: 3127171 - DNA, 25 bp, Homo sapien
tcagcaagtggtatttcaaattgta

SEQ ID NO: 3127172 - DNA, 25 bp, Homo sapien
atcagcaagtggtatttcaaattgt

SEQ ID NO: 3127173 - DNA, 25 bp, Homo sapien
catcagcaagtggtatttcaaattg

SEQ ID NO: 3127174 - DNA, 25 bp, Homo sapien
tctaagaataactacagagagggct

SEQ ID NO: 3127175 - DNA, 25 bp, Homo sapien
agcaagcttccctcggccaatataa

SEQ ID NO: 3127176 - DNA, 25 bp, Homo sapien
gggtaaaactgcctgtaagccagca

SEQ ID NO: 3127177 - DNA, 25 bp, Homo sapien
agccctgtgttttccgatcagcaag

SEQ ID NO: 3127178 - DNA, 25 bp, Homo sapien
cagtggactctcatacacacaaact

SEQ ID NO: 3127179 - DNA, 25 bp, Homo sapien
caattcatgtctctaatacctgtgg

SEQ ID NO: 3127180 - DNA, 25 bp, Homo sapien
caactacatgtgcttatttagagaa

SEQ ID NO: 3127181 - DNA, 25 bp, Homo sapien
tagatctatgggattacttttcctg

SEQ ID NO: 3127182 - DNA, 25 bp, Homo sapien
ctgtggctgtgataggatggtctct

SEQ ID NO: 3127183 - DNA, 25 bp, Homo sapien
cagattctgtaagtgaaggtgagca

SEQ ID NO: 3127184 - DNA, 25 bp, Homo sapien
ctagtggcccgcaaggactggctgt

SEQ ID NO: 3127185 - DNA, 25 bp, Homo sapien
tatgtgtattcactcgccctctgtg

SEQ ID NO: 3127186 - DNA, 25 bp, Homo sapien
cctgtgaggtggcaaggtctggaat

SEQ ID NO: 3127187 - DNA, 25 bp, Homo sapien
gaatgaaggggtccataatccccat

SEQ ID NO: 3127188 - DNA, 25 bp, Homo sapien
tcctgtgaggtggcaaggtctggaa

SEQ ID NO: 3127189 - DNA, 25 bp, Homo sapien
atcctgtgaggtggcaaggtctgga

SEQ ID NO: 3127190 - DNA, 25 bp, Homo sapien
atgctcgctttccattggcccaaac

SEQ ID NO: 3127191 - DNA, 25 bp, Homo sapien
tttccattggcccaaactggctgtg

SEQ ID NO: 3127192 - DNA, 25 bp, Homo sapien
attggcccaaactggctgtgtggcc

SEQ ID NO: 3127193 - DNA, 25 bp, Homo sapien
tgctcgctttccattggcccaaact

SEQ ID NO: 3127194 - DNA, 25 bp, Homo sapien
ctgacaactgtttcgagagttaaac

SEQ ID NO: 3127195 - DNA, 25 bp, Homo sapien
aaatacttgtgcatttcttgggtca

SEQ ID NO: 3127196 - DNA, 25 bp, Homo sapien
ggatcaagtatggtatctcaaatgc

SEQ ID NO: 3127197 - DNA, 25 bp, Homo sapien
tagttgcctacacatacgtcaccca

SEQ ID NO: 3127198 - DNA, 25 bp, Homo sapien
tacatcctcgagcatcttgtccacg

SEQ ID NO: 3127199 - DNA, 25 bp, Homo sapien
aaggtctttcatctacatcctcgag

SEQ ID NO: 3127200 - DNA, 25 bp, Homo sapien
tccacgtcggtaccatagcagtcat

SEQ ID NO: 3127201 - DNA, 25 bp, Homo sapien
gagcatcttgtccacgtcggtacca

SEQ ID NO: 3127202 - DNA, 25 bp, Homo sapien
ggaggtgttgttcatggccaacctt

SEQ ID NO: 3127203 - DNA, 25 bp, Homo sapien
caggaggtgttgttcatggccaacc

SEQ ID NO: 3127204 - DNA, 25 bp, Homo sapien
gcaggaggtgttgttcatggccaac

SEQ ID NO: 3127205 - DNA, 25 bp, Homo sapien
aggtgttgttcatggccaacctttt

SEQ ID NO: 3127206 - DNA, 25 bp, Homo sapien
ctagagtagatcatgcaaagttgat

SEQ ID NO: 3127207 - DNA, 25 bp, Homo sapien
gttgattgtgctttgttcatggtcc

SEQ ID NO: 3127208 - DNA, 25 bp, Homo sapien
agttgattgtgctttgttcatggtc

SEQ ID NO: 3127209 - DNA, 25 bp, Homo sapien
tagatcatgcaaagttgattgtgct

SEQ ID NO: 3127210 - DNA, 25 bp, Homo sapien
ctgtcctatccctcactatactcca

SEQ ID NO: 3127211 - DNA, 25 bp, Homo sapien
ccaggtcctcgcatggcacccagct

SEQ ID NO: 3127212 - DNA, 25 bp, Homo sapien
aggtcctcgcatggcacccagctcc

SEQ ID NO: 3127213 - DNA, 25 bp, Homo sapien
tcctatccctcactatactccagag

SEQ ID NO: 3127214 - DNA, 25 bp, Homo sapien
tccacaaagatggttcccaatgagc

SEQ ID NO: 3127215 - DNA, 25 bp, Homo sapien
aagatggttcccaatgagcctagac

SEQ ID NO: 3127216 - DNA, 25 bp, Homo sapien
ccaccttcactccttgccccgggag

SEQ ID NO: 3127217 - DNA, 25 bp, Homo sapien
tccttgccccgggagcttcactatt

SEQ ID NO: 3127218 - DNA, 25 bp, Homo sapien
gaacagagcggaccataataaggga

SEQ ID NO: 3127219 - DNA, 25 bp, Homo sapien
ggaccataataagggaaggtgccag

SEQ ID NO: 3127220 - DNA, 25 bp, Homo sapien
cagagcggaccataataagggaagg

SEQ ID NO: 3127221 - DNA, 25 bp, Homo sapien
ctgtggcagaacagagcggaccata

SEQ ID NO: 3127222 - DNA, 25 bp, Homo sapien
tgatggctttgctggccatccaggg

SEQ ID NO: 3127223 - DNA, 25 bp, Homo sapien
ctcctggaagtctgatggctttgct

SEQ ID NO: 3127224 - DNA, 25 bp, Homo sapien
tgtggctcctggaagtctgatggct

SEQ ID NO: 3127225 - DNA, 25 bp, Homo sapien
agcactgtggctcctggaagtctga

SEQ ID NO: 3127226 - DNA, 25 bp, Homo sapien
gtcctggccactgtgacaccctcat

SEQ ID NO: 3127227 - DNA, 25 bp, Homo sapien
ctggccactgtgacaccctcattac

SEQ ID NO: 3127228 - DNA, 25 bp, Homo sapien
cctggccactgtgacaccctcatta

SEQ ID NO: 3127229 - DNA, 25 bp, Homo sapien
tcctggccactgtgacaccctcatt

SEQ ID NO: 3127230 - DNA, 25 bp, Homo sapien
gagtcttcacctgatcataactgag

SEQ ID NO: 3127231 - DNA, 25 bp, Homo sapien
catcatcaggatcattggaggagct

SEQ ID NO: 3127232 - DNA, 25 bp, Homo sapien
gcatttgcattgctatgcacaggag

SEQ ID NO: 3127233 - DNA, 25 bp, Homo sapien
gatcattggaggagcttgcatttgc

SEQ ID NO: 3127234 - DNA, 25 bp, Homo sapien
ctcagcaatgtgctctctaattctc

SEQ ID NO: 3127235 - DNA, 25 bp, Homo sapien
ttctcagcaatgtgctctctaattc

SEQ ID NO: 3127236 - DNA, 25 bp, Homo sapien
tgaagctgccgaggacagggacatc

SEQ ID NO: 3127237 - DNA, 25 bp, Homo sapien
cacagatgaagctgccgaggacagg

SEQ ID NO: 3127238 - DNA, 25 bp, Homo sapien
cctgggcaggtagcagtagcataag

SEQ ID NO: 3127239 - DNA, 25 bp, Homo sapien
agccttcctgggcaggtagcagtag

SEQ ID NO: 3127240 - DNA, 25 bp, Homo sapien
tcagttcattaacacagttgtcagc

SEQ ID NO: 3127241 - DNA, 25 bp, Homo sapien
tgggcaggtagcagtagcataagtt

SEQ ID NO: 3127242 - DNA, 25 bp, Homo sapien
tatcactttactccacaaaggcata

SEQ ID NO: 3127243 - DNA, 25 bp, Homo sapien
gagctctgatgtccatgatgaatta

SEQ ID NO: 3127244 - DNA, 25 bp, Homo sapien
tgatgtccatgatgaattagggttc

SEQ ID NO: 3127245 - DNA, 25 bp, Homo sapien
tgaattagggttcagctttcctctc

SEQ ID NO: 3127246 - DNA, 25 bp, Homo sapien
tccacaaggactcctcagtacctga

SEQ ID NO: 3127247 - DNA, 25 bp, Homo sapien
gccctccttgtgattgtacaacttg

SEQ ID NO: 3127248 - DNA, 25 bp, Homo sapien
tacaacttgtgaaactctcaactcc

SEQ ID NO: 3127249 - DNA, 25 bp, Homo sapien
gggaattccacaaggactcctcagt

SEQ ID NO: 3127250 - DNA, 25 bp, Homo sapien
ttttctatcttcaggctgccactaa

SEQ ID NO: 3127251 - DNA, 25 bp, Homo sapien
ttttgtcgtggtacattagtttgca

SEQ ID NO: 3127252 - DNA, 25 bp, Homo sapien
tcgtaccctacaatgttcccttgtg

SEQ ID NO: 3127253 - DNA, 25 bp, Homo sapien
gaatttatccctactatagagtgta

SEQ ID NO: 3127254 - DNA, 25 bp, Homo sapien
tctatagctcctccctcagtataca

SEQ ID NO: 3127255 - DNA, 25 bp, Homo sapien
ctctatagctcctccctcagtatac

SEQ ID NO: 3127256 - DNA, 25 bp, Homo sapien
ctatagctcctccctcagtatacac

SEQ ID NO: 3127257 - DNA, 25 bp, Homo sapien
ccccaaacagatttgacatcgtcaa

SEQ ID NO: 3127258 - DNA, 25 bp, Homo sapien
agatgggagcatgcaccgtactcat

SEQ ID NO: 3127259 - DNA, 25 bp, Homo sapien
atttgacatcgtcaaagatgggagc

SEQ ID NO: 3127260 - DNA, 25 bp, Homo sapien
cctacagcattcacagtataatttg

SEQ ID NO: 3127261 - DNA, 25 bp, Homo sapien
gggcacagagcaagtggaagacggc

SEQ ID NO: 3127262 - DNA, 25 bp, Homo sapien
tcagcccagtcctgttgtaattctg

SEQ ID NO: 3127263 - DNA, 25 bp, Homo sapien
cagcccagtcctgttgtaattctgg

SEQ ID NO: 3127264 - DNA, 25 bp, Homo sapien
agtggaagacggcagagctgtacct

SEQ ID NO: 3127265 - DNA, 25 bp, Homo sapien
ctccccacgaccaccctccaaaatg

SEQ ID NO: 3127266 - DNA, 25 bp, Homo sapien
tactctccccacgaccaccctccaa

SEQ ID NO: 3127267 - DNA, 25 bp, Homo sapien
tctactctccccacgaccaccctcc

SEQ ID NO: 3127268 - DNA, 25 bp, Homo sapien
cacgaccaccctccaaaatgcacct

SEQ ID NO: 3127269 - DNA, 25 bp, Homo sapien
tacggatgataatttcattgtcatg

SEQ ID NO: 3127270 - DNA, 25 bp, Homo sapien
tgctgcaggttacagatatcccttc

SEQ ID NO: 3127271 - DNA, 25 bp, Homo sapien
ctgcaggttacagatatcccttccc

SEQ ID NO: 3127272 - DNA, 25 bp, Homo sapien
cttgcctttacggatgataatttca

SEQ ID NO: 3127273 - DNA, 25 bp, Homo sapien
tcaaaagtagcgatgatgtttatgg

SEQ ID NO: 3127274 - DNA, 25 bp, Homo sapien
tgatatggtgtatcagggatgatgt

SEQ ID NO: 3127275 - DNA, 25 bp, Homo sapien
tggtgtatcagggatgatgttgccc

SEQ ID NO: 3127276 - DNA, 25 bp, Homo sapien
gcgatgatgtttatggagagagtca

SEQ ID NO: 3127277 - DNA, 25 bp, Homo sapien
agggtattaagtactcggtgtgctc

SEQ ID NO: 3127278 - DNA, 25 bp, Homo sapien
aagggtattaagtactcggtgtgct

SEQ ID NO: 3127279 - DNA, 25 bp, Homo sapien
aagaattcaattaggggcctttcat

SEQ ID NO: 3127280 - DNA, 25 bp, Homo sapien
cttcaaagaattcaattaggggcct

SEQ ID NO: 3127281 - DNA, 25 bp, Homo sapien
tgagcccaccttgatttagcccctg

SEQ ID NO: 3127282 - DNA, 25 bp, Homo sapien
tagacactcgctttgctcatgcaga

SEQ ID NO: 3127283 - DNA, 25 bp, Homo sapien
gaagtaaactctgggctcctcatca

SEQ ID NO: 3127284 - DNA, 25 bp, Homo sapien
gaacatttaagctctctgggaacgc

SEQ ID NO: 3127285 - DNA, 25 bp, Homo sapien
aattctccattacaacactcatgtc

SEQ ID NO: 3127286 - DNA, 25 bp, Homo sapien
actgttgaataagtatgtttcccac

SEQ ID NO: 3127287 - DNA, 25 bp, Homo sapien
tgacaagtgtggagatattctcaga

SEQ ID NO: 3127288 - DNA, 25 bp, Homo sapien
cactcatgtcaaagggggtctcaca

SEQ ID NO: 3127289 - DNA, 25 bp, Homo sapien
tcaggcacagccagtactgccatag

SEQ ID NO: 3127290 - DNA, 25 bp, Homo sapien
gcacagccagtactgccatagaatt

SEQ ID NO: 3127291 - DNA, 25 bp, Homo sapien
caggaggtttctcaggcacagccag

SEQ ID NO: 3127292 - DNA, 25 bp, Homo sapien
ggaggtttctcaggcacagccagta

SEQ ID NO: 3127293 - DNA, 25 bp, Homo sapien
tgatgggacttgtgatagttctacc

SEQ ID NO: 3127294 - DNA, 25 bp, Homo sapien
tattataggaagctctggtcaatcc

SEQ ID NO: 3127295 - DNA, 25 bp, Homo sapien
ttgatctcctttggcaacgccctga

SEQ ID NO: 3127296 - DNA, 25 bp, Homo sapien
tctacctgttgcatgaatcagtggc

SEQ ID NO: 3127297 - DNA, 25 bp, Homo sapien
caacccaggtttagagctttatagg

SEQ ID NO: 3127298 - DNA, 25 bp, Homo sapien
tcaccagttactgagcacgaactag

SEQ ID NO: 3127299 - DNA, 25 bp, Homo sapien
agcacaacccaggtttagagcttta

SEQ ID NO: 3127300 - DNA, 25 bp, Homo sapien
cgaactaggaaatgggcagcagagc

SEQ ID NO: 3127301 - DNA, 25 bp, Homo sapien
cagttctataaaatcatggtgttgg

SEQ ID NO: 3127302 - DNA, 25 bp, Homo sapien
ccagcacgggaaagcactgtgattt

SEQ ID NO: 3127303 - DNA, 25 bp, Homo sapien
tagcaaacctggactgcagatttag

SEQ ID NO: 3127304 - DNA, 25 bp, Homo sapien
tttcataatagccagggcacaggaa

SEQ ID NO: 3127305 - DNA, 25 bp, Homo sapien
tgggtatcgcaaattccagactgct

SEQ ID NO: 3127306 - DNA, 25 bp, Homo sapien
ctgggtatcgcaaattccagactgc

SEQ ID NO: 3127307 - DNA, 25 bp, Homo sapien
ggtcttaaacactcctttctctgca

SEQ ID NO: 3127308 - DNA, 25 bp, Homo sapien
gtttaatagctgagattatgctcat

SEQ ID NO: 3127309 - DNA, 25 bp, Homo sapien
cctctgttggagcaatgatcacatt

SEQ ID NO: 3127310 - DNA, 25 bp, Homo sapien
gatcacattatgtttaatagctgag

SEQ ID NO: 3127311 - DNA, 25 bp, Homo sapien
ccatctttcgatgggtgacagcgta

SEQ ID NO: 3127312 - DNA, 25 bp, Homo sapien
ttcagagcacaaaagagagcgatcc

SEQ ID NO: 3127313 - DNA, 25 bp, Homo sapien
tgttctaaaccctggaagctggcgg

SEQ ID NO: 3127314 - DNA, 25 bp, Homo sapien
gaggcagacaacctgagctttcaga

SEQ ID NO: 3127315 - DNA, 25 bp, Homo sapien
tactccataccatgcaagtgcattt

SEQ ID NO: 3127316 - DNA, 25 bp, Homo sapien
cctggactgttttcactactccata

SEQ ID NO: 3127317 - DNA, 25 bp, Homo sapien
taataggaccgaggtgttccatcct

SEQ ID NO: 3127318 - DNA, 25 bp, Homo sapien
ttatggccgaacatataataggacc

SEQ ID NO: 3127319 - DNA, 25 bp, Homo sapien
tccattcaatgttatacagtagtgg

SEQ ID NO: 3127320 - DNA, 25 bp, Homo sapien
tgttaccactgcaaaaactaattta

SEQ ID NO: 3127321 - DNA, 25 bp, Homo sapien
aagatttgaaatcttggtcctgaac

SEQ ID NO: 3127322 - DNA, 25 bp, Homo sapien
ggtcctgaactcaaaacaattgtag

SEQ ID NO: 3127323 - DNA, 25 bp, Homo sapien
gttcacttgggctggaacactggtt

SEQ ID NO: 3127324 - DNA, 25 bp, Homo sapien
gctgcttgacccatgatgttcactt

SEQ ID NO: 3127325 - DNA, 25 bp, Homo sapien
ttctccatgctgcttgacccatgat

SEQ ID NO: 3127326 - DNA, 25 bp, Homo sapien
ttgggctggaacactggttgtccat

SEQ ID NO: 3127327 - DNA, 25 bp, Homo sapien
cctcatcatcattactaatacgagt

SEQ ID NO: 3127328 - DNA, 25 bp, Homo sapien
gggcacatgagaagtgatccataga

SEQ ID NO: 3127329 - DNA, 25 bp, Homo sapien
agagttaccatcaccctcatcatca

SEQ ID NO: 3127330 - DNA, 25 bp, Homo sapien
gagaagtgatccatagagttaccat

SEQ ID NO: 3127331 - DNA, 25 bp, Homo sapien
ggtcagagcccagaccaagctgctg

SEQ ID NO: 3127332 - DNA, 25 bp, Homo sapien
ctggagccaggaatcgaactcagac

SEQ ID NO: 3127333 - DNA, 25 bp, Homo sapien
caggaatcgaactcagaccctctgc

SEQ ID NO: 3127334 - DNA, 25 bp, Homo sapien
gccaggaatcgaactcagaccctct

SEQ ID NO: 3127335 - DNA, 25 bp, Homo sapien
ggagatacaggaaatgatgagaaac

SEQ ID NO: 3127336 - DNA, 25 bp, Homo sapien
gggagatacaggaaatgatgagaaa

SEQ ID NO: 3127337 - DNA, 25 bp, Homo sapien
gttttactacatggcgcagggattc

SEQ ID NO: 3127338 - DNA, 25 bp, Homo sapien
ttttactacatggcgcagggattcc

SEQ ID NO: 3127339 - DNA, 25 bp, Homo sapien
ccagcaattttgaatcgtgatttcc

SEQ ID NO: 3127340 - DNA, 25 bp, Homo sapien
tgaatcgtgatttccccagtgacca

SEQ ID NO: 3127341 - DNA, 25 bp, Homo sapien
tagagtaatggcatttcctgaactg

SEQ ID NO: 3127342 - DNA, 25 bp, Homo sapien
ctgaactgtgtttaagagtctttga

SEQ ID NO: 3127343 - DNA, 25 bp, Homo sapien
caggtaatgagggtcctggtagtct

SEQ ID NO: 3127344 - DNA, 25 bp, Homo sapien
gtcctggtagtctgagggcagccct

SEQ ID NO: 3127345 - DNA, 25 bp, Homo sapien
ggcagccctctaattgctactgttg

SEQ ID NO: 3127346 - DNA, 25 bp, Homo sapien
tgagggcagccctctaattgctact

SEQ ID NO: 3127347 - DNA, 25 bp, Homo sapien
ttccatatctgacactggttccttc

SEQ ID NO: 3127348 - DNA, 25 bp, Homo sapien
tccatatctgacactggttccttct

SEQ ID NO: 3127349 - DNA, 25 bp, Homo sapien
ttgacagctccttttccgtgttccc

SEQ ID NO: 3127350 - DNA, 25 bp, Homo sapien
tttgacagctccttttccgtgttcc

SEQ ID NO: 3127351 - DNA, 25 bp, Homo sapien
tgacagctccttttccgtgttccct

SEQ ID NO: 3127352 - DNA, 25 bp, Homo sapien
tgtccccttgcacctgtgcactgtt

SEQ ID NO: 3127353 - DNA, 25 bp, Homo sapien
atgcctgtccccttgcacctgtgca

SEQ ID NO: 3127354 - DNA, 25 bp, Homo sapien
ccccttgcacctgtgcactgttttt

SEQ ID NO: 3127355 - DNA, 25 bp, Homo sapien
cctgatgcctgtccccttgcacctg

SEQ ID NO: 3127356 - DNA, 25 bp, Homo sapien
atgaagctcttctaagctcatgcac

SEQ ID NO: 3127357 - DNA, 25 bp, Homo sapien
tcttctaagctcatgcacgtggctt

SEQ ID NO: 3127358 - DNA, 25 bp, Homo sapien
ttcatgggctgttggaagccctttg

SEQ ID NO: 3127359 - DNA, 25 bp, Homo sapien
tcatgggctgttggaagccctttgt

SEQ ID NO: 3127360 - DNA, 25 bp, Homo sapien
tcttgctgcacaccgactgtctctt

SEQ ID NO: 3127361 - DNA, 25 bp, Homo sapien
ttgctgcacaccgactgtctctttc

SEQ ID NO: 3127362 - DNA, 25 bp, Homo sapien
tttctcttgctgcacaccgactgtc

SEQ ID NO: 3127363 - DNA, 25 bp, Homo sapien
tgcacaccgactgtctctttcctag

SEQ ID NO: 3127364 - DNA, 25 bp, Homo sapien
catctttacaagcagctgctttgca

SEQ ID NO: 3127365 - DNA, 25 bp, Homo sapien
gctcatctttacaagcagctgcttt

SEQ ID NO: 3127366 - DNA, 25 bp, Homo sapien
aagcagctgctttgcagccacaaat

SEQ ID NO: 3127367 - DNA, 25 bp, Homo sapien
agctcatctttacaagcagctgctt

SEQ ID NO: 3127368 - DNA, 25 bp, Homo sapien
tgttgaactcctagcaaaactgcct

SEQ ID NO: 3127369 - DNA, 25 bp, Homo sapien
tgagcacattactggcagcgggctg

SEQ ID NO: 3127370 - DNA, 25 bp, Homo sapien
ttaaggctaaaatggatctgaggac

SEQ ID NO: 3127371 - DNA, 25 bp, Homo sapien
taattagagagttgagctgagcaca

SEQ ID NO: 3127372 - DNA, 25 bp, Homo sapien
catgttgtgctagggtgctgagaca

SEQ ID NO: 3127373 - DNA, 25 bp, Homo sapien
tttggtgcctggacgatgaagatca

SEQ ID NO: 3127374 - DNA, 25 bp, Homo sapien
tatcaggatgagtctctaagtctct

SEQ ID NO: 3127375 - DNA, 25 bp, Homo sapien
gaagatcagggcacccagtatcagg

SEQ ID NO: 3127376 - DNA, 25 bp, Homo sapien
tagtgtccctatgtcattccttgcc

SEQ ID NO: 3127377 - DNA, 25 bp, Homo sapien
tcatctcaatatgaaggagctcagt

SEQ ID NO: 3127378 - DNA, 25 bp, Homo sapien
ccttgcccaggtatggactccggtt

SEQ ID NO: 3127379 - DNA, 25 bp, Homo sapien
taagttcgtataggtctccaaggcc

SEQ ID NO: 3127380 - DNA, 25 bp, Homo sapien
tcagtgttgtatcccaggtgctcta

SEQ ID NO: 3127381 - DNA, 25 bp, Homo sapien
aggtgctctatagtgcctggatcaa

SEQ ID NO: 3127382 - DNA, 25 bp, Homo sapien
aagaccgctttgctcagtgttgtat

SEQ ID NO: 3127383 - DNA, 25 bp, Homo sapien
aattggctcctctaagcagagtgag

SEQ ID NO: 3127384 - DNA, 25 bp, Homo sapien
ccaccacactcttgtgtttggaatg

SEQ ID NO: 3127385 - DNA, 25 bp, Homo sapien
tcctttccttaatgtctgcaacccc

SEQ ID NO: 3127386 - DNA, 25 bp, Homo sapien
ttcctttccttaatgtctgcaaccc

SEQ ID NO: 3127387 - DNA, 25 bp, Homo sapien
cttgtgtttggaatgcttcctttcc

SEQ ID NO: 3127388 - DNA, 25 bp, Homo sapien
tgagatacctaagagactggacagc

SEQ ID NO: 3127389 - DNA, 25 bp, Homo sapien
ctgagatacctaagagactggacag

SEQ ID NO: 3127390 - DNA, 25 bp, Homo sapien
agatacctaagagactggacagctg

SEQ ID NO: 3127391 - DNA, 25 bp, Homo sapien
gagatacctaagagactggacagct

SEQ ID NO: 3127392 - DNA, 25 bp, Homo sapien
gatgtctgcgttgtcttccacttcc

SEQ ID NO: 3127393 - DNA, 25 bp, Homo sapien
tgtgcaggcttcttgtaaatacccg

SEQ ID NO: 3127394 - DNA, 25 bp, Homo sapien
tgtcccgatccggtctccttctcct

SEQ ID NO: 3127395 - DNA, 25 bp, Homo sapien
cactgacagcccctcctaacactga

SEQ ID NO: 3127396 - DNA, 25 bp, Homo sapien
tgcaaaaaggatacaattataacac

SEQ ID NO: 3127397 - DNA, 25 bp, Homo sapien
taagtaacttgtggcatagaaacac

SEQ ID NO: 3127398 - DNA, 25 bp, Homo sapien
tgtggcatagaaacacaatggtgta

SEQ ID NO: 3127399 - DNA, 25 bp, Homo sapien
aaatattattctgtgcgctaagaca

SEQ ID NO: 3127400 - DNA, 25 bp, Homo sapien
gcattttgacacagatggagggttc

SEQ ID NO: 3127401 - DNA, 25 bp, Homo sapien
tccaggtgtgcaaatgatagggctc

SEQ ID NO: 3127402 - DNA, 25 bp, Homo sapien
ggttctccatcacgtggtccaggtg

SEQ ID NO: 3127403 - DNA, 25 bp, Homo sapien
gactcttgttggtggtaacactggg

SEQ ID NO: 3127404 - DNA, 25 bp, Homo sapien
ccaagtgccttggtacaaacagaag

SEQ ID NO: 3127405 - DNA, 25 bp, Homo sapien
cattgtgaaggattcctagcctctc

SEQ ID NO: 3127406 - DNA, 25 bp, Homo sapien
gatttctcaatcgttcattgtgaag

SEQ ID NO: 3127407 - DNA, 25 bp, Homo sapien
tcagtggacagccaagagcctcctc

SEQ ID NO: 3127408 - DNA, 25 bp, Homo sapien
ctggaggatttctcaatcgttcatt

SEQ ID NO: 3127409 - DNA, 25 bp, Homo sapien
ccaccacctcctcctgctttcctca

SEQ ID NO: 3127410 - DNA, 25 bp, Homo sapien
atcttcccgccgccaccacctcctc

SEQ ID NO: 3127411 - DNA, 25 bp, Homo sapien
cacctcctcctgctttcctcagccg

SEQ ID NO: 3127412 - DNA, 25 bp, Homo sapien
accacctcctcctgctttcctcagc

SEQ ID NO: 3127413 - DNA, 25 bp, Homo sapien
ctgaggagtggaccggcttcacgat

SEQ ID NO: 3127414 - DNA, 25 bp, Homo sapien
aggagtggaccggcttcacgatgcg

SEQ ID NO: 3127415 - DNA, 25 bp, Homo sapien
gagtggaccggcttcacgatgcgtc

SEQ ID NO: 3127416 - DNA, 25 bp, Homo sapien
tgaggagtggaccggcttcacgatg

SEQ ID NO: 3127417 - DNA, 25 bp, Homo sapien
tacccgtccgcgttcactcacaact

SEQ ID NO: 3127418 - DNA, 25 bp, Homo sapien
gctggtctgagtcccgcgggcctgg

SEQ ID NO: 3127419 - DNA, 25 bp, Homo sapien
gcagcggccccgaccacttccgggc

SEQ ID NO: 3127420 - DNA, 25 bp, Homo sapien
gagcggacgaagcacaggcgccctt

SEQ ID NO: 3127421 - DNA, 25 bp, Homo sapien
gggcgtttcggcacaaatcttcaga

SEQ ID NO: 3127422 - DNA, 25 bp, Homo sapien
cgataattgcacacgggagtccggg

SEQ ID NO: 3127423 - DNA, 25 bp, Homo sapien
cgtgctcggtccatagtgggccgta

SEQ ID NO: 3127424 - DNA, 25 bp, Homo sapien
taaatctcgaggagagggcgtttcg

SEQ ID NO: 3127425 - DNA, 25 bp, Homo sapien
ctctcacttctaacttgattctgag

SEQ ID NO: 3127426 - DNA, 25 bp, Homo sapien
tcgattgcaatttacgccaaagagc

SEQ ID NO: 3127427 - DNA, 25 bp, Homo sapien
gagaaacgatccctaatcgattgca

SEQ ID NO: 3127428 - DNA, 25 bp, Homo sapien
caaagcagcaatggcggcctcactt

SEQ ID NO: 3127429 - DNA, 25 bp, Homo sapien
attattttctttgactcccagcaag

SEQ ID NO: 3127430 - DNA, 25 bp, Homo sapien
tagtgctggactttttattattttc

SEQ ID NO: 3127431 - DNA, 25 bp, Homo sapien
ttttctttgactcccagcaagctct

SEQ ID NO: 3127432 - DNA, 25 bp, Homo sapien
tctttttcactcctgataaatccat

SEQ ID NO: 3127433 - DNA, 25 bp, Homo sapien
tctgagcggtctttgcgtttggtag

SEQ ID NO: 3127434 - DNA, 25 bp, Homo sapien
ttttgagcgatccttggacttctca

SEQ ID NO: 3127435 - DNA, 25 bp, Homo sapien
ccctttatcttttgagcgatccttg

SEQ ID NO: 3127436 - DNA, 25 bp, Homo sapien
ggacttctcatctgagcggtctttg

SEQ ID NO: 3127437 - DNA, 25 bp, Homo sapien
tgctaccactggaagcgctgtgcct

SEQ ID NO: 3127438 - DNA, 25 bp, Homo sapien
tgcctctttcgcgttttgtcccggc

SEQ ID NO: 3127439 - DNA, 25 bp, Homo sapien
ctgctgctaccactggaagcgctgt

SEQ ID NO: 3127440 - DNA, 25 bp, Homo sapien
tggaagcgctgtgcctctttcgcgt

SEQ ID NO: 3127441 - DNA, 25 bp, Homo sapien
ccgagaaggacttggagagccagaa

SEQ ID NO: 3127442 - DNA, 25 bp, Homo sapien
gagccactgcttgagccagtgctgg

SEQ ID NO: 3127443 - DNA, 25 bp, Homo sapien
gaggtgctggagcttcctgagcggc

SEQ ID NO: 3127444 - DNA, 25 bp, Homo sapien
tagagctggagctgcgggaggtgct

SEQ ID NO: 3127445 - DNA, 25 bp, Homo sapien
taggagatgggctccgccttttcct

SEQ ID NO: 3127446 - DNA, 25 bp, Homo sapien
tcatctcttttaggtggtttggatt

SEQ ID NO: 3127447 - DNA, 25 bp, Homo sapien
gcgggagcgcctcctgttgtcgtgt

SEQ ID NO: 3127448 - DNA, 25 bp, Homo sapien
tggtttggatttggagcgggagcgc

SEQ ID NO: 3127449 - DNA, 25 bp, Homo sapien
gccacataggcggtggtggcaacat

SEQ ID NO: 3127450 - DNA, 25 bp, Homo sapien
cctttggacagatggggatgcatcc

SEQ ID NO: 3127451 - DNA, 25 bp, Homo sapien
ttccacgggcatgtcaatcatttta

SEQ ID NO: 3127452 - DNA, 25 bp, Homo sapien
agtgatctcctggccatcaatttgt

SEQ ID NO: 3127453 - DNA, 25 bp, Homo sapien
gcccggggaccgtgatctccggcgc

SEQ ID NO: 3127454 - DNA, 25 bp, Homo sapien
ccggggaccgtgatctccggcgcac

SEQ ID NO: 3127455 - DNA, 25 bp, Homo sapien
cccggggaccgtgatctccggcgca

SEQ ID NO: 3127456 - DNA, 25 bp, Homo sapien
caactaccatgggtgagaggatctt

SEQ ID NO: 3127457 - DNA, 25 bp, Homo sapien
caacaaagtacaaacacaatgtcat

SEQ ID NO: 3127458 - DNA, 25 bp, Homo sapien
tgttgccaagataacctgaaagacc

SEQ ID NO: 3127459 - DNA, 25 bp, Homo sapien
aattcttccactctacacaacaaag

SEQ ID NO: 3127460 - DNA, 25 bp, Homo sapien
cagagcaacataacagagttctcca

SEQ ID NO: 3127461 - DNA, 25 bp, Homo sapien
cagcagctcatttcggaagactgag

SEQ ID NO: 3127462 - DNA, 25 bp, Homo sapien
gagcaacataacagagttctccaaa

SEQ ID NO: 3127463 - DNA, 25 bp, Homo sapien
cggcagcagctcatttcggaagact

SEQ ID NO: 3127464 - DNA, 25 bp, Homo sapien
tcctctttagaatccattgaagttg

SEQ ID NO: 3127465 - DNA, 25 bp, Homo sapien
tcatctcccccagaggaagtagcag

SEQ ID NO: 3127466 - DNA, 25 bp, Homo sapien
tctgcagcacatcgttggatcttgc

SEQ ID NO: 3127467 - DNA, 25 bp, Homo sapien
cttttcaataggcagagagcctccc

SEQ ID NO: 3127468 - DNA, 25 bp, Homo sapien
gaaactgcgaaatctatgcgtgtct

SEQ ID NO: 3127469 - DNA, 25 bp, Homo sapien
gatcttggacctggatactttgccc

SEQ ID NO: 3127470 - DNA, 25 bp, Homo sapien
tcatcctgtcggttctgtgaaaggc

SEQ ID NO: 3127471 - DNA, 25 bp, Homo sapien
gaggattaaacccttggccttcaga

SEQ ID NO: 3127472 - DNA, 25 bp, Homo sapien
caaagtgcctgagcgagtctacagc

SEQ ID NO: 3127473 - DNA, 25 bp, Homo sapien
gatggcaggctcaatgtggactaca

SEQ ID NO: 3127474 - DNA, 25 bp, Homo sapien
tgggaggagcattacagccacggct

SEQ ID NO: 3127475 - DNA, 25 bp, Homo sapien
agaggttcctaaagctgtcgccgca

SEQ ID NO: 3127476 - DNA, 25 bp, Homo sapien
aaatggcggtgacatctgccttgcc

SEQ ID NO: 3127477 - DNA, 25 bp, Homo sapien
tacagtcaggctgcgtcaattaact

SEQ ID NO: 3127478 - DNA, 25 bp, Homo sapien
tcttcactcatgagctgggatggct

SEQ ID NO: 3127479 - DNA, 25 bp, Homo sapien
gaccatgggctagccagggcatatt

SEQ ID NO: 3127480 - DNA, 25 bp, Homo sapien
gccaggggagcttcttcagctaaga

SEQ ID NO: 3127481 - DNA, 25 bp, Homo sapien
gcagggtgacagatgactgtccacc

SEQ ID NO: 3127482 - DNA, 25 bp, Homo sapien
ccccagccaggggagcttcttcagc

SEQ ID NO: 3127483 - DNA, 25 bp, Homo sapien
gagcttcttcagctaagatggcacc

SEQ ID NO: 3127484 - DNA, 25 bp, Homo sapien
cactgagggttagggtctcaaccta

SEQ ID NO: 3127485 - DNA, 25 bp, Homo sapien
gcctgtgccttcacatggtggagag

SEQ ID NO: 3127486 - DNA, 25 bp, Homo sapien
tggaaatccgatcatctaaagcccc

SEQ ID NO: 3127487 - DNA, 25 bp, Homo sapien
cagagggccacgttttgcctgtgcc

SEQ ID NO: 3127488 - DNA, 25 bp, Homo sapien
tggagctctccacattgtgcaggtg

SEQ ID NO: 3127489 - DNA, 25 bp, Homo sapien
tgctcattgacttggctgcatccct

SEQ ID NO: 3127490 - DNA, 25 bp, Homo sapien
gagagcaggacagaaccacggtcat

SEQ ID NO: 3127491 - DNA, 25 bp, Homo sapien
tgaacgaggcaccacctcttcagtc

SEQ ID NO: 3127492 - DNA, 25 bp, Homo sapien
tgtcctcttggccaaaaactaggtc

SEQ ID NO: 3127493 - DNA, 25 bp, Homo sapien
tggccaaaaactaggtcacaggctc

SEQ ID NO: 3127494 - DNA, 25 bp, Homo sapien
gacatttgaagcagtgaaagaggaa

SEQ ID NO: 3127495 - DNA, 25 bp, Homo sapien
gaaagaggaaaatgaatcgaatatg

SEQ ID NO: 3127496 - DNA, 25 bp, Homo sapien
cctccaggtggctaaagtgccacag

SEQ ID NO: 3127497 - DNA, 25 bp, Homo sapien
caaagcagccgatgtcatcactctg

SEQ ID NO: 3127498 - DNA, 25 bp, Homo sapien
tctggccgatcctcccctccaggtg

SEQ ID NO: 3127499 - DNA, 25 bp, Homo sapien
taaagtgccacagtgtcccaaagca

SEQ ID NO: 3127500 - DNA, 25 bp, Homo sapien
caaagcacccattagagagcctggt

SEQ ID NO: 3127501 - DNA, 25 bp, Homo sapien
taatgctgcacttaatagcaatgat

SEQ ID NO: 3127502 - DNA, 25 bp, Homo sapien
tcttgctggtaagcctgattttgat

SEQ ID NO: 3127503 - DNA, 25 bp, Homo sapien
agagcctggtatgtagttaagtgtc

SEQ ID NO: 3127504 - DNA, 25 bp, Homo sapien
cgttgtacatccagcgcttagattt

SEQ ID NO: 3127505 - DNA, 25 bp, Homo sapien
cttcccgttgtacatccagcgctta

SEQ ID NO: 3127506 - DNA, 25 bp, Homo sapien
cccgttgtacatccagcgcttagat

SEQ ID NO: 3127507 - DNA, 25 bp, Homo sapien
tacatccagcgcttagattttcccc

SEQ ID NO: 3127508 - DNA, 25 bp, Homo sapien
tgttagcatggagcagcctcaagga

SEQ ID NO: 3127509 - DNA, 25 bp, Homo sapien
aaatccactgtctttgcgctgcgct

SEQ ID NO: 3127510 - DNA, 25 bp, Homo sapien
acgctcccgctttcaggcgctgggt

SEQ ID NO: 3127511 - DNA, 25 bp, Homo sapien
tgcgctccgagaaacagtctcctgt

SEQ ID NO: 3127512 - DNA, 25 bp, Homo sapien
agccttggtcgggtttgcctttgca

SEQ ID NO: 3127513 - DNA, 25 bp, Homo sapien
cacagcccgcaaaagtaactcggct

SEQ ID NO: 3127514 - DNA, 25 bp, Homo sapien
gggcgaggacacagcccgcaaaagt

SEQ ID NO: 3127515 - DNA, 25 bp, Homo sapien
agtaactcggctgagggagcctttg

SEQ ID NO: 3127516 - DNA, 25 bp, Homo sapien
cccctgcagagtcgtgaggttcgct

SEQ ID NO: 3127517 - DNA, 25 bp, Homo sapien
tgatctgtaaggacagggacccaga

SEQ ID NO: 3127518 - DNA, 25 bp, Homo sapien
ttcgcgaccgcagcttcaccatagg

SEQ ID NO: 3127519 - DNA, 25 bp, Homo sapien
gactcttactgggttggatgttttc

SEQ ID NO: 3127520 - DNA, 25 bp, Homo sapien
ctgagcgcagagcggagcaccaggc

SEQ ID NO: 3127521 - DNA, 25 bp, Homo sapien
tgagcgcagagcggagcaccaggca

SEQ ID NO: 3127522 - DNA, 25 bp, Homo sapien
gagcgcagagcggagcaccaggcac

SEQ ID NO: 3127523 - DNA, 25 bp, Homo sapien
ctgcgtgccaggcggggctgtgcgg

SEQ ID NO: 3127524 - DNA, 25 bp, Homo sapien
cgtgccaggcggggctgtgcggagc

SEQ ID NO: 3127525 - DNA, 25 bp, Homo sapien
tgcgtgccaggcggggctgtgcgga

SEQ ID NO: 3127526 - DNA, 25 bp, Homo sapien
tgccaggcggggctgtgcggagcag

SEQ ID NO: 3127527 - DNA, 25 bp, Homo sapien
tcagaccaagcaggcgtaagggagt

SEQ ID NO: 3127528 - DNA, 25 bp, Homo sapien
cgggacgtcccgtgtttgcagtgac

SEQ ID NO: 3127529 - DNA, 25 bp, Homo sapien
acaggtcccgggtacaagtgccgag

SEQ ID NO: 3127530 - DNA, 25 bp, Homo sapien
tgccgagctggcgacttagagaaga

SEQ ID NO: 3127531 - DNA, 25 bp, Homo sapien
agcgccagcgcctaaggtgggtcac

SEQ ID NO: 3127532 - DNA, 25 bp, Homo sapien
gaaggagcgccagcgcctaaggtgg

SEQ ID NO: 3127533 - DNA, 25 bp, Homo sapien
ccggggggcggaaggagcgccagcg

SEQ ID NO: 3127534 - DNA, 25 bp, Homo sapien
cggaaggagcgccagcgcctaaggt

SEQ ID NO: 3127535 - DNA, 25 bp, Homo sapien
tctggcccaggccgccgctccggtc

SEQ ID NO: 3127536 - DNA, 25 bp, Homo sapien
aaaaggagtgttcaatggcgacagg

SEQ ID NO: 3127537 - DNA, 25 bp, Homo sapien
tggcgacagggcgctctttgaagcc

SEQ ID NO: 3127538 - DNA, 25 bp, Homo sapien
aggaaaaggagtgttcaatggcgac

SEQ ID NO: 3127539 - DNA, 25 bp, Homo sapien
caatggcgacagggcgctctttgaa

SEQ ID NO: 3127540 - DNA, 25 bp, Homo sapien
taaatcacgatacccaagctcaagg

SEQ ID NO: 3127541 - DNA, 25 bp, Homo sapien
tgttgtcataggagagctaagctct

SEQ ID NO: 3127542 - DNA, 25 bp, Homo sapien
gacttcagggagagctatttaggag

SEQ ID NO: 3127543 - DNA, 25 bp, Homo sapien
tctggcactacatgagcttctggat

SEQ ID NO: 3127544 - DNA, 25 bp, Homo sapien
ctaaattaactaagcattcctcctc

SEQ ID NO: 3127545 - DNA, 25 bp, Homo sapien
gcatgtcatgtcctgcacaggtatc

SEQ ID NO: 3127546 - DNA, 25 bp, Homo sapien
ggtctaccctagtgctggatggaga

SEQ ID NO: 3127547 - DNA, 25 bp, Homo sapien
gaaagggcattatatactccgaaga

SEQ ID NO: 3127548 - DNA, 25 bp, Homo sapien
gaaacaccacataaagtcaagggcc

SEQ ID NO: 3127549 - DNA, 25 bp, Homo sapien
tagctccatgagaataagggtactg

SEQ ID NO: 3127550 - DNA, 25 bp, Homo sapien
tttgtaataacagcacacatgcatt

SEQ ID NO: 3127551 - DNA, 25 bp, Homo sapien
tatagagctaatattgcagagctgg

SEQ ID NO: 3127552 - DNA, 25 bp, Homo sapien
atctgctggttccagaacttgccct

SEQ ID NO: 3127553 - DNA, 25 bp, Homo sapien
tcagtgtgtactctgtgtcaggaac

SEQ ID NO: 3127554 - DNA, 25 bp, Homo sapien
gatccggatgtgtacgtctttgtgg

SEQ ID NO: 3127555 - DNA, 25 bp, Homo sapien
ttccaccgacatcaaaagtgaatga

SEQ ID NO: 3127556 - DNA, 25 bp, Homo sapien
gattacctctgaaaagacctatctc

SEQ ID NO: 3127557 - DNA, 25 bp, Homo sapien
tagcagcatacagatcaatccataa

SEQ ID NO: 3127558 - DNA, 25 bp, Homo sapien
acagacagaatgacttaagcaacag

SEQ ID NO: 3127559 - DNA, 25 bp, Homo sapien
aagtcaatgcccttatttgtagaaa

SEQ ID NO: 3127560 - DNA, 25 bp, Homo sapien
gaagtccaagagcaaagtgttagtg

SEQ ID NO: 3127561 - DNA, 25 bp, Homo sapien
tgagggtgaatctgttccacatgtc

SEQ ID NO: 3127562 - DNA, 25 bp, Homo sapien
tctcttaggtatcatctgggcctgc

SEQ ID NO: 3127563 - DNA, 25 bp, Homo sapien
gccagcttgaagcagaactccctaa

SEQ ID NO: 3127564 - DNA, 25 bp, Homo sapien
tcccaattagctatagtgaacaggt

SEQ ID NO: 3127565 - DNA, 25 bp, Homo sapien
ttatcccttgagtactgacatgtgg

SEQ ID NO: 3127566 - DNA, 25 bp, Homo sapien
ggactgagacactgtaaaaactgca

SEQ ID NO: 3127567 - DNA, 25 bp, Homo sapien
ctttagcatcacactcagactcggg

SEQ ID NO: 3127568 - DNA, 25 bp, Homo sapien
cagaaggcttccgagagtggccgac

SEQ ID NO: 3127569 - DNA, 25 bp, Homo sapien
gagtggccgacacatcgagatcaag

SEQ ID NO: 3127570 - DNA, 25 bp, Homo sapien
actctgttgtgtataagtatcatat

SEQ ID NO: 3127571 - DNA, 25 bp, Homo sapien
attattggtcatagtctccctgttg

SEQ ID NO: 3127572 - DNA, 25 bp, Homo sapien
atctattgatggacaatcttggcta

SEQ ID NO: 3127573 - DNA, 25 bp, Homo sapien
acaatcttggctatcgtaaatggtg

SEQ ID NO: 3127574 - DNA, 25 bp, Homo sapien
atccatttccccacgttctgagttc

SEQ ID NO: 3127575 - DNA, 25 bp, Homo sapien
catccatttccccacgttctgagtt

SEQ ID NO: 3127576 - DNA, 25 bp, Homo sapien
tccatttccccacgttctgagttcc

SEQ ID NO: 3127577 - DNA, 25 bp, Homo sapien
tcatccatttccccacgttctgagt

SEQ ID NO: 3127578 - DNA, 25 bp, Homo sapien
tatttctatcagtagcacctggact

SEQ ID NO: 3127579 - DNA, 25 bp, Homo sapien
ttcccaacaaaaagtgtgcaattgt

SEQ ID NO: 3127580 - DNA, 25 bp, Homo sapien
cagaaagggacaatcacttgcctaa

SEQ ID NO: 3127581 - DNA, 25 bp, Homo sapien
cagatccacttagtacttaaaggca

SEQ ID NO: 3127582 - DNA, 25 bp, Homo sapien
gacttggcatacaggaaattcacta

SEQ ID NO: 3127583 - DNA, 25 bp, Homo sapien
gaaattttatccagactacgaggct

SEQ ID NO: 3127584 - DNA, 25 bp, Homo sapien
tacgaggctaaggttggcttcccag

SEQ ID NO: 3127585 - DNA, 25 bp, Homo sapien
cgtgcctcgggctccacagttaaat

SEQ ID NO: 3127586 - DNA, 25 bp, Homo sapien
ttgggaaaacacaagcattcggtgc

SEQ ID NO: 3127587 - DNA, 25 bp, Homo sapien
ttctgaggatcgcaagagacccttg

SEQ ID NO: 3127588 - DNA, 25 bp, Homo sapien
caacagccgcttcatgaggattact

SEQ ID NO: 3127589 - DNA, 25 bp, Homo sapien
tatcctcctgagtgtacaacagccg

SEQ ID NO: 3127590 - DNA, 25 bp, Homo sapien
aggtgcctacatgctgttcagaaaa

SEQ ID NO: 3127591 - DNA, 25 bp, Homo sapien
tgcctgctttggtgaccttccttac

SEQ ID NO: 3127592 - DNA, 25 bp, Homo sapien
ttccttaccacagggacattggaca

SEQ ID NO: 3127593 - DNA, 25 bp, Homo sapien
atcactgaagctccacaggaagcca

SEQ ID NO: 3127594 - DNA, 25 bp, Homo sapien
ggagcttgtcggcatcccaaaaact

SEQ ID NO: 3127595 - DNA, 25 bp, Homo sapien
aaactgcatgcaggcaaaccaacaa

SEQ ID NO: 3127596 - DNA, 25 bp, Homo sapien
agaaaagcaaactgcatgcaggcaa

SEQ ID NO: 3127597 - DNA, 25 bp, Homo sapien
aagttaggagcttgtcggcatccca

SEQ ID NO: 3127598 - DNA, 25 bp, Homo sapien
gagtccagtatacccctgagttcat

SEQ ID NO: 3127599 - DNA, 25 bp, Homo sapien
caataatggctcatcggcctttcaa

SEQ ID NO: 3127600 - DNA, 25 bp, Homo sapien
gaattgtccattaaacccacatagc

SEQ ID NO: 3127601 - DNA, 25 bp, Homo sapien
cataaagaagtagagtgaattgtcc

SEQ ID NO: 3127602 - DNA, 25 bp, Homo sapien
ctcctgaataactgggactaggggt

SEQ ID NO: 3127603 - DNA, 25 bp, Homo sapien
ttagtagaggcagaatttcactatg

SEQ ID NO: 3127604 - DNA, 25 bp, Homo sapien
cctgaataactgggactaggggtgc

SEQ ID NO: 3127605 - DNA, 25 bp, Homo sapien
tgaataactgggactaggggtgcgt

SEQ ID NO: 3127606 - DNA, 25 bp, Homo sapien
agaagccttcttagcaacttctctc

SEQ ID NO: 3127607 - DNA, 25 bp, Homo sapien
gcctgtacaagttgtcttgggtgag

SEQ ID NO: 3127608 - DNA, 25 bp, Homo sapien
tcttgggtgagggattgcctggcac

SEQ ID NO: 3127609 - DNA, 25 bp, Homo sapien
gtacagctgctgtgttgaaaaagca

SEQ ID NO: 3127610 - DNA, 25 bp, Homo sapien
gatgtgaagggcctgtacaagttgt

SEQ ID NO: 3127611 - DNA, 25 bp, Homo sapien
ccagaatgcatgtgtccagtgcaga

SEQ ID NO: 3127612 - DNA, 25 bp, Homo sapien
agcagggagccagaccagaatgcat

SEQ ID NO: 3127613 - DNA, 25 bp, Homo sapien
cagggagccagaccagaatgcatgt

SEQ ID NO: 3127614 - DNA, 25 bp, Homo sapien
agtgggctgccccaaggatgcctga

SEQ ID NO: 3127615 - DNA, 25 bp, Homo sapien
gtcctggcgtggatggaccactcca

SEQ ID NO: 3127616 - DNA, 25 bp, Homo sapien
cctggcgtggatggaccactccagg

SEQ ID NO: 3127617 - DNA, 25 bp, Homo sapien
tcctggcgtggatggaccactccag

SEQ ID NO: 3127618 - DNA, 25 bp, Homo sapien
ctggcgtggatggaccactccaggc

SEQ ID NO: 3127619 - DNA, 25 bp, Homo sapien
tgactagagctgcaaattcgagtct

SEQ ID NO: 3127620 - DNA, 25 bp, Homo sapien
tgcaaattcgagtcttgtcagtgga

SEQ ID NO: 3127621 - DNA, 25 bp, Homo sapien
gagctgcaaattcgagtcttgtcag

SEQ ID NO: 3127622 - DNA, 25 bp, Homo sapien
aattcgagtcttgtcagtggagaga

SEQ ID NO: 3127623 - DNA, 25 bp, Homo sapien
aagccacatgttctggtcccatgag

SEQ ID NO: 3127624 - DNA, 25 bp, Homo sapien
caaagccacatgttctggtcccatg

SEQ ID NO: 3127625 - DNA, 25 bp, Homo sapien
ccaaagccacatgttctggtcccat

SEQ ID NO: 3127626 - DNA, 25 bp, Homo sapien
aaagccacatgttctggtcccatga

SEQ ID NO: 3127627 - DNA, 25 bp, Homo sapien
ttagtgcagattaagtcgcaggatc

SEQ ID NO: 3127628 - DNA, 25 bp, Homo sapien
atgcgtattctaatcagatcaattt

SEQ ID NO: 3127629 - DNA, 25 bp, Homo sapien
catgcgtattctaatcagatcaatt

SEQ ID NO: 3127630 - DNA, 25 bp, Homo sapien
aagctgtttgagtggaaaatacaca

SEQ ID NO: 3127631 - DNA, 25 bp, Homo sapien
ggttttgttgttgatgccagagaaa

SEQ ID NO: 3127632 - DNA, 25 bp, Homo sapien
gcttataagtaagccggtaactggc

SEQ ID NO: 3127633 - DNA, 25 bp, Homo sapien
ggtaactggcggtgttcttccagtg

SEQ ID NO: 3127634 - DNA, 25 bp, Homo sapien
acatgcagagctgttgtttcagatt

SEQ ID NO: 3127635 - DNA, 25 bp, Homo sapien
gaggacatgcagagctgttgtttca

SEQ ID NO: 3127636 - DNA, 25 bp, Homo sapien
aggacatgcagagctgttgtttcag

SEQ ID NO: 3127637 - DNA, 25 bp, Homo sapien
ggacatgcagagctgttgtttcaga

SEQ ID NO: 3127638 - DNA, 25 bp, Homo sapien
tgtggggaagcagatcttcatccac

SEQ ID NO: 3127639 - DNA, 25 bp, Homo sapien
cagatcttcatccactaggcattca

SEQ ID NO: 3127640 - DNA, 25 bp, Homo sapien
gaagcagatcttcatccactaggca

SEQ ID NO: 3127641 - DNA, 25 bp, Homo sapien
tcttcatccactaggcattcagaca

SEQ ID NO: 3127642 - DNA, 25 bp, Homo sapien
gataaagttgacagtaaaatcaagc

SEQ ID NO: 3127643 - DNA, 25 bp, Homo sapien
aagttgacagtaaaatcaagcagga

SEQ ID NO: 3127644 - DNA, 25 bp, Homo sapien
ctggagataaagttgacagtaaaat

SEQ ID NO: 3127645 - DNA, 25 bp, Homo sapien
gttgacagtaaaatcaagcaggagt

SEQ ID NO: 3127646 - DNA, 25 bp, Homo sapien
agcagctatgttgtaaccatgagaa

SEQ ID NO: 3127647 - DNA, 25 bp, Homo sapien
tagcagctatgttgtaaccatgaga

SEQ ID NO: 3127648 - DNA, 25 bp, Homo sapien
gacaccaagagtagggctgcaattt

SEQ ID NO: 3127649 - DNA, 25 bp, Homo sapien
gaggagggctctagagacaccaaga

SEQ ID NO: 3127650 - DNA, 25 bp, Homo sapien
cagtcaagacaaacccgagagggaa

SEQ ID NO: 3127651 - DNA, 25 bp, Homo sapien
caatttcaaactgggtcatgaggct

SEQ ID NO: 3127652 - DNA, 25 bp, Homo sapien
tgaacagagcaggtgcttgacctcc

SEQ ID NO: 3127653 - DNA, 25 bp, Homo sapien
tccagaaatacaggttagctgagtc

SEQ ID NO: 3127654 - DNA, 25 bp, Homo sapien
tacggaatctagtagactcactgat

SEQ ID NO: 3127655 - DNA, 25 bp, Homo sapien
tagctgagtcggaagagttgtttct

SEQ ID NO: 3127656 - DNA, 25 bp, Homo sapien
tgaacagactggcccagtgcaggga

SEQ ID NO: 3127657 - DNA, 25 bp, Homo sapien
gaggtgaacagactggcccagtgca

SEQ ID NO: 3127658 - DNA, 25 bp, Homo sapien
ggtgaacagactggcccagtgcagg

SEQ ID NO: 3127659 - DNA, 25 bp, Homo sapien
cggaggtgaacagactggcccagtg

SEQ ID NO: 3127660 - DNA, 25 bp, Homo sapien
ttgtcactgggtccagagtaacaat

SEQ ID NO: 3127661 - DNA, 25 bp, Homo sapien
tttgtcactgggtccagagtaacaa

SEQ ID NO: 3127662 - DNA, 25 bp, Homo sapien
ctttgtcactgggtccagagtaaca

SEQ ID NO: 3127663 - DNA, 25 bp, Homo sapien
cagatggatcttatgtgcgaatggg

SEQ ID NO: 3127664 - DNA, 25 bp, Homo sapien
ggcaaactattgtctgtaggccata

SEQ ID NO: 3127665 - DNA, 25 bp, Homo sapien
ggtagtatctactgctgcactcaaa

SEQ ID NO: 3127666 - DNA, 25 bp, Homo sapien
tgagtgtctgagtacagcagcatgt

SEQ ID NO: 3127667 - DNA, 25 bp, Homo sapien
gggatattttcttgcaaccctacca

SEQ ID NO: 3127668 - DNA, 25 bp, Homo sapien
tcctgaatcaattgaaattcctttg

SEQ ID NO: 3127669 - DNA, 25 bp, Homo sapien
tgaatgtgtatgatctccctcctat

SEQ ID NO: 3127670 - DNA, 25 bp, Homo sapien
agcaggaaccagaatatgttaggtt

SEQ ID NO: 3127671 - DNA, 25 bp, Homo sapien
gtgatataatcattaacgtttcttc

SEQ ID NO: 3127672 - DNA, 25 bp, Homo sapien
ctttctgctatagaaatttcacggg

SEQ ID NO: 3127673 - DNA, 25 bp, Homo sapien
aatctttctgctatagaaatttcac

SEQ ID NO: 3127674 - DNA, 25 bp, Homo sapien
ggtgcttatgaagtatgtgatataa

SEQ ID NO: 3127675 - DNA, 25 bp, Homo sapien
cctctccatctgatgtagcctgcgt

SEQ ID NO: 3127676 - DNA, 25 bp, Homo sapien
ccatctgatgtagcctgcgtgtcac

SEQ ID NO: 3127677 - DNA, 25 bp, Homo sapien
tctccatctgatgtagcctgcgtgt

SEQ ID NO: 3127678 - DNA, 25 bp, Homo sapien
atctgatgtagcctgcgtgtcacca

SEQ ID NO: 3127679 - DNA, 25 bp, Homo sapien
agtactgtgccagagagagccttca

SEQ ID NO: 3127680 - DNA, 25 bp, Homo sapien
gagagagccttcagctgaccaaatg

SEQ ID NO: 3127681 - DNA, 25 bp, Homo sapien
agagagccttcagctgaccaaatgc

SEQ ID NO: 3127682 - DNA, 25 bp, Homo sapien
agagagagccttcagctgaccaaat

SEQ ID NO: 3127683 - DNA, 25 bp, Homo sapien
cctgtttaatccatcaaatgatccc

SEQ ID NO: 3127684 - DNA, 25 bp, Homo sapien
ttgatgcttttgtctctattgcctg

SEQ ID NO: 3127685 - DNA, 25 bp, Homo sapien
caaatgatcccgaaaggttgatgct

SEQ ID NO: 3127686 - DNA, 25 bp, Homo sapien
cccgaaaggttgatgcttttgtctc

SEQ ID NO: 3127687 - DNA, 25 bp, Homo sapien
gccctggggccctggtctgcaactg

SEQ ID NO: 3127688 - DNA, 25 bp, Homo sapien
tttgggtcatagctgagcctctcat

SEQ ID NO: 3127689 - DNA, 25 bp, Homo sapien
actgcctgaggctgtctgtggcttt

SEQ ID NO: 3127690 - DNA, 25 bp, Homo sapien
ttgcctgggacataaaagccctggg

SEQ ID NO: 3127691 - DNA, 25 bp, Homo sapien
ttaggccgaaactagtcccatgagc

SEQ ID NO: 3127692 - DNA, 25 bp, Homo sapien
tggacaggaaggtgcctcattggca

SEQ ID NO: 3127693 - DNA, 25 bp, Homo sapien
gctttcaccaggtctcttaggccga

SEQ ID NO: 3127694 - DNA, 25 bp, Homo sapien
tcattggcaccagggcgttgtcttt

SEQ ID NO: 3127695 - DNA, 25 bp, Homo sapien
gatgttttaatactagagaccctcc

SEQ ID NO: 3127696 - DNA, 25 bp, Homo sapien
cattcaggcctttagatatcagtcc

SEQ ID NO: 3127697 - DNA, 25 bp, Homo sapien
taaaggtaacctgcatgggacgtga

SEQ ID NO: 3127698 - DNA, 25 bp, Homo sapien
gcatgggtcaagctaactttcagag

SEQ ID NO: 3127699 - DNA, 25 bp, Homo sapien
gatgtctccgaattgcacactgagg

SEQ ID NO: 3127700 - DNA, 25 bp, Homo sapien
cccagataagttaggtgatgtctcc

SEQ ID NO: 3127701 - DNA, 25 bp, Homo sapien
tctggataaatcacaccctttggca

SEQ ID NO: 3127702 - DNA, 25 bp, Homo sapien
gagaatacccattgtgcacatgagg

SEQ ID NO: 3127703 - DNA, 25 bp, Homo sapien
aattgaagctacttccatcagaggg

SEQ ID NO: 3127704 - DNA, 25 bp, Homo sapien
tgagaaaaggtaatcattgccaccg

SEQ ID NO: 3127705 - DNA, 25 bp, Homo sapien
tctgactagaatagaccaatgcctc

SEQ ID NO: 3127706 - DNA, 25 bp, Homo sapien
tgacgtgagctcttactgtagttac

SEQ ID NO: 3127707 - DNA, 25 bp, Homo sapien
atcctctggacccttggtggtccat

SEQ ID NO: 3127708 - DNA, 25 bp, Homo sapien
ctcgggtgcacacagtgcatcctct

SEQ ID NO: 3127709 - DNA, 25 bp, Homo sapien
gtgcacacagtgcatcctctggacc

SEQ ID NO: 3127710 - DNA, 25 bp, Homo sapien
gttgggggaggtcctcgggtgcaca

SEQ ID NO: 3127711 - DNA, 25 bp, Homo sapien
taccatagatgcatgggagaccaga

SEQ ID NO: 3127712 - DNA, 25 bp, Homo sapien
tgacagccagacagctaccagatgt

SEQ ID NO: 3127713 - DNA, 25 bp, Homo sapien
tgccctatgaaagagctcaagctag

SEQ ID NO: 3127714 - DNA, 25 bp, Homo sapien
caagctagcctattggagccaggaa

SEQ ID NO: 3127715 - DNA, 25 bp, Homo sapien
tcagtaagaatgtatccggtccaac

SEQ ID NO: 3127716 - DNA, 25 bp, Homo sapien
tcttttgagtcttgtgtcaacacac

SEQ ID NO: 3127717 - DNA, 25 bp, Homo sapien
cacagtagctggtgaatctcctcat

SEQ ID NO: 3127718 - DNA, 25 bp, Homo sapien
caagtgatggcatcaacaacattca

SEQ ID NO: 3127719 - DNA, 25 bp, Homo sapien
tgaaggcctccgtttctcaccctat

SEQ ID NO: 3127720 - DNA, 25 bp, Homo sapien
tctctcctgaggttacatcaaactc

SEQ ID NO: 3127721 - DNA, 25 bp, Homo sapien
gggctgcagtcttttgaatggctga

SEQ ID NO: 3127722 - DNA, 25 bp, Homo sapien
ttctcccagctgttggctgaaggcc

SEQ ID NO: 3127723 - DNA, 25 bp, Homo sapien
ctttccatgcagtcactattgccag

SEQ ID NO: 3127724 - DNA, 25 bp, Homo sapien
tatggactaactctagaggaaaggg

SEQ ID NO: 3127725 - DNA, 25 bp, Homo sapien
ctgatggaatatgggttagagctgc

SEQ ID NO: 3127726 - DNA, 25 bp, Homo sapien
taatctttgggctcttattccagaa

SEQ ID NO: 3127727 - DNA, 25 bp, Homo sapien
cagcacacccatgggaaaggagagg

SEQ ID NO: 3127728 - DNA, 25 bp, Homo sapien
ggctggacagcagtatagctctaga

SEQ ID NO: 3127729 - DNA, 25 bp, Homo sapien
tacaaacaggaatcgggaagacaca

SEQ ID NO: 3127730 - DNA, 25 bp, Homo sapien
caaatggagcacaagataggcccaa

SEQ ID NO: 3127731 - DNA, 25 bp, Homo sapien
gctcccactcttccaacttgcctga

SEQ ID NO: 3127732 - DNA, 25 bp, Homo sapien
tactcttagagccatcatgcttaat

SEQ ID NO: 3127733 - DNA, 25 bp, Homo sapien
taatctggcttttctgctcgtagct

SEQ ID NO: 3127734 - DNA, 25 bp, Homo sapien
ggtattaagatacccttaatctggc

SEQ ID NO: 3127735 - DNA, 25 bp, Homo sapien
ttcgcccaatcagagtcaactacag

SEQ ID NO: 3127736 - DNA, 25 bp, Homo sapien
gaaagaagtggctatctccccaatt

SEQ ID NO: 3127737 - DNA, 25 bp, Homo sapien
aatatcaataccatctgtcaaggga

SEQ ID NO: 3127738 - DNA, 25 bp, Homo sapien
ggaatacactctgtcgcttcgccca

SEQ ID NO: 3127739 - DNA, 25 bp, Homo sapien
tgaattcctcctttgcatgcaaaac

SEQ ID NO: 3127740 - DNA, 25 bp, Homo sapien
tgcaaaacagcccataatcaggtgc

SEQ ID NO: 3127741 - DNA, 25 bp, Homo sapien
agattcactgaattcctcctttgca

SEQ ID NO: 3127742 - DNA, 25 bp, Homo sapien
ccagaatagttaactgagagtctac

SEQ ID NO: 3127743 - DNA, 25 bp, Homo sapien
caagtaaggtcttctcacttggaga

SEQ ID NO: 3127744 - DNA, 25 bp, Homo sapien
agacaagtaaggtcttctcacttgg

SEQ ID NO: 3127745 - DNA, 25 bp, Homo sapien
gacaagtaaggtcttctcacttgga

SEQ ID NO: 3127746 - DNA, 25 bp, Homo sapien
agtaaggtcttctcacttggagatt

SEQ ID NO: 3127747 - DNA, 25 bp, Homo sapien
cgtataactcaaaagcattctcagg

SEQ ID NO: 3127748 - DNA, 25 bp, Homo sapien
tctaatgtgcattattgctgggcag

SEQ ID NO: 3127749 - DNA, 25 bp, Homo sapien
gatgcatgtgacaacctcttagaat

SEQ ID NO: 3127750 - DNA, 25 bp, Homo sapien
gggcagtgacagatccaattcaata

SEQ ID NO: 3127751 - DNA, 25 bp, Homo sapien
gttactttgtacagtgagaacagag

SEQ ID NO: 3127752 - DNA, 25 bp, Homo sapien
cttcagagtggttactttgtacagt

SEQ ID NO: 3127753 - DNA, 25 bp, Homo sapien
gaatcactaggtatagctcgttggc

SEQ ID NO: 3127754 - DNA, 25 bp, Homo sapien
ggactttggaatcactaggtatagc

SEQ ID NO: 3127755 - DNA, 25 bp, Homo sapien
acggcagttctaaaagcctctttgg

SEQ ID NO: 3127756 - DNA, 25 bp, Homo sapien
tctcccaggactgttctaacggcag

SEQ ID NO: 3127757 - DNA, 25 bp, Homo sapien
cgcagtgcttggacgtatactcaac

SEQ ID NO: 3127758 - DNA, 25 bp, Homo sapien
ccaggtagaggtgaagcttcgcagt

SEQ ID NO: 3127759 - DNA, 25 bp, Homo sapien
tggcggaggcctgctcatctgactc

SEQ ID NO: 3127760 - DNA, 25 bp, Homo sapien
ggcagtcttcatgtatcccagcttt

SEQ ID NO: 3127761 - DNA, 25 bp, Homo sapien
ggattttcaaagtgggcacaaggac

SEQ ID NO: 3127762 - DNA, 25 bp, Homo sapien
ttccaacagtggcagctacagggca

SEQ ID NO: 3127763 - DNA, 25 bp, Homo sapien
gaccatagctccatatcagtccatg

SEQ ID NO: 3127764 - DNA, 25 bp, Homo sapien
taacagaccatagctccatatcagt

SEQ ID NO: 3127765 - DNA, 25 bp, Homo sapien
cagaccatagctccatatcagtcca

SEQ ID NO: 3127766 - DNA, 25 bp, Homo sapien
gttcctaacagaccatagctccata

SEQ ID NO: 3127767 - DNA, 25 bp, Homo sapien
ctcttcactcctcctataaggaaat

SEQ ID NO: 3127768 - DNA, 25 bp, Homo sapien
atgtatttcatatgcacgtagagca

SEQ ID NO: 3127769 - DNA, 25 bp, Homo sapien
cttcactcctcctataaggaaattg

SEQ ID NO: 3127770 - DNA, 25 bp, Homo sapien
catatgcacgtagagcaacatgaca

SEQ ID NO: 3127771 - DNA, 25 bp, Homo sapien
tatgtgaaacagaaggagcactggc

SEQ ID NO: 3127772 - DNA, 25 bp, Homo sapien
ggtgattacaaacaaacagccagac

SEQ ID NO: 3127773 - DNA, 25 bp, Homo sapien
tctggacagggatacgtactacaat

SEQ ID NO: 3127774 - DNA, 25 bp, Homo sapien
cagtactgatgtgttctctatgtga

SEQ ID NO: 3127775 - DNA, 25 bp, Homo sapien
acctttgaacatgttgaacttcagc

SEQ ID NO: 3127776 - DNA, 25 bp, Homo sapien
caacgagaaactttgtccacctttg

SEQ ID NO: 3127777 - DNA, 25 bp, Homo sapien
ccacctttgaacatgttgaacttca

SEQ ID NO: 3127778 - DNA, 25 bp, Homo sapien
tagagcaacgagaaactttgtccac

SEQ ID NO: 3127779 - DNA, 25 bp, Homo sapien
tagcctgggactatacaatttatac

SEQ ID NO: 3127780 - DNA, 25 bp, Homo sapien
ccatgaggcagttaatggtgggata

SEQ ID NO: 3127781 - DNA, 25 bp, Homo sapien
agttagagacagtccccatgaggca

SEQ ID NO: 3127782 - DNA, 25 bp, Homo sapien
gtatcagccacccttatcaatcaag

SEQ ID NO: 3127783 - DNA, 25 bp, Homo sapien
gatagcttatatagaaggacacccc

SEQ ID NO: 3127784 - DNA, 25 bp, Homo sapien
caaatttgtagactgcctgtgggta

SEQ ID NO: 3127785 - DNA, 25 bp, Homo sapien
gcatgcaaatagtggtggcctcaga

SEQ ID NO: 3127786 - DNA, 25 bp, Homo sapien
gcaggttattgtgacactggccaga

SEQ ID NO: 3127787 - DNA, 25 bp, Homo sapien
gctcacccatgacgctgtagctact

SEQ ID NO: 3127788 - DNA, 25 bp, Homo sapien
tgtctcttaaatgaggtcctggttc

SEQ ID NO: 3127789 - DNA, 25 bp, Homo sapien
ccatctggatgctcacttgtagctg

SEQ ID NO: 3127790 - DNA, 25 bp, Homo sapien
gcaccttttgccctcagtctcagtt

SEQ ID NO: 3127791 - DNA, 25 bp, Homo sapien
taaattcgtggtataggcacacact

SEQ ID NO: 3127792 - DNA, 25 bp, Homo sapien
cccaaggtcactgttatagtaaatg

SEQ ID NO: 3127793 - DNA, 25 bp, Homo sapien
caggtctttgcgtgaatccaatctc

SEQ ID NO: 3127794 - DNA, 25 bp, Homo sapien
taaatgacaaagctgagatgccaac

SEQ ID NO: 3127795 - DNA, 25 bp, Homo sapien
tatcaatagtgcaagcctggtggtt

SEQ ID NO: 3127796 - DNA, 25 bp, Homo sapien
tctaagtatactaataacaacaagc

SEQ ID NO: 3127797 - DNA, 25 bp, Homo sapien
taaatccatgcattcaataaccgta

SEQ ID NO: 3127798 - DNA, 25 bp, Homo sapien
gcattatgggatttgccaataatta

SEQ ID NO: 3127799 - DNA, 25 bp, Homo sapien
gtgactttgctgttacttcattgat

SEQ ID NO: 3127800 - DNA, 25 bp, Homo sapien
ggttgttttattgcatccgaatctt

SEQ ID NO: 3127801 - DNA, 25 bp, Homo sapien
cattgatgttgagtgcccatttgtg

SEQ ID NO: 3127802 - DNA, 25 bp, Homo sapien
tcttcagcttgtcttaattccatgc

SEQ ID NO: 3127803 - DNA, 25 bp, Homo sapien
tctgagtcatgtactgtggtgacct

SEQ ID NO: 3127804 - DNA, 25 bp, Homo sapien
gaatgtaggagatattcaatcaaca

SEQ ID NO: 3127805 - DNA, 25 bp, Homo sapien
gcctagtcagctcatttccagagga

SEQ ID NO: 3127806 - DNA, 25 bp, Homo sapien
aaatggtgtaagacaagcatcagtc

SEQ ID NO: 3127807 - DNA, 25 bp, Homo sapien
tggtattttacgtgggacataggaa

SEQ ID NO: 3127808 - DNA, 25 bp, Homo sapien
tcaggacttcgaaaacaggtgttca

SEQ ID NO: 3127809 - DNA, 25 bp, Homo sapien
tttctacatcctaggcacaagggcc

SEQ ID NO: 3127810 - DNA, 25 bp, Homo sapien
gtcaagatttggaaggaaacagggc

SEQ ID NO: 3127811 - DNA, 25 bp, Homo sapien
gagataactcttgggcatacaaatg

SEQ ID NO: 3127812 - DNA, 25 bp, Homo sapien
cttaaaatatgagctccaggctact

SEQ ID NO: 3127813 - DNA, 25 bp, Homo sapien
aggctactgcaaaagtgctcactgg

SEQ ID NO: 3127814 - DNA, 25 bp, Homo sapien
ttacttgtattaatgggccttgcag

SEQ ID NO: 3127815 - DNA, 25 bp, Homo sapien
agtcactgccctatatgctttgcat

SEQ ID NO: 3127816 - DNA, 25 bp, Homo sapien
tcttcagtcactgccctatatgctt

SEQ ID NO: 3127817 - DNA, 25 bp, Homo sapien
tcagtcactgccctatatgctttgc

SEQ ID NO: 3127818 - DNA, 25 bp, Homo sapien
ctcttcagtcactgccctatatgct

SEQ ID NO: 3127819 - DNA, 25 bp, Homo sapien
ccaaaggcgccagtgtgtgtttttc

SEQ ID NO: 3127820 - DNA, 25 bp, Homo sapien
tcccaaaggcgccagtgtgtgtttt

SEQ ID NO: 3127821 - DNA, 25 bp, Homo sapien
cccaaaggcgccagtgtgtgttttt

SEQ ID NO: 3127822 - DNA, 25 bp, Homo sapien
tatatctgagactcattttcaaacc

SEQ ID NO: 3127823 - DNA, 25 bp, Homo sapien
tcattttcaaacctgggcttgtaaa

SEQ ID NO: 3127824 - DNA, 25 bp, Homo sapien
ggaaggaaggtctttataatgaata

SEQ ID NO: 3127825 - DNA, 25 bp, Homo sapien
tatttgtgtaaatgcgtgtttttcc

SEQ ID NO: 3127826 - DNA, 25 bp, Homo sapien
tctgttttctggtctctggacacat

SEQ ID NO: 3127827 - DNA, 25 bp, Homo sapien
ctgaaatatctgtgttcccatctgt

SEQ ID NO: 3127828 - DNA, 25 bp, Homo sapien
aatatctgtgttcccatctgttttc

SEQ ID NO: 3127829 - DNA, 25 bp, Homo sapien
catctgttttctggtctctggacac

SEQ ID NO: 3127830 - DNA, 25 bp, Homo sapien
caagatcatcagtcacaatgggacc

SEQ ID NO: 3127831 - DNA, 25 bp, Homo sapien
aatgggaccagatcctcctttgttc

SEQ ID NO: 3127832 - DNA, 25 bp, Homo sapien
gacagcattctttagcatatccaca

SEQ ID NO: 3127833 - DNA, 25 bp, Homo sapien
tcactgttgcacgtctagattgaca

SEQ ID NO: 3127834 - DNA, 25 bp, Homo sapien
tgaaaaccagacataacacctcctt

SEQ ID NO: 3127835 - DNA, 25 bp, Homo sapien
taccatcacttctggcatggaccac

SEQ ID NO: 3127836 - DNA, 25 bp, Homo sapien
cagttaattatagccctaaaagagc

SEQ ID NO: 3127837 - DNA, 25 bp, Homo sapien
gggtttctcaggatccagtcatcca

SEQ ID NO: 3127838 - DNA, 25 bp, Homo sapien
taatgatagagttatacagctcatc

SEQ ID NO: 3127839 - DNA, 25 bp, Homo sapien
atatataatgatagagttatacagc

SEQ ID NO: 3127840 - DNA, 25 bp, Homo sapien
atataatgatagagttatacagctc

SEQ ID NO: 3127841 - DNA, 25 bp, Homo sapien
tgatagagttatacagctcatcata

SEQ ID NO: 3127842 - DNA, 25 bp, Homo sapien
catttttgttttcaggtcttccact

SEQ ID NO: 3127843 - DNA, 25 bp, Homo sapien
ccaacagcatctggattatgagtgt

SEQ ID NO: 3127844 - DNA, 25 bp, Homo sapien
ttttagaacagtcagcagcctcatc

SEQ ID NO: 3127845 - DNA, 25 bp, Homo sapien
ggattatgagtgtgtctacgcattt

SEQ ID NO: 3127846 - DNA, 25 bp, Homo sapien
tacgcattttagaacagtcagcagc

SEQ ID NO: 3127847 - DNA, 25 bp, Homo sapien
ttcaagtttctaaccatttccctca

SEQ ID NO: 3127848 - DNA, 25 bp, Homo sapien
tcaagtttctaaccatttccctcac

SEQ ID NO: 3127849 - DNA, 25 bp, Homo sapien
cctgtttgtcaggaaactctgcatg

SEQ ID NO: 3127850 - DNA, 25 bp, Homo sapien
aactctgcatgcttggttagttcca

SEQ ID NO: 3127851 - DNA, 25 bp, Homo sapien
cacagctaagttgtatccttggttt

SEQ ID NO: 3127852 - DNA, 25 bp, Homo sapien
gttccataagaacttgggcattcat

SEQ ID NO: 3127853 - DNA, 25 bp, Homo sapien
tactggcctgatgtgctaattctgg

SEQ ID NO: 3127854 - DNA, 25 bp, Homo sapien
aacagtcaagtttagctgaagaggg

SEQ ID NO: 3127855 - DNA, 25 bp, Homo sapien
gatgctaagttgactagagaagcca

SEQ ID NO: 3127856 - DNA, 25 bp, Homo sapien
gcgatacacgcaaacgatgctaagt

SEQ ID NO: 3127857 - DNA, 25 bp, Homo sapien
tcttatttaggtgagtagactctga

SEQ ID NO: 3127858 - DNA, 25 bp, Homo sapien
acttcgaggtattgactggttcatg

SEQ ID NO: 3127859 - DNA, 25 bp, Homo sapien
gaaggtgatgttccaaatacttcga

SEQ ID NO: 3127860 - DNA, 25 bp, Homo sapien
aaatattcttaagtccaccttggag

SEQ ID NO: 3127861 - DNA, 25 bp, Homo sapien
ttcatttattgcacgcacacttttc

SEQ ID NO: 3127862 - DNA, 25 bp, Homo sapien
accagactggcagccccctgagaat

SEQ ID NO: 3127863 - DNA, 25 bp, Homo sapien
cccctgagaataaaccatgtggttt

SEQ ID NO: 3127864 - DNA, 25 bp, Homo sapien
tttcatttattgcacgcacactttt

SEQ ID NO: 3127865 - DNA, 25 bp, Homo sapien
tctcttcttctagacaggatttcag

SEQ ID NO: 3127866 - DNA, 25 bp, Homo sapien
aatccatcttacgactttctgtcat

SEQ ID NO: 3127867 - DNA, 25 bp, Homo sapien
tcataatccatcttacgactttctg

SEQ ID NO: 3127868 - DNA, 25 bp, Homo sapien
cataatccatcttacgactttctgt

SEQ ID NO: 3127869 - DNA, 25 bp, Homo sapien
taatccatcttacgactttctgtca

SEQ ID NO: 3127870 - DNA, 25 bp, Homo sapien
cctgaaacgctgagctatctaacat

SEQ ID NO: 3127871 - DNA, 25 bp, Homo sapien
tgacagttcctgaaacgctgagcta

SEQ ID NO: 3127872 - DNA, 25 bp, Homo sapien
aatgtgcacatatccattataccca

SEQ ID NO: 3127873 - DNA, 25 bp, Homo sapien
cagtgtgaactactgacagttcctg

SEQ ID NO: 3127874 - DNA, 25 bp, Homo sapien
aataccaaatgccttagcaagtaat

SEQ ID NO: 3127875 - DNA, 25 bp, Homo sapien
tgccttagcaagtaatagaatatac

SEQ ID NO: 3127876 - DNA, 25 bp, Homo sapien
agaatatacttcagagactgtctgc

SEQ ID NO: 3127877 - DNA, 25 bp, Homo sapien
atagaatatacttcagagactgtct

SEQ ID NO: 3127878 - DNA, 25 bp, Homo sapien
ggggcagaacctgtccacttaagct

SEQ ID NO: 3127879 - DNA, 25 bp, Homo sapien
caggggcagaacctgtccacttaag

SEQ ID NO: 3127880 - DNA, 25 bp, Homo sapien
gcaggggcagaacctgtccacttaa

SEQ ID NO: 3127881 - DNA, 25 bp, Homo sapien
aggggcagaacctgtccacttaagc

SEQ ID NO: 3127882 - DNA, 25 bp, Homo sapien
cagaggtgggcttcgatttctatga

SEQ ID NO: 3127883 - DNA, 25 bp, Homo sapien
taactcaattggaaaagcagactga

SEQ ID NO: 3127884 - DNA, 25 bp, Homo sapien
cagatctcagtttttaccagggctc

SEQ ID NO: 3127885 - DNA, 25 bp, Homo sapien
taaagcagaaaaggcatgagtagtc

SEQ ID NO: 3127886 - DNA, 25 bp, Homo sapien
gactgcaaattccacggacaatgat

SEQ ID NO: 3127887 - DNA, 25 bp, Homo sapien
gagccaacatgaaactgccactgta

SEQ ID NO: 3127888 - DNA, 25 bp, Homo sapien
gacaatgatttggttgagattaagc

SEQ ID NO: 3127889 - DNA, 25 bp, Homo sapien
tgcaaatctccatatacttttcaga

SEQ ID NO: 3127890 - DNA, 25 bp, Homo sapien
tagtcgttactcagggaactttcta

SEQ ID NO: 3127891 - DNA, 25 bp, Homo sapien
ttatgctttatccagccagggttgg

SEQ ID NO: 3127892 - DNA, 25 bp, Homo sapien
tcaaagtgcacaggatagtcgttac

SEQ ID NO: 3127893 - DNA, 25 bp, Homo sapien
tctcctggagttgagttaagatcac

SEQ ID NO: 3127894 - DNA, 25 bp, Homo sapien
ggcaggttgcaggttttctgtttca

SEQ ID NO: 3127895 - DNA, 25 bp, Homo sapien
aaacttcagctaccagcccctgctg

SEQ ID NO: 3127896 - DNA, 25 bp, Homo sapien
gatatatttaactgtctgttctgcc

SEQ ID NO: 3127897 - DNA, 25 bp, Homo sapien
catttacgggctcgactgtccaaac

SEQ ID NO: 3127898 - DNA, 25 bp, Homo sapien
tcccttgtctttccaatctccatct

SEQ ID NO: 3127899 - DNA, 25 bp, Homo sapien
tccttcccttgtctttccaatctcc

SEQ ID NO: 3127900 - DNA, 25 bp, Homo sapien
cttgtctttccaatctccatctttt

SEQ ID NO: 3127901 - DNA, 25 bp, Homo sapien
tccatcttttactttcaatccccat

SEQ ID NO: 3127902 - DNA, 25 bp, Homo sapien
tgaaacttcagtgacctctaatctg

SEQ ID NO: 3127903 - DNA, 25 bp, Homo sapien
actctttcatggagataggcccgaa

SEQ ID NO: 3127904 - DNA, 25 bp, Homo sapien
cagtgacctctaatctgatcataga

SEQ ID NO: 3127905 - DNA, 25 bp, Homo sapien
gataggcccgaagtacacttctaag

SEQ ID NO: 3127906 - DNA, 25 bp, Homo sapien
ttggatgcactgaagatgagaaagc

SEQ ID NO: 3127907 - DNA, 25 bp, Homo sapien
gcatctgtattcgtgtgaggataca

SEQ ID NO: 3127908 - DNA, 25 bp, Homo sapien
tctgtattcgtgtgaggatacagtc

SEQ ID NO: 3127909 - DNA, 25 bp, Homo sapien
ttgtgcatctgtattcgtgtgagga

SEQ ID NO: 3127910 - DNA, 25 bp, Homo sapien
tactcaaatgagactgttggaaagc

SEQ ID NO: 3127911 - DNA, 25 bp, Homo sapien
ctcaaatgagactgttggaaagcaa

SEQ ID NO: 3127912 - DNA, 25 bp, Homo sapien
actcaaatgagactgttggaaagca

SEQ ID NO: 3127913 - DNA, 25 bp, Homo sapien
ttactcaaatgagactgttggaaag

SEQ ID NO: 3127914 - DNA, 25 bp, Homo sapien
aacagagatctggagaaggtgggca

SEQ ID NO: 3127915 - DNA, 25 bp, Homo sapien
ctggaaccagaggatggactatgag

SEQ ID NO: 3127916 - DNA, 25 bp, Homo sapien
tgacaacttctctgtgattcaggaa

SEQ ID NO: 3127917 - DNA, 25 bp, Homo sapien
ggcaggacttcctatagcggaggct

SEQ ID NO: 3127918 - DNA, 25 bp, Homo sapien
ttcttgtgtgattttagaattcttc

SEQ ID NO: 3127919 - DNA, 25 bp, Homo sapien
tacattttcttgtgtgattttagaa

SEQ ID NO: 3127920 - DNA, 25 bp, Homo sapien
attttcttgtgtgattttagaattc

SEQ ID NO: 3127921 - DNA, 25 bp, Homo sapien
ttgtgtgattttagaattcttccac

SEQ ID NO: 3127922 - DNA, 25 bp, Homo sapien
tgtaccttcatcagtatcttcagac

SEQ ID NO: 3127923 - DNA, 25 bp, Homo sapien
agggtactggttgacaccacaaatg

SEQ ID NO: 3127924 - DNA, 25 bp, Homo sapien
cattcagaatagagcaaagggagga

SEQ ID NO: 3127925 - DNA, 25 bp, Homo sapien
gactttgtttctggccatgcattct

SEQ ID NO: 3127926 - DNA, 25 bp, Homo sapien
ctctgccttatccacgtggctgctg

SEQ ID NO: 3127927 - DNA, 25 bp, Homo sapien
tgctttatgataagggaatccagga

SEQ ID NO: 3127928 - DNA, 25 bp, Homo sapien
ggtgaaactttctcgtacagtgtct

SEQ ID NO: 3127929 - DNA, 25 bp, Homo sapien
cagtgtctacagcaccattacaagt

SEQ ID NO: 3127930 - DNA, 25 bp, Homo sapien
aagtcaacagcaactccctcctgca

SEQ ID NO: 3127931 - DNA, 25 bp, Homo sapien
tcggattcccataataggtgatgct

SEQ ID NO: 3127932 - DNA, 25 bp, Homo sapien
ttacaaatacccacattgctccaac

SEQ ID NO: 3127933 - DNA, 25 bp, Homo sapien
gaagtgtgaccaccttttggcacca

SEQ ID NO: 3127934 - DNA, 25 bp, Homo sapien
tcttcggaagatttatgtcccaacc

SEQ ID NO: 3127935 - DNA, 25 bp, Homo sapien
cattgctccaaccattcttcggaag

SEQ ID NO: 3127936 - DNA, 25 bp, Homo sapien
tgtttgaaaagctctacttccttta

SEQ ID NO: 3127937 - DNA, 25 bp, Homo sapien
tgcggtttttattgaattcagtgtc

SEQ ID NO: 3127938 - DNA, 25 bp, Homo sapien
tctggtgacttcagaataaatttcc

SEQ ID NO: 3127939 - DNA, 25 bp, Homo sapien
gattctgggactcataggagtatct

SEQ ID NO: 3127940 - DNA, 25 bp, Homo sapien
gactgccatggagaatcagcccaag

SEQ ID NO: 3127941 - DNA, 25 bp, Homo sapien
cctgtttgtgaatggctcggcttag

SEQ ID NO: 3127942 - DNA, 25 bp, Homo sapien
gatctgtacgggatggactgccatg

SEQ ID NO: 3127943 - DNA, 25 bp, Homo sapien
tcataccagttgaccctggctaggg

SEQ ID NO: 3127944 - DNA, 25 bp, Homo sapien
aaattatgggatgctttatgaattt

SEQ ID NO: 3127945 - DNA, 25 bp, Homo sapien
ggcaatgctaatcttctatgtatag

SEQ ID NO: 3127946 - DNA, 25 bp, Homo sapien
gcatcatccttgcactgaggcaatg

SEQ ID NO: 3127947 - DNA, 25 bp, Homo sapien
tgaggcaatgctaatcttctatgta

SEQ ID NO: 3127948 - DNA, 25 bp, Homo sapien
tgtttctttctataccatccaccaa

SEQ ID NO: 3127949 - DNA, 25 bp, Homo sapien
tgacagccttcttctgtgaagaaag

SEQ ID NO: 3127950 - DNA, 25 bp, Homo sapien
cacaagattccttgcctttccctct

SEQ ID NO: 3127951 - DNA, 25 bp, Homo sapien
tgcattcctctgcacacaagattcc

SEQ ID NO: 3127952 - DNA, 25 bp, Homo sapien
caattgaatattgtcagcagcactc

SEQ ID NO: 3127953 - DNA, 25 bp, Homo sapien
tagcaattgctagggagatggcaac

SEQ ID NO: 3127954 - DNA, 25 bp, Homo sapien
ttgctagtaacacccatacagtggt

SEQ ID NO: 3127955 - DNA, 25 bp, Homo sapien
gacagggcccttagtatctttgaac

SEQ ID NO: 3127956 - DNA, 25 bp, Homo sapien
ctttgtccttggaggtatgctaggc

SEQ ID NO: 3127957 - DNA, 25 bp, Homo sapien
atgctaggcagggatatgctgaagc

SEQ ID NO: 3127958 - DNA, 25 bp, Homo sapien
ggtatgctaggcagggatatgctga

SEQ ID NO: 3127959 - DNA, 25 bp, Homo sapien
ttgtccttggaggtatgctaggcag

SEQ ID NO: 3127960 - DNA, 25 bp, Homo sapien
ccattccggctgtgtttttctggtg

SEQ ID NO: 3127961 - DNA, 25 bp, Homo sapien
ttttctggtgtgagagcttgacttt

SEQ ID NO: 3127962 - DNA, 25 bp, Homo sapien
tccacaaatcccattccggctgtgt

SEQ ID NO: 3127963 - DNA, 25 bp, Homo sapien
ttgctttccacaaatcccattccgg

SEQ ID NO: 3127964 - DNA, 25 bp, Homo sapien
caagacaagccatttgtcactgtcc

SEQ ID NO: 3127965 - DNA, 25 bp, Homo sapien
tcaccattgtagatctagccttagg

SEQ ID NO: 3127966 - DNA, 25 bp, Homo sapien
caatcttacaatcctgctctttcca

SEQ ID NO: 3127967 - DNA, 25 bp, Homo sapien
ccttaggtctcttgttctaacgtca

SEQ ID NO: 3127968 - DNA, 25 bp, Homo sapien
caaactgatcagtaatgttatgttc

SEQ ID NO: 3127969 - DNA, 25 bp, Homo sapien
ctaataggataatgttcaaactgat

SEQ ID NO: 3127970 - DNA, 25 bp, Homo sapien
ggctctcacacttagaaatattcat

SEQ ID NO: 3127971 - DNA, 25 bp, Homo sapien
tcaatggcactgttctaaaactcaa

SEQ ID NO: 3127972 - DNA, 25 bp, Homo sapien
catgagctactatggaattttcagg

SEQ ID NO: 3127973 - DNA, 25 bp, Homo sapien
ttttcaggcaataggccattctggg

SEQ ID NO: 3127974 - DNA, 25 bp, Homo sapien
gccacaccaagtgttcggactttat

SEQ ID NO: 3127975 - DNA, 25 bp, Homo sapien
ggaatggcagatggcagtcaagcaa

SEQ ID NO: 3127976 - DNA, 25 bp, Homo sapien
aattgtcttccatatcgagtgtgat

SEQ ID NO: 3127977 - DNA, 25 bp, Homo sapien
cttcaaggttgtgatatcgggcttc

SEQ ID NO: 3127978 - DNA, 25 bp, Homo sapien
ttttgtggtgtactcaggcatatct

SEQ ID NO: 3127979 - DNA, 25 bp, Homo sapien
tatcgggcttcagcttgatccatgc

SEQ ID NO: 3127980 - DNA, 25 bp, Homo sapien
ctactggtctggtcttcgtggcttc

SEQ ID NO: 3127981 - DNA, 25 bp, Homo sapien
tctggtcttcgtggcttcttttccc

SEQ ID NO: 3127982 - DNA, 25 bp, Homo sapien
cttcgatgcaactactggtctggtc

SEQ ID NO: 3127983 - DNA, 25 bp, Homo sapien
ctggtctggtcttcgtggcttcttt

SEQ ID NO: 3127984 - DNA, 25 bp, Homo sapien
catgaccagggacaaaataggcttt

SEQ ID NO: 3127985 - DNA, 25 bp, Homo sapien
ctgacaagaggctaaactgggctat

SEQ ID NO: 3127986 - DNA, 25 bp, Homo sapien
taaactgggctattccatgaccagg

SEQ ID NO: 3127987 - DNA, 25 bp, Homo sapien
tgggctattccatgaccagggacaa

SEQ ID NO: 3127988 - DNA, 25 bp, Homo sapien
cagcctacacaagtcaagcaaatgg

SEQ ID NO: 3127989 - DNA, 25 bp, Homo sapien
ctacacaagtcaagcaaatggtgtg

SEQ ID NO: 3127990 - DNA, 25 bp, Homo sapien
aggtctcctcctcatggagacgtac

SEQ ID NO: 3127991 - DNA, 25 bp, Homo sapien
agcagcctacacaagtcaagcaaat

SEQ ID NO: 3127992 - DNA, 25 bp, Homo sapien
gatcttagtgaactagtctcctggc

SEQ ID NO: 3127993 - DNA, 25 bp, Homo sapien
ctttacaaaagaacagcgattcact

SEQ ID NO: 3127994 - DNA, 25 bp, Homo sapien
cactcgggagctgtagacgcagtct

SEQ ID NO: 3127995 - DNA, 25 bp, Homo sapien
tagacgcagtctgatcttagtgaac

SEQ ID NO: 3127996 - DNA, 25 bp, Homo sapien
gaagctcgggcacgtttaacgccag

SEQ ID NO: 3127997 - DNA, 25 bp, Homo sapien
tcctccagggcatgtttaacgccag

SEQ ID NO: 3127998 - DNA, 25 bp, Homo sapien
ttccagtcagtaagcacgcagtttg

SEQ ID NO: 3127999 - DNA, 25 bp, Homo sapien
cgagccagcaggtcaagcgtgttga

SEQ ID NO: 3128000 - DNA, 25 bp, Homo sapien
ctggccatcagactaataatgcgta

SEQ ID NO: 3128001 - DNA, 25 bp, Homo sapien
cagactaataatgcgtagataacat

SEQ ID NO: 3128002 - DNA, 25 bp, Homo sapien
ccatcagactaataatgcgtagata

SEQ ID NO: 3128003 - DNA, 25 bp, Homo sapien
ggccatcagactaataatgcgtaga

SEQ ID NO: 3128004 - DNA, 25 bp, Homo sapien
ttctaaacattgaataaggacaatt

SEQ ID NO: 3128005 - DNA, 25 bp, Homo sapien
cctgtgccccaaaatgctataaata

SEQ ID NO: 3128006 - DNA, 25 bp, Homo sapien
ataaaactacaagtcaaatggcaca

SEQ ID NO: 3128007 - DNA, 25 bp, Homo sapien
taaataaaactacaagtcaaatggc

SEQ ID NO: 3128008 - DNA, 25 bp, Homo sapien
gaaagtcccaggataggttgtcagc

SEQ ID NO: 3128009 - DNA, 25 bp, Homo sapien
gaatcctggagttcaagagctgaag

SEQ ID NO: 3128010 - DNA, 25 bp, Homo sapien
gaagccaatccatgtttgaaagcct

SEQ ID NO: 3128011 - DNA, 25 bp, Homo sapien
aactcaattcaaaacctaaggtctg

SEQ ID NO: 3128012 - DNA, 25 bp, Homo sapien
tctccaactgcgagaaaattttccc

SEQ ID NO: 3128013 - DNA, 25 bp, Homo sapien
cagacactcactctggtcctgctca

SEQ ID NO: 3128014 - DNA, 25 bp, Homo sapien
gagcaggaatccctttaagcactcc

SEQ ID NO: 3128015 - DNA, 25 bp, Homo sapien
ttttccctccaatcaatgagagcag

SEQ ID NO: 3128016 - DNA, 25 bp, Homo sapien
tgccgacgacattggccacagcagt

SEQ ID NO: 3128017 - DNA, 25 bp, Homo sapien
ccacagcagttgcttgctccataaa

SEQ ID NO: 3128018 - DNA, 25 bp, Homo sapien
tttgcacttagtaccctgccgacga

SEQ ID NO: 3128019 - DNA, 25 bp, Homo sapien
aattccaaaagctttgcacttagta

SEQ ID NO: 3128020 - DNA, 25 bp, Homo sapien
gatggtgccatgcaataagctgtaa

SEQ ID NO: 3128021 - DNA, 25 bp, Homo sapien
tgatggcagtgaaggatctgaagtc

SEQ ID NO: 3128022 - DNA, 25 bp, Homo sapien
ctgtaaaagtaaagctgaaggagta

SEQ ID NO: 3128023 - DNA, 25 bp, Homo sapien
ctttctctaagatattggtgatggc

SEQ ID NO: 3128024 - DNA, 25 bp, Homo sapien
taagtgctgattagctcttcaaggg

SEQ ID NO: 3128025 - DNA, 25 bp, Homo sapien
tgctgttggaatctaggtggctgtc

SEQ ID NO: 3128026 - DNA, 25 bp, Homo sapien
ggtggctgtcaagaaataatgcccc

SEQ ID NO: 3128027 - DNA, 25 bp, Homo sapien
caatccagttgagcagttgtctgaa

SEQ ID NO: 3128028 - DNA, 25 bp, Homo sapien
aacttgtgcttctagtcatgcttac

SEQ ID NO: 3128029 - DNA, 25 bp, Homo sapien
aaaggtaaagctcatttggatgcta

SEQ ID NO: 3128030 - DNA, 25 bp, Homo sapien
gcacttaggaggaccaaatcaccaa

SEQ ID NO: 3128031 - DNA, 25 bp, Homo sapien
ccaaaaaacatctcttaggaagcag

SEQ ID NO: 3128032 - DNA, 25 bp, Homo sapien
tttttccgtgaatccaattccactc

SEQ ID NO: 3128033 - DNA, 25 bp, Homo sapien
cagtgccatcagtcttgttcctcat

SEQ ID NO: 3128034 - DNA, 25 bp, Homo sapien
tccgtgaatccaattccactctgct

SEQ ID NO: 3128035 - DNA, 25 bp, Homo sapien
tgaatccaattccactctgctactg

SEQ ID NO: 3128036 - DNA, 25 bp, Homo sapien
tgtgcagagataactggaaccacga

SEQ ID NO: 3128037 - DNA, 25 bp, Homo sapien
taatgggacattacacaacaacaaa

SEQ ID NO: 3128038 - DNA, 25 bp, Homo sapien
tagtggtttatcttgagtcctggag

SEQ ID NO: 3128039 - DNA, 25 bp, Homo sapien
ggcagggaacaaatgtaactgtgat

SEQ ID NO: 3128040 - DNA, 25 bp, Homo sapien
gatgacgttggcattttagctggag

SEQ ID NO: 3128041 - DNA, 25 bp, Homo sapien
tttagctggagtcagaatgtggtca

SEQ ID NO: 3128042 - DNA, 25 bp, Homo sapien
tcagaatgtggtcaaagggagatat

SEQ ID NO: 3128043 - DNA, 25 bp, Homo sapien
gggagatatagaggccttcactgag

SEQ ID NO: 3128044 - DNA, 25 bp, Homo sapien
ttttcacctgtgccctgttgagaat

SEQ ID NO: 3128045 - DNA, 25 bp, Homo sapien
acctttttcacctgtgccctgttga

SEQ ID NO: 3128046 - DNA, 25 bp, Homo sapien
tttttcacctgtgccctgttgagaa

SEQ ID NO: 3128047 - DNA, 25 bp, Homo sapien
ctttttcacctgtgccctgttgaga

SEQ ID NO: 3128048 - DNA, 25 bp, Homo sapien
ctatctcccattttaggacgtcagc

SEQ ID NO: 3128049 - DNA, 25 bp, Homo sapien
gaacgcagttttcctctatctccca

SEQ ID NO: 3128050 - DNA, 25 bp, Homo sapien
ggacgtcagcttctattattttatt

SEQ ID NO: 3128051 - DNA, 25 bp, Homo sapien
aaatgggaacgcagttttcctctat

SEQ ID NO: 3128052 - DNA, 25 bp, Homo sapien
gaacagttccgccagaattctggtg

SEQ ID NO: 3128053 - DNA, 25 bp, Homo sapien
gatgaaagttagaggacacactgga

SEQ ID NO: 3128054 - DNA, 25 bp, Homo sapien
catctatccacgtgcattcagggaa

SEQ ID NO: 3128055 - DNA, 25 bp, Homo sapien
acactggagctagaaggcttcagct

SEQ ID NO: 3128056 - DNA, 25 bp, Homo sapien
aactatctatcaagaccatccctga

SEQ ID NO: 3128057 - DNA, 25 bp, Homo sapien
caagtatttctttctagtgacacaa

SEQ ID NO: 3128058 - DNA, 25 bp, Homo sapien
ccatccctgaataggtgtcattcat

SEQ ID NO: 3128059 - DNA, 25 bp, Homo sapien
caagaatggcataagacaccaccca

SEQ ID NO: 3128060 - DNA, 25 bp, Homo sapien
aaggtctactggcacctatgcggca

SEQ ID NO: 3128061 - DNA, 25 bp, Homo sapien
agctttgggccagagtcgtctcgca

SEQ ID NO: 3128062 - DNA, 25 bp, Homo sapien
tatgcggcaatacacattgtggcct

SEQ ID NO: 3128063 - DNA, 25 bp, Homo sapien
tgacggatgatgcagccttaagctt

SEQ ID NO: 3128064 - DNA, 25 bp, Homo sapien
gctttgaatccttgttactctttgt

SEQ ID NO: 3128065 - DNA, 25 bp, Homo sapien
tctgatcttttatcatgtggaaccg

SEQ ID NO: 3128066 - DNA, 25 bp, Homo sapien
ctatctctgatcttttatcatgtgg

SEQ ID NO: 3128067 - DNA, 25 bp, Homo sapien
tatcatgtggaaccgctttgaatcc

SEQ ID NO: 3128068 - DNA, 25 bp, Homo sapien
tagcttcttcactctgggcatggac

SEQ ID NO: 3128069 - DNA, 25 bp, Homo sapien
catcacctttgttgacagaacagca

SEQ ID NO: 3128070 - DNA, 25 bp, Homo sapien
cagaacagcaccagcttcttctaac

SEQ ID NO: 3128071 - DNA, 25 bp, Homo sapien
tggaccttggccactctatccatca

SEQ ID NO: 3128072 - DNA, 25 bp, Homo sapien
tcacgatgccattcccgagtcctct

SEQ ID NO: 3128073 - DNA, 25 bp, Homo sapien
gtggtcacgatgccattcccgagtc

SEQ ID NO: 3128074 - DNA, 25 bp, Homo sapien
tggtcacgatgccattcccgagtcc

SEQ ID NO: 3128075 - DNA, 25 bp, Homo sapien
ggtcacgatgccattcccgagtcct

SEQ ID NO: 3128076 - DNA, 25 bp, Homo sapien
tggaagatcgtactctgtacttcac

SEQ ID NO: 3128077 - DNA, 25 bp, Homo sapien
ccatggaagatcgtactctgtactt

SEQ ID NO: 3128078 - DNA, 25 bp, Homo sapien
gaagatcgtactctgtacttcacca

SEQ ID NO: 3128079 - DNA, 25 bp, Homo sapien
aatgccatggaagatcgtactctgt

SEQ ID NO: 3128080 - DNA, 25 bp, Homo sapien
cattctgtcatggacccagcaggca

SEQ ID NO: 3128081 - DNA, 25 bp, Homo sapien
tcagaagactgtgccccattcttgg

SEQ ID NO: 3128082 - DNA, 25 bp, Homo sapien
gagttagtctttgtgatttagtcca

SEQ ID NO: 3128083 - DNA, 25 bp, Homo sapien
gagttgcatttctatgtcccattct

SEQ ID NO: 3128084 - DNA, 25 bp, Homo sapien
actatgtgttcgtggcagagaggca

SEQ ID NO: 3128085 - DNA, 25 bp, Homo sapien
catattgggatcttaaaactatgtg

SEQ ID NO: 3128086 - DNA, 25 bp, Homo sapien
gcactggcagtcaagtgtggtcaat

SEQ ID NO: 3128087 - DNA, 25 bp, Homo sapien
cagagaggcaccactagaatctgtg

SEQ ID NO: 3128088 - DNA, 25 bp, Homo sapien
tggtgcctgtgttgtcttcctccca

SEQ ID NO: 3128089 - DNA, 25 bp, Homo sapien
gttcagattgttcctggtgcctgtg

SEQ ID NO: 3128090 - DNA, 25 bp, Homo sapien
ttcagattgttcctggtgcctgtgt

SEQ ID NO: 3128091 - DNA, 25 bp, Homo sapien
tgtgttgtcttcctcccatctctgt

SEQ ID NO: 3128092 - DNA, 25 bp, Homo sapien
ctatgcctgtctcttggacgtgtat

SEQ ID NO: 3128093 - DNA, 25 bp, Homo sapien
tgtctcttggacgtgtattaaatgc

SEQ ID NO: 3128094 - DNA, 25 bp, Homo sapien
gcctgtctcttggacgtgtattaaa

SEQ ID NO: 3128095 - DNA, 25 bp, Homo sapien
tctcttggacgtgtattaaatgctg

SEQ ID NO: 3128096 - DNA, 25 bp, Homo sapien
taggcagagttatgctaatcaaatt

SEQ ID NO: 3128097 - DNA, 25 bp, Homo sapien
attaattcattaggcagagttatgc

SEQ ID NO: 3128098 - DNA, 25 bp, Homo sapien
catttgtaatatgatagtcttgtca

SEQ ID NO: 3128099 - DNA, 25 bp, Homo sapien
ggttccacagaaggaattaattcat

SEQ ID NO: 3128100 - DNA, 25 bp, Homo sapien
taatataagacaccctcttggccca

SEQ ID NO: 3128101 - DNA, 25 bp, Homo sapien
agaaggtactcagcaaagggctgtg

SEQ ID NO: 3128102 - DNA, 25 bp, Homo sapien
tcaacctcataacccttaatataag

SEQ ID NO: 3128103 - DNA, 25 bp, Homo sapien
catagcagggaatatttctttttca

SEQ ID NO: 3128104 - DNA, 25 bp, Homo sapien
tcccttcagtgttgccggatgctgc

SEQ ID NO: 3128105 - DNA, 25 bp, Homo sapien
ccttcagtgttgccggatgctgcct

SEQ ID NO: 3128106 - DNA, 25 bp, Homo sapien
tttgccctacttcctcactgtgcat

SEQ ID NO: 3128107 - DNA, 25 bp, Homo sapien
tctcccttcagtgttgccggatgct

SEQ ID NO: 3128108 - DNA, 25 bp, Homo sapien
tcagccagccatatctttcttgtca

SEQ ID NO: 3128109 - DNA, 25 bp, Homo sapien
catatctttcttgtcacctgtgatc

SEQ ID NO: 3128110 - DNA, 25 bp, Homo sapien
cagccatatctttcttgtcacctgt

SEQ ID NO: 3128111 - DNA, 25 bp, Homo sapien
gccatatctttcttgtcacctgtga

SEQ ID NO: 3128112 - DNA, 25 bp, Homo sapien
caaaagggaattgattagtctctcc

SEQ ID NO: 3128113 - DNA, 25 bp, Homo sapien
tacaccacgttttctgcctattctg

SEQ ID NO: 3128114 - DNA, 25 bp, Homo sapien
cagcttagatccctttcctcaaaag

SEQ ID NO: 3128115 - DNA, 25 bp, Homo sapien
aaaccgccactctctttctgacatg

SEQ ID NO: 3128116 - DNA, 25 bp, Homo sapien
ctagagacccacacgactttctgtc

SEQ ID NO: 3128117 - DNA, 25 bp, Homo sapien
ttctagagacccacacgactttctg

SEQ ID NO: 3128118 - DNA, 25 bp, Homo sapien
tctagagacccacacgactttctgt

SEQ ID NO: 3128119 - DNA, 25 bp, Homo sapien
agagacccacacgactttctgtctg

SEQ ID NO: 3128120 - DNA, 25 bp, Homo sapien
tatgaaagtaacagcaaggcggttc

SEQ ID NO: 3128121 - DNA, 25 bp, Homo sapien
tatttaagaaaccattgatgaaggc

SEQ ID NO: 3128122 - DNA, 25 bp, Homo sapien
cagtgagtacaattataacgagagc

SEQ ID NO: 3128123 - DNA, 25 bp, Homo sapien
ggttcctggtgtgctcaagtacaac

SEQ ID NO: 3128124 - DNA, 25 bp, Homo sapien
ggatgccagttctgatcacaggtat

SEQ ID NO: 3128125 - DNA, 25 bp, Homo sapien
aagtggacaggatgccagttctgat

SEQ ID NO: 3128126 - DNA, 25 bp, Homo sapien
gggacagcagtctcaatcaaagtgg

SEQ ID NO: 3128127 - DNA, 25 bp, Homo sapien
cagtctcaatcaaagtggacaggat

SEQ ID NO: 3128128 - DNA, 25 bp, Homo sapien
tgggcaaggaaacacgcgtctccat

SEQ ID NO: 3128129 - DNA, 25 bp, Homo sapien
actgaaagtcttggcggtcgtgctg

SEQ ID NO: 3128130 - DNA, 25 bp, Homo sapien
ttccctgacatgtgaaatggagtct

SEQ ID NO: 3128131 - DNA, 25 bp, Homo sapien
caaacatttatgtcgtcgcccgcta

SEQ ID NO: 3128132 - DNA, 25 bp, Homo sapien
ttgctgcttgtagcggggcaagatt

SEQ ID NO: 3128133 - DNA, 25 bp, Homo sapien
cttgtagcggggcaagatttagtac

SEQ ID NO: 3128134 - DNA, 25 bp, Homo sapien
tgcttgtagcggggcaagatttagt

SEQ ID NO: 3128135 - DNA, 25 bp, Homo sapien
gctgcttgtagcggggcaagattta

SEQ ID NO: 3128136 - DNA, 25 bp, Homo sapien
gaggacgtagagttccgactgctgt

SEQ ID NO: 3128137 - DNA, 25 bp, Homo sapien
tctttgtggaggacgtagagttccg

SEQ ID NO: 3128138 - DNA, 25 bp, Homo sapien
tcagagggagctgtaaagctctttg

SEQ ID NO: 3128139 - DNA, 25 bp, Homo sapien
tgtaaagctctttgtggaggacgta

SEQ ID NO: 3128140 - DNA, 25 bp, Homo sapien
cttacaggtgctgggtaaccagttt

SEQ ID NO: 3128141 - DNA, 25 bp, Homo sapien
tggggagccacgcagtctactctct

SEQ ID NO: 3128142 - DNA, 25 bp, Homo sapien
acgcagtctactctctccagcagct

SEQ ID NO: 3128143 - DNA, 25 bp, Homo sapien
taaccagtttcaatcgcatgctggg

SEQ ID NO: 3128144 - DNA, 25 bp, Homo sapien
cgaatacagtatggcaactatttac

SEQ ID NO: 3128145 - DNA, 25 bp, Homo sapien
tactgaaggaagaccgtaattatca

SEQ ID NO: 3128146 - DNA, 25 bp, Homo sapien
ccctggaaacaatccttggaggata

SEQ ID NO: 3128147 - DNA, 25 bp, Homo sapien
tattatcagtgattcccctggaaac

SEQ ID NO: 3128148 - DNA, 25 bp, Homo sapien
agcagcaatgcccttctgggactct

SEQ ID NO: 3128149 - DNA, 25 bp, Homo sapien
caatgcccttctgggactctaagtc

SEQ ID NO: 3128150 - DNA, 25 bp, Homo sapien
cagcaatgcccttctgggactctaa

SEQ ID NO: 3128151 - DNA, 25 bp, Homo sapien
gcaatgcccttctgggactctaagt

SEQ ID NO: 3128152 - DNA, 25 bp, Homo sapien
ttcttctctatagccaatgtaaatg

SEQ ID NO: 3128153 - DNA, 25 bp, Homo sapien
tatagccaatgtaaatgcttgagtc

SEQ ID NO: 3128154 - DNA, 25 bp, Homo sapien
tctctatagccaatgtaaatgcttg

SEQ ID NO: 3128155 - DNA, 25 bp, Homo sapien
caatgtaaatgcttgagtctcccat

SEQ ID NO: 3128156 - DNA, 25 bp, Homo sapien
gggtctctctctttcgacttgtgga

SEQ ID NO: 3128157 - DNA, 25 bp, Homo sapien
ccttgcagctctggtatcttaacag

SEQ ID NO: 3128158 - DNA, 25 bp, Homo sapien
ccatgtctttggtgttagggtagaa

SEQ ID NO: 3128159 - DNA, 25 bp, Homo sapien
tcgacttgtggagtccctgccaaca

SEQ ID NO: 3128160 - DNA, 25 bp, Homo sapien
ggtttagagtggtttgtctcttgtc

SEQ ID NO: 3128161 - DNA, 25 bp, Homo sapien
cagtttctgtcctcgtattagggta

SEQ ID NO: 3128162 - DNA, 25 bp, Homo sapien
gatggattgtgtttagtgcatgaac

SEQ ID NO: 3128163 - DNA, 25 bp, Homo sapien
gactgcatttgctgatctgatcagt

SEQ ID NO: 3128164 - DNA, 25 bp, Homo sapien
ctagaggagcagttgatggctaaaa

SEQ ID NO: 3128165 - DNA, 25 bp, Homo sapien
tagaggagcagttgatggctaaaaa

SEQ ID NO: 3128166 - DNA, 25 bp, Homo sapien
agaggagcagttgatggctaaaaat

SEQ ID NO: 3128167 - DNA, 25 bp, Homo sapien
ccctccaaagcgccaaatttaattg

SEQ ID NO: 3128168 - DNA, 25 bp, Homo sapien
ctccaaagcgccaaatttaattgtt

SEQ ID NO: 3128169 - DNA, 25 bp, Homo sapien
tcatccctccaaagcgccaaattta

SEQ ID NO: 3128170 - DNA, 25 bp, Homo sapien
atccctccaaagcgccaaatttaat

SEQ ID NO: 3128171 - DNA, 25 bp, Homo sapien
cagttttacaactgcggtccatata

SEQ ID NO: 3128172 - DNA, 25 bp, Homo sapien
cagggacgttcaagaaatacctcca

SEQ ID NO: 3128173 - DNA, 25 bp, Homo sapien
tataccctgtgcagggacgttcaag

SEQ ID NO: 3128174 - DNA, 25 bp, Homo sapien
gcggtccatataccctgtgcaggga

SEQ ID NO: 3128175 - DNA, 25 bp, Homo sapien
gagaagggttagctgccgtcttgaa

SEQ ID NO: 3128176 - DNA, 25 bp, Homo sapien
gctttgagctgttaacgggagacgt

SEQ ID NO: 3128177 - DNA, 25 bp, Homo sapien
gaaggttctaccacaccagttcatc

SEQ ID NO: 3128178 - DNA, 25 bp, Homo sapien
gttcatcactaagcctgctgtgtgg

SEQ ID NO: 3128179 - DNA, 25 bp, Homo sapien
gctcagatacgtggattgtctccaa

SEQ ID NO: 3128180 - DNA, 25 bp, Homo sapien
catttgatctcatcccagcagtgcc

SEQ ID NO: 3128181 - DNA, 25 bp, Homo sapien
cagcagtgcccggacatgtgtgctc

SEQ ID NO: 3128182 - DNA, 25 bp, Homo sapien
tgtgtgctcagatacgtggattgtc

SEQ ID NO: 3128183 - DNA, 25 bp, Homo sapien
gctctaggggtcactgagagccctc

SEQ ID NO: 3128184 - DNA, 25 bp, Homo sapien
cggctctaggggtcactgagagccc

SEQ ID NO: 3128185 - DNA, 25 bp, Homo sapien
tctaggggtcactgagagccctcca

SEQ ID NO: 3128186 - DNA, 25 bp, Homo sapien
ctaggggtcactgagagccctccaa

SEQ ID NO: 3128187 - DNA, 25 bp, Homo sapien
ctgaaggaatgtggaaacgtgaagc

SEQ ID NO: 3128188 - DNA, 25 bp, Homo sapien
ggatgctcttgggtatctgccacag

SEQ ID NO: 3128189 - DNA, 25 bp, Homo sapien
tcttgggtatctgccacagtaagaa

SEQ ID NO: 3128190 - DNA, 25 bp, Homo sapien
aggaatgtggaaacgtgaagccatc

SEQ ID NO: 3128191 - DNA, 25 bp, Homo sapien
tgtgtgccattagcatctgtacaga

SEQ ID NO: 3128192 - DNA, 25 bp, Homo sapien
gaagaacctccgcaatactgcaggt

SEQ ID NO: 3128193 - DNA, 25 bp, Homo sapien
ctggaaagtgtggtgaccaaatgaa

SEQ ID NO: 3128194 - DNA, 25 bp, Homo sapien
tactgcaggtattccctggaaagtg

SEQ ID NO: 3128195 - DNA, 25 bp, Homo sapien
atcatgctgtacagaatctcgagct

SEQ ID NO: 3128196 - DNA, 25 bp, Homo sapien
ttgcataggccacccaatcctatgg

SEQ ID NO: 3128197 - DNA, 25 bp, Homo sapien
tcaatccctgcaaacattctggcaa

SEQ ID NO: 3128198 - DNA, 25 bp, Homo sapien
tcttataaccggttctttctcacaa

SEQ ID NO: 3128199 - DNA, 25 bp, Homo sapien
ctcagttgtcgagggcctctggaaa

SEQ ID NO: 3128200 - DNA, 25 bp, Homo sapien
cccctcagttgtcgagggcctctgg

SEQ ID NO: 3128201 - DNA, 25 bp, Homo sapien
ggaaaaggcccactagccaggatct

SEQ ID NO: 3128202 - DNA, 25 bp, Homo sapien
tggaaaaggcccactagccaggatc

SEQ ID NO: 3128203 - DNA, 25 bp, Homo sapien
gtggcctgatgacgcaatgacacca

SEQ ID NO: 3128204 - DNA, 25 bp, Homo sapien
cacactctacactagactggggaaa

SEQ ID NO: 3128205 - DNA, 25 bp, Homo sapien
ctgtggcctgatgacgcaatgacac

SEQ ID NO: 3128206 - DNA, 25 bp, Homo sapien
cactagactggggaaaggcattctc

SEQ ID NO: 3128207 - DNA, 25 bp, Homo sapien
gggcagtggtaaatccatttaggta

SEQ ID NO: 3128208 - DNA, 25 bp, Homo sapien
tggtaaatccatttaggtaacagat

SEQ ID NO: 3128209 - DNA, 25 bp, Homo sapien
cagtggtaaatccatttaggtaaca

SEQ ID NO: 3128210 - DNA, 25 bp, Homo sapien
ctgggcagtggtaaatccatttagg

SEQ ID NO: 3128211 - DNA, 25 bp, Homo sapien
aacatgcaatttaggccacttggag

SEQ ID NO: 3128212 - DNA, 25 bp, Homo sapien
tcttgtgtttcatggatccctgtga

SEQ ID NO: 3128213 - DNA, 25 bp, Homo sapien
tgttggtatatcaggtttctgggcc

SEQ ID NO: 3128214 - DNA, 25 bp, Homo sapien
ggagattgcgagtttgtggtataaa

SEQ ID NO: 3128215 - DNA, 25 bp, Homo sapien
agtcagacatagatttggtcttttc

SEQ ID NO: 3128216 - DNA, 25 bp, Homo sapien
tcttgtaggctttgctcgtttcgtt

SEQ ID NO: 3128217 - DNA, 25 bp, Homo sapien
tgtaggctttgctcgtttcgtttta

SEQ ID NO: 3128218 - DNA, 25 bp, Homo sapien
tttcttgtaggctttgctcgtttcg

SEQ ID NO: 3128219 - DNA, 25 bp, Homo sapien
tgcactttccacaatgtactgcaat

SEQ ID NO: 3128220 - DNA, 25 bp, Homo sapien
tccacaatgtactgcaatgatctgt

SEQ ID NO: 3128221 - DNA, 25 bp, Homo sapien
caatgtactgcaatgatctgtgcat

SEQ ID NO: 3128222 - DNA, 25 bp, Homo sapien
ctttgcactttccacaatgtactgc

SEQ ID NO: 3128223 - DNA, 25 bp, Homo sapien
ctgtaagtggctggtttggatgaga

SEQ ID NO: 3128224 - DNA, 25 bp, Homo sapien
taagtggctggtttggatgagagac

SEQ ID NO: 3128225 - DNA, 25 bp, Homo sapien
gtaagtggctggtttggatgagaga

SEQ ID NO: 3128226 - DNA, 25 bp, Homo sapien
tgtaagtggctggtttggatgagag

SEQ ID NO: 3128227 - DNA, 25 bp, Homo sapien
tctgattcttcctgaattgctaact

SEQ ID NO: 3128228 - DNA, 25 bp, Homo sapien
gcagatacactctttaaaaccacca

SEQ ID NO: 3128229 - DNA, 25 bp, Homo sapien
gaattgctaacttaactccatttcc

SEQ ID NO: 3128230 - DNA, 25 bp, Homo sapien
gctcccctgatcaatctgttctgga

SEQ ID NO: 3128231 - DNA, 25 bp, Homo sapien
cacagtggacattctgtatccaggg

SEQ ID NO: 3128232 - DNA, 25 bp, Homo sapien
agtggacattctgtatccagggggc

SEQ ID NO: 3128233 - DNA, 25 bp, Homo sapien
tcacagtggacattctgtatccagg

SEQ ID NO: 3128234 - DNA, 25 bp, Homo sapien
cagtggacattctgtatccaggggg

SEQ ID NO: 3128235 - DNA, 25 bp, Homo sapien
gatgtatacaacatataagcctata

SEQ ID NO: 3128236 - DNA, 25 bp, Homo sapien
ccttgagttgctgtgagtcatattc

SEQ ID NO: 3128237 - DNA, 25 bp, Homo sapien
caagtaaagtcaactcattaatgta

SEQ ID NO: 3128238 - DNA, 25 bp, Homo sapien
aagatttccacttattccttccttg

SEQ ID NO: 3128239 - DNA, 25 bp, Homo sapien
cactgaacaggtcaagaaggtcccg

SEQ ID NO: 3128240 - DNA, 25 bp, Homo sapien
tgaacaggtcaagaaggtcccggat

SEQ ID NO: 3128241 - DNA, 25 bp, Homo sapien
ctgaacaggtcaagaaggtcccgga

SEQ ID NO: 3128242 - DNA, 25 bp, Homo sapien
actgaacaggtcaagaaggtcccgg

SEQ ID NO: 3128243 - DNA, 25 bp, Homo sapien
ggaccacgggaagtaggacacatca

SEQ ID NO: 3128244 - DNA, 25 bp, Homo sapien
tattttgagctgtaatgttcatgca

SEQ ID NO: 3128245 - DNA, 25 bp, Homo sapien
gcacataagctttaggttcattcat

SEQ ID NO: 3128246 - DNA, 25 bp, Homo sapien
tctgtcctaatatgtgttcggaact

SEQ ID NO: 3128247 - DNA, 25 bp, Homo sapien
tgaccttaaatcaagctctcgggct

SEQ ID NO: 3128248 - DNA, 25 bp, Homo sapien
tgcatttgtgggtttagcgtgacct

SEQ ID NO: 3128249 - DNA, 25 bp, Homo sapien
aaagcggaaggctcacaccaggctt

SEQ ID NO: 3128250 - DNA, 25 bp, Homo sapien
tccaggccactttgcttatgacttg

SEQ ID NO: 3128251 - DNA, 25 bp, Homo sapien
gagcatcgcctgaatttttgtcatt

SEQ ID NO: 3128252 - DNA, 25 bp, Homo sapien
ttaatcgctatccaaaatactcctt

SEQ ID NO: 3128253 - DNA, 25 bp, Homo sapien
tctactccctgcttaggcaatttaa

SEQ ID NO: 3128254 - DNA, 25 bp, Homo sapien
catggtttgcattatcagcctttta

SEQ ID NO: 3128255 - DNA, 25 bp, Homo sapien
tgagaccgcacctggaaaacaggcc

SEQ ID NO: 3128256 - DNA, 25 bp, Homo sapien
tatgattcattcgtagctggaggaa

SEQ ID NO: 3128257 - DNA, 25 bp, Homo sapien
cctcggtacccaggccatgtggaca

SEQ ID NO: 3128258 - DNA, 25 bp, Homo sapien
taatcccctttatacgacactggtg

SEQ ID NO: 3128259 - DNA, 25 bp, Homo sapien
aagatgtcagggtgcattaaccttt

SEQ ID NO: 3128260 - DNA, 25 bp, Homo sapien
agagaaaccacccttaaagatgtca

SEQ ID NO: 3128261 - DNA, 25 bp, Homo sapien
cccttaaagatgtcagggtgcatta

SEQ ID NO: 3128262 - DNA, 25 bp, Homo sapien
aaccacccttaaagatgtcagggtg

SEQ ID NO: 3128263 - DNA, 25 bp, Homo sapien
gtgtagttttggatatttccaacaa

SEQ ID NO: 3128264 - DNA, 25 bp, Homo sapien
taagagctgacgatgagggatttga

SEQ ID NO: 3128265 - DNA, 25 bp, Homo sapien
tgctgtaagagctgacgatgaggga

SEQ ID NO: 3128266 - DNA, 25 bp, Homo sapien
agctgacgatgagggatttgacctg

SEQ ID NO: 3128267 - DNA, 25 bp, Homo sapien
tgacgatgagggatttgacctggtc

SEQ ID NO: 3128268 - DNA, 25 bp, Homo sapien
gtgtacacttgtacagccttctcca

SEQ ID NO: 3128269 - DNA, 25 bp, Homo sapien
cttgatgtagtcaggtgataacacg

SEQ ID NO: 3128270 - DNA, 25 bp, Homo sapien
tagaaagccaggtactacagggtta

SEQ ID NO: 3128271 - DNA, 25 bp, Homo sapien
tgataccttgtaaagcccaagaaac

SEQ ID NO: 3128272 - DNA, 25 bp, Homo sapien
cgaagatattccgtgtcgtttttgc

SEQ ID NO: 3128273 - DNA, 25 bp, Homo sapien
atattccgtgtcgtttttgcccctg

SEQ ID NO: 3128274 - DNA, 25 bp, Homo sapien
gaagatattccgtgtcgtttttgcc

SEQ ID NO: 3128275 - DNA, 25 bp, Homo sapien
gcaattccaaacttgaggttgactt

SEQ ID NO: 3128276 - DNA, 25 bp, Homo sapien
tttggaacatcgtctttcttgagtt

SEQ ID NO: 3128277 - DNA, 25 bp, Homo sapien
aggttgactttggaacatcgtcttt

SEQ ID NO: 3128278 - DNA, 25 bp, Homo sapien
caatatttgctctagactaatgaaa

SEQ ID NO: 3128279 - DNA, 25 bp, Homo sapien
agcaagacagaatatgacatatcag

SEQ ID NO: 3128280 - DNA, 25 bp, Homo sapien
caagacagaatatgacatatcagtg

SEQ ID NO: 3128281 - DNA, 25 bp, Homo sapien
agacagaatatgacatatcagtgac

SEQ ID NO: 3128282 - DNA, 25 bp, Homo sapien
acagaatatgacatatcagtgactg

SEQ ID NO: 3128283 - DNA, 25 bp, Homo sapien
aaaggtactggccagggatcgcagt

SEQ ID NO: 3128284 - DNA, 25 bp, Homo sapien
cagtgtacaccaaggcgttgttttc

SEQ ID NO: 3128285 - DNA, 25 bp, Homo sapien
ttccaagccagcaggtactactgag

SEQ ID NO: 3128286 - DNA, 25 bp, Homo sapien
aactccacgttttccaagccagcag

SEQ ID NO: 3128287 - DNA, 25 bp, Homo sapien
gagccccttgcaaagatcatcatca

SEQ ID NO: 3128288 - DNA, 25 bp, Homo sapien
catcatcaaactccttatcatggac

SEQ ID NO: 3128289 - DNA, 25 bp, Homo sapien
catcaaactccttatcatggacatc

SEQ ID NO: 3128290 - DNA, 25 bp, Homo sapien
tcttactccactaaggagccccttg

SEQ ID NO: 3128291 - DNA, 25 bp, Homo sapien
ccttagaatacatggtaactttctc

SEQ ID NO: 3128292 - DNA, 25 bp, Homo sapien
gattcttcatccttagaatacatgg

SEQ ID NO: 3128293 - DNA, 25 bp, Homo sapien
tagaatacatggtaactttctccct

SEQ ID NO: 3128294 - DNA, 25 bp, Homo sapien
tcatccttagaatacatggtaactt

SEQ ID NO: 3128295 - DNA, 25 bp, Homo sapien
ccctgcctcaatgtttgtccaagct

SEQ ID NO: 3128296 - DNA, 25 bp, Homo sapien
ccactgaactgcatggccctgctgg

SEQ ID NO: 3128297 - DNA, 25 bp, Homo sapien
tcattttcagcgaatcccttggtct

SEQ ID NO: 3128298 - DNA, 25 bp, Homo sapien
ttgtaccacaaagacaagatagagg

SEQ ID NO: 3128299 - DNA, 25 bp, Homo sapien
tttctttccgtttctaactgagaga

SEQ ID NO: 3128300 - DNA, 25 bp, Homo sapien
tgccttctctttgcgaagttacaag

SEQ ID NO: 3128301 - DNA, 25 bp, Homo sapien
gaagtccccatgtttgagaacctgg

SEQ ID NO: 3128302 - DNA, 25 bp, Homo sapien
catgtggcaataacagcaaggtact

SEQ ID NO: 3128303 - DNA, 25 bp, Homo sapien
agtgtacaccttggaccaggcaaac

SEQ ID NO: 3128304 - DNA, 25 bp, Homo sapien
tactagtgtttatgaaagggaattc

SEQ ID NO: 3128305 - DNA, 25 bp, Homo sapien
gctggtttgcactgaacttactagt

SEQ ID NO: 3128306 - DNA, 25 bp, Homo sapien
gcctgttaatggaacacgtgtaata

SEQ ID NO: 3128307 - DNA, 25 bp, Homo sapien
ggaattcattggatatgcctgttaa

SEQ ID NO: 3128308 - DNA, 25 bp, Homo sapien
ggaacaccgaggctgagtcttgctt

SEQ ID NO: 3128309 - DNA, 25 bp, Homo sapien
aacaccgaggctgagtcttgctttc

SEQ ID NO: 3128310 - DNA, 25 bp, Homo sapien
gaggaggcagtattggggtcccttg

SEQ ID NO: 3128311 - DNA, 25 bp, Homo sapien
gttggaacaccgaggctgagtcttg

SEQ ID NO: 3128312 - DNA, 25 bp, Homo sapien
ctgggacaactacacattgggtggg

SEQ ID NO: 3128313 - DNA, 25 bp, Homo sapien
caactacacattgggtgggccagag

SEQ ID NO: 3128314 - DNA, 25 bp, Homo sapien
agattgctgggacaactacacattg

SEQ ID NO: 3128315 - DNA, 25 bp, Homo sapien
gacaactacacattgggtgggccag

SEQ ID NO: 3128316 - DNA, 25 bp, Homo sapien
ctgtagcttctcctccgatggctcc

SEQ ID NO: 3128317 - DNA, 25 bp, Homo sapien
gtagcttctcctccgatggctccaa

SEQ ID NO: 3128318 - DNA, 25 bp, Homo sapien
ttctcctccgatggctccaagccag

SEQ ID NO: 3128319 - DNA, 25 bp, Homo sapien
ctcctccgatggctccaagccagcc

SEQ ID NO: 3128320 - DNA, 25 bp, Homo sapien
caggaatcctggtgctatcagtgtg

SEQ ID NO: 3128321 - DNA, 25 bp, Homo sapien
tcaggaatcctggtgctatcagtgt

SEQ ID NO: 3128322 - DNA, 25 bp, Homo sapien
aggaatcctggtgctatcagtgtgg

SEQ ID NO: 3128323 - DNA, 25 bp, Homo sapien
gatcaggaatcctggtgctatcagt

SEQ ID NO: 3128324 - DNA, 25 bp, Homo sapien
tgggagtacgatttcagcttcttta

SEQ ID NO: 3128325 - DNA, 25 bp, Homo sapien
tttacatttatgacacaaatggagc

SEQ ID NO: 3128326 - DNA, 25 bp, Homo sapien
aatggagccattcgccctcacttca

SEQ ID NO: 3128327 - DNA, 25 bp, Homo sapien
catattgcattcttgggagtacgat

SEQ ID NO: 3128328 - DNA, 25 bp, Homo sapien
actggctgtctgccctcaaacgtga

SEQ ID NO: 3128329 - DNA, 25 bp, Homo sapien
tgtctgccctcaaacgtgacagctg

SEQ ID NO: 3128330 - DNA, 25 bp, Homo sapien
tgccctcaaacgtgacagctgacat

SEQ ID NO: 3128331 - DNA, 25 bp, Homo sapien
ggctgtctgccctcaaacgtgacag

SEQ ID NO: 3128332 - DNA, 25 bp, Homo sapien
ttgtaacatcgcaggccagtggaac

SEQ ID NO: 3128333 - DNA, 25 bp, Homo sapien
tggagattcattaaaccattcccat

SEQ ID NO: 3128334 - DNA, 25 bp, Homo sapien
tttagccacccgatcccatgaaggc

SEQ ID NO: 3128335 - DNA, 25 bp, Homo sapien
agatctgtgcaatctcatattccag

SEQ ID NO: 3128336 - DNA, 25 bp, Homo sapien
tttgtgttcctgtggcctgactgag

SEQ ID NO: 3128337 - DNA, 25 bp, Homo sapien
ttgtgttcctgtggcctgactgagg

SEQ ID NO: 3128338 - DNA, 25 bp, Homo sapien
gtgttcctgtggcctgactgaggga

SEQ ID NO: 3128339 - DNA, 25 bp, Homo sapien
cttttgtgttcctgtggcctgactg

SEQ ID NO: 3128340 - DNA, 25 bp, Homo sapien
tactgagcacttcattactagaaag

SEQ ID NO: 3128341 - DNA, 25 bp, Homo sapien
gactgggtcttatgtggaccacaaa

SEQ ID NO: 3128342 - DNA, 25 bp, Homo sapien
gagacagatgttcaagacccagcta

SEQ ID NO: 3128343 - DNA, 25 bp, Homo sapien
ggagacagatgttcaagacccagct

SEQ ID NO: 3128344 - DNA, 25 bp, Homo sapien
acgggcttgccccagaccagatctt

SEQ ID NO: 3128345 - DNA, 25 bp, Homo sapien
cttgcttcggtgatatgatcttgga

SEQ ID NO: 3128346 - DNA, 25 bp, Homo sapien
gggaaccgcttatgaaattggccat

SEQ ID NO: 3128347 - DNA, 25 bp, Homo sapien
tcttggagacgctgtcaaaggcaca

SEQ ID NO: 3128348 - DNA, 25 bp, Homo sapien
caacaagaatccacttcattacaca

SEQ ID NO: 3128349 - DNA, 25 bp, Homo sapien
ctccgtgtcggtgttgtcatctcaa

SEQ ID NO: 3128350 - DNA, 25 bp, Homo sapien
cattacacaaaaggatggcactttc

SEQ ID NO: 3128351 - DNA, 25 bp, Homo sapien
taggatttagacctttgtatctggc

SEQ ID NO: 3128352 - DNA, 25 bp, Homo sapien
aggctgtcaaagtgagtatcatgct

SEQ ID NO: 3128353 - DNA, 25 bp, Homo sapien
cctgtaatgtttataagaatcgcac

SEQ ID NO: 3128354 - DNA, 25 bp, Homo sapien
tcaggttcctcaattcaagccttcg

SEQ ID NO: 3128355 - DNA, 25 bp, Homo sapien
caagccttcgtttctcggctgttgt

SEQ ID NO: 3128356 - DNA, 25 bp, Homo sapien
gcagaagagctgtgctggagtccat

SEQ ID NO: 3128357 - DNA, 25 bp, Homo sapien
tgactcagatcttggcagaagagct

SEQ ID NO: 3128358 - DNA, 25 bp, Homo sapien
gctgactcagatcttggcagaagag

SEQ ID NO: 3128359 - DNA, 25 bp, Homo sapien
gttttgctgactcagatcttggcag

SEQ ID NO: 3128360 - DNA, 25 bp, Homo sapien
tgagcttgtagtgagagcaattgca

SEQ ID NO: 3128361 - DNA, 25 bp, Homo sapien
tcaggatgatgcctgcatgcagtgg

SEQ ID NO: 3128362 - DNA, 25 bp, Homo sapien
ttatgagagtgggcactttcttgag

SEQ ID NO: 3128363 - DNA, 25 bp, Homo sapien
accattgctgcagtggaaggcattc

SEQ ID NO: 3128364 - DNA, 25 bp, Homo sapien
taaatgggaattagaaaggcctgct

SEQ ID NO: 3128365 - DNA, 25 bp, Homo sapien
ttggtgagggctccaatccacgacc

SEQ ID NO: 3128366 - DNA, 25 bp, Homo sapien
tagcctggctttattgatgtgtaaa

SEQ ID NO: 3128367 - DNA, 25 bp, Homo sapien
ggctccaatccacgaccattcattt

SEQ ID NO: 3128368 - DNA, 25 bp, Homo sapien
aggagaagaagcaaggggtgttgag

SEQ ID NO: 3128369 - DNA, 25 bp, Homo sapien
ctaaggagaagaagcaaggggtgtt

SEQ ID NO: 3128370 - DNA, 25 bp, Homo sapien
gaagcaaggggtgttgagggctgtg

SEQ ID NO: 3128371 - DNA, 25 bp, Homo sapien
caaggggtgttgagggctgtgtgca

SEQ ID NO: 3128372 - DNA, 25 bp, Homo sapien
gaaagcagggcttggctgactacat

SEQ ID NO: 3128373 - DNA, 25 bp, Homo sapien
ttctcttgtacaccctctgtgtcct

SEQ ID NO: 3128374 - DNA, 25 bp, Homo sapien
tgcttaatgacaacagaggacttat

SEQ ID NO: 3128375 - DNA, 25 bp, Homo sapien
cttaatgacaacagaggacttattc

SEQ ID NO: 3128376 - DNA, 25 bp, Homo sapien
tctgcttaatgacaacagaggactt

SEQ ID NO: 3128377 - DNA, 25 bp, Homo sapien
ccaccaaggtatcaatgatgaggtc

SEQ ID NO: 3128378 - DNA, 25 bp, Homo sapien
gaaacagtcagagacccaccaaggt

SEQ ID NO: 3128379 - DNA, 25 bp, Homo sapien
gatctcctgatactgagggaaatgc

SEQ ID NO: 3128380 - DNA, 25 bp, Homo sapien
ggctcgcttaaacttccccagatct

SEQ ID NO: 3128381 - DNA, 25 bp, Homo sapien
aaattgttgggatagttcacggcaa

SEQ ID NO: 3128382 - DNA, 25 bp, Homo sapien
tcgtttaaattgttgggatagttca

SEQ ID NO: 3128383 - DNA, 25 bp, Homo sapien
ttaaattgttgggatagttcacggc

SEQ ID NO: 3128384 - DNA, 25 bp, Homo sapien
taaattgttgggatagttcacggca

SEQ ID NO: 3128385 - DNA, 25 bp, Homo sapien
agagagaaggacagactggagtgta

SEQ ID NO: 3128386 - DNA, 25 bp, Homo sapien
gaatttgggtgtaggcaccaggtgt

SEQ ID NO: 3128387 - DNA, 25 bp, Homo sapien
aatttgggtgtaggcaccaggtgtc

SEQ ID NO: 3128388 - DNA, 25 bp, Homo sapien
ggaatttgggtgtaggcaccaggtg

SEQ ID NO: 3128389 - DNA, 25 bp, Homo sapien
agtgacttggatacagcccaccgga

SEQ ID NO: 3128390 - DNA, 25 bp, Homo sapien
gaacttgtccaatgcctgcaactgc

SEQ ID NO: 3128391 - DNA, 25 bp, Homo sapien
acagtgcattgtttgcactcttcag

SEQ ID NO: 3128392 - DNA, 25 bp, Homo sapien
gagaactggcacaagaacttgtcca

SEQ ID NO: 3128393 - DNA, 25 bp, Homo sapien
agcatgacaggctctgtcccacagc

SEQ ID NO: 3128394 - DNA, 25 bp, Homo sapien
ccaaacaacagcctgtatgttttca

SEQ ID NO: 3128395 - DNA, 25 bp, Homo sapien
agacagcatgacaggctctgtccca

SEQ ID NO: 3128396 - DNA, 25 bp, Homo sapien
gacagcatgacaggctctgtcccac

SEQ ID NO: 3128397 - DNA, 25 bp, Homo sapien
cacaaacgctgtgccggagtgactc

SEQ ID NO: 3128398 - DNA, 25 bp, Homo sapien
gagtgactccagagccgttctgtga

SEQ ID NO: 3128399 - DNA, 25 bp, Homo sapien
tcctcgtctcttctaaggattttgt

SEQ ID NO: 3128400 - DNA, 25 bp, Homo sapien
aggattttgttagcatctatctccc

SEQ ID NO: 3128401 - DNA, 25 bp, Homo sapien
tattaaagagcaaggtaggctggct

SEQ ID NO: 3128402 - DNA, 25 bp, Homo sapien
aaggtaggctggctctccaacacac

SEQ ID NO: 3128403 - DNA, 25 bp, Homo sapien
aaaggcttacacgtattaaagagca

SEQ ID NO: 3128404 - DNA, 25 bp, Homo sapien
acacgtattaaagagcaaggtaggc

SEQ ID NO: 3128405 - DNA, 25 bp, Homo sapien
tgatgataagagacatgagttgggc

SEQ ID NO: 3128406 - DNA, 25 bp, Homo sapien
tctctccaaggtgcacttcctcagg

SEQ ID NO: 3128407 - DNA, 25 bp, Homo sapien
ctccaaggtgcacttcctcaggcat

SEQ ID NO: 3128408 - DNA, 25 bp, Homo sapien
ccttctctccaaggtgcacttcctc

SEQ ID NO: 3128409 - DNA, 25 bp, Homo sapien
caaggcatcagaagcattagagatc

SEQ ID NO: 3128410 - DNA, 25 bp, Homo sapien
ggcatcagaagcattagagatcaac

SEQ ID NO: 3128411 - DNA, 25 bp, Homo sapien
cttgtccaaggcatcagaagcatta

SEQ ID NO: 3128412 - DNA, 25 bp, Homo sapien
ttgtccaaggcatcagaagcattag

SEQ ID NO: 3128413 - DNA, 25 bp, Homo sapien
gtatgttcctgagtattggggatga

SEQ ID NO: 3128414 - DNA, 25 bp, Homo sapien
tatgttcctgagtattggggatgat

SEQ ID NO: 3128415 - DNA, 25 bp, Homo sapien
aaagcctccatgaatgctttcgtac

SEQ ID NO: 3128416 - DNA, 25 bp, Homo sapien
aaaagcctccatgaatgctttcgta

SEQ ID NO: 3128417 - DNA, 25 bp, Homo sapien
ctaaaaagcctccatgaatgctttc

SEQ ID NO: 3128418 - DNA, 25 bp, Homo sapien
taaaaagcctccatgaatgctttcg

SEQ ID NO: 3128419 - DNA, 25 bp, Homo sapien
gtaggcagaataaaagccaatacca

SEQ ID NO: 3128420 - DNA, 25 bp, Homo sapien
aagccaataccaaattgcccaatca

SEQ ID NO: 3128421 - DNA, 25 bp, Homo sapien
caataccaaattgcccaatcatgga

SEQ ID NO: 3128422 - DNA, 25 bp, Homo sapien
ctaccaggtaggcagaataaaagcc

SEQ ID NO: 3128423 - DNA, 25 bp, Homo sapien
caggcatgccatcatcattgggctt

SEQ ID NO: 3128424 - DNA, 25 bp, Homo sapien
tctcaggcatgccatcatcattggg

SEQ ID NO: 3128425 - DNA, 25 bp, Homo sapien
tcaggcatgccatcatcattgggct

SEQ ID NO: 3128426 - DNA, 25 bp, Homo sapien
ctcaggcatgccatcatcattgggc

SEQ ID NO: 3128427 - DNA, 25 bp, Homo sapien
tgggcttttcttcgtcatctttatt

SEQ ID NO: 3128428 - DNA, 25 bp, Homo sapien
gccttaccatcactaatttctttct

SEQ ID NO: 3128429 - DNA, 25 bp, Homo sapien
ttaccatcactaatttctttctctc

SEQ ID NO: 3128430 - DNA, 25 bp, Homo sapien
tctgccttaccatcactaatttctt

SEQ ID NO: 3128431 - DNA, 25 bp, Homo sapien
tcttcttatccttaccactgtcatc

SEQ ID NO: 3128432 - DNA, 25 bp, Homo sapien
tcttcttcttatccttaccactgtc

SEQ ID NO: 3128433 - DNA, 25 bp, Homo sapien
ctgatcaatgtatttctctttgatc

SEQ ID NO: 3128434 - DNA, 25 bp, Homo sapien
cctcatctgaacccacatcttcgat

SEQ ID NO: 3128435 - DNA, 25 bp, Homo sapien
ttcagtgtttctggtccaaataggc

SEQ ID NO: 3128436 - DNA, 25 bp, Homo sapien
aagtggtctttccagtcattggtga

SEQ ID NO: 3128437 - DNA, 25 bp, Homo sapien
tttccagtcattggtgaggctctta

SEQ ID NO: 3128438 - DNA, 25 bp, Homo sapien
gatgtcttcagtgtttctggtccaa

SEQ ID NO: 3128439 - DNA, 25 bp, Homo sapien
tgaccttctacagaaaagtacctga

SEQ ID NO: 3128440 - DNA, 25 bp, Homo sapien
ttccaactgaccttctacagaaaag

SEQ ID NO: 3128441 - DNA, 25 bp, Homo sapien
caactgaccttctacagaaaagtac

SEQ ID NO: 3128442 - DNA, 25 bp, Homo sapien
actgaccttctacagaaaagtacct

SEQ ID NO: 3128443 - DNA, 25 bp, Homo sapien
tgtccctgatgaacacacgatggac

SEQ ID NO: 3128444 - DNA, 25 bp, Homo sapien
cacggataaagttgagacactctgg

SEQ ID NO: 3128445 - DNA, 25 bp, Homo sapien
atcaactcaacacagctgtccctga

SEQ ID NO: 3128446 - DNA, 25 bp, Homo sapien
cacgatggacatagagtttgatgtt

SEQ ID NO: 3128447 - DNA, 25 bp, Homo sapien
gctcagtgaagagctcaaggcactt

SEQ ID NO: 3128448 - DNA, 25 bp, Homo sapien
tgtttctgtgaatgactttgaagat

SEQ ID NO: 3128449 - DNA, 25 bp, Homo sapien
tcaaggcacttcttaacaatgtttc

SEQ ID NO: 3128450 - DNA, 25 bp, Homo sapien
ctgtgaatgactttgaagattttgc

SEQ ID NO: 3128451 - DNA, 25 bp, Homo sapien
ttagtggagtccttgtggattccaa

SEQ ID NO: 3128452 - DNA, 25 bp, Homo sapien
agtggagtccttgtggattccaagc

SEQ ID NO: 3128453 - DNA, 25 bp, Homo sapien
tggagtccttgtggattccaagctt

SEQ ID NO: 3128454 - DNA, 25 bp, Homo sapien
tcagttagtggagtccttgtggatt

SEQ ID NO: 3128455 - DNA, 25 bp, Homo sapien
tggagtcccgcttccatacttgctc

SEQ ID NO: 3128456 - DNA, 25 bp, Homo sapien
agtcccgcttccatacttgctccac

SEQ ID NO: 3128457 - DNA, 25 bp, Homo sapien
gagtcccgcttccatacttgctcca

SEQ ID NO: 3128458 - DNA, 25 bp, Homo sapien
cctggagtcccgcttccatacttgc

SEQ ID NO: 3128459 - DNA, 25 bp, Homo sapien
tgcacacgtagccatcaatgggctc

SEQ ID NO: 3128460 - DNA, 25 bp, Homo sapien
gcacacgtagccatcaatgggctcg

SEQ ID NO: 3128461 - DNA, 25 bp, Homo sapien
cacacgtagccatcaatgggctcgg

SEQ ID NO: 3128462 - DNA, 25 bp, Homo sapien
cacgtagccatcaatgggctcggtc

SEQ ID NO: 3128463 - DNA, 25 bp, Homo sapien
gctcttcccatcaaactccttgagt

SEQ ID NO: 3128464 - DNA, 25 bp, Homo sapien
tcctcaggtagctccaggccctcct

SEQ ID NO: 3128465 - DNA, 25 bp, Homo sapien
tccccatcctcaggtagctccaggc

SEQ ID NO: 3128466 - DNA, 25 bp, Homo sapien
ccatcctcaggtagctccaggccct

SEQ ID NO: 3128467 - DNA, 25 bp, Homo sapien
gttggagactgtcaccatctcaacc

SEQ ID NO: 3128468 - DNA, 25 bp, Homo sapien
aagcctgttggagactgtcaccatc

SEQ ID NO: 3128469 - DNA, 25 bp, Homo sapien
acaagcctgttggagactgtcacca

SEQ ID NO: 3128470 - DNA, 25 bp, Homo sapien
cctgttggagactgtcaccatctca

SEQ ID NO: 3128471 - DNA, 25 bp, Homo sapien
tccatattggctgtccagctgtagg

SEQ ID NO: 3128472 - DNA, 25 bp, Homo sapien
tcatgatctgctccatattggctgt

SEQ ID NO: 3128473 - DNA, 25 bp, Homo sapien
ctaggctttcatgatctgctccata

SEQ ID NO: 3128474 - DNA, 25 bp, Homo sapien
tttcatgatctgctccatattggct

SEQ ID NO: 3128475 - DNA, 25 bp, Homo sapien
caccaggtccttgactgccttgtca

SEQ ID NO: 3128476 - DNA, 25 bp, Homo sapien
gtgtgtctcagccttctgccgcagc

SEQ ID NO: 3128477 - DNA, 25 bp, Homo sapien
aggtccttgactgccttgtcattct

SEQ ID NO: 3128478 - DNA, 25 bp, Homo sapien
ttgactgccttgtcattcttgtgtg

SEQ ID NO: 3128479 - DNA, 25 bp, Homo sapien
gcaaggcagtttctaacggcagcac

SEQ ID NO: 3128480 - DNA, 25 bp, Homo sapien
gatcatgcagtagatgtggttggaa

SEQ ID NO: 3128481 - DNA, 25 bp, Homo sapien
tcatgcagtagatgtggttggaatg

SEQ ID NO: 3128482 - DNA, 25 bp, Homo sapien
aagacagcaaggcagtttctaacgg

SEQ ID NO: 3128483 - DNA, 25 bp, Homo sapien
agctgctaataccaccagtgcctgc

SEQ ID NO: 3128484 - DNA, 25 bp, Homo sapien
cagcatgtcttctgcccaagctttc

SEQ ID NO: 3128485 - DNA, 25 bp, Homo sapien
gaattgttgccttcagcttgttcct

SEQ ID NO: 3128486 - DNA, 25 bp, Homo sapien
tgttctcttggaattgttgccttca

SEQ ID NO: 3128487 - DNA, 25 bp, Homo sapien
tcaggtatccttccaagttttccaa

SEQ ID NO: 3128488 - DNA, 25 bp, Homo sapien
ttccaaatagttctgagaatactga

SEQ ID NO: 3128489 - DNA, 25 bp, Homo sapien
gaatactgagaagcaggttcatctt

SEQ ID NO: 3128490 - DNA, 25 bp, Homo sapien
aggttcatcttgtatgctctagaac

SEQ ID NO: 3128491 - DNA, 25 bp, Homo sapien
aaaggcatccgtacaaactgtagca

SEQ ID NO: 3128492 - DNA, 25 bp, Homo sapien
cttgacagtcaccaggtgtttctgt

SEQ ID NO: 3128493 - DNA, 25 bp, Homo sapien
aaggcatccgtacaaactgtagcat

SEQ ID NO: 3128494 - DNA, 25 bp, Homo sapien
ttgacagtcaccaggtgtttctgta

SEQ ID NO: 3128495 - DNA, 25 bp, Homo sapien
cctacagatacttatgaagacattc

SEQ ID NO: 3128496 - DNA, 25 bp, Homo sapien
gcataagagtactcccgagaatgag

SEQ ID NO: 3128497 - DNA, 25 bp, Homo sapien
cgctatcgtgagtaaaagtatataa

SEQ ID NO: 3128498 - DNA, 25 bp, Homo sapien
gaatttctcttgcaaactgcataag

SEQ ID NO: 3128499 - DNA, 25 bp, Homo sapien
catcattgctattgcctcacagtgg

SEQ ID NO: 3128500 - DNA, 25 bp, Homo sapien
aggcagctccttggatttgaaagaa

SEQ ID NO: 3128501 - DNA, 25 bp, Homo sapien
caaggactgttaaccctcctagaag

SEQ ID NO: 3128502 - DNA, 25 bp, Homo sapien
aaccaggaacctatgtcaaggactg

SEQ ID NO: 3128503 - DNA, 25 bp, Homo sapien
cgcaccctgtgcaactaaaaaagta

SEQ ID NO: 3128504 - DNA, 25 bp, Homo sapien
actaatgagttaaggtgctgaccac

SEQ ID NO: 3128505 - DNA, 25 bp, Homo sapien
tgtacgtatctctaaaagctttggg

SEQ ID NO: 3128506 - DNA, 25 bp, Homo sapien
tagcggcagccaagaaatttaaagt

SEQ ID NO: 3128507 - DNA, 25 bp, Homo sapien
ggatagctggctctttttgttgaat

SEQ ID NO: 3128508 - DNA, 25 bp, Homo sapien
tgagtttaacttttggatatccgtg

SEQ ID NO: 3128509 - DNA, 25 bp, Homo sapien
gtatatttaggatagctggctcttt

SEQ ID NO: 3128510 - DNA, 25 bp, Homo sapien
tgcagagctgagtttaacttttgga

SEQ ID NO: 3128511 - DNA, 25 bp, Homo sapien
tcttgaagagcataaaagcttagtg

SEQ ID NO: 3128512 - DNA, 25 bp, Homo sapien
tactgcttatgtcataaggaactgt

SEQ ID NO: 3128513 - DNA, 25 bp, Homo sapien
ttctcttaaagtagggagtctgtct

SEQ ID NO: 3128514 - DNA, 25 bp, Homo sapien
aaagcttagtgaagttgcctttctc

SEQ ID NO: 3128515 - DNA, 25 bp, Homo sapien
gccggacacgaagtgggcgcttggt

SEQ ID NO: 3128516 - DNA, 25 bp, Homo sapien
taactccccgcctggattgcgaact

SEQ ID NO: 3128517 - DNA, 25 bp, Homo sapien
gcccgggcccttctggttgtgtggc

SEQ ID NO: 3128518 - DNA, 25 bp, Homo sapien
aaggccgacgagagctgtccagctc

SEQ ID NO: 3128519 - DNA, 25 bp, Homo sapien
tctcctgaagggaaacgcagcgcct

SEQ ID NO: 3128520 - DNA, 25 bp, Homo sapien
caagatggcgcttgccgagtgattc

SEQ ID NO: 3128521 - DNA, 25 bp, Homo sapien
gatggaacgcctgaaagctgctctg

SEQ ID NO: 3128522 - DNA, 25 bp, Homo sapien
cttcagagactttctcaagagggaa

SEQ ID NO: 3128523 - DNA, 25 bp, Homo sapien
catcttataagggttaccaatagtt

SEQ ID NO: 3128524 - DNA, 25 bp, Homo sapien
cacttcagggtgaattggctgccaa

SEQ ID NO: 3128525 - DNA, 25 bp, Homo sapien
tcctctatcacttcagggtgaattg

SEQ ID NO: 3128526 - DNA, 25 bp, Homo sapien
ttggctgccaaggagaacccctcat

SEQ ID NO: 3128527 - DNA, 25 bp, Homo sapien
tatatttctatttctggtttctcac

SEQ ID NO: 3128528 - DNA, 25 bp, Homo sapien
ttttgagtatatttctatttctggt

SEQ ID NO: 3128529 - DNA, 25 bp, Homo sapien
tgagtatatttctatttctggtttc

SEQ ID NO: 3128530 - DNA, 25 bp, Homo sapien
gtatatttctatttctggtttctca

SEQ ID NO: 3128531 - DNA, 25 bp, Homo sapien
cgtgttttggccacattccagtttg

SEQ ID NO: 3128532 - DNA, 25 bp, Homo sapien
gccctgtctgacttgtaattccaac

SEQ ID NO: 3128533 - DNA, 25 bp, Homo sapien
ccgtgagagctaatgaaggccaatt

SEQ ID NO: 3128534 - DNA, 25 bp, Homo sapien
tcttgaagattgctgctcagccctg

SEQ ID NO: 3128535 - DNA, 25 bp, Homo sapien
cttccataggcatgcattggagttg

SEQ ID NO: 3128536 - DNA, 25 bp, Homo sapien
tggcttgcctgagctatactcaaaa

SEQ ID NO: 3128537 - DNA, 25 bp, Homo sapien
tgtttgttcgtttgccattggcttg

SEQ ID NO: 3128538 - DNA, 25 bp, Homo sapien
tgttcgtttgccattggcttgcctg

SEQ ID NO: 3128539 - DNA, 25 bp, Homo sapien
ttcgtttgccattggcttgcctgag

SEQ ID NO: 3128540 - DNA, 25 bp, Homo sapien
ctttccattccctaaacgcgggatg

SEQ ID NO: 3128541 - DNA, 25 bp, Homo sapien
taaacgcgggatgtccaaggtgccg

SEQ ID NO: 3128542 - DNA, 25 bp, Homo sapien
gagagcgcgagccaggagtgtaggg

SEQ ID NO: 3128543 - DNA, 25 bp, Homo sapien
caaggtgccggaggccgagagcgcg

SEQ ID NO: 3128544 - DNA, 25 bp, Homo sapien
gacagagctgattgcactcgacacc

SEQ ID NO: 3128545 - DNA, 25 bp, Homo sapien
gctcctcgacgctgagggttctcgg

SEQ ID NO: 3128546 - DNA, 25 bp, Homo sapien
ttctgtcccaagcagagcactggat

SEQ ID NO: 3128547 - DNA, 25 bp, Homo sapien
tgacatccgcatagagacagagctg

SEQ ID NO: 3128548 - DNA, 25 bp, Homo sapien
ggcatgccgcctagtccttcggttc

SEQ ID NO: 3128549 - DNA, 25 bp, Homo sapien
tttggcttccgcaagagcacctcgg

SEQ ID NO: 3128550 - DNA, 25 bp, Homo sapien
ctgtttcggagagcccaagtttggc

SEQ ID NO: 3128551 - DNA, 25 bp, Homo sapien
agctttcccggcctgtttcggagag

SEQ ID NO: 3128552 - DNA, 25 bp, Homo sapien
tatcaggacagagtagaagcctgtt

SEQ ID NO: 3128553 - DNA, 25 bp, Homo sapien
taaagcagcagtggacacttctttg

SEQ ID NO: 3128554 - DNA, 25 bp, Homo sapien
ccaaatcgggccttgatcaaaaaag

SEQ ID NO: 3128555 - DNA, 25 bp, Homo sapien
caaggtgaaccagccagtgtaagtg

SEQ ID NO: 3128556 - DNA, 25 bp, Homo sapien
gcctccatttcggttctgacccagt

SEQ ID NO: 3128557 - DNA, 25 bp, Homo sapien
ggatcacacgcggtcgctgccaaag

SEQ ID NO: 3128558 - DNA, 25 bp, Homo sapien
tgctgtggatcacacgcggtcgctg

SEQ ID NO: 3128559 - DNA, 25 bp, Homo sapien
gcttccgacgtctgctgtggatcac

SEQ ID NO: 3128560 - DNA, 25 bp, Homo sapien
catctccccattctcgccacccgtg

SEQ ID NO: 3128561 - DNA, 25 bp, Homo sapien
tctccccattctcgccacccgtgca

SEQ ID NO: 3128562 - DNA, 25 bp, Homo sapien
tccccattctcgccacccgtgcacc

SEQ ID NO: 3128563 - DNA, 25 bp, Homo sapien
cccattctcgccacccgtgcacccg

SEQ ID NO: 3128564 - DNA, 25 bp, Homo sapien
aggtacgccccagtcaggcaaggag

SEQ ID NO: 3128565 - DNA, 25 bp, Homo sapien
cagacactcgaagggcgcggacctt

SEQ ID NO: 3128566 - DNA, 25 bp, Homo sapien
gggaatccccagaggctatctgtag

SEQ ID NO: 3128567 - DNA, 25 bp, Homo sapien
cttgcgccactgctgagcggttgga

SEQ ID NO: 3128568 - DNA, 25 bp, Homo sapien
cttccccgccgcagcgaagctgtgc

SEQ ID NO: 3128569 - DNA, 25 bp, Homo sapien
tccacagaccatatgtggcggcggg

SEQ ID NO: 3128570 - DNA, 25 bp, Homo sapien
ctaaatccacagaccatatgtggcg

SEQ ID NO: 3128571 - DNA, 25 bp, Homo sapien
cagaccatatgtggcggcgggaact

SEQ ID NO: 3128572 - DNA, 25 bp, Homo sapien
gaacattattttcgctagcgcggag

SEQ ID NO: 3128573 - DNA, 25 bp, Homo sapien
gatcgcatttcagccataatgacgg

SEQ ID NO: 3128574 - DNA, 25 bp, Homo sapien
gttccagttgttgtgacagatcgca

SEQ ID NO: 3128575 - DNA, 25 bp, Homo sapien
aacttaatggactcggcttgacgtg

SEQ ID NO: 3128576 - DNA, 25 bp, Homo sapien
tctgaggtccggatcactaacgttc

SEQ ID NO: 3128577 - DNA, 25 bp, Homo sapien
tcagagatgcaagggaagccgagaa

SEQ ID NO: 3128578 - DNA, 25 bp, Homo sapien
caagggaagccgagaagttgccgaa

SEQ ID NO: 3128579 - DNA, 25 bp, Homo sapien
tggcgccctcggaaaccggatctga

SEQ ID NO: 3128580 - DNA, 25 bp, Homo sapien
tgctttttggcgtccaaaccatact

SEQ ID NO: 3128581 - DNA, 25 bp, Homo sapien
cacagcgcatctagcacggggtttg

SEQ ID NO: 3128582 - DNA, 25 bp, Homo sapien
cgaataaggccaggatccttcagct

SEQ ID NO: 3128583 - DNA, 25 bp, Homo sapien
tactggaagaacacacgaataaggc

SEQ ID NO: 3128584 - DNA, 25 bp, Homo sapien
cagcaggacgtcctccgtgtgcatc

SEQ ID NO: 3128585 - DNA, 25 bp, Homo sapien
gcagcaggacgtcctccgtgtgcat

SEQ ID NO: 3128586 - DNA, 25 bp, Homo sapien
gagagtattcctgccaaagtcaggc

SEQ ID NO: 3128587 - DNA, 25 bp, Homo sapien
aaacgggtcgagagtattcctgcca

SEQ ID NO: 3128588 - DNA, 25 bp, Homo sapien
tcgctaaggagcttgggtgaccata

SEQ ID NO: 3128589 - DNA, 25 bp, Homo sapien
gattaccaggctgcgtgggttcaga

SEQ ID NO: 3128590 - DNA, 25 bp, Homo sapien
tataaatggccctgaattgtccccg

SEQ ID NO: 3128591 - DNA, 25 bp, Homo sapien
tccccgaagcttcgagggatcggca

SEQ ID NO: 3128592 - DNA, 25 bp, Homo sapien
tggctgggcaatgcccacaatgcca

SEQ ID NO: 3128593 - DNA, 25 bp, Homo sapien
aatgccaactcggaacctcagcgtc

SEQ ID NO: 3128594 - DNA, 25 bp, Homo sapien
acaatgccaactcggaacctcagcg

SEQ ID NO: 3128595 - DNA, 25 bp, Homo sapien
ggcaggagtggctgggcaatgccca

SEQ ID NO: 3128596 - DNA, 25 bp, Homo sapien
caacacccacaagcacaagcgcgct

SEQ ID NO: 3128597 - DNA, 25 bp, Homo sapien
aagcgcgctggggtgccaccgcttt

SEQ ID NO: 3128598 - DNA, 25 bp, Homo sapien
agcgcgctggggtgccaccgctttc

SEQ ID NO: 3128599 - DNA, 25 bp, Homo sapien
ccacaagcacaagcgcgctggggtg

SEQ ID NO: 3128600 - DNA, 25 bp, Homo sapien
tctggagaaccggagagtcccctgt

SEQ ID NO: 3128601 - DNA, 25 bp, Homo sapien
ggacttcaaactcactgcgctcggt

SEQ ID NO: 3128602 - DNA, 25 bp, Homo sapien
agcggtcagctgtttcggaaagtcc

SEQ ID NO: 3128603 - DNA, 25 bp, Homo sapien
tgtggccgcaccagtctctggagaa

SEQ ID NO: 3128604 - DNA, 25 bp, Homo sapien
ccgaccgtagcctcgaaggaagcag

SEQ ID NO: 3128605 - DNA, 25 bp, Homo sapien
tgctgcggaaaccaccgcgatgggt

SEQ ID NO: 3128606 - DNA, 25 bp, Homo sapien
gtagctgcgccgctggttgcaaccg

SEQ ID NO: 3128607 - DNA, 25 bp, Homo sapien
tcggaaaacgctgaaggcaggtagc

SEQ ID NO: 3128608 - DNA, 25 bp, Homo sapien
gctctggagcagaccccggcaatgg

SEQ ID NO: 3128609 - DNA, 25 bp, Homo sapien
agtgtgctgaatgccggctcctggt

SEQ ID NO: 3128610 - DNA, 25 bp, Homo sapien
tgtaatcgggctcaaacacaagtgc

SEQ ID NO: 3128611 - DNA, 25 bp, Homo sapien
tcctctcagggaagcgctctggagc

SEQ ID NO: 3128612 - DNA, 25 bp, Homo sapien
tcttaagagggtagtttgttctcca

SEQ ID NO: 3128613 - DNA, 25 bp, Homo sapien
gttgcttgttgctgcgtcttaagag

SEQ ID NO: 3128614 - DNA, 25 bp, Homo sapien
gaaaagccacagaggtcccggtcgc

SEQ ID NO: 3128615 - DNA, 25 bp, Homo sapien
catctttgccgattgggcggtgaaa

SEQ ID NO: 3128616 - DNA, 25 bp, Homo sapien
gggtgcgaaaccctggcagtcccag

SEQ ID NO: 3128617 - DNA, 25 bp, Homo sapien
tgatttgaaacgtgaaggattgggt

SEQ ID NO: 3128618 - DNA, 25 bp, Homo sapien
taaaggaggttaagacgtgtcgcac

SEQ ID NO: 3128619 - DNA, 25 bp, Homo sapien
gagcctccaagtgtggtgcaagccg

SEQ ID NO: 3128620 - DNA, 25 bp, Homo sapien
gagacaatacctgcccggcgaagtg

SEQ ID NO: 3128621 - DNA, 25 bp, Homo sapien
gtcttcgagctggagcgccgcttta

SEQ ID NO: 3128622 - DNA, 25 bp, Homo sapien
cagtgaacccgcttgggctgaggca

SEQ ID NO: 3128623 - DNA, 25 bp, Homo sapien
gctacaagacaaagcgccggcagat

SEQ ID NO: 3128624 - DNA, 25 bp, Homo sapien
gcgggccggagcgacagcgagatgt

SEQ ID NO: 3128625 - DNA, 25 bp, Homo sapien
gacagcgagatgtccgccagcgtct

SEQ ID NO: 3128626 - DNA, 25 bp, Homo sapien
cggagcgacagcgagatgtccgcca

SEQ ID NO: 3128627 - DNA, 25 bp, Homo sapien
agatgtccgccagcgtctcaggtct

SEQ ID NO: 3128628 - DNA, 25 bp, Homo sapien
gccaacaccttgacgtccttctcca

SEQ ID NO: 3128629 - DNA, 25 bp, Homo sapien
gcgcagatggctgtgcgcggcgcca

SEQ ID NO: 3128630 - DNA, 25 bp, Homo sapien
cggcgctctctgtcccgctcggagc

SEQ ID NO: 3128631 - DNA, 25 bp, Homo sapien
tcctgcccgcggcgcagatggctgt

SEQ ID NO: 3128632 - DNA, 25 bp, Homo sapien
tcccaggtaccctacaaggtttgca

SEQ ID NO: 3128633 - DNA, 25 bp, Homo sapien
tgcaaaacctcattctgagactgag

SEQ ID NO: 3128634 - DNA, 25 bp, Homo sapien
ttaaatggcgttccttcaaaactga

SEQ ID NO: 3128635 - DNA, 25 bp, Homo sapien
tgctgagcactgacaccaaatttaa

SEQ ID NO: 3128636 - DNA, 25 bp, Homo sapien
gttgcagctcaagacccgcgagttc

SEQ ID NO: 3128637 - DNA, 25 bp, Homo sapien
gagatgacaccaggagactcccttg

SEQ ID NO: 3128638 - DNA, 25 bp, Homo sapien
gacctaatgatcgactaagcgccgt

SEQ ID NO: 3128639 - DNA, 25 bp, Homo sapien
taagcgccgtaatggcccgagatga

SEQ ID NO: 3128640 - DNA, 25 bp, Homo sapien
acacccagccccaaacattgtttgg

SEQ ID NO: 3128641 - DNA, 25 bp, Homo sapien
gacttaacagcaaattagagatggc

SEQ ID NO: 3128642 - DNA, 25 bp, Homo sapien
gaaggtatatcaattcatctggcag

SEQ ID NO: 3128643 - DNA, 25 bp, Homo sapien
tttctttttagagtcggcggtctca

SEQ ID NO: 3128644 - DNA, 25 bp, Homo sapien
tgactttactaccagccacgttgac

SEQ ID NO: 3128645 - DNA, 25 bp, Homo sapien
ggtaaagttgcgtcagtcacctgca

SEQ ID NO: 3128646 - DNA, 25 bp, Homo sapien
tgcattcaagattaggtccctcctg

SEQ ID NO: 3128647 - DNA, 25 bp, Homo sapien
gaaactcgcatgtatccaagtaaag

SEQ ID NO: 3128648 - DNA, 25 bp, Homo sapien
cagaaagattctctgggttccaagc

SEQ ID NO: 3128649 - DNA, 25 bp, Homo sapien
ggagaaacgacgaacaaagagcttg

SEQ ID NO: 3128650 - DNA, 25 bp, Homo sapien
caaaaaagagagacgcttgtcagct

SEQ ID NO: 3128651 - DNA, 25 bp, Homo sapien
ccagaagaggttgttcacaaggaga

SEQ ID NO: 3128652 - DNA, 25 bp, Homo sapien
tgagagatagctccagtgccttggg

SEQ ID NO: 3128653 - DNA, 25 bp, Homo sapien
tacctgtgtaggaagagtgctccct

SEQ ID NO: 3128654 - DNA, 25 bp, Homo sapien
ccagctttcggataggctacctaga

SEQ ID NO: 3128655 - DNA, 25 bp, Homo sapien
tcaagagaactctgaggcgcagatg

SEQ ID NO: 3128656 - DNA, 25 bp, Homo sapien
tagtttgacacgtatttaaagcaga

SEQ ID NO: 3128657 - DNA, 25 bp, Homo sapien
caacttagttcatagttggatatcc

SEQ ID NO: 3128658 - DNA, 25 bp, Homo sapien
tagtaattgagctctgagtatgttc

SEQ ID NO: 3128659 - DNA, 25 bp, Homo sapien
tatttttacagaagtctactttgcc

SEQ ID NO: 3128660 - DNA, 25 bp, Homo sapien
tgattcgcccagtaggcatgagcca

SEQ ID NO: 3128661 - DNA, 25 bp, Homo sapien
gggaaactcttgaatatcctggtac

SEQ ID NO: 3128662 - DNA, 25 bp, Homo sapien
tactgggcccactatgtaaaacgtg

SEQ ID NO: 3128663 - DNA, 25 bp, Homo sapien
aagctttcaggtgaactgcacacag

SEQ ID NO: 3128664 - DNA, 25 bp, Homo sapien
tcagtatatcaggtgaaaggtacac

SEQ ID NO: 3128665 - DNA, 25 bp, Homo sapien
gaacttgaatgagctaaatctgcag

SEQ ID NO: 3128666 - DNA, 25 bp, Homo sapien
aaatcaggtctaattcatagtcatt

SEQ ID NO: 3128667 - DNA, 25 bp, Homo sapien
cataatttaaccacctgataacaaa

SEQ ID NO: 3128668 - DNA, 25 bp, Homo sapien
ctagagagacaatcaggaggaaaca

SEQ ID NO: 3128669 - DNA, 25 bp, Homo sapien
ggaaacacagcaaagacgtcattgg

SEQ ID NO: 3128670 - DNA, 25 bp, Homo sapien
ggcagtgcagatcggtgacccagat

SEQ ID NO: 3128671 - DNA, 25 bp, Homo sapien
taaaacactcatccctaggacctgt

SEQ ID NO: 3128672 - DNA, 25 bp, Homo sapien
cctgtgggccgtgatttgtctagtc

SEQ ID NO: 3128673 - DNA, 25 bp, Homo sapien
gaatttctacccagatgacctggat

SEQ ID NO: 3128674 - DNA, 25 bp, Homo sapien
tagtcttccagattacccacagagg

SEQ ID NO: 3128675 - DNA, 25 bp, Homo sapien
ttcagtagcattaataggcacaggc

SEQ ID NO: 3128676 - DNA, 25 bp, Homo sapien
gacacctgcttacaatgtagctgag

SEQ ID NO: 3128677 - DNA, 25 bp, Homo sapien
tacaatgtagctgagagggatacca

SEQ ID NO: 3128678 - DNA, 25 bp, Homo sapien
ttgatacacatgacagaggatctgg

SEQ ID NO: 3128679 - DNA, 25 bp, Homo sapien
ttattaccgactccagacacctgct

SEQ ID NO: 3128680 - DNA, 25 bp, Homo sapien
tcaggaatatgtggaccacaggcag

SEQ ID NO: 3128681 - DNA, 25 bp, Homo sapien
ccacaggcagggtgttcgttgtcca

SEQ ID NO: 3128682 - DNA, 25 bp, Homo sapien
ctggccctcaggaatatgtggacca

SEQ ID NO: 3128683 - DNA, 25 bp, Homo sapien
cagggtgttcgttgtccatcctcat

SEQ ID NO: 3128684 - DNA, 25 bp, Homo sapien
tgtctgattaaaggttactgaacac

SEQ ID NO: 3128685 - DNA, 25 bp, Homo sapien
ggcgtttgaaaagaggaatatctgg

SEQ ID NO: 3128686 - DNA, 25 bp, Homo sapien
taggacagcataaggcttaaagagt

SEQ ID NO: 3128687 - DNA, 25 bp, Homo sapien
tggtttaaaggttattaggacagca

SEQ ID NO: 3128688 - DNA, 25 bp, Homo sapien
taaagctctcgtagggagggccaag

SEQ ID NO: 3128689 - DNA, 25 bp, Homo sapien
tagggattctgctaatggagccaaa

SEQ ID NO: 3128690 - DNA, 25 bp, Homo sapien
tcacgcatgtcaaggccactgtttt

SEQ ID NO: 3128691 - DNA, 25 bp, Homo sapien
tccaagtgaagtgcggatagccgct

SEQ ID NO: 3128692 - DNA, 25 bp, Homo sapien
tatggaggcggcagccatctcctcc

SEQ ID NO: 3128693 - DNA, 25 bp, Homo sapien
tcctcctcagcatcatggccacctt

SEQ ID NO: 3128694 - DNA, 25 bp, Homo sapien
tgaagcccaaaatagtcaaaaagag

SEQ ID NO: 3128695 - DNA, 25 bp, Homo sapien
ggccaccttcataccccttgtgaag

SEQ ID NO: 3128696 - DNA, 25 bp, Homo sapien
agacatctcagcatcaagaacctgc

SEQ ID NO: 3128697 - DNA, 25 bp, Homo sapien
ggccatagaagtatcccctgcacag

SEQ ID NO: 3128698 - DNA, 25 bp, Homo sapien
agggagctaccattcccaagagcaa

SEQ ID NO: 3128699 - DNA, 25 bp, Homo sapien
tcaactcccaagcacgcagacatct

SEQ ID NO: 3128700 - DNA, 25 bp, Homo sapien
tgaatcagtctgggccattcattgg

SEQ ID NO: 3128701 - DNA, 25 bp, Homo sapien
gaatcagtctgggccattcattggc

SEQ ID NO: 3128702 - DNA, 25 bp, Homo sapien
aatcagtctgggccattcattggca

SEQ ID NO: 3128703 - DNA, 25 bp, Homo sapien
tctctctttatagacgcgatgtgga

SEQ ID NO: 3128704 - DNA, 25 bp, Homo sapien
taaagaaatcgctgcccatgtacaa

SEQ ID NO: 3128705 - DNA, 25 bp, Homo sapien
ctaggaatcgctgacctcgggcagg

SEQ ID NO: 3128706 - DNA, 25 bp, Homo sapien
tcgggcaggtctacgtcactacttt

SEQ ID NO: 3128707 - DNA, 25 bp, Homo sapien
gttaacgttgtaattagttcatcta

SEQ ID NO: 3128708 - DNA, 25 bp, Homo sapien
caccatgaccttcacctgctaccat

SEQ ID NO: 3128709 - DNA, 25 bp, Homo sapien
tagttcatctaatgctccaaattgc

SEQ ID NO: 3128710 - DNA, 25 bp, Homo sapien
taatgctccaaattgccaatatctg

SEQ ID NO: 3128711 - DNA, 25 bp, Homo sapien
tataccagaaaccatgatcagccat

SEQ ID NO: 3128712 - DNA, 25 bp, Homo sapien
tcctttataccagaaaccatgatca

SEQ ID NO: 3128713 - DNA, 25 bp, Homo sapien
tttataccagaaaccatgatcagcc

SEQ ID NO: 3128714 - DNA, 25 bp, Homo sapien
cttgggagatctgttgtgtttttcc

SEQ ID NO: 3128715 - DNA, 25 bp, Homo sapien
ggtctgagactgctttccatggaag

SEQ ID NO: 3128716 - DNA, 25 bp, Homo sapien
acagctgtaggttgtggtctgagac

SEQ ID NO: 3128717 - DNA, 25 bp, Homo sapien
cataactaccatgcccccgttaatt

SEQ ID NO: 3128718 - DNA, 25 bp, Homo sapien
ttctacatctctttccataactacc

SEQ ID NO: 3128719 - DNA, 25 bp, Homo sapien
atcgcactggttaggatttttatat

SEQ ID NO: 3128720 - DNA, 25 bp, Homo sapien
taatcgcactggttaggatttttat

SEQ ID NO: 3128721 - DNA, 25 bp, Homo sapien
aatcgcactggttaggatttttata

SEQ ID NO: 3128722 - DNA, 25 bp, Homo sapien
ataatcgcactggttaggattttta

SEQ ID NO: 3128723 - DNA, 25 bp, Homo sapien
tcccaattatcatggagcctttact

SEQ ID NO: 3128724 - DNA, 25 bp, Homo sapien
tgcaggcttcccaattatcatggag

SEQ ID NO: 3128725 - DNA, 25 bp, Homo sapien
gcttcccaattatcatggagccttt

SEQ ID NO: 3128726 - DNA, 25 bp, Homo sapien
caattatcatggagcctttacttac

SEQ ID NO: 3128727 - DNA, 25 bp, Homo sapien
tcagttctacctgagaattacacac

SEQ ID NO: 3128728 - DNA, 25 bp, Homo sapien
tctgcactcagttctacctgagaat

SEQ ID NO: 3128729 - DNA, 25 bp, Homo sapien
accacattccgtttctgcactcagt

SEQ ID NO: 3128730 - DNA, 25 bp, Homo sapien
acctctgtgtagtcctcaccacatt

SEQ ID NO: 3128731 - DNA, 25 bp, Homo sapien
tctgaataaccctgaggtcttctgg

SEQ ID NO: 3128732 - DNA, 25 bp, Homo sapien
tgaggtcttctggatcaaagctgat

SEQ ID NO: 3128733 - DNA, 25 bp, Homo sapien
tggatcaaagctgatagcccctgcc

SEQ ID NO: 3128734 - DNA, 25 bp, Homo sapien
tcttctggatcaaagctgatagccc

SEQ ID NO: 3128735 - DNA, 25 bp, Homo sapien
tcacttgtctgctaatgatattgaa

SEQ ID NO: 3128736 - DNA, 25 bp, Homo sapien
tcaggtcagctgaggaatttgttag

SEQ ID NO: 3128737 - DNA, 25 bp, Homo sapien
ctgctaatgatattgaatttacaca

SEQ ID NO: 3128738 - DNA, 25 bp, Homo sapien
tgtctgctaatgatattgaatttac

SEQ ID NO: 3128739 - DNA, 25 bp, Homo sapien
gctgcaatagcagcatcctgtcctc

SEQ ID NO: 3128740 - DNA, 25 bp, Homo sapien
tgaccagatgcacatccgtccagtc

SEQ ID NO: 3128741 - DNA, 25 bp, Homo sapien
agatgcacatccgtccagtcctggg

SEQ ID NO: 3128742 - DNA, 25 bp, Homo sapien
agtcctgggcctgacgctgcaatag

SEQ ID NO: 3128743 - DNA, 25 bp, Homo sapien
gagtcaattttagactctgaattgt

SEQ ID NO: 3128744 - DNA, 25 bp, Homo sapien
tgttgctgctgagtcaattttagac

SEQ ID NO: 3128745 - DNA, 25 bp, Homo sapien
ctctgaattgttttccgtatgaagc

SEQ ID NO: 3128746 - DNA, 25 bp, Homo sapien
attgttttccgtatgaagcagctgg

SEQ ID NO: 3128747 - DNA, 25 bp, Homo sapien
tgctcctgtttgtgttcacacagtg

SEQ ID NO: 3128748 - DNA, 25 bp, Homo sapien
agatgctcctgtttgtgttcacaca

SEQ ID NO: 3128749 - DNA, 25 bp, Homo sapien
tgtgcttgctgctatccagccctga

SEQ ID NO: 3128750 - DNA, 25 bp, Homo sapien
tctgtgcttgctgctatccagccct

SEQ ID NO: 3128751 - DNA, 25 bp, Homo sapien
cttcagttcagccctggacttgctg

SEQ ID NO: 3128752 - DNA, 25 bp, Homo sapien
ttcagttcagccctggacttgctgc

SEQ ID NO: 3128753 - DNA, 25 bp, Homo sapien
atcttcaagagtcgttctgcccctt

SEQ ID NO: 3128754 - DNA, 25 bp, Homo sapien
tcttcaagagtcgttctgccccttg

SEQ ID NO: 3128755 - DNA, 25 bp, Homo sapien
gccccttgctccatgtcttagccca

SEQ ID NO: 3128756 - DNA, 25 bp, Homo sapien
tcaagagtcgttctgccccttgctc

SEQ ID NO: 3128757 - DNA, 25 bp, Homo sapien
gaagaaccatatgtatgctgatcag

SEQ ID NO: 3128758 - DNA, 25 bp, Homo sapien
caatactttcggcatctgcagtctc

SEQ ID NO: 3128759 - DNA, 25 bp, Homo sapien
gctgaaaatcaatactttcggcatc

SEQ ID NO: 3128760 - DNA, 25 bp, Homo sapien
ggtacctaacaagtagaattcatgc

SEQ ID NO: 3128761 - DNA, 25 bp, Homo sapien
caaaactccttagaggtattatttg

SEQ ID NO: 3128762 - DNA, 25 bp, Homo sapien
gacacatcagactcttctaacagca

SEQ ID NO: 3128763 - DNA, 25 bp, Homo sapien
tcttctaacagcattcgagtcacac

SEQ ID NO: 3128764 - DNA, 25 bp, Homo sapien
cagcattcgagtcacactactcaca

SEQ ID NO: 3128765 - DNA, 25 bp, Homo sapien
gagtcagccccatagacagaaggat

SEQ ID NO: 3128766 - DNA, 25 bp, Homo sapien
gagagtcagccccatagacagaagg

SEQ ID NO: 3128767 - DNA, 25 bp, Homo sapien
ccccatagacagaaggataatttag

SEQ ID NO: 3128768 - DNA, 25 bp, Homo sapien
cagccccatagacagaaggataatt

SEQ ID NO: 3128769 - DNA, 25 bp, Homo sapien
gaaaaggcagcgctgacattctact

SEQ ID NO: 3128770 - DNA, 25 bp, Homo sapien
cctttctgaaaatgtcactgagcca

SEQ ID NO: 3128771 - DNA, 25 bp, Homo sapien
ttctccattgagtgctgacaggtag

SEQ ID NO: 3128772 - DNA, 25 bp, Homo sapien
ggtagcagtagtccttcctttctga

SEQ ID NO: 3128773 - DNA, 25 bp, Homo sapien
agccctgctaaacacgtctcccaag

SEQ ID NO: 3128774 - DNA, 25 bp, Homo sapien
gctgattatccatttgcacatgaaa

SEQ ID NO: 3128775 - DNA, 25 bp, Homo sapien
ggaacttctatcaagatcacctttt

SEQ ID NO: 3128776 - DNA, 25 bp, Homo sapien
ttaagcaggaacttctatcaagatc

SEQ ID NO: 3128777 - DNA, 25 bp, Homo sapien
tgtctataggcaaatgagcgaatgg

SEQ ID NO: 3128778 - DNA, 25 bp, Homo sapien
ctgaagcttagtgtctataggcaaa

SEQ ID NO: 3128779 - DNA, 25 bp, Homo sapien
gatttcctgattaagcaaacaggcc

SEQ ID NO: 3128780 - DNA, 25 bp, Homo sapien
agatttcctgattaagcaaacaggc

SEQ ID NO: 3128781 - DNA, 25 bp, Homo sapien
ctttgcagatggggctcataaaatg

SEQ ID NO: 3128782 - DNA, 25 bp, Homo sapien
tgcagatggggctcataaaatgctc

SEQ ID NO: 3128783 - DNA, 25 bp, Homo sapien
ttgcagatggggctcataaaatgct

SEQ ID NO: 3128784 - DNA, 25 bp, Homo sapien
gcagatggggctcataaaatgctcc

SEQ ID NO: 3128785 - DNA, 25 bp, Homo sapien
tgacagtggtatctggtccacagtc

SEQ ID NO: 3128786 - DNA, 25 bp, Homo sapien
gatgacagtggtatctggtccacag

SEQ ID NO: 3128787 - DNA, 25 bp, Homo sapien
tgatgacagtggtatctggtccaca

SEQ ID NO: 3128788 - DNA, 25 bp, Homo sapien
cccatatcaccaccccaggtgacat

SEQ ID NO: 3128789 - DNA, 25 bp, Homo sapien
gaagttggagtaaagccaaagccat

SEQ ID NO: 3128790 - DNA, 25 bp, Homo sapien
cctcacatgaggcaagcggagactc

SEQ ID NO: 3128791 - DNA, 25 bp, Homo sapien
tgtcaagaacaaggctcatggtcaa

SEQ ID NO: 3128792 - DNA, 25 bp, Homo sapien
tcaattgatgagtccccgcacatca

SEQ ID NO: 3128793 - DNA, 25 bp, Homo sapien
tgtgcccatgggacaacactctgag

SEQ ID NO: 3128794 - DNA, 25 bp, Homo sapien
tctgacaaagaagcgcctactgggt

SEQ ID NO: 3128795 - DNA, 25 bp, Homo sapien
gagacctatttgaccctcctagagc

SEQ ID NO: 3128796 - DNA, 25 bp, Homo sapien
gaaggtttgcctatagggtctgaca

SEQ ID NO: 3128797 - DNA, 25 bp, Homo sapien
gcttttaatgtcaggaccatcaaca

SEQ ID NO: 3128798 - DNA, 25 bp, Homo sapien
gcagagcttttaatgtcaggaccat

SEQ ID NO: 3128799 - DNA, 25 bp, Homo sapien
gagcttttaatgtcaggaccatcaa

SEQ ID NO: 3128800 - DNA, 25 bp, Homo sapien
taatgtcaggaccatcaacatgaaa

SEQ ID NO: 3128801 - DNA, 25 bp, Homo sapien
gatggtctagagcacatctgagagc

SEQ ID NO: 3128802 - DNA, 25 bp, Homo sapien
gcacctgattagaatgtagcctcgt

SEQ ID NO: 3128803 - DNA, 25 bp, Homo sapien
gccatctatgattgcagggtggaaa

SEQ ID NO: 3128804 - DNA, 25 bp, Homo sapien
tacttaagtaggaaaatagagcctc

SEQ ID NO: 3128805 - DNA, 25 bp, Homo sapien
ccataattcagcaacaccaccaacc

SEQ ID NO: 3128806 - DNA, 25 bp, Homo sapien
gccataattcagcaacaccaccaac

SEQ ID NO: 3128807 - DNA, 25 bp, Homo sapien
cataattcagcaacaccaccaacca

SEQ ID NO: 3128808 - DNA, 25 bp, Homo sapien
ggcaaagttgggtccatgagagaat

SEQ ID NO: 3128809 - DNA, 25 bp, Homo sapien
ttcagaggcatagctagaggagcag

SEQ ID NO: 3128810 - DNA, 25 bp, Homo sapien
tgagagaattcagaggcatagctag

SEQ ID NO: 3128811 - DNA, 25 bp, Homo sapien
tttcaggcacagctgtaaagtgtgg

SEQ ID NO: 3128812 - DNA, 25 bp, Homo sapien
tacccatcctgactctggcaatggg

SEQ ID NO: 3128813 - DNA, 25 bp, Homo sapien
gctgtacccatcctgactctggcaa

SEQ ID NO: 3128814 - DNA, 25 bp, Homo sapien
gagatctgctgagtagaatggctgc

SEQ ID NO: 3128815 - DNA, 25 bp, Homo sapien
gatctgctgagtagaatggctgctg

SEQ ID NO: 3128816 - DNA, 25 bp, Homo sapien
gacaggcccagtctggataaagtgg

SEQ ID NO: 3128817 - DNA, 25 bp, Homo sapien
tcccttatggtacttattacactgg

SEQ ID NO: 3128818 - DNA, 25 bp, Homo sapien
tcctatgggaatccaaactacttcc

SEQ ID NO: 3128819 - DNA, 25 bp, Homo sapien
tggtctggcccctaatgtgtgacct

SEQ ID NO: 3128820 - DNA, 25 bp, Homo sapien
cagcaaccccctgtaaccccagact

SEQ ID NO: 3128821 - DNA, 25 bp, Homo sapien
ggccagggtgccttgaccgtgtaca

SEQ ID NO: 3128822 - DNA, 25 bp, Homo sapien
agcaaccccctgtaaccccagactg

SEQ ID NO: 3128823 - DNA, 25 bp, Homo sapien
cagggtgccttgaccgtgtacatca

SEQ ID NO: 3128824 - DNA, 25 bp, Homo sapien
ccaccagatggtagatgagcaacgt

SEQ ID NO: 3128825 - DNA, 25 bp, Homo sapien
gccctaagggttgtacagtctgaag

SEQ ID NO: 3128826 - DNA, 25 bp, Homo sapien
ccattgcaatagaggagggtccaag

SEQ ID NO: 3128827 - DNA, 25 bp, Homo sapien
gcaggctggcgaaggtttttaaaca

SEQ ID NO: 3128828 - DNA, 25 bp, Homo sapien
gtcgtgtcaacaacatccaggtgtg

SEQ ID NO: 3128829 - DNA, 25 bp, Homo sapien
gcttttagtggttatagtcgtgtca

SEQ ID NO: 3128830 - DNA, 25 bp, Homo sapien
tccaggtgtgcttcatggtatgcag

SEQ ID NO: 3128831 - DNA, 25 bp, Homo sapien
gattttcccaagacaggcttcctct

SEQ ID NO: 3128832 - DNA, 25 bp, Homo sapien
gcagccaggagcctagaagtgggag

SEQ ID NO: 3128833 - DNA, 25 bp, Homo sapien
tctgtaacatcaaagtctgttagac

SEQ ID NO: 3128834 - DNA, 25 bp, Homo sapien
tcaaagtctgttagacacacaaata

SEQ ID NO: 3128835 - DNA, 25 bp, Homo sapien
gcacggtgtcgctgtgcttcaggat

SEQ ID NO: 3128836 - DNA, 25 bp, Homo sapien
gtcagggatgaaggctatgtagaca

SEQ ID NO: 3128837 - DNA, 25 bp, Homo sapien
tagtcagggatgaaggctatgtaga

SEQ ID NO: 3128838 - DNA, 25 bp, Homo sapien
ggatgaaggctatgtagacaggaaa

SEQ ID NO: 3128839 - DNA, 25 bp, Homo sapien
aaggctatgtagacaggaaaaggca

SEQ ID NO: 3128840 - DNA, 25 bp, Homo sapien
aatgaggtacactgatttgccaagc

SEQ ID NO: 3128841 - DNA, 25 bp, Homo sapien
tcaacactcaagtggggatacggca

SEQ ID NO: 3128842 - DNA, 25 bp, Homo sapien
atgaggtacactgatttgccaagca

SEQ ID NO: 3128843 - DNA, 25 bp, Homo sapien
tggggatacggcatttgcacaaatg

SEQ ID NO: 3128844 - DNA, 25 bp, Homo sapien
agcacccattccccttcacagaaca

SEQ ID NO: 3128845 - DNA, 25 bp, Homo sapien
gcacccattccccttcacagaacag

SEQ ID NO: 3128846 - DNA, 25 bp, Homo sapien
tcctgcccccgtgggatatgctttt

SEQ ID NO: 3128847 - DNA, 25 bp, Homo sapien
atcctgcccccgtgggatatgcttt

SEQ ID NO: 3128848 - DNA, 25 bp, Homo sapien
gaacagcgagcacagaatacatact

SEQ ID NO: 3128849 - DNA, 25 bp, Homo sapien
gtaactttgatcctcagtgacctct

SEQ ID NO: 3128850 - DNA, 25 bp, Homo sapien
acagcgagcacagaatacatactca

SEQ ID NO: 3128851 - DNA, 25 bp, Homo sapien
tctttattggtaactttgatcctca

SEQ ID NO: 3128852 - DNA, 25 bp, Homo sapien
agatcaagaggttgcaggtaaacag

SEQ ID NO: 3128853 - DNA, 25 bp, Homo sapien
acagactcatgtcaaaatgcctgag

SEQ ID NO: 3128854 - DNA, 25 bp, Homo sapien
tcacagactcatgtcaaaatgcctg

SEQ ID NO: 3128855 - DNA, 25 bp, Homo sapien
gagatcaagaggttgcaggtaaaca

SEQ ID NO: 3128856 - DNA, 25 bp, Homo sapien
tctttgctgaggaaatgtggatgtt

SEQ ID NO: 3128857 - DNA, 25 bp, Homo sapien
cattgatgccaaggtccaactcagg

SEQ ID NO: 3128858 - DNA, 25 bp, Homo sapien
tctagcattgatgccaaggtccaac

SEQ ID NO: 3128859 - DNA, 25 bp, Homo sapien
tttattctagcattgatgccaaggt

SEQ ID NO: 3128860 - DNA, 25 bp, Homo sapien
tgatgccaaggtccaactcaggaat

SEQ ID NO: 3128861 - DNA, 25 bp, Homo sapien
aagagtctggttttgggttcttctg

SEQ ID NO: 3128862 - DNA, 25 bp, Homo sapien
cctcaagagtctggttttgggttct

SEQ ID NO: 3128863 - DNA, 25 bp, Homo sapien
gagtctggttttgggttcttctgtg

SEQ ID NO: 3128864 - DNA, 25 bp, Homo sapien
tcaagagtctggttttgggttcttc

SEQ ID NO: 3128865 - DNA, 25 bp, Homo sapien
cacctagcttctccgtgtcgcctac

SEQ ID NO: 3128866 - DNA, 25 bp, Homo sapien
tgtgtcacctagcttctccgtgtcg

SEQ ID NO: 3128867 - DNA, 25 bp, Homo sapien
ctctgtgtcacctagcttctccgtg

SEQ ID NO: 3128868 - DNA, 25 bp, Homo sapien
gtgtcacctagcttctccgtgtcgc

SEQ ID NO: 3128869 - DNA, 25 bp, Homo sapien
tataacgatagtcatcagtggcctt

SEQ ID NO: 3128870 - DNA, 25 bp, Homo sapien
ttttataacgatagtcatcagtggc

SEQ ID NO: 3128871 - DNA, 25 bp, Homo sapien
tttataacgatagtcatcagtggcc

SEQ ID NO: 3128872 - DNA, 25 bp, Homo sapien
ctttttataacgatagtcatcagtg

SEQ ID NO: 3128873 - DNA, 25 bp, Homo sapien
gaagccaccccctgtgattccatta

SEQ ID NO: 3128874 - DNA, 25 bp, Homo sapien
tttcttccaccggatgcctaaatca

SEQ ID NO: 3128875 - DNA, 25 bp, Homo sapien
caaatctctctgtgataccctggag

SEQ ID NO: 3128876 - DNA, 25 bp, Homo sapien
cttttaagcataagttctgattcca

SEQ ID NO: 3128877 - DNA, 25 bp, Homo sapien
tctcctcattatttacgcaaatttc

SEQ ID NO: 3128878 - DNA, 25 bp, Homo sapien
ccataaaagatgcaagatttcccag

SEQ ID NO: 3128879 - DNA, 25 bp, Homo sapien
aaccattaatggcatctctgtgctc

SEQ ID NO: 3128880 - DNA, 25 bp, Homo sapien
cccagaactgcggagggtccccatt

SEQ ID NO: 3128881 - DNA, 25 bp, Homo sapien
gagccagaagaaccattaatggcat

SEQ ID NO: 3128882 - DNA, 25 bp, Homo sapien
ggtcccaggagcatatacatcagag

SEQ ID NO: 3128883 - DNA, 25 bp, Homo sapien
cagagacaagtttagcatgagggcg

SEQ ID NO: 3128884 - DNA, 25 bp, Homo sapien
gcatgagggcgtttctctcaatctt

SEQ ID NO: 3128885 - DNA, 25 bp, Homo sapien
caagtttagcatgagggcgtttctc

SEQ ID NO: 3128886 - DNA, 25 bp, Homo sapien
tactggatagaagtgtctttcggtc

SEQ ID NO: 3128887 - DNA, 25 bp, Homo sapien
tatttactggatagaagtgtctttc

SEQ ID NO: 3128888 - DNA, 25 bp, Homo sapien
cttctcttaagctatcagggctggt

SEQ ID NO: 3128889 - DNA, 25 bp, Homo sapien
tatcagggctggtactatttactgg

SEQ ID NO: 3128890 - DNA, 25 bp, Homo sapien
actgcatcatcccttactgctttgg

SEQ ID NO: 3128891 - DNA, 25 bp, Homo sapien
ttactgcatcatcccttactgcttt

SEQ ID NO: 3128892 - DNA, 25 bp, Homo sapien
tactgcatcatcccttactgctttg

SEQ ID NO: 3128893 - DNA, 25 bp, Homo sapien
cgttttgtgaatgctgctctaagca

SEQ ID NO: 3128894 - DNA, 25 bp, Homo sapien
aaaaagagcgttttgtgaatgctgc

SEQ ID NO: 3128895 - DNA, 25 bp, Homo sapien
gagcgttttgtgaatgctgctctaa

SEQ ID NO: 3128896 - DNA, 25 bp, Homo sapien
cacagtaattggaaaaagagcgttt

SEQ ID NO: 3128897 - DNA, 25 bp, Homo sapien
tcaacttttaagaggctgaaccgat

SEQ ID NO: 3128898 - DNA, 25 bp, Homo sapien
tgtggaaaggaaattcggtggccat

SEQ ID NO: 3128899 - DNA, 25 bp, Homo sapien
gctgaaccgatatttgtggaaagga

SEQ ID NO: 3128900 - DNA, 25 bp, Homo sapien
taagaggctgaaccgatatttgtgg

SEQ ID NO: 3128901 - DNA, 25 bp, Homo sapien
catggtgaatccactcaagatttgg

SEQ ID NO: 3128902 - DNA, 25 bp, Homo sapien
gagcagagctcctctttatcacact

SEQ ID NO: 3128903 - DNA, 25 bp, Homo sapien
caagatttggtggaagtgtatcaca

SEQ ID NO: 3128904 - DNA, 25 bp, Homo sapien
tcacactgctcatggtgaatccact

SEQ ID NO: 3128905 - DNA, 25 bp, Homo sapien
gtttgatggccatataatctttctc

SEQ ID NO: 3128906 - DNA, 25 bp, Homo sapien
tcctcgtaaacaaggtttgatggcc

SEQ ID NO: 3128907 - DNA, 25 bp, Homo sapien
tgttttagtcttgacctttatcaac

SEQ ID NO: 3128908 - DNA, 25 bp, Homo sapien
ttagtcttgacctttatcaacttcc

SEQ ID NO: 3128909 - DNA, 25 bp, Homo sapien
cgctaatggatcatcttgataaaaa

SEQ ID NO: 3128910 - DNA, 25 bp, Homo sapien
gcagaacgctaatggatcatcttga

SEQ ID NO: 3128911 - DNA, 25 bp, Homo sapien
ctgcagaacgctaatggatcatctt

SEQ ID NO: 3128912 - DNA, 25 bp, Homo sapien
gaacgctaatggatcatcttgataa

SEQ ID NO: 3128913 - DNA, 25 bp, Homo sapien
cacaatagctgatgataggcagggt

SEQ ID NO: 3128914 - DNA, 25 bp, Homo sapien
tgccccaggaggtatgtccttaagc

SEQ ID NO: 3128915 - DNA, 25 bp, Homo sapien
gctattccttgcatggtttgatatc

SEQ ID NO: 3128916 - DNA, 25 bp, Homo sapien
gctttgggactgcaatcccatcaat

SEQ ID NO: 3128917 - DNA, 25 bp, Homo sapien
taacttcttgactattggaagcatc

SEQ ID NO: 3128918 - DNA, 25 bp, Homo sapien
agacgtgcagaatacaaggcaaggg

SEQ ID NO: 3128919 - DNA, 25 bp, Homo sapien
tctaacttcttgactattggaagca

SEQ ID NO: 3128920 - DNA, 25 bp, Homo sapien
aggaaggagacgtgcagaatacaag

SEQ ID NO: 3128921 - DNA, 25 bp, Homo sapien
ctggcttaagtctgccctgaccagg

SEQ ID NO: 3128922 - DNA, 25 bp, Homo sapien
gaggttttctctgtatatggcactt

SEQ ID NO: 3128923 - DNA, 25 bp, Homo sapien
tgaggttttctctgtatatggcact

SEQ ID NO: 3128924 - DNA, 25 bp, Homo sapien
cctggcttaagtctgccctgaccag

SEQ ID NO: 3128925 - DNA, 25 bp, Homo sapien
aaaagggatatgtgaagatgaggcc

SEQ ID NO: 3128926 - DNA, 25 bp, Homo sapien
gaaaagggatatgtgaagatgaggc

SEQ ID NO: 3128927 - DNA, 25 bp, Homo sapien
tcagtccatgggcaatggattccaa

SEQ ID NO: 3128928 - DNA, 25 bp, Homo sapien
ggaatatcagacacaagtggcttct

SEQ ID NO: 3128929 - DNA, 25 bp, Homo sapien
atcaggaatatcagacacaagtggc

SEQ ID NO: 3128930 - DNA, 25 bp, Homo sapien
taaaaggcaggttcattgtcagtcc

SEQ ID NO: 3128931 - DNA, 25 bp, Homo sapien
ccacgtctgctgtccagatacagtc

SEQ ID NO: 3128932 - DNA, 25 bp, Homo sapien
ccattgctatcccacgtctgctgtc

SEQ ID NO: 3128933 - DNA, 25 bp, Homo sapien
cgtctgctgtccagatacagtccca

SEQ ID NO: 3128934 - DNA, 25 bp, Homo sapien
gtctgctgtccagatacagtcccat

SEQ ID NO: 3128935 - DNA, 25 bp, Homo sapien
cagaagacaaaagatactcactgtc

SEQ ID NO: 3128936 - DNA, 25 bp, Homo sapien
tgtccaaatcagatttcttcacagg

SEQ ID NO: 3128937 - DNA, 25 bp, Homo sapien
agcaacactcttctgaaaagccagt

SEQ ID NO: 3128938 - DNA, 25 bp, Homo sapien
gcagctgctgtctcaatgttgtaaa

SEQ ID NO: 3128939 - DNA, 25 bp, Homo sapien
gatgccatgtcaggcaaagattggg

SEQ ID NO: 3128940 - DNA, 25 bp, Homo sapien
tgctctgtcaagtgggtgacttttt

SEQ ID NO: 3128941 - DNA, 25 bp, Homo sapien
aaggacagagcactccaggtagttt

SEQ ID NO: 3128942 - DNA, 25 bp, Homo sapien
ggtttttcctgatcacaaatgttga

SEQ ID NO: 3128943 - DNA, 25 bp, Homo sapien
tactggtaatataggcaggtctcgc

SEQ ID NO: 3128944 - DNA, 25 bp, Homo sapien
ccagggagggcatgatcagtgccaa

SEQ ID NO: 3128945 - DNA, 25 bp, Homo sapien
gccaagatacatctgcccctgatgg

SEQ ID NO: 3128946 - DNA, 25 bp, Homo sapien
catggacgaaaatcacaagggtaac

SEQ ID NO: 3128947 - DNA, 25 bp, Homo sapien
gccaataaagatccttgccagcaga

SEQ ID NO: 3128948 - DNA, 25 bp, Homo sapien
cccaggatgccaataaagatccttg

SEQ ID NO: 3128949 - DNA, 25 bp, Homo sapien
tctgcttaaattagtcgttgcctcc

SEQ ID NO: 3128950 - DNA, 25 bp, Homo sapien
ttgcctccagcagcgatatccattt

SEQ ID NO: 3128951 - DNA, 25 bp, Homo sapien
tgccaagttgcacgctgggttgtca

SEQ ID NO: 3128952 - DNA, 25 bp, Homo sapien
cacgctgggttgtcatagaatgttc

SEQ ID NO: 3128953 - DNA, 25 bp, Homo sapien
ttctgacagtgccaagttgcacgct

SEQ ID NO: 3128954 - DNA, 25 bp, Homo sapien
aatgttctgaagtcgtgtaaaagga

SEQ ID NO: 3128955 - DNA, 25 bp, Homo sapien
tattttcttactcccccctgagcaa

SEQ ID NO: 3128956 - DNA, 25 bp, Homo sapien
ggctctcaacaacaatactctgttt

SEQ ID NO: 3128957 - DNA, 25 bp, Homo sapien
cccctgagcaaaatactctgcaaat

SEQ ID NO: 3128958 - DNA, 25 bp, Homo sapien
gtctccaggctctcaacaacaatac

SEQ ID NO: 3128959 - DNA, 25 bp, Homo sapien
aaaaagcgtccggtgaatttggcag

SEQ ID NO: 3128960 - DNA, 25 bp, Homo sapien
tggagcctgtcctagcagctcagga

SEQ ID NO: 3128961 - DNA, 25 bp, Homo sapien
cagaggagaattagttgacaacccc

SEQ ID NO: 3128962 - DNA, 25 bp, Homo sapien
tgagaaactgccgtatgccactgca

SEQ ID NO: 3128963 - DNA, 25 bp, Homo sapien
tgatgctaatgacagacaaaggagg

SEQ ID NO: 3128964 - DNA, 25 bp, Homo sapien
cccgcaggtaggcagaactcagatc

SEQ ID NO: 3128965 - DNA, 25 bp, Homo sapien
gacacttgtgggtcattcatgagga

SEQ ID NO: 3128966 - DNA, 25 bp, Homo sapien
tgatatacccagagggagctgtccc

SEQ ID NO: 3128967 - DNA, 25 bp, Homo sapien
tcctggaactagaccacagaaagtg

SEQ ID NO: 3128968 - DNA, 25 bp, Homo sapien
tccattaaccatcagggtgaccttg

SEQ ID NO: 3128969 - DNA, 25 bp, Homo sapien
tacagtgatgtggatagaaagggcc

SEQ ID NO: 3128970 - DNA, 25 bp, Homo sapien
gaccttgggtatgttgcacttcacc

SEQ ID NO: 3128971 - DNA, 25 bp, Homo sapien
ttagaaagaatacagacaaggcagt

SEQ ID NO: 3128972 - DNA, 25 bp, Homo sapien
tgggtgggcaaagcaactcctacag

SEQ ID NO: 3128973 - DNA, 25 bp, Homo sapien
ccgggctgttcgaaatcactgcaga

SEQ ID NO: 3128974 - DNA, 25 bp, Homo sapien
taggcacataccctcaagttaaggt

SEQ ID NO: 3128975 - DNA, 25 bp, Homo sapien
aagagaaggtagagaagccaaaatg

SEQ ID NO: 3128976 - DNA, 25 bp, Homo sapien
gagaaggtagagaagccaaaatgag

SEQ ID NO: 3128977 - DNA, 25 bp, Homo sapien
gaagccaaaatgagaagagattgac

SEQ ID NO: 3128978 - DNA, 25 bp, Homo sapien
caaagagaaggtagagaagccaaaa

SEQ ID NO: 3128979 - DNA, 25 bp, Homo sapien
cacacttctaggtttgctggtggca

SEQ ID NO: 3128980 - DNA, 25 bp, Homo sapien
gccctgtggtatggcattttatcaa

SEQ ID NO: 3128981 - DNA, 25 bp, Homo sapien
tatagtacatatgtcctgtccagta

SEQ ID NO: 3128982 - DNA, 25 bp, Homo sapien
gccagggagaatctgatatagtaca

SEQ ID NO: 3128983 - DNA, 25 bp, Homo sapien
agccacgatctggactgtgcctgga

SEQ ID NO: 3128984 - DNA, 25 bp, Homo sapien
cattgggactggttgcatttctaca

SEQ ID NO: 3128985 - DNA, 25 bp, Homo sapien
aaaacatgagcttgcctcccgtcag

SEQ ID NO: 3128986 - DNA, 25 bp, Homo sapien
gctacgaggcttttccagaacttgc

SEQ ID NO: 3128987 - DNA, 25 bp, Homo sapien
ccgcataatgaagtcaggaaataat

SEQ ID NO: 3128988 - DNA, 25 bp, Homo sapien
tgccgcataatgaagtcaggaaata

SEQ ID NO: 3128989 - DNA, 25 bp, Homo sapien
ctgccgcataatgaagtcaggaaat

SEQ ID NO: 3128990 - DNA, 25 bp, Homo sapien
gcataatgaagtcaggaaataattc

SEQ ID NO: 3128991 - DNA, 25 bp, Homo sapien
gttcctgcatgctggtggttaccca

SEQ ID NO: 3128992 - DNA, 25 bp, Homo sapien
tattgtgctttggtgaattgcttaa

SEQ ID NO: 3128993 - DNA, 25 bp, Homo sapien
aacagtctcggaaacccaggttgct

SEQ ID NO: 3128994 - DNA, 25 bp, Homo sapien
taaacctcacgagaggctagagatg

SEQ ID NO: 3128995 - DNA, 25 bp, Homo sapien
cctgttggagccatagcagctaaaa

SEQ ID NO: 3128996 - DNA, 25 bp, Homo sapien
tcagcctcaaagatagagcagatgc

SEQ ID NO: 3128997 - DNA, 25 bp, Homo sapien
gaccatgagatcctacactttcttg

SEQ ID NO: 3128998 - DNA, 25 bp, Homo sapien
cctactcataggacagttgaacaac

SEQ ID NO: 3128999 - DNA, 25 bp, Homo sapien
cactaggacactgagctttgaataa

SEQ ID NO: 3129000 - DNA, 25 bp, Homo sapien
ctttatagagcacatacacaggacc

SEQ ID NO: 3129001 - DNA, 25 bp, Homo sapien
tcctaatactatccctcccccattc

SEQ ID NO: 3129002 - DNA, 25 bp, Homo sapien
ggtcaacatggtgaagctgcgtctc

SEQ ID NO: 3129003 - DNA, 25 bp, Homo sapien
gtcaggagtccaaggctggcctggt

SEQ ID NO: 3129004 - DNA, 25 bp, Homo sapien
ggagtccaaggctggcctggtcaac

SEQ ID NO: 3129005 - DNA, 25 bp, Homo sapien
tcaggagtccaaggctggcctggtc

SEQ ID NO: 3129006 - DNA, 25 bp, Homo sapien
ctatgggccatatagttaatctggc

SEQ ID NO: 3129007 - DNA, 25 bp, Homo sapien
catggtaaaaagtcagtgaatggct

SEQ ID NO: 3129008 - DNA, 25 bp, Homo sapien
ttactctttttgaggttgatcagga

SEQ ID NO: 3129009 - DNA, 25 bp, Homo sapien
gacaggtataatttttgcacaagaa

SEQ ID NO: 3129010 - DNA, 25 bp, Homo sapien
acaatgcgcacacaaggagctcaca

SEQ ID NO: 3129011 - DNA, 25 bp, Homo sapien
tcgtcgcctgcttctatgccagact

SEQ ID NO: 3129012 - DNA, 25 bp, Homo sapien
tcattggaactaaaagagaggatca

SEQ ID NO: 3129013 - DNA, 25 bp, Homo sapien
ggagctcacagcttgggtggcacca

SEQ ID NO: 3129014 - DNA, 25 bp, Homo sapien
cctctcttctctgtgaccattcatc

SEQ ID NO: 3129015 - DNA, 25 bp, Homo sapien
ttcagggcttcatcctctcttctct

SEQ ID NO: 3129016 - DNA, 25 bp, Homo sapien
ctcttctctgtgaccattcatccat

SEQ ID NO: 3129017 - DNA, 25 bp, Homo sapien
cttcagggcttcatcctctcttctc

SEQ ID NO: 3129018 - DNA, 25 bp, Homo sapien
ctagagggatgcaagagttgtcacg

SEQ ID NO: 3129019 - DNA, 25 bp, Homo sapien
caagagttgtcacgggaacacggat

SEQ ID NO: 3129020 - DNA, 25 bp, Homo sapien
ttgtcacgggaacacggatatgtgg

SEQ ID NO: 3129021 - DNA, 25 bp, Homo sapien
cgggaacacggatatgtggagaaac

SEQ ID NO: 3129022 - DNA, 25 bp, Homo sapien
ttctgaaacatagcttggtgagctc

SEQ ID NO: 3129023 - DNA, 25 bp, Homo sapien
aacttctgaaacatagcttggtgag

SEQ ID NO: 3129024 - DNA, 25 bp, Homo sapien
ctgaaacatagcttggtgagctctg

SEQ ID NO: 3129025 - DNA, 25 bp, Homo sapien
acttctgaaacatagcttggtgagc

SEQ ID NO: 3129026 - DNA, 25 bp, Homo sapien
caccaaccatctgttcctccgataa

SEQ ID NO: 3129027 - DNA, 25 bp, Homo sapien
gacaccaaccatctgttcctccgat

SEQ ID NO: 3129028 - DNA, 25 bp, Homo sapien
caaccatctgttcctccgataacat

SEQ ID NO: 3129029 - DNA, 25 bp, Homo sapien
ccaaccatctgttcctccgataaca

SEQ ID NO: 3129030 - DNA, 25 bp, Homo sapien
gagaataaatatctgtcccttcagt

SEQ ID NO: 3129031 - DNA, 25 bp, Homo sapien
aataaatatctgtcccttcagtttc

SEQ ID NO: 3129032 - DNA, 25 bp, Homo sapien
tcatgttgtgctttagagaataaat

SEQ ID NO: 3129033 - DNA, 25 bp, Homo sapien
ctgttttatggaaatagagttgatc

SEQ ID NO: 3129034 - DNA, 25 bp, Homo sapien
gaaatagagttgatcccagaattct

SEQ ID NO: 3129035 - DNA, 25 bp, Homo sapien
actcaggagagtatttgatctttcg

SEQ ID NO: 3129036 - DNA, 25 bp, Homo sapien
tcttggcaagttcgtggagagaaaa

SEQ ID NO: 3129037 - DNA, 25 bp, Homo sapien
caaggggcgtcaaaaggcgtcagat

SEQ ID NO: 3129038 - DNA, 25 bp, Homo sapien
cattcactgcaaggggcgtcaaaag

SEQ ID NO: 3129039 - DNA, 25 bp, Homo sapien
cgtcaaaaggcgtcagatcccattg

SEQ ID NO: 3129040 - DNA, 25 bp, Homo sapien
gggtcattcactgcaaggggcgtca

SEQ ID NO: 3129041 - DNA, 25 bp, Homo sapien
cacggaggatgtgctactagcttct

SEQ ID NO: 3129042 - DNA, 25 bp, Homo sapien
tagttaggcctgatggatactgcta

SEQ ID NO: 3129043 - DNA, 25 bp, Homo sapien
cagaacagccccacaaaataatgac

SEQ ID NO: 3129044 - DNA, 25 bp, Homo sapien
acatcatacgatgtacagaacagcc

SEQ ID NO: 3129045 - DNA, 25 bp, Homo sapien
cagtcttggaagctgcgttctccat

SEQ ID NO: 3129046 - DNA, 25 bp, Homo sapien
gtctgccagtcttggaagctgcgtt

SEQ ID NO: 3129047 - DNA, 25 bp, Homo sapien
tctgccagtcttggaagctgcgttc

SEQ ID NO: 3129048 - DNA, 25 bp, Homo sapien
tgccagtcttggaagctgcgttctc

SEQ ID NO: 3129049 - DNA, 25 bp, Homo sapien
ggcaatgcggaataagccatttatc

SEQ ID NO: 3129050 - DNA, 25 bp, Homo sapien
caggcaatgcggaataagccattta

SEQ ID NO: 3129051 - DNA, 25 bp, Homo sapien
tcaggcaatgcggaataagccattt

SEQ ID NO: 3129052 - DNA, 25 bp, Homo sapien
ctgaatcttgaacacctccctcttg

SEQ ID NO: 3129053 - DNA, 25 bp, Homo sapien
actgcccctccggaaagggcgtgcg

SEQ ID NO: 3129054 - DNA, 25 bp, Homo sapien
cggaaagggcgtgcgtactttagca

SEQ ID NO: 3129055 - DNA, 25 bp, Homo sapien
aagggcgtgcgtactttagcaccac

SEQ ID NO: 3129056 - DNA, 25 bp, Homo sapien
tgccttgttaaatattcaaaggcac

SEQ ID NO: 3129057 - DNA, 25 bp, Homo sapien
caattgcaagtatcctgaggtttcc

SEQ ID NO: 3129058 - DNA, 25 bp, Homo sapien
tagtgtctacaaggtacattggccc

SEQ ID NO: 3129059 - DNA, 25 bp, Homo sapien
gataattgaaccatggaggcacagt

SEQ ID NO: 3129060 - DNA, 25 bp, Homo sapien
ttttgcaaagattcagggacggtgg

SEQ ID NO: 3129061 - DNA, 25 bp, Homo sapien
ggctttctatgttgggttattcttc

SEQ ID NO: 3129062 - DNA, 25 bp, Homo sapien
tgacagccattcaggcttcttggtg

SEQ ID NO: 3129063 - DNA, 25 bp, Homo sapien
tcaggcttcttggtgcagccagcat

SEQ ID NO: 3129064 - DNA, 25 bp, Homo sapien
gtcctctcactgcttctttggaagt

SEQ ID NO: 3129065 - DNA, 25 bp, Homo sapien
tatcccagtctctttgcatttctcc

SEQ ID NO: 3129066 - DNA, 25 bp, Homo sapien
gatggtgcagtcacagtaagctgcc

SEQ ID NO: 3129067 - DNA, 25 bp, Homo sapien
ctgccagcagagaaggtatggtcca

SEQ ID NO: 3129068 - DNA, 25 bp, Homo sapien
ccaaattttggatggtgcagtcaca

SEQ ID NO: 3129069 - DNA, 25 bp, Homo sapien
cggtgctggagatcaagtatactgt

SEQ ID NO: 3129070 - DNA, 25 bp, Homo sapien
taatcaactttgctcccgagtaaga

SEQ ID NO: 3129071 - DNA, 25 bp, Homo sapien
tccatcccctttgcagactatttag

SEQ ID NO: 3129072 - DNA, 25 bp, Homo sapien
gaccttatcctatcctgcagactgg

SEQ ID NO: 3129073 - DNA, 25 bp, Homo sapien
cccagtttcgggccaatctctttat

SEQ ID NO: 3129074 - DNA, 25 bp, Homo sapien
ctccatcccagtttcgggccaatct

SEQ ID NO: 3129075 - DNA, 25 bp, Homo sapien
catcccagtttcgggccaatctctt

SEQ ID NO: 3129076 - DNA, 25 bp, Homo sapien
cagtttcgggccaatctctttatct

SEQ ID NO: 3129077 - DNA, 25 bp, Homo sapien
caaatggtatgagaaattacaaggc

SEQ ID NO: 3129078 - DNA, 25 bp, Homo sapien
gcatgtgtaatgtggcactcggaga

SEQ ID NO: 3129079 - DNA, 25 bp, Homo sapien
cttccaagtagaacaagtactgctg

SEQ ID NO: 3129080 - DNA, 25 bp, Homo sapien
tgttgccaagcaacggtgcagtggt

SEQ ID NO: 3129081 - DNA, 25 bp, Homo sapien
ctgcagcactctcttggattatgag

SEQ ID NO: 3129082 - DNA, 25 bp, Homo sapien
atgcatcttctagaaagcttcaaat

SEQ ID NO: 3129083 - DNA, 25 bp, Homo sapien
actctcttggattatgagactggcc

SEQ ID NO: 3129084 - DNA, 25 bp, Homo sapien
taggccttaaattctgcagcactct

SEQ ID NO: 3129085 - DNA, 25 bp, Homo sapien
cattgtgcgttgaatagatgtggct

SEQ ID NO: 3129086 - DNA, 25 bp, Homo sapien
ggagagtgacattcgttttatgaag

SEQ ID NO: 3129087 - DNA, 25 bp, Homo sapien
gagggatcatttgtggactgccatt

SEQ ID NO: 3129088 - DNA, 25 bp, Homo sapien
agttagtctctctcaaaggagaggg

SEQ ID NO: 3129089 - DNA, 25 bp, Homo sapien
atggaacagatgcaccagatacgcc

SEQ ID NO: 3129090 - DNA, 25 bp, Homo sapien
ggttggtgtgctctttgcagaagac

SEQ ID NO: 3129091 - DNA, 25 bp, Homo sapien
tttgcgtaaatgctgtctgctgggt

SEQ ID NO: 3129092 - DNA, 25 bp, Homo sapien
catgacatcatttgcgtaaatgctg

SEQ ID NO: 3129093 - DNA, 25 bp, Homo sapien
tgcttctgaaagagcgggcagctct

SEQ ID NO: 3129094 - DNA, 25 bp, Homo sapien
gagcgggcagctcttgtcctttgcc

SEQ ID NO: 3129095 - DNA, 25 bp, Homo sapien
tctcccaagtcagccatacagacat

SEQ ID NO: 3129096 - DNA, 25 bp, Homo sapien
gggatgtcactctctgagagatgct

SEQ ID NO: 3129097 - DNA, 25 bp, Homo sapien
tcctacttgttcgcaggttccaaag

SEQ ID NO: 3129098 - DNA, 25 bp, Homo sapien
ctttcctacttgttcgcaggttcca

SEQ ID NO: 3129099 - DNA, 25 bp, Homo sapien
ttcctacttgttcgcaggttccaaa

SEQ ID NO: 3129100 - DNA, 25 bp, Homo sapien
tttcctacttgttcgcaggttccaa

SEQ ID NO: 3129101 - DNA, 25 bp, Homo sapien
tgaggggtactgacaccaacagtgc

SEQ ID NO: 3129102 - DNA, 25 bp, Homo sapien
ccttgtgaggggtactgacaccaac

SEQ ID NO: 3129103 - DNA, 25 bp, Homo sapien
catcgatgtaccagccttgtgaggg

SEQ ID NO: 3129104 - DNA, 25 bp, Homo sapien
gggtactgacaccaacagtgctcct

SEQ ID NO: 3129105 - DNA, 25 bp, Homo sapien
cataatagacgtgtttggagacaaa

SEQ ID NO: 3129106 - DNA, 25 bp, Homo sapien
aaaccgtcctgtatcagggctatag

SEQ ID NO: 3129107 - DNA, 25 bp, Homo sapien
gacaaagtcaaaatgtgccagagtg

SEQ ID NO: 3129108 - DNA, 25 bp, Homo sapien
tgccagagtgacacggagatcatta

SEQ ID NO: 3129109 - DNA, 25 bp, Homo sapien
ctagaaccttctgctgagagagaca

SEQ ID NO: 3129110 - DNA, 25 bp, Homo sapien
caggatattctgaggaacatagaat

SEQ ID NO: 3129111 - DNA, 25 bp, Homo sapien
acaggatattctgaggaacatagaa

SEQ ID NO: 3129112 - DNA, 25 bp, Homo sapien
ttgaaactcacacgtttgattgctt

SEQ ID NO: 3129113 - DNA, 25 bp, Homo sapien
tgaaactcacacgtttgattgcttt

SEQ ID NO: 3129114 - DNA, 25 bp, Homo sapien
gattggaaagttatatttacggtgc

SEQ ID NO: 3129115 - DNA, 25 bp, Homo sapien
tgtctctgaatccttgcccaccagg

SEQ ID NO: 3129116 - DNA, 25 bp, Homo sapien
gcaagatgcttgcattgggccctaa

SEQ ID NO: 3129117 - DNA, 25 bp, Homo sapien
acatcaaggagccaccagagctgcc

SEQ ID NO: 3129118 - DNA, 25 bp, Homo sapien
gttagctcagatagacagcttccca

SEQ ID NO: 3129119 - DNA, 25 bp, Homo sapien
tgtcctgatctgtgcgttagctcag

SEQ ID NO: 3129120 - DNA, 25 bp, Homo sapien
aggcagcagaggctagtttggaatc

SEQ ID NO: 3129121 - DNA, 25 bp, Homo sapien
atccctgtgtcctgatctgtgcgtt

SEQ ID NO: 3129122 - DNA, 25 bp, Homo sapien
tactgtgctttttctttagcagctg

SEQ ID NO: 3129123 - DNA, 25 bp, Homo sapien
tttctttagcagctgttgctgtgtt

SEQ ID NO: 3129124 - DNA, 25 bp, Homo sapien
ctttttctttagcagctgttgctgt

SEQ ID NO: 3129125 - DNA, 25 bp, Homo sapien
tctttagcagctgttgctgtgttgg

SEQ ID NO: 3129126 - DNA, 25 bp, Homo sapien
tcactgctggcgaggaatgaggagt

SEQ ID NO: 3129127 - DNA, 25 bp, Homo sapien
ctggcgaggaatgaggagtccatca

SEQ ID NO: 3129128 - DNA, 25 bp, Homo sapien
gaggaatgaggagtccatcaaactg

SEQ ID NO: 3129129 - DNA, 25 bp, Homo sapien
gcgaggaatgaggagtccatcaaac

SEQ ID NO: 3129130 - DNA, 25 bp, Homo sapien
cgcgccccggccgaatgtattaact

SEQ ID NO: 3129131 - DNA, 25 bp, Homo sapien
atagtaactctgtggtgtggaacac

SEQ ID NO: 3129132 - DNA, 25 bp, Homo sapien
ccctaatagcatgggtgtgagcagc

SEQ ID NO: 3129133 - DNA, 25 bp, Homo sapien
gccattctgagcataaggattccct

SEQ ID NO: 3129134 - DNA, 25 bp, Homo sapien
aggaagaacttttctttatcagctg

SEQ ID NO: 3129135 - DNA, 25 bp, Homo sapien
agaacttttctttatcagctgccat

SEQ ID NO: 3129136 - DNA, 25 bp, Homo sapien
gaagaacttttctttatcagctgcc

SEQ ID NO: 3129137 - DNA, 25 bp, Homo sapien
taaggaagaacttttctttatcagc

SEQ ID NO: 3129138 - DNA, 25 bp, Homo sapien
aaacacaagaatagcaggtgcatgc

SEQ ID NO: 3129139 - DNA, 25 bp, Homo sapien
gcaggtcagttgcaagtctccggag

SEQ ID NO: 3129140 - DNA, 25 bp, Homo sapien
gcacagcatccatggttctttttga

SEQ ID NO: 3129141 - DNA, 25 bp, Homo sapien
tgcttccaactagtcatgtgcctgg

SEQ ID NO: 3129142 - DNA, 25 bp, Homo sapien
tttcagctggctcaaaggagacctt

SEQ ID NO: 3129143 - DNA, 25 bp, Homo sapien
tggacatctcatacgaaaacaaagg

SEQ ID NO: 3129144 - DNA, 25 bp, Homo sapien
tttgagcacttcatcccagggaaac

SEQ ID NO: 3129145 - DNA, 25 bp, Homo sapien
taaatgttgctccttacttaggccc

SEQ ID NO: 3129146 - DNA, 25 bp, Homo sapien
ctttctgggatgaagcattcttcac

SEQ ID NO: 3129147 - DNA, 25 bp, Homo sapien
tctgggatgaagcattcttcacagc

SEQ ID NO: 3129148 - DNA, 25 bp, Homo sapien
tgggatgaagcattcttcacagctg

SEQ ID NO: 3129149 - DNA, 25 bp, Homo sapien
gggatgaagcattcttcacagctgt

SEQ ID NO: 3129150 - DNA, 25 bp, Homo sapien
ttgctgcttgatgcaagtgccattt

SEQ ID NO: 3129151 - DNA, 25 bp, Homo sapien
cttgctgcttgatgcaagtgccatt

SEQ ID NO: 3129152 - DNA, 25 bp, Homo sapien
ttactccatcaacagttgccgattt

SEQ ID NO: 3129153 - DNA, 25 bp, Homo sapien
cagcactcttagcaggaaacagcat

SEQ ID NO: 3129154 - DNA, 25 bp, Homo sapien
gttgccgatttactctccataccct

SEQ ID NO: 3129155 - DNA, 25 bp, Homo sapien
gaagatgctgccattattactccat

SEQ ID NO: 3129156 - DNA, 25 bp, Homo sapien
tggtttcaggggcccctccatggcg

SEQ ID NO: 3129157 - DNA, 25 bp, Homo sapien
gggcccctccatggcgactgtgagc

SEQ ID NO: 3129158 - DNA, 25 bp, Homo sapien
ctccatggcgactgtgagccaccac

SEQ ID NO: 3129159 - DNA, 25 bp, Homo sapien
tttcaggggcccctccatggcgact

SEQ ID NO: 3129160 - DNA, 25 bp, Homo sapien
gcaggatagagtcccacaatggaca

SEQ ID NO: 3129161 - DNA, 25 bp, Homo sapien
ggtaagatgatgctgggcccaacac

SEQ ID NO: 3129162 - DNA, 25 bp, Homo sapien
cagcagtagacgctgtagggtggta

SEQ ID NO: 3129163 - DNA, 25 bp, Homo sapien
gcagaatagctgtgttcagcaggat

SEQ ID NO: 3129164 - DNA, 25 bp, Homo sapien
tcttcttctctgtatgccagcttca

SEQ ID NO: 3129165 - DNA, 25 bp, Homo sapien
accatagacagctcccaaccactag

SEQ ID NO: 3129166 - DNA, 25 bp, Homo sapien
gcttcaatccagacaggaccataga

SEQ ID NO: 3129167 - DNA, 25 bp, Homo sapien
ccatttcctaatcctgcttcttctt

SEQ ID NO: 3129168 - DNA, 25 bp, Homo sapien
catggtactcgttgaagagttttag

SEQ ID NO: 3129169 - DNA, 25 bp, Homo sapien
tccagagtgtccttgacaatctgct

SEQ ID NO: 3129170 - DNA, 25 bp, Homo sapien
gatttatagcagctgttattccaga

SEQ ID NO: 3129171 - DNA, 25 bp, Homo sapien
ttaggatgctcctccaatcgccaca

SEQ ID NO: 3129172 - DNA, 25 bp, Homo sapien
taccttcctctaagttcagaagtga

SEQ ID NO: 3129173 - DNA, 25 bp, Homo sapien
aatcaccaacttcacaacaccaacc

SEQ ID NO: 3129174 - DNA, 25 bp, Homo sapien
accaacccgttgctgcatcttcttt

SEQ ID NO: 3129175 - DNA, 25 bp, Homo sapien
gagactatcaattcctgccatacct

SEQ ID NO: 3129176 - DNA, 25 bp, Homo sapien
taaatcatgtgtgttctttgttctc

SEQ ID NO: 3129177 - DNA, 25 bp, Homo sapien
tgcctgctgcccttgatataaatca

SEQ ID NO: 3129178 - DNA, 25 bp, Homo sapien
tctgggaaatttttctgggcctctc

SEQ ID NO: 3129179 - DNA, 25 bp, Homo sapien
tctctgatgaggccaacttctccca

SEQ ID NO: 3129180 - DNA, 25 bp, Homo sapien
cgcagctccattggatgcataatag

SEQ ID NO: 3129181 - DNA, 25 bp, Homo sapien
cttttctaaccgcagctccattgga

SEQ ID NO: 3129182 - DNA, 25 bp, Homo sapien
agacagagtacctgcaaaaccacca

SEQ ID NO: 3129183 - DNA, 25 bp, Homo sapien
aagacagacagagtacctgcaaaac

SEQ ID NO: 3129184 - DNA, 25 bp, Homo sapien
ttccttcagtgtccagctttctttg

SEQ ID NO: 3129185 - DNA, 25 bp, Homo sapien
ttagcattttccttcagtgtccagc

SEQ ID NO: 3129186 - DNA, 25 bp, Homo sapien
ccttcagtgtccagctttctttgat

SEQ ID NO: 3129187 - DNA, 25 bp, Homo sapien
ttcagtgtccagctttctttgatcc

SEQ ID NO: 3129188 - DNA, 25 bp, Homo sapien
gatgctcattgtctaagcaggcccc

SEQ ID NO: 3129189 - DNA, 25 bp, Homo sapien
acagggactatgactgacaggatgc

SEQ ID NO: 3129190 - DNA, 25 bp, Homo sapien
gttgtacagggactatgactgacag

SEQ ID NO: 3129191 - DNA, 25 bp, Homo sapien
gacaggatgctcattgtctaagcag

SEQ ID NO: 3129192 - DNA, 25 bp, Homo sapien
gagcaggaagtggatacaatgttta

SEQ ID NO: 3129193 - DNA, 25 bp, Homo sapien
ttgagagcaggaagtggatacaatg

SEQ ID NO: 3129194 - DNA, 25 bp, Homo sapien
aggaagtggatacaatgtttaattc

SEQ ID NO: 3129195 - DNA, 25 bp, Homo sapien
gagagcaggaagtggatacaatgtt

SEQ ID NO: 3129196 - DNA, 25 bp, Homo sapien
gatatatgccaaaactgaaaaatat

SEQ ID NO: 3129197 - DNA, 25 bp, Homo sapien
tgaaaaatatttttcaaattgcgta

SEQ ID NO: 3129198 - DNA, 25 bp, Homo sapien
ctttttgcagatatatgccaaaact

SEQ ID NO: 3129199 - DNA, 25 bp, Homo sapien
aaatatttttcaaattgcgtaacat

SEQ ID NO: 3129200 - DNA, 25 bp, Homo sapien
tttcaaaagacgtatgattcttgaa

SEQ ID NO: 3129201 - DNA, 25 bp, Homo sapien
tcaaaagacgtatgattcttgaaga

SEQ ID NO: 3129202 - DNA, 25 bp, Homo sapien
aaagacgtatgattcttgaagataa

SEQ ID NO: 3129203 - DNA, 25 bp, Homo sapien
caaaagacgtatgattcttgaagat

SEQ ID NO: 3129204 - DNA, 25 bp, Homo sapien
tgtggctttcagcattctctgttca

SEQ ID NO: 3129205 - DNA, 25 bp, Homo sapien
tggctctgttctctttggtgaatgc

SEQ ID NO: 3129206 - DNA, 25 bp, Homo sapien
aaaacgatgtctctaaagccttctc

SEQ ID NO: 3129207 - DNA, 25 bp, Homo sapien
ttaaaacgatgtctctaaagccttc

SEQ ID NO: 3129208 - DNA, 25 bp, Homo sapien
cagatataactttactaagggagga

SEQ ID NO: 3129209 - DNA, 25 bp, Homo sapien
gcaattcttgctgtgagtctgtatg

SEQ ID NO: 3129210 - DNA, 25 bp, Homo sapien
ggaggaaattggatttgcgaaagca

SEQ ID NO: 3129211 - DNA, 25 bp, Homo sapien
tctaacataggaggccagtgaacaa

SEQ ID NO: 3129212 - DNA, 25 bp, Homo sapien
aactggaacgctaagtgacaagact

SEQ ID NO: 3129213 - DNA, 25 bp, Homo sapien
tttcaggaagagtcagaaactggaa

SEQ ID NO: 3129214 - DNA, 25 bp, Homo sapien
ggaacgctaagtgacaagactggag

SEQ ID NO: 3129215 - DNA, 25 bp, Homo sapien
catgaagtatggtcatccaagtttc

SEQ ID NO: 3129216 - DNA, 25 bp, Homo sapien
cagcacagcagtgagcagtagcact

SEQ ID NO: 3129217 - DNA, 25 bp, Homo sapien
cagtgagcagtagcactatcttcat

SEQ ID NO: 3129218 - DNA, 25 bp, Homo sapien
acagcagtgagcagtagcactatct

SEQ ID NO: 3129219 - DNA, 25 bp, Homo sapien
gcacagcagtgagcagtagcactat

SEQ ID NO: 3129220 - DNA, 25 bp, Homo sapien
catttactccaactaccacagtgaa

SEQ ID NO: 3129221 - DNA, 25 bp, Homo sapien
tcatgactcccttgatacataagtt

SEQ ID NO: 3129222 - DNA, 25 bp, Homo sapien
tttttctaccgctggccttgtatac

SEQ ID NO: 3129223 - DNA, 25 bp, Homo sapien
gcttgttcagcgtccactctaccat

SEQ ID NO: 3129224 - DNA, 25 bp, Homo sapien
tattaagtgggatcatagaacaacc

SEQ ID NO: 3129225 - DNA, 25 bp, Homo sapien
taagtgtcctattagcaccatgaag

SEQ ID NO: 3129226 - DNA, 25 bp, Homo sapien
tcagggcacagtttacatagtgggt

SEQ ID NO: 3129227 - DNA, 25 bp, Homo sapien
caagacccacgaattttgcctgaag

SEQ ID NO: 3129228 - DNA, 25 bp, Homo sapien
cctcccatgctgatctcgtgctcat

SEQ ID NO: 3129229 - DNA, 25 bp, Homo sapien
tcctcccatgctgatctcgtgctca

SEQ ID NO: 3129230 - DNA, 25 bp, Homo sapien
tttcctcccatgctgatctcgtgct

SEQ ID NO: 3129231 - DNA, 25 bp, Homo sapien
ttcctcccatgctgatctcgtgctc

SEQ ID NO: 3129232 - DNA, 25 bp, Homo sapien
cctttcttctcacagctgcttcttt

SEQ ID NO: 3129233 - DNA, 25 bp, Homo sapien
tggagcaccctttcttctcacagct

SEQ ID NO: 3129234 - DNA, 25 bp, Homo sapien
ggagcaccctttcttctcacagctg

SEQ ID NO: 3129235 - DNA, 25 bp, Homo sapien
ttcttctcacagctgcttctttcat

SEQ ID NO: 3129236 - DNA, 25 bp, Homo sapien
ctgtccttgttaccctcttcctcca

SEQ ID NO: 3129237 - DNA, 25 bp, Homo sapien
tgtccttgttaccctcttcctccat

SEQ ID NO: 3129238 - DNA, 25 bp, Homo sapien
aagcccttggcttcagcatgtcccc

SEQ ID NO: 3129239 - DNA, 25 bp, Homo sapien
catgtcccccaggattggcatggcc

SEQ ID NO: 3129240 - DNA, 25 bp, Homo sapien
caagcccttggcttcagcatgtccc

SEQ ID NO: 3129241 - DNA, 25 bp, Homo sapien
gtcccccaggattggcatggccact

SEQ ID NO: 3129242 - DNA, 25 bp, Homo sapien
aagaatgaccacaggctgaattggt

SEQ ID NO: 3129243 - DNA, 25 bp, Homo sapien
tgtagttctccccactacgcaggga

SEQ ID NO: 3129244 - DNA, 25 bp, Homo sapien
cactacgcagggagtcctgtttgct

SEQ ID NO: 3129245 - DNA, 25 bp, Homo sapien
gaattggtgggagtgtagttctccc

SEQ ID NO: 3129246 - DNA, 25 bp, Homo sapien
ccttaagcattttcttccgtatgaa

SEQ ID NO: 3129247 - DNA, 25 bp, Homo sapien
aagtcagctggtcctgcaagtctac

SEQ ID NO: 3129248 - DNA, 25 bp, Homo sapien
tccaggtgctaccaggtgaagtcag

SEQ ID NO: 3129249 - DNA, 25 bp, Homo sapien
ttccaggtgctaccaggtgaagtca

SEQ ID NO: 3129250 - DNA, 25 bp, Homo sapien
atgtttttattttccctgctttcag

SEQ ID NO: 3129251 - DNA, 25 bp, Homo sapien
ttattttccctgctttcaggtacat

SEQ ID NO: 3129252 - DNA, 25 bp, Homo sapien
tttattttccctgctttcaggtaca

SEQ ID NO: 3129253 - DNA, 25 bp, Homo sapien
tattgtcccctagaatgcgtttcct

SEQ ID NO: 3129254 - DNA, 25 bp, Homo sapien
gagcgctttgacctccatgctattg

SEQ ID NO: 3129255 - DNA, 25 bp, Homo sapien
caccgtgtacaatctggccatgcag

SEQ ID NO: 3129256 - DNA, 25 bp, Homo sapien
tattgtctgtgcacatcttgagcgc

SEQ ID NO: 3129257 - DNA, 25 bp, Homo sapien
gctggagccagtgttgaggattcca

SEQ ID NO: 3129258 - DNA, 25 bp, Homo sapien
ctggagccagtgttgaggattccaa

SEQ ID NO: 3129259 - DNA, 25 bp, Homo sapien
ggctggagccagtgttgaggattcc

SEQ ID NO: 3129260 - DNA, 25 bp, Homo sapien
tttaacttcctctgctggcttccca

SEQ ID NO: 3129261 - DNA, 25 bp, Homo sapien
ttaggttttaacttcctctgctggc

SEQ ID NO: 3129262 - DNA, 25 bp, Homo sapien
ttaacttcctctgctggcttcccat

SEQ ID NO: 3129263 - DNA, 25 bp, Homo sapien
ggttttaacttcctctgctggcttc

SEQ ID NO: 3129264 - DNA, 25 bp, Homo sapien
ccatcagtgtgatctaattcttcct

SEQ ID NO: 3129265 - DNA, 25 bp, Homo sapien
ccaggactgaccttcaatcacagca

SEQ ID NO: 3129266 - DNA, 25 bp, Homo sapien
acacatccatcagtgtgatctaatt

SEQ ID NO: 3129267 - DNA, 25 bp, Homo sapien
tgctctttccaggactgaccttcaa

SEQ ID NO: 3129268 - DNA, 25 bp, Homo sapien
gtgtagttgaggttcctcctttggc

SEQ ID NO: 3129269 - DNA, 25 bp, Homo sapien
gtagttgaggttcctcctttggctg

SEQ ID NO: 3129270 - DNA, 25 bp, Homo sapien
tgtagttgaggttcctcctttggct

SEQ ID NO: 3129271 - DNA, 25 bp, Homo sapien
gctgtgtgtgattctttcacacttg

SEQ ID NO: 3129272 - DNA, 25 bp, Homo sapien
caaccctcatgatctgtggctgcag

SEQ ID NO: 3129273 - DNA, 25 bp, Homo sapien
tgcaatgtctcagaaggctttaagg

SEQ ID NO: 3129274 - DNA, 25 bp, Homo sapien
taagggagtctgaataattcggcca

SEQ ID NO: 3129275 - DNA, 25 bp, Homo sapien
gataccgcctttggctgccctgggt

SEQ ID NO: 3129276 - DNA, 25 bp, Homo sapien
aatactctctaacctcaactgtgag

SEQ ID NO: 3129277 - DNA, 25 bp, Homo sapien
tccctgggctttatcataattcacg

SEQ ID NO: 3129278 - DNA, 25 bp, Homo sapien
ctattgccggagaagatcacacaat

SEQ ID NO: 3129279 - DNA, 25 bp, Homo sapien
tgacacagcagagtatccctgggct

SEQ ID NO: 3129280 - DNA, 25 bp, Homo sapien
tgtggttgaaccttgttcactggcc

SEQ ID NO: 3129281 - DNA, 25 bp, Homo sapien
tggttgaaccttgttcactggccat

SEQ ID NO: 3129282 - DNA, 25 bp, Homo sapien
gtggttgaaccttgttcactggcca

SEQ ID NO: 3129283 - DNA, 25 bp, Homo sapien
taggctgccttctggcagggcttgc

SEQ ID NO: 3129284 - DNA, 25 bp, Homo sapien
ggccatgacatgagcggctccgtga

SEQ ID NO: 3129285 - DNA, 25 bp, Homo sapien
aacagctgtgccagtgttgatgtca

SEQ ID NO: 3129286 - DNA, 25 bp, Homo sapien
gcttctgcgttcgtttctaaaattc

SEQ ID NO: 3129287 - DNA, 25 bp, Homo sapien
ggtgagcctcacttcatacagccag

SEQ ID NO: 3129288 - DNA, 25 bp, Homo sapien
cagtgtgacacagcctctaaagcaa

SEQ ID NO: 3129289 - DNA, 25 bp, Homo sapien
aactcaagtcccaatttccagtgtg

SEQ ID NO: 3129290 - DNA, 25 bp, Homo sapien
tgcagcagtgcttgacttccctggg

SEQ ID NO: 3129291 - DNA, 25 bp, Homo sapien
gcttgtgcaagtaggatgctggcat

SEQ ID NO: 3129292 - DNA, 25 bp, Homo sapien
tcttattctctctccgtattctctt

SEQ ID NO: 3129293 - DNA, 25 bp, Homo sapien
cttgtgattgggcttgtgcaagtag

SEQ ID NO: 3129294 - DNA, 25 bp, Homo sapien
caggctgttgtctggaacactgctg

SEQ ID NO: 3129295 - DNA, 25 bp, Homo sapien
tggttcaaaagccaggttgaattac

SEQ ID NO: 3129296 - DNA, 25 bp, Homo sapien
cttggttcaaaagccaggttgaatt

SEQ ID NO: 3129297 - DNA, 25 bp, Homo sapien
ttggttcaaaagccaggttgaatta

SEQ ID NO: 3129298 - DNA, 25 bp, Homo sapien
acagaggtgaaagggccctctgtcc

SEQ ID NO: 3129299 - DNA, 25 bp, Homo sapien
tatacacacagaggtgaaagggccc

SEQ ID NO: 3129300 - DNA, 25 bp, Homo sapien
cagaggtgaaagggccctctgtcct

SEQ ID NO: 3129301 - DNA, 25 bp, Homo sapien
atacacacagaggtgaaagggccct

SEQ ID NO: 3129302 - DNA, 25 bp, Homo sapien
tttaggagtcacattcacgtcttgc

SEQ ID NO: 3129303 - DNA, 25 bp, Homo sapien
gctgatgttaactccccgttggtaa

SEQ ID NO: 3129304 - DNA, 25 bp, Homo sapien
caaatatttagaacctgaagatcct

SEQ ID NO: 3129305 - DNA, 25 bp, Homo sapien
tggtaaagccttttaggagtcacat

SEQ ID NO: 3129306 - DNA, 25 bp, Homo sapien
gttgatgtaattggcacttatttaa

SEQ ID NO: 3129307 - DNA, 25 bp, Homo sapien
gatgtaattggcacttatttaattg

SEQ ID NO: 3129308 - DNA, 25 bp, Homo sapien
attttgttgatgtaattggcactta

SEQ ID NO: 3129309 - DNA, 25 bp, Homo sapien
agcattttgttgatgtaattggcac

SEQ ID NO: 3129310 - DNA, 25 bp, Homo sapien
acctgacggcggtcacttcctggga

SEQ ID NO: 3129311 - DNA, 25 bp, Homo sapien
ccggcgcaggtgacctgacggcggt

SEQ ID NO: 3129312 - DNA, 25 bp, Homo sapien
ccttgctgggctgcgaggttctggc

SEQ ID NO: 3129313 - DNA, 25 bp, Homo sapien
tggcctgtgacttggccggcgcagg

SEQ ID NO: 3129314 - DNA, 25 bp, Homo sapien
cattgaagccttgtgtatttgtcct

SEQ ID NO: 3129315 - DNA, 25 bp, Homo sapien
tctacgagtaaacattgaagccttg

SEQ ID NO: 3129316 - DNA, 25 bp, Homo sapien
cattttctaaatccaagtgaaagag

SEQ ID NO: 3129317 - DNA, 25 bp, Homo sapien
aagtgaaagagatagggcagtctac

SEQ ID NO: 3129318 - DNA, 25 bp, Homo sapien
tcagagccgtttgcccctctctgtg

SEQ ID NO: 3129319 - DNA, 25 bp, Homo sapien
caggtgatagtagggcttgccgtta

SEQ ID NO: 3129320 - DNA, 25 bp, Homo sapien
atggctctcagaccctagccacgtg

SEQ ID NO: 3129321 - DNA, 25 bp, Homo sapien
gatggcataatctgtcaggccaaag

SEQ ID NO: 3129322 - DNA, 25 bp, Homo sapien
gtctctctgttgtgagggcttcctc

SEQ ID NO: 3129323 - DNA, 25 bp, Homo sapien
ctttgcatggcaagtgggattctgc

SEQ ID NO: 3129324 - DNA, 25 bp, Homo sapien
aggcctcaatgaaatccactgccct

SEQ ID NO: 3129325 - DNA, 25 bp, Homo sapien
actgccctatgggatctcaccagca

SEQ ID NO: 3129326 - DNA, 25 bp, Homo sapien
agcaggagatatacacggggattgc

SEQ ID NO: 3129327 - DNA, 25 bp, Homo sapien
agatatacacggggattgcagctgc

SEQ ID NO: 3129328 - DNA, 25 bp, Homo sapien
gatatacacggggattgcagctgcc

SEQ ID NO: 3129329 - DNA, 25 bp, Homo sapien
aggagatatacacggggattgcagc

SEQ ID NO: 3129330 - DNA, 25 bp, Homo sapien
tgtattctccaaactccgttcttat

SEQ ID NO: 3129331 - DNA, 25 bp, Homo sapien
cccttgggtcagtggcttgttgtct

SEQ ID NO: 3129332 - DNA, 25 bp, Homo sapien
tgagacctagaggtgataagtgttc

SEQ ID NO: 3129333 - DNA, 25 bp, Homo sapien
cctagaggtgataagtgttcctgta

SEQ ID NO: 3129334 - DNA, 25 bp, Homo sapien
catgtgctttgtggaggatcaggct

SEQ ID NO: 3129335 - DNA, 25 bp, Homo sapien
tggagacagagtgaataacatgtgc

SEQ ID NO: 3129336 - DNA, 25 bp, Homo sapien
gctgtcctgagcactgagttttgca

SEQ ID NO: 3129337 - DNA, 25 bp, Homo sapien
gctgagagtgctcagtgctgtcctg

SEQ ID NO: 3129338 - DNA, 25 bp, Homo sapien
tcatgagctctgagtgaaggctgac

SEQ ID NO: 3129339 - DNA, 25 bp, Homo sapien
gggaagatacgatcagattatgaaa

SEQ ID NO: 3129340 - DNA, 25 bp, Homo sapien
attatgaaaggccttcatgctaaaa

SEQ ID NO: 3129341 - DNA, 25 bp, Homo sapien
tcatagaaagggaagatacgatcag

SEQ ID NO: 3129342 - DNA, 25 bp, Homo sapien
tagggaggacgatcatagaaaggga

SEQ ID NO: 3129343 - DNA, 25 bp, Homo sapien
tctggaatgacgaagtaatatttgg

SEQ ID NO: 3129344 - DNA, 25 bp, Homo sapien
tgcttctggaatgacgaagtaatat

SEQ ID NO: 3129345 - DNA, 25 bp, Homo sapien
agggaaggcttcatgtctaggtaga

SEQ ID NO: 3129346 - DNA, 25 bp, Homo sapien
cttcatgtctaggtagagctgcttc

SEQ ID NO: 3129347 - DNA, 25 bp, Homo sapien
tcttgcatctctttggacgcaggag

SEQ ID NO: 3129348 - DNA, 25 bp, Homo sapien
gcaggagcatgcttaacagcactgt

SEQ ID NO: 3129349 - DNA, 25 bp, Homo sapien
ttttccccagacagcctcggcactg

SEQ ID NO: 3129350 - DNA, 25 bp, Homo sapien
cactgtggcttaccactgttgccat

SEQ ID NO: 3129351 - DNA, 25 bp, Homo sapien
aggaggatggcaaactgactcccag

SEQ ID NO: 3129352 - DNA, 25 bp, Homo sapien
gaggatggcaaactgactcccagtt

SEQ ID NO: 3129353 - DNA, 25 bp, Homo sapien
tccagccagggatcatcagtgcttg

SEQ ID NO: 3129354 - DNA, 25 bp, Homo sapien
tcagtgcttgtctcgaggggctgtc

SEQ ID NO: 3129355 - DNA, 25 bp, Homo sapien
ctcttgcctgcctgtcctggttggt

SEQ ID NO: 3129356 - DNA, 25 bp, Homo sapien
tggttgttgctatattccctgtcaa

SEQ ID NO: 3129357 - DNA, 25 bp, Homo sapien
tgttgctatattccctgtcaaccat

SEQ ID NO: 3129358 - DNA, 25 bp, Homo sapien
cctggttggttgttgctatattccc

SEQ ID NO: 3129359 - DNA, 25 bp, Homo sapien
catgcagttttccagcgctggccca

SEQ ID NO: 3129360 - DNA, 25 bp, Homo sapien
cccactgccggaaatgcagaagttt

SEQ ID NO: 3129361 - DNA, 25 bp, Homo sapien
tgcatgcagttttccagcgctggcc

SEQ ID NO: 3129362 - DNA, 25 bp, Homo sapien
ggcccactgccggaaatgcagaagt

SEQ ID NO: 3129363 - DNA, 25 bp, Homo sapien
ggcagttgggctttccacagtgttt

SEQ ID NO: 3129364 - DNA, 25 bp, Homo sapien
cgtataaattagatgtagtaaagga

SEQ ID NO: 3129365 - DNA, 25 bp, Homo sapien
tgagtttctggcagttgggctttcc

SEQ ID NO: 3129366 - DNA, 25 bp, Homo sapien
aatgaacatgcaggggtgagtttct

SEQ ID NO: 3129367 - DNA, 25 bp, Homo sapien
tctcttcatgacgtaggaattccgg

SEQ ID NO: 3129368 - DNA, 25 bp, Homo sapien
ccttcagtaggatgatgtgagttgc

SEQ ID NO: 3129369 - DNA, 25 bp, Homo sapien
tgaggcgcctgaacatcgaacagag

SEQ ID NO: 3129370 - DNA, 25 bp, Homo sapien
tgtctggtgactcttccgttggtag

SEQ ID NO: 3129371 - DNA, 25 bp, Homo sapien
gacgcagtgtctccacaagagatga

SEQ ID NO: 3129372 - DNA, 25 bp, Homo sapien
gaatcgtgtagtctgagaggcttca

SEQ ID NO: 3129373 - DNA, 25 bp, Homo sapien
gaggcttcaggctctgattttgtaa

SEQ ID NO: 3129374 - DNA, 25 bp, Homo sapien
tgctttgggaagacgcagtgtctcc

SEQ ID NO: 3129375 - DNA, 25 bp, Homo sapien
cttgctgaggtcataccgtaacttt

SEQ ID NO: 3129376 - DNA, 25 bp, Homo sapien
tcaggggtccctatagtgtctaaag

SEQ ID NO: 3129377 - DNA, 25 bp, Homo sapien
gtctaaaggctttagtctctttgga

SEQ ID NO: 3129378 - DNA, 25 bp, Homo sapien
tccttaggcataacatcaggggtcc

SEQ ID NO: 3129379 - DNA, 25 bp, Homo sapien
ctgctggtttctttctgtggcagag

SEQ ID NO: 3129380 - DNA, 25 bp, Homo sapien
atgctgctggtttctttctgtggca

SEQ ID NO: 3129381 - DNA, 25 bp, Homo sapien
gctggtttctttctgtggcagagcc

SEQ ID NO: 3129382 - DNA, 25 bp, Homo sapien
ggtttctttctgtggcagagcccat

SEQ ID NO: 3129383 - DNA, 25 bp, Homo sapien
tgtagggtaaacatgaagcctcggc

SEQ ID NO: 3129384 - DNA, 25 bp, Homo sapien
tcctgtggtgaactagcgtctgggc

SEQ ID NO: 3129385 - DNA, 25 bp, Homo sapien
tacacactcggatgcgtggaacggg

SEQ ID NO: 3129386 - DNA, 25 bp, Homo sapien
tgtgcgacccgcgtagaaataggcg

SEQ ID NO: 3129387 - DNA, 25 bp, Homo sapien
gagggcaagcacgcgcgggagggag

SEQ ID NO: 3129388 - DNA, 25 bp, Homo sapien
aagcacgcgcgggagggagggacgg

SEQ ID NO: 3129389 - DNA, 25 bp, Homo sapien
ggcaagcacgcgcgggagggaggga

SEQ ID NO: 3129390 - DNA, 25 bp, Homo sapien
gcaagcacgcgcgggagggagggac

SEQ ID NO: 3129391 - DNA, 25 bp, Homo sapien
gggcgggagcgagcggcgtgtcccg

SEQ ID NO: 3129392 - DNA, 25 bp, Homo sapien
ctggcaaacagtggtcgggagcatt

SEQ ID NO: 3129393 - DNA, 25 bp, Homo sapien
agcgagcggcgtgtcccgttgggtc

SEQ ID NO: 3129394 - DNA, 25 bp, Homo sapien
cgggagcattgggcgggcgcgcgca

SEQ ID NO: 3129395 - DNA, 25 bp, Homo sapien
ggcctctaagaagccggtgacaggc

SEQ ID NO: 3129396 - DNA, 25 bp, Homo sapien
gcccaggactgctacttcggagcgg

SEQ ID NO: 3129397 - DNA, 25 bp, Homo sapien
aggcaacggtggtggcgacagtggg

SEQ ID NO: 3129398 - DNA, 25 bp, Homo sapien
ggcgtaaggaccatacgcctcgccg

SEQ ID NO: 3129399 - DNA, 25 bp, Homo sapien
tgtgtcagccccagaagcagctcat

SEQ ID NO: 3129400 - DNA, 25 bp, Homo sapien
cgatcgtgccgccgccggggtggtg

SEQ ID NO: 3129401 - DNA, 25 bp, Homo sapien
ccgcgccggctgctgtgtcagcccc

SEQ ID NO: 3129402 - DNA, 25 bp, Homo sapien
gccccagaagcagctcatcctgcat

SEQ ID NO: 3129403 - DNA, 25 bp, Homo sapien
gtggggagggctgaactctttcctc

SEQ ID NO: 3129404 - DNA, 25 bp, Homo sapien
acgctgccgcggggcgaagtcctgc

SEQ ID NO: 3129405 - DNA, 25 bp, Homo sapien
gctgccgcggggcgaagtcctgcgg

SEQ ID NO: 3129406 - DNA, 25 bp, Homo sapien
ctgccggacgctgccgcggggcgaa

SEQ ID NO: 3129407 - DNA, 25 bp, Homo sapien
ggacgctgccgcggggcgaagtcct

SEQ ID NO: 3129408 - DNA, 25 bp, Homo sapien
cggcgtcgaggaggccaagcccgca

SEQ ID NO: 3129409 - DNA, 25 bp, Homo sapien
ctggggtcttgcgagggctgcccgc

SEQ ID NO: 3129410 - DNA, 25 bp, Homo sapien
ccaagcccgcattgggggactcggc

SEQ ID NO: 3129411 - DNA, 25 bp, Homo sapien
cattgggggactcggcggcgctgcc

SEQ ID NO: 3129412 - DNA, 25 bp, Homo sapien
tctgcaccgaccagggggtgccgaa

SEQ ID NO: 3129413 - DNA, 25 bp, Homo sapien
tggtggcagacgagccgggcggctg

SEQ ID NO: 3129414 - DNA, 25 bp, Homo sapien
gggtggcggcgacgcggtctgcacc

SEQ ID NO: 3129415 - DNA, 25 bp, Homo sapien
agggggtgccgaagccgggcagcgg

SEQ ID NO: 3129416 - DNA, 25 bp, Homo sapien
tcgtcggaacgctgagcccagtgca

SEQ ID NO: 3129417 - DNA, 25 bp, Homo sapien
ggtagaagccgttctctgagtcggg

SEQ ID NO: 3129418 - DNA, 25 bp, Homo sapien
ctgttgaggtatattcatggcgggc

SEQ ID NO: 3129419 - DNA, 25 bp, Homo sapien
ccgggttcatggacgacggcagccc

SEQ ID NO: 3129420 - DNA, 25 bp, Homo sapien
gcgggctgacgggcgacctccggct

SEQ ID NO: 3129421 - DNA, 25 bp, Homo sapien
gctgcgggctgacgggcgacctccg

SEQ ID NO: 3129422 - DNA, 25 bp, Homo sapien
gagctgcgggctgacgggcgacctc

SEQ ID NO: 3129423 - DNA, 25 bp, Homo sapien
ggagctgcgggctgacgggcgacct

SEQ ID NO: 3129424 - DNA, 25 bp, Homo sapien
aagatcttgaatcaaaaaagatccg

SEQ ID NO: 3129425 - DNA, 25 bp, Homo sapien
tgaatcaaaaaagatccggaaaata

SEQ ID NO: 3129426 - DNA, 25 bp, Homo sapien
tacttaaaatacacacggcccacat

SEQ ID NO: 3129427 - DNA, 25 bp, Homo sapien
cacccaaaaattgtattgagggaat

SEQ ID NO: 3129428 - DNA, 25 bp, Homo sapien
tgctctgatggttgctccagggaga

SEQ ID NO: 3129429 - DNA, 25 bp, Homo sapien
ccccagccactgctctgatggttgc

SEQ ID NO: 3129430 - DNA, 25 bp, Homo sapien
tgctccccaggacatacttccagtg

SEQ ID NO: 3129431 - DNA, 25 bp, Homo sapien
cccaggacatacttccagtgcccca

SEQ ID NO: 3129432 - DNA, 25 bp, Homo sapien
gtgctatgacattaccagaaaacgg

SEQ ID NO: 3129433 - DNA, 25 bp, Homo sapien
gagtaaatttcggtggtgctatgac

SEQ ID NO: 3129434 - DNA, 25 bp, Homo sapien
tcagtgatggagttgagcgagtaaa

SEQ ID NO: 3129435 - DNA, 25 bp, Homo sapien
gattcccatgtttccggttctacga

SEQ ID NO: 3129436 - DNA, 25 bp, Homo sapien
gagtgaatctgagccccaagctggc

SEQ ID NO: 3129437 - DNA, 25 bp, Homo sapien
gctggcaactgcaaactagatctca

SEQ ID NO: 3129438 - DNA, 25 bp, Homo sapien
cagtgcaccaactatcttggagtga

SEQ ID NO: 3129439 - DNA, 25 bp, Homo sapien
ctggatgttccggctgcagtgcacc

SEQ ID NO: 3129440 - DNA, 25 bp, Homo sapien
gacaatacgttgcaaattgcatgaa

SEQ ID NO: 3129441 - DNA, 25 bp, Homo sapien
ctttctgcacagagtaattatgtcc

SEQ ID NO: 3129442 - DNA, 25 bp, Homo sapien
taataaggcttaactggaccagact

SEQ ID NO: 3129443 - DNA, 25 bp, Homo sapien
taccatttctaggtgaagaccctgg

SEQ ID NO: 3129444 - DNA, 25 bp, Homo sapien
cagatctccaaattatgatttacca

SEQ ID NO: 3129445 - DNA, 25 bp, Homo sapien
ttttctgagacagatctccaaatta

SEQ ID NO: 3129446 - DNA, 25 bp, Homo sapien
tttaccacattatcataacagccta

SEQ ID NO: 3129447 - DNA, 25 bp, Homo sapien
cataacagcctattaaagattaatg

SEQ ID NO: 3129448 - DNA, 25 bp, Homo sapien
gatttagcagatgcttgaacatgta

SEQ ID NO: 3129449 - DNA, 25 bp, Homo sapien
ccatactcagtagcagatgacgtgc

SEQ ID NO: 3129450 - DNA, 25 bp, Homo sapien
tattctgcttaactagaaagatcag

SEQ ID NO: 3129451 - DNA, 25 bp, Homo sapien
gaaaatgaggtactcttccaaagaa

SEQ ID NO: 3129452 - DNA, 25 bp, Homo sapien
gaaacctataggcttacatgcaaaa

SEQ ID NO: 3129453 - DNA, 25 bp, Homo sapien
caagttaccatgaacgcaacaatac

SEQ ID NO: 3129454 - DNA, 25 bp, Homo sapien
ggaaaagtgtgcatgcaatctattc

SEQ ID NO: 3129455 - DNA, 25 bp, Homo sapien
caatcaactaaatgggctttcagaa

SEQ ID NO: 3129456 - DNA, 25 bp, Homo sapien
tcaaactgtcatacattctacttcg

SEQ ID NO: 3129457 - DNA, 25 bp, Homo sapien
tctgctctcataatatcgataaggg

SEQ ID NO: 3129458 - DNA, 25 bp, Homo sapien
gataagggaattttccaaagagtgc

SEQ ID NO: 3129459 - DNA, 25 bp, Homo sapien
aactgtcatacattctacttcgatc

SEQ ID NO: 3129460 - DNA, 25 bp, Homo sapien
ctagtaagataagcaaattggtgta

SEQ ID NO: 3129461 - DNA, 25 bp, Homo sapien
gtgtaagagagttttatattggata

SEQ ID NO: 3129462 - DNA, 25 bp, Homo sapien
atattggatataggtgctacttagg

SEQ ID NO: 3129463 - DNA, 25 bp, Homo sapien
gctacttaggtttcactttcatata

SEQ ID NO: 3129464 - DNA, 25 bp, Homo sapien
tcctggatgtggatagctcaatcga

SEQ ID NO: 3129465 - DNA, 25 bp, Homo sapien
cctggatgtggatagctcaatcgac

SEQ ID NO: 3129466 - DNA, 25 bp, Homo sapien
catcaacagattgtcagttcctgga

SEQ ID NO: 3129467 - DNA, 25 bp, Homo sapien
aaatatgacagttacacatttagag

SEQ ID NO: 3129468 - DNA, 25 bp, Homo sapien
agagcagaaaaatcatacttcatgc

SEQ ID NO: 3129469 - DNA, 25 bp, Homo sapien
tcaactgggtcaacataaaactaac

SEQ ID NO: 3129470 - DNA, 25 bp, Homo sapien
ttcatgctaacttcactaatattaa

SEQ ID NO: 3129471 - DNA, 25 bp, Homo sapien
cataatgtacacactaacggcttaa

SEQ ID NO: 3129472 - DNA, 25 bp, Homo sapien
gtataggtgtagagcagacactacc

SEQ ID NO: 3129473 - DNA, 25 bp, Homo sapien
cactaccagtctcttaaaggttagg

SEQ ID NO: 3129474 - DNA, 25 bp, Homo sapien
gaattactcaactgtgctatcattg

SEQ ID NO: 3129475 - DNA, 25 bp, Homo sapien
ctttactggcaaatgaactagactt

SEQ ID NO: 3129476 - DNA, 25 bp, Homo sapien
atcatgattaagtggggttcacccc

SEQ ID NO: 3129477 - DNA, 25 bp, Homo sapien
tttttacaagtgcaatactaaaatc

SEQ ID NO: 3129478 - DNA, 25 bp, Homo sapien
gttcaccccaggaacgtaagattga

SEQ ID NO: 3129479 - DNA, 25 bp, Homo sapien
tctccattttggtgagctgaataac

SEQ ID NO: 3129480 - DNA, 25 bp, Homo sapien
catcaatatctggaggaagaccacc

SEQ ID NO: 3129481 - DNA, 25 bp, Homo sapien
caacaaaaacttttcgagagaagcg

SEQ ID NO: 3129482 - DNA, 25 bp, Homo sapien
tgtgaccatcatcaagcaagccatc

SEQ ID NO: 3129483 - DNA, 25 bp, Homo sapien
gcatgcacacattatggtgatacaa

SEQ ID NO: 3129484 - DNA, 25 bp, Homo sapien
tcaactactttcatatttcaacagg

SEQ ID NO: 3129485 - DNA, 25 bp, Homo sapien
tctctaggtggtaaaaactttcata

SEQ ID NO: 3129486 - DNA, 25 bp, Homo sapien
aacttttgattaccaagcattgcag

SEQ ID NO: 3129487 - DNA, 25 bp, Homo sapien
ttatgaggccaatctactaccaaag

SEQ ID NO: 3129488 - DNA, 25 bp, Homo sapien
ttggtggaaaataggacttgctttc

SEQ ID NO: 3129489 - DNA, 25 bp, Homo sapien
tctactaccaaaggcccaaatcttc

SEQ ID NO: 3129490 - DNA, 25 bp, Homo sapien
gccaatctactaccaaaggcccaaa

SEQ ID NO: 3129491 - DNA, 25 bp, Homo sapien
cacagatggtgacttgatcatgcga

SEQ ID NO: 3129492 - DNA, 25 bp, Homo sapien
cgacttgcatgtgaaggttagcaca

SEQ ID NO: 3129493 - DNA, 25 bp, Homo sapien
ggtgtcttcctagcaataactgact

SEQ ID NO: 3129494 - DNA, 25 bp, Homo sapien
ccattagcaattctgactagctgaa

SEQ ID NO: 3129495 - DNA, 25 bp, Homo sapien
taatttcaaaccgaggtcagcccca

SEQ ID NO: 3129496 - DNA, 25 bp, Homo sapien
tctcccatgcgctttctagtagtga

SEQ ID NO: 3129497 - DNA, 25 bp, Homo sapien
ggtccaggaaatcccctaagcagag

SEQ ID NO: 3129498 - DNA, 25 bp, Homo sapien
gacttttagactggaacgcacttgg

SEQ ID NO: 3129499 - DNA, 25 bp, Homo sapien
tcaatgagtgcctgaactgagctct

SEQ ID NO: 3129500 - DNA, 25 bp, Homo sapien
gaaacacacagatagagttttccat

SEQ ID NO: 3129501 - DNA, 25 bp, Homo sapien
caagcatcaatgagtgcctgaactg

SEQ ID NO: 3129502 - DNA, 25 bp, Homo sapien
tggtttgtccttgatagtagggcta

SEQ ID NO: 3129503 - DNA, 25 bp, Homo sapien
cagcccttaatggcctaggaacacc

SEQ ID NO: 3129504 - DNA, 25 bp, Homo sapien
agcccttaatggcctaggaacacct

SEQ ID NO: 3129505 - DNA, 25 bp, Homo sapien
gcccttaatggcctaggaacacctc

SEQ ID NO: 3129506 - DNA, 25 bp, Homo sapien
tacagccggtccatgatcatagcaa

SEQ ID NO: 3129507 - DNA, 25 bp, Homo sapien
tatcaccatgctgaagctgaacaaa

SEQ ID NO: 3129508 - DNA, 25 bp, Homo sapien
tgcataacaaactccaccatacagc

SEQ ID NO: 3129509 - DNA, 25 bp, Homo sapien
tgaacaaaccgagcactaatggcag

SEQ ID NO: 3129510 - DNA, 25 bp, Homo sapien
tagaatatttgaccttactggctga

SEQ ID NO: 3129511 - DNA, 25 bp, Homo sapien
gactccaatgtacaggctcttaaaa

SEQ ID NO: 3129512 - DNA, 25 bp, Homo sapien
catttaaataacactctccgtcaag

SEQ ID NO: 3129513 - DNA, 25 bp, Homo sapien
aaaattttgacatggctgcacaatg

SEQ ID NO: 3129514 - DNA, 25 bp, Homo sapien
ttaatgtgccaaacagccccagaag

SEQ ID NO: 3129515 - DNA, 25 bp, Homo sapien
gcatgcatggtctagtcaatcggta

SEQ ID NO: 3129516 - DNA, 25 bp, Homo sapien
tgaggactacttctagcatgcatgg

SEQ ID NO: 3129517 - DNA, 25 bp, Homo sapien
tgtgaactgaacctatgctgcattt

SEQ ID NO: 3129518 - DNA, 25 bp, Homo sapien
tctgctccaaataatcggtccttca

SEQ ID NO: 3129519 - DNA, 25 bp, Homo sapien
catgtatctcaattcatctgctctg

SEQ ID NO: 3129520 - DNA, 25 bp, Homo sapien
aagagtcagtactctgctccaaata

SEQ ID NO: 3129521 - DNA, 25 bp, Homo sapien
ttcaatgcctttttaagaaggcaca

SEQ ID NO: 3129522 - DNA, 25 bp, Homo sapien
gctatcagataggaactaaaccaca

SEQ ID NO: 3129523 - DNA, 25 bp, Homo sapien
aaacaccagatgttcaggagttaca

SEQ ID NO: 3129524 - DNA, 25 bp, Homo sapien
tccataatacctgataaaacaccag

SEQ ID NO: 3129525 - DNA, 25 bp, Homo sapien
ggtgactgctttccagctatcagat

SEQ ID NO: 3129526 - DNA, 25 bp, Homo sapien
tggatctgacgtgggcgatcagcac

SEQ ID NO: 3129527 - DNA, 25 bp, Homo sapien
ccagcacgagagtggatatttgccc

SEQ ID NO: 3129528 - DNA, 25 bp, Homo sapien
ccaatggcttatggaactcacgtcc

SEQ ID NO: 3129529 - DNA, 25 bp, Homo sapien
gatcagcaccttcctttaccaatgg

SEQ ID NO: 3129530 - DNA, 25 bp, Homo sapien
gtatcttcagacacagtaagccaca

SEQ ID NO: 3129531 - DNA, 25 bp, Homo sapien
gggtgaaaagcagaagaatgcactt

SEQ ID NO: 3129532 - DNA, 25 bp, Homo sapien
aagaggcttgtagtgttttggctgc

SEQ ID NO: 3129533 - DNA, 25 bp, Homo sapien
tctttccttgttaaacagaggccag

SEQ ID NO: 3129534 - DNA, 25 bp, Homo sapien
tatatagcagcagactgtgttgccc

SEQ ID NO: 3129535 - DNA, 25 bp, Homo sapien
cacatgaattagaaccgcacgtcac

SEQ ID NO: 3129536 - DNA, 25 bp, Homo sapien
gacagaagaccccaatatttatagg

SEQ ID NO: 3129537 - DNA, 25 bp, Homo sapien
acagtgaccccagtttagacagaag

SEQ ID NO: 3129538 - DNA, 25 bp, Homo sapien
cagtcatacttttgggcagcaatat

SEQ ID NO: 3129539 - DNA, 25 bp, Homo sapien
gaatcgaggttagtcagccttccaa

SEQ ID NO: 3129540 - DNA, 25 bp, Homo sapien
cagccagatgcaacagggataaaat

SEQ ID NO: 3129541 - DNA, 25 bp, Homo sapien
gcaaaaagggtgttctagtacattc

SEQ ID NO: 3129542 - DNA, 25 bp, Homo sapien
aaacactccataaaccacttgtgcg

SEQ ID NO: 3129543 - DNA, 25 bp, Homo sapien
gtgtccataaaagcatgggttctct

SEQ ID NO: 3129544 - DNA, 25 bp, Homo sapien
gctttaacaccccattaggaatata

SEQ ID NO: 3129545 - DNA, 25 bp, Homo sapien
tgtgcgattctatacagaaactggg

SEQ ID NO: 3129546 - DNA, 25 bp, Homo sapien
tttctcctcgatgggctggtccttc

SEQ ID NO: 3129547 - DNA, 25 bp, Homo sapien
ctggagagctgaaaccaagggtcaa

SEQ ID NO: 3129548 - DNA, 25 bp, Homo sapien
aaatggaccattgccgcctagggaa

SEQ ID NO: 3129549 - DNA, 25 bp, Homo sapien
tgtttagattttgccactggagagc

SEQ ID NO: 3129550 - DNA, 25 bp, Homo sapien
agaggagagacttgtagcaactgac

SEQ ID NO: 3129551 - DNA, 25 bp, Homo sapien
ccatagccagtactgcccaagctgt

SEQ ID NO: 3129552 - DNA, 25 bp, Homo sapien
gtactgcccaagctgtgagaatgag

SEQ ID NO: 3129553 - DNA, 25 bp, Homo sapien
tagcaactgacaatgttgtttaaga

SEQ ID NO: 3129554 - DNA, 25 bp, Homo sapien
gacactgctttgtggaccagctctc

SEQ ID NO: 3129555 - DNA, 25 bp, Homo sapien
agctgaatgagctagcaagtgccca

SEQ ID NO: 3129556 - DNA, 25 bp, Homo sapien
tagcaagtgcccagtggtcgggcac

SEQ ID NO: 3129557 - DNA, 25 bp, Homo sapien
accatgacttaggaggctctgttag

SEQ ID NO: 3129558 - DNA, 25 bp, Homo sapien
gtgcagaaagcactgcattgtcgga

SEQ ID NO: 3129559 - DNA, 25 bp, Homo sapien
tgcagagccagcagatggtgcagaa

SEQ ID NO: 3129560 - DNA, 25 bp, Homo sapien
agggcagttcaagcgcaggtaacaa

SEQ ID NO: 3129561 - DNA, 25 bp, Homo sapien
acagccagggatgtttcagaaaggg

SEQ ID NO: 3129562 - DNA, 25 bp, Homo sapien
tgtagacataagcagaaagggcagt

SEQ ID NO: 3129563 - DNA, 25 bp, Homo sapien
gaaagggcaagtacaccgagagccc

SEQ ID NO: 3129564 - DNA, 25 bp, Homo sapien
ttactggaatgcagatacggtcatg

SEQ ID NO: 3129565 - DNA, 25 bp, Homo sapien
aggagaagagacttgcggcaagctt

SEQ ID NO: 3129566 - DNA, 25 bp, Homo sapien
cagatacggtcatgagggaggagta

SEQ ID NO: 3129567 - DNA, 25 bp, Homo sapien
gagacttgcggcaagcttttctttt

SEQ ID NO: 3129568 - DNA, 25 bp, Homo sapien
ctcggggcattgagttttcttgttc

SEQ ID NO: 3129569 - DNA, 25 bp, Homo sapien
tctgttttgttcagcgtggcattca

SEQ ID NO: 3129570 - DNA, 25 bp, Homo sapien
ttcagcgtggcattcaagattcctt

SEQ ID NO: 3129571 - DNA, 25 bp, Homo sapien
gacgactgagccttctcggggcatt

SEQ ID NO: 3129572 - DNA, 25 bp, Homo sapien
gaaaaaggtgaattccaatagagcc

SEQ ID NO: 3129573 - DNA, 25 bp, Homo sapien
aaaggtgaattccaatagagcccct

SEQ ID NO: 3129574 - DNA, 25 bp, Homo sapien
aggtgaattccaatagagcccctgc

SEQ ID NO: 3129575 - DNA, 25 bp, Homo sapien
gagaaaaaggtgaattccaatagag

SEQ ID NO: 3129576 - DNA, 25 bp, Homo sapien
caggcaacaggcagtatagtctagt

SEQ ID NO: 3129577 - DNA, 25 bp, Homo sapien
atcattgcaggcaacaggcagtata

SEQ ID NO: 3129578 - DNA, 25 bp, Homo sapien
cattgcaggcaacaggcagtatagt

SEQ ID NO: 3129579 - DNA, 25 bp, Homo sapien
ttgcaggcaacaggcagtatagtct

SEQ ID NO: 3129580 - DNA, 25 bp, Homo sapien
cagcaggttggcagaaccaaagtgg

SEQ ID NO: 3129581 - DNA, 25 bp, Homo sapien
cacatgtgttgtttctacagtgaag

SEQ ID NO: 3129582 - DNA, 25 bp, Homo sapien
caaagtggactgtgttggcctgaag

SEQ ID NO: 3129583 - DNA, 25 bp, Homo sapien
tggcctgaagagagaggccgttcca

SEQ ID NO: 3129584 - DNA, 25 bp, Homo sapien
tgctgaagtgaacattcaggaacaa

SEQ ID NO: 3129585 - DNA, 25 bp, Homo sapien
taagtgtgtttactaggctcattcg

SEQ ID NO: 3129586 - DNA, 25 bp, Homo sapien
caagtcttcatagaacctgaggtca

SEQ ID NO: 3129587 - DNA, 25 bp, Homo sapien
cgtctcctccgtcactgcatatttg

SEQ ID NO: 3129588 - DNA, 25 bp, Homo sapien
ggatgagtgatagcaaggaccttag

SEQ ID NO: 3129589 - DNA, 25 bp, Homo sapien
ctagtgtgggactcatgcaggtcct

SEQ ID NO: 3129590 - DNA, 25 bp, Homo sapien
gtgtgggactcatgcaggtccttgt

SEQ ID NO: 3129591 - DNA, 25 bp, Homo sapien
gagtgatagcaaggaccttagttct

SEQ ID NO: 3129592 - DNA, 25 bp, Homo sapien
tcttctgcatcttccaatcagaaaa

SEQ ID NO: 3129593 - DNA, 25 bp, Homo sapien
ttaacttcgtcttctgcatcttcca

SEQ ID NO: 3129594 - DNA, 25 bp, Homo sapien
tctgcatcttccaatcagaaaagta

SEQ ID NO: 3129595 - DNA, 25 bp, Homo sapien
cgtcttctgcatcttccaatcagaa

SEQ ID NO: 3129596 - DNA, 25 bp, Homo sapien
cgttcggcatcctggataagttcca

SEQ ID NO: 3129597 - DNA, 25 bp, Homo sapien
tcggcatcctggataagttccacat

SEQ ID NO: 3129598 - DNA, 25 bp, Homo sapien
tttaacgttcggcatcctggataag

SEQ ID NO: 3129599 - DNA, 25 bp, Homo sapien
tttttaacgttcggcatcctggata

SEQ ID NO: 3129600 - DNA, 25 bp, Homo sapien
ggcccaaacctccagctcgttgtga

SEQ ID NO: 3129601 - DNA, 25 bp, Homo sapien
tggccagctagtgggatctcctcaa

SEQ ID NO: 3129602 - DNA, 25 bp, Homo sapien
ttatccggttgagcctggaatgggc

SEQ ID NO: 3129603 - DNA, 25 bp, Homo sapien
catgcacaaaagtggattcagctgg

SEQ ID NO: 3129604 - DNA, 25 bp, Homo sapien
gtactctccaacatggaaactggca

SEQ ID NO: 3129605 - DNA, 25 bp, Homo sapien
tcattgtactctccaacatggaaac

SEQ ID NO: 3129606 - DNA, 25 bp, Homo sapien
caggcagggatggagtttccctcat

SEQ ID NO: 3129607 - DNA, 25 bp, Homo sapien
gggatggagtttccctcatcattgt

SEQ ID NO: 3129608 - DNA, 25 bp, Homo sapien
ccaaaactgccactactgtcagatt

SEQ ID NO: 3129609 - DNA, 25 bp, Homo sapien
tactgtcagattggcatggctctgc

SEQ ID NO: 3129610 - DNA, 25 bp, Homo sapien
actactgtcagattggcatggctct

SEQ ID NO: 3129611 - DNA, 25 bp, Homo sapien
aagacaccaaaactgccactactgt

SEQ ID NO: 3129612 - DNA, 25 bp, Homo sapien
caagggcttgccccttttaccattg

SEQ ID NO: 3129613 - DNA, 25 bp, Homo sapien
ggcttgccccttttaccattgcatg

SEQ ID NO: 3129614 - DNA, 25 bp, Homo sapien
taccattgcatgtaatatctgtaat

SEQ ID NO: 3129615 - DNA, 25 bp, Homo sapien
tgccccttttaccattgcatgtaat

SEQ ID NO: 3129616 - DNA, 25 bp, Homo sapien
tgccgaagggaattcagggccctga

SEQ ID NO: 3129617 - DNA, 25 bp, Homo sapien
gaagggaattcagggccctgaatga

SEQ ID NO: 3129618 - DNA, 25 bp, Homo sapien
ttgccgaagggaattcagggccctg

SEQ ID NO: 3129619 - DNA, 25 bp, Homo sapien
ccgaagggaattcagggccctgaat

SEQ ID NO: 3129620 - DNA, 25 bp, Homo sapien
tgttttgatttgtccccgatctcca

SEQ ID NO: 3129621 - DNA, 25 bp, Homo sapien
tggcatttgcccaaaggaccagaag

SEQ ID NO: 3129622 - DNA, 25 bp, Homo sapien
taagttgccaatttagcagaatctt

SEQ ID NO: 3129623 - DNA, 25 bp, Homo sapien
cagaagctgacagaaccaagaatcc

SEQ ID NO: 3129624 - DNA, 25 bp, Homo sapien
gagctgttttatctcgcaggtatgc

SEQ ID NO: 3129625 - DNA, 25 bp, Homo sapien
tcttccaccagaatagtctccaggg

SEQ ID NO: 3129626 - DNA, 25 bp, Homo sapien
gtaactagtcagcattgcttgttct

SEQ ID NO: 3129627 - DNA, 25 bp, Homo sapien
gtatgcctgtggtgagaaaactctg

SEQ ID NO: 3129628 - DNA, 25 bp, Homo sapien
ggcaattaactccacatccagattt

SEQ ID NO: 3129629 - DNA, 25 bp, Homo sapien
ggggtgtagggtggctccatttatg

SEQ ID NO: 3129630 - DNA, 25 bp, Homo sapien
gggtgtagggtggctccatttatgc

SEQ ID NO: 3129631 - DNA, 25 bp, Homo sapien
tggttttctgctcaaggatatcttg

SEQ ID NO: 3129632 - DNA, 25 bp, Homo sapien
tcttagggttagctgaatggttttc

SEQ ID NO: 3129633 - DNA, 25 bp, Homo sapien
caaggatatcttggccaatctccat

SEQ ID NO: 3129634 - DNA, 25 bp, Homo sapien
agttcttagggttagctgaatggtt

SEQ ID NO: 3129635 - DNA, 25 bp, Homo sapien
ggcttaaccaagcagagggctcgac

SEQ ID NO: 3129636 - DNA, 25 bp, Homo sapien
gcctatgacattgaggagatgctca

SEQ ID NO: 3129637 - DNA, 25 bp, Homo sapien
tcattgctatagtggtaccaaagag

SEQ ID NO: 3129638 - DNA, 25 bp, Homo sapien
taccaaagagtgaagtggcttaacc

SEQ ID NO: 3129639 - DNA, 25 bp, Homo sapien
ggtgtttggccctctcgttctatga

SEQ ID NO: 3129640 - DNA, 25 bp, Homo sapien
tctatgagctcctccttacatctca

SEQ ID NO: 3129641 - DNA, 25 bp, Homo sapien
tcaccactatctctagagcagtgtc

SEQ ID NO: 3129642 - DNA, 25 bp, Homo sapien
ccagctcagtggactgacagcagag

SEQ ID NO: 3129643 - DNA, 25 bp, Homo sapien
caaactgccattcactgaggccaca

SEQ ID NO: 3129644 - DNA, 25 bp, Homo sapien
tttcctacaaactgccattcactga

SEQ ID NO: 3129645 - DNA, 25 bp, Homo sapien
gaggccacatgcttttcctactggc

SEQ ID NO: 3129646 - DNA, 25 bp, Homo sapien
caagagctaattttcctacaaactg

SEQ ID NO: 3129647 - DNA, 25 bp, Homo sapien
tattcgaagctactccaaaacaatg

SEQ ID NO: 3129648 - DNA, 25 bp, Homo sapien
ggagctcatgctgttgtacgaagtt

SEQ ID NO: 3129649 - DNA, 25 bp, Homo sapien
tgaaaaataaagtgctcgtctgagc

SEQ ID NO: 3129650 - DNA, 25 bp, Homo sapien
gaatgcgtttgaagcttggagctca

SEQ ID NO: 3129651 - DNA, 25 bp, Homo sapien
ccccaaaacatgaggctttcttgct

SEQ ID NO: 3129652 - DNA, 25 bp, Homo sapien
tgctttggttgtcccatgaatgtag

SEQ ID NO: 3129653 - DNA, 25 bp, Homo sapien
gctttggttgtcccatgaatgtagt

SEQ ID NO: 3129654 - DNA, 25 bp, Homo sapien
ttgctttggttgtcccatgaatgta

SEQ ID NO: 3129655 - DNA, 25 bp, Homo sapien
agggtgcactcaggcgccatgcaaa

SEQ ID NO: 3129656 - DNA, 25 bp, Homo sapien
cattggagcccgtgaggaagttcgc

SEQ ID NO: 3129657 - DNA, 25 bp, Homo sapien
gcttctcagcagtcacgtcatgcca

SEQ ID NO: 3129658 - DNA, 25 bp, Homo sapien
ggaagttcgcgctccggcttctcag

SEQ ID NO: 3129659 - DNA, 25 bp, Homo sapien
ttggttcaaatacgcttaggcctcc

SEQ ID NO: 3129660 - DNA, 25 bp, Homo sapien
atgtactagtctcgggcgccgcttg

SEQ ID NO: 3129661 - DNA, 25 bp, Homo sapien
gacaattagtgtagactctccctag

SEQ ID NO: 3129662 - DNA, 25 bp, Homo sapien
actgtggttctctactttggctgca

SEQ ID NO: 3129663 - DNA, 25 bp, Homo sapien
cattttattcagaggccatggtgtt

SEQ ID NO: 3129664 - DNA, 25 bp, Homo sapien
cttgtgttgcatccatggtggcaga

SEQ ID NO: 3129665 - DNA, 25 bp, Homo sapien
ggtgttgggacattatctttcagca

SEQ ID NO: 3129666 - DNA, 25 bp, Homo sapien
tcatatagacccaggcttgaatcct

SEQ ID NO: 3129667 - DNA, 25 bp, Homo sapien
tagttgtcccgctccctggttagga

SEQ ID NO: 3129668 - DNA, 25 bp, Homo sapien
tgaggacaaagtgcgcatagccagc

SEQ ID NO: 3129669 - DNA, 25 bp, Homo sapien
caaacagggctacttggcattcacc

SEQ ID NO: 3129670 - DNA, 25 bp, Homo sapien
tctgagcctcatgtaccctagttgg

SEQ ID NO: 3129671 - DNA, 25 bp, Homo sapien
cactccttggtcctatttgtctcct

SEQ ID NO: 3129672 - DNA, 25 bp, Homo sapien
tctgcacgttttaggaggcacttac

SEQ ID NO: 3129673 - DNA, 25 bp, Homo sapien
tccacactccttggtcctatttgtc

SEQ ID NO: 3129674 - DNA, 25 bp, Homo sapien
ttaggaggcacttacacattgccat

SEQ ID NO: 3129675 - DNA, 25 bp, Homo sapien
tgacttgtcatagtgttttctattt

SEQ ID NO: 3129676 - DNA, 25 bp, Homo sapien
ttctatttgctatttcatgtaactc

SEQ ID NO: 3129677 - DNA, 25 bp, Homo sapien
tttgctatttcatgtaactcccttg

SEQ ID NO: 3129678 - DNA, 25 bp, Homo sapien
tatttgctatttcatgtaactccct

SEQ ID NO: 3129679 - DNA, 25 bp, Homo sapien
ggtactggggcttgcttgtgtttat

SEQ ID NO: 3129680 - DNA, 25 bp, Homo sapien
gggaaaggagcctgcttgagctgta

SEQ ID NO: 3129681 - DNA, 25 bp, Homo sapien
aagatgtgtctctgggcgaagggcc

SEQ ID NO: 3129682 - DNA, 25 bp, Homo sapien
tctctgggcgaagggccatgcttca

SEQ ID NO: 3129683 - DNA, 25 bp, Homo sapien
tgcttggcaccccagtaatctttgg

SEQ ID NO: 3129684 - DNA, 25 bp, Homo sapien
cctattttatgtagttctagttggg

SEQ ID NO: 3129685 - DNA, 25 bp, Homo sapien
tgtagttctagttgggctgtctgct

SEQ ID NO: 3129686 - DNA, 25 bp, Homo sapien
ttgggctgtctgctcagtgtccttc

SEQ ID NO: 3129687 - DNA, 25 bp, Homo sapien
gaaatatcactgactgatacaactt

SEQ ID NO: 3129688 - DNA, 25 bp, Homo sapien
ttcaactgaaatatcactgactgat

SEQ ID NO: 3129689 - DNA, 25 bp, Homo sapien
actgaaatatcactgactgatacaa

SEQ ID NO: 3129690 - DNA, 25 bp, Homo sapien
tgtattcaactgaaatatcactgac

SEQ ID NO: 3129691 - DNA, 25 bp, Homo sapien
tttcatctgtgtcattggctgacac

SEQ ID NO: 3129692 - DNA, 25 bp, Homo sapien
tccttttaggagtgtatttcatctt

SEQ ID NO: 3129693 - DNA, 25 bp, Homo sapien
tatccacctcttggtacttgtctcc

SEQ ID NO: 3129694 - DNA, 25 bp, Homo sapien
tggctgacaccactaggtgccaggg

SEQ ID NO: 3129695 - DNA, 25 bp, Homo sapien
tatgatccaagcaactgtggccctt

SEQ ID NO: 3129696 - DNA, 25 bp, Homo sapien
tgccagcttttgtcccaatttgtag

SEQ ID NO: 3129697 - DNA, 25 bp, Homo sapien
catcacttcaaccaacgtaatcggc

SEQ ID NO: 3129698 - DNA, 25 bp, Homo sapien
gaatggcccacatggtatgatccaa

SEQ ID NO: 3129699 - DNA, 25 bp, Homo sapien
tagagaaaggctacacaccattcag

SEQ ID NO: 3129700 - DNA, 25 bp, Homo sapien
tgaaacctggcttcacgggttaaga

SEQ ID NO: 3129701 - DNA, 25 bp, Homo sapien
tgtattgaaacagctgagagcctct

SEQ ID NO: 3129702 - DNA, 25 bp, Homo sapien
gaatcttggcatgcactgatagaga

SEQ ID NO: 3129703 - DNA, 25 bp, Homo sapien
gggaagataagagattgcatttgtc

SEQ ID NO: 3129704 - DNA, 25 bp, Homo sapien
tgccctgaacctagcaacactctgg

SEQ ID NO: 3129705 - DNA, 25 bp, Homo sapien
tgccaagaaggacaacattagggtc

SEQ ID NO: 3129706 - DNA, 25 bp, Homo sapien
acattagggtccatggtttgcatag

SEQ ID NO: 3129707 - DNA, 25 bp, Homo sapien
tggacacagctgtgagtcaggatcc

SEQ ID NO: 3129708 - DNA, 25 bp, Homo sapien
cacctaatcttgaagatctgatctt

SEQ ID NO: 3129709 - DNA, 25 bp, Homo sapien
tggttctgcgaggacgctgtatcca

SEQ ID NO: 3129710 - DNA, 25 bp, Homo sapien
gcgaggacgctgtatccactgagaa

SEQ ID NO: 3129711 - DNA, 25 bp, Homo sapien
cttggttctgcgaggacgctgtatc

SEQ ID NO: 3129712 - DNA, 25 bp, Homo sapien
tctgcgaggacgctgtatccactga

SEQ ID NO: 3129713 - DNA, 25 bp, Homo sapien
gaggtttggttcacacactggcagt

SEQ ID NO: 3129714 - DNA, 25 bp, Homo sapien
ggtgagaggtttggttcacacactg

SEQ ID NO: 3129715 - DNA, 25 bp, Homo sapien
gaagttgggctgtaccaggtcctcc

SEQ ID NO: 3129716 - DNA, 25 bp, Homo sapien
cattccacgcaaagagaagtgagga

SEQ ID NO: 3129717 - DNA, 25 bp, Homo sapien
tccctttacagagtcccttgtgttg

SEQ ID NO: 3129718 - DNA, 25 bp, Homo sapien
gagagcagcgagcacacatagttca

SEQ ID NO: 3129719 - DNA, 25 bp, Homo sapien
cctaggtggaccataaactcctttg

SEQ ID NO: 3129720 - DNA, 25 bp, Homo sapien
gtgtatgcgtgtcttcctaggtgga

SEQ ID NO: 3129721 - DNA, 25 bp, Homo sapien
ttccttcctgttcgcgtgtgaaaca

SEQ ID NO: 3129722 - DNA, 25 bp, Homo sapien
tgcaaaagatttgttcccctaatag

SEQ ID NO: 3129723 - DNA, 25 bp, Homo sapien
tagattacaggctgccttcgtgctg

SEQ ID NO: 3129724 - DNA, 25 bp, Homo sapien
aatgcaatttggatgacaggcactg

SEQ ID NO: 3129725 - DNA, 25 bp, Homo sapien
tgctgcaggattctaaatccacaag

SEQ ID NO: 3129726 - DNA, 25 bp, Homo sapien
tgaggatctttcatgagagctcagt

SEQ ID NO: 3129727 - DNA, 25 bp, Homo sapien
gattctaaatccacaagagactgag

SEQ ID NO: 3129728 - DNA, 25 bp, Homo sapien
caagagactgaggatctttcatgag

SEQ ID NO: 3129729 - DNA, 25 bp, Homo sapien
cgagtttcttgagtgtcctccttcc

SEQ ID NO: 3129730 - DNA, 25 bp, Homo sapien
tttcttgagtgtcctccttccccat

SEQ ID NO: 3129731 - DNA, 25 bp, Homo sapien
ctgtgcgagtttcttgagtgtcctc

SEQ ID NO: 3129732 - DNA, 25 bp, Homo sapien
tgtgcgagtttcttgagtgtcctcc

SEQ ID NO: 3129733 - DNA, 25 bp, Homo sapien
ctctcctttcaactgattaccccgg

SEQ ID NO: 3129734 - DNA, 25 bp, Homo sapien
tcctggaaggccgatgcgaccatgg

SEQ ID NO: 3129735 - DNA, 25 bp, Homo sapien
gcccaggggaaccatttgctccagg

SEQ ID NO: 3129736 - DNA, 25 bp, Homo sapien
caaaacttgtaacatagagcaagac

SEQ ID NO: 3129737 - DNA, 25 bp, Homo sapien
tagcggtccagtcttacctctcaaa

SEQ ID NO: 3129738 - DNA, 25 bp, Homo sapien
ctagcggtccagtcttacctctcaa

SEQ ID NO: 3129739 - DNA, 25 bp, Homo sapien
agcggtccagtcttacctctcaaac

SEQ ID NO: 3129740 - DNA, 25 bp, Homo sapien
gagaataagctgtctgcccaacctg

SEQ ID NO: 3129741 - DNA, 25 bp, Homo sapien
caacctgggtctgagaagaggccat

SEQ ID NO: 3129742 - DNA, 25 bp, Homo sapien
tgtcaacgtataagagaaacccgga

SEQ ID NO: 3129743 - DNA, 25 bp, Homo sapien
atagatgactgtggaccccgaagcc

SEQ ID NO: 3129744 - DNA, 25 bp, Homo sapien
tatcactcagggcatttaatagaaa

SEQ ID NO: 3129745 - DNA, 25 bp, Homo sapien
tctgagtgggagtctctttggatcc

SEQ ID NO: 3129746 - DNA, 25 bp, Homo sapien
tttggatcccattcctgcttgttcc

SEQ ID NO: 3129747 - DNA, 25 bp, Homo sapien
tggaaccccagattcaatcagagtg

SEQ ID NO: 3129748 - DNA, 25 bp, Homo sapien
taaatcctccaattctcaggctggc

SEQ ID NO: 3129749 - DNA, 25 bp, Homo sapien
tacctagcagatccatgagaagcaa

SEQ ID NO: 3129750 - DNA, 25 bp, Homo sapien
tgtacacatgtcctgactcagaagg

SEQ ID NO: 3129751 - DNA, 25 bp, Homo sapien
gaaatttactagtcagagctggctc

SEQ ID NO: 3129752 - DNA, 25 bp, Homo sapien
gatggcaaggaacacacacgtggtc

SEQ ID NO: 3129753 - DNA, 25 bp, Homo sapien
ggttcacaggcttaagtccaacaga

SEQ ID NO: 3129754 - DNA, 25 bp, Homo sapien
tgcagaccgtagcaaggaccaagtg

SEQ ID NO: 3129755 - DNA, 25 bp, Homo sapien
tgcagaagctacatcctcaagggct

SEQ ID NO: 3129756 - DNA, 25 bp, Homo sapien
agcacatactatagcagtcatcatg

SEQ ID NO: 3129757 - DNA, 25 bp, Homo sapien
aatatatgagcaatgtgccagcacg

SEQ ID NO: 3129758 - DNA, 25 bp, Homo sapien
acatatttcataacctctctgcctc

SEQ ID NO: 3129759 - DNA, 25 bp, Homo sapien
tggcgcttcactgcctagggctact

SEQ ID NO: 3129760 - DNA, 25 bp, Homo sapien
tataaggcctggtccaagcagaact

SEQ ID NO: 3129761 - DNA, 25 bp, Homo sapien
ctataaggcctggtccaagcagaac

SEQ ID NO: 3129762 - DNA, 25 bp, Homo sapien
gctggaagtaatggcctataaggcc

SEQ ID NO: 3129763 - DNA, 25 bp, Homo sapien
ggcctataaggcctggtccaagcag

SEQ ID NO: 3129764 - DNA, 25 bp, Homo sapien
gaacgtatggtttctgcacagacct

SEQ ID NO: 3129765 - DNA, 25 bp, Homo sapien
ggccctagctagtgaagaacgtatg

SEQ ID NO: 3129766 - DNA, 25 bp, Homo sapien
tagagcttgtaagatgacatttcca

SEQ ID NO: 3129767 - DNA, 25 bp, Homo sapien
gagcattcactgcagagttcactaa

SEQ ID NO: 3129768 - DNA, 25 bp, Homo sapien
gaagctgcagccatgtcttggagca

SEQ ID NO: 3129769 - DNA, 25 bp, Homo sapien
agattctgcattctaggatggaagt

SEQ ID NO: 3129770 - DNA, 25 bp, Homo sapien
cgaatgaatgattaagtcactgact

SEQ ID NO: 3129771 - DNA, 25 bp, Homo sapien
ccagagactaggattatgggacatc

SEQ ID NO: 3129772 - DNA, 25 bp, Homo sapien
tcatggacattcaatatatacttgt

SEQ ID NO: 3129773 - DNA, 25 bp, Homo sapien
cactgacttattggctgtggttcca

SEQ ID NO: 3129774 - DNA, 25 bp, Homo sapien
gtcagcccatatccattagaatata

SEQ ID NO: 3129775 - DNA, 25 bp, Homo sapien
ttgttaatgtcagcccatatccatt

SEQ ID NO: 3129776 - DNA, 25 bp, Homo sapien
tcagcccatatccattagaatatag

SEQ ID NO: 3129777 - DNA, 25 bp, Homo sapien
ttaatgtcagcccatatccattaga

SEQ ID NO: 3129778 - DNA, 25 bp, Homo sapien
ctgacaaagaacaatgaagaagtca

SEQ ID NO: 3129779 - DNA, 25 bp, Homo sapien
gacaaagaacaatgaagaagtcagg

SEQ ID NO: 3129780 - DNA, 25 bp, Homo sapien
caaagaacaatgaagaagtcaggca

SEQ ID NO: 3129781 - DNA, 25 bp, Homo sapien
aaagaacaatgaagaagtcaggcat

SEQ ID NO: 3129782 - DNA, 25 bp, Homo sapien
tttgtgaaaatgcaaaagggagaga

SEQ ID NO: 3129783 - DNA, 25 bp, Homo sapien
ttgtgaaaatgcaaaagggagagaa

SEQ ID NO: 3129784 - DNA, 25 bp, Homo sapien
tgtgaaaatgcaaaagggagagaat

SEQ ID NO: 3129785 - DNA, 25 bp, Homo sapien
ctttgtgaaaatgcaaaagggagag

SEQ ID NO: 3129786 - DNA, 25 bp, Homo sapien
ttcgaacctttgagttcttattctg

SEQ ID NO: 3129787 - DNA, 25 bp, Homo sapien
ggctgtcttcgaacctttgagttct

SEQ ID NO: 3129788 - DNA, 25 bp, Homo sapien
ttggctgtcttcgaacctttgagtt

SEQ ID NO: 3129789 - DNA, 25 bp, Homo sapien
ttcttggctgtcttcgaacctttga

SEQ ID NO: 3129790 - DNA, 25 bp, Homo sapien
atttaccctgcacgggatgctccca

SEQ ID NO: 3129791 - DNA, 25 bp, Homo sapien
gatctgccagcaggctcgggagaaa

SEQ ID NO: 3129792 - DNA, 25 bp, Homo sapien
cttgaaaagatttaccctgcacggg

SEQ ID NO: 3129793 - DNA, 25 bp, Homo sapien
gggaggatctgccagcaggctcggg

SEQ ID NO: 3129794 - DNA, 25 bp, Homo sapien
caaggtgggatttttcggacaccat

SEQ ID NO: 3129795 - DNA, 25 bp, Homo sapien
tcatactcaggaggcgggtcttggg

SEQ ID NO: 3129796 - DNA, 25 bp, Homo sapien
tccggactgtcatactcaggaggcg

SEQ ID NO: 3129797 - DNA, 25 bp, Homo sapien
aggcgggtcttgggctcctcctgca

SEQ ID NO: 3129798 - DNA, 25 bp, Homo sapien
tccgtgggcctctccggactgtcat

SEQ ID NO: 3129799 - DNA, 25 bp, Homo sapien
gcagttaacaagcagtagctgaatg

SEQ ID NO: 3129800 - DNA, 25 bp, Homo sapien
taacaagcagtagctgaatggaaga

SEQ ID NO: 3129801 - DNA, 25 bp, Homo sapien
gttaacaagcagtagctgaatggaa

SEQ ID NO: 3129802 - DNA, 25 bp, Homo sapien
aacaagcagtagctgaatggaagag

SEQ ID NO: 3129803 - DNA, 25 bp, Homo sapien
ggaaacaggtgtgtcgcatggtgag

SEQ ID NO: 3129804 - DNA, 25 bp, Homo sapien
aaacaggtgtgtcgcatggtgagag

SEQ ID NO: 3129805 - DNA, 25 bp, Homo sapien
gactgtgcaataagcatggtgccag

SEQ ID NO: 3129806 - DNA, 25 bp, Homo sapien
ccttaggaagctttcacttatgtca

SEQ ID NO: 3129807 - DNA, 25 bp, Homo sapien
ttaacactccctaacttatgtattg

SEQ ID NO: 3129808 - DNA, 25 bp, Homo sapien
aatggcaaggtcaccaggagcctca

SEQ ID NO: 3129809 - DNA, 25 bp, Homo sapien
aacatctgattcaagcctcactagg

SEQ ID NO: 3129810 - DNA, 25 bp, Homo sapien
ggttaacacatatgtcttccctaac

SEQ ID NO: 3129811 - DNA, 25 bp, Homo sapien
gcttccaaaggcctctagtttccaa

SEQ ID NO: 3129812 - DNA, 25 bp, Homo sapien
aaaagcaatgcctgaagggtggtca

SEQ ID NO: 3129813 - DNA, 25 bp, Homo sapien
caactttgccatagggaaaacagtc

SEQ ID NO: 3129814 - DNA, 25 bp, Homo sapien
gggtggtcattttccctacaatgag

SEQ ID NO: 3129815 - DNA, 25 bp, Homo sapien
aataattaaatatccagtagttgtg

SEQ ID NO: 3129816 - DNA, 25 bp, Homo sapien
atcttcttcattttcgagttagaaa

SEQ ID NO: 3129817 - DNA, 25 bp, Homo sapien
taaataattaaatatccagtagttg

SEQ ID NO: 3129818 - DNA, 25 bp, Homo sapien
ataattaaatatccagtagttgtgc

SEQ ID NO: 3129819 - DNA, 25 bp, Homo sapien
cactggatggtcatggtgtggctcc

SEQ ID NO: 3129820 - DNA, 25 bp, Homo sapien
tccattccccaattcagaaatagcg

SEQ ID NO: 3129821 - DNA, 25 bp, Homo sapien
cccaattcagaaatagcgctttttg

SEQ ID NO: 3129822 - DNA, 25 bp, Homo sapien
cgtcttggtttatcagtgctgccaa

SEQ ID NO: 3129823 - DNA, 25 bp, Homo sapien
taaactctgtggcagtgttcacgca

SEQ ID NO: 3129824 - DNA, 25 bp, Homo sapien
aattgcatagatccttagagcccgg

SEQ ID NO: 3129825 - DNA, 25 bp, Homo sapien
catttctgacagatgcctggctcca

SEQ ID NO: 3129826 - DNA, 25 bp, Homo sapien
taggtaggtcggagaacttgcccaa

SEQ ID NO: 3129827 - DNA, 25 bp, Homo sapien
ctatagcaatagagtggtggacctc

SEQ ID NO: 3129828 - DNA, 25 bp, Homo sapien
gaatttggctatagcaatagagtgg

SEQ ID NO: 3129829 - DNA, 25 bp, Homo sapien
tgaatttggctatagcaatagagtg

SEQ ID NO: 3129830 - DNA, 25 bp, Homo sapien
tagcaatagagtggtggacctcatg

SEQ ID NO: 3129831 - DNA, 25 bp, Homo sapien
gggcattctgggctacactgagcac

SEQ ID NO: 3129832 - DNA, 25 bp, Homo sapien
aagggcattctgggctacactgagc

SEQ ID NO: 3129833 - DNA, 25 bp, Homo sapien
tcaagggcattctgggctacactga

SEQ ID NO: 3129834 - DNA, 25 bp, Homo sapien
caagggcattctgggctacactgag

SEQ ID NO: 3129835 - DNA, 25 bp, Homo sapien
ggaaaattctgcaaagcctgttctg

SEQ ID NO: 3129836 - DNA, 25 bp, Homo sapien
tctgcaaagcctgttctggaagttg

SEQ ID NO: 3129837 - DNA, 25 bp, Homo sapien
gcaaagcctgttctggaagttgaag

SEQ ID NO: 3129838 - DNA, 25 bp, Homo sapien
attctgcaaagcctgttctggaagt

SEQ ID NO: 3129839 - DNA, 25 bp, Homo sapien
ctcgctgcttgcaatttctccctca

SEQ ID NO: 3129840 - DNA, 25 bp, Homo sapien
tcgctgcttgcaatttctccctcat

SEQ ID NO: 3129841 - DNA, 25 bp, Homo sapien
cctcgctgcttgcaatttctccctc

SEQ ID NO: 3129842 - DNA, 25 bp, Homo sapien
gagtggggatttcctgcagcaatgc

SEQ ID NO: 3129843 - DNA, 25 bp, Homo sapien
ctgggacttcgtaagcgtctgggcc

SEQ ID NO: 3129844 - DNA, 25 bp, Homo sapien
ttcttactgggacttcgtaagcgtc

SEQ ID NO: 3129845 - DNA, 25 bp, Homo sapien
acttcgtaagcgtctgggccgagga

SEQ ID NO: 3129846 - DNA, 25 bp, Homo sapien
tcctctgtgtctctggaggaacaca

SEQ ID NO: 3129847 - DNA, 25 bp, Homo sapien
ctaaatctgtttttccaggtctggg

SEQ ID NO: 3129848 - DNA, 25 bp, Homo sapien
caggtctgggcccttcctctgtgtc

SEQ ID NO: 3129849 - DNA, 25 bp, Homo sapien
cagtagaaacacttcctaaatctgt

SEQ ID NO: 3129850 - DNA, 25 bp, Homo sapien
tgggtgttctgagcctatcggacac

SEQ ID NO: 3129851 - DNA, 25 bp, Homo sapien
ccactggctgtcaactccactgagc

SEQ ID NO: 3129852 - DNA, 25 bp, Homo sapien
tcactgtcatcactgggtgttctga

SEQ ID NO: 3129853 - DNA, 25 bp, Homo sapien
tgtcatcactgggtgttctgagcct

SEQ ID NO: 3129854 - DNA, 25 bp, Homo sapien
gagtcaacttcttgttgagtccttt

SEQ ID NO: 3129855 - DNA, 25 bp, Homo sapien
cagaatcatggaacttgactcttga

SEQ ID NO: 3129856 - DNA, 25 bp, Homo sapien
ttgagtaactttgggagtcaacttc

SEQ ID NO: 3129857 - DNA, 25 bp, Homo sapien
taggcttgatttttcgtgcagaatc

SEQ ID NO: 3129858 - DNA, 25 bp, Homo sapien
aagaagttataggcctcttctgcag

SEQ ID NO: 3129859 - DNA, 25 bp, Homo sapien
gattagttcccgctctatgtcttgc

SEQ ID NO: 3129860 - DNA, 25 bp, Homo sapien
tctgatccttctggttcgggatcaa

SEQ ID NO: 3129861 - DNA, 25 bp, Homo sapien
tcgggatcaaagttgaaagtaaaga

SEQ ID NO: 3129862 - DNA, 25 bp, Homo sapien
tcttgcagggacatcagctttttcc

SEQ ID NO: 3129863 - DNA, 25 bp, Homo sapien
caactcagacgtggagtgtcattct

SEQ ID NO: 3129864 - DNA, 25 bp, Homo sapien
tagggtctaacccagagctacaggg

SEQ ID NO: 3129865 - DNA, 25 bp, Homo sapien
gggagccatgtgaattcagtacttg

SEQ ID NO: 3129866 - DNA, 25 bp, Homo sapien
caggtctgactgctacaaaatcgtc

SEQ ID NO: 3129867 - DNA, 25 bp, Homo sapien
cacgtgatctaagcccaataggaag

SEQ ID NO: 3129868 - DNA, 25 bp, Homo sapien
cctactgggtatgaagagcatttct

SEQ ID NO: 3129869 - DNA, 25 bp, Homo sapien
aataggaagtcctcggcatcatcac

SEQ ID NO: 3129870 - DNA, 25 bp, Homo sapien
tctgattggtgcgtgccacctctgg

SEQ ID NO: 3129871 - DNA, 25 bp, Homo sapien
ggtgcgtgccacctctggtcttacc

SEQ ID NO: 3129872 - DNA, 25 bp, Homo sapien
tgatgttctgattggtgcgtgccac

SEQ ID NO: 3129873 - DNA, 25 bp, Homo sapien
tgattggtgcgtgccacctctggtc

SEQ ID NO: 3129874 - DNA, 25 bp, Homo sapien
tgctcctgtgttagtactggcggcc

SEQ ID NO: 3129875 - DNA, 25 bp, Homo sapien
gagctaggatcctgccgtcatctcc

SEQ ID NO: 3129876 - DNA, 25 bp, Homo sapien
tactggcggccttgaaggaaatggc

SEQ ID NO: 3129877 - DNA, 25 bp, Homo sapien
ttcaagctctgccttaatgctctgc

SEQ ID NO: 3129878 - DNA, 25 bp, Homo sapien
aaaagtggagagaggggagtgtcta

SEQ ID NO: 3129879 - DNA, 25 bp, Homo sapien
aaagtggagagaggggagtgtctac

SEQ ID NO: 3129880 - DNA, 25 bp, Homo sapien
tgttcactggcctgcatggtctgct

SEQ ID NO: 3129881 - DNA, 25 bp, Homo sapien
ggtaaatacaccagagccgcttagc

SEQ ID NO: 3129882 - DNA, 25 bp, Homo sapien
gacagatgagatccattggctccct

SEQ ID NO: 3129883 - DNA, 25 bp, Homo sapien
taaatgcccttggaagatgtcagcc

SEQ ID NO: 3129884 - DNA, 25 bp, Homo sapien
aaggtactggtcatataactgggcc

SEQ ID NO: 3129885 - DNA, 25 bp, Homo sapien
tgctctcggctaaaacagggatgat

SEQ ID NO: 3129886 - DNA, 25 bp, Homo sapien
gcttggctgccaaaacatgctctcg

SEQ ID NO: 3129887 - DNA, 25 bp, Homo sapien
tctctggtgtcttgcaaggtactgg

SEQ ID NO: 3129888 - DNA, 25 bp, Homo sapien
ggttttttggatggtatcgagagac

SEQ ID NO: 3129889 - DNA, 25 bp, Homo sapien
tggtatcgagagactgatgaggttt

SEQ ID NO: 3129890 - DNA, 25 bp, Homo sapien
ggccagtctgaacagcatttcttaa

SEQ ID NO: 3129891 - DNA, 25 bp, Homo sapien
tcagatttatactcattgatggttt

SEQ ID NO: 3129892 - DNA, 25 bp, Homo sapien
tgtaaatctctggaactctcgaagg

SEQ ID NO: 3129893 - DNA, 25 bp, Homo sapien
tttcaagggagtatttgtaaatctc

SEQ ID NO: 3129894 - DNA, 25 bp, Homo sapien
tcttgttcagcatcacggaattttc

SEQ ID NO: 3129895 - DNA, 25 bp, Homo sapien
tatgatagtcttaagcaatgttcta

SEQ ID NO: 3129896 - DNA, 25 bp, Homo sapien
ttaatgtatgatatagcccaataaa

SEQ ID NO: 3129897 - DNA, 25 bp, Homo sapien
taatgtatgatatagcccaataaaa

SEQ ID NO: 3129898 - DNA, 25 bp, Homo sapien
cttaatgtatgatatagcccaataa

SEQ ID NO: 3129899 - DNA, 25 bp, Homo sapien
ctgcttcatatgcttcttcatctgc

SEQ ID NO: 3129900 - DNA, 25 bp, Homo sapien
gtactcctccgtgtgctcttctaac

SEQ ID NO: 3129901 - DNA, 25 bp, Homo sapien
cgtgtgctcttctaacagttcactt

SEQ ID NO: 3129902 - DNA, 25 bp, Homo sapien
tcctccgtgtgctcttctaacagtt

SEQ ID NO: 3129903 - DNA, 25 bp, Homo sapien
gtaacgacgttctgtattcttccat

SEQ ID NO: 3129904 - DNA, 25 bp, Homo sapien
ttgtaacgacgttctgtattcttcc

SEQ ID NO: 3129905 - DNA, 25 bp, Homo sapien
aggccttccactgttgtaacgacgt

SEQ ID NO: 3129906 - DNA, 25 bp, Homo sapien
ccactgttgtaacgacgttctgtat

SEQ ID NO: 3129907 - DNA, 25 bp, Homo sapien
gggtgttacgcttcctgccaggctt

SEQ ID NO: 3129908 - DNA, 25 bp, Homo sapien
tatcactgcccgatcagtgggctct

SEQ ID NO: 3129909 - DNA, 25 bp, Homo sapien
acaaggtcctcctcgggatacggct

SEQ ID NO: 3129910 - DNA, 25 bp, Homo sapien
ggctctgcaatctcatcaccgggat

SEQ ID NO: 3129911 - DNA, 25 bp, Homo sapien
tgaagtgttaaactctccggccagt

SEQ ID NO: 3129912 - DNA, 25 bp, Homo sapien
aaatctgcccaaagtgaactcggaa

SEQ ID NO: 3129913 - DNA, 25 bp, Homo sapien
ctagtggccgactgactgtcctgga

SEQ ID NO: 3129914 - DNA, 25 bp, Homo sapien
gaactcggaagtctgctcctagtgg

SEQ ID NO: 3129915 - DNA, 25 bp, Homo sapien
caccccctttaattggtcaattgtg

SEQ ID NO: 3129916 - DNA, 25 bp, Homo sapien
tcctgggttcattagaagagctgcc

SEQ ID NO: 3129917 - DNA, 25 bp, Homo sapien
cctgggttcattagaagagctgccc

SEQ ID NO: 3129918 - DNA, 25 bp, Homo sapien
ctcctgggttcattagaagagctgc

SEQ ID NO: 3129919 - DNA, 25 bp, Homo sapien
tgggttcattagaagagctgcccac

SEQ ID NO: 3129920 - DNA, 25 bp, Homo sapien
tcctctccagtgcagagttgggcaa

SEQ ID NO: 3129921 - DNA, 25 bp, Homo sapien
gtgaccacgtatctgaaggctgccc

SEQ ID NO: 3129922 - DNA, 25 bp, Homo sapien
ccagagcagatggaatagagagtcc

SEQ ID NO: 3129923 - DNA, 25 bp, Homo sapien
ggagcccttcaagtgttccaggcca

SEQ ID NO: 3129924 - DNA, 25 bp, Homo sapien
tctagctctctatccggtcttctca

SEQ ID NO: 3129925 - DNA, 25 bp, Homo sapien
cggtcttctcatgttaatcttggtc

SEQ ID NO: 3129926 - DNA, 25 bp, Homo sapien
tctgagtctgccagtgggtgtctcc

SEQ ID NO: 3129927 - DNA, 25 bp, Homo sapien
atcttggtcttcctgatatcagctt

SEQ ID NO: 3129928 - DNA, 25 bp, Homo sapien
ggcattcttatctcaagcctggcta

SEQ ID NO: 3129929 - DNA, 25 bp, Homo sapien
cttatctcaagcctggctagaagct

SEQ ID NO: 3129930 - DNA, 25 bp, Homo sapien
gaactgccttggcattcttatctca

SEQ ID NO: 3129931 - DNA, 25 bp, Homo sapien
tgcttgtagaactgccttggcattc

SEQ ID NO: 3129932 - DNA, 25 bp, Homo sapien
agcacagggacttaagggcctttcg

SEQ ID NO: 3129933 - DNA, 25 bp, Homo sapien
gagacatccttttgtaggaagcaca

SEQ ID NO: 3129934 - DNA, 25 bp, Homo sapien
caccacaatcctatgaaaggctatg

SEQ ID NO: 3129935 - DNA, 25 bp, Homo sapien
ttttactcctcatgggtgttccctg

SEQ ID NO: 3129936 - DNA, 25 bp, Homo sapien
cacttctgctagcaaggtgggacta

SEQ ID NO: 3129937 - DNA, 25 bp, Homo sapien
aactccctcgtggtccagtgtcaca

SEQ ID NO: 3129938 - DNA, 25 bp, Homo sapien
gggactactgtgtccgacagtttca

SEQ ID NO: 3129939 - DNA, 25 bp, Homo sapien
acttcttcagtaggagcccttccag

SEQ ID NO: 3129940 - DNA, 25 bp, Homo sapien
cactatgagacactttccctgaggt

SEQ ID NO: 3129941 - DNA, 25 bp, Homo sapien
caatggaggaattaaaggtatcccg

SEQ ID NO: 3129942 - DNA, 25 bp, Homo sapien
cgaaatccgatgttctgctgtgaca

SEQ ID NO: 3129943 - DNA, 25 bp, Homo sapien
atcccgttttctccaatggcccatg

SEQ ID NO: 3129944 - DNA, 25 bp, Homo sapien
ggtcatttgggtcgagcttggactc

SEQ ID NO: 3129945 - DNA, 25 bp, Homo sapien
cgagataagctgcatcaaaggggca

SEQ ID NO: 3129946 - DNA, 25 bp, Homo sapien
ttttttcatgtctgtcagtcctgat

SEQ ID NO: 3129947 - DNA, 25 bp, Homo sapien
catttgggtcgagcttggactctgc

SEQ ID NO: 3129948 - DNA, 25 bp, Homo sapien
tgcttggtgctttgctggctgtaac

SEQ ID NO: 3129949 - DNA, 25 bp, Homo sapien
gtgctttgctggctgtaacctcctc

SEQ ID NO: 3129950 - DNA, 25 bp, Homo sapien
tctgcttggtgctttgctggctgta

SEQ ID NO: 3129951 - DNA, 25 bp, Homo sapien
gcctctctgcttggtgctttgctgg

SEQ ID NO: 3129952 - DNA, 25 bp, Homo sapien
cataatttctcggtcatagactgga

SEQ ID NO: 3129953 - DNA, 25 bp, Homo sapien
tgaagaagcctaaatcgtttggatc

SEQ ID NO: 3129954 - DNA, 25 bp, Homo sapien
caaagttaaactcctgttgcagctg

SEQ ID NO: 3129955 - DNA, 25 bp, Homo sapien
gaaatcagggacataggattcacca

SEQ ID NO: 3129956 - DNA, 25 bp, Homo sapien
ctggaggtacttggctactatggcc

SEQ ID NO: 3129957 - DNA, 25 bp, Homo sapien
tactatggccctatgggtgtctatg

SEQ ID NO: 3129958 - DNA, 25 bp, Homo sapien
tgtctatgtgttccttggtttctat

SEQ ID NO: 3129959 - DNA, 25 bp, Homo sapien
tacatttctgtctcgtaaccgtttc

SEQ ID NO: 3129960 - DNA, 25 bp, Homo sapien
tcctggtaaagttcccggcatataa

SEQ ID NO: 3129961 - DNA, 25 bp, Homo sapien
gtagttcactctccacactctaagt

SEQ ID NO: 3129962 - DNA, 25 bp, Homo sapien
gcttactgcaatattggagttcctg

SEQ ID NO: 3129963 - DNA, 25 bp, Homo sapien
tagggccagtctcaaaacacacata

SEQ ID NO: 3129964 - DNA, 25 bp, Homo sapien
tgttttgcaattaagaaacgattta

SEQ ID NO: 3129965 - DNA, 25 bp, Homo sapien
ctgatattgggaacttcttcttcta

SEQ ID NO: 3129966 - DNA, 25 bp, Homo sapien
tgggaacttcttcttctactatcat

SEQ ID NO: 3129967 - DNA, 25 bp, Homo sapien
ttttgcaattaagaaacgatttatc

SEQ ID NO: 3129968 - DNA, 25 bp, Homo sapien
ggcccaaatgcataccatacgatga

SEQ ID NO: 3129969 - DNA, 25 bp, Homo sapien
aatgctgtcaggtttagttcaacgg

SEQ ID NO: 3129970 - DNA, 25 bp, Homo sapien
gagaggccctaggaagacttgttct

SEQ ID NO: 3129971 - DNA, 25 bp, Homo sapien
tgtcatcatcaggtattaaccaggt

SEQ ID NO: 3129972 - DNA, 25 bp, Homo sapien
actgccatgcgacaggagagtaagg

SEQ ID NO: 3129973 - DNA, 25 bp, Homo sapien
ctctactgccatgcgacaggagagt

SEQ ID NO: 3129974 - DNA, 25 bp, Homo sapien
ctactgccatgcgacaggagagtaa

SEQ ID NO: 3129975 - DNA, 25 bp, Homo sapien
cacctctactgccatgcgacaggag

SEQ ID NO: 3129976 - DNA, 25 bp, Homo sapien
gcacaagaccaccagtatgggaaat

SEQ ID NO: 3129977 - DNA, 25 bp, Homo sapien
tctatatccacacccctagttgaag

SEQ ID NO: 3129978 - DNA, 25 bp, Homo sapien
ggagaccaagagacttaatcacaga

SEQ ID NO: 3129979 - DNA, 25 bp, Homo sapien
tcccaatatctgtgtgaatatcaaa

SEQ ID NO: 3129980 - DNA, 25 bp, Homo sapien
acatcttaaagccaagaaggaactg

SEQ ID NO: 3129981 - DNA, 25 bp, Homo sapien
caatgactggactgtgggcctggaa

SEQ ID NO: 3129982 - DNA, 25 bp, Homo sapien
gagagagaggttttgcatggattta

SEQ ID NO: 3129983 - DNA, 25 bp, Homo sapien
catggatttatgtgggtgtagcctc

SEQ ID NO: 3129984 - DNA, 25 bp, Homo sapien
tcacggagatgatatgcaagaaaca

SEQ ID NO: 3129985 - DNA, 25 bp, Homo sapien
tacagctgcttaggcagttcctggg

SEQ ID NO: 3129986 - DNA, 25 bp, Homo sapien
gcctagttggttgcagttttaccca

SEQ ID NO: 3129987 - DNA, 25 bp, Homo sapien
tcacatgacagtgggtgtgtacagc

SEQ ID NO: 3129988 - DNA, 25 bp, Homo sapien
tcacatttgcttgggccagtcctgc

SEQ ID NO: 3129989 - DNA, 25 bp, Homo sapien
cagtggtcgcttttgttctgccagc

SEQ ID NO: 3129990 - DNA, 25 bp, Homo sapien
cagcagctttatgtctccatcagac

SEQ ID NO: 3129991 - DNA, 25 bp, Homo sapien
tggaatgtcgtaagctcgcacaatg

SEQ ID NO: 3129992 - DNA, 25 bp, Homo sapien
catcagacaggttttgggctgtcac

SEQ ID NO: 3129993 - DNA, 25 bp, Homo sapien
ccctctttagcctgaattgatggaa

SEQ ID NO: 3129994 - DNA, 25 bp, Homo sapien
ttggctttgcaagaaccctcagtcc

SEQ ID NO: 3129995 - DNA, 25 bp, Homo sapien
tacttgcaaacagtagggccttggc

SEQ ID NO: 3129996 - DNA, 25 bp, Homo sapien
tcagtcccctgctgaacaataacca

SEQ ID NO: 3129997 - DNA, 25 bp, Homo sapien
tacctatattttaggccccatgtta

SEQ ID NO: 3129998 - DNA, 25 bp, Homo sapien
catttgtttagtacctatattttag

SEQ ID NO: 3129999 - DNA, 25 bp, Homo sapien
attttaggccccatgttagactttg

SEQ ID NO: 3130000 - DNA, 25 bp, Homo sapien
gcaagaccctgggtctaagaagtaa

SEQ ID NO: 3130001 - DNA, 25 bp, Homo sapien
tgcttggggaagcagcatgcttttc

SEQ ID NO: 3130002 - DNA, 25 bp, Homo sapien
atccttgaagacctcgacggctgct

SEQ ID NO: 3130003 - DNA, 25 bp, Homo sapien
agtcagcattgtgggttgggctgta

SEQ ID NO: 3130004 - DNA, 25 bp, Homo sapien
actgaacatccttgaagacctcgac

SEQ ID NO: 3130005 - DNA, 25 bp, Homo sapien
tccagctagggtttggtccttcagc

SEQ ID NO: 3130006 - DNA, 25 bp, Homo sapien
ccgtagtcgtatggcaaactgttcg

SEQ ID NO: 3130007 - DNA, 25 bp, Homo sapien
ttgaaaagagacttctacaaaggga

SEQ ID NO: 3130008 - DNA, 25 bp, Homo sapien
ctaaatggaagttctagttcttcat

SEQ ID NO: 3130009 - DNA, 25 bp, Homo sapien
ctgcaagacagcacatgaccaggga

SEQ ID NO: 3130010 - DNA, 25 bp, Homo sapien
agactggctgtgctataatctccat

SEQ ID NO: 3130011 - DNA, 25 bp, Homo sapien
ctaagacatcatgcagtacttcatc

SEQ ID NO: 3130012 - DNA, 25 bp, Homo sapien
aagacatcatgcagtacttcatcaa

SEQ ID NO: 3130013 - DNA, 25 bp, Homo sapien
gacatcatgcagtacttcatcaaaa

SEQ ID NO: 3130014 - DNA, 25 bp, Homo sapien
ccagccagtgtctctcaatacgagt

SEQ ID NO: 3130015 - DNA, 25 bp, Homo sapien
cagtgtctctcaatacgagtatgga

SEQ ID NO: 3130016 - DNA, 25 bp, Homo sapien
gtctctcaatacgagtatggattcc

SEQ ID NO: 3130017 - DNA, 25 bp, Homo sapien
ctctcaatacgagtatggattccac

SEQ ID NO: 3130018 - DNA, 25 bp, Homo sapien
tcaaaaccccgctcaagaatcatat

SEQ ID NO: 3130019 - DNA, 25 bp, Homo sapien
aatcatatttcgctccttactgtag

SEQ ID NO: 3130020 - DNA, 25 bp, Homo sapien
acttaagcttcggacagaatcaaaa

SEQ ID NO: 3130021 - DNA, 25 bp, Homo sapien
ggacagaatcaaaaccccgctcaag

SEQ ID NO: 3130022 - DNA, 25 bp, Homo sapien
tgagataacgtgtgataaaaacagt

SEQ ID NO: 3130023 - DNA, 25 bp, Homo sapien
tggaaactttaaggcacattcagct

SEQ ID NO: 3130024 - DNA, 25 bp, Homo sapien
ttactgttgtaaggcactgacgatt

SEQ ID NO: 3130025 - DNA, 25 bp, Homo sapien
gtttttccgcttatatcaattactg

SEQ ID NO: 3130026 - DNA, 25 bp, Homo sapien
tgtagccccatgcattatccctgtg

SEQ ID NO: 3130027 - DNA, 25 bp, Homo sapien
tatggaaactgtcatccctggtacc

SEQ ID NO: 3130028 - DNA, 25 bp, Homo sapien
ggtattatcctgaagagtcccaact

SEQ ID NO: 3130029 - DNA, 25 bp, Homo sapien
gatgacctgagagcaaacactattt

SEQ ID NO: 3130030 - DNA, 25 bp, Homo sapien
ccctggttgagagggtaatagtact

SEQ ID NO: 3130031 - DNA, 25 bp, Homo sapien
catgtggttcccaatagtacttggg

SEQ ID NO: 3130032 - DNA, 25 bp, Homo sapien
aactgtaactttgcacctgttgaac

SEQ ID NO: 3130033 - DNA, 25 bp, Homo sapien
gcattttcacttggcccagtcttga

SEQ ID NO: 3130034 - DNA, 25 bp, Homo sapien
acagataccaccaaatgagacagtg

SEQ ID NO: 3130035 - DNA, 25 bp, Homo sapien
aagaagggaatcaaggacacatatc

SEQ ID NO: 3130036 - DNA, 25 bp, Homo sapien
caaggacacatatcgagccaccagt

SEQ ID NO: 3130037 - DNA, 25 bp, Homo sapien
caccaaatgagacagtgtcaggcaa

SEQ ID NO: 3130038 - DNA, 25 bp, Homo sapien
ctcaggaatagcattgcccatcaac

SEQ ID NO: 3130039 - DNA, 25 bp, Homo sapien
tgcccatcaacagccaggccttctt

SEQ ID NO: 3130040 - DNA, 25 bp, Homo sapien
tcccctgccaggagatcaagaaatt

SEQ ID NO: 3130041 - DNA, 25 bp, Homo sapien
ggccttcttacccagagacagaaag

SEQ ID NO: 3130042 - DNA, 25 bp, Homo sapien
attgtcaggacctattaaacagccc

SEQ ID NO: 3130043 - DNA, 25 bp, Homo sapien
taacgaccttgctcccaagttagca

SEQ ID NO: 3130044 - DNA, 25 bp, Homo sapien
aagttagcacataggcagttggacc

SEQ ID NO: 3130045 - DNA, 25 bp, Homo sapien
tccatattaaataacgaccttgctc

SEQ ID NO: 3130046 - DNA, 25 bp, Homo sapien
catgagaatggtgttccacagtgct

SEQ ID NO: 3130047 - DNA, 25 bp, Homo sapien
gctactattacccatctcagagaag

SEQ ID NO: 3130048 - DNA, 25 bp, Homo sapien
cagttgaggtttcagagtgccagga

SEQ ID NO: 3130049 - DNA, 25 bp, Homo sapien
taaccctgcttgattactaatgacc

SEQ ID NO: 3130050 - DNA, 25 bp, Homo sapien
gaataaacacacctgaagctgagct

SEQ ID NO: 3130051 - DNA, 25 bp, Homo sapien
ttaaggcaggcagggaagttctaac

SEQ ID NO: 3130052 - DNA, 25 bp, Homo sapien
gacttttggccagtagactgggaca

SEQ ID NO: 3130053 - DNA, 25 bp, Homo sapien
ggtatcagatcatggaggtcccgta

SEQ ID NO: 3130054 - DNA, 25 bp, Homo sapien
tatgttagcatgtatacatgcacat

SEQ ID NO: 3130055 - DNA, 25 bp, Homo sapien
atgtatgtgtggcatagaggcagca

SEQ ID NO: 3130056 - DNA, 25 bp, Homo sapien
taagaaagacaagactacattagca

SEQ ID NO: 3130057 - DNA, 25 bp, Homo sapien
catataggccgcatacattttgtca

SEQ ID NO: 3130058 - DNA, 25 bp, Homo sapien
gattcatatcgttgaatattaaacc

SEQ ID NO: 3130059 - DNA, 25 bp, Homo sapien
ttatccttagtggagattcatatcg

SEQ ID NO: 3130060 - DNA, 25 bp, Homo sapien
ccttagtggagattcatatcgttga

SEQ ID NO: 3130061 - DNA, 25 bp, Homo sapien
aatttatccttagtggagattcata

SEQ ID NO: 3130062 - DNA, 25 bp, Homo sapien
gccaggatatggaaggcttcttgaa

SEQ ID NO: 3130063 - DNA, 25 bp, Homo sapien
ccaggatatggaaggcttcttgaaa

SEQ ID NO: 3130064 - DNA, 25 bp, Homo sapien
ggccaggatatggaaggcttcttga

SEQ ID NO: 3130065 - DNA, 25 bp, Homo sapien
ctgagcgctggtaaattagctcttc

SEQ ID NO: 3130066 - DNA, 25 bp, Homo sapien
tgtctgagcgctggtaaattagctc

SEQ ID NO: 3130067 - DNA, 25 bp, Homo sapien
tttgtctgagcgctggtaaattagc

SEQ ID NO: 3130068 - DNA, 25 bp, Homo sapien
gtctgagcgctggtaaattagctct

SEQ ID NO: 3130069 - DNA, 25 bp, Homo sapien
ctattccaccgagtcagatggcgtg

SEQ ID NO: 3130070 - DNA, 25 bp, Homo sapien
tccaccgagtcagatggcgtggcct

SEQ ID NO: 3130071 - DNA, 25 bp, Homo sapien
accgagtcagatggcgtggcctcca

SEQ ID NO: 3130072 - DNA, 25 bp, Homo sapien
tattccaccgagtcagatggcgtgg

SEQ ID NO: 3130073 - DNA, 25 bp, Homo sapien
catcttctacatcttctccttgact

SEQ ID NO: 3130074 - DNA, 25 bp, Homo sapien
ttctaacagaggcaagaagtgacgc

SEQ ID NO: 3130075 - DNA, 25 bp, Homo sapien
gtgacgcagagtagaggtacaatac

SEQ ID NO: 3130076 - DNA, 25 bp, Homo sapien
caagaagtgacgcagagtagaggta

SEQ ID NO: 3130077 - DNA, 25 bp, Homo sapien
tcggcctcctgctgggctcaaatgg

SEQ ID NO: 3130078 - DNA, 25 bp, Homo sapien
gctcaaatggtccccccactttagc

SEQ ID NO: 3130079 - DNA, 25 bp, Homo sapien
cctcctgctgggctcaaatggtccc

SEQ ID NO: 3130080 - DNA, 25 bp, Homo sapien
tgctgggctcaaatggtccccccac

SEQ ID NO: 3130081 - DNA, 25 bp, Homo sapien
tacacagcgtcaattaaaggcttca

SEQ ID NO: 3130082 - DNA, 25 bp, Homo sapien
gaacatcaatattatgtactccagt

SEQ ID NO: 3130083 - DNA, 25 bp, Homo sapien
tgtactccagtactatacacagcgt

SEQ ID NO: 3130084 - DNA, 25 bp, Homo sapien
taagagaggcaacatagatccaaac

SEQ ID NO: 3130085 - DNA, 25 bp, Homo sapien
attttctcatatcctaagtgtagtt

SEQ ID NO: 3130086 - DNA, 25 bp, Homo sapien
tcatatcctaagtgtagtttttaca

SEQ ID NO: 3130087 - DNA, 25 bp, Homo sapien
tatttgccaataatatgttcttctg

SEQ ID NO: 3130088 - DNA, 25 bp, Homo sapien
ttgccaataatatgttcttctgatg

SEQ ID NO: 3130089 - DNA, 25 bp, Homo sapien
ggaggaggaactctaaaggctctaa

SEQ ID NO: 3130090 - DNA, 25 bp, Homo sapien
aacattcagttcaggcaaattgtct

SEQ ID NO: 3130091 - DNA, 25 bp, Homo sapien
ggcaggaagctcataatatatcgta

SEQ ID NO: 3130092 - DNA, 25 bp, Homo sapien
gatggaatataactcactactgctt

SEQ ID NO: 3130093 - DNA, 25 bp, Homo sapien
aagtgcacactatctccgaggtatg

SEQ ID NO: 3130094 - DNA, 25 bp, Homo sapien
tgcctgtacatgcaaacctgtggaa

SEQ ID NO: 3130095 - DNA, 25 bp, Homo sapien
tggaagatgaagtaatcttgcagtc

SEQ ID NO: 3130096 - DNA, 25 bp, Homo sapien
tggtctggaaccaagtgcacactat

SEQ ID NO: 3130097 - DNA, 25 bp, Homo sapien
tgttaaccatccctttttgagcgtg

SEQ ID NO: 3130098 - DNA, 25 bp, Homo sapien
tcaaaagggtgagaacagtcttaca

SEQ ID NO: 3130099 - DNA, 25 bp, Homo sapien
gctcagtgagctaggaaagcaccaa

SEQ ID NO: 3130100 - DNA, 25 bp, Homo sapien
tagggatactttgttctcaccactg

SEQ ID NO: 3130101 - DNA, 25 bp, Homo sapien
cagtggatgccagaatttgcagtgt

SEQ ID NO: 3130102 - DNA, 25 bp, Homo sapien
agtgtggttttcgagcctgctgccg

SEQ ID NO: 3130103 - DNA, 25 bp, Homo sapien
tgccgctctggcgaatgacccttga

SEQ ID NO: 3130104 - DNA, 25 bp, Homo sapien
caggtcctcatgctgataccgccag

SEQ ID NO: 3130105 - DNA, 25 bp, Homo sapien
catagtgtgactgggataaaatgtc

SEQ ID NO: 3130106 - DNA, 25 bp, Homo sapien
ttagctgatcgattatagttagggc

SEQ ID NO: 3130107 - DNA, 25 bp, Homo sapien
cacttaccttttggaccatgaagga

SEQ ID NO: 3130108 - DNA, 25 bp, Homo sapien
tcttgtatctagtgcctgggtagca

SEQ ID NO: 3130109 - DNA, 25 bp, Homo sapien
tgccaccatcccttagacttcagga

SEQ ID NO: 3130110 - DNA, 25 bp, Homo sapien
cccaggtagctagggtggaaactga

SEQ ID NO: 3130111 - DNA, 25 bp, Homo sapien
ggaaactgagcatgtggaccctaca

SEQ ID NO: 3130112 - DNA, 25 bp, Homo sapien
tcaggagcataatgacccaggtagc

SEQ ID NO: 3130113 - DNA, 25 bp, Homo sapien
agcatagctgtctacctggcaatcc

SEQ ID NO: 3130114 - DNA, 25 bp, Homo sapien
tcctttaatgggtgctgtcactttc

SEQ ID NO: 3130115 - DNA, 25 bp, Homo sapien
catgattattgggatcaaataccag

SEQ ID NO: 3130116 - DNA, 25 bp, Homo sapien
gttgcttatactttccatgctttgg

SEQ ID NO: 3130117 - DNA, 25 bp, Homo sapien
atatggcctttatcaagttgaagaa

SEQ ID NO: 3130118 - DNA, 25 bp, Homo sapien
ctaatcttaagggaaaagcttgtat

SEQ ID NO: 3130119 - DNA, 25 bp, Homo sapien
cccacttggtcagggtgtgtagtcc

SEQ ID NO: 3130120 - DNA, 25 bp, Homo sapien
tcagtttactggtattagctgagga

SEQ ID NO: 3130121 - DNA, 25 bp, Homo sapien
caggtataccagttgggagcattca

SEQ ID NO: 3130122 - DNA, 25 bp, Homo sapien
caacttgtgtcagtaggtttgagga

SEQ ID NO: 3130123 - DNA, 25 bp, Homo sapien
tctgtgtacatttcctgagagactg

SEQ ID NO: 3130124 - DNA, 25 bp, Homo sapien
tattgaatgaaccaggaaaggcttc

SEQ ID NO: 3130125 - DNA, 25 bp, Homo sapien
tagataatgaacacccctggactaa

SEQ ID NO: 3130126 - DNA, 25 bp, Homo sapien
caagcagtatgcctgtttgcacgat

SEQ ID NO: 3130127 - DNA, 25 bp, Homo sapien
taaggactagtgtctgttggcagca

SEQ ID NO: 3130128 - DNA, 25 bp, Homo sapien
gcaaaattacttcaactgcgtggaa

SEQ ID NO: 3130129 - DNA, 25 bp, Homo sapien
tctagtaccagaaggcagttaactg

SEQ ID NO: 3130130 - DNA, 25 bp, Homo sapien
acttttatggttccactacactggg

SEQ ID NO: 3130131 - DNA, 25 bp, Homo sapien
actgggtactactctcatgtgaggc

SEQ ID NO: 3130132 - DNA, 25 bp, Homo sapien
ctggagaaaccataacaagaaggat

SEQ ID NO: 3130133 - DNA, 25 bp, Homo sapien
gaaaatgaatacattattggtttgc

SEQ ID NO: 3130134 - DNA, 25 bp, Homo sapien
gcagccagaccatttataatgtaca

SEQ ID NO: 3130135 - DNA, 25 bp, Homo sapien
tctccgagatgcttagcctctttga

SEQ ID NO: 3130136 - DNA, 25 bp, Homo sapien
ggtttgcttcaacaacgcagccaga

SEQ ID NO: 3130137 - DNA, 25 bp, Homo sapien
cccacactggcggatgaagcagctg

SEQ ID NO: 3130138 - DNA, 25 bp, Homo sapien
gacaaggtaacggagcgctgagcct

SEQ ID NO: 3130139 - DNA, 25 bp, Homo sapien
gggctctactgcgacaaggtaacgg

SEQ ID NO: 3130140 - DNA, 25 bp, Homo sapien
cagctggtggggctctactgcgaca

SEQ ID NO: 3130141 - DNA, 25 bp, Homo sapien
aatattacccctatctttggagagg

SEQ ID NO: 3130142 - DNA, 25 bp, Homo sapien
tatagtatcagctacctaggagtag

SEQ ID NO: 3130143 - DNA, 25 bp, Homo sapien
tgcttaccctgcacactaggtcaat

SEQ ID NO: 3130144 - DNA, 25 bp, Homo sapien
gatctggtagtaacaattgtgcaca

SEQ ID NO: 3130145 - DNA, 25 bp, Homo sapien
caaattccccattccagccgaaaag

SEQ ID NO: 3130146 - DNA, 25 bp, Homo sapien
cattccagccgaaaagaactggatc

SEQ ID NO: 3130147 - DNA, 25 bp, Homo sapien
cgaaaagaactggatcggccctctg

SEQ ID NO: 3130148 - DNA, 25 bp, Homo sapien
ctggatcggccctctgcgcatgcgt

SEQ ID NO: 3130149 - DNA, 25 bp, Homo sapien
cccacacttccctccgcaacaccac

SEQ ID NO: 3130150 - DNA, 25 bp, Homo sapien
cctggaatgcttcgctttagcggac

SEQ ID NO: 3130151 - DNA, 25 bp, Homo sapien
tgcttcgctttagcggactccggtc

SEQ ID NO: 3130152 - DNA, 25 bp, Homo sapien
tcgctttagcggactccggtccact

SEQ ID NO: 3130153 - DNA, 25 bp, Homo sapien
gaatgcttcgctttagcggactccg

SEQ ID NO: 3130154 - DNA, 25 bp, Homo sapien
ttccctcaattcatacggggggcaa

SEQ ID NO: 3130155 - DNA, 25 bp, Homo sapien
catacggggggcaaaaccagactgt

SEQ ID NO: 3130156 - DNA, 25 bp, Homo sapien
tccctcaattcatacggggggcaaa

SEQ ID NO: 3130157 - DNA, 25 bp, Homo sapien
caattcatacggggggcaaaaccag

SEQ ID NO: 3130158 - DNA, 25 bp, Homo sapien
aaagtttctcatacaccaaggtgca

SEQ ID NO: 3130159 - DNA, 25 bp, Homo sapien
taatgacacctgtagtaaactgtac

SEQ ID NO: 3130160 - DNA, 25 bp, Homo sapien
gatgtgtgcactgaaattggctcct

SEQ ID NO: 3130161 - DNA, 25 bp, Homo sapien
ggctcctgcggctacatggcaacat

SEQ ID NO: 3130162 - DNA, 25 bp, Homo sapien
gatcaagtacaccagtgtgattcca

SEQ ID NO: 3130163 - DNA, 25 bp, Homo sapien
gttctgctggcccaaacaccaaaga

SEQ ID NO: 3130164 - DNA, 25 bp, Homo sapien
gtgtgattccataacccaggtgggt

SEQ ID NO: 3130165 - DNA, 25 bp, Homo sapien
tcatacccgaacacgatcaagtaca

SEQ ID NO: 3130166 - DNA, 25 bp, Homo sapien
tagtactcaatgtaaatcagagcat

SEQ ID NO: 3130167 - DNA, 25 bp, Homo sapien
agtactcaatgtaaatcagagcatg

SEQ ID NO: 3130168 - DNA, 25 bp, Homo sapien
gtactcaatgtaaatcagagcatgt

SEQ ID NO: 3130169 - DNA, 25 bp, Homo sapien
attagtactcaatgtaaatcagagc

SEQ ID NO: 3130170 - DNA, 25 bp, Homo sapien
agcacagtgggtggtcatcaatgta

SEQ ID NO: 3130171 - DNA, 25 bp, Homo sapien
atgtattcagaactacactgctaaa

SEQ ID NO: 3130172 - DNA, 25 bp, Homo sapien
tcaatgtattcagaactacactgct

SEQ ID NO: 3130173 - DNA, 25 bp, Homo sapien
cagtgggtggtcatcaatgtattca

SEQ ID NO: 3130174 - DNA, 25 bp, Homo sapien
gacatgttacaaatagttaaccttg

SEQ ID NO: 3130175 - DNA, 25 bp, Homo sapien
aaagatgacatgttacaaatagtta

SEQ ID NO: 3130176 - DNA, 25 bp, Homo sapien
acatgttacaaatagttaaccttgg

SEQ ID NO: 3130177 - DNA, 25 bp, Homo sapien
gatgacatgttacaaatagttaacc

SEQ ID NO: 3130178 - DNA, 25 bp, Homo sapien
tgacttaatcttggttagatgcttc

SEQ ID NO: 3130179 - DNA, 25 bp, Homo sapien
ctttgacttaatcttggttagatgc

SEQ ID NO: 3130180 - DNA, 25 bp, Homo sapien
cctggtagatgcctttgacttaatc

SEQ ID NO: 3130181 - DNA, 25 bp, Homo sapien
aggacctggtagatgcctttgactt

SEQ ID NO: 3130182 - DNA, 25 bp, Homo sapien
ccttgatgactggagaggtactacc

SEQ ID NO: 3130183 - DNA, 25 bp, Homo sapien
tattgccctatcctaatcactccag

SEQ ID NO: 3130184 - DNA, 25 bp, Homo sapien
tatactcctggccaatattgcccta

SEQ ID NO: 3130185 - DNA, 25 bp, Homo sapien
gggttagctaattcctatgcaaact

SEQ ID NO: 3130186 - DNA, 25 bp, Homo sapien
catgcctgccttggtagtgctgcac

SEQ ID NO: 3130187 - DNA, 25 bp, Homo sapien
tgcttggccgcacctatcttggtca

SEQ ID NO: 3130188 - DNA, 25 bp, Homo sapien
caagatcatagatggtgaggcaaac

SEQ ID NO: 3130189 - DNA, 25 bp, Homo sapien
gtaaaacccagaagttggcatcagg

SEQ ID NO: 3130190 - DNA, 25 bp, Homo sapien
gctaggtcaaatatcaggttggagt

SEQ ID NO: 3130191 - DNA, 25 bp, Homo sapien
catttttatggtctgatccagtgag

SEQ ID NO: 3130192 - DNA, 25 bp, Homo sapien
gagccaatgaggttttccatggcta

SEQ ID NO: 3130193 - DNA, 25 bp, Homo sapien
ttttatggtctgatccagtgaggag

SEQ ID NO: 3130194 - DNA, 25 bp, Homo sapien
cttgagtatgtctgcttgatgatga

SEQ ID NO: 3130195 - DNA, 25 bp, Homo sapien
tctgctagactgttgacttgtataa

SEQ ID NO: 3130196 - DNA, 25 bp, Homo sapien
ctggctgatctgctagactgttgac

SEQ ID NO: 3130197 - DNA, 25 bp, Homo sapien
gactgttgacttgtataagaacatc

SEQ ID NO: 3130198 - DNA, 25 bp, Homo sapien
tactgatatagagacattttgtgcc

SEQ ID NO: 3130199 - DNA, 25 bp, Homo sapien
aatgggtctcacatataccatgaaa

SEQ ID NO: 3130200 - DNA, 25 bp, Homo sapien
gactcacagaattgatttcatgcct

SEQ ID NO: 3130201 - DNA, 25 bp, Homo sapien
aaaatactgatatagagacattttg

SEQ ID NO: 3130202 - DNA, 25 bp, Homo sapien
cccaggaatcaatgactgaaaacca

SEQ ID NO: 3130203 - DNA, 25 bp, Homo sapien
tatttcagacttcacaactagttgc

SEQ ID NO: 3130204 - DNA, 25 bp, Homo sapien
tacccctctcgcatattgaaattga

SEQ ID NO: 3130205 - DNA, 25 bp, Homo sapien
caatgtgcacaattcaggcaaagga

SEQ ID NO: 3130206 - DNA, 25 bp, Homo sapien
taatagcaatttgttccagtttgat

SEQ ID NO: 3130207 - DNA, 25 bp, Homo sapien
ttaatagcaatttgttccagtttga

SEQ ID NO: 3130208 - DNA, 25 bp, Homo sapien
tttaatagcaatttgttccagtttg

SEQ ID NO: 3130209 - DNA, 25 bp, Homo sapien
gaaatgtggctcaaatgaagttgaa

SEQ ID NO: 3130210 - DNA, 25 bp, Homo sapien
cacaattccagattcaacagatgaa

SEQ ID NO: 3130211 - DNA, 25 bp, Homo sapien
gaagtttgcagattggagtcagtat

SEQ ID NO: 3130212 - DNA, 25 bp, Homo sapien
cagatgaacttgaacatgcttctgt

SEQ ID NO: 3130213 - DNA, 25 bp, Homo sapien
cttcattataacgtcttgcacttac

SEQ ID NO: 3130214 - DNA, 25 bp, Homo sapien
aatcttcattataacgtcttgcact

SEQ ID NO: 3130215 - DNA, 25 bp, Homo sapien
ttttaagctttcattcgcaagaata

SEQ ID NO: 3130216 - DNA, 25 bp, Homo sapien
gctttcattcgcaagaatattatta

SEQ ID NO: 3130217 - DNA, 25 bp, Homo sapien
gaaatccctggatacgttcaacatg

SEQ ID NO: 3130218 - DNA, 25 bp, Homo sapien
caagaagccggctattcaatgagct

SEQ ID NO: 3130219 - DNA, 25 bp, Homo sapien
tctggatgctaaaccttcacgatgt

SEQ ID NO: 3130220 - DNA, 25 bp, Homo sapien
cttggaaacatgtaatagctaggac

SEQ ID NO: 3130221 - DNA, 25 bp, Homo sapien
gattcagggtgtcgaaaagcaaatg

SEQ ID NO: 3130222 - DNA, 25 bp, Homo sapien
caaactagttgttgtgaatggtagc

SEQ ID NO: 3130223 - DNA, 25 bp, Homo sapien
gaatggtagcaatagcaggacactc

SEQ ID NO: 3130224 - DNA, 25 bp, Homo sapien
tgctacccgcataactgctgcacaa

SEQ ID NO: 3130225 - DNA, 25 bp, Homo sapien
aaagtatcacagtattatagtacca

SEQ ID NO: 3130226 - DNA, 25 bp, Homo sapien
taacaaaagtatcacagtattatag

SEQ ID NO: 3130227 - DNA, 25 bp, Homo sapien
gtatcacagtattatagtaccattt

SEQ ID NO: 3130228 - DNA, 25 bp, Homo sapien
caaaagtatcacagtattatagtac

SEQ ID NO: 3130229 - DNA, 25 bp, Homo sapien
ggcccaataatggtctacagaaccc

SEQ ID NO: 3130230 - DNA, 25 bp, Homo sapien
gcatcagcaacgtgaagcaacatca

SEQ ID NO: 3130231 - DNA, 25 bp, Homo sapien
tcaatgccgtttctggatggttaca

SEQ ID NO: 3130232 - DNA, 25 bp, Homo sapien
tcaggcaaatggatatcacctcccc

SEQ ID NO: 3130233 - DNA, 25 bp, Homo sapien
tccttctaccaaggcggttccgcaa

SEQ ID NO: 3130234 - DNA, 25 bp, Homo sapien
tccgcaaactgatgcagggcgggac

SEQ ID NO: 3130235 - DNA, 25 bp, Homo sapien
gggcgggactctcgctcggatatct

SEQ ID NO: 3130236 - DNA, 25 bp, Homo sapien
tgtttgccgtttcccgttccagaca

SEQ ID NO: 3130237 - DNA, 25 bp, Homo sapien
cagctggagcagccgcgatgccgcg

SEQ ID NO: 3130238 - DNA, 25 bp, Homo sapien
cagcaacagtagaagcagaagctgc

SEQ ID NO: 3130239 - DNA, 25 bp, Homo sapien
ctggagcagccgcgatgccgcgcac

SEQ ID NO: 3130240 - DNA, 25 bp, Homo sapien
ccgccgccagcagcaacagtagaag

SEQ ID NO: 3130241 - DNA, 25 bp, Homo sapien
tgtcccgcaagtgtgcgctggtgcc

SEQ ID NO: 3130242 - DNA, 25 bp, Homo sapien
ccaggaagatgtcccgcaagtgtgc

SEQ ID NO: 3130243 - DNA, 25 bp, Homo sapien
cggtactcggcgcagcggcccagga

SEQ ID NO: 3130244 - DNA, 25 bp, Homo sapien
cgggactcagcagtgcgcggtactc

SEQ ID NO: 3130245 - DNA, 25 bp, Homo sapien
cgttcaggaccatcgctgtctccac

SEQ ID NO: 3130246 - DNA, 25 bp, Homo sapien
caggaccatcgctgtctccacactc

SEQ ID NO: 3130247 - DNA, 25 bp, Homo sapien
tcaggaccatcgctgtctccacact

SEQ ID NO: 3130248 - DNA, 25 bp, Homo sapien
tgcagacacacttcacagccccctc

SEQ ID NO: 3130249 - DNA, 25 bp, Homo sapien
cagacacacttcacagccccctcct

SEQ ID NO: 3130250 - DNA, 25 bp, Homo sapien
ctgcagacacacttcacagccccct

SEQ ID NO: 3130251 - DNA, 25 bp, Homo sapien
acacacttcacagccccctcctcac

SEQ ID NO: 3130252 - DNA, 25 bp, Homo sapien
cagcacggagcagggatccttgtcc

SEQ ID NO: 3130253 - DNA, 25 bp, Homo sapien
aaaaggtcatagtctgagggcagca

SEQ ID NO: 3130254 - DNA, 25 bp, Homo sapien
tctctgggaatagagtgcctggaca

SEQ ID NO: 3130255 - DNA, 25 bp, Homo sapien
cagcgccactttaaaggcttcccag

SEQ ID NO: 3130256 - DNA, 25 bp, Homo sapien
ggtgttgtctgcaaagctgttaaca

SEQ ID NO: 3130257 - DNA, 25 bp, Homo sapien
agaaatctgcaaccctgccatacag

SEQ ID NO: 3130258 - DNA, 25 bp, Homo sapien
tgtcgacaccagctcaagaaatctg

SEQ ID NO: 3130259 - DNA, 25 bp, Homo sapien
ctgccatacagaacatcgctcaggg

SEQ ID NO: 3130260 - DNA, 25 bp, Homo sapien
aggaatccacaggattattttcaca

SEQ ID NO: 3130261 - DNA, 25 bp, Homo sapien
gatgtagggcaggattggtaatcga

SEQ ID NO: 3130262 - DNA, 25 bp, Homo sapien
gtagggcaggattggtaatcgagtc

SEQ ID NO: 3130263 - DNA, 25 bp, Homo sapien
aatccacaggattattttcacagtc

SEQ ID NO: 3130264 - DNA, 25 bp, Homo sapien
tgacgtggatcaccccagaactatc

SEQ ID NO: 3130265 - DNA, 25 bp, Homo sapien
ctgaaccattcagcatgacgtggat

SEQ ID NO: 3130266 - DNA, 25 bp, Homo sapien
ctcctgttggctctgaaccattcag

SEQ ID NO: 3130267 - DNA, 25 bp, Homo sapien
gatcaccccagaactatccttggaa

SEQ ID NO: 3130268 - DNA, 25 bp, Homo sapien
gaggtttggaatttcataatctgca

SEQ ID NO: 3130269 - DNA, 25 bp, Homo sapien
taacccagatctcgattcgtgtaat

SEQ ID NO: 3130270 - DNA, 25 bp, Homo sapien
tgggtcccccaatttcatgcataac

SEQ ID NO: 3130271 - DNA, 25 bp, Homo sapien
catgcataacccagatctcgattcg

SEQ ID NO: 3130272 - DNA, 25 bp, Homo sapien
gaagaatatcccagataaaggaggc

SEQ ID NO: 3130273 - DNA, 25 bp, Homo sapien
gctcgggactggctagtggcattcc

SEQ ID NO: 3130274 - DNA, 25 bp, Homo sapien
aagctaccaaggtcattcagaaagg

SEQ ID NO: 3130275 - DNA, 25 bp, Homo sapien
cactgtcttcgctggctgagaagaa

SEQ ID NO: 3130276 - DNA, 25 bp, Homo sapien
gtagtttgcaaatttatcacaatct

SEQ ID NO: 3130277 - DNA, 25 bp, Homo sapien
ttgcaaatttatcacaatctattgc

SEQ ID NO: 3130278 - DNA, 25 bp, Homo sapien
aagtagtttgcaaatttatcacaat

SEQ ID NO: 3130279 - DNA, 25 bp, Homo sapien
taattaagtagtttgcaaatttatc

SEQ ID NO: 3130280 - DNA, 25 bp, Homo sapien
tgtactggaaccccatgtccttcag

SEQ ID NO: 3130281 - DNA, 25 bp, Homo sapien
tttccaggactttcatgctgccttc

SEQ ID NO: 3130282 - DNA, 25 bp, Homo sapien
ttttccaggactttcatgctgcctt

SEQ ID NO: 3130283 - DNA, 25 bp, Homo sapien
gtactggaaccccatgtccttcagc

SEQ ID NO: 3130284 - DNA, 25 bp, Homo sapien
caggatgggtgctgtggtccacgca

SEQ ID NO: 3130285 - DNA, 25 bp, Homo sapien
aggatgggtgctgtggtccacgcac

SEQ ID NO: 3130286 - DNA, 25 bp, Homo sapien
atgggtgctgtggtccacgcactgt

SEQ ID NO: 3130287 - DNA, 25 bp, Homo sapien
gatgggtgctgtggtccacgcactg

SEQ ID NO: 3130288 - DNA, 25 bp, Homo sapien
aaaggattacataaaaggtggtgtg

SEQ ID NO: 3130289 - DNA, 25 bp, Homo sapien
acatacaaccaagccagcccatgac

SEQ ID NO: 3130290 - DNA, 25 bp, Homo sapien
attacataaaaggtggtgtgggcca

SEQ ID NO: 3130291 - DNA, 25 bp, Homo sapien
ggattacataaaaggtggtgtgggc

SEQ ID NO: 3130292 - DNA, 25 bp, Homo sapien
tgtggtgtggtaggaagaatgagaa

SEQ ID NO: 3130293 - DNA, 25 bp, Homo sapien
ggtgtggtaggaagaatgagaactt

SEQ ID NO: 3130294 - DNA, 25 bp, Homo sapien
tggtgtggtaggaagaatgagaact

SEQ ID NO: 3130295 - DNA, 25 bp, Homo sapien
gtgtggtaggaagaatgagaacttt

SEQ ID NO: 3130296 - DNA, 25 bp, Homo sapien
tatcccatggctctggactagtggc

SEQ ID NO: 3130297 - DNA, 25 bp, Homo sapien
tgatgcagttaatgtcccagactcg

SEQ ID NO: 3130298 - DNA, 25 bp, Homo sapien
gcttctctagacaacaggacctgct

SEQ ID NO: 3130299 - DNA, 25 bp, Homo sapien
caaatggaatctgcaacgtgcgttc

SEQ ID NO: 3130300 - DNA, 25 bp, Homo sapien
ccagaaggacaagcgcttctcgggc

SEQ ID NO: 3130301 - DNA, 25 bp, Homo sapien
agtccactccctgccccaagttctc

SEQ ID NO: 3130302 - DNA, 25 bp, Homo sapien
tatgactccccagaaggacaagcgc

SEQ ID NO: 3130303 - DNA, 25 bp, Homo sapien
acaagcgcttctcgggcaccgtcag

SEQ ID NO: 3130304 - DNA, 25 bp, Homo sapien
cggtgcgcgaagtcctgcaccgaaa

SEQ ID NO: 3130305 - DNA, 25 bp, Homo sapien
tgcaccgaaaccagcgcaagcaccc

SEQ ID NO: 3130306 - DNA, 25 bp, Homo sapien
ccgaaaccagcgcaagcaccccaag

SEQ ID NO: 3130307 - DNA, 25 bp, Homo sapien
aaaccagcgcaagcaccccaagttt

SEQ ID NO: 3130308 - DNA, 25 bp, Homo sapien
ctcttttctggttagcgcggagcga

SEQ ID NO: 3130309 - DNA, 25 bp, Homo sapien
agccatgagcagcaaagtctcccgt

SEQ ID NO: 3130310 - DNA, 25 bp, Homo sapien
gtctcttttctggttagcgcggagc

SEQ ID NO: 3130311 - DNA, 25 bp, Homo sapien
cttttctggttagcgcggagcgaga

SEQ ID NO: 3130312 - DNA, 25 bp, Homo sapien
gaatgataagacccgccctttgttc

SEQ ID NO: 3130313 - DNA, 25 bp, Homo sapien
cctttgttctgtataaagacttggg

SEQ ID NO: 3130314 - DNA, 25 bp, Homo sapien
tcctggaagccagcaccagaaagag

SEQ ID NO: 3130315 - DNA, 25 bp, Homo sapien
cttttctttgagtagcggctgctgc

SEQ ID NO: 3130316 - DNA, 25 bp, Homo sapien
agaacacgaatgatgactgcaaggg

SEQ ID NO: 3130317 - DNA, 25 bp, Homo sapien
tcaggacatcgttttcccagcaaaa

SEQ ID NO: 3130318 - DNA, 25 bp, Homo sapien
tcatttggtatacacagaacacgaa

SEQ ID NO: 3130319 - DNA, 25 bp, Homo sapien
cagtctgactcccaatgctttgtgt

SEQ ID NO: 3130320 - DNA, 25 bp, Homo sapien
tagtatacatatgtcttaagcaatc

SEQ ID NO: 3130321 - DNA, 25 bp, Homo sapien
agcaatcaacaagcatgcagtgtcc

SEQ ID NO: 3130322 - DNA, 25 bp, Homo sapien
agcatgcagtgtccgtgctgctgga

SEQ ID NO: 3130323 - DNA, 25 bp, Homo sapien
ccgtgctgctggagatataggaaaa

SEQ ID NO: 3130324 - DNA, 25 bp, Homo sapien
tcattataagtaactattatggctg

SEQ ID NO: 3130325 - DNA, 25 bp, Homo sapien
caaactaatacaagttccaaacagt

SEQ ID NO: 3130326 - DNA, 25 bp, Homo sapien
tccctcattataagtaactattatg

SEQ ID NO: 3130327 - DNA, 25 bp, Homo sapien
tacaagttccaaacagtttcagtaa

SEQ ID NO: 3130328 - DNA, 25 bp, Homo sapien
tacagggccatgagtgttgacgaac

SEQ ID NO: 3130329 - DNA, 25 bp, Homo sapien
aatcatacagttggtggccttttgg

SEQ ID NO: 3130330 - DNA, 25 bp, Homo sapien
tcagtgtcactttgcagtcagcgcc

SEQ ID NO: 3130331 - DNA, 25 bp, Homo sapien
tgcggcagctctcacatttgggttt

SEQ ID NO: 3130332 - DNA, 25 bp, Homo sapien
gctaataccgcttttacaatacaca

SEQ ID NO: 3130333 - DNA, 25 bp, Homo sapien
cacaccagtgtctacaccaaatgaa

SEQ ID NO: 3130334 - DNA, 25 bp, Homo sapien
tctgtaagaagctaataccgctttt

SEQ ID NO: 3130335 - DNA, 25 bp, Homo sapien
cgcttttacaatacacaccagtgtc

SEQ ID NO: 3130336 - DNA, 25 bp, Homo sapien
aaccggcggttgtatggttctgctc

SEQ ID NO: 3130337 - DNA, 25 bp, Homo sapien
tctgctctgggtcgcactcctaatg

SEQ ID NO: 3130338 - DNA, 25 bp, Homo sapien
cttgtacaaaggctagaaccggcgg

SEQ ID NO: 3130339 - DNA, 25 bp, Homo sapien
tgggtcgcactcctaatgtcccaca

SEQ ID NO: 3130340 - DNA, 25 bp, Homo sapien
gaatacagccaagtgtaaggtacct

SEQ ID NO: 3130341 - DNA, 25 bp, Homo sapien
gggaatacagccaagtgtaaggtac

SEQ ID NO: 3130342 - DNA, 25 bp, Homo sapien
cagccaagtgtaaggtacctggtac

SEQ ID NO: 3130343 - DNA, 25 bp, Homo sapien
ctagagggaatacagccaagtgtaa

SEQ ID NO: 3130344 - DNA, 25 bp, Homo sapien
tcagaaagtaccttgttaccaagtc

SEQ ID NO: 3130345 - DNA, 25 bp, Homo sapien
ctgttcaggttcagaaagtaccttg

SEQ ID NO: 3130346 - DNA, 25 bp, Homo sapien
aagtaccttgttaccaagtctatcg

SEQ ID NO: 3130347 - DNA, 25 bp, Homo sapien
gtaccttgttaccaagtctatcgtg

SEQ ID NO: 3130348 - DNA, 25 bp, Homo sapien
tctgtagtttacctgagggttcacc

SEQ ID NO: 3130349 - DNA, 25 bp, Homo sapien
gactaggcaggcatgcaattgactc

SEQ ID NO: 3130350 - DNA, 25 bp, Homo sapien
gtttggacacatatataatcacctg

SEQ ID NO: 3130351 - DNA, 25 bp, Homo sapien
aattgactcaactcttgccagagcc

SEQ ID NO: 3130352 - DNA, 25 bp, Homo sapien
tcctaaaattctaagcggagtgatt

SEQ ID NO: 3130353 - DNA, 25 bp, Homo sapien
catgtgggtgtttgaaacccttgcc

SEQ ID NO: 3130354 - DNA, 25 bp, Homo sapien
tgtgctttagagaacctgctgcatt

SEQ ID NO: 3130355 - DNA, 25 bp, Homo sapien
gcttcattggttatgcatgtgggtg

SEQ ID NO: 3130356 - DNA, 25 bp, Homo sapien
cacaatgttgtaagccccttggagg

SEQ ID NO: 3130357 - DNA, 25 bp, Homo sapien
taaggctgtgaattagaggtttccc

SEQ ID NO: 3130358 - DNA, 25 bp, Homo sapien
tggaggtttggagattccagcatct

SEQ ID NO: 3130359 - DNA, 25 bp, Homo sapien
cagaatgggcccctgctatgggcca

SEQ ID NO: 3130360 - DNA, 25 bp, Homo sapien
tgaactgcctccttggattgaagaa

SEQ ID NO: 3130361 - DNA, 25 bp, Homo sapien
tacagattagtctcatccaccgaag

SEQ ID NO: 3130362 - DNA, 25 bp, Homo sapien
tccaccgaagtcatgatctctgcat

SEQ ID NO: 3130363 - DNA, 25 bp, Homo sapien
tttggtcggtatgtctgtaagcttc

SEQ ID NO: 3130364 - DNA, 25 bp, Homo sapien
ggcctccatcgtggttttcctctct

SEQ ID NO: 3130365 - DNA, 25 bp, Homo sapien
aggtgactgaggtccggttatccat

SEQ ID NO: 3130366 - DNA, 25 bp, Homo sapien
cggttatccattccctcagctggct

SEQ ID NO: 3130367 - DNA, 25 bp, Homo sapien
cacacgaagaagctgtggcctcaca

SEQ ID NO: 3130368 - DNA, 25 bp, Homo sapien
ctctcaatatttccgggggtcttcg

SEQ ID NO: 3130369 - DNA, 25 bp, Homo sapien
ctcaatatttccgggggtcttcgtg

SEQ ID NO: 3130370 - DNA, 25 bp, Homo sapien
agcctccctctcaatatttccgggg

SEQ ID NO: 3130371 - DNA, 25 bp, Homo sapien
agagcctccctctcaatatttccgg

SEQ ID NO: 3130372 - DNA, 25 bp, Homo sapien
caacaaaggtagagtgatgtccaca

SEQ ID NO: 3130373 - DNA, 25 bp, Homo sapien
tagcgctcactcttgatattgtaca

SEQ ID NO: 3130374 - DNA, 25 bp, Homo sapien
gtttaactgctcattcatcacgtcc

SEQ ID NO: 3130375 - DNA, 25 bp, Homo sapien
tacattctagaggtttcaacaaagg

SEQ ID NO: 3130376 - DNA, 25 bp, Homo sapien
tcaccttggccttatctactatagc

SEQ ID NO: 3130377 - DNA, 25 bp, Homo sapien
acttgcagatctactatgtggttca

SEQ ID NO: 3130378 - DNA, 25 bp, Homo sapien
ggcagggttagcagacaacttgcag

SEQ ID NO: 3130379 - DNA, 25 bp, Homo sapien
tgtgtgccacgtctgttcgggcata

SEQ ID NO: 3130380 - DNA, 25 bp, Homo sapien
gcacacatttccctcggcaccccca

SEQ ID NO: 3130381 - DNA, 25 bp, Homo sapien
cacacatttccctcggcacccccag

SEQ ID NO: 3130382 - DNA, 25 bp, Homo sapien
aggtcccaacaggtgtctggattta

SEQ ID NO: 3130383 - DNA, 25 bp, Homo sapien
ctggtaaccaattattgggggtcag

SEQ ID NO: 3130384 - DNA, 25 bp, Homo sapien
ggtcaggtcccaacaggtgtctgga

SEQ ID NO: 3130385 - DNA, 25 bp, Homo sapien
tcaggtcccaacaggtgtctggatt

SEQ ID NO: 3130386 - DNA, 25 bp, Homo sapien
tccaagatcaaggcgtcaccaggct

SEQ ID NO: 3130387 - DNA, 25 bp, Homo sapien
caagatcaaggcgtcaccaggctga

SEQ ID NO: 3130388 - DNA, 25 bp, Homo sapien
agatcaaggcgtcaccaggctgatt

SEQ ID NO: 3130389 - DNA, 25 bp, Homo sapien
tggcttgtaagtggctgtcttctca

SEQ ID NO: 3130390 - DNA, 25 bp, Homo sapien
agaggtatccgaagcacaggtgaga

SEQ ID NO: 3130391 - DNA, 25 bp, Homo sapien
aactcctggactcatatattggtga

SEQ ID NO: 3130392 - DNA, 25 bp, Homo sapien
tgatgatgatgtggatgtacttttc

SEQ ID NO: 3130393 - DNA, 25 bp, Homo sapien
tgatgtggatgtacttttctgctgc

SEQ ID NO: 3130394 - DNA, 25 bp, Homo sapien
tggctgggttctgaaactgcacctc

SEQ ID NO: 3130395 - DNA, 25 bp, Homo sapien
gccggcaggaggctaggcagcaaga

SEQ ID NO: 3130396 - DNA, 25 bp, Homo sapien
ggccggcaggaggctaggcagcaag

SEQ ID NO: 3130397 - DNA, 25 bp, Homo sapien
ctggctgggttctgaaactgcacct

SEQ ID NO: 3130398 - DNA, 25 bp, Homo sapien
cagcagggtttgtccccggacaccg

SEQ ID NO: 3130399 - DNA, 25 bp, Homo sapien
ccggacaccgggctgaactcgcagt

SEQ ID NO: 3130400 - DNA, 25 bp, Homo sapien
ccgggctgaactcgcagttggccat

SEQ ID NO: 3130401 - DNA, 25 bp, Homo sapien
gcagcagggtttgtccccggacacc

SEQ ID NO: 3130402 - DNA, 25 bp, Homo sapien
accacgacgaggatcaggaccagga

SEQ ID NO: 3130403 - DNA, 25 bp, Homo sapien
ggatactgacgccaagacagagttg

SEQ ID NO: 3130404 - DNA, 25 bp, Homo sapien
ggaccaggatactgacgccaagaca

SEQ ID NO: 3130405 - DNA, 25 bp, Homo sapien
atcaggaccaggatactgacgccaa

SEQ ID NO: 3130406 - DNA, 25 bp, Homo sapien
gcccggaccgctccactgctggcgc

SEQ ID NO: 3130407 - DNA, 25 bp, Homo sapien
gtgcccggaccgctccactgctggc

SEQ ID NO: 3130408 - DNA, 25 bp, Homo sapien
tggtggtgcccggaccgctccactg

SEQ ID NO: 3130409 - DNA, 25 bp, Homo sapien
cttggtggtgcccggaccgctccac

SEQ ID NO: 3130410 - DNA, 25 bp, Homo sapien
tacttgacgcatcgcgccaggacgg

SEQ ID NO: 3130411 - DNA, 25 bp, Homo sapien
ttcagtgtacttgacgcatcgcgcc

SEQ ID NO: 3130412 - DNA, 25 bp, Homo sapien
ctcaggatgaatttcagtgtacttg

SEQ ID NO: 3130413 - DNA, 25 bp, Homo sapien
gtgtacttgacgcatcgcgccagga

SEQ ID NO: 3130414 - DNA, 25 bp, Homo sapien
cctgcatctgcgagttctattccgt

SEQ ID NO: 3130415 - DNA, 25 bp, Homo sapien
gacaccctgcatctgcgagttctat

SEQ ID NO: 3130416 - DNA, 25 bp, Homo sapien
tgcatctgcgagttctattccgtcc

SEQ ID NO: 3130417 - DNA, 25 bp, Homo sapien
tcagcgacaccctgcatctgcgagt

SEQ ID NO: 3130418 - DNA, 25 bp, Homo sapien
cacagagtgtaaagtagcagctccc

SEQ ID NO: 3130419 - DNA, 25 bp, Homo sapien
tagaacaactaacgggacgctggga

SEQ ID NO: 3130420 - DNA, 25 bp, Homo sapien
catactttacaatacagcctggagg

SEQ ID NO: 3130421 - DNA, 25 bp, Homo sapien
aatttcccggtgaaagcgaggcctg

SEQ ID NO: 3130422 - DNA, 25 bp, Homo sapien
catgatgtggactcaaggcagctca

SEQ ID NO: 3130423 - DNA, 25 bp, Homo sapien
catccatggagagggctggttttca

SEQ ID NO: 3130424 - DNA, 25 bp, Homo sapien
cagcagtctgcagctatcgtcagta

SEQ ID NO: 3130425 - DNA, 25 bp, Homo sapien
tcacccaggtgagattagtggaact

SEQ ID NO: 3130426 - DNA, 25 bp, Homo sapien
caagaagattctattccctggctgt

SEQ ID NO: 3130427 - DNA, 25 bp, Homo sapien
gcttgcagagctattatgacaccag

SEQ ID NO: 3130428 - DNA, 25 bp, Homo sapien
tttgtaactatagcagcacccaggc

SEQ ID NO: 3130429 - DNA, 25 bp, Homo sapien
tgtctgaagcaaaacacaaggccaa

SEQ ID NO: 3130430 - DNA, 25 bp, Homo sapien
aatatctaaactgacatttggcagc

SEQ ID NO: 3130431 - DNA, 25 bp, Homo sapien
tccaaaatatctaaactgacatttg

SEQ ID NO: 3130432 - DNA, 25 bp, Homo sapien
tccctccaaaatatctaaactgaca

SEQ ID NO: 3130433 - DNA, 25 bp, Homo sapien
caaaatatctaaactgacatttggc

SEQ ID NO: 3130434 - DNA, 25 bp, Homo sapien
caattctattaatgcagtggccttc

SEQ ID NO: 3130435 - DNA, 25 bp, Homo sapien
gatttggcagcgattttcctttagg

SEQ ID NO: 3130436 - DNA, 25 bp, Homo sapien
tgggaacttcctgttcccatactcc

SEQ ID NO: 3130437 - DNA, 25 bp, Homo sapien
catactccaactcccttgtaaaact

SEQ ID NO: 3130438 - DNA, 25 bp, Homo sapien
gataaaacacagaaaataaaacata

SEQ ID NO: 3130439 - DNA, 25 bp, Homo sapien
ctgagataaaacacagaaaataaaa

SEQ ID NO: 3130440 - DNA, 25 bp, Homo sapien
tgattttaaaaatatttttggagca

SEQ ID NO: 3130441 - DNA, 25 bp, Homo sapien
acacagaaaataaaacataaattat

SEQ ID NO: 3130442 - DNA, 25 bp, Homo sapien
tcattagtggctgatagtcttcttc

SEQ ID NO: 3130443 - DNA, 25 bp, Homo sapien
cttgttgcaaggtacggtctgagtt

SEQ ID NO: 3130444 - DNA, 25 bp, Homo sapien
ggtacggtctgagttcccaacttca

SEQ ID NO: 3130445 - DNA, 25 bp, Homo sapien
cccatacactttggcagtctacatg

SEQ ID NO: 3130446 - DNA, 25 bp, Homo sapien
actcacactataatgtctggatttt

SEQ ID NO: 3130447 - DNA, 25 bp, Homo sapien
agaagcagtctgcaagtgtaacttg

SEQ ID NO: 3130448 - DNA, 25 bp, Homo sapien
tctgcctagtttttggccaaagccc

SEQ ID NO: 3130449 - DNA, 25 bp, Homo sapien
ggacctatgaattgttaccattggc

SEQ ID NO: 3130450 - DNA, 25 bp, Homo sapien
ttggtctcactgggagctgcagact

SEQ ID NO: 3130451 - DNA, 25 bp, Homo sapien
tggtctcactgggagctgcagactg

SEQ ID NO: 3130452 - DNA, 25 bp, Homo sapien
cagttctatgcccttgttggagatg

SEQ ID NO: 3130453 - DNA, 25 bp, Homo sapien
tgaggctactgacctttggatgggt

SEQ ID NO: 3130454 - DNA, 25 bp, Homo sapien
tcttttagcagtcaggccctttctt

SEQ ID NO: 3130455 - DNA, 25 bp, Homo sapien
gagatgtgttaagatcatctggagg

SEQ ID NO: 3130456 - DNA, 25 bp, Homo sapien
tgtgaagatttgtttacgtagttgc

SEQ ID NO: 3130457 - DNA, 25 bp, Homo sapien
cattccatgtcttttagttgggaca

SEQ ID NO: 3130458 - DNA, 25 bp, Homo sapien
aagatttgtttacgtagttgcttca

SEQ ID NO: 3130459 - DNA, 25 bp, Homo sapien
gatttgtttacgtagttgcttcata

SEQ ID NO: 3130460 - DNA, 25 bp, Homo sapien
gagacttcagtagatatccatcagg

SEQ ID NO: 3130461 - DNA, 25 bp, Homo sapien
ggagacttcagtagatatccatcag

SEQ ID NO: 3130462 - DNA, 25 bp, Homo sapien
tggagacttcagtagatatccatca

SEQ ID NO: 3130463 - DNA, 25 bp, Homo sapien
gtctagctagcgatccatctattct

SEQ ID NO: 3130464 - DNA, 25 bp, Homo sapien
tctagctagcgatccatctattcta

SEQ ID NO: 3130465 - DNA, 25 bp, Homo sapien
agtctagctagcgatccatctattc

SEQ ID NO: 3130466 - DNA, 25 bp, Homo sapien
tagtctagctagcgatccatctatt

SEQ ID NO: 3130467 - DNA, 25 bp, Homo sapien
gatgatccggttttctagttatagg

SEQ ID NO: 3130468 - DNA, 25 bp, Homo sapien
ttgcctgattgtcccggtcagaaca

SEQ ID NO: 3130469 - DNA, 25 bp, Homo sapien
tgattcatgtacgttgaacctgcct

SEQ ID NO: 3130470 - DNA, 25 bp, Homo sapien
cccggtcagaacatccaatactatg

SEQ ID NO: 3130471 - DNA, 25 bp, Homo sapien
tcccgctggacctgtgtgaactgat

SEQ ID NO: 3130472 - DNA, 25 bp, Homo sapien
gtcccgctggacctgtgtgaactga

SEQ ID NO: 3130473 - DNA, 25 bp, Homo sapien
tcagcaaggtagcctagcagcgtgt

SEQ ID NO: 3130474 - DNA, 25 bp, Homo sapien
aaggtagcctagcagcgtgtcctcc

SEQ ID NO: 3130475 - DNA, 25 bp, Homo sapien
cagcaaggtagcctagcagcgtgtc

SEQ ID NO: 3130476 - DNA, 25 bp, Homo sapien
gcaaggtagcctagcagcgtgtcct

SEQ ID NO: 3130477 - DNA, 25 bp, Homo sapien
catccctgggcaatcccacagggcc

SEQ ID NO: 3130478 - DNA, 25 bp, Homo sapien
tccctgggcaatcccacagggccca

SEQ ID NO: 3130479 - DNA, 25 bp, Homo sapien
cacatccctgggcaatcccacaggg

SEQ ID NO: 3130480 - DNA, 25 bp, Homo sapien
acatccctgggcaatcccacagggc

SEQ ID NO: 3130481 - DNA, 25 bp, Homo sapien
cagggcctccagcagaagtcactct

SEQ ID NO: 3130482 - DNA, 25 bp, Homo sapien
gcctccagcagaagtcactctgttc

SEQ ID NO: 3130483 - DNA, 25 bp, Homo sapien
ctccagcagaagtcactctgttcac

SEQ ID NO: 3130484 - DNA, 25 bp, Homo sapien
gggcctccagcagaagtcactctgt

SEQ ID NO: 3130485 - DNA, 25 bp, Homo sapien
cccgaagtggatgctggtaccctac

SEQ ID NO: 3130486 - DNA, 25 bp, Homo sapien
tggactaatataagtatagatggca

SEQ ID NO: 3130487 - DNA, 25 bp, Homo sapien
taatataagtatagatggcatcagg

SEQ ID NO: 3130488 - DNA, 25 bp, Homo sapien
aggccttcacccgaagtggatgctg

SEQ ID NO: 3130489 - DNA, 25 bp, Homo sapien
tctgaaaaatgatggcaaagccagt

SEQ ID NO: 3130490 - DNA, 25 bp, Homo sapien
gcaagaaccttggtctaggtcccac

SEQ ID NO: 3130491 - DNA, 25 bp, Homo sapien
ccaagaattcggaagcaggctatgt

SEQ ID NO: 3130492 - DNA, 25 bp, Homo sapien
tttctgggcaggataaggctacatc

SEQ ID NO: 3130493 - DNA, 25 bp, Homo sapien
tcttgatgagggtatagttaccatc

SEQ ID NO: 3130494 - DNA, 25 bp, Homo sapien
tgacatgttaccagtttctattaca

SEQ ID NO: 3130495 - DNA, 25 bp, Homo sapien
catatatatactcttgatgagggta

SEQ ID NO: 3130496 - DNA, 25 bp, Homo sapien
aaaatttatcgttcaagtatgcagg

SEQ ID NO: 3130497 - DNA, 25 bp, Homo sapien
cagagagcacatgatatagtaattc

SEQ ID NO: 3130498 - DNA, 25 bp, Homo sapien
tatcttcacaacgacatctggagag

SEQ ID NO: 3130499 - DNA, 25 bp, Homo sapien
gaattatcttcccaacagaggtaaa

SEQ ID NO: 3130500 - DNA, 25 bp, Homo sapien
tggacatacatttcataaggtgctt

SEQ ID NO: 3130501 - DNA, 25 bp, Homo sapien
tactgaaacagggttgttgctgcag

SEQ ID NO: 3130502 - DNA, 25 bp, Homo sapien
cagaatactgaaacagggttgttgc

SEQ ID NO: 3130503 - DNA, 25 bp, Homo sapien
accgttttccagaatactgaaacag

SEQ ID NO: 3130504 - DNA, 25 bp, Homo sapien
tttccagaatactgaaacagggttg

SEQ ID NO: 3130505 - DNA, 25 bp, Homo sapien
tagccaaagtcagagtgggtacgtg

SEQ ID NO: 3130506 - DNA, 25 bp, Homo sapien
cccaggttcctggtagccaaagtca

SEQ ID NO: 3130507 - DNA, 25 bp, Homo sapien
tcagagtgggtacgtgcaaagattc

SEQ ID NO: 3130508 - DNA, 25 bp, Homo sapien
caaagattctgcaactggagcccat

SEQ ID NO: 3130509 - DNA, 25 bp, Homo sapien
tagattgttacgactgtcccaggta

SEQ ID NO: 3130510 - DNA, 25 bp, Homo sapien
gatgcaagttactagttcatgtaaa

SEQ ID NO: 3130511 - DNA, 25 bp, Homo sapien
catgtaaagatctgaggaccgtacc

SEQ ID NO: 3130512 - DNA, 25 bp, Homo sapien
cccaggtatctaagattgactaata

SEQ ID NO: 3130513 - DNA, 25 bp, Homo sapien
gtcaaagattttactgcgggatcca

SEQ ID NO: 3130514 - DNA, 25 bp, Homo sapien
cattgagcatcacatggaccacatc

SEQ ID NO: 3130515 - DNA, 25 bp, Homo sapien
tgcgggatccattgagcatcacatg

SEQ ID NO: 3130516 - DNA, 25 bp, Homo sapien
attttactgcgggatccattgagca

SEQ ID NO: 3130517 - DNA, 25 bp, Homo sapien
gcaacaggatacttgcaaacaggat

SEQ ID NO: 3130518 - DNA, 25 bp, Homo sapien
ctagagatgaaatattcactgtgat

SEQ ID NO: 3130519 - DNA, 25 bp, Homo sapien
caggatacttgcaaacaggatgcaa

SEQ ID NO: 3130520 - DNA, 25 bp, Homo sapien
atttgcaacaggatacttgcaaaca

SEQ ID NO: 3130521 - DNA, 25 bp, Homo sapien
gcacagttcccgatgttcccggtag

SEQ ID NO: 3130522 - DNA, 25 bp, Homo sapien
tttactactgaattggggtacacaa

SEQ ID NO: 3130523 - DNA, 25 bp, Homo sapien
tgctttcaaccactacagtacattg

SEQ ID NO: 3130524 - DNA, 25 bp, Homo sapien
aaagatagtgaaggccaagagccca

SEQ ID NO: 3130525 - DNA, 25 bp, Homo sapien
caaattatggacttccacactccca

SEQ ID NO: 3130526 - DNA, 25 bp, Homo sapien
ctgaaccttctctggttgcaaatta

SEQ ID NO: 3130527 - DNA, 25 bp, Homo sapien
gttgcaaattatggacttccacact

SEQ ID NO: 3130528 - DNA, 25 bp, Homo sapien
cttccaccatgtatcacccaggcct

SEQ ID NO: 3130529 - DNA, 25 bp, Homo sapien
tccttttgcttataatcgattccag

SEQ ID NO: 3130530 - DNA, 25 bp, Homo sapien
tgtagatattcttgcaggaaaattg

SEQ ID NO: 3130531 - DNA, 25 bp, Homo sapien
taatcgattccagctcttttatggt

SEQ ID NO: 3130532 - DNA, 25 bp, Homo sapien
tatggtgggatcctggcataagtct

SEQ ID NO: 3130533 - DNA, 25 bp, Homo sapien
tcagatgtgcaagatgaatcctcag

SEQ ID NO: 3130534 - DNA, 25 bp, Homo sapien
tctcagatgtgcaagatgaatcctc

SEQ ID NO: 3130535 - DNA, 25 bp, Homo sapien
cagatgtgcaagatgaatcctcagg

SEQ ID NO: 3130536 - DNA, 25 bp, Homo sapien
gatctcagatgtgcaagatgaatcc

SEQ ID NO: 3130537 - DNA, 25 bp, Homo sapien
aaaacatgtgttttggagccatcca

SEQ ID NO: 3130538 - DNA, 25 bp, Homo sapien
gagctaaaacaaccacagcgactgg

SEQ ID NO: 3130539 - DNA, 25 bp, Homo sapien
cattcctttcggtggcaaaacttgc

SEQ ID NO: 3130540 - DNA, 25 bp, Homo sapien
ttgaccttattgtggaggaccctcc

SEQ ID NO: 3130541 - DNA, 25 bp, Homo sapien
ctgcagggggagctaatggcaactt

SEQ ID NO: 3130542 - DNA, 25 bp, Homo sapien
ccatcctcatgtcgagccaagacta

SEQ ID NO: 3130543 - DNA, 25 bp, Homo sapien
cgggccccgattctgaagacattct

SEQ ID NO: 3130544 - DNA, 25 bp, Homo sapien
gggcaagtctgattctcactcagaa

SEQ ID NO: 3130545 - DNA, 25 bp, Homo sapien
caaggactcgatgagtcccgaaagc

SEQ ID NO: 3130546 - DNA, 25 bp, Homo sapien
ctgttgagcaaggactcgatgagtc

SEQ ID NO: 3130547 - DNA, 25 bp, Homo sapien
tcaaggggtatcctgttgagcaagg

SEQ ID NO: 3130548 - DNA, 25 bp, Homo sapien
tcgatgagtcccgaaagcagcaacc

SEQ ID NO: 3130549 - DNA, 25 bp, Homo sapien
ccgttagggaatagttcaaagcctg

SEQ ID NO: 3130550 - DNA, 25 bp, Homo sapien
gatgttaataaactcgcccaatgca

SEQ ID NO: 3130551 - DNA, 25 bp, Homo sapien
ctttgtgtgggtgagctaaggccaa

SEQ ID NO: 3130552 - DNA, 25 bp, Homo sapien
gaattccatagtttccaccgccttg

SEQ ID NO: 3130553 - DNA, 25 bp, Homo sapien
cactgaatgtatctgtgcaaccgtg

SEQ ID NO: 3130554 - DNA, 25 bp, Homo sapien
ggtgccatgcaccatccaccattct

SEQ ID NO: 3130555 - DNA, 25 bp, Homo sapien
tatcaggccctacacactgaatgta

SEQ ID NO: 3130556 - DNA, 25 bp, Homo sapien
tgcaaccgtgaatctgtggctggtg

SEQ ID NO: 3130557 - DNA, 25 bp, Homo sapien
tctgttctctagccgtgaagtcatg

SEQ ID NO: 3130558 - DNA, 25 bp, Homo sapien
gatctgttctctagccgtgaagtca

SEQ ID NO: 3130559 - DNA, 25 bp, Homo sapien
tgggatctgttctctagccgtgaag

SEQ ID NO: 3130560 - DNA, 25 bp, Homo sapien
gggatctgttctctagccgtgaagt

SEQ ID NO: 3130561 - DNA, 25 bp, Homo sapien
tgtttctgtcaatactctgtcacca

SEQ ID NO: 3130562 - DNA, 25 bp, Homo sapien
agttcaggctgaagtagagattccc

SEQ ID NO: 3130563 - DNA, 25 bp, Homo sapien
gagattcccccttgaatacacaggg

SEQ ID NO: 3130564 - DNA, 25 bp, Homo sapien
tgggccatctgctccacggcagtag

SEQ ID NO: 3130565 - DNA, 25 bp, Homo sapien
tgtgtcattgacagtcctaaccatc

SEQ ID NO: 3130566 - DNA, 25 bp, Homo sapien
ccaaattgtactttgtgctcatggg

SEQ ID NO: 3130567 - DNA, 25 bp, Homo sapien
cagtcctcctaaaagaccagagttt

SEQ ID NO: 3130568 - DNA, 25 bp, Homo sapien
tcacatcaccccaaattgtactttg

SEQ ID NO: 3130569 - DNA, 25 bp, Homo sapien
catgttaatccatgttagcctggcc

SEQ ID NO: 3130570 - DNA, 25 bp, Homo sapien
cacgagaactcactcgtgatgacag

SEQ ID NO: 3130571 - DNA, 25 bp, Homo sapien
caaaggaggagtggcacatcacatg

SEQ ID NO: 3130572 - DNA, 25 bp, Homo sapien
cacgggctgtacaggaaaccttata

SEQ ID NO: 3130573 - DNA, 25 bp, Homo sapien
caaagggaattgtgagtcagatgcc

SEQ ID NO: 3130574 - DNA, 25 bp, Homo sapien
ggtaaagtggaactctcaatggaga

SEQ ID NO: 3130575 - DNA, 25 bp, Homo sapien
tgacatggcaaataacccaagaggg

SEQ ID NO: 3130576 - DNA, 25 bp, Homo sapien
tgtaaactctttgcaccccttgaag

SEQ ID NO: 3130577 - DNA, 25 bp, Homo sapien
atggtggttctcatacatataaaac

SEQ ID NO: 3130578 - DNA, 25 bp, Homo sapien
agggtggtagtggactgatggttga

SEQ ID NO: 3130579 - DNA, 25 bp, Homo sapien
gggtggtagtggactgatggttgat

SEQ ID NO: 3130580 - DNA, 25 bp, Homo sapien
tgatggtggttctcatacatataaa

SEQ ID NO: 3130581 - DNA, 25 bp, Homo sapien
tgatctgtaaaaggtgctgaattgg

SEQ ID NO: 3130582 - DNA, 25 bp, Homo sapien
ctgtaaaaggtgctgaattggaggt

SEQ ID NO: 3130583 - DNA, 25 bp, Homo sapien
gtgctgaattggaggtaactgccat

SEQ ID NO: 3130584 - DNA, 25 bp, Homo sapien
ctggtgatgatctgtaaaaggtgct

SEQ ID NO: 3130585 - DNA, 25 bp, Homo sapien
tggaagcaaaaccgggaacatagta

SEQ ID NO: 3130586 - DNA, 25 bp, Homo sapien
ctggaagcaaaaccgggaacatagt

SEQ ID NO: 3130587 - DNA, 25 bp, Homo sapien
cctcctatctggcaacaggaatatt

SEQ ID NO: 3130588 - DNA, 25 bp, Homo sapien
gatcaacagggaagtcaatgcatgg

SEQ ID NO: 3130589 - DNA, 25 bp, Homo sapien
gtccgcagtaggctggatcaacagg

SEQ ID NO: 3130590 - DNA, 25 bp, Homo sapien
acagggaagtcaatgcatggcagct

SEQ ID NO: 3130591 - DNA, 25 bp, Homo sapien
cgcaaggcagtgacgggcactctga

SEQ ID NO: 3130592 - DNA, 25 bp, Homo sapien
cgatggatctgagagtccgcaaggc

SEQ ID NO: 3130593 - DNA, 25 bp, Homo sapien
tgaatacgatcttttctggacgaaa

SEQ ID NO: 3130594 - DNA, 25 bp, Homo sapien
agtttagcttgtttaatgaatacga

SEQ ID NO: 3130595 - DNA, 25 bp, Homo sapien
tgggcaacacccagattaagcagaa

SEQ ID NO: 3130596 - DNA, 25 bp, Homo sapien
tgaagatctgtagcctcaccctgct

SEQ ID NO: 3130597 - DNA, 25 bp, Homo sapien
aagtttgtcaccaaagaccaagcca

SEQ ID NO: 3130598 - DNA, 25 bp, Homo sapien
gacttcacagcaaagtggtctcaga

SEQ ID NO: 3130599 - DNA, 25 bp, Homo sapien
cctgcattccatcatgggcaggtgg

SEQ ID NO: 3130600 - DNA, 25 bp, Homo sapien
ggcctgcattccatcatgggcaggt

SEQ ID NO: 3130601 - DNA, 25 bp, Homo sapien
ccttgggcctgcattccatcatggg

SEQ ID NO: 3130602 - DNA, 25 bp, Homo sapien
ttgggcctgcattccatcatgggca

SEQ ID NO: 3130603 - DNA, 25 bp, Homo sapien
cctgctctgatgctgtgctgctgag

SEQ ID NO: 3130604 - DNA, 25 bp, Homo sapien
tggaaatgaggttggaagggcagga

SEQ ID NO: 3130605 - DNA, 25 bp, Homo sapien
agccaaggaggtgactgccccacag

SEQ ID NO: 3130606 - DNA, 25 bp, Homo sapien
ttggaagggcaggatgagccaagga

SEQ ID NO: 3130607 - DNA, 25 bp, Homo sapien
gaggcctgggccattcatcatagaa

SEQ ID NO: 3130608 - DNA, 25 bp, Homo sapien
tccctgggattgttcgcacttctgc

SEQ ID NO: 3130609 - DNA, 25 bp, Homo sapien
tccaatggcaggaatgcgactcaag

SEQ ID NO: 3130610 - DNA, 25 bp, Homo sapien
tctgcttggcttggaactggtgaca

SEQ ID NO: 3130611 - DNA, 25 bp, Homo sapien
gtaccaagatttcccctgtgcagct

SEQ ID NO: 3130612 - DNA, 25 bp, Homo sapien
ctgcttcttgaagccaaaccaggtc

SEQ ID NO: 3130613 - DNA, 25 bp, Homo sapien
aaccaggtcaggctgtgaactgaag

SEQ ID NO: 3130614 - DNA, 25 bp, Homo sapien
caggctgtgaactgaagaggtacca

SEQ ID NO: 3130615 - DNA, 25 bp, Homo sapien
caccattgctgtgaacagtacggca

SEQ ID NO: 3130616 - DNA, 25 bp, Homo sapien
caagtgaaccggatactaagccaag

SEQ ID NO: 3130617 - DNA, 25 bp, Homo sapien
tacggcatcgtctaattacaagtga

SEQ ID NO: 3130618 - DNA, 25 bp, Homo sapien
gagaatagtctccagtgccactacg

SEQ ID NO: 3130619 - DNA, 25 bp, Homo sapien
aacagatgccaattacggtgtacag

SEQ ID NO: 3130620 - DNA, 25 bp, Homo sapien
aagattggccatgttccacttggaa

SEQ ID NO: 3130621 - DNA, 25 bp, Homo sapien
aaatgctgttcgttcaaaagtggag

SEQ ID NO: 3130622 - DNA, 25 bp, Homo sapien
ggagtgcagctaacatgagtatcat

SEQ ID NO: 3130623 - DNA, 25 bp, Homo sapien
tgcataggtcttgtagagggtgctt

SEQ ID NO: 3130624 - DNA, 25 bp, Homo sapien
ataggtcttgtagagggtgcttgga

SEQ ID NO: 3130625 - DNA, 25 bp, Homo sapien
gctgcataggtcttgtagagggtgc

SEQ ID NO: 3130626 - DNA, 25 bp, Homo sapien
tggctgcataggtcttgtagagggt

SEQ ID NO: 3130627 - DNA, 25 bp, Homo sapien
tatattatgcttgtgtgtgggccgt

SEQ ID NO: 3130628 - DNA, 25 bp, Homo sapien
gtgtagatccacttagccctgtctg

SEQ ID NO: 3130629 - DNA, 25 bp, Homo sapien
gccttgctcttacctgttcatggaa

SEQ ID NO: 3130630 - DNA, 25 bp, Homo sapien
tgtctgctgtctcgatgggcgttgc

SEQ ID NO: 3130631 - DNA, 25 bp, Homo sapien
tggtgtgtttcctgtaagcctgaaa

SEQ ID NO: 3130632 - DNA, 25 bp, Homo sapien
tttgtctagacacttgcacagccat

SEQ ID NO: 3130633 - DNA, 25 bp, Homo sapien
gcctgaaacttacacgccacatttg

SEQ ID NO: 3130634 - DNA, 25 bp, Homo sapien
ggtgtgtttcctgtaagcctgaaac

SEQ ID NO: 3130635 - DNA, 25 bp, Homo sapien
cagaaactgtaatcttaggtctaaa

SEQ ID NO: 3130636 - DNA, 25 bp, Homo sapien
tgctatttcaagttgctcttggaaa

SEQ ID NO: 3130637 - DNA, 25 bp, Homo sapien
tacagccagaaactgtaatcttagg

SEQ ID NO: 3130638 - DNA, 25 bp, Homo sapien
gctatttcaagttgctcttggaaag

SEQ ID NO: 3130639 - DNA, 25 bp, Homo sapien
atttggcactcccataaccttggtt

SEQ ID NO: 3130640 - DNA, 25 bp, Homo sapien
ccgggacttggagaacgaggtcctg

SEQ ID NO: 3130641 - DNA, 25 bp, Homo sapien
ttagccagcccgaatgccaaccaag

SEQ ID NO: 3130642 - DNA, 25 bp, Homo sapien
gtgcttgacttggtattagatttgg

SEQ ID NO: 3130643 - DNA, 25 bp, Homo sapien
gtactctgttataaaacatcgtttg

SEQ ID NO: 3130644 - DNA, 25 bp, Homo sapien
gaactccctcattaagtagaattgt

SEQ ID NO: 3130645 - DNA, 25 bp, Homo sapien
agatggtgactgtgtactctgttat

SEQ ID NO: 3130646 - DNA, 25 bp, Homo sapien
gatgagaactccctcattaagtaga

SEQ ID NO: 3130647 - DNA, 25 bp, Homo sapien
cacaggtataggactctgctgtacc

SEQ ID NO: 3130648 - DNA, 25 bp, Homo sapien
tataggactctgctgtaccttttgc

SEQ ID NO: 3130649 - DNA, 25 bp, Homo sapien
taccttttgcttcgtatgttccttg

SEQ ID NO: 3130650 - DNA, 25 bp, Homo sapien
tcacccttcgccacaggtataggac

SEQ ID NO: 3130651 - DNA, 25 bp, Homo sapien
cagggttgacattccgttgttgttg

SEQ ID NO: 3130652 - DNA, 25 bp, Homo sapien
gttgtttctctgtagtcagctgata

SEQ ID NO: 3130653 - DNA, 25 bp, Homo sapien
tctcagggttgacattccgttgttg

SEQ ID NO: 3130654 - DNA, 25 bp, Homo sapien
ttctctgtagtcagctgataatgca

SEQ ID NO: 3130655 - DNA, 25 bp, Homo sapien
gaacttggcataagttctgaccaga

SEQ ID NO: 3130656 - DNA, 25 bp, Homo sapien
caaacaaggaaatacgtctcctctg

SEQ ID NO: 3130657 - DNA, 25 bp, Homo sapien
gatctgagctattctaatggaacaa

SEQ ID NO: 3130658 - DNA, 25 bp, Homo sapien
tttatgtggccgtgatgaacttggc

SEQ ID NO: 3130659 - DNA, 25 bp, Homo sapien
ggttacatgcattggtgactctgct

SEQ ID NO: 3130660 - DNA, 25 bp, Homo sapien
tacatgcattggtgactctgctgct

SEQ ID NO: 3130661 - DNA, 25 bp, Homo sapien
caggcaggttacatgcattggtgac

SEQ ID NO: 3130662 - DNA, 25 bp, Homo sapien
ctgcaggcaggttacatgcattggt

SEQ ID NO: 3130663 - DNA, 25 bp, Homo sapien
gggcccttgtattggtagctttgtg

SEQ ID NO: 3130664 - DNA, 25 bp, Homo sapien
tggcagccacttgggatctgagcag

SEQ ID NO: 3130665 - DNA, 25 bp, Homo sapien
tagctttgtgcaggagtaattggag

SEQ ID NO: 3130666 - DNA, 25 bp, Homo sapien
gaagcgtgggcctgaggttagtact

SEQ ID NO: 3130667 - DNA, 25 bp, Homo sapien
tctattgtggatgtgacggtgggcg

SEQ ID NO: 3130668 - DNA, 25 bp, Homo sapien
gtcaaggtgtctattgtggatgtga

SEQ ID NO: 3130669 - DNA, 25 bp, Homo sapien
caaggtgtctattgtggatgtgacg

SEQ ID NO: 3130670 - DNA, 25 bp, Homo sapien
ttgtggatgtgacggtgggcgtaac

SEQ ID NO: 3130671 - DNA, 25 bp, Homo sapien
cacggctgtagaaagtcagaggctc

SEQ ID NO: 3130672 - DNA, 25 bp, Homo sapien
caacaaagaggagcgtggacagacc

SEQ ID NO: 3130673 - DNA, 25 bp, Homo sapien
gaccaggagcttcacggctgtagaa

SEQ ID NO: 3130674 - DNA, 25 bp, Homo sapien
gaggctcgggatcagtttccccgaa

SEQ ID NO: 3130675 - DNA, 25 bp, Homo sapien
tggtggtgccggtgcccgtccaacc

SEQ ID NO: 3130676 - DNA, 25 bp, Homo sapien
gggagagcgtggtggtgccggtgcc

SEQ ID NO: 3130677 - DNA, 25 bp, Homo sapien
caaactttttagtctgagtggtggc

SEQ ID NO: 3130678 - DNA, 25 bp, Homo sapien
agagcgtggtggtgccggtgcccgt

SEQ ID NO: 3130679 - DNA, 25 bp, Homo sapien
cccggacagcggctgggggccagag

SEQ ID NO: 3130680 - DNA, 25 bp, Homo sapien
ggcccggacagcggctgggggccag

SEQ ID NO: 3130681 - DNA, 25 bp, Homo sapien
gggcccggacagcggctgggggcca

SEQ ID NO: 3130682 - DNA, 25 bp, Homo sapien
gcccggacagcggctgggggccaga

SEQ ID NO: 3130683 - DNA, 25 bp, Homo sapien
agcgcactccttccactgtactggg

SEQ ID NO: 3130684 - DNA, 25 bp, Homo sapien
cccggagcgagagaggcatctgctg

SEQ ID NO: 3130685 - DNA, 25 bp, Homo sapien
agtggacgggttcgctctgcgcccc

SEQ ID NO: 3130686 - DNA, 25 bp, Homo sapien
cttaccctagccatctgcgccgcct

SEQ ID NO: 3130687 - DNA, 25 bp, Homo sapien
cagggtctggcgagctaagggaagg

SEQ ID NO: 3130688 - DNA, 25 bp, Homo sapien
aaataattcacgagccagggtctgg

SEQ ID NO: 3130689 - DNA, 25 bp, Homo sapien
cgggctctccgaaagccgtcgcggt

SEQ ID NO: 3130690 - DNA, 25 bp, Homo sapien
ccagaagccgggtcataaataattc

SEQ ID NO: 3130691 - DNA, 25 bp, Homo sapien
caagcgttgcaagaagggagtgcag

SEQ ID NO: 3130692 - DNA, 25 bp, Homo sapien
gaggcgcaagcgttgcaagaaggga

SEQ ID NO: 3130693 - DNA, 25 bp, Homo sapien
cagggggttgagcaggcacctctac

SEQ ID NO: 3130694 - DNA, 25 bp, Homo sapien
gcaggcacctctacaggaaatggat

SEQ ID NO: 3130695 - DNA, 25 bp, Homo sapien
ggcaacagaagggtctaatgcggcc

SEQ ID NO: 3130696 - DNA, 25 bp, Homo sapien
caacagaagggtctaatgcggccgg

SEQ ID NO: 3130697 - DNA, 25 bp, Homo sapien
gagtttttaggagggtagctgcatt

SEQ ID NO: 3130698 - DNA, 25 bp, Homo sapien
caggagagtttttaggagggtagct

SEQ ID NO: 3130699 - DNA, 25 bp, Homo sapien
gggttttctgcccaaagactggtca

SEQ ID NO: 3130700 - DNA, 25 bp, Homo sapien
agactggtcaaggattgtgtgccga

SEQ ID NO: 3130701 - DNA, 25 bp, Homo sapien
gatgacactagtgaggtccccgagg

SEQ ID NO: 3130702 - DNA, 25 bp, Homo sapien
gctgccaaccttggagaatcgaggg

SEQ ID NO: 3130703 - DNA, 25 bp, Homo sapien
caggaagggtagaatgctgggacag

SEQ ID NO: 3130704 - DNA, 25 bp, Homo sapien
caggagttcccaggcatagagagga

SEQ ID NO: 3130705 - DNA, 25 bp, Homo sapien
tgggccttaggctggtagaagttgc

SEQ ID NO: 3130706 - DNA, 25 bp, Homo sapien
gtgggctcctttctcgtggatctgg

SEQ ID NO: 3130707 - DNA, 25 bp, Homo sapien
ctgctctgccgttgtctgctccatt

SEQ ID NO: 3130708 - DNA, 25 bp, Homo sapien
gacttcgagctctcggtgcttccgc

SEQ ID NO: 3130709 - DNA, 25 bp, Homo sapien
tccatttgacttcgagctctcggtg

SEQ ID NO: 3130710 - DNA, 25 bp, Homo sapien
gttgtctgctccatttgacttcgag

SEQ ID NO: 3130711 - DNA, 25 bp, Homo sapien
ttgcacttctccctcaagactcaaa

SEQ ID NO: 3130712 - DNA, 25 bp, Homo sapien
caccgccacaggaaattgtctctaa

SEQ ID NO: 3130713 - DNA, 25 bp, Homo sapien
accgccacaggaaattgtctctaat

SEQ ID NO: 3130714 - DNA, 25 bp, Homo sapien
aattgtctctaataatcctgcatct

SEQ ID NO: 3130715 - DNA, 25 bp, Homo sapien
ctcctggcagcagatgggagcagct

SEQ ID NO: 3130716 - DNA, 25 bp, Homo sapien
gatgggagcagctggcggtagggct

SEQ ID NO: 3130717 - DNA, 25 bp, Homo sapien
ttagtgaccatctctttcccagggc

SEQ ID NO: 3130718 - DNA, 25 bp, Homo sapien
ctggcggtagggctggggtaagttg

SEQ ID NO: 3130719 - DNA, 25 bp, Homo sapien
atgtggggattggccctctctgcct

SEQ ID NO: 3130720 - DNA, 25 bp, Homo sapien
gggtctcacttcactctgctccttg

SEQ ID NO: 3130721 - DNA, 25 bp, Homo sapien
ttgggtctcacttcactctgctcct

SEQ ID NO: 3130722 - DNA, 25 bp, Homo sapien
ttctggtttgggtctcacttcactc

SEQ ID NO: 3130723 - DNA, 25 bp, Homo sapien
gacaggtcatgtctcccttgctgcc

SEQ ID NO: 3130724 - DNA, 25 bp, Homo sapien
ctgtaggaacctctgacccaccctt

SEQ ID NO: 3130725 - DNA, 25 bp, Homo sapien
ttccccactgtaggaacctctgacc

SEQ ID NO: 3130726 - DNA, 25 bp, Homo sapien
ataaggaggacaggtcatgtctccc

SEQ ID NO: 3130727 - DNA, 25 bp, Homo sapien
taggctcggccttgattatagacca

SEQ ID NO: 3130728 - DNA, 25 bp, Homo sapien
tgtatttggtagagtgaatttccca

SEQ ID NO: 3130729 - DNA, 25 bp, Homo sapien
tttaatatttctcagcaaatgaagg

SEQ ID NO: 3130730 - DNA, 25 bp, Homo sapien
taattcacaagtgatagagctatct

SEQ ID NO: 3130731 - DNA, 25 bp, Homo sapien
aacacaaccctgatttcagagcagg

SEQ ID NO: 3130732 - DNA, 25 bp, Homo sapien
caatgccaccgtgaatggaatagtt

SEQ ID NO: 3130733 - DNA, 25 bp, Homo sapien
gaattattctgttactgcgctgtca

SEQ ID NO: 3130734 - DNA, 25 bp, Homo sapien
ggtttggatagatcttcagttccgc

SEQ ID NO: 3130735 - DNA, 25 bp, Homo sapien
gttgaggaaattgtatggacatgcc

SEQ ID NO: 3130736 - DNA, 25 bp, Homo sapien
tgaggaaattgtatggacatgcctt

SEQ ID NO: 3130737 - DNA, 25 bp, Homo sapien
aggaaattgtatggacatgcctttg

SEQ ID NO: 3130738 - DNA, 25 bp, Homo sapien
gaggaaattgtatggacatgccttt

SEQ ID NO: 3130739 - DNA, 25 bp, Homo sapien
gtttcaggcgtacatacataggcag

SEQ ID NO: 3130740 - DNA, 25 bp, Homo sapien
taaaacttctacaacttctggtgtc

SEQ ID NO: 3130741 - DNA, 25 bp, Homo sapien
tgtcagaactgtccagaagatggta

SEQ ID NO: 3130742 - DNA, 25 bp, Homo sapien
gagatgaagattgtgtttccgctta

SEQ ID NO: 3130743 - DNA, 25 bp, Homo sapien
ccagaataacccttaaagatgtatc

SEQ ID NO: 3130744 - DNA, 25 bp, Homo sapien
catgatgaatagtagcattttgtag

SEQ ID NO: 3130745 - DNA, 25 bp, Homo sapien
agcaaaatgtgagctgtatgtcatt

SEQ ID NO: 3130746 - DNA, 25 bp, Homo sapien
gaagcagagcagtgttaactttaag

SEQ ID NO: 3130747 - DNA, 25 bp, Homo sapien
gcagatacagctgccttagagggtg

SEQ ID NO: 3130748 - DNA, 25 bp, Homo sapien
cacctgggaagagcgtaggctcagc

SEQ ID NO: 3130749 - DNA, 25 bp, Homo sapien
cagtaaggaagggagctgtgcagcc

SEQ ID NO: 3130750 - DNA, 25 bp, Homo sapien
gagactacgaaaggagctgagcaga

SEQ ID NO: 3130751 - DNA, 25 bp, Homo sapien
tgtgttccctgtgagttactggggg

SEQ ID NO: 3130752 - DNA, 25 bp, Homo sapien
cttccaaggataatgcttttattcc

SEQ ID NO: 3130753 - DNA, 25 bp, Homo sapien
tccaaggataatgcttttattcctt

SEQ ID NO: 3130754 - DNA, 25 bp, Homo sapien
gtaagaaaatggatagttaactgta

SEQ ID NO: 3130755 - DNA, 25 bp, Homo sapien
ccctgtagagactgtgacacggttg

SEQ ID NO: 3130756 - DNA, 25 bp, Homo sapien
gactgtgacacggttgagggcttcc

SEQ ID NO: 3130757 - DNA, 25 bp, Homo sapien
cctgtagagactgtgacacggttga

SEQ ID NO: 3130758 - DNA, 25 bp, Homo sapien
tgtgacacggttgagggcttccatt

SEQ ID NO: 3130759 - DNA, 25 bp, Homo sapien
acagagcttcgtcgtgtgccacagc

SEQ ID NO: 3130760 - DNA, 25 bp, Homo sapien
tgagaaatacatcgaggcctctgtg

SEQ ID NO: 3130761 - DNA, 25 bp, Homo sapien
cacttttggaacacctgcagtgtgc

SEQ ID NO: 3130762 - DNA, 25 bp, Homo sapien
ttaggcagagatctagtgggcttcc

SEQ ID NO: 3130763 - DNA, 25 bp, Homo sapien
gacttcgagaatatagggatacatg

SEQ ID NO: 3130764 - DNA, 25 bp, Homo sapien
ctggacttcgagaatatagggatac

SEQ ID NO: 3130765 - DNA, 25 bp, Homo sapien
catggggcctgctcttagaaagttc

SEQ ID NO: 3130766 - DNA, 25 bp, Homo sapien
ggctggacttcgagaatatagggat

SEQ ID NO: 3130767 - DNA, 25 bp, Homo sapien
caagaaagcctgaagtcgggtatag

SEQ ID NO: 3130768 - DNA, 25 bp, Homo sapien
ggtgaacatattgtttctactggta

SEQ ID NO: 3130769 - DNA, 25 bp, Homo sapien
atgcatggggataggtattgcttgt

SEQ ID NO: 3130770 - DNA, 25 bp, Homo sapien
cctgaagtcgggtataggtgaacat

SEQ ID NO: 3130771 - DNA, 25 bp, Homo sapien
gatgtagtggttatcaagaactgca

SEQ ID NO: 3130772 - DNA, 25 bp, Homo sapien
catatgtggttactggccttgaact

SEQ ID NO: 3130773 - DNA, 25 bp, Homo sapien
taacatagttagaattgggaatccc

SEQ ID NO: 3130774 - DNA, 25 bp, Homo sapien
gcttgttccccacttgattcatctg

SEQ ID NO: 3130775 - DNA, 25 bp, Homo sapien
tcattatcagggagatgcctccagg

SEQ ID NO: 3130776 - DNA, 25 bp, Homo sapien
tctcggagcccaaacgtgagaagca

SEQ ID NO: 3130777 - DNA, 25 bp, Homo sapien
tagagatagatgtagccaggcttca

SEQ ID NO: 3130778 - DNA, 25 bp, Homo sapien
tctgggactggatacctggacttcc

SEQ ID NO: 3130779 - DNA, 25 bp, Homo sapien
cggcccccgagccgcgcggctgccg

SEQ ID NO: 3130780 - DNA, 25 bp, Homo sapien
gcccccgagccgcgcggctgccgtt

SEQ ID NO: 3130781 - DNA, 25 bp, Homo sapien
ccccggcccccgagccgcgcggctg

SEQ ID NO: 3130782 - DNA, 25 bp, Homo sapien
ccccgagccgcgcggctgccgttgc

SEQ ID NO: 3130783 - DNA, 25 bp, Homo sapien
gccgagccagccacggcgcgagaaa

SEQ ID NO: 3130784 - DNA, 25 bp, Homo sapien
agccacggcgcgagaaaccgtcgcc

SEQ ID NO: 3130785 - DNA, 25 bp, Homo sapien
cccgccacggcgagggcaggaagaa

SEQ ID NO: 3130786 - DNA, 25 bp, Homo sapien
cgcgagaaaccgtcgcccgccacgg

SEQ ID NO: 3130787 - DNA, 25 bp, Homo sapien
gcagactgcgggcagcggtggtggc

SEQ ID NO: 3130788 - DNA, 25 bp, Homo sapien
tccgggcaccgagtctgcaaaagag

SEQ ID NO: 3130789 - DNA, 25 bp, Homo sapien
gcaccgagtctgcaaaagaggccct

SEQ ID NO: 3130790 - DNA, 25 bp, Homo sapien
ggaccgccggacacctcgcagactg

SEQ ID NO: 3130791 - DNA, 25 bp, Homo sapien
agaagagatggaaccaaaatagcgg

SEQ ID NO: 3130792 - DNA, 25 bp, Homo sapien
tggaaccaaaatagcgggcaggcag

SEQ ID NO: 3130793 - DNA, 25 bp, Homo sapien
gagatggaaccaaaatagcgggcag

SEQ ID NO: 3130794 - DNA, 25 bp, Homo sapien
gatggaaccaaaatagcgggcaggc

SEQ ID NO: 3130795 - DNA, 25 bp, Homo sapien
tgttgtgaagctgcccaagctcctt

SEQ ID NO: 3130796 - DNA, 25 bp, Homo sapien
caagctccttcttgcccaaatgctt

SEQ ID NO: 3130797 - DNA, 25 bp, Homo sapien
tccttcttgcccaaatgctttggaa

SEQ ID NO: 3130798 - DNA, 25 bp, Homo sapien
ctgttgtgaagctgcccaagctcct

SEQ ID NO: 3130799 - DNA, 25 bp, Homo sapien
aagacagtgtggaaagtccgccggc

SEQ ID NO: 3130800 - DNA, 25 bp, Homo sapien
gcgccagcccttgaaactctgccgg

SEQ ID NO: 3130801 - DNA, 25 bp, Homo sapien
taaagcgacaaagtaaggacacagt

SEQ ID NO: 3130802 - DNA, 25 bp, Homo sapien
ggtccagccccaagtaaagcgacaa

SEQ ID NO: 3130803 - DNA, 25 bp, Homo sapien
ccgaagctggcacacgggaaatcga

SEQ ID NO: 3130804 - DNA, 25 bp, Homo sapien
ggagcgcgcaacaatcacttgggga

SEQ ID NO: 3130805 - DNA, 25 bp, Homo sapien
gtctcgacaccacgctcgttgcggg

SEQ ID NO: 3130806 - DNA, 25 bp, Homo sapien
gaaatcgaggtaccactgtcccctc

SEQ ID NO: 3130807 - DNA, 25 bp, Homo sapien
gacagaaccctcaaggcccatttat

SEQ ID NO: 3130808 - DNA, 25 bp, Homo sapien
gctcgtttgcaatcacgtaacccgc

SEQ ID NO: 3130809 - DNA, 25 bp, Homo sapien
cacgtaacccgctactgacgacaga

SEQ ID NO: 3130810 - DNA, 25 bp, Homo sapien
ggcccatttatatgcggttctcaag

SEQ ID NO: 3130811 - DNA, 25 bp, Homo sapien
tcagtgaggctcagttttgaccaca

SEQ ID NO: 3130812 - DNA, 25 bp, Homo sapien
taaataataaggttccgacggctgc

SEQ ID NO: 3130813 - DNA, 25 bp, Homo sapien
gaggaaagtccattctgacaactgg

SEQ ID NO: 3130814 - DNA, 25 bp, Homo sapien
ctatttaaaaggataggcacagcct

SEQ ID NO: 3130815 - DNA, 25 bp, Homo sapien
tgagcgtcagtccaaaaatgattgc

SEQ ID NO: 3130816 - DNA, 25 bp, Homo sapien
aatgtagaaaccctgaggcctggtg

SEQ ID NO: 3130817 - DNA, 25 bp, Homo sapien
caaatgttgataatgcaggcctgtc

SEQ ID NO: 3130818 - DNA, 25 bp, Homo sapien
taatgtcaccttacagcagagttct

SEQ ID NO: 3130819 - DNA, 25 bp, Homo sapien
cagttacaacgcagtgtggtgtgca

SEQ ID NO: 3130820 - DNA, 25 bp, Homo sapien
tgggtgtatactgaaaagaatggcc

SEQ ID NO: 3130821 - DNA, 25 bp, Homo sapien
gccctgtctttcaactggatgcaac

SEQ ID NO: 3130822 - DNA, 25 bp, Homo sapien
tacaaatatgggatcgagagctgac

SEQ ID NO: 3130823 - DNA, 25 bp, Homo sapien
catcggcacctaaccatgcttaagt

SEQ ID NO: 3130824 - DNA, 25 bp, Homo sapien
tgcttaagtctctccgtactaaaag

SEQ ID NO: 3130825 - DNA, 25 bp, Homo sapien
gaatgccgtcttgtgagtttctccc

SEQ ID NO: 3130826 - DNA, 25 bp, Homo sapien
catgaggttgccttcagtgacgaca

SEQ ID NO: 3130827 - DNA, 25 bp, Homo sapien
gatccccttgactgagatatgaaag

SEQ ID NO: 3130828 - DNA, 25 bp, Homo sapien
ccaacacgtggtagcaagactttct

SEQ ID NO: 3130829 - DNA, 25 bp, Homo sapien
taaggatgtgtgcattggccaccgc

SEQ ID NO: 3130830 - DNA, 25 bp, Homo sapien
ttagatgagccctccgtggatgaag

SEQ ID NO: 3130831 - DNA, 25 bp, Homo sapien
gaccgggagctccctaagggctaga

SEQ ID NO: 3130832 - DNA, 25 bp, Homo sapien
tggtgctaggaagtgcccaataaac

SEQ ID NO: 3130833 - DNA, 25 bp, Homo sapien
ctggtgctaggaagtgcccaataaa

SEQ ID NO: 3130834 - DNA, 25 bp, Homo sapien
gggagctccctaagggctagagcca

SEQ ID NO: 3130835 - DNA, 25 bp, Homo sapien
tcactttgcccatctagtacacagt

SEQ ID NO: 3130836 - DNA, 25 bp, Homo sapien
tacctaggctaaactggttcttcac

SEQ ID NO: 3130837 - DNA, 25 bp, Homo sapien
tctaccagtttctccttacctaggc

SEQ ID NO: 3130838 - DNA, 25 bp, Homo sapien
cagtatcgcaacaaggattaactta

SEQ ID NO: 3130839 - DNA, 25 bp, Homo sapien
ttaagaagactaagtgggcagcagg

SEQ ID NO: 3130840 - DNA, 25 bp, Homo sapien
catcagggaaggtcttggttacaag

SEQ ID NO: 3130841 - DNA, 25 bp, Homo sapien
taattcatgtcatcgcagtgggact

SEQ ID NO: 3130842 - DNA, 25 bp, Homo sapien
ctctaaagggctcggtgactgcaca

SEQ ID NO: 3130843 - DNA, 25 bp, Homo sapien
gtttaaaacttatgctatctgcggg

SEQ ID NO: 3130844 - DNA, 25 bp, Homo sapien
agatgattcgattctccgattggcc

SEQ ID NO: 3130845 - DNA, 25 bp, Homo sapien
ggccgacagcatcgtctcaaagaag

SEQ ID NO: 3130846 - DNA, 25 bp, Homo sapien
caaggtcacgggcaggtttaatggc

SEQ ID NO: 3130847 - DNA, 25 bp, Homo sapien
caaccgcatcatcggtgccaaggac

SEQ ID NO: 3130848 - DNA, 25 bp, Homo sapien
agttcgtggacctgtaagttccgcg

SEQ ID NO: 3130849 - DNA, 25 bp, Homo sapien
ggaaatgctccgctagcaaccgcat

SEQ ID NO: 3130850 - DNA, 25 bp, Homo sapien
taagttccgcggaaatgctccgcta

SEQ ID NO: 3130851 - DNA, 25 bp, Homo sapien
tccaggctagagaaaggcaccagtc

SEQ ID NO: 3130852 - DNA, 25 bp, Homo sapien
ttcgagatctgctttgagggctgcc

SEQ ID NO: 3130853 - DNA, 25 bp, Homo sapien
tagtacctgggtaagcactccaaga

SEQ ID NO: 3130854 - DNA, 25 bp, Homo sapien
ggcggagcctcgaaatgcagaacaa

SEQ ID NO: 3130855 - DNA, 25 bp, Homo sapien
caaggctccgtggtgcagtttggat

SEQ ID NO: 3130856 - DNA, 25 bp, Homo sapien
tattcccagataaatgacaagccag

SEQ ID NO: 3130857 - DNA, 25 bp, Homo sapien
caggcaatttgctagattgtggcac

SEQ ID NO: 3130858 - DNA, 25 bp, Homo sapien
tgaacatgaaggtaagtgaggcccc

SEQ ID NO: 3130859 - DNA, 25 bp, Homo sapien
tatcaagaactgcaacagctaggct

SEQ ID NO: 3130860 - DNA, 25 bp, Homo sapien
gatgcgtgatgtgatactagcaccc

SEQ ID NO: 3130861 - DNA, 25 bp, Homo sapien
catttattccagtcgggcagcatcc

SEQ ID NO: 3130862 - DNA, 25 bp, Homo sapien
gatgcaattggcaactcacccacgt

SEQ ID NO: 3130863 - DNA, 25 bp, Homo sapien
gaagctcggagaccgggtaaatcta

SEQ ID NO: 3130864 - DNA, 25 bp, Homo sapien
agacacttcagcctaagctcagctc

SEQ ID NO: 3130865 - DNA, 25 bp, Homo sapien
ggtaaatctacttggcctgtctggg

SEQ ID NO: 3130866 - DNA, 25 bp, Homo sapien
agcatctagcacattcgatggctat

SEQ ID NO: 3130867 - DNA, 25 bp, Homo sapien
ggtaagtcttatcccgctctctcac

SEQ ID NO: 3130868 - DNA, 25 bp, Homo sapien
ctctctcaccgaggacaaggagcac

SEQ ID NO: 3130869 - DNA, 25 bp, Homo sapien
cgctctctcaccgaggacaaggagc

SEQ ID NO: 3130870 - DNA, 25 bp, Homo sapien
tcctctccacaccaggtaagtctta

SEQ ID NO: 3130871 - DNA, 25 bp, Homo sapien
aaagcagaagcatgccctgtaagct

SEQ ID NO: 3130872 - DNA, 25 bp, Homo sapien
tttgcttaggccagccctcagcgag

SEQ ID NO: 3130873 - DNA, 25 bp, Homo sapien
ccacgccaggccaataataatgcta

SEQ ID NO: 3130874 - DNA, 25 bp, Homo sapien
tgctgctaagcagaagtgccctgtt

SEQ ID NO: 3130875 - DNA, 25 bp, Homo sapien
ctgttatgatcccaaaagatggtcc

SEQ ID NO: 3130876 - DNA, 25 bp, Homo sapien
tgagtagaagcaggcattgatgatc

SEQ ID NO: 3130877 - DNA, 25 bp, Homo sapien
ctccccagtgctgacagatgtcttg

SEQ ID NO: 3130878 - DNA, 25 bp, Homo sapien
tatgtgtgaatcaaagaaacagtgt

SEQ ID NO: 3130879 - DNA, 25 bp, Homo sapien
actgagcaggtccactgagcttcca

SEQ ID NO: 3130880 - DNA, 25 bp, Homo sapien
tcaaatcaggggctagagcccacat

SEQ ID NO: 3130881 - DNA, 25 bp, Homo sapien
tcatggggtgagagtcgaaatgcct

SEQ ID NO: 3130882 - DNA, 25 bp, Homo sapien
gcctgggggcttgacttgacactga

SEQ ID NO: 3130883 - DNA, 25 bp, Homo sapien
taacaaggtaccaccaacagaatgg

SEQ ID NO: 3130884 - DNA, 25 bp, Homo sapien
gcctcaggacattgggcctctagga

SEQ ID NO: 3130885 - DNA, 25 bp, Homo sapien
catatcatctctaccaggagaggca

SEQ ID NO: 3130886 - DNA, 25 bp, Homo sapien
caacattgacctttgctagcactgc

SEQ ID NO: 3130887 - DNA, 25 bp, Homo sapien
tgagcaaggtagttaagctttccaa

SEQ ID NO: 3130888 - DNA, 25 bp, Homo sapien
cctttaaagtctttgagattggaag

SEQ ID NO: 3130889 - DNA, 25 bp, Homo sapien
tagaccttaacgtgtgactgtgagc

SEQ ID NO: 3130890 - DNA, 25 bp, Homo sapien
tcatctgtacacagggatccgatgg

SEQ ID NO: 3130891 - DNA, 25 bp, Homo sapien
tgcccttccctatggctaacgctgt

SEQ ID NO: 3130892 - DNA, 25 bp, Homo sapien
ctatatccagtcctttgtttccaac

SEQ ID NO: 3130893 - DNA, 25 bp, Homo sapien
tttccaaccgccctcactatttctg

SEQ ID NO: 3130894 - DNA, 25 bp, Homo sapien
tatgaagaggtatctcagatgccag

SEQ ID NO: 3130895 - DNA, 25 bp, Homo sapien
gataagtggtttctattgttgcaac

SEQ ID NO: 3130896 - DNA, 25 bp, Homo sapien
aaggtaatttagcagattgttggca

SEQ ID NO: 3130897 - DNA, 25 bp, Homo sapien
tggctgactatcagccagggatcct

SEQ ID NO: 3130898 - DNA, 25 bp, Homo sapien
tcactatggcgtatacatgtaccct

SEQ ID NO: 3130899 - DNA, 25 bp, Homo sapien
gggtggtgtttgagatcttgattgg

SEQ ID NO: 3130900 - DNA, 25 bp, Homo sapien
ttttggtcttgattggccctgtggg

SEQ ID NO: 3130901 - DNA, 25 bp, Homo sapien
gtttgagatcttgattggcactgta

SEQ ID NO: 3130902 - DNA, 25 bp, Homo sapien
tgtgggggtgatctcttctatcctc

SEQ ID NO: 3130903 - DNA, 25 bp, Homo sapien
gggacctccattagctctgtaggga

SEQ ID NO: 3130904 - DNA, 25 bp, Homo sapien
gatctactggctggtccatttgctg

SEQ ID NO: 3130905 - DNA, 25 bp, Homo sapien
tctcagtgggagtggactcttcagt

SEQ ID NO: 3130906 - DNA, 25 bp, Homo sapien
cagtttgctctatggtggtggtatc

SEQ ID NO: 3130907 - DNA, 25 bp, Homo sapien
gatgatggtgagaatgggcagctct

SEQ ID NO: 3130908 - DNA, 25 bp, Homo sapien
tagatgatggtgagaatgggcagct

SEQ ID NO: 3130909 - DNA, 25 bp, Homo sapien
tgatggtgagaatgggcagctctga

SEQ ID NO: 3130910 - DNA, 25 bp, Homo sapien
ctgtagatgatggtgagaatgggca

SEQ ID NO: 3130911 - DNA, 25 bp, Homo sapien
tcacagggcactctatgcaaccaga

SEQ ID NO: 3130912 - DNA, 25 bp, Homo sapien
ctgtgaagctcaagcccagatattg

SEQ ID NO: 3130913 - DNA, 25 bp, Homo sapien
caagcccagatattgcagcagtttc

SEQ ID NO: 3130914 - DNA, 25 bp, Homo sapien
aatgagctctgcaaggacacgggtc

SEQ ID NO: 3130915 - DNA, 25 bp, Homo sapien
tccccaactctcgaagtgaaacact

SEQ ID NO: 3130916 - DNA, 25 bp, Homo sapien
cctgccaccatcagacatgctagag

SEQ ID NO: 3130917 - DNA, 25 bp, Homo sapien
tccctgtctgtgaaattatgattag

SEQ ID NO: 3130918 - DNA, 25 bp, Homo sapien
tagagaacagtgctttcaccaactt

SEQ ID NO: 3130919 - DNA, 25 bp, Homo sapien
taaaaaccattctctgttccgtgga

SEQ ID NO: 3130920 - DNA, 25 bp, Homo sapien
aaaccattctctgttccgtggagga

SEQ ID NO: 3130921 - DNA, 25 bp, Homo sapien
aaaaccattctctgttccgtggagg

SEQ ID NO: 3130922 - DNA, 25 bp, Homo sapien
aaaaaccattctctgttccgtggag

SEQ ID NO: 3130923 - DNA, 25 bp, Homo sapien
aggcaaagatccacccctccagaga

SEQ ID NO: 3130924 - DNA, 25 bp, Homo sapien
tctttgctatactctctgatcttcc

SEQ ID NO: 3130925 - DNA, 25 bp, Homo sapien
tgactcctactagaatcttccaggg

SEQ ID NO: 3130926 - DNA, 25 bp, Homo sapien
ctgcctgagtccagtatggtcaagg

SEQ ID NO: 3130927 - DNA, 25 bp, Homo sapien
agactacaccttagcaattttccca

SEQ ID NO: 3130928 - DNA, 25 bp, Homo sapien
tgagactacaccttagcaattttcc

SEQ ID NO: 3130929 - DNA, 25 bp, Homo sapien
cttgagactacaccttagcaatttt

SEQ ID NO: 3130930 - DNA, 25 bp, Homo sapien
gagactacaccttagcaattttccc

SEQ ID NO: 3130931 - DNA, 25 bp, Homo sapien
caggagagaggatagcagacccact

SEQ ID NO: 3130932 - DNA, 25 bp, Homo sapien
ctgggctgtgcctgatacaggatct

SEQ ID NO: 3130933 - DNA, 25 bp, Homo sapien
actgtaccagctgccagctaaacct

SEQ ID NO: 3130934 - DNA, 25 bp, Homo sapien
tatcccctagacaaagctgggctgt

SEQ ID NO: 3130935 - DNA, 25 bp, Homo sapien
atctattttgatgaaggacatgcca

SEQ ID NO: 3130936 - DNA, 25 bp, Homo sapien
tttgatgaaggacatgccaggtttc

SEQ ID NO: 3130937 - DNA, 25 bp, Homo sapien
tgaaggacatgccaggtttctcaac

SEQ ID NO: 3130938 - DNA, 25 bp, Homo sapien
tattttgatgaaggacatgccaggt

SEQ ID NO: 3130939 - DNA, 25 bp, Homo sapien
caccaaaagataaacacagttacct

SEQ ID NO: 3130940 - DNA, 25 bp, Homo sapien
tcaccaaaagataaacacagttacc

SEQ ID NO: 3130941 - DNA, 25 bp, Homo sapien
ctccagggtactctgactcggagga

SEQ ID NO: 3130942 - DNA, 25 bp, Homo sapien
ccagggtactctgactcggaggaga

SEQ ID NO: 3130943 - DNA, 25 bp, Homo sapien
ggagaggaagagtacgccgagggat

SEQ ID NO: 3130944 - DNA, 25 bp, Homo sapien
tgcagagcattatccctccagggta

SEQ ID NO: 3130945 - DNA, 25 bp, Homo sapien
cagaattgaagggtggtcccaggct

SEQ ID NO: 3130946 - DNA, 25 bp, Homo sapien
agacaaggatataggctggcccaag

SEQ ID NO: 3130947 - DNA, 25 bp, Homo sapien
catgacgcgactggttacttcagaa

SEQ ID NO: 3130948 - DNA, 25 bp, Homo sapien
tcaagtgggcaatcgtgacaagatg

SEQ ID NO: 3130949 - DNA, 25 bp, Homo sapien
caggaaatcctggggcaagatgctg

SEQ ID NO: 3130950 - DNA, 25 bp, Homo sapien
ggaaatcctggggcaagatgctgca

SEQ ID NO: 3130951 - DNA, 25 bp, Homo sapien
cagagaaggctttgtagacttgatt

SEQ ID NO: 3130952 - DNA, 25 bp, Homo sapien
gaaatcctggggcaagatgctgcat

SEQ ID NO: 3130953 - DNA, 25 bp, Homo sapien
caataattggacctgagctcatggc

SEQ ID NO: 3130954 - DNA, 25 bp, Homo sapien
cacttgcagataagcgaccttggtc

SEQ ID NO: 3130955 - DNA, 25 bp, Homo sapien
gaaactgggagagatcagcgctcca

SEQ ID NO: 3130956 - DNA, 25 bp, Homo sapien
cctgtgagcgtttgcctctggagac

SEQ ID NO: 3130957 - DNA, 25 bp, Homo sapien
gacattgtgacattgtgagagctaa

SEQ ID NO: 3130958 - DNA, 25 bp, Homo sapien
gagagctaatgaacattatccattc

SEQ ID NO: 3130959 - DNA, 25 bp, Homo sapien
cgatatggacattgtgacattgtga

SEQ ID NO: 3130960 - DNA, 25 bp, Homo sapien
gaataataacgatatggacattgtg

SEQ ID NO: 3130961 - DNA, 25 bp, Homo sapien
tacaagacgagcataattatcctat

SEQ ID NO: 3130962 - DNA, 25 bp, Homo sapien
tctgcatctgcttgcgtagagccag

SEQ ID NO: 3130963 - DNA, 25 bp, Homo sapien
ccccatgtgacaaatctgtaccagg

SEQ ID NO: 3130964 - DNA, 25 bp, Homo sapien
tacaatacctgcaacttacaagacg

SEQ ID NO: 3130965 - DNA, 25 bp, Homo sapien
aacacagggagaccgtctccctcca

SEQ ID NO: 3130966 - DNA, 25 bp, Homo sapien
acatagcaagaacctcatctgtaca

SEQ ID NO: 3130967 - DNA, 25 bp, Homo sapien
gatgaacaaccggatgaagagatag

SEQ ID NO: 3130968 - DNA, 25 bp, Homo sapien
gatagggcaaagcacgtgggaagga

SEQ ID NO: 3130969 - DNA, 25 bp, Homo sapien
gtaaagtatattacaaatgatacag

SEQ ID NO: 3130970 - DNA, 25 bp, Homo sapien
tgtaaagtatattacaaatgataca

SEQ ID NO: 3130971 - DNA, 25 bp, Homo sapien
ttgtaaagtatattacaaatgatac

SEQ ID NO: 3130972 - DNA, 25 bp, Homo sapien
tccttctgaaactagtccaatcaat

SEQ ID NO: 3130973 - DNA, 25 bp, Homo sapien
ctaccagaggtacaaaaaggagctg

SEQ ID NO: 3130974 - DNA, 25 bp, Homo sapien
cagaggtacaaaaaggagctggtac

SEQ ID NO: 3130975 - DNA, 25 bp, Homo sapien
aggtacaaaaaggagctggtaccat

SEQ ID NO: 3130976 - DNA, 25 bp, Homo sapien
gatgctaggataccactccaaaagg

SEQ ID NO: 3130977 - DNA, 25 bp, Homo sapien
tcatgcatgtgactagaccacaaca

SEQ ID NO: 3130978 - DNA, 25 bp, Homo sapien
gatgaatttggtccatgggccatag

SEQ ID NO: 3130979 - DNA, 25 bp, Homo sapien
tgttccaggcaaatggacatcctct

SEQ ID NO: 3130980 - DNA, 25 bp, Homo sapien
cttcagacaaatacttaggaactgg

SEQ ID NO: 3130981 - DNA, 25 bp, Homo sapien
gagatgatcccacacgtcctgtgag

SEQ ID NO: 3130982 - DNA, 25 bp, Homo sapien
tcccacacgtcctgtgaggaagtga

SEQ ID NO: 3130983 - DNA, 25 bp, Homo sapien
cttaggaactggtagttcatctggg

SEQ ID NO: 3130984 - DNA, 25 bp, Homo sapien
atcactcttattcaccacagggatg

SEQ ID NO: 3130985 - DNA, 25 bp, Homo sapien
cccttcaattcaataatacgatggt

SEQ ID NO: 3130986 - DNA, 25 bp, Homo sapien
actttcatcactcttattcaccaca

SEQ ID NO: 3130987 - DNA, 25 bp, Homo sapien
ttcaattcaataatacgatggtgtc

SEQ ID NO: 3130988 - DNA, 25 bp, Homo sapien
caagcccaacctgaggaaaaagtgt

SEQ ID NO: 3130989 - DNA, 25 bp, Homo sapien
aggctcctaaacaggttgaagtacg

SEQ ID NO: 3130990 - DNA, 25 bp, Homo sapien
tacgtgctgcttttacaagcccaac

SEQ ID NO: 3130991 - DNA, 25 bp, Homo sapien
acaagataacatggccaaggctcct

SEQ ID NO: 3130992 - DNA, 25 bp, Homo sapien
aatgtcagtatcaaggaggagtctc

SEQ ID NO: 3130993 - DNA, 25 bp, Homo sapien
tgagaagtccacgtagagatacaga

SEQ ID NO: 3130994 - DNA, 25 bp, Homo sapien
ttgcacacccaaagttgccactggg

SEQ ID NO: 3130995 - DNA, 25 bp, Homo sapien
aaaacattgtttagacccatcatgg

SEQ ID NO: 3130996 - DNA, 25 bp, Homo sapien
caccttgacaaagatattcacagga

SEQ ID NO: 3130997 - DNA, 25 bp, Homo sapien
tcacccccgataatatctgccactg

SEQ ID NO: 3130998 - DNA, 25 bp, Homo sapien
catcaccttgacaaagatattcaca

SEQ ID NO: 3130999 - DNA, 25 bp, Homo sapien
ttgacaaagatattcacaggaaagc

SEQ ID NO: 3131000 - DNA, 25 bp, Homo sapien
taattgccgctctaccacttacgat

SEQ ID NO: 3131001 - DNA, 25 bp, Homo sapien
cgatcatttggcttaccaccaggga

SEQ ID NO: 3131002 - DNA, 25 bp, Homo sapien
tgggcagaccacacttagggaattg

SEQ ID NO: 3131003 - DNA, 25 bp, Homo sapien
gaattgccttctgatgctacagttc

SEQ ID NO: 3131004 - DNA, 25 bp, Homo sapien
tcctgagatatcttgatatctgctt

SEQ ID NO: 3131005 - DNA, 25 bp, Homo sapien
gttccaatgcagcaggcatatgcct

SEQ ID NO: 3131006 - DNA, 25 bp, Homo sapien
cagctagaacacttggatttcctcc

SEQ ID NO: 3131007 - DNA, 25 bp, Homo sapien
aaaccattaccacagctagaacact

SEQ ID NO: 3131008 - DNA, 25 bp, Homo sapien
actccaagttcactgccacatccat

SEQ ID NO: 3131009 - DNA, 25 bp, Homo sapien
tcagtctccaaaatcctccccaccc

SEQ ID NO: 3131010 - DNA, 25 bp, Homo sapien
cccactccaagttcactgccacatc

SEQ ID NO: 3131011 - DNA, 25 bp, Homo sapien
ccacccactccaagttcactgccac

SEQ ID NO: 3131012 - DNA, 25 bp, Homo sapien
agctcccacataaatggcatctcct

SEQ ID NO: 3131013 - DNA, 25 bp, Homo sapien
cacataaatggcatctccttcaagt

SEQ ID NO: 3131014 - DNA, 25 bp, Homo sapien
atggcatctccttcaagtcttctac

SEQ ID NO: 3131015 - DNA, 25 bp, Homo sapien
caagctcccacataaatggcatctc

SEQ ID NO: 3131016 - DNA, 25 bp, Homo sapien
tatgttcctccacacatgtaaaggc

SEQ ID NO: 3131017 - DNA, 25 bp, Homo sapien
cagtggctccgtgtgttaaaaaaca

SEQ ID NO: 3131018 - DNA, 25 bp, Homo sapien
gagtcgactcaatttagcccaagtg

SEQ ID NO: 3131019 - DNA, 25 bp, Homo sapien
tatgccgaacctaactacagatgac

SEQ ID NO: 3131020 - DNA, 25 bp, Homo sapien
ttcttgctctcatccttacccttat

SEQ ID NO: 3131021 - DNA, 25 bp, Homo sapien
ttacccttattgttctgatcctgct

SEQ ID NO: 3131022 - DNA, 25 bp, Homo sapien
tcatccttacccttattgttctgat

SEQ ID NO: 3131023 - DNA, 25 bp, Homo sapien
tgctctcatccttacccttattgtt

SEQ ID NO: 3131024 - DNA, 25 bp, Homo sapien
caatgcaggaactgatgtcgagaca

SEQ ID NO: 3131025 - DNA, 25 bp, Homo sapien
tatgaagtagtgaaatgccaatgtc

SEQ ID NO: 3131026 - DNA, 25 bp, Homo sapien
tcagtccccgagactgcctgaagac

SEQ ID NO: 3131027 - DNA, 25 bp, Homo sapien
agacctgcttgtttcagaagtggca

SEQ ID NO: 3131028 - DNA, 25 bp, Homo sapien
cagatttagctggacatcttgtagt

SEQ ID NO: 3131029 - DNA, 25 bp, Homo sapien
gttccccaaatatctcgctgtctaa

SEQ ID NO: 3131030 - DNA, 25 bp, Homo sapien
gtggcatcgcattgtaaaaacctca

SEQ ID NO: 3131031 - DNA, 25 bp, Homo sapien
gcccagttacattcgagaacagata

SEQ ID NO: 3131032 - DNA, 25 bp, Homo sapien
tctgtacttgggttttcacccagaa

SEQ ID NO: 3131033 - DNA, 25 bp, Homo sapien
agagcagtagatctgtacttgggtt

SEQ ID NO: 3131034 - DNA, 25 bp, Homo sapien
cagtagatctgtacttgggttttca

SEQ ID NO: 3131035 - DNA, 25 bp, Homo sapien
tagatctgtacttgggttttcaccc

SEQ ID NO: 3131036 - DNA, 25 bp, Homo sapien
atccacagattcaggaaccccaatc

SEQ ID NO: 3131037 - DNA, 25 bp, Homo sapien
ccacagattcaggaaccccaatcat

SEQ ID NO: 3131038 - DNA, 25 bp, Homo sapien
acagacttgactgtcatccacagat

SEQ ID NO: 3131039 - DNA, 25 bp, Homo sapien
gcagggagacacagacttgactgtc

SEQ ID NO: 3131040 - DNA, 25 bp, Homo sapien
ccgggcatctgggaaacaggagact

SEQ ID NO: 3131041 - DNA, 25 bp, Homo sapien
tgttatgtgcacgtcagtgaggagc

SEQ ID NO: 3131042 - DNA, 25 bp, Homo sapien
cacgtcagtgaggagccgggcatct

SEQ ID NO: 3131043 - DNA, 25 bp, Homo sapien
gagccgggcatctgggaaacaggag

SEQ ID NO: 3131044 - DNA, 25 bp, Homo sapien
tttgtcacagcattcttgcgtaaag

SEQ ID NO: 3131045 - DNA, 25 bp, Homo sapien
cagaagcatggacttaataatcttc

SEQ ID NO: 3131046 - DNA, 25 bp, Homo sapien
gggctgtcagaagcatggacttaat

SEQ ID NO: 3131047 - DNA, 25 bp, Homo sapien
tgtcagaagcatggacttaataatc

SEQ ID NO: 3131048 - DNA, 25 bp, Homo sapien
ttgcaattatttcatttggctcttg

SEQ ID NO: 3131049 - DNA, 25 bp, Homo sapien
tgttgcaattatttcatttggctct

SEQ ID NO: 3131050 - DNA, 25 bp, Homo sapien
aattatttcatttggctcttggaaa

SEQ ID NO: 3131051 - DNA, 25 bp, Homo sapien
gcaattatttcatttggctcttgga

SEQ ID NO: 3131052 - DNA, 25 bp, Homo sapien
tgcagaacagcggagtttcgtgcgc

SEQ ID NO: 3131053 - DNA, 25 bp, Homo sapien
acagcggagtttcgtgcgccacgaa

SEQ ID NO: 3131054 - DNA, 25 bp, Homo sapien
agaacagcggagtttcgtgcgccac

SEQ ID NO: 3131055 - DNA, 25 bp, Homo sapien
gtttcgtgcgccacgaatgctgctg

SEQ ID NO: 3131056 - DNA, 25 bp, Homo sapien
tctggatcaaagacctggattgaag

SEQ ID NO: 3131057 - DNA, 25 bp, Homo sapien
gatcaaagacctggattgaagtcat

SEQ ID NO: 3131058 - DNA, 25 bp, Homo sapien
gatctggatcaaagacctggattga

SEQ ID NO: 3131059 - DNA, 25 bp, Homo sapien
gagatctggatcaaagacctggatt

SEQ ID NO: 3131060 - DNA, 25 bp, Homo sapien
gcttagtgaactcagtcaacaccct

SEQ ID NO: 3131061 - DNA, 25 bp, Homo sapien
tctttaaagacagcaactattactg

SEQ ID NO: 3131062 - DNA, 25 bp, Homo sapien
gattctatggcctcatcgtctgtcc

SEQ ID NO: 3131063 - DNA, 25 bp, Homo sapien
tcactgcttagtgaactcagtcaac

SEQ ID NO: 3131064 - DNA, 25 bp, Homo sapien
gtgggtttcacgaagcatgtcctca

SEQ ID NO: 3131065 - DNA, 25 bp, Homo sapien
gagatggcacctttcagtaagcagc

SEQ ID NO: 3131066 - DNA, 25 bp, Homo sapien
tgctgttgggtattccgataccggg

SEQ ID NO: 3131067 - DNA, 25 bp, Homo sapien
tgttctggggaaaactgttccatga

SEQ ID NO: 3131068 - DNA, 25 bp, Homo sapien
tgatggctgacttggtggtcccagt

SEQ ID NO: 3131069 - DNA, 25 bp, Homo sapien
tgtcgcatcccagcatgacaaggtt

SEQ ID NO: 3131070 - DNA, 25 bp, Homo sapien
aaggttagaggtgccccgagctaag

SEQ ID NO: 3131071 - DNA, 25 bp, Homo sapien
ctaagaggtacgatgatggctgact

SEQ ID NO: 3131072 - DNA, 25 bp, Homo sapien
tcgaggttaccacacgaacaccgtg

SEQ ID NO: 3131073 - DNA, 25 bp, Homo sapien
ggagtagtgtttcgaggttaccaca

SEQ ID NO: 3131074 - DNA, 25 bp, Homo sapien
cgtctcctgacaatgatagcaagga

SEQ ID NO: 3131075 - DNA, 25 bp, Homo sapien
gaaagaaggcactacccgtctcctg

SEQ ID NO: 3131076 - DNA, 25 bp, Homo sapien
cttgtggtcaaggcccaccaggtac

SEQ ID NO: 3131077 - DNA, 25 bp, Homo sapien
ggtaccccacatcctgtggcccatg

SEQ ID NO: 3131078 - DNA, 25 bp, Homo sapien
aggcccaccaggtaccccacatcct

SEQ ID NO: 3131079 - DNA, 25 bp, Homo sapien
tggcccatgaagactgaggtcagac

SEQ ID NO: 3131080 - DNA, 25 bp, Homo sapien
tggtcactcaccctatagcaagatc

SEQ ID NO: 3131081 - DNA, 25 bp, Homo sapien
tcttggacagattcttagttacatc

SEQ ID NO: 3131082 - DNA, 25 bp, Homo sapien
tagctgcatttaacacagattaata

SEQ ID NO: 3131083 - DNA, 25 bp, Homo sapien
tgggactttgaagtctatcctagac

SEQ ID NO: 3131084 - DNA, 25 bp, Homo sapien
gaagttgttctctccacaatccaga

SEQ ID NO: 3131085 - DNA, 25 bp, Homo sapien
ttgtcagggaacaggagagttttcg

SEQ ID NO: 3131086 - DNA, 25 bp, Homo sapien
gctgggcatatcgtcttgtcaggga

SEQ ID NO: 3131087 - DNA, 25 bp, Homo sapien
gaaggctgctctgtactgctgggca

SEQ ID NO: 3131088 - DNA, 25 bp, Homo sapien
tatactgccccatagagtctcctga

SEQ ID NO: 3131089 - DNA, 25 bp, Homo sapien
ttggtgagttcattaccccagtgcc

SEQ ID NO: 3131090 - DNA, 25 bp, Homo sapien
tattcaaaggctagcaatgtcccat

SEQ ID NO: 3131091 - DNA, 25 bp, Homo sapien
cactggtcaccccttaggagaatca

SEQ ID NO: 3131092 - DNA, 25 bp, Homo sapien
cttagcagctgtagcacagtctgag

SEQ ID NO: 3131093 - DNA, 25 bp, Homo sapien
tagcagctgtagcacagtctgagat

SEQ ID NO: 3131094 - DNA, 25 bp, Homo sapien
ataaaatcaacaatgtcgagattgc

SEQ ID NO: 3131095 - DNA, 25 bp, Homo sapien
caatgtcgagattgcatttcttagc

SEQ ID NO: 3131096 - DNA, 25 bp, Homo sapien
atcacaatgtttgaggctgaattca

SEQ ID NO: 3131097 - DNA, 25 bp, Homo sapien
tgaatgaggggagggcaagtgtcag

SEQ ID NO: 3131098 - DNA, 25 bp, Homo sapien
gtgtcaggatcggattatcacaatg

SEQ ID NO: 3131099 - DNA, 25 bp, Homo sapien
gattatcacaatgtttgaggctgaa

SEQ ID NO: 3131100 - DNA, 25 bp, Homo sapien
aagtcacgtgaccttgaagcattca

SEQ ID NO: 3131101 - DNA, 25 bp, Homo sapien
tcagtcctgcactctcttgggattg

SEQ ID NO: 3131102 - DNA, 25 bp, Homo sapien
taacattttcggatctcagtcctgc

SEQ ID NO: 3131103 - DNA, 25 bp, Homo sapien
gaccttgaagcattcaaaataacct

SEQ ID NO: 3131104 - DNA, 25 bp, Homo sapien
aacaaagtgaaagcttcgagttctt

SEQ ID NO: 3131105 - DNA, 25 bp, Homo sapien
aaaggcgtagcccaaaactgataca

SEQ ID NO: 3131106 - DNA, 25 bp, Homo sapien
ttaaaggcgtagcccaaaactgata

SEQ ID NO: 3131107 - DNA, 25 bp, Homo sapien
caaagtgaaagcttcgagttctttt

SEQ ID NO: 3131108 - DNA, 25 bp, Homo sapien
tgctccacgtgacaccagcttgagg

SEQ ID NO: 3131109 - DNA, 25 bp, Homo sapien
cacatggctaggttgggcttctcat

SEQ ID NO: 3131110 - DNA, 25 bp, Homo sapien
cagcttgaggcagctcaattggagc

SEQ ID NO: 3131111 - DNA, 25 bp, Homo sapien
caaggtatgtcagggacagctcatc

SEQ ID NO: 3131112 - DNA, 25 bp, Homo sapien
ttgctaacggttgatgattcctggt

SEQ ID NO: 3131113 - DNA, 25 bp, Homo sapien
atgattcctggtttaggttaaactg

SEQ ID NO: 3131114 - DNA, 25 bp, Homo sapien
ctggaaattacacacatatgtctgt

SEQ ID NO: 3131115 - DNA, 25 bp, Homo sapien
cactcttagaattgctaacggttga

SEQ ID NO: 3131116 - DNA, 25 bp, Homo sapien
tagaatgcgcagaggccgctttctc

SEQ ID NO: 3131117 - DNA, 25 bp, Homo sapien
gaggccgctttctcttgccgaaaac

SEQ ID NO: 3131118 - DNA, 25 bp, Homo sapien
cagaggccgctttctcttgccgaaa

SEQ ID NO: 3131119 - DNA, 25 bp, Homo sapien
agaacccatagaatgcgcagaggcc

SEQ ID NO: 3131120 - DNA, 25 bp, Homo sapien
cccttctttccttctttccattcat

SEQ ID NO: 3131121 - DNA, 25 bp, Homo sapien
ctgcttgggaatgcattgacccttc

SEQ ID NO: 3131122 - DNA, 25 bp, Homo sapien
tgcttgggaatgcattgacccttct

SEQ ID NO: 3131123 - DNA, 25 bp, Homo sapien
cttgggaatgcattgacccttcttt

SEQ ID NO: 3131124 - DNA, 25 bp, Homo sapien
catcaagttgattttattctcagca

SEQ ID NO: 3131125 - DNA, 25 bp, Homo sapien
atcaagttgattttattctcagcac

SEQ ID NO: 3131126 - DNA, 25 bp, Homo sapien
gacatcaagttgattttattctcag

SEQ ID NO: 3131127 - DNA, 25 bp, Homo sapien
ctggacatcaagttgattttattct

SEQ ID NO: 3131128 - DNA, 25 bp, Homo sapien
ggagagggtgaaattctaataacaa

SEQ ID NO: 3131129 - DNA, 25 bp, Homo sapien
tcagtattccactcgccctatctgt

SEQ ID NO: 3131130 - DNA, 25 bp, Homo sapien
gatcacgtccggctttgcctttcca

SEQ ID NO: 3131131 - DNA, 25 bp, Homo sapien
caacttccttctttacggttgccat

SEQ ID NO: 3131132 - DNA, 25 bp, Homo sapien
atctttatggtcttgcattctgtca

SEQ ID NO: 3131133 - DNA, 25 bp, Homo sapien
cactgaatctctgacctcttgcggt

SEQ ID NO: 3131134 - DNA, 25 bp, Homo sapien
tcttgcggtgctatggctccttggc

SEQ ID NO: 3131135 - DNA, 25 bp, Homo sapien
tatacaaaaccgagtgtgtcccgag

SEQ ID NO: 3131136 - DNA, 25 bp, Homo sapien
ggacacagtgcaggatctaaacagt

SEQ ID NO: 3131137 - DNA, 25 bp, Homo sapien
aaatcagtaccttcagtccagggcc

SEQ ID NO: 3131138 - DNA, 25 bp, Homo sapien
tacactatcaatttggaaaatcagt

SEQ ID NO: 3131139 - DNA, 25 bp, Homo sapien
catccccaaatcataggaagatgga

SEQ ID NO: 3131140 - DNA, 25 bp, Homo sapien
ccagggccctctgtaggagctgaat

SEQ ID NO: 3131141 - DNA, 25 bp, Homo sapien
tgtcatctttgcagctctccatttc

SEQ ID NO: 3131142 - DNA, 25 bp, Homo sapien
ttaggtgtcatctttgcagctctcc

SEQ ID NO: 3131143 - DNA, 25 bp, Homo sapien
tcatctttgcagctctccatttctg

SEQ ID NO: 3131144 - DNA, 25 bp, Homo sapien
ggtgtcatctttgcagctctccatt

SEQ ID NO: 3131145 - DNA, 25 bp, Homo sapien
gattctactcattggaattgcctga

SEQ ID NO: 3131146 - DNA, 25 bp, Homo sapien
tatgataatgagaaactagcaaggc

SEQ ID NO: 3131147 - DNA, 25 bp, Homo sapien
tagctgtctgccaagtatgctggga

SEQ ID NO: 3131148 - DNA, 25 bp, Homo sapien
tagctgtcactagaggaaattgtgc

SEQ ID NO: 3131149 - DNA, 25 bp, Homo sapien
gctcctcctttacgaacactctctt

SEQ ID NO: 3131150 - DNA, 25 bp, Homo sapien
ctctggccttactcacatcagctcc

SEQ ID NO: 3131151 - DNA, 25 bp, Homo sapien
cctttacgaacactctcttcccctg

SEQ ID NO: 3131152 - DNA, 25 bp, Homo sapien
tcagctcctcctttacgaacactct

SEQ ID NO: 3131153 - DNA, 25 bp, Homo sapien
gatgaaggccccttgcccaccctca

SEQ ID NO: 3131154 - DNA, 25 bp, Homo sapien
attcctgatgaaggccccttgccca

SEQ ID NO: 3131155 - DNA, 25 bp, Homo sapien
gcattcctgatgaaggccccttgcc

SEQ ID NO: 3131156 - DNA, 25 bp, Homo sapien
ctggcattcctgatgaaggcccctt

SEQ ID NO: 3131157 - DNA, 25 bp, Homo sapien
tggaggactcaacatgaagtctgtc

SEQ ID NO: 3131158 - DNA, 25 bp, Homo sapien
ttccctccaggagctaagttgacct

SEQ ID NO: 3131159 - DNA, 25 bp, Homo sapien
ctcagaaccaggtgcaggcaaagct

SEQ ID NO: 3131160 - DNA, 25 bp, Homo sapien
tgtctcagaattctgagcctcagaa

SEQ ID NO: 3131161 - DNA, 25 bp, Homo sapien
tgtgtacatataggccagtatatgc

SEQ ID NO: 3131162 - DNA, 25 bp, Homo sapien
tgtacatataggccagtatatgcat

SEQ ID NO: 3131163 - DNA, 25 bp, Homo sapien
gtgtacatataggccagtatatgca

SEQ ID NO: 3131164 - DNA, 25 bp, Homo sapien
tctgcttctacttgtctcagtgcta

SEQ ID NO: 3131165 - DNA, 25 bp, Homo sapien
ccaggaggagcgacaacaggtaacc

SEQ ID NO: 3131166 - DNA, 25 bp, Homo sapien
tcagtgctatcatgagatcaaccag

SEQ ID NO: 3131167 - DNA, 25 bp, Homo sapien
caggtaacctacactgttgaaagtt

SEQ ID NO: 3131168 - DNA, 25 bp, Homo sapien
tttcacaagcaaccatcagggtcag

SEQ ID NO: 3131169 - DNA, 25 bp, Homo sapien
tcacagtgtgggcattcagctaagc

SEQ ID NO: 3131170 - DNA, 25 bp, Homo sapien
tccagtaagttatcccgaatgtgcg

SEQ ID NO: 3131171 - DNA, 25 bp, Homo sapien
gaatgtgcggaccaaatcccaactg

SEQ ID NO: 3131172 - DNA, 25 bp, Homo sapien
tgtccctgccaacacaatcatcctc

SEQ ID NO: 3131173 - DNA, 25 bp, Homo sapien
ccctgccaacacaatcatcctcact

SEQ ID NO: 3131174 - DNA, 25 bp, Homo sapien
aatcttgtccctgccaacacaatca

SEQ ID NO: 3131175 - DNA, 25 bp, Homo sapien
gccaacacaatcatcctcacttttt

SEQ ID NO: 3131176 - DNA, 25 bp, Homo sapien
cctctttcggctttagattatctag

SEQ ID NO: 3131177 - DNA, 25 bp, Homo sapien
gattatctagactaactggcctgtg

SEQ ID NO: 3131178 - DNA, 25 bp, Homo sapien
tgtgcccaaccctatcgacagagta

SEQ ID NO: 3131179 - DNA, 25 bp, Homo sapien
aactgggtagttttagtgtcaagat

SEQ ID NO: 3131180 - DNA, 25 bp, Homo sapien
tgggagtggctttgttctaaaagcg

SEQ ID NO: 3131181 - DNA, 25 bp, Homo sapien
gtggctttgttctaaaagcgagctc

SEQ ID NO: 3131182 - DNA, 25 bp, Homo sapien
ctgggagtggctttgttctaaaagc

SEQ ID NO: 3131183 - DNA, 25 bp, Homo sapien
gagtggctttgttctaaaagcgagc

SEQ ID NO: 3131184 - DNA, 25 bp, Homo sapien
tattccaggtggtagcaagtgtcat

SEQ ID NO: 3131185 - DNA, 25 bp, Homo sapien
actgcactaggcactgctgtaggca

SEQ ID NO: 3131186 - DNA, 25 bp, Homo sapien
gcactgtcgtttgaatggatgaaaa

SEQ ID NO: 3131187 - DNA, 25 bp, Homo sapien
tcattgacaagaagaggtggtagca

SEQ ID NO: 3131188 - DNA, 25 bp, Homo sapien
ccttgggctccgaaagtgaagctat

SEQ ID NO: 3131189 - DNA, 25 bp, Homo sapien
ggcaaagagcattgtgatcaaatcc

SEQ ID NO: 3131190 - DNA, 25 bp, Homo sapien
tatatagcatttgcagcttccttgg

SEQ ID NO: 3131191 - DNA, 25 bp, Homo sapien
gatcaaatccacactaatgaagtaa

SEQ ID NO: 3131192 - DNA, 25 bp, Homo sapien
cccagaaagagcacaggttaagcat

SEQ ID NO: 3131193 - DNA, 25 bp, Homo sapien
gcacaggttaagcataattagttct

SEQ ID NO: 3131194 - DNA, 25 bp, Homo sapien
tcttcgtggcaaatgtgtacctgca

SEQ ID NO: 3131195 - DNA, 25 bp, Homo sapien
taagcataattagttcttcgtggca

SEQ ID NO: 3131196 - DNA, 25 bp, Homo sapien
gaaagcccgcaattgatagatgaac

SEQ ID NO: 3131197 - DNA, 25 bp, Homo sapien
tatctatggagtcctggcacgtgca

SEQ ID NO: 3131198 - DNA, 25 bp, Homo sapien
taaatgtcgttgtctcagatgaccc

SEQ ID NO: 3131199 - DNA, 25 bp, Homo sapien
gatgtctgaatatctagcccacagg

SEQ ID NO: 3131200 - DNA, 25 bp, Homo sapien
atagctttgcagtattgactaagtt

SEQ ID NO: 3131201 - DNA, 25 bp, Homo sapien
ttgagccgagtctcatcagctgcct

SEQ ID NO: 3131202 - DNA, 25 bp, Homo sapien
cctctttgtttctccgagccaaaat

SEQ ID NO: 3131203 - DNA, 25 bp, Homo sapien
tttcccgagtggagaagagaaacaa

SEQ ID NO: 3131204 - DNA, 25 bp, Homo sapien
caaagatgattgacggtcttgagcc

SEQ ID NO: 3131205 - DNA, 25 bp, Homo sapien
ttttgtggtacttccgcatcatttc

SEQ ID NO: 3131206 - DNA, 25 bp, Homo sapien
caggtggaactgctagcctgtacat

SEQ ID NO: 3131207 - DNA, 25 bp, Homo sapien
taagtttacggtcagcaggtggaac

SEQ ID NO: 3131208 - DNA, 25 bp, Homo sapien
cgcatcatttctccaatgatgttgg

SEQ ID NO: 3131209 - DNA, 25 bp, Homo sapien
acattgccaggtccaaaaggagaat

SEQ ID NO: 3131210 - DNA, 25 bp, Homo sapien
cacattgccaggtccaaaaggagaa

SEQ ID NO: 3131211 - DNA, 25 bp, Homo sapien
cattgccaggtccaaaaggagaatg

SEQ ID NO: 3131212 - DNA, 25 bp, Homo sapien
gatgtaatacgatgcgcggtgctca

SEQ ID NO: 3131213 - DNA, 25 bp, Homo sapien
gtggctttgcatagggttcccagta

SEQ ID NO: 3131214 - DNA, 25 bp, Homo sapien
aaacctgtgcttctagagtaatgcc

SEQ ID NO: 3131215 - DNA, 25 bp, Homo sapien
gagtaatgcctttccacgtcatttt

SEQ ID NO: 3131216 - DNA, 25 bp, Homo sapien
tggagaatataaagttgaggtatgc

SEQ ID NO: 3131217 - DNA, 25 bp, Homo sapien
ccaggtagtgtcatagaagtagaaa

SEQ ID NO: 3131218 - DNA, 25 bp, Homo sapien
tcatagaagtagaaacgcagggctc

SEQ ID NO: 3131219 - DNA, 25 bp, Homo sapien
tgatggagaatataaagttgaggta

SEQ ID NO: 3131220 - DNA, 25 bp, Homo sapien
tcagatcaaatatgtgtgcccaata

SEQ ID NO: 3131221 - DNA, 25 bp, Homo sapien
cttaaagcattcatgcatggagaag

SEQ ID NO: 3131222 - DNA, 25 bp, Homo sapien
gatcaaatatgtgtgcccaataagg

SEQ ID NO: 3131223 - DNA, 25 bp, Homo sapien
atgcatggagaaggcctctttgccg

SEQ ID NO: 3131224 - DNA, 25 bp, Homo sapien
gggatttagtatgactctccactga

SEQ ID NO: 3131225 - DNA, 25 bp, Homo sapien
gaaaaagatacttaactttgatgag

SEQ ID NO: 3131226 - DNA, 25 bp, Homo sapien
tgcatcagagtatgaggagtgaccc

SEQ ID NO: 3131227 - DNA, 25 bp, Homo sapien
tggctggctggtaatcctcctcact

SEQ ID NO: 3131228 - DNA, 25 bp, Homo sapien
tgcataattcattttggggagagtc

SEQ ID NO: 3131229 - DNA, 25 bp, Homo sapien
aatgaagctggtttgagggtcataa

SEQ ID NO: 3131230 - DNA, 25 bp, Homo sapien
tttggggagagtctcttgagttttg

SEQ ID NO: 3131231 - DNA, 25 bp, Homo sapien
tcatctcatcgtatcttctgcataa

SEQ ID NO: 3131232 - DNA, 25 bp, Homo sapien
aaaaaaccccatagcatgcattcca

SEQ ID NO: 3131233 - DNA, 25 bp, Homo sapien
taggagagtaaatctgctgctactg

SEQ ID NO: 3131234 - DNA, 25 bp, Homo sapien
aatgaaatccggtctgggggctttg

SEQ ID NO: 3131235 - DNA, 25 bp, Homo sapien
gggagcccctactgtaagtgtaatg

SEQ ID NO: 3131236 - DNA, 25 bp, Homo sapien
aaggccctgttttgataagagagag

SEQ ID NO: 3131237 - DNA, 25 bp, Homo sapien
tatatttgagctgcttgttgtgggc

SEQ ID NO: 3131238 - DNA, 25 bp, Homo sapien
taaggtcgttagtaagctccaagaa

SEQ ID NO: 3131239 - DNA, 25 bp, Homo sapien
ctaacccatatatttgagctgcttg

SEQ ID NO: 3131240 - DNA, 25 bp, Homo sapien
gtcgaggggtctctggctccagtga

SEQ ID NO: 3131241 - DNA, 25 bp, Homo sapien
cactcttccagcctagaggattttt

SEQ ID NO: 3131242 - DNA, 25 bp, Homo sapien
ggacacaagggtgggtcctatttca

SEQ ID NO: 3131243 - DNA, 25 bp, Homo sapien
tgaggttcagcttgaatctcaggga

SEQ ID NO: 3131244 - DNA, 25 bp, Homo sapien
gcaaggctgctccatgaacattagg

SEQ ID NO: 3131245 - DNA, 25 bp, Homo sapien
gaacggatgtccagctgctcattta

SEQ ID NO: 3131246 - DNA, 25 bp, Homo sapien
ccatgaacattaggctgagaacagc

SEQ ID NO: 3131247 - DNA, 25 bp, Homo sapien
gcattccactcagaacggatgtcca

SEQ ID NO: 3131248 - DNA, 25 bp, Homo sapien
tgtcacttccttaagaagctgcatc

SEQ ID NO: 3131249 - DNA, 25 bp, Homo sapien
attggacattggagacagtggtaag

SEQ ID NO: 3131250 - DNA, 25 bp, Homo sapien
ctgtcacttccttaagaagctgcat

SEQ ID NO: 3131251 - DNA, 25 bp, Homo sapien
tggtgataattggacattggagaca

SEQ ID NO: 3131252 - DNA, 25 bp, Homo sapien
aatcttttcatcctggtcatattcc

SEQ ID NO: 3131253 - DNA, 25 bp, Homo sapien
cataatttctagcatagcagctggc

SEQ ID NO: 3131254 - DNA, 25 bp, Homo sapien
tccaaaccataatttctagcatagc

SEQ ID NO: 3131255 - DNA, 25 bp, Homo sapien
caaaccataatttctagcatagcag

SEQ ID NO: 3131256 - DNA, 25 bp, Homo sapien
gagctaagatatgagtctaggtctc

SEQ ID NO: 3131257 - DNA, 25 bp, Homo sapien
tagcagctgagctgtacataggcaa

SEQ ID NO: 3131258 - DNA, 25 bp, Homo sapien
ttcatggtggcagaccctagacaca

SEQ ID NO: 3131259 - DNA, 25 bp, Homo sapien
gaccttgaggtgataagctactaag

SEQ ID NO: 3131260 - DNA, 25 bp, Homo sapien
caagtgtgctgtgaatcctggcagg

SEQ ID NO: 3131261 - DNA, 25 bp, Homo sapien
ggtaagattgtacactagaagcaca

SEQ ID NO: 3131262 - DNA, 25 bp, Homo sapien
tgtacactagaagcacaattcagtt

SEQ ID NO: 3131263 - DNA, 25 bp, Homo sapien
tgtaagcatcttcccggtctgtgtg

SEQ ID NO: 3131264 - DNA, 25 bp, Homo sapien
gatcagctggcataattaggtaaga

SEQ ID NO: 3131265 - DNA, 25 bp, Homo sapien
atgcaatgattgtggttccctccat

SEQ ID NO: 3131266 - DNA, 25 bp, Homo sapien
tcttcctttacgttcctgtctctga

SEQ ID NO: 3131267 - DNA, 25 bp, Homo sapien
cagcactcctttaagtgtggcagga

SEQ ID NO: 3131268 - DNA, 25 bp, Homo sapien
agacttcaggttctcacgagggaat

SEQ ID NO: 3131269 - DNA, 25 bp, Homo sapien
gtgtggcaggatgtaatgatgaata

SEQ ID NO: 3131270 - DNA, 25 bp, Homo sapien
tcctgctaacagatggcataaagag

SEQ ID NO: 3131271 - DNA, 25 bp, Homo sapien
taaagagcgtctgtaagaactgagg

SEQ ID NO: 3131272 - DNA, 25 bp, Homo sapien
actgaggtggagcttctagaacgag

SEQ ID NO: 3131273 - DNA, 25 bp, Homo sapien
ttctagaacgagaggattggagagc

SEQ ID NO: 3131274 - DNA, 25 bp, Homo sapien
caacacaactatggtgaaaggtgcc

SEQ ID NO: 3131275 - DNA, 25 bp, Homo sapien
taaaagtcgcctttccagatgtgga

SEQ ID NO: 3131276 - DNA, 25 bp, Homo sapien
agggagccacaagtgagcttgtgaa

SEQ ID NO: 3131277 - DNA, 25 bp, Homo sapien
gaaaggtgccctcatagtcacatgc

SEQ ID NO: 3131278 - DNA, 25 bp, Homo sapien
cctctatcatggcttcttgaataaa

SEQ ID NO: 3131279 - DNA, 25 bp, Homo sapien
ctgctgactttctgtgagttttcct

SEQ ID NO: 3131280 - DNA, 25 bp, Homo sapien
gagttttcctctatcatggcttctt

SEQ ID NO: 3131281 - DNA, 25 bp, Homo sapien
gttttcctctatcatggcttcttga

SEQ ID NO: 3131282 - DNA, 25 bp, Homo sapien
caggaatgaggcatcacccctgtta

SEQ ID NO: 3131283 - DNA, 25 bp, Homo sapien
ctttccttgcagggtctcctctagg

SEQ ID NO: 3131284 - DNA, 25 bp, Homo sapien
ccaggaatgaggcatcacccctgtt

SEQ ID NO: 3131285 - DNA, 25 bp, Homo sapien
ctatgttactggcggcaattctttc

SEQ ID NO: 3131286 - DNA, 25 bp, Homo sapien
cgtctagttgcagggggaattcttg

SEQ ID NO: 3131287 - DNA, 25 bp, Homo sapien
aaccactggctcgtctagttgcagg

SEQ ID NO: 3131288 - DNA, 25 bp, Homo sapien
tggaagcccaaccactggctcgtct

SEQ ID NO: 3131289 - DNA, 25 bp, Homo sapien
agacccagttctctggaagcccaac

SEQ ID NO: 3131290 - DNA, 25 bp, Homo sapien
ccgatgggtgataaagtcgaggacc

SEQ ID NO: 3131291 - DNA, 25 bp, Homo sapien
cagataaccgatgggtgataaagtc

SEQ ID NO: 3131292 - DNA, 25 bp, Homo sapien
gcgacacagataaccgatgggtgat

SEQ ID NO: 3131293 - DNA, 25 bp, Homo sapien
tccttcaggcgacacagataaccga

SEQ ID NO: 3131294 - DNA, 25 bp, Homo sapien
ctgcagtgattcagggctataactg

SEQ ID NO: 3131295 - DNA, 25 bp, Homo sapien
actggctggttctgactgaaaatca

SEQ ID NO: 3131296 - DNA, 25 bp, Homo sapien
cagggctataactggctggttctga

SEQ ID NO: 3131297 - DNA, 25 bp, Homo sapien
tttgatcagtttggtaagcctgtgc

SEQ ID NO: 3131298 - DNA, 25 bp, Homo sapien
ctttataacagttgcacaaagaagt

SEQ ID NO: 3131299 - DNA, 25 bp, Homo sapien
ttataacagttgcacaaagaagttc

SEQ ID NO: 3131300 - DNA, 25 bp, Homo sapien
taacagttgcacaaagaagttcaaa

SEQ ID NO: 3131301 - DNA, 25 bp, Homo sapien
tataacagttgcacaaagaagttca

SEQ ID NO: 3131302 - DNA, 25 bp, Homo sapien
actggtgatggatggcgcccttact

SEQ ID NO: 3131303 - DNA, 25 bp, Homo sapien
tggcgcccttactcagctgactctg

SEQ ID NO: 3131304 - DNA, 25 bp, Homo sapien
ctctgtgactccaacgatgcgggct

SEQ ID NO: 3131305 - DNA, 25 bp, Homo sapien
tgactcgctggacgctctttccttt

SEQ ID NO: 3131306 - DNA, 25 bp, Homo sapien
tgaatgtcgtggatcgcctctgcag

SEQ ID NO: 3131307 - DNA, 25 bp, Homo sapien
ctctgaatgtcgtggatcgcctctg

SEQ ID NO: 3131308 - DNA, 25 bp, Homo sapien
tctgaatgtcgtggatcgcctctgc

SEQ ID NO: 3131309 - DNA, 25 bp, Homo sapien
gaatgtcgtggatcgcctctgcagc

SEQ ID NO: 3131310 - DNA, 25 bp, Homo sapien
ttatggttagtcttccaaacactga

SEQ ID NO: 3131311 - DNA, 25 bp, Homo sapien
cctattgatatggttatggttagtc

SEQ ID NO: 3131312 - DNA, 25 bp, Homo sapien
tccaaacactgaatccacggcatct

SEQ ID NO: 3131313 - DNA, 25 bp, Homo sapien
ctattccctcctattgatatggtta

SEQ ID NO: 3131314 - DNA, 25 bp, Homo sapien
aaggaatgtctcttcgctctgcagc

SEQ ID NO: 3131315 - DNA, 25 bp, Homo sapien
aggaatgtctcttcgctctgcagca

SEQ ID NO: 3131316 - DNA, 25 bp, Homo sapien
aatgtctcttcgctctgcagcagct

SEQ ID NO: 3131317 - DNA, 25 bp, Homo sapien
tggagacggcctatccttggccgtc

SEQ ID NO: 3131318 - DNA, 25 bp, Homo sapien
ggtccctggagacggcctatccttg

SEQ ID NO: 3131319 - DNA, 25 bp, Homo sapien
ctggtggtccctggagacggcctat

SEQ ID NO: 3131320 - DNA, 25 bp, Homo sapien
cctggagacggcctatccttggccg

SEQ ID NO: 3131321 - DNA, 25 bp, Homo sapien
gatgtcgctattgtgaatgtgactt

SEQ ID NO: 3131322 - DNA, 25 bp, Homo sapien
ggacaatgatgtcgctattgtgaat

SEQ ID NO: 3131323 - DNA, 25 bp, Homo sapien
gaatgtgactttcataaggcaaata

SEQ ID NO: 3131324 - DNA, 25 bp, Homo sapien
gcaaatatcatccccagcagttata

SEQ ID NO: 3131325 - DNA, 25 bp, Homo sapien
gtgattcttttagggccatttgcca

SEQ ID NO: 3131326 - DNA, 25 bp, Homo sapien
tcttgtctttgagaagctcttgtga

SEQ ID NO: 3131327 - DNA, 25 bp, Homo sapien
tccttggttattagtggctctgttt

SEQ ID NO: 3131328 - DNA, 25 bp, Homo sapien
gttttccttcaattgcctcttgtct

SEQ ID NO: 3131329 - DNA, 25 bp, Homo sapien
gatttggatttgttgggaaagaaga

SEQ ID NO: 3131330 - DNA, 25 bp, Homo sapien
aataaaggtctgagatgccatcaag

SEQ ID NO: 3131331 - DNA, 25 bp, Homo sapien
tcggtttgataagggattgtaggat

SEQ ID NO: 3131332 - DNA, 25 bp, Homo sapien
cacgtctggcataggaataggatgt

SEQ ID NO: 3131333 - DNA, 25 bp, Homo sapien
gcattaatctgcacctcaacactac

SEQ ID NO: 3131334 - DNA, 25 bp, Homo sapien
ttaatctgcacctcaacactacaaa

SEQ ID NO: 3131335 - DNA, 25 bp, Homo sapien
cattaatctgcacctcaacactaca

SEQ ID NO: 3131336 - DNA, 25 bp, Homo sapien
caagcattaatctgcacctcaacac

SEQ ID NO: 3131337 - DNA, 25 bp, Homo sapien
gacaccttgtggcttaatgcacaca

SEQ ID NO: 3131338 - DNA, 25 bp, Homo sapien
tgtctggactgataacagcccttcc

SEQ ID NO: 3131339 - DNA, 25 bp, Homo sapien
gcactggtcagaagcctgaagcacc

SEQ ID NO: 3131340 - DNA, 25 bp, Homo sapien
ttctcaatatgcagcccagcacaga

SEQ ID NO: 3131341 - DNA, 25 bp, Homo sapien
ttccacattcagaacgactgttttt

SEQ ID NO: 3131342 - DNA, 25 bp, Homo sapien
cattcagaacgactgtttttacctg

SEQ ID NO: 3131343 - DNA, 25 bp, Homo sapien
caccttaagggcctgaatgaagtct

SEQ ID NO: 3131344 - DNA, 25 bp, Homo sapien
ttttacctgaaaatgcccaggcacc

SEQ ID NO: 3131345 - DNA, 25 bp, Homo sapien
atttggtccagctttcggatttgta

SEQ ID NO: 3131346 - DNA, 25 bp, Homo sapien
tggtccagctttcggatttgtaatg

SEQ ID NO: 3131347 - DNA, 25 bp, Homo sapien
cagctttcggatttgtaatgaaacc

SEQ ID NO: 3131348 - DNA, 25 bp, Homo sapien
ctttcggatttgtaatgaaacctga

SEQ ID NO: 3131349 - DNA, 25 bp, Homo sapien
aacttgcacgttttccttctggcag

SEQ ID NO: 3131350 - DNA, 25 bp, Homo sapien
ttgcacgttttccttctggcagcag

SEQ ID NO: 3131351 - DNA, 25 bp, Homo sapien
aaggaacttgcacgttttccttctg

SEQ ID NO: 3131352 - DNA, 25 bp, Homo sapien
ggaacttgcacgttttccttctggc

SEQ ID NO: 3131353 - DNA, 25 bp, Homo sapien
gcaggaaaatggctcaaagttagtt

SEQ ID NO: 3131354 - DNA, 25 bp, Homo sapien
aggatgagtgacagcagttctggca

SEQ ID NO: 3131355 - DNA, 25 bp, Homo sapien
cagttctggcagatcgggcaggaaa

SEQ ID NO: 3131356 - DNA, 25 bp, Homo sapien
gaaatcaggatgagtgacagcagtt

SEQ ID NO: 3131357 - DNA, 25 bp, Homo sapien
tgtcagccgccaatccaaaagttgt

SEQ ID NO: 3131358 - DNA, 25 bp, Homo sapien
tcaattccacgaaggcgcaggcttg

SEQ ID NO: 3131359 - DNA, 25 bp, Homo sapien
tgtccggaggcatcctggtgtcagc

SEQ ID NO: 3131360 - DNA, 25 bp, Homo sapien
gattgtctaggtccaagtcgcgcag

SEQ ID NO: 3131361 - DNA, 25 bp, Homo sapien
caaataattgacttgtggaaatgaa

SEQ ID NO: 3131362 - DNA, 25 bp, Homo sapien
aaataattgacttgtggaaatgaag

SEQ ID NO: 3131363 - DNA, 25 bp, Homo sapien
ataattgacttgtggaaatgaagac

SEQ ID NO: 3131364 - DNA, 25 bp, Homo sapien
taattgacttgtggaaatgaagaca

SEQ ID NO: 3131365 - DNA, 25 bp, Homo sapien
attatttgagaaatgaatatcacct

SEQ ID NO: 3131366 - DNA, 25 bp, Homo sapien
tatttgagaaatgaatatcaccttc

SEQ ID NO: 3131367 - DNA, 25 bp, Homo sapien
ctgagttctgaattatttgagaaat

SEQ ID NO: 3131368 - DNA, 25 bp, Homo sapien
tttgagaaatgaatatcaccttcat

SEQ ID NO: 3131369 - DNA, 25 bp, Homo sapien
cacttgtggccctttcaggaataag

SEQ ID NO: 3131370 - DNA, 25 bp, Homo sapien
caggaataagcccatcgtgccgcta

SEQ ID NO: 3131371 - DNA, 25 bp, Homo sapien
cagttgcagaagtcgtctgaggcca

SEQ ID NO: 3131372 - DNA, 25 bp, Homo sapien
gaggccaacaccaaagcacacttgt

SEQ ID NO: 3131373 - DNA, 25 bp, Homo sapien
gcatctggaagggagccgtgaaaca

SEQ ID NO: 3131374 - DNA, 25 bp, Homo sapien
gagccgtgaaacaggacacaaccat

SEQ ID NO: 3131375 - DNA, 25 bp, Homo sapien
gatgccaagtcttctctttgtggcg

SEQ ID NO: 3131376 - DNA, 25 bp, Homo sapien
ttttcctataaagctggatgccaag

SEQ ID NO: 3131377 - DNA, 25 bp, Homo sapien
actgtgggcagaaagacacttttcc

SEQ ID NO: 3131378 - DNA, 25 bp, Homo sapien
gaagacaaggagattgacttcagca

SEQ ID NO: 3131379 - DNA, 25 bp, Homo sapien
tgtgggcagaaagacacttttccca

SEQ ID NO: 3131380 - DNA, 25 bp, Homo sapien
gacaaggagattgacttcagcacat

SEQ ID NO: 3131381 - DNA, 25 bp, Homo sapien
ggtcgcaaggtgctcagtgggggtg

SEQ ID NO: 3131382 - DNA, 25 bp, Homo sapien
aaggtgctcagtgggcaggagtggg

SEQ ID NO: 3131383 - DNA, 25 bp, Homo sapien
gtgggggtgctttttgagccaggat

SEQ ID NO: 3131384 - DNA, 25 bp, Homo sapien
ggtgctcagtgggggtgctttttga

SEQ ID NO: 3131385 - DNA, 25 bp, Homo sapien
gagctgctgcctaactgggaagttg

SEQ ID NO: 3131386 - DNA, 25 bp, Homo sapien
gatactgacaaagctagtgaccaca

SEQ ID NO: 3131387 - DNA, 25 bp, Homo sapien
tcaagaagcaccaagatcaggaatc

SEQ ID NO: 3131388 - DNA, 25 bp, Homo sapien
gaatcagtgatgatcaggaagccac

SEQ ID NO: 3131389 - DNA, 25 bp, Homo sapien
agcagatcagagtcatgggctgccc

SEQ ID NO: 3131390 - DNA, 25 bp, Homo sapien
gatcagagtcatgggctgcccaagg

SEQ ID NO: 3131391 - DNA, 25 bp, Homo sapien
ctggaaacgggaccccaggacactg

SEQ ID NO: 3131392 - DNA, 25 bp, Homo sapien
cagatcagagtcatgggctgcccaa

SEQ ID NO: 3131393 - DNA, 25 bp, Homo sapien
caggaattaggagttctggtgagag

SEQ ID NO: 3131394 - DNA, 25 bp, Homo sapien
tctgcaggaattaggagttctggtg

SEQ ID NO: 3131395 - DNA, 25 bp, Homo sapien
tggcttccgtagaggttgctgcttc

SEQ ID NO: 3131396 - DNA, 25 bp, Homo sapien
gcttccgtagaggttgctgcttcca

SEQ ID NO: 3131397 - DNA, 25 bp, Homo sapien
tgtatcctacaattcgcaagttggg

SEQ ID NO: 3131398 - DNA, 25 bp, Homo sapien
caacagaagtgagcatgtgacatgc

SEQ ID NO: 3131399 - DNA, 25 bp, Homo sapien
gctggagcactcattcggaagttgg

SEQ ID NO: 3131400 - DNA, 25 bp, Homo sapien
caagtttctgcactgaggaccggga

SEQ ID NO: 3131401 - DNA, 25 bp, Homo sapien
ttctctgagcttaaagcaatccttc

SEQ ID NO: 3131402 - DNA, 25 bp, Homo sapien
tttctctgagcttaaagcaatcctt

SEQ ID NO: 3131403 - DNA, 25 bp, Homo sapien
gctggctgcagtttggatgcagaac

SEQ ID NO: 3131404 - DNA, 25 bp, Homo sapien
ggggggtccacactgatgctggctg

SEQ ID NO: 3131405 - DNA, 25 bp, Homo sapien
tgtggggggtccacactgatgctgg

SEQ ID NO: 3131406 - DNA, 25 bp, Homo sapien
tggggggtccacactgatgctggct

SEQ ID NO: 3131407 - DNA, 25 bp, Homo sapien
tcaagtgtaactgagaagctgcctc

SEQ ID NO: 3131408 - DNA, 25 bp, Homo sapien
ataattactaggataatctccaggc

SEQ ID NO: 3131409 - DNA, 25 bp, Homo sapien
ttataattactaggataatctccag

SEQ ID NO: 3131410 - DNA, 25 bp, Homo sapien
tataattactaggataatctccagg

SEQ ID NO: 3131411 - DNA, 25 bp, Homo sapien
aatgtcttatcttccctacatatgt

SEQ ID NO: 3131412 - DNA, 25 bp, Homo sapien
agtttgctaacttgtagccatgggt

SEQ ID NO: 3131413 - DNA, 25 bp, Homo sapien
atgtcttatcttccctacatatgtg

SEQ ID NO: 3131414 - DNA, 25 bp, Homo sapien
tgctaacttgtagccatgggtctct

SEQ ID NO: 3131415 - DNA, 25 bp, Homo sapien
tctcttgccttacttcctcttccct

SEQ ID NO: 3131416 - DNA, 25 bp, Homo sapien
ggactccctcagttctctcttggct

SEQ ID NO: 3131417 - DNA, 25 bp, Homo sapien
ctggactccctcagttctctcttgg

SEQ ID NO: 3131418 - DNA, 25 bp, Homo sapien
tcttggcttctcttgccttacttcc

SEQ ID NO: 3131419 - DNA, 25 bp, Homo sapien
aaagcatcttaaagtcaagcctcat

SEQ ID NO: 3131420 - DNA, 25 bp, Homo sapien
gaaaaaaagcatcttaaagtcaagc

SEQ ID NO: 3131421 - DNA, 25 bp, Homo sapien
aaaaaagcatcttaaagtcaagcct

SEQ ID NO: 3131422 - DNA, 25 bp, Homo sapien
ctgaaaaaaagcatcttaaagtcaa

SEQ ID NO: 3131423 - DNA, 25 bp, Homo sapien
tcctcatcactacctagagctgaca

SEQ ID NO: 3131424 - DNA, 25 bp, Homo sapien
tttgtcttgggcagaagtcaggtct

SEQ ID NO: 3131425 - DNA, 25 bp, Homo sapien
gctgacaattgccaaagagcaccca

SEQ ID NO: 3131426 - DNA, 25 bp, Homo sapien
gatccccagacacaataccttcctc

SEQ ID NO: 3131427 - DNA, 25 bp, Homo sapien
aacctccgctctggtgcttgggtga

SEQ ID NO: 3131428 - DNA, 25 bp, Homo sapien
gtgcaacctccgctctggtgcttgg

SEQ ID NO: 3131429 - DNA, 25 bp, Homo sapien
acctccgctctggtgcttgggtgat

SEQ ID NO: 3131430 - DNA, 25 bp, Homo sapien
gcaacctccgctctggtgcttgggt

SEQ ID NO: 3131431 - DNA, 25 bp, Homo sapien
cagatgctgtaatgactaaatcaga

SEQ ID NO: 3131432 - DNA, 25 bp, Homo sapien
acagatgctgtaatgactaaatcag

SEQ ID NO: 3131433 - DNA, 25 bp, Homo sapien
gatgctgtaatgactaaatcagaaa

SEQ ID NO: 3131434 - DNA, 25 bp, Homo sapien
tgctgtaatgactaaatcagaaagt

SEQ ID NO: 3131435 - DNA, 25 bp, Homo sapien
ggttagcaagggggcttctgaactg

SEQ ID NO: 3131436 - DNA, 25 bp, Homo sapien
taggcaagggtaaagagggttagca

SEQ ID NO: 3131437 - DNA, 25 bp, Homo sapien
tggtgccaggctggctatatctgaa

SEQ ID NO: 3131438 - DNA, 25 bp, Homo sapien
gctggctatatctgaatctctagag

SEQ ID NO: 3131439 - DNA, 25 bp, Homo sapien
ccagatctaataaactcttggagga

SEQ ID NO: 3131440 - DNA, 25 bp, Homo sapien
caggttcttggtaaaaatacagctc

SEQ ID NO: 3131441 - DNA, 25 bp, Homo sapien
tttcactgtctaactcctccatggc

SEQ ID NO: 3131442 - DNA, 25 bp, Homo sapien
ttttttcactgtctaactcctccat

SEQ ID NO: 3131443 - DNA, 25 bp, Homo sapien
tcactgtctaactcctccatggcca

SEQ ID NO: 3131444 - DNA, 25 bp, Homo sapien
ttttcactgtctaactcctccatgg

SEQ ID NO: 3131445 - DNA, 25 bp, Homo sapien
acagcggcagatcagaggaagaaag

SEQ ID NO: 3131446 - DNA, 25 bp, Homo sapien
ggaagaaagatgagaccatttcccc

SEQ ID NO: 3131447 - DNA, 25 bp, Homo sapien
ctgggctagacagcggcagatcaga

SEQ ID NO: 3131448 - DNA, 25 bp, Homo sapien
caaagagctgggctagacagcggca

SEQ ID NO: 3131449 - DNA, 25 bp, Homo sapien
gacggtggcctagagcattctccag

SEQ ID NO: 3131450 - DNA, 25 bp, Homo sapien
gttgctttccttcgtttccacagag

SEQ ID NO: 3131451 - DNA, 25 bp, Homo sapien
tagatttcggagacgtagacacggt

SEQ ID NO: 3131452 - DNA, 25 bp, Homo sapien
gatgtctgaaaagggttagggctca

SEQ ID NO: 3131453 - DNA, 25 bp, Homo sapien
ggacatgttattaaataagacttga

SEQ ID NO: 3131454 - DNA, 25 bp, Homo sapien
aggacatgttattaaataagacttg

SEQ ID NO: 3131455 - DNA, 25 bp, Homo sapien
aaggacatgttattaaataagactt

SEQ ID NO: 3131456 - DNA, 25 bp, Homo sapien
cttgataaaatgatacagctgtgca

SEQ ID NO: 3131457 - DNA, 25 bp, Homo sapien
gcaccagggtcctaaacttctgagg

SEQ ID NO: 3131458 - DNA, 25 bp, Homo sapien
ttttctattgttagagggctgcttc

SEQ ID NO: 3131459 - DNA, 25 bp, Homo sapien
gatttattgataagggcgtcttcca

SEQ ID NO: 3131460 - DNA, 25 bp, Homo sapien
gaggaccagtgaaatcttaacttgc

SEQ ID NO: 3131461 - DNA, 25 bp, Homo sapien
tgaaaagacccctataaccatggca

SEQ ID NO: 3131462 - DNA, 25 bp, Homo sapien
tcctgggtacctatccaatgcaaac

SEQ ID NO: 3131463 - DNA, 25 bp, Homo sapien
tgcaaacttcgttagcattcagagg

SEQ ID NO: 3131464 - DNA, 25 bp, Homo sapien
aaggcctaagcctacaccttcagaa

SEQ ID NO: 3131465 - DNA, 25 bp, Homo sapien
ggagaacaatgcaaggcctaagcct

SEQ ID NO: 3131466 - DNA, 25 bp, Homo sapien
attttccttttcacaccaggtcttg

SEQ ID NO: 3131467 - DNA, 25 bp, Homo sapien
cctctgtgctgagggtaagcacaga

SEQ ID NO: 3131468 - DNA, 25 bp, Homo sapien
tatatttcatgctcttcgtaggtcc

SEQ ID NO: 3131469 - DNA, 25 bp, Homo sapien
cccttagtgttgagaattttagcat

SEQ ID NO: 3131470 - DNA, 25 bp, Homo sapien
gagagctcccctgcttgtatcaaga

SEQ ID NO: 3131471 - DNA, 25 bp, Homo sapien
tactgccaatcatcttcccttagtg

SEQ ID NO: 3131472 - DNA, 25 bp, Homo sapien
ggtggttataataaacagcccatgc

SEQ ID NO: 3131473 - DNA, 25 bp, Homo sapien
cagcccatgctattgtgtgtagatg

SEQ ID NO: 3131474 - DNA, 25 bp, Homo sapien
gaggaggaacactgtcctgtaaaga

SEQ ID NO: 3131475 - DNA, 25 bp, Homo sapien
tagtactaggaactctgccagatgc

SEQ ID NO: 3131476 - DNA, 25 bp, Homo sapien
catccttatgaactccctgagctgg

SEQ ID NO: 3131477 - DNA, 25 bp, Homo sapien
gctggcactcacagttagagctctg

SEQ ID NO: 3131478 - DNA, 25 bp, Homo sapien
gctgtcacctcattttctggcatcc

SEQ ID NO: 3131479 - DNA, 25 bp, Homo sapien
ttctggagaatgctgtcacctcatt

SEQ ID NO: 3131480 - DNA, 25 bp, Homo sapien
tccatgcccaactatcgacaggcaa

SEQ ID NO: 3131481 - DNA, 25 bp, Homo sapien
ggcagcaaatgtaaggagaattccc

SEQ ID NO: 3131482 - DNA, 25 bp, Homo sapien
caaatgtaaggagaattcccttctc

SEQ ID NO: 3131483 - DNA, 25 bp, Homo sapien
ccaactatcgacaggcaaagagcct

SEQ ID NO: 3131484 - DNA, 25 bp, Homo sapien
cttttcttggctctgagactgcatt

SEQ ID NO: 3131485 - DNA, 25 bp, Homo sapien
tgagactgcattctcctgtcctgtc

SEQ ID NO: 3131486 - DNA, 25 bp, Homo sapien
ttctcctgtcctgtcctttttggtc

SEQ ID NO: 3131487 - DNA, 25 bp, Homo sapien
gactgcattctcctgtcctgtcctt

SEQ ID NO: 3131488 - DNA, 25 bp, Homo sapien
gtagcttgctgctcatttgcaaggg

SEQ ID NO: 3131489 - DNA, 25 bp, Homo sapien
tcactctggagtagcttgctgctca

SEQ ID NO: 3131490 - DNA, 25 bp, Homo sapien
ggctctgatctgactggggtcttca

SEQ ID NO: 3131491 - DNA, 25 bp, Homo sapien
caccatggctgggaagatatttccc

SEQ ID NO: 3131492 - DNA, 25 bp, Homo sapien
gggatgaccataatcctgaattgga

SEQ ID NO: 3131493 - DNA, 25 bp, Homo sapien
cagcagacctcctgggatgaccata

SEQ ID NO: 3131494 - DNA, 25 bp, Homo sapien
cagtaactggcgattcgcagatgtt

SEQ ID NO: 3131495 - DNA, 25 bp, Homo sapien
gcttgtctagagagtagttgacagc

SEQ ID NO: 3131496 - DNA, 25 bp, Homo sapien
gcactgaatatgtcctgagagctaa

SEQ ID NO: 3131497 - DNA, 25 bp, Homo sapien
tatcgactgattaaagctgagaaga

SEQ ID NO: 3131498 - DNA, 25 bp, Homo sapien
cctggccaggcactgaatatgtcct

SEQ ID NO: 3131499 - DNA, 25 bp, Homo sapien
tcctgagagctaatgtggtatcgac

SEQ ID NO: 3131500 - DNA, 25 bp, Homo sapien
ctggaaaagaagttatgagatctct

SEQ ID NO: 3131501 - DNA, 25 bp, Homo sapien
aaaagaagttatgagatctctccat

SEQ ID NO: 3131502 - DNA, 25 bp, Homo sapien
gaaaagaagttatgagatctctcca

SEQ ID NO: 3131503 - DNA, 25 bp, Homo sapien
ggaaaagaagttatgagatctctcc

SEQ ID NO: 3131504 - DNA, 25 bp, Homo sapien
tcttccagttttcatgatcaaattt

SEQ ID NO: 3131505 - DNA, 25 bp, Homo sapien
aaatttctctgctcctttggaccgg

SEQ ID NO: 3131506 - DNA, 25 bp, Homo sapien
gcttcttccagttttcatgatcaaa

SEQ ID NO: 3131507 - DNA, 25 bp, Homo sapien
ttctctgagctgcttcttccagttt

SEQ ID NO: 3131508 - DNA, 25 bp, Homo sapien
gcctaaggcggggtcaccagatacg

SEQ ID NO: 3131509 - DNA, 25 bp, Homo sapien
gggaatcatcatgtaattccaagcc

SEQ ID NO: 3131510 - DNA, 25 bp, Homo sapien
accagatacgctatcttctgctgac

SEQ ID NO: 3131511 - DNA, 25 bp, Homo sapien
atcatcatgtaattccaagcctaag

SEQ ID NO: 3131512 - DNA, 25 bp, Homo sapien
tgacagaagcaaaaccgaattctcc

SEQ ID NO: 3131513 - DNA, 25 bp, Homo sapien
ctgacagaagcaaaaccgaattctc

SEQ ID NO: 3131514 - DNA, 25 bp, Homo sapien
tctgcagcacacgattgtcttgtgt

SEQ ID NO: 3131515 - DNA, 25 bp, Homo sapien
gatgaagcaggcattagggtgtact

SEQ ID NO: 3131516 - DNA, 25 bp, Homo sapien
gtactgactcaggtggacaagaatg

SEQ ID NO: 3131517 - DNA, 25 bp, Homo sapien
agaatgaagaaagcctgtgtagtac

SEQ ID NO: 3131518 - DNA, 25 bp, Homo sapien
tcctcctggcattttcagagtcagg

SEQ ID NO: 3131519 - DNA, 25 bp, Homo sapien
ctcctcctggcattttcagagtcag

SEQ ID NO: 3131520 - DNA, 25 bp, Homo sapien
tgcttccccgctggactcctcctgg

SEQ ID NO: 3131521 - DNA, 25 bp, Homo sapien
cgctggactcctcctggcattttca

SEQ ID NO: 3131522 - DNA, 25 bp, Homo sapien
aacaaatatcccgttgtccagtgag

SEQ ID NO: 3131523 - DNA, 25 bp, Homo sapien
gggccaagccagtgcatatcaagct

SEQ ID NO: 3131524 - DNA, 25 bp, Homo sapien
gctagagaggatgtaaacaaatatc

SEQ ID NO: 3131525 - DNA, 25 bp, Homo sapien
tcaagctgacaaggcacctgagcta

SEQ ID NO: 3131526 - DNA, 25 bp, Homo sapien
gactcattatattgtccatgctggt

SEQ ID NO: 3131527 - DNA, 25 bp, Homo sapien
ctgagtaactcaggtgcgtgccacc

SEQ ID NO: 3131528 - DNA, 25 bp, Homo sapien
tttttgtaaggactcattatattgt

SEQ ID NO: 3131529 - DNA, 25 bp, Homo sapien
cctcctgagtaactcaggtgcgtgc

SEQ ID NO: 3131530 - DNA, 25 bp, Homo sapien
accctaatgtatggctgttttgtta

SEQ ID NO: 3131531 - DNA, 25 bp, Homo sapien
cagcaaccctaatgtatggctgttt

SEQ ID NO: 3131532 - DNA, 25 bp, Homo sapien
tttgttatttcacgtctgctctcag

SEQ ID NO: 3131533 - DNA, 25 bp, Homo sapien
aaactgtctgggcttgtgggcactg

SEQ ID NO: 3131534 - DNA, 25 bp, Homo sapien
tgggcactgtacttgatttgtcact

SEQ ID NO: 3131535 - DNA, 25 bp, Homo sapien
tcacttctggataagataatttggg

SEQ ID NO: 3131536 - DNA, 25 bp, Homo sapien
tatgttgtgcctaaggagttgaacc

SEQ ID NO: 3131537 - DNA, 25 bp, Homo sapien
ctgagtctctgaaagcattcggttg

SEQ ID NO: 3131538 - DNA, 25 bp, Homo sapien
gagtctctgaaagcattcggttggc

SEQ ID NO: 3131539 - DNA, 25 bp, Homo sapien
ctctgaaagcattcggttggcttca

SEQ ID NO: 3131540 - DNA, 25 bp, Homo sapien
aagcattcggttggcttcagcagtt

SEQ ID NO: 3131541 - DNA, 25 bp, Homo sapien
gacaggaaggtgctgtactttgtac

SEQ ID NO: 3131542 - DNA, 25 bp, Homo sapien
taaccatgtgaagttccatgtgaat

SEQ ID NO: 3131543 - DNA, 25 bp, Homo sapien
ttcattagatgtacaaacattttca

SEQ ID NO: 3131544 - DNA, 25 bp, Homo sapien
aacattttcaacagagcctggagac

SEQ ID NO: 3131545 - DNA, 25 bp, Homo sapien
ggtcctgacagctttcaatctgcca

SEQ ID NO: 3131546 - DNA, 25 bp, Homo sapien
gagctctgttttacccttgaggtgg

SEQ ID NO: 3131547 - DNA, 25 bp, Homo sapien
tcattaaagtgaggtccagggtcct

SEQ ID NO: 3131548 - DNA, 25 bp, Homo sapien
tacagtggccctaggagattaacac

SEQ ID NO: 3131549 - DNA, 25 bp, Homo sapien
ccattgacatccattggtgaggcca

SEQ ID NO: 3131550 - DNA, 25 bp, Homo sapien
cattgacatccattggtgaggccaa

SEQ ID NO: 3131551 - DNA, 25 bp, Homo sapien
gacatccattggtgaggccaacagc

SEQ ID NO: 3131552 - DNA, 25 bp, Homo sapien
ttgacatccattggtgaggccaaca

SEQ ID NO: 3131553 - DNA, 25 bp, Homo sapien
gccaactaagtatctgttcatcatg

SEQ ID NO: 3131554 - DNA, 25 bp, Homo sapien
catcatgtacgtctctgcaacagaa

SEQ ID NO: 3131555 - DNA, 25 bp, Homo sapien
gacaacaaaatagagccgcaaaggg

SEQ ID NO: 3131556 - DNA, 25 bp, Homo sapien
gcagggtacatctcaatttcaatta

SEQ ID NO: 3131557 - DNA, 25 bp, Homo sapien
gaagcatggcaaaattctcactgaa

SEQ ID NO: 3131558 - DNA, 25 bp, Homo sapien
aagcatggcaaaattctcactgaag

SEQ ID NO: 3131559 - DNA, 25 bp, Homo sapien
cctggtgggctttgctgatggttga

SEQ ID NO: 3131560 - DNA, 25 bp, Homo sapien
gcagaagcatggcaaaattctcact

SEQ ID NO: 3131561 - DNA, 25 bp, Homo sapien
gccttagtgatggagtcaacctttg

SEQ ID NO: 3131562 - DNA, 25 bp, Homo sapien
taaaacatgccttagtgatggagtc

SEQ ID NO: 3131563 - DNA, 25 bp, Homo sapien
catgccttagtgatggagtcaacct

SEQ ID NO: 3131564 - DNA, 25 bp, Homo sapien
gtgatggagtcaacctttgtctgga

SEQ ID NO: 3131565 - DNA, 25 bp, Homo sapien
gatctggagccttagttttgttcca

SEQ ID NO: 3131566 - DNA, 25 bp, Homo sapien
gcatcagtgggatcttgactaaaac

SEQ ID NO: 3131567 - DNA, 25 bp, Homo sapien
tcctgcttgaggtgggatatcatct

SEQ ID NO: 3131568 - DNA, 25 bp, Homo sapien
cttacagtcaggaccttgaagggtc

SEQ ID NO: 3131569 - DNA, 25 bp, Homo sapien
gttctgatatctcggtcatactctg

SEQ ID NO: 3131570 - DNA, 25 bp, Homo sapien
gcagttctgatatctcggtcatact

SEQ ID NO: 3131571 - DNA, 25 bp, Homo sapien
ctgatatctcggtcatactctgtgc

SEQ ID NO: 3131572 - DNA, 25 bp, Homo sapien
tctgatatctcggtcatactctgtg

SEQ ID NO: 3131573 - DNA, 25 bp, Homo sapien
gatctgtttggtccagcgtgggtca

SEQ ID NO: 3131574 - DNA, 25 bp, Homo sapien
tcatgggatagaaatatggctgctg

SEQ ID NO: 3131575 - DNA, 25 bp, Homo sapien
gattcaccagagaggatctgtttgg

SEQ ID NO: 3131576 - DNA, 25 bp, Homo sapien
cacgtgggcaccatggtctgataaa

SEQ ID NO: 3131577 - DNA, 25 bp, Homo sapien
cagcgtccaggagaacaggtcggac

SEQ ID NO: 3131578 - DNA, 25 bp, Homo sapien
aacaggtcggacatttgaattatag

SEQ ID NO: 3131579 - DNA, 25 bp, Homo sapien
tgaaggcagagtgtacagcgtccag

SEQ ID NO: 3131580 - DNA, 25 bp, Homo sapien
tcatgaaggcagagtgtacagcgtc

SEQ ID NO: 3131581 - DNA, 25 bp, Homo sapien
tctggcaactggacagccatgattt

SEQ ID NO: 3131582 - DNA, 25 bp, Homo sapien
tggcaactggacagccatgattttt

SEQ ID NO: 3131583 - DNA, 25 bp, Homo sapien
ctctggcaactggacagccatgatt

SEQ ID NO: 3131584 - DNA, 25 bp, Homo sapien
cactctggcaactggacagccatga

SEQ ID NO: 3131585 - DNA, 25 bp, Homo sapien
tcttgttagttcctgtctcctgtgc

SEQ ID NO: 3131586 - DNA, 25 bp, Homo sapien
agtaagatcttgttagttcctgtct

SEQ ID NO: 3131587 - DNA, 25 bp, Homo sapien
taagatcttgttagttcctgtctcc

SEQ ID NO: 3131588 - DNA, 25 bp, Homo sapien
gatcttgttagttcctgtctcctgt

SEQ ID NO: 3131589 - DNA, 25 bp, Homo sapien
ttttgggaatgaattatccagatct

SEQ ID NO: 3131590 - DNA, 25 bp, Homo sapien
tttttttgggaatgaattatccaga

SEQ ID NO: 3131591 - DNA, 25 bp, Homo sapien
gggaatgaattatccagatcttcat

SEQ ID NO: 3131592 - DNA, 25 bp, Homo sapien
ttgggaatgaattatccagatcttc

SEQ ID NO: 3131593 - DNA, 25 bp, Homo sapien
ctgctgggcccactgagttaagctg

SEQ ID NO: 3131594 - DNA, 25 bp, Homo sapien
cttgacaaggatgtggttctgctgc

SEQ ID NO: 3131595 - DNA, 25 bp, Homo sapien
tgggcccactgagttaagctgcttg

SEQ ID NO: 3131596 - DNA, 25 bp, Homo sapien
tgaattgggtttctcttgacaagga

SEQ ID NO: 3131597 - DNA, 25 bp, Homo sapien
tccagttctaggcaacagcctcttg

SEQ ID NO: 3131598 - DNA, 25 bp, Homo sapien
cagttctaggcaacagcctcttgac

SEQ ID NO: 3131599 - DNA, 25 bp, Homo sapien
ttctaggcaacagcctcttgaccat

SEQ ID NO: 3131600 - DNA, 25 bp, Homo sapien
gccctgtggactccagttctaggca

SEQ ID NO: 3131601 - DNA, 25 bp, Homo sapien
tgaagactctggcaaatgccactta

SEQ ID NO: 3131602 - DNA, 25 bp, Homo sapien
gaagactctggcaaatgccacttat

SEQ ID NO: 3131603 - DNA, 25 bp, Homo sapien
ttgaagactctggcaaatgccactt

SEQ ID NO: 3131604 - DNA, 25 bp, Homo sapien
cttgaagactctggcaaatgccact

SEQ ID NO: 3131605 - DNA, 25 bp, Homo sapien
tacttgagcatgtggtatgtgtttc

SEQ ID NO: 3131606 - DNA, 25 bp, Homo sapien
acttgagcatgtggtatgtgtttcc

SEQ ID NO: 3131607 - DNA, 25 bp, Homo sapien
tcttctctttgtaatttggcccttg

SEQ ID NO: 3131608 - DNA, 25 bp, Homo sapien
tctttgtaatttggcccttggcttc

SEQ ID NO: 3131609 - DNA, 25 bp, Homo sapien
ggttcagggcaactgacttctttag

SEQ ID NO: 3131610 - DNA, 25 bp, Homo sapien
gggtctttccatatattaaatccag

SEQ ID NO: 3131611 - DNA, 25 bp, Homo sapien
ccccacagatcctgctatacgaggt

SEQ ID NO: 3131612 - DNA, 25 bp, Homo sapien
tttagactttgggtctttccatata

SEQ ID NO: 3131613 - DNA, 25 bp, Homo sapien
tattacataccacgttctttcactg

SEQ ID NO: 3131614 - DNA, 25 bp, Homo sapien
ggttataggagataaacagccctga

SEQ ID NO: 3131615 - DNA, 25 bp, Homo sapien
tgctgatgctcctataggttatagg

SEQ ID NO: 3131616 - DNA, 25 bp, Homo sapien
ggaagattttgctgcctacaaactc

SEQ ID NO: 3131617 - DNA, 25 bp, Homo sapien
agttctcctgtatcttaggcacagc

SEQ ID NO: 3131618 - DNA, 25 bp, Homo sapien
gtatcttaggcacagccccttcaca

SEQ ID NO: 3131619 - DNA, 25 bp, Homo sapien
tggacatactcagtcctccctctgt

SEQ ID NO: 3131620 - DNA, 25 bp, Homo sapien
tcctgtatcttaggcacagcccctt

SEQ ID NO: 3131621 - DNA, 25 bp, Homo sapien
gcagacaggtttctggtactccaga

SEQ ID NO: 3131622 - DNA, 25 bp, Homo sapien
gatgcttgcccagtgttaaaacaaa

SEQ ID NO: 3131623 - DNA, 25 bp, Homo sapien
cattgaataatggaggcaaaccaag

SEQ ID NO: 3131624 - DNA, 25 bp, Homo sapien
gaggcaaaccaagggttgtatgaaa

SEQ ID NO: 3131625 - DNA, 25 bp, Homo sapien
gaagggacacgtgaaacttcattag

SEQ ID NO: 3131626 - DNA, 25 bp, Homo sapien
gacacgtgaaacttcattaggaaaa

SEQ ID NO: 3131627 - DNA, 25 bp, Homo sapien
actggctttttcaggaagggacacg

SEQ ID NO: 3131628 - DNA, 25 bp, Homo sapien
ttcaggaagggacacgtgaaacttc

SEQ ID NO: 3131629 - DNA, 25 bp, Homo sapien
agcacctggagcacgggaatcctcc

SEQ ID NO: 3131630 - DNA, 25 bp, Homo sapien
aaaatacaagtctgactgtgtttct

SEQ ID NO: 3131631 - DNA, 25 bp, Homo sapien
gagcacctggagcacgggaatcctc

SEQ ID NO: 3131632 - DNA, 25 bp, Homo sapien
tacaagtctgactgtgtttctccag

SEQ ID NO: 3131633 - DNA, 25 bp, Homo sapien
gtcagaagaggtcccaagtttctga

SEQ ID NO: 3131634 - DNA, 25 bp, Homo sapien
tcccaagtttctgaaaggggctcat

SEQ ID NO: 3131635 - DNA, 25 bp, Homo sapien
ctgtgtcagaagaggtcccaagttt

SEQ ID NO: 3131636 - DNA, 25 bp, Homo sapien
gtcccaagtttctgaaaggggctca

SEQ ID NO: 3131637 - DNA, 25 bp, Homo sapien
gatggaaccgcttgtgtactcagag

SEQ ID NO: 3131638 - DNA, 25 bp, Homo sapien
tcccttattattacccgctcctgtg

SEQ ID NO: 3131639 - DNA, 25 bp, Homo sapien
cagtgactgaccaaatgaggctctc

SEQ ID NO: 3131640 - DNA, 25 bp, Homo sapien
tgctggtgaacaaggacgctggatg

SEQ ID NO: 3131641 - DNA, 25 bp, Homo sapien
gttgcttagtgtaataaccttcatc

SEQ ID NO: 3131642 - DNA, 25 bp, Homo sapien
aaatctgttgtttacgagaacacat

SEQ ID NO: 3131643 - DNA, 25 bp, Homo sapien
aatctgttgtttacgagaacacatg

SEQ ID NO: 3131644 - DNA, 25 bp, Homo sapien
gctgtgaaagtcctattttggcatc

SEQ ID NO: 3131645 - DNA, 25 bp, Homo sapien
aatccatggatgatgtcgtaacgct

SEQ ID NO: 3131646 - DNA, 25 bp, Homo sapien
gcaccgaaatcaatggcagcagatt

SEQ ID NO: 3131647 - DNA, 25 bp, Homo sapien
gcttctccaagcaacatgctctttg

SEQ ID NO: 3131648 - DNA, 25 bp, Homo sapien
cttgaacacaatgtcaaatccatgg

SEQ ID NO: 3131649 - DNA, 25 bp, Homo sapien
tctccatacgccaactttaaagcct

SEQ ID NO: 3131650 - DNA, 25 bp, Homo sapien
tgaaaacctgatacagcaagtcctt

SEQ ID NO: 3131651 - DNA, 25 bp, Homo sapien
tgagtatcgcagagttaagttgaac

SEQ ID NO: 3131652 - DNA, 25 bp, Homo sapien
tcttggcctttgcacattaatgaaa

SEQ ID NO: 3131653 - DNA, 25 bp, Homo sapien
tctgtggcagattgtgtctagctgg

SEQ ID NO: 3131654 - DNA, 25 bp, Homo sapien
gttcccggtgtggtcacattctgtg

SEQ ID NO: 3131655 - DNA, 25 bp, Homo sapien
cattctgtggcagattgtgtctagc

SEQ ID NO: 3131656 - DNA, 25 bp, Homo sapien
ggtcacattctgtggcagattgtgt

SEQ ID NO: 3131657 - DNA, 25 bp, Homo sapien
cactaacctagatgcctgggacaca

SEQ ID NO: 3131658 - DNA, 25 bp, Homo sapien
gaagagagccctcacaagagatgga

SEQ ID NO: 3131659 - DNA, 25 bp, Homo sapien
tgttcaagacctcactctaatgtgg

SEQ ID NO: 3131660 - DNA, 25 bp, Homo sapien
tttcttcccacacgcatgcactgag

SEQ ID NO: 3131661 - DNA, 25 bp, Homo sapien
tagaaccggacctggtaactgttga

SEQ ID NO: 3131662 - DNA, 25 bp, Homo sapien
tggtgtttacctactcatccgttgg

SEQ ID NO: 3131663 - DNA, 25 bp, Homo sapien
tatgctagaatcatggactgcttgg

SEQ ID NO: 3131664 - DNA, 25 bp, Homo sapien
cactaagagacttaacgagggtaca

SEQ ID NO: 3131665 - DNA, 25 bp, Homo sapien
tagctgttgaaagcaccctgagcac

SEQ ID NO: 3131666 - DNA, 25 bp, Homo sapien
tcacctagctagagagctgcgcagc

SEQ ID NO: 3131667 - DNA, 25 bp, Homo sapien
gctgcgcagctggaactagtataca

SEQ ID NO: 3131668 - DNA, 25 bp, Homo sapien
aaatgggagctcagaaggttggact

SEQ ID NO: 3131669 - DNA, 25 bp, Homo sapien
tacagcagtcagagatgagtatact

SEQ ID NO: 3131670 - DNA, 25 bp, Homo sapien
tgtcatagacgtagttttcgcatcc

SEQ ID NO: 3131671 - DNA, 25 bp, Homo sapien
tcctctggcctagggttaagtgtgc

SEQ ID NO: 3131672 - DNA, 25 bp, Homo sapien
taagtgtgcaagataactactcgtg

SEQ ID NO: 3131673 - DNA, 25 bp, Homo sapien
gggcgcggcgctccggctcgaggca

SEQ ID NO: 3131674 - DNA, 25 bp, Homo sapien
gctccggctcgaggcattcggagct

SEQ ID NO: 3131675 - DNA, 25 bp, Homo sapien
cgggtgctggtgtacggcggcaggg

SEQ ID NO: 3131676 - DNA, 25 bp, Homo sapien
cgccgggtgctggtgtacggcggca

SEQ ID NO: 3131677 - DNA, 25 bp, Homo sapien
ctaccagggcaacgatgatcaggat

SEQ ID NO: 3131678 - DNA, 25 bp, Homo sapien
taccacgcctttttgaaccatccag

SEQ ID NO: 3131679 - DNA, 25 bp, Homo sapien
tgtctgtggcgttgaccagatccac

SEQ ID NO: 3131680 - DNA, 25 bp, Homo sapien
gaagagcccgtagtaaatgtcccca

SEQ ID NO: 3131681 - DNA, 25 bp, Homo sapien
caaaaatgagtgcctagaatcagct

SEQ ID NO: 3131682 - DNA, 25 bp, Homo sapien
ttcatgaagtccaagcttgcttacc

SEQ ID NO: 3131683 - DNA, 25 bp, Homo sapien
ccccagattcatgcttgtcagttga

SEQ ID NO: 3131684 - DNA, 25 bp, Homo sapien
taccacgaaggcttcgacagacagg

SEQ ID NO: 3131685 - DNA, 25 bp, Homo sapien
tgagatgaactcatggcccccagat

SEQ ID NO: 3131686 - DNA, 25 bp, Homo sapien
tgccaggacattccataggcagatg

SEQ ID NO: 3131687 - DNA, 25 bp, Homo sapien
cacatgaaggcctgcgttgagctcc

SEQ ID NO: 3131688 - DNA, 25 bp, Homo sapien
ggacctggatcatgttaagaatggc

SEQ ID NO: 3131689 - DNA, 25 bp, Homo sapien
ctgactgcccggtacgggacctgga

SEQ ID NO: 3131690 - DNA, 25 bp, Homo sapien
ggaatttgactgatcgccaccacga

SEQ ID NO: 3131691 - DNA, 25 bp, Homo sapien
gatatcctcagctgtgaccgtggcc

SEQ ID NO: 3131692 - DNA, 25 bp, Homo sapien
aaagttggcgattcgttccgtcagg

SEQ ID NO: 3131693 - DNA, 25 bp, Homo sapien
ccaagtttgcagcatgggccgaagc

SEQ ID NO: 3131694 - DNA, 25 bp, Homo sapien
acacgtgcacgaaaacccaatcgtc

SEQ ID NO: 3131695 - DNA, 25 bp, Homo sapien
aaacccaatcgtcatcctcatgaac

SEQ ID NO: 3131696 - DNA, 25 bp, Homo sapien
aacccaatcgtcatcctcatgaact

SEQ ID NO: 3131697 - DNA, 25 bp, Homo sapien
gaaaacagaagagctatcgctgact

SEQ ID NO: 3131698 - DNA, 25 bp, Homo sapien
tcatacccagtacagtggacccagg

SEQ ID NO: 3131699 - DNA, 25 bp, Homo sapien
ctgactttgcagtaagtactctggg

SEQ ID NO: 3131700 - DNA, 25 bp, Homo sapien
tcatacctgtgaggctgatacaaat

SEQ ID NO: 3131701 - DNA, 25 bp, Homo sapien
taggcattacctcgggaacagtctg

SEQ ID NO: 3131702 - DNA, 25 bp, Homo sapien
accagagagacttgcgtgcacgcac

SEQ ID NO: 3131703 - DNA, 25 bp, Homo sapien
tgtcttgcgcttgtcccagtgggtg

SEQ ID NO: 3131704 - DNA, 25 bp, Homo sapien
cacaggtgagcagatcgcagtaggc

SEQ ID NO: 3131705 - DNA, 25 bp, Homo sapien
gggacccctgtcacatttgcaatag

SEQ ID NO: 3131706 - DNA, 25 bp, Homo sapien
tattaatctggagggataggctcac

SEQ ID NO: 3131707 - DNA, 25 bp, Homo sapien
gctgctactgctgggatgatcttcg

SEQ ID NO: 3131708 - DNA, 25 bp, Homo sapien
taggctcacaatactcaagcagaag

SEQ ID NO: 3131709 - DNA, 25 bp, Homo sapien
aatccagtaggatcattgcccaccc

SEQ ID NO: 3131710 - DNA, 25 bp, Homo sapien
cagtaggatcattgcccaccctaaa

SEQ ID NO: 3131711 - DNA, 25 bp, Homo sapien
acatcaaatccagtaggatcattgc

SEQ ID NO: 3131712 - DNA, 25 bp, Homo sapien
caaatccagtaggatcattgcccac

SEQ ID NO: 3131713 - DNA, 25 bp, Homo sapien
agcagcatgaccctttgacacacac

SEQ ID NO: 3131714 - DNA, 25 bp, Homo sapien
ccttgcacctctcttgtgctgtagc

SEQ ID NO: 3131715 - DNA, 25 bp, Homo sapien
gtctgaaggtcgttgatgcacacac

SEQ ID NO: 3131716 - DNA, 25 bp, Homo sapien
tgaaggtcgttgatgcacacactga

SEQ ID NO: 3131717 - DNA, 25 bp, Homo sapien
caaggttgctgaatagacgactgca

SEQ ID NO: 3131718 - DNA, 25 bp, Homo sapien
cgctgggcaactcccgggaaataga

SEQ ID NO: 3131719 - DNA, 25 bp, Homo sapien
aacctcccgctgcttagttgaaacg

SEQ ID NO: 3131720 - DNA, 25 bp, Homo sapien
gaaatagaaactgagtgccagagct

SEQ ID NO: 3131721 - DNA, 25 bp, Homo sapien
tccagcgagcacgtggagagcggtg

SEQ ID NO: 3131722 - DNA, 25 bp, Homo sapien
gcgcagacggcgtgcgcgcggactg

SEQ ID NO: 3131723 - DNA, 25 bp, Homo sapien
gcgcggactggctcgggcgccgggc

SEQ ID NO: 3131724 - DNA, 25 bp, Homo sapien
cgggcgagcggacgtgcgtctaggg

SEQ ID NO: 3131725 - DNA, 25 bp, Homo sapien
ttgtcggctcggcccctcgcaccgc

SEQ ID NO: 3131726 - DNA, 25 bp, Homo sapien
cttgtcggctcggcccctcgcaccg

SEQ ID NO: 3131727 - DNA, 25 bp, Homo sapien
tgtcggctcggcccctcgcaccgcc

SEQ ID NO: 3131728 - DNA, 25 bp, Homo sapien
gcagccggaagaggcagcaagaaca

SEQ ID NO: 3131729 - DNA, 25 bp, Homo sapien
cagccggaagaggcagcaagaacat

SEQ ID NO: 3131730 - DNA, 25 bp, Homo sapien
cccgcagccggaagaggcagcaaga

SEQ ID NO: 3131731 - DNA, 25 bp, Homo sapien
cgcagccggaagaggcagcaagaac

SEQ ID NO: 3131732 - DNA, 25 bp, Homo sapien
ggccagacgtcggacgactactcgc

SEQ ID NO: 3131733 - DNA, 25 bp, Homo sapien
gtctcacggccagacgtcggacgac

SEQ ID NO: 3131734 - DNA, 25 bp, Homo sapien
tcacggccagacgtcggacgactac

SEQ ID NO: 3131735 - DNA, 25 bp, Homo sapien
acggccagacgtcggacgactactc

SEQ ID NO: 3131736 - DNA, 25 bp, Homo sapien
gcggtggagagactccggctcccga

SEQ ID NO: 3131737 - DNA, 25 bp, Homo sapien
ctgcggtggagagactccggctccc

SEQ ID NO: 3131738 - DNA, 25 bp, Homo sapien
tgcggtggagagactccggctcccg

SEQ ID NO: 3131739 - DNA, 25 bp, Homo sapien
aagtgcgcggccgagtggagccggg

SEQ ID NO: 3131740 - DNA, 25 bp, Homo sapien
gcaagtgcgcggccgagtggagccg

SEQ ID NO: 3131741 - DNA, 25 bp, Homo sapien
ctggagcaagtgcgcggccgagtgg

SEQ ID NO: 3131742 - DNA, 25 bp, Homo sapien
gagcaagtgcgcggccgagtggagc

SEQ ID NO: 3131743 - DNA, 25 bp, Homo sapien
ttactgccaggaccgcgggtgacga

SEQ ID NO: 3131744 - DNA, 25 bp, Homo sapien
ccaagctcggatgggagccccaccg

SEQ ID NO: 3131745 - DNA, 25 bp, Homo sapien
cgggttactgccaggaccgcgggtg

SEQ ID NO: 3131746 - DNA, 25 bp, Homo sapien
atgggagccccaccgccgcgtcttt

SEQ ID NO: 3131747 - DNA, 25 bp, Homo sapien
ctgtgactctgggacctcagaaacc

SEQ ID NO: 3131748 - DNA, 25 bp, Homo sapien
ctctgggacctcagaaaccctttca

SEQ ID NO: 3131749 - DNA, 25 bp, Homo sapien
tctgggacctcagaaaccctttcac

SEQ ID NO: 3131750 - DNA, 25 bp, Homo sapien
tgactctgggacctcagaaaccctt

SEQ ID NO: 3131751 - DNA, 25 bp, Homo sapien
tggtgcttaggcatgactcccaagc

SEQ ID NO: 3131752 - DNA, 25 bp, Homo sapien
tcttctgcagggacagtcatctctt

SEQ ID NO: 3131753 - DNA, 25 bp, Homo sapien
gctggttccgagagccattcccttt

SEQ ID NO: 3131754 - DNA, 25 bp, Homo sapien
tggagctcaagctccccctagaacg

SEQ ID NO: 3131755 - DNA, 25 bp, Homo sapien
acttgtgaactgtggcacatcatct

SEQ ID NO: 3131756 - DNA, 25 bp, Homo sapien
cagaccataaaaggttcgagtcttc

SEQ ID NO: 3131757 - DNA, 25 bp, Homo sapien
ctgatgcagaccataaaaggttcga

SEQ ID NO: 3131758 - DNA, 25 bp, Homo sapien
aaggttcgagtcttccctgccttca

SEQ ID NO: 3131759 - DNA, 25 bp, Homo sapien
cataaaaggttcgagtcttccctgc

SEQ ID NO: 3131760 - DNA, 25 bp, Homo sapien
ttttgccgaggccaactagcaccac

SEQ ID NO: 3131761 - DNA, 25 bp, Homo sapien
cgaggccaactagcaccacgctggg

SEQ ID NO: 3131762 - DNA, 25 bp, Homo sapien
tgccagttttcctgttcgtcgattc

SEQ ID NO: 3131763 - DNA, 25 bp, Homo sapien
gctgcctttttgccgaggccaacta

SEQ ID NO: 3131764 - DNA, 25 bp, Homo sapien
ggcccgtcctgctgcttaatgctaa

SEQ ID NO: 3131765 - DNA, 25 bp, Homo sapien
aatgctaagtgactcaatggcccct

SEQ ID NO: 3131766 - DNA, 25 bp, Homo sapien
tagtgataaacaagcacgccacgct

SEQ ID NO: 3131767 - DNA, 25 bp, Homo sapien
ctgggacatactgggacaggcacac

SEQ ID NO: 3131768 - DNA, 25 bp, Homo sapien
cagtccaagacaactcaaagagcag

SEQ ID NO: 3131769 - DNA, 25 bp, Homo sapien
gatgaagcttcccaattgccaagag

SEQ ID NO: 3131770 - DNA, 25 bp, Homo sapien
ttacagcaagtacctcactcccagg

SEQ ID NO: 3131771 - DNA, 25 bp, Homo sapien
cctgatacccgaatgttctgagcct

SEQ ID NO: 3131772 - DNA, 25 bp, Homo sapien
ccatagagctttgccgacacagcca

SEQ ID NO: 3131773 - DNA, 25 bp, Homo sapien
tagagctttgccgacacagccatct

SEQ ID NO: 3131774 - DNA, 25 bp, Homo sapien
gagctttgccgacacagccatcttc

SEQ ID NO: 3131775 - DNA, 25 bp, Homo sapien
tccatagagctttgccgacacagcc

SEQ ID NO: 3131776 - DNA, 25 bp, Homo sapien
gactgcctgccaactaagagacact

SEQ ID NO: 3131777 - DNA, 25 bp, Homo sapien
aaccagagggtatccggtcaggcac

SEQ ID NO: 3131778 - DNA, 25 bp, Homo sapien
catctacatgaaaaagggcctgtgc

SEQ ID NO: 3131779 - DNA, 25 bp, Homo sapien
caatggctctaacgtggcaactgaa

SEQ ID NO: 3131780 - DNA, 25 bp, Homo sapien
tcggttttactactagcacttttga

SEQ ID NO: 3131781 - DNA, 25 bp, Homo sapien
agcaaatctggttggcgtcatctca

SEQ ID NO: 3131782 - DNA, 25 bp, Homo sapien
tggcgtctccatcaattggcgtgcc

SEQ ID NO: 3131783 - DNA, 25 bp, Homo sapien
tgatatggacctcggttttactact

SEQ ID NO: 3131784 - DNA, 25 bp, Homo sapien
caatgctggagtctaggctaaggga

SEQ ID NO: 3131785 - DNA, 25 bp, Homo sapien
taaagggctggagatcccaagagag

SEQ ID NO: 3131786 - DNA, 25 bp, Homo sapien
gacacctgggagcaccaatgctgga

SEQ ID NO: 3131787 - DNA, 25 bp, Homo sapien
gaactggacgagcaggctttcagct

SEQ ID NO: 3131788 - DNA, 25 bp, Homo sapien
aggaatgatcccattgcctgttcct

SEQ ID NO: 3131789 - DNA, 25 bp, Homo sapien
gctcgtcagatcctttggccacact

SEQ ID NO: 3131790 - DNA, 25 bp, Homo sapien
gggctcgtcagatcctttggccaca

SEQ ID NO: 3131791 - DNA, 25 bp, Homo sapien
gtcagatcctttggccacactgagg

SEQ ID NO: 3131792 - DNA, 25 bp, Homo sapien
ttaaagtaatgtataccttcaacca

SEQ ID NO: 3131793 - DNA, 25 bp, Homo sapien
tcaaactataaaccggccaggcaca

SEQ ID NO: 3131794 - DNA, 25 bp, Homo sapien
gtatcaaactataaaccggccaggc

SEQ ID NO: 3131795 - DNA, 25 bp, Homo sapien
taatgtataccttcaaccaaacacc

SEQ ID NO: 3131796 - DNA, 25 bp, Homo sapien
tagataaaccccagatactacgctg

SEQ ID NO: 3131797 - DNA, 25 bp, Homo sapien
actgcatttatatgactttccggaa

SEQ ID NO: 3131798 - DNA, 25 bp, Homo sapien
gcatttccatacaattgaacactac

SEQ ID NO: 3131799 - DNA, 25 bp, Homo sapien
cagatactacgctgaaagaagccag

SEQ ID NO: 3131800 - DNA, 25 bp, Homo sapien
gggcaaattaagctttgcagcagac

SEQ ID NO: 3131801 - DNA, 25 bp, Homo sapien
agtcaatgagccagcaacgtcctgc

SEQ ID NO: 3131802 - DNA, 25 bp, Homo sapien
ggccacaatcctacgaagcaatcag

SEQ ID NO: 3131803 - DNA, 25 bp, Homo sapien
ccagaagcgttatgagatgtaatcc

SEQ ID NO: 3131804 - DNA, 25 bp, Homo sapien
ttgacattatgtgcccctgactgct

SEQ ID NO: 3131805 - DNA, 25 bp, Homo sapien
aacatcccccggcttgttggccttg

SEQ ID NO: 3131806 - DNA, 25 bp, Homo sapien
tcccgtttttggctctaacaacatc

SEQ ID NO: 3131807 - DNA, 25 bp, Homo sapien
ctggatggtcttcccgtttttggct

SEQ ID NO: 3131808 - DNA, 25 bp, Homo sapien
ccgctgggcatattttcacaaagag

SEQ ID NO: 3131809 - DNA, 25 bp, Homo sapien
gtaggacagtatgttctacctcaac

SEQ ID NO: 3131810 - DNA, 25 bp, Homo sapien
cccatgatgtaggacagtatgttct

SEQ ID NO: 3131811 - DNA, 25 bp, Homo sapien
ctgcatgcacgtgccacccagagga

SEQ ID NO: 3131812 - DNA, 25 bp, Homo sapien
tccccttcagtgcagggcccatgat

SEQ ID NO: 3131813 - DNA, 25 bp, Homo sapien
cagagcgcatcagccagtatgagcc

SEQ ID NO: 3131814 - DNA, 25 bp, Homo sapien
cattgaggatgaccttcgggttaaa

SEQ ID NO: 3131815 - DNA, 25 bp, Homo sapien
ggcattgaggatgaccttcgggtta

SEQ ID NO: 3131816 - DNA, 25 bp, Homo sapien
cgtaacagagcgcatcagccagtat

SEQ ID NO: 3131817 - DNA, 25 bp, Homo sapien
cctgatcccaaagctacatccatgg

SEQ ID NO: 3131818 - DNA, 25 bp, Homo sapien
gatcccaaagctacatccatggcac

SEQ ID NO: 3131819 - DNA, 25 bp, Homo sapien
tgatcccaaagctacatccatggca

SEQ ID NO: 3131820 - DNA, 25 bp, Homo sapien
ctgatcccaaagctacatccatggc

SEQ ID NO: 3131821 - DNA, 25 bp, Homo sapien
gaactcccttatatgactcacgaca

SEQ ID NO: 3131822 - DNA, 25 bp, Homo sapien
aaactatgaccacagtgttcgtgag

SEQ ID NO: 3131823 - DNA, 25 bp, Homo sapien
tcacgacacgcagtcacaaacgctg

SEQ ID NO: 3131824 - DNA, 25 bp, Homo sapien
aagacatcctcatcgatgcagggtg

SEQ ID NO: 3131825 - DNA, 25 bp, Homo sapien
tagcagccacatgggtacacagagg

SEQ ID NO: 3131826 - DNA, 25 bp, Homo sapien
tactgaactactgagcaccaccagg

SEQ ID NO: 3131827 - DNA, 25 bp, Homo sapien
aaagagttcttatgtggcgggtcac

SEQ ID NO: 3131828 - DNA, 25 bp, Homo sapien
tgaatgagtaagcagccagctggag

SEQ ID NO: 3131829 - DNA, 25 bp, Homo sapien
catcctccagacacggtcccctgtt

SEQ ID NO: 3131830 - DNA, 25 bp, Homo sapien
gctggcaatctacaacctgtcttgt

SEQ ID NO: 3131831 - DNA, 25 bp, Homo sapien
acacggtcccctgtttcaatgctgg

SEQ ID NO: 3131832 - DNA, 25 bp, Homo sapien
tccagacacggtcccctgtttcaat

SEQ ID NO: 3131833 - DNA, 25 bp, Homo sapien
cttaggatgagttacgaattctttc

SEQ ID NO: 3131834 - DNA, 25 bp, Homo sapien
taggatgagttacgaattctttcag

SEQ ID NO: 3131835 - DNA, 25 bp, Homo sapien
tctttcaggaatgctgcagctgtac

SEQ ID NO: 3131836 - DNA, 25 bp, Homo sapien
tgcagctgtacatgctcctgcagat

SEQ ID NO: 3131837 - DNA, 25 bp, Homo sapien
tctttgttggtcatcacgcctgcta

SEQ ID NO: 3131838 - DNA, 25 bp, Homo sapien
acgcctgctatgtctaaatgtgccc

SEQ ID NO: 3131839 - DNA, 25 bp, Homo sapien
cagtcatgcctttccgtagataggg

SEQ ID NO: 3131840 - DNA, 25 bp, Homo sapien
caatgagagtccttgtgggcctccc

SEQ ID NO: 3131841 - DNA, 25 bp, Homo sapien
gtctccgttaaaagattttcatcca

SEQ ID NO: 3131842 - DNA, 25 bp, Homo sapien
taagttcaactgtccaatttaagac

SEQ ID NO: 3131843 - DNA, 25 bp, Homo sapien
taaataccatcctttgtctccgtta

SEQ ID NO: 3131844 - DNA, 25 bp, Homo sapien
taaaaatccttatcaagtaagatat

SEQ ID NO: 3131845 - DNA, 25 bp, Homo sapien
atgaaaaacatatactctgaaaagt

SEQ ID NO: 3131846 - DNA, 25 bp, Homo sapien
ttctcaatgaaaaacatatactctg

SEQ ID NO: 3131847 - DNA, 25 bp, Homo sapien
gagttacaattttgcttctcaatga

SEQ ID NO: 3131848 - DNA, 25 bp, Homo sapien
tgagttacaattttgcttctcaatg

SEQ ID NO: 3131849 - DNA, 25 bp, Homo sapien
tctgacaagtgcatagtaattttca

SEQ ID NO: 3131850 - DNA, 25 bp, Homo sapien
tgtttctgacaagtgcatagtaatt

SEQ ID NO: 3131851 - DNA, 25 bp, Homo sapien
gacaagtgcatagtaattttcagtt

SEQ ID NO: 3131852 - DNA, 25 bp, Homo sapien
ttctgacaagtgcatagtaattttc

SEQ ID NO: 3131853 - DNA, 25 bp, Homo sapien
aatggcgcaagagagatccactgcg

SEQ ID NO: 3131854 - DNA, 25 bp, Homo sapien
atggcgcaagagagatccactgcgc

SEQ ID NO: 3131855 - DNA, 25 bp, Homo sapien
ccaactcgtccaccaaagtactgct

SEQ ID NO: 3131856 - DNA, 25 bp, Homo sapien
ctcgaaagatgactccaactcgtcc

SEQ ID NO: 3131857 - DNA, 25 bp, Homo sapien
agaagcgaagcttggcccggaaggc

SEQ ID NO: 3131858 - DNA, 25 bp, Homo sapien
ccagaaaacataccccctagtggag

SEQ ID NO: 3131859 - DNA, 25 bp, Homo sapien
tcgaatttcttcctgatcggtgcca

SEQ ID NO: 3131860 - DNA, 25 bp, Homo sapien
cccagaacattgtgtacacagaggg

SEQ ID NO: 3131861 - DNA, 25 bp, Homo sapien
aattagcaactaggaaatactgctg

SEQ ID NO: 3131862 - DNA, 25 bp, Homo sapien
agcccagaacattgtgtacacagag

SEQ ID NO: 3131863 - DNA, 25 bp, Homo sapien
tataaaattagcaactaggaaatac

SEQ ID NO: 3131864 - DNA, 25 bp, Homo sapien
tgtctgtcttgcaatatccagaaac

SEQ ID NO: 3131865 - DNA, 25 bp, Homo sapien
ctggtttctggacagataactgcaa

SEQ ID NO: 3131866 - DNA, 25 bp, Homo sapien
gaaaaaacattctgtctgtcttgca

SEQ ID NO: 3131867 - DNA, 25 bp, Homo sapien
cagaaacttctggatacactgatca

SEQ ID NO: 3131868 - DNA, 25 bp, Homo sapien
tagtgcatctttccgctgtaattca

SEQ ID NO: 3131869 - DNA, 25 bp, Homo sapien
tgcatctttccgctgtaattcattc

SEQ ID NO: 3131870 - DNA, 25 bp, Homo sapien
catctttccgctgtaattcattcct

SEQ ID NO: 3131871 - DNA, 25 bp, Homo sapien
agtgcatctttccgctgtaattcat

SEQ ID NO: 3131872 - DNA, 25 bp, Homo sapien
ctgagggatgtcggcgggctttttg

SEQ ID NO: 3131873 - DNA, 25 bp, Homo sapien
ggatgtcggcgggctttttgtgctg

SEQ ID NO: 3131874 - DNA, 25 bp, Homo sapien
agggatgtcggcgggctttttgtgc

SEQ ID NO: 3131875 - DNA, 25 bp, Homo sapien
gatgtcggcgggctttttgtgctgc

SEQ ID NO: 3131876 - DNA, 25 bp, Homo sapien
gaaatggcaacaactggtacgtaca

SEQ ID NO: 3131877 - DNA, 25 bp, Homo sapien
gaggctgcccacaaaactaacgaga

SEQ ID NO: 3131878 - DNA, 25 bp, Homo sapien
gaatgttagcgtatcactgctccca

SEQ ID NO: 3131879 - DNA, 25 bp, Homo sapien
ggtaatcagagatccatgtgccaga

SEQ ID NO: 3131880 - DNA, 25 bp, Homo sapien
gattattcatcacccagtaagatgt

SEQ ID NO: 3131881 - DNA, 25 bp, Homo sapien
tggcttgtgattttctccctgaaaa

SEQ ID NO: 3131882 - DNA, 25 bp, Homo sapien
aaagttagcagctcagagggtttct

SEQ ID NO: 3131883 - DNA, 25 bp, Homo sapien
ttcttagaggattattcatcaccca

SEQ ID NO: 3131884 - DNA, 25 bp, Homo sapien
ggaataggtcctagtcttatcccta

SEQ ID NO: 3131885 - DNA, 25 bp, Homo sapien
gaagcctgtgggcagacctaaggtc

SEQ ID NO: 3131886 - DNA, 25 bp, Homo sapien
taatcctggggaataggtcctagtc

SEQ ID NO: 3131887 - DNA, 25 bp, Homo sapien
ggcagacctaaggtcaagcaccaag

SEQ ID NO: 3131888 - DNA, 25 bp, Homo sapien
gctgttatcaacacactgaccaggg

SEQ ID NO: 3131889 - DNA, 25 bp, Homo sapien
gcttctgccaaaggttaaagactaa

SEQ ID NO: 3131890 - DNA, 25 bp, Homo sapien
gcatcttggagcctgacaaggaagc

SEQ ID NO: 3131891 - DNA, 25 bp, Homo sapien
cttaagaacaccctggaaccacagg

SEQ ID NO: 3131892 - DNA, 25 bp, Homo sapien
tcagactgctcattagaggaggcct

SEQ ID NO: 3131893 - DNA, 25 bp, Homo sapien
gcaggtccccaatgccaggagcttt

SEQ ID NO: 3131894 - DNA, 25 bp, Homo sapien
tggccaggctgatggaagcgcccaa

SEQ ID NO: 3131895 - DNA, 25 bp, Homo sapien
tgtgtcgggcagaaatggcctagca

SEQ ID NO: 3131896 - DNA, 25 bp, Homo sapien
ccgaacagtgttgtcagcttctgaa

SEQ ID NO: 3131897 - DNA, 25 bp, Homo sapien
gagaatggcatgaccgaacagtgtt

SEQ ID NO: 3131898 - DNA, 25 bp, Homo sapien
tatcatggcctgagagcaactttgg

SEQ ID NO: 3131899 - DNA, 25 bp, Homo sapien
ttttatcatggcctgagagcaactt

SEQ ID NO: 3131900 - DNA, 25 bp, Homo sapien
gaaccataggacttctcagacagag

SEQ ID NO: 3131901 - DNA, 25 bp, Homo sapien
gcatgccccgagacacaattagaag

SEQ ID NO: 3131902 - DNA, 25 bp, Homo sapien
tggtggaatcctcagcaactgggcc

SEQ ID NO: 3131903 - DNA, 25 bp, Homo sapien
taaactcagcatgatccctgggcaa

SEQ ID NO: 3131904 - DNA, 25 bp, Homo sapien
gagtttcccgcttagagtgtcttag

SEQ ID NO: 3131905 - DNA, 25 bp, Homo sapien
tttcagtctttggtgctggcccaga

SEQ ID NO: 3131906 - DNA, 25 bp, Homo sapien
taggacagcatgagcccaagagttc

SEQ ID NO: 3131907 - DNA, 25 bp, Homo sapien
gaaatgggtgcctgctacgtgtcct

SEQ ID NO: 3131908 - DNA, 25 bp, Homo sapien
gatgctagtcaactccactggaaag

SEQ ID NO: 3131909 - DNA, 25 bp, Homo sapien
aagatcttctagactgggcacatgg

SEQ ID NO: 3131910 - DNA, 25 bp, Homo sapien
tgtaaataaccaatcctagcccagt

SEQ ID NO: 3131911 - DNA, 25 bp, Homo sapien
tagcccagttataggtctcagtgta

SEQ ID NO: 3131912 - DNA, 25 bp, Homo sapien
gccaagttcgaactcctgcattcca

SEQ ID NO: 3131913 - DNA, 25 bp, Homo sapien
caagttcgaactcctgcattccaac

SEQ ID NO: 3131914 - DNA, 25 bp, Homo sapien
agtgagccaagttcgaactcctgca

SEQ ID NO: 3131915 - DNA, 25 bp, Homo sapien
gttcgaactcctgcattccaaccag

SEQ ID NO: 3131916 - DNA, 25 bp, Homo sapien
tacaaaaggtggactccatctggcc

SEQ ID NO: 3131917 - DNA, 25 bp, Homo sapien
ttaggaccccagatggtgaaacggc

SEQ ID NO: 3131918 - DNA, 25 bp, Homo sapien
gattctttctagcacctggtaccaa

SEQ ID NO: 3131919 - DNA, 25 bp, Homo sapien
tcatggatgattagacaagggacac

SEQ ID NO: 3131920 - DNA, 25 bp, Homo sapien
tatatctatggctgggcggattatg

SEQ ID NO: 3131921 - DNA, 25 bp, Homo sapien
gatttcactacgcagcattccccag

SEQ ID NO: 3131922 - DNA, 25 bp, Homo sapien
agtgccatgtcccaccggaatcggt

SEQ ID NO: 3131923 - DNA, 25 bp, Homo sapien
taagggctggtgtacgctcagaaaa

SEQ ID NO: 3131924 - DNA, 25 bp, Homo sapien
cagtgcctggcagctttattcccac

SEQ ID NO: 3131925 - DNA, 25 bp, Homo sapien
tcaatttcctaaggcatcagcttgc

SEQ ID NO: 3131926 - DNA, 25 bp, Homo sapien
tacacacaaacaagatcggccatat

SEQ ID NO: 3131927 - DNA, 25 bp, Homo sapien
gaaaggcggcaaaatcctttgcata

SEQ ID NO: 3131928 - DNA, 25 bp, Homo sapien
cgccagagcattaagagaacctacg

SEQ ID NO: 3131929 - DNA, 25 bp, Homo sapien
agcagatggcgccagagcattaaga

SEQ ID NO: 3131930 - DNA, 25 bp, Homo sapien
cgcgctctatgtccgccagcagatg

SEQ ID NO: 3131931 - DNA, 25 bp, Homo sapien
aaaaggccataggtaccggccactg

SEQ ID NO: 3131932 - DNA, 25 bp, Homo sapien
tgcagtgtagttgttagggaagacc

SEQ ID NO: 3131933 - DNA, 25 bp, Homo sapien
agagtcccagcgttcaggccatact

SEQ ID NO: 3131934 - DNA, 25 bp, Homo sapien
aaaagttcagggaggctttccactg

SEQ ID NO: 3131935 - DNA, 25 bp, Homo sapien
gccatactgatagagaatctcagcc

SEQ ID NO: 3131936 - DNA, 25 bp, Homo sapien
gccttgactgtgcttgttcatttat

SEQ ID NO: 3131937 - DNA, 25 bp, Homo sapien
cactgaaccctgttgtgttggccca

SEQ ID NO: 3131938 - DNA, 25 bp, Homo sapien
caaaattgctttgagccttgactgt

SEQ ID NO: 3131939 - DNA, 25 bp, Homo sapien
ccctgttgtgttggcccaaaattgc

SEQ ID NO: 3131940 - DNA, 25 bp, Homo sapien
gaaacctgggatggcttactgtgag

SEQ ID NO: 3131941 - DNA, 25 bp, Homo sapien
taagccctccatgggagagtgcgag

SEQ ID NO: 3131942 - DNA, 25 bp, Homo sapien
gcccaggttagaacaggtgtccact

SEQ ID NO: 3131943 - DNA, 25 bp, Homo sapien
ttctcaggaccaaacaagagcatgg

SEQ ID NO: 3131944 - DNA, 25 bp, Homo sapien
ccctgataagaatataagagaagct

SEQ ID NO: 3131945 - DNA, 25 bp, Homo sapien
ggctctttatactatctgcacatat

SEQ ID NO: 3131946 - DNA, 25 bp, Homo sapien
aatgctggtaaatacaacaagaaac

SEQ ID NO: 3131947 - DNA, 25 bp, Homo sapien
aaaaaaagaaagtcgagcattgtgg

SEQ ID NO: 3131948 - DNA, 25 bp, Homo sapien
tgctctgtcacaaactacagtttgt

SEQ ID NO: 3131949 - DNA, 25 bp, Homo sapien
gacttacatgagcttgactcctggg

SEQ ID NO: 3131950 - DNA, 25 bp, Homo sapien
caaagtcccaccctcaacacgtggg

SEQ ID NO: 3131951 - DNA, 25 bp, Homo sapien
gggtgagggtcaggtgttattgctc

SEQ ID NO: 3131952 - DNA, 25 bp, Homo sapien
ggtacaggaggacatgcagacttct

SEQ ID NO: 3131953 - DNA, 25 bp, Homo sapien
gctggatgaaacttcgccgagagga

SEQ ID NO: 3131954 - DNA, 25 bp, Homo sapien
tatgtcttcagcacagctatgggct

SEQ ID NO: 3131955 - DNA, 25 bp, Homo sapien
gactcagatgtggaaggattcatcc

SEQ ID NO: 3131956 - DNA, 25 bp, Homo sapien
tgcaaccaggtacaagacaggctca

SEQ ID NO: 3131957 - DNA, 25 bp, Homo sapien
attatatatttagtgcaaccaggta

SEQ ID NO: 3131958 - DNA, 25 bp, Homo sapien
tgtggaatggctcaatatagctaat

SEQ ID NO: 3131959 - DNA, 25 bp, Homo sapien
caggtacaagacaggctcaaaaaca

SEQ ID NO: 3131960 - DNA, 25 bp, Homo sapien
gtgaacctgccgtttcagggacgcc

SEQ ID NO: 3131961 - DNA, 25 bp, Homo sapien
gaccatgtacttggtggcttcagcc

SEQ ID NO: 3131962 - DNA, 25 bp, Homo sapien
tctctgtctggctcacggtgggttg

SEQ ID NO: 3131963 - DNA, 25 bp, Homo sapien
tattttggaggctgcgagtgagaac

SEQ ID NO: 3131964 - DNA, 25 bp, Homo sapien
gagctcatttctgcaagcgcagagt

SEQ ID NO: 3131965 - DNA, 25 bp, Homo sapien
tatgcgaggttgaattcaggagctc

SEQ ID NO: 3131966 - DNA, 25 bp, Homo sapien
attctcagaagagctttatgcgagg

SEQ ID NO: 3131967 - DNA, 25 bp, Homo sapien
tgcaagcgcagagtgcctgcaacca

SEQ ID NO: 3131968 - DNA, 25 bp, Homo sapien
tgtgctaataggagtgtgcgtgacc

SEQ ID NO: 3131969 - DNA, 25 bp, Homo sapien
gacacatatttggtgctactagatg

SEQ ID NO: 3131970 - DNA, 25 bp, Homo sapien
tcaggacctgacacatatttggtgc

SEQ ID NO: 3131971 - DNA, 25 bp, Homo sapien
cagctaccagatttgaactgaatga

SEQ ID NO: 3131972 - DNA, 25 bp, Homo sapien
acttctttgccatttgtttgaattt

SEQ ID NO: 3131973 - DNA, 25 bp, Homo sapien
tgaatttcctcctgtagctcagagt

SEQ ID NO: 3131974 - DNA, 25 bp, Homo sapien
tagagtttctgcgaagagatctgct

SEQ ID NO: 3131975 - DNA, 25 bp, Homo sapien
ttgtagagtttctgcgaagagatct

SEQ ID NO: 3131976 - DNA, 25 bp, Homo sapien
ggcccagataacagaagttgtaggt

SEQ ID NO: 3131977 - DNA, 25 bp, Homo sapien
tgggcccagataacagaagttgtag

SEQ ID NO: 3131978 - DNA, 25 bp, Homo sapien
gctgaatggtcacagagtagagcct

SEQ ID NO: 3131979 - DNA, 25 bp, Homo sapien
gaaggctgaatggtcacagagtaga

SEQ ID NO: 3131980 - DNA, 25 bp, Homo sapien
caatgttagggtgttgggagatact

SEQ ID NO: 3131981 - DNA, 25 bp, Homo sapien
agtcttatgggctccaatgttaggg

SEQ ID NO: 3131982 - DNA, 25 bp, Homo sapien
cctgggagtcttatgggctccaatg

SEQ ID NO: 3131983 - DNA, 25 bp, Homo sapien
tcaagaagatagagtggggtttcct

SEQ ID NO: 3131984 - DNA, 25 bp, Homo sapien
gacagagggagcacaagacgattct

SEQ ID NO: 3131985 - DNA, 25 bp, Homo sapien
aggacagagggagcacaagacgatt

SEQ ID NO: 3131986 - DNA, 25 bp, Homo sapien
tctgcttacaggagtatctgttgtt

SEQ ID NO: 3131987 - DNA, 25 bp, Homo sapien
ggcttttcttgggtatgaatctgct

SEQ ID NO: 3131988 - DNA, 25 bp, Homo sapien
tatatatgcacgaaagtaacctggc

SEQ ID NO: 3131989 - DNA, 25 bp, Homo sapien
caccagagtgttagtatgactattc

SEQ ID NO: 3131990 - DNA, 25 bp, Homo sapien
taaaatagaatacttaccacgatct

SEQ ID NO: 3131991 - DNA, 25 bp, Homo sapien
taacctggcaagaaacaccagagtg

SEQ ID NO: 3131992 - DNA, 25 bp, Homo sapien
gaagtccttcagcagatgtctcctt

SEQ ID NO: 3131993 - DNA, 25 bp, Homo sapien
aaagggtgcttggtaggctctatca

SEQ ID NO: 3131994 - DNA, 25 bp, Homo sapien
tctccttgggtcctatgggtcggga

SEQ ID NO: 3131995 - DNA, 25 bp, Homo sapien
taccaagccagcttagatcaggcat

SEQ ID NO: 3131996 - DNA, 25 bp, Homo sapien
gtacccaggaagaaatgcgcaggcg

SEQ ID NO: 3131997 - DNA, 25 bp, Homo sapien
caggagaccctgcaagagcaaatgc

SEQ ID NO: 3131998 - DNA, 25 bp, Homo sapien
tgcgcaggcgtcttagtgccagaag

SEQ ID NO: 3131999 - DNA, 25 bp, Homo sapien
tggctgggagggaagaaccatctct

SEQ ID NO: 3132000 - DNA, 25 bp, Homo sapien
gaggaaaccttcaacatgaaagatg

SEQ ID NO: 3132001 - DNA, 25 bp, Homo sapien
gcttcccaataaatgtagcggagaa

SEQ ID NO: 3132002 - DNA, 25 bp, Homo sapien
tatactgcttccatcaaataggatc

SEQ ID NO: 3132003 - DNA, 25 bp, Homo sapien
gaatgctagagttatggaaggacct

SEQ ID NO: 3132004 - DNA, 25 bp, Homo sapien
gccaaacaaggaagagtatatgccc

SEQ ID NO: 3132005 - DNA, 25 bp, Homo sapien
tagtcagtcaaaacgtagaaatcag

SEQ ID NO: 3132006 - DNA, 25 bp, Homo sapien
tatatgcccttgtaaatgagtcttg

SEQ ID NO: 3132007 - DNA, 25 bp, Homo sapien
tggtcctggttgactgggcatctaa

SEQ ID NO: 3132008 - DNA, 25 bp, Homo sapien
cagcttttatatagatgtgcctgca

SEQ ID NO: 3132009 - DNA, 25 bp, Homo sapien
aaagcaagaagttagctacccacaa

SEQ ID NO: 3132010 - DNA, 25 bp, Homo sapien
tatccagactttagaacagccattg

SEQ ID NO: 3132011 - DNA, 25 bp, Homo sapien
ccagcttttatatagatgtgcctac

SEQ ID NO: 3132012 - DNA, 25 bp, Homo sapien
taatcttgaagaacggcacagtggt

SEQ ID NO: 3132013 - DNA, 25 bp, Homo sapien
tgttggatccaagcacaccagtcca

SEQ ID NO: 3132014 - DNA, 25 bp, Homo sapien
gaagaggactctatggtgcccaact

SEQ ID NO: 3132015 - DNA, 25 bp, Homo sapien
gcacagtggtatgggccacaagcat

SEQ ID NO: 3132016 - DNA, 25 bp, Homo sapien
taattccaacaagcacctctgaagg

SEQ ID NO: 3132017 - DNA, 25 bp, Homo sapien
ttctgaggtcccagcaagagtccta

SEQ ID NO: 3132018 - DNA, 25 bp, Homo sapien
aatacatggtggtcaggaactaaca

SEQ ID NO: 3132019 - DNA, 25 bp, Homo sapien
taaaatggccccagactttgctccc

SEQ ID NO: 3132020 - DNA, 25 bp, Homo sapien
ggtataaaagttaacagtgcctgag

SEQ ID NO: 3132021 - DNA, 25 bp, Homo sapien
gccccgtgacttactagatgaatgg

SEQ ID NO: 3132022 - DNA, 25 bp, Homo sapien
tgatcacgtaacttaatccacaggt

SEQ ID NO: 3132023 - DNA, 25 bp, Homo sapien
tgagttgaaacactggccccgtgac

SEQ ID NO: 3132024 - DNA, 25 bp, Homo sapien
tagtcttctatgacagccccaggga

SEQ ID NO: 3132025 - DNA, 25 bp, Homo sapien
aacgttcaaataattcccgcgagag

SEQ ID NO: 3132026 - DNA, 25 bp, Homo sapien
gaggcagcgctctccgagtagtctt

SEQ ID NO: 3132027 - DNA, 25 bp, Homo sapien
cagggagtatttaccgctcgaacgt

SEQ ID NO: 3132028 - DNA, 25 bp, Homo sapien
tgcggtaggtgcggctcagcgccac

SEQ ID NO: 3132029 - DNA, 25 bp, Homo sapien
cagcttcgcctggttctggtgcggc

SEQ ID NO: 3132030 - DNA, 25 bp, Homo sapien
ttaatcgacagcagcctcctttccg

SEQ ID NO: 3132031 - DNA, 25 bp, Homo sapien
ggcctccttaatcgacagcagcctc

SEQ ID NO: 3132032 - DNA, 25 bp, Homo sapien
tttgctgcaaattctattaccctct

SEQ ID NO: 3132033 - DNA, 25 bp, Homo sapien
tccacagctggttcacgtttataga

SEQ ID NO: 3132034 - DNA, 25 bp, Homo sapien
tccatatctgattggtgaaatgagg

SEQ ID NO: 3132035 - DNA, 25 bp, Homo sapien
gaaatgaggtaacaaactttgctgc

SEQ ID NO: 3132036 - DNA, 25 bp, Homo sapien
gagcaggcacactctaaatctcact

SEQ ID NO: 3132037 - DNA, 25 bp, Homo sapien
caggcacactctaaatctcactgca

SEQ ID NO: 3132038 - DNA, 25 bp, Homo sapien
gcaggcacactctaaatctcactgc

SEQ ID NO: 3132039 - DNA, 25 bp, Homo sapien
aggcacactctaaatctcactgcat

SEQ ID NO: 3132040 - DNA, 25 bp, Homo sapien
tttgtttaatcggaatcatatatta

SEQ ID NO: 3132041 - DNA, 25 bp, Homo sapien
catatattaattacctatactcttc

SEQ ID NO: 3132042 - DNA, 25 bp, Homo sapien
tatactcttcaaatgtatagaccat

SEQ ID NO: 3132043 - DNA, 25 bp, Homo sapien
ctcttcaaatgtatagaccataata

SEQ ID NO: 3132044 - DNA, 25 bp, Homo sapien
tggcaaagtctttgctgatggtgca

SEQ ID NO: 3132045 - DNA, 25 bp, Homo sapien
catgataacactgcccgtctaactt

SEQ ID NO: 3132046 - DNA, 25 bp, Homo sapien
tgctgatggtgcaatacatgataac

SEQ ID NO: 3132047 - DNA, 25 bp, Homo sapien
tgcaatacatgataacactgcccgt

SEQ ID NO: 3132048 - DNA, 25 bp, Homo sapien
tctgtcattaagaccttgttgaagg

SEQ ID NO: 3132049 - DNA, 25 bp, Homo sapien
ttgaaggagcattactctctgagca

SEQ ID NO: 3132050 - DNA, 25 bp, Homo sapien
ctgatctgtcattaagaccttgttg

SEQ ID NO: 3132051 - DNA, 25 bp, Homo sapien
gaaggagcattactctctgagcaat

SEQ ID NO: 3132052 - DNA, 25 bp, Homo sapien
gcttctgcatagcttgtttcacagc

SEQ ID NO: 3132053 - DNA, 25 bp, Homo sapien
ccgatggagcaactctaagatattt

SEQ ID NO: 3132054 - DNA, 25 bp, Homo sapien
ttttctacatccaaccgatggagca

SEQ ID NO: 3132055 - DNA, 25 bp, Homo sapien
agagaaccgtaaccagccttgaaga

SEQ ID NO: 3132056 - DNA, 25 bp, Homo sapien
gcatatactacaggctctggcaaaa

SEQ ID NO: 3132057 - DNA, 25 bp, Homo sapien
gcaatttcaggagttaatgtttcca

SEQ ID NO: 3132058 - DNA, 25 bp, Homo sapien
ggctctggcaaaatctgctctaaaa

SEQ ID NO: 3132059 - DNA, 25 bp, Homo sapien
ctcaataaatagtctgcatatacta

SEQ ID NO: 3132060 - DNA, 25 bp, Homo sapien
catagccccactttaagtcaagaag

SEQ ID NO: 3132061 - DNA, 25 bp, Homo sapien
ccaattacaggtggcccaacttaca

SEQ ID NO: 3132062 - DNA, 25 bp, Homo sapien
tcatttgacttatgacatagcccca

SEQ ID NO: 3132063 - DNA, 25 bp, Homo sapien
tagcattctcccaattacagatggt

SEQ ID NO: 3132064 - DNA, 25 bp, Homo sapien
ttcattaacaactggaatgctctgg

SEQ ID NO: 3132065 - DNA, 25 bp, Homo sapien
tccttcttcactggtatccaaagac

SEQ ID NO: 3132066 - DNA, 25 bp, Homo sapien
gaatcaattgttgacctatgaattc

SEQ ID NO: 3132067 - DNA, 25 bp, Homo sapien
caatataggaaaaatcacctctgtg

SEQ ID NO: 3132068 - DNA, 25 bp, Homo sapien
catctataatgatgtggagtagtct

SEQ ID NO: 3132069 - DNA, 25 bp, Homo sapien
tatcatctataatgatgtggagtag

SEQ ID NO: 3132070 - DNA, 25 bp, Homo sapien
tgtgggtaaaataagaatctcctgt

SEQ ID NO: 3132071 - DNA, 25 bp, Homo sapien
cagggatattgggattgtgggtaaa

SEQ ID NO: 3132072 - DNA, 25 bp, Homo sapien
caatgggcgcccgaatctctgagat

SEQ ID NO: 3132073 - DNA, 25 bp, Homo sapien
acatcagctggatcgttattaacac

SEQ ID NO: 3132074 - DNA, 25 bp, Homo sapien
ccaacagtaacaatgggcgcccgaa

SEQ ID NO: 3132075 - DNA, 25 bp, Homo sapien
cttacatcagctggatcgttattaa

SEQ ID NO: 3132076 - DNA, 25 bp, Homo sapien
attctgatgcccgattaaaatcctg

SEQ ID NO: 3132077 - DNA, 25 bp, Homo sapien
ctgatgcccgattaaaatcctgtaa

SEQ ID NO: 3132078 - DNA, 25 bp, Homo sapien
cttcttttaattctgatgcccgatt

SEQ ID NO: 3132079 - DNA, 25 bp, Homo sapien
tcttttaattctgatgcccgattaa

SEQ ID NO: 3132080 - DNA, 25 bp, Homo sapien
tgaaatggacatctgcttcaacagt

SEQ ID NO: 3132081 - DNA, 25 bp, Homo sapien
tggacatctgcttcaacagttcata

SEQ ID NO: 3132082 - DNA, 25 bp, Homo sapien
aatggacatctgcttcaacagttca

SEQ ID NO: 3132083 - DNA, 25 bp, Homo sapien
gaaatggacatctgcttcaacagtt

SEQ ID NO: 3132084 - DNA, 25 bp, Homo sapien
gcaatagtaatacgaagtgtttcct

SEQ ID NO: 3132085 - DNA, 25 bp, Homo sapien
ctgcaatagtaatacgaagtgtttc

SEQ ID NO: 3132086 - DNA, 25 bp, Homo sapien
agtaatacgaagtgtttccttgcaa

SEQ ID NO: 3132087 - DNA, 25 bp, Homo sapien
gccaggtttcttacaacaggatgaa

SEQ ID NO: 3132088 - DNA, 25 bp, Homo sapien
ttaaatggttcaatcccgaacgtca

SEQ ID NO: 3132089 - DNA, 25 bp, Homo sapien
tcaatcccgaacgtcatcagttggt

SEQ ID NO: 3132090 - DNA, 25 bp, Homo sapien
catcagttggtcaaagattgccttt

SEQ ID NO: 3132091 - DNA, 25 bp, Homo sapien
cttcacaatgaagtgttttgatttt

SEQ ID NO: 3132092 - DNA, 25 bp, Homo sapien
tgctcatcatcactgtttatttctg

SEQ ID NO: 3132093 - DNA, 25 bp, Homo sapien
gctcatcatcactgtttatttctgt

SEQ ID NO: 3132094 - DNA, 25 bp, Homo sapien
tcaacttcttttgattcttgctcat

SEQ ID NO: 3132095 - DNA, 25 bp, Homo sapien
cttcttttgattcttgctcatcatc

SEQ ID NO: 3132096 - DNA, 25 bp, Homo sapien
tcactatctaagaaatcagaaagga

SEQ ID NO: 3132097 - DNA, 25 bp, Homo sapien
ctcactatctaagaaatcagaaagg

SEQ ID NO: 3132098 - DNA, 25 bp, Homo sapien
ggaagaacacgcctaggcaatgtcg

SEQ ID NO: 3132099 - DNA, 25 bp, Homo sapien
gttgaacatcctcttcagtcacagg

SEQ ID NO: 3132100 - DNA, 25 bp, Homo sapien
ccagagaacatcagcttggctagtc

SEQ ID NO: 3132101 - DNA, 25 bp, Homo sapien
cagtcacaggattgtaccataacaa

SEQ ID NO: 3132102 - DNA, 25 bp, Homo sapien
caatttcagctaaaggagaagatgc

SEQ ID NO: 3132103 - DNA, 25 bp, Homo sapien
tttcagctaaaggagaagatgcagg

SEQ ID NO: 3132104 - DNA, 25 bp, Homo sapien
tatcaatttcagctaaaggagaaga

SEQ ID NO: 3132105 - DNA, 25 bp, Homo sapien
tgatatcaatttcagctaaaggaga

SEQ ID NO: 3132106 - DNA, 25 bp, Homo sapien
gactcgaatttctggcgagcacgga

SEQ ID NO: 3132107 - DNA, 25 bp, Homo sapien
caaggcttttgtatagactcgaatt

SEQ ID NO: 3132108 - DNA, 25 bp, Homo sapien
cggacttgttaagatctcattgcaa

SEQ ID NO: 3132109 - DNA, 25 bp, Homo sapien
gaatctcattcaatagaaccagaag

SEQ ID NO: 3132110 - DNA, 25 bp, Homo sapien
tagtaccaatacatatcaagttgtt

SEQ ID NO: 3132111 - DNA, 25 bp, Homo sapien
tcaaataagtcacaatatgctaaca

SEQ ID NO: 3132112 - DNA, 25 bp, Homo sapien
cattttgtaaacaccgcattcccta

SEQ ID NO: 3132113 - DNA, 25 bp, Homo sapien
atgtataatctaatacaaccatgta

SEQ ID NO: 3132114 - DNA, 25 bp, Homo sapien
gctgcttcagcttggtcaccaaatt

SEQ ID NO: 3132115 - DNA, 25 bp, Homo sapien
aaagctctcagacatgtcctatctt

SEQ ID NO: 3132116 - DNA, 25 bp, Homo sapien
caaggtggcatcctgtgctgcttca

SEQ ID NO: 3132117 - DNA, 25 bp, Homo sapien
agtagttgtagtcaaggtggcatcc

SEQ ID NO: 3132118 - DNA, 25 bp, Homo sapien
taaatattctgttcagtatgtgatt

SEQ ID NO: 3132119 - DNA, 25 bp, Homo sapien
aaatattctgttcagtatgtgatta

SEQ ID NO: 3132120 - DNA, 25 bp, Homo sapien
aatattctgttcagtatgtgattac

SEQ ID NO: 3132121 - DNA, 25 bp, Homo sapien
tataaatattctgttcagtatgtga

SEQ ID NO: 3132122 - DNA, 25 bp, Homo sapien
caaccaaacatgttagagtagaaaa

SEQ ID NO: 3132123 - DNA, 25 bp, Homo sapien
aaaaagatggtcatatgttgagaaa

SEQ ID NO: 3132124 - DNA, 25 bp, Homo sapien
tgatgtccaaccaaacatgttagag

SEQ ID NO: 3132125 - DNA, 25 bp, Homo sapien
tgtccaaccaaacatgttagagtag

SEQ ID NO: 3132126 - DNA, 25 bp, Homo sapien
taaagggaataatacaacaatataa

SEQ ID NO: 3132127 - DNA, 25 bp, Homo sapien
ttaaagggaataatacaacaatata

SEQ ID NO: 3132128 - DNA, 25 bp, Homo sapien
ctattaaagggaataatacaacaat

SEQ ID NO: 3132129 - DNA, 25 bp, Homo sapien
atacaacaatataaataagataacc

SEQ ID NO: 3132130 - DNA, 25 bp, Homo sapien
ttacacccctgagtggagtcatata

SEQ ID NO: 3132131 - DNA, 25 bp, Homo sapien
gagtggagtcatatatacttcttta

SEQ ID NO: 3132132 - DNA, 25 bp, Homo sapien
cccctgagtggagtcatatatactt

SEQ ID NO: 3132133 - DNA, 25 bp, Homo sapien
tgttagtctttagctgagtagactt

SEQ ID NO: 3132134 - DNA, 25 bp, Homo sapien
caagaaaacatccaacaatatggga

SEQ ID NO: 3132135 - DNA, 25 bp, Homo sapien
caaaacaatattatgaccagactcc

SEQ ID NO: 3132136 - DNA, 25 bp, Homo sapien
aaattaaatctgcatcgaaaagggc

SEQ ID NO: 3132137 - DNA, 25 bp, Homo sapien
atcaaaatcatggttggctcatggg

SEQ ID NO: 3132138 - DNA, 25 bp, Homo sapien
tgttctagccatcttggtaccagtt

SEQ ID NO: 3132139 - DNA, 25 bp, Homo sapien
catgtatctcctacttgttctagcc

SEQ ID NO: 3132140 - DNA, 25 bp, Homo sapien
ctagtttctaggctaactaaatcct

SEQ ID NO: 3132141 - DNA, 25 bp, Homo sapien
tatcaggatttattatcagttgctt

SEQ ID NO: 3132142 - DNA, 25 bp, Homo sapien
gacacctcctgttcgtcctagctga

SEQ ID NO: 3132143 - DNA, 25 bp, Homo sapien
agcagtctgacacctcctgttcgtc

SEQ ID NO: 3132144 - DNA, 25 bp, Homo sapien
tcctgttcgtcctagctgaaactgt

SEQ ID NO: 3132145 - DNA, 25 bp, Homo sapien
tgttcgtcctagctgaaactgtcac

SEQ ID NO: 3132146 - DNA, 25 bp, Homo sapien
tacacgaatttagatacaagcttta

SEQ ID NO: 3132147 - DNA, 25 bp, Homo sapien
gatgttgaaaatacacgaatttaga

SEQ ID NO: 3132148 - DNA, 25 bp, Homo sapien
ctatcagtgtttaattgatagcctg

SEQ ID NO: 3132149 - DNA, 25 bp, Homo sapien
ttccattgacttagcttaaaactaa

SEQ ID NO: 3132150 - DNA, 25 bp, Homo sapien
tcatttctgattctggttctggaac

SEQ ID NO: 3132151 - DNA, 25 bp, Homo sapien
tttctgattctggttctggaacttc

SEQ ID NO: 3132152 - DNA, 25 bp, Homo sapien
catttctgattctggttctggaact

SEQ ID NO: 3132153 - DNA, 25 bp, Homo sapien
tctgattctggttctggaacttcat

SEQ ID NO: 3132154 - DNA, 25 bp, Homo sapien
tctagtgctgcggttttggctcgtc

SEQ ID NO: 3132155 - DNA, 25 bp, Homo sapien
acttttttctagtgctgcggttttg

SEQ ID NO: 3132156 - DNA, 25 bp, Homo sapien
tgctgcggttttggctcgtcttggt

SEQ ID NO: 3132157 - DNA, 25 bp, Homo sapien
gttttggctcgtcttggtagtctca

SEQ ID NO: 3132158 - DNA, 25 bp, Homo sapien
gacataatcttaaaggattccacct

SEQ ID NO: 3132159 - DNA, 25 bp, Homo sapien
ctggacataatcttaaaggattcca

SEQ ID NO: 3132160 - DNA, 25 bp, Homo sapien
ataatcttaaaggattccacctcca

SEQ ID NO: 3132161 - DNA, 25 bp, Homo sapien
ggacataatcttaaaggattccacc

SEQ ID NO: 3132162 - DNA, 25 bp, Homo sapien
cactggtgattgataagctcctttc

SEQ ID NO: 3132163 - DNA, 25 bp, Homo sapien
tagcgagcagcttcatggttaataa

SEQ ID NO: 3132164 - DNA, 25 bp, Homo sapien
gttatactggtcttcctcactggtg

SEQ ID NO: 3132165 - DNA, 25 bp, Homo sapien
tacaggccaaagtaacgtggaagcg

SEQ ID NO: 3132166 - DNA, 25 bp, Homo sapien
gcaagttgccctttgagccccatta

SEQ ID NO: 3132167 - DNA, 25 bp, Homo sapien
gatgtgccttaatcgtcccattgaa

SEQ ID NO: 3132168 - DNA, 25 bp, Homo sapien
caactacctcgaagcaaattggtga

SEQ ID NO: 3132169 - DNA, 25 bp, Homo sapien
tgtgatgataacctgacccatgagc

SEQ ID NO: 3132170 - DNA, 25 bp, Homo sapien
tatagcttgccttagagtttctcaa

SEQ ID NO: 3132171 - DNA, 25 bp, Homo sapien
acaaaaatgaggtccctgaggacat

SEQ ID NO: 3132172 - DNA, 25 bp, Homo sapien
tacaaatatgaagactagcagtcct

SEQ ID NO: 3132173 - DNA, 25 bp, Homo sapien
tgatgcatactaagctacctggtag

SEQ ID NO: 3132174 - DNA, 25 bp, Homo sapien
agatgagttcagatttgacagtgtc

SEQ ID NO: 3132175 - DNA, 25 bp, Homo sapien
cagtgtcaagtacattaactattcc

SEQ ID NO: 3132176 - DNA, 25 bp, Homo sapien
taaagaatactctgttagctctcaa

SEQ ID NO: 3132177 - DNA, 25 bp, Homo sapien
agtccaaatcctgtaccagagccca

SEQ ID NO: 3132178 - DNA, 25 bp, Homo sapien
gatgacctgaccaaaaactttacag

SEQ ID NO: 3132179 - DNA, 25 bp, Homo sapien
gattatacaaactaggaaaggcagg

SEQ ID NO: 3132180 - DNA, 25 bp, Homo sapien
ccccagtgattctattaagatgacc

SEQ ID NO: 3132181 - DNA, 25 bp, Homo sapien
cagcagacttaatgaaggtgaaagc

SEQ ID NO: 3132182 - DNA, 25 bp, Homo sapien
gtctggccattcagactttgcatgg

SEQ ID NO: 3132183 - DNA, 25 bp, Homo sapien
ggacggagtccaggaaacagtagct

SEQ ID NO: 3132184 - DNA, 25 bp, Homo sapien
tagctgggcgcttggacggagtcca

SEQ ID NO: 3132185 - DNA, 25 bp, Homo sapien
tggccattcagactttgcatggtct

SEQ ID NO: 3132186 - DNA, 25 bp, Homo sapien
tcttctccaggtgcccccagatttt

SEQ ID NO: 3132187 - DNA, 25 bp, Homo sapien
ccttcttctccaggtgcccccagat

SEQ ID NO: 3132188 - DNA, 25 bp, Homo sapien
ttcttctccaggtgcccccagattt

SEQ ID NO: 3132189 - DNA, 25 bp, Homo sapien
tcccttcttctccaggtgcccccag

SEQ ID NO: 3132190 - DNA, 25 bp, Homo sapien
gcgaaaatttgagccctcacgtcct

SEQ ID NO: 3132191 - DNA, 25 bp, Homo sapien
aaaatttgagccctcacgtccttgg

SEQ ID NO: 3132192 - DNA, 25 bp, Homo sapien
tatttgcgaaaatttgagccctcac

SEQ ID NO: 3132193 - DNA, 25 bp, Homo sapien
tttgagccctcacgtccttggtggt

SEQ ID NO: 3132194 - DNA, 25 bp, Homo sapien
ccttgcaggagcccataatgttgct

SEQ ID NO: 3132195 - DNA, 25 bp, Homo sapien
gaccttgcaggagcccataatgttg

SEQ ID NO: 3132196 - DNA, 25 bp, Homo sapien
tgcaggagcccataatgttgctctc

SEQ ID NO: 3132197 - DNA, 25 bp, Homo sapien
cttgcaggagcccataatgttgctc

SEQ ID NO: 3132198 - DNA, 25 bp, Homo sapien
ctgctgagaccagtaacctgtctag

SEQ ID NO: 3132199 - DNA, 25 bp, Homo sapien
gtctagttcctgtcggttcttctga

SEQ ID NO: 3132200 - DNA, 25 bp, Homo sapien
tgagaccagtaacctgtctagttcc

SEQ ID NO: 3132201 - DNA, 25 bp, Homo sapien
cagtaacctgtctagttcctgtcgg

SEQ ID NO: 3132202 - DNA, 25 bp, Homo sapien
agcagctccaattccggcagactgt

SEQ ID NO: 3132203 - DNA, 25 bp, Homo sapien
tccaattccggcagactgtgtggtg

SEQ ID NO: 3132204 - DNA, 25 bp, Homo sapien
ggactgtaagtctcagctgcacgag

SEQ ID NO: 3132205 - DNA, 25 bp, Homo sapien
gctccaattccggcagactgtgtgg

SEQ ID NO: 3132206 - DNA, 25 bp, Homo sapien
tcattaaccagttgggttatgactg

SEQ ID NO: 3132207 - DNA, 25 bp, Homo sapien
aacaggtagtgttaatcttttagag

SEQ ID NO: 3132208 - DNA, 25 bp, Homo sapien
tgcttttctctaaatgcagacatcc

SEQ ID NO: 3132209 - DNA, 25 bp, Homo sapien
gcagacatccttgattgactatgta

SEQ ID NO: 3132210 - DNA, 25 bp, Homo sapien
tacctgttcacttgtaataaaaaga

SEQ ID NO: 3132211 - DNA, 25 bp, Homo sapien
tgtacctgttcacttgtaataaaaa

SEQ ID NO: 3132212 - DNA, 25 bp, Homo sapien
ctgtacctgttcacttgtaataaaa

SEQ ID NO: 3132213 - DNA, 25 bp, Homo sapien
tattcttgctgatctcagatgtttt

SEQ ID NO: 3132214 - DNA, 25 bp, Homo sapien
ctttattcttgctgatctcagatgt

SEQ ID NO: 3132215 - DNA, 25 bp, Homo sapien
tttattcttgctgatctcagatgtt

SEQ ID NO: 3132216 - DNA, 25 bp, Homo sapien
attcttgctgatctcagatgtttta

SEQ ID NO: 3132217 - DNA, 25 bp, Homo sapien
ttgcggacgccccgacgactctggt

SEQ ID NO: 3132218 - DNA, 25 bp, Homo sapien
tgacggttgggatttgaagttcttc

SEQ ID NO: 3132219 - DNA, 25 bp, Homo sapien
ccctttaagaaggagccgcttgagc

SEQ ID NO: 3132220 - DNA, 25 bp, Homo sapien
gacgactctggtcctctttcactgt

SEQ ID NO: 3132221 - DNA, 25 bp, Homo sapien
gccttgaataccgaagtcactccgg

SEQ ID NO: 3132222 - DNA, 25 bp, Homo sapien
tctctggacgtttggcagttattcc

SEQ ID NO: 3132223 - DNA, 25 bp, Homo sapien
tattctggctttccgagatctcttc

SEQ ID NO: 3132224 - DNA, 25 bp, Homo sapien
tgtagccgaatgaccggcttgccct

SEQ ID NO: 3132225 - DNA, 25 bp, Homo sapien
cacgcactgtactagggtctagcga

SEQ ID NO: 3132226 - DNA, 25 bp, Homo sapien
gatgtcacggtacagagatctcagt

SEQ ID NO: 3132227 - DNA, 25 bp, Homo sapien
tagcttcggcttgataaactgcact

SEQ ID NO: 3132228 - DNA, 25 bp, Homo sapien
ggaaacaaacgcacaatcgctctgg

SEQ ID NO: 3132229 - DNA, 25 bp, Homo sapien
aagtttattggctttagacaagctc

SEQ ID NO: 3132230 - DNA, 25 bp, Homo sapien
caagtttattggctttagacaagct

SEQ ID NO: 3132231 - DNA, 25 bp, Homo sapien
tagccagtccgtattggaataggag

SEQ ID NO: 3132232 - DNA, 25 bp, Homo sapien
ctaaaaagtagccagtccgtattgg

SEQ ID NO: 3132233 - DNA, 25 bp, Homo sapien
agtagccagtccgtattggaatagg

SEQ ID NO: 3132234 - DNA, 25 bp, Homo sapien
aaaagtagccagtccgtattggaat

SEQ ID NO: 3132235 - DNA, 25 bp, Homo sapien
tagttgccaggactccaagattcac

SEQ ID NO: 3132236 - DNA, 25 bp, Homo sapien
ctctgctaccacagattgactttct

SEQ ID NO: 3132237 - DNA, 25 bp, Homo sapien
ctgctaccacagattgactttctcc

SEQ ID NO: 3132238 - DNA, 25 bp, Homo sapien
tagaaaacatagttgccaggactcc

SEQ ID NO: 3132239 - DNA, 25 bp, Homo sapien
ttctcctcattttgtgtgatttggg

SEQ ID NO: 3132240 - DNA, 25 bp, Homo sapien
cattttgtgtgatttgggttaggaa

SEQ ID NO: 3132241 - DNA, 25 bp, Homo sapien
tctcctcattttgtgtgatttgggt

SEQ ID NO: 3132242 - DNA, 25 bp, Homo sapien
cctcattttgtgtgatttgggttag

SEQ ID NO: 3132243 - DNA, 25 bp, Homo sapien
cttttcaggtccgtagaagccagac

SEQ ID NO: 3132244 - DNA, 25 bp, Homo sapien
tgtaaatatcaatgcagcaagtccc

SEQ ID NO: 3132245 - DNA, 25 bp, Homo sapien
aagccagaccactctctcgaggtag

SEQ ID NO: 3132246 - DNA, 25 bp, Homo sapien
gaagtagccacataaccctgatatg

SEQ ID NO: 3132247 - DNA, 25 bp, Homo sapien
gccagtataatgcagcacatgccat

SEQ ID NO: 3132248 - DNA, 25 bp, Homo sapien
gaacctctttcacagaattacctaa

SEQ ID NO: 3132249 - DNA, 25 bp, Homo sapien
gcaagtctgaaagcttgtatgtcat

SEQ ID NO: 3132250 - DNA, 25 bp, Homo sapien
cagaattacctaagccaaactggcg

SEQ ID NO: 3132251 - DNA, 25 bp, Homo sapien
tctgccattctaagcctggctgctt

SEQ ID NO: 3132252 - DNA, 25 bp, Homo sapien
ccataaaactgcttgaggagttgtc

SEQ ID NO: 3132253 - DNA, 25 bp, Homo sapien
gctttggatgatgatcttgacgaca

SEQ ID NO: 3132254 - DNA, 25 bp, Homo sapien
tgacgacattgtcctgaagcgcagg

SEQ ID NO: 3132255 - DNA, 25 bp, Homo sapien
aaacactactttgaggacagaggag

SEQ ID NO: 3132256 - DNA, 25 bp, Homo sapien
ttggagacagcaggaatgagaaaaa

SEQ ID NO: 3132257 - DNA, 25 bp, Homo sapien
cggttaaagggatgtaatacatctc

SEQ ID NO: 3132258 - DNA, 25 bp, Homo sapien
tctccatgggatatcctaaatcatg

SEQ ID NO: 3132259 - DNA, 25 bp, Homo sapien
tctgctggatcgtgatgtggtccca

SEQ ID NO: 3132260 - DNA, 25 bp, Homo sapien
ctgctggatcgtgatgtggtcccag

SEQ ID NO: 3132261 - DNA, 25 bp, Homo sapien
tctctgctggatcgtgatgtggtcc

SEQ ID NO: 3132262 - DNA, 25 bp, Homo sapien
cttctctgctggatcgtgatgtggt

SEQ ID NO: 3132263 - DNA, 25 bp, Homo sapien
tttcctcatctagatgggcatcaac

SEQ ID NO: 3132264 - DNA, 25 bp, Homo sapien
catgcctgttcaagtatgtttgagg

SEQ ID NO: 3132265 - DNA, 25 bp, Homo sapien
cagcttgcccagtagtttctggttc

SEQ ID NO: 3132266 - DNA, 25 bp, Homo sapien
caaacaagggcacttaggggacaat

SEQ ID NO: 3132267 - DNA, 25 bp, Homo sapien
gaatgattgtcccatatttgtccat

SEQ ID NO: 3132268 - DNA, 25 bp, Homo sapien
cacatctatgaatgattgtcccata

SEQ ID NO: 3132269 - DNA, 25 bp, Homo sapien
tgattgtcccacatctatgaatgat

SEQ ID NO: 3132270 - DNA, 25 bp, Homo sapien
tatgaatgattgtcccacatctatg

SEQ ID NO: 3132271 - DNA, 25 bp, Homo sapien
catgcctgccacagatagggtccca

SEQ ID NO: 3132272 - DNA, 25 bp, Homo sapien
atgcctgccacagatagggtcccag

SEQ ID NO: 3132273 - DNA, 25 bp, Homo sapien
gcctgccacagatagggtcccagcc

SEQ ID NO: 3132274 - DNA, 25 bp, Homo sapien
ctgccacagatagggtcccagccat

SEQ ID NO: 3132275 - DNA, 25 bp, Homo sapien
ccctaaattgaatgactgatttgtc

SEQ ID NO: 3132276 - DNA, 25 bp, Homo sapien
tgtctctcatgtcagttacaccatc

SEQ ID NO: 3132277 - DNA, 25 bp, Homo sapien
ttgcaactttcagtatgataccaag

SEQ ID NO: 3132278 - DNA, 25 bp, Homo sapien
ggaactcactggcatccctaaattg

SEQ ID NO: 3132279 - DNA, 25 bp, Homo sapien
agttggtctgcggttgttcgcaaac

SEQ ID NO: 3132280 - DNA, 25 bp, Homo sapien
acactttaattacgggctgctggca

SEQ ID NO: 3132281 - DNA, 25 bp, Homo sapien
gggacacaaagtaattaccatcatc

SEQ ID NO: 3132282 - DNA, 25 bp, Homo sapien
gcggttgttcgcaaacaggcaattc

SEQ ID NO: 3132283 - DNA, 25 bp, Homo sapien
gcatccacctaagtctaatcatgaa

SEQ ID NO: 3132284 - DNA, 25 bp, Homo sapien
ctataaacccagttcactcatttgg

SEQ ID NO: 3132285 - DNA, 25 bp, Homo sapien
caaagttgccattacaagtttcaca

SEQ ID NO: 3132286 - DNA, 25 bp, Homo sapien
ggcacttactataatgaagatgagt

SEQ ID NO: 3132287 - DNA, 25 bp, Homo sapien
ccatggatacttttctcgggagggc

SEQ ID NO: 3132288 - DNA, 25 bp, Homo sapien
cttcaggatacccatggatactttt

SEQ ID NO: 3132289 - DNA, 25 bp, Homo sapien
tcataaccccacttgcgaaatacat

SEQ ID NO: 3132290 - DNA, 25 bp, Homo sapien
aaccccacttgcgaaatacatttat

SEQ ID NO: 3132291 - DNA, 25 bp, Homo sapien
ttgccatcataattagtacagccct

SEQ ID NO: 3132292 - DNA, 25 bp, Homo sapien
ccatgtcataactcatgaagggcag

SEQ ID NO: 3132293 - DNA, 25 bp, Homo sapien
ctctgccactaactgaatggatgac

SEQ ID NO: 3132294 - DNA, 25 bp, Homo sapien
catagaaagtgcaaaatagagtagc

SEQ ID NO: 3132295 - DNA, 25 bp, Homo sapien
ttgactcttaaggttacgtccttca

SEQ ID NO: 3132296 - DNA, 25 bp, Homo sapien
aggttacgtccttcagctaccttca

SEQ ID NO: 3132297 - DNA, 25 bp, Homo sapien
gttacgtccttcagctaccttcatt

SEQ ID NO: 3132298 - DNA, 25 bp, Homo sapien
tcttaaggttacgtccttcagctac

SEQ ID NO: 3132299 - DNA, 25 bp, Homo sapien
tcctttccattgaccgaatacacat

SEQ ID NO: 3132300 - DNA, 25 bp, Homo sapien
cattgaccgaatacacatcccacat

SEQ ID NO: 3132301 - DNA, 25 bp, Homo sapien
ttccattgaccgaatacacatccca

SEQ ID NO: 3132302 - DNA, 25 bp, Homo sapien
cagcctcctttccattgaccgaata

SEQ ID NO: 3132303 - DNA, 25 bp, Homo sapien
ctctgtatacccaagggtgacagct

SEQ ID NO: 3132304 - DNA, 25 bp, Homo sapien
cctctgtatacccaagggtgacagc

SEQ ID NO: 3132305 - DNA, 25 bp, Homo sapien
cttcatcagacaccactaagtggtt

SEQ ID NO: 3132306 - DNA, 25 bp, Homo sapien
tcaaggaaagtcaacatattctatt

SEQ ID NO: 3132307 - DNA, 25 bp, Homo sapien
tttccatccatcccctattccttca

SEQ ID NO: 3132308 - DNA, 25 bp, Homo sapien
tcatcagacaccactaagtggttac

SEQ ID NO: 3132309 - DNA, 25 bp, Homo sapien
gctgtcttatatcgaagatgtggcc

SEQ ID NO: 3132310 - DNA, 25 bp, Homo sapien
cagctgtcttatatcgaagatgtgg

SEQ ID NO: 3132311 - DNA, 25 bp, Homo sapien
tgtcttatatcgaagatgtggccca

SEQ ID NO: 3132312 - DNA, 25 bp, Homo sapien
gtcttatatcgaagatgtggcccat

SEQ ID NO: 3132313 - DNA, 25 bp, Homo sapien
tcatggatgagtgcctcaacatcaa

SEQ ID NO: 3132314 - DNA, 25 bp, Homo sapien
gaacttgaatctagcatcatggatg

SEQ ID NO: 3132315 - DNA, 25 bp, Homo sapien
tctttatattgaagcttcaggtgcc

SEQ ID NO: 3132316 - DNA, 25 bp, Homo sapien
ggtgccagttcagaaaactccaggt

SEQ ID NO: 3132317 - DNA, 25 bp, Homo sapien
ccattccacaatgcgcttccaagga

SEQ ID NO: 3132318 - DNA, 25 bp, Homo sapien
ttccacaatgcgcttccaaggaggt

SEQ ID NO: 3132319 - DNA, 25 bp, Homo sapien
ttccaaggaggttttggcatctcca

SEQ ID NO: 3132320 - DNA, 25 bp, Homo sapien
ctgacccattccacaatgcgcttcc

SEQ ID NO: 3132321 - DNA, 25 bp, Homo sapien
aaagcagcaatgatggagcccctca

SEQ ID NO: 3132322 - DNA, 25 bp, Homo sapien
tgattggctacctcaaccagcatgg

SEQ ID NO: 3132323 - DNA, 25 bp, Homo sapien
aacatgggagtgagtctaggctacc

SEQ ID NO: 3132324 - DNA, 25 bp, Homo sapien
ggtgtttaaaactctgcccagccaa

SEQ ID NO: 3132325 - DNA, 25 bp, Homo sapien
tgctctaggctcatggtcataggtt

SEQ ID NO: 3132326 - DNA, 25 bp, Homo sapien
tgtccctgattttccattcgtgatc

SEQ ID NO: 3132327 - DNA, 25 bp, Homo sapien
tgtttccactagcaacttgtccctg

SEQ ID NO: 3132328 - DNA, 25 bp, Homo sapien
gataaatgatccacatgctctaggc

SEQ ID NO: 3132329 - DNA, 25 bp, Homo sapien
ccttaaggctgcagcaaggagcact

SEQ ID NO: 3132330 - DNA, 25 bp, Homo sapien
aaactatcacataaccgcactgccg

SEQ ID NO: 3132331 - DNA, 25 bp, Homo sapien
taacatagattccatagcaaggatg

SEQ ID NO: 3132332 - DNA, 25 bp, Homo sapien
ccagctgagattagaagggaaatca

SEQ ID NO: 3132333 - DNA, 25 bp, Homo sapien
agctgcagtcgctcatgaaatccat

SEQ ID NO: 3132334 - DNA, 25 bp, Homo sapien
ggtattttcatcagccactatatgt

SEQ ID NO: 3132335 - DNA, 25 bp, Homo sapien
cattatggaccaggcagagacaaca

SEQ ID NO: 3132336 - DNA, 25 bp, Homo sapien
cactgccctgcctctaggtggttga

SEQ ID NO: 3132337 - DNA, 25 bp, Homo sapien
gctagagtaggtcctttcagtggat

SEQ ID NO: 3132338 - DNA, 25 bp, Homo sapien
tccttcagtgctgtggctagagtag

SEQ ID NO: 3132339 - DNA, 25 bp, Homo sapien
cctggttgttatgaatacatattgt

SEQ ID NO: 3132340 - DNA, 25 bp, Homo sapien
tgcaatgttgaaggtaccagagtca

SEQ ID NO: 3132341 - DNA, 25 bp, Homo sapien
caatgttgaaggtaccagagtcagt

SEQ ID NO: 3132342 - DNA, 25 bp, Homo sapien
tgttgaaggtaccagagtcagttgg

SEQ ID NO: 3132343 - DNA, 25 bp, Homo sapien
ctgcaatgttgaaggtaccagagtc

SEQ ID NO: 3132344 - DNA, 25 bp, Homo sapien
aacagcagggtttttctgattagaa

SEQ ID NO: 3132345 - DNA, 25 bp, Homo sapien
agggcacagtctgacttgtgcgctc

SEQ ID NO: 3132346 - DNA, 25 bp, Homo sapien
ggtctgactgcctttggataccaag

SEQ ID NO: 3132347 - DNA, 25 bp, Homo sapien
gcgctcagggatgtagccaaatgtg

SEQ ID NO: 3132348 - DNA, 25 bp, Homo sapien
agaccaaaggtcaaagcaaggccca

SEQ ID NO: 3132349 - DNA, 25 bp, Homo sapien
tcagatgtggttatctctgtgtgga

SEQ ID NO: 3132350 - DNA, 25 bp, Homo sapien
aggtgctcatccatacgtttcttta

SEQ ID NO: 3132351 - DNA, 25 bp, Homo sapien
ggtgctcatccatacgtttctttat

SEQ ID NO: 3132352 - DNA, 25 bp, Homo sapien
ctgtgtggacctagctcagcacaga

SEQ ID NO: 3132353 - DNA, 25 bp, Homo sapien
tagctacgattacagatgtgccacc

SEQ ID NO: 3132354 - DNA, 25 bp, Homo sapien
cagatgtgccacctcatctggctga

SEQ ID NO: 3132355 - DNA, 25 bp, Homo sapien
ttacagatgtgccacctcatctggc

SEQ ID NO: 3132356 - DNA, 25 bp, Homo sapien
gatgtgccacctcatctggctgatt

SEQ ID NO: 3132357 - DNA, 25 bp, Homo sapien
gttgtgctcccctttatcctcaggc

SEQ ID NO: 3132358 - DNA, 25 bp, Homo sapien
caaaacacatgttgtgctccccttt

SEQ ID NO: 3132359 - DNA, 25 bp, Homo sapien
acatgttgtgctcccctttatcctc

SEQ ID NO: 3132360 - DNA, 25 bp, Homo sapien
acacatgttgtgctcccctttatcc

SEQ ID NO: 3132361 - DNA, 25 bp, Homo sapien
tcacttcactgatcaaaagctgctt

SEQ ID NO: 3132362 - DNA, 25 bp, Homo sapien
catggatcttgacattacaagcccc

SEQ ID NO: 3132363 - DNA, 25 bp, Homo sapien
taaaccttcaatgaggaaagactga

SEQ ID NO: 3132364 - DNA, 25 bp, Homo sapien
gaacttgtgtgtagcaatgcccttg

SEQ ID NO: 3132365 - DNA, 25 bp, Homo sapien
catgcggcgaatgggatctattttc

SEQ ID NO: 3132366 - DNA, 25 bp, Homo sapien
gcggcgaatgggatctattttcaat

SEQ ID NO: 3132367 - DNA, 25 bp, Homo sapien
cctggggggccatgcggcgaatggg

SEQ ID NO: 3132368 - DNA, 25 bp, Homo sapien
ggccatgcggcgaatgggatctatt

SEQ ID NO: 3132369 - DNA, 25 bp, Homo sapien
gactgtcttcagagctccttctcac

SEQ ID NO: 3132370 - DNA, 25 bp, Homo sapien
taaggattccggtgactgtcttcag

SEQ ID NO: 3132371 - DNA, 25 bp, Homo sapien
ctagttggtaaaagaaactcttcat

SEQ ID NO: 3132372 - DNA, 25 bp, Homo sapien
ccttctctgcatgataaggattccg

SEQ ID NO: 3132373 - DNA, 25 bp, Homo sapien
ttcctagaacaaactcttgagagtc

SEQ ID NO: 3132374 - DNA, 25 bp, Homo sapien
gatgaaacgcatatctgaaatgtct

SEQ ID NO: 3132375 - DNA, 25 bp, Homo sapien
tttgctgcagagctgaataacttcc

SEQ ID NO: 3132376 - DNA, 25 bp, Homo sapien
gctgaataacttcctagaacaaact

SEQ ID NO: 3132377 - DNA, 25 bp, Homo sapien
cattacgttcttcatgcatgaaatc

SEQ ID NO: 3132378 - DNA, 25 bp, Homo sapien
ctcattacgttcttcatgcatgaaa

SEQ ID NO: 3132379 - DNA, 25 bp, Homo sapien
tctcattacgttcttcatgcatgaa

SEQ ID NO: 3132380 - DNA, 25 bp, Homo sapien
ttacgttcttcatgcatgaaatcct

SEQ ID NO: 3132381 - DNA, 25 bp, Homo sapien
cagagtcatcaaacaccactgtgta

SEQ ID NO: 3132382 - DNA, 25 bp, Homo sapien
ggaagccatagttcccagcagttct

SEQ ID NO: 3132383 - DNA, 25 bp, Homo sapien
atgaatggaagccatagttcccagc

SEQ ID NO: 3132384 - DNA, 25 bp, Homo sapien
gaagccatagttcccagcagttctt

SEQ ID NO: 3132385 - DNA, 25 bp, Homo sapien
tgtaactggagtttacaaatctatc

SEQ ID NO: 3132386 - DNA, 25 bp, Homo sapien
gtaactggagtttacaaatctatct

SEQ ID NO: 3132387 - DNA, 25 bp, Homo sapien
agctctcttctagaaccacattaca

SEQ ID NO: 3132388 - DNA, 25 bp, Homo sapien
ttttaagtgccatgctttggttacc

SEQ ID NO: 3132389 - DNA, 25 bp, Homo sapien
gctttggttacctgttttgcagctg

SEQ ID NO: 3132390 - DNA, 25 bp, Homo sapien
ggtatcccacgaaacaagtctccaa

SEQ ID NO: 3132391 - DNA, 25 bp, Homo sapien
ctttatccaacttgctattctatgc

SEQ ID NO: 3132392 - DNA, 25 bp, Homo sapien
tgtgagatgaatctttggacagcat

SEQ ID NO: 3132393 - DNA, 25 bp, Homo sapien
ttgctattctatgcctcttacatgg

SEQ ID NO: 3132394 - DNA, 25 bp, Homo sapien
ttggacagcatccagttgagtcttg

SEQ ID NO: 3132395 - DNA, 25 bp, Homo sapien
tggtactcaggataatgcttccagt

SEQ ID NO: 3132396 - DNA, 25 bp, Homo sapien
cattcagcaggacatttgctgtgag

SEQ ID NO: 3132397 - DNA, 25 bp, Homo sapien
gtctcattctggtactcaggataat

SEQ ID NO: 3132398 - DNA, 25 bp, Homo sapien
tttgcccattcagcaggacatttgc

SEQ ID NO: 3132399 - DNA, 25 bp, Homo sapien
tgttcagctggcaaaaaggacaacc

SEQ ID NO: 3132400 - DNA, 25 bp, Homo sapien
aaaaggacaacctcctgctgatagg

SEQ ID NO: 3132401 - DNA, 25 bp, Homo sapien
gccgctgttacccaaagtgggcaca

SEQ ID NO: 3132402 - DNA, 25 bp, Homo sapien
tgataggtgggtcattgtccgccgc

SEQ ID NO: 3132403 - DNA, 25 bp, Homo sapien
cctggaataatcttttctgactcct

SEQ ID NO: 3132404 - DNA, 25 bp, Homo sapien
tgcctggaataatcttttctgactc

SEQ ID NO: 3132405 - DNA, 25 bp, Homo sapien
ctgcctggaataatcttttctgact

SEQ ID NO: 3132406 - DNA, 25 bp, Homo sapien
ggaataatcttttctgactcctcat

SEQ ID NO: 3132407 - DNA, 25 bp, Homo sapien
tcccagtccatatctgctcttgagt

SEQ ID NO: 3132408 - DNA, 25 bp, Homo sapien
tgacaacagagtggccaaacttcca

SEQ ID NO: 3132409 - DNA, 25 bp, Homo sapien
tgagttgcttccagtgtatctgaca

SEQ ID NO: 3132410 - DNA, 25 bp, Homo sapien
gtcaatgaatggatgtctaacagcc

SEQ ID NO: 3132411 - DNA, 25 bp, Homo sapien
tcctaggcctgccaatgctagccag

SEQ ID NO: 3132412 - DNA, 25 bp, Homo sapien
gccaatgctagccagctgaaggtca

SEQ ID NO: 3132413 - DNA, 25 bp, Homo sapien
tagtcagagatcacactcctaggcc

SEQ ID NO: 3132414 - DNA, 25 bp, Homo sapien
accaagacagtaagacaatcttgcc

SEQ ID NO: 3132415 - DNA, 25 bp, Homo sapien
tcacaattcacaatgctgttttctt

SEQ ID NO: 3132416 - DNA, 25 bp, Homo sapien
aatcaggcagccactgaagataaaa

SEQ ID NO: 3132417 - DNA, 25 bp, Homo sapien
cagtccctgggagtaatcacaattc

SEQ ID NO: 3132418 - DNA, 25 bp, Homo sapien
ttttgtgaagtggacatgaaagagt

SEQ ID NO: 3132419 - DNA, 25 bp, Homo sapien
taaactgtcagtactggaatctctc

SEQ ID NO: 3132420 - DNA, 25 bp, Homo sapien
gctatcctgaggcaaacaaccttca

SEQ ID NO: 3132421 - DNA, 25 bp, Homo sapien
tagccatgcaccatataacaatgtt

SEQ ID NO: 3132422 - DNA, 25 bp, Homo sapien
ggaatctctcctaaagaaatagcca

SEQ ID NO: 3132423 - DNA, 25 bp, Homo sapien
tactaggtcataacccatcaacttg

SEQ ID NO: 3132424 - DNA, 25 bp, Homo sapien
cacatttgtgtcagaaaagtaaagc

SEQ ID NO: 3132425 - DNA, 25 bp, Homo sapien
gacttgtcccactaatatgttgggt

SEQ ID NO: 3132426 - DNA, 25 bp, Homo sapien
tgtaagctaagcaatgtaatgcctg

SEQ ID NO: 3132427 - DNA, 25 bp, Homo sapien
ctctcgcagttgatcacagaggtca

SEQ ID NO: 3132428 - DNA, 25 bp, Homo sapien
tctcgcagttgatcacagaggtcat

SEQ ID NO: 3132429 - DNA, 25 bp, Homo sapien
ggcaactgggactcatggtagcacc

SEQ ID NO: 3132430 - DNA, 25 bp, Homo sapien
tgggtacctcagtggcaaaagctgc

SEQ ID NO: 3132431 - DNA, 25 bp, Homo sapien
taggctactagggtccacaccaatg

SEQ ID NO: 3132432 - DNA, 25 bp, Homo sapien
tctctctccagagggcctatggtag

SEQ ID NO: 3132433 - DNA, 25 bp, Homo sapien
gagtataacagaatatgtagccgca

SEQ ID NO: 3132434 - DNA, 25 bp, Homo sapien
tatttacaatagcacaggaggcatt

SEQ ID NO: 3132435 - DNA, 25 bp, Homo sapien
gcactttctgttcattcggcttgga

SEQ ID NO: 3132436 - DNA, 25 bp, Homo sapien
tgtgccagctaccatcctaactcag

SEQ ID NO: 3132437 - DNA, 25 bp, Homo sapien
aacttctgacaagttgtttcctttg

SEQ ID NO: 3132438 - DNA, 25 bp, Homo sapien
cttgaacttctgacaagttgtttcc

SEQ ID NO: 3132439 - DNA, 25 bp, Homo sapien
tgaacttctgacaagttgtttcctt

SEQ ID NO: 3132440 - DNA, 25 bp, Homo sapien
cttctgacaagttgtttcctttgtt

SEQ ID NO: 3132441 - DNA, 25 bp, Homo sapien
tctgccagtagcctcgggagatcat

SEQ ID NO: 3132442 - DNA, 25 bp, Homo sapien
catctgccagtagcctcgggagatc

SEQ ID NO: 3132443 - DNA, 25 bp, Homo sapien
tccatctgccagtagcctcgggaga

SEQ ID NO: 3132444 - DNA, 25 bp, Homo sapien
tctccatctgccagtagcctcggga

SEQ ID NO: 3132445 - DNA, 25 bp, Homo sapien
catctgtacagcgtgcagatgattg

SEQ ID NO: 3132446 - DNA, 25 bp, Homo sapien
cagtggctgcatctgtacagcgtgc

SEQ ID NO: 3132447 - DNA, 25 bp, Homo sapien
gctgcatctgtacagcgtgcagatg

SEQ ID NO: 3132448 - DNA, 25 bp, Homo sapien
tggctgcatctgtacagcgtgcaga

SEQ ID NO: 3132449 - DNA, 25 bp, Homo sapien
tttcttagtacagaggcagaactcc

SEQ ID NO: 3132450 - DNA, 25 bp, Homo sapien
gatcctcaccgttatttcggctcat

SEQ ID NO: 3132451 - DNA, 25 bp, Homo sapien
attttcccgtaaggttctgctccag

SEQ ID NO: 3132452 - DNA, 25 bp, Homo sapien
cagaactccaaacaggtctgatcct

SEQ ID NO: 3132453 - DNA, 25 bp, Homo sapien
gatgatatcgtcacgtttactcatg

SEQ ID NO: 3132454 - DNA, 25 bp, Homo sapien
tcaaagatgatatcgtcacgtttac

SEQ ID NO: 3132455 - DNA, 25 bp, Homo sapien
ctgtcaaagatgatatcgtcacgtt

SEQ ID NO: 3132456 - DNA, 25 bp, Homo sapien
gatatcgtcacgtttactcatgaga

SEQ ID NO: 3132457 - DNA, 25 bp, Homo sapien
gaaaatcttcagacgaatgtctaaa

SEQ ID NO: 3132458 - DNA, 25 bp, Homo sapien
taaatgtgatcagtgtgggtaagca

SEQ ID NO: 3132459 - DNA, 25 bp, Homo sapien
tgtgtaagagtttctgttctgagaa

SEQ ID NO: 3132460 - DNA, 25 bp, Homo sapien
tgtctaaatcccatttctcggggga

SEQ ID NO: 3132461 - DNA, 25 bp, Homo sapien
taagaaacctatcataaactagatg

SEQ ID NO: 3132462 - DNA, 25 bp, Homo sapien
aatgaataagttagtgaccaaatga

SEQ ID NO: 3132463 - DNA, 25 bp, Homo sapien
cttaggaatctgatataggcacaca

SEQ ID NO: 3132464 - DNA, 25 bp, Homo sapien
caatacgttgtataatgtaggcatt

SEQ ID NO: 3132465 - DNA, 25 bp, Homo sapien
taagggcactgtataaatcaaacca

SEQ ID NO: 3132466 - DNA, 25 bp, Homo sapien
aagggcactgtataaatcaaaccat

SEQ ID NO: 3132467 - DNA, 25 bp, Homo sapien
gtcaccaggtcgtccctgtcagcca

SEQ ID NO: 3132468 - DNA, 25 bp, Homo sapien
gggtcaccaggtcgtccctgtcagc

SEQ ID NO: 3132469 - DNA, 25 bp, Homo sapien
tcaccaggtcgtccctgtcagccat

SEQ ID NO: 3132470 - DNA, 25 bp, Homo sapien
cgggtcaccaggtcgtccctgtcag

SEQ ID NO: 3132471 - DNA, 25 bp, Homo sapien
ctgtgaaaattaggatttcttgttt

SEQ ID NO: 3132472 - DNA, 25 bp, Homo sapien
tgaaaattaggatttcttgttttga

SEQ ID NO: 3132473 - DNA, 25 bp, Homo sapien
tgctgtgaaaattaggatttcttgt

SEQ ID NO: 3132474 - DNA, 25 bp, Homo sapien
tctgctgtgaaaattaggatttctt

SEQ ID NO: 3132475 - DNA, 25 bp, Homo sapien
agtgcggaaggatcatgggtaattg

SEQ ID NO: 3132476 - DNA, 25 bp, Homo sapien
tgcaaaagggagagccagaagtgcg

SEQ ID NO: 3132477 - DNA, 25 bp, Homo sapien
tatagagttgcggaacggcagctga

SEQ ID NO: 3132478 - DNA, 25 bp, Homo sapien
catgggtaattggtatagagttgcg

SEQ ID NO: 3132479 - DNA, 25 bp, Homo sapien
cttctaatttttacagccgctgtac

SEQ ID NO: 3132480 - DNA, 25 bp, Homo sapien
tttttacagccgctgtacttctcgg

SEQ ID NO: 3132481 - DNA, 25 bp, Homo sapien
ttcaaaatcaccagaagacgttacc

SEQ ID NO: 3132482 - DNA, 25 bp, Homo sapien
aaaatcaccagaagacgttaccagg

SEQ ID NO: 3132483 - DNA, 25 bp, Homo sapien
tagcatgcactcacataggaacagc

SEQ ID NO: 3132484 - DNA, 25 bp, Homo sapien
tgctgcaatatgtgggaagaaagac

SEQ ID NO: 3132485 - DNA, 25 bp, Homo sapien
taaaggccaacttggctgtctcaag

SEQ ID NO: 3132486 - DNA, 25 bp, Homo sapien
gactggaagtcatgtaaacgctgcc

SEQ ID NO: 3132487 - DNA, 25 bp, Homo sapien
gagataccattaagactcacactat

SEQ ID NO: 3132488 - DNA, 25 bp, Homo sapien
tgtaaggacactagtgagataccat

SEQ ID NO: 3132489 - DNA, 25 bp, Homo sapien
gaggtactagggatcagggcttcaa

SEQ ID NO: 3132490 - DNA, 25 bp, Homo sapien
ccttcacttggaaatgaccatcttc

SEQ ID NO: 3132491 - DNA, 25 bp, Homo sapien
cttgcacactaacatcaaagcaggg

SEQ ID NO: 3132492 - DNA, 25 bp, Homo sapien
cgtccttaacgtgatctgccctctg

SEQ ID NO: 3132493 - DNA, 25 bp, Homo sapien
tgggtgaagttacatgagcaagatc

SEQ ID NO: 3132494 - DNA, 25 bp, Homo sapien
tgagtaaaggagtttgccgtcctta

SEQ ID NO: 3132495 - DNA, 25 bp, Homo sapien
tgctcctcagagaaacttctgttca

SEQ ID NO: 3132496 - DNA, 25 bp, Homo sapien
cctttcataatgctcctcagagaaa

SEQ ID NO: 3132497 - DNA, 25 bp, Homo sapien
ttcataatgctcctcagagaaactt

SEQ ID NO: 3132498 - DNA, 25 bp, Homo sapien
gctcctcagagaaacttctgttcat

SEQ ID NO: 3132499 - DNA, 25 bp, Homo sapien
cctgaaaaatccaaaggcagcaaac

SEQ ID NO: 3132500 - DNA, 25 bp, Homo sapien
aaaatccaaaggcagcaaacagttc

SEQ ID NO: 3132501 - DNA, 25 bp, Homo sapien
gaaaaatccaaaggcagcaaacagt

SEQ ID NO: 3132502 - DNA, 25 bp, Homo sapien
cttagacatatttggggacctgaaa

SEQ ID NO: 3132503 - DNA, 25 bp, Homo sapien
tcgagtgtcactgctgaaacggtca

SEQ ID NO: 3132504 - DNA, 25 bp, Homo sapien
ggacccatgtctacgctgaaggctt

SEQ ID NO: 3132505 - DNA, 25 bp, Homo sapien
taaagaagccagtttacccaaggca

SEQ ID NO: 3132506 - DNA, 25 bp, Homo sapien
ttgtgacaccagcagtaaagaagcc

SEQ ID NO: 3132507 - DNA, 25 bp, Homo sapien
gaccttagcccacaacagagacagt

SEQ ID NO: 3132508 - DNA, 25 bp, Homo sapien
ggtattgtcaattcccttagagaga

SEQ ID NO: 3132509 - DNA, 25 bp, Homo sapien
gcccacggtctactttacagcaaaa

SEQ ID NO: 3132510 - DNA, 25 bp, Homo sapien
gctgtgaacccagatggagcagatc

SEQ ID NO: 3132511 - DNA, 25 bp, Homo sapien
gaaatcctgcaatttcaataggtca

SEQ ID NO: 3132512 - DNA, 25 bp, Homo sapien
taggtcacactgagcagaagatacc

SEQ ID NO: 3132513 - DNA, 25 bp, Homo sapien
ctgggttgaaaatgatgggtcgctc

SEQ ID NO: 3132514 - DNA, 25 bp, Homo sapien
aagataccaagctcttctggtaaca

SEQ ID NO: 3132515 - DNA, 25 bp, Homo sapien
atttctgatttgaaagttgcctgtg

SEQ ID NO: 3132516 - DNA, 25 bp, Homo sapien
tttgagatggctgaagccctgcatt

SEQ ID NO: 3132517 - DNA, 25 bp, Homo sapien
cctgcatttctgatttgaaagttgc

SEQ ID NO: 3132518 - DNA, 25 bp, Homo sapien
tggctgaagccctgcatttctgatt

SEQ ID NO: 3132519 - DNA, 25 bp, Homo sapien
acagctgaggatatatgacaccaga

SEQ ID NO: 3132520 - DNA, 25 bp, Homo sapien
gaatatgcatgtccacggcaaagcc

SEQ ID NO: 3132521 - DNA, 25 bp, Homo sapien
atatgcatgtccacggcaaagccca

SEQ ID NO: 3132522 - DNA, 25 bp, Homo sapien
gctgaggatatatgacaccagaaga

SEQ ID NO: 3132523 - DNA, 25 bp, Homo sapien
tgaataaggcaccatctctactgtt

SEQ ID NO: 3132524 - DNA, 25 bp, Homo sapien
ggtttccagatgaataaggcaccat

SEQ ID NO: 3132525 - DNA, 25 bp, Homo sapien
ttcattaagcatctgctgtatcagg

SEQ ID NO: 3132526 - DNA, 25 bp, Homo sapien
gctgtatcaggtcctggtttccaga

SEQ ID NO: 3132527 - DNA, 25 bp, Homo sapien
tcctgcacagaaatgatagaagcca

SEQ ID NO: 3132528 - DNA, 25 bp, Homo sapien
tagaagccagtcacaatcctgaccc

SEQ ID NO: 3132529 - DNA, 25 bp, Homo sapien
gataatttcgttatttccaagcctc

SEQ ID NO: 3132530 - DNA, 25 bp, Homo sapien
aagcctcctttgcagtgatgtatgc

SEQ ID NO: 3132531 - DNA, 25 bp, Homo sapien
ggctctcatatgcttgatgctgctg

SEQ ID NO: 3132532 - DNA, 25 bp, Homo sapien
gctaggctctgccatgtcttccaca

SEQ ID NO: 3132533 - DNA, 25 bp, Homo sapien
tataggctctcatatgcttgatgct

SEQ ID NO: 3132534 - DNA, 25 bp, Homo sapien
tagaggtctttggagctaggctctg

SEQ ID NO: 3132535 - DNA, 25 bp, Homo sapien
tattcctttgtgatcctccatcccc

SEQ ID NO: 3132536 - DNA, 25 bp, Homo sapien
cccttcactgaccctttttctctca

SEQ ID NO: 3132537 - DNA, 25 bp, Homo sapien
ctattcctttgtgatcctccatccc

SEQ ID NO: 3132538 - DNA, 25 bp, Homo sapien
ccttcactgaccctttttctctcaa

SEQ ID NO: 3132539 - DNA, 25 bp, Homo sapien
tggaagcctctgttgtaacaacatt

SEQ ID NO: 3132540 - DNA, 25 bp, Homo sapien
gtctcctcactttctcccggaattg

SEQ ID NO: 3132541 - DNA, 25 bp, Homo sapien
ctgaggctctactgtacttgtgggt

SEQ ID NO: 3132542 - DNA, 25 bp, Homo sapien
cccggaattgctcttggtaacaggc

SEQ ID NO: 3132543 - DNA, 25 bp, Homo sapien
tccttggtcctgtaatggtgatgcc

SEQ ID NO: 3132544 - DNA, 25 bp, Homo sapien
tgggacatccatgatagctttttct

SEQ ID NO: 3132545 - DNA, 25 bp, Homo sapien
ctgaaaatccttggtcctgtaatgg

SEQ ID NO: 3132546 - DNA, 25 bp, Homo sapien
gggacatccatgatagctttttcta

SEQ ID NO: 3132547 - DNA, 25 bp, Homo sapien
gatgttgtgcgtggcttggttataa

SEQ ID NO: 3132548 - DNA, 25 bp, Homo sapien
agctctgagtcctctgaaatgatgc

SEQ ID NO: 3132549 - DNA, 25 bp, Homo sapien
atgccgtagcccgttctctaactgc

SEQ ID NO: 3132550 - DNA, 25 bp, Homo sapien
tgtgcgtggcttggttataagctct

SEQ ID NO: 3132551 - DNA, 25 bp, Homo sapien
gggtcctctgaagccatcaaacaga

SEQ ID NO: 3132552 - DNA, 25 bp, Homo sapien
gaaggcaacgtgaagttccttctat

SEQ ID NO: 3132553 - DNA, 25 bp, Homo sapien
taactcttgttggtcaattttcctc

SEQ ID NO: 3132554 - DNA, 25 bp, Homo sapien
aaacagaagttggaaggcaacgtga

SEQ ID NO: 3132555 - DNA, 25 bp, Homo sapien
ttagtcagtaataactgtggctgcc

SEQ ID NO: 3132556 - DNA, 25 bp, Homo sapien
tggctgccaggatttcaatgatgtc

SEQ ID NO: 3132557 - DNA, 25 bp, Homo sapien
tcaatgatgtctgaattgtttgaca

SEQ ID NO: 3132558 - DNA, 25 bp, Homo sapien
gtttgacataccaggagaaatatat

SEQ ID NO: 3132559 - DNA, 25 bp, Homo sapien
catctcagctgaaaccctacaagct

SEQ ID NO: 3132560 - DNA, 25 bp, Homo sapien
tctgtgaaaacttccctaaccttgc

SEQ ID NO: 3132561 - DNA, 25 bp, Homo sapien
gaaaggccaacagtgaaatttggga

SEQ ID NO: 3132562 - DNA, 25 bp, Homo sapien
ggaagaatgctatcagccaatacaa

SEQ ID NO: 3132563 - DNA, 25 bp, Homo sapien
gcgactgtcatgtagaatgttgtca

SEQ ID NO: 3132564 - DNA, 25 bp, Homo sapien
gtcacagtgtaatacatgtgtaaga

SEQ ID NO: 3132565 - DNA, 25 bp, Homo sapien
cattttaatgcagtcccgtttctca

SEQ ID NO: 3132566 - DNA, 25 bp, Homo sapien
taatagaacgtaggaatattaactc

SEQ ID NO: 3132567 - DNA, 25 bp, Homo sapien
tgggcagcattttgacagctcgtaa

SEQ ID NO: 3132568 - DNA, 25 bp, Homo sapien
aggtgggcagcattttgacagctcg

SEQ ID NO: 3132569 - DNA, 25 bp, Homo sapien
gcagcattttgacagctcgtaaaag

SEQ ID NO: 3132570 - DNA, 25 bp, Homo sapien
gggcagcattttgacagctcgtaaa

SEQ ID NO: 3132571 - DNA, 25 bp, Homo sapien
tcttctgagaaattcctgtcttcct

SEQ ID NO: 3132572 - DNA, 25 bp, Homo sapien
tgtcttcctctaccagattatacat

SEQ ID NO: 3132573 - DNA, 25 bp, Homo sapien
ggagaggtttccttgacagcctttg

SEQ ID NO: 3132574 - DNA, 25 bp, Homo sapien
tctccatagggagaggtttccttga

SEQ ID NO: 3132575 - DNA, 25 bp, Homo sapien
gctgccacttacacataccgttaat

SEQ ID NO: 3132576 - DNA, 25 bp, Homo sapien
ccgttaatccatcaataactctcat

SEQ ID NO: 3132577 - DNA, 25 bp, Homo sapien
atatcgctgccacttacacataccg

SEQ ID NO: 3132578 - DNA, 25 bp, Homo sapien
tacacataccgttaatccatcaata

SEQ ID NO: 3132579 - DNA, 25 bp, Homo sapien
ttacacattccagacttctgaaact

SEQ ID NO: 3132580 - DNA, 25 bp, Homo sapien
ttccagacttctgaaactttccacc

SEQ ID NO: 3132581 - DNA, 25 bp, Homo sapien
tacacattccagacttctgaaactt

SEQ ID NO: 3132582 - DNA, 25 bp, Homo sapien
cagacttctgaaactttccacctac

SEQ ID NO: 3132583 - DNA, 25 bp, Homo sapien
ccaccactgtagcatacaaggtatg

SEQ ID NO: 3132584 - DNA, 25 bp, Homo sapien
agggttccacttgccaaaatctgct

SEQ ID NO: 3132585 - DNA, 25 bp, Homo sapien
ggtatgatgtgatccagctgccaca

SEQ ID NO: 3132586 - DNA, 25 bp, Homo sapien
tgccacaataggagcagggttccac

SEQ ID NO: 3132587 - DNA, 25 bp, Homo sapien
cagcgttccgaaacgtactccagga

SEQ ID NO: 3132588 - DNA, 25 bp, Homo sapien
tgtttgctcaggagggccattccga

SEQ ID NO: 3132589 - DNA, 25 bp, Homo sapien
cattgaaacaatcgctccaggagcg

SEQ ID NO: 3132590 - DNA, 25 bp, Homo sapien
tccagttgttactttgagcaccgtc

SEQ ID NO: 3132591 - DNA, 25 bp, Homo sapien
caaaatttactacataccatcagat

SEQ ID NO: 3132592 - DNA, 25 bp, Homo sapien
aaatctacatgtaaaattccagtac

SEQ ID NO: 3132593 - DNA, 25 bp, Homo sapien
tcctatattcattggcgattaatgg

SEQ ID NO: 3132594 - DNA, 25 bp, Homo sapien
cgattaatggtgtctaagaatacct

SEQ ID NO: 3132595 - DNA, 25 bp, Homo sapien
cattaatgcctaggtcattttcagc

SEQ ID NO: 3132596 - DNA, 25 bp, Homo sapien
gattttccctcttccggtatcagga

SEQ ID NO: 3132597 - DNA, 25 bp, Homo sapien
gagctctatactccctgcacagcag

SEQ ID NO: 3132598 - DNA, 25 bp, Homo sapien
gttgtccttacttccaccttgtgtg

SEQ ID NO: 3132599 - DNA, 25 bp, Homo sapien
cagtagttcataaatggtaaggtac

SEQ ID NO: 3132600 - DNA, 25 bp, Homo sapien
gcagacaccgtgtgagttgtccctt

SEQ ID NO: 3132601 - DNA, 25 bp, Homo sapien
tacaggtccaggttgagattgtctg

SEQ ID NO: 3132602 - DNA, 25 bp, Homo sapien
ggtaaggtacatcaactcacacatg

SEQ ID NO: 3132603 - DNA, 25 bp, Homo sapien
aactgcagtcgtagttcagaccctg

SEQ ID NO: 3132604 - DNA, 25 bp, Homo sapien
taccatgggctagacgctatgcaaa

SEQ ID NO: 3132605 - DNA, 25 bp, Homo sapien
cagaccctgagttggctgtagaggt

SEQ ID NO: 3132606 - DNA, 25 bp, Homo sapien
cataccatcctgtgtgaaataagag

SEQ ID NO: 3132607 - DNA, 25 bp, Homo sapien
tgcggaaaagggagctatataacca

SEQ ID NO: 3132608 - DNA, 25 bp, Homo sapien
caaaaaagtgtctattgatgcggaa

SEQ ID NO: 3132609 - DNA, 25 bp, Homo sapien
aaaggcaggcaaaagtcatgtcatg

SEQ ID NO: 3132610 - DNA, 25 bp, Homo sapien
tcagaggcatttaggttgcaaggtg

SEQ ID NO: 3132611 - DNA, 25 bp, Homo sapien
caatgtaaactattgctaaggagtt

SEQ ID NO: 3132612 - DNA, 25 bp, Homo sapien
ctaaggagttacggctaccataaat

SEQ ID NO: 3132613 - DNA, 25 bp, Homo sapien
tgtaaactattgctaaggagttacg

SEQ ID NO: 3132614 - DNA, 25 bp, Homo sapien
ctaaattcaatgtaaactattgcta

SEQ ID NO: 3132615 - DNA, 25 bp, Homo sapien
tacttttgagcttcggctggtgagg

SEQ ID NO: 3132616 - DNA, 25 bp, Homo sapien
tatccgtggttgaacaaaagacact

SEQ ID NO: 3132617 - DNA, 25 bp, Homo sapien
caatctgtttgcttgtgggtagcca

SEQ ID NO: 3132618 - DNA, 25 bp, Homo sapien
caaggctgagtatatttgaggaatc

SEQ ID NO: 3132619 - DNA, 25 bp, Homo sapien
tgtatttaacagagatggggtttta

SEQ ID NO: 3132620 - DNA, 25 bp, Homo sapien
attttttgtatttaacagagatggg

SEQ ID NO: 3132621 - DNA, 25 bp, Homo sapien
tgcctgccctgcgttatctttttga

SEQ ID NO: 3132622 - DNA, 25 bp, Homo sapien
tgtggaggatatttgcatctatgtg

SEQ ID NO: 3132623 - DNA, 25 bp, Homo sapien
cctgccctgcgttatctttttgatg

SEQ ID NO: 3132624 - DNA, 25 bp, Homo sapien
accatgcctgccctgcgttatcttt

SEQ ID NO: 3132625 - DNA, 25 bp, Homo sapien
gggttggtgcataaaatggtatttc

SEQ ID NO: 3132626 - DNA, 25 bp, Homo sapien
agagtttgtgctagtttacattccc

SEQ ID NO: 3132627 - DNA, 25 bp, Homo sapien
atttttgtaacacccattctgactg

SEQ ID NO: 3132628 - DNA, 25 bp, Homo sapien
actgggtgagatgctaacttagggt

SEQ ID NO: 3132629 - DNA, 25 bp, Homo sapien
tttcattcgggagcaacagatatcc

SEQ ID NO: 3132630 - DNA, 25 bp, Homo sapien
tgccaaatggcaagtcctgactctc

SEQ ID NO: 3132631 - DNA, 25 bp, Homo sapien
tcagagctcaccagaacttgtttta

SEQ ID NO: 3132632 - DNA, 25 bp, Homo sapien
taattgtcagagaccaattctgggc

SEQ ID NO: 3132633 - DNA, 25 bp, Homo sapien
tcggttgcaatggatagagaaaaca

SEQ ID NO: 3132634 - DNA, 25 bp, Homo sapien
acatttaacagatactcggttgcaa

SEQ ID NO: 3132635 - DNA, 25 bp, Homo sapien
aaaggtatgattataagctacacag

SEQ ID NO: 3132636 - DNA, 25 bp, Homo sapien
gatcacgagattcaaggatatacat

SEQ ID NO: 3132637 - DNA, 25 bp, Homo sapien
gcatcgccaagtcaatcctaagtca

SEQ ID NO: 3132638 - DNA, 25 bp, Homo sapien
gcccgcatcgccaagtcaatcctaa

SEQ ID NO: 3132639 - DNA, 25 bp, Homo sapien
ctaagtcaaaagaacaaacctggag

SEQ ID NO: 3132640 - DNA, 25 bp, Homo sapien
caaaaaagagcccgcatcgccaagt

SEQ ID NO: 3132641 - DNA, 25 bp, Homo sapien
tactctcacctacaccacacttatc

SEQ ID NO: 3132642 - DNA, 25 bp, Homo sapien
ctatatcccagtcagtgtgtttttc

SEQ ID NO: 3132643 - DNA, 25 bp, Homo sapien
cctgcaaaagcaagacattggtctt

SEQ ID NO: 3132644 - DNA, 25 bp, Homo sapien
tgctatatcccagtcagtgtgtttt

SEQ ID NO: 3132645 - DNA, 25 bp, Homo sapien
tcaagtaaaaataggcttggccctg

SEQ ID NO: 3132646 - DNA, 25 bp, Homo sapien
taggcttggccctgaaattacggca

SEQ ID NO: 3132647 - DNA, 25 bp, Homo sapien
tccgtgatatccgtagatgaagcca

SEQ ID NO: 3132648 - DNA, 25 bp, Homo sapien
cattcaaaccctgctcaacatcatt

SEQ ID NO: 3132649 - DNA, 25 bp, Homo sapien
tctctattttagcactatccaaagc

SEQ ID NO: 3132650 - DNA, 25 bp, Homo sapien
tagttatctctattttagcactatc

SEQ ID NO: 3132651 - DNA, 25 bp, Homo sapien
tctattttagcactatccaaagcat

SEQ ID NO: 3132652 - DNA, 25 bp, Homo sapien
ttagcactatccaaagcatattttc

SEQ ID NO: 3132653 - DNA, 25 bp, Homo sapien
tccaactgtgtactggatatattgg

SEQ ID NO: 3132654 - DNA, 25 bp, Homo sapien
aactgtgtactggatatattggtgc

SEQ ID NO: 3132655 - DNA, 25 bp, Homo sapien
tgtactggatatattggtgctgcca

SEQ ID NO: 3132656 - DNA, 25 bp, Homo sapien
cttcagtttccaactgtgtactgga

SEQ ID NO: 3132657 - DNA, 25 bp, Homo sapien
tttttcatggtggtagatgctggga

SEQ ID NO: 3132658 - DNA, 25 bp, Homo sapien
ttctggctatatcctcacagggcag

SEQ ID NO: 3132659 - DNA, 25 bp, Homo sapien
tagttgcttatcttagtcacagtgg

SEQ ID NO: 3132660 - DNA, 25 bp, Homo sapien
tcttactcccttgtaggtgtccacc

SEQ ID NO: 3132661 - DNA, 25 bp, Homo sapien
tattggagtagatccttcatgttcc

SEQ ID NO: 3132662 - DNA, 25 bp, Homo sapien
gaaacagctgtgcaataggaagcta

SEQ ID NO: 3132663 - DNA, 25 bp, Homo sapien
tgttcctttaattggtccaacacaa

SEQ ID NO: 3132664 - DNA, 25 bp, Homo sapien
aataggaagctattggagtagatcc

SEQ ID NO: 3132665 - DNA, 25 bp, Homo sapien
agcttttcctcaaactgtccgtaag

SEQ ID NO: 3132666 - DNA, 25 bp, Homo sapien
tcactcgtctctgcttcaacatgtc

SEQ ID NO: 3132667 - DNA, 25 bp, Homo sapien
aataatcataggttctttgtgcccc

SEQ ID NO: 3132668 - DNA, 25 bp, Homo sapien
ttcctgctgattttaaagcccgttc

SEQ ID NO: 3132669 - DNA, 25 bp, Homo sapien
gacagatgttgagctggcctcctcc

SEQ ID NO: 3132670 - DNA, 25 bp, Homo sapien
gcttctttgacaaacgacaacccga

SEQ ID NO: 3132671 - DNA, 25 bp, Homo sapien
tgcctgaaagcttctttgacaaacg

SEQ ID NO: 3132672 - DNA, 25 bp, Homo sapien
gacaaacgacaacccgaaaatgtga

SEQ ID NO: 3132673 - DNA, 25 bp, Homo sapien
caaatcaatctgcttatgatgaact

SEQ ID NO: 3132674 - DNA, 25 bp, Homo sapien
tgaaagtcattgtatgcaaggcaaa

SEQ ID NO: 3132675 - DNA, 25 bp, Homo sapien
tgaacaacattgaccacagggagaa

SEQ ID NO: 3132676 - DNA, 25 bp, Homo sapien
cattgctttgttacagtcaagaaca

SEQ ID NO: 3132677 - DNA, 25 bp, Homo sapien
taggaagtgatgtatctgagaagcc

SEQ ID NO: 3132678 - DNA, 25 bp, Homo sapien
attcagtgagggcacagatcttccc

SEQ ID NO: 3132679 - DNA, 25 bp, Homo sapien
ggccagtcaatggagaagatcagat

SEQ ID NO: 3132680 - DNA, 25 bp, Homo sapien
gattgccaactcaatggataacgca

SEQ ID NO: 3132681 - DNA, 25 bp, Homo sapien
tgtaagaattagtacctggtccaca

SEQ ID NO: 3132682 - DNA, 25 bp, Homo sapien
tcaatgtcgagctggactacaggaa

SEQ ID NO: 3132683 - DNA, 25 bp, Homo sapien
catcaaatcttccaacgttgtaaga

SEQ ID NO: 3132684 - DNA, 25 bp, Homo sapien
cacacaggcacccaatgaagttcct

SEQ ID NO: 3132685 - DNA, 25 bp, Homo sapien
taacctgcattatggtggcaacaga

SEQ ID NO: 3132686 - DNA, 25 bp, Homo sapien
tatttaacctgcattatggtggcaa

SEQ ID NO: 3132687 - DNA, 25 bp, Homo sapien
tttatttaacctgcattatggtggc

SEQ ID NO: 3132688 - DNA, 25 bp, Homo sapien
aaggtggagcccaaacatttacaga

SEQ ID NO: 3132689 - DNA, 25 bp, Homo sapien
caggttttagcgatatcaaatgcca

SEQ ID NO: 3132690 - DNA, 25 bp, Homo sapien
tgcttccacaacaaccaggttttag

SEQ ID NO: 3132691 - DNA, 25 bp, Homo sapien
tacagagactgagcacaaatttgtg

SEQ ID NO: 3132692 - DNA, 25 bp, Homo sapien
tctctctgctgtaatgcaccagtgc

SEQ ID NO: 3132693 - DNA, 25 bp, Homo sapien
aaggcccagcacactgttacagacg

SEQ ID NO: 3132694 - DNA, 25 bp, Homo sapien
cacactgttacagacgtgctctcgg

SEQ ID NO: 3132695 - DNA, 25 bp, Homo sapien
ttcccatatgccacgggaccaccct

SEQ ID NO: 3132696 - DNA, 25 bp, Homo sapien
acagacgtgctctcggctgatgttc

SEQ ID NO: 3132697 - DNA, 25 bp, Homo sapien
gctaatttttgtgcgtctgcttttt

SEQ ID NO: 3132698 - DNA, 25 bp, Homo sapien
ggctaatttttgtgcgtctgctttt

SEQ ID NO: 3132699 - DNA, 25 bp, Homo sapien
ctaatttttgtgcgtctgcttttta

SEQ ID NO: 3132700 - DNA, 25 bp, Homo sapien
catactcaatctcctgcgaataatc

SEQ ID NO: 3132701 - DNA, 25 bp, Homo sapien
cgcatactcaatctcctgcgaataa

SEQ ID NO: 3132702 - DNA, 25 bp, Homo sapien
accgcatactcaatctcctgcgaat

SEQ ID NO: 3132703 - DNA, 25 bp, Homo sapien
tactcaatctcctgcgaataatcct

SEQ ID NO: 3132704 - DNA, 25 bp, Homo sapien
ttttaaagatgattgcacaggttgg

SEQ ID NO: 3132705 - DNA, 25 bp, Homo sapien
gcccaggcattactggagattttaa

SEQ ID NO: 3132706 - DNA, 25 bp, Homo sapien
caaccgcgcccaggcattactggag

SEQ ID NO: 3132707 - DNA, 25 bp, Homo sapien
gaatccacttaatacgtaaatgagg

SEQ ID NO: 3132708 - DNA, 25 bp, Homo sapien
tcaggacaagactacaacctttaga

SEQ ID NO: 3132709 - DNA, 25 bp, Homo sapien
tgatggcaatcattcatagagacaa

SEQ ID NO: 3132710 - DNA, 25 bp, Homo sapien
taaattctgctagtaatgatggcaa

SEQ ID NO: 3132711 - DNA, 25 bp, Homo sapien
tatttgatgacaatacgtctgccta

SEQ ID NO: 3132712 - DNA, 25 bp, Homo sapien
gcagcactgctagaaagtgtaaact

SEQ ID NO: 3132713 - DNA, 25 bp, Homo sapien
gacctgactcccacctttaataata

SEQ ID NO: 3132714 - DNA, 25 bp, Homo sapien
gaaagccattgacattctcatagtg

SEQ ID NO: 3132715 - DNA, 25 bp, Homo sapien
tttaataatactcaagcagcactgc

SEQ ID NO: 3132716 - DNA, 25 bp, Homo sapien
ttcttatagattcacatacacgtgg

SEQ ID NO: 3132717 - DNA, 25 bp, Homo sapien
tagattcacatacacgtggccaaag

SEQ ID NO: 3132718 - DNA, 25 bp, Homo sapien
ttatagattcacatacacgtggcca

SEQ ID NO: 3132719 - DNA, 25 bp, Homo sapien
agattcacatacacgtggccaaagg

SEQ ID NO: 3132720 - DNA, 25 bp, Homo sapien
ttgcccttaacttgtttgttcacaa

SEQ ID NO: 3132721 - DNA, 25 bp, Homo sapien
tcttgcccttaacttgtttgttcac

SEQ ID NO: 3132722 - DNA, 25 bp, Homo sapien
gcccttaacttgtttgttcacaaca

SEQ ID NO: 3132723 - DNA, 25 bp, Homo sapien
ttaacttgtttgttcacaacaatgc

SEQ ID NO: 3132724 - DNA, 25 bp, Homo sapien
ctatctcagctcttagagtgcttaa

SEQ ID NO: 3132725 - DNA, 25 bp, Homo sapien
ttagagtgcttaatgtgctcaatac

SEQ ID NO: 3132726 - DNA, 25 bp, Homo sapien
tagagtgcttaatgtgctcaataca

SEQ ID NO: 3132727 - DNA, 25 bp, Homo sapien
agtgcttaatgtgctcaatacacac

SEQ ID NO: 3132728 - DNA, 25 bp, Homo sapien
tggcgctttagttgaacccaggtac

SEQ ID NO: 3132729 - DNA, 25 bp, Homo sapien
ctcacaaagtgtgcctctctgggtg

SEQ ID NO: 3132730 - DNA, 25 bp, Homo sapien
gttctcacaaagtgtgcctctctgg

SEQ ID NO: 3132731 - DNA, 25 bp, Homo sapien
ggctggcgctttagttgaacccagg

SEQ ID NO: 3132732 - DNA, 25 bp, Homo sapien
tgaatcaagttgaacagggtcacta

SEQ ID NO: 3132733 - DNA, 25 bp, Homo sapien
tagccgacagctaagcctagacaaa

SEQ ID NO: 3132734 - DNA, 25 bp, Homo sapien
ccctgaagatggatagcatataagc

SEQ ID NO: 3132735 - DNA, 25 bp, Homo sapien
tacactcttagcatattagccgaca

SEQ ID NO: 3132736 - DNA, 25 bp, Homo sapien
gttccaggaatgtagaaacagacca

SEQ ID NO: 3132737 - DNA, 25 bp, Homo sapien
ggaactatggaagtgacagcattca

SEQ ID NO: 3132738 - DNA, 25 bp, Homo sapien
gcattcagttttgctcatgtgagaa

SEQ ID NO: 3132739 - DNA, 25 bp, Homo sapien
ccagtgattcggatgacttttattg

SEQ ID NO: 3132740 - DNA, 25 bp, Homo sapien
aattaagttgcataaatcgtgtgcc

SEQ ID NO: 3132741 - DNA, 25 bp, Homo sapien
ggctgttggactcgcttttgtctag

SEQ ID NO: 3132742 - DNA, 25 bp, Homo sapien
ccccagacagtctatatttaccagt

SEQ ID NO: 3132743 - DNA, 25 bp, Homo sapien
gccatatttctgcagtctttaatct

SEQ ID NO: 3132744 - DNA, 25 bp, Homo sapien
tttagtctcagttacaagaccctgg

SEQ ID NO: 3132745 - DNA, 25 bp, Homo sapien
aagaccctggaaaagttgccccatg

SEQ ID NO: 3132746 - DNA, 25 bp, Homo sapien
tattctgggtaccaaatggctcaca

SEQ ID NO: 3132747 - DNA, 25 bp, Homo sapien
ggaccctatgaactccccggatata

SEQ ID NO: 3132748 - DNA, 25 bp, Homo sapien
gatttcatcctatggtatttaccaa

SEQ ID NO: 3132749 - DNA, 25 bp, Homo sapien
tgtcatagctaacacttcattgcct

SEQ ID NO: 3132750 - DNA, 25 bp, Homo sapien
tgaactctactttatcaccttttct

SEQ ID NO: 3132751 - DNA, 25 bp, Homo sapien
ccaaatttcagaagatttcatccta

SEQ ID NO: 3132752 - DNA, 25 bp, Homo sapien
aattttgccctagcatctggccccg

SEQ ID NO: 3132753 - DNA, 25 bp, Homo sapien
gagtgagcaagaacgaagcgtcctt

SEQ ID NO: 3132754 - DNA, 25 bp, Homo sapien
aaaagacagcgaccagagggagctc

SEQ ID NO: 3132755 - DNA, 25 bp, Homo sapien
ttttgaacacgactggaaaggcgag

SEQ ID NO: 3132756 - DNA, 25 bp, Homo sapien
cttcagagctgtgtctggaattctc

SEQ ID NO: 3132757 - DNA, 25 bp, Homo sapien
ttcagagctgtgtctggaattctca

SEQ ID NO: 3132758 - DNA, 25 bp, Homo sapien
tcagagctgtgtctggaattctcat

SEQ ID NO: 3132759 - DNA, 25 bp, Homo sapien
gggtaaaattgtttagagcagcaat

SEQ ID NO: 3132760 - DNA, 25 bp, Homo sapien
tgctgccactgtttatccatccccc

SEQ ID NO: 3132761 - DNA, 25 bp, Homo sapien
acacactaaactcatgtagacccct

SEQ ID NO: 3132762 - DNA, 25 bp, Homo sapien
gaagggtaaaattgtttagagcagc

SEQ ID NO: 3132763 - DNA, 25 bp, Homo sapien
gaaacctataatagagatttctttc

SEQ ID NO: 3132764 - DNA, 25 bp, Homo sapien
cattcaaaaacatagatatggagtt

SEQ ID NO: 3132765 - DNA, 25 bp, Homo sapien
ccattcaaaaacatagatatggagt

SEQ ID NO: 3132766 - DNA, 25 bp, Homo sapien
tataatagagatttctttcaaggaa

SEQ ID NO: 3132767 - DNA, 25 bp, Homo sapien
gtgacttgtgttttgtaaggatgga

SEQ ID NO: 3132768 - DNA, 25 bp, Homo sapien
ggccagcaaatactctgtgcgtgtt

SEQ ID NO: 3132769 - DNA, 25 bp, Homo sapien
gcaaatactctgtgcgtgtttctgt

SEQ ID NO: 3132770 - DNA, 25 bp, Homo sapien
aataaggccagcaaatactctgtgc

SEQ ID NO: 3132771 - DNA, 25 bp, Homo sapien
gactataagacttgtgcaaaccagg

SEQ ID NO: 3132772 - DNA, 25 bp, Homo sapien
gagtgttcctgagaatagcagtcac

SEQ ID NO: 3132773 - DNA, 25 bp, Homo sapien
tactggatgtttgtgctggatgaaa

SEQ ID NO: 3132774 - DNA, 25 bp, Homo sapien
tggatcaagattgcttaaaggacta

SEQ ID NO: 3132775 - DNA, 25 bp, Homo sapien
tatagtaaaggtgccgaaagtagga

SEQ ID NO: 3132776 - DNA, 25 bp, Homo sapien
gaatctggattatagtaaaggtgcc

SEQ ID NO: 3132777 - DNA, 25 bp, Homo sapien
ctatgctcgattgagagaatctgga

SEQ ID NO: 3132778 - DNA, 25 bp, Homo sapien
tgttttccagtctctataggaagga

SEQ ID NO: 3132779 - DNA, 25 bp, Homo sapien
gcatccctactctcgttactgcatt

SEQ ID NO: 3132780 - DNA, 25 bp, Homo sapien
gcctccacattattggcatccctac

SEQ ID NO: 3132781 - DNA, 25 bp, Homo sapien
tccacattattggcatccctactct

SEQ ID NO: 3132782 - DNA, 25 bp, Homo sapien
ccctactctcgttactgcattttac

SEQ ID NO: 3132783 - DNA, 25 bp, Homo sapien
ttatttcatacggaaatcgaattca

SEQ ID NO: 3132784 - DNA, 25 bp, Homo sapien
catccacattagtatgattctacac

SEQ ID NO: 3132785 - DNA, 25 bp, Homo sapien
gcacatctggcatattccaatctat

SEQ ID NO: 3132786 - DNA, 25 bp, Homo sapien
ttagcattatttcatacggaaatcg

SEQ ID NO: 3132787 - DNA, 25 bp, Homo sapien
taagttaggccatgtgaaatcgcaa

SEQ ID NO: 3132788 - DNA, 25 bp, Homo sapien
caatatatgccatcatttggtgaac

SEQ ID NO: 3132789 - DNA, 25 bp, Homo sapien
gcccagctatttaaatgagcctctt

SEQ ID NO: 3132790 - DNA, 25 bp, Homo sapien
caacaatgcctagtacctggtagga

SEQ ID NO: 3132791 - DNA, 25 bp, Homo sapien
ctaatatgtagtaagtcctcggata

SEQ ID NO: 3132792 - DNA, 25 bp, Homo sapien
aagtcctcggataatggcatgaaag

SEQ ID NO: 3132793 - DNA, 25 bp, Homo sapien
ggcatgaaagattccatattttaaa

SEQ ID NO: 3132794 - DNA, 25 bp, Homo sapien
tcctagaggaccactcccagctttg

SEQ ID NO: 3132795 - DNA, 25 bp, Homo sapien
aactggacctttttacggcagagca

SEQ ID NO: 3132796 - DNA, 25 bp, Homo sapien
ggcagagcactaacaaccactcttt

SEQ ID NO: 3132797 - DNA, 25 bp, Homo sapien
gaaatgacaaacatcacttccgctg

SEQ ID NO: 3132798 - DNA, 25 bp, Homo sapien
gatttccataaggagaactggacct

SEQ ID NO: 3132799 - DNA, 25 bp, Homo sapien
tcaataaatctggtgatggagaaac

SEQ ID NO: 3132800 - DNA, 25 bp, Homo sapien
ttttcttgcaggtcaataaatctgg

SEQ ID NO: 3132801 - DNA, 25 bp, Homo sapien
caaaacagccactgacttttcttgc

SEQ ID NO: 3132802 - DNA, 25 bp, Homo sapien
ggcaaaacagccactgacttttctt

SEQ ID NO: 3132803 - DNA, 25 bp, Homo sapien
gaatgggtgattatctcctttccac

SEQ ID NO: 3132804 - DNA, 25 bp, Homo sapien
ctgggagcagcagaatccatttgta

SEQ ID NO: 3132805 - DNA, 25 bp, Homo sapien
ctattcatttttggtggccatttgc

SEQ ID NO: 3132806 - DNA, 25 bp, Homo sapien
aagccattagcttataaagctggga

SEQ ID NO: 3132807 - DNA, 25 bp, Homo sapien
aaggccttacatattcatgggcaga

SEQ ID NO: 3132808 - DNA, 25 bp, Homo sapien
tctactgcctagtaaaaggccttac

SEQ ID NO: 3132809 - DNA, 25 bp, Homo sapien
gaatcaaagctgtactgtaccaaaa

SEQ ID NO: 3132810 - DNA, 25 bp, Homo sapien
taagtcttctgcagtttgaaacgga

SEQ ID NO: 3132811 - DNA, 25 bp, Homo sapien
ctgaccttatcgatcccgagcatca

SEQ ID NO: 3132812 - DNA, 25 bp, Homo sapien
tgaccttatcgatcccgagcatcat

SEQ ID NO: 3132813 - DNA, 25 bp, Homo sapien
actctgtgcaggcattccctgtgga

SEQ ID NO: 3132814 - DNA, 25 bp, Homo sapien
ccactccaggtagagagattttgct

SEQ ID NO: 3132815 - DNA, 25 bp, Homo sapien
caggtagatattccatactctgtgc

SEQ ID NO: 3132816 - DNA, 25 bp, Homo sapien
attccctgtggaacctatagttcca

SEQ ID NO: 3132817 - DNA, 25 bp, Homo sapien
ttcactctcaagcaccacacaagag

SEQ ID NO: 3132818 - DNA, 25 bp, Homo sapien
tgtgaccctatttcatgcctctgtg

SEQ ID NO: 3132819 - DNA, 25 bp, Homo sapien
tatcctgaagatcctgagaagcaac

SEQ ID NO: 3132820 - DNA, 25 bp, Homo sapien
caacacaatagtaaagtgatcaggg

SEQ ID NO: 3132821 - DNA, 25 bp, Homo sapien
tttttaaccacagtctgcggcagcc

SEQ ID NO: 3132822 - DNA, 25 bp, Homo sapien
gcagccgggcagaaatatccactag

SEQ ID NO: 3132823 - DNA, 25 bp, Homo sapien
ggtgggatccactactccaggcaga

SEQ ID NO: 3132824 - DNA, 25 bp, Homo sapien
tctaaacaataggacggacgcagca

SEQ ID NO: 3132825 - DNA, 25 bp, Homo sapien
tcggcgtccttggcgacgctctgca

SEQ ID NO: 3132826 - DNA, 25 bp, Homo sapien
tgtctgggcaatcccgcctcccgct

SEQ ID NO: 3132827 - DNA, 25 bp, Homo sapien
cttcgctgaaggatgtctgggcaat

SEQ ID NO: 3132828 - DNA, 25 bp, Homo sapien
atgcacttcgctgaaggatgtctgg

SEQ ID NO: 3132829 - DNA, 25 bp, Homo sapien
gatcaaagtgggctccggaagctag

SEQ ID NO: 3132830 - DNA, 25 bp, Homo sapien
caataggtattatggccccgatcaa

SEQ ID NO: 3132831 - DNA, 25 bp, Homo sapien
tgccagtggcgaaggtacaagacag

SEQ ID NO: 3132832 - DNA, 25 bp, Homo sapien
tttagcttgctgctccgagggaacc

SEQ ID NO: 3132833 - DNA, 25 bp, Homo sapien
gcatctgccagccaacgccgcgcat

SEQ ID NO: 3132834 - DNA, 25 bp, Homo sapien
gacagcatctgccagccaacgccgc

SEQ ID NO: 3132835 - DNA, 25 bp, Homo sapien
agcactaaccccagcgacagggaca

SEQ ID NO: 3132836 - DNA, 25 bp, Homo sapien
cttgttcaggatcgccagcactaac

SEQ ID NO: 3132837 - DNA, 25 bp, Homo sapien
cagcccgtgacagtccactgtgctg

SEQ ID NO: 3132838 - DNA, 25 bp, Homo sapien
tgcccgagcaagagcactgcgccgg

SEQ ID NO: 3132839 - DNA, 25 bp, Homo sapien
atattcctgggcacgctgcgcagcg

SEQ ID NO: 3132840 - DNA, 25 bp, Homo sapien
tctcggtgttgcgggggatattcct

SEQ ID NO: 3132841 - DNA, 25 bp, Homo sapien
gggaagacgaagagcgcatactcac

SEQ ID NO: 3132842 - DNA, 25 bp, Homo sapien
ggtgactccgtttatggactctgga

SEQ ID NO: 3132843 - DNA, 25 bp, Homo sapien
tgctggcaatcgcaaggtgactccg

SEQ ID NO: 3132844 - DNA, 25 bp, Homo sapien
tgggctctgaaaccgacctggatgc

SEQ ID NO: 3132845 - DNA, 25 bp, Homo sapien
tgagacaagtccctaggggcctgac

SEQ ID NO: 3132846 - DNA, 25 bp, Homo sapien
cgaggctactatgcgaggtgtcgcc

SEQ ID NO: 3132847 - DNA, 25 bp, Homo sapien
ttcgcttaacggatgggacacggtc

SEQ ID NO: 3132848 - DNA, 25 bp, Homo sapien
ctcgcagtcgcccgctgagacaagt

SEQ ID NO: 3132849 - DNA, 25 bp, Homo sapien
tgcgagcaacggagcgcgaagaggg

SEQ ID NO: 3132850 - DNA, 25 bp, Homo sapien
ggcaggggaactgctgccacgtgaa

SEQ ID NO: 3132851 - DNA, 25 bp, Homo sapien
ctgcgagcaacggagcgcgaagagg

SEQ ID NO: 3132852 - DNA, 25 bp, Homo sapien
tagagactcgcaaagacagggaggc

SEQ ID NO: 3132853 - DNA, 25 bp, Homo sapien
gcggcctcggcgttcacaaagagaa

SEQ ID NO: 3132854 - DNA, 25 bp, Homo sapien
gggccgtcaacaccgggtctgcatt

SEQ ID NO: 3132855 - DNA, 25 bp, Homo sapien
tctggaagcgcctcatcaggagcgc

SEQ ID NO: 3132856 - DNA, 25 bp, Homo sapien
ctcttagatgtctaagaccagcaaa

SEQ ID NO: 3132857 - DNA, 25 bp, Homo sapien
tgtcttcgtaattcttgtgatgtta

SEQ ID NO: 3132858 - DNA, 25 bp, Homo sapien
gcaaaatctgtcttcgtaattcttg

SEQ ID NO: 3132859 - DNA, 25 bp, Homo sapien
gatgtctaagaccagcaaaatctgt

SEQ ID NO: 3132860 - DNA, 25 bp, Homo sapien
gctaatcttattctccataagctga

SEQ ID NO: 3132861 - DNA, 25 bp, Homo sapien
ctagttctttaagatcctggaatgc

SEQ ID NO: 3132862 - DNA, 25 bp, Homo sapien
taagatcctggaatgctcctctttc

SEQ ID NO: 3132863 - DNA, 25 bp, Homo sapien
gctcctctttcaatggtgctaatct

SEQ ID NO: 3132864 - DNA, 25 bp, Homo sapien
cataaattaacctgaaaaccactca

SEQ ID NO: 3132865 - DNA, 25 bp, Homo sapien
tgtacatctttaagtaccaaagcaa

SEQ ID NO: 3132866 - DNA, 25 bp, Homo sapien
caaagcaatgattatcaaggaaata

SEQ ID NO: 3132867 - DNA, 25 bp, Homo sapien
ttcaaaccctaagacatgaaattga

SEQ ID NO: 3132868 - DNA, 25 bp, Homo sapien
cacaaagcaccaccatgaaaatgaa

SEQ ID NO: 3132869 - DNA, 25 bp, Homo sapien
agtgactattaaggcaggcatgaaa

SEQ ID NO: 3132870 - DNA, 25 bp, Homo sapien
tctacttatggacaattacagggaa

SEQ ID NO: 3132871 - DNA, 25 bp, Homo sapien
cccttttgcccagtgaacctgaata

SEQ ID NO: 3132872 - DNA, 25 bp, Homo sapien
ctgtatagcttcgcagtcccaagaa

SEQ ID NO: 3132873 - DNA, 25 bp, Homo sapien
cctgtatagcttcgcagtcccaaga

SEQ ID NO: 3132874 - DNA, 25 bp, Homo sapien
gcctgtatagcttcgcagtcccaag

SEQ ID NO: 3132875 - DNA, 25 bp, Homo sapien
tcaggaaacagctgaaggtgatttc

SEQ ID NO: 3132876 - DNA, 25 bp, Homo sapien
cagcacagcctattataaatccggg

SEQ ID NO: 3132877 - DNA, 25 bp, Homo sapien
gtccaattttcccatcgcccagtga

SEQ ID NO: 3132878 - DNA, 25 bp, Homo sapien
tcaatcaattggaactgtcggaggg

SEQ ID NO: 3132879 - DNA, 25 bp, Homo sapien
aaaacaaagcttgcgcctactcgac

SEQ ID NO: 3132880 - DNA, 25 bp, Homo sapien
ttcatatatttgaacataaagcttc

SEQ ID NO: 3132881 - DNA, 25 bp, Homo sapien
tagaaaaagactacatcataatgac

SEQ ID NO: 3132882 - DNA, 25 bp, Homo sapien
aaagcttcatattcagataaaatgg

SEQ ID NO: 3132883 - DNA, 25 bp, Homo sapien
aagattttactttaacagcatgtaa

SEQ ID NO: 3132884 - DNA, 25 bp, Homo sapien
taatgttggtaacaacagttattcc

SEQ ID NO: 3132885 - DNA, 25 bp, Homo sapien
cctctgtcacatttacttgaagttc

SEQ ID NO: 3132886 - DNA, 25 bp, Homo sapien
caacagaaaggttctgatgaatcag

SEQ ID NO: 3132887 - DNA, 25 bp, Homo sapien
taacaacagttattcctgcatgcca

SEQ ID NO: 3132888 - DNA, 25 bp, Homo sapien
gatgatgcacccctcattgtgttgc

SEQ ID NO: 3132889 - DNA, 25 bp, Homo sapien
ccctcattgtgttgctaaagaatgc

SEQ ID NO: 3132890 - DNA, 25 bp, Homo sapien
tgttgctaaagaatgctgtgcacag

SEQ ID NO: 3132891 - DNA, 25 bp, Homo sapien
aaaggacttctggtgcttcaattgg

SEQ ID NO: 3132892 - DNA, 25 bp, Homo sapien
taggcatccccaataagctgattta

SEQ ID NO: 3132893 - DNA, 25 bp, Homo sapien
tgaagggctttatccataggcatcc

SEQ ID NO: 3132894 - DNA, 25 bp, Homo sapien
taagtgtaagtgcttcactgacctc

SEQ ID NO: 3132895 - DNA, 25 bp, Homo sapien
caggtaatccattaaccatagccgt

SEQ ID NO: 3132896 - DNA, 25 bp, Homo sapien
cgtaggaactgcatatgcctgtgca

SEQ ID NO: 3132897 - DNA, 25 bp, Homo sapien
tagagggaggcatatcgtaggaact

SEQ ID NO: 3132898 - DNA, 25 bp, Homo sapien
ggttctcaacagagtaaagcaggga

SEQ ID NO: 3132899 - DNA, 25 bp, Homo sapien
gagcaggtagagcaagcagttccac

SEQ ID NO: 3132900 - DNA, 25 bp, Homo sapien
acagataactcagagttaattcatg

SEQ ID NO: 3132901 - DNA, 25 bp, Homo sapien
ctcagagttaattcatgtgttgatc

SEQ ID NO: 3132902 - DNA, 25 bp, Homo sapien
taactcagagttaattcatgtgttg

SEQ ID NO: 3132903 - DNA, 25 bp, Homo sapien
agagttaattcatgtgttgatctcc

SEQ ID NO: 3132904 - DNA, 25 bp, Homo sapien
ccaaaatgccccaacctacaggaat

SEQ ID NO: 3132905 - DNA, 25 bp, Homo sapien
tatcaaaattagtgccttctggaaa

SEQ ID NO: 3132906 - DNA, 25 bp, Homo sapien
ctctgatattgcctcagctcagcaa

SEQ ID NO: 3132907 - DNA, 25 bp, Homo sapien
taagctttatcaacaagtccagagc

SEQ ID NO: 3132908 - DNA, 25 bp, Homo sapien
gaatgctataattggtgttcttatt

SEQ ID NO: 3132909 - DNA, 25 bp, Homo sapien
aaatctgagcctctagaggatttta

SEQ ID NO: 3132910 - DNA, 25 bp, Homo sapien
aacgttatttcaacaacaggaacag

SEQ ID NO: 3132911 - DNA, 25 bp, Homo sapien
agcagaaagaggtttcactgcttta

SEQ ID NO: 3132912 - DNA, 25 bp, Homo sapien
aataaaaacttctcaggttgcagac

SEQ ID NO: 3132913 - DNA, 25 bp, Homo sapien
taaccagtggcttacagcagtaaac

SEQ ID NO: 3132914 - DNA, 25 bp, Homo sapien
ggttgcagacataaactatcatggt

SEQ ID NO: 3132915 - DNA, 25 bp, Homo sapien
tagaactgatattgaaagccctgag

SEQ ID NO: 3132916 - DNA, 25 bp, Homo sapien
acaagaagacgtagattctttagga

SEQ ID NO: 3132917 - DNA, 25 bp, Homo sapien
aaatggaccccaaatagcacatcat

SEQ ID NO: 3132918 - DNA, 25 bp, Homo sapien
aatgtttcttctataaggctagaaa

SEQ ID NO: 3132919 - DNA, 25 bp, Homo sapien
tttcctttgcttgagaatcagtcac

SEQ ID NO: 3132920 - DNA, 25 bp, Homo sapien
gatcttgacccttgtggaattccat

SEQ ID NO: 3132921 - DNA, 25 bp, Homo sapien
gcctattaggtgcaatgtactcttc

SEQ ID NO: 3132922 - DNA, 25 bp, Homo sapien
cctgagaaaacgataactaagatgg

SEQ ID NO: 3132923 - DNA, 25 bp, Homo sapien
tccatactggaattacttaaaagcc

SEQ ID NO: 3132924 - DNA, 25 bp, Homo sapien
ctcccctcccccaactccatgagag

SEQ ID NO: 3132925 - DNA, 25 bp, Homo sapien
cctcccccaactccatgagaggccc

SEQ ID NO: 3132926 - DNA, 25 bp, Homo sapien
tcccccaactccatgagaggcccca

SEQ ID NO: 3132927 - DNA, 25 bp, Homo sapien
cccctcccccaactccatgagaggc

SEQ ID NO: 3132928 - DNA, 25 bp, Homo sapien
gagcctgaaactatttagtggccca

SEQ ID NO: 3132929 - DNA, 25 bp, Homo sapien
caagttatctaagtttcagtcctga

SEQ ID NO: 3132930 - DNA, 25 bp, Homo sapien
tagaagccatctgctacatgttgag

SEQ ID NO: 3132931 - DNA, 25 bp, Homo sapien
tatctacctagttcatccagtgtca

SEQ ID NO: 3132932 - DNA, 25 bp, Homo sapien
ccaccagagtaggatatgtaaatca

SEQ ID NO: 3132933 - DNA, 25 bp, Homo sapien
aaatgtgatgctgggaataccctgc

SEQ ID NO: 3132934 - DNA, 25 bp, Homo sapien
tatttacctttagactccaccagag

SEQ ID NO: 3132935 - DNA, 25 bp, Homo sapien
aactgacaattgtaggctgcctagc

SEQ ID NO: 3132936 - DNA, 25 bp, Homo sapien
cagaagagaagtagcactacaaggt

SEQ ID NO: 3132937 - DNA, 25 bp, Homo sapien
taatacataaatgaagaatggtcac

SEQ ID NO: 3132938 - DNA, 25 bp, Homo sapien
gaacaagatacagatactcccttgg

SEQ ID NO: 3132939 - DNA, 25 bp, Homo sapien
cagaagggaaacacttagattaaga

SEQ ID NO: 3132940 - DNA, 25 bp, Homo sapien
tctaggaagttaaccatgtagacaa

SEQ ID NO: 3132941 - DNA, 25 bp, Homo sapien
aacctcacagttttaggagggcagg

SEQ ID NO: 3132942 - DNA, 25 bp, Homo sapien
tgtcaataatgcgttaaatggctgt

SEQ ID NO: 3132943 - DNA, 25 bp, Homo sapien
tagattttgactaccagaaaagaac

SEQ ID NO: 3132944 - DNA, 25 bp, Homo sapien
agtaatgataattgagtaacctggg

SEQ ID NO: 3132945 - DNA, 25 bp, Homo sapien
cctggcagtaatgataattgagtaa

SEQ ID NO: 3132946 - DNA, 25 bp, Homo sapien
agtgtcctcatctttgtaagtggag

SEQ ID NO: 3132947 - DNA, 25 bp, Homo sapien
ttgtgcccgggatggtcagtgtcct

SEQ ID NO: 3132948 - DNA, 25 bp, Homo sapien
tgggctccactgaccacaaattacc

SEQ ID NO: 3132949 - DNA, 25 bp, Homo sapien
ctgggctccactgaccacaaattac

SEQ ID NO: 3132950 - DNA, 25 bp, Homo sapien
gctgggctccactgaccacaaatta

SEQ ID NO: 3132951 - DNA, 25 bp, Homo sapien
tgaacaaagtggcatccgaatacct

SEQ ID NO: 3132952 - DNA, 25 bp, Homo sapien
tccctagacaaaggtaatggcatcc

SEQ ID NO: 3132953 - DNA, 25 bp, Homo sapien
tagaactcttactgtgggcttggca

SEQ ID NO: 3132954 - DNA, 25 bp, Homo sapien
cctttgtaatactggctcatggacc

SEQ ID NO: 3132955 - DNA, 25 bp, Homo sapien
tctcccttagccatcttccaggtag

SEQ ID NO: 3132956 - DNA, 25 bp, Homo sapien
aagactactgttgtcagcctctgag

SEQ ID NO: 3132957 - DNA, 25 bp, Homo sapien
ctgggtgttgcccaatgagatgtga

SEQ ID NO: 3132958 - DNA, 25 bp, Homo sapien
tcaagtggagggatgcgtgcgagtg

SEQ ID NO: 3132959 - DNA, 25 bp, Homo sapien
gccctattacccctgtaagaatgga

SEQ ID NO: 3132960 - DNA, 25 bp, Homo sapien
gtcaagatgacagcagagaactagt

SEQ ID NO: 3132961 - DNA, 25 bp, Homo sapien
gaaggctgactgaaatgagccccaa

SEQ ID NO: 3132962 - DNA, 25 bp, Homo sapien
gaactgagttattcctggcagatgg

SEQ ID NO: 3132963 - DNA, 25 bp, Homo sapien
tgttttaccgattcatcagccatcc

SEQ ID NO: 3132964 - DNA, 25 bp, Homo sapien
ttcagtggatgaatgtgcactctac

SEQ ID NO: 3132965 - DNA, 25 bp, Homo sapien
ttgtcacagcgaagaaaccatgcat

SEQ ID NO: 3132966 - DNA, 25 bp, Homo sapien
caatgtatcgagtgaacgtaagcct

SEQ ID NO: 3132967 - DNA, 25 bp, Homo sapien
gactaatttgaccatactactgagg

SEQ ID NO: 3132968 - DNA, 25 bp, Homo sapien
gaggactctacctgctgtcttgcat

SEQ ID NO: 3132969 - DNA, 25 bp, Homo sapien
gatcaattccctcgtcttacctagt

SEQ ID NO: 3132970 - DNA, 25 bp, Homo sapien
cacagtcaagcatagatcagtaatc

SEQ ID NO: 3132971 - DNA, 25 bp, Homo sapien
tccatatagtgccatgctgtatggg

SEQ ID NO: 3132972 - DNA, 25 bp, Homo sapien
tattccatatagtgccatgctgtat

SEQ ID NO: 3132973 - DNA, 25 bp, Homo sapien
catatagtgccatgctgtatgggtt

SEQ ID NO: 3132974 - DNA, 25 bp, Homo sapien
agtattccatatagtgccatgctgt

SEQ ID NO: 3132975 - DNA, 25 bp, Homo sapien
tatcatattcggagaatgcttccca

SEQ ID NO: 3132976 - DNA, 25 bp, Homo sapien
actggctccagatcccattcccaag

SEQ ID NO: 3132977 - DNA, 25 bp, Homo sapien
gcaacaagtgataatgccagcactc

SEQ ID NO: 3132978 - DNA, 25 bp, Homo sapien
gcactcgtcagaagataaccacatt

SEQ ID NO: 3132979 - DNA, 25 bp, Homo sapien
tacatgcagtggagtcgggtgaacc

SEQ ID NO: 3132980 - DNA, 25 bp, Homo sapien
gggcttagtcatgtattttccattc

SEQ ID NO: 3132981 - DNA, 25 bp, Homo sapien
ttccattccaaggtacacatgcacg

SEQ ID NO: 3132982 - DNA, 25 bp, Homo sapien
gtcgggtgaacctcagaacaagcct

SEQ ID NO: 3132983 - DNA, 25 bp, Homo sapien
tcagaaaggtttggatctctcgctc

SEQ ID NO: 3132984 - DNA, 25 bp, Homo sapien
aggaggcacagtaacacagaatggc

SEQ ID NO: 3132985 - DNA, 25 bp, Homo sapien
aagaatagcaggatacagtgcagag

SEQ ID NO: 3132986 - DNA, 25 bp, Homo sapien
caatcctgagtagcatgaaaaaggt

SEQ ID NO: 3132987 - DNA, 25 bp, Homo sapien
tactgggaagataagtggacctctc

SEQ ID NO: 3132988 - DNA, 25 bp, Homo sapien
tccttaaaagctgtgggtgtttgcc

SEQ ID NO: 3132989 - DNA, 25 bp, Homo sapien
gaacagactccaagaccaagggaac

SEQ ID NO: 3132990 - DNA, 25 bp, Homo sapien
catagaagctgaatgtggtgcctcg

SEQ ID NO: 3132991 - DNA, 25 bp, Homo sapien
ggagtgcacaccgaagagttttcaa

SEQ ID NO: 3132992 - DNA, 25 bp, Homo sapien
ttcctgcgctggcaagggagtgcac

SEQ ID NO: 3132993 - DNA, 25 bp, Homo sapien
tctccatttgcagtagggtagcttc

SEQ ID NO: 3132994 - DNA, 25 bp, Homo sapien
gcacaaactgggtctgagtcataat

SEQ ID NO: 3132995 - DNA, 25 bp, Homo sapien
cttcttggaaaaggcgaaagtctga

SEQ ID NO: 3132996 - DNA, 25 bp, Homo sapien
ctgacttcttggaaaaggcgaaagt

SEQ ID NO: 3132997 - DNA, 25 bp, Homo sapien
ggaaaaggcgaaagtctgatacata

SEQ ID NO: 3132998 - DNA, 25 bp, Homo sapien
cttggaaaaggcgaaagtctgatac

SEQ ID NO: 3132999 - DNA, 25 bp, Homo sapien
ccaaatagccaaagacagatgaggg

SEQ ID NO: 3133000 - DNA, 25 bp, Homo sapien
cacattgacaatgcacgcaatttgc

SEQ ID NO: 3133001 - DNA, 25 bp, Homo sapien
cagctatgttaattcaagcctggat

SEQ ID NO: 3133002 - DNA, 25 bp, Homo sapien
cagatgagggactatgcccatgtta

SEQ ID NO: 3133003 - DNA, 25 bp, Homo sapien
gacacaagcatagtagagattggga

SEQ ID NO: 3133004 - DNA, 25 bp, Homo sapien
gctaaagttaatagtgccacatggg

SEQ ID NO: 3133005 - DNA, 25 bp, Homo sapien
gtgtttcccctatgtctgtacgtgg

SEQ ID NO: 3133006 - DNA, 25 bp, Homo sapien
tcctctgggagaaggcatgaaagaa

SEQ ID NO: 3133007 - DNA, 25 bp, Homo sapien
catagaggacgtgacagctcataac

SEQ ID NO: 3133008 - DNA, 25 bp, Homo sapien
gaaagtcaaagtcgaaacgtccatc

SEQ ID NO: 3133009 - DNA, 25 bp, Homo sapien
gcaaatggacttacttcctaagaca

SEQ ID NO: 3133010 - DNA, 25 bp, Homo sapien
caaaaccacagcaaatggacttact

SEQ ID NO: 3133011 - DNA, 25 bp, Homo sapien
tcagggagtaacttgcccaccaaca

SEQ ID NO: 3133012 - DNA, 25 bp, Homo sapien
ggagatcagaaacactgttattcat

SEQ ID NO: 3133013 - DNA, 25 bp, Homo sapien
tggagatcagaaacactgttattca

SEQ ID NO: 3133014 - DNA, 25 bp, Homo sapien
ctggagatcagaaacactgttattc

SEQ ID NO: 3133015 - DNA, 25 bp, Homo sapien
ctgccttcccccgatgacggccatt

SEQ ID NO: 3133016 - DNA, 25 bp, Homo sapien
tgtgtcataccctttagggtcggta

SEQ ID NO: 3133017 - DNA, 25 bp, Homo sapien
gaggcacacatcgacacacagataa

SEQ ID NO: 3133018 - DNA, 25 bp, Homo sapien
agcctctaccttcctggcttaggtg

SEQ ID NO: 3133019 - DNA, 25 bp, Homo sapien
gcctctaccttcctggcttaggtga

SEQ ID NO: 3133020 - DNA, 25 bp, Homo sapien
ggaccccagaggcacacatcgacac

SEQ ID NO: 3133021 - DNA, 25 bp, Homo sapien
cagtgtttgggtacgatgactcctc

SEQ ID NO: 3133022 - DNA, 25 bp, Homo sapien
aaaaattatgcccaccacactcgca

SEQ ID NO: 3133023 - DNA, 25 bp, Homo sapien
tcccgttgtggctctgaataaaaag

SEQ ID NO: 3133024 - DNA, 25 bp, Homo sapien
aaaatgctttgtaaaggcctggtca

SEQ ID NO: 3133025 - DNA, 25 bp, Homo sapien
tctcgtcacttttaaactactagca

SEQ ID NO: 3133026 - DNA, 25 bp, Homo sapien
tgcattccctgatatattgccataa

SEQ ID NO: 3133027 - DNA, 25 bp, Homo sapien
taatcaccaaagctacacatatgca

SEQ ID NO: 3133028 - DNA, 25 bp, Homo sapien
tttcccaggcatgatatgacctatg

SEQ ID NO: 3133029 - DNA, 25 bp, Homo sapien
ccaaaccagtagacttttcaatcca

SEQ ID NO: 3133030 - DNA, 25 bp, Homo sapien
ctgccaaaccagtagacttttcaat

SEQ ID NO: 3133031 - DNA, 25 bp, Homo sapien
gccaaaccagtagacttttcaatcc

SEQ ID NO: 3133032 - DNA, 25 bp, Homo sapien
tgccaaaccagtagacttttcaatc

SEQ ID NO: 3133033 - DNA, 25 bp, Homo sapien
cctggtcctcgcagatcctgcttcc

SEQ ID NO: 3133034 - DNA, 25 bp, Homo sapien
tcctctaggaaggcaatgcatctgt

SEQ ID NO: 3133035 - DNA, 25 bp, Homo sapien
gagcccagtgagaacctctgcctcc

SEQ ID NO: 3133036 - DNA, 25 bp, Homo sapien
agagcccagtgagaacctctgcctc

SEQ ID NO: 3133037 - DNA, 25 bp, Homo sapien
ttttatgtcaactgccccacggaaa

SEQ ID NO: 3133038 - DNA, 25 bp, Homo sapien
ttccttgggattgcctgaatttggt

SEQ ID NO: 3133039 - DNA, 25 bp, Homo sapien
gctttccttgggattgcctgaattt

SEQ ID NO: 3133040 - DNA, 25 bp, Homo sapien
gaaagctttccttgggattgcctga

SEQ ID NO: 3133041 - DNA, 25 bp, Homo sapien
caaatcaaggtcttgtgcatattca

SEQ ID NO: 3133042 - DNA, 25 bp, Homo sapien
gacccacaatagaatagtcatttct

SEQ ID NO: 3133043 - DNA, 25 bp, Homo sapien
gtaacttcatgtcaaaatgacccac

SEQ ID NO: 3133044 - DNA, 25 bp, Homo sapien
cctgtctccccttatgatgcatttt

SEQ ID NO: 3133045 - DNA, 25 bp, Homo sapien
gcacatcagtattaacttcaaaact

SEQ ID NO: 3133046 - DNA, 25 bp, Homo sapien
gcataaaagcacatcagtattaact

SEQ ID NO: 3133047 - DNA, 25 bp, Homo sapien
agaaagcaattaaggtatggaccat

SEQ ID NO: 3133048 - DNA, 25 bp, Homo sapien
aagaaagcaattaaggtatggacca

SEQ ID NO: 3133049 - DNA, 25 bp, Homo sapien
tgccatacctttagtgacaggctgg

SEQ ID NO: 3133050 - DNA, 25 bp, Homo sapien
tgtaaacaggaaaggatctgttctc

SEQ ID NO: 3133051 - DNA, 25 bp, Homo sapien
gatgtgatttgcaattgtgctacga

SEQ ID NO: 3133052 - DNA, 25 bp, Homo sapien
tctgttctctgccatacctttagtg

SEQ ID NO: 3133053 - DNA, 25 bp, Homo sapien
gccagaaagcactcaagcaaacctt

SEQ ID NO: 3133054 - DNA, 25 bp, Homo sapien
tgtttccagacaaatcggcaaaatc

SEQ ID NO: 3133055 - DNA, 25 bp, Homo sapien
taatgcagtctccaggttaatctgt

SEQ ID NO: 3133056 - DNA, 25 bp, Homo sapien
ggtgagctgtatgtttgcccatatc

SEQ ID NO: 3133057 - DNA, 25 bp, Homo sapien
tctgcttacgaatgtcataagccat

SEQ ID NO: 3133058 - DNA, 25 bp, Homo sapien
aaacacactcatctgcttacgaatg

SEQ ID NO: 3133059 - DNA, 25 bp, Homo sapien
cacaaacacactcatctgcttacga

SEQ ID NO: 3133060 - DNA, 25 bp, Homo sapien
cactcatctgcttacgaatgtcata

SEQ ID NO: 3133061 - DNA, 25 bp, Homo sapien
agagccctgaatgccccatcttcaa

SEQ ID NO: 3133062 - DNA, 25 bp, Homo sapien
gctgatctggttgtaatccagttgc

SEQ ID NO: 3133063 - DNA, 25 bp, Homo sapien
cagctgatctggttgtaatccagtt

SEQ ID NO: 3133064 - DNA, 25 bp, Homo sapien
agctgatctggttgtaatccagttg

SEQ ID NO: 3133065 - DNA, 25 bp, Homo sapien
tagcattttcctatgtgcaggtgaa

SEQ ID NO: 3133066 - DNA, 25 bp, Homo sapien
gatttgttggctcagtttacctaag

SEQ ID NO: 3133067 - DNA, 25 bp, Homo sapien
tagagacccagatcatgcatggacc

SEQ ID NO: 3133068 - DNA, 25 bp, Homo sapien
acagggcatgtcagctagagaccca

SEQ ID NO: 3133069 - DNA, 25 bp, Homo sapien
gagcatcagtggtcctgttggatga

SEQ ID NO: 3133070 - DNA, 25 bp, Homo sapien
gaattaggggttgcaagttcactgc

SEQ ID NO: 3133071 - DNA, 25 bp, Homo sapien
gaagttgatactggacaaggatttg

SEQ ID NO: 3133072 - DNA, 25 bp, Homo sapien
aagaaggcaagttcctctgaaggag

SEQ ID NO: 3133073 - DNA, 25 bp, Homo sapien
aaagtcctaagtttaggcatatggt

SEQ ID NO: 3133074 - DNA, 25 bp, Homo sapien
cctaagtttaggcatatggttgaaa

SEQ ID NO: 3133075 - DNA, 25 bp, Homo sapien
tatggttgaaacttgccacagaaag

SEQ ID NO: 3133076 - DNA, 25 bp, Homo sapien
cagaaagtctagtaatgttgttatt

SEQ ID NO: 3133077 - DNA, 25 bp, Homo sapien
acccgaggcctttggcgaagccagt

SEQ ID NO: 3133078 - DNA, 25 bp, Homo sapien
ccaggtggcagtcacaatacaggtt

SEQ ID NO: 3133079 - DNA, 25 bp, Homo sapien
cggctacattatggcctctcaggtg

SEQ ID NO: 3133080 - DNA, 25 bp, Homo sapien
tacactgagtgtacagaccaacccg

SEQ ID NO: 3133081 - DNA, 25 bp, Homo sapien
ataacaggatacaataaacacaata

SEQ ID NO: 3133082 - DNA, 25 bp, Homo sapien
caggatacaataaacacaataacat

SEQ ID NO: 3133083 - DNA, 25 bp, Homo sapien
aacaggatacaataaacacaataac

SEQ ID NO: 3133084 - DNA, 25 bp, Homo sapien
aggatacaataaacacaataacatc

SEQ ID NO: 3133085 - DNA, 25 bp, Homo sapien
caagaaggagccataaatgactggt

SEQ ID NO: 3133086 - DNA, 25 bp, Homo sapien
acaagaaggagccataaatgactgg

SEQ ID NO: 3133087 - DNA, 25 bp, Homo sapien
aagaaggagccataaatgactggtg

SEQ ID NO: 3133088 - DNA, 25 bp, Homo sapien
gcagggcagtgcaaaacactacaag

SEQ ID NO: 3133089 - DNA, 25 bp, Homo sapien
gacctttcccacgacagtctacgat

SEQ ID NO: 3133090 - DNA, 25 bp, Homo sapien
tcccacgacagtctacgatattgtt

SEQ ID NO: 3133091 - DNA, 25 bp, Homo sapien
tgtggggatctcagtgagacctttc

SEQ ID NO: 3133092 - DNA, 25 bp, Homo sapien
atttgtggggatctcagtgagacct

SEQ ID NO: 3133093 - DNA, 25 bp, Homo sapien
gtggggagataagaaagaatttcag

SEQ ID NO: 3133094 - DNA, 25 bp, Homo sapien
agcagtatttgcctccggagatcat

SEQ ID NO: 3133095 - DNA, 25 bp, Homo sapien
gaaccttctaagaacaatatgcagg

SEQ ID NO: 3133096 - DNA, 25 bp, Homo sapien
aacaatatgcaggtcaaattccaag

SEQ ID NO: 3133097 - DNA, 25 bp, Homo sapien
agaccccagcttggttaactggcag

SEQ ID NO: 3133098 - DNA, 25 bp, Homo sapien
gagggatgactttgattgtgttctg

SEQ ID NO: 3133099 - DNA, 25 bp, Homo sapien
tccaggagggatgactttgattgtg

SEQ ID NO: 3133100 - DNA, 25 bp, Homo sapien
tttgattgtgttctgttccaaacgt

SEQ ID NO: 3133101 - DNA, 25 bp, Homo sapien
gatgactttgattgtgttctgttcc

SEQ ID NO: 3133102 - DNA, 25 bp, Homo sapien
ggaaagcatctggtgcaagttcaga

SEQ ID NO: 3133103 - DNA, 25 bp, Homo sapien
tctggtgcaagttcagagatctgat

SEQ ID NO: 3133104 - DNA, 25 bp, Homo sapien
tcagagagcgtagtccttggaaagc

SEQ ID NO: 3133105 - DNA, 25 bp, Homo sapien
agtgaattcagagagcgtagtcctt

SEQ ID NO: 3133106 - DNA, 25 bp, Homo sapien
cttttggggagttctgtgattttat

SEQ ID NO: 3133107 - DNA, 25 bp, Homo sapien
gggagttctgtgattttatttccat

SEQ ID NO: 3133108 - DNA, 25 bp, Homo sapien
aggagctgtaaggaaaacagtcctt

SEQ ID NO: 3133109 - DNA, 25 bp, Homo sapien
ataaacttttggggagttctgtgat

SEQ ID NO: 3133110 - DNA, 25 bp, Homo sapien
ggtgactcaattggctgtgctcttt

SEQ ID NO: 3133111 - DNA, 25 bp, Homo sapien
aattggctgtgctctttgattcccc

SEQ ID NO: 3133112 - DNA, 25 bp, Homo sapien
gctgtgctctttgattccccatcag

SEQ ID NO: 3133113 - DNA, 25 bp, Homo sapien
tgactcaattggctgtgctctttga

SEQ ID NO: 3133114 - DNA, 25 bp, Homo sapien
atagtttgaatggcccgaagaggtg

SEQ ID NO: 3133115 - DNA, 25 bp, Homo sapien
agtttgaatggcccgaagaggtgaa

SEQ ID NO: 3133116 - DNA, 25 bp, Homo sapien
ttgaatggcccgaagaggtgaaaag

SEQ ID NO: 3133117 - DNA, 25 bp, Homo sapien
tttgaatggcccgaagaggtgaaaa

SEQ ID NO: 3133118 - DNA, 25 bp, Homo sapien
tgaaaagcatctacccgaaggcagt

SEQ ID NO: 3133119 - DNA, 25 bp, Homo sapien
tgaaaaggtccccttggcgatggtc

SEQ ID NO: 3133120 - DNA, 25 bp, Homo sapien
caagttgtggagatcctgaaaagca

SEQ ID NO: 3133121 - DNA, 25 bp, Homo sapien
cccttggcgatggtctgaagcttgt

SEQ ID NO: 3133122 - DNA, 25 bp, Homo sapien
tctcaatcgggttggtatggagata

SEQ ID NO: 3133123 - DNA, 25 bp, Homo sapien
aatccgctagccacttgagatggca

SEQ ID NO: 3133124 - DNA, 25 bp, Homo sapien
tggtgcaacgggcaccactggtctc

SEQ ID NO: 3133125 - DNA, 25 bp, Homo sapien
tgagatggcagtcacaaataaaggg

SEQ ID NO: 3133126 - DNA, 25 bp, Homo sapien
gcttgacggaaccatgttttactca

SEQ ID NO: 3133127 - DNA, 25 bp, Homo sapien
tagaaagctgcgtgacgttccatgg

SEQ ID NO: 3133128 - DNA, 25 bp, Homo sapien
gatcaagcacaacagaaaatctcgc

SEQ ID NO: 3133129 - DNA, 25 bp, Homo sapien
tcatacctcgcaaccacatggttag

SEQ ID NO: 3133130 - DNA, 25 bp, Homo sapien
ctccgggattttgttgagcttttga

SEQ ID NO: 3133131 - DNA, 25 bp, Homo sapien
cttttgattagagcaatctactgtg

SEQ ID NO: 3133132 - DNA, 25 bp, Homo sapien
aactctgcagtgtactggggaatgt

SEQ ID NO: 3133133 - DNA, 25 bp, Homo sapien
ttcagggcaagccagatccgcaaag

SEQ ID NO: 3133134 - DNA, 25 bp, Homo sapien
gcacgtttctgcctggatatatgtt

SEQ ID NO: 3133135 - DNA, 25 bp, Homo sapien
ttttttggacatatacataggaggg

SEQ ID NO: 3133136 - DNA, 25 bp, Homo sapien
tcacatggtaaatcgtgattaactc

SEQ ID NO: 3133137 - DNA, 25 bp, Homo sapien
cattccagtgggtctaaaatggtat

SEQ ID NO: 3133138 - DNA, 25 bp, Homo sapien
ctgtggcttccaacacggtaaattc

SEQ ID NO: 3133139 - DNA, 25 bp, Homo sapien
tcctgtggcttccaacacggtaaat

SEQ ID NO: 3133140 - DNA, 25 bp, Homo sapien
tgtggcttccaacacggtaaattca

SEQ ID NO: 3133141 - DNA, 25 bp, Homo sapien
attcctgtggcttccaacacggtaa

SEQ ID NO: 3133142 - DNA, 25 bp, Homo sapien
tttgaggctttccaatcccttgaac

SEQ ID NO: 3133143 - DNA, 25 bp, Homo sapien
cattttccaaacgattactcgtaag

SEQ ID NO: 3133144 - DNA, 25 bp, Homo sapien
ctcctcaatatctgtgatcttattg

SEQ ID NO: 3133145 - DNA, 25 bp, Homo sapien
tcccttgaacatcttatgctgcaca

SEQ ID NO: 3133146 - DNA, 25 bp, Homo sapien
cccacacaggttattcgattgcttc

SEQ ID NO: 3133147 - DNA, 25 bp, Homo sapien
taaagaatggagagtatcaaatgcc

SEQ ID NO: 3133148 - DNA, 25 bp, Homo sapien
gtcctatgaaactgtcattccccac

SEQ ID NO: 3133149 - DNA, 25 bp, Homo sapien
gcccctggtgcaactgtagtaattt

SEQ ID NO: 3133150 - DNA, 25 bp, Homo sapien
caagccaggtagcagttacagttaa

SEQ ID NO: 3133151 - DNA, 25 bp, Homo sapien
catctaggatttcccgtgacaattc

SEQ ID NO: 3133152 - DNA, 25 bp, Homo sapien
cagttaaaaggattggccaagaggt

SEQ ID NO: 3133153 - DNA, 25 bp, Homo sapien
ggatttcccgtgacaattctcttct

SEQ ID NO: 3133154 - DNA, 25 bp, Homo sapien
caggaaaaccaagatttgtggtctt

SEQ ID NO: 3133155 - DNA, 25 bp, Homo sapien
gaaaaccaagatttgtggtcttgaa

SEQ ID NO: 3133156 - DNA, 25 bp, Homo sapien
aatacaggaaaaccaagatttgtgg

SEQ ID NO: 3133157 - DNA, 25 bp, Homo sapien
aaccaagatttgtggtcttgaaggt

SEQ ID NO: 3133158 - DNA, 25 bp, Homo sapien
tggaatacctttcggcaagaccttc

SEQ ID NO: 3133159 - DNA, 25 bp, Homo sapien
caagcaagtacattcagtaggacag

SEQ ID NO: 3133160 - DNA, 25 bp, Homo sapien
catcggacgactgtatccaagcaag

SEQ ID NO: 3133161 - DNA, 25 bp, Homo sapien
caaacccttgttgctacatcggacg

SEQ ID NO: 3133162 - DNA, 25 bp, Homo sapien
taaatgtttgtagttggagagttcc

SEQ ID NO: 3133163 - DNA, 25 bp, Homo sapien
aagtgttaaatgtttgtagttggag

SEQ ID NO: 3133164 - DNA, 25 bp, Homo sapien
tgtagttggagagttccttgggaac

SEQ ID NO: 3133165 - DNA, 25 bp, Homo sapien
ggagagttccttgggaaccagtgta

SEQ ID NO: 3133166 - DNA, 25 bp, Homo sapien
tatctggaaggttcactaaatcttc

SEQ ID NO: 3133167 - DNA, 25 bp, Homo sapien
cgcctgatcgatattcaatgaagat

SEQ ID NO: 3133168 - DNA, 25 bp, Homo sapien
cagaaccgcaatgagcaaggaggga

SEQ ID NO: 3133169 - DNA, 25 bp, Homo sapien
tcttgctaagacactccatcgcctg

SEQ ID NO: 3133170 - DNA, 25 bp, Homo sapien
gcgtgcttattctgttgttacttaa

SEQ ID NO: 3133171 - DNA, 25 bp, Homo sapien
gaaagcgtgcttattctgttgttac

SEQ ID NO: 3133172 - DNA, 25 bp, Homo sapien
tgaagctctgattagaaagcgtgct

SEQ ID NO: 3133173 - DNA, 25 bp, Homo sapien
agctgggtcatgttgctgaagctct

SEQ ID NO: 3133174 - DNA, 25 bp, Homo sapien
gactttaatccatcaaaggtgcgag

SEQ ID NO: 3133175 - DNA, 25 bp, Homo sapien
gaggaatacatctcagacggttgta

SEQ ID NO: 3133176 - DNA, 25 bp, Homo sapien
tcaaaggtgcgaggaggaatacatc

SEQ ID NO: 3133177 - DNA, 25 bp, Homo sapien
tctcagacggttgtaactaagaatt

SEQ ID NO: 3133178 - DNA, 25 bp, Homo sapien
gaaagcaccttcaggcacaacagaa

SEQ ID NO: 3133179 - DNA, 25 bp, Homo sapien
gatgtgataatgcagaaagatcatt

SEQ ID NO: 3133180 - DNA, 25 bp, Homo sapien
tgcagaaagatcattgaaagcacct

SEQ ID NO: 3133181 - DNA, 25 bp, Homo sapien
cagaaatgtcatttccatgtagaga

SEQ ID NO: 3133182 - DNA, 25 bp, Homo sapien
gatactgtggaagttttaatgcccc

SEQ ID NO: 3133183 - DNA, 25 bp, Homo sapien
tgtatgtcagattcaaacccttcca

SEQ ID NO: 3133184 - DNA, 25 bp, Homo sapien
gacaaggcacaaacaaacctgcacg

SEQ ID NO: 3133185 - DNA, 25 bp, Homo sapien
aatgccccgtttaagaatcagaatg

SEQ ID NO: 3133186 - DNA, 25 bp, Homo sapien
gcaattccaggctccttatattccg

SEQ ID NO: 3133187 - DNA, 25 bp, Homo sapien
agttgtgagtaaaagtttatctgcc

SEQ ID NO: 3133188 - DNA, 25 bp, Homo sapien
ggataaccactgcatgttacaatca

SEQ ID NO: 3133189 - DNA, 25 bp, Homo sapien
tatattccgacttcacccagtcgga

SEQ ID NO: 3133190 - DNA, 25 bp, Homo sapien
aggaagccacagggccctggcagcc

SEQ ID NO: 3133191 - DNA, 25 bp, Homo sapien
tatgaggaagccacagggccctggc

SEQ ID NO: 3133192 - DNA, 25 bp, Homo sapien
ctggtatgaggaagccacagggccc

SEQ ID NO: 3133193 - DNA, 25 bp, Homo sapien
tgaggaagccacagggccctggcag

SEQ ID NO: 3133194 - DNA, 25 bp, Homo sapien
gtgccatcatttttacacggatttg

SEQ ID NO: 3133195 - DNA, 25 bp, Homo sapien
ggtgcatcggtaaaagtcaactgga

SEQ ID NO: 3133196 - DNA, 25 bp, Homo sapien
gaaaccatatggacaggtgcatcgg

SEQ ID NO: 3133197 - DNA, 25 bp, Homo sapien
ttagctagaatattgacatccacag

SEQ ID NO: 3133198 - DNA, 25 bp, Homo sapien
gggcaagtatagtcgagtgaagtag

SEQ ID NO: 3133199 - DNA, 25 bp, Homo sapien
agaaggggcaagtatagtcgagtga

SEQ ID NO: 3133200 - DNA, 25 bp, Homo sapien
gaagaaggggcaagtatagtcgagt

SEQ ID NO: 3133201 - DNA, 25 bp, Homo sapien
aaggggcaagtatagtcgagtgaag

SEQ ID NO: 3133202 - DNA, 25 bp, Homo sapien
gcaagttcctccatgtttacatggg

SEQ ID NO: 3133203 - DNA, 25 bp, Homo sapien
ctttaagtggcaagttcctccatgt

SEQ ID NO: 3133204 - DNA, 25 bp, Homo sapien
tttacatgggttactgatgcaggca

SEQ ID NO: 3133205 - DNA, 25 bp, Homo sapien
ctgatgcaggcatgaattgggacat

SEQ ID NO: 3133206 - DNA, 25 bp, Homo sapien
ttcacaatcatcaacgttgacttca

SEQ ID NO: 3133207 - DNA, 25 bp, Homo sapien
tgtagttattaatgccatcgacaca

SEQ ID NO: 3133208 - DNA, 25 bp, Homo sapien
tcaacgttgacttcacaattttctc

SEQ ID NO: 3133209 - DNA, 25 bp, Homo sapien
taatgccatcgacacatgtagaatt

SEQ ID NO: 3133210 - DNA, 25 bp, Homo sapien
tacatctgattttcaagacacctac

SEQ ID NO: 3133211 - DNA, 25 bp, Homo sapien
ggttagctgaaactatctttaagtc

SEQ ID NO: 3133212 - DNA, 25 bp, Homo sapien
taatagatgcgtatgtttgaacaga

SEQ ID NO: 3133213 - DNA, 25 bp, Homo sapien
acagatatactgatggaaggcaaaa

SEQ ID NO: 3133214 - DNA, 25 bp, Homo sapien
aaacggcaactttgagtagagtgat

SEQ ID NO: 3133215 - DNA, 25 bp, Homo sapien
aatgaaaacggcaactttgagtaga

SEQ ID NO: 3133216 - DNA, 25 bp, Homo sapien
ttctaattcggagccacaaaaaata

SEQ ID NO: 3133217 - DNA, 25 bp, Homo sapien
cggcaactttgagtagagtgatcaa

SEQ ID NO: 3133218 - DNA, 25 bp, Homo sapien
ttttccacctcattcagattagcag

SEQ ID NO: 3133219 - DNA, 25 bp, Homo sapien
cagtcagtctgtaataagcggtgca

SEQ ID NO: 3133220 - DNA, 25 bp, Homo sapien
ggagtgctccatgacaaggctcccc

SEQ ID NO: 3133221 - DNA, 25 bp, Homo sapien
ctacatttgctgctgtggccagatg

SEQ ID NO: 3133222 - DNA, 25 bp, Homo sapien
tccccgtgcttcaagagagtcaaga

SEQ ID NO: 3133223 - DNA, 25 bp, Homo sapien
ggatgcactttgaatcgtgctggca

SEQ ID NO: 3133224 - DNA, 25 bp, Homo sapien
ttaggatgcactttgaatcgtgctg

SEQ ID NO: 3133225 - DNA, 25 bp, Homo sapien
taggatgcactttgaatcgtgctgg

SEQ ID NO: 3133226 - DNA, 25 bp, Homo sapien
atgcactttgaatcgtgctggcagg

SEQ ID NO: 3133227 - DNA, 25 bp, Homo sapien
ttgtcttggcagtcgtcaaaatcga

SEQ ID NO: 3133228 - DNA, 25 bp, Homo sapien
ctacgtaccctggtgtgcagtcaca

SEQ ID NO: 3133229 - DNA, 25 bp, Homo sapien
caaaatcgatgtcgcagtgttcacc

SEQ ID NO: 3133230 - DNA, 25 bp, Homo sapien
gtatagccgttcactgcatctgtgc

SEQ ID NO: 3133231 - DNA, 25 bp, Homo sapien
ctggtacgagggaggaccatgggtg

SEQ ID NO: 3133232 - DNA, 25 bp, Homo sapien
ggaccatgggtggagaaaactcaca

SEQ ID NO: 3133233 - DNA, 25 bp, Homo sapien
tggtacgagggaggaccatgggtgg

SEQ ID NO: 3133234 - DNA, 25 bp, Homo sapien
ggtacgagggaggaccatgggtgga

SEQ ID NO: 3133235 - DNA, 25 bp, Homo sapien
gaagtgttatgttcgtctgaggccg

SEQ ID NO: 3133236 - DNA, 25 bp, Homo sapien
cacttttctccctgatagccaggca

SEQ ID NO: 3133237 - DNA, 25 bp, Homo sapien
tctgaggccgaaccttggctgaagg

SEQ ID NO: 3133238 - DNA, 25 bp, Homo sapien
tattctgacgatacactgagctcca

SEQ ID NO: 3133239 - DNA, 25 bp, Homo sapien
tctttgtcacccttatacaggagga

SEQ ID NO: 3133240 - DNA, 25 bp, Homo sapien
gatagagttctaccgcgatatggtc

SEQ ID NO: 3133241 - DNA, 25 bp, Homo sapien
tatacaggaggattccgctgtcttc

SEQ ID NO: 3133242 - DNA, 25 bp, Homo sapien
tgagagccggtgtcatagctggcac

SEQ ID NO: 3133243 - DNA, 25 bp, Homo sapien
cctactgcttaaatttaggctgcca

SEQ ID NO: 3133244 - DNA, 25 bp, Homo sapien
gagcagattattagcctacttgaga

SEQ ID NO: 3133245 - DNA, 25 bp, Homo sapien
aagaaactcactttgaaagagcaga

SEQ ID NO: 3133246 - DNA, 25 bp, Homo sapien
tactgttatcatggtagcgaatgag

SEQ ID NO: 3133247 - DNA, 25 bp, Homo sapien
gacaaggaaactaggcctgtgccaa

SEQ ID NO: 3133248 - DNA, 25 bp, Homo sapien
aaactgtagattaggacttaccaga

SEQ ID NO: 3133249 - DNA, 25 bp, Homo sapien
acatcgaccttaggcaactgctggc

SEQ ID NO: 3133250 - DNA, 25 bp, Homo sapien
aaacaacttggtgggatctcagtac

SEQ ID NO: 3133251 - DNA, 25 bp, Homo sapien
tcagagtggactgctttgacaagtt

SEQ ID NO: 3133252 - DNA, 25 bp, Homo sapien
gactctgatccaaggcaagtagttc

SEQ ID NO: 3133253 - DNA, 25 bp, Homo sapien
tccacaatgtggaagtttccatcat

SEQ ID NO: 3133254 - DNA, 25 bp, Homo sapien
ggagagtcaaaattcagagtggact

SEQ ID NO: 3133255 - DNA, 25 bp, Homo sapien
tcaaagcaggcatcagtcagacagc

SEQ ID NO: 3133256 - DNA, 25 bp, Homo sapien
taaactctggactactggctggaag

SEQ ID NO: 3133257 - DNA, 25 bp, Homo sapien
gaactgtagcacactctgggtctga

SEQ ID NO: 3133258 - DNA, 25 bp, Homo sapien
taaggatttctggttctgcgtgcac

SEQ ID NO: 3133259 - DNA, 25 bp, Homo sapien
tcattggtccgttggtcacagaggg

SEQ ID NO: 3133260 - DNA, 25 bp, Homo sapien
gatgtaaaggttccggatgcagccg

SEQ ID NO: 3133261 - DNA, 25 bp, Homo sapien
tttccaaggcaagggtcattggtcc

SEQ ID NO: 3133262 - DNA, 25 bp, Homo sapien
ggcctggcgcagagatgccacgtta

SEQ ID NO: 3133263 - DNA, 25 bp, Homo sapien
cctggcatgggttaaacagatcctc

SEQ ID NO: 3133264 - DNA, 25 bp, Homo sapien
cgcattgatgggcaagcaggtgcca

SEQ ID NO: 3133265 - DNA, 25 bp, Homo sapien
gcttgcacttgatcgcctggcatgg

SEQ ID NO: 3133266 - DNA, 25 bp, Homo sapien
ttacagctgtaggagaacgcattga

SEQ ID NO: 3133267 - DNA, 25 bp, Homo sapien
aaaagcttccatgggcacgttcctc

SEQ ID NO: 3133268 - DNA, 25 bp, Homo sapien
taccccagtatgaagtatgtagttc

SEQ ID NO: 3133269 - DNA, 25 bp, Homo sapien
ttgtttaccacagggagcagtttca

SEQ ID NO: 3133270 - DNA, 25 bp, Homo sapien
caggcgagctctgatcacgcagaca

SEQ ID NO: 3133271 - DNA, 25 bp, Homo sapien
tctgcactctaatcgggacaccttc

SEQ ID NO: 3133272 - DNA, 25 bp, Homo sapien
aaaggaggagccgtcagtgcattcg

SEQ ID NO: 3133273 - DNA, 25 bp, Homo sapien
tgcattcgaaagagtatttccgccg

SEQ ID NO: 3133274 - DNA, 25 bp, Homo sapien
tttctcaacctcgtccacaaaggag

SEQ ID NO: 3133275 - DNA, 25 bp, Homo sapien
cttttccaaagacagagctgccggg

SEQ ID NO: 3133276 - DNA, 25 bp, Homo sapien
cattagtcccacacggtcaagaagt

SEQ ID NO: 3133277 - DNA, 25 bp, Homo sapien
gtcaagaagtatacaaccttttcca

SEQ ID NO: 3133278 - DNA, 25 bp, Homo sapien
tccactatgaagcattcattagtcc

SEQ ID NO: 3133279 - DNA, 25 bp, Homo sapien
gcataggggaagctttagttcaagc

SEQ ID NO: 3133280 - DNA, 25 bp, Homo sapien
gggaagctttagttcaagcatttct

SEQ ID NO: 3133281 - DNA, 25 bp, Homo sapien
tccagcataggggaagctttagttc

SEQ ID NO: 3133282 - DNA, 25 bp, Homo sapien
taggggaagctttagttcaagcatt

SEQ ID NO: 3133283 - DNA, 25 bp, Homo sapien
tcagcatgttacaaagatggacccg

SEQ ID NO: 3133284 - DNA, 25 bp, Homo sapien
gggcaatttcacagcagtgcacagt

SEQ ID NO: 3133285 - DNA, 25 bp, Homo sapien
gatggacccgagttgcaatggttcc

SEQ ID NO: 3133286 - DNA, 25 bp, Homo sapien
caatggttcccatcgctgttctaat

SEQ ID NO: 3133287 - DNA, 25 bp, Homo sapien
attttagcactttcatttcctctcg

SEQ ID NO: 3133288 - DNA, 25 bp, Homo sapien
tcatttcctctcgtaaatggaaccc

SEQ ID NO: 3133289 - DNA, 25 bp, Homo sapien
tcgtaaatggaacccagatcctcag

SEQ ID NO: 3133290 - DNA, 25 bp, Homo sapien
caataatctattggttctttatcat

SEQ ID NO: 3133291 - DNA, 25 bp, Homo sapien
caaggtcaacaaacagaccaataca

SEQ ID NO: 3133292 - DNA, 25 bp, Homo sapien
gaatgaggccagtaggtcattgaca

SEQ ID NO: 3133293 - DNA, 25 bp, Homo sapien
catcagtgatcagatgtcaaggtca

SEQ ID NO: 3133294 - DNA, 25 bp, Homo sapien
ccctatgttagtactattgccaaaa

SEQ ID NO: 3133295 - DNA, 25 bp, Homo sapien
tgtacaatgaccatctcacatacag

SEQ ID NO: 3133296 - DNA, 25 bp, Homo sapien
cggactttgcatactctctgcaggt

SEQ ID NO: 3133297 - DNA, 25 bp, Homo sapien
aggacatgttgcagaggggccactt

SEQ ID NO: 3133298 - DNA, 25 bp, Homo sapien
tgttttcctctctcggactttgcat

SEQ ID NO: 3133299 - DNA, 25 bp, Homo sapien
ttgatatgacagtctttttatcccc

SEQ ID NO: 3133300 - DNA, 25 bp, Homo sapien
tttgcaaaaggtctactttctagtg

SEQ ID NO: 3133301 - DNA, 25 bp, Homo sapien
ctttctagtgttgattgctacacac

SEQ ID NO: 3133302 - DNA, 25 bp, Homo sapien
aaggtcaaggacatattaatttgca

SEQ ID NO: 3133303 - DNA, 25 bp, Homo sapien
gggaagagcacagttcactataaac

SEQ ID NO: 3133304 - DNA, 25 bp, Homo sapien
tctacattgtaatttagcagcaaac

SEQ ID NO: 3133305 - DNA, 25 bp, Homo sapien
gagcacagttcactataaaccatta

SEQ ID NO: 3133306 - DNA, 25 bp, Homo sapien
gtaatttagcagcaaacatgttaac

SEQ ID NO: 3133307 - DNA, 25 bp, Homo sapien
catcagcagtgtaaccgatattaat

SEQ ID NO: 3133308 - DNA, 25 bp, Homo sapien
aaacatcagcagtgtaaccgatatt

SEQ ID NO: 3133309 - DNA, 25 bp, Homo sapien
aacatcagcagtgtaaccgatatta

SEQ ID NO: 3133310 - DNA, 25 bp, Homo sapien
acatcagcagtgtaaccgatattaa

SEQ ID NO: 3133311 - DNA, 25 bp, Homo sapien
ttctgggccaaatttagcttgctgc

SEQ ID NO: 3133312 - DNA, 25 bp, Homo sapien
ccctgttgcagttatggtacttacc

SEQ ID NO: 3133313 - DNA, 25 bp, Homo sapien
gaatgcccaagtctccaccgtgatt

SEQ ID NO: 3133314 - DNA, 25 bp, Homo sapien
tggctctcaattatctagcataggg

SEQ ID NO: 3133315 - DNA, 25 bp, Homo sapien
aagtctggagtgatcacttcctttg

SEQ ID NO: 3133316 - DNA, 25 bp, Homo sapien
cttcctttggcagctgttccatttg

SEQ ID NO: 3133317 - DNA, 25 bp, Homo sapien
gaagtctggagtgatcacttccttt

SEQ ID NO: 3133318 - DNA, 25 bp, Homo sapien
acttcctttggcagctgttccattt

SEQ ID NO: 3133319 - DNA, 25 bp, Homo sapien
caacaatagagccttgaagtgaatg

SEQ ID NO: 3133320 - DNA, 25 bp, Homo sapien
tgagttagcagttgaataggcatga

SEQ ID NO: 3133321 - DNA, 25 bp, Homo sapien
gaaatcaacacagtcaacaatagag

SEQ ID NO: 3133322 - DNA, 25 bp, Homo sapien
gaagattcctctacaagtgacggct

SEQ ID NO: 3133323 - DNA, 25 bp, Homo sapien
aatctatagagaatgatggagccac

SEQ ID NO: 3133324 - DNA, 25 bp, Homo sapien
ttcctccagggagacacacattgtc

SEQ ID NO: 3133325 - DNA, 25 bp, Homo sapien
agatgtcccataaagccctccctgg

SEQ ID NO: 3133326 - DNA, 25 bp, Homo sapien
gagttctagctaattagatgtccca

SEQ ID NO: 3133327 - DNA, 25 bp, Homo sapien
catctatgttaaagcaggtatgaga

SEQ ID NO: 3133328 - DNA, 25 bp, Homo sapien
tattttaagtgtgtaatccagtggc

SEQ ID NO: 3133329 - DNA, 25 bp, Homo sapien
cctttttgaggctgatagtattcca

SEQ ID NO: 3133330 - DNA, 25 bp, Homo sapien
tccccagtgagtctatgtatccatt

SEQ ID NO: 3133331 - DNA, 25 bp, Homo sapien
ttccgatataggaaccaaaccatgg

SEQ ID NO: 3133332 - DNA, 25 bp, Homo sapien
taggaaccaaaccatgggatgagga

SEQ ID NO: 3133333 - DNA, 25 bp, Homo sapien
ggaggtgtttccgatataggaacca

SEQ ID NO: 3133334 - DNA, 25 bp, Homo sapien
cagtaggaaaccagcgaagggaggt

SEQ ID NO: 3133335 - DNA, 25 bp, Homo sapien
ttggactggggcccttggcagccat

SEQ ID NO: 3133336 - DNA, 25 bp, Homo sapien
tttggactggggcccttggcagcca

SEQ ID NO: 3133337 - DNA, 25 bp, Homo sapien
taaaatgatgaatagctctgcgcgc

SEQ ID NO: 3133338 - DNA, 25 bp, Homo sapien
gcatgtaaatcactgcggctcccct

SEQ ID NO: 3133339 - DNA, 25 bp, Homo sapien
cctctgaggatgctcgctaaaatga

SEQ ID NO: 3133340 - DNA, 25 bp, Homo sapien
ctcccagaaagtgttcaaatccgtg

SEQ ID NO: 3133341 - DNA, 25 bp, Homo sapien
tcattgagagctaattccaatctcc

SEQ ID NO: 3133342 - DNA, 25 bp, Homo sapien
ctatccaggaggtaatctattcttc

SEQ ID NO: 3133343 - DNA, 25 bp, Homo sapien
tgaggcttggaggagtgtggcatct

SEQ ID NO: 3133344 - DNA, 25 bp, Homo sapien
cgtactttggtctttctggtcctca

SEQ ID NO: 3133345 - DNA, 25 bp, Homo sapien
gcttatgaccggcactcggtcggcc

SEQ ID NO: 3133346 - DNA, 25 bp, Homo sapien
taccgccaccgagcgcctgcgtttg

SEQ ID NO: 3133347 - DNA, 25 bp, Homo sapien
gtcggccaacaaccgcggctaccgc

SEQ ID NO: 3133348 - DNA, 25 bp, Homo sapien
caccgagcgcctgcgtttggggaaa

SEQ ID NO: 3133349 - DNA, 25 bp, Homo sapien
tggcagagagcgcagacaggacacc

SEQ ID NO: 3133350 - DNA, 25 bp, Homo sapien
gaagcaagccggcttggcagagagc

SEQ ID NO: 3133351 - DNA, 25 bp, Homo sapien
aggacacctgtacccgcggttcacg

SEQ ID NO: 3133352 - DNA, 25 bp, Homo sapien
tcaggaagcaagccggcttggcaga

SEQ ID NO: 3133353 - DNA, 25 bp, Homo sapien
tccttagcaacggggtccagcggcc

SEQ ID NO: 3133354 - DNA, 25 bp, Homo sapien
gtccttagcaacggggtccagcggc

SEQ ID NO: 3133355 - DNA, 25 bp, Homo sapien
tcgactgaccctctaccccaggaaa

SEQ ID NO: 3133356 - DNA, 25 bp, Homo sapien
taaggttaacgaaggctactctcga

SEQ ID NO: 3133357 - DNA, 25 bp, Homo sapien
ggaggggtacactccaagcgctcac

SEQ ID NO: 3133358 - DNA, 25 bp, Homo sapien
taacgaaggctactctcgactgacc

SEQ ID NO: 3133359 - DNA, 25 bp, Homo sapien
tctagatacttaaagaccagtccag

SEQ ID NO: 3133360 - DNA, 25 bp, Homo sapien
gacccagagcccaatagtcacttat

SEQ ID NO: 3133361 - DNA, 25 bp, Homo sapien
aaagggccagtattagggtcgcaca

SEQ ID NO: 3133362 - DNA, 25 bp, Homo sapien
tccaaacgtgtaagtaagagcccca

SEQ ID NO: 3133363 - DNA, 25 bp, Homo sapien
ctggaagcatgccactgacaagcct

SEQ ID NO: 3133364 - DNA, 25 bp, Homo sapien
aaataacatgtagaggatggtgtaa

SEQ ID NO: 3133365 - DNA, 25 bp, Homo sapien
cactgacaagcctggagcatgagtt

SEQ ID NO: 3133366 - DNA, 25 bp, Homo sapien
ggagcatgagttgtttgtgaaagca

SEQ ID NO: 3133367 - DNA, 25 bp, Homo sapien
catctatagatttgacccaaccacg

SEQ ID NO: 3133368 - DNA, 25 bp, Homo sapien
tacagttggctctccgtatatgcgg

SEQ ID NO: 3133369 - DNA, 25 bp, Homo sapien
ccacggatacggagagcagactgga

SEQ ID NO: 3133370 - DNA, 25 bp, Homo sapien
gtatatgcgggttccacatctatag

SEQ ID NO: 3133371 - DNA, 25 bp, Homo sapien
caattcagtggaagttttggatgga

SEQ ID NO: 3133372 - DNA, 25 bp, Homo sapien
tggatggaattttatggctaaattt

SEQ ID NO: 3133373 - DNA, 25 bp, Homo sapien
tatcttccttcacgtcaaaaagttg

SEQ ID NO: 3133374 - DNA, 25 bp, Homo sapien
ttctatcttccttcacgtcaaaaag

SEQ ID NO: 3133375 - DNA, 25 bp, Homo sapien
ccagtatcacacttcacctccattc

SEQ ID NO: 3133376 - DNA, 25 bp, Homo sapien
agtatcacacttcacctccattccc

SEQ ID NO: 3133377 - DNA, 25 bp, Homo sapien
ttcccagtatcacacttcacctcca

SEQ ID NO: 3133378 - DNA, 25 bp, Homo sapien
tcccagtatcacacttcacctccat

SEQ ID NO: 3133379 - DNA, 25 bp, Homo sapien
cctccagagccctctgatttctgca

SEQ ID NO: 3133380 - DNA, 25 bp, Homo sapien
gtttttcaactgtgtacctccagag

SEQ ID NO: 3133381 - DNA, 25 bp, Homo sapien
tgtgtacctccagagccctctgatt

SEQ ID NO: 3133382 - DNA, 25 bp, Homo sapien
ttttcaactgtgtacctccagagcc

SEQ ID NO: 3133383 - DNA, 25 bp, Homo sapien
cctgtgttttaactgtgtgcttgat

SEQ ID NO: 3133384 - DNA, 25 bp, Homo sapien
ttcttgcagactctggagaactggt

SEQ ID NO: 3133385 - DNA, 25 bp, Homo sapien
cagactctggagaactggttgacaa

SEQ ID NO: 3133386 - DNA, 25 bp, Homo sapien
gatgatgtcctttgatcatagttac

SEQ ID NO: 3133387 - DNA, 25 bp, Homo sapien
tctgtcttggagagctcactatacc

SEQ ID NO: 3133388 - DNA, 25 bp, Homo sapien
tcaccctaccaaagttgggcatggg

SEQ ID NO: 3133389 - DNA, 25 bp, Homo sapien
taccaccacagtcagtcaggagctt

SEQ ID NO: 3133390 - DNA, 25 bp, Homo sapien
gaagaaaattgaagcgtcaccgtaa

SEQ ID NO: 3133391 - DNA, 25 bp, Homo sapien
tgtgtaacaattcacaagaggaatg

SEQ ID NO: 3133392 - DNA, 25 bp, Homo sapien
ttttcaagtaacaagcatatccgat

SEQ ID NO: 3133393 - DNA, 25 bp, Homo sapien
gaaaaagtgctacacatattggaga

SEQ ID NO: 3133394 - DNA, 25 bp, Homo sapien
gacttctaccatctacaagcaaatg

SEQ ID NO: 3133395 - DNA, 25 bp, Homo sapien
ttgcttttcaaaccgccaagctggt

SEQ ID NO: 3133396 - DNA, 25 bp, Homo sapien
tactagaataccacgaccacacttg

SEQ ID NO: 3133397 - DNA, 25 bp, Homo sapien
tgaacgcggctgaaaccacatatgg

SEQ ID NO: 3133398 - DNA, 25 bp, Homo sapien
gaagcgcaccgtttctactcagcaa

SEQ ID NO: 3133399 - DNA, 25 bp, Homo sapien
aaggcactcgtgactgttcaccaaa

SEQ ID NO: 3133400 - DNA, 25 bp, Homo sapien
ctgcaaggaatacctcctttagagt

SEQ ID NO: 3133401 - DNA, 25 bp, Homo sapien
cagaaggcactcgtgactgttcacc

SEQ ID NO: 3133402 - DNA, 25 bp, Homo sapien
aaatgcagaaggcactcgtgactgt

SEQ ID NO: 3133403 - DNA, 25 bp, Homo sapien
catccaggaatctataccagtccaa

SEQ ID NO: 3133404 - DNA, 25 bp, Homo sapien
caggctaaaactggatgaactctga

SEQ ID NO: 3133405 - DNA, 25 bp, Homo sapien
tttactgaggaataactaacacgca

SEQ ID NO: 3133406 - DNA, 25 bp, Homo sapien
tgtacgaatacactcaaggaactat

SEQ ID NO: 3133407 - DNA, 25 bp, Homo sapien
gaagtggatcaaatgaaagactttc

SEQ ID NO: 3133408 - DNA, 25 bp, Homo sapien
ctaaagtaataagaagtggatcaaa

SEQ ID NO: 3133409 - DNA, 25 bp, Homo sapien
ggacattcccactgtaatctgtgtt

SEQ ID NO: 3133410 - DNA, 25 bp, Homo sapien
ggaggacattcccactgtaatctgt

SEQ ID NO: 3133411 - DNA, 25 bp, Homo sapien
aatattcaagagatggcatatttac

SEQ ID NO: 3133412 - DNA, 25 bp, Homo sapien
aaatacactgcttgtaatactcggc

SEQ ID NO: 3133413 - DNA, 25 bp, Homo sapien
ctatcagtgaaagaactcaggtgct

SEQ ID NO: 3133414 - DNA, 25 bp, Homo sapien
gaagctaagactccaccaacatttt

SEQ ID NO: 3133415 - DNA, 25 bp, Homo sapien
gcctaacctttaatgccaacctcaa

SEQ ID NO: 3133416 - DNA, 25 bp, Homo sapien
catggatgggaagggccaactgtac

SEQ ID NO: 3133417 - DNA, 25 bp, Homo sapien
cgatctgcagctagttaaaacccta

SEQ ID NO: 3133418 - DNA, 25 bp, Homo sapien
caatcatagtgagtcaaaagggcca

SEQ ID NO: 3133419 - DNA, 25 bp, Homo sapien
gaatgcatggctataagatccccta

SEQ ID NO: 3133420 - DNA, 25 bp, Homo sapien
aggaaacatgatttactacccattt

SEQ ID NO: 3133421 - DNA, 25 bp, Homo sapien
gaggaaacatgatttactacccatt

SEQ ID NO: 3133422 - DNA, 25 bp, Homo sapien
aaggaatagctttttcaggagcacc

SEQ ID NO: 3133423 - DNA, 25 bp, Homo sapien
tatggatgcttagtctctctcagac

SEQ ID NO: 3133424 - DNA, 25 bp, Homo sapien
tcagtctaggtagcaaaggaatagc

SEQ ID NO: 3133425 - DNA, 25 bp, Homo sapien
caggagcacctttgaccaaaagtaa

SEQ ID NO: 3133426 - DNA, 25 bp, Homo sapien
tcagaagatagtcaacaaaacctag

SEQ ID NO: 3133427 - DNA, 25 bp, Homo sapien
tagaaaaaagggcaagcaagtagag

SEQ ID NO: 3133428 - DNA, 25 bp, Homo sapien
caacacaggacatctagaagcaaaa

SEQ ID NO: 3133429 - DNA, 25 bp, Homo sapien
gaaaaggataagattaaacatctac

SEQ ID NO: 3133430 - DNA, 25 bp, Homo sapien
caaacacttcatcatccgaatggac

SEQ ID NO: 3133431 - DNA, 25 bp, Homo sapien
gaactagagcattcaatcctctttc

SEQ ID NO: 3133432 - DNA, 25 bp, Homo sapien
gagaaggaccaacaacgacacttag

SEQ ID NO: 3133433 - DNA, 25 bp, Homo sapien
tcagatggtcgtttagagaaggacc

SEQ ID NO: 3133434 - DNA, 25 bp, Homo sapien
aggagcttgtaccattcttctgaaa

SEQ ID NO: 3133435 - DNA, 25 bp, Homo sapien
ggaggagcttgtaccattcttctga

SEQ ID NO: 3133436 - DNA, 25 bp, Homo sapien
aaggaggagcttgtaccattcttct

SEQ ID NO: 3133437 - DNA, 25 bp, Homo sapien
ctattccaatcaatagaaaaagagg

SEQ ID NO: 3133438 - DNA, 25 bp, Homo sapien
ggaaccattatcaaaatcatacctc

SEQ ID NO: 3133439 - DNA, 25 bp, Homo sapien
cagtggaaccattatcaaaatcata

SEQ ID NO: 3133440 - DNA, 25 bp, Homo sapien
aaaacagtggaaccattatcaaaat

SEQ ID NO: 3133441 - DNA, 25 bp, Homo sapien
gtggaaccattatcaaaatcatacc

SEQ ID NO: 3133442 - DNA, 25 bp, Homo sapien
tctgtaatttgcaagagcattgagg

SEQ ID NO: 3133443 - DNA, 25 bp, Homo sapien
ctgtgcctctaaaacacacattttc

SEQ ID NO: 3133444 - DNA, 25 bp, Homo sapien
caagagcattgaggaccatgatgga

SEQ ID NO: 3133445 - DNA, 25 bp, Homo sapien
aggaccatgatggaaagctgtgcct

SEQ ID NO: 3133446 - DNA, 25 bp, Homo sapien
tgcgctggtgattggctctttgaat

SEQ ID NO: 3133447 - DNA, 25 bp, Homo sapien
acttccaccatgttgctctagcttt

SEQ ID NO: 3133448 - DNA, 25 bp, Homo sapien
tttgtaatgcgctggtgattggctc

SEQ ID NO: 3133449 - DNA, 25 bp, Homo sapien
tgctctagcttttgtaatgcgctgg

SEQ ID NO: 3133450 - DNA, 25 bp, Homo sapien
tctggtctgagtcgcagggcttgag

SEQ ID NO: 3133451 - DNA, 25 bp, Homo sapien
agaacagtgtgacctagagacagaa

SEQ ID NO: 3133452 - DNA, 25 bp, Homo sapien
agtctggtctgagtcgcagggcttg

SEQ ID NO: 3133453 - DNA, 25 bp, Homo sapien
ggtctgagtcgcagggcttgagaac

SEQ ID NO: 3133454 - DNA, 25 bp, Homo sapien
taagttccgtgatctttagagggag

SEQ ID NO: 3133455 - DNA, 25 bp, Homo sapien
gttagaagccagactaccagtatct

SEQ ID NO: 3133456 - DNA, 25 bp, Homo sapien
tcatgcagagttcccctaataggta

SEQ ID NO: 3133457 - DNA, 25 bp, Homo sapien
tagtcacttattcgtcaaacctgga

SEQ ID NO: 3133458 - DNA, 25 bp, Homo sapien
ttttagatttgatgatgctaaggct

SEQ ID NO: 3133459 - DNA, 25 bp, Homo sapien
tagatttgatgatgctaaggctccc

SEQ ID NO: 3133460 - DNA, 25 bp, Homo sapien
ggagcagtatgttggaattttagat

SEQ ID NO: 3133461 - DNA, 25 bp, Homo sapien
tcaacagcatatggagcagtatgtt

SEQ ID NO: 3133462 - DNA, 25 bp, Homo sapien
tgcttgacacgtcaacaggtagaaa

SEQ ID NO: 3133463 - DNA, 25 bp, Homo sapien
agttagtgcttgacacgtcaacagg

SEQ ID NO: 3133464 - DNA, 25 bp, Homo sapien
tagtgcttgacacgtcaacaggtag

SEQ ID NO: 3133465 - DNA, 25 bp, Homo sapien
agtgcttgacacgtcaacaggtaga

SEQ ID NO: 3133466 - DNA, 25 bp, Homo sapien
ctattcatcttaacctagtaaataa

SEQ ID NO: 3133467 - DNA, 25 bp, Homo sapien
cttttttgttgatgaataactttga

SEQ ID NO: 3133468 - DNA, 25 bp, Homo sapien
acctagtaaataatgaatggtggct

SEQ ID NO: 3133469 - DNA, 25 bp, Homo sapien
ataactttccattagtaactgttct

SEQ ID NO: 3133470 - DNA, 25 bp, Homo sapien
gggcacagctacaaactgattgcca

SEQ ID NO: 3133471 - DNA, 25 bp, Homo sapien
ggaggatcactcaccagaattctga

SEQ ID NO: 3133472 - DNA, 25 bp, Homo sapien
caataatggttcttcgcacaaataa

SEQ ID NO: 3133473 - DNA, 25 bp, Homo sapien
aaaaatttgaggcttgcggtgagct

SEQ ID NO: 3133474 - DNA, 25 bp, Homo sapien
tagatggcagatagctctggatggt

SEQ ID NO: 3133475 - DNA, 25 bp, Homo sapien
tgttgtagccagagggaattgcttc

SEQ ID NO: 3133476 - DNA, 25 bp, Homo sapien
ggtgctcaatgcaatgaaaacaggt

SEQ ID NO: 3133477 - DNA, 25 bp, Homo sapien
taactctactgtctatgttacaggt

SEQ ID NO: 3133478 - DNA, 25 bp, Homo sapien
tgctaaactgaacacagccactgag

SEQ ID NO: 3133479 - DNA, 25 bp, Homo sapien
tctgtaattgagagaccattcattt

SEQ ID NO: 3133480 - DNA, 25 bp, Homo sapien
tctaaagaatatgctaaactgaaca

SEQ ID NO: 3133481 - DNA, 25 bp, Homo sapien
tctttctctgtaattgagagaccat

SEQ ID NO: 3133482 - DNA, 25 bp, Homo sapien
tctagcagtggaagccattattggt

SEQ ID NO: 3133483 - DNA, 25 bp, Homo sapien
caacttggatttccatgcagtggtc

SEQ ID NO: 3133484 - DNA, 25 bp, Homo sapien
taccataaacagctcagtaagtgct

SEQ ID NO: 3133485 - DNA, 25 bp, Homo sapien
gctgcttgacggtgatgttacttgg

SEQ ID NO: 3133486 - DNA, 25 bp, Homo sapien
tcagcttcagctcatttggtccagg

SEQ ID NO: 3133487 - DNA, 25 bp, Homo sapien
cacatctagaaggtgggattttacc

SEQ ID NO: 3133488 - DNA, 25 bp, Homo sapien
cagctagctaccatgaactgggcga

SEQ ID NO: 3133489 - DNA, 25 bp, Homo sapien
tttagagtgcccactgagtcaggct

SEQ ID NO: 3133490 - DNA, 25 bp, Homo sapien
gagtaagttaaccacgcaggacagg

SEQ ID NO: 3133491 - DNA, 25 bp, Homo sapien
gaacttgcgctactggagagacaca

SEQ ID NO: 3133492 - DNA, 25 bp, Homo sapien
agttttgagcaagaggccccacaga

SEQ ID NO: 3133493 - DNA, 25 bp, Homo sapien
cacgttgaggcagactatccaggaa

SEQ ID NO: 3133494 - DNA, 25 bp, Homo sapien
tgtatgcacaaaaattccttggaag

SEQ ID NO: 3133495 - DNA, 25 bp, Homo sapien
caacgtatgtcagcaaattgacagg

SEQ ID NO: 3133496 - DNA, 25 bp, Homo sapien
agatttttcaccaggcagcttacac

SEQ ID NO: 3133497 - DNA, 25 bp, Homo sapien
ccagtagtctatgagtgaaaggaac

SEQ ID NO: 3133498 - DNA, 25 bp, Homo sapien
tctgtctcatgtatcaactcccttc

SEQ ID NO: 3133499 - DNA, 25 bp, Homo sapien
ctcaaacagctcacactcactaaag

SEQ ID NO: 3133500 - DNA, 25 bp, Homo sapien
tcccttctcagatcggcccatctac

SEQ ID NO: 3133501 - DNA, 25 bp, Homo sapien
taaagctatcggacagaaacacagt

SEQ ID NO: 3133502 - DNA, 25 bp, Homo sapien
gctaatggcagcttaggtcactcca

SEQ ID NO: 3133503 - DNA, 25 bp, Homo sapien
gccaggaatcccaaaaggtcatctc

SEQ ID NO: 3133504 - DNA, 25 bp, Homo sapien
tgggtaccacaactgcgaagattct

SEQ ID NO: 3133505 - DNA, 25 bp, Homo sapien
catgctcatgcagactgggtaccac

SEQ ID NO: 3133506 - DNA, 25 bp, Homo sapien
gggtctgataaaagcctgaactcca

SEQ ID NO: 3133507 - DNA, 25 bp, Homo sapien
cagagtatatcaggcctgggaacca

SEQ ID NO: 3133508 - DNA, 25 bp, Homo sapien
aaaagttcatatgggcgtaggcagc

SEQ ID NO: 3133509 - DNA, 25 bp, Homo sapien
tattgcaagagtgcagacagggtct

SEQ ID NO: 3133510 - DNA, 25 bp, Homo sapien
taggaacatgtaggaccacccagtc

SEQ ID NO: 3133511 - DNA, 25 bp, Homo sapien
acaacctgtaaggaggccgtgagcc

SEQ ID NO: 3133512 - DNA, 25 bp, Homo sapien
gattgtctagactgggaagccgctg

SEQ ID NO: 3133513 - DNA, 25 bp, Homo sapien
tgaagcattcgggaaaaacaacctg

SEQ ID NO: 3133514 - DNA, 25 bp, Homo sapien
gaaaattgcattaaattagaactcg

SEQ ID NO: 3133515 - DNA, 25 bp, Homo sapien
taaattagaactcgtcacctagaca

SEQ ID NO: 3133516 - DNA, 25 bp, Homo sapien
ctcgtcacctagacacacaacagaa

SEQ ID NO: 3133517 - DNA, 25 bp, Homo sapien
tgcattaaattagaactcgtcacct

SEQ ID NO: 3133518 - DNA, 25 bp, Homo sapien
tcaagtgcttgccagaagaaatcca

SEQ ID NO: 3133519 - DNA, 25 bp, Homo sapien
tctctcacccagtcaaagccagtgg

SEQ ID NO: 3133520 - DNA, 25 bp, Homo sapien
agttttctgcctagctggacattcc

SEQ ID NO: 3133521 - DNA, 25 bp, Homo sapien
gaacacagttgagtaaaaccagaac

SEQ ID NO: 3133522 - DNA, 25 bp, Homo sapien
aatctgaccacatgaggcatcgctg

SEQ ID NO: 3133523 - DNA, 25 bp, Homo sapien
taagcagccgctgtatgcaagtcac

SEQ ID NO: 3133524 - DNA, 25 bp, Homo sapien
tcatagacggagaagggagatcatt

SEQ ID NO: 3133525 - DNA, 25 bp, Homo sapien
taaaatgcaggagtcacaccaaagg

SEQ ID NO: 3133526 - DNA, 25 bp, Homo sapien
tgcaggttctgcagtgccaagtgtg

SEQ ID NO: 3133527 - DNA, 25 bp, Homo sapien
agtgtgggacttgaatgtgcatgga

SEQ ID NO: 3133528 - DNA, 25 bp, Homo sapien
tatagtcgcccctctgaatttgcag

SEQ ID NO: 3133529 - DNA, 25 bp, Homo sapien
aggaccaacttctcttatctgcagg

SEQ ID NO: 3133530 - DNA, 25 bp, Homo sapien
agtgctgtgacaactagagtcaggg

SEQ ID NO: 3133531 - DNA, 25 bp, Homo sapien
tccttccccagtgaacttagtcctg

SEQ ID NO: 3133532 - DNA, 25 bp, Homo sapien
tcatgtctaaagtcaggtctgttgg

SEQ ID NO: 3133533 - DNA, 25 bp, Homo sapien
gagactaaacagaacttaccacttc

SEQ ID NO: 3133534 - DNA, 25 bp, Homo sapien
gaaggatttccacagatgactctcc

SEQ ID NO: 3133535 - DNA, 25 bp, Homo sapien
tcctaaatactggatggagcagttc

SEQ ID NO: 3133536 - DNA, 25 bp, Homo sapien
gcctctgggtacaaatacaccgtgt

SEQ ID NO: 3133537 - DNA, 25 bp, Homo sapien
ctctccaggagactatgttttcagt

SEQ ID NO: 3133538 - DNA, 25 bp, Homo sapien
tcagagtcaacaggcccgggagttt

SEQ ID NO: 3133539 - DNA, 25 bp, Homo sapien
ccagcttgctcagagtcaacaggcc

SEQ ID NO: 3133540 - DNA, 25 bp, Homo sapien
gagagccctcggaagcgttctgccc

SEQ ID NO: 3133541 - DNA, 25 bp, Homo sapien
tcggaagcgttctgccccagcttgc

SEQ ID NO: 3133542 - DNA, 25 bp, Homo sapien
ccaaaactccttctgtgatgaaccg

SEQ ID NO: 3133543 - DNA, 25 bp, Homo sapien
tgctttccactcgattgtgagccaa

SEQ ID NO: 3133544 - DNA, 25 bp, Homo sapien
gaaccgtaatgcacacatcacagtg

SEQ ID NO: 3133545 - DNA, 25 bp, Homo sapien
tgattcactgaatgcatctttgctt

SEQ ID NO: 3133546 - DNA, 25 bp, Homo sapien
ggtaaacattgcagaatccacatcc

SEQ ID NO: 3133547 - DNA, 25 bp, Homo sapien
ctgggtaaacattgcagaatccaca

SEQ ID NO: 3133548 - DNA, 25 bp, Homo sapien
taaacattgcagaatccacatccat

SEQ ID NO: 3133549 - DNA, 25 bp, Homo sapien
gggtaaacattgcagaatccacatc

SEQ ID NO: 3133550 - DNA, 25 bp, Homo sapien
cattgggttgtgacaaattatgtct

SEQ ID NO: 3133551 - DNA, 25 bp, Homo sapien
tcattgggttgtgacaaattatgtc

SEQ ID NO: 3133552 - DNA, 25 bp, Homo sapien
atgtcattgggttgtgacaaattat

SEQ ID NO: 3133553 - DNA, 25 bp, Homo sapien
tgggttgtgacaaattatgtctgat

SEQ ID NO: 3133554 - DNA, 25 bp, Homo sapien
tcctttgtccacgtcatatgtatca

SEQ ID NO: 3133555 - DNA, 25 bp, Homo sapien
ggtggcatttttggtgacactggcc

SEQ ID NO: 3133556 - DNA, 25 bp, Homo sapien
gctatacttcccacatatgctgagt

SEQ ID NO: 3133557 - DNA, 25 bp, Homo sapien
tgtcccagtacgctaacttcccaaa

SEQ ID NO: 3133558 - DNA, 25 bp, Homo sapien
tctctttgccccaccaacattcact

SEQ ID NO: 3133559 - DNA, 25 bp, Homo sapien
ttgccccaccaacattcacttctct

SEQ ID NO: 3133560 - DNA, 25 bp, Homo sapien
tcctggaaatatattccaatctccc

SEQ ID NO: 3133561 - DNA, 25 bp, Homo sapien
tctttgccccaccaacattcacttc

SEQ ID NO: 3133562 - DNA, 25 bp, Homo sapien
cattgcaggcattgggatgatcatg

SEQ ID NO: 3133563 - DNA, 25 bp, Homo sapien
gttttagtcgagaacagggctcctg

SEQ ID NO: 3133564 - DNA, 25 bp, Homo sapien
ggagctgggttttagtcgagaacag

SEQ ID NO: 3133565 - DNA, 25 bp, Homo sapien
catgaccatgcctagcaggatggga

SEQ ID NO: 3133566 - DNA, 25 bp, Homo sapien
tcccataaagagaccgtaaaatcta

SEQ ID NO: 3133567 - DNA, 25 bp, Homo sapien
tatacttttcgaaatcatactctgc

SEQ ID NO: 3133568 - DNA, 25 bp, Homo sapien
tagtctttatacttttcgaaatcat

SEQ ID NO: 3133569 - DNA, 25 bp, Homo sapien
ctgctttgtcccataaagagaccgt

SEQ ID NO: 3133570 - DNA, 25 bp, Homo sapien
ttctctatggcgcaactctcttggg

SEQ ID NO: 3133571 - DNA, 25 bp, Homo sapien
tatggcgcaactctcttgggcttct

SEQ ID NO: 3133572 - DNA, 25 bp, Homo sapien
tcattctctatggcgcaactctctt

SEQ ID NO: 3133573 - DNA, 25 bp, Homo sapien
tctatggcgcaactctcttgggctt

SEQ ID NO: 3133574 - DNA, 25 bp, Homo sapien
tttctcctgcgagaaatgctgcttc

SEQ ID NO: 3133575 - DNA, 25 bp, Homo sapien
agctgaagtgcacccctctgaaggg

SEQ ID NO: 3133576 - DNA, 25 bp, Homo sapien
tggactttttctcctgcgagaaatg

SEQ ID NO: 3133577 - DNA, 25 bp, Homo sapien
catccatacttagacttcctttcaa

SEQ ID NO: 3133578 - DNA, 25 bp, Homo sapien
tgccaagggttttgaagcaccaagt

SEQ ID NO: 3133579 - DNA, 25 bp, Homo sapien
cattgagacggcattatttctggct

SEQ ID NO: 3133580 - DNA, 25 bp, Homo sapien
gggcctttcaccatccacgaataag

SEQ ID NO: 3133581 - DNA, 25 bp, Homo sapien
ggaggtttcaaagctaacacagatt

SEQ ID NO: 3133582 - DNA, 25 bp, Homo sapien
aagaagtagagactgtgcccaagtc

SEQ ID NO: 3133583 - DNA, 25 bp, Homo sapien
gacctaggcatgtagtcaggaaaat

SEQ ID NO: 3133584 - DNA, 25 bp, Homo sapien
taaaggctctgacctaggcatgtag

SEQ ID NO: 3133585 - DNA, 25 bp, Homo sapien
ccttggtgaatttagctaaaggctc

SEQ ID NO: 3133586 - DNA, 25 bp, Homo sapien
tcatgctaactccttggtgaattta

SEQ ID NO: 3133587 - DNA, 25 bp, Homo sapien
cttgagtcatctccaggtatctgct

SEQ ID NO: 3133588 - DNA, 25 bp, Homo sapien
ccgtccagccacttttgatttttct

SEQ ID NO: 3133589 - DNA, 25 bp, Homo sapien
tgatttttcttgagtcatctccagg

SEQ ID NO: 3133590 - DNA, 25 bp, Homo sapien
tctccaggtatctgctgtcacacat

SEQ ID NO: 3133591 - DNA, 25 bp, Homo sapien
agtaacattctgtagtaagctgtgg

SEQ ID NO: 3133592 - DNA, 25 bp, Homo sapien
tatcctcacaagttctggaatggaa

SEQ ID NO: 3133593 - DNA, 25 bp, Homo sapien
gtaacattctgtagtaagctgtggg

SEQ ID NO: 3133594 - DNA, 25 bp, Homo sapien
tttttacctgtatttgatggcacaa

SEQ ID NO: 3133595 - DNA, 25 bp, Homo sapien
aaaatatcagcccttccatttaggg

SEQ ID NO: 3133596 - DNA, 25 bp, Homo sapien
gcaggccaatagttcctatttaaaa

SEQ ID NO: 3133597 - DNA, 25 bp, Homo sapien
gcccttccatttagggccaagcagg

SEQ ID NO: 3133598 - DNA, 25 bp, Homo sapien
ctgtcgcttgctttccgatattaaa

SEQ ID NO: 3133599 - DNA, 25 bp, Homo sapien
cgcttgctttccgatattaaaggca

SEQ ID NO: 3133600 - DNA, 25 bp, Homo sapien
gtcgcttgctttccgatattaaagg

SEQ ID NO: 3133601 - DNA, 25 bp, Homo sapien
gcttgctttccgatattaaaggcat

SEQ ID NO: 3133602 - DNA, 25 bp, Homo sapien
tataggcagttctctagttaattcc

SEQ ID NO: 3133603 - DNA, 25 bp, Homo sapien
caacttgaccataagagcagagagt

SEQ ID NO: 3133604 - DNA, 25 bp, Homo sapien
gggtaacacaacagtcacatagaga

SEQ ID NO: 3133605 - DNA, 25 bp, Homo sapien
tactcttaaggctaaagaatgatgg

SEQ ID NO: 3133606 - DNA, 25 bp, Homo sapien
tccacacacattcgtggaatacctt

SEQ ID NO: 3133607 - DNA, 25 bp, Homo sapien
ttcgtggaatacctttcagtgctcc

SEQ ID NO: 3133608 - DNA, 25 bp, Homo sapien
cacacattcgtggaatacctttcag

SEQ ID NO: 3133609 - DNA, 25 bp, Homo sapien
cattcgtggaatacctttcagtgct

SEQ ID NO: 3133610 - DNA, 25 bp, Homo sapien
catgcaaatagaagtgtggaaatat

SEQ ID NO: 3133611 - DNA, 25 bp, Homo sapien
caatgggtagaatggccaaccatcc

SEQ ID NO: 3133612 - DNA, 25 bp, Homo sapien
gccaatgggtagaatggccaaccat

SEQ ID NO: 3133613 - DNA, 25 bp, Homo sapien
atgggtagaatggccaaccatccat

SEQ ID NO: 3133614 - DNA, 25 bp, Homo sapien
gcagcagatggatagcctgaggctt

SEQ ID NO: 3133615 - DNA, 25 bp, Homo sapien
tagcctgaggcttagataggcctct

SEQ ID NO: 3133616 - DNA, 25 bp, Homo sapien
caggcaaacccgcaaaccttctttg

SEQ ID NO: 3133617 - DNA, 25 bp, Homo sapien
caaagcctcgggcaagctgccaggc

SEQ ID NO: 3133618 - DNA, 25 bp, Homo sapien
tgtccccaaatcgaacatcatctga

SEQ ID NO: 3133619 - DNA, 25 bp, Homo sapien
tcatctgaaataaaacccgttgatc

SEQ ID NO: 3133620 - DNA, 25 bp, Homo sapien
taaaacccgttgatctcaggctgcc

SEQ ID NO: 3133621 - DNA, 25 bp, Homo sapien
tcctgagctcatgtccccaaatcga

SEQ ID NO: 3133622 - DNA, 25 bp, Homo sapien
cacatgtggtgggtaatatctctcc

SEQ ID NO: 3133623 - DNA, 25 bp, Homo sapien
ccagcatgctgcaggagtgtaacga

SEQ ID NO: 3133624 - DNA, 25 bp, Homo sapien
aacggtgtgcttaagcaaagctgca

SEQ ID NO: 3133625 - DNA, 25 bp, Homo sapien
agtgtaacgaagatgctccctccaa

SEQ ID NO: 3133626 - DNA, 25 bp, Homo sapien
ctgcatccatctgagctcagttatc

SEQ ID NO: 3133627 - DNA, 25 bp, Homo sapien
taatatttcccacttattcgcctcc

SEQ ID NO: 3133628 - DNA, 25 bp, Homo sapien
catctgagctcagttatccttaaaa

SEQ ID NO: 3133629 - DNA, 25 bp, Homo sapien
acttattcgcctcccctgaaatcac

SEQ ID NO: 3133630 - DNA, 25 bp, Homo sapien
tgttccaagcctgacgttgctacga

SEQ ID NO: 3133631 - DNA, 25 bp, Homo sapien
aagtctttgttccaagcctgacgtt

SEQ ID NO: 3133632 - DNA, 25 bp, Homo sapien
gattctgtaattaactccctccact

SEQ ID NO: 3133633 - DNA, 25 bp, Homo sapien
gcctgacgttgctacgattctgtaa

SEQ ID NO: 3133634 - DNA, 25 bp, Homo sapien
agtctccagttctccgacagacgtt

SEQ ID NO: 3133635 - DNA, 25 bp, Homo sapien
tctgaagtcgaagtactcgcccgct

SEQ ID NO: 3133636 - DNA, 25 bp, Homo sapien
agtttcctaggagtgtcccttctcg

SEQ ID NO: 3133637 - DNA, 25 bp, Homo sapien
agacgtttccctcgcagctctgaag

SEQ ID NO: 3133638 - DNA, 25 bp, Homo sapien
ttcgatccggtagccacagctgaga

SEQ ID NO: 3133639 - DNA, 25 bp, Homo sapien
caatcctggaaaatgagatgtggca

SEQ ID NO: 3133640 - DNA, 25 bp, Homo sapien
tcagctggcacattctaagtagaga

SEQ ID NO: 3133641 - DNA, 25 bp, Homo sapien
gagaatgctattgtcctgaagggaa

SEQ ID NO: 3133642 - DNA, 25 bp, Homo sapien
cagtaaaatggttgagccgtgatct

SEQ ID NO: 3133643 - DNA, 25 bp, Homo sapien
gggctagcaagttactgcagtaaaa

SEQ ID NO: 3133644 - DNA, 25 bp, Homo sapien
gacctctgctggaggactcattaca

SEQ ID NO: 3133645 - DNA, 25 bp, Homo sapien
cctggcttagaatcaatgggtaaaa

SEQ ID NO: 3133646 - DNA, 25 bp, Homo sapien
gatgaaacggaccagatactgccat

SEQ ID NO: 3133647 - DNA, 25 bp, Homo sapien
cttttatttgcgctattaccagatg

SEQ ID NO: 3133648 - DNA, 25 bp, Homo sapien
catggttgtggttgcttttatttgc

SEQ ID NO: 3133649 - DNA, 25 bp, Homo sapien
ttttctttcatggttgtggttgctt

SEQ ID NO: 3133650 - DNA, 25 bp, Homo sapien
gagagaagcatgctaagggcagccc

SEQ ID NO: 3133651 - DNA, 25 bp, Homo sapien
gatgccatggtcaagaacacccaga

SEQ ID NO: 3133652 - DNA, 25 bp, Homo sapien
tgtttgaaacttgaagactgggagt

SEQ ID NO: 3133653 - DNA, 25 bp, Homo sapien
ctcaggtagaggtcagcaagttcct

SEQ ID NO: 3133654 - DNA, 25 bp, Homo sapien
tcatcctccatttggagtacttctt

SEQ ID NO: 3133655 - DNA, 25 bp, Homo sapien
ctccatttggagtacttctttgcaa

SEQ ID NO: 3133656 - DNA, 25 bp, Homo sapien
tttggagtacttctttgcaaagaac

SEQ ID NO: 3133657 - DNA, 25 bp, Homo sapien
ctattatccttattcagatctatga

SEQ ID NO: 3133658 - DNA, 25 bp, Homo sapien
gactgtgttactcttttgccttggg

SEQ ID NO: 3133659 - DNA, 25 bp, Homo sapien
cacacattgcaatggtatggaccat

SEQ ID NO: 3133660 - DNA, 25 bp, Homo sapien
tctcacacattgcaatggtatggac

SEQ ID NO: 3133661 - DNA, 25 bp, Homo sapien
ttttgccttggggagtctcacacat

SEQ ID NO: 3133662 - DNA, 25 bp, Homo sapien
tatatccccagtatggcagaaccgg

SEQ ID NO: 3133663 - DNA, 25 bp, Homo sapien
gcatcctagatgattggcactctgg

SEQ ID NO: 3133664 - DNA, 25 bp, Homo sapien
cactctgggtgtaaaggatacacac

SEQ ID NO: 3133665 - DNA, 25 bp, Homo sapien
gcatggagaaaggaatcatagccca

SEQ ID NO: 3133666 - DNA, 25 bp, Homo sapien
tatttgacaactggtcctgcaaggt

SEQ ID NO: 3133667 - DNA, 25 bp, Homo sapien
tttgacaactggtcctgcaaggtac

SEQ ID NO: 3133668 - DNA, 25 bp, Homo sapien
atatttgacaactggtcctgcaagg

SEQ ID NO: 3133669 - DNA, 25 bp, Homo sapien
aatatttgacaactggtcctgcaag

SEQ ID NO: 3133670 - DNA, 25 bp, Homo sapien
ttgaatttagtcctgtggaatcttg

SEQ ID NO: 3133671 - DNA, 25 bp, Homo sapien
tctattgctcccttacttcctactt

SEQ ID NO: 3133672 - DNA, 25 bp, Homo sapien
atttagtcctgtggaatcttgacca

SEQ ID NO: 3133673 - DNA, 25 bp, Homo sapien
tacttttgaatttagtcctgtggaa

SEQ ID NO: 3133674 - DNA, 25 bp, Homo sapien
acttcaaaggattgcctacttcctg

SEQ ID NO: 3133675 - DNA, 25 bp, Homo sapien
cttcaaaggattgcctacttcctgg

SEQ ID NO: 3133676 - DNA, 25 bp, Homo sapien
agaaggacttcaaaggattgcctac

SEQ ID NO: 3133677 - DNA, 25 bp, Homo sapien
gacttcaaaggattgcctacttcct

SEQ ID NO: 3133678 - DNA, 25 bp, Homo sapien
gacgtgggtcatgtctgggtctcca

SEQ ID NO: 3133679 - DNA, 25 bp, Homo sapien
ctggcaggactatatggacatgggt

SEQ ID NO: 3133680 - DNA, 25 bp, Homo sapien
gtcctgttcattcctgcctgcaata

SEQ ID NO: 3133681 - DNA, 25 bp, Homo sapien
aagcattctgctactcctgatccca

SEQ ID NO: 3133682 - DNA, 25 bp, Homo sapien
gattgttccattgccttctgcaaag

SEQ ID NO: 3133683 - DNA, 25 bp, Homo sapien
ccctgctgtaattgtagcttctctg

SEQ ID NO: 3133684 - DNA, 25 bp, Homo sapien
gtacattatcagacattcccggaaa

SEQ ID NO: 3133685 - DNA, 25 bp, Homo sapien
tgcaaagcttctcgtacccttgggt

SEQ ID NO: 3133686 - DNA, 25 bp, Homo sapien
gatggccgtaatggtctccacaaaa

SEQ ID NO: 3133687 - DNA, 25 bp, Homo sapien
gccgtaatggtctccacaaaatctt

SEQ ID NO: 3133688 - DNA, 25 bp, Homo sapien
tggccgtaatggtctccacaaaatc

SEQ ID NO: 3133689 - DNA, 25 bp, Homo sapien
cagatggccgtaatggtctccacaa

SEQ ID NO: 3133690 - DNA, 25 bp, Homo sapien
actgatgccatttgtaaagttgacc

SEQ ID NO: 3133691 - DNA, 25 bp, Homo sapien
gccttgtctcctggtgccatcagca

SEQ ID NO: 3133692 - DNA, 25 bp, Homo sapien
aatccgtatgtgagaattttgtagc

SEQ ID NO: 3133693 - DNA, 25 bp, Homo sapien
tcatgttctagttctactgatgcca

SEQ ID NO: 3133694 - DNA, 25 bp, Homo sapien
ggaaccctccagcagtagtatggaa

SEQ ID NO: 3133695 - DNA, 25 bp, Homo sapien
catcaacttaggctttgagaggtac

SEQ ID NO: 3133696 - DNA, 25 bp, Homo sapien
gactgacactgctttgtctgtagaa

SEQ ID NO: 3133697 - DNA, 25 bp, Homo sapien
tggaggaggactccctgccatgtct

SEQ ID NO: 3133698 - DNA, 25 bp, Homo sapien
gcttgagcatcgaggaaaccattgg

SEQ ID NO: 3133699 - DNA, 25 bp, Homo sapien
gagggagctcttccagtgcactggt

SEQ ID NO: 3133700 - DNA, 25 bp, Homo sapien
cactggtggtgtcgtcgggtaccac

SEQ ID NO: 3133701 - DNA, 25 bp, Homo sapien
tccctgataagaaaagcttgagcat

SEQ ID NO: 3133702 - DNA, 25 bp, Homo sapien
gtgacacgtttcttgggagtccaac

SEQ ID NO: 3133703 - DNA, 25 bp, Homo sapien
aacacccaatttgcgtcagttcctg

SEQ ID NO: 3133704 - DNA, 25 bp, Homo sapien
agtccaacacccaatttgcgtcagt

SEQ ID NO: 3133705 - DNA, 25 bp, Homo sapien
gacacgtttcttgggagtccaacac

SEQ ID NO: 3133706 - DNA, 25 bp, Homo sapien
ccagtgtaaatccttgagttacggt

SEQ ID NO: 3133707 - DNA, 25 bp, Homo sapien
gagtggatatacctgatgaaagaac

SEQ ID NO: 3133708 - DNA, 25 bp, Homo sapien
gtttggctgtaagtctctgatactt

SEQ ID NO: 3133709 - DNA, 25 bp, Homo sapien
gcactacctgaccacccatggtggg

SEQ ID NO: 3133710 - DNA, 25 bp, Homo sapien
gcgccgtttcttaagccggtctgaa

SEQ ID NO: 3133711 - DNA, 25 bp, Homo sapien
cgcacggtgcgcacacacactggcc

SEQ ID NO: 3133712 - DNA, 25 bp, Homo sapien
cgcgcacggtgcgcacacacactgg

SEQ ID NO: 3133713 - DNA, 25 bp, Homo sapien
cttaagccggtctgaaaagcgcaat

SEQ ID NO: 3133714 - DNA, 25 bp, Homo sapien
gtttcagagatcttccatacatgga

SEQ ID NO: 3133715 - DNA, 25 bp, Homo sapien
ttgtttccagaacgcagggctgctg

SEQ ID NO: 3133716 - DNA, 25 bp, Homo sapien
gctgggtttgctgggttgcatattt

SEQ ID NO: 3133717 - DNA, 25 bp, Homo sapien
tcttccatacatggacccatcagaa

SEQ ID NO: 3133718 - DNA, 25 bp, Homo sapien
ctttttgacgagcaccttgcaggaa

SEQ ID NO: 3133719 - DNA, 25 bp, Homo sapien
tttaggctttttgacgagcaccttg

SEQ ID NO: 3133720 - DNA, 25 bp, Homo sapien
tcatttaggctttttgacgagcacc

SEQ ID NO: 3133721 - DNA, 25 bp, Homo sapien
ggctttttgacgagcaccttgcagg

SEQ ID NO: 3133722 - DNA, 25 bp, Homo sapien
ttccccagcccactgccatttccaa

SEQ ID NO: 3133723 - DNA, 25 bp, Homo sapien
ccccagcccactgccatttccaaca

SEQ ID NO: 3133724 - DNA, 25 bp, Homo sapien
agcccactgccatttccaacaccat

SEQ ID NO: 3133725 - DNA, 25 bp, Homo sapien
ccagcccactgccatttccaacacc

SEQ ID NO: 3133726 - DNA, 25 bp, Homo sapien
cacctgtggttttgcagagaacttt

SEQ ID NO: 3133727 - DNA, 25 bp, Homo sapien
atctctgcgagagtgtagttgtctg

SEQ ID NO: 3133728 - DNA, 25 bp, Homo sapien
taagatctctgcgagagtgtagttg

SEQ ID NO: 3133729 - DNA, 25 bp, Homo sapien
cctgtggttttgcagagaacttttt

SEQ ID NO: 3133730 - DNA, 25 bp, Homo sapien
tgcacattagcaatacttctgggtt

SEQ ID NO: 3133731 - DNA, 25 bp, Homo sapien
gttaatttgaccaacagagtccatg

SEQ ID NO: 3133732 - DNA, 25 bp, Homo sapien
tcgagtctgagtgtatgtctgcaca

SEQ ID NO: 3133733 - DNA, 25 bp, Homo sapien
agggtaggcccaatggctggtacct

SEQ ID NO: 3133734 - DNA, 25 bp, Homo sapien
gataatgaggaagccgataattccg

SEQ ID NO: 3133735 - DNA, 25 bp, Homo sapien
cgggcctcatgtttcctcgggacgt

SEQ ID NO: 3133736 - DNA, 25 bp, Homo sapien
gactttatccggctgctacttctgg

SEQ ID NO: 3133737 - DNA, 25 bp, Homo sapien
gataattccgacaggcccgacttta

SEQ ID NO: 3133738 - DNA, 25 bp, Homo sapien
ccgtatttcaaggtgcggtgctctg

SEQ ID NO: 3133739 - DNA, 25 bp, Homo sapien
caacaaagccactggtggcggcggc

SEQ ID NO: 3133740 - DNA, 25 bp, Homo sapien
actccacctctcagcgttttcaggt

SEQ ID NO: 3133741 - DNA, 25 bp, Homo sapien
tggccggcccaacaaagccactggt

SEQ ID NO: 3133742 - DNA, 25 bp, Homo sapien
agttgggacaaaatacacatttgga

SEQ ID NO: 3133743 - DNA, 25 bp, Homo sapien
ggacaaaatacacatttggattttc

SEQ ID NO: 3133744 - DNA, 25 bp, Homo sapien
gttgggacaaaatacacatttggat

SEQ ID NO: 3133745 - DNA, 25 bp, Homo sapien
caaaatacacatttggattttcctt

SEQ ID NO: 3133746 - DNA, 25 bp, Homo sapien
gaaagtcaatattgaaggactccct

SEQ ID NO: 3133747 - DNA, 25 bp, Homo sapien
caaaccagaatattagtgctcagtg

SEQ ID NO: 3133748 - DNA, 25 bp, Homo sapien
ggtgactcatgggaaagaaagtcaa

SEQ ID NO: 3133749 - DNA, 25 bp, Homo sapien
tcagtgactgagctttcggataagg

SEQ ID NO: 3133750 - DNA, 25 bp, Homo sapien
cataaaggctttcatcttcgtcatc

SEQ ID NO: 3133751 - DNA, 25 bp, Homo sapien
tagatcatcataaaggctttcatct

SEQ ID NO: 3133752 - DNA, 25 bp, Homo sapien
catcataaaggctttcatcttcgtc

SEQ ID NO: 3133753 - DNA, 25 bp, Homo sapien
taaaggctttcatcttcgtcatctt

SEQ ID NO: 3133754 - DNA, 25 bp, Homo sapien
tggcttaaatcttccttgtaccctc

SEQ ID NO: 3133755 - DNA, 25 bp, Homo sapien
taccctccagatagcatgccattca

SEQ ID NO: 3133756 - DNA, 25 bp, Homo sapien
taatggttgaattctagacatggtg

SEQ ID NO: 3133757 - DNA, 25 bp, Homo sapien
ggtgatttttgttgcagggttatgc

SEQ ID NO: 3133758 - DNA, 25 bp, Homo sapien
gaagtaaatcagtgatcatcaaaat

SEQ ID NO: 3133759 - DNA, 25 bp, Homo sapien
taaagctgtttacaagaagtaaatc

SEQ ID NO: 3133760 - DNA, 25 bp, Homo sapien
atcaaaatgtgatttgaagaggttt

SEQ ID NO: 3133761 - DNA, 25 bp, Homo sapien
aatgtctccctctttggtaaagctg

SEQ ID NO: 3133762 - DNA, 25 bp, Homo sapien
tgtcaattgcaaccaaatgatcaaa

SEQ ID NO: 3133763 - DNA, 25 bp, Homo sapien
caaccaaatgatcaaagctgtaagc

SEQ ID NO: 3133764 - DNA, 25 bp, Homo sapien
aatgatcaaagctgtaagcaaagcc

SEQ ID NO: 3133765 - DNA, 25 bp, Homo sapien
gatcaaagctgtaagcaaagccagc

SEQ ID NO: 3133766 - DNA, 25 bp, Homo sapien
cccctgaggttggttgttgatacca

SEQ ID NO: 3133767 - DNA, 25 bp, Homo sapien
tataggctagccaaaagttggcagg

SEQ ID NO: 3133768 - DNA, 25 bp, Homo sapien
gcaggtagcctgtgcacaagccctg

SEQ ID NO: 3133769 - DNA, 25 bp, Homo sapien
caagccctggacttaataggagtaa

SEQ ID NO: 3133770 - DNA, 25 bp, Homo sapien
caaaggctccgagctggtaaagacc

SEQ ID NO: 3133771 - DNA, 25 bp, Homo sapien
tgaacagaggtccaaatgctaagaa

SEQ ID NO: 3133772 - DNA, 25 bp, Homo sapien
tgaagggacatctatttcaagagca

SEQ ID NO: 3133773 - DNA, 25 bp, Homo sapien
taaagaccttggtgtattacaggag

SEQ ID NO: 3133774 - DNA, 25 bp, Homo sapien
cctgcacactctacctttaagaacc

SEQ ID NO: 3133775 - DNA, 25 bp, Homo sapien
tgcccctgcacactctacctttaag

SEQ ID NO: 3133776 - DNA, 25 bp, Homo sapien
ctgcccctgcacactctacctttaa

SEQ ID NO: 3133777 - DNA, 25 bp, Homo sapien
cacactctacctttaagaacccaga

SEQ ID NO: 3133778 - DNA, 25 bp, Homo sapien
ttacattcaccattcatactggagt

SEQ ID NO: 3133779 - DNA, 25 bp, Homo sapien
taaattacattcaccattcatactg

SEQ ID NO: 3133780 - DNA, 25 bp, Homo sapien
tccatgacacattaaattacattca

SEQ ID NO: 3133781 - DNA, 25 bp, Homo sapien
tttccatgacacattaaattacatt

SEQ ID NO: 3133782 - DNA, 25 bp, Homo sapien
cacactgatagtgatgatagtcaaa

SEQ ID NO: 3133783 - DNA, 25 bp, Homo sapien
tttactgcccagcttgccactgaga

SEQ ID NO: 3133784 - DNA, 25 bp, Homo sapien
tgttgatgcagttggttacaaagca

SEQ ID NO: 3133785 - DNA, 25 bp, Homo sapien
ttgcctacttcccaaagagctatgt

SEQ ID NO: 3133786 - DNA, 25 bp, Homo sapien
tctactctggcaattactggctttg

SEQ ID NO: 3133787 - DNA, 25 bp, Homo sapien
ttagtgctctgtctgttctactctg

SEQ ID NO: 3133788 - DNA, 25 bp, Homo sapien
taagtgccagagcaagaatcttgag

SEQ ID NO: 3133789 - DNA, 25 bp, Homo sapien
gaatcttgagctctcttaccacagg

SEQ ID NO: 3133790 - DNA, 25 bp, Homo sapien
gaatgtcaagtagacatcaacctga

SEQ ID NO: 3133791 - DNA, 25 bp, Homo sapien
gtcaagtagacatcaacctgatcct

SEQ ID NO: 3133792 - DNA, 25 bp, Homo sapien
ggggaatgtcaagtagacatcaacc

SEQ ID NO: 3133793 - DNA, 25 bp, Homo sapien
agtagacatcaacctgatccttcat

SEQ ID NO: 3133794 - DNA, 25 bp, Homo sapien
tcttctgtcattagggtactgatgg

SEQ ID NO: 3133795 - DNA, 25 bp, Homo sapien
gccaaagccagtatatctgggagta

SEQ ID NO: 3133796 - DNA, 25 bp, Homo sapien
gtctccctaataccagtgtagttca

SEQ ID NO: 3133797 - DNA, 25 bp, Homo sapien
gagcatgcctgaggctctctgccca

SEQ ID NO: 3133798 - DNA, 25 bp, Homo sapien
aaattatcacactaaatgctttttg

SEQ ID NO: 3133799 - DNA, 25 bp, Homo sapien
ctaaattatcacactaaatgctttt

SEQ ID NO: 3133800 - DNA, 25 bp, Homo sapien
aattatcacactaaatgctttttgt

SEQ ID NO: 3133801 - DNA, 25 bp, Homo sapien
tatcacactaaatgctttttgttcc

SEQ ID NO: 3133802 - DNA, 25 bp, Homo sapien
gcgcttcgtaaatcccactgttgct

SEQ ID NO: 3133803 - DNA, 25 bp, Homo sapien
cagagtacaaacagcgtttgtgaag

SEQ ID NO: 3133804 - DNA, 25 bp, Homo sapien
tgtgaagctcacagcgcttcgtaaa

SEQ ID NO: 3133805 - DNA, 25 bp, Homo sapien
tgttgcttgtgccttcacgaagccc

SEQ ID NO: 3133806 - DNA, 25 bp, Homo sapien
tgccctaaagggatttatggaagcc

SEQ ID NO: 3133807 - DNA, 25 bp, Homo sapien
tctcttctgggagtagacctgccct

SEQ ID NO: 3133808 - DNA, 25 bp, Homo sapien
gggatttatggaagccttatttctc

SEQ ID NO: 3133809 - DNA, 25 bp, Homo sapien
tgggagtagacctgccctaaaggga

SEQ ID NO: 3133810 - DNA, 25 bp, Homo sapien
caagttcaaaggcagttttcatcat

SEQ ID NO: 3133811 - DNA, 25 bp, Homo sapien
cagaaccttcaagttcaaaggcagt

SEQ ID NO: 3133812 - DNA, 25 bp, Homo sapien
ttcaagttcaaaggcagttttcatc

SEQ ID NO: 3133813 - DNA, 25 bp, Homo sapien
cgcagaaccttcaagttcaaaggca

SEQ ID NO: 3133814 - DNA, 25 bp, Homo sapien
gatgtcttttaatttgtgcacttac

SEQ ID NO: 3133815 - DNA, 25 bp, Homo sapien
cttcagatgtcttttaatttgtgca

SEQ ID NO: 3133816 - DNA, 25 bp, Homo sapien
cagatgtcttttaatttgtgcactt

SEQ ID NO: 3133817 - DNA, 25 bp, Homo sapien
ttcagatgtcttttaatttgtgcac

SEQ ID NO: 3133818 - DNA, 25 bp, Homo sapien
gtcccagatctgcaactatcaccag

SEQ ID NO: 3133819 - DNA, 25 bp, Homo sapien
gatctcacattcgttctctcaccta

SEQ ID NO: 3133820 - DNA, 25 bp, Homo sapien
caggcacgagcaaccatgctgagca

SEQ ID NO: 3133821 - DNA, 25 bp, Homo sapien
tatcaccagttacctgatctcacat

SEQ ID NO: 3133822 - DNA, 25 bp, Homo sapien
taatggccccaactgtccaaaagtg

SEQ ID NO: 3133823 - DNA, 25 bp, Homo sapien
cagagagcttcggagacatagacac

SEQ ID NO: 3133824 - DNA, 25 bp, Homo sapien
gattgacggacaactgtaatggccc

SEQ ID NO: 3133825 - DNA, 25 bp, Homo sapien
tatctggctcttgtagggaaacaac

SEQ ID NO: 3133826 - DNA, 25 bp, Homo sapien
gcgattccatgatagcttcctccca

SEQ ID NO: 3133827 - DNA, 25 bp, Homo sapien
caggctgattttaatgctggccaaa

SEQ ID NO: 3133828 - DNA, 25 bp, Homo sapien
tcatccctcatgtcagctgtagtgg

SEQ ID NO: 3133829 - DNA, 25 bp, Homo sapien
tcaattgcgtctatgggcatcgcgt

SEQ ID NO: 3133830 - DNA, 25 bp, Homo sapien
cattaggcagaatatcgggaaagtg

SEQ ID NO: 3133831 - DNA, 25 bp, Homo sapien
tatggaagcaagtcgatagtaagtt

SEQ ID NO: 3133832 - DNA, 25 bp, Homo sapien
caaatatccagctaaagagattcag

SEQ ID NO: 3133833 - DNA, 25 bp, Homo sapien
aaattggctatagcagaggataaac

SEQ ID NO: 3133834 - DNA, 25 bp, Homo sapien
aattagtggcttcccatgattccaa

SEQ ID NO: 3133835 - DNA, 25 bp, Homo sapien
gattccaatcaagcccaattagact

SEQ ID NO: 3133836 - DNA, 25 bp, Homo sapien
caagaatccgtgttctgcccattaa

SEQ ID NO: 3133837 - DNA, 25 bp, Homo sapien
aacatggattgatcttgctagcaca

SEQ ID NO: 3133838 - DNA, 25 bp, Homo sapien
cacggtatccagtagaagtcgttga

SEQ ID NO: 3133839 - DNA, 25 bp, Homo sapien
tccagtagaagtcgttgataacaag

SEQ ID NO: 3133840 - DNA, 25 bp, Homo sapien
ttaagcacggtatccagtagaagtc

SEQ ID NO: 3133841 - DNA, 25 bp, Homo sapien
tagaagtcgttgataacaaggtgcc

SEQ ID NO: 3133842 - DNA, 25 bp, Homo sapien
tttattgtgttgctgatcatgaatg

SEQ ID NO: 3133843 - DNA, 25 bp, Homo sapien
ctataaggcagcatttattgtgttg

SEQ ID NO: 3133844 - DNA, 25 bp, Homo sapien
atcatagctcacttctagctctgtg

SEQ ID NO: 3133845 - DNA, 25 bp, Homo sapien
ataaggcagcatttattgtgttgct

SEQ ID NO: 3133846 - DNA, 25 bp, Homo sapien
aatttttttagtggtgctatatcca

SEQ ID NO: 3133847 - DNA, 25 bp, Homo sapien
aactgtttgctaaagctgtcaacct

SEQ ID NO: 3133848 - DNA, 25 bp, Homo sapien
ttagtggtgctatatccagaatgct

SEQ ID NO: 3133849 - DNA, 25 bp, Homo sapien
ttttttagtggtgctatatccagaa

SEQ ID NO: 3133850 - DNA, 25 bp, Homo sapien
agtccagagcacagaataaggagcc

SEQ ID NO: 3133851 - DNA, 25 bp, Homo sapien
taagtccagagcacagaataaggag

SEQ ID NO: 3133852 - DNA, 25 bp, Homo sapien
gtccagagcacagaataaggagcca

SEQ ID NO: 3133853 - DNA, 25 bp, Homo sapien
atgtaagtccagagcacagaataag

SEQ ID NO: 3133854 - DNA, 25 bp, Homo sapien
ggttcccttacttgccttgttcaga

SEQ ID NO: 3133855 - DNA, 25 bp, Homo sapien
gcctgctgtgctccggtaccgaggc

SEQ ID NO: 3133856 - DNA, 25 bp, Homo sapien
taccgaggcagtaccttgcagtagg

SEQ ID NO: 3133857 - DNA, 25 bp, Homo sapien
ttctttggagattgcgagcagtctt

SEQ ID NO: 3133858 - DNA, 25 bp, Homo sapien
tgatcactatagataatgctttggg

SEQ ID NO: 3133859 - DNA, 25 bp, Homo sapien
aaggtatgatcactatagataatgc

SEQ ID NO: 3133860 - DNA, 25 bp, Homo sapien
cttctgcagaaaggtatgatcacta

SEQ ID NO: 3133861 - DNA, 25 bp, Homo sapien
gcagaaaggtatgatcactatagat

SEQ ID NO: 3133862 - DNA, 25 bp, Homo sapien
gaaagtacttcctatgagggccaaa

SEQ ID NO: 3133863 - DNA, 25 bp, Homo sapien
aagtacttcctatgagggccaaaat

SEQ ID NO: 3133864 - DNA, 25 bp, Homo sapien
aaataacggtaacatttggagtcag

SEQ ID NO: 3133865 - DNA, 25 bp, Homo sapien
tacttcctatgagggccaaaataac

SEQ ID NO: 3133866 - DNA, 25 bp, Homo sapien
ctgagatagtctgctaggtgaggca

SEQ ID NO: 3133867 - DNA, 25 bp, Homo sapien
tgtcctgagatagtctgctaggtga

SEQ ID NO: 3133868 - DNA, 25 bp, Homo sapien
tcctgagatagtctgctaggtgagg

SEQ ID NO: 3133869 - DNA, 25 bp, Homo sapien
cctgagatagtctgctaggtgaggc

SEQ ID NO: 3133870 - DNA, 25 bp, Homo sapien
taataacatgtctgtacaggaagga

SEQ ID NO: 3133871 - DNA, 25 bp, Homo sapien
gtaacaaaactggaactcgtggata

SEQ ID NO: 3133872 - DNA, 25 bp, Homo sapien
ctacttgtttaagcagcctccaggg

SEQ ID NO: 3133873 - DNA, 25 bp, Homo sapien
aagtgcaaagggtgtgttgagttct

SEQ ID NO: 3133874 - DNA, 25 bp, Homo sapien
attgccatcttcagttgaagatgat

SEQ ID NO: 3133875 - DNA, 25 bp, Homo sapien
cttcagttgaagatgattggaattt

SEQ ID NO: 3133876 - DNA, 25 bp, Homo sapien
catcttcagttgaagatgattggaa

SEQ ID NO: 3133877 - DNA, 25 bp, Homo sapien
gccatcttcagttgaagatgattgg

SEQ ID NO: 3133878 - DNA, 25 bp, Homo sapien
tccacagcagggctgtcctgttagt

SEQ ID NO: 3133879 - DNA, 25 bp, Homo sapien
cttcatctctgttactggagaagga

SEQ ID NO: 3133880 - DNA, 25 bp, Homo sapien
acagcagggctgtcctgttagtcat

SEQ ID NO: 3133881 - DNA, 25 bp, Homo sapien
tggagaaggaactcttccacagcag

SEQ ID NO: 3133882 - DNA, 25 bp, Homo sapien
ccttgatgattagagggttagggtc

SEQ ID NO: 3133883 - DNA, 25 bp, Homo sapien
ttctactaggtgtcttagaactgac

SEQ ID NO: 3133884 - DNA, 25 bp, Homo sapien
gcaaatggtttctactaggtgtctt

SEQ ID NO: 3133885 - DNA, 25 bp, Homo sapien
gattagagggttagggtctcctcca

SEQ ID NO: 3133886 - DNA, 25 bp, Homo sapien
ctgggtgtagttgtagatggtaatt

SEQ ID NO: 3133887 - DNA, 25 bp, Homo sapien
tcttgcttagaatattcactgaaaa

SEQ ID NO: 3133888 - DNA, 25 bp, Homo sapien
agttgtagatggtaattaaaggcac

SEQ ID NO: 3133889 - DNA, 25 bp, Homo sapien
tattttggatgtcactggatgcccc

SEQ ID NO: 3133890 - DNA, 25 bp, Homo sapien
atggggtttcatcatgttgaccagg

SEQ ID NO: 3133891 - DNA, 25 bp, Homo sapien
cctggttcaagctattcttctgact

SEQ ID NO: 3133892 - DNA, 25 bp, Homo sapien
tggggtttcatcatgttgaccagga

SEQ ID NO: 3133893 - DNA, 25 bp, Homo sapien
tccctggttcaagctattcttctga

SEQ ID NO: 3133894 - DNA, 25 bp, Homo sapien
tatgtctatagacactgatacgtgt

SEQ ID NO: 3133895 - DNA, 25 bp, Homo sapien
actgatacgtgtcccagattccagg

SEQ ID NO: 3133896 - DNA, 25 bp, Homo sapien
gtctatagacactgatacgtgtccc

SEQ ID NO: 3133897 - DNA, 25 bp, Homo sapien
tagacactgatacgtgtcccagatt

SEQ ID NO: 3133898 - DNA, 25 bp, Homo sapien
ctgcaactgccacctcccggttcaa

SEQ ID NO: 3133899 - DNA, 25 bp, Homo sapien
cttatactcctgacctcgggatccg

SEQ ID NO: 3133900 - DNA, 25 bp, Homo sapien
ggtcttatactcctgacctcgggat

SEQ ID NO: 3133901 - DNA, 25 bp, Homo sapien
tgcaactgccacctcccggttcaag

SEQ ID NO: 3133902 - DNA, 25 bp, Homo sapien
taagacccagtattaatattggtta

SEQ ID NO: 3133903 - DNA, 25 bp, Homo sapien
ggttataataatgcgtgactacata

SEQ ID NO: 3133904 - DNA, 25 bp, Homo sapien
taatgcgtgactacatacaagctaa

SEQ ID NO: 3133905 - DNA, 25 bp, Homo sapien
aatattggttataataatgcgtgac

SEQ ID NO: 3133906 - DNA, 25 bp, Homo sapien
tctggagttgagatatgaactctga

SEQ ID NO: 3133907 - DNA, 25 bp, Homo sapien
tctgatggaccagcaaactggacct

SEQ ID NO: 3133908 - DNA, 25 bp, Homo sapien
tttcacagcgcacagctgtgtctac

SEQ ID NO: 3133909 - DNA, 25 bp, Homo sapien
ggacatgagtcacaggaatcctaat

SEQ ID NO: 3133910 - DNA, 25 bp, Homo sapien
gcatcagcagggttgattcgctctg

SEQ ID NO: 3133911 - DNA, 25 bp, Homo sapien
tctcacaggtttggaggctcaaaat

SEQ ID NO: 3133912 - DNA, 25 bp, Homo sapien
tgaagaagaagcattacccagagtt

SEQ ID NO: 3133913 - DNA, 25 bp, Homo sapien
gaatgcggtgagagtgatcttaccc

SEQ ID NO: 3133914 - DNA, 25 bp, Homo sapien
ttcctctaccaaggtgcttgttttc

SEQ ID NO: 3133915 - DNA, 25 bp, Homo sapien
tatgccgttcctctaccaaggtgct

SEQ ID NO: 3133916 - DNA, 25 bp, Homo sapien
gccgttcctctaccaaggtgcttgt

SEQ ID NO: 3133917 - DNA, 25 bp, Homo sapien
tttatgccgttcctctaccaaggtg

SEQ ID NO: 3133918 - DNA, 25 bp, Homo sapien
ggatggtttccgcttccaaatcttc

SEQ ID NO: 3133919 - DNA, 25 bp, Homo sapien
tacaaatatcttggtcctttcctcg

SEQ ID NO: 3133920 - DNA, 25 bp, Homo sapien
gctctccatctcctcggaggatggt

SEQ ID NO: 3133921 - DNA, 25 bp, Homo sapien
cctcgcttttagctccacacctggt

SEQ ID NO: 3133922 - DNA, 25 bp, Homo sapien
taattgtcttaagattggaagattc

SEQ ID NO: 3133923 - DNA, 25 bp, Homo sapien
gaagagatcccaagaactttgcacg

SEQ ID NO: 3133924 - DNA, 25 bp, Homo sapien
tactagagagtccaccagctgtgct

SEQ ID NO: 3133925 - DNA, 25 bp, Homo sapien
cgtctgtatacaactgtcacctgca

SEQ ID NO: 3133926 - DNA, 25 bp, Homo sapien
caagccttagcatccgggcctgaat

SEQ ID NO: 3133927 - DNA, 25 bp, Homo sapien
gatgctaaaagagatgcccagccat

SEQ ID NO: 3133928 - DNA, 25 bp, Homo sapien
ctctagtctgtgtgctccgggtgac

SEQ ID NO: 3133929 - DNA, 25 bp, Homo sapien
tacagactgttcaaggatgctaaaa

SEQ ID NO: 3133930 - DNA, 25 bp, Homo sapien
tccgggtgacttgttttcaattgct

SEQ ID NO: 3133931 - DNA, 25 bp, Homo sapien
ataggcatttagtatctcacagctc

SEQ ID NO: 3133932 - DNA, 25 bp, Homo sapien
cttaaaacaacaataggcatttagt

SEQ ID NO: 3133933 - DNA, 25 bp, Homo sapien
cttaattgtgttcttctggacaggg

SEQ ID NO: 3133934 - DNA, 25 bp, Homo sapien
gtcaggaattcaggagcttaattgt

SEQ ID NO: 3133935 - DNA, 25 bp, Homo sapien
gcatggaccattgcacttgcctggc

SEQ ID NO: 3133936 - DNA, 25 bp, Homo sapien
gaacatgcaggtcacatttaatggt

SEQ ID NO: 3133937 - DNA, 25 bp, Homo sapien
tgaaagtgttggtgggccctacctg

SEQ ID NO: 3133938 - DNA, 25 bp, Homo sapien
ggtactacctggacaacatgaaggg

SEQ ID NO: 3133939 - DNA, 25 bp, Homo sapien
cataggtgtcctaaaacggattcct

SEQ ID NO: 3133940 - DNA, 25 bp, Homo sapien
caggatggcttcagacggtgacaca

SEQ ID NO: 3133941 - DNA, 25 bp, Homo sapien
taagatccctccatgaaatggctcc

SEQ ID NO: 3133942 - DNA, 25 bp, Homo sapien
caatggttgtgtgcctttaagatcc

SEQ ID NO: 3133943 - DNA, 25 bp, Homo sapien
gaggctgtggtgggcggatcacgag

SEQ ID NO: 3133944 - DNA, 25 bp, Homo sapien
catgtctcttatcccagaactttgg

SEQ ID NO: 3133945 - DNA, 25 bp, Homo sapien
tcctggctaagagggtgaaatcccg

SEQ ID NO: 3133946 - DNA, 25 bp, Homo sapien
gtcaggtgatcgagaccatcctggc

SEQ ID NO: 3133947 - DNA, 25 bp, Homo sapien
acaggatttggggacagttttagat

SEQ ID NO: 3133948 - DNA, 25 bp, Homo sapien
ttacccagacaggagtgatcttggc

SEQ ID NO: 3133949 - DNA, 25 bp, Homo sapien
tctttctattcagttaacaggattt

SEQ ID NO: 3133950 - DNA, 25 bp, Homo sapien
tagataggagggtaaaactctaata

SEQ ID NO: 3133951 - DNA, 25 bp, Homo sapien
tcacatccattgtaggcatttgtct

SEQ ID NO: 3133952 - DNA, 25 bp, Homo sapien
agtttctgtacggagcctgagatat

SEQ ID NO: 3133953 - DNA, 25 bp, Homo sapien
attgtaggcatttgtctgtgttctg

SEQ ID NO: 3133954 - DNA, 25 bp, Homo sapien
taagagtttctgtacggagcctgag

SEQ ID NO: 3133955 - DNA, 25 bp, Homo sapien
ttaagaatcaaggtcgaaggtcatc

SEQ ID NO: 3133956 - DNA, 25 bp, Homo sapien
aagaaagggctaattgctgcctgga

SEQ ID NO: 3133957 - DNA, 25 bp, Homo sapien
tcactgttggtaagtaatggaggca

SEQ ID NO: 3133958 - DNA, 25 bp, Homo sapien
gatctgaagtcctgtgcgctattca

SEQ ID NO: 3133959 - DNA, 25 bp, Homo sapien
ctccaaaagtaatattagatttgat

SEQ ID NO: 3133960 - DNA, 25 bp, Homo sapien
cctccaaaagtaatattagatttga

SEQ ID NO: 3133961 - DNA, 25 bp, Homo sapien
tccaaaagtaatattagatttgatt

SEQ ID NO: 3133962 - DNA, 25 bp, Homo sapien
tcctccaaaagtaatattagatttg

SEQ ID NO: 3133963 - DNA, 25 bp, Homo sapien
cacaggctagtcatataaagactta

SEQ ID NO: 3133964 - DNA, 25 bp, Homo sapien
tgggtcaagccaccacaggctagtc

SEQ ID NO: 3133965 - DNA, 25 bp, Homo sapien
gttattgtgggtcaagccaccacag

SEQ ID NO: 3133966 - DNA, 25 bp, Homo sapien
ggtttccagccttaaaattgacatc

SEQ ID NO: 3133967 - DNA, 25 bp, Homo sapien
gggtagaactgacttctatggatgt

SEQ ID NO: 3133968 - DNA, 25 bp, Homo sapien
agaaattctctagaactgtttgatt

SEQ ID NO: 3133969 - DNA, 25 bp, Homo sapien
tgtgtttgatcatagggcttggccg

SEQ ID NO: 3133970 - DNA, 25 bp, Homo sapien
tctttcctgattgctgcagtttact

SEQ ID NO: 3133971 - DNA, 25 bp, Homo sapien
ggcgctaacagctaattccacagga

SEQ ID NO: 3133972 - DNA, 25 bp, Homo sapien
tcactgatgagctggcatcgcaggc

SEQ ID NO: 3133973 - DNA, 25 bp, Homo sapien
ggaatttctgattgaggcgctaaca

SEQ ID NO: 3133974 - DNA, 25 bp, Homo sapien
ctacaagtgtgaaccggcagcctgt

SEQ ID NO: 3133975 - DNA, 25 bp, Homo sapien
aaacctgtgactttgccgcaaggct

SEQ ID NO: 3133976 - DNA, 25 bp, Homo sapien
tgactttgccgcaaggctctgctct

SEQ ID NO: 3133977 - DNA, 25 bp, Homo sapien
tcaagacccactttcaaaacctgtg

SEQ ID NO: 3133978 - DNA, 25 bp, Homo sapien
tgtgacaatttgaaaggcataacaa

SEQ ID NO: 3133979 - DNA, 25 bp, Homo sapien
aattccaagcccatgatgccagtca

SEQ ID NO: 3133980 - DNA, 25 bp, Homo sapien
cttttttgaagtcctggatgctgac

SEQ ID NO: 3133981 - DNA, 25 bp, Homo sapien
tgctgacacagaatccaaattccaa

SEQ ID NO: 3133982 - DNA, 25 bp, Homo sapien
ttttgaagtcctggatgctgacaca

SEQ ID NO: 3133983 - DNA, 25 bp, Homo sapien
gaagtttcagacaagatccggcatg

SEQ ID NO: 3133984 - DNA, 25 bp, Homo sapien
gaaggcattgctagtttgtattgtc

SEQ ID NO: 3133985 - DNA, 25 bp, Homo sapien
tatccacgcaagaaggaagcattga

SEQ ID NO: 3133986 - DNA, 25 bp, Homo sapien
taagtaacaaaattccacgtcctgc

SEQ ID NO: 3133987 - DNA, 25 bp, Homo sapien
cattacttgcgctgtcttgtggagt

SEQ ID NO: 3133988 - DNA, 25 bp, Homo sapien
gttttagttgattgttcagttaatg

SEQ ID NO: 3133989 - DNA, 25 bp, Homo sapien
attggctatagagtcattacttgcg

SEQ ID NO: 3133990 - DNA, 25 bp, Homo sapien
gagtcattacttgcgctgtcttgtg

SEQ ID NO: 3133991 - DNA, 25 bp, Homo sapien
cgctgagtgctgtcatcttaaaatg

SEQ ID NO: 3133992 - DNA, 25 bp, Homo sapien
aatgacaaatgcagtgcacattatt

SEQ ID NO: 3133993 - DNA, 25 bp, Homo sapien
ccgtgaagggtcctttgcaaataga

SEQ ID NO: 3133994 - DNA, 25 bp, Homo sapien
aatgcactaaacatggcaaaacaga

SEQ ID NO: 3133995 - DNA, 25 bp, Homo sapien
caggacctgcttggagccttctctc

SEQ ID NO: 3133996 - DNA, 25 bp, Homo sapien
ggttctattctgattcaggacctgc

SEQ ID NO: 3133997 - DNA, 25 bp, Homo sapien
atgtaggttctattctgattcagga

SEQ ID NO: 3133998 - DNA, 25 bp, Homo sapien
cttctctccaactcatatggcattc

SEQ ID NO: 3133999 - DNA, 25 bp, Homo sapien
gttttgctgcctttgtaaccaatgg

SEQ ID NO: 3134000 - DNA, 25 bp, Homo sapien
tgtaaccaatgggtttccttgcctc

SEQ ID NO: 3134001 - DNA, 25 bp, Homo sapien
gctgcctttgtaaccaatgggtttc

SEQ ID NO: 3134002 - DNA, 25 bp, Homo sapien
tcgttttgctgcctttgtaaccaat

SEQ ID NO: 3134003 - DNA, 25 bp, Homo sapien
gacagagtatcacttttcagcactg

SEQ ID NO: 3134004 - DNA, 25 bp, Homo sapien
cagtcatagctgaggcaagaccgaa

SEQ ID NO: 3134005 - DNA, 25 bp, Homo sapien
caagaccgaataccccagatcagtg

SEQ ID NO: 3134006 - DNA, 25 bp, Homo sapien
ccctgatgccaccttgagaggcgaa

SEQ ID NO: 3134007 - DNA, 25 bp, Homo sapien
tatgatagggatctccatcttttcc

SEQ ID NO: 3134008 - DNA, 25 bp, Homo sapien
gattctcaagttcttatgataggga

SEQ ID NO: 3134009 - DNA, 25 bp, Homo sapien
tcctgaaaggggaacttgacctgct

SEQ ID NO: 3134010 - DNA, 25 bp, Homo sapien
ttgacctgctaaggattctcaagtt

SEQ ID NO: 3134011 - DNA, 25 bp, Homo sapien
agcccacagcttctccgcgaaataa

SEQ ID NO: 3134012 - DNA, 25 bp, Homo sapien
cagcttctccgcgaaataactgttg

SEQ ID NO: 3134013 - DNA, 25 bp, Homo sapien
tctccgcgaaataactgttgagcac

SEQ ID NO: 3134014 - DNA, 25 bp, Homo sapien
gcttctccgcgaaataactgttgag

SEQ ID NO: 3134015 - DNA, 25 bp, Homo sapien
tctgatttgctgttggcttactgga

SEQ ID NO: 3134016 - DNA, 25 bp, Homo sapien
tgagattcgaagacgagtccgggct

SEQ ID NO: 3134017 - DNA, 25 bp, Homo sapien
tactaacccagtgagggtacatgga

SEQ ID NO: 3134018 - DNA, 25 bp, Homo sapien
tcttgacagcagctatgaaatctac

SEQ ID NO: 3134019 - DNA, 25 bp, Homo sapien
ttcaaacacctctcttcaatgcctg

SEQ ID NO: 3134020 - DNA, 25 bp, Homo sapien
tccatcccaagttgacatggctgtg

SEQ ID NO: 3134021 - DNA, 25 bp, Homo sapien
aaagggcttatgaattgaacttcca

SEQ ID NO: 3134022 - DNA, 25 bp, Homo sapien
tgtgatatgggtctcatagagcctc

SEQ ID NO: 3134023 - DNA, 25 bp, Homo sapien
cagagtgagtcccgcggttgtgttt

SEQ ID NO: 3134024 - DNA, 25 bp, Homo sapien
ttctctgcccacataaattcttgtt

SEQ ID NO: 3134025 - DNA, 25 bp, Homo sapien
agtcccgcggttgtgtttatcttct

SEQ ID NO: 3134026 - DNA, 25 bp, Homo sapien
gtgagtcccgcggttgtgtttatct

SEQ ID NO: 3134027 - DNA, 25 bp, Homo sapien
cagaaacatcgtcttctatttgctt

SEQ ID NO: 3134028 - DNA, 25 bp, Homo sapien
tgtgaaagtggtctatcatttagct

SEQ ID NO: 3134029 - DNA, 25 bp, Homo sapien
tttgtgaaagtggtctatcatttag

SEQ ID NO: 3134030 - DNA, 25 bp, Homo sapien
aaattaacatcagaaacatcgtctt

SEQ ID NO: 3134031 - DNA, 25 bp, Homo sapien
gtcctctagctattcttatcccaag

SEQ ID NO: 3134032 - DNA, 25 bp, Homo sapien
aagcttgattccgtgttcagcattg

SEQ ID NO: 3134033 - DNA, 25 bp, Homo sapien
tattcttatcccaagcttgattccg

SEQ ID NO: 3134034 - DNA, 25 bp, Homo sapien
tatcccaagcttgattccgtgttca

SEQ ID NO: 3134035 - DNA, 25 bp, Homo sapien
aggttctgccaaggtatgtggtttc

SEQ ID NO: 3134036 - DNA, 25 bp, Homo sapien
ttattgatgaataataaatcctggc

SEQ ID NO: 3134037 - DNA, 25 bp, Homo sapien
ttgatgaataataaatcctggcaaa

SEQ ID NO: 3134038 - DNA, 25 bp, Homo sapien
gatgaataataaatcctggcaaatg

SEQ ID NO: 3134039 - DNA, 25 bp, Homo sapien
caaatgttcaaagcattttactttt

SEQ ID NO: 3134040 - DNA, 25 bp, Homo sapien
tgtctacccaggatctcttttctca

SEQ ID NO: 3134041 - DNA, 25 bp, Homo sapien
aataacggtgcttatctgttgttcc

SEQ ID NO: 3134042 - DNA, 25 bp, Homo sapien
ctgcagaataaacaaagggtaatgt

SEQ ID NO: 3134043 - DNA, 25 bp, Homo sapien
tcttggttgtgaatacattaggtgg

SEQ ID NO: 3134044 - DNA, 25 bp, Homo sapien
atactggatggaattcagcatatgt

SEQ ID NO: 3134045 - DNA, 25 bp, Homo sapien
atgtgttgtaggaatactggatgga

SEQ ID NO: 3134046 - DNA, 25 bp, Homo sapien
tactggatggaattcagcatatgta

SEQ ID NO: 3134047 - DNA, 25 bp, Homo sapien
tgtgttgtaggaatactggatggaa

SEQ ID NO: 3134048 - DNA, 25 bp, Homo sapien
aaaatcctgggagtatctgtcatct

SEQ ID NO: 3134049 - DNA, 25 bp, Homo sapien
tctgtctgttgcttaaagacgatgt

SEQ ID NO: 3134050 - DNA, 25 bp, Homo sapien
taaaatcctgggagtatctgtcatc

SEQ ID NO: 3134051 - DNA, 25 bp, Homo sapien
gggaagattctgtctgttgcttaaa

SEQ ID NO: 3134052 - DNA, 25 bp, Homo sapien
aaattgaacaatagacggctctcca

SEQ ID NO: 3134053 - DNA, 25 bp, Homo sapien
tagcttgataccgaaaattgaacaa

SEQ ID NO: 3134054 - DNA, 25 bp, Homo sapien
gcttgataccgaaaattgaacaata

SEQ ID NO: 3134055 - DNA, 25 bp, Homo sapien
ttgaacaatagacggctctccattg

SEQ ID NO: 3134056 - DNA, 25 bp, Homo sapien
agaaaaatgggaaagcggagataca

SEQ ID NO: 3134057 - DNA, 25 bp, Homo sapien
aaaaatgggaaagcggagatacagg

SEQ ID NO: 3134058 - DNA, 25 bp, Homo sapien
agcggagatacaggggtgattcttc

SEQ ID NO: 3134059 - DNA, 25 bp, Homo sapien
aaagcggagatacaggggtgattct

SEQ ID NO: 3134060 - DNA, 25 bp, Homo sapien
gagcaggcaccctcaagtgcttgga

SEQ ID NO: 3134061 - DNA, 25 bp, Homo sapien
caagagtgcacatacctagccaggt

SEQ ID NO: 3134062 - DNA, 25 bp, Homo sapien
ggcttttgctgactccatggtggca

SEQ ID NO: 3134063 - DNA, 25 bp, Homo sapien
tatagagtagagtccacacggtctc

SEQ ID NO: 3134064 - DNA, 25 bp, Homo sapien
tgatttggtgagaaccgtttttcca

SEQ ID NO: 3134065 - DNA, 25 bp, Homo sapien
tttggcctggttgtggcttgtgcta

SEQ ID NO: 3134066 - DNA, 25 bp, Homo sapien
tgctcaattgatttggtgagaaccg

SEQ ID NO: 3134067 - DNA, 25 bp, Homo sapien
ggcttgtgctatgggatgctccagc

SEQ ID NO: 3134068 - DNA, 25 bp, Homo sapien
ttagaaggatcgtggcccaggttga

SEQ ID NO: 3134069 - DNA, 25 bp, Homo sapien
tttagaaggatcgtggcccaggttg

SEQ ID NO: 3134070 - DNA, 25 bp, Homo sapien
tgatgaatgccaggcgttcacgttt

SEQ ID NO: 3134071 - DNA, 25 bp, Homo sapien
tgaatgatgaatgccaggcgttcac

SEQ ID NO: 3134072 - DNA, 25 bp, Homo sapien
agtgtgaatgatgaatgccaggcgt

SEQ ID NO: 3134073 - DNA, 25 bp, Homo sapien
tgccaggcgttcacgtttctcaggg

SEQ ID NO: 3134074 - DNA, 25 bp, Homo sapien
taaaattaattccactcgaacagcc

SEQ ID NO: 3134075 - DNA, 25 bp, Homo sapien
agactttcatgaggcagtctgcttg

SEQ ID NO: 3134076 - DNA, 25 bp, Homo sapien
caggacccaccaatagaatttaagg

SEQ ID NO: 3134077 - DNA, 25 bp, Homo sapien
tagtactccgcttacaatcctgctt

SEQ ID NO: 3134078 - DNA, 25 bp, Homo sapien
ctggtggtccaggaagaatagaggc

SEQ ID NO: 3134079 - DNA, 25 bp, Homo sapien
ggtggtccaggaagaatagaggcat

SEQ ID NO: 3134080 - DNA, 25 bp, Homo sapien
tggtggtccaggaagaatagaggca

SEQ ID NO: 3134081 - DNA, 25 bp, Homo sapien
aaacagaagcaggactagagaacac

SEQ ID NO: 3134082 - DNA, 25 bp, Homo sapien
tctaggtttttgctggaccaagatt

SEQ ID NO: 3134083 - DNA, 25 bp, Homo sapien
tatctgaattgttctgagaaggctc

SEQ ID NO: 3134084 - DNA, 25 bp, Homo sapien
catggagagaaaaggccttctaggt

SEQ ID NO: 3134085 - DNA, 25 bp, Homo sapien
tggctctttgtccacaaccccagaa

SEQ ID NO: 3134086 - DNA, 25 bp, Homo sapien
ctgtgtatgagtcagagtgttaaac

SEQ ID NO: 3134087 - DNA, 25 bp, Homo sapien
gtatgagtcagagtgttaaacttgt

SEQ ID NO: 3134088 - DNA, 25 bp, Homo sapien
tgtatgagtcagagtgttaaacttg

SEQ ID NO: 3134089 - DNA, 25 bp, Homo sapien
gagtcagagtgttaaacttgttgta

SEQ ID NO: 3134090 - DNA, 25 bp, Homo sapien
taaacattatccaacacactttgca

SEQ ID NO: 3134091 - DNA, 25 bp, Homo sapien
gaatcgtatgagtctaagcacaggg

SEQ ID NO: 3134092 - DNA, 25 bp, Homo sapien
gaatttagtcaccagttctactttg

SEQ ID NO: 3134093 - DNA, 25 bp, Homo sapien
cacagaggacctccatgagtaattc

SEQ ID NO: 3134094 - DNA, 25 bp, Homo sapien
catgaatcaaacgtggaaacacggt

SEQ ID NO: 3134095 - DNA, 25 bp, Homo sapien
cacatgaatcaaacgtggaaacacg

SEQ ID NO: 3134096 - DNA, 25 bp, Homo sapien
ctgggagcccacatgaatcaaacgt

SEQ ID NO: 3134097 - DNA, 25 bp, Homo sapien
gagcccacatgaatcaaacgtggaa

SEQ ID NO: 3134098 - DNA, 25 bp, Homo sapien
ctaagggtgagcaaatatacaagac

SEQ ID NO: 3134099 - DNA, 25 bp, Homo sapien
taagggtgagcaaatatacaagact

SEQ ID NO: 3134100 - DNA, 25 bp, Homo sapien
catcagaattccatcgccaatacca

SEQ ID NO: 3134101 - DNA, 25 bp, Homo sapien
cattgtggataccaacaacaaattc

SEQ ID NO: 3134102 - DNA, 25 bp, Homo sapien
acaatgcctctatcaatgtgaccag

SEQ ID NO: 3134103 - DNA, 25 bp, Homo sapien
cagcaatcccatcagaattccatcg

SEQ ID NO: 3134104 - DNA, 25 bp, Homo sapien
tcaatagtaactggatatggatttt

SEQ ID NO: 3134105 - DNA, 25 bp, Homo sapien
ctcaatagtaactggatatggattt

SEQ ID NO: 3134106 - DNA, 25 bp, Homo sapien
caatagtaactggatatggattttc

SEQ ID NO: 3134107 - DNA, 25 bp, Homo sapien
aatagtaactggatatggattttca

SEQ ID NO: 3134108 - DNA, 25 bp, Homo sapien
cagtttatctatcttcgaatccaag

SEQ ID NO: 3134109 - DNA, 25 bp, Homo sapien
ccaagtttcatccagtttatctatc

SEQ ID NO: 3134110 - DNA, 25 bp, Homo sapien
caagatctctgggtgatttatggtc

SEQ ID NO: 3134111 - DNA, 25 bp, Homo sapien
ctctccttgagggtgaccatcccaa

SEQ ID NO: 3134112 - DNA, 25 bp, Homo sapien
gatgcattctaaaagtctgtaaaac

SEQ ID NO: 3134113 - DNA, 25 bp, Homo sapien
caggatgcattctaaaagtctgtaa

SEQ ID NO: 3134114 - DNA, 25 bp, Homo sapien
atgcattctaaaagtctgtaaaact

SEQ ID NO: 3134115 - DNA, 25 bp, Homo sapien
ggatgcattctaaaagtctgtaaaa

SEQ ID NO: 3134116 - DNA, 25 bp, Homo sapien
gcttactgacatggggaaaactgag

SEQ ID NO: 3134117 - DNA, 25 bp, Homo sapien
atgggtggtggccttgcttactgac

SEQ ID NO: 3134118 - DNA, 25 bp, Homo sapien
ccaggcatttggcttgagctactgc

SEQ ID NO: 3134119 - DNA, 25 bp, Homo sapien
cttgtgaactgagagatgtggactg

SEQ ID NO: 3134120 - DNA, 25 bp, Homo sapien
ggcatcattgtatgggattgagaaa

SEQ ID NO: 3134121 - DNA, 25 bp, Homo sapien
tctgtaattgtgattttggagggca

SEQ ID NO: 3134122 - DNA, 25 bp, Homo sapien
tgtagcttatagagctcaacctctg

SEQ ID NO: 3134123 - DNA, 25 bp, Homo sapien
gcacaaggccacattagtaggtatc

SEQ ID NO: 3134124 - DNA, 25 bp, Homo sapien
ggaggacatgtgcaacggatttgca

SEQ ID NO: 3134125 - DNA, 25 bp, Homo sapien
ggaatatggggtattgagtctcttc

SEQ ID NO: 3134126 - DNA, 25 bp, Homo sapien
ttgttgttaggttgatctcgggaag

SEQ ID NO: 3134127 - DNA, 25 bp, Homo sapien
ctcttcttggggacattagggaata

SEQ ID NO: 3134128 - DNA, 25 bp, Homo sapien
tctgagagagttggcacatactctg

SEQ ID NO: 3134129 - DNA, 25 bp, Homo sapien
gttggcacatactctgaaacgtagg

SEQ ID NO: 3134130 - DNA, 25 bp, Homo sapien
gaaacgtaggtgcactgtgttaatt

SEQ ID NO: 3134131 - DNA, 25 bp, Homo sapien
tcatcaggattttctgctgaagtca

SEQ ID NO: 3134132 - DNA, 25 bp, Homo sapien
taccagcaccttaaagtcagtatgt

SEQ ID NO: 3134133 - DNA, 25 bp, Homo sapien
tgctcgtcagactcataagaaagtt

SEQ ID NO: 3134134 - DNA, 25 bp, Homo sapien
tactctcttcctaatcaaagtgtgg

SEQ ID NO: 3134135 - DNA, 25 bp, Homo sapien
ccagccagatctccttttatgacac

SEQ ID NO: 3134136 - DNA, 25 bp, Homo sapien
caaggatgaggcaagcttgagcccc

SEQ ID NO: 3134137 - DNA, 25 bp, Homo sapien
cacatgatcgtgtctaatgggaccc

SEQ ID NO: 3134138 - DNA, 25 bp, Homo sapien
gaatcccagcgcagaactggttaag

SEQ ID NO: 3134139 - DNA, 25 bp, Homo sapien
acctggagttagcacttgacaagcc

SEQ ID NO: 3134140 - DNA, 25 bp, Homo sapien
tagtatctggcccatgaaacagtgt

SEQ ID NO: 3134141 - DNA, 25 bp, Homo sapien
gctgactgagggatccaaatttgaa

SEQ ID NO: 3134142 - DNA, 25 bp, Homo sapien
gcctttattagcagactaaatccct

SEQ ID NO: 3134143 - DNA, 25 bp, Homo sapien
gaaacagtgttcatacatctgtcca

SEQ ID NO: 3134144 - DNA, 25 bp, Homo sapien
gaagcctgttaaagcatggatctca

SEQ ID NO: 3134145 - DNA, 25 bp, Homo sapien
aagaagcctgttaaagcatggatct

SEQ ID NO: 3134146 - DNA, 25 bp, Homo sapien
atctcaagggctccctcttgatatc

SEQ ID NO: 3134147 - DNA, 25 bp, Homo sapien
aagcctgttaaagcatggatctcaa

SEQ ID NO: 3134148 - DNA, 25 bp, Homo sapien
tatgagctacaatagtggccaggac

SEQ ID NO: 3134149 - DNA, 25 bp, Homo sapien
caattccagaaaatgagagttgaaa

SEQ ID NO: 3134150 - DNA, 25 bp, Homo sapien
taagtcagcgttggacaattccaga

SEQ ID NO: 3134151 - DNA, 25 bp, Homo sapien
catgtagaagattccactattatcc

SEQ ID NO: 3134152 - DNA, 25 bp, Homo sapien
catgggaaacgtatactggaggctg

SEQ ID NO: 3134153 - DNA, 25 bp, Homo sapien
tcactgttggatccccagttaaaca

SEQ ID NO: 3134154 - DNA, 25 bp, Homo sapien
gtgctaaactatatggtccagtggt

SEQ ID NO: 3134155 - DNA, 25 bp, Homo sapien
tcgtcatggaatagtttacaaggct

SEQ ID NO: 3134156 - DNA, 25 bp, Homo sapien
atttctatggactgcccagcttctc

SEQ ID NO: 3134157 - DNA, 25 bp, Homo sapien
tttcttgataaggaattgggtagca

SEQ ID NO: 3134158 - DNA, 25 bp, Homo sapien
catgctgatagctacagatgaccag

SEQ ID NO: 3134159 - DNA, 25 bp, Homo sapien
ggtagcaatggtggtacttggtcct

SEQ ID NO: 3134160 - DNA, 25 bp, Homo sapien
gaaggattagcaggaaccatgtctt

SEQ ID NO: 3134161 - DNA, 25 bp, Homo sapien
gagctgaagcctcctcacaagcttg

SEQ ID NO: 3134162 - DNA, 25 bp, Homo sapien
acattgagctgaagcctcctcacaa

SEQ ID NO: 3134163 - DNA, 25 bp, Homo sapien
tcacaagcttgcccatagcagccat

SEQ ID NO: 3134164 - DNA, 25 bp, Homo sapien
gggtaagtaaaccctggatgtgcac

SEQ ID NO: 3134165 - DNA, 25 bp, Homo sapien
gtctggcttctccaatatttgatgt

SEQ ID NO: 3134166 - DNA, 25 bp, Homo sapien
ttctccaatatttgatgttgcaact

SEQ ID NO: 3134167 - DNA, 25 bp, Homo sapien
tttttgttgcttgtctggcttctcc

SEQ ID NO: 3134168 - DNA, 25 bp, Homo sapien
gcttctccaatatttgatgttgcaa

SEQ ID NO: 3134169 - DNA, 25 bp, Homo sapien
tttctctgtagggattcagggtcac

SEQ ID NO: 3134170 - DNA, 25 bp, Homo sapien
atcccactccttcccaaggcataca

SEQ ID NO: 3134171 - DNA, 25 bp, Homo sapien
tcccaaggcatacaattggcttccc

SEQ ID NO: 3134172 - DNA, 25 bp, Homo sapien
tgtagggattcagggtcacaatcat

SEQ ID NO: 3134173 - DNA, 25 bp, Homo sapien
tggttattagccatctctgagttga

SEQ ID NO: 3134174 - DNA, 25 bp, Homo sapien
gaccaatgaaccttgatggttcaga

SEQ ID NO: 3134175 - DNA, 25 bp, Homo sapien
cttgatggttcagacatagtcacac

SEQ ID NO: 3134176 - DNA, 25 bp, Homo sapien
tctgagttgattagaccaatgaacc

SEQ ID NO: 3134177 - DNA, 25 bp, Homo sapien
aataatagtggcaatctggctcctc

SEQ ID NO: 3134178 - DNA, 25 bp, Homo sapien
agttttcatcatcccgggctaactg

SEQ ID NO: 3134179 - DNA, 25 bp, Homo sapien
agaatgctaccccactgggggcaat

SEQ ID NO: 3134180 - DNA, 25 bp, Homo sapien
catcccgggctaactgacgtgtcat

SEQ ID NO: 3134181 - DNA, 25 bp, Homo sapien
catcatcccgggctaactgacgtgt

SEQ ID NO: 3134182 - DNA, 25 bp, Homo sapien
ctcaaaatatatcgttcatctttca

SEQ ID NO: 3134183 - DNA, 25 bp, Homo sapien
aaatatatcgttcatctttcaatcc

SEQ ID NO: 3134184 - DNA, 25 bp, Homo sapien
cactcaaaatatatcgttcatcttt

SEQ ID NO: 3134185 - DNA, 25 bp, Homo sapien
caaaatatatcgttcatctttcaat

SEQ ID NO: 3134186 - DNA, 25 bp, Homo sapien
tcagcactcggtgtgaaagacagtc

SEQ ID NO: 3134187 - DNA, 25 bp, Homo sapien
cccctaacatgctagtggatagtga

SEQ ID NO: 3134188 - DNA, 25 bp, Homo sapien
tcatgactccaaccagtgtcttcag

SEQ ID NO: 3134189 - DNA, 25 bp, Homo sapien
tgttgccaagtctatcacctgttct

SEQ ID NO: 3134190 - DNA, 25 bp, Homo sapien
aatgatgatttccaaaatcatcata

SEQ ID NO: 3134191 - DNA, 25 bp, Homo sapien
tgatttccaaaatcatcataatttt

SEQ ID NO: 3134192 - DNA, 25 bp, Homo sapien
gatgatttccaaaatcatcataatt

SEQ ID NO: 3134193 - DNA, 25 bp, Homo sapien
gatttccaaaatcatcataattttt

SEQ ID NO: 3134194 - DNA, 25 bp, Homo sapien
cagcctagaggaagcctccaaatcc

SEQ ID NO: 3134195 - DNA, 25 bp, Homo sapien
agcctagaggaagcctccaaatcct

SEQ ID NO: 3134196 - DNA, 25 bp, Homo sapien
ggcctcctcaaccaatccaccagaa

SEQ ID NO: 3134197 - DNA, 25 bp, Homo sapien
agtgccggcctcctcaaccaatcca

SEQ ID NO: 3134198 - DNA, 25 bp, Homo sapien
aatgacagttgtcagcaggcatcct

SEQ ID NO: 3134199 - DNA, 25 bp, Homo sapien
tagacatcgttttgctccagtaagt

SEQ ID NO: 3134200 - DNA, 25 bp, Homo sapien
tttggccctagttcatctcccactg

SEQ ID NO: 3134201 - DNA, 25 bp, Homo sapien
aaggtagtttcaaattccaatctgc

SEQ ID NO: 3134202 - DNA, 25 bp, Homo sapien
ggctttgccaccgtaagctttgtca

SEQ ID NO: 3134203 - DNA, 25 bp, Homo sapien
caaaggctttgccaccgtaagcttt

SEQ ID NO: 3134204 - DNA, 25 bp, Homo sapien
ctttgccaccgtaagctttgtcagt

SEQ ID NO: 3134205 - DNA, 25 bp, Homo sapien
taagctttgtcagttcctccagcca

SEQ ID NO: 3134206 - DNA, 25 bp, Homo sapien
ttacatccacatggtcaacatctgt

SEQ ID NO: 3134207 - DNA, 25 bp, Homo sapien
cacatggtcaacatctgttgtcaac

SEQ ID NO: 3134208 - DNA, 25 bp, Homo sapien
tccacatggtcaacatctgttgtca

SEQ ID NO: 3134209 - DNA, 25 bp, Homo sapien
catccacatggtcaacatctgttgt

SEQ ID NO: 3134210 - DNA, 25 bp, Homo sapien
aacaagtgctttccagggcaaagcg

SEQ ID NO: 3134211 - DNA, 25 bp, Homo sapien
caagtgctttccagggcaaagcgct

SEQ ID NO: 3134212 - DNA, 25 bp, Homo sapien
aagtgctttccagggcaaagcgctg

SEQ ID NO: 3134213 - DNA, 25 bp, Homo sapien
ttaacaagtgctttccagggcaaag

SEQ ID NO: 3134214 - DNA, 25 bp, Homo sapien
gtcatgagtctgtattgacttcttc

SEQ ID NO: 3134215 - DNA, 25 bp, Homo sapien
tctgtgtcatgagtctgtattgact

SEQ ID NO: 3134216 - DNA, 25 bp, Homo sapien
ccttctgtgtcatgagtctgtattg

SEQ ID NO: 3134217 - DNA, 25 bp, Homo sapien
ccaataacctttctgaatgtatttc

SEQ ID NO: 3134218 - DNA, 25 bp, Homo sapien
cttttagtttatgtgttgctgaagg

SEQ ID NO: 3134219 - DNA, 25 bp, Homo sapien
agtttatgtgttgctgaaggaggca

SEQ ID NO: 3134220 - DNA, 25 bp, Homo sapien
gtcacccttgtgcagtggccatgcc

SEQ ID NO: 3134221 - DNA, 25 bp, Homo sapien
cacccttgtgcagtggccatgccaa

SEQ ID NO: 3134222 - DNA, 25 bp, Homo sapien
gtccggcactgttgtcagacagtac

SEQ ID NO: 3134223 - DNA, 25 bp, Homo sapien
gttgtcagacagtacagaggattgc

SEQ ID NO: 3134224 - DNA, 25 bp, Homo sapien
cctaattcgaggtttctgtttcata

SEQ ID NO: 3134225 - DNA, 25 bp, Homo sapien
gattgctggtatgcttccatcccgt

SEQ ID NO: 3134226 - DNA, 25 bp, Homo sapien
cacaatgccgccagccacgataatg

SEQ ID NO: 3134227 - DNA, 25 bp, Homo sapien
gggctggccgtaatttctctggaga

SEQ ID NO: 3134228 - DNA, 25 bp, Homo sapien
gctgattcatgagggctggccgtaa

SEQ ID NO: 3134229 - DNA, 25 bp, Homo sapien
gcagcgcccaaagttcagcctgact

SEQ ID NO: 3134230 - DNA, 25 bp, Homo sapien
taacagagctttttgacgcggtcat

SEQ ID NO: 3134231 - DNA, 25 bp, Homo sapien
ggagtcttcggaggagacgccatca

SEQ ID NO: 3134232 - DNA, 25 bp, Homo sapien
tctgcctgcgtcagacagaagccct

SEQ ID NO: 3134233 - DNA, 25 bp, Homo sapien
tgccagatggtttccgtagtggaga

SEQ ID NO: 3134234 - DNA, 25 bp, Homo sapien
gctgctttgccagatggtttccgta

SEQ ID NO: 3134235 - DNA, 25 bp, Homo sapien
gtttgtggttccagaacctggccag

SEQ ID NO: 3134236 - DNA, 25 bp, Homo sapien
ggaaggacccacagtcttattcctg

SEQ ID NO: 3134237 - DNA, 25 bp, Homo sapien
ggccagtagctgttacctacagttt

SEQ ID NO: 3134238 - DNA, 25 bp, Homo sapien
tgctgcagccaactctgtttgtggt

SEQ ID NO: 3134239 - DNA, 25 bp, Homo sapien
tttgagctccttgcgtgtgtgtgcg

SEQ ID NO: 3134240 - DNA, 25 bp, Homo sapien
aatagcttttcgtctgaaggtcagc

SEQ ID NO: 3134241 - DNA, 25 bp, Homo sapien
gatattgcatttcatggacctccta

SEQ ID NO: 3134242 - DNA, 25 bp, Homo sapien
gctgaacaacctctgcagggagcaa

SEQ ID NO: 3134243 - DNA, 25 bp, Homo sapien
ttttaaagccatactcagccaggac

SEQ ID NO: 3134244 - DNA, 25 bp, Homo sapien
ccaggaccctctgtgttggaggctt

SEQ ID NO: 3134245 - DNA, 25 bp, Homo sapien
tgatcaggcacttccaagggtagaa

SEQ ID NO: 3134246 - DNA, 25 bp, Homo sapien
tggaggctttagtctggcttcagtc

SEQ ID NO: 3134247 - DNA, 25 bp, Homo sapien
ctgttgaacccgttgctttgatatt

SEQ ID NO: 3134248 - DNA, 25 bp, Homo sapien
gacaacgtttggtcaggtctggcat

SEQ ID NO: 3134249 - DNA, 25 bp, Homo sapien
tgttgaacccgttgctttgatattt

SEQ ID NO: 3134250 - DNA, 25 bp, Homo sapien
tgatattttgacaacgtttggtcag

SEQ ID NO: 3134251 - DNA, 25 bp, Homo sapien
tcagatgcccattgtgcagacatgg

SEQ ID NO: 3134252 - DNA, 25 bp, Homo sapien
caagtttcaagtacggcacatctca

SEQ ID NO: 3134253 - DNA, 25 bp, Homo sapien
catggtaacaagtttcaagtacggc

SEQ ID NO: 3134254 - DNA, 25 bp, Homo sapien
ggtcagatgcccattgtgcagacat

SEQ ID NO: 3134255 - DNA, 25 bp, Homo sapien
tgtcaagcacattgagtgaaagttg

SEQ ID NO: 3134256 - DNA, 25 bp, Homo sapien
gaaagttgaatgtttaaccttgcat

SEQ ID NO: 3134257 - DNA, 25 bp, Homo sapien
gctttagtcattctctattctcagg

SEQ ID NO: 3134258 - DNA, 25 bp, Homo sapien
taggtcaattaatatactggctcca

SEQ ID NO: 3134259 - DNA, 25 bp, Homo sapien
gaactatccttgtattacaggaata

SEQ ID NO: 3134260 - DNA, 25 bp, Homo sapien
aagatttttgcctcaatagtcatcc

SEQ ID NO: 3134261 - DNA, 25 bp, Homo sapien
tgttttggtgtcaaatcagttcaat

SEQ ID NO: 3134262 - DNA, 25 bp, Homo sapien
caggaataaatctcagttgttttgg

SEQ ID NO: 3134263 - DNA, 25 bp, Homo sapien
gaagactcttcagatgcattccaaa

SEQ ID NO: 3134264 - DNA, 25 bp, Homo sapien
tgtgttcaccctgttttggcatata

SEQ ID NO: 3134265 - DNA, 25 bp, Homo sapien
tcaagccaatgggaactgcactggg

SEQ ID NO: 3134266 - DNA, 25 bp, Homo sapien
tgcactgggcaaacctgactcccat

SEQ ID NO: 3134267 - DNA, 25 bp, Homo sapien
cagctttgtattatgtgaggcccca

SEQ ID NO: 3134268 - DNA, 25 bp, Homo sapien
tttgtagacccgacccagctttgta

SEQ ID NO: 3134269 - DNA, 25 bp, Homo sapien
tattggccatgagaagctcctaagc

SEQ ID NO: 3134270 - DNA, 25 bp, Homo sapien
ggtggaccactacgttctctgataa

SEQ ID NO: 3134271 - DNA, 25 bp, Homo sapien
aaaactgtttacagccaccataggg

SEQ ID NO: 3134272 - DNA, 25 bp, Homo sapien
aatttcttggaatctgtaatttgta

SEQ ID NO: 3134273 - DNA, 25 bp, Homo sapien
gctattttttaggatctgaaacaaa

SEQ ID NO: 3134274 - DNA, 25 bp, Homo sapien
taatttgtacttaatatttcaggct

SEQ ID NO: 3134275 - DNA, 25 bp, Homo sapien
gatattaaaatgcacgtggcgcctt

SEQ ID NO: 3134276 - DNA, 25 bp, Homo sapien
aattaacaaacttgcaggcggctgc

SEQ ID NO: 3134277 - DNA, 25 bp, Homo sapien
gaatatgcctacgatgtcccaacga

SEQ ID NO: 3134278 - DNA, 25 bp, Homo sapien
tcggtaccgatagcactggcaatgt

SEQ ID NO: 3134279 - DNA, 25 bp, Homo sapien
gattttatactggtgtttaataatc

SEQ ID NO: 3134280 - DNA, 25 bp, Homo sapien
tagattttatactggtgtttaataa

SEQ ID NO: 3134281 - DNA, 25 bp, Homo sapien
agcatagattttatactggtgttta

SEQ ID NO: 3134282 - DNA, 25 bp, Homo sapien
catagattttatactggtgtttaat

SEQ ID NO: 3134283 - DNA, 25 bp, Homo sapien
cttcatgggttgactctcaggaggt

SEQ ID NO: 3134284 - DNA, 25 bp, Homo sapien
ggaggtgcccaagagaaagctgcat

SEQ ID NO: 3134285 - DNA, 25 bp, Homo sapien
gaagagttgcaggtagagggactgc

SEQ ID NO: 3134286 - DNA, 25 bp, Homo sapien
ctctgaccttcatgggttgactctc

SEQ ID NO: 3134287 - DNA, 25 bp, Homo sapien
actcagttcctgttgtagatgctgt

SEQ ID NO: 3134288 - DNA, 25 bp, Homo sapien
agttcctgttgtagatgctgtttaa

SEQ ID NO: 3134289 - DNA, 25 bp, Homo sapien
cagttcctgttgtagatgctgttta

SEQ ID NO: 3134290 - DNA, 25 bp, Homo sapien
ctaactcagttcctgttgtagatgc

SEQ ID NO: 3134291 - DNA, 25 bp, Homo sapien
tagttccacagtcccctatttcaaa

SEQ ID NO: 3134292 - DNA, 25 bp, Homo sapien
gatttattcatactgattctgtttt

SEQ ID NO: 3134293 - DNA, 25 bp, Homo sapien
cattaacttgaggttgtaaactgta

SEQ ID NO: 3134294 - DNA, 25 bp, Homo sapien
tacatgatattatgcatttgctagt

SEQ ID NO: 3134295 - DNA, 25 bp, Homo sapien
ccccgaagtagccatgcttttctct

SEQ ID NO: 3134296 - DNA, 25 bp, Homo sapien
cttctggattgttcccacgttttct

SEQ ID NO: 3134297 - DNA, 25 bp, Homo sapien
cctctgatagccccatgtccttaaa

SEQ ID NO: 3134298 - DNA, 25 bp, Homo sapien
tgtcccctctgatagccccatgtcc

SEQ ID NO: 3134299 - DNA, 25 bp, Homo sapien
gatgtccttgatgactgtgtataca

SEQ ID NO: 3134300 - DNA, 25 bp, Homo sapien
tgtttttggttatgattcgccccaa

SEQ ID NO: 3134301 - DNA, 25 bp, Homo sapien
taactctctctaagtgggcaggctt

SEQ ID NO: 3134302 - DNA, 25 bp, Homo sapien
ttccagactttatggacagtgtgca

SEQ ID NO: 3134303 - DNA, 25 bp, Homo sapien
ctcttgaggagccattgcttttctt

SEQ ID NO: 3134304 - DNA, 25 bp, Homo sapien
cccagggctttgtgaggtcaaagcg

SEQ ID NO: 3134305 - DNA, 25 bp, Homo sapien
atcccagggctttgtgaggtcaaag

SEQ ID NO: 3134306 - DNA, 25 bp, Homo sapien
aaggatcaattaaagctgttctgct

SEQ ID NO: 3134307 - DNA, 25 bp, Homo sapien
tcccagggctttgtgaggtcaaagc

SEQ ID NO: 3134308 - DNA, 25 bp, Homo sapien
gcagtcccgttttcgtgtctgtgag

SEQ ID NO: 3134309 - DNA, 25 bp, Homo sapien
taaaagccaggaacattggaactga

SEQ ID NO: 3134310 - DNA, 25 bp, Homo sapien
cgtgggtttattgagccttccaact

SEQ ID NO: 3134311 - DNA, 25 bp, Homo sapien
gccttccaactcgagggatttttga

SEQ ID NO: 3134312 - DNA, 25 bp, Homo sapien
ggtcggagtcgggctcggcaggtcc

SEQ ID NO: 3134313 - DNA, 25 bp, Homo sapien
gggtcggagtcgggctcggcaggtc

SEQ ID NO: 3134314 - DNA, 25 bp, Homo sapien
gtcggagtcgggctcggcaggtccc

SEQ ID NO: 3134315 - DNA, 25 bp, Homo sapien
cgggtcggagtcgggctcggcaggt

SEQ ID NO: 3134316 - DNA, 25 bp, Homo sapien
tgcccggaggccgaggcccgggcgc

SEQ ID NO: 3134317 - DNA, 25 bp, Homo sapien
ctgcccggaggccgaggcccgggcg

SEQ ID NO: 3134318 - DNA, 25 bp, Homo sapien
ccggaggccgaggcccgggcgcgca

SEQ ID NO: 3134319 - DNA, 25 bp, Homo sapien
cggaggccgaggcccgggcgcgcac

SEQ ID NO: 3134320 - DNA, 25 bp, Homo sapien
tctacgagttactgccttcccgcgg

SEQ ID NO: 3134321 - DNA, 25 bp, Homo sapien
tccaggagcgcacaagactgctttg

SEQ ID NO: 3134322 - DNA, 25 bp, Homo sapien
aggcgattccttccgaaacacttgg

SEQ ID NO: 3134323 - DNA, 25 bp, Homo sapien
ctaccataatgaggtgagaaggcga

SEQ ID NO: 3134324 - DNA, 25 bp, Homo sapien
tgaaggacccaacaactggtatagg

SEQ ID NO: 3134325 - DNA, 25 bp, Homo sapien
cttgtccttgaagatagctgggcac

SEQ ID NO: 3134326 - DNA, 25 bp, Homo sapien
tataggcacacctgagatccagacg

SEQ ID NO: 3134327 - DNA, 25 bp, Homo sapien
tagtgtccttagacccaagcaagaa

SEQ ID NO: 3134328 - DNA, 25 bp, Homo sapien
cttggcatttctgaggccccagtca

SEQ ID NO: 3134329 - DNA, 25 bp, Homo sapien
gaagacccttaagcagatgacccag

SEQ ID NO: 3134330 - DNA, 25 bp, Homo sapien
tgaaccctgctgactactgaatgag

SEQ ID NO: 3134331 - DNA, 25 bp, Homo sapien
aatgaggttggtggcaaattctgcc

SEQ ID NO: 3134332 - DNA, 25 bp, Homo sapien
ggtgattatatagcatcctgggcat

SEQ ID NO: 3134333 - DNA, 25 bp, Homo sapien
gtggctaaagactgtggtgattata

SEQ ID NO: 3134334 - DNA, 25 bp, Homo sapien
cgtttgtgcgtggctaaagactgtg

SEQ ID NO: 3134335 - DNA, 25 bp, Homo sapien
gcgtggctaaagactgtggtgatta

SEQ ID NO: 3134336 - DNA, 25 bp, Homo sapien
ttcctcgtgaaggaataaccttctg

SEQ ID NO: 3134337 - DNA, 25 bp, Homo sapien
gctgcttcctcgtgaaggaataacc

SEQ ID NO: 3134338 - DNA, 25 bp, Homo sapien
tgcttcctcgtgaaggaataacctt

SEQ ID NO: 3134339 - DNA, 25 bp, Homo sapien
cctcgtgaaggaataaccttctgta

SEQ ID NO: 3134340 - DNA, 25 bp, Homo sapien
tctgaagcccttgaatcaagattta

SEQ ID NO: 3134341 - DNA, 25 bp, Homo sapien
gcttctgaagcccttgaatcaagat

SEQ ID NO: 3134342 - DNA, 25 bp, Homo sapien
cttctgaagcccttgaatcaagatt

SEQ ID NO: 3134343 - DNA, 25 bp, Homo sapien
tagcttctgaagcccttgaatcaag

SEQ ID NO: 3134344 - DNA, 25 bp, Homo sapien
gtgaggcgttccaccaggacaattt

SEQ ID NO: 3134345 - DNA, 25 bp, Homo sapien
ctcagtcaactcacttcctggtcag

SEQ ID NO: 3134346 - DNA, 25 bp, Homo sapien
gcgggggcctgctacctgttgctct

SEQ ID NO: 3134347 - DNA, 25 bp, Homo sapien
tgctacctgttgctctggtgaggcg

SEQ ID NO: 3134348 - DNA, 25 bp, Homo sapien
agtgcaaccctagttattcagcaga

SEQ ID NO: 3134349 - DNA, 25 bp, Homo sapien
ccctagttattcagcagattgccca

SEQ ID NO: 3134350 - DNA, 25 bp, Homo sapien
acaagtgcaaccctagttattcagc

SEQ ID NO: 3134351 - DNA, 25 bp, Homo sapien
cctagttattcagcagattgcccag

SEQ ID NO: 3134352 - DNA, 25 bp, Homo sapien
tgtggtactgttatgcagcttttgc

SEQ ID NO: 3134353 - DNA, 25 bp, Homo sapien
tactgttatgcagcttttgcccaag

SEQ ID NO: 3134354 - DNA, 25 bp, Homo sapien
atcagagtgatcttttgggctggga

SEQ ID NO: 3134355 - DNA, 25 bp, Homo sapien
gaatctagagatgatcagagtgatc

SEQ ID NO: 3134356 - DNA, 25 bp, Homo sapien
tattttcctggtgtgcactgggatt

SEQ ID NO: 3134357 - DNA, 25 bp, Homo sapien
cttcacaattaactgagtttccaaa

SEQ ID NO: 3134358 - DNA, 25 bp, Homo sapien
ttcctggtgtgcactgggattcttt

SEQ ID NO: 3134359 - DNA, 25 bp, Homo sapien
aattattttcctggtgtgcactggg

SEQ ID NO: 3134360 - DNA, 25 bp, Homo sapien
gagctttgacccacgatctccttca

SEQ ID NO: 3134361 - DNA, 25 bp, Homo sapien
ggaactccctgtactatctttgaag

SEQ ID NO: 3134362 - DNA, 25 bp, Homo sapien
cccagtgggtatgggtttccacaga

SEQ ID NO: 3134363 - DNA, 25 bp, Homo sapien
tcttttcccgctttagagaagcaca

SEQ ID NO: 3134364 - DNA, 25 bp, Homo sapien
tttaagaagctgtctactgggatct

SEQ ID NO: 3134365 - DNA, 25 bp, Homo sapien
ctgccagaagcagagcaccctttgg

SEQ ID NO: 3134366 - DNA, 25 bp, Homo sapien
ccagaggagccaggcaattgtgcaa

SEQ ID NO: 3134367 - DNA, 25 bp, Homo sapien
gaagctgtctactgggatcttcagc

SEQ ID NO: 3134368 - DNA, 25 bp, Homo sapien
gctgcagtggctgccgcccatccaa

SEQ ID NO: 3134369 - DNA, 25 bp, Homo sapien
gcccatccaaatcctgcagggaaag

SEQ ID NO: 3134370 - DNA, 25 bp, Homo sapien
tgataagctgcagtggctgccgccc

SEQ ID NO: 3134371 - DNA, 25 bp, Homo sapien
cttctacttgataagctgcagtggc

SEQ ID NO: 3134372 - DNA, 25 bp, Homo sapien
tattgggtcggtctttagtcctggc

SEQ ID NO: 3134373 - DNA, 25 bp, Homo sapien
gaagggttccatcggcaatgatcaa

SEQ ID NO: 3134374 - DNA, 25 bp, Homo sapien
tctggtgtatcaacatggctccctg

SEQ ID NO: 3134375 - DNA, 25 bp, Homo sapien
gattgtcagcataaagaagggttcc

SEQ ID NO: 3134376 - DNA, 25 bp, Homo sapien
ccaggtgttccgattctagttataa

SEQ ID NO: 3134377 - DNA, 25 bp, Homo sapien
ttagagtccaggtgttccgattcta

SEQ ID NO: 3134378 - DNA, 25 bp, Homo sapien
agtccaggtgttccgattctagtta

SEQ ID NO: 3134379 - DNA, 25 bp, Homo sapien
gagtccaggtgttccgattctagtt

SEQ ID NO: 3134380 - DNA, 25 bp, Homo sapien
tgaatcttgcccatacatctctgtg

SEQ ID NO: 3134381 - DNA, 25 bp, Homo sapien
cagacctgtgggtgtgcccactgaa

SEQ ID NO: 3134382 - DNA, 25 bp, Homo sapien
tagtctaccgacgactgcagtcctg

SEQ ID NO: 3134383 - DNA, 25 bp, Homo sapien
ttttctagactagctggcggcctgg

SEQ ID NO: 3134384 - DNA, 25 bp, Homo sapien
tctaaatggaagggaagagttatct

SEQ ID NO: 3134385 - DNA, 25 bp, Homo sapien
aaatggaagggaagagttatctcca

SEQ ID NO: 3134386 - DNA, 25 bp, Homo sapien
taaatggaagggaagagttatctcc

SEQ ID NO: 3134387 - DNA, 25 bp, Homo sapien
ctaaatggaagggaagagttatctc

SEQ ID NO: 3134388 - DNA, 25 bp, Homo sapien
tcatgtatcaaaatagtgcacgctc

SEQ ID NO: 3134389 - DNA, 25 bp, Homo sapien
aaagcagggtccatgttttactgac

SEQ ID NO: 3134390 - DNA, 25 bp, Homo sapien
tgtccctccagtagtaagaatcatg

SEQ ID NO: 3134391 - DNA, 25 bp, Homo sapien
tcacagacacgtgcagaagttatct

SEQ ID NO: 3134392 - DNA, 25 bp, Homo sapien
gatcaatggacttaatagagacccc

SEQ ID NO: 3134393 - DNA, 25 bp, Homo sapien
tagagaccccagaataataccatgc

SEQ ID NO: 3134394 - DNA, 25 bp, Homo sapien
tggcactggcataggcccacataaa

SEQ ID NO: 3134395 - DNA, 25 bp, Homo sapien
taataagtagcttagcgtggcactg

SEQ ID NO: 3134396 - DNA, 25 bp, Homo sapien
gaaatgcaccaaatgaattgagttt

SEQ ID NO: 3134397 - DNA, 25 bp, Homo sapien
aaatgcaccaaatgaattgagtttg

SEQ ID NO: 3134398 - DNA, 25 bp, Homo sapien
tgaaatgcaccaaatgaattgagtt

SEQ ID NO: 3134399 - DNA, 25 bp, Homo sapien
ttgaaatgcaccaaatgaattgagt

SEQ ID NO: 3134400 - DNA, 25 bp, Homo sapien
tcctcttttctaggacgcactatat

SEQ ID NO: 3134401 - DNA, 25 bp, Homo sapien
ggaggacggattgattccacattcc

SEQ ID NO: 3134402 - DNA, 25 bp, Homo sapien
ggaggaggacggattgattccacat

SEQ ID NO: 3134403 - DNA, 25 bp, Homo sapien
aggacgcactatatgtgactgtgac

SEQ ID NO: 3134404 - DNA, 25 bp, Homo sapien
gactaattggaattgttgaagctgc

SEQ ID NO: 3134405 - DNA, 25 bp, Homo sapien
gatgactctgtaacagactaattgg

SEQ ID NO: 3134406 - DNA, 25 bp, Homo sapien
gcaaggcatgcttatggatgactct

SEQ ID NO: 3134407 - DNA, 25 bp, Homo sapien
tccctggttccactctggagagtaa

SEQ ID NO: 3134408 - DNA, 25 bp, Homo sapien
gaccgctgagttatccacaaacaga

SEQ ID NO: 3134409 - DNA, 25 bp, Homo sapien
tgggcgatggtgctgttagtaaaac

SEQ ID NO: 3134410 - DNA, 25 bp, Homo sapien
gagatgacccctctactattgagaa

SEQ ID NO: 3134411 - DNA, 25 bp, Homo sapien
tggtggagaaccatatactcttgga

SEQ ID NO: 3134412 - DNA, 25 bp, Homo sapien
gaggtaaaccctgaccactgatcta

SEQ ID NO: 3134413 - DNA, 25 bp, Homo sapien
gctatctagtatgttagaatgagag

SEQ ID NO: 3134414 - DNA, 25 bp, Homo sapien
catcactaatgagtagggctatcta

SEQ ID NO: 3134415 - DNA, 25 bp, Homo sapien
taatgatagtatactatgtggttca

SEQ ID NO: 3134416 - DNA, 25 bp, Homo sapien
tgaggaaaagagaaggaagtggaac

SEQ ID NO: 3134417 - DNA, 25 bp, Homo sapien
tttgaggaaaagagaaggaagtgga

SEQ ID NO: 3134418 - DNA, 25 bp, Homo sapien
ttgaggaaaagagaaggaagtggaa

SEQ ID NO: 3134419 - DNA, 25 bp, Homo sapien
ctttgaggaaaagagaaggaagtgg

SEQ ID NO: 3134420 - DNA, 25 bp, Homo sapien
aattattgcatagcgccgctgcata

SEQ ID NO: 3134421 - DNA, 25 bp, Homo sapien
catagcgccgctgcatagcaggctt

SEQ ID NO: 3134422 - DNA, 25 bp, Homo sapien
tgcatagcgccgctgcatagcaggc

SEQ ID NO: 3134423 - DNA, 25 bp, Homo sapien
aaaattattgcatagcgccgctgca

SEQ ID NO: 3134424 - DNA, 25 bp, Homo sapien
tcccacagagtgtagctgccacaag

SEQ ID NO: 3134425 - DNA, 25 bp, Homo sapien
tcccatcaggtaacagacgtgacca

SEQ ID NO: 3134426 - DNA, 25 bp, Homo sapien
ctctcctccctgatgagtaaatgtg

SEQ ID NO: 3134427 - DNA, 25 bp, Homo sapien
gagagaagcggtaatgagtcaatcc

SEQ ID NO: 3134428 - DNA, 25 bp, Homo sapien
atgccagactgcagcaataaccttg

SEQ ID NO: 3134429 - DNA, 25 bp, Homo sapien
tgcagcaataaccttgaattaaagc

SEQ ID NO: 3134430 - DNA, 25 bp, Homo sapien
ccagactgcagcaataaccttgaat

SEQ ID NO: 3134431 - DNA, 25 bp, Homo sapien
aataaccttgaattaaagctgcaac

SEQ ID NO: 3134432 - DNA, 25 bp, Homo sapien
tttagaacttcagatacggcactgt

SEQ ID NO: 3134433 - DNA, 25 bp, Homo sapien
tggaccaatactacaagttggtggg

SEQ ID NO: 3134434 - DNA, 25 bp, Homo sapien
tgttgttgtttaccatccaaatgga

SEQ ID NO: 3134435 - DNA, 25 bp, Homo sapien
gatacggcactgtggaccaatacta

SEQ ID NO: 3134436 - DNA, 25 bp, Homo sapien
ttatgagctgcctgataacctccag

SEQ ID NO: 3134437 - DNA, 25 bp, Homo sapien
taaggaatcatagctgtgccaggat

SEQ ID NO: 3134438 - DNA, 25 bp, Homo sapien
tctggaagcctcgatgatggatagc

SEQ ID NO: 3134439 - DNA, 25 bp, Homo sapien
gacacgatccccaaaggtactgaag

SEQ ID NO: 3134440 - DNA, 25 bp, Homo sapien
agtgtcatcaagaggcgctgggtca

SEQ ID NO: 3134441 - DNA, 25 bp, Homo sapien
ttgaacagttcctgaaatgtttgtc

SEQ ID NO: 3134442 - DNA, 25 bp, Homo sapien
tctcagtgatgtaaattacagggtt

SEQ ID NO: 3134443 - DNA, 25 bp, Homo sapien
gaaatactcccagcgttgagtgtca

SEQ ID NO: 3134444 - DNA, 25 bp, Homo sapien
aagaatacatgcaaacccaaagtaa

SEQ ID NO: 3134445 - DNA, 25 bp, Homo sapien
aattgattagcaagttcagctctgc

SEQ ID NO: 3134446 - DNA, 25 bp, Homo sapien
taaagttcttggcaaccaagatcat

SEQ ID NO: 3134447 - DNA, 25 bp, Homo sapien
gaacctgtcggctcttcttcaaaga

SEQ ID NO: 3134448 - DNA, 25 bp, Homo sapien
gctcttttgatgagaactaggatat

SEQ ID NO: 3134449 - DNA, 25 bp, Homo sapien
cagcatcttgtcttggtggtatatc

SEQ ID NO: 3134450 - DNA, 25 bp, Homo sapien
ggtatatccaagctgcaagatttat

SEQ ID NO: 3134451 - DNA, 25 bp, Homo sapien
caacactttcagtgaagtcttcaat

SEQ ID NO: 3134452 - DNA, 25 bp, Homo sapien
gagggagaatgctgacagacaacag

SEQ ID NO: 3134453 - DNA, 25 bp, Homo sapien
caggatcttacccagaaacaaaggt

SEQ ID NO: 3134454 - DNA, 25 bp, Homo sapien
tgaagtgcccttctgactctatgaa

SEQ ID NO: 3134455 - DNA, 25 bp, Homo sapien
tagaaacagcgcattgaaaagcaag

SEQ ID NO: 3134456 - DNA, 25 bp, Homo sapien
gattagatgcctcttgccataattg

SEQ ID NO: 3134457 - DNA, 25 bp, Homo sapien
agccaaaatgaaggtacgactacac

SEQ ID NO: 3134458 - DNA, 25 bp, Homo sapien
cagagccaaaatgaaggtacgacta

SEQ ID NO: 3134459 - DNA, 25 bp, Homo sapien
agagccaaaatgaaggtacgactac

SEQ ID NO: 3134460 - DNA, 25 bp, Homo sapien
gagccaaaatgaaggtacgactaca

SEQ ID NO: 3134461 - DNA, 25 bp, Homo sapien
cagacaggaccatatggcctggaat

SEQ ID NO: 3134462 - DNA, 25 bp, Homo sapien
gatccaggaaagctccagacaggac

SEQ ID NO: 3134463 - DNA, 25 bp, Homo sapien
tctgatagggctctgacagctgctc

SEQ ID NO: 3134464 - DNA, 25 bp, Homo sapien
cagctgctccgagaggtgggtcctt

SEQ ID NO: 3134465 - DNA, 25 bp, Homo sapien
tcagagggtatagagtcagcacaaa

SEQ ID NO: 3134466 - DNA, 25 bp, Homo sapien
caaaatgatcggtgctgagaagcag

SEQ ID NO: 3134467 - DNA, 25 bp, Homo sapien
gggcatagagggcaagttcagcatc

SEQ ID NO: 3134468 - DNA, 25 bp, Homo sapien
gggtatagagtcagcacaaaatgat

SEQ ID NO: 3134469 - DNA, 25 bp, Homo sapien
gctgggtcttcaaaatcaacgtgga

SEQ ID NO: 3134470 - DNA, 25 bp, Homo sapien
tcaacgtggaagagaccaaaccggc

SEQ ID NO: 3134471 - DNA, 25 bp, Homo sapien
gagaccatgcacaatatacttgaag

SEQ ID NO: 3134472 - DNA, 25 bp, Homo sapien
ccttggccgatgtgtaagggactcg

SEQ ID NO: 3134473 - DNA, 25 bp, Homo sapien
caaggccattgtttcggatgatctt

SEQ ID NO: 3134474 - DNA, 25 bp, Homo sapien
aggccattgtttcggatgatcttgg

SEQ ID NO: 3134475 - DNA, 25 bp, Homo sapien
ttcaaggccattgtttcggatgatc

SEQ ID NO: 3134476 - DNA, 25 bp, Homo sapien
tgcttcaaggccattgtttcggatg

SEQ ID NO: 3134477 - DNA, 25 bp, Homo sapien
tcacatggcagtggatcacctaagc

SEQ ID NO: 3134478 - DNA, 25 bp, Homo sapien
taattaagttcacaaacaggtacgc

SEQ ID NO: 3134479 - DNA, 25 bp, Homo sapien
gagattgcctgaaagatcatcacca

SEQ ID NO: 3134480 - DNA, 25 bp, Homo sapien
ggagatgtacttgtccaaacacaca

SEQ ID NO: 3134481 - DNA, 25 bp, Homo sapien
aactccacatacgtgaagggtttgc

SEQ ID NO: 3134482 - DNA, 25 bp, Homo sapien
tatggatgtgaaagaccaaactcca

SEQ ID NO: 3134483 - DNA, 25 bp, Homo sapien
tagcttttaatttggcaccactctg

SEQ ID NO: 3134484 - DNA, 25 bp, Homo sapien
ttcaaaagtggaaattatgccctgc

SEQ ID NO: 3134485 - DNA, 25 bp, Homo sapien
caaacacatcttagcacaacgcatt

SEQ ID NO: 3134486 - DNA, 25 bp, Homo sapien
tttatgcaactggtaccacagtagg

SEQ ID NO: 3134487 - DNA, 25 bp, Homo sapien
gaatccgcctgaggctattatacag

SEQ ID NO: 3134488 - DNA, 25 bp, Homo sapien
cactcattgtcctaggtctacacag

SEQ ID NO: 3134489 - DNA, 25 bp, Homo sapien
tactattcctcaaagtgctacctat

SEQ ID NO: 3134490 - DNA, 25 bp, Homo sapien
gctttcagtctggttcctatatccc

SEQ ID NO: 3134491 - DNA, 25 bp, Homo sapien
tacctataaatcatcaccatcctgc

SEQ ID NO: 3134492 - DNA, 25 bp, Homo sapien
tgtacttcccactccacataggact

SEQ ID NO: 3134493 - DNA, 25 bp, Homo sapien
aataagacgctttcatggagttacc

SEQ ID NO: 3134494 - DNA, 25 bp, Homo sapien
gggcacctcttaaatcatcacttga

SEQ ID NO: 3134495 - DNA, 25 bp, Homo sapien
tttgcacgacatggaactcgaaccc

SEQ ID NO: 3134496 - DNA, 25 bp, Homo sapien
tccagggaagaataagcccacactg

SEQ ID NO: 3134497 - DNA, 25 bp, Homo sapien
aagtcgcgagatgtaaaatgtttca

SEQ ID NO: 3134498 - DNA, 25 bp, Homo sapien
gaaatagttccgataatcaaggctc

SEQ ID NO: 3134499 - DNA, 25 bp, Homo sapien
tatccatacaatgtgaagtggccat

SEQ ID NO: 3134500 - DNA, 25 bp, Homo sapien
tccaaaaacctgaaagtcgcgagat

SEQ ID NO: 3134501 - DNA, 25 bp, Homo sapien
ctcacggaaaggattctcaattttg

SEQ ID NO: 3134502 - DNA, 25 bp, Homo sapien
tccaattttcaccagcgttcagagt

SEQ ID NO: 3134503 - DNA, 25 bp, Homo sapien
caccagcgttcagagttgcccattt

SEQ ID NO: 3134504 - DNA, 25 bp, Homo sapien
tcacggaaaggattctcaattttgc

SEQ ID NO: 3134505 - DNA, 25 bp, Homo sapien
atgcaggctttgaagggcttcaggc

SEQ ID NO: 3134506 - DNA, 25 bp, Homo sapien
tgcaggctttgaagggcttcaggca

SEQ ID NO: 3134507 - DNA, 25 bp, Homo sapien
tgcttccagcatgaaggtttctctg

SEQ ID NO: 3134508 - DNA, 25 bp, Homo sapien
ttccatgcaggctttgaagggcttc

SEQ ID NO: 3134509 - DNA, 25 bp, Homo sapien
taagctctgcagctataaaagcagt

SEQ ID NO: 3134510 - DNA, 25 bp, Homo sapien
aaagcagtatcttttactccccagt

SEQ ID NO: 3134511 - DNA, 25 bp, Homo sapien
ccataagctctgcagctataaaagc

SEQ ID NO: 3134512 - DNA, 25 bp, Homo sapien
tccccagtgtgcagtagtgatggtt

SEQ ID NO: 3134513 - DNA, 25 bp, Homo sapien
ggagacccttagtatcaagcagacg

SEQ ID NO: 3134514 - DNA, 25 bp, Homo sapien
tcaaaagtccgagtgctgcaaacag

SEQ ID NO: 3134515 - DNA, 25 bp, Homo sapien
gagtggccaatacttcctagaaagc

SEQ ID NO: 3134516 - DNA, 25 bp, Homo sapien
gcggcagagtccctaacagatttgt

SEQ ID NO: 3134517 - DNA, 25 bp, Homo sapien
tgttcctcctctgaagtgaatttta

SEQ ID NO: 3134518 - DNA, 25 bp, Homo sapien
tcctcctctgaagtgaattttatgc

SEQ ID NO: 3134519 - DNA, 25 bp, Homo sapien
ttatgttcctcctctgaagtgaatt

SEQ ID NO: 3134520 - DNA, 25 bp, Homo sapien
tatgttcctcctctgaagtgaattt

SEQ ID NO: 3134521 - DNA, 25 bp, Homo sapien
taataaaatacaccgacgtgtcgct

SEQ ID NO: 3134522 - DNA, 25 bp, Homo sapien
tccagtggcatcaaggtcaagagac

SEQ ID NO: 3134523 - DNA, 25 bp, Homo sapien
aatagcaggactcaatgttccagtg

SEQ ID NO: 3134524 - DNA, 25 bp, Homo sapien
caagagactgacttgtgagggcctc

SEQ ID NO: 3134525 - DNA, 25 bp, Homo sapien
tgcccctagaactgacattagtgac

SEQ ID NO: 3134526 - DNA, 25 bp, Homo sapien
cacactccatgtgcctcggatttat

SEQ ID NO: 3134527 - DNA, 25 bp, Homo sapien
tatttgttatgtgagtgatgaacca

SEQ ID NO: 3134528 - DNA, 25 bp, Homo sapien
aaatcccctgtaagcattgatgccc

SEQ ID NO: 3134529 - DNA, 25 bp, Homo sapien
tgatgctgacatccagaaagatgag

SEQ ID NO: 3134530 - DNA, 25 bp, Homo sapien
ctttgatgctgacatccagaaagat

SEQ ID NO: 3134531 - DNA, 25 bp, Homo sapien
tgctgacatccagaaagatgagcat

SEQ ID NO: 3134532 - DNA, 25 bp, Homo sapien
ttgatgctgacatccagaaagatga

SEQ ID NO: 3134533 - DNA, 25 bp, Homo sapien
ccatgttttagacaatcctgctgca

SEQ ID NO: 3134534 - DNA, 25 bp, Homo sapien
gttttagacaatcctgctgcatctt

SEQ ID NO: 3134535 - DNA, 25 bp, Homo sapien
tcacattccagaacaaattgtcgtt

SEQ ID NO: 3134536 - DNA, 25 bp, Homo sapien
ctaccatgttttagacaatcctgct

SEQ ID NO: 3134537 - DNA, 25 bp, Homo sapien
ctgtatagttatgatctctgtgttt

SEQ ID NO: 3134538 - DNA, 25 bp, Homo sapien
tgtgttttggtcaatgtattccagt

SEQ ID NO: 3134539 - DNA, 25 bp, Homo sapien
gttttggtcaatgtattccagttta

SEQ ID NO: 3134540 - DNA, 25 bp, Homo sapien
gtatagttatgatctctgtgttttg

SEQ ID NO: 3134541 - DNA, 25 bp, Homo sapien
ctgccaaaatgacttaggaaagtta

SEQ ID NO: 3134542 - DNA, 25 bp, Homo sapien
aagttaccaaatcctctctcactta

SEQ ID NO: 3134543 - DNA, 25 bp, Homo sapien
tgccaaaatgacttaggaaagttac

SEQ ID NO: 3134544 - DNA, 25 bp, Homo sapien
aaatcctctctcacttaagtccttc

SEQ ID NO: 3134545 - DNA, 25 bp, Homo sapien
gcaccaacaacctttgggtgtcctg

SEQ ID NO: 3134546 - DNA, 25 bp, Homo sapien
caccaacaacctttgggtgtcctgg

SEQ ID NO: 3134547 - DNA, 25 bp, Homo sapien
agcaccaacaacctttgggtgtcct

SEQ ID NO: 3134548 - DNA, 25 bp, Homo sapien
gagcaagactctcccgtctgccagt

SEQ ID NO: 3134549 - DNA, 25 bp, Homo sapien
cagccagggaatatgaaaagttgga

SEQ ID NO: 3134550 - DNA, 25 bp, Homo sapien
tacaggaataagaacagccagggaa

SEQ ID NO: 3134551 - DNA, 25 bp, Homo sapien
aagaacatcgccatgatacaggaat

SEQ ID NO: 3134552 - DNA, 25 bp, Homo sapien
attcctgaacctgagaattgaatac

SEQ ID NO: 3134553 - DNA, 25 bp, Homo sapien
ttgaatactccatttcacttctgaa

SEQ ID NO: 3134554 - DNA, 25 bp, Homo sapien
aatcctgtctacaatccccattatt

SEQ ID NO: 3134555 - DNA, 25 bp, Homo sapien
tgagaattgaatactccatttcact

SEQ ID NO: 3134556 - DNA, 25 bp, Homo sapien
cgtcaaaggaagcttccaagtaact

SEQ ID NO: 3134557 - DNA, 25 bp, Homo sapien
gtcgtaacatgggttttgtgaggca

SEQ ID NO: 3134558 - DNA, 25 bp, Homo sapien
ctccatataactgagctctcctcgt

SEQ ID NO: 3134559 - DNA, 25 bp, Homo sapien
caagtaactgggtgaagtcttaacg

SEQ ID NO: 3134560 - DNA, 25 bp, Homo sapien
tggcagcacgctgtatctctcatcc

SEQ ID NO: 3134561 - DNA, 25 bp, Homo sapien
caactctcattaagatgggccatcc

SEQ ID NO: 3134562 - DNA, 25 bp, Homo sapien
cccacaactctcattaagatgggcc

SEQ ID NO: 3134563 - DNA, 25 bp, Homo sapien
tgggccatccttggcagcacgctgt

SEQ ID NO: 3134564 - DNA, 25 bp, Homo sapien
aaagcagtcaccaaagctgaagtag

SEQ ID NO: 3134565 - DNA, 25 bp, Homo sapien
gcaaagtcttgttagctggcacaga

SEQ ID NO: 3134566 - DNA, 25 bp, Homo sapien
tagatctactcagaaagcaatgtgg

SEQ ID NO: 3134567 - DNA, 25 bp, Homo sapien
caatgtggttgtggctgctaagaaa

SEQ ID NO: 3134568 - DNA, 25 bp, Homo sapien
acaggacttctcatacatttactgg

SEQ ID NO: 3134569 - DNA, 25 bp, Homo sapien
aactgtgttcttaggcaattgcaag

SEQ ID NO: 3134570 - DNA, 25 bp, Homo sapien
aaactgtgttcttaggcaattgcaa

SEQ ID NO: 3134571 - DNA, 25 bp, Homo sapien
gcaaggacaacttcagtcttattcc

SEQ ID NO: 3134572 - DNA, 25 bp, Homo sapien
caaaactgggcattgcgttcatggc

SEQ ID NO: 3134573 - DNA, 25 bp, Homo sapien
tcagcttcagataatcacatgtagc

SEQ ID NO: 3134574 - DNA, 25 bp, Homo sapien
gctgctatctaacttgtgcttggct

SEQ ID NO: 3134575 - DNA, 25 bp, Homo sapien
tgcgttcatggctgctatctaactt

SEQ ID NO: 3134576 - DNA, 25 bp, Homo sapien
catggaatcaggactggttatgacc

SEQ ID NO: 3134577 - DNA, 25 bp, Homo sapien
ccttatgtagtctcctctaacatgg

SEQ ID NO: 3134578 - DNA, 25 bp, Homo sapien
cttctggtacctgtgtccttatgta

SEQ ID NO: 3134579 - DNA, 25 bp, Homo sapien
tatgaccgatcgcagaaatgacagc

SEQ ID NO: 3134580 - DNA, 25 bp, Homo sapien
tgcagtacccaatttcccatgagta

SEQ ID NO: 3134581 - DNA, 25 bp, Homo sapien
gaaatggagtgtttcccagctgagc

SEQ ID NO: 3134582 - DNA, 25 bp, Homo sapien
gcagctttctgaggcactaggcgga

SEQ ID NO: 3134583 - DNA, 25 bp, Homo sapien
gcggaagaccagtaaaaatgcccca

SEQ ID NO: 3134584 - DNA, 25 bp, Homo sapien
gtattccatacagagcatggatggc

SEQ ID NO: 3134585 - DNA, 25 bp, Homo sapien
ggatggcaagctctctgagttataa

SEQ ID NO: 3134586 - DNA, 25 bp, Homo sapien
gtcttgtctcatgccaattgctgag

SEQ ID NO: 3134587 - DNA, 25 bp, Homo sapien
ctgtctgtcctaacttttgccacct

SEQ ID NO: 3134588 - DNA, 25 bp, Homo sapien
tactgcaattagatacacgtatacc

SEQ ID NO: 3134589 - DNA, 25 bp, Homo sapien
gaagcccctaaaggagatttatgtg

SEQ ID NO: 3134590 - DNA, 25 bp, Homo sapien
cacgtatacctttgtgtccttaata

SEQ ID NO: 3134591 - DNA, 25 bp, Homo sapien
tgaagtccatcaaacagaatgaagc

SEQ ID NO: 3134592 - DNA, 25 bp, Homo sapien
ccagttttccgacaacttctctgct

SEQ ID NO: 3134593 - DNA, 25 bp, Homo sapien
agttttccgacaacttctctgctga

SEQ ID NO: 3134594 - DNA, 25 bp, Homo sapien
gttttccgacaacttctctgctgag

SEQ ID NO: 3134595 - DNA, 25 bp, Homo sapien
tttccgacaacttctctgctgagat

SEQ ID NO: 3134596 - DNA, 25 bp, Homo sapien
aaacaaagcacactgggcacttact

SEQ ID NO: 3134597 - DNA, 25 bp, Homo sapien
tagataggaatgtaaagttgcccaa

SEQ ID NO: 3134598 - DNA, 25 bp, Homo sapien
tagcaatgatcgtaaaatgaagagc

SEQ ID NO: 3134599 - DNA, 25 bp, Homo sapien
gacaagctcgggcaaaaacaaagca

SEQ ID NO: 3134600 - DNA, 25 bp, Homo sapien
cttggcctcctgcgcatcgtaaaga

SEQ ID NO: 3134601 - DNA, 25 bp, Homo sapien
ggcctcctgcgcatcgtaaagagtt

SEQ ID NO: 3134602 - DNA, 25 bp, Homo sapien
ttggcctcctgcgcatcgtaaagag

SEQ ID NO: 3134603 - DNA, 25 bp, Homo sapien
tggcctcctgcgcatcgtaaagagt

SEQ ID NO: 3134604 - DNA, 25 bp, Homo sapien
gcagtgatttagcaaataagtctac

SEQ ID NO: 3134605 - DNA, 25 bp, Homo sapien
tgaagcagtgatttagcaaataagt

SEQ ID NO: 3134606 - DNA, 25 bp, Homo sapien
ttaatgaagcagtgatttagcaaat

SEQ ID NO: 3134607 - DNA, 25 bp, Homo sapien
aagcagtgatttagcaaataagtct

SEQ ID NO: 3134608 - DNA, 25 bp, Homo sapien
taaacgtttcctttatagtgccaca

SEQ ID NO: 3134609 - DNA, 25 bp, Homo sapien
gactttagcactacagcaaggtgtc

SEQ ID NO: 3134610 - DNA, 25 bp, Homo sapien
tacaatgccagctatatcgtctaag

SEQ ID NO: 3134611 - DNA, 25 bp, Homo sapien
caaggtgtcctacttataaaaggca

SEQ ID NO: 3134612 - DNA, 25 bp, Homo sapien
ttcaccacttagagagaggtttatc

SEQ ID NO: 3134613 - DNA, 25 bp, Homo sapien
tcaagctacattggaataacgttga

SEQ ID NO: 3134614 - DNA, 25 bp, Homo sapien
atcttcaccacttagagagaggttt

SEQ ID NO: 3134615 - DNA, 25 bp, Homo sapien
ggaataacgttgatcttgtgagttg

SEQ ID NO: 3134616 - DNA, 25 bp, Homo sapien
ccagcagaaagtagatggcagcctt

SEQ ID NO: 3134617 - DNA, 25 bp, Homo sapien
atggcagcctttttgatgtagccca

SEQ ID NO: 3134618 - DNA, 25 bp, Homo sapien
tggcagcctttttgatgtagcccat

SEQ ID NO: 3134619 - DNA, 25 bp, Homo sapien
gcagaaagtagatggcagccttttt

SEQ ID NO: 3134620 - DNA, 25 bp, Homo sapien
cttctagtttctgacaagtctctct

SEQ ID NO: 3134621 - DNA, 25 bp, Homo sapien
ctagtttctgacaagtctctctggt

SEQ ID NO: 3134622 - DNA, 25 bp, Homo sapien
tgacaagtctctctggtgcccctac

SEQ ID NO: 3134623 - DNA, 25 bp, Homo sapien
cttccttctagtttctgacaagtct

SEQ ID NO: 3134624 - DNA, 25 bp, Homo sapien
catgtatacgggaaaaccacaaaga

SEQ ID NO: 3134625 - DNA, 25 bp, Homo sapien
cagggaattaacactcagatttcgc

SEQ ID NO: 3134626 - DNA, 25 bp, Homo sapien
gtcctttgatgaagccagggaatta

SEQ ID NO: 3134627 - DNA, 25 bp, Homo sapien
gcccaaaaggagaatcatgtagtct

SEQ ID NO: 3134628 - DNA, 25 bp, Homo sapien
cgtgagtggcattggtatcaagata

SEQ ID NO: 3134629 - DNA, 25 bp, Homo sapien
ggtatcaagatagtttgtacttcca

SEQ ID NO: 3134630 - DNA, 25 bp, Homo sapien
tttgtacttccatagaaatgtgtca

SEQ ID NO: 3134631 - DNA, 25 bp, Homo sapien
gattatgatcacagttatagtggtc

SEQ ID NO: 3134632 - DNA, 25 bp, Homo sapien
gtcttataaactgatgtttggctct

SEQ ID NO: 3134633 - DNA, 25 bp, Homo sapien
tggctctaccctttagatagttatt

SEQ ID NO: 3134634 - DNA, 25 bp, Homo sapien
cactgttctaacagtctccatcatg

SEQ ID NO: 3134635 - DNA, 25 bp, Homo sapien
agatcactgttctaacagtctccat

SEQ ID NO: 3134636 - DNA, 25 bp, Homo sapien
tgtagcacctgaggtcatatttcca

SEQ ID NO: 3134637 - DNA, 25 bp, Homo sapien
taactggctcattgtaggtcctctg

SEQ ID NO: 3134638 - DNA, 25 bp, Homo sapien
tctggtcataggagcatatctcttc

SEQ ID NO: 3134639 - DNA, 25 bp, Homo sapien
cactttctttcaaggtccccatctt

SEQ ID NO: 3134640 - DNA, 25 bp, Homo sapien
cagagctattgtagttttggttcca

SEQ ID NO: 3134641 - DNA, 25 bp, Homo sapien
ggctccaatctaagtatactgtata

SEQ ID NO: 3134642 - DNA, 25 bp, Homo sapien
taaagtgagtcacactatttttggg

SEQ ID NO: 3134643 - DNA, 25 bp, Homo sapien
attttactatataggcaaagatcag

SEQ ID NO: 3134644 - DNA, 25 bp, Homo sapien
ctggctccataggtatggccattca

SEQ ID NO: 3134645 - DNA, 25 bp, Homo sapien
ggtatggccattcatgatgcctgga

SEQ ID NO: 3134646 - DNA, 25 bp, Homo sapien
catgatgcctggactagatgctacc

SEQ ID NO: 3134647 - DNA, 25 bp, Homo sapien
gatgctaccaggttcttttcaactg

SEQ ID NO: 3134648 - DNA, 25 bp, Homo sapien
ttagacaaggagtcactttccactg

SEQ ID NO: 3134649 - DNA, 25 bp, Homo sapien
ctggccacaatcctactgctatatg

SEQ ID NO: 3134650 - DNA, 25 bp, Homo sapien
ttttgacatgacacccgatgcctgg

SEQ ID NO: 3134651 - DNA, 25 bp, Homo sapien
ttgcagtagccacgtttagacaagg

SEQ ID NO: 3134652 - DNA, 25 bp, Homo sapien
catatctaacgtggatggtagcagg

SEQ ID NO: 3134653 - DNA, 25 bp, Homo sapien
gtcatatctaacgtggatggtagca

SEQ ID NO: 3134654 - DNA, 25 bp, Homo sapien
atatctaacgtggatggtagcaggc

SEQ ID NO: 3134655 - DNA, 25 bp, Homo sapien
aagtcatatctaacgtggatggtag

SEQ ID NO: 3134656 - DNA, 25 bp, Homo sapien
ccacttgcatttgttcctgacacct

SEQ ID NO: 3134657 - DNA, 25 bp, Homo sapien
cctgacacctgctggacttttccat

SEQ ID NO: 3134658 - DNA, 25 bp, Homo sapien
cttgcatttgttcctgacacctgct

SEQ ID NO: 3134659 - DNA, 25 bp, Homo sapien
ttcccacttgcatttgttcctgaca

SEQ ID NO: 3134660 - DNA, 25 bp, Homo sapien
tctctgtagtaattagaaggtttct

SEQ ID NO: 3134661 - DNA, 25 bp, Homo sapien
gcctttactgcttcagagctccgga

SEQ ID NO: 3134662 - DNA, 25 bp, Homo sapien
gaaattctgggaactacacgaagtg

SEQ ID NO: 3134663 - DNA, 25 bp, Homo sapien
tcatcaccattaacctggagcaaat

SEQ ID NO: 3134664 - DNA, 25 bp, Homo sapien
gaaacctcaagctccatccttttca

SEQ ID NO: 3134665 - DNA, 25 bp, Homo sapien
acctcaagctccatccttttcaaat

SEQ ID NO: 3134666 - DNA, 25 bp, Homo sapien
aaacctcaagctccatccttttcaa

SEQ ID NO: 3134667 - DNA, 25 bp, Homo sapien
cagaaacctcaagctccatcctttt

SEQ ID NO: 3134668 - DNA, 25 bp, Homo sapien
tgccaccatggggttcatgaaaatg

SEQ ID NO: 3134669 - DNA, 25 bp, Homo sapien
tatcataaacaatgggccttttatt

SEQ ID NO: 3134670 - DNA, 25 bp, Homo sapien
ttatatacacccatatttcaagtct

SEQ ID NO: 3134671 - DNA, 25 bp, Homo sapien
aaatatcataaacaatgggcctttt

SEQ ID NO: 3134672 - DNA, 25 bp, Homo sapien
ttgacagcttgtaggtgtgggtcat

SEQ ID NO: 3134673 - DNA, 25 bp, Homo sapien
cttgacagcttgtaggtgtgggtca

SEQ ID NO: 3134674 - DNA, 25 bp, Homo sapien
ctgtcctgaatgttctctcgggaga

SEQ ID NO: 3134675 - DNA, 25 bp, Homo sapien
tcctttttgtgccaggctgtacctc

SEQ ID NO: 3134676 - DNA, 25 bp, Homo sapien
aaattctgcccacaaatctcatcct

SEQ ID NO: 3134677 - DNA, 25 bp, Homo sapien
ggctgtacctcaaaagacttatatc

SEQ ID NO: 3134678 - DNA, 25 bp, Homo sapien
gatgcagaagcagataggagcagtc

SEQ ID NO: 3134679 - DNA, 25 bp, Homo sapien
ttctaaacaaaataaggcgtctgat

SEQ ID NO: 3134680 - DNA, 25 bp, Homo sapien
acaaaataaggcgtctgatgaggac

SEQ ID NO: 3134681 - DNA, 25 bp, Homo sapien
taaacaaaataaggcgtctgatgag

SEQ ID NO: 3134682 - DNA, 25 bp, Homo sapien
caagagttgttacagttgcttcaca

SEQ ID NO: 3134683 - DNA, 25 bp, Homo sapien
tgtcaagagttgttacagttgcttc

SEQ ID NO: 3134684 - DNA, 25 bp, Homo sapien
cgcatgtcaagagttgttacagttg

SEQ ID NO: 3134685 - DNA, 25 bp, Homo sapien
gagttgttacagttgcttcacatgt

SEQ ID NO: 3134686 - DNA, 25 bp, Homo sapien
cccagaggctgattaacttcaaaag

SEQ ID NO: 3134687 - DNA, 25 bp, Homo sapien
ggccccagaggctgattaacttcaa

SEQ ID NO: 3134688 - DNA, 25 bp, Homo sapien
taagcttgtgctcttcttgccagat

SEQ ID NO: 3134689 - DNA, 25 bp, Homo sapien
tcagggccctcttgcgtacccttta

SEQ ID NO: 3134690 - DNA, 25 bp, Homo sapien
ttttcagttgggcagagttctgaca

SEQ ID NO: 3134691 - DNA, 25 bp, Homo sapien
tgggcagagttctgacaacgtttct

SEQ ID NO: 3134692 - DNA, 25 bp, Homo sapien
tagtaggcttgttttcagttgggca

SEQ ID NO: 3134693 - DNA, 25 bp, Homo sapien
ctgacaacgtttcttctggaagtcc

SEQ ID NO: 3134694 - DNA, 25 bp, Homo sapien
caagccctgatccatgcagaccttt

SEQ ID NO: 3134695 - DNA, 25 bp, Homo sapien
catgcagacctttttgcaagtcgtc

SEQ ID NO: 3134696 - DNA, 25 bp, Homo sapien
tcgtcgctgcctgaaatggatccat

SEQ ID NO: 3134697 - DNA, 25 bp, Homo sapien
caccagagaactaagctccttgtgc

SEQ ID NO: 3134698 - DNA, 25 bp, Homo sapien
caaagcttccggacatataagaaag

SEQ ID NO: 3134699 - DNA, 25 bp, Homo sapien
aaacacaaagcttccggacatataa

SEQ ID NO: 3134700 - DNA, 25 bp, Homo sapien
acatataagaaagtccattcatgac

SEQ ID NO: 3134701 - DNA, 25 bp, Homo sapien
gcttccggacatataagaaagtcca

SEQ ID NO: 3134702 - DNA, 25 bp, Homo sapien
tctcaagtagatgactgctagatcg

SEQ ID NO: 3134703 - DNA, 25 bp, Homo sapien
ggtagtgaccccagttctcaagtag

SEQ ID NO: 3134704 - DNA, 25 bp, Homo sapien
gttcacgtgcataccaacctgaatt

SEQ ID NO: 3134705 - DNA, 25 bp, Homo sapien
tagatcggtgccctgtccctatgct

SEQ ID NO: 3134706 - DNA, 25 bp, Homo sapien
agcagggatgtctgagatgcagtct

SEQ ID NO: 3134707 - DNA, 25 bp, Homo sapien
tggagtagaagtaacagaaaggctt

SEQ ID NO: 3134708 - DNA, 25 bp, Homo sapien
tagaagtaacagaaaggcttgtatt

SEQ ID NO: 3134709 - DNA, 25 bp, Homo sapien
gagtagaagtaacagaaaggcttgt

SEQ ID NO: 3134710 - DNA, 25 bp, Homo sapien
gaaataattgtactcctttgcctgc

SEQ ID NO: 3134711 - DNA, 25 bp, Homo sapien
aaataattgtactcctttgcctgca

SEQ ID NO: 3134712 - DNA, 25 bp, Homo sapien
aggaaataattgtactcctttgcct

SEQ ID NO: 3134713 - DNA, 25 bp, Homo sapien
aataattgtactcctttgcctgcag

SEQ ID NO: 3134714 - DNA, 25 bp, Homo sapien
tgaccatgatatgtatgttgagaac

SEQ ID NO: 3134715 - DNA, 25 bp, Homo sapien
tgatatgtatgttgagaacactagt

SEQ ID NO: 3134716 - DNA, 25 bp, Homo sapien
ccatgatatgtatgttgagaacact

SEQ ID NO: 3134717 - DNA, 25 bp, Homo sapien
ctgtgaccatgatatgtatgttgag

SEQ ID NO: 3134718 - DNA, 25 bp, Homo sapien
cggttccattcagactcatttccta

SEQ ID NO: 3134719 - DNA, 25 bp, Homo sapien
tgagctcttttactggaggtgtgga

SEQ ID NO: 3134720 - DNA, 25 bp, Homo sapien
aggtgtggatattttccggttccat

SEQ ID NO: 3134721 - DNA, 25 bp, Homo sapien
tcattggatccgattgttgagctct

SEQ ID NO: 3134722 - DNA, 25 bp, Homo sapien
catcagggctgcaattcaataatgc

SEQ ID NO: 3134723 - DNA, 25 bp, Homo sapien
tgatgtcctcctaccatttgtcttg

SEQ ID NO: 3134724 - DNA, 25 bp, Homo sapien
aatccaaagtaatgcagccatcagg

SEQ ID NO: 3134725 - DNA, 25 bp, Homo sapien
tcttcaattggattgcttctgtcac

SEQ ID NO: 3134726 - DNA, 25 bp, Homo sapien
caagcttcctgttggtacagggaac

SEQ ID NO: 3134727 - DNA, 25 bp, Homo sapien
gattgtaactctcagtctataacct

SEQ ID NO: 3134728 - DNA, 25 bp, Homo sapien
aaaggtgcctgatgtttatctgtac

SEQ ID NO: 3134729 - DNA, 25 bp, Homo sapien
tacagggaactatcgatttgctgac

SEQ ID NO: 3134730 - DNA, 25 bp, Homo sapien
gccatagactgggataaaattatgg

SEQ ID NO: 3134731 - DNA, 25 bp, Homo sapien
tatacaaagaacggtgaattttcca

SEQ ID NO: 3134732 - DNA, 25 bp, Homo sapien
tttaaaattgcaaattagtacaaca

SEQ ID NO: 3134733 - DNA, 25 bp, Homo sapien
aatgctgatatttgaggatgcagca

SEQ ID NO: 3134734 - DNA, 25 bp, Homo sapien
ttacttgccgagcaaagaggcccca

SEQ ID NO: 3134735 - DNA, 25 bp, Homo sapien
tactccactcttacttgccgagcaa

SEQ ID NO: 3134736 - DNA, 25 bp, Homo sapien
ctcttacttgccgagcaaagaggcc

SEQ ID NO: 3134737 - DNA, 25 bp, Homo sapien
ccactcttacttgccgagcaaagag

SEQ ID NO: 3134738 - DNA, 25 bp, Homo sapien
ttaaggcagcagacaatttgacctt

SEQ ID NO: 3134739 - DNA, 25 bp, Homo sapien
gacaatttgaccttgtgacaaatcc

SEQ ID NO: 3134740 - DNA, 25 bp, Homo sapien
cagcagacaatttgaccttgtgaca

SEQ ID NO: 3134741 - DNA, 25 bp, Homo sapien
gaccttgtgacaaatccttgtgact

SEQ ID NO: 3134742 - DNA, 25 bp, Homo sapien
aatcagttccaactgattacagtgc

SEQ ID NO: 3134743 - DNA, 25 bp, Homo sapien
gagtaatcagttccaactgattaca

SEQ ID NO: 3134744 - DNA, 25 bp, Homo sapien
taatcagttccaactgattacagtg

SEQ ID NO: 3134745 - DNA, 25 bp, Homo sapien
agttgagtaatcagttccaactgat

SEQ ID NO: 3134746 - DNA, 25 bp, Homo sapien
atgattggttttgaggaagacacgt

SEQ ID NO: 3134747 - DNA, 25 bp, Homo sapien
ctctgccactcatgattggttttga

SEQ ID NO: 3134748 - DNA, 25 bp, Homo sapien
ttggttttgaggaagacacgtgcat

SEQ ID NO: 3134749 - DNA, 25 bp, Homo sapien
cacctctgccactcatgattggttt

SEQ ID NO: 3134750 - DNA, 25 bp, Homo sapien
acctgttgctcatttatcaggttca

SEQ ID NO: 3134751 - DNA, 25 bp, Homo sapien
tcatcatataaggatcaatgatcat

SEQ ID NO: 3134752 - DNA, 25 bp, Homo sapien
tacctgttgctcatttatcaggttc

SEQ ID NO: 3134753 - DNA, 25 bp, Homo sapien
cttacctgttgctcatttatcaggt

SEQ ID NO: 3134754 - DNA, 25 bp, Homo sapien
actcctctcatgctttctgaagaca

SEQ ID NO: 3134755 - DNA, 25 bp, Homo sapien
gctactggagtaagaccgtcctttc

SEQ ID NO: 3134756 - DNA, 25 bp, Homo sapien
cgtcctttcgttcccctgaagctat

SEQ ID NO: 3134757 - DNA, 25 bp, Homo sapien
tctgaagacagagctactggagtaa

SEQ ID NO: 3134758 - DNA, 25 bp, Homo sapien
tcagtacgctgtagctatctgtgtg

SEQ ID NO: 3134759 - DNA, 25 bp, Homo sapien
tatctgtgtgccagcatgggacgga

SEQ ID NO: 3134760 - DNA, 25 bp, Homo sapien
tacgctgtagctatctgtgtgccag

SEQ ID NO: 3134761 - DNA, 25 bp, Homo sapien
gtgccagcatgggacggaaacagac

SEQ ID NO: 3134762 - DNA, 25 bp, Homo sapien
gatggtcagcagtcacgagctcctt

SEQ ID NO: 3134763 - DNA, 25 bp, Homo sapien
cagctcttgaaagggtgccaaagca

SEQ ID NO: 3134764 - DNA, 25 bp, Homo sapien
aagcagtggtgtggttctcgtgatc

SEQ ID NO: 3134765 - DNA, 25 bp, Homo sapien
caggatttccaaccagatggtcagc

SEQ ID NO: 3134766 - DNA, 25 bp, Homo sapien
ggtgctaaggcttgcaggattgaaa

SEQ ID NO: 3134767 - DNA, 25 bp, Homo sapien
gatttgtacttaatgacagggaact

SEQ ID NO: 3134768 - DNA, 25 bp, Homo sapien
gtatatgccactcagtaaagatgga

SEQ ID NO: 3134769 - DNA, 25 bp, Homo sapien
taaagatggatttgtccgaggccct

SEQ ID NO: 3134770 - DNA, 25 bp, Homo sapien
tttgctttcagccaattcagaatat

SEQ ID NO: 3134771 - DNA, 25 bp, Homo sapien
tcagaatatttctttctgctttcat

SEQ ID NO: 3134772 - DNA, 25 bp, Homo sapien
cttttgctttcagccaattcagaat

SEQ ID NO: 3134773 - DNA, 25 bp, Homo sapien
tgctttcagccaattcagaatattt

SEQ ID NO: 3134774 - DNA, 25 bp, Homo sapien
gtatcatcgaatagattcactccct

SEQ ID NO: 3134775 - DNA, 25 bp, Homo sapien
tgacagtaagtatcatcgaatagat

SEQ ID NO: 3134776 - DNA, 25 bp, Homo sapien
tgttccttctgttgacccaagtaga

SEQ ID NO: 3134777 - DNA, 25 bp, Homo sapien
tctgttgacccaagtagatagacat

SEQ ID NO: 3134778 - DNA, 25 bp, Homo sapien
caggaacatgtattaaagaggccat

SEQ ID NO: 3134779 - DNA, 25 bp, Homo sapien
tcagcagttcttccaaatagccagg

SEQ ID NO: 3134780 - DNA, 25 bp, Homo sapien
ccaaatagccaggaacatgtattaa

SEQ ID NO: 3134781 - DNA, 25 bp, Homo sapien
ttatcagcagttcttccaaatagcc

SEQ ID NO: 3134782 - DNA, 25 bp, Homo sapien
tttaatttcgtgactcgaatttgga

SEQ ID NO: 3134783 - DNA, 25 bp, Homo sapien
ttcgtgactcgaatttggaaacaat

SEQ ID NO: 3134784 - DNA, 25 bp, Homo sapien
ctgttttaatttcgtgactcgaatt

SEQ ID NO: 3134785 - DNA, 25 bp, Homo sapien
taatttcgtgactcgaatttggaaa

SEQ ID NO: 3134786 - DNA, 25 bp, Homo sapien
gagtaattagccctcctgaccatat

SEQ ID NO: 3134787 - DNA, 25 bp, Homo sapien
ctctggctgctcgagttgagagcat

SEQ ID NO: 3134788 - DNA, 25 bp, Homo sapien
ggaagtgtctggattggaggattag

SEQ ID NO: 3134789 - DNA, 25 bp, Homo sapien
gctgttgctgctaatgtagatctct

SEQ ID NO: 3134790 - DNA, 25 bp, Homo sapien
gatggattgatataggagcctaaac

SEQ ID NO: 3134791 - DNA, 25 bp, Homo sapien
ttccatccattcccattgtagcagt

SEQ ID NO: 3134792 - DNA, 25 bp, Homo sapien
taggagcctaaacacatcattcgtt

SEQ ID NO: 3134793 - DNA, 25 bp, Homo sapien
gattgaatccagggcgattttaaag

SEQ ID NO: 3134794 - DNA, 25 bp, Homo sapien
ccttctccaacataagcattgagtc

SEQ ID NO: 3134795 - DNA, 25 bp, Homo sapien
cttccttctccaacataagcattga

SEQ ID NO: 3134796 - DNA, 25 bp, Homo sapien
tctccaacataagcattgagtcctc

SEQ ID NO: 3134797 - DNA, 25 bp, Homo sapien
tccaacataagcattgagtcctcca

SEQ ID NO: 3134798 - DNA, 25 bp, Homo sapien
ctgtgagtccttagaggtcatggga

SEQ ID NO: 3134799 - DNA, 25 bp, Homo sapien
agatccagtggggtgtcagattccc

SEQ ID NO: 3134800 - DNA, 25 bp, Homo sapien
aggatgcagtaggaaaatcagattc

SEQ ID NO: 3134801 - DNA, 25 bp, Homo sapien
gggcagagcctgtgaaagatccagt

SEQ ID NO: 3134802 - DNA, 25 bp, Homo sapien
tcccagtagcagagctggtctttga

SEQ ID NO: 3134803 - DNA, 25 bp, Homo sapien
tgggcagtgtccttgcatagattgg

SEQ ID NO: 3134804 - DNA, 25 bp, Homo sapien
cattggtgttggcagtcaggttccc

SEQ ID NO: 3134805 - DNA, 25 bp, Homo sapien
tggtctttgaaatgccatgggcagt

SEQ ID NO: 3134806 - DNA, 25 bp, Homo sapien
gaaccagcaatgtatgctatggcca

SEQ ID NO: 3134807 - DNA, 25 bp, Homo sapien
gggattggcatggaaccagcaatgt

SEQ ID NO: 3134808 - DNA, 25 bp, Homo sapien
gcatggaaccagcaatgtatgctat

SEQ ID NO: 3134809 - DNA, 25 bp, Homo sapien
aatgtatgctatggccattcaggag

SEQ ID NO: 3134810 - DNA, 25 bp, Homo sapien
gtgcaccaccaatcagaggcctcaa

SEQ ID NO: 3134811 - DNA, 25 bp, Homo sapien
accttctcttatagccagtgcacca

SEQ ID NO: 3134812 - DNA, 25 bp, Homo sapien
tatagccagtgcaccaccaatcaga

SEQ ID NO: 3134813 - DNA, 25 bp, Homo sapien
tcatccaccttctcttatagccagt

SEQ ID NO: 3134814 - DNA, 25 bp, Homo sapien
ggttctaatcttgcagctgcattca

SEQ ID NO: 3134815 - DNA, 25 bp, Homo sapien
gaaaacaccctaaatacagcttctg

SEQ ID NO: 3134816 - DNA, 25 bp, Homo sapien
caaacgagcctcacagttgaatgtt

SEQ ID NO: 3134817 - DNA, 25 bp, Homo sapien
tatccaggttctaatcttgcagctg

SEQ ID NO: 3134818 - DNA, 25 bp, Homo sapien
gaagatgtgctgcattgaattttat

SEQ ID NO: 3134819 - DNA, 25 bp, Homo sapien
gctcagaagtgagcgggaagatgtg

SEQ ID NO: 3134820 - DNA, 25 bp, Homo sapien
gagcagaccttgcatgctcagaagt

SEQ ID NO: 3134821 - DNA, 25 bp, Homo sapien
gaagtgagcgggaagatgtgctgca

SEQ ID NO: 3134822 - DNA, 25 bp, Homo sapien
gaaagacagctactttgtgcaggaa

SEQ ID NO: 3134823 - DNA, 25 bp, Homo sapien
gaggagaggaccctccggggacaga

SEQ ID NO: 3134824 - DNA, 25 bp, Homo sapien
ccctccggggacagacttggaattg

SEQ ID NO: 3134825 - DNA, 25 bp, Homo sapien
tccggggacagacttggaattggca

SEQ ID NO: 3134826 - DNA, 25 bp, Homo sapien
tgatgggattgctgattgccagagt

SEQ ID NO: 3134827 - DNA, 25 bp, Homo sapien
catgatgggattgctgattgccaga

SEQ ID NO: 3134828 - DNA, 25 bp, Homo sapien
gacacatgatgggattgctgattgc

SEQ ID NO: 3134829 - DNA, 25 bp, Homo sapien
cacatgatgggattgctgattgcca

SEQ ID NO: 3134830 - DNA, 25 bp, Homo sapien
ttcattctgataacacacacactcc

SEQ ID NO: 3134831 - DNA, 25 bp, Homo sapien
tcatcgataattgtaaagtcagcca

SEQ ID NO: 3134832 - DNA, 25 bp, Homo sapien
ctgctcttcaattatctcttcagtg

SEQ ID NO: 3134833 - DNA, 25 bp, Homo sapien
acacacactccttggcggctggcag

SEQ ID NO: 3134834 - DNA, 25 bp, Homo sapien
gactctatcaactggcagtacagca

SEQ ID NO: 3134835 - DNA, 25 bp, Homo sapien
cattccttgctgataggaattgacc

SEQ ID NO: 3134836 - DNA, 25 bp, Homo sapien
gacacacaggtgactaaaccaggaa

SEQ ID NO: 3134837 - DNA, 25 bp, Homo sapien
tgaccatgtgactctatcaactggc

SEQ ID NO: 3134838 - DNA, 25 bp, Homo sapien
gtctgcgtgtctgcgaagaggaact

SEQ ID NO: 3134839 - DNA, 25 bp, Homo sapien
aagaggaactgactgtttggacaag

SEQ ID NO: 3134840 - DNA, 25 bp, Homo sapien
gacaagggtggccaatcatacttga

SEQ ID NO: 3134841 - DNA, 25 bp, Homo sapien
catacttgataccatcaggttcaga

SEQ ID NO: 3134842 - DNA, 25 bp, Homo sapien
tgttacctggtcctttcagcaaact

SEQ ID NO: 3134843 - DNA, 25 bp, Homo sapien
aatgtatcagtggtgtactttccca

SEQ ID NO: 3134844 - DNA, 25 bp, Homo sapien
tcatgagagctagccttttcccaaa

SEQ ID NO: 3134845 - DNA, 25 bp, Homo sapien
gagccactcgtaggccacatgcagg

SEQ ID NO: 3134846 - DNA, 25 bp, Homo sapien
tcagagccttaaggatgaaatatca

SEQ ID NO: 3134847 - DNA, 25 bp, Homo sapien
aaatatcagagcctagacgctggtt

SEQ ID NO: 3134848 - DNA, 25 bp, Homo sapien
gccttaaggatgaaatatcagagcc

SEQ ID NO: 3134849 - DNA, 25 bp, Homo sapien
gagccttaaggatgaaatatcagag

SEQ ID NO: 3134850 - DNA, 25 bp, Homo sapien
gcagcacatgaaagagggatctgtc

SEQ ID NO: 3134851 - DNA, 25 bp, Homo sapien
atgaaagagggatctgtcattttgg

SEQ ID NO: 3134852 - DNA, 25 bp, Homo sapien
gaaagagggatctgtcattttggca

SEQ ID NO: 3134853 - DNA, 25 bp, Homo sapien
agcagcacatgaaagagggatctgt

SEQ ID NO: 3134854 - DNA, 25 bp, Homo sapien
ccagcacagaaatctccccttggct

SEQ ID NO: 3134855 - DNA, 25 bp, Homo sapien
atccagcacagaaatctccccttgg

SEQ ID NO: 3134856 - DNA, 25 bp, Homo sapien
cagcacagaaatctccccttggctt

SEQ ID NO: 3134857 - DNA, 25 bp, Homo sapien
tccagcacagaaatctccccttggc

SEQ ID NO: 3134858 - DNA, 25 bp, Homo sapien
taagtttagctctttcagtctcttt

SEQ ID NO: 3134859 - DNA, 25 bp, Homo sapien
tcagtctcttttcaccagtggaagg

SEQ ID NO: 3134860 - DNA, 25 bp, Homo sapien
ttttaagtttagctctttcagtctc

SEQ ID NO: 3134861 - DNA, 25 bp, Homo sapien
cagtctcttttcaccagtggaaggc

SEQ ID NO: 3134862 - DNA, 25 bp, Homo sapien
ttaattggtaagattcccttcctca

SEQ ID NO: 3134863 - DNA, 25 bp, Homo sapien
taattggtaagattcccttcctcac

SEQ ID NO: 3134864 - DNA, 25 bp, Homo sapien
cagtgcacttaattcaagcctaagc

SEQ ID NO: 3134865 - DNA, 25 bp, Homo sapien
gctctaaggcctttgatgctgaatg

SEQ ID NO: 3134866 - DNA, 25 bp, Homo sapien
cctaagcttttgtagtatgttgcaa

SEQ ID NO: 3134867 - DNA, 25 bp, Homo sapien
tagcctagtccttggcatatggcag

SEQ ID NO: 3134868 - DNA, 25 bp, Homo sapien
tttgctgccagcactatgcctttga

SEQ ID NO: 3134869 - DNA, 25 bp, Homo sapien
ctgggtgagtccacacttgcacaga

SEQ ID NO: 3134870 - DNA, 25 bp, Homo sapien
cagaactcggcttctggactgtggg

SEQ ID NO: 3134871 - DNA, 25 bp, Homo sapien
tgtgggttccagcaaagtaaaggtc

SEQ ID NO: 3134872 - DNA, 25 bp, Homo sapien
gatgaggacctttcacctcctcgcc

SEQ ID NO: 3134873 - DNA, 25 bp, Homo sapien
ctgcggagaagatgaggttttcaag

SEQ ID NO: 3134874 - DNA, 25 bp, Homo sapien
ttttcaagatataaagatgaggacc

SEQ ID NO: 3134875 - DNA, 25 bp, Homo sapien
taaagatgaggacctttcacctcct

SEQ ID NO: 3134876 - DNA, 25 bp, Homo sapien
ctctgatccgaggagctgacacaga

SEQ ID NO: 3134877 - DNA, 25 bp, Homo sapien
cacaaggccagagttggaactgctc

SEQ ID NO: 3134878 - DNA, 25 bp, Homo sapien
aggatccaggatgctcggctgcctc

SEQ ID NO: 3134879 - DNA, 25 bp, Homo sapien
caactcgaggccatttgagaactcc

SEQ ID NO: 3134880 - DNA, 25 bp, Homo sapien
ttcctaatagttggctcagcgccgt

SEQ ID NO: 3134881 - DNA, 25 bp, Homo sapien
gattcctaatagttggctcagcgcc

SEQ ID NO: 3134882 - DNA, 25 bp, Homo sapien
taatagttggctcagcgccgtaatg

SEQ ID NO: 3134883 - DNA, 25 bp, Homo sapien
atagttggctcagcgccgtaatgag

SEQ ID NO: 3134884 - DNA, 25 bp, Homo sapien
aagtctattgaggtgaggtgagata

SEQ ID NO: 3134885 - DNA, 25 bp, Homo sapien
catttttgtctgatgctgtgtcaag

SEQ ID NO: 3134886 - DNA, 25 bp, Homo sapien
aaatgtgcagagcatttaacagatc

SEQ ID NO: 3134887 - DNA, 25 bp, Homo sapien
catctattgtgcctatgtctgtatt

SEQ ID NO: 3134888 - DNA, 25 bp, Homo sapien
tcaggtcagtacattcttctccata

SEQ ID NO: 3134889 - DNA, 25 bp, Homo sapien
tcttctccatactgcctattttgtc

SEQ ID NO: 3134890 - DNA, 25 bp, Homo sapien
gtacattcttctccatactgcctat

SEQ ID NO: 3134891 - DNA, 25 bp, Homo sapien
ctccatactgcctattttgtctgtc

SEQ ID NO: 3134892 - DNA, 25 bp, Homo sapien
cataggaacgtgttacatgtttgcc

SEQ ID NO: 3134893 - DNA, 25 bp, Homo sapien
aatctttcgtgttagcagtggctcc

SEQ ID NO: 3134894 - DNA, 25 bp, Homo sapien
tgcttgtaagctcgggagtgaccct

SEQ ID NO: 3134895 - DNA, 25 bp, Homo sapien
gatttttgcctgaatactcccttag

SEQ ID NO: 3134896 - DNA, 25 bp, Homo sapien
cttacaactgccttgcaatgttgca

SEQ ID NO: 3134897 - DNA, 25 bp, Homo sapien
tgccttgcaatgttgcaatgatcct

SEQ ID NO: 3134898 - DNA, 25 bp, Homo sapien
gcttgttcgacagcaaagtcattct

SEQ ID NO: 3134899 - DNA, 25 bp, Homo sapien
ttgtggaaaggcttgttcgacagca

SEQ ID NO: 3134900 - DNA, 25 bp, Homo sapien
cccataggcccattggtagttcata

SEQ ID NO: 3134901 - DNA, 25 bp, Homo sapien
gaatgtcaaatcttggtcccatagg

SEQ ID NO: 3134902 - DNA, 25 bp, Homo sapien
ttttccagccaatacccttagatct

SEQ ID NO: 3134903 - DNA, 25 bp, Homo sapien
ttataggaagtcttaagcctcctcc

SEQ ID NO: 3134904 - DNA, 25 bp, Homo sapien
ccttcttacagccactactaagcct

SEQ ID NO: 3134905 - DNA, 25 bp, Homo sapien
agccactactaagcctccacctgcg

SEQ ID NO: 3134906 - DNA, 25 bp, Homo sapien
aatgaccctccaaattagggctgtc

SEQ ID NO: 3134907 - DNA, 25 bp, Homo sapien
agggctgtcctccttcttacagcca

SEQ ID NO: 3134908 - DNA, 25 bp, Homo sapien
catctgtctcaggcttggcttctct

SEQ ID NO: 3134909 - DNA, 25 bp, Homo sapien
acatctgtctcaggcttggcttctc

SEQ ID NO: 3134910 - DNA, 25 bp, Homo sapien
taggtgcaagaatactacgtagaac

SEQ ID NO: 3134911 - DNA, 25 bp, Homo sapien
tgaagttgtaggtgcaagaatacta

SEQ ID NO: 3134912 - DNA, 25 bp, Homo sapien
tagcccataggaggcctcctggtag

SEQ ID NO: 3134913 - DNA, 25 bp, Homo sapien
ctagcccataggaggcctcctggta

SEQ ID NO: 3134914 - DNA, 25 bp, Homo sapien
cactgacctagttgcattgaaggga

SEQ ID NO: 3134915 - DNA, 25 bp, Homo sapien
ctagttgcattgaagggaggaattc

SEQ ID NO: 3134916 - DNA, 25 bp, Homo sapien
gcctgaggacagaacaacacactga

SEQ ID NO: 3134917 - DNA, 25 bp, Homo sapien
aggaattctgaacctatcatcacag

SEQ ID NO: 3134918 - DNA, 25 bp, Homo sapien
tcaacatttgcatctttgagttttt

SEQ ID NO: 3134919 - DNA, 25 bp, Homo sapien
taccatcaacatttgcatctttgag

SEQ ID NO: 3134920 - DNA, 25 bp, Homo sapien
ctgccctttattcctaccatcaaca

SEQ ID NO: 3134921 - DNA, 25 bp, Homo sapien
tttattcctaccatcaacatttgca

SEQ ID NO: 3134922 - DNA, 25 bp, Homo sapien
tatcctgaagcttcgaatctttttg

SEQ ID NO: 3134923 - DNA, 25 bp, Homo sapien
tcttcctaatagtgctctgagatcc

SEQ ID NO: 3134924 - DNA, 25 bp, Homo sapien
cctctattgtgtatagtcttggtgt

SEQ ID NO: 3134925 - DNA, 25 bp, Homo sapien
gatcccttggggaaatcctctattg

SEQ ID NO: 3134926 - DNA, 25 bp, Homo sapien
tcctctttcccaatcccctctcttc

SEQ ID NO: 3134927 - DNA, 25 bp, Homo sapien
tctttcccaatcccctctcttcatc

SEQ ID NO: 3134928 - DNA, 25 bp, Homo sapien
ctttactctgccctcctctttccca

SEQ ID NO: 3134929 - DNA, 25 bp, Homo sapien
tttcccaatcccctctcttcatcat

SEQ ID NO: 3134930 - DNA, 25 bp, Homo sapien
taaagcaaaataaccctacaagcat

SEQ ID NO: 3134931 - DNA, 25 bp, Homo sapien
ataaagcaaaataaccctacaagca

SEQ ID NO: 3134932 - DNA, 25 bp, Homo sapien
tataaagcaaaataaccctacaagc

SEQ ID NO: 3134933 - DNA, 25 bp, Homo sapien
ctataaagcaaaataaccctacaag

SEQ ID NO: 3134934 - DNA, 25 bp, Homo sapien
tgttctgttctttacgcagttgggt

SEQ ID NO: 3134935 - DNA, 25 bp, Homo sapien
tgttctttacgcagttgggttcttg

SEQ ID NO: 3134936 - DNA, 25 bp, Homo sapien
tacgcagttgggttcttgatcctca

SEQ ID NO: 3134937 - DNA, 25 bp, Homo sapien
ctttacgcagttgggttcttgatcc

SEQ ID NO: 3134938 - DNA, 25 bp, Homo sapien
ttaataccaggtactgattccaagg

SEQ ID NO: 3134939 - DNA, 25 bp, Homo sapien
atcagaaagcctatttaataccagg

SEQ ID NO: 3134940 - DNA, 25 bp, Homo sapien
gcgttcaacagtggataactcttcc

SEQ ID NO: 3134941 - DNA, 25 bp, Homo sapien
aactcttccctagagtactagtcaa

SEQ ID NO: 3134942 - DNA, 25 bp, Homo sapien
ctgttctggagctagctgggcacat

SEQ ID NO: 3134943 - DNA, 25 bp, Homo sapien
cattatcttctcagtatggattgga

SEQ ID NO: 3134944 - DNA, 25 bp, Homo sapien
ttggcagccaaaggcaggcaggcaa

SEQ ID NO: 3134945 - DNA, 25 bp, Homo sapien
ttttttgtcagtcatcagcttgctg

SEQ ID NO: 3134946 - DNA, 25 bp, Homo sapien
gttcagatgtactgcatttgccttt

SEQ ID NO: 3134947 - DNA, 25 bp, Homo sapien
tgtacttggcatcaggccgttggtt

SEQ ID NO: 3134948 - DNA, 25 bp, Homo sapien
ggccgttggttcagttcagatgtac

SEQ ID NO: 3134949 - DNA, 25 bp, Homo sapien
tggcatcaggccgttggttcagttc

SEQ ID NO: 3134950 - DNA, 25 bp, Homo sapien
cccaagtgccactctcaggagttca

SEQ ID NO: 3134951 - DNA, 25 bp, Homo sapien
ctaacatcatactttcaagctcctc

SEQ ID NO: 3134952 - DNA, 25 bp, Homo sapien
caagtgccactctcaggagttcaaa

SEQ ID NO: 3134953 - DNA, 25 bp, Homo sapien
cttccttctttaggcataactaaca

SEQ ID NO: 3134954 - DNA, 25 bp, Homo sapien
cagtggtatccttgctatgttgggc

SEQ ID NO: 3134955 - DNA, 25 bp, Homo sapien
ccttgctatgttgggccgtgcagcc

SEQ ID NO: 3134956 - DNA, 25 bp, Homo sapien
ttctcctccagtggtatccttgcta

SEQ ID NO: 3134957 - DNA, 25 bp, Homo sapien
ggtatccttgctatgttgggccgtg

SEQ ID NO: 3134958 - DNA, 25 bp, Homo sapien
tccatggaatggagactcacactgc

SEQ ID NO: 3134959 - DNA, 25 bp, Homo sapien
ttacacttgcccatacagtagggag

SEQ ID NO: 3134960 - DNA, 25 bp, Homo sapien
tgacgaatggtcacttccatggaat

SEQ ID NO: 3134961 - DNA, 25 bp, Homo sapien
tgttggatgccaagcagcctgtaca

SEQ ID NO: 3134962 - DNA, 25 bp, Homo sapien
cgccaaatcttcccaagtttaatag

SEQ ID NO: 3134963 - DNA, 25 bp, Homo sapien
tgtccataaagctgatgattcatca

SEQ ID NO: 3134964 - DNA, 25 bp, Homo sapien
cattctgcaggaataatacattcat

SEQ ID NO: 3134965 - DNA, 25 bp, Homo sapien
tacattcattgtgtcatggccgcca

SEQ ID NO: 3134966 - DNA, 25 bp, Homo sapien
gtgccaatgaacactttaagcatgt

SEQ ID NO: 3134967 - DNA, 25 bp, Homo sapien
gaacactttaagcatgtatctatca

SEQ ID NO: 3134968 - DNA, 25 bp, Homo sapien
catatttatgaatgtgccaatgaac

SEQ ID NO: 3134969 - DNA, 25 bp, Homo sapien
tatttatgaatgtgccaatgaacac

SEQ ID NO: 3134970 - DNA, 25 bp, Homo sapien
cacccgtatacaggtgaggttgagt

SEQ ID NO: 3134971 - DNA, 25 bp, Homo sapien
gaaggctagtgatgtagcaaggacc

SEQ ID NO: 3134972 - DNA, 25 bp, Homo sapien
gatgtagcaaggaccatcttatggt

SEQ ID NO: 3134973 - DNA, 25 bp, Homo sapien
gaccatcttatggttcacccgtata

SEQ ID NO: 3134974 - DNA, 25 bp, Homo sapien
tgagattgattaagaagaggtacac

SEQ ID NO: 3134975 - DNA, 25 bp, Homo sapien
tctttgccaatagccaccattcctt

SEQ ID NO: 3134976 - DNA, 25 bp, Homo sapien
gctgtggtcatacactttctttgcc

SEQ ID NO: 3134977 - DNA, 25 bp, Homo sapien
gtagattactacattgatggcatga

SEQ ID NO: 3134978 - DNA, 25 bp, Homo sapien
tctccacttttgacacagaacccag

SEQ ID NO: 3134979 - DNA, 25 bp, Homo sapien
gagttactctggcacatcaggagaa

SEQ ID NO: 3134980 - DNA, 25 bp, Homo sapien
cttttgacacagaacccagagttac

SEQ ID NO: 3134981 - DNA, 25 bp, Homo sapien
ccagagttactctggcacatcagga

SEQ ID NO: 3134982 - DNA, 25 bp, Homo sapien
ttgatatagccaatcccacaattac

SEQ ID NO: 3134983 - DNA, 25 bp, Homo sapien
gtttattctctttgatatagccaat

SEQ ID NO: 3134984 - DNA, 25 bp, Homo sapien
gatatagccaatcccacaattacag

SEQ ID NO: 3134985 - DNA, 25 bp, Homo sapien
tctctttgatatagccaatcccaca

SEQ ID NO: 3134986 - DNA, 25 bp, Homo sapien
ctctgtttcactcttgttatgggag

SEQ ID NO: 3134987 - DNA, 25 bp, Homo sapien
ttttctctgtttcactcttgttatg

SEQ ID NO: 3134988 - DNA, 25 bp, Homo sapien
tgctggcctccagtcttttctctgt

SEQ ID NO: 3134989 - DNA, 25 bp, Homo sapien
ttctctgtttcactcttgttatggg

SEQ ID NO: 3134990 - DNA, 25 bp, Homo sapien
ccagctgggctgtcacagaactgct

SEQ ID NO: 3134991 - DNA, 25 bp, Homo sapien
gggacacaggtgtttcatcttcagc

SEQ ID NO: 3134992 - DNA, 25 bp, Homo sapien
cgaggcctcagtcctacacagagta

SEQ ID NO: 3134993 - DNA, 25 bp, Homo sapien
tgggaccccgattctgtgacctgct

SEQ ID NO: 3134994 - DNA, 25 bp, Homo sapien
gaatgttccagaaacctgatagctg

SEQ ID NO: 3134995 - DNA, 25 bp, Homo sapien
tccagaaacctgatagctgttttcc

SEQ ID NO: 3134996 - DNA, 25 bp, Homo sapien
caagaatgttccagaaacctgatag

SEQ ID NO: 3134997 - DNA, 25 bp, Homo sapien
atgttccagaaacctgatagctgtt

SEQ ID NO: 3134998 - DNA, 25 bp, Homo sapien
ttctgctttccaggcgactgatatt

SEQ ID NO: 3134999 - DNA, 25 bp, Homo sapien
ctgctttccaggcgactgatattaa

SEQ ID NO: 3135000 - DNA, 25 bp, Homo sapien
tctgctttccaggcgactgatatta

SEQ ID NO: 3135001 - DNA, 25 bp, Homo sapien
ggagcctgttgtctcccaatttctg

SEQ ID NO: 3135002 - DNA, 25 bp, Homo sapien
gacccttctgtacctagggccactg

SEQ ID NO: 3135003 - DNA, 25 bp, Homo sapien
tattccgggagaatctggctagaat

SEQ ID NO: 3135004 - DNA, 25 bp, Homo sapien
tatgagtccggagggtatagttctc

SEQ ID NO: 3135005 - DNA, 25 bp, Homo sapien
tggtttcgaggaaaatctcatggca

SEQ ID NO: 3135006 - DNA, 25 bp, Homo sapien
ttgcagtgtgagaaactgagcccct

SEQ ID NO: 3135007 - DNA, 25 bp, Homo sapien
ccagagattcttacagtatcctcag

SEQ ID NO: 3135008 - DNA, 25 bp, Homo sapien
caagcgataggcacgtggagaatcc

SEQ ID NO: 3135009 - DNA, 25 bp, Homo sapien
tggagaatccacctttggacgaaat

SEQ ID NO: 3135010 - DNA, 25 bp, Homo sapien
caattttggtaaccgaactggtgct

SEQ ID NO: 3135011 - DNA, 25 bp, Homo sapien
catgcctttagatgtgagcttccag

SEQ ID NO: 3135012 - DNA, 25 bp, Homo sapien
cagagagggaactttgcactattgg

SEQ ID NO: 3135013 - DNA, 25 bp, Homo sapien
aacgactccgagaacaacagttggg

SEQ ID NO: 3135014 - DNA, 25 bp, Homo sapien
ttctacctaggatgcatgacaattg

SEQ ID NO: 3135015 - DNA, 25 bp, Homo sapien
tgtaaagtctctcaatgggtaacca

SEQ ID NO: 3135016 - DNA, 25 bp, Homo sapien
actagcatggcctctgacgtgacca

SEQ ID NO: 3135017 - DNA, 25 bp, Homo sapien
tcccttggcagagtatgacgatggt

SEQ ID NO: 3135018 - DNA, 25 bp, Homo sapien
caatggtttacatgaacacagctgc

SEQ ID NO: 3135019 - DNA, 25 bp, Homo sapien
gcagttccatgaagacacgcttaaa

SEQ ID NO: 3135020 - DNA, 25 bp, Homo sapien
acctgaccagaatgcgcaagggcaa

SEQ ID NO: 3135021 - DNA, 25 bp, Homo sapien
accatttcaaatggcagcagttcca

SEQ ID NO: 3135022 - DNA, 25 bp, Homo sapien
gaacaagcacttcggtcatcccagt

SEQ ID NO: 3135023 - DNA, 25 bp, Homo sapien
gacaagaccggtgaactgagggaca

SEQ ID NO: 3135024 - DNA, 25 bp, Homo sapien
ggtcaagatcaaggtctccaggcag

SEQ ID NO: 3135025 - DNA, 25 bp, Homo sapien
tctcaaagaccccaaaggatgcgct

SEQ ID NO: 3135026 - DNA, 25 bp, Homo sapien
gatagtcttctgtgccaagtgtgaa

SEQ ID NO: 3135027 - DNA, 25 bp, Homo sapien
taaaatgtactggaggcaggccact

SEQ ID NO: 3135028 - DNA, 25 bp, Homo sapien
cagttgctgggtcttgtggagctcc

SEQ ID NO: 3135029 - DNA, 25 bp, Homo sapien
tctccaaggccagtttgttacccag

SEQ ID NO: 3135030 - DNA, 25 bp, Homo sapien
tgctgaatgaggctagaaggtaaag

SEQ ID NO: 3135031 - DNA, 25 bp, Homo sapien
tcagcaaaattggtcgcttagtagt

SEQ ID NO: 3135032 - DNA, 25 bp, Homo sapien
tctgggcttgaaatgcagtgcaaca

SEQ ID NO: 3135033 - DNA, 25 bp, Homo sapien
gaagtgatttagagctttggaaagc

SEQ ID NO: 3135034 - DNA, 25 bp, Homo sapien
ctggatagctctgtaaaacggaaag

SEQ ID NO: 3135035 - DNA, 25 bp, Homo sapien
gatagctctgtaaaacggaaagtgt

SEQ ID NO: 3135036 - DNA, 25 bp, Homo sapien
ctctgtaaaacggaaagtgtccttg

SEQ ID NO: 3135037 - DNA, 25 bp, Homo sapien
tagctctgtaaaacggaaagtgtcc

SEQ ID NO: 3135038 - DNA, 25 bp, Homo sapien
cacttgttgccttttatattgtcac

SEQ ID NO: 3135039 - DNA, 25 bp, Homo sapien
ccagaaacacctatagaacatcagt

SEQ ID NO: 3135040 - DNA, 25 bp, Homo sapien
ttatttgccaaaggcgagtcctcca

SEQ ID NO: 3135041 - DNA, 25 bp, Homo sapien
catttgtcactatgcacttgttgcc

SEQ ID NO: 3135042 - DNA, 25 bp, Homo sapien
tcttcagatacgtcagtaattccac

SEQ ID NO: 3135043 - DNA, 25 bp, Homo sapien
gtgactgtatcaaaatcttcagata

SEQ ID NO: 3135044 - DNA, 25 bp, Homo sapien
gggctgggtctggtgactgtatcaa

SEQ ID NO: 3135045 - DNA, 25 bp, Homo sapien
taagataaagtggtgcctattttgc

SEQ ID NO: 3135046 - DNA, 25 bp, Homo sapien
tttgttctccatgtacagtctgctg

SEQ ID NO: 3135047 - DNA, 25 bp, Homo sapien
tgtttatgtgctcccagggatcaga

SEQ ID NO: 3135048 - DNA, 25 bp, Homo sapien
cagtctgctgcgaaagactttcctc

SEQ ID NO: 3135049 - DNA, 25 bp, Homo sapien
caggttgcctaacttcttgtttatg

SEQ ID NO: 3135050 - DNA, 25 bp, Homo sapien
ttaatctttagcacaaggctgactc

SEQ ID NO: 3135051 - DNA, 25 bp, Homo sapien
aaggctgactctgcaatacagcaca

SEQ ID NO: 3135052 - DNA, 25 bp, Homo sapien
acaaggctgactctgcaatacagca

SEQ ID NO: 3135053 - DNA, 25 bp, Homo sapien
ggctgactctgcaatacagcacaca

SEQ ID NO: 3135054 - DNA, 25 bp, Homo sapien
gaggtggtccattgatggttgaagg

SEQ ID NO: 3135055 - DNA, 25 bp, Homo sapien
ggtccattgatggttgaaggatcaa

SEQ ID NO: 3135056 - DNA, 25 bp, Homo sapien
gaaacgctggccagtcacattgcca

SEQ ID NO: 3135057 - DNA, 25 bp, Homo sapien
tgttcaaggatatatttgcttgact

SEQ ID NO: 3135058 - DNA, 25 bp, Homo sapien
caaatctttacagttcaagctatca

SEQ ID NO: 3135059 - DNA, 25 bp, Homo sapien
aaaccaaatctttacagttcaagct

SEQ ID NO: 3135060 - DNA, 25 bp, Homo sapien
tctttacagttcaagctatcattat

SEQ ID NO: 3135061 - DNA, 25 bp, Homo sapien
cagttcaagctatcattattaatgt

SEQ ID NO: 3135062 - DNA, 25 bp, Homo sapien
tgtaagagtctttcggcattgcatc

SEQ ID NO: 3135063 - DNA, 25 bp, Homo sapien
ctggcctaacaaactaagccaataa

SEQ ID NO: 3135064 - DNA, 25 bp, Homo sapien
ctgtaagagtctttcggcattgcat

SEQ ID NO: 3135065 - DNA, 25 bp, Homo sapien
gtaagagtctttcggcattgcatcc

SEQ ID NO: 3135066 - DNA, 25 bp, Homo sapien
cactgtgcccgtatttcctggctgg

SEQ ID NO: 3135067 - DNA, 25 bp, Homo sapien
tgtgtctctgttcaaggaacccgct

SEQ ID NO: 3135068 - DNA, 25 bp, Homo sapien
gaccctctcaatggattcagactta

SEQ ID NO: 3135069 - DNA, 25 bp, Homo sapien
cagagcatgaaagtaagtgtgtctc

SEQ ID NO: 3135070 - DNA, 25 bp, Homo sapien
gagccttttcacctgacctttcatc

SEQ ID NO: 3135071 - DNA, 25 bp, Homo sapien
agtgacatacaagctgattccaggc

SEQ ID NO: 3135072 - DNA, 25 bp, Homo sapien
tgccagtggtgagccttttcacctg

SEQ ID NO: 3135073 - DNA, 25 bp, Homo sapien
cctgagtgactagattaatggtgcc

SEQ ID NO: 3135074 - DNA, 25 bp, Homo sapien
tttccaacttttgcaacatcgtcac

SEQ ID NO: 3135075 - DNA, 25 bp, Homo sapien
tcttagacaagaaccaattcactgg

SEQ ID NO: 3135076 - DNA, 25 bp, Homo sapien
aaattttggttagtgatgaagacag

SEQ ID NO: 3135077 - DNA, 25 bp, Homo sapien
cattagcatgcttagtgtctggcca

SEQ ID NO: 3135078 - DNA, 25 bp, Homo sapien
aacaaccaagctataaattgccact

SEQ ID NO: 3135079 - DNA, 25 bp, Homo sapien
aaccaagctataaattgccacttct

SEQ ID NO: 3135080 - DNA, 25 bp, Homo sapien
caaccaagctataaattgccacttc

SEQ ID NO: 3135081 - DNA, 25 bp, Homo sapien
aaacaaccaagctataaattgccac

SEQ ID NO: 3135082 - DNA, 25 bp, Homo sapien
tgtaatagcctgctttcacataggt

SEQ ID NO: 3135083 - DNA, 25 bp, Homo sapien
ccatgcagaccaaaatgtaatagcc

SEQ ID NO: 3135084 - DNA, 25 bp, Homo sapien
caatccattttggtcgcagtcacac

SEQ ID NO: 3135085 - DNA, 25 bp, Homo sapien
ttcacataggtcatcgtcaatccat

SEQ ID NO: 3135086 - DNA, 25 bp, Homo sapien
ccttgtggaagcgaacacttgtaaa

SEQ ID NO: 3135087 - DNA, 25 bp, Homo sapien
gtccttgtggaagcgaacacttgta

SEQ ID NO: 3135088 - DNA, 25 bp, Homo sapien
acacttgtaaattggttgaagcttg

SEQ ID NO: 3135089 - DNA, 25 bp, Homo sapien
tgtggaagcgaacacttgtaaattg

SEQ ID NO: 3135090 - DNA, 25 bp, Homo sapien
ccctggaccggctggtagcaagatt

SEQ ID NO: 3135091 - DNA, 25 bp, Homo sapien
tgagtaactggacacgcaaacaatg

SEQ ID NO: 3135092 - DNA, 25 bp, Homo sapien
caggtacgattcagaagccacttta

SEQ ID NO: 3135093 - DNA, 25 bp, Homo sapien
tgtaaggaaaacaggatgcgtccct

SEQ ID NO: 3135094 - DNA, 25 bp, Homo sapien
gccaaggccgtctgtgaatgcattt

SEQ ID NO: 3135095 - DNA, 25 bp, Homo sapien
ggataattcatatgccctgtagcca

SEQ ID NO: 3135096 - DNA, 25 bp, Homo sapien
ttcctatctagcgaggcatgcccgg

SEQ ID NO: 3135097 - DNA, 25 bp, Homo sapien
gatgtccatgtggtgcagcgataca

SEQ ID NO: 3135098 - DNA, 25 bp, Homo sapien
ctgtggattggagttgaaaaagctt

SEQ ID NO: 3135099 - DNA, 25 bp, Homo sapien
tcagtaaggggctggttgcctgcat

SEQ ID NO: 3135100 - DNA, 25 bp, Homo sapien
aaaagcttgactggcgtcattcagg

SEQ ID NO: 3135101 - DNA, 25 bp, Homo sapien
tgaaaaagcttgactggcgtcattc

SEQ ID NO: 3135102 - DNA, 25 bp, Homo sapien
caaaaaggcaccctaaggcagttag

SEQ ID NO: 3135103 - DNA, 25 bp, Homo sapien
gagccgggaatcaaagctgatctga

SEQ ID NO: 3135104 - DNA, 25 bp, Homo sapien
aggcagttagggaggaaacgctaca

SEQ ID NO: 3135105 - DNA, 25 bp, Homo sapien
ggaggaaacgctacatgtatgaaaa

SEQ ID NO: 3135106 - DNA, 25 bp, Homo sapien
aattgtaagctctcttgtgtccatg

SEQ ID NO: 3135107 - DNA, 25 bp, Homo sapien
ctgtgcacacagtaaggtttcaata

SEQ ID NO: 3135108 - DNA, 25 bp, Homo sapien
tacatggctgtgcacacagtaaggt

SEQ ID NO: 3135109 - DNA, 25 bp, Homo sapien
cccctaaaattgtaagctctcttgt

SEQ ID NO: 3135110 - DNA, 25 bp, Homo sapien
ccaacatcccatgacgaagcatcgg

SEQ ID NO: 3135111 - DNA, 25 bp, Homo sapien
cgaagcatcggtagtgaattcaaat

SEQ ID NO: 3135112 - DNA, 25 bp, Homo sapien
cccatgacgaagcatcggtagtgaa

SEQ ID NO: 3135113 - DNA, 25 bp, Homo sapien
catcccatgacgaagcatcggtagt

SEQ ID NO: 3135114 - DNA, 25 bp, Homo sapien
ctcatgattagggcatccagcaatg

SEQ ID NO: 3135115 - DNA, 25 bp, Homo sapien
atccagcaatgcacaagcccaacgt

SEQ ID NO: 3135116 - DNA, 25 bp, Homo sapien
caagcccaacgtagggcaccagtca

SEQ ID NO: 3135117 - DNA, 25 bp, Homo sapien
atgattagggcatccagcaatgcac

SEQ ID NO: 3135118 - DNA, 25 bp, Homo sapien
gtaagggcagccaaaccgaatccca

SEQ ID NO: 3135119 - DNA, 25 bp, Homo sapien
taagggcagccaaaccgaatcccat

SEQ ID NO: 3135120 - DNA, 25 bp, Homo sapien
gtgcatttttaacgtaagggcagcc

SEQ ID NO: 3135121 - DNA, 25 bp, Homo sapien
gtagtgcatttttaacgtaagggca

SEQ ID NO: 3135122 - DNA, 25 bp, Homo sapien
tctgctgacctgcatataatgtaag

SEQ ID NO: 3135123 - DNA, 25 bp, Homo sapien
taaggccctcaacacagttccatac

SEQ ID NO: 3135124 - DNA, 25 bp, Homo sapien
tgtctgtccacctattaaatgcctt

SEQ ID NO: 3135125 - DNA, 25 bp, Homo sapien
aatgccttcagtaatactttcctca

SEQ ID NO: 3135126 - DNA, 25 bp, Homo sapien
ctcttccagcacaaactccctttgg

SEQ ID NO: 3135127 - DNA, 25 bp, Homo sapien
tgggggtccgagtttccctgctgtg

SEQ ID NO: 3135128 - DNA, 25 bp, Homo sapien
tcttccagcacaaactccctttggg

SEQ ID NO: 3135129 - DNA, 25 bp, Homo sapien
gtttccctgctgtggttcttggcat

SEQ ID NO: 3135130 - DNA, 25 bp, Homo sapien
cttgggcggatgagtggctggcagc

SEQ ID NO: 3135131 - DNA, 25 bp, Homo sapien
tttacataaccaaagaccgagttgc

SEQ ID NO: 3135132 - DNA, 25 bp, Homo sapien
gcctgtgggcctcatatttacataa

SEQ ID NO: 3135133 - DNA, 25 bp, Homo sapien
gaccgagttgctttgcccacttggg

SEQ ID NO: 3135134 - DNA, 25 bp, Homo sapien
cacggctacttcagttgctgccaca

SEQ ID NO: 3135135 - DNA, 25 bp, Homo sapien
catgctgtctactagcacggctact

SEQ ID NO: 3135136 - DNA, 25 bp, Homo sapien
tggttgcgggaaaaggttggatgcc

SEQ ID NO: 3135137 - DNA, 25 bp, Homo sapien
gaaaaggttggatgccatgctgtct

SEQ ID NO: 3135138 - DNA, 25 bp, Homo sapien
gcatgtgagcagaacctcgagcttg

SEQ ID NO: 3135139 - DNA, 25 bp, Homo sapien
ccacaagcatgtgagcagaacctcg

SEQ ID NO: 3135140 - DNA, 25 bp, Homo sapien
tgtgagcagaacctcgagcttggtt

SEQ ID NO: 3135141 - DNA, 25 bp, Homo sapien
caagcatgtgagcagaacctcgagc

SEQ ID NO: 3135142 - DNA, 25 bp, Homo sapien
catgcgagcattgtgggcagctctt

SEQ ID NO: 3135143 - DNA, 25 bp, Homo sapien
agtagtattttgcaagaaggatcct

SEQ ID NO: 3135144 - DNA, 25 bp, Homo sapien
tcccaggcatgcgagcattgtgggc

SEQ ID NO: 3135145 - DNA, 25 bp, Homo sapien
cagctctttcgggaggtggcaccag

SEQ ID NO: 3135146 - DNA, 25 bp, Homo sapien
ggtacagacgggatcagcagcattt

SEQ ID NO: 3135147 - DNA, 25 bp, Homo sapien
aatttcctggtacagacgggatcag

SEQ ID NO: 3135148 - DNA, 25 bp, Homo sapien
ccaatttcctggtacagacgggatc

SEQ ID NO: 3135149 - DNA, 25 bp, Homo sapien
tcctggtacagacgggatcagcagc

SEQ ID NO: 3135150 - DNA, 25 bp, Homo sapien
aaatagccttgttgagcatctgagc

SEQ ID NO: 3135151 - DNA, 25 bp, Homo sapien
gggcagccacatgatgccatatggc

SEQ ID NO: 3135152 - DNA, 25 bp, Homo sapien
gaccaacctttgttgggcagcagac

SEQ ID NO: 3135153 - DNA, 25 bp, Homo sapien
tagctcttacttctcctaagcgaaa

SEQ ID NO: 3135154 - DNA, 25 bp, Homo sapien
gctttaatcttgctgggcctgacga

SEQ ID NO: 3135155 - DNA, 25 bp, Homo sapien
ggatttgtagcagcgcgaggccatt

SEQ ID NO: 3135156 - DNA, 25 bp, Homo sapien
gaagagatatctcccagactgcaag

SEQ ID NO: 3135157 - DNA, 25 bp, Homo sapien
gcaattgttagatccagcccagcct

SEQ ID NO: 3135158 - DNA, 25 bp, Homo sapien
atctccatggagtgcagtctccaca

SEQ ID NO: 3135159 - DNA, 25 bp, Homo sapien
tcatcatgatcaggtttattacttt

SEQ ID NO: 3135160 - DNA, 25 bp, Homo sapien
aaaggccatcttgtgtattgggcaa

SEQ ID NO: 3135161 - DNA, 25 bp, Homo sapien
ttacttttacttgcatcgaccgatg

SEQ ID NO: 3135162 - DNA, 25 bp, Homo sapien
agcactgagagaggcttcatcatga

SEQ ID NO: 3135163 - DNA, 25 bp, Homo sapien
gagggatggttctccagagagatca

SEQ ID NO: 3135164 - DNA, 25 bp, Homo sapien
gaggagatatccactacacctgtcc

SEQ ID NO: 3135165 - DNA, 25 bp, Homo sapien
ctcagcaatagcactaaagacattg

SEQ ID NO: 3135166 - DNA, 25 bp, Homo sapien
gagatcaggtgcgttgagcagagga

SEQ ID NO: 3135167 - DNA, 25 bp, Homo sapien
tttctactctgtcttcatttgtcat

SEQ ID NO: 3135168 - DNA, 25 bp, Homo sapien
tgctcaggagcctttaacgggttac

SEQ ID NO: 3135169 - DNA, 25 bp, Homo sapien
tcaagtctgctcaggagcctttaac

SEQ ID NO: 3135170 - DNA, 25 bp, Homo sapien
gtctgctcaggagcctttaacgggt

SEQ ID NO: 3135171 - DNA, 25 bp, Homo sapien
aagtctgctcaggagcctttaacgg

SEQ ID NO: 3135172 - DNA, 25 bp, Homo sapien
ttctttcccgtgcaaggaggtccca

SEQ ID NO: 3135173 - DNA, 25 bp, Homo sapien
gatcgtcagatagccgaccgttcaa

SEQ ID NO: 3135174 - DNA, 25 bp, Homo sapien
cagctgaggtctacacgttggagtc

SEQ ID NO: 3135175 - DNA, 25 bp, Homo sapien
gaggtcccaggaaaagatcgtcaga

SEQ ID NO: 3135176 - DNA, 25 bp, Homo sapien
catcaaatcgcaattcacagggtag

SEQ ID NO: 3135177 - DNA, 25 bp, Homo sapien
cacagggtagatgtacaaggactga

SEQ ID NO: 3135178 - DNA, 25 bp, Homo sapien
gaaaatagatatatcccaaccagtg

SEQ ID NO: 3135179 - DNA, 25 bp, Homo sapien
gactttattagttgttcgtatggct

SEQ ID NO: 3135180 - DNA, 25 bp, Homo sapien
tttggaaagataaggggagcccatc

SEQ ID NO: 3135181 - DNA, 25 bp, Homo sapien
gaattctctagtagcagattgctta

SEQ ID NO: 3135182 - DNA, 25 bp, Homo sapien
gcattgaattctctagtagcagatt

SEQ ID NO: 3135183 - DNA, 25 bp, Homo sapien
tagtagcagattgcttaaacctgtg

SEQ ID NO: 3135184 - DNA, 25 bp, Homo sapien
caggtatttcacgaagaaaagtaca

SEQ ID NO: 3135185 - DNA, 25 bp, Homo sapien
taacagcaccctcggtgttcttgta

SEQ ID NO: 3135186 - DNA, 25 bp, Homo sapien
taactcgtaacagcaccctcggtgt

SEQ ID NO: 3135187 - DNA, 25 bp, Homo sapien
caccctcggtgttcttgtagggatt

SEQ ID NO: 3135188 - DNA, 25 bp, Homo sapien
ggcagggttttaactcgtaacagca

SEQ ID NO: 3135189 - DNA, 25 bp, Homo sapien
tgaggagactcttggtgatgggtgg

SEQ ID NO: 3135190 - DNA, 25 bp, Homo sapien
ccagcgtaagcctgtctgagatagg

SEQ ID NO: 3135191 - DNA, 25 bp, Homo sapien
gatgggtggtccgtagtcccctgga

SEQ ID NO: 3135192 - DNA, 25 bp, Homo sapien
cctgtctgagataggatagaatgct

SEQ ID NO: 3135193 - DNA, 25 bp, Homo sapien
tatcactgttaggacatctgctcag

SEQ ID NO: 3135194 - DNA, 25 bp, Homo sapien
tagccgtgggctttggaagacctga

SEQ ID NO: 3135195 - DNA, 25 bp, Homo sapien
catctgctcagtgagagggccagca

SEQ ID NO: 3135196 - DNA, 25 bp, Homo sapien
cctgtgtgcttcttagccgtgggct

SEQ ID NO: 3135197 - DNA, 25 bp, Homo sapien
ttatttcctggtgacattgtgtagc

SEQ ID NO: 3135198 - DNA, 25 bp, Homo sapien
cctggtgacattgtgtagcagcaaa

SEQ ID NO: 3135199 - DNA, 25 bp, Homo sapien
gacattgtgtagcagcaaataccca

SEQ ID NO: 3135200 - DNA, 25 bp, Homo sapien
ttcctggtgacattgtgtagcagca

SEQ ID NO: 3135201 - DNA, 25 bp, Homo sapien
ccacttctaccaactactgtactac

SEQ ID NO: 3135202 - DNA, 25 bp, Homo sapien
actgtatgtgccactttggtttctg

SEQ ID NO: 3135203 - DNA, 25 bp, Homo sapien
ttcccaacagacttgagaccagctg

SEQ ID NO: 3135204 - DNA, 25 bp, Homo sapien
gaggaggaagaattagctgtggctg

SEQ ID NO: 3135205 - DNA, 25 bp, Homo sapien
cagctgtcgatgactgtatgtgcca

SEQ ID NO: 3135206 - DNA, 25 bp, Homo sapien
aataacactaggagtggtttcaggg

SEQ ID NO: 3135207 - DNA, 25 bp, Homo sapien
aggatcccggagaaaatatcaccct

SEQ ID NO: 3135208 - DNA, 25 bp, Homo sapien
cctgaggaataacactaggagtggt

SEQ ID NO: 3135209 - DNA, 25 bp, Homo sapien
ttgaggatcccggagaaaatatcac

SEQ ID NO: 3135210 - DNA, 25 bp, Homo sapien
taaattgtgtaagacaagacctcac

SEQ ID NO: 3135211 - DNA, 25 bp, Homo sapien
taatggtgggccagtaaatgcactg

SEQ ID NO: 3135212 - DNA, 25 bp, Homo sapien
aatgcactgttgtctgtttcgtgaa

SEQ ID NO: 3135213 - DNA, 25 bp, Homo sapien
tgtggctcttagcttgtaaacctct

SEQ ID NO: 3135214 - DNA, 25 bp, Homo sapien
gccattttgagatgcacccagtgct

SEQ ID NO: 3135215 - DNA, 25 bp, Homo sapien
ttgccaattaactgggtgccctgtg

SEQ ID NO: 3135216 - DNA, 25 bp, Homo sapien
tgtgctctggtggaactctctgtca

SEQ ID NO: 3135217 - DNA, 25 bp, Homo sapien
gagcagttcaatatgcctaagccca

SEQ ID NO: 3135218 - DNA, 25 bp, Homo sapien
gcatggacgattgtatagcttccct

SEQ ID NO: 3135219 - DNA, 25 bp, Homo sapien
tctggatggtgtcttaggcttcact

SEQ ID NO: 3135220 - DNA, 25 bp, Homo sapien
ccctgtgtaggttcatgaataggat

SEQ ID NO: 3135221 - DNA, 25 bp, Homo sapien
cctgagataggcctggtttacttgc

SEQ ID NO: 3135222 - DNA, 25 bp, Homo sapien
gagattgaagtaatatagcatagat

SEQ ID NO: 3135223 - DNA, 25 bp, Homo sapien
attgaagtaatatagcatagatagc

SEQ ID NO: 3135224 - DNA, 25 bp, Homo sapien
agattgaagtaatatagcatagata

SEQ ID NO: 3135225 - DNA, 25 bp, Homo sapien
gattgaagtaatatagcatagatag

SEQ ID NO: 3135226 - DNA, 25 bp, Homo sapien
gggttcttatacataaatgcttagc

SEQ ID NO: 3135227 - DNA, 25 bp, Homo sapien
catgaaatgggttcttatacataaa

SEQ ID NO: 3135228 - DNA, 25 bp, Homo sapien
gcttagcacttttcttgtcatgtat

SEQ ID NO: 3135229 - DNA, 25 bp, Homo sapien
tagttgttcgataaacatcttttct

SEQ ID NO: 3135230 - DNA, 25 bp, Homo sapien
tgaagtttatatagatggcaaggta

SEQ ID NO: 3135231 - DNA, 25 bp, Homo sapien
ttgtggccctcccaaactcgatgga

SEQ ID NO: 3135232 - DNA, 25 bp, Homo sapien
gatggaactcaagatctgggcagct

SEQ ID NO: 3135233 - DNA, 25 bp, Homo sapien
gcagctggctgaaccaagagaaggt

SEQ ID NO: 3135234 - DNA, 25 bp, Homo sapien
ggtaggcaggctccaatgcagggac

SEQ ID NO: 3135235 - DNA, 25 bp, Homo sapien
aggtaggcaggctccaatgcaggga

SEQ ID NO: 3135236 - DNA, 25 bp, Homo sapien
gaaggcattgccgaacggagaacaa

SEQ ID NO: 3135237 - DNA, 25 bp, Homo sapien
cactgaaggcattgccgaacggaga

SEQ ID NO: 3135238 - DNA, 25 bp, Homo sapien
attgccgaacggagaacaagctggg

SEQ ID NO: 3135239 - DNA, 25 bp, Homo sapien
cacactgaaggcattgccgaacgga

SEQ ID NO: 3135240 - DNA, 25 bp, Homo sapien
tcagggcacagcgacagtcgtcctc

SEQ ID NO: 3135241 - DNA, 25 bp, Homo sapien
catgagtgttagaggacacctgtga

SEQ ID NO: 3135242 - DNA, 25 bp, Homo sapien
gaggtgttcggtggaaagcttccac

SEQ ID NO: 3135243 - DNA, 25 bp, Homo sapien
tctgccagtcatgagtgttagagga

SEQ ID NO: 3135244 - DNA, 25 bp, Homo sapien
gacctttagtgattccagatctgcg

SEQ ID NO: 3135245 - DNA, 25 bp, Homo sapien
tctgagccagatcttcatgttgtcc

SEQ ID NO: 3135246 - DNA, 25 bp, Homo sapien
gagcatacgcggaatgataccaaac

SEQ ID NO: 3135247 - DNA, 25 bp, Homo sapien
tccttggccacgtgcgatgcttgca

SEQ ID NO: 3135248 - DNA, 25 bp, Homo sapien
tagctaaacctgtgcctccgaagct

SEQ ID NO: 3135249 - DNA, 25 bp, Homo sapien
ctctagctaaacctgtgcctccgaa

SEQ ID NO: 3135250 - DNA, 25 bp, Homo sapien
tctagctaaacctgtgcctccgaag

SEQ ID NO: 3135251 - DNA, 25 bp, Homo sapien
ctaaacctgtgcctccgaagctcac

SEQ ID NO: 3135252 - DNA, 25 bp, Homo sapien
tcagtcatagaaggtggtattagtg

SEQ ID NO: 3135253 - DNA, 25 bp, Homo sapien
gaaggtggtattagtggatccatca

SEQ ID NO: 3135254 - DNA, 25 bp, Homo sapien
ggtattagtggatccatcaccagca

SEQ ID NO: 3135255 - DNA, 25 bp, Homo sapien
ttagtggatccatcaccagcacaat

SEQ ID NO: 3135256 - DNA, 25 bp, Homo sapien
gtactcctgtatcccacattcatgg

SEQ ID NO: 3135257 - DNA, 25 bp, Homo sapien
tagccaatataagaaatcaattctc

SEQ ID NO: 3135258 - DNA, 25 bp, Homo sapien
gccttttatgttcagcctcctgtac

SEQ ID NO: 3135259 - DNA, 25 bp, Homo sapien
attcatggctgattgttctgatggg

SEQ ID NO: 3135260 - DNA, 25 bp, Homo sapien
tgtgctatctgcaagcacgtccttt

SEQ ID NO: 3135261 - DNA, 25 bp, Homo sapien
gtagtgtccacgtctttgcaaacca

SEQ ID NO: 3135262 - DNA, 25 bp, Homo sapien
gaaaaaagtcatgggtagtgtccac

SEQ ID NO: 3135263 - DNA, 25 bp, Homo sapien
tctgcaagcacgtccttttgaaaaa

SEQ ID NO: 3135264 - DNA, 25 bp, Homo sapien
ctcaactcttttggctccaagtcta

SEQ ID NO: 3135265 - DNA, 25 bp, Homo sapien
tctcaactcttttggctccaagtct

SEQ ID NO: 3135266 - DNA, 25 bp, Homo sapien
ctccaagtctaggtaatatgcgtac

SEQ ID NO: 3135267 - DNA, 25 bp, Homo sapien
ggctccaagtctaggtaatatgcgt

SEQ ID NO: 3135268 - DNA, 25 bp, Homo sapien
aatggatgagacctccccaaggctg

SEQ ID NO: 3135269 - DNA, 25 bp, Homo sapien
tttctccatgacagtctgcccctgg

SEQ ID NO: 3135270 - DNA, 25 bp, Homo sapien
gagtaacagccgctggcgaatccag

SEQ ID NO: 3135271 - DNA, 25 bp, Homo sapien
catgtgtcccaaatttgttccccgg

SEQ ID NO: 3135272 - DNA, 25 bp, Homo sapien
gagctggggcctcttctccgaaaac

SEQ ID NO: 3135273 - DNA, 25 bp, Homo sapien
atgcactggaacttcgtgagctggg

SEQ ID NO: 3135274 - DNA, 25 bp, Homo sapien
ccaaagtgagtaatgcactggaact

SEQ ID NO: 3135275 - DNA, 25 bp, Homo sapien
gtgagtaatgcactggaacttcgtg

SEQ ID NO: 3135276 - DNA, 25 bp, Homo sapien
tccaaggtccaaaagttcactagta

SEQ ID NO: 3135277 - DNA, 25 bp, Homo sapien
tccagtattttaaatcttcctcttc

SEQ ID NO: 3135278 - DNA, 25 bp, Homo sapien
atctttttctctcaacacatccttt

SEQ ID NO: 3135279 - DNA, 25 bp, Homo sapien
ttctctcaacacatccttttttttc

SEQ ID NO: 3135280 - DNA, 25 bp, Homo sapien
tactgctgttaaatagtagtaataa

SEQ ID NO: 3135281 - DNA, 25 bp, Homo sapien
tatgtagtaccttgacaccacggag

SEQ ID NO: 3135282 - DNA, 25 bp, Homo sapien
agtgcaatttacaatcttggaaaat

SEQ ID NO: 3135283 - DNA, 25 bp, Homo sapien
gagttattgcggctgttactactgc

SEQ ID NO: 3135284 - DNA, 25 bp, Homo sapien
catagctgccagtgacacatctagc

SEQ ID NO: 3135285 - DNA, 25 bp, Homo sapien
ttaaacacagtagccctttctgcag

SEQ ID NO: 3135286 - DNA, 25 bp, Homo sapien
tctcttaggagttgtttttgacagc

SEQ ID NO: 3135287 - DNA, 25 bp, Homo sapien
gctttctcattgaaagaaatttccg

SEQ ID NO: 3135288 - DNA, 25 bp, Homo sapien
ttgggctatagcagttaaaaccctg

SEQ ID NO: 3135289 - DNA, 25 bp, Homo sapien
tgggctatagcagttaaaaccctgt

SEQ ID NO: 3135290 - DNA, 25 bp, Homo sapien
tgcttttcgttttaatgtgttattg

SEQ ID NO: 3135291 - DNA, 25 bp, Homo sapien
agaggaagaccaaagggaggctgag

SEQ ID NO: 3135292 - DNA, 25 bp, Homo sapien
tctgatcttatcagagaggaagacc

SEQ ID NO: 3135293 - DNA, 25 bp, Homo sapien
agagaggaagaccaaagggaggctg

SEQ ID NO: 3135294 - DNA, 25 bp, Homo sapien
gaagaccaaagggaggctgagctgg

SEQ ID NO: 3135295 - DNA, 25 bp, Homo sapien
gatcttcctttagacaacgtttcat

SEQ ID NO: 3135296 - DNA, 25 bp, Homo sapien
tagatcttcctttagacaacgtttc

SEQ ID NO: 3135297 - DNA, 25 bp, Homo sapien
agatcttcctttagacaacgtttca

SEQ ID NO: 3135298 - DNA, 25 bp, Homo sapien
ctttagatcttcctttagacaacgt

SEQ ID NO: 3135299 - DNA, 25 bp, Homo sapien
aaatccctctccaatgactgcctga

SEQ ID NO: 3135300 - DNA, 25 bp, Homo sapien
ctggctgatgcactagaaacacctt

SEQ ID NO: 3135301 - DNA, 25 bp, Homo sapien
gcgtttgataggtcattctggctga

SEQ ID NO: 3135302 - DNA, 25 bp, Homo sapien
cccactttatgttgaggcaatgcaa

SEQ ID NO: 3135303 - DNA, 25 bp, Homo sapien
tcccagtcacttcgagtcttgaatc

SEQ ID NO: 3135304 - DNA, 25 bp, Homo sapien
tgtttatccagctcatcccttttct

SEQ ID NO: 3135305 - DNA, 25 bp, Homo sapien
gagtcagcatcagtgacgcgctctt

SEQ ID NO: 3135306 - DNA, 25 bp, Homo sapien
tgtgaagacctgatctgctcgttga

SEQ ID NO: 3135307 - DNA, 25 bp, Homo sapien
aaaagagcctcacaaataggtctgc

SEQ ID NO: 3135308 - DNA, 25 bp, Homo sapien
agcagaaaagagcctcacaaatagg

SEQ ID NO: 3135309 - DNA, 25 bp, Homo sapien
cagaaaagagcctcacaaataggtc

SEQ ID NO: 3135310 - DNA, 25 bp, Homo sapien
gaaaagagcctcacaaataggtctg

SEQ ID NO: 3135311 - DNA, 25 bp, Homo sapien
tggttttgagctctcaggtgttgga

SEQ ID NO: 3135312 - DNA, 25 bp, Homo sapien
agctctcaggtgttggaactttaaa

SEQ ID NO: 3135313 - DNA, 25 bp, Homo sapien
tattcattggttttgagctctcagg

SEQ ID NO: 3135314 - DNA, 25 bp, Homo sapien
ttaaatctgcattcagatggaggca

SEQ ID NO: 3135315 - DNA, 25 bp, Homo sapien
gatctaattgctgattcaatggcat

SEQ ID NO: 3135316 - DNA, 25 bp, Homo sapien
tatggagatctaattgctgattcaa

SEQ ID NO: 3135317 - DNA, 25 bp, Homo sapien
tgggagatgcattgaaaactctcat

SEQ ID NO: 3135318 - DNA, 25 bp, Homo sapien
tcatgacatctggaatatggagatc

SEQ ID NO: 3135319 - DNA, 25 bp, Homo sapien
ctcctgtggtgtttaaacgcattcc

SEQ ID NO: 3135320 - DNA, 25 bp, Homo sapien
tcctgtggtgtttaaacgcattccg

SEQ ID NO: 3135321 - DNA, 25 bp, Homo sapien
cctgtggtgtttaaacgcattccgg

SEQ ID NO: 3135322 - DNA, 25 bp, Homo sapien
ctgtggtgtttaaacgcattccggt

SEQ ID NO: 3135323 - DNA, 25 bp, Homo sapien
ctcttgtttgattgtttggatagca

SEQ ID NO: 3135324 - DNA, 25 bp, Homo sapien
tgtacgcaatgatctgccactgacc

SEQ ID NO: 3135325 - DNA, 25 bp, Homo sapien
tttgaaaaagctgtttgcttgtacg

SEQ ID NO: 3135326 - DNA, 25 bp, Homo sapien
aaacgggttagctcttgtttgattg

SEQ ID NO: 3135327 - DNA, 25 bp, Homo sapien
gggctcgcatgacaatccataaatc

SEQ ID NO: 3135328 - DNA, 25 bp, Homo sapien
caaggagctcttcaggggctcgcat

SEQ ID NO: 3135329 - DNA, 25 bp, Homo sapien
gctcttcaggggctcgcatgacaat

SEQ ID NO: 3135330 - DNA, 25 bp, Homo sapien
ttcaggggctcgcatgacaatccat

SEQ ID NO: 3135331 - DNA, 25 bp, Homo sapien
cagcttctaatttcactgcaattgg

SEQ ID NO: 3135332 - DNA, 25 bp, Homo sapien
gactgtgtccaattgtccctttggt

SEQ ID NO: 3135333 - DNA, 25 bp, Homo sapien
tgttgaccttaacttatatgttgag

SEQ ID NO: 3135334 - DNA, 25 bp, Homo sapien
tataccctggtgtatctaaggcagc

SEQ ID NO: 3135335 - DNA, 25 bp, Homo sapien
cacaggatgctaacatgcacagtca

SEQ ID NO: 3135336 - DNA, 25 bp, Homo sapien
catgcacagtcaagaatccttgggt

SEQ ID NO: 3135337 - DNA, 25 bp, Homo sapien
ctcatacaagggcacgcacaggatg

SEQ ID NO: 3135338 - DNA, 25 bp, Homo sapien
gatcttcatgttgagattctgcgga

SEQ ID NO: 3135339 - DNA, 25 bp, Homo sapien
ctgatgcttgtgctcaaatgcttat

SEQ ID NO: 3135340 - DNA, 25 bp, Homo sapien
cgtgcagtctgcctgatgcttgtgc

SEQ ID NO: 3135341 - DNA, 25 bp, Homo sapien
atatgtgcgaaggaagtaagtgtac

SEQ ID NO: 3135342 - DNA, 25 bp, Homo sapien
ttcccttgtgagtcactgagcgtgc

SEQ ID NO: 3135343 - DNA, 25 bp, Homo sapien
ttggaaggggggaagcatgcaccat

SEQ ID NO: 3135344 - DNA, 25 bp, Homo sapien
ctgtggcattggaaggggggaagca

SEQ ID NO: 3135345 - DNA, 25 bp, Homo sapien
cattggaaggggggaagcatgcacc

SEQ ID NO: 3135346 - DNA, 25 bp, Homo sapien
ggcattggaaggggggaagcatgca

SEQ ID NO: 3135347 - DNA, 25 bp, Homo sapien
tgcctccaagcaagcaagatatgct

SEQ ID NO: 3135348 - DNA, 25 bp, Homo sapien
ggtcacatctttagatcctgaaggg

SEQ ID NO: 3135349 - DNA, 25 bp, Homo sapien
tccagagtccaaatgcagcaacaga

SEQ ID NO: 3135350 - DNA, 25 bp, Homo sapien
tcgatggtcatttcgagatgacagc

SEQ ID NO: 3135351 - DNA, 25 bp, Homo sapien
agcccttgttgatcaacccgacctt

SEQ ID NO: 3135352 - DNA, 25 bp, Homo sapien
tgagcccttgttgatcaacccgacc

SEQ ID NO: 3135353 - DNA, 25 bp, Homo sapien
tgatcaacccgaccttccggttcga

SEQ ID NO: 3135354 - DNA, 25 bp, Homo sapien
cttgttgatcaacccgaccttccgg

SEQ ID NO: 3135355 - DNA, 25 bp, Homo sapien
cagttggccaagaccgggtataggg

SEQ ID NO: 3135356 - DNA, 25 bp, Homo sapien
tggccaagaccgggtatagggatgg

SEQ ID NO: 3135357 - DNA, 25 bp, Homo sapien
tcagttggccaagaccgggtatagg

SEQ ID NO: 3135358 - DNA, 25 bp, Homo sapien
tgggcagacctgtccagggtgatag

SEQ ID NO: 3135359 - DNA, 25 bp, Homo sapien
ataacagtggttgtcaatttcaagt

SEQ ID NO: 3135360 - DNA, 25 bp, Homo sapien
catgttttgagcatgtgcttgtgca

SEQ ID NO: 3135361 - DNA, 25 bp, Homo sapien
ggatgtcatgtccagatcctgtggg

SEQ ID NO: 3135362 - DNA, 25 bp, Homo sapien
aatctctgaatgttagaagacgcca

SEQ ID NO: 3135363 - DNA, 25 bp, Homo sapien
tggggaatttgaagagagcaaagct

SEQ ID NO: 3135364 - DNA, 25 bp, Homo sapien
tggtttttacatctgcgtctcgctt

SEQ ID NO: 3135365 - DNA, 25 bp, Homo sapien
tgtgtttcggagtgattgtatacat

SEQ ID NO: 3135366 - DNA, 25 bp, Homo sapien
cctgcctttataatgctggttttta

SEQ ID NO: 3135367 - DNA, 25 bp, Homo sapien
ctcgctttgtgtttcggagtgattg

SEQ ID NO: 3135368 - DNA, 25 bp, Homo sapien
gataaaattgtcctttccatcagag

SEQ ID NO: 3135369 - DNA, 25 bp, Homo sapien
ggcccagggttagaacccttgcaca

SEQ ID NO: 3135370 - DNA, 25 bp, Homo sapien
gaacccttgcacatttagatgtcag

SEQ ID NO: 3135371 - DNA, 25 bp, Homo sapien
gttgctaaagtaagtgaccgataaa

SEQ ID NO: 3135372 - DNA, 25 bp, Homo sapien
ggattcgcagaagggtcctctttgc

SEQ ID NO: 3135373 - DNA, 25 bp, Homo sapien
gattcgcagaagggtcctctttgca

SEQ ID NO: 3135374 - DNA, 25 bp, Homo sapien
attcgcagaagggtcctctttgcat

SEQ ID NO: 3135375 - DNA, 25 bp, Homo sapien
tggattcgcagaagggtcctctttg

SEQ ID NO: 3135376 - DNA, 25 bp, Homo sapien
ttgcagttgcatgatactcattgta

SEQ ID NO: 3135377 - DNA, 25 bp, Homo sapien
aggtacattaagcttttccgcaaat

SEQ ID NO: 3135378 - DNA, 25 bp, Homo sapien
aggaagagtaatgtttggcaatttt

SEQ ID NO: 3135379 - DNA, 25 bp, Homo sapien
aagcttttccgcaaatagatgctca

SEQ ID NO: 3135380 - DNA, 25 bp, Homo sapien
gggctgcagctgtttatcgtagtcc

SEQ ID NO: 3135381 - DNA, 25 bp, Homo sapien
gcagctgtttatcgtagtccaccag

SEQ ID NO: 3135382 - DNA, 25 bp, Homo sapien
tgcagctgtttatcgtagtccacca

SEQ ID NO: 3135383 - DNA, 25 bp, Homo sapien
gctgcagctgtttatcgtagtccac

SEQ ID NO: 3135384 - DNA, 25 bp, Homo sapien
tcatgccttgttaatgtcactggtt

SEQ ID NO: 3135385 - DNA, 25 bp, Homo sapien
tgtccacggtctgcacaaatagagg

SEQ ID NO: 3135386 - DNA, 25 bp, Homo sapien
gcagctgtgtagtccttttatctcg

SEQ ID NO: 3135387 - DNA, 25 bp, Homo sapien
tgttgagaactgttgagcactgcct

SEQ ID NO: 3135388 - DNA, 25 bp, Homo sapien
taggatcggcttttggtggatgtcc

SEQ ID NO: 3135389 - DNA, 25 bp, Homo sapien
taaagatgtaggatcggcttttggt

SEQ ID NO: 3135390 - DNA, 25 bp, Homo sapien
gctaaagatgtaggatcggcttttg

SEQ ID NO: 3135391 - DNA, 25 bp, Homo sapien
tcggcttttggtggatgtccaagtg

SEQ ID NO: 3135392 - DNA, 25 bp, Homo sapien
ccaaataattgccaagcctttggat

SEQ ID NO: 3135393 - DNA, 25 bp, Homo sapien
attgccaagcctttggatacagagc

SEQ ID NO: 3135394 - DNA, 25 bp, Homo sapien
tccaaaatgctagatctctttagct

SEQ ID NO: 3135395 - DNA, 25 bp, Homo sapien
aaatgctagatctctttagctgatg

SEQ ID NO: 3135396 - DNA, 25 bp, Homo sapien
gacctgccctctctaaaggtcactg

SEQ ID NO: 3135397 - DNA, 25 bp, Homo sapien
cctctctaaaggtcactggcactgt

SEQ ID NO: 3135398 - DNA, 25 bp, Homo sapien
tcactggcactgtggactctttaaa

SEQ ID NO: 3135399 - DNA, 25 bp, Homo sapien
tctcttccccatggatttggtgacc

SEQ ID NO: 3135400 - DNA, 25 bp, Homo sapien
ctgtgtggaccacaggttggatttt

SEQ ID NO: 3135401 - DNA, 25 bp, Homo sapien
cctgtgtggaccacaggttggattt

SEQ ID NO: 3135402 - DNA, 25 bp, Homo sapien
ccctgtgtggaccacaggttggatt

SEQ ID NO: 3135403 - DNA, 25 bp, Homo sapien
aatggggttcatcattgcctcgccc

SEQ ID NO: 3135404 - DNA, 25 bp, Homo sapien
atggggttcatcattgcctcgccct

SEQ ID NO: 3135405 - DNA, 25 bp, Homo sapien
caatggggttcatcattgcctcgcc

SEQ ID NO: 3135406 - DNA, 25 bp, Homo sapien
tggcggtgaccactctcagtctggt

SEQ ID NO: 3135407 - DNA, 25 bp, Homo sapien
tcagtctggtctaaaaggaagtttc

SEQ ID NO: 3135408 - DNA, 25 bp, Homo sapien
aggaagtttctactcatcgaaaaag

SEQ ID NO: 3135409 - DNA, 25 bp, Homo sapien
ctcttgatcatactggcggtgacca

SEQ ID NO: 3135410 - DNA, 25 bp, Homo sapien
cacaaacaacaagcgcaaatcctgc

SEQ ID NO: 3135411 - DNA, 25 bp, Homo sapien
tcgctacagcgctcagtgaactgct

SEQ ID NO: 3135412 - DNA, 25 bp, Homo sapien
ctgcttcgctttatgttgagtctca

SEQ ID NO: 3135413 - DNA, 25 bp, Homo sapien
ccagattgggaggaaattgtgcttt

SEQ ID NO: 3135414 - DNA, 25 bp, Homo sapien
gaattaaggattagcgttccagtgc

SEQ ID NO: 3135415 - DNA, 25 bp, Homo sapien
atggccttcgacacaccacagacag

SEQ ID NO: 3135416 - DNA, 25 bp, Homo sapien
taaggattagcgttccagtgctccc

SEQ ID NO: 3135417 - DNA, 25 bp, Homo sapien
gagaaatggccttcgacacaccaca

SEQ ID NO: 3135418 - DNA, 25 bp, Homo sapien
cagaatcaaggacattggggcatga

SEQ ID NO: 3135419 - DNA, 25 bp, Homo sapien
gaatcaaggacattggggcatgaat

SEQ ID NO: 3135420 - DNA, 25 bp, Homo sapien
agaatcaaggacattggggcatgaa

SEQ ID NO: 3135421 - DNA, 25 bp, Homo sapien
tactgggagaggattgaccttatga

SEQ ID NO: 3135422 - DNA, 25 bp, Homo sapien
cttgtacttggtgattgtactggga

SEQ ID NO: 3135423 - DNA, 25 bp, Homo sapien
gaggattgaccttatgaatgtgcat

SEQ ID NO: 3135424 - DNA, 25 bp, Homo sapien
tgattgtactgggagaggattgacc

SEQ ID NO: 3135425 - DNA, 25 bp, Homo sapien
ttctgccaccactacttcagaagca

SEQ ID NO: 3135426 - DNA, 25 bp, Homo sapien
ctttctgccaccactacttcagaag

SEQ ID NO: 3135427 - DNA, 25 bp, Homo sapien
tctgccaccactacttcagaagcag

SEQ ID NO: 3135428 - DNA, 25 bp, Homo sapien
tttctgccaccactacttcagaagc

SEQ ID NO: 3135429 - DNA, 25 bp, Homo sapien
gcttatgtctgtatggcctccggta

SEQ ID NO: 3135430 - DNA, 25 bp, Homo sapien
ccagaagcgtccatgtttggaggag

SEQ ID NO: 3135431 - DNA, 25 bp, Homo sapien
gaggtaccccacactgatcatcaaa

SEQ ID NO: 3135432 - DNA, 25 bp, Homo sapien
catttatgactagtaccagaagcgt

SEQ ID NO: 3135433 - DNA, 25 bp, Homo sapien
tgccgaactgcctggtaatttcatt

SEQ ID NO: 3135434 - DNA, 25 bp, Homo sapien
tcatggtgacctgaaaggttatgta

SEQ ID NO: 3135435 - DNA, 25 bp, Homo sapien
cagaaaagtagacagtgtataccat

SEQ ID NO: 3135436 - DNA, 25 bp, Homo sapien
tttcaaaaacgtgtttcatggtgac

SEQ ID NO: 3135437 - DNA, 25 bp, Homo sapien
gttgcaaatacttgtaatagaggac

SEQ ID NO: 3135438 - DNA, 25 bp, Homo sapien
gtctccattattcctctagagtgtg

SEQ ID NO: 3135439 - DNA, 25 bp, Homo sapien
ccattattcctctagagtgtgatgt

SEQ ID NO: 3135440 - DNA, 25 bp, Homo sapien
tgttgcaaatacttgtaatagagga

SEQ ID NO: 3135441 - DNA, 25 bp, Homo sapien
caattctcatgtggtggctgggaaa

SEQ ID NO: 3135442 - DNA, 25 bp, Homo sapien
tccaagggcatcagacaattctcat

SEQ ID NO: 3135443 - DNA, 25 bp, Homo sapien
agaggcttattgttaattacagaga

SEQ ID NO: 3135444 - DNA, 25 bp, Homo sapien
tattccctcataaaggacttgtgta

SEQ ID NO: 3135445 - DNA, 25 bp, Homo sapien
tctcttttggctaactccttgcctt

SEQ ID NO: 3135446 - DNA, 25 bp, Homo sapien
ttctcttttggctaactccttgcct

SEQ ID NO: 3135447 - DNA, 25 bp, Homo sapien
gcctttccctgtgattgaagcagtg

SEQ ID NO: 3135448 - DNA, 25 bp, Homo sapien
tttccctgtgattgaagcagtggag

SEQ ID NO: 3135449 - DNA, 25 bp, Homo sapien
tgcagtttctccactgtgggtcccc

SEQ ID NO: 3135450 - DNA, 25 bp, Homo sapien
cccccaccctctaacactttctgct

SEQ ID NO: 3135451 - DNA, 25 bp, Homo sapien
ctctaacactttctgctctcctttt

SEQ ID NO: 3135452 - DNA, 25 bp, Homo sapien
tgaaaaacttgcagtttctccactg

SEQ ID NO: 3135453 - DNA, 25 bp, Homo sapien
tagactaaaagcagatgcctcacag

SEQ ID NO: 3135454 - DNA, 25 bp, Homo sapien
catcttaaggtactgcaccaggtcc

SEQ ID NO: 3135455 - DNA, 25 bp, Homo sapien
cttggtactggcgaagacctctaga

SEQ ID NO: 3135456 - DNA, 25 bp, Homo sapien
tttccatgcacatcttaaggtactg

SEQ ID NO: 3135457 - DNA, 25 bp, Homo sapien
aggggattttcgaacatataagtag

SEQ ID NO: 3135458 - DNA, 25 bp, Homo sapien
tcattgggctgaagagaatttaaac

SEQ ID NO: 3135459 - DNA, 25 bp, Homo sapien
tctgcgaatgcgaggcatgaaatta

SEQ ID NO: 3135460 - DNA, 25 bp, Homo sapien
gctctgaacctttttgtctgcgaat

SEQ ID NO: 3135461 - DNA, 25 bp, Homo sapien
tcatttcatagttagcagaaatcat

SEQ ID NO: 3135462 - DNA, 25 bp, Homo sapien
tcttggatcctgtccagtcccatta

SEQ ID NO: 3135463 - DNA, 25 bp, Homo sapien
tggatcctgtccagtcccattagcg

SEQ ID NO: 3135464 - DNA, 25 bp, Homo sapien
agctcttggatcctgtccagtccca

SEQ ID NO: 3135465 - DNA, 25 bp, Homo sapien
gctcttggatcctgtccagtcccat

SEQ ID NO: 3135466 - DNA, 25 bp, Homo sapien
cagggccactttcacttctgcggaa

SEQ ID NO: 3135467 - DNA, 25 bp, Homo sapien
tgggaaggcaggtgaagtccactcc

SEQ ID NO: 3135468 - DNA, 25 bp, Homo sapien
ttctgcggaacctccagaatgagca

SEQ ID NO: 3135469 - DNA, 25 bp, Homo sapien
cacaggacccggtgtggaatgcaaa

SEQ ID NO: 3135470 - DNA, 25 bp, Homo sapien
ctgttcttgatttgcagtctgtagc

SEQ ID NO: 3135471 - DNA, 25 bp, Homo sapien
tcaaaaataactccggcatctctcg

SEQ ID NO: 3135472 - DNA, 25 bp, Homo sapien
cagagcccttgtacaaagccttttt

SEQ ID NO: 3135473 - DNA, 25 bp, Homo sapien
aaatcccattaacgccagagccctt

SEQ ID NO: 3135474 - DNA, 25 bp, Homo sapien
gcagtctggtctgttcccctgaata

SEQ ID NO: 3135475 - DNA, 25 bp, Homo sapien
gctttcccttacagaggacagtgat

SEQ ID NO: 3135476 - DNA, 25 bp, Homo sapien
gcttattgcaccagtggaaatgtgg

SEQ ID NO: 3135477 - DNA, 25 bp, Homo sapien
gttcatggtggtttcagacagttcc

SEQ ID NO: 3135478 - DNA, 25 bp, Homo sapien
tgctctcgatttccaaagaatggga

SEQ ID NO: 3135479 - DNA, 25 bp, Homo sapien
ctttaaacgatgcaagagatgccat

SEQ ID NO: 3135480 - DNA, 25 bp, Homo sapien
gagaagctgctctcgatttccaaag

SEQ ID NO: 3135481 - DNA, 25 bp, Homo sapien
tccaatgaatgttcgattaagaacc

SEQ ID NO: 3135482 - DNA, 25 bp, Homo sapien
tacatcctggaacaccttaggagcc

SEQ ID NO: 3135483 - DNA, 25 bp, Homo sapien
tgtactcagaagagctacatggagc

SEQ ID NO: 3135484 - DNA, 25 bp, Homo sapien
aatttgagggcggtctgtactcaga

SEQ ID NO: 3135485 - DNA, 25 bp, Homo sapien
catggagctgaggtgcctgacgctt

SEQ ID NO: 3135486 - DNA, 25 bp, Homo sapien
aaggtctacatgtgtatgtttccac

SEQ ID NO: 3135487 - DNA, 25 bp, Homo sapien
ctaaggtctacatgtgtatgtttcc

SEQ ID NO: 3135488 - DNA, 25 bp, Homo sapien
taaggtctacatgtgtatgtttcca

SEQ ID NO: 3135489 - DNA, 25 bp, Homo sapien
ggtctacatgtgtatgtttccacaa

SEQ ID NO: 3135490 - DNA, 25 bp, Homo sapien
cttggagccacgagaagaaagggaa

SEQ ID NO: 3135491 - DNA, 25 bp, Homo sapien
ctttgcttggagccacgagaagaaa

SEQ ID NO: 3135492 - DNA, 25 bp, Homo sapien
gaaggagttggggtgaaggtctctg

SEQ ID NO: 3135493 - DNA, 25 bp, Homo sapien
ttgcttggagccacgagaagaaagg

SEQ ID NO: 3135494 - DNA, 25 bp, Homo sapien
tgagggtgccgcgtgtgtcagtgga

SEQ ID NO: 3135495 - DNA, 25 bp, Homo sapien
gtgccgcgtgtgtcagtggagcttt

SEQ ID NO: 3135496 - DNA, 25 bp, Homo sapien
agtgcctgagggtgccgcgtgtgtc

SEQ ID NO: 3135497 - DNA, 25 bp, Homo sapien
tcacccttgcagggggactgcggag

SEQ ID NO: 3135498 - DNA, 25 bp, Homo sapien
gaccttctgcttaaacctgtagcca

SEQ ID NO: 3135499 - DNA, 25 bp, Homo sapien
taactgccgtattattgaagctgac

SEQ ID NO: 3135500 - DNA, 25 bp, Homo sapien
gactgagttggtttgtaaggagcac

SEQ ID NO: 3135501 - DNA, 25 bp, Homo sapien
taaggagcacgggaagtaactgccg

SEQ ID NO: 3135502 - DNA, 25 bp, Homo sapien
taagcttcagtgcaaccactgctgc

SEQ ID NO: 3135503 - DNA, 25 bp, Homo sapien
ttaagcttcagtgcaaccactgctg

SEQ ID NO: 3135504 - DNA, 25 bp, Homo sapien
tgctgctgctgactgtggccatagc

SEQ ID NO: 3135505 - DNA, 25 bp, Homo sapien
tgctgctgactgtggccatagcctt

SEQ ID NO: 3135506 - DNA, 25 bp, Homo sapien
gtctttggagaagccacgtcactct

SEQ ID NO: 3135507 - DNA, 25 bp, Homo sapien
tgtgctgctcaacatctaaaatgat

SEQ ID NO: 3135508 - DNA, 25 bp, Homo sapien
cgtcactctcgcaggttttctgtgc

SEQ ID NO: 3135509 - DNA, 25 bp, Homo sapien
tttctgtgctgctcaacatctaaaa

SEQ ID NO: 3135510 - DNA, 25 bp, Homo sapien
ctgacatagataaagaggctggctc

SEQ ID NO: 3135511 - DNA, 25 bp, Homo sapien
cagagcaacctaagttctttggaga

SEQ ID NO: 3135512 - DNA, 25 bp, Homo sapien
ttttaaggtaagaatgtcccatcca

SEQ ID NO: 3135513 - DNA, 25 bp, Homo sapien
tgcaacataaaataggagacaccca

SEQ ID NO: 3135514 - DNA, 25 bp, Homo sapien
tcatcaaacaccctgtcaaagtgcc

SEQ ID NO: 3135515 - DNA, 25 bp, Homo sapien
tttaagacaagtagtcacagtggcc

SEQ ID NO: 3135516 - DNA, 25 bp, Homo sapien
agatgctgaccattcataaccacag

SEQ ID NO: 3135517 - DNA, 25 bp, Homo sapien
caggggcgaggaagagagtggtcag

SEQ ID NO: 3135518 - DNA, 25 bp, Homo sapien
tgctgtaaacgagggcctgaaaggc

SEQ ID NO: 3135519 - DNA, 25 bp, Homo sapien
gaagctacagcattttgattcaata

SEQ ID NO: 3135520 - DNA, 25 bp, Homo sapien
aggtcttcagtgaagctacagcatt

SEQ ID NO: 3135521 - DNA, 25 bp, Homo sapien
caacagtggttggatgaaagaaagg

SEQ ID NO: 3135522 - DNA, 25 bp, Homo sapien
gataacataacacaattttgatttg

SEQ ID NO: 3135523 - DNA, 25 bp, Homo sapien
ctttggaatctgagattgttctatt

SEQ ID NO: 3135524 - DNA, 25 bp, Homo sapien
tattttccatttgtgtctcagtaga

SEQ ID NO: 3135525 - DNA, 25 bp, Homo sapien
atttgtagttagctttggaatctga

SEQ ID NO: 3135526 - DNA, 25 bp, Homo sapien
tgagatcagcggctatagtccagga

SEQ ID NO: 3135527 - DNA, 25 bp, Homo sapien
gatcagcggctatagtccaggaata

SEQ ID NO: 3135528 - DNA, 25 bp, Homo sapien
gaagaagggcatcaatgagatcagc

SEQ ID NO: 3135529 - DNA, 25 bp, Homo sapien
gcatcaatgagatcagcggctatag

SEQ ID NO: 3135530 - DNA, 25 bp, Homo sapien
actctgctccgttccacatttgtca

SEQ ID NO: 3135531 - DNA, 25 bp, Homo sapien
ccacatttgtcagcccgtaatagca

SEQ ID NO: 3135532 - DNA, 25 bp, Homo sapien
tgggtcagtctggacaaaagctgcc

SEQ ID NO: 3135533 - DNA, 25 bp, Homo sapien
cctgggtcagtctggacaaaagctg

SEQ ID NO: 3135534 - DNA, 25 bp, Homo sapien
catagtgagcaaaatggacctccat

SEQ ID NO: 3135535 - DNA, 25 bp, Homo sapien
gatttactctgttctagataccagg

SEQ ID NO: 3135536 - DNA, 25 bp, Homo sapien
tcagcgaggctgagcaaatttctga

SEQ ID NO: 3135537 - DNA, 25 bp, Homo sapien
ttaatgcatgtcgtactaagcctgc

SEQ ID NO: 3135538 - DNA, 25 bp, Homo sapien
cacaaagacttctgatatttgtgga

SEQ ID NO: 3135539 - DNA, 25 bp, Homo sapien
tcacaaagacttctgatatttgtgg

SEQ ID NO: 3135540 - DNA, 25 bp, Homo sapien
cagaagagacctatagatcagtgtg

SEQ ID NO: 3135541 - DNA, 25 bp, Homo sapien
gaaaatatcccagctcgagatgtac

SEQ ID NO: 3135542 - DNA, 25 bp, Homo sapien
tcacacattggaataagatgcagcc

SEQ ID NO: 3135543 - DNA, 25 bp, Homo sapien
aaatacagggataaaaggcatacac

SEQ ID NO: 3135544 - DNA, 25 bp, Homo sapien
catggatccacatggtggaacgggc

SEQ ID NO: 3135545 - DNA, 25 bp, Homo sapien
tgagcgcagggaacaactaggattt

SEQ ID NO: 3135546 - DNA, 25 bp, Homo sapien
tggaacgggcattaattgagcgcag

SEQ ID NO: 3135547 - DNA, 25 bp, Homo sapien
tccgactgtaattggagggtgctcc

SEQ ID NO: 3135548 - DNA, 25 bp, Homo sapien
taatccaccaggagctagttcaagg

SEQ ID NO: 3135549 - DNA, 25 bp, Homo sapien
tgtaatccaccaggagctagttcaa

SEQ ID NO: 3135550 - DNA, 25 bp, Homo sapien
aatccaccaggagctagttcaaggg

SEQ ID NO: 3135551 - DNA, 25 bp, Homo sapien
cttgtaatccaccaggagctagttc

SEQ ID NO: 3135552 - DNA, 25 bp, Homo sapien
tggtcacctgaatgccttatgcagg

SEQ ID NO: 3135553 - DNA, 25 bp, Homo sapien
tatgcaggcccttgcctcgttatct

SEQ ID NO: 3135554 - DNA, 25 bp, Homo sapien
tgctgttgccgcagttccttcttgt

SEQ ID NO: 3135555 - DNA, 25 bp, Homo sapien
tgcccctctgctgttgccgcagttc

SEQ ID NO: 3135556 - DNA, 25 bp, Homo sapien
agaaggaggtgaccgttatccatgt

SEQ ID NO: 3135557 - DNA, 25 bp, Homo sapien
gaccgttatccatgttctcaccctg

SEQ ID NO: 3135558 - DNA, 25 bp, Homo sapien
aggtgaccgttatccatgttctcac

SEQ ID NO: 3135559 - DNA, 25 bp, Homo sapien
aaggaggtgaccgttatccatgttc

SEQ ID NO: 3135560 - DNA, 25 bp, Homo sapien
caactccttggccttatcggtgaaa

SEQ ID NO: 3135561 - DNA, 25 bp, Homo sapien
aaatgtttccttatccctcatcaag

SEQ ID NO: 3135562 - DNA, 25 bp, Homo sapien
tctcagacttgaacatgaggtggga

SEQ ID NO: 3135563 - DNA, 25 bp, Homo sapien
tgtaacttccatgtctcggatgcca

SEQ ID NO: 3135564 - DNA, 25 bp, Homo sapien
tttgccccagtatcgccagacccga

SEQ ID NO: 3135565 - DNA, 25 bp, Homo sapien
acctctttgccccagtatcgccaga

SEQ ID NO: 3135566 - DNA, 25 bp, Homo sapien
gacacctctttgccccagtatcgcc

SEQ ID NO: 3135567 - DNA, 25 bp, Homo sapien
cagtatcgccagacccgactgtttc

SEQ ID NO: 3135568 - DNA, 25 bp, Homo sapien
gctggaaagggcaaatatcttctat

SEQ ID NO: 3135569 - DNA, 25 bp, Homo sapien
gaaattctttccatggccctgccaa

SEQ ID NO: 3135570 - DNA, 25 bp, Homo sapien
tctcagtggtctgagaaattctttc

SEQ ID NO: 3135571 - DNA, 25 bp, Homo sapien
tttccttgccgcttaatctcagtgg

SEQ ID NO: 3135572 - DNA, 25 bp, Homo sapien
tgggaaccgtatatgcttatgtgtg

SEQ ID NO: 3135573 - DNA, 25 bp, Homo sapien
gtggtgggaaccgtatatgcttatg

SEQ ID NO: 3135574 - DNA, 25 bp, Homo sapien
ctgtggtgggaaccgtatatgctta

SEQ ID NO: 3135575 - DNA, 25 bp, Homo sapien
ggtgggaaccgtatatgcttatgtg

SEQ ID NO: 3135576 - DNA, 25 bp, Homo sapien
gaattgccgaagtatcatttgctcc

SEQ ID NO: 3135577 - DNA, 25 bp, Homo sapien
tacctgattgttttcggagttcact

SEQ ID NO: 3135578 - DNA, 25 bp, Homo sapien
taggacttgcggtaaatacctgatt

SEQ ID NO: 3135579 - DNA, 25 bp, Homo sapien
cccctacagggctgaattgccgaag

SEQ ID NO: 3135580 - DNA, 25 bp, Homo sapien
gaactgattggatttgtccttgacg

SEQ ID NO: 3135581 - DNA, 25 bp, Homo sapien
tgcctgaagattgacctatcaatgg

SEQ ID NO: 3135582 - DNA, 25 bp, Homo sapien
tccttgacgtgacaggctttcatga

SEQ ID NO: 3135583 - DNA, 25 bp, Homo sapien
gcatattcttttgactgcctgaaga

SEQ ID NO: 3135584 - DNA, 25 bp, Homo sapien
aggagctttgctcagcctgtgcgcg

SEQ ID NO: 3135585 - DNA, 25 bp, Homo sapien
ccttttcagagtcttagataaggag

SEQ ID NO: 3135586 - DNA, 25 bp, Homo sapien
gagcagtcctgttatccttttcaga

SEQ ID NO: 3135587 - DNA, 25 bp, Homo sapien
agtttttatactcgagcagtcctgt

SEQ ID NO: 3135588 - DNA, 25 bp, Homo sapien
taacaggttgagtctctcggacacc

SEQ ID NO: 3135589 - DNA, 25 bp, Homo sapien
cctgatgaccaaggacccagtgtct

SEQ ID NO: 3135590 - DNA, 25 bp, Homo sapien
cccaggagatgtgggatcagtaaca

SEQ ID NO: 3135591 - DNA, 25 bp, Homo sapien
tggtggctctacctgagaacagcac

SEQ ID NO: 3135592 - DNA, 25 bp, Homo sapien
ctcgcatgttggttggggaagacac

SEQ ID NO: 3135593 - DNA, 25 bp, Homo sapien
aacagctcgcatgttggttggggaa

SEQ ID NO: 3135594 - DNA, 25 bp, Homo sapien
gcagctcccccttctgtcttggcga

SEQ ID NO: 3135595 - DNA, 25 bp, Homo sapien
tcttggcgatcctttcctgtcgctg

SEQ ID NO: 3135596 - DNA, 25 bp, Homo sapien
tttcctcctgctgagtataaacaaa

SEQ ID NO: 3135597 - DNA, 25 bp, Homo sapien
ttcctcctgctgagtataaacaaac

SEQ ID NO: 3135598 - DNA, 25 bp, Homo sapien
ctttcctcctgctgagtataaacaa

SEQ ID NO: 3135599 - DNA, 25 bp, Homo sapien
tgatcccttcgcctagtctcacaca

SEQ ID NO: 3135600 - DNA, 25 bp, Homo sapien
gatcccttcgcctagtctcacacat

SEQ ID NO: 3135601 - DNA, 25 bp, Homo sapien
ctgatcccttcgcctagtctcacac

SEQ ID NO: 3135602 - DNA, 25 bp, Homo sapien
gaagttctccaaggctgaaattggg

SEQ ID NO: 3135603 - DNA, 25 bp, Homo sapien
acaattacatagttcggctgtggca

SEQ ID NO: 3135604 - DNA, 25 bp, Homo sapien
ggctgtggcattaaggaagttctcc

SEQ ID NO: 3135605 - DNA, 25 bp, Homo sapien
actgcagccataaggaagtgtggtc

SEQ ID NO: 3135606 - DNA, 25 bp, Homo sapien
aatgtgatagaaccctgatgattcc

SEQ ID NO: 3135607 - DNA, 25 bp, Homo sapien
ggacatgaaaacctaaagttggcag

SEQ ID NO: 3135608 - DNA, 25 bp, Homo sapien
taattctggccgtcatgtgcaccag

SEQ ID NO: 3135609 - DNA, 25 bp, Homo sapien
caaggttgcctggatttagactcaa

SEQ ID NO: 3135610 - DNA, 25 bp, Homo sapien
tgtgccttacttcagactcatacca

SEQ ID NO: 3135611 - DNA, 25 bp, Homo sapien
ggtttgaagaactgtgggatacaac

SEQ ID NO: 3135612 - DNA, 25 bp, Homo sapien
cagttcccctttcaccttgttactg

SEQ ID NO: 3135613 - DNA, 25 bp, Homo sapien
tgtgggatacaactgatttgttgct

SEQ ID NO: 3135614 - DNA, 25 bp, Homo sapien
agcttgcaatctagtggaggaggta

SEQ ID NO: 3135615 - DNA, 25 bp, Homo sapien
ctaggtgagatctgatgagaaaaca

SEQ ID NO: 3135616 - DNA, 25 bp, Homo sapien
actaggcacagcaagtaggaagggc

SEQ ID NO: 3135617 - DNA, 25 bp, Homo sapien
gtcacaaacatgttaagtccccaat

SEQ ID NO: 3135618 - DNA, 25 bp, Homo sapien
gctgtcagctctacgacctgggctc

SEQ ID NO: 3135619 - DNA, 25 bp, Homo sapien
ggtggccaatcgctgtcagctctac

SEQ ID NO: 3135620 - DNA, 25 bp, Homo sapien
gggtggccaatagatattagctctg

SEQ ID NO: 3135621 - DNA, 25 bp, Homo sapien
ggccaatagatattagctctgtgac

SEQ ID NO: 3135622 - DNA, 25 bp, Homo sapien
cctagagccagcccgccagacactc

SEQ ID NO: 3135623 - DNA, 25 bp, Homo sapien
ccccctgctcagctgaggtctccct

SEQ ID NO: 3135624 - DNA, 25 bp, Homo sapien
gttccccctgctcagctgaggtctc

SEQ ID NO: 3135625 - DNA, 25 bp, Homo sapien
cacatgttggcaaagaaaataccca

SEQ ID NO: 3135626 - DNA, 25 bp, Homo sapien
taccctagagctgtggcctcttcac

SEQ ID NO: 3135627 - DNA, 25 bp, Homo sapien
gaagcagtccttcatcatcccttgt

SEQ ID NO: 3135628 - DNA, 25 bp, Homo sapien
ctgtccatctgtaccctagagctgt

SEQ ID NO: 3135629 - DNA, 25 bp, Homo sapien
tttccttcaaagatcgtatcccaat

SEQ ID NO: 3135630 - DNA, 25 bp, Homo sapien
ttttccttggagagcacctccctga

SEQ ID NO: 3135631 - DNA, 25 bp, Homo sapien
tttccttggagagcacctccctgac

SEQ ID NO: 3135632 - DNA, 25 bp, Homo sapien
ctgtcttttccttggagagcacctc

SEQ ID NO: 3135633 - DNA, 25 bp, Homo sapien
ctatctgtcttttccttggagagca

SEQ ID NO: 3135634 - DNA, 25 bp, Homo sapien
tagccgaaaattgtaataatgctgt

SEQ ID NO: 3135635 - DNA, 25 bp, Homo sapien
cacatcgcaaacagaaacaataatt

SEQ ID NO: 3135636 - DNA, 25 bp, Homo sapien
cattatagcgccaaaacacatcgca

SEQ ID NO: 3135637 - DNA, 25 bp, Homo sapien
gaacataaacattgcagtggtattt

SEQ ID NO: 3135638 - DNA, 25 bp, Homo sapien
ccaaactgcagaacgtttacccagg

SEQ ID NO: 3135639 - DNA, 25 bp, Homo sapien
tccaaactgcagaacgtttacccag

SEQ ID NO: 3135640 - DNA, 25 bp, Homo sapien
ttccaaactgcagaacgtttaccca

SEQ ID NO: 3135641 - DNA, 25 bp, Homo sapien
gagcctttccttagggtgctgcgtt

SEQ ID NO: 3135642 - DNA, 25 bp, Homo sapien
ttagggtgctgcgtttagccttagg

SEQ ID NO: 3135643 - DNA, 25 bp, Homo sapien
gccattattgcatcagttcttctct

SEQ ID NO: 3135644 - DNA, 25 bp, Homo sapien
agagatgggtgtggaaatgcaggga

SEQ ID NO: 3135645 - DNA, 25 bp, Homo sapien
gaagtctctacagagctaccgcaga

SEQ ID NO: 3135646 - DNA, 25 bp, Homo sapien
gtccctaggtatgacagtctgccca

SEQ ID NO: 3135647 - DNA, 25 bp, Homo sapien
aaagcagttgctggtagtacccaga

SEQ ID NO: 3135648 - DNA, 25 bp, Homo sapien
gatggtggccatatagtccctaggt

SEQ ID NO: 3135649 - DNA, 25 bp, Homo sapien
gtggtttccgacactctgcacagcc

SEQ ID NO: 3135650 - DNA, 25 bp, Homo sapien
agctgtttcctggtgttcaggtgtg

SEQ ID NO: 3135651 - DNA, 25 bp, Homo sapien
gttcaggtgtgacgtcatctctcat

SEQ ID NO: 3135652 - DNA, 25 bp, Homo sapien
atgacctggtcattcttgcctgtgc

SEQ ID NO: 3135653 - DNA, 25 bp, Homo sapien
gctccagtgccgcatccctgggctc

SEQ ID NO: 3135654 - DNA, 25 bp, Homo sapien
tctggttgacttagttccatttttc

SEQ ID NO: 3135655 - DNA, 25 bp, Homo sapien
gctctgtttggctcagcccctggtt

SEQ ID NO: 3135656 - DNA, 25 bp, Homo sapien
ccttctctggttgacttagttccat

SEQ ID NO: 3135657 - DNA, 25 bp, Homo sapien
ctctttgctatctgaactgccacca

SEQ ID NO: 3135658 - DNA, 25 bp, Homo sapien
tcatgtcctctttgctatctgaact

SEQ ID NO: 3135659 - DNA, 25 bp, Homo sapien
ttcctctggtcccatgaaggctcag

SEQ ID NO: 3135660 - DNA, 25 bp, Homo sapien
tgtcctctttgctatctgaactgcc

SEQ ID NO: 3135661 - DNA, 25 bp, Homo sapien
caggatttgcggtttccaacactgc

SEQ ID NO: 3135662 - DNA, 25 bp, Homo sapien
gaagaatacatgtgcataacgggcc

SEQ ID NO: 3135663 - DNA, 25 bp, Homo sapien
cacatgtttgagaaacctgctccta

SEQ ID NO: 3135664 - DNA, 25 bp, Homo sapien
gcatttgagcatgggcacatgtttg

SEQ ID NO: 3135665 - DNA, 25 bp, Homo sapien
taaggaagcagtgatacagctttgc

SEQ ID NO: 3135666 - DNA, 25 bp, Homo sapien
taggacaagtttccaggcgcgtgcc

SEQ ID NO: 3135667 - DNA, 25 bp, Homo sapien
ccggggccgtgaaactcaggcactt

SEQ ID NO: 3135668 - DNA, 25 bp, Homo sapien
cggcattcgggcatcctcggcagcg

SEQ ID NO: 3135669 - DNA, 25 bp, Homo sapien
cgcatcaccccaagtttccaagaaa

SEQ ID NO: 3135670 - DNA, 25 bp, Homo sapien
tccaagaaacaaatcgccaaactac

SEQ ID NO: 3135671 - DNA, 25 bp, Homo sapien
gcggccatccgagtgaataatacat

SEQ ID NO: 3135672 - DNA, 25 bp, Homo sapien
tagctgccaggtgaagacctctccg

SEQ ID NO: 3135673 - DNA, 25 bp, Homo sapien
gtgtcggtgtgactcggggggccca

SEQ ID NO: 3135674 - DNA, 25 bp, Homo sapien
ctagacgctccacgccgccggcctg

SEQ ID NO: 3135675 - DNA, 25 bp, Homo sapien
ccggcctgtaggtgtgcgtgtcggt

SEQ ID NO: 3135676 - DNA, 25 bp, Homo sapien
cacgccgccggcctgtaggtgtgcg

SEQ ID NO: 3135677 - DNA, 25 bp, Homo sapien
gtgcaatgcagtccggctgcatcgt

SEQ ID NO: 3135678 - DNA, 25 bp, Homo sapien
gactgtgcaatgcagtccggctgca

SEQ ID NO: 3135679 - DNA, 25 bp, Homo sapien
tgatgactgtgcaatgcagtccggc

SEQ ID NO: 3135680 - DNA, 25 bp, Homo sapien
gatgactgtgcaatgcagtccggct

SEQ ID NO: 3135681 - DNA, 25 bp, Homo sapien
aaccagggaactcgagcgcaacctt

SEQ ID NO: 3135682 - DNA, 25 bp, Homo sapien
ttaccccgaacaactccaggcagaa

SEQ ID NO: 3135683 - DNA, 25 bp, Homo sapien
tacccgccttccagttgcgccgagg

SEQ ID NO: 3135684 - DNA, 25 bp, Homo sapien
gcaggagccggcgcgttaccccgaa

SEQ ID NO: 3135685 - DNA, 25 bp, Homo sapien
tcaaacagggcggaaggaaggcttg

SEQ ID NO: 3135686 - DNA, 25 bp, Homo sapien
acagggcggaaggaaggcttgccag

SEQ ID NO: 3135687 - DNA, 25 bp, Homo sapien
aacagggcggaaggaaggcttgcca

SEQ ID NO: 3135688 - DNA, 25 bp, Homo sapien
caaacagggcggaaggaaggcttgc

SEQ ID NO: 3135689 - DNA, 25 bp, Homo sapien
gaatacagcaagttcatgattaaac

SEQ ID NO: 3135690 - DNA, 25 bp, Homo sapien
cagcaagttcatgattaaactcaca

SEQ ID NO: 3135691 - DNA, 25 bp, Homo sapien
agttcatgattaaactcacattcca

SEQ ID NO: 3135692 - DNA, 25 bp, Homo sapien
gttgatgaatacagcaagttcatga

SEQ ID NO: 3135693 - DNA, 25 bp, Homo sapien
caccaggttcgtgtgctgactgcag

SEQ ID NO: 3135694 - DNA, 25 bp, Homo sapien
tccattctgaggcatgaagtcagca

SEQ ID NO: 3135695 - DNA, 25 bp, Homo sapien
ctgcagggtctctcaaggtcaatcc

SEQ ID NO: 3135696 - DNA, 25 bp, Homo sapien
taagccattcagtacaatcgtagca

SEQ ID NO: 3135697 - DNA, 25 bp, Homo sapien
atgactttccctgaactgtcttctt

SEQ ID NO: 3135698 - DNA, 25 bp, Homo sapien
aagcagaatcccgtattcgtaccat

SEQ ID NO: 3135699 - DNA, 25 bp, Homo sapien
gagttgggcgattctctggattcac

SEQ ID NO: 3135700 - DNA, 25 bp, Homo sapien
taattcaccaactgaggtcagcaga

SEQ ID NO: 3135701 - DNA, 25 bp, Homo sapien
tgcagaggccttccggcaattggtg

SEQ ID NO: 3135702 - DNA, 25 bp, Homo sapien
aaaggtgaacccgatggctctgagc

SEQ ID NO: 3135703 - DNA, 25 bp, Homo sapien
ttgtcaacaagaaatcggcatttat

SEQ ID NO: 3135704 - DNA, 25 bp, Homo sapien
acaagaaatcggcatttattttgca

SEQ ID NO: 3135705 - DNA, 25 bp, Homo sapien
tgtcaacaagaaatcggcatttatt

SEQ ID NO: 3135706 - DNA, 25 bp, Homo sapien
tcaacaagaaatcggcatttatttt

SEQ ID NO: 3135707 - DNA, 25 bp, Homo sapien
gcttaaatcacggactgcttcaagt

SEQ ID NO: 3135708 - DNA, 25 bp, Homo sapien
tttccataaaacgaggacagtgctt

SEQ ID NO: 3135709 - DNA, 25 bp, Homo sapien
aaacgaggacagtgcttaaatcacg

SEQ ID NO: 3135710 - DNA, 25 bp, Homo sapien
gtggtttgtctatttcttcctcgaa

SEQ ID NO: 3135711 - DNA, 25 bp, Homo sapien
ccattctacatcaaaaggtatttgg

SEQ ID NO: 3135712 - DNA, 25 bp, Homo sapien
actgtatgtgtacatggagaaccat

SEQ ID NO: 3135713 - DNA, 25 bp, Homo sapien
tccacagtcaaatgtgtgaatgctg

SEQ ID NO: 3135714 - DNA, 25 bp, Homo sapien
ttgcagacacatattaacagttggt

SEQ ID NO: 3135715 - DNA, 25 bp, Homo sapien
ggagagactgggattatggccacac

SEQ ID NO: 3135716 - DNA, 25 bp, Homo sapien
tatcttggcacagagggatgtatct

SEQ ID NO: 3135717 - DNA, 25 bp, Homo sapien
ttttcatagaccaggacgaagatag

SEQ ID NO: 3135718 - DNA, 25 bp, Homo sapien
gatctgaagttgaggtcaaacttgg

SEQ ID NO: 3135719 - DNA, 25 bp, Homo sapien
gacactgtagctcatactggaaaag

SEQ ID NO: 3135720 - DNA, 25 bp, Homo sapien
caaaagttcgagttgtgctcttcac

SEQ ID NO: 3135721 - DNA, 25 bp, Homo sapien
tctgtctcagtacagaggcactgac

SEQ ID NO: 3135722 - DNA, 25 bp, Homo sapien
tcttcacgttggttcgataatggcc

SEQ ID NO: 3135723 - DNA, 25 bp, Homo sapien
tctgctcatagttggcgcccagtgc

SEQ ID NO: 3135724 - DNA, 25 bp, Homo sapien
ggctatgagttggatttggcccaca

SEQ ID NO: 3135725 - DNA, 25 bp, Homo sapien
tgctactcatgcttcacggaatgtt

SEQ ID NO: 3135726 - DNA, 25 bp, Homo sapien
gacccatgaagtccttgtcaaaact

SEQ ID NO: 3135727 - DNA, 25 bp, Homo sapien
tactgcaagtacaggaagaactttg

SEQ ID NO: 3135728 - DNA, 25 bp, Homo sapien
ttttagcacgggagagaactgactc

SEQ ID NO: 3135729 - DNA, 25 bp, Homo sapien
gaactgactccctattgctgagtgg

SEQ ID NO: 3135730 - DNA, 25 bp, Homo sapien
tatatgtactccaatggcacccgaa

SEQ ID NO: 3135731 - DNA, 25 bp, Homo sapien
tgttactggcctttggagaccttcc

SEQ ID NO: 3135732 - DNA, 25 bp, Homo sapien
tctcagatagctgtggtgctgctcc

SEQ ID NO: 3135733 - DNA, 25 bp, Homo sapien
tgctgctcccgtaagattatagtgg

SEQ ID NO: 3135734 - DNA, 25 bp, Homo sapien
tgaacgtaaccttgcagcatcacag

SEQ ID NO: 3135735 - DNA, 25 bp, Homo sapien
actttgataactgtcctctcctaac

SEQ ID NO: 3135736 - DNA, 25 bp, Homo sapien
tagttatgagcgctactctagatgc

SEQ ID NO: 3135737 - DNA, 25 bp, Homo sapien
gagcgctactctagatgcaggaaaa

SEQ ID NO: 3135738 - DNA, 25 bp, Homo sapien
ctattcctgggcgtacacatcctgt

SEQ ID NO: 3135739 - DNA, 25 bp, Homo sapien
cactggctacagatattctaatggg

SEQ ID NO: 3135740 - DNA, 25 bp, Homo sapien
gaagctatgaatgatcccctcctgg

SEQ ID NO: 3135741 - DNA, 25 bp, Homo sapien
cctcctggagcgttatggtgtaata

SEQ ID NO: 3135742 - DNA, 25 bp, Homo sapien
tgaaggaagttgtaagacagagatc

SEQ ID NO: 3135743 - DNA, 25 bp, Homo sapien
tggagaggcctgcagtagccatgag

SEQ ID NO: 3135744 - DNA, 25 bp, Homo sapien
tgcagtagccatgagggcgcctcct

SEQ ID NO: 3135745 - DNA, 25 bp, Homo sapien
tctgggctgggttcactagcggcgg

SEQ ID NO: 3135746 - DNA, 25 bp, Homo sapien
cgggtaggagaagcgcggcgcccgt

SEQ ID NO: 3135747 - DNA, 25 bp, Homo sapien
ccagcgcgagttcctggtaggtgcg

SEQ ID NO: 3135748 - DNA, 25 bp, Homo sapien
cggactcggcatgccccatacttgg

SEQ ID NO: 3135749 - DNA, 25 bp, Homo sapien
ccattctgggcttcgccaaggccgg

SEQ ID NO: 3135750 - DNA, 25 bp, Homo sapien
ggaggtagaggtgcgggcgggaaca

SEQ ID NO: 3135751 - DNA, 25 bp, Homo sapien
gacttcctggaatactacttgctgg

SEQ ID NO: 3135752 - DNA, 25 bp, Homo sapien
caagtgttcaccttcgaagaccctg

SEQ ID NO: 3135753 - DNA, 25 bp, Homo sapien
tgtgtgtctatctaactgcaggcca

SEQ ID NO: 3135754 - DNA, 25 bp, Homo sapien
gaccctggccaagatatatcacact

SEQ ID NO: 3135755 - DNA, 25 bp, Homo sapien
caggcttattgaagaagtaaaatgg

SEQ ID NO: 3135756 - DNA, 25 bp, Homo sapien
acaaatatgcagatatggattcaac

SEQ ID NO: 3135757 - DNA, 25 bp, Homo sapien
tatggagaccacaactatagaagtt

SEQ ID NO: 3135758 - DNA, 25 bp, Homo sapien
agtaaaatggtacaatgatgtgcaa

SEQ ID NO: 3135759 - DNA, 25 bp, Homo sapien
caggtagacattcagccggctgttc

SEQ ID NO: 3135760 - DNA, 25 bp, Homo sapien
gagattccctagagctagtcagagc

SEQ ID NO: 3135761 - DNA, 25 bp, Homo sapien
gacttatgcaaagcctggattggcc

SEQ ID NO: 3135762 - DNA, 25 bp, Homo sapien
gccaaggttgagctggttcctccca

SEQ ID NO: 3135763 - DNA, 25 bp, Homo sapien
ttttcacagcaatggtggaggctca

SEQ ID NO: 3135764 - DNA, 25 bp, Homo sapien
gctcaggagtgcaagcagacacgta

SEQ ID NO: 3135765 - DNA, 25 bp, Homo sapien
catccagttgtcagaagatctaggc

SEQ ID NO: 3135766 - DNA, 25 bp, Homo sapien
gctggtcctggctagtcaactggag

SEQ ID NO: 3135767 - DNA, 25 bp, Homo sapien
cttccagaagctagagctggactgc

SEQ ID NO: 3135768 - DNA, 25 bp, Homo sapien
aagctagagctggactgccatttcc

SEQ ID NO: 3135769 - DNA, 25 bp, Homo sapien
ccagggtgtaacaccatcagaagct

SEQ ID NO: 3135770 - DNA, 25 bp, Homo sapien
actgccatttccagggtgtaacacc

SEQ ID NO: 3135771 - DNA, 25 bp, Homo sapien
ggaagctttgcgtctgaccttggac

SEQ ID NO: 3135772 - DNA, 25 bp, Homo sapien
ttaacacaaccgacaggacacttgg

SEQ ID NO: 3135773 - DNA, 25 bp, Homo sapien
tgaatcaaatatggctcctgcctga

SEQ ID NO: 3135774 - DNA, 25 bp, Homo sapien
gacactgtggtataatctgctgccc

SEQ ID NO: 3135775 - DNA, 25 bp, Homo sapien
ggtgttcaccactttgttcctccat

SEQ ID NO: 3135776 - DNA, 25 bp, Homo sapien
gtgttcaccactttgttcctccata

SEQ ID NO: 3135777 - DNA, 25 bp, Homo sapien
tacccaactcataagagaaacagcc

SEQ ID NO: 3135778 - DNA, 25 bp, Homo sapien
ggcatcttgcctaaggttacccaac

SEQ ID NO: 3135779 - DNA, 25 bp, Homo sapien
tccatctgctaagtggtcaattaat

SEQ ID NO: 3135780 - DNA, 25 bp, Homo sapien
cacagtgagcactcagaatgtatta

SEQ ID NO: 3135781 - DNA, 25 bp, Homo sapien
gactgctgggatactgtaaaataca

SEQ ID NO: 3135782 - DNA, 25 bp, Homo sapien
aaaaaatgaactggactgctgggat

SEQ ID NO: 3135783 - DNA, 25 bp, Homo sapien
aatgaactggactgctgggatactg

SEQ ID NO: 3135784 - DNA, 25 bp, Homo sapien
gaactggactgctgggatactgtaa

SEQ ID NO: 3135785 - DNA, 25 bp, Homo sapien
gagtgttccctcatcaccaagagga

SEQ ID NO: 3135786 - DNA, 25 bp, Homo sapien
ggtccaggatcgttgggctctctca

SEQ ID NO: 3135787 - DNA, 25 bp, Homo sapien
caaatgaacactgcatgggagcagc

SEQ ID NO: 3135788 - DNA, 25 bp, Homo sapien
tgacagtacctctggcatgcagccg

SEQ ID NO: 3135789 - DNA, 25 bp, Homo sapien
taatgcacacgcattcccggagctg

SEQ ID NO: 3135790 - DNA, 25 bp, Homo sapien
gcctccttccttgttaagcgcctga

SEQ ID NO: 3135791 - DNA, 25 bp, Homo sapien
ccgcttacagtagaaatcagggcca

SEQ ID NO: 3135792 - DNA, 25 bp, Homo sapien
ttcctgagggcgatgactctctgct

SEQ ID NO: 3135793 - DNA, 25 bp, Homo sapien
cagaatcagtgacaatctaaaacga

SEQ ID NO: 3135794 - DNA, 25 bp, Homo sapien
cctctttttcagcagaatcagtgac

SEQ ID NO: 3135795 - DNA, 25 bp, Homo sapien
tcagtgacaatctaaaacgagccat

SEQ ID NO: 3135796 - DNA, 25 bp, Homo sapien
ctctttttcagcagaatcagtgaca

SEQ ID NO: 3135797 - DNA, 25 bp, Homo sapien
caagggaaagcgtctccggagaaag

SEQ ID NO: 3135798 - DNA, 25 bp, Homo sapien
tatggattgggaagacgctctcccc

SEQ ID NO: 3135799 - DNA, 25 bp, Homo sapien
ttctggcatgtaaggaacccctagg

SEQ ID NO: 3135800 - DNA, 25 bp, Homo sapien
tcccctgggcactcgggtacaggta

SEQ ID NO: 3135801 - DNA, 25 bp, Homo sapien
gattagtatacagtttaacactggc

SEQ ID NO: 3135802 - DNA, 25 bp, Homo sapien
taatgattagtatacagtttaacac

SEQ ID NO: 3135803 - DNA, 25 bp, Homo sapien
cagtttaacactggcaaccctcaca

SEQ ID NO: 3135804 - DNA, 25 bp, Homo sapien
tatacagtttaacactggcaaccct

SEQ ID NO: 3135805 - DNA, 25 bp, Homo sapien
cgggtgtttcatactccttgcccat

SEQ ID NO: 3135806 - DNA, 25 bp, Homo sapien
gaggccgggtgtttcatactccttg

SEQ ID NO: 3135807 - DNA, 25 bp, Homo sapien
atgaggccgggtgtttcatactcct

SEQ ID NO: 3135808 - DNA, 25 bp, Homo sapien
ggccgggtgtttcatactccttgcc

SEQ ID NO: 3135809 - DNA, 25 bp, Homo sapien
taagccatcgcaggtgtttggtcac

SEQ ID NO: 3135810 - DNA, 25 bp, Homo sapien
tggtcactacgcgagtctttccagt

SEQ ID NO: 3135811 - DNA, 25 bp, Homo sapien
cactgctcaattagtggtgagtgac

SEQ ID NO: 3135812 - DNA, 25 bp, Homo sapien
aaatctatactctgtagcggaccag

SEQ ID NO: 3135813 - DNA, 25 bp, Homo sapien
cttccaagccaagaggtagctaatc

SEQ ID NO: 3135814 - DNA, 25 bp, Homo sapien
tccagcactgaacaagctattgcag

SEQ ID NO: 3135815 - DNA, 25 bp, Homo sapien
caagaggtagctaatccagcactga

SEQ ID NO: 3135816 - DNA, 25 bp, Homo sapien
agctattgcagctactcattgagaa

SEQ ID NO: 3135817 - DNA, 25 bp, Homo sapien
cctcctctgccactgtgagcttttt

SEQ ID NO: 3135818 - DNA, 25 bp, Homo sapien
ccagacatccattcttctctgacct

SEQ ID NO: 3135819 - DNA, 25 bp, Homo sapien
tctgccactgtgagctttttccctc

SEQ ID NO: 3135820 - DNA, 25 bp, Homo sapien
tttttccctctccagacatccattc

SEQ ID NO: 3135821 - DNA, 25 bp, Homo sapien
ccccagaaatcagcaggccattcca

SEQ ID NO: 3135822 - DNA, 25 bp, Homo sapien
accccagaaatcagcaggccattcc

SEQ ID NO: 3135823 - DNA, 25 bp, Homo sapien
gcaggccattccaggagctccccca

SEQ ID NO: 3135824 - DNA, 25 bp, Homo sapien
aaccccagaaatcagcaggccattc

SEQ ID NO: 3135825 - DNA, 25 bp, Homo sapien
gcttactcaagtattcagattcatg

SEQ ID NO: 3135826 - DNA, 25 bp, Homo sapien
cactctggcccttttgaacgaactt

SEQ ID NO: 3135827 - DNA, 25 bp, Homo sapien
acgaacttggtctgtgcaatctcac

SEQ ID NO: 3135828 - DNA, 25 bp, Homo sapien
gaaaccaaagcttatgtggcttact

SEQ ID NO: 3135829 - DNA, 25 bp, Homo sapien
gcagagcgccacctttgtatgaccg

SEQ ID NO: 3135830 - DNA, 25 bp, Homo sapien
gagcgccacctttgtatgaccgact

SEQ ID NO: 3135831 - DNA, 25 bp, Homo sapien
gggcagagcgccacctttgtatgac

SEQ ID NO: 3135832 - DNA, 25 bp, Homo sapien
gatcgtggttcaggggcagagcgcc

SEQ ID NO: 3135833 - DNA, 25 bp, Homo sapien
tgtccctttcagaaggcaggctctt

SEQ ID NO: 3135834 - DNA, 25 bp, Homo sapien
tcctgtccctttcagaaggcaggct

SEQ ID NO: 3135835 - DNA, 25 bp, Homo sapien
ctgaaggctcctttcctgtcccttt

SEQ ID NO: 3135836 - DNA, 25 bp, Homo sapien
ttcctgtccctttcagaaggcaggc

SEQ ID NO: 3135837 - DNA, 25 bp, Homo sapien
aaggagccttcataactgaaagcac

SEQ ID NO: 3135838 - DNA, 25 bp, Homo sapien
gctgtctaaggagccttcataactg

SEQ ID NO: 3135839 - DNA, 25 bp, Homo sapien
tgtctaaggagccttcataactgaa

SEQ ID NO: 3135840 - DNA, 25 bp, Homo sapien
tctaaggagccttcataactgaaag

SEQ ID NO: 3135841 - DNA, 25 bp, Homo sapien
gccggcattgttctaaggagcacag

SEQ ID NO: 3135842 - DNA, 25 bp, Homo sapien
gtgttctgccggcattgttctaagg

SEQ ID NO: 3135843 - DNA, 25 bp, Homo sapien
cattgttctaaggagcacagctggc

SEQ ID NO: 3135844 - DNA, 25 bp, Homo sapien
gcatagtattgtgttctgccggcat

SEQ ID NO: 3135845 - DNA, 25 bp, Homo sapien
gaggcacgtggttcacatttgtgct

SEQ ID NO: 3135846 - DNA, 25 bp, Homo sapien
ccccagaggaggcacgtggttcaca

SEQ ID NO: 3135847 - DNA, 25 bp, Homo sapien
gaggaggcacgtggttcacatttgt

SEQ ID NO: 3135848 - DNA, 25 bp, Homo sapien
cagaggaggcacgtggttcacattt

SEQ ID NO: 3135849 - DNA, 25 bp, Homo sapien
ctcagtgggcaaactcccaaaaagg

SEQ ID NO: 3135850 - DNA, 25 bp, Homo sapien
aaaaaggagagagctgattgagacc

SEQ ID NO: 3135851 - DNA, 25 bp, Homo sapien
aaggagagagctgattgagacctcc

SEQ ID NO: 3135852 - DNA, 25 bp, Homo sapien
ctcctcagtgggcaaactcccaaaa

SEQ ID NO: 3135853 - DNA, 25 bp, Homo sapien
caccaccatgtgcatggatactaca

SEQ ID NO: 3135854 - DNA, 25 bp, Homo sapien
tggtaaaggatgaccaactccaagg

SEQ ID NO: 3135855 - DNA, 25 bp, Homo sapien
ggtgaaggcctgatcagaaacagaa

SEQ ID NO: 3135856 - DNA, 25 bp, Homo sapien
catggatactacagtctgcactgct

SEQ ID NO: 3135857 - DNA, 25 bp, Homo sapien
agagcatctgagttgataggttttg

SEQ ID NO: 3135858 - DNA, 25 bp, Homo sapien
gtggtccagggacacttcaacaggt

SEQ ID NO: 3135859 - DNA, 25 bp, Homo sapien
aacaggtaggatgggcaagacaatg

SEQ ID NO: 3135860 - DNA, 25 bp, Homo sapien
caggatgagacgttctgccaccctg

SEQ ID NO: 3135861 - DNA, 25 bp, Homo sapien
aggatgagacgttctgccaccctgt

SEQ ID NO: 3135862 - DNA, 25 bp, Homo sapien
gtgtaggccattcacaccaggcctc

SEQ ID NO: 3135863 - DNA, 25 bp, Homo sapien
gtaggccattcacaccaggcctcca

SEQ ID NO: 3135864 - DNA, 25 bp, Homo sapien
tgtaggccattcacaccaggcctcc

SEQ ID NO: 3135865 - DNA, 25 bp, Homo sapien
tgtgtaggccattcacaccaggcct

SEQ ID NO: 3135866 - DNA, 25 bp, Homo sapien
cgccttgcaacaggcagcttgccgg

SEQ ID NO: 3135867 - DNA, 25 bp, Homo sapien
tttatggagccctcgccttgcaaca

SEQ ID NO: 3135868 - DNA, 25 bp, Homo sapien
ttacagagatatttatggagccctc

SEQ ID NO: 3135869 - DNA, 25 bp, Homo sapien
tgtttgttgtaggataattcattca

SEQ ID NO: 3135870 - DNA, 25 bp, Homo sapien
cagaaatagtttgagttggcgttag

SEQ ID NO: 3135871 - DNA, 25 bp, Homo sapien
ctctttgcagaaatagtttgagttg

SEQ ID NO: 3135872 - DNA, 25 bp, Homo sapien
tttgcagaaatagtttgagttggcg

SEQ ID NO: 3135873 - DNA, 25 bp, Homo sapien
aaatagtttgagttggcgttagcca

SEQ ID NO: 3135874 - DNA, 25 bp, Homo sapien
tagagaatatttgcagacatttcag

SEQ ID NO: 3135875 - DNA, 25 bp, Homo sapien
cctgccgtagagaatatttgcagac

SEQ ID NO: 3135876 - DNA, 25 bp, Homo sapien
ttggaatgcttttccccgccactct

SEQ ID NO: 3135877 - DNA, 25 bp, Homo sapien
ttcacccctgccgtagagaatattt

SEQ ID NO: 3135878 - DNA, 25 bp, Homo sapien
attacagagcttgtattttccagca

SEQ ID NO: 3135879 - DNA, 25 bp, Homo sapien
tcagccaagaaatcatcatgccttc

SEQ ID NO: 3135880 - DNA, 25 bp, Homo sapien
tcagaattacagagcttgtattttc

SEQ ID NO: 3135881 - DNA, 25 bp, Homo sapien
tcacccctttgcatcccttctgctt

SEQ ID NO: 3135882 - DNA, 25 bp, Homo sapien
tcttcatcattagtgcagagatgag

SEQ ID NO: 3135883 - DNA, 25 bp, Homo sapien
aaagctggtgagtgacccctcttca

SEQ ID NO: 3135884 - DNA, 25 bp, Homo sapien
tcatcattagtgcagagatgagatc

SEQ ID NO: 3135885 - DNA, 25 bp, Homo sapien
cagagatgagatcatctggctttaa

SEQ ID NO: 3135886 - DNA, 25 bp, Homo sapien
tcatattggccatgagggactcggt

SEQ ID NO: 3135887 - DNA, 25 bp, Homo sapien
cacaaacaaccttcttatgaccctt

SEQ ID NO: 3135888 - DNA, 25 bp, Homo sapien
cataaactgtcccaggaaatgccag

SEQ ID NO: 3135889 - DNA, 25 bp, Homo sapien
gagggactcggtcaacttctttgcc

SEQ ID NO: 3135890 - DNA, 25 bp, Homo sapien
acatcatccgtccctgagaggcagg

SEQ ID NO: 3135891 - DNA, 25 bp, Homo sapien
gtggcagacacatcatccgtccctg

SEQ ID NO: 3135892 - DNA, 25 bp, Homo sapien
tggcagacacatcatccgtccctga

SEQ ID NO: 3135893 - DNA, 25 bp, Homo sapien
gcagacacatcatccgtccctgaga

SEQ ID NO: 3135894 - DNA, 25 bp, Homo sapien
tgttgcagcaatcccaaaaactgtc

SEQ ID NO: 3135895 - DNA, 25 bp, Homo sapien
cagcccagatggttctccagatgaa

SEQ ID NO: 3135896 - DNA, 25 bp, Homo sapien
gtgacaggtgcagacttggcccctc

SEQ ID NO: 3135897 - DNA, 25 bp, Homo sapien
aaaattggatcctctttgtgactgg

SEQ ID NO: 3135898 - DNA, 25 bp, Homo sapien
tgatgtagacacattggaatttcct

SEQ ID NO: 3135899 - DNA, 25 bp, Homo sapien
aagtccatcccatggcaactctaaa

SEQ ID NO: 3135900 - DNA, 25 bp, Homo sapien
tggaatttccttaccacccacttca

SEQ ID NO: 3135901 - DNA, 25 bp, Homo sapien
tcccatggcaactctaaaccatttc

SEQ ID NO: 3135902 - DNA, 25 bp, Homo sapien
ctatatttcttccttctatccttaa

SEQ ID NO: 3135903 - DNA, 25 bp, Homo sapien
tgctatatttcttccttctatcctt

SEQ ID NO: 3135904 - DNA, 25 bp, Homo sapien
tatatttcttccttctatccttaaa

SEQ ID NO: 3135905 - DNA, 25 bp, Homo sapien
gctatatttcttccttctatcctta

SEQ ID NO: 3135906 - DNA, 25 bp, Homo sapien
ttgggatgagtatgatcgtcccagc

SEQ ID NO: 3135907 - DNA, 25 bp, Homo sapien
gatgagtatgatcgtcccagctgat

SEQ ID NO: 3135908 - DNA, 25 bp, Homo sapien
gagtatgatcgtcccagctgatctt

SEQ ID NO: 3135909 - DNA, 25 bp, Homo sapien
gggatgagtatgatcgtcccagctg

SEQ ID NO: 3135910 - DNA, 25 bp, Homo sapien
ggtgcagtgacttcaaccagctcag

SEQ ID NO: 3135911 - DNA, 25 bp, Homo sapien
tgctaacattatccacacgcagctg

SEQ ID NO: 3135912 - DNA, 25 bp, Homo sapien
gcactagcgttctcaagttcctcaa

SEQ ID NO: 3135913 - DNA, 25 bp, Homo sapien
gacaggtggcttcaatcacagcact

SEQ ID NO: 3135914 - DNA, 25 bp, Homo sapien
tagaagaggatacatcagtggaacg

SEQ ID NO: 3135915 - DNA, 25 bp, Homo sapien
tcagtggaacgattttgaaatttcc

SEQ ID NO: 3135916 - DNA, 25 bp, Homo sapien
aacagaagccaataacgaaaagctt

SEQ ID NO: 3135917 - DNA, 25 bp, Homo sapien
taacgaaaagcttagaagaggatac

SEQ ID NO: 3135918 - DNA, 25 bp, Homo sapien
ttcacagttaagtggacacctgctc

SEQ ID NO: 3135919 - DNA, 25 bp, Homo sapien
ggtttcacaactcttccattcacct

SEQ ID NO: 3135920 - DNA, 25 bp, Homo sapien
tttcacaactcttccattcaccttg

SEQ ID NO: 3135921 - DNA, 25 bp, Homo sapien
cagttaagtggacacctgctctttg

SEQ ID NO: 3135922 - DNA, 25 bp, Homo sapien
aattgtctgaaatcatctctttggt

SEQ ID NO: 3135923 - DNA, 25 bp, Homo sapien
ttcccaaattgtctgaaatcatctc

SEQ ID NO: 3135924 - DNA, 25 bp, Homo sapien
gtctgaaatcatctctttggtgatg

SEQ ID NO: 3135925 - DNA, 25 bp, Homo sapien
ccaaattgtctgaaatcatctcttt

SEQ ID NO: 3135926 - DNA, 25 bp, Homo sapien
tgaaggctaatcgttttaattgcca

SEQ ID NO: 3135927 - DNA, 25 bp, Homo sapien
gttgtagccattcacgggatggcgt

SEQ ID NO: 3135928 - DNA, 25 bp, Homo sapien
cgggatggcgtttccaaatgacagt

SEQ ID NO: 3135929 - DNA, 25 bp, Homo sapien
tttgaaggctaatcgttttaattgc

SEQ ID NO: 3135930 - DNA, 25 bp, Homo sapien
ccatgtgggaaaaaccaggcagcct

SEQ ID NO: 3135931 - DNA, 25 bp, Homo sapien
gtaaatgcatccagtacagagtggg

SEQ ID NO: 3135932 - DNA, 25 bp, Homo sapien
cgcccaccgtgaagatccaatgaga

SEQ ID NO: 3135933 - DNA, 25 bp, Homo sapien
cagtcaccatgctgtatgccgggca

SEQ ID NO: 3135934 - DNA, 25 bp, Homo sapien
tttggagaggtgtacaatgacctct

SEQ ID NO: 3135935 - DNA, 25 bp, Homo sapien
ctgtttggagaggtgtacaatgacc

SEQ ID NO: 3135936 - DNA, 25 bp, Homo sapien
gacctctttattgagaggccctttg

SEQ ID NO: 3135937 - DNA, 25 bp, Homo sapien
atgacctctttattgagaggccctt

SEQ ID NO: 3135938 - DNA, 25 bp, Homo sapien
cggcttgtagccagtgaccttcagc

SEQ ID NO: 3135939 - DNA, 25 bp, Homo sapien
tttcgggccaaggattccattccgc

SEQ ID NO: 3135940 - DNA, 25 bp, Homo sapien
caaggattccattccgcgacttcac

SEQ ID NO: 3135941 - DNA, 25 bp, Homo sapien
attccgcgacttcaccggcttgtag

SEQ ID NO: 3135942 - DNA, 25 bp, Homo sapien
ggagccagtcattgggccagttcag

SEQ ID NO: 3135943 - DNA, 25 bp, Homo sapien
cagaggagtggtcagcgtgagggag

SEQ ID NO: 3135944 - DNA, 25 bp, Homo sapien
gccagtcattgggccagttcaggga

SEQ ID NO: 3135945 - DNA, 25 bp, Homo sapien
gaggagtggtcagcgtgagggagcc

SEQ ID NO: 3135946 - DNA, 25 bp, Homo sapien
tctctcctgaaaagagagctgcacc

SEQ ID NO: 3135947 - DNA, 25 bp, Homo sapien
agcccaggaacgcaggctgtccctg

SEQ ID NO: 3135948 - DNA, 25 bp, Homo sapien
tttctctcctgaaaagagagctgca

SEQ ID NO: 3135949 - DNA, 25 bp, Homo sapien
ctcctgaaaagagagctgcacccag

SEQ ID NO: 3135950 - DNA, 25 bp, Homo sapien
tccactccgccgagtcagagttggg

SEQ ID NO: 3135951 - DNA, 25 bp, Homo sapien
ctccgtgaccttggcgtacatgtct

SEQ ID NO: 3135952 - DNA, 25 bp, Homo sapien
gcgtacatgtctcggatccactccg

SEQ ID NO: 3135953 - DNA, 25 bp, Homo sapien
gtccaggcgtccgaggcaccggctg

SEQ ID NO: 3135954 - DNA, 25 bp, Homo sapien
ccccgaactggtgcacgtggatggc

SEQ ID NO: 3135955 - DNA, 25 bp, Homo sapien
tcgcggaccgcgaagttgccgaagt

SEQ ID NO: 3135956 - DNA, 25 bp, Homo sapien
gcttcttgcgctctgagtgctcccg

SEQ ID NO: 3135957 - DNA, 25 bp, Homo sapien
ctgttcggctcggtcgggaagccct

SEQ ID NO: 3135958 - DNA, 25 bp, Homo sapien
gaggccttcagacctactgagtggg

SEQ ID NO: 3135959 - DNA, 25 bp, Homo sapien
tgggtctcggtatagggagacctct

SEQ ID NO: 3135960 - DNA, 25 bp, Homo sapien
tcagcaaaggcgaaggtgagacctc

SEQ ID NO: 3135961 - DNA, 25 bp, Homo sapien
tgtttcggtacaaatggaggccttc

SEQ ID NO: 3135962 - DNA, 25 bp, Homo sapien
gggaagggggaagatcgtcaggtca

SEQ ID NO: 3135963 - DNA, 25 bp, Homo sapien
gagtctcagggcttatggggtgggg

SEQ ID NO: 3135964 - DNA, 25 bp, Homo sapien
cgtcaggtcaaaggcgggagtctca

SEQ ID NO: 3135965 - DNA, 25 bp, Homo sapien
aagggggaagatcgtcaggtcaaag

SEQ ID NO: 3135966 - DNA, 25 bp, Homo sapien
gcttccgttgcacgggctggcttcc

SEQ ID NO: 3135967 - DNA, 25 bp, Homo sapien
ggtggcggtggatgcgaaacagctg

SEQ ID NO: 3135968 - DNA, 25 bp, Homo sapien
tggatgcgaaacagctgaagacgcg

SEQ ID NO: 3135969 - DNA, 25 bp, Homo sapien
agacgcggggcagttggcctggctt

SEQ ID NO: 3135970 - DNA, 25 bp, Homo sapien
gctgacaggtctcttaatgaaagct

SEQ ID NO: 3135971 - DNA, 25 bp, Homo sapien
tatttttccggctggattgccagca

SEQ ID NO: 3135972 - DNA, 25 bp, Homo sapien
tctgtgcctgagagcctctaggtgt

SEQ ID NO: 3135973 - DNA, 25 bp, Homo sapien
gggctatggttgtttgctcagaaaa

SEQ ID NO: 3135974 - DNA, 25 bp, Homo sapien
gaaagcctgagactagatcccaaag

SEQ ID NO: 3135975 - DNA, 25 bp, Homo sapien
catttgtgccaccaagtacgggaat

SEQ ID NO: 3135976 - DNA, 25 bp, Homo sapien
gaaccagaatcactcctttgagagg

SEQ ID NO: 3135977 - DNA, 25 bp, Homo sapien
ttctagttggcatccggcactgcag

SEQ ID NO: 3135978 - DNA, 25 bp, Homo sapien
catcgctgcttctgtctatgatcat

SEQ ID NO: 3135979 - DNA, 25 bp, Homo sapien
ctgatgtttgttatcacatcgctgc

SEQ ID NO: 3135980 - DNA, 25 bp, Homo sapien
aacccacagtcctcttccctgttga

SEQ ID NO: 3135981 - DNA, 25 bp, Homo sapien
ttgtgctccacccttcgtcttggta

SEQ ID NO: 3135982 - DNA, 25 bp, Homo sapien
ttagctctcattgttcctaccccgt

SEQ ID NO: 3135983 - DNA, 25 bp, Homo sapien
tccagagttgcatcattagctctca

SEQ ID NO: 3135984 - DNA, 25 bp, Homo sapien
ggactgattcaaaatgatagcttcc

SEQ ID NO: 3135985 - DNA, 25 bp, Homo sapien
tttcacaagggcgttgtaagtcgtg

SEQ ID NO: 3135986 - DNA, 25 bp, Homo sapien
gttcagtgggctccctgccacgttc

SEQ ID NO: 3135987 - DNA, 25 bp, Homo sapien
tgccacgttctttcagtgtgaagct

SEQ ID NO: 3135988 - DNA, 25 bp, Homo sapien
aagctaacagagatcctctttgcca

SEQ ID NO: 3135989 - DNA, 25 bp, Homo sapien
aggttcagtgggctccctgccacgt

SEQ ID NO: 3135990 - DNA, 25 bp, Homo sapien
aaatgtaaatagcccctcttctctc

SEQ ID NO: 3135991 - DNA, 25 bp, Homo sapien
aaaatgtaaatagcccctcttctct

SEQ ID NO: 3135992 - DNA, 25 bp, Homo sapien
gagcgagcacggtagtgcagttcct

SEQ ID NO: 3135993 - DNA, 25 bp, Homo sapien
gaccttcactctggtattcctgctg

SEQ ID NO: 3135994 - DNA, 25 bp, Homo sapien
ttgatgatgtcattactatctaaaa

SEQ ID NO: 3135995 - DNA, 25 bp, Homo sapien
ctgtgttgtccagagagcgagcacg

SEQ ID NO: 3135996 - DNA, 25 bp, Homo sapien
tgtgcaccacatttcgttctccaga

SEQ ID NO: 3135997 - DNA, 25 bp, Homo sapien
gaggtggttgttcaagggccatttc

SEQ ID NO: 3135998 - DNA, 25 bp, Homo sapien
ggacatattggccttttgctatcct

SEQ ID NO: 3135999 - DNA, 25 bp, Homo sapien
ttccctggccaatggtaaatgagct

SEQ ID NO: 3136000 - DNA, 25 bp, Homo sapien
ttcttgccagcaagttggcagttgc

SEQ ID NO: 3136001 - DNA, 25 bp, Homo sapien
acttcttgccagcaagttggcagtt

SEQ ID NO: 3136002 - DNA, 25 bp, Homo sapien
tacttcttgccagcaagttggcagt

SEQ ID NO: 3136003 - DNA, 25 bp, Homo sapien
ctacttcttgccagcaagttggcag

SEQ ID NO: 3136004 - DNA, 25 bp, Homo sapien
tacataagttgcctaatgtgccatc

SEQ ID NO: 3136005 - DNA, 25 bp, Homo sapien
actacaaatggaatgagggctgaga

SEQ ID NO: 3136006 - DNA, 25 bp, Homo sapien
ggatcttggagattgcttcgcatca

SEQ ID NO: 3136007 - DNA, 25 bp, Homo sapien
cctggtctctgtgtgcatgacccaa

SEQ ID NO: 3136008 - DNA, 25 bp, Homo sapien
atcttgttggtccatgggatctttc

SEQ ID NO: 3136009 - DNA, 25 bp, Homo sapien
gctgccttcccaaaaataccaccca

SEQ ID NO: 3136010 - DNA, 25 bp, Homo sapien
ggcttttgcctctttgccctgaact

SEQ ID NO: 3136011 - DNA, 25 bp, Homo sapien
ctgctgccttcccaaaaataccacc

SEQ ID NO: 3136012 - DNA, 25 bp, Homo sapien
attctctttgaagccaaccctgctg

SEQ ID NO: 3136013 - DNA, 25 bp, Homo sapien
ggattctctttgaagccaaccctgc

SEQ ID NO: 3136014 - DNA, 25 bp, Homo sapien
caggattctctttgaagccaaccct

SEQ ID NO: 3136015 - DNA, 25 bp, Homo sapien
gattctctttgaagccaaccctgct

SEQ ID NO: 3136016 - DNA, 25 bp, Homo sapien
ctctggcccatctggcaaagtggtg

SEQ ID NO: 3136017 - DNA, 25 bp, Homo sapien
gctttagtacctcctggcagagaag

SEQ ID NO: 3136018 - DNA, 25 bp, Homo sapien
cagagaagttgcttaagttgagagt

SEQ ID NO: 3136019 - DNA, 25 bp, Homo sapien
cagtaaaaccatactggggctttag

SEQ ID NO: 3136020 - DNA, 25 bp, Homo sapien
tcttagacgtaaaggcagaatgtct

SEQ ID NO: 3136021 - DNA, 25 bp, Homo sapien
tgcctttcttagacgtaaaggcaga

SEQ ID NO: 3136022 - DNA, 25 bp, Homo sapien
ttcttagacgtaaaggcagaatgtc

SEQ ID NO: 3136023 - DNA, 25 bp, Homo sapien
tatgcctttcttagacgtaaaggca

SEQ ID NO: 3136024 - DNA, 25 bp, Homo sapien
gcccttatatcttcaggagcaggcc

SEQ ID NO: 3136025 - DNA, 25 bp, Homo sapien
tcgagggcgccactggagagactca

SEQ ID NO: 3136026 - DNA, 25 bp, Homo sapien
agtcttttgaggagttatggtcgag

SEQ ID NO: 3136027 - DNA, 25 bp, Homo sapien
ggagagactcaactgtgcccttata

SEQ ID NO: 3136028 - DNA, 25 bp, Homo sapien
gaggccacggcggtggatcatgagg

SEQ ID NO: 3136029 - DNA, 25 bp, Homo sapien
ttgggaggccacggcggtggatcat

SEQ ID NO: 3136030 - DNA, 25 bp, Homo sapien
ctcagtaagaagaaaggccgggtgc

SEQ ID NO: 3136031 - DNA, 25 bp, Homo sapien
ggtggctcactcctgtaatcccagc

SEQ ID NO: 3136032 - DNA, 25 bp, Homo sapien
ggttgtagtgggcagagatcacgcc

SEQ ID NO: 3136033 - DNA, 25 bp, Homo sapien
acaaaagcaaaactccatcacacac

SEQ ID NO: 3136034 - DNA, 25 bp, Homo sapien
actgaactccagcctgggcaacaaa

SEQ ID NO: 3136035 - DNA, 25 bp, Homo sapien
gcaacaaaagcaaaactccatcaca

SEQ ID NO: 3136036 - DNA, 25 bp, Homo sapien
ctgcccgctcgccactgttgtggag

SEQ ID NO: 3136037 - DNA, 25 bp, Homo sapien
aattggacgcctgggactgaaacgg

SEQ ID NO: 3136038 - DNA, 25 bp, Homo sapien
gccctggattggaggctgaagccct

SEQ ID NO: 3136039 - DNA, 25 bp, Homo sapien
ttcttccgcgccatctggtgtcagc

SEQ ID NO: 3136040 - DNA, 25 bp, Homo sapien
tccggagtgacctgtaggctgagac

SEQ ID NO: 3136041 - DNA, 25 bp, Homo sapien
tgtagagcatctcctatgggccagg

SEQ ID NO: 3136042 - DNA, 25 bp, Homo sapien
agcttgcattctaggcgtgggagtc

SEQ ID NO: 3136043 - DNA, 25 bp, Homo sapien
caaaggcacatctgcgaaccaagga

SEQ ID NO: 3136044 - DNA, 25 bp, Homo sapien
ccacggttttccgctctcctcccat

SEQ ID NO: 3136045 - DNA, 25 bp, Homo sapien
tttccatttccataaatttacatca

SEQ ID NO: 3136046 - DNA, 25 bp, Homo sapien
ctgctgcctctctgcgtttccattt

SEQ ID NO: 3136047 - DNA, 25 bp, Homo sapien
ccgtcagcagcacgggccctgctgc

SEQ ID NO: 3136048 - DNA, 25 bp, Homo sapien
ttacatcaaatttgtgctgaatcat

SEQ ID NO: 3136049 - DNA, 25 bp, Homo sapien
cagtaggtccttgatcatgtttatt

SEQ ID NO: 3136050 - DNA, 25 bp, Homo sapien
tatccactggctaaagattgtcccc

SEQ ID NO: 3136051 - DNA, 25 bp, Homo sapien
accttttcaccttctcgatcaaatt

SEQ ID NO: 3136052 - DNA, 25 bp, Homo sapien
tcatttcactagcaatttctgtgta

SEQ ID NO: 3136053 - DNA, 25 bp, Homo sapien
gaaatcaggaggtctttaggacaga

SEQ ID NO: 3136054 - DNA, 25 bp, Homo sapien
ctagctggaagattctgcgatgtga

SEQ ID NO: 3136055 - DNA, 25 bp, Homo sapien
ctaggcaaaacataagcagaggcac

SEQ ID NO: 3136056 - DNA, 25 bp, Homo sapien
tcagagattcacttggactgcggtg

SEQ ID NO: 3136057 - DNA, 25 bp, Homo sapien
agtggtcgtgagctcccttagactt

SEQ ID NO: 3136058 - DNA, 25 bp, Homo sapien
gctcccttagacttatagttgccaa

SEQ ID NO: 3136059 - DNA, 25 bp, Homo sapien
tcgtgagctcccttagacttatagt

SEQ ID NO: 3136060 - DNA, 25 bp, Homo sapien
atagttgccaaaaataactaccatc

SEQ ID NO: 3136061 - DNA, 25 bp, Homo sapien
taatctcgttgctgtagaattcacc

SEQ ID NO: 3136062 - DNA, 25 bp, Homo sapien
ggagcagctcccaagataaattgat

SEQ ID NO: 3136063 - DNA, 25 bp, Homo sapien
ccgcgaggacgcattgaacatacga

SEQ ID NO: 3136064 - DNA, 25 bp, Homo sapien
caatgcttctcagatcccgcgagga

SEQ ID NO: 3136065 - DNA, 25 bp, Homo sapien
tcatcaccgcagagcaccatgcgga

SEQ ID NO: 3136066 - DNA, 25 bp, Homo sapien
caccgtaaattacagcccaggcaat

SEQ ID NO: 3136067 - DNA, 25 bp, Homo sapien
catgcggaaaaaggacccctttgtg

SEQ ID NO: 3136068 - DNA, 25 bp, Homo sapien
aatctggagtctcagctagagtgga

SEQ ID NO: 3136069 - DNA, 25 bp, Homo sapien
gagaaacatcccagtgcaatttcag

SEQ ID NO: 3136070 - DNA, 25 bp, Homo sapien
tgatgcacaatagtgggatctggcc

SEQ ID NO: 3136071 - DNA, 25 bp, Homo sapien
tcctagaaatgagcttggagccggt

SEQ ID NO: 3136072 - DNA, 25 bp, Homo sapien
caacaatgacaactgatgatgcaca

SEQ ID NO: 3136073 - DNA, 25 bp, Homo sapien
tattctcaggactcttcacaaagca

SEQ ID NO: 3136074 - DNA, 25 bp, Homo sapien
cacagctgaagagtggcaaagccag

SEQ ID NO: 3136075 - DNA, 25 bp, Homo sapien
aggcaactccctcaagtttgcacag

SEQ ID NO: 3136076 - DNA, 25 bp, Homo sapien
aaacagggcccagagtggttaggca

SEQ ID NO: 3136077 - DNA, 25 bp, Homo sapien
ctttacatcaccatttcatccactg

SEQ ID NO: 3136078 - DNA, 25 bp, Homo sapien
tccatatttatccatatcagttttc

SEQ ID NO: 3136079 - DNA, 25 bp, Homo sapien
actggccagctctcttccatattta

SEQ ID NO: 3136080 - DNA, 25 bp, Homo sapien
ttacatcaccatttcatccactggc

SEQ ID NO: 3136081 - DNA, 25 bp, Homo sapien
tctctcctcgtctcctgcttttatt

SEQ ID NO: 3136082 - DNA, 25 bp, Homo sapien
tgtgactctctcctcgtctcctgct

SEQ ID NO: 3136083 - DNA, 25 bp, Homo sapien
cgtggtgtgactctctcctcgtctc

SEQ ID NO: 3136084 - DNA, 25 bp, Homo sapien
gactctctcctcgtctcctgctttt

SEQ ID NO: 3136085 - DNA, 25 bp, Homo sapien
gtgacacttttgatgcttgtcccgg

SEQ ID NO: 3136086 - DNA, 25 bp, Homo sapien
gacacttttgatgcttgtcccgggc

SEQ ID NO: 3136087 - DNA, 25 bp, Homo sapien
cacttttgatgcttgtcccgggccc

SEQ ID NO: 3136088 - DNA, 25 bp, Homo sapien
tcccgggccccagctcaactctctg

SEQ ID NO: 3136089 - DNA, 25 bp, Homo sapien
ccacagaaatgatgcagggtcctga

SEQ ID NO: 3136090 - DNA, 25 bp, Homo sapien
tcacccacagaaatgatgcagggtc

SEQ ID NO: 3136091 - DNA, 25 bp, Homo sapien
tccatcacccacagaaatgatgcag

SEQ ID NO: 3136092 - DNA, 25 bp, Homo sapien
cagaaatgatgcagggtcctgatga

SEQ ID NO: 3136093 - DNA, 25 bp, Homo sapien
ggagtctatttgcatgccacctaaa

SEQ ID NO: 3136094 - DNA, 25 bp, Homo sapien
tactaaggaggatatctagctggtc

SEQ ID NO: 3136095 - DNA, 25 bp, Homo sapien
ggtgatgaattgctctcggccgtca

SEQ ID NO: 3136096 - DNA, 25 bp, Homo sapien
aaacctgaatgcacgagtggtgatg

SEQ ID NO: 3136097 - DNA, 25 bp, Homo sapien
acccactgggtggtcgtctgctcag

SEQ ID NO: 3136098 - DNA, 25 bp, Homo sapien
gcagagaaatatgtggaccgtcccc

SEQ ID NO: 3136099 - DNA, 25 bp, Homo sapien
tccccagtggagatcagcttgaagg

SEQ ID NO: 3136100 - DNA, 25 bp, Homo sapien
tgtagtctacagagcgcctgtgctg

SEQ ID NO: 3136101 - DNA, 25 bp, Homo sapien
gatcaagacattggcagatttggta

SEQ ID NO: 3136102 - DNA, 25 bp, Homo sapien
gtatgtggcaagaacccactgcata

SEQ ID NO: 3136103 - DNA, 25 bp, Homo sapien
gctgtgtctatgtggtgaaagggca

SEQ ID NO: 3136104 - DNA, 25 bp, Homo sapien
tggcaagaacccactgcatagctgg

SEQ ID NO: 3136105 - DNA, 25 bp, Homo sapien
tttccttggtttgcagctcgacagt

SEQ ID NO: 3136106 - DNA, 25 bp, Homo sapien
acagtcgtgctgtgattcccttctc

SEQ ID NO: 3136107 - DNA, 25 bp, Homo sapien
tgcattcgatactgacttttctgag

SEQ ID NO: 3136108 - DNA, 25 bp, Homo sapien
cccagcagttcaggttattagccat

SEQ ID NO: 3136109 - DNA, 25 bp, Homo sapien
ttatagtcctctgcattatcaaccc

SEQ ID NO: 3136110 - DNA, 25 bp, Homo sapien
cagctccaatgttaacgatcctgga

SEQ ID NO: 3136111 - DNA, 25 bp, Homo sapien
catttatagtcctctgcattatcaa

SEQ ID NO: 3136112 - DNA, 25 bp, Homo sapien
aatgttaacgatcctggaaagccaa

SEQ ID NO: 3136113 - DNA, 25 bp, Homo sapien
ctaatgatgttgtgtctgaagttgc

SEQ ID NO: 3136114 - DNA, 25 bp, Homo sapien
tgtgtctgaagttgctcaatgtcct

SEQ ID NO: 3136115 - DNA, 25 bp, Homo sapien
cagccaggggactgtagagatccag

SEQ ID NO: 3136116 - DNA, 25 bp, Homo sapien
tgaagttgctcaatgtcctcttctg

SEQ ID NO: 3136117 - DNA, 25 bp, Homo sapien
tagtaggagaaaacatccaacgttg

SEQ ID NO: 3136118 - DNA, 25 bp, Homo sapien
tctctccagctgaccgactgtgcat

SEQ ID NO: 3136119 - DNA, 25 bp, Homo sapien
ttcccacttcaaatagtaggagaaa

SEQ ID NO: 3136120 - DNA, 25 bp, Homo sapien
acatccaacgttgttatctctccag

SEQ ID NO: 3136121 - DNA, 25 bp, Homo sapien
aagaggtctgaatcccttttctgat

SEQ ID NO: 3136122 - DNA, 25 bp, Homo sapien
cttccaagtaaagaggtctgaatcc

SEQ ID NO: 3136123 - DNA, 25 bp, Homo sapien
caagtaaagaggtctgaatcccttt

SEQ ID NO: 3136124 - DNA, 25 bp, Homo sapien
tctgatgattgggggagtccgccat

SEQ ID NO: 3136125 - DNA, 25 bp, Homo sapien
acagaagaagcaattgctgaattag

SEQ ID NO: 3136126 - DNA, 25 bp, Homo sapien
cagaagaagcaattgctgaattagg

SEQ ID NO: 3136127 - DNA, 25 bp, Homo sapien
aacagaagaagcaattgctgaatta

SEQ ID NO: 3136128 - DNA, 25 bp, Homo sapien
agaagaagcaattgctgaattaggg

SEQ ID NO: 3136129 - DNA, 25 bp, Homo sapien
tgagagaggctttcagagcactcag

SEQ ID NO: 3136130 - DNA, 25 bp, Homo sapien
ttctgtgcagcacaggcctcaattc

SEQ ID NO: 3136131 - DNA, 25 bp, Homo sapien
tttcagagcactcagaacttcttct

SEQ ID NO: 3136132 - DNA, 25 bp, Homo sapien
tgcagcacaggcctcaattctacct

SEQ ID NO: 3136133 - DNA, 25 bp, Homo sapien
agacattggttcagggatgccatcc

SEQ ID NO: 3136134 - DNA, 25 bp, Homo sapien
ttcttggtcctacccaccacagggc

SEQ ID NO: 3136135 - DNA, 25 bp, Homo sapien
tgagctcctcaagtaagtcaaagtc

SEQ ID NO: 3136136 - DNA, 25 bp, Homo sapien
aacagtaacttctcactttcagaca

SEQ ID NO: 3136137 - DNA, 25 bp, Homo sapien
agcagggtgtggagggaagctcaag

SEQ ID NO: 3136138 - DNA, 25 bp, Homo sapien
tgcaggtaaataactgcattgcaaa

SEQ ID NO: 3136139 - DNA, 25 bp, Homo sapien
aatgtggtgtgaagggggcacttct

SEQ ID NO: 3136140 - DNA, 25 bp, Homo sapien
ccgtggcactgctgtcattgggaat

SEQ ID NO: 3136141 - DNA, 25 bp, Homo sapien
tggtttataggttaattctcccatc

SEQ ID NO: 3136142 - DNA, 25 bp, Homo sapien
ttctcccatcgactgaagaggctgc

SEQ ID NO: 3136143 - DNA, 25 bp, Homo sapien
ctgtatccggtaataaggcccttgg

SEQ ID NO: 3136144 - DNA, 25 bp, Homo sapien
gaggctgcaagctgtatccggtaat

SEQ ID NO: 3136145 - DNA, 25 bp, Homo sapien
ccctgaagtgacccaaggtgcctgg

SEQ ID NO: 3136146 - DNA, 25 bp, Homo sapien
cctgaagtgacccaaggtgcctgga

SEQ ID NO: 3136147 - DNA, 25 bp, Homo sapien
ttcatctgtgcggtctccttggagt

SEQ ID NO: 3136148 - DNA, 25 bp, Homo sapien
tccagggtgcggcatacaaatgagc

SEQ ID NO: 3136149 - DNA, 25 bp, Homo sapien
cgggtttggaacatttgggcgcatc

SEQ ID NO: 3136150 - DNA, 25 bp, Homo sapien
ctataaatatctcgcctcctgagcg

SEQ ID NO: 3136151 - DNA, 25 bp, Homo sapien
cgcacccgaatgaatgacggccggg

SEQ ID NO: 3136152 - DNA, 25 bp, Homo sapien
cctggtcccaaatgtgattcccgca

SEQ ID NO: 3136153 - DNA, 25 bp, Homo sapien
agggcttcctggtcccaaatgtgat

SEQ ID NO: 3136154 - DNA, 25 bp, Homo sapien
tgtgattcccgcacccgaatgaatg

SEQ ID NO: 3136155 - DNA, 25 bp, Homo sapien
tccgagcctgcctcgaggtttccta

SEQ ID NO: 3136156 - DNA, 25 bp, Homo sapien
ttaatccgagcctgcctcgaggttt

SEQ ID NO: 3136157 - DNA, 25 bp, Homo sapien
cgagcctgcctcgaggtttcctata

SEQ ID NO: 3136158 - DNA, 25 bp, Homo sapien
agcctgcctcgaggtttcctataaa

SEQ ID NO: 3136159 - DNA, 25 bp, Homo sapien
ttcaggtttctagcactttcatcta

SEQ ID NO: 3136160 - DNA, 25 bp, Homo sapien
cactttcatctatgtcttttatagc

SEQ ID NO: 3136161 - DNA, 25 bp, Homo sapien
ttcctcctctgactaaaggaaatgc

SEQ ID NO: 3136162 - DNA, 25 bp, Homo sapien
cacttcctcctctgactaaaggaaa

SEQ ID NO: 3136163 - DNA, 25 bp, Homo sapien
ggcagtgagcgtgtgaggctctgac

SEQ ID NO: 3136164 - DNA, 25 bp, Homo sapien
cacatggcccatctagagccagtga

SEQ ID NO: 3136165 - DNA, 25 bp, Homo sapien
tggcttaggactgcatcacatggcc

SEQ ID NO: 3136166 - DNA, 25 bp, Homo sapien
cattgttcttgaccaatctccctgg

SEQ ID NO: 3136167 - DNA, 25 bp, Homo sapien
tctgtggctcccaaaaggaccgaca

SEQ ID NO: 3136168 - DNA, 25 bp, Homo sapien
tgtggctcccaaaaggaccgacagg

SEQ ID NO: 3136169 - DNA, 25 bp, Homo sapien
tggatctgtggctcccaaaaggacc

SEQ ID NO: 3136170 - DNA, 25 bp, Homo sapien
ggcagacaaggagccgggtgggctt

SEQ ID NO: 3136171 - DNA, 25 bp, Homo sapien
caacagcaggggaaaggctctcggc

SEQ ID NO: 3136172 - DNA, 25 bp, Homo sapien
ctgagaacacaacagcaggggaaag

SEQ ID NO: 3136173 - DNA, 25 bp, Homo sapien
cagcaggggaaaggctctcggcccc

SEQ ID NO: 3136174 - DNA, 25 bp, Homo sapien
agaacacaacagcaggggaaaggct

SEQ ID NO: 3136175 - DNA, 25 bp, Homo sapien
cttcatcttgctttgattgcgaaca

SEQ ID NO: 3136176 - DNA, 25 bp, Homo sapien
gattttccatacgaaggcttctctc

SEQ ID NO: 3136177 - DNA, 25 bp, Homo sapien
gagcaaatggtttgtcctcaatgct

SEQ ID NO: 3136178 - DNA, 25 bp, Homo sapien
ttgattgcgaacaaagccctgtctt

SEQ ID NO: 3136179 - DNA, 25 bp, Homo sapien
tcaatagtaagctcagctggttcca

SEQ ID NO: 3136180 - DNA, 25 bp, Homo sapien
ctctagatatggcactgggagttgg

SEQ ID NO: 3136181 - DNA, 25 bp, Homo sapien
gcagaaatatgtctgcggctgcctc

SEQ ID NO: 3136182 - DNA, 25 bp, Homo sapien
tacgctccaggatccttgagtgaca

SEQ ID NO: 3136183 - DNA, 25 bp, Homo sapien
agaggactgctgactcgcactgacg

SEQ ID NO: 3136184 - DNA, 25 bp, Homo sapien
ttgagccaaagaggatgcagggctc

SEQ ID NO: 3136185 - DNA, 25 bp, Homo sapien
tcatcagctggaaccttcacacctg

SEQ ID NO: 3136186 - DNA, 25 bp, Homo sapien
ctcttgggacccaagagcctgagta

SEQ ID NO: 3136187 - DNA, 25 bp, Homo sapien
aaatcaaaatgtgtctccacaaaac

SEQ ID NO: 3136188 - DNA, 25 bp, Homo sapien
tctccatcgtagaaggattccagcc

SEQ ID NO: 3136189 - DNA, 25 bp, Homo sapien
aaaacttagctctcgggctctgctg

SEQ ID NO: 3136190 - DNA, 25 bp, Homo sapien
gcctgctggaactcttgctacacct

SEQ ID NO: 3136191 - DNA, 25 bp, Homo sapien
gcagtggactccaccccggagttac

SEQ ID NO: 3136192 - DNA, 25 bp, Homo sapien
atggcagcagtggactccaccccgg

SEQ ID NO: 3136193 - DNA, 25 bp, Homo sapien
ggttcatggcagcagtggactccac

SEQ ID NO: 3136194 - DNA, 25 bp, Homo sapien
ctgtaagtgggagggggttcatggc

SEQ ID NO: 3136195 - DNA, 25 bp, Homo sapien
tgctgacagtcaaaaacagcaggtt

SEQ ID NO: 3136196 - DNA, 25 bp, Homo sapien
tggggagcgataggaaagctgggct

SEQ ID NO: 3136197 - DNA, 25 bp, Homo sapien
tgctgtcgggttcagattggctttt

SEQ ID NO: 3136198 - DNA, 25 bp, Homo sapien
ttgtgctgacagtcaaaaacagcag

SEQ ID NO: 3136199 - DNA, 25 bp, Homo sapien
ttgatgtgctgttccgtccttgcct

SEQ ID NO: 3136200 - DNA, 25 bp, Homo sapien
gtccttgcctggtgactcagacctt

SEQ ID NO: 3136201 - DNA, 25 bp, Homo sapien
tccttgcctggtgactcagaccttc

SEQ ID NO: 3136202 - DNA, 25 bp, Homo sapien
gatgtgctgttccgtccttgcctgg

SEQ ID NO: 3136203 - DNA, 25 bp, Homo sapien
ctatgcttaactgtataaccgtggg

SEQ ID NO: 3136204 - DNA, 25 bp, Homo sapien
tagtaaacagacctaacactcactg

SEQ ID NO: 3136205 - DNA, 25 bp, Homo sapien
tctgcagttaaagctaaggccttag

SEQ ID NO: 3136206 - DNA, 25 bp, Homo sapien
gcccttttggtatgtgcgcatgtaa

SEQ ID NO: 3136207 - DNA, 25 bp, Homo sapien
tctggtattttggtgacgttgtaca

SEQ ID NO: 3136208 - DNA, 25 bp, Homo sapien
aaacatgaggtcagacatgtgtaag

SEQ ID NO: 3136209 - DNA, 25 bp, Homo sapien
tacattgtcccagactgtttgtaaa

SEQ ID NO: 3136210 - DNA, 25 bp, Homo sapien
gtgtaaggtagacgcctatggccac

SEQ ID NO: 3136211 - DNA, 25 bp, Homo sapien
cttctggagaaggtaccgagctgtc

SEQ ID NO: 3136212 - DNA, 25 bp, Homo sapien
tcttcgctgcttgagactagtccca

SEQ ID NO: 3136213 - DNA, 25 bp, Homo sapien
ttggcttgccctagctgaccgactg

SEQ ID NO: 3136214 - DNA, 25 bp, Homo sapien
ctgtttctaacttcgggatgcggaa

SEQ ID NO: 3136215 - DNA, 25 bp, Homo sapien
ctgcttcttactctgctcgcccggt

SEQ ID NO: 3136216 - DNA, 25 bp, Homo sapien
ttaactagacgaatcagccgcagcg

SEQ ID NO: 3136217 - DNA, 25 bp, Homo sapien
caccagggtttaactagacgaatca

SEQ ID NO: 3136218 - DNA, 25 bp, Homo sapien
cggtctgcacaagtgcaaaatcctt

SEQ ID NO: 3136219 - DNA, 25 bp, Homo sapien
catcaaggggttctaggcaaagttt

SEQ ID NO: 3136220 - DNA, 25 bp, Homo sapien
caagcttcaatccatttcatcaagg

SEQ ID NO: 3136221 - DNA, 25 bp, Homo sapien
tccatgaatcagctttttattgggc

SEQ ID NO: 3136222 - DNA, 25 bp, Homo sapien
cttccagacaagttggcgtccttag

SEQ ID NO: 3136223 - DNA, 25 bp, Homo sapien
aatcacaagttacaagccaggaaac

SEQ ID NO: 3136224 - DNA, 25 bp, Homo sapien
ataatcacaagttacaagccaggaa

SEQ ID NO: 3136225 - DNA, 25 bp, Homo sapien
atcacaagttacaagccaggaaaca

SEQ ID NO: 3136226 - DNA, 25 bp, Homo sapien
taatcacaagttacaagccaggaaa

SEQ ID NO: 3136227 - DNA, 25 bp, Homo sapien
tcagaattgcagctttcgacacaga

SEQ ID NO: 3136228 - DNA, 25 bp, Homo sapien
tgaccagtgaaagaagctgttgaag

SEQ ID NO: 3136229 - DNA, 25 bp, Homo sapien
tgagccactctatgattagaaagcc

SEQ ID NO: 3136230 - DNA, 25 bp, Homo sapien
tcgacacagataagagaggaaagcc

SEQ ID NO: 3136231 - DNA, 25 bp, Homo sapien
tacattcctggttaaaacagtatgt

SEQ ID NO: 3136232 - DNA, 25 bp, Homo sapien
gtatttttcatggttagtaatgtca

SEQ ID NO: 3136233 - DNA, 25 bp, Homo sapien
gtagtatttttcatggttagtaatg

SEQ ID NO: 3136234 - DNA, 25 bp, Homo sapien
cattcctggttaaaacagtatgtaa

SEQ ID NO: 3136235 - DNA, 25 bp, Homo sapien
tcaaaactaggttcttacttagaca

SEQ ID NO: 3136236 - DNA, 25 bp, Homo sapien
gggccagaccttgcagggccttata

SEQ ID NO: 3136237 - DNA, 25 bp, Homo sapien
agctgccacgcaaaatgaagagaac

SEQ ID NO: 3136238 - DNA, 25 bp, Homo sapien
agagggaggctgatccttgaaatca

SEQ ID NO: 3136239 - DNA, 25 bp, Homo sapien
cgggagacggagattgcagcaagct

SEQ ID NO: 3136240 - DNA, 25 bp, Homo sapien
ccgggagacggagattgcagcaagc

SEQ ID NO: 3136241 - DNA, 25 bp, Homo sapien
tgagatcgtaccactaccatccagc

SEQ ID NO: 3136242 - DNA, 25 bp, Homo sapien
accatccagcctgagtgtcagagta

SEQ ID NO: 3136243 - DNA, 25 bp, Homo sapien
tcttgactgggcttgcgtgtgaatc

SEQ ID NO: 3136244 - DNA, 25 bp, Homo sapien
agaaatgttccaagcgcagtcagcc

SEQ ID NO: 3136245 - DNA, 25 bp, Homo sapien
gactgggccacgtgtttcacagcat

SEQ ID NO: 3136246 - DNA, 25 bp, Homo sapien
cagcatccacctggctagagtaggc

SEQ ID NO: 3136247 - DNA, 25 bp, Homo sapien
acagcgtcaacatgccctgggtgca

SEQ ID NO: 3136248 - DNA, 25 bp, Homo sapien
cacattgcactatttcagcaggaaa

SEQ ID NO: 3136249 - DNA, 25 bp, Homo sapien
ttaaaagctagtgggccagcctcct

SEQ ID NO: 3136250 - DNA, 25 bp, Homo sapien
ttccaaggctcactgttaaccacat

SEQ ID NO: 3136251 - DNA, 25 bp, Homo sapien
aatgtcacggcgctttaacttgctt

SEQ ID NO: 3136252 - DNA, 25 bp, Homo sapien
cacggcgctttaacttgcttttcag

SEQ ID NO: 3136253 - DNA, 25 bp, Homo sapien
gaagcaatgtcacggcgctttaact

SEQ ID NO: 3136254 - DNA, 25 bp, Homo sapien
ttggaagcaatgtcacggcgcttta

SEQ ID NO: 3136255 - DNA, 25 bp, Homo sapien
ttaaaaggtctcttttgtgatgcct

SEQ ID NO: 3136256 - DNA, 25 bp, Homo sapien
tattctacattgatgtttcagagga

SEQ ID NO: 3136257 - DNA, 25 bp, Homo sapien
tggtgattggaaagctgatacatga

SEQ ID NO: 3136258 - DNA, 25 bp, Homo sapien
gtcaaaatgcccaatgttctttgta

SEQ ID NO: 3136259 - DNA, 25 bp, Homo sapien
taaattccccttagttagtgccatc

SEQ ID NO: 3136260 - DNA, 25 bp, Homo sapien
ccatctagaagaggcccttcaatct

SEQ ID NO: 3136261 - DNA, 25 bp, Homo sapien
tctaaattccccttagttagtgcca

SEQ ID NO: 3136262 - DNA, 25 bp, Homo sapien
tagtgccatctagaagaggcccttc

SEQ ID NO: 3136263 - DNA, 25 bp, Homo sapien
gaagttacacagcacctcatctagt

SEQ ID NO: 3136264 - DNA, 25 bp, Homo sapien
cctcatctagttcagttaactcttt

SEQ ID NO: 3136265 - DNA, 25 bp, Homo sapien
ttggatgtgaaccaattatcgagta

SEQ ID NO: 3136266 - DNA, 25 bp, Homo sapien
cttccctctggcctgcagaagttac

SEQ ID NO: 3136267 - DNA, 25 bp, Homo sapien
tcttctgctctcataaggatacgcc

SEQ ID NO: 3136268 - DNA, 25 bp, Homo sapien
tatttggtggctgcagacatctttt

SEQ ID NO: 3136269 - DNA, 25 bp, Homo sapien
ggtaatgacctaggtaatccagaat

SEQ ID NO: 3136270 - DNA, 25 bp, Homo sapien
agcgaactgccttgattttgaaaca

SEQ ID NO: 3136271 - DNA, 25 bp, Homo sapien
ttcagtcctatgttccctggtttcc

SEQ ID NO: 3136272 - DNA, 25 bp, Homo sapien
ctctgcctcttgaatgactatctgc

SEQ ID NO: 3136273 - DNA, 25 bp, Homo sapien
gactatctgctaacaccatctctgc

SEQ ID NO: 3136274 - DNA, 25 bp, Homo sapien
tgctcctatagagatttcagtccta

SEQ ID NO: 3136275 - DNA, 25 bp, Homo sapien
gaacatcataccgtgcaagcagcag

SEQ ID NO: 3136276 - DNA, 25 bp, Homo sapien
tagtaggccaatagtacacctcccc

SEQ ID NO: 3136277 - DNA, 25 bp, Homo sapien
tgggcctgacattcgtgttaacacg

SEQ ID NO: 3136278 - DNA, 25 bp, Homo sapien
catctggacgtgttgtgactagcac

SEQ ID NO: 3136279 - DNA, 25 bp, Homo sapien
tgaagatgattaaaccggctgagaa

SEQ ID NO: 3136280 - DNA, 25 bp, Homo sapien
tgtgtaacaccctcaattaacatga

SEQ ID NO: 3136281 - DNA, 25 bp, Homo sapien
gaatgtcctacaaatagtcctgccc

SEQ ID NO: 3136282 - DNA, 25 bp, Homo sapien
tgattaaaggctaactcagagtaga

SEQ ID NO: 3136283 - DNA, 25 bp, Homo sapien
atgcagttataaattatgtgcagtt

SEQ ID NO: 3136284 - DNA, 25 bp, Homo sapien
gcccagcccggcaattacagtttct

SEQ ID NO: 3136285 - DNA, 25 bp, Homo sapien
cgtgcccagcccggcaattacagtt

SEQ ID NO: 3136286 - DNA, 25 bp, Homo sapien
cagcccggcaattacagtttctttt

SEQ ID NO: 3136287 - DNA, 25 bp, Homo sapien
gatgccagggattaacctacccaga

SEQ ID NO: 3136288 - DNA, 25 bp, Homo sapien
gactttggagcctgacagatcaaca

SEQ ID NO: 3136289 - DNA, 25 bp, Homo sapien
tgcagcaaagcacataacacagggt

SEQ ID NO: 3136290 - DNA, 25 bp, Homo sapien
cagaacctggtctgctaaatggagg

SEQ ID NO: 3136291 - DNA, 25 bp, Homo sapien
gtatctgccatagctattttatagc

SEQ ID NO: 3136292 - DNA, 25 bp, Homo sapien
gtaagtaacttactcactttctggc

SEQ ID NO: 3136293 - DNA, 25 bp, Homo sapien
gatcaggatcagtattaagtgaaaa

SEQ ID NO: 3136294 - DNA, 25 bp, Homo sapien
aaatggttatagacaagcaaccaac

SEQ ID NO: 3136295 - DNA, 25 bp, Homo sapien
tggcacatatctctagtggacacag

SEQ ID NO: 3136296 - DNA, 25 bp, Homo sapien
tatttagctttggtagatatttcca

SEQ ID NO: 3136297 - DNA, 25 bp, Homo sapien
tatttcaagctctgaacatcccaac

SEQ ID NO: 3136298 - DNA, 25 bp, Homo sapien
gatatttccattatcgtctacgaag

SEQ ID NO: 3136299 - DNA, 25 bp, Homo sapien
tagatatagccacactccgggagag

SEQ ID NO: 3136300 - DNA, 25 bp, Homo sapien
caggaagttggctaacacagaggaa

SEQ ID NO: 3136301 - DNA, 25 bp, Homo sapien
tagttagtcctacgctgaatccaaa

SEQ ID NO: 3136302 - DNA, 25 bp, Homo sapien
ttcagttgcacagcggaagaggaaa

SEQ ID NO: 3136303 - DNA, 25 bp, Homo sapien
taagtcccagcaattatctttggtt

SEQ ID NO: 3136304 - DNA, 25 bp, Homo sapien
ggtgctatggttttgcaattgcgaa

SEQ ID NO: 3136305 - DNA, 25 bp, Homo sapien
tcagagtcagacgttgttaacggtc

SEQ ID NO: 3136306 - DNA, 25 bp, Homo sapien
tccaggtcaccgtgaatgccgttaa

SEQ ID NO: 3136307 - DNA, 25 bp, Homo sapien
gtggctaagtagtagtccatcatat

SEQ ID NO: 3136308 - DNA, 25 bp, Homo sapien
gaatcagctacaaggacaaactcta

SEQ ID NO: 3136309 - DNA, 25 bp, Homo sapien
catcaaattgatgggactggacctc

SEQ ID NO: 3136310 - DNA, 25 bp, Homo sapien
gaggaggccattaaggcagcccttt

SEQ ID NO: 3136311 - DNA, 25 bp, Homo sapien
ccttttgtttcctgtcatactctga

SEQ ID NO: 3136312 - DNA, 25 bp, Homo sapien
tctcatggcaaggtatagtagtatc

SEQ ID NO: 3136313 - DNA, 25 bp, Homo sapien
ctttcattccgagcatgtgtgggtc

SEQ ID NO: 3136314 - DNA, 25 bp, Homo sapien
caattagctatgatgtgggaggaca

SEQ ID NO: 3136315 - DNA, 25 bp, Homo sapien
cactccataggttagcccaagggct

SEQ ID NO: 3136316 - DNA, 25 bp, Homo sapien
actgcttaacaggaagatgagcttg

SEQ ID NO: 3136317 - DNA, 25 bp, Homo sapien
ttcttctgatcctgaagagattagc

SEQ ID NO: 3136318 - DNA, 25 bp, Homo sapien
aaatttacatcctgtagagactcct

SEQ ID NO: 3136319 - DNA, 25 bp, Homo sapien
tttacatcctgtagagactcctctt

SEQ ID NO: 3136320 - DNA, 25 bp, Homo sapien
ttctgatcctgaagagattagctgg

SEQ ID NO: 3136321 - DNA, 25 bp, Homo sapien
tgctgcattgcttggacgatattca

SEQ ID NO: 3136322 - DNA, 25 bp, Homo sapien
tgcttggacgatattcaaagtgata

SEQ ID NO: 3136323 - DNA, 25 bp, Homo sapien
caaagtgatatgagttttctccacc

SEQ ID NO: 3136324 - DNA, 25 bp, Homo sapien
cacaggtgctgcattgcttggacga

SEQ ID NO: 3136325 - DNA, 25 bp, Homo sapien
gaaggactcacagggctcagatata

SEQ ID NO: 3136326 - DNA, 25 bp, Homo sapien
gaagtgcccaagacaaccacaaggt

SEQ ID NO: 3136327 - DNA, 25 bp, Homo sapien
tgcggatggtaacgtagacacactt

SEQ ID NO: 3136328 - DNA, 25 bp, Homo sapien
tcatcacggactcagtacccagggt

SEQ ID NO: 3136329 - DNA, 25 bp, Homo sapien
gatgccagggagatgcaacttccca

SEQ ID NO: 3136330 - DNA, 25 bp, Homo sapien
tactaaagtcatgctgtcacaggcc

SEQ ID NO: 3136331 - DNA, 25 bp, Homo sapien
gcagagtatgacctttccgtggcac

SEQ ID NO: 3136332 - DNA, 25 bp, Homo sapien
catacattggcacctagggtcaggg

SEQ ID NO: 3136333 - DNA, 25 bp, Homo sapien
gggtagaacggacgccacctcacca

SEQ ID NO: 3136334 - DNA, 25 bp, Homo sapien
ctgcatggcgcggaacgggagcgac

SEQ ID NO: 3136335 - DNA, 25 bp, Homo sapien
cggacgccacctcaccagcgcacgg

SEQ ID NO: 3136336 - DNA, 25 bp, Homo sapien
catggcgcggaacgggagcgaccgg

SEQ ID NO: 3136337 - DNA, 25 bp, Homo sapien
gagcagccaggtgccagagactggg

SEQ ID NO: 3136338 - DNA, 25 bp, Homo sapien
cagagcagccaggtgccagagactg

SEQ ID NO: 3136339 - DNA, 25 bp, Homo sapien
atcagagcagccaggtgccagagac

SEQ ID NO: 3136340 - DNA, 25 bp, Homo sapien
ctgagaccagatcagagcagccagg

SEQ ID NO: 3136341 - DNA, 25 bp, Homo sapien
tgcctggggcgcctctccgcgggtg

SEQ ID NO: 3136342 - DNA, 25 bp, Homo sapien
atccgcggtagcagcggctcccgct

SEQ ID NO: 3136343 - DNA, 25 bp, Homo sapien
ggcccaggcgatccgcggtagcagc

SEQ ID NO: 3136344 - DNA, 25 bp, Homo sapien
cgcggacgccaaccggtcgggctcg

SEQ ID NO: 3136345 - DNA, 25 bp, Homo sapien
gggcagctcctcgtcgccggcctcg

SEQ ID NO: 3136346 - DNA, 25 bp, Homo sapien
gcctcgccctcctccccggcagcgt

SEQ ID NO: 3136347 - DNA, 25 bp, Homo sapien
cgggaggggcagctcctcgtcgccg

SEQ ID NO: 3136348 - DNA, 25 bp, Homo sapien
cgccctcctccccggcagcgtccag

SEQ ID NO: 3136349 - DNA, 25 bp, Homo sapien
atcttagccaaaagacagagaagca

SEQ ID NO: 3136350 - DNA, 25 bp, Homo sapien
aggtattaaactggtaagaacagat

SEQ ID NO: 3136351 - DNA, 25 bp, Homo sapien
actacacttgatcttagccaaaaga

SEQ ID NO: 3136352 - DNA, 25 bp, Homo sapien
ttagccaaaagacagagaagcaatc

SEQ ID NO: 3136353 - DNA, 25 bp, Homo sapien
ttaggatccttcacaaagtaacttc

SEQ ID NO: 3136354 - DNA, 25 bp, Homo sapien
aagtaacttccacttgaaccttgag

SEQ ID NO: 3136355 - DNA, 25 bp, Homo sapien
tatcggcaaattctgggtcatccaa

SEQ ID NO: 3136356 - DNA, 25 bp, Homo sapien
tctgctctcagcataatatcggcaa

SEQ ID NO: 3136357 - DNA, 25 bp, Homo sapien
ttgttgtccacaagataggcacccg

SEQ ID NO: 3136358 - DNA, 25 bp, Homo sapien
tttaggtacaatgctcagatgaagc

SEQ ID NO: 3136359 - DNA, 25 bp, Homo sapien
tggattgagttgaccataaggctct

SEQ ID NO: 3136360 - DNA, 25 bp, Homo sapien
gaaaggtacccctgattaggaatca

SEQ ID NO: 3136361 - DNA, 25 bp, Homo sapien
cacggtcaatcgcattatagttaaa

SEQ ID NO: 3136362 - DNA, 25 bp, Homo sapien
gttaaatgtctcactgacaagccaa

SEQ ID NO: 3136363 - DNA, 25 bp, Homo sapien
ggagggagtcctatcctatgaaact

SEQ ID NO: 3136364 - DNA, 25 bp, Homo sapien
gcctcttgattttgcacggtcaatc

SEQ ID NO: 3136365 - DNA, 25 bp, Homo sapien
catccctcaggtttacttaaaggtg

SEQ ID NO: 3136366 - DNA, 25 bp, Homo sapien
gaagattatctgagcccacgaggtc

SEQ ID NO: 3136367 - DNA, 25 bp, Homo sapien
agtaagccctgttcacaacactgta

SEQ ID NO: 3136368 - DNA, 25 bp, Homo sapien
gagcttagagtaaggaacttggcca

SEQ ID NO: 3136369 - DNA, 25 bp, Homo sapien
ttaaaaataggatgaggccaggtgt

SEQ ID NO: 3136370 - DNA, 25 bp, Homo sapien
actttgggaggctgaggtgggtgga

SEQ ID NO: 3136371 - DNA, 25 bp, Homo sapien
ggtggctcacacctgtaatcccagc

SEQ ID NO: 3136372 - DNA, 25 bp, Homo sapien
tcacttgaggccaggagtttgagac

SEQ ID NO: 3136373 - DNA, 25 bp, Homo sapien
aatattcagcctccttgtaaccttc

SEQ ID NO: 3136374 - DNA, 25 bp, Homo sapien
tgtaatccaaaataactaatctttc

SEQ ID NO: 3136375 - DNA, 25 bp, Homo sapien
tttcctaagccaatattcagcctcc

SEQ ID NO: 3136376 - DNA, 25 bp, Homo sapien
agggtcagcttcaaatttcctaagc

SEQ ID NO: 3136377 - DNA, 25 bp, Homo sapien
gtgaacaaatgagagaacttcaata

SEQ ID NO: 3136378 - DNA, 25 bp, Homo sapien
tgaacaaatgagagaacttcaatac

SEQ ID NO: 3136379 - DNA, 25 bp, Homo sapien
tctaggagcctgctatgagtcagaa

SEQ ID NO: 3136380 - DNA, 25 bp, Homo sapien
tctgcccaggagagtcaatactaca

SEQ ID NO: 3136381 - DNA, 25 bp, Homo sapien
aaagactggacatccctggtctacg

SEQ ID NO: 3136382 - DNA, 25 bp, Homo sapien
atatctgactttgccctgcccctag

SEQ ID NO: 3136383 - DNA, 25 bp, Homo sapien
tctgcttttcgtatctgactaacca

SEQ ID NO: 3136384 - DNA, 25 bp, Homo sapien
acatttctgcttttcgtatctgact

SEQ ID NO: 3136385 - DNA, 25 bp, Homo sapien
ttcgtatctgactaaccaattatca

SEQ ID NO: 3136386 - DNA, 25 bp, Homo sapien
gcttttcgtatctgactaaccaatt

SEQ ID NO: 3136387 - DNA, 25 bp, Homo sapien
gctagaccattatcaattgcagcta

SEQ ID NO: 3136388 - DNA, 25 bp, Homo sapien
tttaaaaggaaatgctagaccatta

SEQ ID NO: 3136389 - DNA, 25 bp, Homo sapien
ggaaatgctagaccattatcaattg

SEQ ID NO: 3136390 - DNA, 25 bp, Homo sapien
gaccattatcaattgcagctatttt

SEQ ID NO: 3136391 - DNA, 25 bp, Homo sapien
gactctacagaaggttctaaatact

SEQ ID NO: 3136392 - DNA, 25 bp, Homo sapien
tctacagaaggttctaaatactcac

SEQ ID NO: 3136393 - DNA, 25 bp, Homo sapien
atagactctacagaaggttctaaat

SEQ ID NO: 3136394 - DNA, 25 bp, Homo sapien
ctctacagaaggttctaaatactca

SEQ ID NO: 3136395 - DNA, 25 bp, Homo sapien
cttttgcttgaggaagccaagccca

SEQ ID NO: 3136396 - DNA, 25 bp, Homo sapien
gtcagaaatatatggtagaatcaaa

SEQ ID NO: 3136397 - DNA, 25 bp, Homo sapien
agggaacttttgcttgaggaagcca

SEQ ID NO: 3136398 - DNA, 25 bp, Homo sapien
aacttttgcttgaggaagccaagcc

SEQ ID NO: 3136399 - DNA, 25 bp, Homo sapien
cacataaatcttgcacaaagttcat

SEQ ID NO: 3136400 - DNA, 25 bp, Homo sapien
cttcacataaatcttgcacaaagtt

SEQ ID NO: 3136401 - DNA, 25 bp, Homo sapien
ttcacataaatcttgcacaaagttc

SEQ ID NO: 3136402 - DNA, 25 bp, Homo sapien
tcacataaatcttgcacaaagttca

SEQ ID NO: 3136403 - DNA, 25 bp, Homo sapien
ctcatcacagacatctgactttcaa

SEQ ID NO: 3136404 - DNA, 25 bp, Homo sapien
ccctcatcacagacatctgactttc

SEQ ID NO: 3136405 - DNA, 25 bp, Homo sapien
ctgacccctcatcacagacatctga

SEQ ID NO: 3136406 - DNA, 25 bp, Homo sapien
gacccctcatcacagacatctgact

SEQ ID NO: 3136407 - DNA, 25 bp, Homo sapien
tcccacaccttcttagacaggcttt

SEQ ID NO: 3136408 - DNA, 25 bp, Homo sapien
cacatctttgtaacaggcctcagaa

SEQ ID NO: 3136409 - DNA, 25 bp, Homo sapien
gaactggaacactcccacaccttct

SEQ ID NO: 3136410 - DNA, 25 bp, Homo sapien
gtaacaggcctcagaactggaacac

SEQ ID NO: 3136411 - DNA, 25 bp, Homo sapien
cgcctggcccaatacctgatttttt

SEQ ID NO: 3136412 - DNA, 25 bp, Homo sapien
cctggcccaatacctgattttttag

SEQ ID NO: 3136413 - DNA, 25 bp, Homo sapien
ctggcccaatacctgattttttaga

SEQ ID NO: 3136414 - DNA, 25 bp, Homo sapien
gcccaatacctgattttttagatct

SEQ ID NO: 3136415 - DNA, 25 bp, Homo sapien
acggaagttgctctacaaattatta

SEQ ID NO: 3136416 - DNA, 25 bp, Homo sapien
taggaaaacggaagttgctctacaa

SEQ ID NO: 3136417 - DNA, 25 bp, Homo sapien
tagttacagaaattgcataaattat

SEQ ID NO: 3136418 - DNA, 25 bp, Homo sapien
agtataggaaaacggaagttgctct

SEQ ID NO: 3136419 - DNA, 25 bp, Homo sapien
agtttttgtactttgtggagagaca

SEQ ID NO: 3136420 - DNA, 25 bp, Homo sapien
aggctcgagagatccacctgtctca

SEQ ID NO: 3136421 - DNA, 25 bp, Homo sapien
ctaggctcgagagatccacctgtct

SEQ ID NO: 3136422 - DNA, 25 bp, Homo sapien
agtgcagagtgcaatcacagtgcac

SEQ ID NO: 3136423 - DNA, 25 bp, Homo sapien
ggtggacaatccgaccctgacttcc

SEQ ID NO: 3136424 - DNA, 25 bp, Homo sapien
gcaattgacagtctgggtaaaggaa

SEQ ID NO: 3136425 - DNA, 25 bp, Homo sapien
tatctgtactagctggaaaggactc

SEQ ID NO: 3136426 - DNA, 25 bp, Homo sapien
ggtaaaggaattgctcaggtggaca

SEQ ID NO: 3136427 - DNA, 25 bp, Homo sapien
tagcaactggagctcctaacagcag

SEQ ID NO: 3136428 - DNA, 25 bp, Homo sapien
taaattgaacaaggccagtactctg

SEQ ID NO: 3136429 - DNA, 25 bp, Homo sapien
gagcaatttcagacgtaggcatcct

SEQ ID NO: 3136430 - DNA, 25 bp, Homo sapien
tgaagaacgtatgacctaggacccc

SEQ ID NO: 3136431 - DNA, 25 bp, Homo sapien
tacaaccaatgtactctgacttgtg

SEQ ID NO: 3136432 - DNA, 25 bp, Homo sapien
ggtatggccagaccttttgcaaata

SEQ ID NO: 3136433 - DNA, 25 bp, Homo sapien
caactgtacttttctggtatggcca

SEQ ID NO: 3136434 - DNA, 25 bp, Homo sapien
acctttagtctaccacatttgtcac

SEQ ID NO: 3136435 - DNA, 25 bp, Homo sapien
atgatagtttggcatcatttatagt

SEQ ID NO: 3136436 - DNA, 25 bp, Homo sapien
tgatagtttggcatcatttatagta

SEQ ID NO: 3136437 - DNA, 25 bp, Homo sapien
gaaaatgatagtttggcatcattta

SEQ ID NO: 3136438 - DNA, 25 bp, Homo sapien
aaatgatagtttggcatcatttata

SEQ ID NO: 3136439 - DNA, 25 bp, Homo sapien
aattccatatagtacagtacttcaa

SEQ ID NO: 3136440 - DNA, 25 bp, Homo sapien
tcacccaggctggaaggcagtggtg

SEQ ID NO: 3136441 - DNA, 25 bp, Homo sapien
tttgtttgagacagaatctactctg

SEQ ID NO: 3136442 - DNA, 25 bp, Homo sapien
cctccctcctgggttcaataattct

SEQ ID NO: 3136443 - DNA, 25 bp, Homo sapien
gggctgtgaaaccatacgtgtgaga

SEQ ID NO: 3136444 - DNA, 25 bp, Homo sapien
caaagtatgtcacttcaggcaaggt

SEQ ID NO: 3136445 - DNA, 25 bp, Homo sapien
gagactcgcagaggtaatccaacag

SEQ ID NO: 3136446 - DNA, 25 bp, Homo sapien
cctgccctcccgtttacaaagtatg

SEQ ID NO: 3136447 - DNA, 25 bp, Homo sapien
tcccgagcttccccggcaccctgcg

SEQ ID NO: 3136448 - DNA, 25 bp, Homo sapien
gagcttccccggcaccctgcgctgc

SEQ ID NO: 3136449 - DNA, 25 bp, Homo sapien
cctccacggcttcaaacccattcct

SEQ ID NO: 3136450 - DNA, 25 bp, Homo sapien
ctctgcctccacggcttcaaaccca

SEQ ID NO: 3136451 - DNA, 25 bp, Homo sapien
gcaggatccaaaggaagcaccacct

SEQ ID NO: 3136452 - DNA, 25 bp, Homo sapien
acggcaggatccaaaggaagcacca

SEQ ID NO: 3136453 - DNA, 25 bp, Homo sapien
aggatccaaaggaagcaccacctcc

SEQ ID NO: 3136454 - DNA, 25 bp, Homo sapien
ggacggcaggatccaaaggaagcac

SEQ ID NO: 3136455 - DNA, 25 bp, Homo sapien
cttgcagtgaaaacctgagctttga

SEQ ID NO: 3136456 - DNA, 25 bp, Homo sapien
tgcagtgaaaacctgagctttgagc

SEQ ID NO: 3136457 - DNA, 25 bp, Homo sapien
gctttgagctggaaacgcccacttt

SEQ ID NO: 3136458 - DNA, 25 bp, Homo sapien
ccttgcagtgaaaacctgagctttg

SEQ ID NO: 3136459 - DNA, 25 bp, Homo sapien
acaggcataaaacctccgagtttct

SEQ ID NO: 3136460 - DNA, 25 bp, Homo sapien
caggcataaaacctccgagtttctt

SEQ ID NO: 3136461 - DNA, 25 bp, Homo sapien
catcttcggttatgagcttctcggg

SEQ ID NO: 3136462 - DNA, 25 bp, Homo sapien
ggctgacatcttcggttatgagctt

SEQ ID NO: 3136463 - DNA, 25 bp, Homo sapien
caggggaggctgacatcttcggtta

SEQ ID NO: 3136464 - DNA, 25 bp, Homo sapien
gcttctcgggcagcaagtctagctc

SEQ ID NO: 3136465 - DNA, 25 bp, Homo sapien
atgagaatgaactgctagtctcaag

SEQ ID NO: 3136466 - DNA, 25 bp, Homo sapien
catgagaatgaactgctagtctcaa

SEQ ID NO: 3136467 - DNA, 25 bp, Homo sapien
acatgagaatgaactgctagtctca

SEQ ID NO: 3136468 - DNA, 25 bp, Homo sapien
aactttctctgagtcaagggcaact

SEQ ID NO: 3136469 - DNA, 25 bp, Homo sapien
cagtactcttctgaatccgagggca

SEQ ID NO: 3136470 - DNA, 25 bp, Homo sapien
taagtctaccaagaactgacagctc

SEQ ID NO: 3136471 - DNA, 25 bp, Homo sapien
catctggtaacaacaactgctgaca

SEQ ID NO: 3136472 - DNA, 25 bp, Homo sapien
tgtcaacttgatcagctcatgcaac

SEQ ID NO: 3136473 - DNA, 25 bp, Homo sapien
gctgtcaacttgatcagctcatgca

SEQ ID NO: 3136474 - DNA, 25 bp, Homo sapien
aaggcttttaatgttagacttcttg

SEQ ID NO: 3136475 - DNA, 25 bp, Homo sapien
acttcttgtcacctgatgctgtcaa

SEQ ID NO: 3136476 - DNA, 25 bp, Homo sapien
cttgaatagtttagttatggacatc

SEQ ID NO: 3136477 - DNA, 25 bp, Homo sapien
gcacctacatccctactctttaagt

SEQ ID NO: 3136478 - DNA, 25 bp, Homo sapien
ctactctttaagtcgaacacctgtt

SEQ ID NO: 3136479 - DNA, 25 bp, Homo sapien
gaatagtttagttatggacatctgg

SEQ ID NO: 3136480 - DNA, 25 bp, Homo sapien
caatataatagagaaagtatatgca

SEQ ID NO: 3136481 - DNA, 25 bp, Homo sapien
atatttactaaatcagtgccaggaa

SEQ ID NO: 3136482 - DNA, 25 bp, Homo sapien
ttattttgttttgctaacacagtgt

SEQ ID NO: 3136483 - DNA, 25 bp, Homo sapien
ttcatatttactaaatcagtgccag

SEQ ID NO: 3136484 - DNA, 25 bp, Homo sapien
ttaaacatattataatggcaaaagc

SEQ ID NO: 3136485 - DNA, 25 bp, Homo sapien
ttataatggcaaaagctatcttcca

SEQ ID NO: 3136486 - DNA, 25 bp, Homo sapien
tccatcaaagaaatgatggttaaac

SEQ ID NO: 3136487 - DNA, 25 bp, Homo sapien
ctttccatcaaagaaatgatggtta

SEQ ID NO: 3136488 - DNA, 25 bp, Homo sapien
cagtgtggtaagtctacaaaggaaa

SEQ ID NO: 3136489 - DNA, 25 bp, Homo sapien
gaaatcggggtcagatcacacagag

SEQ ID NO: 3136490 - DNA, 25 bp, Homo sapien
aacatgagtggaggttatcaaggca

SEQ ID NO: 3136491 - DNA, 25 bp, Homo sapien
ggaaaggcgtctgaccagttccaga

SEQ ID NO: 3136492 - DNA, 25 bp, Homo sapien
ttcctcatttactacgacacagccc

SEQ ID NO: 3136493 - DNA, 25 bp, Homo sapien
acttcctcatttactacgacacagc

SEQ ID NO: 3136494 - DNA, 25 bp, Homo sapien
ctcatttactacgacacagccctga

SEQ ID NO: 3136495 - DNA, 25 bp, Homo sapien
cctcatttactacgacacagccctg

SEQ ID NO: 3136496 - DNA, 25 bp, Homo sapien
ttctaaattaggactagagagaggc

SEQ ID NO: 3136497 - DNA, 25 bp, Homo sapien
taggactagagagaggcacttcatc

SEQ ID NO: 3136498 - DNA, 25 bp, Homo sapien
tcatttctaaattaggactagagag

SEQ ID NO: 3136499 - DNA, 25 bp, Homo sapien
aattaggactagagagaggcacttc

SEQ ID NO: 3136500 - DNA, 25 bp, Homo sapien
ggctttgaccttctttccacatagc

SEQ ID NO: 3136501 - DNA, 25 bp, Homo sapien
cggaggatccgtcaccataatgatt

SEQ ID NO: 3136502 - DNA, 25 bp, Homo sapien
taatagccagaggttcaaccaagcc

SEQ ID NO: 3136503 - DNA, 25 bp, Homo sapien
gattccttcgcctttatcttcctgt

SEQ ID NO: 3136504 - DNA, 25 bp, Homo sapien
tattttgcagtaataaattatacac

SEQ ID NO: 3136505 - DNA, 25 bp, Homo sapien
tatgtatttattttgcagtaataaa

SEQ ID NO: 3136506 - DNA, 25 bp, Homo sapien
tttattttgcagtaataaattatac

SEQ ID NO: 3136507 - DNA, 25 bp, Homo sapien
ttattttgcagtaataaattataca

SEQ ID NO: 3136508 - DNA, 25 bp, Homo sapien
agaaaatgggtagttctttgtgact

SEQ ID NO: 3136509 - DNA, 25 bp, Homo sapien
caaaggtgatttacttttctatatg

SEQ ID NO: 3136510 - DNA, 25 bp, Homo sapien
ccacaaaggtgatttacttttctat

SEQ ID NO: 3136511 - DNA, 25 bp, Homo sapien
cacaaaggtgatttacttttctata

SEQ ID NO: 3136512 - DNA, 25 bp, Homo sapien
tgcagtaaagtgtgcatggcatttc

SEQ ID NO: 3136513 - DNA, 25 bp, Homo sapien
cagtgtctgctgtttgggtggaatc

SEQ ID NO: 3136514 - DNA, 25 bp, Homo sapien
gggctagtcgattattcagaaaact

SEQ ID NO: 3136515 - DNA, 25 bp, Homo sapien
gaaccaagtgctagcttgcaacagc

SEQ ID NO: 3136516 - DNA, 25 bp, Homo sapien
gggtggaatcacaagtagagtcttt

SEQ ID NO: 3136517 - DNA, 25 bp, Homo sapien
aggattattttgttgggcggaatgt

SEQ ID NO: 3136518 - DNA, 25 bp, Homo sapien
actgttttcgacctgtctttccgtg

SEQ ID NO: 3136519 - DNA, 25 bp, Homo sapien
gaatgttggtgaaaatacgcacggg

SEQ ID NO: 3136520 - DNA, 25 bp, Homo sapien
tacgcacgggagactgttttcgacc

SEQ ID NO: 3136521 - DNA, 25 bp, Homo sapien
aaacataccgttgacacggagagca

SEQ ID NO: 3136522 - DNA, 25 bp, Homo sapien
tagagaaacataccgttgacacgga

SEQ ID NO: 3136523 - DNA, 25 bp, Homo sapien
ctctagagaaacataccgttgacac

SEQ ID NO: 3136524 - DNA, 25 bp, Homo sapien
gagaaacataccgttgacacggaga

SEQ ID NO: 3136525 - DNA, 25 bp, Homo sapien
ggatgtgcaagaattacagagctca

SEQ ID NO: 3136526 - DNA, 25 bp, Homo sapien
tggatgtgcaagaattacagagctc

SEQ ID NO: 3136527 - DNA, 25 bp, Homo sapien
cttggatgtgcaagaattacagagc

SEQ ID NO: 3136528 - DNA, 25 bp, Homo sapien
gatgtgcaagaattacagagctcac

SEQ ID NO: 3136529 - DNA, 25 bp, Homo sapien
ctttttacagagaaagcaatggttc

SEQ ID NO: 3136530 - DNA, 25 bp, Homo sapien
aaggctttacacactttttacagag

SEQ ID NO: 3136531 - DNA, 25 bp, Homo sapien
tttacagagaaagcaatggttccat

SEQ ID NO: 3136532 - DNA, 25 bp, Homo sapien
aggctttacacactttttacagaga

SEQ ID NO: 3136533 - DNA, 25 bp, Homo sapien
gcacagtgattgcagatgctacagt

SEQ ID NO: 3136534 - DNA, 25 bp, Homo sapien
gacaagtactgcgtttatgatccag

SEQ ID NO: 3136535 - DNA, 25 bp, Homo sapien
ttgttagctctcttagatgtagcaa

SEQ ID NO: 3136536 - DNA, 25 bp, Homo sapien
gttcaccacaaataaagcagccatg

SEQ ID NO: 3136537 - DNA, 25 bp, Homo sapien
tagcaatgttaggacaagtactgcg

SEQ ID NO: 3136538 - DNA, 25 bp, Homo sapien
gatctgtccctcaaagcctgacgta

SEQ ID NO: 3136539 - DNA, 25 bp, Homo sapien
tcaagatcctctgaatgttgcatgc

SEQ ID NO: 3136540 - DNA, 25 bp, Homo sapien
cacatgagacgtaaagccaaggaga

SEQ ID NO: 3136541 - DNA, 25 bp, Homo sapien
caagtcatagtcacatggtagccca

SEQ ID NO: 3136542 - DNA, 25 bp, Homo sapien
tgaagtttaattaactagctaacca

SEQ ID NO: 3136543 - DNA, 25 bp, Homo sapien
gaagggaaagaatctactgtattgc

SEQ ID NO: 3136544 - DNA, 25 bp, Homo sapien
aatgagcacagtgaattatgtaatt

SEQ ID NO: 3136545 - DNA, 25 bp, Homo sapien
aacaaggtgctaaattatttcacag

SEQ ID NO: 3136546 - DNA, 25 bp, Homo sapien
gtcctttcgtggtctccattttcat

SEQ ID NO: 3136547 - DNA, 25 bp, Homo sapien
tctttctccttgtagcagatgtatg

SEQ ID NO: 3136548 - DNA, 25 bp, Homo sapien
cagatgtatgattcatggattgtcc

SEQ ID NO: 3136549 - DNA, 25 bp, Homo sapien
taagagccaagatattgatgggctc

SEQ ID NO: 3136550 - DNA, 25 bp, Homo sapien
tctagctcagaaaggtgcacacctc

SEQ ID NO: 3136551 - DNA, 25 bp, Homo sapien
cttctgcaaaagaatggtctgccca

SEQ ID NO: 3136552 - DNA, 25 bp, Homo sapien
ctagaataatgtgaccggagctggg

SEQ ID NO: 3136553 - DNA, 25 bp, Homo sapien
tggctgaagatggaacaactcccca

SEQ ID NO: 3136554 - DNA, 25 bp, Homo sapien
tctagaccgtcagaggacaactgca

SEQ ID NO: 3136555 - DNA, 25 bp, Homo sapien
ggcttttagagagtgacctggccaa

SEQ ID NO: 3136556 - DNA, 25 bp, Homo sapien
caagcatttaagtgattctagaccg

SEQ ID NO: 3136557 - DNA, 25 bp, Homo sapien
tactgcataggttaaacgacactgg

SEQ ID NO: 3136558 - DNA, 25 bp, Homo sapien
gctttctgatgcttatgaagtccag

SEQ ID NO: 3136559 - DNA, 25 bp, Homo sapien
tcagtagtcatagtccctcaggtgt

SEQ ID NO: 3136560 - DNA, 25 bp, Homo sapien
atcatagccctccatgtaacaaaag

SEQ ID NO: 3136561 - DNA, 25 bp, Homo sapien
taaagtcaggcaatgtccctatcct

SEQ ID NO: 3136562 - DNA, 25 bp, Homo sapien
ctgcattccagcctgtccaacaaag

SEQ ID NO: 3136563 - DNA, 25 bp, Homo sapien
tgcattccagcctgtccaacaaagc

SEQ ID NO: 3136564 - DNA, 25 bp, Homo sapien
ccactgcattccagcctgtccaaca

SEQ ID NO: 3136565 - DNA, 25 bp, Homo sapien
ccaacaaagcaagactctgtctcaa

SEQ ID NO: 3136566 - DNA, 25 bp, Homo sapien
ttcccaaaagagaacggagtggcca

SEQ ID NO: 3136567 - DNA, 25 bp, Homo sapien
tgggtgctgacattaagagacctaa

SEQ ID NO: 3136568 - DNA, 25 bp, Homo sapien
aggtttcagtatcagggactcgtgg

SEQ ID NO: 3136569 - DNA, 25 bp, Homo sapien
ggcacaagatacacaagagcagatg

SEQ ID NO: 3136570 - DNA, 25 bp, Homo sapien
cagaatcaacatttctaaggtaaaa

SEQ ID NO: 3136571 - DNA, 25 bp, Homo sapien
cccaactcttccagaatcaacattt

SEQ ID NO: 3136572 - DNA, 25 bp, Homo sapien
tccagaatcaacatttctaaggtaa

SEQ ID NO: 3136573 - DNA, 25 bp, Homo sapien
tcttccagaatcaacatttctaagg

SEQ ID NO: 3136574 - DNA, 25 bp, Homo sapien
accggcagactaacacggccccagt

SEQ ID NO: 3136575 - DNA, 25 bp, Homo sapien
ggcagactaacacggccccagtggc

SEQ ID NO: 3136576 - DNA, 25 bp, Homo sapien
tgcaagagtccccaccggcagacta

SEQ ID NO: 3136577 - DNA, 25 bp, Homo sapien
ccccgccgctgtcgcgcgctccagg

SEQ ID NO: 3136578 - DNA, 25 bp, Homo sapien
gaccaggaaaataatctcctgcggg

SEQ ID NO: 3136579 - DNA, 25 bp, Homo sapien
ggccaaagcaatgagatcccgcttg

SEQ ID NO: 3136580 - DNA, 25 bp, Homo sapien
ggaaaataatctcctgcgggagctg

SEQ ID NO: 3136581 - DNA, 25 bp, Homo sapien
cccgcttgggcgaccagaccaggaa

SEQ ID NO: 3136582 - DNA, 25 bp, Homo sapien
catctggtctccatgccagacacgt

SEQ ID NO: 3136583 - DNA, 25 bp, Homo sapien
aacttgccagtcgatgaagtaaaac

SEQ ID NO: 3136584 - DNA, 25 bp, Homo sapien
tctggtctccatgccagacacgtca

SEQ ID NO: 3136585 - DNA, 25 bp, Homo sapien
aaactccaaactcgatgaaaacttg

SEQ ID NO: 3136586 - DNA, 25 bp, Homo sapien
ccaatgcatacaggaaactggagcc

SEQ ID NO: 3136587 - DNA, 25 bp, Homo sapien
ctactgtcacttccatccaatgcat

SEQ ID NO: 3136588 - DNA, 25 bp, Homo sapien
agctctcaggtttttctacatcaca

SEQ ID NO: 3136589 - DNA, 25 bp, Homo sapien
aactggagcctccacagaaaaagag

SEQ ID NO: 3136590 - DNA, 25 bp, Homo sapien
tttggcagtgtaggtagtttaggta

SEQ ID NO: 3136591 - DNA, 25 bp, Homo sapien
gtaagagaagatttgattcatcctc

SEQ ID NO: 3136592 - DNA, 25 bp, Homo sapien
ggtaagagaagatttgattcatcct

SEQ ID NO: 3136593 - DNA, 25 bp, Homo sapien
tgtaggtagtttaggtaagagaaga

SEQ ID NO: 3136594 - DNA, 25 bp, Homo sapien
aaatatttttgaggtgttgctatag

SEQ ID NO: 3136595 - DNA, 25 bp, Homo sapien
ctaaatatttttgaggtgttgctat

SEQ ID NO: 3136596 - DNA, 25 bp, Homo sapien
taaatatttttgaggtgttgctata

SEQ ID NO: 3136597 - DNA, 25 bp, Homo sapien
taataatttcatcagaattttcttc

SEQ ID NO: 3136598 - DNA, 25 bp, Homo sapien
aataatttcatcagaattttcttca

SEQ ID NO: 3136599 - DNA, 25 bp, Homo sapien
acgtctcccaagagcttaataattt

SEQ ID NO: 3136600 - DNA, 25 bp, Homo sapien
ctgacgtctcccaagagcttaataa

SEQ ID NO: 3136601 - DNA, 25 bp, Homo sapien
gctttcatataatctacatgctaaa

SEQ ID NO: 3136602 - DNA, 25 bp, Homo sapien
agatgattgcattgttaaagcgaga

SEQ ID NO: 3136603 - DNA, 25 bp, Homo sapien
tattactgctttcatataatctaca

SEQ ID NO: 3136604 - DNA, 25 bp, Homo sapien
taaagcgagatataaattattactg

SEQ ID NO: 3136605 - DNA, 25 bp, Homo sapien
cagagcttcctccaaggacgagaat

SEQ ID NO: 3136606 - DNA, 25 bp, Homo sapien
ccctgtgactcgagcaattttaaac

SEQ ID NO: 3136607 - DNA, 25 bp, Homo sapien
aaacattccataagcataaagctca

SEQ ID NO: 3136608 - DNA, 25 bp, Homo sapien
gcataaagctcaataaatccagagc

SEQ ID NO: 3136609 - DNA, 25 bp, Homo sapien
cgagtgtaagagtctgatgaaaaag

SEQ ID NO: 3136610 - DNA, 25 bp, Homo sapien
catattccacagagcctacaatatt

SEQ ID NO: 3136611 - DNA, 25 bp, Homo sapien
ttctaccccttttgcgagtgtaaga

SEQ ID NO: 3136612 - DNA, 25 bp, Homo sapien
tccacagagcctacaatattttcta

SEQ ID NO: 3136613 - DNA, 25 bp, Homo sapien
tctgtgaccactgataatgatttca

SEQ ID NO: 3136614 - DNA, 25 bp, Homo sapien
tatgaaacttctgaagcaccattgg

SEQ ID NO: 3136615 - DNA, 25 bp, Homo sapien
aacataatgcaagacaagtaccagc

SEQ ID NO: 3136616 - DNA, 25 bp, Homo sapien
tcacttgataaacataatgcaagac

SEQ ID NO: 3136617 - DNA, 25 bp, Homo sapien
gccatccgagttacttcaggtaaga

SEQ ID NO: 3136618 - DNA, 25 bp, Homo sapien
aaactttctggccatccgagttact

SEQ ID NO: 3136619 - DNA, 25 bp, Homo sapien
caggtaagaaagagtacaacagatt

SEQ ID NO: 3136620 - DNA, 25 bp, Homo sapien
ttcaggtaagaaagagtacaacaga

SEQ ID NO: 3136621 - DNA, 25 bp, Homo sapien
gagtagagacaaggaatcacagcca

SEQ ID NO: 3136622 - DNA, 25 bp, Homo sapien
taccagctggcatgaccaagtctag

SEQ ID NO: 3136623 - DNA, 25 bp, Homo sapien
tctcgctttgactaacggaatgcag

SEQ ID NO: 3136624 - DNA, 25 bp, Homo sapien
gtagcccctccagtcagatgcagag

SEQ ID NO: 3136625 - DNA, 25 bp, Homo sapien
gcttggtcatcacttaactacgaaa

SEQ ID NO: 3136626 - DNA, 25 bp, Homo sapien
tttaactcagttaagatggagaaaa

SEQ ID NO: 3136627 - DNA, 25 bp, Homo sapien
gagaaaaagacaacagcttggtcat

SEQ ID NO: 3136628 - DNA, 25 bp, Homo sapien
acttaactacgaaacattccattga

SEQ ID NO: 3136629 - DNA, 25 bp, Homo sapien
gagacgagaatccatctgcattagt

SEQ ID NO: 3136630 - DNA, 25 bp, Homo sapien
ccatctgcattagtatttcttccca

SEQ ID NO: 3136631 - DNA, 25 bp, Homo sapien
tgcacaaacttggtgagacgagaat

SEQ ID NO: 3136632 - DNA, 25 bp, Homo sapien
cttggtgagacgagaatccatctgc

SEQ ID NO: 3136633 - DNA, 25 bp, Homo sapien
aggtaaagacatacatcatgcattc

SEQ ID NO: 3136634 - DNA, 25 bp, Homo sapien
gtaaagacatacatcatgcattctt

SEQ ID NO: 3136635 - DNA, 25 bp, Homo sapien
tcaaggtaaagacatacatcatgca

SEQ ID NO: 3136636 - DNA, 25 bp, Homo sapien
caaggtaaagacatacatcatgcat

SEQ ID NO: 3136637 - DNA, 25 bp, Homo sapien
gaagatagccaatcagctgttctaa

SEQ ID NO: 3136638 - DNA, 25 bp, Homo sapien
tatcaatgggaaaagagcccttttg

SEQ ID NO: 3136639 - DNA, 25 bp, Homo sapien
taacacctgcccttattgccaaagc

SEQ ID NO: 3136640 - DNA, 25 bp, Homo sapien
agcagtttgaagtcagacgaagcca

SEQ ID NO: 3136641 - DNA, 25 bp, Homo sapien
tttcccccataatagcaagtgcatg

SEQ ID NO: 3136642 - DNA, 25 bp, Homo sapien
cttgcactgatgtggttgtgttctt

SEQ ID NO: 3136643 - DNA, 25 bp, Homo sapien
cccataatagcaagtgcatgaactc

SEQ ID NO: 3136644 - DNA, 25 bp, Homo sapien
tcccccataatagcaagtgcatgaa

SEQ ID NO: 3136645 - DNA, 25 bp, Homo sapien
actgattcatcaagagagtctgaag

SEQ ID NO: 3136646 - DNA, 25 bp, Homo sapien
aaatgacttatgaccaatttttgta

SEQ ID NO: 3136647 - DNA, 25 bp, Homo sapien
ctctgtaaatgacttatgaccaatt

SEQ ID NO: 3136648 - DNA, 25 bp, Homo sapien
tactggagtatgatgactctataga

SEQ ID NO: 3136649 - DNA, 25 bp, Homo sapien
tgactctatagactggccaagcttt

SEQ ID NO: 3136650 - DNA, 25 bp, Homo sapien
aatggtataataaagactccgagcc

SEQ ID NO: 3136651 - DNA, 25 bp, Homo sapien
gcagcatctagtccaagaggttcat

SEQ ID NO: 3136652 - DNA, 25 bp, Homo sapien
cagcatctagtccaagaggttcata

SEQ ID NO: 3136653 - DNA, 25 bp, Homo sapien
cctttcaattcactcaaatggtata

SEQ ID NO: 3136654 - DNA, 25 bp, Homo sapien
aagaagttcatttgccttgagtata

SEQ ID NO: 3136655 - DNA, 25 bp, Homo sapien
gaagttcatttgccttgagtataaa

SEQ ID NO: 3136656 - DNA, 25 bp, Homo sapien
agaagttcatttgccttgagtataa

SEQ ID NO: 3136657 - DNA, 25 bp, Homo sapien
gacgcatcatctactggttctacta

SEQ ID NO: 3136658 - DNA, 25 bp, Homo sapien
tggtccttgctacaattctcttgct

SEQ ID NO: 3136659 - DNA, 25 bp, Homo sapien
agtagttcagattcaacggccatca

SEQ ID NO: 3136660 - DNA, 25 bp, Homo sapien
tggtaaatctaactgctcccctgct

SEQ ID NO: 3136661 - DNA, 25 bp, Homo sapien
ctttgaagtttttcatactactatc

SEQ ID NO: 3136662 - DNA, 25 bp, Homo sapien
gaagtttttcatactactatctata

SEQ ID NO: 3136663 - DNA, 25 bp, Homo sapien
cacataaagccaccgaaaaaatgct

SEQ ID NO: 3136664 - DNA, 25 bp, Homo sapien
ccacataaagccaccgaaaaaatgc

SEQ ID NO: 3136665 - DNA, 25 bp, Homo sapien
caaatctaactgctgtctgtgctaa

SEQ ID NO: 3136666 - DNA, 25 bp, Homo sapien
tctgtgctaagactacgtgtgtaag

SEQ ID NO: 3136667 - DNA, 25 bp, Homo sapien
tggtcttttctgctacgcgcttaca

SEQ ID NO: 3136668 - DNA, 25 bp, Homo sapien
gatccctccttttaacctggtgatg

SEQ ID NO: 3136669 - DNA, 25 bp, Homo sapien
tggtcttctgtcattctcaacattg

SEQ ID NO: 3136670 - DNA, 25 bp, Homo sapien
catggtcttctgtcattctcaacat

SEQ ID NO: 3136671 - DNA, 25 bp, Homo sapien
acatggtcttctgtcattctcaaca

SEQ ID NO: 3136672 - DNA, 25 bp, Homo sapien
atggtcttctgtcattctcaacatt

SEQ ID NO: 3136673 - DNA, 25 bp, Homo sapien
cagcaacaaatgtgatatctttctg

SEQ ID NO: 3136674 - DNA, 25 bp, Homo sapien
tcagcaacaaatgtgatatctttct

SEQ ID NO: 3136675 - DNA, 25 bp, Homo sapien
cttttcgattataaaggtctggagc

SEQ ID NO: 3136676 - DNA, 25 bp, Homo sapien
tccttttcgattataaaggtctgga

SEQ ID NO: 3136677 - DNA, 25 bp, Homo sapien
ccttttcgattataaaggtctggag

SEQ ID NO: 3136678 - DNA, 25 bp, Homo sapien
tgttagggggtgacacaagatcatc

SEQ ID NO: 3136679 - DNA, 25 bp, Homo sapien
ctgtgttagggggtgacacaagatc

SEQ ID NO: 3136680 - DNA, 25 bp, Homo sapien
ttagggggtgacacaagatcatcat

SEQ ID NO: 3136681 - DNA, 25 bp, Homo sapien
tccttctgtgttagggggtgacaca

SEQ ID NO: 3136682 - DNA, 25 bp, Homo sapien
ttaaggtggctgctattttgaagaa

SEQ ID NO: 3136683 - DNA, 25 bp, Homo sapien
gctgctattttgaagaaagtcatac

SEQ ID NO: 3136684 - DNA, 25 bp, Homo sapien
ctttaaggtggctgctattttgaag

SEQ ID NO: 3136685 - DNA, 25 bp, Homo sapien
aaggtggctgctattttgaagaaag

SEQ ID NO: 3136686 - DNA, 25 bp, Homo sapien
ggtgataccaagtacctacccatag

SEQ ID NO: 3136687 - DNA, 25 bp, Homo sapien
taagcaattgctaaatctggtcaga

SEQ ID NO: 3136688 - DNA, 25 bp, Homo sapien
gactctctggcaatacataataggt

SEQ ID NO: 3136689 - DNA, 25 bp, Homo sapien
tgtatatggcagactaagcacccca

SEQ ID NO: 3136690 - DNA, 25 bp, Homo sapien
cttaacaggtttaggcaattgccca

SEQ ID NO: 3136691 - DNA, 25 bp, Homo sapien
tctactgttagagccagtctgcaca

SEQ ID NO: 3136692 - DNA, 25 bp, Homo sapien
tcagtgtcccgagtaacaggactac

SEQ ID NO: 3136693 - DNA, 25 bp, Homo sapien
tgtaggccctcccttagataaagcc

SEQ ID NO: 3136694 - DNA, 25 bp, Homo sapien
tgcaatgattttcgaggataataag

SEQ ID NO: 3136695 - DNA, 25 bp, Homo sapien
tctccatccgccttttcacaaaatg

SEQ ID NO: 3136696 - DNA, 25 bp, Homo sapien
aaacactgatcaataatattctcca

SEQ ID NO: 3136697 - DNA, 25 bp, Homo sapien
gattttcgaggataataaggaaaca

SEQ ID NO: 3136698 - DNA, 25 bp, Homo sapien
acaaagacatgcatttctttcaaac

SEQ ID NO: 3136699 - DNA, 25 bp, Homo sapien
agacatgcatttctttcaaacttac

SEQ ID NO: 3136700 - DNA, 25 bp, Homo sapien
aagacatgcatttctttcaaactta

SEQ ID NO: 3136701 - DNA, 25 bp, Homo sapien
caaagacatgcatttctttcaaact

SEQ ID NO: 3136702 - DNA, 25 bp, Homo sapien
gactgaccatcactgttcgaatgtg

SEQ ID NO: 3136703 - DNA, 25 bp, Homo sapien
taagcacatggcaggtttaagacca

SEQ ID NO: 3136704 - DNA, 25 bp, Homo sapien
tgcacacagatactctacagaaagt

SEQ ID NO: 3136705 - DNA, 25 bp, Homo sapien
gaaaaggaccttggtgctaagcaca

SEQ ID NO: 3136706 - DNA, 25 bp, Homo sapien
agattgcttgattcatcgattttcc

SEQ ID NO: 3136707 - DNA, 25 bp, Homo sapien
gaatacagattgcttgattcatcga

SEQ ID NO: 3136708 - DNA, 25 bp, Homo sapien
aatggaatacagattgcttgattca

SEQ ID NO: 3136709 - DNA, 25 bp, Homo sapien
ttgattcatcgattttccaattaca

SEQ ID NO: 3136710 - DNA, 25 bp, Homo sapien
aaattggctgcggaattacaccatc

SEQ ID NO: 3136711 - DNA, 25 bp, Homo sapien
atttaaattggctgcggaattacac

SEQ ID NO: 3136712 - DNA, 25 bp, Homo sapien
ttacaccatccaataggtaaacaga

SEQ ID NO: 3136713 - DNA, 25 bp, Homo sapien
ttggctgcggaattacaccatccaa

SEQ ID NO: 3136714 - DNA, 25 bp, Homo sapien
gaaatttgaacaatctacgtgtaga

SEQ ID NO: 3136715 - DNA, 25 bp, Homo sapien
aaaggaaatttgaacaatctacgtg

SEQ ID NO: 3136716 - DNA, 25 bp, Homo sapien
gaacaatctacgtgtagaatcctca

SEQ ID NO: 3136717 - DNA, 25 bp, Homo sapien
tttgaacaatctacgtgtagaatcc

SEQ ID NO: 3136718 - DNA, 25 bp, Homo sapien
aaaaagaagataatgtagatttgaa

SEQ ID NO: 3136719 - DNA, 25 bp, Homo sapien
tgtagatttgaagttttattattcc

SEQ ID NO: 3136720 - DNA, 25 bp, Homo sapien
agaagataatgtagatttgaagttt

SEQ ID NO: 3136721 - DNA, 25 bp, Homo sapien
gtagatttgaagttttattattcca

SEQ ID NO: 3136722 - DNA, 25 bp, Homo sapien
gaaatatcagtatgtctccttaaga

SEQ ID NO: 3136723 - DNA, 25 bp, Homo sapien
ccttaagatgcacattttataaagt

SEQ ID NO: 3136724 - DNA, 25 bp, Homo sapien
tcagtatgtctccttaagatgcaca

SEQ ID NO: 3136725 - DNA, 25 bp, Homo sapien
gtctccttaagatgcacattttata

SEQ ID NO: 3136726 - DNA, 25 bp, Homo sapien
tgattgtcagggtcagtacatgtac

SEQ ID NO: 3136727 - DNA, 25 bp, Homo sapien
gctaccaatggcgttctaaatatga

SEQ ID NO: 3136728 - DNA, 25 bp, Homo sapien
ctctgtggaacaacctggatagtca

SEQ ID NO: 3136729 - DNA, 25 bp, Homo sapien
tctttttggttacatcgtggtctca

SEQ ID NO: 3136730 - DNA, 25 bp, Homo sapien
tcccaaatttaatagcaattagtcc

SEQ ID NO: 3136731 - DNA, 25 bp, Homo sapien
actttttctgttgtggcatatgtaa

SEQ ID NO: 3136732 - DNA, 25 bp, Homo sapien
aatttaatagcaattagtccattac

SEQ ID NO: 3136733 - DNA, 25 bp, Homo sapien
aagctcccaaatttaatagcaatta

SEQ ID NO: 3136734 - DNA, 25 bp, Homo sapien
aaggttctattcaatcacaagtcaa

SEQ ID NO: 3136735 - DNA, 25 bp, Homo sapien
cctgcccttgatgtgggaagtggca

SEQ ID NO: 3136736 - DNA, 25 bp, Homo sapien
tacctatattaccaccgtaactgag

SEQ ID NO: 3136737 - DNA, 25 bp, Homo sapien
gagtctgatcctattcctaaacata

SEQ ID NO: 3136738 - DNA, 25 bp, Homo sapien
gcccatgggaaccacattactttct

SEQ ID NO: 3136739 - DNA, 25 bp, Homo sapien
taattataggaaaccgtacgacata

SEQ ID NO: 3136740 - DNA, 25 bp, Homo sapien
tctgcccatgggaaccacattactt

SEQ ID NO: 3136741 - DNA, 25 bp, Homo sapien
agggagctcaggagtattaattata

SEQ ID NO: 3136742 - DNA, 25 bp, Homo sapien
agggatggcttaggtactgttacca

SEQ ID NO: 3136743 - DNA, 25 bp, Homo sapien
caaagatgatcgtgactactgagaa

SEQ ID NO: 3136744 - DNA, 25 bp, Homo sapien
gccttaagcctgtggaaattctatg

SEQ ID NO: 3136745 - DNA, 25 bp, Homo sapien
tatgcatgttatactggcagcaagc

SEQ ID NO: 3136746 - DNA, 25 bp, Homo sapien
cttgtagaataagtcccagtgaact

SEQ ID NO: 3136747 - DNA, 25 bp, Homo sapien
gtgtctttaagaactactgttacag

SEQ ID NO: 3136748 - DNA, 25 bp, Homo sapien
ctgttatatactaaagacaaaggca

SEQ ID NO: 3136749 - DNA, 25 bp, Homo sapien
tctcttccttcacgtcctacagtgt

SEQ ID NO: 3136750 - DNA, 25 bp, Homo sapien
tatctagcgtacctaaaaggttgga

SEQ ID NO: 3136751 - DNA, 25 bp, Homo sapien
taaagccatctcttggaattgacag

SEQ ID NO: 3136752 - DNA, 25 bp, Homo sapien
tacttcctacatgggtactgaggtc

SEQ ID NO: 3136753 - DNA, 25 bp, Homo sapien
catattctatattctggctaggcac

SEQ ID NO: 3136754 - DNA, 25 bp, Homo sapien
tcgaaaaccattcccagcaacatac

SEQ ID NO: 3136755 - DNA, 25 bp, Homo sapien
tgggaatagcactacactgttcatc

SEQ ID NO: 3136756 - DNA, 25 bp, Homo sapien
cacacaggacacttttcgaaaacca

SEQ ID NO: 3136757 - DNA, 25 bp, Homo sapien
tgcttctcaaaatgcatggtacggg

SEQ ID NO: 3136758 - DNA, 25 bp, Homo sapien
taaggccaccacatgatcataatca

SEQ ID NO: 3136759 - DNA, 25 bp, Homo sapien
caacagtggcaatttcgtgagatta

SEQ ID NO: 3136760 - DNA, 25 bp, Homo sapien
ttcttagttgctgaacgatctctaa

SEQ ID NO: 3136761 - DNA, 25 bp, Homo sapien
aaagatctccacataacaacagtgg

SEQ ID NO: 3136762 - DNA, 25 bp, Homo sapien
ttaggagtctagctcagggtcaagt

SEQ ID NO: 3136763 - DNA, 25 bp, Homo sapien
catctgaagactcatcgagctccca

SEQ ID NO: 3136764 - DNA, 25 bp, Homo sapien
tactctcacatgacgaagatttgag

SEQ ID NO: 3136765 - DNA, 25 bp, Homo sapien
tatctctggagctaaagcggcagca

SEQ ID NO: 3136766 - DNA, 25 bp, Homo sapien
acacaaaggtggtccaagacatctt

SEQ ID NO: 3136767 - DNA, 25 bp, Homo sapien
tgtccttttggccataattacacac

SEQ ID NO: 3136768 - DNA, 25 bp, Homo sapien
aagacatcttagtccatctcctatg

SEQ ID NO: 3136769 - DNA, 25 bp, Homo sapien
atctcctatgtccttttggccataa

SEQ ID NO: 3136770 - DNA, 25 bp, Homo sapien
ttgagcaggcgcttgctcaggccca

SEQ ID NO: 3136771 - DNA, 25 bp, Homo sapien
ctttgagcaggcgcttgctcaggcc

SEQ ID NO: 3136772 - DNA, 25 bp, Homo sapien
gagcaggcgcttgctcaggcccact

SEQ ID NO: 3136773 - DNA, 25 bp, Homo sapien
ggactttgagcaggcgcttgctcag

SEQ ID NO: 3136774 - DNA, 25 bp, Homo sapien
agctcatcacgaatgcaagcctggc

SEQ ID NO: 3136775 - DNA, 25 bp, Homo sapien
cctgtttccgcagagccgatggtgg

SEQ ID NO: 3136776 - DNA, 25 bp, Homo sapien
cacagacactcaagtagttgtgcca

SEQ ID NO: 3136777 - DNA, 25 bp, Homo sapien
cagagccgatggtggctatgaatga

SEQ ID NO: 3136778 - DNA, 25 bp, Homo sapien
gaggatgtaggtgcataactgatat

SEQ ID NO: 3136779 - DNA, 25 bp, Homo sapien
gatgtaggtgcataactgatattca

SEQ ID NO: 3136780 - DNA, 25 bp, Homo sapien
tgtaggtgcataactgatattcatc

SEQ ID NO: 3136781 - DNA, 25 bp, Homo sapien
taggtgcataactgatattcatctg

SEQ ID NO: 3136782 - DNA, 25 bp, Homo sapien
ggctgtagggaactagcacttttag

SEQ ID NO: 3136783 - DNA, 25 bp, Homo sapien
tatctctagtggaacttggcatctt

SEQ ID NO: 3136784 - DNA, 25 bp, Homo sapien
gcttcaactggatcttaaaagaagg

SEQ ID NO: 3136785 - DNA, 25 bp, Homo sapien
caaggtttcgaatgctctggatcag

SEQ ID NO: 3136786 - DNA, 25 bp, Homo sapien
tcagtctgttttagacgaatttggt

SEQ ID NO: 3136787 - DNA, 25 bp, Homo sapien
gatagagttcagtctgttttagacg

SEQ ID NO: 3136788 - DNA, 25 bp, Homo sapien
aatgtctactctaaaacacaaagtg

SEQ ID NO: 3136789 - DNA, 25 bp, Homo sapien
gtttgatgaaaagatagagttcagt

SEQ ID NO: 3136790 - DNA, 25 bp, Homo sapien
caaaaaggcatgaattataggaata

SEQ ID NO: 3136791 - DNA, 25 bp, Homo sapien
ctgaaagccatctttagtcaggaag

SEQ ID NO: 3136792 - DNA, 25 bp, Homo sapien
cgtgagtcatcacgctgggcccttc

SEQ ID NO: 3136793 - DNA, 25 bp, Homo sapien
agcaaaagactcatagagaaattaa

SEQ ID NO: 3136794 - DNA, 25 bp, Homo sapien
tttcgctgttgatccagacattcag

SEQ ID NO: 3136795 - DNA, 25 bp, Homo sapien
gtcacagttgtcaacgcagtgccca

SEQ ID NO: 3136796 - DNA, 25 bp, Homo sapien
tcccgctgggtttactagtcacagt

SEQ ID NO: 3136797 - DNA, 25 bp, Homo sapien
cagagtcagagatttcgctgttgat

SEQ ID NO: 3136798 - DNA, 25 bp, Homo sapien
tcgatggcctcgaggccaaagacca

SEQ ID NO: 3136799 - DNA, 25 bp, Homo sapien
ggaccaagaattggacggcggcctc

SEQ ID NO: 3136800 - DNA, 25 bp, Homo sapien
tcctggctctggaccaagaattgga

SEQ ID NO: 3136801 - DNA, 25 bp, Homo sapien
ttgtactgagcctcgatggcctcga

SEQ ID NO: 3136802 - DNA, 25 bp, Homo sapien
ccttgcttctgacgcgcgttgtctg

SEQ ID NO: 3136803 - DNA, 25 bp, Homo sapien
cccttgcttctgacgcgcgttgtct

SEQ ID NO: 3136804 - DNA, 25 bp, Homo sapien
gccgcccttgcttctgacgcgcgtt

SEQ ID NO: 3136805 - DNA, 25 bp, Homo sapien
cgcccttgcttctgacgcgcgttgt

SEQ ID NO: 3136806 - DNA, 25 bp, Homo sapien
aggtgaagtgcgtggacttgaggtg

SEQ ID NO: 3136807 - DNA, 25 bp, Homo sapien
gcacatgcgggccgggcggtccgga

SEQ ID NO: 3136808 - DNA, 25 bp, Homo sapien
ggtgaagtgcgtggacttgaggtgc

SEQ ID NO: 3136809 - DNA, 25 bp, Homo sapien
tgggccaggacagacgcagtaggtt

SEQ ID NO: 3136810 - DNA, 25 bp, Homo sapien
gcggtgagcgtggatccgttgttac

SEQ ID NO: 3136811 - DNA, 25 bp, Homo sapien
ggcggtgagcgtggatccgttgtta

SEQ ID NO: 3136812 - DNA, 25 bp, Homo sapien
aggttggccagcaccgcggcggtga

SEQ ID NO: 3136813 - DNA, 25 bp, Homo sapien
gacagtgaaccgtagtagttggccc

SEQ ID NO: 3136814 - DNA, 25 bp, Homo sapien
ctgagacagtgaaccgtagtagttg

SEQ ID NO: 3136815 - DNA, 25 bp, Homo sapien
agacagtgaaccgtagtagttggcc

SEQ ID NO: 3136816 - DNA, 25 bp, Homo sapien
tgagacagtgaaccgtagtagttgg

SEQ ID NO: 3136817 - DNA, 25 bp, Homo sapien
cggaagggcgcgaacacctcctggc

SEQ ID NO: 3136818 - DNA, 25 bp, Homo sapien
gttcggcgacaagatgtcccagcca

SEQ ID NO: 3136819 - DNA, 25 bp, Homo sapien
ccaagaccgggctcacggtgcccac

SEQ ID NO: 3136820 - DNA, 25 bp, Homo sapien
ctggcccttggcgtccaagaccggg

SEQ ID NO: 3136821 - DNA, 25 bp, Homo sapien
tctgcccacgtaaacctggcgctgc

SEQ ID NO: 3136822 - DNA, 25 bp, Homo sapien
gaagtcatctctgcccacgtaaacc

SEQ ID NO: 3136823 - DNA, 25 bp, Homo sapien
cttgaagtcatctctgcccacgtaa

SEQ ID NO: 3136824 - DNA, 25 bp, Homo sapien
gtcatctctgcccacgtaaacctgg

SEQ ID NO: 3136825 - DNA, 25 bp, Homo sapien
ggccatagccgatgaggaagtccac

SEQ ID NO: 3136826 - DNA, 25 bp, Homo sapien
tcttgaggccatagccgatgaggaa

SEQ ID NO: 3136827 - DNA, 25 bp, Homo sapien
gacttggtcttgaggccatagccga

SEQ ID NO: 3136828 - DNA, 25 bp, Homo sapien
aatcgacttggtcttgaggccatag

SEQ ID NO: 3136829 - DNA, 25 bp, Homo sapien
tgttccccaggtggttataattcac

SEQ ID NO: 3136830 - DNA, 25 bp, Homo sapien
ttgttccccaggtggttataattca

SEQ ID NO: 3136831 - DNA, 25 bp, Homo sapien
agggaacagcgatggcgccaacagg

SEQ ID NO: 3136832 - DNA, 25 bp, Homo sapien
agagggaacagcgatggcgccaaca

SEQ ID NO: 3136833 - DNA, 25 bp, Homo sapien
ctcagagggaacagcgatggcgcca

SEQ ID NO: 3136834 - DNA, 25 bp, Homo sapien
ggaacagcgatggcgccaacaggtt

SEQ ID NO: 3136835 - DNA, 25 bp, Homo sapien
ccgcgtacggcatgtacttgatgac

SEQ ID NO: 3136836 - DNA, 25 bp, Homo sapien
gtcacccgcgtacggcatgtacttg

SEQ ID NO: 3136837 - DNA, 25 bp, Homo sapien
acgcagcggtcaggctcctcgccag

SEQ ID NO: 3136838 - DNA, 25 bp, Homo sapien
gggtcacccgcgtacggcatgtact

SEQ ID NO: 3136839 - DNA, 25 bp, Homo sapien
tccaaggtagactcatccagcgcac

SEQ ID NO: 3136840 - DNA, 25 bp, Homo sapien
ccaaggtagactcatccagcgcacg

SEQ ID NO: 3136841 - DNA, 25 bp, Homo sapien
gcgagtcctcgcacgtgttgtgcag

SEQ ID NO: 3136842 - DNA, 25 bp, Homo sapien
agtcctcgcacgtgttgtgcagtac

SEQ ID NO: 3136843 - DNA, 25 bp, Homo sapien
agcgagtcctcgcacgtgttgtgca

SEQ ID NO: 3136844 - DNA, 25 bp, Homo sapien
gagtcctcgcacgtgttgtgcagta

SEQ ID NO: 3136845 - DNA, 25 bp, Homo sapien
tctgtggctcggtgttgtcattggt

SEQ ID NO: 3136846 - DNA, 25 bp, Homo sapien
gctcggtgttgtcattggtgcagaa

SEQ ID NO: 3136847 - DNA, 25 bp, Homo sapien
gttgtcattggtgcagaagctcacg

SEQ ID NO: 3136848 - DNA, 25 bp, Homo sapien
gtgttgtcattggtgcagaagctca

SEQ ID NO: 3136849 - DNA, 25 bp, Homo sapien
actgggagctccatcttgtgcacca

SEQ ID NO: 3136850 - DNA, 25 bp, Homo sapien
gggagctccatcttgtgcaccagga

SEQ ID NO: 3136851 - DNA, 25 bp, Homo sapien
ggcaccagcggcgccttgaagagat

SEQ ID NO: 3136852 - DNA, 25 bp, Homo sapien
cacaggccctgtggatgttctcgat

SEQ ID NO: 3136853 - DNA, 25 bp, Homo sapien
tatcactggtacagccattggtggc

SEQ ID NO: 3136854 - DNA, 25 bp, Homo sapien
tcttgttcgacacagggcaggcggc

SEQ ID NO: 3136855 - DNA, 25 bp, Homo sapien
gggttcctccacttgtgggtgtcca

SEQ ID NO: 3136856 - DNA, 25 bp, Homo sapien
gggtgtccattggtatcactggtac

SEQ ID NO: 3136857 - DNA, 25 bp, Homo sapien
gaatgcaaagattgatgtgacacgt

SEQ ID NO: 3136858 - DNA, 25 bp, Homo sapien
tgtgacacgtttccttcccatgagg

SEQ ID NO: 3136859 - DNA, 25 bp, Homo sapien
catgaggagctcacagttgtccacg

SEQ ID NO: 3136860 - DNA, 25 bp, Homo sapien
cttgatatggtgctggatcttggga

SEQ ID NO: 3136861 - DNA, 25 bp, Homo sapien
gtaggtgcattcctggacgtgcttt

SEQ ID NO: 3136862 - DNA, 25 bp, Homo sapien
aattctcagccccgaggaagggact

SEQ ID NO: 3136863 - DNA, 25 bp, Homo sapien
ttacactagttatgccttaagggag

SEQ ID NO: 3136864 - DNA, 25 bp, Homo sapien
gttttgggtgccatccaccgcgcgc

SEQ ID NO: 3136865 - DNA, 25 bp, Homo sapien
actccactatcacacaaggctgagt

SEQ ID NO: 3136866 - DNA, 25 bp, Homo sapien
tcgccgggtaatgtggacactgtgt

SEQ ID NO: 3136867 - DNA, 25 bp, Homo sapien
cacaaggctgagtgttcgccgggta

SEQ ID NO: 3136868 - DNA, 25 bp, Homo sapien
ggacactgtgtgttgaaggagctca

SEQ ID NO: 3136869 - DNA, 25 bp, Homo sapien
catagggcagtcttctgaccatagg

SEQ ID NO: 3136870 - DNA, 25 bp, Homo sapien
ctggccatagggcagtcttctgacc

SEQ ID NO: 3136871 - DNA, 25 bp, Homo sapien
tccagggcagtcttctggccatagg

SEQ ID NO: 3136872 - DNA, 25 bp, Homo sapien
cttctggccatagggcagtcttctg

SEQ ID NO: 3136873 - DNA, 25 bp, Homo sapien
gaagggctcctggcataccccacac

SEQ ID NO: 3136874 - DNA, 25 bp, Homo sapien
ggtctccaaaacacattgcactcag

SEQ ID NO: 3136875 - DNA, 25 bp, Homo sapien
caaaacacattgcactcagcaggct

SEQ ID NO: 3136876 - DNA, 25 bp, Homo sapien
actcagcaggctgcccgcaggcagg

SEQ ID NO: 3136877 - DNA, 25 bp, Homo sapien
gcatctatagttccaggtgctcaag

SEQ ID NO: 3136878 - DNA, 25 bp, Homo sapien
taatagaggcaaggtgtcgttgttg

SEQ ID NO: 3136879 - DNA, 25 bp, Homo sapien
cacatgggggttatacactggtttg

SEQ ID NO: 3136880 - DNA, 25 bp, Homo sapien
tcttgggacttacaggttataggag

SEQ ID NO: 3136881 - DNA, 25 bp, Homo sapien
ttcaaaatgacctgatctgactcaa

SEQ ID NO: 3136882 - DNA, 25 bp, Homo sapien
tttgataaagattcactcactctga

SEQ ID NO: 3136883 - DNA, 25 bp, Homo sapien
cagatatcaggaatagtgtcaactt

SEQ ID NO: 3136884 - DNA, 25 bp, Homo sapien
gacctgatctgactcaatgaataat

SEQ ID NO: 3136885 - DNA, 25 bp, Homo sapien
gatacggataacctctatgacccct

SEQ ID NO: 3136886 - DNA, 25 bp, Homo sapien
tcaatgagtgcaccctgtcgctcag

SEQ ID NO: 3136887 - DNA, 25 bp, Homo sapien
ctggtctgacttatagatacggata

SEQ ID NO: 3136888 - DNA, 25 bp, Homo sapien
ctgagtcaatgagtgcaccctgtcg

SEQ ID NO: 3136889 - DNA, 25 bp, Homo sapien
gctgaggctctgaagaaaacttagc

SEQ ID NO: 3136890 - DNA, 25 bp, Homo sapien
tgaggctctgaagaaaacttagcag

SEQ ID NO: 3136891 - DNA, 25 bp, Homo sapien
cagctgaggctctgaagaaaactta

SEQ ID NO: 3136892 - DNA, 25 bp, Homo sapien
gcagctgaggctctgaagaaaactt

SEQ ID NO: 3136893 - DNA, 25 bp, Homo sapien
aggatgacatgcatcttaaatagct

SEQ ID NO: 3136894 - DNA, 25 bp, Homo sapien
tggtaagtgggttttaaggatgaca

SEQ ID NO: 3136895 - DNA, 25 bp, Homo sapien
taagtgggttttaaggatgacatgc

SEQ ID NO: 3136896 - DNA, 25 bp, Homo sapien
taaggatgacatgcatcttaaatag

SEQ ID NO: 3136897 - DNA, 25 bp, Homo sapien
tttcctggatgtatctctggggttg

SEQ ID NO: 3136898 - DNA, 25 bp, Homo sapien
ttcctggatgtatctctggggttga

SEQ ID NO: 3136899 - DNA, 25 bp, Homo sapien
atttcctggatgtatctctggggtt

SEQ ID NO: 3136900 - DNA, 25 bp, Homo sapien
gaagaggggtgatggtgtatttccc

SEQ ID NO: 3136901 - DNA, 25 bp, Homo sapien
gtgatggtgtatttccctaagagtt

SEQ ID NO: 3136902 - DNA, 25 bp, Homo sapien
aggggtgatggtgtatttccctaag

SEQ ID NO: 3136903 - DNA, 25 bp, Homo sapien
gggtgatggtgtatttccctaagag

SEQ ID NO: 3136904 - DNA, 25 bp, Homo sapien
ttgtggctttcgcatctgagcagag

SEQ ID NO: 3136905 - DNA, 25 bp, Homo sapien
tgcaggactgaggaccatgccagtg

SEQ ID NO: 3136906 - DNA, 25 bp, Homo sapien
gacacccagtctgtaggggggcaat

SEQ ID NO: 3136907 - DNA, 25 bp, Homo sapien
atgccagtgaacttcgaattgtggc

SEQ ID NO: 3136908 - DNA, 25 bp, Homo sapien
tgcagtgagcagaagactcaagttg

SEQ ID NO: 3136909 - DNA, 25 bp, Homo sapien
ctgcagtgagcagaagactcaagtt

SEQ ID NO: 3136910 - DNA, 25 bp, Homo sapien
gcagtgagcagaagactcaagttgt

SEQ ID NO: 3136911 - DNA, 25 bp, Homo sapien
ccagagtgggaagacgtgagggaca

SEQ ID NO: 3136912 - DNA, 25 bp, Homo sapien
ttcgcagacagcatcctcaggtgtt

SEQ ID NO: 3136913 - DNA, 25 bp, Homo sapien
ggctgaaagggcaacgcgccttcgc

SEQ ID NO: 3136914 - DNA, 25 bp, Homo sapien
gctgatatcaaacctgaccaccagg

SEQ ID NO: 3136915 - DNA, 25 bp, Homo sapien
cccgaacgcccagagcaaagtttga

SEQ ID NO: 3136916 - DNA, 25 bp, Homo sapien
acccgaacgcccagagcaaagtttg

SEQ ID NO: 3136917 - DNA, 25 bp, Homo sapien
ccgaacgcccagagcaaagtttgac

SEQ ID NO: 3136918 - DNA, 25 bp, Homo sapien
gcatttgctatggttcagttccagt

SEQ ID NO: 3136919 - DNA, 25 bp, Homo sapien
gagccgttctaacacctttgccagg

SEQ ID NO: 3136920 - DNA, 25 bp, Homo sapien
gtcactcaaagctactgaatcatgg

SEQ ID NO: 3136921 - DNA, 25 bp, Homo sapien
gatgaaaccggcagctcagtgcaaa

SEQ ID NO: 3136922 - DNA, 25 bp, Homo sapien
ctgagttctgggaagatggtgatga

SEQ ID NO: 3136923 - DNA, 25 bp, Homo sapien
tctgggaagatggtgatgatttcac

SEQ ID NO: 3136924 - DNA, 25 bp, Homo sapien
tgggaagatggtgatgatttcactg

SEQ ID NO: 3136925 - DNA, 25 bp, Homo sapien
gttctgggaagatggtgatgatttc

SEQ ID NO: 3136926 - DNA, 25 bp, Homo sapien
aagcatgagtgggttgctgctgctt

SEQ ID NO: 3136927 - DNA, 25 bp, Homo sapien
tgccatttccatttgaggaagcatg

SEQ ID NO: 3136928 - DNA, 25 bp, Homo sapien
ctttgggcacccactgattgccaga

SEQ ID NO: 3136929 - DNA, 25 bp, Homo sapien
agagcccccatagacttccaataga

SEQ ID NO: 3136930 - DNA, 25 bp, Homo sapien
tcctctccaaggctccttctcagct

SEQ ID NO: 3136931 - DNA, 25 bp, Homo sapien
tctccaaggctccttctcagctcct

SEQ ID NO: 3136932 - DNA, 25 bp, Homo sapien
tccaaggctccttctcagctcctac

SEQ ID NO: 3136933 - DNA, 25 bp, Homo sapien
ggctcctctccaaggctccttctca

SEQ ID NO: 3136934 - DNA, 25 bp, Homo sapien
ttccacaagaacacagatggatggg

SEQ ID NO: 3136935 - DNA, 25 bp, Homo sapien
gggtgaattccacaagaacacagat

SEQ ID NO: 3136936 - DNA, 25 bp, Homo sapien
ctgggtgaattccacaagaacacag

SEQ ID NO: 3136937 - DNA, 25 bp, Homo sapien
tgaattccacaagaacacagatgga

SEQ ID NO: 3136938 - DNA, 25 bp, Homo sapien
tgcttcagcggtaggataaccaatc

SEQ ID NO: 3136939 - DNA, 25 bp, Homo sapien
gctgttttgattgcttcagcggtag

SEQ ID NO: 3136940 - DNA, 25 bp, Homo sapien
tccagctctgccgtatttatactaa

SEQ ID NO: 3136941 - DNA, 25 bp, Homo sapien
ggtaggataaccaatccattcattt

SEQ ID NO: 3136942 - DNA, 25 bp, Homo sapien
cgaatgattggcttaattacagaac

SEQ ID NO: 3136943 - DNA, 25 bp, Homo sapien
aacatatttgtgttcgaatgattgg

SEQ ID NO: 3136944 - DNA, 25 bp, Homo sapien
tgtgttcgaatgattggcttaatta

SEQ ID NO: 3136945 - DNA, 25 bp, Homo sapien
catatttgtgttcgaatgattggct

SEQ ID NO: 3136946 - DNA, 25 bp, Homo sapien
ttgcctcagagagctattgacagct

SEQ ID NO: 3136947 - DNA, 25 bp, Homo sapien
ggttatccttttggttggtgcacca

SEQ ID NO: 3136948 - DNA, 25 bp, Homo sapien
gagggttatccttttggttggtgca

SEQ ID NO: 3136949 - DNA, 25 bp, Homo sapien
cttccccttgatcaaataggcaaca

SEQ ID NO: 3136950 - DNA, 25 bp, Homo sapien
gcttcctccagtaaagtcagttttg

SEQ ID NO: 3136951 - DNA, 25 bp, Homo sapien
tttttggtcccaagcagggatagca

SEQ ID NO: 3136952 - DNA, 25 bp, Homo sapien
cagttttggtatcaacggaagcctg

SEQ ID NO: 3136953 - DNA, 25 bp, Homo sapien
ctcccacaagctcctccttctccat

SEQ ID NO: 3136954 - DNA, 25 bp, Homo sapien
tcctcccacaagctcctccttctcc

SEQ ID NO: 3136955 - DNA, 25 bp, Homo sapien
tttcctcccacaagctcctccttct

SEQ ID NO: 3136956 - DNA, 25 bp, Homo sapien
ctcctgcatttcctcccacaagctc

SEQ ID NO: 3136957 - DNA, 25 bp, Homo sapien
tgctcttggtagccatatgcttccc

SEQ ID NO: 3136958 - DNA, 25 bp, Homo sapien
gctcttggtagccatatgcttccct

SEQ ID NO: 3136959 - DNA, 25 bp, Homo sapien
ctgctcttggtagccatatgcttcc

SEQ ID NO: 3136960 - DNA, 25 bp, Homo sapien
ctcttggtagccatatgcttccctt

SEQ ID NO: 3136961 - DNA, 25 bp, Homo sapien
caatatggagcctatatggaaaaac

SEQ ID NO: 3136962 - DNA, 25 bp, Homo sapien
tatggagcctatatggaaaaacaca

SEQ ID NO: 3136963 - DNA, 25 bp, Homo sapien
tatgacaatatggagcctatatgga

SEQ ID NO: 3136964 - DNA, 25 bp, Homo sapien
ctggtatgacaatatggagcctata

SEQ ID NO: 3136965 - DNA, 25 bp, Homo sapien
ggagaccgcttcatagctggaggcc

SEQ ID NO: 3136966 - DNA, 25 bp, Homo sapien
gagtcaaagctggagaccgcttcat

SEQ ID NO: 3136967 - DNA, 25 bp, Homo sapien
accgcttcatagctggaggccgctt

SEQ ID NO: 3136968 - DNA, 25 bp, Homo sapien
gtcaaagctggagaccgcttcatag

SEQ ID NO: 3136969 - DNA, 25 bp, Homo sapien
gtggattgcatcataaaagcctgag

SEQ ID NO: 3136970 - DNA, 25 bp, Homo sapien
tctccaaaaataacacctgaacaaa

SEQ ID NO: 3136971 - DNA, 25 bp, Homo sapien
gaggaccagtgagcaagcccactta

SEQ ID NO: 3136972 - DNA, 25 bp, Homo sapien
aaaccgctttgaacttttgcattca

SEQ ID NO: 3136973 - DNA, 25 bp, Homo sapien
tgggcaaggcggactgcagacacca

SEQ ID NO: 3136974 - DNA, 25 bp, Homo sapien
gaactcgacccggattcggcaaagc

SEQ ID NO: 3136975 - DNA, 25 bp, Homo sapien
tgcacacactgctgtcggtgaactc

SEQ ID NO: 3136976 - DNA, 25 bp, Homo sapien
gaggaggaagcgtgctgcacacact

SEQ ID NO: 3136977 - DNA, 25 bp, Homo sapien
tctgggctctaggtccgcaatggga

SEQ ID NO: 3136978 - DNA, 25 bp, Homo sapien
tctaggtccgcaatgggaaaggctg

SEQ ID NO: 3136979 - DNA, 25 bp, Homo sapien
tgggctctaggtccgcaatgggaaa

SEQ ID NO: 3136980 - DNA, 25 bp, Homo sapien
tttatcagtctgtggggcgctttct

SEQ ID NO: 3136981 - DNA, 25 bp, Homo sapien
cacgcccctcgcacattccaggacc

SEQ ID NO: 3136982 - DNA, 25 bp, Homo sapien
acgcccctcgcacattccaggaccg

SEQ ID NO: 3136983 - DNA, 25 bp, Homo sapien
cgcccctcgcacattccaggaccgc

SEQ ID NO: 3136984 - DNA, 25 bp, Homo sapien
gcccctcgcacattccaggaccgcc

SEQ ID NO: 3136985 - DNA, 25 bp, Homo sapien
tgttgcgcaaagaggctggccgctg

SEQ ID NO: 3136986 - DNA, 25 bp, Homo sapien
tatatatggcgaaggtgttgcgcaa

SEQ ID NO: 3136987 - DNA, 25 bp, Homo sapien
gcagcgccccgggtatatatggcga

SEQ ID NO: 3136988 - DNA, 25 bp, Homo sapien
gcgcaaagaggctggccgctgtcat

SEQ ID NO: 3136989 - DNA, 25 bp, Homo sapien
cagcgctccctccgcaggtgctggg

SEQ ID NO: 3136990 - DNA, 25 bp, Homo sapien
tggccacgggccctaatagaaacaa

SEQ ID NO: 3136991 - DNA, 25 bp, Homo sapien
aaattgcgggctttgctccccaaga

SEQ ID NO: 3136992 - DNA, 25 bp, Homo sapien
aaggacggacccttcgctgatggcc

SEQ ID NO: 3136993 - DNA, 25 bp, Homo sapien
tggcttggaaaacataaattgcggg

SEQ ID NO: 3136994 - DNA, 25 bp, Homo sapien
tgaagaaatggggagaggaggaagc

SEQ ID NO: 3136995 - DNA, 25 bp, Homo sapien
gaggaggaagcccagggcagtggtc

SEQ ID NO: 3136996 - DNA, 25 bp, Homo sapien
ctgaagaaatggggagaggaggaag

SEQ ID NO: 3136997 - DNA, 25 bp, Homo sapien
ggagaggaggaagcccagggcagtg

SEQ ID NO: 3136998 - DNA, 25 bp, Homo sapien
ccaacccctacattcgcattgtttg

SEQ ID NO: 3136999 - DNA, 25 bp, Homo sapien
tacattcgcattgtttgggcttctc

SEQ ID NO: 3137000 - DNA, 25 bp, Homo sapien
gtacctggcagtcacccaaccccta

SEQ ID NO: 3137001 - DNA, 25 bp, Homo sapien
gggaatgtagggtacctggcagtca

SEQ ID NO: 3137002 - DNA, 25 bp, Homo sapien
acccaggagaggaactttcttgact

SEQ ID NO: 3137003 - DNA, 25 bp, Homo sapien
cccaggagaggaactttcttgactt

SEQ ID NO: 3137004 - DNA, 25 bp, Homo sapien
gcatctcccaattcaggccagggag

SEQ ID NO: 3137005 - DNA, 25 bp, Homo sapien
tgcggccccttcgaggtacttatcg

SEQ ID NO: 3137006 - DNA, 25 bp, Homo sapien
tctcccaattcaggccagggagcca

SEQ ID NO: 3137007 - DNA, 25 bp, Homo sapien
tgggctgctgacctgcggccccttc

SEQ ID NO: 3137008 - DNA, 25 bp, Homo sapien
ttggttacaggtgcctcagtgttat

SEQ ID NO: 3137009 - DNA, 25 bp, Homo sapien
cttggttacaggtgcctcagtgtta

SEQ ID NO: 3137010 - DNA, 25 bp, Homo sapien
tctatcagtgtagccgtggagtagg

SEQ ID NO: 3137011 - DNA, 25 bp, Homo sapien
cacttgatccccgagtcctgaagag

SEQ ID NO: 3137012 - DNA, 25 bp, Homo sapien
agtcctgaagagtgggtaggttcca

SEQ ID NO: 3137013 - DNA, 25 bp, Homo sapien
agtgggctcatctatcagtgtagcc

SEQ ID NO: 3137014 - DNA, 25 bp, Homo sapien
aatatccagggagcacacgaaaaag

SEQ ID NO: 3137015 - DNA, 25 bp, Homo sapien
aacagagaatcttccctttggtgtc

SEQ ID NO: 3137016 - DNA, 25 bp, Homo sapien
gtagagaaatccgagaagtaaaatc

SEQ ID NO: 3137017 - DNA, 25 bp, Homo sapien
gctggaaggcgctactaagaatatc

SEQ ID NO: 3137018 - DNA, 25 bp, Homo sapien
caccatgctgacaacgatggacgtt

SEQ ID NO: 3137019 - DNA, 25 bp, Homo sapien
acaaagggttggacataatagagct

SEQ ID NO: 3137020 - DNA, 25 bp, Homo sapien
ctctgcaccaagacggtcaccagca

SEQ ID NO: 3137021 - DNA, 25 bp, Homo sapien
ttggacataatagagctgttgctga

SEQ ID NO: 3137022 - DNA, 25 bp, Homo sapien
taattctaggcagtgtaactttttc

SEQ ID NO: 3137023 - DNA, 25 bp, Homo sapien
cagcatattgctgcaccttttttga

SEQ ID NO: 3137024 - DNA, 25 bp, Homo sapien
tctaactggacgagaaacattctag

SEQ ID NO: 3137025 - DNA, 25 bp, Homo sapien
tctgtgctggatatcagacatttaa

SEQ ID NO: 3137026 - DNA, 25 bp, Homo sapien
tgaactcactccgatctcccacctg

SEQ ID NO: 3137027 - DNA, 25 bp, Homo sapien
tgattgacgttccaatgttggcccc

SEQ ID NO: 3137028 - DNA, 25 bp, Homo sapien
taatggggatggcagcccgaacagt

SEQ ID NO: 3137029 - DNA, 25 bp, Homo sapien
cctgcatgagcgcaacaatagtgtt

SEQ ID NO: 3137030 - DNA, 25 bp, Homo sapien
taaatcctactcttctaactggcct

SEQ ID NO: 3137031 - DNA, 25 bp, Homo sapien
ggattacagacgctggcaaccacgg

SEQ ID NO: 3137032 - DNA, 25 bp, Homo sapien
taactggccttgcttcaattccgcc

SEQ ID NO: 3137033 - DNA, 25 bp, Homo sapien
cccagcggctaagtttctagctaga

SEQ ID NO: 3137034 - DNA, 25 bp, Homo sapien
ctctccactataagctgggttatga

SEQ ID NO: 3137035 - DNA, 25 bp, Homo sapien
gacaatgagctttgtgaagggctta

SEQ ID NO: 3137036 - DNA, 25 bp, Homo sapien
tatgatctcgaggtaatgggtggcc

SEQ ID NO: 3137037 - DNA, 25 bp, Homo sapien
ccaacacggacagccagttgaagaa

SEQ ID NO: 3137038 - DNA, 25 bp, Homo sapien
gttcattgcaatttggctgataact

SEQ ID NO: 3137039 - DNA, 25 bp, Homo sapien
tgtttttcgctttttcatcgttcat

SEQ ID NO: 3137040 - DNA, 25 bp, Homo sapien
ccaaatcttgacaagactcttgttt

SEQ ID NO: 3137041 - DNA, 25 bp, Homo sapien
gttttgcaccaaatcttgacaagac

SEQ ID NO: 3137042 - DNA, 25 bp, Homo sapien
caaacatgacaaatgcccacaacac

SEQ ID NO: 3137043 - DNA, 25 bp, Homo sapien
aacatgacaaatgcccacaacactg

SEQ ID NO: 3137044 - DNA, 25 bp, Homo sapien
gacaaacatgacaaatgcccacaac

SEQ ID NO: 3137045 - DNA, 25 bp, Homo sapien
aaacatgacaaatgcccacaacact

SEQ ID NO: 3137046 - DNA, 25 bp, Homo sapien
tcatggtccagttttggatgccatc

SEQ ID NO: 3137047 - DNA, 25 bp, Homo sapien
tttggatgccatccgtccaacagag

SEQ ID NO: 3137048 - DNA, 25 bp, Homo sapien
gatgccatccgtccaacagagggaa

SEQ ID NO: 3137049 - DNA, 25 bp, Homo sapien
aggtgcagttagcagtcgagggaac

SEQ ID NO: 3137050 - DNA, 25 bp, Homo sapien
tcaggcctgtcacctcagttcctaa

SEQ ID NO: 3137051 - DNA, 25 bp, Homo sapien
cctggcccctagagttattgactaa

SEQ ID NO: 3137052 - DNA, 25 bp, Homo sapien
aacaaagcatgtagagggaatcctc

SEQ ID NO: 3137053 - DNA, 25 bp, Homo sapien
tgtcacctcagttcctaagccatag

SEQ ID NO: 3137054 - DNA, 25 bp, Homo sapien
attagaataacgaaggatggctggg

SEQ ID NO: 3137055 - DNA, 25 bp, Homo sapien
gatggctgggttggaaaaaacatta

SEQ ID NO: 3137056 - DNA, 25 bp, Homo sapien
gatatagtgctcagaattaatgtgg

SEQ ID NO: 3137057 - DNA, 25 bp, Homo sapien
ttgctaattataaagccccttctgc

SEQ ID NO: 3137058 - DNA, 25 bp, Homo sapien
gagcccaggatcttgacaatcatga

SEQ ID NO: 3137059 - DNA, 25 bp, Homo sapien
tcatgatcaggcaaccacagaggac

SEQ ID NO: 3137060 - DNA, 25 bp, Homo sapien
caagatccgggaggtggaaattcac

SEQ ID NO: 3137061 - DNA, 25 bp, Homo sapien
gagtatgagcaagatggtgcccaca

SEQ ID NO: 3137062 - DNA, 25 bp, Homo sapien
tgtacgatgaaggtcatgcctgccc

SEQ ID NO: 3137063 - DNA, 25 bp, Homo sapien
agagctgctctgtacgatgaaggtc

SEQ ID NO: 3137064 - DNA, 25 bp, Homo sapien
ggccaggtagccagtcaaccatgca

SEQ ID NO: 3137065 - DNA, 25 bp, Homo sapien
atgcctgccccgacgaggatggcca

SEQ ID NO: 3137066 - DNA, 25 bp, Homo sapien
tcaggggggtcaaggccgacgtgaa

SEQ ID NO: 3137067 - DNA, 25 bp, Homo sapien
gtgagtggataagccctctcaatgg

SEQ ID NO: 3137068 - DNA, 25 bp, Homo sapien
agtggataagccctctcaatggtta

SEQ ID NO: 3137069 - DNA, 25 bp, Homo sapien
taagccctctcaatggttatcacgc

SEQ ID NO: 3137070 - DNA, 25 bp, Homo sapien
ctctcaatggttatcacgccgattc

SEQ ID NO: 3137071 - DNA, 25 bp, Homo sapien
tggagtgaactcctcaatgcattgc

SEQ ID NO: 3137072 - DNA, 25 bp, Homo sapien
ctggagtgaactcctcaatgcattg

SEQ ID NO: 3137073 - DNA, 25 bp, Homo sapien
gatgggcaggcgagtgaacgggatc

SEQ ID NO: 3137074 - DNA, 25 bp, Homo sapien
acgggatcgggtaccacagcaagat

SEQ ID NO: 3137075 - DNA, 25 bp, Homo sapien
taccacagcaagatgccggagatgt

SEQ ID NO: 3137076 - DNA, 25 bp, Homo sapien
gcaagatgccggagatgttgaagaa

SEQ ID NO: 3137077 - DNA, 25 bp, Homo sapien
atgatgaagacgacgggaaccccga

SEQ ID NO: 3137078 - DNA, 25 bp, Homo sapien
cgaaccagcgatacttggcagagat

SEQ ID NO: 3137079 - DNA, 25 bp, Homo sapien
caaacaccgtcagcgggatcaggaa

SEQ ID NO: 3137080 - DNA, 25 bp, Homo sapien
gtagaagacggcgaaccagcgatac

SEQ ID NO: 3137081 - DNA, 25 bp, Homo sapien
tctggagtttcttcggcaggacgcg

SEQ ID NO: 3137082 - DNA, 25 bp, Homo sapien
agggcttcagcgagcgcatccacag

SEQ ID NO: 3137083 - DNA, 25 bp, Homo sapien
caggaagttccagttctggagtttc

SEQ ID NO: 3137084 - DNA, 25 bp, Homo sapien
ttggagacgacggcatcccagggct

SEQ ID NO: 3137085 - DNA, 25 bp, Homo sapien
agcggcagcacttggggcagtcaca

SEQ ID NO: 3137086 - DNA, 25 bp, Homo sapien
agcacgcgcggcagcacacgcggca

SEQ ID NO: 3137087 - DNA, 25 bp, Homo sapien
ctgcagcggcagcacttggggcagt

SEQ ID NO: 3137088 - DNA, 25 bp, Homo sapien
cagcacgcgcggcagcacacgcggc

SEQ ID NO: 3137089 - DNA, 25 bp, Homo sapien
cgtgcattcggtctttgagtccgag

SEQ ID NO: 3137090 - DNA, 25 bp, Homo sapien
ggtctcaggagccttgacagggaca

SEQ ID NO: 3137091 - DNA, 25 bp, Homo sapien
gctaatggttatgttatcaaaggtc

SEQ ID NO: 3137092 - DNA, 25 bp, Homo sapien
tacaaggccgtgcattcggtctttg

SEQ ID NO: 3137093 - DNA, 25 bp, Homo sapien
ctcgaggtggtgaaagggtgcagaa

SEQ ID NO: 3137094 - DNA, 25 bp, Homo sapien
gcatgcaaaactcaaggaccatccc

SEQ ID NO: 3137095 - DNA, 25 bp, Homo sapien
tgaaagggtgcagaagtgggaggga

SEQ ID NO: 3137096 - DNA, 25 bp, Homo sapien
agggaggagagcatgcaaaactcaa

SEQ ID NO: 3137097 - DNA, 25 bp, Homo sapien
tgccttcctggagtaaaagattact

SEQ ID NO: 3137098 - DNA, 25 bp, Homo sapien
caagccaaagggaatcgagttaggt

SEQ ID NO: 3137099 - DNA, 25 bp, Homo sapien
gtaaaagattactgagtgaccaggg

SEQ ID NO: 3137100 - DNA, 25 bp, Homo sapien
tgcatcaatttcattcgctaatggg

SEQ ID NO: 3137101 - DNA, 25 bp, Homo sapien
ggttctactgaccaacccagctagg

SEQ ID NO: 3137102 - DNA, 25 bp, Homo sapien
gagaggcctgagcttgatagtcata

SEQ ID NO: 3137103 - DNA, 25 bp, Homo sapien
ccagctaggcgcaggattagacatc

SEQ ID NO: 3137104 - DNA, 25 bp, Homo sapien
tagagagtacacttcctcatctggg

SEQ ID NO: 3137105 - DNA, 25 bp, Homo sapien
tttccaaacaatgacactatgtccc

SEQ ID NO: 3137106 - DNA, 25 bp, Homo sapien
gtctgcagtttccaaacaatgacac

SEQ ID NO: 3137107 - DNA, 25 bp, Homo sapien
aatgacactatgtcccctgacccag

SEQ ID NO: 3137108 - DNA, 25 bp, Homo sapien
caaacaatgacactatgtcccctga

SEQ ID NO: 3137109 - DNA, 25 bp, Homo sapien
caagtgaactgcctggactagcaca

SEQ ID NO: 3137110 - DNA, 25 bp, Homo sapien
tagcacacctgtccacgtgaggaag

SEQ ID NO: 3137111 - DNA, 25 bp, Homo sapien
tgagcacatgtatccagcctgaact

SEQ ID NO: 3137112 - DNA, 25 bp, Homo sapien
tgaactctagttcaggcgtggctcc

SEQ ID NO: 3137113 - DNA, 25 bp, Homo sapien
tctcctccatctgccccactctctg

SEQ ID NO: 3137114 - DNA, 25 bp, Homo sapien
tttcttctcctccatctgccccact

SEQ ID NO: 3137115 - DNA, 25 bp, Homo sapien
cctccatctgccccactctctgtct

SEQ ID NO: 3137116 - DNA, 25 bp, Homo sapien
tcttctcctccatctgccccactct

SEQ ID NO: 3137117 - DNA, 25 bp, Homo sapien
gctacgagcctggataacttgcacg

SEQ ID NO: 3137118 - DNA, 25 bp, Homo sapien
ttgttatctgaccaagagaggagcg

SEQ ID NO: 3137119 - DNA, 25 bp, Homo sapien
gagaggagcgttagactttagccac

SEQ ID NO: 3137120 - DNA, 25 bp, Homo sapien
tactccctgggattcaaggtggcag

SEQ ID NO: 3137121 - DNA, 25 bp, Homo sapien
cacacgtgtgctcgactgtacttaa

SEQ ID NO: 3137122 - DNA, 25 bp, Homo sapien
gagaggacagctaatcaaagcccat

SEQ ID NO: 3137123 - DNA, 25 bp, Homo sapien
gaggccccaatcttgctgcacggct

SEQ ID NO: 3137124 - DNA, 25 bp, Homo sapien
tttcctagataaggctggagcgcac

SEQ ID NO: 3137125 - DNA, 25 bp, Homo sapien
aaatcaccagagtacaaagacggcc

SEQ ID NO: 3137126 - DNA, 25 bp, Homo sapien
cttacatatatacagagtgggcggg

SEQ ID NO: 3137127 - DNA, 25 bp, Homo sapien
tatcctgacttgctgggatggtgga

SEQ ID NO: 3137128 - DNA, 25 bp, Homo sapien
catttccaaatgagagcactagaag

SEQ ID NO: 3137129 - DNA, 25 bp, Homo sapien
tataaaatagatccaaggaggtccc

SEQ ID NO: 3137130 - DNA, 25 bp, Homo sapien
taaaaggagacctcacatttttata

SEQ ID NO: 3137131 - DNA, 25 bp, Homo sapien
atccaaggaggtccctatttccctg

SEQ ID NO: 3137132 - DNA, 25 bp, Homo sapien
atagatccaaggaggtccctatttc

SEQ ID NO: 3137133 - DNA, 25 bp, Homo sapien
cagaaacattggcggcacttattga

SEQ ID NO: 3137134 - DNA, 25 bp, Homo sapien
gctggtttgaatagacacgacaaga

SEQ ID NO: 3137135 - DNA, 25 bp, Homo sapien
ggtttgaatagacacgacaagaacg

SEQ ID NO: 3137136 - DNA, 25 bp, Homo sapien
agaaacattggcggcacttattgag

SEQ ID NO: 3137137 - DNA, 25 bp, Homo sapien
tgagtagatgacttggataatcctt

SEQ ID NO: 3137138 - DNA, 25 bp, Homo sapien
gacttggataatcctttgaaggaag

SEQ ID NO: 3137139 - DNA, 25 bp, Homo sapien
gatgacttggataatcctttgaagg

SEQ ID NO: 3137140 - DNA, 25 bp, Homo sapien
tttttcattgagtagatgacttgga

SEQ ID NO: 3137141 - DNA, 25 bp, Homo sapien
ggagcttgcccacccatgggtcagc

SEQ ID NO: 3137142 - DNA, 25 bp, Homo sapien
tcaggacagtctccattctcatggg

SEQ ID NO: 3137143 - DNA, 25 bp, Homo sapien
catgggtcagctgggaaacctcagg

SEQ ID NO: 3137144 - DNA, 25 bp, Homo sapien
gcctgtagattcacctctgcctgag

SEQ ID NO: 3137145 - DNA, 25 bp, Homo sapien
tcaaccccctagagcatccacagtt

SEQ ID NO: 3137146 - DNA, 25 bp, Homo sapien
gcttccatggcatctgattgtcaat

SEQ ID NO: 3137147 - DNA, 25 bp, Homo sapien
tagagcatccacagttgtcacatct

SEQ ID NO: 3137148 - DNA, 25 bp, Homo sapien
catccacagttgtcacatctgggct

SEQ ID NO: 3137149 - DNA, 25 bp, Homo sapien
ttcttgaacagcaatcatactccat

SEQ ID NO: 3137150 - DNA, 25 bp, Homo sapien
ttgaacagcaatcatactccatggc

SEQ ID NO: 3137151 - DNA, 25 bp, Homo sapien
cctcatattgacaggctcccaggta

SEQ ID NO: 3137152 - DNA, 25 bp, Homo sapien
tcccaggtatcagtgtggttcttgg

SEQ ID NO: 3137153 - DNA, 25 bp, Homo sapien
aatatcttgcccagtgggatctaga

SEQ ID NO: 3137154 - DNA, 25 bp, Homo sapien
caaatcccaatatcttgcccagtgg

SEQ ID NO: 3137155 - DNA, 25 bp, Homo sapien
ggtggctgttttgcccctgatagga

SEQ ID NO: 3137156 - DNA, 25 bp, Homo sapien
tcccaatatcttgcccagtgggatc

SEQ ID NO: 3137157 - DNA, 25 bp, Homo sapien
tatgtctgactttgcgcagctcaca

SEQ ID NO: 3137158 - DNA, 25 bp, Homo sapien
ggatcagagtatgccacaccaaaaa

SEQ ID NO: 3137159 - DNA, 25 bp, Homo sapien
taccttatggaaagactcagatgtg

SEQ ID NO: 3137160 - DNA, 25 bp, Homo sapien
tatcttgtgaaggtaacgtcctctt

SEQ ID NO: 3137161 - DNA, 25 bp, Homo sapien
gactggagtgtagtgtggcacagtc

SEQ ID NO: 3137162 - DNA, 25 bp, Homo sapien
ctttccacctcagccccctaagtag

SEQ ID NO: 3137163 - DNA, 25 bp, Homo sapien
ggagtgtagtgtggcacagtcacag

SEQ ID NO: 3137164 - DNA, 25 bp, Homo sapien
agcttactgcagcctgaacctcccg

SEQ ID NO: 3137165 - DNA, 25 bp, Homo sapien
gacctagcagttataaggcaccttg

SEQ ID NO: 3137166 - DNA, 25 bp, Homo sapien
tagggtcctagtgcttccgaatcat

SEQ ID NO: 3137167 - DNA, 25 bp, Homo sapien
gagtcatagcatgccctacggcaga

SEQ ID NO: 3137168 - DNA, 25 bp, Homo sapien
tacacgttagaatagactggcagca

SEQ ID NO: 3137169 - DNA, 25 bp, Homo sapien
gcttctgggtcacctgggaactccg

SEQ ID NO: 3137170 - DNA, 25 bp, Homo sapien
ggagggtacaccaagcataattgcc

SEQ ID NO: 3137171 - DNA, 25 bp, Homo sapien
aatcacagagcctgaccgtcagctg

SEQ ID NO: 3137172 - DNA, 25 bp, Homo sapien
tccttgtccactctttgggagggta

SEQ ID NO: 3137173 - DNA, 25 bp, Homo sapien
caaggacccatcaaaaccttccagg

SEQ ID NO: 3137174 - DNA, 25 bp, Homo sapien
tcagcgtctcttccacggtgagaag

SEQ ID NO: 3137175 - DNA, 25 bp, Homo sapien
ctctctgatttacctgaggaggtta

SEQ ID NO: 3137176 - DNA, 25 bp, Homo sapien
tgttgcaagaagctaatgcgaaatc

SEQ ID NO: 3137177 - DNA, 25 bp, Homo sapien
ggtgggaatccttctagaggtgtat

SEQ ID NO: 3137178 - DNA, 25 bp, Homo sapien
tgtatgaaattcctggccggtggga

SEQ ID NO: 3137179 - DNA, 25 bp, Homo sapien
gggtggtcttcacagggtgggaatc

SEQ ID NO: 3137180 - DNA, 25 bp, Homo sapien
cctcctggtgctgttggtcatgcta

SEQ ID NO: 3137181 - DNA, 25 bp, Homo sapien
tcctggtttacacaatgattggacg

SEQ ID NO: 3137182 - DNA, 25 bp, Homo sapien
tgtgctcggcccagaggtagatttc

SEQ ID NO: 3137183 - DNA, 25 bp, Homo sapien
cagtgtttctatggatctcacatgc

SEQ ID NO: 3137184 - DNA, 25 bp, Homo sapien
ttgagaattctgtaacacttcctcc

SEQ ID NO: 3137185 - DNA, 25 bp, Homo sapien
catgagtcagtagggtggcttttct

SEQ ID NO: 3137186 - DNA, 25 bp, Homo sapien
gagttagttcaaaaggagccgagca

SEQ ID NO: 3137187 - DNA, 25 bp, Homo sapien
catttgaacggaagatgtggcatga

SEQ ID NO: 3137188 - DNA, 25 bp, Homo sapien
catacataacctccaaagagtgaca

SEQ ID NO: 3137189 - DNA, 25 bp, Homo sapien
aattcaacctgacctgaccttggtg

SEQ ID NO: 3137190 - DNA, 25 bp, Homo sapien
gataaacttgacttagactgacttg

SEQ ID NO: 3137191 - DNA, 25 bp, Homo sapien
tctgaacttgctggatcaacatcta

SEQ ID NO: 3137192 - DNA, 25 bp, Homo sapien
tgttttaggccaccctcacactgat

SEQ ID NO: 3137193 - DNA, 25 bp, Homo sapien
ttatggcttgttggaccaaaaggat

SEQ ID NO: 3137194 - DNA, 25 bp, Homo sapien
caaaaggatcaaccttgtctcttga

SEQ ID NO: 3137195 - DNA, 25 bp, Homo sapien
taagaggtacgagaaagggcagacg

SEQ ID NO: 3137196 - DNA, 25 bp, Homo sapien
tgaaggctgattgcaccaggaggaa

SEQ ID NO: 3137197 - DNA, 25 bp, Homo sapien
cactaccagggtattgacaactacc

SEQ ID NO: 3137198 - DNA, 25 bp, Homo sapien
aatcttgggtataaacactaccagg

SEQ ID NO: 3137199 - DNA, 25 bp, Homo sapien
gaccctatctacaatctcatgaacg

SEQ ID NO: 3137200 - DNA, 25 bp, Homo sapien
ggaattgggcctgacaacctttcag

SEQ ID NO: 3137201 - DNA, 25 bp, Homo sapien
aaagctcgggtccacgggtactctg

SEQ ID NO: 3137202 - DNA, 25 bp, Homo sapien
ccacgggtactctggcaaaattcat

SEQ ID NO: 3137203 - DNA, 25 bp, Homo sapien
tcgggtccacgggtactctggcaaa

SEQ ID NO: 3137204 - DNA, 25 bp, Homo sapien
gtccacgggtactctggcaaaattc

SEQ ID NO: 3137205 - DNA, 25 bp, Homo sapien
ttacctgtcaaaactgagccgtttg

SEQ ID NO: 3137206 - DNA, 25 bp, Homo sapien
tctggcatccagagaagagatgcga

SEQ ID NO: 3137207 - DNA, 25 bp, Homo sapien
tggcagtggcagtccgggctcttgg

SEQ ID NO: 3137208 - DNA, 25 bp, Homo sapien
tcttggttgtggcagggagcaatga

SEQ ID NO: 3137209 - DNA, 25 bp, Homo sapien
ggtagacacttctgtaaaacatcgt

SEQ ID NO: 3137210 - DNA, 25 bp, Homo sapien
ttctcaggtctaccaggacgctgtt

SEQ ID NO: 3137211 - DNA, 25 bp, Homo sapien
taccaggacgctgtttgccagcttt

SEQ ID NO: 3137212 - DNA, 25 bp, Homo sapien
cggctgctctttctcggtagacact

SEQ ID NO: 3137213 - DNA, 25 bp, Homo sapien
gagagggctatttccctatgaggga

SEQ ID NO: 3137214 - DNA, 25 bp, Homo sapien
gcagttgtatggatcgaaaagggca

SEQ ID NO: 3137215 - DNA, 25 bp, Homo sapien
ggttccattggctgctctcttcaga

SEQ ID NO: 3137216 - DNA, 25 bp, Homo sapien
gaatggaactgtccaacgcttccag

SEQ ID NO: 3137217 - DNA, 25 bp, Homo sapien
gagctgtgtggcaccatctgtttgc

SEQ ID NO: 3137218 - DNA, 25 bp, Homo sapien
taccgagcgtatgttcttgctaagc

SEQ ID NO: 3137219 - DNA, 25 bp, Homo sapien
taccactgattttgaggccagatta

SEQ ID NO: 3137220 - DNA, 25 bp, Homo sapien
taaagaccagaaaggacttgtgtgt

SEQ ID NO: 3137221 - DNA, 25 bp, Homo sapien
catggcttagacagaattggtggac

SEQ ID NO: 3137222 - DNA, 25 bp, Homo sapien
caggcattgtcaagaagttcccgag

SEQ ID NO: 3137223 - DNA, 25 bp, Homo sapien
tggtggacctgaaaacctcaaatga

SEQ ID NO: 3137224 - DNA, 25 bp, Homo sapien
cagagcaggctagtggaagaattcc

SEQ ID NO: 3137225 - DNA, 25 bp, Homo sapien
tgaacatccctatgctttttagagc

SEQ ID NO: 3137226 - DNA, 25 bp, Homo sapien
cctaggttgagttaagtggattctc

SEQ ID NO: 3137227 - DNA, 25 bp, Homo sapien
gaatttactgtggaaagtttgcaca

SEQ ID NO: 3137228 - DNA, 25 bp, Homo sapien
gatgctcagttttcgatctgttaaa

SEQ ID NO: 3137229 - DNA, 25 bp, Homo sapien
tatctgcagtgatagtacgcgcctg

SEQ ID NO: 3137230 - DNA, 25 bp, Homo sapien
cagagcgtggcttacaaagacttta

SEQ ID NO: 3137231 - DNA, 25 bp, Homo sapien
tgtctttgaaggaaacgttcgcaac

SEQ ID NO: 3137232 - DNA, 25 bp, Homo sapien
caaagaattataccctcctgcagac

SEQ ID NO: 3137233 - DNA, 25 bp, Homo sapien
aaagagacagttggatgaaccctgc

SEQ ID NO: 3137234 - DNA, 25 bp, Homo sapien
gactcaaccgggacagatgttcaag

SEQ ID NO: 3137235 - DNA, 25 bp, Homo sapien
catccacgtggatagcttgggccct

SEQ ID NO: 3137236 - DNA, 25 bp, Homo sapien
gctcattcatgtttggtacctgggc

SEQ ID NO: 3137237 - DNA, 25 bp, Homo sapien
tcaccgagcccgtttgcgacttaat

SEQ ID NO: 3137238 - DNA, 25 bp, Homo sapien
tctgactgctaaggaccccggagtc

SEQ ID NO: 3137239 - DNA, 25 bp, Homo sapien
gaataaatcatccaatctgcttcgg

SEQ ID NO: 3137240 - DNA, 25 bp, Homo sapien
ggtctaaatttcaattctggcctga

SEQ ID NO: 3137241 - DNA, 25 bp, Homo sapien
cttctctgagttaagccgttgttcc

SEQ ID NO: 3137242 - DNA, 25 bp, Homo sapien
gttccactattagacattcacttct

SEQ ID NO: 3137243 - DNA, 25 bp, Homo sapien
tctctgagttaagccgttgttccac

SEQ ID NO: 3137244 - DNA, 25 bp, Homo sapien
gcaccacgttccactattagacatt

SEQ ID NO: 3137245 - DNA, 25 bp, Homo sapien
cacctgtactttgagagagcccgca

SEQ ID NO: 3137246 - DNA, 25 bp, Homo sapien
cagacacagaagtcgctctagggat

SEQ ID NO: 3137247 - DNA, 25 bp, Homo sapien
tgcatataatgaggccagtgcttcc

SEQ ID NO: 3137248 - DNA, 25 bp, Homo sapien
ggtagccagtcctatacttagcaga

SEQ ID NO: 3137249 - DNA, 25 bp, Homo sapien
ttatttatgtataacgtaccttcta

SEQ ID NO: 3137250 - DNA, 25 bp, Homo sapien
tatttatgtataacgtaccttctaa

SEQ ID NO: 3137251 - DNA, 25 bp, Homo sapien
attatttatgtataacgtaccttct

SEQ ID NO: 3137252 - DNA, 25 bp, Homo sapien
tgatgtcattcaggtcacagaacta

SEQ ID NO: 3137253 - DNA, 25 bp, Homo sapien
atgatgtcattcaggtcacagaact

SEQ ID NO: 3137254 - DNA, 25 bp, Homo sapien
acagaactaagactgggtggaggca

SEQ ID NO: 3137255 - DNA, 25 bp, Homo sapien
gtcacagaactaagactgggtggag

SEQ ID NO: 3137256 - DNA, 25 bp, Homo sapien
ggctcagtctttgggttaatatcgc

SEQ ID NO: 3137257 - DNA, 25 bp, Homo sapien
tatgccttgcaaagtgggtgcgtaa

SEQ ID NO: 3137258 - DNA, 25 bp, Homo sapien
tattcttctattatcaccgtgcctg

SEQ ID NO: 3137259 - DNA, 25 bp, Homo sapien
gccttaataagagtgctgcctggtt

SEQ ID NO: 3137260 - DNA, 25 bp, Homo sapien
taatgataggccctctcagtccacg

SEQ ID NO: 3137261 - DNA, 25 bp, Homo sapien
tcccagtgttatcagctgacataat

SEQ ID NO: 3137262 - DNA, 25 bp, Homo sapien
ccatgttccggtcttccttgcaggg

SEQ ID NO: 3137263 - DNA, 25 bp, Homo sapien
ggccatgttccggtcttccttgcag

SEQ ID NO: 3137264 - DNA, 25 bp, Homo sapien
ctgggtatgcaccacaatcacgatt

SEQ ID NO: 3137265 - DNA, 25 bp, Homo sapien
ggtatgcaccacaatcacgattatg

SEQ ID NO: 3137266 - DNA, 25 bp, Homo sapien
gggtatgcaccacaatcacgattat

SEQ ID NO: 3137267 - DNA, 25 bp, Homo sapien
tatgcaccacaatcacgattatggg

SEQ ID NO: 3137268 - DNA, 25 bp, Homo sapien
attggcggtgcaccagctggcgcct

SEQ ID NO: 3137269 - DNA, 25 bp, Homo sapien
tcagggctgcccttcgttgctgatg

SEQ ID NO: 3137270 - DNA, 25 bp, Homo sapien
tgctgatgaagaattggcggtgcac

SEQ ID NO: 3137271 - DNA, 25 bp, Homo sapien
gctgcccttcgttgctgatgaagaa

SEQ ID NO: 3137272 - DNA, 25 bp, Homo sapien
gaatctagatttacatgccatcagg

SEQ ID NO: 3137273 - DNA, 25 bp, Homo sapien
tcatgttgtagcacatccacccagg

SEQ ID NO: 3137274 - DNA, 25 bp, Homo sapien
gaatgttcggtagctctgcaaggag

SEQ ID NO: 3137275 - DNA, 25 bp, Homo sapien
tgccatcaggaacaagcatcgtctt

SEQ ID NO: 3137276 - DNA, 25 bp, Homo sapien
tgttatgattgcctacagcaggtga

SEQ ID NO: 3137277 - DNA, 25 bp, Homo sapien
cctggaccagatagtgccaacacaa

SEQ ID NO: 3137278 - DNA, 25 bp, Homo sapien
aagggcactaatccagacgcggagg

SEQ ID NO: 3137279 - DNA, 25 bp, Homo sapien
tgtgggaggacacgagcattcagtc

SEQ ID NO: 3137280 - DNA, 25 bp, Homo sapien
ctgggttctgctccaactcattcct

SEQ ID NO: 3137281 - DNA, 25 bp, Homo sapien
agctctggtccatttgccaggtgct

SEQ ID NO: 3137282 - DNA, 25 bp, Homo sapien
tctcagcttggctctagcccatttc

SEQ ID NO: 3137283 - DNA, 25 bp, Homo sapien
ccccaaagccgccatgattgggaat

SEQ ID NO: 3137284 - DNA, 25 bp, Homo sapien
tgggaatgagcaaccatctcagctt

SEQ ID NO: 3137285 - DNA, 25 bp, Homo sapien
aatgggtctctgtgtctaggttgct

SEQ ID NO: 3137286 - DNA, 25 bp, Homo sapien
tcaagctattgtcaacaggtcatta

SEQ ID NO: 3137287 - DNA, 25 bp, Homo sapien
tctgctgagtgaaacaatgggtctc

SEQ ID NO: 3137288 - DNA, 25 bp, Homo sapien
tcaacaggtcattaaaggcacccac

SEQ ID NO: 3137289 - DNA, 25 bp, Homo sapien
tcatctctttgattcccgtgttttc

SEQ ID NO: 3137290 - DNA, 25 bp, Homo sapien
gaacagagcatcgtgatgaggtact

SEQ ID NO: 3137291 - DNA, 25 bp, Homo sapien
cagtaaggagcgttgccaggagaac

SEQ ID NO: 3137292 - DNA, 25 bp, Homo sapien
agctcttgtgatgtctgatctgaaa

SEQ ID NO: 3137293 - DNA, 25 bp, Homo sapien
aagccctgctcacgggcacctgcaa

SEQ ID NO: 3137294 - DNA, 25 bp, Homo sapien
ggcatcgtcgttttatcagccctgt

SEQ ID NO: 3137295 - DNA, 25 bp, Homo sapien
cgtcgttttatcagccctgtggcca

SEQ ID NO: 3137296 - DNA, 25 bp, Homo sapien
aggtgtagtgggcatcgtcgtttta

SEQ ID NO: 3137297 - DNA, 25 bp, Homo sapien
tagtgggcatcgtcgttttatcagc

SEQ ID NO: 3137298 - DNA, 25 bp, Homo sapien
ccacactgcccttacaagtgggctg

SEQ ID NO: 3137299 - DNA, 25 bp, Homo sapien
caagtgggctgtgcctgactatgac

SEQ ID NO: 3137300 - DNA, 25 bp, Homo sapien
ctgtgcctgactatgacctgcccag

SEQ ID NO: 3137301 - DNA, 25 bp, Homo sapien
ataaataggaatcatgccagcagct

SEQ ID NO: 3137302 - DNA, 25 bp, Homo sapien
ggccttgagggagggacgaggagga

SEQ ID NO: 3137303 - DNA, 25 bp, Homo sapien
gggcggagcggagaaagagacaggg

SEQ ID NO: 3137304 - DNA, 25 bp, Homo sapien
gaggaggaggggcggagcggagaaa

SEQ ID NO: 3137305 - DNA, 25 bp, Homo sapien
ggtggagtcagaggcggggcctcaa

SEQ ID NO: 3137306 - DNA, 25 bp, Homo sapien
aagtagatgggatagaaggcggcgc

SEQ ID NO: 3137307 - DNA, 25 bp, Homo sapien
gcactctcggaaaccaggttaccga

SEQ ID NO: 3137308 - DNA, 25 bp, Homo sapien
aaaatgagcgcggtgcgcaggttcc

SEQ ID NO: 3137309 - DNA, 25 bp, Homo sapien
tcagggagatgaagccgccgaaaat

SEQ ID NO: 3137310 - DNA, 25 bp, Homo sapien
caccgcaaggggttagagatcactc

SEQ ID NO: 3137311 - DNA, 25 bp, Homo sapien
tcaggtcaccgcaaggggttagaga

SEQ ID NO: 3137312 - DNA, 25 bp, Homo sapien
ggagtcaggtcaccgcaaggggtta

SEQ ID NO: 3137313 - DNA, 25 bp, Homo sapien
ttggggagtcaggtcaccgcaaggg

SEQ ID NO: 3137314 - DNA, 25 bp, Homo sapien
tcttcaagatgattcgggtttcctg

SEQ ID NO: 3137315 - DNA, 25 bp, Homo sapien
tccttgctgaggtataggtctcaag

SEQ ID NO: 3137316 - DNA, 25 bp, Homo sapien
ggtttcctggtgaacaaaatgagcc

SEQ ID NO: 3137317 - DNA, 25 bp, Homo sapien
cagtgtccgttaatattcccaaggg

SEQ ID NO: 3137318 - DNA, 25 bp, Homo sapien
caatataatcgctggggcaggcgtc

SEQ ID NO: 3137319 - DNA, 25 bp, Homo sapien
ggcctcaatataatcgctggggcag

SEQ ID NO: 3137320 - DNA, 25 bp, Homo sapien
cctttgtcccaagttctagtggcct

SEQ ID NO: 3137321 - DNA, 25 bp, Homo sapien
gtcccaagttctagtggcctcaata

SEQ ID NO: 3137322 - DNA, 25 bp, Homo sapien
ggcactgaaggcgaaagctgtgtaa

SEQ ID NO: 3137323 - DNA, 25 bp, Homo sapien
tgaaggcgaaagctgtgtaaacgct

SEQ ID NO: 3137324 - DNA, 25 bp, Homo sapien
gctggcactgaaggcgaaagctgtg

SEQ ID NO: 3137325 - DNA, 25 bp, Homo sapien
cactgaaggcgaaagctgtgtaaac

SEQ ID NO: 3137326 - DNA, 25 bp, Homo sapien
caacaagcggcctgatggtttcact

SEQ ID NO: 3137327 - DNA, 25 bp, Homo sapien
caatcctaaatgaccgacctgatag

SEQ ID NO: 3137328 - DNA, 25 bp, Homo sapien
gagaacacataggatactcaggcct

SEQ ID NO: 3137329 - DNA, 25 bp, Homo sapien
gaaaagtagcggatgaatggcaacc

SEQ ID NO: 3137330 - DNA, 25 bp, Homo sapien
cgtttaccactaaattatagtaatg

SEQ ID NO: 3137331 - DNA, 25 bp, Homo sapien
tagagccaaaggacgtttaccacta

SEQ ID NO: 3137332 - DNA, 25 bp, Homo sapien
ggcttgaagcactctgacacatttt

SEQ ID NO: 3137333 - DNA, 25 bp, Homo sapien
gtccaacaggcaagggccaagagaa

SEQ ID NO: 3137334 - DNA, 25 bp, Homo sapien
gagagaaatatttgtatttacatgg

SEQ ID NO: 3137335 - DNA, 25 bp, Homo sapien
agagaaaaatcattctttagaaggg

SEQ ID NO: 3137336 - DNA, 25 bp, Homo sapien
gggagagagaaatatttgtatttac

SEQ ID NO: 3137337 - DNA, 25 bp, Homo sapien
atatttgtatttacatgggccaatg

SEQ ID NO: 3137338 - DNA, 25 bp, Homo sapien
caattccagcccgatttatagcttg

SEQ ID NO: 3137339 - DNA, 25 bp, Homo sapien
gcccgatttatagcttgttccttct

SEQ ID NO: 3137340 - DNA, 25 bp, Homo sapien
tcctcttgaacaattccagcccgat

SEQ ID NO: 3137341 - DNA, 25 bp, Homo sapien
ggtggctgcacatcctcttgaacaa

SEQ ID NO: 3137342 - DNA, 25 bp, Homo sapien
aggaacctggcaaacgtgcaaaaag

SEQ ID NO: 3137343 - DNA, 25 bp, Homo sapien
atattagaatgacgccttgggtggc

SEQ ID NO: 3137344 - DNA, 25 bp, Homo sapien
agtaaacactattttcccatgaggg

SEQ ID NO: 3137345 - DNA, 25 bp, Homo sapien
cacaaacccgcacaacacagtagta

SEQ ID NO: 3137346 - DNA, 25 bp, Homo sapien
tgccaaatggatcagaccacacttt

SEQ ID NO: 3137347 - DNA, 25 bp, Homo sapien
tcctgccaaatggatcagaccacac

SEQ ID NO: 3137348 - DNA, 25 bp, Homo sapien
caaatggatcagaccacacttttaa

SEQ ID NO: 3137349 - DNA, 25 bp, Homo sapien
aatggatcagaccacacttttaacc

SEQ ID NO: 3137350 - DNA, 25 bp, Homo sapien
ggtgaggtgactggctgtaccccat

SEQ ID NO: 3137351 - DNA, 25 bp, Homo sapien
gtattcatatcacagctcgcttgag

SEQ ID NO: 3137352 - DNA, 25 bp, Homo sapien
caatcttcagcatgaggtgcacgaa

SEQ ID NO: 3137353 - DNA, 25 bp, Homo sapien
aacccagctgggtgagatagcttca

SEQ ID NO: 3137354 - DNA, 25 bp, Homo sapien
atcattttaatgtctattttttcac

SEQ ID NO: 3137355 - DNA, 25 bp, Homo sapien
tttaattgctttacaaaagatgatt

SEQ ID NO: 3137356 - DNA, 25 bp, Homo sapien
ggcactataattttaattgctttac

SEQ ID NO: 3137357 - DNA, 25 bp, Homo sapien
attgctttacaaaagatgatttaca

SEQ ID NO: 3137358 - DNA, 25 bp, Homo sapien
taattgctttacaaaagatgattta

SEQ ID NO: 3137359 - DNA, 25 bp, Homo sapien
tataaatgtcaaggcaactgagcag

SEQ ID NO: 3137360 - DNA, 25 bp, Homo sapien
ggcaacatgaagagtgatcctttta

SEQ ID NO: 3137361 - DNA, 25 bp, Homo sapien
tggcaacatgaagagtgatcctttt

SEQ ID NO: 3137362 - DNA, 25 bp, Homo sapien
cttttataaatgtcaaggcaactga

SEQ ID NO: 3137363 - DNA, 25 bp, Homo sapien
caggtgtgagtgaagccgcgaagac

SEQ ID NO: 3137364 - DNA, 25 bp, Homo sapien
tgcacgcagcaggtgtgagtgaagc

SEQ ID NO: 3137365 - DNA, 25 bp, Homo sapien
gaagccgcgaagactgaaactgcat

SEQ ID NO: 3137366 - DNA, 25 bp, Homo sapien
gagtgaagccgcgaagactgaaact

SEQ ID NO: 3137367 - DNA, 25 bp, Homo sapien
tcttattgtagtcacgtgtggtgac

SEQ ID NO: 3137368 - DNA, 25 bp, Homo sapien
tattgtagtcacgtgtggtgacaga

SEQ ID NO: 3137369 - DNA, 25 bp, Homo sapien
tatcttattgtagtcacgtgtggtg

SEQ ID NO: 3137370 - DNA, 25 bp, Homo sapien
ttggtatcttattgtagtcacgtgt

SEQ ID NO: 3137371 - DNA, 25 bp, Homo sapien
tcattatcatgggagcgggctagtt

SEQ ID NO: 3137372 - DNA, 25 bp, Homo sapien
agcacaacatgaactaagacacctg

SEQ ID NO: 3137373 - DNA, 25 bp, Homo sapien
caacagcgttgagaggtgggacctt

SEQ ID NO: 3137374 - DNA, 25 bp, Homo sapien
tgtgtattgaatgtgcctcctaggg

SEQ ID NO: 3137375 - DNA, 25 bp, Homo sapien
tggcattagctagaggctgaacgtc

SEQ ID NO: 3137376 - DNA, 25 bp, Homo sapien
taggacgatggcattagctagaggc

SEQ ID NO: 3137377 - DNA, 25 bp, Homo sapien
taaaatctctttgtctcgtaggacg

SEQ ID NO: 3137378 - DNA, 25 bp, Homo sapien
ctctttgtctcgtaggacgatggca

SEQ ID NO: 3137379 - DNA, 25 bp, Homo sapien
ctgggtccgtcccttcagcacacac

SEQ ID NO: 3137380 - DNA, 25 bp, Homo sapien
agcacacactttctgtgagaggagt

SEQ ID NO: 3137381 - DNA, 25 bp, Homo sapien
ggtccgtcccttcagcacacacttt

SEQ ID NO: 3137382 - DNA, 25 bp, Homo sapien
cacacactttctgtgagaggagttt

SEQ ID NO: 3137383 - DNA, 25 bp, Homo sapien
actgggctgcctcttggacttgccc

SEQ ID NO: 3137384 - DNA, 25 bp, Homo sapien
caggcctggttcacaagtctggcct

SEQ ID NO: 3137385 - DNA, 25 bp, Homo sapien
catggctaccactgggctgcctctt

SEQ ID NO: 3137386 - DNA, 25 bp, Homo sapien
ccccaggcctggttcacaagtctgg

SEQ ID NO: 3137387 - DNA, 25 bp, Homo sapien
gcattcagtgtgtggagaaactgac

SEQ ID NO: 3137388 - DNA, 25 bp, Homo sapien
tccccatgctctgaggcatcatctt

SEQ ID NO: 3137389 - DNA, 25 bp, Homo sapien
ttcagtgtgtggagaaactgacagg

SEQ ID NO: 3137390 - DNA, 25 bp, Homo sapien
gctctgaggcatcatctttcatctc

SEQ ID NO: 3137391 - DNA, 25 bp, Homo sapien
ttctcaggcggttaacgagggccac

SEQ ID NO: 3137392 - DNA, 25 bp, Homo sapien
taggaggaccatgctctctgtacag

SEQ ID NO: 3137393 - DNA, 25 bp, Homo sapien
tcataggaggaccatgctctctgta

SEQ ID NO: 3137394 - DNA, 25 bp, Homo sapien
gctgataaagtcagttctcaggcgg

SEQ ID NO: 3137395 - DNA, 25 bp, Homo sapien
tcccctggtgatggtggaaatcttt

SEQ ID NO: 3137396 - DNA, 25 bp, Homo sapien
tagccaagctcagaggtgtttgccc

SEQ ID NO: 3137397 - DNA, 25 bp, Homo sapien
cctgggccaccagaggggttcacct

SEQ ID NO: 3137398 - DNA, 25 bp, Homo sapien
ttctgcttggtagccaagctcagag

SEQ ID NO: 3137399 - DNA, 25 bp, Homo sapien
ggggctgcctcagcagagctttgtt

SEQ ID NO: 3137400 - DNA, 25 bp, Homo sapien
gtagctcttccactccgtgcagcag

SEQ ID NO: 3137401 - DNA, 25 bp, Homo sapien
tcttggggctccattgttcgggtaa

SEQ ID NO: 3137402 - DNA, 25 bp, Homo sapien
cagagctttgttctcctcgtagctc

SEQ ID NO: 3137403 - DNA, 25 bp, Homo sapien
gggtttggcatagcctggaagctgc

SEQ ID NO: 3137404 - DNA, 25 bp, Homo sapien
gcatagcctggaagctgcacgcagc

SEQ ID NO: 3137405 - DNA, 25 bp, Homo sapien
ctggaagctgcacgcagctcctctg

SEQ ID NO: 3137406 - DNA, 25 bp, Homo sapien
tcctctggccactgcagctttctca

SEQ ID NO: 3137407 - DNA, 25 bp, Homo sapien
tcgatgatggccatccaaccctggg

SEQ ID NO: 3137408 - DNA, 25 bp, Homo sapien
atgatggccatccaaccctgggaag

SEQ ID NO: 3137409 - DNA, 25 bp, Homo sapien
ctcgatgatggccatccaaccctgg

SEQ ID NO: 3137410 - DNA, 25 bp, Homo sapien
gaaagatgaggaggtaggtgaggaa

SEQ ID NO: 3137411 - DNA, 25 bp, Homo sapien
tcatttcgccctagggccacggtca

SEQ ID NO: 3137412 - DNA, 25 bp, Homo sapien
cacggtcacccaacagcttgtagga

SEQ ID NO: 3137413 - DNA, 25 bp, Homo sapien
tgtttccctaataatgcggccagcg

SEQ ID NO: 3137414 - DNA, 25 bp, Homo sapien
tctgttatgagtgcagggagacgac

SEQ ID NO: 3137415 - DNA, 25 bp, Homo sapien
ctgaagcaacgggaagccttttctg

SEQ ID NO: 3137416 - DNA, 25 bp, Homo sapien
tcacttctttatgggccagcctcgc

SEQ ID NO: 3137417 - DNA, 25 bp, Homo sapien
gttccacagtcacttctttatgggc

SEQ ID NO: 3137418 - DNA, 25 bp, Homo sapien
cacattcaccctcggtgctcctgaa

SEQ ID NO: 3137419 - DNA, 25 bp, Homo sapien
tgcagctgaacgaacttgaaggcgg

SEQ ID NO: 3137420 - DNA, 25 bp, Homo sapien
gggcggtactttcaggatccaccac

SEQ ID NO: 3137421 - DNA, 25 bp, Homo sapien
tccagagggcggtactttcaggatc

SEQ ID NO: 3137422 - DNA, 25 bp, Homo sapien
tttcaggatccagagggcggtactt

SEQ ID NO: 3137423 - DNA, 25 bp, Homo sapien
gagggtggacgtgcccactgccttc

SEQ ID NO: 3137424 - DNA, 25 bp, Homo sapien
cattgacctcaaaagagggtggacg

SEQ ID NO: 3137425 - DNA, 25 bp, Homo sapien
cgggagagaccgtacccgtgaccat

SEQ ID NO: 3137426 - DNA, 25 bp, Homo sapien
atctgaccacatgcgcaaccatggg

SEQ ID NO: 3137427 - DNA, 25 bp, Homo sapien
gcagcatggtatcatgtcagagtcc

SEQ ID NO: 3137428 - DNA, 25 bp, Homo sapien
tgtgacctgaggcaagctaccctga

SEQ ID NO: 3137429 - DNA, 25 bp, Homo sapien
gggatgatgataactaccttcacaa

SEQ ID NO: 3137430 - DNA, 25 bp, Homo sapien
tgaatgaaccaatggactgaaccct

SEQ ID NO: 3137431 - DNA, 25 bp, Homo sapien
tttagtcctgatagacagctgcctg

SEQ ID NO: 3137432 - DNA, 25 bp, Homo sapien
gtttgagaactaagcctgccgaccc

SEQ ID NO: 3137433 - DNA, 25 bp, Homo sapien
ccctgcttcaggagtgtgtgatcaa

SEQ ID NO: 3137434 - DNA, 25 bp, Homo sapien
gacccgagttcacttaggacagacc

SEQ ID NO: 3137435 - DNA, 25 bp, Homo sapien
ttgggatttgtgctgattggataag

SEQ ID NO: 3137436 - DNA, 25 bp, Homo sapien
tgggatttgtgctgattggataagg

SEQ ID NO: 3137437 - DNA, 25 bp, Homo sapien
ggatttgtgctgattggataagggc

SEQ ID NO: 3137438 - DNA, 25 bp, Homo sapien
atttgtgctgattggataagggcat

SEQ ID NO: 3137439 - DNA, 25 bp, Homo sapien
gagctaaaaactcgatgcgcttggc

SEQ ID NO: 3137440 - DNA, 25 bp, Homo sapien
tgggccgtaagcaactgccaatgca

SEQ ID NO: 3137441 - DNA, 25 bp, Homo sapien
tgccaatgcacttaagggatgaggt

SEQ ID NO: 3137442 - DNA, 25 bp, Homo sapien
taagggatgaggtagggctttcttc

SEQ ID NO: 3137443 - DNA, 25 bp, Homo sapien
gcgaatcagatggttagtgcagcta

SEQ ID NO: 3137444 - DNA, 25 bp, Homo sapien
tataatgcgaatcagatggttagtg

SEQ ID NO: 3137445 - DNA, 25 bp, Homo sapien
taaagcacagattataatgcgaatc

SEQ ID NO: 3137446 - DNA, 25 bp, Homo sapien
cagatggttagtgcagctatgaaga

SEQ ID NO: 3137447 - DNA, 25 bp, Homo sapien
tttcaaatcttctgtggatagctgg

SEQ ID NO: 3137448 - DNA, 25 bp, Homo sapien
cggctggtacacttgattatcataa

SEQ ID NO: 3137449 - DNA, 25 bp, Homo sapien
tccttgggccataatctggaaacca

SEQ ID NO: 3137450 - DNA, 25 bp, Homo sapien
aattaccgcaattagagccttagcc

SEQ ID NO: 3137451 - DNA, 25 bp, Homo sapien
cttccattccttgcatccggctggt

SEQ ID NO: 3137452 - DNA, 25 bp, Homo sapien
cctgcttctgagttgacttgagggt

SEQ ID NO: 3137453 - DNA, 25 bp, Homo sapien
gcttctgagttgacttgagggttgt

SEQ ID NO: 3137454 - DNA, 25 bp, Homo sapien
agacctgcttctgagttgacttgag

SEQ ID NO: 3137455 - DNA, 25 bp, Homo sapien
acaagacctgcttctgagttgactt

SEQ ID NO: 3137456 - DNA, 25 bp, Homo sapien
gtttgctggtctggtatttgttcct

SEQ ID NO: 3137457 - DNA, 25 bp, Homo sapien
ctggtctggtatttgttcctctgtc

SEQ ID NO: 3137458 - DNA, 25 bp, Homo sapien
tgctggtctggtatttgttcctctg

SEQ ID NO: 3137459 - DNA, 25 bp, Homo sapien
tttgctggtctggtatttgttcctc

SEQ ID NO: 3137460 - DNA, 25 bp, Homo sapien
gggccatacttggaggctgccaagt

SEQ ID NO: 3137461 - DNA, 25 bp, Homo sapien
aagctctgctcaggtctgcggccct

SEQ ID NO: 3137462 - DNA, 25 bp, Homo sapien
agcacctatgcgtagtggcacccag

SEQ ID NO: 3137463 - DNA, 25 bp, Homo sapien
tggtctttggccatcagcacctatg

SEQ ID NO: 3137464 - DNA, 25 bp, Homo sapien
ggaaatataggatggtgtaggtgta

SEQ ID NO: 3137465 - DNA, 25 bp, Homo sapien
gggttgctggtaagatcctggaaat

SEQ ID NO: 3137466 - DNA, 25 bp, Homo sapien
atggtccacaggcatccttagcctg

SEQ ID NO: 3137467 - DNA, 25 bp, Homo sapien
taagatcctggaaatataggatggt

SEQ ID NO: 3137468 - DNA, 25 bp, Homo sapien
ttccctctgtctaccagtggaagcc

SEQ ID NO: 3137469 - DNA, 25 bp, Homo sapien
caaatccattaacatcggtacaatc

SEQ ID NO: 3137470 - DNA, 25 bp, Homo sapien
tccacaccggggtttgcattgactg

SEQ ID NO: 3137471 - DNA, 25 bp, Homo sapien
taacatcggtacaatcctcactctt

SEQ ID NO: 3137472 - DNA, 25 bp, Homo sapien
aaattgccttgattcagcagcccct

SEQ ID NO: 3137473 - DNA, 25 bp, Homo sapien
tctgcaaaatgttaacgtcctggtg

SEQ ID NO: 3137474 - DNA, 25 bp, Homo sapien
tattcgagccacttttccggttctg

SEQ ID NO: 3137475 - DNA, 25 bp, Homo sapien
cagccccttgggacgggcatctcat

SEQ ID NO: 3137476 - DNA, 25 bp, Homo sapien
ggacagctgaagaagtagatgacat

SEQ ID NO: 3137477 - DNA, 25 bp, Homo sapien
catccaaagatacacttctatttgc

SEQ ID NO: 3137478 - DNA, 25 bp, Homo sapien
ctgaagaagtagatgacatccaaag

SEQ ID NO: 3137479 - DNA, 25 bp, Homo sapien
ccaaagatacacttctatttgccat

SEQ ID NO: 3137480 - DNA, 25 bp, Homo sapien
cccttgcaactggtaagccaacagc

SEQ ID NO: 3137481 - DNA, 25 bp, Homo sapien
cacttctggcctagttttgccagag

SEQ ID NO: 3137482 - DNA, 25 bp, Homo sapien
cctagttttgccagagttttgataa

SEQ ID NO: 3137483 - DNA, 25 bp, Homo sapien
cagagtccacttctggcctagtttt

SEQ ID NO: 3137484 - DNA, 25 bp, Homo sapien
ggttgtttattcagattgagcttct

SEQ ID NO: 3137485 - DNA, 25 bp, Homo sapien
accagcattatggaagccacaccca

SEQ ID NO: 3137486 - DNA, 25 bp, Homo sapien
ggctgagcggcacctggagacaccc

SEQ ID NO: 3137487 - DNA, 25 bp, Homo sapien
agaaggcagctgatgccggccctcc

SEQ ID NO: 3137488 - DNA, 25 bp, Homo sapien
acaccagcattatggaagccacacc

SEQ ID NO: 3137489 - DNA, 25 bp, Homo sapien
gaggccagggattgtttcccatgag

SEQ ID NO: 3137490 - DNA, 25 bp, Homo sapien
gcgaccagaggccagggattgtttc

SEQ ID NO: 3137491 - DNA, 25 bp, Homo sapien
cactcccttgtcatgtgcgaccaga

SEQ ID NO: 3137492 - DNA, 25 bp, Homo sapien
attgtttcccatgagggactggagg

SEQ ID NO: 3137493 - DNA, 25 bp, Homo sapien
cactcttgctgggtaaagtctatgc

SEQ ID NO: 3137494 - DNA, 25 bp, Homo sapien
ataccactcttgctgggtaaagtct

SEQ ID NO: 3137495 - DNA, 25 bp, Homo sapien
ttgctgtaagtttccagaatcacat

SEQ ID NO: 3137496 - DNA, 25 bp, Homo sapien
agattgctgtaagtttccagaatca

SEQ ID NO: 3137497 - DNA, 25 bp, Homo sapien
aatccttcctctaatattccggagc

SEQ ID NO: 3137498 - DNA, 25 bp, Homo sapien
ttggtgaacacaagctcccaaaaat

SEQ ID NO: 3137499 - DNA, 25 bp, Homo sapien
tgaacacaagctcccaaaaatactt

SEQ ID NO: 3137500 - DNA, 25 bp, Homo sapien
ttccggagccccttgctctatcttg

SEQ ID NO: 3137501 - DNA, 25 bp, Homo sapien
ttcttttgatcaataattaaacgca

SEQ ID NO: 3137502 - DNA, 25 bp, Homo sapien
tctttcaaactcatttcacacaagt

SEQ ID NO: 3137503 - DNA, 25 bp, Homo sapien
tgatcaataattaaacgcaaagtat

SEQ ID NO: 3137504 - DNA, 25 bp, Homo sapien
ataattaaacgcaaagtatctttca

SEQ ID NO: 3137505 - DNA, 25 bp, Homo sapien
tcaggatgtggaaagaccttttggc

SEQ ID NO: 3137506 - DNA, 25 bp, Homo sapien
gaccttttggccttgtgtgaattct

SEQ ID NO: 3137507 - DNA, 25 bp, Homo sapien
catgcaaaggatttctctcgtgtgt

SEQ ID NO: 3137508 - DNA, 25 bp, Homo sapien
attttccacactcatgacatgcaaa

SEQ ID NO: 3137509 - DNA, 25 bp, Homo sapien
tgcaggcagcaatgatagaaaggtc

SEQ ID NO: 3137510 - DNA, 25 bp, Homo sapien
agctgcaggcagcaatgatagaaag

SEQ ID NO: 3137511 - DNA, 25 bp, Homo sapien
ggcagcaatgatagaaaggtcttct

SEQ ID NO: 3137512 - DNA, 25 bp, Homo sapien
atgatagaaaggtcttctgacatca

SEQ ID NO: 3137513 - DNA, 25 bp, Homo sapien
aactgctgggcggactttgaagatg

SEQ ID NO: 3137514 - DNA, 25 bp, Homo sapien
aggacagtcccatgagtccatgcca

SEQ ID NO: 3137515 - DNA, 25 bp, Homo sapien
aaaacatggcatgtcccggggagct

SEQ ID NO: 3137516 - DNA, 25 bp, Homo sapien
gtttggtgcaccttcatgggcataa

SEQ ID NO: 3137517 - DNA, 25 bp, Homo sapien
ggtggcagtggcatccacaatggca

SEQ ID NO: 3137518 - DNA, 25 bp, Homo sapien
aaggtggagtagctttggtgccact

SEQ ID NO: 3137519 - DNA, 25 bp, Homo sapien
tggtgccactttgggcttgtggcat

SEQ ID NO: 3137520 - DNA, 25 bp, Homo sapien
ctgttgtgcagtggctttacagcac

SEQ ID NO: 3137521 - DNA, 25 bp, Homo sapien
cttagggggtcatgaacaacttatt

SEQ ID NO: 3137522 - DNA, 25 bp, Homo sapien
atgaacaacttatttagtctctttg

SEQ ID NO: 3137523 - DNA, 25 bp, Homo sapien
tcttagggggtcatgaacaacttat

SEQ ID NO: 3137524 - DNA, 25 bp, Homo sapien
ccttcttagggggtcatgaacaact

SEQ ID NO: 3137525 - DNA, 25 bp, Homo sapien
tacgtctggttgaaaactgaagtgt

SEQ ID NO: 3137526 - DNA, 25 bp, Homo sapien
agcaggctataaagaggcagtgtca

SEQ ID NO: 3137527 - DNA, 25 bp, Homo sapien
gagagatactcactccaagcaactt

SEQ ID NO: 3137528 - DNA, 25 bp, Homo sapien
tgttaaattactgtgtcaagctcaa

SEQ ID NO: 3137529 - DNA, 25 bp, Homo sapien
ggagggaatttggttgttgaccaca

SEQ ID NO: 3137530 - DNA, 25 bp, Homo sapien
taggagggaatttggttgttgacca

SEQ ID NO: 3137531 - DNA, 25 bp, Homo sapien
aacccacagaaccaatgctggccgc

SEQ ID NO: 3137532 - DNA, 25 bp, Homo sapien
ccacaacccacagaaccaatgctgg

SEQ ID NO: 3137533 - DNA, 25 bp, Homo sapien
tttgcattcaaaagcacctaagtag

SEQ ID NO: 3137534 - DNA, 25 bp, Homo sapien
cattcaaaagcacctaagtagatga

SEQ ID NO: 3137535 - DNA, 25 bp, Homo sapien
caaaagcacctaagtagatgatcat

SEQ ID NO: 3137536 - DNA, 25 bp, Homo sapien
ttcaaaagcacctaagtagatgatc

SEQ ID NO: 3137537 - DNA, 25 bp, Homo sapien
atatgaggagggactagtatttgcc

SEQ ID NO: 3137538 - DNA, 25 bp, Homo sapien
cacctatatgaggagggactagtat

SEQ ID NO: 3137539 - DNA, 25 bp, Homo sapien
ggagcctcacctatatgaggaggga

SEQ ID NO: 3137540 - DNA, 25 bp, Homo sapien
tgaggagggactagtatttgccttg

SEQ ID NO: 3137541 - DNA, 25 bp, Homo sapien
gcagggccttagggatttagaagca

SEQ ID NO: 3137542 - DNA, 25 bp, Homo sapien
tctggttgttaggtaaggaccctgc

SEQ ID NO: 3137543 - DNA, 25 bp, Homo sapien
tgtctcagggcgagtttcctttaga

SEQ ID NO: 3137544 - DNA, 25 bp, Homo sapien
ctgtggtaccgaagacctgccactg

SEQ ID NO: 3137545 - DNA, 25 bp, Homo sapien
gctgcagaaagaactgtggtaccga

SEQ ID NO: 3137546 - DNA, 25 bp, Homo sapien
tgctgtgtctcagggcgagtttcct

SEQ ID NO: 3137547 - DNA, 25 bp, Homo sapien
actgcacccgaggttcagcattggg

SEQ ID NO: 3137548 - DNA, 25 bp, Homo sapien
caatttccacgccatggcaggagat

SEQ ID NO: 3137549 - DNA, 25 bp, Homo sapien
caggactggactgcacccgaggttc

SEQ ID NO: 3137550 - DNA, 25 bp, Homo sapien
gctgggatgagggagtcaacaagga

SEQ ID NO: 3137551 - DNA, 25 bp, Homo sapien
ccagtgaaggcccaacaaatgtgga

SEQ ID NO: 3137552 - DNA, 25 bp, Homo sapien
cctctgagtggtggcatatcatcct

SEQ ID NO: 3137553 - DNA, 25 bp, Homo sapien
gagactccgtgttctgcagctgtta

SEQ ID NO: 3137554 - DNA, 25 bp, Homo sapien
caaatgtggattgagctcaactgca

SEQ ID NO: 3137555 - DNA, 25 bp, Homo sapien
gtcttttattgctcagtttcagagc

SEQ ID NO: 3137556 - DNA, 25 bp, Homo sapien
agtggtcctgatggtcttttattgc

SEQ ID NO: 3137557 - DNA, 25 bp, Homo sapien
cagtggtcctgatggtcttttattg

SEQ ID NO: 3137558 - DNA, 25 bp, Homo sapien
gctaagaaacgtaaattctgcctct

SEQ ID NO: 3137559 - DNA, 25 bp, Homo sapien
actggagaagtttggtaaagctggc

SEQ ID NO: 3137560 - DNA, 25 bp, Homo sapien
cttggggcatagctgacactggaga

SEQ ID NO: 3137561 - DNA, 25 bp, Homo sapien
tggagaggctaagaaacgtaaattc

SEQ ID NO: 3137562 - DNA, 25 bp, Homo sapien
caatttttggaacagccttggggat

SEQ ID NO: 3137563 - DNA, 25 bp, Homo sapien
aatttttggaacagccttggggatg

SEQ ID NO: 3137564 - DNA, 25 bp, Homo sapien
tcatctttcaaggatctgaatggct

SEQ ID NO: 3137565 - DNA, 25 bp, Homo sapien
tgcttgtgggttttcctggtaaagc

SEQ ID NO: 3137566 - DNA, 25 bp, Homo sapien
caaggatgacacatggttttacaat

SEQ ID NO: 3137567 - DNA, 25 bp, Homo sapien
caaagtctacaccattgacagaatt

SEQ ID NO: 3137568 - DNA, 25 bp, Homo sapien
agtaaaaatgtcagaatgaagagga

SEQ ID NO: 3137569 - DNA, 25 bp, Homo sapien
agagcagtccaatcatctcaaagag

SEQ ID NO: 3137570 - DNA, 25 bp, Homo sapien
caggttgttcttggaggctcagtca

SEQ ID NO: 3137571 - DNA, 25 bp, Homo sapien
tcatgaaatgccgtagaaagagccc

SEQ ID NO: 3137572 - DNA, 25 bp, Homo sapien
agagaaactcaatacaggttgttct

SEQ ID NO: 3137573 - DNA, 25 bp, Homo sapien
taatgtgactcgaagcttctcttgg

SEQ ID NO: 3137574 - DNA, 25 bp, Homo sapien
tcaagcaaggcaactgggctgcaca

SEQ ID NO: 3137575 - DNA, 25 bp, Homo sapien
cagatagacatcttcaaggtctggc

SEQ ID NO: 3137576 - DNA, 25 bp, Homo sapien
cacgctgagctctgaaggtggtcca

SEQ ID NO: 3137577 - DNA, 25 bp, Homo sapien
tgcattcagctcaagaaatgacttg

SEQ ID NO: 3137578 - DNA, 25 bp, Homo sapien
tagctgtactggatggtagagcaca

SEQ ID NO: 3137579 - DNA, 25 bp, Homo sapien
cttgaatttcctgacccagtgtgac

SEQ ID NO: 3137580 - DNA, 25 bp, Homo sapien
ttctcctgattgcattcagctcaag

SEQ ID NO: 3137581 - DNA, 25 bp, Homo sapien
ctctctttggagagaaaccagtcag

SEQ ID NO: 3137582 - DNA, 25 bp, Homo sapien
atcatccgttgttgtttggtttcca

SEQ ID NO: 3137583 - DNA, 25 bp, Homo sapien
caggggtgcccatacacatcagcag

SEQ ID NO: 3137584 - DNA, 25 bp, Homo sapien
tctgcggcaggtagtttctctcttg

SEQ ID NO: 3137585 - DNA, 25 bp, Homo sapien
ctcgaagaattgccccacagaggcg

SEQ ID NO: 3137586 - DNA, 25 bp, Homo sapien
cgaagaattgccccacagaggcgtt

SEQ ID NO: 3137587 - DNA, 25 bp, Homo sapien
tcgaagaattgccccacagaggcgt

SEQ ID NO: 3137588 - DNA, 25 bp, Homo sapien
gaagaattgccccacagaggcgttg

SEQ ID NO: 3137589 - DNA, 25 bp, Homo sapien
actctgcccttgaggtggcgaagag

SEQ ID NO: 3137590 - DNA, 25 bp, Homo sapien
ggcagaactcaacgtggaaacgttg

SEQ ID NO: 3137591 - DNA, 25 bp, Homo sapien
gtgaacgtgagaatgagaactggca

SEQ ID NO: 3137592 - DNA, 25 bp, Homo sapien
gcgaagatggcaccggcctccatca

SEQ ID NO: 3137593 - DNA, 25 bp, Homo sapien
gggggtgagactatatttagcccaa

SEQ ID NO: 3137594 - DNA, 25 bp, Homo sapien
ggtgagactatatttagcccaactc

SEQ ID NO: 3137595 - DNA, 25 bp, Homo sapien
tccagtgaaatgagtgcagggggtg

SEQ ID NO: 3137596 - DNA, 25 bp, Homo sapien
tgcagggggtgagactatatttagc

SEQ ID NO: 3137597 - DNA, 25 bp, Homo sapien
attctcacagttttctgaccggtgt

SEQ ID NO: 3137598 - DNA, 25 bp, Homo sapien
aggaccttggcacatccctttggaa

SEQ ID NO: 3137599 - DNA, 25 bp, Homo sapien
aaggtggccaactccacacttgcca

SEQ ID NO: 3137600 - DNA, 25 bp, Homo sapien
tggccaactccacacttgccagatt

SEQ ID NO: 3137601 - DNA, 25 bp, Homo sapien
tctgagaacctgttggctggccctc

SEQ ID NO: 3137602 - DNA, 25 bp, Homo sapien
gccactgcttgagaaagacagccaa

SEQ ID NO: 3137603 - DNA, 25 bp, Homo sapien
ggcaatgtcctatactccacactgg

SEQ ID NO: 3137604 - DNA, 25 bp, Homo sapien
tcactgcatgcctgttctgagaacc

SEQ ID NO: 3137605 - DNA, 25 bp, Homo sapien
gccattaaaacctccacatgacact

SEQ ID NO: 3137606 - DNA, 25 bp, Homo sapien
gctcttcaatgccacaggagcacac

SEQ ID NO: 3137607 - DNA, 25 bp, Homo sapien
agcagaggccattaaaacctccaca

SEQ ID NO: 3137608 - DNA, 25 bp, Homo sapien
tcttcaatgccacaggagcacacag

SEQ ID NO: 3137609 - DNA, 25 bp, Homo sapien
aagttgctgggcattcagattctag

SEQ ID NO: 3137610 - DNA, 25 bp, Homo sapien
ctgggcattcagattctagaaacgt

SEQ ID NO: 3137611 - DNA, 25 bp, Homo sapien
tgggcattcagattctagaaacgta

SEQ ID NO: 3137612 - DNA, 25 bp, Homo sapien
agttgctgggcattcagattctaga

SEQ ID NO: 3137613 - DNA, 25 bp, Homo sapien
gattgccttcgcatagggtctccca

SEQ ID NO: 3137614 - DNA, 25 bp, Homo sapien
gggctcgtggaaaatcaacattgct

SEQ ID NO: 3137615 - DNA, 25 bp, Homo sapien
cgacagctgggtggataacggcacc

SEQ ID NO: 3137616 - DNA, 25 bp, Homo sapien
cagatcctcacatgaacaaagacaa

SEQ ID NO: 3137617 - DNA, 25 bp, Homo sapien
gacaaggtgggttataaatacactc

SEQ ID NO: 3137618 - DNA, 25 bp, Homo sapien
tacactcattagcttccatgctggg

SEQ ID NO: 3137619 - DNA, 25 bp, Homo sapien
ctgtttctcgttagggccctggctc

SEQ ID NO: 3137620 - DNA, 25 bp, Homo sapien
ggctggatagccctgaagaggctca

SEQ ID NO: 3137621 - DNA, 25 bp, Homo sapien
tcagtgacaggagatagcaccaaca

SEQ ID NO: 3137622 - DNA, 25 bp, Homo sapien
cctgatccttgtcacaatcaccatg

SEQ ID NO: 3137623 - DNA, 25 bp, Homo sapien
atccatgttttccaagtattccgcc

SEQ ID NO: 3137624 - DNA, 25 bp, Homo sapien
gacaggagatagcaccaacatattt

SEQ ID NO: 3137625 - DNA, 25 bp, Homo sapien
ttttccccctatttagtagcatggc

SEQ ID NO: 3137626 - DNA, 25 bp, Homo sapien
ttccccctatttagtagcatggcag

SEQ ID NO: 3137627 - DNA, 25 bp, Homo sapien
ccctatttagtagcatggcagtgga

SEQ ID NO: 3137628 - DNA, 25 bp, Homo sapien
cccctatttagtagcatggcagtgg

SEQ ID NO: 3137629 - DNA, 25 bp, Homo sapien
tatccttctaatgttgctgtgcaaa

SEQ ID NO: 3137630 - DNA, 25 bp, Homo sapien
caaccctcagacgactccagtgaag

SEQ ID NO: 3137631 - DNA, 25 bp, Homo sapien
gactccagtgaagcgttttgtatcc

SEQ ID NO: 3137632 - DNA, 25 bp, Homo sapien
tggctgccaatcatgctggatccaa

SEQ ID NO: 3137633 - DNA, 25 bp, Homo sapien
gcgcatcacggtgacgctggcacag

SEQ ID NO: 3137634 - DNA, 25 bp, Homo sapien
ctagaccaatggcttgcgcatcacg

SEQ ID NO: 3137635 - DNA, 25 bp, Homo sapien
aatggcttgcgcatcacggtgacgc

SEQ ID NO: 3137636 - DNA, 25 bp, Homo sapien
gcatcacggtgacgctggcacagag

SEQ ID NO: 3137637 - DNA, 25 bp, Homo sapien
taacacgttgtgttcttgggtggtg

SEQ ID NO: 3137638 - DNA, 25 bp, Homo sapien
gactagtaacacgttgtgttcttgg

SEQ ID NO: 3137639 - DNA, 25 bp, Homo sapien
ttttgttgactagtaacacgttgtg

SEQ ID NO: 3137640 - DNA, 25 bp, Homo sapien
tagaattttgttgactagtaacacg

SEQ ID NO: 3137641 - DNA, 25 bp, Homo sapien
ggagaattccttgcattatgtccaa

SEQ ID NO: 3137642 - DNA, 25 bp, Homo sapien
gagaattccttgcattatgtccaat

SEQ ID NO: 3137643 - DNA, 25 bp, Homo sapien
atttttgcaaaaagagacacttcac

SEQ ID NO: 3137644 - DNA, 25 bp, Homo sapien
tttttatatcaatgagatcttgatc

SEQ ID NO: 3137645 - DNA, 25 bp, Homo sapien
taaggtgtcttgaattcataagaac

SEQ ID NO: 3137646 - DNA, 25 bp, Homo sapien
cattcatggctaatcacttgttcct

SEQ ID NO: 3137647 - DNA, 25 bp, Homo sapien
aaagctggcgtcttacagccgccgc

SEQ ID NO: 3137648 - DNA, 25 bp, Homo sapien
gccgccgccactcactcttccaagc

SEQ ID NO: 3137649 - DNA, 25 bp, Homo sapien
ctcttccaagccgttgtcctggctg

SEQ ID NO: 3137650 - DNA, 25 bp, Homo sapien
caaagctggcgtcttacagccgccg

SEQ ID NO: 3137651 - DNA, 25 bp, Homo sapien
ttatatgttcagacgaatttcttct

SEQ ID NO: 3137652 - DNA, 25 bp, Homo sapien
gtctgtcccagattaattcatactg

SEQ ID NO: 3137653 - DNA, 25 bp, Homo sapien
tatatgttcagacgaatttcttcta

SEQ ID NO: 3137654 - DNA, 25 bp, Homo sapien
aatgtctgtcccagattaattcata

SEQ ID NO: 3137655 - DNA, 25 bp, Homo sapien
gatattgcacaaaacgaaggcagtt

SEQ ID NO: 3137656 - DNA, 25 bp, Homo sapien
tttgagagtccaaaaccttttcaca

SEQ ID NO: 3137657 - DNA, 25 bp, Homo sapien
tcacaggatattgcacaaaacgaag

SEQ ID NO: 3137658 - DNA, 25 bp, Homo sapien
aacgaaggcagtttgagagtccaaa

SEQ ID NO: 3137659 - DNA, 25 bp, Homo sapien
taatgttttccagactcgagcaacg

SEQ ID NO: 3137660 - DNA, 25 bp, Homo sapien
gaagcaaatccagcctagttcctag

SEQ ID NO: 3137661 - DNA, 25 bp, Homo sapien
gaatacccctaagataacccagatg

SEQ ID NO: 3137662 - DNA, 25 bp, Homo sapien
tatagtagagccaggtcaggaagca

SEQ ID NO: 3137663 - DNA, 25 bp, Homo sapien
gaagaagaggcgaagtcaatactgg

SEQ ID NO: 3137664 - DNA, 25 bp, Homo sapien
gaggcgaagtcaatactgggcttct

SEQ ID NO: 3137665 - DNA, 25 bp, Homo sapien
gaagaggcgaagtcaatactgggct

SEQ ID NO: 3137666 - DNA, 25 bp, Homo sapien
gcgaagtcaatactgggcttctgtg

SEQ ID NO: 3137667 - DNA, 25 bp, Homo sapien
gcaaataatgcgtgtgcttttattg

SEQ ID NO: 3137668 - DNA, 25 bp, Homo sapien
ctgaaggagcaaataatgcgtgtgc

SEQ ID NO: 3137669 - DNA, 25 bp, Homo sapien
agttggctgaaggagcaaataatgc

SEQ ID NO: 3137670 - DNA, 25 bp, Homo sapien
ggagcaaataatgcgtgtgctttta

SEQ ID NO: 3137671 - DNA, 25 bp, Homo sapien
gttttatctagacctttgacttctg

SEQ ID NO: 3137672 - DNA, 25 bp, Homo sapien
ttcttgcaaatatctcagttttatc

SEQ ID NO: 3137673 - DNA, 25 bp, Homo sapien
tatctcagttttatctagaagatct

SEQ ID NO: 3137674 - DNA, 25 bp, Homo sapien
caatgcccggcctgtagtgagtttt

SEQ ID NO: 3137675 - DNA, 25 bp, Homo sapien
tattaacagggattccagcgtctgt

SEQ ID NO: 3137676 - DNA, 25 bp, Homo sapien
ggattccagcgtctgtaatgtaaac

SEQ ID NO: 3137677 - DNA, 25 bp, Homo sapien
ctaaggtattaacagggattccagc

SEQ ID NO: 3137678 - DNA, 25 bp, Homo sapien
aaggtattaacagggattccagcgt

SEQ ID NO: 3137679 - DNA, 25 bp, Homo sapien
gaatggcctcggacatagatactgc

SEQ ID NO: 3137680 - DNA, 25 bp, Homo sapien
tgagccattggaatctgtgccctcc

SEQ ID NO: 3137681 - DNA, 25 bp, Homo sapien
gtgccctcctcttagattccagaat

SEQ ID NO: 3137682 - DNA, 25 bp, Homo sapien
tgcaagtgggatacagagtggttct

SEQ ID NO: 3137683 - DNA, 25 bp, Homo sapien
gaaccgttggcataccaagcactgg

SEQ ID NO: 3137684 - DNA, 25 bp, Homo sapien
caaatggcgatgactgtgtcttggc

SEQ ID NO: 3137685 - DNA, 25 bp, Homo sapien
caggagaagtaaagccgggcctaat

SEQ ID NO: 3137686 - DNA, 25 bp, Homo sapien
gggcctaatcggattcccaggaaga

SEQ ID NO: 3137687 - DNA, 25 bp, Homo sapien
tgcgaccacagctcacgagagcctt

SEQ ID NO: 3137688 - DNA, 25 bp, Homo sapien
caaattaatatggtaggatgaaaac

SEQ ID NO: 3137689 - DNA, 25 bp, Homo sapien
ttagcctaagctttcactctgccgc

SEQ ID NO: 3137690 - DNA, 25 bp, Homo sapien
tactgtcccacgtgatatttaaagc

SEQ ID NO: 3137691 - DNA, 25 bp, Homo sapien
caggatatgcaacacgggttaacca

SEQ ID NO: 3137692 - DNA, 25 bp, Homo sapien
tggaattctataaacacaggatatg

SEQ ID NO: 3137693 - DNA, 25 bp, Homo sapien
cacgacctttctggaattctataaa

SEQ ID NO: 3137694 - DNA, 25 bp, Homo sapien
tatgcaacacgggttaaccacttgt

SEQ ID NO: 3137695 - DNA, 25 bp, Homo sapien
gcgagcggcactgcgcatgtaccca

SEQ ID NO: 3137696 - DNA, 25 bp, Homo sapien
ggcactgcgcatgtacccaatgcgg

SEQ ID NO: 3137697 - DNA, 25 bp, Homo sapien
actgcgcatgtacccaatgcgggca

SEQ ID NO: 3137698 - DNA, 25 bp, Homo sapien
agcggcactgcgcatgtacccaatg

SEQ ID NO: 3137699 - DNA, 25 bp, Homo sapien
cctagagattcccagatccagcact

SEQ ID NO: 3137700 - DNA, 25 bp, Homo sapien
tcgccgcccgaaacctgttgaaggc

SEQ ID NO: 3137701 - DNA, 25 bp, Homo sapien
ccggagaactggaattcgccgcccg

SEQ ID NO: 3137702 - DNA, 25 bp, Homo sapien
ctagagattcccagatccagcactg

SEQ ID NO: 3137703 - DNA, 25 bp, Homo sapien
cgagtctgcccagaggacccgatca

SEQ ID NO: 3137704 - DNA, 25 bp, Homo sapien
agctcttgccgctcgcgtgctgcat

SEQ ID NO: 3137705 - DNA, 25 bp, Homo sapien
ccagaggacccgatcaaagctcttg

SEQ ID NO: 3137706 - DNA, 25 bp, Homo sapien
cgatcaaagctcttgccgctcgcgt

SEQ ID NO: 3137707 - DNA, 25 bp, Homo sapien
aatgggctgcgtttcacaggcctag

SEQ ID NO: 3137708 - DNA, 25 bp, Homo sapien
ggaaaatgggctgcgtttcacaggc

SEQ ID NO: 3137709 - DNA, 25 bp, Homo sapien
tgggctgcgtttcacaggcctagat

SEQ ID NO: 3137710 - DNA, 25 bp, Homo sapien
gctgcgtttcacaggcctagatgaa

SEQ ID NO: 3137711 - DNA, 25 bp, Homo sapien
ggacgaggaatggaggggtcaggag

SEQ ID NO: 3137712 - DNA, 25 bp, Homo sapien
gggtcaggaggcggggccgaggaga

SEQ ID NO: 3137713 - DNA, 25 bp, Homo sapien
cggggacgaggaatggaggggtcag

SEQ ID NO: 3137714 - DNA, 25 bp, Homo sapien
gaatggaggggtcaggaggcggggc

SEQ ID NO: 3137715 - DNA, 25 bp, Homo sapien
tttaggacgcgctttgagggacgta

SEQ ID NO: 3137716 - DNA, 25 bp, Homo sapien
ttaggacgcgctttgagggacgtac

SEQ ID NO: 3137717 - DNA, 25 bp, Homo sapien
ggacgcgctttgagggacgtacgtg

SEQ ID NO: 3137718 - DNA, 25 bp, Homo sapien
gcgctttgagggacgtacgtggaga

SEQ ID NO: 3137719 - DNA, 25 bp, Homo sapien
cgggcgagccctccgtgtggtccat

SEQ ID NO: 3137720 - DNA, 25 bp, Homo sapien
ccaggcgatggagcatgcgcaggcg

SEQ ID NO: 3137721 - DNA, 25 bp, Homo sapien
gcgatggagcatgcgcaggcggctc

SEQ ID NO: 3137722 - DNA, 25 bp, Homo sapien
tcctccgcgggcgagccctccgtgt

SEQ ID NO: 3137723 - DNA, 25 bp, Homo sapien
gcgaagagccagacgcctcgcgccg

SEQ ID NO: 3137724 - DNA, 25 bp, Homo sapien
ccgccgcgaagagccagacgcctcg

SEQ ID NO: 3137725 - DNA, 25 bp, Homo sapien
ccgcccgcagagtaggggatcctgc

SEQ ID NO: 3137726 - DNA, 25 bp, Homo sapien
gccgccgccgcgaagagccagacgc

SEQ ID NO: 3137727 - DNA, 25 bp, Homo sapien
tccacaaactctcgccaaaactcca

SEQ ID NO: 3137728 - DNA, 25 bp, Homo sapien
cttccacaaactctcgccaaaactc

SEQ ID NO: 3137729 - DNA, 25 bp, Homo sapien
tcgcgagattccccccgacgccttc

SEQ ID NO: 3137730 - DNA, 25 bp, Homo sapien
cctcgcgagattccccccgacgcct

SEQ ID NO: 3137731 - DNA, 25 bp, Homo sapien
tgtggcaggtcactgggctaacgac

SEQ ID NO: 3137732 - DNA, 25 bp, Homo sapien
taacgacaagagtgtggcacaacaa

SEQ ID NO: 3137733 - DNA, 25 bp, Homo sapien
gacgccacgggtcggacaaagcgcc

SEQ ID NO: 3137734 - DNA, 25 bp, Homo sapien
acaaagcgcccaaggcggcgaaaca

SEQ ID NO: 3137735 - DNA, 25 bp, Homo sapien
tgagacagttcagcagacgtacacc

SEQ ID NO: 3137736 - DNA, 25 bp, Homo sapien
tgccgagagaataagcccgtggatg

SEQ ID NO: 3137737 - DNA, 25 bp, Homo sapien
tacaccgtgggttgtggataaatca

SEQ ID NO: 3137738 - DNA, 25 bp, Homo sapien
tcttgtgtgcacttagaagcagcag

SEQ ID NO: 3137739 - DNA, 25 bp, Homo sapien
gccaaatgaatatccattgtggcta

SEQ ID NO: 3137740 - DNA, 25 bp, Homo sapien
tgaatatccattgtggctatctgaa

SEQ ID NO: 3137741 - DNA, 25 bp, Homo sapien
aatatccattgtggctatctgaaac

SEQ ID NO: 3137742 - DNA, 25 bp, Homo sapien
acgccaaatgaatatccattgtggc

SEQ ID NO: 3137743 - DNA, 25 bp, Homo sapien
caagtcatgagcttcaccaaaccat

SEQ ID NO: 3137744 - DNA, 25 bp, Homo sapien
ccaagtcatgagcttcaccaaacca

SEQ ID NO: 3137745 - DNA, 25 bp, Homo sapien
gtcatgagcttcaccaaaccatttc

SEQ ID NO: 3137746 - DNA, 25 bp, Homo sapien
catgagcttcaccaaaccatttctt

SEQ ID NO: 3137747 - DNA, 25 bp, Homo sapien
catggatgacagatacaacagactt

SEQ ID NO: 3137748 - DNA, 25 bp, Homo sapien
gaggctgtggaaacagccagctgca

SEQ ID NO: 3137749 - DNA, 25 bp, Homo sapien
cacttccttgacatgtggataagca

SEQ ID NO: 3137750 - DNA, 25 bp, Homo sapien
tattgcaggtggcataaccaagaag

SEQ ID NO: 3137751 - DNA, 25 bp, Homo sapien
aagggaaaacttaagttgcaatgca

SEQ ID NO: 3137752 - DNA, 25 bp, Homo sapien
tcagaagaattctcatgtatgctct

SEQ ID NO: 3137753 - DNA, 25 bp, Homo sapien
gggaaaacttaagttgcaatgcaat

SEQ ID NO: 3137754 - DNA, 25 bp, Homo sapien
gaaaacttaagttgcaatgcaatta

SEQ ID NO: 3137755 - DNA, 25 bp, Homo sapien
tataggatggtatcacagatacagg

SEQ ID NO: 3137756 - DNA, 25 bp, Homo sapien
gcaagtttaatgagcctgcagaaca

SEQ ID NO: 3137757 - DNA, 25 bp, Homo sapien
gatggacaacagcactataacagat

SEQ ID NO: 3137758 - DNA, 25 bp, Homo sapien
tgaagttaacgtttacctgtggcag

SEQ ID NO: 3137759 - DNA, 25 bp, Homo sapien
tctgggagctgggatctagcgaact

SEQ ID NO: 3137760 - DNA, 25 bp, Homo sapien
tcactttgcatcgatttagcctaca

SEQ ID NO: 3137761 - DNA, 25 bp, Homo sapien
gacaggattttagggtaacactggc

SEQ ID NO: 3137762 - DNA, 25 bp, Homo sapien
aaatctgtgggcaccatttacaaca

SEQ ID NO: 3137763 - DNA, 25 bp, Homo sapien
aaacgctaaacaaagaccatcaggg

SEQ ID NO: 3137764 - DNA, 25 bp, Homo sapien
gcagagatcgcccatgggcgacaga

SEQ ID NO: 3137765 - DNA, 25 bp, Homo sapien
aagcaaggaagcactacgctaccat

SEQ ID NO: 3137766 - DNA, 25 bp, Homo sapien
gcactacgctaccatttaggctttt

SEQ ID NO: 3137767 - DNA, 25 bp, Homo sapien
tatgtacgcatttacatgcattcaa

SEQ ID NO: 3137768 - DNA, 25 bp, Homo sapien
gattatgtacgcatttacatgcatt

SEQ ID NO: 3137769 - DNA, 25 bp, Homo sapien
aaagattatgtacgcatttacatgc

SEQ ID NO: 3137770 - DNA, 25 bp, Homo sapien
aaaaaagattatgtacgcatttaca

SEQ ID NO: 3137771 - DNA, 25 bp, Homo sapien
gaccagcagcaatagaatcatccgg

SEQ ID NO: 3137772 - DNA, 25 bp, Homo sapien
gttccctccacgcagctaaatgtag

SEQ ID NO: 3137773 - DNA, 25 bp, Homo sapien
taggatgttggactagccagctaca

SEQ ID NO: 3137774 - DNA, 25 bp, Homo sapien
tgaattttgcaagccactgtgagaa

SEQ ID NO: 3137775 - DNA, 25 bp, Homo sapien
gaaactctcagtttgtgccgtccta

SEQ ID NO: 3137776 - DNA, 25 bp, Homo sapien
cagaaactctcagtttgtgccgtcc

SEQ ID NO: 3137777 - DNA, 25 bp, Homo sapien
cagaacagaaactctcagtttgtgc

SEQ ID NO: 3137778 - DNA, 25 bp, Homo sapien
aacagaaactctcagtttgtgccgt

SEQ ID NO: 3137779 - DNA, 25 bp, Homo sapien
tctaccctatacaagagaaaacaag

SEQ ID NO: 3137780 - DNA, 25 bp, Homo sapien
tatagtcgggccatatggtacacac

SEQ ID NO: 3137781 - DNA, 25 bp, Homo sapien
aaatgttagtacacagcctatgcaa

SEQ ID NO: 3137782 - DNA, 25 bp, Homo sapien
tcagtgcatgatgtttgacaagttc

SEQ ID NO: 3137783 - DNA, 25 bp, Homo sapien
tgggcactcgtggtttttgaacaaa

SEQ ID NO: 3137784 - DNA, 25 bp, Homo sapien
aatgtttaccaacatgggcactcgt

SEQ ID NO: 3137785 - DNA, 25 bp, Homo sapien
aaattcatctctaacaagaaccaca

SEQ ID NO: 3137786 - DNA, 25 bp, Homo sapien
ccaacatgggcactcgtggtttttg

SEQ ID NO: 3137787 - DNA, 25 bp, Homo sapien
catactctacaccagattctttact

SEQ ID NO: 3137788 - DNA, 25 bp, Homo sapien
tactctacaccagattctttactcc

SEQ ID NO: 3137789 - DNA, 25 bp, Homo sapien
tcccatactctacaccagattcttt

SEQ ID NO: 3137790 - DNA, 25 bp, Homo sapien
tctacaccagattctttactccctt

SEQ ID NO: 3137791 - DNA, 25 bp, Homo sapien
cactacttgagtttgatgcctttct

SEQ ID NO: 3137792 - DNA, 25 bp, Homo sapien
tgtaacagtcctatagtcaatcacc

SEQ ID NO: 3137793 - DNA, 25 bp, Homo sapien
taagtggcactactcatcctcccag

SEQ ID NO: 3137794 - DNA, 25 bp, Homo sapien
tgaacacacctgatgagatacacaa

SEQ ID NO: 3137795 - DNA, 25 bp, Homo sapien
agcccagaaccgaggaagagggtcg

SEQ ID NO: 3137796 - DNA, 25 bp, Homo sapien
gggaaggcctcgaggctgccggcgc

SEQ ID NO: 3137797 - DNA, 25 bp, Homo sapien
cgagcccagaaccgaggaagagggt

SEQ ID NO: 3137798 - DNA, 25 bp, Homo sapien
gagcccagaaccgaggaagagggtc

SEQ ID NO: 3137799 - DNA, 25 bp, Homo sapien
ctatgcctgtgccgaccccgaggag

SEQ ID NO: 3137800 - DNA, 25 bp, Homo sapien
cctgtgccgaccccgaggagcgcac

SEQ ID NO: 3137801 - DNA, 25 bp, Homo sapien
tatgcctgtgccgaccccgaggagc

SEQ ID NO: 3137802 - DNA, 25 bp, Homo sapien
tgcctgtgccgaccccgaggagcgc

SEQ ID NO: 3137803 - DNA, 25 bp, Homo sapien
tctgcttctcaacgaccactattct

SEQ ID NO: 3137804 - DNA, 25 bp, Homo sapien
gcttctcaacgaccactattctatt

SEQ ID NO: 3137805 - DNA, 25 bp, Homo sapien
gtctgcttctcaacgaccactattc

SEQ ID NO: 3137806 - DNA, 25 bp, Homo sapien
ggtctgcttctcaacgaccactatt

SEQ ID NO: 3137807 - DNA, 25 bp, Homo sapien
cacagcttggaacacttcgatgcac

SEQ ID NO: 3137808 - DNA, 25 bp, Homo sapien
ggttccgaagaactataatgcttcc

SEQ ID NO: 3137809 - DNA, 25 bp, Homo sapien
catgttaaggtaagtcacagcttgg

SEQ ID NO: 3137810 - DNA, 25 bp, Homo sapien
ttcgatgcacctcaaaacacctcag

SEQ ID NO: 3137811 - DNA, 25 bp, Homo sapien
tgtgagaaaaatctggtgaattatt

SEQ ID NO: 3137812 - DNA, 25 bp, Homo sapien
tcaggtagctaaaactgatagaact

SEQ ID NO: 3137813 - DNA, 25 bp, Homo sapien
agccagtgtacccagaccctaactt

SEQ ID NO: 3137814 - DNA, 25 bp, Homo sapien
gatagaactatctttcctatggaga

SEQ ID NO: 3137815 - DNA, 25 bp, Homo sapien
ggagaatgccctacaaagatacaac

SEQ ID NO: 3137816 - DNA, 25 bp, Homo sapien
ctgtagcttcctcaactggcttcat

SEQ ID NO: 3137817 - DNA, 25 bp, Homo sapien
tcattgccacttatacctgtagctt

SEQ ID NO: 3137818 - DNA, 25 bp, Homo sapien
taagattagatgaagtctcattgcc

SEQ ID NO: 3137819 - DNA, 25 bp, Homo sapien
cacaggcagttcactaacaaattcc

SEQ ID NO: 3137820 - DNA, 25 bp, Homo sapien
tttccttttcaataacagagaccag

SEQ ID NO: 3137821 - DNA, 25 bp, Homo sapien
cagagcatttatggagcccttcaga

SEQ ID NO: 3137822 - DNA, 25 bp, Homo sapien
ttcaataacagagaccagagcattt

SEQ ID NO: 3137823 - DNA, 25 bp, Homo sapien
gagaccagagcatttatggagccct

SEQ ID NO: 3137824 - DNA, 25 bp, Homo sapien
tggcacacatgcctttatgaatttc

SEQ ID NO: 3137825 - DNA, 25 bp, Homo sapien
ggcacacatgcctttatgaatttca

SEQ ID NO: 3137826 - DNA, 25 bp, Homo sapien
aaactgtcaagttatgctaaggtac

SEQ ID NO: 3137827 - DNA, 25 bp, Homo sapien
taataaatctccatagggatacaca

SEQ ID NO: 3137828 - DNA, 25 bp, Homo sapien
ctacatgcatcctgcacttaccaaa

SEQ ID NO: 3137829 - DNA, 25 bp, Homo sapien
aattccgaggtcacaatcaaactaa

SEQ ID NO: 3137830 - DNA, 25 bp, Homo sapien
gatcaacccacgaattccagctatg

SEQ ID NO: 3137831 - DNA, 25 bp, Homo sapien
tgtaccactgtagcatacgattaca

SEQ ID NO: 3137832 - DNA, 25 bp, Homo sapien
gagaggcaaagtgaggtatgaccaa

SEQ ID NO: 3137833 - DNA, 25 bp, Homo sapien
tatgaccaaattctacctaaggctt

SEQ ID NO: 3137834 - DNA, 25 bp, Homo sapien
tcgtttaggtggaggccgctcacca

SEQ ID NO: 3137835 - DNA, 25 bp, Homo sapien
cgtttaggtggaggccgctcaccaa

SEQ ID NO: 3137836 - DNA, 25 bp, Homo sapien
agtcgtttaggtggaggccgctcac

SEQ ID NO: 3137837 - DNA, 25 bp, Homo sapien
taagtcgtttaggtggaggccgctc

SEQ ID NO: 3137838 - DNA, 25 bp, Homo sapien
tctgtactcaggattaactgatttt

SEQ ID NO: 3137839 - DNA, 25 bp, Homo sapien
ggtttctgtactcaggattaactga

SEQ ID NO: 3137840 - DNA, 25 bp, Homo sapien
tttctgtactcaggattaactgatt

SEQ ID NO: 3137841 - DNA, 25 bp, Homo sapien
gtttctgtactcaggattaactgat

SEQ ID NO: 3137842 - DNA, 25 bp, Homo sapien
ggaaggacataagcaggagtcaagt

SEQ ID NO: 3137843 - DNA, 25 bp, Homo sapien
tgaaagtctctattttattcgtaaa

SEQ ID NO: 3137844 - DNA, 25 bp, Homo sapien
agaagtctaacagatgccagctggg

SEQ ID NO: 3137845 - DNA, 25 bp, Homo sapien
tggaaataccttccagggtatggaa

SEQ ID NO: 3137846 - DNA, 25 bp, Homo sapien
ttgatcccctcgctcttttaaataa

SEQ ID NO: 3137847 - DNA, 25 bp, Homo sapien
ataagtactgtttgatcccctcgct

SEQ ID NO: 3137848 - DNA, 25 bp, Homo sapien
gtactgtttgatcccctcgctcttt

SEQ ID NO: 3137849 - DNA, 25 bp, Homo sapien
tttgcatgaagaataagtactgttt

SEQ ID NO: 3137850 - DNA, 25 bp, Homo sapien
cattctcacttcttgtactgttatt

SEQ ID NO: 3137851 - DNA, 25 bp, Homo sapien
tcttgtactgttattagtacagaaa

SEQ ID NO: 3137852 - DNA, 25 bp, Homo sapien
cacttcttgtactgttattagtaca

SEQ ID NO: 3137853 - DNA, 25 bp, Homo sapien
tctcacttcttgtactgttattagt

SEQ ID NO: 3137854 - DNA, 25 bp, Homo sapien
aagatatacacaaggaggtgggcaa

SEQ ID NO: 3137855 - DNA, 25 bp, Homo sapien
gatatacacaaggaggtgggcaaaa

SEQ ID NO: 3137856 - DNA, 25 bp, Homo sapien
tatacacaaggaggtgggcaaaaaa

SEQ ID NO: 3137857 - DNA, 25 bp, Homo sapien
agatatacacaaggaggtgggcaaa

SEQ ID NO: 3137858 - DNA, 25 bp, Homo sapien
ataaatgcacacggttgagactctt

SEQ ID NO: 3137859 - DNA, 25 bp, Homo sapien
aataaatgcacacggttgagactct

SEQ ID NO: 3137860 - DNA, 25 bp, Homo sapien
taaatgcacacggttgagactcttg

SEQ ID NO: 3137861 - DNA, 25 bp, Homo sapien
aaatgcacacggttgagactcttgt

SEQ ID NO: 3137862 - DNA, 25 bp, Homo sapien
gaagtgctttcgcttgtctgagtca

SEQ ID NO: 3137863 - DNA, 25 bp, Homo sapien
agtgctttcgcttgtctgagtcaga

SEQ ID NO: 3137864 - DNA, 25 bp, Homo sapien
tgctttcgcttgtctgagtcagata

SEQ ID NO: 3137865 - DNA, 25 bp, Homo sapien
ctgagtcagatatatacaatgtttt

SEQ ID NO: 3137866 - DNA, 25 bp, Homo sapien
cagcatttttcaatgactgcttctt

SEQ ID NO: 3137867 - DNA, 25 bp, Homo sapien
tgcttctttttggaaggtttggaga

SEQ ID NO: 3137868 - DNA, 25 bp, Homo sapien
agtcagcatttttcaatgactgctt

SEQ ID NO: 3137869 - DNA, 25 bp, Homo sapien
tctttttggaaggtttggagatgac

SEQ ID NO: 3137870 - DNA, 25 bp, Homo sapien
aactagtatttgtccttgagccccg

SEQ ID NO: 3137871 - DNA, 25 bp, Homo sapien
ggtggaatagacttacaacagctga

SEQ ID NO: 3137872 - DNA, 25 bp, Homo sapien
taatatacctcctagtgcaagagag

SEQ ID NO: 3137873 - DNA, 25 bp, Homo sapien
tgagccccgtcatcagtctgtttag

SEQ ID NO: 3137874 - DNA, 25 bp, Homo sapien
gtagtcgattaaacagagccacctt

SEQ ID NO: 3137875 - DNA, 25 bp, Homo sapien
tagtcgattaaacagagccaccttt

SEQ ID NO: 3137876 - DNA, 25 bp, Homo sapien
ctccttctacatgcaagtatctggt

SEQ ID NO: 3137877 - DNA, 25 bp, Homo sapien
ccttctacatgcaagtatctggtac

SEQ ID NO: 3137878 - DNA, 25 bp, Homo sapien
cttctacatgcaagtatctggtact

SEQ ID NO: 3137879 - DNA, 25 bp, Homo sapien
ctacatgcaagtatctggtactaac

SEQ ID NO: 3137880 - DNA, 25 bp, Homo sapien
agagatgaataaaaaaggctcccca

SEQ ID NO: 3137881 - DNA, 25 bp, Homo sapien
tgctgtgaactggcatgaaaattac

SEQ ID NO: 3137882 - DNA, 25 bp, Homo sapien
tgaataaaaaaggctccccactgct

SEQ ID NO: 3137883 - DNA, 25 bp, Homo sapien
aaaaaggctccccactgctgtgaac

SEQ ID NO: 3137884 - DNA, 25 bp, Homo sapien
cacacaagtttgactgtttgtccat

SEQ ID NO: 3137885 - DNA, 25 bp, Homo sapien
acacaagtttgactgtttgtccata

SEQ ID NO: 3137886 - DNA, 25 bp, Homo sapien
caagtttgactgtttgtccataatg

SEQ ID NO: 3137887 - DNA, 25 bp, Homo sapien
cacaagtttgactgtttgtccataa

SEQ ID NO: 3137888 - DNA, 25 bp, Homo sapien
caatcttgggagtgccatgccagta

SEQ ID NO: 3137889 - DNA, 25 bp, Homo sapien
atcttgggagtgccatgccagtaac

SEQ ID NO: 3137890 - DNA, 25 bp, Homo sapien
aatcttgggagtgccatgccagtaa

SEQ ID NO: 3137891 - DNA, 25 bp, Homo sapien
caaaaataggccatcgtgccccgtt

SEQ ID NO: 3137892 - DNA, 25 bp, Homo sapien
tatgaagtccttaccctagatacag

SEQ ID NO: 3137893 - DNA, 25 bp, Homo sapien
gatcctgggtctaagatagcatcaa

SEQ ID NO: 3137894 - DNA, 25 bp, Homo sapien
tacagagagggatcctacaaggtct

SEQ ID NO: 3137895 - DNA, 25 bp, Homo sapien
cacagttatttgtcctatgcctaca

SEQ ID NO: 3137896 - DNA, 25 bp, Homo sapien
aataaaaggtcatccacacatggaa

SEQ ID NO: 3137897 - DNA, 25 bp, Homo sapien
cacttttagattgcaagcatgtcag

SEQ ID NO: 3137898 - DNA, 25 bp, Homo sapien
tccttgtgtaaaacatcaaaagtac

SEQ ID NO: 3137899 - DNA, 25 bp, Homo sapien
ggtctgcttatcaactttcctaatt

SEQ ID NO: 3137900 - DNA, 25 bp, Homo sapien
gtctgcttatcaactttcctaatta

SEQ ID NO: 3137901 - DNA, 25 bp, Homo sapien
tttttgcaagctgctaacctcacag

SEQ ID NO: 3137902 - DNA, 25 bp, Homo sapien
ttttgcaagctgctaacctcacagt

SEQ ID NO: 3137903 - DNA, 25 bp, Homo sapien
atataattaacagcaaatgaaaatt

SEQ ID NO: 3137904 - DNA, 25 bp, Homo sapien
atttttgcaagctgctaacctcaca

SEQ ID NO: 3137905 - DNA, 25 bp, Homo sapien
gggactcagcatgcccatcagtgtg

SEQ ID NO: 3137906 - DNA, 25 bp, Homo sapien
caatgggactcctcatgcttaggca

SEQ ID NO: 3137907 - DNA, 25 bp, Homo sapien
taccttaacacacctagaccaggga

SEQ ID NO: 3137908 - DNA, 25 bp, Homo sapien
gaagcttatgcatgttccatgggag

SEQ ID NO: 3137909 - DNA, 25 bp, Homo sapien
ctctttatttggttcttttggacat

SEQ ID NO: 3137910 - DNA, 25 bp, Homo sapien
tttggttcttttggacatggagtgg

SEQ ID NO: 3137911 - DNA, 25 bp, Homo sapien
ttggttcttttggacatggagtggc

SEQ ID NO: 3137912 - DNA, 25 bp, Homo sapien
ttatttggttcttttggacatggag

SEQ ID NO: 3137913 - DNA, 25 bp, Homo sapien
attgtccaggaagcgccatcattta

SEQ ID NO: 3137914 - DNA, 25 bp, Homo sapien
tccaggaagcgccatcatttatcat

SEQ ID NO: 3137915 - DNA, 25 bp, Homo sapien
atctgtgctaatgattgtccaggaa

SEQ ID NO: 3137916 - DNA, 25 bp, Homo sapien
taatgattgtccaggaagcgccatc

SEQ ID NO: 3137917 - DNA, 25 bp, Homo sapien
cccattccctcataaaatgtatact

SEQ ID NO: 3137918 - DNA, 25 bp, Homo sapien
cacaggagtgactggggcaaggaca

SEQ ID NO: 3137919 - DNA, 25 bp, Homo sapien
actggggcaaggacagggcccattc

SEQ ID NO: 3137920 - DNA, 25 bp, Homo sapien
agggcccattccctcataaaatgta

SEQ ID NO: 3137921 - DNA, 25 bp, Homo sapien
ggccaacttggactaggcgttctca

SEQ ID NO: 3137922 - DNA, 25 bp, Homo sapien
taaattttctggcaagtacgctcct

SEQ ID NO: 3137923 - DNA, 25 bp, Homo sapien
aaatcccctaatcagacgattggag

SEQ ID NO: 3137924 - DNA, 25 bp, Homo sapien
gctgagagtagctgcaaagagctga

SEQ ID NO: 3137925 - DNA, 25 bp, Homo sapien
ccacactcgtaaatttggagtgaaa

SEQ ID NO: 3137926 - DNA, 25 bp, Homo sapien
ctgtaagttcaagcattgctacgtc

SEQ ID NO: 3137927 - DNA, 25 bp, Homo sapien
agttcaagcattgctacgtccccac

SEQ ID NO: 3137928 - DNA, 25 bp, Homo sapien
ccaaaccacactcgtaaatttggag

SEQ ID NO: 3137929 - DNA, 25 bp, Homo sapien
cttaacacaaggttgtttaatacat

SEQ ID NO: 3137930 - DNA, 25 bp, Homo sapien
aaaatgagacttaacacaaggttgt

SEQ ID NO: 3137931 - DNA, 25 bp, Homo sapien
ggaaagaatctcctgtacccacacc

SEQ ID NO: 3137932 - DNA, 25 bp, Homo sapien
cccacacccctcacaacctctggat

SEQ ID NO: 3137933 - DNA, 25 bp, Homo sapien
aacctggactggttgccggacccat

SEQ ID NO: 3137934 - DNA, 25 bp, Homo sapien
tctgggacgacacagagcatactct

SEQ ID NO: 3137935 - DNA, 25 bp, Homo sapien
tccctcgctgtttgtgtttgattcg

SEQ ID NO: 3137936 - DNA, 25 bp, Homo sapien
cttgaattggctcgaaggattgctc

SEQ ID NO: 3137937 - DNA, 25 bp, Homo sapien
gttaactttttgccacactcaagtc

SEQ ID NO: 3137938 - DNA, 25 bp, Homo sapien
taactttttgccacactcaagtcag

SEQ ID NO: 3137939 - DNA, 25 bp, Homo sapien
actttttgccacactcaagtcagtt

SEQ ID NO: 3137940 - DNA, 25 bp, Homo sapien
cagtttaagtcctagcaaaaagacg

SEQ ID NO: 3137941 - DNA, 25 bp, Homo sapien
ccaagaaaccacaaacgattgttca

SEQ ID NO: 3137942 - DNA, 25 bp, Homo sapien
tagtatcacctggtatgaaaagttt

SEQ ID NO: 3137943 - DNA, 25 bp, Homo sapien
gcatttcaaatcagcacttgcaggg

SEQ ID NO: 3137944 - DNA, 25 bp, Homo sapien
ttgaatagtatcacctggtatgaaa

SEQ ID NO: 3137945 - DNA, 25 bp, Homo sapien
ggcaaacatttatcacaacacaggg

SEQ ID NO: 3137946 - DNA, 25 bp, Homo sapien
caaagcagcactaggaacatgtcca

SEQ ID NO: 3137947 - DNA, 25 bp, Homo sapien
tcaggaatgaaagcacggtaaaacc

SEQ ID NO: 3137948 - DNA, 25 bp, Homo sapien
caatgatgttctggctaggctaccc

SEQ ID NO: 3137949 - DNA, 25 bp, Homo sapien
atgcatcaggcacattcgacagaag

SEQ ID NO: 3137950 - DNA, 25 bp, Homo sapien
taaaagacgataatacatgcatcag

SEQ ID NO: 3137951 - DNA, 25 bp, Homo sapien
tgaaataaaagacgataatacatgc

SEQ ID NO: 3137952 - DNA, 25 bp, Homo sapien
tctgaaataaaagacgataatacat

SEQ ID NO: 3137953 - DNA, 25 bp, Homo sapien
tagtagagctatcactttgatgtga

SEQ ID NO: 3137954 - DNA, 25 bp, Homo sapien
gagctatcactttgatgtgatgtac

SEQ ID NO: 3137955 - DNA, 25 bp, Homo sapien
taaattagtagagctatcactttga

SEQ ID NO: 3137956 - DNA, 25 bp, Homo sapien
agctatcactttgatgtgatgtaca

SEQ ID NO: 3137957 - DNA, 25 bp, Homo sapien
aactaaattggcttgcacatcatca

SEQ ID NO: 3137958 - DNA, 25 bp, Homo sapien
tggaaactaaattggcttgcacatc

SEQ ID NO: 3137959 - DNA, 25 bp, Homo sapien
ggaaactaaattggcttgcacatca

SEQ ID NO: 3137960 - DNA, 25 bp, Homo sapien
atttggaaactaaattggcttgcac

SEQ ID NO: 3137961 - DNA, 25 bp, Homo sapien
tttaatcccaaaatcttctagagag

SEQ ID NO: 3137962 - DNA, 25 bp, Homo sapien
taagtacactgtaagggaacagata

SEQ ID NO: 3137963 - DNA, 25 bp, Homo sapien
tttaaccaagtataagctccatgag

SEQ ID NO: 3137964 - DNA, 25 bp, Homo sapien
aatggcagtaaagcagaggtctctg

SEQ ID NO: 3137965 - DNA, 25 bp, Homo sapien
caaactctgacttgtctcacgctga

SEQ ID NO: 3137966 - DNA, 25 bp, Homo sapien
tgacttgtctcacgctgattaggac

SEQ ID NO: 3137967 - DNA, 25 bp, Homo sapien
cagtgagcttgtttagaaacatggc

SEQ ID NO: 3137968 - DNA, 25 bp, Homo sapien
cacgctgattaggacacatccaggg

SEQ ID NO: 3137969 - DNA, 25 bp, Homo sapien
ggtccttggcaatcctcctggacca

SEQ ID NO: 3137970 - DNA, 25 bp, Homo sapien
tttggtccttggcaatcctcctgga

SEQ ID NO: 3137971 - DNA, 25 bp, Homo sapien
ggcaatcctcctggaccacctgctg

SEQ ID NO: 3137972 - DNA, 25 bp, Homo sapien
cttggcaatcctcctggaccacctg

SEQ ID NO: 3137973 - DNA, 25 bp, Homo sapien
gggctaggaggttccagtagcatca

SEQ ID NO: 3137974 - DNA, 25 bp, Homo sapien
acgcacaaggggaacctgagcctgg

SEQ ID NO: 3137975 - DNA, 25 bp, Homo sapien
acactttgctgccaatccatctgct

SEQ ID NO: 3137976 - DNA, 25 bp, Homo sapien
gacgcccacgctggactaatcggct

SEQ ID NO: 3137977 - DNA, 25 bp, Homo sapien
gagggtctcgtgtccttcgtactgt

SEQ ID NO: 3137978 - DNA, 25 bp, Homo sapien
tccttcgtactgtcctgaacactca

SEQ ID NO: 3137979 - DNA, 25 bp, Homo sapien
tgagcctgctgcagtcgagggtctc

SEQ ID NO: 3137980 - DNA, 25 bp, Homo sapien
tgcagtcgagggtctcgtgtccttc

SEQ ID NO: 3137981 - DNA, 25 bp, Homo sapien
gaggcccatggccaaaccaccgaga

SEQ ID NO: 3137982 - DNA, 25 bp, Homo sapien
atggccaaaccaccgagacctgctt

SEQ ID NO: 3137983 - DNA, 25 bp, Homo sapien
ccgagacctgcttagtaatggcggg

SEQ ID NO: 3137984 - DNA, 25 bp, Homo sapien
aaccaccgagacctgcttagtaatg

SEQ ID NO: 3137985 - DNA, 25 bp, Homo sapien
gcaggtacctaggtctggactcttc

SEQ ID NO: 3137986 - DNA, 25 bp, Homo sapien
tctgagtcccctctaaggaactggg

SEQ ID NO: 3137987 - DNA, 25 bp, Homo sapien
aactgggcaggtacctaggtctgga

SEQ ID NO: 3137988 - DNA, 25 bp, Homo sapien
gagtcccctctaaggaactgggcag

SEQ ID NO: 3137989 - DNA, 25 bp, Homo sapien
tctcctgttctctaatttcaatgac

SEQ ID NO: 3137990 - DNA, 25 bp, Homo sapien
tcatcaactgcttctgtctttctct

SEQ ID NO: 3137991 - DNA, 25 bp, Homo sapien
tttcaatgactttcctcaagcacag

SEQ ID NO: 3137992 - DNA, 25 bp, Homo sapien
tcttcttcatcaactgcttctgtct

SEQ ID NO: 3137993 - DNA, 25 bp, Homo sapien
tgggttggctctacgtacatttgga

SEQ ID NO: 3137994 - DNA, 25 bp, Homo sapien
cgtacatttggaacgataaaggcat

SEQ ID NO: 3137995 - DNA, 25 bp, Homo sapien
gccttgggttggctctacgtacatt

SEQ ID NO: 3137996 - DNA, 25 bp, Homo sapien
ggctctacgtacatttggaacgata

SEQ ID NO: 3137997 - DNA, 25 bp, Homo sapien
gaaacccagttcgtctggcaaaagc

SEQ ID NO: 3137998 - DNA, 25 bp, Homo sapien
tttctctactgaaaccccagccgga

SEQ ID NO: 3137999 - DNA, 25 bp, Homo sapien
gattagggctcagtggtagaaaccc

SEQ ID NO: 3138000 - DNA, 25 bp, Homo sapien
catgtcaagatgaactgtgatcggc

SEQ ID NO: 3138001 - DNA, 25 bp, Homo sapien
tagttcttcagtttccccttctcca

SEQ ID NO: 3138002 - DNA, 25 bp, Homo sapien
agttcttcagtttccccttctccat

SEQ ID NO: 3138003 - DNA, 25 bp, Homo sapien
tgctgaaattctacacaaacttcca

SEQ ID NO: 3138004 - DNA, 25 bp, Homo sapien
cccagagtcttattttactgtggcc

SEQ ID NO: 3138005 - DNA, 25 bp, Homo sapien
gagtcttattttactgtggcccctc

SEQ ID NO: 3138006 - DNA, 25 bp, Homo sapien
tccctgacatctgctagtggctctg

SEQ ID NO: 3138007 - DNA, 25 bp, Homo sapien
cttcatcccagagtcttattttact

SEQ ID NO: 3138008 - DNA, 25 bp, Homo sapien
cacttctccgggaccttattacact

SEQ ID NO: 3138009 - DNA, 25 bp, Homo sapien
cggcgcggagcgaacgggctaccgg

SEQ ID NO: 3138010 - DNA, 25 bp, Homo sapien
tcagggccagtgacacttctccggg

SEQ ID NO: 3138011 - DNA, 25 bp, Homo sapien
cagtgacacttctccgggaccttat

SEQ ID NO: 3138012 - DNA, 25 bp, Homo sapien
gccgttccagctgagagtacaaatt

SEQ ID NO: 3138013 - DNA, 25 bp, Homo sapien
taatgagagagaggtccgactcctc

SEQ ID NO: 3138014 - DNA, 25 bp, Homo sapien
ggagcccttgagcttttggactatc

SEQ ID NO: 3138015 - DNA, 25 bp, Homo sapien
ggactatctgggcaataatgagaga

SEQ ID NO: 3138016 - DNA, 25 bp, Homo sapien
ctaattcaaccctacatgaccttct

SEQ ID NO: 3138017 - DNA, 25 bp, Homo sapien
aaccctacatgaccttctataaaca

SEQ ID NO: 3138018 - DNA, 25 bp, Homo sapien
ctacatgaccttctataaacaatgc

SEQ ID NO: 3138019 - DNA, 25 bp, Homo sapien
tcaaccctacatgaccttctataaa

SEQ ID NO: 3138020 - DNA, 25 bp, Homo sapien
taatctcaggtctctgaagactggc

SEQ ID NO: 3138021 - DNA, 25 bp, Homo sapien
cactataaacagcattctgaagttt

SEQ ID NO: 3138022 - DNA, 25 bp, Homo sapien
tcagttcactataaacagcattctg

SEQ ID NO: 3138023 - DNA, 25 bp, Homo sapien
ctataaacagcattctgaagtttct

SEQ ID NO: 3138024 - DNA, 25 bp, Homo sapien
acactcagttcactataaacagcat

SEQ ID NO: 3138025 - DNA, 25 bp, Homo sapien
caaagtaaatatagctaaacaaaat

SEQ ID NO: 3138026 - DNA, 25 bp, Homo sapien
cacaaagtaaatatagctaaacaaa

SEQ ID NO: 3138027 - DNA, 25 bp, Homo sapien
tgtataccaaaggttctttaagatg

SEQ ID NO: 3138028 - DNA, 25 bp, Homo sapien
gtgctttcctcatgtataccaaagg

SEQ ID NO: 3138029 - DNA, 25 bp, Homo sapien
aggtgcagcaggatgactaggtaaa

SEQ ID NO: 3138030 - DNA, 25 bp, Homo sapien
tgcagcaggatgactaggtaaagga

SEQ ID NO: 3138031 - DNA, 25 bp, Homo sapien
gtgccagtgggatactcagttcagt

SEQ ID NO: 3138032 - DNA, 25 bp, Homo sapien
ctttcgtgccagtgggatactcagt

SEQ ID NO: 3138033 - DNA, 25 bp, Homo sapien
gtgggatactcagttcagtgcacat

SEQ ID NO: 3138034 - DNA, 25 bp, Homo sapien
tgggatactcagttcagtgcacata

SEQ ID NO: 3138035 - DNA, 25 bp, Homo sapien
ccccatccagcagtctcagaaaagc

SEQ ID NO: 3138036 - DNA, 25 bp, Homo sapien
gagagtgtgactaagagtcagtagc

SEQ ID NO: 3138037 - DNA, 25 bp, Homo sapien
tgtgactaagagtcagtagcatcat

SEQ ID NO: 3138038 - DNA, 25 bp, Homo sapien
ctggccaagagagtgtgactaagag

SEQ ID NO: 3138039 - DNA, 25 bp, Homo sapien
tcatcagttcccatttcattccatt

SEQ ID NO: 3138040 - DNA, 25 bp, Homo sapien
ccatttattaagaagttctttctgt

SEQ ID NO: 3138041 - DNA, 25 bp, Homo sapien
cattccatttattaagaagttcttt

SEQ ID NO: 3138042 - DNA, 25 bp, Homo sapien
ctggttcatcagttcccatttcatt

SEQ ID NO: 3138043 - DNA, 25 bp, Homo sapien
aatccttaggtgcataaacaggtct

SEQ ID NO: 3138044 - DNA, 25 bp, Homo sapien
cataaacaggtctgaaaaggcttaa

SEQ ID NO: 3138045 - DNA, 25 bp, Homo sapien
gcataaacaggtctgaaaaggctta

SEQ ID NO: 3138046 - DNA, 25 bp, Homo sapien
aaatccttaggtgcataaacaggtc

SEQ ID NO: 3138047 - DNA, 25 bp, Homo sapien
ctaagagaatcaccgttttcataat

SEQ ID NO: 3138048 - DNA, 25 bp, Homo sapien
tttgggttgcgaagattaattaata

SEQ ID NO: 3138049 - DNA, 25 bp, Homo sapien
ttcataatttgggttgcgaagatta

SEQ ID NO: 3138050 - DNA, 25 bp, Homo sapien
agaatcaccgttttcataatttggg

SEQ ID NO: 3138051 - DNA, 25 bp, Homo sapien
gaattaaacccaaatgagtcctgaa

SEQ ID NO: 3138052 - DNA, 25 bp, Homo sapien
aattcagggatgtcttttactttca

SEQ ID NO: 3138053 - DNA, 25 bp, Homo sapien
tactttcagtggaacttgaattaaa

SEQ ID NO: 3138054 - DNA, 25 bp, Homo sapien
cagggatgtcttttactttcagtgg

SEQ ID NO: 3138055 - DNA, 25 bp, Homo sapien
tggctgtaaggactctccgtgatga

SEQ ID NO: 3138056 - DNA, 25 bp, Homo sapien
cgtgatgatgtacctgctaatggca

SEQ ID NO: 3138057 - DNA, 25 bp, Homo sapien
tccgtgatgatgtacctgctaatgg

SEQ ID NO: 3138058 - DNA, 25 bp, Homo sapien
tgtaaggactctccgtgatgatgta

SEQ ID NO: 3138059 - DNA, 25 bp, Homo sapien
gccttttgaccaatgagtgctgcca

SEQ ID NO: 3138060 - DNA, 25 bp, Homo sapien
caattggaccatcaagtgctctgct

SEQ ID NO: 3138061 - DNA, 25 bp, Homo sapien
taggtaacagactactcagtaaggt

SEQ ID NO: 3138062 - DNA, 25 bp, Homo sapien
tgctctgctaaaataaggataaatc

SEQ ID NO: 3138063 - DNA, 25 bp, Homo sapien
gtgtagaatcatctatacccagttg

SEQ ID NO: 3138064 - DNA, 25 bp, Homo sapien
caggaggcacttgtgtagaatcatc

SEQ ID NO: 3138065 - DNA, 25 bp, Homo sapien
cacttgtgtagaatcatctataccc

SEQ ID NO: 3138066 - DNA, 25 bp, Homo sapien
gaatcatctatacccagttgtccta

SEQ ID NO: 3138067 - DNA, 25 bp, Homo sapien
tgcccaatacgtacatgttcatttt

SEQ ID NO: 3138068 - DNA, 25 bp, Homo sapien
caatacgtacatgttcattttcaaa

SEQ ID NO: 3138069 - DNA, 25 bp, Homo sapien
tttgcccaatacgtacatgttcatt

SEQ ID NO: 3138070 - DNA, 25 bp, Homo sapien
ctttttgcccaatacgtacatgttc

SEQ ID NO: 3138071 - DNA, 25 bp, Homo sapien
tctcagtgccgtgggacttccttgt

SEQ ID NO: 3138072 - DNA, 25 bp, Homo sapien
ttcaaaatgagagcccacaattcag

SEQ ID NO: 3138073 - DNA, 25 bp, Homo sapien
tcagctctcagtgccgtgggacttc

SEQ ID NO: 3138074 - DNA, 25 bp, Homo sapien
gagcccacaattcagctctcagtgc

SEQ ID NO: 3138075 - DNA, 25 bp, Homo sapien
cactgtaaaaaatgattacctggga

SEQ ID NO: 3138076 - DNA, 25 bp, Homo sapien
caatttctatacagttaagttggca

SEQ ID NO: 3138077 - DNA, 25 bp, Homo sapien
tagaaatcgcagtgattcttctgcg

SEQ ID NO: 3138078 - DNA, 25 bp, Homo sapien
taagttggcagtgcatctacaaagt

SEQ ID NO: 3138079 - DNA, 25 bp, Homo sapien
gtattttgctaagactgaagagaag

SEQ ID NO: 3138080 - DNA, 25 bp, Homo sapien
caattaagtttacaagtttggcagg

SEQ ID NO: 3138081 - DNA, 25 bp, Homo sapien
cagaaacaggcaccgtgaagactaa

SEQ ID NO: 3138082 - DNA, 25 bp, Homo sapien
tgaagactaagtgagctgaccacaa

SEQ ID NO: 3138083 - DNA, 25 bp, Homo sapien
tatagattagactgtccaccaaaag

SEQ ID NO: 3138084 - DNA, 25 bp, Homo sapien
gttgtatcacattggtcttaagctg

SEQ ID NO: 3138085 - DNA, 25 bp, Homo sapien
caccaaaaggtcatgttgtatcaca

SEQ ID NO: 3138086 - DNA, 25 bp, Homo sapien
taagctgctcataatacaagacatc

SEQ ID NO: 3138087 - DNA, 25 bp, Homo sapien
cattgcttgctgtcaacttcacatc

SEQ ID NO: 3138088 - DNA, 25 bp, Homo sapien
taatcatcattgcttgctgtcaact

SEQ ID NO: 3138089 - DNA, 25 bp, Homo sapien
catcattgcttgctgtcaacttcac

SEQ ID NO: 3138090 - DNA, 25 bp, Homo sapien
aataataatcatcattgcttgctgt

SEQ ID NO: 3138091 - DNA, 25 bp, Homo sapien
ctgcatctggccttactttactttt

SEQ ID NO: 3138092 - DNA, 25 bp, Homo sapien
tgaagcctctgatgtacttcagagt

SEQ ID NO: 3138093 - DNA, 25 bp, Homo sapien
ggttaagtacaacatctaagccatc

SEQ ID NO: 3138094 - DNA, 25 bp, Homo sapien
ctaagccatcttacaagcagctggg

SEQ ID NO: 3138095 - DNA, 25 bp, Homo sapien
actgttcgacgagccccagtgaggt

SEQ ID NO: 3138096 - DNA, 25 bp, Homo sapien
cctgcctccactgttcgacgagccc

SEQ ID NO: 3138097 - DNA, 25 bp, Homo sapien
tgcctccactgttcgacgagcccca

SEQ ID NO: 3138098 - DNA, 25 bp, Homo sapien
ctccactgttcgacgagccccagtg

SEQ ID NO: 3138099 - DNA, 25 bp, Homo sapien
ccatcaggtcacttacgtacttctc

SEQ ID NO: 3138100 - DNA, 25 bp, Homo sapien
cattcctttagaaggggagtggtgc

SEQ ID NO: 3138101 - DNA, 25 bp, Homo sapien
aatctttttcaaggcattagctcag

SEQ ID NO: 3138102 - DNA, 25 bp, Homo sapien
attagctcagagcagtttggtcatc

SEQ ID NO: 3138103 - DNA, 25 bp, Homo sapien
cttgatgagtccgacaattatgtgt

SEQ ID NO: 3138104 - DNA, 25 bp, Homo sapien
ttttccttcacttcaacttgatgag

SEQ ID NO: 3138105 - DNA, 25 bp, Homo sapien
cacttcaacttgatgagtccgacaa

SEQ ID NO: 3138106 - DNA, 25 bp, Homo sapien
caacttgatgagtccgacaattatg

SEQ ID NO: 3138107 - DNA, 25 bp, Homo sapien
tgttggtgagcatgttgtcctaaac

SEQ ID NO: 3138108 - DNA, 25 bp, Homo sapien
tatgtctgggtatggatatctgtgg

SEQ ID NO: 3138109 - DNA, 25 bp, Homo sapien
cagaactactgaaacgtgagttaaa

SEQ ID NO: 3138110 - DNA, 25 bp, Homo sapien
ttgagatagtttcatcacctttggc

SEQ ID NO: 3138111 - DNA, 25 bp, Homo sapien
ctatcagagtcactggcattcatca

SEQ ID NO: 3138112 - DNA, 25 bp, Homo sapien
atcagagtcactggcattcatcaac

SEQ ID NO: 3138113 - DNA, 25 bp, Homo sapien
tatcagagtcactggcattcatcaa

SEQ ID NO: 3138114 - DNA, 25 bp, Homo sapien
ttaaataagagttgtcttctgtttg

SEQ ID NO: 3138115 - DNA, 25 bp, Homo sapien
attaaataagagttgtcttctgttt

SEQ ID NO: 3138116 - DNA, 25 bp, Homo sapien
aatggtactgtcaaactactcagtt

SEQ ID NO: 3138117 - DNA, 25 bp, Homo sapien
ttccactcagtattgaagtctgaaa

SEQ ID NO: 3138118 - DNA, 25 bp, Homo sapien
ttgaatgcaaagtgactcaacacag

SEQ ID NO: 3138119 - DNA, 25 bp, Homo sapien
tatgattttggtggcgaggcactgt

SEQ ID NO: 3138120 - DNA, 25 bp, Homo sapien
acacagatgtatcccgggaaaaaca

SEQ ID NO: 3138121 - DNA, 25 bp, Homo sapien
ttatgtatgattttggtggcgaggc

SEQ ID NO: 3138122 - DNA, 25 bp, Homo sapien
catttggtgggtaaaagacagcata

SEQ ID NO: 3138123 - DNA, 25 bp, Homo sapien
agcatattcttccagtcctagtttt

SEQ ID NO: 3138124 - DNA, 25 bp, Homo sapien
gcatattcttccagtcctagttttc

SEQ ID NO: 3138125 - DNA, 25 bp, Homo sapien
ggcaggttaacactctatgcctcag

SEQ ID NO: 3138126 - DNA, 25 bp, Homo sapien
gttgggcaggttaacactctatgcc

SEQ ID NO: 3138127 - DNA, 25 bp, Homo sapien
tgggcaggttaacactctatgcctc

SEQ ID NO: 3138128 - DNA, 25 bp, Homo sapien
ctgttgggcaggttaacactctatg

SEQ ID NO: 3138129 - DNA, 25 bp, Homo sapien
ttttttaccttcctactgcctctgc

SEQ ID NO: 3138130 - DNA, 25 bp, Homo sapien
atagccaccagcttcatttccaggg

SEQ ID NO: 3138131 - DNA, 25 bp, Homo sapien
caacaagtggctaaggtagtcagaa

SEQ ID NO: 3138132 - DNA, 25 bp, Homo sapien
gcccggccaatagtaaggctcttta

SEQ ID NO: 3138133 - DNA, 25 bp, Homo sapien
tctcttttggataaggaccacttaa

SEQ ID NO: 3138134 - DNA, 25 bp, Homo sapien
tgtctcttttggataaggaccactt

SEQ ID NO: 3138135 - DNA, 25 bp, Homo sapien
gtctcttttggataaggaccactta

SEQ ID NO: 3138136 - DNA, 25 bp, Homo sapien
gatgccattgacatgaactccttcc

SEQ ID NO: 3138137 - DNA, 25 bp, Homo sapien
tgccattgacatgaactccttcctt

SEQ ID NO: 3138138 - DNA, 25 bp, Homo sapien
tgatgccattgacatgaactccttc

SEQ ID NO: 3138139 - DNA, 25 bp, Homo sapien
cattgacatgaactccttcctttgg

SEQ ID NO: 3138140 - DNA, 25 bp, Homo sapien
gaaaatccatgaaaagggataacac

SEQ ID NO: 3138141 - DNA, 25 bp, Homo sapien
cattgaaaatccatgaaaagggata

SEQ ID NO: 3138142 - DNA, 25 bp, Homo sapien
tgaaaatccatgaaaagggataaca

SEQ ID NO: 3138143 - DNA, 25 bp, Homo sapien
ttgaaaatccatgaaaagggataac

SEQ ID NO: 3138144 - DNA, 25 bp, Homo sapien
attcaccacgaccatctgatgttga

SEQ ID NO: 3138145 - DNA, 25 bp, Homo sapien
ccatctgatgttgaacactgatgtt

SEQ ID NO: 3138146 - DNA, 25 bp, Homo sapien
tcattcaccacgaccatctgatgtt

SEQ ID NO: 3138147 - DNA, 25 bp, Homo sapien
gatgttgaacactgatgtttacaaa

SEQ ID NO: 3138148 - DNA, 25 bp, Homo sapien
catggtatagaaaacaaagtggtgc

SEQ ID NO: 3138149 - DNA, 25 bp, Homo sapien
tggtatagaaaacaaagtggtgcaa

SEQ ID NO: 3138150 - DNA, 25 bp, Homo sapien
atggtatagaaaacaaagtggtgca

SEQ ID NO: 3138151 - DNA, 25 bp, Homo sapien
agaagagatggaatggagtctgaag

SEQ ID NO: 3138152 - DNA, 25 bp, Homo sapien
aggatgagaagagatggaatggagt

SEQ ID NO: 3138153 - DNA, 25 bp, Homo sapien
aatggagtctgaagaaaaaacgcac

SEQ ID NO: 3138154 - DNA, 25 bp, Homo sapien
agatggaatggagtctgaagaaaaa

SEQ ID NO: 3138155 - DNA, 25 bp, Homo sapien
gtctagctgcaagccaaaaaaggtg

SEQ ID NO: 3138156 - DNA, 25 bp, Homo sapien
tctagctgcaagccaaaaaaggtgg

SEQ ID NO: 3138157 - DNA, 25 bp, Homo sapien
tagctgcaagccaaaaaaggtggtg

SEQ ID NO: 3138158 - DNA, 25 bp, Homo sapien
ctagctgcaagccaaaaaaggtggt

SEQ ID NO: 3138159 - DNA, 25 bp, Homo sapien
tttctcgtagatgataaaagagttg

SEQ ID NO: 3138160 - DNA, 25 bp, Homo sapien
ccaatttctcgtagatgataaaaga

SEQ ID NO: 3138161 - DNA, 25 bp, Homo sapien
gccccaatttctcgtagatgataaa

SEQ ID NO: 3138162 - DNA, 25 bp, Homo sapien
ttgagccccaatttctcgtagatga

SEQ ID NO: 3138163 - DNA, 25 bp, Homo sapien
gcaatatcagaagaacccaaccaat

SEQ ID NO: 3138164 - DNA, 25 bp, Homo sapien
aaccaattctattcaagagtcttag

SEQ ID NO: 3138165 - DNA, 25 bp, Homo sapien
gtcttagaaatcacctgggcattta

SEQ ID NO: 3138166 - DNA, 25 bp, Homo sapien
tgcagtggtgagaaaccataagtcc

SEQ ID NO: 3138167 - DNA, 25 bp, Homo sapien
gcaagagctgatctgtagctaagta

SEQ ID NO: 3138168 - DNA, 25 bp, Homo sapien
cctaggattctatcccataaaagca

SEQ ID NO: 3138169 - DNA, 25 bp, Homo sapien
caagaatttccagagagttgtatcc

SEQ ID NO: 3138170 - DNA, 25 bp, Homo sapien
gagaaagctcgaaccatccacttaa

SEQ ID NO: 3138171 - DNA, 25 bp, Homo sapien
tcaagactgcagtttttgttcgtac

SEQ ID NO: 3138172 - DNA, 25 bp, Homo sapien
tagaaacagcatgtgttctacaaac

SEQ ID NO: 3138173 - DNA, 25 bp, Homo sapien
aataaattccagttacggatggtga

SEQ ID NO: 3138174 - DNA, 25 bp, Homo sapien
tgttcgtacttatcgtcaaagccag

SEQ ID NO: 3138175 - DNA, 25 bp, Homo sapien
gctgcagccagtgatgtcacctcca

SEQ ID NO: 3138176 - DNA, 25 bp, Homo sapien
ttcactgctcggaaagcaaacacgg

SEQ ID NO: 3138177 - DNA, 25 bp, Homo sapien
ctccatcaggttcactgctcggaaa

SEQ ID NO: 3138178 - DNA, 25 bp, Homo sapien
ctcggaaagcaaacacggcagctgc

SEQ ID NO: 3138179 - DNA, 25 bp, Homo sapien
ggatgttagcctcagtcttcttcaa

SEQ ID NO: 3138180 - DNA, 25 bp, Homo sapien
tatgcaacagacactaaaatgacag

SEQ ID NO: 3138181 - DNA, 25 bp, Homo sapien
aagtaacgcgtgtcctatgcaacag

SEQ ID NO: 3138182 - DNA, 25 bp, Homo sapien
tctagtgtaagtagtaactgactgc

SEQ ID NO: 3138183 - DNA, 25 bp, Homo sapien
aaagtagaaaggtcagcaagaactg

SEQ ID NO: 3138184 - DNA, 25 bp, Homo sapien
aagtagaaaggtcagcaagaactgc

SEQ ID NO: 3138185 - DNA, 25 bp, Homo sapien
ttaaagtagaaaggtcagcaagaac

SEQ ID NO: 3138186 - DNA, 25 bp, Homo sapien
taaagtagaaaggtcagcaagaact

SEQ ID NO: 3138187 - DNA, 25 bp, Homo sapien
tgctcaatttagcagaagttgtgtt

SEQ ID NO: 3138188 - DNA, 25 bp, Homo sapien
tattacatgccattgacaagtcagg

SEQ ID NO: 3138189 - DNA, 25 bp, Homo sapien
tcttgaaaatcagcagcatgcgatg

SEQ ID NO: 3138190 - DNA, 25 bp, Homo sapien
taactgaagagggaacatgatcttt

SEQ ID NO: 3138191 - DNA, 25 bp, Homo sapien
aactgacataaaagaattatccaag

SEQ ID NO: 3138192 - DNA, 25 bp, Homo sapien
gacataaaagaattatccaagaagc

SEQ ID NO: 3138193 - DNA, 25 bp, Homo sapien
ataaactgacataaaagaattatcc

SEQ ID NO: 3138194 - DNA, 25 bp, Homo sapien
tgacataaaagaattatccaagaag

SEQ ID NO: 3138195 - DNA, 25 bp, Homo sapien
taaagcccaaaataaggctgatgcc

SEQ ID NO: 3138196 - DNA, 25 bp, Homo sapien
gaagctggcaacaagcatcggcaat

SEQ ID NO: 3138197 - DNA, 25 bp, Homo sapien
gctgatgccttgcataatgtctgca

SEQ ID NO: 3138198 - DNA, 25 bp, Homo sapien
tgctctgccctagaagtaaatcttg

SEQ ID NO: 3138199 - DNA, 25 bp, Homo sapien
tagtgtactagactattacgttgcc

SEQ ID NO: 3138200 - DNA, 25 bp, Homo sapien
gcataggattataactgcatcacct

SEQ ID NO: 3138201 - DNA, 25 bp, Homo sapien
tctcagagtagataatagtcatggg

SEQ ID NO: 3138202 - DNA, 25 bp, Homo sapien
tctgtatgcatgtgaacgagatcat

SEQ ID NO: 3138203 - DNA, 25 bp, Homo sapien
tgagacctggttggccaacgtagtg

SEQ ID NO: 3138204 - DNA, 25 bp, Homo sapien
gcctattaggctacatcaatgccaa

SEQ ID NO: 3138205 - DNA, 25 bp, Homo sapien
ggacaggtccggtgtggtcactcac

SEQ ID NO: 3138206 - DNA, 25 bp, Homo sapien
tcataacatatcacattagtgggtg

SEQ ID NO: 3138207 - DNA, 25 bp, Homo sapien
tgactacttggctaggacccagagg

SEQ ID NO: 3138208 - DNA, 25 bp, Homo sapien
cagaggtagactggtgcagcacgat

SEQ ID NO: 3138209 - DNA, 25 bp, Homo sapien
caacaatttctgagtaggtcaaggg

SEQ ID NO: 3138210 - DNA, 25 bp, Homo sapien
ggtctcgattttgcactggtcctga

SEQ ID NO: 3138211 - DNA, 25 bp, Homo sapien
ttccaaaggcaactccgcaaattcc

SEQ ID NO: 3138212 - DNA, 25 bp, Homo sapien
tagattctagagatatatggctgaa

SEQ ID NO: 3138213 - DNA, 25 bp, Homo sapien
tgggagtgaaagacaagctaacttg

SEQ ID NO: 3138214 - DNA, 25 bp, Homo sapien
gggcaaacacaatgctagattctag

SEQ ID NO: 3138215 - DNA, 25 bp, Homo sapien
gtatccataatacacccaaactgaa

SEQ ID NO: 3138216 - DNA, 25 bp, Homo sapien
gaatgaactactatcacataatatg

SEQ ID NO: 3138217 - DNA, 25 bp, Homo sapien
tcctaggcagtagtaaaaaggaatg

SEQ ID NO: 3138218 - DNA, 25 bp, Homo sapien
ctcatacaatgaaatcctaggcagt

SEQ ID NO: 3138219 - DNA, 25 bp, Homo sapien
gggaaacactggaactcatatactg

SEQ ID NO: 3138220 - DNA, 25 bp, Homo sapien
gaatgactaatatgacaacaccaag

SEQ ID NO: 3138221 - DNA, 25 bp, Homo sapien
tggaggcctccttctaagttaaaca

SEQ ID NO: 3138222 - DNA, 25 bp, Homo sapien
gaaaccagcccatacacataatcag

SEQ ID NO: 3138223 - DNA, 25 bp, Homo sapien
aatgatatcaattatttccaggctg

SEQ ID NO: 3138224 - DNA, 25 bp, Homo sapien
tgtttatggattggaggactcaaca

SEQ ID NO: 3138225 - DNA, 25 bp, Homo sapien
gatctattaagccaatgctatctca

SEQ ID NO: 3138226 - DNA, 25 bp, Homo sapien
gaagtagtaagcttagcaaggtctc

SEQ ID NO: 3138227 - DNA, 25 bp, Homo sapien
ctatcacaggaaggatggcgccatt

SEQ ID NO: 3138228 - DNA, 25 bp, Homo sapien
gcattgataatacctgaagccagct

SEQ ID NO: 3138229 - DNA, 25 bp, Homo sapien
gaacacttgtcattacattgggccc

SEQ ID NO: 3138230 - DNA, 25 bp, Homo sapien
tagaagctgcctgtattcctggctc

SEQ ID NO: 3138231 - DNA, 25 bp, Homo sapien
atgggatctggactctgtaaagctc

SEQ ID NO: 3138232 - DNA, 25 bp, Homo sapien
ggatctggactctgtaaagctcagg

SEQ ID NO: 3138233 - DNA, 25 bp, Homo sapien
gtaaagctcagggaatagaggagca

SEQ ID NO: 3138234 - DNA, 25 bp, Homo sapien
ccccaattccataccatgggatctg

SEQ ID NO: 3138235 - DNA, 25 bp, Homo sapien
acacagtctctgcaaaaaaaataca

SEQ ID NO: 3138236 - DNA, 25 bp, Homo sapien
ggtgaaacacagtctctgcaaaaaa

SEQ ID NO: 3138237 - DNA, 25 bp, Homo sapien
catggtgaaacacagtctctgcaaa

SEQ ID NO: 3138238 - DNA, 25 bp, Homo sapien
gaaacacagtctctgcaaaaaaaat

SEQ ID NO: 3138239 - DNA, 25 bp, Homo sapien
gagatcttccccttttctataataa

SEQ ID NO: 3138240 - DNA, 25 bp, Homo sapien
tggtatttatagtacaaatttccta

SEQ ID NO: 3138241 - DNA, 25 bp, Homo sapien
tttcctagtaaatactgctttgact

SEQ ID NO: 3138242 - DNA, 25 bp, Homo sapien
caagatcactgatgtgagatcttcc

SEQ ID NO: 3138243 - DNA, 25 bp, Homo sapien
ttgggatatatagtatgctctgttt

SEQ ID NO: 3138244 - DNA, 25 bp, Homo sapien
ttctcaaggaaaacttttggatata

SEQ ID NO: 3138245 - DNA, 25 bp, Homo sapien
tattgcttttgggatatatagtatg

SEQ ID NO: 3138246 - DNA, 25 bp, Homo sapien
tcaaggaaaacttttggatatattg

SEQ ID NO: 3138247 - DNA, 25 bp, Homo sapien
taagtacctatgttctttaggaaca

SEQ ID NO: 3138248 - DNA, 25 bp, Homo sapien
cacattctgcagtcgtattttgcag

SEQ ID NO: 3138249 - DNA, 25 bp, Homo sapien
aaagcagattagatacatgactcac

SEQ ID NO: 3138250 - DNA, 25 bp, Homo sapien
tttgcagtaaattgagagtcatgtt

SEQ ID NO: 3138251 - DNA, 25 bp, Homo sapien
cgtgacaccagtggaccagaacctt

SEQ ID NO: 3138252 - DNA, 25 bp, Homo sapien
gatgacgacagaggattatcttcga

SEQ ID NO: 3138253 - DNA, 25 bp, Homo sapien
tagccccgcggttagttatgatcca

SEQ ID NO: 3138254 - DNA, 25 bp, Homo sapien
tataacctagatgctcaagatgacg

SEQ ID NO: 3138255 - DNA, 25 bp, Homo sapien
tcataatttggtggcctaagatgca

SEQ ID NO: 3138256 - DNA, 25 bp, Homo sapien
tgaatttagagaacatacttggatg

SEQ ID NO: 3138257 - DNA, 25 bp, Homo sapien
tacttggatgctcctcataatttgg

SEQ ID NO: 3138258 - DNA, 25 bp, Homo sapien
gcacctctggaccattcccaatgtt

SEQ ID NO: 3138259 - DNA, 25 bp, Homo sapien
aatctcaacaagattagtacacagg

SEQ ID NO: 3138260 - DNA, 25 bp, Homo sapien
tgaagccaaagccattgagtggcca

SEQ ID NO: 3138261 - DNA, 25 bp, Homo sapien
aagattagtacacagggcttccagg

SEQ ID NO: 3138262 - DNA, 25 bp, Homo sapien
ccattgagtggccaaaaatctcaac

SEQ ID NO: 3138263 - DNA, 25 bp, Homo sapien
gaacaagttcattcaggttgttttg

SEQ ID NO: 3138264 - DNA, 25 bp, Homo sapien
aggcacacactctcatagtgctgcc

SEQ ID NO: 3138265 - DNA, 25 bp, Homo sapien
tcagtgacaccagatgcaactctag

SEQ ID NO: 3138266 - DNA, 25 bp, Homo sapien
gtgctgccctttcgtcagagaccgc

SEQ ID NO: 3138267 - DNA, 25 bp, Homo sapien
cagccccacaaacttgtggctctgg

SEQ ID NO: 3138268 - DNA, 25 bp, Homo sapien
ttattagtcttcaaactgtgggttc

SEQ ID NO: 3138269 - DNA, 25 bp, Homo sapien
ggccaagtactcaattacacatggg

SEQ ID NO: 3138270 - DNA, 25 bp, Homo sapien
ttaccaatctctgccaaaggccaag

SEQ ID NO: 3138271 - DNA, 25 bp, Homo sapien
ctatgttgaagatacactaaggtca

SEQ ID NO: 3138272 - DNA, 25 bp, Homo sapien
gaattcccagaccacctagtatgag

SEQ ID NO: 3138273 - DNA, 25 bp, Homo sapien
aattgatagccccagcttggacctt

SEQ ID NO: 3138274 - DNA, 25 bp, Homo sapien
tgtcccagttcactaaatggcagct

SEQ ID NO: 3138275 - DNA, 25 bp, Homo sapien
gctaggtcttgtctcacagtggtca

SEQ ID NO: 3138276 - DNA, 25 bp, Homo sapien
tgaactaattacgttacacacaaca

SEQ ID NO: 3138277 - DNA, 25 bp, Homo sapien
gaactaattacgttacacacaacaa

SEQ ID NO: 3138278 - DNA, 25 bp, Homo sapien
gaaatgaactaattacgttacacac

SEQ ID NO: 3138279 - DNA, 25 bp, Homo sapien
aatgaactaattacgttacacacaa

SEQ ID NO: 3138280 - DNA, 25 bp, Homo sapien
tctgtatctgtctgggatcagccaa

SEQ ID NO: 3138281 - DNA, 25 bp, Homo sapien
tgttgccattagaaccagtctgaga

SEQ ID NO: 3138282 - DNA, 25 bp, Homo sapien
tcacatgacccaagatggaccaatc

SEQ ID NO: 3138283 - DNA, 25 bp, Homo sapien
gaagtaagttgatccggaactgtca

SEQ ID NO: 3138284 - DNA, 25 bp, Homo sapien
agtagcattttaactatctgtttgt

SEQ ID NO: 3138285 - DNA, 25 bp, Homo sapien
taagtagcattttaactatctgttt

SEQ ID NO: 3138286 - DNA, 25 bp, Homo sapien
aagtagcattttaactatctgtttg

SEQ ID NO: 3138287 - DNA, 25 bp, Homo sapien
agtttaccaagatataccagcagta

SEQ ID NO: 3138288 - DNA, 25 bp, Homo sapien
atataccagcagtaaagattcttgt

SEQ ID NO: 3138289 - DNA, 25 bp, Homo sapien
tataccagcagtaaagattcttgtt

SEQ ID NO: 3138290 - DNA, 25 bp, Homo sapien
tgcagtttaccaagatataccagca

SEQ ID NO: 3138291 - DNA, 25 bp, Homo sapien
tattgtctggggctgacttcagaaa

SEQ ID NO: 3138292 - DNA, 25 bp, Homo sapien
cctaagcggattccaggcatctcct

SEQ ID NO: 3138293 - DNA, 25 bp, Homo sapien
tcctgaatcttcacgctgcttcctt

SEQ ID NO: 3138294 - DNA, 25 bp, Homo sapien
gcttcctttccatccggagatttct

SEQ ID NO: 3138295 - DNA, 25 bp, Homo sapien
taggcctgagtgactgaggactgag

SEQ ID NO: 3138296 - DNA, 25 bp, Homo sapien
gttaggcctgagtgactgaggactg

SEQ ID NO: 3138297 - DNA, 25 bp, Homo sapien
ttaggcctgagtgactgaggactga

SEQ ID NO: 3138298 - DNA, 25 bp, Homo sapien
cttggctgagtcaggtcggataccg

SEQ ID NO: 3138299 - DNA, 25 bp, Homo sapien
gagaatgaaggttgccgacacccct

SEQ ID NO: 3138300 - DNA, 25 bp, Homo sapien
tcctcacttctaagttgaggatggg

SEQ ID NO: 3138301 - DNA, 25 bp, Homo sapien
acccctaacacactccgtagtgatg

SEQ ID NO: 3138302 - DNA, 25 bp, Homo sapien
aagggttggtgctctccggaatgcc

SEQ ID NO: 3138303 - DNA, 25 bp, Homo sapien
cagtgtgaggaattgtttcttggaa

SEQ ID NO: 3138304 - DNA, 25 bp, Homo sapien
tccctgaaagtgaagagaacctctc

SEQ ID NO: 3138305 - DNA, 25 bp, Homo sapien
taattgcgttggcaggcattcctgg

SEQ ID NO: 3138306 - DNA, 25 bp, Homo sapien
aactagaacctagtcctatgtaggc

SEQ ID NO: 3138307 - DNA, 25 bp, Homo sapien
taccgacaagacaggaaattatacc

SEQ ID NO: 3138308 - DNA, 25 bp, Homo sapien
caattactgtaattagcctgaccaa

SEQ ID NO: 3138309 - DNA, 25 bp, Homo sapien
ggttaatacgcacactacaaaggag

SEQ ID NO: 3138310 - DNA, 25 bp, Homo sapien
agttactgcttcacatgcttccggc

SEQ ID NO: 3138311 - DNA, 25 bp, Homo sapien
tggattcaggcctcacgcactgttg

SEQ ID NO: 3138312 - DNA, 25 bp, Homo sapien
gaatgctctccccatgtggtggcaa

SEQ ID NO: 3138313 - DNA, 25 bp, Homo sapien
taaatcttccctcagcaaatccagc

SEQ ID NO: 3138314 - DNA, 25 bp, Homo sapien
ttccattatccatggcagcttttgt

SEQ ID NO: 3138315 - DNA, 25 bp, Homo sapien
tccattatccatggcagcttttgta

SEQ ID NO: 3138316 - DNA, 25 bp, Homo sapien
agcttcaaaagacttctccctcttc

SEQ ID NO: 3138317 - DNA, 25 bp, Homo sapien
gacttctccctcttctcaattttgt

SEQ ID NO: 3138318 - DNA, 25 bp, Homo sapien
ccaacaccatcagcttcaaaagact

SEQ ID NO: 3138319 - DNA, 25 bp, Homo sapien
ctccaacaccatcagcttcaaaaga

SEQ ID NO: 3138320 - DNA, 25 bp, Homo sapien
ggagagacaaagggacatggctgga

SEQ ID NO: 3138321 - DNA, 25 bp, Homo sapien
gctgcaatctggaattctcctcctc

SEQ ID NO: 3138322 - DNA, 25 bp, Homo sapien
tctcaaaactagagcaggactcttc

SEQ ID NO: 3138323 - DNA, 25 bp, Homo sapien
ctgggctgctgcaatctggaattct

SEQ ID NO: 3138324 - DNA, 25 bp, Homo sapien
acttgctgctgtgaggcttgccagt

SEQ ID NO: 3138325 - DNA, 25 bp, Homo sapien
cacttgctgctgtgaggcttgccag

SEQ ID NO: 3138326 - DNA, 25 bp, Homo sapien
attcacacttgctgctgtgaggctt

SEQ ID NO: 3138327 - DNA, 25 bp, Homo sapien
cacacttgctgctgtgaggcttgcc

SEQ ID NO: 3138328 - DNA, 25 bp, Homo sapien
taatcagattttaactttgacttcc

SEQ ID NO: 3138329 - DNA, 25 bp, Homo sapien
ctgaaaggcgatttagatcaggttt

SEQ ID NO: 3138330 - DNA, 25 bp, Homo sapien
tggaatccttgcgaagtaatcagat

SEQ ID NO: 3138331 - DNA, 25 bp, Homo sapien
caggttttggaatccttgcgaagta

SEQ ID NO: 3138332 - DNA, 25 bp, Homo sapien
ttggtgctactggaaatgctctttg

SEQ ID NO: 3138333 - DNA, 25 bp, Homo sapien
tatcaggccataaggcctcttgctt

SEQ ID NO: 3138334 - DNA, 25 bp, Homo sapien
gaattatcaggccataaggcctctt

SEQ ID NO: 3138335 - DNA, 25 bp, Homo sapien
aggcctcttgcttggtgctactgga

SEQ ID NO: 3138336 - DNA, 25 bp, Homo sapien
catgctccttcccacacatcttctt

SEQ ID NO: 3138337 - DNA, 25 bp, Homo sapien
tgctccttcccacacatcttcttta

SEQ ID NO: 3138338 - DNA, 25 bp, Homo sapien
tcatgctccttcccacacatcttct

SEQ ID NO: 3138339 - DNA, 25 bp, Homo sapien
gctccttcccacacatcttctttaa

SEQ ID NO: 3138340 - DNA, 25 bp, Homo sapien
tctcctcggaggtctacagtgatgt

SEQ ID NO: 3138341 - DNA, 25 bp, Homo sapien
tcatctacagtacagtcttctcctc

SEQ ID NO: 3138342 - DNA, 25 bp, Homo sapien
gtcttctcctcggaggtctacagtg

SEQ ID NO: 3138343 - DNA, 25 bp, Homo sapien
agaaccatagactcatctacagtac

SEQ ID NO: 3138344 - DNA, 25 bp, Homo sapien
gatatagacaatgtgatggctccat

SEQ ID NO: 3138345 - DNA, 25 bp, Homo sapien
ttaggtatcgagttttcccgctgac

SEQ ID NO: 3138346 - DNA, 25 bp, Homo sapien
gctgccttcggtggaaacgctgtta

SEQ ID NO: 3138347 - DNA, 25 bp, Homo sapien
gactctcgacaaacgctaacaaggg

SEQ ID NO: 3138348 - DNA, 25 bp, Homo sapien
cgctgcctcctgccggcttccccca

SEQ ID NO: 3138349 - DNA, 25 bp, Homo sapien
cccgctgcctcctgccggcttcccc

SEQ ID NO: 3138350 - DNA, 25 bp, Homo sapien
gcccgctgcctcctgccggcttccc

SEQ ID NO: 3138351 - DNA, 25 bp, Homo sapien
tgcctcctgccggcttcccccaggt

SEQ ID NO: 3138352 - DNA, 25 bp, Homo sapien
ccagctcggactcggagaaccggtt

SEQ ID NO: 3138353 - DNA, 25 bp, Homo sapien
caaatgtcgggctccctatctccct

SEQ ID NO: 3138354 - DNA, 25 bp, Homo sapien
aagcctgcccttcccaaatgtcggg

SEQ ID NO: 3138355 - DNA, 25 bp, Homo sapien
cgcgccgccagctcggactcggaga

SEQ ID NO: 3138356 - DNA, 25 bp, Homo sapien
ttggcttaggataaacgcatcgcac

SEQ ID NO: 3138357 - DNA, 25 bp, Homo sapien
tggctctgggcgtgcattctaagcg

SEQ ID NO: 3138358 - DNA, 25 bp, Homo sapien
tcagctgtgttacgtgcagacaggt

SEQ ID NO: 3138359 - DNA, 25 bp, Homo sapien
tgagctctagaatcaggcaaacctg

SEQ ID NO: 3138360 - DNA, 25 bp, Homo sapien
gtcgccaaatcccattcaaaagcta

SEQ ID NO: 3138361 - DNA, 25 bp, Homo sapien
tgaggcaatcgcttacctttctccc

SEQ ID NO: 3138362 - DNA, 25 bp, Homo sapien
gccaaacataaacacaagactccaa

SEQ ID NO: 3138363 - DNA, 25 bp, Homo sapien
gcccaaccctagaattatatatgct

SEQ ID NO: 3138364 - DNA, 25 bp, Homo sapien
tgaatagccggaatgaaccttgctg

SEQ ID NO: 3138365 - DNA, 25 bp, Homo sapien
caagcactcaaaagaccaaggccag

SEQ ID NO: 3138366 - DNA, 25 bp, Homo sapien
aaaggaactagggatccggcaagca

SEQ ID NO: 3138367 - DNA, 25 bp, Homo sapien
ctctcactactggaaccggaaagga

SEQ ID NO: 3138368 - DNA, 25 bp, Homo sapien
tgtgcacccaagatctgctctctgt

SEQ ID NO: 3138369 - DNA, 25 bp, Homo sapien
ctctgttgtaaatcctgttcagacc

SEQ ID NO: 3138370 - DNA, 25 bp, Homo sapien
ctcttgtgcacccaagatctgctct

SEQ ID NO: 3138371 - DNA, 25 bp, Homo sapien
tgttgtaaatcctgttcagacctgg

SEQ ID NO: 3138372 - DNA, 25 bp, Homo sapien
ctgtgctgtatcctgaaccggctga

SEQ ID NO: 3138373 - DNA, 25 bp, Homo sapien
gacagaacaatgatgtagacttgac

SEQ ID NO: 3138374 - DNA, 25 bp, Homo sapien
gtagacttgacttgttttcgccaac

SEQ ID NO: 3138375 - DNA, 25 bp, Homo sapien
ccatcccatcgactctgtgctgtat

SEQ ID NO: 3138376 - DNA, 25 bp, Homo sapien
gcgagtttcagcctcgtagagggca

SEQ ID NO: 3138377 - DNA, 25 bp, Homo sapien
cagcgtccccgtaatttcaatatag

SEQ ID NO: 3138378 - DNA, 25 bp, Homo sapien
tcccacatcctgagggcgagtttca

SEQ ID NO: 3138379 - DNA, 25 bp, Homo sapien
tgcaatcggaaaacagcagcgtccc

SEQ ID NO: 3138380 - DNA, 25 bp, Homo sapien
gccgccaaacaccaaccccagctcc

SEQ ID NO: 3138381 - DNA, 25 bp, Homo sapien
ggcccgcgctggtcgtagtaccacg

SEQ ID NO: 3138382 - DNA, 25 bp, Homo sapien
tcgcacattcgctcgcataccaatc

SEQ ID NO: 3138383 - DNA, 25 bp, Homo sapien
tggtcgtagtaccacgctccgccgg

SEQ ID NO: 3138384 - DNA, 25 bp, Homo sapien
aggcggtgcacgacacccgcgctgc

SEQ ID NO: 3138385 - DNA, 25 bp, Homo sapien
gcggtgcacgacacccgcgctgctg

SEQ ID NO: 3138386 - DNA, 25 bp, Homo sapien
ctgctgcggcgagaccgggatccgc

SEQ ID NO: 3138387 - DNA, 25 bp, Homo sapien
gctgcggcgagaccgggatccgctg

SEQ ID NO: 3138388 - DNA, 25 bp, Homo sapien
ggcctccggagctctgatcccggct

SEQ ID NO: 3138389 - DNA, 25 bp, Homo sapien
agcctggtcccatcggcaccggcgg

SEQ ID NO: 3138390 - DNA, 25 bp, Homo sapien
ctcagacacgggctcccgccgggcg

SEQ ID NO: 3138391 - DNA, 25 bp, Homo sapien
ctccggagctctgatcccggctgcg

SEQ ID NO: 3138392 - DNA, 25 bp, Homo sapien
ccgaggagaagccgggtgaaagcgc

SEQ ID NO: 3138393 - DNA, 25 bp, Homo sapien
gagtcgaggcgggatgaaggcgccg

SEQ ID NO: 3138394 - DNA, 25 bp, Homo sapien
gggtgaaagcgcagcggcgccccgg

SEQ ID NO: 3138395 - DNA, 25 bp, Homo sapien
gaggcgggatgaaggcgccgaggag

SEQ ID NO: 3138396 - DNA, 25 bp, Homo sapien
cgccgccgcagcagccagccccacg

SEQ ID NO: 3138397 - DNA, 25 bp, Homo sapien
gcgccgccgccgcagcagccagccc

SEQ ID NO: 3138398 - DNA, 25 bp, Homo sapien
gccgccgccgcagcagccagcccca

SEQ ID NO: 3138399 - DNA, 25 bp, Homo sapien
cgccgccgccgcagcagccagcccc

SEQ ID NO: 3138400 - DNA, 25 bp, Homo sapien
ctgtcatgagcgccgggctatcgcc

SEQ ID NO: 3138401 - DNA, 25 bp, Homo sapien
aggtgccggggcacaagctcgcatc

SEQ ID NO: 3138402 - DNA, 25 bp, Homo sapien
gcagttgcggcagagccagtcgccc

SEQ ID NO: 3138403 - DNA, 25 bp, Homo sapien
agctcgcatccgtccgccgctccgg

SEQ ID NO: 3138404 - DNA, 25 bp, Homo sapien
cattctactctgtaagtttgatatt

SEQ ID NO: 3138405 - DNA, 25 bp, Homo sapien
ctttctatggctgcgttacttcact

SEQ ID NO: 3138406 - DNA, 25 bp, Homo sapien
gatctccgaacttatttatgttgca

SEQ ID NO: 3138407 - DNA, 25 bp, Homo sapien
acagtcacactgttgtacattagat

SEQ ID NO: 3138408 - DNA, 25 bp, Homo sapien
agtgagtttttcctgcctcccaagt

SEQ ID NO: 3138409 - DNA, 25 bp, Homo sapien
accacacccggcctgttaccctctg

SEQ ID NO: 3138410 - DNA, 25 bp, Homo sapien
caagtgagtttttcctgcctcccaa

SEQ ID NO: 3138411 - DNA, 25 bp, Homo sapien
cacacccggcctgttaccctctgaa

SEQ ID NO: 3138412 - DNA, 25 bp, Homo sapien
gcagctcgctcagctaagagtacct

SEQ ID NO: 3138413 - DNA, 25 bp, Homo sapien
tctccacatgaaaataaactcaaat

SEQ ID NO: 3138414 - DNA, 25 bp, Homo sapien
ccacatgaaaataaactcaaatagt

SEQ ID NO: 3138415 - DNA, 25 bp, Homo sapien
catctccacatgaaaataaactcaa

SEQ ID NO: 3138416 - DNA, 25 bp, Homo sapien
tccacatgaaaataaactcaaatag

SEQ ID NO: 3138417 - DNA, 25 bp, Homo sapien
tgtttgtcaaataagaggaactggc

SEQ ID NO: 3138418 - DNA, 25 bp, Homo sapien
tttgtcaaataagaggaactggcgc

SEQ ID NO: 3138419 - DNA, 25 bp, Homo sapien
tgtcaaataagaggaactggcgcat

SEQ ID NO: 3138420 - DNA, 25 bp, Homo sapien
tccttgtttgtcaaataagaggaac

SEQ ID NO: 3138421 - DNA, 25 bp, Homo sapien
tatgaactgggtgctatctggcccc

SEQ ID NO: 3138422 - DNA, 25 bp, Homo sapien
tctggccccacgattcataaagtgg

SEQ ID NO: 3138423 - DNA, 25 bp, Homo sapien
gtgagccaccgagtactctcctttt

SEQ ID NO: 3138424 - DNA, 25 bp, Homo sapien
tgccaaggagttgccatgagacctg

SEQ ID NO: 3138425 - DNA, 25 bp, Homo sapien
tccttgtagcatgtcctaggtgtct

SEQ ID NO: 3138426 - DNA, 25 bp, Homo sapien
cggacaagcacgcttgagattttaa

SEQ ID NO: 3138427 - DNA, 25 bp, Homo sapien
tccccatctctcaggcagcaaacac

SEQ ID NO: 3138428 - DNA, 25 bp, Homo sapien
gcatgtcctaggtgtctccccatct

SEQ ID NO: 3138429 - DNA, 25 bp, Homo sapien
cgtgaccagccggctttctaatttt

SEQ ID NO: 3138430 - DNA, 25 bp, Homo sapien
ccagccggctttctaattttctcta

SEQ ID NO: 3138431 - DNA, 25 bp, Homo sapien
gaccagccggctttctaattttctc

SEQ ID NO: 3138432 - DNA, 25 bp, Homo sapien
accagccggctttctaattttctct

SEQ ID NO: 3138433 - DNA, 25 bp, Homo sapien
tcttttctctggattaacagcagca

SEQ ID NO: 3138434 - DNA, 25 bp, Homo sapien
ggaacgccagtcaagatttgctaaa

SEQ ID NO: 3138435 - DNA, 25 bp, Homo sapien
caagaactcggaggcataatggtca

SEQ ID NO: 3138436 - DNA, 25 bp, Homo sapien
agaccctgatgtgcccgtaagtttg

SEQ ID NO: 3138437 - DNA, 25 bp, Homo sapien
tataatacgtagttgcctccagcag

SEQ ID NO: 3138438 - DNA, 25 bp, Homo sapien
tacttcaattccaccatctttgtca

SEQ ID NO: 3138439 - DNA, 25 bp, Homo sapien
tgtcttcttctgtaaagcatggtgg

SEQ ID NO: 3138440 - DNA, 25 bp, Homo sapien
tatgtattgtttgaagagcttccag

SEQ ID NO: 3138441 - DNA, 25 bp, Homo sapien
gcatggtggactcagtgacatgcag

SEQ ID NO: 3138442 - DNA, 25 bp, Homo sapien
gacaatagcaaggaaaacatttttc

SEQ ID NO: 3138443 - DNA, 25 bp, Homo sapien
ctaagacaatagcaaggaaaacatt

SEQ ID NO: 3138444 - DNA, 25 bp, Homo sapien
caatagcaaggaaaacatttttcca

SEQ ID NO: 3138445 - DNA, 25 bp, Homo sapien
taagacaatagcaaggaaaacattt

SEQ ID NO: 3138446 - DNA, 25 bp, Homo sapien
tcataccagcattaatctgctgctt

SEQ ID NO: 3138447 - DNA, 25 bp, Homo sapien
taccagcattaatctgctgctttct

SEQ ID NO: 3138448 - DNA, 25 bp, Homo sapien
ttcttgatatccacagatcatacca

SEQ ID NO: 3138449 - DNA, 25 bp, Homo sapien
agatcataccagcattaatctgctg

SEQ ID NO: 3138450 - DNA, 25 bp, Homo sapien
gatcagtgactgcagcagtcagtgc

SEQ ID NO: 3138451 - DNA, 25 bp, Homo sapien
tatgtgatcagtgactgcagcagtc

SEQ ID NO: 3138452 - DNA, 25 bp, Homo sapien
agtgactgcagcagtcagtgcttgg

SEQ ID NO: 3138453 - DNA, 25 bp, Homo sapien
acgacaatccaaacagctttctaga

SEQ ID NO: 3138454 - DNA, 25 bp, Homo sapien
tgagaccactggactatggggctct

SEQ ID NO: 3138455 - DNA, 25 bp, Homo sapien
ttggaagactatggcagcagttctc

SEQ ID NO: 3138456 - DNA, 25 bp, Homo sapien
accatatttggaagactatggcagc

SEQ ID NO: 3138457 - DNA, 25 bp, Homo sapien
agcactgcctgggaatctattagaa

SEQ ID NO: 3138458 - DNA, 25 bp, Homo sapien
cactttaagtagaggtaagcatttc

SEQ ID NO: 3138459 - DNA, 25 bp, Homo sapien
cacaaggcatgaacacaaggcactg

SEQ ID NO: 3138460 - DNA, 25 bp, Homo sapien
taccagcaaagatgaggttacaggg

SEQ ID NO: 3138461 - DNA, 25 bp, Homo sapien
tacagggaccggatttaccatactc

SEQ ID NO: 3138462 - DNA, 25 bp, Homo sapien
cttctgatgttttccatcgtttcca

SEQ ID NO: 3138463 - DNA, 25 bp, Homo sapien
tcgtttccataaatcctcaatcgtt

SEQ ID NO: 3138464 - DNA, 25 bp, Homo sapien
aatcctcaatcgttatatgtttatc

SEQ ID NO: 3138465 - DNA, 25 bp, Homo sapien
gatgttttccatcgtttccataaat

SEQ ID NO: 3138466 - DNA, 25 bp, Homo sapien
gaggaaatccctcattatcataatg

SEQ ID NO: 3138467 - DNA, 25 bp, Homo sapien
actgtttgaactgaggaaatccctc

SEQ ID NO: 3138468 - DNA, 25 bp, Homo sapien
atcataatggttagatctcagatta

SEQ ID NO: 3138469 - DNA, 25 bp, Homo sapien
tcataatggttagatctcagattaa

SEQ ID NO: 3138470 - DNA, 25 bp, Homo sapien
tgaccaactaaattactaagcatcc

SEQ ID NO: 3138471 - DNA, 25 bp, Homo sapien
taagaaatgcacataatgtctaata

SEQ ID NO: 3138472 - DNA, 25 bp, Homo sapien
gttttgagtaatctccttcagtccc

SEQ ID NO: 3138473 - DNA, 25 bp, Homo sapien
aatgccatggctaataagttgtaca

SEQ ID NO: 3138474 - DNA, 25 bp, Homo sapien
tcacaggctcgggatcagtgggaat

SEQ ID NO: 3138475 - DNA, 25 bp, Homo sapien
gctagcacacagaaacctattatta

SEQ ID NO: 3138476 - DNA, 25 bp, Homo sapien
gcacacagaaacctattattattca

SEQ ID NO: 3138477 - DNA, 25 bp, Homo sapien
aatgtagctagcacacagaaaccta

SEQ ID NO: 3138478 - DNA, 25 bp, Homo sapien
attcaaaagcttccaatttacacat

SEQ ID NO: 3138479 - DNA, 25 bp, Homo sapien
tcattcaaaagcttccaatttacac

SEQ ID NO: 3138480 - DNA, 25 bp, Homo sapien
cattcaaaagcttccaatttacaca

SEQ ID NO: 3138481 - DNA, 25 bp, Homo sapien
agcaggtgagtctgatttttgtaac

SEQ ID NO: 3138482 - DNA, 25 bp, Homo sapien
gggattacagcataaagttttgatt

SEQ ID NO: 3138483 - DNA, 25 bp, Homo sapien
ggattacagcataaagttttgatta

SEQ ID NO: 3138484 - DNA, 25 bp, Homo sapien
aagcaggtgagtctgatttttgtaa

SEQ ID NO: 3138485 - DNA, 25 bp, Homo sapien
tcagtgtctttcaattacccagaag

SEQ ID NO: 3138486 - DNA, 25 bp, Homo sapien
cagaagtaatctggtcccacatggg

SEQ ID NO: 3138487 - DNA, 25 bp, Homo sapien
tgtgaaggccgaggcccacataagg

SEQ ID NO: 3138488 - DNA, 25 bp, Homo sapien
cagctagtatctctataatgcggac

SEQ ID NO: 3138489 - DNA, 25 bp, Homo sapien
cttgattctattgatgtgaggtagc

SEQ ID NO: 3138490 - DNA, 25 bp, Homo sapien
aaattcatttaaactgggccgtgtg

SEQ ID NO: 3138491 - DNA, 25 bp, Homo sapien
tgaacagtccttgcatcttaacatg

SEQ ID NO: 3138492 - DNA, 25 bp, Homo sapien
gatctagaccacctttaaaattcat

SEQ ID NO: 3138493 - DNA, 25 bp, Homo sapien
tgcattgagaattgccctgtcctca

SEQ ID NO: 3138494 - DNA, 25 bp, Homo sapien
gtatccatttaaccaagtaacagga

SEQ ID NO: 3138495 - DNA, 25 bp, Homo sapien
taaaacctggacatgggcctgaggc

SEQ ID NO: 3138496 - DNA, 25 bp, Homo sapien
ttcttcctattcaagatgaactgca

SEQ ID NO: 3138497 - DNA, 25 bp, Homo sapien
agtgatagtaaaagcaattaggaca

SEQ ID NO: 3138498 - DNA, 25 bp, Homo sapien
aaagcaattaggacaaagattagca

SEQ ID NO: 3138499 - DNA, 25 bp, Homo sapien
aagcaattaggacaaagattagcat

SEQ ID NO: 3138500 - DNA, 25 bp, Homo sapien
tagtaaaagcaattaggacaaagat

SEQ ID NO: 3138501 - DNA, 25 bp, Homo sapien
cattgttgtctctaaaattcttctc

SEQ ID NO: 3138502 - DNA, 25 bp, Homo sapien
ctgggaagtgtcgttcctttgacat

SEQ ID NO: 3138503 - DNA, 25 bp, Homo sapien
gggtagttcaacaaactctatcaac

SEQ ID NO: 3138504 - DNA, 25 bp, Homo sapien
ccactgaagagtgtcttcaagggtc

SEQ ID NO: 3138505 - DNA, 25 bp, Homo sapien
tagagaacaactggattcagacacc

SEQ ID NO: 3138506 - DNA, 25 bp, Homo sapien
aattcaggtataacgtatagacgcc

SEQ ID NO: 3138507 - DNA, 25 bp, Homo sapien
tagattggccaaaagttgacccttg

SEQ ID NO: 3138508 - DNA, 25 bp, Homo sapien
caagagcctgattatttagacaaga

SEQ ID NO: 3138509 - DNA, 25 bp, Homo sapien
catccaatgccttgagctgaagttt

SEQ ID NO: 3138510 - DNA, 25 bp, Homo sapien
caaaaccacatccaatgccttgagc

SEQ ID NO: 3138511 - DNA, 25 bp, Homo sapien
tcataaatgaaggttcgtgcactgc

SEQ ID NO: 3138512 - DNA, 25 bp, Homo sapien
tgtgactccggtcactgattttcaa

SEQ ID NO: 3138513 - DNA, 25 bp, Homo sapien
tctgcgtataagcaaaccagcagcc

SEQ ID NO: 3138514 - DNA, 25 bp, Homo sapien
ccaattactatagaaactgtgagga

SEQ ID NO: 3138515 - DNA, 25 bp, Homo sapien
gtccattagactttgctctgcagtt

SEQ ID NO: 3138516 - DNA, 25 bp, Homo sapien
tctttcatccagttatgaggtgggc

SEQ ID NO: 3138517 - DNA, 25 bp, Homo sapien
ttagctctctcagccgacaagcctc

SEQ ID NO: 3138518 - DNA, 25 bp, Homo sapien
ctttgcataattgatttcatccatc

SEQ ID NO: 3138519 - DNA, 25 bp, Homo sapien
cctgttctgcatactgacgtctact

SEQ ID NO: 3138520 - DNA, 25 bp, Homo sapien
catcattttgcgctctaaattttgc

SEQ ID NO: 3138521 - DNA, 25 bp, Homo sapien
aaggagcttcagaacttttagcaga

SEQ ID NO: 3138522 - DNA, 25 bp, Homo sapien
ggcaaggtaagatttcatgaatgag

SEQ ID NO: 3138523 - DNA, 25 bp, Homo sapien
gagatcctttacctttgcagagaag

SEQ ID NO: 3138524 - DNA, 25 bp, Homo sapien
tgagtgaacatgatggtaactatct

SEQ ID NO: 3138525 - DNA, 25 bp, Homo sapien
ccaaaggactccgtgcaatgcctaa

SEQ ID NO: 3138526 - DNA, 25 bp, Homo sapien
cgtgcaatgcctaaatgcctatatt

SEQ ID NO: 3138527 - DNA, 25 bp, Homo sapien
gactccgtgcaatgcctaaatgcct

SEQ ID NO: 3138528 - DNA, 25 bp, Homo sapien
cttctccaaaggactccgtgcaatg

SEQ ID NO: 3138529 - DNA, 25 bp, Homo sapien
catctgtctataattaaattctgcc

SEQ ID NO: 3138530 - DNA, 25 bp, Homo sapien
tataattaaattctgccagcacctc

SEQ ID NO: 3138531 - DNA, 25 bp, Homo sapien
atgcatctgtctataattaaattct

SEQ ID NO: 3138532 - DNA, 25 bp, Homo sapien
taattaaattctgccagcacctcac

SEQ ID NO: 3138533 - DNA, 25 bp, Homo sapien
gggaagagctccaaaaaacagacat

SEQ ID NO: 3138534 - DNA, 25 bp, Homo sapien
gagggaagagctccaaaaaacagac

SEQ ID NO: 3138535 - DNA, 25 bp, Homo sapien
tagagggaagagctccaaaaaacag

SEQ ID NO: 3138536 - DNA, 25 bp, Homo sapien
ttagagggaagagctccaaaaaaca

SEQ ID NO: 3138537 - DNA, 25 bp, Homo sapien
tctacttcatgtgttaactgaagcc

SEQ ID NO: 3138538 - DNA, 25 bp, Homo sapien
gaagccatttctgaagtgcatctgg

SEQ ID NO: 3138539 - DNA, 25 bp, Homo sapien
tagctagctgcatttcagcgttttg

SEQ ID NO: 3138540 - DNA, 25 bp, Homo sapien
taatattgtagtattgcacttctac

SEQ ID NO: 3138541 - DNA, 25 bp, Homo sapien
taaagcttatgattactagagtcta

SEQ ID NO: 3138542 - DNA, 25 bp, Homo sapien
aaagtatacacttctccaaatgcag

SEQ ID NO: 3138543 - DNA, 25 bp, Homo sapien
tactagagtctatttacacaataag

SEQ ID NO: 3138544 - DNA, 25 bp, Homo sapien
taatccctctaagaatgcagcctaa

SEQ ID NO: 3138545 - DNA, 25 bp, Homo sapien
taaaaccagtagagaattactagcc

SEQ ID NO: 3138546 - DNA, 25 bp, Homo sapien
gagaaaacgtgctttcctaagccaa

SEQ ID NO: 3138547 - DNA, 25 bp, Homo sapien
caggaagacccgaatcttgtactaa

SEQ ID NO: 3138548 - DNA, 25 bp, Homo sapien
aagatatccctgcattccaaaaaag

SEQ ID NO: 3138549 - DNA, 25 bp, Homo sapien
gaattttgtggtctacctcatctag

SEQ ID NO: 3138550 - DNA, 25 bp, Homo sapien
gagctgtgtgcaacgtgcagagtcc

SEQ ID NO: 3138551 - DNA, 25 bp, Homo sapien
gaggagctgtgtgcaacgtgcagag

SEQ ID NO: 3138552 - DNA, 25 bp, Homo sapien
ggtctacctcatctagggaggagct

SEQ ID NO: 3138553 - DNA, 25 bp, Homo sapien
gcatcaaaaggtctttaatatggca

SEQ ID NO: 3138554 - DNA, 25 bp, Homo sapien
tgcatcaaaaggtctttaatatggc

SEQ ID NO: 3138555 - DNA, 25 bp, Homo sapien
ttgccagcgaaaaagtcgttctcgt

SEQ ID NO: 3138556 - DNA, 25 bp, Homo sapien
gagttatgggctatctgaaagccac

SEQ ID NO: 3138557 - DNA, 25 bp, Homo sapien
caagttgtcaactcagagagagctt

SEQ ID NO: 3138558 - DNA, 25 bp, Homo sapien
gatcttctcaatttgttgccagcga

SEQ ID NO: 3138559 - DNA, 25 bp, Homo sapien
caatgctgcggcgtgaacggcacag

SEQ ID NO: 3138560 - DNA, 25 bp, Homo sapien
taatgatccaggaggtttagccatg

SEQ ID NO: 3138561 - DNA, 25 bp, Homo sapien
gctgaggcgaggacggcacaatgct

SEQ ID NO: 3138562 - DNA, 25 bp, Homo sapien
tgagggtgccgagggtgtgacgggt

SEQ ID NO: 3138563 - DNA, 25 bp, Homo sapien
cgcagggcaacttgacactgagagg

SEQ ID NO: 3138564 - DNA, 25 bp, Homo sapien
cttcatttcgataaagcgcagggca

SEQ ID NO: 3138565 - DNA, 25 bp, Homo sapien
taaagcgcagggcaacttgacactg

SEQ ID NO: 3138566 - DNA, 25 bp, Homo sapien
ttcgataaagcgcagggcaacttga

SEQ ID NO: 3138567 - DNA, 25 bp, Homo sapien
tctccttaggaatatgctgcactga

SEQ ID NO: 3138568 - DNA, 25 bp, Homo sapien
taaagtgttaaccaagcaaagtcgc

SEQ ID NO: 3138569 - DNA, 25 bp, Homo sapien
gtgtccagtgacctctaagcagtta

SEQ ID NO: 3138570 - DNA, 25 bp, Homo sapien
gttggactgaaatacgctgctgcta

SEQ ID NO: 3138571 - DNA, 25 bp, Homo sapien
gagagctagctatgaaactttgaca

SEQ ID NO: 3138572 - DNA, 25 bp, Homo sapien
catagaacattccaacagagcgaga

SEQ ID NO: 3138573 - DNA, 25 bp, Homo sapien
gaactgaacgttccatcaatgcagg

SEQ ID NO: 3138574 - DNA, 25 bp, Homo sapien
gacttgggttcctaagatggtccta

SEQ ID NO: 3138575 - DNA, 25 bp, Homo sapien
ggcaaatgcacctctcatagcaagg

SEQ ID NO: 3138576 - DNA, 25 bp, Homo sapien
tactgcactacaagctctcgaaagg

SEQ ID NO: 3138577 - DNA, 25 bp, Homo sapien
catatgattataacccagcagctgg

SEQ ID NO: 3138578 - DNA, 25 bp, Homo sapien
cacatttactggaggtctggcactt

SEQ ID NO: 3138579 - DNA, 25 bp, Homo sapien
gatccaaagtccttgtcaaagcgta

SEQ ID NO: 3138580 - DNA, 25 bp, Homo sapien
cttgtcaaagcgtaccaggccgtgt

SEQ ID NO: 3138581 - DNA, 25 bp, Homo sapien
caggccgtgtacatgtggtccctgg

SEQ ID NO: 3138582 - DNA, 25 bp, Homo sapien
tctctcatactcagagtaagatcca

SEQ ID NO: 3138583 - DNA, 25 bp, Homo sapien
tatggcttctcaaaactcaatgctg

SEQ ID NO: 3138584 - DNA, 25 bp, Homo sapien
gacattctaactaaaacaactttca

SEQ ID NO: 3138585 - DNA, 25 bp, Homo sapien
taaataatatggcttctcaaaactc

SEQ ID NO: 3138586 - DNA, 25 bp, Homo sapien
cttaagagtactagcagacattcta

SEQ ID NO: 3138587 - DNA, 25 bp, Homo sapien
ttacaggcgaatcccctcgggagga

SEQ ID NO: 3138588 - DNA, 25 bp, Homo sapien
tcagacctacacagtcgggagaacc

SEQ ID NO: 3138589 - DNA, 25 bp, Homo sapien
caccgggatgccactggaaagctgg

SEQ ID NO: 3138590 - DNA, 25 bp, Homo sapien
tatatctcgaggcttaaaggaggag

SEQ ID NO: 3138591 - DNA, 25 bp, Homo sapien
tcctgaactggtttactgtcgttgc

SEQ ID NO: 3138592 - DNA, 25 bp, Homo sapien
tactgtcgttgccagctgaggaaca

SEQ ID NO: 3138593 - DNA, 25 bp, Homo sapien
tatgacaaaggtcatgtgggatgct

SEQ ID NO: 3138594 - DNA, 25 bp, Homo sapien
tgcttattctggcaacacttggggc

SEQ ID NO: 3138595 - DNA, 25 bp, Homo sapien
catgctggcttacgagtccattaaa

SEQ ID NO: 3138596 - DNA, 25 bp, Homo sapien
gacagtagacagttgcccttctgga

SEQ ID NO: 3138597 - DNA, 25 bp, Homo sapien
gatgttccactatggcatccggcct

SEQ ID NO: 3138598 - DNA, 25 bp, Homo sapien
ttaaagcttgtaagtccatcgtggc

SEQ ID NO: 3138599 - DNA, 25 bp, Homo sapien
ccacctcggcttaaggttgtgaatg

SEQ ID NO: 3138600 - DNA, 25 bp, Homo sapien
acaacatgatctttacagcgggact

SEQ ID NO: 3138601 - DNA, 25 bp, Homo sapien
gtgtgtaaacaattgcctgaatccc

SEQ ID NO: 3138602 - DNA, 25 bp, Homo sapien
ttgatctaaaagtgaaaacagtccc

SEQ ID NO: 3138603 - DNA, 25 bp, Homo sapien
taaagtggtataagcagaaactccc

SEQ ID NO: 3138604 - DNA, 25 bp, Homo sapien
gaactcctcctgtctggttataaga

SEQ ID NO: 3138605 - DNA, 25 bp, Homo sapien
gcagcagtgggccttgctaacagct

SEQ ID NO: 3138606 - DNA, 25 bp, Homo sapien
gcattttcacctaaatagcactggg

SEQ ID NO: 3138607 - DNA, 25 bp, Homo sapien
cctgaactctgaggcgtcggagacg

SEQ ID NO: 3138608 - DNA, 25 bp, Homo sapien
aactctgaggcgtcggagacgttga

SEQ ID NO: 3138609 - DNA, 25 bp, Homo sapien
catccctgaactctgaggcgtcgga

SEQ ID NO: 3138610 - DNA, 25 bp, Homo sapien
ttcttcacatccctgaactctgagg

SEQ ID NO: 3138611 - DNA, 25 bp, Homo sapien
tggctttcctctacaatattttgtg

SEQ ID NO: 3138612 - DNA, 25 bp, Homo sapien
ggctttcctctacaatattttgtgc

SEQ ID NO: 3138613 - DNA, 25 bp, Homo sapien
atggctttcctctacaatattttgt

SEQ ID NO: 3138614 - DNA, 25 bp, Homo sapien
tccagcgaaggcctttgagatctgg

SEQ ID NO: 3138615 - DNA, 25 bp, Homo sapien
tgggtccagcgaaggcctttgagat

SEQ ID NO: 3138616 - DNA, 25 bp, Homo sapien
gttcccttggtcttaaatggaatca

SEQ ID NO: 3138617 - DNA, 25 bp, Homo sapien
ctgaaatgtaaattggggtgagttt

SEQ ID NO: 3138618 - DNA, 25 bp, Homo sapien
taggtgcagttaacccagagttggg

SEQ ID NO: 3138619 - DNA, 25 bp, Homo sapien
tcagctccgggtaatgacgccttaa

SEQ ID NO: 3138620 - DNA, 25 bp, Homo sapien
ccagtgaatgggaaattggaacctc

SEQ ID NO: 3138621 - DNA, 25 bp, Homo sapien
tcagagattgctgcacaaaggagag

SEQ ID NO: 3138622 - DNA, 25 bp, Homo sapien
tgaattctgtaaagacctatttggt

SEQ ID NO: 3138623 - DNA, 25 bp, Homo sapien
tcactgaattctgtaaagacctatt

SEQ ID NO: 3138624 - DNA, 25 bp, Homo sapien
tgctttcactgaattctgtaaagac

SEQ ID NO: 3138625 - DNA, 25 bp, Homo sapien
gtaaagacctatttggttgagtcat

SEQ ID NO: 3138626 - DNA, 25 bp, Homo sapien
ctctactcccacagaagagggctct

SEQ ID NO: 3138627 - DNA, 25 bp, Homo sapien
gcaaatggctaactgactgaccagt

SEQ ID NO: 3138628 - DNA, 25 bp, Homo sapien
gaacatgctcacacaatcgtagtgg

SEQ ID NO: 3138629 - DNA, 25 bp, Homo sapien
tacagcagcacaacgatccctggtt

SEQ ID NO: 3138630 - DNA, 25 bp, Homo sapien
tattatagaattagcacgtggcaga

SEQ ID NO: 3138631 - DNA, 25 bp, Homo sapien
tcaggactctcctacacggacacaa

SEQ ID NO: 3138632 - DNA, 25 bp, Homo sapien
gtgggtgagtggttggcttgatccc

SEQ ID NO: 3138633 - DNA, 25 bp, Homo sapien
agcccttctccacctcaggactctc

SEQ ID NO: 3138634 - DNA, 25 bp, Homo sapien
ggactctcctacacggacacaagag

SEQ ID NO: 3138635 - DNA, 25 bp, Homo sapien
aaacccactcttagtttcgcctgag

SEQ ID NO: 3138636 - DNA, 25 bp, Homo sapien
ggtaatagaatactctccagctgta

SEQ ID NO: 3138637 - DNA, 25 bp, Homo sapien
tcaaacactgttgctaggatgtccc

SEQ ID NO: 3138638 - DNA, 25 bp, Homo sapien
ccaacattgggtatgtgctttaaaa

SEQ ID NO: 3138639 - DNA, 25 bp, Homo sapien
agcaccggacctgatgcaggaagat

SEQ ID NO: 3138640 - DNA, 25 bp, Homo sapien
gagcatttcatgtcaggggcagcac

SEQ ID NO: 3138641 - DNA, 25 bp, Homo sapien
tcttgagcatttcatgtcaggggca

SEQ ID NO: 3138642 - DNA, 25 bp, Homo sapien
ggcagcaccggacctgatgcaggaa

SEQ ID NO: 3138643 - DNA, 25 bp, Homo sapien
caagatggattcacagctgaattct

SEQ ID NO: 3138644 - DNA, 25 bp, Homo sapien
accagaggtacaaggaggagctggt

SEQ ID NO: 3138645 - DNA, 25 bp, Homo sapien
caaaaatagtccaggacaagatgga

SEQ ID NO: 3138646 - DNA, 25 bp, Homo sapien
accattccttctgaaactattccaa

SEQ ID NO: 3138647 - DNA, 25 bp, Homo sapien
aatcacctttggcaaaggtgttctc

SEQ ID NO: 3138648 - DNA, 25 bp, Homo sapien
gaccttgtgcaaatcacctttggca

SEQ ID NO: 3138649 - DNA, 25 bp, Homo sapien
agggaccttgtgcaaatcacctttg

SEQ ID NO: 3138650 - DNA, 25 bp, Homo sapien
tgtgcaaatcacctttggcaaaggt

SEQ ID NO: 3138651 - DNA, 25 bp, Homo sapien
tctcaggtcacatctgtggaacgcc

SEQ ID NO: 3138652 - DNA, 25 bp, Homo sapien
gcccttttggtcatcggtagattga

SEQ ID NO: 3138653 - DNA, 25 bp, Homo sapien
caggtgatctcttgtaaacgtgtca

SEQ ID NO: 3138654 - DNA, 25 bp, Homo sapien
tgaagacccaattagccaacacagt

SEQ ID NO: 3138655 - DNA, 25 bp, Homo sapien
cagtaagcatcttaaaagagagcaa

SEQ ID NO: 3138656 - DNA, 25 bp, Homo sapien
cagcagtaagcatcttaaaagagag

SEQ ID NO: 3138657 - DNA, 25 bp, Homo sapien
gcagtaagcatcttaaaagagagca

SEQ ID NO: 3138658 - DNA, 25 bp, Homo sapien
agcagtaagcatcttaaaagagagc

SEQ ID NO: 3138659 - DNA, 25 bp, Homo sapien
caaacattggcgtagcagccttagt

SEQ ID NO: 3138660 - DNA, 25 bp, Homo sapien
tattgtgctgcatggatatacgaca

SEQ ID NO: 3138661 - DNA, 25 bp, Homo sapien
gtctgaaagaccatcgggcaaaatg

SEQ ID NO: 3138662 - DNA, 25 bp, Homo sapien
aaccttcagctctgtgaggaccaca

SEQ ID NO: 3138663 - DNA, 25 bp, Homo sapien
gagtacctagttagcccctctcaat

SEQ ID NO: 3138664 - DNA, 25 bp, Homo sapien
aggtctgccttaaaaagggctatgg

SEQ ID NO: 3138665 - DNA, 25 bp, Homo sapien
cagaaagatttaacagagtacctag

SEQ ID NO: 3138666 - DNA, 25 bp, Homo sapien
gaggtctgccttaaaaagggctatg

SEQ ID NO: 3138667 - DNA, 25 bp, Homo sapien
ttttgccgagtcctgaatgccttgg

SEQ ID NO: 3138668 - DNA, 25 bp, Homo sapien
tcctgaatgccttggcggtccatcc

SEQ ID NO: 3138669 - DNA, 25 bp, Homo sapien
cgagtcctgaatgccttggcggtcc

SEQ ID NO: 3138670 - DNA, 25 bp, Homo sapien
cttttgcacttttgccgagtcctga

SEQ ID NO: 3138671 - DNA, 25 bp, Homo sapien
tatctctggaaggatataatttttc

SEQ ID NO: 3138672 - DNA, 25 bp, Homo sapien
tctctggaaggatataatttttctg

SEQ ID NO: 3138673 - DNA, 25 bp, Homo sapien
ctgtatctctggaaggatataattt

SEQ ID NO: 3138674 - DNA, 25 bp, Homo sapien
tggaaggatataatttttctggcaa

SEQ ID NO: 3138675 - DNA, 25 bp, Homo sapien
aaacagttgttgaaactatgcatat

SEQ ID NO: 3138676 - DNA, 25 bp, Homo sapien
acagttgttgaaactatgcatattc

SEQ ID NO: 3138677 - DNA, 25 bp, Homo sapien
gaaacagttgttgaaactatgcata

SEQ ID NO: 3138678 - DNA, 25 bp, Homo sapien
aacagttgttgaaactatgcatatt

SEQ ID NO: 3138679 - DNA, 25 bp, Homo sapien
gtcccctccttgtaatagtcaactg

SEQ ID NO: 3138680 - DNA, 25 bp, Homo sapien
gacatggtccctatctcacttctga

SEQ ID NO: 3138681 - DNA, 25 bp, Homo sapien
taatacaggactggcagctttgcca

SEQ ID NO: 3138682 - DNA, 25 bp, Homo sapien
gccgatcttcaaatctgcgagcaga

SEQ ID NO: 3138683 - DNA, 25 bp, Homo sapien
gcctaggtgctttggactggtgtcc

SEQ ID NO: 3138684 - DNA, 25 bp, Homo sapien
gcctctcgttgacatcaatcggcat

SEQ ID NO: 3138685 - DNA, 25 bp, Homo sapien
tgagcctctcgttgacatcaatcgg

SEQ ID NO: 3138686 - DNA, 25 bp, Homo sapien
catgagcctctcgttgacatcaatc

SEQ ID NO: 3138687 - DNA, 25 bp, Homo sapien
gagcctctcgttgacatcaatcggc

SEQ ID NO: 3138688 - DNA, 25 bp, Homo sapien
tcctgacgtcttccctcaggaccat

SEQ ID NO: 3138689 - DNA, 25 bp, Homo sapien
aggatcctggccattgcagcactgt

SEQ ID NO: 3138690 - DNA, 25 bp, Homo sapien
gcagcactgttcctgacgtcttccc

SEQ ID NO: 3138691 - DNA, 25 bp, Homo sapien
tcaggatcctggccattgcagcact

SEQ ID NO: 3138692 - DNA, 25 bp, Homo sapien
atgagtcaccctgatattctcctga

SEQ ID NO: 3138693 - DNA, 25 bp, Homo sapien
tccctgcatgcatgagtcaccctga

SEQ ID NO: 3138694 - DNA, 25 bp, Homo sapien
ttctcctgatgtctggagcacatca

SEQ ID NO: 3138695 - DNA, 25 bp, Homo sapien
accgagtggagtgaaatctgctgtg

SEQ ID NO: 3138696 - DNA, 25 bp, Homo sapien
cagttttaacgacagcattagcaga

SEQ ID NO: 3138697 - DNA, 25 bp, Homo sapien
gcagtagtggtagcagccgcaggtg

SEQ ID NO: 3138698 - DNA, 25 bp, Homo sapien
gttttaacgacagcattagcagaag

SEQ ID NO: 3138699 - DNA, 25 bp, Homo sapien
ggccaaaggttaaaatgcaggcatc

SEQ ID NO: 3138700 - DNA, 25 bp, Homo sapien
gccaaaggttaaaatgcaggcatcc

SEQ ID NO: 3138701 - DNA, 25 bp, Homo sapien
gtggccaaaggttaaaatgcaggca

SEQ ID NO: 3138702 - DNA, 25 bp, Homo sapien
atgtgcaaaacgaccgtacttttct

SEQ ID NO: 3138703 - DNA, 25 bp, Homo sapien
ccatttccataacctggcagtcccc

SEQ ID NO: 3138704 - DNA, 25 bp, Homo sapien
gcaaggagaacagtaaagatttgat

SEQ ID NO: 3138705 - DNA, 25 bp, Homo sapien
aagcaaggagaacagtaaagatttg

SEQ ID NO: 3138706 - DNA, 25 bp, Homo sapien
catttccataacctggcagtccccg

SEQ ID NO: 3138707 - DNA, 25 bp, Homo sapien
ttcctgcaggtgacagcgtagcatt

SEQ ID NO: 3138708 - DNA, 25 bp, Homo sapien
ctttcctgcaggtgacagcgtagca

SEQ ID NO: 3138709 - DNA, 25 bp, Homo sapien
tttcctgcaggtgacagcgtagcat

SEQ ID NO: 3138710 - DNA, 25 bp, Homo sapien
ggctttcctgcaggtgacagcgtag

SEQ ID NO: 3138711 - DNA, 25 bp, Homo sapien
ttcttcatatgcagtgggaataatg

SEQ ID NO: 3138712 - DNA, 25 bp, Homo sapien
cagtgggaataatgtggtcacttat

SEQ ID NO: 3138713 - DNA, 25 bp, Homo sapien
gaataatgtggtcacttatagcttt

SEQ ID NO: 3138714 - DNA, 25 bp, Homo sapien
tttcttcatatgcagtgggaataat

SEQ ID NO: 3138715 - DNA, 25 bp, Homo sapien
aactgccaatacttgtgactggcag

SEQ ID NO: 3138716 - DNA, 25 bp, Homo sapien
tctaactgccaatacttgtgactgg

SEQ ID NO: 3138717 - DNA, 25 bp, Homo sapien
taactgccaatacttgtgactggca

SEQ ID NO: 3138718 - DNA, 25 bp, Homo sapien
ctctaactgccaatacttgtgactg

SEQ ID NO: 3138719 - DNA, 25 bp, Homo sapien
cttcactgggcctcgtatgttttgc

SEQ ID NO: 3138720 - DNA, 25 bp, Homo sapien
gaattccaccttctgctagcactgc

SEQ ID NO: 3138721 - DNA, 25 bp, Homo sapien
cagtcctgcagtagcgtctcttcac

SEQ ID NO: 3138722 - DNA, 25 bp, Homo sapien
ttctgctagcactgcatgacctctg

SEQ ID NO: 3138723 - DNA, 25 bp, Homo sapien
attgactgtcaagttttcgacaccg

SEQ ID NO: 3138724 - DNA, 25 bp, Homo sapien
gaagaaccagacattgaatgatgag

SEQ ID NO: 3138725 - DNA, 25 bp, Homo sapien
aagttttcgacaccgcaaggtgaag

SEQ ID NO: 3138726 - DNA, 25 bp, Homo sapien
ctttgagatacattcactattggtg

SEQ ID NO: 3138727 - DNA, 25 bp, Homo sapien
taatcttgattccatattcaacagc

SEQ ID NO: 3138728 - DNA, 25 bp, Homo sapien
aacttctcattacagcctggcttcc

SEQ ID NO: 3138729 - DNA, 25 bp, Homo sapien
cttcaatcgttttgtgtgcttaatc

SEQ ID NO: 3138730 - DNA, 25 bp, Homo sapien
ttaaaacttcaatcgttttgtgtgc

SEQ ID NO: 3138731 - DNA, 25 bp, Homo sapien
ccccaattggtcaatggccttctaa

SEQ ID NO: 3138732 - DNA, 25 bp, Homo sapien
agccccaattggtcaatggccttct

SEQ ID NO: 3138733 - DNA, 25 bp, Homo sapien
cccaattggtcaatggccttctaac

SEQ ID NO: 3138734 - DNA, 25 bp, Homo sapien
gccccaattggtcaatggccttcta

SEQ ID NO: 3138735 - DNA, 25 bp, Homo sapien
actcagtcgtttcagttgcttttag

SEQ ID NO: 3138736 - DNA, 25 bp, Homo sapien
ttccaactcagtcgtttcagttgct

SEQ ID NO: 3138737 - DNA, 25 bp, Homo sapien
ccaactcagtcgtttcagttgcttt

SEQ ID NO: 3138738 - DNA, 25 bp, Homo sapien
tcattccaactcagtcgtttcagtt

SEQ ID NO: 3138739 - DNA, 25 bp, Homo sapien
gacatcactgttgtagtacagatgc

SEQ ID NO: 3138740 - DNA, 25 bp, Homo sapien
tagtacagatgctacaaagaccaac

SEQ ID NO: 3138741 - DNA, 25 bp, Homo sapien
gatcacaatgccatgacatcactgt

SEQ ID NO: 3138742 - DNA, 25 bp, Homo sapien
ggtgcttgcgatatgcgcacgtcag

SEQ ID NO: 3138743 - DNA, 25 bp, Homo sapien
ctattgagagcaaacttcatgatag

SEQ ID NO: 3138744 - DNA, 25 bp, Homo sapien
ttcatgatagaattgtcattttgtc

SEQ ID NO: 3138745 - DNA, 25 bp, Homo sapien
tttcctcataataaacacgctgcat

SEQ ID NO: 3138746 - DNA, 25 bp, Homo sapien
attgagagcaaacttcatgatagaa

SEQ ID NO: 3138747 - DNA, 25 bp, Homo sapien
ggcacactatgcccaggcccaaaag

SEQ ID NO: 3138748 - DNA, 25 bp, Homo sapien
gcaatgatttgtgcttggttcagca

SEQ ID NO: 3138749 - DNA, 25 bp, Homo sapien
cagtctgcatgcttgaggctcttcc

SEQ ID NO: 3138750 - DNA, 25 bp, Homo sapien
aaagccttaggcaatgatttgtgct

SEQ ID NO: 3138751 - DNA, 25 bp, Homo sapien
aactttgccagttttgaacagctcg

SEQ ID NO: 3138752 - DNA, 25 bp, Homo sapien
ttgccagttttgaacagctcgggga

SEQ ID NO: 3138753 - DNA, 25 bp, Homo sapien
actttgccagttttgaacagctcgg

SEQ ID NO: 3138754 - DNA, 25 bp, Homo sapien
ctttgccagttttgaacagctcggg

SEQ ID NO: 3138755 - DNA, 25 bp, Homo sapien
ctcctggactatccaggaaccagca

SEQ ID NO: 3138756 - DNA, 25 bp, Homo sapien
ttcatttcggctgaaggagtcaagc

SEQ ID NO: 3138757 - DNA, 25 bp, Homo sapien
ggagtcaagctgtgataacattttg

SEQ ID NO: 3138758 - DNA, 25 bp, Homo sapien
ttttgacagctttctcaaggaggtc

SEQ ID NO: 3138759 - DNA, 25 bp, Homo sapien
aatattcccgaacacattcatcgtc

SEQ ID NO: 3138760 - DNA, 25 bp, Homo sapien
aagaagataatattcccgaacacat

SEQ ID NO: 3138761 - DNA, 25 bp, Homo sapien
gataatattcccgaacacattcatc

SEQ ID NO: 3138762 - DNA, 25 bp, Homo sapien
gaagataatattcccgaacacattc

SEQ ID NO: 3138763 - DNA, 25 bp, Homo sapien
cccgggcgagaatgaagggtatcac

SEQ ID NO: 3138764 - DNA, 25 bp, Homo sapien
caaatacgctggcttggatatgtcc

SEQ ID NO: 3138765 - DNA, 25 bp, Homo sapien
tgttgttcatgacagtcactcacca

SEQ ID NO: 3138766 - DNA, 25 bp, Homo sapien
ttctgacagtcatcccattcccaag

SEQ ID NO: 3138767 - DNA, 25 bp, Homo sapien
gcccatgttctgtcggttgccattg

SEQ ID NO: 3138768 - DNA, 25 bp, Homo sapien
cagcccatgttctgtcggttgccat

SEQ ID NO: 3138769 - DNA, 25 bp, Homo sapien
tcagcccatgttctgtcggttgcca

SEQ ID NO: 3138770 - DNA, 25 bp, Homo sapien
catgttctgtcggttgccattgccc

SEQ ID NO: 3138771 - DNA, 25 bp, Homo sapien
gctaaaagcattgaaggacactgtc

SEQ ID NO: 3138772 - DNA, 25 bp, Homo sapien
gaatatggccctctaggcgttgctg

SEQ ID NO: 3138773 - DNA, 25 bp, Homo sapien
gcaagaaagggagaactgggtcact

SEQ ID NO: 3138774 - DNA, 25 bp, Homo sapien
tctactgggagtggagagttgaaca

SEQ ID NO: 3138775 - DNA, 25 bp, Homo sapien
gaggtcagacatctgctgttgttga

SEQ ID NO: 3138776 - DNA, 25 bp, Homo sapien
tcagctgaggtcagacatctgctgt

SEQ ID NO: 3138777 - DNA, 25 bp, Homo sapien
cagctgaggtcagacatctgctgtt

SEQ ID NO: 3138778 - DNA, 25 bp, Homo sapien
gctgaggtcagacatctgctgttgt

SEQ ID NO: 3138779 - DNA, 25 bp, Homo sapien
ttttccttgtagtgtttcttgacat

SEQ ID NO: 3138780 - DNA, 25 bp, Homo sapien
gctttccaggactcaaggggtgaat

SEQ ID NO: 3138781 - DNA, 25 bp, Homo sapien
catcaactggctgaggcttccatct

SEQ ID NO: 3138782 - DNA, 25 bp, Homo sapien
tttccttgtagtgtttcttgacatc

SEQ ID NO: 3138783 - DNA, 25 bp, Homo sapien
caaatgtaccactggctgtgatagg

SEQ ID NO: 3138784 - DNA, 25 bp, Homo sapien
ttcaaagggcatatccaaatgtacc

SEQ ID NO: 3138785 - DNA, 25 bp, Homo sapien
gaagtaacttgcaattctctgaggt

SEQ ID NO: 3138786 - DNA, 25 bp, Homo sapien
ctgtgatagggtaaaggatcggcat

SEQ ID NO: 3138787 - DNA, 25 bp, Homo sapien
tttgatggcactgttaaggagatat

SEQ ID NO: 3138788 - DNA, 25 bp, Homo sapien
aaaactggattatgttatattccta

SEQ ID NO: 3138789 - DNA, 25 bp, Homo sapien
ttttcaaactgagtgttttagaagc

SEQ ID NO: 3138790 - DNA, 25 bp, Homo sapien
caaaaaactggattatgttatattc

SEQ ID NO: 3138791 - DNA, 25 bp, Homo sapien
cttctctcctgtgctatatatggga

SEQ ID NO: 3138792 - DNA, 25 bp, Homo sapien
tactacagaatcctgggtgtattcc

SEQ ID NO: 3138793 - DNA, 25 bp, Homo sapien
aataatgattatagtcataggactc

SEQ ID NO: 3138794 - DNA, 25 bp, Homo sapien
ttgttctgtagatctcttgcctttt

SEQ ID NO: 3138795 - DNA, 25 bp, Homo sapien
tcttaactggctttctgatgacagc

SEQ ID NO: 3138796 - DNA, 25 bp, Homo sapien
cttaactggctttctgatgacagct

SEQ ID NO: 3138797 - DNA, 25 bp, Homo sapien
ttaactggctttctgatgacagctc

SEQ ID NO: 3138798 - DNA, 25 bp, Homo sapien
caaatcgaagtattcactgggtagg

SEQ ID NO: 3138799 - DNA, 25 bp, Homo sapien
ttgttgtcggcagggagttattctc

SEQ ID NO: 3138800 - DNA, 25 bp, Homo sapien
gaatctgagaacgaatctacttcca

SEQ ID NO: 3138801 - DNA, 25 bp, Homo sapien
tatattatgagcaccaactggatgt

SEQ ID NO: 3138802 - DNA, 25 bp, Homo sapien
acatcatagtcaatgctgtgaaaca

SEQ ID NO: 3138803 - DNA, 25 bp, Homo sapien
ccatcttggagccatgatgtttctc

SEQ ID NO: 3138804 - DNA, 25 bp, Homo sapien
ttttcgttcacatcatagtcaatgc

SEQ ID NO: 3138805 - DNA, 25 bp, Homo sapien
cagctggctctccatcttggagcca

SEQ ID NO: 3138806 - DNA, 25 bp, Homo sapien
atcctggacatatttggagttgact

SEQ ID NO: 3138807 - DNA, 25 bp, Homo sapien
gttgactgcttgtaagtaattctgt

SEQ ID NO: 3138808 - DNA, 25 bp, Homo sapien
ttgactgcttgtaagtaattctgtc

SEQ ID NO: 3138809 - DNA, 25 bp, Homo sapien
ctttaatctcagagctgcagaatgc

SEQ ID NO: 3138810 - DNA, 25 bp, Homo sapien
tgcacgagttagcatggcaaagaga

SEQ ID NO: 3138811 - DNA, 25 bp, Homo sapien
gagctgcagaatgcacgagttagca

SEQ ID NO: 3138812 - DNA, 25 bp, Homo sapien
tctcagagctgcagaatgcacgagt

SEQ ID NO: 3138813 - DNA, 25 bp, Homo sapien
tatgttctaggaggccaaatgttgg

SEQ ID NO: 3138814 - DNA, 25 bp, Homo sapien
ggtatctttgtctgctaatctttat

SEQ ID NO: 3138815 - DNA, 25 bp, Homo sapien
aatttctgtatctatgctcagaggg

SEQ ID NO: 3138816 - DNA, 25 bp, Homo sapien
caaatgttggcctccaaatattgat

SEQ ID NO: 3138817 - DNA, 25 bp, Homo sapien
tctggcacgcagtgaaattagaggt

SEQ ID NO: 3138818 - DNA, 25 bp, Homo sapien
tgaactgagtactagaatgtgtcct

SEQ ID NO: 3138819 - DNA, 25 bp, Homo sapien
tctaggttatggctctttgaaggtc

SEQ ID NO: 3138820 - DNA, 25 bp, Homo sapien
tatcttctgatgtaaccaggcttgg

SEQ ID NO: 3138821 - DNA, 25 bp, Homo sapien
agtaagggactggttagctgcgatt

SEQ ID NO: 3138822 - DNA, 25 bp, Homo sapien
tcctgacaccgtgatactgatggaa

SEQ ID NO: 3138823 - DNA, 25 bp, Homo sapien
gctgcgattttatgggtttcctgac

SEQ ID NO: 3138824 - DNA, 25 bp, Homo sapien
tggcatctgcctttgagtaagggac

SEQ ID NO: 3138825 - DNA, 25 bp, Homo sapien
ccatccctggcagagtcaacatctt

SEQ ID NO: 3138826 - DNA, 25 bp, Homo sapien
cctggcagagtcaacatcttgtttc

SEQ ID NO: 3138827 - DNA, 25 bp, Homo sapien
ctatttgccagtttgtctggtgtac

SEQ ID NO: 3138828 - DNA, 25 bp, Homo sapien
tttgccagtttgtctggtgtactca

SEQ ID NO: 3138829 - DNA, 25 bp, Homo sapien
taaattctcctgcatagttacaagc

SEQ ID NO: 3138830 - DNA, 25 bp, Homo sapien
catcttttgttggtgcacagcttcc

SEQ ID NO: 3138831 - DNA, 25 bp, Homo sapien
gagccttattgtcatgccggtaatc

SEQ ID NO: 3138832 - DNA, 25 bp, Homo sapien
gagtgggcttgtctattcttcatct

SEQ ID NO: 3138833 - DNA, 25 bp, Homo sapien
tattagattacagcaacagcattct

SEQ ID NO: 3138834 - DNA, 25 bp, Homo sapien
gatatggtcattcacaaagggaagg

SEQ ID NO: 3138835 - DNA, 25 bp, Homo sapien
gggaagggcaagtataattcttcta

SEQ ID NO: 3138836 - DNA, 25 bp, Homo sapien
cagcattctgaatattgtacacata

SEQ ID NO: 3138837 - DNA, 25 bp, Homo sapien
tacaaaaatcactacgcagcaaagt

SEQ ID NO: 3138838 - DNA, 25 bp, Homo sapien
taaagcacatagactacaagtaacg

SEQ ID NO: 3138839 - DNA, 25 bp, Homo sapien
gcagatcaagtgcatatccatatgg

SEQ ID NO: 3138840 - DNA, 25 bp, Homo sapien
caagtaacgtctacacatagtatag

SEQ ID NO: 3138841 - DNA, 25 bp, Homo sapien
tgtacttgattccttggggcctctt

SEQ ID NO: 3138842 - DNA, 25 bp, Homo sapien
tgaaggttcttgtacttgattcctt

SEQ ID NO: 3138843 - DNA, 25 bp, Homo sapien
aggttcttgtacttgattccttggg

SEQ ID NO: 3138844 - DNA, 25 bp, Homo sapien
tcttgtacttgattccttggggcct

SEQ ID NO: 3138845 - DNA, 25 bp, Homo sapien
tcacactaccacataagacaccaaa

SEQ ID NO: 3138846 - DNA, 25 bp, Homo sapien
tacctggaatataggtttcattcac

SEQ ID NO: 3138847 - DNA, 25 bp, Homo sapien
gaatggttgccaaagggccttacta

SEQ ID NO: 3138848 - DNA, 25 bp, Homo sapien
tgccaaagggccttactacctggaa

SEQ ID NO: 3138849 - DNA, 25 bp, Homo sapien
ccatactttctggacatataaagca

SEQ ID NO: 3138850 - DNA, 25 bp, Homo sapien
ttctggacatataaagcaacttgac

SEQ ID NO: 3138851 - DNA, 25 bp, Homo sapien
ttgagcccttttccatactttctgg

SEQ ID NO: 3138852 - DNA, 25 bp, Homo sapien
tactttctggacatataaagcaact

SEQ ID NO: 3138853 - DNA, 25 bp, Homo sapien
taccaccagaggcattgaacttgaa

SEQ ID NO: 3138854 - DNA, 25 bp, Homo sapien
gcagtgtccagcttaattgtcccag

SEQ ID NO: 3138855 - DNA, 25 bp, Homo sapien
ccatgggtatgggttccactggcta

SEQ ID NO: 3138856 - DNA, 25 bp, Homo sapien
tggaattgcctacaaaaggtacagc

SEQ ID NO: 3138857 - DNA, 25 bp, Homo sapien
tagaataaactcatgattaaagaga

SEQ ID NO: 3138858 - DNA, 25 bp, Homo sapien
ttttaaccatggctagaataaactc

SEQ ID NO: 3138859 - DNA, 25 bp, Homo sapien
ctgtcttgtaaagaagtcttgctga

SEQ ID NO: 3138860 - DNA, 25 bp, Homo sapien
gaagtcttgctgaagtagtcatttt

SEQ ID NO: 3138861 - DNA, 25 bp, Homo sapien
tctttctgtccagcggccataagtt

SEQ ID NO: 3138862 - DNA, 25 bp, Homo sapien
ctgtccagcggccataagttttcaa

SEQ ID NO: 3138863 - DNA, 25 bp, Homo sapien
atgatctttctgtccagcggccata

SEQ ID NO: 3138864 - DNA, 25 bp, Homo sapien
gatctttctgtccagcggccataag

SEQ ID NO: 3138865 - DNA, 25 bp, Homo sapien
ctcatcatgcttacctggccctgct

SEQ ID NO: 3138866 - DNA, 25 bp, Homo sapien
catcatgcttacctggccctgctct

SEQ ID NO: 3138867 - DNA, 25 bp, Homo sapien
gtactcatcatgcttacctggccct

SEQ ID NO: 3138868 - DNA, 25 bp, Homo sapien
tcatgcttacctggccctgctcttg

SEQ ID NO: 3138869 - DNA, 25 bp, Homo sapien
ctgggagattgtagagatcatgttt

SEQ ID NO: 3138870 - DNA, 25 bp, Homo sapien
taggctttagaacctggtttgattc

SEQ ID NO: 3138871 - DNA, 25 bp, Homo sapien
gtagagatcatgtttaggctttaga

SEQ ID NO: 3138872 - DNA, 25 bp, Homo sapien
catgtttaggctttagaacctggtt

SEQ ID NO: 3138873 - DNA, 25 bp, Homo sapien
gagattgatttatgggtttcgttac

SEQ ID NO: 3138874 - DNA, 25 bp, Homo sapien
tgggccacgggagattgatttatgg

SEQ ID NO: 3138875 - DNA, 25 bp, Homo sapien
accccgcacgtcctaactcctccat

SEQ ID NO: 3138876 - DNA, 25 bp, Homo sapien
cacgggagattgatttatgggtttc

SEQ ID NO: 3138877 - DNA, 25 bp, Homo sapien
actatcatgctttttcaagctgatc

SEQ ID NO: 3138878 - DNA, 25 bp, Homo sapien
atcatgctttttcaagctgatctcc

SEQ ID NO: 3138879 - DNA, 25 bp, Homo sapien
ttactatcatgctttttcaagctga

SEQ ID NO: 3138880 - DNA, 25 bp, Homo sapien
tgttttactatcatgctttttcaag

SEQ ID NO: 3138881 - DNA, 25 bp, Homo sapien
gcagaacagcaaatattgtagaaca

SEQ ID NO: 3138882 - DNA, 25 bp, Homo sapien
ttggtgtggatgtcttttttgttga

SEQ ID NO: 3138883 - DNA, 25 bp, Homo sapien
tgatgatggtcacctacagatgggg

SEQ ID NO: 3138884 - DNA, 25 bp, Homo sapien
gaacagcaaatattgtagaacagca

SEQ ID NO: 3138885 - DNA, 25 bp, Homo sapien
gccttgtgaggttggggaaattctc

SEQ ID NO: 3138886 - DNA, 25 bp, Homo sapien
agcttcattccattctccccatgat

SEQ ID NO: 3138887 - DNA, 25 bp, Homo sapien
tcgactactgaagcttgtgtatgca

SEQ ID NO: 3138888 - DNA, 25 bp, Homo sapien
cccatgattctcaggtacaccagtc

SEQ ID NO: 3138889 - DNA, 25 bp, Homo sapien
acagaaacttcttcctggtgctctg

SEQ ID NO: 3138890 - DNA, 25 bp, Homo sapien
ttacagaaacttcttcctggtgctc

SEQ ID NO: 3138891 - DNA, 25 bp, Homo sapien
ttcttcctggtgctctggaataaca

SEQ ID NO: 3138892 - DNA, 25 bp, Homo sapien
ttcctggtgctctggaataacatcc

SEQ ID NO: 3138893 - DNA, 25 bp, Homo sapien
taacagacaccagactgtgaggtat

SEQ ID NO: 3138894 - DNA, 25 bp, Homo sapien
ataacagacaccagactgtgaggta

SEQ ID NO: 3138895 - DNA, 25 bp, Homo sapien
tggtaattacagatcggtaacttag

SEQ ID NO: 3138896 - DNA, 25 bp, Homo sapien
aatctttagagctaagccaggagac

SEQ ID NO: 3138897 - DNA, 25 bp, Homo sapien
attgcatgtacttgtggcccaaagc

SEQ ID NO: 3138898 - DNA, 25 bp, Homo sapien
ccacttggaatgtacgcagaaggat

SEQ ID NO: 3138899 - DNA, 25 bp, Homo sapien
gtcctgctttcaccttcataatcca

SEQ ID NO: 3138900 - DNA, 25 bp, Homo sapien
tcctgctttcaccttcataatccat

SEQ ID NO: 3138901 - DNA, 25 bp, Homo sapien
cttgtcctgctttcaccttcataat

SEQ ID NO: 3138902 - DNA, 25 bp, Homo sapien
tgtcctgctttcaccttcataatcc

SEQ ID NO: 3138903 - DNA, 25 bp, Homo sapien
agctcagatcctcagaacaatgacc

SEQ ID NO: 3138904 - DNA, 25 bp, Homo sapien
ttcttcaccaaagctcagatcctca

SEQ ID NO: 3138905 - DNA, 25 bp, Homo sapien
tcagatcctcagaacaatgaccaac

SEQ ID NO: 3138906 - DNA, 25 bp, Homo sapien
cagcttcttcaccaaagctcagatc

SEQ ID NO: 3138907 - DNA, 25 bp, Homo sapien
taaagaactgcccaatgttgaacat

SEQ ID NO: 3138908 - DNA, 25 bp, Homo sapien
caactgcacgttcaactttatagga

SEQ ID NO: 3138909 - DNA, 25 bp, Homo sapien
atagaatagtcgctgtattagtcca

SEQ ID NO: 3138910 - DNA, 25 bp, Homo sapien
cactctgtggttcgtctgtttaccc

SEQ ID NO: 3138911 - DNA, 25 bp, Homo sapien
gcctttccaggatttcagtcaccat

SEQ ID NO: 3138912 - DNA, 25 bp, Homo sapien
cttctcagaagcctttccaggattt

SEQ ID NO: 3138913 - DNA, 25 bp, Homo sapien
tttgaaatacttcccagtccttctc

SEQ ID NO: 3138914 - DNA, 25 bp, Homo sapien
aatacttcccagtccttctcagaag

SEQ ID NO: 3138915 - DNA, 25 bp, Homo sapien
aaaacaacatccgatcttcccatgg

SEQ ID NO: 3138916 - DNA, 25 bp, Homo sapien
tggagtgcatgtttcccgcctgcct

SEQ ID NO: 3138917 - DNA, 25 bp, Homo sapien
tgttgttgcttagttaccattattg

SEQ ID NO: 3138918 - DNA, 25 bp, Homo sapien
tcccatggatgtcttgtgttgttgc

SEQ ID NO: 3138919 - DNA, 25 bp, Homo sapien
cacaaagacggagtataagctggtt

SEQ ID NO: 3138920 - DNA, 25 bp, Homo sapien
aagacggagtataagctggttctac

SEQ ID NO: 3138921 - DNA, 25 bp, Homo sapien
tataagctggttctactggccttgc

SEQ ID NO: 3138922 - DNA, 25 bp, Homo sapien
atgttcacaaagacggagtataagc

SEQ ID NO: 3138923 - DNA, 25 bp, Homo sapien
tcatcccaacaatcagaggcacaaa

SEQ ID NO: 3138924 - DNA, 25 bp, Homo sapien
aatcctcatcccaacaatcagaggc

SEQ ID NO: 3138925 - DNA, 25 bp, Homo sapien
ctctggtgtttagtttcggtgccag

SEQ ID NO: 3138926 - DNA, 25 bp, Homo sapien
ggtgtttagtttcggtgccagcttc

SEQ ID NO: 3138927 - DNA, 25 bp, Homo sapien
attctgttcgtaaaacttgtgataa

SEQ ID NO: 3138928 - DNA, 25 bp, Homo sapien
ttctgttcgtaaaacttgtgataag

SEQ ID NO: 3138929 - DNA, 25 bp, Homo sapien
tctgttcgtaaaacttgtgataagt

SEQ ID NO: 3138930 - DNA, 25 bp, Homo sapien
tgttcgtaaaacttgtgataagtag

SEQ ID NO: 3138931 - DNA, 25 bp, Homo sapien
ttgctgcttcagatgcctttaactg

SEQ ID NO: 3138932 - DNA, 25 bp, Homo sapien
gcttcagatgcctttaactgcatca

SEQ ID NO: 3138933 - DNA, 25 bp, Homo sapien
ttcttgctgcttcagatgcctttaa

SEQ ID NO: 3138934 - DNA, 25 bp, Homo sapien
gctgcttcagatgcctttaactgca

SEQ ID NO: 3138935 - DNA, 25 bp, Homo sapien
gaagtgtgaaaggacgtcaaaaggc

SEQ ID NO: 3138936 - DNA, 25 bp, Homo sapien
cctttgtcgtttgagttaatggatg

SEQ ID NO: 3138937 - DNA, 25 bp, Homo sapien
caaaaggcactccagctttgccact

SEQ ID NO: 3138938 - DNA, 25 bp, Homo sapien
tcactcaacttagatggcatttcct

SEQ ID NO: 3138939 - DNA, 25 bp, Homo sapien
aggagcattgcagatgggacccatc

SEQ ID NO: 3138940 - DNA, 25 bp, Homo sapien
aaaactcgcaaagcctaacgtctgg

SEQ ID NO: 3138941 - DNA, 25 bp, Homo sapien
tctgaatagcagctcactgagaaga

SEQ ID NO: 3138942 - DNA, 25 bp, Homo sapien
caaggttaggtctctttgcagtgta

SEQ ID NO: 3138943 - DNA, 25 bp, Homo sapien
gaagtgtagccctcactgtctttga

SEQ ID NO: 3138944 - DNA, 25 bp, Homo sapien
ctggttatagaatgtgtggctacat

SEQ ID NO: 3138945 - DNA, 25 bp, Homo sapien
tggctacatttaccgactatagaag

SEQ ID NO: 3138946 - DNA, 25 bp, Homo sapien
tctttgagattctgatccaccgcca

SEQ ID NO: 3138947 - DNA, 25 bp, Homo sapien
aaagtcactcataaagatcagggaa

SEQ ID NO: 3138948 - DNA, 25 bp, Homo sapien
taaagtcactcataaagatcaggga

SEQ ID NO: 3138949 - DNA, 25 bp, Homo sapien
ttctctctagagttagcagcaatac

SEQ ID NO: 3138950 - DNA, 25 bp, Homo sapien
agtttgggaatcatgttgtgtagtc

SEQ ID NO: 3138951 - DNA, 25 bp, Homo sapien
ccagccagcaaatcagtttgggaat

SEQ ID NO: 3138952 - DNA, 25 bp, Homo sapien
gttgtgtagtcaataaatcatcttg

SEQ ID NO: 3138953 - DNA, 25 bp, Homo sapien
acttccagaaccttgccccaggact

SEQ ID NO: 3138954 - DNA, 25 bp, Homo sapien
ttccagaaccttgccccaggactca

SEQ ID NO: 3138955 - DNA, 25 bp, Homo sapien
cttccagaaccttgccccaggactc

SEQ ID NO: 3138956 - DNA, 25 bp, Homo sapien
cctcctttgaccagatgcagctata

SEQ ID NO: 3138957 - DNA, 25 bp, Homo sapien
tgaccagatgcagctataacgatac

SEQ ID NO: 3138958 - DNA, 25 bp, Homo sapien
gcagctataacgatactggcctcag

SEQ ID NO: 3138959 - DNA, 25 bp, Homo sapien
tataacgatactggcctcagcaaag

SEQ ID NO: 3138960 - DNA, 25 bp, Homo sapien
tccccaggaatgtccggaccaccat

SEQ ID NO: 3138961 - DNA, 25 bp, Homo sapien
tttacatcctgtcggcagtaccaga

SEQ ID NO: 3138962 - DNA, 25 bp, Homo sapien
ttcccactgctttacatcctgtcgg

SEQ ID NO: 3138963 - DNA, 25 bp, Homo sapien
ggttccctgttgatcagtctcttcc

SEQ ID NO: 3138964 - DNA, 25 bp, Homo sapien
gtttgtttctataggatttagcgtg

SEQ ID NO: 3138965 - DNA, 25 bp, Homo sapien
tgtttgtttctataggatttagcgt

SEQ ID NO: 3138966 - DNA, 25 bp, Homo sapien
tgtttctataggatttagcgtgttt

SEQ ID NO: 3138967 - DNA, 25 bp, Homo sapien
tctataggatttagcgtgttttctt

SEQ ID NO: 3138968 - DNA, 25 bp, Homo sapien
tctgtttggggagtcgttttcctga

SEQ ID NO: 3138969 - DNA, 25 bp, Homo sapien
tggggagtcgttttcctgatttgcc

SEQ ID NO: 3138970 - DNA, 25 bp, Homo sapien
tgactccaattgaccacctgttctg

SEQ ID NO: 3138971 - DNA, 25 bp, Homo sapien
atttgcctgcattttgaccttgtcc

SEQ ID NO: 3138972 - DNA, 25 bp, Homo sapien
tcatagcgatgtccgcatctcagga

SEQ ID NO: 3138973 - DNA, 25 bp, Homo sapien
tgcactcatagcgatgtccgcatct

SEQ ID NO: 3138974 - DNA, 25 bp, Homo sapien
ctagttgcactcatagcgatgtccg

SEQ ID NO: 3138975 - DNA, 25 bp, Homo sapien
tagcgatgtccgcatctcaggaggt

SEQ ID NO: 3138976 - DNA, 25 bp, Homo sapien
cccaggcagccatctattatctgac

SEQ ID NO: 3138977 - DNA, 25 bp, Homo sapien
tattatctgactttccaatggtttg

SEQ ID NO: 3138978 - DNA, 25 bp, Homo sapien
caggatatgtaagtctgatgttgtg

SEQ ID NO: 3138979 - DNA, 25 bp, Homo sapien
tcttttgttatcatccccaggcagc

SEQ ID NO: 3138980 - DNA, 25 bp, Homo sapien
agccttgcgtaggtcagcaaaaatg

SEQ ID NO: 3138981 - DNA, 25 bp, Homo sapien
tcatttattctgtacccgttcaaca

SEQ ID NO: 3138982 - DNA, 25 bp, Homo sapien
caaaaatggtatgtaccagagcata

SEQ ID NO: 3138983 - DNA, 25 bp, Homo sapien
tgtaccagagcatagttatgaaaat

SEQ ID NO: 3138984 - DNA, 25 bp, Homo sapien
taatctaagccctggtagacacagc

SEQ ID NO: 3138985 - DNA, 25 bp, Homo sapien
ctaatctaagccctggtagacacag

SEQ ID NO: 3138986 - DNA, 25 bp, Homo sapien
aatctaagccctggtagacacagcc

SEQ ID NO: 3138987 - DNA, 25 bp, Homo sapien
tgtctctcagattccaaggaacaca

SEQ ID NO: 3138988 - DNA, 25 bp, Homo sapien
cactgatcctccttatttggtgtct

SEQ ID NO: 3138989 - DNA, 25 bp, Homo sapien
tccaaggaacacatttcaaattctc

SEQ ID NO: 3138990 - DNA, 25 bp, Homo sapien
catttcaaattctccaaaacagtcc

SEQ ID NO: 3138991 - DNA, 25 bp, Homo sapien
tagtcaacatccgaatgtggacagg

SEQ ID NO: 3138992 - DNA, 25 bp, Homo sapien
gacaggatgcctgcactgaagatag

SEQ ID NO: 3138993 - DNA, 25 bp, Homo sapien
caggatgcctgcactgaagatagga

SEQ ID NO: 3138994 - DNA, 25 bp, Homo sapien
atccgaatgtggacaggatgcctgc

SEQ ID NO: 3138995 - DNA, 25 bp, Homo sapien
ctggttagcatgcttataacagttc

SEQ ID NO: 3138996 - DNA, 25 bp, Homo sapien
cagttctagagtgattgttttcctc

SEQ ID NO: 3138997 - DNA, 25 bp, Homo sapien
gttagcatgcttataacagttctag

SEQ ID NO: 3138998 - DNA, 25 bp, Homo sapien
taacagttctagagtgattgttttc

SEQ ID NO: 3138999 - DNA, 25 bp, Homo sapien
tctttgtacagaaccccacagaaaa

SEQ ID NO: 3139000 - DNA, 25 bp, Homo sapien
tgatccatctgaatcaccagcgagg

SEQ ID NO: 3139001 - DNA, 25 bp, Homo sapien
gaacttagctttgttgaaagatcct

SEQ ID NO: 3139002 - DNA, 25 bp, Homo sapien
atgagaataactgcgttaaaagacg

SEQ ID NO: 3139003 - DNA, 25 bp, Homo sapien
ccagatctagtagtaaggcttctta

SEQ ID NO: 3139004 - DNA, 25 bp, Homo sapien
ggcagagttgacagtcacagcctct

SEQ ID NO: 3139005 - DNA, 25 bp, Homo sapien
gcaagtgtcccaacataggtctagt

SEQ ID NO: 3139006 - DNA, 25 bp, Homo sapien
taggtctagttgcttaatgtctcag

SEQ ID NO: 3139007 - DNA, 25 bp, Homo sapien
tatgcatattccatggacttatcag

SEQ ID NO: 3139008 - DNA, 25 bp, Homo sapien
gaaccagaatatatgcatattccat

SEQ ID NO: 3139009 - DNA, 25 bp, Homo sapien
catggacttatcaggtaccttctga

SEQ ID NO: 3139010 - DNA, 25 bp, Homo sapien
caggtaccttctgaaacatattcat

SEQ ID NO: 3139011 - DNA, 25 bp, Homo sapien
caatcaacaaactgctactagcctg

SEQ ID NO: 3139012 - DNA, 25 bp, Homo sapien
tcatagagctattggagggaaaagc

SEQ ID NO: 3139013 - DNA, 25 bp, Homo sapien
gagaattccaaggtgtcatagagct

SEQ ID NO: 3139014 - DNA, 25 bp, Homo sapien
tggatacaacgaataagactcaggc

SEQ ID NO: 3139015 - DNA, 25 bp, Homo sapien
cttctggctggttctgcttcttcaa

SEQ ID NO: 3139016 - DNA, 25 bp, Homo sapien
gcttcttcaattcaggtggataatg

SEQ ID NO: 3139017 - DNA, 25 bp, Homo sapien
ttcttcaattcaggtggataatgta

SEQ ID NO: 3139018 - DNA, 25 bp, Homo sapien
ctgcttcttcaattcaggtggataa

SEQ ID NO: 3139019 - DNA, 25 bp, Homo sapien
gaaatatacccagttcccatgatga

SEQ ID NO: 3139020 - DNA, 25 bp, Homo sapien
acctccattgcaaatgggtgtcaat

SEQ ID NO: 3139021 - DNA, 25 bp, Homo sapien
aatgggtgtcaataatccaatctcc

SEQ ID NO: 3139022 - DNA, 25 bp, Homo sapien
tctccagtagacttagaaatatacc

SEQ ID NO: 3139023 - DNA, 25 bp, Homo sapien
ttacactaggctccaaagaaaccga

SEQ ID NO: 3139024 - DNA, 25 bp, Homo sapien
atttttgtaagaatcgaagtgatac

SEQ ID NO: 3139025 - DNA, 25 bp, Homo sapien
tacactaggctccaaagaaaccgaa

SEQ ID NO: 3139026 - DNA, 25 bp, Homo sapien
taagaatcgaagtgatactgcccac

SEQ ID NO: 3139027 - DNA, 25 bp, Homo sapien
tgggcaaatcgtgtagtaactttgt

SEQ ID NO: 3139028 - DNA, 25 bp, Homo sapien
ccaaattgggcttctcttgaactga

SEQ ID NO: 3139029 - DNA, 25 bp, Homo sapien
ctattccaaattgggcttctcttga

SEQ ID NO: 3139030 - DNA, 25 bp, Homo sapien
cgtgtagtaactttgtgatttgaac

SEQ ID NO: 3139031 - DNA, 25 bp, Homo sapien
gtcatctagccccagagaattatta

SEQ ID NO: 3139032 - DNA, 25 bp, Homo sapien
gctattgattgggtcatctagcccc

SEQ ID NO: 3139033 - DNA, 25 bp, Homo sapien
tcagtgctattgattgggtcatcta

SEQ ID NO: 3139034 - DNA, 25 bp, Homo sapien
gattgggtcatctagccccagagaa

SEQ ID NO: 3139035 - DNA, 25 bp, Homo sapien
ttgcattcctatttgggtaattatc

SEQ ID NO: 3139036 - DNA, 25 bp, Homo sapien
taattgcattcctatttgggtaatt

SEQ ID NO: 3139037 - DNA, 25 bp, Homo sapien
aattgcattcctatttgggtaatta

SEQ ID NO: 3139038 - DNA, 25 bp, Homo sapien
tttccaactgttcatcattgggtaa

SEQ ID NO: 3139039 - DNA, 25 bp, Homo sapien
aggctgctgttcatgtggcagagca

SEQ ID NO: 3139040 - DNA, 25 bp, Homo sapien
tgttcatgtggcagagcacgcatct

SEQ ID NO: 3139041 - DNA, 25 bp, Homo sapien
tgctgttcatgtggcagagcacgca

SEQ ID NO: 3139042 - DNA, 25 bp, Homo sapien
atgtggcagagcacgcatctccagc

SEQ ID NO: 3139043 - DNA, 25 bp, Homo sapien
tgccccataagtgaaacgatatttt

SEQ ID NO: 3139044 - DNA, 25 bp, Homo sapien
aatctgccccataagtgaaacgata

SEQ ID NO: 3139045 - DNA, 25 bp, Homo sapien
cacaatctgccccataagtgaaacg

SEQ ID NO: 3139046 - DNA, 25 bp, Homo sapien
tctgccccataagtgaaacgatatt

SEQ ID NO: 3139047 - DNA, 25 bp, Homo sapien
gactctcgatcactatagcacagaa

SEQ ID NO: 3139048 - DNA, 25 bp, Homo sapien
tatggcggactctcgatcactatag

SEQ ID NO: 3139049 - DNA, 25 bp, Homo sapien
gatgctgaatttatggcggactctc

SEQ ID NO: 3139050 - DNA, 25 bp, Homo sapien
gaatttatggcggactctcgatcac

SEQ ID NO: 3139051 - DNA, 25 bp, Homo sapien
tgatctcagtccatgaacaacaaaa

SEQ ID NO: 3139052 - DNA, 25 bp, Homo sapien
ctcacttagttcctatcaaagattt

SEQ ID NO: 3139053 - DNA, 25 bp, Homo sapien
taattttagatatatctacttcctc

SEQ ID NO: 3139054 - DNA, 25 bp, Homo sapien
tatcacggggatttgatgtacagat

SEQ ID NO: 3139055 - DNA, 25 bp, Homo sapien
gaagtatgctctacacagtttctag

SEQ ID NO: 3139056 - DNA, 25 bp, Homo sapien
cctctgtgcattcaaaagatctgta

SEQ ID NO: 3139057 - DNA, 25 bp, Homo sapien
cctgcattatctgtcctgaatggaa

SEQ ID NO: 3139058 - DNA, 25 bp, Homo sapien
tatgtggattctaggtacaaggcac

SEQ ID NO: 3139059 - DNA, 25 bp, Homo sapien
aagattcctcttatatggtgtcaaa

SEQ ID NO: 3139060 - DNA, 25 bp, Homo sapien
tgttgtagggtattacatcttgtga

SEQ ID NO: 3139061 - DNA, 25 bp, Homo sapien
cattggcattattgaatcaacagga

SEQ ID NO: 3139062 - DNA, 25 bp, Homo sapien
tgttaatctattccccaattgggta

SEQ ID NO: 3139063 - DNA, 25 bp, Homo sapien
aaatgcctaggagtagaatggctga

SEQ ID NO: 3139064 - DNA, 25 bp, Homo sapien
catagggtaggtgtataatcaaata

SEQ ID NO: 3139065 - DNA, 25 bp, Homo sapien
gagtcatagggtaggtgtataatca

SEQ ID NO: 3139066 - DNA, 25 bp, Homo sapien
tagaatggctgagtggcagagtcat

SEQ ID NO: 3139067 - DNA, 25 bp, Homo sapien
ggtgcatatgtgcagggcctataca

SEQ ID NO: 3139068 - DNA, 25 bp, Homo sapien
ggaggactccaatctgtttgagaaa

SEQ ID NO: 3139069 - DNA, 25 bp, Homo sapien
agttcgcatcaaagacactatgtag

SEQ ID NO: 3139070 - DNA, 25 bp, Homo sapien
tttgagccagctaaacaagttcgca

SEQ ID NO: 3139071 - DNA, 25 bp, Homo sapien
gtgttagccatgattgtctcagtcc

SEQ ID NO: 3139072 - DNA, 25 bp, Homo sapien
gatactttaagtggccagagtgtct

SEQ ID NO: 3139073 - DNA, 25 bp, Homo sapien
caggcgtgagcaatattagatactt

SEQ ID NO: 3139074 - DNA, 25 bp, Homo sapien
tcagtccctcgacctggtgatctgc

SEQ ID NO: 3139075 - DNA, 25 bp, Homo sapien
tcttgtacctgtaatgtttcaaacg

SEQ ID NO: 3139076 - DNA, 25 bp, Homo sapien
cagtggcacttctagtctggatttc

SEQ ID NO: 3139077 - DNA, 25 bp, Homo sapien
gaaaaaccttagtaagctagatgtc

SEQ ID NO: 3139078 - DNA, 25 bp, Homo sapien
gatgtccccagtatatggttctcag

SEQ ID NO: 3139079 - DNA, 25 bp, Homo sapien
ttaattcttaattcaacactgcccc

SEQ ID NO: 3139080 - DNA, 25 bp, Homo sapien
ttttctggcactggtctagttctgg

SEQ ID NO: 3139081 - DNA, 25 bp, Homo sapien
gcttcatagtatgttgcacacagat

SEQ ID NO: 3139082 - DNA, 25 bp, Homo sapien
gaaatagtgatctctgcaatgagcc

SEQ ID NO: 3139083 - DNA, 25 bp, Homo sapien
gtactgaggagaaaacagtgtggcc

SEQ ID NO: 3139084 - DNA, 25 bp, Homo sapien
taattttacttagcaatagggtggc

SEQ ID NO: 3139085 - DNA, 25 bp, Homo sapien
caatattattcttaagtgcaactgg

SEQ ID NO: 3139086 - DNA, 25 bp, Homo sapien
atagtgcctctagtaacctatgagg

SEQ ID NO: 3139087 - DNA, 25 bp, Homo sapien
caagattatgatggaagcctcccaa

SEQ ID NO: 3139088 - DNA, 25 bp, Homo sapien
cacgttcactgattagttatgaccc

SEQ ID NO: 3139089 - DNA, 25 bp, Homo sapien
ttgattctcttatgagccacagcac

SEQ ID NO: 3139090 - DNA, 25 bp, Homo sapien
gctgattctcctatactgccaacag

SEQ ID NO: 3139091 - DNA, 25 bp, Homo sapien
tcctgctagggaacttgccttggtc

SEQ ID NO: 3139092 - DNA, 25 bp, Homo sapien
gtagatggtcaagtctcttatagaa

SEQ ID NO: 3139093 - DNA, 25 bp, Homo sapien
ggttttcagccaccaataacattat

SEQ ID NO: 3139094 - DNA, 25 bp, Homo sapien
tacagatttgcccttggtaactcgg

SEQ ID NO: 3139095 - DNA, 25 bp, Homo sapien
tactgcaacaggaccccataactca

SEQ ID NO: 3139096 - DNA, 25 bp, Homo sapien
gaacaaggctttgctcaacattgag

SEQ ID NO: 3139097 - DNA, 25 bp, Homo sapien
ccaaaggcaattggcctgcactcac

SEQ ID NO: 3139098 - DNA, 25 bp, Homo sapien
cactggatggaacaaggctttgctc

SEQ ID NO: 3139099 - DNA, 25 bp, Homo sapien
gaaggcttgcataaatccagatgga

SEQ ID NO: 3139100 - DNA, 25 bp, Homo sapien
cagtgtgattatttctgggcaataa

SEQ ID NO: 3139101 - DNA, 25 bp, Homo sapien
gccacacagccagtgtaaaattgga

SEQ ID NO: 3139102 - DNA, 25 bp, Homo sapien
gtgacagacttggtaggccacacag

SEQ ID NO: 3139103 - DNA, 25 bp, Homo sapien
tgtgatccttaaagtaaaccctgtc

SEQ ID NO: 3139104 - DNA, 25 bp, Homo sapien
gcaattatcctgaatgttaccctac

SEQ ID NO: 3139105 - DNA, 25 bp, Homo sapien
tcctgagtcacttctcaccgacggt

SEQ ID NO: 3139106 - DNA, 25 bp, Homo sapien
tttcttaggctagtaggtcaccatg

SEQ ID NO: 3139107 - DNA, 25 bp, Homo sapien
gatagtttcccatttactcaggtca

SEQ ID NO: 3139108 - DNA, 25 bp, Homo sapien
aaaacactgatcactttgtgttcaa

SEQ ID NO: 3139109 - DNA, 25 bp, Homo sapien
tatcagtactcttgggtatgtaaga

SEQ ID NO: 3139110 - DNA, 25 bp, Homo sapien
ttgtgttcaaagcagcagctatcag

SEQ ID NO: 3139111 - DNA, 25 bp, Homo sapien
cctcaccagctaccccagtcttcat

SEQ ID NO: 3139112 - DNA, 25 bp, Homo sapien
tgtctcagtgtttctctaatgcttc

SEQ ID NO: 3139113 - DNA, 25 bp, Homo sapien
taatgcttctgccaaatgaaacgtc

SEQ ID NO: 3139114 - DNA, 25 bp, Homo sapien
tcttcttgtctcagtgtttctctaa

SEQ ID NO: 3139115 - DNA, 25 bp, Homo sapien
tcaaagctgtcgttccaggtctaaa

SEQ ID NO: 3139116 - DNA, 25 bp, Homo sapien
caacaatagatttttgcaaggctct

SEQ ID NO: 3139117 - DNA, 25 bp, Homo sapien
caggcaagctgtggcaagtggattc

SEQ ID NO: 3139118 - DNA, 25 bp, Homo sapien
gcaaggctctgtgtttaacatgaga

SEQ ID NO: 3139119 - DNA, 25 bp, Homo sapien
tatgccatggtcagatattcaatct

SEQ ID NO: 3139120 - DNA, 25 bp, Homo sapien
gataagcagtactcattccatggtt

SEQ ID NO: 3139121 - DNA, 25 bp, Homo sapien
gaatctgtacaatagacgtcacgta

SEQ ID NO: 3139122 - DNA, 25 bp, Homo sapien
tcttctagttgcatggctcaaacaa

SEQ ID NO: 3139123 - DNA, 25 bp, Homo sapien
tgaaaagagacttctttcttgactt

SEQ ID NO: 3139124 - DNA, 25 bp, Homo sapien
tagtgttctgaaaggcacatggtca

SEQ ID NO: 3139125 - DNA, 25 bp, Homo sapien
tagctaatcggtgtaaacatgtcat

SEQ ID NO: 3139126 - DNA, 25 bp, Homo sapien
tatattggatctgaacatatcttgc

SEQ ID NO: 3139127 - DNA, 25 bp, Homo sapien
tctgacaaggtctatatgaactata

SEQ ID NO: 3139128 - DNA, 25 bp, Homo sapien
cattattgactgatgattgcgttcc

SEQ ID NO: 3139129 - DNA, 25 bp, Homo sapien
tgactgatgattgcgttcccggaaa

SEQ ID NO: 3139130 - DNA, 25 bp, Homo sapien
gatgattgcgttcccggaaacctca

SEQ ID NO: 3139131 - DNA, 25 bp, Homo sapien
tatatcattattgactgatgattgc

SEQ ID NO: 3139132 - DNA, 25 bp, Homo sapien
tcttgattgcccaaagcttgagcaa

SEQ ID NO: 3139133 - DNA, 25 bp, Homo sapien
ctccctctgagtagtgattgtgcac

SEQ ID NO: 3139134 - DNA, 25 bp, Homo sapien
caaggttggattttagcgtaccata

SEQ ID NO: 3139135 - DNA, 25 bp, Homo sapien
taagaatgagcatctgatatggtca

SEQ ID NO: 3139136 - DNA, 25 bp, Homo sapien
cactaatgaggttagaagcaactgc

SEQ ID NO: 3139137 - DNA, 25 bp, Homo sapien
agcactaatgaggttagaagcaact

SEQ ID NO: 3139138 - DNA, 25 bp, Homo sapien
ctgacagtcatgtggaacattggaa

SEQ ID NO: 3139139 - DNA, 25 bp, Homo sapien
ggaacattggaaagcactaatgagg

SEQ ID NO: 3139140 - DNA, 25 bp, Homo sapien
acactgtcttctctatatcaagtgc

SEQ ID NO: 3139141 - DNA, 25 bp, Homo sapien
ctggcatcttacacactgtcttctc

SEQ ID NO: 3139142 - DNA, 25 bp, Homo sapien
gacactgaggttaccacctcagctg

SEQ ID NO: 3139143 - DNA, 25 bp, Homo sapien
ttgacactgaggttaccacctcagc

SEQ ID NO: 3139144 - DNA, 25 bp, Homo sapien
tcatcagggagtctcgggcagtgaa

SEQ ID NO: 3139145 - DNA, 25 bp, Homo sapien
gaaaaggtatgtgcgggttgcctct

SEQ ID NO: 3139146 - DNA, 25 bp, Homo sapien
gatcaaagagttgcatccagtgagg

SEQ ID NO: 3139147 - DNA, 25 bp, Homo sapien
gaaatcgagtatagccctggtgggc

SEQ ID NO: 3139148 - DNA, 25 bp, Homo sapien
tcagctgcaagtccaaaggaattag

SEQ ID NO: 3139149 - DNA, 25 bp, Homo sapien
tttttatgctctcacaggtaactga

SEQ ID NO: 3139150 - DNA, 25 bp, Homo sapien
aaggaattagctagcaaggctgacc

SEQ ID NO: 3139151 - DNA, 25 bp, Homo sapien
aaggctgaccttcctaagaggctgg

SEQ ID NO: 3139152 - DNA, 25 bp, Homo sapien
caaaaacacacgctaatggtgttac

SEQ ID NO: 3139153 - DNA, 25 bp, Homo sapien
gacaatttggacataataagttgcc

SEQ ID NO: 3139154 - DNA, 25 bp, Homo sapien
atgtgtggtcaaacaaggctggccc

SEQ ID NO: 3139155 - DNA, 25 bp, Homo sapien
gctttaaatatataggagctgctac

SEQ ID NO: 3139156 - DNA, 25 bp, Homo sapien
tcttagaatatttgctgatagtctc

SEQ ID NO: 3139157 - DNA, 25 bp, Homo sapien
catggggtagatcaacaatttctgt

SEQ ID NO: 3139158 - DNA, 25 bp, Homo sapien
tctcatggggtagatcaacaatttc

SEQ ID NO: 3139159 - DNA, 25 bp, Homo sapien
gaatatttgctgatagtctcatggg

SEQ ID NO: 3139160 - DNA, 25 bp, Homo sapien
tatgtcctgtatacacagattttgt

SEQ ID NO: 3139161 - DNA, 25 bp, Homo sapien
ctttgcttcaagatgagatagtgtc

SEQ ID NO: 3139162 - DNA, 25 bp, Homo sapien
tcaagatgagatagtgtctatgtcc

SEQ ID NO: 3139163 - DNA, 25 bp, Homo sapien
tagacctgtcctcatacatgatgaa

SEQ ID NO: 3139164 - DNA, 25 bp, Homo sapien
taagcagaacaggtacaagaaagca

SEQ ID NO: 3139165 - DNA, 25 bp, Homo sapien
acaaaccatccaagtgctgctaggg

SEQ ID NO: 3139166 - DNA, 25 bp, Homo sapien
gggtatatgcagtaagcagaacagg

SEQ ID NO: 3139167 - DNA, 25 bp, Homo sapien
ctcacaaaccatccaagtgctgcta

SEQ ID NO: 3139168 - DNA, 25 bp, Homo sapien
tcttgctaaaatcaccttcaattgt

SEQ ID NO: 3139169 - DNA, 25 bp, Homo sapien
aattcagtgttgctgcttgaaatct

SEQ ID NO: 3139170 - DNA, 25 bp, Homo sapien
tgctaaaatcaccttcaattgtttg

SEQ ID NO: 3139171 - DNA, 25 bp, Homo sapien
aaatcaccttcaattgtttgtcctc

SEQ ID NO: 3139172 - DNA, 25 bp, Homo sapien
ttgctacaatcaggaaattgtccca

SEQ ID NO: 3139173 - DNA, 25 bp, Homo sapien
tgctacaatcaggaaattgtcccat

SEQ ID NO: 3139174 - DNA, 25 bp, Homo sapien
cttgctacaatcaggaaattgtccc

SEQ ID NO: 3139175 - DNA, 25 bp, Homo sapien
ctgtgcaggaacctatggggaaaca

SEQ ID NO: 3139176 - DNA, 25 bp, Homo sapien
caaggagccaatgagacaggttttc

SEQ ID NO: 3139177 - DNA, 25 bp, Homo sapien
gaacctatggggaaacatgtgcccc

SEQ ID NO: 3139178 - DNA, 25 bp, Homo sapien
atgtgccccaaggagccaatgagac

SEQ ID NO: 3139179 - DNA, 25 bp, Homo sapien
aaaacctactggaagacaagtgcct

SEQ ID NO: 3139180 - DNA, 25 bp, Homo sapien
ggagacctatccagcttatgaaaaa

SEQ ID NO: 3139181 - DNA, 25 bp, Homo sapien
aaccgataagcaggacaggacagcc

SEQ ID NO: 3139182 - DNA, 25 bp, Homo sapien
tcccatagaagacccctaggtggcc

SEQ ID NO: 3139183 - DNA, 25 bp, Homo sapien
caagtttgtcttcttcaagataaaa

SEQ ID NO: 3139184 - DNA, 25 bp, Homo sapien
tcttcaagataaaagttgagtctcc

SEQ ID NO: 3139185 - DNA, 25 bp, Homo sapien
caagataaaagttgagtctcctcat

SEQ ID NO: 3139186 - DNA, 25 bp, Homo sapien
tgtcttcttcaagataaaagttgag

SEQ ID NO: 3139187 - DNA, 25 bp, Homo sapien
tttggatgcctagcatgcttttcca

SEQ ID NO: 3139188 - DNA, 25 bp, Homo sapien
gatcataacttatcccaaaaccact

SEQ ID NO: 3139189 - DNA, 25 bp, Homo sapien
aaatttggcaggtatttacgttgat

SEQ ID NO: 3139190 - DNA, 25 bp, Homo sapien
tatgaaataggaacgctgctatctc

SEQ ID NO: 3139191 - DNA, 25 bp, Homo sapien
cagggatctcctttcttaatgcatt

SEQ ID NO: 3139192 - DNA, 25 bp, Homo sapien
tgtgtgggtaatgagtctctctcct

SEQ ID NO: 3139193 - DNA, 25 bp, Homo sapien
tggctgcccttggaggatttcttcc

SEQ ID NO: 3139194 - DNA, 25 bp, Homo sapien
tcctgtaaaccatgttgtgtgggta

SEQ ID NO: 3139195 - DNA, 25 bp, Homo sapien
tacttcttcaccgaaacacaatatt

SEQ ID NO: 3139196 - DNA, 25 bp, Homo sapien
tagtgtcttcaagatttctacttct

SEQ ID NO: 3139197 - DNA, 25 bp, Homo sapien
atgattttagtgtcttcaagatttc

SEQ ID NO: 3139198 - DNA, 25 bp, Homo sapien
tttctacttcttcaccgaaacacaa

SEQ ID NO: 3139199 - DNA, 25 bp, Homo sapien
gacaacgtggatacaagtttcatct

SEQ ID NO: 3139200 - DNA, 25 bp, Homo sapien
catgttgatattgtaatttagctta

SEQ ID NO: 3139201 - DNA, 25 bp, Homo sapien
tggtgtatctgttaactctgtcttc

SEQ ID NO: 3139202 - DNA, 25 bp, Homo sapien
tactcctaactgcattcccatttct

SEQ ID NO: 3139203 - DNA, 25 bp, Homo sapien
ccacagaaacccacacagtagtgtc

SEQ ID NO: 3139204 - DNA, 25 bp, Homo sapien
tgggttcacggtctcagagctggct

SEQ ID NO: 3139205 - DNA, 25 bp, Homo sapien
aagcagtgttaacccaaaaagtgag

SEQ ID NO: 3139206 - DNA, 25 bp, Homo sapien
tcataaaagcagtgttaacccaaaa

SEQ ID NO: 3139207 - DNA, 25 bp, Homo sapien
ggtgaagcattagaaacttcgtttc

SEQ ID NO: 3139208 - DNA, 25 bp, Homo sapien
aaacttcgtttcattgctggcggga

SEQ ID NO: 3139209 - DNA, 25 bp, Homo sapien
tatttgagtagccaggacactgata

SEQ ID NO: 3139210 - DNA, 25 bp, Homo sapien
gataatatcaaatactggtgacaag

SEQ ID NO: 3139211 - DNA, 25 bp, Homo sapien
ctgagacgattagtaccaacaataa

SEQ ID NO: 3139212 - DNA, 25 bp, Homo sapien
gcatgaatgagccttgccaagtact

SEQ ID NO: 3139213 - DNA, 25 bp, Homo sapien
taataattgagccatcatgcgaggg

SEQ ID NO: 3139214 - DNA, 25 bp, Homo sapien
catttgaatatggatagattctcag

SEQ ID NO: 3139215 - DNA, 25 bp, Homo sapien
caggagactgattttcgaaaccgga

SEQ ID NO: 3139216 - DNA, 25 bp, Homo sapien
ggagactgattttcgaaaccggaga

SEQ ID NO: 3139217 - DNA, 25 bp, Homo sapien
tcaggagactgattttcgaaaccgg

SEQ ID NO: 3139218 - DNA, 25 bp, Homo sapien
gagactgattttcgaaaccggagaa

SEQ ID NO: 3139219 - DNA, 25 bp, Homo sapien
gacaccagcgtcagtatcttcacaa

SEQ ID NO: 3139220 - DNA, 25 bp, Homo sapien
gctcctcgcagtgacccagtgtatt

SEQ ID NO: 3139221 - DNA, 25 bp, Homo sapien
gtatcttcacaatttacctgctcct

SEQ ID NO: 3139222 - DNA, 25 bp, Homo sapien
aatggccttccacagacaccagcgt

SEQ ID NO: 3139223 - DNA, 25 bp, Homo sapien
tctccctacactgttgcttagttcc

SEQ ID NO: 3139224 - DNA, 25 bp, Homo sapien
tgctctccctacactgttgcttagt

SEQ ID NO: 3139225 - DNA, 25 bp, Homo sapien
tacactgttgcttagttccttggaa

SEQ ID NO: 3139226 - DNA, 25 bp, Homo sapien
ctgtgctctccctacactgttgctt

SEQ ID NO: 3139227 - DNA, 25 bp, Homo sapien
cagcttggtatttctggacacgtcc

SEQ ID NO: 3139228 - DNA, 25 bp, Homo sapien
cacgtccctctaatggagtatcagt

SEQ ID NO: 3139229 - DNA, 25 bp, Homo sapien
ggtatttctggacacgtccctctaa

SEQ ID NO: 3139230 - DNA, 25 bp, Homo sapien
ttctggacacgtccctctaatggag

SEQ ID NO: 3139231 - DNA, 25 bp, Homo sapien
cctgcagggttcaaggctctagttg

SEQ ID NO: 3139232 - DNA, 25 bp, Homo sapien
cctctttctcccaactaccacctgg

SEQ ID NO: 3139233 - DNA, 25 bp, Homo sapien
caatgcattctaattccacaggatc

SEQ ID NO: 3139234 - DNA, 25 bp, Homo sapien
gtgtatgggcaatgggggctggcca

SEQ ID NO: 3139235 - DNA, 25 bp, Homo sapien
tcattcagtgtatgggcaatggggg

SEQ ID NO: 3139236 - DNA, 25 bp, Homo sapien
tggccagctgctcaatggcttccca

SEQ ID NO: 3139237 - DNA, 25 bp, Homo sapien
cccactgggcagttttgcctgttcc

SEQ ID NO: 3139238 - DNA, 25 bp, Homo sapien
acttttaggcaatcaagtagaactc

SEQ ID NO: 3139239 - DNA, 25 bp, Homo sapien
aaaaatgatgcttgtccatgcagtc

SEQ ID NO: 3139240 - DNA, 25 bp, Homo sapien
cattcacacagtgtaatcgagggtt

SEQ ID NO: 3139241 - DNA, 25 bp, Homo sapien
gatctgctggaacatacaacatcag

SEQ ID NO: 3139242 - DNA, 25 bp, Homo sapien
gcggcagaacacagtgtggcagttc

SEQ ID NO: 3139243 - DNA, 25 bp, Homo sapien
gtggcagttcctggtttttgaagca

SEQ ID NO: 3139244 - DNA, 25 bp, Homo sapien
gctgaactctgcagtccgatattgt

SEQ ID NO: 3139245 - DNA, 25 bp, Homo sapien
tgaagcaatgtgatgtaggatattc

SEQ ID NO: 3139246 - DNA, 25 bp, Homo sapien
atgacagctgggattttgacagata

SEQ ID NO: 3139247 - DNA, 25 bp, Homo sapien
ctttaagtatcagtgtgtacagcta

SEQ ID NO: 3139248 - DNA, 25 bp, Homo sapien
tcacaatattcaattgtcttctcca

SEQ ID NO: 3139249 - DNA, 25 bp, Homo sapien
aagacatcttcacaatattcaattg

SEQ ID NO: 3139250 - DNA, 25 bp, Homo sapien
tgccaaaatacttcccaaagtgtca

SEQ ID NO: 3139251 - DNA, 25 bp, Homo sapien
aatacttcccaaagtgtcactgtta

SEQ ID NO: 3139252 - DNA, 25 bp, Homo sapien
ggccccatatgcgttgttcccatct

SEQ ID NO: 3139253 - DNA, 25 bp, Homo sapien
ccatctttgtattcgtgagttctca

SEQ ID NO: 3139254 - DNA, 25 bp, Homo sapien
caatgtcagtggaattagaatcagg

SEQ ID NO: 3139255 - DNA, 25 bp, Homo sapien
tttgcaatgtcaggacaataccagc

SEQ ID NO: 3139256 - DNA, 25 bp, Homo sapien
ccctggatgatggatgtacaggatc

SEQ ID NO: 3139257 - DNA, 25 bp, Homo sapien
taccagcttatgaaactctcagagg

SEQ ID NO: 3139258 - DNA, 25 bp, Homo sapien
aagggtgaccactgactctggacat

SEQ ID NO: 3139259 - DNA, 25 bp, Homo sapien
gacatgctcatcactgacaagactg

SEQ ID NO: 3139260 - DNA, 25 bp, Homo sapien
tatctacagataagggtgaccactg

SEQ ID NO: 3139261 - DNA, 25 bp, Homo sapien
taaatctgcttatctacagataagg

SEQ ID NO: 3139262 - DNA, 25 bp, Homo sapien
taagggtgagttgttcattttctag

SEQ ID NO: 3139263 - DNA, 25 bp, Homo sapien
gcttctactttctgattaagggtga

SEQ ID NO: 3139264 - DNA, 25 bp, Homo sapien
ccttattcctagcccttgcactgat

SEQ ID NO: 3139265 - DNA, 25 bp, Homo sapien
tcagtagtagacttggccctctgct

SEQ ID NO: 3139266 - DNA, 25 bp, Homo sapien
caaaatgaagaacttgtagccacca

SEQ ID NO: 3139267 - DNA, 25 bp, Homo sapien
tcaaaatgaagaacttgtagccacc

SEQ ID NO: 3139268 - DNA, 25 bp, Homo sapien
atgaagaacttgtagccaccaaatt

SEQ ID NO: 3139269 - DNA, 25 bp, Homo sapien
aaatgaagaacttgtagccaccaaa

SEQ ID NO: 3139270 - DNA, 25 bp, Homo sapien
tgtcaatatttgccaaattgccatc

SEQ ID NO: 3139271 - DNA, 25 bp, Homo sapien
cattaatgtcaatatttgccaaatt

SEQ ID NO: 3139272 - DNA, 25 bp, Homo sapien
atatttgccaaattgccatctctgt

SEQ ID NO: 3139273 - DNA, 25 bp, Homo sapien
taatgtcaatatttgccaaattgcc

SEQ ID NO: 3139274 - DNA, 25 bp, Homo sapien
tccccagagccaaggagaaactcca

SEQ ID NO: 3139275 - DNA, 25 bp, Homo sapien
cattagcttgtttccttcttcgctc

SEQ ID NO: 3139276 - DNA, 25 bp, Homo sapien
gcttgtttccttcttcgctcacatt

SEQ ID NO: 3139277 - DNA, 25 bp, Homo sapien
cttcattagcttgtttccttcttcg

SEQ ID NO: 3139278 - DNA, 25 bp, Homo sapien
tcagtgggcaagaatccgtgtttaa

SEQ ID NO: 3139279 - DNA, 25 bp, Homo sapien
ctgagaggagccgtttggagcattt

SEQ ID NO: 3139280 - DNA, 25 bp, Homo sapien
tggtagtcagctctagaaacacctg

SEQ ID NO: 3139281 - DNA, 25 bp, Homo sapien
atccgtgtttaaccgtctttggcat

SEQ ID NO: 3139282 - DNA, 25 bp, Homo sapien
cagtgaatccatggatacctccagc

SEQ ID NO: 3139283 - DNA, 25 bp, Homo sapien
gtgaatccatggatacctccagcag

SEQ ID NO: 3139284 - DNA, 25 bp, Homo sapien
tccagtgaatccatggatacctcca

SEQ ID NO: 3139285 - DNA, 25 bp, Homo sapien
tgaatccatggatacctccagcagg

SEQ ID NO: 3139286 - DNA, 25 bp, Homo sapien
aacaccaccactacctttgaggagc

SEQ ID NO: 3139287 - DNA, 25 bp, Homo sapien
agatctaaggtgtccttcattgaca

SEQ ID NO: 3139288 - DNA, 25 bp, Homo sapien
gagcatcttaatgatgcccagatct

SEQ ID NO: 3139289 - DNA, 25 bp, Homo sapien
atcttgccatcatcaagctgcttaa

SEQ ID NO: 3139290 - DNA, 25 bp, Homo sapien
gattagactaaacatgtgtccagct

SEQ ID NO: 3139291 - DNA, 25 bp, Homo sapien
gagtcaagaatgctcttatgttgct

SEQ ID NO: 3139292 - DNA, 25 bp, Homo sapien
caagaatgctcttatgttgctgatt

SEQ ID NO: 3139293 - DNA, 25 bp, Homo sapien
tgttgctgattagactaaacatgtg

SEQ ID NO: 3139294 - DNA, 25 bp, Homo sapien
gactggtagccaatgatacatgcaa

SEQ ID NO: 3139295 - DNA, 25 bp, Homo sapien
ttgttaaaggcacaagacacaatga

SEQ ID NO: 3139296 - DNA, 25 bp, Homo sapien
tattaaaccagctagaagtcttcag

SEQ ID NO: 3139297 - DNA, 25 bp, Homo sapien
gaatttctatcacaccattattggg

SEQ ID NO: 3139298 - DNA, 25 bp, Homo sapien
ctaatctccgtgttattctaatttc

SEQ ID NO: 3139299 - DNA, 25 bp, Homo sapien
atgcttcatgagtttacatgttgtt

SEQ ID NO: 3139300 - DNA, 25 bp, Homo sapien
taatctccgtgttattctaatttca

SEQ ID NO: 3139301 - DNA, 25 bp, Homo sapien
ttcatgagtttacatgttgttcttc

SEQ ID NO: 3139302 - DNA, 25 bp, Homo sapien
aaattcttcttatatcctgaagcca

SEQ ID NO: 3139303 - DNA, 25 bp, Homo sapien
cataacccaaattaattgccacacc

SEQ ID NO: 3139304 - DNA, 25 bp, Homo sapien
caaattaattgccacacctctaaaa

SEQ ID NO: 3139305 - DNA, 25 bp, Homo sapien
tctaaaattcttcttatatcctgaa

SEQ ID NO: 3139306 - DNA, 25 bp, Homo sapien
cttaccaatgctatgttatcatagc

SEQ ID NO: 3139307 - DNA, 25 bp, Homo sapien
tgtcttctgatgtcggaagtttgca

SEQ ID NO: 3139308 - DNA, 25 bp, Homo sapien
tgtcggaagtttgcagagtcatcct

SEQ ID NO: 3139309 - DNA, 25 bp, Homo sapien
tttgcagagtcatcctgtgccacca

SEQ ID NO: 3139310 - DNA, 25 bp, Homo sapien
gccaccaggataaataccaattgtg

SEQ ID NO: 3139311 - DNA, 25 bp, Homo sapien
ctcttggtgacaacaatattgtcta

SEQ ID NO: 3139312 - DNA, 25 bp, Homo sapien
ctaatgattgggttctaattgtctc

SEQ ID NO: 3139313 - DNA, 25 bp, Homo sapien
ggccctcctagaataaatggaacat

SEQ ID NO: 3139314 - DNA, 25 bp, Homo sapien
caattcataattggccctcctagaa

SEQ ID NO: 3139315 - DNA, 25 bp, Homo sapien
acttgtgtaagtggaaaccgtgcct

SEQ ID NO: 3139316 - DNA, 25 bp, Homo sapien
tctcttcagacttgtgtaagtggaa

SEQ ID NO: 3139317 - DNA, 25 bp, Homo sapien
tcagacttgtgtaagtggaaaccgt

SEQ ID NO: 3139318 - DNA, 25 bp, Homo sapien
aagtctcttcagacttgtgtaagtg

SEQ ID NO: 3139319 - DNA, 25 bp, Homo sapien
ctttacaagaagacttttcatgaag

SEQ ID NO: 3139320 - DNA, 25 bp, Homo sapien
acaagaagacttttcatgaagtatt

SEQ ID NO: 3139321 - DNA, 25 bp, Homo sapien
aagacttttcatgaagtattttcca

SEQ ID NO: 3139322 - DNA, 25 bp, Homo sapien
gacttttcatgaagtattttccata

SEQ ID NO: 3139323 - DNA, 25 bp, Homo sapien
tgatctgccaccaccaatccttctc

SEQ ID NO: 3139324 - DNA, 25 bp, Homo sapien
aatccttctctgagtcaccacctgg

SEQ ID NO: 3139325 - DNA, 25 bp, Homo sapien
ttctctgagtcaccacctggcactg

SEQ ID NO: 3139326 - DNA, 25 bp, Homo sapien
ttgatctgccaccaccaatccttct

SEQ ID NO: 3139327 - DNA, 25 bp, Homo sapien
actgatttggactgtcacccggtgg

SEQ ID NO: 3139328 - DNA, 25 bp, Homo sapien
caaggtcgattgatgtttccaccca

SEQ ID NO: 3139329 - DNA, 25 bp, Homo sapien
taggcatataaacatagtttgtgcc

SEQ ID NO: 3139330 - DNA, 25 bp, Homo sapien
cctgtatgacgcaaacactggattg

SEQ ID NO: 3139331 - DNA, 25 bp, Homo sapien
tttgactttcaaacattgctaatac

SEQ ID NO: 3139332 - DNA, 25 bp, Homo sapien
ttcttttgactttcaaacattgcta

SEQ ID NO: 3139333 - DNA, 25 bp, Homo sapien
caagccctccaatttcttttgactt

SEQ ID NO: 3139334 - DNA, 25 bp, Homo sapien
tcactgcaagccctccaatttcttt

SEQ ID NO: 3139335 - DNA, 25 bp, Homo sapien
tccacagttacagagttttcatgag

SEQ ID NO: 3139336 - DNA, 25 bp, Homo sapien
cacagttacagagttttcatgagat

SEQ ID NO: 3139337 - DNA, 25 bp, Homo sapien
atccacagttacagagttttcatga

SEQ ID NO: 3139338 - DNA, 25 bp, Homo sapien
ccacagttacagagttttcatgaga

SEQ ID NO: 3139339 - DNA, 25 bp, Homo sapien
gttctgaaacccttggatgtcacag

SEQ ID NO: 3139340 - DNA, 25 bp, Homo sapien
ggcagaaagcaaacagggcatccgt

SEQ ID NO: 3139341 - DNA, 25 bp, Homo sapien
tattcgtgatgaaagtagcaccttc

SEQ ID NO: 3139342 - DNA, 25 bp, Homo sapien
aattggtgctatctcctattcgtga

SEQ ID NO: 3139343 - DNA, 25 bp, Homo sapien
ggctgctgttgttcgatatttgaaa

SEQ ID NO: 3139344 - DNA, 25 bp, Homo sapien
ccaaaccatattaaagggatgtagg

SEQ ID NO: 3139345 - DNA, 25 bp, Homo sapien
ttctgattggttcgggcctggctgc

SEQ ID NO: 3139346 - DNA, 25 bp, Homo sapien
tatggctggtgcatattctgattgg

SEQ ID NO: 3139347 - DNA, 25 bp, Homo sapien
attagtgggaagaggacttcaggaa

SEQ ID NO: 3139348 - DNA, 25 bp, Homo sapien
tccatttaagtctctcatcgggcat

SEQ ID NO: 3139349 - DNA, 25 bp, Homo sapien
ttagtgggaagaggacttcaggaag

SEQ ID NO: 3139350 - DNA, 25 bp, Homo sapien
attaagaacggcagagaaaatccca

SEQ ID NO: 3139351 - DNA, 25 bp, Homo sapien
ttaagaacggcagagaaaatcccat

SEQ ID NO: 3139352 - DNA, 25 bp, Homo sapien
ttattgttgttgctaaaatctggca

SEQ ID NO: 3139353 - DNA, 25 bp, Homo sapien
gttgctaaaatctggcactgatgcc

SEQ ID NO: 3139354 - DNA, 25 bp, Homo sapien
gcactgatgccttattggagtagta

SEQ ID NO: 3139355 - DNA, 25 bp, Homo sapien
tggagtagtagatatcaagatactt

SEQ ID NO: 3139356 - DNA, 25 bp, Homo sapien
gtactttcgattttgataacactga

SEQ ID NO: 3139357 - DNA, 25 bp, Homo sapien
aatacctatgaccttgtgcttatga

SEQ ID NO: 3139358 - DNA, 25 bp, Homo sapien
ttatgaggtcctaccactcgggcac

SEQ ID NO: 3139359 - DNA, 25 bp, Homo sapien
caaagagctgtactttcgattttga

SEQ ID NO: 3139360 - DNA, 25 bp, Homo sapien
acgttgatcctgagtaagagagttt

SEQ ID NO: 3139361 - DNA, 25 bp, Homo sapien
tgatcctgagtaagagagttttgtg

SEQ ID NO: 3139362 - DNA, 25 bp, Homo sapien
gttgatcctgagtaagagagttttg

SEQ ID NO: 3139363 - DNA, 25 bp, Homo sapien
gatcctgagtaagagagttttgtgt

SEQ ID NO: 3139364 - DNA, 25 bp, Homo sapien
attccattattgccatgagacaatc

SEQ ID NO: 3139365 - DNA, 25 bp, Homo sapien
ggttgatgttgtctcagcacagtga

SEQ ID NO: 3139366 - DNA, 25 bp, Homo sapien
tttctgccagagattagaggtttta

SEQ ID NO: 3139367 - DNA, 25 bp, Homo sapien
aatcccacattctttagggcataga

SEQ ID NO: 3139368 - DNA, 25 bp, Homo sapien
ttagggcatagatttgcctgtctct

SEQ ID NO: 3139369 - DNA, 25 bp, Homo sapien
aaattggcacatatagtactgcttc

SEQ ID NO: 3139370 - DNA, 25 bp, Homo sapien
gcttcagtgttataggcaatttttg

SEQ ID NO: 3139371 - DNA, 25 bp, Homo sapien
attggcacatatagtactgcttcag

SEQ ID NO: 3139372 - DNA, 25 bp, Homo sapien
tagtactgcttcagtgttataggca

SEQ ID NO: 3139373 - DNA, 25 bp, Homo sapien
cattggcattgccatatttataggt

SEQ ID NO: 3139374 - DNA, 25 bp, Homo sapien
ggtggtaggatgcaacaaaaagctt

SEQ ID NO: 3139375 - DNA, 25 bp, Homo sapien
tataggtgactttttatcccttgaa

SEQ ID NO: 3139376 - DNA, 25 bp, Homo sapien
tttttatcccttgaaccaagacatg

SEQ ID NO: 3139377 - DNA, 25 bp, Homo sapien
ggctcaataccattgactttgcaga

SEQ ID NO: 3139378 - DNA, 25 bp, Homo sapien
cattcagtgcacagggctcaatacc

SEQ ID NO: 3139379 - DNA, 25 bp, Homo sapien
tggagtaaaggtgacatccgttctg

SEQ ID NO: 3139380 - DNA, 25 bp, Homo sapien
ggtgacatccgttctggatttgaga

SEQ ID NO: 3139381 - DNA, 25 bp, Homo sapien
cagtgttgccatgacaaacatctta

SEQ ID NO: 3139382 - DNA, 25 bp, Homo sapien
agcagtgttgccatgacaaacatct

SEQ ID NO: 3139383 - DNA, 25 bp, Homo sapien
gcaatgtaagctgtgtgatgatcca

SEQ ID NO: 3139384 - DNA, 25 bp, Homo sapien
caaacttgaaagcaatgtaagctgt

SEQ ID NO: 3139385 - DNA, 25 bp, Homo sapien
cttgaaagcaatgtaagctgtgtga

SEQ ID NO: 3139386 - DNA, 25 bp, Homo sapien
tgtaagctgtgtgatgatccatcac

SEQ ID NO: 3139387 - DNA, 25 bp, Homo sapien
tgcaacacctctgtatcaggtaagg

SEQ ID NO: 3139388 - DNA, 25 bp, Homo sapien
ctacaatttccatttttgggaccag

SEQ ID NO: 3139389 - DNA, 25 bp, Homo sapien
tgtatcaggtaaggtggtcctacaa

SEQ ID NO: 3139390 - DNA, 25 bp, Homo sapien
tattatattgcaacacctctgtatc

SEQ ID NO: 3139391 - DNA, 25 bp, Homo sapien
gctctagggaatacattggtggaag

SEQ ID NO: 3139392 - DNA, 25 bp, Homo sapien
aagctctttactgttcctacaaaga

SEQ ID NO: 3139393 - DNA, 25 bp, Homo sapien
ttggtggaagttctaaatcactttc

SEQ ID NO: 3139394 - DNA, 25 bp, Homo sapien
tactgttcctacaaagagctctagg

SEQ ID NO: 3139395 - DNA, 25 bp, Homo sapien
ctctgatatagtggaatacagtatg

SEQ ID NO: 3139396 - DNA, 25 bp, Homo sapien
gctgattgcacttgctagaaaattt

SEQ ID NO: 3139397 - DNA, 25 bp, Homo sapien
cccataaattactcctttgaggaca

SEQ ID NO: 3139398 - DNA, 25 bp, Homo sapien
cagtatgccttccattgggtgtgct

SEQ ID NO: 3139399 - DNA, 25 bp, Homo sapien
tataggccattcatgtatatgaaag

SEQ ID NO: 3139400 - DNA, 25 bp, Homo sapien
ttttctacagtctactgtttatatg

SEQ ID NO: 3139401 - DNA, 25 bp, Homo sapien
gatttaactgggcttattctatagg

SEQ ID NO: 3139402 - DNA, 25 bp, Homo sapien
ggcttattctataggccattcatgt

SEQ ID NO: 3139403 - DNA, 25 bp, Homo sapien
aataagtctgcatgagctgaattct

SEQ ID NO: 3139404 - DNA, 25 bp, Homo sapien
gaacccataaataagtctgcatgag

SEQ ID NO: 3139405 - DNA, 25 bp, Homo sapien
aagaacccataaataagtctgcatg

SEQ ID NO: 3139406 - DNA, 25 bp, Homo sapien
ccataaataagtctgcatgagctga

SEQ ID NO: 3139407 - DNA, 25 bp, Homo sapien
catctccagatatttctcgtttttc

SEQ ID NO: 3139408 - DNA, 25 bp, Homo sapien
tttctatctctgcatgtacggccac

SEQ ID NO: 3139409 - DNA, 25 bp, Homo sapien
cattgctgctcttgcaaatcccctg

SEQ ID NO: 3139410 - DNA, 25 bp, Homo sapien
gccacctgttgaaccaattttcacc

SEQ ID NO: 3139411 - DNA, 25 bp, Homo sapien
cacatctcaaatattcctaggaaat

SEQ ID NO: 3139412 - DNA, 25 bp, Homo sapien
acatctcaaatattcctaggaaata

SEQ ID NO: 3139413 - DNA, 25 bp, Homo sapien
tcacatctcaaatattcctaggaaa

SEQ ID NO: 3139414 - DNA, 25 bp, Homo sapien
cataagcaatcatagcaatccaaaa

SEQ ID NO: 3139415 - DNA, 25 bp, Homo sapien
agcacaaaggacatcatggccacga

SEQ ID NO: 3139416 - DNA, 25 bp, Homo sapien
tctccgaagcacaaaggacatcatg

SEQ ID NO: 3139417 - DNA, 25 bp, Homo sapien
tccgaagcacaaaggacatcatggc

SEQ ID NO: 3139418 - DNA, 25 bp, Homo sapien
agtgtctccgaagcacaaaggacat

SEQ ID NO: 3139419 - DNA, 25 bp, Homo sapien
tctggtggcctctatgactctcatg

SEQ ID NO: 3139420 - DNA, 25 bp, Homo sapien
tccatggctccatacgtgcggaagg

SEQ ID NO: 3139421 - DNA, 25 bp, Homo sapien
caagtgcagcatgacctgcgagcct

SEQ ID NO: 3139422 - DNA, 25 bp, Homo sapien
caatgaaggttggaacttttggaca

SEQ ID NO: 3139423 - DNA, 25 bp, Homo sapien
tgttgctttctcagaaattaatgct

SEQ ID NO: 3139424 - DNA, 25 bp, Homo sapien
ttattcattcgcatgtagcatgttc

SEQ ID NO: 3139425 - DNA, 25 bp, Homo sapien
gctttattcattcgcatgtagcatg

SEQ ID NO: 3139426 - DNA, 25 bp, Homo sapien
agattccataaggtgttgctttctc

SEQ ID NO: 3139427 - DNA, 25 bp, Homo sapien
tgttctccattgctctctgccaggc

SEQ ID NO: 3139428 - DNA, 25 bp, Homo sapien
gacagccaacacttgttctccattg

SEQ ID NO: 3139429 - DNA, 25 bp, Homo sapien
tctctttcacgggtttagtgaggaa

SEQ ID NO: 3139430 - DNA, 25 bp, Homo sapien
tgccaggcctgtctcatggagagga

SEQ ID NO: 3139431 - DNA, 25 bp, Homo sapien
cctgctgtcgctgtgcattttcaac

SEQ ID NO: 3139432 - DNA, 25 bp, Homo sapien
gccctgctgtcgctgtgcattttca

SEQ ID NO: 3139433 - DNA, 25 bp, Homo sapien
caaagccctgctgtcgctgtgcatt

SEQ ID NO: 3139434 - DNA, 25 bp, Homo sapien
aagccctgctgtcgctgtgcatttt

SEQ ID NO: 3139435 - DNA, 25 bp, Homo sapien
ggttctgccacgaggatgaaagcca

SEQ ID NO: 3139436 - DNA, 25 bp, Homo sapien
ttctgccacgaggatgaaagccatt

SEQ ID NO: 3139437 - DNA, 25 bp, Homo sapien
tctgccacgaggatgaaagccattg

SEQ ID NO: 3139438 - DNA, 25 bp, Homo sapien
gccacgaggatgaaagccattgtac

SEQ ID NO: 3139439 - DNA, 25 bp, Homo sapien
ctgctatggatgctgctggatttta

SEQ ID NO: 3139440 - DNA, 25 bp, Homo sapien
cacctgctatggatgctgctggatt

SEQ ID NO: 3139441 - DNA, 25 bp, Homo sapien
tgctggattttatgttgctccccat

SEQ ID NO: 3139442 - DNA, 25 bp, Homo sapien
gctgctggattttatgttgctcccc

SEQ ID NO: 3139443 - DNA, 25 bp, Homo sapien
ctcagtttccttcgttttggatcaa

SEQ ID NO: 3139444 - DNA, 25 bp, Homo sapien
ggctcttggtctaacaatcctgtct

SEQ ID NO: 3139445 - DNA, 25 bp, Homo sapien
cagtttccttcgttttggatcaatg

SEQ ID NO: 3139446 - DNA, 25 bp, Homo sapien
ggtctaacaatcctgtctccaattc

SEQ ID NO: 3139447 - DNA, 25 bp, Homo sapien
tcataactgagtcccagtatctttt

SEQ ID NO: 3139448 - DNA, 25 bp, Homo sapien
tttatccagttcatagtctttcgac

SEQ ID NO: 3139449 - DNA, 25 bp, Homo sapien
agtctttcgactctgcttatattca

SEQ ID NO: 3139450 - DNA, 25 bp, Homo sapien
aaactttctggatcagtcgacccat

SEQ ID NO: 3139451 - DNA, 25 bp, Homo sapien
cctcaattttcaatgatgttgttgc

SEQ ID NO: 3139452 - DNA, 25 bp, Homo sapien
cattgctggagcatatgacatgtat

SEQ ID NO: 3139453 - DNA, 25 bp, Homo sapien
gaatgtccaaactgttccccatagt

SEQ ID NO: 3139454 - DNA, 25 bp, Homo sapien
tttttagtatttcaaggaatgtcca

SEQ ID NO: 3139455 - DNA, 25 bp, Homo sapien
gactctccttatcatacatgaggtt

SEQ ID NO: 3139456 - DNA, 25 bp, Homo sapien
cataaaggcttttgactgccatagc

SEQ ID NO: 3139457 - DNA, 25 bp, Homo sapien
gactgccatagcattaactacatga

SEQ ID NO: 3139458 - DNA, 25 bp, Homo sapien
cattaactacatgactctccttatc

SEQ ID NO: 3139459 - DNA, 25 bp, Homo sapien
gcatcatttctttgaactgactacc

SEQ ID NO: 3139460 - DNA, 25 bp, Homo sapien
aactgactaccacctttgcagtctg

SEQ ID NO: 3139461 - DNA, 25 bp, Homo sapien
tgcagtctgcaatacgagctccctt

SEQ ID NO: 3139462 - DNA, 25 bp, Homo sapien
gaagaatgaaacacctgtaagcatc

SEQ ID NO: 3139463 - DNA, 25 bp, Homo sapien
caaggagtttgaattgagacatggc

SEQ ID NO: 3139464 - DNA, 25 bp, Homo sapien
aacccatgtttctagaatggtactc

SEQ ID NO: 3139465 - DNA, 25 bp, Homo sapien
ttagctgatgtgtcaaggagtttga

SEQ ID NO: 3139466 - DNA, 25 bp, Homo sapien
gaattgagacatggctgaaacccat

SEQ ID NO: 3139467 - DNA, 25 bp, Homo sapien
acttcaacgcgagtgggagaagtga

SEQ ID NO: 3139468 - DNA, 25 bp, Homo sapien
tacttcaacgcgagtgggagaagtg

SEQ ID NO: 3139469 - DNA, 25 bp, Homo sapien
aatgctgctccagtcatcttttaaa

SEQ ID NO: 3139470 - DNA, 25 bp, Homo sapien
cgatgagtattgacccattattctc

SEQ ID NO: 3139471 - DNA, 25 bp, Homo sapien
tggaaaatctccctggtatcgatga

SEQ ID NO: 3139472 - DNA, 25 bp, Homo sapien
cctggtatcgatgagtattgaccca

SEQ ID NO: 3139473 - DNA, 25 bp, Homo sapien
tagaatctgcaaaatgtaaaggatc

SEQ ID NO: 3139474 - DNA, 25 bp, Homo sapien
tctcctcgtccttgtttgtacccat

SEQ ID NO: 3139475 - DNA, 25 bp, Homo sapien
cttagaatctgcaaaatgtaaagga

SEQ ID NO: 3139476 - DNA, 25 bp, Homo sapien
aatgtaaaggatctctcctcgtcct

SEQ ID NO: 3139477 - DNA, 25 bp, Homo sapien
cctaaagggagattgaactggcaga

SEQ ID NO: 3139478 - DNA, 25 bp, Homo sapien
tgcaggtatccatgatttcctaaag

SEQ ID NO: 3139479 - DNA, 25 bp, Homo sapien
tgatttcctaaagggagattgaact

SEQ ID NO: 3139480 - DNA, 25 bp, Homo sapien
aagggagattgaactggcagaaaaa

SEQ ID NO: 3139481 - DNA, 25 bp, Homo sapien
gcctggaactaaaactagccaagga

SEQ ID NO: 3139482 - DNA, 25 bp, Homo sapien
ggcatgacagtttgatacccccaaa

SEQ ID NO: 3139483 - DNA, 25 bp, Homo sapien
ctctactaccaggacatgttgagtg

SEQ ID NO: 3139484 - DNA, 25 bp, Homo sapien
atgttgagtggtttgatggtcctgt

SEQ ID NO: 3139485 - DNA, 25 bp, Homo sapien
tatctccatggcataagtctttctc

SEQ ID NO: 3139486 - DNA, 25 bp, Homo sapien
tacatatctccatggcataagtctt

SEQ ID NO: 3139487 - DNA, 25 bp, Homo sapien
tccatggcataagtctttctccttt

SEQ ID NO: 3139488 - DNA, 25 bp, Homo sapien
ctgtcttacatatctccatggcata

SEQ ID NO: 3139489 - DNA, 25 bp, Homo sapien
tggaaatagatttggtccagggaac

SEQ ID NO: 3139490 - DNA, 25 bp, Homo sapien
cttggaaatagatttggtccaggga

SEQ ID NO: 3139491 - DNA, 25 bp, Homo sapien
ttttcttggaaatagatttggtcca

SEQ ID NO: 3139492 - DNA, 25 bp, Homo sapien
aatagatttggtccagggaacccat

SEQ ID NO: 3139493 - DNA, 25 bp, Homo sapien
taatactggcaactgtcccagcagc

SEQ ID NO: 3139494 - DNA, 25 bp, Homo sapien
catcagctgatggtcttctaccacc

SEQ ID NO: 3139495 - DNA, 25 bp, Homo sapien
agaataagccctgaagtcctaaagg

SEQ ID NO: 3139496 - DNA, 25 bp, Homo sapien
tatttccaaaacctgttgataacca

SEQ ID NO: 3139497 - DNA, 25 bp, Homo sapien
tactagttatggaactatgggccat

SEQ ID NO: 3139498 - DNA, 25 bp, Homo sapien
ttgttactagttatggaactatggg

SEQ ID NO: 3139499 - DNA, 25 bp, Homo sapien
gttactagttatggaactatgggcc

SEQ ID NO: 3139500 - DNA, 25 bp, Homo sapien
gcattgttactagttatggaactat

SEQ ID NO: 3139501 - DNA, 25 bp, Homo sapien
tggtagagcctaatattatatagcc

SEQ ID NO: 3139502 - DNA, 25 bp, Homo sapien
gagtgtgaacttttttggtatggtg

SEQ ID NO: 3139503 - DNA, 25 bp, Homo sapien
tccagccattgtctcatttgtgcaa

SEQ ID NO: 3139504 - DNA, 25 bp, Homo sapien
cctctgcatgaatgccggtgactcc

SEQ ID NO: 3139505 - DNA, 25 bp, Homo sapien
gcatatcaccaagtgtagttgagaa

SEQ ID NO: 3139506 - DNA, 25 bp, Homo sapien
atatcaccaagtgtagttgagaagc

SEQ ID NO: 3139507 - DNA, 25 bp, Homo sapien
catatcaccaagtgtagttgagaag

SEQ ID NO: 3139508 - DNA, 25 bp, Homo sapien
tatcaccaagtgtagttgagaagca

SEQ ID NO: 3139509 - DNA, 25 bp, Homo sapien
ttgcacagctgttggttccacgtgg

SEQ ID NO: 3139510 - DNA, 25 bp, Homo sapien
cccagttcatagtttgcacagctgt

SEQ ID NO: 3139511 - DNA, 25 bp, Homo sapien
gagtggttccccagttcatagtttg

SEQ ID NO: 3139512 - DNA, 25 bp, Homo sapien
tccacgtggtggtaccaccttcttc

SEQ ID NO: 3139513 - DNA, 25 bp, Homo sapien
atccaggaatcccacgtgaaaagtc

SEQ ID NO: 3139514 - DNA, 25 bp, Homo sapien
ttatccaggaatcccacgtgaaaag

SEQ ID NO: 3139515 - DNA, 25 bp, Homo sapien
ccaggaatcccacgtgaaaagtcct

SEQ ID NO: 3139516 - DNA, 25 bp, Homo sapien
gaatcccacgtgaaaagtcctcttc

SEQ ID NO: 3139517 - DNA, 25 bp, Homo sapien
caggcaaagctcagagcctcatata

SEQ ID NO: 3139518 - DNA, 25 bp, Homo sapien
ggcaaagctcagagcctcatatatc

SEQ ID NO: 3139519 - DNA, 25 bp, Homo sapien
gcaaagctcagagcctcatatatcc

SEQ ID NO: 3139520 - DNA, 25 bp, Homo sapien
tcaggcaaagctcagagcctcatat

SEQ ID NO: 3139521 - DNA, 25 bp, Homo sapien
ttgctttgctgccttgacaagcaga

SEQ ID NO: 3139522 - DNA, 25 bp, Homo sapien
ccttgacaagcagaggagttaccca

SEQ ID NO: 3139523 - DNA, 25 bp, Homo sapien
gggagctgccgccaaaccaacgagg

SEQ ID NO: 3139524 - DNA, 25 bp, Homo sapien
gctgccgccaaaccaacgaggtggg

SEQ ID NO: 3139525 - DNA, 25 bp, Homo sapien
ttcatcaaattggttgacataggca

SEQ ID NO: 3139526 - DNA, 25 bp, Homo sapien
caaattggttgacataggcaaatgt

SEQ ID NO: 3139527 - DNA, 25 bp, Homo sapien
catcaaattggttgacataggcaaa

SEQ ID NO: 3139528 - DNA, 25 bp, Homo sapien
tcaaattggttgacataggcaaatg

SEQ ID NO: 3139529 - DNA, 25 bp, Homo sapien
ctgctgctttttcaaactttaccat

SEQ ID NO: 3139530 - DNA, 25 bp, Homo sapien
tcatgtgcctaacatgttgtgtttc

SEQ ID NO: 3139531 - DNA, 25 bp, Homo sapien
gacacatcatgtgcctaacatgttg

SEQ ID NO: 3139532 - DNA, 25 bp, Homo sapien
taacatgttgtgtttctccaataac

SEQ ID NO: 3139533 - DNA, 25 bp, Homo sapien
gcctaacatgttgtgtttctccaat

SEQ ID NO: 3139534 - DNA, 25 bp, Homo sapien
tttgaagagagtccaggtacaaatc

SEQ ID NO: 3139535 - DNA, 25 bp, Homo sapien
ttttgatcaatggatttgaagagag

SEQ ID NO: 3139536 - DNA, 25 bp, Homo sapien
gatcaatggatttgaagagagtcca

SEQ ID NO: 3139537 - DNA, 25 bp, Homo sapien
tcaatggatttgaagagagtccagg

SEQ ID NO: 3139538 - DNA, 25 bp, Homo sapien
gcttcatgagccattgtgtatttca

SEQ ID NO: 3139539 - DNA, 25 bp, Homo sapien
tacagggagatgcttcatgagccat

SEQ ID NO: 3139540 - DNA, 25 bp, Homo sapien
tatgtcactacagggagatgcttca

SEQ ID NO: 3139541 - DNA, 25 bp, Homo sapien
gacatatgtcactacagggagatgc

SEQ ID NO: 3139542 - DNA, 25 bp, Homo sapien
caacctagggttgctgtgttctcta

SEQ ID NO: 3139543 - DNA, 25 bp, Homo sapien
gagggctggtgaatcatagtcatct

SEQ ID NO: 3139544 - DNA, 25 bp, Homo sapien
aatgtgatggttccccttggtctga

SEQ ID NO: 3139545 - DNA, 25 bp, Homo sapien
gtgtttctccagtcctaatgtgatg

SEQ ID NO: 3139546 - DNA, 25 bp, Homo sapien
ggctccgacctttctgccagagcag

SEQ ID NO: 3139547 - DNA, 25 bp, Homo sapien
ccaagccagcgtgggaaatgggtcc

SEQ ID NO: 3139548 - DNA, 25 bp, Homo sapien
gtccgacgtgtgctgcatggagaac

SEQ ID NO: 3139549 - DNA, 25 bp, Homo sapien
aacttcgcggcggagccaagccagc

SEQ ID NO: 3139550 - DNA, 25 bp, Homo sapien
cagtagcagccgagccgccgaaact

SEQ ID NO: 3139551 - DNA, 25 bp, Homo sapien
gtagcagccgagccgccgaaactac

SEQ ID NO: 3139552 - DNA, 25 bp, Homo sapien
atcaggcttgtccctgacgctgctg

SEQ ID NO: 3139553 - DNA, 25 bp, Homo sapien
ggatcaggcttgtccctgacgctgc

SEQ ID NO: 3139554 - DNA, 25 bp, Homo sapien
caagttgcccaaagtggtggttgct

SEQ ID NO: 3139555 - DNA, 25 bp, Homo sapien
ccgcgagcaggaaacccgcaagttg

SEQ ID NO: 3139556 - DNA, 25 bp, Homo sapien
caggaaacccgcaagttgcccaaag

SEQ ID NO: 3139557 - DNA, 25 bp, Homo sapien
aacccgcaagttgcccaaagtggtg

SEQ ID NO: 3139558 - DNA, 25 bp, Homo sapien
acactgaaccgctagtgggaatctc

SEQ ID NO: 3139559 - DNA, 25 bp, Homo sapien
gagacactgaaccgctagtgggaat

SEQ ID NO: 3139560 - DNA, 25 bp, Homo sapien
cactgaaccgctagtgggaatctcc

SEQ ID NO: 3139561 - DNA, 25 bp, Homo sapien
gacactgaaccgctagtgggaatct

SEQ ID NO: 3139562 - DNA, 25 bp, Homo sapien
ggcacggctggtgaattccgcagtt

SEQ ID NO: 3139563 - DNA, 25 bp, Homo sapien
tccgcagttgtctcgtcccttttcg

SEQ ID NO: 3139564 - DNA, 25 bp, Homo sapien
cccttttcgcgtctgggagagtctg

SEQ ID NO: 3139565 - DNA, 25 bp, Homo sapien
ttgtggcctcggaagtgccctggca

SEQ ID NO: 3139566 - DNA, 25 bp, Homo sapien
gacagctgccaagtagcttaaaaaa

SEQ ID NO: 3139567 - DNA, 25 bp, Homo sapien
tgcccaattctgtctggatttccga

SEQ ID NO: 3139568 - DNA, 25 bp, Homo sapien
agagacagctgccaagtagcttaaa

SEQ ID NO: 3139569 - DNA, 25 bp, Homo sapien
tctggatttccgaagaaaagccaaa

SEQ ID NO: 3139570 - DNA, 25 bp, Homo sapien
ggtcattagtcacgaagcagccgcc

SEQ ID NO: 3139571 - DNA, 25 bp, Homo sapien
tcttaacaactctgcgcaaggtcat

SEQ ID NO: 3139572 - DNA, 25 bp, Homo sapien
tactcgcgtcacagagcggtcagtg

SEQ ID NO: 3139573 - DNA, 25 bp, Homo sapien
gcccaagtttgggttcgcagccgca

SEQ ID NO: 3139574 - DNA, 25 bp, Homo sapien
gccagtcaacagatcgagaatgaaa

SEQ ID NO: 3139575 - DNA, 25 bp, Homo sapien
aaacgtgagtcgcttcctgcaccag

SEQ ID NO: 3139576 - DNA, 25 bp, Homo sapien
ggcacgtcgcttcgggcacggtgca

SEQ ID NO: 3139577 - DNA, 25 bp, Homo sapien
aactccgactctgctcatgcagcgg

SEQ ID NO: 3139578 - DNA, 25 bp, Homo sapien
tctagtccccgctctgtcggaaggg

SEQ ID NO: 3139579 - DNA, 25 bp, Homo sapien
gccgttcagtcgcagtactcacagt

SEQ ID NO: 3139580 - DNA, 25 bp, Homo sapien
tcatgcaatgggtgctaatcgcccg

SEQ ID NO: 3139581 - DNA, 25 bp, Homo sapien
gagttgagtccaattcacgttccag

SEQ ID NO: 3139582 - DNA, 25 bp, Homo sapien
cgcgcgcccatcccgcggtccgcat

SEQ ID NO: 3139583 - DNA, 25 bp, Homo sapien
gattctcctccaccgtgagcgtgag

SEQ ID NO: 3139584 - DNA, 25 bp, Homo sapien
tcttcaggtactcggaaccggactc

SEQ ID NO: 3139585 - DNA, 25 bp, Homo sapien
gtctgaagccacgttgccgatgcgg

SEQ ID NO: 3139586 - DNA, 25 bp, Homo sapien
gaagtccaggaagcactcgttctcg

SEQ ID NO: 3139587 - DNA, 25 bp, Homo sapien
ctcgatgccgttgcggccgaagtcg

SEQ ID NO: 3139588 - DNA, 25 bp, Homo sapien
cgcggtcggtggctgtgggcagcag

SEQ ID NO: 3139589 - DNA, 25 bp, Homo sapien
agctcgtagcgctcgatgccgttgc

SEQ ID NO: 3139590 - DNA, 25 bp, Homo sapien
tgcagctcgaacacgctgctgcggc

SEQ ID NO: 3139591 - DNA, 25 bp, Homo sapien
ctgcttctcgccgtccggggtgtcc

SEQ ID NO: 3139592 - DNA, 25 bp, Homo sapien
gcttctcgccgtccggggtgtccgc

SEQ ID NO: 3139593 - DNA, 25 bp, Homo sapien
tgcttctcgccgtccggggtgtccg

SEQ ID NO: 3139594 - DNA, 25 bp, Homo sapien
gctgcttctcgccgtccggggtgtc

SEQ ID NO: 3139595 - DNA, 25 bp, Homo sapien
gtaggagtcgcgctgctcgcggtcc

SEQ ID NO: 3139596 - DNA, 25 bp, Homo sapien
tcacgtcggtgatgaggacccgtag

SEQ ID NO: 3139597 - DNA, 25 bp, Homo sapien
ccgtaggatggcctgcgaggagcga

SEQ ID NO: 3139598 - DNA, 25 bp, Homo sapien
gtcgcgcactcgcagggtcagctcg

SEQ ID NO: 3139599 - DNA, 25 bp, Homo sapien
tttgatgttaaggaccacggtggcc

SEQ ID NO: 3139600 - DNA, 25 bp, Homo sapien
cacggtattgaccaggatgtcccca

SEQ ID NO: 3139601 - DNA, 25 bp, Homo sapien
taatttcatagcttgggtcaccagc

SEQ ID NO: 3139602 - DNA, 25 bp, Homo sapien
gaagacgtcctgcataaacttaggg

SEQ ID NO: 3139603 - DNA, 25 bp, Homo sapien
taaatatatttgggatacatcttac

SEQ ID NO: 3139604 - DNA, 25 bp, Homo sapien
tttaaatatatttgggatacatctt

SEQ ID NO: 3139605 - DNA, 25 bp, Homo sapien
tagccctccctgggatatttaaata

SEQ ID NO: 3139606 - DNA, 25 bp, Homo sapien
tatttaaatatatttgggatacatc

SEQ ID NO: 3139607 - DNA, 25 bp, Homo sapien
ggcctttgctaaattaatggtgcaa

SEQ ID NO: 3139608 - DNA, 25 bp, Homo sapien
gaattagggatgtcaagtgcaaaga

SEQ ID NO: 3139609 - DNA, 25 bp, Homo sapien
cagtggtatacctcttgtagatggc

SEQ ID NO: 3139610 - DNA, 25 bp, Homo sapien
tagtgaaccttaattctaatttgca

SEQ ID NO: 3139611 - DNA, 25 bp, Homo sapien
taattatccacttagttgccacaga

SEQ ID NO: 3139612 - DNA, 25 bp, Homo sapien
tccaatttgcatagacaccagtagt

SEQ ID NO: 3139613 - DNA, 25 bp, Homo sapien
ccagcagtttcatcaaagtagtcag

SEQ ID NO: 3139614 - DNA, 25 bp, Homo sapien
tagtactacatctgcatgaatcagc

SEQ ID NO: 3139615 - DNA, 25 bp, Homo sapien
tcggattccacattccacatgcaaa

SEQ ID NO: 3139616 - DNA, 25 bp, Homo sapien
gtttctccttatctgaatagctaca

SEQ ID NO: 3139617 - DNA, 25 bp, Homo sapien
tgggttctgacagtaagaaatacgt

SEQ ID NO: 3139618 - DNA, 25 bp, Homo sapien
tttgcctcaattcttctcggattcc

SEQ ID NO: 3139619 - DNA, 25 bp, Homo sapien
cagatgtcaaaacggaatgtaactt

SEQ ID NO: 3139620 - DNA, 25 bp, Homo sapien
tagaccctgctgtatggaattgaaa

SEQ ID NO: 3139621 - DNA, 25 bp, Homo sapien
aacaacaggacttaggttcaacact

SEQ ID NO: 3139622 - DNA, 25 bp, Homo sapien
taggaaattgtctacttatggcaca

SEQ ID NO: 3139623 - DNA, 25 bp, Homo sapien
ctatgaaaatttgggctacatcatc

SEQ ID NO: 3139624 - DNA, 25 bp, Homo sapien
tgaatttcggaaataattccagcaa

SEQ ID NO: 3139625 - DNA, 25 bp, Homo sapien
ttccagcaactctaccacacacatt

SEQ ID NO: 3139626 - DNA, 25 bp, Homo sapien
ttgaaatgcaaaggtatgaactatg

SEQ ID NO: 3139627 - DNA, 25 bp, Homo sapien
tctcaatcatgctgtcaatgatcca

SEQ ID NO: 3139628 - DNA, 25 bp, Homo sapien
gaaaaatagaatgcgtatgccttta

SEQ ID NO: 3139629 - DNA, 25 bp, Homo sapien
aaacacagttgtacttctagttcac

SEQ ID NO: 3139630 - DNA, 25 bp, Homo sapien
gaccaggtttaccaaggaagaatga

SEQ ID NO: 3139631 - DNA, 25 bp, Homo sapien
gaaactgtcactgaagttaatgtaa

SEQ ID NO: 3139632 - DNA, 25 bp, Homo sapien
aggatcagctgcaagtggattttaa

SEQ ID NO: 3139633 - DNA, 25 bp, Homo sapien
taacagcctatcaaggataagctca

SEQ ID NO: 3139634 - DNA, 25 bp, Homo sapien
gaacataattcgatcactaaagaga

SEQ ID NO: 3139635 - DNA, 25 bp, Homo sapien
tgcggatcaaatcaatggatgacct

SEQ ID NO: 3139636 - DNA, 25 bp, Homo sapien
ggtatcaggccaaatgtaacggaaa

SEQ ID NO: 3139637 - DNA, 25 bp, Homo sapien
tccagagatccagatagtgttgctt

SEQ ID NO: 3139638 - DNA, 25 bp, Homo sapien
tactagatgactaaagacacagcct

SEQ ID NO: 3139639 - DNA, 25 bp, Homo sapien
aaagactaatacagctataaatggt

SEQ ID NO: 3139640 - DNA, 25 bp, Homo sapien
tacagctataaatggtatacactaa

SEQ ID NO: 3139641 - DNA, 25 bp, Homo sapien
taaaagactaatacagctataaatg

SEQ ID NO: 3139642 - DNA, 25 bp, Homo sapien
taaatggtatacactaatatgtgtg

SEQ ID NO: 3139643 - DNA, 25 bp, Homo sapien
ccccaaaggtagtatgatcagataa

SEQ ID NO: 3139644 - DNA, 25 bp, Homo sapien
tatcaattacaatcctacatgaggg

SEQ ID NO: 3139645 - DNA, 25 bp, Homo sapien
acagaagaactggagcctaaagcag

SEQ ID NO: 3139646 - DNA, 25 bp, Homo sapien
gactctagtccacattatatccctg

SEQ ID NO: 3139647 - DNA, 25 bp, Homo sapien
tgtaatgtaccgcaaaagagtcact

SEQ ID NO: 3139648 - DNA, 25 bp, Homo sapien
gataaaatgcacacaagcccagaag

SEQ ID NO: 3139649 - DNA, 25 bp, Homo sapien
gggaaaccttgccatagtctagaaa

SEQ ID NO: 3139650 - DNA, 25 bp, Homo sapien
tactctagatatatgggaacagctc

SEQ ID NO: 3139651 - DNA, 25 bp, Homo sapien
ctgggagctttaatagctttttgtt

SEQ ID NO: 3139652 - DNA, 25 bp, Homo sapien
gagttcaatacaaacatcactacat

SEQ ID NO: 3139653 - DNA, 25 bp, Homo sapien
cattagagttcaatacaaacatcac

SEQ ID NO: 3139654 - DNA, 25 bp, Homo sapien
acacagcattagagttcaatacaaa

SEQ ID NO: 3139655 - DNA, 25 bp, Homo sapien
tagagatttcggagctaagaaaaat

SEQ ID NO: 3139656 - DNA, 25 bp, Homo sapien
aatgccaactttgtgtttgtaaata

SEQ ID NO: 3139657 - DNA, 25 bp, Homo sapien
cttatgcccaattggaaagctttag

SEQ ID NO: 3139658 - DNA, 25 bp, Homo sapien
agctttagtagagatttcggagcta

SEQ ID NO: 3139659 - DNA, 25 bp, Homo sapien
cagtaatgtatggatgtagacgcat

SEQ ID NO: 3139660 - DNA, 25 bp, Homo sapien
taatggagcatcatattagagtgga

SEQ ID NO: 3139661 - DNA, 25 bp, Homo sapien
cacagtatggtgcataatggagcat

SEQ ID NO: 3139662 - DNA, 25 bp, Homo sapien
gctccagcaggtttcggagtagaaa

SEQ ID NO: 3139663 - DNA, 25 bp, Homo sapien
gaaaggtcatcacagtatggtgcat

SEQ ID NO: 3139664 - DNA, 25 bp, Homo sapien
aaaatgtacaacaagtggaacaagc

SEQ ID NO: 3139665 - DNA, 25 bp, Homo sapien
aatgtacaacaagtggaacaagcag

SEQ ID NO: 3139666 - DNA, 25 bp, Homo sapien
aaatgtacaacaagtggaacaagca

SEQ ID NO: 3139667 - DNA, 25 bp, Homo sapien
atgtacaacaagtggaacaagcagt

SEQ ID NO: 3139668 - DNA, 25 bp, Homo sapien
ccttccgaatgtgactacagtgact

SEQ ID NO: 3139669 - DNA, 25 bp, Homo sapien
caaaactatctgacaggcctgtgat

SEQ ID NO: 3139670 - DNA, 25 bp, Homo sapien
ttacgtctaataggtgctaaccgcc

SEQ ID NO: 3139671 - DNA, 25 bp, Homo sapien
caaagacataagaggctgaatttcc

SEQ ID NO: 3139672 - DNA, 25 bp, Homo sapien
tttttaacatagcaaccgagaacag

SEQ ID NO: 3139673 - DNA, 25 bp, Homo sapien
aaatagccataacttcctaccccag

SEQ ID NO: 3139674 - DNA, 25 bp, Homo sapien
actaaaatccttgagagtgtcagca

SEQ ID NO: 3139675 - DNA, 25 bp, Homo sapien
taccccagtctagagtgctggttct

SEQ ID NO: 3139676 - DNA, 25 bp, Homo sapien
aaactggtgcttttcctcacagttt

SEQ ID NO: 3139677 - DNA, 25 bp, Homo sapien
cttggtaaactggtgcttttcctca

SEQ ID NO: 3139678 - DNA, 25 bp, Homo sapien
ggtaaactggtgcttttcctcacag

SEQ ID NO: 3139679 - DNA, 25 bp, Homo sapien
aactggtgcttttcctcacagtttg

SEQ ID NO: 3139680 - DNA, 25 bp, Homo sapien
tggatggatctgcaggctacctagc

SEQ ID NO: 3139681 - DNA, 25 bp, Homo sapien
ggagatcagagaattgcccatgtgc

SEQ ID NO: 3139682 - DNA, 25 bp, Homo sapien
tctcagagcctaatataaaatagcc

SEQ ID NO: 3139683 - DNA, 25 bp, Homo sapien
catgtgctaccgaaacaagggtcac

SEQ ID NO: 3139684 - DNA, 25 bp, Homo sapien
ccagtgcgtctcttacttgcctcaa

SEQ ID NO: 3139685 - DNA, 25 bp, Homo sapien
tgcttgagtttagcttgtctaaggc

SEQ ID NO: 3139686 - DNA, 25 bp, Homo sapien
aaatgtcaaagtgtactgtacgacc

SEQ ID NO: 3139687 - DNA, 25 bp, Homo sapien
gtttagcttgtctaaggcttccgtg

SEQ ID NO: 3139688 - DNA, 25 bp, Homo sapien
cacaacgaaggaataatatctgcag

SEQ ID NO: 3139689 - DNA, 25 bp, Homo sapien
tcggtgagcatggattagcacaacg

SEQ ID NO: 3139690 - DNA, 25 bp, Homo sapien
tatcagttgacgaaaacagaggttt

SEQ ID NO: 3139691 - DNA, 25 bp, Homo sapien
gtgtgcacatgtatctacatcttct

SEQ ID NO: 3139692 - DNA, 25 bp, Homo sapien
gctctcaagatacggcatatacgtc

SEQ ID NO: 3139693 - DNA, 25 bp, Homo sapien
tctgctctcaaatcactgcccgttg

SEQ ID NO: 3139694 - DNA, 25 bp, Homo sapien
catatacgtccttgcttagtaaacc

SEQ ID NO: 3139695 - DNA, 25 bp, Homo sapien
cagttgcaaggcatcgctctgctct

SEQ ID NO: 3139696 - DNA, 25 bp, Homo sapien
tacaccctggcgagctaaagtctga

SEQ ID NO: 3139697 - DNA, 25 bp, Homo sapien
ggcttgaacatccttcgctgataga

SEQ ID NO: 3139698 - DNA, 25 bp, Homo sapien
tagggtaagaaaccactgtgtggca

SEQ ID NO: 3139699 - DNA, 25 bp, Homo sapien
gaggagtccttcgaaaattctgggc

SEQ ID NO: 3139700 - DNA, 25 bp, Homo sapien
tggtatatgtggaaggccacactcg

SEQ ID NO: 3139701 - DNA, 25 bp, Homo sapien
tggaaggccacactcggttgatgca

SEQ ID NO: 3139702 - DNA, 25 bp, Homo sapien
tgcaccttgatctgaaattattgta

SEQ ID NO: 3139703 - DNA, 25 bp, Homo sapien
acccagtgcctactggtatatgtgg

SEQ ID NO: 3139704 - DNA, 25 bp, Homo sapien
gaaagcctgactggagtctacccaa

SEQ ID NO: 3139705 - DNA, 25 bp, Homo sapien
caatcagacctgtagtatgcaaaac

SEQ ID NO: 3139706 - DNA, 25 bp, Homo sapien
tatgcaaaacaatcgatccctaaga

SEQ ID NO: 3139707 - DNA, 25 bp, Homo sapien
gatggacccaatgtaaccacagtgt

SEQ ID NO: 3139708 - DNA, 25 bp, Homo sapien
tccccttagaagagcagtgttgcag

SEQ ID NO: 3139709 - DNA, 25 bp, Homo sapien
cccaagacgggtgcatcattatcaa

SEQ ID NO: 3139710 - DNA, 25 bp, Homo sapien
gacacagactgctatcggactttaa

SEQ ID NO: 3139711 - DNA, 25 bp, Homo sapien
tgagttcctgtacatcccaagacgg

SEQ ID NO: 3139712 - DNA, 25 bp, Homo sapien
gagtttgcacaggtacaaaatcacc

SEQ ID NO: 3139713 - DNA, 25 bp, Homo sapien
ccagcactttgaggtaacagtttca

SEQ ID NO: 3139714 - DNA, 25 bp, Homo sapien
aaatcacctgtgcacgattctccag

SEQ ID NO: 3139715 - DNA, 25 bp, Homo sapien
tatgcacagcattaattttaccacg

SEQ ID NO: 3139716 - DNA, 25 bp, Homo sapien
gaaatattaaggctaaactactgaa

SEQ ID NO: 3139717 - DNA, 25 bp, Homo sapien
tacatacgtgcactgttaacattcc

SEQ ID NO: 3139718 - DNA, 25 bp, Homo sapien
cctcacatttagatcaaaagatagc

SEQ ID NO: 3139719 - DNA, 25 bp, Homo sapien
gagtccatatcttctaatacatacg

SEQ ID NO: 3139720 - DNA, 25 bp, Homo sapien
gttccgattagatcatagattaaag

SEQ ID NO: 3139721 - DNA, 25 bp, Homo sapien
gatgactgtagaccgctaattctta

SEQ ID NO: 3139722 - DNA, 25 bp, Homo sapien
tcttatttagctcttgagttccgat

SEQ ID NO: 3139723 - DNA, 25 bp, Homo sapien
catagattaaagtggatgactgtag

SEQ ID NO: 3139724 - DNA, 25 bp, Homo sapien
ttgaactcaggatacccaccaagcc

SEQ ID NO: 3139725 - DNA, 25 bp, Homo sapien
actcaggatacccaccaagcctgtt

SEQ ID NO: 3139726 - DNA, 25 bp, Homo sapien
ttttgaactcaggatacccaccaag

SEQ ID NO: 3139727 - DNA, 25 bp, Homo sapien
atttttgaactcaggatacccacca

SEQ ID NO: 3139728 - DNA, 25 bp, Homo sapien
gagtgaaagggaatctttgacaaaa

SEQ ID NO: 3139729 - DNA, 25 bp, Homo sapien
catctctaaaacatggtgatatttc

SEQ ID NO: 3139730 - DNA, 25 bp, Homo sapien
tgcttccagcagatcctatgtccaa

SEQ ID NO: 3139731 - DNA, 25 bp, Homo sapien
cactatttagattgcttcgaactga

SEQ ID NO: 3139732 - DNA, 25 bp, Homo sapien
gagcaggaaagccaactctcacctt

SEQ ID NO: 3139733 - DNA, 25 bp, Homo sapien
cctcattcgagaggtgccctccata

SEQ ID NO: 3139734 - DNA, 25 bp, Homo sapien
aagacaggacatagagtgaacatgg

SEQ ID NO: 3139735 - DNA, 25 bp, Homo sapien
tactgtgacagttgtatagatgttg

SEQ ID NO: 3139736 - DNA, 25 bp, Homo sapien
gagtagggttttgccagcctagttc

SEQ ID NO: 3139737 - DNA, 25 bp, Homo sapien
tagggttttgccagcctagttccaa

SEQ ID NO: 3139738 - DNA, 25 bp, Homo sapien
atgtgagtagggttttgccagccta

SEQ ID NO: 3139739 - DNA, 25 bp, Homo sapien
agggatgtgagtagggttttgccag

SEQ ID NO: 3139740 - DNA, 25 bp, Homo sapien
ttacacgattcctcaatgtggccag

SEQ ID NO: 3139741 - DNA, 25 bp, Homo sapien
tacattcattttacacgattcctca

SEQ ID NO: 3139742 - DNA, 25 bp, Homo sapien
ttttacacgattcctcaatgtggcc

SEQ ID NO: 3139743 - DNA, 25 bp, Homo sapien
tcattttacacgattcctcaatgtg

SEQ ID NO: 3139744 - DNA, 25 bp, Homo sapien
tctttgttgatctagcacaggctca

SEQ ID NO: 3139745 - DNA, 25 bp, Homo sapien
agaggtacttccagcatgcaattca

SEQ ID NO: 3139746 - DNA, 25 bp, Homo sapien
tatacagtatcttcaattgagcaag

SEQ ID NO: 3139747 - DNA, 25 bp, Homo sapien
taatggccatacattcctagaacac

SEQ ID NO: 3139748 - DNA, 25 bp, Homo sapien
tatgagtttccaagtgtctgcagac

SEQ ID NO: 3139749 - DNA, 25 bp, Homo sapien
acatcctgccgctatgtgagacagc

SEQ ID NO: 3139750 - DNA, 25 bp, Homo sapien
cctgaaggaggacactatgagtttc

SEQ ID NO: 3139751 - DNA, 25 bp, Homo sapien
caaatagcggagaagaacagtttca

SEQ ID NO: 3139752 - DNA, 25 bp, Homo sapien
cattcaactcgatgcagaacaaaaa

SEQ ID NO: 3139753 - DNA, 25 bp, Homo sapien
aactggttcttgcactttaatattc

SEQ ID NO: 3139754 - DNA, 25 bp, Homo sapien
tctgccaggcaatgcattcaactcg

SEQ ID NO: 3139755 - DNA, 25 bp, Homo sapien
gaagtcaaggagaccttcatgtgct

SEQ ID NO: 3139756 - DNA, 25 bp, Homo sapien
tttggctctgcagaaacttctatct

SEQ ID NO: 3139757 - DNA, 25 bp, Homo sapien
aagcacacagaatctgaatgtgttc

SEQ ID NO: 3139758 - DNA, 25 bp, Homo sapien
cattttttatgctgttgcaaaatgg

SEQ ID NO: 3139759 - DNA, 25 bp, Homo sapien
aatggcagaaccaatcttctggcag

SEQ ID NO: 3139760 - DNA, 25 bp, Homo sapien
taaccacactggatgatgtgccttt

SEQ ID NO: 3139761 - DNA, 25 bp, Homo sapien
tccactctatcagcagagccaactt

SEQ ID NO: 3139762 - DNA, 25 bp, Homo sapien
gtgtctgggctaaagtcgctactca

SEQ ID NO: 3139763 - DNA, 25 bp, Homo sapien
tgatgcactttgatacctcttgact

SEQ ID NO: 3139764 - DNA, 25 bp, Homo sapien
gcctggcctgcatgaaatcttaata

SEQ ID NO: 3139765 - DNA, 25 bp, Homo sapien
tactactaggtcatgccaatttaca

SEQ ID NO: 3139766 - DNA, 25 bp, Homo sapien
cctacagtatgttcaagtgggtaaa

SEQ ID NO: 3139767 - DNA, 25 bp, Homo sapien
tcttaatatgcatttagcctacagt

SEQ ID NO: 3139768 - DNA, 25 bp, Homo sapien
ccagctaagaaaaggtgatgcccat

SEQ ID NO: 3139769 - DNA, 25 bp, Homo sapien
catgtcactgtagactctccagaga

SEQ ID NO: 3139770 - DNA, 25 bp, Homo sapien
tcatgaaaaacgaaacctgggtgga

SEQ ID NO: 3139771 - DNA, 25 bp, Homo sapien
gaaatttatcgactgtgctctccaa

SEQ ID NO: 3139772 - DNA, 25 bp, Homo sapien
catttgaggaccgcgtcttgtgcat

SEQ ID NO: 3139773 - DNA, 25 bp, Homo sapien
tcatttgaggaccgcgtcttgtgca

SEQ ID NO: 3139774 - DNA, 25 bp, Homo sapien
ttcatttgaggaccgcgtcttgtgc

SEQ ID NO: 3139775 - DNA, 25 bp, Homo sapien
cagcagtctcactggaagagtgatc

SEQ ID NO: 3139776 - DNA, 25 bp, Homo sapien
gcaaaatatgccactagcagcatta

SEQ ID NO: 3139777 - DNA, 25 bp, Homo sapien
gaagctcatttcacctaatttaact

SEQ ID NO: 3139778 - DNA, 25 bp, Homo sapien
gcagcattatacaaaaactcaagag

SEQ ID NO: 3139779 - DNA, 25 bp, Homo sapien
ttaatccccggttgtctaggctgca

SEQ ID NO: 3139780 - DNA, 25 bp, Homo sapien
taagcgtcatggtctacaacattgg

SEQ ID NO: 3139781 - DNA, 25 bp, Homo sapien
tagtcagattacaggacccctagga

SEQ ID NO: 3139782 - DNA, 25 bp, Homo sapien
tattgcccgaagtggagcatgctgg

SEQ ID NO: 3139783 - DNA, 25 bp, Homo sapien
ggaaaataggccatatggagcaccc

SEQ ID NO: 3139784 - DNA, 25 bp, Homo sapien
tgtacacaactgaagtcgattatct

SEQ ID NO: 3139785 - DNA, 25 bp, Homo sapien
gaagtcgattatctctcctagcccc

SEQ ID NO: 3139786 - DNA, 25 bp, Homo sapien
ggccatatggagcacccaggcattc

SEQ ID NO: 3139787 - DNA, 25 bp, Homo sapien
taatacgaaatcatacttgctgcca

SEQ ID NO: 3139788 - DNA, 25 bp, Homo sapien
tctcatcacaggttctatggcaaaa

SEQ ID NO: 3139789 - DNA, 25 bp, Homo sapien
gacactattccaggtatttagcata

SEQ ID NO: 3139790 - DNA, 25 bp, Homo sapien
cacttattatttccatgagccagac

SEQ ID NO: 3139791 - DNA, 25 bp, Homo sapien
attttcgtactgataagaagaggcc

SEQ ID NO: 3139792 - DNA, 25 bp, Homo sapien
gtaatcgctacatcctcaactggaa

SEQ ID NO: 3139793 - DNA, 25 bp, Homo sapien
cactgtggatgtactcctgaggttt

SEQ ID NO: 3139794 - DNA, 25 bp, Homo sapien
aaaatctaggtagtgcaagagcaag

SEQ ID NO: 3139795 - DNA, 25 bp, Homo sapien
caattttaattgcatacttaggtca

SEQ ID NO: 3139796 - DNA, 25 bp, Homo sapien
tcattggctgtaagtactgataagc

SEQ ID NO: 3139797 - DNA, 25 bp, Homo sapien
tgataagctgttaccatgaaacatc

SEQ ID NO: 3139798 - DNA, 25 bp, Homo sapien
ctagctaggatagtacaattttaat

SEQ ID NO: 3139799 - DNA, 25 bp, Homo sapien
ctcatccgaggccaataatgctgga

SEQ ID NO: 3139800 - DNA, 25 bp, Homo sapien
tcaataatgaacgtcaagtagggcc

SEQ ID NO: 3139801 - DNA, 25 bp, Homo sapien
cagggatttttcagaaggaccatta

SEQ ID NO: 3139802 - DNA, 25 bp, Homo sapien
tatctgaagccattaattgcctggg

SEQ ID NO: 3139803 - DNA, 25 bp, Homo sapien
tgctctaacgttacagcaatcagcc

SEQ ID NO: 3139804 - DNA, 25 bp, Homo sapien
gtaacaagccaggttaaacttctca

SEQ ID NO: 3139805 - DNA, 25 bp, Homo sapien
gcaatcagcccaaaaatgcctctat

SEQ ID NO: 3139806 - DNA, 25 bp, Homo sapien
gctacacaagctgactaagcatctg

SEQ ID NO: 3139807 - DNA, 25 bp, Homo sapien
cagcctgaggtgacataccaattga

SEQ ID NO: 3139808 - DNA, 25 bp, Homo sapien
ctttaatggctgcagaagggtttca

SEQ ID NO: 3139809 - DNA, 25 bp, Homo sapien
gcctgtgggaaatactaagacggac

SEQ ID NO: 3139810 - DNA, 25 bp, Homo sapien
caattgaatctcatcaccctgggca

SEQ ID NO: 3139811 - DNA, 25 bp, Homo sapien
tcaaggatactgtcacgtaaacggt

SEQ ID NO: 3139812 - DNA, 25 bp, Homo sapien
tatgacaattaggttcagtacagac

SEQ ID NO: 3139813 - DNA, 25 bp, Homo sapien
ggtccctgtgaggaagcataatcca

SEQ ID NO: 3139814 - DNA, 25 bp, Homo sapien
catctccctctaagttcagtggctt

SEQ ID NO: 3139815 - DNA, 25 bp, Homo sapien
gaaaaatatattcaacgccgagcat

SEQ ID NO: 3139816 - DNA, 25 bp, Homo sapien
gaaagctaccagtgaccataaggaa

SEQ ID NO: 3139817 - DNA, 25 bp, Homo sapien
ctgaaacctgactttggcacccaaa

SEQ ID NO: 3139818 - DNA, 25 bp, Homo sapien
tcttaatgaatggaagcggagacat

SEQ ID NO: 3139819 - DNA, 25 bp, Homo sapien
tcctactgtgtgtaaaaggctgcaa

SEQ ID NO: 3139820 - DNA, 25 bp, Homo sapien
tatatgggttggatcagtgactaaa

SEQ ID NO: 3139821 - DNA, 25 bp, Homo sapien
ctttgaaaccgtaagagtatatggg

SEQ ID NO: 3139822 - DNA, 25 bp, Homo sapien
taattaacttaacggaaagcacaga

SEQ ID NO: 3139823 - DNA, 25 bp, Homo sapien
tcccctctgccctaaaatgtgggtg

SEQ ID NO: 3139824 - DNA, 25 bp, Homo sapien
tcctgcagcattgtacgtaccatca

SEQ ID NO: 3139825 - DNA, 25 bp, Homo sapien
tctagaggccacacgagtaggcaaa

SEQ ID NO: 3139826 - DNA, 25 bp, Homo sapien
cagataatgtacaattcctgcagca

SEQ ID NO: 3139827 - DNA, 25 bp, Homo sapien
cagaaaacgtcactctacgaaatgg

SEQ ID NO: 3139828 - DNA, 25 bp, Homo sapien
catccggcgtggtcctttcatagtt

SEQ ID NO: 3139829 - DNA, 25 bp, Homo sapien
ccctgatgtgggtcctgaggctgac

SEQ ID NO: 3139830 - DNA, 25 bp, Homo sapien
agcccgctgtcatagcaactctgca

SEQ ID NO: 3139831 - DNA, 25 bp, Homo sapien
tgattatgtgtgtggatgttgtgtt

SEQ ID NO: 3139832 - DNA, 25 bp, Homo sapien
tgtactctgaccaaagttcacattg

SEQ ID NO: 3139833 - DNA, 25 bp, Homo sapien
ctggcctgcccacattaacatacat

SEQ ID NO: 3139834 - DNA, 25 bp, Homo sapien
gcacccagggcttgatcagatctac

SEQ ID NO: 3139835 - DNA, 25 bp, Homo sapien
cagatggttcttgcatagtgggatc

SEQ ID NO: 3139836 - DNA, 25 bp, Homo sapien
gataacgtcacttatctggtgccaa

SEQ ID NO: 3139837 - DNA, 25 bp, Homo sapien
ccagaagtatcatgcaacggtagcc

SEQ ID NO: 3139838 - DNA, 25 bp, Homo sapien
tatctacatgatcccacaggtctac

SEQ ID NO: 3139839 - DNA, 25 bp, Homo sapien
aatcgtagtctgatctattcccagg

SEQ ID NO: 3139840 - DNA, 25 bp, Homo sapien
cttaacagcactcttcttccatgcg

SEQ ID NO: 3139841 - DNA, 25 bp, Homo sapien
gaggccttaacagcactcttcttcc

SEQ ID NO: 3139842 - DNA, 25 bp, Homo sapien
taatggagaggccttaacagcactc

SEQ ID NO: 3139843 - DNA, 25 bp, Homo sapien
tgttgattaatggagaggccttaac

SEQ ID NO: 3139844 - DNA, 25 bp, Homo sapien
ggatggtgttgatgtcctgacttca

SEQ ID NO: 3139845 - DNA, 25 bp, Homo sapien
ccaggatggtgttgatgtcctgact

SEQ ID NO: 3139846 - DNA, 25 bp, Homo sapien
aggatggtgttgatgtcctgacttc

SEQ ID NO: 3139847 - DNA, 25 bp, Homo sapien
atggtgttgatgtcctgacttcatg

SEQ ID NO: 3139848 - DNA, 25 bp, Homo sapien
tacttactttattgcatgcatacac

SEQ ID NO: 3139849 - DNA, 25 bp, Homo sapien
tgcatacacagtacacataggcttt

SEQ ID NO: 3139850 - DNA, 25 bp, Homo sapien
tgcccatcctagaattacactttta

SEQ ID NO: 3139851 - DNA, 25 bp, Homo sapien
gaatagctgccactacagagcacca

SEQ ID NO: 3139852 - DNA, 25 bp, Homo sapien
gggctggctcacttcattcgactat

SEQ ID NO: 3139853 - DNA, 25 bp, Homo sapien
cagagtggccccttctagataacag

SEQ ID NO: 3139854 - DNA, 25 bp, Homo sapien
gaggcttatgctcactggaagaccg

SEQ ID NO: 3139855 - DNA, 25 bp, Homo sapien
gaccgtttagtgtacctggaccaga

SEQ ID NO: 3139856 - DNA, 25 bp, Homo sapien
taatttttctcgaggcgaaatggag

SEQ ID NO: 3139857 - DNA, 25 bp, Homo sapien
gagactgtgacatgtattgctcagc

SEQ ID NO: 3139858 - DNA, 25 bp, Homo sapien
tcagcactccaggaatattttgccc

SEQ ID NO: 3139859 - DNA, 25 bp, Homo sapien
tctcaagcacatattggatacagtg

SEQ ID NO: 3139860 - DNA, 25 bp, Homo sapien
cattagacgtatggagcatggcgac

SEQ ID NO: 3139861 - DNA, 25 bp, Homo sapien
gaaaggtaaagcatcatgaccagac

SEQ ID NO: 3139862 - DNA, 25 bp, Homo sapien
gcacagtatctacccatgtgggatc

SEQ ID NO: 3139863 - DNA, 25 bp, Homo sapien
tctaatgccctgatatggcaatgct

SEQ ID NO: 3139864 - DNA, 25 bp, Homo sapien
tcacaccagtctcctgcgtgagcct

SEQ ID NO: 3139865 - DNA, 25 bp, Homo sapien
ggttcacaccagtctcctgcgtgag

SEQ ID NO: 3139866 - DNA, 25 bp, Homo sapien
gttcacaccagtctcctgcgtgagc

SEQ ID NO: 3139867 - DNA, 25 bp, Homo sapien
cacaccagtctcctgcgtgagcctc

SEQ ID NO: 3139868 - DNA, 25 bp, Homo sapien
tctgagaaagttatcgaataactca

SEQ ID NO: 3139869 - DNA, 25 bp, Homo sapien
caagatgatcaccttaacattctgg

SEQ ID NO: 3139870 - DNA, 25 bp, Homo sapien
ttccactctccagagatcaagatga

SEQ ID NO: 3139871 - DNA, 25 bp, Homo sapien
gaatctcttcaatggcattccactc

SEQ ID NO: 3139872 - DNA, 25 bp, Homo sapien
ctccattcctcaacttatcttgtac

SEQ ID NO: 3139873 - DNA, 25 bp, Homo sapien
ctccctccattcctcaacttatctt

SEQ ID NO: 3139874 - DNA, 25 bp, Homo sapien
ttcctccctccattcctcaacttat

SEQ ID NO: 3139875 - DNA, 25 bp, Homo sapien
cctccattcctcaacttatcttgta

SEQ ID NO: 3139876 - DNA, 25 bp, Homo sapien
gaatggagcttcagatattacagga

SEQ ID NO: 3139877 - DNA, 25 bp, Homo sapien
gataaagtcatctactcagagctaa

SEQ ID NO: 3139878 - DNA, 25 bp, Homo sapien
tcttctgacctaaaggagagacgct

SEQ ID NO: 3139879 - DNA, 25 bp, Homo sapien
gagcacaagctatgatctcagcagg

SEQ ID NO: 3139880 - DNA, 25 bp, Homo sapien
tgtctctcgtctgacgcacaaaact

SEQ ID NO: 3139881 - DNA, 25 bp, Homo sapien
gggctcggtttcgtatttctctctc

SEQ ID NO: 3139882 - DNA, 25 bp, Homo sapien
aaacttagcagaaagcggcacgtgg

SEQ ID NO: 3139883 - DNA, 25 bp, Homo sapien
cacaaaacttagcagaaagcggcac

SEQ ID NO: 3139884 - DNA, 25 bp, Homo sapien
tgtatcagcaccatccaaatgagct

SEQ ID NO: 3139885 - DNA, 25 bp, Homo sapien
tgtacatggctaatagtgaccacac

SEQ ID NO: 3139886 - DNA, 25 bp, Homo sapien
caggctcgagatgaacttgtccaaa

SEQ ID NO: 3139887 - DNA, 25 bp, Homo sapien
caaatgagctttctccggtgataga

SEQ ID NO: 3139888 - DNA, 25 bp, Homo sapien
tattgcccagaaaatctaacttaac

SEQ ID NO: 3139889 - DNA, 25 bp, Homo sapien
ttttgtccaagtaataaactgacca

SEQ ID NO: 3139890 - DNA, 25 bp, Homo sapien
gaaaatgttggcacctctctggaac

SEQ ID NO: 3139891 - DNA, 25 bp, Homo sapien
caaacattttggatatgatctgtga

SEQ ID NO: 3139892 - DNA, 25 bp, Homo sapien
gggtctttgagtcccgcagaaagcc

SEQ ID NO: 3139893 - DNA, 25 bp, Homo sapien
gacactcgtgtctctggacctgaag

SEQ ID NO: 3139894 - DNA, 25 bp, Homo sapien
agaagtgtgccactcccaagactga

SEQ ID NO: 3139895 - DNA, 25 bp, Homo sapien
aaaaaagtattggtgctgcacttcc

SEQ ID NO: 3139896 - DNA, 25 bp, Homo sapien
ctgattatgttacttccatttcctg

SEQ ID NO: 3139897 - DNA, 25 bp, Homo sapien
gattatgttacttccatttcctgtt

SEQ ID NO: 3139898 - DNA, 25 bp, Homo sapien
tgtttctcctttatctttcccgtgc

SEQ ID NO: 3139899 - DNA, 25 bp, Homo sapien
tatctttcccgtgcttttccttcat

SEQ ID NO: 3139900 - DNA, 25 bp, Homo sapien
gtgaagtagtgcgataagacctcgc

SEQ ID NO: 3139901 - DNA, 25 bp, Homo sapien
tgcgataagacctcgccataactcc

SEQ ID NO: 3139902 - DNA, 25 bp, Homo sapien
taagacctcgccataactcctggtc

SEQ ID NO: 3139903 - DNA, 25 bp, Homo sapien
tagtgcgataagacctcgccataac

SEQ ID NO: 3139904 - DNA, 25 bp, Homo sapien
tagttgtatatgtttccaaaggccc

SEQ ID NO: 3139905 - DNA, 25 bp, Homo sapien
tatacctcaggcaaactagaccaca

SEQ ID NO: 3139906 - DNA, 25 bp, Homo sapien
ggcttaagttagaagaatcccagca

SEQ ID NO: 3139907 - DNA, 25 bp, Homo sapien
tgcatccccgttgttgtgacaaaca

SEQ ID NO: 3139908 - DNA, 25 bp, Homo sapien
gccccatatagatattacgtactac

SEQ ID NO: 3139909 - DNA, 25 bp, Homo sapien
agttagccccatatagatattacgt

SEQ ID NO: 3139910 - DNA, 25 bp, Homo sapien
tagccccatatagatattacgtact

SEQ ID NO: 3139911 - DNA, 25 bp, Homo sapien
ccatatagatattacgtactactta

SEQ ID NO: 3139912 - DNA, 25 bp, Homo sapien
aataagtagctctatactttatctt

SEQ ID NO: 3139913 - DNA, 25 bp, Homo sapien
ataaaataagtagctctatacttta

SEQ ID NO: 3139914 - DNA, 25 bp, Homo sapien
aaataagtagctctatactttatct

SEQ ID NO: 3139915 - DNA, 25 bp, Homo sapien
aaaataagtagctctatactttatc

SEQ ID NO: 3139916 - DNA, 25 bp, Homo sapien
cactatgattcctgtccaaaagtaa

SEQ ID NO: 3139917 - DNA, 25 bp, Homo sapien
acacactatgattcctgtccaaaag

SEQ ID NO: 3139918 - DNA, 25 bp, Homo sapien
cacactatgattcctgtccaaaagt

SEQ ID NO: 3139919 - DNA, 25 bp, Homo sapien
caacacactatgattcctgtccaaa

SEQ ID NO: 3139920 - DNA, 25 bp, Homo sapien
gtagaaggagttgagatggacattc

SEQ ID NO: 3139921 - DNA, 25 bp, Homo sapien
tttaaaatgctaaaggagaatgcca

SEQ ID NO: 3139922 - DNA, 25 bp, Homo sapien
ctgtcacaaaagtgcagtgaacttt

SEQ ID NO: 3139923 - DNA, 25 bp, Homo sapien
gcctttagagcagctctaatatttg

SEQ ID NO: 3139924 - DNA, 25 bp, Homo sapien
cagcagtggctattgggagctatga

SEQ ID NO: 3139925 - DNA, 25 bp, Homo sapien
gagaagaggcagcaagactataaac

SEQ ID NO: 3139926 - DNA, 25 bp, Homo sapien
gactataaactatggctgggcaaag

SEQ ID NO: 3139927 - DNA, 25 bp, Homo sapien
attcaaggccgtagagcaccacagt

SEQ ID NO: 3139928 - DNA, 25 bp, Homo sapien
ttttgattagctttcctactcccat

SEQ ID NO: 3139929 - DNA, 25 bp, Homo sapien
tttttgattagctttcctactccca

SEQ ID NO: 3139930 - DNA, 25 bp, Homo sapien
gatactgtgtacaattacttcctga

SEQ ID NO: 3139931 - DNA, 25 bp, Homo sapien
cagcaggaacggaatgcccagtgta

SEQ ID NO: 3139932 - DNA, 25 bp, Homo sapien
tcctgaaacctgatatcaaagaagg

SEQ ID NO: 3139933 - DNA, 25 bp, Homo sapien
ttatgttcactacggaaatggctct

SEQ ID NO: 3139934 - DNA, 25 bp, Homo sapien
tgagacctacattacaatgcctggg

SEQ ID NO: 3139935 - DNA, 25 bp, Homo sapien
tgggatacattcttagtcttaaagg

SEQ ID NO: 3139936 - DNA, 25 bp, Homo sapien
tactaactacaactgatttactcag

SEQ ID NO: 3139937 - DNA, 25 bp, Homo sapien
tctgtgagaatacttaaagaagatt

SEQ ID NO: 3139938 - DNA, 25 bp, Homo sapien
tacacttggaaagcatggatctccc

SEQ ID NO: 3139939 - DNA, 25 bp, Homo sapien
tgaaaggaataaagcccaggcctcc

SEQ ID NO: 3139940 - DNA, 25 bp, Homo sapien
caactaaaacttgggcttgtgacca

SEQ ID NO: 3139941 - DNA, 25 bp, Homo sapien
aaacacagattcatgggcactggcc

SEQ ID NO: 3139942 - DNA, 25 bp, Homo sapien
catgccttcatacattatctactcc

SEQ ID NO: 3139943 - DNA, 25 bp, Homo sapien
tactccatgccttcatacattatct

SEQ ID NO: 3139944 - DNA, 25 bp, Homo sapien
catctactccatgccttcatacatt

SEQ ID NO: 3139945 - DNA, 25 bp, Homo sapien
gccttcatacattatctactcctgt

SEQ ID NO: 3139946 - DNA, 25 bp, Homo sapien
atacagttcctacacattctgcctg

SEQ ID NO: 3139947 - DNA, 25 bp, Homo sapien
caagggtgtatatattggagtctac

SEQ ID NO: 3139948 - DNA, 25 bp, Homo sapien
tgcctgccttcagtttacgagtcat

SEQ ID NO: 3139949 - DNA, 25 bp, Homo sapien
tggagtctacaagcctaatacagtt

SEQ ID NO: 3139950 - DNA, 25 bp, Homo sapien
tgacagtgtcagtctctaaaagcaa

SEQ ID NO: 3139951 - DNA, 25 bp, Homo sapien
tcttgccttggcagaattaagcttt

SEQ ID NO: 3139952 - DNA, 25 bp, Homo sapien
tattcagtttatgaaaggctgcccc

SEQ ID NO: 3139953 - DNA, 25 bp, Homo sapien
cggtgagttaatactaggcattccc

SEQ ID NO: 3139954 - DNA, 25 bp, Homo sapien
gaaaagcccttcattgaattggtca

SEQ ID NO: 3139955 - DNA, 25 bp, Homo sapien
taaatagtgttctcaccaccttcag

SEQ ID NO: 3139956 - DNA, 25 bp, Homo sapien
gatgcaactgcagtgctcaacagaa

SEQ ID NO: 3139957 - DNA, 25 bp, Homo sapien
catgactcatagctctgatactggt

SEQ ID NO: 3139958 - DNA, 25 bp, Homo sapien
tattctgtgaaagctccaacttgag

SEQ ID NO: 3139959 - DNA, 25 bp, Homo sapien
tactccgcactaaagaatgacccct

SEQ ID NO: 3139960 - DNA, 25 bp, Homo sapien
catactcttcaggatctaggccaca

SEQ ID NO: 3139961 - DNA, 25 bp, Homo sapien
tacaacccattgcaggaactccatg

SEQ ID NO: 3139962 - DNA, 25 bp, Homo sapien
tgttgcatgccagatctccctgtat

SEQ ID NO: 3139963 - DNA, 25 bp, Homo sapien
gataatgagcattcctgcccagtct

SEQ ID NO: 3139964 - DNA, 25 bp, Homo sapien
gaagatctcataggatgtaccgaag

SEQ ID NO: 3139965 - DNA, 25 bp, Homo sapien
gtattacaccaatagataacctgtg

SEQ ID NO: 3139966 - DNA, 25 bp, Homo sapien
aatctgtcatcaacagatttgacat

SEQ ID NO: 3139967 - DNA, 25 bp, Homo sapien
tatcttcctgttaggcactaaatct

SEQ ID NO: 3139968 - DNA, 25 bp, Homo sapien
taggcactaaatctgtcatcaacag

SEQ ID NO: 3139969 - DNA, 25 bp, Homo sapien
attctttaaagagtatcttcctgtt

SEQ ID NO: 3139970 - DNA, 25 bp, Homo sapien
gttttctccaaacctggttcagcca

SEQ ID NO: 3139971 - DNA, 25 bp, Homo sapien
ttttctccaaacctggttcagccat

SEQ ID NO: 3139972 - DNA, 25 bp, Homo sapien
tggttttctccaaacctggttcagc

SEQ ID NO: 3139973 - DNA, 25 bp, Homo sapien
ggtttagatagataccaggtgacat

SEQ ID NO: 3139974 - DNA, 25 bp, Homo sapien
ggcaaaatattcctaccatgtcctt

SEQ ID NO: 3139975 - DNA, 25 bp, Homo sapien
aacacccgtgcttttatgactactg

SEQ ID NO: 3139976 - DNA, 25 bp, Homo sapien
tatcaccagccccagagtggctagc

SEQ ID NO: 3139977 - DNA, 25 bp, Homo sapien
tcaaaagaattctggacttgagaac

SEQ ID NO: 3139978 - DNA, 25 bp, Homo sapien
gaattctggacttgagaacattgct

SEQ ID NO: 3139979 - DNA, 25 bp, Homo sapien
ggacttgagaacattgcttcttcat

SEQ ID NO: 3139980 - DNA, 25 bp, Homo sapien
gtcatcaaaagaattctggacttga

SEQ ID NO: 3139981 - DNA, 25 bp, Homo sapien
gagtgtggccaattcacccagtatt

SEQ ID NO: 3139982 - DNA, 25 bp, Homo sapien
aagattccttcaacatgagtgtggc

SEQ ID NO: 3139983 - DNA, 25 bp, Homo sapien
ttattaggaaaggatgagatgctca

SEQ ID NO: 3139984 - DNA, 25 bp, Homo sapien
caccacatgctacttccagaaatag

SEQ ID NO: 3139985 - DNA, 25 bp, Homo sapien
tggctgccccttaagtgaatttaat

SEQ ID NO: 3139986 - DNA, 25 bp, Homo sapien
tagaatatgtcagtacacactggct

SEQ ID NO: 3139987 - DNA, 25 bp, Homo sapien
tatggaatctattaccccaaagccc

SEQ ID NO: 3139988 - DNA, 25 bp, Homo sapien
tcaccttttactagggtaggacaga

SEQ ID NO: 3139989 - DNA, 25 bp, Homo sapien
tcttacagcggcaataatgaatata

SEQ ID NO: 3139990 - DNA, 25 bp, Homo sapien
taaatagacaaagggcgttgaatag

SEQ ID NO: 3139991 - DNA, 25 bp, Homo sapien
tgcgtcccatgccaatgaagtaatg

SEQ ID NO: 3139992 - DNA, 25 bp, Homo sapien
gaagtaatgaaaacccgcactgttc

SEQ ID NO: 3139993 - DNA, 25 bp, Homo sapien
cagtaagcgaaagtggaggagggag

SEQ ID NO: 3139994 - DNA, 25 bp, Homo sapien
tcagtaagcgaaagtggaggaggga

SEQ ID NO: 3139995 - DNA, 25 bp, Homo sapien
gtcactgagggaacatcttacttaa

SEQ ID NO: 3139996 - DNA, 25 bp, Homo sapien
gatgatggatcagctttgcaggacg

SEQ ID NO: 3139997 - DNA, 25 bp, Homo sapien
gataatttacagttcccagtcgctg

SEQ ID NO: 3139998 - DNA, 25 bp, Homo sapien
taaatctgagtgctataaggacagc

SEQ ID NO: 3139999 - DNA, 25 bp, Homo sapien
catttgccacttccacagacctaag

SEQ ID NO: 3140000 - DNA, 25 bp, Homo sapien
cacttccacagacctaaggtaggta

SEQ ID NO: 3140001 - DNA, 25 bp, Homo sapien
aaggtaggtatcatttctggaaagc

SEQ ID NO: 3140002 - DNA, 25 bp, Homo sapien
tccacagacctaaggtaggtatcat

SEQ ID NO: 3140003 - DNA, 25 bp, Homo sapien
tagtatttgacactcctcaacaggc

SEQ ID NO: 3140004 - DNA, 25 bp, Homo sapien
tgacactcctcaacaggctcccctg

SEQ ID NO: 3140005 - DNA, 25 bp, Homo sapien
agtatttgacactcctcaacaggct

SEQ ID NO: 3140006 - DNA, 25 bp, Homo sapien
gtatttgacactcctcaacaggctc

SEQ ID NO: 3140007 - DNA, 25 bp, Homo sapien
ctgaaatccaaggagaataagccat

SEQ ID NO: 3140008 - DNA, 25 bp, Homo sapien
tcctctccggagaagtgcggaccgg

SEQ ID NO: 3140009 - DNA, 25 bp, Homo sapien
gaaactagctgcactgaaggtctca

SEQ ID NO: 3140010 - DNA, 25 bp, Homo sapien
cagtcagggctacatctggaagagg

SEQ ID NO: 3140011 - DNA, 25 bp, Homo sapien
caggaggtttctgttgcggtcaccc

SEQ ID NO: 3140012 - DNA, 25 bp, Homo sapien
cagtttgctagagagccatcaaggc

SEQ ID NO: 3140013 - DNA, 25 bp, Homo sapien
taaaccctaggtagctgaacaaatg

SEQ ID NO: 3140014 - DNA, 25 bp, Homo sapien
tacaagacagcttcctagggtagtg

SEQ ID NO: 3140015 - DNA, 25 bp, Homo sapien
tttaggactgcaatcacccactgag

SEQ ID NO: 3140016 - DNA, 25 bp, Homo sapien
cagaccagtcactatgattttattt

SEQ ID NO: 3140017 - DNA, 25 bp, Homo sapien
gacagaccagtcactatgattttat

SEQ ID NO: 3140018 - DNA, 25 bp, Homo sapien
cagacagaccagtcactatgatttt

SEQ ID NO: 3140019 - DNA, 25 bp, Homo sapien
ttcagacagaccagtcactatgatt

SEQ ID NO: 3140020 - DNA, 25 bp, Homo sapien
agcaagcagctcaggtaagtgacca

SEQ ID NO: 3140021 - DNA, 25 bp, Homo sapien
gcagctcaggtaagtgaccagagta

SEQ ID NO: 3140022 - DNA, 25 bp, Homo sapien
caagcagctcaggtaagtgaccaga

SEQ ID NO: 3140023 - DNA, 25 bp, Homo sapien
gctcaggtaagtgaccagagtacat

SEQ ID NO: 3140024 - DNA, 25 bp, Homo sapien
ggtaagttgatatatccttgcaaaa

SEQ ID NO: 3140025 - DNA, 25 bp, Homo sapien
gcctggtaagttgatatatccttgc

SEQ ID NO: 3140026 - DNA, 25 bp, Homo sapien
ctggtaagttgatatatccttgcaa

SEQ ID NO: 3140027 - DNA, 25 bp, Homo sapien
cctggtaagttgatatatccttgca

SEQ ID NO: 3140028 - DNA, 25 bp, Homo sapien
gactccaggaaacaccaaaactatg

SEQ ID NO: 3140029 - DNA, 25 bp, Homo sapien
gttccacgtggacatactgcacgca

SEQ ID NO: 3140030 - DNA, 25 bp, Homo sapien
caaaactatgcttttcagttccacg

SEQ ID NO: 3140031 - DNA, 25 bp, Homo sapien
gaaatatctggcttgattcagcatc

SEQ ID NO: 3140032 - DNA, 25 bp, Homo sapien
caggtttactgactaacatcaaatc

SEQ ID NO: 3140033 - DNA, 25 bp, Homo sapien
gggtagcatataatcacaggtttac

SEQ ID NO: 3140034 - DNA, 25 bp, Homo sapien
ggatatatggaattcaccttcactg

SEQ ID NO: 3140035 - DNA, 25 bp, Homo sapien
ctgaaaaacttcattggatatatgg

SEQ ID NO: 3140036 - DNA, 25 bp, Homo sapien
ctagcttcatgagcttagaaacagc

SEQ ID NO: 3140037 - DNA, 25 bp, Homo sapien
gcttcatgagcttagaaacagcata

SEQ ID NO: 3140038 - DNA, 25 bp, Homo sapien
cttagaaacagcatacaggtggagg

SEQ ID NO: 3140039 - DNA, 25 bp, Homo sapien
tgagcttagaaacagcatacaggtg

SEQ ID NO: 3140040 - DNA, 25 bp, Homo sapien
agttcctgtcatcggtctccttagc

SEQ ID NO: 3140041 - DNA, 25 bp, Homo sapien
ttcccaatgataagctgtagcagct

SEQ ID NO: 3140042 - DNA, 25 bp, Homo sapien
gtctccatactcaggagtatcagtg

SEQ ID NO: 3140043 - DNA, 25 bp, Homo sapien
tccttagccttctaaaacgatatcc

SEQ ID NO: 3140044 - DNA, 25 bp, Homo sapien
gctctctaggttccccatggcaaat

SEQ ID NO: 3140045 - DNA, 25 bp, Homo sapien
ctcttgctctctaggttccccatgg

SEQ ID NO: 3140046 - DNA, 25 bp, Homo sapien
tgctctctaggttccccatggcaaa

SEQ ID NO: 3140047 - DNA, 25 bp, Homo sapien
cttgctctctaggttccccatggca

SEQ ID NO: 3140048 - DNA, 25 bp, Homo sapien
caagtggctcctgtcagaaggaggc

SEQ ID NO: 3140049 - DNA, 25 bp, Homo sapien
tgcataacgtggtagttagtttccc

SEQ ID NO: 3140050 - DNA, 25 bp, Homo sapien
atgaccggcaagtggctcctgtcag

SEQ ID NO: 3140051 - DNA, 25 bp, Homo sapien
tttacagtagagctgcataacgtgg

SEQ ID NO: 3140052 - DNA, 25 bp, Homo sapien
tctaaatattctattaattcagaga

SEQ ID NO: 3140053 - DNA, 25 bp, Homo sapien
taataagtatcacaaattctaaacg

SEQ ID NO: 3140054 - DNA, 25 bp, Homo sapien
gaaaatgttaataagtatcacaaat

SEQ ID NO: 3140055 - DNA, 25 bp, Homo sapien
ttctaaacggatgttcagtaatatt

SEQ ID NO: 3140056 - DNA, 25 bp, Homo sapien
gctgttattttgtcaacacgttact

SEQ ID NO: 3140057 - DNA, 25 bp, Homo sapien
ttgacattcttctagatggactctc

SEQ ID NO: 3140058 - DNA, 25 bp, Homo sapien
tacttcagtggtttgtttgacattc

SEQ ID NO: 3140059 - DNA, 25 bp, Homo sapien
ctctctggtcctgtcaattttttca

SEQ ID NO: 3140060 - DNA, 25 bp, Homo sapien
ctcctttcagcggattctaaaaaga

SEQ ID NO: 3140061 - DNA, 25 bp, Homo sapien
tcctttcagcggattctaaaaagac

SEQ ID NO: 3140062 - DNA, 25 bp, Homo sapien
tctcctttcagcggattctaaaaag

SEQ ID NO: 3140063 - DNA, 25 bp, Homo sapien
caggctgataatgcttcctggttga

SEQ ID NO: 3140064 - DNA, 25 bp, Homo sapien
cccttccaggctgataatgcttcct

SEQ ID NO: 3140065 - DNA, 25 bp, Homo sapien
ccttccaggctgataatgcttcctg

SEQ ID NO: 3140066 - DNA, 25 bp, Homo sapien
gctgataatgcttcctggttgaaca

SEQ ID NO: 3140067 - DNA, 25 bp, Homo sapien
tgagacagtcctcgtggcttcaggg

SEQ ID NO: 3140068 - DNA, 25 bp, Homo sapien
gggctgccttcatgtggtatctgtg

SEQ ID NO: 3140069 - DNA, 25 bp, Homo sapien
tttgctgccattctatcagcctggg

SEQ ID NO: 3140070 - DNA, 25 bp, Homo sapien
ggtttcaacagttataaccataaca

SEQ ID NO: 3140071 - DNA, 25 bp, Homo sapien
tgatcccacataacgtgacaactcc

SEQ ID NO: 3140072 - DNA, 25 bp, Homo sapien
ttaatcctttgatcccacataacgt

SEQ ID NO: 3140073 - DNA, 25 bp, Homo sapien
gttgtccatctgcattgctttccat

SEQ ID NO: 3140074 - DNA, 25 bp, Homo sapien
gaagttgtccatctgcattgctttc

SEQ ID NO: 3140075 - DNA, 25 bp, Homo sapien
tttcccttagggccaacattctgca

SEQ ID NO: 3140076 - DNA, 25 bp, Homo sapien
gtttcccttagggccaacattctgc

SEQ ID NO: 3140077 - DNA, 25 bp, Homo sapien
ttcccttagggccaacattctgcat

SEQ ID NO: 3140078 - DNA, 25 bp, Homo sapien
cttgagagcttcttgctgtcactga

SEQ ID NO: 3140079 - DNA, 25 bp, Homo sapien
tgttttattaaattttctgcggcca

SEQ ID NO: 3140080 - DNA, 25 bp, Homo sapien
tgagagcttcttgctgtcactgagt

SEQ ID NO: 3140081 - DNA, 25 bp, Homo sapien
cttgctgtcactgagtgttttatta

SEQ ID NO: 3140082 - DNA, 25 bp, Homo sapien
gattctatgccatttttatgatttt

SEQ ID NO: 3140083 - DNA, 25 bp, Homo sapien
ttaggattctatgccatttttatga

SEQ ID NO: 3140084 - DNA, 25 bp, Homo sapien
aggattctatgccatttttatgatt

SEQ ID NO: 3140085 - DNA, 25 bp, Homo sapien
ggattctatgccatttttatgattt

SEQ ID NO: 3140086 - DNA, 25 bp, Homo sapien
acatgccacccatgaatcaaggaat

SEQ ID NO: 3140087 - DNA, 25 bp, Homo sapien
caattcttgaacaatgagtttggtt

SEQ ID NO: 3140088 - DNA, 25 bp, Homo sapien
tgtgccaattcttgaacaatgagtt

SEQ ID NO: 3140089 - DNA, 25 bp, Homo sapien
ggctcatgtgccaattcttgaacaa

SEQ ID NO: 3140090 - DNA, 25 bp, Homo sapien
tgaacaatgagtttggttttctggc

SEQ ID NO: 3140091 - DNA, 25 bp, Homo sapien
aaaaaaggcaggatagcccagagcc

SEQ ID NO: 3140092 - DNA, 25 bp, Homo sapien
aaaaaggcaggatagcccagagcca

SEQ ID NO: 3140093 - DNA, 25 bp, Homo sapien
aattccccggaataccacgtatgct

SEQ ID NO: 3140094 - DNA, 25 bp, Homo sapien
aataccacgtatgcttgccgataca

SEQ ID NO: 3140095 - DNA, 25 bp, Homo sapien
ccggaataccacgtatgcttgccga

SEQ ID NO: 3140096 - DNA, 25 bp, Homo sapien
tccccggaataccacgtatgcttgc

SEQ ID NO: 3140097 - DNA, 25 bp, Homo sapien
cactccttgtctaccacccaaagct

SEQ ID NO: 3140098 - DNA, 25 bp, Homo sapien
tttaggataagtgtttgcagtcctc

SEQ ID NO: 3140099 - DNA, 25 bp, Homo sapien
tccgaactgtactggagtagattcc

SEQ ID NO: 3140100 - DNA, 25 bp, Homo sapien
acccaaagctccgaactgtactgga

SEQ ID NO: 3140101 - DNA, 25 bp, Homo sapien
caggggacttataaaaggagctcat

SEQ ID NO: 3140102 - DNA, 25 bp, Homo sapien
ccaggggacttataaaaggagctca

SEQ ID NO: 3140103 - DNA, 25 bp, Homo sapien
tccaggggacttataaaaggagctc

SEQ ID NO: 3140104 - DNA, 25 bp, Homo sapien
tgccattacttgataaacttctttt

SEQ ID NO: 3140105 - DNA, 25 bp, Homo sapien
attcaaaatctatggtggtgttagt

SEQ ID NO: 3140106 - DNA, 25 bp, Homo sapien
tgtgccattacttgataaacttctt

SEQ ID NO: 3140107 - DNA, 25 bp, Homo sapien
cttgtgccattacttgataaacttc

SEQ ID NO: 3140108 - DNA, 25 bp, Homo sapien
gtctacaatttcctttgtaacaata

SEQ ID NO: 3140109 - DNA, 25 bp, Homo sapien
tcagttaaggaagtctacaatttcc

SEQ ID NO: 3140110 - DNA, 25 bp, Homo sapien
caatttcctttgtaacaatatttgt

SEQ ID NO: 3140111 - DNA, 25 bp, Homo sapien
ctacaatttcctttgtaacaatatt

SEQ ID NO: 3140112 - DNA, 25 bp, Homo sapien
ggactcacagatgctctccttgttt

SEQ ID NO: 3140113 - DNA, 25 bp, Homo sapien
gactcacagatgctctccttgtttt

SEQ ID NO: 3140114 - DNA, 25 bp, Homo sapien
gatgctctccttgttttcctatggc

SEQ ID NO: 3140115 - DNA, 25 bp, Homo sapien
cacagatgctctccttgttttccta

SEQ ID NO: 3140116 - DNA, 25 bp, Homo sapien
gggtatctaccaagataaggctggt

SEQ ID NO: 3140117 - DNA, 25 bp, Homo sapien
taaaggaacgatctccaaatccagt

SEQ ID NO: 3140118 - DNA, 25 bp, Homo sapien
gcctgtggctcatcaagattgagac

SEQ ID NO: 3140119 - DNA, 25 bp, Homo sapien
aaaatgacagcaggattggttcctc

SEQ ID NO: 3140120 - DNA, 25 bp, Homo sapien
ggatggtggaggattgatcttacat

SEQ ID NO: 3140121 - DNA, 25 bp, Homo sapien
aggatggtggaggattgatcttaca

SEQ ID NO: 3140122 - DNA, 25 bp, Homo sapien
acctcttgactcttagggcatgtga

SEQ ID NO: 3140123 - DNA, 25 bp, Homo sapien
tcttgactcttagggcatgtgaagt

SEQ ID NO: 3140124 - DNA, 25 bp, Homo sapien
tagcacttgttacactacctagttg

SEQ ID NO: 3140125 - DNA, 25 bp, Homo sapien
ctttcctcttgacgccaatggcagt

SEQ ID NO: 3140126 - DNA, 25 bp, Homo sapien
gtacttaattcttctctagcacttg

SEQ ID NO: 3140127 - DNA, 25 bp, Homo sapien
cctcataatggtttgtacttaattc

SEQ ID NO: 3140128 - DNA, 25 bp, Homo sapien
ctggtggtatctgacaacacgcagc

SEQ ID NO: 3140129 - DNA, 25 bp, Homo sapien
ggtggtatctgacaacacgcagcat

SEQ ID NO: 3140130 - DNA, 25 bp, Homo sapien
tggtggtatctgacaacacgcagca

SEQ ID NO: 3140131 - DNA, 25 bp, Homo sapien
aatcgccccagccaagtaactctct

SEQ ID NO: 3140132 - DNA, 25 bp, Homo sapien
ttaggccagcaaaatataatgtcat

SEQ ID NO: 3140133 - DNA, 25 bp, Homo sapien
taggccagcaaaatataatgtcatg

SEQ ID NO: 3140134 - DNA, 25 bp, Homo sapien
gccaagtaactctcttcttagcctg

SEQ ID NO: 3140135 - DNA, 25 bp, Homo sapien
gctattcccacaaatttgatgttag

SEQ ID NO: 3140136 - DNA, 25 bp, Homo sapien
cattgatgtagacatcattaaagga

SEQ ID NO: 3140137 - DNA, 25 bp, Homo sapien
ccaggtgttcattgaacagggctat

SEQ ID NO: 3140138 - DNA, 25 bp, Homo sapien
tgaacagggctattcccacaaattt

SEQ ID NO: 3140139 - DNA, 25 bp, Homo sapien
tcatcagttagcagtgtggcttggc

SEQ ID NO: 3140140 - DNA, 25 bp, Homo sapien
aggtcctccctctttcaagctggtc

SEQ ID NO: 3140141 - DNA, 25 bp, Homo sapien
ttgtgctgatggcaattggcaggtc

SEQ ID NO: 3140142 - DNA, 25 bp, Homo sapien
cctctttcaagctggtctctcatca

SEQ ID NO: 3140143 - DNA, 25 bp, Homo sapien
ctgtggttacaccaggcagtttttg

SEQ ID NO: 3140144 - DNA, 25 bp, Homo sapien
tgtgactcagcagaaaatggatggt

SEQ ID NO: 3140145 - DNA, 25 bp, Homo sapien
tttttaccgacacctccttgtctca

SEQ ID NO: 3140146 - DNA, 25 bp, Homo sapien
gtctcattcatggagttgcagtcta

SEQ ID NO: 3140147 - DNA, 25 bp, Homo sapien
ctaacatcttcatggagagtgaaga

SEQ ID NO: 3140148 - DNA, 25 bp, Homo sapien
catcaacattttttgaggcgatttt

SEQ ID NO: 3140149 - DNA, 25 bp, Homo sapien
cacccagagtgagcattatctaaca

SEQ ID NO: 3140150 - DNA, 25 bp, Homo sapien
agttgattgagcaagcattctgtga

SEQ ID NO: 3140151 - DNA, 25 bp, Homo sapien
tttttcaagggcatagaaaggcgga

SEQ ID NO: 3140152 - DNA, 25 bp, Homo sapien
ttcaagggcatagaaaggcggagct

SEQ ID NO: 3140153 - DNA, 25 bp, Homo sapien
ttcttgtttttcaagggcatagaaa

SEQ ID NO: 3140154 - DNA, 25 bp, Homo sapien
cttgtttttcaagggcatagaaagg

SEQ ID NO: 3140155 - DNA, 25 bp, Homo sapien
gatgatgtataggaaagcaactgac

SEQ ID NO: 3140156 - DNA, 25 bp, Homo sapien
tgttcctgatgtgagtggcaaagct

SEQ ID NO: 3140157 - DNA, 25 bp, Homo sapien
taaagccatagattgcataaccaca

SEQ ID NO: 3140158 - DNA, 25 bp, Homo sapien
ggttccataagattagaatgccaca

SEQ ID NO: 3140159 - DNA, 25 bp, Homo sapien
cagggagtcgagcagatcctgctgt

SEQ ID NO: 3140160 - DNA, 25 bp, Homo sapien
agcagggagtcgagcagatcctgct

SEQ ID NO: 3140161 - DNA, 25 bp, Homo sapien
tgagcagggagtcgagcagatcctg

SEQ ID NO: 3140162 - DNA, 25 bp, Homo sapien
tctgagcagggagtcgagcagatcc

SEQ ID NO: 3140163 - DNA, 25 bp, Homo sapien
tctgtcttctctatgatcctcaaat

SEQ ID NO: 3140164 - DNA, 25 bp, Homo sapien
aatgtggacatataccaagtttcca

SEQ ID NO: 3140165 - DNA, 25 bp, Homo sapien
tctctatgatcctcaaatgtggaca

SEQ ID NO: 3140166 - DNA, 25 bp, Homo sapien
ctcaaatgtggacatataccaagtt

SEQ ID NO: 3140167 - DNA, 25 bp, Homo sapien
agttatcatcatatccttctaacat

SEQ ID NO: 3140168 - DNA, 25 bp, Homo sapien
aagttatcatcatatccttctaaca

SEQ ID NO: 3140169 - DNA, 25 bp, Homo sapien
taagttatcatcatatccttctaac

SEQ ID NO: 3140170 - DNA, 25 bp, Homo sapien
ctaagttatcatcatatccttctaa

SEQ ID NO: 3140171 - DNA, 25 bp, Homo sapien
cctatcaacagtggcagggagcata

SEQ ID NO: 3140172 - DNA, 25 bp, Homo sapien
tagctcgcagaagaacatagacact

SEQ ID NO: 3140173 - DNA, 25 bp, Homo sapien
gagacctgacccctatcaacagtgg

SEQ ID NO: 3140174 - DNA, 25 bp, Homo sapien
gcagggagcatagctcgcagaagaa

SEQ ID NO: 3140175 - DNA, 25 bp, Homo sapien
aaatgagtccatcagatccaatcac

SEQ ID NO: 3140176 - DNA, 25 bp, Homo sapien
gatgttatgtgtactgttctcctgc

SEQ ID NO: 3140177 - DNA, 25 bp, Homo sapien
atccaatcaccttgatgttatgtgt

SEQ ID NO: 3140178 - DNA, 25 bp, Homo sapien
ctaaatgagtccatcagatccaatc

SEQ ID NO: 3140179 - DNA, 25 bp, Homo sapien
ccccagaatccagatctttttgagt

SEQ ID NO: 3140180 - DNA, 25 bp, Homo sapien
cccagaatccagatctttttgagtt

SEQ ID NO: 3140181 - DNA, 25 bp, Homo sapien
cccccagaatccagatctttttgag

SEQ ID NO: 3140182 - DNA, 25 bp, Homo sapien
ttgtgtttgctttgcgggtaactat

SEQ ID NO: 3140183 - DNA, 25 bp, Homo sapien
ggtaactataatacttgcaggaagt

SEQ ID NO: 3140184 - DNA, 25 bp, Homo sapien
aactataatacttgcaggaagttgc

SEQ ID NO: 3140185 - DNA, 25 bp, Homo sapien
tgtgtttgctttgcgggtaactata

SEQ ID NO: 3140186 - DNA, 25 bp, Homo sapien
cagaatggtgtgcacccttgtgtct

SEQ ID NO: 3140187 - DNA, 25 bp, Homo sapien
atggtgtgcacccttgtgtctgaga

SEQ ID NO: 3140188 - DNA, 25 bp, Homo sapien
tggtgtgcacccttgtgtctgagag

SEQ ID NO: 3140189 - DNA, 25 bp, Homo sapien
atagcagaatggtgtgcacccttgt

SEQ ID NO: 3140190 - DNA, 25 bp, Homo sapien
tatttctatactccgcattcacagc

SEQ ID NO: 3140191 - DNA, 25 bp, Homo sapien
tgagaccacattgtatttcccttga

SEQ ID NO: 3140192 - DNA, 25 bp, Homo sapien
tacaatccaacagtgcagagctgct

SEQ ID NO: 3140193 - DNA, 25 bp, Homo sapien
tactgtgcgagttccctgctgttgt

SEQ ID NO: 3140194 - DNA, 25 bp, Homo sapien
acaaagaggtcacggatggtgagca

SEQ ID NO: 3140195 - DNA, 25 bp, Homo sapien
aagaggtcacggatggtgagcattc

SEQ ID NO: 3140196 - DNA, 25 bp, Homo sapien
ggcacaaagaggtcacggatggtga

SEQ ID NO: 3140197 - DNA, 25 bp, Homo sapien
ggggtccaagaggcacaaagaggtc

SEQ ID NO: 3140198 - DNA, 25 bp, Homo sapien
gaagaagcactggtgactctaatgc

SEQ ID NO: 3140199 - DNA, 25 bp, Homo sapien
tactcataaccgtgcagtttgctta

SEQ ID NO: 3140200 - DNA, 25 bp, Homo sapien
ctctcatgttttaggctaacaaaag

SEQ ID NO: 3140201 - DNA, 25 bp, Homo sapien
tctggagaatgttaagaagaagcac

SEQ ID NO: 3140202 - DNA, 25 bp, Homo sapien
catagatggatatgtagttatcgtt

SEQ ID NO: 3140203 - DNA, 25 bp, Homo sapien
tagttatcgttatctcctgatttca

SEQ ID NO: 3140204 - DNA, 25 bp, Homo sapien
tccctccatacatagatggatatgt

SEQ ID NO: 3140205 - DNA, 25 bp, Homo sapien
tttctccctccatacatagatggat

SEQ ID NO: 3140206 - DNA, 25 bp, Homo sapien
tcagtcataaatatcttcttgtagg

SEQ ID NO: 3140207 - DNA, 25 bp, Homo sapien
ttgttcagtcataaatatcttcttg

SEQ ID NO: 3140208 - DNA, 25 bp, Homo sapien
tcataaatatcttcttgtaggtcat

SEQ ID NO: 3140209 - DNA, 25 bp, Homo sapien
gtcataaatatcttcttgtaggtca

SEQ ID NO: 3140210 - DNA, 25 bp, Homo sapien
ccactcaaaccacaggggaactagc

SEQ ID NO: 3140211 - DNA, 25 bp, Homo sapien
cacaggggaactagcccaaaggtag

SEQ ID NO: 3140212 - DNA, 25 bp, Homo sapien
agaggaaagcacttgtcaccttcac

SEQ ID NO: 3140213 - DNA, 25 bp, Homo sapien
cagaggaaagcacttgtcaccttca

SEQ ID NO: 3140214 - DNA, 25 bp, Homo sapien
ttaggctgtcttttctcagggtcac

SEQ ID NO: 3140215 - DNA, 25 bp, Homo sapien
cctcttccatatgttgacttcattc

SEQ ID NO: 3140216 - DNA, 25 bp, Homo sapien
gttgacttcattcttaggctgtctt

SEQ ID NO: 3140217 - DNA, 25 bp, Homo sapien
tctcagggtcaccaaatggctgcag

SEQ ID NO: 3140218 - DNA, 25 bp, Homo sapien
tcaagcagataagtgcctataaaag

SEQ ID NO: 3140219 - DNA, 25 bp, Homo sapien
ctgtagaagaatctccattataaac

SEQ ID NO: 3140220 - DNA, 25 bp, Homo sapien
actcttcaagcagataagtgcctat

SEQ ID NO: 3140221 - DNA, 25 bp, Homo sapien
gtttggtaaactgtagaagaatctc

SEQ ID NO: 3140222 - DNA, 25 bp, Homo sapien
gtgtcctggtagtattgcttattca

SEQ ID NO: 3140223 - DNA, 25 bp, Homo sapien
tccacactgacgtgtcctggtagta

SEQ ID NO: 3140224 - DNA, 25 bp, Homo sapien
tatcattccacactgacgtgtcctg

SEQ ID NO: 3140225 - DNA, 25 bp, Homo sapien
cactgacgtgtcctggtagtattgc

SEQ ID NO: 3140226 - DNA, 25 bp, Homo sapien
tacagcatgtcatcggttcctttgt

SEQ ID NO: 3140227 - DNA, 25 bp, Homo sapien
ctacagcatgtcatcggttcctttg

SEQ ID NO: 3140228 - DNA, 25 bp, Homo sapien
tctccttgatccttaaaactagcag

SEQ ID NO: 3140229 - DNA, 25 bp, Homo sapien
acagtcttgatccttcttcggcaca

SEQ ID NO: 3140230 - DNA, 25 bp, Homo sapien
gctgagttctgagctacactttctg

SEQ ID NO: 3140231 - DNA, 25 bp, Homo sapien
gaaaatttatgaacaacttggctgg

SEQ ID NO: 3140232 - DNA, 25 bp, Homo sapien
tctaccacaaactctgtaccacctc

SEQ ID NO: 3140233 - DNA, 25 bp, Homo sapien
acctctaccacaaactctgtaccac

SEQ ID NO: 3140234 - DNA, 25 bp, Homo sapien
ctctaccacaaactctgtaccacct

SEQ ID NO: 3140235 - DNA, 25 bp, Homo sapien
tacctctaccacaaactctgtacca

SEQ ID NO: 3140236 - DNA, 25 bp, Homo sapien
ctgtgatggatgctattgtgccttt

SEQ ID NO: 3140237 - DNA, 25 bp, Homo sapien
tgcctcacaggaatactccctttca

SEQ ID NO: 3140238 - DNA, 25 bp, Homo sapien
gctattgtgcctttggacaatggga

SEQ ID NO: 3140239 - DNA, 25 bp, Homo sapien
gcctcacaggaatactccctttcat

SEQ ID NO: 3140240 - DNA, 25 bp, Homo sapien
tcaaatcacgtacaataaaagcttc

SEQ ID NO: 3140241 - DNA, 25 bp, Homo sapien
ctgttcatctaaaggtagcctggcg

SEQ ID NO: 3140242 - DNA, 25 bp, Homo sapien
gctttcaaatcacgtacaataaaag

SEQ ID NO: 3140243 - DNA, 25 bp, Homo sapien
ggcgtacagttcatgactcttagct

SEQ ID NO: 3140244 - DNA, 25 bp, Homo sapien
cattctataattactcagaggttct

SEQ ID NO: 3140245 - DNA, 25 bp, Homo sapien
aagccactttgtggcttaagccaca

SEQ ID NO: 3140246 - DNA, 25 bp, Homo sapien
cgttttgagtatatcttacagaggc

SEQ ID NO: 3140247 - DNA, 25 bp, Homo sapien
catttgcacagcagacgttttgagt

SEQ ID NO: 3140248 - DNA, 25 bp, Homo sapien
ccctctgcctttggtagtgtgtctg

SEQ ID NO: 3140249 - DNA, 25 bp, Homo sapien
gcgtgttaggcagttacaggtccca

SEQ ID NO: 3140250 - DNA, 25 bp, Homo sapien
gatctttgggttgcatagttccgtg

SEQ ID NO: 3140251 - DNA, 25 bp, Homo sapien
cgcccgggagtttggtattcttcag

SEQ ID NO: 3140252 - DNA, 25 bp, Homo sapien
ttccaggtttgggacgctaggctcc

SEQ ID NO: 3140253 - DNA, 25 bp, Homo sapien
gacttgtttaaagaagcactttgtc

SEQ ID NO: 3140254 - DNA, 25 bp, Homo sapien
gggatcaggacttgtttaaagaagc

SEQ ID NO: 3140255 - DNA, 25 bp, Homo sapien
gggagatctgaattctatccctgag

SEQ ID NO: 3140256 - DNA, 25 bp, Homo sapien
tcaaggaggagagtctaagtctgct

SEQ ID NO: 3140257 - DNA, 25 bp, Homo sapien
gagactatgattgcaatccctacgt

SEQ ID NO: 3140258 - DNA, 25 bp, Homo sapien
agcacacgaataggttcacttcagg

SEQ ID NO: 3140259 - DNA, 25 bp, Homo sapien
ttacatgtaggaggggtctcctgaa

SEQ ID NO: 3140260 - DNA, 25 bp, Homo sapien
ctgaatacagcacacgaataggttc

SEQ ID NO: 3140261 - DNA, 25 bp, Homo sapien
caactctagatgctatttgtggaca

SEQ ID NO: 3140262 - DNA, 25 bp, Homo sapien
gatgatcctatccttgaaacacttg

SEQ ID NO: 3140263 - DNA, 25 bp, Homo sapien
tccgagaatcctaggttatgccagt

SEQ ID NO: 3140264 - DNA, 25 bp, Homo sapien
caattgattggtgtgagctttccga

SEQ ID NO: 3140265 - DNA, 25 bp, Homo sapien
cttgtacagccccagtacaatgagc

SEQ ID NO: 3140266 - DNA, 25 bp, Homo sapien
tacagccccagtacaatgagccaat

SEQ ID NO: 3140267 - DNA, 25 bp, Homo sapien
ggagtgggcaattgctataaatatt

SEQ ID NO: 3140268 - DNA, 25 bp, Homo sapien
agagggagtgggcaattgctataaa

SEQ ID NO: 3140269 - DNA, 25 bp, Homo sapien
caaccaaaatacaggacagctgaag

SEQ ID NO: 3140270 - DNA, 25 bp, Homo sapien
tcaaccaaaatacaggacagctgaa

SEQ ID NO: 3140271 - DNA, 25 bp, Homo sapien
aaccaaaatacaggacagctgaagc

SEQ ID NO: 3140272 - DNA, 25 bp, Homo sapien
gatttttgagcctgatttcccttgc

SEQ ID NO: 3140273 - DNA, 25 bp, Homo sapien
ttttgagcctgatttcccttgccat

SEQ ID NO: 3140274 - DNA, 25 bp, Homo sapien
cactgatgattagttatttgattag

SEQ ID NO: 3140275 - DNA, 25 bp, Homo sapien
tcagatgaatgcatacactgatgat

SEQ ID NO: 3140276 - DNA, 25 bp, Homo sapien
tgtccgcaaggcgaccatttcctga

SEQ ID NO: 3140277 - DNA, 25 bp, Homo sapien
gatttgatatgttccatttgtaagc

SEQ ID NO: 3140278 - DNA, 25 bp, Homo sapien
caagttcacaaaagcttgatttgat

SEQ ID NO: 3140279 - DNA, 25 bp, Homo sapien
cttccatttaggcttcatattcttt

SEQ ID NO: 3140280 - DNA, 25 bp, Homo sapien
tctctgtgctttctggccggcatgg

SEQ ID NO: 3140281 - DNA, 25 bp, Homo sapien
tccgatcctaaggacccagggagaa

SEQ ID NO: 3140282 - DNA, 25 bp, Homo sapien
catatacctgcaggagaagttagtt

SEQ ID NO: 3140283 - DNA, 25 bp, Homo sapien
gccggcatgggggaacatatacctg

SEQ ID NO: 3140284 - DNA, 25 bp, Homo sapien
cactaataggaaattgaaggccgat

SEQ ID NO: 3140285 - DNA, 25 bp, Homo sapien
ggacagcaattcctttagcctctgg

SEQ ID NO: 3140286 - DNA, 25 bp, Homo sapien
cagcatgccccagagatcaaaagtg

SEQ ID NO: 3140287 - DNA, 25 bp, Homo sapien
tatggttaagaccaacagcatgccc

SEQ ID NO: 3140288 - DNA, 25 bp, Homo sapien
gcatggtagttcgtatcttccctta

SEQ ID NO: 3140289 - DNA, 25 bp, Homo sapien
aaatctatttcaggtagatgcagca

SEQ ID NO: 3140290 - DNA, 25 bp, Homo sapien
cacagcactatgtagcagaaaagct

SEQ ID NO: 3140291 - DNA, 25 bp, Homo sapien
tttctgcacagcactatgtagcaga

SEQ ID NO: 3140292 - DNA, 25 bp, Homo sapien
gctgtgggatcataggaaaaatgat

SEQ ID NO: 3140293 - DNA, 25 bp, Homo sapien
attggtgaaagtgaagtaaatcggt

SEQ ID NO: 3140294 - DNA, 25 bp, Homo sapien
gaaaaatgatgacggattggtgaaa

SEQ ID NO: 3140295 - DNA, 25 bp, Homo sapien
aagtcaaaagagattgtaatagctg

SEQ ID NO: 3140296 - DNA, 25 bp, Homo sapien
ctgccggacaccaacaagacttgtt

SEQ ID NO: 3140297 - DNA, 25 bp, Homo sapien
gctgcagcccggtggttgttgcttt

SEQ ID NO: 3140298 - DNA, 25 bp, Homo sapien
agtctctggagttgttgagggtgca

SEQ ID NO: 3140299 - DNA, 25 bp, Homo sapien
cacttcctgctatcaagccatgaca

SEQ ID NO: 3140300 - DNA, 25 bp, Homo sapien
tatcaagccatgacagcaggcaggc

SEQ ID NO: 3140301 - DNA, 25 bp, Homo sapien
gattaggaccacatcactgatggaa

SEQ ID NO: 3140302 - DNA, 25 bp, Homo sapien
aacaatccttgaaaggatgttgtag

SEQ ID NO: 3140303 - DNA, 25 bp, Homo sapien
tattctagaagtggatgatgcactg

SEQ ID NO: 3140304 - DNA, 25 bp, Homo sapien
ttgtagtgtttgtgaggactataac

SEQ ID NO: 3140305 - DNA, 25 bp, Homo sapien
tggtgaaaaacgcagaaggctggat

SEQ ID NO: 3140306 - DNA, 25 bp, Homo sapien
catcagtttccttatagtcttctcc

SEQ ID NO: 3140307 - DNA, 25 bp, Homo sapien
gctggatggcctctgggtactgtca

SEQ ID NO: 3140308 - DNA, 25 bp, Homo sapien
catgtctacggttcagccatagtgg

SEQ ID NO: 3140309 - DNA, 25 bp, Homo sapien
ttgttacaggtggtgatctggtttt

SEQ ID NO: 3140310 - DNA, 25 bp, Homo sapien
gatcgctgataggttcatggctgga

SEQ ID NO: 3140311 - DNA, 25 bp, Homo sapien
gagatacagccatcttattgagaag

SEQ ID NO: 3140312 - DNA, 25 bp, Homo sapien
gactcatggtagatcttaataggct

SEQ ID NO: 3140313 - DNA, 25 bp, Homo sapien
gcaatagttaggcatgatcgctgat

SEQ ID NO: 3140314 - DNA, 25 bp, Homo sapien
ccaaggaccagaattgctgctgagc

SEQ ID NO: 3140315 - DNA, 25 bp, Homo sapien
tggaagtgcttgttagcagggtcat

SEQ ID NO: 3140316 - DNA, 25 bp, Homo sapien
aaagtatacatccaccattaggtct

SEQ ID NO: 3140317 - DNA, 25 bp, Homo sapien
caaaagtatacatccaccattaggt

SEQ ID NO: 3140318 - DNA, 25 bp, Homo sapien
attaggtctttggaagtgcttgtta

SEQ ID NO: 3140319 - DNA, 25 bp, Homo sapien
tatgagatccacagattgcaccaca

SEQ ID NO: 3140320 - DNA, 25 bp, Homo sapien
tcctgatagacacctgataagcact

SEQ ID NO: 3140321 - DNA, 25 bp, Homo sapien
caggccatgggaacataactatgag

SEQ ID NO: 3140322 - DNA, 25 bp, Homo sapien
ggcagagaatctcccatagcagctt

SEQ ID NO: 3140323 - DNA, 25 bp, Homo sapien
ttggagtatgcttccaataatcgtc

SEQ ID NO: 3140324 - DNA, 25 bp, Homo sapien
ggagtatgcttccaataatcgtctg

SEQ ID NO: 3140325 - DNA, 25 bp, Homo sapien
atttggagtatgcttccaataatcg

SEQ ID NO: 3140326 - DNA, 25 bp, Homo sapien
gagtatgcttccaataatcgtctgt

SEQ ID NO: 3140327 - DNA, 25 bp, Homo sapien
caagttccctgactcagtgcttatt

SEQ ID NO: 3140328 - DNA, 25 bp, Homo sapien
ttccaagttccctgactcagtgctt

SEQ ID NO: 3140329 - DNA, 25 bp, Homo sapien
aggagctggcattctctctaagcct

SEQ ID NO: 3140330 - DNA, 25 bp, Homo sapien
gagctggcattctctctaagcctct

SEQ ID NO: 3140331 - DNA, 25 bp, Homo sapien
aagccttctctatgcagaaactctg

SEQ ID NO: 3140332 - DNA, 25 bp, Homo sapien
tctctatgcagaaactctggatagc

SEQ ID NO: 3140333 - DNA, 25 bp, Homo sapien
tgcagaaactctggatagcacgtat

SEQ ID NO: 3140334 - DNA, 25 bp, Homo sapien
aaactctggatagcacgtattagca

SEQ ID NO: 3140335 - DNA, 25 bp, Homo sapien
cagtagttgcaatagcacaagcatc

SEQ ID NO: 3140336 - DNA, 25 bp, Homo sapien
tcacagacaccacagctataacagc

SEQ ID NO: 3140337 - DNA, 25 bp, Homo sapien
agcagcactattcttcactcttaaa

SEQ ID NO: 3140338 - DNA, 25 bp, Homo sapien
cacggccagtgtttgaaacaggaaa

SEQ ID NO: 3140339 - DNA, 25 bp, Homo sapien
tccactgaagtcatgatagatgact

SEQ ID NO: 3140340 - DNA, 25 bp, Homo sapien
tcatgatagatgactttacaacttt

SEQ ID NO: 3140341 - DNA, 25 bp, Homo sapien
ctgaagtcatgatagatgactttac

SEQ ID NO: 3140342 - DNA, 25 bp, Homo sapien
gaagtcatgatagatgactttacaa

SEQ ID NO: 3140343 - DNA, 25 bp, Homo sapien
ggtgctatttcagttctatagaata

SEQ ID NO: 3140344 - DNA, 25 bp, Homo sapien
tctatagaatatcaatggtgctaca

SEQ ID NO: 3140345 - DNA, 25 bp, Homo sapien
tcttgacaatttctttaggcctagt

SEQ ID NO: 3140346 - DNA, 25 bp, Homo sapien
gacatgaatgttggtgctatttcag

SEQ ID NO: 3140347 - DNA, 25 bp, Homo sapien
accagcatccttcctattaacagcc

SEQ ID NO: 3140348 - DNA, 25 bp, Homo sapien
ccagcatccttcctattaacagcca

SEQ ID NO: 3140349 - DNA, 25 bp, Homo sapien
catccttcctattaacagccacaaa

SEQ ID NO: 3140350 - DNA, 25 bp, Homo sapien
taactgtcaactaggtatgttccaa

SEQ ID NO: 3140351 - DNA, 25 bp, Homo sapien
tcccactagaagtagcttcacttgt

SEQ ID NO: 3140352 - DNA, 25 bp, Homo sapien
tggactcctactgatgaaataataa

SEQ ID NO: 3140353 - DNA, 25 bp, Homo sapien
cacttgttctaatcttttggactcc

SEQ ID NO: 3140354 - DNA, 25 bp, Homo sapien
ttttaactggatgtaacgtacactg

SEQ ID NO: 3140355 - DNA, 25 bp, Homo sapien
taactggatgtaacgtacactgtac

SEQ ID NO: 3140356 - DNA, 25 bp, Homo sapien
tcaccagcaaatgggctcttgtgtt

SEQ ID NO: 3140357 - DNA, 25 bp, Homo sapien
atcaccagcaaatgggctcttgtgt

SEQ ID NO: 3140358 - DNA, 25 bp, Homo sapien
gaaacagcaggatgtcctaggcaca

SEQ ID NO: 3140359 - DNA, 25 bp, Homo sapien
aacagcaggatgtcctaggcacatc

SEQ ID NO: 3140360 - DNA, 25 bp, Homo sapien
caggatgtcctaggcacatcctctt

SEQ ID NO: 3140361 - DNA, 25 bp, Homo sapien
cagcaggatgtcctaggcacatcct

SEQ ID NO: 3140362 - DNA, 25 bp, Homo sapien
gaaggtggacatggttaacgagtac

SEQ ID NO: 3140363 - DNA, 25 bp, Homo sapien
tgtattatcatagtcaggaggtggg

SEQ ID NO: 3140364 - DNA, 25 bp, Homo sapien
agtcatatcttcactcagttgcaag

SEQ ID NO: 3140365 - DNA, 25 bp, Homo sapien
aagcatttatccgttgaattgcaca

SEQ ID NO: 3140366 - DNA, 25 bp, Homo sapien
gcctctgtcctccagtttgaccaga

SEQ ID NO: 3140367 - DNA, 25 bp, Homo sapien
ctcctgtggaaaggcctctgtcctc

SEQ ID NO: 3140368 - DNA, 25 bp, Homo sapien
aaaggcctctgtcctccagtttgac

SEQ ID NO: 3140369 - DNA, 25 bp, Homo sapien
tgtcctccagtttgaccagagccat

SEQ ID NO: 3140370 - DNA, 25 bp, Homo sapien
gagaaactcaatgcaaatactgtat

SEQ ID NO: 3140371 - DNA, 25 bp, Homo sapien
gccttgaaggagaaactcaatgcaa

SEQ ID NO: 3140372 - DNA, 25 bp, Homo sapien
ctgccttgaaggagaaactcaatgc

SEQ ID NO: 3140373 - DNA, 25 bp, Homo sapien
aaggagaaactcaatgcaaatactg

SEQ ID NO: 3140374 - DNA, 25 bp, Homo sapien
cattaacccgtaagtcactgctgat

SEQ ID NO: 3140375 - DNA, 25 bp, Homo sapien
gggtgcaagtgctgcttcccattaa

SEQ ID NO: 3140376 - DNA, 25 bp, Homo sapien
tgtatctgggcacttgggtgcaagt

SEQ ID NO: 3140377 - DNA, 25 bp, Homo sapien
ttcatgtctgctgtactttcaaggt

SEQ ID NO: 3140378 - DNA, 25 bp, Homo sapien
tgtgaatcctatcttgagctgtctg

SEQ ID NO: 3140379 - DNA, 25 bp, Homo sapien
gaatcctatcttgagctgtctgctt

SEQ ID NO: 3140380 - DNA, 25 bp, Homo sapien
ctgagatggatttggactgtgaatc

SEQ ID NO: 3140381 - DNA, 25 bp, Homo sapien
gactgtgaatcctatcttgagctgt

SEQ ID NO: 3140382 - DNA, 25 bp, Homo sapien
catttatgtgaggaagacaaaggag

SEQ ID NO: 3140383 - DNA, 25 bp, Homo sapien
tacatttatgtgaggaagacaaagg

SEQ ID NO: 3140384 - DNA, 25 bp, Homo sapien
ctagtacatttatgtgaggaagaca

SEQ ID NO: 3140385 - DNA, 25 bp, Homo sapien
gtacatttatgtgaggaagacaaag

SEQ ID NO: 3140386 - DNA, 25 bp, Homo sapien
cttccccattgatgagagcatttat

SEQ ID NO: 3140387 - DNA, 25 bp, Homo sapien
actctcctatatttggtgttagtca

SEQ ID NO: 3140388 - DNA, 25 bp, Homo sapien
ataaactttactctcctatatttgg

SEQ ID NO: 3140389 - DNA, 25 bp, Homo sapien
cccattgatgagagcatttataaac

SEQ ID NO: 3140390 - DNA, 25 bp, Homo sapien
agagcactaagccttctccatgaag

SEQ ID NO: 3140391 - DNA, 25 bp, Homo sapien
gtaaagagcactaagccttctccat

SEQ ID NO: 3140392 - DNA, 25 bp, Homo sapien
gagcactaagccttctccatgaagt

SEQ ID NO: 3140393 - DNA, 25 bp, Homo sapien
aaagagcactaagccttctccatga

SEQ ID NO: 3140394 - DNA, 25 bp, Homo sapien
tctccccctcttgatggtgttgaca

SEQ ID NO: 3140395 - DNA, 25 bp, Homo sapien
tatctccccctcttgatggtgttga

SEQ ID NO: 3140396 - DNA, 25 bp, Homo sapien
cccctcttgatggtgttgacactac

SEQ ID NO: 3140397 - DNA, 25 bp, Homo sapien
tccccctcttgatggtgttgacact

SEQ ID NO: 3140398 - DNA, 25 bp, Homo sapien
gccattgtcaccacgtatttgcatc

SEQ ID NO: 3140399 - DNA, 25 bp, Homo sapien
ctgctactaacccatcccttagtta

SEQ ID NO: 3140400 - DNA, 25 bp, Homo sapien
aacccatcccttagttatggtgcaa

SEQ ID NO: 3140401 - DNA, 25 bp, Homo sapien
cattgtcaccacgtatttgcatcaa

SEQ ID NO: 3140402 - DNA, 25 bp, Homo sapien
ctaagcagacagtgacagcattgat

SEQ ID NO: 3140403 - DNA, 25 bp, Homo sapien
agcagacagtgacagcattgatagc

SEQ ID NO: 3140404 - DNA, 25 bp, Homo sapien
gcagacagtgacagcattgatagct

SEQ ID NO: 3140405 - DNA, 25 bp, Homo sapien
taagcagacagtgacagcattgata

SEQ ID NO: 3140406 - DNA, 25 bp, Homo sapien
aattctgtacggtaaagggtctcat

SEQ ID NO: 3140407 - DNA, 25 bp, Homo sapien
acatgtgggctcttgagtcttcatt

SEQ ID NO: 3140408 - DNA, 25 bp, Homo sapien
aacatgtgggctcttgagtcttcat

SEQ ID NO: 3140409 - DNA, 25 bp, Homo sapien
caacatgtgggctcttgagtcttca

SEQ ID NO: 3140410 - DNA, 25 bp, Homo sapien
ataatgttctagaagcaactgaacc

SEQ ID NO: 3140411 - DNA, 25 bp, Homo sapien
aataatgttctagaagcaactgaac

SEQ ID NO: 3140412 - DNA, 25 bp, Homo sapien
aaatgaagactgtgaagagagtcag

SEQ ID NO: 3140413 - DNA, 25 bp, Homo sapien
actgtgaagagagtcagttattgca

SEQ ID NO: 3140414 - DNA, 25 bp, Homo sapien
gaagactgtgaagagagtcagttat

SEQ ID NO: 3140415 - DNA, 25 bp, Homo sapien
gactgtgaagagagtcagttattgc

SEQ ID NO: 3140416 - DNA, 25 bp, Homo sapien
cagaagttggtgatgtgaagtgtat

SEQ ID NO: 3140417 - DNA, 25 bp, Homo sapien
gaagttggtgatgtgaagtgtataa

SEQ ID NO: 3140418 - DNA, 25 bp, Homo sapien
aattttgcagggagagtatgttggg

SEQ ID NO: 3140419 - DNA, 25 bp, Homo sapien
gggtgtttattcagaagttggtgat

SEQ ID NO: 3140420 - DNA, 25 bp, Homo sapien
gcatactttgccagtgcactaatct

SEQ ID NO: 3140421 - DNA, 25 bp, Homo sapien
gtgttttcggtatgtgctgtccaca

SEQ ID NO: 3140422 - DNA, 25 bp, Homo sapien
cagctctccactgtaatctgcatac

SEQ ID NO: 3140423 - DNA, 25 bp, Homo sapien
tgcaagactggggtgttttcggtat

SEQ ID NO: 3140424 - DNA, 25 bp, Homo sapien
gggactcctctttggctccttgaag

SEQ ID NO: 3140425 - DNA, 25 bp, Homo sapien
tggaagtgaagcatgcaggtgacca

SEQ ID NO: 3140426 - DNA, 25 bp, Homo sapien
tttgctgcttagagatggaagtgaa

SEQ ID NO: 3140427 - DNA, 25 bp, Homo sapien
gaccatgctgcaagttttctggacc

SEQ ID NO: 3140428 - DNA, 25 bp, Homo sapien
tgtggctcctaagactggccctggc

SEQ ID NO: 3140429 - DNA, 25 bp, Homo sapien
cagctgagttgatgcggcaggtcaa

SEQ ID NO: 3140430 - DNA, 25 bp, Homo sapien
gctccagctccgaataaacccaagt

SEQ ID NO: 3140431 - DNA, 25 bp, Homo sapien
ccctggcgtggtgtgaaagaaccct

SEQ ID NO: 3140432 - DNA, 25 bp, Homo sapien
ggtaggttgatgaaacaaactctga

SEQ ID NO: 3140433 - DNA, 25 bp, Homo sapien
tgctcagaggtaggttgatgaaaca

SEQ ID NO: 3140434 - DNA, 25 bp, Homo sapien
cagtagtgctcagaggtaggttgat

SEQ ID NO: 3140435 - DNA, 25 bp, Homo sapien
tcagaggtaggttgatgaaacaaac

SEQ ID NO: 3140436 - DNA, 25 bp, Homo sapien
tattgtttcaatgttgccagatcag

SEQ ID NO: 3140437 - DNA, 25 bp, Homo sapien
gcagcagttggatatcctgccatct

SEQ ID NO: 3140438 - DNA, 25 bp, Homo sapien
tgcacacgtggcagctcagttgagc

SEQ ID NO: 3140439 - DNA, 25 bp, Homo sapien
tgccagatcagttatactacaggac

SEQ ID NO: 3140440 - DNA, 25 bp, Homo sapien
ttacttccatttccgtgtcacaaag

SEQ ID NO: 3140441 - DNA, 25 bp, Homo sapien
catggcttttccactcaatcttttc

SEQ ID NO: 3140442 - DNA, 25 bp, Homo sapien
caaaaggtcctctaaaactggatag

SEQ ID NO: 3140443 - DNA, 25 bp, Homo sapien
ccttcatggcttttccactcaatct

SEQ ID NO: 3140444 - DNA, 25 bp, Homo sapien
tgttgacacagttgtcgttgttttt

SEQ ID NO: 3140445 - DNA, 25 bp, Homo sapien
ttattgttgacacagttgtcgttgt

SEQ ID NO: 3140446 - DNA, 25 bp, Homo sapien
ctttatctttgcgattgctatttat

SEQ ID NO: 3140447 - DNA, 25 bp, Homo sapien
tctttgcgattgctatttattgttg

SEQ ID NO: 3140448 - DNA, 25 bp, Homo sapien
gaaacagcagctttaaagtgctttg

SEQ ID NO: 3140449 - DNA, 25 bp, Homo sapien
acagcagctttaaagtgctttgcca

SEQ ID NO: 3140450 - DNA, 25 bp, Homo sapien
acgacactctagaggagttcactga

SEQ ID NO: 3140451 - DNA, 25 bp, Homo sapien
ttatttgaacgacactctagaggag

SEQ ID NO: 3140452 - DNA, 25 bp, Homo sapien
gatctgcatgcagcctaagttggcc

SEQ ID NO: 3140453 - DNA, 25 bp, Homo sapien
ataatgggatctgcatgcagcctaa

SEQ ID NO: 3140454 - DNA, 25 bp, Homo sapien
tgcatgcagcctaagttggccagca

SEQ ID NO: 3140455 - DNA, 25 bp, Homo sapien
tgggatctgcatgcagcctaagttg

SEQ ID NO: 3140456 - DNA, 25 bp, Homo sapien
cctatcacgaagagcctttggataa

SEQ ID NO: 3140457 - DNA, 25 bp, Homo sapien
aaccagtgaaaaccagaggtgtcca

SEQ ID NO: 3140458 - DNA, 25 bp, Homo sapien
tgaaaaccagaggtgtccagtgcat

SEQ ID NO: 3140459 - DNA, 25 bp, Homo sapien
ccagtgaaaaccagaggtgtccagt

SEQ ID NO: 3140460 - DNA, 25 bp, Homo sapien
gagagaaagctgatatgggactgtc

SEQ ID NO: 3140461 - DNA, 25 bp, Homo sapien
gaaagctgatatgggactgtccagt

SEQ ID NO: 3140462 - DNA, 25 bp, Homo sapien
gagaaagctgatatgggactgtcca

SEQ ID NO: 3140463 - DNA, 25 bp, Homo sapien
caagagagaaagctgatatgggact

SEQ ID NO: 3140464 - DNA, 25 bp, Homo sapien
taaaggtatgcagattgaggtagca

SEQ ID NO: 3140465 - DNA, 25 bp, Homo sapien
tcatcatggactagggactggcagt

SEQ ID NO: 3140466 - DNA, 25 bp, Homo sapien
tgttcttccagaattagttgggcca

SEQ ID NO: 3140467 - DNA, 25 bp, Homo sapien
tgtatttccatcgatcagcagtgac

SEQ ID NO: 3140468 - DNA, 25 bp, Homo sapien
tctgcaatcataatcatctgggtag

SEQ ID NO: 3140469 - DNA, 25 bp, Homo sapien
gagattctggccatcacaggaacag

SEQ ID NO: 3140470 - DNA, 25 bp, Homo sapien
actctgaatgcataatactctcccc

SEQ ID NO: 3140471 - DNA, 25 bp, Homo sapien
atactctcccctttacttgccatgg

SEQ ID NO: 3140472 - DNA, 25 bp, Homo sapien
tggcaaattccagcgtgccctttgc

SEQ ID NO: 3140473 - DNA, 25 bp, Homo sapien
tctgtgcatagatactgatagtggt

SEQ ID NO: 3140474 - DNA, 25 bp, Homo sapien
tgtgtgagccgccagcataacttgc

SEQ ID NO: 3140475 - DNA, 25 bp, Homo sapien
aatagttacccacattgagcatctg

SEQ ID NO: 3140476 - DNA, 25 bp, Homo sapien
gaatctacccatgtggaacctgtag

SEQ ID NO: 3140477 - DNA, 25 bp, Homo sapien
gaacccataggtaaactgcattgct

SEQ ID NO: 3140478 - DNA, 25 bp, Homo sapien
ggtagattgaatccacccatgcaga

SEQ ID NO: 3140479 - DNA, 25 bp, Homo sapien
gagtgtattaatgcagagcctgtag

SEQ ID NO: 3140480 - DNA, 25 bp, Homo sapien
gtaaaatgatgtctggattcctaag

SEQ ID NO: 3140481 - DNA, 25 bp, Homo sapien
caagtacagttctgtggactgccac

SEQ ID NO: 3140482 - DNA, 25 bp, Homo sapien
tggtcaactctgatgatgtcaaaac

SEQ ID NO: 3140483 - DNA, 25 bp, Homo sapien
cctaaggaccttccacagtttaatg

SEQ ID NO: 3140484 - DNA, 25 bp, Homo sapien
gcaagttgagttcatggagtaggtt

SEQ ID NO: 3140485 - DNA, 25 bp, Homo sapien
tgttgtaagcctgcaagttgagttc

SEQ ID NO: 3140486 - DNA, 25 bp, Homo sapien
tacaagccttgttgtaagcctgcaa

SEQ ID NO: 3140487 - DNA, 25 bp, Homo sapien
tcattctgataggatagaagtttga

SEQ ID NO: 3140488 - DNA, 25 bp, Homo sapien
cacagtgaatgtgaaatgggcccag

SEQ ID NO: 3140489 - DNA, 25 bp, Homo sapien
gggcaaagcctgttcaataacatcc

SEQ ID NO: 3140490 - DNA, 25 bp, Homo sapien
tgggcccagatggaaacatctattc

SEQ ID NO: 3140491 - DNA, 25 bp, Homo sapien
gcataagttctttggacagtacctg

SEQ ID NO: 3140492 - DNA, 25 bp, Homo sapien
aagcctttgtcatggtagttccctc

SEQ ID NO: 3140493 - DNA, 25 bp, Homo sapien
caataatgccgtaaactaaacctct

SEQ ID NO: 3140494 - DNA, 25 bp, Homo sapien
tcaacaacagttgtagacaaaccca

SEQ ID NO: 3140495 - DNA, 25 bp, Homo sapien
gacaaacccattattgactgaaaag

SEQ ID NO: 3140496 - DNA, 25 bp, Homo sapien
catctgttagtatggcatggtgcct

SEQ ID NO: 3140497 - DNA, 25 bp, Homo sapien
tttacaagttggtaagcctgttcca

SEQ ID NO: 3140498 - DNA, 25 bp, Homo sapien
taaggacagacagctgtttgggcat

SEQ ID NO: 3140499 - DNA, 25 bp, Homo sapien
tcattcatggtcttttggttgtgaa

SEQ ID NO: 3140500 - DNA, 25 bp, Homo sapien
tccctcaggcccatttctagctttc

SEQ ID NO: 3140501 - DNA, 25 bp, Homo sapien
gatacttttaggcacattctccctc

SEQ ID NO: 3140502 - DNA, 25 bp, Homo sapien
gatctctcagtgctacacaggtttt

SEQ ID NO: 3140503 - DNA, 25 bp, Homo sapien
tctacctgagtaattttagcaaagc

SEQ ID NO: 3140504 - DNA, 25 bp, Homo sapien
cctgttgttgcttttcaccccatct

SEQ ID NO: 3140505 - DNA, 25 bp, Homo sapien
ctctgctgctatctgccacccttgc

SEQ ID NO: 3140506 - DNA, 25 bp, Homo sapien
tgttgcttttcaccccatctatcat

SEQ ID NO: 3140507 - DNA, 25 bp, Homo sapien
tgttgttgcttttcaccccatctat

SEQ ID NO: 3140508 - DNA, 25 bp, Homo sapien
tgcaaaggtgaaaaactatggccct

SEQ ID NO: 3140509 - DNA, 25 bp, Homo sapien
ctgggtaccatggtggcttctgcca

SEQ ID NO: 3140510 - DNA, 25 bp, Homo sapien
ctggagataaaggatacaggtgtcc

SEQ ID NO: 3140511 - DNA, 25 bp, Homo sapien
aaggatacaggtgtcctctgtagag

SEQ ID NO: 3140512 - DNA, 25 bp, Homo sapien
ctgggatctgcaacactggaaactg

SEQ ID NO: 3140513 - DNA, 25 bp, Homo sapien
gagcttcaggaattctacagagggt

SEQ ID NO: 3140514 - DNA, 25 bp, Homo sapien
catcttttaaactcgggaagctggg

SEQ ID NO: 3140515 - DNA, 25 bp, Homo sapien
ctgggtagcccatggtttcaagagc

SEQ ID NO: 3140516 - DNA, 25 bp, Homo sapien
tgtaggatgtttcaaggttgcctga

SEQ ID NO: 3140517 - DNA, 25 bp, Homo sapien
tgtttcaaggttgcctgagataggt

SEQ ID NO: 3140518 - DNA, 25 bp, Homo sapien
gagtcttgacaatagtgtaggatgt

SEQ ID NO: 3140519 - DNA, 25 bp, Homo sapien
ttaatgaacagggatgtccgtggag

SEQ ID NO: 3140520 - DNA, 25 bp, Homo sapien
gtccgcctgctacagttgtaaatta

SEQ ID NO: 3140521 - DNA, 25 bp, Homo sapien
atgagatcagtgtgcttcatatcaa

SEQ ID NO: 3140522 - DNA, 25 bp, Homo sapien
ttccattagaaaggatctgacggtc

SEQ ID NO: 3140523 - DNA, 25 bp, Homo sapien
ggaggcaagcttggtctgacttcat

SEQ ID NO: 3140524 - DNA, 25 bp, Homo sapien
atggcaccagctgcacagttctttg

SEQ ID NO: 3140525 - DNA, 25 bp, Homo sapien
tggcactcacaactaacatgcttta

SEQ ID NO: 3140526 - DNA, 25 bp, Homo sapien
tagcatctgtagaaaatatgttggc

SEQ ID NO: 3140527 - DNA, 25 bp, Homo sapien
aatagtgctaattataaacattgtc

SEQ ID NO: 3140528 - DNA, 25 bp, Homo sapien
cattgtctataatagagctttgtca

SEQ ID NO: 3140529 - DNA, 25 bp, Homo sapien
ggaaaccccatttgatgtcatcatt

SEQ ID NO: 3140530 - DNA, 25 bp, Homo sapien
gagccaacattctgattaatattca

SEQ ID NO: 3140531 - DNA, 25 bp, Homo sapien
aggtattggaaaccccatttgatgt

SEQ ID NO: 3140532 - DNA, 25 bp, Homo sapien
tgtcatcattgcagagccaacattc

SEQ ID NO: 3140533 - DNA, 25 bp, Homo sapien
gagctatgtctatggtcatcattaa

SEQ ID NO: 3140534 - DNA, 25 bp, Homo sapien
ttaacacattctatgcaagactgct

SEQ ID NO: 3140535 - DNA, 25 bp, Homo sapien
gcaggtgtagccgatatgactggat

SEQ ID NO: 3140536 - DNA, 25 bp, Homo sapien
actgcttagatctctggaaacaggc

SEQ ID NO: 3140537 - DNA, 25 bp, Homo sapien
ttagatttctatactctggagtctt

SEQ ID NO: 3140538 - DNA, 25 bp, Homo sapien
agatttctatactctggagtcttac

SEQ ID NO: 3140539 - DNA, 25 bp, Homo sapien
tagatttctatactctggagtctta

SEQ ID NO: 3140540 - DNA, 25 bp, Homo sapien
gcaacacaggtttaccgaacaaaca

SEQ ID NO: 3140541 - DNA, 25 bp, Homo sapien
ccgcttacagactgggtaagtttag

SEQ ID NO: 3140542 - DNA, 25 bp, Homo sapien
aaaacggacggaggcggctctacag

SEQ ID NO: 3140543 - DNA, 25 bp, Homo sapien
atgtcattgttagcgcaggaacggg

SEQ ID NO: 3140544 - DNA, 25 bp, Homo sapien
ttcataaattatcttggaacaactt

SEQ ID NO: 3140545 - DNA, 25 bp, Homo sapien
caataaatgatgtgattcatggatt

SEQ ID NO: 3140546 - DNA, 25 bp, Homo sapien
gatgtgattcatggatttaacataa

SEQ ID NO: 3140547 - DNA, 25 bp, Homo sapien
aaatgatgtgattcatggatttaac

SEQ ID NO: 3140548 - DNA, 25 bp, Homo sapien
aatgaggactccttattacagcagc

SEQ ID NO: 3140549 - DNA, 25 bp, Homo sapien
tgtatcaagatggaggaccactgga

SEQ ID NO: 3140550 - DNA, 25 bp, Homo sapien
tgtccaccctttctgtataagtgat

SEQ ID NO: 3140551 - DNA, 25 bp, Homo sapien
tctgtataagtgatactggagcatg

SEQ ID NO: 3140552 - DNA, 25 bp, Homo sapien
ttttcattctgggtcagtgctaagt

SEQ ID NO: 3140553 - DNA, 25 bp, Homo sapien
cttttcattctgggtcagtgctaag

SEQ ID NO: 3140554 - DNA, 25 bp, Homo sapien
tcagtgctaagtaatacatcatgca

SEQ ID NO: 3140555 - DNA, 25 bp, Homo sapien
ggtcagtgctaagtaatacatcatg

SEQ ID NO: 3140556 - DNA, 25 bp, Homo sapien
ttttctgctaaaaatcgtgtaggaa

SEQ ID NO: 3140557 - DNA, 25 bp, Homo sapien
ggagtggtcgtggagaaatttggaa

SEQ ID NO: 3140558 - DNA, 25 bp, Homo sapien
gtaggaagaatgtgactactaaaga

SEQ ID NO: 3140559 - DNA, 25 bp, Homo sapien
tactaaagaataaacttgagactgg

SEQ ID NO: 3140560 - DNA, 25 bp, Homo sapien
gaacagcgatacaattcttcccaat

SEQ ID NO: 3140561 - DNA, 25 bp, Homo sapien
tgggatactcaagaacagcgataca

SEQ ID NO: 3140562 - DNA, 25 bp, Homo sapien
ctgtagaattagtagtcaacaaact

SEQ ID NO: 3140563 - DNA, 25 bp, Homo sapien
tattttgacagcgaccatctatggg

SEQ ID NO: 3140564 - DNA, 25 bp, Homo sapien
gtatctatgtgtaatcttgaaaaat

SEQ ID NO: 3140565 - DNA, 25 bp, Homo sapien
ctatgtgtaatcttgaaaaatacat

SEQ ID NO: 3140566 - DNA, 25 bp, Homo sapien
tgtatctatgtgtaatcttgaaaaa

SEQ ID NO: 3140567 - DNA, 25 bp, Homo sapien
atctatgtgtaatcttgaaaaatac

SEQ ID NO: 3140568 - DNA, 25 bp, Homo sapien
tcaatcgattaattatgcaaggtcc

SEQ ID NO: 3140569 - DNA, 25 bp, Homo sapien
gatgaatttgcgacagctttctccc

SEQ ID NO: 3140570 - DNA, 25 bp, Homo sapien
gatggaactcagttacaactcgggc

SEQ ID NO: 3140571 - DNA, 25 bp, Homo sapien
gcaaggtcctgttatcaagttcttc

SEQ ID NO: 3140572 - DNA, 25 bp, Homo sapien
gcttttttgagaaacctgcaagctt

SEQ ID NO: 3140573 - DNA, 25 bp, Homo sapien
tttccaagattgttataagctggct

SEQ ID NO: 3140574 - DNA, 25 bp, Homo sapien
ttttgagaaacctgcaagcttttcc

SEQ ID NO: 3140575 - DNA, 25 bp, Homo sapien
gagaaacctgcaagcttttccaaga

SEQ ID NO: 3140576 - DNA, 25 bp, Homo sapien
tcaattatgaggcacaatttctatc

SEQ ID NO: 3140577 - DNA, 25 bp, Homo sapien
caaaatatcaattatgaggcacaat

SEQ ID NO: 3140578 - DNA, 25 bp, Homo sapien
tatgaggcacaatttctatcttggt

SEQ ID NO: 3140579 - DNA, 25 bp, Homo sapien
acttcatggaatcctcaaaatatca

SEQ ID NO: 3140580 - DNA, 25 bp, Homo sapien
atagggatcctgtttacacttggcc

SEQ ID NO: 3140581 - DNA, 25 bp, Homo sapien
ttaatagggatcctgtttacacttg

SEQ ID NO: 3140582 - DNA, 25 bp, Homo sapien
tagggatcctgtttacacttggcct

SEQ ID NO: 3140583 - DNA, 25 bp, Homo sapien
aatagggatcctgtttacacttggc

SEQ ID NO: 3140584 - DNA, 25 bp, Homo sapien
acaataacagagttaagaatattca

SEQ ID NO: 3140585 - DNA, 25 bp, Homo sapien
gataagatgcagcaaaaattatcat

SEQ ID NO: 3140586 - DNA, 25 bp, Homo sapien
caagaattagtcagctatggaagcg

SEQ ID NO: 3140587 - DNA, 25 bp, Homo sapien
ttagaagataaagtgtcagtgaaga

SEQ ID NO: 3140588 - DNA, 25 bp, Homo sapien
ccagtttctaacaacattgagtatt

SEQ ID NO: 3140589 - DNA, 25 bp, Homo sapien
taaattggacattaaattggattgc

SEQ ID NO: 3140590 - DNA, 25 bp, Homo sapien
tggttataattcctaagtcaaatat

SEQ ID NO: 3140591 - DNA, 25 bp, Homo sapien
ggagttttggatgttctttacatac

SEQ ID NO: 3140592 - DNA, 25 bp, Homo sapien
tggcttctcacacctgggggcatgc

SEQ ID NO: 3140593 - DNA, 25 bp, Homo sapien
tctggcttctcacacctgggggcat

SEQ ID NO: 3140594 - DNA, 25 bp, Homo sapien
tcctttgaccccacgattttcagag

SEQ ID NO: 3140595 - DNA, 25 bp, Homo sapien
ctcctttgaccccacgattttcaga

SEQ ID NO: 3140596 - DNA, 25 bp, Homo sapien
cctgaaatcatcatgataataatca

SEQ ID NO: 3140597 - DNA, 25 bp, Homo sapien
tgctacttttatccaggctcctgaa

SEQ ID NO: 3140598 - DNA, 25 bp, Homo sapien
ataatcataaacacaattcaagcat

SEQ ID NO: 3140599 - DNA, 25 bp, Homo sapien
ggctcctgaaatcatcatgataata

SEQ ID NO: 3140600 - DNA, 25 bp, Homo sapien
tgtacctcgaaaaatgaagtatacc

SEQ ID NO: 3140601 - DNA, 25 bp, Homo sapien
ctaagctacaaattgggaatgtctt

SEQ ID NO: 3140602 - DNA, 25 bp, Homo sapien
caagtcgttttaaatgtgcatgtac

SEQ ID NO: 3140603 - DNA, 25 bp, Homo sapien
ttacaagtaagctggaaactgcctc

SEQ ID NO: 3140604 - DNA, 25 bp, Homo sapien
tattaactcgatgttattgttcaga

SEQ ID NO: 3140605 - DNA, 25 bp, Homo sapien
tattgttcagatcatttttggccat

SEQ ID NO: 3140606 - DNA, 25 bp, Homo sapien
actttttctgatttccgaagatatt

SEQ ID NO: 3140607 - DNA, 25 bp, Homo sapien
taactcgatgttattgttcagatca

SEQ ID NO: 3140608 - DNA, 25 bp, Homo sapien
ctccagtggttgactgattagagac

SEQ ID NO: 3140609 - DNA, 25 bp, Homo sapien
tagagacaatcttatgtaacatgac

SEQ ID NO: 3140610 - DNA, 25 bp, Homo sapien
gagacaatcttatgtaacatgactt

SEQ ID NO: 3140611 - DNA, 25 bp, Homo sapien
ttatctgactccagtggttgactga

SEQ ID NO: 3140612 - DNA, 25 bp, Homo sapien
gagctttggatttagaagccctccc

SEQ ID NO: 3140613 - DNA, 25 bp, Homo sapien
taaaaattgtcggtattcttagtgc

SEQ ID NO: 3140614 - DNA, 25 bp, Homo sapien
tcggtattcttagtgcagatttaaa

SEQ ID NO: 3140615 - DNA, 25 bp, Homo sapien
tagggctttcccatcactctctgga

SEQ ID NO: 3140616 - DNA, 25 bp, Homo sapien
catagtttcgaatctgtgtcctaga

SEQ ID NO: 3140617 - DNA, 25 bp, Homo sapien
ttcacccaaattatgagcatagaca

SEQ ID NO: 3140618 - DNA, 25 bp, Homo sapien
gagcatagacatagtttcgaatctg

SEQ ID NO: 3140619 - DNA, 25 bp, Homo sapien
gtgtcctagatatggagaacttcat

SEQ ID NO: 3140620 - DNA, 25 bp, Homo sapien
ggttaccatacatgtcaggcttcat

SEQ ID NO: 3140621 - DNA, 25 bp, Homo sapien
tcttcacttcacactggttaccata

SEQ ID NO: 3140622 - DNA, 25 bp, Homo sapien
gagacaaacttgtcttcacttcaca

SEQ ID NO: 3140623 - DNA, 25 bp, Homo sapien
catgttcaaacctgcattacccttg

SEQ ID NO: 3140624 - DNA, 25 bp, Homo sapien
cagagagcagtcgaattaattggtg

SEQ ID NO: 3140625 - DNA, 25 bp, Homo sapien
ttcaagtggatcagagagcagtcga

SEQ ID NO: 3140626 - DNA, 25 bp, Homo sapien
taattggtgcttctctgaaccaaat

SEQ ID NO: 3140627 - DNA, 25 bp, Homo sapien
gcagtcgaattaattggtgcttctc

SEQ ID NO: 3140628 - DNA, 25 bp, Homo sapien
aaaccttgtaggacattcacactca

SEQ ID NO: 3140629 - DNA, 25 bp, Homo sapien
aaccttgtaggacattcacactcat

SEQ ID NO: 3140630 - DNA, 25 bp, Homo sapien
cttgtaggacattcacactcatttt

SEQ ID NO: 3140631 - DNA, 25 bp, Homo sapien
gtaggacattcacactcattttatt

SEQ ID NO: 3140632 - DNA, 25 bp, Homo sapien
tgagggcctgatcttcacttccaag

SEQ ID NO: 3140633 - DNA, 25 bp, Homo sapien
gtcctgcaggttgaaaaatccaaga

SEQ ID NO: 3140634 - DNA, 25 bp, Homo sapien
aagtgtctcttaaggtcttcagccc

SEQ ID NO: 3140635 - DNA, 25 bp, Homo sapien
tgaaccctcgacttctgaggcatga

SEQ ID NO: 3140636 - DNA, 25 bp, Homo sapien
gatttgggccattttaacagatgca

SEQ ID NO: 3140637 - DNA, 25 bp, Homo sapien
tagtatcatacaggaatcgttcagc

SEQ ID NO: 3140638 - DNA, 25 bp, Homo sapien
ggctaactgcatagatgtgctcatg

SEQ ID NO: 3140639 - DNA, 25 bp, Homo sapien
gaattagcctatgagttagaccgag

SEQ ID NO: 3140640 - DNA, 25 bp, Homo sapien
taaccactagcctgcagaataggaa

SEQ ID NO: 3140641 - DNA, 25 bp, Homo sapien
gataacttggtacaggctaactgaa

SEQ ID NO: 3140642 - DNA, 25 bp, Homo sapien
ctgagaatagcgtttctcatttaac

SEQ ID NO: 3140643 - DNA, 25 bp, Homo sapien
agaatagcgtttctcatttaaccca

SEQ ID NO: 3140644 - DNA, 25 bp, Homo sapien
gagaatagcgtttctcatttaaccc

SEQ ID NO: 3140645 - DNA, 25 bp, Homo sapien
tgagaatagcgtttctcatttaacc

SEQ ID NO: 3140646 - DNA, 25 bp, Homo sapien
tcaccacttcgttgatggcagaacg

SEQ ID NO: 3140647 - DNA, 25 bp, Homo sapien
gatgtgcttgtgaatattgatggtg

SEQ ID NO: 3140648 - DNA, 25 bp, Homo sapien
ccatggatgtgcttgtgaatattga

SEQ ID NO: 3140649 - DNA, 25 bp, Homo sapien
ctccatggatgtgcttgtgaatatt

SEQ ID NO: 3140650 - DNA, 25 bp, Homo sapien
gcaaattcctgaatctctttgagtg

SEQ ID NO: 3140651 - DNA, 25 bp, Homo sapien
tgagcctggtatcaatgcacacatc

SEQ ID NO: 3140652 - DNA, 25 bp, Homo sapien
acacatctggagttcccgtctcctt

SEQ ID NO: 3140653 - DNA, 25 bp, Homo sapien
ccgtctccttcatggcaaattcctg

SEQ ID NO: 3140654 - DNA, 25 bp, Homo sapien
tctcatccaaattgactgtgtgtag

SEQ ID NO: 3140655 - DNA, 25 bp, Homo sapien
tcatccaaattgactgtgtgtagat

SEQ ID NO: 3140656 - DNA, 25 bp, Homo sapien
tccaaattgactgtgtgtagatttc

SEQ ID NO: 3140657 - DNA, 25 bp, Homo sapien
gttctcatccaaattgactgtgtgt

SEQ ID NO: 3140658 - DNA, 25 bp, Homo sapien
gagataaacccttttaggcattgga

SEQ ID NO: 3140659 - DNA, 25 bp, Homo sapien
ggacgtgctcttagacccaaattca

SEQ ID NO: 3140660 - DNA, 25 bp, Homo sapien
tggtccacagagatagccaatttcc

SEQ ID NO: 3140661 - DNA, 25 bp, Homo sapien
gcgtgtccttccagatcctattgtc

SEQ ID NO: 3140662 - DNA, 25 bp, Homo sapien
cagccaatttctcttgcttagcaca

SEQ ID NO: 3140663 - DNA, 25 bp, Homo sapien
caagctgacttgtcttggcttgctg

SEQ ID NO: 3140664 - DNA, 25 bp, Homo sapien
caatttctcttgcttagcacaggaa

SEQ ID NO: 3140665 - DNA, 25 bp, Homo sapien
cttggcttgctgtctctccaaatcc

SEQ ID NO: 3140666 - DNA, 25 bp, Homo sapien
cacataattatatggtttgccttta

SEQ ID NO: 3140667 - DNA, 25 bp, Homo sapien
taattatatggtttgcctttagcca

SEQ ID NO: 3140668 - DNA, 25 bp, Homo sapien
tatatggtttgcctttagccaggct

SEQ ID NO: 3140669 - DNA, 25 bp, Homo sapien
ggtttgcctttagccaggcttatgc

SEQ ID NO: 3140670 - DNA, 25 bp, Homo sapien
ctgctgtggagttgaactcctctgt

SEQ ID NO: 3140671 - DNA, 25 bp, Homo sapien
tctgtcgagtccatatccctaaggg

SEQ ID NO: 3140672 - DNA, 25 bp, Homo sapien
tgacattctgacatattctgcccgc

SEQ ID NO: 3140673 - DNA, 25 bp, Homo sapien
tatccctaagggatcataagctttt

SEQ ID NO: 3140674 - DNA, 25 bp, Homo sapien
tcactgggggatatctcagacttcc

SEQ ID NO: 3140675 - DNA, 25 bp, Homo sapien
ttatcttttgatgttcccgtggaag

SEQ ID NO: 3140676 - DNA, 25 bp, Homo sapien
ctagggctttgttcccatattatct

SEQ ID NO: 3140677 - DNA, 25 bp, Homo sapien
gaagaggtgaatacttgcaacacca

SEQ ID NO: 3140678 - DNA, 25 bp, Homo sapien
tgttgttcataagaacctgaatctt

SEQ ID NO: 3140679 - DNA, 25 bp, Homo sapien
tactctaggtatgtgaacataagca

SEQ ID NO: 3140680 - DNA, 25 bp, Homo sapien
cccaaaggtcattatccagtcacag

SEQ ID NO: 3140681 - DNA, 25 bp, Homo sapien
tctccacaactgcttatactctagg

SEQ ID NO: 3140682 - DNA, 25 bp, Homo sapien
ctctttgtgtggtagttgttggaat

SEQ ID NO: 3140683 - DNA, 25 bp, Homo sapien
accttagtgcgtgcttagacttggg

SEQ ID NO: 3140684 - DNA, 25 bp, Homo sapien
ccaagtttaggttcagaggtctgta

SEQ ID NO: 3140685 - DNA, 25 bp, Homo sapien
aaaatttgctcaagccggccgggcg

SEQ ID NO: 3140686 - DNA, 25 bp, Homo sapien
tcaagaccattcaggaaaacgtgat

SEQ ID NO: 3140687 - DNA, 25 bp, Homo sapien
tcactaaataagtcaccagggccca

SEQ ID NO: 3140688 - DNA, 25 bp, Homo sapien
aattctggagctaaggctggacacg

SEQ ID NO: 3140689 - DNA, 25 bp, Homo sapien
cagggcccagttctagagatacaga

SEQ ID NO: 3140690 - DNA, 25 bp, Homo sapien
taaaccgtaaactgtctgtaggcca

SEQ ID NO: 3140691 - DNA, 25 bp, Homo sapien
ctagtcacatgctcgattaaggaac

SEQ ID NO: 3140692 - DNA, 25 bp, Homo sapien
ttttgtggccatcttctagaatagc

SEQ ID NO: 3140693 - DNA, 25 bp, Homo sapien
gctctttattagcaaggcttctgtg

SEQ ID NO: 3140694 - DNA, 25 bp, Homo sapien
tattccacatggctagagataatgc

SEQ ID NO: 3140695 - DNA, 25 bp, Homo sapien
taatctgacgttcaaagacacaaga

SEQ ID NO: 3140696 - DNA, 25 bp, Homo sapien
tagagacggtcattctgagcaggaa

SEQ ID NO: 3140697 - DNA, 25 bp, Homo sapien
tgtgcaatgcactgagaactcttct

SEQ ID NO: 3140698 - DNA, 25 bp, Homo sapien
tgggctattgcaaaattttctagct

SEQ ID NO: 3140699 - DNA, 25 bp, Homo sapien
ttttctagcttgtcaacttgacact

SEQ ID NO: 3140700 - DNA, 25 bp, Homo sapien
tgtcaacttgacactcatctcttct

SEQ ID NO: 3140701 - DNA, 25 bp, Homo sapien
tctagcttgtcaacttgacactcat

SEQ ID NO: 3140702 - DNA, 25 bp, Homo sapien
catagttcatcccttcactggctgt

SEQ ID NO: 3140703 - DNA, 25 bp, Homo sapien
tagacaaggacgtaaaagtgggaca

SEQ ID NO: 3140704 - DNA, 25 bp, Homo sapien
atctgactgctatgtgaatcttggc

SEQ ID NO: 3140705 - DNA, 25 bp, Homo sapien
taagagatgcccactagtagatatt

SEQ ID NO: 3140706 - DNA, 25 bp, Homo sapien
taaaaactgtgatagctcggtggat

SEQ ID NO: 3140707 - DNA, 25 bp, Homo sapien
atagggcttttacacagttggtggg

SEQ ID NO: 3140708 - DNA, 25 bp, Homo sapien
agaaatagggcttttacacagttgg

SEQ ID NO: 3140709 - DNA, 25 bp, Homo sapien
aaatagggcttttacacagttggtg

SEQ ID NO: 3140710 - DNA, 25 bp, Homo sapien
aatagggcttttacacagttggtgg

SEQ ID NO: 3140711 - DNA, 25 bp, Homo sapien
tgcttaattggtctgtagagactgg

SEQ ID NO: 3140712 - DNA, 25 bp, Homo sapien
cttttgcttaattggtctgtagaga

SEQ ID NO: 3140713 - DNA, 25 bp, Homo sapien
cttaattggtctgtagagactggtc

SEQ ID NO: 3140714 - DNA, 25 bp, Homo sapien
taattggtctgtagagactggtcat

SEQ ID NO: 3140715 - DNA, 25 bp, Homo sapien
ttatgcagaaaagcctgctgagaaa

SEQ ID NO: 3140716 - DNA, 25 bp, Homo sapien
tcagatatcattatgcagaaaagcc

SEQ ID NO: 3140717 - DNA, 25 bp, Homo sapien
gatatcattatgcagaaaagcctgc

SEQ ID NO: 3140718 - DNA, 25 bp, Homo sapien
tatcattatgcagaaaagcctgctg

SEQ ID NO: 3140719 - DNA, 25 bp, Homo sapien
tgtttcttgaacagctgtgtcagta

SEQ ID NO: 3140720 - DNA, 25 bp, Homo sapien
cagctgtgtcagtatgtccatgatc

SEQ ID NO: 3140721 - DNA, 25 bp, Homo sapien
acagcaaaggtaaggatagtgtttc

SEQ ID NO: 3140722 - DNA, 25 bp, Homo sapien
tcataaaaggatcagacagcaaagg

SEQ ID NO: 3140723 - DNA, 25 bp, Homo sapien
gtagcacttcagcaaacttctccat

SEQ ID NO: 3140724 - DNA, 25 bp, Homo sapien
cctggactgtagcacttcagcaaac

SEQ ID NO: 3140725 - DNA, 25 bp, Homo sapien
gactgtagcacttcagcaaacttct

SEQ ID NO: 3140726 - DNA, 25 bp, Homo sapien
tattcctggactgtagcacttcagc

SEQ ID NO: 3140727 - DNA, 25 bp, Homo sapien
tcccataagtttcagcgttgctcta

SEQ ID NO: 3140728 - DNA, 25 bp, Homo sapien
gctttctagcagttgttgttggcac

SEQ ID NO: 3140729 - DNA, 25 bp, Homo sapien
tcaagtgtgtttcagaggtgctgct

SEQ ID NO: 3140730 - DNA, 25 bp, Homo sapien
cgttgctctagtgggcagctttcta

SEQ ID NO: 3140731 - DNA, 25 bp, Homo sapien
ccacctgtgatgaactagcacgtag

SEQ ID NO: 3140732 - DNA, 25 bp, Homo sapien
tgaactagcacgtagaacagcaata

SEQ ID NO: 3140733 - DNA, 25 bp, Homo sapien
actagcacgtagaacagcaatactt

SEQ ID NO: 3140734 - DNA, 25 bp, Homo sapien
tgtgatgaactagcacgtagaacag

SEQ ID NO: 3140735 - DNA, 25 bp, Homo sapien
cactcttaacctgagtgggcaccat

SEQ ID NO: 3140736 - DNA, 25 bp, Homo sapien
gttagtggactgacagagacagacc

SEQ ID NO: 3140737 - DNA, 25 bp, Homo sapien
gaaaactgcaattgggcctactaag

SEQ ID NO: 3140738 - DNA, 25 bp, Homo sapien
cctactaaggtgagtgagcttatct

SEQ ID NO: 3140739 - DNA, 25 bp, Homo sapien
agtcgagtttctccatctggacagc

SEQ ID NO: 3140740 - DNA, 25 bp, Homo sapien
tatagtcgagtttctccatctggac

SEQ ID NO: 3140741 - DNA, 25 bp, Homo sapien
tttatagtcgagtttctccatctgg

SEQ ID NO: 3140742 - DNA, 25 bp, Homo sapien
ttttttatagtcgagtttctccatc

SEQ ID NO: 3140743 - DNA, 25 bp, Homo sapien
ctcaattatcttctttagctgccca

SEQ ID NO: 3140744 - DNA, 25 bp, Homo sapien
attatcttctttagctgcccatttt

SEQ ID NO: 3140745 - DNA, 25 bp, Homo sapien
tactcaattatcttctttagctgcc

SEQ ID NO: 3140746 - DNA, 25 bp, Homo sapien
caattatcttctttagctgcccatt

SEQ ID NO: 3140747 - DNA, 25 bp, Homo sapien
attatccctgtgagcaccctggcag

SEQ ID NO: 3140748 - DNA, 25 bp, Homo sapien
tagaatgcttgtgataggccctccc

SEQ ID NO: 3140749 - DNA, 25 bp, Homo sapien
tatctgacgatgaacatcatttctg

SEQ ID NO: 3140750 - DNA, 25 bp, Homo sapien
gctccctcccaggtgataattatcc

SEQ ID NO: 3140751 - DNA, 25 bp, Homo sapien
gcagctggccattgtaatgctctgc

SEQ ID NO: 3140752 - DNA, 25 bp, Homo sapien
ctgctgatggtccttgtcacacgtg

SEQ ID NO: 3140753 - DNA, 25 bp, Homo sapien
cattgtaatgctctgctgatggtcc

SEQ ID NO: 3140754 - DNA, 25 bp, Homo sapien
gctgatggtccttgtcacacgtgaa

SEQ ID NO: 3140755 - DNA, 25 bp, Homo sapien
ctatgacaaccaattggaggtccga

SEQ ID NO: 3140756 - DNA, 25 bp, Homo sapien
ggtccgaaggagagcacaccagcat

SEQ ID NO: 3140757 - DNA, 25 bp, Homo sapien
aattggaggtccgaaggagagcaca

SEQ ID NO: 3140758 - DNA, 25 bp, Homo sapien
caaccaattggaggtccgaaggaga

SEQ ID NO: 3140759 - DNA, 25 bp, Homo sapien
cagggatagcaaatgctcctccagg

SEQ ID NO: 3140760 - DNA, 25 bp, Homo sapien
agggatagcaaatgctcctccaggt

SEQ ID NO: 3140761 - DNA, 25 bp, Homo sapien
gggatagcaaatgctcctccaggtt

SEQ ID NO: 3140762 - DNA, 25 bp, Homo sapien
agagaaacttaatttctctggcaga

SEQ ID NO: 3140763 - DNA, 25 bp, Homo sapien
gagaaacttaatttctctggcagat

SEQ ID NO: 3140764 - DNA, 25 bp, Homo sapien
gagtaaacatattaaacttcctctg

SEQ ID NO: 3140765 - DNA, 25 bp, Homo sapien
ggaaaccagtatgattgagtaaaca

SEQ ID NO: 3140766 - DNA, 25 bp, Homo sapien
gctcccacatagtgtgaacagaagt

SEQ ID NO: 3140767 - DNA, 25 bp, Homo sapien
ttttagattttctgccttggcaccc

SEQ ID NO: 3140768 - DNA, 25 bp, Homo sapien
tgagggatccttcacatgcaatgac

SEQ ID NO: 3140769 - DNA, 25 bp, Homo sapien
ggatccttcacatgcaatgacagtc

SEQ ID NO: 3140770 - DNA, 25 bp, Homo sapien
attgagggatccttcacatgcaatg

SEQ ID NO: 3140771 - DNA, 25 bp, Homo sapien
gagggatccttcacatgcaatgaca

SEQ ID NO: 3140772 - DNA, 25 bp, Homo sapien
tgacccatgagattacctactcttt

SEQ ID NO: 3140773 - DNA, 25 bp, Homo sapien
aagagtgtgtcacatatccaagttt

SEQ ID NO: 3140774 - DNA, 25 bp, Homo sapien
cctcttgtggccctaaatcggctaa

SEQ ID NO: 3140775 - DNA, 25 bp, Homo sapien
ctaaatcggctaagagtgtgtcaca

SEQ ID NO: 3140776 - DNA, 25 bp, Homo sapien
cagactgggtatctccaggaatgac

SEQ ID NO: 3140777 - DNA, 25 bp, Homo sapien
tggtcgcttaaaggctagatctaaa

SEQ ID NO: 3140778 - DNA, 25 bp, Homo sapien
cacagtttctccttggtcgcttaaa

SEQ ID NO: 3140779 - DNA, 25 bp, Homo sapien
tagaactgccatcaggttctttagc

SEQ ID NO: 3140780 - DNA, 25 bp, Homo sapien
cattctcgttttgatttaggtaagc

SEQ ID NO: 3140781 - DNA, 25 bp, Homo sapien
gccattctcgttttgatttaggtaa

SEQ ID NO: 3140782 - DNA, 25 bp, Homo sapien
ccattctcgttttgatttaggtaag

SEQ ID NO: 3140783 - DNA, 25 bp, Homo sapien
gtgcatgcaacagggaatcccacag

SEQ ID NO: 3140784 - DNA, 25 bp, Homo sapien
ttgttatggagataaaaagggattc

SEQ ID NO: 3140785 - DNA, 25 bp, Homo sapien
tggccacatgagcacctgtgcatgc

SEQ ID NO: 3140786 - DNA, 25 bp, Homo sapien
ggattccggtattaacaactgatga

SEQ ID NO: 3140787 - DNA, 25 bp, Homo sapien
cttaactccttcctgttgtgcacac

SEQ ID NO: 3140788 - DNA, 25 bp, Homo sapien
catcttaactccttcctgttgtgca

SEQ ID NO: 3140789 - DNA, 25 bp, Homo sapien
tcttaactccttcctgttgtgcaca

SEQ ID NO: 3140790 - DNA, 25 bp, Homo sapien
tcatcttaactccttcctgttgtgc

SEQ ID NO: 3140791 - DNA, 25 bp, Homo sapien
cttcactcccaatttgtgaaccatc

SEQ ID NO: 3140792 - DNA, 25 bp, Homo sapien
aaccagtgcattgctcccaatcctt

SEQ ID NO: 3140793 - DNA, 25 bp, Homo sapien
cactcccaatttgtgaaccatcctt

SEQ ID NO: 3140794 - DNA, 25 bp, Homo sapien
agtgcattgctcccaatccttcact

SEQ ID NO: 3140795 - DNA, 25 bp, Homo sapien
acaagttctgcatgctggattttga

SEQ ID NO: 3140796 - DNA, 25 bp, Homo sapien
caagttctgcatgctggattttgat

SEQ ID NO: 3140797 - DNA, 25 bp, Homo sapien
aattcagacacaatgtggagagata

SEQ ID NO: 3140798 - DNA, 25 bp, Homo sapien
ccttactcatgttccctcctccaaa

SEQ ID NO: 3140799 - DNA, 25 bp, Homo sapien
cctccaaattcagacacaatgtgga

SEQ ID NO: 3140800 - DNA, 25 bp, Homo sapien
tcagacacaatgtggagagatatac

SEQ ID NO: 3140801 - DNA, 25 bp, Homo sapien
gtcctcataatcgtggaagaaggtg

SEQ ID NO: 3140802 - DNA, 25 bp, Homo sapien
gctggcagtcctcataatcgtggaa

SEQ ID NO: 3140803 - DNA, 25 bp, Homo sapien
ggcagtcctcataatcgtggaagaa

SEQ ID NO: 3140804 - DNA, 25 bp, Homo sapien
ggctggcagtcctcataatcgtgga

SEQ ID NO: 3140805 - DNA, 25 bp, Homo sapien
taaaattctagacaagcacaccagc

SEQ ID NO: 3140806 - DNA, 25 bp, Homo sapien
taacttactcatgagttacttctgg

SEQ ID NO: 3140807 - DNA, 25 bp, Homo sapien
actcatgagttacttctggtacttt

SEQ ID NO: 3140808 - DNA, 25 bp, Homo sapien
catgagttacttctggtactttttg

SEQ ID NO: 3140809 - DNA, 25 bp, Homo sapien
gagttacttctggtactttttgaga

SEQ ID NO: 3140810 - DNA, 25 bp, Homo sapien
gtttgatgagcttcccaatgcagaa

SEQ ID NO: 3140811 - DNA, 25 bp, Homo sapien
tgtttgatgagcttcccaatgcaga

SEQ ID NO: 3140812 - DNA, 25 bp, Homo sapien
tgtgtttgatgagcttcccaatgca

SEQ ID NO: 3140813 - DNA, 25 bp, Homo sapien
gatgtgtttgatgagcttcccaatg

SEQ ID NO: 3140814 - DNA, 25 bp, Homo sapien
caagggacccgaagtttgcattcca

SEQ ID NO: 3140815 - DNA, 25 bp, Homo sapien
gaagtttgcattccaggcattgaag

SEQ ID NO: 3140816 - DNA, 25 bp, Homo sapien
caggcattgaagctagcaaagacca

SEQ ID NO: 3140817 - DNA, 25 bp, Homo sapien
ctagcaaagaccaatgtagcaagtc

SEQ ID NO: 3140818 - DNA, 25 bp, Homo sapien
atgtcaggaggaacttggcatcagt

SEQ ID NO: 3140819 - DNA, 25 bp, Homo sapien
gaagaagagatgtaatttcatatgg

SEQ ID NO: 3140820 - DNA, 25 bp, Homo sapien
tcttgctgaagcagttagcagctgc

SEQ ID NO: 3140821 - DNA, 25 bp, Homo sapien
gaagagatgtaatttcatatggtgt

SEQ ID NO: 3140822 - DNA, 25 bp, Homo sapien
ttttttcttgctgaagcagttagca

SEQ ID NO: 3140823 - DNA, 25 bp, Homo sapien
cactggaagttctcgttgctctcag

SEQ ID NO: 3140824 - DNA, 25 bp, Homo sapien
tggaagttctcgttgctctcagtca

SEQ ID NO: 3140825 - DNA, 25 bp, Homo sapien
ctggaagttctcgttgctctcagtc

SEQ ID NO: 3140826 - DNA, 25 bp, Homo sapien
ggaagttctcgttgctctcagtcat

SEQ ID NO: 3140827 - DNA, 25 bp, Homo sapien
cagggtcttctaccagatataagaa

SEQ ID NO: 3140828 - DNA, 25 bp, Homo sapien
ttctccactggctctttccatgttt

SEQ ID NO: 3140829 - DNA, 25 bp, Homo sapien
tttcttacattcacagggtcttcta

SEQ ID NO: 3140830 - DNA, 25 bp, Homo sapien
tctttccatgttttccagggaaaca

SEQ ID NO: 3140831 - DNA, 25 bp, Homo sapien
ttcacgtcttcaaatggaactgaaa

SEQ ID NO: 3140832 - DNA, 25 bp, Homo sapien
tcacgtcttcaaatggaactgaaac

SEQ ID NO: 3140833 - DNA, 25 bp, Homo sapien
agccatgcatgatgcctcttgatct

SEQ ID NO: 3140834 - DNA, 25 bp, Homo sapien
gatgcctcttgatcttctatgtctg

SEQ ID NO: 3140835 - DNA, 25 bp, Homo sapien
gagtttgaacgcatgctgcttttga

SEQ ID NO: 3140836 - DNA, 25 bp, Homo sapien
gagaagctgagtttgaacgcatgct

SEQ ID NO: 3140837 - DNA, 25 bp, Homo sapien
tcactccactctttcagtgctacct

SEQ ID NO: 3140838 - DNA, 25 bp, Homo sapien
ttcactccactctttcagtgctacc

SEQ ID NO: 3140839 - DNA, 25 bp, Homo sapien
cccttcactccactctttcagtgct

SEQ ID NO: 3140840 - DNA, 25 bp, Homo sapien
tccactctttcagtgctaccttcat

SEQ ID NO: 3140841 - DNA, 25 bp, Homo sapien
tggtaatagtacctcgtacattcat

SEQ ID NO: 3140842 - DNA, 25 bp, Homo sapien
gggatatagatctagcactgctgcc

SEQ ID NO: 3140843 - DNA, 25 bp, Homo sapien
tagatctagcactgctgccaaaaca

SEQ ID NO: 3140844 - DNA, 25 bp, Homo sapien
caattttgccgtggggatatagatc

SEQ ID NO: 3140845 - DNA, 25 bp, Homo sapien
gccgtggggatatagatctagcact

SEQ ID NO: 3140846 - DNA, 25 bp, Homo sapien
cagggtgtagtagaagaggataatt

SEQ ID NO: 3140847 - DNA, 25 bp, Homo sapien
agggtgtagtagaagaggataattt

SEQ ID NO: 3140848 - DNA, 25 bp, Homo sapien
tcagggtgtagtagaagaggataat

SEQ ID NO: 3140849 - DNA, 25 bp, Homo sapien
taatcgaagctatagttaagtaagg

SEQ ID NO: 3140850 - DNA, 25 bp, Homo sapien
tcgaagctatagttaagtaaggtaa

SEQ ID NO: 3140851 - DNA, 25 bp, Homo sapien
aacaattggattgctcgtagagaaa

SEQ ID NO: 3140852 - DNA, 25 bp, Homo sapien
ctcgtagagaaaagacagcaggaca

SEQ ID NO: 3140853 - DNA, 25 bp, Homo sapien
actgacttagcaaatcctctctatt

SEQ ID NO: 3140854 - DNA, 25 bp, Homo sapien
ttcagggactgacttagcaaatcct

SEQ ID NO: 3140855 - DNA, 25 bp, Homo sapien
tcagggactgacttagcaaatcctc

SEQ ID NO: 3140856 - DNA, 25 bp, Homo sapien
agggactgacttagcaaatcctctc

SEQ ID NO: 3140857 - DNA, 25 bp, Homo sapien
cattatttgacagtgctctctcatg

SEQ ID NO: 3140858 - DNA, 25 bp, Homo sapien
ttcaattccacagatgtcccttcac

SEQ ID NO: 3140859 - DNA, 25 bp, Homo sapien
tcctgcactgcatttcaattccaca

SEQ ID NO: 3140860 - DNA, 25 bp, Homo sapien
cagtgctctctcatgagttgttcca

SEQ ID NO: 3140861 - DNA, 25 bp, Homo sapien
cagtgtgactgtgtggtagtaataa

SEQ ID NO: 3140862 - DNA, 25 bp, Homo sapien
gaagaatctgtgaacttcctcacac

SEQ ID NO: 3140863 - DNA, 25 bp, Homo sapien
agtaataattttgagaagaaggaag

SEQ ID NO: 3140864 - DNA, 25 bp, Homo sapien
tgactgtgtggtagtaataattttg

SEQ ID NO: 3140865 - DNA, 25 bp, Homo sapien
gaatagtgaaagcagtaaagtatgg

SEQ ID NO: 3140866 - DNA, 25 bp, Homo sapien
gcagtaaagtatggcctggaaatca

SEQ ID NO: 3140867 - DNA, 25 bp, Homo sapien
tcaatgaactgattgacatcagact

SEQ ID NO: 3140868 - DNA, 25 bp, Homo sapien
ttgacatcagactggaactctagac

SEQ ID NO: 3140869 - DNA, 25 bp, Homo sapien
gacacagtaccatcttcgaaatctc

SEQ ID NO: 3140870 - DNA, 25 bp, Homo sapien
ttatttacatgacacagtaccatct

SEQ ID NO: 3140871 - DNA, 25 bp, Homo sapien
tacatgacacagtaccatcttcgaa

SEQ ID NO: 3140872 - DNA, 25 bp, Homo sapien
gtaccatcttcgaaatctccttgat

SEQ ID NO: 3140873 - DNA, 25 bp, Homo sapien
gcagtggtcgtcagttgaatctctg

SEQ ID NO: 3140874 - DNA, 25 bp, Homo sapien
tgaaggcagtggtcgtcagttgaat

SEQ ID NO: 3140875 - DNA, 25 bp, Homo sapien
cttatgtagaaccaagttacttccg

SEQ ID NO: 3140876 - DNA, 25 bp, Homo sapien
ttcttatgtagaaccaagttacttc

SEQ ID NO: 3140877 - DNA, 25 bp, Homo sapien
tggtgacattccagtgcctcgtctt

SEQ ID NO: 3140878 - DNA, 25 bp, Homo sapien
cactgcgagcctggaatagggagat

SEQ ID NO: 3140879 - DNA, 25 bp, Homo sapien
cgtctttcccactgcgagcctggaa

SEQ ID NO: 3140880 - DNA, 25 bp, Homo sapien
ctatcccttccctggtgacattcca

SEQ ID NO: 3140881 - DNA, 25 bp, Homo sapien
gcagagctatgatgtgaacaataat

SEQ ID NO: 3140882 - DNA, 25 bp, Homo sapien
cagagctatgatgtgaacaataatt

SEQ ID NO: 3140883 - DNA, 25 bp, Homo sapien
cttgcagagctatgatgtgaacaat

SEQ ID NO: 3140884 - DNA, 25 bp, Homo sapien
tgcagagctatgatgtgaacaataa

SEQ ID NO: 3140885 - DNA, 25 bp, Homo sapien
acaaactctattactcgatgatcca

SEQ ID NO: 3140886 - DNA, 25 bp, Homo sapien
aaactctattactcgatgatccaga

SEQ ID NO: 3140887 - DNA, 25 bp, Homo sapien
aactctattactcgatgatccagaa

SEQ ID NO: 3140888 - DNA, 25 bp, Homo sapien
caaactctattactcgatgatccag

SEQ ID NO: 3140889 - DNA, 25 bp, Homo sapien
ccaaatattacttggttagcaaatg

SEQ ID NO: 3140890 - DNA, 25 bp, Homo sapien
tcagtaaccattaggccttgtggtt

SEQ ID NO: 3140891 - DNA, 25 bp, Homo sapien
cattaggccttgtggttaaccataa

SEQ ID NO: 3140892 - DNA, 25 bp, Homo sapien
cctgaacgctgctttaagtaataat

SEQ ID NO: 3140893 - DNA, 25 bp, Homo sapien
ttttggaacgagtgtcctcgacttg

SEQ ID NO: 3140894 - DNA, 25 bp, Homo sapien
gagtgtcctcgacttgtctgaaaaa

SEQ ID NO: 3140895 - DNA, 25 bp, Homo sapien
gttttgaggaagatccagacataag

SEQ ID NO: 3140896 - DNA, 25 bp, Homo sapien
tgatgaaggcatataagtacaagtt

SEQ ID NO: 3140897 - DNA, 25 bp, Homo sapien
caatgcattactagtaactactacc

SEQ ID NO: 3140898 - DNA, 25 bp, Homo sapien
aatgcattactagtaactactacca

SEQ ID NO: 3140899 - DNA, 25 bp, Homo sapien
atgcattactagtaactactaccat

SEQ ID NO: 3140900 - DNA, 25 bp, Homo sapien
gccgctcccccagcggtgggagatt

SEQ ID NO: 3140901 - DNA, 25 bp, Homo sapien
gggagattctgccacggaccatcgc

SEQ ID NO: 3140902 - DNA, 25 bp, Homo sapien
cttcagcagctggtgtgttgacagc

SEQ ID NO: 3140903 - DNA, 25 bp, Homo sapien
cctggcgtcagggtggcgggatgcg

SEQ ID NO: 3140904 - DNA, 25 bp, Homo sapien
gcaggttgcccagagaggccctcat

SEQ ID NO: 3140905 - DNA, 25 bp, Homo sapien
ctcagggaaaccagcaggttgccca

SEQ ID NO: 3140906 - DNA, 25 bp, Homo sapien
cagcaggttgcccagagaggccctc

SEQ ID NO: 3140907 - DNA, 25 bp, Homo sapien
accagcaggttgcccagagaggccc

SEQ ID NO: 3140908 - DNA, 25 bp, Homo sapien
aggcagcattcctgatggcaatagg

SEQ ID NO: 3140909 - DNA, 25 bp, Homo sapien
cttgtagcagattagggaacagacc

SEQ ID NO: 3140910 - DNA, 25 bp, Homo sapien
caagtaggcttgaataccactggct

SEQ ID NO: 3140911 - DNA, 25 bp, Homo sapien
tactgatgatacctccttttgcacc

SEQ ID NO: 3140912 - DNA, 25 bp, Homo sapien
gaacagacctctgtgaaggttcctt

SEQ ID NO: 3140913 - DNA, 25 bp, Homo sapien
gcagactaacgtctcaaaatccgag

SEQ ID NO: 3140914 - DNA, 25 bp, Homo sapien
caacgaacgggaagtttcacgatgt

SEQ ID NO: 3140915 - DNA, 25 bp, Homo sapien
catgcaccggtaataagagtgaaac

SEQ ID NO: 3140916 - DNA, 25 bp, Homo sapien
accaggttaggtctggcagtcccag

SEQ ID NO: 3140917 - DNA, 25 bp, Homo sapien
tcagctaattgcccctgataatcta

SEQ ID NO: 3140918 - DNA, 25 bp, Homo sapien
agctaattgcccctgataatctatg

SEQ ID NO: 3140919 - DNA, 25 bp, Homo sapien
gctaattgcccctgataatctatgt

SEQ ID NO: 3140920 - DNA, 25 bp, Homo sapien
tcttcagctaattgcccctgataat

SEQ ID NO: 3140921 - DNA, 25 bp, Homo sapien
tacctaagtccctgacaatgtagag

SEQ ID NO: 3140922 - DNA, 25 bp, Homo sapien
tctaggaagcgtctttaaaggcaag

SEQ ID NO: 3140923 - DNA, 25 bp, Homo sapien
gacatagactgcaaaacattcctca

SEQ ID NO: 3140924 - DNA, 25 bp, Homo sapien
gacctgaacatacagtcgctctgaa

SEQ ID NO: 3140925 - DNA, 25 bp, Homo sapien
tctgtcctgtatatttacgtccccc

SEQ ID NO: 3140926 - DNA, 25 bp, Homo sapien
ttctgtcctgtatatttacgtcccc

SEQ ID NO: 3140927 - DNA, 25 bp, Homo sapien
cttctgtcctgtatatttacgtccc

SEQ ID NO: 3140928 - DNA, 25 bp, Homo sapien
tgtcctgtatatttacgtcccccat

SEQ ID NO: 3140929 - DNA, 25 bp, Homo sapien
cttttctaagcctggcaacacctgt

SEQ ID NO: 3140930 - DNA, 25 bp, Homo sapien
taagcctggcaacacctgtaagttg

SEQ ID NO: 3140931 - DNA, 25 bp, Homo sapien
gcaacacctgtaagttgcctgtggt

SEQ ID NO: 3140932 - DNA, 25 bp, Homo sapien
aacacctgtaagttgcctgtggtct

SEQ ID NO: 3140933 - DNA, 25 bp, Homo sapien
tataatctgaacacaagtcacatgc

SEQ ID NO: 3140934 - DNA, 25 bp, Homo sapien
tttataatctgaacacaagtcacat

SEQ ID NO: 3140935 - DNA, 25 bp, Homo sapien
ttataatctgaacacaagtcacatg

SEQ ID NO: 3140936 - DNA, 25 bp, Homo sapien
tattagaatgtgaagatactgctgc

SEQ ID NO: 3140937 - DNA, 25 bp, Homo sapien
atattagaatgtgaagatactgctg

SEQ ID NO: 3140938 - DNA, 25 bp, Homo sapien
tgcacagctctgtactccccatgtc

SEQ ID NO: 3140939 - DNA, 25 bp, Homo sapien
gtactccccatgtcaattatattag

SEQ ID NO: 3140940 - DNA, 25 bp, Homo sapien
cattatgtttctttgaacttagtag

SEQ ID NO: 3140941 - DNA, 25 bp, Homo sapien
gtttctttgaacttagtagacacat

SEQ ID NO: 3140942 - DNA, 25 bp, Homo sapien
ttatgtttctttgaacttagtagac

SEQ ID NO: 3140943 - DNA, 25 bp, Homo sapien
ttcccattatgtttctttgaactta

SEQ ID NO: 3140944 - DNA, 25 bp, Homo sapien
caggtgatggcaactccctggaagc

SEQ ID NO: 3140945 - DNA, 25 bp, Homo sapien
gtggagacacaggtgatggcaactc

SEQ ID NO: 3140946 - DNA, 25 bp, Homo sapien
taagtgatattggattccaggagac

SEQ ID NO: 3140947 - DNA, 25 bp, Homo sapien
tggaggatcccatcaaagactgtgg

SEQ ID NO: 3140948 - DNA, 25 bp, Homo sapien
aatgggtggaagtgtgaatattctg

SEQ ID NO: 3140949 - DNA, 25 bp, Homo sapien
tatgagaagttagaagggtgatagc

SEQ ID NO: 3140950 - DNA, 25 bp, Homo sapien
gagaagttagaagggtgatagccaa

SEQ ID NO: 3140951 - DNA, 25 bp, Homo sapien
aagttagaagggtgatagccaatgg

SEQ ID NO: 3140952 - DNA, 25 bp, Homo sapien
tatcttgttatcatgtcctgttctg

SEQ ID NO: 3140953 - DNA, 25 bp, Homo sapien
ttatcttgttatcatgtcctgttct

SEQ ID NO: 3140954 - DNA, 25 bp, Homo sapien
atcttgttatcatgtcctgttctgt

SEQ ID NO: 3140955 - DNA, 25 bp, Homo sapien
gtacctctgactgcgtggtgctgct

SEQ ID NO: 3140956 - DNA, 25 bp, Homo sapien
ccaacccggtgggatgtacctctga

SEQ ID NO: 3140957 - DNA, 25 bp, Homo sapien
ccggtgggatgtacctctgactgcg

SEQ ID NO: 3140958 - DNA, 25 bp, Homo sapien
tgggatgtacctctgactgcgtggt

SEQ ID NO: 3140959 - DNA, 25 bp, Homo sapien
ctcttgctgcatgatcctgcgtgct

SEQ ID NO: 3140960 - DNA, 25 bp, Homo sapien
cttgctgcatgatcctgcgtgctgc

SEQ ID NO: 3140961 - DNA, 25 bp, Homo sapien
tcttgctgcatgatcctgcgtgctg

SEQ ID NO: 3140962 - DNA, 25 bp, Homo sapien
ttgctgcatgatcctgcgtgctgct

SEQ ID NO: 3140963 - DNA, 25 bp, Homo sapien
tgtgttgcacgagctttgatttctt

SEQ ID NO: 3140964 - DNA, 25 bp, Homo sapien
gaatgtttcgtgaatttagcatcat

SEQ ID NO: 3140965 - DNA, 25 bp, Homo sapien
tggaatgtttcgtgaatttagcatc

SEQ ID NO: 3140966 - DNA, 25 bp, Homo sapien
ggaatgtttcgtgaatttagcatca

SEQ ID NO: 3140967 - DNA, 25 bp, Homo sapien
gcttgagaccattatagagatagca

SEQ ID NO: 3140968 - DNA, 25 bp, Homo sapien
ttcagctgtgctattacacgtgcca

SEQ ID NO: 3140969 - DNA, 25 bp, Homo sapien
catttttctacagatgcttgagacc

SEQ ID NO: 3140970 - DNA, 25 bp, Homo sapien
ggtataagatttattacaccaagta

SEQ ID NO: 3140971 - DNA, 25 bp, Homo sapien
gacagactgttcctaggtagccatg

SEQ ID NO: 3140972 - DNA, 25 bp, Homo sapien
tgttcctaggtagccatgccttctt

SEQ ID NO: 3140973 - DNA, 25 bp, Homo sapien
ggactctcttctacgccctccactt

SEQ ID NO: 3140974 - DNA, 25 bp, Homo sapien
cactgacagactgttcctaggtagc

SEQ ID NO: 3140975 - DNA, 25 bp, Homo sapien
tatgaagccatactctccctatctg

SEQ ID NO: 3140976 - DNA, 25 bp, Homo sapien
cacagactagttgtagcctcaagct

SEQ ID NO: 3140977 - DNA, 25 bp, Homo sapien
caagctctccttcacaatagctgtg

SEQ ID NO: 3140978 - DNA, 25 bp, Homo sapien
tgccagtcatggtcagatcctcagg

SEQ ID NO: 3140979 - DNA, 25 bp, Homo sapien
gaatgatcctagaagctttttctgc

SEQ ID NO: 3140980 - DNA, 25 bp, Homo sapien
ctatatccaaagtctgagtccctct

SEQ ID NO: 3140981 - DNA, 25 bp, Homo sapien
tctgagtccctctaggaatgatcct

SEQ ID NO: 3140982 - DNA, 25 bp, Homo sapien
ccctctaggaatgatcctagaagct

SEQ ID NO: 3140983 - DNA, 25 bp, Homo sapien
tctaaacagcgttgtggcaataatg

SEQ ID NO: 3140984 - DNA, 25 bp, Homo sapien
cggagatctaaacagcgttgtggca

SEQ ID NO: 3140985 - DNA, 25 bp, Homo sapien
actaaacggagatctaaacagcgtt

SEQ ID NO: 3140986 - DNA, 25 bp, Homo sapien
gcgttgtggcaataatggagataac

SEQ ID NO: 3140987 - DNA, 25 bp, Homo sapien
gatgctgtttacagctacacctgca

SEQ ID NO: 3140988 - DNA, 25 bp, Homo sapien
tgctgtttacagctacacctgcaat

SEQ ID NO: 3140989 - DNA, 25 bp, Homo sapien
ctgatgctgtttacagctacacctg

SEQ ID NO: 3140990 - DNA, 25 bp, Homo sapien
tgcctgatgctgtttacagctacac

SEQ ID NO: 3140991 - DNA, 25 bp, Homo sapien
gatacatatttggatactacagctt

SEQ ID NO: 3140992 - DNA, 25 bp, Homo sapien
catgatacatatttggatactacag

SEQ ID NO: 3140993 - DNA, 25 bp, Homo sapien
accatgatacatatttggatactac

SEQ ID NO: 3140994 - DNA, 25 bp, Homo sapien
tacatatttggatactacagctttg

SEQ ID NO: 3140995 - DNA, 25 bp, Homo sapien
tcttgattttactggaagcagcaac

SEQ ID NO: 3140996 - DNA, 25 bp, Homo sapien
gctgtatagcagattcagccacaca

SEQ ID NO: 3140997 - DNA, 25 bp, Homo sapien
cagttttactgtcaagctgtatagc

SEQ ID NO: 3140998 - DNA, 25 bp, Homo sapien
taacaggctttagtattcgttggct

SEQ ID NO: 3140999 - DNA, 25 bp, Homo sapien
gagtatccagctttggaccttaagg

SEQ ID NO: 3141000 - DNA, 25 bp, Homo sapien
tactccgtcagcctttggtagagca

SEQ ID NO: 3141001 - DNA, 25 bp, Homo sapien
ggtagagcacatcttggcaaaaccc

SEQ ID NO: 3141002 - DNA, 25 bp, Homo sapien
caaaaccctatgtgtcagcttccgg

SEQ ID NO: 3141003 - DNA, 25 bp, Homo sapien
taataccctgatttccaccattttc

SEQ ID NO: 3141004 - DNA, 25 bp, Homo sapien
tacaccggattttcaatgtgcttcc

SEQ ID NO: 3141005 - DNA, 25 bp, Homo sapien
tcttttctgaagctagcctccgatg

SEQ ID NO: 3141006 - DNA, 25 bp, Homo sapien
tttggtaataccctgatttccacca

SEQ ID NO: 3141007 - DNA, 25 bp, Homo sapien
ttgtgaagtcgtgaagaccaaggcc

SEQ ID NO: 3141008 - DNA, 25 bp, Homo sapien
tgttcagtttgtgaagtcgtgaaga

SEQ ID NO: 3141009 - DNA, 25 bp, Homo sapien
cagtttgtgaagtcgtgaagaccaa

SEQ ID NO: 3141010 - DNA, 25 bp, Homo sapien
cagtccagatttacttatggggatc

SEQ ID NO: 3141011 - DNA, 25 bp, Homo sapien
gattaagacattgcctgttacaggg

SEQ ID NO: 3141012 - DNA, 25 bp, Homo sapien
ttaagacattgcctgttacagggaa

SEQ ID NO: 3141013 - DNA, 25 bp, Homo sapien
taagacattgcctgttacagggaat

SEQ ID NO: 3141014 - DNA, 25 bp, Homo sapien
ggattaagacattgcctgttacagg

SEQ ID NO: 3141015 - DNA, 25 bp, Homo sapien
ctggcagaaaaggtagctcagttcc

SEQ ID NO: 3141016 - DNA, 25 bp, Homo sapien
ccatgagcgatgttttctatagcac

SEQ ID NO: 3141017 - DNA, 25 bp, Homo sapien
catagtgtctctgaatatcttcccc

SEQ ID NO: 3141018 - DNA, 25 bp, Homo sapien
ctttgttacttctagttgtgtggca

SEQ ID NO: 3141019 - DNA, 25 bp, Homo sapien
acttgggtgctccacagatattgtg

SEQ ID NO: 3141020 - DNA, 25 bp, Homo sapien
gtttcatcttaaattgctgaccctt

SEQ ID NO: 3141021 - DNA, 25 bp, Homo sapien
actgttcctctggatgccatttctt

SEQ ID NO: 3141022 - DNA, 25 bp, Homo sapien
gggtaccagcactgttcctctggat

SEQ ID NO: 3141023 - DNA, 25 bp, Homo sapien
gaataactgaacatggggtaccagc

SEQ ID NO: 3141024 - DNA, 25 bp, Homo sapien
ggtaccctgttcggttgtcatcatc

SEQ ID NO: 3141025 - DNA, 25 bp, Homo sapien
ggggtaccctgttcggttgtcatca

SEQ ID NO: 3141026 - DNA, 25 bp, Homo sapien
gggtaccctgttcggttgtcatcat

SEQ ID NO: 3141027 - DNA, 25 bp, Homo sapien
ctggggtaccctgttcggttgtcat

SEQ ID NO: 3141028 - DNA, 25 bp, Homo sapien
ctttttaggaatagcagtcctatct

SEQ ID NO: 3141029 - DNA, 25 bp, Homo sapien
taggaatagcagtcctatctggaaa

SEQ ID NO: 3141030 - DNA, 25 bp, Homo sapien
tagcagtcctatctggaaaccacat

SEQ ID NO: 3141031 - DNA, 25 bp, Homo sapien
gaatagcagtcctatctggaaacca

SEQ ID NO: 3141032 - DNA, 25 bp, Homo sapien
aagtaactagtccacttgctgtcgc

SEQ ID NO: 3141033 - DNA, 25 bp, Homo sapien
ttcacattgctgacagtgctttcac

SEQ ID NO: 3141034 - DNA, 25 bp, Homo sapien
gctgttattatcgattccaagtaac

SEQ ID NO: 3141035 - DNA, 25 bp, Homo sapien
aatgatcacaaatttggtcatctgc

SEQ ID NO: 3141036 - DNA, 25 bp, Homo sapien
gaaatatcacatgctggcttacacc

SEQ ID NO: 3141037 - DNA, 25 bp, Homo sapien
tattgccagatcgtctcatcttcag

SEQ ID NO: 3141038 - DNA, 25 bp, Homo sapien
catcttcagaaatatcacatgctgg

SEQ ID NO: 3141039 - DNA, 25 bp, Homo sapien
ggcttacacctgaggaaggatgctt

SEQ ID NO: 3141040 - DNA, 25 bp, Homo sapien
ttgttccgaaattaggtgtaattga

SEQ ID NO: 3141041 - DNA, 25 bp, Homo sapien
tactccttcttaaggctcgtctctt

SEQ ID NO: 3141042 - DNA, 25 bp, Homo sapien
gacttttagtcactactctttggag

SEQ ID NO: 3141043 - DNA, 25 bp, Homo sapien
gatgaaagaatactgaagagacttt

SEQ ID NO: 3141044 - DNA, 25 bp, Homo sapien
acaggaatccctccactcttgctca

SEQ ID NO: 3141045 - DNA, 25 bp, Homo sapien
caacaggaatccctccactcttgct

SEQ ID NO: 3141046 - DNA, 25 bp, Homo sapien
aacaggaatccctccactcttgctc

SEQ ID NO: 3141047 - DNA, 25 bp, Homo sapien
caggaatccctccactcttgctcat

SEQ ID NO: 3141048 - DNA, 25 bp, Homo sapien
ttttcaaatgggctgttagttcatt

SEQ ID NO: 3141049 - DNA, 25 bp, Homo sapien
tcaaatgggctgttagttcattgag

SEQ ID NO: 3141050 - DNA, 25 bp, Homo sapien
tgatttatcttttagttccaattgg

SEQ ID NO: 3141051 - DNA, 25 bp, Homo sapien
ttagttcattgagtggcaaagccat

SEQ ID NO: 3141052 - DNA, 25 bp, Homo sapien
ggaacaatgtgacttagtatttaat

SEQ ID NO: 3141053 - DNA, 25 bp, Homo sapien
attgtggtcagtttatggcaaatgt

SEQ ID NO: 3141054 - DNA, 25 bp, Homo sapien
gtaccatggtatgtaactaataaaa

SEQ ID NO: 3141055 - DNA, 25 bp, Homo sapien
ttgactagcctcatttgtgggtgga

SEQ ID NO: 3141056 - DNA, 25 bp, Homo sapien
cagaagtgactagtcatcacagtca

SEQ ID NO: 3141057 - DNA, 25 bp, Homo sapien
cacagtcactatctctaaaccatca

SEQ ID NO: 3141058 - DNA, 25 bp, Homo sapien
ttcccttcctgccagaagtgactag

SEQ ID NO: 3141059 - DNA, 25 bp, Homo sapien
taaaccatcagtgtgctctgtgggt

SEQ ID NO: 3141060 - DNA, 25 bp, Homo sapien
cattttccttatggtgttgcttctc

SEQ ID NO: 3141061 - DNA, 25 bp, Homo sapien
aattccattgtaagagccaacatta

SEQ ID NO: 3141062 - DNA, 25 bp, Homo sapien
tgtaagagccaacattatccatgtg

SEQ ID NO: 3141063 - DNA, 25 bp, Homo sapien
aacattatccatgtgcttccaaagc

SEQ ID NO: 3141064 - DNA, 25 bp, Homo sapien
agtgggcacccggaatatatgcttc

SEQ ID NO: 3141065 - DNA, 25 bp, Homo sapien
tgggcacccggaatatatgcttctt

SEQ ID NO: 3141066 - DNA, 25 bp, Homo sapien
ggtgcagcaaacatggatgggatct

SEQ ID NO: 3141067 - DNA, 25 bp, Homo sapien
ttctgaaggtgcagcaaacatggat

SEQ ID NO: 3141068 - DNA, 25 bp, Homo sapien
gcactatccataagaatccaatgtc

SEQ ID NO: 3141069 - DNA, 25 bp, Homo sapien
tatccataagaatccaatgtctgat

SEQ ID NO: 3141070 - DNA, 25 bp, Homo sapien
gaatccaatgtctgattcccattgc

SEQ ID NO: 3141071 - DNA, 25 bp, Homo sapien
tccataagaatccaatgtctgattc

SEQ ID NO: 3141072 - DNA, 25 bp, Homo sapien
cctgcctctggctaggccacttggt

SEQ ID NO: 3141073 - DNA, 25 bp, Homo sapien
ccatcaagaggactttctgaaatcc

SEQ ID NO: 3141074 - DNA, 25 bp, Homo sapien
cccagaacctgtgttgagactttgg

SEQ ID NO: 3141075 - DNA, 25 bp, Homo sapien
tggctaggccacttggttctcccct

SEQ ID NO: 3141076 - DNA, 25 bp, Homo sapien
gaccagggccacccttcaatctctc

SEQ ID NO: 3141077 - DNA, 25 bp, Homo sapien
gggccacccttcaatctctcaccat

SEQ ID NO: 3141078 - DNA, 25 bp, Homo sapien
accagggccacccttcaatctctca

SEQ ID NO: 3141079 - DNA, 25 bp, Homo sapien
ggaccagggccacccttcaatctct

SEQ ID NO: 3141080 - DNA, 25 bp, Homo sapien
caagagcaggctcactctgaagatc

SEQ ID NO: 3141081 - DNA, 25 bp, Homo sapien
gggcctggcctactttgagatccac

SEQ ID NO: 3141082 - DNA, 25 bp, Homo sapien
caagggtgacatggtgttggccctc

SEQ ID NO: 3141083 - DNA, 25 bp, Homo sapien
tgagatccactacagccagctcttt

SEQ ID NO: 3141084 - DNA, 25 bp, Homo sapien
cagtcagtccaatcatagtacagtg

SEQ ID NO: 3141085 - DNA, 25 bp, Homo sapien
tacagtgatgtggtggtagatgcta

SEQ ID NO: 3141086 - DNA, 25 bp, Homo sapien
taaaatagttcaccatgggtatgag

SEQ ID NO: 3141087 - DNA, 25 bp, Homo sapien
tcattgtaaaatacggatcatttgt

SEQ ID NO: 3141088 - DNA, 25 bp, Homo sapien
tcaccgtaggaggatacttaaacag

SEQ ID NO: 3141089 - DNA, 25 bp, Homo sapien
gaatatcacctacaggtcaccgtag

SEQ ID NO: 3141090 - DNA, 25 bp, Homo sapien
cccaccgcagttggagactgttaga

SEQ ID NO: 3141091 - DNA, 25 bp, Homo sapien
gaagaatgatgacccttcaaaggat

SEQ ID NO: 3141092 - DNA, 25 bp, Homo sapien
tcgcttttcgaactccgcgacccga

SEQ ID NO: 3141093 - DNA, 25 bp, Homo sapien
tccgcgacccgagcgcaaggcgagt

SEQ ID NO: 3141094 - DNA, 25 bp, Homo sapien
gctgggccgggatggcccacgcggg

SEQ ID NO: 3141095 - DNA, 25 bp, Homo sapien
acccgagcgcaaggcgagtacccgg

SEQ ID NO: 3141096 - DNA, 25 bp, Homo sapien
cccagaggcggaggcgcaatgagct

SEQ ID NO: 3141097 - DNA, 25 bp, Homo sapien
cttggacccagaggcggaggcgcaa

SEQ ID NO: 3141098 - DNA, 25 bp, Homo sapien
tagcttggacccagaggcggaggcg

SEQ ID NO: 3141099 - DNA, 25 bp, Homo sapien
ggaggatagcttggacccagaggcg

SEQ ID NO: 3141100 - DNA, 25 bp, Homo sapien
gcagagagccgagattgcactacta

SEQ ID NO: 3141101 - DNA, 25 bp, Homo sapien
cagagagccgagattgcactactac

SEQ ID NO: 3141102 - DNA, 25 bp, Homo sapien
gggtgacagagtgatgagactatgt

SEQ ID NO: 3141103 - DNA, 25 bp, Homo sapien
agagccgagattgcactactacatt

SEQ ID NO: 3141104 - DNA, 25 bp, Homo sapien
tcttttgcttctccaaattcctctt

SEQ ID NO: 3141105 - DNA, 25 bp, Homo sapien
ttttgcttctccaaattcctcttcc

SEQ ID NO: 3141106 - DNA, 25 bp, Homo sapien
tgtcttttgcttctccaaattcctc

SEQ ID NO: 3141107 - DNA, 25 bp, Homo sapien
ctgtcttttgcttctccaaattcct

SEQ ID NO: 3141108 - DNA, 25 bp, Homo sapien
gactgtatatttgtaagacttccat

SEQ ID NO: 3141109 - DNA, 25 bp, Homo sapien
cattttgatctggactgtatatttg

SEQ ID NO: 3141110 - DNA, 25 bp, Homo sapien
tgcttgtgccgataaaatagtctta

SEQ ID NO: 3141111 - DNA, 25 bp, Homo sapien
tctgcttgtgccgataaaatagtct

SEQ ID NO: 3141112 - DNA, 25 bp, Homo sapien
ctagcgaacaagcaaggaagtgagc

SEQ ID NO: 3141113 - DNA, 25 bp, Homo sapien
caaggaagtgagcatgtgggaagaa

SEQ ID NO: 3141114 - DNA, 25 bp, Homo sapien
gcgaacaagcaaggaagtgagcatg

SEQ ID NO: 3141115 - DNA, 25 bp, Homo sapien
aacaagcaaggaagtgagcatgtgg

SEQ ID NO: 3141116 - DNA, 25 bp, Homo sapien
tacccttgaggggccagatgcagca

SEQ ID NO: 3141117 - DNA, 25 bp, Homo sapien
ttgactttacccttgaggggccaga

SEQ ID NO: 3141118 - DNA, 25 bp, Homo sapien
tttacccttgaggggccagatgcag

SEQ ID NO: 3141119 - DNA, 25 bp, Homo sapien
ttacccttgaggggccagatgcagc

SEQ ID NO: 3141120 - DNA, 25 bp, Homo sapien
tggcgaaactgtcttttcgacaaaa

SEQ ID NO: 3141121 - DNA, 25 bp, Homo sapien
aagttgcaatgaactgatatcacaa

SEQ ID NO: 3141122 - DNA, 25 bp, Homo sapien
catggcgaaactgtcttttcgacaa

SEQ ID NO: 3141123 - DNA, 25 bp, Homo sapien
aatgaactgatatcacaacactgta

SEQ ID NO: 3141124 - DNA, 25 bp, Homo sapien
cagtgaggtgaagcgtatcttcacc

SEQ ID NO: 3141125 - DNA, 25 bp, Homo sapien
gggccagaataagtgtcagtccatt

SEQ ID NO: 3141126 - DNA, 25 bp, Homo sapien
tattagatcaactatgctttgggcc

SEQ ID NO: 3141127 - DNA, 25 bp, Homo sapien
tcttcacctactcggatttcctgga

SEQ ID NO: 3141128 - DNA, 25 bp, Homo sapien
gcttcattacagtccatgtcctcag

SEQ ID NO: 3141129 - DNA, 25 bp, Homo sapien
aaagcttcattatctgatgtaacat

SEQ ID NO: 3141130 - DNA, 25 bp, Homo sapien
atccattttcatgacgtcagaccac

SEQ ID NO: 3141131 - DNA, 25 bp, Homo sapien
cagaccactgaatggaattttgagt

SEQ ID NO: 3141132 - DNA, 25 bp, Homo sapien
catgacatctcttagagacgtcata

SEQ ID NO: 3141133 - DNA, 25 bp, Homo sapien
ccctttgaatgttgaattgtcagca

SEQ ID NO: 3141134 - DNA, 25 bp, Homo sapien
gaattgtcagcagaaatatccctcg

SEQ ID NO: 3141135 - DNA, 25 bp, Homo sapien
ttagagacgtcatacactcatccct

SEQ ID NO: 3141136 - DNA, 25 bp, Homo sapien
atgtgaatagtgatttgagaagtag

SEQ ID NO: 3141137 - DNA, 25 bp, Homo sapien
gtgaatagtgatttgagaagtagtt

SEQ ID NO: 3141138 - DNA, 25 bp, Homo sapien
aggatgtgaatagtgatttgagaag

SEQ ID NO: 3141139 - DNA, 25 bp, Homo sapien
accaggatgtgaatagtgatttgag

SEQ ID NO: 3141140 - DNA, 25 bp, Homo sapien
cgattacagctttgcaacatgtcgc

SEQ ID NO: 3141141 - DNA, 25 bp, Homo sapien
caaatgttcaaatgagggtgtgcca

SEQ ID NO: 3141142 - DNA, 25 bp, Homo sapien
ccattaatggcctctgaaatcaaca

SEQ ID NO: 3141143 - DNA, 25 bp, Homo sapien
ctttatacagtcatgggcctgtgac

SEQ ID NO: 3141144 - DNA, 25 bp, Homo sapien
ccagtttacctgagcccatgtattc

SEQ ID NO: 3141145 - DNA, 25 bp, Homo sapien
tcacaaaggtcatcacccaagagtg

SEQ ID NO: 3141146 - DNA, 25 bp, Homo sapien
gaccacagtggccatccaagtggcc

SEQ ID NO: 3141147 - DNA, 25 bp, Homo sapien
aaatctgcttcaatatttggcccag

SEQ ID NO: 3141148 - DNA, 25 bp, Homo sapien
ggtggaacgcagggtgcctgaggtg

SEQ ID NO: 3141149 - DNA, 25 bp, Homo sapien
ccttttctcgagacacattgattct

SEQ ID NO: 3141150 - DNA, 25 bp, Homo sapien
cttgccttttctcgagacacattga

SEQ ID NO: 3141151 - DNA, 25 bp, Homo sapien
tgccttttctcgagacacattgatt

SEQ ID NO: 3141152 - DNA, 25 bp, Homo sapien
tacttgccttttctcgagacacatt

SEQ ID NO: 3141153 - DNA, 25 bp, Homo sapien
gccccagtacacgtccattcagtga

SEQ ID NO: 3141154 - DNA, 25 bp, Homo sapien
tccatttgtgggagaaacagtagct

SEQ ID NO: 3141155 - DNA, 25 bp, Homo sapien
gagtacattcatcatgcatgccgca

SEQ ID NO: 3141156 - DNA, 25 bp, Homo sapien
tgctttggtatcttgaatggaggac

SEQ ID NO: 3141157 - DNA, 25 bp, Homo sapien
tgtaatttcctctgtaacgtgcagt

SEQ ID NO: 3141158 - DNA, 25 bp, Homo sapien
tgcaatgcctattggaaatggaact

SEQ ID NO: 3141159 - DNA, 25 bp, Homo sapien
gattgaaggtttatgtcacacactt

SEQ ID NO: 3141160 - DNA, 25 bp, Homo sapien
gggccagtaacatcactcagcacat

SEQ ID NO: 3141161 - DNA, 25 bp, Homo sapien
caacagaaaagatacccaatttgta

SEQ ID NO: 3141162 - DNA, 25 bp, Homo sapien
ctttaaacaagacacaacagaaaag

SEQ ID NO: 3141163 - DNA, 25 bp, Homo sapien
ttgtaaacttttactgaagcacagg

SEQ ID NO: 3141164 - DNA, 25 bp, Homo sapien
tttgtaaacttttactgaagcacag

SEQ ID NO: 3141165 - DNA, 25 bp, Homo sapien
gacttaagagcgaggcctttctttg

SEQ ID NO: 3141166 - DNA, 25 bp, Homo sapien
gatattcgggaatccatgcttgact

SEQ ID NO: 3141167 - DNA, 25 bp, Homo sapien
ctcctggagggtaatttaaggatat

SEQ ID NO: 3141168 - DNA, 25 bp, Homo sapien
catgcttgacttaagagcgaggcct

SEQ ID NO: 3141169 - DNA, 25 bp, Homo sapien
ctgaaaaggataagttgatgggtgc

SEQ ID NO: 3141170 - DNA, 25 bp, Homo sapien
ccagagctgggtcaactggttggat

SEQ ID NO: 3141171 - DNA, 25 bp, Homo sapien
gcttgtggattggactgagtagaaa

SEQ ID NO: 3141172 - DNA, 25 bp, Homo sapien
tatcaaggtatggagaacaaggtaa

SEQ ID NO: 3141173 - DNA, 25 bp, Homo sapien
gcatgcatttctgctagagttctta

SEQ ID NO: 3141174 - DNA, 25 bp, Homo sapien
tatacttgcaggaattttgggatcc

SEQ ID NO: 3141175 - DNA, 25 bp, Homo sapien
ttcaaaatgcaccacccagcatgca

SEQ ID NO: 3141176 - DNA, 25 bp, Homo sapien
tccagcgctttgaatagattgaagg

SEQ ID NO: 3141177 - DNA, 25 bp, Homo sapien
caatcttgccctttgagaacttgag

SEQ ID NO: 3141178 - DNA, 25 bp, Homo sapien
gagtagtccattctgagagcccttg

SEQ ID NO: 3141179 - DNA, 25 bp, Homo sapien
tagataagagcatgtgagtagtcca

SEQ ID NO: 3141180 - DNA, 25 bp, Homo sapien
gtagacacatatcaccatgctgatg

SEQ ID NO: 3141181 - DNA, 25 bp, Homo sapien
tccaaatgttcatacaattcaactg

SEQ ID NO: 3141182 - DNA, 25 bp, Homo sapien
tcctaggttttcttatggaggcaat

SEQ ID NO: 3141183 - DNA, 25 bp, Homo sapien
ttcaactgataccaagccgctctgt

SEQ ID NO: 3141184 - DNA, 25 bp, Homo sapien
gctctgtatggttttcacaacatca

SEQ ID NO: 3141185 - DNA, 25 bp, Homo sapien
aagtgcaggtccttaagcacctggc

SEQ ID NO: 3141186 - DNA, 25 bp, Homo sapien
gacagtactatgcaggcagtggtgc

SEQ ID NO: 3141187 - DNA, 25 bp, Homo sapien
ctggcttaaatctttggaaggcacc

SEQ ID NO: 3141188 - DNA, 25 bp, Homo sapien
caaatgactattgtccatggtggaa

SEQ ID NO: 3141189 - DNA, 25 bp, Homo sapien
aaatgacgagatggctctggaggtc

SEQ ID NO: 3141190 - DNA, 25 bp, Homo sapien
tatgtttccagtaaatcttaaaaga

SEQ ID NO: 3141191 - DNA, 25 bp, Homo sapien
tccttctcgaacttggaaatgacga

SEQ ID NO: 3141192 - DNA, 25 bp, Homo sapien
gttgttctccttctcgaacttggaa

SEQ ID NO: 3141193 - DNA, 25 bp, Homo sapien
actaagtcccgtcagctggctcaga

SEQ ID NO: 3141194 - DNA, 25 bp, Homo sapien
tctgctccggaagccaagtaggaag

SEQ ID NO: 3141195 - DNA, 25 bp, Homo sapien
tgtggtttctgctccggaagccaag

SEQ ID NO: 3141196 - DNA, 25 bp, Homo sapien
catctttgtcacttgctcactaagt

SEQ ID NO: 3141197 - DNA, 25 bp, Homo sapien
tgtaatgagggcaactatagtttcc

SEQ ID NO: 3141198 - DNA, 25 bp, Homo sapien
tactttataaacgacaatggtgcct

SEQ ID NO: 3141199 - DNA, 25 bp, Homo sapien
ctttgatttggagttccagcctagg

SEQ ID NO: 3141200 - DNA, 25 bp, Homo sapien
gcaaattggcaactgagaatggttt

SEQ ID NO: 3141201 - DNA, 25 bp, Homo sapien
aaaagccctataacgatacagtgcc

SEQ ID NO: 3141202 - DNA, 25 bp, Homo sapien
catgttcctcttagtgacatggtca

SEQ ID NO: 3141203 - DNA, 25 bp, Homo sapien
tatctgtgcttcctttgtaaaagaa

SEQ ID NO: 3141204 - DNA, 25 bp, Homo sapien
caattcctgtttagttatactgccc

SEQ ID NO: 3141205 - DNA, 25 bp, Homo sapien
tatcaccacgtagcatgccatgatg

SEQ ID NO: 3141206 - DNA, 25 bp, Homo sapien
gtttccacaggttcgcacagctgct

SEQ ID NO: 3141207 - DNA, 25 bp, Homo sapien
caattgtctgttagtggccacccta

SEQ ID NO: 3141208 - DNA, 25 bp, Homo sapien
ggaatcacgcagatgacctagctct

SEQ ID NO: 3141209 - DNA, 25 bp, Homo sapien
cattaggattcctttgattactgac

SEQ ID NO: 3141210 - DNA, 25 bp, Homo sapien
ctttgattactgactactctttcca

SEQ ID NO: 3141211 - DNA, 25 bp, Homo sapien
ccagaaagaggtacgagtgtcttga

SEQ ID NO: 3141212 - DNA, 25 bp, Homo sapien
agttttatagccactgtcattagga

SEQ ID NO: 3141213 - DNA, 25 bp, Homo sapien
ttttgcatgattttggtctgtgccc

SEQ ID NO: 3141214 - DNA, 25 bp, Homo sapien
tgcatgattttggtctgtgccctct

SEQ ID NO: 3141215 - DNA, 25 bp, Homo sapien
ctcttttcgctttgcacactacctt

SEQ ID NO: 3141216 - DNA, 25 bp, Homo sapien
ttgcatgattttggtctgtgccctc

SEQ ID NO: 3141217 - DNA, 25 bp, Homo sapien
tagaaactcttttggtactctgtgg

SEQ ID NO: 3141218 - DNA, 25 bp, Homo sapien
ggtactctgtggacggttgattaat

SEQ ID NO: 3141219 - DNA, 25 bp, Homo sapien
ctctgtggacggttgattaatttct

SEQ ID NO: 3141220 - DNA, 25 bp, Homo sapien
cttttggtactctgtggacggttga

SEQ ID NO: 3141221 - DNA, 25 bp, Homo sapien
ccctgctaactctcttcctcctaat

SEQ ID NO: 3141222 - DNA, 25 bp, Homo sapien
ctcctaatactgctgtattactgca

SEQ ID NO: 3141223 - DNA, 25 bp, Homo sapien
tcctcctaatactgctgtattactg

SEQ ID NO: 3141224 - DNA, 25 bp, Homo sapien
ctcttcctcctaatactgctgtatt

SEQ ID NO: 3141225 - DNA, 25 bp, Homo sapien
tgcactgattcctggcctgtgtctt

SEQ ID NO: 3141226 - DNA, 25 bp, Homo sapien
tgattcctggcctgtgtcttctctt

SEQ ID NO: 3141227 - DNA, 25 bp, Homo sapien
actgattcctggcctgtgtcttctc

SEQ ID NO: 3141228 - DNA, 25 bp, Homo sapien
attcctggcctgtgtcttctcttac

SEQ ID NO: 3141229 - DNA, 25 bp, Homo sapien
gggcaggcttttctcgtcccatcca

SEQ ID NO: 3141230 - DNA, 25 bp, Homo sapien
gtccatgttatctgggcaggctttt

SEQ ID NO: 3141231 - DNA, 25 bp, Homo sapien
ctgggcaggcttttctcgtcccatc

SEQ ID NO: 3141232 - DNA, 25 bp, Homo sapien
tgaagtccatgttatctgggcaggc

SEQ ID NO: 3141233 - DNA, 25 bp, Homo sapien
ccctggtctggtgttaagcaagcat

SEQ ID NO: 3141234 - DNA, 25 bp, Homo sapien
tccatctgccttccattactgaact

SEQ ID NO: 3141235 - DNA, 25 bp, Homo sapien
tacacactcctgtaaattgcaccct

SEQ ID NO: 3141236 - DNA, 25 bp, Homo sapien
aattgcaccctgattttacaataca

SEQ ID NO: 3141237 - DNA, 25 bp, Homo sapien
caaatgctattaagtgaggccaaac

SEQ ID NO: 3141238 - DNA, 25 bp, Homo sapien
tggagcaagttatcccaaagggctt

SEQ ID NO: 3141239 - DNA, 25 bp, Homo sapien
ggagcgctcacacccaggaatgctt

SEQ ID NO: 3141240 - DNA, 25 bp, Homo sapien
caatcttgcggagatgtcgagccag

SEQ ID NO: 3141241 - DNA, 25 bp, Homo sapien
taactgaaactaattgctaccgatg

SEQ ID NO: 3141242 - DNA, 25 bp, Homo sapien
tgttttcaagccaacgacctaatgg

SEQ ID NO: 3141243 - DNA, 25 bp, Homo sapien
gagctaaagggcgttaggctttcca

SEQ ID NO: 3141244 - DNA, 25 bp, Homo sapien
tcagtgaaactagttcaatgtccca

SEQ ID NO: 3141245 - DNA, 25 bp, Homo sapien
catacaggttggctcaccagacaga

SEQ ID NO: 3141246 - DNA, 25 bp, Homo sapien
ttagcaaaagcgaacaaggcatctc

SEQ ID NO: 3141247 - DNA, 25 bp, Homo sapien
gcaaaggtatgggtgtgtctatcaa

SEQ ID NO: 3141248 - DNA, 25 bp, Homo sapien
gaagaccagttaccaaagcacagga

SEQ ID NO: 3141249 - DNA, 25 bp, Homo sapien
cagaaaggtcacaggagtgtcccca

SEQ ID NO: 3141250 - DNA, 25 bp, Homo sapien
atcaggctaagacaaccagggacac

SEQ ID NO: 3141251 - DNA, 25 bp, Homo sapien
aatacgctgctgatttgagaaacac

SEQ ID NO: 3141252 - DNA, 25 bp, Homo sapien
taatcttccatggtgagagtgtgac

SEQ ID NO: 3141253 - DNA, 25 bp, Homo sapien
aaaatgttatccttggagcagcagc

SEQ ID NO: 3141254 - DNA, 25 bp, Homo sapien
gagcctgaactaggaactcgggacc

SEQ ID NO: 3141255 - DNA, 25 bp, Homo sapien
tggagatggcggaaagtaacaaccc

SEQ ID NO: 3141256 - DNA, 25 bp, Homo sapien
gcaaattcaagggtctcactccaga

SEQ ID NO: 3141257 - DNA, 25 bp, Homo sapien
ggctgccaggttttctgatggtgtg

SEQ ID NO: 3141258 - DNA, 25 bp, Homo sapien
ctgctcagatgggaaggcgacagga

SEQ ID NO: 3141259 - DNA, 25 bp, Homo sapien
ctcagatgggaaggcgacaggagag

SEQ ID NO: 3141260 - DNA, 25 bp, Homo sapien
atgggaaggcgacaggagagagaca

SEQ ID NO: 3141261 - DNA, 25 bp, Homo sapien
gcaggtcccagaacttaagacaatt

SEQ ID NO: 3141262 - DNA, 25 bp, Homo sapien
gaagtaagctttaatatgacacgac

SEQ ID NO: 3141263 - DNA, 25 bp, Homo sapien
tatataagctcagtaaaaatctgcc

SEQ ID NO: 3141264 - DNA, 25 bp, Homo sapien
tagcataataggtcaaagggctcat

SEQ ID NO: 3141265 - DNA, 25 bp, Homo sapien
tacactcggtcagaaacggacaact

SEQ ID NO: 3141266 - DNA, 25 bp, Homo sapien
taaaagatgatcacgccaggcgtgg

SEQ ID NO: 3141267 - DNA, 25 bp, Homo sapien
actggaattcttgggcacatgctga

SEQ ID NO: 3141268 - DNA, 25 bp, Homo sapien
taatggaattgtagcctagccaagc

SEQ ID NO: 3141269 - DNA, 25 bp, Homo sapien
gtatccccatctgccatctgtgttt

SEQ ID NO: 3141270 - DNA, 25 bp, Homo sapien
ggtgtatccccatctgccatctgtg

SEQ ID NO: 3141271 - DNA, 25 bp, Homo sapien
atccccatctgccatctgtgttttc

SEQ ID NO: 3141272 - DNA, 25 bp, Homo sapien
ctggtgtatccccatctgccatctg

SEQ ID NO: 3141273 - DNA, 25 bp, Homo sapien
aattcatggctgatagaactggaac

SEQ ID NO: 3141274 - DNA, 25 bp, Homo sapien
cttccaattcatggctgatagaact

SEQ ID NO: 3141275 - DNA, 25 bp, Homo sapien
ggctgatagaactggaacctttctc

SEQ ID NO: 3141276 - DNA, 25 bp, Homo sapien
tagaactggaacctttctctgctct

SEQ ID NO: 3141277 - DNA, 25 bp, Homo sapien
ttaattggatgaagtgatacttaag

SEQ ID NO: 3141278 - DNA, 25 bp, Homo sapien
aattaattggatgaagtgatactta

SEQ ID NO: 3141279 - DNA, 25 bp, Homo sapien
aaaattaattggatgaagtgatact

SEQ ID NO: 3141280 - DNA, 25 bp, Homo sapien
aaattaattggatgaagtgatactt

SEQ ID NO: 3141281 - DNA, 25 bp, Homo sapien
gggcttgtattgtggatctccacag

SEQ ID NO: 3141282 - DNA, 25 bp, Homo sapien
tgtattgtggatctccacagatttc

SEQ ID NO: 3141283 - DNA, 25 bp, Homo sapien
ggcttgtattgtggatctccacaga

SEQ ID NO: 3141284 - DNA, 25 bp, Homo sapien
cttgtattgtggatctccacagatt

SEQ ID NO: 3141285 - DNA, 25 bp, Homo sapien
acacctttgatagtcacacactgta

SEQ ID NO: 3141286 - DNA, 25 bp, Homo sapien
cacctttgatagtcacacactgtat

SEQ ID NO: 3141287 - DNA, 25 bp, Homo sapien
gaatgcccgcttcatctggatcctc

SEQ ID NO: 3141288 - DNA, 25 bp, Homo sapien
atgaagaatgcccgcttcatctgga

SEQ ID NO: 3141289 - DNA, 25 bp, Homo sapien
gaagaatgcccgcttcatctggatc

SEQ ID NO: 3141290 - DNA, 25 bp, Homo sapien
aagaatgcccgcttcatctggatcc

SEQ ID NO: 3141291 - DNA, 25 bp, Homo sapien
cactgtcctccacaccattgtgttt

SEQ ID NO: 3141292 - DNA, 25 bp, Homo sapien
cctccacaccattgtgtttgaggtc

SEQ ID NO: 3141293 - DNA, 25 bp, Homo sapien
actgtcctccacaccattgtgtttg

SEQ ID NO: 3141294 - DNA, 25 bp, Homo sapien
tgtcctccacaccattgtgtttgag

SEQ ID NO: 3141295 - DNA, 25 bp, Homo sapien
aaattcttctatatgtctcttgatc

SEQ ID NO: 3141296 - DNA, 25 bp, Homo sapien
tcttgatctgcaactgacatttagc

SEQ ID NO: 3141297 - DNA, 25 bp, Homo sapien
tctgcaactgacatttagctaattg

SEQ ID NO: 3141298 - DNA, 25 bp, Homo sapien
tatgtctcttgatctgcaactgaca

SEQ ID NO: 3141299 - DNA, 25 bp, Homo sapien
taaatagataccaaatggctgctgt

SEQ ID NO: 3141300 - DNA, 25 bp, Homo sapien
gggaaatatcagtgtctacttcaaa

SEQ ID NO: 3141301 - DNA, 25 bp, Homo sapien
ttcaaataaatagataccaaatggc

SEQ ID NO: 3141302 - DNA, 25 bp, Homo sapien
ctgtccataactgctgctggctgag

SEQ ID NO: 3141303 - DNA, 25 bp, Homo sapien
taactatacggatggataaggaaga

SEQ ID NO: 3141304 - DNA, 25 bp, Homo sapien
tggtgtcaacctcacctggtggtca

SEQ ID NO: 3141305 - DNA, 25 bp, Homo sapien
tggcagaacaaaaggtcagacatgg

SEQ ID NO: 3141306 - DNA, 25 bp, Homo sapien
tcagacatgggtgtccctggtgtca

SEQ ID NO: 3141307 - DNA, 25 bp, Homo sapien
agatgaaaagtgaagtgatgtgagg

SEQ ID NO: 3141308 - DNA, 25 bp, Homo sapien
ctgtttccttaaagtcaatactagt

SEQ ID NO: 3141309 - DNA, 25 bp, Homo sapien
aatgcgatgattcccatgccctgag

SEQ ID NO: 3141310 - DNA, 25 bp, Homo sapien
catgccctgagtttctgctccagac

SEQ ID NO: 3141311 - DNA, 25 bp, Homo sapien
caatttgtggaaagctggaaatgcg

SEQ ID NO: 3141312 - DNA, 25 bp, Homo sapien
gtacattcaatcagaaggcttctat

SEQ ID NO: 3141313 - DNA, 25 bp, Homo sapien
tatgtacattcaatcagaaggcttc

SEQ ID NO: 3141314 - DNA, 25 bp, Homo sapien
ctatgtacattcaatcagaaggctt

SEQ ID NO: 3141315 - DNA, 25 bp, Homo sapien
tgtacattcaatcagaaggcttcta

SEQ ID NO: 3141316 - DNA, 25 bp, Homo sapien
tactttaccagatctgcatcagcca

SEQ ID NO: 3141317 - DNA, 25 bp, Homo sapien
gatgatgataccaggatattctacc

SEQ ID NO: 3141318 - DNA, 25 bp, Homo sapien
aaccatactttaccagatctgcatc

SEQ ID NO: 3141319 - DNA, 25 bp, Homo sapien
taatgatgatgataccaggatattc

SEQ ID NO: 3141320 - DNA, 25 bp, Homo sapien
tcattcaacgtgtcaggtgcaaact

SEQ ID NO: 3141321 - DNA, 25 bp, Homo sapien
tgagttatctttgtgatggcaattg

SEQ ID NO: 3141322 - DNA, 25 bp, Homo sapien
gtgtcaggtgcaaactgctgctgtc

SEQ ID NO: 3141323 - DNA, 25 bp, Homo sapien
tccatctcattcaacgtgtcaggtg

SEQ ID NO: 3141324 - DNA, 25 bp, Homo sapien
tcagagtaattgacaagcacccttc

SEQ ID NO: 3141325 - DNA, 25 bp, Homo sapien
gacaagcacccttcttaagagtcca

SEQ ID NO: 3141326 - DNA, 25 bp, Homo sapien
agcacccttcttaagagtccagact

SEQ ID NO: 3141327 - DNA, 25 bp, Homo sapien
aattgacaagcacccttcttaagag

SEQ ID NO: 3141328 - DNA, 25 bp, Homo sapien
tataagaaaaatatacagatttaac

SEQ ID NO: 3141329 - DNA, 25 bp, Homo sapien
aaaaatatacagatttaacggaatg

SEQ ID NO: 3141330 - DNA, 25 bp, Homo sapien
ctataagaaaaatatacagatttaa

SEQ ID NO: 3141331 - DNA, 25 bp, Homo sapien
ataagaaaaatatacagatttaacg

SEQ ID NO: 3141332 - DNA, 25 bp, Homo sapien
ttcatcagatttactgagcttcact

SEQ ID NO: 3141333 - DNA, 25 bp, Homo sapien
tcactcttcatcagatttactgagc

SEQ ID NO: 3141334 - DNA, 25 bp, Homo sapien
actcttcatcagatttactgagctt

SEQ ID NO: 3141335 - DNA, 25 bp, Homo sapien
tcttcatcagatttactgagcttca

SEQ ID NO: 3141336 - DNA, 25 bp, Homo sapien
tctctttgagaagggcaagacatgg

SEQ ID NO: 3141337 - DNA, 25 bp, Homo sapien
gaacttggccatatctctctgacta

SEQ ID NO: 3141338 - DNA, 25 bp, Homo sapien
tccaagtttggaaagtgtgatggcc

SEQ ID NO: 3141339 - DNA, 25 bp, Homo sapien
tgactggtacttcggatgccccaag

SEQ ID NO: 3141340 - DNA, 25 bp, Homo sapien
tcagggggcttctttcgcagtagaa

SEQ ID NO: 3141341 - DNA, 25 bp, Homo sapien
cagttattgtggtgatgggatcaca

SEQ ID NO: 3141342 - DNA, 25 bp, Homo sapien
ggcttctttcgcagtagaaaattca

SEQ ID NO: 3141343 - DNA, 25 bp, Homo sapien
gagtccttggcctcagttattgtgg

SEQ ID NO: 3141344 - DNA, 25 bp, Homo sapien
gttgatactttggtctccacgctgt

SEQ ID NO: 3141345 - DNA, 25 bp, Homo sapien
tgttgatactttggtctccacgctg

SEQ ID NO: 3141346 - DNA, 25 bp, Homo sapien
ccacgctgtctctgtgcatcttatt

SEQ ID NO: 3141347 - DNA, 25 bp, Homo sapien
tgtctctgtgcatcttattcaccaa

SEQ ID NO: 3141348 - DNA, 25 bp, Homo sapien
ttattgtatgtctttcctgtgtatg

SEQ ID NO: 3141349 - DNA, 25 bp, Homo sapien
cccaccagtaaccagtatcttaaag

SEQ ID NO: 3141350 - DNA, 25 bp, Homo sapien
tcctccccaccagtaaccagtatct

SEQ ID NO: 3141351 - DNA, 25 bp, Homo sapien
ccagtaaccagtatcttaaagttat

SEQ ID NO: 3141352 - DNA, 25 bp, Homo sapien
gaatcttaaagaagggatggtgtta

SEQ ID NO: 3141353 - DNA, 25 bp, Homo sapien
tgcttcgggcaaatactggctttcc

SEQ ID NO: 3141354 - DNA, 25 bp, Homo sapien
tgtgaggaccttccattcagatgct

SEQ ID NO: 3141355 - DNA, 25 bp, Homo sapien
ttcagatgcttcgggcaaatactgg

SEQ ID NO: 3141356 - DNA, 25 bp, Homo sapien
catgagacagaggaatcgaatgggt

SEQ ID NO: 3141357 - DNA, 25 bp, Homo sapien
agtctgcaggttgtgttcttctcta

SEQ ID NO: 3141358 - DNA, 25 bp, Homo sapien
catgacatgatgtgcttctagcctt

SEQ ID NO: 3141359 - DNA, 25 bp, Homo sapien
ttaaccatggcccagaacaaatgaa

SEQ ID NO: 3141360 - DNA, 25 bp, Homo sapien
ctgtgctcgaatgacactattttta

SEQ ID NO: 3141361 - DNA, 25 bp, Homo sapien
cacagctggaccttagggattctct

SEQ ID NO: 3141362 - DNA, 25 bp, Homo sapien
tctgccactgtgctcgaatgacact

SEQ ID NO: 3141363 - DNA, 25 bp, Homo sapien
tggaccttagggattctctgccact

SEQ ID NO: 3141364 - DNA, 25 bp, Homo sapien
gggcactgtgggtcaacagtcatgc

SEQ ID NO: 3141365 - DNA, 25 bp, Homo sapien
tttcagaatttgtccatatgcagcc

SEQ ID NO: 3141366 - DNA, 25 bp, Homo sapien
gcttgggcatcttctgttagcctgc

SEQ ID NO: 3141367 - DNA, 25 bp, Homo sapien
tatgcagccagacatctcacaaaca

SEQ ID NO: 3141368 - DNA, 25 bp, Homo sapien
tagaaaatagtctgagctggacttg

SEQ ID NO: 3141369 - DNA, 25 bp, Homo sapien
tcattgtagttctatcacaagctcc

SEQ ID NO: 3141370 - DNA, 25 bp, Homo sapien
ccgcgcaggtctggcctcttcatga

SEQ ID NO: 3141371 - DNA, 25 bp, Homo sapien
gggccgcatacactttcattgtagt

SEQ ID NO: 3141372 - DNA, 25 bp, Homo sapien
tggtgagtcccagtaaactgctgat

SEQ ID NO: 3141373 - DNA, 25 bp, Homo sapien
tcatgtataagggaagtaggtagag

SEQ ID NO: 3141374 - DNA, 25 bp, Homo sapien
gtagaggcctttgatggtgagtccc

SEQ ID NO: 3141375 - DNA, 25 bp, Homo sapien
actaaggatggcttatcatacagat

SEQ ID NO: 3141376 - DNA, 25 bp, Homo sapien
tattaagagtctccatccgacggtc

SEQ ID NO: 3141377 - DNA, 25 bp, Homo sapien
ctgggcagagtatcaatgaatggca

SEQ ID NO: 3141378 - DNA, 25 bp, Homo sapien
gagtctccatccgacggtcaaagct

SEQ ID NO: 3141379 - DNA, 25 bp, Homo sapien
catccgacggtcaaagcttatctca

SEQ ID NO: 3141380 - DNA, 25 bp, Homo sapien
ttattcaagaacaaggttttgctgc

SEQ ID NO: 3141381 - DNA, 25 bp, Homo sapien
attcaagaacaaggttttgctgcat

SEQ ID NO: 3141382 - DNA, 25 bp, Homo sapien
tattcaagaacaaggttttgctgca

SEQ ID NO: 3141383 - DNA, 25 bp, Homo sapien
cctgaaatgacacgcatgcatcctg

SEQ ID NO: 3141384 - DNA, 25 bp, Homo sapien
acacgataggatctgaatgtccaaa

SEQ ID NO: 3141385 - DNA, 25 bp, Homo sapien
ctttgcctgaaatgacacgcatgca

SEQ ID NO: 3141386 - DNA, 25 bp, Homo sapien
gcatgcatcctgctacacgatagga

SEQ ID NO: 3141387 - DNA, 25 bp, Homo sapien
gatctgtaggccagtaggacactga

SEQ ID NO: 3141388 - DNA, 25 bp, Homo sapien
ctgacagactcaagtgcctgttgat

SEQ ID NO: 3141389 - DNA, 25 bp, Homo sapien
ttcaggacagctggcgatgactggg

SEQ ID NO: 3141390 - DNA, 25 bp, Homo sapien
cctgttgatctgtaggccagtagga

SEQ ID NO: 3141391 - DNA, 25 bp, Homo sapien
tcaccattcaggatacagaatgggc

SEQ ID NO: 3141392 - DNA, 25 bp, Homo sapien
ggaaatcaccattcaggatacagaa

SEQ ID NO: 3141393 - DNA, 25 bp, Homo sapien
cattcaggatacagaatgggcatgt

SEQ ID NO: 3141394 - DNA, 25 bp, Homo sapien
cttgaggaaatcaccattcaggata

SEQ ID NO: 3141395 - DNA, 25 bp, Homo sapien
tgaagactttcaatttccatttggc

SEQ ID NO: 3141396 - DNA, 25 bp, Homo sapien
tagtccttgaagactttcaatttcc

SEQ ID NO: 3141397 - DNA, 25 bp, Homo sapien
gtccttgaagactttcaatttccat

SEQ ID NO: 3141398 - DNA, 25 bp, Homo sapien
agactttcaatttccatttggcaat

SEQ ID NO: 3141399 - DNA, 25 bp, Homo sapien
accacttctccagatttctctgaat

SEQ ID NO: 3141400 - DNA, 25 bp, Homo sapien
tagtctccacttgctggggaaaatg

SEQ ID NO: 3141401 - DNA, 25 bp, Homo sapien
tggggaaaatgtactctctaactct

SEQ ID NO: 3141402 - DNA, 25 bp, Homo sapien
ctaactctgttatgcaccacttctc

SEQ ID NO: 3141403 - DNA, 25 bp, Homo sapien
catagccagctataccatcatgggc

SEQ ID NO: 3141404 - DNA, 25 bp, Homo sapien
taactgatgcaaagcatgagctccc

SEQ ID NO: 3141405 - DNA, 25 bp, Homo sapien
gctgtgactacatctggctcaggaa

SEQ ID NO: 3141406 - DNA, 25 bp, Homo sapien
gacaccctcgttggatcagctgaaa

SEQ ID NO: 3141407 - DNA, 25 bp, Homo sapien
gctgcccaattcttagatcagtggt

SEQ ID NO: 3141408 - DNA, 25 bp, Homo sapien
caattggtcaattgttctagcatca

SEQ ID NO: 3141409 - DNA, 25 bp, Homo sapien
cttccatcggtgtttctagttactg

SEQ ID NO: 3141410 - DNA, 25 bp, Homo sapien
tagttactgtagcaatcctatgctg

SEQ ID NO: 3141411 - DNA, 25 bp, Homo sapien
tccccatataagctacctgatggct

SEQ ID NO: 3141412 - DNA, 25 bp, Homo sapien
ttcaagggctttgtcacatcatcag

SEQ ID NO: 3141413 - DNA, 25 bp, Homo sapien
ggtttccgcttgtgctactttgtag

SEQ ID NO: 3141414 - DNA, 25 bp, Homo sapien
tgtctgggacacaatcagatcttaa

SEQ ID NO: 3141415 - DNA, 25 bp, Homo sapien
tgatgtgaagtgtggaaataccagt

SEQ ID NO: 3141416 - DNA, 25 bp, Homo sapien
ctttctctgcatgtgtagactgaat

SEQ ID NO: 3141417 - DNA, 25 bp, Homo sapien
gtggaaataccagtcttcagtgttt

SEQ ID NO: 3141418 - DNA, 25 bp, Homo sapien
gaagtgtggaaataccagtcttcag

SEQ ID NO: 3141419 - DNA, 25 bp, Homo sapien
ctgtcataaacaagagccaaatcca

SEQ ID NO: 3141420 - DNA, 25 bp, Homo sapien
acaacataggtcatgtgcttacttc

SEQ ID NO: 3141421 - DNA, 25 bp, Homo sapien
ctgtctggcccaacataggtcatgt

SEQ ID NO: 3141422 - DNA, 25 bp, Homo sapien
ccaacataggtcatgttttacaaca

SEQ ID NO: 3141423 - DNA, 25 bp, Homo sapien
gaagaagcacatgtcaaatcacagg

SEQ ID NO: 3141424 - DNA, 25 bp, Homo sapien
tatattaatgttaccaaggccgact

SEQ ID NO: 3141425 - DNA, 25 bp, Homo sapien
gatacagtctcagtataagccaaga

SEQ ID NO: 3141426 - DNA, 25 bp, Homo sapien
gcaataaggaacaggataactctct

SEQ ID NO: 3141427 - DNA, 25 bp, Homo sapien
ccacaaactgccctcctttggatcc

SEQ ID NO: 3141428 - DNA, 25 bp, Homo sapien
cacaaactgccctcctttggatccc

SEQ ID NO: 3141429 - DNA, 25 bp, Homo sapien
aactgccctcctttggatcccccat

SEQ ID NO: 3141430 - DNA, 25 bp, Homo sapien
tccacaaactgccctcctttggatc

SEQ ID NO: 3141431 - DNA, 25 bp, Homo sapien
ttgaagtgccttgagggtgaaccag

SEQ ID NO: 3141432 - DNA, 25 bp, Homo sapien
gggcattggatagctttcagtggtt

SEQ ID NO: 3141433 - DNA, 25 bp, Homo sapien
tgggtagggcattggatagctttca

SEQ ID NO: 3141434 - DNA, 25 bp, Homo sapien
aagaatttgaagtgccttgagggtg

SEQ ID NO: 3141435 - DNA, 25 bp, Homo sapien
cttctaattaatgagtaatctctgc

SEQ ID NO: 3141436 - DNA, 25 bp, Homo sapien
tgacctgtacagtttgctgccagtg

SEQ ID NO: 3141437 - DNA, 25 bp, Homo sapien
ctgctggagagaaagttccctcgta

SEQ ID NO: 3141438 - DNA, 25 bp, Homo sapien
ggctgctatgcttaatctggtgtgt

SEQ ID NO: 3141439 - DNA, 25 bp, Homo sapien
tgagaaggcctagttggtgtcctcg

SEQ ID NO: 3141440 - DNA, 25 bp, Homo sapien
tggtgtcctcgaatctgaccaaccc

SEQ ID NO: 3141441 - DNA, 25 bp, Homo sapien
ctcgaatctgaccaaccccagacag

SEQ ID NO: 3141442 - DNA, 25 bp, Homo sapien
tctgaccaaccccagacagcacatt

SEQ ID NO: 3141443 - DNA, 25 bp, Homo sapien
tatcttcacgggtacgtgtcttcct

SEQ ID NO: 3141444 - DNA, 25 bp, Homo sapien
taagtgctggcagtggacatccttg

SEQ ID NO: 3141445 - DNA, 25 bp, Homo sapien
tttaatagactccatataatgctct

SEQ ID NO: 3141446 - DNA, 25 bp, Homo sapien
cttattttactgactaggacctcta

SEQ ID NO: 3141447 - DNA, 25 bp, Homo sapien
gcatctagcatctagtcttttacca

SEQ ID NO: 3141448 - DNA, 25 bp, Homo sapien
catgatagttggaataggatttgta

SEQ ID NO: 3141449 - DNA, 25 bp, Homo sapien
tactgtcttagtaaaatgagtttgg

SEQ ID NO: 3141450 - DNA, 25 bp, Homo sapien
tatttttcatgatagttggaatagg

SEQ ID NO: 3141451 - DNA, 25 bp, Homo sapien
cctgggcttttctctactagtagac

SEQ ID NO: 3141452 - DNA, 25 bp, Homo sapien
gtctgtgccttgacaagtactccgt

SEQ ID NO: 3141453 - DNA, 25 bp, Homo sapien
aaatgcagcctacaatttattcctg

SEQ ID NO: 3141454 - DNA, 25 bp, Homo sapien
tccgtgttaattgtgctgaatccac

SEQ ID NO: 3141455 - DNA, 25 bp, Homo sapien
ttttcttctcaatgatgtagacatc

SEQ ID NO: 3141456 - DNA, 25 bp, Homo sapien
tcctcagatccagtcgaattctttc

SEQ ID NO: 3141457 - DNA, 25 bp, Homo sapien
caacaccttgtcttcaattatgctg

SEQ ID NO: 3141458 - DNA, 25 bp, Homo sapien
ttgttcatattgtttttccaacacc

SEQ ID NO: 3141459 - DNA, 25 bp, Homo sapien
ggcttgcatggcttgtatgtcccat

SEQ ID NO: 3141460 - DNA, 25 bp, Homo sapien
caagttctcagatatgaccctggga

SEQ ID NO: 3141461 - DNA, 25 bp, Homo sapien
taaaacactgcattaccacaagggc

SEQ ID NO: 3141462 - DNA, 25 bp, Homo sapien
tgctgtgccatacaccagtaggtct

SEQ ID NO: 3141463 - DNA, 25 bp, Homo sapien
gaaaattgatgttcacgatggccct

SEQ ID NO: 3141464 - DNA, 25 bp, Homo sapien
tctttttgggcaagcactggcatca

SEQ ID NO: 3141465 - DNA, 25 bp, Homo sapien
ggagctctcagagtactcacttgtg

SEQ ID NO: 3141466 - DNA, 25 bp, Homo sapien
caaagattaatgtgacgctgcagcg

SEQ ID NO: 3141467 - DNA, 25 bp, Homo sapien
cagtgtaagacacaacagtattcaa

SEQ ID NO: 3141468 - DNA, 25 bp, Homo sapien
aagtgccttggagtgtcttctcggc

SEQ ID NO: 3141469 - DNA, 25 bp, Homo sapien
catctcattgatgcgctgagcgtac

SEQ ID NO: 3141470 - DNA, 25 bp, Homo sapien
gcttatcagacacccacttatcgag

SEQ ID NO: 3141471 - DNA, 25 bp, Homo sapien
tttccttgcacatcagaatccaact

SEQ ID NO: 3141472 - DNA, 25 bp, Homo sapien
gatggagctctagacgtgttctgca

SEQ ID NO: 3141473 - DNA, 25 bp, Homo sapien
tctcagtccatggaaaagttgtgac

SEQ ID NO: 3141474 - DNA, 25 bp, Homo sapien
ttcctgttgagcctcctaaaagaca

SEQ ID NO: 3141475 - DNA, 25 bp, Homo sapien
cgtcttaatcttccctccattgtgc

SEQ ID NO: 3141476 - DNA, 25 bp, Homo sapien
cactctgtattaggacatctgtttt

SEQ ID NO: 3141477 - DNA, 25 bp, Homo sapien
attttcttaattggcgtcattagtc

SEQ ID NO: 3141478 - DNA, 25 bp, Homo sapien
tggcgtcattagtctgaccatcagc

SEQ ID NO: 3141479 - DNA, 25 bp, Homo sapien
ttgtgcttccactctgtattaggac

SEQ ID NO: 3141480 - DNA, 25 bp, Homo sapien
tcaagcagccattcttgtgaattct

SEQ ID NO: 3141481 - DNA, 25 bp, Homo sapien
cagggtcacattcaagcagccattc

SEQ ID NO: 3141482 - DNA, 25 bp, Homo sapien
ttaggctctagtgacaaaatagcct

SEQ ID NO: 3141483 - DNA, 25 bp, Homo sapien
caaaatagcctttgacagggtcaca

SEQ ID NO: 3141484 - DNA, 25 bp, Homo sapien
ttgcagtagttacatcgttcccgta

SEQ ID NO: 3141485 - DNA, 25 bp, Homo sapien
ccagtgtcggagaaactctagcaca

SEQ ID NO: 3141486 - DNA, 25 bp, Homo sapien
ttgaataaaggcaacagttttccag

SEQ ID NO: 3141487 - DNA, 25 bp, Homo sapien
agttacatcgttcccgtaatctctg

SEQ ID NO: 3141488 - DNA, 25 bp, Homo sapien
atagctactcctactgcttccaacc

SEQ ID NO: 3141489 - DNA, 25 bp, Homo sapien
caataggatctctgtaaattggtgt

SEQ ID NO: 3141490 - DNA, 25 bp, Homo sapien
tagctactcctactgcttccaaccc

SEQ ID NO: 3141491 - DNA, 25 bp, Homo sapien
ttcaataggatctctgtaaattggt

SEQ ID NO: 3141492 - DNA, 25 bp, Homo sapien
gattttccatcgcttaaagtggact

SEQ ID NO: 3141493 - DNA, 25 bp, Homo sapien
tattatatggttgtgtccaggaccc

SEQ ID NO: 3141494 - DNA, 25 bp, Homo sapien
ggacccaactttgatcatacagaca

SEQ ID NO: 3141495 - DNA, 25 bp, Homo sapien
tcatggttgttccttcagaattggg

SEQ ID NO: 3141496 - DNA, 25 bp, Homo sapien
cctgagtatctgaagttgtcccctt

SEQ ID NO: 3141497 - DNA, 25 bp, Homo sapien
gtatctgaagttgtccccttcatct

SEQ ID NO: 3141498 - DNA, 25 bp, Homo sapien
tctgcctgagtatctgaagttgtcc

SEQ ID NO: 3141499 - DNA, 25 bp, Homo sapien
cttctgcctgagtatctgaagttgt

SEQ ID NO: 3141500 - DNA, 25 bp, Homo sapien
tgcttctggaccttgggtgagggcg

SEQ ID NO: 3141501 - DNA, 25 bp, Homo sapien
tgagggcgtaagacacaggctcctc

SEQ ID NO: 3141502 - DNA, 25 bp, Homo sapien
gaccttgggtgagggcgtaagacac

SEQ ID NO: 3141503 - DNA, 25 bp, Homo sapien
caggctcctcatccgggatgcactg

SEQ ID NO: 3141504 - DNA, 25 bp, Homo sapien
aggatgggatgatctttgaatattt

SEQ ID NO: 3141505 - DNA, 25 bp, Homo sapien
tgatctttgaatatttgttggcacc

SEQ ID NO: 3141506 - DNA, 25 bp, Homo sapien
ggatgatctttgaatatttgttggc

SEQ ID NO: 3141507 - DNA, 25 bp, Homo sapien
aatatttgttggcaccttttatgcc

SEQ ID NO: 3141508 - DNA, 25 bp, Homo sapien
gcctatgtattcataaggtatttta

SEQ ID NO: 3141509 - DNA, 25 bp, Homo sapien
taagaagctttgtgtggcatggaca

SEQ ID NO: 3141510 - DNA, 25 bp, Homo sapien
catggacatgaaatatgcctatgta

SEQ ID NO: 3141511 - DNA, 25 bp, Homo sapien
taagcataaacgcaagccatctgcc

SEQ ID NO: 3141512 - DNA, 25 bp, Homo sapien
aagaattcgtgttaagatagcaggc

SEQ ID NO: 3141513 - DNA, 25 bp, Homo sapien
tgaagaattcgtgttaagatagcag

SEQ ID NO: 3141514 - DNA, 25 bp, Homo sapien
ttcgtgttaagatagcaggcagcag

SEQ ID NO: 3141515 - DNA, 25 bp, Homo sapien
aattcgtgttaagatagcaggcagc

SEQ ID NO: 3141516 - DNA, 25 bp, Homo sapien
ttgatgggctgcattcatgtcaaaa

SEQ ID NO: 3141517 - DNA, 25 bp, Homo sapien
tgaagcattgaagcagtagatttca

SEQ ID NO: 3141518 - DNA, 25 bp, Homo sapien
tgaagcagtagatttcatttggttg

SEQ ID NO: 3141519 - DNA, 25 bp, Homo sapien
tgggctgcattcatgtcaaaatcac

SEQ ID NO: 3141520 - DNA, 25 bp, Homo sapien
aggagttcagatgttcgtcaaagat

SEQ ID NO: 3141521 - DNA, 25 bp, Homo sapien
ctttcacatagcactctccctctag

SEQ ID NO: 3141522 - DNA, 25 bp, Homo sapien
ttcagatgttcgtcaaagataagga

SEQ ID NO: 3141523 - DNA, 25 bp, Homo sapien
gagttcagatgttcgtcaaagataa

SEQ ID NO: 3141524 - DNA, 25 bp, Homo sapien
ggtaaaagggagcaagcagcaacgt

SEQ ID NO: 3141525 - DNA, 25 bp, Homo sapien
ccagctctggttgacgtgtctgtca

SEQ ID NO: 3141526 - DNA, 25 bp, Homo sapien
tgtcatcctctagcaggttagctgg

SEQ ID NO: 3141527 - DNA, 25 bp, Homo sapien
ggctaggcttgctcacatttctgga

SEQ ID NO: 3141528 - DNA, 25 bp, Homo sapien
catcatccagccttgtaatctctct

SEQ ID NO: 3141529 - DNA, 25 bp, Homo sapien
ttcttcgcatgttttgcaatgttgg

SEQ ID NO: 3141530 - DNA, 25 bp, Homo sapien
tctgttgcccaactcgttgttaaat

SEQ ID NO: 3141531 - DNA, 25 bp, Homo sapien
taaagctcagatgaacatataagca

SEQ ID NO: 3141532 - DNA, 25 bp, Homo sapien
tcaatattatatctccaagcagtca

SEQ ID NO: 3141533 - DNA, 25 bp, Homo sapien
caatattatatctccaagcagtcat

SEQ ID NO: 3141534 - DNA, 25 bp, Homo sapien
tgtctaagtacctcaaatagtttct

SEQ ID NO: 3141535 - DNA, 25 bp, Homo sapien
tctcccatatttgtctaagtacctc

SEQ ID NO: 3141536 - DNA, 25 bp, Homo sapien
cccatatttgtctaagtacctcaaa

SEQ ID NO: 3141537 - DNA, 25 bp, Homo sapien
gtctcccatatttgtctaagtacct

SEQ ID NO: 3141538 - DNA, 25 bp, Homo sapien
taagagctacagtatgcagcagaag

SEQ ID NO: 3141539 - DNA, 25 bp, Homo sapien
tctcccattgatagttcgagtggac

SEQ ID NO: 3141540 - DNA, 25 bp, Homo sapien
gacctgtgacagataaatccaggag

SEQ ID NO: 3141541 - DNA, 25 bp, Homo sapien
tggtctagacaaagagtcagagtgg

SEQ ID NO: 3141542 - DNA, 25 bp, Homo sapien
tactgtgaagtgcacatgtcatcac

SEQ ID NO: 3141543 - DNA, 25 bp, Homo sapien
ctttgtactgtgaagtgcacatgtc

SEQ ID NO: 3141544 - DNA, 25 bp, Homo sapien
tttgtactgtgaagtgcacatgtca

SEQ ID NO: 3141545 - DNA, 25 bp, Homo sapien
tgtactgtgaagtgcacatgtcatc

SEQ ID NO: 3141546 - DNA, 25 bp, Homo sapien
ttttctgaaccttcgtttgcaaatc

SEQ ID NO: 3141547 - DNA, 25 bp, Homo sapien
tgtaaagtgtagttgtataacacct

SEQ ID NO: 3141548 - DNA, 25 bp, Homo sapien
aagatccggaatcacttcacttttc

SEQ ID NO: 3141549 - DNA, 25 bp, Homo sapien
cggaaaagaataagatccggaatca

SEQ ID NO: 3141550 - DNA, 25 bp, Homo sapien
ctttatgtaccagaaggcgtcccga

SEQ ID NO: 3141551 - DNA, 25 bp, Homo sapien
aataacttgcggcttagaggacggc

SEQ ID NO: 3141552 - DNA, 25 bp, Homo sapien
aattttcgggaatccacacgctcgg

SEQ ID NO: 3141553 - DNA, 25 bp, Homo sapien
cagacccggagagtttaaagcatca

SEQ ID NO: 3141554 - DNA, 25 bp, Homo sapien
ctgatgaagacccggacgctgcggc

SEQ ID NO: 3141555 - DNA, 25 bp, Homo sapien
tgcggccggcgggcacgaggtgaga

SEQ ID NO: 3141556 - DNA, 25 bp, Homo sapien
agcgcagagtctcggggacagggca

SEQ ID NO: 3141557 - DNA, 25 bp, Homo sapien
cagggccgtgaggttcccagagaaa

SEQ ID NO: 3141558 - DNA, 25 bp, Homo sapien
caaatgagaattatatccaatgatc

SEQ ID NO: 3141559 - DNA, 25 bp, Homo sapien
ccaatgatcgtttgaatgtggactt

SEQ ID NO: 3141560 - DNA, 25 bp, Homo sapien
tcgactcttttcgactcaaggcttg

SEQ ID NO: 3141561 - DNA, 25 bp, Homo sapien
ttggtcttctccgaaagctttttca

SEQ ID NO: 3141562 - DNA, 25 bp, Homo sapien
tttatatgaggtaatgggctgtgat

SEQ ID NO: 3141563 - DNA, 25 bp, Homo sapien
gctgtgatgtaacgaggacctcctg

SEQ ID NO: 3141564 - DNA, 25 bp, Homo sapien
taatgggctgtgatgtaacgaggac

SEQ ID NO: 3141565 - DNA, 25 bp, Homo sapien
tatatgaggtaatgggctgtgatgt

SEQ ID NO: 3141566 - DNA, 25 bp, Homo sapien
tctgaaacatgtgtacagatacatg

SEQ ID NO: 3141567 - DNA, 25 bp, Homo sapien
ttacggatgtattctgatactgaat

SEQ ID NO: 3141568 - DNA, 25 bp, Homo sapien
cagatacatgtatatcattcctgct

SEQ ID NO: 3141569 - DNA, 25 bp, Homo sapien
tcctgctattatctttagtagcttg

SEQ ID NO: 3141570 - DNA, 25 bp, Homo sapien
cctacttgtgatatcagcaaaagtg

SEQ ID NO: 3141571 - DNA, 25 bp, Homo sapien
cagcatgggtctgccttgatcctac

SEQ ID NO: 3141572 - DNA, 25 bp, Homo sapien
atgggtctgccttgatcctacttgt

SEQ ID NO: 3141573 - DNA, 25 bp, Homo sapien
acatccatggattgcggctggttgg

SEQ ID NO: 3141574 - DNA, 25 bp, Homo sapien
gcatctctataaccatccccgtggg

SEQ ID NO: 3141575 - DNA, 25 bp, Homo sapien
gtcctctaggtgaggccctgtcaag

SEQ ID NO: 3141576 - DNA, 25 bp, Homo sapien
ggaactctagggctgcatctctata

SEQ ID NO: 3141577 - DNA, 25 bp, Homo sapien
tcagcagctgtgaaagctggaccat

SEQ ID NO: 3141578 - DNA, 25 bp, Homo sapien
aatataaaatactctgggatctcag

SEQ ID NO: 3141579 - DNA, 25 bp, Homo sapien
gctgcaattacaggttctaataata

SEQ ID NO: 3141580 - DNA, 25 bp, Homo sapien
ttgtgtcttccttgtgggccattac

SEQ ID NO: 3141581 - DNA, 25 bp, Homo sapien
tggggttaagtgatactggctaaag

SEQ ID NO: 3141582 - DNA, 25 bp, Homo sapien
cttggggttaagtgatactggctaa

SEQ ID NO: 3141583 - DNA, 25 bp, Homo sapien
gggttaagtgatactggctaaagta

SEQ ID NO: 3141584 - DNA, 25 bp, Homo sapien
ttaagtgatactggctaaagtaatc

SEQ ID NO: 3141585 - DNA, 25 bp, Homo sapien
tttcaactatgagaaagggcttaga

SEQ ID NO: 3141586 - DNA, 25 bp, Homo sapien
ctatgagaaagggcttagaagatgg

SEQ ID NO: 3141587 - DNA, 25 bp, Homo sapien
aactatgagaaagggcttagaagat

SEQ ID NO: 3141588 - DNA, 25 bp, Homo sapien
tcaactatgagaaagggcttagaag

SEQ ID NO: 3141589 - DNA, 25 bp, Homo sapien
gtgctgaacaattctgcattgatga

SEQ ID NO: 3141590 - DNA, 25 bp, Homo sapien
ggatatacattttctcttagcgcct

SEQ ID NO: 3141591 - DNA, 25 bp, Homo sapien
tctgcagaattctctcagtttagga

SEQ ID NO: 3141592 - DNA, 25 bp, Homo sapien
tctcttagcgcctgtctttctgctc

SEQ ID NO: 3141593 - DNA, 25 bp, Homo sapien
cattttctcttagcgcctgtctttc

SEQ ID NO: 3141594 - DNA, 25 bp, Homo sapien
ggtggcacggcttgctgaaactcag

SEQ ID NO: 3141595 - DNA, 25 bp, Homo sapien
gaactcaggactctgcccagtgcat

SEQ ID NO: 3141596 - DNA, 25 bp, Homo sapien
tagttggaatcctcgtggcctagac

SEQ ID NO: 3141597 - DNA, 25 bp, Homo sapien
gcaggttaccttctggcctaagata

SEQ ID NO: 3141598 - DNA, 25 bp, Homo sapien
ccacagatctggcttgttccaggtc

SEQ ID NO: 3141599 - DNA, 25 bp, Homo sapien
tgtgattcccatttcttggctatgg

SEQ ID NO: 3141600 - DNA, 25 bp, Homo sapien
gttccaggtctttgtctaagtgcat

SEQ ID NO: 3141601 - DNA, 25 bp, Homo sapien
tatgagtttccccttgtggccccag

SEQ ID NO: 3141602 - DNA, 25 bp, Homo sapien
ctgcttgcacggcatttggtgagat

SEQ ID NO: 3141603 - DNA, 25 bp, Homo sapien
ctcctgcttgcacggcatttggtga

SEQ ID NO: 3141604 - DNA, 25 bp, Homo sapien
tcctgcttgcacggcatttggtgag

SEQ ID NO: 3141605 - DNA, 25 bp, Homo sapien
cctgcttgcacggcatttggtgaga

SEQ ID NO: 3141606 - DNA, 25 bp, Homo sapien
gcttcatgcgggtcttctggagctc

SEQ ID NO: 3141607 - DNA, 25 bp, Homo sapien
gcagcttcatgcgggtcttctggag

SEQ ID NO: 3141608 - DNA, 25 bp, Homo sapien
cagcagcttcatgcgggtcttctgg

SEQ ID NO: 3141609 - DNA, 25 bp, Homo sapien
ccagcagcttcatgcgggtcttctg

SEQ ID NO: 3141610 - DNA, 25 bp, Homo sapien
gcttagaatagtggagcaactcctg

SEQ ID NO: 3141611 - DNA, 25 bp, Homo sapien
gatatttaacacaactttcaggcct

SEQ ID NO: 3141612 - DNA, 25 bp, Homo sapien
tactggatccaaaaacctgagagga

SEQ ID NO: 3141613 - DNA, 25 bp, Homo sapien
tagttctatcctccaatgacccaag

SEQ ID NO: 3141614 - DNA, 25 bp, Homo sapien
tccaaggctggattacggtaaagct

SEQ ID NO: 3141615 - DNA, 25 bp, Homo sapien
tttcccaggacactcccatagtggg

SEQ ID NO: 3141616 - DNA, 25 bp, Homo sapien
gaataatcctagctctatctgcagg

SEQ ID NO: 3141617 - DNA, 25 bp, Homo sapien
tagcttagggatggcactcaacagg

SEQ ID NO: 3141618 - DNA, 25 bp, Homo sapien
cccatatttatagatgtgatcacta

SEQ ID NO: 3141619 - DNA, 25 bp, Homo sapien
ttaagttagtgacttgttccctgag

SEQ ID NO: 3141620 - DNA, 25 bp, Homo sapien
catttggtccccacaacaatccttt

SEQ ID NO: 3141621 - DNA, 25 bp, Homo sapien
ccagggctctcgcttgattgtaaaa

SEQ ID NO: 3141622 - DNA, 25 bp, Homo sapien
ggtgctcctctcatcgcatgcgtgg

SEQ ID NO: 3141623 - DNA, 25 bp, Homo sapien
tctcccacagcaaatttccacctca

SEQ ID NO: 3141624 - DNA, 25 bp, Homo sapien
tgcgtggtatcaggcttggctcttc

SEQ ID NO: 3141625 - DNA, 25 bp, Homo sapien
tccattggtggtaatggtgctcctc

SEQ ID NO: 3141626 - DNA, 25 bp, Homo sapien
aattccatctgcacatcccgcacag

SEQ ID NO: 3141627 - DNA, 25 bp, Homo sapien
tacaattccatctgcacatcccgca

SEQ ID NO: 3141628 - DNA, 25 bp, Homo sapien
tccatctgcacatcccgcacagatg

SEQ ID NO: 3141629 - DNA, 25 bp, Homo sapien
ctacaattccatctgcacatcccgc

SEQ ID NO: 3141630 - DNA, 25 bp, Homo sapien
tccaaagatagccttgtactcccag

SEQ ID NO: 3141631 - DNA, 25 bp, Homo sapien
gcaacacacttggagactaatacta

SEQ ID NO: 3141632 - DNA, 25 bp, Homo sapien
catgctgaatgagccagatgcccta

SEQ ID NO: 3141633 - DNA, 25 bp, Homo sapien
gatacataggacagatagcaacaca

SEQ ID NO: 3141634 - DNA, 25 bp, Homo sapien
ggaaattgacctgttagctctgagc

SEQ ID NO: 3141635 - DNA, 25 bp, Homo sapien
gttaactgtcagagaagatcctggg

SEQ ID NO: 3141636 - DNA, 25 bp, Homo sapien
gatcaaggtggtatctctggagagc

SEQ ID NO: 3141637 - DNA, 25 bp, Homo sapien
gccaaatggaggtaggagatcttct

SEQ ID NO: 3141638 - DNA, 25 bp, Homo sapien
tgggaagtacccaaagcaatggaat

SEQ ID NO: 3141639 - DNA, 25 bp, Homo sapien
cctccttgggtactaatgttgttga

SEQ ID NO: 3141640 - DNA, 25 bp, Homo sapien
gatcagtggcattagtatctcctgg

SEQ ID NO: 3141641 - DNA, 25 bp, Homo sapien
gttgtttatcctatcgaccagtggt

SEQ ID NO: 3141642 - DNA, 25 bp, Homo sapien
cagctgccttgaattaagatccagg

SEQ ID NO: 3141643 - DNA, 25 bp, Homo sapien
cctttaagggtaatattatgtgtga

SEQ ID NO: 3141644 - DNA, 25 bp, Homo sapien
acctttaagggtaatattatgtgtg

SEQ ID NO: 3141645 - DNA, 25 bp, Homo sapien
acttgacggagggaaagctggctca

SEQ ID NO: 3141646 - DNA, 25 bp, Homo sapien
catgggcctgagaacttgacggagg

SEQ ID NO: 3141647 - DNA, 25 bp, Homo sapien
ggcctgagaacttgacggagggaaa

SEQ ID NO: 3141648 - DNA, 25 bp, Homo sapien
ctgagaacttgacggagggaaagct

SEQ ID NO: 3141649 - DNA, 25 bp, Homo sapien
ctaggaggaaggttggcctgtgcat

SEQ ID NO: 3141650 - DNA, 25 bp, Homo sapien
tcctgctgatccactgttccaaggg

SEQ ID NO: 3141651 - DNA, 25 bp, Homo sapien
agctgagttgcccatacatcctgct

SEQ ID NO: 3141652 - DNA, 25 bp, Homo sapien
tgctgatccactgttccaagggaat

SEQ ID NO: 3141653 - DNA, 25 bp, Homo sapien
ctttttaactgaggaatcagcagac

SEQ ID NO: 3141654 - DNA, 25 bp, Homo sapien
acaatggtggttgtgatgtattccc

SEQ ID NO: 3141655 - DNA, 25 bp, Homo sapien
ttgggtgggaggacaatggtggttg

SEQ ID NO: 3141656 - DNA, 25 bp, Homo sapien
gacaatggtggttgtgatgtattcc

SEQ ID NO: 3141657 - DNA, 25 bp, Homo sapien
tcaacttctccagggattcggatat

SEQ ID NO: 3141658 - DNA, 25 bp, Homo sapien
tccagctttgcctctatggcggcat

SEQ ID NO: 3141659 - DNA, 25 bp, Homo sapien
tggcaccgagttctcatctcgacag

SEQ ID NO: 3141660 - DNA, 25 bp, Homo sapien
tcccatatttttcacctaatagtcc

SEQ ID NO: 3141661 - DNA, 25 bp, Homo sapien
tcatctgatatctcttgccatgtct

SEQ ID NO: 3141662 - DNA, 25 bp, Homo sapien
tacagcagccttaaatatcttcttg

SEQ ID NO: 3141663 - DNA, 25 bp, Homo sapien
tttacagcagccttaaatatcttct

SEQ ID NO: 3141664 - DNA, 25 bp, Homo sapien
ttctcgttttcagcattggtagaag

SEQ ID NO: 3141665 - DNA, 25 bp, Homo sapien
cttagcctggctgtgtttcatttta

SEQ ID NO: 3141666 - DNA, 25 bp, Homo sapien
ttagcctggctgtgtttcattttac

SEQ ID NO: 3141667 - DNA, 25 bp, Homo sapien
ctgagaacaggtacctcttagcctg

SEQ ID NO: 3141668 - DNA, 25 bp, Homo sapien
agaacaggtacctcttagcctggct

SEQ ID NO: 3141669 - DNA, 25 bp, Homo sapien
gggagtagcctagtttcatgtcaca

SEQ ID NO: 3141670 - DNA, 25 bp, Homo sapien
gaataatcctcggttctgttccagt

SEQ ID NO: 3141671 - DNA, 25 bp, Homo sapien
taataagagggttgatgtgtccagc

SEQ ID NO: 3141672 - DNA, 25 bp, Homo sapien
catttgtactcatagaaggaggcgt

SEQ ID NO: 3141673 - DNA, 25 bp, Homo sapien
ttctttgctacttcagctagcagaa

SEQ ID NO: 3141674 - DNA, 25 bp, Homo sapien
cttcagctagcagaagggtcttccc

SEQ ID NO: 3141675 - DNA, 25 bp, Homo sapien
cagctagcagaagggtcttcccagt

SEQ ID NO: 3141676 - DNA, 25 bp, Homo sapien
tacttcagctagcagaagggtcttc

SEQ ID NO: 3141677 - DNA, 25 bp, Homo sapien
tactcattactgaacggagactgat

SEQ ID NO: 3141678 - DNA, 25 bp, Homo sapien
tgaacggagactgatttagcagact

SEQ ID NO: 3141679 - DNA, 25 bp, Homo sapien
cttagcctggacatactcattactg

SEQ ID NO: 3141680 - DNA, 25 bp, Homo sapien
actggagtgaccagagggcttgtcc

SEQ ID NO: 3141681 - DNA, 25 bp, Homo sapien
tggaaaggactatccggacaaagcg

SEQ ID NO: 3141682 - DNA, 25 bp, Homo sapien
tgaccttccttttgacgcgcagcag

SEQ ID NO: 3141683 - DNA, 25 bp, Homo sapien
tagggtagctttgaaccagacaccg

SEQ ID NO: 3141684 - DNA, 25 bp, Homo sapien
gaaggtcaggttcacaaacattggc

SEQ ID NO: 3141685 - DNA, 25 bp, Homo sapien
gagagggaggattcatcgacgtctt

SEQ ID NO: 3141686 - DNA, 25 bp, Homo sapien
tccaaggaccagaataactgctcta

SEQ ID NO: 3141687 - DNA, 25 bp, Homo sapien
tatactttcatgaacggtgacagag

SEQ ID NO: 3141688 - DNA, 25 bp, Homo sapien
ttcatcgacgtctttgtgagatctc

SEQ ID NO: 3141689 - DNA, 25 bp, Homo sapien
ggtgatgtaaccaagagccctagag

SEQ ID NO: 3141690 - DNA, 25 bp, Homo sapien
aatccattgatgtaggtggcgctgc

SEQ ID NO: 3141691 - DNA, 25 bp, Homo sapien
cagggagcttacaacaggcagcagt

SEQ ID NO: 3141692 - DNA, 25 bp, Homo sapien
catgatgatgccgtaaagcaggtca

SEQ ID NO: 3141693 - DNA, 25 bp, Homo sapien
agtctcggccgatgtgataaacacg

SEQ ID NO: 3141694 - DNA, 25 bp, Homo sapien
ttgtttggaagttgcacgcgccgac

SEQ ID NO: 3141695 - DNA, 25 bp, Homo sapien
taaagcggccatccgtacagcagat

SEQ ID NO: 3141696 - DNA, 25 bp, Homo sapien
tccatttttagacagcacggcagat

SEQ ID NO: 3141697 - DNA, 25 bp, Homo sapien
ataactgttacactttggcctggag

SEQ ID NO: 3141698 - DNA, 25 bp, Homo sapien
cacaatgatgttcaggtgcctctgg

SEQ ID NO: 3141699 - DNA, 25 bp, Homo sapien
ttgcaaagacctcagtggactctct

SEQ ID NO: 3141700 - DNA, 25 bp, Homo sapien
gccagatgatcccagaggcgtgaac

SEQ ID NO: 3141701 - DNA, 25 bp, Homo sapien
ggcccctggcttctagggccgagca

SEQ ID NO: 3141702 - DNA, 25 bp, Homo sapien
gcccctggcttctagggccgagcat

SEQ ID NO: 3141703 - DNA, 25 bp, Homo sapien
cccctggcttctagggccgagcata

SEQ ID NO: 3141704 - DNA, 25 bp, Homo sapien
ccctggcttctagggccgagcatac

SEQ ID NO: 3141705 - DNA, 25 bp, Homo sapien
gaaaccctcgcatgcaattgttgca

SEQ ID NO: 3141706 - DNA, 25 bp, Homo sapien
tatctctcgggaaactgggaataca

SEQ ID NO: 3141707 - DNA, 25 bp, Homo sapien
tttagaccgttcactgcagactagg

SEQ ID NO: 3141708 - DNA, 25 bp, Homo sapien
gtagttagttcttgtcccagtccag

SEQ ID NO: 3141709 - DNA, 25 bp, Homo sapien
cctccctggctagtagctaaaccat

SEQ ID NO: 3141710 - DNA, 25 bp, Homo sapien
gaatgtgttgcctaaagagctcaaa

SEQ ID NO: 3141711 - DNA, 25 bp, Homo sapien
tccaagaggaaatacaattgacctg

SEQ ID NO: 3141712 - DNA, 25 bp, Homo sapien
gagctatcagttgcaaacaagttag

SEQ ID NO: 3141713 - DNA, 25 bp, Homo sapien
aataggatattggagaggcatctgg

SEQ ID NO: 3141714 - DNA, 25 bp, Homo sapien
aagggagcttcctatgatcaaggga

SEQ ID NO: 3141715 - DNA, 25 bp, Homo sapien
gaagggagcttcctatgatcaaggg

SEQ ID NO: 3141716 - DNA, 25 bp, Homo sapien
gagaagggagcttcctatgatcaag

SEQ ID NO: 3141717 - DNA, 25 bp, Homo sapien
gagagaagggagcttcctatgatca

SEQ ID NO: 3141718 - DNA, 25 bp, Homo sapien
tgagcacaaacgaccgcgccaaccg

SEQ ID NO: 3141719 - DNA, 25 bp, Homo sapien
gccatcacgggaaactccggggtgc

SEQ ID NO: 3141720 - DNA, 25 bp, Homo sapien
ccggggtgcttactccaatgttgcg

SEQ ID NO: 3141721 - DNA, 25 bp, Homo sapien
aaactccggggtgcttactccaatg

SEQ ID NO: 3141722 - DNA, 25 bp, Homo sapien
gcactgaagcagaaaatccacgcgc

SEQ ID NO: 3141723 - DNA, 25 bp, Homo sapien
tgaagcagaaaatccacgcgcttgt

SEQ ID NO: 3141724 - DNA, 25 bp, Homo sapien
gcagaaaatccacgcgcttgttggc

SEQ ID NO: 3141725 - DNA, 25 bp, Homo sapien
ccgggcgcactgaagcagaaaatcc

SEQ ID NO: 3141726 - DNA, 25 bp, Homo sapien
cgaggatgcggcggggctagggctc

SEQ ID NO: 3141727 - DNA, 25 bp, Homo sapien
tgcggcggggctagggctcgaaacc

SEQ ID NO: 3141728 - DNA, 25 bp, Homo sapien
ggctagggctcgaaaccctggagta

SEQ ID NO: 3141729 - DNA, 25 bp, Homo sapien
gctagggctcgaaaccctggagtac

SEQ ID NO: 3141730 - DNA, 25 bp, Homo sapien
cccgggctgcgggtgagccttcccg

SEQ ID NO: 3141731 - DNA, 25 bp, Homo sapien
cgggctgcgggtgagccttcccgac

SEQ ID NO: 3141732 - DNA, 25 bp, Homo sapien
ggcccgggctgcgggtgagccttcc

SEQ ID NO: 3141733 - DNA, 25 bp, Homo sapien
gggctgcgggtgagccttcccgaca

SEQ ID NO: 3141734 - DNA, 25 bp, Homo sapien
agcggccgccccagcgctgtcattg

SEQ ID NO: 3141735 - DNA, 25 bp, Homo sapien
gccgagctcgcagcggccgccccag

SEQ ID NO: 3141736 - DNA, 25 bp, Homo sapien
ccagcgctgtcattgggcccgcgcg

SEQ ID NO: 3141737 - DNA, 25 bp, Homo sapien
ggagacgctagcggctccgcgctgc

SEQ ID NO: 3141738 - DNA, 25 bp, Homo sapien
cggggtcccggcgcccatggcttcg

SEQ ID NO: 3141739 - DNA, 25 bp, Homo sapien
tcccggcgcccatggcttcgccggc

SEQ ID NO: 3141740 - DNA, 25 bp, Homo sapien
gggtcccggcgcccatggcttcgcc

SEQ ID NO: 3141741 - DNA, 25 bp, Homo sapien
cggcggcggggtcccggcgcccatg

SEQ ID NO: 3141742 - DNA, 25 bp, Homo sapien
tagagcccctttgttgaattacgtg

SEQ ID NO: 3141743 - DNA, 25 bp, Homo sapien
cgcatgcaccgttgaaagttcatta

SEQ ID NO: 3141744 - DNA, 25 bp, Homo sapien
taaaagtaggcgactcggagagaag

SEQ ID NO: 3141745 - DNA, 25 bp, Homo sapien
cagttttttcaagttcgcatgcacc

SEQ ID NO: 3141746 - DNA, 25 bp, Homo sapien
gaattgggactctgagattccagtc

SEQ ID NO: 3141747 - DNA, 25 bp, Homo sapien
tccaatgggcagctgtatgactttg

SEQ ID NO: 3141748 - DNA, 25 bp, Homo sapien
caaaaggcagtacttcttcctttct

SEQ ID NO: 3141749 - DNA, 25 bp, Homo sapien
gaagtaggaacatgactaaaccagg

SEQ ID NO: 3141750 - DNA, 25 bp, Homo sapien
gatggtccgccaatactcagaggca

SEQ ID NO: 3141751 - DNA, 25 bp, Homo sapien
cagagctgccttggtgtccacagat

SEQ ID NO: 3141752 - DNA, 25 bp, Homo sapien
gttgagccaacatgtgatgaaccca

SEQ ID NO: 3141753 - DNA, 25 bp, Homo sapien
taaatcatgaaagacgtgaggctca

SEQ ID NO: 3141754 - DNA, 25 bp, Homo sapien
tccgtcgtggtactgagcacaggct

SEQ ID NO: 3141755 - DNA, 25 bp, Homo sapien
gcattatgtagggaggcagagctcc

SEQ ID NO: 3141756 - DNA, 25 bp, Homo sapien
caagttacataaggtacgaggtgta

SEQ ID NO: 3141757 - DNA, 25 bp, Homo sapien
caagtcccagtgttggattcatcac

SEQ ID NO: 3141758 - DNA, 25 bp, Homo sapien
gagattccacagcataccagtcaga

SEQ ID NO: 3141759 - DNA, 25 bp, Homo sapien
tgagattccacagcataccagtcag

SEQ ID NO: 3141760 - DNA, 25 bp, Homo sapien
atgagattccacagcataccagtca

SEQ ID NO: 3141761 - DNA, 25 bp, Homo sapien
gattccacagcataccagtcagaat

SEQ ID NO: 3141762 - DNA, 25 bp, Homo sapien
cctgacctcatctatggacattttt

SEQ ID NO: 3141763 - DNA, 25 bp, Homo sapien
caaaggaatggacggcaaaattgct

SEQ ID NO: 3141764 - DNA, 25 bp, Homo sapien
cattgggatcaacatatggattcaa

SEQ ID NO: 3141765 - DNA, 25 bp, Homo sapien
aaagcctcagcttagttgcttaaga

SEQ ID NO: 3141766 - DNA, 25 bp, Homo sapien
tatgatactatcacttggcaaaggg

SEQ ID NO: 3141767 - DNA, 25 bp, Homo sapien
ttcttgctcggcagaatgattaact

SEQ ID NO: 3141768 - DNA, 25 bp, Homo sapien
caaaggctcggtgcttgaaaggttg

SEQ ID NO: 3141769 - DNA, 25 bp, Homo sapien
ttgacaatggctgcccgagtttggc

SEQ ID NO: 3141770 - DNA, 25 bp, Homo sapien
ccaccccagtaataaccaccatcaa

SEQ ID NO: 3141771 - DNA, 25 bp, Homo sapien
atcactcccagtgtagacatcacca

SEQ ID NO: 3141772 - DNA, 25 bp, Homo sapien
tcactcccagtgtagacatcaccat

SEQ ID NO: 3141773 - DNA, 25 bp, Homo sapien
agtaataaccaccatcaatcactcc

SEQ ID NO: 3141774 - DNA, 25 bp, Homo sapien
gtttgcattaaagtcaacgctcttc

SEQ ID NO: 3141775 - DNA, 25 bp, Homo sapien
ctacaaacgcgggtagacgtttgca

SEQ ID NO: 3141776 - DNA, 25 bp, Homo sapien
cgcgggtagacgtttgcattaaagt

SEQ ID NO: 3141777 - DNA, 25 bp, Homo sapien
caacgctcttcttggtagcattggc

SEQ ID NO: 3141778 - DNA, 25 bp, Homo sapien
ttgaagttaagtgcaattttggccc

SEQ ID NO: 3141779 - DNA, 25 bp, Homo sapien
tctacacttgatccaatttagtttg

SEQ ID NO: 3141780 - DNA, 25 bp, Homo sapien
tggctatgtagctgactgtaaatcc

SEQ ID NO: 3141781 - DNA, 25 bp, Homo sapien
taacaatacctacttaccaggttgc

SEQ ID NO: 3141782 - DNA, 25 bp, Homo sapien
tatagaatcctacgggccaagtgtt

SEQ ID NO: 3141783 - DNA, 25 bp, Homo sapien
gactgatgaattgcttagggcctcc

SEQ ID NO: 3141784 - DNA, 25 bp, Homo sapien
cttataagaccagaagtgcggcagg

SEQ ID NO: 3141785 - DNA, 25 bp, Homo sapien
tatcctggcagggactacgttggag

SEQ ID NO: 3141786 - DNA, 25 bp, Homo sapien
ctagtgccaggcgtttgtcctcatc

SEQ ID NO: 3141787 - DNA, 25 bp, Homo sapien
tcctcatcagacttaaactgaagct

SEQ ID NO: 3141788 - DNA, 25 bp, Homo sapien
agtgccaggcgtttgtcctcatcag

SEQ ID NO: 3141789 - DNA, 25 bp, Homo sapien
tcatcagacttaaactgaagctctt

SEQ ID NO: 3141790 - DNA, 25 bp, Homo sapien
gaaaacaccgatgaaagagccagct

SEQ ID NO: 3141791 - DNA, 25 bp, Homo sapien
tcttctatgggagcaggtagcaggc

SEQ ID NO: 3141792 - DNA, 25 bp, Homo sapien
tcccctccggaatagagtatgttct

SEQ ID NO: 3141793 - DNA, 25 bp, Homo sapien
gacagcattggaggtagcacggtac

SEQ ID NO: 3141794 - DNA, 25 bp, Homo sapien
tgcctcggccatctgtcagtcacct

SEQ ID NO: 3141795 - DNA, 25 bp, Homo sapien
atgtagcaggatgagccgcagggaa

SEQ ID NO: 3141796 - DNA, 25 bp, Homo sapien
agcaggatgagccgcagggaaaacc

SEQ ID NO: 3141797 - DNA, 25 bp, Homo sapien
tagcaggatgagccgcagggaaaac

SEQ ID NO: 3141798 - DNA, 25 bp, Homo sapien
ttttccatcaatgctcaatgataca

SEQ ID NO: 3141799 - DNA, 25 bp, Homo sapien
gaactgcaccctattccttgctgat

SEQ ID NO: 3141800 - DNA, 25 bp, Homo sapien
ttttccagtctagagaactgcaccc

SEQ ID NO: 3141801 - DNA, 25 bp, Homo sapien
ctttctggagccaaacaggaccttt

SEQ ID NO: 3141802 - DNA, 25 bp, Homo sapien
tgtggatattgtctgttaggtttct

SEQ ID NO: 3141803 - DNA, 25 bp, Homo sapien
ctgttgtggatattgtctgttaggt

SEQ ID NO: 3141804 - DNA, 25 bp, Homo sapien
gatattgtctgttaggtttctctag

SEQ ID NO: 3141805 - DNA, 25 bp, Homo sapien
ttgtctgttaggtttctctagaagt

SEQ ID NO: 3141806 - DNA, 25 bp, Homo sapien
ggtggcattggcatattagtgtcta

SEQ ID NO: 3141807 - DNA, 25 bp, Homo sapien
ggcatattagtgtctacaatgaagg

SEQ ID NO: 3141808 - DNA, 25 bp, Homo sapien
ggcattggcatattagtgtctacaa

SEQ ID NO: 3141809 - DNA, 25 bp, Homo sapien
tattagtgtctacaatgaaggacat

SEQ ID NO: 3141810 - DNA, 25 bp, Homo sapien
tataggatggtttcgtagcaggtga

SEQ ID NO: 3141811 - DNA, 25 bp, Homo sapien
tgaagggaacagtcacagtgaacaa

SEQ ID NO: 3141812 - DNA, 25 bp, Homo sapien
gaaaggatggaacagtgcacctgaa

SEQ ID NO: 3141813 - DNA, 25 bp, Homo sapien
tcaggtgcctcagagataaggaaag

SEQ ID NO: 3141814 - DNA, 25 bp, Homo sapien
agagcccccccttctacatgaggat

SEQ ID NO: 3141815 - DNA, 25 bp, Homo sapien
tgcccgtgttgtgagccaatctcag

SEQ ID NO: 3141816 - DNA, 25 bp, Homo sapien
tctacatgaggatacatggccatga

SEQ ID NO: 3141817 - DNA, 25 bp, Homo sapien
agaggctgcccgtgttgtgagccaa

SEQ ID NO: 3141818 - DNA, 25 bp, Homo sapien
ccaggccatgatcttgactgaatga

SEQ ID NO: 3141819 - DNA, 25 bp, Homo sapien
gctcttcgcaatactgccctctggg

SEQ ID NO: 3141820 - DNA, 25 bp, Homo sapien
gtggtttgtgaactagctcttcgca

SEQ ID NO: 3141821 - DNA, 25 bp, Homo sapien
gactgaatgataaaaggccaagttc

SEQ ID NO: 3141822 - DNA, 25 bp, Homo sapien
tgcgcccaacactggagcattcaga

SEQ ID NO: 3141823 - DNA, 25 bp, Homo sapien
cggactaagctgtctactcaaaaga

SEQ ID NO: 3141824 - DNA, 25 bp, Homo sapien
aactgtactgtagatcaaacggacc

SEQ ID NO: 3141825 - DNA, 25 bp, Homo sapien
tattactggagcgaaagagagggat

SEQ ID NO: 3141826 - DNA, 25 bp, Homo sapien
cagacggacaggctctaatgtccaa

SEQ ID NO: 3141827 - DNA, 25 bp, Homo sapien
tcttcctggttagaggttctgtcct

SEQ ID NO: 3141828 - DNA, 25 bp, Homo sapien
ttggcggggacagcctcttcctggt

SEQ ID NO: 3141829 - DNA, 25 bp, Homo sapien
cattccttctctagatcagacggac

SEQ ID NO: 3141830 - DNA, 25 bp, Homo sapien
gatagcccgagtcatcgcacaagct

SEQ ID NO: 3141831 - DNA, 25 bp, Homo sapien
caatctcagctatgatttgtggacc

SEQ ID NO: 3141832 - DNA, 25 bp, Homo sapien
ctgtgttgcttttcctaccgctggg

SEQ ID NO: 3141833 - DNA, 25 bp, Homo sapien
ggacctgttcttttgcagctcaaag

SEQ ID NO: 3141834 - DNA, 25 bp, Homo sapien
gattctgacggattccttgccaggg

SEQ ID NO: 3141835 - DNA, 25 bp, Homo sapien
taaaggatgccggaataagctggcg

SEQ ID NO: 3141836 - DNA, 25 bp, Homo sapien
taagctggcggatccattgtgtccc

SEQ ID NO: 3141837 - DNA, 25 bp, Homo sapien
gcatttgctcctcaagagttaaagg

SEQ ID NO: 3141838 - DNA, 25 bp, Homo sapien
tgctggttaccaggaataccccatt

SEQ ID NO: 3141839 - DNA, 25 bp, Homo sapien
taactaccacgtgggtcagagaggg

SEQ ID NO: 3141840 - DNA, 25 bp, Homo sapien
gatgctagacagagaagggacttct

SEQ ID NO: 3141841 - DNA, 25 bp, Homo sapien
ccatcaccgcttcagagttctcaaa

SEQ ID NO: 3141842 - DNA, 25 bp, Homo sapien
tgtattattttacagcacctgcacc

SEQ ID NO: 3141843 - DNA, 25 bp, Homo sapien
tatcagtgtcgtcttcatctagctt

SEQ ID NO: 3141844 - DNA, 25 bp, Homo sapien
tgtcgtcttcatctagcttgcagct

SEQ ID NO: 3141845 - DNA, 25 bp, Homo sapien
atttatcagtgtcgtcttcatctag

SEQ ID NO: 3141846 - DNA, 25 bp, Homo sapien
agtgtcgtcttcatctagcttgcag

SEQ ID NO: 3141847 - DNA, 25 bp, Homo sapien
cagggctcccatggatcagctgtcc

SEQ ID NO: 3141848 - DNA, 25 bp, Homo sapien
tatttgcagtactggcccaggagcc

SEQ ID NO: 3141849 - DNA, 25 bp, Homo sapien
gacaccgcaggcatggtgttcccct

SEQ ID NO: 3141850 - DNA, 25 bp, Homo sapien
gcagcagggccgatgccgttgacac

SEQ ID NO: 3141851 - DNA, 25 bp, Homo sapien
gggccccaatgctgaaggtaatctg

SEQ ID NO: 3141852 - DNA, 25 bp, Homo sapien
gaagggcgtattcaaaccatgctcc

SEQ ID NO: 3141853 - DNA, 25 bp, Homo sapien
caggcatggcatgaacaggaccctt

SEQ ID NO: 3141854 - DNA, 25 bp, Homo sapien
gacatggtcttgtacttccaaggca

SEQ ID NO: 3141855 - DNA, 25 bp, Homo sapien
cctgcagtagcagcttctaaagctg

SEQ ID NO: 3141856 - DNA, 25 bp, Homo sapien
ccaaatcttctcctgcagtagcagc

SEQ ID NO: 3141857 - DNA, 25 bp, Homo sapien
taaacaactggtaaggctgcactgg

SEQ ID NO: 3141858 - DNA, 25 bp, Homo sapien
tcataaacatctgtaccaggtgctc

SEQ ID NO: 3141859 - DNA, 25 bp, Homo sapien
catccagggagcaaatgcatctgca

SEQ ID NO: 3141860 - DNA, 25 bp, Homo sapien
gaatgacagctcatctacacagagt

SEQ ID NO: 3141861 - DNA, 25 bp, Homo sapien
ggctttgctgttccgaatgtcatga

SEQ ID NO: 3141862 - DNA, 25 bp, Homo sapien
taagacttattttggccagcctccc

SEQ ID NO: 3141863 - DNA, 25 bp, Homo sapien
tgtgaaaactgctgagcttaacccg

SEQ ID NO: 3141864 - DNA, 25 bp, Homo sapien
gcttaacccgctgttgaacaactgg

SEQ ID NO: 3141865 - DNA, 25 bp, Homo sapien
cacgcccggccatctagattagttc

SEQ ID NO: 3141866 - DNA, 25 bp, Homo sapien
ccagggtcactgatattctgagaaa

SEQ ID NO: 3141867 - DNA, 25 bp, Homo sapien
tgagttaagacttctagaaagacac

SEQ ID NO: 3141868 - DNA, 25 bp, Homo sapien
tttacattgaaagtaacatccaggg

SEQ ID NO: 3141869 - DNA, 25 bp, Homo sapien
cactgtgcctagcttagctcttttt

SEQ ID NO: 3141870 - DNA, 25 bp, Homo sapien
actgtgcctagcttagctctttttt

SEQ ID NO: 3141871 - DNA, 25 bp, Homo sapien
tatgtgggtcattgatacacgggcc

SEQ ID NO: 3141872 - DNA, 25 bp, Homo sapien
caaaatgattgaagcagcatgggtc

SEQ ID NO: 3141873 - DNA, 25 bp, Homo sapien
tatatagaggtcacttgcgatggct

SEQ ID NO: 3141874 - DNA, 25 bp, Homo sapien
ccttaaaggtgctggaaggctcaga

SEQ ID NO: 3141875 - DNA, 25 bp, Homo sapien
taagcgtgctcagacagctcactgt

SEQ ID NO: 3141876 - DNA, 25 bp, Homo sapien
agttagtgccttccaatcagagtgc

SEQ ID NO: 3141877 - DNA, 25 bp, Homo sapien
tttctgacaagaggtggcactaggc

SEQ ID NO: 3141878 - DNA, 25 bp, Homo sapien
tatccacgtgatgcaattgcctaag

SEQ ID NO: 3141879 - DNA, 25 bp, Homo sapien
gaagttagcagaccacttaggtgtg

SEQ ID NO: 3141880 - DNA, 25 bp, Homo sapien
cgttttcgtcataaagcctggttgt

SEQ ID NO: 3141881 - DNA, 25 bp, Homo sapien
aatgtgcaggtaagcatcatctacg

SEQ ID NO: 3141882 - DNA, 25 bp, Homo sapien
taacttagatctcaggccaaacgca

SEQ ID NO: 3141883 - DNA, 25 bp, Homo sapien
aacacctggaggtcatgacgcatgg

SEQ ID NO: 3141884 - DNA, 25 bp, Homo sapien
taccaggcacgtgtcacatgggcag

SEQ ID NO: 3141885 - DNA, 25 bp, Homo sapien
gaggcacatgtatgggaagtaccag

SEQ ID NO: 3141886 - DNA, 25 bp, Homo sapien
tgcaggtgttactgaagggtcaacc

SEQ ID NO: 3141887 - DNA, 25 bp, Homo sapien
tctgagtcgagttgagccggccagt

SEQ ID NO: 3141888 - DNA, 25 bp, Homo sapien
acttggtgaagggtctacatgcgtc

SEQ ID NO: 3141889 - DNA, 25 bp, Homo sapien
gcacacacaactttgtctgagtcga

SEQ ID NO: 3141890 - DNA, 25 bp, Homo sapien
gccacagagttccatagcctcatgg

SEQ ID NO: 3141891 - DNA, 25 bp, Homo sapien
agggcgcgactgctgtaagcggcat

SEQ ID NO: 3141892 - DNA, 25 bp, Homo sapien
gagggcgcgactgctgtaagcggca

SEQ ID NO: 3141893 - DNA, 25 bp, Homo sapien
cgagggcgcgactgctgtaagcggc

SEQ ID NO: 3141894 - DNA, 25 bp, Homo sapien
aatgattcggttccgctttggaggg

SEQ ID NO: 3141895 - DNA, 25 bp, Homo sapien
caggtgttacctggatactggtgag

SEQ ID NO: 3141896 - DNA, 25 bp, Homo sapien
ctttggagggaaccccgcgcgctga

SEQ ID NO: 3141897 - DNA, 25 bp, Homo sapien
tactggtgagaatgattcggttccg

SEQ ID NO: 3141898 - DNA, 25 bp, Homo sapien
tggtgttgcagaaagtactcgtgat

SEQ ID NO: 3141899 - DNA, 25 bp, Homo sapien
tgttgcagaaagtactcgtgatttt

SEQ ID NO: 3141900 - DNA, 25 bp, Homo sapien
ctggtgttgcagaaagtactcgtga

SEQ ID NO: 3141901 - DNA, 25 bp, Homo sapien
ggtgttgcagaaagtactcgtgatt

SEQ ID NO: 3141902 - DNA, 25 bp, Homo sapien
ttgggcattttgtggcgtggccagg

SEQ ID NO: 3141903 - DNA, 25 bp, Homo sapien
tggctgcccacgcggttcagctggt

SEQ ID NO: 3141904 - DNA, 25 bp, Homo sapien
agctgggacttctttgtcttgggca

SEQ ID NO: 3141905 - DNA, 25 bp, Homo sapien
ctggccgaatcggagaactgcacgg

SEQ ID NO: 3141906 - DNA, 25 bp, Homo sapien
gaaccctgcttctcatataagatgg

SEQ ID NO: 3141907 - DNA, 25 bp, Homo sapien
tcctgtgttcccaaagcaactgatg

SEQ ID NO: 3141908 - DNA, 25 bp, Homo sapien
tacttgagcggtttttgtctggcag

SEQ ID NO: 3141909 - DNA, 25 bp, Homo sapien
caaaacacctgaaaggacccagagg

SEQ ID NO: 3141910 - DNA, 25 bp, Homo sapien
tacacggggagctctataattttag

SEQ ID NO: 3141911 - DNA, 25 bp, Homo sapien
tgtatttcagcatacacggggagct

SEQ ID NO: 3141912 - DNA, 25 bp, Homo sapien
gggagctctataattttagtcctgt

SEQ ID NO: 3141913 - DNA, 25 bp, Homo sapien
ctctataattttagtcctgtcctgg

SEQ ID NO: 3141914 - DNA, 25 bp, Homo sapien
gcttagtttctggtattagcagtga

SEQ ID NO: 3141915 - DNA, 25 bp, Homo sapien
tgtaattagagaccagaactgcaag

SEQ ID NO: 3141916 - DNA, 25 bp, Homo sapien
gaatagttaacctttcggagcatac

SEQ ID NO: 3141917 - DNA, 25 bp, Homo sapien
ttagcagtgaggactttaagcagtg

SEQ ID NO: 3141918 - DNA, 25 bp, Homo sapien
cctgttagcctttctggtgtctctg

SEQ ID NO: 3141919 - DNA, 25 bp, Homo sapien
tggaaggcaccttgtaacactttta

SEQ ID NO: 3141920 - DNA, 25 bp, Homo sapien
tatggaaggcaccttgtaacacttt

SEQ ID NO: 3141921 - DNA, 25 bp, Homo sapien
ctcctgttagcctttctggtgtctc

SEQ ID NO: 3141922 - DNA, 25 bp, Homo sapien
tatcctaatcagagacatatggcag

SEQ ID NO: 3141923 - DNA, 25 bp, Homo sapien
tccgtggacccatagtataatgaga

SEQ ID NO: 3141924 - DNA, 25 bp, Homo sapien
gataaatcttctgggcggttcttaa

SEQ ID NO: 3141925 - DNA, 25 bp, Homo sapien
tcccgaagagagataggccaggctt

SEQ ID NO: 3141926 - DNA, 25 bp, Homo sapien
ctgcaagcgtgtaactgcagaatgg

SEQ ID NO: 3141927 - DNA, 25 bp, Homo sapien
tgcaagcgtgtaactgcagaatggt

SEQ ID NO: 3141928 - DNA, 25 bp, Homo sapien
gcaagcgtgtaactgcagaatggtc

SEQ ID NO: 3141929 - DNA, 25 bp, Homo sapien
gattccattaatcgatatctgccaa

SEQ ID NO: 3141930 - DNA, 25 bp, Homo sapien
gcactgaatactctgtgatgtgatt

SEQ ID NO: 3141931 - DNA, 25 bp, Homo sapien
gatctacgcaggcagtaccattgca

SEQ ID NO: 3141932 - DNA, 25 bp, Homo sapien
taccattgcaggaccatggtgtcac

SEQ ID NO: 3141933 - DNA, 25 bp, Homo sapien
ttagaccagagcaagatttaaagga

SEQ ID NO: 3141934 - DNA, 25 bp, Homo sapien
ctcatcctttgctgagactttaggt

SEQ ID NO: 3141935 - DNA, 25 bp, Homo sapien
aagctccttcaggacttgggcagtg

SEQ ID NO: 3141936 - DNA, 25 bp, Homo sapien
gctccttcaggacttgggcagtgcc

SEQ ID NO: 3141937 - DNA, 25 bp, Homo sapien
acttgggcagtgcctttggatggtg

SEQ ID NO: 3141938 - DNA, 25 bp, Homo sapien
aagcaggaggctacaatggtctaga

SEQ ID NO: 3141939 - DNA, 25 bp, Homo sapien
aatggtctagacctttgtggtggca

SEQ ID NO: 3141940 - DNA, 25 bp, Homo sapien
cagggagatggacattatcccacac

SEQ ID NO: 3141941 - DNA, 25 bp, Homo sapien
tgtggtggcaatctggaactgtaaa

SEQ ID NO: 3141942 - DNA, 25 bp, Homo sapien
caatggaggtacaattatatcttta

SEQ ID NO: 3141943 - DNA, 25 bp, Homo sapien
tgaaggtcatagacttgcagactcc

SEQ ID NO: 3141944 - DNA, 25 bp, Homo sapien
gctagttcagatcaatggaggtaca

SEQ ID NO: 3141945 - DNA, 25 bp, Homo sapien
agagcagctgtgattgctagttcag

SEQ ID NO: 3141946 - DNA, 25 bp, Homo sapien
atggattttaaggctctgtctggat

SEQ ID NO: 3141947 - DNA, 25 bp, Homo sapien
ggcatccgatgggatcatctgatga

SEQ ID NO: 3141948 - DNA, 25 bp, Homo sapien
tccgatgggatcatctgatgagcag

SEQ ID NO: 3141949 - DNA, 25 bp, Homo sapien
gaactgatcattccagcctttggat

SEQ ID NO: 3141950 - DNA, 25 bp, Homo sapien
tggcaagaaagcaaatcaaccgccg

SEQ ID NO: 3141951 - DNA, 25 bp, Homo sapien
gccgtttcttcacatagctcaatag

SEQ ID NO: 3141952 - DNA, 25 bp, Homo sapien
atgggaagaaatttatacttgggag

SEQ ID NO: 3141953 - DNA, 25 bp, Homo sapien
ttgggagcttacatgctcagtggcc

SEQ ID NO: 3141954 - DNA, 25 bp, Homo sapien
tcaaaggtaaaagtagtgccgtgat

SEQ ID NO: 3141955 - DNA, 25 bp, Homo sapien
gtgatgcctgccgtactcctgtgtg

SEQ ID NO: 3141956 - DNA, 25 bp, Homo sapien
atgcctgccgtactcctgtgtggga

SEQ ID NO: 3141957 - DNA, 25 bp, Homo sapien
aagtagtgccgtgatgcctgccgta

SEQ ID NO: 3141958 - DNA, 25 bp, Homo sapien
ggaattatagtagaagctccttggg

SEQ ID NO: 3141959 - DNA, 25 bp, Homo sapien
cggaagtcgtactgcttgatttgca

SEQ ID NO: 3141960 - DNA, 25 bp, Homo sapien
accccctcggaagtcgtactgcttg

SEQ ID NO: 3141961 - DNA, 25 bp, Homo sapien
tggcaggaattatagtagaagctcc

SEQ ID NO: 3141962 - DNA, 25 bp, Homo sapien
cggccgccttcatgttctcctctaa

SEQ ID NO: 3141963 - DNA, 25 bp, Homo sapien
tcacaaggtggctcttctgaccttc

SEQ ID NO: 3141964 - DNA, 25 bp, Homo sapien
ggtggctcttctgaccttcggccgc

SEQ ID NO: 3141965 - DNA, 25 bp, Homo sapien
catctgtggctggtcacaaggtggc

SEQ ID NO: 3141966 - DNA, 25 bp, Homo sapien
atgctggacagagacgttttcggcc

SEQ ID NO: 3141967 - DNA, 25 bp, Homo sapien
tgctgtgccggtgttctgctttgga

SEQ ID NO: 3141968 - DNA, 25 bp, Homo sapien
tataaaaatcagagggtgggataaa

SEQ ID NO: 3141969 - DNA, 25 bp, Homo sapien
cgttttcggcctaagcgtgactgct

SEQ ID NO: 3141970 - DNA, 25 bp, Homo sapien
gctgttagatgctgagtcccatgca

SEQ ID NO: 3141971 - DNA, 25 bp, Homo sapien
gatgaatccattggcccttacctga

SEQ ID NO: 3141972 - DNA, 25 bp, Homo sapien
ccgggtgagcactgagcgaaagtca

SEQ ID NO: 3141973 - DNA, 25 bp, Homo sapien
gagtactggtaaggaacacacatgc

SEQ ID NO: 3141974 - DNA, 25 bp, Homo sapien
catgagctgttgtgcctgaccgtga

SEQ ID NO: 3141975 - DNA, 25 bp, Homo sapien
gataaactgtcatcgcatggtcatg

SEQ ID NO: 3141976 - DNA, 25 bp, Homo sapien
catttgtacaattggaagacgcttt

SEQ ID NO: 3141977 - DNA, 25 bp, Homo sapien
ggagagagatcaccttcgctgatat

SEQ ID NO: 3141978 - DNA, 25 bp, Homo sapien
tggtggcacattcctatgttcccag

SEQ ID NO: 3141979 - DNA, 25 bp, Homo sapien
catggtggcacattcctatgttccc

SEQ ID NO: 3141980 - DNA, 25 bp, Homo sapien
ggcatggtggcacattcctatgttc

SEQ ID NO: 3141981 - DNA, 25 bp, Homo sapien
ggtggcacattcctatgttcccagc

SEQ ID NO: 3141982 - DNA, 25 bp, Homo sapien
tgattggtttgtgaggaaagcgcac

SEQ ID NO: 3141983 - DNA, 25 bp, Homo sapien
tttgtgaggaaagcgcaccaaacag

SEQ ID NO: 3141984 - DNA, 25 bp, Homo sapien
catctggtccgaggatttaacttgt

SEQ ID NO: 3141985 - DNA, 25 bp, Homo sapien
caggaagacaagtcctccatctggt

SEQ ID NO: 3141986 - DNA, 25 bp, Homo sapien
gatccagttgctcaatgcctatttc

SEQ ID NO: 3141987 - DNA, 25 bp, Homo sapien
atccagttgctcaatgcctatttcc

SEQ ID NO: 3141988 - DNA, 25 bp, Homo sapien
tccagttgctcaatgcctatttcca

SEQ ID NO: 3141989 - DNA, 25 bp, Homo sapien
ccagttgctcaatgcctatttccat

SEQ ID NO: 3141990 - DNA, 25 bp, Homo sapien
gagaggaagaattgctatcagagcc

SEQ ID NO: 3141991 - DNA, 25 bp, Homo sapien
gagagattaggacggctgccttgtc

SEQ ID NO: 3141992 - DNA, 25 bp, Homo sapien
ccagcagtgtcagcccagagtgaat

SEQ ID NO: 3141993 - DNA, 25 bp, Homo sapien
tggaggatgggctcgtgtcttcatc

SEQ ID NO: 3141994 - DNA, 25 bp, Homo sapien
gacggtgctatcagtaaataaagac

SEQ ID NO: 3141995 - DNA, 25 bp, Homo sapien
ccaggagacagacggtgctatcagt

SEQ ID NO: 3141996 - DNA, 25 bp, Homo sapien
tgtgtaattttaaaggttcgcaaga

SEQ ID NO: 3141997 - DNA, 25 bp, Homo sapien
aaggttcgcaagagccattagtcag

SEQ ID NO: 3141998 - DNA, 25 bp, Homo sapien
gaattcactgggcttttgtatcaca

SEQ ID NO: 3141999 - DNA, 25 bp, Homo sapien
gtacatagcacattcacaagacagg

SEQ ID NO: 3142000 - DNA, 25 bp, Homo sapien
tatcacagtacaacttgggaacact

SEQ ID NO: 3142001 - DNA, 25 bp, Homo sapien
ggttgaagacttacaaagagcctgt

SEQ ID NO: 3142002 - DNA, 25 bp, Homo sapien
tttacttgatagcactgtcccagga

SEQ ID NO: 3142003 - DNA, 25 bp, Homo sapien
aggtatctcccatttcccttgccag

SEQ ID NO: 3142004 - DNA, 25 bp, Homo sapien
ttgccaaacctgttgaactcagagg

SEQ ID NO: 3142005 - DNA, 25 bp, Homo sapien
ggatctcaaacagagagaacccgcc

SEQ ID NO: 3142006 - DNA, 25 bp, Homo sapien
acactgacttagcagtttggccttc

SEQ ID NO: 3142007 - DNA, 25 bp, Homo sapien
tagcaggcccgtatttccgttagcc

SEQ ID NO: 3142008 - DNA, 25 bp, Homo sapien
tgagaacatttcagtcgcttacaac

SEQ ID NO: 3142009 - DNA, 25 bp, Homo sapien
tttcatagaaaccagagcaggttgg

SEQ ID NO: 3142010 - DNA, 25 bp, Homo sapien
cagagcatcactcaatcctgcagat

SEQ ID NO: 3142011 - DNA, 25 bp, Homo sapien
gcagattggcccatgaaaaattcat

SEQ ID NO: 3142012 - DNA, 25 bp, Homo sapien
caggtatgcgtacagagcatcactc

SEQ ID NO: 3142013 - DNA, 25 bp, Homo sapien
gagtttccaggtatgcgtacagagc

SEQ ID NO: 3142014 - DNA, 25 bp, Homo sapien
ggaactaagaagctatccaaataga

SEQ ID NO: 3142015 - DNA, 25 bp, Homo sapien
tttgtagtagcaggaactaagaagc

SEQ ID NO: 3142016 - DNA, 25 bp, Homo sapien
taaagggacagattttgtagtagca

SEQ ID NO: 3142017 - DNA, 25 bp, Homo sapien
ccaaatagactaacttgttggcaat

SEQ ID NO: 3142018 - DNA, 25 bp, Homo sapien
tatttctattccagcgacagtttaa

SEQ ID NO: 3142019 - DNA, 25 bp, Homo sapien
tccagcgacagtttaaaaaatagta

SEQ ID NO: 3142020 - DNA, 25 bp, Homo sapien
tctattccagcgacagtttaaaaaa

SEQ ID NO: 3142021 - DNA, 25 bp, Homo sapien
tctatttctattccagcgacagttt

SEQ ID NO: 3142022 - DNA, 25 bp, Homo sapien
tctattagtgtgaccttgctcccaa

SEQ ID NO: 3142023 - DNA, 25 bp, Homo sapien
accgattttatggtatagttgcaga

SEQ ID NO: 3142024 - DNA, 25 bp, Homo sapien
tagttgcagatactggaaccaggaa

SEQ ID NO: 3142025 - DNA, 25 bp, Homo sapien
ttccccttcatattcagtggcattc

SEQ ID NO: 3142026 - DNA, 25 bp, Homo sapien
tgggtggaaggcctcgcctgagatt

SEQ ID NO: 3142027 - DNA, 25 bp, Homo sapien
tggaaggcctcgcctgagattcact

SEQ ID NO: 3142028 - DNA, 25 bp, Homo sapien
gggtggaaggcctcgcctgagattc

SEQ ID NO: 3142029 - DNA, 25 bp, Homo sapien
ttctgggtggaaggcctcgcctgag

SEQ ID NO: 3142030 - DNA, 25 bp, Homo sapien
ccagaatgtagattccaggaaacca

SEQ ID NO: 3142031 - DNA, 25 bp, Homo sapien
tctgcaggtaccatgtgactctggg

SEQ ID NO: 3142032 - DNA, 25 bp, Homo sapien
tgtctggcttgttcaccactgtgac

SEQ ID NO: 3142033 - DNA, 25 bp, Homo sapien
caatgagagctagggaagttctgca

SEQ ID NO: 3142034 - DNA, 25 bp, Homo sapien
ctatcctaatatggctccctttaga

SEQ ID NO: 3142035 - DNA, 25 bp, Homo sapien
cctccactgctgacccggggagaga

SEQ ID NO: 3142036 - DNA, 25 bp, Homo sapien
atcatggcagaatcagatattccac

SEQ ID NO: 3142037 - DNA, 25 bp, Homo sapien
tagaccaacacaaacgtctctttcc

SEQ ID NO: 3142038 - DNA, 25 bp, Homo sapien
tttctacttgcatcacgtggcctcc

SEQ ID NO: 3142039 - DNA, 25 bp, Homo sapien
tggcctccctgaatataagggatga

SEQ ID NO: 3142040 - DNA, 25 bp, Homo sapien
cacgtggcctccctgaatataaggg

SEQ ID NO: 3142041 - DNA, 25 bp, Homo sapien
cctccctgaatataagggatgaaag

SEQ ID NO: 3142042 - DNA, 25 bp, Homo sapien
gatatttttatctgaaccacctggc

SEQ ID NO: 3142043 - DNA, 25 bp, Homo sapien
ccattgggcagttacagaataagcc

SEQ ID NO: 3142044 - DNA, 25 bp, Homo sapien
agaataagccccacagtaacgacct

SEQ ID NO: 3142045 - DNA, 25 bp, Homo sapien
aattccgcttcgctcttcggaggag

SEQ ID NO: 3142046 - DNA, 25 bp, Homo sapien
gggtaacactgtagactcctccagt

SEQ ID NO: 3142047 - DNA, 25 bp, Homo sapien
cttgcggggcattccttttcgaaca

SEQ ID NO: 3142048 - DNA, 25 bp, Homo sapien
acacttgcggggcattccttttcga

SEQ ID NO: 3142049 - DNA, 25 bp, Homo sapien
gctgggtaacactgtagactcctcc

SEQ ID NO: 3142050 - DNA, 25 bp, Homo sapien
gtgcttaatgtgctcaatacgcacg

SEQ ID NO: 3142051 - DNA, 25 bp, Homo sapien
gcgtttcaggaagctatctcggctc

SEQ ID NO: 3142052 - DNA, 25 bp, Homo sapien
ctatctcggctcttagagtgcttaa

SEQ ID NO: 3142053 - DNA, 25 bp, Homo sapien
gagtgcttaatgtgctcaatacgca

SEQ ID NO: 3142054 - DNA, 25 bp, Homo sapien
tggcatgaattcatagggagtaggt

SEQ ID NO: 3142055 - DNA, 25 bp, Homo sapien
tatggcatgaattcatagggagtag

SEQ ID NO: 3142056 - DNA, 25 bp, Homo sapien
ttatggcatgaattcatagggagta

SEQ ID NO: 3142057 - DNA, 25 bp, Homo sapien
gcatgaattcatagggagtaggttc

SEQ ID NO: 3142058 - DNA, 25 bp, Homo sapien
gcagagggaagcaggcggtgagatc

SEQ ID NO: 3142059 - DNA, 25 bp, Homo sapien
cagagggaagcaggcggtgagatct

SEQ ID NO: 3142060 - DNA, 25 bp, Homo sapien
ctgcagagggaagcaggcggtgaga

SEQ ID NO: 3142061 - DNA, 25 bp, Homo sapien
gagggaagcaggcggtgagatctgc

SEQ ID NO: 3142062 - DNA, 25 bp, Homo sapien
actgggcggtctcctggtccagccg

SEQ ID NO: 3142063 - DNA, 25 bp, Homo sapien
agccactgggcggtctcctggtcca

SEQ ID NO: 3142064 - DNA, 25 bp, Homo sapien
agcgcagccactgggcggtctcctg

SEQ ID NO: 3142065 - DNA, 25 bp, Homo sapien
ttgtcccagcgcagccactgggcgg

SEQ ID NO: 3142066 - DNA, 25 bp, Homo sapien
tgtaaccaagccctcgggatgggag

SEQ ID NO: 3142067 - DNA, 25 bp, Homo sapien
tgctctgcaaaggtctcagcggcca

SEQ ID NO: 3142068 - DNA, 25 bp, Homo sapien
cgactaccgacgacgagccagcggt

SEQ ID NO: 3142069 - DNA, 25 bp, Homo sapien
tcagcggccaaaggaatacgcggga

SEQ ID NO: 3142070 - DNA, 25 bp, Homo sapien
ggatgatggtcaagtcattcatacg

SEQ ID NO: 3142071 - DNA, 25 bp, Homo sapien
cgagaaattccaggtcccatagcag

SEQ ID NO: 3142072 - DNA, 25 bp, Homo sapien
tctgctattagtcgtttcactgcct

SEQ ID NO: 3142073 - DNA, 25 bp, Homo sapien
catagcagctcggaggccagctgtc

SEQ ID NO: 3142074 - DNA, 25 bp, Homo sapien
gagagccaagctaatttagaatgcc

SEQ ID NO: 3142075 - DNA, 25 bp, Homo sapien
caagctaatttagaatgcctttagc

SEQ ID NO: 3142076 - DNA, 25 bp, Homo sapien
tgttgcgagagccaagctaatttag

SEQ ID NO: 3142077 - DNA, 25 bp, Homo sapien
cagtcttgttgcgagagccaagcta

SEQ ID NO: 3142078 - DNA, 25 bp, Homo sapien
ggcgtcaaaactgatcacgatgcct

SEQ ID NO: 3142079 - DNA, 25 bp, Homo sapien
aaactgatcacgatgcctttctgct

SEQ ID NO: 3142080 - DNA, 25 bp, Homo sapien
ccactggatggatgagctcgggcgt

SEQ ID NO: 3142081 - DNA, 25 bp, Homo sapien
tgagctcgggcgtcaaaactgatca

SEQ ID NO: 3142082 - DNA, 25 bp, Homo sapien
ctgagaatgcagagtgacagggaag

SEQ ID NO: 3142083 - DNA, 25 bp, Homo sapien
gaagaaaaggagagttgagtgatca

SEQ ID NO: 3142084 - DNA, 25 bp, Homo sapien
agaatgcagagtgacagggaagaaa

SEQ ID NO: 3142085 - DNA, 25 bp, Homo sapien
aagaaaaggagagttgagtgatcag

SEQ ID NO: 3142086 - DNA, 25 bp, Homo sapien
tgtggttgcagcaagtcgggcaaac

SEQ ID NO: 3142087 - DNA, 25 bp, Homo sapien
tcccctgactgataaatgtggttgc

SEQ ID NO: 3142088 - DNA, 25 bp, Homo sapien
acaggaatcccctgactgataaatg

SEQ ID NO: 3142089 - DNA, 25 bp, Homo sapien
acaaagggggttggcgttatatcag

SEQ ID NO: 3142090 - DNA, 25 bp, Homo sapien
cttataaccattatcctgctttgga

SEQ ID NO: 3142091 - DNA, 25 bp, Homo sapien
gagatgcagttatcatgattccagc

SEQ ID NO: 3142092 - DNA, 25 bp, Homo sapien
ctttggattgtgagatgcagttatc

SEQ ID NO: 3142093 - DNA, 25 bp, Homo sapien
gttatcatgattccagcacaaagtt

SEQ ID NO: 3142094 - DNA, 25 bp, Homo sapien
cactcggattgtggagaagtggact

SEQ ID NO: 3142095 - DNA, 25 bp, Homo sapien
cattattgatggaagcactcggatt

SEQ ID NO: 3142096 - DNA, 25 bp, Homo sapien
gaagtggactgctatcaattaaaga

SEQ ID NO: 3142097 - DNA, 25 bp, Homo sapien
tcgtcccaagcttgaggccacggtt

SEQ ID NO: 3142098 - DNA, 25 bp, Homo sapien
tggacagaggtgtgcacaaacttca

SEQ ID NO: 3142099 - DNA, 25 bp, Homo sapien
tgttggaaactcaggatccggatct

SEQ ID NO: 3142100 - DNA, 25 bp, Homo sapien
aaagctatgacccaccccatggaca

SEQ ID NO: 3142101 - DNA, 25 bp, Homo sapien
tcgggattcgggtatttcactgttg

SEQ ID NO: 3142102 - DNA, 25 bp, Homo sapien
gcatccgggtcgttagctaaaacaa

SEQ ID NO: 3142103 - DNA, 25 bp, Homo sapien
gccttggttttgtcagccaaagcaa

SEQ ID NO: 3142104 - DNA, 25 bp, Homo sapien
aagtctatcagcatccgggtcgtta

SEQ ID NO: 3142105 - DNA, 25 bp, Homo sapien
tggccttggttttgtcagccaaagc

SEQ ID NO: 3142106 - DNA, 25 bp, Homo sapien
tgagagcactgcgatcctggttctt

SEQ ID NO: 3142107 - DNA, 25 bp, Homo sapien
gagacggtgctggacaacatgtacg

SEQ ID NO: 3142108 - DNA, 25 bp, Homo sapien
caatggcccgcaagattttggagga

SEQ ID NO: 3142109 - DNA, 25 bp, Homo sapien
tccaagatgtaaaaagccaccagcc

SEQ ID NO: 3142110 - DNA, 25 bp, Homo sapien
agagaaagacatgccttagatcttc

SEQ ID NO: 3142111 - DNA, 25 bp, Homo sapien
agatcttctacagagcagatgaaag

SEQ ID NO: 3142112 - DNA, 25 bp, Homo sapien
tccaaaagagaaagacatgccttag

SEQ ID NO: 3142113 - DNA, 25 bp, Homo sapien
cttctacagagcagatgaaaggaaa

SEQ ID NO: 3142114 - DNA, 25 bp, Homo sapien
acagttttcccctggtctattagct

SEQ ID NO: 3142115 - DNA, 25 bp, Homo sapien
tccacttaaagccagttaatgtttc

SEQ ID NO: 3142116 - DNA, 25 bp, Homo sapien
tcccatccacttaaagccagttaat

SEQ ID NO: 3142117 - DNA, 25 bp, Homo sapien
tctgtttcccatccacttaaagcca

SEQ ID NO: 3142118 - DNA, 25 bp, Homo sapien
ctggagaggcaaaataaaccgtgtt

SEQ ID NO: 3142119 - DNA, 25 bp, Homo sapien
caattttggagtaggacagttcgac

SEQ ID NO: 3142120 - DNA, 25 bp, Homo sapien
aatgtcactgttttgagtcatccag

SEQ ID NO: 3142121 - DNA, 25 bp, Homo sapien
aaaatacatgtaccggcagccaagc

SEQ ID NO: 3142122 - DNA, 25 bp, Homo sapien
taaaagagcagaacctgagcgatta

SEQ ID NO: 3142123 - DNA, 25 bp, Homo sapien
tgacagcagcaaaccatgccttcct

SEQ ID NO: 3142124 - DNA, 25 bp, Homo sapien
gctgtaggctaaggtcagtgccatc

SEQ ID NO: 3142125 - DNA, 25 bp, Homo sapien
taaatctatctaagctgctgtaggc

SEQ ID NO: 3142126 - DNA, 25 bp, Homo sapien
ttatgacagcggcactgactccatc

SEQ ID NO: 3142127 - DNA, 25 bp, Homo sapien
gctaggaagctagccaactctgcac

SEQ ID NO: 3142128 - DNA, 25 bp, Homo sapien
taaatggcctttagttgctgagaca

SEQ ID NO: 3142129 - DNA, 25 bp, Homo sapien
caaagacaaattcttggttgctagg

SEQ ID NO: 3142130 - DNA, 25 bp, Homo sapien
tccatcgtagtttctgaggttttca

SEQ ID NO: 3142131 - DNA, 25 bp, Homo sapien
ttatcaggttggctatcatcatagc

SEQ ID NO: 3142132 - DNA, 25 bp, Homo sapien
tcatcatagccagttgtaaggtccc

SEQ ID NO: 3142133 - DNA, 25 bp, Homo sapien
gcagataaaataggaagctttagta

SEQ ID NO: 3142134 - DNA, 25 bp, Homo sapien
ctctgtcccactggtgcgcatggtg

SEQ ID NO: 3142135 - DNA, 25 bp, Homo sapien
ggtgaaggtgatcatttggctgctt

SEQ ID NO: 3142136 - DNA, 25 bp, Homo sapien
agtacttgattttgggctctgtccc

SEQ ID NO: 3142137 - DNA, 25 bp, Homo sapien
ggtggccacgcctccattagcaaag

SEQ ID NO: 3142138 - DNA, 25 bp, Homo sapien
gaagtctggggagtaaaaatcacac

SEQ ID NO: 3142139 - DNA, 25 bp, Homo sapien
ggaagtctggggagtaaaaatcaca

SEQ ID NO: 3142140 - DNA, 25 bp, Homo sapien
catttgaatagaaccagttaggaag

SEQ ID NO: 3142141 - DNA, 25 bp, Homo sapien
tggcatttgaatagaaccagttagg

SEQ ID NO: 3142142 - DNA, 25 bp, Homo sapien
tgacttagacaaaacaccccatgag

SEQ ID NO: 3142143 - DNA, 25 bp, Homo sapien
catggaacacatctattgacttaga

SEQ ID NO: 3142144 - DNA, 25 bp, Homo sapien
ccccattgaccaagtgacaatgaaa

SEQ ID NO: 3142145 - DNA, 25 bp, Homo sapien
tccaatgtctgaactataaacaaag

SEQ ID NO: 3142146 - DNA, 25 bp, Homo sapien
aaatgttcttcaatagcactgacca

SEQ ID NO: 3142147 - DNA, 25 bp, Homo sapien
tagcactgaccagttcattcagttc

SEQ ID NO: 3142148 - DNA, 25 bp, Homo sapien
ttcttcaatagcactgaccagttca

SEQ ID NO: 3142149 - DNA, 25 bp, Homo sapien
cttttggctgcagattgtacttctg

SEQ ID NO: 3142150 - DNA, 25 bp, Homo sapien
catgaaacaatgaggaatgtaggtc

SEQ ID NO: 3142151 - DNA, 25 bp, Homo sapien
taaatgcaagtatacccaaggctgg

SEQ ID NO: 3142152 - DNA, 25 bp, Homo sapien
aaagtggctatcctacatatgacag

SEQ ID NO: 3142153 - DNA, 25 bp, Homo sapien
tgtccaagctcaactttttagtagg

SEQ ID NO: 3142154 - DNA, 25 bp, Homo sapien
tcatgggtgcccaactggagttatt

SEQ ID NO: 3142155 - DNA, 25 bp, Homo sapien
tagttcttgctcataggtcttgctg

SEQ ID NO: 3142156 - DNA, 25 bp, Homo sapien
ggaaggctgtaagaccacgaattat

SEQ ID NO: 3142157 - DNA, 25 bp, Homo sapien
agaaagtttgatcctagctcatggg

SEQ ID NO: 3142158 - DNA, 25 bp, Homo sapien
tgggcccagaatacagagcgtgtgc

SEQ ID NO: 3142159 - DNA, 25 bp, Homo sapien
ttaggcacgcagacatcgaagagtg

SEQ ID NO: 3142160 - DNA, 25 bp, Homo sapien
ggtggttctcctatctgaagacagg

SEQ ID NO: 3142161 - DNA, 25 bp, Homo sapien
tgtctcaccatcaggaagaattagg

SEQ ID NO: 3142162 - DNA, 25 bp, Homo sapien
ggaattgaaactgaaactcaggctg

SEQ ID NO: 3142163 - DNA, 25 bp, Homo sapien
tagttgccatgtgctacattagacc

SEQ ID NO: 3142164 - DNA, 25 bp, Homo sapien
tacagtattgttaaccatagttgcc

SEQ ID NO: 3142165 - DNA, 25 bp, Homo sapien
aactcctacaggttgtgatgggcac

SEQ ID NO: 3142166 - DNA, 25 bp, Homo sapien
tacactccatctacacaggaggaga

SEQ ID NO: 3142167 - DNA, 25 bp, Homo sapien
gggatacgctggacttatttcactg

SEQ ID NO: 3142168 - DNA, 25 bp, Homo sapien
aaagatgtctgccttagtgcatggg

SEQ ID NO: 3142169 - DNA, 25 bp, Homo sapien
taggtggctgcactagggatacgct

SEQ ID NO: 3142170 - DNA, 25 bp, Homo sapien
ttcacatatgtaagttatttaagtg

SEQ ID NO: 3142171 - DNA, 25 bp, Homo sapien
tatagttgtttgaagtagcactatg

SEQ ID NO: 3142172 - DNA, 25 bp, Homo sapien
aattgttattgtaggtgtataaagc

SEQ ID NO: 3142173 - DNA, 25 bp, Homo sapien
gtagcactatgttgctaaatataaa

SEQ ID NO: 3142174 - DNA, 25 bp, Homo sapien
ggaaaccccacacttgctagcaaat

SEQ ID NO: 3142175 - DNA, 25 bp, Homo sapien
cacccaagtcctatgtgtgacatgg

SEQ ID NO: 3142176 - DNA, 25 bp, Homo sapien
tgccgatcctttatccaagaggaag

SEQ ID NO: 3142177 - DNA, 25 bp, Homo sapien
tggaggagagacactacttctacct

SEQ ID NO: 3142178 - DNA, 25 bp, Homo sapien
ttaacttctcgggagcatccacaga

SEQ ID NO: 3142179 - DNA, 25 bp, Homo sapien
aggtttccttgatcagcacacattg

SEQ ID NO: 3142180 - DNA, 25 bp, Homo sapien
gaataacattccttattgcgaggtg

SEQ ID NO: 3142181 - DNA, 25 bp, Homo sapien
cacacattgaagaaacgtgctccgg

SEQ ID NO: 3142182 - DNA, 25 bp, Homo sapien
ttttactgcacgaagaactcacgct

SEQ ID NO: 3142183 - DNA, 25 bp, Homo sapien
agataaaactctgggcactggttcc

SEQ ID NO: 3142184 - DNA, 25 bp, Homo sapien
aatgggtggactgtatacttaagcc

SEQ ID NO: 3142185 - DNA, 25 bp, Homo sapien
gagacaacggtaaatcaatgcagtg

SEQ ID NO: 3142186 - DNA, 25 bp, Homo sapien
ttccccttgatatgtggccacgtga

SEQ ID NO: 3142187 - DNA, 25 bp, Homo sapien
ttgatatgtggccacgtgactccca

SEQ ID NO: 3142188 - DNA, 25 bp, Homo sapien
tcccaggagagctggtacacaccat

SEQ ID NO: 3142189 - DNA, 25 bp, Homo sapien
atatgtggccacgtgactcccagga

SEQ ID NO: 3142190 - DNA, 25 bp, Homo sapien
gctgcacacatttacctccagagtg

SEQ ID NO: 3142191 - DNA, 25 bp, Homo sapien
gacctgctgcacacatttacctcca

SEQ ID NO: 3142192 - DNA, 25 bp, Homo sapien
cctgctgcacacatttacctccaga

SEQ ID NO: 3142193 - DNA, 25 bp, Homo sapien
agtgacctgctgcacacatttacct

SEQ ID NO: 3142194 - DNA, 25 bp, Homo sapien
aaaagcgggacagagctcgctccct

SEQ ID NO: 3142195 - DNA, 25 bp, Homo sapien
tgtgcatgccccgatcaggtctggg

SEQ ID NO: 3142196 - DNA, 25 bp, Homo sapien
tgatgtagagtgcaaggaaagacgc

SEQ ID NO: 3142197 - DNA, 25 bp, Homo sapien
gggacattcccagcggtgatgtaga

SEQ ID NO: 3142198 - DNA, 25 bp, Homo sapien
tctccctccgaaacagacgtggtgg

SEQ ID NO: 3142199 - DNA, 25 bp, Homo sapien
cgctggcatgcgaggcaggaaaatc

SEQ ID NO: 3142200 - DNA, 25 bp, Homo sapien
cctcgtggcgggatgtacagtcgca

SEQ ID NO: 3142201 - DNA, 25 bp, Homo sapien
tctgggaaacaacgaaggcgaagtg

SEQ ID NO: 3142202 - DNA, 25 bp, Homo sapien
ggacggtggcggcaccaggagcagc

SEQ ID NO: 3142203 - DNA, 25 bp, Homo sapien
cagcaacaggcaccggcggacggtg

SEQ ID NO: 3142204 - DNA, 25 bp, Homo sapien
acaggcaccggcggacggtggcggc

SEQ ID NO: 3142205 - DNA, 25 bp, Homo sapien
cggacggtggcggcaccaggagcag

SEQ ID NO: 3142206 - DNA, 25 bp, Homo sapien
ggagtccatcgcacccggctggctg

SEQ ID NO: 3142207 - DNA, 25 bp, Homo sapien
gctggctgcgctcttcccgccgcgg

SEQ ID NO: 3142208 - DNA, 25 bp, Homo sapien
ctggctgcgctcttcccgccgcggg

SEQ ID NO: 3142209 - DNA, 25 bp, Homo sapien
ggcgggcggggagtccatcgcaccc

SEQ ID NO: 3142210 - DNA, 25 bp, Homo sapien
gccgggacgcgcaggtgcttggggg

SEQ ID NO: 3142211 - DNA, 25 bp, Homo sapien
ctgtgccgcggcgcgctcagagccc

SEQ ID NO: 3142212 - DNA, 25 bp, Homo sapien
ggccgggacgcgcaggtgcttgggg

SEQ ID NO: 3142213 - DNA, 25 bp, Homo sapien
tgccgcggcgcgctcagagcccggg

SEQ ID NO: 3142214 - DNA, 25 bp, Homo sapien
ccgcgacgccccgagaggagccagc

SEQ ID NO: 3142215 - DNA, 25 bp, Homo sapien
gacgaagccccaggaagcgccttac

SEQ ID NO: 3142216 - DNA, 25 bp, Homo sapien
ggccaggacgaagccccaggaagcg

SEQ ID NO: 3142217 - DNA, 25 bp, Homo sapien
gcgacgccccgagaggagccagcag

SEQ ID NO: 3142218 - DNA, 25 bp, Homo sapien
gtccgtgggcggccagatgccttcc

SEQ ID NO: 3142219 - DNA, 25 bp, Homo sapien
ggagctctcgggtcgctagcaacat

SEQ ID NO: 3142220 - DNA, 25 bp, Homo sapien
gcaacattaaggtttcgctttcgtc

SEQ ID NO: 3142221 - DNA, 25 bp, Homo sapien
gcaacgagatggcaatgaacttcct

SEQ ID NO: 3142222 - DNA, 25 bp, Homo sapien
ggcttggggtcactctgaccacact

SEQ ID NO: 3142223 - DNA, 25 bp, Homo sapien
aaagttactactgcaaagtaccctg

SEQ ID NO: 3142224 - DNA, 25 bp, Homo sapien
ccctgaacttttaaagcgtggcttg

SEQ ID NO: 3142225 - DNA, 25 bp, Homo sapien
ttccaatctggtcgccttgcaaaca

SEQ ID NO: 3142226 - DNA, 25 bp, Homo sapien
ccatagaaagaaatgttgcgcgcac

SEQ ID NO: 3142227 - DNA, 25 bp, Homo sapien
ctccccactgcttgccagggttaca

SEQ ID NO: 3142228 - DNA, 25 bp, Homo sapien
tgctgcttgattcaggctccccact

SEQ ID NO: 3142229 - DNA, 25 bp, Homo sapien
ccatgctgcttgattcaggctcccc

SEQ ID NO: 3142230 - DNA, 25 bp, Homo sapien
tccccactgcttgccagggttacat

SEQ ID NO: 3142231 - DNA, 25 bp, Homo sapien
aagtccccaaatgggccgtgataca

SEQ ID NO: 3142232 - DNA, 25 bp, Homo sapien
aagggcaaaacaaatgatcctgagg

SEQ ID NO: 3142233 - DNA, 25 bp, Homo sapien
aacaaatgatcctgaggcacccaca

SEQ ID NO: 3142234 - DNA, 25 bp, Homo sapien
tgatcctgaggcacccacacatata

SEQ ID NO: 3142235 - DNA, 25 bp, Homo sapien
taaacttgagaagggcagcacggta

SEQ ID NO: 3142236 - DNA, 25 bp, Homo sapien
cattaaacttgagaagggcagcacg

SEQ ID NO: 3142237 - DNA, 25 bp, Homo sapien
gtggtcattaaacttgagaagggca

SEQ ID NO: 3142238 - DNA, 25 bp, Homo sapien
ggtcattaaacttgagaagggcagc

SEQ ID NO: 3142239 - DNA, 25 bp, Homo sapien
ctgcccaaggccatactataagaag

SEQ ID NO: 3142240 - DNA, 25 bp, Homo sapien
gaaaagtgaggtcacctgcccaagg

SEQ ID NO: 3142241 - DNA, 25 bp, Homo sapien
gatgatatccaaagatcccatagat

SEQ ID NO: 3142242 - DNA, 25 bp, Homo sapien
cttctgtacgttcacaaagctgaga

SEQ ID NO: 3142243 - DNA, 25 bp, Homo sapien
ctcagcaaaacagttatcactgttt

SEQ ID NO: 3142244 - DNA, 25 bp, Homo sapien
ctattttacacacttcatatgcaga

SEQ ID NO: 3142245 - DNA, 25 bp, Homo sapien
ttttacacacttcatatgcagaaac

SEQ ID NO: 3142246 - DNA, 25 bp, Homo sapien
gggaactcagcaaaacagttatcac

SEQ ID NO: 3142247 - DNA, 25 bp, Homo sapien
caccgagacctcgttagaaagcaga

SEQ ID NO: 3142248 - DNA, 25 bp, Homo sapien
gagacctcgttagaaagcagatgtt

SEQ ID NO: 3142249 - DNA, 25 bp, Homo sapien
ccgagacctcgttagaaagcagatg

SEQ ID NO: 3142250 - DNA, 25 bp, Homo sapien
tccaccgagacctcgttagaaagca

SEQ ID NO: 3142251 - DNA, 25 bp, Homo sapien
agtttgtgaacacgctgaggcttgc

SEQ ID NO: 3142252 - DNA, 25 bp, Homo sapien
ggtgaaacgcaaagccggacttgct

SEQ ID NO: 3142253 - DNA, 25 bp, Homo sapien
cctttctggtggactgcctgctgag

SEQ ID NO: 3142254 - DNA, 25 bp, Homo sapien
gaggcttgcactcaaagatgctgga

SEQ ID NO: 3142255 - DNA, 25 bp, Homo sapien
gctcttaattagtagttttagactg

SEQ ID NO: 3142256 - DNA, 25 bp, Homo sapien
gagaggcatggctttagaacattca

SEQ ID NO: 3142257 - DNA, 25 bp, Homo sapien
caggtgactcacaagctcatttcag

SEQ ID NO: 3142258 - DNA, 25 bp, Homo sapien
cagccacaccttagtcttttggatc

SEQ ID NO: 3142259 - DNA, 25 bp, Homo sapien
ctacaagcctctgctaatatcatct

SEQ ID NO: 3142260 - DNA, 25 bp, Homo sapien
ctgctaatatcatctccaacagtac

SEQ ID NO: 3142261 - DNA, 25 bp, Homo sapien
cctctgctaatatcatctccaacag

SEQ ID NO: 3142262 - DNA, 25 bp, Homo sapien
aagcctctgctaatatcatctccaa

SEQ ID NO: 3142263 - DNA, 25 bp, Homo sapien
gataatccttcgctatgagatacag

SEQ ID NO: 3142264 - DNA, 25 bp, Homo sapien
tcaagagaatgctcctacagcagat

SEQ ID NO: 3142265 - DNA, 25 bp, Homo sapien
gatacagtgacattggtgtcccaag

SEQ ID NO: 3142266 - DNA, 25 bp, Homo sapien
catctgtttagaagaggccttaacc

SEQ ID NO: 3142267 - DNA, 25 bp, Homo sapien
ttaaacgggtgggatcaagatcctg

SEQ ID NO: 3142268 - DNA, 25 bp, Homo sapien
tgcagcagcagaccatccagataat

SEQ ID NO: 3142269 - DNA, 25 bp, Homo sapien
tttactagatgggtgccaaaaccat

SEQ ID NO: 3142270 - DNA, 25 bp, Homo sapien
tcattgaagaggaccaactagccaa

SEQ ID NO: 3142271 - DNA, 25 bp, Homo sapien
catgaatcctgctaaaatcaaagca

SEQ ID NO: 3142272 - DNA, 25 bp, Homo sapien
caaaaagtttataggcacaatgtcc

SEQ ID NO: 3142273 - DNA, 25 bp, Homo sapien
gtttataggcacaatgtccaaagaa

SEQ ID NO: 3142274 - DNA, 25 bp, Homo sapien
taggcacaatgtccaaagaaatcag

SEQ ID NO: 3142275 - DNA, 25 bp, Homo sapien
tgtcccgtcacagttgttaaacacc

SEQ ID NO: 3142276 - DNA, 25 bp, Homo sapien
gccgcgttcagagtggacaccaaat

SEQ ID NO: 3142277 - DNA, 25 bp, Homo sapien
aaggctgcgagcattttcacattaa

SEQ ID NO: 3142278 - DNA, 25 bp, Homo sapien
gacaccaaatccagaggatcacaat

SEQ ID NO: 3142279 - DNA, 25 bp, Homo sapien
tcgaagacgactcctaggctttggc

SEQ ID NO: 3142280 - DNA, 25 bp, Homo sapien
gctggagaatatcttgaccccggga

SEQ ID NO: 3142281 - DNA, 25 bp, Homo sapien
gataagatataatggcgcctcaggc

SEQ ID NO: 3142282 - DNA, 25 bp, Homo sapien
gaagtctacatgataggccccagca

SEQ ID NO: 3142283 - DNA, 25 bp, Homo sapien
aatatcgtttagttggctgccacag

SEQ ID NO: 3142284 - DNA, 25 bp, Homo sapien
gagaggagcactgggttctagtccc

SEQ ID NO: 3142285 - DNA, 25 bp, Homo sapien
tgacatagttcacgttagggaggac

SEQ ID NO: 3142286 - DNA, 25 bp, Homo sapien
aatttgacttgatgccttaccaggg

SEQ ID NO: 3142287 - DNA, 25 bp, Homo sapien
gatgtataacgaccaaatcaggtac

SEQ ID NO: 3142288 - DNA, 25 bp, Homo sapien
gacagtcaagacagtaaggcaagag

SEQ ID NO: 3142289 - DNA, 25 bp, Homo sapien
tgtgttgggagcatgcaaagtcctc

SEQ ID NO: 3142290 - DNA, 25 bp, Homo sapien
tatgggagacggagtgatatttcca

SEQ ID NO: 3142291 - DNA, 25 bp, Homo sapien
ctccggcagctctttcaaaggtccc

SEQ ID NO: 3142292 - DNA, 25 bp, Homo sapien
ttctccggcagctctttcaaaggtc

SEQ ID NO: 3142293 - DNA, 25 bp, Homo sapien
cttctccggcagctctttcaaaggt

SEQ ID NO: 3142294 - DNA, 25 bp, Homo sapien
tctccggcagctctttcaaaggtcc

SEQ ID NO: 3142295 - DNA, 25 bp, Homo sapien
caacaaaacttccaagcgcgtgtga

SEQ ID NO: 3142296 - DNA, 25 bp, Homo sapien
ggttcatcatgactgcaggccttgc

SEQ ID NO: 3142297 - DNA, 25 bp, Homo sapien
tgttcctagaaaggacgtgatctcg

SEQ ID NO: 3142298 - DNA, 25 bp, Homo sapien
tgatttccgcacagactcagcgaag

SEQ ID NO: 3142299 - DNA, 25 bp, Homo sapien
tggattccaattacctgcagctgag

SEQ ID NO: 3142300 - DNA, 25 bp, Homo sapien
actggctccgaatgcaaaatgtctg

SEQ ID NO: 3142301 - DNA, 25 bp, Homo sapien
aaaaggcaccaaattactggctccg

SEQ ID NO: 3142302 - DNA, 25 bp, Homo sapien
gcagctgagacaatacacggcatat

SEQ ID NO: 3142303 - DNA, 25 bp, Homo sapien
gaatgcactggtgcgaggagccaca

SEQ ID NO: 3142304 - DNA, 25 bp, Homo sapien
tctacattaataacgggctccctgg

SEQ ID NO: 3142305 - DNA, 25 bp, Homo sapien
taatgggcctatgaatcgcttggaa

SEQ ID NO: 3142306 - DNA, 25 bp, Homo sapien
aagtcaacatgtgacccacgtctgg

SEQ ID NO: 3142307 - DNA, 25 bp, Homo sapien
tgcaaacagattgcattcccatggt

SEQ ID NO: 3142308 - DNA, 25 bp, Homo sapien
aaagtctagaagattgaagggaaag

SEQ ID NO: 3142309 - DNA, 25 bp, Homo sapien
ttaggtaaggctgatggagcatcgt

SEQ ID NO: 3142310 - DNA, 25 bp, Homo sapien
tatgttttgccaaaacgtcgtgtta

SEQ ID NO: 3142311 - DNA, 25 bp, Homo sapien
aatatctatgtcatagcaaacagct

SEQ ID NO: 3142312 - DNA, 25 bp, Homo sapien
tctatgtcatagcaaacagctggca

SEQ ID NO: 3142313 - DNA, 25 bp, Homo sapien
atacaagtacacacaaactccaaag

SEQ ID NO: 3142314 - DNA, 25 bp, Homo sapien
tatgtcatagcaaacagctggcaat

SEQ ID NO: 3142315 - DNA, 25 bp, Homo sapien
ttgttaaacaaataatgctttatta

SEQ ID NO: 3142316 - DNA, 25 bp, Homo sapien
gtagttgagattataggcatgcact

SEQ ID NO: 3142317 - DNA, 25 bp, Homo sapien
agttgagattataggcatgcactgt

SEQ ID NO: 3142318 - DNA, 25 bp, Homo sapien
gagtagttgagattataggcatgca

SEQ ID NO: 3142319 - DNA, 25 bp, Homo sapien
ggcacgatctcagctaaccacaacc

SEQ ID NO: 3142320 - DNA, 25 bp, Homo sapien
tcactcccgccgccggcccgtgggc

SEQ ID NO: 3142321 - DNA, 25 bp, Homo sapien
gccgggcggcggctcttcgcccgcc

SEQ ID NO: 3142322 - DNA, 25 bp, Homo sapien
caatggtgacatcgcgggccgggcg

SEQ ID NO: 3142323 - DNA, 25 bp, Homo sapien
gaacaatggtgacatcgcgggccgg

SEQ ID NO: 3142324 - DNA, 25 bp, Homo sapien
ggcggcggctcttcgcccgccggct

SEQ ID NO: 3142325 - DNA, 25 bp, Homo sapien
tttccacatctttaacggcttctga

SEQ ID NO: 3142326 - DNA, 25 bp, Homo sapien
tcctaagtggtccctctgcttccat

SEQ ID NO: 3142327 - DNA, 25 bp, Homo sapien
tctgactacacttaaaagcaaatcc

SEQ ID NO: 3142328 - DNA, 25 bp, Homo sapien
gaaatatacatcagctgacatcact

SEQ ID NO: 3142329 - DNA, 25 bp, Homo sapien
gttcaaatcaagttacttcatcgct

SEQ ID NO: 3142330 - DNA, 25 bp, Homo sapien
tttaagttctgccataaactagctg

SEQ ID NO: 3142331 - DNA, 25 bp, Homo sapien
tgttcaaatcaagttacttcatcgc

SEQ ID NO: 3142332 - DNA, 25 bp, Homo sapien
ttaagttctgccataaactagctgt

SEQ ID NO: 3142333 - DNA, 25 bp, Homo sapien
acgagcccaaaacctcaagcgctgg

SEQ ID NO: 3142334 - DNA, 25 bp, Homo sapien
ccaaaacctcaagcgctggtccggg

SEQ ID NO: 3142335 - DNA, 25 bp, Homo sapien
tcaagcgctggtccgggcctacact

SEQ ID NO: 3142336 - DNA, 25 bp, Homo sapien
aaacctcaagcgctggtccgggcct

SEQ ID NO: 3142337 - DNA, 25 bp, Homo sapien
caggcatcccttaaaaagtttcgag

SEQ ID NO: 3142338 - DNA, 25 bp, Homo sapien
aagtttcgagcaccacagtctaggg

SEQ ID NO: 3142339 - DNA, 25 bp, Homo sapien
tcaggcctctcaacttctgggaagt

SEQ ID NO: 3142340 - DNA, 25 bp, Homo sapien
caggagataaagactggcttcgcca

SEQ ID NO: 3142341 - DNA, 25 bp, Homo sapien
aatgatttggggtagcaatccagga

SEQ ID NO: 3142342 - DNA, 25 bp, Homo sapien
gcaaatgatttggggtagcaatcca

SEQ ID NO: 3142343 - DNA, 25 bp, Homo sapien
ttggggtagcaatccaggagaaggt

SEQ ID NO: 3142344 - DNA, 25 bp, Homo sapien
tttggggtagcaatccaggagaagg

SEQ ID NO: 3142345 - DNA, 25 bp, Homo sapien
cccaaggatgaggtagaaacagaga

SEQ ID NO: 3142346 - DNA, 25 bp, Homo sapien
cccacccaaggatgaggtagaaaca

SEQ ID NO: 3142347 - DNA, 25 bp, Homo sapien
tgagaaggtcctgtcgctgcttgcc

SEQ ID NO: 3142348 - DNA, 25 bp, Homo sapien
gcttgccatggttaagccagaagtc

SEQ ID NO: 3142349 - DNA, 25 bp, Homo sapien
cctcaagaagacagtcgctggagac

SEQ ID NO: 3142350 - DNA, 25 bp, Homo sapien
caagaagacagtcgctggagacagg

SEQ ID NO: 3142351 - DNA, 25 bp, Homo sapien
tcgtcctcaagaagacagtcgctgg

SEQ ID NO: 3142352 - DNA, 25 bp, Homo sapien
tgccttcgtcctcaagaagacagtc

SEQ ID NO: 3142353 - DNA, 25 bp, Homo sapien
gttaatacaatatctcaggcatcaa

SEQ ID NO: 3142354 - DNA, 25 bp, Homo sapien
tggaggaacgtaaatttctgacacc

SEQ ID NO: 3142355 - DNA, 25 bp, Homo sapien
cagctcactgtaactaacgtctgcc

SEQ ID NO: 3142356 - DNA, 25 bp, Homo sapien
tgacgtagggaaagtgtgaccaaca

SEQ ID NO: 3142357 - DNA, 25 bp, Homo sapien
accagcagaggtgttgttaggctca

SEQ ID NO: 3142358 - DNA, 25 bp, Homo sapien
agcagaggtgttgttaggctcaaca

SEQ ID NO: 3142359 - DNA, 25 bp, Homo sapien
gcaccagcagaggtgttgttaggct

SEQ ID NO: 3142360 - DNA, 25 bp, Homo sapien
cagcagaggtgttgttaggctcaac

SEQ ID NO: 3142361 - DNA, 25 bp, Homo sapien
ggactggagttgctccccagtgact

SEQ ID NO: 3142362 - DNA, 25 bp, Homo sapien
actggagttgctccccagtgactgg

SEQ ID NO: 3142363 - DNA, 25 bp, Homo sapien
gactggagttgctccccagtgactg

SEQ ID NO: 3142364 - DNA, 25 bp, Homo sapien
ggaaatgcggttttctaccatggca

SEQ ID NO: 3142365 - DNA, 25 bp, Homo sapien
tctaccatggcatcatgtcttctcc

SEQ ID NO: 3142366 - DNA, 25 bp, Homo sapien
gcttctctggaaatgcggttttcta

SEQ ID NO: 3142367 - DNA, 25 bp, Homo sapien
acatgggtctaatgtgtcactcaga

SEQ ID NO: 3142368 - DNA, 25 bp, Homo sapien
aatacaagtggacaaagaaacagga

SEQ ID NO: 3142369 - DNA, 25 bp, Homo sapien
aacacgggtaatttgcaaagtatct

SEQ ID NO: 3142370 - DNA, 25 bp, Homo sapien
gcaaagtatctacacaacgcctcac

SEQ ID NO: 3142371 - DNA, 25 bp, Homo sapien
gggtaatttgcaaagtatctacaca

SEQ ID NO: 3142372 - DNA, 25 bp, Homo sapien
tcaggattttaaggatgagcaaaga

SEQ ID NO: 3142373 - DNA, 25 bp, Homo sapien
catcaggattttaaggatgagcaaa

SEQ ID NO: 3142374 - DNA, 25 bp, Homo sapien
gattttaaggatgagcaaagatgac

SEQ ID NO: 3142375 - DNA, 25 bp, Homo sapien
caggattttaaggatgagcaaagat

SEQ ID NO: 3142376 - DNA, 25 bp, Homo sapien
actcatgggaacactctggtttctt

SEQ ID NO: 3142377 - DNA, 25 bp, Homo sapien
ctcatgggaacactctggtttcttg

SEQ ID NO: 3142378 - DNA, 25 bp, Homo sapien
cactcatgggaacactctggtttct

SEQ ID NO: 3142379 - DNA, 25 bp, Homo sapien
acactcatgggaacactctggtttc

SEQ ID NO: 3142380 - DNA, 25 bp, Homo sapien
taaaccccacagagatggtctatgc

SEQ ID NO: 3142381 - DNA, 25 bp, Homo sapien
caggtgtccctgttagctggctgag

SEQ ID NO: 3142382 - DNA, 25 bp, Homo sapien
tcttgccaaggagtgatcaggtgtc

SEQ ID NO: 3142383 - DNA, 25 bp, Homo sapien
taatgactgttagcccctgacacag

SEQ ID NO: 3142384 - DNA, 25 bp, Homo sapien
cacggtgttgtccctactgctacat

SEQ ID NO: 3142385 - DNA, 25 bp, Homo sapien
ggtgttgtccctactgctacatcct

SEQ ID NO: 3142386 - DNA, 25 bp, Homo sapien
tgttgtccctactgctacatcctct

SEQ ID NO: 3142387 - DNA, 25 bp, Homo sapien
acggtgttgtccctactgctacatc

SEQ ID NO: 3142388 - DNA, 25 bp, Homo sapien
gggacgacacttatgaagcacctct

SEQ ID NO: 3142389 - DNA, 25 bp, Homo sapien
gcttccacagaaaagagaaggggga

SEQ ID NO: 3142390 - DNA, 25 bp, Homo sapien
aagcacctcttacctgccaagggct

SEQ ID NO: 3142391 - DNA, 25 bp, Homo sapien
cagaaaagagaagggggacgacact

SEQ ID NO: 3142392 - DNA, 25 bp, Homo sapien
ggctactccactgcggagcactgga

SEQ ID NO: 3142393 - DNA, 25 bp, Homo sapien
gctggctactccactgcggagcact

SEQ ID NO: 3142394 - DNA, 25 bp, Homo sapien
atgctctttcgggacgccccgctgg

SEQ ID NO: 3142395 - DNA, 25 bp, Homo sapien
actccactgcggagcactggaggag

SEQ ID NO: 3142396 - DNA, 25 bp, Homo sapien
gtggctggcactcacggaatgaatg

SEQ ID NO: 3142397 - DNA, 25 bp, Homo sapien
ggctggcactcacggaatgaatgca

SEQ ID NO: 3142398 - DNA, 25 bp, Homo sapien
agagagagaggcgtgttatttggaa

SEQ ID NO: 3142399 - DNA, 25 bp, Homo sapien
gaggcgtgttatttggaacatgcag

SEQ ID NO: 3142400 - DNA, 25 bp, Homo sapien
tcgatgcactcgtcgatcagggccg

SEQ ID NO: 3142401 - DNA, 25 bp, Homo sapien
gatcttccccgcctgacggatggag

SEQ ID NO: 3142402 - DNA, 25 bp, Homo sapien
gaagagcacctcgaacttcttggaa

SEQ ID NO: 3142403 - DNA, 25 bp, Homo sapien
tcttggaaaacgtgtcgtcgaactc

SEQ ID NO: 3142404 - DNA, 25 bp, Homo sapien
gggcctgcgcacaggctcctggctc

SEQ ID NO: 3142405 - DNA, 25 bp, Homo sapien
ggcctgcgcacaggctcctggctcc

SEQ ID NO: 3142406 - DNA, 25 bp, Homo sapien
ctggctccctgtgggcgcggcatgg

SEQ ID NO: 3142407 - DNA, 25 bp, Homo sapien
ggctccctgtgggcgcggcatgggg

SEQ ID NO: 3142408 - DNA, 25 bp, Homo sapien
gaagagcatagttcgattttcctcg

SEQ ID NO: 3142409 - DNA, 25 bp, Homo sapien
tttcctcgatatctgtgggctgcac

SEQ ID NO: 3142410 - DNA, 25 bp, Homo sapien
tgaagaagccgctgcttcggaggcc

SEQ ID NO: 3142411 - DNA, 25 bp, Homo sapien
gaggtggttctcaatgtcgctctcc

SEQ ID NO: 3142412 - DNA, 25 bp, Homo sapien
tcttgaaagcgtatggcagactggg

SEQ ID NO: 3142413 - DNA, 25 bp, Homo sapien
caaaagcaattgactaagaatcttc

SEQ ID NO: 3142414 - DNA, 25 bp, Homo sapien
taagaatcttcgctccataaagcag

SEQ ID NO: 3142415 - DNA, 25 bp, Homo sapien
gctgtgcacgagctgggtgatattt

SEQ ID NO: 3142416 - DNA, 25 bp, Homo sapien
caagggacgttagcacagcagtcaa

SEQ ID NO: 3142417 - DNA, 25 bp, Homo sapien
catttccagcatgtggcaagggacg

SEQ ID NO: 3142418 - DNA, 25 bp, Homo sapien
tcccaggtggccacaatgaaacctt

SEQ ID NO: 3142419 - DNA, 25 bp, Homo sapien
cctgattaccctgagaaatgctctc

SEQ ID NO: 3142420 - DNA, 25 bp, Homo sapien
aactaattcatttttaacatgcaac

SEQ ID NO: 3142421 - DNA, 25 bp, Homo sapien
ctgtggagaccaaggatgatgaaaa

SEQ ID NO: 3142422 - DNA, 25 bp, Homo sapien
ggagaccaaggatgatgaaaaacta

SEQ ID NO: 3142423 - DNA, 25 bp, Homo sapien
ctaattcatttttaacatgcaacat

SEQ ID NO: 3142424 - DNA, 25 bp, Homo sapien
ggcaggtagccttttactcttgtcc

SEQ ID NO: 3142425 - DNA, 25 bp, Homo sapien
gcaggtagccttttactcttgtcct

SEQ ID NO: 3142426 - DNA, 25 bp, Homo sapien
caggtagccttttactcttgtcctt

SEQ ID NO: 3142427 - DNA, 25 bp, Homo sapien
tgtcaggactgatgaggtaaacttc

SEQ ID NO: 3142428 - DNA, 25 bp, Homo sapien
ctgagagcaaaaggatatctcctta

SEQ ID NO: 3142429 - DNA, 25 bp, Homo sapien
tgaggtaaacttcagactggccaat

SEQ ID NO: 3142430 - DNA, 25 bp, Homo sapien
ccaatgctatttttttggtgtcagg

SEQ ID NO: 3142431 - DNA, 25 bp, Homo sapien
ccaaagggagagaacgagatgttca

SEQ ID NO: 3142432 - DNA, 25 bp, Homo sapien
cagttgtatccagaagacgcaccat

SEQ ID NO: 3142433 - DNA, 25 bp, Homo sapien
tcagttgtatccagaagacgcacca

SEQ ID NO: 3142434 - DNA, 25 bp, Homo sapien
gagaacgagatgttcagttgtatcc

SEQ ID NO: 3142435 - DNA, 25 bp, Homo sapien
acctccggaagactcccgacagata

SEQ ID NO: 3142436 - DNA, 25 bp, Homo sapien
ctccggaagactcccgacagataaa

SEQ ID NO: 3142437 - DNA, 25 bp, Homo sapien
tgaaacacgtaacagacaaaatgaa

SEQ ID NO: 3142438 - DNA, 25 bp, Homo sapien
gaagactcccgacagataaacccaa

SEQ ID NO: 3142439 - DNA, 25 bp, Homo sapien
gcttactaaatagtcataagtaaat

SEQ ID NO: 3142440 - DNA, 25 bp, Homo sapien
taatgatatgtcaatgaccatctgg

SEQ ID NO: 3142441 - DNA, 25 bp, Homo sapien
tagtcataagtaaataactaaagac

SEQ ID NO: 3142442 - DNA, 25 bp, Homo sapien
gaaaaatcagtggagctaaaattcc

SEQ ID NO: 3142443 - DNA, 25 bp, Homo sapien
gcctgtttcagggtcatcataattt

SEQ ID NO: 3142444 - DNA, 25 bp, Homo sapien
cacagctgggctggcgccttagctg

SEQ ID NO: 3142445 - DNA, 25 bp, Homo sapien
cacagagcttgtgcaggctttgcag

SEQ ID NO: 3142446 - DNA, 25 bp, Homo sapien
tgtctgctgcactgcggccaccgtg

SEQ ID NO: 3142447 - DNA, 25 bp, Homo sapien
ttcttttcacaatagcatgggttgt

SEQ ID NO: 3142448 - DNA, 25 bp, Homo sapien
catgggttgtttaaatcatgtgacc

SEQ ID NO: 3142449 - DNA, 25 bp, Homo sapien
ttttagaaatcctcccataaacaga

SEQ ID NO: 3142450 - DNA, 25 bp, Homo sapien
tgtatttagtagaaacgtatttgag

SEQ ID NO: 3142451 - DNA, 25 bp, Homo sapien
tctcatcctaccagggtggccctga

SEQ ID NO: 3142452 - DNA, 25 bp, Homo sapien
tctcttctcatcctaccagggtggc

SEQ ID NO: 3142453 - DNA, 25 bp, Homo sapien
acctacatcactacggatggcaggg

SEQ ID NO: 3142454 - DNA, 25 bp, Homo sapien
tggagaacagtgtgcgaggcaccta

SEQ ID NO: 3142455 - DNA, 25 bp, Homo sapien
gccttttcttggtatccagagataa

SEQ ID NO: 3142456 - DNA, 25 bp, Homo sapien
cattagaacccgatatttcaagaag

SEQ ID NO: 3142457 - DNA, 25 bp, Homo sapien
gataaatgtcacacatgatgagacg

SEQ ID NO: 3142458 - DNA, 25 bp, Homo sapien
aatacggcttagagcctgcactgcc

SEQ ID NO: 3142459 - DNA, 25 bp, Homo sapien
cactgattatgcgagcctcaacctc

SEQ ID NO: 3142460 - DNA, 25 bp, Homo sapien
ccagagagcttacgtcattccacag

SEQ ID NO: 3142461 - DNA, 25 bp, Homo sapien
tgtgcttggcgtggaaattttcatc

SEQ ID NO: 3142462 - DNA, 25 bp, Homo sapien
tataataggcattaagcttgcacca

SEQ ID NO: 3142463 - DNA, 25 bp, Homo sapien
aaaagagaggcatgaaaaaattcta

SEQ ID NO: 3142464 - DNA, 25 bp, Homo sapien
gagaggcatgaaaaaattctatata

SEQ ID NO: 3142465 - DNA, 25 bp, Homo sapien
aaagagaggcatgaaaaaattctat

SEQ ID NO: 3142466 - DNA, 25 bp, Homo sapien
gaggcatgaaaaaattctatataaa

SEQ ID NO: 3142467 - DNA, 25 bp, Homo sapien
tgctcctgattggttaatgtcgtca

SEQ ID NO: 3142468 - DNA, 25 bp, Homo sapien
cctcttcaaaaatagtcgcctgctc

SEQ ID NO: 3142469 - DNA, 25 bp, Homo sapien
caggtgcttttgcagttctagtttt

SEQ ID NO: 3142470 - DNA, 25 bp, Homo sapien
taatgtcgtcaggtgcttttgcagt

SEQ ID NO: 3142471 - DNA, 25 bp, Homo sapien
ctatcgtgtcttttatgtgtggtcc

SEQ ID NO: 3142472 - DNA, 25 bp, Homo sapien
ttttttacacatagcatttcccagg

SEQ ID NO: 3142473 - DNA, 25 bp, Homo sapien
caggttgggacaacactggtttgct

SEQ ID NO: 3142474 - DNA, 25 bp, Homo sapien
tggtcacccctgaaaccaagacgaa

SEQ ID NO: 3142475 - DNA, 25 bp, Homo sapien
cactgctagatcaaagggttatggg

SEQ ID NO: 3142476 - DNA, 25 bp, Homo sapien
gactccaggctgtgaaccccaatat

SEQ ID NO: 3142477 - DNA, 25 bp, Homo sapien
atattttggaggctacagcagacac

SEQ ID NO: 3142478 - DNA, 25 bp, Homo sapien
tatgggtacactgagcccaaatgtc

SEQ ID NO: 3142479 - DNA, 25 bp, Homo sapien
ccccaatatggatgtgttctttctg

SEQ ID NO: 3142480 - DNA, 25 bp, Homo sapien
tcatctccccaatatggatgtgttc

SEQ ID NO: 3142481 - DNA, 25 bp, Homo sapien
gctgctcatttctcggtctcaattt

SEQ ID NO: 3142482 - DNA, 25 bp, Homo sapien
taatcaattcattctctcgctgctc

SEQ ID NO: 3142483 - DNA, 25 bp, Homo sapien
gtcctctgtccgcttctgaagtcct

SEQ ID NO: 3142484 - DNA, 25 bp, Homo sapien
ccagagaagttctttgtcaaagcca

SEQ ID NO: 3142485 - DNA, 25 bp, Homo sapien
tagaaatttttaggtgcaacaagaa

SEQ ID NO: 3142486 - DNA, 25 bp, Homo sapien
gatcctaccacggtctatgtcacat

SEQ ID NO: 3142487 - DNA, 25 bp, Homo sapien
caggtccacgggaaatacacgccta

SEQ ID NO: 3142488 - DNA, 25 bp, Homo sapien
tttcacactatagagcgtaccctgg

SEQ ID NO: 3142489 - DNA, 25 bp, Homo sapien
caagtgcctgctaaatgctacgcgc

SEQ ID NO: 3142490 - DNA, 25 bp, Homo sapien
gaatctgttgcaaccggttctgtgc

SEQ ID NO: 3142491 - DNA, 25 bp, Homo sapien
tgtgccccttcagactacaccagat

SEQ ID NO: 3142492 - DNA, 25 bp, Homo sapien
tacaaattcatgttcccagtatcag

SEQ ID NO: 3142493 - DNA, 25 bp, Homo sapien
tcatctgctgttcgaagaccttatg

SEQ ID NO: 3142494 - DNA, 25 bp, Homo sapien
cagtatcagtataggaaagttcacc

SEQ ID NO: 3142495 - DNA, 25 bp, Homo sapien
aactttcctcgcagagctgtcatga

SEQ ID NO: 3142496 - DNA, 25 bp, Homo sapien
tgcagcctgaagacgtatagtgaac

SEQ ID NO: 3142497 - DNA, 25 bp, Homo sapien
ttgttcaagtgagcatttgccaggg

SEQ ID NO: 3142498 - DNA, 25 bp, Homo sapien
aaatacctttgtatcaccacctggc

SEQ ID NO: 3142499 - DNA, 25 bp, Homo sapien
agcaatccttctccctcggccccca

SEQ ID NO: 3142500 - DNA, 25 bp, Homo sapien
caagcaatccttctccctcggcccc

SEQ ID NO: 3142501 - DNA, 25 bp, Homo sapien
aatccttctccctcggcccccagag

SEQ ID NO: 3142502 - DNA, 25 bp, Homo sapien
tagctgggactacacacagctaatt

SEQ ID NO: 3142503 - DNA, 25 bp, Homo sapien
tcacttccaatattctctgctgcca

SEQ ID NO: 3142504 - DNA, 25 bp, Homo sapien
atctagcctaaatcgagtggcactg

SEQ ID NO: 3142505 - DNA, 25 bp, Homo sapien
tcgagtggcactgggtggtaattca

SEQ ID NO: 3142506 - DNA, 25 bp, Homo sapien
gcactgggtggtaattcacttccaa

SEQ ID NO: 3142507 - DNA, 25 bp, Homo sapien
actctgttaaagatctctttgcttt

SEQ ID NO: 3142508 - DNA, 25 bp, Homo sapien
ctctgttaaagatctctttgctttg

SEQ ID NO: 3142509 - DNA, 25 bp, Homo sapien
gttacttaatgtactagacagggag

SEQ ID NO: 3142510 - DNA, 25 bp, Homo sapien
tttgctggtgttacttaatgtacta

SEQ ID NO: 3142511 - DNA, 25 bp, Homo sapien
taatgtactagacagggagctatcc

SEQ ID NO: 3142512 - DNA, 25 bp, Homo sapien
tactagacagggagctatccagatc

SEQ ID NO: 3142513 - DNA, 25 bp, Homo sapien
ctgagtgatacctcataagtttcct

SEQ ID NO: 3142514 - DNA, 25 bp, Homo sapien
tcatgaggcgtctctgtgctcactg

SEQ ID NO: 3142515 - DNA, 25 bp, Homo sapien
cagggtgtttgctcgcctcctgaag

SEQ ID NO: 3142516 - DNA, 25 bp, Homo sapien
tgggagatgactctccgagtcactg

SEQ ID NO: 3142517 - DNA, 25 bp, Homo sapien
ccactggaattatgttttaggtact

SEQ ID NO: 3142518 - DNA, 25 bp, Homo sapien
tgcttagactcacccacaggtgaag

SEQ ID NO: 3142519 - DNA, 25 bp, Homo sapien
ggagctgaagactgacctgggcggt

SEQ ID NO: 3142520 - DNA, 25 bp, Homo sapien
gacctgggcggtgcttagactcacc

SEQ ID NO: 3142521 - DNA, 25 bp, Homo sapien
aagtataaaatataagcttcaaaat

SEQ ID NO: 3142522 - DNA, 25 bp, Homo sapien
taggataaagaaacataaaaacaca

SEQ ID NO: 3142523 - DNA, 25 bp, Homo sapien
acacaaagtataaaatataagcttc

SEQ ID NO: 3142524 - DNA, 25 bp, Homo sapien
cataaaaacacaaagtataaaatat

SEQ ID NO: 3142525 - DNA, 25 bp, Homo sapien
tctacaggagccagaaattttagaa

SEQ ID NO: 3142526 - DNA, 25 bp, Homo sapien
atctacaggagccagaaattttaga

SEQ ID NO: 3142527 - DNA, 25 bp, Homo sapien
tccgcagggcattacggtaggagat

SEQ ID NO: 3142528 - DNA, 25 bp, Homo sapien
ttttccgcagggcattacggtagga

SEQ ID NO: 3142529 - DNA, 25 bp, Homo sapien
tatgctcactaaccagaaacactgg

SEQ ID NO: 3142530 - DNA, 25 bp, Homo sapien
cagattagacgtcctgaacagatca

SEQ ID NO: 3142531 - DNA, 25 bp, Homo sapien
tattcaacacttagtaacacccagg

SEQ ID NO: 3142532 - DNA, 25 bp, Homo sapien
cacatatcatagttccaattgggcc

SEQ ID NO: 3142533 - DNA, 25 bp, Homo sapien
ggtggctactcggaggaatatctgc

SEQ ID NO: 3142534 - DNA, 25 bp, Homo sapien
caccagaatcaccaagatggtttgc

SEQ ID NO: 3142535 - DNA, 25 bp, Homo sapien
gtcttcacaggagtcccaccagaat

SEQ ID NO: 3142536 - DNA, 25 bp, Homo sapien
tctgctggaagaatcgcacgccttc

SEQ ID NO: 3142537 - DNA, 25 bp, Homo sapien
gaatttacctggtgcatgacgttcc

SEQ ID NO: 3142538 - DNA, 25 bp, Homo sapien
catgacgttcctctaggaatgctag

SEQ ID NO: 3142539 - DNA, 25 bp, Homo sapien
tacctggtgcatgacgttcctctag

SEQ ID NO: 3142540 - DNA, 25 bp, Homo sapien
tgcatgacgttcctctaggaatgct

SEQ ID NO: 3142541 - DNA, 25 bp, Homo sapien
taccctggaaacattcgcatcactg

SEQ ID NO: 3142542 - DNA, 25 bp, Homo sapien
gggaggtgacattaccctggaaaca

SEQ ID NO: 3142543 - DNA, 25 bp, Homo sapien
gaaacattcgcatcactgattttct

SEQ ID NO: 3142544 - DNA, 25 bp, Homo sapien
acagcatgggaggtgacattaccct

SEQ ID NO: 3142545 - DNA, 25 bp, Homo sapien
caacacagatgcctatagggagctt

SEQ ID NO: 3142546 - DNA, 25 bp, Homo sapien
catgcaggtacactgagagtccacg

SEQ ID NO: 3142547 - DNA, 25 bp, Homo sapien
actgagagtccacgcccaacacaga

SEQ ID NO: 3142548 - DNA, 25 bp, Homo sapien
gtctggccaacagggagacatgcag

SEQ ID NO: 3142549 - DNA, 25 bp, Homo sapien
tacaggccaacgatggcgatccaca

SEQ ID NO: 3142550 - DNA, 25 bp, Homo sapien
ttcagtacaggccaacgatggcgat

SEQ ID NO: 3142551 - DNA, 25 bp, Homo sapien
caggccaacgatggcgatccacagt

SEQ ID NO: 3142552 - DNA, 25 bp, Homo sapien
ccaacgatggcgatccacagtgagg

SEQ ID NO: 3142553 - DNA, 25 bp, Homo sapien
acacactcatgagggcagtgccaga

SEQ ID NO: 3142554 - DNA, 25 bp, Homo sapien
ccacacactcatgagggcagtgcca

SEQ ID NO: 3142555 - DNA, 25 bp, Homo sapien
tcccacacactcatgagggcagtgc

SEQ ID NO: 3142556 - DNA, 25 bp, Homo sapien
ttcccacacactcatgagggcagtg

SEQ ID NO: 3142557 - DNA, 25 bp, Homo sapien
ctcccagctgcagggtccctgatgg

SEQ ID NO: 3142558 - DNA, 25 bp, Homo sapien
cagctgcagggtccctgatggaggc

SEQ ID NO: 3142559 - DNA, 25 bp, Homo sapien
cccagctgcagggtccctgatggag

SEQ ID NO: 3142560 - DNA, 25 bp, Homo sapien
ctgcagggtccctgatggaggcacc

SEQ ID NO: 3142561 - DNA, 25 bp, Homo sapien
ttaaaagatgggcagtaagtccagt

SEQ ID NO: 3142562 - DNA, 25 bp, Homo sapien
aagatgggcagtaagtccagttgtg

SEQ ID NO: 3142563 - DNA, 25 bp, Homo sapien
aaaagatgggcagtaagtccagttg

SEQ ID NO: 3142564 - DNA, 25 bp, Homo sapien
ctcttaaaagatgggcagtaagtcc

SEQ ID NO: 3142565 - DNA, 25 bp, Homo sapien
cacaccagctgtgtacatccataac

SEQ ID NO: 3142566 - DNA, 25 bp, Homo sapien
ataacttatcaccagaactgctgtt

SEQ ID NO: 3142567 - DNA, 25 bp, Homo sapien
tgttcatcgaacattctccagcaaa

SEQ ID NO: 3142568 - DNA, 25 bp, Homo sapien
aagccgtcccctggcaactgtttga

SEQ ID NO: 3142569 - DNA, 25 bp, Homo sapien
ctcccatactgccttgtctgcaaga

SEQ ID NO: 3142570 - DNA, 25 bp, Homo sapien
aacctgcaatctgaatccttgccag

SEQ ID NO: 3142571 - DNA, 25 bp, Homo sapien
tcccatactgccttgtctgcaagag

SEQ ID NO: 3142572 - DNA, 25 bp, Homo sapien
ctccaatctacaacctgcaatctga

SEQ ID NO: 3142573 - DNA, 25 bp, Homo sapien
tgtccggaaaggtatccccactgac

SEQ ID NO: 3142574 - DNA, 25 bp, Homo sapien
ttgtccggaaaggtatccccactga

SEQ ID NO: 3142575 - DNA, 25 bp, Homo sapien
gaaaactatcagaatgtggtccata

SEQ ID NO: 3142576 - DNA, 25 bp, Homo sapien
tttctctgacggagaatgaagaact

SEQ ID NO: 3142577 - DNA, 25 bp, Homo sapien
tggtccatatgggtttctctgacgg

SEQ ID NO: 3142578 - DNA, 25 bp, Homo sapien
aacttctctggcaagcagtgccagg

SEQ ID NO: 3142579 - DNA, 25 bp, Homo sapien
ctaactgtatgcagcctgctgtaca

SEQ ID NO: 3142580 - DNA, 25 bp, Homo sapien
gtatgcagcctgctgtacactggga

SEQ ID NO: 3142581 - DNA, 25 bp, Homo sapien
aactgtatgcagcctgctgtacact

SEQ ID NO: 3142582 - DNA, 25 bp, Homo sapien
ctgtatgcagcctgctgtacactgg

SEQ ID NO: 3142583 - DNA, 25 bp, Homo sapien
aagtgaatggaaactcggtgacttt

SEQ ID NO: 3142584 - DNA, 25 bp, Homo sapien
actcggtgacttttcgtactacaag

SEQ ID NO: 3142585 - DNA, 25 bp, Homo sapien
tgaatggaaactcggtgacttttcg

SEQ ID NO: 3142586 - DNA, 25 bp, Homo sapien
tcggtgacttttcgtactacaagaa

SEQ ID NO: 3142587 - DNA, 25 bp, Homo sapien
acatccgcgtattggcaggcagaca

SEQ ID NO: 3142588 - DNA, 25 bp, Homo sapien
atcatccagacctctcgtcaggcga

SEQ ID NO: 3142589 - DNA, 25 bp, Homo sapien
agctcgagggtgtcaccactgagcc

SEQ ID NO: 3142590 - DNA, 25 bp, Homo sapien
gaacaatccctcactggtacatccg

SEQ ID NO: 3142591 - DNA, 25 bp, Homo sapien
accctttcctccttgatatctcctg

SEQ ID NO: 3142592 - DNA, 25 bp, Homo sapien
caccctttcctccttgatatctcct

SEQ ID NO: 3142593 - DNA, 25 bp, Homo sapien
tcaccctttcctccttgatatctcc

SEQ ID NO: 3142594 - DNA, 25 bp, Homo sapien
ccctttcctccttgatatctcctgt

SEQ ID NO: 3142595 - DNA, 25 bp, Homo sapien
gatttccgcgacagttttgctctcc

SEQ ID NO: 3142596 - DNA, 25 bp, Homo sapien
agttttgctctccagatatagaggg

SEQ ID NO: 3142597 - DNA, 25 bp, Homo sapien
accagccaggtaactcggtttcaga

SEQ ID NO: 3142598 - DNA, 25 bp, Homo sapien
aatggaagtacactagggatttccg

SEQ ID NO: 3142599 - DNA, 25 bp, Homo sapien
ttttagatcctcattaagagctatc

SEQ ID NO: 3142600 - DNA, 25 bp, Homo sapien
tgcaaattttagatcctcattaaga

SEQ ID NO: 3142601 - DNA, 25 bp, Homo sapien
aaattttagatcctcattaagagct

SEQ ID NO: 3142602 - DNA, 25 bp, Homo sapien
ttagatcctcattaagagctatcat

SEQ ID NO: 3142603 - DNA, 25 bp, Homo sapien
tctgtggcctatagcaccatggcgc

SEQ ID NO: 3142604 - DNA, 25 bp, Homo sapien
gtcatgccctcggagacggcttcct

SEQ ID NO: 3142605 - DNA, 25 bp, Homo sapien
tgtctggctgactctcctctgtcaa

SEQ ID NO: 3142606 - DNA, 25 bp, Homo sapien
ttttggcctttctttgtctggctga

SEQ ID NO: 3142607 - DNA, 25 bp, Homo sapien
catcattgttgtcagtttttgtgga

SEQ ID NO: 3142608 - DNA, 25 bp, Homo sapien
attgttgtcagtttttgtggaaagt

SEQ ID NO: 3142609 - DNA, 25 bp, Homo sapien
tcattgttgtcagtttttgtggaaa

SEQ ID NO: 3142610 - DNA, 25 bp, Homo sapien
tgttgtcagtttttgtggaaagtgg

SEQ ID NO: 3142611 - DNA, 25 bp, Homo sapien
aaccctgtatacttaggattagtca

SEQ ID NO: 3142612 - DNA, 25 bp, Homo sapien
ccaaaccctgtatacttaggattag

SEQ ID NO: 3142613 - DNA, 25 bp, Homo sapien
accctgtatacttaggattagtcat

SEQ ID NO: 3142614 - DNA, 25 bp, Homo sapien
caaaccctgtatacttaggattagt

SEQ ID NO: 3142615 - DNA, 25 bp, Homo sapien
tctcggagctcacgagatgtccttt

SEQ ID NO: 3142616 - DNA, 25 bp, Homo sapien
aactggttctaaaggagatcgtggg

SEQ ID NO: 3142617 - DNA, 25 bp, Homo sapien
gccaaagggcccatcttcacaaact

SEQ ID NO: 3142618 - DNA, 25 bp, Homo sapien
tagccttttgccacagctctcggag

SEQ ID NO: 3142619 - DNA, 25 bp, Homo sapien
acttcagagccaagataagaccagg

SEQ ID NO: 3142620 - DNA, 25 bp, Homo sapien
agaccaggcctgttcaatatcaaga

SEQ ID NO: 3142621 - DNA, 25 bp, Homo sapien
caggcacagaccatggctgaggata

SEQ ID NO: 3142622 - DNA, 25 bp, Homo sapien
tatacattagactatcgtgctgctg

SEQ ID NO: 3142623 - DNA, 25 bp, Homo sapien
gagaacgtctatccactcgctatga

SEQ ID NO: 3142624 - DNA, 25 bp, Homo sapien
gcaccctgatgagaggacccgtctt

SEQ ID NO: 3142625 - DNA, 25 bp, Homo sapien
tgtagggacatgcacagagaacgtc

SEQ ID NO: 3142626 - DNA, 25 bp, Homo sapien
cttactagcctattccaactgtggg

SEQ ID NO: 3142627 - DNA, 25 bp, Homo sapien
gctgtcatttgcaagaatattggcc

SEQ ID NO: 3142628 - DNA, 25 bp, Homo sapien
ccagtattggcattaaagtttgacc

SEQ ID NO: 3142629 - DNA, 25 bp, Homo sapien
tagctatgccctgattttacatggc

SEQ ID NO: 3142630 - DNA, 25 bp, Homo sapien
gacctacatgatgaacataactgcc

SEQ ID NO: 3142631 - DNA, 25 bp, Homo sapien
aatgtttgcatatctcacgtttaca

SEQ ID NO: 3142632 - DNA, 25 bp, Homo sapien
tatttgtattaatcttgcttaaatg

SEQ ID NO: 3142633 - DNA, 25 bp, Homo sapien
catatttgtattaatcttgcttaaa

SEQ ID NO: 3142634 - DNA, 25 bp, Homo sapien
gtttgcatatctcacgtttacatca

SEQ ID NO: 3142635 - DNA, 25 bp, Homo sapien
tgcctaaaatcagtggcctccaaaa

SEQ ID NO: 3142636 - DNA, 25 bp, Homo sapien
cagaactacaacaaacacccaggct

SEQ ID NO: 3142637 - DNA, 25 bp, Homo sapien
gaactggccagaagattcagctgaa

SEQ ID NO: 3142638 - DNA, 25 bp, Homo sapien
tcagatacaggaaccagctgttcgc

SEQ ID NO: 3142639 - DNA, 25 bp, Homo sapien
ccagcaggcaacatgagcatcctgc

SEQ ID NO: 3142640 - DNA, 25 bp, Homo sapien
cccagcaggcaacatgagcatcctg

SEQ ID NO: 3142641 - DNA, 25 bp, Homo sapien
cagtaaggctgctacaagcacgtct

SEQ ID NO: 3142642 - DNA, 25 bp, Homo sapien
aggctgctacaagcacgtctggcca

SEQ ID NO: 3142643 - DNA, 25 bp, Homo sapien
ttcctctggcagtaaggctgctaca

SEQ ID NO: 3142644 - DNA, 25 bp, Homo sapien
tggcagtaaggctgctacaagcacg

SEQ ID NO: 3142645 - DNA, 25 bp, Homo sapien
cactggactctggatgccaacgtac

SEQ ID NO: 3142646 - DNA, 25 bp, Homo sapien
ctgcactgcaactggcggcagcact

SEQ ID NO: 3142647 - DNA, 25 bp, Homo sapien
cagcaaatcaggtttggggctagcc

SEQ ID NO: 3142648 - DNA, 25 bp, Homo sapien
tggggctagccttgctgcactgcaa

SEQ ID NO: 3142649 - DNA, 25 bp, Homo sapien
tgcccaacagccgagtgcatttttt

SEQ ID NO: 3142650 - DNA, 25 bp, Homo sapien
gagtaatttcttcataatcgagctt

SEQ ID NO: 3142651 - DNA, 25 bp, Homo sapien
tcttcataatcgagcttcaggcgct

SEQ ID NO: 3142652 - DNA, 25 bp, Homo sapien
cctggagtgctaagcatcttttccc

SEQ ID NO: 3142653 - DNA, 25 bp, Homo sapien
gctgaggtggagtaagctaatcata

SEQ ID NO: 3142654 - DNA, 25 bp, Homo sapien
gctgggtaggaactgactgcacaga

SEQ ID NO: 3142655 - DNA, 25 bp, Homo sapien
tgtgagcatccaacaaagctctaaa

SEQ ID NO: 3142656 - DNA, 25 bp, Homo sapien
gcaagataagctgcaagaagagccc

SEQ ID NO: 3142657 - DNA, 25 bp, Homo sapien
atgcctggccactggttccattatt

SEQ ID NO: 3142658 - DNA, 25 bp, Homo sapien
gcctggccactggttccattattaa

SEQ ID NO: 3142659 - DNA, 25 bp, Homo sapien
ctggttccattattaattaacagca

SEQ ID NO: 3142660 - DNA, 25 bp, Homo sapien
ggttccattattaattaacagcata

SEQ ID NO: 3142661 - DNA, 25 bp, Homo sapien
ttaaggtggaattgctcagctagaa

SEQ ID NO: 3142662 - DNA, 25 bp, Homo sapien
aatttccagatttcacctcggtgat

SEQ ID NO: 3142663 - DNA, 25 bp, Homo sapien
gttctttgtatggcacatcctttgg

SEQ ID NO: 3142664 - DNA, 25 bp, Homo sapien
caaggtcaataagaatcgcatgctg

SEQ ID NO: 3142665 - DNA, 25 bp, Homo sapien
gccacatgctctaaaagcagcaggg

SEQ ID NO: 3142666 - DNA, 25 bp, Homo sapien
ggccccaaagcactgtgtgttctgt

SEQ ID NO: 3142667 - DNA, 25 bp, Homo sapien
gcatcctctgtcgtggctgcaggaa

SEQ ID NO: 3142668 - DNA, 25 bp, Homo sapien
gaacaggtattctggaagcagggcc

SEQ ID NO: 3142669 - DNA, 25 bp, Homo sapien
gataggaacatgatggcatttcctg

SEQ ID NO: 3142670 - DNA, 25 bp, Homo sapien
ctcccagccttggagcaagtgtggg

SEQ ID NO: 3142671 - DNA, 25 bp, Homo sapien
tgtttcacatgataggaacatgatg

SEQ ID NO: 3142672 - DNA, 25 bp, Homo sapien
caccctgaacctatttctcactttg

SEQ ID NO: 3142673 - DNA, 25 bp, Homo sapien
cacgccgaggcccttgttctgatct

SEQ ID NO: 3142674 - DNA, 25 bp, Homo sapien
ccttgttctgatctggtctcttctt

SEQ ID NO: 3142675 - DNA, 25 bp, Homo sapien
gggctgatcgtgtccgtggaagaat

SEQ ID NO: 3142676 - DNA, 25 bp, Homo sapien
agtgccttcggagtgcacagccacg

SEQ ID NO: 3142677 - DNA, 25 bp, Homo sapien
gaatgttacattctaggtccctttc

SEQ ID NO: 3142678 - DNA, 25 bp, Homo sapien
cacaggacttcaactcaaagatgga

SEQ ID NO: 3142679 - DNA, 25 bp, Homo sapien
gcgtgagataacaagactgctgaat

SEQ ID NO: 3142680 - DNA, 25 bp, Homo sapien
tcaaagtgcacgatgctgctctgtg

SEQ ID NO: 3142681 - DNA, 25 bp, Homo sapien
aaagctattcagtctcacggtggct

SEQ ID NO: 3142682 - DNA, 25 bp, Homo sapien
gtggctctgcacagttgactaacaa

SEQ ID NO: 3142683 - DNA, 25 bp, Homo sapien
ggcaaaccagcaatctgacaccgac

SEQ ID NO: 3142684 - DNA, 25 bp, Homo sapien
gaggccagaggtctcttgcagcaaa

SEQ ID NO: 3142685 - DNA, 25 bp, Homo sapien
tgtacggtgctgtgagaaaccccat

SEQ ID NO: 3142686 - DNA, 25 bp, Homo sapien
tcaagagatcttgcaggtggtccct

SEQ ID NO: 3142687 - DNA, 25 bp, Homo sapien
ggcttgttaaacctgcacatcccag

SEQ ID NO: 3142688 - DNA, 25 bp, Homo sapien
gccagaaaggcctacaagatgatcc

SEQ ID NO: 3142689 - DNA, 25 bp, Homo sapien
aacacatcttccagtgtgttctatg

SEQ ID NO: 3142690 - DNA, 25 bp, Homo sapien
tgcatgaaactggccaagctaaaac

SEQ ID NO: 3142691 - DNA, 25 bp, Homo sapien
ccaaatgcaacttcctgtcccactg

SEQ ID NO: 3142692 - DNA, 25 bp, Homo sapien
tgttctatgagactcccaaatgcaa

SEQ ID NO: 3142693 - DNA, 25 bp, Homo sapien
tgtggggacccgctcgacaggcact

SEQ ID NO: 3142694 - DNA, 25 bp, Homo sapien
agggcaccgtggcaatctaacggca

SEQ ID NO: 3142695 - DNA, 25 bp, Homo sapien
tccaacaagcacttctcgagaaagg

SEQ ID NO: 3142696 - DNA, 25 bp, Homo sapien
aaggttcaaccagaggagggcaccg

SEQ ID NO: 3142697 - DNA, 25 bp, Homo sapien
tatcagcaagctgacaggcaatagg

SEQ ID NO: 3142698 - DNA, 25 bp, Homo sapien
caagctgacaggcaataggaaccac

SEQ ID NO: 3142699 - DNA, 25 bp, Homo sapien
ctttatcagcaagctgacaggcaat

SEQ ID NO: 3142700 - DNA, 25 bp, Homo sapien
gacaggcaataggaaccacatagag

SEQ ID NO: 3142701 - DNA, 25 bp, Homo sapien
ggccaaattttgccaaaccaatgac

SEQ ID NO: 3142702 - DNA, 25 bp, Homo sapien
tgggccaaattttgccaaaccaatg

SEQ ID NO: 3142703 - DNA, 25 bp, Homo sapien
gggccaaattttgccaaaccaatga

SEQ ID NO: 3142704 - DNA, 25 bp, Homo sapien
cactggctctgtgcttagaaggacc

SEQ ID NO: 3142705 - DNA, 25 bp, Homo sapien
caacattcctaagagggtgggccta

SEQ ID NO: 3142706 - DNA, 25 bp, Homo sapien
taattgacaccgcttgtagagtggc

SEQ ID NO: 3142707 - DNA, 25 bp, Homo sapien
gggagtgacctatgctaattggcca

SEQ ID NO: 3142708 - DNA, 25 bp, Homo sapien
ccctccgtctggtatcaaacaggtg

SEQ ID NO: 3142709 - DNA, 25 bp, Homo sapien
ccaaatggacccctccgtctggtat

SEQ ID NO: 3142710 - DNA, 25 bp, Homo sapien
ggagcacttccccacttctgcattt

SEQ ID NO: 3142711 - DNA, 25 bp, Homo sapien
gacccctccgtctggtatcaaacag

SEQ ID NO: 3142712 - DNA, 25 bp, Homo sapien
ctgggcagagaagtatgggtgtgta

SEQ ID NO: 3142713 - DNA, 25 bp, Homo sapien
tatgggtgtgtaggaaaggttcgcc

SEQ ID NO: 3142714 - DNA, 25 bp, Homo sapien
gcagagaagtatgggtgtgtaggaa

SEQ ID NO: 3142715 - DNA, 25 bp, Homo sapien
agtatgggtgtgtaggaaaggttcg

SEQ ID NO: 3142716 - DNA, 25 bp, Homo sapien
tgtaaagcgatagctgtcctgctcc

SEQ ID NO: 3142717 - DNA, 25 bp, Homo sapien
tcctggtctagaagtgagtaggcct

SEQ ID NO: 3142718 - DNA, 25 bp, Homo sapien
gaccttggcaatatcccacttcctg

SEQ ID NO: 3142719 - DNA, 25 bp, Homo sapien
agtgagtaggccttcaaaatgttgt

SEQ ID NO: 3142720 - DNA, 25 bp, Homo sapien
aacatcagaaacttgagcattttaa

SEQ ID NO: 3142721 - DNA, 25 bp, Homo sapien
tgagcattttaaacgcctcttcctc

SEQ ID NO: 3142722 - DNA, 25 bp, Homo sapien
aaataatcatgtctggccgatactg

SEQ ID NO: 3142723 - DNA, 25 bp, Homo sapien
tgtctggccgatactgtttccgcag

SEQ ID NO: 3142724 - DNA, 25 bp, Homo sapien
gaagactgtctaatcaaccaaaggc

SEQ ID NO: 3142725 - DNA, 25 bp, Homo sapien
acaaaaccgttttcagaggctcaga

SEQ ID NO: 3142726 - DNA, 25 bp, Homo sapien
gagggtcagaatccgctaagatcca

SEQ ID NO: 3142727 - DNA, 25 bp, Homo sapien
ggctctaatgtattccctcccagga

SEQ ID NO: 3142728 - DNA, 25 bp, Homo sapien
aacctcgagagctggtacatctgga

SEQ ID NO: 3142729 - DNA, 25 bp, Homo sapien
gcgggaactgtgaggcaaacatggt

SEQ ID NO: 3142730 - DNA, 25 bp, Homo sapien
ctctggctacgaatcccagcgggaa

SEQ ID NO: 3142731 - DNA, 25 bp, Homo sapien
tcatgaagcaacctcgagagctggt

SEQ ID NO: 3142732 - DNA, 25 bp, Homo sapien
taagagaaggctggttctggcaaac

SEQ ID NO: 3142733 - DNA, 25 bp, Homo sapien
gaaatgtttcccctctaataagaga

SEQ ID NO: 3142734 - DNA, 25 bp, Homo sapien
ttatcagaagttaaggaggactcca

SEQ ID NO: 3142735 - DNA, 25 bp, Homo sapien
tagggaagccccgtgattatcagaa

SEQ ID NO: 3142736 - DNA, 25 bp, Homo sapien
gatctacacggatcggatccacatc

SEQ ID NO: 3142737 - DNA, 25 bp, Homo sapien
gtgagcgatcggatctacacggatc

SEQ ID NO: 3142738 - DNA, 25 bp, Homo sapien
gtctgctctagggagaccctcatgg

SEQ ID NO: 3142739 - DNA, 25 bp, Homo sapien
gaccctcatggtgagcgatcggatc

SEQ ID NO: 3142740 - DNA, 25 bp, Homo sapien
catcagtcaatactcacaacccaga

SEQ ID NO: 3142741 - DNA, 25 bp, Homo sapien
gctgaggaaggcaattcatgagaaa

SEQ ID NO: 3142742 - DNA, 25 bp, Homo sapien
gcatcagtcaatactcacaacccag

SEQ ID NO: 3142743 - DNA, 25 bp, Homo sapien
cagcatcagtcaatactcacaaccc

SEQ ID NO: 3142744 - DNA, 25 bp, Homo sapien
tctgcaatagaagggctatcatttc

SEQ ID NO: 3142745 - DNA, 25 bp, Homo sapien
ttttacccatttatgagccgaagga

SEQ ID NO: 3142746 - DNA, 25 bp, Homo sapien
aatagaagggctatcatttccaaag

SEQ ID NO: 3142747 - DNA, 25 bp, Homo sapien
cgtctttttacccatttatgagccg

SEQ ID NO: 3142748 - DNA, 25 bp, Homo sapien
gtcacctgaatagctggagattttc

SEQ ID NO: 3142749 - DNA, 25 bp, Homo sapien
tggaaggctgcggtcctccagtcgt

SEQ ID NO: 3142750 - DNA, 25 bp, Homo sapien
cagtgctgtgcagaacaacagcaca

SEQ ID NO: 3142751 - DNA, 25 bp, Homo sapien
ccagtcgtggctccgctacattcta

SEQ ID NO: 3142752 - DNA, 25 bp, Homo sapien
cattctatgagtaacgggtaaaggg

SEQ ID NO: 3142753 - DNA, 25 bp, Homo sapien
cacaaacatcacaactactgatggc

SEQ ID NO: 3142754 - DNA, 25 bp, Homo sapien
tccttcttaagtctggttgttgagg

SEQ ID NO: 3142755 - DNA, 25 bp, Homo sapien
tcacaactactgatggctcagggtg

SEQ ID NO: 3142756 - DNA, 25 bp, Homo sapien
ctttccacaaacatcacaactactg

SEQ ID NO: 3142757 - DNA, 25 bp, Homo sapien
catctgtaccaagccaaggttgggt

SEQ ID NO: 3142758 - DNA, 25 bp, Homo sapien
ggtttctaggttttcatgctgcaga

SEQ ID NO: 3142759 - DNA, 25 bp, Homo sapien
tcaagggcttatggcttcccaacag

SEQ ID NO: 3142760 - DNA, 25 bp, Homo sapien
tcccaacagacttaaagccacttta

SEQ ID NO: 3142761 - DNA, 25 bp, Homo sapien
aacacttcagaggataatggttcta

SEQ ID NO: 3142762 - DNA, 25 bp, Homo sapien
cttcagaggataatggttctattgt

SEQ ID NO: 3142763 - DNA, 25 bp, Homo sapien
cacttcagaggataatggttctatt

SEQ ID NO: 3142764 - DNA, 25 bp, Homo sapien
cagaggataatggttctattgtata

SEQ ID NO: 3142765 - DNA, 25 bp, Homo sapien
agagaacactcagatgtcaagttca

SEQ ID NO: 3142766 - DNA, 25 bp, Homo sapien
agttcagatagaaacaccagaggga

SEQ ID NO: 3142767 - DNA, 25 bp, Homo sapien
ctcagatgtcaagttcagatagaaa

SEQ ID NO: 3142768 - DNA, 25 bp, Homo sapien
gcagaaagcctgacagagaacactc

SEQ ID NO: 3142769 - DNA, 25 bp, Homo sapien
ggaagcatccattacatctactctg

SEQ ID NO: 3142770 - DNA, 25 bp, Homo sapien
cagtatgctccaccatctgcaatgg

SEQ ID NO: 3142771 - DNA, 25 bp, Homo sapien
ggaatcatgctggaccccatgtctg

SEQ ID NO: 3142772 - DNA, 25 bp, Homo sapien
catctgtacacagggcagtatgctc

SEQ ID NO: 3142773 - DNA, 25 bp, Homo sapien
aatggaaccacagctatcacagagg

SEQ ID NO: 3142774 - DNA, 25 bp, Homo sapien
gaaatggaaccacagctatcacaga

SEQ ID NO: 3142775 - DNA, 25 bp, Homo sapien
gaaccacagctatcacagaggacca

SEQ ID NO: 3142776 - DNA, 25 bp, Homo sapien
tggaaccacagctatcacagaggac

SEQ ID NO: 3142777 - DNA, 25 bp, Homo sapien
tattcaatggacaggtcctttggta

SEQ ID NO: 3142778 - DNA, 25 bp, Homo sapien
tggtaagtacactgccacaaaggct

SEQ ID NO: 3142779 - DNA, 25 bp, Homo sapien
ctttcagcctgtccacattgagcca

SEQ ID NO: 3142780 - DNA, 25 bp, Homo sapien
tcagcctgtccacattgagccagag

SEQ ID NO: 3142781 - DNA, 25 bp, Homo sapien
gacaagaatacaacactgacctcct

SEQ ID NO: 3142782 - DNA, 25 bp, Homo sapien
aagaatacaacactgacctcctttc

SEQ ID NO: 3142783 - DNA, 25 bp, Homo sapien
gtgacaagaatacaacactgacctc

SEQ ID NO: 3142784 - DNA, 25 bp, Homo sapien
caagaatacaacactgacctccttt

SEQ ID NO: 3142785 - DNA, 25 bp, Homo sapien
tggtcactacacaaagctgcaaggt

SEQ ID NO: 3142786 - DNA, 25 bp, Homo sapien
ctgagcactggtcactacacaaagc

SEQ ID NO: 3142787 - DNA, 25 bp, Homo sapien
tgcctaagccgttccctgagcactg

SEQ ID NO: 3142788 - DNA, 25 bp, Homo sapien
cagggtcttgcctaagccgttccct

SEQ ID NO: 3142789 - DNA, 25 bp, Homo sapien
tgttaaaactgagattgtttggcac

SEQ ID NO: 3142790 - DNA, 25 bp, Homo sapien
ctgaacagtaaaaaccacaaatgtt

SEQ ID NO: 3142791 - DNA, 25 bp, Homo sapien
aaactgagattgtttggcactcatg

SEQ ID NO: 3142792 - DNA, 25 bp, Homo sapien
ccacaaatgttaaaactgagattgt

SEQ ID NO: 3142793 - DNA, 25 bp, Homo sapien
tcatcaatggatgccacgtcatgga

SEQ ID NO: 3142794 - DNA, 25 bp, Homo sapien
ctcagcaaaaccatcatcaatggat

SEQ ID NO: 3142795 - DNA, 25 bp, Homo sapien
ggatgccacgtcatggaacttctga

SEQ ID NO: 3142796 - DNA, 25 bp, Homo sapien
aaccatcatcaatggatgccacgtc

SEQ ID NO: 3142797 - DNA, 25 bp, Homo sapien
ctttgagtcagccttaaaattgcgg

SEQ ID NO: 3142798 - DNA, 25 bp, Homo sapien
aattaaacgaggcaactcctggaag

SEQ ID NO: 3142799 - DNA, 25 bp, Homo sapien
gctccactggcgactctatgaatga

SEQ ID NO: 3142800 - DNA, 25 bp, Homo sapien
aatgacttgagctcggtacttaacc

SEQ ID NO: 3142801 - DNA, 25 bp, Homo sapien
ccctgctagatcagaacacacattc

SEQ ID NO: 3142802 - DNA, 25 bp, Homo sapien
caaactagcctatcttccctggaat

SEQ ID NO: 3142803 - DNA, 25 bp, Homo sapien
gaaactgcctctctattgcattgcc

SEQ ID NO: 3142804 - DNA, 25 bp, Homo sapien
gatggctccctactggcattcaaac

SEQ ID NO: 3142805 - DNA, 25 bp, Homo sapien
caactcctaagtgcctaagtgactc

SEQ ID NO: 3142806 - DNA, 25 bp, Homo sapien
taatggtgacgaaaacaccacacgt

SEQ ID NO: 3142807 - DNA, 25 bp, Homo sapien
gatgagtgaatacgaaacgatgcct

SEQ ID NO: 3142808 - DNA, 25 bp, Homo sapien
taagtgactcaagccgtccgtgtct

SEQ ID NO: 3142809 - DNA, 25 bp, Homo sapien
taagtacaggtttttgatactcacc

SEQ ID NO: 3142810 - DNA, 25 bp, Homo sapien
aataagaaaaactacgcactgagaa

SEQ ID NO: 3142811 - DNA, 25 bp, Homo sapien
attccaaggtaacattaagtacagg

SEQ ID NO: 3142812 - DNA, 25 bp, Homo sapien
aaaactacgcactgagaaggtaata

SEQ ID NO: 3142813 - DNA, 25 bp, Homo sapien
tctacgcttagctctacacttggta

SEQ ID NO: 3142814 - DNA, 25 bp, Homo sapien
tcctctacgcttagctctacacttg

SEQ ID NO: 3142815 - DNA, 25 bp, Homo sapien
ctgtgaagcgtctcctctacgctta

SEQ ID NO: 3142816 - DNA, 25 bp, Homo sapien
gaagcgtctcctctacgcttagctc

SEQ ID NO: 3142817 - DNA, 25 bp, Homo sapien
cgtctgcaatcacgacaatgcgcac

SEQ ID NO: 3142818 - DNA, 25 bp, Homo sapien
aaagtcatcacgtactaaaactgag

SEQ ID NO: 3142819 - DNA, 25 bp, Homo sapien
gtcatcacgtactaaaactgagaaa

SEQ ID NO: 3142820 - DNA, 25 bp, Homo sapien
gcaggcgtctgcaatcacgacaatg

SEQ ID NO: 3142821 - DNA, 25 bp, Homo sapien
tcaaggttctgtttgcgtaagctgc

SEQ ID NO: 3142822 - DNA, 25 bp, Homo sapien
tgcaactgttcaaggaggtcaaggt

SEQ ID NO: 3142823 - DNA, 25 bp, Homo sapien
taactgtttagcgatgtccatttca

SEQ ID NO: 3142824 - DNA, 25 bp, Homo sapien
ttcttcttgaaggacgtggtactca

SEQ ID NO: 3142825 - DNA, 25 bp, Homo sapien
aaagagttaagtgcagaaacagcct

SEQ ID NO: 3142826 - DNA, 25 bp, Homo sapien
gactgcctgaccttagcaaaggaca

SEQ ID NO: 3142827 - DNA, 25 bp, Homo sapien
caatctgtctgctccataataaaaa

SEQ ID NO: 3142828 - DNA, 25 bp, Homo sapien
agctctgggactgcctgaccttagc

SEQ ID NO: 3142829 - DNA, 25 bp, Homo sapien
aacggctggcattcagctaacaggc

SEQ ID NO: 3142830 - DNA, 25 bp, Homo sapien
tctttgagtaatgacaacggctggc

SEQ ID NO: 3142831 - DNA, 25 bp, Homo sapien
tttgctcatagaagttaaaagctct

SEQ ID NO: 3142832 - DNA, 25 bp, Homo sapien
catccctctgtggacctagctggtt

SEQ ID NO: 3142833 - DNA, 25 bp, Homo sapien
caagcttgtgtctgcaaagctcatc

SEQ ID NO: 3142834 - DNA, 25 bp, Homo sapien
cttgctgccaagcttgtgtctgcaa

SEQ ID NO: 3142835 - DNA, 25 bp, Homo sapien
ttgctgccaagcttgtgtctgcaaa

SEQ ID NO: 3142836 - DNA, 25 bp, Homo sapien
gcttgtgtctgcaaagctcatcttt

SEQ ID NO: 3142837 - DNA, 25 bp, Homo sapien
tgctctccagcgtctagacaacgtt

SEQ ID NO: 3142838 - DNA, 25 bp, Homo sapien
caatcgtctgatgtactgctgaaca

SEQ ID NO: 3142839 - DNA, 25 bp, Homo sapien
cagtgtgggcgtcaatgacttgtac

SEQ ID NO: 3142840 - DNA, 25 bp, Homo sapien
tgtacacggaggaggcatgattctt

SEQ ID NO: 3142841 - DNA, 25 bp, Homo sapien
cctgcagcttagttagtagtgaatt

SEQ ID NO: 3142842 - DNA, 25 bp, Homo sapien
tgaagcccctctgcattccgaggtg

SEQ ID NO: 3142843 - DNA, 25 bp, Homo sapien
tcatcactttgaagcccctctgcat

SEQ ID NO: 3142844 - DNA, 25 bp, Homo sapien
tgcattccgaggtgcaacctgcagc

SEQ ID NO: 3142845 - DNA, 25 bp, Homo sapien
aggcccttaaaagcaccctgagagc

SEQ ID NO: 3142846 - DNA, 25 bp, Homo sapien
caggcccttaaaagcaccctgagag

SEQ ID NO: 3142847 - DNA, 25 bp, Homo sapien
ggcccttaaaagcaccctgagagcc

SEQ ID NO: 3142848 - DNA, 25 bp, Homo sapien
tgcagcagggccgaccgctccagtt

SEQ ID NO: 3142849 - DNA, 25 bp, Homo sapien
tcaggctcccggtcgctgggctctg

SEQ ID NO: 3142850 - DNA, 25 bp, Homo sapien
taaggtaagcatggcctgcttcagc

SEQ ID NO: 3142851 - DNA, 25 bp, Homo sapien
gctcgggctgcgtgcactcaggctc

SEQ ID NO: 3142852 - DNA, 25 bp, Homo sapien
tctgtccctctcagttaaggcctgg

SEQ ID NO: 3142853 - DNA, 25 bp, Homo sapien
tcaggactggagaagggacgattta

SEQ ID NO: 3142854 - DNA, 25 bp, Homo sapien
tacttgctggcaagccggtttcctc

SEQ ID NO: 3142855 - DNA, 25 bp, Homo sapien
gcaagttggagttcgtaagaatcta

SEQ ID NO: 3142856 - DNA, 25 bp, Homo sapien
cacgccatctaaagctactgtgtac

SEQ ID NO: 3142857 - DNA, 25 bp, Homo sapien
caggaggaagtctcgaatgccagcc

SEQ ID NO: 3142858 - DNA, 25 bp, Homo sapien
cacatgctagcaatacctggtaggg

SEQ ID NO: 3142859 - DNA, 25 bp, Homo sapien
ggaaaccgctatcctctgagccagg

SEQ ID NO: 3142860 - DNA, 25 bp, Homo sapien
ctctcggaagaacgatggacccacg

SEQ ID NO: 3142861 - DNA, 25 bp, Homo sapien
gctgctccataccatataactcttg

SEQ ID NO: 3142862 - DNA, 25 bp, Homo sapien
ccaaataaccgttgtggctgctcca

SEQ ID NO: 3142863 - DNA, 25 bp, Homo sapien
ctaaggtttacaaccaaggcagttg

SEQ ID NO: 3142864 - DNA, 25 bp, Homo sapien
taagagagatatctatgaagcctaa

SEQ ID NO: 3142865 - DNA, 25 bp, Homo sapien
tccttagatggttgcgtacctgtcc

SEQ ID NO: 3142866 - DNA, 25 bp, Homo sapien
gtacctgtcccatgccctggaactg

SEQ ID NO: 3142867 - DNA, 25 bp, Homo sapien
ctggaactgggtgagctctcctggc

SEQ ID NO: 3142868 - DNA, 25 bp, Homo sapien
agacaacttttgactggtccccaag

SEQ ID NO: 3142869 - DNA, 25 bp, Homo sapien
caggataatccaatatagaacagga

SEQ ID NO: 3142870 - DNA, 25 bp, Homo sapien
taatccaatatagaacaggataatc

SEQ ID NO: 3142871 - DNA, 25 bp, Homo sapien
tatagaacaggataatccaatatag

SEQ ID NO: 3142872 - DNA, 25 bp, Homo sapien
tggatatagaacaggataatccaat

SEQ ID NO: 3142873 - DNA, 25 bp, Homo sapien
gagctgttaccaggatatacttcac

SEQ ID NO: 3142874 - DNA, 25 bp, Homo sapien
taatcctctaatggccgtctggagg

SEQ ID NO: 3142875 - DNA, 25 bp, Homo sapien
tggtggaaccaacattccaggtctt

SEQ ID NO: 3142876 - DNA, 25 bp, Homo sapien
ggcaccgtgcaaacagccttatgtg

SEQ ID NO: 3142877 - DNA, 25 bp, Homo sapien
attctttaacagtctcactgcaaaa

SEQ ID NO: 3142878 - DNA, 25 bp, Homo sapien
tctttaacagtctcactgcaaaatg

SEQ ID NO: 3142879 - DNA, 25 bp, Homo sapien
ttctttaacagtctcactgcaaaat

SEQ ID NO: 3142880 - DNA, 25 bp, Homo sapien
tttatccaggcataggggtgacctg

SEQ ID NO: 3142881 - DNA, 25 bp, Homo sapien
gaagggctattgcaggaactgggtg

SEQ ID NO: 3142882 - DNA, 25 bp, Homo sapien
ccacaggggaaatctggccacttgg

SEQ ID NO: 3142883 - DNA, 25 bp, Homo sapien
gaagcacagattccggatttctgct

SEQ ID NO: 3142884 - DNA, 25 bp, Homo sapien
tcgcatgggtaagtggcttcccctg

SEQ ID NO: 3142885 - DNA, 25 bp, Homo sapien
tctgggtagcattcaactccctctt

SEQ ID NO: 3142886 - DNA, 25 bp, Homo sapien
tttctagaacctgttcgcatgggta

SEQ ID NO: 3142887 - DNA, 25 bp, Homo sapien
acacattgctacaccgtgccactcc

SEQ ID NO: 3142888 - DNA, 25 bp, Homo sapien
gatctgactgatgggaaggcccatc

SEQ ID NO: 3142889 - DNA, 25 bp, Homo sapien
tacacccatgggtgaactatggcaa

SEQ ID NO: 3142890 - DNA, 25 bp, Homo sapien
caggtattcccaaagtgcctacttg

SEQ ID NO: 3142891 - DNA, 25 bp, Homo sapien
gcctacttgttccaggattggtata

SEQ ID NO: 3142892 - DNA, 25 bp, Homo sapien
accgctctgaagtcgtttctgtcct

SEQ ID NO: 3142893 - DNA, 25 bp, Homo sapien
cctgaccgctctgaagtcgtttctg

SEQ ID NO: 3142894 - DNA, 25 bp, Homo sapien
gctctgaagtcgtttctgtcctgga

SEQ ID NO: 3142895 - DNA, 25 bp, Homo sapien
tctgaagtcgtttctgtcctggatc

SEQ ID NO: 3142896 - DNA, 25 bp, Homo sapien
tgcatcctagcattccagggataat

SEQ ID NO: 3142897 - DNA, 25 bp, Homo sapien
caatttgtatttcccgccatccttg

SEQ ID NO: 3142898 - DNA, 25 bp, Homo sapien
gtatttcccgccatccttgctgcat

SEQ ID NO: 3142899 - DNA, 25 bp, Homo sapien
ctctaccatcacctttactttccct

SEQ ID NO: 3142900 - DNA, 25 bp, Homo sapien
ctctctcagtcctaagtcaccatct

SEQ ID NO: 3142901 - DNA, 25 bp, Homo sapien
ggctctagaataagcaaggttttct

SEQ ID NO: 3142902 - DNA, 25 bp, Homo sapien
tctcagtcctaagtcaccatctctc

SEQ ID NO: 3142903 - DNA, 25 bp, Homo sapien
ccaggctctagaataagcaaggttt

SEQ ID NO: 3142904 - DNA, 25 bp, Homo sapien
acctctgctctaatttctgcaaacg

SEQ ID NO: 3142905 - DNA, 25 bp, Homo sapien
tgacctctgctctaatttctgcaaa

SEQ ID NO: 3142906 - DNA, 25 bp, Homo sapien
catgcacacatgacctctgctctaa

SEQ ID NO: 3142907 - DNA, 25 bp, Homo sapien
catgacctctgctctaatttctgca

SEQ ID NO: 3142908 - DNA, 25 bp, Homo sapien
tgggcttgagtaagagcaagcaggg

SEQ ID NO: 3142909 - DNA, 25 bp, Homo sapien
gacccgccctgctgacaccagtccc

SEQ ID NO: 3142910 - DNA, 25 bp, Homo sapien
tgacaccagtcccaaccatctggtt

SEQ ID NO: 3142911 - DNA, 25 bp, Homo sapien
cttgggcttgagtaagagcaagcag

SEQ ID NO: 3142912 - DNA, 25 bp, Homo sapien
gcgtttcacgacacttccatgcttt

SEQ ID NO: 3142913 - DNA, 25 bp, Homo sapien
tcagtttcatccctgcgtttcacga

SEQ ID NO: 3142914 - DNA, 25 bp, Homo sapien
ttcatccctgcgtttcacgacactt

SEQ ID NO: 3142915 - DNA, 25 bp, Homo sapien
ctgcgtttcacgacacttccatgct

SEQ ID NO: 3142916 - DNA, 25 bp, Homo sapien
ctccctggccccacccatgccccac

SEQ ID NO: 3142917 - DNA, 25 bp, Homo sapien
acacgatgcgtctgttatggagtcc

SEQ ID NO: 3142918 - DNA, 25 bp, Homo sapien
caccaaaagctactggatgatggat

SEQ ID NO: 3142919 - DNA, 25 bp, Homo sapien
gattgaacattgtgtcctggccaag

SEQ ID NO: 3142920 - DNA, 25 bp, Homo sapien
tctcctctaatggaattcctgtccc

SEQ ID NO: 3142921 - DNA, 25 bp, Homo sapien
tagcttaagcgtctgctttaaaggg

SEQ ID NO: 3142922 - DNA, 25 bp, Homo sapien
tatttagcttaagcgtctgctttaa

SEQ ID NO: 3142923 - DNA, 25 bp, Homo sapien
gtttatttagcttaagcgtctgctt

SEQ ID NO: 3142924 - DNA, 25 bp, Homo sapien
tttagcttaagcgtctgctttaaag

SEQ ID NO: 3142925 - DNA, 25 bp, Homo sapien
tattccactcggactgcacccacca

SEQ ID NO: 3142926 - DNA, 25 bp, Homo sapien
gcacccaccagcagcacgcagctgc

SEQ ID NO: 3142927 - DNA, 25 bp, Homo sapien
accagcagcacgcagctgctttcca

SEQ ID NO: 3142928 - DNA, 25 bp, Homo sapien
cccaccagcagcacgcagctgcttt

SEQ ID NO: 3142929 - DNA, 25 bp, Homo sapien
caagtgcatacttcctataatttta

SEQ ID NO: 3142930 - DNA, 25 bp, Homo sapien
tgaagggcaaatgacgaaagggaac

SEQ ID NO: 3142931 - DNA, 25 bp, Homo sapien
ggcaaatgacgaaagggaaccttca

SEQ ID NO: 3142932 - DNA, 25 bp, Homo sapien
ctgaagggcaaatgacgaaagggaa

SEQ ID NO: 3142933 - DNA, 25 bp, Homo sapien
tcccaggctcagggatatcaaatgg

SEQ ID NO: 3142934 - DNA, 25 bp, Homo sapien
ccaggctcagggatatcaaatggga

SEQ ID NO: 3142935 - DNA, 25 bp, Homo sapien
ggctcagggatatcaaatgggatcc

SEQ ID NO: 3142936 - DNA, 25 bp, Homo sapien
caggctcagggatatcaaatgggat

SEQ ID NO: 3142937 - DNA, 25 bp, Homo sapien
gctagcctctgaagggccatgggcc

SEQ ID NO: 3142938 - DNA, 25 bp, Homo sapien
ttacctgcattcaagatggacactg

SEQ ID NO: 3142939 - DNA, 25 bp, Homo sapien
tgctagcctctgaagggccatgggc

SEQ ID NO: 3142940 - DNA, 25 bp, Homo sapien
agctctgaggccaggccgttacctg

SEQ ID NO: 3142941 - DNA, 25 bp, Homo sapien
ggcttttgtagcttgaagttggata

SEQ ID NO: 3142942 - DNA, 25 bp, Homo sapien
tcagcagtggagaggtctggttgcc

SEQ ID NO: 3142943 - DNA, 25 bp, Homo sapien
ggatggtgggtctttggactattaa

SEQ ID NO: 3142944 - DNA, 25 bp, Homo sapien
gaaggccaagttggcctccgtggat

SEQ ID NO: 3142945 - DNA, 25 bp, Homo sapien
tcagcctcgcaggggtctctgtggg

SEQ ID NO: 3142946 - DNA, 25 bp, Homo sapien
tctctggggggttcgctcaggcttt

SEQ ID NO: 3142947 - DNA, 25 bp, Homo sapien
ttctctggggggttcgctcaggctt

SEQ ID NO: 3142948 - DNA, 25 bp, Homo sapien
cttctctggggggttcgctcaggct

SEQ ID NO: 3142949 - DNA, 25 bp, Homo sapien
tcaagcttagaagactctgatctag

SEQ ID NO: 3142950 - DNA, 25 bp, Homo sapien
agaaaactcaagacgaggctgggat

SEQ ID NO: 3142951 - DNA, 25 bp, Homo sapien
tccaggactcatgcaaggaggttgt

SEQ ID NO: 3142952 - DNA, 25 bp, Homo sapien
ccattcacttatgagccaagacggg

SEQ ID NO: 3142953 - DNA, 25 bp, Homo sapien
gcaccagaagagtgagttgctagaa

SEQ ID NO: 3142954 - DNA, 25 bp, Homo sapien
tccttggtgccagtgaactgtgtaa

SEQ ID NO: 3142955 - DNA, 25 bp, Homo sapien
ctcctcttgcaccagaagagtgagt

SEQ ID NO: 3142956 - DNA, 25 bp, Homo sapien
tattacccttcaattctgtctcttg

SEQ ID NO: 3142957 - DNA, 25 bp, Homo sapien
gaaccttaggcaattcatctatgca

SEQ ID NO: 3142958 - DNA, 25 bp, Homo sapien
ctgggcctggtagtgatgagttctc

SEQ ID NO: 3142959 - DNA, 25 bp, Homo sapien
tatgcactgttacctgggtttccca

SEQ ID NO: 3142960 - DNA, 25 bp, Homo sapien
gattcgcaggacaccaactagaagc

SEQ ID NO: 3142961 - DNA, 25 bp, Homo sapien
caatttataccagtttgcaaggtga

SEQ ID NO: 3142962 - DNA, 25 bp, Homo sapien
gatctcttgcagactaaagtttgag

SEQ ID NO: 3142963 - DNA, 25 bp, Homo sapien
gaaccattgagactacacagtgtga

SEQ ID NO: 3142964 - DNA, 25 bp, Homo sapien
gaggctgggttccacaatttatacc

SEQ ID NO: 3142965 - DNA, 25 bp, Homo sapien
tgatcctgaacagtaattctcccac

SEQ ID NO: 3142966 - DNA, 25 bp, Homo sapien
gatgcatttatgacccaagccagaa

SEQ ID NO: 3142967 - DNA, 25 bp, Homo sapien
cagaactggccccaactggcctggg

SEQ ID NO: 3142968 - DNA, 25 bp, Homo sapien
gaaacgctgcatctaatgccacgga

SEQ ID NO: 3142969 - DNA, 25 bp, Homo sapien
aatgtaggaccaatattaacctggc

SEQ ID NO: 3142970 - DNA, 25 bp, Homo sapien
gagtaccatctgtaggaaaccaagc

SEQ ID NO: 3142971 - DNA, 25 bp, Homo sapien
catctttttgctggagtattgggag

SEQ ID NO: 3142972 - DNA, 25 bp, Homo sapien
caatcaacttgagtgcaccatcagg

SEQ ID NO: 3142973 - DNA, 25 bp, Homo sapien
tatgcgtcttattataagctaaagt

SEQ ID NO: 3142974 - DNA, 25 bp, Homo sapien
attatatgcgtcttattataagcta

SEQ ID NO: 3142975 - DNA, 25 bp, Homo sapien
ccccagcctatttcgtgaattgaaa

SEQ ID NO: 3142976 - DNA, 25 bp, Homo sapien
ataaatacttccccagcctatttcg

SEQ ID NO: 3142977 - DNA, 25 bp, Homo sapien
ctgtgacagagaacacaagagttct

SEQ ID NO: 3142978 - DNA, 25 bp, Homo sapien
gacagagaacacaagagttctagcc

SEQ ID NO: 3142979 - DNA, 25 bp, Homo sapien
tgtgacagagaacacaagagttcta

SEQ ID NO: 3142980 - DNA, 25 bp, Homo sapien
cagagaacacaagagttctagccat

SEQ ID NO: 3142981 - DNA, 25 bp, Homo sapien
ctgggaaccgcagggattgtagaat

SEQ ID NO: 3142982 - DNA, 25 bp, Homo sapien
tgtagaattgatctccagacagctc

SEQ ID NO: 3142983 - DNA, 25 bp, Homo sapien
gcagggattgtagaattgatctcca

SEQ ID NO: 3142984 - DNA, 25 bp, Homo sapien
aaccgcagggattgtagaattgatc

SEQ ID NO: 3142985 - DNA, 25 bp, Homo sapien
tactgcctgacgctggaagtgcagg

SEQ ID NO: 3142986 - DNA, 25 bp, Homo sapien
tcctgcccaattggagccgctttcc

SEQ ID NO: 3142987 - DNA, 25 bp, Homo sapien
cccctactgcctgacgctggaagtg

SEQ ID NO: 3142988 - DNA, 25 bp, Homo sapien
cgaggcaagcttgaacgccccagct

SEQ ID NO: 3142989 - DNA, 25 bp, Homo sapien
catccccagggttgatatggctagc

SEQ ID NO: 3142990 - DNA, 25 bp, Homo sapien
aactctttcgcctatttccccagat

SEQ ID NO: 3142991 - DNA, 25 bp, Homo sapien
gacatgtcaggaggcattaagatgc

SEQ ID NO: 3142992 - DNA, 25 bp, Homo sapien
gaacagcacggcatttttcctagtt

SEQ ID NO: 3142993 - DNA, 25 bp, Homo sapien
gccactgacacatagaagcattttc

SEQ ID NO: 3142994 - DNA, 25 bp, Homo sapien
aagccactgacacatagaagcattt

SEQ ID NO: 3142995 - DNA, 25 bp, Homo sapien
agccactgacacatagaagcatttt

SEQ ID NO: 3142996 - DNA, 25 bp, Homo sapien
cactgacacatagaagcattttcaa

SEQ ID NO: 3142997 - DNA, 25 bp, Homo sapien
ccttctttttatagaggatatgatc

SEQ ID NO: 3142998 - DNA, 25 bp, Homo sapien
tttatagaggatatgatcttcattg

SEQ ID NO: 3142999 - DNA, 25 bp, Homo sapien
tcagtcagaggtggactgaggaaag

SEQ ID NO: 3143000 - DNA, 25 bp, Homo sapien
aggtggactgaggaaaggtggcaca

SEQ ID NO: 3143001 - DNA, 25 bp, Homo sapien
gagcacatagttatttggactgttg

SEQ ID NO: 3143002 - DNA, 25 bp, Homo sapien
tgagcacatagttatttggactgtt

SEQ ID NO: 3143003 - DNA, 25 bp, Homo sapien
ctgagcacatagttatttggactgt

SEQ ID NO: 3143004 - DNA, 25 bp, Homo sapien
tgttttgcaactgttccccttggct

SEQ ID NO: 3143005 - DNA, 25 bp, Homo sapien
cagatgtagcaccaaagagtcttcc

SEQ ID NO: 3143006 - DNA, 25 bp, Homo sapien
gaattcaggaaaaccatatgaaacc

SEQ ID NO: 3143007 - DNA, 25 bp, Homo sapien
tttcttagtgttcctgattctgctg

SEQ ID NO: 3143008 - DNA, 25 bp, Homo sapien
ccactttattgctgtgggtacaaag

SEQ ID NO: 3143009 - DNA, 25 bp, Homo sapien
ctcataaggctgtttccgtgttcca

SEQ ID NO: 3143010 - DNA, 25 bp, Homo sapien
tttccgtgttccaggcaacagctgg

SEQ ID NO: 3143011 - DNA, 25 bp, Homo sapien
caaagagttctagtaaatcctgtgt

SEQ ID NO: 3143012 - DNA, 25 bp, Homo sapien
gttcaaaaatcttgagccatattac

SEQ ID NO: 3143013 - DNA, 25 bp, Homo sapien
gggcagttcaaaaatcttgagccat

SEQ ID NO: 3143014 - DNA, 25 bp, Homo sapien
ctgagtagagcctgggcagttcaaa

SEQ ID NO: 3143015 - DNA, 25 bp, Homo sapien
tgagtagagcctgggcagttcaaaa

SEQ ID NO: 3143016 - DNA, 25 bp, Homo sapien
aacacagactgtacatttgacctcc

SEQ ID NO: 3143017 - DNA, 25 bp, Homo sapien
cagactgtacatttgacctcccaac

SEQ ID NO: 3143018 - DNA, 25 bp, Homo sapien
agaacacagactgtacatttgacct

SEQ ID NO: 3143019 - DNA, 25 bp, Homo sapien
cacagactgtacatttgacctccca

SEQ ID NO: 3143020 - DNA, 25 bp, Homo sapien
cagttcctgcataatttcagcccca

SEQ ID NO: 3143021 - DNA, 25 bp, Homo sapien
agttcctgcataatttcagccccat

SEQ ID NO: 3143022 - DNA, 25 bp, Homo sapien
accccagttcctgcataatttcagc

SEQ ID NO: 3143023 - DNA, 25 bp, Homo sapien
cccagttcctgcataatttcagccc

SEQ ID NO: 3143024 - DNA, 25 bp, Homo sapien
ccattggaggcgaattaactctttc

SEQ ID NO: 3143025 - DNA, 25 bp, Homo sapien
caagaagcagttgcaagaaggctct

SEQ ID NO: 3143026 - DNA, 25 bp, Homo sapien
tactctggaggctaatcttttcccc

SEQ ID NO: 3143027 - DNA, 25 bp, Homo sapien
tagagggtgaaaatagccaagaagc

SEQ ID NO: 3143028 - DNA, 25 bp, Homo sapien
ctagggatctgacccagtgtcacct

SEQ ID NO: 3143029 - DNA, 25 bp, Homo sapien
tcccacctcaagttgcagaatccta

SEQ ID NO: 3143030 - DNA, 25 bp, Homo sapien
gggcctttaggcctgtcctatgtag

SEQ ID NO: 3143031 - DNA, 25 bp, Homo sapien
ctgtcctatgtaggctgaggcccct

SEQ ID NO: 3143032 - DNA, 25 bp, Homo sapien
ataaggcatgtggctgatcatgtcc

SEQ ID NO: 3143033 - DNA, 25 bp, Homo sapien
agaagaagggcataaggcatgtggc

SEQ ID NO: 3143034 - DNA, 25 bp, Homo sapien
gcatgtggctgatcatgtccatgcc

SEQ ID NO: 3143035 - DNA, 25 bp, Homo sapien
cagagaagaagggcataaggcatgt

SEQ ID NO: 3143036 - DNA, 25 bp, Homo sapien
tcaagtacaactttttcgaaattca

SEQ ID NO: 3143037 - DNA, 25 bp, Homo sapien
cattggccacgagtagattctcctt

SEQ ID NO: 3143038 - DNA, 25 bp, Homo sapien
gaaacactaagctgccgatttctgt

SEQ ID NO: 3143039 - DNA, 25 bp, Homo sapien
aaagagcatttaggccacaaccagc

SEQ ID NO: 3143040 - DNA, 25 bp, Homo sapien
ggagaaggtgttaccatccgagaca

SEQ ID NO: 3143041 - DNA, 25 bp, Homo sapien
gaaggtgttaccatccgagacagtt

SEQ ID NO: 3143042 - DNA, 25 bp, Homo sapien
taccatccgagacagtttttcattt

SEQ ID NO: 3143043 - DNA, 25 bp, Homo sapien
tgttaccatccgagacagtttttca

SEQ ID NO: 3143044 - DNA, 25 bp, Homo sapien
ctctgctccctctgatctctcagcc

SEQ ID NO: 3143045 - DNA, 25 bp, Homo sapien
ctgctccctctgatctctcagccat

SEQ ID NO: 3143046 - DNA, 25 bp, Homo sapien
cattttccctaactgctctgctccc

SEQ ID NO: 3143047 - DNA, 25 bp, Homo sapien
ttttccctaactgctctgctccctc

SEQ ID NO: 3143048 - DNA, 25 bp, Homo sapien
atggactttctccaggaagagagac

SEQ ID NO: 3143049 - DNA, 25 bp, Homo sapien
cttaaagatggactttctccaggaa

SEQ ID NO: 3143050 - DNA, 25 bp, Homo sapien
ttaaagatggactttctccaggaag

SEQ ID NO: 3143051 - DNA, 25 bp, Homo sapien
gactttctccaggaagagagaccat

SEQ ID NO: 3143052 - DNA, 25 bp, Homo sapien
ttttgcttttggtactgaatctgct

SEQ ID NO: 3143053 - DNA, 25 bp, Homo sapien
tgcttttggtactgaatctgctggg

SEQ ID NO: 3143054 - DNA, 25 bp, Homo sapien
cttttggtactgaatctgctgggtg

SEQ ID NO: 3143055 - DNA, 25 bp, Homo sapien
ttgcttttggtactgaatctgctgg

SEQ ID NO: 3143056 - DNA, 25 bp, Homo sapien
aatgtctgtagttcttaggtcatgg

SEQ ID NO: 3143057 - DNA, 25 bp, Homo sapien
cctgtttcaaggtcgccaggtatta

SEQ ID NO: 3143058 - DNA, 25 bp, Homo sapien
tacccatttggctagtggcttttgg

SEQ ID NO: 3143059 - DNA, 25 bp, Homo sapien
gctagtggcttttggttctctgaac

SEQ ID NO: 3143060 - DNA, 25 bp, Homo sapien
ccagggtggtagatttgaggacctc

SEQ ID NO: 3143061 - DNA, 25 bp, Homo sapien
gggtggtagatttgaggacctccat

SEQ ID NO: 3143062 - DNA, 25 bp, Homo sapien
tgccagggtggtagatttgaggacc

SEQ ID NO: 3143063 - DNA, 25 bp, Homo sapien
acagctcgcctctgccagggtggta

SEQ ID NO: 3143064 - DNA, 25 bp, Homo sapien
actgtaagccccacagaaggactcc

SEQ ID NO: 3143065 - DNA, 25 bp, Homo sapien
ccttccctaagtgtctacagcttcg

SEQ ID NO: 3143066 - DNA, 25 bp, Homo sapien
tgtctacagcttcgggcagtgctgg

SEQ ID NO: 3143067 - DNA, 25 bp, Homo sapien
gtaagccccacagaaggactccagg

SEQ ID NO: 3143068 - DNA, 25 bp, Homo sapien
ttcccctttagcaggtggtctcttc

SEQ ID NO: 3143069 - DNA, 25 bp, Homo sapien
tgtagttcccctttagcaggtggtc

SEQ ID NO: 3143070 - DNA, 25 bp, Homo sapien
ccctttagcaggtggtctcttccat

SEQ ID NO: 3143071 - DNA, 25 bp, Homo sapien
tagcaggtggtctcttccatttcta

SEQ ID NO: 3143072 - DNA, 25 bp, Homo sapien
gtcagccactcatgctccccaaatt

SEQ ID NO: 3143073 - DNA, 25 bp, Homo sapien
agccacttccttgtgttggtcacag

SEQ ID NO: 3143074 - DNA, 25 bp, Homo sapien
ctttctttgtcagccactcatgctc

SEQ ID NO: 3143075 - DNA, 25 bp, Homo sapien
acttccttgtgttggtcacagttct

SEQ ID NO: 3143076 - DNA, 25 bp, Homo sapien
gaatgtaaccatgataacaccccaa

SEQ ID NO: 3143077 - DNA, 25 bp, Homo sapien
gataacaccccaatgtctgggaagc

SEQ ID NO: 3143078 - DNA, 25 bp, Homo sapien
cagcttgcagaatgtaaccatgata

SEQ ID NO: 3143079 - DNA, 25 bp, Homo sapien
gtttgaggctgcagcttgcagaatg

SEQ ID NO: 3143080 - DNA, 25 bp, Homo sapien
tgatttactatctgcaagctttgtc

SEQ ID NO: 3143081 - DNA, 25 bp, Homo sapien
cgaaatccaggggatctcctttcct

SEQ ID NO: 3143082 - DNA, 25 bp, Homo sapien
ggtgcctttgggacaccgaaatcca

SEQ ID NO: 3143083 - DNA, 25 bp, Homo sapien
ttcctggtggcctgatttactatct

SEQ ID NO: 3143084 - DNA, 25 bp, Homo sapien
tcatgacccgaaacaagactggtgg

SEQ ID NO: 3143085 - DNA, 25 bp, Homo sapien
acttgggctctccacgatctcggaa

SEQ ID NO: 3143086 - DNA, 25 bp, Homo sapien
taaccaatggtgcactcatgacccg

SEQ ID NO: 3143087 - DNA, 25 bp, Homo sapien
gaaaaccgtgcctttatcagaaatg

SEQ ID NO: 3143088 - DNA, 25 bp, Homo sapien
gataggcaccaaggcggggagagac

SEQ ID NO: 3143089 - DNA, 25 bp, Homo sapien
ctccttcagaggagataggcaccaa

SEQ ID NO: 3143090 - DNA, 25 bp, Homo sapien
tccttcagaggagataggcaccaag

SEQ ID NO: 3143091 - DNA, 25 bp, Homo sapien
ttcagaggagataggcaccaaggcg

SEQ ID NO: 3143092 - DNA, 25 bp, Homo sapien
gagtaattctcctcacttgatgtac

SEQ ID NO: 3143093 - DNA, 25 bp, Homo sapien
gtaattctcctcacttgatgtacct

SEQ ID NO: 3143094 - DNA, 25 bp, Homo sapien
ggaggggagtaattctcctcacttg

SEQ ID NO: 3143095 - DNA, 25 bp, Homo sapien
gggagtaattctcctcacttgatgt

SEQ ID NO: 3143096 - DNA, 25 bp, Homo sapien
tgagctctcgcagtagaagaggaag

SEQ ID NO: 3143097 - DNA, 25 bp, Homo sapien
ttcaaggtggtaggtccatggccca

SEQ ID NO: 3143098 - DNA, 25 bp, Homo sapien
tgacttgtcaaaccaggacttcctg

SEQ ID NO: 3143099 - DNA, 25 bp, Homo sapien
tgtggagtagcaccagcttcaaggt

SEQ ID NO: 3143100 - DNA, 25 bp, Homo sapien
caggaagcccggagcacatttccca

SEQ ID NO: 3143101 - DNA, 25 bp, Homo sapien
gactgtccctgcagtccagtcagat

SEQ ID NO: 3143102 - DNA, 25 bp, Homo sapien
cagattatcagaatcttggtaccac

SEQ ID NO: 3143103 - DNA, 25 bp, Homo sapien
tccctgcagtccagtcagattatca

SEQ ID NO: 3143104 - DNA, 25 bp, Homo sapien
ttggtaccaccgttctccctgactg

SEQ ID NO: 3143105 - DNA, 25 bp, Homo sapien
tcagagcataaaccaaccatcccta

SEQ ID NO: 3143106 - DNA, 25 bp, Homo sapien
cttcttaacatagagcttcagggag

SEQ ID NO: 3143107 - DNA, 25 bp, Homo sapien
cagaagatattgttggtctatcaca

SEQ ID NO: 3143108 - DNA, 25 bp, Homo sapien
catccctatcctgaacttgcagaag

SEQ ID NO: 3143109 - DNA, 25 bp, Homo sapien
caaaaccttctatggctaccaatat

SEQ ID NO: 3143110 - DNA, 25 bp, Homo sapien
ccttcgagacttggtgcaggcatca

SEQ ID NO: 3143111 - DNA, 25 bp, Homo sapien
ctaccaatatcctcaataggctgtt

SEQ ID NO: 3143112 - DNA, 25 bp, Homo sapien
ttttcatcctacacgtctctactct

SEQ ID NO: 3143113 - DNA, 25 bp, Homo sapien
tcacactcagaagagaattcgtgtc

SEQ ID NO: 3143114 - DNA, 25 bp, Homo sapien
cacactcagaagagaattcgtgtcc

SEQ ID NO: 3143115 - DNA, 25 bp, Homo sapien
ctcacactcagaagagaattcgtgt

SEQ ID NO: 3143116 - DNA, 25 bp, Homo sapien
cagagaggatttagcagcacgagca

SEQ ID NO: 3143117 - DNA, 25 bp, Homo sapien
acaactaagcgggagccatggagga

SEQ ID NO: 3143118 - DNA, 25 bp, Homo sapien
gcagagcgtggctgagtcatcacac

SEQ ID NO: 3143119 - DNA, 25 bp, Homo sapien
tcctgagaggagtctgcaagccata

SEQ ID NO: 3143120 - DNA, 25 bp, Homo sapien
tagttcacgctgataccaagccaag

SEQ ID NO: 3143121 - DNA, 25 bp, Homo sapien
ttctctacctggactaccctgagag

SEQ ID NO: 3143122 - DNA, 25 bp, Homo sapien
tgcagctctttctgaacataaggtg

SEQ ID NO: 3143123 - DNA, 25 bp, Homo sapien
cctgagagctaaccccagttattgg

SEQ ID NO: 3143124 - DNA, 25 bp, Homo sapien
atatatgtggttttgggtgttaaca

SEQ ID NO: 3143125 - DNA, 25 bp, Homo sapien
tttgctgtagcaaacggatctctgg

SEQ ID NO: 3143126 - DNA, 25 bp, Homo sapien
gtggttttgggtgttaacatctgaa

SEQ ID NO: 3143127 - DNA, 25 bp, Homo sapien
tggcaagtctctgaagtaaagtaat

SEQ ID NO: 3143128 - DNA, 25 bp, Homo sapien
cagtggaacttatgtgctactctgt

SEQ ID NO: 3143129 - DNA, 25 bp, Homo sapien
tagaaggcaagagatatcgatgatg

SEQ ID NO: 3143130 - DNA, 25 bp, Homo sapien
gatgacagcgaatatttaattaagc

SEQ ID NO: 3143131 - DNA, 25 bp, Homo sapien
ttaagcacttacgtacagtggaact

SEQ ID NO: 3143132 - DNA, 25 bp, Homo sapien
gctctctcttaggagatgtttcatg

SEQ ID NO: 3143133 - DNA, 25 bp, Homo sapien
tcatgtcctcgaaattctttgcaga

SEQ ID NO: 3143134 - DNA, 25 bp, Homo sapien
gaaattctttgcagaattgcttgta

SEQ ID NO: 3143135 - DNA, 25 bp, Homo sapien
taggagatgtttcatgtcctcgaaa

SEQ ID NO: 3143136 - DNA, 25 bp, Homo sapien
cctttgctggaattttgcatgtctt

SEQ ID NO: 3143137 - DNA, 25 bp, Homo sapien
gtaccagctttgtggatcagccaac

SEQ ID NO: 3143138 - DNA, 25 bp, Homo sapien
tttgttgttgtaccagctttgtgga

SEQ ID NO: 3143139 - DNA, 25 bp, Homo sapien
ctcctttgctggaattttgcatgtc

SEQ ID NO: 3143140 - DNA, 25 bp, Homo sapien
ctgggtgcgttagggagggcggcaa

SEQ ID NO: 3143141 - DNA, 25 bp, Homo sapien
ggagggcggcaataaggctgaagtc

SEQ ID NO: 3143142 - DNA, 25 bp, Homo sapien
ggctgaatcggcatccttacaggag

SEQ ID NO: 3143143 - DNA, 25 bp, Homo sapien
cctgtttgaccaaggtgatgtgggc

SEQ ID NO: 3143144 - DNA, 25 bp, Homo sapien
caaaccaggtcattgttcagctggg

SEQ ID NO: 3143145 - DNA, 25 bp, Homo sapien
agctgggtttcattgagtgccttct

SEQ ID NO: 3143146 - DNA, 25 bp, Homo sapien
acaaaccaggtcattgttcagctgg

SEQ ID NO: 3143147 - DNA, 25 bp, Homo sapien
ttgttcagctgggtttcattgagtg

SEQ ID NO: 3143148 - DNA, 25 bp, Homo sapien
agcttcttctatcaagttctctttg

SEQ ID NO: 3143149 - DNA, 25 bp, Homo sapien
tttcagcttcttctatcaagttctc

SEQ ID NO: 3143150 - DNA, 25 bp, Homo sapien
tctttcagcttcttctatcaagttc

SEQ ID NO: 3143151 - DNA, 25 bp, Homo sapien
ttcagcttcttctatcaagttctct

SEQ ID NO: 3143152 - DNA, 25 bp, Homo sapien
ctgttattgttcgtaggttttctgg

SEQ ID NO: 3143153 - DNA, 25 bp, Homo sapien
tagctgctccgctgtttctttctga

SEQ ID NO: 3143154 - DNA, 25 bp, Homo sapien
gcttgtctgttattgttcgtaggtt

SEQ ID NO: 3143155 - DNA, 25 bp, Homo sapien
tgtctggtgcgttgtctcagcagga

SEQ ID NO: 3143156 - DNA, 25 bp, Homo sapien
tgcgcagttgggcttgcctggaaac

SEQ ID NO: 3143157 - DNA, 25 bp, Homo sapien
tcaagtcgcttctagggacctagcg

SEQ ID NO: 3143158 - DNA, 25 bp, Homo sapien
ttggcaaactttggtcggatcctcc

SEQ ID NO: 3143159 - DNA, 25 bp, Homo sapien
gctaaaaagcggcatttgcgcagtt

SEQ ID NO: 3143160 - DNA, 25 bp, Homo sapien
gcccgctgcgctgcttccaaaacac

SEQ ID NO: 3143161 - DNA, 25 bp, Homo sapien
cgggctcgcgggcgagccgaggcgg

SEQ ID NO: 3143162 - DNA, 25 bp, Homo sapien
acactcattattccccggagccggg

SEQ ID NO: 3143163 - DNA, 25 bp, Homo sapien
ccggggacggcctgacagacactca

SEQ ID NO: 3143164 - DNA, 25 bp, Homo sapien
gacggcctgacagacactcattatt

SEQ ID NO: 3143165 - DNA, 25 bp, Homo sapien
ggcccaacctgtcccacgaggcgcg

SEQ ID NO: 3143166 - DNA, 25 bp, Homo sapien
accaactccgggcagtcacatgacg

SEQ ID NO: 3143167 - DNA, 25 bp, Homo sapien
ataaaggccccgatacgggctgcct

SEQ ID NO: 3143168 - DNA, 25 bp, Homo sapien
agggcgccgccgacgagaaataaag

SEQ ID NO: 3143169 - DNA, 25 bp, Homo sapien
ccccgagcgcagcaatgtcagggct

SEQ ID NO: 3143170 - DNA, 25 bp, Homo sapien
ctttggagggaatcgtgagcgggcg

SEQ ID NO: 3143171 - DNA, 25 bp, Homo sapien
tcgtgagcgggcgggaggaggccgg

SEQ ID NO: 3143172 - DNA, 25 bp, Homo sapien
ctgcccgggacggcggcgggcgctg

SEQ ID NO: 3143173 - DNA, 25 bp, Homo sapien
gaggccggggaccacacaggtgagc

SEQ ID NO: 3143174 - DNA, 25 bp, Homo sapien
cacgcggagagcacggagatttctg

SEQ ID NO: 3143175 - DNA, 25 bp, Homo sapien
aaacaacgttgccacacgcggagag

SEQ ID NO: 3143176 - DNA, 25 bp, Homo sapien
tttctccaaacaacgttgccacacg

SEQ ID NO: 3143177 - DNA, 25 bp, Homo sapien
ttgccacacgcggagagcacggaga

SEQ ID NO: 3143178 - DNA, 25 bp, Homo sapien
tccagaaccgagaatgggatgctgc

SEQ ID NO: 3143179 - DNA, 25 bp, Homo sapien
ggatgctgcctccaatcccaattgc

SEQ ID NO: 3143180 - DNA, 25 bp, Homo sapien
ggaggatccagacgccctggcagct

SEQ ID NO: 3143181 - DNA, 25 bp, Homo sapien
agggccgggagactgctccaagttt

SEQ ID NO: 3143182 - DNA, 25 bp, Homo sapien
ggcactgcggcaggttctctccatg

SEQ ID NO: 3143183 - DNA, 25 bp, Homo sapien
ggtcctgatccagggatctgtccct

SEQ ID NO: 3143184 - DNA, 25 bp, Homo sapien
tgttaggtaggtcccatgggtcctg

SEQ ID NO: 3143185 - DNA, 25 bp, Homo sapien
caggcagttgcctaaggcgtcttcc

SEQ ID NO: 3143186 - DNA, 25 bp, Homo sapien
tttagtgaaatacaagaaggtgagc

SEQ ID NO: 3143187 - DNA, 25 bp, Homo sapien
ctagtattattgtatactgctataa

SEQ ID NO: 3143188 - DNA, 25 bp, Homo sapien
tgtcagtagctatctgcccaaaaaa

SEQ ID NO: 3143189 - DNA, 25 bp, Homo sapien
aaaatgaatatgacaattccagatc

SEQ ID NO: 3143190 - DNA, 25 bp, Homo sapien
gccaggctgccaacattgcttaaat

SEQ ID NO: 3143191 - DNA, 25 bp, Homo sapien
gagcagcctgggttaaacgtgaacg

SEQ ID NO: 3143192 - DNA, 25 bp, Homo sapien
tctttgccaggatggacccacgttt

SEQ ID NO: 3143193 - DNA, 25 bp, Homo sapien
aagacttaaactaaagccaggctgc

SEQ ID NO: 3143194 - DNA, 25 bp, Homo sapien
ttttcatagaaggttatcagtagcc

SEQ ID NO: 3143195 - DNA, 25 bp, Homo sapien
tacaggtcagctaagtatttccagc

SEQ ID NO: 3143196 - DNA, 25 bp, Homo sapien
taaggcaggtcttaaatagttatcc

SEQ ID NO: 3143197 - DNA, 25 bp, Homo sapien
cataaagaatgtggtggaatgtgac

SEQ ID NO: 3143198 - DNA, 25 bp, Homo sapien
gtgaacaagttctagagtgagttcc

SEQ ID NO: 3143199 - DNA, 25 bp, Homo sapien
agttctagagtgagttccagctgaa

SEQ ID NO: 3143200 - DNA, 25 bp, Homo sapien
aacaagttctagagtgagttccagc

SEQ ID NO: 3143201 - DNA, 25 bp, Homo sapien
aagtgaacaagttctagagtgagtt

SEQ ID NO: 3143202 - DNA, 25 bp, Homo sapien
cttctagggtgctctggtgtttggc

SEQ ID NO: 3143203 - DNA, 25 bp, Homo sapien
aaaccttctagggtgctctggtgtt

SEQ ID NO: 3143204 - DNA, 25 bp, Homo sapien
tagttaaaccttctagggtgctctg

SEQ ID NO: 3143205 - DNA, 25 bp, Homo sapien
ccttctagggtgctctggtgtttgg

SEQ ID NO: 3143206 - DNA, 25 bp, Homo sapien
cactgagacagggtccatggcctct

SEQ ID NO: 3143207 - DNA, 25 bp, Homo sapien
gcttgacaggaactgggtcaaacat

SEQ ID NO: 3143208 - DNA, 25 bp, Homo sapien
gggtccatggcctcttgcttgacag

SEQ ID NO: 3143209 - DNA, 25 bp, Homo sapien
caggaactgggtcaaacatgagcat

SEQ ID NO: 3143210 - DNA, 25 bp, Homo sapien
gaaaagtttgcctatgaaatgcctg

SEQ ID NO: 3143211 - DNA, 25 bp, Homo sapien
ggtgcgatctctgctatctcggctc

SEQ ID NO: 3143212 - DNA, 25 bp, Homo sapien
gctgctaggacagtatttagctcac

SEQ ID NO: 3143213 - DNA, 25 bp, Homo sapien
ttagctcactcatacctggtggcgt

SEQ ID NO: 3143214 - DNA, 25 bp, Homo sapien
tcactagtccctggcggcctaaaag

SEQ ID NO: 3143215 - DNA, 25 bp, Homo sapien
tatccatggcaactcagctccaagg

SEQ ID NO: 3143216 - DNA, 25 bp, Homo sapien
gagcccatgcacaaggatgatctaa

SEQ ID NO: 3143217 - DNA, 25 bp, Homo sapien
ggtgttgtacctgcagaaaccccag

SEQ ID NO: 3143218 - DNA, 25 bp, Homo sapien
caagcgattgtttctgctgtgctat

SEQ ID NO: 3143219 - DNA, 25 bp, Homo sapien
cgttgacttgaatagcgaaagactt

SEQ ID NO: 3143220 - DNA, 25 bp, Homo sapien
tagcaaaagcacaaacaagcgattg

SEQ ID NO: 3143221 - DNA, 25 bp, Homo sapien
tgattaagagggaaatgacatgtcc

SEQ ID NO: 3143222 - DNA, 25 bp, Homo sapien
tagatcaaggatcaaatgaagaaaa

SEQ ID NO: 3143223 - DNA, 25 bp, Homo sapien
aacaagaacatgaaggatataaaat

SEQ ID NO: 3143224 - DNA, 25 bp, Homo sapien
tttaaagccaggcacgcacagtacc

SEQ ID NO: 3143225 - DNA, 25 bp, Homo sapien
cgcagccagttttcactactaatac

SEQ ID NO: 3143226 - DNA, 25 bp, Homo sapien
acttgaatgtctgacagtgacagtg

SEQ ID NO: 3143227 - DNA, 25 bp, Homo sapien
cttgaatgtctgacagtgacagtga

SEQ ID NO: 3143228 - DNA, 25 bp, Homo sapien
gattccatgtaattagatgggtatg

SEQ ID NO: 3143229 - DNA, 25 bp, Homo sapien
attccatgtaattagatgggtatga

SEQ ID NO: 3143230 - DNA, 25 bp, Homo sapien
ggattccatgtaattagatgggtat

SEQ ID NO: 3143231 - DNA, 25 bp, Homo sapien
tccgtattccatgccgcgagagggc

SEQ ID NO: 3143232 - DNA, 25 bp, Homo sapien
aacttcagagaggagggcgaattcc

SEQ ID NO: 3143233 - DNA, 25 bp, Homo sapien
ttgttcaccgtgaggtccactggct

SEQ ID NO: 3143234 - DNA, 25 bp, Homo sapien
gaaagaacttctcaggcaatggtgt

SEQ ID NO: 3143235 - DNA, 25 bp, Homo sapien
tggttcgatcccaggttctatttta

SEQ ID NO: 3143236 - DNA, 25 bp, Homo sapien
ttcttcaggataataatctgtcctc

SEQ ID NO: 3143237 - DNA, 25 bp, Homo sapien
taggcttctcatatgattcaattac

SEQ ID NO: 3143238 - DNA, 25 bp, Homo sapien
tgtcctctgtggttcgatcccaggt

SEQ ID NO: 3143239 - DNA, 25 bp, Homo sapien
tatgcaaatgctgggtagacctaaa

SEQ ID NO: 3143240 - DNA, 25 bp, Homo sapien
gaccctgtggaggtaatcgttgcct

SEQ ID NO: 3143241 - DNA, 25 bp, Homo sapien
ctgaagctgtgtgtggcaactacca

SEQ ID NO: 3143242 - DNA, 25 bp, Homo sapien
gaggtcaaggttatctacagcagga

SEQ ID NO: 3143243 - DNA, 25 bp, Homo sapien
cacgttgctagttaccttgccagaa

SEQ ID NO: 3143244 - DNA, 25 bp, Homo sapien
aaggtacctacccaagctgaatgtg

SEQ ID NO: 3143245 - DNA, 25 bp, Homo sapien
tccctacctgctgatgaagtcggct

SEQ ID NO: 3143246 - DNA, 25 bp, Homo sapien
gaacaactataagtgcaggccacgt

SEQ ID NO: 3143247 - DNA, 25 bp, Homo sapien
cctccgcttcctttgagtatccggg

SEQ ID NO: 3143248 - DNA, 25 bp, Homo sapien
atctgtgtatcctccgcttcctttg

SEQ ID NO: 3143249 - DNA, 25 bp, Homo sapien
cttcccaggctgcacgatgaccgaa

SEQ ID NO: 3143250 - DNA, 25 bp, Homo sapien
tcccaggctgcacgatgaccgaagg

SEQ ID NO: 3143251 - DNA, 25 bp, Homo sapien
tccttgactgtgaaagcacttcccc

SEQ ID NO: 3143252 - DNA, 25 bp, Homo sapien
acttcccccattccagcggcgaagg

SEQ ID NO: 3143253 - DNA, 25 bp, Homo sapien
aggaaggccacatccttgactgtga

SEQ ID NO: 3143254 - DNA, 25 bp, Homo sapien
ggccacatccttgactgtgaaagca

SEQ ID NO: 3143255 - DNA, 25 bp, Homo sapien
tagatacaaggctatcaccctcagc

SEQ ID NO: 3143256 - DNA, 25 bp, Homo sapien
catcgatttgcactgctgtttgggc

SEQ ID NO: 3143257 - DNA, 25 bp, Homo sapien
cactactaatggtcaatcaggctgt

SEQ ID NO: 3143258 - DNA, 25 bp, Homo sapien
tcaaggatgccctcagtaatcatcg

SEQ ID NO: 3143259 - DNA, 25 bp, Homo sapien
tcagaacgggagaagctgcggtcac

SEQ ID NO: 3143260 - DNA, 25 bp, Homo sapien
ttttcggaaatgtcttgttagttca

SEQ ID NO: 3143261 - DNA, 25 bp, Homo sapien
tagcatgtggcgtttcctatggagg

SEQ ID NO: 3143262 - DNA, 25 bp, Homo sapien
cacagtccgggcactggaaaggttt

SEQ ID NO: 3143263 - DNA, 25 bp, Homo sapien
tgtctctggcaaggactagcagtct

SEQ ID NO: 3143264 - DNA, 25 bp, Homo sapien
caaagacctccatatgagctgcagg

SEQ ID NO: 3143265 - DNA, 25 bp, Homo sapien
tacttctagctaaccggtgcaaggg

SEQ ID NO: 3143266 - DNA, 25 bp, Homo sapien
cacctagatcgaaagtttgggctca

SEQ ID NO: 3143267 - DNA, 25 bp, Homo sapien
tctttacagctggttcacagggcgg

SEQ ID NO: 3143268 - DNA, 25 bp, Homo sapien
gaaagcgtattgaccagcatgggaa

SEQ ID NO: 3143269 - DNA, 25 bp, Homo sapien
gctcggagcaacttcatgtatgaca

SEQ ID NO: 3143270 - DNA, 25 bp, Homo sapien
tgacttctctaggatgacacttggg

SEQ ID NO: 3143271 - DNA, 25 bp, Homo sapien
tcagtatctgcaagtatactaatgc

SEQ ID NO: 3143272 - DNA, 25 bp, Homo sapien
gttcacagtttgacatgacaaaatg

SEQ ID NO: 3143273 - DNA, 25 bp, Homo sapien
gaattcccattggactacagagtag

SEQ ID NO: 3143274 - DNA, 25 bp, Homo sapien
gagaaggtacattaaacattcacat

SEQ ID NO: 3143275 - DNA, 25 bp, Homo sapien
aaaaccagggacatagcttgagggc

SEQ ID NO: 3143276 - DNA, 25 bp, Homo sapien
taagtaatgttctaagcaagggttc

SEQ ID NO: 3143277 - DNA, 25 bp, Homo sapien
taactgcccatcagagtaagtaatg

SEQ ID NO: 3143278 - DNA, 25 bp, Homo sapien
gcttgagggctgagttaattccggt

SEQ ID NO: 3143279 - DNA, 25 bp, Homo sapien
tgcaagccctgagacagttgtgatg

SEQ ID NO: 3143280 - DNA, 25 bp, Homo sapien
tagttagcaactcacctctctgcag

SEQ ID NO: 3143281 - DNA, 25 bp, Homo sapien
ggaaagctggccttagatgcggtca

SEQ ID NO: 3143282 - DNA, 25 bp, Homo sapien
tactccatcctacaccgaagtggta

SEQ ID NO: 3143283 - DNA, 25 bp, Homo sapien
tgcttttcatcccagtctctgcctt

SEQ ID NO: 3143284 - DNA, 25 bp, Homo sapien
ttcatcccagtctctgccttcatct

SEQ ID NO: 3143285 - DNA, 25 bp, Homo sapien
gcttttcatcccagtctctgccttc

SEQ ID NO: 3143286 - DNA, 25 bp, Homo sapien
ttttcatcccagtctctgccttcat

SEQ ID NO: 3143287 - DNA, 25 bp, Homo sapien
agttctgagctatgcgaacaacagc

SEQ ID NO: 3143288 - DNA, 25 bp, Homo sapien
gaacaacagcgtagtctatgagata

SEQ ID NO: 3143289 - DNA, 25 bp, Homo sapien
tatgcgaacaacagcgtagtctatg

SEQ ID NO: 3143290 - DNA, 25 bp, Homo sapien
tgagctatgcgaacaacagcgtagt

SEQ ID NO: 3143291 - DNA, 25 bp, Homo sapien
ggcattggatggagagtgagctgtg

SEQ ID NO: 3143292 - DNA, 25 bp, Homo sapien
cttgacagctggcattggatggaga

SEQ ID NO: 3143293 - DNA, 25 bp, Homo sapien
tgacagctggcattggatggagagt

SEQ ID NO: 3143294 - DNA, 25 bp, Homo sapien
cagctggcattggatggagagtgag

SEQ ID NO: 3143295 - DNA, 25 bp, Homo sapien
aattgatggcagtttggttgaactg

SEQ ID NO: 3143296 - DNA, 25 bp, Homo sapien
ctccagcctccatgggcggaaattg

SEQ ID NO: 3143297 - DNA, 25 bp, Homo sapien
gaaattgatggcagtttggttgaac

SEQ ID NO: 3143298 - DNA, 25 bp, Homo sapien
cctccatgggcggaaattgatggca

SEQ ID NO: 3143299 - DNA, 25 bp, Homo sapien
cgtgcacacgaatatttccattcga

SEQ ID NO: 3143300 - DNA, 25 bp, Homo sapien
gtgccggacagcttcctgtcagctc

SEQ ID NO: 3143301 - DNA, 25 bp, Homo sapien
cctcctgcaaacgtgcacacgaata

SEQ ID NO: 3143302 - DNA, 25 bp, Homo sapien
cattcgaacctgagattctcgcagg

SEQ ID NO: 3143303 - DNA, 25 bp, Homo sapien
aggacaaagttgcagccaacagtag

SEQ ID NO: 3143304 - DNA, 25 bp, Homo sapien
gttcaaggacaaagttgcagccaac

SEQ ID NO: 3143305 - DNA, 25 bp, Homo sapien
atgttcaaggacaaagttgcagcca

SEQ ID NO: 3143306 - DNA, 25 bp, Homo sapien
gacaaagttgcagccaacagtaggg

SEQ ID NO: 3143307 - DNA, 25 bp, Homo sapien
cctgtacatctattcaacagccagc

SEQ ID NO: 3143308 - DNA, 25 bp, Homo sapien
ggacaagcacaatgaaaaactcctg

SEQ ID NO: 3143309 - DNA, 25 bp, Homo sapien
ctgagctgctggacaacactgcgtt

SEQ ID NO: 3143310 - DNA, 25 bp, Homo sapien
tggcctacacctgtacatctattca

SEQ ID NO: 3143311 - DNA, 25 bp, Homo sapien
tgatccttttaaccctggacagggc

SEQ ID NO: 3143312 - DNA, 25 bp, Homo sapien
tgaggacccacttgagatagggagt

SEQ ID NO: 3143313 - DNA, 25 bp, Homo sapien
gatagggagtgggtctggtagtgca

SEQ ID NO: 3143314 - DNA, 25 bp, Homo sapien
gggtctggtagtgcatcctgaagtc

SEQ ID NO: 3143315 - DNA, 25 bp, Homo sapien
gctggggatacataccttggtccct

SEQ ID NO: 3143316 - DNA, 25 bp, Homo sapien
ggggatacataccttggtccctgag

SEQ ID NO: 3143317 - DNA, 25 bp, Homo sapien
gggatacataccttggtccctgagc

SEQ ID NO: 3143318 - DNA, 25 bp, Homo sapien
tggggatacataccttggtccctga

SEQ ID NO: 3143319 - DNA, 25 bp, Homo sapien
caaaaattagctgggcgtgatggtg

SEQ ID NO: 3143320 - DNA, 25 bp, Homo sapien
tggagaccatcctggccaacatggt

SEQ ID NO: 3143321 - DNA, 25 bp, Homo sapien
gtgggtgacccacgaggtcaagaga

SEQ ID NO: 3143322 - DNA, 25 bp, Homo sapien
tgaaaccctgtctctactaaaaata

SEQ ID NO: 3143323 - DNA, 25 bp, Homo sapien
taccaacatgacatcgctgaaggtg

SEQ ID NO: 3143324 - DNA, 25 bp, Homo sapien
gatacagtagacaaaaataactccc

SEQ ID NO: 3143325 - DNA, 25 bp, Homo sapien
gaaagaaaagtgcagtataccattc

SEQ ID NO: 3143326 - DNA, 25 bp, Homo sapien
agtgtttccaccataacagatacag

SEQ ID NO: 3143327 - DNA, 25 bp, Homo sapien
ctagatgggatggcggccaggcaga

SEQ ID NO: 3143328 - DNA, 25 bp, Homo sapien
cacttcctagatgggatggcggcca

SEQ ID NO: 3143329 - DNA, 25 bp, Homo sapien
atgggatggcggccgggaagaggcg

SEQ ID NO: 3143330 - DNA, 25 bp, Homo sapien
ttcctagatgggatggcggccaggc

SEQ ID NO: 3143331 - DNA, 25 bp, Homo sapien
tgatgcaatgtgtcacccacatccc

SEQ ID NO: 3143332 - DNA, 25 bp, Homo sapien
catacttgacacaggtatcattgcc

SEQ ID NO: 3143333 - DNA, 25 bp, Homo sapien
cctggctcaggacccatcatggaag

SEQ ID NO: 3143334 - DNA, 25 bp, Homo sapien
ccatgctgacttctgattagctcca

SEQ ID NO: 3143335 - DNA, 25 bp, Homo sapien
tttaaaaggcactctggtggctgct

SEQ ID NO: 3143336 - DNA, 25 bp, Homo sapien
taatccttgggctgcttgcgtcata

SEQ ID NO: 3143337 - DNA, 25 bp, Homo sapien
tctggaaaatatggtggcaaaggca

SEQ ID NO: 3143338 - DNA, 25 bp, Homo sapien
tcaggcaacccgtttggtgtgcacc

SEQ ID NO: 3143339 - DNA, 25 bp, Homo sapien
tgctggagtctggaccaagacgctc

SEQ ID NO: 3143340 - DNA, 25 bp, Homo sapien
ctgctggagtctggaccaagacgct

SEQ ID NO: 3143341 - DNA, 25 bp, Homo sapien
gctggagtctggaccaagacgctcc

SEQ ID NO: 3143342 - DNA, 25 bp, Homo sapien
tgtagatgcgcagtaaaaactcgtg

SEQ ID NO: 3143343 - DNA, 25 bp, Homo sapien
catcccagtggaaagtaggttcctc

SEQ ID NO: 3143344 - DNA, 25 bp, Homo sapien
ggctccaggtttagcaggacactga

SEQ ID NO: 3143345 - DNA, 25 bp, Homo sapien
actctgaaacggtcccatgcgggaa

SEQ ID NO: 3143346 - DNA, 25 bp, Homo sapien
tttgacacatacataccgtgtgtca

SEQ ID NO: 3143347 - DNA, 25 bp, Homo sapien
cacatacataccgtgtgtcaaatca

SEQ ID NO: 3143348 - DNA, 25 bp, Homo sapien
cataccgtgtgtcaaatcagggtat

SEQ ID NO: 3143349 - DNA, 25 bp, Homo sapien
caccatctcaaacatacatcatttt

SEQ ID NO: 3143350 - DNA, 25 bp, Homo sapien
ctggtagtgtccatcactaagtgta

SEQ ID NO: 3143351 - DNA, 25 bp, Homo sapien
ggcagtccgtagaaggaaaactcag

SEQ ID NO: 3143352 - DNA, 25 bp, Homo sapien
gtgtggcagtccgtagaaggaaaac

SEQ ID NO: 3143353 - DNA, 25 bp, Homo sapien
tccatcactaagtgtaaagtttggg

SEQ ID NO: 3143354 - DNA, 25 bp, Homo sapien
ttttgtggcaggataccataaggac

SEQ ID NO: 3143355 - DNA, 25 bp, Homo sapien
aactgcctcagggtatgaacgcctc

SEQ ID NO: 3143356 - DNA, 25 bp, Homo sapien
tgaacccagacaccgtgggtctggt

SEQ ID NO: 3143357 - DNA, 25 bp, Homo sapien
tggaggaatattgcgtttttgtggc

SEQ ID NO: 3143358 - DNA, 25 bp, Homo sapien
gagcctccccaggcctgaggagact

SEQ ID NO: 3143359 - DNA, 25 bp, Homo sapien
ccactccttactgagcctccccagg

SEQ ID NO: 3143360 - DNA, 25 bp, Homo sapien
atccactccttactgagcctcccca

SEQ ID NO: 3143361 - DNA, 25 bp, Homo sapien
gcctccccaggcctgaggagacttc

SEQ ID NO: 3143362 - DNA, 25 bp, Homo sapien
ccctgctgtgccgtaacagcccaat

SEQ ID NO: 3143363 - DNA, 25 bp, Homo sapien
cccttccctgctgtgccgtaacagc

SEQ ID NO: 3143364 - DNA, 25 bp, Homo sapien
tcttctcctttgacccaaaccacac

SEQ ID NO: 3143365 - DNA, 25 bp, Homo sapien
tgctgtgccgtaacagcccaatcag

SEQ ID NO: 3143366 - DNA, 25 bp, Homo sapien
ggcggccgagtacgcgcgggagtgc

SEQ ID NO: 3143367 - DNA, 25 bp, Homo sapien
gctcaggcggccgagtacgcgcggg

SEQ ID NO: 3143368 - DNA, 25 bp, Homo sapien
gtcccgccccgccacgtctgcaggg

SEQ ID NO: 3143369 - DNA, 25 bp, Homo sapien
tacgcgcgggagtgcccagcgggtc

SEQ ID NO: 3143370 - DNA, 25 bp, Homo sapien
ctggaagagcaggcagggcgtgggt

SEQ ID NO: 3143371 - DNA, 25 bp, Homo sapien
tggaagagcaggcagggcgtgggtc

SEQ ID NO: 3143372 - DNA, 25 bp, Homo sapien
ggaagagcaggcagggcgtgggtcg

SEQ ID NO: 3143373 - DNA, 25 bp, Homo sapien
gaagagcaggcagggcgtgggtcgg

SEQ ID NO: 3143374 - DNA, 25 bp, Homo sapien
gatggcagaggcgagggctagccga

SEQ ID NO: 3143375 - DNA, 25 bp, Homo sapien
gagggctagccgactgggtggaggg

SEQ ID NO: 3143376 - DNA, 25 bp, Homo sapien
gaggcggtgcctgcttagagtgttg

SEQ ID NO: 3143377 - DNA, 25 bp, Homo sapien
gggatctgcggtagggagtgggacc

SEQ ID NO: 3143378 - DNA, 25 bp, Homo sapien
tatgggtggggtagggaaggagcca

SEQ ID NO: 3143379 - DNA, 25 bp, Homo sapien
ttgatggaagaaaggagggcgggga

SEQ ID NO: 3143380 - DNA, 25 bp, Homo sapien
tcaggcttgatggaagaaaggaggg

SEQ ID NO: 3143381 - DNA, 25 bp, Homo sapien
tggaagaaaggagggcggggacgca

SEQ ID NO: 3143382 - DNA, 25 bp, Homo sapien
aggcttgatggaagaaaggagggcg

SEQ ID NO: 3143383 - DNA, 25 bp, Homo sapien
caatgtaagaagtttatcagattct

SEQ ID NO: 3143384 - DNA, 25 bp, Homo sapien
tatggtctgaatcgctcagattcaa

SEQ ID NO: 3143385 - DNA, 25 bp, Homo sapien
aagactgtgaccaacagcacctagg

SEQ ID NO: 3143386 - DNA, 25 bp, Homo sapien
catgtttgatgtaagcctggtcaaa

SEQ ID NO: 3143387 - DNA, 25 bp, Homo sapien
tttctgtccctcagatatttactga

SEQ ID NO: 3143388 - DNA, 25 bp, Homo sapien
ttgacaagtctacgtacccaggctc

SEQ ID NO: 3143389 - DNA, 25 bp, Homo sapien
taaaaactctggatgagaggctctt

SEQ ID NO: 3143390 - DNA, 25 bp, Homo sapien
caaaaacagtgccagtcagcgaagg

SEQ ID NO: 3143391 - DNA, 25 bp, Homo sapien
tcagcgaaggaccaggaataaaaac

SEQ ID NO: 3143392 - DNA, 25 bp, Homo sapien
tccagtggctaaggtgtcaccagca

SEQ ID NO: 3143393 - DNA, 25 bp, Homo sapien
cagtggctaaggtgtcaccagcatc

SEQ ID NO: 3143394 - DNA, 25 bp, Homo sapien
ccagtggctaaggtgtcaccagcat

SEQ ID NO: 3143395 - DNA, 25 bp, Homo sapien
ctccagtggctaaggtgtcaccagc

SEQ ID NO: 3143396 - DNA, 25 bp, Homo sapien
gctggtgttggctcatgtgaaactg

SEQ ID NO: 3143397 - DNA, 25 bp, Homo sapien
acagctgcattttcatgcccctccc

SEQ ID NO: 3143398 - DNA, 25 bp, Homo sapien
tgaaactgcagctgaatcacaatgc

SEQ ID NO: 3143399 - DNA, 25 bp, Homo sapien
aagaatcactattaggcatctcagt

SEQ ID NO: 3143400 - DNA, 25 bp, Homo sapien
gggtatttcggatctgggttctgcc

SEQ ID NO: 3143401 - DNA, 25 bp, Homo sapien
ctcagtcacgtctccattgagaggg

SEQ ID NO: 3143402 - DNA, 25 bp, Homo sapien
cattcagcaagtgtatcctcagtca

SEQ ID NO: 3143403 - DNA, 25 bp, Homo sapien
caaggctgacggaatcaatacattc

SEQ ID NO: 3143404 - DNA, 25 bp, Homo sapien
gtttaccctatctgattcaaactcc

SEQ ID NO: 3143405 - DNA, 25 bp, Homo sapien
gaagcccatcgcagacagttctgag

SEQ ID NO: 3143406 - DNA, 25 bp, Homo sapien
gggtcagcgacctcttgaaactcat

SEQ ID NO: 3143407 - DNA, 25 bp, Homo sapien
tatggatggcttcaaagggtcagcg

SEQ ID NO: 3143408 - DNA, 25 bp, Homo sapien
cttcctatgtgttttgtggctgtta

SEQ ID NO: 3143409 - DNA, 25 bp, Homo sapien
tgcaaactgccaaacctgcggctta

SEQ ID NO: 3143410 - DNA, 25 bp, Homo sapien
gttgttgttctaagatcaatggatg

SEQ ID NO: 3143411 - DNA, 25 bp, Homo sapien
aatgtcccacttttacttcctatgt

SEQ ID NO: 3143412 - DNA, 25 bp, Homo sapien
catccaggtaattccgtggtgctct

SEQ ID NO: 3143413 - DNA, 25 bp, Homo sapien
cagtgtttgcacttccatccaggta

SEQ ID NO: 3143414 - DNA, 25 bp, Homo sapien
ggtggagtacctgttaccaaccagc

SEQ ID NO: 3143415 - DNA, 25 bp, Homo sapien
aacacaatacatccagagccacggg

SEQ ID NO: 3143416 - DNA, 25 bp, Homo sapien
ctccttccatagacaacttcacatc

SEQ ID NO: 3143417 - DNA, 25 bp, Homo sapien
tttgattcaaggtgccctgcttcac

SEQ ID NO: 3143418 - DNA, 25 bp, Homo sapien
tagtgacaggaaggcttgcaaggta

SEQ ID NO: 3143419 - DNA, 25 bp, Homo sapien
ctggcgatggatgggcagtagtgac

SEQ ID NO: 3143420 - DNA, 25 bp, Homo sapien
caaggtagaaacctttgattcaagg

SEQ ID NO: 3143421 - DNA, 25 bp, Homo sapien
atcctcctccacttggaggggaatc

SEQ ID NO: 3143422 - DNA, 25 bp, Homo sapien
tcctcctccacttggaggggaatcc

SEQ ID NO: 3143423 - DNA, 25 bp, Homo sapien
catcctcctccacttggaggggaat

SEQ ID NO: 3143424 - DNA, 25 bp, Homo sapien
tgctgacgacagcagagatttgccc

SEQ ID NO: 3143425 - DNA, 25 bp, Homo sapien
ctgacgacagcagagatttgcccca

SEQ ID NO: 3143426 - DNA, 25 bp, Homo sapien
cagatgctgacgacagcagagattt

SEQ ID NO: 3143427 - DNA, 25 bp, Homo sapien
tgtggcagatgctgacgacagcaga

SEQ ID NO: 3143428 - DNA, 25 bp, Homo sapien
gttacagggagatgcacctttaagt

SEQ ID NO: 3143429 - DNA, 25 bp, Homo sapien
ttaagtgtgcacagagagcacctat

SEQ ID NO: 3143430 - DNA, 25 bp, Homo sapien
tgtgcacagagagcacctatagctg

SEQ ID NO: 3143431 - DNA, 25 bp, Homo sapien
cagggagatgcacctttaagtgtgc

SEQ ID NO: 3143432 - DNA, 25 bp, Homo sapien
ttctgtaattggtggtgtaactgac

SEQ ID NO: 3143433 - DNA, 25 bp, Homo sapien
agaattaaggtaggcgggatgcacc

SEQ ID NO: 3143434 - DNA, 25 bp, Homo sapien
gatgcaccacatgacaaacttacgg

SEQ ID NO: 3143435 - DNA, 25 bp, Homo sapien
acttacggtcaacgacgggccacat

SEQ ID NO: 3143436 - DNA, 25 bp, Homo sapien
tgtatgagcttataaggtcctgtgg

SEQ ID NO: 3143437 - DNA, 25 bp, Homo sapien
tccagtaacgtaataagcaatagag

SEQ ID NO: 3143438 - DNA, 25 bp, Homo sapien
tcctgtggaaataagtaaggcctgc

SEQ ID NO: 3143439 - DNA, 25 bp, Homo sapien
tagcaagtccaaagagtatagaaac

SEQ ID NO: 3143440 - DNA, 25 bp, Homo sapien
tccttgactgccgtcaatccatgac

SEQ ID NO: 3143441 - DNA, 25 bp, Homo sapien
ttacaccatgaatccgtagagtggc

SEQ ID NO: 3143442 - DNA, 25 bp, Homo sapien
tgggctccttcagaagatccagaat

SEQ ID NO: 3143443 - DNA, 25 bp, Homo sapien
catgaatccgtagagtggctcctgc

SEQ ID NO: 3143444 - DNA, 25 bp, Homo sapien
ccctgatctgtggctgcatctgtta

SEQ ID NO: 3143445 - DNA, 25 bp, Homo sapien
cagggccctgatctgtggctgcatc

SEQ ID NO: 3143446 - DNA, 25 bp, Homo sapien
gccctgatctgtggctgcatctgtt

SEQ ID NO: 3143447 - DNA, 25 bp, Homo sapien
gggccctgatctgtggctgcatctg

SEQ ID NO: 3143448 - DNA, 25 bp, Homo sapien
gctgatgaaggggaagtgggtgggc

SEQ ID NO: 3143449 - DNA, 25 bp, Homo sapien
tgatgaaggggaagtgggtgggctt

SEQ ID NO: 3143450 - DNA, 25 bp, Homo sapien
ctgatgaaggggaagtgggtgggct

SEQ ID NO: 3143451 - DNA, 25 bp, Homo sapien
aggctgatgaaggggaagtgggtgg

SEQ ID NO: 3143452 - DNA, 25 bp, Homo sapien
ttttgaaccacattggtgatggcag

SEQ ID NO: 3143453 - DNA, 25 bp, Homo sapien
ttgaaccacattggtgatggcagac

SEQ ID NO: 3143454 - DNA, 25 bp, Homo sapien
gtgttttgaaccacattggtgatgg

SEQ ID NO: 3143455 - DNA, 25 bp, Homo sapien
tgttttgaaccacattggtgatggc

SEQ ID NO: 3143456 - DNA, 25 bp, Homo sapien
caaggcctccagttaagacactttt

SEQ ID NO: 3143457 - DNA, 25 bp, Homo sapien
aagcccgggtcactttctgcaagga

SEQ ID NO: 3143458 - DNA, 25 bp, Homo sapien
gaaacagttctctccatgagcgtct

SEQ ID NO: 3143459 - DNA, 25 bp, Homo sapien
tgaattccaacgcatcaaggcctcc

SEQ ID NO: 3143460 - DNA, 25 bp, Homo sapien
taagctaggcatgttccatctggaa

SEQ ID NO: 3143461 - DNA, 25 bp, Homo sapien
taacatcggagtgctcatacttggg

SEQ ID NO: 3143462 - DNA, 25 bp, Homo sapien
catgggttcctagtaccaagtcctg

SEQ ID NO: 3143463 - DNA, 25 bp, Homo sapien
tctagatgatcctgcaaagtccctc

SEQ ID NO: 3143464 - DNA, 25 bp, Homo sapien
gaggcgtttcccacatgagtgatta

SEQ ID NO: 3143465 - DNA, 25 bp, Homo sapien
gcaaaaattcaatgcctgggaataa

SEQ ID NO: 3143466 - DNA, 25 bp, Homo sapien
ttttacatcatatcctacttcacat

SEQ ID NO: 3143467 - DNA, 25 bp, Homo sapien
tgattgatcctattgataactttta

SEQ ID NO: 3143468 - DNA, 25 bp, Homo sapien
cacaatgtttgtactctggatgtac

SEQ ID NO: 3143469 - DNA, 25 bp, Homo sapien
tacacaatgtttgtactctggatgt

SEQ ID NO: 3143470 - DNA, 25 bp, Homo sapien
acacaatgtttgtactctggatgta

SEQ ID NO: 3143471 - DNA, 25 bp, Homo sapien
acaatgtttgtactctggatgtaca

SEQ ID NO: 3143472 - DNA, 25 bp, Homo sapien
tgcgcggttctctccatcgtgagct

SEQ ID NO: 3143473 - DNA, 25 bp, Homo sapien
cttgctttcgctttcattggacaga

SEQ ID NO: 3143474 - DNA, 25 bp, Homo sapien
tgacaagccttgatattcatcaaac

SEQ ID NO: 3143475 - DNA, 25 bp, Homo sapien
tcatcaaacagcatcccgtagtgcg

SEQ ID NO: 3143476 - DNA, 25 bp, Homo sapien
cacatgactaagcatgccatttcaa

SEQ ID NO: 3143477 - DNA, 25 bp, Homo sapien
taagcatgccatttcaaacgagtag

SEQ ID NO: 3143478 - DNA, 25 bp, Homo sapien
aaaaatgagatcttttaatggcaga

SEQ ID NO: 3143479 - DNA, 25 bp, Homo sapien
tttcaaacgagtagtgcagaagtac

SEQ ID NO: 3143480 - DNA, 25 bp, Homo sapien
acaatggaatcattctccaccacca

SEQ ID NO: 3143481 - DNA, 25 bp, Homo sapien
caccatgatatcttgtaatgttttt

SEQ ID NO: 3143482 - DNA, 25 bp, Homo sapien
gatggaagtcaccacaatggaatca

SEQ ID NO: 3143483 - DNA, 25 bp, Homo sapien
accatgatatcttgtaatgtttttt

SEQ ID NO: 3143484 - DNA, 25 bp, Homo sapien
ttgtggaggcaatgggcaaactgtt

SEQ ID NO: 3143485 - DNA, 25 bp, Homo sapien
tacccattaactatcattactaagt

SEQ ID NO: 3143486 - DNA, 25 bp, Homo sapien
taactatcattactaagtcaagaca

SEQ ID NO: 3143487 - DNA, 25 bp, Homo sapien
atctccaggctagggaaagaaagca

SEQ ID NO: 3143488 - DNA, 25 bp, Homo sapien
cattttttaagagttccagcttctc

SEQ ID NO: 3143489 - DNA, 25 bp, Homo sapien
ctccatcaagtgatgctaaaaatga

SEQ ID NO: 3143490 - DNA, 25 bp, Homo sapien
cattctctaattctttggctgcaaa

SEQ ID NO: 3143491 - DNA, 25 bp, Homo sapien
tggctgcaaagatgtctttaatgga

SEQ ID NO: 3143492 - DNA, 25 bp, Homo sapien
ttcgcactttaagtaataagcacag

SEQ ID NO: 3143493 - DNA, 25 bp, Homo sapien
ttttcctggcattgtgttcgcactt

SEQ ID NO: 3143494 - DNA, 25 bp, Homo sapien
tatctaacatgaccccctacaacag

SEQ ID NO: 3143495 - DNA, 25 bp, Homo sapien
cagctaacattttcgagcagttctg

SEQ ID NO: 3143496 - DNA, 25 bp, Homo sapien
ccaactgtctctgatacggcctctt

SEQ ID NO: 3143497 - DNA, 25 bp, Homo sapien
tttgatgcaatgagcataaatctca

SEQ ID NO: 3143498 - DNA, 25 bp, Homo sapien
tcaaaaacatgattcccaactgtct

SEQ ID NO: 3143499 - DNA, 25 bp, Homo sapien
cattaagctgaaggcatgtaaggtc

SEQ ID NO: 3143500 - DNA, 25 bp, Homo sapien
gaaggcatggattctacccagctcc

SEQ ID NO: 3143501 - DNA, 25 bp, Homo sapien
gagctagagagctagattgattcca

SEQ ID NO: 3143502 - DNA, 25 bp, Homo sapien
tacaagcactttgtagagctccagc

SEQ ID NO: 3143503 - DNA, 25 bp, Homo sapien
cctgggcagcatcgacaaggtctct

SEQ ID NO: 3143504 - DNA, 25 bp, Homo sapien
taaataacatcaacgtcaagggata

SEQ ID NO: 3143505 - DNA, 25 bp, Homo sapien
tttatggagaagtataaacagggct

SEQ ID NO: 3143506 - DNA, 25 bp, Homo sapien
agaagtataaacagggctagctggg

SEQ ID NO: 3143507 - DNA, 25 bp, Homo sapien
caagggatacgttttatggagaagt

SEQ ID NO: 3143508 - DNA, 25 bp, Homo sapien
gatacctggctggtcctacaatatt

SEQ ID NO: 3143509 - DNA, 25 bp, Homo sapien
tagtctcaaccatctctctggagaa

SEQ ID NO: 3143510 - DNA, 25 bp, Homo sapien
ttccctaggatacctggctggtcct

SEQ ID NO: 3143511 - DNA, 25 bp, Homo sapien
gagccacagtgctgaataaaccgaa

SEQ ID NO: 3143512 - DNA, 25 bp, Homo sapien
cagccgctgggcaaagatgaatgtc

SEQ ID NO: 3143513 - DNA, 25 bp, Homo sapien
ggatgtggcagctcccccaacatta

SEQ ID NO: 3143514 - DNA, 25 bp, Homo sapien
gatgaatgtcttccattcgtgagca

SEQ ID NO: 3143515 - DNA, 25 bp, Homo sapien
cacgacagaagaagcgtgatttatt

SEQ ID NO: 3143516 - DNA, 25 bp, Homo sapien
gtggccgccacatgtaattcaaaga

SEQ ID NO: 3143517 - DNA, 25 bp, Homo sapien
gtaagcatgcgagcaaattcttctc

SEQ ID NO: 3143518 - DNA, 25 bp, Homo sapien
aaagagaagctctgtaagcatgcga

SEQ ID NO: 3143519 - DNA, 25 bp, Homo sapien
tggccgccacatgtaattcaaagag

SEQ ID NO: 3143520 - DNA, 25 bp, Homo sapien
agaacaatgcaagcctgaggactct

SEQ ID NO: 3143521 - DNA, 25 bp, Homo sapien
gaaggtatggaaagaacaatgcaag

SEQ ID NO: 3143522 - DNA, 25 bp, Homo sapien
caatgcaagcctgaggactcttcaa

SEQ ID NO: 3143523 - DNA, 25 bp, Homo sapien
aacaatgcaagcctgaggactcttc

SEQ ID NO: 3143524 - DNA, 25 bp, Homo sapien
acttttgccacatctactgacacca

SEQ ID NO: 3143525 - DNA, 25 bp, Homo sapien
tcttccacccagtcatgagccctct

SEQ ID NO: 3143526 - DNA, 25 bp, Homo sapien
gacaccacggtttgatcctcttcca

SEQ ID NO: 3143527 - DNA, 25 bp, Homo sapien
tcttcttcggacacttttgccacat

SEQ ID NO: 3143528 - DNA, 25 bp, Homo sapien
tttcaatggacgacatgtatacttc

SEQ ID NO: 3143529 - DNA, 25 bp, Homo sapien
tgttacctccgccagactttcaatg

SEQ ID NO: 3143530 - DNA, 25 bp, Homo sapien
agctgctcaatacagcgcgctgtta

SEQ ID NO: 3143531 - DNA, 25 bp, Homo sapien
gccagactttcaatggacgacatgt

SEQ ID NO: 3143532 - DNA, 25 bp, Homo sapien
ttcttgtccatgaagaattaattct

SEQ ID NO: 3143533 - DNA, 25 bp, Homo sapien
gtccatgaagaattaattctgctac

SEQ ID NO: 3143534 - DNA, 25 bp, Homo sapien
cttgtccatgaagaattaattctgc

SEQ ID NO: 3143535 - DNA, 25 bp, Homo sapien
tgtccatgaagaattaattctgcta

SEQ ID NO: 3143536 - DNA, 25 bp, Homo sapien
ctttgataaagaggccacttcattg

SEQ ID NO: 3143537 - DNA, 25 bp, Homo sapien
tgataaagaggccacttcattgcac

SEQ ID NO: 3143538 - DNA, 25 bp, Homo sapien
gataaagaggccacttcattgcaca

SEQ ID NO: 3143539 - DNA, 25 bp, Homo sapien
cttctttgataaagaggccacttca

SEQ ID NO: 3143540 - DNA, 25 bp, Homo sapien
ctctaacaatacactactgatcatg

SEQ ID NO: 3143541 - DNA, 25 bp, Homo sapien
ggcatcctgtatgtacgttgtactg

SEQ ID NO: 3143542 - DNA, 25 bp, Homo sapien
cctgtatgtacgttgtactgttgca

SEQ ID NO: 3143543 - DNA, 25 bp, Homo sapien
gtatgtacgttgtactgttgcagcc

SEQ ID NO: 3143544 - DNA, 25 bp, Homo sapien
gaaggcatcctgtatgtacgttgta

SEQ ID NO: 3143545 - DNA, 25 bp, Homo sapien
ttcaaacaactggtctggatatgtg

SEQ ID NO: 3143546 - DNA, 25 bp, Homo sapien
caaacaactggtctggatatgtgag

SEQ ID NO: 3143547 - DNA, 25 bp, Homo sapien
aacaactggtctggatatgtgagac

SEQ ID NO: 3143548 - DNA, 25 bp, Homo sapien
aaacaactggtctggatatgtgaga

SEQ ID NO: 3143549 - DNA, 25 bp, Homo sapien
tggtacatattgaggcaaggcggcc

SEQ ID NO: 3143550 - DNA, 25 bp, Homo sapien
aaaagtctaaggtctccccatgagt

SEQ ID NO: 3143551 - DNA, 25 bp, Homo sapien
tggttcctaaccagtgccacggact

SEQ ID NO: 3143552 - DNA, 25 bp, Homo sapien
caaatggatgtctgtggccaggcgc

SEQ ID NO: 3143553 - DNA, 25 bp, Homo sapien
tgcagcctcccatggatcaatatac

SEQ ID NO: 3143554 - DNA, 25 bp, Homo sapien
tgtaattatgccaccatgtgctcgt

SEQ ID NO: 3143555 - DNA, 25 bp, Homo sapien
tctgtcctttagcaacgatgatgat

SEQ ID NO: 3143556 - DNA, 25 bp, Homo sapien
gatgatgatatttgccaccagcgag

SEQ ID NO: 3143557 - DNA, 25 bp, Homo sapien
gaacaaaggcagtctactccatcgg

SEQ ID NO: 3143558 - DNA, 25 bp, Homo sapien
catttgccctggagagaactactag

SEQ ID NO: 3143559 - DNA, 25 bp, Homo sapien
taggcaaggcttcacatgacagtac

SEQ ID NO: 3143560 - DNA, 25 bp, Homo sapien
acagtacctgtagggatgtccatgg

SEQ ID NO: 3143561 - DNA, 25 bp, Homo sapien
agattatacacagaagactttgacc

SEQ ID NO: 3143562 - DNA, 25 bp, Homo sapien
tattccagagtatttgtgcaccacc

SEQ ID NO: 3143563 - DNA, 25 bp, Homo sapien
ccctgaagaatcttgaaagacccct

SEQ ID NO: 3143564 - DNA, 25 bp, Homo sapien
tacacatcttggagctgtcactaca

SEQ ID NO: 3143565 - DNA, 25 bp, Homo sapien
caatttcttttgcttcctgttttga

SEQ ID NO: 3143566 - DNA, 25 bp, Homo sapien
agcaatttcttttgcttcctgtttt

SEQ ID NO: 3143567 - DNA, 25 bp, Homo sapien
agaagcaatttcttttgcttcctgt

SEQ ID NO: 3143568 - DNA, 25 bp, Homo sapien
aatttcttttgcttcctgttttgat

SEQ ID NO: 3143569 - DNA, 25 bp, Homo sapien
gatgtcatggatataaagcaccttt

SEQ ID NO: 3143570 - DNA, 25 bp, Homo sapien
cacctttgaaaagcgatagaaatct

SEQ ID NO: 3143571 - DNA, 25 bp, Homo sapien
gatgagttgaggttagataccagat

SEQ ID NO: 3143572 - DNA, 25 bp, Homo sapien
caaaagttacttgggaaagatgagt

SEQ ID NO: 3143573 - DNA, 25 bp, Homo sapien
tggttgtgcaggtgtcggtccccac

SEQ ID NO: 3143574 - DNA, 25 bp, Homo sapien
gccacactagctttgcgaaagccac

SEQ ID NO: 3143575 - DNA, 25 bp, Homo sapien
ttgtgcaggtgtcggtccccactgc

SEQ ID NO: 3143576 - DNA, 25 bp, Homo sapien
gaaagccacagggaagtgatcttgg

SEQ ID NO: 3143577 - DNA, 25 bp, Homo sapien
ttttgctgcgtgaggaatgcaagcc

SEQ ID NO: 3143578 - DNA, 25 bp, Homo sapien
cagctgaagagcgtggaatagtctt

SEQ ID NO: 3143579 - DNA, 25 bp, Homo sapien
tcagtgcccaatgacaccttggtct

SEQ ID NO: 3143580 - DNA, 25 bp, Homo sapien
tcctgatcgttgctggcactgccag

SEQ ID NO: 3143581 - DNA, 25 bp, Homo sapien
tctctcatgcaagtatttccattca

SEQ ID NO: 3143582 - DNA, 25 bp, Homo sapien
tctcatgcaagtatttccattcacc

SEQ ID NO: 3143583 - DNA, 25 bp, Homo sapien
catgcaagtatttccattcacccat

SEQ ID NO: 3143584 - DNA, 25 bp, Homo sapien
tcatgcaagtatttccattcaccca

SEQ ID NO: 3143585 - DNA, 25 bp, Homo sapien
aggccactccttgcagtccccagag

SEQ ID NO: 3143586 - DNA, 25 bp, Homo sapien
gaaagaactgcccaacacagcgttg

SEQ ID NO: 3143587 - DNA, 25 bp, Homo sapien
tgttgggaaggtcatcaccggccca

SEQ ID NO: 3143588 - DNA, 25 bp, Homo sapien
cagagcattcccgaaagaactgccc

SEQ ID NO: 3143589 - DNA, 25 bp, Homo sapien
aaccaatctagaatttctaagtgaa

SEQ ID NO: 3143590 - DNA, 25 bp, Homo sapien
ccaatctagaatttctaagtgaact

SEQ ID NO: 3143591 - DNA, 25 bp, Homo sapien
ttcaccacagctaaaccaatctaga

SEQ ID NO: 3143592 - DNA, 25 bp, Homo sapien
cagctctcttcaccacagctaaacc

SEQ ID NO: 3143593 - DNA, 25 bp, Homo sapien
tgtgtacattaaccgcaatgacatt

SEQ ID NO: 3143594 - DNA, 25 bp, Homo sapien
acattaaccgcaatgacattcttct

SEQ ID NO: 3143595 - DNA, 25 bp, Homo sapien
ctttgtgtacattaaccgcaatgac

SEQ ID NO: 3143596 - DNA, 25 bp, Homo sapien
cattaaccgcaatgacattcttctc

SEQ ID NO: 3143597 - DNA, 25 bp, Homo sapien
ggagcgagccactcccgctccgtca

SEQ ID NO: 3143598 - DNA, 25 bp, Homo sapien
cgcgcgcccctagaccctgtccggg

SEQ ID NO: 3143599 - DNA, 25 bp, Homo sapien
gggccggcgagctgagtgggatgct

SEQ ID NO: 3143600 - DNA, 25 bp, Homo sapien
ccggaggcggccgtgggtcacggcg

SEQ ID NO: 3143601 - DNA, 25 bp, Homo sapien
atctttgtgtaaaagtattcacata

SEQ ID NO: 3143602 - DNA, 25 bp, Homo sapien
acacattcacaatgcagtcaaatct

SEQ ID NO: 3143603 - DNA, 25 bp, Homo sapien
caagccaataggacatacacattca

SEQ ID NO: 3143604 - DNA, 25 bp, Homo sapien
ttcacataagtcataacaagccaat

SEQ ID NO: 3143605 - DNA, 25 bp, Homo sapien
ggaaacaaccctgcacatacagcag

SEQ ID NO: 3143606 - DNA, 25 bp, Homo sapien
tagattcagggaggttcatcaaccg

SEQ ID NO: 3143607 - DNA, 25 bp, Homo sapien
tgtcaatcccatatttacatccaag

SEQ ID NO: 3143608 - DNA, 25 bp, Homo sapien
ggcttcaaatcttcgctctttccac

SEQ ID NO: 3143609 - DNA, 25 bp, Homo sapien
ccaggaagctctgtatcaggatcaa

SEQ ID NO: 3143610 - DNA, 25 bp, Homo sapien
cagcctgtctcactagaatttgcaa

SEQ ID NO: 3143611 - DNA, 25 bp, Homo sapien
tcagggagggaatatcgtagttact

SEQ ID NO: 3143612 - DNA, 25 bp, Homo sapien
cagtcaatccttaccctgggagagg

SEQ ID NO: 3143613 - DNA, 25 bp, Homo sapien
aagtgtctaagagtcttaatatgac

SEQ ID NO: 3143614 - DNA, 25 bp, Homo sapien
tctaagagtcttaatatgacattcc

SEQ ID NO: 3143615 - DNA, 25 bp, Homo sapien
gaaacaagtgtctaagagtcttaat

SEQ ID NO: 3143616 - DNA, 25 bp, Homo sapien
cacagaaacaagtgtctaagagtct

SEQ ID NO: 3143617 - DNA, 25 bp, Homo sapien
tagaaaactctaccatgtgagaggc

SEQ ID NO: 3143618 - DNA, 25 bp, Homo sapien
caatcaaacagctaggataggactc

SEQ ID NO: 3143619 - DNA, 25 bp, Homo sapien
tgagccctgggttaacactggttat

SEQ ID NO: 3143620 - DNA, 25 bp, Homo sapien
taaagtgtgaacaagtgagccctgg

SEQ ID NO: 3143621 - DNA, 25 bp, Homo sapien
cactgcatccacaacctcccgagct

SEQ ID NO: 3143622 - DNA, 25 bp, Homo sapien
gacacatttaccttggtgacaaaat

SEQ ID NO: 3143623 - DNA, 25 bp, Homo sapien
taaaaatatgaagtaagcttaaaca

SEQ ID NO: 3143624 - DNA, 25 bp, Homo sapien
aaaaatatgaagtaagcttaaacat

SEQ ID NO: 3143625 - DNA, 25 bp, Homo sapien
tcttcttgatctgtagttcttatat

SEQ ID NO: 3143626 - DNA, 25 bp, Homo sapien
ttcttgatctgtagttcttatattt

SEQ ID NO: 3143627 - DNA, 25 bp, Homo sapien
tgggccactgccagttagtgtaaca

SEQ ID NO: 3143628 - DNA, 25 bp, Homo sapien
gactattgggtgtacaagtgcccta

SEQ ID NO: 3143629 - DNA, 25 bp, Homo sapien
aagtgcggctcaaaaaagctaccag

SEQ ID NO: 3143630 - DNA, 25 bp, Homo sapien
agtgccctaatggtgccctctgttg

SEQ ID NO: 3143631 - DNA, 25 bp, Homo sapien
tcctgaagcagctagaccactttcc

SEQ ID NO: 3143632 - DNA, 25 bp, Homo sapien
gatgaaacacggtggaacattccgt

SEQ ID NO: 3143633 - DNA, 25 bp, Homo sapien
tcatccacctatcctgaagcagcta

SEQ ID NO: 3143634 - DNA, 25 bp, Homo sapien
ttccgttcaatcagagcaaactctc

SEQ ID NO: 3143635 - DNA, 25 bp, Homo sapien
tacacaacaaaaatatgtaaaggaa

SEQ ID NO: 3143636 - DNA, 25 bp, Homo sapien
ctgtacacaacaaaaatatgtaaag

SEQ ID NO: 3143637 - DNA, 25 bp, Homo sapien
tgtaaaggaaaataaatcacattca

SEQ ID NO: 3143638 - DNA, 25 bp, Homo sapien
gtaaaggaaaataaatcacattcat

SEQ ID NO: 3143639 - DNA, 25 bp, Homo sapien
accaagacaagagaagtatatgccc

SEQ ID NO: 3143640 - DNA, 25 bp, Homo sapien
caagacaagagaagtatatgccctg

SEQ ID NO: 3143641 - DNA, 25 bp, Homo sapien
gcacacagatttgtgcatccaacca

SEQ ID NO: 3143642 - DNA, 25 bp, Homo sapien
gatttgtgcatccaaccaagacaag

SEQ ID NO: 3143643 - DNA, 25 bp, Homo sapien
tcggtaaccaattgaagccaaaggc

SEQ ID NO: 3143644 - DNA, 25 bp, Homo sapien
ggtctatccagccaatgtgcaccgc

SEQ ID NO: 3143645 - DNA, 25 bp, Homo sapien
cagttggctggaccttcggtaacca

SEQ ID NO: 3143646 - DNA, 25 bp, Homo sapien
gctggctgtcaactgtagaattagg

SEQ ID NO: 3143647 - DNA, 25 bp, Homo sapien
ttttctaacagtaagaaaataatca

SEQ ID NO: 3143648 - DNA, 25 bp, Homo sapien
tttctaacagtaagaaaataatcaa

SEQ ID NO: 3143649 - DNA, 25 bp, Homo sapien
ttctaacagtaagaaaataatcaac

SEQ ID NO: 3143650 - DNA, 25 bp, Homo sapien
tattagtctggagagctgtaacaca

SEQ ID NO: 3143651 - DNA, 25 bp, Homo sapien
ttaatgaatgaagcaaaccacaggc

SEQ ID NO: 3143652 - DNA, 25 bp, Homo sapien
tgaatagcccaccaagatatttctg

SEQ ID NO: 3143653 - DNA, 25 bp, Homo sapien
tagcaatctctcagtcaaaaaagga

SEQ ID NO: 3143654 - DNA, 25 bp, Homo sapien
tgtaaactgtccacacccgtcttac

SEQ ID NO: 3143655 - DNA, 25 bp, Homo sapien
tgatgagtcttcttgagtagcattt

SEQ ID NO: 3143656 - DNA, 25 bp, Homo sapien
agatgtaaactgtccacacccgtct

SEQ ID NO: 3143657 - DNA, 25 bp, Homo sapien
gatgagtcttcttgagtagcatttt

SEQ ID NO: 3143658 - DNA, 25 bp, Homo sapien
tatacacgtatagaaaatataccag

SEQ ID NO: 3143659 - DNA, 25 bp, Homo sapien
ggctaggtagttgatgatttttact

SEQ ID NO: 3143660 - DNA, 25 bp, Homo sapien
ttttctgatggctctatggtttata

SEQ ID NO: 3143661 - DNA, 25 bp, Homo sapien
acagttggtattttgaggtggctag

SEQ ID NO: 3143662 - DNA, 25 bp, Homo sapien
tacatggctccatagtatgacagga

SEQ ID NO: 3143663 - DNA, 25 bp, Homo sapien
gctcggcatgattaagggcttggaa

SEQ ID NO: 3143664 - DNA, 25 bp, Homo sapien
taatgtctgactactattggaagtc

SEQ ID NO: 3143665 - DNA, 25 bp, Homo sapien
tggaaaaattcatctgatgtacatg

SEQ ID NO: 3143666 - DNA, 25 bp, Homo sapien
tactggatcaaggaccacaacgaat

SEQ ID NO: 3143667 - DNA, 25 bp, Homo sapien
catactggatcaaggaccacaacga

SEQ ID NO: 3143668 - DNA, 25 bp, Homo sapien
ctggatcaaggaccacaacgaattt

SEQ ID NO: 3143669 - DNA, 25 bp, Homo sapien
agcatactggatcaaggaccacaac

SEQ ID NO: 3143670 - DNA, 25 bp, Homo sapien
gataacaggcactcaatattatctt

SEQ ID NO: 3143671 - DNA, 25 bp, Homo sapien
ctgtagataacaggcactcaatatt

SEQ ID NO: 3143672 - DNA, 25 bp, Homo sapien
taacaggcactcaatattatcttct

SEQ ID NO: 3143673 - DNA, 25 bp, Homo sapien
gtagataacaggcactcaatattat

SEQ ID NO: 3143674 - DNA, 25 bp, Homo sapien
acgaattccaagacagttggatgga

SEQ ID NO: 3143675 - DNA, 25 bp, Homo sapien
taaaaacttacagcatgcttctaca

SEQ ID NO: 3143676 - DNA, 25 bp, Homo sapien
gaattccaagacagttggatggatg

SEQ ID NO: 3143677 - DNA, 25 bp, Homo sapien
cttacagcatgcttctacaacctgt

SEQ ID NO: 3143678 - DNA, 25 bp, Homo sapien
cacttgtattcgtgcaggatcagtg

SEQ ID NO: 3143679 - DNA, 25 bp, Homo sapien
cttgtattcgtgcaggatcagtgaa

SEQ ID NO: 3143680 - DNA, 25 bp, Homo sapien
gtattcgtgcaggatcagtgaacat

SEQ ID NO: 3143681 - DNA, 25 bp, Homo sapien
tgtattcgtgcaggatcagtgaaca

SEQ ID NO: 3143682 - DNA, 25 bp, Homo sapien
agaagtgcattcaatattgtctcct

SEQ ID NO: 3143683 - DNA, 25 bp, Homo sapien
agtgcattcaatattgtctcctcat

SEQ ID NO: 3143684 - DNA, 25 bp, Homo sapien
gaagtgcattcaatattgtctcctc

SEQ ID NO: 3143685 - DNA, 25 bp, Homo sapien
aagtgcattcaatattgtctcctca

SEQ ID NO: 3143686 - DNA, 25 bp, Homo sapien
atgttacttaattgaggccgggcac

SEQ ID NO: 3143687 - DNA, 25 bp, Homo sapien
cttgagataggcagcaaagtatgca

SEQ ID NO: 3143688 - DNA, 25 bp, Homo sapien
ggtaattctcctccaattggtagga

SEQ ID NO: 3143689 - DNA, 25 bp, Homo sapien
taataatcctgtgaggtagtcaggg

SEQ ID NO: 3143690 - DNA, 25 bp, Homo sapien
tagcttccttcggtatttttgtgcc

SEQ ID NO: 3143691 - DNA, 25 bp, Homo sapien
cagtagccagttctgtaccacttat

SEQ ID NO: 3143692 - DNA, 25 bp, Homo sapien
ctgtcaccaaatagggatagttgag

SEQ ID NO: 3143693 - DNA, 25 bp, Homo sapien
catttccagctgaattgaatcttgg

SEQ ID NO: 3143694 - DNA, 25 bp, Homo sapien
tgacttcctaggttttgtccgagga

SEQ ID NO: 3143695 - DNA, 25 bp, Homo sapien
cagttgacttcctaggttttgtccg

SEQ ID NO: 3143696 - DNA, 25 bp, Homo sapien
cgtattagctgatttgtttggccct

SEQ ID NO: 3143697 - DNA, 25 bp, Homo sapien
taaaacacagtctcaggtagatata

SEQ ID NO: 3143698 - DNA, 25 bp, Homo sapien
tggctatttggagcccgtattagct

SEQ ID NO: 3143699 - DNA, 25 bp, Homo sapien
tatgtaaatgcttgggacttcccta

SEQ ID NO: 3143700 - DNA, 25 bp, Homo sapien
aatacatcatgtaagccgcgctagc

SEQ ID NO: 3143701 - DNA, 25 bp, Homo sapien
tagacaagtctttttctacctctgc

SEQ ID NO: 3143702 - DNA, 25 bp, Homo sapien
ggtcatcagagcactagtattattg

SEQ ID NO: 3143703 - DNA, 25 bp, Homo sapien
ccccaattgtgaagagttcaactag

SEQ ID NO: 3143704 - DNA, 25 bp, Homo sapien
ggagatcatacttttcaatgcttgt

SEQ ID NO: 3143705 - DNA, 25 bp, Homo sapien
tacggagatcatacttttcaatgct

SEQ ID NO: 3143706 - DNA, 25 bp, Homo sapien
tgtacggagatcatacttttcaatg

SEQ ID NO: 3143707 - DNA, 25 bp, Homo sapien
atttgtacggagatcatacttttca

SEQ ID NO: 3143708 - DNA, 25 bp, Homo sapien
catacagtttgtcatctagcactgc

SEQ ID NO: 3143709 - DNA, 25 bp, Homo sapien
tagcactgcaacaccgaactgtagc

SEQ ID NO: 3143710 - DNA, 25 bp, Homo sapien
tatgtgtggacataggtggcatcac

SEQ ID NO: 3143711 - DNA, 25 bp, Homo sapien
ggtggcatcacactccaagtttttg

SEQ ID NO: 3143712 - DNA, 25 bp, Homo sapien
ccgtgggagctatgtgatattttga

SEQ ID NO: 3143713 - DNA, 25 bp, Homo sapien
taaatgtgccgtgggagctatgtga

SEQ ID NO: 3143714 - DNA, 25 bp, Homo sapien
tgtaaatgtgccgtgggagctatgt

SEQ ID NO: 3143715 - DNA, 25 bp, Homo sapien
tgtgccgtgggagctatgtgatatt

SEQ ID NO: 3143716 - DNA, 25 bp, Homo sapien
agacaggaaacaattaacgacttca

SEQ ID NO: 3143717 - DNA, 25 bp, Homo sapien
gacaggaaacaattaacgacttcag

SEQ ID NO: 3143718 - DNA, 25 bp, Homo sapien
gagacaggaaacaattaacgacttc

SEQ ID NO: 3143719 - DNA, 25 bp, Homo sapien
ctgagggtcccatctttccactgtg

SEQ ID NO: 3143720 - DNA, 25 bp, Homo sapien
actcctaggggtagacatagtggca

SEQ ID NO: 3143721 - DNA, 25 bp, Homo sapien
tgccacacctactgtactcctaggg

SEQ ID NO: 3143722 - DNA, 25 bp, Homo sapien
tccagccatcatgtcctcctacggc

SEQ ID NO: 3143723 - DNA, 25 bp, Homo sapien
agtcaagttggatgcgggagcatcg

SEQ ID NO: 3143724 - DNA, 25 bp, Homo sapien
ccatcacgaccaccaactgcataaa

SEQ ID NO: 3143725 - DNA, 25 bp, Homo sapien
acagtgtccacttattagtatgagg

SEQ ID NO: 3143726 - DNA, 25 bp, Homo sapien
agtccattccaggtcgtcactccta

SEQ ID NO: 3143727 - DNA, 25 bp, Homo sapien
gctttggagtgttcagacaagctcc

SEQ ID NO: 3143728 - DNA, 25 bp, Homo sapien
cacttcctgtgagagcaggctgtta

SEQ ID NO: 3143729 - DNA, 25 bp, Homo sapien
ccacacttgagttttgtgaggccag

SEQ ID NO: 3143730 - DNA, 25 bp, Homo sapien
gaggccagttgggatgacttacgtt

SEQ ID NO: 3143731 - DNA, 25 bp, Homo sapien
gaaaattttagaaccggagctgaca

SEQ ID NO: 3143732 - DNA, 25 bp, Homo sapien
gatactgcccctaaaatctgttgta

SEQ ID NO: 3143733 - DNA, 25 bp, Homo sapien
gagtgtagtacaacagcaagcccat

SEQ ID NO: 3143734 - DNA, 25 bp, Homo sapien
gagctagtgtcaatactgaagactg

SEQ ID NO: 3143735 - DNA, 25 bp, Homo sapien
ctgatgctcatggatgctactgcag

SEQ ID NO: 3143736 - DNA, 25 bp, Homo sapien
catggatgctactgcagtccacatg

SEQ ID NO: 3143737 - DNA, 25 bp, Homo sapien
gatcataagcctccacagtattaag

SEQ ID NO: 3143738 - DNA, 25 bp, Homo sapien
aagcctccacagtattaaggtatgc

SEQ ID NO: 3143739 - DNA, 25 bp, Homo sapien
tgggtgacacaagcacaaattcctg

SEQ ID NO: 3143740 - DNA, 25 bp, Homo sapien
ttttagaagtgctagaccctcccag

SEQ ID NO: 3143741 - DNA, 25 bp, Homo sapien
tgttgcagccctccagtagtcctat

SEQ ID NO: 3143742 - DNA, 25 bp, Homo sapien
tagtaagactgccagatcaggtttc

SEQ ID NO: 3143743 - DNA, 25 bp, Homo sapien
tatgcgaccccaactgcatcattct

SEQ ID NO: 3143744 - DNA, 25 bp, Homo sapien
tcaagccttgcaactgaagcaatcc

SEQ ID NO: 3143745 - DNA, 25 bp, Homo sapien
tacactgttgaaactccttactcct

SEQ ID NO: 3143746 - DNA, 25 bp, Homo sapien
gaaagatcaacaagacctggcaata

SEQ ID NO: 3143747 - DNA, 25 bp, Homo sapien
gaacaataggaactctagacactgg

SEQ ID NO: 3143748 - DNA, 25 bp, Homo sapien
taagaatctatgcatttgacccagg

SEQ ID NO: 3143749 - DNA, 25 bp, Homo sapien
gactaccttctacgtgcatggctga

SEQ ID NO: 3143750 - DNA, 25 bp, Homo sapien
tgttaacatggattcagcgggtgag

SEQ ID NO: 3143751 - DNA, 25 bp, Homo sapien
aagagatatgtattggatctgtagg

SEQ ID NO: 3143752 - DNA, 25 bp, Homo sapien
agatatgtattggatctgtaggtta

SEQ ID NO: 3143753 - DNA, 25 bp, Homo sapien
gagatatgtattggatctgtaggtt

SEQ ID NO: 3143754 - DNA, 25 bp, Homo sapien
aaaagagatatgtattggatctgta

SEQ ID NO: 3143755 - DNA, 25 bp, Homo sapien
ctccagctcttcctaggcacagtgg

SEQ ID NO: 3143756 - DNA, 25 bp, Homo sapien
gctccagctcttcctaggcacagtg

SEQ ID NO: 3143757 - DNA, 25 bp, Homo sapien
tccagctcttcctaggcacagtgga

SEQ ID NO: 3143758 - DNA, 25 bp, Homo sapien
cataacatgtagttcttggtgagtc

SEQ ID NO: 3143759 - DNA, 25 bp, Homo sapien
tgcccaggattgtgacaatgcacat

SEQ ID NO: 3143760 - DNA, 25 bp, Homo sapien
gggaatgtgtgatcacaatccacca

SEQ ID NO: 3143761 - DNA, 25 bp, Homo sapien
tccagagcagtgcattcgtcctcac

SEQ ID NO: 3143762 - DNA, 25 bp, Homo sapien
ccttatagaatgtcacagggtgctc

SEQ ID NO: 3143763 - DNA, 25 bp, Homo sapien
catcgaggtcatctaaattgttggc

SEQ ID NO: 3143764 - DNA, 25 bp, Homo sapien
tatcctagtgaagcgtacagaatgc

SEQ ID NO: 3143765 - DNA, 25 bp, Homo sapien
ctattgtgccgtgtggagataccac

SEQ ID NO: 3143766 - DNA, 25 bp, Homo sapien
tctcccctcatggttctcgttgttt

SEQ ID NO: 3143767 - DNA, 25 bp, Homo sapien
ttgtgtaagagttatcaataatttc

SEQ ID NO: 3143768 - DNA, 25 bp, Homo sapien
atgcctgccatgtaccggacggtgg

SEQ ID NO: 3143769 - DNA, 25 bp, Homo sapien
tttctcactcccttcttaggttgaa

SEQ ID NO: 3143770 - DNA, 25 bp, Homo sapien
tcaaatggaaccagcttgaacctgg

SEQ ID NO: 3143771 - DNA, 25 bp, Homo sapien
cttgcaagttgttcagccccaggag

SEQ ID NO: 3143772 - DNA, 25 bp, Homo sapien
gaagtctagcgatgatgccaatacc

SEQ ID NO: 3143773 - DNA, 25 bp, Homo sapien
gatgaaaatgccataagtagcctgt

SEQ ID NO: 3143774 - DNA, 25 bp, Homo sapien
caagggttgcccagtaacttctgac

SEQ ID NO: 3143775 - DNA, 25 bp, Homo sapien
taaagaagcctagtacaagatgccg

SEQ ID NO: 3143776 - DNA, 25 bp, Homo sapien
cacattcgttacacaggtcatggta

SEQ ID NO: 3143777 - DNA, 25 bp, Homo sapien
gagttttgcctccagatggtctgct

SEQ ID NO: 3143778 - DNA, 25 bp, Homo sapien
cactctgccagtccgtctctgctgc

SEQ ID NO: 3143779 - DNA, 25 bp, Homo sapien
tcactctgccagtccgtctctgctg

SEQ ID NO: 3143780 - DNA, 25 bp, Homo sapien
ctttggcaattttatgaccagctgc

SEQ ID NO: 3143781 - DNA, 25 bp, Homo sapien
tatggctacttaaacaaggttggga

SEQ ID NO: 3143782 - DNA, 25 bp, Homo sapien
taatgtatttcagctggaagcagtc

SEQ ID NO: 3143783 - DNA, 25 bp, Homo sapien
ggcccgcttgctgattgcatctttg

SEQ ID NO: 3143784 - DNA, 25 bp, Homo sapien
tgttcaccaccgaagtgacaggatc

SEQ ID NO: 3143785 - DNA, 25 bp, Homo sapien
caacccaaatattgagtaaaataca

SEQ ID NO: 3143786 - DNA, 25 bp, Homo sapien
gaaaatctgttataaaggacataaa

SEQ ID NO: 3143787 - DNA, 25 bp, Homo sapien
tgtatccccctaactctgaaataaa

SEQ ID NO: 3143788 - DNA, 25 bp, Homo sapien
caagtaacgtgaatctgggctgcag

SEQ ID NO: 3143789 - DNA, 25 bp, Homo sapien
ggttttgattcctgcgactagacta

SEQ ID NO: 3143790 - DNA, 25 bp, Homo sapien
tattatggtcagacgacttgtcacc

SEQ ID NO: 3143791 - DNA, 25 bp, Homo sapien
tactaaaattgtgtagctagggcgt

SEQ ID NO: 3143792 - DNA, 25 bp, Homo sapien
tctaggtgacggaagaatgatcccc

SEQ ID NO: 3143793 - DNA, 25 bp, Homo sapien
attctcatcctctcggaggcctcat

SEQ ID NO: 3143794 - DNA, 25 bp, Homo sapien
tctttgctagtatttgctaccattt

SEQ ID NO: 3143795 - DNA, 25 bp, Homo sapien
ctcatattctaggtgacggaagaat

SEQ ID NO: 3143796 - DNA, 25 bp, Homo sapien
tacctgctcagtcaacgtggacatg

SEQ ID NO: 3143797 - DNA, 25 bp, Homo sapien
caagctccgtggatttccacctggg

SEQ ID NO: 3143798 - DNA, 25 bp, Homo sapien
actctgctgcgggttctgagcgtcc

SEQ ID NO: 3143799 - DNA, 25 bp, Homo sapien
gtttgcagcgagaaatctccaggac

SEQ ID NO: 3143800 - DNA, 25 bp, Homo sapien
tgcttggactccaataccccacatt

SEQ ID NO: 3143801 - DNA, 25 bp, Homo sapien
catgagtcctctcgacaccactgtg

SEQ ID NO: 3143802 - DNA, 25 bp, Homo sapien
tggactccaataccccacattgggt

SEQ ID NO: 3143803 - DNA, 25 bp, Homo sapien
ctctcgacaccactgtggatgccat

SEQ ID NO: 3143804 - DNA, 25 bp, Homo sapien
cactccggcccagatgcccatgttt

SEQ ID NO: 3143805 - DNA, 25 bp, Homo sapien
cagatgcccatgttttcctgcttgg

SEQ ID NO: 3143806 - DNA, 25 bp, Homo sapien
ttccaggcagttctccgtcgtggat

SEQ ID NO: 3143807 - DNA, 25 bp, Homo sapien
cagttctccgtcgtggatggcctcc

SEQ ID NO: 3143808 - DNA, 25 bp, Homo sapien
gataattactagtttgatcaatctt

SEQ ID NO: 3143809 - DNA, 25 bp, Homo sapien
tctccaacagtgaaaaccttgtctt

SEQ ID NO: 3143810 - DNA, 25 bp, Homo sapien
tgagtttacaacaatatgccgaatt

SEQ ID NO: 3143811 - DNA, 25 bp, Homo sapien
tattatctctatcttgaaaaccgtg

SEQ ID NO: 3143812 - DNA, 25 bp, Homo sapien
attacaggcgtctgccaacatgctc

SEQ ID NO: 3143813 - DNA, 25 bp, Homo sapien
ttacaggcgtctgccaacatgctca

SEQ ID NO: 3143814 - DNA, 25 bp, Homo sapien
tacaggcgtctgccaacatgctcag

SEQ ID NO: 3143815 - DNA, 25 bp, Homo sapien
acaggcgtctgccaacatgctcagc

SEQ ID NO: 3143816 - DNA, 25 bp, Homo sapien
gatcctgtgtagtttgtgatttcac

SEQ ID NO: 3143817 - DNA, 25 bp, Homo sapien
gcagttgatcctgtgtagtttgtga

SEQ ID NO: 3143818 - DNA, 25 bp, Homo sapien
tcaaaaagcagttgatcctgtgtag

SEQ ID NO: 3143819 - DNA, 25 bp, Homo sapien
gtgtagtttgtgatttcacggcatg

SEQ ID NO: 3143820 - DNA, 25 bp, Homo sapien
taaatagaactatgtcgtatgcacc

SEQ ID NO: 3143821 - DNA, 25 bp, Homo sapien
cattacaggacatttgggtagttcc

SEQ ID NO: 3143822 - DNA, 25 bp, Homo sapien
ggtacaccatgagtgacaccacgag

SEQ ID NO: 3143823 - DNA, 25 bp, Homo sapien
gactttaccgaagaagtctcccaca

SEQ ID NO: 3143824 - DNA, 25 bp, Homo sapien
cagatttcaccagttacatatgcac

SEQ ID NO: 3143825 - DNA, 25 bp, Homo sapien
tggtccaatccatacagtttaatca

SEQ ID NO: 3143826 - DNA, 25 bp, Homo sapien
caccagttacatatgcacttgtgtg

SEQ ID NO: 3143827 - DNA, 25 bp, Homo sapien
ggtccaatccatacagtttaatcag

SEQ ID NO: 3143828 - DNA, 25 bp, Homo sapien
tcagcctcctaaatattagcatcat

SEQ ID NO: 3143829 - DNA, 25 bp, Homo sapien
agcctcctaaatattagcatcatac

SEQ ID NO: 3143830 - DNA, 25 bp, Homo sapien
gcctcctaaatattagcatcataca

SEQ ID NO: 3143831 - DNA, 25 bp, Homo sapien
cagcctcctaaatattagcatcata

SEQ ID NO: 3143832 - DNA, 25 bp, Homo sapien
tggcaatacatagggagtggccacc

SEQ ID NO: 3143833 - DNA, 25 bp, Homo sapien
tgtgatacccatacccttagaaggt

SEQ ID NO: 3143834 - DNA, 25 bp, Homo sapien
caagtataacacagagctaaggcct

SEQ ID NO: 3143835 - DNA, 25 bp, Homo sapien
gatcaagggccctgaaacctgtcct

SEQ ID NO: 3143836 - DNA, 25 bp, Homo sapien
caaaaggacagaggagaagcatgcc

SEQ ID NO: 3143837 - DNA, 25 bp, Homo sapien
gatatggagtcaaccaaggtgccca

SEQ ID NO: 3143838 - DNA, 25 bp, Homo sapien
aagtgtgatgtatataggccaagca

SEQ ID NO: 3143839 - DNA, 25 bp, Homo sapien
aaacttctggccatgtcttctgagg

SEQ ID NO: 3143840 - DNA, 25 bp, Homo sapien
agtaagtgctaaatgggtatgggta

SEQ ID NO: 3143841 - DNA, 25 bp, Homo sapien
ggtatgggtatttcttttgggatga

SEQ ID NO: 3143842 - DNA, 25 bp, Homo sapien
taatgctctgtggtatatacgatgg

SEQ ID NO: 3143843 - DNA, 25 bp, Homo sapien
gcctgacacaaagggtcacactgta

SEQ ID NO: 3143844 - DNA, 25 bp, Homo sapien
gagatggaggctgttaccttcttct

SEQ ID NO: 3143845 - DNA, 25 bp, Homo sapien
cctggcagccattagagttacttga

SEQ ID NO: 3143846 - DNA, 25 bp, Homo sapien
gagaaccaccgatttattctagagt

SEQ ID NO: 3143847 - DNA, 25 bp, Homo sapien
tagagtatgccaaatccaaggaagc

SEQ ID NO: 3143848 - DNA, 25 bp, Homo sapien
ccttggcgcccgaaagcgttgggat

SEQ ID NO: 3143849 - DNA, 25 bp, Homo sapien
gaacaatttgtgttaatcccttaca

SEQ ID NO: 3143850 - DNA, 25 bp, Homo sapien
tcttaatatgccctcaaatagccat

SEQ ID NO: 3143851 - DNA, 25 bp, Homo sapien
tgatttgaatatggaaccgtacacc

SEQ ID NO: 3143852 - DNA, 25 bp, Homo sapien
gcagcgaccaatcagcgagtgctaa

SEQ ID NO: 3143853 - DNA, 25 bp, Homo sapien
tgctaattgaaaggcggtgcctcga

SEQ ID NO: 3143854 - DNA, 25 bp, Homo sapien
cgaactatgaagtacgcaggcgcac

SEQ ID NO: 3143855 - DNA, 25 bp, Homo sapien
gctcgagccgctacgcgaactatga

SEQ ID NO: 3143856 - DNA, 25 bp, Homo sapien
ctccaaacgcgttaactcgaccagt

SEQ ID NO: 3143857 - DNA, 25 bp, Homo sapien
agtcaacttcacagcgaccctccaa

SEQ ID NO: 3143858 - DNA, 25 bp, Homo sapien
agttctttccgcgtgcgaagctggg

SEQ ID NO: 3143859 - DNA, 25 bp, Homo sapien
cgaagctggggtatctttagatcca

SEQ ID NO: 3143860 - DNA, 25 bp, Homo sapien
gaggcttagccccaagaaatgaggt

SEQ ID NO: 3143861 - DNA, 25 bp, Homo sapien
gccagaggcttagccccaagaaatg

SEQ ID NO: 3143862 - DNA, 25 bp, Homo sapien
aatgaggtagctcgtgacatcggac

SEQ ID NO: 3143863 - DNA, 25 bp, Homo sapien
cccaagaaatgaggtagctcgtgac

SEQ ID NO: 3143864 - DNA, 25 bp, Homo sapien
ttgccaggcaaactgtattggtgcg

SEQ ID NO: 3143865 - DNA, 25 bp, Homo sapien
gccaagtcttttctagcagtgagaa

SEQ ID NO: 3143866 - DNA, 25 bp, Homo sapien
cctgttactgcaaggtagtttcctg

SEQ ID NO: 3143867 - DNA, 25 bp, Homo sapien
tattggtgcgccaagccaagtcttt

SEQ ID NO: 3143868 - DNA, 25 bp, Homo sapien
cttttttgaccatggcgatcaaaga

SEQ ID NO: 3143869 - DNA, 25 bp, Homo sapien
tgaccatggcgatcaaagattttca

SEQ ID NO: 3143870 - DNA, 25 bp, Homo sapien
ttcttttttgaccatggcgatcaaa

SEQ ID NO: 3143871 - DNA, 25 bp, Homo sapien
ggcgatcaaagattttcacaatata

SEQ ID NO: 3143872 - DNA, 25 bp, Homo sapien
gtctaactggctggtcttatttgtg

SEQ ID NO: 3143873 - DNA, 25 bp, Homo sapien
ggtcttatttgtgttggcatcccaa

SEQ ID NO: 3143874 - DNA, 25 bp, Homo sapien
catcccaaagataaatgcagctaga

SEQ ID NO: 3143875 - DNA, 25 bp, Homo sapien
gcaatcactgctaggacatctccat

SEQ ID NO: 3143876 - DNA, 25 bp, Homo sapien
ggctgctaggttcttctattaagta

SEQ ID NO: 3143877 - DNA, 25 bp, Homo sapien
aggctgctaggttcttctattaagt

SEQ ID NO: 3143878 - DNA, 25 bp, Homo sapien
gctgctaggttcttctattaagtat

SEQ ID NO: 3143879 - DNA, 25 bp, Homo sapien
caggctgctaggttcttctattaag

SEQ ID NO: 3143880 - DNA, 25 bp, Homo sapien
taaattactaaacaattcacgatca

SEQ ID NO: 3143881 - DNA, 25 bp, Homo sapien
caattcacgatcataacctctaaac

SEQ ID NO: 3143882 - DNA, 25 bp, Homo sapien
gatcataacctctaaacagtccttt

SEQ ID NO: 3143883 - DNA, 25 bp, Homo sapien
tactaaacaattcacgatcataacc

SEQ ID NO: 3143884 - DNA, 25 bp, Homo sapien
cagccaggaaacttccaacttttga

SEQ ID NO: 3143885 - DNA, 25 bp, Homo sapien
aggacaggaatctttcgagatgtct

SEQ ID NO: 3143886 - DNA, 25 bp, Homo sapien
tttcctttaacagttccaacagcca

SEQ ID NO: 3143887 - DNA, 25 bp, Homo sapien
caggaatctttcgagatgtctgatg

SEQ ID NO: 3143888 - DNA, 25 bp, Homo sapien
tcaattgaattaaagcactgaccaa

SEQ ID NO: 3143889 - DNA, 25 bp, Homo sapien
caaggtacatatgaaatgctatcac

SEQ ID NO: 3143890 - DNA, 25 bp, Homo sapien
cctctcatagggttgaggatcaatt

SEQ ID NO: 3143891 - DNA, 25 bp, Homo sapien
gaataatagtaggacctctcatagg

SEQ ID NO: 3143892 - DNA, 25 bp, Homo sapien
ctgtcttatcgtgtcaccttcctga

SEQ ID NO: 3143893 - DNA, 25 bp, Homo sapien
tgtcttatcgtgtcaccttcctgat

SEQ ID NO: 3143894 - DNA, 25 bp, Homo sapien
tcaccttcctgattactaactgtaa

SEQ ID NO: 3143895 - DNA, 25 bp, Homo sapien
ccttcctgattactaactgtaatca

SEQ ID NO: 3143896 - DNA, 25 bp, Homo sapien
tgttgctaggctctgatctcacttg

SEQ ID NO: 3143897 - DNA, 25 bp, Homo sapien
agaggttcggtcatccatcttcatc

SEQ ID NO: 3143898 - DNA, 25 bp, Homo sapien
tgctaggctctgatctcacttgtgt

SEQ ID NO: 3143899 - DNA, 25 bp, Homo sapien
cagcagcagaggttcggtcatccat

SEQ ID NO: 3143900 - DNA, 25 bp, Homo sapien
attatagcagacaatgttgccaaag

SEQ ID NO: 3143901 - DNA, 25 bp, Homo sapien
tatagcagacaatgttgccaaagtc

SEQ ID NO: 3143902 - DNA, 25 bp, Homo sapien
agctgggttatctggttcattcaga

SEQ ID NO: 3143903 - DNA, 25 bp, Homo sapien
atagcagacaatgttgccaaagtcc

SEQ ID NO: 3143904 - DNA, 25 bp, Homo sapien
gagcctgaaatatctcttgaccaag

SEQ ID NO: 3143905 - DNA, 25 bp, Homo sapien
taagagtctgtgatactgcaatgct

SEQ ID NO: 3143906 - DNA, 25 bp, Homo sapien
gaaaaaccaatcatgatgcggccat

SEQ ID NO: 3143907 - DNA, 25 bp, Homo sapien
gattatctttatggttacgagcctg

SEQ ID NO: 3143908 - DNA, 25 bp, Homo sapien
gttcacgttttatagctgtactcag

SEQ ID NO: 3143909 - DNA, 25 bp, Homo sapien
taaattgtaaacatgattgccagat

SEQ ID NO: 3143910 - DNA, 25 bp, Homo sapien
gccagattcatattagctaacaaag

SEQ ID NO: 3143911 - DNA, 25 bp, Homo sapien
gtgtgcttactccatgttacccaga

SEQ ID NO: 3143912 - DNA, 25 bp, Homo sapien
gaggtaattacctgctattcctaac

SEQ ID NO: 3143913 - DNA, 25 bp, Homo sapien
aattgaggtaattacctgctattcc

SEQ ID NO: 3143914 - DNA, 25 bp, Homo sapien
tgtgattatatatacggtttgtctt

SEQ ID NO: 3143915 - DNA, 25 bp, Homo sapien
ttacctgctattcctaacttgctga

SEQ ID NO: 3143916 - DNA, 25 bp, Homo sapien
taagtcaaccaagtcttggatttta

SEQ ID NO: 3143917 - DNA, 25 bp, Homo sapien
ccaggttgagtataacatacatgtc

SEQ ID NO: 3143918 - DNA, 25 bp, Homo sapien
gagtataacatacatgtcttttaag

SEQ ID NO: 3143919 - DNA, 25 bp, Homo sapien
gtcaaccaagtcttggattttaatg

SEQ ID NO: 3143920 - DNA, 25 bp, Homo sapien
tcaatctgcttcagaaaaatcaata

SEQ ID NO: 3143921 - DNA, 25 bp, Homo sapien
caatctgcttcagaaaaatcaatac

SEQ ID NO: 3143922 - DNA, 25 bp, Homo sapien
tcatcagtccaggacaaggtaccca

SEQ ID NO: 3143923 - DNA, 25 bp, Homo sapien
gagataggcaatccttgtgctgcag

SEQ ID NO: 3143924 - DNA, 25 bp, Homo sapien
ccctttgggtagagagtgctagcaa

SEQ ID NO: 3143925 - DNA, 25 bp, Homo sapien
aacagggttggctacggtgacttca

SEQ ID NO: 3143926 - DNA, 25 bp, Homo sapien
gccagatgataaagacctactgcca

SEQ ID NO: 3143927 - DNA, 25 bp, Homo sapien
cataaaaccaagctcgattattcat

SEQ ID NO: 3143928 - DNA, 25 bp, Homo sapien
aaggacataaaaccaagctcgatta

SEQ ID NO: 3143929 - DNA, 25 bp, Homo sapien
aaaaccaagctcgattattcattcc

SEQ ID NO: 3143930 - DNA, 25 bp, Homo sapien
tctatagtcacttagctaacagagg

SEQ ID NO: 3143931 - DNA, 25 bp, Homo sapien
tgctgccttcactacaaaggtaaag

SEQ ID NO: 3143932 - DNA, 25 bp, Homo sapien
caaggttttcctcacatgctaatag

SEQ ID NO: 3143933 - DNA, 25 bp, Homo sapien
cactgtgccaagtgagaccacgcat

SEQ ID NO: 3143934 - DNA, 25 bp, Homo sapien
aggcattccattatggtttacctga

SEQ ID NO: 3143935 - DNA, 25 bp, Homo sapien
tttcaggtttgttctattcctgagg

SEQ ID NO: 3143936 - DNA, 25 bp, Homo sapien
caggtttgttctattcctgagggtt

SEQ ID NO: 3143937 - DNA, 25 bp, Homo sapien
ccattatggtttacctgaaacaaag

SEQ ID NO: 3143938 - DNA, 25 bp, Homo sapien
tcaaaaagtgcagcagcatagtcag

SEQ ID NO: 3143939 - DNA, 25 bp, Homo sapien
ccttcaaaaagtgcagcagcatagt

SEQ ID NO: 3143940 - DNA, 25 bp, Homo sapien
ttcaaaaagtgcagcagcatagtca

SEQ ID NO: 3143941 - DNA, 25 bp, Homo sapien
gccttcaaaaagtgcagcagcatag

SEQ ID NO: 3143942 - DNA, 25 bp, Homo sapien
ccactgctgggaaaagccgagtctc

SEQ ID NO: 3143943 - DNA, 25 bp, Homo sapien
aagccgagtctcacgttcttcttga

SEQ ID NO: 3143944 - DNA, 25 bp, Homo sapien
tcttgagcatccaagatttcgcttt

SEQ ID NO: 3143945 - DNA, 25 bp, Homo sapien
gaaatcactagttaaggcatggcat

SEQ ID NO: 3143946 - DNA, 25 bp, Homo sapien
gaatgtatccccactgcaaagagac

SEQ ID NO: 3143947 - DNA, 25 bp, Homo sapien
gtaccttgtctatgtctagatagca

SEQ ID NO: 3143948 - DNA, 25 bp, Homo sapien
tgttattcccgctgaagacctttca

SEQ ID NO: 3143949 - DNA, 25 bp, Homo sapien
tatgcaggcctgcactaatgtgtgt

SEQ ID NO: 3143950 - DNA, 25 bp, Homo sapien
atgtagaaatactgaacgacaccag

SEQ ID NO: 3143951 - DNA, 25 bp, Homo sapien
tgtagaaatactgaacgacaccagt

SEQ ID NO: 3143952 - DNA, 25 bp, Homo sapien
tgaaaactaatctggtcccatttgg

SEQ ID NO: 3143953 - DNA, 25 bp, Homo sapien
gatgtcgataatcattaacgaattg

SEQ ID NO: 3143954 - DNA, 25 bp, Homo sapien
cactgacaggatgtcgataatcatt

SEQ ID NO: 3143955 - DNA, 25 bp, Homo sapien
tttttcacactgacaggatgtcgat

SEQ ID NO: 3143956 - DNA, 25 bp, Homo sapien
cttgtatagtgtccttgtgaaagac

SEQ ID NO: 3143957 - DNA, 25 bp, Homo sapien
gtccttgtgaaagacataagtgtac

SEQ ID NO: 3143958 - DNA, 25 bp, Homo sapien
gaatctcataggtagcgtcattgac

SEQ ID NO: 3143959 - DNA, 25 bp, Homo sapien
ggtgaaaaatctggaatctcatagg

SEQ ID NO: 3143960 - DNA, 25 bp, Homo sapien
ctacattataaaacagacatcgcaa

SEQ ID NO: 3143961 - DNA, 25 bp, Homo sapien
tacattataaaacagacatcgcaat

SEQ ID NO: 3143962 - DNA, 25 bp, Homo sapien
acattataaaacagacatcgcaatg

SEQ ID NO: 3143963 - DNA, 25 bp, Homo sapien
tcaggccccgtatcttttaagttgc

SEQ ID NO: 3143964 - DNA, 25 bp, Homo sapien
tgagaaagccatgggtgctaaggta

SEQ ID NO: 3143965 - DNA, 25 bp, Homo sapien
ggtgctaccagccaaaataaccttg

SEQ ID NO: 3143966 - DNA, 25 bp, Homo sapien
gcattggtctcagttcgtcaggccc

SEQ ID NO: 3143967 - DNA, 25 bp, Homo sapien
tatttgttccaaggacatcactatg

SEQ ID NO: 3143968 - DNA, 25 bp, Homo sapien
atttccaattctccgataaacacgg

SEQ ID NO: 3143969 - DNA, 25 bp, Homo sapien
gataaacacggattgcaaactccac

SEQ ID NO: 3143970 - DNA, 25 bp, Homo sapien
tgtagacaagctctggccaactcat

SEQ ID NO: 3143971 - DNA, 25 bp, Homo sapien
tccagggcagcaataggacagctgg

SEQ ID NO: 3143972 - DNA, 25 bp, Homo sapien
cctgagccaggttataatcgttggt

SEQ ID NO: 3143973 - DNA, 25 bp, Homo sapien
gtaaacatggcaaggtgtcctgcca

SEQ ID NO: 3143974 - DNA, 25 bp, Homo sapien
cctgccaaaagattgtagtcctcta

SEQ ID NO: 3143975 - DNA, 25 bp, Homo sapien
aaatgctttgccagttgtagagcac

SEQ ID NO: 3143976 - DNA, 25 bp, Homo sapien
taaaaggtatctggtctggggccaa

SEQ ID NO: 3143977 - DNA, 25 bp, Homo sapien
tgtcccaatgctgtaaatcccttct

SEQ ID NO: 3143978 - DNA, 25 bp, Homo sapien
gcgaattcaagctgaatagcatatt

SEQ ID NO: 3143979 - DNA, 25 bp, Homo sapien
aaatcgaagagttctggatggtccg

SEQ ID NO: 3143980 - DNA, 25 bp, Homo sapien
caacgtcactttttggtataggcat

SEQ ID NO: 3143981 - DNA, 25 bp, Homo sapien
tctgacaggacttggtggatcatct

SEQ ID NO: 3143982 - DNA, 25 bp, Homo sapien
ctgaccataatgagacaagtttgag

SEQ ID NO: 3143983 - DNA, 25 bp, Homo sapien
tacagatgcattctttcaaagtgca

SEQ ID NO: 3143984 - DNA, 25 bp, Homo sapien
taagctcacaaaagatgtggaacac

SEQ ID NO: 3143985 - DNA, 25 bp, Homo sapien
tcaaagtgcagtctgtcattatgtt

SEQ ID NO: 3143986 - DNA, 25 bp, Homo sapien
tgtcactgagttgcttaagctcaca

SEQ ID NO: 3143987 - DNA, 25 bp, Homo sapien
ttcctttctcataatgagccaaagc

SEQ ID NO: 3143988 - DNA, 25 bp, Homo sapien
ttctcataatgagccaaagcattta

SEQ ID NO: 3143989 - DNA, 25 bp, Homo sapien
cttattatcacctgttattcctttc

SEQ ID NO: 3143990 - DNA, 25 bp, Homo sapien
ctcataatgagccaaagcatttaca

SEQ ID NO: 3143991 - DNA, 25 bp, Homo sapien
gtctcccattcttatggacatctgg

SEQ ID NO: 3143992 - DNA, 25 bp, Homo sapien
cacagtctcttttaaggaccctgct

SEQ ID NO: 3143993 - DNA, 25 bp, Homo sapien
tggttaacccctcgacgtatgtctc

SEQ ID NO: 3143994 - DNA, 25 bp, Homo sapien
ctcccattcttatggacatctgggc

SEQ ID NO: 3143995 - DNA, 25 bp, Homo sapien
tcttagagcggatgtaaacagatgc

SEQ ID NO: 3143996 - DNA, 25 bp, Homo sapien
acagttgggccgcttctgaaaattg

SEQ ID NO: 3143997 - DNA, 25 bp, Homo sapien
tcgtagtagagacctttttcataca

SEQ ID NO: 3143998 - DNA, 25 bp, Homo sapien
aacagatgctgctttatcgtagtag

SEQ ID NO: 3143999 - DNA, 25 bp, Homo sapien
gggcagaagatcaccaacttttgcc

SEQ ID NO: 3144000 - DNA, 25 bp, Homo sapien
aaacgtggggcagaagatcaccaac

SEQ ID NO: 3144001 - DNA, 25 bp, Homo sapien
ccttggctttggcatactgcaaatg

SEQ ID NO: 3144002 - DNA, 25 bp, Homo sapien
tactgcaaatggatcttaggagaag

SEQ ID NO: 3144003 - DNA, 25 bp, Homo sapien
tgcattttcataagctacaacagct

SEQ ID NO: 3144004 - DNA, 25 bp, Homo sapien
gggtctctctaacaatattgacagc

SEQ ID NO: 3144005 - DNA, 25 bp, Homo sapien
gatagatgcggattacactttgcca

SEQ ID NO: 3144006 - DNA, 25 bp, Homo sapien
tattgaggtgatccagatagatgcg

SEQ ID NO: 3144007 - DNA, 25 bp, Homo sapien
cagcctttgaatttaaacgcttaga

SEQ ID NO: 3144008 - DNA, 25 bp, Homo sapien
cgacagcctttgaatttaaacgctt

SEQ ID NO: 3144009 - DNA, 25 bp, Homo sapien
gacagcctttgaatttaaacgctta

SEQ ID NO: 3144010 - DNA, 25 bp, Homo sapien
cacgacagcctttgaatttaaacgc

SEQ ID NO: 3144011 - DNA, 25 bp, Homo sapien
tgaaagacatactcttgtctgctga

SEQ ID NO: 3144012 - DNA, 25 bp, Homo sapien
ttgaaagacatactcttgtctgctg

SEQ ID NO: 3144013 - DNA, 25 bp, Homo sapien
gaaagacatactcttgtctgctgac

SEQ ID NO: 3144014 - DNA, 25 bp, Homo sapien
ttggacatgacaagaaactggatgg

SEQ ID NO: 3144015 - DNA, 25 bp, Homo sapien
tgttgctgagccagtgtgaaagctt

SEQ ID NO: 3144016 - DNA, 25 bp, Homo sapien
ttgtgttgctgagccagtgtgaaag

SEQ ID NO: 3144017 - DNA, 25 bp, Homo sapien
ggacatgacaagaaactggatggca

SEQ ID NO: 3144018 - DNA, 25 bp, Homo sapien
taaacatttacaccaggcgcattct

SEQ ID NO: 3144019 - DNA, 25 bp, Homo sapien
cataacatagatacatgtgtgtcta

SEQ ID NO: 3144020 - DNA, 25 bp, Homo sapien
caggcgcattcttgtatgtatacca

SEQ ID NO: 3144021 - DNA, 25 bp, Homo sapien
tgaagtagcagggatcttcaaatcc

SEQ ID NO: 3144022 - DNA, 25 bp, Homo sapien
tctccttcaaagtataaggcaatgc

SEQ ID NO: 3144023 - DNA, 25 bp, Homo sapien
gcaatgctttgatagtcttcattag

SEQ ID NO: 3144024 - DNA, 25 bp, Homo sapien
gccacacagcaagaagaattttcca

SEQ ID NO: 3144025 - DNA, 25 bp, Homo sapien
cagcctgaagatatctcttttctcc

SEQ ID NO: 3144026 - DNA, 25 bp, Homo sapien
gccacattatcttccgagcttgggc

SEQ ID NO: 3144027 - DNA, 25 bp, Homo sapien
cattatcttccgagcttgggcattt

SEQ ID NO: 3144028 - DNA, 25 bp, Homo sapien
ggcatttcaggaagtgtttaagtgc

SEQ ID NO: 3144029 - DNA, 25 bp, Homo sapien
tcttccgagcttgggcatttcagga

SEQ ID NO: 3144030 - DNA, 25 bp, Homo sapien
tttgacgatgtacccagtaactcag

SEQ ID NO: 3144031 - DNA, 25 bp, Homo sapien
gcacaagcattttgacgatgtaccc

SEQ ID NO: 3144032 - DNA, 25 bp, Homo sapien
ggcgtgggtgaagcacaagcatttt

SEQ ID NO: 3144033 - DNA, 25 bp, Homo sapien
atctcccagtgaggggcctcgtact

SEQ ID NO: 3144034 - DNA, 25 bp, Homo sapien
cccaggagatggtctatcagctgat

SEQ ID NO: 3144035 - DNA, 25 bp, Homo sapien
ggtctatcagctgattggtcagcag

SEQ ID NO: 3144036 - DNA, 25 bp, Homo sapien
gagatggtctatcagctgattggtc

SEQ ID NO: 3144037 - DNA, 25 bp, Homo sapien
tcagctgattggtcagcagttcatc

SEQ ID NO: 3144038 - DNA, 25 bp, Homo sapien
tacaagcggaacaggtacttggcat

SEQ ID NO: 3144039 - DNA, 25 bp, Homo sapien
gcttctcggtattgcttcagagcca

SEQ ID NO: 3144040 - DNA, 25 bp, Homo sapien
catgtacaagcggaacaggtacttg

SEQ ID NO: 3144041 - DNA, 25 bp, Homo sapien
ctgggcagcttctcggtattgcttc

SEQ ID NO: 3144042 - DNA, 25 bp, Homo sapien
acatcgtgtgcattccggtagttgc

SEQ ID NO: 3144043 - DNA, 25 bp, Homo sapien
gagaacatcgtgtgcattccggtag

SEQ ID NO: 3144044 - DNA, 25 bp, Homo sapien
ctgaagagaacatcgtgtgcattcc

SEQ ID NO: 3144045 - DNA, 25 bp, Homo sapien
gaagagaacatcgtgtgcattccgg

SEQ ID NO: 3144046 - DNA, 25 bp, Homo sapien
tactagtatatagctgtgcagaatc

SEQ ID NO: 3144047 - DNA, 25 bp, Homo sapien
catctcggagggaattttgatcttc

SEQ ID NO: 3144048 - DNA, 25 bp, Homo sapien
gtggccatctcggagggaattttga

SEQ ID NO: 3144049 - DNA, 25 bp, Homo sapien
ctgggatttcagttctgcatacata

SEQ ID NO: 3144050 - DNA, 25 bp, Homo sapien
gagagagagaatgatctgctaaagg

SEQ ID NO: 3144051 - DNA, 25 bp, Homo sapien
ggaccaacttcaccaagttctggta

SEQ ID NO: 3144052 - DNA, 25 bp, Homo sapien
tgctaaaggaaaggcgccgtgtctg

SEQ ID NO: 3144053 - DNA, 25 bp, Homo sapien
tctggtaagacccaaaagctgtgtg

SEQ ID NO: 3144054 - DNA, 25 bp, Homo sapien
atgttgttggccacccgaatgagca

SEQ ID NO: 3144055 - DNA, 25 bp, Homo sapien
gctgatgttgttggccacccgaatg

SEQ ID NO: 3144056 - DNA, 25 bp, Homo sapien
aatgagcatgcgagcccctttcatg

SEQ ID NO: 3144057 - DNA, 25 bp, Homo sapien
acccgaatgagcatgcgagcccctt

SEQ ID NO: 3144058 - DNA, 25 bp, Homo sapien
ggacagacacccagaattaccggct

SEQ ID NO: 3144059 - DNA, 25 bp, Homo sapien
gatgagtggctcaccgtgcctaaaa

SEQ ID NO: 3144060 - DNA, 25 bp, Homo sapien
catagatttggagacggttcccacc

SEQ ID NO: 3144061 - DNA, 25 bp, Homo sapien
ccttgcccgcatggtagactttgat

SEQ ID NO: 3144062 - DNA, 25 bp, Homo sapien
aggggagagcagcaacagcacagtg

SEQ ID NO: 3144063 - DNA, 25 bp, Homo sapien
ctgtcctcagtgatacaggcgggat

SEQ ID NO: 3144064 - DNA, 25 bp, Homo sapien
ctgctgtcctcagtgatacaggcgg

SEQ ID NO: 3144065 - DNA, 25 bp, Homo sapien
gatacaggcgggattccaccctggt

SEQ ID NO: 3144066 - DNA, 25 bp, Homo sapien
gctgcggtattcaggcctcatcaac

SEQ ID NO: 3144067 - DNA, 25 bp, Homo sapien
ggcatctattttgctgcggtattca

SEQ ID NO: 3144068 - DNA, 25 bp, Homo sapien
cacagttgacgtcaggatgggtaca

SEQ ID NO: 3144069 - DNA, 25 bp, Homo sapien
caacatagctgcgaagctgaaagca

SEQ ID NO: 3144070 - DNA, 25 bp, Homo sapien
gagaaatacgattagatagcagaaa

SEQ ID NO: 3144071 - DNA, 25 bp, Homo sapien
ccccaccgttttcttattgagcttg

SEQ ID NO: 3144072 - DNA, 25 bp, Homo sapien
ctttgagaaatacgattagatagca

SEQ ID NO: 3144073 - DNA, 25 bp, Homo sapien
ttcttattgagcttgcacactggca

SEQ ID NO: 3144074 - DNA, 25 bp, Homo sapien
ctttctgaacaaaaaggcgaagatc

SEQ ID NO: 3144075 - DNA, 25 bp, Homo sapien
tttctgaacaaaaaggcgaagatcc

SEQ ID NO: 3144076 - DNA, 25 bp, Homo sapien
ccatttgtcattaccaatccagtca

SEQ ID NO: 3144077 - DNA, 25 bp, Homo sapien
tggatccaagattcaggtacctggg

SEQ ID NO: 3144078 - DNA, 25 bp, Homo sapien
ccagtcatctccctgggctaaggtc

SEQ ID NO: 3144079 - DNA, 25 bp, Homo sapien
acctgggtctcgtcataatgtaatg

SEQ ID NO: 3144080 - DNA, 25 bp, Homo sapien
gagccccagctagcgtggttctatg

SEQ ID NO: 3144081 - DNA, 25 bp, Homo sapien
ggctagcaggtaccatattggacca

SEQ ID NO: 3144082 - DNA, 25 bp, Homo sapien
tgaaatacgggtagtgcgaagaact

SEQ ID NO: 3144083 - DNA, 25 bp, Homo sapien
tggtagccatgagccacatttgaac

SEQ ID NO: 3144084 - DNA, 25 bp, Homo sapien
gagttcatagcacattcaacggcag

SEQ ID NO: 3144085 - DNA, 25 bp, Homo sapien
tacatgggccacctttgggaactgg

SEQ ID NO: 3144086 - DNA, 25 bp, Homo sapien
caacggcagaaagcatgggtaggtc

SEQ ID NO: 3144087 - DNA, 25 bp, Homo sapien
taggttctagggtgttacatgggcc

SEQ ID NO: 3144088 - DNA, 25 bp, Homo sapien
gacatatgacacacctacttcatag

SEQ ID NO: 3144089 - DNA, 25 bp, Homo sapien
gagatacttacaagctcacaccagc

SEQ ID NO: 3144090 - DNA, 25 bp, Homo sapien
aaaatgccgttttattcatgtaccg

SEQ ID NO: 3144091 - DNA, 25 bp, Homo sapien
tacttcatagtcagactctgggctt

SEQ ID NO: 3144092 - DNA, 25 bp, Homo sapien
tatgggatactgtttttacatccag

SEQ ID NO: 3144093 - DNA, 25 bp, Homo sapien
tttgcagaatggacatggagtcgtg

SEQ ID NO: 3144094 - DNA, 25 bp, Homo sapien
gagtcgtggcctcttctatctcaga

SEQ ID NO: 3144095 - DNA, 25 bp, Homo sapien
caatatgggatactgtttttacatc

SEQ ID NO: 3144096 - DNA, 25 bp, Homo sapien
cacaatgtggacacaccgtccagtc

SEQ ID NO: 3144097 - DNA, 25 bp, Homo sapien
tgtggacacaccgtccagtcatctt

SEQ ID NO: 3144098 - DNA, 25 bp, Homo sapien
gacacaccgtccagtcatctttcaa

SEQ ID NO: 3144099 - DNA, 25 bp, Homo sapien
aatgtggacacaccgtccagtcatc

SEQ ID NO: 3144100 - DNA, 25 bp, Homo sapien
gtccaccatgcaatttgagaatcag

SEQ ID NO: 3144101 - DNA, 25 bp, Homo sapien
gagtctttagagatccttaggaaca

SEQ ID NO: 3144102 - DNA, 25 bp, Homo sapien
cagaactattcagtctcatgcaaga

SEQ ID NO: 3144103 - DNA, 25 bp, Homo sapien
aaaggtcacaggaggttcttcccag

SEQ ID NO: 3144104 - DNA, 25 bp, Homo sapien
ggtactgggtacagtctgaaatctt

SEQ ID NO: 3144105 - DNA, 25 bp, Homo sapien
gctgagcagcgtttaatctttctga

SEQ ID NO: 3144106 - DNA, 25 bp, Homo sapien
atctttctgaacacataggacatgt

SEQ ID NO: 3144107 - DNA, 25 bp, Homo sapien
tcctccgttcgcaggtactgggtac

SEQ ID NO: 3144108 - DNA, 25 bp, Homo sapien
gactgtaatccgcatcaagtttcag

SEQ ID NO: 3144109 - DNA, 25 bp, Homo sapien
acattcaagttagaaatctctagac

SEQ ID NO: 3144110 - DNA, 25 bp, Homo sapien
tagaagggtttcaagtaatggctgg

SEQ ID NO: 3144111 - DNA, 25 bp, Homo sapien
gaagggtttcaagtaatggctggca

SEQ ID NO: 3144112 - DNA, 25 bp, Homo sapien
gaaacagcctcctgtggaaaatgct

SEQ ID NO: 3144113 - DNA, 25 bp, Homo sapien
tctgtatccagaaaggaccgtctct

SEQ ID NO: 3144114 - DNA, 25 bp, Homo sapien
tcatcgttttgccaccgtacagaag

SEQ ID NO: 3144115 - DNA, 25 bp, Homo sapien
cgtacagaagtggaaagtgccgacc

SEQ ID NO: 3144116 - DNA, 25 bp, Homo sapien
tttacccgtgtatttattaacagca

SEQ ID NO: 3144117 - DNA, 25 bp, Homo sapien
tatagatattaaattaactgaaagt

SEQ ID NO: 3144118 - DNA, 25 bp, Homo sapien
aacagagatttacccgtgtatttat

SEQ ID NO: 3144119 - DNA, 25 bp, Homo sapien
gtttctatagatattaaattaactg

SEQ ID NO: 3144120 - DNA, 25 bp, Homo sapien
gctacttaaatcgagaaggtcccaa

SEQ ID NO: 3144121 - DNA, 25 bp, Homo sapien
tgttcccaaagtctgtaagtcctga

SEQ ID NO: 3144122 - DNA, 25 bp, Homo sapien
tattcccataatctgccctgaggtg

SEQ ID NO: 3144123 - DNA, 25 bp, Homo sapien
ggcctctgccgtatgggtccatgta

SEQ ID NO: 3144124 - DNA, 25 bp, Homo sapien
tctcgaccggtgatgttgaccttat

SEQ ID NO: 3144125 - DNA, 25 bp, Homo sapien
tcttttctgtgttcgtgatgactgc

SEQ ID NO: 3144126 - DNA, 25 bp, Homo sapien
tgatgactgcaggtctcgaccggtg

SEQ ID NO: 3144127 - DNA, 25 bp, Homo sapien
ccggtgatgttgaccttataatcca

SEQ ID NO: 3144128 - DNA, 25 bp, Homo sapien
ccagcaatgaacgattgaaatttga

SEQ ID NO: 3144129 - DNA, 25 bp, Homo sapien
agatgcaggattaatacacaagagt

SEQ ID NO: 3144130 - DNA, 25 bp, Homo sapien
atgccagcaatgaacgattgaaatt

SEQ ID NO: 3144131 - DNA, 25 bp, Homo sapien
taatacacaagagtcaattgttttc

SEQ ID NO: 3144132 - DNA, 25 bp, Homo sapien
acacataaagaatgcttcacaactc

SEQ ID NO: 3144133 - DNA, 25 bp, Homo sapien
taaagaatgcttcacaactctatcc

SEQ ID NO: 3144134 - DNA, 25 bp, Homo sapien
ttcacaactctatccttgcacagag

SEQ ID NO: 3144135 - DNA, 25 bp, Homo sapien
gaatgcttcacaactctatccttgc

SEQ ID NO: 3144136 - DNA, 25 bp, Homo sapien
gagatagggtgtcactcttgcccaa

SEQ ID NO: 3144137 - DNA, 25 bp, Homo sapien
ttttttcagagatagggtgtcactc

SEQ ID NO: 3144138 - DNA, 25 bp, Homo sapien
ttttcagagatagggtgtcactctt

SEQ ID NO: 3144139 - DNA, 25 bp, Homo sapien
tcagagatagggtgtcactcttgcc

SEQ ID NO: 3144140 - DNA, 25 bp, Homo sapien
aatgcatcggtgacaagagtttgaa

SEQ ID NO: 3144141 - DNA, 25 bp, Homo sapien
catagagagcaacgtaatttgaggg

SEQ ID NO: 3144142 - DNA, 25 bp, Homo sapien
tggccctattgcagtcaccaacgcg

SEQ ID NO: 3144143 - DNA, 25 bp, Homo sapien
cagtaaaagcttgtgattgtaaagc

SEQ ID NO: 3144144 - DNA, 25 bp, Homo sapien
tctaagcactagagcgtccagaaga

SEQ ID NO: 3144145 - DNA, 25 bp, Homo sapien
taatccaatatttgacacggtcccc

SEQ ID NO: 3144146 - DNA, 25 bp, Homo sapien
catgccaagccactagatatgggtt

SEQ ID NO: 3144147 - DNA, 25 bp, Homo sapien
gaatccagtaacagctcgtagcaga

SEQ ID NO: 3144148 - DNA, 25 bp, Homo sapien
ttcccacagaatgaaagtaagctca

SEQ ID NO: 3144149 - DNA, 25 bp, Homo sapien
agctaagttagctatacttaacaac

SEQ ID NO: 3144150 - DNA, 25 bp, Homo sapien
taaatgcaaaatttgaggatagatc

SEQ ID NO: 3144151 - DNA, 25 bp, Homo sapien
ttaaaatcagttgccttgatttcag

SEQ ID NO: 3144152 - DNA, 25 bp, Homo sapien
tttaatatgcatgagttagctaaca

SEQ ID NO: 3144153 - DNA, 25 bp, Homo sapien
gaagaaatgtgtttagctcccataa

SEQ ID NO: 3144154 - DNA, 25 bp, Homo sapien
gctcccataacaattaatcttctct

SEQ ID NO: 3144155 - DNA, 25 bp, Homo sapien
tgctttagtagagcacattcttccc

SEQ ID NO: 3144156 - DNA, 25 bp, Homo sapien
tctcttgcaaattcctgagtcttct

SEQ ID NO: 3144157 - DNA, 25 bp, Homo sapien
ctagatattagcctcaatgtgaggc

SEQ ID NO: 3144158 - DNA, 25 bp, Homo sapien
aatccatgtccacaacagctgtatt

SEQ ID NO: 3144159 - DNA, 25 bp, Homo sapien
caaaaagttaaattcgattctagat

SEQ ID NO: 3144160 - DNA, 25 bp, Homo sapien
gatcattctggaacgaaaaggaccc

SEQ ID NO: 3144161 - DNA, 25 bp, Homo sapien
gggaacatttcaaaccgagatggag

SEQ ID NO: 3144162 - DNA, 25 bp, Homo sapien
tagacccgcattaaggtactcccta

SEQ ID NO: 3144163 - DNA, 25 bp, Homo sapien
tctaaattgcaagtcagccttggga

SEQ ID NO: 3144164 - DNA, 25 bp, Homo sapien
cgtgatcgataaccaacccttctga

SEQ ID NO: 3144165 - DNA, 25 bp, Homo sapien
tttccgaccggtttggctcgatcca

SEQ ID NO: 3144166 - DNA, 25 bp, Homo sapien
gaaatgtgtgttgtagttatgccaa

SEQ ID NO: 3144167 - DNA, 25 bp, Homo sapien
agttatgccaaactttcgagtgagc

SEQ ID NO: 3144168 - DNA, 25 bp, Homo sapien
attgttgacatttgaatatatccat

SEQ ID NO: 3144169 - DNA, 25 bp, Homo sapien
ggattgttgacatttgaatatatcc

SEQ ID NO: 3144170 - DNA, 25 bp, Homo sapien
gattgttgacatttgaatatatcca

SEQ ID NO: 3144171 - DNA, 25 bp, Homo sapien
ggttggcaaaccatccaagcacaga

SEQ ID NO: 3144172 - DNA, 25 bp, Homo sapien
catcatgtagatggccgtggtgtct

SEQ ID NO: 3144173 - DNA, 25 bp, Homo sapien
gatagtcgccatccccatggatagg

SEQ ID NO: 3144174 - DNA, 25 bp, Homo sapien
cagtttaatccagttcagcgcttct

SEQ ID NO: 3144175 - DNA, 25 bp, Homo sapien
ggagaagtcacagggaaactggccc

SEQ ID NO: 3144176 - DNA, 25 bp, Homo sapien
aaactggccctgcacatctggcgtg

SEQ ID NO: 3144177 - DNA, 25 bp, Homo sapien
cataaaataatcctcggcggatggt

SEQ ID NO: 3144178 - DNA, 25 bp, Homo sapien
gaacagattcagtgacaccccagga

SEQ ID NO: 3144179 - DNA, 25 bp, Homo sapien
gtaaccagcaagttgtaaacaccac

SEQ ID NO: 3144180 - DNA, 25 bp, Homo sapien
taactggttgtaaccagcaagttgt

SEQ ID NO: 3144181 - DNA, 25 bp, Homo sapien
tggttgtaaccagcaagttgtaaac

SEQ ID NO: 3144182 - DNA, 25 bp, Homo sapien
tgtaactggttgtaaccagcaagtt

SEQ ID NO: 3144183 - DNA, 25 bp, Homo sapien
tgtggggacgaagccacagactcgg

SEQ ID NO: 3144184 - DNA, 25 bp, Homo sapien
gtggggacgaagccacagactcggg

SEQ ID NO: 3144185 - DNA, 25 bp, Homo sapien
ctgtggggacgaagccacagactcg

SEQ ID NO: 3144186 - DNA, 25 bp, Homo sapien
agtctgttgccagtggcgttccaca

SEQ ID NO: 3144187 - DNA, 25 bp, Homo sapien
tggcgttccacacgtacagatgagg

SEQ ID NO: 3144188 - DNA, 25 bp, Homo sapien
ttccactcggtgcaacagtctgttg

SEQ ID NO: 3144189 - DNA, 25 bp, Homo sapien
cacacgtacagatgaggatcgctga

SEQ ID NO: 3144190 - DNA, 25 bp, Homo sapien
tgcattgagcgggtcgtgttttcag

SEQ ID NO: 3144191 - DNA, 25 bp, Homo sapien
gagcgggtcgtgttttcagcctcac

SEQ ID NO: 3144192 - DNA, 25 bp, Homo sapien
tctgtgcattgagcgggtcgtgttt

SEQ ID NO: 3144193 - DNA, 25 bp, Homo sapien
cattgagcgggtcgtgttttcagcc

SEQ ID NO: 3144194 - DNA, 25 bp, Homo sapien
cagtgggaaggaccgaggcccaatc

SEQ ID NO: 3144195 - DNA, 25 bp, Homo sapien
gcacctgtagtacctcagggcctgt

SEQ ID NO: 3144196 - DNA, 25 bp, Homo sapien
cccaatccagagcaaaccggtagtg

SEQ ID NO: 3144197 - DNA, 25 bp, Homo sapien
ttcaccgcggacaggttgccagtgg

SEQ ID NO: 3144198 - DNA, 25 bp, Homo sapien
gcggagatgccaagcttcagcccct

SEQ ID NO: 3144199 - DNA, 25 bp, Homo sapien
cgcggagatgccaagcttcagcccc

SEQ ID NO: 3144200 - DNA, 25 bp, Homo sapien
ggagatgccaagcttcagcccctca

SEQ ID NO: 3144201 - DNA, 25 bp, Homo sapien
agatgccaagcttcagcccctcact

SEQ ID NO: 3144202 - DNA, 25 bp, Homo sapien
gcaatgtattccctcatggccgcgg

SEQ ID NO: 3144203 - DNA, 25 bp, Homo sapien
gatctcgaactgcaggaagcgctcg

SEQ ID NO: 3144204 - DNA, 25 bp, Homo sapien
tgccagagcggttgtagatgtcact

SEQ ID NO: 3144205 - DNA, 25 bp, Homo sapien
cccgtcggtgcttggaggcaatgta

SEQ ID NO: 3144206 - DNA, 25 bp, Homo sapien
gtccctgtccgagtcgtagcggctg

SEQ ID NO: 3144207 - DNA, 25 bp, Homo sapien
ggatgtccctgtccgagtcgtagcg

SEQ ID NO: 3144208 - DNA, 25 bp, Homo sapien
agtcgtagcggctgccggccagctg

SEQ ID NO: 3144209 - DNA, 25 bp, Homo sapien
ctggatgtccctgtccgagtcgtag

SEQ ID NO: 3144210 - DNA, 25 bp, Homo sapien
tgccactggcggtgatgtaaatgtc

SEQ ID NO: 3144211 - DNA, 25 bp, Homo sapien
ctccagagcctggtcgtcgatgcca

SEQ ID NO: 3144212 - DNA, 25 bp, Homo sapien
tccatgtcgccgtagttcctccgga

SEQ ID NO: 3144213 - DNA, 25 bp, Homo sapien
taggtagtacttccggagccggtca

SEQ ID NO: 3144214 - DNA, 25 bp, Homo sapien
tcaggtaacaggaatctcgctctgc

SEQ ID NO: 3144215 - DNA, 25 bp, Homo sapien
gtaacaggaatctcgctctgccctg

SEQ ID NO: 3144216 - DNA, 25 bp, Homo sapien
caggtaacaggaatctcgctctgcc

SEQ ID NO: 3144217 - DNA, 25 bp, Homo sapien
ctgtgtctgaaggggccccgccctt

SEQ ID NO: 3144218 - DNA, 25 bp, Homo sapien
gcctatttggcctgattgtgaacct

SEQ ID NO: 3144219 - DNA, 25 bp, Homo sapien
ctgtcgctcgcttaagctaccatga

SEQ ID NO: 3144220 - DNA, 25 bp, Homo sapien
gggtcacaagcagaaaaacgttgcc

SEQ ID NO: 3144221 - DNA, 25 bp, Homo sapien
cttggtgcagcccaggaatcacagt

SEQ ID NO: 3144222 - DNA, 25 bp, Homo sapien
agtttgaatgcataatagcctttga

SEQ ID NO: 3144223 - DNA, 25 bp, Homo sapien
gttctcaaaagggaagcccctgctg

SEQ ID NO: 3144224 - DNA, 25 bp, Homo sapien
agccagtttgaatgcataatagcct

SEQ ID NO: 3144225 - DNA, 25 bp, Homo sapien
cctttgattctgactttatcaatca

SEQ ID NO: 3144226 - DNA, 25 bp, Homo sapien
cccaggaatatcagtggtttcttct

SEQ ID NO: 3144227 - DNA, 25 bp, Homo sapien
tggagaagaagcaacaacccaggaa

SEQ ID NO: 3144228 - DNA, 25 bp, Homo sapien
cctttctttaatggtatgtgttgta

SEQ ID NO: 3144229 - DNA, 25 bp, Homo sapien
aatggcaattgataagagtagaacc

SEQ ID NO: 3144230 - DNA, 25 bp, Homo sapien
cacaagtagctattggtagagatga

SEQ ID NO: 3144231 - DNA, 25 bp, Homo sapien
cctgtaagttaccagcatatggaac

SEQ ID NO: 3144232 - DNA, 25 bp, Homo sapien
tgtcatcaccttggttacagctgta

SEQ ID NO: 3144233 - DNA, 25 bp, Homo sapien
catagcttactgtcaggatgaagcc

SEQ ID NO: 3144234 - DNA, 25 bp, Homo sapien
tagaaccaccctgacctaaaggaga

SEQ ID NO: 3144235 - DNA, 25 bp, Homo sapien
cccaagcccttgatgttaaagagag

SEQ ID NO: 3144236 - DNA, 25 bp, Homo sapien
gaattgactagttgtatgcgtgacc

SEQ ID NO: 3144237 - DNA, 25 bp, Homo sapien
tgagttgcccagttgacattaaaga

SEQ ID NO: 3144238 - DNA, 25 bp, Homo sapien
aatatcacaagtaggtcttaagtgt

SEQ ID NO: 3144239 - DNA, 25 bp, Homo sapien
tatcacaagtaggtcttaagtgtca

SEQ ID NO: 3144240 - DNA, 25 bp, Homo sapien
taaatatcacaagtaggtcttaagt

SEQ ID NO: 3144241 - DNA, 25 bp, Homo sapien
atatcacaagtaggtcttaagtgtc

SEQ ID NO: 3144242 - DNA, 25 bp, Homo sapien
tcacaagtaggtcttaagtgtcatc

SEQ ID NO: 3144243 - DNA, 25 bp, Homo sapien
aaatatcacaagtaggtcttaagtg

SEQ ID NO: 3144244 - DNA, 25 bp, Homo sapien
gatgacacttaagacctacttgtga

SEQ ID NO: 3144245 - DNA, 25 bp, Homo sapien
cacttaagacctacttgtgatattt

SEQ ID NO: 3144246 - DNA, 25 bp, Homo sapien
tgacacttaagacctacttgtgata

SEQ ID NO: 3144247 - DNA, 25 bp, Homo sapien
atgacacttaagacctacttgtgat

SEQ ID NO: 3144248 - DNA, 25 bp, Homo sapien
acttaagacctacttgtgatattta

SEQ ID NO: 3144249 - DNA, 25 bp, Homo sapien
gacacttaagacctacttgtgatat

SEQ ID NO: 3144250 - DNA, 25 bp, Homo sapien
gtttttaactgttgtggcttgctga

SEQ ID NO: 3144251 - DNA, 25 bp, Homo sapien
cagcctgctgaacagttcctttttc

SEQ ID NO: 3144252 - DNA, 25 bp, Homo sapien
cctttttcagagacatagataccat

SEQ ID NO: 3144253 - DNA, 25 bp, Homo sapien
agatcttattcatcagcctgctgaa

SEQ ID NO: 3144254 - DNA, 25 bp, Homo sapien
tagataccatccaaaaatttcctga

SEQ ID NO: 3144255 - DNA, 25 bp, Homo sapien
gttgtggcttgctgaatcaaagccg

SEQ ID NO: 3144256 - DNA, 25 bp, Homo sapien
gaaaaaggaactgttcagcaggctg

SEQ ID NO: 3144257 - DNA, 25 bp, Homo sapien
gctttgattcagcaagccacaacag

SEQ ID NO: 3144258 - DNA, 25 bp, Homo sapien
tcagcaagccacaacagttaaaaac

SEQ ID NO: 3144259 - DNA, 25 bp, Homo sapien
ttcagcaggctgatgaataagatct

SEQ ID NO: 3144260 - DNA, 25 bp, Homo sapien
cagttaaaaacaaggatatcaggaa

SEQ ID NO: 3144261 - DNA, 25 bp, Homo sapien
tcaggaaatttttggatggtatcta

SEQ ID NO: 3144262 - DNA, 25 bp, Homo sapien
aacaagctcaatgtcatttccttca

SEQ ID NO: 3144263 - DNA, 25 bp, Homo sapien
gcttgagatactgaacaagcaacac

SEQ ID NO: 3144264 - DNA, 25 bp, Homo sapien
tctgggcttgagatactgaacaagc

SEQ ID NO: 3144265 - DNA, 25 bp, Homo sapien
ttctgggcttgagatactgaacaag

SEQ ID NO: 3144266 - DNA, 25 bp, Homo sapien
caaggattaattcatctttctgggc

SEQ ID NO: 3144267 - DNA, 25 bp, Homo sapien
gctcaatgtcatttccttcaaggat

SEQ ID NO: 3144268 - DNA, 25 bp, Homo sapien
atccttgaaggaaatgacattgagc

SEQ ID NO: 3144269 - DNA, 25 bp, Homo sapien
gaaagatgaattaatccttgaagga

SEQ ID NO: 3144270 - DNA, 25 bp, Homo sapien
tgaaggaaatgacattgagcttgtt

SEQ ID NO: 3144271 - DNA, 25 bp, Homo sapien
gcttgttcagtatctcaagcccaga

SEQ ID NO: 3144272 - DNA, 25 bp, Homo sapien
gtgttgcttgttcagtatctcaagc

SEQ ID NO: 3144273 - DNA, 25 bp, Homo sapien
caagcccagaaagatgaattaatcc

SEQ ID NO: 3144274 - DNA, 25 bp, Homo sapien
tataaacccttaagtagcaccaaca

SEQ ID NO: 3144275 - DNA, 25 bp, Homo sapien
cttaattctgtctgagggtatgcac

SEQ ID NO: 3144276 - DNA, 25 bp, Homo sapien
caaatctggttttactcagcacaaa

SEQ ID NO: 3144277 - DNA, 25 bp, Homo sapien
tgagagctgaaatttacgctaggct

SEQ ID NO: 3144278 - DNA, 25 bp, Homo sapien
gctaggctattaaccactactcatg

SEQ ID NO: 3144279 - DNA, 25 bp, Homo sapien
cactgcaagctactccaatgtatca

SEQ ID NO: 3144280 - DNA, 25 bp, Homo sapien
gtgcataccctcagacagaattaag

SEQ ID NO: 3144281 - DNA, 25 bp, Homo sapien
ctacatgagtagtggttaatagcct

SEQ ID NO: 3144282 - DNA, 25 bp, Homo sapien
acaacaatgcatgcgtaatacatag

SEQ ID NO: 3144283 - DNA, 25 bp, Homo sapien
taatagcctagcgtaaatttcagct

SEQ ID NO: 3144284 - DNA, 25 bp, Homo sapien
gatgtttcaacacatgcatattctg

SEQ ID NO: 3144285 - DNA, 25 bp, Homo sapien
gatacattggagtagcttgcagtgg

SEQ ID NO: 3144286 - DNA, 25 bp, Homo sapien
ttcggatttcaacaagagacccatt

SEQ ID NO: 3144287 - DNA, 25 bp, Homo sapien
tcggatttcaacaagagacccattc

SEQ ID NO: 3144288 - DNA, 25 bp, Homo sapien
gatttcaacaagagacccattctcc

SEQ ID NO: 3144289 - DNA, 25 bp, Homo sapien
ttcaacaagagacccattctcctgg

SEQ ID NO: 3144290 - DNA, 25 bp, Homo sapien
cggatttcaacaagagacccattct

SEQ ID NO: 3144291 - DNA, 25 bp, Homo sapien
atttcggatttcaacaagagaccca

SEQ ID NO: 3144292 - DNA, 25 bp, Homo sapien
tgggtctcttgttgaaatccgaaat

SEQ ID NO: 3144293 - DNA, 25 bp, Homo sapien
ccaggagaatgggtctcttgttgaa

SEQ ID NO: 3144294 - DNA, 25 bp, Homo sapien
gaatgggtctcttgttgaaatccga

SEQ ID NO: 3144295 - DNA, 25 bp, Homo sapien
aatgggtctcttgttgaaatccgaa

SEQ ID NO: 3144296 - DNA, 25 bp, Homo sapien
gagaatgggtctcttgttgaaatcc

SEQ ID NO: 3144297 - DNA, 25 bp, Homo sapien
agaatgggtctcttgttgaaatccg

SEQ ID NO: 3144298 - DNA, 25 bp, Homo sapien
taacacccttgatcatgttctgtac

SEQ ID NO: 3144299 - DNA, 25 bp, Homo sapien
gtaacacccttgatcatgttctgta

SEQ ID NO: 3144300 - DNA, 25 bp, Homo sapien
gtacagaacatgatcaagggtgtta

SEQ ID NO: 3144301 - DNA, 25 bp, Homo sapien
tacagaacatgatcaagggtgttac

SEQ ID NO: 3144302 - DNA, 25 bp, Homo sapien
ccttcacgataactgtgcgtccctt

SEQ ID NO: 3144303 - DNA, 25 bp, Homo sapien
gggcccttcacgataactgtgcgtc

SEQ ID NO: 3144304 - DNA, 25 bp, Homo sapien
cacgataactgtgcgtcccttcaga

SEQ ID NO: 3144305 - DNA, 25 bp, Homo sapien
gaaggctgagttctacattgatgtg

SEQ ID NO: 3144306 - DNA, 25 bp, Homo sapien
ccaagaaggctgagttctacattga

SEQ ID NO: 3144307 - DNA, 25 bp, Homo sapien
gataactgtgcgtcccttcagagta

SEQ ID NO: 3144308 - DNA, 25 bp, Homo sapien
tcaatgtagaactcagccttcttgg

SEQ ID NO: 3144309 - DNA, 25 bp, Homo sapien
gaagggacgcacagttatcgtgaag

SEQ ID NO: 3144310 - DNA, 25 bp, Homo sapien
cacatcaatgtagaactcagccttc

SEQ ID NO: 3144311 - DNA, 25 bp, Homo sapien
tactctgaagggacgcacagttatc

SEQ ID NO: 3144312 - DNA, 25 bp, Homo sapien
cacagttatcgtgaagggccccaga

SEQ ID NO: 3144313 - DNA, 25 bp, Homo sapien
gacgcacagttatcgtgaagggccc

SEQ ID NO: 3144314 - DNA, 25 bp, Homo sapien
tcgacagtctgattgctgagaatag

SEQ ID NO: 3144315 - DNA, 25 bp, Homo sapien
gacagtctgattgctgagaatagtc

SEQ ID NO: 3144316 - DNA, 25 bp, Homo sapien
ctgattgctgagaatagtcttcatt

SEQ ID NO: 3144317 - DNA, 25 bp, Homo sapien
ggaatgtcgacagtctgattgctga

SEQ ID NO: 3144318 - DNA, 25 bp, Homo sapien
attttctggaatgtcgacagtctga

SEQ ID NO: 3144319 - DNA, 25 bp, Homo sapien
tctggaatgtcgacagtctgattgc

SEQ ID NO: 3144320 - DNA, 25 bp, Homo sapien
tcagcaatcagactgtcgacattcc

SEQ ID NO: 3144321 - DNA, 25 bp, Homo sapien
tattctcagcaatcagactgtcgac

SEQ ID NO: 3144322 - DNA, 25 bp, Homo sapien
actattctcagcaatcagactgtcg

SEQ ID NO: 3144323 - DNA, 25 bp, Homo sapien
aatgaagactattctcagcaatcag

SEQ ID NO: 3144324 - DNA, 25 bp, Homo sapien
tcagactgtcgacattccagaaaat

SEQ ID NO: 3144325 - DNA, 25 bp, Homo sapien
gcaatcagactgtcgacattccaga

SEQ ID NO: 3144326 - DNA, 25 bp, Homo sapien
tacctcgcagtagacgcagcaaaga

SEQ ID NO: 3144327 - DNA, 25 bp, Homo sapien
caaccctggaagtcctatgcgggcg

SEQ ID NO: 3144328 - DNA, 25 bp, Homo sapien
taaatggagcgacgtaatttcgacc

SEQ ID NO: 3144329 - DNA, 25 bp, Homo sapien
tgcactgcgctagtcctaaagagga

SEQ ID NO: 3144330 - DNA, 25 bp, Homo sapien
cagagcagatggtttcagattccca

SEQ ID NO: 3144331 - DNA, 25 bp, Homo sapien
tgcgcgacgcacgtaaggctaaagc

SEQ ID NO: 3144332 - DNA, 25 bp, Homo sapien
tctttaggactagcgcagtgcaggg

SEQ ID NO: 3144333 - DNA, 25 bp, Homo sapien
gcaggccccttacgcgatacaagta

SEQ ID NO: 3144334 - DNA, 25 bp, Homo sapien
catttatgacaagcagccaagctgc

SEQ ID NO: 3144335 - DNA, 25 bp, Homo sapien
gctttagccttacgtgcgtcgcgca

SEQ ID NO: 3144336 - DNA, 25 bp, Homo sapien
gggaatctgaaaccatctgctctgg

SEQ ID NO: 3144337 - DNA, 25 bp, Homo sapien
tgagggatcgctaactcccgggaaa

SEQ ID NO: 3144338 - DNA, 25 bp, Homo sapien
tacgctgcggggatgcagcccgcac

SEQ ID NO: 3144339 - DNA, 25 bp, Homo sapien
tgtctctacgctgcggggatgcagc

SEQ ID NO: 3144340 - DNA, 25 bp, Homo sapien
ggatgcagcccgcaccctggggccc

SEQ ID NO: 3144341 - DNA, 25 bp, Homo sapien
tgcggggatgcagcccgcaccctgg

SEQ ID NO: 3144342 - DNA, 25 bp, Homo sapien
atgtctctacgctgcggggatgcag

SEQ ID NO: 3144343 - DNA, 25 bp, Homo sapien
gctgcggggatgcagcccgcaccct

SEQ ID NO: 3144344 - DNA, 25 bp, Homo sapien
ctgcatccccgcagcgtagagacat

SEQ ID NO: 3144345 - DNA, 25 bp, Homo sapien
tgcgggctgcatccccgcagcgtag

SEQ ID NO: 3144346 - DNA, 25 bp, Homo sapien
gtgcgggctgcatccccgcagcgta

SEQ ID NO: 3144347 - DNA, 25 bp, Homo sapien
gggccccagggtgcgggctgcatcc

SEQ ID NO: 3144348 - DNA, 25 bp, Homo sapien
agggtgcgggctgcatccccgcagc

SEQ ID NO: 3144349 - DNA, 25 bp, Homo sapien
gctgcatccccgcagcgtagagaca

SEQ ID NO: 3144350 - DNA, 25 bp, Homo sapien
ttaacggtctgactgggctgcaaaa

SEQ ID NO: 3144351 - DNA, 25 bp, Homo sapien
ttttttatctggcaaggagcttaac

SEQ ID NO: 3144352 - DNA, 25 bp, Homo sapien
tacaaaatcttgaaggtctggtcca

SEQ ID NO: 3144353 - DNA, 25 bp, Homo sapien
tctggtccattctgtaggagttcct

SEQ ID NO: 3144354 - DNA, 25 bp, Homo sapien
ctttagccatggaggtagtcttaac

SEQ ID NO: 3144355 - DNA, 25 bp, Homo sapien
tgtatggagatttaaattccgcaaa

SEQ ID NO: 3144356 - DNA, 25 bp, Homo sapien
ctgtctttagccatggaggtagtct

SEQ ID NO: 3144357 - DNA, 25 bp, Homo sapien
tggagatttaaattccgcaaagtat

SEQ ID NO: 3144358 - DNA, 25 bp, Homo sapien
gagtatggtttatatatggcattgc

SEQ ID NO: 3144359 - DNA, 25 bp, Homo sapien
ctgaaagattatatactgaagagtt

SEQ ID NO: 3144360 - DNA, 25 bp, Homo sapien
aaactttacgaatgtatatacttca

SEQ ID NO: 3144361 - DNA, 25 bp, Homo sapien
cgtatgtgacataccttcatattta

SEQ ID NO: 3144362 - DNA, 25 bp, Homo sapien
aagacattcactattcaaaaatgct

SEQ ID NO: 3144363 - DNA, 25 bp, Homo sapien
agacattcactattcaaaaatgctg

SEQ ID NO: 3144364 - DNA, 25 bp, Homo sapien
tgggacatcgagcttcctcacatac

SEQ ID NO: 3144365 - DNA, 25 bp, Homo sapien
tgtggcggtggcatattctccacct

SEQ ID NO: 3144366 - DNA, 25 bp, Homo sapien
tccaatattgggacatcgagcttcc

SEQ ID NO: 3144367 - DNA, 25 bp, Homo sapien
ccaacactctccaatattgggacat

SEQ ID NO: 3144368 - DNA, 25 bp, Homo sapien
tagactaaagccatagaggttgagg

SEQ ID NO: 3144369 - DNA, 25 bp, Homo sapien
ctagactaaagccatagaggttgag

SEQ ID NO: 3144370 - DNA, 25 bp, Homo sapien
agactaaagccatagaggttgaggc

SEQ ID NO: 3144371 - DNA, 25 bp, Homo sapien
tacaacaggttggattattccatca

SEQ ID NO: 3144372 - DNA, 25 bp, Homo sapien
gattattccatcaggttttttctta

SEQ ID NO: 3144373 - DNA, 25 bp, Homo sapien
caggttggattattccatcaggttt

SEQ ID NO: 3144374 - DNA, 25 bp, Homo sapien
gagattacaacaggttggattattc

SEQ ID NO: 3144375 - DNA, 25 bp, Homo sapien
tgaaagaaccaataatagatttatt

SEQ ID NO: 3144376 - DNA, 25 bp, Homo sapien
agaaccaataatagatttattcaga

SEQ ID NO: 3144377 - DNA, 25 bp, Homo sapien
accaataatagatttattcagagaa

SEQ ID NO: 3144378 - DNA, 25 bp, Homo sapien
aagaaccaataatagatttattcag

SEQ ID NO: 3144379 - DNA, 25 bp, Homo sapien
aagttgggtatacaggcaagtgcca

SEQ ID NO: 3144380 - DNA, 25 bp, Homo sapien
ctctgtagtctaggctgggacgcag

SEQ ID NO: 3144381 - DNA, 25 bp, Homo sapien
cagatcaatgtacaggtctctatgg

SEQ ID NO: 3144382 - DNA, 25 bp, Homo sapien
taggagaggtatctcaaggcagcac

SEQ ID NO: 3144383 - DNA, 25 bp, Homo sapien
ttaacagaacaaaatctgcaacctc

SEQ ID NO: 3144384 - DNA, 25 bp, Homo sapien
cttaacagaacaaaatctgcaacct

SEQ ID NO: 3144385 - DNA, 25 bp, Homo sapien
tgcaattgcctttgcagtattgtag

SEQ ID NO: 3144386 - DNA, 25 bp, Homo sapien
gatgtcaggacaacataatccagac

SEQ ID NO: 3144387 - DNA, 25 bp, Homo sapien
agtattgtagggctcactggcatcc

SEQ ID NO: 3144388 - DNA, 25 bp, Homo sapien
gacaacataatccagaccccattct

SEQ ID NO: 3144389 - DNA, 25 bp, Homo sapien
gatacggtctttgcaatgtgttcag

SEQ ID NO: 3144390 - DNA, 25 bp, Homo sapien
aatatgatacggtctttgcaatgtg

SEQ ID NO: 3144391 - DNA, 25 bp, Homo sapien
cctttaaatatgatacggtctttgc

SEQ ID NO: 3144392 - DNA, 25 bp, Homo sapien
tacggtctttgcaatgtgttcagct

SEQ ID NO: 3144393 - DNA, 25 bp, Homo sapien
cttgtaaaataaacctagtggattg

SEQ ID NO: 3144394 - DNA, 25 bp, Homo sapien
agcttgtaaaataaacctagtggat

SEQ ID NO: 3144395 - DNA, 25 bp, Homo sapien
ttgtaaaataaacctagtggattgc

SEQ ID NO: 3144396 - DNA, 25 bp, Homo sapien
cctcgaaaatcaggagtaagacact

SEQ ID NO: 3144397 - DNA, 25 bp, Homo sapien
tattgctttgagatcacctcgaaaa

SEQ ID NO: 3144398 - DNA, 25 bp, Homo sapien
gcatacacatctaatcctgacagag

SEQ ID NO: 3144399 - DNA, 25 bp, Homo sapien
cgggactgtttctacattatgtgca

SEQ ID NO: 3144400 - DNA, 25 bp, Homo sapien
ttatttgtgggtattaaaacacaca

SEQ ID NO: 3144401 - DNA, 25 bp, Homo sapien
tgagttactaacatcttaatgtttg

SEQ ID NO: 3144402 - DNA, 25 bp, Homo sapien
aacactaaggtgttagtaactgata

SEQ ID NO: 3144403 - DNA, 25 bp, Homo sapien
cacagtaacttagtaatatgagtta

SEQ ID NO: 3144404 - DNA, 25 bp, Homo sapien
aagctgaacccacatgtcagagggt

SEQ ID NO: 3144405 - DNA, 25 bp, Homo sapien
gaacaggctgtgtcctagacttcaa

SEQ ID NO: 3144406 - DNA, 25 bp, Homo sapien
tgaaaccagggaaactggcacccac

SEQ ID NO: 3144407 - DNA, 25 bp, Homo sapien
gagagtctccatactgaacaaagaa

SEQ ID NO: 3144408 - DNA, 25 bp, Homo sapien
aagcaacctgaaagaccagagaagt

SEQ ID NO: 3144409 - DNA, 25 bp, Homo sapien
caagtacatagttatgcaagcaacc

SEQ ID NO: 3144410 - DNA, 25 bp, Homo sapien
gactgttgtcagcaagaattacaag

SEQ ID NO: 3144411 - DNA, 25 bp, Homo sapien
tcacatagttcaaaggtagcattta

SEQ ID NO: 3144412 - DNA, 25 bp, Homo sapien
cttggcatgtttcagtacacgtagg

SEQ ID NO: 3144413 - DNA, 25 bp, Homo sapien
caaaattggcccgaggatcacgaac

SEQ ID NO: 3144414 - DNA, 25 bp, Homo sapien
tcgcctaaacccaacattatagatg

SEQ ID NO: 3144415 - DNA, 25 bp, Homo sapien
tacacgtagggactgatcaaaattg

SEQ ID NO: 3144416 - DNA, 25 bp, Homo sapien
gctgccatctataaccatatacttt

SEQ ID NO: 3144417 - DNA, 25 bp, Homo sapien
atgctgccatctataaccatatact

SEQ ID NO: 3144418 - DNA, 25 bp, Homo sapien
catgctgccatctataaccatatac

SEQ ID NO: 3144419 - DNA, 25 bp, Homo sapien
tgctgccatctataaccatatactt

SEQ ID NO: 3144420 - DNA, 25 bp, Homo sapien
tattgtcctaaagtcaagcagtcta

SEQ ID NO: 3144421 - DNA, 25 bp, Homo sapien
ctgcatatattgtcctaaagtcaag

SEQ ID NO: 3144422 - DNA, 25 bp, Homo sapien
aaagtcaagcagtctacatctgcct

SEQ ID NO: 3144423 - DNA, 25 bp, Homo sapien
gtcctaaagtcaagcagtctacatc

SEQ ID NO: 3144424 - DNA, 25 bp, Homo sapien
ttatatgaagaacgcaccaaagggc

SEQ ID NO: 3144425 - DNA, 25 bp, Homo sapien
tttcaggagtaatatattcttcaac

SEQ ID NO: 3144426 - DNA, 25 bp, Homo sapien
tgaagaacgcaccaaagggccactt

SEQ ID NO: 3144427 - DNA, 25 bp, Homo sapien
ctgctttatatgaagaacgcaccaa

SEQ ID NO: 3144428 - DNA, 25 bp, Homo sapien
cccagcaactcagccacccagctaa

SEQ ID NO: 3144429 - DNA, 25 bp, Homo sapien
gggtagctagaactagaggtgccca

SEQ ID NO: 3144430 - DNA, 25 bp, Homo sapien
caccaccacccagcaactcagccac

SEQ ID NO: 3144431 - DNA, 25 bp, Homo sapien
cctgggtagctagaactagaggtgc

SEQ ID NO: 3144432 - DNA, 25 bp, Homo sapien
tatttattggcacttctctcttctc

SEQ ID NO: 3144433 - DNA, 25 bp, Homo sapien
taaagtaaataacagtgagacaact

SEQ ID NO: 3144434 - DNA, 25 bp, Homo sapien
tctaacctaaatatcccctattatc

SEQ ID NO: 3144435 - DNA, 25 bp, Homo sapien
taaatatcccctattatctttggcc

SEQ ID NO: 3144436 - DNA, 25 bp, Homo sapien
tccaggcattctggcaccacctctg

SEQ ID NO: 3144437 - DNA, 25 bp, Homo sapien
cacctctgttattaactggaatcaa

SEQ ID NO: 3144438 - DNA, 25 bp, Homo sapien
gcattctggcaccacctctgttatt

SEQ ID NO: 3144439 - DNA, 25 bp, Homo sapien
ggcaccacctctgttattaactgga

SEQ ID NO: 3144440 - DNA, 25 bp, Homo sapien
gcaactgtttaattgggacaaagaa

SEQ ID NO: 3144441 - DNA, 25 bp, Homo sapien
actgtttaattgggacaaagaagat

SEQ ID NO: 3144442 - DNA, 25 bp, Homo sapien
tgccattggcctacactgtgcaaag

SEQ ID NO: 3144443 - DNA, 25 bp, Homo sapien
ccattggcctacactgtgcaaaggg

SEQ ID NO: 3144444 - DNA, 25 bp, Homo sapien
ctgccattggcctacactgtgcaaa

SEQ ID NO: 3144445 - DNA, 25 bp, Homo sapien
gccattggcctacactgtgcaaagg

SEQ ID NO: 3144446 - DNA, 25 bp, Homo sapien
ggcgggagcgcggcctattcattta

SEQ ID NO: 3144447 - DNA, 25 bp, Homo sapien
cgggagcgcggcctattcatttatt

SEQ ID NO: 3144448 - DNA, 25 bp, Homo sapien
gagcgcggcctattcatttattttt

SEQ ID NO: 3144449 - DNA, 25 bp, Homo sapien
gggcgtcggcgcatcctccctgggc

SEQ ID NO: 3144450 - DNA, 25 bp, Homo sapien
gggacgtggacggagggtcctgatg

SEQ ID NO: 3144451 - DNA, 25 bp, Homo sapien
ggacggagggtcctgatgacagagg

SEQ ID NO: 3144452 - DNA, 25 bp, Homo sapien
ctctgacgctggccgcacaggggac

SEQ ID NO: 3144453 - DNA, 25 bp, Homo sapien
cgcacaggggacgtggacggagggt

SEQ ID NO: 3144454 - DNA, 25 bp, Homo sapien
catagtttggcttcacgggcgtagg

SEQ ID NO: 3144455 - DNA, 25 bp, Homo sapien
gctctcgttgcctcggtctcgggct

SEQ ID NO: 3144456 - DNA, 25 bp, Homo sapien
ttcacgggcgtaggcttgctctgag

SEQ ID NO: 3144457 - DNA, 25 bp, Homo sapien
cggctgtgctctcgttgcctcggtc

SEQ ID NO: 3144458 - DNA, 25 bp, Homo sapien
tctccattcgggctgaatttcacgg

SEQ ID NO: 3144459 - DNA, 25 bp, Homo sapien
tccattcgggctgaatttcacggag

SEQ ID NO: 3144460 - DNA, 25 bp, Homo sapien
ttggtgtggccagcaagggtgaact

SEQ ID NO: 3144461 - DNA, 25 bp, Homo sapien
agccactctccattcgggctgaatt

SEQ ID NO: 3144462 - DNA, 25 bp, Homo sapien
catcatatgagtcccccaaatttta

SEQ ID NO: 3144463 - DNA, 25 bp, Homo sapien
ttaatgagtttatcagcagatgaac

SEQ ID NO: 3144464 - DNA, 25 bp, Homo sapien
atcatatgagtcccccaaattttaa

SEQ ID NO: 3144465 - DNA, 25 bp, Homo sapien
gttagaatctgacgaccaggctgtg

SEQ ID NO: 3144466 - DNA, 25 bp, Homo sapien
tagaatctgacgaccaggctgtgac

SEQ ID NO: 3144467 - DNA, 25 bp, Homo sapien
caaaaaggttagaatctgacgacca

SEQ ID NO: 3144468 - DNA, 25 bp, Homo sapien
aaaggttagaatctgacgaccaggc

SEQ ID NO: 3144469 - DNA, 25 bp, Homo sapien
ttcagacactttcccgagctcacgt

SEQ ID NO: 3144470 - DNA, 25 bp, Homo sapien
ctcacgtcccgtatcttcaaggttt

SEQ ID NO: 3144471 - DNA, 25 bp, Homo sapien
tttcagacactttcccgagctcacg

SEQ ID NO: 3144472 - DNA, 25 bp, Homo sapien
gagctcacgtcccgtatcttcaagg

SEQ ID NO: 3144473 - DNA, 25 bp, Homo sapien
tcatcaaaggatcctgagacagtaa

SEQ ID NO: 3144474 - DNA, 25 bp, Homo sapien
caaaggatcctgagacagtaaggct

SEQ ID NO: 3144475 - DNA, 25 bp, Homo sapien
tcaaaggatcctgagacagtaaggc

SEQ ID NO: 3144476 - DNA, 25 bp, Homo sapien
ctttcatcaaaggatcctgagacag

SEQ ID NO: 3144477 - DNA, 25 bp, Homo sapien
tccctgttttcacaacccatatcct

SEQ ID NO: 3144478 - DNA, 25 bp, Homo sapien
ttccctgttttcacaacccatatcc

SEQ ID NO: 3144479 - DNA, 25 bp, Homo sapien
cctgttttcacaacccatatcctca

SEQ ID NO: 3144480 - DNA, 25 bp, Homo sapien
ctgttttcacaacccatatcctcac

SEQ ID NO: 3144481 - DNA, 25 bp, Homo sapien
catcacgattaaaatgaatggccga

SEQ ID NO: 3144482 - DNA, 25 bp, Homo sapien
gagtgagctagcagtcttgtggcac

SEQ ID NO: 3144483 - DNA, 25 bp, Homo sapien
gctacttgaaactatcaagaatcca

SEQ ID NO: 3144484 - DNA, 25 bp, Homo sapien
tcatcatcagtgagcgttttcaggc

SEQ ID NO: 3144485 - DNA, 25 bp, Homo sapien
gcgtggcagccacgatgtatccacc

SEQ ID NO: 3144486 - DNA, 25 bp, Homo sapien
acgatgtatccacccttcggggaga

SEQ ID NO: 3144487 - DNA, 25 bp, Homo sapien
gcagccacgatgtatccacccttcg

SEQ ID NO: 3144488 - DNA, 25 bp, Homo sapien
agccacgatgtatccacccttcggg

SEQ ID NO: 3144489 - DNA, 25 bp, Homo sapien
tctcgttcttgtggccagtgtatgt

SEQ ID NO: 3144490 - DNA, 25 bp, Homo sapien
ttgtcattttctagcgcggcagagg

SEQ ID NO: 3144491 - DNA, 25 bp, Homo sapien
ttcccgccagtaacagagaaattag

SEQ ID NO: 3144492 - DNA, 25 bp, Homo sapien
taaagaaggttatcctccgagccag

SEQ ID NO: 3144493 - DNA, 25 bp, Homo sapien
tagaactttccggtggtccacactc

SEQ ID NO: 3144494 - DNA, 25 bp, Homo sapien
tggtctatcgcatgtgggagcaaag

SEQ ID NO: 3144495 - DNA, 25 bp, Homo sapien
gacatcatgtttcttgccaatccgg

SEQ ID NO: 3144496 - DNA, 25 bp, Homo sapien
aaaggaggctcaaatcaggcccggt

SEQ ID NO: 3144497 - DNA, 25 bp, Homo sapien
tgcagttcaatgagaagagggagac

SEQ ID NO: 3144498 - DNA, 25 bp, Homo sapien
cagtcaccccaaatatggttaaaag

SEQ ID NO: 3144499 - DNA, 25 bp, Homo sapien
aacagcctttacatgtatggtctgg

SEQ ID NO: 3144500 - DNA, 25 bp, Homo sapien
ttgcattaaacatcccaggtctcat

SEQ ID NO: 3144501 - DNA, 25 bp, Homo sapien
gaaagataatcatgttggttttaat

SEQ ID NO: 3144502 - DNA, 25 bp, Homo sapien
acgcctggcccatgaaccaagtgtt

SEQ ID NO: 3144503 - DNA, 25 bp, Homo sapien
gcatatctggtaattatgaatctag

SEQ ID NO: 3144504 - DNA, 25 bp, Homo sapien
catcagatttatactagctatatgg

SEQ ID NO: 3144505 - DNA, 25 bp, Homo sapien
ttcctgacttggatgagatttccct

SEQ ID NO: 3144506 - DNA, 25 bp, Homo sapien
cacaggaagcggttctctcgttggg

SEQ ID NO: 3144507 - DNA, 25 bp, Homo sapien
gccgcagagtcgtagtcttttgttt

SEQ ID NO: 3144508 - DNA, 25 bp, Homo sapien
gggacctcattttggccgcagagtc

SEQ ID NO: 3144509 - DNA, 25 bp, Homo sapien
tctgactaaaccctgggttgccggc

SEQ ID NO: 3144510 - DNA, 25 bp, Homo sapien
actggtccagtcatgaggaactcag

SEQ ID NO: 3144511 - DNA, 25 bp, Homo sapien
agatccaggagaccgaaacccgagg

SEQ ID NO: 3144512 - DNA, 25 bp, Homo sapien
acgggaggcgcctctttcccagaag

SEQ ID NO: 3144513 - DNA, 25 bp, Homo sapien
cagacatcccaaatcccggattggg

SEQ ID NO: 3144514 - DNA, 25 bp, Homo sapien
acgcacagacatcccaaatcccgga

SEQ ID NO: 3144515 - DNA, 25 bp, Homo sapien
tcccaaatcccggattgggcctgag

SEQ ID NO: 3144516 - DNA, 25 bp, Homo sapien
gacatcccaaatcccggattgggcc

SEQ ID NO: 3144517 - DNA, 25 bp, Homo sapien
tcaaccactttcttaaagtcaccat

SEQ ID NO: 3144518 - DNA, 25 bp, Homo sapien
cacattcaaccactttcttaaagtc

SEQ ID NO: 3144519 - DNA, 25 bp, Homo sapien
caaccactttcttaaagtcaccatc

SEQ ID NO: 3144520 - DNA, 25 bp, Homo sapien
tcatccacattcaaccactttctta

SEQ ID NO: 3144521 - DNA, 25 bp, Homo sapien
aacaataccttactatgactggctc

SEQ ID NO: 3144522 - DNA, 25 bp, Homo sapien
caaacaataccttactatgactggc

SEQ ID NO: 3144523 - DNA, 25 bp, Homo sapien
cccaaacaataccttactatgactg

SEQ ID NO: 3144524 - DNA, 25 bp, Homo sapien
aataccttactatgactggctctgt

SEQ ID NO: 3144525 - DNA, 25 bp, Homo sapien
agctactgtgaaagcagagttggag

SEQ ID NO: 3144526 - DNA, 25 bp, Homo sapien
actgtgaaagcagagttggagggtc

SEQ ID NO: 3144527 - DNA, 25 bp, Homo sapien
cacagctactgtgaaagcagagttg

SEQ ID NO: 3144528 - DNA, 25 bp, Homo sapien
tactgtgaaagcagagttggagggt

SEQ ID NO: 3144529 - DNA, 25 bp, Homo sapien
tggggaaagactcacaatcataggg

SEQ ID NO: 3144530 - DNA, 25 bp, Homo sapien
gagagcttatgcagaggaactcctt

SEQ ID NO: 3144531 - DNA, 25 bp, Homo sapien
gggaaagactcacaatcatagggca

SEQ ID NO: 3144532 - DNA, 25 bp, Homo sapien
aaagactcacaatcatagggcaagg

SEQ ID NO: 3144533 - DNA, 25 bp, Homo sapien
agatttgggacttccaccccatgaa

SEQ ID NO: 3144534 - DNA, 25 bp, Homo sapien
gccaagatttgggacttccacccca

SEQ ID NO: 3144535 - DNA, 25 bp, Homo sapien
tctatgtactcgcaggctcaacacc

SEQ ID NO: 3144536 - DNA, 25 bp, Homo sapien
acttctatgtactcgcaggctcaac

SEQ ID NO: 3144537 - DNA, 25 bp, Homo sapien
taccctaggtaatggatcattgtat

SEQ ID NO: 3144538 - DNA, 25 bp, Homo sapien
gccaaaatgtcctgattctaactct

SEQ ID NO: 3144539 - DNA, 25 bp, Homo sapien
gaattcagaacctctcaataggcca

SEQ ID NO: 3144540 - DNA, 25 bp, Homo sapien
aaagacatacctgggcaatttacaa

SEQ ID NO: 3144541 - DNA, 25 bp, Homo sapien
cattgcataagatgaagtgggaaaa

SEQ ID NO: 3144542 - DNA, 25 bp, Homo sapien
ttgcataagatgaagtgggaaaaat

SEQ ID NO: 3144543 - DNA, 25 bp, Homo sapien
attgcataagatgaagtgggaaaaa

SEQ ID NO: 3144544 - DNA, 25 bp, Homo sapien
acattgcataagatgaagtgggaaa

SEQ ID NO: 3144545 - DNA, 25 bp, Homo sapien
aaagaaagttcaccacaacatccat

SEQ ID NO: 3144546 - DNA, 25 bp, Homo sapien
gaaagttcaccacaacatccattgg

SEQ ID NO: 3144547 - DNA, 25 bp, Homo sapien
tcaaagaaagttcaccacaacatcc

SEQ ID NO: 3144548 - DNA, 25 bp, Homo sapien
aacatccattgggttagtgttccag

SEQ ID NO: 3144549 - DNA, 25 bp, Homo sapien
ttttcgtcctccataacatccaagg

SEQ ID NO: 3144550 - DNA, 25 bp, Homo sapien
taaaactgagtcacatagtcacacc

SEQ ID NO: 3144551 - DNA, 25 bp, Homo sapien
aagctggcagtctcaaacttcaagc

SEQ ID NO: 3144552 - DNA, 25 bp, Homo sapien
tcactagtaactgcctgttgaaagc

SEQ ID NO: 3144553 - DNA, 25 bp, Homo sapien
taagcagactcaagcgtttcagccc

SEQ ID NO: 3144554 - DNA, 25 bp, Homo sapien
tgttacaggccgaaagaatgaaggt

SEQ ID NO: 3144555 - DNA, 25 bp, Homo sapien
tagacagccttaaccctgggaccta

SEQ ID NO: 3144556 - DNA, 25 bp, Homo sapien
tatccattgagccttgtaaaagccc

SEQ ID NO: 3144557 - DNA, 25 bp, Homo sapien
catgctttagctcacctttgcctca

SEQ ID NO: 3144558 - DNA, 25 bp, Homo sapien
tggcattatcaaggaaagagaggtc

SEQ ID NO: 3144559 - DNA, 25 bp, Homo sapien
gcccaaattgcttgacacagcacat

SEQ ID NO: 3144560 - DNA, 25 bp, Homo sapien
caggagtcaatatggaaagcagcac

SEQ ID NO: 3144561 - DNA, 25 bp, Homo sapien
taagactccggtagaatgacactgg

SEQ ID NO: 3144562 - DNA, 25 bp, Homo sapien
tcctggtacagataataagactccg

SEQ ID NO: 3144563 - DNA, 25 bp, Homo sapien
gaaactgctggagcatcagggtcag

SEQ ID NO: 3144564 - DNA, 25 bp, Homo sapien
aaggcctggtagatttactgacatg

SEQ ID NO: 3144565 - DNA, 25 bp, Homo sapien
tgtcaaacaggtgaaacagctggcc

SEQ ID NO: 3144566 - DNA, 25 bp, Homo sapien
tataccggtagaaggatgtaaccca

SEQ ID NO: 3144567 - DNA, 25 bp, Homo sapien
gaagccaggctcgagctattgtgca

SEQ ID NO: 3144568 - DNA, 25 bp, Homo sapien
catttgccgatatgagggtccctaa

SEQ ID NO: 3144569 - DNA, 25 bp, Homo sapien
ggcatgagcctgttacaggccgaaa

SEQ ID NO: 3144570 - DNA, 25 bp, Homo sapien
tatatccttgcaaatgttgtttgtc

SEQ ID NO: 3144571 - DNA, 25 bp, Homo sapien
aatgggttaagatttatatccttgc

SEQ ID NO: 3144572 - DNA, 25 bp, Homo sapien
gtgttccttgtgattatctatagga

SEQ ID NO: 3144573 - DNA, 25 bp, Homo sapien
aaaattggagttacctgtgtgatct

SEQ ID NO: 3144574 - DNA, 25 bp, Homo sapien
gggactttagtgtgcgtatctcttc

SEQ ID NO: 3144575 - DNA, 25 bp, Homo sapien
tgtgtgatcttttcccattagttgc

SEQ ID NO: 3144576 - DNA, 25 bp, Homo sapien
tcaaaccatcagatgccaaattgtc

SEQ ID NO: 3144577 - DNA, 25 bp, Homo sapien
catttactttgagggactaatatcc

SEQ ID NO: 3144578 - DNA, 25 bp, Homo sapien
ggaaccagacatgtcactgtaccaa

SEQ ID NO: 3144579 - DNA, 25 bp, Homo sapien
tcatgtacatgtcaacggatatctg

SEQ ID NO: 3144580 - DNA, 25 bp, Homo sapien
aatagtaacactgctctggcatgat

SEQ ID NO: 3144581 - DNA, 25 bp, Homo sapien
cactgttccatggtcagcaagtcat

SEQ ID NO: 3144582 - DNA, 25 bp, Homo sapien
tgttatctatccaagcactgttcca

SEQ ID NO: 3144583 - DNA, 25 bp, Homo sapien
caaaggaaccttggaagtctatcac

SEQ ID NO: 3144584 - DNA, 25 bp, Homo sapien
caaaagtggtcgtgtgatatgctaa

SEQ ID NO: 3144585 - DNA, 25 bp, Homo sapien
aatacaaaagtagcctggtgtggtg

SEQ ID NO: 3144586 - DNA, 25 bp, Homo sapien
caaaagtagcctggtgtggtggcac

SEQ ID NO: 3144587 - DNA, 25 bp, Homo sapien
atggaaaaactccatctccactaaa

SEQ ID NO: 3144588 - DNA, 25 bp, Homo sapien
aacatggaaaaactccatctccact

SEQ ID NO: 3144589 - DNA, 25 bp, Homo sapien
ctgaggtcaggagttcgagaccagc

SEQ ID NO: 3144590 - DNA, 25 bp, Homo sapien
gagaccgagggagctggatcacctg

SEQ ID NO: 3144591 - DNA, 25 bp, Homo sapien
tttgggagaccgagggagctggatc

SEQ ID NO: 3144592 - DNA, 25 bp, Homo sapien
cctgaggtcaggagttcgagaccag

SEQ ID NO: 3144593 - DNA, 25 bp, Homo sapien
gccaatccctggcaagagatattga

SEQ ID NO: 3144594 - DNA, 25 bp, Homo sapien
tctatagctggtaaagtagagcaga

SEQ ID NO: 3144595 - DNA, 25 bp, Homo sapien
taagatggagctaaatccctatagc

SEQ ID NO: 3144596 - DNA, 25 bp, Homo sapien
tagtcactgaatctatggctcacaa

SEQ ID NO: 3144597 - DNA, 25 bp, Homo sapien
taaagtgaataccaatagcacttaa

SEQ ID NO: 3144598 - DNA, 25 bp, Homo sapien
ttaaagctgtattagggcctgttag

SEQ ID NO: 3144599 - DNA, 25 bp, Homo sapien
taggaaggaatgttaatatgagaga

SEQ ID NO: 3144600 - DNA, 25 bp, Homo sapien
taaaaggttgtattgttttgctcag

SEQ ID NO: 3144601 - DNA, 25 bp, Homo sapien
catggattaaactggcttatgtggc

SEQ ID NO: 3144602 - DNA, 25 bp, Homo sapien
ggactgtggtagctcttggattgtt

SEQ ID NO: 3144603 - DNA, 25 bp, Homo sapien
taatttctggcctgattgaaggaaa

SEQ ID NO: 3144604 - DNA, 25 bp, Homo sapien
tgaaggaaatttgagaggtctgcat

SEQ ID NO: 3144605 - DNA, 25 bp, Homo sapien
cattcctatccatcctgctcttagg

SEQ ID NO: 3144606 - DNA, 25 bp, Homo sapien
aacagaggctacattcctatccatc

SEQ ID NO: 3144607 - DNA, 25 bp, Homo sapien
cggcctgtttagctgtttctaggga

SEQ ID NO: 3144608 - DNA, 25 bp, Homo sapien
cgcccggcctgtttagctgtttcta

SEQ ID NO: 3144609 - DNA, 25 bp, Homo sapien
tttttcttatatcccacctcactat

SEQ ID NO: 3144610 - DNA, 25 bp, Homo sapien
tgaaatgtgcttctttcggataatc

SEQ ID NO: 3144611 - DNA, 25 bp, Homo sapien
tcctgaatcaggagttctcgctgtt

SEQ ID NO: 3144612 - DNA, 25 bp, Homo sapien
catgaacatcccacaggctcctgaa

SEQ ID NO: 3144613 - DNA, 25 bp, Homo sapien
gagtaaatggtggagaaatatatac

SEQ ID NO: 3144614 - DNA, 25 bp, Homo sapien
agtaaatggtggagaaatatataca

SEQ ID NO: 3144615 - DNA, 25 bp, Homo sapien
agagtaaatggtggagaaatatata

SEQ ID NO: 3144616 - DNA, 25 bp, Homo sapien
gagtgatacgttctggttttcttca

SEQ ID NO: 3144617 - DNA, 25 bp, Homo sapien
agtaggttagttgctgatacgtaac

SEQ ID NO: 3144618 - DNA, 25 bp, Homo sapien
cacacattttaaggctatttacata

SEQ ID NO: 3144619 - DNA, 25 bp, Homo sapien
tgccaaattgcatttattagtaggt

SEQ ID NO: 3144620 - DNA, 25 bp, Homo sapien
ccctgcttattgcagaacattataa

SEQ ID NO: 3144621 - DNA, 25 bp, Homo sapien
tcaaaaaccctgcttattgcagaac

SEQ ID NO: 3144622 - DNA, 25 bp, Homo sapien
gtatttgctacttgactatttcatt

SEQ ID NO: 3144623 - DNA, 25 bp, Homo sapien
gaaaatggttctcagtaatgtattt

SEQ ID NO: 3144624 - DNA, 25 bp, Homo sapien
cccattgtaggtgtttgaattcaac

SEQ ID NO: 3144625 - DNA, 25 bp, Homo sapien
gaatatggttgtggtacttcggcat

SEQ ID NO: 3144626 - DNA, 25 bp, Homo sapien
gaatatacattccagcacactctgc

SEQ ID NO: 3144627 - DNA, 25 bp, Homo sapien
gttttactggatactggacacatgg

SEQ ID NO: 3144628 - DNA, 25 bp, Homo sapien
agctagtattgtcagttagaatgtc

SEQ ID NO: 3144629 - DNA, 25 bp, Homo sapien
aatgtctacatacggccttttcatg

SEQ ID NO: 3144630 - DNA, 25 bp, Homo sapien
gcctggttccaagggagaacatccc

SEQ ID NO: 3144631 - DNA, 25 bp, Homo sapien
tcagttagaatgtctacatacggcc

SEQ ID NO: 3144632 - DNA, 25 bp, Homo sapien
tggcttcgccgtcttctcctgttgt

SEQ ID NO: 3144633 - DNA, 25 bp, Homo sapien
aataatttgcttctggcttcgccgt

SEQ ID NO: 3144634 - DNA, 25 bp, Homo sapien
tctggcttcgccgtcttctcctgtt

SEQ ID NO: 3144635 - DNA, 25 bp, Homo sapien
ttgcttctggcttcgccgtcttctc

SEQ ID NO: 3144636 - DNA, 25 bp, Homo sapien
tagtttctttgcgtagaggcgtttg

SEQ ID NO: 3144637 - DNA, 25 bp, Homo sapien
tgtaaggtgtaaggaaatgatccag

SEQ ID NO: 3144638 - DNA, 25 bp, Homo sapien
gtttctttgcgtagaggcgtttgta

SEQ ID NO: 3144639 - DNA, 25 bp, Homo sapien
ggcgtttgtagtattctctgatgat

SEQ ID NO: 3144640 - DNA, 25 bp, Homo sapien
cattgaagaagaaactcttttattt

SEQ ID NO: 3144641 - DNA, 25 bp, Homo sapien
cttctggaaagtgagcctctccagc

SEQ ID NO: 3144642 - DNA, 25 bp, Homo sapien
gactcaactgagttattactgccaa

SEQ ID NO: 3144643 - DNA, 25 bp, Homo sapien
cacatatagcaacagtatgactcaa

SEQ ID NO: 3144644 - DNA, 25 bp, Homo sapien
gcaacagtatgactcaactgagtta

SEQ ID NO: 3144645 - DNA, 25 bp, Homo sapien
tatgactcaactgagttattactgc

SEQ ID NO: 3144646 - DNA, 25 bp, Homo sapien
tgctttggcaggagtaatattctct

SEQ ID NO: 3144647 - DNA, 25 bp, Homo sapien
tatggtaagcatccagatgatgtct

SEQ ID NO: 3144648 - DNA, 25 bp, Homo sapien
ccattttttccgtttgtcatctcaa

SEQ ID NO: 3144649 - DNA, 25 bp, Homo sapien
atgatgtctttgattgcagatgcac

SEQ ID NO: 3144650 - DNA, 25 bp, Homo sapien
gcttcctactgagtctattcacact

SEQ ID NO: 3144651 - DNA, 25 bp, Homo sapien
ttcttctcaacagggggcttgacac

SEQ ID NO: 3144652 - DNA, 25 bp, Homo sapien
ggcttgacacccctgcaaggtccaa

SEQ ID NO: 3144653 - DNA, 25 bp, Homo sapien
caaatctctactccataatgctgct

SEQ ID NO: 3144654 - DNA, 25 bp, Homo sapien
aaagatttaacacagggtcatcagg

SEQ ID NO: 3144655 - DNA, 25 bp, Homo sapien
tatattcagcatattccagcctggg

SEQ ID NO: 3144656 - DNA, 25 bp, Homo sapien
tattgaaattgcaatcccttcccca

SEQ ID NO: 3144657 - DNA, 25 bp, Homo sapien
ggtcatcaggacttactcaccactt

SEQ ID NO: 3144658 - DNA, 25 bp, Homo sapien
cagcctcccaagttgctgacttggg

SEQ ID NO: 3144659 - DNA, 25 bp, Homo sapien
tcagcctcccaagttgctgacttgg

SEQ ID NO: 3144660 - DNA, 25 bp, Homo sapien
taaaatctttaaatctctattttca

SEQ ID NO: 3144661 - DNA, 25 bp, Homo sapien
tctttaaatctctattttcattttg

SEQ ID NO: 3144662 - DNA, 25 bp, Homo sapien
ttaaatctctattttcattttgcat

SEQ ID NO: 3144663 - DNA, 25 bp, Homo sapien
aaaatctttaaatctctattttcat

SEQ ID NO: 3144664 - DNA, 25 bp, Homo sapien
ctgctttttcacattctagtacttc

SEQ ID NO: 3144665 - DNA, 25 bp, Homo sapien
ttcacattctagtacttcttttttg

SEQ ID NO: 3144666 - DNA, 25 bp, Homo sapien
ctttttcacattctagtacttcttt

SEQ ID NO: 3144667 - DNA, 25 bp, Homo sapien
tgagtaataatttaaatttttcaga

SEQ ID NO: 3144668 - DNA, 25 bp, Homo sapien
tagtgtagcctgctccgaacttgcc

SEQ ID NO: 3144669 - DNA, 25 bp, Homo sapien
ttccacttagggtggctggccgcgc

SEQ ID NO: 3144670 - DNA, 25 bp, Homo sapien
gctacatttgcagaagagaccttcc

SEQ ID NO: 3144671 - DNA, 25 bp, Homo sapien
tggaaagcgtaagaccttccaggtg

SEQ ID NO: 3144672 - DNA, 25 bp, Homo sapien
ttttgcatcgagagagtcggatgag

SEQ ID NO: 3144673 - DNA, 25 bp, Homo sapien
tcgagagagtcggatgagcttcaca

SEQ ID NO: 3144674 - DNA, 25 bp, Homo sapien
gcatcgagagagtcggatgagcttc

SEQ ID NO: 3144675 - DNA, 25 bp, Homo sapien
agagagtcggatgagcttcacacac

SEQ ID NO: 3144676 - DNA, 25 bp, Homo sapien
tcctcaggctctcggggactgcggc

SEQ ID NO: 3144677 - DNA, 25 bp, Homo sapien
gctgcggcagaacagggctgtttct

SEQ ID NO: 3144678 - DNA, 25 bp, Homo sapien
gagaagctccgctgctgccgagccc

SEQ ID NO: 3144679 - DNA, 25 bp, Homo sapien
ctcggccgggctggcgattctgcac

SEQ ID NO: 3144680 - DNA, 25 bp, Homo sapien
ggtattctaaagactccgtcgagga

SEQ ID NO: 3144681 - DNA, 25 bp, Homo sapien
gtccgccgccgaagaaacagacgat

SEQ ID NO: 3144682 - DNA, 25 bp, Homo sapien
ctttagctcgggcaacgggagacac

SEQ ID NO: 3144683 - DNA, 25 bp, Homo sapien
tacgcgggagagttgaacagacacc

SEQ ID NO: 3144684 - DNA, 25 bp, Homo sapien
tagagctgttcgagcacagtggtgt

SEQ ID NO: 3144685 - DNA, 25 bp, Homo sapien
tcatagagctgttcgagcacagtgg

SEQ ID NO: 3144686 - DNA, 25 bp, Homo sapien
cttcatagagctgttcgagcacagt

SEQ ID NO: 3144687 - DNA, 25 bp, Homo sapien
cctctccacataggcctcttcatag

SEQ ID NO: 3144688 - DNA, 25 bp, Homo sapien
ccaagcagccagccaaaccagcaac

SEQ ID NO: 3144689 - DNA, 25 bp, Homo sapien
tgccaagcagccagccaaaccagca

SEQ ID NO: 3144690 - DNA, 25 bp, Homo sapien
ctgccaagcagccagccaaaccagc

SEQ ID NO: 3144691 - DNA, 25 bp, Homo sapien
gccaagcagccagccaaaccagcaa

SEQ ID NO: 3144692 - DNA, 25 bp, Homo sapien
catggctgacatccatagcagcgcc

SEQ ID NO: 3144693 - DNA, 25 bp, Homo sapien
gcagcgcctcttgatatgcccaggg

SEQ ID NO: 3144694 - DNA, 25 bp, Homo sapien
tcacccagagccaaagaaccagttg

SEQ ID NO: 3144695 - DNA, 25 bp, Homo sapien
aaccagttggcacctgaggagactg

SEQ ID NO: 3144696 - DNA, 25 bp, Homo sapien
acacgtctgtaatcacagctctttg

SEQ ID NO: 3144697 - DNA, 25 bp, Homo sapien
gccgggtattgtggcacacgtctgt

SEQ ID NO: 3144698 - DNA, 25 bp, Homo sapien
ttagccgggtattgtggcacacgtc

SEQ ID NO: 3144699 - DNA, 25 bp, Homo sapien
ggaggctgaggcagaagaattgctt

SEQ ID NO: 3144700 - DNA, 25 bp, Homo sapien
tgagtttttgttgttccagctgcag

SEQ ID NO: 3144701 - DNA, 25 bp, Homo sapien
gacacagatggtggtatagaaacat

SEQ ID NO: 3144702 - DNA, 25 bp, Homo sapien
tatgaaccactgtgtggaccatttg

SEQ ID NO: 3144703 - DNA, 25 bp, Homo sapien
cagagagaccatttgctctttgaca

SEQ ID NO: 3144704 - DNA, 25 bp, Homo sapien
ggtgacagagccagaatttgtctca

SEQ ID NO: 3144705 - DNA, 25 bp, Homo sapien
aaagttaaccaggcgtggtggtgag

SEQ ID NO: 3144706 - DNA, 25 bp, Homo sapien
cacaaaagttaaccaggcgtggtgg

SEQ ID NO: 3144707 - DNA, 25 bp, Homo sapien
gttaaccaggcgtggtggtgagcac

SEQ ID NO: 3144708 - DNA, 25 bp, Homo sapien
aatctgttgagttcatgagttccag

SEQ ID NO: 3144709 - DNA, 25 bp, Homo sapien
tgggacaatctgttgagttcatgag

SEQ ID NO: 3144710 - DNA, 25 bp, Homo sapien
gacaatctgttgagttcatgagttc

SEQ ID NO: 3144711 - DNA, 25 bp, Homo sapien
ggtgggacaatctgttgagttcatg

SEQ ID NO: 3144712 - DNA, 25 bp, Homo sapien
cactccagcagcctgggagacaaca

SEQ ID NO: 3144713 - DNA, 25 bp, Homo sapien
ttgcactccagcagcctgggagaca

SEQ ID NO: 3144714 - DNA, 25 bp, Homo sapien
tgcactccagcagcctgggagacaa

SEQ ID NO: 3144715 - DNA, 25 bp, Homo sapien
ctccagcagcctgggagacaacaag

SEQ ID NO: 3144716 - DNA, 25 bp, Homo sapien
catcacatattagtgttactaaaca

SEQ ID NO: 3144717 - DNA, 25 bp, Homo sapien
ccatcacatattagtgttactaaac

SEQ ID NO: 3144718 - DNA, 25 bp, Homo sapien
cttcttgctcagaacattgactttc

SEQ ID NO: 3144719 - DNA, 25 bp, Homo sapien
ttgttcttcttgctcagaacattga

SEQ ID NO: 3144720 - DNA, 25 bp, Homo sapien
ttcttcttgctcagaacattgactt

SEQ ID NO: 3144721 - DNA, 25 bp, Homo sapien
tgttcttcttgctcagaacattgac

SEQ ID NO: 3144722 - DNA, 25 bp, Homo sapien
gagttgattgagtctgctttttcct

SEQ ID NO: 3144723 - DNA, 25 bp, Homo sapien
aggagttgattgagtctgctttttc

SEQ ID NO: 3144724 - DNA, 25 bp, Homo sapien
aaagtaggagttgattgagtctgct

SEQ ID NO: 3144725 - DNA, 25 bp, Homo sapien
tggaaaagtaggagttgattgagtc

SEQ ID NO: 3144726 - DNA, 25 bp, Homo sapien
caaggagattagtccatcttcaaac

SEQ ID NO: 3144727 - DNA, 25 bp, Homo sapien
cacattctttcggtaagacagagaa

SEQ ID NO: 3144728 - DNA, 25 bp, Homo sapien
tctgccttgcacgtaaattttttct

SEQ ID NO: 3144729 - DNA, 25 bp, Homo sapien
tttctttaccatgtaggtcctactc

SEQ ID NO: 3144730 - DNA, 25 bp, Homo sapien
ctgcaataatttgaattggatttat

SEQ ID NO: 3144731 - DNA, 25 bp, Homo sapien
tttgaattggatttataccatttac

SEQ ID NO: 3144732 - DNA, 25 bp, Homo sapien
catttacaaccactaatgtatccat

SEQ ID NO: 3144733 - DNA, 25 bp, Homo sapien
accatttacaaccactaatgtatcc

SEQ ID NO: 3144734 - DNA, 25 bp, Homo sapien
cagggttcccaaggctcagctgaat

SEQ ID NO: 3144735 - DNA, 25 bp, Homo sapien
gtccttcccactgtttcactgctta

SEQ ID NO: 3144736 - DNA, 25 bp, Homo sapien
aagagcctatagaatcctgttttgc

SEQ ID NO: 3144737 - DNA, 25 bp, Homo sapien
tttcttgaattctaagagcctatag

SEQ ID NO: 3144738 - DNA, 25 bp, Homo sapien
tgaccgaaggttcgggcgcaaccga

SEQ ID NO: 3144739 - DNA, 25 bp, Homo sapien
tgtctagcgcaggaaaacgctctcc

SEQ ID NO: 3144740 - DNA, 25 bp, Homo sapien
cggtccggcccattttcagttggtg

SEQ ID NO: 3144741 - DNA, 25 bp, Homo sapien
aacccggaggctgaacgccgtgtct

SEQ ID NO: 3144742 - DNA, 25 bp, Homo sapien
ggcgcatgcgcacgacgttgacccg

SEQ ID NO: 3144743 - DNA, 25 bp, Homo sapien
aaatggcgccgggtcggcgcatgcg

SEQ ID NO: 3144744 - DNA, 25 bp, Homo sapien
atgcgcacgacgttgacccggccgg

SEQ ID NO: 3144745 - DNA, 25 bp, Homo sapien
gccaccaaaatggcgccgggtcggc

SEQ ID NO: 3144746 - DNA, 25 bp, Homo sapien
cgcgctcgcctcagtgtggaatcac

SEQ ID NO: 3144747 - DNA, 25 bp, Homo sapien
ccgcgctcgcctcagtgtggaatca

SEQ ID NO: 3144748 - DNA, 25 bp, Homo sapien
ccgccgcgctcgcctcagtgtggaa

SEQ ID NO: 3144749 - DNA, 25 bp, Homo sapien
gccgcgctcgcctcagtgtggaatc

SEQ ID NO: 3144750 - DNA, 25 bp, Homo sapien
agacctgagcacacgaacactgcca

SEQ ID NO: 3144751 - DNA, 25 bp, Homo sapien
tcagacctgagcacacgaacactgc

SEQ ID NO: 3144752 - DNA, 25 bp, Homo sapien
tccctcggcgattcagacctgagca

SEQ ID NO: 3144753 - DNA, 25 bp, Homo sapien
gcctcctccctcggcgattcagacc

SEQ ID NO: 3144754 - DNA, 25 bp, Homo sapien
gtctccgcccgcagctgattcgtac

SEQ ID NO: 3144755 - DNA, 25 bp, Homo sapien
ccgcttgattcgctgcaccgcgatg

SEQ ID NO: 3144756 - DNA, 25 bp, Homo sapien
tgattcgctgcaccgcgatgttggc

SEQ ID NO: 3144757 - DNA, 25 bp, Homo sapien
tgaactcccgcttgattcgctgcac

SEQ ID NO: 3144758 - DNA, 25 bp, Homo sapien
ttgaactcccgcttgattcgctgca

SEQ ID NO: 3144759 - DNA, 25 bp, Homo sapien
tacagaataatctagatcaagctag

SEQ ID NO: 3144760 - DNA, 25 bp, Homo sapien
tcagtagtgccaaggttaaaaaatc

SEQ ID NO: 3144761 - DNA, 25 bp, Homo sapien
tcaagctagatcaagtacattaaaa

SEQ ID NO: 3144762 - DNA, 25 bp, Homo sapien
tgcatatactggtagaggtcaggga

SEQ ID NO: 3144763 - DNA, 25 bp, Homo sapien
tattctaaatttggagtaaaagcaa

SEQ ID NO: 3144764 - DNA, 25 bp, Homo sapien
tctaaatttggagtaaaagcaaaga

SEQ ID NO: 3144765 - DNA, 25 bp, Homo sapien
ttattctaaatttggagtaaaagca

SEQ ID NO: 3144766 - DNA, 25 bp, Homo sapien
tggtggtgatagctacacaatgtcc

SEQ ID NO: 3144767 - DNA, 25 bp, Homo sapien
aaagcgaaaccctgactccagaaca

SEQ ID NO: 3144768 - DNA, 25 bp, Homo sapien
gaacaagactccagccttactccag

SEQ ID NO: 3144769 - DNA, 25 bp, Homo sapien
aaagaattcctacaaatctggctgg

SEQ ID NO: 3144770 - DNA, 25 bp, Homo sapien
ggtgcacaccgctgtgccctactaa

SEQ ID NO: 3144771 - DNA, 25 bp, Homo sapien
gcttaagctattgcaagttgccagg

SEQ ID NO: 3144772 - DNA, 25 bp, Homo sapien
ttaatacaaatagtccatctgggct

SEQ ID NO: 3144773 - DNA, 25 bp, Homo sapien
ccaacaggttaagactgcggcgtga

SEQ ID NO: 3144774 - DNA, 25 bp, Homo sapien
tgatcctgagttcattcttgcccct

SEQ ID NO: 3144775 - DNA, 25 bp, Homo sapien
tctaccctctacatggctagttgtc

SEQ ID NO: 3144776 - DNA, 25 bp, Homo sapien
ccaagaagaggttatgacgcagttt

SEQ ID NO: 3144777 - DNA, 25 bp, Homo sapien
cattttaattgaggagtactgtgct

SEQ ID NO: 3144778 - DNA, 25 bp, Homo sapien
tcatggcactgtacctactgggctc

SEQ ID NO: 3144779 - DNA, 25 bp, Homo sapien
gcatgctcaagtttttggtagtgaa

SEQ ID NO: 3144780 - DNA, 25 bp, Homo sapien
tccgacctcggctgcccaagcagct

SEQ ID NO: 3144781 - DNA, 25 bp, Homo sapien
tattcatgagagcaacatgatctta

SEQ ID NO: 3144782 - DNA, 25 bp, Homo sapien
tacaatggctcatggctcatgcatg

SEQ ID NO: 3144783 - DNA, 25 bp, Homo sapien
aagaaaaaagagaggtgagtggatc

SEQ ID NO: 3144784 - DNA, 25 bp, Homo sapien
agcaggtccttggataacatcattt

SEQ ID NO: 3144785 - DNA, 25 bp, Homo sapien
ggtccttggataacatcatttcctt

SEQ ID NO: 3144786 - DNA, 25 bp, Homo sapien
gaagtctctaaggaaccccaagaca

SEQ ID NO: 3144787 - DNA, 25 bp, Homo sapien
ccacgaaggcttttgtataacaaca

SEQ ID NO: 3144788 - DNA, 25 bp, Homo sapien
tcctaagtcagataaacgtaatgcc

SEQ ID NO: 3144789 - DNA, 25 bp, Homo sapien
gacggttcgccatgtctccatttgt

SEQ ID NO: 3144790 - DNA, 25 bp, Homo sapien
tgctgtgttgcccagctcactgcaa

SEQ ID NO: 3144791 - DNA, 25 bp, Homo sapien
cctctgactcctgggttcaaggaat

SEQ ID NO: 3144792 - DNA, 25 bp, Homo sapien
cctgggttcaaggaattctcctgcc

SEQ ID NO: 3144793 - DNA, 25 bp, Homo sapien
tattgtcaacaaccaacagtgaaga

SEQ ID NO: 3144794 - DNA, 25 bp, Homo sapien
caaaatagcacataacgttgaagct

SEQ ID NO: 3144795 - DNA, 25 bp, Homo sapien
tagttcctcatagggttcgctggtg

SEQ ID NO: 3144796 - DNA, 25 bp, Homo sapien
gccacaactgttttaggagccctgc

SEQ ID NO: 3144797 - DNA, 25 bp, Homo sapien
cttaaggcttcttacaggaataatc

SEQ ID NO: 3144798 - DNA, 25 bp, Homo sapien
taaggcttcttacaggaataatcat

SEQ ID NO: 3144799 - DNA, 25 bp, Homo sapien
ctcctcttaaggcttcttacaggaa

SEQ ID NO: 3144800 - DNA, 25 bp, Homo sapien
cctcttaaggcttcttacaggaata

SEQ ID NO: 3144801 - DNA, 25 bp, Homo sapien
cccacgatacatgggttctgcttaa

SEQ ID NO: 3144802 - DNA, 25 bp, Homo sapien
tctgctctagtaaaataagtctcgg

SEQ ID NO: 3144803 - DNA, 25 bp, Homo sapien
aattccatgtatatcaggcccaaag

SEQ ID NO: 3144804 - DNA, 25 bp, Homo sapien
tagtacactatccaccagaatggtg

SEQ ID NO: 3144805 - DNA, 25 bp, Homo sapien
ttctcatctacaagatctactttaa

SEQ ID NO: 3144806 - DNA, 25 bp, Homo sapien
taaaattctcatctacaagatctac

SEQ ID NO: 3144807 - DNA, 25 bp, Homo sapien
aattctcatctacaagatctacttt

SEQ ID NO: 3144808 - DNA, 25 bp, Homo sapien
catctacaagatctactttaatttg

SEQ ID NO: 3144809 - DNA, 25 bp, Homo sapien
tagaggtttaccatgccagatcttt

SEQ ID NO: 3144810 - DNA, 25 bp, Homo sapien
tgtaacaaagctctgctaaaactgt

SEQ ID NO: 3144811 - DNA, 25 bp, Homo sapien
ccaatgagatatttaaggcaaggtc

SEQ ID NO: 3144812 - DNA, 25 bp, Homo sapien
ggtaactgagtgtctacagtccata

SEQ ID NO: 3144813 - DNA, 25 bp, Homo sapien
gccaccccgcccaggcagatataag

SEQ ID NO: 3144814 - DNA, 25 bp, Homo sapien
ccgcccaggcagatataagcacttt

SEQ ID NO: 3144815 - DNA, 25 bp, Homo sapien
tttggtcccattctcggtatcggga

SEQ ID NO: 3144816 - DNA, 25 bp, Homo sapien
tggtcccattctcggtatcgggaaa

SEQ ID NO: 3144817 - DNA, 25 bp, Homo sapien
aggcatgagccgttatgcctcgtgg

SEQ ID NO: 3144818 - DNA, 25 bp, Homo sapien
gcctcgtggctagttctttttaata

SEQ ID NO: 3144819 - DNA, 25 bp, Homo sapien
tctttttaatagaatcccatagtga

SEQ ID NO: 3144820 - DNA, 25 bp, Homo sapien
gattcatgcatgagttgaactaaat

SEQ ID NO: 3144821 - DNA, 25 bp, Homo sapien
aaagtacagatgatacaaaggacag

SEQ ID NO: 3144822 - DNA, 25 bp, Homo sapien
tgtgtcctctaatccatcctgttaa

SEQ ID NO: 3144823 - DNA, 25 bp, Homo sapien
tcatcaggacaattaactattggag

SEQ ID NO: 3144824 - DNA, 25 bp, Homo sapien
gaaggcaaggaggtataaaagtaca

SEQ ID NO: 3144825 - DNA, 25 bp, Homo sapien
gattaaatgggtatgtttctggtat

SEQ ID NO: 3144826 - DNA, 25 bp, Homo sapien
tgggtatgtttctggtatttttatc

SEQ ID NO: 3144827 - DNA, 25 bp, Homo sapien
tttatctctagttggtatcttcctc

SEQ ID NO: 3144828 - DNA, 25 bp, Homo sapien
tttttatctctagttggtatcttcc

SEQ ID NO: 3144829 - DNA, 25 bp, Homo sapien
tgcagatgatccaataaagaattta

SEQ ID NO: 3144830 - DNA, 25 bp, Homo sapien
ttgaatttgcagatgatccaataaa

SEQ ID NO: 3144831 - DNA, 25 bp, Homo sapien
gaatttgcagatgatccaataaaga

SEQ ID NO: 3144832 - DNA, 25 bp, Homo sapien
tgtactataatctatagttagaaat

SEQ ID NO: 3144833 - DNA, 25 bp, Homo sapien
tccaaacaaatagcccctgtgacgg

SEQ ID NO: 3144834 - DNA, 25 bp, Homo sapien
tgatctttcaggatatccaaacaaa

SEQ ID NO: 3144835 - DNA, 25 bp, Homo sapien
cggaactaatattaggatgccatat

SEQ ID NO: 3144836 - DNA, 25 bp, Homo sapien
gccatattttagtgataaaccggac

SEQ ID NO: 3144837 - DNA, 25 bp, Homo sapien
attttttatcaccataaattctggt

SEQ ID NO: 3144838 - DNA, 25 bp, Homo sapien
ctgcgctgggctatcgtatttttta

SEQ ID NO: 3144839 - DNA, 25 bp, Homo sapien
cactgcgctgggctatcgtattttt

SEQ ID NO: 3144840 - DNA, 25 bp, Homo sapien
cggagtctcgctgtagctaattttt

SEQ ID NO: 3144841 - DNA, 25 bp, Homo sapien
tttccaaccttgtctggttcacgtc

SEQ ID NO: 3144842 - DNA, 25 bp, Homo sapien
caggtgttatctcactattgactag

SEQ ID NO: 3144843 - DNA, 25 bp, Homo sapien
ccttgtctggttcacgtctccttag

SEQ ID NO: 3144844 - DNA, 25 bp, Homo sapien
tacttatgcccaacttaatgtggac

SEQ ID NO: 3144845 - DNA, 25 bp, Homo sapien
gaaactgtatcttcgataatataaa

SEQ ID NO: 3144846 - DNA, 25 bp, Homo sapien
caattttggactgctctaatctaaa

SEQ ID NO: 3144847 - DNA, 25 bp, Homo sapien
tacaaagtagtgatcaaatctatat

SEQ ID NO: 3144848 - DNA, 25 bp, Homo sapien
ggatcagtatatacaatcaacttaa

SEQ ID NO: 3144849 - DNA, 25 bp, Homo sapien
ccacatccggccagcaaccggccta

SEQ ID NO: 3144850 - DNA, 25 bp, Homo sapien
accacatccggccagcaaccggcct

SEQ ID NO: 3144851 - DNA, 25 bp, Homo sapien
cacatccggccagcaaccggcctaa

SEQ ID NO: 3144852 - DNA, 25 bp, Homo sapien
ttcacagaatgtgtgaacacggctc

SEQ ID NO: 3144853 - DNA, 25 bp, Homo sapien
gaattttcacagaatgtgtgaacac

SEQ ID NO: 3144854 - DNA, 25 bp, Homo sapien
gtgattttctcaccttagactacag

SEQ ID NO: 3144855 - DNA, 25 bp, Homo sapien
ttctcaccttagactacaggcacgc

SEQ ID NO: 3144856 - DNA, 25 bp, Homo sapien
gttcttagagattcaaaaatcctta

SEQ ID NO: 3144857 - DNA, 25 bp, Homo sapien
aaattaataagttcttagagattca

SEQ ID NO: 3144858 - DNA, 25 bp, Homo sapien
taagttcttagagattcaaaaatcc

SEQ ID NO: 3144859 - DNA, 25 bp, Homo sapien
taataagttcttagagattcaaaaa

SEQ ID NO: 3144860 - DNA, 25 bp, Homo sapien
aatgagatatcacctagcactcgtt

SEQ ID NO: 3144861 - DNA, 25 bp, Homo sapien
gcactcgttagaacggctactataa

SEQ ID NO: 3144862 - DNA, 25 bp, Homo sapien
caaaaattttctggccgtgatagtg

SEQ ID NO: 3144863 - DNA, 25 bp, Homo sapien
caaatactgttaattagggtgggca

SEQ ID NO: 3144864 - DNA, 25 bp, Homo sapien
gcacatcctggatagatattgggaa

SEQ ID NO: 3144865 - DNA, 25 bp, Homo sapien
gagacagttcttgcatgctggcgaa

SEQ ID NO: 3144866 - DNA, 25 bp, Homo sapien
taagacgccaggtaagagaacatgg

SEQ ID NO: 3144867 - DNA, 25 bp, Homo sapien
gacatgctcctgcttataataggcc

SEQ ID NO: 3144868 - DNA, 25 bp, Homo sapien
tacataaatagtacttccctagatg

SEQ ID NO: 3144869 - DNA, 25 bp, Homo sapien
tgggttcctgatttgaaccacaaaa

SEQ ID NO: 3144870 - DNA, 25 bp, Homo sapien
cctagatgcctacgataaaagttaa

SEQ ID NO: 3144871 - DNA, 25 bp, Homo sapien
tgagccacgacaactagccaattac

SEQ ID NO: 3144872 - DNA, 25 bp, Homo sapien
taccatgtaaattagatcattcttc

SEQ ID NO: 3144873 - DNA, 25 bp, Homo sapien
ctttatcaattaatagaggtatgta

SEQ ID NO: 3144874 - DNA, 25 bp, Homo sapien
aaatgttacatgtaaagagaatgcc

SEQ ID NO: 3144875 - DNA, 25 bp, Homo sapien
agaatgcccatttttaccatgtaaa

SEQ ID NO: 3144876 - DNA, 25 bp, Homo sapien
aggcatgaaaaaccacctgcgcccg

SEQ ID NO: 3144877 - DNA, 25 bp, Homo sapien
ggcatgaaaaaccacctgcgcccgg

SEQ ID NO: 3144878 - DNA, 25 bp, Homo sapien
ttacaggcatgaaaaaccacctgcg

SEQ ID NO: 3144879 - DNA, 25 bp, Homo sapien
acaggcatgaaaaaccacctgcgcc

SEQ ID NO: 3144880 - DNA, 25 bp, Homo sapien
gatttgctactacagcatcctgtgg

SEQ ID NO: 3144881 - DNA, 25 bp, Homo sapien
tctgcagctgccaatagtgcttgca

SEQ ID NO: 3144882 - DNA, 25 bp, Homo sapien
taccgtgcggagagtcattgcagct

SEQ ID NO: 3144883 - DNA, 25 bp, Homo sapien
ttgcaatgacaataataccgtgcgg

SEQ ID NO: 3144884 - DNA, 25 bp, Homo sapien
cctcaacgtgtaaggcttagagctc

SEQ ID NO: 3144885 - DNA, 25 bp, Homo sapien
gagctaaaagaaacccttgagtcca

SEQ ID NO: 3144886 - DNA, 25 bp, Homo sapien
ccctaattggaagtactctgagaca

SEQ ID NO: 3144887 - DNA, 25 bp, Homo sapien
gcaaagctggaacacaagccatgct

SEQ ID NO: 3144888 - DNA, 25 bp, Homo sapien
taatcgcctacaatcctacttttcc

SEQ ID NO: 3144889 - DNA, 25 bp, Homo sapien
cactttgcattatagacaacctatg

SEQ ID NO: 3144890 - DNA, 25 bp, Homo sapien
aaaattgattgacatgacattacag

SEQ ID NO: 3144891 - DNA, 25 bp, Homo sapien
gatatatttcagctcttaatcgcct

SEQ ID NO: 3144892 - DNA, 25 bp, Homo sapien
tggtgctccagcatacacatgtgcc

SEQ ID NO: 3144893 - DNA, 25 bp, Homo sapien
tatcaaagcccatagcacataggtt

SEQ ID NO: 3144894 - DNA, 25 bp, Homo sapien
cacatgtgcccaaagtcgagctgtc

SEQ ID NO: 3144895 - DNA, 25 bp, Homo sapien
tttggtgtattctggactagaaact

SEQ ID NO: 3144896 - DNA, 25 bp, Homo sapien
gcccaggctgcgaatttctcttatt

SEQ ID NO: 3144897 - DNA, 25 bp, Homo sapien
acatttgcagtgcatggaaagcttc

SEQ ID NO: 3144898 - DNA, 25 bp, Homo sapien
aatcaacatgcccttatgtacttac

SEQ ID NO: 3144899 - DNA, 25 bp, Homo sapien
cactctttatactgggaattaacac

SEQ ID NO: 3144900 - DNA, 25 bp, Homo sapien
catcccatgattttgaagacaaggc

SEQ ID NO: 3144901 - DNA, 25 bp, Homo sapien
tgattttgaagacaaggccactatt

SEQ ID NO: 3144902 - DNA, 25 bp, Homo sapien
tgttgcagtctctacatcccatgat

SEQ ID NO: 3144903 - DNA, 25 bp, Homo sapien
tactcagaagcaattctgttgcagt

SEQ ID NO: 3144904 - DNA, 25 bp, Homo sapien
ctccaatggtgcctagataacatca

SEQ ID NO: 3144905 - DNA, 25 bp, Homo sapien
gataacatcattaggcaagaatgcc

SEQ ID NO: 3144906 - DNA, 25 bp, Homo sapien
gactatatcagcagctctctatgcc

SEQ ID NO: 3144907 - DNA, 25 bp, Homo sapien
agaggcaagcttgactatatcagca

SEQ ID NO: 3144908 - DNA, 25 bp, Homo sapien
tcaggctaaaaactgcaaacagctg

SEQ ID NO: 3144909 - DNA, 25 bp, Homo sapien
gttaaggtagctgtgatgcaacacc

SEQ ID NO: 3144910 - DNA, 25 bp, Homo sapien
caagcatgcaagtaaattcacaggc

SEQ ID NO: 3144911 - DNA, 25 bp, Homo sapien
caaactcttgctagtcttggtacac

SEQ ID NO: 3144912 - DNA, 25 bp, Homo sapien
gaagttatgctgacgttatgattca

SEQ ID NO: 3144913 - DNA, 25 bp, Homo sapien
gcttctagtatcaagattattgaga

SEQ ID NO: 3144914 - DNA, 25 bp, Homo sapien
gtgtgtgatcttgcaaaactaataa

SEQ ID NO: 3144915 - DNA, 25 bp, Homo sapien
aatatacagccttactttaattcag

SEQ ID NO: 3144916 - DNA, 25 bp, Homo sapien
tagtcgtgattccaaacatttcggg

SEQ ID NO: 3144917 - DNA, 25 bp, Homo sapien
gaagttaacggctcagaatagaccc

SEQ ID NO: 3144918 - DNA, 25 bp, Homo sapien
caggatatagctgcctccaagagca

SEQ ID NO: 3144919 - DNA, 25 bp, Homo sapien
caaatgggacaagggagatactaac

SEQ ID NO: 3144920 - DNA, 25 bp, Homo sapien
gggaaaacatgcatgcatttatttt

SEQ ID NO: 3144921 - DNA, 25 bp, Homo sapien
catgcatttatttttaagaattccc

SEQ ID NO: 3144922 - DNA, 25 bp, Homo sapien
tgcatgcatttatttttaagaattc

SEQ ID NO: 3144923 - DNA, 25 bp, Homo sapien
tgcatttatttttaagaattcccaa

SEQ ID NO: 3144924 - DNA, 25 bp, Homo sapien
cgctacgaagtactgggcaaatatc

SEQ ID NO: 3144925 - DNA, 25 bp, Homo sapien
tatcagcatttatggaggaagggtc

SEQ ID NO: 3144926 - DNA, 25 bp, Homo sapien
taaagacacgatcagttttgccatg

SEQ ID NO: 3144927 - DNA, 25 bp, Homo sapien
gacagtaccgagcaactttccagaa

SEQ ID NO: 3144928 - DNA, 25 bp, Homo sapien
ttcaccgtgttagtctcgtgatccg

SEQ ID NO: 3144929 - DNA, 25 bp, Homo sapien
tcaccgtgttagtctcgtgatccgc

SEQ ID NO: 3144930 - DNA, 25 bp, Homo sapien
caccgtgttagtctcgtgatccgcc

SEQ ID NO: 3144931 - DNA, 25 bp, Homo sapien
accgtgttagtctcgtgatccgccc

SEQ ID NO: 3144932 - DNA, 25 bp, Homo sapien
gacgagaatggctgcatgtaaggct

SEQ ID NO: 3144933 - DNA, 25 bp, Homo sapien
cacagttctggtcctatggacgaga

SEQ ID NO: 3144934 - DNA, 25 bp, Homo sapien
gcacaactggcattctggacttcat

SEQ ID NO: 3144935 - DNA, 25 bp, Homo sapien
ccagaaatagccagctcctgtgttg

SEQ ID NO: 3144936 - DNA, 25 bp, Homo sapien
cttgatgtcccgtgcccaagcagtc

SEQ ID NO: 3144937 - DNA, 25 bp, Homo sapien
ttggtcaggttatgctttgttgagt

SEQ ID NO: 3144938 - DNA, 25 bp, Homo sapien
gaggccacaatcctctgcacacatg

SEQ ID NO: 3144939 - DNA, 25 bp, Homo sapien
cacacatggagtgctgccttgatgt

SEQ ID NO: 3144940 - DNA, 25 bp, Homo sapien
tgtgctgcacatgggctgaattttt

SEQ ID NO: 3144941 - DNA, 25 bp, Homo sapien
cagagaactacaacacaaaagtgca

SEQ ID NO: 3144942 - DNA, 25 bp, Homo sapien
tgacaagtgtaaaatcctaccataa

SEQ ID NO: 3144943 - DNA, 25 bp, Homo sapien
acttgaagcagaaccttgtaatttg

SEQ ID NO: 3144944 - DNA, 25 bp, Homo sapien
catccattttagagccaggaattcc

SEQ ID NO: 3144945 - DNA, 25 bp, Homo sapien
gatttgcaagtagtaaacagttcat

SEQ ID NO: 3144946 - DNA, 25 bp, Homo sapien
ttccctgctatgaaaagtgatgtgg

SEQ ID NO: 3144947 - DNA, 25 bp, Homo sapien
ttctgcaaaaatgagatgtacagat

SEQ ID NO: 3144948 - DNA, 25 bp, Homo sapien
ctcacttcagaacacacactctctg

SEQ ID NO: 3144949 - DNA, 25 bp, Homo sapien
tttcacatgaccacaagtcctctga

SEQ ID NO: 3144950 - DNA, 25 bp, Homo sapien
tctgcaaaaacttggattcacaaat

SEQ ID NO: 3144951 - DNA, 25 bp, Homo sapien
aagctcacttcagaacacacactct

SEQ ID NO: 3144952 - DNA, 25 bp, Homo sapien
tagatcctgatcagacataacaagt

SEQ ID NO: 3144953 - DNA, 25 bp, Homo sapien
ctagatcctgatcagacataacaag

SEQ ID NO: 3144954 - DNA, 25 bp, Homo sapien
gatcctgatcagacataacaagtta

SEQ ID NO: 3144955 - DNA, 25 bp, Homo sapien
actagatcctgatcagacataacaa

SEQ ID NO: 3144956 - DNA, 25 bp, Homo sapien
gatctgggtgcaaagggttttaaca

SEQ ID NO: 3144957 - DNA, 25 bp, Homo sapien
ccccgtaaattgatgtggagggcat

SEQ ID NO: 3144958 - DNA, 25 bp, Homo sapien
tcagtcctcttgaatcggcagaaac

SEQ ID NO: 3144959 - DNA, 25 bp, Homo sapien
cagttgaaatgaccacagtgttggc

SEQ ID NO: 3144960 - DNA, 25 bp, Homo sapien
gaaatgtcaataggtaataggtccc

SEQ ID NO: 3144961 - DNA, 25 bp, Homo sapien
ccttggccttagaacttaactcatc

SEQ ID NO: 3144962 - DNA, 25 bp, Homo sapien
ggagaaaacagtcacgaaatgtcaa

SEQ ID NO: 3144963 - DNA, 25 bp, Homo sapien
tagtgcctttcaagtggttgcagag

SEQ ID NO: 3144964 - DNA, 25 bp, Homo sapien
tagttcgccatagggtttgtgcttc

SEQ ID NO: 3144965 - DNA, 25 bp, Homo sapien
ctcagtaatgatccccttagagcag

SEQ ID NO: 3144966 - DNA, 25 bp, Homo sapien
ccataccagtctgcagttcgtgggt

SEQ ID NO: 3144967 - DNA, 25 bp, Homo sapien
gtgggttggagacccctagcttaga

SEQ ID NO: 3144968 - DNA, 25 bp, Homo sapien
caactatggtatattacgaacttac

SEQ ID NO: 3144969 - DNA, 25 bp, Homo sapien
gaacttacagtaagagttacagaca

SEQ ID NO: 3144970 - DNA, 25 bp, Homo sapien
tgaaaagacattataaccttagagc

SEQ ID NO: 3144971 - DNA, 25 bp, Homo sapien
tcaggaatctttagtactctgaaaa

SEQ ID NO: 3144972 - DNA, 25 bp, Homo sapien
taactcagagttctccgtgtgcaaa

SEQ ID NO: 3144973 - DNA, 25 bp, Homo sapien
gagaagagcacacgcacgacaatgt

SEQ ID NO: 3144974 - DNA, 25 bp, Homo sapien
tatttgctcagaagctgcataaggc

SEQ ID NO: 3144975 - DNA, 25 bp, Homo sapien
tgtgaagttactgctcccattggag

SEQ ID NO: 3144976 - DNA, 25 bp, Homo sapien
gccatgattacagttatgcgccact

SEQ ID NO: 3144977 - DNA, 25 bp, Homo sapien
aaagcaatatgaggaaagagaacaa

SEQ ID NO: 3144978 - DNA, 25 bp, Homo sapien
aactagacacatctaaaggaacaga

SEQ ID NO: 3144979 - DNA, 25 bp, Homo sapien
gagccatcaaactacctgactttat

SEQ ID NO: 3144980 - DNA, 25 bp, Homo sapien
cacgtgatcctctcccttcaatctc

SEQ ID NO: 3144981 - DNA, 25 bp, Homo sapien
tcacgtgatcctctcccttcaatct

SEQ ID NO: 3144982 - DNA, 25 bp, Homo sapien
acgtgatcctctcccttcaatctcc

SEQ ID NO: 3144983 - DNA, 25 bp, Homo sapien
cattttggccaaagataagaccaca

SEQ ID NO: 3144984 - DNA, 25 bp, Homo sapien
tatactgcatgacaacattttggcc

SEQ ID NO: 3144985 - DNA, 25 bp, Homo sapien
tattataacagaactcagggtgatg

SEQ ID NO: 3144986 - DNA, 25 bp, Homo sapien
gaccacatgtattttgggagtccca

SEQ ID NO: 3144987 - DNA, 25 bp, Homo sapien
aatgggctgaactgtaatcagagga

SEQ ID NO: 3144988 - DNA, 25 bp, Homo sapien
gcggaacagcctagcaccctgtgtt

SEQ ID NO: 3144989 - DNA, 25 bp, Homo sapien
taggtactagcaagaaggatattcc

SEQ ID NO: 3144990 - DNA, 25 bp, Homo sapien
gaattagctctaccgcggatcatag

SEQ ID NO: 3144991 - DNA, 25 bp, Homo sapien
gtgggaatgaagcaactgcactttc

SEQ ID NO: 3144992 - DNA, 25 bp, Homo sapien
gaggaattccctatcccaggatgga

SEQ ID NO: 3144993 - DNA, 25 bp, Homo sapien
ccagaacacgccattttgaaggtct

SEQ ID NO: 3144994 - DNA, 25 bp, Homo sapien
tacactcactgctaactgtagtggt

SEQ ID NO: 3144995 - DNA, 25 bp, Homo sapien
caaagtgaatatacgtataaagaaa

SEQ ID NO: 3144996 - DNA, 25 bp, Homo sapien
ccccagaagttgtgtgttcccctca

SEQ ID NO: 3144997 - DNA, 25 bp, Homo sapien
aatagaatatcatcagcacccccag

SEQ ID NO: 3144998 - DNA, 25 bp, Homo sapien
cttccttcattcgtaattcctccat

SEQ ID NO: 3144999 - DNA, 25 bp, Homo sapien
acatataggtaagagtactaagcag

SEQ ID NO: 3145000 - DNA, 25 bp, Homo sapien
tgcctgggaacataatcacttagta

SEQ ID NO: 3145001 - DNA, 25 bp, Homo sapien
tcatctaactaaattgtgacaaagt

SEQ ID NO: 3145002 - DNA, 25 bp, Homo sapien
cagtgagtgactagctacattgcct

SEQ ID NO: 3145003 - DNA, 25 bp, Homo sapien
ctttttgtcccatgaaaagtatatg

SEQ ID NO: 3145004 - DNA, 25 bp, Homo sapien
tttttgtcccatgaaaagtatatga

SEQ ID NO: 3145005 - DNA, 25 bp, Homo sapien
tctttttgtcccatgaaaagtatat

SEQ ID NO: 3145006 - DNA, 25 bp, Homo sapien
aaagaggctacccagaaagcagtta

SEQ ID NO: 3145007 - DNA, 25 bp, Homo sapien
gctaaagaggctacccagaaagcag

SEQ ID NO: 3145008 - DNA, 25 bp, Homo sapien
aagcccaccaagctaaagaggctac

SEQ ID NO: 3145009 - DNA, 25 bp, Homo sapien
ccaagctaaagaggctacccagaaa

SEQ ID NO: 3145010 - DNA, 25 bp, Homo sapien
acatacgatggttttgtggccacag

SEQ ID NO: 3145011 - DNA, 25 bp, Homo sapien
catacgatggttttgtggccacagt

SEQ ID NO: 3145012 - DNA, 25 bp, Homo sapien
gtccacaccgttccacagtataaat

SEQ ID NO: 3145013 - DNA, 25 bp, Homo sapien
tcacgtaaatattaacaccctggta

SEQ ID NO: 3145014 - DNA, 25 bp, Homo sapien
gagtctgtggaatagctgccatgaa

SEQ ID NO: 3145015 - DNA, 25 bp, Homo sapien
tctgagtctgtggaatagctgccat

SEQ ID NO: 3145016 - DNA, 25 bp, Homo sapien
ttctgagtctgtggaatagctgcca

SEQ ID NO: 3145017 - DNA, 25 bp, Homo sapien
ggttctgagtctgtggaatagctgc

SEQ ID NO: 3145018 - DNA, 25 bp, Homo sapien
acttggtctcagtagagcagtttgg

SEQ ID NO: 3145019 - DNA, 25 bp, Homo sapien
atccctgggaaagagcgggtggcga

SEQ ID NO: 3145020 - DNA, 25 bp, Homo sapien
tccctgggaaagagcgggtggcgag

SEQ ID NO: 3145021 - DNA, 25 bp, Homo sapien
gccaaacttcggaccctggtgctcg

SEQ ID NO: 3145022 - DNA, 25 bp, Homo sapien
ggaatgggaaactcctggcgctgtt

SEQ ID NO: 3145023 - DNA, 25 bp, Homo sapien
ccacggcggctggtgcggaggagcc

SEQ ID NO: 3145024 - DNA, 25 bp, Homo sapien
ttcattgtgaaaggcggaatgggaa

SEQ ID NO: 3145025 - DNA, 25 bp, Homo sapien
cgggtccgaggctcggctgggcaag

SEQ ID NO: 3145026 - DNA, 25 bp, Homo sapien
tcggctgggcaagggcgttttgttc

SEQ ID NO: 3145027 - DNA, 25 bp, Homo sapien
agccctataggcctcgggtctggtt

SEQ ID NO: 3145028 - DNA, 25 bp, Homo sapien
tagttttgcggcctaagccgagccc

SEQ ID NO: 3145029 - DNA, 25 bp, Homo sapien
agctcatcgccgctgcgaaagataa

SEQ ID NO: 3145030 - DNA, 25 bp, Homo sapien
cccgcgcggcaggtattggcgccaa

SEQ ID NO: 3145031 - DNA, 25 bp, Homo sapien
tattggcgccaaccgggtggcggcg

SEQ ID NO: 3145032 - DNA, 25 bp, Homo sapien
taaagcactgtttgccctgcgtgcc

SEQ ID NO: 3145033 - DNA, 25 bp, Homo sapien
tcgtctatgtccctcaggatgaccc

SEQ ID NO: 3145034 - DNA, 25 bp, Homo sapien
agtttcgtctatgtccctcaggatg

SEQ ID NO: 3145035 - DNA, 25 bp, Homo sapien
tttcgtctatgtccctcaggatgac

SEQ ID NO: 3145036 - DNA, 25 bp, Homo sapien
cagtttcgtctatgtccctcaggat

SEQ ID NO: 3145037 - DNA, 25 bp, Homo sapien
cactgctgcgtgcactgtttttacc

SEQ ID NO: 3145038 - DNA, 25 bp, Homo sapien
tgctgcgtgcactgtttttacctga

SEQ ID NO: 3145039 - DNA, 25 bp, Homo sapien
tcaaacactgctgcgtgcactgttt

SEQ ID NO: 3145040 - DNA, 25 bp, Homo sapien
aacactgctgcgtgcactgttttta

SEQ ID NO: 3145041 - DNA, 25 bp, Homo sapien
tgggttccatgaagcacccctgtta

SEQ ID NO: 3145042 - DNA, 25 bp, Homo sapien
tgtaattttacttgggttccatgaa

SEQ ID NO: 3145043 - DNA, 25 bp, Homo sapien
ggttccatgaagcacccctgttatc

SEQ ID NO: 3145044 - DNA, 25 bp, Homo sapien
ttccatgaagcacccctgttatcat

SEQ ID NO: 3145045 - DNA, 25 bp, Homo sapien
tgccatgggcttgcacagtaaggct

SEQ ID NO: 3145046 - DNA, 25 bp, Homo sapien
tgcagatatactaaaagtgccatgg

SEQ ID NO: 3145047 - DNA, 25 bp, Homo sapien
aaagcagggacatatctagcttctg

SEQ ID NO: 3145048 - DNA, 25 bp, Homo sapien
caaagcagggacatatctagcttct

SEQ ID NO: 3145049 - DNA, 25 bp, Homo sapien
gaacagctgttgagattgccggagt

SEQ ID NO: 3145050 - DNA, 25 bp, Homo sapien
aggcctacacaaacagtaccctgag

SEQ ID NO: 3145051 - DNA, 25 bp, Homo sapien
cttcatacttacaagatcatacagg

SEQ ID NO: 3145052 - DNA, 25 bp, Homo sapien
tcatacaggaaatgcacagggagct

SEQ ID NO: 3145053 - DNA, 25 bp, Homo sapien
tagaagagctcaatagaatccattg

SEQ ID NO: 3145054 - DNA, 25 bp, Homo sapien
tccattgatggagtcctcatgagtc

SEQ ID NO: 3145055 - DNA, 25 bp, Homo sapien
taggtaaacccaaatagaagagctc

SEQ ID NO: 3145056 - DNA, 25 bp, Homo sapien
tcatagtgtccccattaggtaaacc

SEQ ID NO: 3145057 - DNA, 25 bp, Homo sapien
gattctgaagactgaccttgctgct

SEQ ID NO: 3145058 - DNA, 25 bp, Homo sapien
aaatgatgtctataaagcacctgac

SEQ ID NO: 3145059 - DNA, 25 bp, Homo sapien
gaggcgatttagcaaagggatcatt

SEQ ID NO: 3145060 - DNA, 25 bp, Homo sapien
gtaaaatacgaatctctggaggtgc

SEQ ID NO: 3145061 - DNA, 25 bp, Homo sapien
cagagctgctgactggccgagcgcc

SEQ ID NO: 3145062 - DNA, 25 bp, Homo sapien
agctgctgactggccgagcgccgta

SEQ ID NO: 3145063 - DNA, 25 bp, Homo sapien
tgcatagatgctggcagagctgctg

SEQ ID NO: 3145064 - DNA, 25 bp, Homo sapien
tagatgctggcagagctgctgactg

SEQ ID NO: 3145065 - DNA, 25 bp, Homo sapien
cctggaacccaatgccgagccggaa

SEQ ID NO: 3145066 - DNA, 25 bp, Homo sapien
gaacccaatgccgagccggaagctg

SEQ ID NO: 3145067 - DNA, 25 bp, Homo sapien
acccaatgccgagccggaagctggt

SEQ ID NO: 3145068 - DNA, 25 bp, Homo sapien
gcagccaggccctggaacccaatgc

SEQ ID NO: 3145069 - DNA, 25 bp, Homo sapien
catggcctccttatagttctgggtg

SEQ ID NO: 3145070 - DNA, 25 bp, Homo sapien
tttgcatggcctccttatagttctg

SEQ ID NO: 3145071 - DNA, 25 bp, Homo sapien
tcaggctttgcatggcctccttata

SEQ ID NO: 3145072 - DNA, 25 bp, Homo sapien
cctccttatagttctgggtgcctcc

SEQ ID NO: 3145073 - DNA, 25 bp, Homo sapien
ttgaagtaatggctccagactctga

SEQ ID NO: 3145074 - DNA, 25 bp, Homo sapien
tcttgaagtaatggctccagactct

SEQ ID NO: 3145075 - DNA, 25 bp, Homo sapien
ggtcttgaagtaatggctccagact

SEQ ID NO: 3145076 - DNA, 25 bp, Homo sapien
tgaagtaatggctccagactctgac

SEQ ID NO: 3145077 - DNA, 25 bp, Homo sapien
cttgactccaaagtcattagcagca

SEQ ID NO: 3145078 - DNA, 25 bp, Homo sapien
tccaaagtcattagcagcaagacgg

SEQ ID NO: 3145079 - DNA, 25 bp, Homo sapien
atacttgactccaaagtcattagca

SEQ ID NO: 3145080 - DNA, 25 bp, Homo sapien
gactccaaagtcattagcagcaaga

SEQ ID NO: 3145081 - DNA, 25 bp, Homo sapien
ggtgtcatcagtgagcttgcagagc

SEQ ID NO: 3145082 - DNA, 25 bp, Homo sapien
tggtgtcatcagtgagcttgcagag

SEQ ID NO: 3145083 - DNA, 25 bp, Homo sapien
agagcccatggatgtagttctttac

SEQ ID NO: 3145084 - DNA, 25 bp, Homo sapien
gcccatggatgtagttctttacaga

SEQ ID NO: 3145085 - DNA, 25 bp, Homo sapien
ctttgtggttcttcttcatgaagac

SEQ ID NO: 3145086 - DNA, 25 bp, Homo sapien
atctttgtggttcttcttcatgaag

SEQ ID NO: 3145087 - DNA, 25 bp, Homo sapien
taatctttgtggttcttcttcatga

SEQ ID NO: 3145088 - DNA, 25 bp, Homo sapien
ttaatctttgtggttcttcttcatg

SEQ ID NO: 3145089 - DNA, 25 bp, Homo sapien
agagctggcagtctgagcttgtaga

SEQ ID NO: 3145090 - DNA, 25 bp, Homo sapien
ctggcagtctgagcttgtagacctt

SEQ ID NO: 3145091 - DNA, 25 bp, Homo sapien
ggcagtctgagcttgtagacctttt

SEQ ID NO: 3145092 - DNA, 25 bp, Homo sapien
agctggcagtctgagcttgtagacc

SEQ ID NO: 3145093 - DNA, 25 bp, Homo sapien
gtatgtctcagctccgtgagcagca

SEQ ID NO: 3145094 - DNA, 25 bp, Homo sapien
tgcagggtgtaccgggcctccatct

SEQ ID NO: 3145095 - DNA, 25 bp, Homo sapien
ctccatctgcagggtgtaccgggcc

SEQ ID NO: 3145096 - DNA, 25 bp, Homo sapien
tctgcagggtgtaccgggcctccat

SEQ ID NO: 3145097 - DNA, 25 bp, Homo sapien
tgccatccactatcctgcgggtggt

SEQ ID NO: 3145098 - DNA, 25 bp, Homo sapien
tttgccatccactatcctgcgggtg

SEQ ID NO: 3145099 - DNA, 25 bp, Homo sapien
atccactatcctgcgggtggtggtc

SEQ ID NO: 3145100 - DNA, 25 bp, Homo sapien
actttgccatccactatcctgcggg

SEQ ID NO: 3145101 - DNA, 25 bp, Homo sapien
tgattaccgagctaattcttcttgc

SEQ ID NO: 3145102 - DNA, 25 bp, Homo sapien
aatctgaggataactaggcttccca

SEQ ID NO: 3145103 - DNA, 25 bp, Homo sapien
gattcctgtttaccagaaaatctga

SEQ ID NO: 3145104 - DNA, 25 bp, Homo sapien
gaaaaagcaaccctctctgagcaat

SEQ ID NO: 3145105 - DNA, 25 bp, Homo sapien
acagctctcagaagcgctacagggc

SEQ ID NO: 3145106 - DNA, 25 bp, Homo sapien
ttcacctaagtgtcgctgagccagg

SEQ ID NO: 3145107 - DNA, 25 bp, Homo sapien
caataagtccgtagagatcgaggtc

SEQ ID NO: 3145108 - DNA, 25 bp, Homo sapien
ggacgcatgaccttcacgagcaata

SEQ ID NO: 3145109 - DNA, 25 bp, Homo sapien
gaggtgcaggtcaacatgatgtccg

SEQ ID NO: 3145110 - DNA, 25 bp, Homo sapien
tggacaaggtcctcgaagagcctcc

SEQ ID NO: 3145111 - DNA, 25 bp, Homo sapien
tgtccgaaaacatcctcacaggtgc

SEQ ID NO: 3145112 - DNA, 25 bp, Homo sapien
aataaggccaccctctggtatgcgc

SEQ ID NO: 3145113 - DNA, 25 bp, Homo sapien
cgaacgccatccagatctgccggat

SEQ ID NO: 3145114 - DNA, 25 bp, Homo sapien
tggcccagacatcaagacgccgaac

SEQ ID NO: 3145115 - DNA, 25 bp, Homo sapien
attatgcggacgctaatgtggcccg

SEQ ID NO: 3145116 - DNA, 25 bp, Homo sapien
cccgcaatgtctaggcgggaccatc

SEQ ID NO: 3145117 - DNA, 25 bp, Homo sapien
agtcatcaatgccttgaagtttccc

SEQ ID NO: 3145118 - DNA, 25 bp, Homo sapien
tcccattcagccttgtattcctcat

SEQ ID NO: 3145119 - DNA, 25 bp, Homo sapien
atcaatgccttgaagtttcccattc

SEQ ID NO: 3145120 - DNA, 25 bp, Homo sapien
tttcccattcagccttgtattcctc

SEQ ID NO: 3145121 - DNA, 25 bp, Homo sapien
gccggttcggctgcttccggtcgcc

SEQ ID NO: 3145122 - DNA, 25 bp, Homo sapien
gcaagcccttcttcgagtgtcgggt

SEQ ID NO: 3145123 - DNA, 25 bp, Homo sapien
tctcccgttggagagcaagccctgc

SEQ ID NO: 3145124 - DNA, 25 bp, Homo sapien
caagtctcgcccgagagcgggccgt

SEQ ID NO: 3145125 - DNA, 25 bp, Homo sapien
cgcgccgcgcaaggctagcaagcag

SEQ ID NO: 3145126 - DNA, 25 bp, Homo sapien
gagggcgtcgaagccggtgccgcgt

SEQ ID NO: 3145127 - DNA, 25 bp, Homo sapien
gtgccgcgtcgtcgaacgcacaacg

SEQ ID NO: 3145128 - DNA, 25 bp, Homo sapien
tcgaacgcacaacgcggcgccgcag

SEQ ID NO: 3145129 - DNA, 25 bp, Homo sapien
gatgaatttccaaacggacggctta

SEQ ID NO: 3145130 - DNA, 25 bp, Homo sapien
taaataaacggctctgctaggacta

SEQ ID NO: 3145131 - DNA, 25 bp, Homo sapien
caaaatccgaacgtgtgagtggctg

SEQ ID NO: 3145132 - DNA, 25 bp, Homo sapien
gctaggactatgtgctcaggaaggt

SEQ ID NO: 3145133 - DNA, 25 bp, Homo sapien
acaggtccatagtacagggcatctc

SEQ ID NO: 3145134 - DNA, 25 bp, Homo sapien
cattttcgtacctggaatacacagg

SEQ ID NO: 3145135 - DNA, 25 bp, Homo sapien
cgtacctggaatacacaggtccata

SEQ ID NO: 3145136 - DNA, 25 bp, Homo sapien
ggaatacacaggtccatagtacagg

SEQ ID NO: 3145137 - DNA, 25 bp, Homo sapien
tgtctgtctagcatcgatgctgtca

SEQ ID NO: 3145138 - DNA, 25 bp, Homo sapien
cacagttgatatatgcaaactctac

SEQ ID NO: 3145139 - DNA, 25 bp, Homo sapien
gcatcgatgctgtcaacatgctcat

SEQ ID NO: 3145140 - DNA, 25 bp, Homo sapien
caacatgctcattaaggccacagtt

SEQ ID NO: 3145141 - DNA, 25 bp, Homo sapien
tcaacatgtcttataccacgaaagc

SEQ ID NO: 3145142 - DNA, 25 bp, Homo sapien
taacaccacaattcagttctttatg

SEQ ID NO: 3145143 - DNA, 25 bp, Homo sapien
gcttcctcagtcaacatgtcttata

SEQ ID NO: 3145144 - DNA, 25 bp, Homo sapien
tcttataccacgaaagctcttttga

SEQ ID NO: 3145145 - DNA, 25 bp, Homo sapien
tctatctgttataacatcctaaaca

SEQ ID NO: 3145146 - DNA, 25 bp, Homo sapien
aaagttggtggaatatagaaataag

SEQ ID NO: 3145147 - DNA, 25 bp, Homo sapien
gaaaacagtataaattatggcagaa

SEQ ID NO: 3145148 - DNA, 25 bp, Homo sapien
agaactcatcctttggaatactatg

SEQ ID NO: 3145149 - DNA, 25 bp, Homo sapien
acttcacgaatctgcgtgtcatatc

SEQ ID NO: 3145150 - DNA, 25 bp, Homo sapien
aatctgcgtgtcatatccttgcaca

SEQ ID NO: 3145151 - DNA, 25 bp, Homo sapien
tcacgaatctgcgtgtcatatcctt

SEQ ID NO: 3145152 - DNA, 25 bp, Homo sapien
acgaatctgcgtgtcatatccttgc

SEQ ID NO: 3145153 - DNA, 25 bp, Homo sapien
aaaaagaatacagcctgtggttaag

SEQ ID NO: 3145154 - DNA, 25 bp, Homo sapien
aaagaatacagcctgtggttaagca

SEQ ID NO: 3145155 - DNA, 25 bp, Homo sapien
agaatacagcctgtggttaagcacc

SEQ ID NO: 3145156 - DNA, 25 bp, Homo sapien
ctgtggttaagcaccaggaggtgtt

SEQ ID NO: 3145157 - DNA, 25 bp, Homo sapien
gcttcataatacagaacaggcacag

SEQ ID NO: 3145158 - DNA, 25 bp, Homo sapien
ccccgcttcataatacagaacaggc

SEQ ID NO: 3145159 - DNA, 25 bp, Homo sapien
cgcttcataatacagaacaggcaca

SEQ ID NO: 3145160 - DNA, 25 bp, Homo sapien
acagggcgtgggctgaagtatacgg

SEQ ID NO: 3145161 - DNA, 25 bp, Homo sapien
taagtgcgaattaaaactctaatga

SEQ ID NO: 3145162 - DNA, 25 bp, Homo sapien
tcactaaccattaagtaagtgcgaa

SEQ ID NO: 3145163 - DNA, 25 bp, Homo sapien
acacgaaagaggagatacaggtggc

SEQ ID NO: 3145164 - DNA, 25 bp, Homo sapien
taaaactctaatgaggtcaggtgcg

SEQ ID NO: 3145165 - DNA, 25 bp, Homo sapien
caaaatagggttaaatatcttgcac

SEQ ID NO: 3145166 - DNA, 25 bp, Homo sapien
gacatttaagtcataattcaaacaa

SEQ ID NO: 3145167 - DNA, 25 bp, Homo sapien
cttttcttagttaagatgtttgaca

SEQ ID NO: 3145168 - DNA, 25 bp, Homo sapien
acaaaatagggttaaatatcttgca

SEQ ID NO: 3145169 - DNA, 25 bp, Homo sapien
tgcagtcttccgaaaaggatttccc

SEQ ID NO: 3145170 - DNA, 25 bp, Homo sapien
tttgcagtcttccgaaaaggatttc

SEQ ID NO: 3145171 - DNA, 25 bp, Homo sapien
ttgcagtcttccgaaaaggatttcc

SEQ ID NO: 3145172 - DNA, 25 bp, Homo sapien
tcaaatacactacatcaggatccag

SEQ ID NO: 3145173 - DNA, 25 bp, Homo sapien
tgagatactggtgaagagttcttcc

SEQ ID NO: 3145174 - DNA, 25 bp, Homo sapien
agagtagtggttggctcctcacgac

SEQ ID NO: 3145175 - DNA, 25 bp, Homo sapien
tttgtctcacccatggaaggtagag

SEQ ID NO: 3145176 - DNA, 25 bp, Homo sapien
tgtgcacaagaactggcacctagta

SEQ ID NO: 3145177 - DNA, 25 bp, Homo sapien
ggcacctagtaagcacccaattaag

SEQ ID NO: 3145178 - DNA, 25 bp, Homo sapien
actggcacctagtaagcacccaatt

SEQ ID NO: 3145179 - DNA, 25 bp, Homo sapien
catgaaaaagtgctgtgcacaagaa

SEQ ID NO: 3145180 - DNA, 25 bp, Homo sapien
aatagacaatccatagcattttcaa

SEQ ID NO: 3145181 - DNA, 25 bp, Homo sapien
taatagacaatccatagcattttca

SEQ ID NO: 3145182 - DNA, 25 bp, Homo sapien
ctaatagacaatccatagcattttc

SEQ ID NO: 3145183 - DNA, 25 bp, Homo sapien
ttctatcttggtatcagtggcagat

SEQ ID NO: 3145184 - DNA, 25 bp, Homo sapien
ggttctcagaagcaacgaaactttg

SEQ ID NO: 3145185 - DNA, 25 bp, Homo sapien
ctgctgcacctacttggttctcaga

SEQ ID NO: 3145186 - DNA, 25 bp, Homo sapien
cagaagcaacgaaactttgtgaaga

SEQ ID NO: 3145187 - DNA, 25 bp, Homo sapien
aaaagcattctgtattaaggaatcc

SEQ ID NO: 3145188 - DNA, 25 bp, Homo sapien
aatccaggtcttcagttagctgcat

SEQ ID NO: 3145189 - DNA, 25 bp, Homo sapien
cagttagctgcatgtccaaaaatga

SEQ ID NO: 3145190 - DNA, 25 bp, Homo sapien
tctgtattaaggaatccaggtcttc

SEQ ID NO: 3145191 - DNA, 25 bp, Homo sapien
tgagtcattaaaactattaacatct

SEQ ID NO: 3145192 - DNA, 25 bp, Homo sapien
aactattaacatcttgtgaaggcaa

SEQ ID NO: 3145193 - DNA, 25 bp, Homo sapien
aacacttggactcgttcaaaactga

SEQ ID NO: 3145194 - DNA, 25 bp, Homo sapien
tacaacctgcgatggagtcacttgc

SEQ ID NO: 3145195 - DNA, 25 bp, Homo sapien
tacaggagcttcagagaattgagcc

SEQ ID NO: 3145196 - DNA, 25 bp, Homo sapien
gaattgagcctcaacgcactcagat

SEQ ID NO: 3145197 - DNA, 25 bp, Homo sapien
tgtagttgacagatctccagtgtgc

SEQ ID NO: 3145198 - DNA, 25 bp, Homo sapien
gatcccggaagacctctgagaagaa

SEQ ID NO: 3145199 - DNA, 25 bp, Homo sapien
gaaacacatcagagacccgagtaga

SEQ ID NO: 3145200 - DNA, 25 bp, Homo sapien
gcaagtaccgggcagtaactcacat

SEQ ID NO: 3145201 - DNA, 25 bp, Homo sapien
aatcatcagtactaagaatgactcc

SEQ ID NO: 3145202 - DNA, 25 bp, Homo sapien
cattcatgtgcttctcctaagtact

SEQ ID NO: 3145203 - DNA, 25 bp, Homo sapien
gactccacttggattatcctcttgc

SEQ ID NO: 3145204 - DNA, 25 bp, Homo sapien
tcaaactggtactgtccatttatat

SEQ ID NO: 3145205 - DNA, 25 bp, Homo sapien
ttcccatgcctgtaggtttgtatta

SEQ ID NO: 3145206 - DNA, 25 bp, Homo sapien
catttcccatgcctgtaggtttgta

SEQ ID NO: 3145207 - DNA, 25 bp, Homo sapien
tctataattataggagatatcttct

SEQ ID NO: 3145208 - DNA, 25 bp, Homo sapien
aattataggagatatcttcttctca

SEQ ID NO: 3145209 - DNA, 25 bp, Homo sapien
ccatgtgtctggttcccgaaaaagg

SEQ ID NO: 3145210 - DNA, 25 bp, Homo sapien
tccaccatgtgtctggttcccgaaa

SEQ ID NO: 3145211 - DNA, 25 bp, Homo sapien
catgtgtctggttcccgaaaaagga

SEQ ID NO: 3145212 - DNA, 25 bp, Homo sapien
caccatgtgtctggttcccgaaaaa

SEQ ID NO: 3145213 - DNA, 25 bp, Homo sapien
ttctttgcttaccccatgaatgtta

SEQ ID NO: 3145214 - DNA, 25 bp, Homo sapien
taatgttccaacattcttgttattt

SEQ ID NO: 3145215 - DNA, 25 bp, Homo sapien
acaaaacgttgataatgttccaaca

SEQ ID NO: 3145216 - DNA, 25 bp, Homo sapien
tttgcttaccccatgaatgttacgc

SEQ ID NO: 3145217 - DNA, 25 bp, Homo sapien
ggaaccgaagaactcataattattg

SEQ ID NO: 3145218 - DNA, 25 bp, Homo sapien
gaaccgaagaactcataattattgg

SEQ ID NO: 3145219 - DNA, 25 bp, Homo sapien
ctggaaccgaagaactcataattat

SEQ ID NO: 3145220 - DNA, 25 bp, Homo sapien
accgaagaactcataattattggca

SEQ ID NO: 3145221 - DNA, 25 bp, Homo sapien
gcttctatcctcacaagaatatgca

SEQ ID NO: 3145222 - DNA, 25 bp, Homo sapien
ctagtgcttctatcctcacaagaat

SEQ ID NO: 3145223 - DNA, 25 bp, Homo sapien
ctatcctcacaagaatatgcacaca

SEQ ID NO: 3145224 - DNA, 25 bp, Homo sapien
cacaactcaatacgttcaattttct

SEQ ID NO: 3145225 - DNA, 25 bp, Homo sapien
gaatgctaggattcatatcacttat

SEQ ID NO: 3145226 - DNA, 25 bp, Homo sapien
tctcttcagtgaactctagatgctt

SEQ ID NO: 3145227 - DNA, 25 bp, Homo sapien
aatctgcattagagagatatgcaac

SEQ ID NO: 3145228 - DNA, 25 bp, Homo sapien
tatgcaacattctcaggtaacattg

SEQ ID NO: 3145229 - DNA, 25 bp, Homo sapien
cactacagcaagtactaggtgatac

SEQ ID NO: 3145230 - DNA, 25 bp, Homo sapien
tgcaagatcacagtcttcttgatta

SEQ ID NO: 3145231 - DNA, 25 bp, Homo sapien
taggtgatactctctccatagaact

SEQ ID NO: 3145232 - DNA, 25 bp, Homo sapien
tttcaccaggtgaggatttttcatt

SEQ ID NO: 3145233 - DNA, 25 bp, Homo sapien
tcatgtggagatcctcgttgctgga

SEQ ID NO: 3145234 - DNA, 25 bp, Homo sapien
tttagtttttgagagcttgtgcccc

SEQ ID NO: 3145235 - DNA, 25 bp, Homo sapien
gaaggccagtcacccataatgttga

SEQ ID NO: 3145236 - DNA, 25 bp, Homo sapien
taggttgggctcacttaaaccagtc

SEQ ID NO: 3145237 - DNA, 25 bp, Homo sapien
cagaaacagttggtgcactattggt

SEQ ID NO: 3145238 - DNA, 25 bp, Homo sapien
tccagggtctctcttaggcatttgc

SEQ ID NO: 3145239 - DNA, 25 bp, Homo sapien
caacgatgtgtgttgcccatgactc

SEQ ID NO: 3145240 - DNA, 25 bp, Homo sapien
tgtggttctactactccagaaacag

SEQ ID NO: 3145241 - DNA, 25 bp, Homo sapien
gcttgtggcccaaataatatcttta

SEQ ID NO: 3145242 - DNA, 25 bp, Homo sapien
tgtgatccatcacacgatttttgga

SEQ ID NO: 3145243 - DNA, 25 bp, Homo sapien
agattcatctgcactggtaagctca

SEQ ID NO: 3145244 - DNA, 25 bp, Homo sapien
tgtggttcagtctgggtgcacatgc

SEQ ID NO: 3145245 - DNA, 25 bp, Homo sapien
gataaactacttcctgccattagaa

SEQ ID NO: 3145246 - DNA, 25 bp, Homo sapien
gactgtgagtcagcgttactaatac

SEQ ID NO: 3145247 - DNA, 25 bp, Homo sapien
tctttctgcatcacaagtagactgt

SEQ ID NO: 3145248 - DNA, 25 bp, Homo sapien
tacctggaaaggactgcttactgct

SEQ ID NO: 3145249 - DNA, 25 bp, Homo sapien
tcattaagttgaaaagccagttcag

SEQ ID NO: 3145250 - DNA, 25 bp, Homo sapien
ttccagacagtctatggtcagagat

SEQ ID NO: 3145251 - DNA, 25 bp, Homo sapien
gccaattccagacagtctatggtca

SEQ ID NO: 3145252 - DNA, 25 bp, Homo sapien
cagttcagggggtaatgccaattcc

SEQ ID NO: 3145253 - DNA, 25 bp, Homo sapien
atcattactcattatatatttgcag

SEQ ID NO: 3145254 - DNA, 25 bp, Homo sapien
taaaccaccttatgcatcacaaaac

SEQ ID NO: 3145255 - DNA, 25 bp, Homo sapien
gaaaacatactaaaccaccttatgc

SEQ ID NO: 3145256 - DNA, 25 bp, Homo sapien
cctaacttatgcttctatttactaa

SEQ ID NO: 3145257 - DNA, 25 bp, Homo sapien
gattcagatctatatgaaccacaca

SEQ ID NO: 3145258 - DNA, 25 bp, Homo sapien
ttccatttctcatgaatcactttcg

SEQ ID NO: 3145259 - DNA, 25 bp, Homo sapien
tatgaaccacacaatcttcaactgt

SEQ ID NO: 3145260 - DNA, 25 bp, Homo sapien
cactttcgccagattcagatctata

SEQ ID NO: 3145261 - DNA, 25 bp, Homo sapien
attatgtggtagatttcactgaaat

SEQ ID NO: 3145262 - DNA, 25 bp, Homo sapien
taatattatgtggtagatttcactg

SEQ ID NO: 3145263 - DNA, 25 bp, Homo sapien
aatattatgtggtagatttcactga

SEQ ID NO: 3145264 - DNA, 25 bp, Homo sapien
tattatgtggtagatttcactgaaa

SEQ ID NO: 3145265 - DNA, 25 bp, Homo sapien
caggaggatcatgtgcccagtagtt

SEQ ID NO: 3145266 - DNA, 25 bp, Homo sapien
ttaattctgggagtgaaaaactcac

SEQ ID NO: 3145267 - DNA, 25 bp, Homo sapien
taaccaatcagcattgaagtcttta

SEQ ID NO: 3145268 - DNA, 25 bp, Homo sapien
tcttgttatgaagaatggtctgaaa

SEQ ID NO: 3145269 - DNA, 25 bp, Homo sapien
cataaacttgccacaagacacctct

SEQ ID NO: 3145270 - DNA, 25 bp, Homo sapien
tgcataaacttgccacaagacacct

SEQ ID NO: 3145271 - DNA, 25 bp, Homo sapien
gcataaacttgccacaagacacctc

SEQ ID NO: 3145272 - DNA, 25 bp, Homo sapien
taaaggtagcatttcagatgctgtt

SEQ ID NO: 3145273 - DNA, 25 bp, Homo sapien
caatgatccaataaaggtagcattt

SEQ ID NO: 3145274 - DNA, 25 bp, Homo sapien
gtttgagtattccaatgatccaata

SEQ ID NO: 3145275 - DNA, 25 bp, Homo sapien
cttttttagtttgagtattccaatg

SEQ ID NO: 3145276 - DNA, 25 bp, Homo sapien
taaaaattacaatagctgaggtagg

SEQ ID NO: 3145277 - DNA, 25 bp, Homo sapien
caggtgtgatggcaagagtcccagc

SEQ ID NO: 3145278 - DNA, 25 bp, Homo sapien
ttttaattctaacctaagatgataa

SEQ ID NO: 3145279 - DNA, 25 bp, Homo sapien
ggatctgctctaaactgtcagacaa

SEQ ID NO: 3145280 - DNA, 25 bp, Homo sapien
aatggctggaaatatcttaaagagc

SEQ ID NO: 3145281 - DNA, 25 bp, Homo sapien
tttggttaatggctggaaatatctt

SEQ ID NO: 3145282 - DNA, 25 bp, Homo sapien
ggttaatggctggaaatatcttaaa

SEQ ID NO: 3145283 - DNA, 25 bp, Homo sapien
aattttggttaatggctggaaatat

SEQ ID NO: 3145284 - DNA, 25 bp, Homo sapien
gaacacagttaagaaattgcactgt

SEQ ID NO: 3145285 - DNA, 25 bp, Homo sapien
tttttctctttagacttctggccag

SEQ ID NO: 3145286 - DNA, 25 bp, Homo sapien
tatgagatgtgacattctcattttg

SEQ ID NO: 3145287 - DNA, 25 bp, Homo sapien
ttttggtgaacaaactcttgggcta

SEQ ID NO: 3145288 - DNA, 25 bp, Homo sapien
cacatgcgaaagaatcaacttgaac

SEQ ID NO: 3145289 - DNA, 25 bp, Homo sapien
taggagtccagcaataaatccttgt

SEQ ID NO: 3145290 - DNA, 25 bp, Homo sapien
ccacagtaatcaagaagccgcagta

SEQ ID NO: 3145291 - DNA, 25 bp, Homo sapien
gccgcagtaatcaagacaagtggta

SEQ ID NO: 3145292 - DNA, 25 bp, Homo sapien
gacagttcacttggtgtttcttcag

SEQ ID NO: 3145293 - DNA, 25 bp, Homo sapien
gaaagacagttcacttggtgtttct

SEQ ID NO: 3145294 - DNA, 25 bp, Homo sapien
tggaaagacagttcacttggtgttt

SEQ ID NO: 3145295 - DNA, 25 bp, Homo sapien
agacagttcacttggtgtttcttca

SEQ ID NO: 3145296 - DNA, 25 bp, Homo sapien
ctgctgggcataaaaggtggcgaca

SEQ ID NO: 3145297 - DNA, 25 bp, Homo sapien
tttccctatccgataagcttctttg

SEQ ID NO: 3145298 - DNA, 25 bp, Homo sapien
ctgggcataaaaggtggcgacattt

SEQ ID NO: 3145299 - DNA, 25 bp, Homo sapien
ccctatccgataagcttctttggcc

SEQ ID NO: 3145300 - DNA, 25 bp, Homo sapien
tcaaagatctctatggcagcaaggt

SEQ ID NO: 3145301 - DNA, 25 bp, Homo sapien
gcgaagcattgactttctcaaagat

SEQ ID NO: 3145302 - DNA, 25 bp, Homo sapien
ttctgtggcagcagcgaagcattga

SEQ ID NO: 3145303 - DNA, 25 bp, Homo sapien
tggaggtctaaaacattctgtggca

SEQ ID NO: 3145304 - DNA, 25 bp, Homo sapien
tacactagcaatatatgagggctcc

SEQ ID NO: 3145305 - DNA, 25 bp, Homo sapien
ggctgttgcagacattcatatgcaa

SEQ ID NO: 3145306 - DNA, 25 bp, Homo sapien
tccaggctgggtgaaacaacctaat

SEQ ID NO: 3145307 - DNA, 25 bp, Homo sapien
aaatttttcacagtggctacactag

SEQ ID NO: 3145308 - DNA, 25 bp, Homo sapien
tttgatgcgagcaactcctccctgg

SEQ ID NO: 3145309 - DNA, 25 bp, Homo sapien
taatcacagacaaatagggcttccc

SEQ ID NO: 3145310 - DNA, 25 bp, Homo sapien
gaagctatggcttatgaggtactta

SEQ ID NO: 3145311 - DNA, 25 bp, Homo sapien
gaggtacttaatgacagctggtttg

SEQ ID NO: 3145312 - DNA, 25 bp, Homo sapien
aatatgctacactgaaattggtggg

SEQ ID NO: 3145313 - DNA, 25 bp, Homo sapien
tatttcaatagaagccacccaattc

SEQ ID NO: 3145314 - DNA, 25 bp, Homo sapien
gatgtcacctgttttatgctcataa

SEQ ID NO: 3145315 - DNA, 25 bp, Homo sapien
cataatgttctggtctaactactcc

SEQ ID NO: 3145316 - DNA, 25 bp, Homo sapien
tcaagcaccctggtttaatttcaga

SEQ ID NO: 3145317 - DNA, 25 bp, Homo sapien
tttcaagcaccctggtttaatttca

SEQ ID NO: 3145318 - DNA, 25 bp, Homo sapien
ttcaagcaccctggtttaatttcag

SEQ ID NO: 3145319 - DNA, 25 bp, Homo sapien
tgaaatacgacttatacagacagtt

SEQ ID NO: 3145320 - DNA, 25 bp, Homo sapien
gggcatgaatcaggtctcaaagcac

SEQ ID NO: 3145321 - DNA, 25 bp, Homo sapien
gcatttcgataaggcagcaacatct

SEQ ID NO: 3145322 - DNA, 25 bp, Homo sapien
gatcaaggtcatatacaaagcagaa

SEQ ID NO: 3145323 - DNA, 25 bp, Homo sapien
caaactatctttactgcgggcatac

SEQ ID NO: 3145324 - DNA, 25 bp, Homo sapien
gaaataagtctagctgaagtgccga

SEQ ID NO: 3145325 - DNA, 25 bp, Homo sapien
tacaggttgagtgagtatcccctac

SEQ ID NO: 3145326 - DNA, 25 bp, Homo sapien
taatatctccctggtccaactggac

SEQ ID NO: 3145327 - DNA, 25 bp, Homo sapien
gacagttagagatgtagccacccac

SEQ ID NO: 3145328 - DNA, 25 bp, Homo sapien
caccctggcctaggaaaatgagggc

SEQ ID NO: 3145329 - DNA, 25 bp, Homo sapien
tttcctccagcagaatacagatgtg

SEQ ID NO: 3145330 - DNA, 25 bp, Homo sapien
tagaagtgtcctacggcaggttcca

SEQ ID NO: 3145331 - DNA, 25 bp, Homo sapien
ctttgtcaggcagctagtggcggca

SEQ ID NO: 3145332 - DNA, 25 bp, Homo sapien
gtctatcctggtaattgcatcctga

SEQ ID NO: 3145333 - DNA, 25 bp, Homo sapien
ggcggcattatcaggccaagacctc

SEQ ID NO: 3145334 - DNA, 25 bp, Homo sapien
aatgccaactgtcgtgtgattgtca

SEQ ID NO: 3145335 - DNA, 25 bp, Homo sapien
tgaaaagaaaaacgtagcccagagc

SEQ ID NO: 3145336 - DNA, 25 bp, Homo sapien
caaacaaaacagtgaggtcccgctg

SEQ ID NO: 3145337 - DNA, 25 bp, Homo sapien
tcaccagagtcttcagagtctcagc

SEQ ID NO: 3145338 - DNA, 25 bp, Homo sapien
ggtcccgctgcaaagaactgtttca

SEQ ID NO: 3145339 - DNA, 25 bp, Homo sapien
tggcatgcatcactacgccaagcta

SEQ ID NO: 3145340 - DNA, 25 bp, Homo sapien
ctggcatgcatcactacgccaagct

SEQ ID NO: 3145341 - DNA, 25 bp, Homo sapien
cagacaatgaaggcaaaatctaatt

SEQ ID NO: 3145342 - DNA, 25 bp, Homo sapien
actggcatgcatcactacgccaagc

SEQ ID NO: 3145343 - DNA, 25 bp, Homo sapien
atgcttggctggaaagagacttctt

SEQ ID NO: 3145344 - DNA, 25 bp, Homo sapien
gatatgattccactgtctgatacca

SEQ ID NO: 3145345 - DNA, 25 bp, Homo sapien
tcagagtatgtttaggtgtatgcct

SEQ ID NO: 3145346 - DNA, 25 bp, Homo sapien
caatcctgcctagaatttagtgaac

SEQ ID NO: 3145347 - DNA, 25 bp, Homo sapien
tgtaacttttactcccaggctctag

SEQ ID NO: 3145348 - DNA, 25 bp, Homo sapien
tatgctttcccactccactagtggt

SEQ ID NO: 3145349 - DNA, 25 bp, Homo sapien
taccacctcttaggttttgctgaga

SEQ ID NO: 3145350 - DNA, 25 bp, Homo sapien
tgtaagaatatactatttccccacc

SEQ ID NO: 3145351 - DNA, 25 bp, Homo sapien
gaactttgactacagacagaaggct

SEQ ID NO: 3145352 - DNA, 25 bp, Homo sapien
gggactcttggaactttgactacag

SEQ ID NO: 3145353 - DNA, 25 bp, Homo sapien
gactcttggaactttgactacagac

SEQ ID NO: 3145354 - DNA, 25 bp, Homo sapien
cttggaactttgactacagacagaa

SEQ ID NO: 3145355 - DNA, 25 bp, Homo sapien
caggcacctgggctatgtaagattt

SEQ ID NO: 3145356 - DNA, 25 bp, Homo sapien
gagcagccgtaaagagagccaaagc

SEQ ID NO: 3145357 - DNA, 25 bp, Homo sapien
taaagttgctgtcccctaaagagcc

SEQ ID NO: 3145358 - DNA, 25 bp, Homo sapien
tattcaaaggacagagtgaacccat

SEQ ID NO: 3145359 - DNA, 25 bp, Homo sapien
aaaatttcaagattagtcataaaca

SEQ ID NO: 3145360 - DNA, 25 bp, Homo sapien
aaatttcaagattagtcataaacaa

SEQ ID NO: 3145361 - DNA, 25 bp, Homo sapien
taaaatttcaagattagtcataaac

SEQ ID NO: 3145362 - DNA, 25 bp, Homo sapien
tcataatctgaacaggttagctctc

SEQ ID NO: 3145363 - DNA, 25 bp, Homo sapien
gcctgtaatttcctgggttagccca

SEQ ID NO: 3145364 - DNA, 25 bp, Homo sapien
cctcctgagttttggaagatgttac

SEQ ID NO: 3145365 - DNA, 25 bp, Homo sapien
ggaattccacccactaacgcacagt

SEQ ID NO: 3145366 - DNA, 25 bp, Homo sapien
taggagctttttcaagacgcagcac

SEQ ID NO: 3145367 - DNA, 25 bp, Homo sapien
ggttgtaggagctttttcaagacgc

SEQ ID NO: 3145368 - DNA, 25 bp, Homo sapien
agctttttcaagacgcagcaccacc

SEQ ID NO: 3145369 - DNA, 25 bp, Homo sapien
tgtaggagctttttcaagacgcagc

SEQ ID NO: 3145370 - DNA, 25 bp, Homo sapien
atgcacagtccgcttcctattctgc

SEQ ID NO: 3145371 - DNA, 25 bp, Homo sapien
ttgctgatgcacagtccgcttccta

SEQ ID NO: 3145372 - DNA, 25 bp, Homo sapien
gctgatgcacagtccgcttcctatt

SEQ ID NO: 3145373 - DNA, 25 bp, Homo sapien
ctccttgctgatgcacagtccgctt

SEQ ID NO: 3145374 - DNA, 25 bp, Homo sapien
tcgccataatgttcaatggtcttta

SEQ ID NO: 3145375 - DNA, 25 bp, Homo sapien
ggtctttatcatcggcgtaaatccg

SEQ ID NO: 3145376 - DNA, 25 bp, Homo sapien
accgcgcctcgccataatgttcaat

SEQ ID NO: 3145377 - DNA, 25 bp, Homo sapien
cgtaaatccgtaggtttaatgatca

SEQ ID NO: 3145378 - DNA, 25 bp, Homo sapien
tgcagtgttcacttcagaggtccca

SEQ ID NO: 3145379 - DNA, 25 bp, Homo sapien
ggtactgaacaaccactttctgacc

SEQ ID NO: 3145380 - DNA, 25 bp, Homo sapien
gaccaataaatagattgattctccc

SEQ ID NO: 3145381 - DNA, 25 bp, Homo sapien
gaaatccaaggtactgaacaaccac

SEQ ID NO: 3145382 - DNA, 25 bp, Homo sapien
cacagttcgtaactgggaatcagag

SEQ ID NO: 3145383 - DNA, 25 bp, Homo sapien
gggcgtgtcccttctgacgctgtgc

SEQ ID NO: 3145384 - DNA, 25 bp, Homo sapien
ggaaaccatgggtccacagttcgta

SEQ ID NO: 3145385 - DNA, 25 bp, Homo sapien
aatcctggggacttcagagtggcag

SEQ ID NO: 3145386 - DNA, 25 bp, Homo sapien
cccctggctgaccacccttctgctt

SEQ ID NO: 3145387 - DNA, 25 bp, Homo sapien
ttttagatgatctggtacagtccag

SEQ ID NO: 3145388 - DNA, 25 bp, Homo sapien
ctggaattgccagttttagatgatc

SEQ ID NO: 3145389 - DNA, 25 bp, Homo sapien
gccagttttagatgatctggtacag

SEQ ID NO: 3145390 - DNA, 25 bp, Homo sapien
gccacaagtccgtgaggtggttcct

SEQ ID NO: 3145391 - DNA, 25 bp, Homo sapien
gctgattgcatctcaccgaagagtt

SEQ ID NO: 3145392 - DNA, 25 bp, Homo sapien
accatgtttagactccacgcagcca

SEQ ID NO: 3145393 - DNA, 25 bp, Homo sapien
gagaagacaacacggctgaagtgaa

SEQ ID NO: 3145394 - DNA, 25 bp, Homo sapien
ccaccccaagatggttgggttagtg

SEQ ID NO: 3145395 - DNA, 25 bp, Homo sapien
caatttcctgtagccggcttctccg

SEQ ID NO: 3145396 - DNA, 25 bp, Homo sapien
aaagagattagcaagttcctgtgcc

SEQ ID NO: 3145397 - DNA, 25 bp, Homo sapien
cagcaggagcaatccgaatgtgaca

SEQ ID NO: 3145398 - DNA, 25 bp, Homo sapien
cactgtggttgatttcctcatagga

SEQ ID NO: 3145399 - DNA, 25 bp, Homo sapien
cagaatgccgaagaaatgtcttgac

SEQ ID NO: 3145400 - DNA, 25 bp, Homo sapien
ccaagccttttcactgtggttgatt

SEQ ID NO: 3145401 - DNA, 25 bp, Homo sapien
tcccgagaatattaactgattcaca

SEQ ID NO: 3145402 - DNA, 25 bp, Homo sapien
tatacatcatagagcacttttggga

SEQ ID NO: 3145403 - DNA, 25 bp, Homo sapien
tccacggcaccagcttagaaccaat

SEQ ID NO: 3145404 - DNA, 25 bp, Homo sapien
gactggtacctcgtagcatatctcc

SEQ ID NO: 3145405 - DNA, 25 bp, Homo sapien
tacaactcaggctactgactggtac

SEQ ID NO: 3145406 - DNA, 25 bp, Homo sapien
ggtcagtctcgcctttgtgcctttg

SEQ ID NO: 3145407 - DNA, 25 bp, Homo sapien
gtgtccacaccctaactgtctaatc

SEQ ID NO: 3145408 - DNA, 25 bp, Homo sapien
caaggtcctcgcttttgtgtccaca

SEQ ID NO: 3145409 - DNA, 25 bp, Homo sapien
ttcaactggccttatcatctccagg

SEQ ID NO: 3145410 - DNA, 25 bp, Homo sapien
catgcaaagtgatctggctcaaaag

SEQ ID NO: 3145411 - DNA, 25 bp, Homo sapien
tgatctctacgacaaccctctgagg

SEQ ID NO: 3145412 - DNA, 25 bp, Homo sapien
tggcaatagccaagtccttaataag

SEQ ID NO: 3145413 - DNA, 25 bp, Homo sapien
ttttttcagtcaggcactaggctac

SEQ ID NO: 3145414 - DNA, 25 bp, Homo sapien
caggcaaatgtgatgagaaccgtat

SEQ ID NO: 3145415 - DNA, 25 bp, Homo sapien
cacctgtccgggttgaataattctg

SEQ ID NO: 3145416 - DNA, 25 bp, Homo sapien
gatgactatacgtagttctcaggca

SEQ ID NO: 3145417 - DNA, 25 bp, Homo sapien
tttacttaacgaggcactgaatgga

SEQ ID NO: 3145418 - DNA, 25 bp, Homo sapien
cattctttttctccggagggatgaa

SEQ ID NO: 3145419 - DNA, 25 bp, Homo sapien
tatgaccgtgacatgagaatgtggc

SEQ ID NO: 3145420 - DNA, 25 bp, Homo sapien
catcttaccacttccagtagggttg

SEQ ID NO: 3145421 - DNA, 25 bp, Homo sapien
agatgaagtgcgtttctctttctca

SEQ ID NO: 3145422 - DNA, 25 bp, Homo sapien
tagagtctctcaagaaggtgacagc

SEQ ID NO: 3145423 - DNA, 25 bp, Homo sapien
aaccacagttgggatcattttcagc

SEQ ID NO: 3145424 - DNA, 25 bp, Homo sapien
tcctatttcctgtacgtgcctccaa

SEQ ID NO: 3145425 - DNA, 25 bp, Homo sapien
tatagtgacaatattgttttggcac

SEQ ID NO: 3145426 - DNA, 25 bp, Homo sapien
ctgaccccaggaggtggaaggtgca

SEQ ID NO: 3145427 - DNA, 25 bp, Homo sapien
tagccggcatggtggtgcattcctg

SEQ ID NO: 3145428 - DNA, 25 bp, Homo sapien
ggaaggtgcagtgagccatcatcat

SEQ ID NO: 3145429 - DNA, 25 bp, Homo sapien
tcacctgaccccaggaggtggaagg

SEQ ID NO: 3145430 - DNA, 25 bp, Homo sapien
actatcatagttagctacccatggg

SEQ ID NO: 3145431 - DNA, 25 bp, Homo sapien
ggctgaattctagtgtcttcccaac

SEQ ID NO: 3145432 - DNA, 25 bp, Homo sapien
gaggctttacaaacctggcccaaga

SEQ ID NO: 3145433 - DNA, 25 bp, Homo sapien
tattcctgcataaagtagagtgttc

SEQ ID NO: 3145434 - DNA, 25 bp, Homo sapien
gattggagtccacccaggtaactgg

SEQ ID NO: 3145435 - DNA, 25 bp, Homo sapien
gaaaacgagctgcagttccgatggc

SEQ ID NO: 3145436 - DNA, 25 bp, Homo sapien
gatacccctgatgtctcgtaagagg

SEQ ID NO: 3145437 - DNA, 25 bp, Homo sapien
gaaacgcagctctcgtcaggactag

SEQ ID NO: 3145438 - DNA, 25 bp, Homo sapien
caatgttctgcgtataaatgacctc

SEQ ID NO: 3145439 - DNA, 25 bp, Homo sapien
gtaccatatagctaggacctcagag

SEQ ID NO: 3145440 - DNA, 25 bp, Homo sapien
ggagaggtcatgcaatggccacaca

SEQ ID NO: 3145441 - DNA, 25 bp, Homo sapien
gaatggtgtggctgtacttcatcac

SEQ ID NO: 3145442 - DNA, 25 bp, Homo sapien
tcttaaggccctaggatctgttgga

SEQ ID NO: 3145443 - DNA, 25 bp, Homo sapien
taggtgcgttgtccatgagctgtaa

SEQ ID NO: 3145444 - DNA, 25 bp, Homo sapien
aattctattgtacactgtagccacc

SEQ ID NO: 3145445 - DNA, 25 bp, Homo sapien
ttgaagccaagtattgacctcttac

SEQ ID NO: 3145446 - DNA, 25 bp, Homo sapien
tgaagatgcaacttggccccaaagc

SEQ ID NO: 3145447 - DNA, 25 bp, Homo sapien
taaatgcggagaccttttaatccag

SEQ ID NO: 3145448 - DNA, 25 bp, Homo sapien
gctctagtgaaagctgtacacacca

SEQ ID NO: 3145449 - DNA, 25 bp, Homo sapien
taaactcaggactatgctgtgccat

SEQ ID NO: 3145450 - DNA, 25 bp, Homo sapien
gcctctgagcccattcataggtctc

SEQ ID NO: 3145451 - DNA, 25 bp, Homo sapien
aactgagcaatcctaaaacagtggc

SEQ ID NO: 3145452 - DNA, 25 bp, Homo sapien
tgacaagctaatgagaagagatgct

SEQ ID NO: 3145453 - DNA, 25 bp, Homo sapien
tacaacaagactgcatgtggtcaat

SEQ ID NO: 3145454 - DNA, 25 bp, Homo sapien
cagtgtgtaaggctgccgatatgca

SEQ ID NO: 3145455 - DNA, 25 bp, Homo sapien
tgttctggatatgcagcccagagca

SEQ ID NO: 3145456 - DNA, 25 bp, Homo sapien
cattctctagaagtaggataacccc

SEQ ID NO: 3145457 - DNA, 25 bp, Homo sapien
ggataaccccttaacttgcagattg

SEQ ID NO: 3145458 - DNA, 25 bp, Homo sapien
tttccagcaagacggtcattgtttc

SEQ ID NO: 3145459 - DNA, 25 bp, Homo sapien
tcagcacactttccatctacacagg

SEQ ID NO: 3145460 - DNA, 25 bp, Homo sapien
taaagtagcatgttccctgctgcgg

SEQ ID NO: 3145461 - DNA, 25 bp, Homo sapien
taagcacaatgctcatatagctaga

SEQ ID NO: 3145462 - DNA, 25 bp, Homo sapien
aatacagactctacctgcaactcag

SEQ ID NO: 3145463 - DNA, 25 bp, Homo sapien
gagatgacccaaactcaactttcta

SEQ ID NO: 3145464 - DNA, 25 bp, Homo sapien
gaaaatcttgcgcttcaatacagac

SEQ ID NO: 3145465 - DNA, 25 bp, Homo sapien
tcggccctccctgggtagaattctg

SEQ ID NO: 3145466 - DNA, 25 bp, Homo sapien
cactcccaggagcacaatcaaggaa

SEQ ID NO: 3145467 - DNA, 25 bp, Homo sapien
tagtccggttcaatttcagagtcaa

SEQ ID NO: 3145468 - DNA, 25 bp, Homo sapien
tgaagcctctctgagccgtgtgtcc

SEQ ID NO: 3145469 - DNA, 25 bp, Homo sapien
caaggaatcgttgcctgaggtctag

SEQ ID NO: 3145470 - DNA, 25 bp, Homo sapien
tacccacgtggtgttcactttcctg

SEQ ID NO: 3145471 - DNA, 25 bp, Homo sapien
gaaaatccaccaagctgtataccca

SEQ ID NO: 3145472 - DNA, 25 bp, Homo sapien
ccaagctgtatacccacgtggtgtt

SEQ ID NO: 3145473 - DNA, 25 bp, Homo sapien
ttgatgttttaaaggacatctgttg

SEQ ID NO: 3145474 - DNA, 25 bp, Homo sapien
ttcactatctaacaaatagacactt

SEQ ID NO: 3145475 - DNA, 25 bp, Homo sapien
tatctaacaaatagacacttgtata

SEQ ID NO: 3145476 - DNA, 25 bp, Homo sapien
ctagttttcactatctaacaaatag

SEQ ID NO: 3145477 - DNA, 25 bp, Homo sapien
gttttcactatctaacaaatagaca

SEQ ID NO: 3145478 - DNA, 25 bp, Homo sapien
aggcttgtatgcagtggcacgatat

SEQ ID NO: 3145479 - DNA, 25 bp, Homo sapien
acgatattggctcactgccgcctcc

SEQ ID NO: 3145480 - DNA, 25 bp, Homo sapien
gcttgtatgcagtggcacgatattg

SEQ ID NO: 3145481 - DNA, 25 bp, Homo sapien
cacgatattggctcactgccgcctc

SEQ ID NO: 3145482 - DNA, 25 bp, Homo sapien
tgcccaaccgactacctatgtgacg

SEQ ID NO: 3145483 - DNA, 25 bp, Homo sapien
gcattgaatctgagctgcccaaccg

SEQ ID NO: 3145484 - DNA, 25 bp, Homo sapien
catgggctttaaagtcaggtggacc

SEQ ID NO: 3145485 - DNA, 25 bp, Homo sapien
taagtgtgcttagagctgagagtgc

SEQ ID NO: 3145486 - DNA, 25 bp, Homo sapien
catctgggaattataggaagccatc

SEQ ID NO: 3145487 - DNA, 25 bp, Homo sapien
gagtctgatttagcacaaaacctgg

SEQ ID NO: 3145488 - DNA, 25 bp, Homo sapien
gagggctccataggcttccgttaaa

SEQ ID NO: 3145489 - DNA, 25 bp, Homo sapien
aggttactgtcacacaccgtggtca

SEQ ID NO: 3145490 - DNA, 25 bp, Homo sapien
gagagcgttctccacggcttcagtt

SEQ ID NO: 3145491 - DNA, 25 bp, Homo sapien
tctctgtcggcttctactccaagaa

SEQ ID NO: 3145492 - DNA, 25 bp, Homo sapien
tctgatggatctagccatgttggaa

SEQ ID NO: 3145493 - DNA, 25 bp, Homo sapien
aagaagtggcaaaggccccgagagc

SEQ ID NO: 3145494 - DNA, 25 bp, Homo sapien
caggacctctgacggcgatttgcag

SEQ ID NO: 3145495 - DNA, 25 bp, Homo sapien
tgcaagccaggtaggtctgtgtcct

SEQ ID NO: 3145496 - DNA, 25 bp, Homo sapien
tgcagcacacgccattcagcaaggg

SEQ ID NO: 3145497 - DNA, 25 bp, Homo sapien
caagcaccgtctgctttgaaaacct

SEQ ID NO: 3145498 - DNA, 25 bp, Homo sapien
tgtactccccgattgctaagggctg

SEQ ID NO: 3145499 - DNA, 25 bp, Homo sapien
gagtagcacatcagcaccacgtctg

SEQ ID NO: 3145500 - DNA, 25 bp, Homo sapien
gatgcttctgaaggcgtcattgccg

SEQ ID NO: 3145501 - DNA, 25 bp, Homo sapien
caggaatgagttatggttggccaca

SEQ ID NO: 3145502 - DNA, 25 bp, Homo sapien
acggcagttcggacggcgcactcaa

SEQ ID NO: 3145503 - DNA, 25 bp, Homo sapien
cggcagttcggacggcgcactcaaa

SEQ ID NO: 3145504 - DNA, 25 bp, Homo sapien
gcagttcggacggcgcactcaaaca

SEQ ID NO: 3145505 - DNA, 25 bp, Homo sapien
cagttcggacggcgcactcaaacac

SEQ ID NO: 3145506 - DNA, 25 bp, Homo sapien
gagcctccttctgtttcgtctcctg

SEQ ID NO: 3145507 - DNA, 25 bp, Homo sapien
agcctccttctgtttcgtctcctgg

SEQ ID NO: 3145508 - DNA, 25 bp, Homo sapien
gcactcattgatggagaagagcctc

SEQ ID NO: 3145509 - DNA, 25 bp, Homo sapien
cttgcactcattgatggagaagagc

SEQ ID NO: 3145510 - DNA, 25 bp, Homo sapien
gtggccaagcctcatcaataactgt

SEQ ID NO: 3145511 - DNA, 25 bp, Homo sapien
gggattttctaactggcctgggcaa

SEQ ID NO: 3145512 - DNA, 25 bp, Homo sapien
tattcatcacagttccccaagggat

SEQ ID NO: 3145513 - DNA, 25 bp, Homo sapien
tatccaaaaggagacgctgcttggg

SEQ ID NO: 3145514 - DNA, 25 bp, Homo sapien
cataactggagttgagtgaaagaca

SEQ ID NO: 3145515 - DNA, 25 bp, Homo sapien
tccagcagccaagtggtttcaacag

SEQ ID NO: 3145516 - DNA, 25 bp, Homo sapien
cgtacaagcatttcactcacagagg

SEQ ID NO: 3145517 - DNA, 25 bp, Homo sapien
cagaggagtttatgttttcgaggat

SEQ ID NO: 3145518 - DNA, 25 bp, Homo sapien
taccttaagttatgtagtcctctgt

SEQ ID NO: 3145519 - DNA, 25 bp, Homo sapien
cccagcctttgcaatttctacctta

SEQ ID NO: 3145520 - DNA, 25 bp, Homo sapien
gcaatttctaccttaagttatgtag

SEQ ID NO: 3145521 - DNA, 25 bp, Homo sapien
tttgcaatttctaccttaagttatg

SEQ ID NO: 3145522 - DNA, 25 bp, Homo sapien
tgctctgctgccaccgtggaaccac

SEQ ID NO: 3145523 - DNA, 25 bp, Homo sapien
tgccaccgtggaaccacctcctctt

SEQ ID NO: 3145524 - DNA, 25 bp, Homo sapien
cagcaaagccatttgagtgtgccct

SEQ ID NO: 3145525 - DNA, 25 bp, Homo sapien
agccatttgagtgtgccctctctgg

SEQ ID NO: 3145526 - DNA, 25 bp, Homo sapien
gaagacagacacttatcggctccat

SEQ ID NO: 3145527 - DNA, 25 bp, Homo sapien
gaggcagtgctaccttcaagaacag

SEQ ID NO: 3145528 - DNA, 25 bp, Homo sapien
ttggctcccgccaacaggtggaggt

SEQ ID NO: 3145529 - DNA, 25 bp, Homo sapien
tatgagagttcccagacggagctgt

SEQ ID NO: 3145530 - DNA, 25 bp, Homo sapien
gatgatctcttgctctaccatgtga

SEQ ID NO: 3145531 - DNA, 25 bp, Homo sapien
aagaagacagccattgcaaaccagg

SEQ ID NO: 3145532 - DNA, 25 bp, Homo sapien
gacagagacaagaatgaactacccg

SEQ ID NO: 3145533 - DNA, 25 bp, Homo sapien
tattgaagtcccctagtctatggtt

SEQ ID NO: 3145534 - DNA, 25 bp, Homo sapien
aggcctaatccccagtgtgatggta

SEQ ID NO: 3145535 - DNA, 25 bp, Homo sapien
tgaggcctaatccccagtgtgatgg

SEQ ID NO: 3145536 - DNA, 25 bp, Homo sapien
ggcctaatccccagtgtgatggtat

SEQ ID NO: 3145537 - DNA, 25 bp, Homo sapien
cctaatccccagtgtgatggtattt

SEQ ID NO: 3145538 - DNA, 25 bp, Homo sapien
ctaagtacgaaatccttgaaagaga

SEQ ID NO: 3145539 - DNA, 25 bp, Homo sapien
ccctgtcactcccttgttcaaagga

SEQ ID NO: 3145540 - DNA, 25 bp, Homo sapien
tgtcactcccttgttcaaaggaaat

SEQ ID NO: 3145541 - DNA, 25 bp, Homo sapien
acgaaatccttgaaagagaagagcc

SEQ ID NO: 3145542 - DNA, 25 bp, Homo sapien
tatgggaagaatgacaaaaggaagc

SEQ ID NO: 3145543 - DNA, 25 bp, Homo sapien
tattatgggaagaatgacaaaagga

SEQ ID NO: 3145544 - DNA, 25 bp, Homo sapien
gaagactgccaagctctcatcatca

SEQ ID NO: 3145545 - DNA, 25 bp, Homo sapien
aaaggaagctcccgtaggaagactg

SEQ ID NO: 3145546 - DNA, 25 bp, Homo sapien
cttgagcctcctccggggacaaagg

SEQ ID NO: 3145547 - DNA, 25 bp, Homo sapien
tcatccgcaaggcttgagcctcctc

SEQ ID NO: 3145548 - DNA, 25 bp, Homo sapien
caaagggaatctgatacagcacctt

SEQ ID NO: 3145549 - DNA, 25 bp, Homo sapien
gggacaaagggaatctgatacagca

SEQ ID NO: 3145550 - DNA, 25 bp, Homo sapien
tggtcatcatcaagcgctctgtgcc

SEQ ID NO: 3145551 - DNA, 25 bp, Homo sapien
ctttgattaagctgagagactcccc

SEQ ID NO: 3145552 - DNA, 25 bp, Homo sapien
gaaggtctgcaggtatgagctttga

SEQ ID NO: 3145553 - DNA, 25 bp, Homo sapien
tgttcacagagctccacatgcaagt

SEQ ID NO: 3145554 - DNA, 25 bp, Homo sapien
accttccaccgctgaagttcaaaca

SEQ ID NO: 3145555 - DNA, 25 bp, Homo sapien
ttccaccgctgaagttcaaacagtt

SEQ ID NO: 3145556 - DNA, 25 bp, Homo sapien
caaccttccaccgctgaagttcaaa

SEQ ID NO: 3145557 - DNA, 25 bp, Homo sapien
tgcccaaccttccaccgctgaagtt

SEQ ID NO: 3145558 - DNA, 25 bp, Homo sapien
aaccacagtggccttgggggcatca

SEQ ID NO: 3145559 - DNA, 25 bp, Homo sapien
gaaccacagtggccttgggggcatc

SEQ ID NO: 3145560 - DNA, 25 bp, Homo sapien
ctgtagaaccacagtggccttgggg

SEQ ID NO: 3145561 - DNA, 25 bp, Homo sapien
tagaaccacagtggccttgggggca

SEQ ID NO: 3145562 - DNA, 25 bp, Homo sapien
gccttccaaaaaccagatgaccctg

SEQ ID NO: 3145563 - DNA, 25 bp, Homo sapien
gccgtcccttgtaactctgtaagct

SEQ ID NO: 3145564 - DNA, 25 bp, Homo sapien
tgtcctttctggaactaccgccgtc

SEQ ID NO: 3145565 - DNA, 25 bp, Homo sapien
tacgatgaaatctccaagatgcctt

SEQ ID NO: 3145566 - DNA, 25 bp, Homo sapien
ttttgggaatgtttatcacttctaa

SEQ ID NO: 3145567 - DNA, 25 bp, Homo sapien
aaattcaacagtttgtatttctgga

SEQ ID NO: 3145568 - DNA, 25 bp, Homo sapien
tgataaagaaattcaacagtttgta

SEQ ID NO: 3145569 - DNA, 25 bp, Homo sapien
tgtttatcacttctaaaatgatgat

SEQ ID NO: 3145570 - DNA, 25 bp, Homo sapien
tgggattgatgggactcggaaagtc

SEQ ID NO: 3145571 - DNA, 25 bp, Homo sapien
gtgggattgatgggactcggaaagt

SEQ ID NO: 3145572 - DNA, 25 bp, Homo sapien
ggtgggattgatgggactcggaaag

SEQ ID NO: 3145573 - DNA, 25 bp, Homo sapien
gggattgatgggactcggaaagtcc

SEQ ID NO: 3145574 - DNA, 25 bp, Homo sapien
cctctgctgattagtaaggagtttg

SEQ ID NO: 3145575 - DNA, 25 bp, Homo sapien
ctgctgattagtaaggagtttgggg

SEQ ID NO: 3145576 - DNA, 25 bp, Homo sapien
ctctgctgattagtaaggagtttgg

SEQ ID NO: 3145577 - DNA, 25 bp, Homo sapien
gccgctactgctcggtataaacaga

SEQ ID NO: 3145578 - DNA, 25 bp, Homo sapien
taaagtggatctcccagccaaagac

SEQ ID NO: 3145579 - DNA, 25 bp, Homo sapien
tccccgcagtttgagacgggcgaag

SEQ ID NO: 3145580 - DNA, 25 bp, Homo sapien
tcacaactgtgagggtctttgtcgg

SEQ ID NO: 3145581 - DNA, 25 bp, Homo sapien
gacaaaacctcttaatgcactggac

SEQ ID NO: 3145582 - DNA, 25 bp, Homo sapien
tgtattatcacttatttgccctaga

SEQ ID NO: 3145583 - DNA, 25 bp, Homo sapien
acaggtagcccctgtttctgtgaat

SEQ ID NO: 3145584 - DNA, 25 bp, Homo sapien
gggtccctagcaatgggtctgaatc

SEQ ID NO: 3145585 - DNA, 25 bp, Homo sapien
acatcctgagctacaatccgtcttg

SEQ ID NO: 3145586 - DNA, 25 bp, Homo sapien
aattacagccctggattctcagcag

SEQ ID NO: 3145587 - DNA, 25 bp, Homo sapien
gtcttgtaaagccttgcaacggcct

SEQ ID NO: 3145588 - DNA, 25 bp, Homo sapien
tcagtttcccacaccttatgcagag

SEQ ID NO: 3145589 - DNA, 25 bp, Homo sapien
aaagccctttggcacagcaggattg

SEQ ID NO: 3145590 - DNA, 25 bp, Homo sapien
aaaagccctttggcacagcaggatt

SEQ ID NO: 3145591 - DNA, 25 bp, Homo sapien
tcctgtcccgcgttctgtgaggaaa

SEQ ID NO: 3145592 - DNA, 25 bp, Homo sapien
caccatccacaacggaaggttcctg

SEQ ID NO: 3145593 - DNA, 25 bp, Homo sapien
gaaatgcgtctgtccctctggagct

SEQ ID NO: 3145594 - DNA, 25 bp, Homo sapien
tccacaacggaaggttcctgccttc

SEQ ID NO: 3145595 - DNA, 25 bp, Homo sapien
atggaatgcaggacattggttcaga

SEQ ID NO: 3145596 - DNA, 25 bp, Homo sapien
caggacattggttcagaagtttgaa

SEQ ID NO: 3145597 - DNA, 25 bp, Homo sapien
tgcaggacattggttcagaagtttg

SEQ ID NO: 3145598 - DNA, 25 bp, Homo sapien
ggaatgcaggacattggttcagaag

SEQ ID NO: 3145599 - DNA, 25 bp, Homo sapien
tgaccacgtaaaagccaggccagaa

SEQ ID NO: 3145600 - DNA, 25 bp, Homo sapien
taggctcttagcctagctaaggcta

SEQ ID NO: 3145601 - DNA, 25 bp, Homo sapien
gggatggacgcacatccgctgacca

SEQ ID NO: 3145602 - DNA, 25 bp, Homo sapien
ctgaacgagaggaatccaggagagc

SEQ ID NO: 3145603 - DNA, 25 bp, Homo sapien
gacataggctctgtacaccaaggag

SEQ ID NO: 3145604 - DNA, 25 bp, Homo sapien
cattgacataggctctgtacaccaa

SEQ ID NO: 3145605 - DNA, 25 bp, Homo sapien
ttgacataggctctgtacaccaagg

SEQ ID NO: 3145606 - DNA, 25 bp, Homo sapien
ttgccattgacataggctctgtaca

SEQ ID NO: 3145607 - DNA, 25 bp, Homo sapien
atccaagaatcagctggaagtccag

SEQ ID NO: 3145608 - DNA, 25 bp, Homo sapien
ctcatccaagaatcagctggaagtc

SEQ ID NO: 3145609 - DNA, 25 bp, Homo sapien
tgcctccgtgcctaaggaccagctc

SEQ ID NO: 3145610 - DNA, 25 bp, Homo sapien
ttctcagatccccatgaataaggac

SEQ ID NO: 3145611 - DNA, 25 bp, Homo sapien
aagactctacgtgcttttagcagca

SEQ ID NO: 3145612 - DNA, 25 bp, Homo sapien
ccagaaagactctacgtgcttttag

SEQ ID NO: 3145613 - DNA, 25 bp, Homo sapien
gggaagcctaaaagactgagccatg

SEQ ID NO: 3145614 - DNA, 25 bp, Homo sapien
ccatgggacggctgtccagaaagac

SEQ ID NO: 3145615 - DNA, 25 bp, Homo sapien
caacaggggtatgcctgacacccca

SEQ ID NO: 3145616 - DNA, 25 bp, Homo sapien
ggcaacaggggtatgcctgacaccc

SEQ ID NO: 3145617 - DNA, 25 bp, Homo sapien
gcaggcaacaggggtatgcctgaca

SEQ ID NO: 3145618 - DNA, 25 bp, Homo sapien
aggcaacaggggtatgcctgacacc

SEQ ID NO: 3145619 - DNA, 25 bp, Homo sapien
gccatctcagttgagggtccctagc

SEQ ID NO: 3145620 - DNA, 25 bp, Homo sapien
gggccatctcagttgagggtcccta

SEQ ID NO: 3145621 - DNA, 25 bp, Homo sapien
tccggtaatttgagactggcagctc

SEQ ID NO: 3145622 - DNA, 25 bp, Homo sapien
cctcccctccggtaatttgagactg

SEQ ID NO: 3145623 - DNA, 25 bp, Homo sapien
ctcagtcaggcagcgtggtcttcca

SEQ ID NO: 3145624 - DNA, 25 bp, Homo sapien
caccgctgcagccttatggcgggag

SEQ ID NO: 3145625 - DNA, 25 bp, Homo sapien
aatacaaaggatctgggcacaagga

SEQ ID NO: 3145626 - DNA, 25 bp, Homo sapien
cccctatgaatacaaaggatctggg

SEQ ID NO: 3145627 - DNA, 25 bp, Homo sapien
agtagatccagcaaaaggagatgca

SEQ ID NO: 3145628 - DNA, 25 bp, Homo sapien
tatccttaatctgagagagcgtaat

SEQ ID NO: 3145629 - DNA, 25 bp, Homo sapien
tcttccactggacgaagagcattag

SEQ ID NO: 3145630 - DNA, 25 bp, Homo sapien
gcgtaatctgcagggtcacattcag

SEQ ID NO: 3145631 - DNA, 25 bp, Homo sapien
tgagcatattttccatctgccgtct

SEQ ID NO: 3145632 - DNA, 25 bp, Homo sapien
tcccacgtgagataggcatcgtgcc

SEQ ID NO: 3145633 - DNA, 25 bp, Homo sapien
tcgtactgatctcggtcccacgtga

SEQ ID NO: 3145634 - DNA, 25 bp, Homo sapien
tctggcctccacacgaggtcactgg

SEQ ID NO: 3145635 - DNA, 25 bp, Homo sapien
tggcggatccacaaataagcagtca

SEQ ID NO: 3145636 - DNA, 25 bp, Homo sapien
cacactaggcttgtgtgaactcatg

SEQ ID NO: 3145637 - DNA, 25 bp, Homo sapien
gacagaaccagccaaagccacacta

SEQ ID NO: 3145638 - DNA, 25 bp, Homo sapien
gagatgatgaatcagtgtggtgaaa

SEQ ID NO: 3145639 - DNA, 25 bp, Homo sapien
tgaatcagtgtggtgaaaggctctg

SEQ ID NO: 3145640 - DNA, 25 bp, Homo sapien
tgccacaactcaggaagcccattgt

SEQ ID NO: 3145641 - DNA, 25 bp, Homo sapien
tgtgttgcctatgatgttctgtacc

SEQ ID NO: 3145642 - DNA, 25 bp, Homo sapien
gcccattgtgttgcctatgatgttc

SEQ ID NO: 3145643 - DNA, 25 bp, Homo sapien
gccacaactcaggaagcccattgtg

SEQ ID NO: 3145644 - DNA, 25 bp, Homo sapien
ccatcctacttccttggtgcaagag

SEQ ID NO: 3145645 - DNA, 25 bp, Homo sapien
cctacttccttggtgcaagagagat

SEQ ID NO: 3145646 - DNA, 25 bp, Homo sapien
tcctacttccttggtgcaagagaga

SEQ ID NO: 3145647 - DNA, 25 bp, Homo sapien
catcctacttccttggtgcaagaga

SEQ ID NO: 3145648 - DNA, 25 bp, Homo sapien
ggcaatggaccaccattttgcctgt

SEQ ID NO: 3145649 - DNA, 25 bp, Homo sapien
tgtcactgtggctcggaagtctgga

SEQ ID NO: 3145650 - DNA, 25 bp, Homo sapien
tcaactctaatttgtccttctcctc

SEQ ID NO: 3145651 - DNA, 25 bp, Homo sapien
ccccatcacttcagtgttttggcaa

SEQ ID NO: 3145652 - DNA, 25 bp, Homo sapien
agataaggaaaatgaaagccgcatg

SEQ ID NO: 3145653 - DNA, 25 bp, Homo sapien
tcagataaggaaaatgaaagccgca

SEQ ID NO: 3145654 - DNA, 25 bp, Homo sapien
ctgaaggtcagataaggaaaatgaa

SEQ ID NO: 3145655 - DNA, 25 bp, Homo sapien
ggtcagataaggaaaatgaaagccg

SEQ ID NO: 3145656 - DNA, 25 bp, Homo sapien
tgacgatatagaacgaggacctcct

SEQ ID NO: 3145657 - DNA, 25 bp, Homo sapien
tcataccgcaggaccacattggtgt

SEQ ID NO: 3145658 - DNA, 25 bp, Homo sapien
gattgccattgtaggtccaggaacc

SEQ ID NO: 3145659 - DNA, 25 bp, Homo sapien
tcacattcttcacagcgggcatgcc

SEQ ID NO: 3145660 - DNA, 25 bp, Homo sapien
tgccagggccttatctccagaatgt

SEQ ID NO: 3145661 - DNA, 25 bp, Homo sapien
gattcagtaggcttccggtgggccc

SEQ ID NO: 3145662 - DNA, 25 bp, Homo sapien
caaaatcaggtcttaacctctgggt

SEQ ID NO: 3145663 - DNA, 25 bp, Homo sapien
tctttcgtgtaaacccagagaccat

SEQ ID NO: 3145664 - DNA, 25 bp, Homo sapien
tttctgcctcaggagaggtaataaa

SEQ ID NO: 3145665 - DNA, 25 bp, Homo sapien
tagacaaacaagaccctggacatgt

SEQ ID NO: 3145666 - DNA, 25 bp, Homo sapien
tctttgaggcacttggcgatgtact

SEQ ID NO: 3145667 - DNA, 25 bp, Homo sapien
ggtggtcccgctctctactgtggtg

SEQ ID NO: 3145668 - DNA, 25 bp, Homo sapien
gaggcagctttcacccacatcatag

SEQ ID NO: 3145669 - DNA, 25 bp, Homo sapien
tcaaaatagtcatcacaaacaccat

SEQ ID NO: 3145670 - DNA, 25 bp, Homo sapien
cacatgaagaatcggtctatgactt

SEQ ID NO: 3145671 - DNA, 25 bp, Homo sapien
aaaatccacatgaagaatcggtcta

SEQ ID NO: 3145672 - DNA, 25 bp, Homo sapien
ctaatccgctcttgctatgatcaaa

SEQ ID NO: 3145673 - DNA, 25 bp, Homo sapien
taatttctacccagatagcaaagcc

SEQ ID NO: 3145674 - DNA, 25 bp, Homo sapien
cactacggtgggctataaaagggct

SEQ ID NO: 3145675 - DNA, 25 bp, Homo sapien
tatataaactagaggccagtcaccc

SEQ ID NO: 3145676 - DNA, 25 bp, Homo sapien
tatgacttcaaatgcactatgcctg

SEQ ID NO: 3145677 - DNA, 25 bp, Homo sapien
cattggtaaagcgttggtctgagcc

SEQ ID NO: 3145678 - DNA, 25 bp, Homo sapien
gatgttctagaacttgtgtttccag

SEQ ID NO: 3145679 - DNA, 25 bp, Homo sapien
tttgtcccggttgcattggtaaagc

SEQ ID NO: 3145680 - DNA, 25 bp, Homo sapien
agtccagttgccaggtttgtcccgg

SEQ ID NO: 3145681 - DNA, 25 bp, Homo sapien
tatttcaaaggcgtaatctgagagg

SEQ ID NO: 3145682 - DNA, 25 bp, Homo sapien
tcaggtcttatttcaaaggcgtaat

SEQ ID NO: 3145683 - DNA, 25 bp, Homo sapien
caaaggcgtaatctgagaggaagga

SEQ ID NO: 3145684 - DNA, 25 bp, Homo sapien
tcttatttcaaaggcgtaatctgag

SEQ ID NO: 3145685 - DNA, 25 bp, Homo sapien
cagtttgggtgggagtagagcagaa

SEQ ID NO: 3145686 - DNA, 25 bp, Homo sapien
aaccagtttgggtgggagtagagca

SEQ ID NO: 3145687 - DNA, 25 bp, Homo sapien
agtttgggtgggagtagagcagaag

SEQ ID NO: 3145688 - DNA, 25 bp, Homo sapien
accagtttgggtgggagtagagcag

SEQ ID NO: 3145689 - DNA, 25 bp, Homo sapien
aatgtcagagccacacctagaggtc

SEQ ID NO: 3145690 - DNA, 25 bp, Homo sapien
ttagccctcacagctagcctatggg

SEQ ID NO: 3145691 - DNA, 25 bp, Homo sapien
gcagcagtgcccaacattgactgaa

SEQ ID NO: 3145692 - DNA, 25 bp, Homo sapien
ggagtagacaccactattataccca

SEQ ID NO: 3145693 - DNA, 25 bp, Homo sapien
gcctaacttgcaggctctccaatgg

SEQ ID NO: 3145694 - DNA, 25 bp, Homo sapien
gacatgtgacctgccttttgctcca

SEQ ID NO: 3145695 - DNA, 25 bp, Homo sapien
gagtaggccctctcactgtctgaca

SEQ ID NO: 3145696 - DNA, 25 bp, Homo sapien
gactgcggtcatcaggcctaacttg

SEQ ID NO: 3145697 - DNA, 25 bp, Homo sapien
cctttcctcttgggtcatacagcag

SEQ ID NO: 3145698 - DNA, 25 bp, Homo sapien
ctttcctcttgggtcatacagcagc

SEQ ID NO: 3145699 - DNA, 25 bp, Homo sapien
tgtccaggagtttatagcagcaatc

SEQ ID NO: 3145700 - DNA, 25 bp, Homo sapien
gctgaagctagagctgcccctagtg

SEQ ID NO: 3145701 - DNA, 25 bp, Homo sapien
caatcaaagcttttagggctgccca

SEQ ID NO: 3145702 - DNA, 25 bp, Homo sapien
gagctgcccctagtgaaaaactccc

SEQ ID NO: 3145703 - DNA, 25 bp, Homo sapien
ttcaacattaaatagggttcatggc

SEQ ID NO: 3145704 - DNA, 25 bp, Homo sapien
aggaggagaaagtgtgaagaaatcc

SEQ ID NO: 3145705 - DNA, 25 bp, Homo sapien
gagaaagtgtgaagaaatccaacct

SEQ ID NO: 3145706 - DNA, 25 bp, Homo sapien
cagggtggctgccttaaaggaggag

SEQ ID NO: 3145707 - DNA, 25 bp, Homo sapien
caccgtgcatagcaaggttaacagg

SEQ ID NO: 3145708 - DNA, 25 bp, Homo sapien
tggtcattgcatttgaaaccaaaac

SEQ ID NO: 3145709 - DNA, 25 bp, Homo sapien
atggagagagttgatgtacattgag

SEQ ID NO: 3145710 - DNA, 25 bp, Homo sapien
tgctgggatgaccttgatgttggtc

SEQ ID NO: 3145711 - DNA, 25 bp, Homo sapien
tgtatgttatcgtagacaagacccc

SEQ ID NO: 3145712 - DNA, 25 bp, Homo sapien
catggccaattaagtatcagtgagc

SEQ ID NO: 3145713 - DNA, 25 bp, Homo sapien
tactgaggcctttaagcaccgctaa

SEQ ID NO: 3145714 - DNA, 25 bp, Homo sapien
gcaatgttcctgatgatgtacccca

SEQ ID NO: 3145715 - DNA, 25 bp, Homo sapien
gaaagctctcctttgccaccgttag

SEQ ID NO: 3145716 - DNA, 25 bp, Homo sapien
ggatacgcaggctacatacctcagg

SEQ ID NO: 3145717 - DNA, 25 bp, Homo sapien
caaaagacttgcaatggttcgtgcc

SEQ ID NO: 3145718 - DNA, 25 bp, Homo sapien
cacacttgaggagctagggaactat

SEQ ID NO: 3145719 - DNA, 25 bp, Homo sapien
acgtgttcaggaaggctcctttttg

SEQ ID NO: 3145720 - DNA, 25 bp, Homo sapien
ttcaggaaggctcctttttgtctct

SEQ ID NO: 3145721 - DNA, 25 bp, Homo sapien
tgttcaggaaggctcctttttgtct

SEQ ID NO: 3145722 - DNA, 25 bp, Homo sapien
cgtgttcaggaaggctcctttttgt

SEQ ID NO: 3145723 - DNA, 25 bp, Homo sapien
cagagaaggtcctccttatccgcag

SEQ ID NO: 3145724 - DNA, 25 bp, Homo sapien
ccagtggtggccgtcaacagttcag

SEQ ID NO: 3145725 - DNA, 25 bp, Homo sapien
caattgtgtggatggtagattctcc

SEQ ID NO: 3145726 - DNA, 25 bp, Homo sapien
gcagctggcatgtatctagaggcca

SEQ ID NO: 3145727 - DNA, 25 bp, Homo sapien
tctcctgctagaggcactttttagg

SEQ ID NO: 3145728 - DNA, 25 bp, Homo sapien
ttaatgcaattgtatactggtcccc

SEQ ID NO: 3145729 - DNA, 25 bp, Homo sapien
tagggatgggtaaatgtttctccca

SEQ ID NO: 3145730 - DNA, 25 bp, Homo sapien
gtttctcccactaccatcattgcat

SEQ ID NO: 3145731 - DNA, 25 bp, Homo sapien
tacgagctgcgcctcatgatggact

SEQ ID NO: 3145732 - DNA, 25 bp, Homo sapien
gactttgacggcaagaaccgcggct

SEQ ID NO: 3145733 - DNA, 25 bp, Homo sapien
gacaagatgaagaaccgcggcttcg

SEQ ID NO: 3145734 - DNA, 25 bp, Homo sapien
tgagctcaacaactacgagatccgc

SEQ ID NO: 3145735 - DNA, 25 bp, Homo sapien
catgggtgtttatgcaaatagtcct

SEQ ID NO: 3145736 - DNA, 25 bp, Homo sapien
tatgcaaatagtcctcttaaaaata

SEQ ID NO: 3145737 - DNA, 25 bp, Homo sapien
attgtaactacatgggtgtttatgc

SEQ ID NO: 3145738 - DNA, 25 bp, Homo sapien
taactacatgggtgtttatgcaaat

SEQ ID NO: 3145739 - DNA, 25 bp, Homo sapien
cagagtacgcgagacatgaatagca

SEQ ID NO: 3145740 - DNA, 25 bp, Homo sapien
taaatgattagctcaaatctgggcg

SEQ ID NO: 3145741 - DNA, 25 bp, Homo sapien
aaatgtctgcactggacgggcgctg

SEQ ID NO: 3145742 - DNA, 25 bp, Homo sapien
tcgtataggcttaggtggtttccca

SEQ ID NO: 3145743 - DNA, 25 bp, Homo sapien
tctcaagatcatcgttatttgtgtc

SEQ ID NO: 3145744 - DNA, 25 bp, Homo sapien
acgtctgccattctcaagatcatcg

SEQ ID NO: 3145745 - DNA, 25 bp, Homo sapien
aatgcctttttgtaagacgtctgcc

SEQ ID NO: 3145746 - DNA, 25 bp, Homo sapien
gcctttttgtaagacgtctgccatt

SEQ ID NO: 3145747 - DNA, 25 bp, Homo sapien
aaaaacatactgtgataagctgctc

SEQ ID NO: 3145748 - DNA, 25 bp, Homo sapien
tctcatattaatgtgttgtcccaat

SEQ ID NO: 3145749 - DNA, 25 bp, Homo sapien
tatagtaatttcacctgacacttgg

SEQ ID NO: 3145750 - DNA, 25 bp, Homo sapien
ggtaattttagcattggtgtttcta

SEQ ID NO: 3145751 - DNA, 25 bp, Homo sapien
tttttgttgctttcggttccatctg

SEQ ID NO: 3145752 - DNA, 25 bp, Homo sapien
ccttgaccatcctaaggttgctcat

SEQ ID NO: 3145753 - DNA, 25 bp, Homo sapien
ccatctgccaatccccatgaaggct

SEQ ID NO: 3145754 - DNA, 25 bp, Homo sapien
gagctaacagatgacccttgaccat

SEQ ID NO: 3145755 - DNA, 25 bp, Homo sapien
caggacagtttgtgagtatgagtga

SEQ ID NO: 3145756 - DNA, 25 bp, Homo sapien
tattttaactgttatctccattccc

SEQ ID NO: 3145757 - DNA, 25 bp, Homo sapien
tgtgagtatgagtgaccaatgctga

SEQ ID NO: 3145758 - DNA, 25 bp, Homo sapien
tgagtgaccaatgctgaaacagtca

SEQ ID NO: 3145759 - DNA, 25 bp, Homo sapien
ctttccagacgatgacgttctcttt

SEQ ID NO: 3145760 - DNA, 25 bp, Homo sapien
cacagcggtggcacatcgtgtgcat

SEQ ID NO: 3145761 - DNA, 25 bp, Homo sapien
ccagacgatgacgttctctttgtca

SEQ ID NO: 3145762 - DNA, 25 bp, Homo sapien
catcgtgtgcatcttattgcgatgc

SEQ ID NO: 3145763 - DNA, 25 bp, Homo sapien
gaacctttatggcatgactaatcac

SEQ ID NO: 3145764 - DNA, 25 bp, Homo sapien
tttatggcatgactaatcactgaaa

SEQ ID NO: 3145765 - DNA, 25 bp, Homo sapien
tttaaaccagaacctttatggcatg

SEQ ID NO: 3145766 - DNA, 25 bp, Homo sapien
taaaccagaacctttatggcatgac

SEQ ID NO: 3145767 - DNA, 25 bp, Homo sapien
ggattcaagcatttcgcccatctcg

SEQ ID NO: 3145768 - DNA, 25 bp, Homo sapien
attcaagcatttcgcccatctcggc

SEQ ID NO: 3145769 - DNA, 25 bp, Homo sapien
ggacgaagtctggcccttgtcgccc

SEQ ID NO: 3145770 - DNA, 25 bp, Homo sapien
ggggacgaagtctggcccttgtcgc

SEQ ID NO: 3145771 - DNA, 25 bp, Homo sapien
ttgagtacaaaagccattgccacaa

SEQ ID NO: 3145772 - DNA, 25 bp, Homo sapien
cagagacactgagtcagccagaagg

SEQ ID NO: 3145773 - DNA, 25 bp, Homo sapien
gccacaaggttgacctcatgctggt

SEQ ID NO: 3145774 - DNA, 25 bp, Homo sapien
acttggaagccagttgagtacaaaa

SEQ ID NO: 3145775 - DNA, 25 bp, Homo sapien
gagcactccggggatctagattgga

SEQ ID NO: 3145776 - DNA, 25 bp, Homo sapien
gggagagctgtgagaatcgtcatct

SEQ ID NO: 3145777 - DNA, 25 bp, Homo sapien
ggtccatgcttgcatttcagtttgt

SEQ ID NO: 3145778 - DNA, 25 bp, Homo sapien
cgtcatctaaggtccatgcttgcat

SEQ ID NO: 3145779 - DNA, 25 bp, Homo sapien
ttccttctccaggtcacctttgtca

SEQ ID NO: 3145780 - DNA, 25 bp, Homo sapien
tctccaggtcacctttgtcaccttt

SEQ ID NO: 3145781 - DNA, 25 bp, Homo sapien
ctttgtcaccttttttaatctgcat

SEQ ID NO: 3145782 - DNA, 25 bp, Homo sapien
cttctccaggtcacctttgtcacct

SEQ ID NO: 3145783 - DNA, 25 bp, Homo sapien
ctggtgtcatcgctggtccaaattg

SEQ ID NO: 3145784 - DNA, 25 bp, Homo sapien
acaggtgacagcacaaggccacctt

SEQ ID NO: 3145785 - DNA, 25 bp, Homo sapien
catcgctggtccaaattgccttcac

SEQ ID NO: 3145786 - DNA, 25 bp, Homo sapien
tgtcatcgctggtccaaattgcctt

SEQ ID NO: 3145787 - DNA, 25 bp, Homo sapien
acctaatgactcatcccctcgaggg

SEQ ID NO: 3145788 - DNA, 25 bp, Homo sapien
agctttttggagcataatgctcacc

SEQ ID NO: 3145789 - DNA, 25 bp, Homo sapien
tcatcccctcgagggaattctttat

SEQ ID NO: 3145790 - DNA, 25 bp, Homo sapien
taatgctcacctaatgactcatccc

SEQ ID NO: 3145791 - DNA, 25 bp, Homo sapien
tttgtaagaaataggcttggaggcc

SEQ ID NO: 3145792 - DNA, 25 bp, Homo sapien
gatcaggcataaatatgattgtggg

SEQ ID NO: 3145793 - DNA, 25 bp, Homo sapien
gatgttagtatgttacgtttgtctg

SEQ ID NO: 3145794 - DNA, 25 bp, Homo sapien
tgaaacaaccctcagttgctaactt

SEQ ID NO: 3145795 - DNA, 25 bp, Homo sapien
gtggcctgtgttagattcggccacc

SEQ ID NO: 3145796 - DNA, 25 bp, Homo sapien
ccagcatgcacagagctgaagcgtg

SEQ ID NO: 3145797 - DNA, 25 bp, Homo sapien
ctgtgttagattcggccaccagcat

SEQ ID NO: 3145798 - DNA, 25 bp, Homo sapien
cagcatgcacagagctgaagcgtgg

SEQ ID NO: 3145799 - DNA, 25 bp, Homo sapien
tatacgatctgcatttgtctggact

SEQ ID NO: 3145800 - DNA, 25 bp, Homo sapien
gtttagtcggcaaacaagctgttgc

SEQ ID NO: 3145801 - DNA, 25 bp, Homo sapien
gaggactcttgacaacatgagcagg

SEQ ID NO: 3145802 - DNA, 25 bp, Homo sapien
ggactgtcacttgagctgttctctg

SEQ ID NO: 3145803 - DNA, 25 bp, Homo sapien
tgctacacagcaccatttacagatg

SEQ ID NO: 3145804 - DNA, 25 bp, Homo sapien
tgtgcgttaccccttagcccttaca

SEQ ID NO: 3145805 - DNA, 25 bp, Homo sapien
catcgtgcccagcttgctatcacat

SEQ ID NO: 3145806 - DNA, 25 bp, Homo sapien
cagtgagaagtcatatctcttgtcc

SEQ ID NO: 3145807 - DNA, 25 bp, Homo sapien
cagcacaaatatcagagtggccttc

SEQ ID NO: 3145808 - DNA, 25 bp, Homo sapien
tgtattgtacatcctttcccattca

SEQ ID NO: 3145809 - DNA, 25 bp, Homo sapien
tcctctgctttatttacctcacaac

SEQ ID NO: 3145810 - DNA, 25 bp, Homo sapien
tagatccttgctaggctccctgtct

SEQ ID NO: 3145811 - DNA, 25 bp, Homo sapien
gagtttttcagctcatgacctctgg

SEQ ID NO: 3145812 - DNA, 25 bp, Homo sapien
gattcttgttcctggaattaaagcg

SEQ ID NO: 3145813 - DNA, 25 bp, Homo sapien
tgcctccattaccagattccagcca

SEQ ID NO: 3145814 - DNA, 25 bp, Homo sapien
ctctgcctccattaccagattccag

SEQ ID NO: 3145815 - DNA, 25 bp, Homo sapien
tagattgtatcaacctggaagaagt

SEQ ID NO: 3145816 - DNA, 25 bp, Homo sapien
gtagattgtatcaacctggaagaag

SEQ ID NO: 3145817 - DNA, 25 bp, Homo sapien
aagtagattgtatcaacctggaaga

SEQ ID NO: 3145818 - DNA, 25 bp, Homo sapien
gattgtatcaacctggaagaagtct

SEQ ID NO: 3145819 - DNA, 25 bp, Homo sapien
gaattaggctcaaaggaacttgatc

SEQ ID NO: 3145820 - DNA, 25 bp, Homo sapien
aatggaagatccatatgaattaggc

SEQ ID NO: 3145821 - DNA, 25 bp, Homo sapien
gatccatatgaattaggctcaaagg

SEQ ID NO: 3145822 - DNA, 25 bp, Homo sapien
ttggctcacaaattccattccatac

SEQ ID NO: 3145823 - DNA, 25 bp, Homo sapien
tcttgatgattgaaagcttgttctg

SEQ ID NO: 3145824 - DNA, 25 bp, Homo sapien
ttgatgattgaaagcttgttctggg

SEQ ID NO: 3145825 - DNA, 25 bp, Homo sapien
aaagtcatagttcttgatgattgaa

SEQ ID NO: 3145826 - DNA, 25 bp, Homo sapien
ctctacaataaaagtcatagttctt

SEQ ID NO: 3145827 - DNA, 25 bp, Homo sapien
ggcgtgcacacgtctagatttccat

SEQ ID NO: 3145828 - DNA, 25 bp, Homo sapien
ggcctgccgtcacctcaaatttctg

SEQ ID NO: 3145829 - DNA, 25 bp, Homo sapien
gaaaggcttctcaattcatcatagc

SEQ ID NO: 3145830 - DNA, 25 bp, Homo sapien
ctctcagctagaatggagtgtgggc

SEQ ID NO: 3145831 - DNA, 25 bp, Homo sapien
agggcttcttgaaggaggtggccgg

SEQ ID NO: 3145832 - DNA, 25 bp, Homo sapien
gatttgggtccatggaattcagagc

SEQ ID NO: 3145833 - DNA, 25 bp, Homo sapien
tttgggtccatggaattcagagcaa

SEQ ID NO: 3145834 - DNA, 25 bp, Homo sapien
ggatttgggtccatggaattcagag

SEQ ID NO: 3145835 - DNA, 25 bp, Homo sapien
tcatgtcgacaaaaccagcaaattc

SEQ ID NO: 3145836 - DNA, 25 bp, Homo sapien
ctcatgtcgacaaaaccagcaaatt

SEQ ID NO: 3145837 - DNA, 25 bp, Homo sapien
catgtcgacaaaaccagcaaattcc

SEQ ID NO: 3145838 - DNA, 25 bp, Homo sapien
tccacggaatgatgttatcttattc

SEQ ID NO: 3145839 - DNA, 25 bp, Homo sapien
tatccacggaatgatgttatcttat

SEQ ID NO: 3145840 - DNA, 25 bp, Homo sapien
ccacggaatgatgttatcttattcc

SEQ ID NO: 3145841 - DNA, 25 bp, Homo sapien
ctatccacggaatgatgttatctta

SEQ ID NO: 3145842 - DNA, 25 bp, Homo sapien
taaattgaagggctagtaagtggct

SEQ ID NO: 3145843 - DNA, 25 bp, Homo sapien
cacgcccgacccagagagatttctt

SEQ ID NO: 3145844 - DNA, 25 bp, Homo sapien
ggttggcagttggactcgtagtttc

SEQ ID NO: 3145845 - DNA, 25 bp, Homo sapien
gcccgacccagagagatttcttaat

SEQ ID NO: 3145846 - DNA, 25 bp, Homo sapien
aaaactggggttcagtctgtgctcc

SEQ ID NO: 3145847 - DNA, 25 bp, Homo sapien
agaatgaggtttgaacactatacta

SEQ ID NO: 3145848 - DNA, 25 bp, Homo sapien
atgaggtttgaacactatactaggc

SEQ ID NO: 3145849 - DNA, 25 bp, Homo sapien
gaggtttgaacactatactaggccc

SEQ ID NO: 3145850 - DNA, 25 bp, Homo sapien
aaatggttattgctgcaacagtctc

SEQ ID NO: 3145851 - DNA, 25 bp, Homo sapien
caggatttgcagtttgtccagcatc

SEQ ID NO: 3145852 - DNA, 25 bp, Homo sapien
caacttgagcagaatgatattatca

SEQ ID NO: 3145853 - DNA, 25 bp, Homo sapien
gatttgcagtttgtccagcatcatc

SEQ ID NO: 3145854 - DNA, 25 bp, Homo sapien
atgtttcgtgtcatctcgtttttcc

SEQ ID NO: 3145855 - DNA, 25 bp, Homo sapien
tgtcatctcgtttttccaaatcagc

SEQ ID NO: 3145856 - DNA, 25 bp, Homo sapien
ttttccaaatcagcaatgacagcag

SEQ ID NO: 3145857 - DNA, 25 bp, Homo sapien
tgacagcaggatgagtgggccaact

SEQ ID NO: 3145858 - DNA, 25 bp, Homo sapien
ttaccatttggagagggattccgga

SEQ ID NO: 3145859 - DNA, 25 bp, Homo sapien
taccatttggagagggattccggaa

SEQ ID NO: 3145860 - DNA, 25 bp, Homo sapien
aaaagtcctacaaatgccctgttgg

SEQ ID NO: 3145861 - DNA, 25 bp, Homo sapien
aatgagctccgtgtaccaggctgac

SEQ ID NO: 3145862 - DNA, 25 bp, Homo sapien
taggtgaatgaagatccctctgcaa

SEQ ID NO: 3145863 - DNA, 25 bp, Homo sapien
tcaaggatggctagaaatgagctcc

SEQ ID NO: 3145864 - DNA, 25 bp, Homo sapien
aaactagacacattgaaaggactta

SEQ ID NO: 3145865 - DNA, 25 bp, Homo sapien
ggtaatatactatatagagggagct

SEQ ID NO: 3145866 - DNA, 25 bp, Homo sapien
cattgaaaggacttatttttcttgc

SEQ ID NO: 3145867 - DNA, 25 bp, Homo sapien
tatagaaccagtaaatatgaattaa

SEQ ID NO: 3145868 - DNA, 25 bp, Homo sapien
gcaaaattgcttttcgtggcctttg

SEQ ID NO: 3145869 - DNA, 25 bp, Homo sapien
cctctctgcgttcatttgccttgtt

SEQ ID NO: 3145870 - DNA, 25 bp, Homo sapien
tccctctctgcgttcatttgccttg

SEQ ID NO: 3145871 - DNA, 25 bp, Homo sapien
gcttttcgtggcctttggaggcaca

SEQ ID NO: 3145872 - DNA, 25 bp, Homo sapien
tttctgaatgagcatgggttttctc

SEQ ID NO: 3145873 - DNA, 25 bp, Homo sapien
ctttctgaatgagcatgggttttct

SEQ ID NO: 3145874 - DNA, 25 bp, Homo sapien
tcacggaagggtggatacgtctgca

SEQ ID NO: 3145875 - DNA, 25 bp, Homo sapien
taggagtcacttctccggtgggaac

SEQ ID NO: 3145876 - DNA, 25 bp, Homo sapien
tctccattggctagagctagtcacg

SEQ ID NO: 3145877 - DNA, 25 bp, Homo sapien
tcatatgatacggacaagcccagcc

SEQ ID NO: 3145878 - DNA, 25 bp, Homo sapien
ggctgacagtgtactcttagttact

SEQ ID NO: 3145879 - DNA, 25 bp, Homo sapien
gtgaatatcaatgaatcacagcagt

SEQ ID NO: 3145880 - DNA, 25 bp, Homo sapien
ggtgggctgacagtgtactcttagt

SEQ ID NO: 3145881 - DNA, 25 bp, Homo sapien
tgggctgacagtgtactcttagtta

SEQ ID NO: 3145882 - DNA, 25 bp, Homo sapien
gcccgagagaacttcgctgccttcg

SEQ ID NO: 3145883 - DNA, 25 bp, Homo sapien
cctcgggagctgagcccgagagaac

SEQ ID NO: 3145884 - DNA, 25 bp, Homo sapien
gccgctcccgctttccactgtggaa

SEQ ID NO: 3145885 - DNA, 25 bp, Homo sapien
gcggcgccgctctgcgggtggaacc

SEQ ID NO: 3145886 - DNA, 25 bp, Homo sapien
agacgctgagcgctcccgtgcgcag

SEQ ID NO: 3145887 - DNA, 25 bp, Homo sapien
ctagacgctgagcgctcccgtgcgc

SEQ ID NO: 3145888 - DNA, 25 bp, Homo sapien
ctgagcgctcccgtgcgcagcgccc

SEQ ID NO: 3145889 - DNA, 25 bp, Homo sapien
acgctgagcgctcccgtgcgcagcg

SEQ ID NO: 3145890 - DNA, 25 bp, Homo sapien
aatttctccaacgtggttctggctg

SEQ ID NO: 3145891 - DNA, 25 bp, Homo sapien
gccatcaaggccgattttctttgaa

SEQ ID NO: 3145892 - DNA, 25 bp, Homo sapien
gagcgtctgactcggacagatgccc

SEQ ID NO: 3145893 - DNA, 25 bp, Homo sapien
gagagaagtccgtctggtcaagtcc

SEQ ID NO: 3145894 - DNA, 25 bp, Homo sapien
gggacaaaatagctcataggatcat

SEQ ID NO: 3145895 - DNA, 25 bp, Homo sapien
agtagaaagggcctcactaatggaa

SEQ ID NO: 3145896 - DNA, 25 bp, Homo sapien
tagaactgagaaccagtcctggcct

SEQ ID NO: 3145897 - DNA, 25 bp, Homo sapien
aagaagggtgaaagtgctccataaa

SEQ ID NO: 3145898 - DNA, 25 bp, Homo sapien
gttggcaatatctgggctcccttgt

SEQ ID NO: 3145899 - DNA, 25 bp, Homo sapien
tctccctccgcataggatcctggat

SEQ ID NO: 3145900 - DNA, 25 bp, Homo sapien
cctccgcataggatcctggattgaa

SEQ ID NO: 3145901 - DNA, 25 bp, Homo sapien
tccgcataggatcctggattgaaat

SEQ ID NO: 3145902 - DNA, 25 bp, Homo sapien
ttgtccaattgcagtgcactggaac

SEQ ID NO: 3145903 - DNA, 25 bp, Homo sapien
ggagcaacatttggttgctgttgtc

SEQ ID NO: 3145904 - DNA, 25 bp, Homo sapien
gctggattgggagcaacatttggtt

SEQ ID NO: 3145905 - DNA, 25 bp, Homo sapien
tccccaaaggctgcatagacttcat

SEQ ID NO: 3145906 - DNA, 25 bp, Homo sapien
gaaccagcacttcatgttctgctac

SEQ ID NO: 3145907 - DNA, 25 bp, Homo sapien
tctgctaccttgtgcaaaagcttcc

SEQ ID NO: 3145908 - DNA, 25 bp, Homo sapien
catgttctgctaccttgtgcaaaag

SEQ ID NO: 3145909 - DNA, 25 bp, Homo sapien
gcacttcatgttctgctaccttgtg

SEQ ID NO: 3145910 - DNA, 25 bp, Homo sapien
tagtttggacgaatacataacggca

SEQ ID NO: 3145911 - DNA, 25 bp, Homo sapien
gaagggtacggagatttcccatata

SEQ ID NO: 3145912 - DNA, 25 bp, Homo sapien
ggatggacctacattgacacctcat

SEQ ID NO: 3145913 - DNA, 25 bp, Homo sapien
cggcatgtatgcaccattgtagtat

SEQ ID NO: 3145914 - DNA, 25 bp, Homo sapien
aatacatttgagatgctgggtgcgg

SEQ ID NO: 3145915 - DNA, 25 bp, Homo sapien
taagcccatgcattgttttgctcca

SEQ ID NO: 3145916 - DNA, 25 bp, Homo sapien
gccaccaaagattaggccaacatat

SEQ ID NO: 3145917 - DNA, 25 bp, Homo sapien
gagtaaagtcctcctcagtaaagaa

SEQ ID NO: 3145918 - DNA, 25 bp, Homo sapien
tagattagaatgataagcttggccc

SEQ ID NO: 3145919 - DNA, 25 bp, Homo sapien
gcttctcagaatctgcccaaactag

SEQ ID NO: 3145920 - DNA, 25 bp, Homo sapien
taagcttggcccttagccagtcctg

SEQ ID NO: 3145921 - DNA, 25 bp, Homo sapien
tctgcccaaactagattagaatgat

SEQ ID NO: 3145922 - DNA, 25 bp, Homo sapien
caccagcatatcctgcaaacctgca

SEQ ID NO: 3145923 - DNA, 25 bp, Homo sapien
tttggaaaggcatctactctgaggc

SEQ ID NO: 3145924 - DNA, 25 bp, Homo sapien
aaaggcatctactctgaggctgctt

SEQ ID NO: 3145925 - DNA, 25 bp, Homo sapien
ggaaaggcatctactctgaggctgc

SEQ ID NO: 3145926 - DNA, 25 bp, Homo sapien
tttgtatggctttcatcccacggta

SEQ ID NO: 3145927 - DNA, 25 bp, Homo sapien
gctttcatcccacggtaaagtcaaa

SEQ ID NO: 3145928 - DNA, 25 bp, Homo sapien
caaaaaattgtaaatcaaaccatct

SEQ ID NO: 3145929 - DNA, 25 bp, Homo sapien
aaaattgcaggtgaccaggcacctg

SEQ ID NO: 3145930 - DNA, 25 bp, Homo sapien
taaggctgttcacttgatcctgggc

SEQ ID NO: 3145931 - DNA, 25 bp, Homo sapien
tcttgagagtcaagcagactagggt

SEQ ID NO: 3145932 - DNA, 25 bp, Homo sapien
ttgtaataaacacagtcatgggcca

SEQ ID NO: 3145933 - DNA, 25 bp, Homo sapien
tctaggagaatttgactcaccgcaa

SEQ ID NO: 3145934 - DNA, 25 bp, Homo sapien
agaggtaacagactgagaagtgttc

SEQ ID NO: 3145935 - DNA, 25 bp, Homo sapien
ccagcaaggggagttgtaggaacaa

SEQ ID NO: 3145936 - DNA, 25 bp, Homo sapien
gggagttgtaggaacaattacagtg

SEQ ID NO: 3145937 - DNA, 25 bp, Homo sapien
tttgagctgatacacttgtgagcat

SEQ ID NO: 3145938 - DNA, 25 bp, Homo sapien
attagaaattgtttaccgtcctcat

SEQ ID NO: 3145939 - DNA, 25 bp, Homo sapien
tagaaattgtttaccgtcctcatgt

SEQ ID NO: 3145940 - DNA, 25 bp, Homo sapien
ttagaaattgtttaccgtcctcatg

SEQ ID NO: 3145941 - DNA, 25 bp, Homo sapien
ctgaaacaagaaacgccttccatgg

SEQ ID NO: 3145942 - DNA, 25 bp, Homo sapien
catggcctgtccgtgaatgcttttc

SEQ ID NO: 3145943 - DNA, 25 bp, Homo sapien
tctatgtccctactatccttttctc

SEQ ID NO: 3145944 - DNA, 25 bp, Homo sapien
tctctgtccaacatgaaataggtac

SEQ ID NO: 3145945 - DNA, 25 bp, Homo sapien
cttcgcggacgtggcggcgaagagg

SEQ ID NO: 3145946 - DNA, 25 bp, Homo sapien
ccgagtctccggcagtcgactgctc

SEQ ID NO: 3145947 - DNA, 25 bp, Homo sapien
gtcttcatggcaaccgcgagcggag

SEQ ID NO: 3145948 - DNA, 25 bp, Homo sapien
tcccggaccgggtcttcatggcaac

SEQ ID NO: 3145949 - DNA, 25 bp, Homo sapien
ccggtgtcgtgaagtggtgggcgcc

SEQ ID NO: 3145950 - DNA, 25 bp, Homo sapien
tctggcgcccggttcgctccggtgt

SEQ ID NO: 3145951 - DNA, 25 bp, Homo sapien
cctcgcctggcctcgcgcgtgaggc

SEQ ID NO: 3145952 - DNA, 25 bp, Homo sapien
gcccggttcgctccggtgtcgtgaa

SEQ ID NO: 3145953 - DNA, 25 bp, Homo sapien
ccgcgaaggccgtttggttcaaatg

SEQ ID NO: 3145954 - DNA, 25 bp, Homo sapien
ctgcccgcgaaggccgtttggttca

SEQ ID NO: 3145955 - DNA, 25 bp, Homo sapien
gcgaaggccgtttggttcaaatgca

SEQ ID NO: 3145956 - DNA, 25 bp, Homo sapien
tgcccgcgaaggccgtttggttcaa

SEQ ID NO: 3145957 - DNA, 25 bp, Homo sapien
gtcggtcacaggcccttgggagccc

SEQ ID NO: 3145958 - DNA, 25 bp, Homo sapien
cgaagacgcggagggcggcgtcggt

SEQ ID NO: 3145959 - DNA, 25 bp, Homo sapien
ggcggcgtcggtcacaggcccttgg

SEQ ID NO: 3145960 - DNA, 25 bp, Homo sapien
gacgaagacgcggagggcggcgtcg

SEQ ID NO: 3145961 - DNA, 25 bp, Homo sapien
cagtcaccggctcccccgactcctc

SEQ ID NO: 3145962 - DNA, 25 bp, Homo sapien
ccagtcaccggctcccccgactcct

SEQ ID NO: 3145963 - DNA, 25 bp, Homo sapien
agcccagtcaccggctcccccgact

SEQ ID NO: 3145964 - DNA, 25 bp, Homo sapien
gcccagtcaccggctcccccgactc

SEQ ID NO: 3145965 - DNA, 25 bp, Homo sapien
cctgtcgtgagtccttcaccctggg

SEQ ID NO: 3145966 - DNA, 25 bp, Homo sapien
caccctggggttagaattccgatgt

SEQ ID NO: 3145967 - DNA, 25 bp, Homo sapien
gatgttccaggaaacggctttcctc

SEQ ID NO: 3145968 - DNA, 25 bp, Homo sapien
tgcccctcgcctgtcgtgagtcctt

SEQ ID NO: 3145969 - DNA, 25 bp, Homo sapien
ccagttcgcccgtggaattcagcat

SEQ ID NO: 3145970 - DNA, 25 bp, Homo sapien
tcgaaaactccagttcgcccgtgga

SEQ ID NO: 3145971 - DNA, 25 bp, Homo sapien
tccagttcgcccgtggaattcagca

SEQ ID NO: 3145972 - DNA, 25 bp, Homo sapien
aactccagttcgcccgtggaattca

SEQ ID NO: 3145973 - DNA, 25 bp, Homo sapien
aggcagggaagtgagttgggagatg

SEQ ID NO: 3145974 - DNA, 25 bp, Homo sapien
agggaagtgagttgggagatgatct

SEQ ID NO: 3145975 - DNA, 25 bp, Homo sapien
cgttttttcgggcacaccagctgag

SEQ ID NO: 3145976 - DNA, 25 bp, Homo sapien
cataaacggagtccggatagcccgt

SEQ ID NO: 3145977 - DNA, 25 bp, Homo sapien
gacaaacgctgaaaggactgatcct

SEQ ID NO: 3145978 - DNA, 25 bp, Homo sapien
gactgatcctcagactcggacaagg

SEQ ID NO: 3145979 - DNA, 25 bp, Homo sapien
tttagtgttgatcttccagactggc

SEQ ID NO: 3145980 - DNA, 25 bp, Homo sapien
tcttttagtgttgatcttccagact

SEQ ID NO: 3145981 - DNA, 25 bp, Homo sapien
ttttagtgttgatcttccagactgg

SEQ ID NO: 3145982 - DNA, 25 bp, Homo sapien
tttcttttagtgttgatcttccaga

SEQ ID NO: 3145983 - DNA, 25 bp, Homo sapien
aaccatatcaacgtattattataag

SEQ ID NO: 3145984 - DNA, 25 bp, Homo sapien
ccatatcaacgtattattataagaa

SEQ ID NO: 3145985 - DNA, 25 bp, Homo sapien
ccaaaccatatcaacgtattattat

SEQ ID NO: 3145986 - DNA, 25 bp, Homo sapien
caaaccatatcaacgtattattata

SEQ ID NO: 3145987 - DNA, 25 bp, Homo sapien
tcacatgtgaaagtattgacagaac

SEQ ID NO: 3145988 - DNA, 25 bp, Homo sapien
aaatgcataagagcctccaatattt

SEQ ID NO: 3145989 - DNA, 25 bp, Homo sapien
tataagccagatgtaagtttacaaa

SEQ ID NO: 3145990 - DNA, 25 bp, Homo sapien
gaacttatactgtataagccagatg

SEQ ID NO: 3145991 - DNA, 25 bp, Homo sapien
ctgaagaagctagagactgaataac

SEQ ID NO: 3145992 - DNA, 25 bp, Homo sapien
tggatattctaaagaaacggttggc

SEQ ID NO: 3145993 - DNA, 25 bp, Homo sapien
gggtcctagaccacacagtatcggc

SEQ ID NO: 3145994 - DNA, 25 bp, Homo sapien
ggcctttgactggttcctaggagat

SEQ ID NO: 3145995 - DNA, 25 bp, Homo sapien
tacttgggaagatacagctgtctat

SEQ ID NO: 3145996 - DNA, 25 bp, Homo sapien
tattgtggtacttgggaagatacag

SEQ ID NO: 3145997 - DNA, 25 bp, Homo sapien
tggtacttgggaagatacagctgtc

SEQ ID NO: 3145998 - DNA, 25 bp, Homo sapien
cttgggaagatacagctgtctatca

SEQ ID NO: 3145999 - DNA, 25 bp, Homo sapien
tgttaagaaggttctctacttcttg

SEQ ID NO: 3146000 - DNA, 25 bp, Homo sapien
taataagactgctcaaatgatctgg

SEQ ID NO: 3146001 - DNA, 25 bp, Homo sapien
cattatcagaaaggacacgagtttg

SEQ ID NO: 3146002 - DNA, 25 bp, Homo sapien
tcattatcagaaaggacacgagttt

SEQ ID NO: 3146003 - DNA, 25 bp, Homo sapien
caagagagcaaacccatctcacaag

SEQ ID NO: 3146004 - DNA, 25 bp, Homo sapien
gcatcatcaaatggtggaacacaga

SEQ ID NO: 3146005 - DNA, 25 bp, Homo sapien
acacagaagggcaaaagcacaagag

SEQ ID NO: 3146006 - DNA, 25 bp, Homo sapien
ctttatgtctggttctaactgagca

SEQ ID NO: 3146007 - DNA, 25 bp, Homo sapien
caaaatcaaggtgctggcatttggt

SEQ ID NO: 3146008 - DNA, 25 bp, Homo sapien
tccaaaatcaaggtgctggcatttg

SEQ ID NO: 3146009 - DNA, 25 bp, Homo sapien
aaatcaaggtgctggcatttggtga

SEQ ID NO: 3146010 - DNA, 25 bp, Homo sapien
aaaatcaaggtgctggcatttggtg

SEQ ID NO: 3146011 - DNA, 25 bp, Homo sapien
aggccacagacaggtactggtctgc

SEQ ID NO: 3146012 - DNA, 25 bp, Homo sapien
gccacagacaggtactggtctgcag

SEQ ID NO: 3146013 - DNA, 25 bp, Homo sapien
cagacaggtactggtctgcagccct

SEQ ID NO: 3146014 - DNA, 25 bp, Homo sapien
ctcgtgctgtgctgcccagttccta

SEQ ID NO: 3146015 - DNA, 25 bp, Homo sapien
ttactaggtaagtgaaacaggtgaa

SEQ ID NO: 3146016 - DNA, 25 bp, Homo sapien
tttactaggtaagtgaaacaggtga

SEQ ID NO: 3146017 - DNA, 25 bp, Homo sapien
tgtgcaaaattcttagcgcagtgcc

SEQ ID NO: 3146018 - DNA, 25 bp, Homo sapien
tatcagtatcacagatggcaacagt

SEQ ID NO: 3146019 - DNA, 25 bp, Homo sapien
cacgtagcaggcactcattataggc

SEQ ID NO: 3146020 - DNA, 25 bp, Homo sapien
catgagtctgtattaagtccttccc

SEQ ID NO: 3146021 - DNA, 25 bp, Homo sapien
aaggatgtggtaaattgaaagggca

SEQ ID NO: 3146022 - DNA, 25 bp, Homo sapien
tatccaagcataaagtggtaaagtg

SEQ ID NO: 3146023 - DNA, 25 bp, Homo sapien
ttcctgtttcctaactgtttctgga

SEQ ID NO: 3146024 - DNA, 25 bp, Homo sapien
aaagggcatcatgcttgattcgaca

SEQ ID NO: 3146025 - DNA, 25 bp, Homo sapien
tacaacattagcttgtaattacaaa

SEQ ID NO: 3146026 - DNA, 25 bp, Homo sapien
acaacattagcttgtaattacaaat

SEQ ID NO: 3146027 - DNA, 25 bp, Homo sapien
caacattagcttgtaattacaaata

SEQ ID NO: 3146028 - DNA, 25 bp, Homo sapien
tatacaacattagcttgtaattaca

SEQ ID NO: 3146029 - DNA, 25 bp, Homo sapien
taagatgagatggaaaaattaagac

SEQ ID NO: 3146030 - DNA, 25 bp, Homo sapien
tagcaatgttgatccacagcaaaga

SEQ ID NO: 3146031 - DNA, 25 bp, Homo sapien
caatacagatttgactttattatag

SEQ ID NO: 3146032 - DNA, 25 bp, Homo sapien
catcaatatgcaatacagatttgac

SEQ ID NO: 3146033 - DNA, 25 bp, Homo sapien
taggccttataaacctccctgataa

SEQ ID NO: 3146034 - DNA, 25 bp, Homo sapien
gaagttctttggctaggttggattg

SEQ ID NO: 3146035 - DNA, 25 bp, Homo sapien
tattcaaggtgacaattaggcctta

SEQ ID NO: 3146036 - DNA, 25 bp, Homo sapien
gctaggttggattgttgagaatcac

SEQ ID NO: 3146037 - DNA, 25 bp, Homo sapien
catgagacaaagacgccaaccagat

SEQ ID NO: 3146038 - DNA, 25 bp, Homo sapien
ttttcatatgcaagatggcactagc

SEQ ID NO: 3146039 - DNA, 25 bp, Homo sapien
tcccattcatggaatctgggagaag

SEQ ID NO: 3146040 - DNA, 25 bp, Homo sapien
aaagtagaaccttacagctgccagc

SEQ ID NO: 3146041 - DNA, 25 bp, Homo sapien
ggacagcaagacttcgagatttgtc

SEQ ID NO: 3146042 - DNA, 25 bp, Homo sapien
acatgtgggaaactgtgtaccatga

SEQ ID NO: 3146043 - DNA, 25 bp, Homo sapien
ggaaactgtgtaccatgagcctgta

SEQ ID NO: 3146044 - DNA, 25 bp, Homo sapien
ccatgagcctgtattgaccattaag

SEQ ID NO: 3146045 - DNA, 25 bp, Homo sapien
tttgtgaaaagggtcttcaagtcag

SEQ ID NO: 3146046 - DNA, 25 bp, Homo sapien
tagcttgtgattgtactccacacac

SEQ ID NO: 3146047 - DNA, 25 bp, Homo sapien
gatccttagcttgtgattgtactcc

SEQ ID NO: 3146048 - DNA, 25 bp, Homo sapien
gtcttcaagtcaggatccttagctt

SEQ ID NO: 3146049 - DNA, 25 bp, Homo sapien
agatattagttcacatatagagctt

SEQ ID NO: 3146050 - DNA, 25 bp, Homo sapien
tttaagatattagttcacatataga

SEQ ID NO: 3146051 - DNA, 25 bp, Homo sapien
tgcagaacaataatcaccaaatgaa

SEQ ID NO: 3146052 - DNA, 25 bp, Homo sapien
ttgcagaacaataatcaccaaatga

SEQ ID NO: 3146053 - DNA, 25 bp, Homo sapien
aaaaatccaatattgactttcaagt

SEQ ID NO: 3146054 - DNA, 25 bp, Homo sapien
ggttgaatttatattgagctgagat

SEQ ID NO: 3146055 - DNA, 25 bp, Homo sapien
tgagcaggagtatcgatggggccca

SEQ ID NO: 3146056 - DNA, 25 bp, Homo sapien
attcagcccatgtattttaaatgtg

SEQ ID NO: 3146057 - DNA, 25 bp, Homo sapien
taacctctacttcccaagttcaaga

SEQ ID NO: 3146058 - DNA, 25 bp, Homo sapien
agttcaagagattctccagcctcag

SEQ ID NO: 3146059 - DNA, 25 bp, Homo sapien
ctgtaacctctacttcccaagttca

SEQ ID NO: 3146060 - DNA, 25 bp, Homo sapien
tcactgtaacctctacttcccaagt

SEQ ID NO: 3146061 - DNA, 25 bp, Homo sapien
tgagtatggacctaaaggtggaatt

SEQ ID NO: 3146062 - DNA, 25 bp, Homo sapien
acattgttgcttacatgttattttc

SEQ ID NO: 3146063 - DNA, 25 bp, Homo sapien
ttcttccacattgttgcttacatgt

SEQ ID NO: 3146064 - DNA, 25 bp, Homo sapien
tatggacctaaaggtggaattctta

SEQ ID NO: 3146065 - DNA, 25 bp, Homo sapien
tggacaggatagaagtctggtctga

SEQ ID NO: 3146066 - DNA, 25 bp, Homo sapien
cagttgtctttccagcacagtccaa

SEQ ID NO: 3146067 - DNA, 25 bp, Homo sapien
ttgaactgcagcctgtataagacag

SEQ ID NO: 3146068 - DNA, 25 bp, Homo sapien
tgcagcctgtataagacagttgtct

SEQ ID NO: 3146069 - DNA, 25 bp, Homo sapien
aagacagttgtctttccagcacagt

SEQ ID NO: 3146070 - DNA, 25 bp, Homo sapien
tcctttaggccatctcctatgattg

SEQ ID NO: 3146071 - DNA, 25 bp, Homo sapien
ttcctttaggccatctcctatgatt

SEQ ID NO: 3146072 - DNA, 25 bp, Homo sapien
cctttaggccatctcctatgattgc

SEQ ID NO: 3146073 - DNA, 25 bp, Homo sapien
cttcctttaggccatctcctatgat

SEQ ID NO: 3146074 - DNA, 25 bp, Homo sapien
taataggtattgatattcatctttc

SEQ ID NO: 3146075 - DNA, 25 bp, Homo sapien
cagatataataggtattgatattca

SEQ ID NO: 3146076 - DNA, 25 bp, Homo sapien
tccacacagatataataggtattga

SEQ ID NO: 3146077 - DNA, 25 bp, Homo sapien
taggtattgatattcatctttcttt

SEQ ID NO: 3146078 - DNA, 25 bp, Homo sapien
ctatttgtcaaaatcagaccagaga

SEQ ID NO: 3146079 - DNA, 25 bp, Homo sapien
tttgtcaaaatcagaccagagaaaa

SEQ ID NO: 3146080 - DNA, 25 bp, Homo sapien
ttgtcaaaatcagaccagagaaaac

SEQ ID NO: 3146081 - DNA, 25 bp, Homo sapien
tatttgtcaaaatcagaccagagaa

SEQ ID NO: 3146082 - DNA, 25 bp, Homo sapien
aaagctttaatagcatccaggaggg

SEQ ID NO: 3146083 - DNA, 25 bp, Homo sapien
gacaggcaggcaaaccacgctgtag

SEQ ID NO: 3146084 - DNA, 25 bp, Homo sapien
ggcaaaccacgctgtagacactctt

SEQ ID NO: 3146085 - DNA, 25 bp, Homo sapien
gcaggcaaaccacgctgtagacact

SEQ ID NO: 3146086 - DNA, 25 bp, Homo sapien
tggcttccccaaatggtagtaccaa

SEQ ID NO: 3146087 - DNA, 25 bp, Homo sapien
ctggtcaatttactatccttgcttg

SEQ ID NO: 3146088 - DNA, 25 bp, Homo sapien
attcccacaactgtgttctggtcaa

SEQ ID NO: 3146089 - DNA, 25 bp, Homo sapien
gagaagagaccactttaagaagcac

SEQ ID NO: 3146090 - DNA, 25 bp, Homo sapien
aatatgctgtggtgaacactgccag

SEQ ID NO: 3146091 - DNA, 25 bp, Homo sapien
agccaccatagggataaacaagcat

SEQ ID NO: 3146092 - DNA, 25 bp, Homo sapien
cactgccaggattctacacagccac

SEQ ID NO: 3146093 - DNA, 25 bp, Homo sapien
atatgctgtggtgaacactgccagg

SEQ ID NO: 3146094 - DNA, 25 bp, Homo sapien
acccagtcctgaacaacgaggtagc

SEQ ID NO: 3146095 - DNA, 25 bp, Homo sapien
cagtcctgaacaacgaggtagcagc

SEQ ID NO: 3146096 - DNA, 25 bp, Homo sapien
aattctactggattactaacaccca

SEQ ID NO: 3146097 - DNA, 25 bp, Homo sapien
tggattactaacacccagtcctgaa

SEQ ID NO: 3146098 - DNA, 25 bp, Homo sapien
tgctgttgagcaagaacgtgaagtt

SEQ ID NO: 3146099 - DNA, 25 bp, Homo sapien
catgtgttagctgttcatactgctg

SEQ ID NO: 3146100 - DNA, 25 bp, Homo sapien
gctgttgagcaagaacgtgaagttt

SEQ ID NO: 3146101 - DNA, 25 bp, Homo sapien
atttcattgcatgtgttagctgttc

SEQ ID NO: 3146102 - DNA, 25 bp, Homo sapien
acatgtgcagtaaacaactgcttga

SEQ ID NO: 3146103 - DNA, 25 bp, Homo sapien
catgtgcagtaaacaactgcttgag

SEQ ID NO: 3146104 - DNA, 25 bp, Homo sapien
tcccaaggtcttgaaattccagtgc

SEQ ID NO: 3146105 - DNA, 25 bp, Homo sapien
tattcccaaggtcttgaaattccag

SEQ ID NO: 3146106 - DNA, 25 bp, Homo sapien
ccaggctgggattaactaactgatt

SEQ ID NO: 3146107 - DNA, 25 bp, Homo sapien
tccacaagtgttgctgggagaactg

SEQ ID NO: 3146108 - DNA, 25 bp, Homo sapien
gattgttgtacaacttcgtgaatgt

SEQ ID NO: 3146109 - DNA, 25 bp, Homo sapien
ggactcctaactcttatcatataca

SEQ ID NO: 3146110 - DNA, 25 bp, Homo sapien
ttatcagtagacaattgaatttcct

SEQ ID NO: 3146111 - DNA, 25 bp, Homo sapien
aaaatttatcagtagacaattgaat

SEQ ID NO: 3146112 - DNA, 25 bp, Homo sapien
tgaatttcctttaaggagcacagtg

SEQ ID NO: 3146113 - DNA, 25 bp, Homo sapien
ttggtaatttcagatggttccattc

SEQ ID NO: 3146114 - DNA, 25 bp, Homo sapien
acagacactgtctcagaagggtccc

SEQ ID NO: 3146115 - DNA, 25 bp, Homo sapien
cacagacactgtctcagaagggtcc

SEQ ID NO: 3146116 - DNA, 25 bp, Homo sapien
tcacagacactgtctcagaagggtc

SEQ ID NO: 3146117 - DNA, 25 bp, Homo sapien
cagacactgtctcagaagggtcccg

SEQ ID NO: 3146118 - DNA, 25 bp, Homo sapien
gctgcagctcgggccaaaacatcat

SEQ ID NO: 3146119 - DNA, 25 bp, Homo sapien
ggctgcagctcgggccaaaacatca

SEQ ID NO: 3146120 - DNA, 25 bp, Homo sapien
gttacagtctctgatagattagcac

SEQ ID NO: 3146121 - DNA, 25 bp, Homo sapien
catttggatgccattatcagtagtg

SEQ ID NO: 3146122 - DNA, 25 bp, Homo sapien
cagtagtggcaccttttgtcaatga

SEQ ID NO: 3146123 - DNA, 25 bp, Homo sapien
gtttctcgattcaggaactcagcaa

SEQ ID NO: 3146124 - DNA, 25 bp, Homo sapien
acaatcaaagccatcgccgaggagg

SEQ ID NO: 3146125 - DNA, 25 bp, Homo sapien
ccgttcacgcggtctggagggacaa

SEQ ID NO: 3146126 - DNA, 25 bp, Homo sapien
gggtgcaacccaacgacagtacaaa

SEQ ID NO: 3146127 - DNA, 25 bp, Homo sapien
taagaagtgtgtctgccgttcacgc

SEQ ID NO: 3146128 - DNA, 25 bp, Homo sapien
cacacttagaagatccctaggtgac

SEQ ID NO: 3146129 - DNA, 25 bp, Homo sapien
gagtgagataagttctgaccgctga

SEQ ID NO: 3146130 - DNA, 25 bp, Homo sapien
tgctttgctgactcctacattattg

SEQ ID NO: 3146131 - DNA, 25 bp, Homo sapien
gagtctctaactggatcctctcaga

SEQ ID NO: 3146132 - DNA, 25 bp, Homo sapien
gagagacacctcactgtaaaaggaa

SEQ ID NO: 3146133 - DNA, 25 bp, Homo sapien
gaaagtcacgactacaaccgcatgg

SEQ ID NO: 3146134 - DNA, 25 bp, Homo sapien
taatgagctacctgctgaagggagg

SEQ ID NO: 3146135 - DNA, 25 bp, Homo sapien
gatgattgtgtccagtctgctcagg

SEQ ID NO: 3146136 - DNA, 25 bp, Homo sapien
tagaatatcagagctgaagtagacc

SEQ ID NO: 3146137 - DNA, 25 bp, Homo sapien
gccacctgaattgagcatttaggaa

SEQ ID NO: 3146138 - DNA, 25 bp, Homo sapien
ctgacacgttttactgataaatgta

SEQ ID NO: 3146139 - DNA, 25 bp, Homo sapien
tattaccgctataatacaattcacc

SEQ ID NO: 3146140 - DNA, 25 bp, Homo sapien
ggcaaggtctcactctgcttcccag

SEQ ID NO: 3146141 - DNA, 25 bp, Homo sapien
tgaggcaaggtctcactctgcttcc

SEQ ID NO: 3146142 - DNA, 25 bp, Homo sapien
tggactcaagagatcctcgtacctc

SEQ ID NO: 3146143 - DNA, 25 bp, Homo sapien
ggactcaagagatcctcgtacctca

SEQ ID NO: 3146144 - DNA, 25 bp, Homo sapien
tgtgacttcacatgctactgtagag

SEQ ID NO: 3146145 - DNA, 25 bp, Homo sapien
gaggatgagccacacgctataattt

SEQ ID NO: 3146146 - DNA, 25 bp, Homo sapien
tggactaccctaaccaaccagatag

SEQ ID NO: 3146147 - DNA, 25 bp, Homo sapien
tgttaaattaagctgcaccgccttc

SEQ ID NO: 3146148 - DNA, 25 bp, Homo sapien
aaataatcctgtccttcatagaaga

SEQ ID NO: 3146149 - DNA, 25 bp, Homo sapien
taatcctgtccttcatagaagattc

SEQ ID NO: 3146150 - DNA, 25 bp, Homo sapien
tttaaataatcctgtccttcataga

SEQ ID NO: 3146151 - DNA, 25 bp, Homo sapien
aatcctgtccttcatagaagattct

SEQ ID NO: 3146152 - DNA, 25 bp, Homo sapien
gcagcacttttatctcaagaagaag

SEQ ID NO: 3146153 - DNA, 25 bp, Homo sapien
aaaatgccaaatgaaacatgtcagt

SEQ ID NO: 3146154 - DNA, 25 bp, Homo sapien
tttgcagcacttttatctcaagaag

SEQ ID NO: 3146155 - DNA, 25 bp, Homo sapien
ccaaatgaaacatgtcagtggaatc

SEQ ID NO: 3146156 - DNA, 25 bp, Homo sapien
tgtaagatgactcgacacaaggcca

SEQ ID NO: 3146157 - DNA, 25 bp, Homo sapien
tcaacgcaagcagtagttcctggcc

SEQ ID NO: 3146158 - DNA, 25 bp, Homo sapien
gccacacggccagtagaaagtttaa

SEQ ID NO: 3146159 - DNA, 25 bp, Homo sapien
tgtatggcccgttcatgtcccaggc

SEQ ID NO: 3146160 - DNA, 25 bp, Homo sapien
gctagatagacacagacttgccacc

SEQ ID NO: 3146161 - DNA, 25 bp, Homo sapien
gaacgactagccaacatgcctatgg

SEQ ID NO: 3146162 - DNA, 25 bp, Homo sapien
tgatctttcatctcggtcgctgtag

SEQ ID NO: 3146163 - DNA, 25 bp, Homo sapien
tgtgattcggtaaacaggcagccat

SEQ ID NO: 3146164 - DNA, 25 bp, Homo sapien
tatcttcccattatgcaaaaccagg

SEQ ID NO: 3146165 - DNA, 25 bp, Homo sapien
aatgccttctgtgttgctaggccta

SEQ ID NO: 3146166 - DNA, 25 bp, Homo sapien
ccatgactggccaggtcaactgtat

SEQ ID NO: 3146167 - DNA, 25 bp, Homo sapien
caaaaccaggtggactacattgtta

SEQ ID NO: 3146168 - DNA, 25 bp, Homo sapien
aaagcagataacttacaaagtttgc

SEQ ID NO: 3146169 - DNA, 25 bp, Homo sapien
gagactgtgctggattgagaagtaa

SEQ ID NO: 3146170 - DNA, 25 bp, Homo sapien
gaagtggaggccctaaaagcagata

SEQ ID NO: 3146171 - DNA, 25 bp, Homo sapien
aacttacaaagtttgccagtgaggg

SEQ ID NO: 3146172 - DNA, 25 bp, Homo sapien
taagaagtatggacggcactgtccc

SEQ ID NO: 3146173 - DNA, 25 bp, Homo sapien
gatctcctgattggatgccgcataa

SEQ ID NO: 3146174 - DNA, 25 bp, Homo sapien
tccagaacagggtagccatgcagtg

SEQ ID NO: 3146175 - DNA, 25 bp, Homo sapien
gacagcagtgtagttcagagcaaga

SEQ ID NO: 3146176 - DNA, 25 bp, Homo sapien
acagggcgtgtcctgagcattcaga

SEQ ID NO: 3146177 - DNA, 25 bp, Homo sapien
aacatagggcgttatggcacagggc

SEQ ID NO: 3146178 - DNA, 25 bp, Homo sapien
tgttacctgtagacaaaccagtcgg

SEQ ID NO: 3146179 - DNA, 25 bp, Homo sapien
aagttccacgtgcagtacttgggca

SEQ ID NO: 3146180 - DNA, 25 bp, Homo sapien
ccagctgcagaattgtgaacttgaa

SEQ ID NO: 3146181 - DNA, 25 bp, Homo sapien
taactttcttagtaactttgcagga

SEQ ID NO: 3146182 - DNA, 25 bp, Homo sapien
gttacttcacatgcagcatcctctg

SEQ ID NO: 3146183 - DNA, 25 bp, Homo sapien
ctttgcaggaaattcactgagcatt

SEQ ID NO: 3146184 - DNA, 25 bp, Homo sapien
gccgtggacagcgttctatgattga

SEQ ID NO: 3146185 - DNA, 25 bp, Homo sapien
cctttgtttgcaggtgcgttcaggg

SEQ ID NO: 3146186 - DNA, 25 bp, Homo sapien
ttccccgagtcagcgcttagcgagt

SEQ ID NO: 3146187 - DNA, 25 bp, Homo sapien
gaagttggcgaaggaacggctctcc

SEQ ID NO: 3146188 - DNA, 25 bp, Homo sapien
aagaaaagccatttaccctcttctg

SEQ ID NO: 3146189 - DNA, 25 bp, Homo sapien
gacttttagattctaggcataaggg

SEQ ID NO: 3146190 - DNA, 25 bp, Homo sapien
tggagctgaatcactgcattgccaa

SEQ ID NO: 3146191 - DNA, 25 bp, Homo sapien
tccaaatacccaagcctggctgagc

SEQ ID NO: 3146192 - DNA, 25 bp, Homo sapien
cattgttgccgcacctaggaggcag

SEQ ID NO: 3146193 - DNA, 25 bp, Homo sapien
cacagacgaggtggcttcaactaca

SEQ ID NO: 3146194 - DNA, 25 bp, Homo sapien
cctaggaggccttgaattcttcggg

SEQ ID NO: 3146195 - DNA, 25 bp, Homo sapien
ctgggtgcacccaagattgtgagga

SEQ ID NO: 3146196 - DNA, 25 bp, Homo sapien
catgcagtcgactgacacttggcgt

SEQ ID NO: 3146197 - DNA, 25 bp, Homo sapien
taatggtgattgcatggtgcaccgg

SEQ ID NO: 3146198 - DNA, 25 bp, Homo sapien
taacgtgctgatgattgaacctgct

SEQ ID NO: 3146199 - DNA, 25 bp, Homo sapien
gcaccggcctttctttagtagcaga

SEQ ID NO: 3146200 - DNA, 25 bp, Homo sapien
gagtgcaggaatagtccaaaccata

SEQ ID NO: 3146201 - DNA, 25 bp, Homo sapien
cctgttccatgtctagccggtccga

SEQ ID NO: 3146202 - DNA, 25 bp, Homo sapien
gatttaatgagcaggcctttgcagc

SEQ ID NO: 3146203 - DNA, 25 bp, Homo sapien
gcttgtcccgtatcgctgagtgcag

SEQ ID NO: 3146204 - DNA, 25 bp, Homo sapien
gcgggattctgccagccgagcttct

SEQ ID NO: 3146205 - DNA, 25 bp, Homo sapien
ggtttcccagtagcgcagacatctg

SEQ ID NO: 3146206 - DNA, 25 bp, Homo sapien
gacatctgctgcgtatcagcaggaa

SEQ ID NO: 3146207 - DNA, 25 bp, Homo sapien
tcagcaggaatagaagcgggattct

SEQ ID NO: 3146208 - DNA, 25 bp, Homo sapien
catgcggacctcaggacttgctttc

SEQ ID NO: 3146209 - DNA, 25 bp, Homo sapien
aaataacgtttctcagctttgcagc

SEQ ID NO: 3146210 - DNA, 25 bp, Homo sapien
gtagtgtaaatcagccatgcggacc

SEQ ID NO: 3146211 - DNA, 25 bp, Homo sapien
tgcagcagcagaaacgtaatctgta

SEQ ID NO: 3146212 - DNA, 25 bp, Homo sapien
aatgggcatccagtgtcgaccttca

SEQ ID NO: 3146213 - DNA, 25 bp, Homo sapien
tgttttggttgagagctagaaacaa

SEQ ID NO: 3146214 - DNA, 25 bp, Homo sapien
gaatgggcatccagtgtcgaccttc

SEQ ID NO: 3146215 - DNA, 25 bp, Homo sapien
tttggttgagagctagaaacaatgg

SEQ ID NO: 3146216 - DNA, 25 bp, Homo sapien
ttctctcggcagacacgctgctcag

SEQ ID NO: 3146217 - DNA, 25 bp, Homo sapien
gttccccctctgttgttggcaccaa

SEQ ID NO: 3146218 - DNA, 25 bp, Homo sapien
gatccatgatggtctcattctctcg

SEQ ID NO: 3146219 - DNA, 25 bp, Homo sapien
taggatatgtgtccctttcgatcca

SEQ ID NO: 3146220 - DNA, 25 bp, Homo sapien
taccgtgataaccatcggagggcgg

SEQ ID NO: 3146221 - DNA, 25 bp, Homo sapien
tcgttggtccactgtgataccgtga

SEQ ID NO: 3146222 - DNA, 25 bp, Homo sapien
gcctggtgttgtcgaatactcctgt

SEQ ID NO: 3146223 - DNA, 25 bp, Homo sapien
tttcagccgcttgccttgtctccag

SEQ ID NO: 3146224 - DNA, 25 bp, Homo sapien
ttcgcagactctcctctggtttcct

SEQ ID NO: 3146225 - DNA, 25 bp, Homo sapien
ttcctggtctcattggagccagcag

SEQ ID NO: 3146226 - DNA, 25 bp, Homo sapien
gagccgtatcgcgtcttcgcagact

SEQ ID NO: 3146227 - DNA, 25 bp, Homo sapien
tgcactgagccgtatcgcgtcttcg

SEQ ID NO: 3146228 - DNA, 25 bp, Homo sapien
cgcattgacacttcagttgccacgc

SEQ ID NO: 3146229 - DNA, 25 bp, Homo sapien
cattgacacttcagttgccacgcag

SEQ ID NO: 3146230 - DNA, 25 bp, Homo sapien
tgacacttcagttgccacgcagttg

SEQ ID NO: 3146231 - DNA, 25 bp, Homo sapien
cacttcagttgccacgcagttgcac

SEQ ID NO: 3146232 - DNA, 25 bp, Homo sapien
taatatccccagaatgtcggggtgg

SEQ ID NO: 3146233 - DNA, 25 bp, Homo sapien
gaatctcggtgcaatgacacaccag

SEQ ID NO: 3146234 - DNA, 25 bp, Homo sapien
aggcatttaaaggaggcccctggat

SEQ ID NO: 3146235 - DNA, 25 bp, Homo sapien
tcagggccagtctgcgggcgaatct

SEQ ID NO: 3146236 - DNA, 25 bp, Homo sapien
tccagctgctgctagaagcaaatct

SEQ ID NO: 3146237 - DNA, 25 bp, Homo sapien
catttgacccttggatttctgcagg

SEQ ID NO: 3146238 - DNA, 25 bp, Homo sapien
tgtgccctccgcagcaggagaggaa

SEQ ID NO: 3146239 - DNA, 25 bp, Homo sapien
tctattttcatttgacccttggatt

SEQ ID NO: 3146240 - DNA, 25 bp, Homo sapien
cctggcatgccaccatttagaagaa

SEQ ID NO: 3146241 - DNA, 25 bp, Homo sapien
ttttacaaaacatgacgcccacttc

SEQ ID NO: 3146242 - DNA, 25 bp, Homo sapien
cttaagtgggaaatcaagtcctggc

SEQ ID NO: 3146243 - DNA, 25 bp, Homo sapien
cgttggagttgatcaaggccacttc

SEQ ID NO: 3146244 - DNA, 25 bp, Homo sapien
tgtggccatcaaccagaaccctcat

SEQ ID NO: 3146245 - DNA, 25 bp, Homo sapien
ccattttgtggccatcaaccagaac

SEQ ID NO: 3146246 - DNA, 25 bp, Homo sapien
ttttgtggccatcaaccagaaccct

SEQ ID NO: 3146247 - DNA, 25 bp, Homo sapien
cattttgtggccatcaaccagaacc

SEQ ID NO: 3146248 - DNA, 25 bp, Homo sapien
ctagtgtgatcagtgaccagttgag

SEQ ID NO: 3146249 - DNA, 25 bp, Homo sapien
tctagtgtgatcagtgaccagttga

SEQ ID NO: 3146250 - DNA, 25 bp, Homo sapien
tcaatctagtgtgatcagtgaccag

SEQ ID NO: 3146251 - DNA, 25 bp, Homo sapien
aatctagtgtgatcagtgaccagtt

SEQ ID NO: 3146252 - DNA, 25 bp, Homo sapien
cgacgaggctcggatgacacagaga

SEQ ID NO: 3146253 - DNA, 25 bp, Homo sapien
ggctcggatgacacagagatcagct

SEQ ID NO: 3146254 - DNA, 25 bp, Homo sapien
ttccccttccgacgaggctcggatg

SEQ ID NO: 3146255 - DNA, 25 bp, Homo sapien
aacacattccccttccgacgaggct

SEQ ID NO: 3146256 - DNA, 25 bp, Homo sapien
ggtattctcatggtggtctcccatc

SEQ ID NO: 3146257 - DNA, 25 bp, Homo sapien
ggcaagttcagggttttatggccat

SEQ ID NO: 3146258 - DNA, 25 bp, Homo sapien
tctggcaagttcagggttttatggc

SEQ ID NO: 3146259 - DNA, 25 bp, Homo sapien
gagatctggcaagttcagggtttta

SEQ ID NO: 3146260 - DNA, 25 bp, Homo sapien
catacttcccgcgttacttccaggg

SEQ ID NO: 3146261 - DNA, 25 bp, Homo sapien
caacgtagagatcctgcacatggca

SEQ ID NO: 3146262 - DNA, 25 bp, Homo sapien
gccctgtggtttggcttgttcgtca

SEQ ID NO: 3146263 - DNA, 25 bp, Homo sapien
catgagcctcggtcttacttgaagg

SEQ ID NO: 3146264 - DNA, 25 bp, Homo sapien
taggtatgaggatcagtgctcttag

SEQ ID NO: 3146265 - DNA, 25 bp, Homo sapien
cttagcaatttggttggaaagaaga

SEQ ID NO: 3146266 - DNA, 25 bp, Homo sapien
aggatcagtgctcttagcaatttgg

SEQ ID NO: 3146267 - DNA, 25 bp, Homo sapien
tggttggaaagaagagtctttgaag

SEQ ID NO: 3146268 - DNA, 25 bp, Homo sapien
tcaccatgggactgcggaagagaaa

SEQ ID NO: 3146269 - DNA, 25 bp, Homo sapien
cggaagagaaatcccagccagtcca

SEQ ID NO: 3146270 - DNA, 25 bp, Homo sapien
gagcagaaccgaggcaatcaccatg

SEQ ID NO: 3146271 - DNA, 25 bp, Homo sapien
gaatggcgatttgctgctgcagaaa

SEQ ID NO: 3146272 - DNA, 25 bp, Homo sapien
cctcctagcgtgaaggtacccttat

SEQ ID NO: 3146273 - DNA, 25 bp, Homo sapien
tagcgtgaaggtacccttatcttgg

SEQ ID NO: 3146274 - DNA, 25 bp, Homo sapien
ccttatcttgggcagtgctgtttcc

SEQ ID NO: 3146275 - DNA, 25 bp, Homo sapien
ctctcttccctcctagcgtgaaggt

SEQ ID NO: 3146276 - DNA, 25 bp, Homo sapien
gatggcagaatcactgggggaccca

SEQ ID NO: 3146277 - DNA, 25 bp, Homo sapien
ctctggattaggaatcgatcctctt

SEQ ID NO: 3146278 - DNA, 25 bp, Homo sapien
aattgatgttggagcttcataaatc

SEQ ID NO: 3146279 - DNA, 25 bp, Homo sapien
cacactcaacatagcatgatgaata

SEQ ID NO: 3146280 - DNA, 25 bp, Homo sapien
cctttcatgagtagtttcgggaagc

SEQ ID NO: 3146281 - DNA, 25 bp, Homo sapien
agtagtttcgggaagccagctttat

SEQ ID NO: 3146282 - DNA, 25 bp, Homo sapien
ttcacagagttcttatcatttttgt

SEQ ID NO: 3146283 - DNA, 25 bp, Homo sapien
aggtttcctttcatgagtagtttcg

SEQ ID NO: 3146284 - DNA, 25 bp, Homo sapien
gatgttggacacaaacttcaaaaga

SEQ ID NO: 3146285 - DNA, 25 bp, Homo sapien
tgccatgtatatgaggatgttggac

SEQ ID NO: 3146286 - DNA, 25 bp, Homo sapien
cagctgcaagcaacaagaggactca

SEQ ID NO: 3146287 - DNA, 25 bp, Homo sapien
caaaagaaccctagtaatgtggtga

SEQ ID NO: 3146288 - DNA, 25 bp, Homo sapien
tgcaatcccggcaccgaggctggta

SEQ ID NO: 3146289 - DNA, 25 bp, Homo sapien
aatcccggcaccgaggctggtagat

SEQ ID NO: 3146290 - DNA, 25 bp, Homo sapien
caatcccggcaccgaggctggtaga

SEQ ID NO: 3146291 - DNA, 25 bp, Homo sapien
gcaatcccggcaccgaggctggtag

SEQ ID NO: 3146292 - DNA, 25 bp, Homo sapien
tgggggtaaggcatcccaaggcaga

SEQ ID NO: 3146293 - DNA, 25 bp, Homo sapien
gatttctgtatcttttccccacatt

SEQ ID NO: 3146294 - DNA, 25 bp, Homo sapien
gttgggggtaaggcatcccaaggca

SEQ ID NO: 3146295 - DNA, 25 bp, Homo sapien
ctgatttctgtatcttttccccaca

SEQ ID NO: 3146296 - DNA, 25 bp, Homo sapien
tgtgaacttgcatcctgtgtcgagg

SEQ ID NO: 3146297 - DNA, 25 bp, Homo sapien
tgtgtcgagggaaacaccctgttcc

SEQ ID NO: 3146298 - DNA, 25 bp, Homo sapien
cccttaagttctgttgaggaaagca

SEQ ID NO: 3146299 - DNA, 25 bp, Homo sapien
gaggcttctaaatgcaggtcccagc

SEQ ID NO: 3146300 - DNA, 25 bp, Homo sapien
gaggcctctgctgagcttgtcactt

SEQ ID NO: 3146301 - DNA, 25 bp, Homo sapien
ccttccctggaactagagtgtggtt

SEQ ID NO: 3146302 - DNA, 25 bp, Homo sapien
actttgtgccttttttctggtggag

SEQ ID NO: 3146303 - DNA, 25 bp, Homo sapien
agcgtagagattgctgccccgaggc

SEQ ID NO: 3146304 - DNA, 25 bp, Homo sapien
ccttggagcagctgtatagatattt

SEQ ID NO: 3146305 - DNA, 25 bp, Homo sapien
ggagcagctgtatagatatttattt

SEQ ID NO: 3146306 - DNA, 25 bp, Homo sapien
gccttggagcagctgtatagatatt

SEQ ID NO: 3146307 - DNA, 25 bp, Homo sapien
ttggagcagctgtatagatatttat

SEQ ID NO: 3146308 - DNA, 25 bp, Homo sapien
catctgatgcctttgaaaccatctc

SEQ ID NO: 3146309 - DNA, 25 bp, Homo sapien
ctgacttcagtgcagatagcattgg

SEQ ID NO: 3146310 - DNA, 25 bp, Homo sapien
tccagaaatggcctggatcttgttc

SEQ ID NO: 3146311 - DNA, 25 bp, Homo sapien
aaaccatctctgtcctgactgactt

SEQ ID NO: 3146312 - DNA, 25 bp, Homo sapien
tagcctgaggcatatgcagataaat

SEQ ID NO: 3146313 - DNA, 25 bp, Homo sapien
tatgaaataacaccacaggagggaa

SEQ ID NO: 3146314 - DNA, 25 bp, Homo sapien
cccaaggtgatgtgtagcctgactt

SEQ ID NO: 3146315 - DNA, 25 bp, Homo sapien
catcaacagtgcattctaagctctc

SEQ ID NO: 3146316 - DNA, 25 bp, Homo sapien
tttagtatatgtgctgtcaaagcaa

SEQ ID NO: 3146317 - DNA, 25 bp, Homo sapien
aatcttctctgtattattctgattt

SEQ ID NO: 3146318 - DNA, 25 bp, Homo sapien
tagtatatgtgctgtcaaagcaagc

SEQ ID NO: 3146319 - DNA, 25 bp, Homo sapien
gtatatgtgctgtcaaagcaagcaa

SEQ ID NO: 3146320 - DNA, 25 bp, Homo sapien
tttgtggaggcccacgcatctattg

SEQ ID NO: 3146321 - DNA, 25 bp, Homo sapien
tggtttgtgactgcggctgttttgt

SEQ ID NO: 3146322 - DNA, 25 bp, Homo sapien
ttaacaccgacttggtttgtgactg

SEQ ID NO: 3146323 - DNA, 25 bp, Homo sapien
tcttaacaccgacttggtttgtgac

SEQ ID NO: 3146324 - DNA, 25 bp, Homo sapien
gattcagcttgtctgtatctgaagg

SEQ ID NO: 3146325 - DNA, 25 bp, Homo sapien
tgtatctgaaggtgacggttaccat

SEQ ID NO: 3146326 - DNA, 25 bp, Homo sapien
cagcttgtctgtatctgaaggtgac

SEQ ID NO: 3146327 - DNA, 25 bp, Homo sapien
gttttgaatagattcagcttgtctg

SEQ ID NO: 3146328 - DNA, 25 bp, Homo sapien
tagtatcagtacagaagctccccat

SEQ ID NO: 3146329 - DNA, 25 bp, Homo sapien
cacagggctgcgatggcaatagcca

SEQ ID NO: 3146330 - DNA, 25 bp, Homo sapien
caatagccacagctgtcaaaaagtc

SEQ ID NO: 3146331 - DNA, 25 bp, Homo sapien
taggaagttcctttgctagggcagg

SEQ ID NO: 3146332 - DNA, 25 bp, Homo sapien
catctggaaacatgtccttaattcc

SEQ ID NO: 3146333 - DNA, 25 bp, Homo sapien
gggaccagctctttggggactctgc

SEQ ID NO: 3146334 - DNA, 25 bp, Homo sapien
ttttcctttccatccctcatctgga

SEQ ID NO: 3146335 - DNA, 25 bp, Homo sapien
tgctaagcattgctgccagcactgt

SEQ ID NO: 3146336 - DNA, 25 bp, Homo sapien
aaagattcccattttcattgcacac

SEQ ID NO: 3146337 - DNA, 25 bp, Homo sapien
tcaaagattcccattttcattgcac

SEQ ID NO: 3146338 - DNA, 25 bp, Homo sapien
caaagattcccattttcattgcaca

SEQ ID NO: 3146339 - DNA, 25 bp, Homo sapien
tctttcagatattaggacagcttag

SEQ ID NO: 3146340 - DNA, 25 bp, Homo sapien
gggattaaactaagcacactcatga

SEQ ID NO: 3146341 - DNA, 25 bp, Homo sapien
tagccacgttcttttggaggttaca

SEQ ID NO: 3146342 - DNA, 25 bp, Homo sapien
actggaagtttatccgcatgcccaa

SEQ ID NO: 3146343 - DNA, 25 bp, Homo sapien
cttcttcagacttgggtagaggaga

SEQ ID NO: 3146344 - DNA, 25 bp, Homo sapien
ttctgtgtaatttttacccactgtc

SEQ ID NO: 3146345 - DNA, 25 bp, Homo sapien
tgggtagaggagaactgaacttttc

SEQ ID NO: 3146346 - DNA, 25 bp, Homo sapien
tctgtgtaatttttacccactgtca

SEQ ID NO: 3146347 - DNA, 25 bp, Homo sapien
ctatctgcccttaatttggtttgcc

SEQ ID NO: 3146348 - DNA, 25 bp, Homo sapien
tggttctgttgacccacttggaaga

SEQ ID NO: 3146349 - DNA, 25 bp, Homo sapien
tattgtattccaactgaacggattc

SEQ ID NO: 3146350 - DNA, 25 bp, Homo sapien
tggaagagctccagtgtagtgcctg

SEQ ID NO: 3146351 - DNA, 25 bp, Homo sapien
ttgctgtggaactcagcccatccca

SEQ ID NO: 3146352 - DNA, 25 bp, Homo sapien
cttgctgtggaactcagcccatccc

SEQ ID NO: 3146353 - DNA, 25 bp, Homo sapien
tgctgtggaactcagcccatcccac

SEQ ID NO: 3146354 - DNA, 25 bp, Homo sapien
agggcgctgccaggcctgctataac

SEQ ID NO: 3146355 - DNA, 25 bp, Homo sapien
gtatcccagatacttgtggccaagc

SEQ ID NO: 3146356 - DNA, 25 bp, Homo sapien
tgctataaccaggagtgccctgcat

SEQ ID NO: 3146357 - DNA, 25 bp, Homo sapien
aaaggagtagaacgcagagtgtgca

SEQ ID NO: 3146358 - DNA, 25 bp, Homo sapien
gttgtagtatatgtgttactgaagc

SEQ ID NO: 3146359 - DNA, 25 bp, Homo sapien
gccaggctaatgtctgtgtcgttcc

SEQ ID NO: 3146360 - DNA, 25 bp, Homo sapien
caggctaatgtctgtgtcgttccag

SEQ ID NO: 3146361 - DNA, 25 bp, Homo sapien
gggccaggctaatgtctgtgtcgtt

SEQ ID NO: 3146362 - DNA, 25 bp, Homo sapien
ggtttcgctgtattgccaaggccag

SEQ ID NO: 3146363 - DNA, 25 bp, Homo sapien
taatcattttgcctgcttcagcctg

SEQ ID NO: 3146364 - DNA, 25 bp, Homo sapien
tttcgctgtattgccaaggccagtc

SEQ ID NO: 3146365 - DNA, 25 bp, Homo sapien
gcatgatctcggtttgccgcagcct

SEQ ID NO: 3146366 - DNA, 25 bp, Homo sapien
cgataggactacacttctttggaat

SEQ ID NO: 3146367 - DNA, 25 bp, Homo sapien
gccacacatttagctagagatccta

SEQ ID NO: 3146368 - DNA, 25 bp, Homo sapien
taagaggtagtttataagccagtca

SEQ ID NO: 3146369 - DNA, 25 bp, Homo sapien
ttcacacgtttcagtgccaccttct

SEQ ID NO: 3146370 - DNA, 25 bp, Homo sapien
cacaggatcagtcacgtggttgtgg

SEQ ID NO: 3146371 - DNA, 25 bp, Homo sapien
gctcatgtgtcggttttgcagcaca

SEQ ID NO: 3146372 - DNA, 25 bp, Homo sapien
tgaatttcccgtaagttttgaagca

SEQ ID NO: 3146373 - DNA, 25 bp, Homo sapien
gaagcactggaacgaggtctgtttt

SEQ ID NO: 3146374 - DNA, 25 bp, Homo sapien
ttatgtgtggccgactcttctgagt

SEQ ID NO: 3146375 - DNA, 25 bp, Homo sapien
tgtggccgactcttctgagtaatac

SEQ ID NO: 3146376 - DNA, 25 bp, Homo sapien
cttcaaattccatatcttcacatat

SEQ ID NO: 3146377 - DNA, 25 bp, Homo sapien
gactcttctgagtaataccatgaaa

SEQ ID NO: 3146378 - DNA, 25 bp, Homo sapien
tctttggtgacgtatggtctagttg

SEQ ID NO: 3146379 - DNA, 25 bp, Homo sapien
taaatggtgtgggtgctgaaggcca

SEQ ID NO: 3146380 - DNA, 25 bp, Homo sapien
gttgaagggctgagataaatggtgt

SEQ ID NO: 3146381 - DNA, 25 bp, Homo sapien
tgggcccttatgatgtggagcagtt

SEQ ID NO: 3146382 - DNA, 25 bp, Homo sapien
tctgtgttgtctagaagagcttgac

SEQ ID NO: 3146383 - DNA, 25 bp, Homo sapien
ccagcacgtgcaaaaaagggacttc

SEQ ID NO: 3146384 - DNA, 25 bp, Homo sapien
tgagatgcagtttgaggcacagcag

SEQ ID NO: 3146385 - DNA, 25 bp, Homo sapien
cagcaggtcagttgtgatacttcca

SEQ ID NO: 3146386 - DNA, 25 bp, Homo sapien
caagaattcagactgagccctgcca

SEQ ID NO: 3146387 - DNA, 25 bp, Homo sapien
tccacggggcagatcagtatgttca

SEQ ID NO: 3146388 - DNA, 25 bp, Homo sapien
tctgtttcagttcctaaggggaatg

SEQ ID NO: 3146389 - DNA, 25 bp, Homo sapien
tgagccctgccagaacattcctgtg

SEQ ID NO: 3146390 - DNA, 25 bp, Homo sapien
gtctggaattccgattaggtgccgc

SEQ ID NO: 3146391 - DNA, 25 bp, Homo sapien
tggaattccgattaggtgccgcctg

SEQ ID NO: 3146392 - DNA, 25 bp, Homo sapien
gaattccgattaggtgccgcctgca

SEQ ID NO: 3146393 - DNA, 25 bp, Homo sapien
tttgtctggaattccgattaggtgc

SEQ ID NO: 3146394 - DNA, 25 bp, Homo sapien
tcaggaagatccatgcattgcagca

SEQ ID NO: 3146395 - DNA, 25 bp, Homo sapien
tctcatatttgctcattccactctc

SEQ ID NO: 3146396 - DNA, 25 bp, Homo sapien
tctcccacctatcggtagagcgttt

SEQ ID NO: 3146397 - DNA, 25 bp, Homo sapien
tgtgggtggtgaagcaaatttacaa

SEQ ID NO: 3146398 - DNA, 25 bp, Homo sapien
gaaatttgcgaagaactggcagctt

SEQ ID NO: 3146399 - DNA, 25 bp, Homo sapien
ctacatctttaaacttcaggtctga

SEQ ID NO: 3146400 - DNA, 25 bp, Homo sapien
tggagaactccttcctacatcttta

SEQ ID NO: 3146401 - DNA, 25 bp, Homo sapien
aaacttcaggtctgattgtggttca

SEQ ID NO: 3146402 - DNA, 25 bp, Homo sapien
aggtgggagtggagaactccttcct

SEQ ID NO: 3146403 - DNA, 25 bp, Homo sapien
taagctatgggcttccgtcatttcc

SEQ ID NO: 3146404 - DNA, 25 bp, Homo sapien
tactgttgtctgaatcacctccgtg

SEQ ID NO: 3146405 - DNA, 25 bp, Homo sapien
tttctccagtatccgcaaaacagca

SEQ ID NO: 3146406 - DNA, 25 bp, Homo sapien
tgggccctggatcactgcattactg

SEQ ID NO: 3146407 - DNA, 25 bp, Homo sapien
tcactgcagcctccacctcctggac

SEQ ID NO: 3146408 - DNA, 25 bp, Homo sapien
tggagtgcagtggtgcaatcttggc

SEQ ID NO: 3146409 - DNA, 25 bp, Homo sapien
acagtctcgctctgttgacccggct

SEQ ID NO: 3146410 - DNA, 25 bp, Homo sapien
ttccacctcagcctcgccagtagct

SEQ ID NO: 3146411 - DNA, 25 bp, Homo sapien
cctgccgttgactgaagtgttgtta

SEQ ID NO: 3146412 - DNA, 25 bp, Homo sapien
tgttatgtgcacctagaatgtagcc

SEQ ID NO: 3146413 - DNA, 25 bp, Homo sapien
gctcctaggttatggacctgtacag

SEQ ID NO: 3146414 - DNA, 25 bp, Homo sapien
gaatgtagccatttccgtggagaca

SEQ ID NO: 3146415 - DNA, 25 bp, Homo sapien
aacctgttcatgtaacacagaggag

SEQ ID NO: 3146416 - DNA, 25 bp, Homo sapien
gaaacctgttcatgtaacacagagg

SEQ ID NO: 3146417 - DNA, 25 bp, Homo sapien
ctgttcatgtaacacagaggaggga

SEQ ID NO: 3146418 - DNA, 25 bp, Homo sapien
gagaaacctgttcatgtaacacaga

SEQ ID NO: 3146419 - DNA, 25 bp, Homo sapien
agcagtggtggttctgtatccaact

SEQ ID NO: 3146420 - DNA, 25 bp, Homo sapien
tggtggttctgtatccaactgggtc

SEQ ID NO: 3146421 - DNA, 25 bp, Homo sapien
tggttctgtatccaactgggtcctg

SEQ ID NO: 3146422 - DNA, 25 bp, Homo sapien
cagtggtggttctgtatccaactgg

SEQ ID NO: 3146423 - DNA, 25 bp, Homo sapien
gctttttgatgaggcaccgaacata

SEQ ID NO: 3146424 - DNA, 25 bp, Homo sapien
tgccctcaggatgaagtctaagctt

SEQ ID NO: 3146425 - DNA, 25 bp, Homo sapien
aatcttctgcagatctgggcatatc

SEQ ID NO: 3146426 - DNA, 25 bp, Homo sapien
tctgggcatatcatcccaactcttc

SEQ ID NO: 3146427 - DNA, 25 bp, Homo sapien
tcaaagcaaagatgcagactatgtc

SEQ ID NO: 3146428 - DNA, 25 bp, Homo sapien
cactcccaagttgggtgcctactac

SEQ ID NO: 3146429 - DNA, 25 bp, Homo sapien
tctgcctgcttggaatcatatttaa

SEQ ID NO: 3146430 - DNA, 25 bp, Homo sapien
tgggtcacaacattatctgcctgct

SEQ ID NO: 3146431 - DNA, 25 bp, Homo sapien
tgttggacagatgcctgtgattggc

SEQ ID NO: 3146432 - DNA, 25 bp, Homo sapien
ctgtgttggacagatgcctgtgatt

SEQ ID NO: 3146433 - DNA, 25 bp, Homo sapien
ttggacagatgcctgtgattggctg

SEQ ID NO: 3146434 - DNA, 25 bp, Homo sapien
tgtgttggacagatgcctgtgattg

SEQ ID NO: 3146435 - DNA, 25 bp, Homo sapien
tcctcgcctcgatgagaaatgcagc

SEQ ID NO: 3146436 - DNA, 25 bp, Homo sapien
ccttggtctctggaatacgactttc

SEQ ID NO: 3146437 - DNA, 25 bp, Homo sapien
agcctttgtctcctcgcctcgatga

SEQ ID NO: 3146438 - DNA, 25 bp, Homo sapien
tgaaattttggcaagcctttcctgt

SEQ ID NO: 3146439 - DNA, 25 bp, Homo sapien
gcaggggagggggtcctgtgctttg

SEQ ID NO: 3146440 - DNA, 25 bp, Homo sapien
gctgcaggggagggggtcctgtgct

SEQ ID NO: 3146441 - DNA, 25 bp, Homo sapien
aggggagggggtcctgtgctttgct

SEQ ID NO: 3146442 - DNA, 25 bp, Homo sapien
ctgcaggggagggggtcctgtgctt

SEQ ID NO: 3146443 - DNA, 25 bp, Homo sapien
ggtggtacgctagaaatgacatttg

SEQ ID NO: 3146444 - DNA, 25 bp, Homo sapien
aaatgacatttgtgcggcgagaaca

SEQ ID NO: 3146445 - DNA, 25 bp, Homo sapien
aatgacatttgtgcggcgagaacag

SEQ ID NO: 3146446 - DNA, 25 bp, Homo sapien
cgggcggaatggagggtggtacgct

SEQ ID NO: 3146447 - DNA, 25 bp, Homo sapien
ccgcagggccagtggcacggcgact

SEQ ID NO: 3146448 - DNA, 25 bp, Homo sapien
cagggccagtggcacggcgactgcg

SEQ ID NO: 3146449 - DNA, 25 bp, Homo sapien
gggccagtggcacggcgactgcggg

SEQ ID NO: 3146450 - DNA, 25 bp, Homo sapien
ggcacggcgactgcgggctcactct

SEQ ID NO: 3146451 - DNA, 25 bp, Homo sapien
gcgcctgctgcggagtcccgtgcgc

SEQ ID NO: 3146452 - DNA, 25 bp, Homo sapien
cgcctgctgcggagtcccgtgcgcc

SEQ ID NO: 3146453 - DNA, 25 bp, Homo sapien
ggtagcggcagcagcgtgcggcgag

SEQ ID NO: 3146454 - DNA, 25 bp, Homo sapien
gcagcgtgcggcgagcggctgcggg

SEQ ID NO: 3146455 - DNA, 25 bp, Homo sapien
gggaaacacccgggtagcggcagca

SEQ ID NO: 3146456 - DNA, 25 bp, Homo sapien
cggcagcagcgtgcggcgagcggct

SEQ ID NO: 3146457 - DNA, 25 bp, Homo sapien
tgcctttgccccggattccggggca

SEQ ID NO: 3146458 - DNA, 25 bp, Homo sapien
ctttgccccggattccggggcagca

SEQ ID NO: 3146459 - DNA, 25 bp, Homo sapien
ccccggattccggggcagcacgaga

SEQ ID NO: 3146460 - DNA, 25 bp, Homo sapien
ccggattccggggcagcacgagagt

SEQ ID NO: 3146461 - DNA, 25 bp, Homo sapien
ctggagcagagccgctgggcgccgg

SEQ ID NO: 3146462 - DNA, 25 bp, Homo sapien
gagcagagccgctgggcgccggagc

SEQ ID NO: 3146463 - DNA, 25 bp, Homo sapien
ggcgccggagccgaggcgagcgccg

SEQ ID NO: 3146464 - DNA, 25 bp, Homo sapien
cgctgggcgccggagccgaggcgag

SEQ ID NO: 3146465 - DNA, 25 bp, Homo sapien
tgtaaccgcatctgatctgggcgct

SEQ ID NO: 3146466 - DNA, 25 bp, Homo sapien
gcgctgtaaccgcatctgatctggg

SEQ ID NO: 3146467 - DNA, 25 bp, Homo sapien
ctagtgcgctgtaaccgcatctgat

SEQ ID NO: 3146468 - DNA, 25 bp, Homo sapien
cgcatctgatctgggcgctccggga

SEQ ID NO: 3146469 - DNA, 25 bp, Homo sapien
gcccgttctggtctcaagtaggaag

SEQ ID NO: 3146470 - DNA, 25 bp, Homo sapien
tcagttgccggagcccgttctggtc

SEQ ID NO: 3146471 - DNA, 25 bp, Homo sapien
cggagcccgttctggtctcaagtag

SEQ ID NO: 3146472 - DNA, 25 bp, Homo sapien
ttgccggagcccgttctggtctcaa

SEQ ID NO: 3146473 - DNA, 25 bp, Homo sapien
agtggaatctcgtcagcgccgctcc

SEQ ID NO: 3146474 - DNA, 25 bp, Homo sapien
gagaagtggaatctcgtcagcgccg

SEQ ID NO: 3146475 - DNA, 25 bp, Homo sapien
agaagtggaatctcgtcagcgccgc

SEQ ID NO: 3146476 - DNA, 25 bp, Homo sapien
gaagtggaatctcgtcagcgccgct

SEQ ID NO: 3146477 - DNA, 25 bp, Homo sapien
ttacatatttagcaagacagagggc

SEQ ID NO: 3146478 - DNA, 25 bp, Homo sapien
gacgtcactgtcagggcatttcagg

SEQ ID NO: 3146479 - DNA, 25 bp, Homo sapien
ccgtttccggaaggctgattgcatc

SEQ ID NO: 3146480 - DNA, 25 bp, Homo sapien
tgcagctgcgcaacgcttggtggcc

SEQ ID NO: 3146481 - DNA, 25 bp, Homo sapien
gagtgggattggcaaatgacagaca

SEQ ID NO: 3146482 - DNA, 25 bp, Homo sapien
gattggcaaatgacagacataagac

SEQ ID NO: 3146483 - DNA, 25 bp, Homo sapien
gttgggagtgggattggcaaatgac

SEQ ID NO: 3146484 - DNA, 25 bp, Homo sapien
ggcaaatgacagacataagacatag

SEQ ID NO: 3146485 - DNA, 25 bp, Homo sapien
cagttgtgggagtgacaatagcagt

SEQ ID NO: 3146486 - DNA, 25 bp, Homo sapien
gagtgacaatagcagtggcagattc

SEQ ID NO: 3146487 - DNA, 25 bp, Homo sapien
gattctgcatccctggattgcagct

SEQ ID NO: 3146488 - DNA, 25 bp, Homo sapien
ggcagattctgcatccctggattgc

SEQ ID NO: 3146489 - DNA, 25 bp, Homo sapien
agacttgatgaatatctgttaatga

SEQ ID NO: 3146490 - DNA, 25 bp, Homo sapien
aagacttgatgaatatctgttaatg

SEQ ID NO: 3146491 - DNA, 25 bp, Homo sapien
gttccttgagtgtatggagcagtcc

SEQ ID NO: 3146492 - DNA, 25 bp, Homo sapien
taatctggtggttgtggagacggga

SEQ ID NO: 3146493 - DNA, 25 bp, Homo sapien
cactcgccggtgagataatctggtg

SEQ ID NO: 3146494 - DNA, 25 bp, Homo sapien
gtcgcggccagatgggtacgaaccc

SEQ ID NO: 3146495 - DNA, 25 bp, Homo sapien
ccaggctgcagctataaagcgccgg

SEQ ID NO: 3146496 - DNA, 25 bp, Homo sapien
tagggaagacgaaaaacagctagcg

SEQ ID NO: 3146497 - DNA, 25 bp, Homo sapien
ctgcagctataaagcgccggccaga

SEQ ID NO: 3146498 - DNA, 25 bp, Homo sapien
agacgaaaaacagctagcggagccg

SEQ ID NO: 3146499 - DNA, 25 bp, Homo sapien
ttcgcggagcgcccggcagaaatag

SEQ ID NO: 3146500 - DNA, 25 bp, Homo sapien
tcgcggagcgcccggcagaaatagc

SEQ ID NO: 3146501 - DNA, 25 bp, Homo sapien
cttcgcggagcgcccggcagaaata

SEQ ID NO: 3146502 - DNA, 25 bp, Homo sapien
gttgatctccatcggcttgagctgc

SEQ ID NO: 3146503 - DNA, 25 bp, Homo sapien
gggttgatctccatcggcttgagct

SEQ ID NO: 3146504 - DNA, 25 bp, Homo sapien
ggttgatctccatcggcttgagctg

SEQ ID NO: 3146505 - DNA, 25 bp, Homo sapien
aaccgaaccgatcagcgactcggct

SEQ ID NO: 3146506 - DNA, 25 bp, Homo sapien
aaaaccgaaccgatcagcgactcgg

SEQ ID NO: 3146507 - DNA, 25 bp, Homo sapien
ggcaaaaccgaaccgatcagcgact

SEQ ID NO: 3146508 - DNA, 25 bp, Homo sapien
aaaggcaaaaccgaaccgatcagcg

SEQ ID NO: 3146509 - DNA, 25 bp, Homo sapien
ggccggcgcaatgacacagcacaaa

SEQ ID NO: 3146510 - DNA, 25 bp, Homo sapien
agagacggcgcgagacgccactcac

SEQ ID NO: 3146511 - DNA, 25 bp, Homo sapien
tgcagccgagtctgtgctgcccgcg

SEQ ID NO: 3146512 - DNA, 25 bp, Homo sapien
tgaccggtttcgtagagtcacccgc

SEQ ID NO: 3146513 - DNA, 25 bp, Homo sapien
ccagcacgtccacgaagcgccactg

SEQ ID NO: 3146514 - DNA, 25 bp, Homo sapien
agcacgtccacgaagcgccactggc

SEQ ID NO: 3146515 - DNA, 25 bp, Homo sapien
tccacgaagcgccactggccggcga

SEQ ID NO: 3146516 - DNA, 25 bp, Homo sapien
cacgtccacgaagcgccactggccg

SEQ ID NO: 3146517 - DNA, 25 bp, Homo sapien
gagtgatgccccaagttttgctaaa

SEQ ID NO: 3146518 - DNA, 25 bp, Homo sapien
tgcttccagaacacctagccttagg

SEQ ID NO: 3146519 - DNA, 25 bp, Homo sapien
cacatcagcggtcaagtgacagcaa

SEQ ID NO: 3146520 - DNA, 25 bp, Homo sapien
ttaggacggtgcttcagttaacctc

SEQ ID NO: 3146521 - DNA, 25 bp, Homo sapien
tatgatttcttgagccagggtcagt

SEQ ID NO: 3146522 - DNA, 25 bp, Homo sapien
tacaagaggaagatgtgacactagc

SEQ ID NO: 3146523 - DNA, 25 bp, Homo sapien
gacaactgatccagggtattgggct

SEQ ID NO: 3146524 - DNA, 25 bp, Homo sapien
taaatgaatcggactaggaaacgga

SEQ ID NO: 3146525 - DNA, 25 bp, Homo sapien
gtcttgattattggccactgcgtga

SEQ ID NO: 3146526 - DNA, 25 bp, Homo sapien
cacaggaattcccaatggtctgctt

SEQ ID NO: 3146527 - DNA, 25 bp, Homo sapien
gaataagtccgattgtgccacagga

SEQ ID NO: 3146528 - DNA, 25 bp, Homo sapien
ttaggactaacttcttgtcccttca

SEQ ID NO: 3146529 - DNA, 25 bp, Homo sapien
tcagaaagaaactgtttcagaactg

SEQ ID NO: 3146530 - DNA, 25 bp, Homo sapien
gtttcagaaagaaactgtttcagaa

SEQ ID NO: 3146531 - DNA, 25 bp, Homo sapien
aactgtttcagaactgatccatcct

SEQ ID NO: 3146532 - DNA, 25 bp, Homo sapien
aaagaaactgtttcagaactgatcc

SEQ ID NO: 3146533 - DNA, 25 bp, Homo sapien
ttcttttcaaagcattttgctctgt

SEQ ID NO: 3146534 - DNA, 25 bp, Homo sapien
cttttcaaagcattttgctctgtct

SEQ ID NO: 3146535 - DNA, 25 bp, Homo sapien
tttcaaagcattttgctctgtcttc

SEQ ID NO: 3146536 - DNA, 25 bp, Homo sapien
tcaaagcattttgctctgtcttcag

SEQ ID NO: 3146537 - DNA, 25 bp, Homo sapien
cattggccttcctgtgccacggcat

SEQ ID NO: 3146538 - DNA, 25 bp, Homo sapien
gacattggccttcctgtgccacggc

SEQ ID NO: 3146539 - DNA, 25 bp, Homo sapien
ccgacattggccttcctgtgccacg

SEQ ID NO: 3146540 - DNA, 25 bp, Homo sapien
tgccacggcatcatgggctgcctgt

SEQ ID NO: 3146541 - DNA, 25 bp, Homo sapien
ggcagcctggctccgatttgtattt

SEQ ID NO: 3146542 - DNA, 25 bp, Homo sapien
gcagcctggctccgatttgtatttg

SEQ ID NO: 3146543 - DNA, 25 bp, Homo sapien
tgggactacagacctcgctactctg

SEQ ID NO: 3146544 - DNA, 25 bp, Homo sapien
cacttactaggagaggtgtacactc

SEQ ID NO: 3146545 - DNA, 25 bp, Homo sapien
taaatttagcagctgactcagaggt

SEQ ID NO: 3146546 - DNA, 25 bp, Homo sapien
tctagaacttgtccttcgttgggca

SEQ ID NO: 3146547 - DNA, 25 bp, Homo sapien
ataaaatggaaattcaccttgtcat

SEQ ID NO: 3146548 - DNA, 25 bp, Homo sapien
aatggaaattcaccttgtcatctac

SEQ ID NO: 3146549 - DNA, 25 bp, Homo sapien
ccatccacgttgttaaacagaataa

SEQ ID NO: 3146550 - DNA, 25 bp, Homo sapien
gccatccacgttgttaaacagaata

SEQ ID NO: 3146551 - DNA, 25 bp, Homo sapien
cgccatggttcaccggaaaaggcat

SEQ ID NO: 3146552 - DNA, 25 bp, Homo sapien
ggcgccatggttcaccggaaaaggc

SEQ ID NO: 3146553 - DNA, 25 bp, Homo sapien
ccatggttcaccggaaaaggcattc

SEQ ID NO: 3146554 - DNA, 25 bp, Homo sapien
gcgccatggttcaccggaaaaggca

SEQ ID NO: 3146555 - DNA, 25 bp, Homo sapien
taagaagagatgcattccaaagatg

SEQ ID NO: 3146556 - DNA, 25 bp, Homo sapien
agaagagatgcattccaaagatgac

SEQ ID NO: 3146557 - DNA, 25 bp, Homo sapien
aagaagagatgcattccaaagatga

SEQ ID NO: 3146558 - DNA, 25 bp, Homo sapien
attaagaagagatgcattccaaaga

SEQ ID NO: 3146559 - DNA, 25 bp, Homo sapien
cagtttgccatgtaagtccttgacc

SEQ ID NO: 3146560 - DNA, 25 bp, Homo sapien
tctatgggctgctgagttgtaacag

SEQ ID NO: 3146561 - DNA, 25 bp, Homo sapien
tctaggtttgaatcacagtttgcca

SEQ ID NO: 3146562 - DNA, 25 bp, Homo sapien
cctagaacagcacctaagaagaggg

SEQ ID NO: 3146563 - DNA, 25 bp, Homo sapien
caggtgatgggaaagacaaggttac

SEQ ID NO: 3146564 - DNA, 25 bp, Homo sapien
tcttccataaggtggcataagtgaa

SEQ ID NO: 3146565 - DNA, 25 bp, Homo sapien
gaaaggctccaaggtctattaatgc

SEQ ID NO: 3146566 - DNA, 25 bp, Homo sapien
tattaatgctcaaagttcaccctca

SEQ ID NO: 3146567 - DNA, 25 bp, Homo sapien
cttgcagagagccacggcagagaag

SEQ ID NO: 3146568 - DNA, 25 bp, Homo sapien
cttgctcacgctcggtgaattctct

SEQ ID NO: 3146569 - DNA, 25 bp, Homo sapien
agccacggcagagaagcggacttct

SEQ ID NO: 3146570 - DNA, 25 bp, Homo sapien
acttctccttgctcacgctcggtga

SEQ ID NO: 3146571 - DNA, 25 bp, Homo sapien
aaatcagcaaagtccctcccacaga

SEQ ID NO: 3146572 - DNA, 25 bp, Homo sapien
ggggaaatcagcaaagtccctccca

SEQ ID NO: 3146573 - DNA, 25 bp, Homo sapien
ggaaatcagcaaagtccctcccaca

SEQ ID NO: 3146574 - DNA, 25 bp, Homo sapien
aatcagcaaagtccctcccacagag

SEQ ID NO: 3146575 - DNA, 25 bp, Homo sapien
cacaatggcccagtggacagctgtg

SEQ ID NO: 3146576 - DNA, 25 bp, Homo sapien
tgcttgtgcttaagtgcctgggtgt

SEQ ID NO: 3146577 - DNA, 25 bp, Homo sapien
taaagcgttagatatcggatacaag

SEQ ID NO: 3146578 - DNA, 25 bp, Homo sapien
gaaggcgtgtctgcagaacagaaga

SEQ ID NO: 3146579 - DNA, 25 bp, Homo sapien
tattccttttgaggacaaacaatta

SEQ ID NO: 3146580 - DNA, 25 bp, Homo sapien
acctgacatattgaggagagggtaa

SEQ ID NO: 3146581 - DNA, 25 bp, Homo sapien
taagcagcaccctctaggtcactac

SEQ ID NO: 3146582 - DNA, 25 bp, Homo sapien
gcttctttctgcctcgatctgtcat

SEQ ID NO: 3146583 - DNA, 25 bp, Homo sapien
tctaggtcactactttcactacgct

SEQ ID NO: 3146584 - DNA, 25 bp, Homo sapien
gccaagtttccaggggtcagagcca

SEQ ID NO: 3146585 - DNA, 25 bp, Homo sapien
cagggaatctatctagtggaggcat

SEQ ID NO: 3146586 - DNA, 25 bp, Homo sapien
tgccatcactatagaagtttctgct

SEQ ID NO: 3146587 - DNA, 25 bp, Homo sapien
tctgcatggcttccctatcctcagg

SEQ ID NO: 3146588 - DNA, 25 bp, Homo sapien
tatcctcagggaatctatctagtgg

SEQ ID NO: 3146589 - DNA, 25 bp, Homo sapien
catagagccttgagcaaacacagaa

SEQ ID NO: 3146590 - DNA, 25 bp, Homo sapien
tatcatatggtggacaaagacttcc

SEQ ID NO: 3146591 - DNA, 25 bp, Homo sapien
cagaaacctttgtccctgctcgtat

SEQ ID NO: 3146592 - DNA, 25 bp, Homo sapien
tgatgtcgaaagtgcatcctgttcg

SEQ ID NO: 3146593 - DNA, 25 bp, Homo sapien
gcgtcctctcaagcgccgggatgag

SEQ ID NO: 3146594 - DNA, 25 bp, Homo sapien
ccgggatgaggacggccgccgccgt

SEQ ID NO: 3146595 - DNA, 25 bp, Homo sapien
gcgcagccccgcgtcctctcaagcg

SEQ ID NO: 3146596 - DNA, 25 bp, Homo sapien
gctgctagaggacgccgcggcagct

SEQ ID NO: 3146597 - DNA, 25 bp, Homo sapien
tccagaccgagagcgggacaagcca

SEQ ID NO: 3146598 - DNA, 25 bp, Homo sapien
aagagcttccagaccgagagcggga

SEQ ID NO: 3146599 - DNA, 25 bp, Homo sapien
agcttccagaccgagagcgggacaa

SEQ ID NO: 3146600 - DNA, 25 bp, Homo sapien
cttccagaccgagagcgggacaagc

SEQ ID NO: 3146601 - DNA, 25 bp, Homo sapien
gtgcgcgggtccgtggctcagggcg

SEQ ID NO: 3146602 - DNA, 25 bp, Homo sapien
gtcggagcgtgcgcgggtccgtggc

SEQ ID NO: 3146603 - DNA, 25 bp, Homo sapien
tccgtggctcagggcgccagtgcaa

SEQ ID NO: 3146604 - DNA, 25 bp, Homo sapien
tcagggcgccagtgcaaggccgccc

SEQ ID NO: 3146605 - DNA, 25 bp, Homo sapien
agctggcaaaagaaagtgggggcgg

SEQ ID NO: 3146606 - DNA, 25 bp, Homo sapien
agcagctggcaaaagaaagtggggg

SEQ ID NO: 3146607 - DNA, 25 bp, Homo sapien
gcggttggggggaggcaaggctgga

SEQ ID NO: 3146608 - DNA, 25 bp, Homo sapien
ctggagcagctggcaaaagaaagtg

SEQ ID NO: 3146609 - DNA, 25 bp, Homo sapien
aggtttcgcggctcgccgaggcccg

SEQ ID NO: 3146610 - DNA, 25 bp, Homo sapien
gcgctaaggtttcgcggctcgccga

SEQ ID NO: 3146611 - DNA, 25 bp, Homo sapien
aaagcgctaaggtttcgcggctcgc

SEQ ID NO: 3146612 - DNA, 25 bp, Homo sapien
attccaatgccaaagcgctaaggtt

SEQ ID NO: 3146613 - DNA, 25 bp, Homo sapien
ctagctgagatttgcgaggccagcg

SEQ ID NO: 3146614 - DNA, 25 bp, Homo sapien
gatggacgcgcaggggatcccttcc

SEQ ID NO: 3146615 - DNA, 25 bp, Homo sapien
ctggaagcggcgctagctgagattt

SEQ ID NO: 3146616 - DNA, 25 bp, Homo sapien
ctcacgcgcgcagctagactgcagt

SEQ ID NO: 3146617 - DNA, 25 bp, Homo sapien
cgaaatgcgagcaccggtgaagtct

SEQ ID NO: 3146618 - DNA, 25 bp, Homo sapien
tttgctagcactgcgcttcccttgg

SEQ ID NO: 3146619 - DNA, 25 bp, Homo sapien
agaagcaagataccccgaaatgcga

SEQ ID NO: 3146620 - DNA, 25 bp, Homo sapien
gtgggtatgcgcctccgtgaagaca

SEQ ID NO: 3146621 - DNA, 25 bp, Homo sapien
aaaggctgggcagcgtctatgcgga

SEQ ID NO: 3146622 - DNA, 25 bp, Homo sapien
cgtctatgcggatgcgtgctcgcag

SEQ ID NO: 3146623 - DNA, 25 bp, Homo sapien
ggtgggtcttgcaagctacccccgc

SEQ ID NO: 3146624 - DNA, 25 bp, Homo sapien
cggatgcgtgctcgcaggtgggtct

SEQ ID NO: 3146625 - DNA, 25 bp, Homo sapien
ccgtacttcggaaccgaccctgcag

SEQ ID NO: 3146626 - DNA, 25 bp, Homo sapien
cgtacttcggaaccgaccctgcagt

SEQ ID NO: 3146627 - DNA, 25 bp, Homo sapien
gtacttcggaaccgaccctgcagtc

SEQ ID NO: 3146628 - DNA, 25 bp, Homo sapien
taagtacgcaacacaggcagagcac

SEQ ID NO: 3146629 - DNA, 25 bp, Homo sapien
gaaaggccacccattgaagctgagg

SEQ ID NO: 3146630 - DNA, 25 bp, Homo sapien
tgtatcctgggagcataagtacgca

SEQ ID NO: 3146631 - DNA, 25 bp, Homo sapien
cagacagttcatttcgggagctcgg

SEQ ID NO: 3146632 - DNA, 25 bp, Homo sapien
gttcccgtggtttgcagactcggca

SEQ ID NO: 3146633 - DNA, 25 bp, Homo sapien
tctttgttcacaaggcaactgcatg

SEQ ID NO: 3146634 - DNA, 25 bp, Homo sapien
aaagcaaactgtaatctgggccaaa

SEQ ID NO: 3146635 - DNA, 25 bp, Homo sapien
taccaatgaggatgctgccagagac

SEQ ID NO: 3146636 - DNA, 25 bp, Homo sapien
gccccatgggcacactctgattgaa

SEQ ID NO: 3146637 - DNA, 25 bp, Homo sapien
ggaacctgttccaaatcataaccga

SEQ ID NO: 3146638 - DNA, 25 bp, Homo sapien
ccgaaaccaagtcgaaggacatctg

SEQ ID NO: 3146639 - DNA, 25 bp, Homo sapien
gattgaaggtaaaggagtccaggaa

SEQ ID NO: 3146640 - DNA, 25 bp, Homo sapien
catcagggttagatgcatgggcatc

SEQ ID NO: 3146641 - DNA, 25 bp, Homo sapien
ggtaattccctgagatacactagcc

SEQ ID NO: 3146642 - DNA, 25 bp, Homo sapien
cacatgtcaggacagggagcctgca

SEQ ID NO: 3146643 - DNA, 25 bp, Homo sapien
gcagaactgaattccacggcatcat

SEQ ID NO: 3146644 - DNA, 25 bp, Homo sapien
tcttgatggaagttaaaaatgagtg

SEQ ID NO: 3146645 - DNA, 25 bp, Homo sapien
aaatgagtggcctatcatgtcagag

SEQ ID NO: 3146646 - DNA, 25 bp, Homo sapien
agagcaataccagggttcatcaggc

SEQ ID NO: 3146647 - DNA, 25 bp, Homo sapien
tcatgtcagagcaataccagggttc

SEQ ID NO: 3146648 - DNA, 25 bp, Homo sapien
gcatctttgatagggacggaccagg

SEQ ID NO: 3146649 - DNA, 25 bp, Homo sapien
acaattggtggtagcctctttggca

SEQ ID NO: 3146650 - DNA, 25 bp, Homo sapien
tctctgttgggtagcagccagcatc

SEQ ID NO: 3146651 - DNA, 25 bp, Homo sapien
tcctctagggaattcactgcttctc

SEQ ID NO: 3146652 - DNA, 25 bp, Homo sapien
gctgttctgtatgaaactattttgt

SEQ ID NO: 3146653 - DNA, 25 bp, Homo sapien
ccaagaattagcaaagtaacctgtg

SEQ ID NO: 3146654 - DNA, 25 bp, Homo sapien
caagggcaaatgttctaatctcaaa

SEQ ID NO: 3146655 - DNA, 25 bp, Homo sapien
tgtcattggaatcatcactatcccc

SEQ ID NO: 3146656 - DNA, 25 bp, Homo sapien
cgtcaaggccttctaatatgtccaa

SEQ ID NO: 3146657 - DNA, 25 bp, Homo sapien
tcttgacaagtatctaaagtgtccc

SEQ ID NO: 3146658 - DNA, 25 bp, Homo sapien
tcccatccttaaatacagaacaaaa

SEQ ID NO: 3146659 - DNA, 25 bp, Homo sapien
aactccctctctgaatgtctcagga

SEQ ID NO: 3146660 - DNA, 25 bp, Homo sapien
acccaactggactacttccaattgt

SEQ ID NO: 3146661 - DNA, 25 bp, Homo sapien
aatctacttgtcaagttcccaccca

SEQ ID NO: 3146662 - DNA, 25 bp, Homo sapien
tacttccaattgtccagttccatct

SEQ ID NO: 3146663 - DNA, 25 bp, Homo sapien
tacaaatctacttgtcaagttccca

SEQ ID NO: 3146664 - DNA, 25 bp, Homo sapien
cacgagacgtggaagactaccaaaa

SEQ ID NO: 3146665 - DNA, 25 bp, Homo sapien
attttacaccaaatgtgcctggaag

SEQ ID NO: 3146666 - DNA, 25 bp, Homo sapien
caaatgtgcaaaggtagcaatgtac

SEQ ID NO: 3146667 - DNA, 25 bp, Homo sapien
tagagcaacactcgagaagagggag

SEQ ID NO: 3146668 - DNA, 25 bp, Homo sapien
gttccctctactattaaaagcgcca

SEQ ID NO: 3146669 - DNA, 25 bp, Homo sapien
cacattccaggctgtctgtcctata

SEQ ID NO: 3146670 - DNA, 25 bp, Homo sapien
tcatcacttcgctcctcatgaggtc

SEQ ID NO: 3146671 - DNA, 25 bp, Homo sapien
gaatcacctatggagccttaaatat

SEQ ID NO: 3146672 - DNA, 25 bp, Homo sapien
tatccactggttcagagtacaactg

SEQ ID NO: 3146673 - DNA, 25 bp, Homo sapien
ttatgagctcacttcctggaagcca

SEQ ID NO: 3146674 - DNA, 25 bp, Homo sapien
tagtagtgtcaatatatacgccacc

SEQ ID NO: 3146675 - DNA, 25 bp, Homo sapien
gaggaggctcacttgctcacattaa

SEQ ID NO: 3146676 - DNA, 25 bp, Homo sapien
caacccctgcagctatccattcatc

SEQ ID NO: 3146677 - DNA, 25 bp, Homo sapien
ttcagtgttgaagtgtcaaaagtgg

SEQ ID NO: 3146678 - DNA, 25 bp, Homo sapien
tgatgacaccttaagaaccttcccc

SEQ ID NO: 3146679 - DNA, 25 bp, Homo sapien
gtgtcaaaagtggtgtgatgacacc

SEQ ID NO: 3146680 - DNA, 25 bp, Homo sapien
gcaaccatttacaggtcagacactg

SEQ ID NO: 3146681 - DNA, 25 bp, Homo sapien
tgagttctacacgaccagtttggtg

SEQ ID NO: 3146682 - DNA, 25 bp, Homo sapien
tactgatgttcctgtaggtcctctg

SEQ ID NO: 3146683 - DNA, 25 bp, Homo sapien
gccttgtcagtcaggatctatgcct

SEQ ID NO: 3146684 - DNA, 25 bp, Homo sapien
tataaggtaccacctcaaattgggc

SEQ ID NO: 3146685 - DNA, 25 bp, Homo sapien
ctgttgatggtttcttgagtgcttt

SEQ ID NO: 3146686 - DNA, 25 bp, Homo sapien
tcttgagtgctttgatgacgagggc

SEQ ID NO: 3146687 - DNA, 25 bp, Homo sapien
gtgccacatttgtcaggcaatgctg

SEQ ID NO: 3146688 - DNA, 25 bp, Homo sapien
gacattcatgaagggcagagtagaa

SEQ ID NO: 3146689 - DNA, 25 bp, Homo sapien
tagaaccatcataatttaccaccag

SEQ ID NO: 3146690 - DNA, 25 bp, Homo sapien
acagtgacattcatgaagggcagag

SEQ ID NO: 3146691 - DNA, 25 bp, Homo sapien
gtagaaccatcataatttaccacca

SEQ ID NO: 3146692 - DNA, 25 bp, Homo sapien
tgcaacaatcccatgctctactaat

SEQ ID NO: 3146693 - DNA, 25 bp, Homo sapien
aacaatcccatgctctactaatgca

SEQ ID NO: 3146694 - DNA, 25 bp, Homo sapien
aaatgcaacaatcccatgctctact

SEQ ID NO: 3146695 - DNA, 25 bp, Homo sapien
aatcccatgctctactaatgcacac

SEQ ID NO: 3146696 - DNA, 25 bp, Homo sapien
tctagaacctaagttcccagaaggc

SEQ ID NO: 3146697 - DNA, 25 bp, Homo sapien
ctccccaggagctagaaaagttcct

SEQ ID NO: 3146698 - DNA, 25 bp, Homo sapien
tgagacccagctaccaagaagtatt

SEQ ID NO: 3146699 - DNA, 25 bp, Homo sapien
taaaagtatgcccagacctaagagc

SEQ ID NO: 3146700 - DNA, 25 bp, Homo sapien
tggccttcagagcttactttctaaa

SEQ ID NO: 3146701 - DNA, 25 bp, Homo sapien
tttctaaaaaatgcccagacacaga

SEQ ID NO: 3146702 - DNA, 25 bp, Homo sapien
aaaatgcccagacacagataaatat

SEQ ID NO: 3146703 - DNA, 25 bp, Homo sapien
tgcacctggccttcagagcttactt

SEQ ID NO: 3146704 - DNA, 25 bp, Homo sapien
gaagcaagaagtgattgatagaggc

SEQ ID NO: 3146705 - DNA, 25 bp, Homo sapien
gtaatgtccttagaccagagtcaga

SEQ ID NO: 3146706 - DNA, 25 bp, Homo sapien
cagctattctagataatttcccaaa

SEQ ID NO: 3146707 - DNA, 25 bp, Homo sapien
gaaacactggatttggtcccagaag

SEQ ID NO: 3146708 - DNA, 25 bp, Homo sapien
cctaaaatcatatccacgctggagt

SEQ ID NO: 3146709 - DNA, 25 bp, Homo sapien
gaaggtctgattacccaggcaatct

SEQ ID NO: 3146710 - DNA, 25 bp, Homo sapien
tgcgacactgtaattcactgctggt

SEQ ID NO: 3146711 - DNA, 25 bp, Homo sapien
ggatgaaagccaccagatgcatgga

SEQ ID NO: 3146712 - DNA, 25 bp, Homo sapien
cacagagagttagttccattttccc

SEQ ID NO: 3146713 - DNA, 25 bp, Homo sapien
tcactggatcccatggacgggagag

SEQ ID NO: 3146714 - DNA, 25 bp, Homo sapien
tgctgtcttgcagggagcacagaga

SEQ ID NO: 3146715 - DNA, 25 bp, Homo sapien
gaatgctggcagtgttgacaatgca

SEQ ID NO: 3146716 - DNA, 25 bp, Homo sapien
tgggtcacagccttaatacagaaga

SEQ ID NO: 3146717 - DNA, 25 bp, Homo sapien
ttaagtaacctctgtagatactggg

SEQ ID NO: 3146718 - DNA, 25 bp, Homo sapien
tatttggctacaagaggcatgagga

SEQ ID NO: 3146719 - DNA, 25 bp, Homo sapien
gagatatgcaattcagcacctagaa

SEQ ID NO: 3146720 - DNA, 25 bp, Homo sapien
cataaagatgggtatctaacctccc

SEQ ID NO: 3146721 - DNA, 25 bp, Homo sapien
aaacaggctgttttcacccggagtg

SEQ ID NO: 3146722 - DNA, 25 bp, Homo sapien
tgttcaatgcttagaacagggcctg

SEQ ID NO: 3146723 - DNA, 25 bp, Homo sapien
ccggagtgactcgatcttgaaacaa

SEQ ID NO: 3146724 - DNA, 25 bp, Homo sapien
tgtcaaccagactgcaggagcggca

SEQ ID NO: 3146725 - DNA, 25 bp, Homo sapien
gtttctgaggcaacaatcagagttg

SEQ ID NO: 3146726 - DNA, 25 bp, Homo sapien
ttggaatcccacaggcaacaaggcg

SEQ ID NO: 3146727 - DNA, 25 bp, Homo sapien
gaattctgcaaacgtctgggccagt

SEQ ID NO: 3146728 - DNA, 25 bp, Homo sapien
catgctctgcagagcagaactcgag

SEQ ID NO: 3146729 - DNA, 25 bp, Homo sapien
gaactcgagaatttcagtggaggac

SEQ ID NO: 3146730 - DNA, 25 bp, Homo sapien
ttggcagccacaaggtaacacctgc

SEQ ID NO: 3146731 - DNA, 25 bp, Homo sapien
tctccagcgttcttgcaatgaggaa

SEQ ID NO: 3146732 - DNA, 25 bp, Homo sapien
ggaggtagagactaataatgccacc

SEQ ID NO: 3146733 - DNA, 25 bp, Homo sapien
cccaggaattgtgtgaggcactgga

SEQ ID NO: 3146734 - DNA, 25 bp, Homo sapien
tggccccgaagactgtacatacaaa

SEQ ID NO: 3146735 - DNA, 25 bp, Homo sapien
agtgcccattcttttgaccctcagg

SEQ ID NO: 3146736 - DNA, 25 bp, Homo sapien
tttcagaactgtctggcccagcgga

SEQ ID NO: 3146737 - DNA, 25 bp, Homo sapien
agcggaggtcactgctcggaaccaa

SEQ ID NO: 3146738 - DNA, 25 bp, Homo sapien
tcactgctcggaaccaagtgatttc

SEQ ID NO: 3146739 - DNA, 25 bp, Homo sapien
ttctttaaggaaatgaacacacaaa

SEQ ID NO: 3146740 - DNA, 25 bp, Homo sapien
cacagcctgatacaaacgctaatat

SEQ ID NO: 3146741 - DNA, 25 bp, Homo sapien
gatacaaacgctaatataaaccaag

SEQ ID NO: 3146742 - DNA, 25 bp, Homo sapien
gaatatttgtttgaacagagcatca

SEQ ID NO: 3146743 - DNA, 25 bp, Homo sapien
ataaaccaagttgaatatttgtttg

SEQ ID NO: 3146744 - DNA, 25 bp, Homo sapien
tagaaggtcagcaccaacttctgac

SEQ ID NO: 3146745 - DNA, 25 bp, Homo sapien
catgaagccataatgctggtttatt

SEQ ID NO: 3146746 - DNA, 25 bp, Homo sapien
gcaccaacttctgacagatgtctgc

SEQ ID NO: 3146747 - DNA, 25 bp, Homo sapien
tgtgcattgtgcagaattgctacac

SEQ ID NO: 3146748 - DNA, 25 bp, Homo sapien
tcaatcagcaacagtccccaaggac

SEQ ID NO: 3146749 - DNA, 25 bp, Homo sapien
gaaagcccagtaatgccaaggctga

SEQ ID NO: 3146750 - DNA, 25 bp, Homo sapien
atcagcatcaagctccagctcaggc

SEQ ID NO: 3146751 - DNA, 25 bp, Homo sapien
tgatttataacatcagcatcaagct

SEQ ID NO: 3146752 - DNA, 25 bp, Homo sapien
ccctatttaatcacctagaaaagat

SEQ ID NO: 3146753 - DNA, 25 bp, Homo sapien
ccttaatcatgaagcatcaagcaaa

SEQ ID NO: 3146754 - DNA, 25 bp, Homo sapien
cagtataggaatactaccttaatca

SEQ ID NO: 3146755 - DNA, 25 bp, Homo sapien
actaataaaattaatgctcaagttt

SEQ ID NO: 3146756 - DNA, 25 bp, Homo sapien
gctgctcccttggttaactgagaac

SEQ ID NO: 3146757 - DNA, 25 bp, Homo sapien
tcagcagcacttgttccatgggcct

SEQ ID NO: 3146758 - DNA, 25 bp, Homo sapien
gcagcacttgttccatgggcctctc

SEQ ID NO: 3146759 - DNA, 25 bp, Homo sapien
ccttggttaactgagaacattccat

SEQ ID NO: 3146760 - DNA, 25 bp, Homo sapien
aaattgggggtacatgctcaaaagc

SEQ ID NO: 3146761 - DNA, 25 bp, Homo sapien
tgtatttccatctacgtaaattggg

SEQ ID NO: 3146762 - DNA, 25 bp, Homo sapien
gaaagtttggagaccaccgtatcag

SEQ ID NO: 3146763 - DNA, 25 bp, Homo sapien
tcgaggtgtccgctgacgctacagc

SEQ ID NO: 3146764 - DNA, 25 bp, Homo sapien
acatatcctttgtgtcagcaacagc

SEQ ID NO: 3146765 - DNA, 25 bp, Homo sapien
tacatatcctttgtgtcagcaacag

SEQ ID NO: 3146766 - DNA, 25 bp, Homo sapien
gcagcgtatgaaataactctagcag

SEQ ID NO: 3146767 - DNA, 25 bp, Homo sapien
gcagcgtcctcttcaaatacccatt

SEQ ID NO: 3146768 - DNA, 25 bp, Homo sapien
cccagcaggatgaaagcagcgtcct

SEQ ID NO: 3146769 - DNA, 25 bp, Homo sapien
ggaaatagctgagcgtttaagccac

SEQ ID NO: 3146770 - DNA, 25 bp, Homo sapien
caggaagctcatcagagcaggcatt

SEQ ID NO: 3146771 - DNA, 25 bp, Homo sapien
gccaaaatgctaaataggttggtct

SEQ ID NO: 3146772 - DNA, 25 bp, Homo sapien
gcccctttggcaacactggccaaaa

SEQ ID NO: 3146773 - DNA, 25 bp, Homo sapien
tgctaaataggttggtcttctgcaa

SEQ ID NO: 3146774 - DNA, 25 bp, Homo sapien
catacaaagagaactttgcagactt

SEQ ID NO: 3146775 - DNA, 25 bp, Homo sapien
tatttcgtggagattggccttcgca

SEQ ID NO: 3146776 - DNA, 25 bp, Homo sapien
attattatttcgtggagattggcct

SEQ ID NO: 3146777 - DNA, 25 bp, Homo sapien
attggccttcgcatttattctctgg

SEQ ID NO: 3146778 - DNA, 25 bp, Homo sapien
ggagattggccttcgcatttattct

SEQ ID NO: 3146779 - DNA, 25 bp, Homo sapien
gtcattttatggcactgggaggagt

SEQ ID NO: 3146780 - DNA, 25 bp, Homo sapien
gagttaaaatgcagaggcaatatct

SEQ ID NO: 3146781 - DNA, 25 bp, Homo sapien
cttcacctcttgtcttgaatggaat

SEQ ID NO: 3146782 - DNA, 25 bp, Homo sapien
tcttctcactctcggtattggcagg

SEQ ID NO: 3146783 - DNA, 25 bp, Homo sapien
aatatttcttggagggacacgaaga

SEQ ID NO: 3146784 - DNA, 25 bp, Homo sapien
aaagcccaatagcatagttttcttg

SEQ ID NO: 3146785 - DNA, 25 bp, Homo sapien
aattatgtcaccaactatgccctgt

SEQ ID NO: 3146786 - DNA, 25 bp, Homo sapien
cctgtgtgcctttcaagaaagccca

SEQ ID NO: 3146787 - DNA, 25 bp, Homo sapien
tctcccatgcccattaggaccgagc

SEQ ID NO: 3146788 - DNA, 25 bp, Homo sapien
gaccgagcacggtcttcacactgct

SEQ ID NO: 3146789 - DNA, 25 bp, Homo sapien
acactgctctccaccgattcaaatg

SEQ ID NO: 3146790 - DNA, 25 bp, Homo sapien
tgcccattaggaccgagcacggtct

SEQ ID NO: 3146791 - DNA, 25 bp, Homo sapien
acctgtccgaaaatctttatcacca

SEQ ID NO: 3146792 - DNA, 25 bp, Homo sapien
cctgtccgaaaatctttatcaccaa

SEQ ID NO: 3146793 - DNA, 25 bp, Homo sapien
taaacctgtccgaaaatctttatca

SEQ ID NO: 3146794 - DNA, 25 bp, Homo sapien
gccatatggagtaagagatgtccca

SEQ ID NO: 3146795 - DNA, 25 bp, Homo sapien
ggtattccatttccatcgtacatgc

SEQ ID NO: 3146796 - DNA, 25 bp, Homo sapien
tcgtacatgctgtatgtaggtgctc

SEQ ID NO: 3146797 - DNA, 25 bp, Homo sapien
ttagtattccggcataggagttgca

SEQ ID NO: 3146798 - DNA, 25 bp, Homo sapien
tccccagtgacctcacccggagccc

SEQ ID NO: 3146799 - DNA, 25 bp, Homo sapien
tgaactccccagtgacctcacccgg

SEQ ID NO: 3146800 - DNA, 25 bp, Homo sapien
ctgaactccccagtgacctcacccg

SEQ ID NO: 3146801 - DNA, 25 bp, Homo sapien
aactccccagtgacctcacccggag

SEQ ID NO: 3146802 - DNA, 25 bp, Homo sapien
acagggatcccattgactggggctc

SEQ ID NO: 3146803 - DNA, 25 bp, Homo sapien
cattgactggggctcccctagacct

SEQ ID NO: 3146804 - DNA, 25 bp, Homo sapien
ctaggatgtttgaacagctccacag

SEQ ID NO: 3146805 - DNA, 25 bp, Homo sapien
taggatgtttgaacagctccacagg

SEQ ID NO: 3146806 - DNA, 25 bp, Homo sapien
gcatactgccattgccagggagcat

SEQ ID NO: 3146807 - DNA, 25 bp, Homo sapien
tgagtatggggttgctcccacgagt

SEQ ID NO: 3146808 - DNA, 25 bp, Homo sapien
tgcatttctctatgcgcaagctaca

SEQ ID NO: 3146809 - DNA, 25 bp, Homo sapien
caaatagccatgaagagtatctgca

SEQ ID NO: 3146810 - DNA, 25 bp, Homo sapien
ggtaggcaatctattgatcttttta

SEQ ID NO: 3146811 - DNA, 25 bp, Homo sapien
ggcaatctattgatctttttaacaa

SEQ ID NO: 3146812 - DNA, 25 bp, Homo sapien
taggcaatctattgatctttttaac

SEQ ID NO: 3146813 - DNA, 25 bp, Homo sapien
gggtaggcaatctattgatcttttt

SEQ ID NO: 3146814 - DNA, 25 bp, Homo sapien
tataacattaaaccccagagctcca

SEQ ID NO: 3146815 - DNA, 25 bp, Homo sapien
ctccagggtccagagttgccatagg

SEQ ID NO: 3146816 - DNA, 25 bp, Homo sapien
gcttctataacattaaaccccagag

SEQ ID NO: 3146817 - DNA, 25 bp, Homo sapien
ctgcaaattttgcttctataacatt

SEQ ID NO: 3146818 - DNA, 25 bp, Homo sapien
tgttgatctcaaggcaactggagca

SEQ ID NO: 3146819 - DNA, 25 bp, Homo sapien
gctgaagtcatggacacagtcaaga

SEQ ID NO: 3146820 - DNA, 25 bp, Homo sapien
cgagaaccgtggaagtacatgaaca

SEQ ID NO: 3146821 - DNA, 25 bp, Homo sapien
ccaggtttgtagattcaggagtcac

SEQ ID NO: 3146822 - DNA, 25 bp, Homo sapien
cttcactatttgtagacgccctgtt

SEQ ID NO: 3146823 - DNA, 25 bp, Homo sapien
cactatttgtagacgccctgttcaa

SEQ ID NO: 3146824 - DNA, 25 bp, Homo sapien
tttgtagacgccctgttcaaatccc

SEQ ID NO: 3146825 - DNA, 25 bp, Homo sapien
tgtagacgccctgttcaaatcccac

SEQ ID NO: 3146826 - DNA, 25 bp, Homo sapien
cactggacccagtgcaaataatgca

SEQ ID NO: 3146827 - DNA, 25 bp, Homo sapien
agagcctttctcattccatgccctg

SEQ ID NO: 3146828 - DNA, 25 bp, Homo sapien
aataatgcaaatgatagccacttcc

SEQ ID NO: 3146829 - DNA, 25 bp, Homo sapien
tgccctgaagctagttgttcttcct

SEQ ID NO: 3146830 - DNA, 25 bp, Homo sapien
ttatctggaacacgagattcccttg

SEQ ID NO: 3146831 - DNA, 25 bp, Homo sapien
cactgcaccggtctttctgtcatga

SEQ ID NO: 3146832 - DNA, 25 bp, Homo sapien
tatacggccacctcagttatctgga

SEQ ID NO: 3146833 - DNA, 25 bp, Homo sapien
ttttgtgacagggtccgactcccat

SEQ ID NO: 3146834 - DNA, 25 bp, Homo sapien
ctagtatttatggttatggctgttc

SEQ ID NO: 3146835 - DNA, 25 bp, Homo sapien
aaagcaggatgctgaaatatgtgag

SEQ ID NO: 3146836 - DNA, 25 bp, Homo sapien
tatttatggttatggctgttcatgc

SEQ ID NO: 3146837 - DNA, 25 bp, Homo sapien
tattaaacctccctaaaggacatga

SEQ ID NO: 3146838 - DNA, 25 bp, Homo sapien
aaaacagtcgtcaccactgccaacc

SEQ ID NO: 3146839 - DNA, 25 bp, Homo sapien
tcctttcccaaaacagtcgtcacca

SEQ ID NO: 3146840 - DNA, 25 bp, Homo sapien
ctctgtccacaagcaggctgctgcg

SEQ ID NO: 3146841 - DNA, 25 bp, Homo sapien
ctgtccacaagcaggctgctgcggc

SEQ ID NO: 3146842 - DNA, 25 bp, Homo sapien
cagcacagcagccgaaatgccctta

SEQ ID NO: 3146843 - DNA, 25 bp, Homo sapien
ccagcacagcagccgaaatgccctt

SEQ ID NO: 3146844 - DNA, 25 bp, Homo sapien
tcatgctccgcaatgaactccagcc

SEQ ID NO: 3146845 - DNA, 25 bp, Homo sapien
atgctccgcaatgaactccagccaa

SEQ ID NO: 3146846 - DNA, 25 bp, Homo sapien
acgtcctcatgctccgcaatgaact

SEQ ID NO: 3146847 - DNA, 25 bp, Homo sapien
cccacacgtcctcatgctccgcaat

SEQ ID NO: 3146848 - DNA, 25 bp, Homo sapien
gcttctttacatttcacaggttgat

SEQ ID NO: 3146849 - DNA, 25 bp, Homo sapien
tgcccacgtctacatttctttcact

SEQ ID NO: 3146850 - DNA, 25 bp, Homo sapien
gatacattactgctttggatttccc

SEQ ID NO: 3146851 - DNA, 25 bp, Homo sapien
cagtttcatggttcaatccaatgcc

SEQ ID NO: 3146852 - DNA, 25 bp, Homo sapien
taactaatagaagcagtgtgtccag

SEQ ID NO: 3146853 - DNA, 25 bp, Homo sapien
taagtaagctaatgccatctcagcc

SEQ ID NO: 3146854 - DNA, 25 bp, Homo sapien
tagaccacacctagaggaaggttgt

SEQ ID NO: 3146855 - DNA, 25 bp, Homo sapien
gacttggcagcagtatatatggaca

SEQ ID NO: 3146856 - DNA, 25 bp, Homo sapien
cctcaaaatgcactagttcttggac

SEQ ID NO: 3146857 - DNA, 25 bp, Homo sapien
aaaatgcactagttcttggacctca

SEQ ID NO: 3146858 - DNA, 25 bp, Homo sapien
aaatgcactagttcttggacctcac

SEQ ID NO: 3146859 - DNA, 25 bp, Homo sapien
tcaaaatgcactagttcttggacct

SEQ ID NO: 3146860 - DNA, 25 bp, Homo sapien
tagcagtagcctttgggaagtgcct

SEQ ID NO: 3146861 - DNA, 25 bp, Homo sapien
gaaactgtcccattcctgtagataa

SEQ ID NO: 3146862 - DNA, 25 bp, Homo sapien
aattaggtacttccgtgatgtcact

SEQ ID NO: 3146863 - DNA, 25 bp, Homo sapien
cattcccgttgccttatgtctagaa

SEQ ID NO: 3146864 - DNA, 25 bp, Homo sapien
gataggtttgtagcctgtgcttgtc

SEQ ID NO: 3146865 - DNA, 25 bp, Homo sapien
tggttaagctgataggtttgtagcc

SEQ ID NO: 3146866 - DNA, 25 bp, Homo sapien
gtagcctgtgcttgtctcccaggga

SEQ ID NO: 3146867 - DNA, 25 bp, Homo sapien
tgacagggatgatggttaagctgat

SEQ ID NO: 3146868 - DNA, 25 bp, Homo sapien
tgaaaaactggaacaacatgaatgt

SEQ ID NO: 3146869 - DNA, 25 bp, Homo sapien
gctggtatagaaatgggtgccaaaa

SEQ ID NO: 3146870 - DNA, 25 bp, Homo sapien
tggcatttgttggattcagatacac

SEQ ID NO: 3146871 - DNA, 25 bp, Homo sapien
gaatgttcaacaacaagagatcgct

SEQ ID NO: 3146872 - DNA, 25 bp, Homo sapien
tcaaggtttctacttctgggatcaa

SEQ ID NO: 3146873 - DNA, 25 bp, Homo sapien
tctgtaaccgtctggctctggaatc

SEQ ID NO: 3146874 - DNA, 25 bp, Homo sapien
tggttttcaaacctcttaccatgag

SEQ ID NO: 3146875 - DNA, 25 bp, Homo sapien
tcttaagctgagtaatgacttgtcc

SEQ ID NO: 3146876 - DNA, 25 bp, Homo sapien
ccatgagttaccatgcaggaattca

SEQ ID NO: 3146877 - DNA, 25 bp, Homo sapien
ttaccatgcaggaattcacactcat

SEQ ID NO: 3146878 - DNA, 25 bp, Homo sapien
tattccatgagttaccatgcaggaa

SEQ ID NO: 3146879 - DNA, 25 bp, Homo sapien
gttaccatgcaggaattcacactca

SEQ ID NO: 3146880 - DNA, 25 bp, Homo sapien
gatccacggtggtaggaacaacata

SEQ ID NO: 3146881 - DNA, 25 bp, Homo sapien
cacggtggtaggaacaacatacaca

SEQ ID NO: 3146882 - DNA, 25 bp, Homo sapien
ctgatccacggtggtaggaacaaca

SEQ ID NO: 3146883 - DNA, 25 bp, Homo sapien
tccacggtggtaggaacaacataca

SEQ ID NO: 3146884 - DNA, 25 bp, Homo sapien
catacttcaatctttgcaacaaagg

SEQ ID NO: 3146885 - DNA, 25 bp, Homo sapien
caaataggagtcaaacatcaaggtc

SEQ ID NO: 3146886 - DNA, 25 bp, Homo sapien
ccccaagacatgtgagacaaatagg

SEQ ID NO: 3146887 - DNA, 25 bp, Homo sapien
catttctacactggcaatgccaacc

SEQ ID NO: 3146888 - DNA, 25 bp, Homo sapien
aagttgagattctttaaggccgagc

SEQ ID NO: 3146889 - DNA, 25 bp, Homo sapien
gactgttactctgttggatgtatcc

SEQ ID NO: 3146890 - DNA, 25 bp, Homo sapien
tcctggaggtcactcgggtcaaaaa

SEQ ID NO: 3146891 - DNA, 25 bp, Homo sapien
caacctctcaagaataagataatat

SEQ ID NO: 3146892 - DNA, 25 bp, Homo sapien
aagggagcttaaccagggcttcaga

SEQ ID NO: 3146893 - DNA, 25 bp, Homo sapien
tgagcagcagacctagggctagatc

SEQ ID NO: 3146894 - DNA, 25 bp, Homo sapien
gggcttcagatctagtgagcagcag

SEQ ID NO: 3146895 - DNA, 25 bp, Homo sapien
gggctagatcctcattttcctgatg

SEQ ID NO: 3146896 - DNA, 25 bp, Homo sapien
tccacatgagcagaagaccttggct

SEQ ID NO: 3146897 - DNA, 25 bp, Homo sapien
cagttagtgctcagctgaaatgcca

SEQ ID NO: 3146898 - DNA, 25 bp, Homo sapien
tgagttcaacatcctaccctgcttg

SEQ ID NO: 3146899 - DNA, 25 bp, Homo sapien
tactgcttccgctagtaattggtgg

SEQ ID NO: 3146900 - DNA, 25 bp, Homo sapien
atttttcagcttcctactataatca

SEQ ID NO: 3146901 - DNA, 25 bp, Homo sapien
acaacaatttgccaaactccttaat

SEQ ID NO: 3146902 - DNA, 25 bp, Homo sapien
tgcctacaaatggaaaggggctaat

SEQ ID NO: 3146903 - DNA, 25 bp, Homo sapien
cctacaaatggaaaggggctaatgt

SEQ ID NO: 3146904 - DNA, 25 bp, Homo sapien
atttaataatcccatctgtgcctac

SEQ ID NO: 3146905 - DNA, 25 bp, Homo sapien
ctccttcaggtttagtgtcgttccg

SEQ ID NO: 3146906 - DNA, 25 bp, Homo sapien
tttcccagccagtaaatggtaacta

SEQ ID NO: 3146907 - DNA, 25 bp, Homo sapien
tcgttccgctgtaggatgtgcagct

SEQ ID NO: 3146908 - DNA, 25 bp, Homo sapien
ccagccagtaaatggtaactaatac

SEQ ID NO: 3146909 - DNA, 25 bp, Homo sapien
ggagcagcacgcgttcatctcctgc

SEQ ID NO: 3146910 - DNA, 25 bp, Homo sapien
gctcctgtttatactatctggcaaa

SEQ ID NO: 3146911 - DNA, 25 bp, Homo sapien
gaatgagcccctggtttagctgtgc

SEQ ID NO: 3146912 - DNA, 25 bp, Homo sapien
tgtaaaatcctggagcagcacgcgt

SEQ ID NO: 3146913 - DNA, 25 bp, Homo sapien
ctgcgtttaggactttcaatgtcat

SEQ ID NO: 3146914 - DNA, 25 bp, Homo sapien
aaggaatcatctctgccgtggcgag

SEQ ID NO: 3146915 - DNA, 25 bp, Homo sapien
ccgagagcgagagccaaaggaatcc

SEQ ID NO: 3146916 - DNA, 25 bp, Homo sapien
gactacatctggtgaaggcgtctgc

SEQ ID NO: 3146917 - DNA, 25 bp, Homo sapien
ggagtcgctgcgctcggaatcccag

SEQ ID NO: 3146918 - DNA, 25 bp, Homo sapien
tttcctcttcaatgaagcccattaa

SEQ ID NO: 3146919 - DNA, 25 bp, Homo sapien
agcccattaagtggactcataagag

SEQ ID NO: 3146920 - DNA, 25 bp, Homo sapien
taaaacattagactgttcatttaac

SEQ ID NO: 3146921 - DNA, 25 bp, Homo sapien
aattggacacctgtctagcaagaca

SEQ ID NO: 3146922 - DNA, 25 bp, Homo sapien
gaggcaagtcggattcagagtcgct

SEQ ID NO: 3146923 - DNA, 25 bp, Homo sapien
gaagtccgccgtgcagacatgtcat

SEQ ID NO: 3146924 - DNA, 25 bp, Homo sapien
ggtactggttaaaaggcactgctga

SEQ ID NO: 3146925 - DNA, 25 bp, Homo sapien
catctggcagcttccgatgaggcaa

SEQ ID NO: 3146926 - DNA, 25 bp, Homo sapien
gagtcaagcagtctccgcagaagga

SEQ ID NO: 3146927 - DNA, 25 bp, Homo sapien
ttctaggcgcactcacgaagcttct

SEQ ID NO: 3146928 - DNA, 25 bp, Homo sapien
ggaatctttctacgcctaatctgac

SEQ ID NO: 3146929 - DNA, 25 bp, Homo sapien
cgcagaaggacaaggatgacagatt

SEQ ID NO: 3146930 - DNA, 25 bp, Homo sapien
taattcatacaatgcatcatacccg

SEQ ID NO: 3146931 - DNA, 25 bp, Homo sapien
gaagaaaattcaacgcagccattta

SEQ ID NO: 3146932 - DNA, 25 bp, Homo sapien
cgcaacattgagagttatcccagac

SEQ ID NO: 3146933 - DNA, 25 bp, Homo sapien
ggtaaatttcattagtttgttcagc

SEQ ID NO: 3146934 - DNA, 25 bp, Homo sapien
cacagccccgtctgaagaagggtgc

SEQ ID NO: 3146935 - DNA, 25 bp, Homo sapien
gattcatttggccagctgggttgtc

SEQ ID NO: 3146936 - DNA, 25 bp, Homo sapien
tggcaaagcgctgtgctgctggcat

SEQ ID NO: 3146937 - DNA, 25 bp, Homo sapien
ccttttgcgcttttggatctcagca

SEQ ID NO: 3146938 - DNA, 25 bp, Homo sapien
cagtgatgcaataggaaaagcggga

SEQ ID NO: 3146939 - DNA, 25 bp, Homo sapien
gactatcatctacgtgctcagagca

SEQ ID NO: 3146940 - DNA, 25 bp, Homo sapien
acatgacaaagacaagggctgcacc

SEQ ID NO: 3146941 - DNA, 25 bp, Homo sapien
gctcagagcagggaacagtgatgca

SEQ ID NO: 3146942 - DNA, 25 bp, Homo sapien
tgaccagctctgcaagtcactgact

SEQ ID NO: 3146943 - DNA, 25 bp, Homo sapien
tggaagatgggtatatcagccacct

SEQ ID NO: 3146944 - DNA, 25 bp, Homo sapien
gagcatccgaatctgatcaccaggt

SEQ ID NO: 3146945 - DNA, 25 bp, Homo sapien
tcagccacctcttagactagcctgg

SEQ ID NO: 3146946 - DNA, 25 bp, Homo sapien
cggcgtttggtaaggagggctgtag

SEQ ID NO: 3146947 - DNA, 25 bp, Homo sapien
cagccacggtgaaccggcgtttggt

SEQ ID NO: 3146948 - DNA, 25 bp, Homo sapien
taaggagggctgtagaggaatccat

SEQ ID NO: 3146949 - DNA, 25 bp, Homo sapien
tggtaaggagggctgtagaggaatc

SEQ ID NO: 3146950 - DNA, 25 bp, Homo sapien
gagcttcaaggcagattcacggcga

SEQ ID NO: 3146951 - DNA, 25 bp, Homo sapien
ggcaatgcataagcaaccaggtcag

SEQ ID NO: 3146952 - DNA, 25 bp, Homo sapien
tcacctaaagaaaggcaggctagct

SEQ ID NO: 3146953 - DNA, 25 bp, Homo sapien
tatgacgcccactttgcagaagaga

SEQ ID NO: 3146954 - DNA, 25 bp, Homo sapien
tctttagcacatgagtacccagtag

SEQ ID NO: 3146955 - DNA, 25 bp, Homo sapien
gaaaagcaggatcctaaatggctct

SEQ ID NO: 3146956 - DNA, 25 bp, Homo sapien
gggactccacatgtgatcagacaaa

SEQ ID NO: 3146957 - DNA, 25 bp, Homo sapien
tgagccaccaagaaactgatctggg

SEQ ID NO: 3146958 - DNA, 25 bp, Homo sapien
gagattccctttgagagctgtttgc

SEQ ID NO: 3146959 - DNA, 25 bp, Homo sapien
gaatcgttgccatgttggtgggtca

SEQ ID NO: 3146960 - DNA, 25 bp, Homo sapien
tctttgcgaaggacaatatcacgaa

SEQ ID NO: 3146961 - DNA, 25 bp, Homo sapien
tcaagatcaggcagtcgacacacaa

SEQ ID NO: 3146962 - DNA, 25 bp, Homo sapien
taataatgccaactgatgacaccag

SEQ ID NO: 3146963 - DNA, 25 bp, Homo sapien
cctttgaatggactagagcagctgt

SEQ ID NO: 3146964 - DNA, 25 bp, Homo sapien
aatgtagctaataagagagaagtgc

SEQ ID NO: 3146965 - DNA, 25 bp, Homo sapien
ggtggctgttctctgataggcaata

SEQ ID NO: 3146966 - DNA, 25 bp, Homo sapien
aaaagaccaactactcccctgagct

SEQ ID NO: 3146967 - DNA, 25 bp, Homo sapien
gaaatcatatctccctctcaggaca

SEQ ID NO: 3146968 - DNA, 25 bp, Homo sapien
caagaatgattaactctgcaggatg

SEQ ID NO: 3146969 - DNA, 25 bp, Homo sapien
ctccaacatgtattaagaggacggg

SEQ ID NO: 3146970 - DNA, 25 bp, Homo sapien
gcatggcaaagaggcactagggacc

SEQ ID NO: 3146971 - DNA, 25 bp, Homo sapien
ggtttgttacaaggcctgccaacag

SEQ ID NO: 3146972 - DNA, 25 bp, Homo sapien
gatgatttggcatgcttgcacagcc

SEQ ID NO: 3146973 - DNA, 25 bp, Homo sapien
cagcaatggcaaagaccaagggcct

SEQ ID NO: 3146974 - DNA, 25 bp, Homo sapien
gttacaggtcactatcaacttcacc

SEQ ID NO: 3146975 - DNA, 25 bp, Homo sapien
gtcactatcaacttcacctcttctg

SEQ ID NO: 3146976 - DNA, 25 bp, Homo sapien
tacaggtcactatcaacttcacctc

SEQ ID NO: 3146977 - DNA, 25 bp, Homo sapien
caggtcactatcaacttcacctctt

SEQ ID NO: 3146978 - DNA, 25 bp, Homo sapien
ctgagtcctccttccacaggttcac

SEQ ID NO: 3146979 - DNA, 25 bp, Homo sapien
ccacaggttcactttcctgagccct

SEQ ID NO: 3146980 - DNA, 25 bp, Homo sapien
tgagtcctccttccacaggttcact

SEQ ID NO: 3146981 - DNA, 25 bp, Homo sapien
caggttcactttcctgagccctcat

SEQ ID NO: 3146982 - DNA, 25 bp, Homo sapien
atgttggagagcgtaatgaagctcg

SEQ ID NO: 3146983 - DNA, 25 bp, Homo sapien
tctgacactttgagtctctcccacg

SEQ ID NO: 3146984 - DNA, 25 bp, Homo sapien
tgggccaggtcatccttgtgaagat

SEQ ID NO: 3146985 - DNA, 25 bp, Homo sapien
tctcccacgtctccaagtcagcttc

SEQ ID NO: 3146986 - DNA, 25 bp, Homo sapien
gtcatcacgaatggcagtttctgct

SEQ ID NO: 3146987 - DNA, 25 bp, Homo sapien
catttctgctgatctagctccgtca

SEQ ID NO: 3146988 - DNA, 25 bp, Homo sapien
gaggcccttgctttgcggttggcaa

SEQ ID NO: 3146989 - DNA, 25 bp, Homo sapien
gctggaagctttcttagaggccctt

SEQ ID NO: 3146990 - DNA, 25 bp, Homo sapien
ctgcagtcattttgtcgattaaata

SEQ ID NO: 3146991 - DNA, 25 bp, Homo sapien
attttgtcgattaaatatttggtgg

SEQ ID NO: 3146992 - DNA, 25 bp, Homo sapien
ttggtggccctttaagctggaagtg

SEQ ID NO: 3146993 - DNA, 25 bp, Homo sapien
aatatttggtggccctttaagctgg

SEQ ID NO: 3146994 - DNA, 25 bp, Homo sapien
ttctgcaatagtcacctcggccaca

SEQ ID NO: 3146995 - DNA, 25 bp, Homo sapien
agccagccacgaggcccttctgcaa

SEQ ID NO: 3146996 - DNA, 25 bp, Homo sapien
actcttcctgagactccggcacagg

SEQ ID NO: 3146997 - DNA, 25 bp, Homo sapien
agtcacctcggccacaattcattgt

SEQ ID NO: 3146998 - DNA, 25 bp, Homo sapien
aaagccagagaggacagtttcactc

SEQ ID NO: 3146999 - DNA, 25 bp, Homo sapien
taaagccagagaggacagtttcact

SEQ ID NO: 3147000 - DNA, 25 bp, Homo sapien
ctaaagccagagaggacagtttcac

SEQ ID NO: 3147001 - DNA, 25 bp, Homo sapien
tcctgtggcagctgtttggatgtaa

SEQ ID NO: 3147002 - DNA, 25 bp, Homo sapien
tcttggagcgctttctgtttcttct

SEQ ID NO: 3147003 - DNA, 25 bp, Homo sapien
ggctgctgtcctctgatctttctgc

SEQ ID NO: 3147004 - DNA, 25 bp, Homo sapien
tgacagcctctcagaatctcttgga

SEQ ID NO: 3147005 - DNA, 25 bp, Homo sapien
cactggcgttaattcaagacagaag

SEQ ID NO: 3147006 - DNA, 25 bp, Homo sapien
tagggcaacattcagtccagccagt

SEQ ID NO: 3147007 - DNA, 25 bp, Homo sapien
aaagatattttcagtagtgtcactc

SEQ ID NO: 3147008 - DNA, 25 bp, Homo sapien
gtgtcactcactggcgttaattcaa

SEQ ID NO: 3147009 - DNA, 25 bp, Homo sapien
tcgtgaatcatccaactttcgctgg

SEQ ID NO: 3147010 - DNA, 25 bp, Homo sapien
gaagcctcacactcagaggccagag

SEQ ID NO: 3147011 - DNA, 25 bp, Homo sapien
tcatgggtagacctttagaagattc

SEQ ID NO: 3147012 - DNA, 25 bp, Homo sapien
gttggatccagtgtgtctaagggac

SEQ ID NO: 3147013 - DNA, 25 bp, Homo sapien
acaagggcacagaataactttctga

SEQ ID NO: 3147014 - DNA, 25 bp, Homo sapien
cacaagggcacagaataactttctg

SEQ ID NO: 3147015 - DNA, 25 bp, Homo sapien
caagggcacagaataactttctgac

SEQ ID NO: 3147016 - DNA, 25 bp, Homo sapien
tcacaagggcacagaataactttct

SEQ ID NO: 3147017 - DNA, 25 bp, Homo sapien
caaaaccagacttgaatgatactcc

SEQ ID NO: 3147018 - DNA, 25 bp, Homo sapien
cacaattcctagaaaactggtagcc

SEQ ID NO: 3147019 - DNA, 25 bp, Homo sapien
tccgcatgcatttgacagaaaccac

SEQ ID NO: 3147020 - DNA, 25 bp, Homo sapien
accctgtccctgagatgttaatgca

SEQ ID NO: 3147021 - DNA, 25 bp, Homo sapien
cagacacaggagttctcggaccgta

SEQ ID NO: 3147022 - DNA, 25 bp, Homo sapien
agacacaggagttctcggaccgtat

SEQ ID NO: 3147023 - DNA, 25 bp, Homo sapien
tatagcctgtgccaaaaaactgcct

SEQ ID NO: 3147024 - DNA, 25 bp, Homo sapien
tctgggccaagtctaccgtaaagga

SEQ ID NO: 3147025 - DNA, 25 bp, Homo sapien
tgagggccgggatggaattacccca

SEQ ID NO: 3147026 - DNA, 25 bp, Homo sapien
aaaatggcctatggctctcacaacg

SEQ ID NO: 3147027 - DNA, 25 bp, Homo sapien
agaattccagacatcatcaatgatg

SEQ ID NO: 3147028 - DNA, 25 bp, Homo sapien
cagcatcgccgaatgcaaagggctc

SEQ ID NO: 3147029 - DNA, 25 bp, Homo sapien
caccaaagaattccagacatcatca

SEQ ID NO: 3147030 - DNA, 25 bp, Homo sapien
tgatgtccaaaattgttactcccat

SEQ ID NO: 3147031 - DNA, 25 bp, Homo sapien
aggtataacctgggtagaatttgtg

SEQ ID NO: 3147032 - DNA, 25 bp, Homo sapien
aaatggtatttgaagccccaggctc

SEQ ID NO: 3147033 - DNA, 25 bp, Homo sapien
tgccgcaaacgccaaaatgtgaccg

SEQ ID NO: 3147034 - DNA, 25 bp, Homo sapien
tttatatgtaggtgccaaaataggt

SEQ ID NO: 3147035 - DNA, 25 bp, Homo sapien
aatgtgaccgtctttgtcttcagtg

SEQ ID NO: 3147036 - DNA, 25 bp, Homo sapien
agtgatgtcactgaatcgggtcaat

SEQ ID NO: 3147037 - DNA, 25 bp, Homo sapien
cgggcggtgggcgtgctggcacccc

SEQ ID NO: 3147038 - DNA, 25 bp, Homo sapien
tgggcgggcggtgggcgtgctggca

SEQ ID NO: 3147039 - DNA, 25 bp, Homo sapien
ggcggtgggcgtgctggcaccccac

SEQ ID NO: 3147040 - DNA, 25 bp, Homo sapien
ggcgggcggtgggcgtgctggcacc

SEQ ID NO: 3147041 - DNA, 25 bp, Homo sapien
ggcgctaccgggcttggaaaactgc

SEQ ID NO: 3147042 - DNA, 25 bp, Homo sapien
ctgagtgtggagagagcgaacacaa

SEQ ID NO: 3147043 - DNA, 25 bp, Homo sapien
ttcccgggctgcgcacagcgcgtga

SEQ ID NO: 3147044 - DNA, 25 bp, Homo sapien
aagagggaccgcgatcagcgcccgt

SEQ ID NO: 3147045 - DNA, 25 bp, Homo sapien
atcttgccatttgtcgtcctcttcc

SEQ ID NO: 3147046 - DNA, 25 bp, Homo sapien
tcctggcgggccctgctgtgcggct

SEQ ID NO: 3147047 - DNA, 25 bp, Homo sapien
cctcctcctcacaccgcatgtcaaa

SEQ ID NO: 3147048 - DNA, 25 bp, Homo sapien
tcctcacaccgcatgtcaaacatgc

SEQ ID NO: 3147049 - DNA, 25 bp, Homo sapien
cacgtctacccacccggctggattt

SEQ ID NO: 3147050 - DNA, 25 bp, Homo sapien
tttccccgcatggctttcaagtcca

SEQ ID NO: 3147051 - DNA, 25 bp, Homo sapien
tgcccgcgcgccttggccacaactc

SEQ ID NO: 3147052 - DNA, 25 bp, Homo sapien
acccacccggctggattttctgctg

SEQ ID NO: 3147053 - DNA, 25 bp, Homo sapien
tcagaagatagtgcagcctcaattc

SEQ ID NO: 3147054 - DNA, 25 bp, Homo sapien
tatcgttactaccatcatcatcatg

SEQ ID NO: 3147055 - DNA, 25 bp, Homo sapien
aacaatgcctggtactggtacacat

SEQ ID NO: 3147056 - DNA, 25 bp, Homo sapien
tctgtggaatcgaggacaataagag

SEQ ID NO: 3147057 - DNA, 25 bp, Homo sapien
tattcttacaagcttgcagggttaa

SEQ ID NO: 3147058 - DNA, 25 bp, Homo sapien
tggctctcagcacacaatctcaaag

SEQ ID NO: 3147059 - DNA, 25 bp, Homo sapien
taagtgctcaagatactttagacat

SEQ ID NO: 3147060 - DNA, 25 bp, Homo sapien
aaatagacgtaaggtgccaggcaca

SEQ ID NO: 3147061 - DNA, 25 bp, Homo sapien
ttgatgcttttccttcgttcacttg

SEQ ID NO: 3147062 - DNA, 25 bp, Homo sapien
tctacgactcttccaacgagccagg

SEQ ID NO: 3147063 - DNA, 25 bp, Homo sapien
ttcttgattaagtcctgagaaacac

SEQ ID NO: 3147064 - DNA, 25 bp, Homo sapien
tgtaggttttgatgcttttccttcg

SEQ ID NO: 3147065 - DNA, 25 bp, Homo sapien
ttttgcttggagacccactgcctgc

SEQ ID NO: 3147066 - DNA, 25 bp, Homo sapien
gcttgggtgtcagcataggcactgc

SEQ ID NO: 3147067 - DNA, 25 bp, Homo sapien
caatgtactgttgaaggatcccctc

SEQ ID NO: 3147068 - DNA, 25 bp, Homo sapien
cagaacactggcacgagcaatggtg

SEQ ID NO: 3147069 - DNA, 25 bp, Homo sapien
taccgttgtcttgtttcagctccag

SEQ ID NO: 3147070 - DNA, 25 bp, Homo sapien
gtgccaccgtgggacactctctttc

SEQ ID NO: 3147071 - DNA, 25 bp, Homo sapien
acaccttcaaacatctgggatttgg

SEQ ID NO: 3147072 - DNA, 25 bp, Homo sapien
tgttgatctcgatgctaccgttgtc

SEQ ID NO: 3147073 - DNA, 25 bp, Homo sapien
tatcttgatagtttttcccttcttg

SEQ ID NO: 3147074 - DNA, 25 bp, Homo sapien
tgccggaagaagtttcctttcacac

SEQ ID NO: 3147075 - DNA, 25 bp, Homo sapien
tcagctcccttggtgccggaagaag

SEQ ID NO: 3147076 - DNA, 25 bp, Homo sapien
cacaccaaacctttctaggtcctgg

SEQ ID NO: 3147077 - DNA, 25 bp, Homo sapien
tcttgggataacacactctgaatgg

SEQ ID NO: 3147078 - DNA, 25 bp, Homo sapien
gagccacagtcctatgtagtacagc

SEQ ID NO: 3147079 - DNA, 25 bp, Homo sapien
cctaaagtactatagacagggtcca

SEQ ID NO: 3147080 - DNA, 25 bp, Homo sapien
ggatcaggctggtttctaggaagaa

SEQ ID NO: 3147081 - DNA, 25 bp, Homo sapien
ccccagcaggtctcgggccgccctt

SEQ ID NO: 3147082 - DNA, 25 bp, Homo sapien
gccctttgaacagttctagctcacc

SEQ ID NO: 3147083 - DNA, 25 bp, Homo sapien
gctgtgccctttgaacagttctagc

SEQ ID NO: 3147084 - DNA, 25 bp, Homo sapien
acgctccacacgcaatcccttcccc

SEQ ID NO: 3147085 - DNA, 25 bp, Homo sapien
ctggcatctggctgctcattttaac

SEQ ID NO: 3147086 - DNA, 25 bp, Homo sapien
cattttaactagaatcttggtggtg

SEQ ID NO: 3147087 - DNA, 25 bp, Homo sapien
catctggctgctcattttaactaga

SEQ ID NO: 3147088 - DNA, 25 bp, Homo sapien
tcattttaactagaatcttggtggt

SEQ ID NO: 3147089 - DNA, 25 bp, Homo sapien
tccctggacgtgaatgaatgagagc

SEQ ID NO: 3147090 - DNA, 25 bp, Homo sapien
cagaaaggttgcatgggactcagcc

SEQ ID NO: 3147091 - DNA, 25 bp, Homo sapien
ctgagaatgcgatccaaactgcccg

SEQ ID NO: 3147092 - DNA, 25 bp, Homo sapien
gagacatggtctagcccaaagccta

SEQ ID NO: 3147093 - DNA, 25 bp, Homo sapien
tgaatgagcctcttgagaacactgg

SEQ ID NO: 3147094 - DNA, 25 bp, Homo sapien
aataactacacaacagggccaaagc

SEQ ID NO: 3147095 - DNA, 25 bp, Homo sapien
taagacagatcctgatttagagatg

SEQ ID NO: 3147096 - DNA, 25 bp, Homo sapien
caaagcctcaccagaccaaaaatga

SEQ ID NO: 3147097 - DNA, 25 bp, Homo sapien
tatgggtcattctgaaagatttcaa

SEQ ID NO: 3147098 - DNA, 25 bp, Homo sapien
tgtataactcgtattttcatctcca

SEQ ID NO: 3147099 - DNA, 25 bp, Homo sapien
tggattcaccattacattctccgtg

SEQ ID NO: 3147100 - DNA, 25 bp, Homo sapien
tcctccacttgtgctgaattaccct

SEQ ID NO: 3147101 - DNA, 25 bp, Homo sapien
taacttctcagtggcctgtcttggc

SEQ ID NO: 3147102 - DNA, 25 bp, Homo sapien
gttcttgaaagcctttcaagctggc

SEQ ID NO: 3147103 - DNA, 25 bp, Homo sapien
ataacaccagtgaagtctttttgtg

SEQ ID NO: 3147104 - DNA, 25 bp, Homo sapien
ctttcaagctggcttagggtcataa

SEQ ID NO: 3147105 - DNA, 25 bp, Homo sapien
cttgaataaatgattcctttaaaag

SEQ ID NO: 3147106 - DNA, 25 bp, Homo sapien
ctgatgaggcaagttctatattccc

SEQ ID NO: 3147107 - DNA, 25 bp, Homo sapien
gaggcaagttctatattcccttttc

SEQ ID NO: 3147108 - DNA, 25 bp, Homo sapien
ttgactattcggttccgttttctca

SEQ ID NO: 3147109 - DNA, 25 bp, Homo sapien
ctattcggttccgttttctcagtgg

SEQ ID NO: 3147110 - DNA, 25 bp, Homo sapien
taccatttcagcgtctatttttatg

SEQ ID NO: 3147111 - DNA, 25 bp, Homo sapien
tgttactgtgtgtcaaaatcctacc

SEQ ID NO: 3147112 - DNA, 25 bp, Homo sapien
taactatatgtgagctttaccattt

SEQ ID NO: 3147113 - DNA, 25 bp, Homo sapien
ttgacctctcgcttatctattgctg

SEQ ID NO: 3147114 - DNA, 25 bp, Homo sapien
aataatttggtattgaaagagggtg

SEQ ID NO: 3147115 - DNA, 25 bp, Homo sapien
cctaagggggcatatcaaaatgtga

SEQ ID NO: 3147116 - DNA, 25 bp, Homo sapien
tcttcctaaaacaacgaatacagta

SEQ ID NO: 3147117 - DNA, 25 bp, Homo sapien
agaagaattaggttcactttagaag

SEQ ID NO: 3147118 - DNA, 25 bp, Homo sapien
tatctataggaccatttattctgca

SEQ ID NO: 3147119 - DNA, 25 bp, Homo sapien
gaagtacattcagtccatatcccgt

SEQ ID NO: 3147120 - DNA, 25 bp, Homo sapien
catatcccgtcctggcaatataagc

SEQ ID NO: 3147121 - DNA, 25 bp, Homo sapien
gttacatccagaaacgtacagaagg

SEQ ID NO: 3147122 - DNA, 25 bp, Homo sapien
ccacaaaggccacggtcgggctgca

SEQ ID NO: 3147123 - DNA, 25 bp, Homo sapien
gggctgcatcgagtcacagttgttg

SEQ ID NO: 3147124 - DNA, 25 bp, Homo sapien
acctttccactcatttcattttctg

SEQ ID NO: 3147125 - DNA, 25 bp, Homo sapien
tcgagtcacagttgttgtaaaatgc

SEQ ID NO: 3147126 - DNA, 25 bp, Homo sapien
aaccgctttcctccactctgcactt

SEQ ID NO: 3147127 - DNA, 25 bp, Homo sapien
gtttaaccgctttcctccactctgc

SEQ ID NO: 3147128 - DNA, 25 bp, Homo sapien
tttaaccgctttcctccactctgca

SEQ ID NO: 3147129 - DNA, 25 bp, Homo sapien
cgctttcctccactctgcacttcac

SEQ ID NO: 3147130 - DNA, 25 bp, Homo sapien
ccaagagtaatcaaggttgcgaaca

SEQ ID NO: 3147131 - DNA, 25 bp, Homo sapien
gcgaacaactggtgtaactgatgaa

SEQ ID NO: 3147132 - DNA, 25 bp, Homo sapien
tgttatccaaatccagtggcatcag

SEQ ID NO: 3147133 - DNA, 25 bp, Homo sapien
gagagactagccagtaagctgacag

SEQ ID NO: 3147134 - DNA, 25 bp, Homo sapien
tgcaagaactgtccattgataaatg

SEQ ID NO: 3147135 - DNA, 25 bp, Homo sapien
gaactgtccattgataaatgcacag

SEQ ID NO: 3147136 - DNA, 25 bp, Homo sapien
aatattgcaagaactgtccattgat

SEQ ID NO: 3147137 - DNA, 25 bp, Homo sapien
gtccattgataaatgcacaggtgac

SEQ ID NO: 3147138 - DNA, 25 bp, Homo sapien
aatgtcagcgttgcttcgggttctg

SEQ ID NO: 3147139 - DNA, 25 bp, Homo sapien
ggcaaatgtagttggttggcttcag

SEQ ID NO: 3147140 - DNA, 25 bp, Homo sapien
gcttcgggttctggagattttggct

SEQ ID NO: 3147141 - DNA, 25 bp, Homo sapien
ttggcaaatgtagttggttggcttc

SEQ ID NO: 3147142 - DNA, 25 bp, Homo sapien
tgggcccagaacatgcagacctaaa

SEQ ID NO: 3147143 - DNA, 25 bp, Homo sapien
gctagggttcctggtctgctcaaat

SEQ ID NO: 3147144 - DNA, 25 bp, Homo sapien
tcaaatagagaatccggctccagct

SEQ ID NO: 3147145 - DNA, 25 bp, Homo sapien
ggcaaacaccctggctaaaggaata

SEQ ID NO: 3147146 - DNA, 25 bp, Homo sapien
gagagagatctcacagcagtaaaac

SEQ ID NO: 3147147 - DNA, 25 bp, Homo sapien
cctgggattcccactaggataaagg

SEQ ID NO: 3147148 - DNA, 25 bp, Homo sapien
tgttttgaagcatagtccctctggg

SEQ ID NO: 3147149 - DNA, 25 bp, Homo sapien
tataggccctaaatgcccacgtttc

SEQ ID NO: 3147150 - DNA, 25 bp, Homo sapien
tctgggccaggtattgagctaaaca

SEQ ID NO: 3147151 - DNA, 25 bp, Homo sapien
ccagagcatgcagctataattacag

SEQ ID NO: 3147152 - DNA, 25 bp, Homo sapien
acattatgaatgcttattctgggcc

SEQ ID NO: 3147153 - DNA, 25 bp, Homo sapien
gggaaatctgatgggtaaggtcaca

SEQ ID NO: 3147154 - DNA, 25 bp, Homo sapien
tgatgcttgacttcagatcagtccc

SEQ ID NO: 3147155 - DNA, 25 bp, Homo sapien
ccttaaatgggtgctgggcagagac

SEQ ID NO: 3147156 - DNA, 25 bp, Homo sapien
tggtgagatgtgcagcatgagcatc

SEQ ID NO: 3147157 - DNA, 25 bp, Homo sapien
cctactgaatgagacactgtgagag

SEQ ID NO: 3147158 - DNA, 25 bp, Homo sapien
ggagtttggctctagtcaataccag

SEQ ID NO: 3147159 - DNA, 25 bp, Homo sapien
taaaaggcagcaaagatgggtggtt

SEQ ID NO: 3147160 - DNA, 25 bp, Homo sapien
gaaccatgctcccaagtactatagg

SEQ ID NO: 3147161 - DNA, 25 bp, Homo sapien
ggctcatggcaaggatttgtatcct

SEQ ID NO: 3147162 - DNA, 25 bp, Homo sapien
gagaaaaactgggatcgtcgccaag

SEQ ID NO: 3147163 - DNA, 25 bp, Homo sapien
actctaagcggaacactggcagtgc

SEQ ID NO: 3147164 - DNA, 25 bp, Homo sapien
gagttctgaactctaagcggaacac

SEQ ID NO: 3147165 - DNA, 25 bp, Homo sapien
ggatcgtcgccaagagttctgaact

SEQ ID NO: 3147166 - DNA, 25 bp, Homo sapien
gaaatgaagacaagtgccacacatc

SEQ ID NO: 3147167 - DNA, 25 bp, Homo sapien
tcaacataaagttgtgtgattcctc

SEQ ID NO: 3147168 - DNA, 25 bp, Homo sapien
cattgatcgccccaacatggatttt

SEQ ID NO: 3147169 - DNA, 25 bp, Homo sapien
gaaatacagctacccagtatgcagt

SEQ ID NO: 3147170 - DNA, 25 bp, Homo sapien
tgtttttgacctatcagtggagtat

SEQ ID NO: 3147171 - DNA, 25 bp, Homo sapien
gacctatcagtggagtatagttcct

SEQ ID NO: 3147172 - DNA, 25 bp, Homo sapien
ttttgacctatcagtggagtatagt

SEQ ID NO: 3147173 - DNA, 25 bp, Homo sapien
gaatgtgagtattttctaattgtct

SEQ ID NO: 3147174 - DNA, 25 bp, Homo sapien
ggtgtcataacaggtgacttctcac

SEQ ID NO: 3147175 - DNA, 25 bp, Homo sapien
tgtcataacaggtgacttctcactg

SEQ ID NO: 3147176 - DNA, 25 bp, Homo sapien
gtgtcataacaggtgacttctcact

SEQ ID NO: 3147177 - DNA, 25 bp, Homo sapien
aggtgtcataacaggtgacttctca

SEQ ID NO: 3147178 - DNA, 25 bp, Homo sapien
acacgatctcggtgccaccacacct

SEQ ID NO: 3147179 - DNA, 25 bp, Homo sapien
tgacacgatctcggtgccaccacac

SEQ ID NO: 3147180 - DNA, 25 bp, Homo sapien
tctttgagccaatcaaatgttataa

SEQ ID NO: 3147181 - DNA, 25 bp, Homo sapien
gacacgatctcggtgccaccacacc

SEQ ID NO: 3147182 - DNA, 25 bp, Homo sapien
ggagcaaacgttcctgttcctgttg

SEQ ID NO: 3147183 - DNA, 25 bp, Homo sapien
tgtcgcctgcgctcctcttctgggt

SEQ ID NO: 3147184 - DNA, 25 bp, Homo sapien
tttcctgtcgcctgcgctcctcttc

SEQ ID NO: 3147185 - DNA, 25 bp, Homo sapien
cctgtcgcctgcgctcctcttctgg

SEQ ID NO: 3147186 - DNA, 25 bp, Homo sapien
gactggcaactaaggaggtgatgaa

SEQ ID NO: 3147187 - DNA, 25 bp, Homo sapien
tatttcacgtgtatgctagcagaga

SEQ ID NO: 3147188 - DNA, 25 bp, Homo sapien
ctacttgactggaaattgactggca

SEQ ID NO: 3147189 - DNA, 25 bp, Homo sapien
tagactggcccttatccatacttgg

SEQ ID NO: 3147190 - DNA, 25 bp, Homo sapien
cctcatagtatctgcgttcttcctc

SEQ ID NO: 3147191 - DNA, 25 bp, Homo sapien
tagtatctgcgttcttcctcttcca

SEQ ID NO: 3147192 - DNA, 25 bp, Homo sapien
tgtcctgctccttctggtatctctc

SEQ ID NO: 3147193 - DNA, 25 bp, Homo sapien
ttcccactcttctttcagcttgtcc

SEQ ID NO: 3147194 - DNA, 25 bp, Homo sapien
caaatgaatggaactgattatttca

SEQ ID NO: 3147195 - DNA, 25 bp, Homo sapien
caagaatctgactcactgattagag

SEQ ID NO: 3147196 - DNA, 25 bp, Homo sapien
aatgcagtcattcagcctcaatatc

SEQ ID NO: 3147197 - DNA, 25 bp, Homo sapien
taattgtatcgtctcccttgactgt

SEQ ID NO: 3147198 - DNA, 25 bp, Homo sapien
tggtcagcggaacttgaagaaacag

SEQ ID NO: 3147199 - DNA, 25 bp, Homo sapien
aggtagacagctggtcagcggaact

SEQ ID NO: 3147200 - DNA, 25 bp, Homo sapien
gacagctggtcagcggaacttgaag

SEQ ID NO: 3147201 - DNA, 25 bp, Homo sapien
cagtgtcttcaattatcttacgctc

SEQ ID NO: 3147202 - DNA, 25 bp, Homo sapien
tcctccagtcgatcactttccctag

SEQ ID NO: 3147203 - DNA, 25 bp, Homo sapien
tcagcaataagtcactgtcatctcc

SEQ ID NO: 3147204 - DNA, 25 bp, Homo sapien
tttccctagtcttcagcaataagtc

SEQ ID NO: 3147205 - DNA, 25 bp, Homo sapien
tcatctccctggaatgatttcttcc

SEQ ID NO: 3147206 - DNA, 25 bp, Homo sapien
ctgagcgtgcacgagcagagcccag

SEQ ID NO: 3147207 - DNA, 25 bp, Homo sapien
ccttcctgagcgtgcacgagcagag

SEQ ID NO: 3147208 - DNA, 25 bp, Homo sapien
ttcctgagcgtgcacgagcagagcc

SEQ ID NO: 3147209 - DNA, 25 bp, Homo sapien
agcgtgcacgagcagagcccagctt

SEQ ID NO: 3147210 - DNA, 25 bp, Homo sapien
tccttttgatacagggttcccagaa

SEQ ID NO: 3147211 - DNA, 25 bp, Homo sapien
tccagcgggagggtttttggcttca

SEQ ID NO: 3147212 - DNA, 25 bp, Homo sapien
ggagactcgatctgatggttaatgc

SEQ ID NO: 3147213 - DNA, 25 bp, Homo sapien
ttccgcctttcactgggagactcga

SEQ ID NO: 3147214 - DNA, 25 bp, Homo sapien
gaactgtgcgttggatttgatgtct

SEQ ID NO: 3147215 - DNA, 25 bp, Homo sapien
ggtgggagaacagggagagaaaggc

SEQ ID NO: 3147216 - DNA, 25 bp, Homo sapien
gggagaacagggagagaaaggccca

SEQ ID NO: 3147217 - DNA, 25 bp, Homo sapien
ctggaagtgctctcggggacttttc

SEQ ID NO: 3147218 - DNA, 25 bp, Homo sapien
cagcctggaagtgctctcggggact

SEQ ID NO: 3147219 - DNA, 25 bp, Homo sapien
ggaagagttccccaatcaaatgcta

SEQ ID NO: 3147220 - DNA, 25 bp, Homo sapien
agtggatcccgcctagaagggctta

SEQ ID NO: 3147221 - DNA, 25 bp, Homo sapien
cctcttgaagggaaaggcgccagct

SEQ ID NO: 3147222 - DNA, 25 bp, Homo sapien
tctctccagggaacgggaattcagg

SEQ ID NO: 3147223 - DNA, 25 bp, Homo sapien
aatggactggaaccaaaccagcaga

SEQ ID NO: 3147224 - DNA, 25 bp, Homo sapien
cccggagaggtgagatctaatgtct

SEQ ID NO: 3147225 - DNA, 25 bp, Homo sapien
cacctgtgatacagcagactagaca

SEQ ID NO: 3147226 - DNA, 25 bp, Homo sapien
tgctctgtcgccaagttctctgatc

SEQ ID NO: 3147227 - DNA, 25 bp, Homo sapien
tgagggtctcgatgatcattgcagc

SEQ ID NO: 3147228 - DNA, 25 bp, Homo sapien
tgaaaatagagattgagggtctcga

SEQ ID NO: 3147229 - DNA, 25 bp, Homo sapien
gattgagggtctcgatgatcattgc

SEQ ID NO: 3147230 - DNA, 25 bp, Homo sapien
tagagattgagggtctcgatgatca

SEQ ID NO: 3147231 - DNA, 25 bp, Homo sapien
gaggcatttttcagcacggaacgat

SEQ ID NO: 3147232 - DNA, 25 bp, Homo sapien
tgaagttgtgtctggagagcaaagc

SEQ ID NO: 3147233 - DNA, 25 bp, Homo sapien
ggagagcaaagcagtaagtacgtac

SEQ ID NO: 3147234 - DNA, 25 bp, Homo sapien
agcacggaacgatgccaaaagacat

SEQ ID NO: 3147235 - DNA, 25 bp, Homo sapien
agttcaggagaccatttcgaatcct

SEQ ID NO: 3147236 - DNA, 25 bp, Homo sapien
ttctggatcgcatgtagcaatcatt

SEQ ID NO: 3147237 - DNA, 25 bp, Homo sapien
gcatgtagcaatcattacagttcag

SEQ ID NO: 3147238 - DNA, 25 bp, Homo sapien
atttcgaatcctaacatccgtccca

SEQ ID NO: 3147239 - DNA, 25 bp, Homo sapien
gattacactcggtcatcatgaggca

SEQ ID NO: 3147240 - DNA, 25 bp, Homo sapien
attacactcggtcatcatgaggcat

SEQ ID NO: 3147241 - DNA, 25 bp, Homo sapien
taatgaaactcctgaatgtagggcg

SEQ ID NO: 3147242 - DNA, 25 bp, Homo sapien
tctgagaaacagtggagagccgctc

SEQ ID NO: 3147243 - DNA, 25 bp, Homo sapien
aaccatccccaaatggtgccagtcg

SEQ ID NO: 3147244 - DNA, 25 bp, Homo sapien
gagacattgatgagttggtgctcga

SEQ ID NO: 3147245 - DNA, 25 bp, Homo sapien
gcttctcacttactaaggcagcaaa

SEQ ID NO: 3147246 - DNA, 25 bp, Homo sapien
accttccacagtaggaggcccggat

SEQ ID NO: 3147247 - DNA, 25 bp, Homo sapien
gaagtggaaccctcattgttgtctc

SEQ ID NO: 3147248 - DNA, 25 bp, Homo sapien
tgcaagacgggaaagcaagcaggct

SEQ ID NO: 3147249 - DNA, 25 bp, Homo sapien
aggcagtaaaaacgtgacttcactt

SEQ ID NO: 3147250 - DNA, 25 bp, Homo sapien
acactccctatcttcactccaattt

SEQ ID NO: 3147251 - DNA, 25 bp, Homo sapien
taaaaacgtgacttcactttgagaa

SEQ ID NO: 3147252 - DNA, 25 bp, Homo sapien
cagtaaaaacgtgacttcactttga

SEQ ID NO: 3147253 - DNA, 25 bp, Homo sapien
tcacaatgttgtaggctgcccggca

SEQ ID NO: 3147254 - DNA, 25 bp, Homo sapien
cacaatgttgtaggctgcccggcac

SEQ ID NO: 3147255 - DNA, 25 bp, Homo sapien
tgagtgatccggaagcttgaaagcc

SEQ ID NO: 3147256 - DNA, 25 bp, Homo sapien
aattaggtaaatgctgagaagcccc

SEQ ID NO: 3147257 - DNA, 25 bp, Homo sapien
ggggacactctcagtaaagaaatgg

SEQ ID NO: 3147258 - DNA, 25 bp, Homo sapien
gcctttcagaaattaggtaaatgct

SEQ ID NO: 3147259 - DNA, 25 bp, Homo sapien
gctattcaggatcattacaacccca

SEQ ID NO: 3147260 - DNA, 25 bp, Homo sapien
aaaccataagcctgtttgaccatgc

SEQ ID NO: 3147261 - DNA, 25 bp, Homo sapien
tgcatcatttagctaattcccaaag

SEQ ID NO: 3147262 - DNA, 25 bp, Homo sapien
tgtgctacgaaagaacagataccac

SEQ ID NO: 3147263 - DNA, 25 bp, Homo sapien
acataaagtgtttaattcctagaca

SEQ ID NO: 3147264 - DNA, 25 bp, Homo sapien
cagtatatattatcaaactagtgtc

SEQ ID NO: 3147265 - DNA, 25 bp, Homo sapien
ttcagtcttagaagaccgtgtgtct

SEQ ID NO: 3147266 - DNA, 25 bp, Homo sapien
tacagtatatattatcaaactagtg

SEQ ID NO: 3147267 - DNA, 25 bp, Homo sapien
ttagaagaccgtgtgtctcaaattg

SEQ ID NO: 3147268 - DNA, 25 bp, Homo sapien
gaagactcctaatctagtgcctcga

SEQ ID NO: 3147269 - DNA, 25 bp, Homo sapien
caacgtcccggagtgtaaatctagc

SEQ ID NO: 3147270 - DNA, 25 bp, Homo sapien
taacgcttttctttggacacctgtg

SEQ ID NO: 3147271 - DNA, 25 bp, Homo sapien
tcgagagaagcaggcaacagaggcc

SEQ ID NO: 3147272 - DNA, 25 bp, Homo sapien
agctgaaactcgtcgcacagggcag

SEQ ID NO: 3147273 - DNA, 25 bp, Homo sapien
aatatggtcgaaatccctccagtgg

SEQ ID NO: 3147274 - DNA, 25 bp, Homo sapien
tatggaacccacatgcaaagaaccc

SEQ ID NO: 3147275 - DNA, 25 bp, Homo sapien
gctagccatactcaataagacacgg

SEQ ID NO: 3147276 - DNA, 25 bp, Homo sapien
gtaacatcttttggacggactcaca

SEQ ID NO: 3147277 - DNA, 25 bp, Homo sapien
catggaagttcgctagtgaaaaaca

SEQ ID NO: 3147278 - DNA, 25 bp, Homo sapien
tataaccgatatagaacactggccc

SEQ ID NO: 3147279 - DNA, 25 bp, Homo sapien
caagatctagtctgcctaagctgcc

SEQ ID NO: 3147280 - DNA, 25 bp, Homo sapien
tataaatgtacatttactataaaag

SEQ ID NO: 3147281 - DNA, 25 bp, Homo sapien
taaatgtacatttactataaaagct

SEQ ID NO: 3147282 - DNA, 25 bp, Homo sapien
aaatgtacatttactataaaagctg

SEQ ID NO: 3147283 - DNA, 25 bp, Homo sapien
atgtacatttactataaaagctgtt

SEQ ID NO: 3147284 - DNA, 25 bp, Homo sapien
ctgatcctccacttcctgctgtcat

SEQ ID NO: 3147285 - DNA, 25 bp, Homo sapien
agtaaatagtatgaatctctctggg

SEQ ID NO: 3147286 - DNA, 25 bp, Homo sapien
cccaaatattgtcaactgaaggctt

SEQ ID NO: 3147287 - DNA, 25 bp, Homo sapien
gattctagcacaggttgccgaaggg

SEQ ID NO: 3147288 - DNA, 25 bp, Homo sapien
tgtcctcttatgcacagcaattcgt

SEQ ID NO: 3147289 - DNA, 25 bp, Homo sapien
gagtccacttggaacattcataatc

SEQ ID NO: 3147290 - DNA, 25 bp, Homo sapien
caggtggctgcaatgagtccacttg

SEQ ID NO: 3147291 - DNA, 25 bp, Homo sapien
aatttgattttcgaagtgccttaca

SEQ ID NO: 3147292 - DNA, 25 bp, Homo sapien
ttacagtccttaagccaggtggctg

SEQ ID NO: 3147293 - DNA, 25 bp, Homo sapien
gcccacaggtccagtaacaagattt

SEQ ID NO: 3147294 - DNA, 25 bp, Homo sapien
tataatgaggataaactttgacaca

SEQ ID NO: 3147295 - DNA, 25 bp, Homo sapien
ggtgttaaatgcaattgggtctcaa

SEQ ID NO: 3147296 - DNA, 25 bp, Homo sapien
tgggtctcaaattttaagcagttaa

SEQ ID NO: 3147297 - DNA, 25 bp, Homo sapien
aaaatagagcgtccacacagccact

SEQ ID NO: 3147298 - DNA, 25 bp, Homo sapien
attctggcttaaaatagagcgtcca

SEQ ID NO: 3147299 - DNA, 25 bp, Homo sapien
ttgaccacaggtttatccaaattgg

SEQ ID NO: 3147300 - DNA, 25 bp, Homo sapien
ccagattgaccacaggtttatccaa

SEQ ID NO: 3147301 - DNA, 25 bp, Homo sapien
atgtgacatgccaatattcccagga

SEQ ID NO: 3147302 - DNA, 25 bp, Homo sapien
catcactccgttgcctttgattaat

SEQ ID NO: 3147303 - DNA, 25 bp, Homo sapien
ctattggttctgattgatcatttct

SEQ ID NO: 3147304 - DNA, 25 bp, Homo sapien
cttgttcatcactccgttgcctttg

SEQ ID NO: 3147305 - DNA, 25 bp, Homo sapien
tctctgttatactctcaatgtcact

SEQ ID NO: 3147306 - DNA, 25 bp, Homo sapien
cttattatggtaatgggcaatttga

SEQ ID NO: 3147307 - DNA, 25 bp, Homo sapien
ggcaatttgagcatgattttgatca

SEQ ID NO: 3147308 - DNA, 25 bp, Homo sapien
gattttgatcattagaagtgactga

SEQ ID NO: 3147309 - DNA, 25 bp, Homo sapien
gagaatgtcagaatgatccggcctt

SEQ ID NO: 3147310 - DNA, 25 bp, Homo sapien
tgtcagaatgatccggccttttccc

SEQ ID NO: 3147311 - DNA, 25 bp, Homo sapien
gaatgtcagaatgatccggcctttt

SEQ ID NO: 3147312 - DNA, 25 bp, Homo sapien
caggccagactggagaatgtcagaa

SEQ ID NO: 3147313 - DNA, 25 bp, Homo sapien
gaaggaaggcaaaacacagtgcaaa

SEQ ID NO: 3147314 - DNA, 25 bp, Homo sapien
gattatctgaaaacagtccatgacc

SEQ ID NO: 3147315 - DNA, 25 bp, Homo sapien
cattagatcaacaggcaggattatc

SEQ ID NO: 3147316 - DNA, 25 bp, Homo sapien
cttacaccatttccatattggaagg

SEQ ID NO: 3147317 - DNA, 25 bp, Homo sapien
gactgttcaaaggttggaattcgag

SEQ ID NO: 3147318 - DNA, 25 bp, Homo sapien
acatagagtgtgagtgactgttcaa

SEQ ID NO: 3147319 - DNA, 25 bp, Homo sapien
agagtgtgagtgactgttcaaaggt

SEQ ID NO: 3147320 - DNA, 25 bp, Homo sapien
catagagtgtgagtgactgttcaaa

SEQ ID NO: 3147321 - DNA, 25 bp, Homo sapien
ggcttgcatttgatcaggcagtttg

SEQ ID NO: 3147322 - DNA, 25 bp, Homo sapien
tcatatcaaactttgaatcatcttt

SEQ ID NO: 3147323 - DNA, 25 bp, Homo sapien
tcttgccaaaagcatccaaatgtgg

SEQ ID NO: 3147324 - DNA, 25 bp, Homo sapien
gggcttcttgccaaaagcatccaaa

SEQ ID NO: 3147325 - DNA, 25 bp, Homo sapien
cattgagggcctaaagtaatcgcgc

SEQ ID NO: 3147326 - DNA, 25 bp, Homo sapien
ccaaagccgccttagtgaagagcag

SEQ ID NO: 3147327 - DNA, 25 bp, Homo sapien
tattgtcgtcgctgctgccatggct

SEQ ID NO: 3147328 - DNA, 25 bp, Homo sapien
tatgttctgatctggaatcctgcgg

SEQ ID NO: 3147329 - DNA, 25 bp, Homo sapien
gaaccgccgcgccaagtttcgcaag

SEQ ID NO: 3147330 - DNA, 25 bp, Homo sapien
aagtttcgcaagcaggagcgcgcag

SEQ ID NO: 3147331 - DNA, 25 bp, Homo sapien
gactcttccagggacgacgagagca

SEQ ID NO: 3147332 - DNA, 25 bp, Homo sapien
tcctcgggcaaaaagtctgactctt

SEQ ID NO: 3147333 - DNA, 25 bp, Homo sapien
gggaccaccagagcagtccgtacgc

SEQ ID NO: 3147334 - DNA, 25 bp, Homo sapien
gtaaggaccttcagctttctcagcg

SEQ ID NO: 3147335 - DNA, 25 bp, Homo sapien
tttctcagcggaggaagccgccttt

SEQ ID NO: 3147336 - DNA, 25 bp, Homo sapien
gcctttccgcccgtatataggaagc

SEQ ID NO: 3147337 - DNA, 25 bp, Homo sapien
aaactacaataccttttatcatctg

SEQ ID NO: 3147338 - DNA, 25 bp, Homo sapien
tgaaaaactacaataccttttatca

SEQ ID NO: 3147339 - DNA, 25 bp, Homo sapien
caacattgaaaaactacaatacctt

SEQ ID NO: 3147340 - DNA, 25 bp, Homo sapien
tatcaacattgaaaaactacaatac

SEQ ID NO: 3147341 - DNA, 25 bp, Homo sapien
ctgaaatagcatttagcaagggcca

SEQ ID NO: 3147342 - DNA, 25 bp, Homo sapien
aagagatgatctgtaaagagggctc

SEQ ID NO: 3147343 - DNA, 25 bp, Homo sapien
ccagcatacaagtgtctaatatcat

SEQ ID NO: 3147344 - DNA, 25 bp, Homo sapien
aaagagggctcaggctgaaatagca

SEQ ID NO: 3147345 - DNA, 25 bp, Homo sapien
gttgtaatatctgtaagagcacaaa

SEQ ID NO: 3147346 - DNA, 25 bp, Homo sapien
aaaatgtgtcctcttaaagatgcat

SEQ ID NO: 3147347 - DNA, 25 bp, Homo sapien
atttgccaaccgctgacttgcatac

SEQ ID NO: 3147348 - DNA, 25 bp, Homo sapien
aatcactgttattaataccacaatt

SEQ ID NO: 3147349 - DNA, 25 bp, Homo sapien
ggggcttgaggcgaccctcaggtga

SEQ ID NO: 3147350 - DNA, 25 bp, Homo sapien
gtgacctgttccagccggagaatct

SEQ ID NO: 3147351 - DNA, 25 bp, Homo sapien
gcttgaggcgaccctcaggtgacct

SEQ ID NO: 3147352 - DNA, 25 bp, Homo sapien
tgacctgttccagccggagaatcta

SEQ ID NO: 3147353 - DNA, 25 bp, Homo sapien
aaagcttttgttcttctaggtccat

SEQ ID NO: 3147354 - DNA, 25 bp, Homo sapien
cagcttctcccttcagctgtctcag

SEQ ID NO: 3147355 - DNA, 25 bp, Homo sapien
gaacaatgaagacccttcagcttct

SEQ ID NO: 3147356 - DNA, 25 bp, Homo sapien
gcttctcccttcagctgtctcaggg

SEQ ID NO: 3147357 - DNA, 25 bp, Homo sapien
ttcagcttctcccttcagctgtctc

SEQ ID NO: 3147358 - DNA, 25 bp, Homo sapien
cctggtagcaattatcgatgaaatt

SEQ ID NO: 3147359 - DNA, 25 bp, Homo sapien
gattcctggtagcaattatcgatga

SEQ ID NO: 3147360 - DNA, 25 bp, Homo sapien
attatcgatgaaattaacaaaagca

SEQ ID NO: 3147361 - DNA, 25 bp, Homo sapien
atgattcctggtagcaattatcgat

SEQ ID NO: 3147362 - DNA, 25 bp, Homo sapien
tatttgagcaccactctcatgaggc

SEQ ID NO: 3147363 - DNA, 25 bp, Homo sapien
ccatatttgagcaccactctcatga

SEQ ID NO: 3147364 - DNA, 25 bp, Homo sapien
tgagcaccactctcatgaggctctg

SEQ ID NO: 3147365 - DNA, 25 bp, Homo sapien
tgtaatttgcttattcctattaaat

SEQ ID NO: 3147366 - DNA, 25 bp, Homo sapien
tctctttcaattggttgtgagaacc

SEQ ID NO: 3147367 - DNA, 25 bp, Homo sapien
ggttatgaagcaagagaatgtttta

SEQ ID NO: 3147368 - DNA, 25 bp, Homo sapien
ctttggttatgaagcaagagaatgt

SEQ ID NO: 3147369 - DNA, 25 bp, Homo sapien
attctctttcaattggttgtgagaa

SEQ ID NO: 3147370 - DNA, 25 bp, Homo sapien
tccagggacatcaatagccaggatt

SEQ ID NO: 3147371 - DNA, 25 bp, Homo sapien
atcaatagccaggattccccttcca

SEQ ID NO: 3147372 - DNA, 25 bp, Homo sapien
tctttccagggacatcaatagccag

SEQ ID NO: 3147373 - DNA, 25 bp, Homo sapien
gacatcaatagccaggattcccctt

SEQ ID NO: 3147374 - DNA, 25 bp, Homo sapien
gggagctcggtgtccaagtatacca

SEQ ID NO: 3147375 - DNA, 25 bp, Homo sapien
gactctttgtgacatctgatgggtg

SEQ ID NO: 3147376 - DNA, 25 bp, Homo sapien
tgaaattatccaagagtaagaggac

SEQ ID NO: 3147377 - DNA, 25 bp, Homo sapien
gggaggtcagtttgatttgaaatta

SEQ ID NO: 3147378 - DNA, 25 bp, Homo sapien
gtaatacttaggaccacagtaaaca

SEQ ID NO: 3147379 - DNA, 25 bp, Homo sapien
tgagcacgaacttgtattcccagag

SEQ ID NO: 3147380 - DNA, 25 bp, Homo sapien
caaattgttcccagtgccttagagc

SEQ ID NO: 3147381 - DNA, 25 bp, Homo sapien
tagagctaaagggtaatacttagga

SEQ ID NO: 3147382 - DNA, 25 bp, Homo sapien
gaactttcaacctcttgagctgaca

SEQ ID NO: 3147383 - DNA, 25 bp, Homo sapien
gctgacagttagtagtggatgcaca

SEQ ID NO: 3147384 - DNA, 25 bp, Homo sapien
gagcattgtggctccggaaaagagc

SEQ ID NO: 3147385 - DNA, 25 bp, Homo sapien
gcttgcgactaattgcagcttgtaa

SEQ ID NO: 3147386 - DNA, 25 bp, Homo sapien
acgtcagctttctcccctattggtg

SEQ ID NO: 3147387 - DNA, 25 bp, Homo sapien
cctattggtgtggttacagggacca

SEQ ID NO: 3147388 - DNA, 25 bp, Homo sapien
cctggagctaacacaaacactgaac

SEQ ID NO: 3147389 - DNA, 25 bp, Homo sapien
gagctcagccctcagaaggttcctg

SEQ ID NO: 3147390 - DNA, 25 bp, Homo sapien
caccatggtcaagctggtaggaggc

SEQ ID NO: 3147391 - DNA, 25 bp, Homo sapien
accatggtcaagctggtaggaggca

SEQ ID NO: 3147392 - DNA, 25 bp, Homo sapien
ggcatgatcctggtgtattggggag

SEQ ID NO: 3147393 - DNA, 25 bp, Homo sapien
atcctggtgtattggggagttttgc

SEQ ID NO: 3147394 - DNA, 25 bp, Homo sapien
tagccacgggactcagagatacccc

SEQ ID NO: 3147395 - DNA, 25 bp, Homo sapien
catctgcgaggactcagaactccct

SEQ ID NO: 3147396 - DNA, 25 bp, Homo sapien
acacatgggctcctcggttagatgg

SEQ ID NO: 3147397 - DNA, 25 bp, Homo sapien
gatggcatctgcgaggactcagaac

SEQ ID NO: 3147398 - DNA, 25 bp, Homo sapien
tgggctcctcggttagatggcatct

SEQ ID NO: 3147399 - DNA, 25 bp, Homo sapien
gaacatccccacataatcaatgtaa

SEQ ID NO: 3147400 - DNA, 25 bp, Homo sapien
atcatatttacaaggcaggttttgt

SEQ ID NO: 3147401 - DNA, 25 bp, Homo sapien
cttcagaacatccccacataatcaa

SEQ ID NO: 3147402 - DNA, 25 bp, Homo sapien
tcatatttacaaggcaggttttgtt

SEQ ID NO: 3147403 - DNA, 25 bp, Homo sapien
caggtcaaagttgccattaataggc

SEQ ID NO: 3147404 - DNA, 25 bp, Homo sapien
cataggagaggcagacggcaaaatt

SEQ ID NO: 3147405 - DNA, 25 bp, Homo sapien
aaatgaacctcaactacagacttgg

SEQ ID NO: 3147406 - DNA, 25 bp, Homo sapien
taaagctttagtcactcattcaggt

SEQ ID NO: 3147407 - DNA, 25 bp, Homo sapien
atggtgggagcccacgaagtcaagc

SEQ ID NO: 3147408 - DNA, 25 bp, Homo sapien
acattcttgccgctgatggtgggag

SEQ ID NO: 3147409 - DNA, 25 bp, Homo sapien
gggcacattcttgccgctgatggtg

SEQ ID NO: 3147410 - DNA, 25 bp, Homo sapien
attcttgccgctgatggtgggagcc

SEQ ID NO: 3147411 - DNA, 25 bp, Homo sapien
gagaggtgaaataacacgtctgcta

SEQ ID NO: 3147412 - DNA, 25 bp, Homo sapien
tgctaagaagccgagagtaaaaatg

SEQ ID NO: 3147413 - DNA, 25 bp, Homo sapien
gcttcagtcagcttctcagaatatt

SEQ ID NO: 3147414 - DNA, 25 bp, Homo sapien
aagttgaagacacggcaaaagcagg

SEQ ID NO: 3147415 - DNA, 25 bp, Homo sapien
cagtctggatctgcccaaatgaagg

SEQ ID NO: 3147416 - DNA, 25 bp, Homo sapien
ttgacctctttcagtagtcagagaa

SEQ ID NO: 3147417 - DNA, 25 bp, Homo sapien
tgacctctttcagtagtcagagaac

SEQ ID NO: 3147418 - DNA, 25 bp, Homo sapien
attttgacctctttcagtagtcaga

SEQ ID NO: 3147419 - DNA, 25 bp, Homo sapien
gattcgataatggatgctcaaataa

SEQ ID NO: 3147420 - DNA, 25 bp, Homo sapien
tcagattcgataatggatgctcaaa

SEQ ID NO: 3147421 - DNA, 25 bp, Homo sapien
tgacataatggcatggtgcaaggct

SEQ ID NO: 3147422 - DNA, 25 bp, Homo sapien
cctctgacataatggcatggtgcaa

SEQ ID NO: 3147423 - DNA, 25 bp, Homo sapien
ttttttcaagttgctttatccatgt

SEQ ID NO: 3147424 - DNA, 25 bp, Homo sapien
ttttcaagttgctttatccatgtat

SEQ ID NO: 3147425 - DNA, 25 bp, Homo sapien
tttttcaagttgctttatccatgta

SEQ ID NO: 3147426 - DNA, 25 bp, Homo sapien
tttcaagttgctttatccatgtata

SEQ ID NO: 3147427 - DNA, 25 bp, Homo sapien
ttatattctgtgttttgaagactgt

SEQ ID NO: 3147428 - DNA, 25 bp, Homo sapien
catagctgtatcttattatattctg

SEQ ID NO: 3147429 - DNA, 25 bp, Homo sapien
ctgtaagtcttagtcgctaactgga

SEQ ID NO: 3147430 - DNA, 25 bp, Homo sapien
tttgaagactgttggtaatggagca

SEQ ID NO: 3147431 - DNA, 25 bp, Homo sapien
ttcatgcactaagccaccagccgca

SEQ ID NO: 3147432 - DNA, 25 bp, Homo sapien
agttcatgcactaagccaccagccg

SEQ ID NO: 3147433 - DNA, 25 bp, Homo sapien
cagttcatgcactaagccaccagcc

SEQ ID NO: 3147434 - DNA, 25 bp, Homo sapien
atgcactaagccaccagccgcagag

SEQ ID NO: 3147435 - DNA, 25 bp, Homo sapien
gctggagcagcctgccagacgtgat

SEQ ID NO: 3147436 - DNA, 25 bp, Homo sapien
ttagggtttcgtaatcccatctctg

SEQ ID NO: 3147437 - DNA, 25 bp, Homo sapien
atgcaaattggtgcggtggcgcaaa

SEQ ID NO: 3147438 - DNA, 25 bp, Homo sapien
tctctgccccaggattcccgtagag

SEQ ID NO: 3147439 - DNA, 25 bp, Homo sapien
tggctgctaatagagatctaattga

SEQ ID NO: 3147440 - DNA, 25 bp, Homo sapien
ttggctgctaatagagatctaattg

SEQ ID NO: 3147441 - DNA, 25 bp, Homo sapien
gcggtcctgagcgacccagcagaca

SEQ ID NO: 3147442 - DNA, 25 bp, Homo sapien
aggtgtcgcgctgcaacctgttcag

SEQ ID NO: 3147443 - DNA, 25 bp, Homo sapien
cagacagcgcaggtgtcgcgctgca

SEQ ID NO: 3147444 - DNA, 25 bp, Homo sapien
gctgcaacctgttcagccggccggg

SEQ ID NO: 3147445 - DNA, 25 bp, Homo sapien
gaagccgaggtcaaagtggatcccg

SEQ ID NO: 3147446 - DNA, 25 bp, Homo sapien
taagggcctaggctctggaatccgg

SEQ ID NO: 3147447 - DNA, 25 bp, Homo sapien
caagacctgggtgcatttttcggag

SEQ ID NO: 3147448 - DNA, 25 bp, Homo sapien
tatgtgctaagcgagagatgccagc

SEQ ID NO: 3147449 - DNA, 25 bp, Homo sapien
gcgcaggaaggataagggagcagaa

SEQ ID NO: 3147450 - DNA, 25 bp, Homo sapien
gccccgattcacagccgtgctggga

SEQ ID NO: 3147451 - DNA, 25 bp, Homo sapien
ctgggacaagaagcgttgtcatttg

SEQ ID NO: 3147452 - DNA, 25 bp, Homo sapien
caagaagcgttgtcatttgagcccc

SEQ ID NO: 3147453 - DNA, 25 bp, Homo sapien
ctgggccgaggagggaaatatccat

SEQ ID NO: 3147454 - DNA, 25 bp, Homo sapien
aaattataatatcagccacagagca

SEQ ID NO: 3147455 - DNA, 25 bp, Homo sapien
cggaggagtctggcgcgacataaaa

SEQ ID NO: 3147456 - DNA, 25 bp, Homo sapien
tctgcatctttgaggcattgagcct

SEQ ID NO: 3147457 - DNA, 25 bp, Homo sapien
ggcgcgacataaaagcgcattatga

SEQ ID NO: 3147458 - DNA, 25 bp, Homo sapien
gactgcttccggaatgttctgccca

SEQ ID NO: 3147459 - DNA, 25 bp, Homo sapien
acaccttgaccttccctaaagcctg

SEQ ID NO: 3147460 - DNA, 25 bp, Homo sapien
cagcctccactcaggtcggaagact

SEQ ID NO: 3147461 - DNA, 25 bp, Homo sapien
ccactcaggtcggaagacttccagc

SEQ ID NO: 3147462 - DNA, 25 bp, Homo sapien
cagatgaaggcatgaggttaatttc

SEQ ID NO: 3147463 - DNA, 25 bp, Homo sapien
gcagatgaaggcatgaggttaattt

SEQ ID NO: 3147464 - DNA, 25 bp, Homo sapien
ggtacatacagtaagagccatttga

SEQ ID NO: 3147465 - DNA, 25 bp, Homo sapien
catgtttggtacatacagtaagagc

SEQ ID NO: 3147466 - DNA, 25 bp, Homo sapien
gccatttgattactgtcattgttgg

SEQ ID NO: 3147467 - DNA, 25 bp, Homo sapien
gtaagagccatttgattactgtcat

SEQ ID NO: 3147468 - DNA, 25 bp, Homo sapien
ttgtcaatagtagcctgaccttttt

SEQ ID NO: 3147469 - DNA, 25 bp, Homo sapien
tcaatagtagcctgacctttttccc

SEQ ID NO: 3147470 - DNA, 25 bp, Homo sapien
atagtagcctgacctttttccccat

SEQ ID NO: 3147471 - DNA, 25 bp, Homo sapien
gtcaatagtagcctgacctttttcc

SEQ ID NO: 3147472 - DNA, 25 bp, Homo sapien
aaagtgggcaaagtagataaagatc

SEQ ID NO: 3147473 - DNA, 25 bp, Homo sapien
tgggcaaagtagataaagatcattc

SEQ ID NO: 3147474 - DNA, 25 bp, Homo sapien
caaagtagataaagatcattcgagc

SEQ ID NO: 3147475 - DNA, 25 bp, Homo sapien
aagtagataaagatcattcgagctg

SEQ ID NO: 3147476 - DNA, 25 bp, Homo sapien
aatgccaacattgaagtcctcggtt

SEQ ID NO: 3147477 - DNA, 25 bp, Homo sapien
caacattgaagtcctcggttggagt

SEQ ID NO: 3147478 - DNA, 25 bp, Homo sapien
ccaacattgaagtcctcggttggag

SEQ ID NO: 3147479 - DNA, 25 bp, Homo sapien
tgccaacattgaagtcctcggttgg

SEQ ID NO: 3147480 - DNA, 25 bp, Homo sapien
tagatacagccattcagccggttac

SEQ ID NO: 3147481 - DNA, 25 bp, Homo sapien
tcagggctgtctcttgcttccgcgg

SEQ ID NO: 3147482 - DNA, 25 bp, Homo sapien
tgtcctcccagttcgcacgtgtgaa

SEQ ID NO: 3147483 - DNA, 25 bp, Homo sapien
aacagggaggctttcagtggccgct

SEQ ID NO: 3147484 - DNA, 25 bp, Homo sapien
ctgtgcatttgtgccctgaaggtcc

SEQ ID NO: 3147485 - DNA, 25 bp, Homo sapien
ttgaagttgcctggtgttttgattc

SEQ ID NO: 3147486 - DNA, 25 bp, Homo sapien
gaaggtcccttccaaatggatacta

SEQ ID NO: 3147487 - DNA, 25 bp, Homo sapien
tttccagaattgaagttgcctggtg

SEQ ID NO: 3147488 - DNA, 25 bp, Homo sapien
ttgggggccgtctgttcagtttcac

SEQ ID NO: 3147489 - DNA, 25 bp, Homo sapien
cttcttgggggccgtctgttcagtt

SEQ ID NO: 3147490 - DNA, 25 bp, Homo sapien
tcttgggggccgtctgttcagtttc

SEQ ID NO: 3147491 - DNA, 25 bp, Homo sapien
ccttcttgggggccgtctgttcagt

SEQ ID NO: 3147492 - DNA, 25 bp, Homo sapien
ttgaaacgggcaaatgaatgtattc

SEQ ID NO: 3147493 - DNA, 25 bp, Homo sapien
tgaaacgggcaaatgaatgtattca

SEQ ID NO: 3147494 - DNA, 25 bp, Homo sapien
cttgaaacgggcaaatgaatgtatt

SEQ ID NO: 3147495 - DNA, 25 bp, Homo sapien
gaaacgggcaaatgaatgtattcat

SEQ ID NO: 3147496 - DNA, 25 bp, Homo sapien
ttgaccagctgcttgaggtggccac

SEQ ID NO: 3147497 - DNA, 25 bp, Homo sapien
ggagcgcctgtcttgtccagcgccc

SEQ ID NO: 3147498 - DNA, 25 bp, Homo sapien
ggcggattggccttgctgacctgat

SEQ ID NO: 3147499 - DNA, 25 bp, Homo sapien
gacctgatacatcgcagctcttctc

SEQ ID NO: 3147500 - DNA, 25 bp, Homo sapien
acccgatccccatcgccaaggttgg

SEQ ID NO: 3147501 - DNA, 25 bp, Homo sapien
tggagctgacctcccacccgatccc

SEQ ID NO: 3147502 - DNA, 25 bp, Homo sapien
catcgccaaggttgggaaacaagca

SEQ ID NO: 3147503 - DNA, 25 bp, Homo sapien
ggcaccctgacttcgctgctctctg

SEQ ID NO: 3147504 - DNA, 25 bp, Homo sapien
gggagaggcctggagtccgggaggc

SEQ ID NO: 3147505 - DNA, 25 bp, Homo sapien
gagggagaggcctggagtccgggag

SEQ ID NO: 3147506 - DNA, 25 bp, Homo sapien
ctggagtccgggaggccccgctttg

SEQ ID NO: 3147507 - DNA, 25 bp, Homo sapien
gagaggcctggagtccgggaggccc

SEQ ID NO: 3147508 - DNA, 25 bp, Homo sapien
tacactggtattgcggccttcataa

SEQ ID NO: 3147509 - DNA, 25 bp, Homo sapien
tattgcggccttcataaacatcgcc

SEQ ID NO: 3147510 - DNA, 25 bp, Homo sapien
taaacatcgccattatggtttataa

SEQ ID NO: 3147511 - DNA, 25 bp, Homo sapien
tataaggacgccattgtggtgaggc

SEQ ID NO: 3147512 - DNA, 25 bp, Homo sapien
gaatgcgcgcaccttcaacgtaagt

SEQ ID NO: 3147513 - DNA, 25 bp, Homo sapien
aaaataatcgagaccggcggaggca

SEQ ID NO: 3147514 - DNA, 25 bp, Homo sapien
taacgccagcgcctgagacggtttt

SEQ ID NO: 3147515 - DNA, 25 bp, Homo sapien
tgacggctcatcatgtataaaatgg

SEQ ID NO: 3147516 - DNA, 25 bp, Homo sapien
ccttgtggacttttgtgctcaaggc

SEQ ID NO: 3147517 - DNA, 25 bp, Homo sapien
gtccttgtggacttttgtgctcaag

SEQ ID NO: 3147518 - DNA, 25 bp, Homo sapien
cagtccttgtggacttttgtgctca

SEQ ID NO: 3147519 - DNA, 25 bp, Homo sapien
agtccttgtggacttttgtgctcaa

SEQ ID NO: 3147520 - DNA, 25 bp, Homo sapien
cagagtgctgccttgtatgcgatca

SEQ ID NO: 3147521 - DNA, 25 bp, Homo sapien
agccattgcctttttatgcagagtg

SEQ ID NO: 3147522 - DNA, 25 bp, Homo sapien
tctggggtctgtaagttactctgtc

SEQ ID NO: 3147523 - DNA, 25 bp, Homo sapien
caaatgtgtgggccctttttcaggt

SEQ ID NO: 3147524 - DNA, 25 bp, Homo sapien
cactgagctacaattgtatgtataa

SEQ ID NO: 3147525 - DNA, 25 bp, Homo sapien
ataattgtgtggtatcttaaaggca

SEQ ID NO: 3147526 - DNA, 25 bp, Homo sapien
tgtcaagaggactttcatgcttttc

SEQ ID NO: 3147527 - DNA, 25 bp, Homo sapien
ttttcttcacattgtcaagaggact

SEQ ID NO: 3147528 - DNA, 25 bp, Homo sapien
ccttagccagctgcatgacccgcat

SEQ ID NO: 3147529 - DNA, 25 bp, Homo sapien
gccccttagccagctgcatgacccg

SEQ ID NO: 3147530 - DNA, 25 bp, Homo sapien
gccttctgccccttagccagctgca

SEQ ID NO: 3147531 - DNA, 25 bp, Homo sapien
agggccttctgccccttagccagct

SEQ ID NO: 3147532 - DNA, 25 bp, Homo sapien
gttgtccagcagccgtttctcaaac

SEQ ID NO: 3147533 - DNA, 25 bp, Homo sapien
taggtaatgacgatcaggttgtcca

SEQ ID NO: 3147534 - DNA, 25 bp, Homo sapien
ctaggtaatgacgatcaggttgtcc

SEQ ID NO: 3147535 - DNA, 25 bp, Homo sapien
aggttgtccagcagccgtttctcaa

SEQ ID NO: 3147536 - DNA, 25 bp, Homo sapien
ctgaaggaaggtgatactcacaaag

SEQ ID NO: 3147537 - DNA, 25 bp, Homo sapien
tgaaggaaggtgatactcacaaaga

SEQ ID NO: 3147538 - DNA, 25 bp, Homo sapien
gaaggaaggtgatactcacaaagac

SEQ ID NO: 3147539 - DNA, 25 bp, Homo sapien
tccaggccagaaagatgccaaagat

SEQ ID NO: 3147540 - DNA, 25 bp, Homo sapien
gctttgatgtcactcaggaggttcc

SEQ ID NO: 3147541 - DNA, 25 bp, Homo sapien
ggctagcccagggtactctccctat

SEQ ID NO: 3147542 - DNA, 25 bp, Homo sapien
ccctataaggtcagatgattagtaa

SEQ ID NO: 3147543 - DNA, 25 bp, Homo sapien
ttttggacccacttggctagcccag

SEQ ID NO: 3147544 - DNA, 25 bp, Homo sapien
aagacttgtgattattttggaccca

SEQ ID NO: 3147545 - DNA, 25 bp, Homo sapien
gttattgccgaacccggaagtgctc

SEQ ID NO: 3147546 - DNA, 25 bp, Homo sapien
ccgccggctccaggttattgccgaa

SEQ ID NO: 3147547 - DNA, 25 bp, Homo sapien
gctccaggttattgccgaacccgga

SEQ ID NO: 3147548 - DNA, 25 bp, Homo sapien
gccgaacccggaagtgctcctttca

SEQ ID NO: 3147549 - DNA, 25 bp, Homo sapien
agaaagacgggagcgaaggtggagc

SEQ ID NO: 3147550 - DNA, 25 bp, Homo sapien
gtgaagccctaaagagccaacctac

SEQ ID NO: 3147551 - DNA, 25 bp, Homo sapien
gccgagatcaaagcggtgtttccag

SEQ ID NO: 3147552 - DNA, 25 bp, Homo sapien
tggagcttcggggtgaagccctaaa

SEQ ID NO: 3147553 - DNA, 25 bp, Homo sapien
cagccgactggatccagggcacccg

SEQ ID NO: 3147554 - DNA, 25 bp, Homo sapien
ggtgcagccgactggatccagggca

SEQ ID NO: 3147555 - DNA, 25 bp, Homo sapien
gccgactggatccagggcacccgca

SEQ ID NO: 3147556 - DNA, 25 bp, Homo sapien
ctggtgcagccgactggatccaggg

SEQ ID NO: 3147557 - DNA, 25 bp, Homo sapien
ctccaccagggaagggtctcgctcg

SEQ ID NO: 3147558 - DNA, 25 bp, Homo sapien
gcctccaccagggaagggtctcgct

SEQ ID NO: 3147559 - DNA, 25 bp, Homo sapien
tccaccagggaagggtctcgctcgc

SEQ ID NO: 3147560 - DNA, 25 bp, Homo sapien
cctccaccagggaagggtctcgctc

SEQ ID NO: 3147561 - DNA, 25 bp, Homo sapien
ttccctgcctcgcgccacacacagg

SEQ ID NO: 3147562 - DNA, 25 bp, Homo sapien
aggccggatgcaccctgccggaact

SEQ ID NO: 3147563 - DNA, 25 bp, Homo sapien
acacacaggccggatgcaccctgcc

SEQ ID NO: 3147564 - DNA, 25 bp, Homo sapien
cggatgcaccctgccggaactctga

SEQ ID NO: 3147565 - DNA, 25 bp, Homo sapien
cgccgcaaccgcgaagagagaagaa

SEQ ID NO: 3147566 - DNA, 25 bp, Homo sapien
ctgcgacgccgcaaccgcgaagaga

SEQ ID NO: 3147567 - DNA, 25 bp, Homo sapien
aaggggagagaaaacgtcagcgctg

SEQ ID NO: 3147568 - DNA, 25 bp, Homo sapien
ccgcaaccgcgaagagagaagaaag

SEQ ID NO: 3147569 - DNA, 25 bp, Homo sapien
gggccgttcggggtcgtatctgcca

SEQ ID NO: 3147570 - DNA, 25 bp, Homo sapien
ggccgttcggggtcgtatctgccat

SEQ ID NO: 3147571 - DNA, 25 bp, Homo sapien
tgcaaatcaagccagactaccctgc

SEQ ID NO: 3147572 - DNA, 25 bp, Homo sapien
ggactcgcaacgcttcctgcttctt

SEQ ID NO: 3147573 - DNA, 25 bp, Homo sapien
tcctaactcttgcaaatcaagccag

SEQ ID NO: 3147574 - DNA, 25 bp, Homo sapien
ctgagcttctggaacgcctcgggac

SEQ ID NO: 3147575 - DNA, 25 bp, Homo sapien
tcctagattaaactttcctatacca

SEQ ID NO: 3147576 - DNA, 25 bp, Homo sapien
tggtcctagattaaactttcctata

SEQ ID NO: 3147577 - DNA, 25 bp, Homo sapien
cctagattaaactttcctataccat

SEQ ID NO: 3147578 - DNA, 25 bp, Homo sapien
ctagattaaactttcctataccatt

SEQ ID NO: 3147579 - DNA, 25 bp, Homo sapien
tgtccagtttattggtcatcatgaa

SEQ ID NO: 3147580 - DNA, 25 bp, Homo sapien
agtaaactgtgaacaagcgagaaag

SEQ ID NO: 3147581 - DNA, 25 bp, Homo sapien
agcgagaaagccacattgccgtgtc

SEQ ID NO: 3147582 - DNA, 25 bp, Homo sapien
cattgccgtgtccagtttattggtc

SEQ ID NO: 3147583 - DNA, 25 bp, Homo sapien
ggaatgctctgcttaactggaagtg

SEQ ID NO: 3147584 - DNA, 25 bp, Homo sapien
tgagtgaatacaacaggtagtggca

SEQ ID NO: 3147585 - DNA, 25 bp, Homo sapien
gctgtcctctaacaaagcctgggcc

SEQ ID NO: 3147586 - DNA, 25 bp, Homo sapien
catttgccagcaaagcacgttggta

SEQ ID NO: 3147587 - DNA, 25 bp, Homo sapien
tggcaatttcattgttaacaaggta

SEQ ID NO: 3147588 - DNA, 25 bp, Homo sapien
cattgttaacaaggtagaaaaggat

SEQ ID NO: 3147589 - DNA, 25 bp, Homo sapien
tcattgttaacaaggtagaaaagga

SEQ ID NO: 3147590 - DNA, 25 bp, Homo sapien
ttagttggcaatttcattgttaaca

SEQ ID NO: 3147591 - DNA, 25 bp, Homo sapien
aatgaagtgccgagaacaaacccag

SEQ ID NO: 3147592 - DNA, 25 bp, Homo sapien
tgaagtgccgagaacaaacccaggc

SEQ ID NO: 3147593 - DNA, 25 bp, Homo sapien
aagtgccgagaacaaacccaggctt

SEQ ID NO: 3147594 - DNA, 25 bp, Homo sapien
aaatgaagtgccgagaacaaaccca

SEQ ID NO: 3147595 - DNA, 25 bp, Homo sapien
tttcacattttaaagtcagaaattc

SEQ ID NO: 3147596 - DNA, 25 bp, Homo sapien
gctcttcaaagtttagatttcacat

SEQ ID NO: 3147597 - DNA, 25 bp, Homo sapien
atcagctcttcaaagtttagatttc

SEQ ID NO: 3147598 - DNA, 25 bp, Homo sapien
cagctcttcaaagtttagatttcac

SEQ ID NO: 3147599 - DNA, 25 bp, Homo sapien
catttgtatctagttcactggggtt

SEQ ID NO: 3147600 - DNA, 25 bp, Homo sapien
tggttaaattccatttgtatctagt

SEQ ID NO: 3147601 - DNA, 25 bp, Homo sapien
tcactggggttaagatggaaagagc

SEQ ID NO: 3147602 - DNA, 25 bp, Homo sapien
cactggggttaagatggaaagagct

SEQ ID NO: 3147603 - DNA, 25 bp, Homo sapien
tacccacattatctcagtgaagtga

SEQ ID NO: 3147604 - DNA, 25 bp, Homo sapien
tgaaattaccaggtttacccacata

SEQ ID NO: 3147605 - DNA, 25 bp, Homo sapien
tactacttactagccaatgtgtggg

SEQ ID NO: 3147606 - DNA, 25 bp, Homo sapien
gtattactcacccactaactgtaga

SEQ ID NO: 3147607 - DNA, 25 bp, Homo sapien
tatgtggcagcatgaagcaaagaga

SEQ ID NO: 3147608 - DNA, 25 bp, Homo sapien
tttcgtatatgtggcagcatgaagc

SEQ ID NO: 3147609 - DNA, 25 bp, Homo sapien
gtcaaggacctttttcgtatatgtg

SEQ ID NO: 3147610 - DNA, 25 bp, Homo sapien
gagaataacaagactgggaagatac

SEQ ID NO: 3147611 - DNA, 25 bp, Homo sapien
caagtttgtaaggtatagagggact

SEQ ID NO: 3147612 - DNA, 25 bp, Homo sapien
tatcaggtatgccagaattaaacac

SEQ ID NO: 3147613 - DNA, 25 bp, Homo sapien
taattcagaagtcagacaaagagca

SEQ ID NO: 3147614 - DNA, 25 bp, Homo sapien
tgacaactcaacaaactttagagac

SEQ ID NO: 3147615 - DNA, 25 bp, Homo sapien
gaatattttgttgattagcacttaa

SEQ ID NO: 3147616 - DNA, 25 bp, Homo sapien
tagcacttaatttgtccaagacaga

SEQ ID NO: 3147617 - DNA, 25 bp, Homo sapien
gaggtaaactatttgagccccttgc

SEQ ID NO: 3147618 - DNA, 25 bp, Homo sapien
taaaaactgtcgcaggcatcaggaa

SEQ ID NO: 3147619 - DNA, 25 bp, Homo sapien
tggatttaatatgcaactacctaga

SEQ ID NO: 3147620 - DNA, 25 bp, Homo sapien
agttgtaaagcttcataaaatatgc

SEQ ID NO: 3147621 - DNA, 25 bp, Homo sapien
tggctcatcagtaaatctaaacagc

SEQ ID NO: 3147622 - DNA, 25 bp, Homo sapien
aaatgtggcaacaacctaatgtgaa

SEQ ID NO: 3147623 - DNA, 25 bp, Homo sapien
aattcaactggagaatatgtgtatc

SEQ ID NO: 3147624 - DNA, 25 bp, Homo sapien
caattcatgtgtatactctcaaaac

SEQ ID NO: 3147625 - DNA, 25 bp, Homo sapien
catgtgtatactctcaaaacttaaa

SEQ ID NO: 3147626 - DNA, 25 bp, Homo sapien
acaaatacaagcgtgataaatatac

SEQ ID NO: 3147627 - DNA, 25 bp, Homo sapien
ttcgagacgaatatcgaagggtaag

SEQ ID NO: 3147628 - DNA, 25 bp, Homo sapien
tatcgaagggtaagaaatctatagt

SEQ ID NO: 3147629 - DNA, 25 bp, Homo sapien
tagtatataaaaggttggagcaaac

SEQ ID NO: 3147630 - DNA, 25 bp, Homo sapien
gacaatatgggtttcttcgagacga

SEQ ID NO: 3147631 - DNA, 25 bp, Homo sapien
cacaaatataagatgaagcagttca

SEQ ID NO: 3147632 - DNA, 25 bp, Homo sapien
ctgcacaaatataagatgaagcagt

SEQ ID NO: 3147633 - DNA, 25 bp, Homo sapien
tataagatgaagcagttcatgaagg

SEQ ID NO: 3147634 - DNA, 25 bp, Homo sapien
aagatgaagcagttcatgaaggcca

SEQ ID NO: 3147635 - DNA, 25 bp, Homo sapien
gcaagactatcagtgccactttcca

SEQ ID NO: 3147636 - DNA, 25 bp, Homo sapien
gaaaaagcaatacacaggcttacct

SEQ ID NO: 3147637 - DNA, 25 bp, Homo sapien
tgtctctgcgtcacactttgccaat

SEQ ID NO: 3147638 - DNA, 25 bp, Homo sapien
tgaaggtttgttgcaacaccgcata

SEQ ID NO: 3147639 - DNA, 25 bp, Homo sapien
tgtgttcaacaacaatcctcagttc

SEQ ID NO: 3147640 - DNA, 25 bp, Homo sapien
ctatggaactgttggtgccaatctg

SEQ ID NO: 3147641 - DNA, 25 bp, Homo sapien
tgcttataaaggcaatgctctggag

SEQ ID NO: 3147642 - DNA, 25 bp, Homo sapien
caaagtcttctcacaaacagtgggc

SEQ ID NO: 3147643 - DNA, 25 bp, Homo sapien
tatccaactggctaagaggcttaca

SEQ ID NO: 3147644 - DNA, 25 bp, Homo sapien
tgctttcaatggctaggtgacccca

SEQ ID NO: 3147645 - DNA, 25 bp, Homo sapien
gcaacggtaatgaagatcagcatga

SEQ ID NO: 3147646 - DNA, 25 bp, Homo sapien
tttaaccattagcaacacagcgcag

SEQ ID NO: 3147647 - DNA, 25 bp, Homo sapien
tgagtaaagggtatgcaaaagaact

SEQ ID NO: 3147648 - DNA, 25 bp, Homo sapien
taaaacgttaacatgagaggacctg

SEQ ID NO: 3147649 - DNA, 25 bp, Homo sapien
cagttagtagtattgttctgggcta

SEQ ID NO: 3147650 - DNA, 25 bp, Homo sapien
ggatcatggtataaacagagcacac

SEQ ID NO: 3147651 - DNA, 25 bp, Homo sapien
gggccatggaattcagggacttagt

SEQ ID NO: 3147652 - DNA, 25 bp, Homo sapien
gattataaacataactgtccgtggc

SEQ ID NO: 3147653 - DNA, 25 bp, Homo sapien
gccggttgtagatattcctattgca

SEQ ID NO: 3147654 - DNA, 25 bp, Homo sapien
tgccagaagaacaatggtactacac

SEQ ID NO: 3147655 - DNA, 25 bp, Homo sapien
ggatcccagggcttactttcacagg

SEQ ID NO: 3147656 - DNA, 25 bp, Homo sapien
gtcagatttcctacacgcacaagag

SEQ ID NO: 3147657 - DNA, 25 bp, Homo sapien
tgaagaatgtaactccccaacctgt

SEQ ID NO: 3147658 - DNA, 25 bp, Homo sapien
tcatataggctctgtggaattctcc

SEQ ID NO: 3147659 - DNA, 25 bp, Homo sapien
taacatcaataaaatcttagatata

SEQ ID NO: 3147660 - DNA, 25 bp, Homo sapien
ttaacatcaataaaatcttagatat

SEQ ID NO: 3147661 - DNA, 25 bp, Homo sapien
tttaacatcaataaaatcttagata

SEQ ID NO: 3147662 - DNA, 25 bp, Homo sapien
acatcaataaaatcttagatataac

SEQ ID NO: 3147663 - DNA, 25 bp, Homo sapien
ttccagagagatttttattccacaa

SEQ ID NO: 3147664 - DNA, 25 bp, Homo sapien
attccagagagatttttattccaca

SEQ ID NO: 3147665 - DNA, 25 bp, Homo sapien
gtgatgggctgaggataagaggagt

SEQ ID NO: 3147666 - DNA, 25 bp, Homo sapien
ttctaactacaaatgttcttagttc

SEQ ID NO: 3147667 - DNA, 25 bp, Homo sapien
tccagttacaccttagatcacattt

SEQ ID NO: 3147668 - DNA, 25 bp, Homo sapien
gaggagtgtgttcaaattcacctta

SEQ ID NO: 3147669 - DNA, 25 bp, Homo sapien
ctcagggatctcagtgcaccacttt

SEQ ID NO: 3147670 - DNA, 25 bp, Homo sapien
cacctgcttagactgataattctca

SEQ ID NO: 3147671 - DNA, 25 bp, Homo sapien
aagatctttgttgacacatcacctg

SEQ ID NO: 3147672 - DNA, 25 bp, Homo sapien
tagggcacatttgaccatagccaag

SEQ ID NO: 3147673 - DNA, 25 bp, Homo sapien
tgctactgaaagcatactactactg

SEQ ID NO: 3147674 - DNA, 25 bp, Homo sapien
tgtaataagtctccttacgtataac

SEQ ID NO: 3147675 - DNA, 25 bp, Homo sapien
taaggatgtgataattaccagtaag

SEQ ID NO: 3147676 - DNA, 25 bp, Homo sapien
acccctctggtaggttattaggatg

SEQ ID NO: 3147677 - DNA, 25 bp, Homo sapien
atggtgcaagctgttaacagatcta

SEQ ID NO: 3147678 - DNA, 25 bp, Homo sapien
gctgttaacagatctaccactctgg

SEQ ID NO: 3147679 - DNA, 25 bp, Homo sapien
cacatcgtgtgacctttgcagcagt

SEQ ID NO: 3147680 - DNA, 25 bp, Homo sapien
catcctgggacaactgttggcaata

SEQ ID NO: 3147681 - DNA, 25 bp, Homo sapien
agctgtcacaactggatactactgg

SEQ ID NO: 3147682 - DNA, 25 bp, Homo sapien
ggcagcctcttacgacagagaatta

SEQ ID NO: 3147683 - DNA, 25 bp, Homo sapien
tcctcctgcggaatgttcctcgtga

SEQ ID NO: 3147684 - DNA, 25 bp, Homo sapien
tggctaaacgggagtaactggtgac

SEQ ID NO: 3147685 - DNA, 25 bp, Homo sapien
gcattaaatcccattctggctacct

SEQ ID NO: 3147686 - DNA, 25 bp, Homo sapien
cgaggagtcgcagcctttcagcctc

SEQ ID NO: 3147687 - DNA, 25 bp, Homo sapien
gaagggatcttcagagttcgcaggc

SEQ ID NO: 3147688 - DNA, 25 bp, Homo sapien
aatgaagttaaatcggtcgctcgcc

SEQ ID NO: 3147689 - DNA, 25 bp, Homo sapien
cacgtacacgtggaacgaagggatc

SEQ ID NO: 3147690 - DNA, 25 bp, Homo sapien
tcgacctggttcactacgaagagct

SEQ ID NO: 3147691 - DNA, 25 bp, Homo sapien
gagagtccaactggttcagcgaggc

SEQ ID NO: 3147692 - DNA, 25 bp, Homo sapien
gcactgcacagcttggagcatctgt

SEQ ID NO: 3147693 - DNA, 25 bp, Homo sapien
gcatctgtgattccctcgaagcaca

SEQ ID NO: 3147694 - DNA, 25 bp, Homo sapien
tgtgaacacttaagaaccgcgacgc

SEQ ID NO: 3147695 - DNA, 25 bp, Homo sapien
cagataggcggactcattcacgtga

SEQ ID NO: 3147696 - DNA, 25 bp, Homo sapien
cacgctgggaatgtcgtcctcggag

SEQ ID NO: 3147697 - DNA, 25 bp, Homo sapien
gagccgtactagcaaactgctgggc

SEQ ID NO: 3147698 - DNA, 25 bp, Homo sapien
agtcatggaacaggcgagtggccct

SEQ ID NO: 3147699 - DNA, 25 bp, Homo sapien
ccatatcctgagaacgaccctgtga

SEQ ID NO: 3147700 - DNA, 25 bp, Homo sapien
taccccgctatagagaggatgcacc

SEQ ID NO: 3147701 - DNA, 25 bp, Homo sapien
tctttggactctcggacacagtgcc

SEQ ID NO: 3147702 - DNA, 25 bp, Homo sapien
tatctatgaaggacgtctgaacccc

SEQ ID NO: 3147703 - DNA, 25 bp, Homo sapien
tgaacacagacatacttgttgtcat

SEQ ID NO: 3147704 - DNA, 25 bp, Homo sapien
ttgaacacagacatacttgttgtca

SEQ ID NO: 3147705 - DNA, 25 bp, Homo sapien
tttgaacacagacatacttgttgtc

SEQ ID NO: 3147706 - DNA, 25 bp, Homo sapien
ccggaaacggcaacgtcatttagcg

SEQ ID NO: 3147707 - DNA, 25 bp, Homo sapien
ggaaacggcaacgtcatttagcgac

SEQ ID NO: 3147708 - DNA, 25 bp, Homo sapien
aaacggcaacgtcatttagcgacgc

SEQ ID NO: 3147709 - DNA, 25 bp, Homo sapien
gaaacggcaacgtcatttagcgacg

SEQ ID NO: 3147710 - DNA, 25 bp, Homo sapien
tgactccatagactggacatcagcg

SEQ ID NO: 3147711 - DNA, 25 bp, Homo sapien
caccggtaccaactgactccataga

SEQ ID NO: 3147712 - DNA, 25 bp, Homo sapien
tcagcgaacaccgatggcttcgccg

SEQ ID NO: 3147713 - DNA, 25 bp, Homo sapien
tagactggacatcagcgaacaccga

SEQ ID NO: 3147714 - DNA, 25 bp, Homo sapien
gctacatctgtgggccgcggcggcg

SEQ ID NO: 3147715 - DNA, 25 bp, Homo sapien
ccagctacatctgtgggccgcggcg

SEQ ID NO: 3147716 - DNA, 25 bp, Homo sapien
gcacagggaggaccagctacatctg

SEQ ID NO: 3147717 - DNA, 25 bp, Homo sapien
cacagggaggaccagctacatctgt

SEQ ID NO: 3147718 - DNA, 25 bp, Homo sapien
aggttctgaggttggcgaaaggcaa

SEQ ID NO: 3147719 - DNA, 25 bp, Homo sapien
agttcggcttctacggagccagcgg

SEQ ID NO: 3147720 - DNA, 25 bp, Homo sapien
cgaattgccccaggcgaggcgccga

SEQ ID NO: 3147721 - DNA, 25 bp, Homo sapien
cgaaaggcaagtgggcgaattgccc

SEQ ID NO: 3147722 - DNA, 25 bp, Homo sapien
cgaggtgcccacaagttcccgcggg

SEQ ID NO: 3147723 - DNA, 25 bp, Homo sapien
ccgcgatgcgcacgtaacattttgt

SEQ ID NO: 3147724 - DNA, 25 bp, Homo sapien
taggcttcagaggtgcaatccggcc

SEQ ID NO: 3147725 - DNA, 25 bp, Homo sapien
tgtttggtacaaagcggtaggcttc

SEQ ID NO: 3147726 - DNA, 25 bp, Homo sapien
ggagtccgcaatttccaaccgcgga

SEQ ID NO: 3147727 - DNA, 25 bp, Homo sapien
cgcaatttccaaccgcggaggtgag

SEQ ID NO: 3147728 - DNA, 25 bp, Homo sapien
tggaactttgcggagtccgcaattt

SEQ ID NO: 3147729 - DNA, 25 bp, Homo sapien
ttgcggagtccgcaatttccaaccg

SEQ ID NO: 3147730 - DNA, 25 bp, Homo sapien
ctaaatgaaggtgcgctggaaagct

SEQ ID NO: 3147731 - DNA, 25 bp, Homo sapien
tcaaccaagtgctaaatgaaggtgc

SEQ ID NO: 3147732 - DNA, 25 bp, Homo sapien
caagtgctaaatgaaggtgcgctgg

SEQ ID NO: 3147733 - DNA, 25 bp, Homo sapien
atgaaggtgcgctggaaagctccaa

SEQ ID NO: 3147734 - DNA, 25 bp, Homo sapien
caaaaagactgctcagccgaactga

SEQ ID NO: 3147735 - DNA, 25 bp, Homo sapien
gacccaaactgggttcattcaatga

SEQ ID NO: 3147736 - DNA, 25 bp, Homo sapien
caatgattgtcggatactttcgtac

SEQ ID NO: 3147737 - DNA, 25 bp, Homo sapien
caaaagatccgtagtgagtagcacc

SEQ ID NO: 3147738 - DNA, 25 bp, Homo sapien
tgcacccagccgatgattcattctg

SEQ ID NO: 3147739 - DNA, 25 bp, Homo sapien
gccctgggaatagtgctgttaaaat

SEQ ID NO: 3147740 - DNA, 25 bp, Homo sapien
tgtccataagggaacctggcagtat

SEQ ID NO: 3147741 - DNA, 25 bp, Homo sapien
ttcctgaggattagcagcatgagcc

SEQ ID NO: 3147742 - DNA, 25 bp, Homo sapien
aaagccaggttgtttgtcctgaatt

SEQ ID NO: 3147743 - DNA, 25 bp, Homo sapien
ttgctgactgaattcctatggtatt

SEQ ID NO: 3147744 - DNA, 25 bp, Homo sapien
gctgactgaattcctatggtattgt

SEQ ID NO: 3147745 - DNA, 25 bp, Homo sapien
aattcctatggtattgtttagccca

SEQ ID NO: 3147746 - DNA, 25 bp, Homo sapien
ccaaatgtcactaaattctgccact

SEQ ID NO: 3147747 - DNA, 25 bp, Homo sapien
cttccaaatgtcactaaattctgcc

SEQ ID NO: 3147748 - DNA, 25 bp, Homo sapien
gtttgaaaagcttccaaatgtcact

SEQ ID NO: 3147749 - DNA, 25 bp, Homo sapien
agcttccaaatgtcactaaattctg

SEQ ID NO: 3147750 - DNA, 25 bp, Homo sapien
ctttacttgactcagggtaccaata

SEQ ID NO: 3147751 - DNA, 25 bp, Homo sapien
acttgactcagggtaccaatatatg

SEQ ID NO: 3147752 - DNA, 25 bp, Homo sapien
gactcagggtaccaatatatggatg

SEQ ID NO: 3147753 - DNA, 25 bp, Homo sapien
cagggtaccaatatatggatgacta

SEQ ID NO: 3147754 - DNA, 25 bp, Homo sapien
tccactctgagtgtttgtgatccct

SEQ ID NO: 3147755 - DNA, 25 bp, Homo sapien
tgcatcttgcagaagtacatgcttt

SEQ ID NO: 3147756 - DNA, 25 bp, Homo sapien
tctgcatcttgcagaagtacatgct

SEQ ID NO: 3147757 - DNA, 25 bp, Homo sapien
aaatgactctcatctttgagagatg

SEQ ID NO: 3147758 - DNA, 25 bp, Homo sapien
gcatcttgcagaagtacatgcttta

SEQ ID NO: 3147759 - DNA, 25 bp, Homo sapien
ttctttgttgtctcttggatatttc

SEQ ID NO: 3147760 - DNA, 25 bp, Homo sapien
agtcactgagcctggttatagtatc

SEQ ID NO: 3147761 - DNA, 25 bp, Homo sapien
gagcctggttgattatagttttagc

SEQ ID NO: 3147762 - DNA, 25 bp, Homo sapien
gaccagaggtgaacactatcacatc

SEQ ID NO: 3147763 - DNA, 25 bp, Homo sapien
ttcatagtgatctaaatgtcttcca

SEQ ID NO: 3147764 - DNA, 25 bp, Homo sapien
gttcttgcttaagtggagctttgag

SEQ ID NO: 3147765 - DNA, 25 bp, Homo sapien
ggagctttgagttctgtgcctatac

SEQ ID NO: 3147766 - DNA, 25 bp, Homo sapien
cttgcttaagtggagctttgagttc

SEQ ID NO: 3147767 - DNA, 25 bp, Homo sapien
gctttgagttctgtgcctatacctt

SEQ ID NO: 3147768 - DNA, 25 bp, Homo sapien
ggatttgaggcagaactcatttatc

SEQ ID NO: 3147769 - DNA, 25 bp, Homo sapien
tgagtgtactttgagccatactccc

SEQ ID NO: 3147770 - DNA, 25 bp, Homo sapien
gagccatactcccttttcttaagga

SEQ ID NO: 3147771 - DNA, 25 bp, Homo sapien
catttatcgctctgactccagtgat

SEQ ID NO: 3147772 - DNA, 25 bp, Homo sapien
taaggagccagtagcaaattttcca

SEQ ID NO: 3147773 - DNA, 25 bp, Homo sapien
gaaagactagaattgctaatgctgg

SEQ ID NO: 3147774 - DNA, 25 bp, Homo sapien
agcaggtaacacactctaagaaagg

SEQ ID NO: 3147775 - DNA, 25 bp, Homo sapien
gattatttagatatgacacacggct

SEQ ID NO: 3147776 - DNA, 25 bp, Homo sapien
caatttaactcctaagattcttgtg

SEQ ID NO: 3147777 - DNA, 25 bp, Homo sapien
tcttgtgtgatggaaagcttttgaa

SEQ ID NO: 3147778 - DNA, 25 bp, Homo sapien
caatgacttaacaatttaactccta

SEQ ID NO: 3147779 - DNA, 25 bp, Homo sapien
gattcttgtgtgatggaaagctttt

SEQ ID NO: 3147780 - DNA, 25 bp, Homo sapien
atcttcatggggacttcgtcgtctg

SEQ ID NO: 3147781 - DNA, 25 bp, Homo sapien
acatctgatctcaagtatacagtaa

SEQ ID NO: 3147782 - DNA, 25 bp, Homo sapien
cacatctgatctcaagtatacagta

SEQ ID NO: 3147783 - DNA, 25 bp, Homo sapien
tcatggggacttcgtcgtctgattt

SEQ ID NO: 3147784 - DNA, 25 bp, Homo sapien
aattttcttacacattatgacatat

SEQ ID NO: 3147785 - DNA, 25 bp, Homo sapien
aattctctaatgagaatcttacaac

SEQ ID NO: 3147786 - DNA, 25 bp, Homo sapien
ttattaatccaaaatttggtttgca

SEQ ID NO: 3147787 - DNA, 25 bp, Homo sapien
tcttacaacaaagtgtaaggtgctt

SEQ ID NO: 3147788 - DNA, 25 bp, Homo sapien
gcttccttacgcaattttttctctc

SEQ ID NO: 3147789 - DNA, 25 bp, Homo sapien
tgcttccttacgcaattttttctct

SEQ ID NO: 3147790 - DNA, 25 bp, Homo sapien
ctatttctgcttccttacgcaattt

SEQ ID NO: 3147791 - DNA, 25 bp, Homo sapien
ttctgcttccttacgcaattttttc

SEQ ID NO: 3147792 - DNA, 25 bp, Homo sapien
tacgttcagcacatatgcctcacag

SEQ ID NO: 3147793 - DNA, 25 bp, Homo sapien
gggtcctgatatgtggttctgatat

SEQ ID NO: 3147794 - DNA, 25 bp, Homo sapien
gcaccacttggatcattccgatgaa

SEQ ID NO: 3147795 - DNA, 25 bp, Homo sapien
ggtgagcagcaccacttggatcatt

SEQ ID NO: 3147796 - DNA, 25 bp, Homo sapien
tcttgattaaagtctcctcgttctt

SEQ ID NO: 3147797 - DNA, 25 bp, Homo sapien
tcattcttgattaaagtctcctcgt

SEQ ID NO: 3147798 - DNA, 25 bp, Homo sapien
attcttgattaaagtctcctcgttc

SEQ ID NO: 3147799 - DNA, 25 bp, Homo sapien
tgattaaagtctcctcgttctttgg

SEQ ID NO: 3147800 - DNA, 25 bp, Homo sapien
tcttgctagccagtgcactgaacag

SEQ ID NO: 3147801 - DNA, 25 bp, Homo sapien
agattatgctttaagtgtaggtccc

SEQ ID NO: 3147802 - DNA, 25 bp, Homo sapien
tcaccatctgctttacactaggcga

SEQ ID NO: 3147803 - DNA, 25 bp, Homo sapien
tggtgaactgtacaacaagcagagg

SEQ ID NO: 3147804 - DNA, 25 bp, Homo sapien
cttggtatttcccaagaaatctctg

SEQ ID NO: 3147805 - DNA, 25 bp, Homo sapien
acactgatgctgttctggagcgtgg

SEQ ID NO: 3147806 - DNA, 25 bp, Homo sapien
aacactgatgctgttctggagcgtg

SEQ ID NO: 3147807 - DNA, 25 bp, Homo sapien
taacaggggcatttagcctgtttct

SEQ ID NO: 3147808 - DNA, 25 bp, Homo sapien
gcacgtcagatgggtctcctgcatg

SEQ ID NO: 3147809 - DNA, 25 bp, Homo sapien
cgtcagatgggtctcctgcatgcag

SEQ ID NO: 3147810 - DNA, 25 bp, Homo sapien
ggcatttagcctgtttctatttaag

SEQ ID NO: 3147811 - DNA, 25 bp, Homo sapien
tcagataatgagtgtatagcttctg

SEQ ID NO: 3147812 - DNA, 25 bp, Homo sapien
ctgagaacatacttgctgaaccggt

SEQ ID NO: 3147813 - DNA, 25 bp, Homo sapien
cttgctgaaccggtataaatccagg

SEQ ID NO: 3147814 - DNA, 25 bp, Homo sapien
caagtatcagataatgagtgtatag

SEQ ID NO: 3147815 - DNA, 25 bp, Homo sapien
cattgactattacagtcattgagaa

SEQ ID NO: 3147816 - DNA, 25 bp, Homo sapien
gtcagaggttcttaaagcataacaa

SEQ ID NO: 3147817 - DNA, 25 bp, Homo sapien
gctcagtgactgacaatgttatact

SEQ ID NO: 3147818 - DNA, 25 bp, Homo sapien
atacttcacattccattgtcagagg

SEQ ID NO: 3147819 - DNA, 25 bp, Homo sapien
gtgtctctcattgaagttctcccaa

SEQ ID NO: 3147820 - DNA, 25 bp, Homo sapien
aaaggtatcctcttaatataccaca

SEQ ID NO: 3147821 - DNA, 25 bp, Homo sapien
gctccttatcttcacgttattttta

SEQ ID NO: 3147822 - DNA, 25 bp, Homo sapien
tctcattgaagttctcccaaatcag

SEQ ID NO: 3147823 - DNA, 25 bp, Homo sapien
gacttcgtaaaattttggcatcagg

SEQ ID NO: 3147824 - DNA, 25 bp, Homo sapien
tattggatgctaaacactgtgaatg

SEQ ID NO: 3147825 - DNA, 25 bp, Homo sapien
ggttatactagcctcattaaagcag

SEQ ID NO: 3147826 - DNA, 25 bp, Homo sapien
gatattgttccataggttaccaagg

SEQ ID NO: 3147827 - DNA, 25 bp, Homo sapien
ccagctattttgtacttttagcaga

SEQ ID NO: 3147828 - DNA, 25 bp, Homo sapien
gattacatgggcccatcaccatgcc

SEQ ID NO: 3147829 - DNA, 25 bp, Homo sapien
gtggtgcaatctcggatcttggctc

SEQ ID NO: 3147830 - DNA, 25 bp, Homo sapien
ctgggattacatgggcccatcacca

SEQ ID NO: 3147831 - DNA, 25 bp, Homo sapien
caatttgtttatctgctgtactgct

SEQ ID NO: 3147832 - DNA, 25 bp, Homo sapien
cagttctggttgttaacaaatacac

SEQ ID NO: 3147833 - DNA, 25 bp, Homo sapien
tgttgccagtcagaaaagtacttca

SEQ ID NO: 3147834 - DNA, 25 bp, Homo sapien
gacatcagacgcaaccatttttccc

SEQ ID NO: 3147835 - DNA, 25 bp, Homo sapien
cattataattagagacacaggtcta

SEQ ID NO: 3147836 - DNA, 25 bp, Homo sapien
tgcccggccctgatagaacattttt

SEQ ID NO: 3147837 - DNA, 25 bp, Homo sapien
agtaaattccaagcatcgtaccatt

SEQ ID NO: 3147838 - DNA, 25 bp, Homo sapien
cttaagtctctcaagaagtgaggga

SEQ ID NO: 3147839 - DNA, 25 bp, Homo sapien
gcacctgcataaatggtaccttaga

SEQ ID NO: 3147840 - DNA, 25 bp, Homo sapien
ttaagtatcatactatccagcacct

SEQ ID NO: 3147841 - DNA, 25 bp, Homo sapien
ttatgtgcatataaccgcatataac

SEQ ID NO: 3147842 - DNA, 25 bp, Homo sapien
gtaccttagaagatctttctagttg

SEQ ID NO: 3147843 - DNA, 25 bp, Homo sapien
ggatctggtgtttgaacagacttac

SEQ ID NO: 3147844 - DNA, 25 bp, Homo sapien
aggatctggtgtttgaacagactta

SEQ ID NO: 3147845 - DNA, 25 bp, Homo sapien
gagaaggatctggtgtttgaacaga

SEQ ID NO: 3147846 - DNA, 25 bp, Homo sapien
gaaggatctggtgtttgaacagact

SEQ ID NO: 3147847 - DNA, 25 bp, Homo sapien
catgccgtgctacaaagcataaaaa

SEQ ID NO: 3147848 - DNA, 25 bp, Homo sapien
aagttctgcattttagatactacag

SEQ ID NO: 3147849 - DNA, 25 bp, Homo sapien
ggagaaaacaagatctccatgccgt

SEQ ID NO: 3147850 - DNA, 25 bp, Homo sapien
gcattttagatactacagtggaaga

SEQ ID NO: 3147851 - DNA, 25 bp, Homo sapien
ttactgaagctagtcttaaaatgat

SEQ ID NO: 3147852 - DNA, 25 bp, Homo sapien
aaataagtgtgtatctaatagaagt

SEQ ID NO: 3147853 - DNA, 25 bp, Homo sapien
ttcaaaagtgttagatggttatgtt

SEQ ID NO: 3147854 - DNA, 25 bp, Homo sapien
tgatgtttgtggaattcaaaagtgt

SEQ ID NO: 3147855 - DNA, 25 bp, Homo sapien
gatagtcctgcacccatcatgaaaa

SEQ ID NO: 3147856 - DNA, 25 bp, Homo sapien
tccatggtaccaagatagtcctgca

SEQ ID NO: 3147857 - DNA, 25 bp, Homo sapien
tattggttgaggatgaagcaatccc

SEQ ID NO: 3147858 - DNA, 25 bp, Homo sapien
taccaacaccactaattagcgaaga

SEQ ID NO: 3147859 - DNA, 25 bp, Homo sapien
gatactaatgatcctgctaaaatac

SEQ ID NO: 3147860 - DNA, 25 bp, Homo sapien
agatactaatgatcctgctaaaata

SEQ ID NO: 3147861 - DNA, 25 bp, Homo sapien
tactaatgatcctgctaaaatacaa

SEQ ID NO: 3147862 - DNA, 25 bp, Homo sapien
atactaatgatcctgctaaaataca

SEQ ID NO: 3147863 - DNA, 25 bp, Homo sapien
accatttcatagactttcaaagatg

SEQ ID NO: 3147864 - DNA, 25 bp, Homo sapien
gagcacagcagtgaatcaggcagtt

SEQ ID NO: 3147865 - DNA, 25 bp, Homo sapien
aaacatatacaattaggatctgtca

SEQ ID NO: 3147866 - DNA, 25 bp, Homo sapien
tagatgaagggaacattatacatag

SEQ ID NO: 3147867 - DNA, 25 bp, Homo sapien
aacaacagctttagtttattgaaga

SEQ ID NO: 3147868 - DNA, 25 bp, Homo sapien
taattactaataacaacagctttag

SEQ ID NO: 3147869 - DNA, 25 bp, Homo sapien
tataataaaatgaaccccatagttc

SEQ ID NO: 3147870 - DNA, 25 bp, Homo sapien
catagttctaaaccataataattaa

SEQ ID NO: 3147871 - DNA, 25 bp, Homo sapien
catacttgtaaaatgacattccttt

SEQ ID NO: 3147872 - DNA, 25 bp, Homo sapien
tcctttagcccgagcattcctacga

SEQ ID NO: 3147873 - DNA, 25 bp, Homo sapien
cattcctacgaagttcatttacagc

SEQ ID NO: 3147874 - DNA, 25 bp, Homo sapien
aaaatgacattcctttagcccgagc

SEQ ID NO: 3147875 - DNA, 25 bp, Homo sapien
gcagcagtatcctccaataatatca

SEQ ID NO: 3147876 - DNA, 25 bp, Homo sapien
catttgtactaggatcacgactttc

SEQ ID NO: 3147877 - DNA, 25 bp, Homo sapien
ctgttatagaagtaaggcccatgca

SEQ ID NO: 3147878 - DNA, 25 bp, Homo sapien
aactcccaagactgcagcagtatcc

SEQ ID NO: 3147879 - DNA, 25 bp, Homo sapien
catgctaaatggttgttttcgaaaa

SEQ ID NO: 3147880 - DNA, 25 bp, Homo sapien
tggaagctcgtcacctaaaattatt

SEQ ID NO: 3147881 - DNA, 25 bp, Homo sapien
caaagttgacatctgcatcaagtca

SEQ ID NO: 3147882 - DNA, 25 bp, Homo sapien
catcagagaatgctagtttggtatt

SEQ ID NO: 3147883 - DNA, 25 bp, Homo sapien
gactctcttctcatccaaccaagga

SEQ ID NO: 3147884 - DNA, 25 bp, Homo sapien
tgagcacatttagattagagacacc

SEQ ID NO: 3147885 - DNA, 25 bp, Homo sapien
gttctgtaagagaattaagccctac

SEQ ID NO: 3147886 - DNA, 25 bp, Homo sapien
ggatgctacaacttgctttcataag

SEQ ID NO: 3147887 - DNA, 25 bp, Homo sapien
tgcccacacccaaagaacctaggct

SEQ ID NO: 3147888 - DNA, 25 bp, Homo sapien
gcctaataaggtgcccacacccaaa

SEQ ID NO: 3147889 - DNA, 25 bp, Homo sapien
taataaggtgcccacacccaaagaa

SEQ ID NO: 3147890 - DNA, 25 bp, Homo sapien
cacccaaagaacctaggctgtcata

SEQ ID NO: 3147891 - DNA, 25 bp, Homo sapien
cagtgagccgttgtacttgttctgg

SEQ ID NO: 3147892 - DNA, 25 bp, Homo sapien
tggaccgccctaagagtgcttctgt

SEQ ID NO: 3147893 - DNA, 25 bp, Homo sapien
tacttgttctggctggatggaccgc

SEQ ID NO: 3147894 - DNA, 25 bp, Homo sapien
cattctccaggagttcagtgagccg

SEQ ID NO: 3147895 - DNA, 25 bp, Homo sapien
tgctgattatctcctaagtctccag

SEQ ID NO: 3147896 - DNA, 25 bp, Homo sapien
gcgaatataaggcaactctacaggt

SEQ ID NO: 3147897 - DNA, 25 bp, Homo sapien
cacaatgctgctagaatttcactga

SEQ ID NO: 3147898 - DNA, 25 bp, Homo sapien
tcaagattaaacatatagggcatag

SEQ ID NO: 3147899 - DNA, 25 bp, Homo sapien
gagacttcgatactttcagtaacgg

SEQ ID NO: 3147900 - DNA, 25 bp, Homo sapien
gaagggaggaagagctaatacaaca

SEQ ID NO: 3147901 - DNA, 25 bp, Homo sapien
gaaacctcgtctctcaggagtttga

SEQ ID NO: 3147902 - DNA, 25 bp, Homo sapien
tcagtaacggatacagaggccgggc

SEQ ID NO: 3147903 - DNA, 25 bp, Homo sapien
gagaaaccctgaagtcgaagaccca

SEQ ID NO: 3147904 - DNA, 25 bp, Homo sapien
ccatgttgaagaggcccatttggca

SEQ ID NO: 3147905 - DNA, 25 bp, Homo sapien
gagctaaatcttgcgaacaatcatg

SEQ ID NO: 3147906 - DNA, 25 bp, Homo sapien
tgtgagtaaggttagaagcagcccc

SEQ ID NO: 3147907 - DNA, 25 bp, Homo sapien
ccaaatatgatcttgtaacaactcg

SEQ ID NO: 3147908 - DNA, 25 bp, Homo sapien
taacaactcgcccatcaaaatctac

SEQ ID NO: 3147909 - DNA, 25 bp, Homo sapien
tactttacctaatcccagatctgtg

SEQ ID NO: 3147910 - DNA, 25 bp, Homo sapien
tacttctgccttaaatcttacttta

SEQ ID NO: 3147911 - DNA, 25 bp, Homo sapien
cttcagctcctaaagtatcaataat

SEQ ID NO: 3147912 - DNA, 25 bp, Homo sapien
tcagttccttctcaagtctatctac

SEQ ID NO: 3147913 - DNA, 25 bp, Homo sapien
taagcataaaggtctctagttcttc

SEQ ID NO: 3147914 - DNA, 25 bp, Homo sapien
tgtttaagcataaaggtctctagtt

SEQ ID NO: 3147915 - DNA, 25 bp, Homo sapien
tttaaaagacaacctgatcaggatc

SEQ ID NO: 3147916 - DNA, 25 bp, Homo sapien
tgcttataaatacctacacactgtg

SEQ ID NO: 3147917 - DNA, 25 bp, Homo sapien
catgtgatggatgcacttagtgtct

SEQ ID NO: 3147918 - DNA, 25 bp, Homo sapien
gtgtctgctgtagagtaagtactca

SEQ ID NO: 3147919 - DNA, 25 bp, Homo sapien
taagttgtgagctgaataaactgct

SEQ ID NO: 3147920 - DNA, 25 bp, Homo sapien
tattcaatcttgtgctaccttgcac

SEQ ID NO: 3147921 - DNA, 25 bp, Homo sapien
tactatgctgacatttcctgatggc

SEQ ID NO: 3147922 - DNA, 25 bp, Homo sapien
tgcaaagtgcggttcaaggactgct

SEQ ID NO: 3147923 - DNA, 25 bp, Homo sapien
tttcaacactcaatggcattactca

SEQ ID NO: 3147924 - DNA, 25 bp, Homo sapien
tagaagggcccgccaccataccaag

SEQ ID NO: 3147925 - DNA, 25 bp, Homo sapien
tggcattactcaacagagatgactc

SEQ ID NO: 3147926 - DNA, 25 bp, Homo sapien
tcaatggcattactcaacagagatg

SEQ ID NO: 3147927 - DNA, 25 bp, Homo sapien
gataggagaaaggtttatctatact

SEQ ID NO: 3147928 - DNA, 25 bp, Homo sapien
agggataggagaaaggtttatctat

SEQ ID NO: 3147929 - DNA, 25 bp, Homo sapien
aacttaatggagggataggagaaag

SEQ ID NO: 3147930 - DNA, 25 bp, Homo sapien
ttaatcatcataaacaaaaaactta

SEQ ID NO: 3147931 - DNA, 25 bp, Homo sapien
ggtaggtctgcatatgatgagcctt

SEQ ID NO: 3147932 - DNA, 25 bp, Homo sapien
taggtctgcatatgatgagccttcc

SEQ ID NO: 3147933 - DNA, 25 bp, Homo sapien
ctaaggtaggtctgcatatgatgag

SEQ ID NO: 3147934 - DNA, 25 bp, Homo sapien
gtctgcatatgatgagccttccagg

SEQ ID NO: 3147935 - DNA, 25 bp, Homo sapien
tctccaaatctacatgtcgaacttc

SEQ ID NO: 3147936 - DNA, 25 bp, Homo sapien
catgtcgaacttcaggatttcgttt

SEQ ID NO: 3147937 - DNA, 25 bp, Homo sapien
tctacatgtcgaacttcaggatttc

SEQ ID NO: 3147938 - DNA, 25 bp, Homo sapien
caaatctacatgtcgaacttcagga

SEQ ID NO: 3147939 - DNA, 25 bp, Homo sapien
tagagtggacggacaaacttgtttc

SEQ ID NO: 3147940 - DNA, 25 bp, Homo sapien
gctgtcctgcctgtaaaattataaa

SEQ ID NO: 3147941 - DNA, 25 bp, Homo sapien
tcagatttacataagtagtgccgcc

SEQ ID NO: 3147942 - DNA, 25 bp, Homo sapien
aaaaagtcatcacactggcccatgg

SEQ ID NO: 3147943 - DNA, 25 bp, Homo sapien
cacaattttccagtaaatgagattt

SEQ ID NO: 3147944 - DNA, 25 bp, Homo sapien
ttctgggtcaaaaatcaccattaca

SEQ ID NO: 3147945 - DNA, 25 bp, Homo sapien
tccagtaaatgagatttctgggtca

SEQ ID NO: 3147946 - DNA, 25 bp, Homo sapien
tctcacaattttccagtaaatgaga

SEQ ID NO: 3147947 - DNA, 25 bp, Homo sapien
aatgtacagcatgcaaaatactctg

SEQ ID NO: 3147948 - DNA, 25 bp, Homo sapien
cactaggaggaaactggatataatt

SEQ ID NO: 3147949 - DNA, 25 bp, Homo sapien
cacattaactttgagggtcgtcttg

SEQ ID NO: 3147950 - DNA, 25 bp, Homo sapien
ggtactttctcatatggcaatgaca

SEQ ID NO: 3147951 - DNA, 25 bp, Homo sapien
gagggaccaggaccatcttaatgtg

SEQ ID NO: 3147952 - DNA, 25 bp, Homo sapien
taaaacttaggcactctttagatgg

SEQ ID NO: 3147953 - DNA, 25 bp, Homo sapien
tcttaatgtgccagggaaatcagac

SEQ ID NO: 3147954 - DNA, 25 bp, Homo sapien
gaaatgctgccaaagcttgacaaat

SEQ ID NO: 3147955 - DNA, 25 bp, Homo sapien
tgcctggccttacaaagggtacttc

SEQ ID NO: 3147956 - DNA, 25 bp, Homo sapien
caaggtagtacagtgcccagtgaca

SEQ ID NO: 3147957 - DNA, 25 bp, Homo sapien
gaatgaacgcactctgatactcttg

SEQ ID NO: 3147958 - DNA, 25 bp, Homo sapien
ccccgactgcctaggtagttacaag

SEQ ID NO: 3147959 - DNA, 25 bp, Homo sapien
tcccaggtttgcacaccacttttgt

SEQ ID NO: 3147960 - DNA, 25 bp, Homo sapien
gctgtcccaggtttgcacaccactt

SEQ ID NO: 3147961 - DNA, 25 bp, Homo sapien
tgtcccaggtttgcacaccactttt

SEQ ID NO: 3147962 - DNA, 25 bp, Homo sapien
ccaggtttgcacaccacttttgttc

SEQ ID NO: 3147963 - DNA, 25 bp, Homo sapien
tgctccatggccgtacatgacaacg

SEQ ID NO: 3147964 - DNA, 25 bp, Homo sapien
cgctgaggctgatgagagcactttc

SEQ ID NO: 3147965 - DNA, 25 bp, Homo sapien
cttggagccctatcgtgctggtctt

SEQ ID NO: 3147966 - DNA, 25 bp, Homo sapien
tgctggtcttcgctgaggctgatga

SEQ ID NO: 3147967 - DNA, 25 bp, Homo sapien
gcttaagctattctcccgccttttg

SEQ ID NO: 3147968 - DNA, 25 bp, Homo sapien
ttaagctattctcccgccttttgcc

SEQ ID NO: 3147969 - DNA, 25 bp, Homo sapien
ctgggcttaagctattctcccgcct

SEQ ID NO: 3147970 - DNA, 25 bp, Homo sapien
cccgccttttgcctccctgagctgg

SEQ ID NO: 3147971 - DNA, 25 bp, Homo sapien
tacaaaattacctgctctcgggaag

SEQ ID NO: 3147972 - DNA, 25 bp, Homo sapien
tcttgcgtaaagcaggaaggctcaa

SEQ ID NO: 3147973 - DNA, 25 bp, Homo sapien
tcaagttacaacgaaagacaggagc

SEQ ID NO: 3147974 - DNA, 25 bp, Homo sapien
tattgtcctcgatgccaagagctgg

SEQ ID NO: 3147975 - DNA, 25 bp, Homo sapien
gcccaggtcagtctttgatctcctc

SEQ ID NO: 3147976 - DNA, 25 bp, Homo sapien
ccagcaatttgggtccttttcccat

SEQ ID NO: 3147977 - DNA, 25 bp, Homo sapien
ttcattgacgttttcccctctatct

SEQ ID NO: 3147978 - DNA, 25 bp, Homo sapien
taggctcagctttatcatcctgtat

SEQ ID NO: 3147979 - DNA, 25 bp, Homo sapien
gtgatctgggtaacattatatcccc

SEQ ID NO: 3147980 - DNA, 25 bp, Homo sapien
gtgcctgtccctcatcatagttatt

SEQ ID NO: 3147981 - DNA, 25 bp, Homo sapien
aatccataatagtaggaccttgtga

SEQ ID NO: 3147982 - DNA, 25 bp, Homo sapien
agtctcccaccctggtttttcatca

SEQ ID NO: 3147983 - DNA, 25 bp, Homo sapien
ggaagaaagatgtatacaacattgg

SEQ ID NO: 3147984 - DNA, 25 bp, Homo sapien
gatcttcctggatatggatggtaaa

SEQ ID NO: 3147985 - DNA, 25 bp, Homo sapien
tttaggaagaaagatgtatacaaca

SEQ ID NO: 3147986 - DNA, 25 bp, Homo sapien
tggtttaggaagaaagatgtataca

SEQ ID NO: 3147987 - DNA, 25 bp, Homo sapien
taagattcttcggtgatgatccacg

SEQ ID NO: 3147988 - DNA, 25 bp, Homo sapien
ggtgatgatccacgtcttgatttac

SEQ ID NO: 3147989 - DNA, 25 bp, Homo sapien
tcttcggtgatgatccacgtcttga

SEQ ID NO: 3147990 - DNA, 25 bp, Homo sapien
ccatgtaagattcttcggtgatgat

SEQ ID NO: 3147991 - DNA, 25 bp, Homo sapien
ctctggtcctggagattccaggaca

SEQ ID NO: 3147992 - DNA, 25 bp, Homo sapien
agtgtttaggtcctggtccagagag

SEQ ID NO: 3147993 - DNA, 25 bp, Homo sapien
taagtgtttaggtcctggtccagag

SEQ ID NO: 3147994 - DNA, 25 bp, Homo sapien
ctaagtgtttaggtcctggtccaga

SEQ ID NO: 3147995 - DNA, 25 bp, Homo sapien
gtttaggtcctggtccagagaggat

SEQ ID NO: 3147996 - DNA, 25 bp, Homo sapien
ctatggcatgctcccagtagacagc

SEQ ID NO: 3147997 - DNA, 25 bp, Homo sapien
gaaaaagagcatggcggacaccaaa

SEQ ID NO: 3147998 - DNA, 25 bp, Homo sapien
cactgggtaccaactaagcaggaga

SEQ ID NO: 3147999 - DNA, 25 bp, Homo sapien
caccaaatggtgtccgtaggtgaca

SEQ ID NO: 3148000 - DNA, 25 bp, Homo sapien
aaagttgtaagatctgccaatggga

SEQ ID NO: 3148001 - DNA, 25 bp, Homo sapien
aagttgtaagatctgccaatgggag

SEQ ID NO: 3148002 - DNA, 25 bp, Homo sapien
gttgtaagatctgccaatgggagtg

SEQ ID NO: 3148003 - DNA, 25 bp, Homo sapien
taaagttgtaagatctgccaatggg

SEQ ID NO: 3148004 - DNA, 25 bp, Homo sapien
cattattagccaatcaaagagcccc

SEQ ID NO: 3148005 - DNA, 25 bp, Homo sapien
gaacttgtctgaacggtctgggtgc

SEQ ID NO: 3148006 - DNA, 25 bp, Homo sapien
caatctgccattcagcaagcatgaa

SEQ ID NO: 3148007 - DNA, 25 bp, Homo sapien
cagcactaatttgtggtccaatcca

SEQ ID NO: 3148008 - DNA, 25 bp, Homo sapien
agaggagctgggcaagctggtggag

SEQ ID NO: 3148009 - DNA, 25 bp, Homo sapien
ggtggagggagggaatgcagttcat

SEQ ID NO: 3148010 - DNA, 25 bp, Homo sapien
gagctgggcaagctggtggagggag

SEQ ID NO: 3148011 - DNA, 25 bp, Homo sapien
ctgggcaagctggtggagggaggga

SEQ ID NO: 3148012 - DNA, 25 bp, Homo sapien
cagtggccccatcagtccttcattt

SEQ ID NO: 3148013 - DNA, 25 bp, Homo sapien
tttggaagctggttcagggaatagt

SEQ ID NO: 3148014 - DNA, 25 bp, Homo sapien
agtggccccatcagtccttcatttt

SEQ ID NO: 3148015 - DNA, 25 bp, Homo sapien
tggaagctggttcagggaatagtct

SEQ ID NO: 3148016 - DNA, 25 bp, Homo sapien
tctaagtcacttgatgctgcacaga

SEQ ID NO: 3148017 - DNA, 25 bp, Homo sapien
gcctggcagggtcttcacagacgat

SEQ ID NO: 3148018 - DNA, 25 bp, Homo sapien
caacagttaaatcaaagagctcctc

SEQ ID NO: 3148019 - DNA, 25 bp, Homo sapien
gaattctaagataacttcctgctct

SEQ ID NO: 3148020 - DNA, 25 bp, Homo sapien
acacagccacggaccgacacagttg

SEQ ID NO: 3148021 - DNA, 25 bp, Homo sapien
cagcgtggcatggtgttccaggtca

SEQ ID NO: 3148022 - DNA, 25 bp, Homo sapien
tcatgggcttttccgtagatgctgt

SEQ ID NO: 3148023 - DNA, 25 bp, Homo sapien
tgctgtttggtgagttcatctaggg

SEQ ID NO: 3148024 - DNA, 25 bp, Homo sapien
taagcactggaacaaataaatgcaa

SEQ ID NO: 3148025 - DNA, 25 bp, Homo sapien
gggtatgtttggtgagaacagcttc

SEQ ID NO: 3148026 - DNA, 25 bp, Homo sapien
cagccccatagaggattcgtttgta

SEQ ID NO: 3148027 - DNA, 25 bp, Homo sapien
gagaacagcttcctagatgtcccca

SEQ ID NO: 3148028 - DNA, 25 bp, Homo sapien
gctggagtctccacggttccttccg

SEQ ID NO: 3148029 - DNA, 25 bp, Homo sapien
ttttgtcagcaaactgtggtcctgc

SEQ ID NO: 3148030 - DNA, 25 bp, Homo sapien
ccgtgattcagagcaaggcggactg

SEQ ID NO: 3148031 - DNA, 25 bp, Homo sapien
gaagtctggaggaacattcgctgga

SEQ ID NO: 3148032 - DNA, 25 bp, Homo sapien
gctggtcccacctggttatcttgag

SEQ ID NO: 3148033 - DNA, 25 bp, Homo sapien
gttatcttgagtatggtgtggcccc

SEQ ID NO: 3148034 - DNA, 25 bp, Homo sapien
atggtgtggccccaactgctgcaga

SEQ ID NO: 3148035 - DNA, 25 bp, Homo sapien
tatagctggtcccacctggttatct

SEQ ID NO: 3148036 - DNA, 25 bp, Homo sapien
ccctgatgtcgtgtggctggtctac

SEQ ID NO: 3148037 - DNA, 25 bp, Homo sapien
caggtccctgatgtcgtgtggctgg

SEQ ID NO: 3148038 - DNA, 25 bp, Homo sapien
gtccctgatgtcgtgtggctggtct

SEQ ID NO: 3148039 - DNA, 25 bp, Homo sapien
ctgatgtcgtgtggctggtctactc

SEQ ID NO: 3148040 - DNA, 25 bp, Homo sapien
tacccacacctgagtctccccccag

SEQ ID NO: 3148041 - DNA, 25 bp, Homo sapien
tggctgtgtctggtcattgaacgtt

SEQ ID NO: 3148042 - DNA, 25 bp, Homo sapien
tcctttcagtatggggtggtcgctc

SEQ ID NO: 3148043 - DNA, 25 bp, Homo sapien
cagccggcagatgggcagctaatag

SEQ ID NO: 3148044 - DNA, 25 bp, Homo sapien
cccagggcttgtgggtcatttggac

SEQ ID NO: 3148045 - DNA, 25 bp, Homo sapien
caggtagacggctagatgagaagac

SEQ ID NO: 3148046 - DNA, 25 bp, Homo sapien
gtagacggctagatgagaagacctg

SEQ ID NO: 3148047 - DNA, 25 bp, Homo sapien
tgtgtgcaggtagacggctagatga

SEQ ID NO: 3148048 - DNA, 25 bp, Homo sapien
gatgagaagacctgagtagccacat

SEQ ID NO: 3148049 - DNA, 25 bp, Homo sapien
tacagtcattgttgactctacaaga

SEQ ID NO: 3148050 - DNA, 25 bp, Homo sapien
gcctcacattgtgggcttatctctg

SEQ ID NO: 3148051 - DNA, 25 bp, Homo sapien
aacagttgcattcttggtctttgca

SEQ ID NO: 3148052 - DNA, 25 bp, Homo sapien
ctgtgtcctgttggagacagtgctt

SEQ ID NO: 3148053 - DNA, 25 bp, Homo sapien
gatgctttcccggatctggaaaaag

SEQ ID NO: 3148054 - DNA, 25 bp, Homo sapien
ctgactttttggctgggtagcctaa

SEQ ID NO: 3148055 - DNA, 25 bp, Homo sapien
cacttcccagatccaaagggctggc

SEQ ID NO: 3148056 - DNA, 25 bp, Homo sapien
tacagtcttgattaatgggtttgct

SEQ ID NO: 3148057 - DNA, 25 bp, Homo sapien
taaagcgcagactgaccactcagtg

SEQ ID NO: 3148058 - DNA, 25 bp, Homo sapien
agactgaccactcagtgaaacacag

SEQ ID NO: 3148059 - DNA, 25 bp, Homo sapien
tctgctaaagcgcagactgaccact

SEQ ID NO: 3148060 - DNA, 25 bp, Homo sapien
gcgcagactgaccactcagtgaaac

SEQ ID NO: 3148061 - DNA, 25 bp, Homo sapien
ttgctgtaagtaaatgctatactaa

SEQ ID NO: 3148062 - DNA, 25 bp, Homo sapien
gctgtaagtaaatgctatactaatt

SEQ ID NO: 3148063 - DNA, 25 bp, Homo sapien
tgtaagtaaatgctatactaattga

SEQ ID NO: 3148064 - DNA, 25 bp, Homo sapien
taagtaaatgctatactaattgagc

SEQ ID NO: 3148065 - DNA, 25 bp, Homo sapien
gcgtttcggtccttctactgcagca

SEQ ID NO: 3148066 - DNA, 25 bp, Homo sapien
ttagctacgcatgcttcagtggccc

SEQ ID NO: 3148067 - DNA, 25 bp, Homo sapien
tgctgcgttcggcacatgcaaacct

SEQ ID NO: 3148068 - DNA, 25 bp, Homo sapien
tactcaatacaggatgtgctggcag

SEQ ID NO: 3148069 - DNA, 25 bp, Homo sapien
gcatacatatgtcagtaatcacaat

SEQ ID NO: 3148070 - DNA, 25 bp, Homo sapien
atcagttgatccctgaaggtggagg

SEQ ID NO: 3148071 - DNA, 25 bp, Homo sapien
gtaaattgattaaacaaatcgaaga

SEQ ID NO: 3148072 - DNA, 25 bp, Homo sapien
gtgagagaatcagttgatccctgaa

SEQ ID NO: 3148073 - DNA, 25 bp, Homo sapien
gcacccctgtctagcttgtaatgag

SEQ ID NO: 3148074 - DNA, 25 bp, Homo sapien
gcaagcacttggtttatttcgaggc

SEQ ID NO: 3148075 - DNA, 25 bp, Homo sapien
gaagaagtctgtggttggcaagcac

SEQ ID NO: 3148076 - DNA, 25 bp, Homo sapien
tgtaatgagcagttgaccccttgtc

SEQ ID NO: 3148077 - DNA, 25 bp, Homo sapien
agtgcttcactcctggccaagggtt

SEQ ID NO: 3148078 - DNA, 25 bp, Homo sapien
ataagagtacccgactttctcccat

SEQ ID NO: 3148079 - DNA, 25 bp, Homo sapien
cccattctgtgttggcttagagaga

SEQ ID NO: 3148080 - DNA, 25 bp, Homo sapien
cttagagagactgtcaatcagtgct

SEQ ID NO: 3148081 - DNA, 25 bp, Homo sapien
gaaaaatggtaagttgctgctcagc

SEQ ID NO: 3148082 - DNA, 25 bp, Homo sapien
aatggtaagttgctgctcagcggcc

SEQ ID NO: 3148083 - DNA, 25 bp, Homo sapien
ggtaagttgctgctcagcggccatg

SEQ ID NO: 3148084 - DNA, 25 bp, Homo sapien
agttgctgctcagcggccatgtgtg

SEQ ID NO: 3148085 - DNA, 25 bp, Homo sapien
gcttgcagactgaagagaggccagc

SEQ ID NO: 3148086 - DNA, 25 bp, Homo sapien
ttgaaatttccttgacagtagatgg

SEQ ID NO: 3148087 - DNA, 25 bp, Homo sapien
gagcagcacgaaaagtgaactgacc

SEQ ID NO: 3148088 - DNA, 25 bp, Homo sapien
gcagggtttagagcagcacgaaaag

SEQ ID NO: 3148089 - DNA, 25 bp, Homo sapien
tctacaaggtgtagccccaagcaca

SEQ ID NO: 3148090 - DNA, 25 bp, Homo sapien
gtatccgattagtctgtgattccac

SEQ ID NO: 3148091 - DNA, 25 bp, Homo sapien
tccacattatgtcggtagagctgta

SEQ ID NO: 3148092 - DNA, 25 bp, Homo sapien
ctggacagaccttatttcagctgga

SEQ ID NO: 3148093 - DNA, 25 bp, Homo sapien
ctactcgagaacttgttgcaactga

SEQ ID NO: 3148094 - DNA, 25 bp, Homo sapien
aactgagtgacatccgtttcacgac

SEQ ID NO: 3148095 - DNA, 25 bp, Homo sapien
cgagaacttgttgcaactgagtgac

SEQ ID NO: 3148096 - DNA, 25 bp, Homo sapien
tgttgcaactgagtgacatccgttt

SEQ ID NO: 3148097 - DNA, 25 bp, Homo sapien
tttatccacgcacgtgggcgcgcga

SEQ ID NO: 3148098 - DNA, 25 bp, Homo sapien
caatgagggttaagaaagagtccgc

SEQ ID NO: 3148099 - DNA, 25 bp, Homo sapien
gagggctgccgaattcccgcgttta

SEQ ID NO: 3148100 - DNA, 25 bp, Homo sapien
tctggagctaatcacagcgggtgcg

SEQ ID NO: 3148101 - DNA, 25 bp, Homo sapien
gtcccaacctgtggcgatcgccggg

SEQ ID NO: 3148102 - DNA, 25 bp, Homo sapien
ccagggacacgtcgcaagctgctgg

SEQ ID NO: 3148103 - DNA, 25 bp, Homo sapien
tacgagttccgcaggccgggagtca

SEQ ID NO: 3148104 - DNA, 25 bp, Homo sapien
gaagccagtcctgcgtgggatagca

SEQ ID NO: 3148105 - DNA, 25 bp, Homo sapien
agccctcgtggtagttgccctgcac

SEQ ID NO: 3148106 - DNA, 25 bp, Homo sapien
cgcagcagatggtagcgtccagcgt

SEQ ID NO: 3148107 - DNA, 25 bp, Homo sapien
gtggcagtactctccggactgctgg

SEQ ID NO: 3148108 - DNA, 25 bp, Homo sapien
cagcgtgtcgaagtcctctgggcac

SEQ ID NO: 3148109 - DNA, 25 bp, Homo sapien
cttgtttctaaatctccacctcgaa

SEQ ID NO: 3148110 - DNA, 25 bp, Homo sapien
ccttgtttctaaatctccacctcga

SEQ ID NO: 3148111 - DNA, 25 bp, Homo sapien
aaaggcaaaaacagacataaacaga

SEQ ID NO: 3148112 - DNA, 25 bp, Homo sapien
taaaaggcaaaaacagacataaaca

SEQ ID NO: 3148113 - DNA, 25 bp, Homo sapien
aaggcaaaaacagacataaacagat

SEQ ID NO: 3148114 - DNA, 25 bp, Homo sapien
aggcaaaaacagacataaacagatg

SEQ ID NO: 3148115 - DNA, 25 bp, Homo sapien
caaaggagaacctgcggatggagcc

SEQ ID NO: 3148116 - DNA, 25 bp, Homo sapien
tccttgggtctcaaacaggtgcaac

SEQ ID NO: 3148117 - DNA, 25 bp, Homo sapien
ataaatagccactacagagcccagg

SEQ ID NO: 3148118 - DNA, 25 bp, Homo sapien
tgatgaacgcaatgaagatggagcc

SEQ ID NO: 3148119 - DNA, 25 bp, Homo sapien
tctgactgagttgtggattcatggc

SEQ ID NO: 3148120 - DNA, 25 bp, Homo sapien
tagaaggtgctgtgttttcctagca

SEQ ID NO: 3148121 - DNA, 25 bp, Homo sapien
cactgatcagttacaagggaaattt

SEQ ID NO: 3148122 - DNA, 25 bp, Homo sapien
catggttaggttactcccgaaatca

SEQ ID NO: 3148123 - DNA, 25 bp, Homo sapien
tggtattatccgtccttgggcacag

SEQ ID NO: 3148124 - DNA, 25 bp, Homo sapien
ggttcagatctgtcccctatggtat

SEQ ID NO: 3148125 - DNA, 25 bp, Homo sapien
tgatttcttcatccgcaggataggc

SEQ ID NO: 3148126 - DNA, 25 bp, Homo sapien
tgggacacacatggcgcttaataaa

SEQ ID NO: 3148127 - DNA, 25 bp, Homo sapien
gacgacaattgggtggggacctcca

SEQ ID NO: 3148128 - DNA, 25 bp, Homo sapien
acgacaattgggtggggacctccat

SEQ ID NO: 3148129 - DNA, 25 bp, Homo sapien
cttcccagggacgacaattgggtgg

SEQ ID NO: 3148130 - DNA, 25 bp, Homo sapien
agtcttcccagggacgacaattggg

SEQ ID NO: 3148131 - DNA, 25 bp, Homo sapien
agtgatccaggccaatgcatggcta

SEQ ID NO: 3148132 - DNA, 25 bp, Homo sapien
gcatggctattgctgtaaatcttga

SEQ ID NO: 3148133 - DNA, 25 bp, Homo sapien
taaagttctatcacggcctacctgg

SEQ ID NO: 3148134 - DNA, 25 bp, Homo sapien
gacaaattaattggtcctctgcaca

SEQ ID NO: 3148135 - DNA, 25 bp, Homo sapien
tgtagctccttagttaccagtatgc

SEQ ID NO: 3148136 - DNA, 25 bp, Homo sapien
tacatggacttaccagcaaaatagg

SEQ ID NO: 3148137 - DNA, 25 bp, Homo sapien
tttgctaccaacagtaaatgaaggg

SEQ ID NO: 3148138 - DNA, 25 bp, Homo sapien
cacatctagcaagaccacaggtgta

SEQ ID NO: 3148139 - DNA, 25 bp, Homo sapien
gagggtgcctactcagtcttctaga

SEQ ID NO: 3148140 - DNA, 25 bp, Homo sapien
tacagatgggtatgcgttctctcaa

SEQ ID NO: 3148141 - DNA, 25 bp, Homo sapien
gacctatgtggaaatatgtgagccc

SEQ ID NO: 3148142 - DNA, 25 bp, Homo sapien
tgacttacgggacagaggatttagg

SEQ ID NO: 3148143 - DNA, 25 bp, Homo sapien
ttttatataaaggatttaagcatcc

SEQ ID NO: 3148144 - DNA, 25 bp, Homo sapien
tatataaaggatttaagcatccgtg

SEQ ID NO: 3148145 - DNA, 25 bp, Homo sapien
gccattttatataaaggatttaagc

SEQ ID NO: 3148146 - DNA, 25 bp, Homo sapien
ccattttatataaaggatttaagca

SEQ ID NO: 3148147 - DNA, 25 bp, Homo sapien
tgattttaagtctacgagagaatgt

SEQ ID NO: 3148148 - DNA, 25 bp, Homo sapien
gattttaagtctacgagagaatgtg

SEQ ID NO: 3148149 - DNA, 25 bp, Homo sapien
ccatgagcagctatttgtgtttatc

SEQ ID NO: 3148150 - DNA, 25 bp, Homo sapien
attccttatgcccatgccatgtcgg

SEQ ID NO: 3148151 - DNA, 25 bp, Homo sapien
tttctaaagatgtgatccccttggg

SEQ ID NO: 3148152 - DNA, 25 bp, Homo sapien
tatttgtgatgctgagagccaaggg

SEQ ID NO: 3148153 - DNA, 25 bp, Homo sapien
ttaatgcccttctagcatcagtgcc

SEQ ID NO: 3148154 - DNA, 25 bp, Homo sapien
gaagtacttagttccatctggttga

SEQ ID NO: 3148155 - DNA, 25 bp, Homo sapien
gatgaactgaccagtcatgatgtgc

SEQ ID NO: 3148156 - DNA, 25 bp, Homo sapien
tcagtgccacccatcgaagtactta

SEQ ID NO: 3148157 - DNA, 25 bp, Homo sapien
tattgaacgcttactttatcccagg

SEQ ID NO: 3148158 - DNA, 25 bp, Homo sapien
ccaagatctgggaagaataacacca

SEQ ID NO: 3148159 - DNA, 25 bp, Homo sapien
gacgttgactgaatagaggagctct

SEQ ID NO: 3148160 - DNA, 25 bp, Homo sapien
tgtctgacgctattctaggcactgt

SEQ ID NO: 3148161 - DNA, 25 bp, Homo sapien
caaaagcttaataagggtctccagg

SEQ ID NO: 3148162 - DNA, 25 bp, Homo sapien
gatatccacgtaatgaaacacggcc

SEQ ID NO: 3148163 - DNA, 25 bp, Homo sapien
tacgtaagtgtgttttggttgccca

SEQ ID NO: 3148164 - DNA, 25 bp, Homo sapien
acttgaggccgttctgcaggattcc

SEQ ID NO: 3148165 - DNA, 25 bp, Homo sapien
tacagtgggaatgctaacagaggtt

SEQ ID NO: 3148166 - DNA, 25 bp, Homo sapien
tagggtaggcttgactagcacgtcc

SEQ ID NO: 3148167 - DNA, 25 bp, Homo sapien
gacccagatggtttaagcaagtgtg

SEQ ID NO: 3148168 - DNA, 25 bp, Homo sapien
tacagcaaaaccagacatatcaagg

SEQ ID NO: 3148169 - DNA, 25 bp, Homo sapien
ccacaactatcaaaggtgcctaggg

SEQ ID NO: 3148170 - DNA, 25 bp, Homo sapien
cactgggaagtgtcttatcacatgc

SEQ ID NO: 3148171 - DNA, 25 bp, Homo sapien
ctgactttacaaccccactgggaag

SEQ ID NO: 3148172 - DNA, 25 bp, Homo sapien
aattgccattagctatcctgctgag

SEQ ID NO: 3148173 - DNA, 25 bp, Homo sapien
ggcttcacagtcttggtgcttgaaa

SEQ ID NO: 3148174 - DNA, 25 bp, Homo sapien
tcttaactcgtttggcgtctcgctg

SEQ ID NO: 3148175 - DNA, 25 bp, Homo sapien
tggcgtctcgctgttgggcttcaca

SEQ ID NO: 3148176 - DNA, 25 bp, Homo sapien
gatgccggactcttaactcgtttgg

SEQ ID NO: 3148177 - DNA, 25 bp, Homo sapien
ttaggctctttggctgctgtaatac

SEQ ID NO: 3148178 - DNA, 25 bp, Homo sapien
atacagctcctaggatgtttttgct

SEQ ID NO: 3148179 - DNA, 25 bp, Homo sapien
tgtatggctttttcaagctggctta

SEQ ID NO: 3148180 - DNA, 25 bp, Homo sapien
acagctcctaggatgtttttgctta

SEQ ID NO: 3148181 - DNA, 25 bp, Homo sapien
gatcaagtcctcaagaattgtgtca

SEQ ID NO: 3148182 - DNA, 25 bp, Homo sapien
tctgatggaattccccgtgtgaggt

SEQ ID NO: 3148183 - DNA, 25 bp, Homo sapien
tcttgttagaggcagctgcactctg

SEQ ID NO: 3148184 - DNA, 25 bp, Homo sapien
tgagctctcctcttgttagaggcag

SEQ ID NO: 3148185 - DNA, 25 bp, Homo sapien
tgcactctgatggaattccccgtgt

SEQ ID NO: 3148186 - DNA, 25 bp, Homo sapien
tataaagatgtgtgtggccccttcc

SEQ ID NO: 3148187 - DNA, 25 bp, Homo sapien
taattacatcagtgccactgccgga

SEQ ID NO: 3148188 - DNA, 25 bp, Homo sapien
tatccctggataggaataggtgggc

SEQ ID NO: 3148189 - DNA, 25 bp, Homo sapien
tcttttcccataaggactgtggttc

SEQ ID NO: 3148190 - DNA, 25 bp, Homo sapien
tatgttctagtacaggctacgagtt

SEQ ID NO: 3148191 - DNA, 25 bp, Homo sapien
tctgtctgccttacccgttttggaa

SEQ ID NO: 3148192 - DNA, 25 bp, Homo sapien
ggacctctttgaccatgtgttttta

SEQ ID NO: 3148193 - DNA, 25 bp, Homo sapien
taaatgcgttcgttgggccgccttc

SEQ ID NO: 3148194 - DNA, 25 bp, Homo sapien
cgtagcgtatggtagccttgcttct

SEQ ID NO: 3148195 - DNA, 25 bp, Homo sapien
cttccgtagcgtatggtagccttgc

SEQ ID NO: 3148196 - DNA, 25 bp, Homo sapien
gcgtatggtagccttgcttcttttg

SEQ ID NO: 3148197 - DNA, 25 bp, Homo sapien
tatggtagccttgcttcttttgtct

SEQ ID NO: 3148198 - DNA, 25 bp, Homo sapien
cacgcgtcatttgatctggtatcct

SEQ ID NO: 3148199 - DNA, 25 bp, Homo sapien
gtcatttgatctggtatcctttctg

SEQ ID NO: 3148200 - DNA, 25 bp, Homo sapien
gcaaaagcagggcaagccacgcgtc

SEQ ID NO: 3148201 - DNA, 25 bp, Homo sapien
cagggcaagccacgcgtcatttgat

SEQ ID NO: 3148202 - DNA, 25 bp, Homo sapien
ggtaattagggatgttgacgaagct

SEQ ID NO: 3148203 - DNA, 25 bp, Homo sapien
tcattatgacgcaaagaacagagaa

SEQ ID NO: 3148204 - DNA, 25 bp, Homo sapien
cagagccgtagaggtgattatacaa

SEQ ID NO: 3148205 - DNA, 25 bp, Homo sapien
taacatgggttacaggtggtgcaca

SEQ ID NO: 3148206 - DNA, 25 bp, Homo sapien
tctagaaacaatcgttggcctgtct

SEQ ID NO: 3148207 - DNA, 25 bp, Homo sapien
caaatccatttgtcagcttcaggac

SEQ ID NO: 3148208 - DNA, 25 bp, Homo sapien
gccttaacaggccagatgtacttgt

SEQ ID NO: 3148209 - DNA, 25 bp, Homo sapien
ccagatgtctttgtagccttaacag

SEQ ID NO: 3148210 - DNA, 25 bp, Homo sapien
tcagcggatccaagagacagccacc

SEQ ID NO: 3148211 - DNA, 25 bp, Homo sapien
ggatccaagagacagccacctgcac

SEQ ID NO: 3148212 - DNA, 25 bp, Homo sapien
cggatccaagagacagccacctgca

SEQ ID NO: 3148213 - DNA, 25 bp, Homo sapien
agcggatccaagagacagccacctg

SEQ ID NO: 3148214 - DNA, 25 bp, Homo sapien
cttggagcaacagccattgaggata

SEQ ID NO: 3148215 - DNA, 25 bp, Homo sapien
gctacttggagcaacagccattgag

SEQ ID NO: 3148216 - DNA, 25 bp, Homo sapien
ggagcaacagccattgaggataaat

SEQ ID NO: 3148217 - DNA, 25 bp, Homo sapien
gcaacagccattgaggataaattac

SEQ ID NO: 3148218 - DNA, 25 bp, Homo sapien
tcactaatggtctatcgatgttatt

SEQ ID NO: 3148219 - DNA, 25 bp, Homo sapien
gaaccactgagtcgtataggatgcg

SEQ ID NO: 3148220 - DNA, 25 bp, Homo sapien
ggagaacagttgcacccaaatatgg

SEQ ID NO: 3148221 - DNA, 25 bp, Homo sapien
gatgcgtgtatgtgggtcctcaccg

SEQ ID NO: 3148222 - DNA, 25 bp, Homo sapien
tcagctgggcaaattgaactcctgt

SEQ ID NO: 3148223 - DNA, 25 bp, Homo sapien
ggatcctggggagccatgcctgtca

SEQ ID NO: 3148224 - DNA, 25 bp, Homo sapien
ttcctgctgtaccatatcctttgcc

SEQ ID NO: 3148225 - DNA, 25 bp, Homo sapien
catggagcttcaacacccgtgttga

SEQ ID NO: 3148226 - DNA, 25 bp, Homo sapien
tgtcagtctctcaggcctctgatgc

SEQ ID NO: 3148227 - DNA, 25 bp, Homo sapien
caagccttgccccagagatatataa

SEQ ID NO: 3148228 - DNA, 25 bp, Homo sapien
tgtcaacaccacttctggaaacaag

SEQ ID NO: 3148229 - DNA, 25 bp, Homo sapien
tgtgtactgttttccaacaacctag

SEQ ID NO: 3148230 - DNA, 25 bp, Homo sapien
tggtttggttgatgattcagtgacc

SEQ ID NO: 3148231 - DNA, 25 bp, Homo sapien
caggaggaagtaaggactattttca

SEQ ID NO: 3148232 - DNA, 25 bp, Homo sapien
gctgaccaggaggaagtaaggacta

SEQ ID NO: 3148233 - DNA, 25 bp, Homo sapien
tggctgaccaggaggaagtaaggac

SEQ ID NO: 3148234 - DNA, 25 bp, Homo sapien
tgaccaggaggaagtaaggactatt

SEQ ID NO: 3148235 - DNA, 25 bp, Homo sapien
ctcagcgtggtttctcgtccgcctt

SEQ ID NO: 3148236 - DNA, 25 bp, Homo sapien
gcagcactgccctgtttgctctccc

SEQ ID NO: 3148237 - DNA, 25 bp, Homo sapien
gctgccaagcagagcgcagggtcct

SEQ ID NO: 3148238 - DNA, 25 bp, Homo sapien
tctcgtccgccttctgtctgtgctc

SEQ ID NO: 3148239 - DNA, 25 bp, Homo sapien
actcagaactgttaccagatcaaga

SEQ ID NO: 3148240 - DNA, 25 bp, Homo sapien
ccagatcaagaacggcactcgcctt

SEQ ID NO: 3148241 - DNA, 25 bp, Homo sapien
tgttaccagatcaagaacggcactc

SEQ ID NO: 3148242 - DNA, 25 bp, Homo sapien
gaactgttaccagatcaagaacggc

SEQ ID NO: 3148243 - DNA, 25 bp, Homo sapien
tcactgatcagtaggtgccaggtag

SEQ ID NO: 3148244 - DNA, 25 bp, Homo sapien
gaagactctgtgtcgtcattctcag

SEQ ID NO: 3148245 - DNA, 25 bp, Homo sapien
cattctcagcaacccagtagtcact

SEQ ID NO: 3148246 - DNA, 25 bp, Homo sapien
gttggcaactgattatagtcactgc

SEQ ID NO: 3148247 - DNA, 25 bp, Homo sapien
tgagttgactgaccacaaatccaca

SEQ ID NO: 3148248 - DNA, 25 bp, Homo sapien
ttggtgctgagttgactgaccacaa

SEQ ID NO: 3148249 - DNA, 25 bp, Homo sapien
ggtgctgagttgactgaccacaaat

SEQ ID NO: 3148250 - DNA, 25 bp, Homo sapien
gctgagttgactgaccacaaatcca

SEQ ID NO: 3148251 - DNA, 25 bp, Homo sapien
ctagctttaggatgctgctggtggc

SEQ ID NO: 3148252 - DNA, 25 bp, Homo sapien
tgggttctagctttaggatgctgct

SEQ ID NO: 3148253 - DNA, 25 bp, Homo sapien
tctgatgggcgctgggttctagctt

SEQ ID NO: 3148254 - DNA, 25 bp, Homo sapien
tcggtggccgctctgatgggcgctg

SEQ ID NO: 3148255 - DNA, 25 bp, Homo sapien
acatcgttgccccatgcaggagatc

SEQ ID NO: 3148256 - DNA, 25 bp, Homo sapien
tgcttttggccagctcacctgaacc

SEQ ID NO: 3148257 - DNA, 25 bp, Homo sapien
agctcacctgaacccacatcgttgc

SEQ ID NO: 3148258 - DNA, 25 bp, Homo sapien
agatctttggttctgagtgtaggtg

SEQ ID NO: 3148259 - DNA, 25 bp, Homo sapien
gaaggtgtgtatgagtatagcgata

SEQ ID NO: 3148260 - DNA, 25 bp, Homo sapien
gcgatacagcatgtcatcaatattt

SEQ ID NO: 3148261 - DNA, 25 bp, Homo sapien
aatctcaaagtaggtgtcattttac

SEQ ID NO: 3148262 - DNA, 25 bp, Homo sapien
ctgaagtggcactgtgtgagaaggt

SEQ ID NO: 3148263 - DNA, 25 bp, Homo sapien
cctcgaatgggtgttctccgcggga

SEQ ID NO: 3148264 - DNA, 25 bp, Homo sapien
agtgtactcgcagaccctttccagg

SEQ ID NO: 3148265 - DNA, 25 bp, Homo sapien
ggcgtgctttgcaccgcagtgtgac

SEQ ID NO: 3148266 - DNA, 25 bp, Homo sapien
gagcgtgtgtgtttatcctggaaga

SEQ ID NO: 3148267 - DNA, 25 bp, Homo sapien
atccgctcgcgcgccgaaggtaagg

SEQ ID NO: 3148268 - DNA, 25 bp, Homo sapien
gcgatgcccaccatgcggaggaccg

SEQ ID NO: 3148269 - DNA, 25 bp, Homo sapien
gatgcccaccatgcggaggaccgtg

SEQ ID NO: 3148270 - DNA, 25 bp, Homo sapien
aggaccgtgtcggagatccgctcgc

SEQ ID NO: 3148271 - DNA, 25 bp, Homo sapien
gctccactgcgatcaaaagccaggg

SEQ ID NO: 3148272 - DNA, 25 bp, Homo sapien
caagatgtgagagagtccgagtggc

SEQ ID NO: 3148273 - DNA, 25 bp, Homo sapien
agacccaacagctctttccggacga

SEQ ID NO: 3148274 - DNA, 25 bp, Homo sapien
agctctttccggacgacgggcggct

SEQ ID NO: 3148275 - DNA, 25 bp, Homo sapien
aaccacctgggccaatacttagttg

SEQ ID NO: 3148276 - DNA, 25 bp, Homo sapien
gagcctgaactagggagatgcaccg

SEQ ID NO: 3148277 - DNA, 25 bp, Homo sapien
cagatggcgaacagtcagtcgttcc

SEQ ID NO: 3148278 - DNA, 25 bp, Homo sapien
ggttagaattacacccagatggcga

SEQ ID NO: 3148279 - DNA, 25 bp, Homo sapien
tgaggatctctttcgctggttgctg

SEQ ID NO: 3148280 - DNA, 25 bp, Homo sapien
agttcagcagctcgccagaaacagc

SEQ ID NO: 3148281 - DNA, 25 bp, Homo sapien
taaaaggcctctatgtgaggatctc

SEQ ID NO: 3148282 - DNA, 25 bp, Homo sapien
gacaactttttagcatagatctcgg

SEQ ID NO: 3148283 - DNA, 25 bp, Homo sapien
tagccatattaacaagacatggtgg

SEQ ID NO: 3148284 - DNA, 25 bp, Homo sapien
taaccaatctaactatgtgaacaca

SEQ ID NO: 3148285 - DNA, 25 bp, Homo sapien
ggagattccagtgaactgaaattac

SEQ ID NO: 3148286 - DNA, 25 bp, Homo sapien
tctacctacacagtttctcaatttg

SEQ ID NO: 3148287 - DNA, 25 bp, Homo sapien
gcatcatgaatctggcaattggcca

SEQ ID NO: 3148288 - DNA, 25 bp, Homo sapien
tgagttccagtgagaaatttgcttg

SEQ ID NO: 3148289 - DNA, 25 bp, Homo sapien
taccccaactggaggtgtgagaaaa

SEQ ID NO: 3148290 - DNA, 25 bp, Homo sapien
tccgttgtaaacctttacagtggca

SEQ ID NO: 3148291 - DNA, 25 bp, Homo sapien
gtattacaggtcagcaacattccca

SEQ ID NO: 3148292 - DNA, 25 bp, Homo sapien
gacacatggccataggactaaattc

SEQ ID NO: 3148293 - DNA, 25 bp, Homo sapien
gggttgtcacttgcactcagatgct

SEQ ID NO: 3148294 - DNA, 25 bp, Homo sapien
gcagagacggctaattgtttcccaa

SEQ ID NO: 3148295 - DNA, 25 bp, Homo sapien
tttcattatcaccaagcgtataagg

SEQ ID NO: 3148296 - DNA, 25 bp, Homo sapien
accaagcgtataaggattttcaaag

SEQ ID NO: 3148297 - DNA, 25 bp, Homo sapien
ttcttgtagcccaatccccacttct

SEQ ID NO: 3148298 - DNA, 25 bp, Homo sapien
tatcaccaagcgtataaggattttc

SEQ ID NO: 3148299 - DNA, 25 bp, Homo sapien
ttcagccatgtctttcaaatggtgg

SEQ ID NO: 3148300 - DNA, 25 bp, Homo sapien
attttctctgttgcatttcgaactt

SEQ ID NO: 3148301 - DNA, 25 bp, Homo sapien
ttttcaaactctctgtgtcctggtc

SEQ ID NO: 3148302 - DNA, 25 bp, Homo sapien
tcttacatttccatcaaaggactat

SEQ ID NO: 3148303 - DNA, 25 bp, Homo sapien
gcctatttttatatcagcaccatcc

SEQ ID NO: 3148304 - DNA, 25 bp, Homo sapien
tatatgcctatttttatatcagcac

SEQ ID NO: 3148305 - DNA, 25 bp, Homo sapien
tatttttatatcagcaccatcctat

SEQ ID NO: 3148306 - DNA, 25 bp, Homo sapien
catgcccaacctctatatgcctatt

SEQ ID NO: 3148307 - DNA, 25 bp, Homo sapien
tactgtaggtttgatctgcaaacac

SEQ ID NO: 3148308 - DNA, 25 bp, Homo sapien
aacactgtctcatgctggccacagc

SEQ ID NO: 3148309 - DNA, 25 bp, Homo sapien
tgcaaacactgtctcatgctggcca

SEQ ID NO: 3148310 - DNA, 25 bp, Homo sapien
ttcccagtactgtaggtttgatctg

SEQ ID NO: 3148311 - DNA, 25 bp, Homo sapien
tacgttcagtcgatttgccccaggt

SEQ ID NO: 3148312 - DNA, 25 bp, Homo sapien
ttttgcattttttacgttcagtcga

SEQ ID NO: 3148313 - DNA, 25 bp, Homo sapien
tgccccaggtatatgactcacgttg

SEQ ID NO: 3148314 - DNA, 25 bp, Homo sapien
ccaacaattatatttcggattttgc

SEQ ID NO: 3148315 - DNA, 25 bp, Homo sapien
aggtgcatctactccataggcttca

SEQ ID NO: 3148316 - DNA, 25 bp, Homo sapien
catgttccgtgacagtggaggtttc

SEQ ID NO: 3148317 - DNA, 25 bp, Homo sapien
tagtggctcccctagtgaggcagct

SEQ ID NO: 3148318 - DNA, 25 bp, Homo sapien
tagctattgtcgctgtcaaggaagg

SEQ ID NO: 3148319 - DNA, 25 bp, Homo sapien
tatgtcagcattccagtgtccattc

SEQ ID NO: 3148320 - DNA, 25 bp, Homo sapien
ggaacctctgaccatatcctgatca

SEQ ID NO: 3148321 - DNA, 25 bp, Homo sapien
ctctccagggaatttctaattgaga

SEQ ID NO: 3148322 - DNA, 25 bp, Homo sapien
tttgacctccgggaacctctgacca

SEQ ID NO: 3148323 - DNA, 25 bp, Homo sapien
gatcaattcgcttgtctctccaggg

SEQ ID NO: 3148324 - DNA, 25 bp, Homo sapien
gaacagtttacagcattctggaccc

SEQ ID NO: 3148325 - DNA, 25 bp, Homo sapien
ccaattctagtgatggcagcactcc

SEQ ID NO: 3148326 - DNA, 25 bp, Homo sapien
tgcactagtccacttgccagatagc

SEQ ID NO: 3148327 - DNA, 25 bp, Homo sapien
tctggacccgttgttactgcactag

SEQ ID NO: 3148328 - DNA, 25 bp, Homo sapien
tatgtggccattctgctgtccatcg

SEQ ID NO: 3148329 - DNA, 25 bp, Homo sapien
gtatttgacgcctctgactgtgcca

SEQ ID NO: 3148330 - DNA, 25 bp, Homo sapien
aatccagagagcctgacggttgccc

SEQ ID NO: 3148331 - DNA, 25 bp, Homo sapien
cactgtgagaggacgcgatccgaaa

SEQ ID NO: 3148332 - DNA, 25 bp, Homo sapien
tcaaattgttaaatagagcctggcc

SEQ ID NO: 3148333 - DNA, 25 bp, Homo sapien
ttggtcaaattgttaaatagagcct

SEQ ID NO: 3148334 - DNA, 25 bp, Homo sapien
ttgttaaatagagcctggccagcac

SEQ ID NO: 3148335 - DNA, 25 bp, Homo sapien
aattgttaaatagagcctggccagc

SEQ ID NO: 3148336 - DNA, 25 bp, Homo sapien
tgctttgaacagcatagttttatct

SEQ ID NO: 3148337 - DNA, 25 bp, Homo sapien
taatctttgctcaaatgctttgaac

SEQ ID NO: 3148338 - DNA, 25 bp, Homo sapien
ctacactggtatttcaaggataata

SEQ ID NO: 3148339 - DNA, 25 bp, Homo sapien
tacactggtatttcaaggataataa

SEQ ID NO: 3148340 - DNA, 25 bp, Homo sapien
atccaagataccgactgctcacttt

SEQ ID NO: 3148341 - DNA, 25 bp, Homo sapien
caagataccgactgctcactttttc

SEQ ID NO: 3148342 - DNA, 25 bp, Homo sapien
agataccgactgctcactttttcct

SEQ ID NO: 3148343 - DNA, 25 bp, Homo sapien
tccaagataccgactgctcactttt

SEQ ID NO: 3148344 - DNA, 25 bp, Homo sapien
gctcttcaccaaaggtgatacgcga

SEQ ID NO: 3148345 - DNA, 25 bp, Homo sapien
tgatacgcgaataagaacagttgcc

SEQ ID NO: 3148346 - DNA, 25 bp, Homo sapien
gcatgtgaacctggctcttcaccaa

SEQ ID NO: 3148347 - DNA, 25 bp, Homo sapien
ccaaaggtgatacgcgaataagaac

SEQ ID NO: 3148348 - DNA, 25 bp, Homo sapien
tccagctcattaagtcccctgcaaa

SEQ ID NO: 3148349 - DNA, 25 bp, Homo sapien
caaagatggtggaagggtacaagtc

SEQ ID NO: 3148350 - DNA, 25 bp, Homo sapien
tctccatgttactctatctttccag

SEQ ID NO: 3148351 - DNA, 25 bp, Homo sapien
catgttactctatctttccagctca

SEQ ID NO: 3148352 - DNA, 25 bp, Homo sapien
tctagggagcccttcaaaactctcc

SEQ ID NO: 3148353 - DNA, 25 bp, Homo sapien
cattcggtgggttgtgcgctgccca

SEQ ID NO: 3148354 - DNA, 25 bp, Homo sapien
ctctccattcggtgggttgtgcgct

SEQ ID NO: 3148355 - DNA, 25 bp, Homo sapien
agcagcactatctctagggagccct

SEQ ID NO: 3148356 - DNA, 25 bp, Homo sapien
cccactttgtggcataacagagatg

SEQ ID NO: 3148357 - DNA, 25 bp, Homo sapien
gaacccaataaatcttccacaccaa

SEQ ID NO: 3148358 - DNA, 25 bp, Homo sapien
taactgcaaagacaatgaacccaat

SEQ ID NO: 3148359 - DNA, 25 bp, Homo sapien
tcaattactgaatgagcctagacgt

SEQ ID NO: 3148360 - DNA, 25 bp, Homo sapien
tccaccactttgtacgcagagaaat

SEQ ID NO: 3148361 - DNA, 25 bp, Homo sapien
tctgccaagatgcacgtggacaggt

SEQ ID NO: 3148362 - DNA, 25 bp, Homo sapien
gagaaatcagaccactctgccaaga

SEQ ID NO: 3148363 - DNA, 25 bp, Homo sapien
cactccaaaggttcaatgtcataaa

SEQ ID NO: 3148364 - DNA, 25 bp, Homo sapien
gaaggagcttcagaaactcgtcggc

SEQ ID NO: 3148365 - DNA, 25 bp, Homo sapien
tacacggtcaaattctagatcagtt

SEQ ID NO: 3148366 - DNA, 25 bp, Homo sapien
catctttcaaaggttgtccggacca

SEQ ID NO: 3148367 - DNA, 25 bp, Homo sapien
cacgaaggcaggtggtataaatcac

SEQ ID NO: 3148368 - DNA, 25 bp, Homo sapien
ggacagaaataagtgctccaatccc

SEQ ID NO: 3148369 - DNA, 25 bp, Homo sapien
gacagaaataagtgctccaatccct

SEQ ID NO: 3148370 - DNA, 25 bp, Homo sapien
gggacagaaataagtgctccaatcc

SEQ ID NO: 3148371 - DNA, 25 bp, Homo sapien
ctgggacagaaataagtgctccaat

SEQ ID NO: 3148372 - DNA, 25 bp, Homo sapien
caagatccaagtatccatctgtggt

SEQ ID NO: 3148373 - DNA, 25 bp, Homo sapien
caagtatccatctgtggttcgacgg

SEQ ID NO: 3148374 - DNA, 25 bp, Homo sapien
ccatctgtggttcgacggtctctgt

SEQ ID NO: 3148375 - DNA, 25 bp, Homo sapien
taaatgaaaccaagatccaagtatc

SEQ ID NO: 3148376 - DNA, 25 bp, Homo sapien
catcgcacagaaggtactcaatgtt

SEQ ID NO: 3148377 - DNA, 25 bp, Homo sapien
ttttaccctctagaacatcgcacag

SEQ ID NO: 3148378 - DNA, 25 bp, Homo sapien
aaatcttttaccctctagaacatcg

SEQ ID NO: 3148379 - DNA, 25 bp, Homo sapien
tttgttcggtgactgtttggcttct

SEQ ID NO: 3148380 - DNA, 25 bp, Homo sapien
atgctctctctcccaccttgttccc

SEQ ID NO: 3148381 - DNA, 25 bp, Homo sapien
ctctctctcccaccttgttccctta

SEQ ID NO: 3148382 - DNA, 25 bp, Homo sapien
tgctctctctcccaccttgttccct

SEQ ID NO: 3148383 - DNA, 25 bp, Homo sapien
tctctctcccaccttgttcccttaa

SEQ ID NO: 3148384 - DNA, 25 bp, Homo sapien
agcattgacagtagtcaaagcctcc

SEQ ID NO: 3148385 - DNA, 25 bp, Homo sapien
gcctcctgttccctactgggtccca

SEQ ID NO: 3148386 - DNA, 25 bp, Homo sapien
cttgcagttctcctgattcattcat

SEQ ID NO: 3148387 - DNA, 25 bp, Homo sapien
ttcattgacaaaattttctcagcac

SEQ ID NO: 3148388 - DNA, 25 bp, Homo sapien
tcattgacaaaattttctcagcacc

SEQ ID NO: 3148389 - DNA, 25 bp, Homo sapien
ctcaattttggttaggatgtcttgc

SEQ ID NO: 3148390 - DNA, 25 bp, Homo sapien
ttgctcccatggcacacggagcatg

SEQ ID NO: 3148391 - DNA, 25 bp, Homo sapien
gcacacggagcatggaagaaagcca

SEQ ID NO: 3148392 - DNA, 25 bp, Homo sapien
tgaagcagtttcgaaacatggacat

SEQ ID NO: 3148393 - DNA, 25 bp, Homo sapien
cattttcattgcaagccgtacactt

SEQ ID NO: 3148394 - DNA, 25 bp, Homo sapien
tacacttcagggctttgaaagagtc

SEQ ID NO: 3148395 - DNA, 25 bp, Homo sapien
ctgtgaagcagtttcgaaacatgga

SEQ ID NO: 3148396 - DNA, 25 bp, Homo sapien
tgaggtttttcctgggtagaagctc

SEQ ID NO: 3148397 - DNA, 25 bp, Homo sapien
ataaaccaaagtattgcctttgatt

SEQ ID NO: 3148398 - DNA, 25 bp, Homo sapien
taaaccaaagtattgcctttgatta

SEQ ID NO: 3148399 - DNA, 25 bp, Homo sapien
accaaagtattgcctttgattaata

SEQ ID NO: 3148400 - DNA, 25 bp, Homo sapien
tcagtgcggtttagaacgtacattc

SEQ ID NO: 3148401 - DNA, 25 bp, Homo sapien
atgagctggcaaacaacagggagaa

SEQ ID NO: 3148402 - DNA, 25 bp, Homo sapien
ttttccgtaccaggaatcaggaatg

SEQ ID NO: 3148403 - DNA, 25 bp, Homo sapien
tgcggtttagaacgtacattctgtt

SEQ ID NO: 3148404 - DNA, 25 bp, Homo sapien
atggtcaaatgaactgtgaacaagg

SEQ ID NO: 3148405 - DNA, 25 bp, Homo sapien
ctcttcttagtccctcttcagccat

SEQ ID NO: 3148406 - DNA, 25 bp, Homo sapien
ttagtccctcttcagccatcaaatc

SEQ ID NO: 3148407 - DNA, 25 bp, Homo sapien
ttcttagtccctcttcagccatcaa

SEQ ID NO: 3148408 - DNA, 25 bp, Homo sapien
cctcttcagccatcaaatccttcat

SEQ ID NO: 3148409 - DNA, 25 bp, Homo sapien
gataacttagatgtccagcatcatg

SEQ ID NO: 3148410 - DNA, 25 bp, Homo sapien
cttgctaaggtcacctggatgatgg

SEQ ID NO: 3148411 - DNA, 25 bp, Homo sapien
tggatgatggttctgccatgagctc

SEQ ID NO: 3148412 - DNA, 25 bp, Homo sapien
ccaagttctttgtgataacttagat

SEQ ID NO: 3148413 - DNA, 25 bp, Homo sapien
tgtaagtgtgatctcttttcaccaa

SEQ ID NO: 3148414 - DNA, 25 bp, Homo sapien
gtaagtgtgatctcttttcaccaac

SEQ ID NO: 3148415 - DNA, 25 bp, Homo sapien
gtaaatcaataacttctaccagctg

SEQ ID NO: 3148416 - DNA, 25 bp, Homo sapien
tggtccggtaaatcaataacttcta

SEQ ID NO: 3148417 - DNA, 25 bp, Homo sapien
agcattcttcttcgatttacctgca

SEQ ID NO: 3148418 - DNA, 25 bp, Homo sapien
ataactgaagattgcagcacttcca

SEQ ID NO: 3148419 - DNA, 25 bp, Homo sapien
ttgcagcacttccatatagaagcct

SEQ ID NO: 3148420 - DNA, 25 bp, Homo sapien
ttccatatagaagcctaagcattct

SEQ ID NO: 3148421 - DNA, 25 bp, Homo sapien
gcctttgatacaggactgctgtgca

SEQ ID NO: 3148422 - DNA, 25 bp, Homo sapien
gactgctgtgcatcatcagttggta

SEQ ID NO: 3148423 - DNA, 25 bp, Homo sapien
cttggttgtgaaattagcttcactc

SEQ ID NO: 3148424 - DNA, 25 bp, Homo sapien
tctcattttatgtgagtagcctttg

SEQ ID NO: 3148425 - DNA, 25 bp, Homo sapien
gagccttccatttgaatgcacacca

SEQ ID NO: 3148426 - DNA, 25 bp, Homo sapien
ttgaatgcacaccattgcttgcttc

SEQ ID NO: 3148427 - DNA, 25 bp, Homo sapien
ccatttgaatgcacaccattgcttg

SEQ ID NO: 3148428 - DNA, 25 bp, Homo sapien
ccccaggaatcagccacaagagcct

SEQ ID NO: 3148429 - DNA, 25 bp, Homo sapien
gaaaatagcacttatattacttaga

SEQ ID NO: 3148430 - DNA, 25 bp, Homo sapien
tacccaacacctgatctcctggttt

SEQ ID NO: 3148431 - DNA, 25 bp, Homo sapien
tacttagactttctgtagtatttga

SEQ ID NO: 3148432 - DNA, 25 bp, Homo sapien
ttgatgttattacatcatgagcagt

SEQ ID NO: 3148433 - DNA, 25 bp, Homo sapien
tttgcccatgtgtaactcttcactt

SEQ ID NO: 3148434 - DNA, 25 bp, Homo sapien
ctttgcccatgtgtaactcttcact

SEQ ID NO: 3148435 - DNA, 25 bp, Homo sapien
gaatcatctttggtgtccaccaatg

SEQ ID NO: 3148436 - DNA, 25 bp, Homo sapien
catctttggtgtccaccaatgtcac

SEQ ID NO: 3148437 - DNA, 25 bp, Homo sapien
tggtgtccaccaatgtcactttggt

SEQ ID NO: 3148438 - DNA, 25 bp, Homo sapien
tccaccaatgtcactttggtatctt

SEQ ID NO: 3148439 - DNA, 25 bp, Homo sapien
caggcatatcatgaccacagctttc

SEQ ID NO: 3148440 - DNA, 25 bp, Homo sapien
tcttgcctgtgccatatgctccttg

SEQ ID NO: 3148441 - DNA, 25 bp, Homo sapien
gtactcccttgttgaggactcagtg

SEQ ID NO: 3148442 - DNA, 25 bp, Homo sapien
tcttcgagctgccactgtagccagc

SEQ ID NO: 3148443 - DNA, 25 bp, Homo sapien
tctttctcatgctcaaaagtaagac

SEQ ID NO: 3148444 - DNA, 25 bp, Homo sapien
tctcatgctcaaaagtaagacttct

SEQ ID NO: 3148445 - DNA, 25 bp, Homo sapien
gcagtttcctcagggtgtgcttcct

SEQ ID NO: 3148446 - DNA, 25 bp, Homo sapien
ccacactctttctcatgctcaaaag

SEQ ID NO: 3148447 - DNA, 25 bp, Homo sapien
tagtagagactgtgcagcaggaatt

SEQ ID NO: 3148448 - DNA, 25 bp, Homo sapien
actgcagcagtagacaatcattgaa

SEQ ID NO: 3148449 - DNA, 25 bp, Homo sapien
caggtgcttagaatgtgccaggcac

SEQ ID NO: 3148450 - DNA, 25 bp, Homo sapien
aaacttggctgtagactttgatcac

SEQ ID NO: 3148451 - DNA, 25 bp, Homo sapien
ggcccggttctcaggtagaagtagc

SEQ ID NO: 3148452 - DNA, 25 bp, Homo sapien
tgttgacccattcctggaaggcccg

SEQ ID NO: 3148453 - DNA, 25 bp, Homo sapien
tgctgttgacccattcctggaaggc

SEQ ID NO: 3148454 - DNA, 25 bp, Homo sapien
caggtagaagtagcatggtcagtga

SEQ ID NO: 3148455 - DNA, 25 bp, Homo sapien
tataaggtttccattatggttgtgg

SEQ ID NO: 3148456 - DNA, 25 bp, Homo sapien
gccccttcgctatacattttacact

SEQ ID NO: 3148457 - DNA, 25 bp, Homo sapien
ggttgtggttattcactgaaccatg

SEQ ID NO: 3148458 - DNA, 25 bp, Homo sapien
ttatcatgataactaatggcatgca

SEQ ID NO: 3148459 - DNA, 25 bp, Homo sapien
gtacttgataatttgagtaagccac

SEQ ID NO: 3148460 - DNA, 25 bp, Homo sapien
tggaaagtgtatttatgtgcagtaa

SEQ ID NO: 3148461 - DNA, 25 bp, Homo sapien
aataaataattagacctgggtagtg

SEQ ID NO: 3148462 - DNA, 25 bp, Homo sapien
gaggctaggcaagcatatcctgaag

SEQ ID NO: 3148463 - DNA, 25 bp, Homo sapien
agatgtgatggctggctttacagcc

SEQ ID NO: 3148464 - DNA, 25 bp, Homo sapien
gcattttgccttcccaatcttttta

SEQ ID NO: 3148465 - DNA, 25 bp, Homo sapien
taagcagaagtcatcgagtaggact

SEQ ID NO: 3148466 - DNA, 25 bp, Homo sapien
tttctttcggattctcaggctgctg

SEQ ID NO: 3148467 - DNA, 25 bp, Homo sapien
agtttcagctgagtcattcttcgga

SEQ ID NO: 3148468 - DNA, 25 bp, Homo sapien
tcagctgagtcattcttcggagatc

SEQ ID NO: 3148469 - DNA, 25 bp, Homo sapien
ttcttcggagatcccagtcagggcc

SEQ ID NO: 3148470 - DNA, 25 bp, Homo sapien
tgagtcattcttcggagatcccagt

SEQ ID NO: 3148471 - DNA, 25 bp, Homo sapien
tctgaagacaaatgtaggcaatgat

SEQ ID NO: 3148472 - DNA, 25 bp, Homo sapien
tactgcaggtcgtctgaagacaaat

SEQ ID NO: 3148473 - DNA, 25 bp, Homo sapien
gtttaagccaagtttgtactgcagg

SEQ ID NO: 3148474 - DNA, 25 bp, Homo sapien
caagtttgtactgcaggtcgtctga

SEQ ID NO: 3148475 - DNA, 25 bp, Homo sapien
tgtaatttattctcccacggtgaat

SEQ ID NO: 3148476 - DNA, 25 bp, Homo sapien
gtaatttattctcccacggtgaatc

SEQ ID NO: 3148477 - DNA, 25 bp, Homo sapien
ttgtaatttattctcccacggtgaa

SEQ ID NO: 3148478 - DNA, 25 bp, Homo sapien
attgtaatttattctcccacggtga

SEQ ID NO: 3148479 - DNA, 25 bp, Homo sapien
cctttgggcctgagaacgaccacat

SEQ ID NO: 3148480 - DNA, 25 bp, Homo sapien
gagttacagagttgcagccaaaagc

SEQ ID NO: 3148481 - DNA, 25 bp, Homo sapien
tttgggcctgagaacgaccacatac

SEQ ID NO: 3148482 - DNA, 25 bp, Homo sapien
gttacagagttgcagccaaaagcaa

SEQ ID NO: 3148483 - DNA, 25 bp, Homo sapien
tgagagaaacaagtttcagcaaagc

SEQ ID NO: 3148484 - DNA, 25 bp, Homo sapien
gccacttccaagacccaatgagaga

SEQ ID NO: 3148485 - DNA, 25 bp, Homo sapien
ttctataggaacgtcctattcgcca

SEQ ID NO: 3148486 - DNA, 25 bp, Homo sapien
cagcaaagccaccttagcagatact

SEQ ID NO: 3148487 - DNA, 25 bp, Homo sapien
catgggataacaagggtgatgattc

SEQ ID NO: 3148488 - DNA, 25 bp, Homo sapien
ggagcttgtgtttcgtgagtgcctc

SEQ ID NO: 3148489 - DNA, 25 bp, Homo sapien
ctttttcccggagaaggagcttgtg

SEQ ID NO: 3148490 - DNA, 25 bp, Homo sapien
gagaagatgaattttcatgggataa

SEQ ID NO: 3148491 - DNA, 25 bp, Homo sapien
taccacaagaaatgggtgacacaat

SEQ ID NO: 3148492 - DNA, 25 bp, Homo sapien
gaaaattaactgtcgaaagtgcagc

SEQ ID NO: 3148493 - DNA, 25 bp, Homo sapien
cagatggcacttataggaaaggaca

SEQ ID NO: 3148494 - DNA, 25 bp, Homo sapien
tccccttagtgagaaggccattagc

SEQ ID NO: 3148495 - DNA, 25 bp, Homo sapien
ctctccaagactttctaacaaggcc

SEQ ID NO: 3148496 - DNA, 25 bp, Homo sapien
tatggttgcccgacattgcctctgg

SEQ ID NO: 3148497 - DNA, 25 bp, Homo sapien
tggttgcccgacattgcctctggtt

SEQ ID NO: 3148498 - DNA, 25 bp, Homo sapien
atctatggttgcccgacattgcctc

SEQ ID NO: 3148499 - DNA, 25 bp, Homo sapien
ttgcccgacattgcctctggttgac

SEQ ID NO: 3148500 - DNA, 25 bp, Homo sapien
tattccgttctcctccgttcatgag

SEQ ID NO: 3148501 - DNA, 25 bp, Homo sapien
tttgatattccgttctcctccgttc

SEQ ID NO: 3148502 - DNA, 25 bp, Homo sapien
tgatattccgttctcctccgttcat

SEQ ID NO: 3148503 - DNA, 25 bp, Homo sapien
gatattccgttctcctccgttcatg

SEQ ID NO: 3148504 - DNA, 25 bp, Homo sapien
acatccagcttctaggaacaaacgt

SEQ ID NO: 3148505 - DNA, 25 bp, Homo sapien
caaagttagatgttcagcatgggtc

SEQ ID NO: 3148506 - DNA, 25 bp, Homo sapien
tagtggctatggtgtctccatggag

SEQ ID NO: 3148507 - DNA, 25 bp, Homo sapien
gaacaaacgtgggaatggtgctact

SEQ ID NO: 3148508 - DNA, 25 bp, Homo sapien
aagccaatagccacatcaagctgaa

SEQ ID NO: 3148509 - DNA, 25 bp, Homo sapien
gctctgctctccagtgtttcaaagc

SEQ ID NO: 3148510 - DNA, 25 bp, Homo sapien
tcttaagctctgctctccagtgttt

SEQ ID NO: 3148511 - DNA, 25 bp, Homo sapien
ctctgctctccagtgtttcaaagcc

SEQ ID NO: 3148512 - DNA, 25 bp, Homo sapien
taagctctgctctccagtgtttcaa

SEQ ID NO: 3148513 - DNA, 25 bp, Homo sapien
cagtagatgtagatgaaaattcatc

SEQ ID NO: 3148514 - DNA, 25 bp, Homo sapien
tagatgtagatgaaaattcatcagg

SEQ ID NO: 3148515 - DNA, 25 bp, Homo sapien
ctgtgcagtagatgtagatgaaaat

SEQ ID NO: 3148516 - DNA, 25 bp, Homo sapien
tgcagtagatgtagatgaaaattca

SEQ ID NO: 3148517 - DNA, 25 bp, Homo sapien
tgaactcaacaacctcatcatcatg

SEQ ID NO: 3148518 - DNA, 25 bp, Homo sapien
ctgtaactctacctcttatgggctg

SEQ ID NO: 3148519 - DNA, 25 bp, Homo sapien
tatgggctgtacagttaggccagct

SEQ ID NO: 3148520 - DNA, 25 bp, Homo sapien
ttcgagcacataagttggagccctt

SEQ ID NO: 3148521 - DNA, 25 bp, Homo sapien
tatttgcacccctgacaaccaaaat

SEQ ID NO: 3148522 - DNA, 25 bp, Homo sapien
caatgtagcccagacatgtggtacc

SEQ ID NO: 3148523 - DNA, 25 bp, Homo sapien
ccagataaattatttgcacccctga

SEQ ID NO: 3148524 - DNA, 25 bp, Homo sapien
taaattatttgcacccctgacaacc

SEQ ID NO: 3148525 - DNA, 25 bp, Homo sapien
tgcctgaggtcccattaaactgagt

SEQ ID NO: 3148526 - DNA, 25 bp, Homo sapien
ttgcctcaccaaagtgaaggacaag

SEQ ID NO: 3148527 - DNA, 25 bp, Homo sapien
ggtgtgtctctgtaattgcctcacc

SEQ ID NO: 3148528 - DNA, 25 bp, Homo sapien
cctgaggtcccattaaactgagttt

SEQ ID NO: 3148529 - DNA, 25 bp, Homo sapien
aattcgataatcgaatttgcctcta

SEQ ID NO: 3148530 - DNA, 25 bp, Homo sapien
ttctgggaataagaactgacaagac

SEQ ID NO: 3148531 - DNA, 25 bp, Homo sapien
attcgataatcgaatttgcctctat

SEQ ID NO: 3148532 - DNA, 25 bp, Homo sapien
tgggaataagaactgacaagacaca

SEQ ID NO: 3148533 - DNA, 25 bp, Homo sapien
ttcggccaggttttagacgatgacc

SEQ ID NO: 3148534 - DNA, 25 bp, Homo sapien
tatgacactcagcataccacatttg

SEQ ID NO: 3148535 - DNA, 25 bp, Homo sapien
gactatcccgtgatttatgccgtca

SEQ ID NO: 3148536 - DNA, 25 bp, Homo sapien
gacgatgaccatgggtcttcaaata

SEQ ID NO: 3148537 - DNA, 25 bp, Homo sapien
tatgttgtattgttgagttatgtgg

SEQ ID NO: 3148538 - DNA, 25 bp, Homo sapien
tgtattgttgagttatgtggcattc

SEQ ID NO: 3148539 - DNA, 25 bp, Homo sapien
tgtataaaatcatgtttcttgtctc

SEQ ID NO: 3148540 - DNA, 25 bp, Homo sapien
taaaatcatgtttcttgtctcaggg

SEQ ID NO: 3148541 - DNA, 25 bp, Homo sapien
tgcctttctgcatcatgggttccca

SEQ ID NO: 3148542 - DNA, 25 bp, Homo sapien
ctgcctttctgcatcatgggttccc

SEQ ID NO: 3148543 - DNA, 25 bp, Homo sapien
gcctttctgcatcatgggttcccat

SEQ ID NO: 3148544 - DNA, 25 bp, Homo sapien
gccttaaggatgaattgaaattctc

SEQ ID NO: 3148545 - DNA, 25 bp, Homo sapien
catgatgcgagctggccttaaggat

SEQ ID NO: 3148546 - DNA, 25 bp, Homo sapien
atgttccacatgatgcgagctggcc

SEQ ID NO: 3148547 - DNA, 25 bp, Homo sapien
ggccttaaggatgaattgaaattct

SEQ ID NO: 3148548 - DNA, 25 bp, Homo sapien
tcatggaaccagaacaactgtgagt

SEQ ID NO: 3148549 - DNA, 25 bp, Homo sapien
aaatctatggaagaagttgcctctg

SEQ ID NO: 3148550 - DNA, 25 bp, Homo sapien
tttgatcggtagataagccatcagg

SEQ ID NO: 3148551 - DNA, 25 bp, Homo sapien
tccaggagacggttgaagcatcaga

SEQ ID NO: 3148552 - DNA, 25 bp, Homo sapien
aaggcattgaccatgagctaggaac

SEQ ID NO: 3148553 - DNA, 25 bp, Homo sapien
catgagctaggaacaactggagcca

SEQ ID NO: 3148554 - DNA, 25 bp, Homo sapien
gaccatgagctaggaacaactggag

SEQ ID NO: 3148555 - DNA, 25 bp, Homo sapien
catatcaatgcctctgtaaggcatt

SEQ ID NO: 3148556 - DNA, 25 bp, Homo sapien
tttgagtgcagttgctacccacaag

SEQ ID NO: 3148557 - DNA, 25 bp, Homo sapien
tcagtatcagagttttgttctgctc

SEQ ID NO: 3148558 - DNA, 25 bp, Homo sapien
ttcatgcctcctgcggcaacctggt

SEQ ID NO: 3148559 - DNA, 25 bp, Homo sapien
tcttgctgtgcttcgcggatttgag

SEQ ID NO: 3148560 - DNA, 25 bp, Homo sapien
aaagcaattccttagagacctacaa

SEQ ID NO: 3148561 - DNA, 25 bp, Homo sapien
ttaacattccactgtcaacattgga

SEQ ID NO: 3148562 - DNA, 25 bp, Homo sapien
aagttaacaaggatatccaagactt

SEQ ID NO: 3148563 - DNA, 25 bp, Homo sapien
caagcaagtggaaaacacaaaaaag

SEQ ID NO: 3148564 - DNA, 25 bp, Homo sapien
attacactgctgtagtgatttaaac

SEQ ID NO: 3148565 - DNA, 25 bp, Homo sapien
gctgtagtgatttaaacctgtttct

SEQ ID NO: 3148566 - DNA, 25 bp, Homo sapien
cactgctgtagtgatttaaacctgt

SEQ ID NO: 3148567 - DNA, 25 bp, Homo sapien
tgatttaaacctgtttctctgtgac

SEQ ID NO: 3148568 - DNA, 25 bp, Homo sapien
tatgctttgctgaattcctaaacat

SEQ ID NO: 3148569 - DNA, 25 bp, Homo sapien
ttatgctttgctgaattcctaaaca

SEQ ID NO: 3148570 - DNA, 25 bp, Homo sapien
tgcacccgctgggtttccagagata

SEQ ID NO: 3148571 - DNA, 25 bp, Homo sapien
gcacccgctgggtttccagagatat

SEQ ID NO: 3148572 - DNA, 25 bp, Homo sapien
ttgcacccgctgggtttccagagat

SEQ ID NO: 3148573 - DNA, 25 bp, Homo sapien
acccgctgggtttccagagatatgt

SEQ ID NO: 3148574 - DNA, 25 bp, Homo sapien
atttatgcagggatacatatagtca

SEQ ID NO: 3148575 - DNA, 25 bp, Homo sapien
cagggatacatatagtcatcattgc

SEQ ID NO: 3148576 - DNA, 25 bp, Homo sapien
gatacatatagtcatcattgccaga

SEQ ID NO: 3148577 - DNA, 25 bp, Homo sapien
agtcaatttatttatgcagggatac

SEQ ID NO: 3148578 - DNA, 25 bp, Homo sapien
gtttgcagttctcagccagcaaggg

SEQ ID NO: 3148579 - DNA, 25 bp, Homo sapien
tctgtgtagtgtctcaaatgtgccc

SEQ ID NO: 3148580 - DNA, 25 bp, Homo sapien
tgtagtgtctcaaatgtgccctgct

SEQ ID NO: 3148581 - DNA, 25 bp, Homo sapien
gttcatccattaactgccctatcag

SEQ ID NO: 3148582 - DNA, 25 bp, Homo sapien
cttttcattggaaaatgttcaaaat

SEQ ID NO: 3148583 - DNA, 25 bp, Homo sapien
cattggaaaatgttcaaaattttgg

SEQ ID NO: 3148584 - DNA, 25 bp, Homo sapien
tcattggaaaatgttcaaaattttg

SEQ ID NO: 3148585 - DNA, 25 bp, Homo sapien
ctgaaaaacagatttgctggtctgt

SEQ ID NO: 3148586 - DNA, 25 bp, Homo sapien
attcccagcaaacaaacctctgaaa

SEQ ID NO: 3148587 - DNA, 25 bp, Homo sapien
atttgctggtctgttcctcataccc

SEQ ID NO: 3148588 - DNA, 25 bp, Homo sapien
ttcccagcaaacaaacctctgaaaa

SEQ ID NO: 3148589 - DNA, 25 bp, Homo sapien
aaaaacaggactcaagattgtagaa

SEQ ID NO: 3148590 - DNA, 25 bp, Homo sapien
tagaaaagtttcaatgatgtcagaa

SEQ ID NO: 3148591 - DNA, 25 bp, Homo sapien
tggttaatttggctagagtcataat

SEQ ID NO: 3148592 - DNA, 25 bp, Homo sapien
ttttgctgtgttgcaggtactccca

SEQ ID NO: 3148593 - DNA, 25 bp, Homo sapien
tccccaggtggtatgcagcaaattc

SEQ ID NO: 3148594 - DNA, 25 bp, Homo sapien
ctaatgaggtcctactccccaggtg

SEQ ID NO: 3148595 - DNA, 25 bp, Homo sapien
gcaaacacattccttcctaatgagg

SEQ ID NO: 3148596 - DNA, 25 bp, Homo sapien
ggaacttgatccgacctggtcatgt

SEQ ID NO: 3148597 - DNA, 25 bp, Homo sapien
ctttgccaacaacataggagagttg

SEQ ID NO: 3148598 - DNA, 25 bp, Homo sapien
catcatcattccgagccaggttgta

SEQ ID NO: 3148599 - DNA, 25 bp, Homo sapien
aaataatagcaccagtgtcctccga

SEQ ID NO: 3148600 - DNA, 25 bp, Homo sapien
tgtcctccgagtttagcacatcatc

SEQ ID NO: 3148601 - DNA, 25 bp, Homo sapien
gctctcaaggcttctggaagcatat

SEQ ID NO: 3148602 - DNA, 25 bp, Homo sapien
tctcaaggcttctggaagcatattc

SEQ ID NO: 3148603 - DNA, 25 bp, Homo sapien
tgcaacgcctcctttttcggcgtgt

SEQ ID NO: 3148604 - DNA, 25 bp, Homo sapien
cgcctcctttttcggcgtgtcagtt

SEQ ID NO: 3148605 - DNA, 25 bp, Homo sapien
gcgtggcagttgcaacccctcgttt

SEQ ID NO: 3148606 - DNA, 25 bp, Homo sapien
ctgcgtggcagttgcaacccctcgt

SEQ ID NO: 3148607 - DNA, 25 bp, Homo sapien
aatatcagaagctactcccttttca

SEQ ID NO: 3148608 - DNA, 25 bp, Homo sapien
tgaatatcagaagctactccctttt

SEQ ID NO: 3148609 - DNA, 25 bp, Homo sapien
ccctcctttttctgcgtggcagttg

SEQ ID NO: 3148610 - DNA, 25 bp, Homo sapien
gcagttgctgcgtggcagttgcaac

SEQ ID NO: 3148611 - DNA, 25 bp, Homo sapien
agtgagtggcgagggaatgtggagg

SEQ ID NO: 3148612 - DNA, 25 bp, Homo sapien
ccaggactggatgttgctctgagtg

SEQ ID NO: 3148613 - DNA, 25 bp, Homo sapien
tcaataagttatacttagctcactg

SEQ ID NO: 3148614 - DNA, 25 bp, Homo sapien
cacagttaggctatactaaattaaa

SEQ ID NO: 3148615 - DNA, 25 bp, Homo sapien
cgttaccgtgctgaatcctataggc

SEQ ID NO: 3148616 - DNA, 25 bp, Homo sapien
caagtctgtacagcacgttaccgtg

SEQ ID NO: 3148617 - DNA, 25 bp, Homo sapien
tactgcaccttctatatggcagagc

SEQ ID NO: 3148618 - DNA, 25 bp, Homo sapien
tgttgtaccaacatcaaggagtgta

SEQ ID NO: 3148619 - DNA, 25 bp, Homo sapien
taaattccggtttcagagcatcagt

SEQ ID NO: 3148620 - DNA, 25 bp, Homo sapien
ccaagatcgggctagagagtgaaac

SEQ ID NO: 3148621 - DNA, 25 bp, Homo sapien
ccattgaggattcttgtgtacagca

SEQ ID NO: 3148622 - DNA, 25 bp, Homo sapien
gaaggctttttatggtactcaggga

SEQ ID NO: 3148623 - DNA, 25 bp, Homo sapien
ttgtatagtttcagagaagtgctgc

SEQ ID NO: 3148624 - DNA, 25 bp, Homo sapien
gaaagattcgattgtatagtttcag

SEQ ID NO: 3148625 - DNA, 25 bp, Homo sapien
acagatttatgtattaacatatcta

SEQ ID NO: 3148626 - DNA, 25 bp, Homo sapien
tatctaaagaaagattcgattgtat

SEQ ID NO: 3148627 - DNA, 25 bp, Homo sapien
cttggcagtaagtaagttccttgtt

SEQ ID NO: 3148628 - DNA, 25 bp, Homo sapien
gacagggactttgaggaccaagcac

SEQ ID NO: 3148629 - DNA, 25 bp, Homo sapien
tccaggacagggactttgaggacca

SEQ ID NO: 3148630 - DNA, 25 bp, Homo sapien
gaggaccaagcacttggcagtaagt

SEQ ID NO: 3148631 - DNA, 25 bp, Homo sapien
tagtctctcccttatactgtcatgg

SEQ ID NO: 3148632 - DNA, 25 bp, Homo sapien
gctgacccatgtgctccttcctgtg

SEQ ID NO: 3148633 - DNA, 25 bp, Homo sapien
tgtcatggtctgctctcacagatgg

SEQ ID NO: 3148634 - DNA, 25 bp, Homo sapien
gatggatagtaccatgaccatggct

SEQ ID NO: 3148635 - DNA, 25 bp, Homo sapien
catagtaggatgacccttgattcca

SEQ ID NO: 3148636 - DNA, 25 bp, Homo sapien
agtaggatgacccttgattccagct

SEQ ID NO: 3148637 - DNA, 25 bp, Homo sapien
ctctgcatagtaggatgacccttga

SEQ ID NO: 3148638 - DNA, 25 bp, Homo sapien
tttactctgcatagtaggatgaccc

SEQ ID NO: 3148639 - DNA, 25 bp, Homo sapien
tccttcagttcatcatatctaaacc

SEQ ID NO: 3148640 - DNA, 25 bp, Homo sapien
tcagttcatcatatctaaacctggg

SEQ ID NO: 3148641 - DNA, 25 bp, Homo sapien
taaacctgggggcaactatatttgc

SEQ ID NO: 3148642 - DNA, 25 bp, Homo sapien
aacctgggggcaactatatttgcca

SEQ ID NO: 3148643 - DNA, 25 bp, Homo sapien
gttctaagaggttcttcccacagag

SEQ ID NO: 3148644 - DNA, 25 bp, Homo sapien
catagggtcatggtctgttctaaga

SEQ ID NO: 3148645 - DNA, 25 bp, Homo sapien
caactcccaaataataacccatagg

SEQ ID NO: 3148646 - DNA, 25 bp, Homo sapien
taataacccatagggtcatggtctg

SEQ ID NO: 3148647 - DNA, 25 bp, Homo sapien
tcacaaatccaaaagtttgtacttg

SEQ ID NO: 3148648 - DNA, 25 bp, Homo sapien
tctggatgtgttttatagactttga

SEQ ID NO: 3148649 - DNA, 25 bp, Homo sapien
tctttctggatgtgttttatagact

SEQ ID NO: 3148650 - DNA, 25 bp, Homo sapien
tatagactttgaaagtcacaaatcc

SEQ ID NO: 3148651 - DNA, 25 bp, Homo sapien
gcaggggccttatccattactttca

SEQ ID NO: 3148652 - DNA, 25 bp, Homo sapien
tcaacggatgaagacttgtgccctg

SEQ ID NO: 3148653 - DNA, 25 bp, Homo sapien
gcagctggcaccgatgacatcagtg

SEQ ID NO: 3148654 - DNA, 25 bp, Homo sapien
agacttgtgccctgacagtgggctg

SEQ ID NO: 3148655 - DNA, 25 bp, Homo sapien
ccccagttttcatggagttcttcag

SEQ ID NO: 3148656 - DNA, 25 bp, Homo sapien
agatcgcagatacagacaagtcccc

SEQ ID NO: 3148657 - DNA, 25 bp, Homo sapien
tgataggagctaatgggcagatcgc

SEQ ID NO: 3148658 - DNA, 25 bp, Homo sapien
tttgatgccactgatgagcagaagt

SEQ ID NO: 3148659 - DNA, 25 bp, Homo sapien
tagaaattgcgattgatattccaat

SEQ ID NO: 3148660 - DNA, 25 bp, Homo sapien
tattccaatttaagggagtaatcat

SEQ ID NO: 3148661 - DNA, 25 bp, Homo sapien
attgcgattgatattccaatttaag

SEQ ID NO: 3148662 - DNA, 25 bp, Homo sapien
ttctatagaaattgcgattgatatt

SEQ ID NO: 3148663 - DNA, 25 bp, Homo sapien
ttccaaactgagagccaactggagc

SEQ ID NO: 3148664 - DNA, 25 bp, Homo sapien
gagcccattacaggaacaaatcttc

SEQ ID NO: 3148665 - DNA, 25 bp, Homo sapien
aaaactgtatctttcggcaaagagc

SEQ ID NO: 3148666 - DNA, 25 bp, Homo sapien
tctttcggcaaagagcccattacag

SEQ ID NO: 3148667 - DNA, 25 bp, Homo sapien
ccaaccataacatggctgtatttga

SEQ ID NO: 3148668 - DNA, 25 bp, Homo sapien
agtctctgcttacacccccaaccat

SEQ ID NO: 3148669 - DNA, 25 bp, Homo sapien
tgcttacacccccaaccataacatg

SEQ ID NO: 3148670 - DNA, 25 bp, Homo sapien
acccccaaccataacatggctgtat

SEQ ID NO: 3148671 - DNA, 25 bp, Homo sapien
catgttccaaccatgattgtcatgg

SEQ ID NO: 3148672 - DNA, 25 bp, Homo sapien
gccctgcaccacctgtggcccaaag

SEQ ID NO: 3148673 - DNA, 25 bp, Homo sapien
ttttgtgccacattggtaatattga

SEQ ID NO: 3148674 - DNA, 25 bp, Homo sapien
gctgagtcacttgccatcatgtctg

SEQ ID NO: 3148675 - DNA, 25 bp, Homo sapien
gatggtggttggaaagtccccactg

SEQ ID NO: 3148676 - DNA, 25 bp, Homo sapien
cctcttccaggatcaaatgttaaag

SEQ ID NO: 3148677 - DNA, 25 bp, Homo sapien
ccactgaccagtagccattggctct

SEQ ID NO: 3148678 - DNA, 25 bp, Homo sapien
ggtttcttcaaggatgtactcttat

SEQ ID NO: 3148679 - DNA, 25 bp, Homo sapien
ggttttctgactataaggtactcaa

SEQ ID NO: 3148680 - DNA, 25 bp, Homo sapien
tataaggtactcaatagcaaggcca

SEQ ID NO: 3148681 - DNA, 25 bp, Homo sapien
aggtactcaatagcaaggccagtat

SEQ ID NO: 3148682 - DNA, 25 bp, Homo sapien
tctgactataaggtactcaatagca

SEQ ID NO: 3148683 - DNA, 25 bp, Homo sapien
gcatgactgtccatatcagaggcct

SEQ ID NO: 3148684 - DNA, 25 bp, Homo sapien
catgactgtccatatcagaggcctt

SEQ ID NO: 3148685 - DNA, 25 bp, Homo sapien
tgactgtccatatcagaggccttca

SEQ ID NO: 3148686 - DNA, 25 bp, Homo sapien
gactgtccatatcagaggccttcag

SEQ ID NO: 3148687 - DNA, 25 bp, Homo sapien
gttgctggtggccaaccagcctaca

SEQ ID NO: 3148688 - DNA, 25 bp, Homo sapien
cgatgaatacttgagtggagttgct

SEQ ID NO: 3148689 - DNA, 25 bp, Homo sapien
tatactggtatgcattcagctacga

SEQ ID NO: 3148690 - DNA, 25 bp, Homo sapien
tggtggccaaccagcctacaggtaa

SEQ ID NO: 3148691 - DNA, 25 bp, Homo sapien
tctccagtctgagcatggtaactgc

SEQ ID NO: 3148692 - DNA, 25 bp, Homo sapien
ctcagcagttgttgttgggtaggca

SEQ ID NO: 3148693 - DNA, 25 bp, Homo sapien
tgggtaggcaatacaagccattatt

SEQ ID NO: 3148694 - DNA, 25 bp, Homo sapien
gcaattgcaatgtcagtcacaccat

SEQ ID NO: 3148695 - DNA, 25 bp, Homo sapien
catataccctgggtgccatgtgaac

SEQ ID NO: 3148696 - DNA, 25 bp, Homo sapien
atgtgaactaccaaagtctggtccc

SEQ ID NO: 3148697 - DNA, 25 bp, Homo sapien
tataccctgggtgccatgtgaacta

SEQ ID NO: 3148698 - DNA, 25 bp, Homo sapien
tgccatgtgaactaccaaagtctgg

SEQ ID NO: 3148699 - DNA, 25 bp, Homo sapien
gacctcttgggatcagtcgtttctc

SEQ ID NO: 3148700 - DNA, 25 bp, Homo sapien
ttcactaggattgttaaagtcactg

SEQ ID NO: 3148701 - DNA, 25 bp, Homo sapien
tcttgggacctagtattcactagga

SEQ ID NO: 3148702 - DNA, 25 bp, Homo sapien
cactgagaactcctgtgtaaaatct

SEQ ID NO: 3148703 - DNA, 25 bp, Homo sapien
cggagaagtacacgtcccgcttcta

SEQ ID NO: 3148704 - DNA, 25 bp, Homo sapien
ctacttggagcaggcctttgatcgc

SEQ ID NO: 3148705 - DNA, 25 bp, Homo sapien
aaattccggcgtgtggcgcgcatca

SEQ ID NO: 3148706 - DNA, 25 bp, Homo sapien
ctttgatcgcctgtccgaggccggc

SEQ ID NO: 3148707 - DNA, 25 bp, Homo sapien
agtagttagcgccaccgtcggcgct

SEQ ID NO: 3148708 - DNA, 25 bp, Homo sapien
cttgacgtcagtgcctcctcccgtg

SEQ ID NO: 3148709 - DNA, 25 bp, Homo sapien
tgctgccaggagtagttagcgccac

SEQ ID NO: 3148710 - DNA, 25 bp, Homo sapien
caggagtagttagcgccaccgtcgg

SEQ ID NO: 3148711 - DNA, 25 bp, Homo sapien
tggcaaagataaacaccaaagggtg

SEQ ID NO: 3148712 - DNA, 25 bp, Homo sapien
tccagctgggtctgtttgttataaa

SEQ ID NO: 3148713 - DNA, 25 bp, Homo sapien
ggtgtaagacggcattatcaaccat

SEQ ID NO: 3148714 - DNA, 25 bp, Homo sapien
catgatcaggcttggcattagatgc

SEQ ID NO: 3148715 - DNA, 25 bp, Homo sapien
gccatttataattgccatatagtac

SEQ ID NO: 3148716 - DNA, 25 bp, Homo sapien
tgccatatagtacaaatctaattac

SEQ ID NO: 3148717 - DNA, 25 bp, Homo sapien
acagctcttgtgtatgtgattgcca

SEQ ID NO: 3148718 - DNA, 25 bp, Homo sapien
tgctgacagctcttgtgtatgtgat

SEQ ID NO: 3148719 - DNA, 25 bp, Homo sapien
ctgtactgcatcattgttgaaacta

SEQ ID NO: 3148720 - DNA, 25 bp, Homo sapien
atcattgttgaaactagaaaaggcc

SEQ ID NO: 3148721 - DNA, 25 bp, Homo sapien
cattgttgaaactagaaaaggccat

SEQ ID NO: 3148722 - DNA, 25 bp, Homo sapien
tactgcatcattgttgaaactagaa

SEQ ID NO: 3148723 - DNA, 25 bp, Homo sapien
aatgctttgagcttattgtgtgagt

SEQ ID NO: 3148724 - DNA, 25 bp, Homo sapien
gtcttccaactccacttggttatgg

SEQ ID NO: 3148725 - DNA, 25 bp, Homo sapien
gaggtctggataagtgcgtaatgct

SEQ ID NO: 3148726 - DNA, 25 bp, Homo sapien
gggcctttcaattctagcaagtaga

SEQ ID NO: 3148727 - DNA, 25 bp, Homo sapien
actccagaatctgacagttgatttt

SEQ ID NO: 3148728 - DNA, 25 bp, Homo sapien
tccagaatctgacagttgattttct

SEQ ID NO: 3148729 - DNA, 25 bp, Homo sapien
attcagattcagttcatgtttcaac

SEQ ID NO: 3148730 - DNA, 25 bp, Homo sapien
ctaacggttctcgtctctattcaga

SEQ ID NO: 3148731 - DNA, 25 bp, Homo sapien
cgcaacagcagcatagcccgttttt

SEQ ID NO: 3148732 - DNA, 25 bp, Homo sapien
cagatcctgtgaagcgaagacaatg

SEQ ID NO: 3148733 - DNA, 25 bp, Homo sapien
ggatccggtggacaggactcaaaca

SEQ ID NO: 3148734 - DNA, 25 bp, Homo sapien
gtaccagatccggaagcaacccgaa

SEQ ID NO: 3148735 - DNA, 25 bp, Homo sapien
gcggaggcgtcaggagagggtaccc

SEQ ID NO: 3148736 - DNA, 25 bp, Homo sapien
ccgggcggcggaggcgtcaggagag

SEQ ID NO: 3148737 - DNA, 25 bp, Homo sapien
ggcggcggaggcgtcaggagagggt

SEQ ID NO: 3148738 - DNA, 25 bp, Homo sapien
acccgggcggcggaggcgtcaggag

SEQ ID NO: 3148739 - DNA, 25 bp, Homo sapien
ggccccagtggctcgtggcgcgaga

SEQ ID NO: 3148740 - DNA, 25 bp, Homo sapien
agcctgtcggtagcccaggactctg

SEQ ID NO: 3148741 - DNA, 25 bp, Homo sapien
gaattctgcggagctgtagagcctg

SEQ ID NO: 3148742 - DNA, 25 bp, Homo sapien
ctcgtggcgcgagagcgcgtgcgca

SEQ ID NO: 3148743 - DNA, 25 bp, Homo sapien
tctaggagcctgtcagctaaagtac

SEQ ID NO: 3148744 - DNA, 25 bp, Homo sapien
atgatccacgtgtgcaacaatactg

SEQ ID NO: 3148745 - DNA, 25 bp, Homo sapien
gtacttttgccatgatccacgtgtg

SEQ ID NO: 3148746 - DNA, 25 bp, Homo sapien
aacaggaaacctagacatgtcaagt

SEQ ID NO: 3148747 - DNA, 25 bp, Homo sapien
cctctttctcgttccacttgcaatt

SEQ ID NO: 3148748 - DNA, 25 bp, Homo sapien
caatttatcaagaacctgcttatta

SEQ ID NO: 3148749 - DNA, 25 bp, Homo sapien
ctctttctcgttccacttgcaattt

SEQ ID NO: 3148750 - DNA, 25 bp, Homo sapien
tatcaagaacctgcttattattctt

SEQ ID NO: 3148751 - DNA, 25 bp, Homo sapien
gtgtatcaatgagatttaaaaggta

SEQ ID NO: 3148752 - DNA, 25 bp, Homo sapien
ggtgtatcaatgagatttaaaaggt

SEQ ID NO: 3148753 - DNA, 25 bp, Homo sapien
tgtatcaatgagatttaaaaggtac

SEQ ID NO: 3148754 - DNA, 25 bp, Homo sapien
cggtgtatcaatgagatttaaaagg

SEQ ID NO: 3148755 - DNA, 25 bp, Homo sapien
gcaagcagaaagtgacctggatact

SEQ ID NO: 3148756 - DNA, 25 bp, Homo sapien
gaaagtgacctggatacttcataac

SEQ ID NO: 3148757 - DNA, 25 bp, Homo sapien
caccctggcaagcagaaagtgacct

SEQ ID NO: 3148758 - DNA, 25 bp, Homo sapien
aagtaaaacaccctggcaagcagaa

SEQ ID NO: 3148759 - DNA, 25 bp, Homo sapien
tataactggaattaccgatagctgt

SEQ ID NO: 3148760 - DNA, 25 bp, Homo sapien
ttaccgatagctgtgcttcgaaggc

SEQ ID NO: 3148761 - DNA, 25 bp, Homo sapien
ttataactggaattaccgatagctg

SEQ ID NO: 3148762 - DNA, 25 bp, Homo sapien
tagctgtgcttcgaaggcaagaaag

SEQ ID NO: 3148763 - DNA, 25 bp, Homo sapien
cttaatacattcatcacttggaata

SEQ ID NO: 3148764 - DNA, 25 bp, Homo sapien
cattcatcacttggaatatcaaaca

SEQ ID NO: 3148765 - DNA, 25 bp, Homo sapien
tcatcacttggaatatcaaacactt

SEQ ID NO: 3148766 - DNA, 25 bp, Homo sapien
tacattcatcacttggaatatcaaa

SEQ ID NO: 3148767 - DNA, 25 bp, Homo sapien
tgcctgaagaacactctcaacattt

SEQ ID NO: 3148768 - DNA, 25 bp, Homo sapien
tctttcaataattgcctgaagaaca

SEQ ID NO: 3148769 - DNA, 25 bp, Homo sapien
caataattgcctgaagaacactctc

SEQ ID NO: 3148770 - DNA, 25 bp, Homo sapien
catttgttccaagtttagcagaaat

SEQ ID NO: 3148771 - DNA, 25 bp, Homo sapien
tctcagaggatttttgcgatgcact

SEQ ID NO: 3148772 - DNA, 25 bp, Homo sapien
gaggatttttgcgatgcactttagg

SEQ ID NO: 3148773 - DNA, 25 bp, Homo sapien
cagaggatttttgcgatgcacttta

SEQ ID NO: 3148774 - DNA, 25 bp, Homo sapien
tggtcaaaggtggagtcaaatacca

SEQ ID NO: 3148775 - DNA, 25 bp, Homo sapien
taatgctacattggctatcacacct

SEQ ID NO: 3148776 - DNA, 25 bp, Homo sapien
tggctgctcattaggattcaagact

SEQ ID NO: 3148777 - DNA, 25 bp, Homo sapien
ggaaaccactccgtcaaataatgct

SEQ ID NO: 3148778 - DNA, 25 bp, Homo sapien
aagactcctacttcattaacttcgt

SEQ ID NO: 3148779 - DNA, 25 bp, Homo sapien
tctttcatcccagcaatcagatagc

SEQ ID NO: 3148780 - DNA, 25 bp, Homo sapien
agcaatcagatagcccacctgtcct

SEQ ID NO: 3148781 - DNA, 25 bp, Homo sapien
tcctatttgcgcttcagtgacatct

SEQ ID NO: 3148782 - DNA, 25 bp, Homo sapien
cattggtttcgctgatttaaaccca

SEQ ID NO: 3148783 - DNA, 25 bp, Homo sapien
gaacggtcacactggaatcatttaa

SEQ ID NO: 3148784 - DNA, 25 bp, Homo sapien
tcagattggtctagaggatacattc

SEQ ID NO: 3148785 - DNA, 25 bp, Homo sapien
ttctatagcactcttcagattgtta

SEQ ID NO: 3148786 - DNA, 25 bp, Homo sapien
cagagcaaggctactatcccgatga

SEQ ID NO: 3148787 - DNA, 25 bp, Homo sapien
ccataaaatgtcaatccgcaacgtg

SEQ ID NO: 3148788 - DNA, 25 bp, Homo sapien
gggagggatggaattaagtcattca

SEQ ID NO: 3148789 - DNA, 25 bp, Homo sapien
tgttttcgttcactttacactaata

SEQ ID NO: 3148790 - DNA, 25 bp, Homo sapien
tccgcaacgtgaaacaggcagataa

SEQ ID NO: 3148791 - DNA, 25 bp, Homo sapien
ttgctccagtcgctggttgaaaact

SEQ ID NO: 3148792 - DNA, 25 bp, Homo sapien
tgtgcaaaagtccaagaaatcctag

SEQ ID NO: 3148793 - DNA, 25 bp, Homo sapien
cagctttatatggaacagtaggggt

SEQ ID NO: 3148794 - DNA, 25 bp, Homo sapien
ggttgaaaacttccatgtgcaaaag

SEQ ID NO: 3148795 - DNA, 25 bp, Homo sapien
tggtatagtaaaaagcttctcctgc

SEQ ID NO: 3148796 - DNA, 25 bp, Homo sapien
tactaaataccagtactaaatacca

SEQ ID NO: 3148797 - DNA, 25 bp, Homo sapien
agcttctcctgcattgtatatacac

SEQ ID NO: 3148798 - DNA, 25 bp, Homo sapien
tgtttaatacttaatcagctattgg

SEQ ID NO: 3148799 - DNA, 25 bp, Homo sapien
tgtgataatagtgcccaaaacaact

SEQ ID NO: 3148800 - DNA, 25 bp, Homo sapien
tcatctggtgtgataatagtgccca

SEQ ID NO: 3148801 - DNA, 25 bp, Homo sapien
tgatttatcggggaattgtgcagga

SEQ ID NO: 3148802 - DNA, 25 bp, Homo sapien
cggggaattgtgcaggattgataat

SEQ ID NO: 3148803 - DNA, 25 bp, Homo sapien
gatatttaagcataactctattttg

SEQ ID NO: 3148804 - DNA, 25 bp, Homo sapien
ctagcatatccagaagatagggatt

SEQ ID NO: 3148805 - DNA, 25 bp, Homo sapien
gatagggatttcaaagagtcataaa

SEQ ID NO: 3148806 - DNA, 25 bp, Homo sapien
taagcataactctattttgatcaat

SEQ ID NO: 3148807 - DNA, 25 bp, Homo sapien
gcaaatcacaagtagtctgtaacac

SEQ ID NO: 3148808 - DNA, 25 bp, Homo sapien
ccttagagtatgattctcaactatc

SEQ ID NO: 3148809 - DNA, 25 bp, Homo sapien
ggaatacagctcttcatgaaaaggg

SEQ ID NO: 3148810 - DNA, 25 bp, Homo sapien
gttccaagtcattctaaccttagag

SEQ ID NO: 3148811 - DNA, 25 bp, Homo sapien
cctgttcctcaaaagactaagttat

SEQ ID NO: 3148812 - DNA, 25 bp, Homo sapien
caaaggttttcgtgatgaggacaac

SEQ ID NO: 3148813 - DNA, 25 bp, Homo sapien
gactaagttattaaagtgttcacta

SEQ ID NO: 3148814 - DNA, 25 bp, Homo sapien
gctcttgagattgcataacataaat

SEQ ID NO: 3148815 - DNA, 25 bp, Homo sapien
tcaattaggcttacaagttgtccca

SEQ ID NO: 3148816 - DNA, 25 bp, Homo sapien
taataagtgtttaaacagagcctag

SEQ ID NO: 3148817 - DNA, 25 bp, Homo sapien
tgtcccaatcacagacaagaatatg

SEQ ID NO: 3148818 - DNA, 25 bp, Homo sapien
gtaaaccaattagagcaatgcctag

SEQ ID NO: 3148819 - DNA, 25 bp, Homo sapien
gataaatattacacttcctgagaga

SEQ ID NO: 3148820 - DNA, 25 bp, Homo sapien
gtgataaatattacacttcctgaga

SEQ ID NO: 3148821 - DNA, 25 bp, Homo sapien
tgataaatattacacttcctgagag

SEQ ID NO: 3148822 - DNA, 25 bp, Homo sapien
ttgtgtacaacagttactagctcct

SEQ ID NO: 3148823 - DNA, 25 bp, Homo sapien
tgtacaacagttactagctcctcta

SEQ ID NO: 3148824 - DNA, 25 bp, Homo sapien
tggtagcctgcatcttcgtaatcaa

SEQ ID NO: 3148825 - DNA, 25 bp, Homo sapien
tttacaagttctgcagtctggtagc

SEQ ID NO: 3148826 - DNA, 25 bp, Homo sapien
tgaattgctatctcaaacagttgcc

SEQ ID NO: 3148827 - DNA, 25 bp, Homo sapien
ggctttgccaattgaatgagctttg

SEQ ID NO: 3148828 - DNA, 25 bp, Homo sapien
attttacttccaatagcagcttgaa

SEQ ID NO: 3148829 - DNA, 25 bp, Homo sapien
aagagaatccttcagccgttcacat

SEQ ID NO: 3148830 - DNA, 25 bp, Homo sapien
tggaacttcaacgttgccaattttc

SEQ ID NO: 3148831 - DNA, 25 bp, Homo sapien
catcttttggaacttcaacgttgcc

SEQ ID NO: 3148832 - DNA, 25 bp, Homo sapien
aagcttcatttttcgggtaatatca

SEQ ID NO: 3148833 - DNA, 25 bp, Homo sapien
taaaagcatcttttggaacttcaac

SEQ ID NO: 3148834 - DNA, 25 bp, Homo sapien
ccttactagtgagtggttggaacag

SEQ ID NO: 3148835 - DNA, 25 bp, Homo sapien
catcgatgttacaaaccacttaagg

SEQ ID NO: 3148836 - DNA, 25 bp, Homo sapien
caggcaacatggcttcaaaatctaa

SEQ ID NO: 3148837 - DNA, 25 bp, Homo sapien
agtttctaagaacctttcgatggca

SEQ ID NO: 3148838 - DNA, 25 bp, Homo sapien
cgttggctgaataaacatgggagct

SEQ ID NO: 3148839 - DNA, 25 bp, Homo sapien
tgagagctctggagaaatacagcca

SEQ ID NO: 3148840 - DNA, 25 bp, Homo sapien
ccagggttaaggtgtgcccatgaca

SEQ ID NO: 3148841 - DNA, 25 bp, Homo sapien
ggcttcaagcataggcaggtaagag

SEQ ID NO: 3148842 - DNA, 25 bp, Homo sapien
caataactgtaagctcaaaatatct

SEQ ID NO: 3148843 - DNA, 25 bp, Homo sapien
aatgatttcacaataactgtaagct

SEQ ID NO: 3148844 - DNA, 25 bp, Homo sapien
aataactgtaagctcaaaatatctg

SEQ ID NO: 3148845 - DNA, 25 bp, Homo sapien
acaataactgtaagctcaaaatatc

SEQ ID NO: 3148846 - DNA, 25 bp, Homo sapien
tacttctacacatgattttaagtaa

SEQ ID NO: 3148847 - DNA, 25 bp, Homo sapien
atatcacaggctacttctacacatg

SEQ ID NO: 3148848 - DNA, 25 bp, Homo sapien
gactatatcacaggctacttctaca

SEQ ID NO: 3148849 - DNA, 25 bp, Homo sapien
atctaggactatatcacaggctact

SEQ ID NO: 3148850 - DNA, 25 bp, Homo sapien
ttcaaaatactactgtcatggtctt

SEQ ID NO: 3148851 - DNA, 25 bp, Homo sapien
actgtcatggtctttcagatttcat

SEQ ID NO: 3148852 - DNA, 25 bp, Homo sapien
aaatactactgtcatggtctttcag

SEQ ID NO: 3148853 - DNA, 25 bp, Homo sapien
tcagatttcatctgtttttatcaga

SEQ ID NO: 3148854 - DNA, 25 bp, Homo sapien
gaggagctaagctgctgttaggcaa

SEQ ID NO: 3148855 - DNA, 25 bp, Homo sapien
gctgaggagcgaaaactctggccat

SEQ ID NO: 3148856 - DNA, 25 bp, Homo sapien
catagctcagcacagtggttgtcac

SEQ ID NO: 3148857 - DNA, 25 bp, Homo sapien
tgaataagggaagcatacatagctc

SEQ ID NO: 3148858 - DNA, 25 bp, Homo sapien
cctgcattcattttgggtttgttac

SEQ ID NO: 3148859 - DNA, 25 bp, Homo sapien
tgttaccatcatgcattaggagagt

SEQ ID NO: 3148860 - DNA, 25 bp, Homo sapien
gaagtgaacctgaagaatacatgca

SEQ ID NO: 3148861 - DNA, 25 bp, Homo sapien
cgactcccaacaattatagtacatg

SEQ ID NO: 3148862 - DNA, 25 bp, Homo sapien
catttgtgatatgactccagtggcg

SEQ ID NO: 3148863 - DNA, 25 bp, Homo sapien
tagctggctctcaagattgactggc

SEQ ID NO: 3148864 - DNA, 25 bp, Homo sapien
taaaggtagagtgtccacatcaggc

SEQ ID NO: 3148865 - DNA, 25 bp, Homo sapien
taaagtactgaagtcacatagccac

SEQ ID NO: 3148866 - DNA, 25 bp, Homo sapien
gagcagtctgcaagtatatgtacca

SEQ ID NO: 3148867 - DNA, 25 bp, Homo sapien
gtgagacagcagttctgagcccctg

SEQ ID NO: 3148868 - DNA, 25 bp, Homo sapien
gatcctctacaaagtgatactctgg

SEQ ID NO: 3148869 - DNA, 25 bp, Homo sapien
gaagatcagctatttcccaagcagc

SEQ ID NO: 3148870 - DNA, 25 bp, Homo sapien
tgtatagacattggttagaatctgt

SEQ ID NO: 3148871 - DNA, 25 bp, Homo sapien
ggaagcagtcctatttgatgtataa

SEQ ID NO: 3148872 - DNA, 25 bp, Homo sapien
taacgtttcaggaagtctggtgcat

SEQ ID NO: 3148873 - DNA, 25 bp, Homo sapien
aattcgtatgtagaaagttgtcagt

SEQ ID NO: 3148874 - DNA, 25 bp, Homo sapien
tataaggcccaaatcatcagtgagg

SEQ ID NO: 3148875 - DNA, 25 bp, Homo sapien
caggaacctcagttattcatagcca

SEQ ID NO: 3148876 - DNA, 25 bp, Homo sapien
tgaagagtgcatgtacattctaccc

SEQ ID NO: 3148877 - DNA, 25 bp, Homo sapien
tcagtgaggtcagtagtagtagatc

SEQ ID NO: 3148878 - DNA, 25 bp, Homo sapien
gcatcgtaagtgattctcaaccggt

SEQ ID NO: 3148879 - DNA, 25 bp, Homo sapien
aaagttgcctgtaccttggtctgag

SEQ ID NO: 3148880 - DNA, 25 bp, Homo sapien
tctagggagagggacctgagaatct

SEQ ID NO: 3148881 - DNA, 25 bp, Homo sapien
tctgcgccctccagagagtttaaga

SEQ ID NO: 3148882 - DNA, 25 bp, Homo sapien
ggtgttgcttgttcccgctgttcca

SEQ ID NO: 3148883 - DNA, 25 bp, Homo sapien
gcctttatctgcatccgggtccgtg

SEQ ID NO: 3148884 - DNA, 25 bp, Homo sapien
gggattcgcgctccactggtcagct

SEQ ID NO: 3148885 - DNA, 25 bp, Homo sapien
cgctgttccagcatcgaagaaccat

SEQ ID NO: 3148886 - DNA, 25 bp, Homo sapien
aattgatcgatatattcagcataat

SEQ ID NO: 3148887 - DNA, 25 bp, Homo sapien
tgatcgatatattcagcataattac

SEQ ID NO: 3148888 - DNA, 25 bp, Homo sapien
caattgatcgatatattcagcataa

SEQ ID NO: 3148889 - DNA, 25 bp, Homo sapien
ttgatcgatatattcagcataatta

SEQ ID NO: 3148890 - DNA, 25 bp, Homo sapien
tgtccttaggatgacctggagggga

SEQ ID NO: 3148891 - DNA, 25 bp, Homo sapien
cagttgtaaaagactgaagaggcta

SEQ ID NO: 3148892 - DNA, 25 bp, Homo sapien
tctttattctgctctcagttgtaaa

SEQ ID NO: 3148893 - DNA, 25 bp, Homo sapien
ctcagttgtaaaagactgaagaggc

SEQ ID NO: 3148894 - DNA, 25 bp, Homo sapien
tcatggtttgtactatgtgttgcca

SEQ ID NO: 3148895 - DNA, 25 bp, Homo sapien
ttccctttctgttaggaagtcatgg

SEQ ID NO: 3148896 - DNA, 25 bp, Homo sapien
aggaagtcatggtttgtactatgtg

SEQ ID NO: 3148897 - DNA, 25 bp, Homo sapien
ccctttctgttaggaagtcatggtt

SEQ ID NO: 3148898 - DNA, 25 bp, Homo sapien
cagctctccttaagtgtcctgaaag

SEQ ID NO: 3148899 - DNA, 25 bp, Homo sapien
ctctgcttaatattcgtgagcattt

SEQ ID NO: 3148900 - DNA, 25 bp, Homo sapien
tctattaggtcagtccatacagttg

SEQ ID NO: 3148901 - DNA, 25 bp, Homo sapien
tacagttgacttatgctctgcttaa

SEQ ID NO: 3148902 - DNA, 25 bp, Homo sapien
tctcagagctatacagtgtccccat

SEQ ID NO: 3148903 - DNA, 25 bp, Homo sapien
tgtccccattgtgctgttagacagg

SEQ ID NO: 3148904 - DNA, 25 bp, Homo sapien
taactgtcaagcacgaaagcaatgc

SEQ ID NO: 3148905 - DNA, 25 bp, Homo sapien
ggcaagactataatcactctcagag

SEQ ID NO: 3148906 - DNA, 25 bp, Homo sapien
atttcaagtatctcagtaagttcaa

SEQ ID NO: 3148907 - DNA, 25 bp, Homo sapien
aatttcaagtatctcagtaagttca

SEQ ID NO: 3148908 - DNA, 25 bp, Homo sapien
gccagacaagaagacctccttcttc

SEQ ID NO: 3148909 - DNA, 25 bp, Homo sapien
cagacaagaagacctccttcttcat

SEQ ID NO: 3148910 - DNA, 25 bp, Homo sapien
cactgccagacaagaagacctcctt

SEQ ID NO: 3148911 - DNA, 25 bp, Homo sapien
ctgccagacaagaagacctccttct

SEQ ID NO: 3148912 - DNA, 25 bp, Homo sapien
taataggcccagatttgtaagtgag

SEQ ID NO: 3148913 - DNA, 25 bp, Homo sapien
aatcctctatgaataggcctcttat

SEQ ID NO: 3148914 - DNA, 25 bp, Homo sapien
tgaataggcctcttattaataggcc

SEQ ID NO: 3148915 - DNA, 25 bp, Homo sapien
tgaggtcatcttttagtagtgcctc

SEQ ID NO: 3148916 - DNA, 25 bp, Homo sapien
aggctgtttgggaagcatggctgag

SEQ ID NO: 3148917 - DNA, 25 bp, Homo sapien
atggggaagcaggaaaatcttcacc

SEQ ID NO: 3148918 - DNA, 25 bp, Homo sapien
gggaagcaggaaaatcttcacctgg

SEQ ID NO: 3148919 - DNA, 25 bp, Homo sapien
cgttccacaggctgtttgggaagca

SEQ ID NO: 3148920 - DNA, 25 bp, Homo sapien
aatccacaattaagatctggaagag

SEQ ID NO: 3148921 - DNA, 25 bp, Homo sapien
gctagaaatccacaattaagatctg

SEQ ID NO: 3148922 - DNA, 25 bp, Homo sapien
ttctcaccaggtcatcacatggcct

SEQ ID NO: 3148923 - DNA, 25 bp, Homo sapien
tcaccaggtcatcacatggcctttt

SEQ ID NO: 3148924 - DNA, 25 bp, Homo sapien
atgcaggtcatcttaaaaggattaa

SEQ ID NO: 3148925 - DNA, 25 bp, Homo sapien
caaaatgcaggtcatcttaaaagga

SEQ ID NO: 3148926 - DNA, 25 bp, Homo sapien
aaatgcaggtcatcttaaaaggatt

SEQ ID NO: 3148927 - DNA, 25 bp, Homo sapien
aaaatgcaggtcatcttaaaaggat

SEQ ID NO: 3148928 - DNA, 25 bp, Homo sapien
tttttctccattgactggatttcac

SEQ ID NO: 3148929 - DNA, 25 bp, Homo sapien
ttttctccattgactggatttcacc

SEQ ID NO: 3148930 - DNA, 25 bp, Homo sapien
agtgaagacttctgtggacatcctc

SEQ ID NO: 3148931 - DNA, 25 bp, Homo sapien
tgttgtaattctcgttccagtttaa

SEQ ID NO: 3148932 - DNA, 25 bp, Homo sapien
taattctcgttccagtttaactcac

SEQ ID NO: 3148933 - DNA, 25 bp, Homo sapien
actcagtgaagacttctgtggacat

SEQ ID NO: 3148934 - DNA, 25 bp, Homo sapien
cacttggtcttcttataagcactgg

SEQ ID NO: 3148935 - DNA, 25 bp, Homo sapien
gaaagcacttggtcttcttataagc

SEQ ID NO: 3148936 - DNA, 25 bp, Homo sapien
tcttataagcactggagctaacagg

SEQ ID NO: 3148937 - DNA, 25 bp, Homo sapien
tggtcttcttataagcactggagct

SEQ ID NO: 3148938 - DNA, 25 bp, Homo sapien
cagactccattcctgatgctgtctt

SEQ ID NO: 3148939 - DNA, 25 bp, Homo sapien
gcaacacatcgcaagccacttgcat

SEQ ID NO: 3148940 - DNA, 25 bp, Homo sapien
acagactccattcctgatgctgtct

SEQ ID NO: 3148941 - DNA, 25 bp, Homo sapien
ctgtcttttgcaacacatcgcaagc

SEQ ID NO: 3148942 - DNA, 25 bp, Homo sapien
ggtgagtcagtttcttgtggcgtcc

SEQ ID NO: 3148943 - DNA, 25 bp, Homo sapien
tgtggcgtcctttggacaacagctg

SEQ ID NO: 3148944 - DNA, 25 bp, Homo sapien
gatgtcagtagggtccttcaggcaa

SEQ ID NO: 3148945 - DNA, 25 bp, Homo sapien
caggcaagttgtgatcagcagggtc

SEQ ID NO: 3148946 - DNA, 25 bp, Homo sapien
cttgcaagtatattcaggagctgtg

SEQ ID NO: 3148947 - DNA, 25 bp, Homo sapien
acagcttcccttgggtatgatatat

SEQ ID NO: 3148948 - DNA, 25 bp, Homo sapien
tgggtatgatatatccagcaggcaa

SEQ ID NO: 3148949 - DNA, 25 bp, Homo sapien
cagcaggcaatctccggtactgtaa

SEQ ID NO: 3148950 - DNA, 25 bp, Homo sapien
taatctccctgaacccagtttaaca

SEQ ID NO: 3148951 - DNA, 25 bp, Homo sapien
ggctgtctccggtaatctccctgaa

SEQ ID NO: 3148952 - DNA, 25 bp, Homo sapien
tcactggctgtctccggtaatctcc

SEQ ID NO: 3148953 - DNA, 25 bp, Homo sapien
gaagatcactggctgtctccggtaa

SEQ ID NO: 3148954 - DNA, 25 bp, Homo sapien
cagtatactcatcatctattacaat

SEQ ID NO: 3148955 - DNA, 25 bp, Homo sapien
tcaacagtatactcatcatctatta

SEQ ID NO: 3148956 - DNA, 25 bp, Homo sapien
aacagtatactcatcatctattaca

SEQ ID NO: 3148957 - DNA, 25 bp, Homo sapien
acagtatactcatcatctattacaa

SEQ ID NO: 3148958 - DNA, 25 bp, Homo sapien
tatctgtcagctataaaagactggg

SEQ ID NO: 3148959 - DNA, 25 bp, Homo sapien
tgttactccaggtaaacgtgggata

SEQ ID NO: 3148960 - DNA, 25 bp, Homo sapien
gggttttaaccatgagcttcgtctg

SEQ ID NO: 3148961 - DNA, 25 bp, Homo sapien
gaagtttctcaacagtctgcccagg

SEQ ID NO: 3148962 - DNA, 25 bp, Homo sapien
atcaccttattattgactcaaaaga

SEQ ID NO: 3148963 - DNA, 25 bp, Homo sapien
ggacacaaaacatgccatcacttaa

SEQ ID NO: 3148964 - DNA, 25 bp, Homo sapien
agtagaacaaagcattgattttaag

SEQ ID NO: 3148965 - DNA, 25 bp, Homo sapien
ttatcagggtaattagggagaactg

SEQ ID NO: 3148966 - DNA, 25 bp, Homo sapien
gacagactactaccaagactaacaa

SEQ ID NO: 3148967 - DNA, 25 bp, Homo sapien
aaaatcaatgaaccaagaactagtt

SEQ ID NO: 3148968 - DNA, 25 bp, Homo sapien
ttgacagactactaccaagactaac

SEQ ID NO: 3148969 - DNA, 25 bp, Homo sapien
cagactactaccaagactaacaaag

SEQ ID NO: 3148970 - DNA, 25 bp, Homo sapien
tttgctgcattaactgagcaaacat

SEQ ID NO: 3148971 - DNA, 25 bp, Homo sapien
cttccatatcaaggattaacacaat

SEQ ID NO: 3148972 - DNA, 25 bp, Homo sapien
ttttcagctccacttattctgcaga

SEQ ID NO: 3148973 - DNA, 25 bp, Homo sapien
ttcagctccacttattctgcagaag

SEQ ID NO: 3148974 - DNA, 25 bp, Homo sapien
aaccttccatatcaaggattaacac

SEQ ID NO: 3148975 - DNA, 25 bp, Homo sapien
cactgggcgatgttcatcatcaaag

SEQ ID NO: 3148976 - DNA, 25 bp, Homo sapien
taggagtacggatgatcaggaaaga

SEQ ID NO: 3148977 - DNA, 25 bp, Homo sapien
tagctggttaaagccaaaagagatc

SEQ ID NO: 3148978 - DNA, 25 bp, Homo sapien
actaccttcactgggcgatgttcat

SEQ ID NO: 3148979 - DNA, 25 bp, Homo sapien
ttctgcacagttgtgtgatgctgtc

SEQ ID NO: 3148980 - DNA, 25 bp, Homo sapien
tactattctgcacagttgtgtgatg

SEQ ID NO: 3148981 - DNA, 25 bp, Homo sapien
actattctgcacagttgtgtgatgc

SEQ ID NO: 3148982 - DNA, 25 bp, Homo sapien
tattctgcacagttgtgtgatgctg

SEQ ID NO: 3148983 - DNA, 25 bp, Homo sapien
tgaaccagatgagtaggacctgaag

SEQ ID NO: 3148984 - DNA, 25 bp, Homo sapien
tggtcctaagaggtattcccacagc

SEQ ID NO: 3148985 - DNA, 25 bp, Homo sapien
tgtgagcattcctactggcatcagg

SEQ ID NO: 3148986 - DNA, 25 bp, Homo sapien
cctgctagttctgcggaatccgggc

SEQ ID NO: 3148987 - DNA, 25 bp, Homo sapien
ggcatttttgcaccgtcttggtgca

SEQ ID NO: 3148988 - DNA, 25 bp, Homo sapien
cctgctggcctttgaaaggctcact

SEQ ID NO: 3148989 - DNA, 25 bp, Homo sapien
actgtggcatttttgcaccgtcttg

SEQ ID NO: 3148990 - DNA, 25 bp, Homo sapien
tggcctttgaaaggctcactgtggc

SEQ ID NO: 3148991 - DNA, 25 bp, Homo sapien
agagggggatgggtcataggataat

SEQ ID NO: 3148992 - DNA, 25 bp, Homo sapien
agagagggggatgggtcataggata

SEQ ID NO: 3148993 - DNA, 25 bp, Homo sapien
tcagagagggggatgggtcatagga

SEQ ID NO: 3148994 - DNA, 25 bp, Homo sapien
ctcagagagggggatgggtcatagg

SEQ ID NO: 3148995 - DNA, 25 bp, Homo sapien
tcccacttcacccaggcttgccaca

SEQ ID NO: 3148996 - DNA, 25 bp, Homo sapien
ctctctcccacttcacccaggcttg

SEQ ID NO: 3148997 - DNA, 25 bp, Homo sapien
ccagattctgtctactctcctctct

SEQ ID NO: 3148998 - DNA, 25 bp, Homo sapien
acttcacccaggcttgccacaatca

SEQ ID NO: 3148999 - DNA, 25 bp, Homo sapien
catccctcatcttctgtgcagccac

SEQ ID NO: 3149000 - DNA, 25 bp, Homo sapien
tcatccctcatcttctgtgcagcca

SEQ ID NO: 3149001 - DNA, 25 bp, Homo sapien
tcatcttctgtgcagccacaatatt

SEQ ID NO: 3149002 - DNA, 25 bp, Homo sapien
tctgtgcagccacaatattttgagc

SEQ ID NO: 3149003 - DNA, 25 bp, Homo sapien
taatatatgtgccatccaagtgacg

SEQ ID NO: 3149004 - DNA, 25 bp, Homo sapien
tatatgtgccatccaagtgacgact

SEQ ID NO: 3149005 - DNA, 25 bp, Homo sapien
gaatgcctcaggaatttgtatgtca

SEQ ID NO: 3149006 - DNA, 25 bp, Homo sapien
tttaatatatgtgccatccaagtga

SEQ ID NO: 3149007 - DNA, 25 bp, Homo sapien
tgccatcacgcagaccaactttttc

SEQ ID NO: 3149008 - DNA, 25 bp, Homo sapien
cagttgacttttgaggaacatggat

SEQ ID NO: 3149009 - DNA, 25 bp, Homo sapien
tatactcaagtgtaaagaccttagg

SEQ ID NO: 3149010 - DNA, 25 bp, Homo sapien
caataaactgggtataagctgtcaa

SEQ ID NO: 3149011 - DNA, 25 bp, Homo sapien
tctctttatgttttcataggcatca

SEQ ID NO: 3149012 - DNA, 25 bp, Homo sapien
tcataggcatcatgagtaaggagac

SEQ ID NO: 3149013 - DNA, 25 bp, Homo sapien
tcatgagtaaggagacgaggacaga

SEQ ID NO: 3149014 - DNA, 25 bp, Homo sapien
tatgttttcataggcatcatgagta

SEQ ID NO: 3149015 - DNA, 25 bp, Homo sapien
tgggtagtacaaatgattatctcct

SEQ ID NO: 3149016 - DNA, 25 bp, Homo sapien
gaatagaaaaggattgaggtaaaga

SEQ ID NO: 3149017 - DNA, 25 bp, Homo sapien
gaggtaaagaatgcataaaatctgg

SEQ ID NO: 3149018 - DNA, 25 bp, Homo sapien
aatctggaagattattagacggttt

SEQ ID NO: 3149019 - DNA, 25 bp, Homo sapien
tcacacactcctctttttaactccc

SEQ ID NO: 3149020 - DNA, 25 bp, Homo sapien
caggacactttccttctcacacact

SEQ ID NO: 3149021 - DNA, 25 bp, Homo sapien
gacactttccttctcacacactcct

SEQ ID NO: 3149022 - DNA, 25 bp, Homo sapien
ctcacacactcctctttttaactcc

SEQ ID NO: 3149023 - DNA, 25 bp, Homo sapien
aatataagtgtgagaaacctttgtt

SEQ ID NO: 3149024 - DNA, 25 bp, Homo sapien
agcaatataagtgtgagaaaccttt

SEQ ID NO: 3149025 - DNA, 25 bp, Homo sapien
caggcaaaatttccggtgaggtctt

SEQ ID NO: 3149026 - DNA, 25 bp, Homo sapien
tcaggcaaaatttccggtgaggtct

SEQ ID NO: 3149027 - DNA, 25 bp, Homo sapien
agtaccaaatacatagcccctgtgg

SEQ ID NO: 3149028 - DNA, 25 bp, Homo sapien
gaataactgctgactaatacctcct

SEQ ID NO: 3149029 - DNA, 25 bp, Homo sapien
tccgtaggaaagatgtatgagtcac

SEQ ID NO: 3149030 - DNA, 25 bp, Homo sapien
tattcaccgaagtaagtgctccgta

SEQ ID NO: 3149031 - DNA, 25 bp, Homo sapien
gatactaccaatgaagagttgagaa

SEQ ID NO: 3149032 - DNA, 25 bp, Homo sapien
tcctagcatagaggaaggccctctc

SEQ ID NO: 3149033 - DNA, 25 bp, Homo sapien
gagaacacctctccaggtgaaggag

SEQ ID NO: 3149034 - DNA, 25 bp, Homo sapien
ggcaaatatgcctctgataagcaat

SEQ ID NO: 3149035 - DNA, 25 bp, Homo sapien
aatgagagtatctgaagtaaactcc

SEQ ID NO: 3149036 - DNA, 25 bp, Homo sapien
cgtggctgacaataatgagagtatc

SEQ ID NO: 3149037 - DNA, 25 bp, Homo sapien
ggttttatccccaccgtggctgaca

SEQ ID NO: 3149038 - DNA, 25 bp, Homo sapien
tccccaccgtggctgacaataatga

SEQ ID NO: 3149039 - DNA, 25 bp, Homo sapien
gcattcgacttccaaactcgcagta

SEQ ID NO: 3149040 - DNA, 25 bp, Homo sapien
gcttttctcattcgcattcgacttc

SEQ ID NO: 3149041 - DNA, 25 bp, Homo sapien
cattcgcattcgacttccaaactcg

SEQ ID NO: 3149042 - DNA, 25 bp, Homo sapien
ttccaaactcgcagtacttcccaag

SEQ ID NO: 3149043 - DNA, 25 bp, Homo sapien
agtttaagtcctaaaggagttgctg

SEQ ID NO: 3149044 - DNA, 25 bp, Homo sapien
taagtcctaaaggagttgctgttat

SEQ ID NO: 3149045 - DNA, 25 bp, Homo sapien
agatgagtttaagtcctaaaggagt

SEQ ID NO: 3149046 - DNA, 25 bp, Homo sapien
tgagtttaagtcctaaaggagttgc

SEQ ID NO: 3149047 - DNA, 25 bp, Homo sapien
caatgcgaagagatttgtgaacaca

SEQ ID NO: 3149048 - DNA, 25 bp, Homo sapien
gaacacactgatgcttttactccac

SEQ ID NO: 3149049 - DNA, 25 bp, Homo sapien
tagagcctagatatcacacaatgcg

SEQ ID NO: 3149050 - DNA, 25 bp, Homo sapien
tctccaagaatattgtacagatggc

SEQ ID NO: 3149051 - DNA, 25 bp, Homo sapien
gtactgctctttgccacgtctctgc

SEQ ID NO: 3149052 - DNA, 25 bp, Homo sapien
aagtagttgatagccaatttcttgg

SEQ ID NO: 3149053 - DNA, 25 bp, Homo sapien
tgccacgtctctgcatttcaagtag

SEQ ID NO: 3149054 - DNA, 25 bp, Homo sapien
tggtgtaccgtgaaaagcctataac

SEQ ID NO: 3149055 - DNA, 25 bp, Homo sapien
cctttactgaagactcatcctcatc

SEQ ID NO: 3149056 - DNA, 25 bp, Homo sapien
agcacaagtaatcatatacccttta

SEQ ID NO: 3149057 - DNA, 25 bp, Homo sapien
tcatctattgaggatggtcgtcttc

SEQ ID NO: 3149058 - DNA, 25 bp, Homo sapien
cagccatatttaccctagtgatcaa

SEQ ID NO: 3149059 - DNA, 25 bp, Homo sapien
cccatctgttggtcacttagtaacc

SEQ ID NO: 3149060 - DNA, 25 bp, Homo sapien
tattctccataccaccacgagagtg

SEQ ID NO: 3149061 - DNA, 25 bp, Homo sapien
tgaaatgttgtaccatcgcagtcca

SEQ ID NO: 3149062 - DNA, 25 bp, Homo sapien
tagtaaccatatgagctgccagagc

SEQ ID NO: 3149063 - DNA, 25 bp, Homo sapien
ttccacagaagagtttctggaacat

SEQ ID NO: 3149064 - DNA, 25 bp, Homo sapien
ttgttttccacagaagagtttctgg

SEQ ID NO: 3149065 - DNA, 25 bp, Homo sapien
tgttttccacagaagagtttctgga

SEQ ID NO: 3149066 - DNA, 25 bp, Homo sapien
ttttccacagaagagtttctggaac

SEQ ID NO: 3149067 - DNA, 25 bp, Homo sapien
cgtgtgatctatcgtaggactaaat

SEQ ID NO: 3149068 - DNA, 25 bp, Homo sapien
cacttcgatgaatagtcgtgtgatc

SEQ ID NO: 3149069 - DNA, 25 bp, Homo sapien
cgtaggactaaatacagtagaatca

SEQ ID NO: 3149070 - DNA, 25 bp, Homo sapien
gcttttgttggcaccagtattttca

SEQ ID NO: 3149071 - DNA, 25 bp, Homo sapien
ttcacatatgggcaggctttcaagt

SEQ ID NO: 3149072 - DNA, 25 bp, Homo sapien
tgggcaggctttcaagtgagaatcc

SEQ ID NO: 3149073 - DNA, 25 bp, Homo sapien
tggcctttaccaacagatctaaatt

SEQ ID NO: 3149074 - DNA, 25 bp, Homo sapien
gctttcaagtgagaatcctggcctt

SEQ ID NO: 3149075 - DNA, 25 bp, Homo sapien
ctgtttgggaggtgcactgcctttc

SEQ ID NO: 3149076 - DNA, 25 bp, Homo sapien
ggaagacagatttagaatccgaacg

SEQ ID NO: 3149077 - DNA, 25 bp, Homo sapien
tgcttcccacgggtctctcttggaa

SEQ ID NO: 3149078 - DNA, 25 bp, Homo sapien
gggaaaaccaattaggcactgcctg

SEQ ID NO: 3149079 - DNA, 25 bp, Homo sapien
ttcccacgggtctctcttggaagac

SEQ ID NO: 3149080 - DNA, 25 bp, Homo sapien
taggcagagaaagcgcctgcttcca

SEQ ID NO: 3149081 - DNA, 25 bp, Homo sapien
ctccagcgtcttcgcctgtacagtt

SEQ ID NO: 3149082 - DNA, 25 bp, Homo sapien
ttcgcctgtacagttgttccagctg

SEQ ID NO: 3149083 - DNA, 25 bp, Homo sapien
gctgccagaggctttctggttacca

SEQ ID NO: 3149084 - DNA, 25 bp, Homo sapien
aatgtgatgaaataacgagactcat

SEQ ID NO: 3149085 - DNA, 25 bp, Homo sapien
agggacaatttggtccaatcagctg

SEQ ID NO: 3149086 - DNA, 25 bp, Homo sapien
agcacaattgctgggtcacccctca

SEQ ID NO: 3149087 - DNA, 25 bp, Homo sapien
gagactcattgcctgtgtagctcag

SEQ ID NO: 3149088 - DNA, 25 bp, Homo sapien
tggaagagccactagatgcacatga

SEQ ID NO: 3149089 - DNA, 25 bp, Homo sapien
tgatcatgaacaaaggctctatggc

SEQ ID NO: 3149090 - DNA, 25 bp, Homo sapien
tggactaattcagtagcccctgctg

SEQ ID NO: 3149091 - DNA, 25 bp, Homo sapien
gatgggttaaattggtctgctgaac

SEQ ID NO: 3149092 - DNA, 25 bp, Homo sapien
ggcaccattgagcacggaatgaatg

SEQ ID NO: 3149093 - DNA, 25 bp, Homo sapien
atcccggcacctcaggatgccgagg

SEQ ID NO: 3149094 - DNA, 25 bp, Homo sapien
gcaccattgagcacggaatgaatga

SEQ ID NO: 3149095 - DNA, 25 bp, Homo sapien
gcaatcccggcacctcaggatgccg

SEQ ID NO: 3149096 - DNA, 25 bp, Homo sapien
ctgttcatgccaagtataagatact

SEQ ID NO: 3149097 - DNA, 25 bp, Homo sapien
taagatacttaggttctctggttgc

SEQ ID NO: 3149098 - DNA, 25 bp, Homo sapien
tttcaattagactctgcaatgggca

SEQ ID NO: 3149099 - DNA, 25 bp, Homo sapien
ctctggttgcaaggttttaaatggc

SEQ ID NO: 3149100 - DNA, 25 bp, Homo sapien
cctcaggattggttgccttaggaca

SEQ ID NO: 3149101 - DNA, 25 bp, Homo sapien
gatgggaatggatttactggcaacc

SEQ ID NO: 3149102 - DNA, 25 bp, Homo sapien
aacagaaggttttgtgctgcccaag

SEQ ID NO: 3149103 - DNA, 25 bp, Homo sapien
taggaagagcttagtcacgacccac

SEQ ID NO: 3149104 - DNA, 25 bp, Homo sapien
tgttcctaagtcaataaaacggatg

SEQ ID NO: 3149105 - DNA, 25 bp, Homo sapien
tggcaggagagtaagcaaaaccttt

SEQ ID NO: 3149106 - DNA, 25 bp, Homo sapien
aaacctttatgactcacagtgctaa

SEQ ID NO: 3149107 - DNA, 25 bp, Homo sapien
taaaacggatggcaggagagtaagc

SEQ ID NO: 3149108 - DNA, 25 bp, Homo sapien
tcctttttgttcgtcttctatccca

SEQ ID NO: 3149109 - DNA, 25 bp, Homo sapien
atgcttttcttggtacctgcaaaca

SEQ ID NO: 3149110 - DNA, 25 bp, Homo sapien
ttggtacctgcaaacaagatgaatg

SEQ ID NO: 3149111 - DNA, 25 bp, Homo sapien
tttcttggtacctgcaaacaagatg

SEQ ID NO: 3149112 - DNA, 25 bp, Homo sapien
cacatacaccaacttagtttcagta

SEQ ID NO: 3149113 - DNA, 25 bp, Homo sapien
tcatctaatgttttacgtttggatt

SEQ ID NO: 3149114 - DNA, 25 bp, Homo sapien
atttcaacttctcacagttctcatc

SEQ ID NO: 3149115 - DNA, 25 bp, Homo sapien
tttacgtttggatttcacatacacc

SEQ ID NO: 3149116 - DNA, 25 bp, Homo sapien
tgaagagtacttaagcaggcactgg

SEQ ID NO: 3149117 - DNA, 25 bp, Homo sapien
tgatgaagactcatagtgagcactg

SEQ ID NO: 3149118 - DNA, 25 bp, Homo sapien
actctggaactaaaatactgctctg

SEQ ID NO: 3149119 - DNA, 25 bp, Homo sapien
gattaatggcctgatggtgtttccc

SEQ ID NO: 3149120 - DNA, 25 bp, Homo sapien
gttctttgttaagcgcacatatttc

SEQ ID NO: 3149121 - DNA, 25 bp, Homo sapien
tttgttaagcgcacatatttctgct

SEQ ID NO: 3149122 - DNA, 25 bp, Homo sapien
atatttctgcttcttcgcctccacc

SEQ ID NO: 3149123 - DNA, 25 bp, Homo sapien
ctagttctttgttaagcgcacatat

SEQ ID NO: 3149124 - DNA, 25 bp, Homo sapien
tttttctcttcttctctttagacat

SEQ ID NO: 3149125 - DNA, 25 bp, Homo sapien
catgatttttctcttcttctcttta

SEQ ID NO: 3149126 - DNA, 25 bp, Homo sapien
gatttttctcttcttctctttagac

SEQ ID NO: 3149127 - DNA, 25 bp, Homo sapien
tgatttttctcttcttctctttaga

SEQ ID NO: 3149128 - DNA, 25 bp, Homo sapien
ggtctgcagcatcccgaatctggat

SEQ ID NO: 3149129 - DNA, 25 bp, Homo sapien
ctggagctttgactctttgtgatag

SEQ ID NO: 3149130 - DNA, 25 bp, Homo sapien
tgagtggcctcgttgatcctagctg

SEQ ID NO: 3149131 - DNA, 25 bp, Homo sapien
gatccctattcttgctaaggccctg

SEQ ID NO: 3149132 - DNA, 25 bp, Homo sapien
tattttcagtcttacgccagtatgg

SEQ ID NO: 3149133 - DNA, 25 bp, Homo sapien
tcctcctcaatctggaaatgtccaa

SEQ ID NO: 3149134 - DNA, 25 bp, Homo sapien
tttcaagggtggcagctcagttgcc

SEQ ID NO: 3149135 - DNA, 25 bp, Homo sapien
ccaggtgcatactcttgtaagtaca

SEQ ID NO: 3149136 - DNA, 25 bp, Homo sapien
ttcttcatgctggagtagaactgat

SEQ ID NO: 3149137 - DNA, 25 bp, Homo sapien
gaactgatttctaccagcagctaca

SEQ ID NO: 3149138 - DNA, 25 bp, Homo sapien
tcggtcccagccagaattattcttc

SEQ ID NO: 3149139 - DNA, 25 bp, Homo sapien
tcagcttcttcagttcggtcccagc

SEQ ID NO: 3149140 - DNA, 25 bp, Homo sapien
ggtaagtctgcacccacatggcttt

SEQ ID NO: 3149141 - DNA, 25 bp, Homo sapien
gtgactgatggtaagtctgcaccca

SEQ ID NO: 3149142 - DNA, 25 bp, Homo sapien
ggtcagtgggattatgctcaatgct

SEQ ID NO: 3149143 - DNA, 25 bp, Homo sapien
tcttgaagtcttgcaggtcagtggg

SEQ ID NO: 3149144 - DNA, 25 bp, Homo sapien
ccttaaatttgcagtcatgaattgc

SEQ ID NO: 3149145 - DNA, 25 bp, Homo sapien
gcagtcatgaattgcttcaatcctg

SEQ ID NO: 3149146 - DNA, 25 bp, Homo sapien
gaattgcttcaatcctgctgtctgc

SEQ ID NO: 3149147 - DNA, 25 bp, Homo sapien
tatcgtttccttaaatttgcagtca

SEQ ID NO: 3149148 - DNA, 25 bp, Homo sapien
tctaactgttccctgtatctctctg

SEQ ID NO: 3149149 - DNA, 25 bp, Homo sapien
ctaactgttccctgtatctctctgt

SEQ ID NO: 3149150 - DNA, 25 bp, Homo sapien
ccttgtttgggaacacttttgactg

SEQ ID NO: 3149151 - DNA, 25 bp, Homo sapien
cagtctaactgttccctgtatctct

SEQ ID NO: 3149152 - DNA, 25 bp, Homo sapien
gctttgaagcgtctttccaaggcat

SEQ ID NO: 3149153 - DNA, 25 bp, Homo sapien
tttccaactgggaccatccagcaag

SEQ ID NO: 3149154 - DNA, 25 bp, Homo sapien
ccaagagttcttttaggctgtcagc

SEQ ID NO: 3149155 - DNA, 25 bp, Homo sapien
gagcccactagctattccctgagca

SEQ ID NO: 3149156 - DNA, 25 bp, Homo sapien
cactgtcatccaataagattcttga

SEQ ID NO: 3149157 - DNA, 25 bp, Homo sapien
cttgcttacttttggtttgcatttg

SEQ ID NO: 3149158 - DNA, 25 bp, Homo sapien
ccttaccttgagtatctaagtgcct

SEQ ID NO: 3149159 - DNA, 25 bp, Homo sapien
tgtctatctcctcttaggtgtggta

SEQ ID NO: 3149160 - DNA, 25 bp, Homo sapien
cttcccgttttgctaaactatatct

SEQ ID NO: 3149161 - DNA, 25 bp, Homo sapien
tcttcccgttttgctaaactatatc

SEQ ID NO: 3149162 - DNA, 25 bp, Homo sapien
ttcccgttttgctaaactatatctc

SEQ ID NO: 3149163 - DNA, 25 bp, Homo sapien
tcccgttttgctaaactatatctca

SEQ ID NO: 3149164 - DNA, 25 bp, Homo sapien
tcagggcttctctctaatttctctg

SEQ ID NO: 3149165 - DNA, 25 bp, Homo sapien
tctctaatttctctgacttcatttt

SEQ ID NO: 3149166 - DNA, 25 bp, Homo sapien
cttctctctaatttctctgacttca

SEQ ID NO: 3149167 - DNA, 25 bp, Homo sapien
ggcttctctctaatttctctgactt

SEQ ID NO: 3149168 - DNA, 25 bp, Homo sapien
ggcattggtgacttgatggtcttat

SEQ ID NO: 3149169 - DNA, 25 bp, Homo sapien
tcaacataaggagggcattggtgac

SEQ ID NO: 3149170 - DNA, 25 bp, Homo sapien
tggtgacttgatggtcttattgcaa

SEQ ID NO: 3149171 - DNA, 25 bp, Homo sapien
tattgcaaataatttcagcagagga

SEQ ID NO: 3149172 - DNA, 25 bp, Homo sapien
atcttagggatgataaagacccgat

SEQ ID NO: 3149173 - DNA, 25 bp, Homo sapien
gcttatgggatacagctggacaaga

SEQ ID NO: 3149174 - DNA, 25 bp, Homo sapien
ttagggatgataaagacccgatcga

SEQ ID NO: 3149175 - DNA, 25 bp, Homo sapien
ggaactaaacttgatcttagggatg

SEQ ID NO: 3149176 - DNA, 25 bp, Homo sapien
agattgccttgtctctgtattaatt

SEQ ID NO: 3149177 - DNA, 25 bp, Homo sapien
tctgtattaattccagcctgtgtgc

SEQ ID NO: 3149178 - DNA, 25 bp, Homo sapien
gtattaattccagcctgtgtgctta

SEQ ID NO: 3149179 - DNA, 25 bp, Homo sapien
ttgccttgtctctgtattaattcca

SEQ ID NO: 3149180 - DNA, 25 bp, Homo sapien
tttaaagtccccagtgtgccattct

SEQ ID NO: 3149181 - DNA, 25 bp, Homo sapien
agtccccagtgtgccattcttttct

SEQ ID NO: 3149182 - DNA, 25 bp, Homo sapien
tgccatagcaaagcatttaaagtcc

SEQ ID NO: 3149183 - DNA, 25 bp, Homo sapien
ctgtagaattgagtcaaatgccata

SEQ ID NO: 3149184 - DNA, 25 bp, Homo sapien
tgacttaggagatgatgccattaca

SEQ ID NO: 3149185 - DNA, 25 bp, Homo sapien
aattcagtgacttaggagatgatgc

SEQ ID NO: 3149186 - DNA, 25 bp, Homo sapien
taccagcggcattgcttctttcaga

SEQ ID NO: 3149187 - DNA, 25 bp, Homo sapien
tataaaatagaaccattgttcagca

SEQ ID NO: 3149188 - DNA, 25 bp, Homo sapien
ggcttgatcttcactcactgcaaac

SEQ ID NO: 3149189 - DNA, 25 bp, Homo sapien
tggcttgatcttcactcactgcaaa

SEQ ID NO: 3149190 - DNA, 25 bp, Homo sapien
gaaatgctggtcctgcttctccatg

SEQ ID NO: 3149191 - DNA, 25 bp, Homo sapien
gaaatagtggctatttcccacccag

SEQ ID NO: 3149192 - DNA, 25 bp, Homo sapien
gaatctgggatttaataggcccatg

SEQ ID NO: 3149193 - DNA, 25 bp, Homo sapien
gaacacacctatatctgtaggccct

SEQ ID NO: 3149194 - DNA, 25 bp, Homo sapien
caaaatgtagccgtcagactcttct

SEQ ID NO: 3149195 - DNA, 25 bp, Homo sapien
tgtcccaaaatgtagccgtcagact

SEQ ID NO: 3149196 - DNA, 25 bp, Homo sapien
tcccaaaatgtagccgtcagactct

SEQ ID NO: 3149197 - DNA, 25 bp, Homo sapien
aatgtagccgtcagactcttcttcc

SEQ ID NO: 3149198 - DNA, 25 bp, Homo sapien
gccttactgcctcttaataataatg

SEQ ID NO: 3149199 - DNA, 25 bp, Homo sapien
gtcggccttactgcctcttaataat

SEQ ID NO: 3149200 - DNA, 25 bp, Homo sapien
ttgtgtcggccttactgcctcttaa

SEQ ID NO: 3149201 - DNA, 25 bp, Homo sapien
atgagctcaatctaggggactttga

SEQ ID NO: 3149202 - DNA, 25 bp, Homo sapien
ttgggtatctataccttcagtaggg

SEQ ID NO: 3149203 - DNA, 25 bp, Homo sapien
taatggctccaaataggagtgaacc

SEQ ID NO: 3149204 - DNA, 25 bp, Homo sapien
tggttctggcttgattaatggctcc

SEQ ID NO: 3149205 - DNA, 25 bp, Homo sapien
taggggttggcagcctactggttct

SEQ ID NO: 3149206 - DNA, 25 bp, Homo sapien
gttgagctcctaatgcacagtacac

SEQ ID NO: 3149207 - DNA, 25 bp, Homo sapien
cttgaaagcgacaccgctttgcttc

SEQ ID NO: 3149208 - DNA, 25 bp, Homo sapien
caccatgcgagttattgcttatcag

SEQ ID NO: 3149209 - DNA, 25 bp, Homo sapien
gcttatcagtgaagttgtgatcatc

SEQ ID NO: 3149210 - DNA, 25 bp, Homo sapien
caaaggagagcactgagttcttgtg

SEQ ID NO: 3149211 - DNA, 25 bp, Homo sapien
tcaaaggagagcactgagttcttgt

SEQ ID NO: 3149212 - DNA, 25 bp, Homo sapien
ggagagcactgagttcttgtggcac

SEQ ID NO: 3149213 - DNA, 25 bp, Homo sapien
aaggagagcactgagttcttgtggc

SEQ ID NO: 3149214 - DNA, 25 bp, Homo sapien
ggatgtattgccctgaaacatctgt

SEQ ID NO: 3149215 - DNA, 25 bp, Homo sapien
aaccaagcttggcttgcaggatgta

SEQ ID NO: 3149216 - DNA, 25 bp, Homo sapien
atgtattgccctgaaacatctgtgg

SEQ ID NO: 3149217 - DNA, 25 bp, Homo sapien
agcttggcttgcaggatgtattgcc

SEQ ID NO: 3149218 - DNA, 25 bp, Homo sapien
ggaatttgcctctgcgccgtctttt

SEQ ID NO: 3149219 - DNA, 25 bp, Homo sapien
gggttcgttgtcagtaagctgacag

SEQ ID NO: 3149220 - DNA, 25 bp, Homo sapien
aaggttcggaatttgcctctgcgcc

SEQ ID NO: 3149221 - DNA, 25 bp, Homo sapien
tgcgccgtctttttttgcctgttac

SEQ ID NO: 3149222 - DNA, 25 bp, Homo sapien
tggaacgcgcagtccttcatgtgac

SEQ ID NO: 3149223 - DNA, 25 bp, Homo sapien
tcagtttggaacgcgcagtccttca

SEQ ID NO: 3149224 - DNA, 25 bp, Homo sapien
gtttggaacgcgcagtccttcatgt

SEQ ID NO: 3149225 - DNA, 25 bp, Homo sapien
gaacgcgcagtccttcatgtgaccg

SEQ ID NO: 3149226 - DNA, 25 bp, Homo sapien
ttctcaagctaaatccttcgcctgg

SEQ ID NO: 3149227 - DNA, 25 bp, Homo sapien
caagctaaatccttcgcctggactg

SEQ ID NO: 3149228 - DNA, 25 bp, Homo sapien
tgatgttttctcaagctaaatcctt

SEQ ID NO: 3149229 - DNA, 25 bp, Homo sapien
taaatccttcgcctggactgcctct

SEQ ID NO: 3149230 - DNA, 25 bp, Homo sapien
taacacagtgcagcatgttggcttg

SEQ ID NO: 3149231 - DNA, 25 bp, Homo sapien
tgagaatccggttttcatgcaaagg

SEQ ID NO: 3149232 - DNA, 25 bp, Homo sapien
tatccttaatgaaggaaatcccctg

SEQ ID NO: 3149233 - DNA, 25 bp, Homo sapien
tgtctcctagttcaagtatacagta

SEQ ID NO: 3149234 - DNA, 25 bp, Homo sapien
caggcttgaagtatggcatgttgca

SEQ ID NO: 3149235 - DNA, 25 bp, Homo sapien
aaggtacccgcgatcgctctgtccg

SEQ ID NO: 3149236 - DNA, 25 bp, Homo sapien
tggtttctgccaagaaggtacccgc

SEQ ID NO: 3149237 - DNA, 25 bp, Homo sapien
gggtcagtttcgccctcctgcgctt

SEQ ID NO: 3149238 - DNA, 25 bp, Homo sapien
gcagaggatccgaaagcacagccat

SEQ ID NO: 3149239 - DNA, 25 bp, Homo sapien
ctgcagaggatccgaaagcacagcc

SEQ ID NO: 3149240 - DNA, 25 bp, Homo sapien
tgcagaggatccgaaagcacagcca

SEQ ID NO: 3149241 - DNA, 25 bp, Homo sapien
tgattggcatctttcgttgacagtc

SEQ ID NO: 3149242 - DNA, 25 bp, Homo sapien
cgctcagtgatctggctaaggctgc

SEQ ID NO: 3149243 - DNA, 25 bp, Homo sapien
ggagggtctgttgttctctggttgc

SEQ ID NO: 3149244 - DNA, 25 bp, Homo sapien
acagtcagggaggtcctagaacggg

SEQ ID NO: 3149245 - DNA, 25 bp, Homo sapien
ctccgggtagtcagagacaagctgc

SEQ ID NO: 3149246 - DNA, 25 bp, Homo sapien
tcctagtggaacaggcaacagattt

SEQ ID NO: 3149247 - DNA, 25 bp, Homo sapien
taccaaaagacaccttgtgccttgc

SEQ ID NO: 3149248 - DNA, 25 bp, Homo sapien
ccttgcaaacaatattcctagtgga

SEQ ID NO: 3149249 - DNA, 25 bp, Homo sapien
gctgggcagtaattcccgaatggac

SEQ ID NO: 3149250 - DNA, 25 bp, Homo sapien
ttcaaggaatgcaacttagtcggct

SEQ ID NO: 3149251 - DNA, 25 bp, Homo sapien
tagtcggctgctgggcagtaattcc

SEQ ID NO: 3149252 - DNA, 25 bp, Homo sapien
ttttctgcgaagattcaaggaatgc

SEQ ID NO: 3149253 - DNA, 25 bp, Homo sapien
agccccagactctctcgattttgta

SEQ ID NO: 3149254 - DNA, 25 bp, Homo sapien
ctgtgtgcacaacagaccatggtaa

SEQ ID NO: 3149255 - DNA, 25 bp, Homo sapien
tctctcgattttgtactgtccacat

SEQ ID NO: 3149256 - DNA, 25 bp, Homo sapien
gtgtgcacaacagaccatggtaatc

SEQ ID NO: 3149257 - DNA, 25 bp, Homo sapien
aagtccggccgcaagcgaatgtcat

SEQ ID NO: 3149258 - DNA, 25 bp, Homo sapien
tgacatgttgctgggttcattggtg

SEQ ID NO: 3149259 - DNA, 25 bp, Homo sapien
cactgtctctttcacgtatgacatg

SEQ ID NO: 3149260 - DNA, 25 bp, Homo sapien
tcctttgagcaatctgtccactgtc

SEQ ID NO: 3149261 - DNA, 25 bp, Homo sapien
atattcacttcggagaccatgtcta

SEQ ID NO: 3149262 - DNA, 25 bp, Homo sapien
gatccgcatcccaacgtcgacgggg

SEQ ID NO: 3149263 - DNA, 25 bp, Homo sapien
tatgctggcgacatcgatccgcatc

SEQ ID NO: 3149264 - DNA, 25 bp, Homo sapien
ggagaccatgtctatgctggcgaca

SEQ ID NO: 3149265 - DNA, 25 bp, Homo sapien
aacgcagagggcaaagggacctgtc

SEQ ID NO: 3149266 - DNA, 25 bp, Homo sapien
ccgcagtagcccgtgtgtgtcgaaa

SEQ ID NO: 3149267 - DNA, 25 bp, Homo sapien
gaggtgaccgccaatgaaacgcaga

SEQ ID NO: 3149268 - DNA, 25 bp, Homo sapien
tttcccatctgcgtaagccgaaccg

SEQ ID NO: 3149269 - DNA, 25 bp, Homo sapien
gaaaactcctacacacagtggacgg

SEQ ID NO: 3149270 - DNA, 25 bp, Homo sapien
gcaacaggcttttccgtcttacgag

SEQ ID NO: 3149271 - DNA, 25 bp, Homo sapien
gacggaaccagccaacagagaaagt

SEQ ID NO: 3149272 - DNA, 25 bp, Homo sapien
cgttatttgaagcaggagccgctac

SEQ ID NO: 3149273 - DNA, 25 bp, Homo sapien
ttggcctctcaatagttggcttggg

SEQ ID NO: 3149274 - DNA, 25 bp, Homo sapien
gacactcatagctctctgaaacagg

SEQ ID NO: 3149275 - DNA, 25 bp, Homo sapien
ttacccctggtgtcttggcattaaa

SEQ ID NO: 3149276 - DNA, 25 bp, Homo sapien
taatgtgagttaatgttacccctgg

SEQ ID NO: 3149277 - DNA, 25 bp, Homo sapien
tgaaaaccccaatagcaagcaaaaa

SEQ ID NO: 3149278 - DNA, 25 bp, Homo sapien
cagtagatccaatatgaattaaatc

SEQ ID NO: 3149279 - DNA, 25 bp, Homo sapien
tatgaattaaatcagcaaatggatc

SEQ ID NO: 3149280 - DNA, 25 bp, Homo sapien
ttacatacagtagatccaatatgaa

SEQ ID NO: 3149281 - DNA, 25 bp, Homo sapien
gatccaatatgaattaaatcagcaa

SEQ ID NO: 3149282 - DNA, 25 bp, Homo sapien
caagttagtcgttccaagaagagag

SEQ ID NO: 3149283 - DNA, 25 bp, Homo sapien
gcaccgtaaggtcacaagttagtcg

SEQ ID NO: 3149284 - DNA, 25 bp, Homo sapien
tgagtattgtgcaccgtaaggtcac

SEQ ID NO: 3149285 - DNA, 25 bp, Homo sapien
gatataagtttgagtattgtgcacc

SEQ ID NO: 3149286 - DNA, 25 bp, Homo sapien
catttgggaatttaacatctgctgt

SEQ ID NO: 3149287 - DNA, 25 bp, Homo sapien
attgcaaaagactcctggcatttgg

SEQ ID NO: 3149288 - DNA, 25 bp, Homo sapien
taaggctcttatccagcacagtatg

SEQ ID NO: 3149289 - DNA, 25 bp, Homo sapien
tgtggtcattgtcttcaagaagtcc

SEQ ID NO: 3149290 - DNA, 25 bp, Homo sapien
tgaggtaaaaccatgggaacggcat

SEQ ID NO: 3149291 - DNA, 25 bp, Homo sapien
acagagtacaagccaattttaacaa

SEQ ID NO: 3149292 - DNA, 25 bp, Homo sapien
tgtcgccagtttttcccaatggtga

SEQ ID NO: 3149293 - DNA, 25 bp, Homo sapien
tcataattaaaacccagccaaatct

SEQ ID NO: 3149294 - DNA, 25 bp, Homo sapien
gatgagctgcctagctatcctgaga

SEQ ID NO: 3149295 - DNA, 25 bp, Homo sapien
cagtttgtgaatggagctatcattg

SEQ ID NO: 3149296 - DNA, 25 bp, Homo sapien
gctatcattgtgagtgatgagctgc

SEQ ID NO: 3149297 - DNA, 25 bp, Homo sapien
gagagaactgagaaattgcacagcc

SEQ ID NO: 3149298 - DNA, 25 bp, Homo sapien
gcctcacattggcagtgaaaatcct

SEQ ID NO: 3149299 - DNA, 25 bp, Homo sapien
ttgctctaaaagcagctcttcctca

SEQ ID NO: 3149300 - DNA, 25 bp, Homo sapien
acattggcagtgaaaatcctcatgg

SEQ ID NO: 3149301 - DNA, 25 bp, Homo sapien
aaacttgctctaaaagcagctcttc

SEQ ID NO: 3149302 - DNA, 25 bp, Homo sapien
caaactcttcattgagtgattgtgt

SEQ ID NO: 3149303 - DNA, 25 bp, Homo sapien
ttatttagaagggtgtgatattccg

SEQ ID NO: 3149304 - DNA, 25 bp, Homo sapien
catgattgagagaatgtgcagtatt

SEQ ID NO: 3149305 - DNA, 25 bp, Homo sapien
tgtgtttttcttagcatgattgaga

SEQ ID NO: 3149306 - DNA, 25 bp, Homo sapien
catgaaccaggcttcgcagacgtag

SEQ ID NO: 3149307 - DNA, 25 bp, Homo sapien
cagacgtagccattatttgccaggg

SEQ ID NO: 3149308 - DNA, 25 bp, Homo sapien
ttcacgtattgctgcacccacagac

SEQ ID NO: 3149309 - DNA, 25 bp, Homo sapien
ccttggcactgcagtatcattcacg

SEQ ID NO: 3149310 - DNA, 25 bp, Homo sapien
ggtacaaatggtagagttgccatca

SEQ ID NO: 3149311 - DNA, 25 bp, Homo sapien
tgtaggtacaaatggtagagttgcc

SEQ ID NO: 3149312 - DNA, 25 bp, Homo sapien
caaggctgtaggtacaaatggtaga

SEQ ID NO: 3149313 - DNA, 25 bp, Homo sapien
caaatggtagagttgccatcatgtt

SEQ ID NO: 3149314 - DNA, 25 bp, Homo sapien
tgagtcataagtgcccctagtgttt

SEQ ID NO: 3149315 - DNA, 25 bp, Homo sapien
ataagtgcccctagtgttttcccag

SEQ ID NO: 3149316 - DNA, 25 bp, Homo sapien
atgagtcataagtgcccctagtgtt

SEQ ID NO: 3149317 - DNA, 25 bp, Homo sapien
gtcataagtgcccctagtgttttcc

SEQ ID NO: 3149318 - DNA, 25 bp, Homo sapien
ctgtaagtgctttgaaggcaggaac

SEQ ID NO: 3149319 - DNA, 25 bp, Homo sapien
ggcaggaactgtgtctatcacatca

SEQ ID NO: 3149320 - DNA, 25 bp, Homo sapien
ttattaggtaactacagtgcctggc

SEQ ID NO: 3149321 - DNA, 25 bp, Homo sapien
ctggcacatcataggaactgaaaat

SEQ ID NO: 3149322 - DNA, 25 bp, Homo sapien
tgtgaatgtaagcacacagaggctt

SEQ ID NO: 3149323 - DNA, 25 bp, Homo sapien
acagaggctttaaatcaaggcagtg

SEQ ID NO: 3149324 - DNA, 25 bp, Homo sapien
gctttttaagctcacctaatggaca

SEQ ID NO: 3149325 - DNA, 25 bp, Homo sapien
tggttgaacttcagtagacttgtgc

SEQ ID NO: 3149326 - DNA, 25 bp, Homo sapien
tgtccttccttgtatatccagccaa

SEQ ID NO: 3149327 - DNA, 25 bp, Homo sapien
gtccttccttgtatatccagccaaa

SEQ ID NO: 3149328 - DNA, 25 bp, Homo sapien
ttgtccttccttgtatatccagcca

SEQ ID NO: 3149329 - DNA, 25 bp, Homo sapien
ttgactaagctgtgccaaaagtgga

SEQ ID NO: 3149330 - DNA, 25 bp, Homo sapien
tccgtggaagtaatgtgggctgcca

SEQ ID NO: 3149331 - DNA, 25 bp, Homo sapien
cagtggcgtctcttcttttggcaca

SEQ ID NO: 3149332 - DNA, 25 bp, Homo sapien
aagtggaatccctggtgctgtgcct

SEQ ID NO: 3149333 - DNA, 25 bp, Homo sapien
tgtggcgccctttccgcattttcat

SEQ ID NO: 3149334 - DNA, 25 bp, Homo sapien
ccttctgtggcgccctttccgcatt

SEQ ID NO: 3149335 - DNA, 25 bp, Homo sapien
ttctgtggcgccctttccgcatttt

SEQ ID NO: 3149336 - DNA, 25 bp, Homo sapien
ctgtggcgccctttccgcattttca

SEQ ID NO: 3149337 - DNA, 25 bp, Homo sapien
ttccgacgtgctcccacagtaggct

SEQ ID NO: 3149338 - DNA, 25 bp, Homo sapien
tgggtttggcccttccgacgtgctc

SEQ ID NO: 3149339 - DNA, 25 bp, Homo sapien
aggagccaggaagtctgggtttggc

SEQ ID NO: 3149340 - DNA, 25 bp, Homo sapien
agccaggaagtctgggtttggccct

SEQ ID NO: 3149341 - DNA, 25 bp, Homo sapien
tcagtggtggcactattcaacattt

SEQ ID NO: 3149342 - DNA, 25 bp, Homo sapien
tttctctcttaccacattcctgttt

SEQ ID NO: 3149343 - DNA, 25 bp, Homo sapien
ttcaacatttctctcttaccacatt

SEQ ID NO: 3149344 - DNA, 25 bp, Homo sapien
acatttctctcttaccacattcctg

SEQ ID NO: 3149345 - DNA, 25 bp, Homo sapien
acccagagttggtcagctaccctat

SEQ ID NO: 3149346 - DNA, 25 bp, Homo sapien
gcacaaatgatttcttgtcattcag

SEQ ID NO: 3149347 - DNA, 25 bp, Homo sapien
caagactgctggaaatacatggtga

SEQ ID NO: 3149348 - DNA, 25 bp, Homo sapien
actgttccatcaggatgcagtcgaa

SEQ ID NO: 3149349 - DNA, 25 bp, Homo sapien
aaagaatgactaaaggtgacaccaa

SEQ ID NO: 3149350 - DNA, 25 bp, Homo sapien
catatcctataataacaggttacag

SEQ ID NO: 3149351 - DNA, 25 bp, Homo sapien
ctacatgagggtttgtaatagacct

SEQ ID NO: 3149352 - DNA, 25 bp, Homo sapien
cagatatttccttgttaaaactggt

SEQ ID NO: 3149353 - DNA, 25 bp, Homo sapien
tgtaagattaaattgcagtagggca

SEQ ID NO: 3149354 - DNA, 25 bp, Homo sapien
cagtagggcatcaaatgagagagag

SEQ ID NO: 3149355 - DNA, 25 bp, Homo sapien
tacacaatcctgtacatcagtggaa

SEQ ID NO: 3149356 - DNA, 25 bp, Homo sapien
catctatttggtttgagagagagga

SEQ ID NO: 3149357 - DNA, 25 bp, Homo sapien
caccacatggacccatctgttccag

SEQ ID NO: 3149358 - DNA, 25 bp, Homo sapien
ccagtttgtacttggagcctttcct

SEQ ID NO: 3149359 - DNA, 25 bp, Homo sapien
accacatggacccatctgttccagt

SEQ ID NO: 3149360 - DNA, 25 bp, Homo sapien
ccacatggacccatctgttccagtt

SEQ ID NO: 3149361 - DNA, 25 bp, Homo sapien
tttcctccaccaagataatggcttt

SEQ ID NO: 3149362 - DNA, 25 bp, Homo sapien
tattcttctttagctccactaatcc

SEQ ID NO: 3149363 - DNA, 25 bp, Homo sapien
gctccactaatccaatgacaaaagt

SEQ ID NO: 3149364 - DNA, 25 bp, Homo sapien
aaaataatgagcaataacagtttcc

SEQ ID NO: 3149365 - DNA, 25 bp, Homo sapien
tatcctgtgacacaaaagaccaaag

SEQ ID NO: 3149366 - DNA, 25 bp, Homo sapien
ctgtgacacaaaagaccaaagtaca

SEQ ID NO: 3149367 - DNA, 25 bp, Homo sapien
ttatcctgtgacacaaaagaccaaa

SEQ ID NO: 3149368 - DNA, 25 bp, Homo sapien
tcctgtgacacaaaagaccaaagta

SEQ ID NO: 3149369 - DNA, 25 bp, Homo sapien
tcccttgcttgcatatgctccatgt

SEQ ID NO: 3149370 - DNA, 25 bp, Homo sapien
gattccagattggatctatccagtg

SEQ ID NO: 3149371 - DNA, 25 bp, Homo sapien
gctccatgttctacaagggccgtcc

SEQ ID NO: 3149372 - DNA, 25 bp, Homo sapien
gctgtacctgatctgccctgtggca

SEQ ID NO: 3149373 - DNA, 25 bp, Homo sapien
tgagcagagggcgaagagctcctta

SEQ ID NO: 3149374 - DNA, 25 bp, Homo sapien
gagcagagggcgaagagctccttat

SEQ ID NO: 3149375 - DNA, 25 bp, Homo sapien
agcagagggcgaagagctccttata

SEQ ID NO: 3149376 - DNA, 25 bp, Homo sapien
gatgttgttagtggcctcccgctgt

SEQ ID NO: 3149377 - DNA, 25 bp, Homo sapien
tccttggaggatctgcgtagctggc

SEQ ID NO: 3149378 - DNA, 25 bp, Homo sapien
ggctgaatagtagtccctaaagata

SEQ ID NO: 3149379 - DNA, 25 bp, Homo sapien
aaagtccacatttcacgccaggtac

SEQ ID NO: 3149380 - DNA, 25 bp, Homo sapien
taagcaggtaaacataggagtcacc

SEQ ID NO: 3149381 - DNA, 25 bp, Homo sapien
agtcagtttagcaagagtaccctcc

SEQ ID NO: 3149382 - DNA, 25 bp, Homo sapien
gagtcacctgtagccttttgagagt

SEQ ID NO: 3149383 - DNA, 25 bp, Homo sapien
gttaacccctactgcaatagtcgtg

SEQ ID NO: 3149384 - DNA, 25 bp, Homo sapien
gcttgatatttttggatgatcaata

SEQ ID NO: 3149385 - DNA, 25 bp, Homo sapien
tattcctcatccactacgcatgcat

SEQ ID NO: 3149386 - DNA, 25 bp, Homo sapien
catccactacgcatgcatttactgg

SEQ ID NO: 3149387 - DNA, 25 bp, Homo sapien
tattcatggttgcatattcctcatc

SEQ ID NO: 3149388 - DNA, 25 bp, Homo sapien
aacattgtgagactatgaggcaggc

SEQ ID NO: 3149389 - DNA, 25 bp, Homo sapien
tgcttgcatctgaggtgaaccactt

SEQ ID NO: 3149390 - DNA, 25 bp, Homo sapien
tgtgtcatggaccatacatggagtc

SEQ ID NO: 3149391 - DNA, 25 bp, Homo sapien
cccactcctgaaacgttactgatga

SEQ ID NO: 3149392 - DNA, 25 bp, Homo sapien
attttgttggtacccattaagcata

SEQ ID NO: 3149393 - DNA, 25 bp, Homo sapien
gagactggggtattcaacccctcaa

SEQ ID NO: 3149394 - DNA, 25 bp, Homo sapien
tctattttgttggtacccattaagc

SEQ ID NO: 3149395 - DNA, 25 bp, Homo sapien
ccccagcccctcactatccttccga

SEQ ID NO: 3149396 - DNA, 25 bp, Homo sapien
gagcagaaatggaaacgtatgatca

SEQ ID NO: 3149397 - DNA, 25 bp, Homo sapien
ctatgatgaaatatccagtagccag

SEQ ID NO: 3149398 - DNA, 25 bp, Homo sapien
gatggtctggcaactgaaattgtca

SEQ ID NO: 3149399 - DNA, 25 bp, Homo sapien
catgaattggcatcacatgagaaaa

SEQ ID NO: 3149400 - DNA, 25 bp, Homo sapien
acggatcttggtgtttgaaactgac

SEQ ID NO: 3149401 - DNA, 25 bp, Homo sapien
cggatcttggtgtttgaaactgaca

SEQ ID NO: 3149402 - DNA, 25 bp, Homo sapien
gagaggagagagaaaaaagaaaaca

SEQ ID NO: 3149403 - DNA, 25 bp, Homo sapien
ctgatagagaggagagagaaaaaag

SEQ ID NO: 3149404 - DNA, 25 bp, Homo sapien
tagagaggagagagaaaaaagaaaa

SEQ ID NO: 3149405 - DNA, 25 bp, Homo sapien
agaggagagagaaaaaagaaaacat

SEQ ID NO: 3149406 - DNA, 25 bp, Homo sapien
tccaatggatatcttcgaagatcca

SEQ ID NO: 3149407 - DNA, 25 bp, Homo sapien
caatggatatcttcgaagatccatc

SEQ ID NO: 3149408 - DNA, 25 bp, Homo sapien
tcatccaatggatatcttcgaagat

SEQ ID NO: 3149409 - DNA, 25 bp, Homo sapien
ggatatcttcgaagatccatcatac

SEQ ID NO: 3149410 - DNA, 25 bp, Homo sapien
ttcgatctccagggtgcagttctgc

SEQ ID NO: 3149411 - DNA, 25 bp, Homo sapien
aactttcgatctccagggtgcagtt

SEQ ID NO: 3149412 - DNA, 25 bp, Homo sapien
ctttcgatctccagggtgcagttct

SEQ ID NO: 3149413 - DNA, 25 bp, Homo sapien
tttcgatctccagggtgcagttctg

SEQ ID NO: 3149414 - DNA, 25 bp, Homo sapien
gagaagttgaattcaactgggtcaa

SEQ ID NO: 3149415 - DNA, 25 bp, Homo sapien
tttcattcccctgtccaagtaactc

SEQ ID NO: 3149416 - DNA, 25 bp, Homo sapien
ttcattcccctgtccaagtaactca

SEQ ID NO: 3149417 - DNA, 25 bp, Homo sapien
gaagttgaattcaactgggtcaagg

SEQ ID NO: 3149418 - DNA, 25 bp, Homo sapien
caagaaagcctcctatcgaaggtgg

SEQ ID NO: 3149419 - DNA, 25 bp, Homo sapien
taagaagtggacagttttaccagtg

SEQ ID NO: 3149420 - DNA, 25 bp, Homo sapien
gaggaaggtcaagtcacacaagagc

SEQ ID NO: 3149421 - DNA, 25 bp, Homo sapien
cctaacttagattggaggagtctca

SEQ ID NO: 3149422 - DNA, 25 bp, Homo sapien
tagtctactgaatatggcaaaatca

SEQ ID NO: 3149423 - DNA, 25 bp, Homo sapien
tcattttcattaagtagtctactga

SEQ ID NO: 3149424 - DNA, 25 bp, Homo sapien
ggagatatccaatgctgctaatttc

SEQ ID NO: 3149425 - DNA, 25 bp, Homo sapien
cagatttatctaaggagatatccaa

SEQ ID NO: 3149426 - DNA, 25 bp, Homo sapien
tactcttggattgcccttctcatgg

SEQ ID NO: 3149427 - DNA, 25 bp, Homo sapien
tcatggtcttcgtggcatgtgaaca

SEQ ID NO: 3149428 - DNA, 25 bp, Homo sapien
catggtcttcgtggcatgtgaacat

SEQ ID NO: 3149429 - DNA, 25 bp, Homo sapien
cttgacctactcttggattgccctt

SEQ ID NO: 3149430 - DNA, 25 bp, Homo sapien
agttcatgacacatggtaaggagtc

SEQ ID NO: 3149431 - DNA, 25 bp, Homo sapien
tatgaggtagagttgttcagtgcaa

SEQ ID NO: 3149432 - DNA, 25 bp, Homo sapien
tgtgtacagcacatactcacagacc

SEQ ID NO: 3149433 - DNA, 25 bp, Homo sapien
ggagtctagaaactttgtgggtgaa

SEQ ID NO: 3149434 - DNA, 25 bp, Homo sapien
gttgttggaccccttagtgacatca

SEQ ID NO: 3149435 - DNA, 25 bp, Homo sapien
tacttaagggtcaggtaattgatcc

SEQ ID NO: 3149436 - DNA, 25 bp, Homo sapien
cagaccacaaggttgttggacccct

SEQ ID NO: 3149437 - DNA, 25 bp, Homo sapien
tttctctacataccctgaatggtgc

SEQ ID NO: 3149438 - DNA, 25 bp, Homo sapien
aaatatgacagcattgaggtctgtt

SEQ ID NO: 3149439 - DNA, 25 bp, Homo sapien
acacatcttgccaaatatgacagca

SEQ ID NO: 3149440 - DNA, 25 bp, Homo sapien
tggaatcttcacaccacacatcttg

SEQ ID NO: 3149441 - DNA, 25 bp, Homo sapien
cttgtggagcatccatcagccagcg

SEQ ID NO: 3149442 - DNA, 25 bp, Homo sapien
tcagatgcccttaatgacactcgcc

SEQ ID NO: 3149443 - DNA, 25 bp, Homo sapien
tgcccttaatgacactcgcctctac

SEQ ID NO: 3149444 - DNA, 25 bp, Homo sapien
gatgcccttaatgacactcgcctct

SEQ ID NO: 3149445 - DNA, 25 bp, Homo sapien
cagatgcccttaatgacactcgcct

SEQ ID NO: 3149446 - DNA, 25 bp, Homo sapien
caatcaggacagctgacagaatcct

SEQ ID NO: 3149447 - DNA, 25 bp, Homo sapien
aatcaggacagctgacagaatcctc

SEQ ID NO: 3149448 - DNA, 25 bp, Homo sapien
ttggaactgttagaaagtctgcagg

SEQ ID NO: 3149449 - DNA, 25 bp, Homo sapien
aaagtctgcaggggattttcacagc

SEQ ID NO: 3149450 - DNA, 25 bp, Homo sapien
gatgtacaggaactgaggataggtt

SEQ ID NO: 3149451 - DNA, 25 bp, Homo sapien
cctccatacagggaccggagaggtg

SEQ ID NO: 3149452 - DNA, 25 bp, Homo sapien
gataggttttcagagtgcagtcagc

SEQ ID NO: 3149453 - DNA, 25 bp, Homo sapien
ttttcagagtgcagtcagctaggtg

SEQ ID NO: 3149454 - DNA, 25 bp, Homo sapien
tagggaagaactatttgctccagca

SEQ ID NO: 3149455 - DNA, 25 bp, Homo sapien
agaactatttgctccagcattgtga

SEQ ID NO: 3149456 - DNA, 25 bp, Homo sapien
ccagcattgtgattaccagagcttt

SEQ ID NO: 3149457 - DNA, 25 bp, Homo sapien
gggaagaactatttgctccagcatt

SEQ ID NO: 3149458 - DNA, 25 bp, Homo sapien
tggcaagctgaatataccaggtcat

SEQ ID NO: 3149459 - DNA, 25 bp, Homo sapien
ttggcaagctgaatataccaggtca

SEQ ID NO: 3149460 - DNA, 25 bp, Homo sapien
aaaataacaatgcatataaggaacc

SEQ ID NO: 3149461 - DNA, 25 bp, Homo sapien
ataacaatgcatataaggaacccag

SEQ ID NO: 3149462 - DNA, 25 bp, Homo sapien
gctcactatgctttccatctacaac

SEQ ID NO: 3149463 - DNA, 25 bp, Homo sapien
agctcactatgctttccatctacaa

SEQ ID NO: 3149464 - DNA, 25 bp, Homo sapien
cacctgtatgactgtctggaggaac

SEQ ID NO: 3149465 - DNA, 25 bp, Homo sapien
ccatcttgtagtcaacaattgaaaa

SEQ ID NO: 3149466 - DNA, 25 bp, Homo sapien
tgaggaagttcgattttattaacac

SEQ ID NO: 3149467 - DNA, 25 bp, Homo sapien
aagttcgattttattaacaccagtg

SEQ ID NO: 3149468 - DNA, 25 bp, Homo sapien
caccttcttagacaccatcttgtag

SEQ ID NO: 3149469 - DNA, 25 bp, Homo sapien
caaaagacaagtaatcagaccatta

SEQ ID NO: 3149470 - DNA, 25 bp, Homo sapien
gacaagtaatcagaccattatttgg

SEQ ID NO: 3149471 - DNA, 25 bp, Homo sapien
caagtaatcagaccattatttggtt

SEQ ID NO: 3149472 - DNA, 25 bp, Homo sapien
agaaacaaaagacaagtaatcagac

SEQ ID NO: 3149473 - DNA, 25 bp, Homo sapien
cagaattgtaatcagtgtagaaggc

SEQ ID NO: 3149474 - DNA, 25 bp, Homo sapien
gactctggctgcagatgcatcatag

SEQ ID NO: 3149475 - DNA, 25 bp, Homo sapien
cttagtgacagtcgtggatacgctc

SEQ ID NO: 3149476 - DNA, 25 bp, Homo sapien
ctctttagacgaaaacttagtgaca

SEQ ID NO: 3149477 - DNA, 25 bp, Homo sapien
acataagggatctttggcagggtct

SEQ ID NO: 3149478 - DNA, 25 bp, Homo sapien
caacccatcagataaatatcaatcg

SEQ ID NO: 3149479 - DNA, 25 bp, Homo sapien
aatatcaatcgctttgacataaggg

SEQ ID NO: 3149480 - DNA, 25 bp, Homo sapien
gcagggtctccctgaggtgggtgct

SEQ ID NO: 3149481 - DNA, 25 bp, Homo sapien
gcttctttgaagtttgctctcttgc

SEQ ID NO: 3149482 - DNA, 25 bp, Homo sapien
gaagtttgctctcttgcaaccacga

SEQ ID NO: 3149483 - DNA, 25 bp, Homo sapien
ttgcaaccacgatgtccaccttctt

SEQ ID NO: 3149484 - DNA, 25 bp, Homo sapien
tcttgcctgccgagtctttctttca

SEQ ID NO: 3149485 - DNA, 25 bp, Homo sapien
tttgcatagccagttagggacctct

SEQ ID NO: 3149486 - DNA, 25 bp, Homo sapien
caggctcggacacaagttgcaggac

SEQ ID NO: 3149487 - DNA, 25 bp, Homo sapien
cacatgatggtgcaaccgtggtaca

SEQ ID NO: 3149488 - DNA, 25 bp, Homo sapien
taatgggtcaaaggattcgcctggc

SEQ ID NO: 3149489 - DNA, 25 bp, Homo sapien
cgagccactcgtctcattccggatt

SEQ ID NO: 3149490 - DNA, 25 bp, Homo sapien
aggagaatgttaccgtgggcgtcga

SEQ ID NO: 3149491 - DNA, 25 bp, Homo sapien
gggtcgctcacgctcgtgagcactt

SEQ ID NO: 3149492 - DNA, 25 bp, Homo sapien
gatgctggcgctgtcataggagtac

SEQ ID NO: 3149493 - DNA, 25 bp, Homo sapien
tcagtgtacatagtaaagccaatag

SEQ ID NO: 3149494 - DNA, 25 bp, Homo sapien
gccaatagacgacattaaaaagaga

SEQ ID NO: 3149495 - DNA, 25 bp, Homo sapien
aacattcgggaccacttgtctatgg

SEQ ID NO: 3149496 - DNA, 25 bp, Homo sapien
tgcggatgcgccccttgctgggtac

SEQ ID NO: 3149497 - DNA, 25 bp, Homo sapien
aggaaagtagtctaaatggaaccat

SEQ ID NO: 3149498 - DNA, 25 bp, Homo sapien
gaaagtagtctaaatggaaccatta

SEQ ID NO: 3149499 - DNA, 25 bp, Homo sapien
gaggaaagtagtctaaatggaacca

SEQ ID NO: 3149500 - DNA, 25 bp, Homo sapien
aaacagcagtatcgctgttggggac

SEQ ID NO: 3149501 - DNA, 25 bp, Homo sapien
tcgagaaacagcagtatcgctgttg

SEQ ID NO: 3149502 - DNA, 25 bp, Homo sapien
ctcgagaaacagcagtatcgctgtt

SEQ ID NO: 3149503 - DNA, 25 bp, Homo sapien
gagaaacagcagtatcgctgttggg

SEQ ID NO: 3149504 - DNA, 25 bp, Homo sapien
tttgttatagtttaccaggaagcag

SEQ ID NO: 3149505 - DNA, 25 bp, Homo sapien
gaaaagactgctaaagatctacctg

SEQ ID NO: 3149506 - DNA, 25 bp, Homo sapien
taaagagctgataacctggaccacg

SEQ ID NO: 3149507 - DNA, 25 bp, Homo sapien
tgcaagacctaaaaccaattggatg

SEQ ID NO: 3149508 - DNA, 25 bp, Homo sapien
tcaatggctaccaggtcgaccaggt

SEQ ID NO: 3149509 - DNA, 25 bp, Homo sapien
cttttacaacggacatgggagaact

SEQ ID NO: 3149510 - DNA, 25 bp, Homo sapien
ccagttgaggcctgtgtgactagcc

SEQ ID NO: 3149511 - DNA, 25 bp, Homo sapien
tggagctgtggagcccttttacaac

SEQ ID NO: 3149512 - DNA, 25 bp, Homo sapien
tgaccaagagtaatccacaagcgga

SEQ ID NO: 3149513 - DNA, 25 bp, Homo sapien
gatgacttcataccctaaggctgga

SEQ ID NO: 3149514 - DNA, 25 bp, Homo sapien
ccctgccaagggactgaagagtttc

SEQ ID NO: 3149515 - DNA, 25 bp, Homo sapien
cccaggagggcatatggtgacacca

SEQ ID NO: 3149516 - DNA, 25 bp, Homo sapien
taatcctggataattcaagccgaaa

SEQ ID NO: 3149517 - DNA, 25 bp, Homo sapien
cagtaatgctgattgaaccaccatg

SEQ ID NO: 3149518 - DNA, 25 bp, Homo sapien
ggaatgcctatccttggacccttaa

SEQ ID NO: 3149519 - DNA, 25 bp, Homo sapien
tgacctggatctttgcctcacaaag

SEQ ID NO: 3149520 - DNA, 25 bp, Homo sapien
gacacctggctatggcttgcagcag

SEQ ID NO: 3149521 - DNA, 25 bp, Homo sapien
tttatgacgcagttcaaggagcagc

SEQ ID NO: 3149522 - DNA, 25 bp, Homo sapien
gaatagccacgaatgactgataaag

SEQ ID NO: 3149523 - DNA, 25 bp, Homo sapien
cccctcaacggcatggataattcag

SEQ ID NO: 3149524 - DNA, 25 bp, Homo sapien
tactagtttcaagtcccagtgtata

SEQ ID NO: 3149525 - DNA, 25 bp, Homo sapien
tggtgttaccaatcatttactgtcc

SEQ ID NO: 3149526 - DNA, 25 bp, Homo sapien
aaaataatgacatggttacctctgg

SEQ ID NO: 3149527 - DNA, 25 bp, Homo sapien
tttaccctgatcaaacccatccatt

SEQ ID NO: 3149528 - DNA, 25 bp, Homo sapien
ccaatagggaatggttatgagtccc

SEQ ID NO: 3149529 - DNA, 25 bp, Homo sapien
tcttgctataggagaagtaataaca

SEQ ID NO: 3149530 - DNA, 25 bp, Homo sapien
tatgagtcccttgatgtaacaagga

SEQ ID NO: 3149531 - DNA, 25 bp, Homo sapien
aatgctttctgatcagtgctggttg

SEQ ID NO: 3149532 - DNA, 25 bp, Homo sapien
gattatacaacctgcctctaaagga

SEQ ID NO: 3149533 - DNA, 25 bp, Homo sapien
cagaggaggctattatgattataca

SEQ ID NO: 3149534 - DNA, 25 bp, Homo sapien
caagatagcctatgaggtttggaaa

SEQ ID NO: 3149535 - DNA, 25 bp, Homo sapien
ttcattgggttgacatgaggcagga

SEQ ID NO: 3149536 - DNA, 25 bp, Homo sapien
tcactgtaggattaggccccttgag

SEQ ID NO: 3149537 - DNA, 25 bp, Homo sapien
gaaagccccagctatttagtacagg

SEQ ID NO: 3149538 - DNA, 25 bp, Homo sapien
tgaggacaatgttcagagaccggaa

SEQ ID NO: 3149539 - DNA, 25 bp, Homo sapien
gaaaagcagcggtaattagcaagga

SEQ ID NO: 3149540 - DNA, 25 bp, Homo sapien
gcgttgaaagatacgtaaatgtgcc

SEQ ID NO: 3149541 - DNA, 25 bp, Homo sapien
acaaaggtacaaactgcgttgaaag

SEQ ID NO: 3149542 - DNA, 25 bp, Homo sapien
tattcgacggttttctaaagagcac

SEQ ID NO: 3149543 - DNA, 25 bp, Homo sapien
cagagaaagttcaatagaaccctaa

SEQ ID NO: 3149544 - DNA, 25 bp, Homo sapien
tgcaaatcaggatactttagtagag

SEQ ID NO: 3149545 - DNA, 25 bp, Homo sapien
ttagtagagacttctgttaaaactc

SEQ ID NO: 3149546 - DNA, 25 bp, Homo sapien
aaactctgggacaatgaccatgccc

SEQ ID NO: 3149547 - DNA, 25 bp, Homo sapien
tgcccaggcacccaaaaagatggtt

SEQ ID NO: 3149548 - DNA, 25 bp, Homo sapien
tgtccaaaaacagcatcatttgagt

SEQ ID NO: 3149549 - DNA, 25 bp, Homo sapien
gtccaaaaacagcatcatttgagtt

SEQ ID NO: 3149550 - DNA, 25 bp, Homo sapien
ctgtccaaaaacagcatcatttgag

SEQ ID NO: 3149551 - DNA, 25 bp, Homo sapien
catcaggcatgggttcaacaatgtc

SEQ ID NO: 3149552 - DNA, 25 bp, Homo sapien
ccatgtaggtagtcctgagctaatg

SEQ ID NO: 3149553 - DNA, 25 bp, Homo sapien
aatgtcaggtaccttaattccatcc

SEQ ID NO: 3149554 - DNA, 25 bp, Homo sapien
tccttttgccgctttgtacttggtc

SEQ ID NO: 3149555 - DNA, 25 bp, Homo sapien
tccctccgtgatccttcatattctt

SEQ ID NO: 3149556 - DNA, 25 bp, Homo sapien
aaaactccctccgtgatccttcata

SEQ ID NO: 3149557 - DNA, 25 bp, Homo sapien
atatctaggtctggcacgtaaaaac

SEQ ID NO: 3149558 - DNA, 25 bp, Homo sapien
tgatacacattatatctaggtctgg

SEQ ID NO: 3149559 - DNA, 25 bp, Homo sapien
gaagatacagttgtcagttcatagg

SEQ ID NO: 3149560 - DNA, 25 bp, Homo sapien
tcttggtcaagactccacatgaagt

SEQ ID NO: 3149561 - DNA, 25 bp, Homo sapien
taattgcaaaggtatggcatctagt

SEQ ID NO: 3149562 - DNA, 25 bp, Homo sapien
tagtaatgcccagagtaaccttctg

SEQ ID NO: 3149563 - DNA, 25 bp, Homo sapien
tgagcccggccttcatagtttatta

SEQ ID NO: 3149564 - DNA, 25 bp, Homo sapien
gagacagcaattaaagttctctggg

SEQ ID NO: 3149565 - DNA, 25 bp, Homo sapien
tggcatggcctctgcatttcaagga

SEQ ID NO: 3149566 - DNA, 25 bp, Homo sapien
aattcattaggcgaactaggtgtgc

SEQ ID NO: 3149567 - DNA, 25 bp, Homo sapien
cgttcagaaattcagaatgaattac

SEQ ID NO: 3149568 - DNA, 25 bp, Homo sapien
attcagaatgaattacagttaccat

SEQ ID NO: 3149569 - DNA, 25 bp, Homo sapien
aaattcagaatgaattacagttacc

SEQ ID NO: 3149570 - DNA, 25 bp, Homo sapien
tcagaaattcagaatgaattacagt

SEQ ID NO: 3149571 - DNA, 25 bp, Homo sapien
gaaagtcaacacttgattagctcta

SEQ ID NO: 3149572 - DNA, 25 bp, Homo sapien
gatgtcgatgcggtagccagtgctt

SEQ ID NO: 3149573 - DNA, 25 bp, Homo sapien
attctccctacgttccagcatgtca

SEQ ID NO: 3149574 - DNA, 25 bp, Homo sapien
agtggacactctgttttactatcaa

SEQ ID NO: 3149575 - DNA, 25 bp, Homo sapien
ctgtataatatagaagtgagggaac

SEQ ID NO: 3149576 - DNA, 25 bp, Homo sapien
tgtataatatagaagtgagggaact

SEQ ID NO: 3149577 - DNA, 25 bp, Homo sapien
cacaaattcgaagagtgaaagcggg

SEQ ID NO: 3149578 - DNA, 25 bp, Homo sapien
cacagcatgttggtcacgagtcgca

SEQ ID NO: 3149579 - DNA, 25 bp, Homo sapien
gaaagcgggttgtgcttccacgcca

SEQ ID NO: 3149580 - DNA, 25 bp, Homo sapien
gagtcgcaaggtacaagaaaagagc

SEQ ID NO: 3149581 - DNA, 25 bp, Homo sapien
gccatgtcatcaaatctaaacacga

SEQ ID NO: 3149582 - DNA, 25 bp, Homo sapien
agaactgtagttttgagccatgtca

SEQ ID NO: 3149583 - DNA, 25 bp, Homo sapien
gacagtcagagggattcgccgtctc

SEQ ID NO: 3149584 - DNA, 25 bp, Homo sapien
ctaaacacgactagggaagtggagc

SEQ ID NO: 3149585 - DNA, 25 bp, Homo sapien
gaatcaaccttaaggaatcaatctg

SEQ ID NO: 3149586 - DNA, 25 bp, Homo sapien
tcacaacgggatgacaaaggagtgt

SEQ ID NO: 3149587 - DNA, 25 bp, Homo sapien
gagaaagctccaatacaaacacctt

SEQ ID NO: 3149588 - DNA, 25 bp, Homo sapien
tcacctttgaggcagataaccaaaa

SEQ ID NO: 3149589 - DNA, 25 bp, Homo sapien
taataggcgagataccttcctgaaa

SEQ ID NO: 3149590 - DNA, 25 bp, Homo sapien
ttaagcactctaataggcgagatac

SEQ ID NO: 3149591 - DNA, 25 bp, Homo sapien
actctaataggcgagataccttcct

SEQ ID NO: 3149592 - DNA, 25 bp, Homo sapien
taggcgagataccttcctgaaacgc

SEQ ID NO: 3149593 - DNA, 25 bp, Homo sapien
gcggcaccccatacatgttctctag

SEQ ID NO: 3149594 - DNA, 25 bp, Homo sapien
ttataagatttatttgcacttcctt

SEQ ID NO: 3149595 - DNA, 25 bp, Homo sapien
gaagactgtgatatgatacagacat

SEQ ID NO: 3149596 - DNA, 25 bp, Homo sapien
gaagaatatgggaaattgccaaaga

SEQ ID NO: 3149597 - DNA, 25 bp, Homo sapien
taaatggtagtctgcgaaagaaagc

SEQ ID NO: 3149598 - DNA, 25 bp, Homo sapien
tttatgcctatacttatgtagggca

SEQ ID NO: 3149599 - DNA, 25 bp, Homo sapien
tcctaattaagagcctatttcaaaa

SEQ ID NO: 3149600 - DNA, 25 bp, Homo sapien
caccttcattgctctttagaaaatt

SEQ ID NO: 3149601 - DNA, 25 bp, Homo sapien
taaagcatgatttagacctgtatac

SEQ ID NO: 3149602 - DNA, 25 bp, Homo sapien
tagacctgtatacaagtataatctc

SEQ ID NO: 3149603 - DNA, 25 bp, Homo sapien
tgggatagtctattaatagcagatt

SEQ ID NO: 3149604 - DNA, 25 bp, Homo sapien
aatgactcataaaatgcttaaagtt

SEQ ID NO: 3149605 - DNA, 25 bp, Homo sapien
gattgggagggatccacacaacaga

SEQ ID NO: 3149606 - DNA, 25 bp, Homo sapien
gcttgaccacggaatgagggagatt

SEQ ID NO: 3149607 - DNA, 25 bp, Homo sapien
acaccataaggtgttctctgctctg

SEQ ID NO: 3149608 - DNA, 25 bp, Homo sapien
gctctgctcccattagaaccctgag

SEQ ID NO: 3149609 - DNA, 25 bp, Homo sapien
tgtggtaagatccaggttgtgtagc

SEQ ID NO: 3149610 - DNA, 25 bp, Homo sapien
caaactgtggtaagatccaggttgt

SEQ ID NO: 3149611 - DNA, 25 bp, Homo sapien
atccaaactgtggtaagatccaggt

SEQ ID NO: 3149612 - DNA, 25 bp, Homo sapien
actgtggtaagatccaggttgtgta

SEQ ID NO: 3149613 - DNA, 25 bp, Homo sapien
tggcccattggagagcctcagtcat

SEQ ID NO: 3149614 - DNA, 25 bp, Homo sapien
tggttgcacctctgatcagccgtcg

SEQ ID NO: 3149615 - DNA, 25 bp, Homo sapien
ccacaggcgagcaacgaggaatagt

SEQ ID NO: 3149616 - DNA, 25 bp, Homo sapien
cgattgttcacataggctccggaga

SEQ ID NO: 3149617 - DNA, 25 bp, Homo sapien
tctaccaaaggtacccagttcagga

SEQ ID NO: 3149618 - DNA, 25 bp, Homo sapien
gtatttccgataatcttccaggcca

SEQ ID NO: 3149619 - DNA, 25 bp, Homo sapien
taattgtaaggaccaccaccagagg

SEQ ID NO: 3149620 - DNA, 25 bp, Homo sapien
caccagaggcaacatggtgatttcc

SEQ ID NO: 3149621 - DNA, 25 bp, Homo sapien
tttgctttgtcggctcctgggttga

SEQ ID NO: 3149622 - DNA, 25 bp, Homo sapien
tatacatgagttacagaagcttttg

SEQ ID NO: 3149623 - DNA, 25 bp, Homo sapien
cacttatacatgagttacagaagct

SEQ ID NO: 3149624 - DNA, 25 bp, Homo sapien
attccacttatacatgagttacaga

SEQ ID NO: 3149625 - DNA, 25 bp, Homo sapien
cacaagcattgggaaaagttggaac

SEQ ID NO: 3149626 - DNA, 25 bp, Homo sapien
ttggaactaatacacactgaacgat

SEQ ID NO: 3149627 - DNA, 25 bp, Homo sapien
tcttataagttcagtagcaaacagc

SEQ ID NO: 3149628 - DNA, 25 bp, Homo sapien
aacagtgattccactaggatgggag

SEQ ID NO: 3149629 - DNA, 25 bp, Homo sapien
tctgcagggatgacctcgttgcagg

SEQ ID NO: 3149630 - DNA, 25 bp, Homo sapien
caggagaggcgaataaagtccccaa

SEQ ID NO: 3149631 - DNA, 25 bp, Homo sapien
aacagtaacgtctttccagcatcgg

SEQ ID NO: 3149632 - DNA, 25 bp, Homo sapien
cgtctttccagcatcggtcaatgta

SEQ ID NO: 3149633 - DNA, 25 bp, Homo sapien
tccatctggatcagtggaaaagagt

SEQ ID NO: 3149634 - DNA, 25 bp, Homo sapien
tctccatcaagaccagaagtctcaa

SEQ ID NO: 3149635 - DNA, 25 bp, Homo sapien
attccatctggatcagtggaaaaga

SEQ ID NO: 3149636 - DNA, 25 bp, Homo sapien
tgttctgcatatccccgaaccacct

SEQ ID NO: 3149637 - DNA, 25 bp, Homo sapien
ggctttcacattctatcctactgga

SEQ ID NO: 3149638 - DNA, 25 bp, Homo sapien
tgctgaggtcattgtttgggctttc

SEQ ID NO: 3149639 - DNA, 25 bp, Homo sapien
gtttgggctttcacattctatccta

SEQ ID NO: 3149640 - DNA, 25 bp, Homo sapien
aggaagcctcggaatctgctgaggt

SEQ ID NO: 3149641 - DNA, 25 bp, Homo sapien
accttcagagttttgtatgaggcac

SEQ ID NO: 3149642 - DNA, 25 bp, Homo sapien
tggctgtcacatacagcttccatga

SEQ ID NO: 3149643 - DNA, 25 bp, Homo sapien
tactatgtgcccagcgctccaaccc

SEQ ID NO: 3149644 - DNA, 25 bp, Homo sapien
ttttgtatgaggcactggctgtcac

SEQ ID NO: 3149645 - DNA, 25 bp, Homo sapien
caatgcccacaacagcctctgtgtt

SEQ ID NO: 3149646 - DNA, 25 bp, Homo sapien
aattttctttactgagacccacgcg

SEQ ID NO: 3149647 - DNA, 25 bp, Homo sapien
gagacccacgcgttctttgttggaa

SEQ ID NO: 3149648 - DNA, 25 bp, Homo sapien
ggtgcatcctctaagcaacaaattt

SEQ ID NO: 3149649 - DNA, 25 bp, Homo sapien
cgcttataccgtggcccactgttgt

SEQ ID NO: 3149650 - DNA, 25 bp, Homo sapien
ttgctgcgcttataccgtggcccac

SEQ ID NO: 3149651 - DNA, 25 bp, Homo sapien
aatttgctgcgcttataccgtggcc

SEQ ID NO: 3149652 - DNA, 25 bp, Homo sapien
tgcgcttataccgtggcccactgtt

SEQ ID NO: 3149653 - DNA, 25 bp, Homo sapien
aagcacattatgaccagaagcatga

SEQ ID NO: 3149654 - DNA, 25 bp, Homo sapien
cacattatgaccagaagcatgacac

SEQ ID NO: 3149655 - DNA, 25 bp, Homo sapien
acattatgaccagaagcatgacaca

SEQ ID NO: 3149656 - DNA, 25 bp, Homo sapien
gcacattatgaccagaagcatgaca

SEQ ID NO: 3149657 - DNA, 25 bp, Homo sapien
caaaaaatacacagacatcaaaagg

SEQ ID NO: 3149658 - DNA, 25 bp, Homo sapien
ttcaaaaaatacacagacatcaaaa

SEQ ID NO: 3149659 - DNA, 25 bp, Homo sapien
aaaatacacagacatcaaaaggatg

SEQ ID NO: 3149660 - DNA, 25 bp, Homo sapien
aaaaatacacagacatcaaaaggat

SEQ ID NO: 3149661 - DNA, 25 bp, Homo sapien
ccaacagtggtgatatgatatgtcc

SEQ ID NO: 3149662 - DNA, 25 bp, Homo sapien
caaaatgatcatggtccaaaacata

SEQ ID NO: 3149663 - DNA, 25 bp, Homo sapien
tgatatgtccatcaggctcgggaac

SEQ ID NO: 3149664 - DNA, 25 bp, Homo sapien
gctcgggaacattgaaaaaatgcat

SEQ ID NO: 3149665 - DNA, 25 bp, Homo sapien
tcacaatttcgatggaaacatagag

SEQ ID NO: 3149666 - DNA, 25 bp, Homo sapien
caatttcgatggaaacatagagaga

SEQ ID NO: 3149667 - DNA, 25 bp, Homo sapien
cacaatttcgatggaaacatagaga

SEQ ID NO: 3149668 - DNA, 25 bp, Homo sapien
cttcacaatttcgatggaaacatag

SEQ ID NO: 3149669 - DNA, 25 bp, Homo sapien
tgaacaatagaatccattttttcat

SEQ ID NO: 3149670 - DNA, 25 bp, Homo sapien
gaaatccacatcactttgaatgaaa

SEQ ID NO: 3149671 - DNA, 25 bp, Homo sapien
ttcattgtagaaatccacatcactt

SEQ ID NO: 3149672 - DNA, 25 bp, Homo sapien
attgtagaaatccacatcactttga

SEQ ID NO: 3149673 - DNA, 25 bp, Homo sapien
ctcggcgatgttcagggctcggcac

SEQ ID NO: 3149674 - DNA, 25 bp, Homo sapien
cactacatcttcgaaaaaccatctt

SEQ ID NO: 3149675 - DNA, 25 bp, Homo sapien
aatcctgccacactacatcttcgaa

SEQ ID NO: 3149676 - DNA, 25 bp, Homo sapien
ttcctgtcttatcggaaaagaggta

SEQ ID NO: 3149677 - DNA, 25 bp, Homo sapien
cttatcggaaaagaggtactgaatc

SEQ ID NO: 3149678 - DNA, 25 bp, Homo sapien
aaataaaccacttctatgtcagaat

SEQ ID NO: 3149679 - DNA, 25 bp, Homo sapien
catctggaagcattaagtactcaat

SEQ ID NO: 3149680 - DNA, 25 bp, Homo sapien
tcagaattgtcagacatccaacact

SEQ ID NO: 3149681 - DNA, 25 bp, Homo sapien
gttttcacggaaatccaacactcac

SEQ ID NO: 3149682 - DNA, 25 bp, Homo sapien
atgtgctctccaaagggcccgaaac

SEQ ID NO: 3149683 - DNA, 25 bp, Homo sapien
cagatgagcttccttcaattgtatc

SEQ ID NO: 3149684 - DNA, 25 bp, Homo sapien
caacttttgcctgcttgtaaataac

SEQ ID NO: 3149685 - DNA, 25 bp, Homo sapien
aacaaaggtgaacagcattcagatg

SEQ ID NO: 3149686 - DNA, 25 bp, Homo sapien
aagcagcctgtctggaatgaggcac

SEQ ID NO: 3149687 - DNA, 25 bp, Homo sapien
tccacttcctagagtaaaagagctc

SEQ ID NO: 3149688 - DNA, 25 bp, Homo sapien
tattgctgagggaaccactgactgt

SEQ ID NO: 3149689 - DNA, 25 bp, Homo sapien
ggcccattatgaactgtcctgcagc

SEQ ID NO: 3149690 - DNA, 25 bp, Homo sapien
catacattgtggatgtgcaagactc

SEQ ID NO: 3149691 - DNA, 25 bp, Homo sapien
tctggagccaggaatagggaaaaac

SEQ ID NO: 3149692 - DNA, 25 bp, Homo sapien
tatcagtctgatggctgggaaatcc

SEQ ID NO: 3149693 - DNA, 25 bp, Homo sapien
ggatgtgactagacagttcctgaca

SEQ ID NO: 3149694 - DNA, 25 bp, Homo sapien
ggtttaggttcaggtcttagctcca

SEQ ID NO: 3149695 - DNA, 25 bp, Homo sapien
gagaccagtagaacaggaacctaag

SEQ ID NO: 3149696 - DNA, 25 bp, Homo sapien
gcatactaactggaggtcttgggca

SEQ ID NO: 3149697 - DNA, 25 bp, Homo sapien
tacctcccaggtggctgtataaagt

SEQ ID NO: 3149698 - DNA, 25 bp, Homo sapien
tgacacaatgcttctcacacgtgag

SEQ ID NO: 3149699 - DNA, 25 bp, Homo sapien
tcagtacaggtttgctctaagaagt

SEQ ID NO: 3149700 - DNA, 25 bp, Homo sapien
cacacgtgagagtacgagttttgac

SEQ ID NO: 3149701 - DNA, 25 bp, Homo sapien
ccacatgctcaaaatcaaggttgta

SEQ ID NO: 3149702 - DNA, 25 bp, Homo sapien
tggtgtctggtaccacgtctgtttc

SEQ ID NO: 3149703 - DNA, 25 bp, Homo sapien
ctggtgtctggtaccacgtctgttt

SEQ ID NO: 3149704 - DNA, 25 bp, Homo sapien
ttaggagcagaaaccactactgtgt

SEQ ID NO: 3149705 - DNA, 25 bp, Homo sapien
cattggtggattttggatggtctca

SEQ ID NO: 3149706 - DNA, 25 bp, Homo sapien
tcatctagtggcataaagagccgag

SEQ ID NO: 3149707 - DNA, 25 bp, Homo sapien
gagccgaggtgtaatctgactaaat

SEQ ID NO: 3149708 - DNA, 25 bp, Homo sapien
tagggcaatactgaaaaagctatga

SEQ ID NO: 3149709 - DNA, 25 bp, Homo sapien
gaaatacaggaattccatgatctta

SEQ ID NO: 3149710 - DNA, 25 bp, Homo sapien
ttaatattgctagcagtgggcatcc

SEQ ID NO: 3149711 - DNA, 25 bp, Homo sapien
tctgtgtgtatcctaaccataacaa

SEQ ID NO: 3149712 - DNA, 25 bp, Homo sapien
agtgcattggtaagccctggcggca

SEQ ID NO: 3149713 - DNA, 25 bp, Homo sapien
gagaacttgatcttcggacagacca

SEQ ID NO: 3149714 - DNA, 25 bp, Homo sapien
tcataacacaggttgcaggccaatg

SEQ ID NO: 3149715 - DNA, 25 bp, Homo sapien
cacaaaggcgtttggaactccagaa

SEQ ID NO: 3149716 - DNA, 25 bp, Homo sapien
ggatgtgtaggagttgaaatgttaa

SEQ ID NO: 3149717 - DNA, 25 bp, Homo sapien
ctttttcttactgagtcaaagggca

SEQ ID NO: 3149718 - DNA, 25 bp, Homo sapien
tcttactgagtcaaagggcaggatg

SEQ ID NO: 3149719 - DNA, 25 bp, Homo sapien
tgttaatggtcccaaagcagcaaag

SEQ ID NO: 3149720 - DNA, 25 bp, Homo sapien
tcagcgcctttcgtatacaccacaa

SEQ ID NO: 3149721 - DNA, 25 bp, Homo sapien
gaagccaccgacagtaactccatga

SEQ ID NO: 3149722 - DNA, 25 bp, Homo sapien
caccacaacttgattggaaagaggg

SEQ ID NO: 3149723 - DNA, 25 bp, Homo sapien
tccatgatcacagaatcagcgcctt

SEQ ID NO: 3149724 - DNA, 25 bp, Homo sapien
tgctttcccatcaaatcctaggcag

SEQ ID NO: 3149725 - DNA, 25 bp, Homo sapien
ataaagccatcaagtatggtctttt

SEQ ID NO: 3149726 - DNA, 25 bp, Homo sapien
tctccgagcttttcaaatcactact

SEQ ID NO: 3149727 - DNA, 25 bp, Homo sapien
tcaccaaatgtgattagtccccaga

SEQ ID NO: 3149728 - DNA, 25 bp, Homo sapien
tgttgtttctccagacttgctccat

SEQ ID NO: 3149729 - DNA, 25 bp, Homo sapien
ctgttgtttctccagacttgctcca

SEQ ID NO: 3149730 - DNA, 25 bp, Homo sapien
cttctttgctatacataaagtacga

SEQ ID NO: 3149731 - DNA, 25 bp, Homo sapien
gtacgaaggccttgtttggcatagt

SEQ ID NO: 3149732 - DNA, 25 bp, Homo sapien
acgaaggccttgtttggcatagtca

SEQ ID NO: 3149733 - DNA, 25 bp, Homo sapien
ctatacataaagtacgaaggccttg

SEQ ID NO: 3149734 - DNA, 25 bp, Homo sapien
tgtttacatataaagtcactcacgg

SEQ ID NO: 3149735 - DNA, 25 bp, Homo sapien
tcactcacggacatattgaaacata

SEQ ID NO: 3149736 - DNA, 25 bp, Homo sapien
gggatccttgtagcaaaatactttg

SEQ ID NO: 3149737 - DNA, 25 bp, Homo sapien
gaaaagttccggtgagaacatctct

SEQ ID NO: 3149738 - DNA, 25 bp, Homo sapien
catatgatcttgtgggaataccagg

SEQ ID NO: 3149739 - DNA, 25 bp, Homo sapien
cagccatgtcagatccatatcctca

SEQ ID NO: 3149740 - DNA, 25 bp, Homo sapien
tttacatattcctccctctgggcac

SEQ ID NO: 3149741 - DNA, 25 bp, Homo sapien
ttaaaagagaggtatgaagcaagcc

SEQ ID NO: 3149742 - DNA, 25 bp, Homo sapien
agccactctgcatattcagtgtcac

SEQ ID NO: 3149743 - DNA, 25 bp, Homo sapien
tctccaacctcatggcagattcaag

SEQ ID NO: 3149744 - DNA, 25 bp, Homo sapien
aattcttccctgttgtcaatgctgg

SEQ ID NO: 3149745 - DNA, 25 bp, Homo sapien
cctcagccactctgcatattcagtg

SEQ ID NO: 3149746 - DNA, 25 bp, Homo sapien
cctccattcaggcaatacaaacata

SEQ ID NO: 3149747 - DNA, 25 bp, Homo sapien
ttattagataacaatggaagaaaat

SEQ ID NO: 3149748 - DNA, 25 bp, Homo sapien
tattagataacaatggaagaaaata

SEQ ID NO: 3149749 - DNA, 25 bp, Homo sapien
tccattcaggcaatacaaacataat

SEQ ID NO: 3149750 - DNA, 25 bp, Homo sapien
tgatgcccgctttgtgaagagcttc

SEQ ID NO: 3149751 - DNA, 25 bp, Homo sapien
tattgaggataaaaagcttgtcatc

SEQ ID NO: 3149752 - DNA, 25 bp, Homo sapien
cataagctatgttgacagctgtctc

SEQ ID NO: 3149753 - DNA, 25 bp, Homo sapien
ggctccagtagtttgcatgcataag

SEQ ID NO: 3149754 - DNA, 25 bp, Homo sapien
aagtaaatcttcacttaatgacact

SEQ ID NO: 3149755 - DNA, 25 bp, Homo sapien
gtaaatcttcacttaatgacacttg

SEQ ID NO: 3149756 - DNA, 25 bp, Homo sapien
taaatcttcacttaatgacacttgc

SEQ ID NO: 3149757 - DNA, 25 bp, Homo sapien
ctgaagtaaatcttcacttaatgac

SEQ ID NO: 3149758 - DNA, 25 bp, Homo sapien
gagatggctgcggaccaatttcacc

SEQ ID NO: 3149759 - DNA, 25 bp, Homo sapien
gcagcagaccacagcttgacaccaa

SEQ ID NO: 3149760 - DNA, 25 bp, Homo sapien
ttttctgcagcggtgtggctcggca

SEQ ID NO: 3149761 - DNA, 25 bp, Homo sapien
caatagcaagggtcatcacctggag

SEQ ID NO: 3149762 - DNA, 25 bp, Homo sapien
tgatacccactagacttctgattct

SEQ ID NO: 3149763 - DNA, 25 bp, Homo sapien
tgagtaagacccaattcccaatttc

SEQ ID NO: 3149764 - DNA, 25 bp, Homo sapien
caggcctggccaagtttcgtgtttg

SEQ ID NO: 3149765 - DNA, 25 bp, Homo sapien
tcctaggctgtaattcagtggcata

SEQ ID NO: 3149766 - DNA, 25 bp, Homo sapien
tgttgcaaatcaataggggcagctc

SEQ ID NO: 3149767 - DNA, 25 bp, Homo sapien
catatgaggagtaaagaaagggtgt

SEQ ID NO: 3149768 - DNA, 25 bp, Homo sapien
caaagttcatcccgttctccaagtt

SEQ ID NO: 3149769 - DNA, 25 bp, Homo sapien
caaataaatccttcaaagttcatcc

SEQ ID NO: 3149770 - DNA, 25 bp, Homo sapien
ttcttgacctgagacccctatccca

SEQ ID NO: 3149771 - DNA, 25 bp, Homo sapien
ctgagacccctatcccaatgtctgc

SEQ ID NO: 3149772 - DNA, 25 bp, Homo sapien
ttgtatcatgctaacatcattggca

SEQ ID NO: 3149773 - DNA, 25 bp, Homo sapien
tgtctgccacttgtatcatgctaac

SEQ ID NO: 3149774 - DNA, 25 bp, Homo sapien
gagcttgctgagatgtttgaactga

SEQ ID NO: 3149775 - DNA, 25 bp, Homo sapien
aatagagaatcatgttggaaagccg

SEQ ID NO: 3149776 - DNA, 25 bp, Homo sapien
aagccgtgtataacaccagtgtcca

SEQ ID NO: 3149777 - DNA, 25 bp, Homo sapien
tgtccatggacaagaaggagcttgc

SEQ ID NO: 3149778 - DNA, 25 bp, Homo sapien
ttcaggcagttgcatgagggtctct

SEQ ID NO: 3149779 - DNA, 25 bp, Homo sapien
acaccataaatgacaggaggggcag

SEQ ID NO: 3149780 - DNA, 25 bp, Homo sapien
ggtaccagaaaaggaggttcacata

SEQ ID NO: 3149781 - DNA, 25 bp, Homo sapien
ttgaagaagatcaaaacccagtaat

SEQ ID NO: 3149782 - DNA, 25 bp, Homo sapien
cttcgtggaagggaagcttctgact

SEQ ID NO: 3149783 - DNA, 25 bp, Homo sapien
ccagactcatctttagaggagagag

SEQ ID NO: 3149784 - DNA, 25 bp, Homo sapien
gaaagtctggacatgaagccaaagc

SEQ ID NO: 3149785 - DNA, 25 bp, Homo sapien
gcttctgactgcagacttccagact

SEQ ID NO: 3149786 - DNA, 25 bp, Homo sapien
tgctgccagcgcagtattcctaagg

SEQ ID NO: 3149787 - DNA, 25 bp, Homo sapien
tataaggtcctacatggtttgccca

SEQ ID NO: 3149788 - DNA, 25 bp, Homo sapien
gattcacctgtgctagtctctctgc

SEQ ID NO: 3149789 - DNA, 25 bp, Homo sapien
gctggatagccatctaactgccctc

SEQ ID NO: 3149790 - DNA, 25 bp, Homo sapien
aaaagcatccaataaggtgatccag

SEQ ID NO: 3149791 - DNA, 25 bp, Homo sapien
agcagaccaggctttgataaaaagc

SEQ ID NO: 3149792 - DNA, 25 bp, Homo sapien
ggcacaaagaagcagaccaggcttt

SEQ ID NO: 3149793 - DNA, 25 bp, Homo sapien
caataaggtgatccagaaggtatgg

SEQ ID NO: 3149794 - DNA, 25 bp, Homo sapien
ccagatggaggagaacgatgaacag

SEQ ID NO: 3149795 - DNA, 25 bp, Homo sapien
atgtcagtatctgagccctggtagg

SEQ ID NO: 3149796 - DNA, 25 bp, Homo sapien
ggagaacgatgaacagagcggctgt

SEQ ID NO: 3149797 - DNA, 25 bp, Homo sapien
ctttcaatgaccagatggaggagaa

SEQ ID NO: 3149798 - DNA, 25 bp, Homo sapien
cttcagaggcaagaaaaccactcac

SEQ ID NO: 3149799 - DNA, 25 bp, Homo sapien
ttaggctacttcagaggcaagaaaa

SEQ ID NO: 3149800 - DNA, 25 bp, Homo sapien
ctacttcagaggcaagaaaaccact

SEQ ID NO: 3149801 - DNA, 25 bp, Homo sapien
taggctacttcagaggcaagaaaac

SEQ ID NO: 3149802 - DNA, 25 bp, Homo sapien
aactcttagcttcatgtgatccaca

SEQ ID NO: 3149803 - DNA, 25 bp, Homo sapien
aataggcatgaaccctaccctcgca

SEQ ID NO: 3149804 - DNA, 25 bp, Homo sapien
ccctcgcagagagcataggctaatg

SEQ ID NO: 3149805 - DNA, 25 bp, Homo sapien
gcaggtgccatgacacacagttagt

SEQ ID NO: 3149806 - DNA, 25 bp, Homo sapien
taatcagccctactttagaaattgt

SEQ ID NO: 3149807 - DNA, 25 bp, Homo sapien
caggttattcagatgatattgctca

SEQ ID NO: 3149808 - DNA, 25 bp, Homo sapien
gctcataatccgtgaacccaaactg

SEQ ID NO: 3149809 - DNA, 25 bp, Homo sapien
tggccaccaaaagtaccaatgcaat

SEQ ID NO: 3149810 - DNA, 25 bp, Homo sapien
tgcctttggcaagtgagatagtgac

SEQ ID NO: 3149811 - DNA, 25 bp, Homo sapien
cagggccaggatctctagccatgca

SEQ ID NO: 3149812 - DNA, 25 bp, Homo sapien
tagccatgcatcctccagcataaga

SEQ ID NO: 3149813 - DNA, 25 bp, Homo sapien
gaataagagcatgaagggaaagagt

SEQ ID NO: 3149814 - DNA, 25 bp, Homo sapien
aaaaagaatgagattctatcactta

SEQ ID NO: 3149815 - DNA, 25 bp, Homo sapien
gccaaacattggttaggatgtggat

SEQ ID NO: 3149816 - DNA, 25 bp, Homo sapien
tgctggttgtacacccaaaagaaag

SEQ ID NO: 3149817 - DNA, 25 bp, Homo sapien
aaaattaagctactgtatgatccag

SEQ ID NO: 3149818 - DNA, 25 bp, Homo sapien
caagatgctaccaatgatgaccagc

SEQ ID NO: 3149819 - DNA, 25 bp, Homo sapien
tgatgaccagcaagtgaatccaagt

SEQ ID NO: 3149820 - DNA, 25 bp, Homo sapien
atgatgaccagcaagtgaatccaag

SEQ ID NO: 3149821 - DNA, 25 bp, Homo sapien
aaaataagacaagatgctaccaatg

SEQ ID NO: 3149822 - DNA, 25 bp, Homo sapien
caatggacgtcgtgaggatacaaac

SEQ ID NO: 3149823 - DNA, 25 bp, Homo sapien
gcaagttacacacatggctccaaaa

SEQ ID NO: 3149824 - DNA, 25 bp, Homo sapien
tcctgcataatccagtaagggttgg

SEQ ID NO: 3149825 - DNA, 25 bp, Homo sapien
ggatacaaactaagtagaatactgg

SEQ ID NO: 3149826 - DNA, 25 bp, Homo sapien
tggagttagtctgtcaaagtgctta

SEQ ID NO: 3149827 - DNA, 25 bp, Homo sapien
tagtctgtcaaagtgcttagctctc

SEQ ID NO: 3149828 - DNA, 25 bp, Homo sapien
tccacttcttgagagctttagtcct

SEQ ID NO: 3149829 - DNA, 25 bp, Homo sapien
tggaaacagggatccctgaagaact

SEQ ID NO: 3149830 - DNA, 25 bp, Homo sapien
tcattgcaaatacagcagaagggcc

SEQ ID NO: 3149831 - DNA, 25 bp, Homo sapien
ttggagggtccagccatctcaaagg

SEQ ID NO: 3149832 - DNA, 25 bp, Homo sapien
cagagtagccttgatctaaagcagt

SEQ ID NO: 3149833 - DNA, 25 bp, Homo sapien
tcaaaggccttagtttcagagtagc

SEQ ID NO: 3149834 - DNA, 25 bp, Homo sapien
tcattcttgcttggagagatacctc

SEQ ID NO: 3149835 - DNA, 25 bp, Homo sapien
aaaaattccgactggagcctgacca

SEQ ID NO: 3149836 - DNA, 25 bp, Homo sapien
taaaatgctcatgtcccttatggaa

SEQ ID NO: 3149837 - DNA, 25 bp, Homo sapien
gaatacttgcaactccaaggagggt

SEQ ID NO: 3149838 - DNA, 25 bp, Homo sapien
gacaacatctatacagaggcagatc

SEQ ID NO: 3149839 - DNA, 25 bp, Homo sapien
tgacaacatctatacagaggcagat

SEQ ID NO: 3149840 - DNA, 25 bp, Homo sapien
agatctcataaaaggtcttctcttg

SEQ ID NO: 3149841 - DNA, 25 bp, Homo sapien
acagaggcagatctcataaaaggtc

SEQ ID NO: 3149842 - DNA, 25 bp, Homo sapien
taagaacctcatagaaacctccaga

SEQ ID NO: 3149843 - DNA, 25 bp, Homo sapien
aatacaggaaatcacccaatgggcc

SEQ ID NO: 3149844 - DNA, 25 bp, Homo sapien
cagcatacatgattcgcaataggag

SEQ ID NO: 3149845 - DNA, 25 bp, Homo sapien
gattttatagtagcacctggcctta

SEQ ID NO: 3149846 - DNA, 25 bp, Homo sapien
tgccagctgctgtgaggataataaa

SEQ ID NO: 3149847 - DNA, 25 bp, Homo sapien
gctttacatttgttcagggcataga

SEQ ID NO: 3149848 - DNA, 25 bp, Homo sapien
gtttatcaggagacgacgatttcag

SEQ ID NO: 3149849 - DNA, 25 bp, Homo sapien
agattgtggccctgtaacattagca

SEQ ID NO: 3149850 - DNA, 25 bp, Homo sapien
gaagttatggagatgctcagattct

SEQ ID NO: 3149851 - DNA, 25 bp, Homo sapien
gatgctcagattctgtacgatggca

SEQ ID NO: 3149852 - DNA, 25 bp, Homo sapien
ggaaattgaagttatggagatgctc

SEQ ID NO: 3149853 - DNA, 25 bp, Homo sapien
gattctgtacgatggcagaaataca

SEQ ID NO: 3149854 - DNA, 25 bp, Homo sapien
gtattatgtgcactattgtcctgag

SEQ ID NO: 3149855 - DNA, 25 bp, Homo sapien
taatagggaacataaactacaatca

SEQ ID NO: 3149856 - DNA, 25 bp, Homo sapien
cctgagttttgaaagtacatatatc

SEQ ID NO: 3149857 - DNA, 25 bp, Homo sapien
gctaaaagtgtgtaaatatgcatac

SEQ ID NO: 3149858 - DNA, 25 bp, Homo sapien
ttaaggttgaatgcttgtggtgttt

SEQ ID NO: 3149859 - DNA, 25 bp, Homo sapien
aggacatctgcttttgagctttaag

SEQ ID NO: 3149860 - DNA, 25 bp, Homo sapien
ttcagcatgagtgtttatggagggt

SEQ ID NO: 3149861 - DNA, 25 bp, Homo sapien
gctttaaggttgaatgcttgtggtg

SEQ ID NO: 3149862 - DNA, 25 bp, Homo sapien
ccgaggtggagttgaaactgagctt

SEQ ID NO: 3149863 - DNA, 25 bp, Homo sapien
caaggactcaaagacagggcaagta

SEQ ID NO: 3149864 - DNA, 25 bp, Homo sapien
gcaagtaagggcaccatacagtccg

SEQ ID NO: 3149865 - DNA, 25 bp, Homo sapien
gagaatggagcgctgacaggctctc

SEQ ID NO: 3149866 - DNA, 25 bp, Homo sapien
tcctcagaaggcagggtaaagtcca

SEQ ID NO: 3149867 - DNA, 25 bp, Homo sapien
ctcctcagaaggcagggtaaagtcc

SEQ ID NO: 3149868 - DNA, 25 bp, Homo sapien
cctcagaaggcagggtaaagtccat

SEQ ID NO: 3149869 - DNA, 25 bp, Homo sapien
caggttccatgtaagccccttgcat

SEQ ID NO: 3149870 - DNA, 25 bp, Homo sapien
tctctgaggaatgaaagctagaagt

SEQ ID NO: 3149871 - DNA, 25 bp, Homo sapien
ttgaggacttagaggccatgagcct

SEQ ID NO: 3149872 - DNA, 25 bp, Homo sapien
aagctagaagtccttccttcgttct

SEQ ID NO: 3149873 - DNA, 25 bp, Homo sapien
cattatatagcagagaccagtgctc

SEQ ID NO: 3149874 - DNA, 25 bp, Homo sapien
gtaggatggccttcccattatatag

SEQ ID NO: 3149875 - DNA, 25 bp, Homo sapien
gtgctcacgtgcttgtagaagaggc

SEQ ID NO: 3149876 - DNA, 25 bp, Homo sapien
cagtgctcacgtgcttgtagaagag

SEQ ID NO: 3149877 - DNA, 25 bp, Homo sapien
ttgtgttgggtcacccaggttgagt

SEQ ID NO: 3149878 - DNA, 25 bp, Homo sapien
cagagattgtgttgggtcacccagg

SEQ ID NO: 3149879 - DNA, 25 bp, Homo sapien
ttgggtcacccaggttgagtggcat

SEQ ID NO: 3149880 - DNA, 25 bp, Homo sapien
tcacccaggttgagtggcatggaga

SEQ ID NO: 3149881 - DNA, 25 bp, Homo sapien
ttggcttacctgatggctgccgcca

SEQ ID NO: 3149882 - DNA, 25 bp, Homo sapien
cttggcttacctgatggctgccgcc

SEQ ID NO: 3149883 - DNA, 25 bp, Homo sapien
tctccatagctcctggatatacttg

SEQ ID NO: 3149884 - DNA, 25 bp, Homo sapien
aagaaagcgcgtgacatcagactgc

SEQ ID NO: 3149885 - DNA, 25 bp, Homo sapien
cgcgtgacatcagactgcttctttc

SEQ ID NO: 3149886 - DNA, 25 bp, Homo sapien
ttctccatagctcctggatatactt

SEQ ID NO: 3149887 - DNA, 25 bp, Homo sapien
cttgtagcccagttggcgcgcttta

SEQ ID NO: 3149888 - DNA, 25 bp, Homo sapien
agttggcgcgctttatcaggccggg

SEQ ID NO: 3149889 - DNA, 25 bp, Homo sapien
tgtataacgtaaccttgcttggcct

SEQ ID NO: 3149890 - DNA, 25 bp, Homo sapien
tagcccagttggcgcgctttatcag

SEQ ID NO: 3149891 - DNA, 25 bp, Homo sapien
gcgttttcggccaccacggctaaca

SEQ ID NO: 3149892 - DNA, 25 bp, Homo sapien
ctgggcgttttcggccaccacggct

SEQ ID NO: 3149893 - DNA, 25 bp, Homo sapien
tttcggccaccacggctaacacaaa

SEQ ID NO: 3149894 - DNA, 25 bp, Homo sapien
gttttcggccaccacggctaacaca

SEQ ID NO: 3149895 - DNA, 25 bp, Homo sapien
gagcaaaattttagctggttaacac

SEQ ID NO: 3149896 - DNA, 25 bp, Homo sapien
tcgagcaaaattttagctggttaac

SEQ ID NO: 3149897 - DNA, 25 bp, Homo sapien
cgagcaaaattttagctggttaaca

SEQ ID NO: 3149898 - DNA, 25 bp, Homo sapien
cttcgagcaaaattttagctggtta

SEQ ID NO: 3149899 - DNA, 25 bp, Homo sapien
taagaattcaggactcccagagccc

SEQ ID NO: 3149900 - DNA, 25 bp, Homo sapien
tcgctcctccgcaacggactgaagg

SEQ ID NO: 3149901 - DNA, 25 bp, Homo sapien
ccagctcgctcctccgcaacggact

SEQ ID NO: 3149902 - DNA, 25 bp, Homo sapien
gctcgctcctccgcaacggactgaa

SEQ ID NO: 3149903 - DNA, 25 bp, Homo sapien
tgaggataacctcaaaaaatttgta

SEQ ID NO: 3149904 - DNA, 25 bp, Homo sapien
tatggaatggatcaatgaggataac

SEQ ID NO: 3149905 - DNA, 25 bp, Homo sapien
ggatcaatgaggataacctcaaaaa

SEQ ID NO: 3149906 - DNA, 25 bp, Homo sapien
ctcaaaaaatttgtatgtggaatct

SEQ ID NO: 3149907 - DNA, 25 bp, Homo sapien
agctgcccggcgagaaccacaaata

SEQ ID NO: 3149908 - DNA, 25 bp, Homo sapien
caagctgcccggcgagaaccacaaa

SEQ ID NO: 3149909 - DNA, 25 bp, Homo sapien
tgcccggcgagaaccacaaatagtg

SEQ ID NO: 3149910 - DNA, 25 bp, Homo sapien
ctgcccggcgagaaccacaaatagt

SEQ ID NO: 3149911 - DNA, 25 bp, Homo sapien
tcctaaattgtttattaggtatgaa

SEQ ID NO: 3149912 - DNA, 25 bp, Homo sapien
gtcctaaattgtttattaggtatga

SEQ ID NO: 3149913 - DNA, 25 bp, Homo sapien
cctaaattgtttattaggtatgaat

SEQ ID NO: 3149914 - DNA, 25 bp, Homo sapien
tgtcctaaattgtttattaggtatg

SEQ ID NO: 3149915 - DNA, 25 bp, Homo sapien
tttgacaaagcattcaagaaacatc

SEQ ID NO: 3149916 - DNA, 25 bp, Homo sapien
gagccaaaacccacaacttgtaaca

SEQ ID NO: 3149917 - DNA, 25 bp, Homo sapien
cacaacttgtaacagctgcttttcc

SEQ ID NO: 3149918 - DNA, 25 bp, Homo sapien
tccagagtgaatcgagccaaaaccc

SEQ ID NO: 3149919 - DNA, 25 bp, Homo sapien
agctctcacgtgtctttccagagtg

SEQ ID NO: 3149920 - DNA, 25 bp, Homo sapien
tagctaaaagccactagaaggctga

SEQ ID NO: 3149921 - DNA, 25 bp, Homo sapien
tcatctgagatcctctacttgtcag

SEQ ID NO: 3149922 - DNA, 25 bp, Homo sapien
aatttccgaagtacactcatctgag

SEQ ID NO: 3149923 - DNA, 25 bp, Homo sapien
gaaaatgtaacccattgatacggga

SEQ ID NO: 3149924 - DNA, 25 bp, Homo sapien
tcttatatggtctcttgaggtcgca

SEQ ID NO: 3149925 - DNA, 25 bp, Homo sapien
tgaggtcgcagaagatgctgacata

SEQ ID NO: 3149926 - DNA, 25 bp, Homo sapien
caatgctgttcgcttatcataggga

SEQ ID NO: 3149927 - DNA, 25 bp, Homo sapien
tgctgacataggaaaccaatgctgt

SEQ ID NO: 3149928 - DNA, 25 bp, Homo sapien
atttatcttctgatgggagacaatg

SEQ ID NO: 3149929 - DNA, 25 bp, Homo sapien
gatgacaggtatttcggaacccaga

SEQ ID NO: 3149930 - DNA, 25 bp, Homo sapien
ttccctgagtgcatcattgatggcg

SEQ ID NO: 3149931 - DNA, 25 bp, Homo sapien
tcacatatctccatcgcctcagttg

SEQ ID NO: 3149932 - DNA, 25 bp, Homo sapien
catgctgtttggctgtaccctcgcc

SEQ ID NO: 3149933 - DNA, 25 bp, Homo sapien
agttggtccctctgtgagggctcat

SEQ ID NO: 3149934 - DNA, 25 bp, Homo sapien
gtccctctgtgagggctcataaccc

SEQ ID NO: 3149935 - DNA, 25 bp, Homo sapien
ttggtccctctgtgagggctcataa

SEQ ID NO: 3149936 - DNA, 25 bp, Homo sapien
tggtccctctgtgagggctcataac

SEQ ID NO: 3149937 - DNA, 25 bp, Homo sapien
tgtagtcatgacctctagacgccat

SEQ ID NO: 3149938 - DNA, 25 bp, Homo sapien
gacccccattgttcaggtccagttg

SEQ ID NO: 3149939 - DNA, 25 bp, Homo sapien
ggtcttagtgatattccaaaagtca

SEQ ID NO: 3149940 - DNA, 25 bp, Homo sapien
ggacactagtgttagacccccattg

SEQ ID NO: 3149941 - DNA, 25 bp, Homo sapien
tttctttctctgacccaattgccgc

SEQ ID NO: 3149942 - DNA, 25 bp, Homo sapien
tctgacccaattgccgcctttgatg

SEQ ID NO: 3149943 - DNA, 25 bp, Homo sapien
ctttgatggcaaaaactcagttggt

SEQ ID NO: 3149944 - DNA, 25 bp, Homo sapien
caattgccgcctttgatggcaaaaa

SEQ ID NO: 3149945 - DNA, 25 bp, Homo sapien
tacagcagctgtttgcatattctcc

SEQ ID NO: 3149946 - DNA, 25 bp, Homo sapien
tgcatattctcctgcaatacatttc

SEQ ID NO: 3149947 - DNA, 25 bp, Homo sapien
tttgcatattctcctgcaatacatt

SEQ ID NO: 3149948 - DNA, 25 bp, Homo sapien
catattctcctgcaatacatttcta

SEQ ID NO: 3149949 - DNA, 25 bp, Homo sapien
gtcatcctggagcagtggctagtct

SEQ ID NO: 3149950 - DNA, 25 bp, Homo sapien
ttcactcataaagagccacagtcat

SEQ ID NO: 3149951 - DNA, 25 bp, Homo sapien
cttcactcataaagagccacagtca

SEQ ID NO: 3149952 - DNA, 25 bp, Homo sapien
gagcagtggctagtctgtttgcctc

SEQ ID NO: 3149953 - DNA, 25 bp, Homo sapien
tgttcttccccaagcctgtcactgt

SEQ ID NO: 3149954 - DNA, 25 bp, Homo sapien
tgctgaatcagctgttcttccccaa

SEQ ID NO: 3149955 - DNA, 25 bp, Homo sapien
tcactgtccccagttctgtcttcag

SEQ ID NO: 3149956 - DNA, 25 bp, Homo sapien
cttgggactgctgaatcagctgttc

SEQ ID NO: 3149957 - DNA, 25 bp, Homo sapien
gagagccgcaacactgaattgttgc

SEQ ID NO: 3149958 - DNA, 25 bp, Homo sapien
gagccgcaacactgaattgttgctg

SEQ ID NO: 3149959 - DNA, 25 bp, Homo sapien
gccgcaacactgaattgttgctgag

SEQ ID NO: 3149960 - DNA, 25 bp, Homo sapien
caggagagccgcaacactgaattgt

SEQ ID NO: 3149961 - DNA, 25 bp, Homo sapien
gtggtcttagggtttctgagtgtcc

SEQ ID NO: 3149962 - DNA, 25 bp, Homo sapien
tcttttccgcacttgtagcctcttt

SEQ ID NO: 3149963 - DNA, 25 bp, Homo sapien
tgtagcctctttcaacacaaagact

SEQ ID NO: 3149964 - DNA, 25 bp, Homo sapien
ccatactgttaatgaggtactcctt

SEQ ID NO: 3149965 - DNA, 25 bp, Homo sapien
aggaccaacgatgaaagcctctgtt

SEQ ID NO: 3149966 - DNA, 25 bp, Homo sapien
gaccaacgatgaaagcctctgttaa

SEQ ID NO: 3149967 - DNA, 25 bp, Homo sapien
acgatgaaagcctctgttaaccttc

SEQ ID NO: 3149968 - DNA, 25 bp, Homo sapien
ccaacgatgaaagcctctgttaacc

SEQ ID NO: 3149969 - DNA, 25 bp, Homo sapien
ggctgaccaggcaggttttccatag

SEQ ID NO: 3149970 - DNA, 25 bp, Homo sapien
gctgaccaggcaggttttccataga

SEQ ID NO: 3149971 - DNA, 25 bp, Homo sapien
acaccaagaatttcaataggatgaa

SEQ ID NO: 3149972 - DNA, 25 bp, Homo sapien
atttcaataggatgaactattttgg

SEQ ID NO: 3149973 - DNA, 25 bp, Homo sapien
caaggacacatttaagcagatagtt

SEQ ID NO: 3149974 - DNA, 25 bp, Homo sapien
cacatttaagcagatagttttgaaa

SEQ ID NO: 3149975 - DNA, 25 bp, Homo sapien
tggtgattattgtccaaggacacat

SEQ ID NO: 3149976 - DNA, 25 bp, Homo sapien
ttattgtccaaggacacatttaagc

SEQ ID NO: 3149977 - DNA, 25 bp, Homo sapien
gacttcgatgactgacataggcaca

SEQ ID NO: 3149978 - DNA, 25 bp, Homo sapien
gatgactgacataggcacaattgtg

SEQ ID NO: 3149979 - DNA, 25 bp, Homo sapien
gactgacataggcacaattgtggct

SEQ ID NO: 3149980 - DNA, 25 bp, Homo sapien
ctgtacaagacttcgatgactgaca

SEQ ID NO: 3149981 - DNA, 25 bp, Homo sapien
gggagctctgactttgaattcagca

SEQ ID NO: 3149982 - DNA, 25 bp, Homo sapien
ccagggaagctgttcgagtaattca

SEQ ID NO: 3149983 - DNA, 25 bp, Homo sapien
tgtacgcgctttttgcacggctccc

SEQ ID NO: 3149984 - DNA, 25 bp, Homo sapien
tcctcccgcgggaaacttctgagaa

SEQ ID NO: 3149985 - DNA, 25 bp, Homo sapien
gcaggcgcctcactcctgctactac

SEQ ID NO: 3149986 - DNA, 25 bp, Homo sapien
ggttggctcagatccagtcctggga

SEQ ID NO: 3149987 - DNA, 25 bp, Homo sapien
cagcgttggctctcgttcaggagga

SEQ ID NO: 3149988 - DNA, 25 bp, Homo sapien
aagaaggtctaatttgcggctgccc

SEQ ID NO: 3149989 - DNA, 25 bp, Homo sapien
ggaatccgcttgctaccgcgagggt

SEQ ID NO: 3149990 - DNA, 25 bp, Homo sapien
gcatctagtggacttggctgcacac

SEQ ID NO: 3149991 - DNA, 25 bp, Homo sapien
tgtgatggcctcttagtcccggtga

SEQ ID NO: 3149992 - DNA, 25 bp, Homo sapien
cacggaggatctgtcattacgggtt

SEQ ID NO: 3149993 - DNA, 25 bp, Homo sapien
tccccaaagccggtaagatcgatga

SEQ ID NO: 3149994 - DNA, 25 bp, Homo sapien
catttgacaattgccttggacttgg

SEQ ID NO: 3149995 - DNA, 25 bp, Homo sapien
tactgtgttgagtacctccagtgcc

SEQ ID NO: 3149996 - DNA, 25 bp, Homo sapien
tgccctccttgacgctgccttagaa

SEQ ID NO: 3149997 - DNA, 25 bp, Homo sapien
tagctgcttttgaatgacaggcagg

SEQ ID NO: 3149998 - DNA, 25 bp, Homo sapien
gaaaataatcagttcttatgaaaac

SEQ ID NO: 3149999 - DNA, 25 bp, Homo sapien
tctatgtaccttaatctcgtttctc

SEQ ID NO: 3150000 - DNA, 25 bp, Homo sapien
ccacaatcttaaatagatttcagct

SEQ ID NO: 3150001 - DNA, 25 bp, Homo sapien
caatcttaaatagatttcagctgaa

SEQ ID NO: 3150002 - DNA, 25 bp, Homo sapien
gatgtcaagacatcaaaaacagtag

SEQ ID NO: 3150003 - DNA, 25 bp, Homo sapien
tgtcgtagtacagaaattggtcata

SEQ ID NO: 3150004 - DNA, 25 bp, Homo sapien
taaggaggtagtgaagtgccaacat

SEQ ID NO: 3150005 - DNA, 25 bp, Homo sapien
aacagtcgagagaaaaatttgtagc

SEQ ID NO: 3150006 - DNA, 25 bp, Homo sapien
tacttcatcctgaattcaaacaggg

SEQ ID NO: 3150007 - DNA, 25 bp, Homo sapien
tgtaagatcacaagcctgtatgtgg

SEQ ID NO: 3150008 - DNA, 25 bp, Homo sapien
ctagatgcctagattttccagtaga

SEQ ID NO: 3150009 - DNA, 25 bp, Homo sapien
ggaaggaagacatgtagaatactac

SEQ ID NO: 3150010 - DNA, 25 bp, Homo sapien
agaatgtccaccttgtgttcagatg

SEQ ID NO: 3150011 - DNA, 25 bp, Homo sapien
ggagaatgtccaccttgtgttcaga

SEQ ID NO: 3150012 - DNA, 25 bp, Homo sapien
tggagaatgtccaccttgtgttcag

SEQ ID NO: 3150013 - DNA, 25 bp, Homo sapien
ctggagaatgtccaccttgtgttca

SEQ ID NO: 3150014 - DNA, 25 bp, Homo sapien
ccagaatgccttcattgtgaggaag

SEQ ID NO: 3150015 - DNA, 25 bp, Homo sapien
cagaatgccttcattgtgaggaagg

SEQ ID NO: 3150016 - DNA, 25 bp, Homo sapien
ctccaagtcacggccactaggttgt

SEQ ID NO: 3150017 - DNA, 25 bp, Homo sapien
gtgctccaagtcacggccactaggt

SEQ ID NO: 3150018 - DNA, 25 bp, Homo sapien
caccatgtcatcaaccttgccaaaa

SEQ ID NO: 3150019 - DNA, 25 bp, Homo sapien
agaaaaacatcgctgtcactttggt

SEQ ID NO: 3150020 - DNA, 25 bp, Homo sapien
tgtcctgctccgtgtcatgatcaag

SEQ ID NO: 3150021 - DNA, 25 bp, Homo sapien
gttttggagaaatgtggtcacttgt

SEQ ID NO: 3150022 - DNA, 25 bp, Homo sapien
gaaagtgctagcattccttagggag

SEQ ID NO: 3150023 - DNA, 25 bp, Homo sapien
gatgttcacagcgttgtcaccgagg

SEQ ID NO: 3150024 - DNA, 25 bp, Homo sapien
gacaaagtacttgaatgcggaatcc

SEQ ID NO: 3150025 - DNA, 25 bp, Homo sapien
cagaagatgtaccaacttgtggaga

SEQ ID NO: 3150026 - DNA, 25 bp, Homo sapien
tgtaccactgcagttggttcccggc

SEQ ID NO: 3150027 - DNA, 25 bp, Homo sapien
ttctgtcttcggcactgtgtgcttc

SEQ ID NO: 3150028 - DNA, 25 bp, Homo sapien
tgtgtgcttcttgctccgcggttta

SEQ ID NO: 3150029 - DNA, 25 bp, Homo sapien
cagtcggtaaggagacgtagctttc

SEQ ID NO: 3150030 - DNA, 25 bp, Homo sapien
cactgttcttgggagtgtaaatgat

SEQ ID NO: 3150031 - DNA, 25 bp, Homo sapien
aaatatatggatagacgcttctcaa

SEQ ID NO: 3150032 - DNA, 25 bp, Homo sapien
ggcatgtttactgaggcactattca

SEQ ID NO: 3150033 - DNA, 25 bp, Homo sapien
cacaggcatgtttactgaggcacta

SEQ ID NO: 3150034 - DNA, 25 bp, Homo sapien
ttctgcagatatgtgacttctgcat

SEQ ID NO: 3150035 - DNA, 25 bp, Homo sapien
catttctgcagaaacgtgacttctg

SEQ ID NO: 3150036 - DNA, 25 bp, Homo sapien
gcatttctgcagaaacgtgacttct

SEQ ID NO: 3150037 - DNA, 25 bp, Homo sapien
ctcacagtgcctcttcggcgccctc

SEQ ID NO: 3150038 - DNA, 25 bp, Homo sapien
ctcttcggcgccctctactgcaaaa

SEQ ID NO: 3150039 - DNA, 25 bp, Homo sapien
ttcggcgccctctactgcaaaaaca

SEQ ID NO: 3150040 - DNA, 25 bp, Homo sapien
acagtgcctcttcggcgccctctac

SEQ ID NO: 3150041 - DNA, 25 bp, Homo sapien
gttatcgccagtccagaccgaggct

SEQ ID NO: 3150042 - DNA, 25 bp, Homo sapien
gaccgaggctgcaagatcgcagaca

SEQ ID NO: 3150043 - DNA, 25 bp, Homo sapien
caaaatgagtggtggtttagggcac

SEQ ID NO: 3150044 - DNA, 25 bp, Homo sapien
ccccgtacgaaaactgctcaggaat

SEQ ID NO: 3150045 - DNA, 25 bp, Homo sapien
gcacactggatagcaaagacgcttg

SEQ ID NO: 3150046 - DNA, 25 bp, Homo sapien
atcagggtgcacttgcacatagaga

SEQ ID NO: 3150047 - DNA, 25 bp, Homo sapien
tctgttctagtcagagctggtctgc

SEQ ID NO: 3150048 - DNA, 25 bp, Homo sapien
gagaaggtgtagttcagcacactgg

SEQ ID NO: 3150049 - DNA, 25 bp, Homo sapien
ggtccaatgagctacttgggttatt

SEQ ID NO: 3150050 - DNA, 25 bp, Homo sapien
tattggatttcttgtcagattgcca

SEQ ID NO: 3150051 - DNA, 25 bp, Homo sapien
tgttttatctgggctgagcttcagc

SEQ ID NO: 3150052 - DNA, 25 bp, Homo sapien
gccagtcttggacttggtccaatga

SEQ ID NO: 3150053 - DNA, 25 bp, Homo sapien
acagaaatcagagtagtgcttactt

SEQ ID NO: 3150054 - DNA, 25 bp, Homo sapien
ccattgttgagtgaagcgtatttga

SEQ ID NO: 3150055 - DNA, 25 bp, Homo sapien
taagtagccctcactttcatgccat

SEQ ID NO: 3150056 - DNA, 25 bp, Homo sapien
aatgtgctttggtgcaaggtacaag

SEQ ID NO: 3150057 - DNA, 25 bp, Homo sapien
gatcctatgactgacatcaactaaa

SEQ ID NO: 3150058 - DNA, 25 bp, Homo sapien
tgcaaatgctggcagtgatcctaaa

SEQ ID NO: 3150059 - DNA, 25 bp, Homo sapien
gatgacctcatggaagctctaactg

SEQ ID NO: 3150060 - DNA, 25 bp, Homo sapien
tgagtacccagatgccaaaactatg

SEQ ID NO: 3150061 - DNA, 25 bp, Homo sapien
caaaccaggtttgcccgaatcttgg

SEQ ID NO: 3150062 - DNA, 25 bp, Homo sapien
gatggcagctacttcggtgagatca

SEQ ID NO: 3150063 - DNA, 25 bp, Homo sapien
gatttccaacatgaatgcagccaga

SEQ ID NO: 3150064 - DNA, 25 bp, Homo sapien
gcaaagctggcaatcgaagaacggc

SEQ ID NO: 3150065 - DNA, 25 bp, Homo sapien
tatcaaggaaggcaaactcgctgtg

SEQ ID NO: 3150066 - DNA, 25 bp, Homo sapien
gaatagaagtgtactcccatagcag

SEQ ID NO: 3150067 - DNA, 25 bp, Homo sapien
tccttcaggatccatgctaggctgt

SEQ ID NO: 3150068 - DNA, 25 bp, Homo sapien
gagccatttgagtagtgtgtcgaca

SEQ ID NO: 3150069 - DNA, 25 bp, Homo sapien
tggtaggctatcttccaaacagtgt

SEQ ID NO: 3150070 - DNA, 25 bp, Homo sapien
tcctgacctttctcaaaatctccat

SEQ ID NO: 3150071 - DNA, 25 bp, Homo sapien
cccttgtggaagaagcgattgctat

SEQ ID NO: 3150072 - DNA, 25 bp, Homo sapien
gattgctattttcaggcactggctg

SEQ ID NO: 3150073 - DNA, 25 bp, Homo sapien
gaagagaggaccctgtaactcagaa

SEQ ID NO: 3150074 - DNA, 25 bp, Homo sapien
gagcaggcacaacccattctagaag

SEQ ID NO: 3150075 - DNA, 25 bp, Homo sapien
atggtgacgccgagccgcaaaatca

SEQ ID NO: 3150076 - DNA, 25 bp, Homo sapien
gggttcttgacttcccgcaataaga

SEQ ID NO: 3150077 - DNA, 25 bp, Homo sapien
gaaatactgatggaggtctatgtcc

SEQ ID NO: 3150078 - DNA, 25 bp, Homo sapien
gcaatgggtgcaatgaaatctcaca

SEQ ID NO: 3150079 - DNA, 25 bp, Homo sapien
ttagaaagttaagtgtcctctctta

SEQ ID NO: 3150080 - DNA, 25 bp, Homo sapien
tgtttttattagagctaattgttta

SEQ ID NO: 3150081 - DNA, 25 bp, Homo sapien
tttttattagagctaattgtttaga

SEQ ID NO: 3150082 - DNA, 25 bp, Homo sapien
ttaagtgtcctctcttaaagaatta

SEQ ID NO: 3150083 - DNA, 25 bp, Homo sapien
cacccgatagctaaggttgtgcctt

SEQ ID NO: 3150084 - DNA, 25 bp, Homo sapien
tgctaaggtcccacccgatagctaa

SEQ ID NO: 3150085 - DNA, 25 bp, Homo sapien
tatccaacttgatcagggtttgatc

SEQ ID NO: 3150086 - DNA, 25 bp, Homo sapien
tatagccagagactcgtccctaggt

SEQ ID NO: 3150087 - DNA, 25 bp, Homo sapien
cttccggaacgcgggcgcttgctcc

SEQ ID NO: 3150088 - DNA, 25 bp, Homo sapien
cagggctctccgggcggcagcctca

SEQ ID NO: 3150089 - DNA, 25 bp, Homo sapien
agggctctccgggcggcagcctcac

SEQ ID NO: 3150090 - DNA, 25 bp, Homo sapien
caccgggtgacgtcggccgcagact

SEQ ID NO: 3150091 - DNA, 25 bp, Homo sapien
tctcgcggtgctcgatccccgggag

SEQ ID NO: 3150092 - DNA, 25 bp, Homo sapien
gccccccaggcagacacgccctctg

SEQ ID NO: 3150093 - DNA, 25 bp, Homo sapien
agggcgcagcgcagaactcccacgg

SEQ ID NO: 3150094 - DNA, 25 bp, Homo sapien
tggagactgcagaaaacccgccagt

SEQ ID NO: 3150095 - DNA, 25 bp, Homo sapien
tgttgcgaacacttggcgaagggca

SEQ ID NO: 3150096 - DNA, 25 bp, Homo sapien
agcctgcaaacgagtgctcccggtt

SEQ ID NO: 3150097 - DNA, 25 bp, Homo sapien
gagcctcgcccagagatttcacggg

SEQ ID NO: 3150098 - DNA, 25 bp, Homo sapien
attctagatccagcggccttaaaaa

SEQ ID NO: 3150099 - DNA, 25 bp, Homo sapien
tagaaaataattctagatccagcgg

SEQ ID NO: 3150100 - DNA, 25 bp, Homo sapien
aataattctagatccagcggcctta

SEQ ID NO: 3150101 - DNA, 25 bp, Homo sapien
tttaatagcttgtgaattgttcagg

SEQ ID NO: 3150102 - DNA, 25 bp, Homo sapien
tgggaggagtttggacagaccagag

SEQ ID NO: 3150103 - DNA, 25 bp, Homo sapien
gggaggagtttggacagaccagaga

SEQ ID NO: 3150104 - DNA, 25 bp, Homo sapien
ggaggagtttggacagaccagagac

SEQ ID NO: 3150105 - DNA, 25 bp, Homo sapien
ctgggaggagtttggacagaccaga

SEQ ID NO: 3150106 - DNA, 25 bp, Homo sapien
taaaaatacttgagcttactgccag

SEQ ID NO: 3150107 - DNA, 25 bp, Homo sapien
tatgctgtaattcaggtccgtgtag

SEQ ID NO: 3150108 - DNA, 25 bp, Homo sapien
tgccagtaccaagcccacataaaga

SEQ ID NO: 3150109 - DNA, 25 bp, Homo sapien
gcccttgctggccagttgcaagagg

SEQ ID NO: 3150110 - DNA, 25 bp, Homo sapien
ttgacagcaatcctacccaccagag

SEQ ID NO: 3150111 - DNA, 25 bp, Homo sapien
accagagccattccttcaggtaaga

SEQ ID NO: 3150112 - DNA, 25 bp, Homo sapien
cattccttcaggtaagaatgtccac

SEQ ID NO: 3150113 - DNA, 25 bp, Homo sapien
cagagccattccttcaggtaagaat

SEQ ID NO: 3150114 - DNA, 25 bp, Homo sapien
tgctttcagatcctgtaaagtctcg

SEQ ID NO: 3150115 - DNA, 25 bp, Homo sapien
gagactgaagtcagcaaaagtggct

SEQ ID NO: 3150116 - DNA, 25 bp, Homo sapien
gaagctttaagactcctggctacag

SEQ ID NO: 3150117 - DNA, 25 bp, Homo sapien
gctacagagggaatttatgatgccc

SEQ ID NO: 3150118 - DNA, 25 bp, Homo sapien
gtggcaggtgcaaaagcataagcag

SEQ ID NO: 3150119 - DNA, 25 bp, Homo sapien
ttatgagaacactcaaagcacccag

SEQ ID NO: 3150120 - DNA, 25 bp, Homo sapien
gagaacactcaaagcacccagaggg

SEQ ID NO: 3150121 - DNA, 25 bp, Homo sapien
tgaccaaggtggcaggtgcaaaagc

SEQ ID NO: 3150122 - DNA, 25 bp, Homo sapien
gatacttagacctatccagtactgc

SEQ ID NO: 3150123 - DNA, 25 bp, Homo sapien
cacctgttactgctctgatacttag

SEQ ID NO: 3150124 - DNA, 25 bp, Homo sapien
tggcatccccatgaaggcaattaag

SEQ ID NO: 3150125 - DNA, 25 bp, Homo sapien
taccaggtactttcctagagttgcc

SEQ ID NO: 3150126 - DNA, 25 bp, Homo sapien
tttcccatgaatgttcaagtgctcg

SEQ ID NO: 3150127 - DNA, 25 bp, Homo sapien
agttgaccccaatatacttaatatg

SEQ ID NO: 3150128 - DNA, 25 bp, Homo sapien
tttcatgcaaagatgtgacttcctc

SEQ ID NO: 3150129 - DNA, 25 bp, Homo sapien
tcttgtggggcatggataaccatca

SEQ ID NO: 3150130 - DNA, 25 bp, Homo sapien
tgggagccacaatcaaaatcagcac

SEQ ID NO: 3150131 - DNA, 25 bp, Homo sapien
cttgggagccacaatcaaaatcagc

SEQ ID NO: 3150132 - DNA, 25 bp, Homo sapien
ttgggagccacaatcaaaatcagca

SEQ ID NO: 3150133 - DNA, 25 bp, Homo sapien
ggagccacaatcaaaatcagcacca

SEQ ID NO: 3150134 - DNA, 25 bp, Homo sapien
taagctcactccaagtaatgtcagt

SEQ ID NO: 3150135 - DNA, 25 bp, Homo sapien
cattgacattcagagagacggcttc

SEQ ID NO: 3150136 - DNA, 25 bp, Homo sapien
cacaagagaggtattaaaggtgtcc

SEQ ID NO: 3150137 - DNA, 25 bp, Homo sapien
tgaaaacgctccaatcaaggaacag

SEQ ID NO: 3150138 - DNA, 25 bp, Homo sapien
gccacctggcagagacaaagatact

SEQ ID NO: 3150139 - DNA, 25 bp, Homo sapien
tgcagtagcccctgagatcttagta

SEQ ID NO: 3150140 - DNA, 25 bp, Homo sapien
taatggaacattagggccttgcagc

SEQ ID NO: 3150141 - DNA, 25 bp, Homo sapien
tgagccattgcccagacagaagata

SEQ ID NO: 3150142 - DNA, 25 bp, Homo sapien
tagatgtacagacaagctgtagctc

SEQ ID NO: 3150143 - DNA, 25 bp, Homo sapien
actactgttagatgtacagacaagc

SEQ ID NO: 3150144 - DNA, 25 bp, Homo sapien
tactgttagatgtacagacaagctg

SEQ ID NO: 3150145 - DNA, 25 bp, Homo sapien
tgttagatgtacagacaagctgtag

SEQ ID NO: 3150146 - DNA, 25 bp, Homo sapien
cactgttgcatctctaggtcctagg

SEQ ID NO: 3150147 - DNA, 25 bp, Homo sapien
tgagatccaatctggtaggcagcct

SEQ ID NO: 3150148 - DNA, 25 bp, Homo sapien
tagttccacgtgacaacctcagctg

SEQ ID NO: 3150149 - DNA, 25 bp, Homo sapien
taagtaagtattaatggcatgaccc

SEQ ID NO: 3150150 - DNA, 25 bp, Homo sapien
cttcagatgggcacttgagcctctc

SEQ ID NO: 3150151 - DNA, 25 bp, Homo sapien
gatgggcacttgagcctctcttttc

SEQ ID NO: 3150152 - DNA, 25 bp, Homo sapien
cagatgggcacttgagcctctcttt

SEQ ID NO: 3150153 - DNA, 25 bp, Homo sapien
tcagatgggcacttgagcctctctt

SEQ ID NO: 3150154 - DNA, 25 bp, Homo sapien
tctatggtgggatccaagacgtgat

SEQ ID NO: 3150155 - DNA, 25 bp, Homo sapien
tcaccccacatattgtcgggactgg

SEQ ID NO: 3150156 - DNA, 25 bp, Homo sapien
ttgcatgtcccctttactactggcc

SEQ ID NO: 3150157 - DNA, 25 bp, Homo sapien
gatgagtgaagagcctcaactgccc

SEQ ID NO: 3150158 - DNA, 25 bp, Homo sapien
tgttggctacaaagcgacccatgag

SEQ ID NO: 3150159 - DNA, 25 bp, Homo sapien
tacaaagcgacccatgaggatttaa

SEQ ID NO: 3150160 - DNA, 25 bp, Homo sapien
caagctgattccctgatgtgcatat

SEQ ID NO: 3150161 - DNA, 25 bp, Homo sapien
ttaattttggccagtccagcaagct

SEQ ID NO: 3150162 - DNA, 25 bp, Homo sapien
gaaatgatctgcttttcagataaca

SEQ ID NO: 3150163 - DNA, 25 bp, Homo sapien
ccatccagtcggttttctgttgctg

SEQ ID NO: 3150164 - DNA, 25 bp, Homo sapien
tcacgtactcatggctttctaacag

SEQ ID NO: 3150165 - DNA, 25 bp, Homo sapien
ttagagactccctcaatatcacgta

SEQ ID NO: 3150166 - DNA, 25 bp, Homo sapien
tcttactaaggatagtgaggaagat

SEQ ID NO: 3150167 - DNA, 25 bp, Homo sapien
aatctaagttttctgtggtggactc

SEQ ID NO: 3150168 - DNA, 25 bp, Homo sapien
ctaaggatagtgaggaagatgataa

SEQ ID NO: 3150169 - DNA, 25 bp, Homo sapien
tgtggtggactcattcacagacatg

SEQ ID NO: 3150170 - DNA, 25 bp, Homo sapien
aaaaagtccagcgaagaagattgct

SEQ ID NO: 3150171 - DNA, 25 bp, Homo sapien
gatgcctcaagatgtattactgtta

SEQ ID NO: 3150172 - DNA, 25 bp, Homo sapien
aaggagacagctaagtgatgcctca

SEQ ID NO: 3150173 - DNA, 25 bp, Homo sapien
gaagaagattgcttaagctgaggag

SEQ ID NO: 3150174 - DNA, 25 bp, Homo sapien
tgtgctgaaattgctatacctttaa

SEQ ID NO: 3150175 - DNA, 25 bp, Homo sapien
caatagtaggtgactttgcttgaca

SEQ ID NO: 3150176 - DNA, 25 bp, Homo sapien
gtaaaatgtatagagggaactactc

SEQ ID NO: 3150177 - DNA, 25 bp, Homo sapien
gaagatgatctctacaattctctgc

SEQ ID NO: 3150178 - DNA, 25 bp, Homo sapien
aaacactactgtgctaggaccaccc

SEQ ID NO: 3150179 - DNA, 25 bp, Homo sapien
tagtagtaaacactactgtgctagg

SEQ ID NO: 3150180 - DNA, 25 bp, Homo sapien
aacactactgtgctaggaccaccca

SEQ ID NO: 3150181 - DNA, 25 bp, Homo sapien
attagtagtaaacactactgtgcta

SEQ ID NO: 3150182 - DNA, 25 bp, Homo sapien
caacacacatgaccactggtgaggt

SEQ ID NO: 3150183 - DNA, 25 bp, Homo sapien
taagtggggatcgagcactggtcat

SEQ ID NO: 3150184 - DNA, 25 bp, Homo sapien
cacatgaccactggtgaggttagat

SEQ ID NO: 3150185 - DNA, 25 bp, Homo sapien
ctgcagaacaccttgataagtgggg

SEQ ID NO: 3150186 - DNA, 25 bp, Homo sapien
aaatgatccctcagaacaggatttt

SEQ ID NO: 3150187 - DNA, 25 bp, Homo sapien
ttaaaggtctgaattgatatcccaa

SEQ ID NO: 3150188 - DNA, 25 bp, Homo sapien
tttccagggaacttgccaacaccat

SEQ ID NO: 3150189 - DNA, 25 bp, Homo sapien
cttccttttgtgcagtggattcctt

SEQ ID NO: 3150190 - DNA, 25 bp, Homo sapien
tagtcaaacttaactgtctactcct

SEQ ID NO: 3150191 - DNA, 25 bp, Homo sapien
gaattcatccttaaggagaaagtga

SEQ ID NO: 3150192 - DNA, 25 bp, Homo sapien
tgcattgcctacatttccatggtaa

SEQ ID NO: 3150193 - DNA, 25 bp, Homo sapien
cctatttccctagtttgttctgtga

SEQ ID NO: 3150194 - DNA, 25 bp, Homo sapien
cataattgtgtgcatgcctctgtgc

SEQ ID NO: 3150195 - DNA, 25 bp, Homo sapien
taggcagggtagaggcaaagtttcc

SEQ ID NO: 3150196 - DNA, 25 bp, Homo sapien
ttcgcagttccctagcaaagctcag

SEQ ID NO: 3150197 - DNA, 25 bp, Homo sapien
gctgtgagcctttcgatgcaccttt

SEQ ID NO: 3150198 - DNA, 25 bp, Homo sapien
tgtgctgcctgtaaagcgagtgcct

SEQ ID NO: 3150199 - DNA, 25 bp, Homo sapien
aagcaaattgagaaggagatcctgt

SEQ ID NO: 3150200 - DNA, 25 bp, Homo sapien
tgcgttgtacagattcccatggata

SEQ ID NO: 3150201 - DNA, 25 bp, Homo sapien
gcgagtgcctctgtgcttgcaagtt

SEQ ID NO: 3150202 - DNA, 25 bp, Homo sapien
catagggtgggcttaaaacctccat

SEQ ID NO: 3150203 - DNA, 25 bp, Homo sapien
gcttccagagcttacaggagtcctc

SEQ ID NO: 3150204 - DNA, 25 bp, Homo sapien
tacagtgaagagatagatgcaaagc

SEQ ID NO: 3150205 - DNA, 25 bp, Homo sapien
tcagcgaaaggaaaaggcacgtgaa

SEQ ID NO: 3150206 - DNA, 25 bp, Homo sapien
ggtcctcatcggtaggtgtgggcat

SEQ ID NO: 3150207 - DNA, 25 bp, Homo sapien
ggtgtatcactctgttctcactggg

SEQ ID NO: 3150208 - DNA, 25 bp, Homo sapien
tgcctggaccacagatgggtgtatc

SEQ ID NO: 3150209 - DNA, 25 bp, Homo sapien
tctgggaagccaagttctgagcctg

SEQ ID NO: 3150210 - DNA, 25 bp, Homo sapien
tcttagttgtaggaaactttagctg

SEQ ID NO: 3150211 - DNA, 25 bp, Homo sapien
tcagcttatcagctgtattctgttc

SEQ ID NO: 3150212 - DNA, 25 bp, Homo sapien
tatttcttgaagttctagaatcagc

SEQ ID NO: 3150213 - DNA, 25 bp, Homo sapien
tttagctgtggtctaggtccatctc

SEQ ID NO: 3150214 - DNA, 25 bp, Homo sapien
taatgataggtgttctgatgaaaat

SEQ ID NO: 3150215 - DNA, 25 bp, Homo sapien
ttctaatgataggtgttctgatgaa

SEQ ID NO: 3150216 - DNA, 25 bp, Homo sapien
atcactttctaatgataggtgttct

SEQ ID NO: 3150217 - DNA, 25 bp, Homo sapien
tctaatgataggtgttctgatgaaa

SEQ ID NO: 3150218 - DNA, 25 bp, Homo sapien
ctctcccagctctgctatctctgca

SEQ ID NO: 3150219 - DNA, 25 bp, Homo sapien
tctcccagctctgctatctctgcat

SEQ ID NO: 3150220 - DNA, 25 bp, Homo sapien
ccagctctgctatctctgcattcat

SEQ ID NO: 3150221 - DNA, 25 bp, Homo sapien
tcccagctctgctatctctgcattc

SEQ ID NO: 3150222 - DNA, 25 bp, Homo sapien
tgcccggccacagaggcattatttt

SEQ ID NO: 3150223 - DNA, 25 bp, Homo sapien
gtgcccggccacagaggcattattt

SEQ ID NO: 3150224 - DNA, 25 bp, Homo sapien
gcccggccacagaggcattattttt

SEQ ID NO: 3150225 - DNA, 25 bp, Homo sapien
tccttggatgtctgctgcttcagag

SEQ ID NO: 3150226 - DNA, 25 bp, Homo sapien
tgagtgttgatcttcagcatggtgc

SEQ ID NO: 3150227 - DNA, 25 bp, Homo sapien
ctttattatgctcccttcttgtcca

SEQ ID NO: 3150228 - DNA, 25 bp, Homo sapien
catggtgctggttccccgtggatgc

SEQ ID NO: 3150229 - DNA, 25 bp, Homo sapien
gagtccctggaattgttcgtacttc

SEQ ID NO: 3150230 - DNA, 25 bp, Homo sapien
tggaattgttcgtacttccctccag

SEQ ID NO: 3150231 - DNA, 25 bp, Homo sapien
catgagtccctggaattgttcgtac

SEQ ID NO: 3150232 - DNA, 25 bp, Homo sapien
ctggaattgttcgtacttccctcca

SEQ ID NO: 3150233 - DNA, 25 bp, Homo sapien
gttcaatcagtcctgcatcccaggg

SEQ ID NO: 3150234 - DNA, 25 bp, Homo sapien
ttcacgcatgatttgactctccgtc

SEQ ID NO: 3150235 - DNA, 25 bp, Homo sapien
atgttcaatcagtcctgcatcccag

SEQ ID NO: 3150236 - DNA, 25 bp, Homo sapien
gcatgatttgactctccgtctatta

SEQ ID NO: 3150237 - DNA, 25 bp, Homo sapien
cataatatcacaatagttatagggc

SEQ ID NO: 3150238 - DNA, 25 bp, Homo sapien
aaaggattggttgattttatctgca

SEQ ID NO: 3150239 - DNA, 25 bp, Homo sapien
gagttagccgggaacactggataaa

SEQ ID NO: 3150240 - DNA, 25 bp, Homo sapien
tcattcctgattttggtagttcggg

SEQ ID NO: 3150241 - DNA, 25 bp, Homo sapien
cacaagttaaaggatgaggtcccac

SEQ ID NO: 3150242 - DNA, 25 bp, Homo sapien
cttaatagttgagtggaaagcgctc

SEQ ID NO: 3150243 - DNA, 25 bp, Homo sapien
cagttctgccgtggataccagctgg

SEQ ID NO: 3150244 - DNA, 25 bp, Homo sapien
tgtgaccagtagatttctccccagc

SEQ ID NO: 3150245 - DNA, 25 bp, Homo sapien
cccagactttggctattaggaagaa

SEQ ID NO: 3150246 - DNA, 25 bp, Homo sapien
ttagaagggcacataggttttccca

SEQ ID NO: 3150247 - DNA, 25 bp, Homo sapien
gtatgatacacagcacacattttgt

SEQ ID NO: 3150248 - DNA, 25 bp, Homo sapien
gcataaaagcataatcctctgaaga

SEQ ID NO: 3150249 - DNA, 25 bp, Homo sapien
tacagttgcctaaatactagcgtgg

SEQ ID NO: 3150250 - DNA, 25 bp, Homo sapien
cagctaacagttgccaagcaggaat

SEQ ID NO: 3150251 - DNA, 25 bp, Homo sapien
tagcgtggcggtcaagatcagactc

SEQ ID NO: 3150252 - DNA, 25 bp, Homo sapien
ggcagcagctactgattcccagcta

SEQ ID NO: 3150253 - DNA, 25 bp, Homo sapien
ctcacttcctagacatgatggccag

SEQ ID NO: 3150254 - DNA, 25 bp, Homo sapien
ctgccggatggagacgttcctcact

SEQ ID NO: 3150255 - DNA, 25 bp, Homo sapien
gacgctcacttcccagaccgggtgg

SEQ ID NO: 3150256 - DNA, 25 bp, Homo sapien
agggcggctgccggatggagacgtt

SEQ ID NO: 3150257 - DNA, 25 bp, Homo sapien
ttactattcgacaagaccgtcatcg

SEQ ID NO: 3150258 - DNA, 25 bp, Homo sapien
actattcgacaagaccgtcatcgtc

SEQ ID NO: 3150259 - DNA, 25 bp, Homo sapien
tttactattcgacaagaccgtcatc

SEQ ID NO: 3150260 - DNA, 25 bp, Homo sapien
cctttactattcgacaagaccgtca

SEQ ID NO: 3150261 - DNA, 25 bp, Homo sapien
gcttggtgcctctcagagctcattt

SEQ ID NO: 3150262 - DNA, 25 bp, Homo sapien
gacctttgcttggtgcctctcagag

SEQ ID NO: 3150263 - DNA, 25 bp, Homo sapien
gaaccacatttgagtgggggcctta

SEQ ID NO: 3150264 - DNA, 25 bp, Homo sapien
taaatgaagtagacctttgcttggt

SEQ ID NO: 3150265 - DNA, 25 bp, Homo sapien
gtcgctgggactctggtgggcaaga

SEQ ID NO: 3150266 - DNA, 25 bp, Homo sapien
cagttccaggaacataggggcccat

SEQ ID NO: 3150267 - DNA, 25 bp, Homo sapien
ctgctggtcgctgggactctggtgg

SEQ ID NO: 3150268 - DNA, 25 bp, Homo sapien
cccatacttagtccatggacagact

SEQ ID NO: 3150269 - DNA, 25 bp, Homo sapien
cctgcatggaatcctacaagaatca

SEQ ID NO: 3150270 - DNA, 25 bp, Homo sapien
tattctaagccgtatgtcacccact

SEQ ID NO: 3150271 - DNA, 25 bp, Homo sapien
cagttgtagctatcactgagttcat

SEQ ID NO: 3150272 - DNA, 25 bp, Homo sapien
cataacaccagagtgtaagacaggt

SEQ ID NO: 3150273 - DNA, 25 bp, Homo sapien
caggcaattaagaagaaaccccaca

SEQ ID NO: 3150274 - DNA, 25 bp, Homo sapien
taaaaatgattcagagggcagccat

SEQ ID NO: 3150275 - DNA, 25 bp, Homo sapien
gacagtttatagtccatatctgaaa

SEQ ID NO: 3150276 - DNA, 25 bp, Homo sapien
gtctcctagctagacacaagaaggt

SEQ ID NO: 3150277 - DNA, 25 bp, Homo sapien
gttcattagctcatattccacaaag

SEQ ID NO: 3150278 - DNA, 25 bp, Homo sapien
tgagttcattagctcatattccaca

SEQ ID NO: 3150279 - DNA, 25 bp, Homo sapien
attgagttcattagctcatattcca

SEQ ID NO: 3150280 - DNA, 25 bp, Homo sapien
taattgagttcattagctcatattc

SEQ ID NO: 3150281 - DNA, 25 bp, Homo sapien
agcatgctgggagttacacctggga

SEQ ID NO: 3150282 - DNA, 25 bp, Homo sapien
catgaactcaggctatggaaacgcc

SEQ ID NO: 3150283 - DNA, 25 bp, Homo sapien
gatttatctgatggccaacagcagg

SEQ ID NO: 3150284 - DNA, 25 bp, Homo sapien
taatataaaatgactagggatccct

SEQ ID NO: 3150285 - DNA, 25 bp, Homo sapien
gatgcatctgttgcagtatgaaaga

SEQ ID NO: 3150286 - DNA, 25 bp, Homo sapien
tcagaccacgatgaatctagatgca

SEQ ID NO: 3150287 - DNA, 25 bp, Homo sapien
tcctaggacagggtaatcaatctct

SEQ ID NO: 3150288 - DNA, 25 bp, Homo sapien
gtatgaaagatctttcctaggacag

SEQ ID NO: 3150289 - DNA, 25 bp, Homo sapien
caattctgtggcctagtggattcag

SEQ ID NO: 3150290 - DNA, 25 bp, Homo sapien
cactcaagatgacagggtgtatgct

SEQ ID NO: 3150291 - DNA, 25 bp, Homo sapien
cagtataaataccataggagcagct

SEQ ID NO: 3150292 - DNA, 25 bp, Homo sapien
ggagcagctaattgacaaccaacag

SEQ ID NO: 3150293 - DNA, 25 bp, Homo sapien
ttgctccaagccatcccacacttgt

SEQ ID NO: 3150294 - DNA, 25 bp, Homo sapien
aagccatcccacacttgttcgctgg

SEQ ID NO: 3150295 - DNA, 25 bp, Homo sapien
catcccacacttgttcgctggagtt

SEQ ID NO: 3150296 - DNA, 25 bp, Homo sapien
cccacacttgttcgctggagttcat

SEQ ID NO: 3150297 - DNA, 25 bp, Homo sapien
gcttgataaatgactttggagaccc

SEQ ID NO: 3150298 - DNA, 25 bp, Homo sapien
gaatggctagaactagggatcccct

SEQ ID NO: 3150299 - DNA, 25 bp, Homo sapien
taagttcagactgtccaagcagtcc

SEQ ID NO: 3150300 - DNA, 25 bp, Homo sapien
taaacctcggatatttgtgcagaca

SEQ ID NO: 3150301 - DNA, 25 bp, Homo sapien
cagcattccctagtctttttggcac

SEQ ID NO: 3150302 - DNA, 25 bp, Homo sapien
tacagtctcatacgggcaacctaga

SEQ ID NO: 3150303 - DNA, 25 bp, Homo sapien
tattgactgtactttgtagaccagc

SEQ ID NO: 3150304 - DNA, 25 bp, Homo sapien
cttttccacggatttgggaggatga

SEQ ID NO: 3150305 - DNA, 25 bp, Homo sapien
tagaattatttgagctgcttatata

SEQ ID NO: 3150306 - DNA, 25 bp, Homo sapien
tttcctatagaattatttgagctgc

SEQ ID NO: 3150307 - DNA, 25 bp, Homo sapien
ctatagaattatttgagctgcttat

SEQ ID NO: 3150308 - DNA, 25 bp, Homo sapien
tcctatagaattatttgagctgctt

SEQ ID NO: 3150309 - DNA, 25 bp, Homo sapien
tgtatgcacctaagagccttttaac

SEQ ID NO: 3150310 - DNA, 25 bp, Homo sapien
ggatctttgatacgggcatacaatg

SEQ ID NO: 3150311 - DNA, 25 bp, Homo sapien
cataatatttaatcacagagttggg

SEQ ID NO: 3150312 - DNA, 25 bp, Homo sapien
gggcataacgtacataaatattccc

SEQ ID NO: 3150313 - DNA, 25 bp, Homo sapien
tgggttctttctcaggatcatatcc

SEQ ID NO: 3150314 - DNA, 25 bp, Homo sapien
tttctcaggatcatatccttccgtg

SEQ ID NO: 3150315 - DNA, 25 bp, Homo sapien
gtttctgctgacatagggagtagga

SEQ ID NO: 3150316 - DNA, 25 bp, Homo sapien
catagggagtaggattctgggttct

SEQ ID NO: 3150317 - DNA, 25 bp, Homo sapien
tgtgagtttccagcattgagacaaa

SEQ ID NO: 3150318 - DNA, 25 bp, Homo sapien
caaaacaaagtggttgcaggcagct

SEQ ID NO: 3150319 - DNA, 25 bp, Homo sapien
agagtccaccgttgtgtaaacagat

SEQ ID NO: 3150320 - DNA, 25 bp, Homo sapien
ctaggtaacagggtgattccttgtg

SEQ ID NO: 3150321 - DNA, 25 bp, Homo sapien
ggcctcttgcccagactctgttcgg

SEQ ID NO: 3150322 - DNA, 25 bp, Homo sapien
aagttcgaacgggtcctgatatagg

SEQ ID NO: 3150323 - DNA, 25 bp, Homo sapien
tcggcaagagtcgaacagagaagaa

SEQ ID NO: 3150324 - DNA, 25 bp, Homo sapien
ggtcctgatatagggaagactagaa

SEQ ID NO: 3150325 - DNA, 25 bp, Homo sapien
aaccccagtttcagacagttaagag

SEQ ID NO: 3150326 - DNA, 25 bp, Homo sapien
gaacagcctcgcctgttggtctggg

SEQ ID NO: 3150327 - DNA, 25 bp, Homo sapien
taattggagattgtctcggctggca

SEQ ID NO: 3150328 - DNA, 25 bp, Homo sapien
ggtggctaacaaggtcctcgaacag

SEQ ID NO: 3150329 - DNA, 25 bp, Homo sapien
agccgaactgcctcatctgcgccgg

SEQ ID NO: 3150330 - DNA, 25 bp, Homo sapien
tcgggttccaaagcgccgctggccc

SEQ ID NO: 3150331 - DNA, 25 bp, Homo sapien
gcgccggcatatagcaggaccaggc

SEQ ID NO: 3150332 - DNA, 25 bp, Homo sapien
gggaggcggcgccaatatccggccc

SEQ ID NO: 3150333 - DNA, 25 bp, Homo sapien
tctcgcagcgacagggaaagagacg

SEQ ID NO: 3150334 - DNA, 25 bp, Homo sapien
gacagggaaagagacggaggaaaga

SEQ ID NO: 3150335 - DNA, 25 bp, Homo sapien
cgctcgctctcgcagcgacagggaa

SEQ ID NO: 3150336 - DNA, 25 bp, Homo sapien
cgctctcgcagcgacagggaaagag

SEQ ID NO: 3150337 - DNA, 25 bp, Homo sapien
ctcgcccgccgctagcaaggaggtg

SEQ ID NO: 3150338 - DNA, 25 bp, Homo sapien
ctcagctgttcgttctgcttctcca

SEQ ID NO: 3150339 - DNA, 25 bp, Homo sapien
cgccggaggagggaatggacgcgcc

SEQ ID NO: 3150340 - DNA, 25 bp, Homo sapien
aaggaggtggcgtcccgcagctctt

SEQ ID NO: 3150341 - DNA, 25 bp, Homo sapien
tcaactatgtgaagaggccattcat

SEQ ID NO: 3150342 - DNA, 25 bp, Homo sapien
taaaatgctgggtacaactctggga

SEQ ID NO: 3150343 - DNA, 25 bp, Homo sapien
gcagtgacaccacagtagtcttcaa

SEQ ID NO: 3150344 - DNA, 25 bp, Homo sapien
taaccatggtcgaaggatcagagaa

SEQ ID NO: 3150345 - DNA, 25 bp, Homo sapien
tagcacactcaacatcaggacttgg

SEQ ID NO: 3150346 - DNA, 25 bp, Homo sapien
actaatggactaaccgatttctgca

SEQ ID NO: 3150347 - DNA, 25 bp, Homo sapien
aacttgcctgcaccaaactaatgga

SEQ ID NO: 3150348 - DNA, 25 bp, Homo sapien
caggacttgggtaatccaaaacttg

SEQ ID NO: 3150349 - DNA, 25 bp, Homo sapien
gcattaatgagaaggggaaaatcaa

SEQ ID NO: 3150350 - DNA, 25 bp, Homo sapien
ctgcattaatgagaaggggaaaatc

SEQ ID NO: 3150351 - DNA, 25 bp, Homo sapien
attaatgagaaggggaaaatcaaat

SEQ ID NO: 3150352 - DNA, 25 bp, Homo sapien
tgcattaatgagaaggggaaaatca

SEQ ID NO: 3150353 - DNA, 25 bp, Homo sapien
tttgactataggaggtcgcactggg

SEQ ID NO: 3150354 - DNA, 25 bp, Homo sapien
tactggcatttggactgtaaggact

SEQ ID NO: 3150355 - DNA, 25 bp, Homo sapien
ccactgctgtatgggctactggcat

SEQ ID NO: 3150356 - DNA, 25 bp, Homo sapien
taaggactggtgtaactcatagagt

SEQ ID NO: 3150357 - DNA, 25 bp, Homo sapien
cagttacatcatttagcttataatt

SEQ ID NO: 3150358 - DNA, 25 bp, Homo sapien
tgagtggaggatttctgtctgagct

SEQ ID NO: 3150359 - DNA, 25 bp, Homo sapien
ttaactcactatctatagaggactg

SEQ ID NO: 3150360 - DNA, 25 bp, Homo sapien
aattggatccaattgaatcttcatc

SEQ ID NO: 3150361 - DNA, 25 bp, Homo sapien
gcaacaatgaatgttatttatttaa

SEQ ID NO: 3150362 - DNA, 25 bp, Homo sapien
ctggcaacaatgaatgttatttatt

SEQ ID NO: 3150363 - DNA, 25 bp, Homo sapien
ggcaacaatgaatgttatttattta

SEQ ID NO: 3150364 - DNA, 25 bp, Homo sapien
acaatgaatgttatttatttaaaca

SEQ ID NO: 3150365 - DNA, 25 bp, Homo sapien
gcaagatgaaccagaactgcgccga

SEQ ID NO: 3150366 - DNA, 25 bp, Homo sapien
tgcgccgagacgtggtggctgcata

SEQ ID NO: 3150367 - DNA, 25 bp, Homo sapien
ttgcaagatgaaccagaactgcgcc

SEQ ID NO: 3150368 - DNA, 25 bp, Homo sapien
aattgcaagatgaaccagaactgcg

SEQ ID NO: 3150369 - DNA, 25 bp, Homo sapien
catcatctaaactttgtgcatcaag

SEQ ID NO: 3150370 - DNA, 25 bp, Homo sapien
atcatctaaactttgtgcatcaagt

SEQ ID NO: 3150371 - DNA, 25 bp, Homo sapien
catctaaactttgtgcatcaagttc

SEQ ID NO: 3150372 - DNA, 25 bp, Homo sapien
tcatctaaactttgtgcatcaagtt

SEQ ID NO: 3150373 - DNA, 25 bp, Homo sapien
tactatattctattccccgagcagg

SEQ ID NO: 3150374 - DNA, 25 bp, Homo sapien
tttctgggtgactgcttaggtgacg

SEQ ID NO: 3150375 - DNA, 25 bp, Homo sapien
tgctgtaagcggctaatcataggct

SEQ ID NO: 3150376 - DNA, 25 bp, Homo sapien
tgtctgtaaatctgtgggatggcct

SEQ ID NO: 3150377 - DNA, 25 bp, Homo sapien
atgttcgggacaggtttggaagact

SEQ ID NO: 3150378 - DNA, 25 bp, Homo sapien
ctgaggttgcatacgaggtattcct

SEQ ID NO: 3150379 - DNA, 25 bp, Homo sapien
ggtattcctccgtttggcacttgaa

SEQ ID NO: 3150380 - DNA, 25 bp, Homo sapien
cttgtgtattagatgttcgggacag

SEQ ID NO: 3150381 - DNA, 25 bp, Homo sapien
tgagatcatccaagagttctcctgg

SEQ ID NO: 3150382 - DNA, 25 bp, Homo sapien
tcacattcatgggttagtaaccacc

SEQ ID NO: 3150383 - DNA, 25 bp, Homo sapien
cacatgggatgaatactgagcgttc

SEQ ID NO: 3150384 - DNA, 25 bp, Homo sapien
taaaaccgttttgactacacgctca

SEQ ID NO: 3150385 - DNA, 25 bp, Homo sapien
tcagagctcatatacgggactgatg

SEQ ID NO: 3150386 - DNA, 25 bp, Homo sapien
agagctcatatacgggactgatgtg

SEQ ID NO: 3150387 - DNA, 25 bp, Homo sapien
cagagctcatatacgggactgatgt

SEQ ID NO: 3150388 - DNA, 25 bp, Homo sapien
agctcatatacgggactgatgtgag

SEQ ID NO: 3150389 - DNA, 25 bp, Homo sapien
tgtgtccctacaaggaccccagtga

SEQ ID NO: 3150390 - DNA, 25 bp, Homo sapien
gagtgaataagcatcccttgtgtcc

SEQ ID NO: 3150391 - DNA, 25 bp, Homo sapien
cattgtgtacctacaaggatctgag

SEQ ID NO: 3150392 - DNA, 25 bp, Homo sapien
caaccactgatagtaatatgccaca

SEQ ID NO: 3150393 - DNA, 25 bp, Homo sapien
cagcaggtccttggcgagtcacaat

SEQ ID NO: 3150394 - DNA, 25 bp, Homo sapien
tttggaggagtcagaccatctctac

SEQ ID NO: 3150395 - DNA, 25 bp, Homo sapien
gatgaattgccctaatgtgaaacca

SEQ ID NO: 3150396 - DNA, 25 bp, Homo sapien
gcagctcagggccatccaagataaa

SEQ ID NO: 3150397 - DNA, 25 bp, Homo sapien
ggaagtacaagacaaaggctacagc

SEQ ID NO: 3150398 - DNA, 25 bp, Homo sapien
gaagtacaagacaaaggctacagcg

SEQ ID NO: 3150399 - DNA, 25 bp, Homo sapien
aagtacaagacaaaggctacagcgt

SEQ ID NO: 3150400 - DNA, 25 bp, Homo sapien
ctggaagtacaagacaaaggctaca

SEQ ID NO: 3150401 - DNA, 25 bp, Homo sapien
ctgttgaaaaataaggaactgtaat

SEQ ID NO: 3150402 - DNA, 25 bp, Homo sapien
tgttgaaaaataaggaactgtaata

SEQ ID NO: 3150403 - DNA, 25 bp, Homo sapien
tttgtagatgaagtttgaagcaact

SEQ ID NO: 3150404 - DNA, 25 bp, Homo sapien
ttgtagatgaagtttgaagcaactg

SEQ ID NO: 3150405 - DNA, 25 bp, Homo sapien
tgtagatgaagtttgaagcaactgt

SEQ ID NO: 3150406 - DNA, 25 bp, Homo sapien
gacagctttgatgtccgaccttcat

SEQ ID NO: 3150407 - DNA, 25 bp, Homo sapien
tgtcttggaaccaatattggacagc

SEQ ID NO: 3150408 - DNA, 25 bp, Homo sapien
gctgcccatacattcagtgtcttgg

SEQ ID NO: 3150409 - DNA, 25 bp, Homo sapien
taaagctatcagaaaacctacatgt

SEQ ID NO: 3150410 - DNA, 25 bp, Homo sapien
taataaatagcctgccaatcaatga

SEQ ID NO: 3150411 - DNA, 25 bp, Homo sapien
ttgaggaggtaataaatagcctgcc

SEQ ID NO: 3150412 - DNA, 25 bp, Homo sapien
tgccaatcaatgaaaagcccaatac

SEQ ID NO: 3150413 - DNA, 25 bp, Homo sapien
atgaaaagcccaataccagacagat

SEQ ID NO: 3150414 - DNA, 25 bp, Homo sapien
caattctttattcctgcagaaggtg

SEQ ID NO: 3150415 - DNA, 25 bp, Homo sapien
tagcataaatcggagtgacaaacac

SEQ ID NO: 3150416 - DNA, 25 bp, Homo sapien
gaacctcgaacatgcatacaacagg

SEQ ID NO: 3150417 - DNA, 25 bp, Homo sapien
tgaaagaacataccccgaatctggg

SEQ ID NO: 3150418 - DNA, 25 bp, Homo sapien
gaaattgccaccatcgtacacgcaa

SEQ ID NO: 3150419 - DNA, 25 bp, Homo sapien
gcctggccctgaaactctgttatgc

SEQ ID NO: 3150420 - DNA, 25 bp, Homo sapien
gatacatgctacagaatgacgaact

SEQ ID NO: 3150421 - DNA, 25 bp, Homo sapien
cctattggaaggtctatgatgttac

SEQ ID NO: 3150422 - DNA, 25 bp, Homo sapien
atactgcaagcggagccggacttgg

SEQ ID NO: 3150423 - DNA, 25 bp, Homo sapien
gaggagggcaggatactgcaagcgg

SEQ ID NO: 3150424 - DNA, 25 bp, Homo sapien
ccgaaggggaaagcgcagcggattc

SEQ ID NO: 3150425 - DNA, 25 bp, Homo sapien
gcagaaagctccaagtaccgaaggg

SEQ ID NO: 3150426 - DNA, 25 bp, Homo sapien
cactaagccccgaatgaagatgtga

SEQ ID NO: 3150427 - DNA, 25 bp, Homo sapien
caactttgtcgaccctgtctgctgg

SEQ ID NO: 3150428 - DNA, 25 bp, Homo sapien
tcagggtctgtaacgctgatgttag

SEQ ID NO: 3150429 - DNA, 25 bp, Homo sapien
caggtttacatccttgcccacaggg

SEQ ID NO: 3150430 - DNA, 25 bp, Homo sapien
ctgtgggatggcaaagaaaaaccaa

SEQ ID NO: 3150431 - DNA, 25 bp, Homo sapien
tgtgggatggcaaagaaaaaccaat

SEQ ID NO: 3150432 - DNA, 25 bp, Homo sapien
taaatgctttcactggttgccgaag

SEQ ID NO: 3150433 - DNA, 25 bp, Homo sapien
cctgcaggtctggttagagtagcgc

SEQ ID NO: 3150434 - DNA, 25 bp, Homo sapien
tgctctgaaccataggaggcccagg

SEQ ID NO: 3150435 - DNA, 25 bp, Homo sapien
tatttcttggctaccaggagaacca

SEQ ID NO: 3150436 - DNA, 25 bp, Homo sapien
ctaccataggttttaggagctggca

SEQ ID NO: 3150437 - DNA, 25 bp, Homo sapien
taccataggttttaggagctggcaa

SEQ ID NO: 3150438 - DNA, 25 bp, Homo sapien
gctaccataggttttaggagctggc

SEQ ID NO: 3150439 - DNA, 25 bp, Homo sapien
ccataggttttaggagctggcaagg

SEQ ID NO: 3150440 - DNA, 25 bp, Homo sapien
cctggtgaagggtatccatgaagcc

SEQ ID NO: 3150441 - DNA, 25 bp, Homo sapien
tgtgctaattaagacagagagggct

SEQ ID NO: 3150442 - DNA, 25 bp, Homo sapien
caagagtcttatctgaacagtctgc

SEQ ID NO: 3150443 - DNA, 25 bp, Homo sapien
gaagccgtggacttctgcattcttg

SEQ ID NO: 3150444 - DNA, 25 bp, Homo sapien
cattatcatgtagaattctggcgcc

SEQ ID NO: 3150445 - DNA, 25 bp, Homo sapien
aaatgagaggcctgctacagaagca

SEQ ID NO: 3150446 - DNA, 25 bp, Homo sapien
gttccaggttgcaagcaccgaggtg

SEQ ID NO: 3150447 - DNA, 25 bp, Homo sapien
tcaagctgacagactaccatggtgt

SEQ ID NO: 3150448 - DNA, 25 bp, Homo sapien
tttgcaaatcaaacgtcatgtgacc

SEQ ID NO: 3150449 - DNA, 25 bp, Homo sapien
gaggcaaccacatatacaagttcgg

SEQ ID NO: 3150450 - DNA, 25 bp, Homo sapien
caggctgtttattaaggaggcaacc

SEQ ID NO: 3150451 - DNA, 25 bp, Homo sapien
gcttaacgtcaaaaatggacacctg

SEQ ID NO: 3150452 - DNA, 25 bp, Homo sapien
taagcagagggccatttagccaccc

SEQ ID NO: 3150453 - DNA, 25 bp, Homo sapien
tccggattatgggattgcagacaac

SEQ ID NO: 3150454 - DNA, 25 bp, Homo sapien
tcacagcaggtaaaaaagttccaag

SEQ ID NO: 3150455 - DNA, 25 bp, Homo sapien
taactaggtatcaattcacagcagg

SEQ ID NO: 3150456 - DNA, 25 bp, Homo sapien
aatgccttgttaggtgagttcaccc

SEQ ID NO: 3150457 - DNA, 25 bp, Homo sapien
ggcaatatgatatagccctaggcta

SEQ ID NO: 3150458 - DNA, 25 bp, Homo sapien
aagatgagatacctgtaaagggcac

SEQ ID NO: 3150459 - DNA, 25 bp, Homo sapien
tacaatgacatcagcgacatgggtg

SEQ ID NO: 3150460 - DNA, 25 bp, Homo sapien
tttctgtttcagtttattatatttc

SEQ ID NO: 3150461 - DNA, 25 bp, Homo sapien
tctgtttcagtttattatatttcat

SEQ ID NO: 3150462 - DNA, 25 bp, Homo sapien
ttctgtttcagtttattatatttca

SEQ ID NO: 3150463 - DNA, 25 bp, Homo sapien
cacttttctgtttcagtttattata

SEQ ID NO: 3150464 - DNA, 25 bp, Homo sapien
aacgctgaagaacaaatcttcgatt

SEQ ID NO: 3150465 - DNA, 25 bp, Homo sapien
ttccaacgttgtgctaacgctgaag

SEQ ID NO: 3150466 - DNA, 25 bp, Homo sapien
gaaatcaagatctccccctagtgtt

SEQ ID NO: 3150467 - DNA, 25 bp, Homo sapien
taatagcactttgactttccaacgt

SEQ ID NO: 3150468 - DNA, 25 bp, Homo sapien
cacttggcacttgaagccggcttcc

SEQ ID NO: 3150469 - DNA, 25 bp, Homo sapien
ggactcagtccccagagcctcttcc

SEQ ID NO: 3150470 - DNA, 25 bp, Homo sapien
tggcacttgaagccggcttccctgg

SEQ ID NO: 3150471 - DNA, 25 bp, Homo sapien
acttggcacttgaagccggcttccc

SEQ ID NO: 3150472 - DNA, 25 bp, Homo sapien
cccaggaagatggaagtagcagtcg

SEQ ID NO: 3150473 - DNA, 25 bp, Homo sapien
aagatggaagtagcagtcggcccca

SEQ ID NO: 3150474 - DNA, 25 bp, Homo sapien
acccaggaagatggaagtagcagtc

SEQ ID NO: 3150475 - DNA, 25 bp, Homo sapien
aggaagatggaagtagcagtcggcc

SEQ ID NO: 3150476 - DNA, 25 bp, Homo sapien
tttgtccaatagccaatgcattttc

SEQ ID NO: 3150477 - DNA, 25 bp, Homo sapien
tgtccaatagccaatgcattttcta

SEQ ID NO: 3150478 - DNA, 25 bp, Homo sapien
gctcccaggtgcccaaacttccacc

SEQ ID NO: 3150479 - DNA, 25 bp, Homo sapien
gtccaatagccaatgcattttctaa

SEQ ID NO: 3150480 - DNA, 25 bp, Homo sapien
tccattactactgggaagtaggagg

SEQ ID NO: 3150481 - DNA, 25 bp, Homo sapien
caggcttttcccaccaaaatgtggc

SEQ ID NO: 3150482 - DNA, 25 bp, Homo sapien
caagactaagtgatcagtgtcagta

SEQ ID NO: 3150483 - DNA, 25 bp, Homo sapien
tagaagggttttgttgctcagatac

SEQ ID NO: 3150484 - DNA, 25 bp, Homo sapien
atcttatttaatggtttcttacagg

SEQ ID NO: 3150485 - DNA, 25 bp, Homo sapien
tggtttcttacagagattttcaaac

SEQ ID NO: 3150486 - DNA, 25 bp, Homo sapien
tgtgcctgctaatttgaatagctga

SEQ ID NO: 3150487 - DNA, 25 bp, Homo sapien
gaatagctgaaatttgggtagtctc

SEQ ID NO: 3150488 - DNA, 25 bp, Homo sapien
gggaactgtattgggactttttgca

SEQ ID NO: 3150489 - DNA, 25 bp, Homo sapien
aaaaagccgtattcactgtgtggtg

SEQ ID NO: 3150490 - DNA, 25 bp, Homo sapien
ccatgacaaagggaacttggagaat

SEQ ID NO: 3150491 - DNA, 25 bp, Homo sapien
tttgcaaagcagtaagtgatatgta

SEQ ID NO: 3150492 - DNA, 25 bp, Homo sapien
tacgagttgtctaccacagccatag

SEQ ID NO: 3150493 - DNA, 25 bp, Homo sapien
ggctgaacccactccaactcatggt

SEQ ID NO: 3150494 - DNA, 25 bp, Homo sapien
tacctacagacgaaggcaggacttt

SEQ ID NO: 3150495 - DNA, 25 bp, Homo sapien
ctgttgaggagaaccaaagccggca

SEQ ID NO: 3150496 - DNA, 25 bp, Homo sapien
tcctcacctagctggttatatgagc

SEQ ID NO: 3150497 - DNA, 25 bp, Homo sapien
cctctctagttaagaagctgggaaa

SEQ ID NO: 3150498 - DNA, 25 bp, Homo sapien
tcatttcatgatatcacccagcctg

SEQ ID NO: 3150499 - DNA, 25 bp, Homo sapien
aaagtgcaggcaacaccaagaccct

SEQ ID NO: 3150500 - DNA, 25 bp, Homo sapien
ggagacggatgattgttagaaaact

SEQ ID NO: 3150501 - DNA, 25 bp, Homo sapien
ctggagacggatgattgttagaaaa

SEQ ID NO: 3150502 - DNA, 25 bp, Homo sapien
tggagacggatgattgttagaaaac

SEQ ID NO: 3150503 - DNA, 25 bp, Homo sapien
ccataaagtgatagtcagttgagtt

SEQ ID NO: 3150504 - DNA, 25 bp, Homo sapien
catctagctccctgggggtgaccat

SEQ ID NO: 3150505 - DNA, 25 bp, Homo sapien
gggtgaccataaagtgatagtcagt

SEQ ID NO: 3150506 - DNA, 25 bp, Homo sapien
gggcctgttaaggaggcatctagct

SEQ ID NO: 3150507 - DNA, 25 bp, Homo sapien
gtcgttctgcccgtcggtctccgag

SEQ ID NO: 3150508 - DNA, 25 bp, Homo sapien
cgcgccgctgacgtgctcggcggcg

SEQ ID NO: 3150509 - DNA, 25 bp, Homo sapien
gtgctcggcggcgtcgggggcggcg

SEQ ID NO: 3150510 - DNA, 25 bp, Homo sapien
cagcctggcactccgcgcagcgcgg

SEQ ID NO: 3150511 - DNA, 25 bp, Homo sapien
ggagctgcggattccggtcccctcc

SEQ ID NO: 3150512 - DNA, 25 bp, Homo sapien
gccggagctgcggattccggtcccc

SEQ ID NO: 3150513 - DNA, 25 bp, Homo sapien
gccgcgtgcctctcgccgtcccgcg

SEQ ID NO: 3150514 - DNA, 25 bp, Homo sapien
cgccgtcccgcggtcgccgcagtcg

SEQ ID NO: 3150515 - DNA, 25 bp, Homo sapien
gcgagggcgaggtccgtgccggggc

SEQ ID NO: 3150516 - DNA, 25 bp, Homo sapien
ttgtcccgcagcagaggggcgaaga

SEQ ID NO: 3150517 - DNA, 25 bp, Homo sapien
gggtgtagttgtcccgcagcagagg

SEQ ID NO: 3150518 - DNA, 25 bp, Homo sapien
tagttgtcccgcagcagaggggcga

SEQ ID NO: 3150519 - DNA, 25 bp, Homo sapien
cggggctgaagccgaagctcggacc

SEQ ID NO: 3150520 - DNA, 25 bp, Homo sapien
gctgaagccgaagctcggacccggc

SEQ ID NO: 3150521 - DNA, 25 bp, Homo sapien
agccgaagctcggacccggcccgag

SEQ ID NO: 3150522 - DNA, 25 bp, Homo sapien
gggctgaagccgaagctcggacccg

SEQ ID NO: 3150523 - DNA, 25 bp, Homo sapien
agcccgtggttcagcggcgtgtccc

SEQ ID NO: 3150524 - DNA, 25 bp, Homo sapien
cacgaacacgttcagcccgtggttc

SEQ ID NO: 3150525 - DNA, 25 bp, Homo sapien
cgtgtcccagaacgggagcgcgtgg

SEQ ID NO: 3150526 - DNA, 25 bp, Homo sapien
agggcggcgcccacgaacacgttca

SEQ ID NO: 3150527 - DNA, 25 bp, Homo sapien
tcgtccagcttgaaggcgagggcca

SEQ ID NO: 3150528 - DNA, 25 bp, Homo sapien
tgaggttcatgtcgccgtcaaccag

SEQ ID NO: 3150529 - DNA, 25 bp, Homo sapien
cataagattggagagattgccgccg

SEQ ID NO: 3150530 - DNA, 25 bp, Homo sapien
gaagtggttcacgtccaccgtgcag

SEQ ID NO: 3150531 - DNA, 25 bp, Homo sapien
aatcagaacgagctttgagtcaaac

SEQ ID NO: 3150532 - DNA, 25 bp, Homo sapien
aagtctgggcagaacctacatccga

SEQ ID NO: 3150533 - DNA, 25 bp, Homo sapien
gagtcaaacagccagctaacctttt

SEQ ID NO: 3150534 - DNA, 25 bp, Homo sapien
cttgtatgttgagtagaggtggaac

SEQ ID NO: 3150535 - DNA, 25 bp, Homo sapien
tatttgtagcgaatgaagacgccca

SEQ ID NO: 3150536 - DNA, 25 bp, Homo sapien
gcccagctgtagatccacaggcaca

SEQ ID NO: 3150537 - DNA, 25 bp, Homo sapien
cccgataggtatgagagtgctgcag

SEQ ID NO: 3150538 - DNA, 25 bp, Homo sapien
acaatgtagtcagccacccggctgt

SEQ ID NO: 3150539 - DNA, 25 bp, Homo sapien
caggtcctaacatagtgccggtcat

SEQ ID NO: 3150540 - DNA, 25 bp, Homo sapien
tacttgccagcagttcaggtcctaa

SEQ ID NO: 3150541 - DNA, 25 bp, Homo sapien
ctatgaattgcggtggaaaggccag

SEQ ID NO: 3150542 - DNA, 25 bp, Homo sapien
ttagaatggctgtacagagctgcac

SEQ ID NO: 3150543 - DNA, 25 bp, Homo sapien
gaagtctgagcggtttccatcatta

SEQ ID NO: 3150544 - DNA, 25 bp, Homo sapien
agagaagtctgagcggtttccatca

SEQ ID NO: 3150545 - DNA, 25 bp, Homo sapien
ttagagagaagtctgagcggtttcc

SEQ ID NO: 3150546 - DNA, 25 bp, Homo sapien
tagagagaagtctgagcggtttcca

SEQ ID NO: 3150547 - DNA, 25 bp, Homo sapien
tgacaacgtttggttaatacaccag

SEQ ID NO: 3150548 - DNA, 25 bp, Homo sapien
gaagaccagtcgaaaagaacatggc

SEQ ID NO: 3150549 - DNA, 25 bp, Homo sapien
ttcacgttagccattccaggtgcaa

SEQ ID NO: 3150550 - DNA, 25 bp, Homo sapien
gaacatggcttgtccactagaaaaa

SEQ ID NO: 3150551 - DNA, 25 bp, Homo sapien
gaagtactcggcggccgtcagccgc

SEQ ID NO: 3150552 - DNA, 25 bp, Homo sapien
gctggtagctgtcgaagtactcggc

SEQ ID NO: 3150553 - DNA, 25 bp, Homo sapien
gccgggaacacgtaaccgtccagca

SEQ ID NO: 3150554 - DNA, 25 bp, Homo sapien
agccgctcccgctggtagctgtcga

SEQ ID NO: 3150555 - DNA, 25 bp, Homo sapien
gcgcgcggcccgagacccggcccca

SEQ ID NO: 3150556 - DNA, 25 bp, Homo sapien
tgcgggcgcgcggcccgagacccgg

SEQ ID NO: 3150557 - DNA, 25 bp, Homo sapien
gcgggcgcgcggcccgagacccggc

SEQ ID NO: 3150558 - DNA, 25 bp, Homo sapien
ctgcgggcgcgcggcccgagacccg

SEQ ID NO: 3150559 - DNA, 25 bp, Homo sapien
tgcaccgccacgtcgcagctgccgg

SEQ ID NO: 3150560 - DNA, 25 bp, Homo sapien
caggaaggcggtgagacggcgcaag

SEQ ID NO: 3150561 - DNA, 25 bp, Homo sapien
agaaagagccgccacccgtggtgcc

SEQ ID NO: 3150562 - DNA, 25 bp, Homo sapien
tccaggcctcgacgggatggctgct

SEQ ID NO: 3150563 - DNA, 25 bp, Homo sapien
agtacacggcgacggtgcgcgggaa

SEQ ID NO: 3150564 - DNA, 25 bp, Homo sapien
cggggcgccttcttcgtccacacct

SEQ ID NO: 3150565 - DNA, 25 bp, Homo sapien
gccggggcgccttcttcgtccacac

SEQ ID NO: 3150566 - DNA, 25 bp, Homo sapien
gggcgccttcttcgtccacacctcc

SEQ ID NO: 3150567 - DNA, 25 bp, Homo sapien
gccgccggggcgccttcttcgtcca

SEQ ID NO: 3150568 - DNA, 25 bp, Homo sapien
agctcgctcggactgcggcctgggc

SEQ ID NO: 3150569 - DNA, 25 bp, Homo sapien
gggctccgtggcgacggcccctctc

SEQ ID NO: 3150570 - DNA, 25 bp, Homo sapien
agctcgggaccgtcggccggctgct

SEQ ID NO: 3150571 - DNA, 25 bp, Homo sapien
gaggttgccccgggctccttagcgc

SEQ ID NO: 3150572 - DNA, 25 bp, Homo sapien
ggatccttgggaatcgactctccag

SEQ ID NO: 3150573 - DNA, 25 bp, Homo sapien
gagcagccgccacgagtaagtctgg

SEQ ID NO: 3150574 - DNA, 25 bp, Homo sapien
ggtttttgccacatccagtgcggaa

SEQ ID NO: 3150575 - DNA, 25 bp, Homo sapien
gataggtaatccaaccgtgcggtca

SEQ ID NO: 3150576 - DNA, 25 bp, Homo sapien
tgccctcgggcagcaacactgagca

SEQ ID NO: 3150577 - DNA, 25 bp, Homo sapien
gaagctcgtaaaggagaaatcagaa

SEQ ID NO: 3150578 - DNA, 25 bp, Homo sapien
tccagctttccaatagcctggaagc

SEQ ID NO: 3150579 - DNA, 25 bp, Homo sapien
tgagcagtccaaatgctttcgcagt

SEQ ID NO: 3150580 - DNA, 25 bp, Homo sapien
ctgaacaacaggatatgtcaattta

SEQ ID NO: 3150581 - DNA, 25 bp, Homo sapien
aacaggatatgtcaatttaaccaac

SEQ ID NO: 3150582 - DNA, 25 bp, Homo sapien
caggatatgtcaatttaaccaacaa

SEQ ID NO: 3150583 - DNA, 25 bp, Homo sapien
tcaatttaaccaacaaaacacctga

SEQ ID NO: 3150584 - DNA, 25 bp, Homo sapien
actctcccagcggatgttgcagtcc

SEQ ID NO: 3150585 - DNA, 25 bp, Homo sapien
tgcagtggtaatagccatatttctg

SEQ ID NO: 3150586 - DNA, 25 bp, Homo sapien
gcagtccttgcagtggtaatagcca

SEQ ID NO: 3150587 - DNA, 25 bp, Homo sapien
gttagttccctgtacacaccacaca

SEQ ID NO: 3150588 - DNA, 25 bp, Homo sapien
gatatcctccactcggtaagggtta

SEQ ID NO: 3150589 - DNA, 25 bp, Homo sapien
gacaggtgatatcctccactcggta

SEQ ID NO: 3150590 - DNA, 25 bp, Homo sapien
ttctgacaagttctgcaaaactgtt

SEQ ID NO: 3150591 - DNA, 25 bp, Homo sapien
taagggttataagacttctgacaag

SEQ ID NO: 3150592 - DNA, 25 bp, Homo sapien
ctatactaaaaaccctcgacgactg

SEQ ID NO: 3150593 - DNA, 25 bp, Homo sapien
ctgcccaggtcagacaaaatgcaaa

SEQ ID NO: 3150594 - DNA, 25 bp, Homo sapien
tcgacgactgcccaggtcagacaaa

SEQ ID NO: 3150595 - DNA, 25 bp, Homo sapien
gactgcccaggtcagacaaaatgca

SEQ ID NO: 3150596 - DNA, 25 bp, Homo sapien
cgtttgcctttgcatctaccgcaca

SEQ ID NO: 3150597 - DNA, 25 bp, Homo sapien
aggaacatctcgtttgtttacaact

SEQ ID NO: 3150598 - DNA, 25 bp, Homo sapien
tccacgtggcgaagttttactgggc

SEQ ID NO: 3150599 - DNA, 25 bp, Homo sapien
ctgtcacaggacaggcgtttgcctt

SEQ ID NO: 3150600 - DNA, 25 bp, Homo sapien
agaatacactgcctttcatgaagta

SEQ ID NO: 3150601 - DNA, 25 bp, Homo sapien
aaagctcactcgtctactccatcag

SEQ ID NO: 3150602 - DNA, 25 bp, Homo sapien
tcagcgcatgcacagcaacactgac

SEQ ID NO: 3150603 - DNA, 25 bp, Homo sapien
caatgtataaatcgtgttgcaatac

SEQ ID NO: 3150604 - DNA, 25 bp, Homo sapien
taaatgtaggtaggacaggtgccca

SEQ ID NO: 3150605 - DNA, 25 bp, Homo sapien
gaggtatcgttcttttaagcagggc

SEQ ID NO: 3150606 - DNA, 25 bp, Homo sapien
tatggaggcctcaaactcactttgg

SEQ ID NO: 3150607 - DNA, 25 bp, Homo sapien
tctgtccacattgatgcaggtgggc

SEQ ID NO: 3150608 - DNA, 25 bp, Homo sapien
tggtcacagctcattcataatcact

SEQ ID NO: 3150609 - DNA, 25 bp, Homo sapien
gtaaaatttcgtaactggtcacagc

SEQ ID NO: 3150610 - DNA, 25 bp, Homo sapien
aatgtaattacgtatgctcaagtgc

SEQ ID NO: 3150611 - DNA, 25 bp, Homo sapien
ggtgtggaccctgccagaaatgtaa

SEQ ID NO: 3150612 - DNA, 25 bp, Homo sapien
taatggcctccaatactgaaacaac

SEQ ID NO: 3150613 - DNA, 25 bp, Homo sapien
tggtgataacgtctcagagcatgcc

SEQ ID NO: 3150614 - DNA, 25 bp, Homo sapien
tgcagtcagctatacgcatcaagac

SEQ ID NO: 3150615 - DNA, 25 bp, Homo sapien
gaaaacctaacctgcaattgatgct

SEQ ID NO: 3150616 - DNA, 25 bp, Homo sapien
tactcgagagtctgagctgggatga

SEQ ID NO: 3150617 - DNA, 25 bp, Homo sapien
cctagttactcgagagtctgagctg

SEQ ID NO: 3150618 - DNA, 25 bp, Homo sapien
gtcctagttactcgagagtctgagc

SEQ ID NO: 3150619 - DNA, 25 bp, Homo sapien
tagttactcgagagtctgagctggg

SEQ ID NO: 3150620 - DNA, 25 bp, Homo sapien
caagtagttgctctaattatcctgg

SEQ ID NO: 3150621 - DNA, 25 bp, Homo sapien
gaaactgctaagtcatctatgtaaa

SEQ ID NO: 3150622 - DNA, 25 bp, Homo sapien
tatccttacaactcaggcaagtagt

SEQ ID NO: 3150623 - DNA, 25 bp, Homo sapien
cacttcggcaagtaatgtaaccttt

SEQ ID NO: 3150624 - DNA, 25 bp, Homo sapien
ttctcataagcaaacagacctactt

SEQ ID NO: 3150625 - DNA, 25 bp, Homo sapien
caaaggtcaggcataggttgtaaag

SEQ ID NO: 3150626 - DNA, 25 bp, Homo sapien
aaaactgacactagtcttctgagaa

SEQ ID NO: 3150627 - DNA, 25 bp, Homo sapien
aatggatcttgattgccggttcaca

SEQ ID NO: 3150628 - DNA, 25 bp, Homo sapien
gaataaagattaatgcacaggttcc

SEQ ID NO: 3150629 - DNA, 25 bp, Homo sapien
tagtatacttggacaaactggacaa

SEQ ID NO: 3150630 - DNA, 25 bp, Homo sapien
tgatagcttttgacaatggctgcca

SEQ ID NO: 3150631 - DNA, 25 bp, Homo sapien
tgtcaagcaaatagcctaagggccg

SEQ ID NO: 3150632 - DNA, 25 bp, Homo sapien
gaaggatcctatataattcaagaac

SEQ ID NO: 3150633 - DNA, 25 bp, Homo sapien
gttttgtaggatacaacttcagtat

SEQ ID NO: 3150634 - DNA, 25 bp, Homo sapien
gaggaacatgttacaacctttgaag

SEQ ID NO: 3150635 - DNA, 25 bp, Homo sapien
tagttcactaaaactatgattgttt

SEQ ID NO: 3150636 - DNA, 25 bp, Homo sapien
tggctatccacagggaacatgacag

SEQ ID NO: 3150637 - DNA, 25 bp, Homo sapien
gcaagaatttagcagggcctgacta

SEQ ID NO: 3150638 - DNA, 25 bp, Homo sapien
caccatacaccgtaacaccagtgga

SEQ ID NO: 3150639 - DNA, 25 bp, Homo sapien
tacagtgcctagtttggatcacacc

SEQ ID NO: 3150640 - DNA, 25 bp, Homo sapien
tattgctgtcactagaagtacttcc

SEQ ID NO: 3150641 - DNA, 25 bp, Homo sapien
ttttcctttagcgaagaacaagaga

SEQ ID NO: 3150642 - DNA, 25 bp, Homo sapien
tgttagttggaaaaggccacagtta

SEQ ID NO: 3150643 - DNA, 25 bp, Homo sapien
aatatggtgatcagcacagtgcggc

SEQ ID NO: 3150644 - DNA, 25 bp, Homo sapien
cagaaatcgatcgttatttgaagca

SEQ ID NO: 3150645 - DNA, 25 bp, Homo sapien
ttgcagtttagtcttggcattagaa

SEQ ID NO: 3150646 - DNA, 25 bp, Homo sapien
caagatgtatgtataatagcatggg

SEQ ID NO: 3150647 - DNA, 25 bp, Homo sapien
gtatgatggagaagcttggctttcc

SEQ ID NO: 3150648 - DNA, 25 bp, Homo sapien
taacaggcacatcataggcatctcc

SEQ ID NO: 3150649 - DNA, 25 bp, Homo sapien
taagtaagtacagggtctagcatgg

SEQ ID NO: 3150650 - DNA, 25 bp, Homo sapien
gctcacgggctttggaattgtcctt

SEQ ID NO: 3150651 - DNA, 25 bp, Homo sapien
taatgtcatcaagcttcagccccgt

SEQ ID NO: 3150652 - DNA, 25 bp, Homo sapien
tggagagagaggatctggctgttac

SEQ ID NO: 3150653 - DNA, 25 bp, Homo sapien
ccagccccatatcttaagtgttagt

SEQ ID NO: 3150654 - DNA, 25 bp, Homo sapien
ttggagagagaggatctggctgtta

SEQ ID NO: 3150655 - DNA, 25 bp, Homo sapien
ggagagagaggatctggctgttacc

SEQ ID NO: 3150656 - DNA, 25 bp, Homo sapien
tgaacagtgcataatgaaacttttg

SEQ ID NO: 3150657 - DNA, 25 bp, Homo sapien
tatacttgaatagcaacactttgcc

SEQ ID NO: 3150658 - DNA, 25 bp, Homo sapien
tgtatttcttctatagggaatcatg

SEQ ID NO: 3150659 - DNA, 25 bp, Homo sapien
cagtaatgttggtttaagtctgaac

SEQ ID NO: 3150660 - DNA, 25 bp, Homo sapien
tgctgttggtatcctacatatgcac

SEQ ID NO: 3150661 - DNA, 25 bp, Homo sapien
taattgcagatctcatgggagtaca

SEQ ID NO: 3150662 - DNA, 25 bp, Homo sapien
ggctatacaagtgttcaacctgcca

SEQ ID NO: 3150663 - DNA, 25 bp, Homo sapien
tatccatctatgtagcacctgccac

SEQ ID NO: 3150664 - DNA, 25 bp, Homo sapien
gattcgcaggtccatttccagctag

SEQ ID NO: 3150665 - DNA, 25 bp, Homo sapien
tgcaggattctggtgtttacaggac

SEQ ID NO: 3150666 - DNA, 25 bp, Homo sapien
caggtatgtttgctggatgaggtcc

SEQ ID NO: 3150667 - DNA, 25 bp, Homo sapien
catgagtagccaagtcaagtctgga

SEQ ID NO: 3150668 - DNA, 25 bp, Homo sapien
tcattttgcctgttgccgttctcgc

SEQ ID NO: 3150669 - DNA, 25 bp, Homo sapien
tgttgccgttctcgccatgctttgc

SEQ ID NO: 3150670 - DNA, 25 bp, Homo sapien
ggcctttcatcatctagcctctgct

SEQ ID NO: 3150671 - DNA, 25 bp, Homo sapien
gttctcgccatgctttgccagttct

SEQ ID NO: 3150672 - DNA, 25 bp, Homo sapien
catattggtcctgtttgcatcttcc

SEQ ID NO: 3150673 - DNA, 25 bp, Homo sapien
ctggaatattgccacagcttccata

SEQ ID NO: 3150674 - DNA, 25 bp, Homo sapien
tattgccacagcttccatattggtc

SEQ ID NO: 3150675 - DNA, 25 bp, Homo sapien
tccacattgctggtaagggttcctt

SEQ ID NO: 3150676 - DNA, 25 bp, Homo sapien
ctatagttgtgcgtcactgcaagac

SEQ ID NO: 3150677 - DNA, 25 bp, Homo sapien
gcatggtaatgaagccaaggcactg

SEQ ID NO: 3150678 - DNA, 25 bp, Homo sapien
tagttgtgcgtcactgcaagactgc

SEQ ID NO: 3150679 - DNA, 25 bp, Homo sapien
catggtaatgaagccaaggcactgt

SEQ ID NO: 3150680 - DNA, 25 bp, Homo sapien
cacttagttgcccagtgactggagt

SEQ ID NO: 3150681 - DNA, 25 bp, Homo sapien
tgcccagtgactggagtgccgtgat

SEQ ID NO: 3150682 - DNA, 25 bp, Homo sapien
ctccctcttctccttctccctcttc

SEQ ID NO: 3150683 - DNA, 25 bp, Homo sapien
ttctccctcttctccttctccctct

SEQ ID NO: 3150684 - DNA, 25 bp, Homo sapien
cctcttctccttctccctcttctcc

SEQ ID NO: 3150685 - DNA, 25 bp, Homo sapien
tctccctcttctccttctccctctt

SEQ ID NO: 3150686 - DNA, 25 bp, Homo sapien
tagctctggctttgtagagccaaag

SEQ ID NO: 3150687 - DNA, 25 bp, Homo sapien
cgatgatcaatctagaacagcagtt

SEQ ID NO: 3150688 - DNA, 25 bp, Homo sapien
caaagtggttctagatgatatgcga

SEQ ID NO: 3150689 - DNA, 25 bp, Homo sapien
gcaggccacaggtctttgtcgcagg

SEQ ID NO: 3150690 - DNA, 25 bp, Homo sapien
aatgctatgccaatcattttcacca

SEQ ID NO: 3150691 - DNA, 25 bp, Homo sapien
tgcttcatcgtttgaaatgctatgc

SEQ ID NO: 3150692 - DNA, 25 bp, Homo sapien
catttgtgcttcatcgtttgaaatg

SEQ ID NO: 3150693 - DNA, 25 bp, Homo sapien
tctgtgtagaccatttgtgcttcat

SEQ ID NO: 3150694 - DNA, 25 bp, Homo sapien
aagttccccaagattagttaagatg

SEQ ID NO: 3150695 - DNA, 25 bp, Homo sapien
tcaaggaagttggtataggcacctt

SEQ ID NO: 3150696 - DNA, 25 bp, Homo sapien
tgggcctagtaatgtagaagaacct

SEQ ID NO: 3150697 - DNA, 25 bp, Homo sapien
tggttttggatactagtactgagga

SEQ ID NO: 3150698 - DNA, 25 bp, Homo sapien
tgtacgcgtacatgaagggcagttt

SEQ ID NO: 3150699 - DNA, 25 bp, Homo sapien
gtttcatggtctatagctgtttggt

SEQ ID NO: 3150700 - DNA, 25 bp, Homo sapien
ttaacacccattgtacatgtacgcg

SEQ ID NO: 3150701 - DNA, 25 bp, Homo sapien
gtctcagtattgtcgttaacaccca

SEQ ID NO: 3150702 - DNA, 25 bp, Homo sapien
tcaatgccagatttaaaatttgtct

SEQ ID NO: 3150703 - DNA, 25 bp, Homo sapien
tagaaaaataccaagaccagccagg

SEQ ID NO: 3150704 - DNA, 25 bp, Homo sapien
ttagctatagaaaaataccaagacc

SEQ ID NO: 3150705 - DNA, 25 bp, Homo sapien
tcccagcctttaggaggatcacctg

SEQ ID NO: 3150706 - DNA, 25 bp, Homo sapien
ttaagtacttctctatgaagctttt

SEQ ID NO: 3150707 - DNA, 25 bp, Homo sapien
tttcttctttgccaatgcaaattct

SEQ ID NO: 3150708 - DNA, 25 bp, Homo sapien
gtatgcttcattttagggccagaca

SEQ ID NO: 3150709 - DNA, 25 bp, Homo sapien
gtacttctctatgaagctttttaaa

SEQ ID NO: 3150710 - DNA, 25 bp, Homo sapien
tcttctggtaacaggagctgtgagc

SEQ ID NO: 3150711 - DNA, 25 bp, Homo sapien
taaactccttgatggtagcagctgt

SEQ ID NO: 3150712 - DNA, 25 bp, Homo sapien
ggagcttaggttgatccccagtaaa

SEQ ID NO: 3150713 - DNA, 25 bp, Homo sapien
gagaggcaagaacccattcgcgtag

SEQ ID NO: 3150714 - DNA, 25 bp, Homo sapien
ttcatttcactcagaccgtctcttt

SEQ ID NO: 3150715 - DNA, 25 bp, Homo sapien
cagaccgtctctttctgtccactcc

SEQ ID NO: 3150716 - DNA, 25 bp, Homo sapien
ttctgtccactccaatatcatatta

SEQ ID NO: 3150717 - DNA, 25 bp, Homo sapien
tccactccaatatcatattagtggc

SEQ ID NO: 3150718 - DNA, 25 bp, Homo sapien
ttttaggattgccagtaatctggtt

SEQ ID NO: 3150719 - DNA, 25 bp, Homo sapien
cagaacttgttgcttgtctacggtt

SEQ ID NO: 3150720 - DNA, 25 bp, Homo sapien
taagatggtgtaccagagaggactc

SEQ ID NO: 3150721 - DNA, 25 bp, Homo sapien
tatggagttataaggtgatgtagaa

SEQ ID NO: 3150722 - DNA, 25 bp, Homo sapien
tcagtttaagcagttgaaggtgtct

SEQ ID NO: 3150723 - DNA, 25 bp, Homo sapien
tttgaagggttgacattgggcaacc

SEQ ID NO: 3150724 - DNA, 25 bp, Homo sapien
caagaaggagggactttagcagtct

SEQ ID NO: 3150725 - DNA, 25 bp, Homo sapien
acttgaagagtagacaagtctcaac

SEQ ID NO: 3150726 - DNA, 25 bp, Homo sapien
gattcacttgggaggatatgggaca

SEQ ID NO: 3150727 - DNA, 25 bp, Homo sapien
gaaacacggcttgccatcagggaag

SEQ ID NO: 3150728 - DNA, 25 bp, Homo sapien
atatgggacaggaaacacggcttgc

SEQ ID NO: 3150729 - DNA, 25 bp, Homo sapien
gacatcagattcacttgggaggata

SEQ ID NO: 3150730 - DNA, 25 bp, Homo sapien
gcagatccggagtcaagatggttca

SEQ ID NO: 3150731 - DNA, 25 bp, Homo sapien
tagaggagcttctcattgggcagaa

SEQ ID NO: 3150732 - DNA, 25 bp, Homo sapien
tggatgtgagtggtgcacctccaca

SEQ ID NO: 3150733 - DNA, 25 bp, Homo sapien
ggaggctgtccaaagaatgtgcaag

SEQ ID NO: 3150734 - DNA, 25 bp, Homo sapien
agttgtttttggctgcaattaacgg

SEQ ID NO: 3150735 - DNA, 25 bp, Homo sapien
ttaacggactccaacgataggcgcc

SEQ ID NO: 3150736 - DNA, 25 bp, Homo sapien
ttctcttactgctagtagctgctgc

SEQ ID NO: 3150737 - DNA, 25 bp, Homo sapien
cgataggcgccacctgatttccctg

SEQ ID NO: 3150738 - DNA, 25 bp, Homo sapien
tgttgactggggaaaggcgcttcat

SEQ ID NO: 3150739 - DNA, 25 bp, Homo sapien
gaggcagctgtactaggactgggaa

SEQ ID NO: 3150740 - DNA, 25 bp, Homo sapien
cattgtcaagagaacggagccaggg

SEQ ID NO: 3150741 - DNA, 25 bp, Homo sapien
actgggaacgggtaggtgttgactg

SEQ ID NO: 3150742 - DNA, 25 bp, Homo sapien
tcggagggaggtttaaccacagatc

SEQ ID NO: 3150743 - DNA, 25 bp, Homo sapien
cacagatcggttccgatcggattat

SEQ ID NO: 3150744 - DNA, 25 bp, Homo sapien
gagcgagagagaaatccggttaaaa

SEQ ID NO: 3150745 - DNA, 25 bp, Homo sapien
gtttctcgccaatcaggaaggccag

SEQ ID NO: 3150746 - DNA, 25 bp, Homo sapien
gacatgctgtactgaaagcctcact

SEQ ID NO: 3150747 - DNA, 25 bp, Homo sapien
gctttgctctgtgagaacaaaccag

SEQ ID NO: 3150748 - DNA, 25 bp, Homo sapien
caaaccagactagtacaagagacag

SEQ ID NO: 3150749 - DNA, 25 bp, Homo sapien
taaatgatgcccatgcgatgataca

SEQ ID NO: 3150750 - DNA, 25 bp, Homo sapien
agctgctctcaatggactggactga

SEQ ID NO: 3150751 - DNA, 25 bp, Homo sapien
gatacagccagactactctatctcc

SEQ ID NO: 3150752 - DNA, 25 bp, Homo sapien
tgctctcaatggactggactgacat

SEQ ID NO: 3150753 - DNA, 25 bp, Homo sapien
tcttagggccactcgtaggggatac

SEQ ID NO: 3150754 - DNA, 25 bp, Homo sapien
tgcggccagagttagttgaatctgg

SEQ ID NO: 3150755 - DNA, 25 bp, Homo sapien
cgtgcggccagagttagttgaatct

SEQ ID NO: 3150756 - DNA, 25 bp, Homo sapien
cggccagagttagttgaatctgggt

SEQ ID NO: 3150757 - DNA, 25 bp, Homo sapien
tcacgtgcggccagagttagttgaa

SEQ ID NO: 3150758 - DNA, 25 bp, Homo sapien
ctgcctctgtggagttaatgatgcc

SEQ ID NO: 3150759 - DNA, 25 bp, Homo sapien
tatccagtctggtctgtttgcttga

SEQ ID NO: 3150760 - DNA, 25 bp, Homo sapien
aacttgggattggaggctgcctctg

SEQ ID NO: 3150761 - DNA, 25 bp, Homo sapien
tgaatgaagtcatgtaaacttggga

SEQ ID NO: 3150762 - DNA, 25 bp, Homo sapien
gacatgattgctagcagaggcctca

SEQ ID NO: 3150763 - DNA, 25 bp, Homo sapien
ggcagcttactgacatgattgctag

SEQ ID NO: 3150764 - DNA, 25 bp, Homo sapien
caggctgtgattaagaggtaggctg

SEQ ID NO: 3150765 - DNA, 25 bp, Homo sapien
gaggcctcagttcatctccttagtg

SEQ ID NO: 3150766 - DNA, 25 bp, Homo sapien
tgaaagatgcaatcggaattccaca

SEQ ID NO: 3150767 - DNA, 25 bp, Homo sapien
cagtatcacgtataccagactcttt

SEQ ID NO: 3150768 - DNA, 25 bp, Homo sapien
tgcccacaatactgattcttacaag

SEQ ID NO: 3150769 - DNA, 25 bp, Homo sapien
gaattccacaggctcttaacttgac

SEQ ID NO: 3150770 - DNA, 25 bp, Homo sapien
acctctggcagggtaccgtgatctc

SEQ ID NO: 3150771 - DNA, 25 bp, Homo sapien
tctctctgaggctacggtttttctc

SEQ ID NO: 3150772 - DNA, 25 bp, Homo sapien
cagggtaccgtgatctctctgaggc

SEQ ID NO: 3150773 - DNA, 25 bp, Homo sapien
tctctgaggctacggtttttctcac

SEQ ID NO: 3150774 - DNA, 25 bp, Homo sapien
ggaaatgacgtcagacctcactgcg

SEQ ID NO: 3150775 - DNA, 25 bp, Homo sapien
gtagaacagccgcaagaagtcatcc

SEQ ID NO: 3150776 - DNA, 25 bp, Homo sapien
aggggtagaacagccgcaagaagtc

SEQ ID NO: 3150777 - DNA, 25 bp, Homo sapien
cagacaggggctcaaaatgaccgcg

SEQ ID NO: 3150778 - DNA, 25 bp, Homo sapien
cagccgcaagaagtcatccagacag

SEQ ID NO: 3150779 - DNA, 25 bp, Homo sapien
accaagcgatcaggggcagaaggcc

SEQ ID NO: 3150780 - DNA, 25 bp, Homo sapien
aaggcccggagggtggactcgagag

SEQ ID NO: 3150781 - DNA, 25 bp, Homo sapien
ctgcaaggaaaaccaagcgatcagg

SEQ ID NO: 3150782 - DNA, 25 bp, Homo sapien
aaaaccaagcgatcaggggcagaag

SEQ ID NO: 3150783 - DNA, 25 bp, Homo sapien
gaaaatggcggaaggtgcgaaagtc

SEQ ID NO: 3150784 - DNA, 25 bp, Homo sapien
tgcgaaagtcgtggatggccgcaaa

SEQ ID NO: 3150785 - DNA, 25 bp, Homo sapien
aggccgagacccgagcgcgatctgt

SEQ ID NO: 3150786 - DNA, 25 bp, Homo sapien
caacggggctgtttgcgtcacctca

SEQ ID NO: 3150787 - DNA, 25 bp, Homo sapien
ccccagaagcactccgtcgcctccc

SEQ ID NO: 3150788 - DNA, 25 bp, Homo sapien
gcatccgtgaccacgaacttcccca

SEQ ID NO: 3150789 - DNA, 25 bp, Homo sapien
agactgagcagcaaccccacacgca

SEQ ID NO: 3150790 - DNA, 25 bp, Homo sapien
accccacacgcatccgtgaccacga

SEQ ID NO: 3150791 - DNA, 25 bp, Homo sapien
catgccaaccccttaattagagaaa

SEQ ID NO: 3150792 - DNA, 25 bp, Homo sapien
tgacacggcgcttaagacaatacca

SEQ ID NO: 3150793 - DNA, 25 bp, Homo sapien
gaaatggcatacacaatgaggacag

SEQ ID NO: 3150794 - DNA, 25 bp, Homo sapien
ggattaaagcctaagcggcctacaa

SEQ ID NO: 3150795 - DNA, 25 bp, Homo sapien
tcgtttctcgaatctatgcccaatg

SEQ ID NO: 3150796 - DNA, 25 bp, Homo sapien
taacaaagacgacatatccttctcc

SEQ ID NO: 3150797 - DNA, 25 bp, Homo sapien
ttctccctgtgaggtaaaactaaca

SEQ ID NO: 3150798 - DNA, 25 bp, Homo sapien
gcccaatgattaggataattcccca

SEQ ID NO: 3150799 - DNA, 25 bp, Homo sapien
gcattcggctctcgaaaatcagccc

SEQ ID NO: 3150800 - DNA, 25 bp, Homo sapien
tggtcttggaacctctgcattcggc

SEQ ID NO: 3150801 - DNA, 25 bp, Homo sapien
cattcggctctcgaaaatcagccct

SEQ ID NO: 3150802 - DNA, 25 bp, Homo sapien
ttggaacctctgcattcggctctcg

SEQ ID NO: 3150803 - DNA, 25 bp, Homo sapien
gtcaggactggctacctaatgtgct

SEQ ID NO: 3150804 - DNA, 25 bp, Homo sapien
ctttgacttcaaatagaattaatgc

SEQ ID NO: 3150805 - DNA, 25 bp, Homo sapien
tgctactatctgctagtcaggactg

SEQ ID NO: 3150806 - DNA, 25 bp, Homo sapien
ggcgctgtctgcacatgcccatgaa

SEQ ID NO: 3150807 - DNA, 25 bp, Homo sapien
tcattgcattctgcgaagactctcc

SEQ ID NO: 3150808 - DNA, 25 bp, Homo sapien
tttcatcattgcattctgcgaagac

SEQ ID NO: 3150809 - DNA, 25 bp, Homo sapien
gcattctgcgaagactctcctttct

SEQ ID NO: 3150810 - DNA, 25 bp, Homo sapien
ttcctctgttggaatgtaatcaggc

SEQ ID NO: 3150811 - DNA, 25 bp, Homo sapien
gcagcagcatacatttatcagccag

SEQ ID NO: 3150812 - DNA, 25 bp, Homo sapien
cacatgtcccactattaagagtctg

SEQ ID NO: 3150813 - DNA, 25 bp, Homo sapien
taagagtctggtatacacgggcatc

SEQ ID NO: 3150814 - DNA, 25 bp, Homo sapien
tatttagattgttaaacacctgcag

SEQ ID NO: 3150815 - DNA, 25 bp, Homo sapien
aatattattcatagactccagctga

SEQ ID NO: 3150816 - DNA, 25 bp, Homo sapien
cactcttatactgtatcatttgaaa

SEQ ID NO: 3150817 - DNA, 25 bp, Homo sapien
tgtcacaatcctgactcaatgcaac

SEQ ID NO: 3150818 - DNA, 25 bp, Homo sapien
gaaaactagtagtacacatatatga

SEQ ID NO: 3150819 - DNA, 25 bp, Homo sapien
tggtccatgggctagtttgttcaac

SEQ ID NO: 3150820 - DNA, 25 bp, Homo sapien
aaacaattcttagctcatgcataca

SEQ ID NO: 3150821 - DNA, 25 bp, Homo sapien
catcactttggaatagggcattaac

SEQ ID NO: 3150822 - DNA, 25 bp, Homo sapien
caaattgcacaaacgctaaggtctg

SEQ ID NO: 3150823 - DNA, 25 bp, Homo sapien
taattaatccttgagtaatcaacat

SEQ ID NO: 3150824 - DNA, 25 bp, Homo sapien
tactaattaatccttgagtaatcaa

SEQ ID NO: 3150825 - DNA, 25 bp, Homo sapien
aatccttgagtaatcaacatacttg

SEQ ID NO: 3150826 - DNA, 25 bp, Homo sapien
ttaatccttgagtaatcaacatact

SEQ ID NO: 3150827 - DNA, 25 bp, Homo sapien
taggacaagaaagtctcctcggtgg

SEQ ID NO: 3150828 - DNA, 25 bp, Homo sapien
taaaaatagatcacctgccagaccc

SEQ ID NO: 3150829 - DNA, 25 bp, Homo sapien
taatgttgctattggcccacctaga

SEQ ID NO: 3150830 - DNA, 25 bp, Homo sapien
taattaaaacaataggcctccaggc

SEQ ID NO: 3150831 - DNA, 25 bp, Homo sapien
caggacacactctttactctcatgg

SEQ ID NO: 3150832 - DNA, 25 bp, Homo sapien
gaaggttaacgcaatactctttgtg

SEQ ID NO: 3150833 - DNA, 25 bp, Homo sapien
cctctgtcaggtgctagaaatagct

SEQ ID NO: 3150834 - DNA, 25 bp, Homo sapien
tagtgtcatggttgctattcatccc

SEQ ID NO: 3150835 - DNA, 25 bp, Homo sapien
tataagtttagggatggaaccatat

SEQ ID NO: 3150836 - DNA, 25 bp, Homo sapien
ttagggatggaaccatatttgggat

SEQ ID NO: 3150837 - DNA, 25 bp, Homo sapien
gtataagtttagggatggaaccata

SEQ ID NO: 3150838 - DNA, 25 bp, Homo sapien
aagtttagggatggaaccatatttg

SEQ ID NO: 3150839 - DNA, 25 bp, Homo sapien
aatgaaatgctttaacaaactgatt

SEQ ID NO: 3150840 - DNA, 25 bp, Homo sapien
tttatcagagcatgtaaccacataa

SEQ ID NO: 3150841 - DNA, 25 bp, Homo sapien
tgaaaactacaatgttgttcatact

SEQ ID NO: 3150842 - DNA, 25 bp, Homo sapien
aaaatgcctatttcaactgatgatt

SEQ ID NO: 3150843 - DNA, 25 bp, Homo sapien
gctgataataatggttcccagcttc

SEQ ID NO: 3150844 - DNA, 25 bp, Homo sapien
tatcattgatgggcaatgtagcttc

SEQ ID NO: 3150845 - DNA, 25 bp, Homo sapien
tcattgatgggcaatgtagcttctt

SEQ ID NO: 3150846 - DNA, 25 bp, Homo sapien
gatagtttgctgataataatggttc

SEQ ID NO: 3150847 - DNA, 25 bp, Homo sapien
ccaggtggtgaagatcgtcgtgctt

SEQ ID NO: 3150848 - DNA, 25 bp, Homo sapien
cctgatcgtaaagcttctccaaggg

SEQ ID NO: 3150849 - DNA, 25 bp, Homo sapien
ccagcaaagtatcccatgatacaag

SEQ ID NO: 3150850 - DNA, 25 bp, Homo sapien
ttctcttggcaagttttcacataag

SEQ ID NO: 3150851 - DNA, 25 bp, Homo sapien
actcacacttgagtcatattttgac

SEQ ID NO: 3150852 - DNA, 25 bp, Homo sapien
tgtcacaaaagatgattgaccactc

SEQ ID NO: 3150853 - DNA, 25 bp, Homo sapien
gaactgaatggaattggctcataat

SEQ ID NO: 3150854 - DNA, 25 bp, Homo sapien
tcagtaataccagtgggagcagatt

SEQ ID NO: 3150855 - DNA, 25 bp, Homo sapien
gttggaccataaaatgttgaaattc

SEQ ID NO: 3150856 - DNA, 25 bp, Homo sapien
ttggaccataaaatgttgaaattca

SEQ ID NO: 3150857 - DNA, 25 bp, Homo sapien
ggaccataaaatgttgaaattcatt

SEQ ID NO: 3150858 - DNA, 25 bp, Homo sapien
tggaccataaaatgttgaaattcat

SEQ ID NO: 3150859 - DNA, 25 bp, Homo sapien
gctgagtttaggttgatgattgatg

SEQ ID NO: 3150860 - DNA, 25 bp, Homo sapien
caaacatgctgagtttaggttgatg

SEQ ID NO: 3150861 - DNA, 25 bp, Homo sapien
gatgattgatggtagaacacacagg

SEQ ID NO: 3150862 - DNA, 25 bp, Homo sapien
ttaggttgatgattgatggtagaac

SEQ ID NO: 3150863 - DNA, 25 bp, Homo sapien
gggacatactagtaattcatccttg

SEQ ID NO: 3150864 - DNA, 25 bp, Homo sapien
tcttgtattacagacagggaagctg

SEQ ID NO: 3150865 - DNA, 25 bp, Homo sapien
tcactattccactaagcttgcctta

SEQ ID NO: 3150866 - DNA, 25 bp, Homo sapien
taaaacccagcctatcaaatgtaac

SEQ ID NO: 3150867 - DNA, 25 bp, Homo sapien
ttagaactcaaaggtaggatcccag

SEQ ID NO: 3150868 - DNA, 25 bp, Homo sapien
caattaggaaatgtccttgggcaaa

SEQ ID NO: 3150869 - DNA, 25 bp, Homo sapien
ttgggttcttaaccccactctgctg

SEQ ID NO: 3150870 - DNA, 25 bp, Homo sapien
aaattctgaaggaaatcgtgtgtac

SEQ ID NO: 3150871 - DNA, 25 bp, Homo sapien
tggttgacaggatcaaatagtgaac

SEQ ID NO: 3150872 - DNA, 25 bp, Homo sapien
catattatcatagagtcaaatgtaa

SEQ ID NO: 3150873 - DNA, 25 bp, Homo sapien
ggttactcctaatattggttgacag

SEQ ID NO: 3150874 - DNA, 25 bp, Homo sapien
aagatgctaacattcagtgaacaac

SEQ ID NO: 3150875 - DNA, 25 bp, Homo sapien
gatgcagaagaaagtatcaactgtt

SEQ ID NO: 3150876 - DNA, 25 bp, Homo sapien
tccagtctaacagatgcaatgttga

SEQ ID NO: 3150877 - DNA, 25 bp, Homo sapien
cacagactctatgaaaacaactcca

SEQ ID NO: 3150878 - DNA, 25 bp, Homo sapien
tatattctactagggacaactgaat

SEQ ID NO: 3150879 - DNA, 25 bp, Homo sapien
ttggcactctttcatgcataggcct

SEQ ID NO: 3150880 - DNA, 25 bp, Homo sapien
ccttaattcctcatatgtaatattt

SEQ ID NO: 3150881 - DNA, 25 bp, Homo sapien
ctttcttcaaggttgggatcaggtc

SEQ ID NO: 3150882 - DNA, 25 bp, Homo sapien
gatacttcatatgactctctgttct

SEQ ID NO: 3150883 - DNA, 25 bp, Homo sapien
tgttttagtttccaatcctcaacag

SEQ ID NO: 3150884 - DNA, 25 bp, Homo sapien
caacagtaaagtgattcagactaaa

SEQ ID NO: 3150885 - DNA, 25 bp, Homo sapien
tcaacagtaaagtgattcagactaa

SEQ ID NO: 3150886 - DNA, 25 bp, Homo sapien
gtttccaatcctcaacagtaaagtg

SEQ ID NO: 3150887 - DNA, 25 bp, Homo sapien
taatcctagcactctcagagactga

SEQ ID NO: 3150888 - DNA, 25 bp, Homo sapien
ctgggcgtgggggcctgtagtccta

SEQ ID NO: 3150889 - DNA, 25 bp, Homo sapien
tcctagcactctcagagactgaggc

SEQ ID NO: 3150890 - DNA, 25 bp, Homo sapien
aatggaaaactggccggacacggtg

SEQ ID NO: 3150891 - DNA, 25 bp, Homo sapien
cgctccgtcatccaggctgcagtgc

SEQ ID NO: 3150892 - DNA, 25 bp, Homo sapien
agtggcgtgatgtcggttcactgca

SEQ ID NO: 3150893 - DNA, 25 bp, Homo sapien
acctctgcctcctgggttcatgcag

SEQ ID NO: 3150894 - DNA, 25 bp, Homo sapien
ctcgctccgtcatccaggctgcagt

SEQ ID NO: 3150895 - DNA, 25 bp, Homo sapien
ccagcaaatgttaaaggtctaccaa

SEQ ID NO: 3150896 - DNA, 25 bp, Homo sapien
gaactccaaacgaagcaaccgctaa

SEQ ID NO: 3150897 - DNA, 25 bp, Homo sapien
tagcaggacaaagtaccgacaagtc

SEQ ID NO: 3150898 - DNA, 25 bp, Homo sapien
cagagcaatggccactagatgcagt

SEQ ID NO: 3150899 - DNA, 25 bp, Homo sapien
ttttgcttctcttccacatagcttc

SEQ ID NO: 3150900 - DNA, 25 bp, Homo sapien
tgcttctcttccacatagcttctgt

SEQ ID NO: 3150901 - DNA, 25 bp, Homo sapien
ttgcttctcttccacatagcttctg

SEQ ID NO: 3150902 - DNA, 25 bp, Homo sapien
ttttttgcttctcttccacatagct

SEQ ID NO: 3150903 - DNA, 25 bp, Homo sapien
aaagcataaataattgatgattcca

SEQ ID NO: 3150904 - DNA, 25 bp, Homo sapien
aaaaagcataaataattgatgattc

SEQ ID NO: 3150905 - DNA, 25 bp, Homo sapien
cataaataattgatgattccaagca

SEQ ID NO: 3150906 - DNA, 25 bp, Homo sapien
agcataaataattgatgattccaag

SEQ ID NO: 3150907 - DNA, 25 bp, Homo sapien
gtatctccatacttgtttactttga

SEQ ID NO: 3150908 - DNA, 25 bp, Homo sapien
caagtatctccatacttgtttactt

SEQ ID NO: 3150909 - DNA, 25 bp, Homo sapien
agtatctccatacttgtttactttg

SEQ ID NO: 3150910 - DNA, 25 bp, Homo sapien
cccaagtatctccatacttgtttac

SEQ ID NO: 3150911 - DNA, 25 bp, Homo sapien
tcatgaccacctagatgaagctgga

SEQ ID NO: 3150912 - DNA, 25 bp, Homo sapien
tctagagcattgtaatctcgacggt

SEQ ID NO: 3150913 - DNA, 25 bp, Homo sapien
gaatccctaaggtgagtacatttac

SEQ ID NO: 3150914 - DNA, 25 bp, Homo sapien
taaatgtgtttatgaagactgctgc

SEQ ID NO: 3150915 - DNA, 25 bp, Homo sapien
cataaacattaagataatacagaaa

SEQ ID NO: 3150916 - DNA, 25 bp, Homo sapien
tacatgattataactagcttaaaaa

SEQ ID NO: 3150917 - DNA, 25 bp, Homo sapien
acctacatgattataactagcttaa

SEQ ID NO: 3150918 - DNA, 25 bp, Homo sapien
catgattataactagcttaaaaata

SEQ ID NO: 3150919 - DNA, 25 bp, Homo sapien
cctacatgattataactagcttaaa

SEQ ID NO: 3150920 - DNA, 25 bp, Homo sapien
tgcctccagccatattatagattta

SEQ ID NO: 3150921 - DNA, 25 bp, Homo sapien
atttacctatttactatattatcaa

SEQ ID NO: 3150922 - DNA, 25 bp, Homo sapien
tctacataaatcacattcattatat

SEQ ID NO: 3150923 - DNA, 25 bp, Homo sapien
ttaaggcatttacctatttactata

SEQ ID NO: 3150924 - DNA, 25 bp, Homo sapien
tttatctacataaatcacattcatt

SEQ ID NO: 3150925 - DNA, 25 bp, Homo sapien
gattagatgatcagctcctagactt

SEQ ID NO: 3150926 - DNA, 25 bp, Homo sapien
gatacgaagggtcactgtacaccaa

SEQ ID NO: 3150927 - DNA, 25 bp, Homo sapien
gtccaggttcctaacgtccactata

SEQ ID NO: 3150928 - DNA, 25 bp, Homo sapien
gatacggaacccacagatacgaagg

SEQ ID NO: 3150929 - DNA, 25 bp, Homo sapien
taagttcaggccttcagacagagaa

SEQ ID NO: 3150930 - DNA, 25 bp, Homo sapien
tatgcctaacaggtgaacaaagcag

SEQ ID NO: 3150931 - DNA, 25 bp, Homo sapien
taaattgcctacgtgtcttaccagc

SEQ ID NO: 3150932 - DNA, 25 bp, Homo sapien
gatactttgctcaagacctcaggaa

SEQ ID NO: 3150933 - DNA, 25 bp, Homo sapien
tatgtgaagggccattaccagcaaa

SEQ ID NO: 3150934 - DNA, 25 bp, Homo sapien
aattgctatgccctatgtgaagggc

SEQ ID NO: 3150935 - DNA, 25 bp, Homo sapien
tgaagtaactagtttccagggctcc

SEQ ID NO: 3150936 - DNA, 25 bp, Homo sapien
gcattcatagctgataatgaattgc

SEQ ID NO: 3150937 - DNA, 25 bp, Homo sapien
tttagttgatagtctgaaaccacat

SEQ ID NO: 3150938 - DNA, 25 bp, Homo sapien
aaaggacacattttagttgatagtc

SEQ ID NO: 3150939 - DNA, 25 bp, Homo sapien
caatagatcttttatgtacaaaaag

SEQ ID NO: 3150940 - DNA, 25 bp, Homo sapien
ctggtatcaatagatcttttatgta

SEQ ID NO: 3150941 - DNA, 25 bp, Homo sapien
cactcagaatggttgtgatgggcag

SEQ ID NO: 3150942 - DNA, 25 bp, Homo sapien
catatgtacctacaaagccaaagga

SEQ ID NO: 3150943 - DNA, 25 bp, Homo sapien
caaggctgggatcagtgacttacgc

SEQ ID NO: 3150944 - DNA, 25 bp, Homo sapien
ggacaagagcgagtgattaaagcat

SEQ ID NO: 3150945 - DNA, 25 bp, Homo sapien
caccattaaggagctcacagtcaga

SEQ ID NO: 3150946 - DNA, 25 bp, Homo sapien
caaaggacagtagggccacactgct

SEQ ID NO: 3150947 - DNA, 25 bp, Homo sapien
aaagatcagtgcttgactgccctca

SEQ ID NO: 3150948 - DNA, 25 bp, Homo sapien
gttgtaacagtgtaaggacagccaa

SEQ ID NO: 3150949 - DNA, 25 bp, Homo sapien
aatggcaggatgccgaggactgctc

SEQ ID NO: 3150950 - DNA, 25 bp, Homo sapien
gatgtccccgacacacacatgaaac

SEQ ID NO: 3150951 - DNA, 25 bp, Homo sapien
ctctcacagaggtacgcagatggca

SEQ ID NO: 3150952 - DNA, 25 bp, Homo sapien
caagttgagctggaataagaaaaag

SEQ ID NO: 3150953 - DNA, 25 bp, Homo sapien
aagtgctggtctccagtaccacagg

SEQ ID NO: 3150954 - DNA, 25 bp, Homo sapien
ttgaaaagctttcagaatcttccct

SEQ ID NO: 3150955 - DNA, 25 bp, Homo sapien
agtaccacaggacctgaacacctct

SEQ ID NO: 3150956 - DNA, 25 bp, Homo sapien
tgtcccgctcccagtcttttgaaaa

SEQ ID NO: 3150957 - DNA, 25 bp, Homo sapien
cttgaaagcagtggcccagtcccag

SEQ ID NO: 3150958 - DNA, 25 bp, Homo sapien
ccagtcccagatcttttggcggctg

SEQ ID NO: 3150959 - DNA, 25 bp, Homo sapien
tcttctggtcacactgaactggttg

SEQ ID NO: 3150960 - DNA, 25 bp, Homo sapien
tcagtgtcaaaatccacgtggtccc

SEQ ID NO: 3150961 - DNA, 25 bp, Homo sapien
cagtggaatatctcaccttcaggat

SEQ ID NO: 3150962 - DNA, 25 bp, Homo sapien
cataaactggaatctaatctaggac

SEQ ID NO: 3150963 - DNA, 25 bp, Homo sapien
tatgatgctgatttgctaagagtcc

SEQ ID NO: 3150964 - DNA, 25 bp, Homo sapien
tacatctgatggttgggtcacttaa

SEQ ID NO: 3150965 - DNA, 25 bp, Homo sapien
tatgcaggtttggagctaaacctga

SEQ ID NO: 3150966 - DNA, 25 bp, Homo sapien
tccttctaaggatgcggggctgtct

SEQ ID NO: 3150967 - DNA, 25 bp, Homo sapien
ggagctaaacctgaattgctgagga

SEQ ID NO: 3150968 - DNA, 25 bp, Homo sapien
gctttgtgggtgaaatatgcaggtt

SEQ ID NO: 3150969 - DNA, 25 bp, Homo sapien
gaaggctgctgttcgcagccatggc

SEQ ID NO: 3150970 - DNA, 25 bp, Homo sapien
catggcacacctggcccttacaagg

SEQ ID NO: 3150971 - DNA, 25 bp, Homo sapien
catacaagcaacacggtgcacatac

SEQ ID NO: 3150972 - DNA, 25 bp, Homo sapien
aaggaacatgattggcttaattgac

SEQ ID NO: 3150973 - DNA, 25 bp, Homo sapien
aatgcaacactcactgatttgctgc

SEQ ID NO: 3150974 - DNA, 25 bp, Homo sapien
atttacatgcttaaagtgaatacag

SEQ ID NO: 3150975 - DNA, 25 bp, Homo sapien
atatccaaaatgcaacactcactga

SEQ ID NO: 3150976 - DNA, 25 bp, Homo sapien
tacatgcttaaagtgaatacagagg

SEQ ID NO: 3150977 - DNA, 25 bp, Homo sapien
ggcgccacctgtgcgcgttgcgccg

SEQ ID NO: 3150978 - DNA, 25 bp, Homo sapien
gcgcctctggtccccgcctttgcct

SEQ ID NO: 3150979 - DNA, 25 bp, Homo sapien
cctgtgcgcgttgcgccgcctccgg

SEQ ID NO: 3150980 - DNA, 25 bp, Homo sapien
ccacctgtgcgcgttgcgccgcctc

SEQ ID NO: 3150981 - DNA, 25 bp, Homo sapien
ttcacgaccacacccagcctcgcct

SEQ ID NO: 3150982 - DNA, 25 bp, Homo sapien
cccgccccttcacgaccacacccag

SEQ ID NO: 3150983 - DNA, 25 bp, Homo sapien
gtccgcccgccccttcacgaccaca

SEQ ID NO: 3150984 - DNA, 25 bp, Homo sapien
cccttcacgaccacacccagcctcg

SEQ ID NO: 3150985 - DNA, 25 bp, Homo sapien
aaagccgtgcgggtcgggcccgctg

SEQ ID NO: 3150986 - DNA, 25 bp, Homo sapien
ccacttgccgaaccgaggcagtgtg

SEQ ID NO: 3150987 - DNA, 25 bp, Homo sapien
gggcagcgctttccaggaaagccgt

SEQ ID NO: 3150988 - DNA, 25 bp, Homo sapien
ttcccgcgtcccgttgccaagtgag

SEQ ID NO: 3150989 - DNA, 25 bp, Homo sapien
agcagcgactccaagaggatttctc

SEQ ID NO: 3150990 - DNA, 25 bp, Homo sapien
cagcagcgactccaagaggatttct

SEQ ID NO: 3150991 - DNA, 25 bp, Homo sapien
ccagcagcgactccaagaggatttc

SEQ ID NO: 3150992 - DNA, 25 bp, Homo sapien
aattgtcctcgggattttgcaaagc

SEQ ID NO: 3150993 - DNA, 25 bp, Homo sapien
aaatgcccaagtgtgcagccgacac

SEQ ID NO: 3150994 - DNA, 25 bp, Homo sapien
cagctccgacagaattacaccaata

SEQ ID NO: 3150995 - DNA, 25 bp, Homo sapien
gactcgagtctgatgcttttcgcca

SEQ ID NO: 3150996 - DNA, 25 bp, Homo sapien
ctaagttgtcccctgtataatgaaa

SEQ ID NO: 3150997 - DNA, 25 bp, Homo sapien
ggcagcagtcgttcccttgagtaga

SEQ ID NO: 3150998 - DNA, 25 bp, Homo sapien
caaaagcacttgagtgaggcagcag

SEQ ID NO: 3150999 - DNA, 25 bp, Homo sapien
tattgtgagagtccaaaagggcagc

SEQ ID NO: 3151000 - DNA, 25 bp, Homo sapien
gaaagtaatagatcatcggtcccag

SEQ ID NO: 3151001 - DNA, 25 bp, Homo sapien
tcatggtagagagaccaagaaacac

SEQ ID NO: 3151002 - DNA, 25 bp, Homo sapien
agcagggttagcatccacttcttgt

SEQ ID NO: 3151003 - DNA, 25 bp, Homo sapien
cccagtgagttctagtgtttgcaaa

SEQ ID NO: 3151004 - DNA, 25 bp, Homo sapien
acagaactcactgctctgactgtgt

SEQ ID NO: 3151005 - DNA, 25 bp, Homo sapien
ctcactgctctgactgtgttgtgcg

SEQ ID NO: 3151006 - DNA, 25 bp, Homo sapien
tgctctgactgtgttgtgcgatggc

SEQ ID NO: 3151007 - DNA, 25 bp, Homo sapien
tgtggggatccacagaactcactgc

SEQ ID NO: 3151008 - DNA, 25 bp, Homo sapien
aggaagacaccccaagcgcaagaac

SEQ ID NO: 3151009 - DNA, 25 bp, Homo sapien
cacagcttgcactatcagtgaggaa

SEQ ID NO: 3151010 - DNA, 25 bp, Homo sapien
accatcagtcgaagtttggcatttg

SEQ ID NO: 3151011 - DNA, 25 bp, Homo sapien
ttcctgaccaccaagtcacagcttg

SEQ ID NO: 3151012 - DNA, 25 bp, Homo sapien
caatacgatcaagtgtggctatggc

SEQ ID NO: 3151013 - DNA, 25 bp, Homo sapien
ggacatctgataactccagattggg

SEQ ID NO: 3151014 - DNA, 25 bp, Homo sapien
tataccatatgcgtagaacaacaag

SEQ ID NO: 3151015 - DNA, 25 bp, Homo sapien
ccagattgggtttagtgaagtatac

SEQ ID NO: 3151016 - DNA, 25 bp, Homo sapien
ttttcttcaggtttactgcagtcac

SEQ ID NO: 3151017 - DNA, 25 bp, Homo sapien
gtctagaggccatccccgtggctac

SEQ ID NO: 3151018 - DNA, 25 bp, Homo sapien
tgaggaacacaaggctaccaaaagc

SEQ ID NO: 3151019 - DNA, 25 bp, Homo sapien
cagccagttgggtctagaggccatc

SEQ ID NO: 3151020 - DNA, 25 bp, Homo sapien
gggtgaggaacacaaggctaccaaa

SEQ ID NO: 3151021 - DNA, 25 bp, Homo sapien
tctggccctggatgtggatgcccac

SEQ ID NO: 3151022 - DNA, 25 bp, Homo sapien
ccaaatgggttaggatctggccctg

SEQ ID NO: 3151023 - DNA, 25 bp, Homo sapien
gccctggatgtggatgcccactcac

SEQ ID NO: 3151024 - DNA, 25 bp, Homo sapien
ggccctggatgtggatgcccactca

SEQ ID NO: 3151025 - DNA, 25 bp, Homo sapien
ttgccaagcacagcagtactgcacc

SEQ ID NO: 3151026 - DNA, 25 bp, Homo sapien
gaagcatcaatccacttgccaagca

SEQ ID NO: 3151027 - DNA, 25 bp, Homo sapien
ccagatcaaaccagtaccacgaaac

SEQ ID NO: 3151028 - DNA, 25 bp, Homo sapien
cacaaacaagatggaagcatcaatc

SEQ ID NO: 3151029 - DNA, 25 bp, Homo sapien
tactttcagtcgagttgcgcatgct

SEQ ID NO: 3151030 - DNA, 25 bp, Homo sapien
aactggataaccaagctcagtcgtg

SEQ ID NO: 3151031 - DNA, 25 bp, Homo sapien
tgcgcatgcttgcaaacaaactgga

SEQ ID NO: 3151032 - DNA, 25 bp, Homo sapien
tttacaacagcccatttggccacag

SEQ ID NO: 3151033 - DNA, 25 bp, Homo sapien
agtcagcatcttaatgccccatagc

SEQ ID NO: 3151034 - DNA, 25 bp, Homo sapien
aggctcttcactacttcggccaaga

SEQ ID NO: 3151035 - DNA, 25 bp, Homo sapien
ttcggccaagaactccagaaaggag

SEQ ID NO: 3151036 - DNA, 25 bp, Homo sapien
ccttcaagggtagctagagcaggct

SEQ ID NO: 3151037 - DNA, 25 bp, Homo sapien
taaagatggcgaagacacagccaga

SEQ ID NO: 3151038 - DNA, 25 bp, Homo sapien
taaggtgtccaagtgtttggggcca

SEQ ID NO: 3151039 - DNA, 25 bp, Homo sapien
gtccaagtgtttggggccacatgga

SEQ ID NO: 3151040 - DNA, 25 bp, Homo sapien
gatgcagtaaagatggcgaagacac

SEQ ID NO: 3151041 - DNA, 25 bp, Homo sapien
gcaatggtcatggttttcccagggt

SEQ ID NO: 3151042 - DNA, 25 bp, Homo sapien
tctctagcgtagacacctcctggga

SEQ ID NO: 3151043 - DNA, 25 bp, Homo sapien
aagataaaatatcatggcaatggtc

SEQ ID NO: 3151044 - DNA, 25 bp, Homo sapien
caaacttaaaagctgtgcaccaggc

SEQ ID NO: 3151045 - DNA, 25 bp, Homo sapien
catattcagcccgataattaacatc

SEQ ID NO: 3151046 - DNA, 25 bp, Homo sapien
agcccgataattaacatcattgtcc

SEQ ID NO: 3151047 - DNA, 25 bp, Homo sapien
ttaggaccaaatagcatattcagcc

SEQ ID NO: 3151048 - DNA, 25 bp, Homo sapien
tttcttaggaccaaatagcatattc

SEQ ID NO: 3151049 - DNA, 25 bp, Homo sapien
ggaaattctgcatgttgaattctct

SEQ ID NO: 3151050 - DNA, 25 bp, Homo sapien
cattttggaaattctgcatgttgaa

SEQ ID NO: 3151051 - DNA, 25 bp, Homo sapien
tttggaaattctgcatgttgaattc

SEQ ID NO: 3151052 - DNA, 25 bp, Homo sapien
tcattttggaaattctgcatgttga

SEQ ID NO: 3151053 - DNA, 25 bp, Homo sapien
aacaatcccacaccaacaagcagcc

SEQ ID NO: 3151054 - DNA, 25 bp, Homo sapien
gctttatgccgtagtcctaatccca

SEQ ID NO: 3151055 - DNA, 25 bp, Homo sapien
gttttctctcataggctttatgccg

SEQ ID NO: 3151056 - DNA, 25 bp, Homo sapien
tgccgtagtcctaatcccaacaatc

SEQ ID NO: 3151057 - DNA, 25 bp, Homo sapien
gaagtacaaagaccaagaagagaag

SEQ ID NO: 3151058 - DNA, 25 bp, Homo sapien
agtacaaagaccaagaagagaagca

SEQ ID NO: 3151059 - DNA, 25 bp, Homo sapien
tggaagtacaaagaccaagaagaga

SEQ ID NO: 3151060 - DNA, 25 bp, Homo sapien
gtacaaagaccaagaagagaagcat

SEQ ID NO: 3151061 - DNA, 25 bp, Homo sapien
cagatggcagcagagacctctttgg

SEQ ID NO: 3151062 - DNA, 25 bp, Homo sapien
cagcagagacctctttggttggtgc

SEQ ID NO: 3151063 - DNA, 25 bp, Homo sapien
gatggcagcagagacctctttggtt

SEQ ID NO: 3151064 - DNA, 25 bp, Homo sapien
tggcagcagagacctctttggttgg

SEQ ID NO: 3151065 - DNA, 25 bp, Homo sapien
gactagaccacccttcattgtcata

SEQ ID NO: 3151066 - DNA, 25 bp, Homo sapien
gctgatctttctagactagaccacc

SEQ ID NO: 3151067 - DNA, 25 bp, Homo sapien
gatctttctagactagaccaccctt

SEQ ID NO: 3151068 - DNA, 25 bp, Homo sapien
tctagactagaccacccttcattgt

SEQ ID NO: 3151069 - DNA, 25 bp, Homo sapien
cattgttccccatatagggcttaga

SEQ ID NO: 3151070 - DNA, 25 bp, Homo sapien
tcactctccaaaattgttatgaaat

SEQ ID NO: 3151071 - DNA, 25 bp, Homo sapien
ggttaagtcattgttccccatatag

SEQ ID NO: 3151072 - DNA, 25 bp, Homo sapien
gggcttagaagcatcactctccaaa

SEQ ID NO: 3151073 - DNA, 25 bp, Homo sapien
ttgtgcttggaccaaagtctgtata

SEQ ID NO: 3151074 - DNA, 25 bp, Homo sapien
tgtgcttggaccaaagtctgtatag

SEQ ID NO: 3151075 - DNA, 25 bp, Homo sapien
cttgtgcttggaccaaagtctgtat

SEQ ID NO: 3151076 - DNA, 25 bp, Homo sapien
gggattaactcccaaggtatactca

SEQ ID NO: 3151077 - DNA, 25 bp, Homo sapien
tagcctttcatgactatcttcggga

SEQ ID NO: 3151078 - DNA, 25 bp, Homo sapien
ttacagaatgtgcatatctccagca

SEQ ID NO: 3151079 - DNA, 25 bp, Homo sapien
caagcctatgcagcctagcctttca

SEQ ID NO: 3151080 - DNA, 25 bp, Homo sapien
gatttcacaattgggtatcttgaca

SEQ ID NO: 3151081 - DNA, 25 bp, Homo sapien
gatctcgccctctggtgacggaaga

SEQ ID NO: 3151082 - DNA, 25 bp, Homo sapien
cagcttgcccgaaatgttaacggtc

SEQ ID NO: 3151083 - DNA, 25 bp, Homo sapien
tgtgtcacgacaaaatccaccagct

SEQ ID NO: 3151084 - DNA, 25 bp, Homo sapien
tcacttgattagagctacttttcag

SEQ ID NO: 3151085 - DNA, 25 bp, Homo sapien
ctgtagataatctctggagccaggt

SEQ ID NO: 3151086 - DNA, 25 bp, Homo sapien
agctgtagataatctctggagccag

SEQ ID NO: 3151087 - DNA, 25 bp, Homo sapien
gatatatcccagaaatatcacttga

SEQ ID NO: 3151088 - DNA, 25 bp, Homo sapien
ctcgatacataatgtattcacacca

SEQ ID NO: 3151089 - DNA, 25 bp, Homo sapien
ctgatcagccctcgatacataatgt

SEQ ID NO: 3151090 - DNA, 25 bp, Homo sapien
atctgtcatgatcagtgctgtcgat

SEQ ID NO: 3151091 - DNA, 25 bp, Homo sapien
tgtcatgatcagtgctgtcgatatc

SEQ ID NO: 3151092 - DNA, 25 bp, Homo sapien
aggagaacccttgagtgtttcaggg

SEQ ID NO: 3151093 - DNA, 25 bp, Homo sapien
ggagaacccttgagtgtttcaggga

SEQ ID NO: 3151094 - DNA, 25 bp, Homo sapien
aattttgccatctgaatttctgaat

SEQ ID NO: 3151095 - DNA, 25 bp, Homo sapien
catgggagattcttgcataacccaa

SEQ ID NO: 3151096 - DNA, 25 bp, Homo sapien
tcatcagggatcctaaattttgcca

SEQ ID NO: 3151097 - DNA, 25 bp, Homo sapien
tctggttgtctctataattagtggg

SEQ ID NO: 3151098 - DNA, 25 bp, Homo sapien
gattaaaatgaattttctcagaaac

SEQ ID NO: 3151099 - DNA, 25 bp, Homo sapien
gggattaaaatgaattttctcagaa

SEQ ID NO: 3151100 - DNA, 25 bp, Homo sapien
tgggattaaaatgaattttctcaga

SEQ ID NO: 3151101 - DNA, 25 bp, Homo sapien
ctgggattaaaatgaattttctcag

SEQ ID NO: 3151102 - DNA, 25 bp, Homo sapien
gttttcataattgtgtccttctttg

SEQ ID NO: 3151103 - DNA, 25 bp, Homo sapien
aaaagtatttgggagtattcatatg

SEQ ID NO: 3151104 - DNA, 25 bp, Homo sapien
gtgtccttctttgtaggatccaaat

SEQ ID NO: 3151105 - DNA, 25 bp, Homo sapien
tcatatgaaaatgatggttgttttc

SEQ ID NO: 3151106 - DNA, 25 bp, Homo sapien
actgcatagataccatgtgtttttt

SEQ ID NO: 3151107 - DNA, 25 bp, Homo sapien
agataccatgtgttttttaagttga

SEQ ID NO: 3151108 - DNA, 25 bp, Homo sapien
ttagattttcccagccaataacttc

SEQ ID NO: 3151109 - DNA, 25 bp, Homo sapien
gattttcccagccaataacttcttg

SEQ ID NO: 3151110 - DNA, 25 bp, Homo sapien
ttaagactttgtccagtataaagta

SEQ ID NO: 3151111 - DNA, 25 bp, Homo sapien
cagtataaagtagggggagagatct

SEQ ID NO: 3151112 - DNA, 25 bp, Homo sapien
agactttgtccagtataaagtaggg

SEQ ID NO: 3151113 - DNA, 25 bp, Homo sapien
ccagtataaagtagggggagagatc

SEQ ID NO: 3151114 - DNA, 25 bp, Homo sapien
ggaatcatcccgagtggaatggaat

SEQ ID NO: 3151115 - DNA, 25 bp, Homo sapien
gaatggaatcatcccgagtggaatg

SEQ ID NO: 3151116 - DNA, 25 bp, Homo sapien
atcccgagtggaatggaatggtatg

SEQ ID NO: 3151117 - DNA, 25 bp, Homo sapien
tggaatggaatcatcccgagtggaa

SEQ ID NO: 3151118 - DNA, 25 bp, Homo sapien
ggaatcaacacgagtggaatggaat

SEQ ID NO: 3151119 - DNA, 25 bp, Homo sapien
gaatcaacacgagtggaatggaatg

SEQ ID NO: 3151120 - DNA, 25 bp, Homo sapien
aatcaacacgagtggaatggaatgg

SEQ ID NO: 3151121 - DNA, 25 bp, Homo sapien
tcaacacgagtggaatggaatggaa

SEQ ID NO: 3151122 - DNA, 25 bp, Homo sapien
ggaatgcaatggaatgctatggaat

SEQ ID NO: 3151123 - DNA, 25 bp, Homo sapien
aatgcaatggaatgctatggaatca

SEQ ID NO: 3151124 - DNA, 25 bp, Homo sapien
caatggaatgctatggaatcaaccc

SEQ ID NO: 3151125 - DNA, 25 bp, Homo sapien
tgcaatggaatgctatggaatcaac

SEQ ID NO: 3151126 - DNA, 25 bp, Homo sapien
aatggaatcaatccgggtggaatgg

SEQ ID NO: 3151127 - DNA, 25 bp, Homo sapien
aatggaatggaatcaatccgggtgg

SEQ ID NO: 3151128 - DNA, 25 bp, Homo sapien
tggaatggaatcaatccgggtggaa

SEQ ID NO: 3151129 - DNA, 25 bp, Homo sapien
ggaatggaatcaatccgggtggaat

SEQ ID NO: 3151130 - DNA, 25 bp, Homo sapien
ttggaatggcatcaacacgaatgga

SEQ ID NO: 3151131 - DNA, 25 bp, Homo sapien
aatggattcaacccgagtggaatgt

SEQ ID NO: 3151132 - DNA, 25 bp, Homo sapien
ccgagtggaatgtaatggattggaa

SEQ ID NO: 3151133 - DNA, 25 bp, Homo sapien
aacccgagtggaatgtaatggattg

SEQ ID NO: 3151134 - DNA, 25 bp, Homo sapien
tggattcaacccgagtggaatgtaa

SEQ ID NO: 3151135 - DNA, 25 bp, Homo sapien
tggaatggaatcaacccgagtggaa

SEQ ID NO: 3151136 - DNA, 25 bp, Homo sapien
ggaatcaacccgagtggaatggaat

SEQ ID NO: 3151137 - DNA, 25 bp, Homo sapien
ggaatggaatggaatcaacccgagt

SEQ ID NO: 3151138 - DNA, 25 bp, Homo sapien
aatggaatggaatcaacccgagtgg

SEQ ID NO: 3151139 - DNA, 25 bp, Homo sapien
tgattgaatccgagtggaattgaat

SEQ ID NO: 3151140 - DNA, 25 bp, Homo sapien
ttgaatccgagtggaattgaatgaa

SEQ ID NO: 3151141 - DNA, 25 bp, Homo sapien
aattgattgaatccgagtggaattg

SEQ ID NO: 3151142 - DNA, 25 bp, Homo sapien
ttgattgaatccgagtggaattgaa

SEQ ID NO: 3151143 - DNA, 25 bp, Homo sapien
aggaacggactggaatcaacccgag

SEQ ID NO: 3151144 - DNA, 25 bp, Homo sapien
tggaatggaatcaacccgagtggaa

SEQ ID NO: 3151145 - DNA, 25 bp, Homo sapien
ggaatggaatggaatcaacccgagt

SEQ ID NO: 3151146 - DNA, 25 bp, Homo sapien
ggaatcaacccgagtggaatggaat

SEQ ID NO: 3151147 - DNA, 25 bp, Homo sapien
aatggaatggaatcaacccgagtgg

SEQ ID NO: 3151148 - DNA, 25 bp, Homo sapien
tcaacccgagtggaatggaatggaa

SEQ ID NO: 3151149 - DNA, 25 bp, Homo sapien
atcaacccgagtggaatggaatgga

SEQ ID NO: 3151150 - DNA, 25 bp, Homo sapien
ggaatcaactcgagtgaaatggaat

SEQ ID NO: 3151151 - DNA, 25 bp, Homo sapien
gaatcaactcgagtgaaatggaatg

SEQ ID NO: 3151152 - DNA, 25 bp, Homo sapien
tcaactcgagtgaaatggaatggaa

SEQ ID NO: 3151153 - DNA, 25 bp, Homo sapien
aatcaactcgagtgaaatggaatgg

SEQ ID NO: 3151154 - DNA, 25 bp, Homo sapien
ggaatggaatggaatcaacctgagt

SEQ ID NO: 3151155 - DNA, 25 bp, Homo sapien
tggaatggaatcaacctgagtggaa

SEQ ID NO: 3151156 - DNA, 25 bp, Homo sapien
aatggaatggaatcaacctgagtgg

SEQ ID NO: 3151157 - DNA, 25 bp, Homo sapien
ggaatggaatcaacctgagtggaat

SEQ ID NO: 3151158 - DNA, 25 bp, Homo sapien
ttgaatggaatcatcccgagtggaa

SEQ ID NO: 3151159 - DNA, 25 bp, Homo sapien
atggaatggtatctaatgcaatgga

SEQ ID NO: 3151160 - DNA, 25 bp, Homo sapien
cgagtggaatggaatggtatctaat

SEQ ID NO: 3151161 - DNA, 25 bp, Homo sapien
agtggaatggaatggtatctaatgc

SEQ ID NO: 3151162 - DNA, 25 bp, Homo sapien
tggaatcaacccgattagaaactaa

SEQ ID NO: 3151163 - DNA, 25 bp, Homo sapien
ttggaatcaacccgattagaaacta

SEQ ID NO: 3151164 - DNA, 25 bp, Homo sapien
atggaataaaagggcatggaatgga

SEQ ID NO: 3151165 - DNA, 25 bp, Homo sapien
tggaataaaagggcatggaatggaa

SEQ ID NO: 3151166 - DNA, 25 bp, Homo sapien
gaataaaagggcatggaatggaacg

SEQ ID NO: 3151167 - DNA, 25 bp, Homo sapien
ataaaagggcatggaatggaacgga

SEQ ID NO: 3151168 - DNA, 25 bp, Homo sapien
aatggtatagaatggaatgtaatgg

SEQ ID NO: 3151169 - DNA, 25 bp, Homo sapien
gaatggtatagaatggaatgtaatg

SEQ ID NO: 3151170 - DNA, 25 bp, Homo sapien
gtatagaatggaatgtaatggaacg

SEQ ID NO: 3151171 - DNA, 25 bp, Homo sapien
tggtatagaatggaatgtaatggaa

SEQ ID NO: 3151172 - DNA, 25 bp, Homo sapien
gaatggaatggaatttattggaatg

SEQ ID NO: 3151173 - DNA, 25 bp, Homo sapien
ggaatggaatggaatttattggaat

SEQ ID NO: 3151174 - DNA, 25 bp, Homo sapien
gaatggaatttattggaatggtatg

SEQ ID NO: 3151175 - DNA, 25 bp, Homo sapien
tggaatggaatttattggaatggta

SEQ ID NO: 3151176 - DNA, 25 bp, Homo sapien
ggaatggaatggaatcaccctgagt

SEQ ID NO: 3151177 - DNA, 25 bp, Homo sapien
gaatggaatggaatcaccctgagtg

SEQ ID NO: 3151178 - DNA, 25 bp, Homo sapien
tggaatggaacggaacagaaaggaa

SEQ ID NO: 3151179 - DNA, 25 bp, Homo sapien
ggaatggaatgaacccgagtggaaa

SEQ ID NO: 3151180 - DNA, 25 bp, Homo sapien
gaatgaacccgagtggaaaggaatg

SEQ ID NO: 3151181 - DNA, 25 bp, Homo sapien
tcatcccgagtggaatgcaatggaa

SEQ ID NO: 3151182 - DNA, 25 bp, Homo sapien
gaatggaatggaagggaatcaacac

SEQ ID NO: 3151183 - DNA, 25 bp, Homo sapien
tggaatggaagggaatcaacacgag

SEQ ID NO: 3151184 - DNA, 25 bp, Homo sapien
tggaagggaatcaacacgagtggaa

SEQ ID NO: 3151185 - DNA, 25 bp, Homo sapien
gaatcaacccaagtggaatggaatg

SEQ ID NO: 3151186 - DNA, 25 bp, Homo sapien
gaatcatcccgagtggaatggaatg

SEQ ID NO: 3151187 - DNA, 25 bp, Homo sapien
aaatggaaacaacccgagtggaatg

SEQ ID NO: 3151188 - DNA, 25 bp, Homo sapien
atggaaaggaatcaacctgaagggt

SEQ ID NO: 3151189 - DNA, 25 bp, Homo sapien
ggaatagaatgaaatggaaaggaat

SEQ ID NO: 3151190 - DNA, 25 bp, Homo sapien
agaatgaaatggaaaggaatggaat

SEQ ID NO: 3151191 - DNA, 25 bp, Homo sapien
aatggaatagaatgaaatggaaagg

SEQ ID NO: 3151192 - DNA, 25 bp, Homo sapien
gaaatggaaaggaatggaatggaaa

SEQ ID NO: 3151193 - DNA, 25 bp, Homo sapien
ggaataaccagagaggaatggaatg

SEQ ID NO: 3151194 - DNA, 25 bp, Homo sapien
aatggaatggaataaccagagagga

SEQ ID NO: 3151195 - DNA, 25 bp, Homo sapien
atggaataaccagagaggaatggaa

SEQ ID NO: 3151196 - DNA, 25 bp, Homo sapien
ggaatggaataaccagagaggaatg

SEQ ID NO: 3151197 - DNA, 25 bp, Homo sapien
atggagtggaatcgaatggaataga

SEQ ID NO: 3151198 - DNA, 25 bp, Homo sapien
gaatggagtggaatcgaatggaata

SEQ ID NO: 3151199 - DNA, 25 bp, Homo sapien
aatggagtggaatcgaatggaatag

SEQ ID NO: 3151200 - DNA, 25 bp, Homo sapien
aacccgagtggaatggcatggaatg

SEQ ID NO: 3151201 - DNA, 25 bp, Homo sapien
caacccgagtggaatggcatggaat

SEQ ID NO: 3151202 - DNA, 25 bp, Homo sapien
caacccgagtggaatggaatacaat

SEQ ID NO: 3151203 - DNA, 25 bp, Homo sapien
atggaatacaatggaatggaatgca

SEQ ID NO: 3151204 - DNA, 25 bp, Homo sapien
ggaatacaatggaatggaatgcaat

SEQ ID NO: 3151205 - DNA, 25 bp, Homo sapien
acccgagtggaatggaatacaatgg

SEQ ID NO: 3151206 - DNA, 25 bp, Homo sapien
ggaatggaatggaaacaacgcaatg

SEQ ID NO: 3151207 - DNA, 25 bp, Homo sapien
ttggaatggaatggaaacaacgcaa

SEQ ID NO: 3151208 - DNA, 25 bp, Homo sapien
gattggaatggaatggaaacaacgc

SEQ ID NO: 3151209 - DNA, 25 bp, Homo sapien
gaatggattggaatggaatggaaac

SEQ ID NO: 3151210 - DNA, 25 bp, Homo sapien
aacccaagtggaaaggaatggaatg

SEQ ID NO: 3151211 - DNA, 25 bp, Homo sapien
caagtggaaaggaatggaatggaat

SEQ ID NO: 3151212 - DNA, 25 bp, Homo sapien
cccaagtggaaaggaatggaatgga

SEQ ID NO: 3151213 - DNA, 25 bp, Homo sapien
acccaagtggaaaggaatggaatgg

SEQ ID NO: 3151214 - DNA, 25 bp, Homo sapien
ccgagtggaaaacaatggaatgaaa

SEQ ID NO: 3151215 - DNA, 25 bp, Homo sapien
caacccgagtggaaaacaatggaat

SEQ ID NO: 3151216 - DNA, 25 bp, Homo sapien
atcaacccgagtggaaaacaatgga

SEQ ID NO: 3151217 - DNA, 25 bp, Homo sapien
gaatcaacccgagtggaaaacaatg

SEQ ID NO: 3151218 - DNA, 25 bp, Homo sapien
atgcaatcaactttggtagaatggt

SEQ ID NO: 3151219 - DNA, 25 bp, Homo sapien
atgcaatcaactttggtggaatggt

SEQ ID NO: 3151220 - DNA, 25 bp, Homo sapien
gcaatcaactttggtggaatggtat

SEQ ID NO: 3151221 - DNA, 25 bp, Homo sapien
tcaactttggtggaatggtatggaa

SEQ ID NO: 3151222 - DNA, 25 bp, Homo sapien
aatcaactttggtggaatggtatgg

SEQ ID NO: 3151223 - DNA, 25 bp, Homo sapien
acagaatggtatggaatcaacccga

SEQ ID NO: 3151224 - DNA, 25 bp, Homo sapien
gcaatcaactttggtggaatggtat

SEQ ID NO: 3151225 - DNA, 25 bp, Homo sapien
tcaactttggtggaatggtatggaa

SEQ ID NO: 3151226 - DNA, 25 bp, Homo sapien
aatcaactttggtggaatggtatgg

SEQ ID NO: 3151227 - DNA, 25 bp, Homo sapien
aatggaatcaacccgagtggaatgc

SEQ ID NO: 3151228 - DNA, 25 bp, Homo sapien
tcaacccgagtggaatgcaatggaa

SEQ ID NO: 3151229 - DNA, 25 bp, Homo sapien
ggaatcaacccgagtggaatgcaat

SEQ ID NO: 3151230 - DNA, 25 bp, Homo sapien
aaaggaatggaatcaacccgagtgg

SEQ ID NO: 3151231 - DNA, 25 bp, Homo sapien
aatggaatggaaaggaatcaacccg

SEQ ID NO: 3151232 - DNA, 25 bp, Homo sapien
ggaatggaatggaaaggaatcaacc

SEQ ID NO: 3151233 - DNA, 25 bp, Homo sapien
gaatggaatggaaaggaatcaaccc

SEQ ID NO: 3151234 - DNA, 25 bp, Homo sapien
tggaatggaaaggaatcaacccgaa

SEQ ID NO: 3151235 - DNA, 25 bp, Homo sapien
gaatggaatcaacccgagtggaaag

SEQ ID NO: 3151236 - DNA, 25 bp, Homo sapien
tggaatcaacccgagtggaaaggaa

SEQ ID NO: 3151237 - DNA, 25 bp, Homo sapien
aatggaatggaatcaacccgagtgg

SEQ ID NO: 3151238 - DNA, 25 bp, Homo sapien
gaatcaacccgagtggaaaggaatg

SEQ ID NO: 3151239 - DNA, 25 bp, Homo sapien
aatggaatcaacccgagtggaatgc

SEQ ID NO: 3151240 - DNA, 25 bp, Homo sapien
aatggaatggaatcaacccgagtgg

SEQ ID NO: 3151241 - DNA, 25 bp, Homo sapien
ggaatcaacccgagtggaatgcaat

SEQ ID NO: 3151242 - DNA, 25 bp, Homo sapien
tcaacccgagtggaatgcaatggaa

SEQ ID NO: 3151243 - DNA, 25 bp, Homo sapien
gaaacaacccgagtggaatggaatg

SEQ ID NO: 3151244 - DNA, 25 bp, Homo sapien
tggaaacaacccgagtggaatggaa

SEQ ID NO: 3151245 - DNA, 25 bp, Homo sapien
aatggaatggaaacaacccgagtgg

SEQ ID NO: 3151246 - DNA, 25 bp, Homo sapien
gaatggaaacaacccgagtggaatg

SEQ ID NO: 3151247 - DNA, 25 bp, Homo sapien
aatggaatctacccgagtggaatgg

SEQ ID NO: 3151248 - DNA, 25 bp, Homo sapien
gaatctacccgagtggaatggaatg

SEQ ID NO: 3151249 - DNA, 25 bp, Homo sapien
ggaatctacccgagtggaatggaat

SEQ ID NO: 3151250 - DNA, 25 bp, Homo sapien
tggaatctacccgagtggaatggaa

SEQ ID NO: 3151251 - DNA, 25 bp, Homo sapien
aatcaactttggtggaatggtatgg

SEQ ID NO: 3151252 - DNA, 25 bp, Homo sapien
tcaactttggtggaatggtatggaa

SEQ ID NO: 3151253 - DNA, 25 bp, Homo sapien
gcaatcaactttggtggaatggtat

SEQ ID NO: 3151254 - DNA, 25 bp, Homo sapien
atgcaatcaactttggtggaatggt

SEQ ID NO: 3151255 - DNA, 25 bp, Homo sapien
tcaacccgagtcgaatggaatggaa

SEQ ID NO: 3151256 - DNA, 25 bp, Homo sapien
caacccgagtcgaatggaatggaat

SEQ ID NO: 3151257 - DNA, 25 bp, Homo sapien
aacccgagtcgaatggaatggaatg

SEQ ID NO: 3151258 - DNA, 25 bp, Homo sapien
aacccgagtggaaaggaatggaatg

SEQ ID NO: 3151259 - DNA, 25 bp, Homo sapien
cccgagtggaaaggaatggaatgga

SEQ ID NO: 3151260 - DNA, 25 bp, Homo sapien
cgagtggaaaggaatggaatggaat

SEQ ID NO: 3151261 - DNA, 25 bp, Homo sapien
acccgagtggaaaggaatggaatgg

SEQ ID NO: 3151262 - DNA, 25 bp, Homo sapien
acagaatggtatggaatcaacccga

SEQ ID NO: 3151263 - DNA, 25 bp, Homo sapien
aatggaacagaatcaacccgaatgg

SEQ ID NO: 3151264 - DNA, 25 bp, Homo sapien
aacggaatgaagtggaatggtatag

SEQ ID NO: 3151265 - DNA, 25 bp, Homo sapien
gaacggaatgaagtggaatggtata

SEQ ID NO: 3151266 - DNA, 25 bp, Homo sapien
aatggaatggaataaaagggcatgg

SEQ ID NO: 3151267 - DNA, 25 bp, Homo sapien
gaaatgaatcaaaccgagtggaatg

SEQ ID NO: 3151268 - DNA, 25 bp, Homo sapien
tggaaatgaatcaaaccgagtggaa

SEQ ID NO: 3151269 - DNA, 25 bp, Homo sapien
ggaaatgaatcaaaccgagtggaat

SEQ ID NO: 3151270 - DNA, 25 bp, Homo sapien
tggaatggaataacatgcaatcaac

SEQ ID NO: 3151271 - DNA, 25 bp, Homo sapien
gaatggaataacatgcaatcaactt

SEQ ID NO: 3151272 - DNA, 25 bp, Homo sapien
atggaataacatgcaatcaactttg

SEQ ID NO: 3151273 - DNA, 25 bp, Homo sapien
ggaatggaataacatgcaatcaact

SEQ ID NO: 3151274 - DNA, 25 bp, Homo sapien
atggaatggaatggcatggaatcaa

SEQ ID NO: 3151275 - DNA, 25 bp, Homo sapien
ggaatggaatggcatggaatcaacc

SEQ ID NO: 3151276 - DNA, 25 bp, Homo sapien
aatggaatggaatggcatggaatca

SEQ ID NO: 3151277 - DNA, 25 bp, Homo sapien
caatggaatggaatggcatggaatc

SEQ ID NO: 3151278 - DNA, 25 bp, Homo sapien
tcaacccgagtggaatggaatggaa

SEQ ID NO: 3151279 - DNA, 25 bp, Homo sapien
aatcaacccgagtggaatggaatgg

SEQ ID NO: 3151280 - DNA, 25 bp, Homo sapien
gaatcaacccgagtggaatggaatg

SEQ ID NO: 3151281 - DNA, 25 bp, Homo sapien
atcaacccgagtggaatggaatgga

SEQ ID NO: 3151282 - DNA, 25 bp, Homo sapien
gggaatcaacccgaatggaatggaa

SEQ ID NO: 3151283 - DNA, 25 bp, Homo sapien
aatcaacccgaatggaatggaaagg

SEQ ID NO: 3151284 - DNA, 25 bp, Homo sapien
gaatcaacccgaatggaatggaaag

SEQ ID NO: 3151285 - DNA, 25 bp, Homo sapien
gaagggaatcaacccgaatggaatg

SEQ ID NO: 3151286 - DNA, 25 bp, Homo sapien
tggaatggaaggcattggaatcaac

SEQ ID NO: 3151287 - DNA, 25 bp, Homo sapien
atggaaggcattggaatcaactgga

SEQ ID NO: 3151288 - DNA, 25 bp, Homo sapien
atggaatggaaggcattggaatcaa

SEQ ID NO: 3151289 - DNA, 25 bp, Homo sapien
gaatggaaggcattggaatcaactg

SEQ ID NO: 3151290 - DNA, 25 bp, Homo sapien
gaatggaatcaaatggaaagaaatg

SEQ ID NO: 3151291 - DNA, 25 bp, Homo sapien
acagggacatagaaccaagccccaa

SEQ ID NO: 3151292 - DNA, 25 bp, Homo sapien
cggcccagctacaggaccgcctctg

SEQ ID NO: 3151293 - DNA, 25 bp, Homo sapien
ccaagccggcccagctacaggaccg

SEQ ID NO: 3151294 - DNA, 25 bp, Homo sapien
aagccccaagccggcccagctacag

SEQ ID NO: 3151295 - DNA, 25 bp, Homo sapien
gctgacgaccatcatctattacgcc

SEQ ID NO: 3151296 - DNA, 25 bp, Homo sapien
aaggctgacgaccatcatctattac

SEQ ID NO: 3151297 - DNA, 25 bp, Homo sapien
gacgaccatcatctattacgccatc

SEQ ID NO: 3151298 - DNA, 25 bp, Homo sapien
ggctgacgaccatcatctattacgc

SEQ ID NO: 3151299 - DNA, 25 bp, Homo sapien
ttgctcttggaaacacccagaggac

SEQ ID NO: 3151300 - DNA, 25 bp, Homo sapien
cagagatttattcgtttcttgttgc

SEQ ID NO: 3151301 - DNA, 25 bp, Homo sapien
tcgtttcttgttgctcttggaaaca

SEQ ID NO: 3151302 - DNA, 25 bp, Homo sapien
gaaacacccagaggacactggaaac

SEQ ID NO: 3151303 - DNA, 25 bp, Homo sapien
gaaatagcaacaaaaaaacgcttca

SEQ ID NO: 3151304 - DNA, 25 bp, Homo sapien
aagttcacaaggataccaaggaatt

SEQ ID NO: 3151305 - DNA, 25 bp, Homo sapien
tcacaaggataccaaggaattgaac

SEQ ID NO: 3151306 - DNA, 25 bp, Homo sapien
gttcacaaggataccaaggaattga

SEQ ID NO: 3151307 - DNA, 25 bp, Homo sapien
cactgctgagaatggtaagggaccc

SEQ ID NO: 3151308 - DNA, 25 bp, Homo sapien
tggtccacatggagcagttgctacg

SEQ ID NO: 3151309 - DNA, 25 bp, Homo sapien
cactgtaaatgtaacgaagcttccg

SEQ ID NO: 3151310 - DNA, 25 bp, Homo sapien
tgggaggacgaaacatgtggatcac

SEQ ID NO: 3151311 - DNA, 25 bp, Homo sapien
ttgtgttctggtgatgaagtctctg

SEQ ID NO: 3151312 - DNA, 25 bp, Homo sapien
tttgtgttctggtgatgaagtctct

SEQ ID NO: 3151313 - DNA, 25 bp, Homo sapien
tgtgttctggtgatgaagtctctgc

SEQ ID NO: 3151314 - DNA, 25 bp, Homo sapien
gttccaaattgtagggagcaaggcc

SEQ ID NO: 3151315 - DNA, 25 bp, Homo sapien
tcagagacctttgtagcagtccttg

SEQ ID NO: 3151316 - DNA, 25 bp, Homo sapien
tgcagcctcaggacactactgcctg

SEQ ID NO: 3151317 - DNA, 25 bp, Homo sapien
tactgcctacatcgaacagcctgtg

SEQ ID NO: 3151318 - DNA, 25 bp, Homo sapien
aagagttgtactgcctacatcgaac

SEQ ID NO: 3151319 - DNA, 25 bp, Homo sapien
agctcattgacagtgtggaatgcat

SEQ ID NO: 3151320 - DNA, 25 bp, Homo sapien
aaagagctcattgacagtgtggaat

SEQ ID NO: 3151321 - DNA, 25 bp, Homo sapien
agagctcattgacagtgtggaatgc

SEQ ID NO: 3151322 - DNA, 25 bp, Homo sapien
ggctgattggcaaagagctcattga

SEQ ID NO: 3151323 - DNA, 25 bp, Homo sapien
gaacacaggccatctggaggatgac

SEQ ID NO: 3151324 - DNA, 25 bp, Homo sapien
tcaggtgccaagaggcagaacacag

SEQ ID NO: 3151325 - DNA, 25 bp, Homo sapien
gaggatgactctggtaagagcttcc

SEQ ID NO: 3151326 - DNA, 25 bp, Homo sapien
catctggaggatgactctggtaaga

SEQ ID NO: 3151327 - DNA, 25 bp, Homo sapien
cgggtgcctgttttgtgctgacagt

SEQ ID NO: 3151328 - DNA, 25 bp, Homo sapien
tgcctgttttgtgctgacagtcgtc

SEQ ID NO: 3151329 - DNA, 25 bp, Homo sapien
ggtgcctgttttgtgctgacagtcg

SEQ ID NO: 3151330 - DNA, 25 bp, Homo sapien
cctgttttgtgctgacagtcgtctc

SEQ ID NO: 3151331 - DNA, 25 bp, Homo sapien
cctctgtgttgtgtctttagatcgg

SEQ ID NO: 3151332 - DNA, 25 bp, Homo sapien
gttctggattagtcttcctgtagcc

SEQ ID NO: 3151333 - DNA, 25 bp, Homo sapien
gcctctgtgttgtgtctttagatcg

SEQ ID NO: 3151334 - DNA, 25 bp, Homo sapien
ctctgtgttgtgtctttagatcggg

SEQ ID NO: 3151335 - DNA, 25 bp, Homo sapien
tgaggtaccaggaaactagcaaaga

SEQ ID NO: 3151336 - DNA, 25 bp, Homo sapien
caaagagccttctggctgtctggag

SEQ ID NO: 3151337 - DNA, 25 bp, Homo sapien
gcaaagagccttctggctgtctgga

SEQ ID NO: 3151338 - DNA, 25 bp, Homo sapien
ggtaccaggaaactagcaaagagcc

SEQ ID NO: 3151339 - DNA, 25 bp, Homo sapien
ctaacgaagagaatatttaaccata

SEQ ID NO: 3151340 - DNA, 25 bp, Homo sapien
taacgaagagaatatttaaccataa

SEQ ID NO: 3151341 - DNA, 25 bp, Homo sapien
acgaagagaatatttaaccataaag

SEQ ID NO: 3151342 - DNA, 25 bp, Homo sapien
cgaagagaatatttaaccataaagt

SEQ ID NO: 3151343 - DNA, 25 bp, Homo sapien
ctgctgtgtcggacacttgctccca

SEQ ID NO: 3151344 - DNA, 25 bp, Homo sapien
tagtttttaaacgcacacttagtca

SEQ ID NO: 3151345 - DNA, 25 bp, Homo sapien
agctgctgctgtgtcggacacttgc

SEQ ID NO: 3151346 - DNA, 25 bp, Homo sapien
taaacgcacacttagtcaactgaag

SEQ ID NO: 3151347 - DNA, 25 bp, Homo sapien
ggtgcatccaaggtacgttgaaaat

SEQ ID NO: 3151348 - DNA, 25 bp, Homo sapien
tgcatccaaggtacgttgaaaatcc

SEQ ID NO: 3151349 - DNA, 25 bp, Homo sapien
aggtgcatccaaggtacgttgaaaa

SEQ ID NO: 3151350 - DNA, 25 bp, Homo sapien
gcatccaaggtacgttgaaaatcca

SEQ ID NO: 3151351 - DNA, 25 bp, Homo sapien
tgggtacaggacagggggtgcatgg

SEQ ID NO: 3151352 - DNA, 25 bp, Homo sapien
ccatgggtttccaggcttgtgggca

SEQ ID NO: 3151353 - DNA, 25 bp, Homo sapien
cacaaactcggcaccgtctgttatg

SEQ ID NO: 3151354 - DNA, 25 bp, Homo sapien
ttttccacaaactcggcaccgtctg

SEQ ID NO: 3151355 - DNA, 25 bp, Homo sapien
agaggctgatctctccaaccactgc

SEQ ID NO: 3151356 - DNA, 25 bp, Homo sapien
agagattgtggagagccgaaattgt

SEQ ID NO: 3151357 - DNA, 25 bp, Homo sapien
gcagagattgtggagagccgaaatt

SEQ ID NO: 3151358 - DNA, 25 bp, Homo sapien
agattgtggagagccgaaattgtgc

SEQ ID NO: 3151359 - DNA, 25 bp, Homo sapien
ggcagagattgtggagagccgaaat

SEQ ID NO: 3151360 - DNA, 25 bp, Homo sapien
cagaacctacagacatcaatataat

SEQ ID NO: 3151361 - DNA, 25 bp, Homo sapien
gctacataatgtagataatgggaat

SEQ ID NO: 3151362 - DNA, 25 bp, Homo sapien
caatggctagcaagatttatctcga

SEQ ID NO: 3151363 - DNA, 25 bp, Homo sapien
aatagaggatgtaactacagaacct

SEQ ID NO: 3151364 - DNA, 25 bp, Homo sapien
gatgcagataaatcgtttcttaaag

SEQ ID NO: 3151365 - DNA, 25 bp, Homo sapien
gggatgcagataaatcgtttcttaa

SEQ ID NO: 3151366 - DNA, 25 bp, Homo sapien
gcagataaatcgtttcttaaaggta

SEQ ID NO: 3151367 - DNA, 25 bp, Homo sapien
tgggatgcagataaatcgtttctta

SEQ ID NO: 3151368 - DNA, 25 bp, Homo sapien
taattgttgcaagaaagaaccttgg

SEQ ID NO: 3151369 - DNA, 25 bp, Homo sapien
taatatgaaagtatcttcccacaag

SEQ ID NO: 3151370 - DNA, 25 bp, Homo sapien
gaaccttggaggaatgctaagatta

SEQ ID NO: 3151371 - DNA, 25 bp, Homo sapien
aagtggagatgtcaacttagccaag

SEQ ID NO: 3151372 - DNA, 25 bp, Homo sapien
aacttccatagccaaatttgagaaa

SEQ ID NO: 3151373 - DNA, 25 bp, Homo sapien
gggacatatttgatatcaggattgg

SEQ ID NO: 3151374 - DNA, 25 bp, Homo sapien
gaaaattttcaattaatccaggcca

SEQ ID NO: 3151375 - DNA, 25 bp, Homo sapien
tatttgatatcaggattgggcaggg

SEQ ID NO: 3151376 - DNA, 25 bp, Homo sapien
acctagtgaaactcgccaatagatg

SEQ ID NO: 3151377 - DNA, 25 bp, Homo sapien
agtgaaactcgccaatagatggagt

SEQ ID NO: 3151378 - DNA, 25 bp, Homo sapien
aacctagtgaaactcgccaatagat

SEQ ID NO: 3151379 - DNA, 25 bp, Homo sapien
tattaacctagtgaaactcgccaat

SEQ ID NO: 3151380 - DNA, 25 bp, Homo sapien
caggtatttgagacgctgagtttgg

SEQ ID NO: 3151381 - DNA, 25 bp, Homo sapien
ggagtgaaattgttgcattatgtga

SEQ ID NO: 3151382 - DNA, 25 bp, Homo sapien
ttgagaaactgccacgttgtttttc

SEQ ID NO: 3151383 - DNA, 25 bp, Homo sapien
tggaggattttcttagctcaggagt

SEQ ID NO: 3151384 - DNA, 25 bp, Homo sapien
ccgcttgctattttaggcacttaga

SEQ ID NO: 3151385 - DNA, 25 bp, Homo sapien
tcagctggccactgaacctaaccag

SEQ ID NO: 3151386 - DNA, 25 bp, Homo sapien
tttttcagatactactcagctggcc

SEQ ID NO: 3151387 - DNA, 25 bp, Homo sapien
tgccatcatttcagaccgcttgcta

SEQ ID NO: 3151388 - DNA, 25 bp, Homo sapien
tagttatggtcaaacacttctaacc

SEQ ID NO: 3151389 - DNA, 25 bp, Homo sapien
tacgcttaaagggtgttgatggatc

SEQ ID NO: 3151390 - DNA, 25 bp, Homo sapien
aatgctgctgttaatcgggtgtaca

SEQ ID NO: 3151391 - DNA, 25 bp, Homo sapien
acttctaaccaaaagtgccatgttg

SEQ ID NO: 3151392 - DNA, 25 bp, Homo sapien
tcattctgtgaggaacaaccaaatt

SEQ ID NO: 3151393 - DNA, 25 bp, Homo sapien
caaccaaattgttttccgcagcaag

SEQ ID NO: 3151394 - DNA, 25 bp, Homo sapien
tttccgcagcaagggcatcattttc

SEQ ID NO: 3151395 - DNA, 25 bp, Homo sapien
caaactttgctcttagcagtgcctt

SEQ ID NO: 3151396 - DNA, 25 bp, Homo sapien
cattagattccaaagggccgagtcc

SEQ ID NO: 3151397 - DNA, 25 bp, Homo sapien
cacactaataacaacgggaagccct

SEQ ID NO: 3151398 - DNA, 25 bp, Homo sapien
cccaggtgccataaggtcaggataa

SEQ ID NO: 3151399 - DNA, 25 bp, Homo sapien
caatggtgacgctatctaccgggac

SEQ ID NO: 3151400 - DNA, 25 bp, Homo sapien
gctgtttctggagtatagggtcgca

SEQ ID NO: 3151401 - DNA, 25 bp, Homo sapien
ggtcgcatactcataaacccagtgt

SEQ ID NO: 3151402 - DNA, 25 bp, Homo sapien
cagtgtaactcagaaccgcatctca

SEQ ID NO: 3151403 - DNA, 25 bp, Homo sapien
cctcgacaggtgcaggaaaattgtg

SEQ ID NO: 3151404 - DNA, 25 bp, Homo sapien
tatgactgacataacacgtagcaca

SEQ ID NO: 3151405 - DNA, 25 bp, Homo sapien
ccacattgtaggcttacccacaggg

SEQ ID NO: 3151406 - DNA, 25 bp, Homo sapien
tgtggacatgtcctataaacagaat

SEQ ID NO: 3151407 - DNA, 25 bp, Homo sapien
caataggtgagctgttatgactgac

SEQ ID NO: 3151408 - DNA, 25 bp, Homo sapien
gaccctcagccctaggtagcaacta

SEQ ID NO: 3151409 - DNA, 25 bp, Homo sapien
ctgaccctcagccctaggtagcaac

SEQ ID NO: 3151410 - DNA, 25 bp, Homo sapien
tgaccctcagccctaggtagcaact

SEQ ID NO: 3151411 - DNA, 25 bp, Homo sapien
ccctttcctaaccaagcaggacagt

SEQ ID NO: 3151412 - DNA, 25 bp, Homo sapien
ctaaccaagcaggacagtcactcat

SEQ ID NO: 3151413 - DNA, 25 bp, Homo sapien
ctttcctaaccaagcaggacagtca

SEQ ID NO: 3151414 - DNA, 25 bp, Homo sapien
tcctaaccaagcaggacagtcactc

SEQ ID NO: 3151415 - DNA, 25 bp, Homo sapien
agatgattggattatctggagccat

SEQ ID NO: 3151416 - DNA, 25 bp, Homo sapien
tggattatctggagccataccttga

SEQ ID NO: 3151417 - DNA, 25 bp, Homo sapien
tgattggattatctggagccatacc

SEQ ID NO: 3151418 - DNA, 25 bp, Homo sapien
gattggattatctggagccatacct

SEQ ID NO: 3151419 - DNA, 25 bp, Homo sapien
tcagcaaactaatccagggaaagaa

SEQ ID NO: 3151420 - DNA, 25 bp, Homo sapien
tcaaactcagaaagtgacagaccaa

SEQ ID NO: 3151421 - DNA, 25 bp, Homo sapien
cctttcgggaggcagagcgttaaga

SEQ ID NO: 3151422 - DNA, 25 bp, Homo sapien
agaaaaacagctactgcatgctggg

SEQ ID NO: 3151423 - DNA, 25 bp, Homo sapien
ttcctaaccaagcaggacagtcact

SEQ ID NO: 3151424 - DNA, 25 bp, Homo sapien
ctaaccaagcaggacagtcactcat

SEQ ID NO: 3151425 - DNA, 25 bp, Homo sapien
tcctaaccaagcaggacagtcactc

SEQ ID NO: 3151426 - DNA, 25 bp, Homo sapien
tttcctaaccaagcaggacagtcac

SEQ ID NO: 3151427 - DNA, 25 bp, Homo sapien
tgattggattatctggagccacacc

SEQ ID NO: 3151428 - DNA, 25 bp, Homo sapien
gattggattatctggagccacacct

SEQ ID NO: 3151429 - DNA, 25 bp, Homo sapien
tggattatctggagccacaccttga

SEQ ID NO: 3151430 - DNA, 25 bp, Homo sapien
agatgattggattatctggagccac

SEQ ID NO: 3151431 - DNA, 25 bp, Homo sapien
ccctttcctaaccaagcaggacagt

SEQ ID NO: 3151432 - DNA, 25 bp, Homo sapien
ctaaccaagcaggacagtcactcat

SEQ ID NO: 3151433 - DNA, 25 bp, Homo sapien
ctttcctaaccaagcaggacagtca

SEQ ID NO: 3151434 - DNA, 25 bp, Homo sapien
tcctaaccaagcaggacagtcactc

SEQ ID NO: 3151435 - DNA, 25 bp, Homo sapien
tctgtcatcaccagaatcccacaag

SEQ ID NO: 3151436 - DNA, 25 bp, Homo sapien
ctgtcctcaccgtgatgggcaatca

SEQ ID NO: 3151437 - DNA, 25 bp, Homo sapien
aatcccacaagctcccatttccctg

SEQ ID NO: 3151438 - DNA, 25 bp, Homo sapien
tttccctgtcctcaccgtgatgggc

SEQ ID NO: 3151439 - DNA, 25 bp, Homo sapien
cggagcggatcagcggccgagcctt

SEQ ID NO: 3151440 - DNA, 25 bp, Homo sapien
atactcagatcttcgcggagcggat

SEQ ID NO: 3151441 - DNA, 25 bp, Homo sapien
cggccgagcctttggcggactctgc

SEQ ID NO: 3151442 - DNA, 25 bp, Homo sapien
gctggcctatactcagatcttcgcg

SEQ ID NO: 3151443 - DNA, 25 bp, Homo sapien
gtttatacaacgcatatctccacct

SEQ ID NO: 3151444 - DNA, 25 bp, Homo sapien
gaatgtttatacaacgcatatctcc

SEQ ID NO: 3151445 - DNA, 25 bp, Homo sapien
aagaatgtttatacaacgcatatct

SEQ ID NO: 3151446 - DNA, 25 bp, Homo sapien
ttatacaacgcatatctccaccttt

SEQ ID NO: 3151447 - DNA, 25 bp, Homo sapien
ttgatattccgaacccgagcaccct

SEQ ID NO: 3151448 - DNA, 25 bp, Homo sapien
gcaccctcatccaacgaatgctcca

SEQ ID NO: 3151449 - DNA, 25 bp, Homo sapien
cgagcaccctcatccaacgaatgct

SEQ ID NO: 3151450 - DNA, 25 bp, Homo sapien
acccaactggctcccaagtctccac

SEQ ID NO: 3151451 - DNA, 25 bp, Homo sapien
ttctgtgagcaaatcttattcaata

SEQ ID NO: 3151452 - DNA, 25 bp, Homo sapien
tctgtgagcaaatcttattcaataa

SEQ ID NO: 3151453 - DNA, 25 bp, Homo sapien
ctgtgagcaaatcttattcaataaa

SEQ ID NO: 3151454 - DNA, 25 bp, Homo sapien
tttctgtgagcaaatcttattcaat

SEQ ID NO: 3151455 - DNA, 25 bp, Homo sapien
caagtccacgcagagtccgccaaag

SEQ ID NO: 3151456 - DNA, 25 bp, Homo sapien
cagagtccgccaaaggctctggccg

SEQ ID NO: 3151457 - DNA, 25 bp, Homo sapien
tccaagtcgcaagacgccgtgagct

SEQ ID NO: 3151458 - DNA, 25 bp, Homo sapien
ctggccgctgatcccctccgcgaag

SEQ ID NO: 3151459 - DNA, 25 bp, Homo sapien
catccctggtgaggagttgcccctt

SEQ ID NO: 3151460 - DNA, 25 bp, Homo sapien
tgggatgatgtagagtacttccaca

SEQ ID NO: 3151461 - DNA, 25 bp, Homo sapien
tgagagtggtgaagccctgtgggat

SEQ ID NO: 3151462 - DNA, 25 bp, Homo sapien
taaagctgtggaattctgttgatga

SEQ ID NO: 3151463 - DNA, 25 bp, Homo sapien
accgtggagtaatggccaggtaact

SEQ ID NO: 3151464 - DNA, 25 bp, Homo sapien
tcacgggaaccgtggagtaatggcc

SEQ ID NO: 3151465 - DNA, 25 bp, Homo sapien
ccaggtaactgcgtcatgtggacta

SEQ ID NO: 3151466 - DNA, 25 bp, Homo sapien
gactagtagattggccagagcttcg

SEQ ID NO: 3151467 - DNA, 25 bp, Homo sapien
agtgtcacttccaggaaggagggtg

SEQ ID NO: 3151468 - DNA, 25 bp, Homo sapien
aaggagggtgatgctagccatgtca

SEQ ID NO: 3151469 - DNA, 25 bp, Homo sapien
gatgctagccatgtcacgggtagtg

SEQ ID NO: 3151470 - DNA, 25 bp, Homo sapien
catgtcacgggtagtgtgtcccgca

SEQ ID NO: 3151471 - DNA, 25 bp, Homo sapien
ctatttacaaatgacagatgtgaaa

SEQ ID NO: 3151472 - DNA, 25 bp, Homo sapien
ttacaaatgacagatgtgaaactgg

SEQ ID NO: 3151473 - DNA, 25 bp, Homo sapien
tgacagatgtgaaactggggttcac

SEQ ID NO: 3151474 - DNA, 25 bp, Homo sapien
tttacaaatgacagatgtgaaactg

SEQ ID NO: 3151475 - DNA, 25 bp, Homo sapien
cttatgatggtttgattcatgattt

SEQ ID NO: 3151476 - DNA, 25 bp, Homo sapien
ccatatccacggacaaaccgtgact

SEQ ID NO: 3151477 - DNA, 25 bp, Homo sapien
cggacaaaccgtgacttatgatggt

SEQ ID NO: 3151478 - DNA, 25 bp, Homo sapien
attgatgacacccatatccacggac

SEQ ID NO: 3151479 - DNA, 25 bp, Homo sapien
gctgaggataatgaccacacatcac

SEQ ID NO: 3151480 - DNA, 25 bp, Homo sapien
ttgctgaggataatgaccacacatc

SEQ ID NO: 3151481 - DNA, 25 bp, Homo sapien
ctttccctggattagtttgctgagg

SEQ ID NO: 3151482 - DNA, 25 bp, Homo sapien
tgaggataatgaccacacatcacca

SEQ ID NO: 3151483 - DNA, 25 bp, Homo sapien
gccagccagggtgggtttaaatagc

SEQ ID NO: 3151484 - DNA, 25 bp, Homo sapien
gcggaaagggcggagcttcactcct

SEQ ID NO: 3151485 - DNA, 25 bp, Homo sapien
tagcctcgggcgcagcctagcagcg

SEQ ID NO: 3151486 - DNA, 25 bp, Homo sapien
cctagcagcggaaagggcggagctt

SEQ ID NO: 3151487 - DNA, 25 bp, Homo sapien
caagcccacgcagagtccgccaaac

SEQ ID NO: 3151488 - DNA, 25 bp, Homo sapien
cgcaagacgccgtgagctccaagcc

SEQ ID NO: 3151489 - DNA, 25 bp, Homo sapien
gcccacgcagagtccgccaaacgct

SEQ ID NO: 3151490 - DNA, 25 bp, Homo sapien
gcttccaagtcgcaagacgccgtga

SEQ ID NO: 3151491 - DNA, 25 bp, Homo sapien
gggatgatgtagagtacttccatat

SEQ ID NO: 3151492 - DNA, 25 bp, Homo sapien
taaagctgtggaattctgttgatga

SEQ ID NO: 3151493 - DNA, 25 bp, Homo sapien
gatgtagagtacttccatatccctg

SEQ ID NO: 3151494 - DNA, 25 bp, Homo sapien
aaagctgtggaattctgttgatgat

SEQ ID NO: 3151495 - DNA, 25 bp, Homo sapien
tgtataggtacaggtcatagggaga

SEQ ID NO: 3151496 - DNA, 25 bp, Homo sapien
cagtaaggtccgtgagtttgtaggt

SEQ ID NO: 3151497 - DNA, 25 bp, Homo sapien
cctgtgagtgtctagggttgtcctg

SEQ ID NO: 3151498 - DNA, 25 bp, Homo sapien
catagggagatactctcgtgaggcc

SEQ ID NO: 3151499 - DNA, 25 bp, Homo sapien
ctagtagattggccagggcttcgaa

SEQ ID NO: 3151500 - DNA, 25 bp, Homo sapien
gtgggctagtagattggccagggct

SEQ ID NO: 3151501 - DNA, 25 bp, Homo sapien
ggctagtagattggccagggcttcg

SEQ ID NO: 3151502 - DNA, 25 bp, Homo sapien
tgggctagtagattggccagggctt

SEQ ID NO: 3151503 - DNA, 25 bp, Homo sapien
ccctcacgggaaccgtggagtaatg

SEQ ID NO: 3151504 - DNA, 25 bp, Homo sapien
accgtggagtaatggccaggtaact

SEQ ID NO: 3151505 - DNA, 25 bp, Homo sapien
tgggtggtgatatcggccatgacgg

SEQ ID NO: 3151506 - DNA, 25 bp, Homo sapien
cggaatgcaggagcggctcttgtgc

SEQ ID NO: 3151507 - DNA, 25 bp, Homo sapien
aaggagggtgatgctagccatgtca

SEQ ID NO: 3151508 - DNA, 25 bp, Homo sapien
tagtgcgtcccgcagggacgccgac

SEQ ID NO: 3151509 - DNA, 25 bp, Homo sapien
ggaaggagggtgatgctagccatgt

SEQ ID NO: 3151510 - DNA, 25 bp, Homo sapien
atgtcaccggtagtgcgtcccgcag

SEQ ID NO: 3151511 - DNA, 25 bp, Homo sapien
ctatttccaaatgacagatgtgaaa

SEQ ID NO: 3151512 - DNA, 25 bp, Homo sapien
tccaaatgacagatgtgaaactggg

SEQ ID NO: 3151513 - DNA, 25 bp, Homo sapien
tatttccaaatgacagatgtgaaac

SEQ ID NO: 3151514 - DNA, 25 bp, Homo sapien
tttccaaatgacagatgtgaaactg

SEQ ID NO: 3151515 - DNA, 25 bp, Homo sapien
tatgtggcgcactctcatggagacc

SEQ ID NO: 3151516 - DNA, 25 bp, Homo sapien
gtactaaaagccactcaattcatga

SEQ ID NO: 3151517 - DNA, 25 bp, Homo sapien
tgaatgtgcacaaccacaggtgtac

SEQ ID NO: 3151518 - DNA, 25 bp, Homo sapien
gagtgaatatctgaaacggaggcag

SEQ ID NO: 3151519 - DNA, 25 bp, Homo sapien
accaatagatgttcacaactgatgg

SEQ ID NO: 3151520 - DNA, 25 bp, Homo sapien
ccaatagatgttcacaactgatgga

SEQ ID NO: 3151521 - DNA, 25 bp, Homo sapien
agccgtgaaagagagatagcggtaa

SEQ ID NO: 3151522 - DNA, 25 bp, Homo sapien
gatagcggtaaatagttacaataac

SEQ ID NO: 3151523 - DNA, 25 bp, Homo sapien
ggtgtacagcattactgtatacaat

SEQ ID NO: 3151524 - DNA, 25 bp, Homo sapien
gttaatggtgtacagcattactgta

SEQ ID NO: 3151525 - DNA, 25 bp, Homo sapien
gcattactgtatacaatggaattga

SEQ ID NO: 3151526 - DNA, 25 bp, Homo sapien
tacagcattactgtatacaatggaa

SEQ ID NO: 3151527 - DNA, 25 bp, Homo sapien
ttttcttaacgctctgcctcccgaa

SEQ ID NO: 3151528 - DNA, 25 bp, Homo sapien
tgtttttcttaacgctctgcctccc

SEQ ID NO: 3151529 - DNA, 25 bp, Homo sapien
agctgtttttcttaacgctctgcct

SEQ ID NO: 3151530 - DNA, 25 bp, Homo sapien
tcttaacgctctgcctcccgaaagg

SEQ ID NO: 3151531 - DNA, 25 bp, Homo sapien
tcgggcgcagcctagcagcagaaag

SEQ ID NO: 3151532 - DNA, 25 bp, Homo sapien
tgggtttaaattgcctcgggcgcag

SEQ ID NO: 3151533 - DNA, 25 bp, Homo sapien
tccgcgaagatctgagtataggcca

SEQ ID NO: 3151534 - DNA, 25 bp, Homo sapien
ccgcgaagatctgagtataggccag

SEQ ID NO: 3151535 - DNA, 25 bp, Homo sapien
gccctgcgggatgatgtagagtact

SEQ ID NO: 3151536 - DNA, 25 bp, Homo sapien
gtaaagctgtggaattctgttgatg

SEQ ID NO: 3151537 - DNA, 25 bp, Homo sapien
gtacttccacatccctggtgaggag

SEQ ID NO: 3151538 - DNA, 25 bp, Homo sapien
aaagctgtggaattctgttgatgat

SEQ ID NO: 3151539 - DNA, 25 bp, Homo sapien
accggggagtaactgagtgaaactg

SEQ ID NO: 3151540 - DNA, 25 bp, Homo sapien
tgagagagactggagagtaattgag

SEQ ID NO: 3151541 - DNA, 25 bp, Homo sapien
tgactgcagctgaaatgtgggcatg

SEQ ID NO: 3151542 - DNA, 25 bp, Homo sapien
agagactggagagtaattgagtgaa

SEQ ID NO: 3151543 - DNA, 25 bp, Homo sapien
agtagctgtcaggccctcggagtgt

SEQ ID NO: 3151544 - DNA, 25 bp, Homo sapien
ggggagtagctgtcaggccctcgga

SEQ ID NO: 3151545 - DNA, 25 bp, Homo sapien
ggagtagctgtcaggccctcggagt

SEQ ID NO: 3151546 - DNA, 25 bp, Homo sapien
aacggggagtagctgtcaggccctc

SEQ ID NO: 3151547 - DNA, 25 bp, Homo sapien
gtgggctactagactggccagggct

SEQ ID NO: 3151548 - DNA, 25 bp, Homo sapien
ctactagactggccagggcttcgta

SEQ ID NO: 3151549 - DNA, 25 bp, Homo sapien
ggctactagactggccagggcttcg

SEQ ID NO: 3151550 - DNA, 25 bp, Homo sapien
tgggctactagactggccagggctt

SEQ ID NO: 3151551 - DNA, 25 bp, Homo sapien
cacgggaaccgtggagtaatggcca

SEQ ID NO: 3151552 - DNA, 25 bp, Homo sapien
atcggaaatgacaggggcctcttct

SEQ ID NO: 3151553 - DNA, 25 bp, Homo sapien
cggaatgcaggagcgggtcttgtgc

SEQ ID NO: 3151554 - DNA, 25 bp, Homo sapien
atagactgggtggtgatatcggaaa

SEQ ID NO: 3151555 - DNA, 25 bp, Homo sapien
tagtgtgtcccgcagggacgccgac

SEQ ID NO: 3151556 - DNA, 25 bp, Homo sapien
gtagtgtgtcccgcagggacgccga

SEQ ID NO: 3151557 - DNA, 25 bp, Homo sapien
ggtagtgtgtcccgcagggacgccg

SEQ ID NO: 3151558 - DNA, 25 bp, Homo sapien
cggtagtgtgtcccgcagggacgcc

SEQ ID NO: 3151559 - DNA, 25 bp, Homo sapien
agtgtcactgccaggaaggagggtg

SEQ ID NO: 3151560 - DNA, 25 bp, Homo sapien
aggaaggagggtgatgctagccatg

SEQ ID NO: 3151561 - DNA, 25 bp, Homo sapien
atcaacagtgtcactgccaggaagg

SEQ ID NO: 3151562 - DNA, 25 bp, Homo sapien
aaggagggtgatgctagccatgtca

SEQ ID NO: 3151563 - DNA, 25 bp, Homo sapien
gatgacacccatatccacggacaaa

SEQ ID NO: 3151564 - DNA, 25 bp, Homo sapien
tgttcacaactgatggagagccgtg

SEQ ID NO: 3151565 - DNA, 25 bp, Homo sapien
tacactgggtttatgagtatgcgac

SEQ ID NO: 3151566 - DNA, 25 bp, Homo sapien
tatgcgaccctatactccagaaaca

SEQ ID NO: 3151567 - DNA, 25 bp, Homo sapien
tgcactgcactaaagccattagatc

SEQ ID NO: 3151568 - DNA, 25 bp, Homo sapien
tgcactaaagccattagatcagttc

SEQ ID NO: 3151569 - DNA, 25 bp, Homo sapien
gccattagatcagttcttcagtgag

SEQ ID NO: 3151570 - DNA, 25 bp, Homo sapien
aaagccattagatcagttcttcagt

SEQ ID NO: 3151571 - DNA, 25 bp, Homo sapien
cagggtgggtttaaatagcctcctg

SEQ ID NO: 3151572 - DNA, 25 bp, Homo sapien
gccagccagggtgggtttaaatagc

SEQ ID NO: 3151573 - DNA, 25 bp, Homo sapien
tgggtttaaatagcctcctgcgcag

SEQ ID NO: 3151574 - DNA, 25 bp, Homo sapien
cagccagggtgggtttaaatagcct

SEQ ID NO: 3151575 - DNA, 25 bp, Homo sapien
cgccgtgagctccaagtcgacgcag

SEQ ID NO: 3151576 - DNA, 25 bp, Homo sapien
gcaagacgccgtgagctccaagtcg

SEQ ID NO: 3151577 - DNA, 25 bp, Homo sapien
acgcagagtccgccaaaggctccgg

SEQ ID NO: 3151578 - DNA, 25 bp, Homo sapien
ggaatccgcttccaagtcgcaagac

SEQ ID NO: 3151579 - DNA, 25 bp, Homo sapien
gtaaagctgtggaattctgttgatg

SEQ ID NO: 3151580 - DNA, 25 bp, Homo sapien
aaagctgtggaattctgttgatgat

SEQ ID NO: 3151581 - DNA, 25 bp, Homo sapien
gccctgcgggatgatgtagagtact

SEQ ID NO: 3151582 - DNA, 25 bp, Homo sapien
gtacttccacatccctggtgaggag

SEQ ID NO: 3151583 - DNA, 25 bp, Homo sapien
tgggctagtagattggccaggactt

SEQ ID NO: 3151584 - DNA, 25 bp, Homo sapien
ctagtagattggccaggacttcgaa

SEQ ID NO: 3151585 - DNA, 25 bp, Homo sapien
ggctagtagattggccaggacttcg

SEQ ID NO: 3151586 - DNA, 25 bp, Homo sapien
gtgggctagtagattggccaggact

SEQ ID NO: 3151587 - DNA, 25 bp, Homo sapien
cacgggaaccgtggagtaatggcca

SEQ ID NO: 3151588 - DNA, 25 bp, Homo sapien
ccctcacgggaaccgtggagtaatg

SEQ ID NO: 3151589 - DNA, 25 bp, Homo sapien
accgtggagtaatggccaggtaact

SEQ ID NO: 3151590 - DNA, 25 bp, Homo sapien
ctgctggagcgtcttgccagcatgg

SEQ ID NO: 3151591 - DNA, 25 bp, Homo sapien
ctagccatgtcacgggcagtgtgtc

SEQ ID NO: 3151592 - DNA, 25 bp, Homo sapien
gcagtgtgtcccacagggacgccga

SEQ ID NO: 3151593 - DNA, 25 bp, Homo sapien
aaggagggtgatgctagccatgtca

SEQ ID NO: 3151594 - DNA, 25 bp, Homo sapien
cagtgtgtcccacagggacgccgac

SEQ ID NO: 3151595 - DNA, 25 bp, Homo sapien
gcttccctaggaacagctgatcagt

SEQ ID NO: 3151596 - DNA, 25 bp, Homo sapien
taacaattacccagagtcttgtggc

SEQ ID NO: 3151597 - DNA, 25 bp, Homo sapien
gtctgattttgcctatgtcacccag

SEQ ID NO: 3151598 - DNA, 25 bp, Homo sapien
gaaattgtaagaagacacccttgcc

SEQ ID NO: 3151599 - DNA, 25 bp, Homo sapien
tacctctgttgtaggcaaccaccat

SEQ ID NO: 3151600 - DNA, 25 bp, Homo sapien
catgtacatcaaaaattgagagttg

SEQ ID NO: 3151601 - DNA, 25 bp, Homo sapien
tatacaatacgtagtcctctgtgac

SEQ ID NO: 3151602 - DNA, 25 bp, Homo sapien
gagttgagaaaattatcttgatcct

SEQ ID NO: 3151603 - DNA, 25 bp, Homo sapien
gcattccggtatcaacaagagctta

SEQ ID NO: 3151604 - DNA, 25 bp, Homo sapien
caaggctcaattccgaactgttgaa

SEQ ID NO: 3151605 - DNA, 25 bp, Homo sapien
catgaaaatccgtgcattgaacagc

SEQ ID NO: 3151606 - DNA, 25 bp, Homo sapien
tagaaactctccaagcgacctaagc

SEQ ID NO: 3151607 - DNA, 25 bp, Homo sapien
caaggtaacatgaagtattgggtca

SEQ ID NO: 3151608 - DNA, 25 bp, Homo sapien
taaactagtgttaaaggagtcatca

SEQ ID NO: 3151609 - DNA, 25 bp, Homo sapien
tttaacaacaatggccactgagtta

SEQ ID NO: 3151610 - DNA, 25 bp, Homo sapien
caaatgacatgacctttcagactat

SEQ ID NO: 3151611 - DNA, 25 bp, Homo sapien
caactgatggagagccgtgaaagag

SEQ ID NO: 3151612 - DNA, 25 bp, Homo sapien
tacactgggtttatgagtatgcgac

SEQ ID NO: 3151613 - DNA, 25 bp, Homo sapien
tgatgacacccatatccacggacaa

SEQ ID NO: 3151614 - DNA, 25 bp, Homo sapien
tatgcgaccctatactccagaaaca

SEQ ID NO: 3151615 - DNA, 25 bp, Homo sapien
tcatgcactgtactaaagccattag

SEQ ID NO: 3151616 - DNA, 25 bp, Homo sapien
aaacatctcacataatcatgcactg

SEQ ID NO: 3151617 - DNA, 25 bp, Homo sapien
cacacaatggttcctactaagtgaa

SEQ ID NO: 3151618 - DNA, 25 bp, Homo sapien
gccattagatcagttcttcagtcag

SEQ ID NO: 3151619 - DNA, 25 bp, Homo sapien
agctgtttttcttaacgctctgcct

SEQ ID NO: 3151620 - DNA, 25 bp, Homo sapien
tcttaacgctctgcctcccgaaagg

SEQ ID NO: 3151621 - DNA, 25 bp, Homo sapien
tgtttttcttaacgctctgcctccc

SEQ ID NO: 3151622 - DNA, 25 bp, Homo sapien
ttttcttaacgctctgcctcccgaa

SEQ ID NO: 3151623 - DNA, 25 bp, Homo sapien
cttatggcacctgggttgagaacca

SEQ ID NO: 3151624 - DNA, 25 bp, Homo sapien
ttgagaaccatgatttgaaccaaac

SEQ ID NO: 3151625 - DNA, 25 bp, Homo sapien
gagaaccatgatttgaaccaaacat

SEQ ID NO: 3151626 - DNA, 25 bp, Homo sapien
atggcacctgggttgagaaccatga

SEQ ID NO: 3151627 - DNA, 25 bp, Homo sapien
cttgccacaatcaaaccccggagat

SEQ ID NO: 3151628 - DNA, 25 bp, Homo sapien
caggctacacctcgtaggaaactgt

SEQ ID NO: 3151629 - DNA, 25 bp, Homo sapien
gatttcatgcgccaccttttggaca

SEQ ID NO: 3151630 - DNA, 25 bp, Homo sapien
ccccggagatccacagatctgtgtt

SEQ ID NO: 3151631 - DNA, 25 bp, Homo sapien
ggccgctgatccgctccgcgaagat

SEQ ID NO: 3151632 - DNA, 25 bp, Homo sapien
tgagctccaagtccacgcagagtcc

SEQ ID NO: 3151633 - DNA, 25 bp, Homo sapien
caagtcgcaagacgccgtgagctcc

SEQ ID NO: 3151634 - DNA, 25 bp, Homo sapien
atccgcttccaagtcgcaagacgcc

SEQ ID NO: 3151635 - DNA, 25 bp, Homo sapien
gccctgcgggatgatgtagagtact

SEQ ID NO: 3151636 - DNA, 25 bp, Homo sapien
aaagctgtggaattctgttgatgat

SEQ ID NO: 3151637 - DNA, 25 bp, Homo sapien
cgggatgatgtagagtacttccaca

SEQ ID NO: 3151638 - DNA, 25 bp, Homo sapien
gaggagctgcccgttgggtctgagt

SEQ ID NO: 3151639 - DNA, 25 bp, Homo sapien
agagtaattgagtgaaattggtgag

SEQ ID NO: 3151640 - DNA, 25 bp, Homo sapien
gagagtaattgagtgaaattggtga

SEQ ID NO: 3151641 - DNA, 25 bp, Homo sapien
agactggagagtaattgagtgaaat

SEQ ID NO: 3151642 - DNA, 25 bp, Homo sapien
tggagagtaattgagtgaaattggt

SEQ ID NO: 3151643 - DNA, 25 bp, Homo sapien
taacggggagtagctgtcaggccct

SEQ ID NO: 3151644 - DNA, 25 bp, Homo sapien
tgaaggacaataacggggagtagct

SEQ ID NO: 3151645 - DNA, 25 bp, Homo sapien
ggagtgtctgagtgtaagtggagat

SEQ ID NO: 3151646 - DNA, 25 bp, Homo sapien
tgtctgagtgtaagtggagatgggt

SEQ ID NO: 3151647 - DNA, 25 bp, Homo sapien
gctagtagactggccagggattcga

SEQ ID NO: 3151648 - DNA, 25 bp, Homo sapien
ctagtagactggccagggattcgaa

SEQ ID NO: 3151649 - DNA, 25 bp, Homo sapien
gtgggctagtagactggccagggat

SEQ ID NO: 3151650 - DNA, 25 bp, Homo sapien
gggctagtagactggccagggattc

SEQ ID NO: 3151651 - DNA, 25 bp, Homo sapien
tcacgggaaccgtggagtaatgacc

SEQ ID NO: 3151652 - DNA, 25 bp, Homo sapien
cggctcttgtgcggcttggtgtgga

SEQ ID NO: 3151653 - DNA, 25 bp, Homo sapien
agcaggaggtccccgctgcagagct

SEQ ID NO: 3151654 - DNA, 25 bp, Homo sapien
actgggtggtaatatcggccatgac

SEQ ID NO: 3151655 - DNA, 25 bp, Homo sapien
tagtgtgtcccgcagggacgccgac

SEQ ID NO: 3151656 - DNA, 25 bp, Homo sapien
gtagtgtgtcccgcagggacgccga

SEQ ID NO: 3151657 - DNA, 25 bp, Homo sapien
ggtagtgtgtcccgcagggacgccg

SEQ ID NO: 3151658 - DNA, 25 bp, Homo sapien
cggtagtgtgtcccgcagggacgcc

SEQ ID NO: 3151659 - DNA, 25 bp, Homo sapien
aggaaggagggtgatgctagccacg

SEQ ID NO: 3151660 - DNA, 25 bp, Homo sapien
caggaaggagggtgatgctagccac

SEQ ID NO: 3151661 - DNA, 25 bp, Homo sapien
cgccaggaaggagggtgatgctagc

SEQ ID NO: 3151662 - DNA, 25 bp, Homo sapien
ccaggaaggagggtgatgctagcca

SEQ ID NO: 3151663 - DNA, 25 bp, Homo sapien
gagagagaaaaaggtgagtaaatac

SEQ ID NO: 3151664 - DNA, 25 bp, Homo sapien
ggagaccacggcagacatagtgaga

SEQ ID NO: 3151665 - DNA, 25 bp, Homo sapien
tggagaccacggcagacatagtgag

SEQ ID NO: 3151666 - DNA, 25 bp, Homo sapien
tcatggagaccacggcagacatagt

SEQ ID NO: 3151667 - DNA, 25 bp, Homo sapien
cacacagagggcgacggcagcttgg

SEQ ID NO: 3151668 - DNA, 25 bp, Homo sapien
ctgcacacagagggcgacggcagct

SEQ ID NO: 3151669 - DNA, 25 bp, Homo sapien
agcttgggcgcccagatggcggagc

SEQ ID NO: 3151670 - DNA, 25 bp, Homo sapien
cacagagggcgacggcagcttgggc

SEQ ID NO: 3151671 - DNA, 25 bp, Homo sapien
tgcgagcgggctcaggggttgccag

SEQ ID NO: 3151672 - DNA, 25 bp, Homo sapien
gagtgcgagcgggctcaggggttgc

SEQ ID NO: 3151673 - DNA, 25 bp, Homo sapien
ctaggagtgcgagcgggctcagggg

SEQ ID NO: 3151674 - DNA, 25 bp, Homo sapien
cgagcgggctcaggggttgccaggc

SEQ ID NO: 3151675 - DNA, 25 bp, Homo sapien
agctgctgccgcagggcagaatgcc

SEQ ID NO: 3151676 - DNA, 25 bp, Homo sapien
agatcggagccgtttgtatgggcac

SEQ ID NO: 3151677 - DNA, 25 bp, Homo sapien
gagccgtttgtatgggcactcggca

SEQ ID NO: 3151678 - DNA, 25 bp, Homo sapien
actgggacacgtggccctgcttctg

SEQ ID NO: 3151679 - DNA, 25 bp, Homo sapien
tgtggttagtgtgggcgagctcggg

SEQ ID NO: 3151680 - DNA, 25 bp, Homo sapien
ttagtgtgggcgagctcgggagttg

SEQ ID NO: 3151681 - DNA, 25 bp, Homo sapien
cctgcttccgagatgtggttagtgt

SEQ ID NO: 3151682 - DNA, 25 bp, Homo sapien
gcttccgagatgtggttagtgtggg

SEQ ID NO: 3151683 - DNA, 25 bp, Homo sapien
ctccacggaatcatcttcaacagac

SEQ ID NO: 3151684 - DNA, 25 bp, Homo sapien
tgctctccacggaatcatcttcaac

SEQ ID NO: 3151685 - DNA, 25 bp, Homo sapien
ctcatcttccatgggcagggtggaa

SEQ ID NO: 3151686 - DNA, 25 bp, Homo sapien
ccatcctgctctccacggaatcatc

SEQ ID NO: 3151687 - DNA, 25 bp, Homo sapien
atacggagctgtgagagttttttac

SEQ ID NO: 3151688 - DNA, 25 bp, Homo sapien
tacggagctgtgagagttttttact

SEQ ID NO: 3151689 - DNA, 25 bp, Homo sapien
acggagctgtgagagttttttactg

SEQ ID NO: 3151690 - DNA, 25 bp, Homo sapien
cggagctgtgagagttttttactgg

SEQ ID NO: 3151691 - DNA, 25 bp, Homo sapien
tagaaatccagtgtcctaaactcac

SEQ ID NO: 3151692 - DNA, 25 bp, Homo sapien
gtggtagaaatccagtgtcctaaac

SEQ ID NO: 3151693 - DNA, 25 bp, Homo sapien
tgagtggtagaaatccagtgtccta

SEQ ID NO: 3151694 - DNA, 25 bp, Homo sapien
ggtagaaatccagtgtcctaaactc

SEQ ID NO: 3151695 - DNA, 25 bp, Homo sapien
accatcctgctctccaaggactcct

SEQ ID NO: 3151696 - DNA, 25 bp, Homo sapien
tcaatgggcagggtggaaactgcaa

SEQ ID NO: 3151697 - DNA, 25 bp, Homo sapien
catggagtcgagagctgacaggaat

SEQ ID NO: 3151698 - DNA, 25 bp, Homo sapien
atcttcaacagactcctcatcttca

SEQ ID NO: 3151699 - DNA, 25 bp, Homo sapien
ctacagaatgtgagaacagaaggtc

SEQ ID NO: 3151700 - DNA, 25 bp, Homo sapien
aactacagaatgtgagaacagaagg

SEQ ID NO: 3151701 - DNA, 25 bp, Homo sapien
tacagaatgtgagaacagaaggtct

SEQ ID NO: 3151702 - DNA, 25 bp, Homo sapien
agaatgtgagaacagaaggtctgac

SEQ ID NO: 3151703 - DNA, 25 bp, Homo sapien
tccagcaacacaaacccaatcgcgc

SEQ ID NO: 3151704 - DNA, 25 bp, Homo sapien
ctccagcaacacaaacccaatcgcg

SEQ ID NO: 3151705 - DNA, 25 bp, Homo sapien
ccagcaacacaaacccaatcgcgca

SEQ ID NO: 3151706 - DNA, 25 bp, Homo sapien
cagcaacacaaacccaatcgcgcag

SEQ ID NO: 3151707 - DNA, 25 bp, Homo sapien
aatagtatagcttgataatgaagta

SEQ ID NO: 3151708 - DNA, 25 bp, Homo sapien
tagtatagcttgataatgaagtagg

SEQ ID NO: 3151709 - DNA, 25 bp, Homo sapien
gataatgaagtaggctgagaataat

SEQ ID NO: 3151710 - DNA, 25 bp, Homo sapien
aaaatagtatagcttgataatgaag

SEQ ID NO: 3151711 - DNA, 25 bp, Homo sapien
gttcactaagttctacgatactgtt

SEQ ID NO: 3151712 - DNA, 25 bp, Homo sapien
tgtagttcactaagttctacgatac

SEQ ID NO: 3151713 - DNA, 25 bp, Homo sapien
ctgatttaaacaagtaacatgtaaa

SEQ ID NO: 3151714 - DNA, 25 bp, Homo sapien
acaagtaacatgtaaattgatttct

SEQ ID NO: 3151715 - DNA, 25 bp, Homo sapien
aattgttttttatattgtgcttgta

SEQ ID NO: 3151716 - DNA, 25 bp, Homo sapien
tgaagccgtattatccttgtttaac

SEQ ID NO: 3151717 - DNA, 25 bp, Homo sapien
tctacatctttaagtgtgagttcct

SEQ ID NO: 3151718 - DNA, 25 bp, Homo sapien
gagttccttcttatttagtgaagcc

SEQ ID NO: 3151719 - DNA, 25 bp, Homo sapien
ccgtggattctagagaagaaagtag

SEQ ID NO: 3151720 - DNA, 25 bp, Homo sapien
aagaaagtagatgggagcaagtgtc

SEQ ID NO: 3151721 - DNA, 25 bp, Homo sapien
gagcaagtgtccaacacagcagcag

SEQ ID NO: 3151722 - DNA, 25 bp, Homo sapien
aaagtagatgggagcaagtgtccaa

SEQ ID NO: 3151723 - DNA, 25 bp, Homo sapien
ccagccaccctctagggtgcccaga

SEQ ID NO: 3151724 - DNA, 25 bp, Homo sapien
ctctttccagccaccctctagggtg

SEQ ID NO: 3151725 - DNA, 25 bp, Homo sapien
ttccagccaccctctagggtgccca

SEQ ID NO: 3151726 - DNA, 25 bp, Homo sapien
ccaccctctagggtgcccagactca

SEQ ID NO: 3151727 - DNA, 25 bp, Homo sapien
cacacaggttgggtgagaagatgta

SEQ ID NO: 3151728 - DNA, 25 bp, Homo sapien
acacaggttgggtgagaagatgtat

SEQ ID NO: 3151729 - DNA, 25 bp, Homo sapien
gtgcctgcacccagatgctggttgt

SEQ ID NO: 3151730 - DNA, 25 bp, Homo sapien
tgctgggggggtacatcaggaagtg

SEQ ID NO: 3151731 - DNA, 25 bp, Homo sapien
cctgcacccagatgctggttgtgtg

SEQ ID NO: 3151732 - DNA, 25 bp, Homo sapien
cccagatgctggttgtgtggttcat

SEQ ID NO: 3151733 - DNA, 25 bp, Homo sapien
cacttgaagccgtcaatcttgctct

SEQ ID NO: 3151734 - DNA, 25 bp, Homo sapien
tgagagccctgttgtccatcttctt

SEQ ID NO: 3151735 - DNA, 25 bp, Homo sapien
gaagcacttgaagccgtcaatcttg

SEQ ID NO: 3151736 - DNA, 25 bp, Homo sapien
gtgaagcacttgaagccgtcaatct

SEQ ID NO: 3151737 - DNA, 25 bp, Homo sapien
tgtggaagatgctctttcttaaagc

SEQ ID NO: 3151738 - DNA, 25 bp, Homo sapien
ctcactgacaatgtggaagatgctc

SEQ ID NO: 3151739 - DNA, 25 bp, Homo sapien
tgacaatgtggaagatgctctttct

SEQ ID NO: 3151740 - DNA, 25 bp, Homo sapien
cactgacaatgtggaagatgctctt

SEQ ID NO: 3151741 - DNA, 25 bp, Homo sapien
tccaagatgttggtcttgtgtacct

SEQ ID NO: 3151742 - DNA, 25 bp, Homo sapien
aagatgttggtcttgtgtacctgag

SEQ ID NO: 3151743 - DNA, 25 bp, Homo sapien
atgtccaagatgttggtcttgtgta

SEQ ID NO: 3151744 - DNA, 25 bp, Homo sapien
caagatgttggtcttgtgtacctga

SEQ ID NO: 3151745 - DNA, 25 bp, Homo sapien
gctgtccacaggctccttgataaca

SEQ ID NO: 3151746 - DNA, 25 bp, Homo sapien
cagctgtccacaggctccttgataa

SEQ ID NO: 3151747 - DNA, 25 bp, Homo sapien
ccacaggctccttgataacatgcat

SEQ ID NO: 3151748 - DNA, 25 bp, Homo sapien
tgtccacaggctccttgataacatg

SEQ ID NO: 3151749 - DNA, 25 bp, Homo sapien
tgttgcactgacttgtgcatgctgg

SEQ ID NO: 3151750 - DNA, 25 bp, Homo sapien
accagccacgtttgtaagggtgtgc

SEQ ID NO: 3151751 - DNA, 25 bp, Homo sapien
tgcatgctgggcaaagccaagctgg

SEQ ID NO: 3151752 - DNA, 25 bp, Homo sapien
gtatggctccatttgtgtcacagtt

SEQ ID NO: 3151753 - DNA, 25 bp, Homo sapien
tcagacgtggtacatcagttcttct

SEQ ID NO: 3151754 - DNA, 25 bp, Homo sapien
cagacgtggtacatcagttcttcta

SEQ ID NO: 3151755 - DNA, 25 bp, Homo sapien
gacgtggtacatcagttcttctacc

SEQ ID NO: 3151756 - DNA, 25 bp, Homo sapien
agacgtggtacatcagttcttctac

SEQ ID NO: 3151757 - DNA, 25 bp, Homo sapien
ggtccttcctggacggattggcaag

SEQ ID NO: 3151758 - DNA, 25 bp, Homo sapien
ccttcctggacggattggcaaggag

SEQ ID NO: 3151759 - DNA, 25 bp, Homo sapien
tcctggacggattggcaaggagctc

SEQ ID NO: 3151760 - DNA, 25 bp, Homo sapien
ggagctcactgatgttcttgaaggc

SEQ ID NO: 3151761 - DNA, 25 bp, Homo sapien
tcctgttcctgtgataatgatgcca

SEQ ID NO: 3151762 - DNA, 25 bp, Homo sapien
ataatgatgccatcagcctctgtac

SEQ ID NO: 3151763 - DNA, 25 bp, Homo sapien
gtgataatgatgccatcagcctctg

SEQ ID NO: 3151764 - DNA, 25 bp, Homo sapien
cctgttcctgtgataatgatgccat

SEQ ID NO: 3151765 - DNA, 25 bp, Homo sapien
ctgaccaggtctccactgatcaagc

SEQ ID NO: 3151766 - DNA, 25 bp, Homo sapien
aggtctccactgatcaagccccaca

SEQ ID NO: 3151767 - DNA, 25 bp, Homo sapien
aggccagcactaagccccagctgac

SEQ ID NO: 3151768 - DNA, 25 bp, Homo sapien
cttgtcaccggtgccgcagcccatg

SEQ ID NO: 3151769 - DNA, 25 bp, Homo sapien
ctaggtcccatgtgcccagtcctcc

SEQ ID NO: 3151770 - DNA, 25 bp, Homo sapien
cccagtcctccactgaatagcaccc

SEQ ID NO: 3151771 - DNA, 25 bp, Homo sapien
taggtcccatgtgcccagtcctcca

SEQ ID NO: 3151772 - DNA, 25 bp, Homo sapien
agtcctccactgaatagcacccctt

SEQ ID NO: 3151773 - DNA, 25 bp, Homo sapien
tacagattaggtcccgctgacaagg

SEQ ID NO: 3151774 - DNA, 25 bp, Homo sapien
caggtcaccctgtagaacagtgcta

SEQ ID NO: 3151775 - DNA, 25 bp, Homo sapien
gttgccaccgatcaggcccctaata

SEQ ID NO: 3151776 - DNA, 25 bp, Homo sapien
taaccaggactaaggtcaccagatg

SEQ ID NO: 3151777 - DNA, 25 bp, Homo sapien
ggagaagcattcagagcacagcagg

SEQ ID NO: 3151778 - DNA, 25 bp, Homo sapien
ggataagcattcagaccctcgtagc

SEQ ID NO: 3151779 - DNA, 25 bp, Homo sapien
ataagcattcagaccctcgtagcag

SEQ ID NO: 3151780 - DNA, 25 bp, Homo sapien
atgtgagggagaagcattcagagca

SEQ ID NO: 3151781 - DNA, 25 bp, Homo sapien
acagtgttctggaatactaggtgag

SEQ ID NO: 3151782 - DNA, 25 bp, Homo sapien
tggaatactaggtgagggagaaata

SEQ ID NO: 3151783 - DNA, 25 bp, Homo sapien
ggaccaacattcagacccttgcaac

SEQ ID NO: 3151784 - DNA, 25 bp, Homo sapien
gttctggaatcctatatgacggacc

SEQ ID NO: 3151785 - DNA, 25 bp, Homo sapien
ggaccaacattcagacccttgcaac

SEQ ID NO: 3151786 - DNA, 25 bp, Homo sapien
tggaatactaggtgagggagaaata

SEQ ID NO: 3151787 - DNA, 25 bp, Homo sapien
acagtgttctggaatactaggtgag

SEQ ID NO: 3151788 - DNA, 25 bp, Homo sapien
gttctggaatcctatatgacggacc

SEQ ID NO: 3151789 - DNA, 25 bp, Homo sapien
acaacgactatagtgacagcagcag

SEQ ID NO: 3151790 - DNA, 25 bp, Homo sapien
cactcacaacgactatagtgacagc

SEQ ID NO: 3151791 - DNA, 25 bp, Homo sapien
agtgtttggtgaaggacaaacactc

SEQ ID NO: 3151792 - DNA, 25 bp, Homo sapien
cactcagacactcacaacgactata

SEQ ID NO: 3151793 - DNA, 25 bp, Homo sapien
ccaagtgtaggttgttggcatttat

SEQ ID NO: 3151794 - DNA, 25 bp, Homo sapien
tcagtgggtacagaaacttaggttg

SEQ ID NO: 3151795 - DNA, 25 bp, Homo sapien
tatgtccaagtgtaggttgttggca

SEQ ID NO: 3151796 - DNA, 25 bp, Homo sapien
gtgtctctgtaggtaaggtgttttc

SEQ ID NO: 3151797 - DNA, 25 bp, Homo sapien
gactacctgcttaacaaagaacaca

SEQ ID NO: 3151798 - DNA, 25 bp, Homo sapien
gatacattcataccattagcattca

SEQ ID NO: 3151799 - DNA, 25 bp, Homo sapien
tatcccacaaataagaccacctgct

SEQ ID NO: 3151800 - DNA, 25 bp, Homo sapien
tttccctgtctttcttagcatgtac

SEQ ID NO: 3151801 - DNA, 25 bp, Homo sapien
ttccttcttcaggtgtaatgttagg

SEQ ID NO: 3151802 - DNA, 25 bp, Homo sapien
catctgcagctgtaaacttcccttt

SEQ ID NO: 3151803 - DNA, 25 bp, Homo sapien
tttttaatttaagcaccggcagcta

SEQ ID NO: 3151804 - DNA, 25 bp, Homo sapien
ccggcagctataagcttccctttag

SEQ ID NO: 3151805 - DNA, 25 bp, Homo sapien
ggagagataggaggtgccctagtgt

SEQ ID NO: 3151806 - DNA, 25 bp, Homo sapien
gaggtgccctagtgtgaaaatgtgt

SEQ ID NO: 3151807 - DNA, 25 bp, Homo sapien
tgttcacttcttatgagatacatga

SEQ ID NO: 3151808 - DNA, 25 bp, Homo sapien
ctacagtttgccttttaccctgttg

SEQ ID NO: 3151809 - DNA, 25 bp, Homo sapien
cagacactaggctttgctttagacc

SEQ ID NO: 3151810 - DNA, 25 bp, Homo sapien
ttcttcagacactaggctttgcttt

SEQ ID NO: 3151811 - DNA, 25 bp, Homo sapien
gacactaggctttgctttagaccat

SEQ ID NO: 3151812 - DNA, 25 bp, Homo sapien
actaggctttgctttagaccattca

SEQ ID NO: 3151813 - DNA, 25 bp, Homo sapien
gcagatccctgagatggtgcagtgc

SEQ ID NO: 3151814 - DNA, 25 bp, Homo sapien
ccctgagatggtgcagtgccctttc

SEQ ID NO: 3151815 - DNA, 25 bp, Homo sapien
cccagatgtctccttaggcagatcc

SEQ ID NO: 3151816 - DNA, 25 bp, Homo sapien
agtttccaatgacattttctcaccg

SEQ ID NO: 3151817 - DNA, 25 bp, Homo sapien
atcaggttgttgtgacctatcatct

SEQ ID NO: 3151818 - DNA, 25 bp, Homo sapien
aatcaggttgttgtgacctatcatc

SEQ ID NO: 3151819 - DNA, 25 bp, Homo sapien
tcaggttgttgtgacctatcatctg

SEQ ID NO: 3151820 - DNA, 25 bp, Homo sapien
taacgtaaaatattaactatgctcc

SEQ ID NO: 3151821 - DNA, 25 bp, Homo sapien
cagttctaactgtttatggactaaa

SEQ ID NO: 3151822 - DNA, 25 bp, Homo sapien
gatcaaggttctacttgtgatctct

SEQ ID NO: 3151823 - DNA, 25 bp, Homo sapien
gtgatctctcatgagtttttcaagg

SEQ ID NO: 3151824 - DNA, 25 bp, Homo sapien
tgtgcccacattgccgaggctgttc

SEQ ID NO: 3151825 - DNA, 25 bp, Homo sapien
ccacattgccgaggctgttcgagct

SEQ ID NO: 3151826 - DNA, 25 bp, Homo sapien
gttagctgtgcccacattgccgagg

SEQ ID NO: 3151827 - DNA, 25 bp, Homo sapien
tagctgtgcccacattgccgaggct

SEQ ID NO: 3151828 - DNA, 25 bp, Homo sapien
aaagggcacaagtgttacagaatcc

SEQ ID NO: 3151829 - DNA, 25 bp, Homo sapien
aagggcacaagtgttacagaatcct

SEQ ID NO: 3151830 - DNA, 25 bp, Homo sapien
caaagggcacaagtgttacagaatc

SEQ ID NO: 3151831 - DNA, 25 bp, Homo sapien
agggcacaagtgttacagaatcctg

SEQ ID NO: 3151832 - DNA, 25 bp, Homo sapien
ctgtttcaggtccttccccagcttg

SEQ ID NO: 3151833 - DNA, 25 bp, Homo sapien
ctccggttcctgtttccatttcagg

SEQ ID NO: 3151834 - DNA, 25 bp, Homo sapien
ggtctttcctctgcttgcatccttc

SEQ ID NO: 3151835 - DNA, 25 bp, Homo sapien
gctgtccccgatcccgcccttctgg

SEQ ID NO: 3151836 - DNA, 25 bp, Homo sapien
cttgactgaggctccccacagtcat

SEQ ID NO: 3151837 - DNA, 25 bp, Homo sapien
ctccattaagccttccttgactgag

SEQ ID NO: 3151838 - DNA, 25 bp, Homo sapien
ttccttgactgaggctccccacagt

SEQ ID NO: 3151839 - DNA, 25 bp, Homo sapien
tccattaagccttccttgactgagg

SEQ ID NO: 3151840 - DNA, 25 bp, Homo sapien
gatccttgtggatgattggcttgct

SEQ ID NO: 3151841 - DNA, 25 bp, Homo sapien
tggatgattggcttgctgttctcgg

SEQ ID NO: 3151842 - DNA, 25 bp, Homo sapien
tccctcagatccttgtggatgattg

SEQ ID NO: 3151843 - DNA, 25 bp, Homo sapien
cattccctcagatccttgtggatga

SEQ ID NO: 3151844 - DNA, 25 bp, Homo sapien
tctcattatggcaaagtgaagcatt

SEQ ID NO: 3151845 - DNA, 25 bp, Homo sapien
tggcagctgagcatctcattatggc

SEQ ID NO: 3151846 - DNA, 25 bp, Homo sapien
tcagggcagtacaggagaccccatc

SEQ ID NO: 3151847 - DNA, 25 bp, Homo sapien
catccatctccggttgttggtggct

SEQ ID NO: 3151848 - DNA, 25 bp, Homo sapien
ttctccattggctaaaccgcggctc

SEQ ID NO: 3151849 - DNA, 25 bp, Homo sapien
tgacaaaaggagtgcccatagcgcc

SEQ ID NO: 3151850 - DNA, 25 bp, Homo sapien
atagcgccggtctggagctggcaac

SEQ ID NO: 3151851 - DNA, 25 bp, Homo sapien
actgcacctcggctcgaagctgagg

SEQ ID NO: 3151852 - DNA, 25 bp, Homo sapien
attttcaggcagctcacacccggct

SEQ ID NO: 3151853 - DNA, 25 bp, Homo sapien
ccgagtgcattttcaggcagctcac

SEQ ID NO: 3151854 - DNA, 25 bp, Homo sapien
tgcattttcaggcagctcacacccg

SEQ ID NO: 3151855 - DNA, 25 bp, Homo sapien
ggcatccgagtgcattttcaggcag

SEQ ID NO: 3151856 - DNA, 25 bp, Homo sapien
cgcaccactcagccctttggaaatc

SEQ ID NO: 3151857 - DNA, 25 bp, Homo sapien
ccgctacagcccaacgctgcctcca

SEQ ID NO: 3151858 - DNA, 25 bp, Homo sapien
aaatcctcacccttgtgccccgctc

SEQ ID NO: 3151859 - DNA, 25 bp, Homo sapien
tgcaccccggacactccgatctcgg

SEQ ID NO: 3151860 - DNA, 25 bp, Homo sapien
aggcaccagagaccatgcaaacgta

SEQ ID NO: 3151861 - DNA, 25 bp, Homo sapien
ccagagaccatgcaaacgtaatgac

SEQ ID NO: 3151862 - DNA, 25 bp, Homo sapien
gagaccatgcaaacgtaatgacagg

SEQ ID NO: 3151863 - DNA, 25 bp, Homo sapien
catgcaaacgtaatgacaggaatgg

SEQ ID NO: 3151864 - DNA, 25 bp, Homo sapien
ttgttcattctactcagccacagtg

SEQ ID NO: 3151865 - DNA, 25 bp, Homo sapien
tggttgctctcatacttcatcaggt

SEQ ID NO: 3151866 - DNA, 25 bp, Homo sapien
cagggccttgtacaccctgcatctg

SEQ ID NO: 3151867 - DNA, 25 bp, Homo sapien
gctccattaacactccaagaacact

SEQ ID NO: 3151868 - DNA, 25 bp, Homo sapien
aaataaacatgttaggcctgccaag

SEQ ID NO: 3151869 - DNA, 25 bp, Homo sapien
agaaggaagtcaggcaagcttggca

SEQ ID NO: 3151870 - DNA, 25 bp, Homo sapien
cacagtataaagcagagcctggtaa

SEQ ID NO: 3151871 - DNA, 25 bp, Homo sapien
tctggaatagaaagacccaacgttg

SEQ ID NO: 3151872 - DNA, 25 bp, Homo sapien
cttacatcaatgatcccaaggtcag

SEQ ID NO: 3151873 - DNA, 25 bp, Homo sapien
ttcaattctcgccttacatcaatga

SEQ ID NO: 3151874 - DNA, 25 bp, Homo sapien
cctctgtaattgaggcaggtggcct

SEQ ID NO: 3151875 - DNA, 25 bp, Homo sapien
cttcctctgtaattgaggcaggtgg

SEQ ID NO: 3151876 - DNA, 25 bp, Homo sapien
cagcattttgtgctgagagacagcc

SEQ ID NO: 3151877 - DNA, 25 bp, Homo sapien
gccatatagaatggtccccaaaacc

SEQ ID NO: 3151878 - DNA, 25 bp, Homo sapien
gcactgttcacagtcatagccatat

SEQ ID NO: 3151879 - DNA, 25 bp, Homo sapien
tctaaatggccctccaatatagaca

SEQ ID NO: 3151880 - DNA, 25 bp, Homo sapien
tgctactctgaaccctgaaaacaag

SEQ ID NO: 3151881 - DNA, 25 bp, Homo sapien
gcaggtgctacaatatcaggtgtct

SEQ ID NO: 3151882 - DNA, 25 bp, Homo sapien
gggctggatcctctgtgctgctact

SEQ ID NO: 3151883 - DNA, 25 bp, Homo sapien
gaacagatccaaagagcaggtgcta

SEQ ID NO: 3151884 - DNA, 25 bp, Homo sapien
ttactgaaacattttatttaggaca

SEQ ID NO: 3151885 - DNA, 25 bp, Homo sapien
tactgaaacattttatttaggacac

SEQ ID NO: 3151886 - DNA, 25 bp, Homo sapien
gggtgtggtagatcttatgaatatt

SEQ ID NO: 3151887 - DNA, 25 bp, Homo sapien
atatttgccagtgttgagagatgag

SEQ ID NO: 3151888 - DNA, 25 bp, Homo sapien
agcttattaagggtgtggtagatct

SEQ ID NO: 3151889 - DNA, 25 bp, Homo sapien
cttatgaatatttgccagtgttgag

SEQ ID NO: 3151890 - DNA, 25 bp, Homo sapien
tgtttggtgatcgtcttggccaatg

SEQ ID NO: 3151891 - DNA, 25 bp, Homo sapien
tggtgatcgtcttggccaatgtctt

SEQ ID NO: 3151892 - DNA, 25 bp, Homo sapien
tttggtgatcgtcttggccaatgtc

SEQ ID NO: 3151893 - DNA, 25 bp, Homo sapien
ctgtttggtgatcgtcttggccaat

SEQ ID NO: 3151894 - DNA, 25 bp, Homo sapien
gtacagtgcctaagatgatacaata

SEQ ID NO: 3151895 - DNA, 25 bp, Homo sapien
cagtgcctaagatgatacaatacca

SEQ ID NO: 3151896 - DNA, 25 bp, Homo sapien
gcaggctatgacctgtacagtgcct

SEQ ID NO: 3151897 - DNA, 25 bp, Homo sapien
ggctatgacctgtacagtgcctaag

SEQ ID NO: 3151898 - DNA, 25 bp, Homo sapien
tccaagcataccacggcctgacctg

SEQ ID NO: 3151899 - DNA, 25 bp, Homo sapien
gctctccaagcataccacggcctga

SEQ ID NO: 3151900 - DNA, 25 bp, Homo sapien
tctccaagcataccacggcctgacc

SEQ ID NO: 3151901 - DNA, 25 bp, Homo sapien
cagctctccaagcataccacggcct

SEQ ID NO: 3151902 - DNA, 25 bp, Homo sapien
gcccttctctaaagagatacctgcc

SEQ ID NO: 3151903 - DNA, 25 bp, Homo sapien
ccttctctaaagagatacctgccat

SEQ ID NO: 3151904 - DNA, 25 bp, Homo sapien
catgcccttctctaaagagatacct

SEQ ID NO: 3151905 - DNA, 25 bp, Homo sapien
tgcccttctctaaagagatacctgc

SEQ ID NO: 3151906 - DNA, 25 bp, Homo sapien
tactctgttgggtaccggaatcaca

SEQ ID NO: 3151907 - DNA, 25 bp, Homo sapien
ttggcacgaacaacctgagcgccgt

SEQ ID NO: 3151908 - DNA, 25 bp, Homo sapien
gacgtatccactgtaaccaaggcaa

SEQ ID NO: 3151909 - DNA, 25 bp, Homo sapien
taacactaactgacattgactgggc

SEQ ID NO: 3151910 - DNA, 25 bp, Homo sapien
tgacacttaggaaagcaatcaaaat

SEQ ID NO: 3151911 - DNA, 25 bp, Homo sapien
tgtgtgcaatttttgcccaaagatt

SEQ ID NO: 3151912 - DNA, 25 bp, Homo sapien
catttcttttgggttcagtgtttca

SEQ ID NO: 3151913 - DNA, 25 bp, Homo sapien
aactgaccccatctgatttcaaata

SEQ ID NO: 3151914 - DNA, 25 bp, Homo sapien
cttgtatgagttgtattacttgact

SEQ ID NO: 3151915 - DNA, 25 bp, Homo sapien
acttgtatgagttgtattacttgac

SEQ ID NO: 3151916 - DNA, 25 bp, Homo sapien
aacttgtatgagttgtattacttga

SEQ ID NO: 3151917 - DNA, 25 bp, Homo sapien
ttgtatgagttgtattacttgactt

SEQ ID NO: 3151918 - DNA, 25 bp, Homo sapien
aagaaactgtgtctatccacctgcc

SEQ ID NO: 3151919 - DNA, 25 bp, Homo sapien
ggaagggaattgacttaggaccaca

SEQ ID NO: 3151920 - DNA, 25 bp, Homo sapien
aactcagatccaggcaagggaaggg

SEQ ID NO: 3151921 - DNA, 25 bp, Homo sapien
tgactcactgactctcacatggctg

SEQ ID NO: 3151922 - DNA, 25 bp, Homo sapien
tatgcagataagaaaacggaggcgg

SEQ ID NO: 3151923 - DNA, 25 bp, Homo sapien
cacattcagtcagggttttcagtta

SEQ ID NO: 3151924 - DNA, 25 bp, Homo sapien
gcagtcttgcttcaggccgtcttaa

SEQ ID NO: 3151925 - DNA, 25 bp, Homo sapien
taggcacatcagtcccagtagtctt

SEQ ID NO: 3151926 - DNA, 25 bp, Homo sapien
ctttattaaagcagtctgaagaact

SEQ ID NO: 3151927 - DNA, 25 bp, Homo sapien
attaaagcagtctgaagaactgcaa

SEQ ID NO: 3151928 - DNA, 25 bp, Homo sapien
tattaaagcagtctgaagaactgca

SEQ ID NO: 3151929 - DNA, 25 bp, Homo sapien
ttattaaagcagtctgaagaactgc

SEQ ID NO: 3151930 - DNA, 25 bp, Homo sapien
tcatgtctacttttcttggcagata

SEQ ID NO: 3151931 - DNA, 25 bp, Homo sapien
atgtctacttttcttggcagataaa

SEQ ID NO: 3151932 - DNA, 25 bp, Homo sapien
ctatcatgtctacttttcttggcag

SEQ ID NO: 3151933 - DNA, 25 bp, Homo sapien
tatcatgtctacttttcttggcaga

SEQ ID NO: 3151934 - DNA, 25 bp, Homo sapien
tgcaccagttttgggcgatcaatgg

SEQ ID NO: 3151935 - DNA, 25 bp, Homo sapien
ttgaaaaatcgactggcaaagccca

SEQ ID NO: 3151936 - DNA, 25 bp, Homo sapien
tggcatttgcacacttagaagaccc

SEQ ID NO: 3151937 - DNA, 25 bp, Homo sapien
caattctgtggtcctcagcaggcac

SEQ ID NO: 3151938 - DNA, 25 bp, Homo sapien
gaagcgagacacaaagaccatatcc

SEQ ID NO: 3151939 - DNA, 25 bp, Homo sapien
tagaaacaaaagtggataccggcca

SEQ ID NO: 3151940 - DNA, 25 bp, Homo sapien
ggcgggcacagaccattaagtacag

SEQ ID NO: 3151941 - DNA, 25 bp, Homo sapien
taaacgaatctaacaggcccttgga

SEQ ID NO: 3151942 - DNA, 25 bp, Homo sapien
tttattctagtcgaatcatattttc

SEQ ID NO: 3151943 - DNA, 25 bp, Homo sapien
cagtctttattctagtcgaatcata

SEQ ID NO: 3151944 - DNA, 25 bp, Homo sapien
gtctttattctagtcgaatcatatt

SEQ ID NO: 3151945 - DNA, 25 bp, Homo sapien
tattctagtcgaatcatattttcta

SEQ ID NO: 3151946 - DNA, 25 bp, Homo sapien
atattcatagaaccattccaagcac

SEQ ID NO: 3151947 - DNA, 25 bp, Homo sapien
ctgcatattcatagaaccattccaa

SEQ ID NO: 3151948 - DNA, 25 bp, Homo sapien
tgcatattcatagaaccattccaag

SEQ ID NO: 3151949 - DNA, 25 bp, Homo sapien
gcatattcatagaaccattccaagc

SEQ ID NO: 3151950 - DNA, 25 bp, Homo sapien
ggatcagtcttagatgatacaaatg

SEQ ID NO: 3151951 - DNA, 25 bp, Homo sapien
tcttagatgatacaaatgaatacct

SEQ ID NO: 3151952 - DNA, 25 bp, Homo sapien
ccttattgtcataaggatcagtctt

SEQ ID NO: 3151953 - DNA, 25 bp, Homo sapien
cataaggatcagtcttagatgatac

SEQ ID NO: 3151954 - DNA, 25 bp, Homo sapien
ttgaaatgtacacatttttaaattc

SEQ ID NO: 3151955 - DNA, 25 bp, Homo sapien
tgaaatgtacacatttttaaattct

SEQ ID NO: 3151956 - DNA, 25 bp, Homo sapien
gcaaagcttattttaacacaggtgc

SEQ ID NO: 3151957 - DNA, 25 bp, Homo sapien
tcactgcactaagtaagggttcaaa

SEQ ID NO: 3151958 - DNA, 25 bp, Homo sapien
aataacaaataagccccaggtcgca

SEQ ID NO: 3151959 - DNA, 25 bp, Homo sapien
aaataggtttcccagcaatccaaag

SEQ ID NO: 3151960 - DNA, 25 bp, Homo sapien
cagttaaaacgaaggacttagcagg

SEQ ID NO: 3151961 - DNA, 25 bp, Homo sapien
ctctactccagattaaaaggcaggg

SEQ ID NO: 3151962 - DNA, 25 bp, Homo sapien
gcctgctctcttctacggaaaatga

SEQ ID NO: 3151963 - DNA, 25 bp, Homo sapien
agccctcttcgtgctggtatctagg

SEQ ID NO: 3151964 - DNA, 25 bp, Homo sapien
tactggaggtacatctggtaaggct

SEQ ID NO: 3151965 - DNA, 25 bp, Homo sapien
tccaaaatagactaagggcctacag

SEQ ID NO: 3151966 - DNA, 25 bp, Homo sapien
tgtaaaaccaatgttggcacctgtg

SEQ ID NO: 3151967 - DNA, 25 bp, Homo sapien
tatagcataccacatcacagaggca

SEQ ID NO: 3151968 - DNA, 25 bp, Homo sapien
tcagggcctacaacatcatcagttc

SEQ ID NO: 3151969 - DNA, 25 bp, Homo sapien
caccaatgtcttcacaaaatttctc

SEQ ID NO: 3151970 - DNA, 25 bp, Homo sapien
ccaatgtcttcacaaaatttctcca

SEQ ID NO: 3151971 - DNA, 25 bp, Homo sapien
gttttctggttcaacaccaatgtct

SEQ ID NO: 3151972 - DNA, 25 bp, Homo sapien
aatgtcttcacaaaatttctccatg

SEQ ID NO: 3151973 - DNA, 25 bp, Homo sapien
tccgtcattgtaggcacatgtggcc

SEQ ID NO: 3151974 - DNA, 25 bp, Homo sapien
attaggctaaaacaactactgaggg

SEQ ID NO: 3151975 - DNA, 25 bp, Homo sapien
cacttctgagctaaattcaattgga

SEQ ID NO: 3151976 - DNA, 25 bp, Homo sapien
gggcacgaaggtacacagcgtacaa

SEQ ID NO: 3151977 - DNA, 25 bp, Homo sapien
cagtgagccgacatcataccattgc

SEQ ID NO: 3151978 - DNA, 25 bp, Homo sapien
ccgggaggcagaggttgcagtgagc

SEQ ID NO: 3151979 - DNA, 25 bp, Homo sapien
ctccagcctggcgacagtgcgagac

SEQ ID NO: 3151980 - DNA, 25 bp, Homo sapien
aggcaggggaaatcgcttcaacccg

SEQ ID NO: 3151981 - DNA, 25 bp, Homo sapien
ctagaagaggtgagaagtaactaaa

SEQ ID NO: 3151982 - DNA, 25 bp, Homo sapien
agggacagggccttcttaggaccat

SEQ ID NO: 3151983 - DNA, 25 bp, Homo sapien
aagaagagggacagggccttcttag

SEQ ID NO: 3151984 - DNA, 25 bp, Homo sapien
taactaaaaaagaatgtcagtccta

SEQ ID NO: 3151985 - DNA, 25 bp, Homo sapien
cagtgacaactctggtttatgccac

SEQ ID NO: 3151986 - DNA, 25 bp, Homo sapien
ctacacagggacagggttgaggcca

SEQ ID NO: 3151987 - DNA, 25 bp, Homo sapien
ttgaggccatgcctgattaggacag

SEQ ID NO: 3151988 - DNA, 25 bp, Homo sapien
aatgacatttcaaaggtgcacccag

SEQ ID NO: 3151989 - DNA, 25 bp, Homo sapien
ctgtagagtaaaataacccatgttt

SEQ ID NO: 3151990 - DNA, 25 bp, Homo sapien
catgttttgtgcatccaatttccaa

SEQ ID NO: 3151991 - DNA, 25 bp, Homo sapien
catccaatttccaagctaggacaag

SEQ ID NO: 3151992 - DNA, 25 bp, Homo sapien
tccaagctaggacaagcataactac

SEQ ID NO: 3151993 - DNA, 25 bp, Homo sapien
gagaagtcattccttttaaccactc

SEQ ID NO: 3151994 - DNA, 25 bp, Homo sapien
ggagagaagtcattccttttaacca

SEQ ID NO: 3151995 - DNA, 25 bp, Homo sapien
gagagaagtcattccttttaaccac

SEQ ID NO: 3151996 - DNA, 25 bp, Homo sapien
tggagagaagtcattccttttaacc

SEQ ID NO: 3151997 - DNA, 25 bp, Homo sapien
ggagatggatcacaaaataaacccc

SEQ ID NO: 3151998 - DNA, 25 bp, Homo sapien
gaatagtcctcaaaatgggtcttag

SEQ ID NO: 3151999 - DNA, 25 bp, Homo sapien
taagttacatagaggtggctttctc

SEQ ID NO: 3152000 - DNA, 25 bp, Homo sapien
gagagctgctctacaagaataccaa

SEQ ID NO: 3152001 - DNA, 25 bp, Homo sapien
atagatgttccctaccagctgccgg

SEQ ID NO: 3152002 - DNA, 25 bp, Homo sapien
tgggaggacccagttagaaggcacc

SEQ ID NO: 3152003 - DNA, 25 bp, Homo sapien
gattagttaagagacccaagggcgc

SEQ ID NO: 3152004 - DNA, 25 bp, Homo sapien
tctatgaatcaaaaagcaggctgtc

SEQ ID NO: 3152005 - DNA, 25 bp, Homo sapien
cagatgggagtatggtaagtccaac

SEQ ID NO: 3152006 - DNA, 25 bp, Homo sapien
tctgtctattaggaacagcataggc

SEQ ID NO: 3152007 - DNA, 25 bp, Homo sapien
gacttcttcaagagaatgacacata

SEQ ID NO: 3152008 - DNA, 25 bp, Homo sapien
aaggcttttgtagtccacagtgagg

SEQ ID NO: 3152009 - DNA, 25 bp, Homo sapien
gaatcatttaagaatgatcttaagt

SEQ ID NO: 3152010 - DNA, 25 bp, Homo sapien
taaagtttgtagaatcatttaagaa

SEQ ID NO: 3152011 - DNA, 25 bp, Homo sapien
agtcaaacgcatatctgtaaataag

SEQ ID NO: 3152012 - DNA, 25 bp, Homo sapien
ccgtgcaaagtcaaacgcatatctg

SEQ ID NO: 3152013 - DNA, 25 bp, Homo sapien
taaatgtaatagtttcagcatccca

SEQ ID NO: 3152014 - DNA, 25 bp, Homo sapien
catttgtattggacgaagtagactt

SEQ ID NO: 3152015 - DNA, 25 bp, Homo sapien
tattgtcagatccaaccacatgcta

SEQ ID NO: 3152016 - DNA, 25 bp, Homo sapien
tagcaagcgaggagatataaatttt

SEQ ID NO: 3152017 - DNA, 25 bp, Homo sapien
tgctgctgatcagcgcacaccctcc

SEQ ID NO: 3152018 - DNA, 25 bp, Homo sapien
gctgctgatcagcgcacaccctcct

SEQ ID NO: 3152019 - DNA, 25 bp, Homo sapien
atgctgctgatcagcgcacaccctc

SEQ ID NO: 3152020 - DNA, 25 bp, Homo sapien
tcgcaatcactaacaccatcttcgg

SEQ ID NO: 3152021 - DNA, 25 bp, Homo sapien
agcagctcgcaatcactaacaccat

SEQ ID NO: 3152022 - DNA, 25 bp, Homo sapien
agctcgcaatcactaacaccatctt

SEQ ID NO: 3152023 - DNA, 25 bp, Homo sapien
agccagcagctcgcaatcactaaca

SEQ ID NO: 3152024 - DNA, 25 bp, Homo sapien
ggaaagctgaacagcactcacttac

SEQ ID NO: 3152025 - DNA, 25 bp, Homo sapien
ggactggaaagctgaacagcactca

SEQ ID NO: 3152026 - DNA, 25 bp, Homo sapien
aggactggaaagctgaacagcactc

SEQ ID NO: 3152027 - DNA, 25 bp, Homo sapien
ctggaaagctgaacagcactcactt

SEQ ID NO: 3152028 - DNA, 25 bp, Homo sapien
acaagcggtcagtttccatggaaag

SEQ ID NO: 3152029 - DNA, 25 bp, Homo sapien
ctacaagcggtcagtttccatggaa

SEQ ID NO: 3152030 - DNA, 25 bp, Homo sapien
gtttccatggaaaggaatagagggc

SEQ ID NO: 3152031 - DNA, 25 bp, Homo sapien
aagcggtcagtttccatggaaagga

SEQ ID NO: 3152032 - DNA, 25 bp, Homo sapien
ttccgtctttcttatatgcttccat

SEQ ID NO: 3152033 - DNA, 25 bp, Homo sapien
catttccgtctttcttatatgcttc

SEQ ID NO: 3152034 - DNA, 25 bp, Homo sapien
atttccgtctttcttatatgcttcc

SEQ ID NO: 3152035 - DNA, 25 bp, Homo sapien
tttccgtctttcttatatgcttcca

SEQ ID NO: 3152036 - DNA, 25 bp, Homo sapien
taaagaccctgcatccagactaagg

SEQ ID NO: 3152037 - DNA, 25 bp, Homo sapien
aaaacaaggatgagccagatgcccc

SEQ ID NO: 3152038 - DNA, 25 bp, Homo sapien
caaacacaatggaaggcttgggcat

SEQ ID NO: 3152039 - DNA, 25 bp, Homo sapien
tgtcaactgaatgatcaccctaatg

SEQ ID NO: 3152040 - DNA, 25 bp, Homo sapien
tttcctaataacagtcccaacatgc

SEQ ID NO: 3152041 - DNA, 25 bp, Homo sapien
cagtgtttatgtctaggctgcgctg

SEQ ID NO: 3152042 - DNA, 25 bp, Homo sapien
caacatgcacttggcagtgtttatg

SEQ ID NO: 3152043 - DNA, 25 bp, Homo sapien
ctctaagaattggtgaaaaactgga

SEQ ID NO: 3152044 - DNA, 25 bp, Homo sapien
cacagatgcactccaagaagatagg

SEQ ID NO: 3152045 - DNA, 25 bp, Homo sapien
gaagataggtagctgctgactgaca

SEQ ID NO: 3152046 - DNA, 25 bp, Homo sapien
cagagctgtggctgtttcggatgca

SEQ ID NO: 3152047 - DNA, 25 bp, Homo sapien
gatctaaggtcctcaagttacttgg

SEQ ID NO: 3152048 - DNA, 25 bp, Homo sapien
tggagggaaaagtaatatgaattac

SEQ ID NO: 3152049 - DNA, 25 bp, Homo sapien
gggaaaagtaatatgaattactgac

SEQ ID NO: 3152050 - DNA, 25 bp, Homo sapien
ctgatggagggaaaagtaatatgaa

SEQ ID NO: 3152051 - DNA, 25 bp, Homo sapien
ggaaaagtaatatgaattactgaca

SEQ ID NO: 3152052 - DNA, 25 bp, Homo sapien
ttgcaccactggtctttattaataa

SEQ ID NO: 3152053 - DNA, 25 bp, Homo sapien
tctaggacattgcaccactggtctt

SEQ ID NO: 3152054 - DNA, 25 bp, Homo sapien
caagattaattgttctgctaaactc

SEQ ID NO: 3152055 - DNA, 25 bp, Homo sapien
tagttgctgaggtcaagattaattg

SEQ ID NO: 3152056 - DNA, 25 bp, Homo sapien
cacaaactcgtccaacaaaactggc

SEQ ID NO: 3152057 - DNA, 25 bp, Homo sapien
ttgtctttataccactccacaaact

SEQ ID NO: 3152058 - DNA, 25 bp, Homo sapien
ccactccacaaactcgtccaacaaa

SEQ ID NO: 3152059 - DNA, 25 bp, Homo sapien
ccacaaactcgtccaacaaaactgg

SEQ ID NO: 3152060 - DNA, 25 bp, Homo sapien
tggtaacagtgactctctcgctgct

SEQ ID NO: 3152061 - DNA, 25 bp, Homo sapien
taatcacagtgaggacgttggcaaa

SEQ ID NO: 3152062 - DNA, 25 bp, Homo sapien
agcagcatgcgctttgatacaaaca

SEQ ID NO: 3152063 - DNA, 25 bp, Homo sapien
ccctgcgaaagggaaacagtgcaag

SEQ ID NO: 3152064 - DNA, 25 bp, Homo sapien
tatgcctctaaaaagttatgactcc

SEQ ID NO: 3152065 - DNA, 25 bp, Homo sapien
tagcagatcaatcactggctagaag

SEQ ID NO: 3152066 - DNA, 25 bp, Homo sapien
tacataccatgaaagcttaactgaa

SEQ ID NO: 3152067 - DNA, 25 bp, Homo sapien
tgcgatgcagttataaacagccagc

SEQ ID NO: 3152068 - DNA, 25 bp, Homo sapien
agcatgtactgggttagctcaatgc

SEQ ID NO: 3152069 - DNA, 25 bp, Homo sapien
gtactgggttagctcaatgctggtg

SEQ ID NO: 3152070 - DNA, 25 bp, Homo sapien
catgtactgggttagctcaatgctg

SEQ ID NO: 3152071 - DNA, 25 bp, Homo sapien
tgtactgggttagctcaatgctggt

SEQ ID NO: 3152072 - DNA, 25 bp, Homo sapien
aaataatggctattgcccttctgta

SEQ ID NO: 3152073 - DNA, 25 bp, Homo sapien
caaaaataatggctattgcccttct

SEQ ID NO: 3152074 - DNA, 25 bp, Homo sapien
atggctattgcccttctgtacaaat

SEQ ID NO: 3152075 - DNA, 25 bp, Homo sapien
ggctattgcccttctgtacaaataa

SEQ ID NO: 3152076 - DNA, 25 bp, Homo sapien
taaacgatcacatgtcacccgaaag

SEQ ID NO: 3152077 - DNA, 25 bp, Homo sapien
cattcaatagcaccagatagttggg

SEQ ID NO: 3152078 - DNA, 25 bp, Homo sapien
aatagtggtcaagagtagcactgtc

SEQ ID NO: 3152079 - DNA, 25 bp, Homo sapien
cacatgttcaaatcacggatcttgc

SEQ ID NO: 3152080 - DNA, 25 bp, Homo sapien
taatagctgttgcttgccattaaca

SEQ ID NO: 3152081 - DNA, 25 bp, Homo sapien
tacgcagttttttccctaccatcaa

SEQ ID NO: 3152082 - DNA, 25 bp, Homo sapien
tgacctgttgcctttaaagtgtaac

SEQ ID NO: 3152083 - DNA, 25 bp, Homo sapien
cagatccaaacctgcctaggccagt

SEQ ID NO: 3152084 - DNA, 25 bp, Homo sapien
cccagatgaaggcaccctaatttat

SEQ ID NO: 3152085 - DNA, 25 bp, Homo sapien
tattgcaatgtggagttcgaaacac

SEQ ID NO: 3152086 - DNA, 25 bp, Homo sapien
tcaagacaatcaagggtaagcactc

SEQ ID NO: 3152087 - DNA, 25 bp, Homo sapien
tacttcagcagtaaacatctaaagg

SEQ ID NO: 3152088 - DNA, 25 bp, Homo sapien
tttcagttaagctgggagtcacagg

SEQ ID NO: 3152089 - DNA, 25 bp, Homo sapien
tataggttacctgctgtcattgaac

SEQ ID NO: 3152090 - DNA, 25 bp, Homo sapien
taatgcaaatactgacgacacgaag

SEQ ID NO: 3152091 - DNA, 25 bp, Homo sapien
gacacgaagcattcacagttatagg

SEQ ID NO: 3152092 - DNA, 25 bp, Homo sapien
atgctttaaagactaccttaaatgg

SEQ ID NO: 3152093 - DNA, 25 bp, Homo sapien
aatgctttaaagactaccttaaatg

SEQ ID NO: 3152094 - DNA, 25 bp, Homo sapien
tgtctgcaatgcacctctgctaggt

SEQ ID NO: 3152095 - DNA, 25 bp, Homo sapien
tctgccacaagttaagaattccctg

SEQ ID NO: 3152096 - DNA, 25 bp, Homo sapien
taacaatgtccttcctttagggtga

SEQ ID NO: 3152097 - DNA, 25 bp, Homo sapien
tttgtcttgagccagcattcgtggt

SEQ ID NO: 3152098 - DNA, 25 bp, Homo sapien
catgctatcgaaagttggcccaaaa

SEQ ID NO: 3152099 - DNA, 25 bp, Homo sapien
cagagagtgattgcaaaggagtttc

SEQ ID NO: 3152100 - DNA, 25 bp, Homo sapien
tctcactatgggatacagagaagcc

SEQ ID NO: 3152101 - DNA, 25 bp, Homo sapien
tagagacaaagaaaacgcagtggct

SEQ ID NO: 3152102 - DNA, 25 bp, Homo sapien
gctttccggcctgctgagtacttgg

SEQ ID NO: 3152103 - DNA, 25 bp, Homo sapien
tcctcggagcagcaatgagatcctc

SEQ ID NO: 3152104 - DNA, 25 bp, Homo sapien
gatgttctgcttcgtctcctcggag

SEQ ID NO: 3152105 - DNA, 25 bp, Homo sapien
gatggcttcggccagactatactgg

SEQ ID NO: 3152106 - DNA, 25 bp, Homo sapien
taactagtaatgagcttctgtttac

SEQ ID NO: 3152107 - DNA, 25 bp, Homo sapien
gattcagtttgtaataactagtaat

SEQ ID NO: 3152108 - DNA, 25 bp, Homo sapien
tgtgtttcacattgctaacttgagt

SEQ ID NO: 3152109 - DNA, 25 bp, Homo sapien
cacattgctaacttgagtttcagtt

SEQ ID NO: 3152110 - DNA, 25 bp, Homo sapien
tacatgctagtttcaattaccacag

SEQ ID NO: 3152111 - DNA, 25 bp, Homo sapien
gcacagatatgacaagcagtagcca

SEQ ID NO: 3152112 - DNA, 25 bp, Homo sapien
cacacaaaacggactgctgataata

SEQ ID NO: 3152113 - DNA, 25 bp, Homo sapien
cacagtattctagagacgggttgca

SEQ ID NO: 3152114 - DNA, 25 bp, Homo sapien
aaaaatgtgcatgggtttatccctt

SEQ ID NO: 3152115 - DNA, 25 bp, Homo sapien
gagaggaagaaagggcaatttagcc

SEQ ID NO: 3152116 - DNA, 25 bp, Homo sapien
gatcgtctccacaaaacagggttga

SEQ ID NO: 3152117 - DNA, 25 bp, Homo sapien
tctgctttatagtgaaatcatagac

SEQ ID NO: 3152118 - DNA, 25 bp, Homo sapien
gatatggagggccagttgtatacgt

SEQ ID NO: 3152119 - DNA, 25 bp, Homo sapien
ggatatggagggccagttgtatacg

SEQ ID NO: 3152120 - DNA, 25 bp, Homo sapien
tggagggccagttgtatacgtaaaa

SEQ ID NO: 3152121 - DNA, 25 bp, Homo sapien
tatggagggccagttgtatacgtaa

SEQ ID NO: 3152122 - DNA, 25 bp, Homo sapien
tcaacccctcagagctcatcacttt

SEQ ID NO: 3152123 - DNA, 25 bp, Homo sapien
tctaagcttttgagcttcatgagga

SEQ ID NO: 3152124 - DNA, 25 bp, Homo sapien
tatctaagcttttgagcttcatgag

SEQ ID NO: 3152125 - DNA, 25 bp, Homo sapien
cttttggacatgttaatattcttgc

SEQ ID NO: 3152126 - DNA, 25 bp, Homo sapien
tggaataagtggatgtcttcgtaaa

SEQ ID NO: 3152127 - DNA, 25 bp, Homo sapien
gcttttgatgggtgctaaatagcaa

SEQ ID NO: 3152128 - DNA, 25 bp, Homo sapien
cgtaaatgccgttaatgatggtccc

SEQ ID NO: 3152129 - DNA, 25 bp, Homo sapien
gcaatcaatttaagagagagcaaaa

SEQ ID NO: 3152130 - DNA, 25 bp, Homo sapien
tcttggcttccctagaattcaagga

SEQ ID NO: 3152131 - DNA, 25 bp, Homo sapien
tatctctacatatgccccagtgcca

SEQ ID NO: 3152132 - DNA, 25 bp, Homo sapien
tgataagaagcgttggtcttcctcc

SEQ ID NO: 3152133 - DNA, 25 bp, Homo sapien
gaaatcaccttagcatatgctacgt

SEQ ID NO: 3152134 - DNA, 25 bp, Homo sapien
atatggcgggaagggtgttctcttc

SEQ ID NO: 3152135 - DNA, 25 bp, Homo sapien
gctcactattcctctcggccccacg

SEQ ID NO: 3152136 - DNA, 25 bp, Homo sapien
cctggccgggttcgggaagccagag

SEQ ID NO: 3152137 - DNA, 25 bp, Homo sapien
gggaccaggcggtggcctccgcagg

SEQ ID NO: 3152138 - DNA, 25 bp, Homo sapien
gtttcgtttgagaccagtcttttca

SEQ ID NO: 3152139 - DNA, 25 bp, Homo sapien
ttcgtttgagaccagtcttttcagg

SEQ ID NO: 3152140 - DNA, 25 bp, Homo sapien
agcttttcctgcaacgttcgtaaag

SEQ ID NO: 3152141 - DNA, 25 bp, Homo sapien
tttcgtttgagaccagtcttttcag

SEQ ID NO: 3152142 - DNA, 25 bp, Homo sapien
tgaggagctttgtgggctcccactc

SEQ ID NO: 3152143 - DNA, 25 bp, Homo sapien
aaagagaagctggtaagggccacga

SEQ ID NO: 3152144 - DNA, 25 bp, Homo sapien
aaattggtccagatttcagaggtaa

SEQ ID NO: 3152145 - DNA, 25 bp, Homo sapien
gaagtttcaggaaagcctttgcctg

SEQ ID NO: 3152146 - DNA, 25 bp, Homo sapien
agagttgtccctgcaccttggcaac

SEQ ID NO: 3152147 - DNA, 25 bp, Homo sapien
ggtttagattttgatcacacgtgtt

SEQ ID NO: 3152148 - DNA, 25 bp, Homo sapien
ctgtgaggatcccaaagagttgtcc

SEQ ID NO: 3152149 - DNA, 25 bp, Homo sapien
caatgagttcaaggcaatggtttag

SEQ ID NO: 3152150 - DNA, 25 bp, Homo sapien
gcagcagtaaaggaagcctccagcc

SEQ ID NO: 3152151 - DNA, 25 bp, Homo sapien
aaggcgtgacttgattgtttccaca

SEQ ID NO: 3152152 - DNA, 25 bp, Homo sapien
tgtttccacaccatcattacgtcct

SEQ ID NO: 3152153 - DNA, 25 bp, Homo sapien
gggaccttgctgtcaacagattttc

SEQ ID NO: 3152154 - DNA, 25 bp, Homo sapien
cgaggactgggatctttatgtctct

SEQ ID NO: 3152155 - DNA, 25 bp, Homo sapien
ttgcatatcccgatcccgaggactg

SEQ ID NO: 3152156 - DNA, 25 bp, Homo sapien
tatgtctctccctatcaaacgtgtc

SEQ ID NO: 3152157 - DNA, 25 bp, Homo sapien
gactccgggttgagttcaaattaga

SEQ ID NO: 3152158 - DNA, 25 bp, Homo sapien
catctgatatgtgttgttgcctgga

SEQ ID NO: 3152159 - DNA, 25 bp, Homo sapien
caatgctgtggtaggagaaattccc

SEQ ID NO: 3152160 - DNA, 25 bp, Homo sapien
tgattccctaagcttgctaccctgg

SEQ ID NO: 3152161 - DNA, 25 bp, Homo sapien
tgtgcctatgaagaaggaactccaa

SEQ ID NO: 3152162 - DNA, 25 bp, Homo sapien
gtgttatgagagccctggtgagaaa

SEQ ID NO: 3152163 - DNA, 25 bp, Homo sapien
ggtgttatgagagccctggtgagaa

SEQ ID NO: 3152164 - DNA, 25 bp, Homo sapien
gaggggtgttatgagagccctggtg

SEQ ID NO: 3152165 - DNA, 25 bp, Homo sapien
ggggtgttatgagagccctggtgag

SEQ ID NO: 3152166 - DNA, 25 bp, Homo sapien
ctgcagccaaaagggatatggccga

SEQ ID NO: 3152167 - DNA, 25 bp, Homo sapien
tcttcaagattcttttcagtttcaa

SEQ ID NO: 3152168 - DNA, 25 bp, Homo sapien
gggatatggccgatctgttcttgct

SEQ ID NO: 3152169 - DNA, 25 bp, Homo sapien
caagattcttttcagtttcaaccag

SEQ ID NO: 3152170 - DNA, 25 bp, Homo sapien
gcatcctcctgagcttgaagagatt

SEQ ID NO: 3152171 - DNA, 25 bp, Homo sapien
tgtggcgggcatcctcctgagcttg

SEQ ID NO: 3152172 - DNA, 25 bp, Homo sapien
ctcctgagcttgaagagatttaagc

SEQ ID NO: 3152173 - DNA, 25 bp, Homo sapien
ctgtggcgggcatcctcctgagctt

SEQ ID NO: 3152174 - DNA, 25 bp, Homo sapien
tctcctccttcaggtttcggagctg

SEQ ID NO: 3152175 - DNA, 25 bp, Homo sapien
tcggagctgtttcttataatcggac

SEQ ID NO: 3152176 - DNA, 25 bp, Homo sapien
tgagtgagttccactgctcacgctt

SEQ ID NO: 3152177 - DNA, 25 bp, Homo sapien
ggctctgaccgcctattctctgagc

SEQ ID NO: 3152178 - DNA, 25 bp, Homo sapien
gcagggctgggagaccggctcctgg

SEQ ID NO: 3152179 - DNA, 25 bp, Homo sapien
agggctgggagaccggctcctggag

SEQ ID NO: 3152180 - DNA, 25 bp, Homo sapien
ggggcagggctgggagaccggctcc

SEQ ID NO: 3152181 - DNA, 25 bp, Homo sapien
gggcagggctgggagaccggctcct

SEQ ID NO: 3152182 - DNA, 25 bp, Homo sapien
tgcgcgccacattggacagcttgga

SEQ ID NO: 3152183 - DNA, 25 bp, Homo sapien
ggtctcagccttgtcgatgcagcgc

SEQ ID NO: 3152184 - DNA, 25 bp, Homo sapien
gaataggaatcgctgaaccgggaca

SEQ ID NO: 3152185 - DNA, 25 bp, Homo sapien
cactgtggcgatgtagatgatccgc

SEQ ID NO: 3152186 - DNA, 25 bp, Homo sapien
ggtcttctgataactaaacacagtt

SEQ ID NO: 3152187 - DNA, 25 bp, Homo sapien
gaggtaggtgaagagatccaaaaca

SEQ ID NO: 3152188 - DNA, 25 bp, Homo sapien
caggaagcaggacagtgcagaaatt

SEQ ID NO: 3152189 - DNA, 25 bp, Homo sapien
ggaattagaaagaatccgagcttca

SEQ ID NO: 3152190 - DNA, 25 bp, Homo sapien
gcattctcaaagtcattcgacccca

SEQ ID NO: 3152191 - DNA, 25 bp, Homo sapien
gtcaacgattttctcacatggatct

SEQ ID NO: 3152192 - DNA, 25 bp, Homo sapien
ccatttttgctacatggaatgcctc

SEQ ID NO: 3152193 - DNA, 25 bp, Homo sapien
gaccccacataagatggtgtcaacg

SEQ ID NO: 3152194 - DNA, 25 bp, Homo sapien
aaggcaatgcaacatatctcctgga

SEQ ID NO: 3152195 - DNA, 25 bp, Homo sapien
aggcaaaagtcaacgacaggaggga

SEQ ID NO: 3152196 - DNA, 25 bp, Homo sapien
tctgctccatatgcaatatctaggg

SEQ ID NO: 3152197 - DNA, 25 bp, Homo sapien
tgacattcatggctcggatcacatc

SEQ ID NO: 3152198 - DNA, 25 bp, Homo sapien
taagggagcagtgaaatccgagtcg

SEQ ID NO: 3152199 - DNA, 25 bp, Homo sapien
gcaggccacacgtgatagaggacta

SEQ ID NO: 3152200 - DNA, 25 bp, Homo sapien
cataatgacacagtcattctccatg

SEQ ID NO: 3152201 - DNA, 25 bp, Homo sapien
aatccgagtcgtagctgcggcggta

SEQ ID NO: 3152202 - DNA, 25 bp, Homo sapien
cacttgggatgaattgtcactatgc

SEQ ID NO: 3152203 - DNA, 25 bp, Homo sapien
aatgttctcgaacttgtgaatcaaa

SEQ ID NO: 3152204 - DNA, 25 bp, Homo sapien
cttgtgaatcaaacacttgggatga

SEQ ID NO: 3152205 - DNA, 25 bp, Homo sapien
gaattgtcactatgcaaggccaccg

SEQ ID NO: 3152206 - DNA, 25 bp, Homo sapien
gtatgaaatcttatcaactctttat

SEQ ID NO: 3152207 - DNA, 25 bp, Homo sapien
cctttgtatgaaatcttatcaactc

SEQ ID NO: 3152208 - DNA, 25 bp, Homo sapien
tgtatgaaatcttatcaactcttta

SEQ ID NO: 3152209 - DNA, 25 bp, Homo sapien
tttgtatgaaatcttatcaactctt

SEQ ID NO: 3152210 - DNA, 25 bp, Homo sapien
atttgatgtaaaacgtaagaataat

SEQ ID NO: 3152211 - DNA, 25 bp, Homo sapien
cctcctttccaaactgcgcaacaga

SEQ ID NO: 3152212 - DNA, 25 bp, Homo sapien
cagataagatcttcttaacagagtg

SEQ ID NO: 3152213 - DNA, 25 bp, Homo sapien
tccaaactgcgcaacagataagatc

SEQ ID NO: 3152214 - DNA, 25 bp, Homo sapien
aaatgggacttaaactcctgcttcg

SEQ ID NO: 3152215 - DNA, 25 bp, Homo sapien
cgacttacagatcgcaccgaattcc

SEQ ID NO: 3152216 - DNA, 25 bp, Homo sapien
tcctgcttcgacaacgacttacaga

SEQ ID NO: 3152217 - DNA, 25 bp, Homo sapien
ccaatttggctacgggggcaaatgg

SEQ ID NO: 3152218 - DNA, 25 bp, Homo sapien
taagccttttgatgggagtccggag

SEQ ID NO: 3152219 - DNA, 25 bp, Homo sapien
cttttgatgggagtccggagttaca

SEQ ID NO: 3152220 - DNA, 25 bp, Homo sapien
gcccatgaataagccttttgatggg

SEQ ID NO: 3152221 - DNA, 25 bp, Homo sapien
gggagtccggagttacaatttgcca

SEQ ID NO: 3152222 - DNA, 25 bp, Homo sapien
ctttcactaagtagaaggtactgca

SEQ ID NO: 3152223 - DNA, 25 bp, Homo sapien
cggtcaggcgtaactggctacaagc

SEQ ID NO: 3152224 - DNA, 25 bp, Homo sapien
cacaagtcagtgacatagccggtca

SEQ ID NO: 3152225 - DNA, 25 bp, Homo sapien
tgcaccggaaccacaagtcagtgac

SEQ ID NO: 3152226 - DNA, 25 bp, Homo sapien
tcttattggagaaggactccgactt

SEQ ID NO: 3152227 - DNA, 25 bp, Homo sapien
tattggagaaggactccgacttcga

SEQ ID NO: 3152228 - DNA, 25 bp, Homo sapien
ttggcaatccacatcttattggaga

SEQ ID NO: 3152229 - DNA, 25 bp, Homo sapien
gagaaggactccgacttcgagacat

SEQ ID NO: 3152230 - DNA, 25 bp, Homo sapien
taaaagggaacattgagtctgcagg

SEQ ID NO: 3152231 - DNA, 25 bp, Homo sapien
cagttacctaggcagatagtgctcc

SEQ ID NO: 3152232 - DNA, 25 bp, Homo sapien
cacacagttcccataaaagagcgta

SEQ ID NO: 3152233 - DNA, 25 bp, Homo sapien
tctaaagttacaaatgcgccaagcc

SEQ ID NO: 3152234 - DNA, 25 bp, Homo sapien
tcactgtatgttacaccgggcaggg

SEQ ID NO: 3152235 - DNA, 25 bp, Homo sapien
gatcatgtactaagggccctacgag

SEQ ID NO: 3152236 - DNA, 25 bp, Homo sapien
cacaacagtggaataggcgaaacct

SEQ ID NO: 3152237 - DNA, 25 bp, Homo sapien
taggaatacagcaggtggagcaccc

SEQ ID NO: 3152238 - DNA, 25 bp, Homo sapien
gtctgtgtgttcgtgcagaatggac

SEQ ID NO: 3152239 - DNA, 25 bp, Homo sapien
gttcgtgcagaatggactcaatccc

SEQ ID NO: 3152240 - DNA, 25 bp, Homo sapien
tggactcaatcccacactccttaag

SEQ ID NO: 3152241 - DNA, 25 bp, Homo sapien
tcctggaaggtctgttggtctaaac

SEQ ID NO: 3152242 - DNA, 25 bp, Homo sapien
ccgcagagcaaagggtcacatttta

SEQ ID NO: 3152243 - DNA, 25 bp, Homo sapien
tatatccgcagagcaaagggtcaca

SEQ ID NO: 3152244 - DNA, 25 bp, Homo sapien
tttaattcttctgggagcatccaca

SEQ ID NO: 3152245 - DNA, 25 bp, Homo sapien
gcagtatatccgcagagcaaagggt

SEQ ID NO: 3152246 - DNA, 25 bp, Homo sapien
gcaccccacaggagagtctgctggt

SEQ ID NO: 3152247 - DNA, 25 bp, Homo sapien
aaaggctggaaccacccagaccagt

SEQ ID NO: 3152248 - DNA, 25 bp, Homo sapien
tcagtactcaaagaagggatgccag

SEQ ID NO: 3152249 - DNA, 25 bp, Homo sapien
agagtctgctggtgattctgctggt

SEQ ID NO: 3152250 - DNA, 25 bp, Homo sapien
ccttcagtagctcagatgggccatg

SEQ ID NO: 3152251 - DNA, 25 bp, Homo sapien
agttttgagaagatcccaagaggtc

SEQ ID NO: 3152252 - DNA, 25 bp, Homo sapien
accagtagcctgttgatcttgcaga

SEQ ID NO: 3152253 - DNA, 25 bp, Homo sapien
tcccagagttggatgctcagtgact

SEQ ID NO: 3152254 - DNA, 25 bp, Homo sapien
tgtgaaccacagtaacccagctgcc

SEQ ID NO: 3152255 - DNA, 25 bp, Homo sapien
atgtgtgaaccacagtaacccagct

SEQ ID NO: 3152256 - DNA, 25 bp, Homo sapien
tgaaccacagtaacccagctgccta

SEQ ID NO: 3152257 - DNA, 25 bp, Homo sapien
accacagtaacccagctgcctaggg

SEQ ID NO: 3152258 - DNA, 25 bp, Homo sapien
gagaaacaaactgtcaatcgtccat

SEQ ID NO: 3152259 - DNA, 25 bp, Homo sapien
tgagaaacaaactgtcaatcgtcca

SEQ ID NO: 3152260 - DNA, 25 bp, Homo sapien
ctgagaaacaaactgtcaatcgtcc

SEQ ID NO: 3152261 - DNA, 25 bp, Homo sapien
gaaacaaactgtcaatcgtccataa

SEQ ID NO: 3152262 - DNA, 25 bp, Homo sapien
gattcctggatgcaactagagtgtc

SEQ ID NO: 3152263 - DNA, 25 bp, Homo sapien
ctttctcctgattcctggatgcaac

SEQ ID NO: 3152264 - DNA, 25 bp, Homo sapien
tggatgcaactagagtgtccacctg

SEQ ID NO: 3152265 - DNA, 25 bp, Homo sapien
ttcccagcttgtgtggtgaggattg

SEQ ID NO: 3152266 - DNA, 25 bp, Homo sapien
aaaaataacgacaggagacagagga

SEQ ID NO: 3152267 - DNA, 25 bp, Homo sapien
ctcaccttcaaaaaataacgacagg

SEQ ID NO: 3152268 - DNA, 25 bp, Homo sapien
gagaaaagtggatgcttctgagctc

SEQ ID NO: 3152269 - DNA, 25 bp, Homo sapien
acagaggagaaaagtggatgcttct

SEQ ID NO: 3152270 - DNA, 25 bp, Homo sapien
cagacaccaaacctgctggcttcat

SEQ ID NO: 3152271 - DNA, 25 bp, Homo sapien
ttagcagcatgagagaaggtccaat

SEQ ID NO: 3152272 - DNA, 25 bp, Homo sapien
gaagaaagtgatcagcatcagggtc

SEQ ID NO: 3152273 - DNA, 25 bp, Homo sapien
caagagtgaggaaggtttagcagca

SEQ ID NO: 3152274 - DNA, 25 bp, Homo sapien
tgatcagcatcagggtcaaatttag

SEQ ID NO: 3152275 - DNA, 25 bp, Homo sapien
cttttctttcatgttgttctgaatc

SEQ ID NO: 3152276 - DNA, 25 bp, Homo sapien
gacagagccacatttggctctccct

SEQ ID NO: 3152277 - DNA, 25 bp, Homo sapien
gagccacatttggctctccctgaag

SEQ ID NO: 3152278 - DNA, 25 bp, Homo sapien
cagagccacatttggctctccctga

SEQ ID NO: 3152279 - DNA, 25 bp, Homo sapien
cataaaggagaggctaaatcccttt

SEQ ID NO: 3152280 - DNA, 25 bp, Homo sapien
cagtggtcatgttaggattataatt

SEQ ID NO: 3152281 - DNA, 25 bp, Homo sapien
ggtcatgttaggattataattgaat

SEQ ID NO: 3152282 - DNA, 25 bp, Homo sapien
tggccagtggtcatgttaggattat

SEQ ID NO: 3152283 - DNA, 25 bp, Homo sapien
gccagtggtcatgttaggattataa

SEQ ID NO: 3152284 - DNA, 25 bp, Homo sapien
attggtgttccagatgtcaaggaca

SEQ ID NO: 3152285 - DNA, 25 bp, Homo sapien
ccgacttcacgctctccgcattggg

SEQ ID NO: 3152286 - DNA, 25 bp, Homo sapien
ttagattggtgttccagatgtcaag

SEQ ID NO: 3152287 - DNA, 25 bp, Homo sapien
gatgatctgggaaccgacttcacgc

SEQ ID NO: 3152288 - DNA, 25 bp, Homo sapien
tatgtacggttctgtttctggctgg

SEQ ID NO: 3152289 - DNA, 25 bp, Homo sapien
gctttcccaattagatcaaccgatg

SEQ ID NO: 3152290 - DNA, 25 bp, Homo sapien
cattggcagcagatgagttggtgac

SEQ ID NO: 3152291 - DNA, 25 bp, Homo sapien
taacaggcatatgatccacctcgcc

SEQ ID NO: 3152292 - DNA, 25 bp, Homo sapien
agccaatttgccaataggtgcaaaa

SEQ ID NO: 3152293 - DNA, 25 bp, Homo sapien
tttagaccaactggagccaatttgc

SEQ ID NO: 3152294 - DNA, 25 bp, Homo sapien
ggagaattgctttagaccaactgga

SEQ ID NO: 3152295 - DNA, 25 bp, Homo sapien
tcttgagcaatgtctcccccatcca

SEQ ID NO: 3152296 - DNA, 25 bp, Homo sapien
gctggaggagtgagcagacgtggca

SEQ ID NO: 3152297 - DNA, 25 bp, Homo sapien
cttgccaaatactgcggctggagga

SEQ ID NO: 3152298 - DNA, 25 bp, Homo sapien
tgcggctggaggagtgagcagacgt

SEQ ID NO: 3152299 - DNA, 25 bp, Homo sapien
ttgccaaatactgcggctggaggag

SEQ ID NO: 3152300 - DNA, 25 bp, Homo sapien
gaaccacatggcaaggattgccatg

SEQ ID NO: 3152301 - DNA, 25 bp, Homo sapien
tacttagacatagaacaactccact

SEQ ID NO: 3152302 - DNA, 25 bp, Homo sapien
ctttctttggtctaagttcagattg

SEQ ID NO: 3152303 - DNA, 25 bp, Homo sapien
tcccatcctattctggttactgaag

SEQ ID NO: 3152304 - DNA, 25 bp, Homo sapien
tctcagataagtcacatttggctcc

SEQ ID NO: 3152305 - DNA, 25 bp, Homo sapien
ggaatagtcatacaagctctcagat

SEQ ID NO: 3152306 - DNA, 25 bp, Homo sapien
atagtcatacaagctctcagataag

SEQ ID NO: 3152307 - DNA, 25 bp, Homo sapien
agaaggaatagtcatacaagctctc

SEQ ID NO: 3152308 - DNA, 25 bp, Homo sapien
tcccaaggaaggacacttgcaccat

SEQ ID NO: 3152309 - DNA, 25 bp, Homo sapien
gcaccataagtaggggtgaagtgac

SEQ ID NO: 3152310 - DNA, 25 bp, Homo sapien
tgccctcaggcaccataagtagggg

SEQ ID NO: 3152311 - DNA, 25 bp, Homo sapien
agcagccatgggtttgacagccatg

SEQ ID NO: 3152312 - DNA, 25 bp, Homo sapien
gtgaatcacctagatccagaaaggt

SEQ ID NO: 3152313 - DNA, 25 bp, Homo sapien
accatacgggactactatatctggg

SEQ ID NO: 3152314 - DNA, 25 bp, Homo sapien
gggcctttgtcatcaaccatacggg

SEQ ID NO: 3152315 - DNA, 25 bp, Homo sapien
tgtgctacaagtccaagggcctttg

SEQ ID NO: 3152316 - DNA, 25 bp, Homo sapien
ttcctagtagttgctgtgctacaag

SEQ ID NO: 3152317 - DNA, 25 bp, Homo sapien
gctctaggggactgcatagagccca

SEQ ID NO: 3152318 - DNA, 25 bp, Homo sapien
tttgctctaggggactgcatagagc

SEQ ID NO: 3152319 - DNA, 25 bp, Homo sapien
gggactgcatagagcccagctggag

SEQ ID NO: 3152320 - DNA, 25 bp, Homo sapien
taggggactgcatagagcccagctg

SEQ ID NO: 3152321 - DNA, 25 bp, Homo sapien
gctggaacgttgtgacgatctcaca

SEQ ID NO: 3152322 - DNA, 25 bp, Homo sapien
cagcatgctggaacgttgtgacgat

SEQ ID NO: 3152323 - DNA, 25 bp, Homo sapien
catgctggaacgttgtgacgatctc

SEQ ID NO: 3152324 - DNA, 25 bp, Homo sapien
tgctggaacgttgtgacgatctcac

SEQ ID NO: 3152325 - DNA, 25 bp, Homo sapien
tggcggttcctcaaggatctagagc

SEQ ID NO: 3152326 - DNA, 25 bp, Homo sapien
gtggcggttcctcaaggatctagag

SEQ ID NO: 3152327 - DNA, 25 bp, Homo sapien
agacagtgtggcggttcctcaagga

SEQ ID NO: 3152328 - DNA, 25 bp, Homo sapien
cggttcctcaaggatctagagctag

SEQ ID NO: 3152329 - DNA, 25 bp, Homo sapien
gacttacagcctacagatctatgag

SEQ ID NO: 3152330 - DNA, 25 bp, Homo sapien
tgtcatggtggtaaagccctcatga

SEQ ID NO: 3152331 - DNA, 25 bp, Homo sapien
tgagacacaaactcaagcagtctgg

SEQ ID NO: 3152332 - DNA, 25 bp, Homo sapien
ttgtcgtttgtgatccagaaagcca

SEQ ID NO: 3152333 - DNA, 25 bp, Homo sapien
tataatctattttcgaggaacacat

SEQ ID NO: 3152334 - DNA, 25 bp, Homo sapien
tgaggacaacgatccccatctgtgg

SEQ ID NO: 3152335 - DNA, 25 bp, Homo sapien
tctgtggtgccccactgaattcata

SEQ ID NO: 3152336 - DNA, 25 bp, Homo sapien
tgaattcatactgatccacgtgcag

SEQ ID NO: 3152337 - DNA, 25 bp, Homo sapien
tggatggtgggcaagttattgacca

SEQ ID NO: 3152338 - DNA, 25 bp, Homo sapien
ttttacaaagagacagctccaggcc

SEQ ID NO: 3152339 - DNA, 25 bp, Homo sapien
acaaggccacctgttttacaaagag

SEQ ID NO: 3152340 - DNA, 25 bp, Homo sapien
aggccagctctgtcatgaactcctg

SEQ ID NO: 3152341 - DNA, 25 bp, Homo sapien
cacttgtgcaatgcttggcactggg

SEQ ID NO: 3152342 - DNA, 25 bp, Homo sapien
tggctgctgcacattctacgtcttg

SEQ ID NO: 3152343 - DNA, 25 bp, Homo sapien
tgtggacccaatctaacgccttgta

SEQ ID NO: 3152344 - DNA, 25 bp, Homo sapien
ttgaggaaggcgctcaatgactgtc

SEQ ID NO: 3152345 - DNA, 25 bp, Homo sapien
ttgttccacagaccattggctcctg

SEQ ID NO: 3152346 - DNA, 25 bp, Homo sapien
gaatctggccatgtatggctgggaa

SEQ ID NO: 3152347 - DNA, 25 bp, Homo sapien
gtcagtgttctctatcccacaagca

SEQ ID NO: 3152348 - DNA, 25 bp, Homo sapien
ggtgacaaggtgtaatcatcattat

SEQ ID NO: 3152349 - DNA, 25 bp, Homo sapien
aatgctgtgccttcctccagatccg

SEQ ID NO: 3152350 - DNA, 25 bp, Homo sapien
tatctcttgtattccaccagctgcc

SEQ ID NO: 3152351 - DNA, 25 bp, Homo sapien
tccagatccgcttctatctcaggga

SEQ ID NO: 3152352 - DNA, 25 bp, Homo sapien
caccagctgcccatcttgtcaatat

SEQ ID NO: 3152353 - DNA, 25 bp, Homo sapien
tcagaccaaggacctcaccctggag

SEQ ID NO: 3152354 - DNA, 25 bp, Homo sapien
cctggagagtcagggccttttggga

SEQ ID NO: 3152355 - DNA, 25 bp, Homo sapien
gtttcagaccaaggacctcaccctg

SEQ ID NO: 3152356 - DNA, 25 bp, Homo sapien
cagagcttctccggggtggtgcgtt

SEQ ID NO: 3152357 - DNA, 25 bp, Homo sapien
cagggcggaaggccattaaaagcca

SEQ ID NO: 3152358 - DNA, 25 bp, Homo sapien
gttcagagcttctccggggtggtgc

SEQ ID NO: 3152359 - DNA, 25 bp, Homo sapien
tgaagtgcctctgttcagagcttct

SEQ ID NO: 3152360 - DNA, 25 bp, Homo sapien
gattcaaggtgaaagcctgtgtgcc

SEQ ID NO: 3152361 - DNA, 25 bp, Homo sapien
taccatagagctagggtgtggcctg

SEQ ID NO: 3152362 - DNA, 25 bp, Homo sapien
gatcagtcttcacaatcgcacccga

SEQ ID NO: 3152363 - DNA, 25 bp, Homo sapien
aggcactttgcaaccctctgatggg

SEQ ID NO: 3152364 - DNA, 25 bp, Homo sapien
ttttgcttgctgagagcattctctg

SEQ ID NO: 3152365 - DNA, 25 bp, Homo sapien
tttgcttgctgagagcattctctga

SEQ ID NO: 3152366 - DNA, 25 bp, Homo sapien
gcttgctgagagcattctctgatgg

SEQ ID NO: 3152367 - DNA, 25 bp, Homo sapien
ttgctgagagcattctctgatggga

SEQ ID NO: 3152368 - DNA, 25 bp, Homo sapien
ccttatgaaacacaattctagacca

SEQ ID NO: 3152369 - DNA, 25 bp, Homo sapien
gaaacacaattctagaccattctct

SEQ ID NO: 3152370 - DNA, 25 bp, Homo sapien
acacaattctagaccattctctgac

SEQ ID NO: 3152371 - DNA, 25 bp, Homo sapien
tatgcttccttatgaaacacaattc

SEQ ID NO: 3152372 - DNA, 25 bp, Homo sapien
tagatgtagagctttagttcttcca

SEQ ID NO: 3152373 - DNA, 25 bp, Homo sapien
ttagatgtagagctttagttcttcc

SEQ ID NO: 3152374 - DNA, 25 bp, Homo sapien
gttagagccgatagaatgatgagta

SEQ ID NO: 3152375 - DNA, 25 bp, Homo sapien
gaatgatgagtacaaatgcaagcat

SEQ ID NO: 3152376 - DNA, 25 bp, Homo sapien
tgttagagccgatagaatgatgagt

SEQ ID NO: 3152377 - DNA, 25 bp, Homo sapien
ctgttagagccgatagaatgatgag

SEQ ID NO: 3152378 - DNA, 25 bp, Homo sapien
tgtcctagtgttcgaccatccaccg

SEQ ID NO: 3152379 - DNA, 25 bp, Homo sapien
agacggtgtttctgccgggttgaca

SEQ ID NO: 3152380 - DNA, 25 bp, Homo sapien
tactccatgagacgctgtggatgtg

SEQ ID NO: 3152381 - DNA, 25 bp, Homo sapien
atccaccgcatgtgcagctccaggt

SEQ ID NO: 3152382 - DNA, 25 bp, Homo sapien
ttcttgggtctcaagtccgctggcc

SEQ ID NO: 3152383 - DNA, 25 bp, Homo sapien
ctcaaactgagacgttggttcttct

SEQ ID NO: 3152384 - DNA, 25 bp, Homo sapien
tgggtctcaagtccgctggccttgg

SEQ ID NO: 3152385 - DNA, 25 bp, Homo sapien
ctgcctcttgactcaaactgagacg

SEQ ID NO: 3152386 - DNA, 25 bp, Homo sapien
attttagtatacatgatgctgaagg

SEQ ID NO: 3152387 - DNA, 25 bp, Homo sapien
gtatacatgatgctgaaggaagcac

SEQ ID NO: 3152388 - DNA, 25 bp, Homo sapien
tagtatacatgatgctgaaggaagc

SEQ ID NO: 3152389 - DNA, 25 bp, Homo sapien
tttagtatacatgatgctgaaggaa

SEQ ID NO: 3152390 - DNA, 25 bp, Homo sapien
tatgtgaaagtccagcgtctcccaa

SEQ ID NO: 3152391 - DNA, 25 bp, Homo sapien
catccattctgtcatggtgccttta

SEQ ID NO: 3152392 - DNA, 25 bp, Homo sapien
cagcggacataggttcttctggcct

SEQ ID NO: 3152393 - DNA, 25 bp, Homo sapien
cctgttccttgcgatatagaggaga

SEQ ID NO: 3152394 - DNA, 25 bp, Homo sapien
ggcttctgatggtgaactgtgcatt

SEQ ID NO: 3152395 - DNA, 25 bp, Homo sapien
tgccacagtcaactgcctgaatagg

SEQ ID NO: 3152396 - DNA, 25 bp, Homo sapien
tgtaactctaactgcagtgcagcct

SEQ ID NO: 3152397 - DNA, 25 bp, Homo sapien
ttgttgccctagcaatacctctggg

SEQ ID NO: 3152398 - DNA, 25 bp, Homo sapien
aggagaattagtgcttcctgtgctg

SEQ ID NO: 3152399 - DNA, 25 bp, Homo sapien
tcctgctggttctcagacaaggtca

SEQ ID NO: 3152400 - DNA, 25 bp, Homo sapien
aatggtattggcgttatgatggtga

SEQ ID NO: 3152401 - DNA, 25 bp, Homo sapien
tggtgattgtttacaaagaagggct

SEQ ID NO: 3152402 - DNA, 25 bp, Homo sapien
aggtaatattccaacattgccacaa

SEQ ID NO: 3152403 - DNA, 25 bp, Homo sapien
cagacaggtaatattccaacattgc

SEQ ID NO: 3152404 - DNA, 25 bp, Homo sapien
caggtaatattccaacattgccaca

SEQ ID NO: 3152405 - DNA, 25 bp, Homo sapien
gacaggtaatattccaacattgcca

SEQ ID NO: 3152406 - DNA, 25 bp, Homo sapien
tgccttacttgatagtcttgctttt

SEQ ID NO: 3152407 - DNA, 25 bp, Homo sapien
gtccaagattgcattttgtaggttg

SEQ ID NO: 3152408 - DNA, 25 bp, Homo sapien
tggtccaagattgcattttgtaggt

SEQ ID NO: 3152409 - DNA, 25 bp, Homo sapien
gtggtccaagattgcattttgtagg

SEQ ID NO: 3152410 - DNA, 25 bp, Homo sapien
aatgccattctcttgtccattgctc

SEQ ID NO: 3152411 - DNA, 25 bp, Homo sapien
gccattctcttgtccattgctcatc

SEQ ID NO: 3152412 - DNA, 25 bp, Homo sapien
gcaatgccattctcttgtccattgc

SEQ ID NO: 3152413 - DNA, 25 bp, Homo sapien
ctgcaatgccattctcttgtccatt

SEQ ID NO: 3152414 - DNA, 25 bp, Homo sapien
tggaagcctggaatcagtccagcga

SEQ ID NO: 3152415 - DNA, 25 bp, Homo sapien
tcagtccagcgagtcgtagggcaag

SEQ ID NO: 3152416 - DNA, 25 bp, Homo sapien
tctttttaatggatcctcttcctgc

SEQ ID NO: 3152417 - DNA, 25 bp, Homo sapien
ggcaatgctgcctcctactgggcta

SEQ ID NO: 3152418 - DNA, 25 bp, Homo sapien
ggttacacctggctggggcaactca

SEQ ID NO: 3152419 - DNA, 25 bp, Homo sapien
tcagtttatccagggttacacctgg

SEQ ID NO: 3152420 - DNA, 25 bp, Homo sapien
tggggcaactcagtgatgaagagaa

SEQ ID NO: 3152421 - DNA, 25 bp, Homo sapien
ctcagtttatccagggttacacctg

SEQ ID NO: 3152422 - DNA, 25 bp, Homo sapien
aatccagatggtagaacttcatgag

SEQ ID NO: 3152423 - DNA, 25 bp, Homo sapien
cagaatttttttggcgaatccagat

SEQ ID NO: 3152424 - DNA, 25 bp, Homo sapien
tatatttccgattaagaagagtttc

SEQ ID NO: 3152425 - DNA, 25 bp, Homo sapien
agaagagtttctgggtttagcatgc

SEQ ID NO: 3152426 - DNA, 25 bp, Homo sapien
tatgaacagggattactctctcggc

SEQ ID NO: 3152427 - DNA, 25 bp, Homo sapien
caagagtacattagttgggtagaga

SEQ ID NO: 3152428 - DNA, 25 bp, Homo sapien
tggtttaagttaagctttcgcagcg

SEQ ID NO: 3152429 - DNA, 25 bp, Homo sapien
ggagaatccctgatacaatttacag

SEQ ID NO: 3152430 - DNA, 25 bp, Homo sapien
cacagctattagatcctctccggag

SEQ ID NO: 3152431 - DNA, 25 bp, Homo sapien
gatcctctccggagcttcaagtcag

SEQ ID NO: 3152432 - DNA, 25 bp, Homo sapien
gtccagattcacagctattagatcc

SEQ ID NO: 3152433 - DNA, 25 bp, Homo sapien
cagattcacagctattagatcctct

SEQ ID NO: 3152434 - DNA, 25 bp, Homo sapien
tgcctagaaagggttgtcgagttaa

SEQ ID NO: 3152435 - DNA, 25 bp, Homo sapien
agttaaaacaaatgcgtgacaaggg

SEQ ID NO: 3152436 - DNA, 25 bp, Homo sapien
aagctggtgcctagaaagggttgtc

SEQ ID NO: 3152437 - DNA, 25 bp, Homo sapien
ctttctgcaagacggggcaatggaa

SEQ ID NO: 3152438 - DNA, 25 bp, Homo sapien
aattccaatttgctccagcagagaa

SEQ ID NO: 3152439 - DNA, 25 bp, Homo sapien
cctgttatgtgtgctgaagagcttt

SEQ ID NO: 3152440 - DNA, 25 bp, Homo sapien
tcaatcaatttcaggaattccaatt

SEQ ID NO: 3152441 - DNA, 25 bp, Homo sapien
tgttatgtgtgctgaagagctttcc

SEQ ID NO: 3152442 - DNA, 25 bp, Homo sapien
tgagaacgagggtaaaagtagaaca

SEQ ID NO: 3152443 - DNA, 25 bp, Homo sapien
gctggtggtaacctgccttctagca

SEQ ID NO: 3152444 - DNA, 25 bp, Homo sapien
tcagacttaagggtggcaaaacata

SEQ ID NO: 3152445 - DNA, 25 bp, Homo sapien
gggctactaatgcattctaccatgg

SEQ ID NO: 3152446 - DNA, 25 bp, Homo sapien
tcttgatgagagtatctgtgaagcc

SEQ ID NO: 3152447 - DNA, 25 bp, Homo sapien
ataactacatgcagcaggatgctca

SEQ ID NO: 3152448 - DNA, 25 bp, Homo sapien
tatggcatgtaacactaattacatc

SEQ ID NO: 3152449 - DNA, 25 bp, Homo sapien
ggcatgtaacactaattacatccat

SEQ ID NO: 3152450 - DNA, 25 bp, Homo sapien
tttgataactacatgcagcaggatg

SEQ ID NO: 3152451 - DNA, 25 bp, Homo sapien
cctggtagagatgagtatatttata

SEQ ID NO: 3152452 - DNA, 25 bp, Homo sapien
atgactttagggagatacgggaaat

SEQ ID NO: 3152453 - DNA, 25 bp, Homo sapien
acttatctgataacttctgttcctt

SEQ ID NO: 3152454 - DNA, 25 bp, Homo sapien
agggaacttatctgataacttctgt

SEQ ID NO: 3152455 - DNA, 25 bp, Homo sapien
ttatataaatgtgatgactttaggg

SEQ ID NO: 3152456 - DNA, 25 bp, Homo sapien
ggccgggttgccgcacaagtgcatt

SEQ ID NO: 3152457 - DNA, 25 bp, Homo sapien
gagggccgggttgccgcacaagtgc

SEQ ID NO: 3152458 - DNA, 25 bp, Homo sapien
ccgggttgccgcacaagtgcattga

SEQ ID NO: 3152459 - DNA, 25 bp, Homo sapien
ttcccgagggccgggttgccgcaca

SEQ ID NO: 3152460 - DNA, 25 bp, Homo sapien
ggtatttcaggatccagtgaaattc

SEQ ID NO: 3152461 - DNA, 25 bp, Homo sapien
tgacctgctgtccacatttagtggg

SEQ ID NO: 3152462 - DNA, 25 bp, Homo sapien
gctcaaagtgcaaagctgttggtat

SEQ ID NO: 3152463 - DNA, 25 bp, Homo sapien
ttagttcatcattattttccttctg

SEQ ID NO: 3152464 - DNA, 25 bp, Homo sapien
tttattgttcactggaagtttagta

SEQ ID NO: 3152465 - DNA, 25 bp, Homo sapien
cactggaagtttagtactagtttct

SEQ ID NO: 3152466 - DNA, 25 bp, Homo sapien
tgttcactggaagtttagtactagt

SEQ ID NO: 3152467 - DNA, 25 bp, Homo sapien
tattgttcactggaagtttagtact

SEQ ID NO: 3152468 - DNA, 25 bp, Homo sapien
tgtccttgaacaagttgtccggtct

SEQ ID NO: 3152469 - DNA, 25 bp, Homo sapien
tgtccggtcttagactttccttatc

SEQ ID NO: 3152470 - DNA, 25 bp, Homo sapien
tccggtcttagactttccttatcta

SEQ ID NO: 3152471 - DNA, 25 bp, Homo sapien
tgaacaagttgtccggtcttagact

SEQ ID NO: 3152472 - DNA, 25 bp, Homo sapien
ggtggaattgagacccgctggcttc

SEQ ID NO: 3152473 - DNA, 25 bp, Homo sapien
gggagtggatcctagagcctttctg

SEQ ID NO: 3152474 - DNA, 25 bp, Homo sapien
tcagctttcagcacaatgggacgtg

SEQ ID NO: 3152475 - DNA, 25 bp, Homo sapien
tgatagctgcacaggtactggttgg

SEQ ID NO: 3152476 - DNA, 25 bp, Homo sapien
ggacctgcgaggtgcggctgccgca

SEQ ID NO: 3152477 - DNA, 25 bp, Homo sapien
aggagggccgccgcttccgcgtcgg

SEQ ID NO: 3152478 - DNA, 25 bp, Homo sapien
gaggagggccgccgcttccgcgtcg

SEQ ID NO: 3152479 - DNA, 25 bp, Homo sapien
cctgcgaggtgcggctgccgcagcg

SEQ ID NO: 3152480 - DNA, 25 bp, Homo sapien
tcagaaacgggccccttcaattcgc

SEQ ID NO: 3152481 - DNA, 25 bp, Homo sapien
agtggtgcacagactcgcgctctga

SEQ ID NO: 3152482 - DNA, 25 bp, Homo sapien
tcaattcgcgtggacctatctgcta

SEQ ID NO: 3152483 - DNA, 25 bp, Homo sapien
ggacctatctgctaagtggtgcaca

SEQ ID NO: 3152484 - DNA, 25 bp, Homo sapien
catttcggtaagtcatctgggcagg

SEQ ID NO: 3152485 - DNA, 25 bp, Homo sapien
gaactttgcaatccatgcgccaatg

SEQ ID NO: 3152486 - DNA, 25 bp, Homo sapien
aacttctgtgaaattgagtcctgag

SEQ ID NO: 3152487 - DNA, 25 bp, Homo sapien
gatatagcactcagtaatcagatgc

SEQ ID NO: 3152488 - DNA, 25 bp, Homo sapien
caaagtgcttgggtgcattctgttc

SEQ ID NO: 3152489 - DNA, 25 bp, Homo sapien
gttcatgtcctagctatcagcattt

SEQ ID NO: 3152490 - DNA, 25 bp, Homo sapien
tctgttcatgtcctagctatcagca

SEQ ID NO: 3152491 - DNA, 25 bp, Homo sapien
ttctgttcatgtcctagctatcagc

SEQ ID NO: 3152492 - DNA, 25 bp, Homo sapien
cagtccaagctgtatgtaggcccct

SEQ ID NO: 3152493 - DNA, 25 bp, Homo sapien
tcccaaggctgtgcaaggtaccatg

SEQ ID NO: 3152494 - DNA, 25 bp, Homo sapien
tatcatccttaggtctggagggcag

SEQ ID NO: 3152495 - DNA, 25 bp, Homo sapien
aagaatccaaggctgcgctcatggg

SEQ ID NO: 3152496 - DNA, 25 bp, Homo sapien
tgacaacctcctggtgacgccaatg

SEQ ID NO: 3152497 - DNA, 25 bp, Homo sapien
gacgccaatgctgttagtccatgaa

SEQ ID NO: 3152498 - DNA, 25 bp, Homo sapien
gcctcattggagacaagggaagtca

SEQ ID NO: 3152499 - DNA, 25 bp, Homo sapien
aacacatcatacaaggaaggcccca

SEQ ID NO: 3152500 - DNA, 25 bp, Homo sapien
gaacatataacaagggcatcccacc

SEQ ID NO: 3152501 - DNA, 25 bp, Homo sapien
catatcaagtgagtggcaatagctc

SEQ ID NO: 3152502 - DNA, 25 bp, Homo sapien
catatagctagtccaggcaggctga

SEQ ID NO: 3152503 - DNA, 25 bp, Homo sapien
gacaccagggtctacgtttgaacca

SEQ ID NO: 3152504 - DNA, 25 bp, Homo sapien
tttatggacatttattagttcccca

SEQ ID NO: 3152505 - DNA, 25 bp, Homo sapien
aagaacgtggattgtgaagatttta

SEQ ID NO: 3152506 - DNA, 25 bp, Homo sapien
ctgaagccatggcagaagaacgtgg

SEQ ID NO: 3152507 - DNA, 25 bp, Homo sapien
caaacagagggaccggctgaagcca

SEQ ID NO: 3152508 - DNA, 25 bp, Homo sapien
ggtatcacaatcatatgcagcctgt

SEQ ID NO: 3152509 - DNA, 25 bp, Homo sapien
ctgcaggtatcacaatcatatgcag

SEQ ID NO: 3152510 - DNA, 25 bp, Homo sapien
aaaattgctggcaatgtgcaaccat

SEQ ID NO: 3152511 - DNA, 25 bp, Homo sapien
taaaaaattgctggcaatgtgcaac

SEQ ID NO: 3152512 - DNA, 25 bp, Homo sapien
gttcatggggcacgacagaagttcc

SEQ ID NO: 3152513 - DNA, 25 bp, Homo sapien
tgggttgttcgccagtggagctctg

SEQ ID NO: 3152514 - DNA, 25 bp, Homo sapien
aagaaggaatggaagttgggttcat

SEQ ID NO: 3152515 - DNA, 25 bp, Homo sapien
tgataccaatatccaatccatagaa

SEQ ID NO: 3152516 - DNA, 25 bp, Homo sapien
tattcaagtcccctaatacttgaca

SEQ ID NO: 3152517 - DNA, 25 bp, Homo sapien
ctagggaatgcactttcaatatttt

SEQ ID NO: 3152518 - DNA, 25 bp, Homo sapien
tttattcaagtcccctaatacttga

SEQ ID NO: 3152519 - DNA, 25 bp, Homo sapien
ttcaagtcccctaatacttgacatt

SEQ ID NO: 3152520 - DNA, 25 bp, Homo sapien
catggagtgccatttgtatttgaaa

SEQ ID NO: 3152521 - DNA, 25 bp, Homo sapien
cagctcctcttccattaggacatgg

SEQ ID NO: 3152522 - DNA, 25 bp, Homo sapien
cactgttgccatatgctctattttt

SEQ ID NO: 3152523 - DNA, 25 bp, Homo sapien
ccccactgcgcaatttgtgtcatct

SEQ ID NO: 3152524 - DNA, 25 bp, Homo sapien
ctaaaaacggcctaagcatactggc

SEQ ID NO: 3152525 - DNA, 25 bp, Homo sapien
taaaaacggcctaagcatactggct

SEQ ID NO: 3152526 - DNA, 25 bp, Homo sapien
gaagcaaatgctgataccacacttc

SEQ ID NO: 3152527 - DNA, 25 bp, Homo sapien
caaatgctgataccacacttcctgt

SEQ ID NO: 3152528 - DNA, 25 bp, Homo sapien
tagcatggcagggtgcacactcatt

SEQ ID NO: 3152529 - DNA, 25 bp, Homo sapien
gatgggtctagtggtctcccgcaca

SEQ ID NO: 3152530 - DNA, 25 bp, Homo sapien
gaaactctgtgtaccctctgtgcag

SEQ ID NO: 3152531 - DNA, 25 bp, Homo sapien
tatattggcatcttaccttaggaca

SEQ ID NO: 3152532 - DNA, 25 bp, Homo sapien
tacaacacaagagcgggcagtaggc

SEQ ID NO: 3152533 - DNA, 25 bp, Homo sapien
ccttgtctacaacacaagagcgggc

SEQ ID NO: 3152534 - DNA, 25 bp, Homo sapien
actcccttgtctacaacacaagagc

SEQ ID NO: 3152535 - DNA, 25 bp, Homo sapien
tgtctacaacacaagagcgggcagt

SEQ ID NO: 3152536 - DNA, 25 bp, Homo sapien
tccagtgttcccttccccatgaatt

SEQ ID NO: 3152537 - DNA, 25 bp, Homo sapien
cattggaaattgttaaatggctctt

SEQ ID NO: 3152538 - DNA, 25 bp, Homo sapien
catctccattggaaattgttaaatg

SEQ ID NO: 3152539 - DNA, 25 bp, Homo sapien
cagtgttcccttccccatgaattct

SEQ ID NO: 3152540 - DNA, 25 bp, Homo sapien
gacgggcccggccattggctgtcgg

SEQ ID NO: 3152541 - DNA, 25 bp, Homo sapien
gcacggggataagccatgtctgcgc

SEQ ID NO: 3152542 - DNA, 25 bp, Homo sapien
ggtgtggctcatgcagtagcacggg

SEQ ID NO: 3152543 - DNA, 25 bp, Homo sapien
agccaatcccggatggggcgggacg

SEQ ID NO: 3152544 - DNA, 25 bp, Homo sapien
ccaatcccgggaagactctgggcaa

SEQ ID NO: 3152545 - DNA, 25 bp, Homo sapien
cagctgacaaagaggcctgcgacct

SEQ ID NO: 3152546 - DNA, 25 bp, Homo sapien
tgcgacgggcgcacaaaccagagag

SEQ ID NO: 3152547 - DNA, 25 bp, Homo sapien
tcccctggagaggtcgggtagctca

SEQ ID NO: 3152548 - DNA, 25 bp, Homo sapien
ggaacctccggctgttccgctgggc

SEQ ID NO: 3152549 - DNA, 25 bp, Homo sapien
ggaagcaaagcgcaaaattgttacg

SEQ ID NO: 3152550 - DNA, 25 bp, Homo sapien
cgcgggagaccgaaagccgaagact

SEQ ID NO: 3152551 - DNA, 25 bp, Homo sapien
aattgttacggtgcccagacctgcg

SEQ ID NO: 3152552 - DNA, 25 bp, Homo sapien
acccgctacatagtggcgcgtcagc

SEQ ID NO: 3152553 - DNA, 25 bp, Homo sapien
gaaacccgctacatagtggcgcgtc

SEQ ID NO: 3152554 - DNA, 25 bp, Homo sapien
ccgaaacccgctacatagtggcgcg

SEQ ID NO: 3152555 - DNA, 25 bp, Homo sapien
aacccgctacatagtggcgcgtcag

SEQ ID NO: 3152556 - DNA, 25 bp, Homo sapien
cacttccgcagacgtaagagacgaa

SEQ ID NO: 3152557 - DNA, 25 bp, Homo sapien
tccgcagacgtaagagacgaactcc

SEQ ID NO: 3152558 - DNA, 25 bp, Homo sapien
gctgcacttccgcagacgtaagaga

SEQ ID NO: 3152559 - DNA, 25 bp, Homo sapien
gacgtaagagacgaactcctggagc

SEQ ID NO: 3152560 - DNA, 25 bp, Homo sapien
gagccggattcggaccttggcgaca

SEQ ID NO: 3152561 - DNA, 25 bp, Homo sapien
cggattcggaccttggcgacaaaca

SEQ ID NO: 3152562 - DNA, 25 bp, Homo sapien
accttggcgacaaacagacgccggg

SEQ ID NO: 3152563 - DNA, 25 bp, Homo sapien
tcggaccttggcgacaaacagacgc

SEQ ID NO: 3152564 - DNA, 25 bp, Homo sapien
gcgttgctctcaatacctcgtggat

SEQ ID NO: 3152565 - DNA, 25 bp, Homo sapien
caaaggcgctcaagttgtaacgaaa

SEQ ID NO: 3152566 - DNA, 25 bp, Homo sapien
tgaaaccacactagaaacacagctg

SEQ ID NO: 3152567 - DNA, 25 bp, Homo sapien
gcactgggtcaaccttaaaagggca

SEQ ID NO: 3152568 - DNA, 25 bp, Homo sapien
caattgaaataccagcaacaggaca

SEQ ID NO: 3152569 - DNA, 25 bp, Homo sapien
agtcaattgaaataccagcaacagg

SEQ ID NO: 3152570 - DNA, 25 bp, Homo sapien
ggatagttggcttaagtcaattgaa

SEQ ID NO: 3152571 - DNA, 25 bp, Homo sapien
tattgtaactgaagggatagttggc

SEQ ID NO: 3152572 - DNA, 25 bp, Homo sapien
tgccctgttgccaccagcattgtca

SEQ ID NO: 3152573 - DNA, 25 bp, Homo sapien
cacggacacgtggttgctacaagtt

SEQ ID NO: 3152574 - DNA, 25 bp, Homo sapien
tacaagttagtacgcatatttggcc

SEQ ID NO: 3152575 - DNA, 25 bp, Homo sapien
agcattgtcactgctctagctcctg

SEQ ID NO: 3152576 - DNA, 25 bp, Homo sapien
cagaatccacctccgagttgtgaca

SEQ ID NO: 3152577 - DNA, 25 bp, Homo sapien
tatagcgcctagataacggttcagg

SEQ ID NO: 3152578 - DNA, 25 bp, Homo sapien
taagggtcagctgcattgagttagc

SEQ ID NO: 3152579 - DNA, 25 bp, Homo sapien
cccagagggcttcggtgtagcaagt

SEQ ID NO: 3152580 - DNA, 25 bp, Homo sapien
tccaccagtcggaggtggcagccct

SEQ ID NO: 3152581 - DNA, 25 bp, Homo sapien
aggcttctccaccagtcggaggtgg

SEQ ID NO: 3152582 - DNA, 25 bp, Homo sapien
ggcttctccaccagtcggaggtggc

SEQ ID NO: 3152583 - DNA, 25 bp, Homo sapien
ttctccaccagtcggaggtggcagc

SEQ ID NO: 3152584 - DNA, 25 bp, Homo sapien
gtgctgaccccacatattttagcca

SEQ ID NO: 3152585 - DNA, 25 bp, Homo sapien
gtataaatacaagtgtgcataagtg

SEQ ID NO: 3152586 - DNA, 25 bp, Homo sapien
ggtgtcttgtgctgtataaatacaa

SEQ ID NO: 3152587 - DNA, 25 bp, Homo sapien
catgtatctcaagattaaagtctaa

SEQ ID NO: 3152588 - DNA, 25 bp, Homo sapien
ccggtgatgacatatcaagagcaag

SEQ ID NO: 3152589 - DNA, 25 bp, Homo sapien
tggtgatgtgcaaagcggtcatcca

SEQ ID NO: 3152590 - DNA, 25 bp, Homo sapien
tcagctggctacaacagagctttta

SEQ ID NO: 3152591 - DNA, 25 bp, Homo sapien
ctagggtaccaaggccgcagtgaac

SEQ ID NO: 3152592 - DNA, 25 bp, Homo sapien
tcacgcgcacctgccttttccgcgg

SEQ ID NO: 3152593 - DNA, 25 bp, Homo sapien
tggattaggccctgtgtattgaagg

SEQ ID NO: 3152594 - DNA, 25 bp, Homo sapien
aacccgtagtagtaaagcgcgactg

SEQ ID NO: 3152595 - DNA, 25 bp, Homo sapien
gctcccctgccagttggcgggagta

SEQ ID NO: 3152596 - DNA, 25 bp, Homo sapien
gaaggtctaggactcttccagcagc

SEQ ID NO: 3152597 - DNA, 25 bp, Homo sapien
catccggtgattggcagacacgtct

SEQ ID NO: 3152598 - DNA, 25 bp, Homo sapien
aatggccaatggaacgagagcttct

SEQ ID NO: 3152599 - DNA, 25 bp, Homo sapien
gagagcttctccgtgcttagccaat

SEQ ID NO: 3152600 - DNA, 25 bp, Homo sapien
aatgtagactactccaatgcctatc

SEQ ID NO: 3152601 - DNA, 25 bp, Homo sapien
catcatagtgagttaaagaaaccag

SEQ ID NO: 3152602 - DNA, 25 bp, Homo sapien
attcacaaaatggactgcactgcag

SEQ ID NO: 3152603 - DNA, 25 bp, Homo sapien
caggctagcggttacctttgggtga

SEQ ID NO: 3152604 - DNA, 25 bp, Homo sapien
gctgaaagatataggacttcctgtg

SEQ ID NO: 3152605 - DNA, 25 bp, Homo sapien
ggtaataaaaactttcagcaatata

SEQ ID NO: 3152606 - DNA, 25 bp, Homo sapien
cctccttgagctgaaagatatagga

SEQ ID NO: 3152607 - DNA, 25 bp, Homo sapien
tttcagcaatataggacacaagaga

SEQ ID NO: 3152608 - DNA, 25 bp, Homo sapien
cgaagcatccgagaacctgaagaat

SEQ ID NO: 3152609 - DNA, 25 bp, Homo sapien
taagggcacttagcactaggacctc

SEQ ID NO: 3152610 - DNA, 25 bp, Homo sapien
caaacggcttgtggaactgttggca

SEQ ID NO: 3152611 - DNA, 25 bp, Homo sapien
gtttagcctctgcatcccgaaagga

SEQ ID NO: 3152612 - DNA, 25 bp, Homo sapien
caagggaggcctttgtttcgtccat

SEQ ID NO: 3152613 - DNA, 25 bp, Homo sapien
taaatagcagctcagggctctaggc

SEQ ID NO: 3152614 - DNA, 25 bp, Homo sapien
gagggtaatcgcgaagtctccccag

SEQ ID NO: 3152615 - DNA, 25 bp, Homo sapien
tacacacctgatgaaggcgtgctga

SEQ ID NO: 3152616 - DNA, 25 bp, Homo sapien
taaacatagaaatgggttggtgacc

SEQ ID NO: 3152617 - DNA, 25 bp, Homo sapien
ggacatctcaaagagtgctacttgg

SEQ ID NO: 3152618 - DNA, 25 bp, Homo sapien
tggccttactcaatcttacagtgaa

SEQ ID NO: 3152619 - DNA, 25 bp, Homo sapien
agtgtttaaacccatgtcttgagcc

SEQ ID NO: 3152620 - DNA, 25 bp, Homo sapien
tgctcaggactaggatgcccattag

SEQ ID NO: 3152621 - DNA, 25 bp, Homo sapien
taggatgcccattaggtcattacaa

SEQ ID NO: 3152622 - DNA, 25 bp, Homo sapien
caggactaggatgcccattaggtca

SEQ ID NO: 3152623 - DNA, 25 bp, Homo sapien
tgggtgctcaggactaggatgccca

SEQ ID NO: 3152624 - DNA, 25 bp, Homo sapien
caaagagttatgtaactggttgtga

SEQ ID NO: 3152625 - DNA, 25 bp, Homo sapien
gagaaggaacaaagagttatgtaac

SEQ ID NO: 3152626 - DNA, 25 bp, Homo sapien
aaacaccactgcacttggaccagcg

SEQ ID NO: 3152627 - DNA, 25 bp, Homo sapien
tctattagttgtaaacaccactgca

SEQ ID NO: 3152628 - DNA, 25 bp, Homo sapien
gaaaccctgatgttctggcctgact

SEQ ID NO: 3152629 - DNA, 25 bp, Homo sapien
ccctgatgttctggcctgactgctc

SEQ ID NO: 3152630 - DNA, 25 bp, Homo sapien
gaaaggtgaaaatgccagacaccat

SEQ ID NO: 3152631 - DNA, 25 bp, Homo sapien
tgaaaatgccagacaccatgggctc

SEQ ID NO: 3152632 - DNA, 25 bp, Homo sapien
ttaaacatttgttattaggagtaga

SEQ ID NO: 3152633 - DNA, 25 bp, Homo sapien
attaaacatttgttattaggagtag

SEQ ID NO: 3152634 - DNA, 25 bp, Homo sapien
cacacttgttgcttccgtggagaag

SEQ ID NO: 3152635 - DNA, 25 bp, Homo sapien
tgttaccaccttcgttctccctgct

SEQ ID NO: 3152636 - DNA, 25 bp, Homo sapien
actcccttgacaccggcctctgtta

SEQ ID NO: 3152637 - DNA, 25 bp, Homo sapien
gagaagcgtcatgtcacatttgtgt

SEQ ID NO: 3152638 - DNA, 25 bp, Homo sapien
tttaggatgaatcactctctgaaac

SEQ ID NO: 3152639 - DNA, 25 bp, Homo sapien
gccatatagggagaagcaggattta

SEQ ID NO: 3152640 - DNA, 25 bp, Homo sapien
ctggaagggtttacatgccatatag

SEQ ID NO: 3152641 - DNA, 25 bp, Homo sapien
gcaggatttaggatgaatcactctc

SEQ ID NO: 3152642 - DNA, 25 bp, Homo sapien
ctgcttttcgagatagtggtcacga

SEQ ID NO: 3152643 - DNA, 25 bp, Homo sapien
aacaaccaggatgtagtttccagga

SEQ ID NO: 3152644 - DNA, 25 bp, Homo sapien
tagtggtcacgagccttcggtcgac

SEQ ID NO: 3152645 - DNA, 25 bp, Homo sapien
tcaccttgctgagataaacaaccag

SEQ ID NO: 3152646 - DNA, 25 bp, Homo sapien
ggtctcagaagattcatagacatgc

SEQ ID NO: 3152647 - DNA, 25 bp, Homo sapien
tggtctcagaagattcatagacatg

SEQ ID NO: 3152648 - DNA, 25 bp, Homo sapien
gtctcagaagattcatagacatgct

SEQ ID NO: 3152649 - DNA, 25 bp, Homo sapien
ggcccacaagctggaaagccaggaa

SEQ ID NO: 3152650 - DNA, 25 bp, Homo sapien
tcaagtctgatagctgcctgccaca

SEQ ID NO: 3152651 - DNA, 25 bp, Homo sapien
gaattccctctactgcaaagattga

SEQ ID NO: 3152652 - DNA, 25 bp, Homo sapien
gattgataagcagcaagtcttgtcc

SEQ ID NO: 3152653 - DNA, 25 bp, Homo sapien
ggctcctgcatgcagagcagtgctg

SEQ ID NO: 3152654 - DNA, 25 bp, Homo sapien
catgcagagcagtgctgcagaggac

SEQ ID NO: 3152655 - DNA, 25 bp, Homo sapien
gcagagcagtgctgcagaggaccat

SEQ ID NO: 3152656 - DNA, 25 bp, Homo sapien
ctgcatgcagagcagtgctgcagag

SEQ ID NO: 3152657 - DNA, 25 bp, Homo sapien
cagaccacccccagggaatgacatt

SEQ ID NO: 3152658 - DNA, 25 bp, Homo sapien
tcctgtccccggatttaaatactca

SEQ ID NO: 3152659 - DNA, 25 bp, Homo sapien
cagtgcacctgttgtttaaaagttc

SEQ ID NO: 3152660 - DNA, 25 bp, Homo sapien
tcaaacagaatcctgtttataaaaa

SEQ ID NO: 3152661 - DNA, 25 bp, Homo sapien
acagaatcctgtttataaaaataag

SEQ ID NO: 3152662 - DNA, 25 bp, Homo sapien
gaatcctgtttataaaaataagaca

SEQ ID NO: 3152663 - DNA, 25 bp, Homo sapien
caaacagaatcctgtttataaaaat

SEQ ID NO: 3152664 - DNA, 25 bp, Homo sapien
tctgctcagtgctattagccattac

SEQ ID NO: 3152665 - DNA, 25 bp, Homo sapien
tgctcagtgctattagccattactg

SEQ ID NO: 3152666 - DNA, 25 bp, Homo sapien
ctcagtgctattagccattactgcc

SEQ ID NO: 3152667 - DNA, 25 bp, Homo sapien
ttctgctcagtgctattagccatta

SEQ ID NO: 3152668 - DNA, 25 bp, Homo sapien
tctgggaagaaagagcagaccggac

SEQ ID NO: 3152669 - DNA, 25 bp, Homo sapien
ttcagaggccgacgcatgccagagg

SEQ ID NO: 3152670 - DNA, 25 bp, Homo sapien
gaccagacgctgctaatggcttttg

SEQ ID NO: 3152671 - DNA, 25 bp, Homo sapien
ggcttttgttcgtctgccaattcta

SEQ ID NO: 3152672 - DNA, 25 bp, Homo sapien
cccctagtgccttcacgttccaggg

SEQ ID NO: 3152673 - DNA, 25 bp, Homo sapien
tgtgaaaatcaagctataaccactc

SEQ ID NO: 3152674 - DNA, 25 bp, Homo sapien
cgttccaggggcagaagtcgcatgc

SEQ ID NO: 3152675 - DNA, 25 bp, Homo sapien
tcgcatgcggaatgaagaagagtaa

SEQ ID NO: 3152676 - DNA, 25 bp, Homo sapien
ggcaccagtggaaagatgaaaggga

SEQ ID NO: 3152677 - DNA, 25 bp, Homo sapien
ttccaaatacctggttcattgctcc

SEQ ID NO: 3152678 - DNA, 25 bp, Homo sapien
tacctggttcattgctccttcgcct

SEQ ID NO: 3152679 - DNA, 25 bp, Homo sapien
caaatacctggttcattgctccttc

SEQ ID NO: 3152680 - DNA, 25 bp, Homo sapien
aatacctggttcattgctccttcgc

SEQ ID NO: 3152681 - DNA, 25 bp, Homo sapien
aataaataagtgcaggtacgggcgg

SEQ ID NO: 3152682 - DNA, 25 bp, Homo sapien
gagcgccgaggttccgcagggctca

SEQ ID NO: 3152683 - DNA, 25 bp, Homo sapien
tgagggactggagaatgctagcgct

SEQ ID NO: 3152684 - DNA, 25 bp, Homo sapien
agcgggcgggaggacccgactgcgg

SEQ ID NO: 3152685 - DNA, 25 bp, Homo sapien
accacggcgatcttgaccaggcggc

SEQ ID NO: 3152686 - DNA, 25 bp, Homo sapien
ggtactcggcgatggtgcacatgtt

SEQ ID NO: 3152687 - DNA, 25 bp, Homo sapien
tgcacatgttctgaatgaggcgcat

SEQ ID NO: 3152688 - DNA, 25 bp, Homo sapien
gcgcccacacagcagtcggaggccg

SEQ ID NO: 3152689 - DNA, 25 bp, Homo sapien
acccagggctaagcgcgacgactca

SEQ ID NO: 3152690 - DNA, 25 bp, Homo sapien
ttgttcagcctcaactcccgtcagg

SEQ ID NO: 3152691 - DNA, 25 bp, Homo sapien
tcccgtcaggggtcgtccaagacca

SEQ ID NO: 3152692 - DNA, 25 bp, Homo sapien
gaagcaggcgggtggcgtagacaac

SEQ ID NO: 3152693 - DNA, 25 bp, Homo sapien
gccggtggtccccagaaagctgcct

SEQ ID NO: 3152694 - DNA, 25 bp, Homo sapien
attgccagaggctcaaacaccccaa

SEQ ID NO: 3152695 - DNA, 25 bp, Homo sapien
ccaaagttctgatggcggcggtgcc

SEQ ID NO: 3152696 - DNA, 25 bp, Homo sapien
ccaggggggctagcttcactaactc

SEQ ID NO: 3152697 - DNA, 25 bp, Homo sapien
ctgagccacacctaagccttccagt

SEQ ID NO: 3152698 - DNA, 25 bp, Homo sapien
ctaagccttccagtagacccatgtc

SEQ ID NO: 3152699 - DNA, 25 bp, Homo sapien
ggctgagccacacctaagccttcca

SEQ ID NO: 3152700 - DNA, 25 bp, Homo sapien
agccttccagtagacccatgtcttc

SEQ ID NO: 3152701 - DNA, 25 bp, Homo sapien
gaagttagattgttctccaccccac

SEQ ID NO: 3152702 - DNA, 25 bp, Homo sapien
taaccttggaagttagattgttctc

SEQ ID NO: 3152703 - DNA, 25 bp, Homo sapien
ttctcccaaagaaagccatagatgg

SEQ ID NO: 3152704 - DNA, 25 bp, Homo sapien
ccaagtgaaattcctaccctgtagc

SEQ ID NO: 3152705 - DNA, 25 bp, Homo sapien
ttggtgaggaaccggaccaccagtg

SEQ ID NO: 3152706 - DNA, 25 bp, Homo sapien
ttcatagtcaccgatgaatcgtttg

SEQ ID NO: 3152707 - DNA, 25 bp, Homo sapien
caccgatgaatcgtttggtgaggaa

SEQ ID NO: 3152708 - DNA, 25 bp, Homo sapien
tgaatcgtttggtgaggaaccggac

SEQ ID NO: 3152709 - DNA, 25 bp, Homo sapien
tcctgcaatgggacagaatttttct

SEQ ID NO: 3152710 - DNA, 25 bp, Homo sapien
tttaagtggcgggatcctcaggctc

SEQ ID NO: 3152711 - DNA, 25 bp, Homo sapien
tcaggctcggactgtcactgaaaga

SEQ ID NO: 3152712 - DNA, 25 bp, Homo sapien
gaagggagaggttcttgactacaaa

SEQ ID NO: 3152713 - DNA, 25 bp, Homo sapien
tattaaaaccagggcaaagtttgca

SEQ ID NO: 3152714 - DNA, 25 bp, Homo sapien
aacagcaattttaaccctatgttag

SEQ ID NO: 3152715 - DNA, 25 bp, Homo sapien
ttatcttgctcagcctatgtgaggt

SEQ ID NO: 3152716 - DNA, 25 bp, Homo sapien
ttttagagtactcccttgatgcaaa

SEQ ID NO: 3152717 - DNA, 25 bp, Homo sapien
ctatctgaacttgtctagtatagag

SEQ ID NO: 3152718 - DNA, 25 bp, Homo sapien
tgaacttgtctagtatagagattac

SEQ ID NO: 3152719 - DNA, 25 bp, Homo sapien
gggtttcaccttctatctgaacttg

SEQ ID NO: 3152720 - DNA, 25 bp, Homo sapien
cagggtttcaccttctatctgaact

SEQ ID NO: 3152721 - DNA, 25 bp, Homo sapien
agcatgctggctagctgcagtccaa

SEQ ID NO: 3152722 - DNA, 25 bp, Homo sapien
tcatagaatgagcagcctagcatgc

SEQ ID NO: 3152723 - DNA, 25 bp, Homo sapien
gagaaaacgatcaccacagcatctg

SEQ ID NO: 3152724 - DNA, 25 bp, Homo sapien
ttctcgggtgtactgctaggctgct

SEQ ID NO: 3152725 - DNA, 25 bp, Homo sapien
gcctaggaagcaacccaacgtcatt

SEQ ID NO: 3152726 - DNA, 25 bp, Homo sapien
tattcaacgttcctgcactaggaga

SEQ ID NO: 3152727 - DNA, 25 bp, Homo sapien
gcaacggaccaccatttacaaggta

SEQ ID NO: 3152728 - DNA, 25 bp, Homo sapien
tattcagagagtggctcagtgggct

SEQ ID NO: 3152729 - DNA, 25 bp, Homo sapien
ggcatcactggaaacgctgtcagct

SEQ ID NO: 3152730 - DNA, 25 bp, Homo sapien
tattaggaaggtttgaggcatcact

SEQ ID NO: 3152731 - DNA, 25 bp, Homo sapien
ctgtgaggatctgtaccctgtggga

SEQ ID NO: 3152732 - DNA, 25 bp, Homo sapien
tgaggatctgtaccctgtgggaaca

SEQ ID NO: 3152733 - DNA, 25 bp, Homo sapien
cagcctggacgtctttatgactgag

SEQ ID NO: 3152734 - DNA, 25 bp, Homo sapien
tacacccatggctcctaaacctggg

SEQ ID NO: 3152735 - DNA, 25 bp, Homo sapien
tccaggagcccacagtagcaaaggg

SEQ ID NO: 3152736 - DNA, 25 bp, Homo sapien
caaaagccagacatcgtgacagaag

SEQ ID NO: 3152737 - DNA, 25 bp, Homo sapien
tgcaaagggcctccaacaaataagg

SEQ ID NO: 3152738 - DNA, 25 bp, Homo sapien
ctgcaaagggcctccaacaaataag

SEQ ID NO: 3152739 - DNA, 25 bp, Homo sapien
gcaaagggcctccaacaaataagga

SEQ ID NO: 3152740 - DNA, 25 bp, Homo sapien
caggaggcacaggacgttcactgct

SEQ ID NO: 3152741 - DNA, 25 bp, Homo sapien
tcttcgtaaccagagtttgggtgaa

SEQ ID NO: 3152742 - DNA, 25 bp, Homo sapien
tcagaagtttggcttatggtcatct

SEQ ID NO: 3152743 - DNA, 25 bp, Homo sapien
gctccttgattaacaagcaggaaca

SEQ ID NO: 3152744 - DNA, 25 bp, Homo sapien
catcatcactaacaacatccacctc

SEQ ID NO: 3152745 - DNA, 25 bp, Homo sapien
tgtgccttctcatgctccctggagg

SEQ ID NO: 3152746 - DNA, 25 bp, Homo sapien
ataaaatccagactgagggaagcag

SEQ ID NO: 3152747 - DNA, 25 bp, Homo sapien
agtcacctcttcttctagggtgcat

SEQ ID NO: 3152748 - DNA, 25 bp, Homo sapien
tgcttgtgcaaaacctaaccaggcc

SEQ ID NO: 3152749 - DNA, 25 bp, Homo sapien
aaccaggcccttgcaaagcacatca

SEQ ID NO: 3152750 - DNA, 25 bp, Homo sapien
tcttctagggtgcatacaatactgc

SEQ ID NO: 3152751 - DNA, 25 bp, Homo sapien
ttggaatccccttccaagggatgtg

SEQ ID NO: 3152752 - DNA, 25 bp, Homo sapien
gtagccatgtagtcatgctgtgggc

SEQ ID NO: 3152753 - DNA, 25 bp, Homo sapien
ctgggacaattttgggagtgggcaa

SEQ ID NO: 3152754 - DNA, 25 bp, Homo sapien
ttgcaccactccaaaggagcgtagc

SEQ ID NO: 3152755 - DNA, 25 bp, Homo sapien
agctgcagggattttaagcctgtga

SEQ ID NO: 3152756 - DNA, 25 bp, Homo sapien
accttccctgcatccgccccataac

SEQ ID NO: 3152757 - DNA, 25 bp, Homo sapien
gcatccgccccataactactgtgag

SEQ ID NO: 3152758 - DNA, 25 bp, Homo sapien
tgagtaatgcgatcagattcacact

SEQ ID NO: 3152759 - DNA, 25 bp, Homo sapien
gaaggtattctggtgggtagatggt

SEQ ID NO: 3152760 - DNA, 25 bp, Homo sapien
gcttgagaaggaggctgaccactgc

SEQ ID NO: 3152761 - DNA, 25 bp, Homo sapien
cactgcggggtgctcttgagtgtcc

SEQ ID NO: 3152762 - DNA, 25 bp, Homo sapien
tccccactggctgtttttgtggaag

SEQ ID NO: 3152763 - DNA, 25 bp, Homo sapien
gcatcatattgcaactggttgaact

SEQ ID NO: 3152764 - DNA, 25 bp, Homo sapien
tatgtaagattatctgcatcaaaca

SEQ ID NO: 3152765 - DNA, 25 bp, Homo sapien
aatcctctgcgataggaaagtcagg

SEQ ID NO: 3152766 - DNA, 25 bp, Homo sapien
ggattttgcctttactagagtcaga

SEQ ID NO: 3152767 - DNA, 25 bp, Homo sapien
gcaaactgtagggagccagtgaaat

SEQ ID NO: 3152768 - DNA, 25 bp, Homo sapien
gggagatatagactgtccttctggg

SEQ ID NO: 3152769 - DNA, 25 bp, Homo sapien
tctccactgtgagtaacttgttgag

SEQ ID NO: 3152770 - DNA, 25 bp, Homo sapien
ggcagtgacgtgtttttccagactc

SEQ ID NO: 3152771 - DNA, 25 bp, Homo sapien
caagagcattttgaaccagcagtgc

SEQ ID NO: 3152772 - DNA, 25 bp, Homo sapien
tactgtatggctctcgcatggcttg

SEQ ID NO: 3152773 - DNA, 25 bp, Homo sapien
ccttggcatgcatcttgaagagcag

SEQ ID NO: 3152774 - DNA, 25 bp, Homo sapien
tgacaccaggaggatattaggcaga

SEQ ID NO: 3152775 - DNA, 25 bp, Homo sapien
gaaataaatcccagaacattaccac

SEQ ID NO: 3152776 - DNA, 25 bp, Homo sapien
ggagtgggatctggactagacctcc

SEQ ID NO: 3152777 - DNA, 25 bp, Homo sapien
aggagtgggatctggactagacctc

SEQ ID NO: 3152778 - DNA, 25 bp, Homo sapien
tcgaaacgctgtgagagatctgatt

SEQ ID NO: 3152779 - DNA, 25 bp, Homo sapien
ggcaggagggatcagcctccatcag

SEQ ID NO: 3152780 - DNA, 25 bp, Homo sapien
gggcaggagggatcagcctccatca

SEQ ID NO: 3152781 - DNA, 25 bp, Homo sapien
ttgttgcaggaagtggcacatcaga

SEQ ID NO: 3152782 - DNA, 25 bp, Homo sapien
tgttgcaggaagtggcacatcagat

SEQ ID NO: 3152783 - DNA, 25 bp, Homo sapien
tgcaggaagtggcacatcagatatg

SEQ ID NO: 3152784 - DNA, 25 bp, Homo sapien
gttgcaggaagtggcacatcagata

SEQ ID NO: 3152785 - DNA, 25 bp, Homo sapien
agccacatatcttcgtgatgaaata

SEQ ID NO: 3152786 - DNA, 25 bp, Homo sapien
catatcttcgtgatgaaatacaggg

SEQ ID NO: 3152787 - DNA, 25 bp, Homo sapien
ggagacagcgtggaggataagaagg

SEQ ID NO: 3152788 - DNA, 25 bp, Homo sapien
agctgcatcaggtagaatccccgtc

SEQ ID NO: 3152789 - DNA, 25 bp, Homo sapien
tcagctgtccagtgcatattctgcc

SEQ ID NO: 3152790 - DNA, 25 bp, Homo sapien
ctgtccagtgcatattctgccttca

SEQ ID NO: 3152791 - DNA, 25 bp, Homo sapien
cttcagatcatggagccggctgtag

SEQ ID NO: 3152792 - DNA, 25 bp, Homo sapien
gctgtagttcaccagttctttaact

SEQ ID NO: 3152793 - DNA, 25 bp, Homo sapien
tcagtggccataagtagctagcggc

SEQ ID NO: 3152794 - DNA, 25 bp, Homo sapien
tagcggctactgtataggaccacac

SEQ ID NO: 3152795 - DNA, 25 bp, Homo sapien
catatgccaagcacaagcactgttt

SEQ ID NO: 3152796 - DNA, 25 bp, Homo sapien
tcccgctgggcttacattctactgc

SEQ ID NO: 3152797 - DNA, 25 bp, Homo sapien
aatgtgtgcaaatctggacaggaag

SEQ ID NO: 3152798 - DNA, 25 bp, Homo sapien
aaatgtgtgcaaatctggacaggaa

SEQ ID NO: 3152799 - DNA, 25 bp, Homo sapien
tcctagtgggagctgtaactgtctg

SEQ ID NO: 3152800 - DNA, 25 bp, Homo sapien
tggttttgtttattggtagtggtga

SEQ ID NO: 3152801 - DNA, 25 bp, Homo sapien
gagaaggcagtgtcctagtgggagc

SEQ ID NO: 3152802 - DNA, 25 bp, Homo sapien
atctgataactgaagccgctgagaa

SEQ ID NO: 3152803 - DNA, 25 bp, Homo sapien
ctagctcgtgagtccaggccctttg

SEQ ID NO: 3152804 - DNA, 25 bp, Homo sapien
cactagctcattggcatcttcaaga

SEQ ID NO: 3152805 - DNA, 25 bp, Homo sapien
tcaagaatctgtccaaagttgctag

SEQ ID NO: 3152806 - DNA, 25 bp, Homo sapien
cctgaaggtcactgtagttatctcc

SEQ ID NO: 3152807 - DNA, 25 bp, Homo sapien
agacttggcatgtccccactaggaa

SEQ ID NO: 3152808 - DNA, 25 bp, Homo sapien
tacaaccctggaaatagatgcagaa

SEQ ID NO: 3152809 - DNA, 25 bp, Homo sapien
catgaagactacacactgtcaggaa

SEQ ID NO: 3152810 - DNA, 25 bp, Homo sapien
gaaaaataatcaatccgcccatcgt

SEQ ID NO: 3152811 - DNA, 25 bp, Homo sapien
cctgcaggtaggtttgtacagcaca

SEQ ID NO: 3152812 - DNA, 25 bp, Homo sapien
cactgtcagtccacaaggtcctggt

SEQ ID NO: 3152813 - DNA, 25 bp, Homo sapien
gacttcagcgtggtcacaagagact

SEQ ID NO: 3152814 - DNA, 25 bp, Homo sapien
aatgcatccataaagaacaggcctg

SEQ ID NO: 3152815 - DNA, 25 bp, Homo sapien
gacccaggtgcatgctttgtagact

SEQ ID NO: 3152816 - DNA, 25 bp, Homo sapien
taaagagcagcccttgctgagtccc

SEQ ID NO: 3152817 - DNA, 25 bp, Homo sapien
taaactgccacgtcaggaagaacca

SEQ ID NO: 3152818 - DNA, 25 bp, Homo sapien
tgttcaattacacaaggagcccgta

SEQ ID NO: 3152819 - DNA, 25 bp, Homo sapien
taggttcttgacaacctctgtgtaa

SEQ ID NO: 3152820 - DNA, 25 bp, Homo sapien
ccctgtggctaggttcttgacaacc

SEQ ID NO: 3152821 - DNA, 25 bp, Homo sapien
tggctaggttcttgacaacctctgt

SEQ ID NO: 3152822 - DNA, 25 bp, Homo sapien
cttgacaacctctgtgtaatcttcc

SEQ ID NO: 3152823 - DNA, 25 bp, Homo sapien
ttctcatctgccgtagacgaagtct

SEQ ID NO: 3152824 - DNA, 25 bp, Homo sapien
catctgccgtagacgaagtctgtgg

SEQ ID NO: 3152825 - DNA, 25 bp, Homo sapien
tctgccgtagacgaagtctgtggca

SEQ ID NO: 3152826 - DNA, 25 bp, Homo sapien
tcttttctcatctgccgtagacgaa

SEQ ID NO: 3152827 - DNA, 25 bp, Homo sapien
tgtaatgagctggtgtcacactctc

SEQ ID NO: 3152828 - DNA, 25 bp, Homo sapien
tgatcttcgcagacgtttcaacctg

SEQ ID NO: 3152829 - DNA, 25 bp, Homo sapien
tttggtaggatcttctgagacaccc

SEQ ID NO: 3152830 - DNA, 25 bp, Homo sapien
catatgcactttggtaggatcttct

SEQ ID NO: 3152831 - DNA, 25 bp, Homo sapien
gctaatttgtaagtccaactccatg

SEQ ID NO: 3152832 - DNA, 25 bp, Homo sapien
ccatgtcatagtcaaaactcggagt

SEQ ID NO: 3152833 - DNA, 25 bp, Homo sapien
agctgatgaattgtaggttctgacc

SEQ ID NO: 3152834 - DNA, 25 bp, Homo sapien
ccaggatgaatatttgggtgaggcc

SEQ ID NO: 3152835 - DNA, 25 bp, Homo sapien
cctgatggttgaggtaacgaattaa

SEQ ID NO: 3152836 - DNA, 25 bp, Homo sapien
catctgtacctgatggttgaggtaa

SEQ ID NO: 3152837 - DNA, 25 bp, Homo sapien
tgtacctgatggttgaggtaacgaa

SEQ ID NO: 3152838 - DNA, 25 bp, Homo sapien
cttcatctgtacctgatggttgagg

SEQ ID NO: 3152839 - DNA, 25 bp, Homo sapien
gcctctgaagtgtgagacattggat

SEQ ID NO: 3152840 - DNA, 25 bp, Homo sapien
cagaaggaaattggcctctgaagtg

SEQ ID NO: 3152841 - DNA, 25 bp, Homo sapien
tattgccgtcacaagcaatgcttgt

SEQ ID NO: 3152842 - DNA, 25 bp, Homo sapien
tgtgagacattggattattgccgtc

SEQ ID NO: 3152843 - DNA, 25 bp, Homo sapien
tagtactatgctcaatgctgatgga

SEQ ID NO: 3152844 - DNA, 25 bp, Homo sapien
cagccgtgttgggaagataagcaca

SEQ ID NO: 3152845 - DNA, 25 bp, Homo sapien
cacaaatggatcatgtaattaccag

SEQ ID NO: 3152846 - DNA, 25 bp, Homo sapien
ttgttaatagcatgaagccactgcc

SEQ ID NO: 3152847 - DNA, 25 bp, Homo sapien
ccagtctgcccatatggcacggata

SEQ ID NO: 3152848 - DNA, 25 bp, Homo sapien
tattgacccaataatagcttttctg

SEQ ID NO: 3152849 - DNA, 25 bp, Homo sapien
tcagatttatagactgaatagttcc

SEQ ID NO: 3152850 - DNA, 25 bp, Homo sapien
cacggatatgctgcttaaggatcac

SEQ ID NO: 3152851 - DNA, 25 bp, Homo sapien
ctgggccacatttagcagtcaccag

SEQ ID NO: 3152852 - DNA, 25 bp, Homo sapien
cactgggtaagtgaatgcctgggcc

SEQ ID NO: 3152853 - DNA, 25 bp, Homo sapien
gacagtacacacattccctcacatg

SEQ ID NO: 3152854 - DNA, 25 bp, Homo sapien
tcacatgtgaccagtcagggcagaa

SEQ ID NO: 3152855 - DNA, 25 bp, Homo sapien
cacatggaattaaccgtgtgaagtc

SEQ ID NO: 3152856 - DNA, 25 bp, Homo sapien
tgttgtgcttattctttgggacacg

SEQ ID NO: 3152857 - DNA, 25 bp, Homo sapien
tgaagtctcttgtgttaaactgaac

SEQ ID NO: 3152858 - DNA, 25 bp, Homo sapien
tgggttgaaagaaggtacgccattc

SEQ ID NO: 3152859 - DNA, 25 bp, Homo sapien
gatagactcagattaggcagcttgg

SEQ ID NO: 3152860 - DNA, 25 bp, Homo sapien
aatgacctataacccctccactgag

SEQ ID NO: 3152861 - DNA, 25 bp, Homo sapien
gctgatgcatgccttccattcacta

SEQ ID NO: 3152862 - DNA, 25 bp, Homo sapien
ttaacatctatagcctgtaacagga

SEQ ID NO: 3152863 - DNA, 25 bp, Homo sapien
tgttctaaatgacccactccaatga

SEQ ID NO: 3152864 - DNA, 25 bp, Homo sapien
gattccctagcggatccttcagctg

SEQ ID NO: 3152865 - DNA, 25 bp, Homo sapien
tatctgtgaatttaccctgggagaa

SEQ ID NO: 3152866 - DNA, 25 bp, Homo sapien
catactgagaatcctgccaaagcct

SEQ ID NO: 3152867 - DNA, 25 bp, Homo sapien
tttggcaagataacatgccttgagc

SEQ ID NO: 3152868 - DNA, 25 bp, Homo sapien
cctaatattaggctcagctgtgagt

SEQ ID NO: 3152869 - DNA, 25 bp, Homo sapien
cagtcattggaatagtgataagacc

SEQ ID NO: 3152870 - DNA, 25 bp, Homo sapien
tgataagaccatgggatttagaatc

SEQ ID NO: 3152871 - DNA, 25 bp, Homo sapien
agtggcttgggaatgagtctgacaa

SEQ ID NO: 3152872 - DNA, 25 bp, Homo sapien
agggagcagaggcttttcataaata

SEQ ID NO: 3152873 - DNA, 25 bp, Homo sapien
ccggagtggcttgggaatgagtctg

SEQ ID NO: 3152874 - DNA, 25 bp, Homo sapien
cagggagcagaggcttttcataaat

SEQ ID NO: 3152875 - DNA, 25 bp, Homo sapien
aacagtgaaaaacttggctcccata

SEQ ID NO: 3152876 - DNA, 25 bp, Homo sapien
caagatctggtactagatatgctca

SEQ ID NO: 3152877 - DNA, 25 bp, Homo sapien
gctgtaatccattaccaggtggagc

SEQ ID NO: 3152878 - DNA, 25 bp, Homo sapien
ggaactacaagacccagactcatgt

SEQ ID NO: 3152879 - DNA, 25 bp, Homo sapien
ctttcattgcatatggaattccagg

SEQ ID NO: 3152880 - DNA, 25 bp, Homo sapien
gaaatcttgcatctttggttttctt

SEQ ID NO: 3152881 - DNA, 25 bp, Homo sapien
tgttggtagtatccagctgcagcct

SEQ ID NO: 3152882 - DNA, 25 bp, Homo sapien
tcagcatggtccgcttccctttgtc

SEQ ID NO: 3152883 - DNA, 25 bp, Homo sapien
tcagccagcttctgtagtcctttct

SEQ ID NO: 3152884 - DNA, 25 bp, Homo sapien
gaagtgcctgttggtagtatccagc

SEQ ID NO: 3152885 - DNA, 25 bp, Homo sapien
tcttccttttagttatcgacctcat

SEQ ID NO: 3152886 - DNA, 25 bp, Homo sapien
caacagcatgatcagtgttctctgc

SEQ ID NO: 3152887 - DNA, 25 bp, Homo sapien
gccttttatatttgcgtgtagatag

SEQ ID NO: 3152888 - DNA, 25 bp, Homo sapien
gatatttgccagagatagagctata

SEQ ID NO: 3152889 - DNA, 25 bp, Homo sapien
ggatttggattccccttccctgcaa

SEQ ID NO: 3152890 - DNA, 25 bp, Homo sapien
aggatttggattccccttccctgca

SEQ ID NO: 3152891 - DNA, 25 bp, Homo sapien
caaggatttggattccccttccctg

SEQ ID NO: 3152892 - DNA, 25 bp, Homo sapien
ctagctttcttctgactgggaagcc

SEQ ID NO: 3152893 - DNA, 25 bp, Homo sapien
tggcctgtttacagaaaacagcctc

SEQ ID NO: 3152894 - DNA, 25 bp, Homo sapien
ggctcaactggcctgtttacagaaa

SEQ ID NO: 3152895 - DNA, 25 bp, Homo sapien
tctgtttgaagcacagcataacatc

SEQ ID NO: 3152896 - DNA, 25 bp, Homo sapien
tcttaaacttggcagttctgtttga

SEQ ID NO: 3152897 - DNA, 25 bp, Homo sapien
ccagggccttgtcccggctccactg

SEQ ID NO: 3152898 - DNA, 25 bp, Homo sapien
gggattcttgtaggagaggactcca

SEQ ID NO: 3152899 - DNA, 25 bp, Homo sapien
agggccttgtcccggctccactgag

SEQ ID NO: 3152900 - DNA, 25 bp, Homo sapien
ggattcttgtaggagaggactccag

SEQ ID NO: 3152901 - DNA, 25 bp, Homo sapien
gaattctatggggattgttaaagta

SEQ ID NO: 3152902 - DNA, 25 bp, Homo sapien
tggaattctatggggattgttaaag

SEQ ID NO: 3152903 - DNA, 25 bp, Homo sapien
aattcagactcctgtggaattctat

SEQ ID NO: 3152904 - DNA, 25 bp, Homo sapien
ttcaattcagactcctgtggaattc

SEQ ID NO: 3152905 - DNA, 25 bp, Homo sapien
aagcagaatatccctttgatttttt

SEQ ID NO: 3152906 - DNA, 25 bp, Homo sapien
aatcagttgttcgtacgatttcttc

SEQ ID NO: 3152907 - DNA, 25 bp, Homo sapien
gtactgaatcagttgttcgtacgat

SEQ ID NO: 3152908 - DNA, 25 bp, Homo sapien
tgttcgtacgatttcttcagtctgt

SEQ ID NO: 3152909 - DNA, 25 bp, Homo sapien
agttgttcgtacgatttcttcagtc

SEQ ID NO: 3152910 - DNA, 25 bp, Homo sapien
tgaagacacgccagcatttcgacaa

SEQ ID NO: 3152911 - DNA, 25 bp, Homo sapien
tttcactgagagtaaaatggacagc

SEQ ID NO: 3152912 - DNA, 25 bp, Homo sapien
ctttatcgaaatctcttgaagagct

SEQ ID NO: 3152913 - DNA, 25 bp, Homo sapien
tctcttgaagagctttttcactgag

SEQ ID NO: 3152914 - DNA, 25 bp, Homo sapien
aaagtcagcagtaatccactgtgta

SEQ ID NO: 3152915 - DNA, 25 bp, Homo sapien
atcatatgaatcattgttaaagtca

SEQ ID NO: 3152916 - DNA, 25 bp, Homo sapien
taaagtcagcagtaatccactgtgt

SEQ ID NO: 3152917 - DNA, 25 bp, Homo sapien
aaacaaatcaaaagccacttatcat

SEQ ID NO: 3152918 - DNA, 25 bp, Homo sapien
gagtttgctgaaatgcacctcatta

SEQ ID NO: 3152919 - DNA, 25 bp, Homo sapien
cttctttcgcaggaagacagcatga

SEQ ID NO: 3152920 - DNA, 25 bp, Homo sapien
agacagcatgacaggaaaggatgag

SEQ ID NO: 3152921 - DNA, 25 bp, Homo sapien
gtccaggacatcctcaacagcaagg

SEQ ID NO: 3152922 - DNA, 25 bp, Homo sapien
ggcgccctgactatacagagcactg

SEQ ID NO: 3152923 - DNA, 25 bp, Homo sapien
gaactgactatagggaacaggcact

SEQ ID NO: 3152924 - DNA, 25 bp, Homo sapien
tcttctccgcttaggaggcgccctg

SEQ ID NO: 3152925 - DNA, 25 bp, Homo sapien
tgctcatagcttgcctgtgaccgag

SEQ ID NO: 3152926 - DNA, 25 bp, Homo sapien
ggaataagaagtggctcaactctac

SEQ ID NO: 3152927 - DNA, 25 bp, Homo sapien
aatgatggaataagaagtggctcaa

SEQ ID NO: 3152928 - DNA, 25 bp, Homo sapien
gggatgttctatctgattggtaaat

SEQ ID NO: 3152929 - DNA, 25 bp, Homo sapien
ttacacattaggaagagattttgat

SEQ ID NO: 3152930 - DNA, 25 bp, Homo sapien
cacattaggaagagattttgataag

SEQ ID NO: 3152931 - DNA, 25 bp, Homo sapien
cattaggaagagattttgataaggt

SEQ ID NO: 3152932 - DNA, 25 bp, Homo sapien
tacacattaggaagagattttgata

SEQ ID NO: 3152933 - DNA, 25 bp, Homo sapien
ccattgtctcccctgtggacaccct

SEQ ID NO: 3152934 - DNA, 25 bp, Homo sapien
tcaggttgtgatcccctgccctgga

SEQ ID NO: 3152935 - DNA, 25 bp, Homo sapien
gttccaacaacccctgcgagactgt

SEQ ID NO: 3152936 - DNA, 25 bp, Homo sapien
caccaccttccacgtggatgccctt

SEQ ID NO: 3152937 - DNA, 25 bp, Homo sapien
aacactgttctgtagttctagagta

SEQ ID NO: 3152938 - DNA, 25 bp, Homo sapien
gaactactgtatattcttctctcct

SEQ ID NO: 3152939 - DNA, 25 bp, Homo sapien
gggtcacttggtccaggaagtctag

SEQ ID NO: 3152940 - DNA, 25 bp, Homo sapien
ctctcctcagagttgtaacacttca

SEQ ID NO: 3152941 - DNA, 25 bp, Homo sapien
gctgaagtgaactggtatgatcata

SEQ ID NO: 3152942 - DNA, 25 bp, Homo sapien
ggctgaagtgaactggtatgatcat

SEQ ID NO: 3152943 - DNA, 25 bp, Homo sapien
gcgatcctcttgtttcagcctttta

SEQ ID NO: 3152944 - DNA, 25 bp, Homo sapien
ttgtttcagccttttaagtagctag

SEQ ID NO: 3152945 - DNA, 25 bp, Homo sapien
agtggcagggtcactgttcactgca

SEQ ID NO: 3152946 - DNA, 25 bp, Homo sapien
gaaatgcagtggcagggtcactgtt

SEQ ID NO: 3152947 - DNA, 25 bp, Homo sapien
aaaacagtcttactctgtaacccag

SEQ ID NO: 3152948 - DNA, 25 bp, Homo sapien
gggtcactgttcactgcagtctcta

SEQ ID NO: 3152949 - DNA, 25 bp, Homo sapien
gatgaagcctccagcgcaggtccgt

SEQ ID NO: 3152950 - DNA, 25 bp, Homo sapien
tccaatcccaggaaggcgacggcag

SEQ ID NO: 3152951 - DNA, 25 bp, Homo sapien
cgaacgaagaaagctcgagactcca

SEQ ID NO: 3152952 - DNA, 25 bp, Homo sapien
cagcggcggcaaagatgaagcctcc

SEQ ID NO: 3152953 - DNA, 25 bp, Homo sapien
cccgaggcgcgagaagggcgcgaac

SEQ ID NO: 3152954 - DNA, 25 bp, Homo sapien
cttaaacgcggcgatcaacagcccc

SEQ ID NO: 3152955 - DNA, 25 bp, Homo sapien
aaacgcggcgatcaacagccccctc

SEQ ID NO: 3152956 - DNA, 25 bp, Homo sapien
ccccgaggcgcgagaagggcgcgaa

SEQ ID NO: 3152957 - DNA, 25 bp, Homo sapien
gacactaggcgctcgacctcgccgg

SEQ ID NO: 3152958 - DNA, 25 bp, Homo sapien
tcagctccgacactaggcgctcgac

SEQ ID NO: 3152959 - DNA, 25 bp, Homo sapien
ggcgctcgacctcgccggccgacat

SEQ ID NO: 3152960 - DNA, 25 bp, Homo sapien
atcccctccggtcccgccgctcagc

SEQ ID NO: 3152961 - DNA, 25 bp, Homo sapien
aacaagggtaaagagcgcagcagct

SEQ ID NO: 3152962 - DNA, 25 bp, Homo sapien
aaccaccacctcagaatcgacagaa

SEQ ID NO: 3152963 - DNA, 25 bp, Homo sapien
cagcagctaggcgatcgagacgcct

SEQ ID NO: 3152964 - DNA, 25 bp, Homo sapien
ggcctgagagaacccgagagacaga

SEQ ID NO: 3152965 - DNA, 25 bp, Homo sapien
caaacaagtacccttctagagagaa

SEQ ID NO: 3152966 - DNA, 25 bp, Homo sapien
ccatgatgtaggttaaacggtagtc

SEQ ID NO: 3152967 - DNA, 25 bp, Homo sapien
cactgaaaactataagccgaagggt

SEQ ID NO: 3152968 - DNA, 25 bp, Homo sapien
caaggaggtacccttgcaggtgcat

SEQ ID NO: 3152969 - DNA, 25 bp, Homo sapien
ctgtgcacatgcacgtcccatgggc

SEQ ID NO: 3152970 - DNA, 25 bp, Homo sapien
cactgtgcacatgcacgtcccatgg

SEQ ID NO: 3152971 - DNA, 25 bp, Homo sapien
actgtgcacatgcacgtcccatggg

SEQ ID NO: 3152972 - DNA, 25 bp, Homo sapien
tatgaaaatctgaagtgatcatcac

SEQ ID NO: 3152973 - DNA, 25 bp, Homo sapien
ctcttaaagaaactagtattatgaa

SEQ ID NO: 3152974 - DNA, 25 bp, Homo sapien
aatctgaagtgatcatcacaagcac

SEQ ID NO: 3152975 - DNA, 25 bp, Homo sapien
taaagaaactagtattatgaaaatc

SEQ ID NO: 3152976 - DNA, 25 bp, Homo sapien
attttcttcttctggcctttcaact

SEQ ID NO: 3152977 - DNA, 25 bp, Homo sapien
gcattttcttcttctggcctttcaa

SEQ ID NO: 3152978 - DNA, 25 bp, Homo sapien
tttcttcttctggcctttcaacttc

SEQ ID NO: 3152979 - DNA, 25 bp, Homo sapien
cttcttctggcctttcaacttcatt

SEQ ID NO: 3152980 - DNA, 25 bp, Homo sapien
tcttcaattccagatggaggattag

SEQ ID NO: 3152981 - DNA, 25 bp, Homo sapien
tcatcttcaattccagatggaggat

SEQ ID NO: 3152982 - DNA, 25 bp, Homo sapien
cggttttggtacaccattttcagca

SEQ ID NO: 3152983 - DNA, 25 bp, Homo sapien
ttcaattccagatggaggattagca

SEQ ID NO: 3152984 - DNA, 25 bp, Homo sapien
cactatcactatcatcttcggtctc

SEQ ID NO: 3152985 - DNA, 25 bp, Homo sapien
ccatactgtggtgctcccgttttaa

SEQ ID NO: 3152986 - DNA, 25 bp, Homo sapien
tatcatcttcggtctcagtcacttt

SEQ ID NO: 3152987 - DNA, 25 bp, Homo sapien
taatgtctcctatagtgacatgaac

SEQ ID NO: 3152988 - DNA, 25 bp, Homo sapien
caagggttcttttgtagcatggtaa

SEQ ID NO: 3152989 - DNA, 25 bp, Homo sapien
tctttgctacttaacacagtgccag

SEQ ID NO: 3152990 - DNA, 25 bp, Homo sapien
ctcacagagataggtaacaaactac

SEQ ID NO: 3152991 - DNA, 25 bp, Homo sapien
gatcacagatggtttgataaaggca

SEQ ID NO: 3152992 - DNA, 25 bp, Homo sapien
tccataaactcttccccctgtcttg

SEQ ID NO: 3152993 - DNA, 25 bp, Homo sapien
gttaagatttacaggtgctgtacca

SEQ ID NO: 3152994 - DNA, 25 bp, Homo sapien
aactcttccccctgtcttgatgtta

SEQ ID NO: 3152995 - DNA, 25 bp, Homo sapien
gatttacaggtgctgtaccataact

SEQ ID NO: 3152996 - DNA, 25 bp, Homo sapien
ccaaatctacctctaagagtggaac

SEQ ID NO: 3152997 - DNA, 25 bp, Homo sapien
tacgccatggtttatcttcaaaaga

SEQ ID NO: 3152998 - DNA, 25 bp, Homo sapien
ttccaggtgcatcaaggtctactcc

SEQ ID NO: 3152999 - DNA, 25 bp, Homo sapien
gaactccattaatgcttccaggtgc

SEQ ID NO: 3153000 - DNA, 25 bp, Homo sapien
aacttcaagtcccattcgtatcctc

SEQ ID NO: 3153001 - DNA, 25 bp, Homo sapien
tcacagtaagctttccaggtatctt

SEQ ID NO: 3153002 - DNA, 25 bp, Homo sapien
ccaggtatcttcattaaacccataa

SEQ ID NO: 3153003 - DNA, 25 bp, Homo sapien
tagtagaggttactggtataacttc

SEQ ID NO: 3153004 - DNA, 25 bp, Homo sapien
gtagacaagccaagggtattccgga

SEQ ID NO: 3153005 - DNA, 25 bp, Homo sapien
cacttttatagggaagcgatttatt

SEQ ID NO: 3153006 - DNA, 25 bp, Homo sapien
caagccaagggtattccggagtatt

SEQ ID NO: 3153007 - DNA, 25 bp, Homo sapien
taaaagtgggacggtagacaagcca

SEQ ID NO: 3153008 - DNA, 25 bp, Homo sapien
tctgcacctggtgtaacttccatag

SEQ ID NO: 3153009 - DNA, 25 bp, Homo sapien
ttggatctctgcacctggtgtaact

SEQ ID NO: 3153010 - DNA, 25 bp, Homo sapien
gtaacttccatagtacagtcttcgg

SEQ ID NO: 3153011 - DNA, 25 bp, Homo sapien
taacttccatagtacagtcttcggc

SEQ ID NO: 3153012 - DNA, 25 bp, Homo sapien
gaacagtattaggtgaaaggcacca

SEQ ID NO: 3153013 - DNA, 25 bp, Homo sapien
gaattttcccgttctgtgttcacca

SEQ ID NO: 3153014 - DNA, 25 bp, Homo sapien
ttcctgcagatcactacaaataggt

SEQ ID NO: 3153015 - DNA, 25 bp, Homo sapien
cacttagaagccgaataaactgtta

SEQ ID NO: 3153016 - DNA, 25 bp, Homo sapien
tctctgagtttccagttcttccctg

SEQ ID NO: 3153017 - DNA, 25 bp, Homo sapien
tctttctctgagtttccagttcttc

SEQ ID NO: 3153018 - DNA, 25 bp, Homo sapien
ggcagtttctttctctgagtttcca

SEQ ID NO: 3153019 - DNA, 25 bp, Homo sapien
tttctttctctgagtttccagttct

SEQ ID NO: 3153020 - DNA, 25 bp, Homo sapien
gagaagtaaactcagcttttgtaga

SEQ ID NO: 3153021 - DNA, 25 bp, Homo sapien
gaggagaagtaaactcagcttttgt

SEQ ID NO: 3153022 - DNA, 25 bp, Homo sapien
agaagtaaactcagcttttgtagat

SEQ ID NO: 3153023 - DNA, 25 bp, Homo sapien
ggagaagtaaactcagcttttgtag

SEQ ID NO: 3153024 - DNA, 25 bp, Homo sapien
gtggaagcccagtcttgaacaaaga

SEQ ID NO: 3153025 - DNA, 25 bp, Homo sapien
tgctcggtggaagcccagtcttgaa

SEQ ID NO: 3153026 - DNA, 25 bp, Homo sapien
ctgctcggtggaagcccagtcttga

SEQ ID NO: 3153027 - DNA, 25 bp, Homo sapien
tcggtggaagcccagtcttgaacaa

SEQ ID NO: 3153028 - DNA, 25 bp, Homo sapien
aaaaatagcaactttgcagtgcaga

SEQ ID NO: 3153029 - DNA, 25 bp, Homo sapien
gacaaactgacatcctgtatctcca

SEQ ID NO: 3153030 - DNA, 25 bp, Homo sapien
acaggatatttagcctttccacaaa

SEQ ID NO: 3153031 - DNA, 25 bp, Homo sapien
tggcggagtgggaaagctcattttt

SEQ ID NO: 3153032 - DNA, 25 bp, Homo sapien
tcaacatagtatgatgtcaatgcag

SEQ ID NO: 3153033 - DNA, 25 bp, Homo sapien
gatataagtattgttagtgcaacca

SEQ ID NO: 3153034 - DNA, 25 bp, Homo sapien
cactctgacgtgtttcataaaaacc

SEQ ID NO: 3153035 - DNA, 25 bp, Homo sapien
gtgcaaccagttaacagcaacactc

SEQ ID NO: 3153036 - DNA, 25 bp, Homo sapien
cttagatcaggtgattcggccctcc

SEQ ID NO: 3153037 - DNA, 25 bp, Homo sapien
ggtgattcggccctcccatatcgat

SEQ ID NO: 3153038 - DNA, 25 bp, Homo sapien
ggcttttctggaggcagtacttgtc

SEQ ID NO: 3153039 - DNA, 25 bp, Homo sapien
tgccacttcccaacgcttgaattgg

SEQ ID NO: 3153040 - DNA, 25 bp, Homo sapien
ttacgggtcctaaatactggctcag

SEQ ID NO: 3153041 - DNA, 25 bp, Homo sapien
taaatgcgatgtggtatgagaaaga

SEQ ID NO: 3153042 - DNA, 25 bp, Homo sapien
gattggaaagattcagtagagtcaa

SEQ ID NO: 3153043 - DNA, 25 bp, Homo sapien
cactgtagtgggtataagattggaa

SEQ ID NO: 3153044 - DNA, 25 bp, Homo sapien
caaggtatgggcacatcttttcagt

SEQ ID NO: 3153045 - DNA, 25 bp, Homo sapien
gacataaaaggagatagtcagagga

SEQ ID NO: 3153046 - DNA, 25 bp, Homo sapien
tcagtacagtgtctcatcaagacat

SEQ ID NO: 3153047 - DNA, 25 bp, Homo sapien
ttcagagcacttgatcaaatgcccc

SEQ ID NO: 3153048 - DNA, 25 bp, Homo sapien
cataagtgtgttcaaaagtgcaaac

SEQ ID NO: 3153049 - DNA, 25 bp, Homo sapien
gcattgtaaagtggcagcactagga

SEQ ID NO: 3153050 - DNA, 25 bp, Homo sapien
aggattcaggcttagcataaccaac

SEQ ID NO: 3153051 - DNA, 25 bp, Homo sapien
taaagtacatatccaattagtttca

SEQ ID NO: 3153052 - DNA, 25 bp, Homo sapien
attacggacgcatgctaccacgccc

SEQ ID NO: 3153053 - DNA, 25 bp, Homo sapien
gtcttcctctgtcgtccaggctgga

SEQ ID NO: 3153054 - DNA, 25 bp, Homo sapien
cccgagctgggattacggacgcatg

SEQ ID NO: 3153055 - DNA, 25 bp, Homo sapien
tcttcctctgtcgtccaggctggag

SEQ ID NO: 3153056 - DNA, 25 bp, Homo sapien
ctgccttctactcggctgatagtta

SEQ ID NO: 3153057 - DNA, 25 bp, Homo sapien
gctgttctcatttgcccgtcgcctg

SEQ ID NO: 3153058 - DNA, 25 bp, Homo sapien
gctgatagttatagtctgaccgata

SEQ ID NO: 3153059 - DNA, 25 bp, Homo sapien
cgataacatcaattgccccaggtaa

SEQ ID NO: 3153060 - DNA, 25 bp, Homo sapien
aattgttgtctacttcagtagcaga

SEQ ID NO: 3153061 - DNA, 25 bp, Homo sapien
gagcagtgctgacagtcggaggagg

SEQ ID NO: 3153062 - DNA, 25 bp, Homo sapien
gaggtggtttgctaaaattgttgtc

SEQ ID NO: 3153063 - DNA, 25 bp, Homo sapien
cagtagcagatctttcagaaaggac

SEQ ID NO: 3153064 - DNA, 25 bp, Homo sapien
cccacagaactagtcatttgaggct

SEQ ID NO: 3153065 - DNA, 25 bp, Homo sapien
cagggatcctggtttgtggtccaca

SEQ ID NO: 3153066 - DNA, 25 bp, Homo sapien
gcagaattccactactgggctacat

SEQ ID NO: 3153067 - DNA, 25 bp, Homo sapien
tactagatgattagccagacactga

SEQ ID NO: 3153068 - DNA, 25 bp, Homo sapien
gcaaaatagcttctgacatggctct

SEQ ID NO: 3153069 - DNA, 25 bp, Homo sapien
ggctctcaatgatccctgtctgctg

SEQ ID NO: 3153070 - DNA, 25 bp, Homo sapien
gctaacatattaagacgcctacacc

SEQ ID NO: 3153071 - DNA, 25 bp, Homo sapien
taatagtgggctttgcactcacaaa

SEQ ID NO: 3153072 - DNA, 25 bp, Homo sapien
gagcaaccatgcctggccttaattt

SEQ ID NO: 3153073 - DNA, 25 bp, Homo sapien
gtgagcaaccatgcctggccttaat

SEQ ID NO: 3153074 - DNA, 25 bp, Homo sapien
gaactcaagcaatctacccgccttg

SEQ ID NO: 3153075 - DNA, 25 bp, Homo sapien
atttttgcattttttataaagatgg

SEQ ID NO: 3153076 - DNA, 25 bp, Homo sapien
tctttagaacaatacggacactact

SEQ ID NO: 3153077 - DNA, 25 bp, Homo sapien
tgaatccacaagtctactaaactga

SEQ ID NO: 3153078 - DNA, 25 bp, Homo sapien
ccatacaagctagtagagtcccaga

SEQ ID NO: 3153079 - DNA, 25 bp, Homo sapien
actaaactgacccatagctaatggc

SEQ ID NO: 3153080 - DNA, 25 bp, Homo sapien
tggaggtggtacagttattggaata

SEQ ID NO: 3153081 - DNA, 25 bp, Homo sapien
ctggaggtggtacagttattggaat

SEQ ID NO: 3153082 - DNA, 25 bp, Homo sapien
ggaggtggtacagttattggaatac

SEQ ID NO: 3153083 - DNA, 25 bp, Homo sapien
ctacagaaacgggtaagacaggtat

SEQ ID NO: 3153084 - DNA, 25 bp, Homo sapien
gctgaaaataggaccttgaaatccc

SEQ ID NO: 3153085 - DNA, 25 bp, Homo sapien
tattctaaccgcatcaacaccgtct

SEQ ID NO: 3153086 - DNA, 25 bp, Homo sapien
gtctctcctgtaactataagcttga

SEQ ID NO: 3153087 - DNA, 25 bp, Homo sapien
ctaagcctccgttttagtaattctg

SEQ ID NO: 3153088 - DNA, 25 bp, Homo sapien
aagtccacaatcctatttcatacag

SEQ ID NO: 3153089 - DNA, 25 bp, Homo sapien
tgtgaaaacacttccactaagcctc

SEQ ID NO: 3153090 - DNA, 25 bp, Homo sapien
ccagtgttaggatctataattcctc

SEQ ID NO: 3153091 - DNA, 25 bp, Homo sapien
gacactgtcctaaatgagaacaaga

SEQ ID NO: 3153092 - DNA, 25 bp, Homo sapien
cacaatacctaaatggaataccaca

SEQ ID NO: 3153093 - DNA, 25 bp, Homo sapien
taggctataaagcatcctagcagaa

SEQ ID NO: 3153094 - DNA, 25 bp, Homo sapien
caattaacaactctcactactagga

SEQ ID NO: 3153095 - DNA, 25 bp, Homo sapien
gtaagcagtctggtctaatacacag

SEQ ID NO: 3153096 - DNA, 25 bp, Homo sapien
gtgttcaaagctgagaatatccacc

SEQ ID NO: 3153097 - DNA, 25 bp, Homo sapien
aggacaccggtcttattttcagcac

SEQ ID NO: 3153098 - DNA, 25 bp, Homo sapien
cacagcccattttgtaagtatgaga

SEQ ID NO: 3153099 - DNA, 25 bp, Homo sapien
ttggtataagagatggaggtggagc

SEQ ID NO: 3153100 - DNA, 25 bp, Homo sapien
tgttggtataagagatggaggtgga

SEQ ID NO: 3153101 - DNA, 25 bp, Homo sapien
ggtataagagatggaggtggagcgc

SEQ ID NO: 3153102 - DNA, 25 bp, Homo sapien
tctattgttggtataagagatggag

SEQ ID NO: 3153103 - DNA, 25 bp, Homo sapien
tatttccaagtatatggttcttctg

SEQ ID NO: 3153104 - DNA, 25 bp, Homo sapien
ccaagtatatggttcttctgtcaaa

SEQ ID NO: 3153105 - DNA, 25 bp, Homo sapien
tgatatcgggctacaggtccaacat

SEQ ID NO: 3153106 - DNA, 25 bp, Homo sapien
gccctgttttgatatcgggctacag

SEQ ID NO: 3153107 - DNA, 25 bp, Homo sapien
gacagcttttcttgactatggtccc

SEQ ID NO: 3153108 - DNA, 25 bp, Homo sapien
tgttgttaaacaccatactgccacc

SEQ ID NO: 3153109 - DNA, 25 bp, Homo sapien
aataaggctactgccacacagaatg

SEQ ID NO: 3153110 - DNA, 25 bp, Homo sapien
tacagcgttctagttagcataagcc

SEQ ID NO: 3153111 - DNA, 25 bp, Homo sapien
tatctgccaagaattatacttgcac

SEQ ID NO: 3153112 - DNA, 25 bp, Homo sapien
cacaattctatcaacccttttggta

SEQ ID NO: 3153113 - DNA, 25 bp, Homo sapien
tatttgccacttaagaggaaataac

SEQ ID NO: 3153114 - DNA, 25 bp, Homo sapien
gatgctactgatgtaaagttctcac

SEQ ID NO: 3153115 - DNA, 25 bp, Homo sapien
caatcaacttagcttgagttacaag

SEQ ID NO: 3153116 - DNA, 25 bp, Homo sapien
tttggtgataaatcagtaattcagc

SEQ ID NO: 3153117 - DNA, 25 bp, Homo sapien
atttcaggctatcagaatatttcag

SEQ ID NO: 3153118 - DNA, 25 bp, Homo sapien
tatgtctggtacaaataagttctga

SEQ ID NO: 3153119 - DNA, 25 bp, Homo sapien
gcagaacgactatcataaccagagg

SEQ ID NO: 3153120 - DNA, 25 bp, Homo sapien
ttgccatatggaaatgcacgtgcag

SEQ ID NO: 3153121 - DNA, 25 bp, Homo sapien
tatggaaatgcacgtgcagaacgac

SEQ ID NO: 3153122 - DNA, 25 bp, Homo sapien
aaatgcacgtgcagaacgactatca

SEQ ID NO: 3153123 - DNA, 25 bp, Homo sapien
taaaccatgaacacgtttttattgc

SEQ ID NO: 3153124 - DNA, 25 bp, Homo sapien
caaactgaatctaggcatctaaata

SEQ ID NO: 3153125 - DNA, 25 bp, Homo sapien
tagaccactcattcctgtagttaat

SEQ ID NO: 3153126 - DNA, 25 bp, Homo sapien
tgctctgtaagatgttaaaccatga

SEQ ID NO: 3153127 - DNA, 25 bp, Homo sapien
tatctatcatattgaaagataacag

SEQ ID NO: 3153128 - DNA, 25 bp, Homo sapien
ttactaaagaggctttccattcaaa

SEQ ID NO: 3153129 - DNA, 25 bp, Homo sapien
tactcaagaaataaggtgataaaca

SEQ ID NO: 3153130 - DNA, 25 bp, Homo sapien
tatcaaatgcattctaaaaccttgt

SEQ ID NO: 3153131 - DNA, 25 bp, Homo sapien
tcaacctagaaaagtgtactcaaca

SEQ ID NO: 3153132 - DNA, 25 bp, Homo sapien
tgaatacccacagtatcgggaagat

SEQ ID NO: 3153133 - DNA, 25 bp, Homo sapien
agaatgtctatcatgccaggtgcag

SEQ ID NO: 3153134 - DNA, 25 bp, Homo sapien
tcttcaaagtgttgagaggaggcca

SEQ ID NO: 3153135 - DNA, 25 bp, Homo sapien
tgtccacaagactaggccacgaagg

SEQ ID NO: 3153136 - DNA, 25 bp, Homo sapien
ctggtgtccacaagactaggccacg

SEQ ID NO: 3153137 - DNA, 25 bp, Homo sapien
cacgaaggagcagaaccaggaagat

SEQ ID NO: 3153138 - DNA, 25 bp, Homo sapien
acaagactaggccacgaaggagcag

SEQ ID NO: 3153139 - DNA, 25 bp, Homo sapien
ctctctctctggtgcgttctctttc

SEQ ID NO: 3153140 - DNA, 25 bp, Homo sapien
taggactgtgatcacgctccctctc

SEQ ID NO: 3153141 - DNA, 25 bp, Homo sapien
tttctctgtcccgatcacggtctcg

SEQ ID NO: 3153142 - DNA, 25 bp, Homo sapien
tggtgtaggactgtgatcacgctcc

SEQ ID NO: 3153143 - DNA, 25 bp, Homo sapien
ctgttcaaggtaatgggaagcctct

SEQ ID NO: 3153144 - DNA, 25 bp, Homo sapien
tcctcataacgaaaataaatttgta

SEQ ID NO: 3153145 - DNA, 25 bp, Homo sapien
caaatttaaggactactgttcaagg

SEQ ID NO: 3153146 - DNA, 25 bp, Homo sapien
cctttatcattttaagatggctttc

SEQ ID NO: 3153147 - DNA, 25 bp, Homo sapien
ccatgccagtcagtagagaggagca

SEQ ID NO: 3153148 - DNA, 25 bp, Homo sapien
tgtggaggcatgtcacctgaaaagt

SEQ ID NO: 3153149 - DNA, 25 bp, Homo sapien
cttttgtatttggagtgtggaggca

SEQ ID NO: 3153150 - DNA, 25 bp, Homo sapien
cccaattgtactgctgaccaagtta

SEQ ID NO: 3153151 - DNA, 25 bp, Homo sapien
tttcaactgcataaatagaagctgc

SEQ ID NO: 3153152 - DNA, 25 bp, Homo sapien
gcttgttctcaaaatagcactagag

SEQ ID NO: 3153153 - DNA, 25 bp, Homo sapien
gattggacatacctgcattctgaca

SEQ ID NO: 3153154 - DNA, 25 bp, Homo sapien
tgaaaaagtgagatctgcaactgat

SEQ ID NO: 3153155 - DNA, 25 bp, Homo sapien
ttgaaatagaaatgttttcttgaca

SEQ ID NO: 3153156 - DNA, 25 bp, Homo sapien
aatgttttcttgacaactggaccat

SEQ ID NO: 3153157 - DNA, 25 bp, Homo sapien
ctgaaattgaaatagaaatgttttc

SEQ ID NO: 3153158 - DNA, 25 bp, Homo sapien
tagaaatgttttcttgacaactgga

SEQ ID NO: 3153159 - DNA, 25 bp, Homo sapien
tgcatattccctgtatctgtatcgt

SEQ ID NO: 3153160 - DNA, 25 bp, Homo sapien
tttttctcgacttgctctgtgacgc

SEQ ID NO: 3153161 - DNA, 25 bp, Homo sapien
tctgtgacgctcataacctctttct

SEQ ID NO: 3153162 - DNA, 25 bp, Homo sapien
cttcgagaagacttatgtctggttt

SEQ ID NO: 3153163 - DNA, 25 bp, Homo sapien
gcaggctcactgcccgcttcttttc

SEQ ID NO: 3153164 - DNA, 25 bp, Homo sapien
actttcatggcgacgtctactatta

SEQ ID NO: 3153165 - DNA, 25 bp, Homo sapien
cactttcatggcgacgtctactatt

SEQ ID NO: 3153166 - DNA, 25 bp, Homo sapien
cttcactttcatggcgacgtctact

SEQ ID NO: 3153167 - DNA, 25 bp, Homo sapien
tatagtatctacttctggtactaat

SEQ ID NO: 3153168 - DNA, 25 bp, Homo sapien
tttatagtatctacttctggtacta

SEQ ID NO: 3153169 - DNA, 25 bp, Homo sapien
agtatctacttctggtactaatata

SEQ ID NO: 3153170 - DNA, 25 bp, Homo sapien
gatttatagtatctacttctggtac

SEQ ID NO: 3153171 - DNA, 25 bp, Homo sapien
tgctgtctttttatttttgaaatag

SEQ ID NO: 3153172 - DNA, 25 bp, Homo sapien
ttatttttgaaatagtacaagacaa

SEQ ID NO: 3153173 - DNA, 25 bp, Homo sapien
ggatataaagtcattgctgtctttt

SEQ ID NO: 3153174 - DNA, 25 bp, Homo sapien
tttttgaaatagtacaagacaaaga

SEQ ID NO: 3153175 - DNA, 25 bp, Homo sapien
tgtgtgtacacatgcctcctagaaa

SEQ ID NO: 3153176 - DNA, 25 bp, Homo sapien
tgtataccccactgaattcaagctg

SEQ ID NO: 3153177 - DNA, 25 bp, Homo sapien
tatgctgaagtctgccaagggtaca

SEQ ID NO: 3153178 - DNA, 25 bp, Homo sapien
tatccctaaaaatgctcgctcagag

SEQ ID NO: 3153179 - DNA, 25 bp, Homo sapien
gacttatcaaacgtagcactgggtg

SEQ ID NO: 3153180 - DNA, 25 bp, Homo sapien
tattacgaagaaacacagctggaag

SEQ ID NO: 3153181 - DNA, 25 bp, Homo sapien
tgtggtcaacaacgtcatcctggag

SEQ ID NO: 3153182 - DNA, 25 bp, Homo sapien
cggactacagctacaaatgtggtca

SEQ ID NO: 3153183 - DNA, 25 bp, Homo sapien
cattgactaacaaggttggtaacaa

SEQ ID NO: 3153184 - DNA, 25 bp, Homo sapien
gtcacgtcacattgactaacaaggt

SEQ ID NO: 3153185 - DNA, 25 bp, Homo sapien
aaagtcacgtcacattgactaacaa

SEQ ID NO: 3153186 - DNA, 25 bp, Homo sapien
cgtcacattgactaacaaggttggt

SEQ ID NO: 3153187 - DNA, 25 bp, Homo sapien
tgtatgacgatagattcagaactgg

SEQ ID NO: 3153188 - DNA, 25 bp, Homo sapien
aactggttagagttgaatttcagca

SEQ ID NO: 3153189 - DNA, 25 bp, Homo sapien
tcagaactggttagagttgaatttc

SEQ ID NO: 3153190 - DNA, 25 bp, Homo sapien
tagatgatgtgtatgtatgacgata

SEQ ID NO: 3153191 - DNA, 25 bp, Homo sapien
gaaatgcagcagataaatattttac

SEQ ID NO: 3153192 - DNA, 25 bp, Homo sapien
agcagataaatattttacaatagga

SEQ ID NO: 3153193 - DNA, 25 bp, Homo sapien
ctgtgaaatgcagcagataaatatt

SEQ ID NO: 3153194 - DNA, 25 bp, Homo sapien
cagcagataaatattttacaatagg

SEQ ID NO: 3153195 - DNA, 25 bp, Homo sapien
ggcacactatgacttactgggttca

SEQ ID NO: 3153196 - DNA, 25 bp, Homo sapien
tcccaggtgggaatgtaatgctttg

SEQ ID NO: 3153197 - DNA, 25 bp, Homo sapien
caaagcagttatgttctctccagta

SEQ ID NO: 3153198 - DNA, 25 bp, Homo sapien
tacctgctttgtacatgaggagtca

SEQ ID NO: 3153199 - DNA, 25 bp, Homo sapien
ctcgctgcggcaataaagttaaata

SEQ ID NO: 3153200 - DNA, 25 bp, Homo sapien
tggaaatcaaatgagccaccatact

SEQ ID NO: 3153201 - DNA, 25 bp, Homo sapien
taaagccacctagtatctgaggtca

SEQ ID NO: 3153202 - DNA, 25 bp, Homo sapien
tactatgccaaatcttcgataggcc

SEQ ID NO: 3153203 - DNA, 25 bp, Homo sapien
attccttgcttgctggaatgacagc

SEQ ID NO: 3153204 - DNA, 25 bp, Homo sapien
catatcacataggtgtgaaataaac

SEQ ID NO: 3153205 - DNA, 25 bp, Homo sapien
ctctttcttgcagtaagctattcct

SEQ ID NO: 3153206 - DNA, 25 bp, Homo sapien
tttcttggtacatatcacataggtg

SEQ ID NO: 3153207 - DNA, 25 bp, Homo sapien
ggctgccaataagctaaagtccaca

SEQ ID NO: 3153208 - DNA, 25 bp, Homo sapien
tcaggaggctgccaataagctaaag

SEQ ID NO: 3153209 - DNA, 25 bp, Homo sapien
atggcatcagaaccgcttcctcttg

SEQ ID NO: 3153210 - DNA, 25 bp, Homo sapien
aatatggatggcatcagaaccgctt

SEQ ID NO: 3153211 - DNA, 25 bp, Homo sapien
cttagcttttgagctgtgccacttg

SEQ ID NO: 3153212 - DNA, 25 bp, Homo sapien
tcccagttccaaggtggttctcggc

SEQ ID NO: 3153213 - DNA, 25 bp, Homo sapien
gccacttggtggtgtcccagttcca

SEQ ID NO: 3153214 - DNA, 25 bp, Homo sapien
ttagcttttgagctgtgccacttgg

SEQ ID NO: 3153215 - DNA, 25 bp, Homo sapien
gaggaatgagctggagttctccagt

SEQ ID NO: 3153216 - DNA, 25 bp, Homo sapien
tttgcttgactaggcctgtgaattc

SEQ ID NO: 3153217 - DNA, 25 bp, Homo sapien
gggagatttttgcttgactaggcct

SEQ ID NO: 3153218 - DNA, 25 bp, Homo sapien
tccagtgtacaagtcagcaagggtc

SEQ ID NO: 3153219 - DNA, 25 bp, Homo sapien
tggatctttcaggaagggttgtggc

SEQ ID NO: 3153220 - DNA, 25 bp, Homo sapien
tagaaacgctgttggaaggtgcggt

SEQ ID NO: 3153221 - DNA, 25 bp, Homo sapien
gagagaacagggttagaaacgctgt

SEQ ID NO: 3153222 - DNA, 25 bp, Homo sapien
aaggtgcggttattggacacaggat

SEQ ID NO: 3153223 - DNA, 25 bp, Homo sapien
ttctaggttgctgagggaccggctc

SEQ ID NO: 3153224 - DNA, 25 bp, Homo sapien
ggaccggctcctgtcacattatgag

SEQ ID NO: 3153225 - DNA, 25 bp, Homo sapien
taccaggcagaagtccaatgtttgc

SEQ ID NO: 3153226 - DNA, 25 bp, Homo sapien
gaatgctttgggtgttactgtcctc

SEQ ID NO: 3153227 - DNA, 25 bp, Homo sapien
ctggctctcaggaccacctaacttt

SEQ ID NO: 3153228 - DNA, 25 bp, Homo sapien
gctctcaggaccacctaactttggg

SEQ ID NO: 3153229 - DNA, 25 bp, Homo sapien
ctcaggaccacctaactttgggatg

SEQ ID NO: 3153230 - DNA, 25 bp, Homo sapien
ggctctcaggaccacctaactttgg

SEQ ID NO: 3153231 - DNA, 25 bp, Homo sapien
tgagatctttccagatgccataacg

SEQ ID NO: 3153232 - DNA, 25 bp, Homo sapien
aggagactcttaaggtgaggcagct

SEQ ID NO: 3153233 - DNA, 25 bp, Homo sapien
ttccagatgccataacgaaaggaga

SEQ ID NO: 3153234 - DNA, 25 bp, Homo sapien
ggcctgccatgtgagatctttccag

SEQ ID NO: 3153235 - DNA, 25 bp, Homo sapien
ccatgttcaatgagtaggcgggctg

SEQ ID NO: 3153236 - DNA, 25 bp, Homo sapien
tgttgcaggattggagccgtgtttc

SEQ ID NO: 3153237 - DNA, 25 bp, Homo sapien
gggagctcttgtatagagttgttgc

SEQ ID NO: 3153238 - DNA, 25 bp, Homo sapien
gaagacagagatagcagccatgttc

SEQ ID NO: 3153239 - DNA, 25 bp, Homo sapien
cactgggaggtacctgaaaccacaa

SEQ ID NO: 3153240 - DNA, 25 bp, Homo sapien
caactgcataaggtttggacccgca

SEQ ID NO: 3153241 - DNA, 25 bp, Homo sapien
catcttagtaccagatgagcgcaca

SEQ ID NO: 3153242 - DNA, 25 bp, Homo sapien
gggacagaacatccacaaaggaaaa

SEQ ID NO: 3153243 - DNA, 25 bp, Homo sapien
tggagggtcctgttcttcaatctag

SEQ ID NO: 3153244 - DNA, 25 bp, Homo sapien
tttgtcaggaacataaacccatgcc

SEQ ID NO: 3153245 - DNA, 25 bp, Homo sapien
tctagttggagatctatgcagttgt

SEQ ID NO: 3153246 - DNA, 25 bp, Homo sapien
gacccactgccagggattgattgat

SEQ ID NO: 3153247 - DNA, 25 bp, Homo sapien
tgggcctttggttatttctaggaca

SEQ ID NO: 3153248 - DNA, 25 bp, Homo sapien
cattcttcatcactagctcttcaaa

SEQ ID NO: 3153249 - DNA, 25 bp, Homo sapien
catcaaggtctagtgaaagctttca

SEQ ID NO: 3153250 - DNA, 25 bp, Homo sapien
tcttcatcactagctcttcaaatcc

SEQ ID NO: 3153251 - DNA, 25 bp, Homo sapien
aatgtggctctgtcctactatggtg

SEQ ID NO: 3153252 - DNA, 25 bp, Homo sapien
tttccaatgtggctctgtcctacta

SEQ ID NO: 3153253 - DNA, 25 bp, Homo sapien
caatgtggctctgtcctactatggt

SEQ ID NO: 3153254 - DNA, 25 bp, Homo sapien
tccaatgtggctctgtcctactatg

SEQ ID NO: 3153255 - DNA, 25 bp, Homo sapien
ccagtgacctgaacacctgtgagtt

SEQ ID NO: 3153256 - DNA, 25 bp, Homo sapien
atgagactggacactaatggctgct

SEQ ID NO: 3153257 - DNA, 25 bp, Homo sapien
tttcgaatctttgtgcagcatcccc

SEQ ID NO: 3153258 - DNA, 25 bp, Homo sapien
gagtttgaaggctctttcaatcaca

SEQ ID NO: 3153259 - DNA, 25 bp, Homo sapien
cttttattgtagcagggtgattaca

SEQ ID NO: 3153260 - DNA, 25 bp, Homo sapien
tattgtagcagggtgattacacggc

SEQ ID NO: 3153261 - DNA, 25 bp, Homo sapien
tagcagggtgattacacggctgatc

SEQ ID NO: 3153262 - DNA, 25 bp, Homo sapien
cagggtgattacacggctgatctga

SEQ ID NO: 3153263 - DNA, 25 bp, Homo sapien
gcccttatggctcccttggtgccag

SEQ ID NO: 3153264 - DNA, 25 bp, Homo sapien
acataactcagtaggtaaatatctg

SEQ ID NO: 3153265 - DNA, 25 bp, Homo sapien
gtatacttcactattctttttatag

SEQ ID NO: 3153266 - DNA, 25 bp, Homo sapien
gaccctggcctcgagcatccctcag

SEQ ID NO: 3153267 - DNA, 25 bp, Homo sapien
gtaactcaggtgttgtttcttcagt

SEQ ID NO: 3153268 - DNA, 25 bp, Homo sapien
tgacagggttgaattgaggcatatg

SEQ ID NO: 3153269 - DNA, 25 bp, Homo sapien
aagtgtttgttccatgtaactcagg

SEQ ID NO: 3153270 - DNA, 25 bp, Homo sapien
ttcccagtttctttggacataagct

SEQ ID NO: 3153271 - DNA, 25 bp, Homo sapien
actggggacgtgctggtcgagtgca

SEQ ID NO: 3153272 - DNA, 25 bp, Homo sapien
caaactctacataggtctgaggtgt

SEQ ID NO: 3153273 - DNA, 25 bp, Homo sapien
actctacataggtctgaggtgtcac

SEQ ID NO: 3153274 - DNA, 25 bp, Homo sapien
gtgcaatgcaaactctacataggtc

SEQ ID NO: 3153275 - DNA, 25 bp, Homo sapien
ctgtgagcccttcccgactttcttc

SEQ ID NO: 3153276 - DNA, 25 bp, Homo sapien
tgtgagcccttcccgactttcttcc

SEQ ID NO: 3153277 - DNA, 25 bp, Homo sapien
tccgccgatacaaaggagctcttga

SEQ ID NO: 3153278 - DNA, 25 bp, Homo sapien
tctgaggaatatagctttggcaaat

SEQ ID NO: 3153279 - DNA, 25 bp, Homo sapien
cgatacaaaggagctcttgaagtaa

SEQ ID NO: 3153280 - DNA, 25 bp, Homo sapien
tcattctccgccgatacaaaggagc

SEQ ID NO: 3153281 - DNA, 25 bp, Homo sapien
tatctagtttgtgtgaatcatgagc

SEQ ID NO: 3153282 - DNA, 25 bp, Homo sapien
gcaattagttgccacatctcttaag

SEQ ID NO: 3153283 - DNA, 25 bp, Homo sapien
tagtttgtgtgaatcatgagctaaa

SEQ ID NO: 3153284 - DNA, 25 bp, Homo sapien
aatacaatctacacgttgcaattag

SEQ ID NO: 3153285 - DNA, 25 bp, Homo sapien
tgtcctgtgttttgagcatctgaag

SEQ ID NO: 3153286 - DNA, 25 bp, Homo sapien
caaaccaacagggtgagctttatgg

SEQ ID NO: 3153287 - DNA, 25 bp, Homo sapien
cagggtgagctttatggatttgcca

SEQ ID NO: 3153288 - DNA, 25 bp, Homo sapien
gatccctggatttgtcttgtcctgt

SEQ ID NO: 3153289 - DNA, 25 bp, Homo sapien
taaacatgctcctgtttaggtcccc

SEQ ID NO: 3153290 - DNA, 25 bp, Homo sapien
aaacatgctcctgtttaggtcccct

SEQ ID NO: 3153291 - DNA, 25 bp, Homo sapien
agccactcctgcggcaggttggtgc

SEQ ID NO: 3153292 - DNA, 25 bp, Homo sapien
ccagccactcctgcggcaggttggt

SEQ ID NO: 3153293 - DNA, 25 bp, Homo sapien
tcaggcttaatgatttttgataatt

SEQ ID NO: 3153294 - DNA, 25 bp, Homo sapien
ttcaggcttaatgatttttgataat

SEQ ID NO: 3153295 - DNA, 25 bp, Homo sapien
ttttcaggcttaatgatttttgata

SEQ ID NO: 3153296 - DNA, 25 bp, Homo sapien
cttttcaggcttaatgatttttgat

SEQ ID NO: 3153297 - DNA, 25 bp, Homo sapien
gaatgaccctcttggttgcaggcgg

SEQ ID NO: 3153298 - DNA, 25 bp, Homo sapien
caactggcttttgctctggtatgtg

SEQ ID NO: 3153299 - DNA, 25 bp, Homo sapien
tagacacacgatctcgaatgaccct

SEQ ID NO: 3153300 - DNA, 25 bp, Homo sapien
tctagtgcgttgacagtagacacac

SEQ ID NO: 3153301 - DNA, 25 bp, Homo sapien
tccacatttttcaacttccttaatg

SEQ ID NO: 3153302 - DNA, 25 bp, Homo sapien
tcttcatgttttccacatttttcaa

SEQ ID NO: 3153303 - DNA, 25 bp, Homo sapien
ttcatgttttccacatttttcaact

SEQ ID NO: 3153304 - DNA, 25 bp, Homo sapien
cacatttttcaacttccttaatgat

SEQ ID NO: 3153305 - DNA, 25 bp, Homo sapien
tgacttggcagagagttctttttgc

SEQ ID NO: 3153306 - DNA, 25 bp, Homo sapien
ggcagactgggtgtttggtctcctc

SEQ ID NO: 3153307 - DNA, 25 bp, Homo sapien
ttgctgtcagtcgtgctatctccag

SEQ ID NO: 3153308 - DNA, 25 bp, Homo sapien
cacaaaatgtgattctccatgggcc

SEQ ID NO: 3153309 - DNA, 25 bp, Homo sapien
atttgtctccgctagcctcacaggc

SEQ ID NO: 3153310 - DNA, 25 bp, Homo sapien
caatgtcatcaaacaaggtgggcag

SEQ ID NO: 3153311 - DNA, 25 bp, Homo sapien
tgtcatcaaacaaggtgggcagatt

SEQ ID NO: 3153312 - DNA, 25 bp, Homo sapien
aggtgggcagatttgtctccgctag

SEQ ID NO: 3153313 - DNA, 25 bp, Homo sapien
caaaaggcacagagttcccaggtgc

SEQ ID NO: 3153314 - DNA, 25 bp, Homo sapien
caactctcaaaaggcacagagttcc

SEQ ID NO: 3153315 - DNA, 25 bp, Homo sapien
tagtttctattggataaaaaggtga

SEQ ID NO: 3153316 - DNA, 25 bp, Homo sapien
gttgttttaagccttcaactctcaa

SEQ ID NO: 3153317 - DNA, 25 bp, Homo sapien
agtgggccttgattaaaaactgctc

SEQ ID NO: 3153318 - DNA, 25 bp, Homo sapien
gaagtgtcccagtgagcatgaaatc

SEQ ID NO: 3153319 - DNA, 25 bp, Homo sapien
tgctctgccgcttgccgatgagctt

SEQ ID NO: 3153320 - DNA, 25 bp, Homo sapien
gctgaatgtgtccaggaagtgtccc

SEQ ID NO: 3153321 - DNA, 25 bp, Homo sapien
agatgccgggcatcatcctttacag

SEQ ID NO: 3153322 - DNA, 25 bp, Homo sapien
cagtcagaacagatgtcaggagtca

SEQ ID NO: 3153323 - DNA, 25 bp, Homo sapien
ggtacagccccgatatagtctggat

SEQ ID NO: 3153324 - DNA, 25 bp, Homo sapien
tgctatgtgatacatgggttcccct

SEQ ID NO: 3153325 - DNA, 25 bp, Homo sapien
gaatgccagtaccacaacccataag

SEQ ID NO: 3153326 - DNA, 25 bp, Homo sapien
tacgaagggtagaacaaaaatcagc

SEQ ID NO: 3153327 - DNA, 25 bp, Homo sapien
gacatctagttaaacctggcctgaa

SEQ ID NO: 3153328 - DNA, 25 bp, Homo sapien
taatcccacattggcataggctctg

SEQ ID NO: 3153329 - DNA, 25 bp, Homo sapien
taactcctttgaccacgagaacatg

SEQ ID NO: 3153330 - DNA, 25 bp, Homo sapien
tagcccttaactgagctggcagctt

SEQ ID NO: 3153331 - DNA, 25 bp, Homo sapien
ggtgtcctgaaattccctggtgact

SEQ ID NO: 3153332 - DNA, 25 bp, Homo sapien
tcactatgctaatgcggactccaag

SEQ ID NO: 3153333 - DNA, 25 bp, Homo sapien
cacttgaaaatttgaagaggcacta

SEQ ID NO: 3153334 - DNA, 25 bp, Homo sapien
ccagatgatttggtgtttagtggat

SEQ ID NO: 3153335 - DNA, 25 bp, Homo sapien
tgccttcaagttggagtgttgtaaa

SEQ ID NO: 3153336 - DNA, 25 bp, Homo sapien
tggagtgttgtaaaccgatatccat

SEQ ID NO: 3153337 - DNA, 25 bp, Homo sapien
cactggtttcgagcagctttgggca

SEQ ID NO: 3153338 - DNA, 25 bp, Homo sapien
aactctgttgcttcatccatggcca

SEQ ID NO: 3153339 - DNA, 25 bp, Homo sapien
ggatgaacccaagctttggcagggc

SEQ ID NO: 3153340 - DNA, 25 bp, Homo sapien
gcagtttgtggtgcagacaagccat

SEQ ID NO: 3153341 - DNA, 25 bp, Homo sapien
tcttctgccagaaatagtgggtgga

SEQ ID NO: 3153342 - DNA, 25 bp, Homo sapien
ttcaggtcttctttagcaggtctct

SEQ ID NO: 3153343 - DNA, 25 bp, Homo sapien
caggtcttctttagcaggtctcttt

SEQ ID NO: 3153344 - DNA, 25 bp, Homo sapien
ctgccagaaatagtgggtggaaaag

SEQ ID NO: 3153345 - DNA, 25 bp, Homo sapien
aagaaatgccaacaattggaaatgg

SEQ ID NO: 3153346 - DNA, 25 bp, Homo sapien
caaagaaatgccaacaattggaaat

SEQ ID NO: 3153347 - DNA, 25 bp, Homo sapien
ctacaaagaaatgccaacaattgga

SEQ ID NO: 3153348 - DNA, 25 bp, Homo sapien
agaaatgccaacaattggaaatggg

SEQ ID NO: 3153349 - DNA, 25 bp, Homo sapien
tctctatcattgtctccttgtgggc

SEQ ID NO: 3153350 - DNA, 25 bp, Homo sapien
tctgtaagcatctcggcctgttcca

SEQ ID NO: 3153351 - DNA, 25 bp, Homo sapien
catgctctgttaggcagtgcttcct

SEQ ID NO: 3153352 - DNA, 25 bp, Homo sapien
tgttccacagctaaggatgctctcc

SEQ ID NO: 3153353 - DNA, 25 bp, Homo sapien
agcactaaggccatagactcacttt
